United States Patent Application Publication US 2005/0244851 A1 - sequence listing, part 18

SEQ ID NO: 678892 - DNA, 25 bp, Homo sapien
tgtgctcggaccgttgtggatgctt

SEQ ID NO: 678893 - DNA, 25 bp, Homo sapien
tcctcacagagggatgcatttttct

SEQ ID NO: 678894 - DNA, 25 bp, Homo sapien
cacagagggatgcatttttctgctg

SEQ ID NO: 678895 - DNA, 25 bp, Homo sapien
ggaagaatccagagaattcccctca

SEQ ID NO: 678896 - DNA, 25 bp, Homo sapien
aggaagaatccagagaattcccctc

SEQ ID NO: 678897 - DNA, 25 bp, Homo sapien
gaagaatccagagaattcccctcaa

SEQ ID NO: 678898 - DNA, 25 bp, Homo sapien
gcggaccacccgctttgatccttga

SEQ ID NO: 678899 - DNA, 25 bp, Homo sapien
cacttctcgacaggggccttgcgga

SEQ ID NO: 678900 - DNA, 25 bp, Homo sapien
ttgatcgggagcatttaggacctca

SEQ ID NO: 678901 - DNA, 25 bp, Homo sapien
ccgctttgatccttgatcgggagca

SEQ ID NO: 678902 - DNA, 25 bp, Homo sapien
gaaggccatggcatatgcgatctct

SEQ ID NO: 678903 - DNA, 25 bp, Homo sapien
gggctttggcggagctccctctgta

SEQ ID NO: 678904 - DNA, 25 bp, Homo sapien
catatgcgatctctcaggctgtgcc

SEQ ID NO: 678905 - DNA, 25 bp, Homo sapien
gtatctgcaagcccgctgacccatt

SEQ ID NO: 678906 - DNA, 25 bp, Homo sapien
ttttccagagcactggtctagccca

SEQ ID NO: 678907 - DNA, 25 bp, Homo sapien
tccaaacatgcaaatcacggatcct

SEQ ID NO: 678908 - DNA, 25 bp, Homo sapien
tgcttctcttaaggccctgttccaa

SEQ ID NO: 678909 - DNA, 25 bp, Homo sapien
gtctagcccatgattttccccaaag

SEQ ID NO: 678910 - DNA, 25 bp, Homo sapien
tcttgcatggtccacgtgccgttga

SEQ ID NO: 678911 - DNA, 25 bp, Homo sapien
catggtccacgtgccgttgaggttt

SEQ ID NO: 678912 - DNA, 25 bp, Homo sapien
gtccacgtgccgttgaggtttggct

SEQ ID NO: 678913 - DNA, 25 bp, Homo sapien
aaagggagctcttgcatggtccacg

SEQ ID NO: 678914 - DNA, 25 bp, Homo sapien
tagccaggcctgaaatccatcagat

SEQ ID NO: 678915 - DNA, 25 bp, Homo sapien
accccagtcggttcatcaaaatgca

SEQ ID NO: 678916 - DNA, 25 bp, Homo sapien
gatttaagcccttggatctagccag

SEQ ID NO: 678917 - DNA, 25 bp, Homo sapien
gccagaaaggccgagtcctgatgaa

SEQ ID NO: 678918 - DNA, 25 bp, Homo sapien
cccttctcccctcatagctaaacct

SEQ ID NO: 678919 - DNA, 25 bp, Homo sapien
tcccctcatagctaaaccttgaact

SEQ ID NO: 678920 - DNA, 25 bp, Homo sapien
tctcccctcatagctaaaccttgaa

SEQ ID NO: 678921 - DNA, 25 bp, Homo sapien
cttctcccctcatagctaaaccttg

SEQ ID NO: 678922 - DNA, 25 bp, Homo sapien
caatgaggccaccatatggaggaca

SEQ ID NO: 678923 - DNA, 25 bp, Homo sapien
cgactggagtgaacaatgaggccac

SEQ ID NO: 678924 - DNA, 25 bp, Homo sapien
gaacaatgaggccaccatatggagg

SEQ ID NO: 678925 - DNA, 25 bp, Homo sapien
tgaggccaccatatggaggacagca

SEQ ID NO: 678926 - DNA, 25 bp, Homo sapien
tagagcaacattcgggagctccgat

SEQ ID NO: 678927 - DNA, 25 bp, Homo sapien
gaaacagccagatatgtgagcaatg

SEQ ID NO: 678928 - DNA, 25 bp, Homo sapien
aaaatttggattggcgggcagccag

SEQ ID NO: 678929 - DNA, 25 bp, Homo sapien
gccagctctacacctacagagttgt

SEQ ID NO: 678930 - DNA, 25 bp, Homo sapien
tcctccacgtatttgcagaactgaa

SEQ ID NO: 678931 - DNA, 25 bp, Homo sapien
cagaactgaactgctcgggacggtt

SEQ ID NO: 678932 - DNA, 25 bp, Homo sapien
tggctgggtctctccaccagattga

SEQ ID NO: 678933 - DNA, 25 bp, Homo sapien
agccacgtgcagaagagaactcaag

SEQ ID NO: 678934 - DNA, 25 bp, Homo sapien
gcccagcatgcttgtccacttcagc

SEQ ID NO: 678935 - DNA, 25 bp, Homo sapien
tccacttcagcagccagactctgat

SEQ ID NO: 678936 - DNA, 25 bp, Homo sapien
ccacttcagcagccagactctgatc

SEQ ID NO: 678937 - DNA, 25 bp, Homo sapien
cagcatgcttgtccacttcagcagc

SEQ ID NO: 678938 - DNA, 25 bp, Homo sapien
caagagctccaaaagctggggctgt

SEQ ID NO: 678939 - DNA, 25 bp, Homo sapien
gggctgtggagcactctcactgctt

SEQ ID NO: 678940 - DNA, 25 bp, Homo sapien
tgcagcccagcccaagagctccaaa

SEQ ID NO: 678941 - DNA, 25 bp, Homo sapien
gtggagcactctcactgcttggcat

SEQ ID NO: 678942 - DNA, 25 bp, Homo sapien
tgttgcgggcgaatgagctggacga

SEQ ID NO: 678943 - DNA, 25 bp, Homo sapien
cgcaacattggaggacgatggagct

SEQ ID NO: 678944 - DNA, 25 bp, Homo sapien
acttgcggctctcttcgcaggcttt

SEQ ID NO: 678945 - DNA, 25 bp, Homo sapien
cagggcgcgcagacttgcggctctc

SEQ ID NO: 678946 - DNA, 25 bp, Homo sapien
cgggaggtagggtcaatcgcagatt

SEQ ID NO: 678947 - DNA, 25 bp, Homo sapien
caaagatgaagtggggataggaaat

SEQ ID NO: 678948 - DNA, 25 bp, Homo sapien
gatgggggacatttgtacagatccc

SEQ ID NO: 678949 - DNA, 25 bp, Homo sapien
tgctcagtgctacggagaaaacaaa

SEQ ID NO: 678950 - DNA, 25 bp, Homo sapien
caacgggcccgttcacccattatgt

SEQ ID NO: 678951 - DNA, 25 bp, Homo sapien
tcagacatgtgcgttcgcagcccct

SEQ ID NO: 678952 - DNA, 25 bp, Homo sapien
cacataacaattagccagacctggg

SEQ ID NO: 678953 - DNA, 25 bp, Homo sapien
gagtggccgtccctttacatggtac

SEQ ID NO: 678954 - DNA, 25 bp, Homo sapien
acactccaccacatacgtacacacg

SEQ ID NO: 678955 - DNA, 25 bp, Homo sapien
cacgtacactccaccacatacgtac

SEQ ID NO: 678956 - DNA, 25 bp, Homo sapien
gtacactccaccacatacgtacaca

SEQ ID NO: 678957 - DNA, 25 bp, Homo sapien
tccaccacatacgtacacacgcaga

SEQ ID NO: 678958 - DNA, 25 bp, Homo sapien
ttggtggcacataagacttccaggg

SEQ ID NO: 678959 - DNA, 25 bp, Homo sapien
ggggggcctgaatttgcacccttca

SEQ ID NO: 678960 - DNA, 25 bp, Homo sapien
ccaggggggcctgaatttgcaccct

SEQ ID NO: 678961 - DNA, 25 bp, Homo sapien
catattggtggcacataagacttcc

SEQ ID NO: 678962 - DNA, 25 bp, Homo sapien
ttgttttaatcagatcttgcagata

SEQ ID NO: 678963 - DNA, 25 bp, Homo sapien
tcagatcttgcagataatgttttcc

SEQ ID NO: 678964 - DNA, 25 bp, Homo sapien
taatcagatcttgcagataatgttt

SEQ ID NO: 678965 - DNA, 25 bp, Homo sapien
tttaatcagatcttgcagataatgt

SEQ ID NO: 678966 - DNA, 25 bp, Homo sapien
cttagctctcaacttatccttacag

SEQ ID NO: 678967 - DNA, 25 bp, Homo sapien
tctcaacttatccttacagtcttgg

SEQ ID NO: 678968 - DNA, 25 bp, Homo sapien
tatccttacagtcttggttaagacc

SEQ ID NO: 678969 - DNA, 25 bp, Homo sapien
caacttatccttacagtcttggtta

SEQ ID NO: 678970 - DNA, 25 bp, Homo sapien
tggactgaaaaatcgtactgtgaat

SEQ ID NO: 678971 - DNA, 25 bp, Homo sapien
gaatttcattaatgaacattggact

SEQ ID NO: 678972 - DNA, 25 bp, Homo sapien
tctgctggctgtagttgtagaagct

SEQ ID NO: 678973 - DNA, 25 bp, Homo sapien
tcgaagagggggaattgaatttcat

SEQ ID NO: 678974 - DNA, 25 bp, Homo sapien
gcaggggtgctatttggaagaccat

SEQ ID NO: 678975 - DNA, 25 bp, Homo sapien
agaggtcccagtaggtgactgccat

SEQ ID NO: 678976 - DNA, 25 bp, Homo sapien
atgttgagaggtcccagtaggtgac

SEQ ID NO: 678977 - DNA, 25 bp, Homo sapien
cagatgttgagaggtcccagtaggt

SEQ ID NO: 678978 - DNA, 25 bp, Homo sapien
gagaaacagatgttgagaggtccca

SEQ ID NO: 678979 - DNA, 25 bp, Homo sapien
cctgtctcccgccgagaacctgctc

SEQ ID NO: 678980 - DNA, 25 bp, Homo sapien
tcctgtctcccgccgagaacctgct

SEQ ID NO: 678981 - DNA, 25 bp, Homo sapien
ttcctgtctcccgccgagaacctgc

SEQ ID NO: 678982 - DNA, 25 bp, Homo sapien
tcttctttgctaataaaaatgggat

SEQ ID NO: 678983 - DNA, 25 bp, Homo sapien
ctcttctttgctaataaaaatggga

SEQ ID NO: 678984 - DNA, 25 bp, Homo sapien
tcaggataaaccaacctggaggtcc

SEQ ID NO: 678985 - DNA, 25 bp, Homo sapien
caaggatggaggtatcattttaccc

SEQ ID NO: 678986 - DNA, 25 bp, Homo sapien
tttacccgagtatggataatctggg

SEQ ID NO: 678987 - DNA, 25 bp, Homo sapien
cagggcgttagctgagtgagacttc

SEQ ID NO: 678988 - DNA, 25 bp, Homo sapien
aggtgtgcaaactccaggccgtcta

SEQ ID NO: 678989 - DNA, 25 bp, Homo sapien
ggagatcggtgcttcaaggttaaca

SEQ ID NO: 678990 - DNA, 25 bp, Homo sapien
gagcaagatgaaaacctccaggatg

SEQ ID NO: 678991 - DNA, 25 bp, Homo sapien
ggccgtctaccctgcactgtgatgg

SEQ ID NO: 678992 - DNA, 25 bp, Homo sapien
tgttttcatcaagtgggtactgttg

SEQ ID NO: 678993 - DNA, 25 bp, Homo sapien
gggtactgttgataattccaataac

SEQ ID NO: 678994 - DNA, 25 bp, Homo sapien
tctgcagattcaaccgaggatcaaa

SEQ ID NO: 678995 - DNA, 25 bp, Homo sapien
ttgaaagatcatcacgcgtcacttt

SEQ ID NO: 678996 - DNA, 25 bp, Homo sapien
gagtttaccaccacgatgtttcctg

SEQ ID NO: 678997 - DNA, 25 bp, Homo sapien
tatgctgatcctggcgaccatgacc

SEQ ID NO: 678998 - DNA, 25 bp, Homo sapien
caaggagaaggtgcaagcttcgcct

SEQ ID NO: 678999 - DNA, 25 bp, Homo sapien
tgggtctgtgctcactatgctgatc

SEQ ID NO: 679000 - DNA, 25 bp, Homo sapien
cttcagcaggggcttctggctggct

SEQ ID NO: 679001 - DNA, 25 bp, Homo sapien
cttctggctggctgatggaggcatg

SEQ ID NO: 679002 - DNA, 25 bp, Homo sapien
cagtccaccttcagcaggggcttct

SEQ ID NO: 679003 - DNA, 25 bp, Homo sapien
ttctggctggctgatggaggcatgt

SEQ ID NO: 679004 - DNA, 25 bp, Homo sapien
gtttttgatctgtttgacaaataga

SEQ ID NO: 679005 - DNA, 25 bp, Homo sapien
tgtttttgatctgtttgacaaatag

SEQ ID NO: 679006 - DNA, 25 bp, Homo sapien
tagaggaatcatcattaaccttcac

SEQ ID NO: 679007 - DNA, 25 bp, Homo sapien
gagcataaagcgagattggatggct

SEQ ID NO: 679008 - DNA, 25 bp, Homo sapien
tggcttccatttaggatggcagaaa

SEQ ID NO: 679009 - DNA, 25 bp, Homo sapien
cataagccgataatgggtatgtggg

SEQ ID NO: 679010 - DNA, 25 bp, Homo sapien
cacaagcttagagctagggcagcca

SEQ ID NO: 679011 - DNA, 25 bp, Homo sapien
tgccacaagcttagagctagggcag

SEQ ID NO: 679012 - DNA, 25 bp, Homo sapien
ccacaagcttagagctagggcagcc

SEQ ID NO: 679013 - DNA, 25 bp, Homo sapien
acaagcttagagctagggcagccat

SEQ ID NO: 679014 - DNA, 25 bp, Homo sapien
ttccattgctgagggcagagaacct

SEQ ID NO: 679015 - DNA, 25 bp, Homo sapien
cttccattgctgagggcagagaacc

SEQ ID NO: 679016 - DNA, 25 bp, Homo sapien
tgggcatcgggctctgcaccttcac

SEQ ID NO: 679017 - DNA, 25 bp, Homo sapien
ctgggcatcgggctctgcaccttca

SEQ ID NO: 679018 - DNA, 25 bp, Homo sapien
ctgcaccttcacccacatccgccct

SEQ ID NO: 679019 - DNA, 25 bp, Homo sapien
cttcacccacatccgccctgtagcc

SEQ ID NO: 679020 - DNA, 25 bp, Homo sapien
gtagaattctcagtattccattctc

SEQ ID NO: 679021 - DNA, 25 bp, Homo sapien
aattctcagtattccattctctgag

SEQ ID NO: 679022 - DNA, 25 bp, Homo sapien
agaattctcagtattccattctctg

SEQ ID NO: 679023 - DNA, 25 bp, Homo sapien
tgtagaattctcagtattccattct

SEQ ID NO: 679024 - DNA, 25 bp, Homo sapien
cagcgactcctgtgaaattagcagt

SEQ ID NO: 679025 - DNA, 25 bp, Homo sapien
tcggtatttccatcgggtctacacc

SEQ ID NO: 679026 - DNA, 25 bp, Homo sapien
tggtgaaagtcaccctcgaaggcag

SEQ ID NO: 679027 - DNA, 25 bp, Homo sapien
gcagtgacttcacgcgttgagggca

SEQ ID NO: 679028 - DNA, 25 bp, Homo sapien
gacacgagggcaatgatgtcacagc

SEQ ID NO: 679029 - DNA, 25 bp, Homo sapien
tggccgacgttgaccaggactggcc

SEQ ID NO: 679030 - DNA, 25 bp, Homo sapien
cacggccgtggccttggagacaggg

SEQ ID NO: 679031 - DNA, 25 bp, Homo sapien
tctgtgcactgatggaagctggctt

SEQ ID NO: 679032 - DNA, 25 bp, Homo sapien
gggccctggtccctgtagttgccat

SEQ ID NO: 679033 - DNA, 25 bp, Homo sapien
ccaggccagggccctggtccctgta

SEQ ID NO: 679034 - DNA, 25 bp, Homo sapien
gccagggccctggtccctgtagttg

SEQ ID NO: 679035 - DNA, 25 bp, Homo sapien
cagggccctggtccctgtagttgcc

SEQ ID NO: 679036 - DNA, 25 bp, Homo sapien
gaaaatggcttgctacaatccagtc

SEQ ID NO: 679037 - DNA, 25 bp, Homo sapien
aatccagtcatgtttagccccttgg

SEQ ID NO: 679038 - DNA, 25 bp, Homo sapien
gccacacacaacatgagatgcttct

SEQ ID NO: 679039 - DNA, 25 bp, Homo sapien
tgcaagcatttccatctcggaagac

SEQ ID NO: 679040 - DNA, 25 bp, Homo sapien
ctgtgtctctcagactctggtgagt

SEQ ID NO: 679041 - DNA, 25 bp, Homo sapien
tgctgtgtctctcagactctggtga

SEQ ID NO: 679042 - DNA, 25 bp, Homo sapien
gaggccttgttaaaactccgatggc

SEQ ID NO: 679043 - DNA, 25 bp, Homo sapien
tgagcaaccccacatcgctgtgtga

SEQ ID NO: 679044 - DNA, 25 bp, Homo sapien
tcggctgtgacctgaccttcgaggg

SEQ ID NO: 679045 - DNA, 25 bp, Homo sapien
atcgctgtgacctgtgctgcggacc

SEQ ID NO: 679046 - DNA, 25 bp, Homo sapien
tcattcgcacaaaaggcctcattgt

SEQ ID NO: 679047 - DNA, 25 bp, Homo sapien
cttagccaaatcaattatctcctcc

SEQ ID NO: 679048 - DNA, 25 bp, Homo sapien
tgttatcacttagccaaatcaatta

SEQ ID NO: 679049 - DNA, 25 bp, Homo sapien
gggcacatgttatcacttagccaaa

SEQ ID NO: 679050 - DNA, 25 bp, Homo sapien
taaatggggcacatgttatcactta

SEQ ID NO: 679051 - DNA, 25 bp, Homo sapien
cgtgggtgaccactccgcggattat

SEQ ID NO: 679052 - DNA, 25 bp, Homo sapien
cccaagtccagagagcgagaggttg

SEQ ID NO: 679053 - DNA, 25 bp, Homo sapien
tccccttgaggcgatttacaaccca

SEQ ID NO: 679054 - DNA, 25 bp, Homo sapien
tatcccacctcagtcgtaagctcgt

SEQ ID NO: 679055 - DNA, 25 bp, Homo sapien
catgtagccaggtatgaacagggca

SEQ ID NO: 679056 - DNA, 25 bp, Homo sapien
gatgtgactgtatgcagcgctgagc

SEQ ID NO: 679057 - DNA, 25 bp, Homo sapien
tgaatattgcaaaaggtagcccggg

SEQ ID NO: 679058 - DNA, 25 bp, Homo sapien
gaacagggcatttcgcatgggcatg

SEQ ID NO: 679059 - DNA, 25 bp, Homo sapien
tccatggagcggtcaaccccggctg

SEQ ID NO: 679060 - DNA, 25 bp, Homo sapien
gctcagatctgcagccatgacttgg

SEQ ID NO: 679061 - DNA, 25 bp, Homo sapien
tggtgcaacccctcacaggagggtg

SEQ ID NO: 679062 - DNA, 25 bp, Homo sapien
cagccgtggtatgaatggctgcagc

SEQ ID NO: 679063 - DNA, 25 bp, Homo sapien
tattcaggcgatgcaggaattcctc

SEQ ID NO: 679064 - DNA, 25 bp, Homo sapien
ttatcccgtgggtgctctgagccat

SEQ ID NO: 679065 - DNA, 25 bp, Homo sapien
gagccatgcgttgcactaagccctg

SEQ ID NO: 679066 - DNA, 25 bp, Homo sapien
taagccctgtgtggtgagcaaaatg

SEQ ID NO: 679067 - DNA, 25 bp, Homo sapien
ggaggctgcgttcaatataaatgca

SEQ ID NO: 679068 - DNA, 25 bp, Homo sapien
taacgacagcagcttgcaagtgggc

SEQ ID NO: 679069 - DNA, 25 bp, Homo sapien
tgtgctgtgcatgaataacgacagc

SEQ ID NO: 679070 - DNA, 25 bp, Homo sapien
tataaatgcaaaacgctccagacat

SEQ ID NO: 679071 - DNA, 25 bp, Homo sapien
tacaggtgccgcatcgagatctggc

SEQ ID NO: 679072 - DNA, 25 bp, Homo sapien
gagatctggccacttctaccatgag

SEQ ID NO: 679073 - DNA, 25 bp, Homo sapien
ttcctacatgagacacagtgagccg

SEQ ID NO: 679074 - DNA, 25 bp, Homo sapien
catctatctttgaggtgaccgaggg

SEQ ID NO: 679075 - DNA, 25 bp, Homo sapien
ccttgatcagatggctgaagtcgcg

SEQ ID NO: 679076 - DNA, 25 bp, Homo sapien
ttgatcagatggctgaagtcgcgca

SEQ ID NO: 679077 - DNA, 25 bp, Homo sapien
tccttgatcagatggctgaagtcgc

SEQ ID NO: 679078 - DNA, 25 bp, Homo sapien
ccatccttgatcagatggctgaagt

SEQ ID NO: 679079 - DNA, 25 bp, Homo sapien
tcgtctcttggcagacgctgtccca

SEQ ID NO: 679080 - DNA, 25 bp, Homo sapien
ctggctcgtctcttggcagacgctg

SEQ ID NO: 679081 - DNA, 25 bp, Homo sapien
ttggcagacgctgtcccacgcatct

SEQ ID NO: 679082 - DNA, 25 bp, Homo sapien
gtcccacgcatctctgtcatttgca

SEQ ID NO: 679083 - DNA, 25 bp, Homo sapien
ctcgaactaaaacaacaatgctcct

SEQ ID NO: 679084 - DNA, 25 bp, Homo sapien
tgaccctcgaactaaaacaacaatg

SEQ ID NO: 679085 - DNA, 25 bp, Homo sapien
ctgaaactagaacaagacctctcct

SEQ ID NO: 679086 - DNA, 25 bp, Homo sapien
ggtctgcagctccacgaccctgaaa

SEQ ID NO: 679087 - DNA, 25 bp, Homo sapien
gtcggcagctccacgaccctcaaac

SEQ ID NO: 679088 - DNA, 25 bp, Homo sapien
ctccacgaccctcaaactagaacaa

SEQ ID NO: 679089 - DNA, 25 bp, Homo sapien
tcggcagctccacgaccctcaaact

SEQ ID NO: 679090 - DNA, 25 bp, Homo sapien
cacgaccctcaaactagaacaagac

SEQ ID NO: 679091 - DNA, 25 bp, Homo sapien
cggaccctcgaactacagcaacatt

SEQ ID NO: 679092 - DNA, 25 bp, Homo sapien
tctgcagctccacgaaaatcaaact

SEQ ID NO: 679093 - DNA, 25 bp, Homo sapien
ggtctgcagctccacgaaaatcaaa

SEQ ID NO: 679094 - DNA, 25 bp, Homo sapien
ggaccctcgaactacagcaacattg

SEQ ID NO: 679095 - DNA, 25 bp, Homo sapien
aatgactctcacacttcaatggcag

SEQ ID NO: 679096 - DNA, 25 bp, Homo sapien
gggtcttctgtttcacgatccttaa

SEQ ID NO: 679097 - DNA, 25 bp, Homo sapien
agctagaatagcagcaccggctcct

SEQ ID NO: 679098 - DNA, 25 bp, Homo sapien
cgatccttaaattagaacagcagca

SEQ ID NO: 679099 - DNA, 25 bp, Homo sapien
gattccagccagtcgtattgtacca

SEQ ID NO: 679100 - DNA, 25 bp, Homo sapien
tagcatccaatctaggaccacactg

SEQ ID NO: 679101 - DNA, 25 bp, Homo sapien
ttgtaccagaaagccaagaagtgct

SEQ ID NO: 679102 - DNA, 25 bp, Homo sapien
gaaacagaagctatagtcagaggac

SEQ ID NO: 679103 - DNA, 25 bp, Homo sapien
aaatctgttgttagaggtatactca

SEQ ID NO: 679104 - DNA, 25 bp, Homo sapien
gtggactcttggtcgtcctatcaag

SEQ ID NO: 679105 - DNA, 25 bp, Homo sapien
gacatcggacgaaatagggaccact

SEQ ID NO: 679106 - DNA, 25 bp, Homo sapien
gaggtatactcaggaacgatttgtg

SEQ ID NO: 679107 - DNA, 25 bp, Homo sapien
ggattcgtgactgcaacatcaaaag

SEQ ID NO: 679108 - DNA, 25 bp, Homo sapien
gattcgtgactgcaacatcaaaagg

SEQ ID NO: 679109 - DNA, 25 bp, Homo sapien
ctctgccatcaggattcgtgactgc

SEQ ID NO: 679110 - DNA, 25 bp, Homo sapien
ttcgtgactgcaacatcaaaaggcg

SEQ ID NO: 679111 - DNA, 25 bp, Homo sapien
ctggtgtaaagggagcttttatcag

SEQ ID NO: 679112 - DNA, 25 bp, Homo sapien
ggagcttttatcagtagtctgagcc

SEQ ID NO: 679113 - DNA, 25 bp, Homo sapien
cttttatcagtagtctgagcccctc

SEQ ID NO: 679114 - DNA, 25 bp, Homo sapien
gtaaagggagcttttatcagtagtc

SEQ ID NO: 679115 - DNA, 25 bp, Homo sapien
agacagtagcaacaggcttcagagt

SEQ ID NO: 679116 - DNA, 25 bp, Homo sapien
tgcagacagtagcaacaggcttcag

SEQ ID NO: 679117 - DNA, 25 bp, Homo sapien
gcaacaggcttcagagtcagcccag

SEQ ID NO: 679118 - DNA, 25 bp, Homo sapien
ctgcagacagtagcaacaggcttca

SEQ ID NO: 679119 - DNA, 25 bp, Homo sapien
tatttgagttggagagagcccaacc

SEQ ID NO: 679120 - DNA, 25 bp, Homo sapien
cctggacatcagctaaaggtctggg

SEQ ID NO: 679121 - DNA, 25 bp, Homo sapien
cacagctgaatgcatgaacctggac

SEQ ID NO: 679122 - DNA, 25 bp, Homo sapien
aggaatagccaccatcacggaggtg

SEQ ID NO: 679123 - DNA, 25 bp, Homo sapien
ctctttcaccaccgaaccttccagg

SEQ ID NO: 679124 - DNA, 25 bp, Homo sapien
tctttcaccaccgaaccttccagga

SEQ ID NO: 679125 - DNA, 25 bp, Homo sapien
cctctttcaccaccgaaccttccag

SEQ ID NO: 679126 - DNA, 25 bp, Homo sapien
tcaccaccgaaccttccaggaccga

SEQ ID NO: 679127 - DNA, 25 bp, Homo sapien
taagcaatgaagggagcaatatcca

SEQ ID NO: 679128 - DNA, 25 bp, Homo sapien
caatgaagggagcaatatccacaaa

SEQ ID NO: 679129 - DNA, 25 bp, Homo sapien
aatatccacaaaggccccacacctt

SEQ ID NO: 679130 - DNA, 25 bp, Homo sapien
ccagaggggaaaggcgtaagcaatg

SEQ ID NO: 679131 - DNA, 25 bp, Homo sapien
tggtcaaaataccttcctggagccc

SEQ ID NO: 679132 - DNA, 25 bp, Homo sapien
ggagcccatgcagatagcctccaaa

SEQ ID NO: 679133 - DNA, 25 bp, Homo sapien
aaggctgctgcacaatccggtcacc

SEQ ID NO: 679134 - DNA, 25 bp, Homo sapien
cacaatccggtcaccttggtcaaaa

SEQ ID NO: 679135 - DNA, 25 bp, Homo sapien
catttgcacatttcatggtcacacc

SEQ ID NO: 679136 - DNA, 25 bp, Homo sapien
tgcacatttcatggtcacaccaatg

SEQ ID NO: 679137 - DNA, 25 bp, Homo sapien
catttcatggtcacaccaatgggct

SEQ ID NO: 679138 - DNA, 25 bp, Homo sapien
tttcatggtcacaccaatgggctcc

SEQ ID NO: 679139 - DNA, 25 bp, Homo sapien
ctgaccccagggcctttgcacttgc

SEQ ID NO: 679140 - DNA, 25 bp, Homo sapien
gaccccagggcctttgcacttgctg

SEQ ID NO: 679141 - DNA, 25 bp, Homo sapien
cccagggcctttgcacttgctgtac

SEQ ID NO: 679142 - DNA, 25 bp, Homo sapien
ccccagggcctttgcacttgctgta

SEQ ID NO: 679143 - DNA, 25 bp, Homo sapien
ccagagaaacctgcagagggatcat

SEQ ID NO: 679144 - DNA, 25 bp, Homo sapien
cccagagaaacctgcagagggatca

SEQ ID NO: 679145 - DNA, 25 bp, Homo sapien
ccccagagaaacctgcagagggatc

SEQ ID NO: 679146 - DNA, 25 bp, Homo sapien
cagagaagacaagttctcatcacca

SEQ ID NO: 679147 - DNA, 25 bp, Homo sapien
cccagagaagacaagttctcatcac

SEQ ID NO: 679148 - DNA, 25 bp, Homo sapien
gagaagacaagttctcatcaccaac

SEQ ID NO: 679149 - DNA, 25 bp, Homo sapien
ttgaagacaggttctcatcaccaac

SEQ ID NO: 679150 - DNA, 25 bp, Homo sapien
gttatgggttgtggagacgcacacc

SEQ ID NO: 679151 - DNA, 25 bp, Homo sapien
caccatcgtcaccattgtgattgtt

SEQ ID NO: 679152 - DNA, 25 bp, Homo sapien
aaccattcgtgtggccattatcacc

SEQ ID NO: 679153 - DNA, 25 bp, Homo sapien
tgggcactgatcagaagcgtgttta

SEQ ID NO: 679154 - DNA, 25 bp, Homo sapien
tggtaccaggtgacagcagggacca

SEQ ID NO: 679155 - DNA, 25 bp, Homo sapien
accaggtgacagcagggaccaacat

SEQ ID NO: 679156 - DNA, 25 bp, Homo sapien
gtaccaggtgacagcagggaccaac

SEQ ID NO: 679157 - DNA, 25 bp, Homo sapien
ctggtaccaggtgacagcagggacc

SEQ ID NO: 679158 - DNA, 25 bp, Homo sapien
taaaccagtgcacaatgcgctggcc

SEQ ID NO: 679159 - DNA, 25 bp, Homo sapien
ttccctgaaggcataccgaagctgg

SEQ ID NO: 679160 - DNA, 25 bp, Homo sapien
ccagatgccgggagggcttcaagct

SEQ ID NO: 679161 - DNA, 25 bp, Homo sapien
ccctcgtgtatgctgcggcaagaga

SEQ ID NO: 679162 - DNA, 25 bp, Homo sapien
cagcaggcagggtggcttcctgtgc

SEQ ID NO: 679163 - DNA, 25 bp, Homo sapien
tcctccccagcaggcagggtggctt

SEQ ID NO: 679164 - DNA, 25 bp, Homo sapien
caggcagggtggcttcctgtgctct

SEQ ID NO: 679165 - DNA, 25 bp, Homo sapien
ggcttcctgtgctctggctggtgat

SEQ ID NO: 679166 - DNA, 25 bp, Homo sapien
atcacagaagccaccgcccggtgtt

SEQ ID NO: 679167 - DNA, 25 bp, Homo sapien
accggccaaccgctggagaatggag

SEQ ID NO: 679168 - DNA, 25 bp, Homo sapien
ggaaggaatcacagtcgatacctca

SEQ ID NO: 679169 - DNA, 25 bp, Homo sapien
caaagagagcgagttctaacaccgg

SEQ ID NO: 679170 - DNA, 25 bp, Homo sapien
tagggtgaacctggaagctaagatg

SEQ ID NO: 679171 - DNA, 25 bp, Homo sapien
taacaggcgtgatggaggccccgtc

SEQ ID NO: 679172 - DNA, 25 bp, Homo sapien
aatactaccttctgttggtcccctg

SEQ ID NO: 679173 - DNA, 25 bp, Homo sapien
tccaccaagcaggttagtacagggt

SEQ ID NO: 679174 - DNA, 25 bp, Homo sapien
tggcctccatgacgttcccttgggt

SEQ ID NO: 679175 - DNA, 25 bp, Homo sapien
aaagtgcaggcggagccatcccgag

SEQ ID NO: 679176 - DNA, 25 bp, Homo sapien
ctcgtcatcacagcgagggtggcca

SEQ ID NO: 679177 - DNA, 25 bp, Homo sapien
cagcttctggcaggcgtgtgaagaa

SEQ ID NO: 679178 - DNA, 25 bp, Homo sapien
tgcctgctgtgtcctcccaaatccc

SEQ ID NO: 679179 - DNA, 25 bp, Homo sapien
tccagaggccgcggcccagcgtggg

SEQ ID NO: 679180 - DNA, 25 bp, Homo sapien
tgtgtcctcccaaatcccagctcca

SEQ ID NO: 679181 - DNA, 25 bp, Homo sapien
ctggagaaggccagcgctgcctgct

SEQ ID NO: 679182 - DNA, 25 bp, Homo sapien
catccaccggcggctggcagaggcg

SEQ ID NO: 679183 - DNA, 25 bp, Homo sapien
tccaccggcggctggcagaggcggt

SEQ ID NO: 679184 - DNA, 25 bp, Homo sapien
accggcggctggcagaggcggtaga

SEQ ID NO: 679185 - DNA, 25 bp, Homo sapien
cggcggctggcagaggcggtagagg

SEQ ID NO: 679186 - DNA, 25 bp, Homo sapien
ctcatcttcccggtgggagcaggag

SEQ ID NO: 679187 - DNA, 25 bp, Homo sapien
gggctcatcttcccggtgggagcag

SEQ ID NO: 679188 - DNA, 25 bp, Homo sapien
ctgggggctcatcttcccggtggga

SEQ ID NO: 679189 - DNA, 25 bp, Homo sapien
catcttcccggtgggagcaggagct

SEQ ID NO: 679190 - DNA, 25 bp, Homo sapien
gggcatctggtccttgactcgcagg

SEQ ID NO: 679191 - DNA, 25 bp, Homo sapien
tggtccttgactcgcaggtttttgg

SEQ ID NO: 679192 - DNA, 25 bp, Homo sapien
tccttgactcgcaggtttttggcca

SEQ ID NO: 679193 - DNA, 25 bp, Homo sapien
catctggtccttgactcgcaggttt

SEQ ID NO: 679194 - DNA, 25 bp, Homo sapien
ctggaagaaggaaccatcaggcagg

SEQ ID NO: 679195 - DNA, 25 bp, Homo sapien
gaagaaggaaccatcaggcaggggc

SEQ ID NO: 679196 - DNA, 25 bp, Homo sapien
agaaggaaccatcaggcaggggcct

SEQ ID NO: 679197 - DNA, 25 bp, Homo sapien
tggaagaaggaaccatcaggcaggg

SEQ ID NO: 679198 - DNA, 25 bp, Homo sapien
caggttcagggcacgtgaggaagca

SEQ ID NO: 679199 - DNA, 25 bp, Homo sapien
aggttcagggcacgtgaggaagcac

SEQ ID NO: 679200 - DNA, 25 bp, Homo sapien
ggttcagggcacgtgaggaagcaca

SEQ ID NO: 679201 - DNA, 25 bp, Homo sapien
gcaggttcagggcacgtgaggaagc

SEQ ID NO: 679202 - DNA, 25 bp, Homo sapien
gcatgatgcacttgggcagcaaccc

SEQ ID NO: 679203 - DNA, 25 bp, Homo sapien
gctccagggacacgctcagggtgct

SEQ ID NO: 679204 - DNA, 25 bp, Homo sapien
cttccgcatgatgtccgtggcctgc

SEQ ID NO: 679205 - DNA, 25 bp, Homo sapien
tggctccgtgccaagatggccgcct

SEQ ID NO: 679206 - DNA, 25 bp, Homo sapien
ccccaggcggtagcagagctccgag

SEQ ID NO: 679207 - DNA, 25 bp, Homo sapien
aggacttcatgaggcggcagagctc

SEQ ID NO: 679208 - DNA, 25 bp, Homo sapien
tttgggtggacaaaggacttcatga

SEQ ID NO: 679209 - DNA, 25 bp, Homo sapien
cagcaccaggctttgggtggacaaa

SEQ ID NO: 679210 - DNA, 25 bp, Homo sapien
gttagaccgctccaggtaaaatgcc

SEQ ID NO: 679211 - DNA, 25 bp, Homo sapien
atccgtgggcaggttagaccgctcc

SEQ ID NO: 679212 - DNA, 25 bp, Homo sapien
gcatccgtgggcaggttagaccgct

SEQ ID NO: 679213 - DNA, 25 bp, Homo sapien
tgggcaggttagaccgctccaggta

SEQ ID NO: 679214 - DNA, 25 bp, Homo sapien
ggactgcgcgttgatgtcctgctgc

SEQ ID NO: 679215 - DNA, 25 bp, Homo sapien
ctccagggactgcgcgttgatgtcc

SEQ ID NO: 679216 - DNA, 25 bp, Homo sapien
tgagtttgcggtaatactgctgaac

SEQ ID NO: 679217 - DNA, 25 bp, Homo sapien
ctgctgcaaatcctccgcggcctgg

SEQ ID NO: 679218 - DNA, 25 bp, Homo sapien
tgggagccggtgtgcttggtggcct

SEQ ID NO: 679219 - DNA, 25 bp, Homo sapien
caggcggttgggagccggtgtgctt

SEQ ID NO: 679220 - DNA, 25 bp, Homo sapien
gcaggcggttgggagccggtgtgct

SEQ ID NO: 679221 - DNA, 25 bp, Homo sapien
ggttgggagccggtgtgcttggtgg

SEQ ID NO: 679222 - DNA, 25 bp, Homo sapien
tgccggctgccctcaatgtggtaga

SEQ ID NO: 679223 - DNA, 25 bp, Homo sapien
tcaatgtggtagaagacgttggtgt

SEQ ID NO: 679224 - DNA, 25 bp, Homo sapien
agcttggagaagtggtagctgtcga

SEQ ID NO: 679225 - DNA, 25 bp, Homo sapien
tagaagatgaccttcagcgcctgcc

SEQ ID NO: 679226 - DNA, 25 bp, Homo sapien
ccacatagttctcgtccagctgctt

SEQ ID NO: 679227 - DNA, 25 bp, Homo sapien
gccacatagttctcgtccagctgct

SEQ ID NO: 679228 - DNA, 25 bp, Homo sapien
atgtcctccagcatggtccgttcct

SEQ ID NO: 679229 - DNA, 25 bp, Homo sapien
tgacagcgtcacccagatgtcctcc

SEQ ID NO: 679230 - DNA, 25 bp, Homo sapien
ctgtggctggcgagagcagggactg

SEQ ID NO: 679231 - DNA, 25 bp, Homo sapien
ttgttgtagcggtagcccagggccg

SEQ ID NO: 679232 - DNA, 25 bp, Homo sapien
tgctccagccacttgcggctggcgt

SEQ ID NO: 679233 - DNA, 25 bp, Homo sapien
agaagatcgcgtctctgcgcagctg

SEQ ID NO: 679234 - DNA, 25 bp, Homo sapien
ttttagtgaccaaatttgacccaga

SEQ ID NO: 679235 - DNA, 25 bp, Homo sapien
cggcttctggccagtgagtttttta

SEQ ID NO: 679236 - DNA, 25 bp, Homo sapien
aattatttccaatggccggcttctg

SEQ ID NO: 679237 - DNA, 25 bp, Homo sapien
caagcaattggtctctcagggtccc

SEQ ID NO: 679238 - DNA, 25 bp, Homo sapien
ctgtgcacttcagcaaggccaggag

SEQ ID NO: 679239 - DNA, 25 bp, Homo sapien
gccaggagcagctggttcttcccat

SEQ ID NO: 679240 - DNA, 25 bp, Homo sapien
tgtgcacttcagcaaggccaggagc

SEQ ID NO: 679241 - DNA, 25 bp, Homo sapien
aaggccaggagcagctggttcttcc

SEQ ID NO: 679242 - DNA, 25 bp, Homo sapien
cctgaatctggtcagtgggctgcca

SEQ ID NO: 679243 - DNA, 25 bp, Homo sapien
catcgaaacctatctgtgggcctga

SEQ ID NO: 679244 - DNA, 25 bp, Homo sapien
tgggcctagagtcaccagatcttcg

SEQ ID NO: 679245 - DNA, 25 bp, Homo sapien
ggaactcacacatccaatgctttgg

SEQ ID NO: 679246 - DNA, 25 bp, Homo sapien
tcctcctggatgctaatctggatca

SEQ ID NO: 679247 - DNA, 25 bp, Homo sapien
tgctaatctggatcaggctccggcc

SEQ ID NO: 679248 - DNA, 25 bp, Homo sapien
atatctctgaatgttgtccaccagg

SEQ ID NO: 679249 - DNA, 25 bp, Homo sapien
ggccacggattgtacactcttcttt

SEQ ID NO: 679250 - DNA, 25 bp, Homo sapien
tcataatcctagatcaagggagctg

SEQ ID NO: 679251 - DNA, 25 bp, Homo sapien
gactcctgggcattatcgggtccac

SEQ ID NO: 679252 - DNA, 25 bp, Homo sapien
aaaggcctatgtcccatcacagatc

SEQ ID NO: 679253 - DNA, 25 bp, Homo sapien
cattatcgggtccacagagggtaag

SEQ ID NO: 679254 - DNA, 25 bp, Homo sapien
ttccccatcgcaggctgtcaccttg

SEQ ID NO: 679255 - DNA, 25 bp, Homo sapien
tgtcaccttggactggctatcccct

SEQ ID NO: 679256 - DNA, 25 bp, Homo sapien
cccatcgcaggctgtcaccttggac

SEQ ID NO: 679257 - DNA, 25 bp, Homo sapien
tctaacacccttccccatcgcaggc

SEQ ID NO: 679258 - DNA, 25 bp, Homo sapien
tggccccttgaggagagcattgatg

SEQ ID NO: 679259 - DNA, 25 bp, Homo sapien
tagggaaatgcttggtctcttcgaa

SEQ ID NO: 679260 - DNA, 25 bp, Homo sapien
ggtctcttcgaaagcccggctcatg

SEQ ID NO: 679261 - DNA, 25 bp, Homo sapien
cttgtaagctgtggttcatagggaa

SEQ ID NO: 679262 - DNA, 25 bp, Homo sapien
tgtcctgcttgtcagatgggatccg

SEQ ID NO: 679263 - DNA, 25 bp, Homo sapien
aagcttgtcctgcttgtcagatggg

SEQ ID NO: 679264 - DNA, 25 bp, Homo sapien
tgcttgtcagatgggatccgcatgt

SEQ ID NO: 679265 - DNA, 25 bp, Homo sapien
gtcagatgggatccgcatgtcacag

SEQ ID NO: 679266 - DNA, 25 bp, Homo sapien
caagggatgtggagtctgaagacca

SEQ ID NO: 679267 - DNA, 25 bp, Homo sapien
tacagaactccaaacccacaaggga

SEQ ID NO: 679268 - DNA, 25 bp, Homo sapien
gcaaaatggacaacaggcactaacg

SEQ ID NO: 679269 - DNA, 25 bp, Homo sapien
ggcactaacgcatgacaagattgta

SEQ ID NO: 679270 - DNA, 25 bp, Homo sapien
catctcgtcgctgcccaagtaggag

SEQ ID NO: 679271 - DNA, 25 bp, Homo sapien
tcacgctggtgtaggacaggaccga

SEQ ID NO: 679272 - DNA, 25 bp, Homo sapien
ggacaggaccgagtctcgattgctg

SEQ ID NO: 679273 - DNA, 25 bp, Homo sapien
cccaagtaggagctgttacttctca

SEQ ID NO: 679274 - DNA, 25 bp, Homo sapien
ctggtcctggcacccaaaacccact

SEQ ID NO: 679275 - DNA, 25 bp, Homo sapien
acccgaggtgggctctgtgatggtg

SEQ ID NO: 679276 - DNA, 25 bp, Homo sapien
ttgaagcacaccttcttgatgcccc

SEQ ID NO: 679277 - DNA, 25 bp, Homo sapien
tcctcagccaaggatgcgtcgcagg

SEQ ID NO: 679278 - DNA, 25 bp, Homo sapien
cgcgataactcatggtgtcgtggcc

SEQ ID NO: 679279 - DNA, 25 bp, Homo sapien
tgatgcagtgctgggtgtacgacat

SEQ ID NO: 679280 - DNA, 25 bp, Homo sapien
tcttcctgaccaagggtcccactgg

SEQ ID NO: 679281 - DNA, 25 bp, Homo sapien
caggcaagcacttccaggagggagc

SEQ ID NO: 679282 - DNA, 25 bp, Homo sapien
gtaggcatcctggatctcacggtcc

SEQ ID NO: 679283 - DNA, 25 bp, Homo sapien
tttgcgtccaaagcggatgctgaag

SEQ ID NO: 679284 - DNA, 25 bp, Homo sapien
gccgatgagggagggtttgcgtcca

SEQ ID NO: 679285 - DNA, 25 bp, Homo sapien
cttgctccgggtcaaggccgatgag

SEQ ID NO: 679286 - DNA, 25 bp, Homo sapien
tgagggagggtttgcgtccaaagcg

SEQ ID NO: 679287 - DNA, 25 bp, Homo sapien
taggacacttccatgaggttgatgt

SEQ ID NO: 679288 - DNA, 25 bp, Homo sapien
gtggtcttggggtaggacacttcca

SEQ ID NO: 679289 - DNA, 25 bp, Homo sapien
gacacttccatgaggttgatgtggc

SEQ ID NO: 679290 - DNA, 25 bp, Homo sapien
gggtaggacacttccatgaggttga

SEQ ID NO: 679291 - DNA, 25 bp, Homo sapien
tgggctgaccctgctcttcagttgg

SEQ ID NO: 679292 - DNA, 25 bp, Homo sapien
agaagtccaggccacacagcgggtg

SEQ ID NO: 679293 - DNA, 25 bp, Homo sapien
ccctgctcttcagttgggctgcaaa

SEQ ID NO: 679294 - DNA, 25 bp, Homo sapien
tgaccctgctcttcagttgggctgc

SEQ ID NO: 679295 - DNA, 25 bp, Homo sapien
gcatggtcacgatggcgctgctcag

SEQ ID NO: 679296 - DNA, 25 bp, Homo sapien
atgagccgcctgcagttctccacga

SEQ ID NO: 679297 - DNA, 25 bp, Homo sapien
tggtgtcacagatgttgcggaactc

SEQ ID NO: 679298 - DNA, 25 bp, Homo sapien
tccacgaagacgctgtcattggcag

SEQ ID NO: 679299 - DNA, 25 bp, Homo sapien
ccgcggggctccacgatcttctcca

SEQ ID NO: 679300 - DNA, 25 bp, Homo sapien
ggcacctgacgcctgccgtgctcac

SEQ ID NO: 679301 - DNA, 25 bp, Homo sapien
agcagccgcggggctccacgatctt

SEQ ID NO: 679302 - DNA, 25 bp, Homo sapien
agcacatggcacctgacgcctgccg

SEQ ID NO: 679303 - DNA, 25 bp, Homo sapien
actcatacaccacgccgtgttccag

SEQ ID NO: 679304 - DNA, 25 bp, Homo sapien
atactcatacaccacgccgtgttcc

SEQ ID NO: 679305 - DNA, 25 bp, Homo sapien
tcatacaccacgccgtgttccaggt

SEQ ID NO: 679306 - DNA, 25 bp, Homo sapien
atacaccacgccgtgttccaggtgc

SEQ ID NO: 679307 - DNA, 25 bp, Homo sapien
atcctcatgggtgtggtagatccac

SEQ ID NO: 679308 - DNA, 25 bp, Homo sapien
tcctgggcctgctcgccactggggt

SEQ ID NO: 679309 - DNA, 25 bp, Homo sapien
ctgactggctcgtgcttcctgggca

SEQ ID NO: 679310 - DNA, 25 bp, Homo sapien
tgtggtagatccactggtacaggcc

SEQ ID NO: 679311 - DNA, 25 bp, Homo sapien
ttcgcgccgactccggaatgcctgg

SEQ ID NO: 679312 - DNA, 25 bp, Homo sapien
cacgttgctgccattgaccttcaga

SEQ ID NO: 679313 - DNA, 25 bp, Homo sapien
gggcaccatcgttcatcacgttgct

SEQ ID NO: 679314 - DNA, 25 bp, Homo sapien
tcgttcatcacgttgctgccattga

SEQ ID NO: 679315 - DNA, 25 bp, Homo sapien
ccccacagcatagacgtacggtggg

SEQ ID NO: 679316 - DNA, 25 bp, Homo sapien
ctctccccacagcatagacgtacgg

SEQ ID NO: 679317 - DNA, 25 bp, Homo sapien
catagacgtacggtggggcagctcc

SEQ ID NO: 679318 - DNA, 25 bp, Homo sapien
tctccccacagcatagacgtacggt

SEQ ID NO: 679319 - DNA, 25 bp, Homo sapien
tgtccggctggtcggggattttgat

SEQ ID NO: 679320 - DNA, 25 bp, Homo sapien
acagtgtgtccggctggtcggggat

SEQ ID NO: 679321 - DNA, 25 bp, Homo sapien
tgtgtccggctggtcggggattttg

SEQ ID NO: 679322 - DNA, 25 bp, Homo sapien
cggctggtcggggattttgatgatc

SEQ ID NO: 679323 - DNA, 25 bp, Homo sapien
caatgcgccagacacggtcccactt

SEQ ID NO: 679324 - DNA, 25 bp, Homo sapien
cagaaggactggttgaggatggact

SEQ ID NO: 679325 - DNA, 25 bp, Homo sapien
gaaggactggttgaggatggactcc

SEQ ID NO: 679326 - DNA, 25 bp, Homo sapien
gcagaaggactggttgaggatggac

SEQ ID NO: 679327 - DNA, 25 bp, Homo sapien
aaggactggttgaggatggactcca

SEQ ID NO: 679328 - DNA, 25 bp, Homo sapien
gaacaccaggtcctcattgatggag

SEQ ID NO: 679329 - DNA, 25 bp, Homo sapien
accaggtcctcattgatggagtaga

SEQ ID NO: 679330 - DNA, 25 bp, Homo sapien
cgcaggaacaccaggtcctcattga

SEQ ID NO: 679331 - DNA, 25 bp, Homo sapien
ccgcaggaacaccaggtcctcattg

SEQ ID NO: 679332 - DNA, 25 bp, Homo sapien
cctcgatgtcaaagccatagtcctc

SEQ ID NO: 679333 - DNA, 25 bp, Homo sapien
tcctcgatgtcaaagccatagtcct

SEQ ID NO: 679334 - DNA, 25 bp, Homo sapien
cccctctggacggacttcaccacca

SEQ ID NO: 679335 - DNA, 25 bp, Homo sapien
ttctcctcgatgtcaaagccatagt

SEQ ID NO: 679336 - DNA, 25 bp, Homo sapien
cagcaggcgcttggccagaatgttc

SEQ ID NO: 679337 - DNA, 25 bp, Homo sapien
catctcctcgtcagcatgaaagcgg

SEQ ID NO: 679338 - DNA, 25 bp, Homo sapien
aaagcggaagtactgggactcatcc

SEQ ID NO: 679339 - DNA, 25 bp, Homo sapien
gaagtcgttgcgaagctgtttgttc

SEQ ID NO: 679340 - DNA, 25 bp, Homo sapien
gagtgtgcagcctctaaacccgcac

SEQ ID NO: 679341 - DNA, 25 bp, Homo sapien
tacatagcacagtagttgagtgtgc

SEQ ID NO: 679342 - DNA, 25 bp, Homo sapien
taaacccgcacgatctgggttctaa

SEQ ID NO: 679343 - DNA, 25 bp, Homo sapien
gggagaggctacatagcacagtagt

SEQ ID NO: 679344 - DNA, 25 bp, Homo sapien
gaattctaatcccgactccagacgg

SEQ ID NO: 679345 - DNA, 25 bp, Homo sapien
aattctaatcccgactccagacggc

SEQ ID NO: 679346 - DNA, 25 bp, Homo sapien
ctgaattctaatcccgactccagac

SEQ ID NO: 679347 - DNA, 25 bp, Homo sapien
ctgaattctaatcccggctccagac

SEQ ID NO: 679348 - DNA, 25 bp, Homo sapien
tgaagccattgttgcacagacccac

SEQ ID NO: 679349 - DNA, 25 bp, Homo sapien
cgtggtgcatgaagccattgttgca

SEQ ID NO: 679350 - DNA, 25 bp, Homo sapien
ttgttgcacagacccacgccgagcg

SEQ ID NO: 679351 - DNA, 25 bp, Homo sapien
tgcctcctcccgagtctggcagtct

SEQ ID NO: 679352 - DNA, 25 bp, Homo sapien
tcccgggaagcactgacttgtaggt

SEQ ID NO: 679353 - DNA, 25 bp, Homo sapien
agtggcaggggagaccctccattct

SEQ ID NO: 679354 - DNA, 25 bp, Homo sapien
tggcaggggagaccctccattcttt

SEQ ID NO: 679355 - DNA, 25 bp, Homo sapien
tgtatttaaaccaaaccattgtgga

SEQ ID NO: 679356 - DNA, 25 bp, Homo sapien
tgttttgtggttgacattgatgtat

SEQ ID NO: 679357 - DNA, 25 bp, Homo sapien
cagatgaaagtggttcccagggcct

SEQ ID NO: 679358 - DNA, 25 bp, Homo sapien
gctgtgaagacggcagtaaagcctc

SEQ ID NO: 679359 - DNA, 25 bp, Homo sapien
tgaagacggcagtaaagcctcacac

SEQ ID NO: 679360 - DNA, 25 bp, Homo sapien
gaagacggcagtaaagcctcacacc

SEQ ID NO: 679361 - DNA, 25 bp, Homo sapien
tgtgaagacggcagtaaagcctcac

SEQ ID NO: 679362 - DNA, 25 bp, Homo sapien
cacctgctcattcttgaactggtgc

SEQ ID NO: 679363 - DNA, 25 bp, Homo sapien
tccagctcacttcgggccttgtagg

SEQ ID NO: 679364 - DNA, 25 bp, Homo sapien
gcggaagcgatacatcacctgctca

SEQ ID NO: 679365 - DNA, 25 bp, Homo sapien
taggtgccatcgtcgtagcggaagc

SEQ ID NO: 679366 - DNA, 25 bp, Homo sapien
tttcaccaatttctaggagccaggc

SEQ ID NO: 679367 - DNA, 25 bp, Homo sapien
ccaagttgactccttcttccgtctt

SEQ ID NO: 679368 - DNA, 25 bp, Homo sapien
ccttcttccgtcttgctgatttcac

SEQ ID NO: 679369 - DNA, 25 bp, Homo sapien
ttcaccaatttctaggagccaggca

SEQ ID NO: 679370 - DNA, 25 bp, Homo sapien
tgtggttgagaggatttccccaatt

SEQ ID NO: 679371 - DNA, 25 bp, Homo sapien
gccaggaacacaatatgtggttgag

SEQ ID NO: 679372 - DNA, 25 bp, Homo sapien
ctgccaggaacacaatatgtggttg

SEQ ID NO: 679373 - DNA, 25 bp, Homo sapien
atatgtggttgagaggatttcccca

SEQ ID NO: 679374 - DNA, 25 bp, Homo sapien
ggccgcctctggcactgatcagcaa

SEQ ID NO: 679375 - DNA, 25 bp, Homo sapien
tctggcactgatcagcaactctctg

SEQ ID NO: 679376 - DNA, 25 bp, Homo sapien
agctgtctaattgggggccgcctct

SEQ ID NO: 679377 - DNA, 25 bp, Homo sapien
tctcggaagcccaccagctgtctaa

SEQ ID NO: 679378 - DNA, 25 bp, Homo sapien
tctgcccaaactgggtcttgccatc

SEQ ID NO: 679379 - DNA, 25 bp, Homo sapien
tgcccaaactgggtcttgccatctt

SEQ ID NO: 679380 - DNA, 25 bp, Homo sapien
tctgccctacgtttctgcccaaact

SEQ ID NO: 679381 - DNA, 25 bp, Homo sapien
caactctgccctacgtttctgccca

SEQ ID NO: 679382 - DNA, 25 bp, Homo sapien
tcatacctggtaaccctgagctccg

SEQ ID NO: 679383 - DNA, 25 bp, Homo sapien
gcatctaatctctgccaagggtgaa

SEQ ID NO: 679384 - DNA, 25 bp, Homo sapien
cacctgtgcgtacaggtggccaaga

SEQ ID NO: 679385 - DNA, 25 bp, Homo sapien
ttccctctggcagacgtccataact

SEQ ID NO: 679386 - DNA, 25 bp, Homo sapien
gtgcagagcaaagccgtgcagggag

SEQ ID NO: 679387 - DNA, 25 bp, Homo sapien
agagcaaagccgtgcagggagaaga

SEQ ID NO: 679388 - DNA, 25 bp, Homo sapien
gtgtgcagagcaaagccgtgcaggg

SEQ ID NO: 679389 - DNA, 25 bp, Homo sapien
gctgtgtgcagagcaaagccgtgca

SEQ ID NO: 679390 - DNA, 25 bp, Homo sapien
tttctccggcggtccttgatgaggt

SEQ ID NO: 679391 - DNA, 25 bp, Homo sapien
cttgttcatcatcatgtggtacagc

SEQ ID NO: 679392 - DNA, 25 bp, Homo sapien
aatcatgacgtaggcatcacgctcc

SEQ ID NO: 679393 - DNA, 25 bp, Homo sapien
cccttctccgcaatcatgacgtagg

SEQ ID NO: 679394 - DNA, 25 bp, Homo sapien
tcttggccatgcagacaaaccactt

SEQ ID NO: 679395 - DNA, 25 bp, Homo sapien
tcccgctcgcggatgatggcatcca

SEQ ID NO: 679396 - DNA, 25 bp, Homo sapien
attcttggccgtgttgtggatcttc

SEQ ID NO: 679397 - DNA, 25 bp, Homo sapien
tccagccgttggtgacggtatagcc

SEQ ID NO: 679398 - DNA, 25 bp, Homo sapien
tgttcgcttcatgcatctatgctct

SEQ ID NO: 679399 - DNA, 25 bp, Homo sapien
ttaacttgaatgctaaccacccaga

SEQ ID NO: 679400 - DNA, 25 bp, Homo sapien
tatgctctgggcacttttctgtagg

SEQ ID NO: 679401 - DNA, 25 bp, Homo sapien
taaatgcttaggaggtaaaaatgtc

SEQ ID NO: 679402 - DNA, 25 bp, Homo sapien
ttcagtgttgattcgacccctgaag

SEQ ID NO: 679403 - DNA, 25 bp, Homo sapien
ccctgaagatgtagagggagccgtt

SEQ ID NO: 679404 - DNA, 25 bp, Homo sapien
gattcgacccctgaagatgtagagg

SEQ ID NO: 679405 - DNA, 25 bp, Homo sapien
cttcagtgttgattcgacccctgaa

SEQ ID NO: 679406 - DNA, 25 bp, Homo sapien
gctgagaccatcctatacctgctga

SEQ ID NO: 679407 - DNA, 25 bp, Homo sapien
aatggcgggcctagctcttaaccaa

SEQ ID NO: 679408 - DNA, 25 bp, Homo sapien
ggcatggcctaggacacaaagcaag

SEQ ID NO: 679409 - DNA, 25 bp, Homo sapien
caagttaacaacaatggtgctggca

SEQ ID NO: 679410 - DNA, 25 bp, Homo sapien
ttcctactagacagcactgatgtag

SEQ ID NO: 679411 - DNA, 25 bp, Homo sapien
ggcttgcattgtattcctactagac

SEQ ID NO: 679412 - DNA, 25 bp, Homo sapien
gagggaagtgacaagcccaaggcat

SEQ ID NO: 679413 - DNA, 25 bp, Homo sapien
tagaacaaacccctcaactcacagg

SEQ ID NO: 679414 - DNA, 25 bp, Homo sapien
tgcccgcagagatctttaacaaagt

SEQ ID NO: 679415 - DNA, 25 bp, Homo sapien
ggccctttcctggatgttgcccgca

SEQ ID NO: 679416 - DNA, 25 bp, Homo sapien
tggatttccgcttgcagtagacgag

SEQ ID NO: 679417 - DNA, 25 bp, Homo sapien
cagtagacgagaaggttgtcgaaga

SEQ ID NO: 679418 - DNA, 25 bp, Homo sapien
ctcattgatgttggagcaaacggtc

SEQ ID NO: 679419 - DNA, 25 bp, Homo sapien
ggagcaaacggtcttcatggcctgc

SEQ ID NO: 679420 - DNA, 25 bp, Homo sapien
tccatctgccgcttggtctcattga

SEQ ID NO: 679421 - DNA, 25 bp, Homo sapien
ttgccgggagtcctcttggccagct

SEQ ID NO: 679422 - DNA, 25 bp, Homo sapien
aaggatgtccaaaggtgcccgctct

SEQ ID NO: 679423 - DNA, 25 bp, Homo sapien
caagggcaacaaacaaacgtggcta

SEQ ID NO: 679424 - DNA, 25 bp, Homo sapien
aagcctgggcttccgcgagatgcct

SEQ ID NO: 679425 - DNA, 25 bp, Homo sapien
gagctgcagaggtctactgcttcca

SEQ ID NO: 679426 - DNA, 25 bp, Homo sapien
tggtcttccggcctcccagaagcat

SEQ ID NO: 679427 - DNA, 25 bp, Homo sapien
caacaggtagccttccaaagggatg

SEQ ID NO: 679428 - DNA, 25 bp, Homo sapien
aggagcgggtacttgcagatcctct

SEQ ID NO: 679429 - DNA, 25 bp, Homo sapien
cagatcctctggatcggagacaaca

SEQ ID NO: 679430 - DNA, 25 bp, Homo sapien
gcgcgcacggtagggatcttgttca

SEQ ID NO: 679431 - DNA, 25 bp, Homo sapien
gggatcttgttcagctccaccagca

SEQ ID NO: 679432 - DNA, 25 bp, Homo sapien
tcctcgtacacgcagaacttgtcct

SEQ ID NO: 679433 - DNA, 25 bp, Homo sapien
tggttgctgcaatactcctcgtaca

SEQ ID NO: 679434 - DNA, 25 bp, Homo sapien
gaaccatcagtcagggtttcccgta

SEQ ID NO: 679435 - DNA, 25 bp, Homo sapien
tcactaggtccagaaccatcagtca

SEQ ID NO: 679436 - DNA, 25 bp, Homo sapien
taggtccagaaccatcagtcagggt

SEQ ID NO: 679437 - DNA, 25 bp, Homo sapien
tccagaaccatcagtcagggtttcc

SEQ ID NO: 679438 - DNA, 25 bp, Homo sapien
tgcccagcatgtagtacaggctgcc

SEQ ID NO: 679439 - DNA, 25 bp, Homo sapien
gcccagcatgtagtacaggctgccc

SEQ ID NO: 679440 - DNA, 25 bp, Homo sapien
gctgcccagcatgtagtacaggctg

SEQ ID NO: 679441 - DNA, 25 bp, Homo sapien
aggctgcccagcatgtagtacaggc

SEQ ID NO: 679442 - DNA, 25 bp, Homo sapien
ggaaccaggatttcagctgcagact

SEQ ID NO: 679443 - DNA, 25 bp, Homo sapien
ctggaaccaggatttcagctgcaga

SEQ ID NO: 679444 - DNA, 25 bp, Homo sapien
ttcagctgcagactgtggtgatgca

SEQ ID NO: 679445 - DNA, 25 bp, Homo sapien
cagctgcagactgtggtgatgcagg

SEQ ID NO: 679446 - DNA, 25 bp, Homo sapien
cattcatccttgtgcccgggcatca

SEQ ID NO: 679447 - DNA, 25 bp, Homo sapien
tccgacattcatccttgtgcccggg

SEQ ID NO: 679448 - DNA, 25 bp, Homo sapien
aagcctccgacattcatccttgtgc

SEQ ID NO: 679449 - DNA, 25 bp, Homo sapien
tcaaagcctccgacattcatccttg

SEQ ID NO: 679450 - DNA, 25 bp, Homo sapien
ttcccaagttcatgctgagactgcg

SEQ ID NO: 679451 - DNA, 25 bp, Homo sapien
tgagactgcggctccgggtgtaaac

SEQ ID NO: 679452 - DNA, 25 bp, Homo sapien
tgtaaacaatactccaaggcggcca

SEQ ID NO: 679453 - DNA, 25 bp, Homo sapien
ggcggccaagaaatccttatgaact

SEQ ID NO: 679454 - DNA, 25 bp, Homo sapien
tgacattctcctccgtgaggccctt

SEQ ID NO: 679455 - DNA, 25 bp, Homo sapien
tctgccggatgcgatgcaggaatgc

SEQ ID NO: 679456 - DNA, 25 bp, Homo sapien
ttgacattctcctccgtgaggccct

SEQ ID NO: 679457 - DNA, 25 bp, Homo sapien
ggccacgttctgccggatgcgatgc

SEQ ID NO: 679458 - DNA, 25 bp, Homo sapien
gctgtcatagccacagggccacggg

SEQ ID NO: 679459 - DNA, 25 bp, Homo sapien
aaaaggaattcatggtgctgtcata

SEQ ID NO: 679460 - DNA, 25 bp, Homo sapien
agacccctgggaaaaggaattcatg

SEQ ID NO: 679461 - DNA, 25 bp, Homo sapien
tggaagcagccacatggagacccct

SEQ ID NO: 679462 - DNA, 25 bp, Homo sapien
ctgccaagatggatgacagattggg

SEQ ID NO: 679463 - DNA, 25 bp, Homo sapien
tgccctgccaagatggatgacagat

SEQ ID NO: 679464 - DNA, 25 bp, Homo sapien
ccctgccaagatggatgacagattg

SEQ ID NO: 679465 - DNA, 25 bp, Homo sapien
tggatgacagattgggggtccacac

SEQ ID NO: 679466 - DNA, 25 bp, Homo sapien
attagaaccaggtctcccgatgcca

SEQ ID NO: 679467 - DNA, 25 bp, Homo sapien
caggtctcccgatgccaggccaggt

SEQ ID NO: 679468 - DNA, 25 bp, Homo sapien
accaagagtatgagacactggtctg

SEQ ID NO: 679469 - DNA, 25 bp, Homo sapien
aggtcaaacagcaaactggtgacaa

SEQ ID NO: 679470 - DNA, 25 bp, Homo sapien
gatggaaagatttaccttctgcaga

SEQ ID NO: 679471 - DNA, 25 bp, Homo sapien
ctctgagtcaactctggaaacctgg

SEQ ID NO: 679472 - DNA, 25 bp, Homo sapien
cagagcagcggcaaggcaaatatga

SEQ ID NO: 679473 - DNA, 25 bp, Homo sapien
cctgggccagaacacaagaatgtcc

SEQ ID NO: 679474 - DNA, 25 bp, Homo sapien
gccactggctcagaaccaactgagg

SEQ ID NO: 679475 - DNA, 25 bp, Homo sapien
ttttggatttgaaacatcctcccca

SEQ ID NO: 679476 - DNA, 25 bp, Homo sapien
tgttcccacctagcattccttcatc

SEQ ID NO: 679477 - DNA, 25 bp, Homo sapien
ccaaggattccaccgctgactcatt

SEQ ID NO: 679478 - DNA, 25 bp, Homo sapien
ggagaatttgatgggttaggataaa

SEQ ID NO: 679479 - DNA, 25 bp, Homo sapien
gaactgtagcccttatcgtcagcac

SEQ ID NO: 679480 - DNA, 25 bp, Homo sapien
gaagcactgtacgaactgtagccct

SEQ ID NO: 679481 - DNA, 25 bp, Homo sapien
taggataaaatgcactaggaagcac

SEQ ID NO: 679482 - DNA, 25 bp, Homo sapien
ccaccacatcaagctggaaaggaag

SEQ ID NO: 679483 - DNA, 25 bp, Homo sapien
gaaaggcgacagtatacaaatcgct

SEQ ID NO: 679484 - DNA, 25 bp, Homo sapien
tctgctgaggaaatttactgccctg

SEQ ID NO: 679485 - DNA, 25 bp, Homo sapien
ccaagcagtgccataggaggacagc

SEQ ID NO: 679486 - DNA, 25 bp, Homo sapien
ctgtccactgccgtccagccaggat

SEQ ID NO: 679487 - DNA, 25 bp, Homo sapien
cctgtccactgccgtccagccagga

SEQ ID NO: 679488 - DNA, 25 bp, Homo sapien
gcttaaaataatggccggccaggga

SEQ ID NO: 679489 - DNA, 25 bp, Homo sapien
aaaggattctcgctctcactgcagt

SEQ ID NO: 679490 - DNA, 25 bp, Homo sapien
caagaacctagaggccgggctgtgt

SEQ ID NO: 679491 - DNA, 25 bp, Homo sapien
aaagcatgatgaggagaccaagcca

SEQ ID NO: 679492 - DNA, 25 bp, Homo sapien
ggagaaataacaaaggacctaagca

SEQ ID NO: 679493 - DNA, 25 bp, Homo sapien
gacaccgtgtctcaatcataccctg

SEQ ID NO: 679494 - DNA, 25 bp, Homo sapien
gacctaagcagatgtacgggaggaa

SEQ ID NO: 679495 - DNA, 25 bp, Homo sapien
gagattggtctcgactactcagcag

SEQ ID NO: 679496 - DNA, 25 bp, Homo sapien
gggtctcctctgacaagcccacagg

SEQ ID NO: 679497 - DNA, 25 bp, Homo sapien
caggaggtttaccagcagtggctgc

SEQ ID NO: 679498 - DNA, 25 bp, Homo sapien
caagcccacaggaggtttaccagca

SEQ ID NO: 679499 - DNA, 25 bp, Homo sapien
tctgacaagcccacaggaggtttac

SEQ ID NO: 679500 - DNA, 25 bp, Homo sapien
agggcccactcatcgaagctgcaaa

SEQ ID NO: 679501 - DNA, 25 bp, Homo sapien
agccactgtgaccacccaaggttcc

SEQ ID NO: 679502 - DNA, 25 bp, Homo sapien
ccagaggacacctttagggcccact

SEQ ID NO: 679503 - DNA, 25 bp, Homo sapien
tgccatccattctgctcaagaaact

SEQ ID NO: 679504 - DNA, 25 bp, Homo sapien
tggcaccagatagcagagcggccag

SEQ ID NO: 679505 - DNA, 25 bp, Homo sapien
gcaccagatagcagagcggccagcc

SEQ ID NO: 679506 - DNA, 25 bp, Homo sapien
ggcaccagatagcagagcggccagc

SEQ ID NO: 679507 - DNA, 25 bp, Homo sapien
ctggcaccagatagcagagcggcca

SEQ ID NO: 679508 - DNA, 25 bp, Homo sapien
gggctgggctggacccgagcatctg

SEQ ID NO: 679509 - DNA, 25 bp, Homo sapien
tgggctggacccgagcatctgagga

SEQ ID NO: 679510 - DNA, 25 bp, Homo sapien
ctgggctggacccgagcatctgagg

SEQ ID NO: 679511 - DNA, 25 bp, Homo sapien
ggctgggctggacccgagcatctga

SEQ ID NO: 679512 - DNA, 25 bp, Homo sapien
cgcgctgctgctgccagatggcaga

SEQ ID NO: 679513 - DNA, 25 bp, Homo sapien
ctgctgccagatggcagagcctggc

SEQ ID NO: 679514 - DNA, 25 bp, Homo sapien
cttcgcgctgctgctgccagatggc

SEQ ID NO: 679515 - DNA, 25 bp, Homo sapien
gctgctgctgccagatggcagagcc

SEQ ID NO: 679516 - DNA, 25 bp, Homo sapien
gaaagcacagtctggcaaagcgagc

SEQ ID NO: 679517 - DNA, 25 bp, Homo sapien
ctggcacagggcgccaggcctgcaa

SEQ ID NO: 679518 - DNA, 25 bp, Homo sapien
acatccactttgcaccccgctgtaa

SEQ ID NO: 679519 - DNA, 25 bp, Homo sapien
aatggcagctctgtcccgactttcc

SEQ ID NO: 679520 - DNA, 25 bp, Homo sapien
tttgtggaaaccatgcgagctgcgt

SEQ ID NO: 679521 - DNA, 25 bp, Homo sapien
taggcagcgtggtcttttgtggaaa

SEQ ID NO: 679522 - DNA, 25 bp, Homo sapien
gctgcgtaagcaccaaggaacatct

SEQ ID NO: 679523 - DNA, 25 bp, Homo sapien
tgcatcggtgacactgaaggtctaa

SEQ ID NO: 679524 - DNA, 25 bp, Homo sapien
accaagaccagcagcaccccaattc

SEQ ID NO: 679525 - DNA, 25 bp, Homo sapien
caagaccagcagcaccccaattcca

SEQ ID NO: 679526 - DNA, 25 bp, Homo sapien
ccagcagcaccccaattccacttcc

SEQ ID NO: 679527 - DNA, 25 bp, Homo sapien
agaccagcagcaccccaattccact

SEQ ID NO: 679528 - DNA, 25 bp, Homo sapien
tacgcagggtacatgtggagaacca

SEQ ID NO: 679529 - DNA, 25 bp, Homo sapien
gaagagtggcgtcaagatggcccaa

SEQ ID NO: 679530 - DNA, 25 bp, Homo sapien
gaggagacgactgcaagagtcccag

SEQ ID NO: 679531 - DNA, 25 bp, Homo sapien
agaagtggccggatcctggctgctt

SEQ ID NO: 679532 - DNA, 25 bp, Homo sapien
gagaatatgtcttggcccgaagtgt

SEQ ID NO: 679533 - DNA, 25 bp, Homo sapien
gctgagaatatgtcttggcccgaag

SEQ ID NO: 679534 - DNA, 25 bp, Homo sapien
ctgccaaagacctgacacacgggga

SEQ ID NO: 679535 - DNA, 25 bp, Homo sapien
gggctgagaatatgtcttggcccga

SEQ ID NO: 679536 - DNA, 25 bp, Homo sapien
ttgcaagccgactcctgagcctgca

SEQ ID NO: 679537 - DNA, 25 bp, Homo sapien
tatgcctcttgtgtacgtgtgacga

SEQ ID NO: 679538 - DNA, 25 bp, Homo sapien
gtttctcagcggaaatgcagctcca

SEQ ID NO: 679539 - DNA, 25 bp, Homo sapien
tcctctgggactgcttgcttgcctg

SEQ ID NO: 679540 - DNA, 25 bp, Homo sapien
acattctggatcctgttcattcaaa

SEQ ID NO: 679541 - DNA, 25 bp, Homo sapien
gggcactgttgtcggaacattctgg

SEQ ID NO: 679542 - DNA, 25 bp, Homo sapien
aagatggctttgtcagtaggaaagg

SEQ ID NO: 679543 - DNA, 25 bp, Homo sapien
gagtaacaaagatggctttgtcagt

SEQ ID NO: 679544 - DNA, 25 bp, Homo sapien
ggagcggccccaaattccctgccat

SEQ ID NO: 679545 - DNA, 25 bp, Homo sapien
tggagcggccccaaattccctgcca

SEQ ID NO: 679546 - DNA, 25 bp, Homo sapien
taaaacaatcccgtgcaggctgaca

SEQ ID NO: 679547 - DNA, 25 bp, Homo sapien
ggcccacagcaagggtacgatcaat

SEQ ID NO: 679548 - DNA, 25 bp, Homo sapien
tacgatcaatgacttctgaccagag

SEQ ID NO: 679549 - DNA, 25 bp, Homo sapien
cacatatgagcctaacctggactta

SEQ ID NO: 679550 - DNA, 25 bp, Homo sapien
ttgggatccccaggccaagtgactg

SEQ ID NO: 679551 - DNA, 25 bp, Homo sapien
tgaacagctcggtgcctcaatttcc

SEQ ID NO: 679552 - DNA, 25 bp, Homo sapien
ttggacaaaagcagactatcacgga

SEQ ID NO: 679553 - DNA, 25 bp, Homo sapien
caacagccggtttccaggattctag

SEQ ID NO: 679554 - DNA, 25 bp, Homo sapien
ccaaactcctctttgggtgtggttg

SEQ ID NO: 679555 - DNA, 25 bp, Homo sapien
ctgccctggttacttggtaacccag

SEQ ID NO: 679556 - DNA, 25 bp, Homo sapien
tgtggttgggtccactggcctcctc

SEQ ID NO: 679557 - DNA, 25 bp, Homo sapien
cacagatgggggcccaaactcctct

SEQ ID NO: 679558 - DNA, 25 bp, Homo sapien
gcaggaatcagctccgacctggccc

SEQ ID NO: 679559 - DNA, 25 bp, Homo sapien
ctggcttctgttcaagatctccgaa

SEQ ID NO: 679560 - DNA, 25 bp, Homo sapien
tctgttcaagatctccgaaacgcag

SEQ ID NO: 679561 - DNA, 25 bp, Homo sapien
ttcaagatctccgaaacgcagggca

SEQ ID NO: 679562 - DNA, 25 bp, Homo sapien
ctccctccagtattctagccagcat

SEQ ID NO: 679563 - DNA, 25 bp, Homo sapien
gatgacttcattctcgtggcccaga

SEQ ID NO: 679564 - DNA, 25 bp, Homo sapien
gagttgtagaatccccacagggttg

SEQ ID NO: 679565 - DNA, 25 bp, Homo sapien
gggtgccctgaagtctcaaaagcca

SEQ ID NO: 679566 - DNA, 25 bp, Homo sapien
taaggacaacgacctgttgatgact

SEQ ID NO: 679567 - DNA, 25 bp, Homo sapien
atttctatccgtccacagttcttcc

SEQ ID NO: 679568 - DNA, 25 bp, Homo sapien
ccatttctatccgtccacagttctt

SEQ ID NO: 679569 - DNA, 25 bp, Homo sapien
tgccatttctatccgtccacagttc

SEQ ID NO: 679570 - DNA, 25 bp, Homo sapien
gcctgccatttctatccgtccacag

SEQ ID NO: 679571 - DNA, 25 bp, Homo sapien
aagaagcgcaaggtgcccacgtagt

SEQ ID NO: 679572 - DNA, 25 bp, Homo sapien
acgtagtccctctcggtgcccaaga

SEQ ID NO: 679573 - DNA, 25 bp, Homo sapien
aagatctcgttgaggacgcagaggc

SEQ ID NO: 679574 - DNA, 25 bp, Homo sapien
cgactgcaagaagcgcaaggtgccc

SEQ ID NO: 679575 - DNA, 25 bp, Homo sapien
gctcgctgccgctgggcgcctccat

SEQ ID NO: 679576 - DNA, 25 bp, Homo sapien
gccccgtcgccgccgggctcgctgc

SEQ ID NO: 679577 - DNA, 25 bp, Homo sapien
tgggcgcagtccccggccccgtcgc

SEQ ID NO: 679578 - DNA, 25 bp, Homo sapien
cggagctgggcgccgcggcgccagg

SEQ ID NO: 679579 - DNA, 25 bp, Homo sapien
gaccatggaatgaagcgggcttgca

SEQ ID NO: 679580 - DNA, 25 bp, Homo sapien
tccaaatccaactggcagggtaacc

SEQ ID NO: 679581 - DNA, 25 bp, Homo sapien
aagacacgttatttctctgggcctc

SEQ ID NO: 679582 - DNA, 25 bp, Homo sapien
aactgttcacggtacctttctgagc

SEQ ID NO: 679583 - DNA, 25 bp, Homo sapien
ggtaggagtgtgtccacttgttcaa

SEQ ID NO: 679584 - DNA, 25 bp, Homo sapien
ggagtgtgtccacttgttcaaggaa

SEQ ID NO: 679585 - DNA, 25 bp, Homo sapien
tgtgtccacttgttcaaggaacagc

SEQ ID NO: 679586 - DNA, 25 bp, Homo sapien
taggagtgtgtccacttgttcaagg

SEQ ID NO: 679587 - DNA, 25 bp, Homo sapien
cacccaggccgtattgtttgattcc

SEQ ID NO: 679588 - DNA, 25 bp, Homo sapien
tcccagtgtccagcatagagtggct

SEQ ID NO: 679589 - DNA, 25 bp, Homo sapien
cgtattgtttgattccctgcctagg

SEQ ID NO: 679590 - DNA, 25 bp, Homo sapien
tgcctaggatgttagctcagctggg

SEQ ID NO: 679591 - DNA, 25 bp, Homo sapien
cgcctttgtgtcgggcactttgttt

SEQ ID NO: 679592 - DNA, 25 bp, Homo sapien
acgcctttgtgtcgggcactttgtt

SEQ ID NO: 679593 - DNA, 25 bp, Homo sapien
tacgcctttgtgtcgggcactttgt

SEQ ID NO: 679594 - DNA, 25 bp, Homo sapien
ttacgcctttgtgtcgggcactttg

SEQ ID NO: 679595 - DNA, 25 bp, Homo sapien
agccaaacttcattgttcttcgtgg

SEQ ID NO: 679596 - DNA, 25 bp, Homo sapien
tcttcgtgggttcttccagttgctt

SEQ ID NO: 679597 - DNA, 25 bp, Homo sapien
tgttcttcgtgggttcttccagttg

SEQ ID NO: 679598 - DNA, 25 bp, Homo sapien
aagccaaacttcattgttcttcgtg

SEQ ID NO: 679599 - DNA, 25 bp, Homo sapien
gtgaccagaagcctgatctccccag

SEQ ID NO: 679600 - DNA, 25 bp, Homo sapien
aaactctctgcatctatgtgtgacc

SEQ ID NO: 679601 - DNA, 25 bp, Homo sapien
tgaccagaagcctgatctccccagg

SEQ ID NO: 679602 - DNA, 25 bp, Homo sapien
tctctgcatctatgtgtgaccagaa

SEQ ID NO: 679603 - DNA, 25 bp, Homo sapien
ccacatgtctggggaatttctcaga

SEQ ID NO: 679604 - DNA, 25 bp, Homo sapien
ggaatttctcagaatcattgtgcag

SEQ ID NO: 679605 - DNA, 25 bp, Homo sapien
tttctcagaatcattgtgcagggcg

SEQ ID NO: 679606 - DNA, 25 bp, Homo sapien
atttctcagaatcattgtgcagggc

SEQ ID NO: 679607 - DNA, 25 bp, Homo sapien
gtcaaaaccagagctcattttccag

SEQ ID NO: 679608 - DNA, 25 bp, Homo sapien
gggcatctggacttgcccttcacag

SEQ ID NO: 679609 - DNA, 25 bp, Homo sapien
tgagcagcagagtgtacgcaggcct

SEQ ID NO: 679610 - DNA, 25 bp, Homo sapien
ccttcagttactccatccagtagta

SEQ ID NO: 679611 - DNA, 25 bp, Homo sapien
tacactgacaggattcaacgttgaa

SEQ ID NO: 679612 - DNA, 25 bp, Homo sapien
tacagagtgtcttagtcccacccca

SEQ ID NO: 679613 - DNA, 25 bp, Homo sapien
taaagtgtaattcaagccaggcgcg

SEQ ID NO: 679614 - DNA, 25 bp, Homo sapien
ccctcaagcaaccatgttattagtt

SEQ ID NO: 679615 - DNA, 25 bp, Homo sapien
gatcaccctgcatttatccatggaa

SEQ ID NO: 679616 - DNA, 25 bp, Homo sapien
taggaggccattgtagttgtccagg

SEQ ID NO: 679617 - DNA, 25 bp, Homo sapien
gaaagggaatcttacaccatgtgct

SEQ ID NO: 679618 - DNA, 25 bp, Homo sapien
tgaattggccatggagcataaagga

SEQ ID NO: 679619 - DNA, 25 bp, Homo sapien
aagcctagaaactcaccagttgctg

SEQ ID NO: 679620 - DNA, 25 bp, Homo sapien
tggcgcgatcaggtacaaattgctt

SEQ ID NO: 679621 - DNA, 25 bp, Homo sapien
gaaaacttagtaatatccaatggag

SEQ ID NO: 679622 - DNA, 25 bp, Homo sapien
taatactgtctgtagcatggcttca

SEQ ID NO: 679623 - DNA, 25 bp, Homo sapien
aatgcagaaagcaacaaaactgagc

SEQ ID NO: 679624 - DNA, 25 bp, Homo sapien
taaaagaccactcttaagggataca

SEQ ID NO: 679625 - DNA, 25 bp, Homo sapien
agggatacagaagtagaaaatgcag

SEQ ID NO: 679626 - DNA, 25 bp, Homo sapien
aaactgagcttcttggccaggcaag

SEQ ID NO: 679627 - DNA, 25 bp, Homo sapien
aaacacaacattttcctctggcagg

SEQ ID NO: 679628 - DNA, 25 bp, Homo sapien
cagtggacagtgacgaacagagatt

SEQ ID NO: 679629 - DNA, 25 bp, Homo sapien
gggtatgtacaaccgcaacatcagg

SEQ ID NO: 679630 - DNA, 25 bp, Homo sapien
tcattgtctgttagggaaatcacca

SEQ ID NO: 679631 - DNA, 25 bp, Homo sapien
taacctatacacaatgattaagtgc

SEQ ID NO: 679632 - DNA, 25 bp, Homo sapien
caaaggtgttttactcagtgttcta

SEQ ID NO: 679633 - DNA, 25 bp, Homo sapien
caatataatctatcaaaggtgtttt

SEQ ID NO: 679634 - DNA, 25 bp, Homo sapien
ccttgcccaatggatgtataaattt

SEQ ID NO: 679635 - DNA, 25 bp, Homo sapien
tttatccagtattgtgatgatcttg

SEQ ID NO: 679636 - DNA, 25 bp, Homo sapien
ctagagactcatcagcaacttggtg

SEQ ID NO: 679637 - DNA, 25 bp, Homo sapien
tgtctgtatttttgtggcccatgtc

SEQ ID NO: 679638 - DNA, 25 bp, Homo sapien
ggcccatgtcttctatgtggttgag

SEQ ID NO: 679639 - DNA, 25 bp, Homo sapien
ggtagataatatggggccctggctc

SEQ ID NO: 679640 - DNA, 25 bp, Homo sapien
gacagcggtagataatatggggccc

SEQ ID NO: 679641 - DNA, 25 bp, Homo sapien
cagatggacagcggtagataatatg

SEQ ID NO: 679642 - DNA, 25 bp, Homo sapien
tgatgtgctggagagcagatggaca

SEQ ID NO: 679643 - DNA, 25 bp, Homo sapien
tgagggttttctacagaaactggta

SEQ ID NO: 679644 - DNA, 25 bp, Homo sapien
tagagatgctagacagacacaagat

SEQ ID NO: 679645 - DNA, 25 bp, Homo sapien
aggagacaccccgtgacaccaagag

SEQ ID NO: 679646 - DNA, 25 bp, Homo sapien
cctcctttgcgattggctcttagag

SEQ ID NO: 679647 - DNA, 25 bp, Homo sapien
gttcgagacctgtctggccgtgtct

SEQ ID NO: 679648 - DNA, 25 bp, Homo sapien
agttctcttccgtcttagaccctat

SEQ ID NO: 679649 - DNA, 25 bp, Homo sapien
ttagaccctatgtgcacgaccttgg

SEQ ID NO: 679650 - DNA, 25 bp, Homo sapien
ccgtcttagaccctatgtgcacgac

SEQ ID NO: 679651 - DNA, 25 bp, Homo sapien
gggatgaggcgctcccggtactaac

SEQ ID NO: 679652 - DNA, 25 bp, Homo sapien
tctgtatccccacgaggtgaggcgc

SEQ ID NO: 679653 - DNA, 25 bp, Homo sapien
caaggtcttcggcttccctagggag

SEQ ID NO: 679654 - DNA, 25 bp, Homo sapien
tactaacgagcgctagggagtgaga

SEQ ID NO: 679655 - DNA, 25 bp, Homo sapien
tggtgtttgtgaaaatcctataaga

SEQ ID NO: 679656 - DNA, 25 bp, Homo sapien
gttcttggtgtttgtgaaaatccta

SEQ ID NO: 679657 - DNA, 25 bp, Homo sapien
tgtgaaaatcctataagatttaaag

SEQ ID NO: 679658 - DNA, 25 bp, Homo sapien
tgaaaatcctataagatttaaagaa

SEQ ID NO: 679659 - DNA, 25 bp, Homo sapien
agcaattctccgagtacactgggat

SEQ ID NO: 679660 - DNA, 25 bp, Homo sapien
taaaacctgttaatcgcatttagaa

SEQ ID NO: 679661 - DNA, 25 bp, Homo sapien
taataagagcatataaagatagttt

SEQ ID NO: 679662 - DNA, 25 bp, Homo sapien
ctgggcctggccagtaaaacctgtt

SEQ ID NO: 679663 - DNA, 25 bp, Homo sapien
tgaagaattccagcgatacctgcct

SEQ ID NO: 679664 - DNA, 25 bp, Homo sapien
aatcccagatttgtgataatgccgc

SEQ ID NO: 679665 - DNA, 25 bp, Homo sapien
taatgccgcactctatgcacaaaag

SEQ ID NO: 679666 - DNA, 25 bp, Homo sapien
gaacacgctgacaagtatctgtgaa

SEQ ID NO: 679667 - DNA, 25 bp, Homo sapien
ggttccatcaatggtgagcaccagc

SEQ ID NO: 679668 - DNA, 25 bp, Homo sapien
tctccaagggtaccttcaggcagcc

SEQ ID NO: 679669 - DNA, 25 bp, Homo sapien
tctaatgggctaaacccagatggtt

SEQ ID NO: 679670 - DNA, 25 bp, Homo sapien
tgtattggcgcaccaagatctccaa

SEQ ID NO: 679671 - DNA, 25 bp, Homo sapien
tagtgttttccataaccttctgatc

SEQ ID NO: 679672 - DNA, 25 bp, Homo sapien
caatcataggctggctttacagtga

SEQ ID NO: 679673 - DNA, 25 bp, Homo sapien
tccataaccttctgatcactttcag

SEQ ID NO: 679674 - DNA, 25 bp, Homo sapien
cagttattccggcagtacaatcata

SEQ ID NO: 679675 - DNA, 25 bp, Homo sapien
ctggacggggcacaagtccctacat

SEQ ID NO: 679676 - DNA, 25 bp, Homo sapien
ctacatccaggtacccaacatgcct

SEQ ID NO: 679677 - DNA, 25 bp, Homo sapien
cagtgctcagttatggtgagagatg

SEQ ID NO: 679678 - DNA, 25 bp, Homo sapien
ccctgggaagtgtccggcagtctcc

SEQ ID NO: 679679 - DNA, 25 bp, Homo sapien
gatcttcagacttttgcccagatgg

SEQ ID NO: 679680 - DNA, 25 bp, Homo sapien
tagtagctgtttattgatcaatggt

SEQ ID NO: 679681 - DNA, 25 bp, Homo sapien
gggaccaacctagcagtagtggcat

SEQ ID NO: 679682 - DNA, 25 bp, Homo sapien
gcccagatggaatcacaagcattac

SEQ ID NO: 679683 - DNA, 25 bp, Homo sapien
taccatttattgatgacaaacactt

SEQ ID NO: 679684 - DNA, 25 bp, Homo sapien
gtacttaactcgcagggctaccagg

SEQ ID NO: 679685 - DNA, 25 bp, Homo sapien
acgcagagcctcagtgcacacactt

SEQ ID NO: 679686 - DNA, 25 bp, Homo sapien
aattccagcgtaaacaatgaatgga

SEQ ID NO: 679687 - DNA, 25 bp, Homo sapien
gctaccaggctttccatacggacca

SEQ ID NO: 679688 - DNA, 25 bp, Homo sapien
aaagaccaaacacggaggtgcccag

SEQ ID NO: 679689 - DNA, 25 bp, Homo sapien
tttcagctgaaccagagggcacaca

SEQ ID NO: 679690 - DNA, 25 bp, Homo sapien
tgctattgcgtagggaccgccaggt

SEQ ID NO: 679691 - DNA, 25 bp, Homo sapien
tcccaatgtgtctgagtgagccagc

SEQ ID NO: 679692 - DNA, 25 bp, Homo sapien
agcgccttccccttcatcagtgcac

SEQ ID NO: 679693 - DNA, 25 bp, Homo sapien
catcatcagcgccttccccttcatc

SEQ ID NO: 679694 - DNA, 25 bp, Homo sapien
catcagcgccttccccttcatcagt

SEQ ID NO: 679695 - DNA, 25 bp, Homo sapien
cagcgccttccccttcatcagtgca

SEQ ID NO: 679696 - DNA, 25 bp, Homo sapien
tgttggtccaactcagacagcaact

SEQ ID NO: 679697 - DNA, 25 bp, Homo sapien
acagacattggtccgtttcctgttc

SEQ ID NO: 679698 - DNA, 25 bp, Homo sapien
tggtccaactcagacagcaacttta

SEQ ID NO: 679699 - DNA, 25 bp, Homo sapien
ttgttggtccaactcagacagcaac

SEQ ID NO: 679700 - DNA, 25 bp, Homo sapien
acttcttcaactctggtactactaa

SEQ ID NO: 679701 - DNA, 25 bp, Homo sapien
aatacactggtcaggcaggcaagag

SEQ ID NO: 679702 - DNA, 25 bp, Homo sapien
taaccatgtggtaaccagactgtat

SEQ ID NO: 679703 - DNA, 25 bp, Homo sapien
ttgggaccacagcataatacactgg

SEQ ID NO: 679704 - DNA, 25 bp, Homo sapien
catatcatggcaggactccacatcc

SEQ ID NO: 679705 - DNA, 25 bp, Homo sapien
ctgagaggagcaattgataagagat

SEQ ID NO: 679706 - DNA, 25 bp, Homo sapien
catccttgccgataccatggctgat

SEQ ID NO: 679707 - DNA, 25 bp, Homo sapien
taccatggctgatcagaggtggctg

SEQ ID NO: 679708 - DNA, 25 bp, Homo sapien
tacaacaactctcgggctatcatgg

SEQ ID NO: 679709 - DNA, 25 bp, Homo sapien
gctatcatggcagttaccgtggcct

SEQ ID NO: 679710 - DNA, 25 bp, Homo sapien
ttctttaaaatggtctcggctgtgg

SEQ ID NO: 679711 - DNA, 25 bp, Homo sapien
ggagctgccctggtaaaatctttgg

SEQ ID NO: 679712 - DNA, 25 bp, Homo sapien
cttccatcccctggtttctttatgg

SEQ ID NO: 679713 - DNA, 25 bp, Homo sapien
catcccctggtttctttatgggtgt

SEQ ID NO: 679714 - DNA, 25 bp, Homo sapien
ccatcccctggtttctttatgggtg

SEQ ID NO: 679715 - DNA, 25 bp, Homo sapien
tggcctgtctctactgtcacactgt

SEQ ID NO: 679716 - DNA, 25 bp, Homo sapien
cacacctggccgtgaatttttcaac

SEQ ID NO: 679717 - DNA, 25 bp, Homo sapien
cctaaactttggatttggcctgtct

SEQ ID NO: 679718 - DNA, 25 bp, Homo sapien
tccacaattaacgaaagcctaacag

SEQ ID NO: 679719 - DNA, 25 bp, Homo sapien
cccagttccctagggtgaggcgaga

SEQ ID NO: 679720 - DNA, 25 bp, Homo sapien
cagcaggactccttgaactgtcagg

SEQ ID NO: 679721 - DNA, 25 bp, Homo sapien
ggcgagagaccatcttgcaatcaga

SEQ ID NO: 679722 - DNA, 25 bp, Homo sapien
gcccctctgagcacattatggtcca

SEQ ID NO: 679723 - DNA, 25 bp, Homo sapien
ctgcgcctgcgggactttgaaacca

SEQ ID NO: 679724 - DNA, 25 bp, Homo sapien
tccagcatgttctcggctgcattgc

SEQ ID NO: 679725 - DNA, 25 bp, Homo sapien
tcctctgacttgagtgcgggtttgg

SEQ ID NO: 679726 - DNA, 25 bp, Homo sapien
gttggtgcccgttccttctgcagtg

SEQ ID NO: 679727 - DNA, 25 bp, Homo sapien
ggagcgtgtactctggctccttctc

SEQ ID NO: 679728 - DNA, 25 bp, Homo sapien
tgtgaggagcgtgtactctggctcc

SEQ ID NO: 679729 - DNA, 25 bp, Homo sapien
ctgcggcgcgggaggcctcgctctg

SEQ ID NO: 679730 - DNA, 25 bp, Homo sapien
tcacaaactccctgcggcgcgggag

SEQ ID NO: 679731 - DNA, 25 bp, Homo sapien
taatcggattgatcccctggccata

SEQ ID NO: 679732 - DNA, 25 bp, Homo sapien
cggattgatcccctggccatattct

SEQ ID NO: 679733 - DNA, 25 bp, Homo sapien
tcggctaatcggattgatcccctgg

SEQ ID NO: 679734 - DNA, 25 bp, Homo sapien
tgggccagtcggctaatcggattga

SEQ ID NO: 679735 - DNA, 25 bp, Homo sapien
tcaagaacagctatggcggcatttt

SEQ ID NO: 679736 - DNA, 25 bp, Homo sapien
tctttttgattctaggctttactcg

SEQ ID NO: 679737 - DNA, 25 bp, Homo sapien
caggcaggggcggtaacttcttcag

SEQ ID NO: 679738 - DNA, 25 bp, Homo sapien
ggctttactcgttcaactgcaggca

SEQ ID NO: 679739 - DNA, 25 bp, Homo sapien
tggggtgggccactctcccgggcca

SEQ ID NO: 679740 - DNA, 25 bp, Homo sapien
aaccaaggacaagacctactaaatg

SEQ ID NO: 679741 - DNA, 25 bp, Homo sapien
tactaaatgaaaggaagcggggatc

SEQ ID NO: 679742 - DNA, 25 bp, Homo sapien
ttaaaagctccaaggcacactggct

SEQ ID NO: 679743 - DNA, 25 bp, Homo sapien
taaaagctccaaggcacactggctg

SEQ ID NO: 679744 - DNA, 25 bp, Homo sapien
taaatactggttgctatgtggccac

SEQ ID NO: 679745 - DNA, 25 bp, Homo sapien
gaagctagcccagcaaagtccagaa

SEQ ID NO: 679746 - DNA, 25 bp, Homo sapien
tgctcttgagtctggtgagtcccaa

SEQ ID NO: 679747 - DNA, 25 bp, Homo sapien
tgagtcccaaacagtcaggcatgaa

SEQ ID NO: 679748 - DNA, 25 bp, Homo sapien
tgtcacccagggtggaacgcagtgg

SEQ ID NO: 679749 - DNA, 25 bp, Homo sapien
ggaacgcagtggcgcgatcttggct

SEQ ID NO: 679750 - DNA, 25 bp, Homo sapien
tcacccagggtggaacgcagtggcg

SEQ ID NO: 679751 - DNA, 25 bp, Homo sapien
acccagggtggaacgcagtggcgcg

SEQ ID NO: 679752 - DNA, 25 bp, Homo sapien
tgagcctccaaaatggatgcactct

SEQ ID NO: 679753 - DNA, 25 bp, Homo sapien
taggcacccgtggactgattttaaa

SEQ ID NO: 679754 - DNA, 25 bp, Homo sapien
taagtgaaagttatattcattgtcc

SEQ ID NO: 679755 - DNA, 25 bp, Homo sapien
cctgtcctcaggttagactttggag

SEQ ID NO: 679756 - DNA, 25 bp, Homo sapien
tgaacacagagttgagagccagatc

SEQ ID NO: 679757 - DNA, 25 bp, Homo sapien
aaaggaagcaatctgaccccaaatc

SEQ ID NO: 679758 - DNA, 25 bp, Homo sapien
caactctgcacatgaggtgacccgg

SEQ ID NO: 679759 - DNA, 25 bp, Homo sapien
ctctgggtagcagcaagagtgagca

SEQ ID NO: 679760 - DNA, 25 bp, Homo sapien
cttcttcggattctcttccattcac

SEQ ID NO: 679761 - DNA, 25 bp, Homo sapien
caagttccgtttaagtgcaatctca

SEQ ID NO: 679762 - DNA, 25 bp, Homo sapien
ctcgaaattcacaggcaagttccgt

SEQ ID NO: 679763 - DNA, 25 bp, Homo sapien
gtgcaatctcaaacacttgacttat

SEQ ID NO: 679764 - DNA, 25 bp, Homo sapien
cagcccacctgtagcgatgtcagat

SEQ ID NO: 679765 - DNA, 25 bp, Homo sapien
tgttggcggccaaacataaaagata

SEQ ID NO: 679766 - DNA, 25 bp, Homo sapien
caggttctaacttaacaggacttca

SEQ ID NO: 679767 - DNA, 25 bp, Homo sapien
gacttcagattcttcgtgtactggc

SEQ ID NO: 679768 - DNA, 25 bp, Homo sapien
gaacatgtctacaacagccgctgcc

SEQ ID NO: 679769 - DNA, 25 bp, Homo sapien
agaacatgtctacaacagccgctgc

SEQ ID NO: 679770 - DNA, 25 bp, Homo sapien
acatgtctacaacagccgctgccct

SEQ ID NO: 679771 - DNA, 25 bp, Homo sapien
atgtctacaacagccgctgccctca

SEQ ID NO: 679772 - DNA, 25 bp, Homo sapien
caggatcctcaacgctttggcagca

SEQ ID NO: 679773 - DNA, 25 bp, Homo sapien
ccacagaaagttccacttgataaag

SEQ ID NO: 679774 - DNA, 25 bp, Homo sapien
gcagcagcatcgtgtttcgcagcct

SEQ ID NO: 679775 - DNA, 25 bp, Homo sapien
gccattaaattgctgtcctcccaca

SEQ ID NO: 679776 - DNA, 25 bp, Homo sapien
gggataagcacctcctctcatgttg

SEQ ID NO: 679777 - DNA, 25 bp, Homo sapien
gggtcaacaggcttatacattggtt

SEQ ID NO: 679778 - DNA, 25 bp, Homo sapien
catgttgtagttataggtggactgc

SEQ ID NO: 679779 - DNA, 25 bp, Homo sapien
catccgagagtaagggtcaacaggc

SEQ ID NO: 679780 - DNA, 25 bp, Homo sapien
catttagttctacagtaggggttat

SEQ ID NO: 679781 - DNA, 25 bp, Homo sapien
gcacagtgcatttagttctacagta

SEQ ID NO: 679782 - DNA, 25 bp, Homo sapien
cagtgcatttagttctacagtaggg

SEQ ID NO: 679783 - DNA, 25 bp, Homo sapien
agtgcatttagttctacagtagggg

SEQ ID NO: 679784 - DNA, 25 bp, Homo sapien
ttgccttcatagctgatttttcttg

SEQ ID NO: 679785 - DNA, 25 bp, Homo sapien
gctgatttttcttgtaggtcttact

SEQ ID NO: 679786 - DNA, 25 bp, Homo sapien
tacttttaggattccctcagtgcac

SEQ ID NO: 679787 - DNA, 25 bp, Homo sapien
taggattccctcagtgcacggcttc

SEQ ID NO: 679788 - DNA, 25 bp, Homo sapien
tgttctgcagtccatcaggctactc

SEQ ID NO: 679789 - DNA, 25 bp, Homo sapien
tggcagaagcctgcaacgcagtaca

SEQ ID NO: 679790 - DNA, 25 bp, Homo sapien
tacaatccctgggtcatcttggtga

SEQ ID NO: 679791 - DNA, 25 bp, Homo sapien
catgaactcaaaaccctggcaggca

SEQ ID NO: 679792 - DNA, 25 bp, Homo sapien
gggaatataggcacacaccgctaca

SEQ ID NO: 679793 - DNA, 25 bp, Homo sapien
ctgggaatataggcacacaccgcta

SEQ ID NO: 679794 - DNA, 25 bp, Homo sapien
ggaatataggcacacaccgctacac

SEQ ID NO: 679795 - DNA, 25 bp, Homo sapien
atataggcacacaccgctacacctg

SEQ ID NO: 679796 - DNA, 25 bp, Homo sapien
tgtaatagatgcagagggtaaagca

SEQ ID NO: 679797 - DNA, 25 bp, Homo sapien
taatagatgcagagggtaaagcaga

SEQ ID NO: 679798 - DNA, 25 bp, Homo sapien
tggatgtaatagatgcagagggtaa

SEQ ID NO: 679799 - DNA, 25 bp, Homo sapien
actggtggatgtaatagatgcagag

SEQ ID NO: 679800 - DNA, 25 bp, Homo sapien
tagaaggaatactcatcaaaggctg

SEQ ID NO: 679801 - DNA, 25 bp, Homo sapien
tcagtatttggctccctgagagagc

SEQ ID NO: 679802 - DNA, 25 bp, Homo sapien
ggttcttgttcagtatttggctccc

SEQ ID NO: 679803 - DNA, 25 bp, Homo sapien
gatgggttctgaacttgcacttgaa

SEQ ID NO: 679804 - DNA, 25 bp, Homo sapien
acagctttcagtgcaggttaattca

SEQ ID NO: 679805 - DNA, 25 bp, Homo sapien
tatacagatacaaaggagcactcct

SEQ ID NO: 679806 - DNA, 25 bp, Homo sapien
gagaagccggaacagacatcacagt

SEQ ID NO: 679807 - DNA, 25 bp, Homo sapien
tagaccatactgagcacagtccgag

SEQ ID NO: 679808 - DNA, 25 bp, Homo sapien
tctgggcacatgagcgctacgaaag

SEQ ID NO: 679809 - DNA, 25 bp, Homo sapien
ggaagcagtattaacccacatagtg

SEQ ID NO: 679810 - DNA, 25 bp, Homo sapien
ccaagaagcttattgagccagtcat

SEQ ID NO: 679811 - DNA, 25 bp, Homo sapien
cacaagctgctagtggtcaacgaag

SEQ ID NO: 679812 - DNA, 25 bp, Homo sapien
tgcattgccctgacaaaagaccaga

SEQ ID NO: 679813 - DNA, 25 bp, Homo sapien
aaagagggcgttccaggaacaatgt

SEQ ID NO: 679814 - DNA, 25 bp, Homo sapien
aaaagagggcgttccaggaacaatg

SEQ ID NO: 679815 - DNA, 25 bp, Homo sapien
aagagggcgttccaggaacaatgtt

SEQ ID NO: 679816 - DNA, 25 bp, Homo sapien
gagggcgttccaggaacaatgttgt

SEQ ID NO: 679817 - DNA, 25 bp, Homo sapien
cagttctgagaggttaagtggttaa

SEQ ID NO: 679818 - DNA, 25 bp, Homo sapien
tctgagaggttaagtggttaataaa

SEQ ID NO: 679819 - DNA, 25 bp, Homo sapien
gttctgagaggttaagtggttaata

SEQ ID NO: 679820 - DNA, 25 bp, Homo sapien
tcagttctgagaggttaagtggtta

SEQ ID NO: 679821 - DNA, 25 bp, Homo sapien
gcctggcaaaagagcgagactccgt

SEQ ID NO: 679822 - DNA, 25 bp, Homo sapien
ggaggttgcagtgactcaggatcgc

SEQ ID NO: 679823 - DNA, 25 bp, Homo sapien
agcctggcaaaagagcgagactccg

SEQ ID NO: 679824 - DNA, 25 bp, Homo sapien
gttgcagtgactcaggatcgcgcca

SEQ ID NO: 679825 - DNA, 25 bp, Homo sapien
ctcagcttatcgggaggctgaagtg

SEQ ID NO: 679826 - DNA, 25 bp, Homo sapien
gcctgggcgacaagagcaaaactcc

SEQ ID NO: 679827 - DNA, 25 bp, Homo sapien
tgggaaaatcgcttgaacctgggag

SEQ ID NO: 679828 - DNA, 25 bp, Homo sapien
tcgcttgaacctgggaggtggaggt

SEQ ID NO: 679829 - DNA, 25 bp, Homo sapien
caggttcaagcaactctcctgcctc

SEQ ID NO: 679830 - DNA, 25 bp, Homo sapien
gcaacctctgcttcccaggttcaag

SEQ ID NO: 679831 - DNA, 25 bp, Homo sapien
tgcaatggcacgataaccgctcact

SEQ ID NO: 679832 - DNA, 25 bp, Homo sapien
cagggtttcgccatgctggccaggc

SEQ ID NO: 679833 - DNA, 25 bp, Homo sapien
tctggctgaaacctaaaagagagca

SEQ ID NO: 679834 - DNA, 25 bp, Homo sapien
gagaacgtgtaaactccacagacag

SEQ ID NO: 679835 - DNA, 25 bp, Homo sapien
tcaagagtacccagagaaaacccat

SEQ ID NO: 679836 - DNA, 25 bp, Homo sapien
tcctttcccagatactaaattggcg

SEQ ID NO: 679837 - DNA, 25 bp, Homo sapien
tcaaagctaagtgagtgactaacac

SEQ ID NO: 679838 - DNA, 25 bp, Homo sapien
caaaaccgaccttggctatgagtta

SEQ ID NO: 679839 - DNA, 25 bp, Homo sapien
tcaaaatcgctaatgttgtgacaca

SEQ ID NO: 679840 - DNA, 25 bp, Homo sapien
tcgagtttcgcatgttttccagaat

SEQ ID NO: 679841 - DNA, 25 bp, Homo sapien
accacaccaggctcaagagatagtc

SEQ ID NO: 679842 - DNA, 25 bp, Homo sapien
ctgtcgcccaggcaacctccacctc

SEQ ID NO: 679843 - DNA, 25 bp, Homo sapien
caggctcaagagatagtctccatct

SEQ ID NO: 679844 - DNA, 25 bp, Homo sapien
caccaggctcaagagatagtctcca

SEQ ID NO: 679845 - DNA, 25 bp, Homo sapien
agacgggagaatcttttgaaccagg

SEQ ID NO: 679846 - DNA, 25 bp, Homo sapien
gaatcttttgaaccagggtggcaga

SEQ ID NO: 679847 - DNA, 25 bp, Homo sapien
ctacaaaaattaacacggcgcggtg

SEQ ID NO: 679848 - DNA, 25 bp, Homo sapien
tgagacgggagaatcttttgaacca

SEQ ID NO: 679849 - DNA, 25 bp, Homo sapien
gaggcggtcaaaggaagcgggagcc

SEQ ID NO: 679850 - DNA, 25 bp, Homo sapien
ggcgcaaacgctgaagagccgctca

SEQ ID NO: 679851 - DNA, 25 bp, Homo sapien
agcgggagccgagagagacgcggca

SEQ ID NO: 679852 - DNA, 25 bp, Homo sapien
agggaagaggcggagtggccgtgga

SEQ ID NO: 679853 - DNA, 25 bp, Homo sapien
tcccagtctattccttttagacttg

SEQ ID NO: 679854 - DNA, 25 bp, Homo sapien
gttgagatcgatttcataggaaggt

SEQ ID NO: 679855 - DNA, 25 bp, Homo sapien
aaaagaatgacatgggacgtggcag

SEQ ID NO: 679856 - DNA, 25 bp, Homo sapien
tcctgagcatagctaatgatctggg

SEQ ID NO: 679857 - DNA, 25 bp, Homo sapien
gagatgtcatcctcaaattccggga

SEQ ID NO: 679858 - DNA, 25 bp, Homo sapien
gagaaagatgtgtatgcagttctgc

SEQ ID NO: 679859 - DNA, 25 bp, Homo sapien
ttctgcagctagaggcggaggaaaa

SEQ ID NO: 679860 - DNA, 25 bp, Homo sapien
catcagttacacagtattagtagtc

SEQ ID NO: 679861 - DNA, 25 bp, Homo sapien
tcagtaagcaagctgctgcatccct

SEQ ID NO: 679862 - DNA, 25 bp, Homo sapien
catttgcagcccgtggcttcctgtg

SEQ ID NO: 679863 - DNA, 25 bp, Homo sapien
tagatacgggtttcacggcaggcat

SEQ ID NO: 679864 - DNA, 25 bp, Homo sapien
tgcgaggcgggatcttgttcacaag

SEQ ID NO: 679865 - DNA, 25 bp, Homo sapien
atcaatacagcaaagcggctcctgg

SEQ ID NO: 679866 - DNA, 25 bp, Homo sapien
aggaggcagtggtccaagagcccga

SEQ ID NO: 679867 - DNA, 25 bp, Homo sapien
aggcagtggtccaagagcccgagag

SEQ ID NO: 679868 - DNA, 25 bp, Homo sapien
ggaaggaggcagtggtccaagagcc

SEQ ID NO: 679869 - DNA, 25 bp, Homo sapien
aagctctgcaggaatttgacttggc

SEQ ID NO: 679870 - DNA, 25 bp, Homo sapien
ttcttctcatcccagttgccaaagc

SEQ ID NO: 679871 - DNA, 25 bp, Homo sapien
gcacttcttatcgtaagcttaaaaa

SEQ ID NO: 679872 - DNA, 25 bp, Homo sapien
tcatccctgaaatcttatgctttct

SEQ ID NO: 679873 - DNA, 25 bp, Homo sapien
tgaagaactcaccaacacaagcaag

SEQ ID NO: 679874 - DNA, 25 bp, Homo sapien
tcgagctgggtaggattttaagtca

SEQ ID NO: 679875 - DNA, 25 bp, Homo sapien
gaaggccctgaaacagtatcgagct

SEQ ID NO: 679876 - DNA, 25 bp, Homo sapien
gaaaatagtctttggatgccagagt

SEQ ID NO: 679877 - DNA, 25 bp, Homo sapien
aaacagttgggcttgccccaccaga

SEQ ID NO: 679878 - DNA, 25 bp, Homo sapien
tatatacctaagaagggcctcttcc

SEQ ID NO: 679879 - DNA, 25 bp, Homo sapien
taaaggcttagaacttagggcctga

SEQ ID NO: 679880 - DNA, 25 bp, Homo sapien
tcaggtggaaacacataaaggctta

SEQ ID NO: 679881 - DNA, 25 bp, Homo sapien
gacagaaggagccttgacaccataa

SEQ ID NO: 679882 - DNA, 25 bp, Homo sapien
tagttacttgctgcaaaaaccagag

SEQ ID NO: 679883 - DNA, 25 bp, Homo sapien
taaattagttacttgctgcaaaaac

SEQ ID NO: 679884 - DNA, 25 bp, Homo sapien
aggagccttgacaccataaattagt

SEQ ID NO: 679885 - DNA, 25 bp, Homo sapien
gcatacataggaaagggacacttag

SEQ ID NO: 679886 - DNA, 25 bp, Homo sapien
cacttagaaaggacctgagatacct

SEQ ID NO: 679887 - DNA, 25 bp, Homo sapien
gctttataagctaaagtgcatagta

SEQ ID NO: 679888 - DNA, 25 bp, Homo sapien
taattggctttataagctaaagtgc

SEQ ID NO: 679889 - DNA, 25 bp, Homo sapien
tagggcctggcaattagaatcggtc

SEQ ID NO: 679890 - DNA, 25 bp, Homo sapien
gaatcggtctgcatcaatgagctca

SEQ ID NO: 679891 - DNA, 25 bp, Homo sapien
gataaagtgcttactctagcgcagg

SEQ ID NO: 679892 - DNA, 25 bp, Homo sapien
tggcatgctagctctacccagggaa

SEQ ID NO: 679893 - DNA, 25 bp, Homo sapien
catcaggttgttggccgtgtcagac

SEQ ID NO: 679894 - DNA, 25 bp, Homo sapien
tatggcactgacaatctgcactcgc

SEQ ID NO: 679895 - DNA, 25 bp, Homo sapien
tccagagtatgatttgtgccaccaa

SEQ ID NO: 679896 - DNA, 25 bp, Homo sapien
cagtgaccacgaggataacctatgg

SEQ ID NO: 679897 - DNA, 25 bp, Homo sapien
tcttgtagcgggtcagaaggttcac

SEQ ID NO: 679898 - DNA, 25 bp, Homo sapien
cttcttctctgctatcttgtagcgg

SEQ ID NO: 679899 - DNA, 25 bp, Homo sapien
tgctatcttgtagcgggtcagaagg

SEQ ID NO: 679900 - DNA, 25 bp, Homo sapien
tctctgctatcttgtagcgggtcag

SEQ ID NO: 679901 - DNA, 25 bp, Homo sapien
tcaggcacggaacaagggaccattt

SEQ ID NO: 679902 - DNA, 25 bp, Homo sapien
tgactagcagaccaccatacaggag

SEQ ID NO: 679903 - DNA, 25 bp, Homo sapien
cattttaccggttgactgtgcccac

SEQ ID NO: 679904 - DNA, 25 bp, Homo sapien
catgtagcggtctagggcttgcacc

SEQ ID NO: 679905 - DNA, 25 bp, Homo sapien
tagcctttttaggttgctgacacca

SEQ ID NO: 679906 - DNA, 25 bp, Homo sapien
gctgacaccatccaagaaagatcgg

SEQ ID NO: 679907 - DNA, 25 bp, Homo sapien
gcgcctggccgctgaaaagcttttt

SEQ ID NO: 679908 - DNA, 25 bp, Homo sapien
ggcacggtcttgttggctcaccaca

SEQ ID NO: 679909 - DNA, 25 bp, Homo sapien
ttctccagatcctggtaaatgtggg

SEQ ID NO: 679910 - DNA, 25 bp, Homo sapien
aacagatggatgattctccagatcc

SEQ ID NO: 679911 - DNA, 25 bp, Homo sapien
tcaaaaggcgggcaatttcagggca

SEQ ID NO: 679912 - DNA, 25 bp, Homo sapien
cgggcaatttcagggcacatacggt

SEQ ID NO: 679913 - DNA, 25 bp, Homo sapien
acacatgcatgtcattagaaacatg

SEQ ID NO: 679914 - DNA, 25 bp, Homo sapien
gcacacacggacaatttctttaaag

SEQ ID NO: 679915 - DNA, 25 bp, Homo sapien
tctttaaagataaggttgctgttag

SEQ ID NO: 679916 - DNA, 25 bp, Homo sapien
cagttgtgatggcttgtatctgtaa

SEQ ID NO: 679917 - DNA, 25 bp, Homo sapien
caaaaactcaacacggtgatcttgt

SEQ ID NO: 679918 - DNA, 25 bp, Homo sapien
tgggcatttggtaacaacagaggcc

SEQ ID NO: 679919 - DNA, 25 bp, Homo sapien
tttatatgagacctcttttgctggc

SEQ ID NO: 679920 - DNA, 25 bp, Homo sapien
acagaatctagctctattgccaggc

SEQ ID NO: 679921 - DNA, 25 bp, Homo sapien
tcactagccgttcaaaaagggacac

SEQ ID NO: 679922 - DNA, 25 bp, Homo sapien
caaagggaatgtttactttcactag

SEQ ID NO: 679923 - DNA, 25 bp, Homo sapien
ctggtaattcagacggacaaaggga

SEQ ID NO: 679924 - DNA, 25 bp, Homo sapien
gaagttcttggccagatcatacacg

SEQ ID NO: 679925 - DNA, 25 bp, Homo sapien
tctgtaggatctggcggtatttggc

SEQ ID NO: 679926 - DNA, 25 bp, Homo sapien
gctggcaagctttgctcaatgtggc

SEQ ID NO: 679927 - DNA, 25 bp, Homo sapien
gctggtggtccccaatcaaaatgag

SEQ ID NO: 679928 - DNA, 25 bp, Homo sapien
gctcaatgtggcaatggtatgggcc

SEQ ID NO: 679929 - DNA, 25 bp, Homo sapien
gaagtgaacttagatgcaacaggca

SEQ ID NO: 679930 - DNA, 25 bp, Homo sapien
tgtccttagataatctggcaccaga

SEQ ID NO: 679931 - DNA, 25 bp, Homo sapien
ctgcgcctggcgaaagtgagtgaat

SEQ ID NO: 679932 - DNA, 25 bp, Homo sapien
gttctcaaaatatgggtgctttcag

SEQ ID NO: 679933 - DNA, 25 bp, Homo sapien
tgtcagcctggtacaactgtagcca

SEQ ID NO: 679934 - DNA, 25 bp, Homo sapien
tactggcgttcatagctgaggatct

SEQ ID NO: 679935 - DNA, 25 bp, Homo sapien
ctttctgctgatgtgcggtactggc

SEQ ID NO: 679936 - DNA, 25 bp, Homo sapien
tacaacctgggcatctttaagaatg

SEQ ID NO: 679937 - DNA, 25 bp, Homo sapien
tcagtggtggtgctcaatcaataat

SEQ ID NO: 679938 - DNA, 25 bp, Homo sapien
aagaggaactccctacatgggttgg

SEQ ID NO: 679939 - DNA, 25 bp, Homo sapien
gatagactccataggctccacgaag

SEQ ID NO: 679940 - DNA, 25 bp, Homo sapien
catgggttggctagatgtggaacac

SEQ ID NO: 679941 - DNA, 25 bp, Homo sapien
tataaagctgccagcgagaactgag

SEQ ID NO: 679942 - DNA, 25 bp, Homo sapien
catggtgttcagtttgcgaagctca

SEQ ID NO: 679943 - DNA, 25 bp, Homo sapien
gctgccaaacatcctcgatctcgtt

SEQ ID NO: 679944 - DNA, 25 bp, Homo sapien
tggcctcggctgcagtcatggtgtt

SEQ ID NO: 679945 - DNA, 25 bp, Homo sapien
acatcaataccaggcagggtactgt

SEQ ID NO: 679946 - DNA, 25 bp, Homo sapien
ctgcagacatcaataccaggcaggg

SEQ ID NO: 679947 - DNA, 25 bp, Homo sapien
gcagacatcaataccaggcagggta

SEQ ID NO: 679948 - DNA, 25 bp, Homo sapien
gacatcaataccaggcagggtactg

SEQ ID NO: 679949 - DNA, 25 bp, Homo sapien
ctgtagagtggctaaacaaggactc

SEQ ID NO: 679950 - DNA, 25 bp, Homo sapien
ggtcacagcacgtaagaaaaagggc

SEQ ID NO: 679951 - DNA, 25 bp, Homo sapien
tgtcaggagtaaatacgtggaaagc

SEQ ID NO: 679952 - DNA, 25 bp, Homo sapien
tataggattgttggcttgtcaggag

SEQ ID NO: 679953 - DNA, 25 bp, Homo sapien
ccagtgccacaatggtctagcctca

SEQ ID NO: 679954 - DNA, 25 bp, Homo sapien
tggtctagcctcatggccagaagca

SEQ ID NO: 679955 - DNA, 25 bp, Homo sapien
cagaagcattttagccaactcctgg

SEQ ID NO: 679956 - DNA, 25 bp, Homo sapien
aatcacccggtctgcttgaatcagg

SEQ ID NO: 679957 - DNA, 25 bp, Homo sapien
ctatcagcgaactctcctcctcccc

SEQ ID NO: 679958 - DNA, 25 bp, Homo sapien
tctgagttgacttaattgatccatc

SEQ ID NO: 679959 - DNA, 25 bp, Homo sapien
gttgacttaattgatccatccattg

SEQ ID NO: 679960 - DNA, 25 bp, Homo sapien
gagttgacttaattgatccatccat

SEQ ID NO: 679961 - DNA, 25 bp, Homo sapien
cattatctgagttgacttaattgat

SEQ ID NO: 679962 - DNA, 25 bp, Homo sapien
ggagaaacactttgcgtgaaagaac

SEQ ID NO: 679963 - DNA, 25 bp, Homo sapien
aagacctagccactccagcatcatg

SEQ ID NO: 679964 - DNA, 25 bp, Homo sapien
catcatggaatgcttccagtgctgg

SEQ ID NO: 679965 - DNA, 25 bp, Homo sapien
tgaaagaaccgacaccaagacctag

SEQ ID NO: 679966 - DNA, 25 bp, Homo sapien
ttctgcaggtactgttcccgtagga

SEQ ID NO: 679967 - DNA, 25 bp, Homo sapien
cacgcatggtgcactccagggtctt

SEQ ID NO: 679968 - DNA, 25 bp, Homo sapien
gttcccgtaggacaccacgcatggt

SEQ ID NO: 679969 - DNA, 25 bp, Homo sapien
ggtccattcatgagactttcccagt

SEQ ID NO: 679970 - DNA, 25 bp, Homo sapien
tcatgtaggcccttcggaggtgcat

SEQ ID NO: 679971 - DNA, 25 bp, Homo sapien
cacccgcacaatgctggtcttctga

SEQ ID NO: 679972 - DNA, 25 bp, Homo sapien
gctcccttagggtgaactgcttcag

SEQ ID NO: 679973 - DNA, 25 bp, Homo sapien
ggaattcccgcttgttcctcagctc

SEQ ID NO: 679974 - DNA, 25 bp, Homo sapien
ctcgttggttaggagggcctgaaca

SEQ ID NO: 679975 - DNA, 25 bp, Homo sapien
ggaacttctggaggctaatttgcca

SEQ ID NO: 679976 - DNA, 25 bp, Homo sapien
tgaacaatttttagacccacatagg

SEQ ID NO: 679977 - DNA, 25 bp, Homo sapien
tagtataacacacaaccaagatggg

SEQ ID NO: 679978 - DNA, 25 bp, Homo sapien
tctagaaacctagagtgaaggctcc

SEQ ID NO: 679979 - DNA, 25 bp, Homo sapien
ctccgtcccttgcttatcttacaaa

SEQ ID NO: 679980 - DNA, 25 bp, Homo sapien
tatcttacaaagcagatcttatgta

SEQ ID NO: 679981 - DNA, 25 bp, Homo sapien
attctagaaacctagagtgaaggct

SEQ ID NO: 679982 - DNA, 25 bp, Homo sapien
taatagccagttcccttgtgagagc

SEQ ID NO: 679983 - DNA, 25 bp, Homo sapien
tacggtggcaaaaagaaatgtctcg

SEQ ID NO: 679984 - DNA, 25 bp, Homo sapien
gacgaaatcttctcgcaggagccgg

SEQ ID NO: 679985 - DNA, 25 bp, Homo sapien
gaagcagagctggacaattcctcgg

SEQ ID NO: 679986 - DNA, 25 bp, Homo sapien
cctgggcctggcatccagatgaggt

SEQ ID NO: 679987 - DNA, 25 bp, Homo sapien
atccagatgaggtcttctctcctcc

SEQ ID NO: 679988 - DNA, 25 bp, Homo sapien
tctgtggttggtatgggaattcctg

SEQ ID NO: 679989 - DNA, 25 bp, Homo sapien
ctctgtggttggtatgggaattcct

SEQ ID NO: 679990 - DNA, 25 bp, Homo sapien
ctgagtcacctgaattccttcacgt

SEQ ID NO: 679991 - DNA, 25 bp, Homo sapien
gtctgagtcacctgaattccttcac

SEQ ID NO: 679992 - DNA, 25 bp, Homo sapien
tctgagtcacctgaattccttcacg

SEQ ID NO: 679993 - DNA, 25 bp, Homo sapien
ttgacactggtcctgtaagaggaag

SEQ ID NO: 679994 - DNA, 25 bp, Homo sapien
gtttcaataaccaggaggtttggca

SEQ ID NO: 679995 - DNA, 25 bp, Homo sapien
ctaccttggtgatttttgacactgg

SEQ ID NO: 679996 - DNA, 25 bp, Homo sapien
ctacgaggtgctgtttcctcaggac

SEQ ID NO: 679997 - DNA, 25 bp, Homo sapien
gcagaggcagtggcgggtcggcgcg

SEQ ID NO: 679998 - DNA, 25 bp, Homo sapien
ggttcgcggcgaggcaaggaagaat

SEQ ID NO: 679999 - DNA, 25 bp, Homo sapien
ggcgccggggttcgcggcgaggcaa

SEQ ID NO: 680000 - DNA, 25 bp, Homo sapien
ggcagtggcgggtcggcgcgggcgc

SEQ ID NO: 680001 - DNA, 25 bp, Homo sapien
cggcgccgcgcactttcggtttccg

SEQ ID NO: 680002 - DNA, 25 bp, Homo sapien
atgactgcgcccaaggcctttgcgg

SEQ ID NO: 680003 - DNA, 25 bp, Homo sapien
ggcttcggcccaggcaggtcggtgg

SEQ ID NO: 680004 - DNA, 25 bp, Homo sapien
cgtcgagcggtttggtgcgtgtgaa

SEQ ID NO: 680005 - DNA, 25 bp, Homo sapien
tcttctgcggtggtaagtctcttcc

SEQ ID NO: 680006 - DNA, 25 bp, Homo sapien
taataagttcgttcctgcctcaggg

SEQ ID NO: 680007 - DNA, 25 bp, Homo sapien
tgcctcagggattaacaggaattta

SEQ ID NO: 680008 - DNA, 25 bp, Homo sapien
gaagtgacctactcttccacatttg

SEQ ID NO: 680009 - DNA, 25 bp, Homo sapien
tccagataaggaacaaatgcgggtt

SEQ ID NO: 680010 - DNA, 25 bp, Homo sapien
tctatccccattggctagagtccaa

SEQ ID NO: 680011 - DNA, 25 bp, Homo sapien
agagtccaatctaaactagtcctga

SEQ ID NO: 680012 - DNA, 25 bp, Homo sapien
tgccacgagcgagggagacttttcc

SEQ ID NO: 680013 - DNA, 25 bp, Homo sapien
tgttgtagcgactgatttctccagc

SEQ ID NO: 680014 - DNA, 25 bp, Homo sapien
caaggggtgttgtagcgactgattt

SEQ ID NO: 680015 - DNA, 25 bp, Homo sapien
gagaagatagagcaggtctctccca

SEQ ID NO: 680016 - DNA, 25 bp, Homo sapien
tagcgactgatttctccagcccatg

SEQ ID NO: 680017 - DNA, 25 bp, Homo sapien
tttgctgacttgggtttttcctcca

SEQ ID NO: 680018 - DNA, 25 bp, Homo sapien
tggctgcagtcgctgtgtgaaacct

SEQ ID NO: 680019 - DNA, 25 bp, Homo sapien
tacaccggaggcgtgtcctgcagga

SEQ ID NO: 680020 - DNA, 25 bp, Homo sapien
caggtctcctaccatgtacaccgga

SEQ ID NO: 680021 - DNA, 25 bp, Homo sapien
tcctaccatgtacaccggaggcgtg

SEQ ID NO: 680022 - DNA, 25 bp, Homo sapien
gggctgtcttgtaagtgacttggat

SEQ ID NO: 680023 - DNA, 25 bp, Homo sapien
tagggctgtcttgtaagtgacttgg

SEQ ID NO: 680024 - DNA, 25 bp, Homo sapien
gctgtcttgtaagtgacttggatac

SEQ ID NO: 680025 - DNA, 25 bp, Homo sapien
ttagggctgtcttgtaagtgacttg

SEQ ID NO: 680026 - DNA, 25 bp, Homo sapien
cagaggtaccaagctcggtgtccct

SEQ ID NO: 680027 - DNA, 25 bp, Homo sapien
gcctgggatgtggtccgccctaact

SEQ ID NO: 680028 - DNA, 25 bp, Homo sapien
cgccctaactctgttttctccttga

SEQ ID NO: 680029 - DNA, 25 bp, Homo sapien
caagctcggtgtccctatggtgcca

SEQ ID NO: 680030 - DNA, 25 bp, Homo sapien
caggaaggactggcggagcaggggg

SEQ ID NO: 680031 - DNA, 25 bp, Homo sapien
aaggactggcggagcagggggatcc

SEQ ID NO: 680032 - DNA, 25 bp, Homo sapien
ggaaggactggcggagcagggggat

SEQ ID NO: 680033 - DNA, 25 bp, Homo sapien
gactggcggagcagggggatccaag

SEQ ID NO: 680034 - DNA, 25 bp, Homo sapien
cgtcagccgaattctttccacgggc

SEQ ID NO: 680035 - DNA, 25 bp, Homo sapien
gccgtcagccgaattctttccacgg

SEQ ID NO: 680036 - DNA, 25 bp, Homo sapien
tcagccgaattctttccacgggcag

SEQ ID NO: 680037 - DNA, 25 bp, Homo sapien
gagccgtcagccgaattctttccac

SEQ ID NO: 680038 - DNA, 25 bp, Homo sapien
tgtgagagcgggcgtgccaagggca

SEQ ID NO: 680039 - DNA, 25 bp, Homo sapien
ctgtgagagcgggcgtgccaagggc

SEQ ID NO: 680040 - DNA, 25 bp, Homo sapien
gtgagagcgggcgtgccaagggcat

SEQ ID NO: 680041 - DNA, 25 bp, Homo sapien
gcttgtgctcttgacgaaataggaa

SEQ ID NO: 680042 - DNA, 25 bp, Homo sapien
cagcctctaaatagtggtggtgcct

SEQ ID NO: 680043 - DNA, 25 bp, Homo sapien
tcctctcatggatcgtgtaaagtag

SEQ ID NO: 680044 - DNA, 25 bp, Homo sapien
catgattaggaaacgttggagctgg

SEQ ID NO: 680045 - DNA, 25 bp, Homo sapien
gggtactccctttggagtgtgttgc

SEQ ID NO: 680046 - DNA, 25 bp, Homo sapien
tactccctttggagtgtgttgctgg

SEQ ID NO: 680047 - DNA, 25 bp, Homo sapien
cttgggtactccctttggagtgtgt

SEQ ID NO: 680048 - DNA, 25 bp, Homo sapien
ccctttggagtgtgttgctggaact

SEQ ID NO: 680049 - DNA, 25 bp, Homo sapien
tacttccctgagtcccaatttcctc

SEQ ID NO: 680050 - DNA, 25 bp, Homo sapien
acttccctgagtcccaatttcctca

SEQ ID NO: 680051 - DNA, 25 bp, Homo sapien
cttccctgagtcccaatttcctcat

SEQ ID NO: 680052 - DNA, 25 bp, Homo sapien
ctcttcctttactggcggaagccat

SEQ ID NO: 680053 - DNA, 25 bp, Homo sapien
tacctcttcctttactggcggaagc

SEQ ID NO: 680054 - DNA, 25 bp, Homo sapien
tctccaggtacctcttcctttactg

SEQ ID NO: 680055 - DNA, 25 bp, Homo sapien
caggtacctcttcctttactggcgg

SEQ ID NO: 680056 - DNA, 25 bp, Homo sapien
aatgtgattggcttggcccctgtca

SEQ ID NO: 680057 - DNA, 25 bp, Homo sapien
ggcatactatcatgacggctttggg

SEQ ID NO: 680058 - DNA, 25 bp, Homo sapien
tgacgagagatgaataggacccacg

SEQ ID NO: 680059 - DNA, 25 bp, Homo sapien
gatcttcggctctaaaagctggagg

SEQ ID NO: 680060 - DNA, 25 bp, Homo sapien
caggaagtatgggaagatccctgca

SEQ ID NO: 680061 - DNA, 25 bp, Homo sapien
gaacccttggcttagtccattggaa

SEQ ID NO: 680062 - DNA, 25 bp, Homo sapien
cactcagctcaaccaagagggaggc

SEQ ID NO: 680063 - DNA, 25 bp, Homo sapien
cttgagggcatcctaatgggacgga

SEQ ID NO: 680064 - DNA, 25 bp, Homo sapien
gagccatttgctattgcctgggaag

SEQ ID NO: 680065 - DNA, 25 bp, Homo sapien
taaaatgttccaagacggagccgga

SEQ ID NO: 680066 - DNA, 25 bp, Homo sapien
aacaagcccttttggaatggagcca

SEQ ID NO: 680067 - DNA, 25 bp, Homo sapien
tcccaatgtggtgcctggtaggcca

SEQ ID NO: 680068 - DNA, 25 bp, Homo sapien
tagaaattttcggagaacttgcata

SEQ ID NO: 680069 - DNA, 25 bp, Homo sapien
gaaattttcggagaacttgcataca

SEQ ID NO: 680070 - DNA, 25 bp, Homo sapien
acaatagaaattttcggagaacttg

SEQ ID NO: 680071 - DNA, 25 bp, Homo sapien
tgcaattgaccccatccctttcata

SEQ ID NO: 680072 - DNA, 25 bp, Homo sapien
aacagccataggcaacagtgtttgc

SEQ ID NO: 680073 - DNA, 25 bp, Homo sapien
ggttccctcgattaacagagcccta

SEQ ID NO: 680074 - DNA, 25 bp, Homo sapien
catgagttgacggatggagaatcac

SEQ ID NO: 680075 - DNA, 25 bp, Homo sapien
tggttcaaaccagactatcagaggt

SEQ ID NO: 680076 - DNA, 25 bp, Homo sapien
tttttggttccaagatctctgggga

SEQ ID NO: 680077 - DNA, 25 bp, Homo sapien
agtgatgagtttgcttgcatgagat

SEQ ID NO: 680078 - DNA, 25 bp, Homo sapien
agatttttggttccaagatctctgg

SEQ ID NO: 680079 - DNA, 25 bp, Homo sapien
gatttttggttccaagatctctggg

SEQ ID NO: 680080 - DNA, 25 bp, Homo sapien
tcccaaagaagcatgtccggaggct

SEQ ID NO: 680081 - DNA, 25 bp, Homo sapien
actactctgagatgcgtggacattc

SEQ ID NO: 680082 - DNA, 25 bp, Homo sapien
gagagattagcgatagagacctggc

SEQ ID NO: 680083 - DNA, 25 bp, Homo sapien
gagacgaggctacagttaccaagac

SEQ ID NO: 680084 - DNA, 25 bp, Homo sapien
ggtccctagccctttcagataattg

SEQ ID NO: 680085 - DNA, 25 bp, Homo sapien
tgattgggacacatggctacctggt

SEQ ID NO: 680086 - DNA, 25 bp, Homo sapien
ttggaatgcaagttcagctgggttc

SEQ ID NO: 680087 - DNA, 25 bp, Homo sapien
tgccaaactgaccagcatccattcg

SEQ ID NO: 680088 - DNA, 25 bp, Homo sapien
gatgggctgggaaaacttataatac

SEQ ID NO: 680089 - DNA, 25 bp, Homo sapien
tcaagacctttctatcgagtgaact

SEQ ID NO: 680090 - DNA, 25 bp, Homo sapien
ttcacgtacataggtacaggttggg

SEQ ID NO: 680091 - DNA, 25 bp, Homo sapien
taatactctctttcgaattgagcac

SEQ ID NO: 680092 - DNA, 25 bp, Homo sapien
tctgtactggctgcatcgatggctg

SEQ ID NO: 680093 - DNA, 25 bp, Homo sapien
cagttgctgcgcgaatactctgaag

SEQ ID NO: 680094 - DNA, 25 bp, Homo sapien
ttaatgcggcaaagaacaggactgc

SEQ ID NO: 680095 - DNA, 25 bp, Homo sapien
tgtcccacagtcattcctcaagagg

SEQ ID NO: 680096 - DNA, 25 bp, Homo sapien
gtttgcacttttcctgaccactggg

SEQ ID NO: 680097 - DNA, 25 bp, Homo sapien
ggagatgtggttctcaagtttgcac

SEQ ID NO: 680098 - DNA, 25 bp, Homo sapien
ccctggcaacacacggacgtcaggg

SEQ ID NO: 680099 - DNA, 25 bp, Homo sapien
ctctgatctcgtgtgcttccatggg

SEQ ID NO: 680100 - DNA, 25 bp, Homo sapien
aacttcggactggtgctcccaggga

SEQ ID NO: 680101 - DNA, 25 bp, Homo sapien
tcaaagtggtttttctccgatcttg

SEQ ID NO: 680102 - DNA, 25 bp, Homo sapien
cccgtgctgaacttcggactggtgc

SEQ ID NO: 680103 - DNA, 25 bp, Homo sapien
tctccgatcttgtccccgtgctgaa

SEQ ID NO: 680104 - DNA, 25 bp, Homo sapien
ctgtagagcagctgtccctcatcat

SEQ ID NO: 680105 - DNA, 25 bp, Homo sapien
tcaatgtactggtggacacccgcct

SEQ ID NO: 680106 - DNA, 25 bp, Homo sapien
cagccttgtccaaaagcgtggcaca

SEQ ID NO: 680107 - DNA, 25 bp, Homo sapien
caaagttgaacgctattgctgtgtg

SEQ ID NO: 680108 - DNA, 25 bp, Homo sapien
gggtcaccctccatgaagttgactt

SEQ ID NO: 680109 - DNA, 25 bp, Homo sapien
tgctcggagcttcaaagggttgtta

SEQ ID NO: 680110 - DNA, 25 bp, Homo sapien
ggtcatggtacatccctagaacggg

SEQ ID NO: 680111 - DNA, 25 bp, Homo sapien
cccggttcctgagagggtcatggta

SEQ ID NO: 680112 - DNA, 25 bp, Homo sapien
tgtgctgctgactccttggtattga

SEQ ID NO: 680113 - DNA, 25 bp, Homo sapien
cttgagctggtttcagacagtgtcc

SEQ ID NO: 680114 - DNA, 25 bp, Homo sapien
tcaatgaccccttctgtgcgagtgg

SEQ ID NO: 680115 - DNA, 25 bp, Homo sapien
tgctgaggactagaagacgatctgg

SEQ ID NO: 680116 - DNA, 25 bp, Homo sapien
tgtggactggccgaactcatcgagg

SEQ ID NO: 680117 - DNA, 25 bp, Homo sapien
cattgtagctcctccgcaaagtgaa

SEQ ID NO: 680118 - DNA, 25 bp, Homo sapien
catgttcatggatacgatgctgcca

SEQ ID NO: 680119 - DNA, 25 bp, Homo sapien
cacttcttgggcgaggagaggaacc

SEQ ID NO: 680120 - DNA, 25 bp, Homo sapien
ggagtggggaccgcaggagggtcat

SEQ ID NO: 680121 - DNA, 25 bp, Homo sapien
gccagagaatgaagggaaggtgcag

SEQ ID NO: 680122 - DNA, 25 bp, Homo sapien
gaatgaagggaaggtgcagatgaag

SEQ ID NO: 680123 - DNA, 25 bp, Homo sapien
tcaagagaagccagagaatgaaggg

SEQ ID NO: 680124 - DNA, 25 bp, Homo sapien
tgcagtatcgcgatcacgactcact

SEQ ID NO: 680125 - DNA, 25 bp, Homo sapien
tggagtgcagtatcgcgatcacgac

SEQ ID NO: 680126 - DNA, 25 bp, Homo sapien
gggattacaggccaccacgtccagc

SEQ ID NO: 680127 - DNA, 25 bp, Homo sapien
gaacccctgacctcatgtcatccac

SEQ ID NO: 680128 - DNA, 25 bp, Homo sapien
cccctgtcttgggcctaggcctgtg

SEQ ID NO: 680129 - DNA, 25 bp, Homo sapien
tggggcacagtcactactgttagtt

SEQ ID NO: 680130 - DNA, 25 bp, Homo sapien
gtggggcacagtcactactgttagt

SEQ ID NO: 680131 - DNA, 25 bp, Homo sapien
gggcacagtcactactgttagttcc

SEQ ID NO: 680132 - DNA, 25 bp, Homo sapien
gcacagtcactactgttagttccat

SEQ ID NO: 680133 - DNA, 25 bp, Homo sapien
tataatgccttgtaaattaaggtca

SEQ ID NO: 680134 - DNA, 25 bp, Homo sapien
ggtcattttccgtggagtaaatagc

SEQ ID NO: 680135 - DNA, 25 bp, Homo sapien
gtaaatagctgcgttaatggcagca

SEQ ID NO: 680136 - DNA, 25 bp, Homo sapien
aatggcagcaaaaggtaacggcgtt

SEQ ID NO: 680137 - DNA, 25 bp, Homo sapien
ccagcttggcttccttctgaagggc

SEQ ID NO: 680138 - DNA, 25 bp, Homo sapien
ccgtgctcccaccggtggctggctg

SEQ ID NO: 680139 - DNA, 25 bp, Homo sapien
agggagcccgtgctcccaccggtgg

SEQ ID NO: 680140 - DNA, 25 bp, Homo sapien
cagcttggcttccttctgaagggct

SEQ ID NO: 680141 - DNA, 25 bp, Homo sapien
cctgggtagggccttacatattggg

SEQ ID NO: 680142 - DNA, 25 bp, Homo sapien
ggtgctttccaggattgcagggcct

SEQ ID NO: 680143 - DNA, 25 bp, Homo sapien
tgaaatggttccccaaggtgctttc

SEQ ID NO: 680144 - DNA, 25 bp, Homo sapien
catattgggagagtccttgtggcct

SEQ ID NO: 680145 - DNA, 25 bp, Homo sapien
gatgcagctggccattatgacagac

SEQ ID NO: 680146 - DNA, 25 bp, Homo sapien
gacaaacactggatgctatgaggaa

SEQ ID NO: 680147 - DNA, 25 bp, Homo sapien
tgatacagcccctcaacaatcaggg

SEQ ID NO: 680148 - DNA, 25 bp, Homo sapien
gtcctaagctcacagaataaccggg

SEQ ID NO: 680149 - DNA, 25 bp, Homo sapien
gcaaacaggtgctggcagaaatcta

SEQ ID NO: 680150 - DNA, 25 bp, Homo sapien
cacggttcattaatgctcttgaggg

SEQ ID NO: 680151 - DNA, 25 bp, Homo sapien
ccgtggacaaatctgtggacacgtg

SEQ ID NO: 680152 - DNA, 25 bp, Homo sapien
agcacggcgcatgaagcacggttca

SEQ ID NO: 680153 - DNA, 25 bp, Homo sapien
gcagggatttgaactaggcccacct

SEQ ID NO: 680154 - DNA, 25 bp, Homo sapien
cagtcagaggcaatcttcatgggaa

SEQ ID NO: 680155 - DNA, 25 bp, Homo sapien
ggacctaatggtggtctctgaccca

SEQ ID NO: 680156 - DNA, 25 bp, Homo sapien
cacatttctggtgaattccctggga

SEQ ID NO: 680157 - DNA, 25 bp, Homo sapien
cctttctaatggagctgatactgta

SEQ ID NO: 680158 - DNA, 25 bp, Homo sapien
tgtggtgaccgcagtgaccaacaaa

SEQ ID NO: 680159 - DNA, 25 bp, Homo sapien
tgcgaacatgaccaagccaatcctt

SEQ ID NO: 680160 - DNA, 25 bp, Homo sapien
gctgcttacttggatctgctccagg

SEQ ID NO: 680161 - DNA, 25 bp, Homo sapien
agttgtgaccttgaatgatgttgct

SEQ ID NO: 680162 - DNA, 25 bp, Homo sapien
gaccttgaatgatgttgctccaata

SEQ ID NO: 680163 - DNA, 25 bp, Homo sapien
gtgaccttgaatgatgttgctccaa

SEQ ID NO: 680164 - DNA, 25 bp, Homo sapien
ttgtgaccttgaatgatgttgctcc

SEQ ID NO: 680165 - DNA, 25 bp, Homo sapien
tttgtgcgaggaaggtatgaacgtc

SEQ ID NO: 680166 - DNA, 25 bp, Homo sapien
aacgtcaggtttccggtgcacagag

SEQ ID NO: 680167 - DNA, 25 bp, Homo sapien
agtgaattttcacgatgttttgtgc

SEQ ID NO: 680168 - DNA, 25 bp, Homo sapien
tatgaacgtcaggtttccggtgcac

SEQ ID NO: 680169 - DNA, 25 bp, Homo sapien
tatggagttggtgcctaacgcatgc

SEQ ID NO: 680170 - DNA, 25 bp, Homo sapien
gaacttgggcaatccagtgctaagg

SEQ ID NO: 680171 - DNA, 25 bp, Homo sapien
cttgcaggattgtcaggaggattac

SEQ ID NO: 680172 - DNA, 25 bp, Homo sapien
cacagagggctgcaatagttgaccc

SEQ ID NO: 680173 - DNA, 25 bp, Homo sapien
aattggccaaagtccacagctagga

SEQ ID NO: 680174 - DNA, 25 bp, Homo sapien
tactccaggatgtttgaccaggatc

SEQ ID NO: 680175 - DNA, 25 bp, Homo sapien
acaaggctgggctgcgattcgaagc

SEQ ID NO: 680176 - DNA, 25 bp, Homo sapien
tccttcagacaaccctgtggagtag

SEQ ID NO: 680177 - DNA, 25 bp, Homo sapien
tgtgcagtcgcccagtgcggtagaa

SEQ ID NO: 680178 - DNA, 25 bp, Homo sapien
ttgctgcgcacgatctccatgggct

SEQ ID NO: 680179 - DNA, 25 bp, Homo sapien
tgcgcagcacgtgttatcgaactcc

SEQ ID NO: 680180 - DNA, 25 bp, Homo sapien
gatgccccagtagtcgagctcttgg

SEQ ID NO: 680181 - DNA, 25 bp, Homo sapien
tggtggagcgggagccatgcttcgt

SEQ ID NO: 680182 - DNA, 25 bp, Homo sapien
ctggtggagcgggagccatgcttcg

SEQ ID NO: 680183 - DNA, 25 bp, Homo sapien
ggtggagcgggagccatgcttcgtc

SEQ ID NO: 680184 - DNA, 25 bp, Homo sapien
tggagcgggagccatgcttcgtcat

SEQ ID NO: 680185 - DNA, 25 bp, Homo sapien
actcgacggcaaggcccgctgctgc

SEQ ID NO: 680186 - DNA, 25 bp, Homo sapien
caggccgctgtcactcgacggcaag

SEQ ID NO: 680187 - DNA, 25 bp, Homo sapien
cgggcgcgcgtcacggccgtcttct

SEQ ID NO: 680188 - DNA, 25 bp, Homo sapien
cgcgtcacggccgtcttctcacctc

SEQ ID NO: 680189 - DNA, 25 bp, Homo sapien
ccaaacactggagcatctcctgaga

SEQ ID NO: 680190 - DNA, 25 bp, Homo sapien
ttgctccagcgacaaggtgagccgc

SEQ ID NO: 680191 - DNA, 25 bp, Homo sapien
cctgtccgaggtcacaacagacggg

SEQ ID NO: 680192 - DNA, 25 bp, Homo sapien
gaatggcagcgggcttttttccaaa

SEQ ID NO: 680193 - DNA, 25 bp, Homo sapien
tattctgtcccgcacttcggagcgc

SEQ ID NO: 680194 - DNA, 25 bp, Homo sapien
tccttcgtcccgtcaacaacgtgtg

SEQ ID NO: 680195 - DNA, 25 bp, Homo sapien
cggtgacaggcgtctgagatacagc

SEQ ID NO: 680196 - DNA, 25 bp, Homo sapien
tgtgttgaacgcctcctgtgcgcga

SEQ ID NO: 680197 - DNA, 25 bp, Homo sapien
tggatgtcgctcaggacaacgggtc

SEQ ID NO: 680198 - DNA, 25 bp, Homo sapien
tgtcgctcaggacaacgggtctttg

SEQ ID NO: 680199 - DNA, 25 bp, Homo sapien
ctctgagtggatgtcgctcaggaca

SEQ ID NO: 680200 - DNA, 25 bp, Homo sapien
aggacaacgggtctttgctgtggcc

SEQ ID NO: 680201 - DNA, 25 bp, Homo sapien
tagcttgttgttttgggctccctcc

SEQ ID NO: 680202 - DNA, 25 bp, Homo sapien
ctagcttgttgttttgggctccctc

SEQ ID NO: 680203 - DNA, 25 bp, Homo sapien
cctttcataagctgacagtaggagt

SEQ ID NO: 680204 - DNA, 25 bp, Homo sapien
ctgacagtaggagtaaatgtatttc

SEQ ID NO: 680205 - DNA, 25 bp, Homo sapien
atatcctttcataagctgacagtag

SEQ ID NO: 680206 - DNA, 25 bp, Homo sapien
cataagctgacagtaggagtaaatg

SEQ ID NO: 680207 - DNA, 25 bp, Homo sapien
aatggtacaagggtatgaaaggcca

SEQ ID NO: 680208 - DNA, 25 bp, Homo sapien
aaggccaaagtcttggagctgcaga

SEQ ID NO: 680209 - DNA, 25 bp, Homo sapien
ctgttgactttaatggtacaagggt

SEQ ID NO: 680210 - DNA, 25 bp, Homo sapien
tacaagggtatgaaaggccaaagtc

SEQ ID NO: 680211 - DNA, 25 bp, Homo sapien
caggcacggccaatgccctccatca

SEQ ID NO: 680212 - DNA, 25 bp, Homo sapien
cattccaggcacggccaatgccctc

SEQ ID NO: 680213 - DNA, 25 bp, Homo sapien
tccaggcacggccaatgccctccat

SEQ ID NO: 680214 - DNA, 25 bp, Homo sapien
aatgccctccatcagaatcacactc

SEQ ID NO: 680215 - DNA, 25 bp, Homo sapien
agatggccctggtcgcccatgggat

SEQ ID NO: 680216 - DNA, 25 bp, Homo sapien
agaacaggcaggtagggcattgcca

SEQ ID NO: 680217 - DNA, 25 bp, Homo sapien
catgggatgagaaacttactcctgc

SEQ ID NO: 680218 - DNA, 25 bp, Homo sapien
aaatagcaaggcataacaatcactg

SEQ ID NO: 680219 - DNA, 25 bp, Homo sapien
acgaggtcaggagttcgagaccagc

SEQ ID NO: 680220 - DNA, 25 bp, Homo sapien
tcacgaggtcaggagttcgagacca

SEQ ID NO: 680221 - DNA, 25 bp, Homo sapien
gaggcccaggcaggcaaatcacgag

SEQ ID NO: 680222 - DNA, 25 bp, Homo sapien
ggcccaggcaggcaaatcacgaggt

SEQ ID NO: 680223 - DNA, 25 bp, Homo sapien
aagcgagtctgtttaaaggagaata

SEQ ID NO: 680224 - DNA, 25 bp, Homo sapien
aaacacttcattagatcaacttaag

SEQ ID NO: 680225 - DNA, 25 bp, Homo sapien
aaagcgagtctgtttaaaggagaat

SEQ ID NO: 680226 - DNA, 25 bp, Homo sapien
cagcttatgagctatgtggccccag

SEQ ID NO: 680227 - DNA, 25 bp, Homo sapien
tcctgaagtcgagaagaattgtccc

SEQ ID NO: 680228 - DNA, 25 bp, Homo sapien
tccagctaaagctagagggacctca

SEQ ID NO: 680229 - DNA, 25 bp, Homo sapien
tctctcgcaggcatttaaagggtct

SEQ ID NO: 680230 - DNA, 25 bp, Homo sapien
tcagaaccctggtgaagccgagagc

SEQ ID NO: 680231 - DNA, 25 bp, Homo sapien
gaagtggtaatgctagcacctgcac

SEQ ID NO: 680232 - DNA, 25 bp, Homo sapien
ctttgactggataaggcccgggcca

SEQ ID NO: 680233 - DNA, 25 bp, Homo sapien
gcccgggccatgctagctcataaga

SEQ ID NO: 680234 - DNA, 25 bp, Homo sapien
tgttccggctgcatcagaccgaagc

SEQ ID NO: 680235 - DNA, 25 bp, Homo sapien
tgaggtcaaactcagggatctccac

SEQ ID NO: 680236 - DNA, 25 bp, Homo sapien
cacatctgcgttgatcagctccaag

SEQ ID NO: 680237 - DNA, 25 bp, Homo sapien
agaccgaagccgtacctgctgaggt

SEQ ID NO: 680238 - DNA, 25 bp, Homo sapien
gattaatacggcgactcctctggat

SEQ ID NO: 680239 - DNA, 25 bp, Homo sapien
gatgtcaacggttgctgcctccctg

SEQ ID NO: 680240 - DNA, 25 bp, Homo sapien
caggactgctgctaacccttaggtg

SEQ ID NO: 680241 - DNA, 25 bp, Homo sapien
aataactattcgcagctgccatgcc

SEQ ID NO: 680242 - DNA, 25 bp, Homo sapien
caaataagagatggctcacgggctg

SEQ ID NO: 680243 - DNA, 25 bp, Homo sapien
tacggtcagctgaaaggaatgtcca

SEQ ID NO: 680244 - DNA, 25 bp, Homo sapien
ggctctcggccccacaggtattaaa

SEQ ID NO: 680245 - DNA, 25 bp, Homo sapien
tgcctacaatgagccagacagtggg

SEQ ID NO: 680246 - DNA, 25 bp, Homo sapien
tgatgctgttgaccgcataactcct

SEQ ID NO: 680247 - DNA, 25 bp, Homo sapien
tcttcagccgtttcccatccttgta

SEQ ID NO: 680248 - DNA, 25 bp, Homo sapien
tgtaattcttcagccgtttcccatc

SEQ ID NO: 680249 - DNA, 25 bp, Homo sapien
tctctgatccgtcagggttcaggaa

SEQ ID NO: 680250 - DNA, 25 bp, Homo sapien
gaaaacaattcgcaaggcacactcc

SEQ ID NO: 680251 - DNA, 25 bp, Homo sapien
catggagtagctgccgactgaaaga

SEQ ID NO: 680252 - DNA, 25 bp, Homo sapien
taaggcaagggttgtagctgagcac

SEQ ID NO: 680253 - DNA, 25 bp, Homo sapien
tacactgcacagtggtaaggcaagg

SEQ ID NO: 680254 - DNA, 25 bp, Homo sapien
ggtccaccacaacctcgcgggtgat

SEQ ID NO: 680255 - DNA, 25 bp, Homo sapien
aggttgaattctcgcccgtctgcca

SEQ ID NO: 680256 - DNA, 25 bp, Homo sapien
aggcggtcaccacgtcgcaggttga

SEQ ID NO: 680257 - DNA, 25 bp, Homo sapien
tctcgcccgtctgccatgggcatgg

SEQ ID NO: 680258 - DNA, 25 bp, Homo sapien
aaggatactctcgagctctccgcgg

SEQ ID NO: 680259 - DNA, 25 bp, Homo sapien
tctagaaccttctgtgggagagtgg

SEQ ID NO: 680260 - DNA, 25 bp, Homo sapien
agccagaaggcagcgggacccatat

SEQ ID NO: 680261 - DNA, 25 bp, Homo sapien
tggtcgtctgcgagacaggctgctc

SEQ ID NO: 680262 - DNA, 25 bp, Homo sapien
tcaggtccagctgacacagcaaggt

SEQ ID NO: 680263 - DNA, 25 bp, Homo sapien
tttctgagagttccaccagcacctc

SEQ ID NO: 680264 - DNA, 25 bp, Homo sapien
gaatgcaagcaatcccacacgtgct

SEQ ID NO: 680265 - DNA, 25 bp, Homo sapien
tccccactttctgtgactgtggaca

SEQ ID NO: 680266 - DNA, 25 bp, Homo sapien
ccaagccagatatcgggaaggaaga

SEQ ID NO: 680267 - DNA, 25 bp, Homo sapien
tgtcaatcaatggtttcagtcctgg

SEQ ID NO: 680268 - DNA, 25 bp, Homo sapien
ctggcattaccagcatcagtgggct

SEQ ID NO: 680269 - DNA, 25 bp, Homo sapien
tctcagcggagctatgtgcaggccc

SEQ ID NO: 680270 - DNA, 25 bp, Homo sapien
tgacactgcacatgtggtccttgtc

SEQ ID NO: 680271 - DNA, 25 bp, Homo sapien
gcctggctggggatagcagcttcca

SEQ ID NO: 680272 - DNA, 25 bp, Homo sapien
catttgctccggtgggcccgcctgg

SEQ ID NO: 680273 - DNA, 25 bp, Homo sapien
ttccacaggcgacttttgacactgc

SEQ ID NO: 680274 - DNA, 25 bp, Homo sapien
gaaccacaagccgtgtttcaggaag

SEQ ID NO: 680275 - DNA, 25 bp, Homo sapien
gttttaaagctccacggtaatgcta

SEQ ID NO: 680276 - DNA, 25 bp, Homo sapien
gattctaaacctggctgcacctcac

SEQ ID NO: 680277 - DNA, 25 bp, Homo sapien
gaaatcaccccttggaaaagtgaga

SEQ ID NO: 680278 - DNA, 25 bp, Homo sapien
catcagctgagtggacgcggtcctg

SEQ ID NO: 680279 - DNA, 25 bp, Homo sapien
tccgtaaagagtcaggtagccggct

SEQ ID NO: 680280 - DNA, 25 bp, Homo sapien
tggcagcgcctcaattccgtaaaga

SEQ ID NO: 680281 - DNA, 25 bp, Homo sapien
cgaaaggtgtggaagacatcagctg

SEQ ID NO: 680282 - DNA, 25 bp, Homo sapien
ctgtaggagaagtcgaggagaccca

SEQ ID NO: 680283 - DNA, 25 bp, Homo sapien
acagcactgcatggaggttggtata

SEQ ID NO: 680284 - DNA, 25 bp, Homo sapien
gcttctgtagcatcgcccaacagca

SEQ ID NO: 680285 - DNA, 25 bp, Homo sapien
gaggttggtatacatggcttctgtg

SEQ ID NO: 680286 - DNA, 25 bp, Homo sapien
tgggtccaggagaacggtgacatac

SEQ ID NO: 680287 - DNA, 25 bp, Homo sapien
agtcgagcctggtgcgaggctccca

SEQ ID NO: 680288 - DNA, 25 bp, Homo sapien
acaccaccgcgtcgtaggagtgtgg

SEQ ID NO: 680289 - DNA, 25 bp, Homo sapien
tggcataggcatggaagtcgagcct

SEQ ID NO: 680290 - DNA, 25 bp, Homo sapien
aaagtccaaggcataccccaaccag

SEQ ID NO: 680291 - DNA, 25 bp, Homo sapien
caaagtccaaggcataccccaacca

SEQ ID NO: 680292 - DNA, 25 bp, Homo sapien
ggcacttgtcaccatttgataaggc

SEQ ID NO: 680293 - DNA, 25 bp, Homo sapien
tggcacttgtcaccatttgataagg

SEQ ID NO: 680294 - DNA, 25 bp, Homo sapien
gcacttgtcaccatttgataaggca

SEQ ID NO: 680295 - DNA, 25 bp, Homo sapien
atggcacttgtcaccatttgataag

SEQ ID NO: 680296 - DNA, 25 bp, Homo sapien
ccatcaacattttcgtcagctcata

SEQ ID NO: 680297 - DNA, 25 bp, Homo sapien
tcctaactgttgtagcctgatgcta

SEQ ID NO: 680298 - DNA, 25 bp, Homo sapien
tctctcctctttgagaaggactgag

SEQ ID NO: 680299 - DNA, 25 bp, Homo sapien
caatataacattctgtgctcctggc

SEQ ID NO: 680300 - DNA, 25 bp, Homo sapien
gcaacagtgcggccaggaggccgag

SEQ ID NO: 680301 - DNA, 25 bp, Homo sapien
caacagtgcggccaggaggccgagg

SEQ ID NO: 680302 - DNA, 25 bp, Homo sapien
ggccgaggagcgcggcccaagccat

SEQ ID NO: 680303 - DNA, 25 bp, Homo sapien
agcaacagtgcggccaggaggccga

SEQ ID NO: 680304 - DNA, 25 bp, Homo sapien
cacccggcgcgcccctcccactccg

SEQ ID NO: 680305 - DNA, 25 bp, Homo sapien
gcggggctggcggcctggcccactc

SEQ ID NO: 680306 - DNA, 25 bp, Homo sapien
cggcctggcccactcccaggtaaag

SEQ ID NO: 680307 - DNA, 25 bp, Homo sapien
actccgcccaccccagcccgctttg

SEQ ID NO: 680308 - DNA, 25 bp, Homo sapien
ctggtgcacgttagggcctccggat

SEQ ID NO: 680309 - DNA, 25 bp, Homo sapien
caccctctacctggtgcacgttagg

SEQ ID NO: 680310 - DNA, 25 bp, Homo sapien
tagtgcccgtgaagtatgcaccctc

SEQ ID NO: 680311 - DNA, 25 bp, Homo sapien
gggacagatagtgcccgtgaagtat

SEQ ID NO: 680312 - DNA, 25 bp, Homo sapien
cagccgccaaggctgttcggagatg

SEQ ID NO: 680313 - DNA, 25 bp, Homo sapien
atgggtgagtgtttgatatcagcga

SEQ ID NO: 680314 - DNA, 25 bp, Homo sapien
gtgtttgatatcagcgagcagcccc

SEQ ID NO: 680315 - DNA, 25 bp, Homo sapien
tcacgggtcgtggtgagaattgaag

SEQ ID NO: 680316 - DNA, 25 bp, Homo sapien
gagccgcacccaggacgcgcgggga

SEQ ID NO: 680317 - DNA, 25 bp, Homo sapien
ggactgctgcaatgccccgtgcagc

SEQ ID NO: 680318 - DNA, 25 bp, Homo sapien
tcgccaggctcttcggggactgctg

SEQ ID NO: 680319 - DNA, 25 bp, Homo sapien
gcgcccgagccgcacccaggacgcg

SEQ ID NO: 680320 - DNA, 25 bp, Homo sapien
tccaaggtcatgtgtagggacaggc

SEQ ID NO: 680321 - DNA, 25 bp, Homo sapien
tatgatattcgaggcctggtggaca

SEQ ID NO: 680322 - DNA, 25 bp, Homo sapien
gccagtgctgacgaaggaagtcccc

SEQ ID NO: 680323 - DNA, 25 bp, Homo sapien
gcttaccggcattttcaagggcagg

SEQ ID NO: 680324 - DNA, 25 bp, Homo sapien
catccagcccttgccgttcttttga

SEQ ID NO: 680325 - DNA, 25 bp, Homo sapien
cagttatgtttttatacaaggcgtc

SEQ ID NO: 680326 - DNA, 25 bp, Homo sapien
aaggcgtcgtatgtgatgtttgcaa

SEQ ID NO: 680327 - DNA, 25 bp, Homo sapien
agctcgggtgtcaggttgacagtta

SEQ ID NO: 680328 - DNA, 25 bp, Homo sapien
gaaactggacttctcctcgatggtg

SEQ ID NO: 680329 - DNA, 25 bp, Homo sapien
accctctggccggctcacagaatag

SEQ ID NO: 680330 - DNA, 25 bp, Homo sapien
tcctgtgtcaccctctggccggctc

SEQ ID NO: 680331 - DNA, 25 bp, Homo sapien
gaggaatggacttgtactttcctgt

SEQ ID NO: 680332 - DNA, 25 bp, Homo sapien
ttaagccactcactccgccaaagaa

SEQ ID NO: 680333 - DNA, 25 bp, Homo sapien
gttccagaggtcgtcatcttctcca

SEQ ID NO: 680334 - DNA, 25 bp, Homo sapien
gaaagcattaggaaagccattgatt

SEQ ID NO: 680335 - DNA, 25 bp, Homo sapien
cgccaaagaactcggtataaggaag

SEQ ID NO: 680336 - DNA, 25 bp, Homo sapien
ccggtatgtgatctacatcatgaaa

SEQ ID NO: 680337 - DNA, 25 bp, Homo sapien
tttggttgcaaaatgcctcggcatc

SEQ ID NO: 680338 - DNA, 25 bp, Homo sapien
cataatagttgcgatcactttccgg

SEQ ID NO: 680339 - DNA, 25 bp, Homo sapien
ccaacgttgaaaagcatggctcgat

SEQ ID NO: 680340 - DNA, 25 bp, Homo sapien
ggaggtgctcgtggcggttccggaa

SEQ ID NO: 680341 - DNA, 25 bp, Homo sapien
atgggaagcaggtgtctgaacagga

SEQ ID NO: 680342 - DNA, 25 bp, Homo sapien
aaaatgcaaactgcaagcgctggcg

SEQ ID NO: 680343 - DNA, 25 bp, Homo sapien
tccggaaggggataaggatcgccac

SEQ ID NO: 680344 - DNA, 25 bp, Homo sapien
catgaatgtaatccattccaatttc

SEQ ID NO: 680345 - DNA, 25 bp, Homo sapien
tgacctccgagcttgatggttgggt

SEQ ID NO: 680346 - DNA, 25 bp, Homo sapien
ttccagtgacctccgagcttgatgg

SEQ ID NO: 680347 - DNA, 25 bp, Homo sapien
gaaggcttccagtgacctccgagct

SEQ ID NO: 680348 - DNA, 25 bp, Homo sapien
gaaatgttgtagtttgcaggaaggt

SEQ ID NO: 680349 - DNA, 25 bp, Homo sapien
tcatggaagggagtctttcagggca

SEQ ID NO: 680350 - DNA, 25 bp, Homo sapien
tctttcagggcaggtatggtttgca

SEQ ID NO: 680351 - DNA, 25 bp, Homo sapien
ttgcaaagtaggtgaagtcttcagg

SEQ ID NO: 680352 - DNA, 25 bp, Homo sapien
tgttcctcttggcataagcactccg

SEQ ID NO: 680353 - DNA, 25 bp, Homo sapien
cgttgtcccggatcagaatgccttg

SEQ ID NO: 680354 - DNA, 25 bp, Homo sapien
tcataaacctgagcaccgattgttc

SEQ ID NO: 680355 - DNA, 25 bp, Homo sapien
gaatgccttgggcttgcatcatgaa

SEQ ID NO: 680356 - DNA, 25 bp, Homo sapien
tccatacctttcaggacaccaacat

SEQ ID NO: 680357 - DNA, 25 bp, Homo sapien
catcttttgggtagctagtagagct

SEQ ID NO: 680358 - DNA, 25 bp, Homo sapien
gaattagttcatggttcttcataga

SEQ ID NO: 680359 - DNA, 25 bp, Homo sapien
ttaaaaccctacatgaccataactc

SEQ ID NO: 680360 - DNA, 25 bp, Homo sapien
catgttctagccacaacctctctct

SEQ ID NO: 680361 - DNA, 25 bp, Homo sapien
tcatccatgttctagccacaacctc

SEQ ID NO: 680362 - DNA, 25 bp, Homo sapien
caacctctctctgaaagatttcaag

SEQ ID NO: 680363 - DNA, 25 bp, Homo sapien
tctgaaagatttcaagcacccacat

SEQ ID NO: 680364 - DNA, 25 bp, Homo sapien
cactaacggagttgtccagatgcaa

SEQ ID NO: 680365 - DNA, 25 bp, Homo sapien
agttgtgaccacactaacggagttg

SEQ ID NO: 680366 - DNA, 25 bp, Homo sapien
tccaggctgcgctctctgcatactg

SEQ ID NO: 680367 - DNA, 25 bp, Homo sapien
gttgtccagatgcaataggatgagc

SEQ ID NO: 680368 - DNA, 25 bp, Homo sapien
catggctctggcctaaagtaggaag

SEQ ID NO: 680369 - DNA, 25 bp, Homo sapien
ccagagaggtgaactgagttgctgc

SEQ ID NO: 680370 - DNA, 25 bp, Homo sapien
gagtctctgcagaacttactttggg

SEQ ID NO: 680371 - DNA, 25 bp, Homo sapien
ttaataaacttaggccatggctctg

SEQ ID NO: 680372 - DNA, 25 bp, Homo sapien
ctgaacacgtacacttatcaaaaca

SEQ ID NO: 680373 - DNA, 25 bp, Homo sapien
ccattgaaactgaacacgtacactt

SEQ ID NO: 680374 - DNA, 25 bp, Homo sapien
ttccattgaaactgaacacgtacac

SEQ ID NO: 680375 - DNA, 25 bp, Homo sapien
aactgaacacgtacacttatcaaaa

SEQ ID NO: 680376 - DNA, 25 bp, Homo sapien
cagggtatgacggatgttgctgatg

SEQ ID NO: 680377 - DNA, 25 bp, Homo sapien
gcgtcagggtatgacggatgttgct

SEQ ID NO: 680378 - DNA, 25 bp, Homo sapien
ggtatgacggatgttgctgatggga

SEQ ID NO: 680379 - DNA, 25 bp, Homo sapien
gggcgtcagggtatgacggatgttg

SEQ ID NO: 680380 - DNA, 25 bp, Homo sapien
tatgagcaccctttaggaatgctgc

SEQ ID NO: 680381 - DNA, 25 bp, Homo sapien
tgttccactagtgaaaaactgcagt

SEQ ID NO: 680382 - DNA, 25 bp, Homo sapien
ctaaataatttacgctaggagcagt

SEQ ID NO: 680383 - DNA, 25 bp, Homo sapien
accctgtaagataaggaggttctct

SEQ ID NO: 680384 - DNA, 25 bp, Homo sapien
tcacattattgttagcctggaagct

SEQ ID NO: 680385 - DNA, 25 bp, Homo sapien
taatgggttatctactcgttgggaa

SEQ ID NO: 680386 - DNA, 25 bp, Homo sapien
caagaaggcagcattccaactggta

SEQ ID NO: 680387 - DNA, 25 bp, Homo sapien
tagaaacgggttctctgggccatgc

SEQ ID NO: 680388 - DNA, 25 bp, Homo sapien
tgcaccaaccaccctctgcacacca

SEQ ID NO: 680389 - DNA, 25 bp, Homo sapien
ctgcaccaaccaccctctgcacacc

SEQ ID NO: 680390 - DNA, 25 bp, Homo sapien
gcaccaaccaccctctgcacaccat

SEQ ID NO: 680391 - DNA, 25 bp, Homo sapien
tatacctgccttgaagcaacaggga

SEQ ID NO: 680392 - DNA, 25 bp, Homo sapien
tcaaatcatattagccagagggtca

SEQ ID NO: 680393 - DNA, 25 bp, Homo sapien
cagagggtcaacaatccagctattc

SEQ ID NO: 680394 - DNA, 25 bp, Homo sapien
cagggaaatattacaggacttggcc

SEQ ID NO: 680395 - DNA, 25 bp, Homo sapien
ttaaattctagtcagctgaatgacc

SEQ ID NO: 680396 - DNA, 25 bp, Homo sapien
ttctagtcagctgaatgacctttgg

SEQ ID NO: 680397 - DNA, 25 bp, Homo sapien
tagtcagctgaatgacctttggcaa

SEQ ID NO: 680398 - DNA, 25 bp, Homo sapien
taaattctagtcagctgaatgacct

SEQ ID NO: 680399 - DNA, 25 bp, Homo sapien
tttgcctagcaaatggtgtaagcca

SEQ ID NO: 680400 - DNA, 25 bp, Homo sapien
cagggtacttccaaagagtagaggc

SEQ ID NO: 680401 - DNA, 25 bp, Homo sapien
tagaaaatcatctagggtcgctaca

SEQ ID NO: 680402 - DNA, 25 bp, Homo sapien
tggtcagctcagacaagataaatgg

SEQ ID NO: 680403 - DNA, 25 bp, Homo sapien
cttatgcttcgctgtatttcccaaa

SEQ ID NO: 680404 - DNA, 25 bp, Homo sapien
tacatataatgtaagctcaattacg

SEQ ID NO: 680405 - DNA, 25 bp, Homo sapien
ggactgaaaacctgacagtcacttt

SEQ ID NO: 680406 - DNA, 25 bp, Homo sapien
ttgcctctagactacagttttaaca

SEQ ID NO: 680407 - DNA, 25 bp, Homo sapien
ggcttttattgaacaatctggcata

SEQ ID NO: 680408 - DNA, 25 bp, Homo sapien
gcagtttttgcacacctaactccaa

SEQ ID NO: 680409 - DNA, 25 bp, Homo sapien
taaccacagggtgaagtgaacctat

SEQ ID NO: 680410 - DNA, 25 bp, Homo sapien
ggttggagaccactgctttatatgg

SEQ ID NO: 680411 - DNA, 25 bp, Homo sapien
aaaagaataaactgcatgacattaa

SEQ ID NO: 680412 - DNA, 25 bp, Homo sapien
aagaataaactgcatgacattaatg

SEQ ID NO: 680413 - DNA, 25 bp, Homo sapien
aataaactgcatgacattaatgata

SEQ ID NO: 680414 - DNA, 25 bp, Homo sapien
gaataaactgcatgacattaatgat

SEQ ID NO: 680415 - DNA, 25 bp, Homo sapien
tatagttaatgtgaccagggtagcc

SEQ ID NO: 680416 - DNA, 25 bp, Homo sapien
catgtgggatcttccaaagggctaa

SEQ ID NO: 680417 - DNA, 25 bp, Homo sapien
gctcagcctagagaatgccacacaa

SEQ ID NO: 680418 - DNA, 25 bp, Homo sapien
taccgatgcaaaaggcacgctgtgt

SEQ ID NO: 680419 - DNA, 25 bp, Homo sapien
taaatagacttgacatcgaaggggc

SEQ ID NO: 680420 - DNA, 25 bp, Homo sapien
cacattatcggtaaagacagcaggt

SEQ ID NO: 680421 - DNA, 25 bp, Homo sapien
catcgaaggggctagaatttcccat

SEQ ID NO: 680422 - DNA, 25 bp, Homo sapien
tcaagaatcccttgccagaaataat

SEQ ID NO: 680423 - DNA, 25 bp, Homo sapien
cttctaagctttgcagtgggctttg

SEQ ID NO: 680424 - DNA, 25 bp, Homo sapien
ccttctaagctttgcagtgggcttt

SEQ ID NO: 680425 - DNA, 25 bp, Homo sapien
agcctggaaggtttacccttcgcag

SEQ ID NO: 680426 - DNA, 25 bp, Homo sapien
cgcagagacgcttgctcttggactt

SEQ ID NO: 680427 - DNA, 25 bp, Homo sapien
tcctcaagcgcagcggcgcctttga

SEQ ID NO: 680428 - DNA, 25 bp, Homo sapien
cggcgcctttgagggagcacagcct

SEQ ID NO: 680429 - DNA, 25 bp, Homo sapien
gaattagcctaaacctgtgcttatg

SEQ ID NO: 680430 - DNA, 25 bp, Homo sapien
gcaaagtctgacttttaaggctcag

SEQ ID NO: 680431 - DNA, 25 bp, Homo sapien
gatacctggtttagtaagacatctg

SEQ ID NO: 680432 - DNA, 25 bp, Homo sapien
aataaactgcccctgcttttgaggt

SEQ ID NO: 680433 - DNA, 25 bp, Homo sapien
ttcaggtttcagtgcaagacaaacc

SEQ ID NO: 680434 - DNA, 25 bp, Homo sapien
catactgtacgacacaaagtgctta

SEQ ID NO: 680435 - DNA, 25 bp, Homo sapien
tagatgacaatgacaatcagtactg

SEQ ID NO: 680436 - DNA, 25 bp, Homo sapien
tctaccacacttagaatgtactggg

SEQ ID NO: 680437 - DNA, 25 bp, Homo sapien
tgtgattagatgtgccgaacatact

SEQ ID NO: 680438 - DNA, 25 bp, Homo sapien
gatgtgccgaacatacttccaagat

SEQ ID NO: 680439 - DNA, 25 bp, Homo sapien
ccttatgtgattagatgtgccgaac

SEQ ID NO: 680440 - DNA, 25 bp, Homo sapien
ctttgccttatgtgattagatgtgc

SEQ ID NO: 680441 - DNA, 25 bp, Homo sapien
caaggtcattcgatcaaatcaggta

SEQ ID NO: 680442 - DNA, 25 bp, Homo sapien
aaagccagccataaatcaaatttct

SEQ ID NO: 680443 - DNA, 25 bp, Homo sapien
tggaactaagcaggccaaaaatgtc

SEQ ID NO: 680444 - DNA, 25 bp, Homo sapien
tatcagatcattgaaatcaagtcac

SEQ ID NO: 680445 - DNA, 25 bp, Homo sapien
ttctcacctggtaccatttcccaaa

SEQ ID NO: 680446 - DNA, 25 bp, Homo sapien
gaaggagtacccattacatctttcc

SEQ ID NO: 680447 - DNA, 25 bp, Homo sapien
ccttctcacctggtaccatttccca

SEQ ID NO: 680448 - DNA, 25 bp, Homo sapien
tcacctggtaccatttcccaaaggc

SEQ ID NO: 680449 - DNA, 25 bp, Homo sapien
tatccccttctctacggacaattta

SEQ ID NO: 680450 - DNA, 25 bp, Homo sapien
tctctacggacaatttaaacttctc

SEQ ID NO: 680451 - DNA, 25 bp, Homo sapien
aaggtgacaaggatgtgcccttgtg

SEQ ID NO: 680452 - DNA, 25 bp, Homo sapien
aaaggtgacaaggatgtgcccttgt

SEQ ID NO: 680453 - DNA, 25 bp, Homo sapien
caaaggtgacaaggatgtgcccttg

SEQ ID NO: 680454 - DNA, 25 bp, Homo sapien
cgggcgccacatagacgaagtacag

SEQ ID NO: 680455 - DNA, 25 bp, Homo sapien
tatgccgggcgccacatagacgaag

SEQ ID NO: 680456 - DNA, 25 bp, Homo sapien
catagacgaagtacagcagcgagga

SEQ ID NO: 680457 - DNA, 25 bp, Homo sapien
tacagcagcgaggacgagagagaaa

SEQ ID NO: 680458 - DNA, 25 bp, Homo sapien
ctcccagccgccggccgtcgcgggc

SEQ ID NO: 680459 - DNA, 25 bp, Homo sapien
cagccaggcggccgctagagagcca

SEQ ID NO: 680460 - DNA, 25 bp, Homo sapien
cggccgctagagagccaggccgggc

SEQ ID NO: 680461 - DNA, 25 bp, Homo sapien
caggcggccgctagagagccaggcc

SEQ ID NO: 680462 - DNA, 25 bp, Homo sapien
tgtgacctcacgcaagttaaactct

SEQ ID NO: 680463 - DNA, 25 bp, Homo sapien
aactagggtactgtcttggaatgcc

SEQ ID NO: 680464 - DNA, 25 bp, Homo sapien
caagaagcagtagcctcaaggagct

SEQ ID NO: 680465 - DNA, 25 bp, Homo sapien
aaatctcggcttggcatctcctggc

SEQ ID NO: 680466 - DNA, 25 bp, Homo sapien
aaatcccccacaaaagatgctattc

SEQ ID NO: 680467 - DNA, 25 bp, Homo sapien
taaaaatcccccacaaaagatgcta

SEQ ID NO: 680468 - DNA, 25 bp, Homo sapien
atcccccacaaaagatgctattctc

SEQ ID NO: 680469 - DNA, 25 bp, Homo sapien
aaaaatcccccacaaaagatgctat

SEQ ID NO: 680470 - DNA, 25 bp, Homo sapien
ccatcttcttcctcttcttccacac

SEQ ID NO: 680471 - DNA, 25 bp, Homo sapien
ttctccatcttcttcctcttcttcc

SEQ ID NO: 680472 - DNA, 25 bp, Homo sapien
ctccatcttcttcctcttcttccac

SEQ ID NO: 680473 - DNA, 25 bp, Homo sapien
tcatttctccatcttcttcctcttc

SEQ ID NO: 680474 - DNA, 25 bp, Homo sapien
ttcacccagatgtccagacaatgct

SEQ ID NO: 680475 - DNA, 25 bp, Homo sapien
tattcttctgtatttgcaagctgca

SEQ ID NO: 680476 - DNA, 25 bp, Homo sapien
tattaaaacttcacccagatgtcca

SEQ ID NO: 680477 - DNA, 25 bp, Homo sapien
gacaatgctccatctatgtattctt

SEQ ID NO: 680478 - DNA, 25 bp, Homo sapien
ctacagataccaggtagccctagta

SEQ ID NO: 680479 - DNA, 25 bp, Homo sapien
accaggtagccctagtactccattc

SEQ ID NO: 680480 - DNA, 25 bp, Homo sapien
gtagccctagtactccattccccgc

SEQ ID NO: 680481 - DNA, 25 bp, Homo sapien
cagataccaggtagccctagtactc

SEQ ID NO: 680482 - DNA, 25 bp, Homo sapien
tgaccaggctactgactacagcagc

SEQ ID NO: 680483 - DNA, 25 bp, Homo sapien
gatctgggattgagacataaactca

SEQ ID NO: 680484 - DNA, 25 bp, Homo sapien
taaccacaggcaaatgctatgggca

SEQ ID NO: 680485 - DNA, 25 bp, Homo sapien
ttggctttcctgttactccactgag

SEQ ID NO: 680486 - DNA, 25 bp, Homo sapien
aacagatacaacaatatatgcttcc

SEQ ID NO: 680487 - DNA, 25 bp, Homo sapien
tgcttccatgcctctaaagttaacc

SEQ ID NO: 680488 - DNA, 25 bp, Homo sapien
agccaaaagcatcccaacagataca

SEQ ID NO: 680489 - DNA, 25 bp, Homo sapien
aattatacatttgcgggttgggtat

SEQ ID NO: 680490 - DNA, 25 bp, Homo sapien
tcaaacaactgaaggtacaggactc

SEQ ID NO: 680491 - DNA, 25 bp, Homo sapien
actgaaggtacaggactcagagttc

SEQ ID NO: 680492 - DNA, 25 bp, Homo sapien
aggactcagagttcccgttgaggta

SEQ ID NO: 680493 - DNA, 25 bp, Homo sapien
tcagagttcccgttgaggtatttga

SEQ ID NO: 680494 - DNA, 25 bp, Homo sapien
ggactatgggcacgtatcaccacgc

SEQ ID NO: 680495 - DNA, 25 bp, Homo sapien
tgggactatgggcacgtatcaccac

SEQ ID NO: 680496 - DNA, 25 bp, Homo sapien
gactatgggcacgtatcaccacgcc

SEQ ID NO: 680497 - DNA, 25 bp, Homo sapien
ctatgggcacgtatcaccacgccca

SEQ ID NO: 680498 - DNA, 25 bp, Homo sapien
ttagcacagcgaagtcgagggcact

SEQ ID NO: 680499 - DNA, 25 bp, Homo sapien
aggcggttattcctctccacagccg

SEQ ID NO: 680500 - DNA, 25 bp, Homo sapien
cagtcctgccaagtccaggcggtta

SEQ ID NO: 680501 - DNA, 25 bp, Homo sapien
tgccctcagggtgagtcacagtgac

SEQ ID NO: 680502 - DNA, 25 bp, Homo sapien
tagacagaagggactctgactttac

SEQ ID NO: 680503 - DNA, 25 bp, Homo sapien
tctagttgcagtgaatgaacccgtg

SEQ ID NO: 680504 - DNA, 25 bp, Homo sapien
tcacttaatgccagagtcaggtcta

SEQ ID NO: 680505 - DNA, 25 bp, Homo sapien
cccgtgtaataacaggtgtgaatgc

SEQ ID NO: 680506 - DNA, 25 bp, Homo sapien
aatgataggcggtaaatcttcacca

SEQ ID NO: 680507 - DNA, 25 bp, Homo sapien
cattttagtgtgtttgcctgagatg

SEQ ID NO: 680508 - DNA, 25 bp, Homo sapien
catggaactgctatttgagtctgag

SEQ ID NO: 680509 - DNA, 25 bp, Homo sapien
aacagtacacggcaaacttagcttg

SEQ ID NO: 680510 - DNA, 25 bp, Homo sapien
acatcagactttggaaaatggcaga

SEQ ID NO: 680511 - DNA, 25 bp, Homo sapien
tcagactttggaaaatggcagagtt

SEQ ID NO: 680512 - DNA, 25 bp, Homo sapien
catcagactttggaaaatggcagag

SEQ ID NO: 680513 - DNA, 25 bp, Homo sapien
agactttggaaaatggcagagttgt

SEQ ID NO: 680514 - DNA, 25 bp, Homo sapien
tccatgcccttaagatactcatttt

SEQ ID NO: 680515 - DNA, 25 bp, Homo sapien
aaattccatgcccttaagatactca

SEQ ID NO: 680516 - DNA, 25 bp, Homo sapien
ttacacaaattccatgcccttaaga

SEQ ID NO: 680517 - DNA, 25 bp, Homo sapien
aattccatgcccttaagatactcat

SEQ ID NO: 680518 - DNA, 25 bp, Homo sapien
tttgccataaatgggtgctttgccc

SEQ ID NO: 680519 - DNA, 25 bp, Homo sapien
tcctggacacagactgatagatgta

SEQ ID NO: 680520 - DNA, 25 bp, Homo sapien
gaagtgatgttaagtggctcacaga

SEQ ID NO: 680521 - DNA, 25 bp, Homo sapien
aggatagactgtgtcctgggacgac

SEQ ID NO: 680522 - DNA, 25 bp, Homo sapien
cattgggagctaaactcaattgctt

SEQ ID NO: 680523 - DNA, 25 bp, Homo sapien
tacttttatctcgtatcctggctac

SEQ ID NO: 680524 - DNA, 25 bp, Homo sapien
cttttccagttgtctctattataaa

SEQ ID NO: 680525 - DNA, 25 bp, Homo sapien
tatcctggctacacatattgaacat

SEQ ID NO: 680526 - DNA, 25 bp, Homo sapien
gctgcactaatcttggtacttgaaa

SEQ ID NO: 680527 - DNA, 25 bp, Homo sapien
acatgctgttccctcactgggtgcc

SEQ ID NO: 680528 - DNA, 25 bp, Homo sapien
caccgctgcgttttagctgcactaa

SEQ ID NO: 680529 - DNA, 25 bp, Homo sapien
tcacctgggcaagtcgtctttatcc

SEQ ID NO: 680530 - DNA, 25 bp, Homo sapien
tatctccctgggtagcagacggctg

SEQ ID NO: 680531 - DNA, 25 bp, Homo sapien
tgcagagtcgccttagtccagaacc

SEQ ID NO: 680532 - DNA, 25 bp, Homo sapien
tcatctgtgaagctagggcgcctac

SEQ ID NO: 680533 - DNA, 25 bp, Homo sapien
aattctgacctaagtggcagggccc

SEQ ID NO: 680534 - DNA, 25 bp, Homo sapien
ggaccgttcccaggaggtaccagca

SEQ ID NO: 680535 - DNA, 25 bp, Homo sapien
gagatgagggcaccccgtgttcctt

SEQ ID NO: 680536 - DNA, 25 bp, Homo sapien
tcgtcaccaggtgtgatagccccag

SEQ ID NO: 680537 - DNA, 25 bp, Homo sapien
gacttgaaaacgatgctgtggcgga

SEQ ID NO: 680538 - DNA, 25 bp, Homo sapien
tgcaggagcccctgcgtcatctcgt

SEQ ID NO: 680539 - DNA, 25 bp, Homo sapien
tcatctcgttggactctttaaggga

SEQ ID NO: 680540 - DNA, 25 bp, Homo sapien
agtgagctgcaagaggcccctgtta

SEQ ID NO: 680541 - DNA, 25 bp, Homo sapien
ctctttaagggagtcaggaatagat

SEQ ID NO: 680542 - DNA, 25 bp, Homo sapien
gatgacaggtacactggactttccc

SEQ ID NO: 680543 - DNA, 25 bp, Homo sapien
aatgctggcgcaatctggaaatgga

SEQ ID NO: 680544 - DNA, 25 bp, Homo sapien
tagggtaagttacgtggcatcacgg

SEQ ID NO: 680545 - DNA, 25 bp, Homo sapien
gaccacagtgcgtccgtgatgacag

SEQ ID NO: 680546 - DNA, 25 bp, Homo sapien
tacatgtgatctaccagatagatat

SEQ ID NO: 680547 - DNA, 25 bp, Homo sapien
tacacactgtacatctacatgtgat

SEQ ID NO: 680548 - DNA, 25 bp, Homo sapien
gaaattcagcttaatatacacactg

SEQ ID NO: 680549 - DNA, 25 bp, Homo sapien
cctgctaggctggtcttagtaataa

SEQ ID NO: 680550 - DNA, 25 bp, Homo sapien
tggaggatacaacacgaatgggcgc

SEQ ID NO: 680551 - DNA, 25 bp, Homo sapien
tcagcaagctataggtccgacaggt

SEQ ID NO: 680552 - DNA, 25 bp, Homo sapien
gaagtgcaaggttcctgctcagcaa

SEQ ID NO: 680553 - DNA, 25 bp, Homo sapien
tatagttagttcacaaggaagcggc

SEQ ID NO: 680554 - DNA, 25 bp, Homo sapien
actgagctgtggtgtacgaaatgac

SEQ ID NO: 680555 - DNA, 25 bp, Homo sapien
ccgaaaggtcggttgatgtagccct

SEQ ID NO: 680556 - DNA, 25 bp, Homo sapien
aatgaatctgaacggaagtgccacc

SEQ ID NO: 680557 - DNA, 25 bp, Homo sapien
ggagcaaagttcacgaaggccatgg

SEQ ID NO: 680558 - DNA, 25 bp, Homo sapien
tgctcacactcgactttggccagaa

SEQ ID NO: 680559 - DNA, 25 bp, Homo sapien
tcataatggtaagcgctgaggcagg

SEQ ID NO: 680560 - DNA, 25 bp, Homo sapien
tcacaatgtccagctcggagtagcc

SEQ ID NO: 680561 - DNA, 25 bp, Homo sapien
cataggcatccactgacctcgaggg

SEQ ID NO: 680562 - DNA, 25 bp, Homo sapien
cctcttccagtaatgtcgacttgac

SEQ ID NO: 680563 - DNA, 25 bp, Homo sapien
agggtctccacgagctctctgagct

SEQ ID NO: 680564 - DNA, 25 bp, Homo sapien
ccagctcaggtgtgtagcccatgca

SEQ ID NO: 680565 - DNA, 25 bp, Homo sapien
tctctgagcttgtatgcagtgccca

SEQ ID NO: 680566 - DNA, 25 bp, Homo sapien
tagaactggatcagccggaatcgat

SEQ ID NO: 680567 - DNA, 25 bp, Homo sapien
cagcatgctgaaggcgccgtgcaga

SEQ ID NO: 680568 - DNA, 25 bp, Homo sapien
ggtggtatccactttgctctcatgg

SEQ ID NO: 680569 - DNA, 25 bp, Homo sapien
gctctcatggaactgcacgtacttc

SEQ ID NO: 680570 - DNA, 25 bp, Homo sapien
tcgaggggggctaccttatctcctc

SEQ ID NO: 680571 - DNA, 25 bp, Homo sapien
ccgatcgaggggggctaccttatct

SEQ ID NO: 680572 - DNA, 25 bp, Homo sapien
gaggggggctaccttatctcctcca

SEQ ID NO: 680573 - DNA, 25 bp, Homo sapien
ggggggctaccttatctcctccatg

SEQ ID NO: 680574 - DNA, 25 bp, Homo sapien
actaaaagcatggacatgttgccgc

SEQ ID NO: 680575 - DNA, 25 bp, Homo sapien
gaggcagggacatcactaaaagcat

SEQ ID NO: 680576 - DNA, 25 bp, Homo sapien
cagggacatcactaaaagcatggac

SEQ ID NO: 680577 - DNA, 25 bp, Homo sapien
catggacatgttgccgcctggacca

SEQ ID NO: 680578 - DNA, 25 bp, Homo sapien
tcccagttccacactgtcacattct

SEQ ID NO: 680579 - DNA, 25 bp, Homo sapien
ttcccagttccacactgtcacattc

SEQ ID NO: 680580 - DNA, 25 bp, Homo sapien
gctgcaggggtactgagaccagtac

SEQ ID NO: 680581 - DNA, 25 bp, Homo sapien
tgacactgccgccgaggacggcccg

SEQ ID NO: 680582 - DNA, 25 bp, Homo sapien
ggccccgtcgggctctagcctctcc

SEQ ID NO: 680583 - DNA, 25 bp, Homo sapien
cggccgagggaagcaagcgagaggc

SEQ ID NO: 680584 - DNA, 25 bp, Homo sapien
cactcggcccggaaatgatgtcacc

SEQ ID NO: 680585 - DNA, 25 bp, Homo sapien
gcgggcccgaagagagggtggacca

SEQ ID NO: 680586 - DNA, 25 bp, Homo sapien
ggtggaccacggctgcgcgctggct

SEQ ID NO: 680587 - DNA, 25 bp, Homo sapien
ggaagcggtcgatgcccgcggccga

SEQ ID NO: 680588 - DNA, 25 bp, Homo sapien
ttgtgatgaattagtcgtaagcacc

SEQ ID NO: 680589 - DNA, 25 bp, Homo sapien
tagtcgtaagcaccactgcaattgg

SEQ ID NO: 680590 - DNA, 25 bp, Homo sapien
gaattagtcgtaagcaccactgcaa

SEQ ID NO: 680591 - DNA, 25 bp, Homo sapien
aagcaccactgcaattggaccagtc

SEQ ID NO: 680592 - DNA, 25 bp, Homo sapien
tcaggatcctcactctgatctaaga

SEQ ID NO: 680593 - DNA, 25 bp, Homo sapien
aatgggccaacatctgtaacaaggt

SEQ ID NO: 680594 - DNA, 25 bp, Homo sapien
gtaatgggccaacatctgtaacaag

SEQ ID NO: 680595 - DNA, 25 bp, Homo sapien
ccagaggggtaatgggccaacatct

SEQ ID NO: 680596 - DNA, 25 bp, Homo sapien
gggtaatgggccaacatctgtaaca

SEQ ID NO: 680597 - DNA, 25 bp, Homo sapien
cattgcacccggtctcttcatcttt

SEQ ID NO: 680598 - DNA, 25 bp, Homo sapien
cgtactccgcccatgatgggctttt

SEQ ID NO: 680599 - DNA, 25 bp, Homo sapien
tgagccaccgtactccgcccatgat

SEQ ID NO: 680600 - DNA, 25 bp, Homo sapien
ctgatctcgaactcgggagcgtgaa

SEQ ID NO: 680601 - DNA, 25 bp, Homo sapien
tagcacaatgaagcaagtgtctcct

SEQ ID NO: 680602 - DNA, 25 bp, Homo sapien
agagctgaagctcccgctgggctgt

SEQ ID NO: 680603 - DNA, 25 bp, Homo sapien
cagtgtttgtctctcgggtccttca

SEQ ID NO: 680604 - DNA, 25 bp, Homo sapien
taaccttgtttgtcacacggtcgag

SEQ ID NO: 680605 - DNA, 25 bp, Homo sapien
tggtggcaccgagaaacttacttcc

SEQ ID NO: 680606 - DNA, 25 bp, Homo sapien
gagacatcgttcataaggcacagca

SEQ ID NO: 680607 - DNA, 25 bp, Homo sapien
tgaagagctgcagatgccgagaagc

SEQ ID NO: 680608 - DNA, 25 bp, Homo sapien
cattagtatttctcgggaggaccca

SEQ ID NO: 680609 - DNA, 25 bp, Homo sapien
catttatgggtctgttattgatata

SEQ ID NO: 680610 - DNA, 25 bp, Homo sapien
tatgttaatctcttctaaagttaaa

SEQ ID NO: 680611 - DNA, 25 bp, Homo sapien
tatctggtaagttgtacaggaagca

SEQ ID NO: 680612 - DNA, 25 bp, Homo sapien
gatacctaatattatctgtcataat

SEQ ID NO: 680613 - DNA, 25 bp, Homo sapien
tttgagctacaggacaaaggctgac

SEQ ID NO: 680614 - DNA, 25 bp, Homo sapien
caccctccacgaggtgtgactaact

SEQ ID NO: 680615 - DNA, 25 bp, Homo sapien
ccacgaggtgtgactaactatgcaa

SEQ ID NO: 680616 - DNA, 25 bp, Homo sapien
gtgactaactatgcaataatccacc

SEQ ID NO: 680617 - DNA, 25 bp, Homo sapien
cacaggggtctgggctcttgataga

SEQ ID NO: 680618 - DNA, 25 bp, Homo sapien
atccaatggcctctccgaggtctgg

SEQ ID NO: 680619 - DNA, 25 bp, Homo sapien
gccgtcctgtgccttggagggggcc

SEQ ID NO: 680620 - DNA, 25 bp, Homo sapien
ctagggttgaataaggaggaggtgg

SEQ ID NO: 680621 - DNA, 25 bp, Homo sapien
agcccgagggagcaaagctgcaaag

SEQ ID NO: 680622 - DNA, 25 bp, Homo sapien
tttcctccacgcagttcagcctggg

SEQ ID NO: 680623 - DNA, 25 bp, Homo sapien
ggattttcctccacgcagttcagcc

SEQ ID NO: 680624 - DNA, 25 bp, Homo sapien
ggtagttcccggctgtggagcccga

SEQ ID NO: 680625 - DNA, 25 bp, Homo sapien
accagcctatcagcctggggaatat

SEQ ID NO: 680626 - DNA, 25 bp, Homo sapien
atctggcgaagcatagtggctcacg

SEQ ID NO: 680627 - DNA, 25 bp, Homo sapien
gaagatctggcgaagcatagtggct

SEQ ID NO: 680628 - DNA, 25 bp, Homo sapien
aaaaacaagaagatctggcgaagca

SEQ ID NO: 680629 - DNA, 25 bp, Homo sapien
tatgcaacacttgggcaagcccgtg

SEQ ID NO: 680630 - DNA, 25 bp, Homo sapien
ctcaggctcatgtggacgggcattc

SEQ ID NO: 680631 - DNA, 25 bp, Homo sapien
gggcttcggtagagtcccagtgtca

SEQ ID NO: 680632 - DNA, 25 bp, Homo sapien
gccctgagaggcgagaattattgcc

SEQ ID NO: 680633 - DNA, 25 bp, Homo sapien
accattgtgctcagctgacctaagc

SEQ ID NO: 680634 - DNA, 25 bp, Homo sapien
tattgaggaactaccacctaagcac

SEQ ID NO: 680635 - DNA, 25 bp, Homo sapien
agcagaattcatgagccaaggttac

SEQ ID NO: 680636 - DNA, 25 bp, Homo sapien
gggaacgctcacaacaaggcaatga

SEQ ID NO: 680637 - DNA, 25 bp, Homo sapien
tgacttcggtccacacttagcctct

SEQ ID NO: 680638 - DNA, 25 bp, Homo sapien
tcggtccacacttagcctcttgagt

SEQ ID NO: 680639 - DNA, 25 bp, Homo sapien
caagggtgacttcggtccacactta

SEQ ID NO: 680640 - DNA, 25 bp, Homo sapien
taacaagggtgacttcggtccacac

SEQ ID NO: 680641 - DNA, 25 bp, Homo sapien
tatttgcccggaaggtattgcgcac

SEQ ID NO: 680642 - DNA, 25 bp, Homo sapien
tctgcaggacgaatcgaaggaagcc

SEQ ID NO: 680643 - DNA, 25 bp, Homo sapien
gcagggccctgctttaaacagtgaa

SEQ ID NO: 680644 - DNA, 25 bp, Homo sapien
tccacccaaggagatggcacaatga

SEQ ID NO: 680645 - DNA, 25 bp, Homo sapien
ctcgagtctgcactgggtagggaca

SEQ ID NO: 680646 - DNA, 25 bp, Homo sapien
gatgaagcgccagccttggatcagg

SEQ ID NO: 680647 - DNA, 25 bp, Homo sapien
gctctcaagccagactcgagtctgc

SEQ ID NO: 680648 - DNA, 25 bp, Homo sapien
tggatcaggaccctgtccagaggtg

SEQ ID NO: 680649 - DNA, 25 bp, Homo sapien
tggccacccaccctgatggtgtctg

SEQ ID NO: 680650 - DNA, 25 bp, Homo sapien
aagctctcagcccaggatagccggg

SEQ ID NO: 680651 - DNA, 25 bp, Homo sapien
gctgaggtccagatcgtagttttag

SEQ ID NO: 680652 - DNA, 25 bp, Homo sapien
gtccagatgcagttcgtggccaccc

SEQ ID NO: 680653 - DNA, 25 bp, Homo sapien
agccaggaccgtggccacagaaagg

SEQ ID NO: 680654 - DNA, 25 bp, Homo sapien
tggagaggcccctgtcaatggtgtc

SEQ ID NO: 680655 - DNA, 25 bp, Homo sapien
gcccctgtcaatggtgtctgtgctg

SEQ ID NO: 680656 - DNA, 25 bp, Homo sapien
ctgtgctgaacaagtcccatttgct

SEQ ID NO: 680657 - DNA, 25 bp, Homo sapien
gatgagtggagaggcccctgtcaat

SEQ ID NO: 680658 - DNA, 25 bp, Homo sapien
ctgaggtttgtggagccaacggcaa

SEQ ID NO: 680659 - DNA, 25 bp, Homo sapien
gcaggcatcctggtggaaaaggcat

SEQ ID NO: 680660 - DNA, 25 bp, Homo sapien
gaaaaggcatcccaggttgcaggac

SEQ ID NO: 680661 - DNA, 25 bp, Homo sapien
cccctggcctgacgtgaagtagctt

SEQ ID NO: 680662 - DNA, 25 bp, Homo sapien
cacgtaaaaccaccacggcccgcat

SEQ ID NO: 680663 - DNA, 25 bp, Homo sapien
gacgcctggtataaaatccctgttc

SEQ ID NO: 680664 - DNA, 25 bp, Homo sapien
tgttcccagccatatctatacccag

SEQ ID NO: 680665 - DNA, 25 bp, Homo sapien
cattttctttagcactggttccctt

SEQ ID NO: 680666 - DNA, 25 bp, Homo sapien
cctctcccggcctggtgttttcatt

SEQ ID NO: 680667 - DNA, 25 bp, Homo sapien
cagagtctccacatccttggatttc

SEQ ID NO: 680668 - DNA, 25 bp, Homo sapien
agtctccacatccttggatttctcc

SEQ ID NO: 680669 - DNA, 25 bp, Homo sapien
gagtctccacatccttggatttctc

SEQ ID NO: 680670 - DNA, 25 bp, Homo sapien
ctcagagtctccacatccttggatt

SEQ ID NO: 680671 - DNA, 25 bp, Homo sapien
gctggtgttctgcgctcctggcctt

SEQ ID NO: 680672 - DNA, 25 bp, Homo sapien
ctggtgttctgcgctcctggccttg

SEQ ID NO: 680673 - DNA, 25 bp, Homo sapien
ctctgggcagccaggggtgtggggc

SEQ ID NO: 680674 - DNA, 25 bp, Homo sapien
tcagagtggccctggctctgggcag

SEQ ID NO: 680675 - DNA, 25 bp, Homo sapien
gcagccaggggtgtggggctttggg

SEQ ID NO: 680676 - DNA, 25 bp, Homo sapien
tgggcagccaggggtgtggggcttt

SEQ ID NO: 680677 - DNA, 25 bp, Homo sapien
tggctccataaacagcccgtcgctc

SEQ ID NO: 680678 - DNA, 25 bp, Homo sapien
tccagcctggcgagcaggttcatgg

SEQ ID NO: 680679 - DNA, 25 bp, Homo sapien
cccggctgctaatcacttccagatt

SEQ ID NO: 680680 - DNA, 25 bp, Homo sapien
cacttccagattggccgggtcaggg

SEQ ID NO: 680681 - DNA, 25 bp, Homo sapien
ctccccgaggcctgagtccccattt

SEQ ID NO: 680682 - DNA, 25 bp, Homo sapien
gctctgtgagttcccctcaggacca

SEQ ID NO: 680683 - DNA, 25 bp, Homo sapien
gccgctgggtggtagccttgtccca

SEQ ID NO: 680684 - DNA, 25 bp, Homo sapien
ctgctccgctgagcagagacacagc

SEQ ID NO: 680685 - DNA, 25 bp, Homo sapien
gcctaatggattcggcctggctgac

SEQ ID NO: 680686 - DNA, 25 bp, Homo sapien
tgggcaaaaatgtcacagggcatca

SEQ ID NO: 680687 - DNA, 25 bp, Homo sapien
ggcaaaaatgtcacagggcatcagc

SEQ ID NO: 680688 - DNA, 25 bp, Homo sapien
gggcatcagcctaatggattcggcc

SEQ ID NO: 680689 - DNA, 25 bp, Homo sapien
cagacttgatagttgctgcttcaaa

SEQ ID NO: 680690 - DNA, 25 bp, Homo sapien
caggcaatggtctgacaataaaaag

SEQ ID NO: 680691 - DNA, 25 bp, Homo sapien
caggatgttaaatccttagaactaa

SEQ ID NO: 680692 - DNA, 25 bp, Homo sapien
ataaaaaggctgcttatggaatact

SEQ ID NO: 680693 - DNA, 25 bp, Homo sapien
tgtcaaaggaatataagaacgggat

SEQ ID NO: 680694 - DNA, 25 bp, Homo sapien
atcccgttcttatattcctttgaca

SEQ ID NO: 680695 - DNA, 25 bp, Homo sapien
ggttacaatctatgcttcggccaag

SEQ ID NO: 680696 - DNA, 25 bp, Homo sapien
cagttgagttagatgtgccccacca

SEQ ID NO: 680697 - DNA, 25 bp, Homo sapien
cccaggccgtgtaatcagcagcaag

SEQ ID NO: 680698 - DNA, 25 bp, Homo sapien
tggaaagacgcagcaatttgccagg

SEQ ID NO: 680699 - DNA, 25 bp, Homo sapien
ctgtaacactgtccttcgggcggct

SEQ ID NO: 680700 - DNA, 25 bp, Homo sapien
cattaggcgccgaagctcttgcagg

SEQ ID NO: 680701 - DNA, 25 bp, Homo sapien
gtaacactgtccttcgggcggctga

SEQ ID NO: 680702 - DNA, 25 bp, Homo sapien
ttagacatcattaggcgccgaagct

SEQ ID NO: 680703 - DNA, 25 bp, Homo sapien
caaagaacctaggaattgggcccag

SEQ ID NO: 680704 - DNA, 25 bp, Homo sapien
gctcttcaataatggccgctgctgg

SEQ ID NO: 680705 - DNA, 25 bp, Homo sapien
cagtggttcacaaataaggcccagg

SEQ ID NO: 680706 - DNA, 25 bp, Homo sapien
tcatatttcaaagcgaccagcacag

SEQ ID NO: 680707 - DNA, 25 bp, Homo sapien
ttagaactatttactccattcatat

SEQ ID NO: 680708 - DNA, 25 bp, Homo sapien
gaactatttactccattcatattaa

SEQ ID NO: 680709 - DNA, 25 bp, Homo sapien
cattagaactatttactccattcat

SEQ ID NO: 680710 - DNA, 25 bp, Homo sapien
cactccattagaactatttactcca

SEQ ID NO: 680711 - DNA, 25 bp, Homo sapien
aaaaagagtacggagatgtcacgca

SEQ ID NO: 680712 - DNA, 25 bp, Homo sapien
cactagtttatatgacttccgggcc

SEQ ID NO: 680713 - DNA, 25 bp, Homo sapien
gcattctctattctaggaagccgag

SEQ ID NO: 680714 - DNA, 25 bp, Homo sapien
tagtctgacctgagagattactggc

SEQ ID NO: 680715 - DNA, 25 bp, Homo sapien
caagtgactctcctgtctcctgagt

SEQ ID NO: 680716 - DNA, 25 bp, Homo sapien
ctcagctgatctgccctcttcggcc

SEQ ID NO: 680717 - DNA, 25 bp, Homo sapien
acctcagctgatctgccctcttcgg

SEQ ID NO: 680718 - DNA, 25 bp, Homo sapien
ctgacctcagctgatctgccctctt

SEQ ID NO: 680719 - DNA, 25 bp, Homo sapien
cccgtgtaaacagcggcatctagtg

SEQ ID NO: 680720 - DNA, 25 bp, Homo sapien
ctcaggaaaggagtcttgtactgca

SEQ ID NO: 680721 - DNA, 25 bp, Homo sapien
gagtcttgtactgcataattgctcc

SEQ ID NO: 680722 - DNA, 25 bp, Homo sapien
taattgctcccgtgtaaacagcggc

SEQ ID NO: 680723 - DNA, 25 bp, Homo sapien
gacattgcgacactttgtcaaaaaa

SEQ ID NO: 680724 - DNA, 25 bp, Homo sapien
aaaccccaagctaaggctgggtgcg

SEQ ID NO: 680725 - DNA, 25 bp, Homo sapien
cctgggtgacattgcgacactttgt

SEQ ID NO: 680726 - DNA, 25 bp, Homo sapien
tgtaatctcggcatctgggggggcc

SEQ ID NO: 680727 - DNA, 25 bp, Homo sapien
tgtccattaggcactacaggcccag

SEQ ID NO: 680728 - DNA, 25 bp, Homo sapien
tagcacaggaagtactacctttgca

SEQ ID NO: 680729 - DNA, 25 bp, Homo sapien
aatgtcattgccacgaggagccaga

SEQ ID NO: 680730 - DNA, 25 bp, Homo sapien
cataagatgctagcaacagggaaaa

SEQ ID NO: 680731 - DNA, 25 bp, Homo sapien
cattgcttaaacaggcgtcagtgga

SEQ ID NO: 680732 - DNA, 25 bp, Homo sapien
ggaaacattaggtcaaccagtcacc

SEQ ID NO: 680733 - DNA, 25 bp, Homo sapien
gactccacactaggttttataacag

SEQ ID NO: 680734 - DNA, 25 bp, Homo sapien
gaatgcagatcacagtaactgttgg

SEQ ID NO: 680735 - DNA, 25 bp, Homo sapien
ttggagtttcctagccagcagcagc

SEQ ID NO: 680736 - DNA, 25 bp, Homo sapien
taccagggtggtacagacagaacaa

SEQ ID NO: 680737 - DNA, 25 bp, Homo sapien
tgtgaatgtccccagaaagctggag

SEQ ID NO: 680738 - DNA, 25 bp, Homo sapien
tctgcacagcgacgagacacaatta

SEQ ID NO: 680739 - DNA, 25 bp, Homo sapien
aaaagaaatcttgctagtcatgaca

SEQ ID NO: 680740 - DNA, 25 bp, Homo sapien
gcctagtattgggtatcaatccaaa

SEQ ID NO: 680741 - DNA, 25 bp, Homo sapien
gaaatcctgccagtcggagaattgc

SEQ ID NO: 680742 - DNA, 25 bp, Homo sapien
tctcaaagagatcatctgcacttcc

SEQ ID NO: 680743 - DNA, 25 bp, Homo sapien
gaggatcaagcgttgcctagacaca

SEQ ID NO: 680744 - DNA, 25 bp, Homo sapien
tcctctgaagcatgggtaccagtac

SEQ ID NO: 680745 - DNA, 25 bp, Homo sapien
gaaatattccatgtctaacgctgtg

SEQ ID NO: 680746 - DNA, 25 bp, Homo sapien
gctgtggacagctagacatttgcca

SEQ ID NO: 680747 - DNA, 25 bp, Homo sapien
tccaactggcagcatactctgtctc

SEQ ID NO: 680748 - DNA, 25 bp, Homo sapien
cctggatcacatggtatagaccttt

SEQ ID NO: 680749 - DNA, 25 bp, Homo sapien
gctactactgacaatgctgcatgaa

SEQ ID NO: 680750 - DNA, 25 bp, Homo sapien
gcctttgggcaatacattcaagaga

SEQ ID NO: 680751 - DNA, 25 bp, Homo sapien
tttccccggtatttagcagacgcag

SEQ ID NO: 680752 - DNA, 25 bp, Homo sapien
tcagcatatgatggaccttcagaga

SEQ ID NO: 680753 - DNA, 25 bp, Homo sapien
gcccaagctgttttaggcagacaga

SEQ ID NO: 680754 - DNA, 25 bp, Homo sapien
aactgaaattcagggtagcccaagc

SEQ ID NO: 680755 - DNA, 25 bp, Homo sapien
gactttgggcaagagatctgactcc

SEQ ID NO: 680756 - DNA, 25 bp, Homo sapien
cattatgaagactgggaactctcac

SEQ ID NO: 680757 - DNA, 25 bp, Homo sapien
tcacagtgctagtgcagagtcctgc

SEQ ID NO: 680758 - DNA, 25 bp, Homo sapien
tatgtgtcctcaaaaaacggttggc

SEQ ID NO: 680759 - DNA, 25 bp, Homo sapien
cagagggggttcaaatatataaact

SEQ ID NO: 680760 - DNA, 25 bp, Homo sapien
tcagagggggttcaaatatataaac

SEQ ID NO: 680761 - DNA, 25 bp, Homo sapien
agagggggttcaaatatataaactg

SEQ ID NO: 680762 - DNA, 25 bp, Homo sapien
gagggggttcaaatatataaactga

SEQ ID NO: 680763 - DNA, 25 bp, Homo sapien
taaaaggaggcacagtgaatttaag

SEQ ID NO: 680764 - DNA, 25 bp, Homo sapien
aaaggaggcacagtgaatttaagac

SEQ ID NO: 680765 - DNA, 25 bp, Homo sapien
tccgtgataaggctaatatttttta

SEQ ID NO: 680766 - DNA, 25 bp, Homo sapien
tttaaaaggaggcacagtgaattta

SEQ ID NO: 680767 - DNA, 25 bp, Homo sapien
tcttccaacagtcggaaattgcgag

SEQ ID NO: 680768 - DNA, 25 bp, Homo sapien
cagtcggaaattgcgagggactttt

SEQ ID NO: 680769 - DNA, 25 bp, Homo sapien
tcctttctggccttcttcgagttct

SEQ ID NO: 680770 - DNA, 25 bp, Homo sapien
tcttgtaagtgtcatgtcttcgtca

SEQ ID NO: 680771 - DNA, 25 bp, Homo sapien
tatagagccagaagcatttgcctag

SEQ ID NO: 680772 - DNA, 25 bp, Homo sapien
actgtgaccgaacatgtggcatcaa

SEQ ID NO: 680773 - DNA, 25 bp, Homo sapien
gtctcaggatatagagccagaagca

SEQ ID NO: 680774 - DNA, 25 bp, Homo sapien
gcctagagcaaacactgtgaccgaa

SEQ ID NO: 680775 - DNA, 25 bp, Homo sapien
cgacccggtaggagtgttattctgg

SEQ ID NO: 680776 - DNA, 25 bp, Homo sapien
taacccagattgtaggtagccaacc

SEQ ID NO: 680777 - DNA, 25 bp, Homo sapien
tctggagaagttagaaccgggcagc

SEQ ID NO: 680778 - DNA, 25 bp, Homo sapien
cagcagtctggcctgactcagaatc

SEQ ID NO: 680779 - DNA, 25 bp, Homo sapien
tgcgtcgctcttgcttgaaggccgg

SEQ ID NO: 680780 - DNA, 25 bp, Homo sapien
cttgcgtcgctcttgcttgaaggcc

SEQ ID NO: 680781 - DNA, 25 bp, Homo sapien
cgtcgctcttgcttgaaggccggcc

SEQ ID NO: 680782 - DNA, 25 bp, Homo sapien
ttgcgtcgctcttgcttgaaggccg

SEQ ID NO: 680783 - DNA, 25 bp, Homo sapien
gcgcgcacgcacatacgccgccgct

SEQ ID NO: 680784 - DNA, 25 bp, Homo sapien
ggagacctgcacgacccgtggcctg

SEQ ID NO: 680785 - DNA, 25 bp, Homo sapien
tgcacgacccgtggcctggaaggct

SEQ ID NO: 680786 - DNA, 25 bp, Homo sapien
acgcccgccccggagacctgcacga

SEQ ID NO: 680787 - DNA, 25 bp, Homo sapien
tttgcagtgaaattttctaggttca

SEQ ID NO: 680788 - DNA, 25 bp, Homo sapien
ctttgcagtgaaattttctaggttc

SEQ ID NO: 680789 - DNA, 25 bp, Homo sapien
gacttcaggtaagacgcttgaacct

SEQ ID NO: 680790 - DNA, 25 bp, Homo sapien
ctttgtgacttcaggtaagacgctt

SEQ ID NO: 680791 - DNA, 25 bp, Homo sapien
aagacgcttgaacctctcctggcat

SEQ ID NO: 680792 - DNA, 25 bp, Homo sapien
tcaggtaagacgcttgaacctctcc

SEQ ID NO: 680793 - DNA, 25 bp, Homo sapien
cttctatgaggatagtagtatcaac

SEQ ID NO: 680794 - DNA, 25 bp, Homo sapien
ccccttctatgaggatagtagtatc

SEQ ID NO: 680795 - DNA, 25 bp, Homo sapien
agtttccccttctatgaggatagta

SEQ ID NO: 680796 - DNA, 25 bp, Homo sapien
ttccccttctatgaggatagtagta

SEQ ID NO: 680797 - DNA, 25 bp, Homo sapien
tgtggagataaaatgctttcctaaa

SEQ ID NO: 680798 - DNA, 25 bp, Homo sapien
gcaactcctgtgaatatccccattt

SEQ ID NO: 680799 - DNA, 25 bp, Homo sapien
caagccgttacatccaacttttaat

SEQ ID NO: 680800 - DNA, 25 bp, Homo sapien
agctcatcgcaggaagaggttaggc

SEQ ID NO: 680801 - DNA, 25 bp, Homo sapien
aataattcccgtgccgagctcatcg

SEQ ID NO: 680802 - DNA, 25 bp, Homo sapien
tgtttactcgcatggattccttggc

SEQ ID NO: 680803 - DNA, 25 bp, Homo sapien
ggctcttgtaggaaacttcttgcaa

SEQ ID NO: 680804 - DNA, 25 bp, Homo sapien
gggactctgaaaacttgtgaactta

SEQ ID NO: 680805 - DNA, 25 bp, Homo sapien
aaaacacactcgtggttcaagcctg

SEQ ID NO: 680806 - DNA, 25 bp, Homo sapien
taatcttcacacctatcctatgagg

SEQ ID NO: 680807 - DNA, 25 bp, Homo sapien
tgtgaacttaaaccggcatggcctc

SEQ ID NO: 680808 - DNA, 25 bp, Homo sapien
cacagtctggtgcaaagttaagtgc

SEQ ID NO: 680809 - DNA, 25 bp, Homo sapien
tgtctggccctcataggcacttgtt

SEQ ID NO: 680810 - DNA, 25 bp, Homo sapien
gcaaatggtgcaaagagtactcact

SEQ ID NO: 680811 - DNA, 25 bp, Homo sapien
gcagcgcaccttctggttttgagaa

SEQ ID NO: 680812 - DNA, 25 bp, Homo sapien
aatcaaaagtctagttggcaaagga

SEQ ID NO: 680813 - DNA, 25 bp, Homo sapien
tggcattatgggtcacgttttaaaa

SEQ ID NO: 680814 - DNA, 25 bp, Homo sapien
tatgagttgtcgaattctaacaccc

SEQ ID NO: 680815 - DNA, 25 bp, Homo sapien
ggtcccctcaggcatagtcacaaat

SEQ ID NO: 680816 - DNA, 25 bp, Homo sapien
tgtgtacttgctgtcccatcaagag

SEQ ID NO: 680817 - DNA, 25 bp, Homo sapien
ccaagcttgttcttgcctcagggcc

SEQ ID NO: 680818 - DNA, 25 bp, Homo sapien
tgcttttccgctgtggttctgtcct

SEQ ID NO: 680819 - DNA, 25 bp, Homo sapien
tcacttctttcgtgtctgacctcct

SEQ ID NO: 680820 - DNA, 25 bp, Homo sapien
tctctgacatactctggccagaggg

SEQ ID NO: 680821 - DNA, 25 bp, Homo sapien
gaagtcacaaatagggatcagccat

SEQ ID NO: 680822 - DNA, 25 bp, Homo sapien
tggtattggaaacatcagctctggc

SEQ ID NO: 680823 - DNA, 25 bp, Homo sapien
cgaggcagccaaggttaagtagact

SEQ ID NO: 680824 - DNA, 25 bp, Homo sapien
gctccacgacgcttaggtgtgcctg

SEQ ID NO: 680825 - DNA, 25 bp, Homo sapien
gggctgtggcagaacaatgctccac

SEQ ID NO: 680826 - DNA, 25 bp, Homo sapien
ttgcagatagagcaactcaggtggc

SEQ ID NO: 680827 - DNA, 25 bp, Homo sapien
gagtgggtaaacctcctctctacca

SEQ ID NO: 680828 - DNA, 25 bp, Homo sapien
aggttggcaaccaggtagcaggctc

SEQ ID NO: 680829 - DNA, 25 bp, Homo sapien
gctagggaaggttggcaaccaggta

SEQ ID NO: 680830 - DNA, 25 bp, Homo sapien
agggaaggttggcaaccaggtagca

SEQ ID NO: 680831 - DNA, 25 bp, Homo sapien
aggggccagctcaaagaggctggaa

SEQ ID NO: 680832 - DNA, 25 bp, Homo sapien
ttctgggcccatttcatgtcatctg

SEQ ID NO: 680833 - DNA, 25 bp, Homo sapien
gtcgccagaagcctatcttctccag

SEQ ID NO: 680834 - DNA, 25 bp, Homo sapien
tggatgaggtcctccaggcgtcgcc

SEQ ID NO: 680835 - DNA, 25 bp, Homo sapien
ttctcgcccgtcaggccctggatga

SEQ ID NO: 680836 - DNA, 25 bp, Homo sapien
gagtcagtacaggataggacacagg

SEQ ID NO: 680837 - DNA, 25 bp, Homo sapien
cactgtggtggccttatcactcagc

SEQ ID NO: 680838 - DNA, 25 bp, Homo sapien
tccctgatcatccacttaagcagca

SEQ ID NO: 680839 - DNA, 25 bp, Homo sapien
caggcacttacttatatttgagcac

SEQ ID NO: 680840 - DNA, 25 bp, Homo sapien
tgtttgctgcaggagcctacgccca

SEQ ID NO: 680841 - DNA, 25 bp, Homo sapien
cacaacgccatgaagtcgagggaga

SEQ ID NO: 680842 - DNA, 25 bp, Homo sapien
tacgcccaaagcaccatggcatgtg

SEQ ID NO: 680843 - DNA, 25 bp, Homo sapien
caataaatacgggatgatgggtggc

SEQ ID NO: 680844 - DNA, 25 bp, Homo sapien
tgtgcgaccacttgtggatctggtt

SEQ ID NO: 680845 - DNA, 25 bp, Homo sapien
ttggtgaaggtgccgaagatgatca

SEQ ID NO: 680846 - DNA, 25 bp, Homo sapien
tgtttacgtggcaggatgacatgcc

SEQ ID NO: 680847 - DNA, 25 bp, Homo sapien
gcgtggcagcccaaagtacgtgtgc

SEQ ID NO: 680848 - DNA, 25 bp, Homo sapien
ctgtgggtgcggaacttgtaggcca

SEQ ID NO: 680849 - DNA, 25 bp, Homo sapien
tgtgggtgcggaacttgtaggccat

SEQ ID NO: 680850 - DNA, 25 bp, Homo sapien
gctgtgggtgcggaacttgtaggcc

SEQ ID NO: 680851 - DNA, 25 bp, Homo sapien
gggctgtgggtgcggaacttgtagg

SEQ ID NO: 680852 - DNA, 25 bp, Homo sapien
ccaggcagttgtccccgttggtctc

SEQ ID NO: 680853 - DNA, 25 bp, Homo sapien
tagctgtcgggtcaatgtggtgctc

SEQ ID NO: 680854 - DNA, 25 bp, Homo sapien
tcaatgtggtgctcccggaagggtc

SEQ ID NO: 680855 - DNA, 25 bp, Homo sapien
cgatgaagtcgtgccgtgtgatagc

SEQ ID NO: 680856 - DNA, 25 bp, Homo sapien
cagttgaggaggtccctctaagtaa

SEQ ID NO: 680857 - DNA, 25 bp, Homo sapien
cagtctccctacctgtgctgtaagg

SEQ ID NO: 680858 - DNA, 25 bp, Homo sapien
gagatgagccgaaatgaccctggaa

SEQ ID NO: 680859 - DNA, 25 bp, Homo sapien
gggacttcagttggcggaaactaca

SEQ ID NO: 680860 - DNA, 25 bp, Homo sapien
ccccagtgtaccaggccagacaaga

SEQ ID NO: 680861 - DNA, 25 bp, Homo sapien
ccagtgtaccaggccagacaagaag

SEQ ID NO: 680862 - DNA, 25 bp, Homo sapien
cccagtgtaccaggccagacaagaa

SEQ ID NO: 680863 - DNA, 25 bp, Homo sapien
gtcccttcttctctagttgggatgt

SEQ ID NO: 680864 - DNA, 25 bp, Homo sapien
aagaaagtacctcggccaggtgcgg

SEQ ID NO: 680865 - DNA, 25 bp, Homo sapien
gcaccagtgctgcctggaactgcag

SEQ ID NO: 680866 - DNA, 25 bp, Homo sapien
gaaagaaagtacctcggccaggtgc

SEQ ID NO: 680867 - DNA, 25 bp, Homo sapien
caccagtgctgcctggaactgcagc

SEQ ID NO: 680868 - DNA, 25 bp, Homo sapien
actggatgccgactttccagaggcc

SEQ ID NO: 680869 - DNA, 25 bp, Homo sapien
catcacaggtgccaagcacgggagg

SEQ ID NO: 680870 - DNA, 25 bp, Homo sapien
cagaggccctgtggtatccatcaca

SEQ ID NO: 680871 - DNA, 25 bp, Homo sapien
gcagcacagcttcatgcaggcacct

SEQ ID NO: 680872 - DNA, 25 bp, Homo sapien
tcaacagcggccatctcaagcatct

SEQ ID NO: 680873 - DNA, 25 bp, Homo sapien
tgcctccagacctagatttccagtt

SEQ ID NO: 680874 - DNA, 25 bp, Homo sapien
cagaatttgacaacgcatcaccacc

SEQ ID NO: 680875 - DNA, 25 bp, Homo sapien
cccagattgctatttccagctgcct

SEQ ID NO: 680876 - DNA, 25 bp, Homo sapien
ggcgatgaggctgaagcacaggatc

SEQ ID NO: 680877 - DNA, 25 bp, Homo sapien
caggttgtgggcgatgaggctgaag

SEQ ID NO: 680878 - DNA, 25 bp, Homo sapien
aagcacaggatcacagagcaccact

SEQ ID NO: 680879 - DNA, 25 bp, Homo sapien
caacaccgagtatgacgaggggtgt

SEQ ID NO: 680880 - DNA, 25 bp, Homo sapien
ggaattcatggacaaatagggctct

SEQ ID NO: 680881 - DNA, 25 bp, Homo sapien
aaagtatggcgtgtgggccagggag

SEQ ID NO: 680882 - DNA, 25 bp, Homo sapien
ggcagtggggcttctaaaagtatgg

SEQ ID NO: 680883 - DNA, 25 bp, Homo sapien
gaattcatggacaaatagggctctg

SEQ ID NO: 680884 - DNA, 25 bp, Homo sapien
cagactctgattcaggcatggctgt

SEQ ID NO: 680885 - DNA, 25 bp, Homo sapien
aaagggccttgattgcagatttggg

SEQ ID NO: 680886 - DNA, 25 bp, Homo sapien
gataaagggccttgattgcagattt

SEQ ID NO: 680887 - DNA, 25 bp, Homo sapien
gaggagataaagggccttgattgca

SEQ ID NO: 680888 - DNA, 25 bp, Homo sapien
agggcagctttgggcttggaccggg

SEQ ID NO: 680889 - DNA, 25 bp, Homo sapien
gctgaagggcagctttgggcttgga

SEQ ID NO: 680890 - DNA, 25 bp, Homo sapien
tgaagggcagctttgggcttggacc

SEQ ID NO: 680891 - DNA, 25 bp, Homo sapien
ggcagctttgggcttggaccgggtc

SEQ ID NO: 680892 - DNA, 25 bp, Homo sapien
gcgcagccagctcgcgggccccggc

SEQ ID NO: 680893 - DNA, 25 bp, Homo sapien
caacaagacgcctcgtcctcgtcca

SEQ ID NO: 680894 - DNA, 25 bp, Homo sapien
gcgccccagcggcaacaagacgcct

SEQ ID NO: 680895 - DNA, 25 bp, Homo sapien
gcggcaacaagacgcctcgtcctcg

SEQ ID NO: 680896 - DNA, 25 bp, Homo sapien
gcagggccgcggaaccgcggcgaga

SEQ ID NO: 680897 - DNA, 25 bp, Homo sapien
cgatcggcccggtgcgctctgctgg

SEQ ID NO: 680898 - DNA, 25 bp, Homo sapien
atcacgccgcccaatgaccgcccag

SEQ ID NO: 680899 - DNA, 25 bp, Homo sapien
ggccactcgcccgatcggcccggtg

SEQ ID NO: 680900 - DNA, 25 bp, Homo sapien
cctcagggcccaagaaggttgctca

SEQ ID NO: 680901 - DNA, 25 bp, Homo sapien
tctggtcggtcaaccaacaggtggc

SEQ ID NO: 680902 - DNA, 25 bp, Homo sapien
gaccagaggtagtgtggcagaatcc

SEQ ID NO: 680903 - DNA, 25 bp, Homo sapien
gttttgtcatattccagccagcagg

SEQ ID NO: 680904 - DNA, 25 bp, Homo sapien
taaggtggcctcattcatggtgaca

SEQ ID NO: 680905 - DNA, 25 bp, Homo sapien
tcacttacctaaggcacctgggttg

SEQ ID NO: 680906 - DNA, 25 bp, Homo sapien
taggcccagatgtcccataaagtct

SEQ ID NO: 680907 - DNA, 25 bp, Homo sapien
attgagcacgtactgcacgccaggc

SEQ ID NO: 680908 - DNA, 25 bp, Homo sapien
tgcccgttaggaggagacagatcaa

SEQ ID NO: 680909 - DNA, 25 bp, Homo sapien
tgcatgcccgttaggaggagacaga

SEQ ID NO: 680910 - DNA, 25 bp, Homo sapien
aggagacagatcaagcacgtagtca

SEQ ID NO: 680911 - DNA, 25 bp, Homo sapien
aagcacgtagtcacgctgcgctgtg

SEQ ID NO: 680912 - DNA, 25 bp, Homo sapien
tcctggtgaaggaggccaccctttc

SEQ ID NO: 680913 - DNA, 25 bp, Homo sapien
gaaggaggccaccctttcctcttga

SEQ ID NO: 680914 - DNA, 25 bp, Homo sapien
ctggtgaaggaggccaccctttcct

SEQ ID NO: 680915 - DNA, 25 bp, Homo sapien
aaggaggccaccctttcctcttgag

SEQ ID NO: 680916 - DNA, 25 bp, Homo sapien
ggttattgcagcgttattcactaag

SEQ ID NO: 680917 - DNA, 25 bp, Homo sapien
tatctgcgcttgcacggttattgca

SEQ ID NO: 680918 - DNA, 25 bp, Homo sapien
cggccctgggctactactgttgctg

SEQ ID NO: 680919 - DNA, 25 bp, Homo sapien
tctgcgcttgcacatatcctatgga

SEQ ID NO: 680920 - DNA, 25 bp, Homo sapien
gctattgcaaagcatttgctgttct

SEQ ID NO: 680921 - DNA, 25 bp, Homo sapien
tcacaagcttttgctattgcaaagc

SEQ ID NO: 680922 - DNA, 25 bp, Homo sapien
gcttttgctattgcaaagcatttgc

SEQ ID NO: 680923 - DNA, 25 bp, Homo sapien
ctcacaagcttttgctattgcaaag

SEQ ID NO: 680924 - DNA, 25 bp, Homo sapien
tcctctcttctcattgcgttttgtt

SEQ ID NO: 680925 - DNA, 25 bp, Homo sapien
tctcttctcattgcgttttgtttgt

SEQ ID NO: 680926 - DNA, 25 bp, Homo sapien
ctctcttctcattgcgttttgtttg

SEQ ID NO: 680927 - DNA, 25 bp, Homo sapien
atcctctcttctcattgcgttttgt

SEQ ID NO: 680928 - DNA, 25 bp, Homo sapien
tgtccatgaatgtgtctttagggcc

SEQ ID NO: 680929 - DNA, 25 bp, Homo sapien
cagcatgtgccaaggaacattcgat

SEQ ID NO: 680930 - DNA, 25 bp, Homo sapien
tggacactctggttcctctcggcgg

SEQ ID NO: 680931 - DNA, 25 bp, Homo sapien
attttcctccatagtgctgaccaga

SEQ ID NO: 680932 - DNA, 25 bp, Homo sapien
cagcggttgctacgggccgccctta

SEQ ID NO: 680933 - DNA, 25 bp, Homo sapien
gccgcctgcctttaaatccatggaa

SEQ ID NO: 680934 - DNA, 25 bp, Homo sapien
gaaactttagcgagtcagagccgcg

SEQ ID NO: 680935 - DNA, 25 bp, Homo sapien
gcgttcatgcaacgcctggtggcct

SEQ ID NO: 680936 - DNA, 25 bp, Homo sapien
agctgggcagcatcggcgaccacga

SEQ ID NO: 680937 - DNA, 25 bp, Homo sapien
catcgacttcagcccgtacctggag

SEQ ID NO: 680938 - DNA, 25 bp, Homo sapien
tcggcgaccacgagcgcgccatcga

SEQ ID NO: 680939 - DNA, 25 bp, Homo sapien
gactgcttggctgctgcgtacggcg

SEQ ID NO: 680940 - DNA, 25 bp, Homo sapien
tcctctccgacctcttctccgacga

SEQ ID NO: 680941 - DNA, 25 bp, Homo sapien
acgacttcctctccgacctcttctc

SEQ ID NO: 680942 - DNA, 25 bp, Homo sapien
cacgacttcctctccgacctcttct

SEQ ID NO: 680943 - DNA, 25 bp, Homo sapien
acttcctctccgacctcttctccga

SEQ ID NO: 680944 - DNA, 25 bp, Homo sapien
acaaggccaagatgcgcaacctgga

SEQ ID NO: 680945 - DNA, 25 bp, Homo sapien
aacctggagacgcagcacaaggtcc

SEQ ID NO: 680946 - DNA, 25 bp, Homo sapien
caagaagaccgtggacaagcacagc

SEQ ID NO: 680947 - DNA, 25 bp, Homo sapien
caagcacagcgacgagtacaagatc

SEQ ID NO: 680948 - DNA, 25 bp, Homo sapien
gccgggccctgagtaatcgcttaaa

SEQ ID NO: 680949 - DNA, 25 bp, Homo sapien
ggactgacgcaacccacgtgtaact

SEQ ID NO: 680950 - DNA, 25 bp, Homo sapien
taaacatggctgaacgcgtgtgtac

SEQ ID NO: 680951 - DNA, 25 bp, Homo sapien
cgggccggtttcgaagttgatgcaa

SEQ ID NO: 680952 - DNA, 25 bp, Homo sapien
tgaagtcaccggtccaagagctggt

SEQ ID NO: 680953 - DNA, 25 bp, Homo sapien
cccggccatgggtgctacttattac

SEQ ID NO: 680954 - DNA, 25 bp, Homo sapien
tcctgcgtggcctgtgatggcgtcc

SEQ ID NO: 680955 - DNA, 25 bp, Homo sapien
tccctgtgggatttttgatggtgca

SEQ ID NO: 680956 - DNA, 25 bp, Homo sapien
aatccctggatgtttctgaagcctc

SEQ ID NO: 680957 - DNA, 25 bp, Homo sapien
ttattcaatccctggatgtttctga

SEQ ID NO: 680958 - DNA, 25 bp, Homo sapien
caatccctggatgtttctgaagcct

SEQ ID NO: 680959 - DNA, 25 bp, Homo sapien
ttcaatccctggatgtttctgaagc

SEQ ID NO: 680960 - DNA, 25 bp, Homo sapien
gcaggtgtggaagtgtcctcgtagc

SEQ ID NO: 680961 - DNA, 25 bp, Homo sapien
aggtgtggaagtgtcctcgtagcat

SEQ ID NO: 680962 - DNA, 25 bp, Homo sapien
ggcaggtgtggaagtgtcctcgtag

SEQ ID NO: 680963 - DNA, 25 bp, Homo sapien
caggtgtggaagtgtcctcgtagca

SEQ ID NO: 680964 - DNA, 25 bp, Homo sapien
cactgccttttctgattgctaaagc

SEQ ID NO: 680965 - DNA, 25 bp, Homo sapien
ccgcccactgggtgttgagtcactc

SEQ ID NO: 680966 - DNA, 25 bp, Homo sapien
tcatgccatgagcttcttgccctct

SEQ ID NO: 680967 - DNA, 25 bp, Homo sapien
taggccagaagctccttggagtcca

SEQ ID NO: 680968 - DNA, 25 bp, Homo sapien
gcaggaattggtcttttgtccccac

SEQ ID NO: 680969 - DNA, 25 bp, Homo sapien
gtgtagacctcgagtgagccctgcc

SEQ ID NO: 680970 - DNA, 25 bp, Homo sapien
accaggtggcttcccaaggggcaca

SEQ ID NO: 680971 - DNA, 25 bp, Homo sapien
gaaggtgggtggctaaacagcagga

SEQ ID NO: 680972 - DNA, 25 bp, Homo sapien
gagacattttccgagcaatgttgtg

SEQ ID NO: 680973 - DNA, 25 bp, Homo sapien
ttttccgagcaatgttgtggctgat

SEQ ID NO: 680974 - DNA, 25 bp, Homo sapien
cattttccgagcaatgttgtggctg

SEQ ID NO: 680975 - DNA, 25 bp, Homo sapien
cgggagacattttccgagcaatgtt

SEQ ID NO: 680976 - DNA, 25 bp, Homo sapien
ccgcctttcacccaacccgcttgtg

SEQ ID NO: 680977 - DNA, 25 bp, Homo sapien
caaaggcccattgttcgggcccacg

SEQ ID NO: 680978 - DNA, 25 bp, Homo sapien
aggcccattgttcgggcccacgttg

SEQ ID NO: 680979 - DNA, 25 bp, Homo sapien
ggcacaaaggcccattgttcgggcc

SEQ ID NO: 680980 - DNA, 25 bp, Homo sapien
ccctttcttcgtcccaggcaatagc

SEQ ID NO: 680981 - DNA, 25 bp, Homo sapien
ttggcatccacgaagctggcattgc

SEQ ID NO: 680982 - DNA, 25 bp, Homo sapien
ggcatccacgaagctggcattgcac

SEQ ID NO: 680983 - DNA, 25 bp, Homo sapien
ctttcttcgtcccaggcaatagctt

SEQ ID NO: 680984 - DNA, 25 bp, Homo sapien
agtcagtgctcagaggcaccaatgg

SEQ ID NO: 680985 - DNA, 25 bp, Homo sapien
tgctcagaggcaccaatgggaggat

SEQ ID NO: 680986 - DNA, 25 bp, Homo sapien
cctctctgtatctctcgtttctctg

SEQ ID NO: 680987 - DNA, 25 bp, Homo sapien
cgtttctctgtctcggtcatccgtg

SEQ ID NO: 680988 - DNA, 25 bp, Homo sapien
ctccttgctgtcatcttctgtccct

SEQ ID NO: 680989 - DNA, 25 bp, Homo sapien
cagcttctgctgtggagcgtttttc

SEQ ID NO: 680990 - DNA, 25 bp, Homo sapien
actgcctggatgacggtgggtgtcc

SEQ ID NO: 680991 - DNA, 25 bp, Homo sapien
agcacagggcagtgcgcagaacgca

SEQ ID NO: 680992 - DNA, 25 bp, Homo sapien
cacagatgcagtccatagggatggt

SEQ ID NO: 680993 - DNA, 25 bp, Homo sapien
ctttccgtatcacagaacctccagg

SEQ ID NO: 680994 - DNA, 25 bp, Homo sapien
caggtgacccgagggtctgtcctta

SEQ ID NO: 680995 - DNA, 25 bp, Homo sapien
ccaggctcagtggaacccagtttga

SEQ ID NO: 680996 - DNA, 25 bp, Homo sapien
ggtctgtccttagaataccaccagg

SEQ ID NO: 680997 - DNA, 25 bp, Homo sapien
cacgatcgaggtctgtccctttggt

SEQ ID NO: 680998 - DNA, 25 bp, Homo sapien
tgacgggaccagagcacgttcctgg

SEQ ID NO: 680999 - DNA, 25 bp, Homo sapien
tgagatgacgggaccagagcacgtt

SEQ ID NO: 681000 - DNA, 25 bp, Homo sapien
gggcagtgtgagatgacgggaccag

SEQ ID NO: 681001 - DNA, 25 bp, Homo sapien
gaaaaccaagtgactatgaggggga

SEQ ID NO: 681002 - DNA, 25 bp, Homo sapien
gggtctcagactcatagcccagtgc

SEQ ID NO: 681003 - DNA, 25 bp, Homo sapien
tgggcactgtctggccgggcttcat

SEQ ID NO: 681004 - DNA, 25 bp, Homo sapien
gcccccagcaggtcccatgggcact

SEQ ID NO: 681005 - DNA, 25 bp, Homo sapien
cccagcaggtcccatgggcactgtc

SEQ ID NO: 681006 - DNA, 25 bp, Homo sapien
agcaggtcccatgggcactgtctgg

SEQ ID NO: 681007 - DNA, 25 bp, Homo sapien
aatcaccaagaggtaatcctgcctg

SEQ ID NO: 681008 - DNA, 25 bp, Homo sapien
ggggagctcccggtttgccctcagc

SEQ ID NO: 681009 - DNA, 25 bp, Homo sapien
agctcccggtttgccctcagccctt

SEQ ID NO: 681010 - DNA, 25 bp, Homo sapien
accaagaggtaatcctgcctgctgc

SEQ ID NO: 681011 - DNA, 25 bp, Homo sapien
cggtgtgtctcctgttcgcagctca

SEQ ID NO: 681012 - DNA, 25 bp, Homo sapien
ctcggtgtgtctcctgttcgcagct

SEQ ID NO: 681013 - DNA, 25 bp, Homo sapien
gtctcctgttcgcagctcagaagag

SEQ ID NO: 681014 - DNA, 25 bp, Homo sapien
tgtgtctcctgttcgcagctcagaa

SEQ ID NO: 681015 - DNA, 25 bp, Homo sapien
tcatgaaagtgagttcggccattcc

SEQ ID NO: 681016 - DNA, 25 bp, Homo sapien
tgcgaggcgcagtatctggcatatg

SEQ ID NO: 681017 - DNA, 25 bp, Homo sapien
ttcccttcaggtcacggaggctgag

SEQ ID NO: 681018 - DNA, 25 bp, Homo sapien
tatcattattgcaggagtggcttca

SEQ ID NO: 681019 - DNA, 25 bp, Homo sapien
tctgcttttggagccgagcctggac

SEQ ID NO: 681020 - DNA, 25 bp, Homo sapien
gattattttataggctgcacaggca

SEQ ID NO: 681021 - DNA, 25 bp, Homo sapien
catacagaaggtgctgactgacccc

SEQ ID NO: 681022 - DNA, 25 bp, Homo sapien
tgttggaattcaaacggcctcctgc

SEQ ID NO: 681023 - DNA, 25 bp, Homo sapien
tctgctcactgacggaatcctatgc

SEQ ID NO: 681024 - DNA, 25 bp, Homo sapien
gattctcacccatcgtgagcctggg

SEQ ID NO: 681025 - DNA, 25 bp, Homo sapien
gggacccggcgtgaaattccatcag

SEQ ID NO: 681026 - DNA, 25 bp, Homo sapien
ttcagacccggttgtgaatcccagt

SEQ ID NO: 681027 - DNA, 25 bp, Homo sapien
gtgactcaggcggagaagatgctcc

SEQ ID NO: 681028 - DNA, 25 bp, Homo sapien
aaatagcacctgctagggaagcttc

SEQ ID NO: 681029 - DNA, 25 bp, Homo sapien
gtaggcggtacctaggctgtacctg

SEQ ID NO: 681030 - DNA, 25 bp, Homo sapien
ctgcctgcccctgccgtgggaggca

SEQ ID NO: 681031 - DNA, 25 bp, Homo sapien
gagactggagtcttaatacagtgcc

SEQ ID NO: 681032 - DNA, 25 bp, Homo sapien
gactggagtcttaatacagtgcctt

SEQ ID NO: 681033 - DNA, 25 bp, Homo sapien
agactggagtcttaatacagtgcct

SEQ ID NO: 681034 - DNA, 25 bp, Homo sapien
aagagactggagtcttaatacagtg

SEQ ID NO: 681035 - DNA, 25 bp, Homo sapien
acacagccaggagatgagcgcactg

SEQ ID NO: 681036 - DNA, 25 bp, Homo sapien
tttgcccacatcaagcaggtcagag

SEQ ID NO: 681037 - DNA, 25 bp, Homo sapien
agagctggctccggtcccgtttgcc

SEQ ID NO: 681038 - DNA, 25 bp, Homo sapien
gtcaaggcatgcactgaccaggcgt

SEQ ID NO: 681039 - DNA, 25 bp, Homo sapien
cgtagtaggcgctcggtctgcttct

SEQ ID NO: 681040 - DNA, 25 bp, Homo sapien
agcaaatggtgcttgtggaaccacc

SEQ ID NO: 681041 - DNA, 25 bp, Homo sapien
caaggcaacgccaaaatagcgcagc

SEQ ID NO: 681042 - DNA, 25 bp, Homo sapien
tgaaagtccacagtcgctgaagggt

SEQ ID NO: 681043 - DNA, 25 bp, Homo sapien
tttgtgcagcatcctcggcgggtgt

SEQ ID NO: 681044 - DNA, 25 bp, Homo sapien
gctggtgttgctggtgggttttccc

SEQ ID NO: 681045 - DNA, 25 bp, Homo sapien
tcccgccaaagacgctgacttcttt

SEQ ID NO: 681046 - DNA, 25 bp, Homo sapien
aggatgtgagcacttagcaccccag

SEQ ID NO: 681047 - DNA, 25 bp, Homo sapien
ccatgttgatactgagcttagtgta

SEQ ID NO: 681048 - DNA, 25 bp, Homo sapien
ggctatttacgggagtgattccact

SEQ ID NO: 681049 - DNA, 25 bp, Homo sapien
ggcacccgattgacacagcgcacta

SEQ ID NO: 681050 - DNA, 25 bp, Homo sapien
gagttttgacctttccgatctgggc

SEQ ID NO: 681051 - DNA, 25 bp, Homo sapien
caggcatgtgggctatatcttcatc

SEQ ID NO: 681052 - DNA, 25 bp, Homo sapien
ggatctagttcaatacactgcttta

SEQ ID NO: 681053 - DNA, 25 bp, Homo sapien
tcccgtttacacagaaaggatctag

SEQ ID NO: 681054 - DNA, 25 bp, Homo sapien
taattgatcttggagctgtttccat

SEQ ID NO: 681055 - DNA, 25 bp, Homo sapien
cctagggccattaggtggattcaca

SEQ ID NO: 681056 - DNA, 25 bp, Homo sapien
tctgatgcgtaaaacaaggatgaca

SEQ ID NO: 681057 - DNA, 25 bp, Homo sapien
tacaagattgctatggccgaaccaa

SEQ ID NO: 681058 - DNA, 25 bp, Homo sapien
cattcatggtatccctggtggttgc

SEQ ID NO: 681059 - DNA, 25 bp, Homo sapien
catgtgtgactatccccagaaagta

SEQ ID NO: 681060 - DNA, 25 bp, Homo sapien
ccaagggccatttccaaagctacca

SEQ ID NO: 681061 - DNA, 25 bp, Homo sapien
gatgaggtccttccactcagggaat

SEQ ID NO: 681062 - DNA, 25 bp, Homo sapien
tgtgagccttgtgaataccatggga

SEQ ID NO: 681063 - DNA, 25 bp, Homo sapien
cccctggcaggcgtgatgcgtagtt

SEQ ID NO: 681064 - DNA, 25 bp, Homo sapien
tccggctgccggttgacatgaagaa

SEQ ID NO: 681065 - DNA, 25 bp, Homo sapien
tctcgatcgctgattggtccttctg

SEQ ID NO: 681066 - DNA, 25 bp, Homo sapien
ctccccgcggaagtgcttgtcgaaa

SEQ ID NO: 681067 - DNA, 25 bp, Homo sapien
cataagggactttgagactgtgtag

SEQ ID NO: 681068 - DNA, 25 bp, Homo sapien
tgtatgccatatctggtctctgaat

SEQ ID NO: 681069 - DNA, 25 bp, Homo sapien
gatttacatcaagcttatttgacag

SEQ ID NO: 681070 - DNA, 25 bp, Homo sapien
gctagactaatatttctaaccactg

SEQ ID NO: 681071 - DNA, 25 bp, Homo sapien
taatatggtcccatcatcactagag

SEQ ID NO: 681072 - DNA, 25 bp, Homo sapien
ccgttaatatggtcccatcatcact

SEQ ID NO: 681073 - DNA, 25 bp, Homo sapien
tatggtcccatcatcactagagtaa

SEQ ID NO: 681074 - DNA, 25 bp, Homo sapien
ggtcccatcatcactagagtaattc

SEQ ID NO: 681075 - DNA, 25 bp, Homo sapien
catatttccccagtgttactcgtat

SEQ ID NO: 681076 - DNA, 25 bp, Homo sapien
tttaatgtgattcaattctaggttg

SEQ ID NO: 681077 - DNA, 25 bp, Homo sapien
catatctccgtcatacccttgtatg

SEQ ID NO: 681078 - DNA, 25 bp, Homo sapien
cgtatccacgtgtgtatgcattgtg

SEQ ID NO: 681079 - DNA, 25 bp, Homo sapien
agtttatagttaccctgggtgctga

SEQ ID NO: 681080 - DNA, 25 bp, Homo sapien
agccagtttatagttaccctgggtg

SEQ ID NO: 681081 - DNA, 25 bp, Homo sapien
gccagtttatagttaccctgggtgc

SEQ ID NO: 681082 - DNA, 25 bp, Homo sapien
cagtttatagttaccctgggtgctg

SEQ ID NO: 681083 - DNA, 25 bp, Homo sapien
ataggccatcgagctttctccactg

SEQ ID NO: 681084 - DNA, 25 bp, Homo sapien
tcaggtggtaataggccatcgagct

SEQ ID NO: 681085 - DNA, 25 bp, Homo sapien
ggtaataggccatcgagctttctcc

SEQ ID NO: 681086 - DNA, 25 bp, Homo sapien
tgttgttctcaggtggtaataggcc

SEQ ID NO: 681087 - DNA, 25 bp, Homo sapien
cctttgaagcaacagtgccggaaca

SEQ ID NO: 681088 - DNA, 25 bp, Homo sapien
aacctgcagagtgacacaagcagca

SEQ ID NO: 681089 - DNA, 25 bp, Homo sapien
gcaggcttctgaggttgctctagcc

SEQ ID NO: 681090 - DNA, 25 bp, Homo sapien
tagctgtatgatttattaccaccca

SEQ ID NO: 681091 - DNA, 25 bp, Homo sapien
cgatcggcataacgcatgcagccca

SEQ ID NO: 681092 - DNA, 25 bp, Homo sapien
gtcttgaactcctacttcaggcaat

SEQ ID NO: 681093 - DNA, 25 bp, Homo sapien
ctggtcttgaactcctacttcaggc

SEQ ID NO: 681094 - DNA, 25 bp, Homo sapien
cttgaactcctacttcaggcaatcc

SEQ ID NO: 681095 - DNA, 25 bp, Homo sapien
tggtcttgaactcctacttcaggca

SEQ ID NO: 681096 - DNA, 25 bp, Homo sapien
gatcaggagccatggtgtagtcttc

SEQ ID NO: 681097 - DNA, 25 bp, Homo sapien
tgtttaccacctcctaggaaagcag

SEQ ID NO: 681098 - DNA, 25 bp, Homo sapien
tatagaaattgcagttggaactccc

SEQ ID NO: 681099 - DNA, 25 bp, Homo sapien
tgagatctgggctacccacccatgt

SEQ ID NO: 681100 - DNA, 25 bp, Homo sapien
tagaccatcctgtgtagaccatccc

SEQ ID NO: 681101 - DNA, 25 bp, Homo sapien
gtccatgtaaactgtcctgtgtaga

SEQ ID NO: 681102 - DNA, 25 bp, Homo sapien
tctgttggaatagctgagaatagcc

SEQ ID NO: 681103 - DNA, 25 bp, Homo sapien
tagactgtctctgtagaccgtcctg

SEQ ID NO: 681104 - DNA, 25 bp, Homo sapien
tgcccacttgtttgggaaggcccca

SEQ ID NO: 681105 - DNA, 25 bp, Homo sapien
gggtcttgccatgtaattagcgcct

SEQ ID NO: 681106 - DNA, 25 bp, Homo sapien
caccaaatagtgtaggatgctccct

SEQ ID NO: 681107 - DNA, 25 bp, Homo sapien
cattacagcaaggagtggtgtccag

SEQ ID NO: 681108 - DNA, 25 bp, Homo sapien
tgaagtggttcccttcacccacacc

SEQ ID NO: 681109 - DNA, 25 bp, Homo sapien
tgacagacagctggccctgaagtgg

SEQ ID NO: 681110 - DNA, 25 bp, Homo sapien
gaattcctgctgcatgtccgtagca

SEQ ID NO: 681111 - DNA, 25 bp, Homo sapien
cccatagtccaccttgtcactgctg

SEQ ID NO: 681112 - DNA, 25 bp, Homo sapien
gtattgagtgggtcagtgcacgtga

SEQ ID NO: 681113 - DNA, 25 bp, Homo sapien
ggtattgagtgggtcagtgcacgtg

SEQ ID NO: 681114 - DNA, 25 bp, Homo sapien
tattgagtgggtcagtgcacgtgaa

SEQ ID NO: 681115 - DNA, 25 bp, Homo sapien
aaagagctgttgacacacgctgaca

SEQ ID NO: 681116 - DNA, 25 bp, Homo sapien
tgtatttggtgataactgctcagcc

SEQ ID NO: 681117 - DNA, 25 bp, Homo sapien
gaaacatttgtgtaactgaggcaga

SEQ ID NO: 681118 - DNA, 25 bp, Homo sapien
tccacaacagttatccatgagcaga

SEQ ID NO: 681119 - DNA, 25 bp, Homo sapien
tagacggtgagaaagcgtcagagcc

SEQ ID NO: 681120 - DNA, 25 bp, Homo sapien
tgcaggatcccgttgccacgtttga

SEQ ID NO: 681121 - DNA, 25 bp, Homo sapien
acctgccccggtcagcagcttcgtg

SEQ ID NO: 681122 - DNA, 25 bp, Homo sapien
cgatgggtttggaagtctgagccct

SEQ ID NO: 681123 - DNA, 25 bp, Homo sapien
catattatacagtgcgacagctaga

SEQ ID NO: 681124 - DNA, 25 bp, Homo sapien
cacttcaggcggctactggttcaca

SEQ ID NO: 681125 - DNA, 25 bp, Homo sapien
ttaaaatgcgcacaatactggccac

SEQ ID NO: 681126 - DNA, 25 bp, Homo sapien
ggcttttgtataccccgagcaagat

SEQ ID NO: 681127 - DNA, 25 bp, Homo sapien
cctgcaagtcccagtgaagcatgct

SEQ ID NO: 681128 - DNA, 25 bp, Homo sapien
gcagcctgcaagtcccagtgaagca

SEQ ID NO: 681129 - DNA, 25 bp, Homo sapien
ggagcggcagcctgcaagtcccagt

SEQ ID NO: 681130 - DNA, 25 bp, Homo sapien
gactggagcggcagcctgcaagtcc

SEQ ID NO: 681131 - DNA, 25 bp, Homo sapien
cattaaggttatatggataccattt

SEQ ID NO: 681132 - DNA, 25 bp, Homo sapien
attaaggttatatggataccatttt

SEQ ID NO: 681133 - DNA, 25 bp, Homo sapien
tgccttttgatcacagccgccagaa

SEQ ID NO: 681134 - DNA, 25 bp, Homo sapien
gctggaaacagacgccaggccattg

SEQ ID NO: 681135 - DNA, 25 bp, Homo sapien
tcattgaagatgttgcgtactcccc

SEQ ID NO: 681136 - DNA, 25 bp, Homo sapien
tactaggagctcttaggtcattgaa

SEQ ID NO: 681137 - DNA, 25 bp, Homo sapien
tcatcggaaaatggatgggagtgcc

SEQ ID NO: 681138 - DNA, 25 bp, Homo sapien
cgtaggacacactcggttcatgggc

SEQ ID NO: 681139 - DNA, 25 bp, Homo sapien
tgagccacaccttggagtcaccagt

SEQ ID NO: 681140 - DNA, 25 bp, Homo sapien
tcaccagtctttggagaccaagtct

SEQ ID NO: 681141 - DNA, 25 bp, Homo sapien
tatgaaactttctcatacccttagg

SEQ ID NO: 681142 - DNA, 25 bp, Homo sapien
tcatacccttaggtgatgtaatcag

SEQ ID NO: 681143 - DNA, 25 bp, Homo sapien
ttaggacgctgttgcgctcaagccc

SEQ ID NO: 681144 - DNA, 25 bp, Homo sapien
ttggagaagagggttaggacgctgt

SEQ ID NO: 681145 - DNA, 25 bp, Homo sapien
ccacctcattgggagaagtgccatt

SEQ ID NO: 681146 - DNA, 25 bp, Homo sapien
cataaatgggtgtcctcgaggcctc

SEQ ID NO: 681147 - DNA, 25 bp, Homo sapien
cattggcatgtcaacccgctgttaa

SEQ ID NO: 681148 - DNA, 25 bp, Homo sapien
taattcagagaagtgggctccacct

SEQ ID NO: 681149 - DNA, 25 bp, Homo sapien
tttgccatgggcctgctgcgtcaga

SEQ ID NO: 681150 - DNA, 25 bp, Homo sapien
gaatctgcagggagcaactctccac

SEQ ID NO: 681151 - DNA, 25 bp, Homo sapien
gatctctgcttactaatgtgcccca

SEQ ID NO: 681152 - DNA, 25 bp, Homo sapien
caaaggcatccatagtgcactagca

SEQ ID NO: 681153 - DNA, 25 bp, Homo sapien
tatgttagagaggtagcgagctgct

SEQ ID NO: 681154 - DNA, 25 bp, Homo sapien
tgaaaaacacggcagctgtagctcc

SEQ ID NO: 681155 - DNA, 25 bp, Homo sapien
ggtgctcacgactcttcctgcaaag

SEQ ID NO: 681156 - DNA, 25 bp, Homo sapien
gaagagaggcacctgctggaaacca

SEQ ID NO: 681157 - DNA, 25 bp, Homo sapien
aaattgaacatatgaacaaggcaaa

SEQ ID NO: 681158 - DNA, 25 bp, Homo sapien
gtgaaacaccaatagtttaattgaa

SEQ ID NO: 681159 - DNA, 25 bp, Homo sapien
tgagaatgttcaagttaaagttctc

SEQ ID NO: 681160 - DNA, 25 bp, Homo sapien
tccaggaagtatcgatgagaatgtt

SEQ ID NO: 681161 - DNA, 25 bp, Homo sapien
tatttagggcctcaacttgcctggc

SEQ ID NO: 681162 - DNA, 25 bp, Homo sapien
gagatcctagggtagcttccgaagc

SEQ ID NO: 681163 - DNA, 25 bp, Homo sapien
agcactcgcagcaagtcagtcgggc

SEQ ID NO: 681164 - DNA, 25 bp, Homo sapien
agaagttgagcgctctgttgaggcc

SEQ ID NO: 681165 - DNA, 25 bp, Homo sapien
agtgcacagcaccattacccagagt

SEQ ID NO: 681166 - DNA, 25 bp, Homo sapien
ttacccagagtgcaggctatgtcca

SEQ ID NO: 681167 - DNA, 25 bp, Homo sapien
aaaaaacgatgtgagatttgtgctc

SEQ ID NO: 681168 - DNA, 25 bp, Homo sapien
cgatgtgagatttgtgctcatcagc

SEQ ID NO: 681169 - DNA, 25 bp, Homo sapien
tccatcttctcaaaagctaaccgtc

SEQ ID NO: 681170 - DNA, 25 bp, Homo sapien
atcttctcaaaagctaaccgtcctt

SEQ ID NO: 681171 - DNA, 25 bp, Homo sapien
catctgcctcctggcaaaagacttc

SEQ ID NO: 681172 - DNA, 25 bp, Homo sapien
catcttctcaaaagctaaccgtcct

SEQ ID NO: 681173 - DNA, 25 bp, Homo sapien
acaggctggcagtctggtcgatgct

SEQ ID NO: 681174 - DNA, 25 bp, Homo sapien
acagtgtggtttcccgggctgccgc

SEQ ID NO: 681175 - DNA, 25 bp, Homo sapien
gctggcagtctggtcgatgctttca

SEQ ID NO: 681176 - DNA, 25 bp, Homo sapien
cagtctggtcgatgctttcaatgcc

SEQ ID NO: 681177 - DNA, 25 bp, Homo sapien
tggagccttgcgtcgttctctgcca

SEQ ID NO: 681178 - DNA, 25 bp, Homo sapien
ttgagcgctaggcatgcggcctgct

SEQ ID NO: 681179 - DNA, 25 bp, Homo sapien
tctgccagggcgttggtgtagaaca

SEQ ID NO: 681180 - DNA, 25 bp, Homo sapien
cttgaggtgtttgagcgctaggcat

SEQ ID NO: 681181 - DNA, 25 bp, Homo sapien
taaacaacgttcaggacacgatcgg

SEQ ID NO: 681182 - DNA, 25 bp, Homo sapien
cctgtgtacacagtcacaagatcta

SEQ ID NO: 681183 - DNA, 25 bp, Homo sapien
gacagtaaggcacgctgtgcccatc

SEQ ID NO: 681184 - DNA, 25 bp, Homo sapien
atggttccgggtccatcagccacca

SEQ ID NO: 681185 - DNA, 25 bp, Homo sapien
ccatgagaacaccagcttacctatg

SEQ ID NO: 681186 - DNA, 25 bp, Homo sapien
catgagaacaccagcttacctatgc

SEQ ID NO: 681187 - DNA, 25 bp, Homo sapien
atgagaacaccagcttacctatgcc

SEQ ID NO: 681188 - DNA, 25 bp, Homo sapien
ccctcggagtgccgtccagctggag

SEQ ID NO: 681189 - DNA, 25 bp, Homo sapien
ttctgttcctgactgcaccagccag

SEQ ID NO: 681190 - DNA, 25 bp, Homo sapien
tggccgccctgcacaccctcggagt

SEQ ID NO: 681191 - DNA, 25 bp, Homo sapien
gcagcgcccaggctcttaaggtctg

SEQ ID NO: 681192 - DNA, 25 bp, Homo sapien
acagtgaagctcctcgatgagtgtc

SEQ ID NO: 681193 - DNA, 25 bp, Homo sapien
cccgcacagtgaagctcctcgatga

SEQ ID NO: 681194 - DNA, 25 bp, Homo sapien
cagtgaagctcctcgatgagtgtca

SEQ ID NO: 681195 - DNA, 25 bp, Homo sapien
gcacagtgaagctcctcgatgagtg

SEQ ID NO: 681196 - DNA, 25 bp, Homo sapien
gacagctgcaagtttgcttggctgc

SEQ ID NO: 681197 - DNA, 25 bp, Homo sapien
ccctgaatgggagtttggcaggaca

SEQ ID NO: 681198 - DNA, 25 bp, Homo sapien
tcccctgaatgggagtttggcagga

SEQ ID NO: 681199 - DNA, 25 bp, Homo sapien
ggtcccctgaatgggagtttggcag

SEQ ID NO: 681200 - DNA, 25 bp, Homo sapien
gacttcccttggagctaatatcagc

SEQ ID NO: 681201 - DNA, 25 bp, Homo sapien
cccatcggctgaacgcagaatctca

SEQ ID NO: 681202 - DNA, 25 bp, Homo sapien
tgtgacagggctccgtggatattcc

SEQ ID NO: 681203 - DNA, 25 bp, Homo sapien
tctgaattataacctgagaaactgc

SEQ ID NO: 681204 - DNA, 25 bp, Homo sapien
gtgagctgggtgaagtgcttctcca

SEQ ID NO: 681205 - DNA, 25 bp, Homo sapien
gcttctccaggtcagagacgctctg

SEQ ID NO: 681206 - DNA, 25 bp, Homo sapien
actggaaccaggtaatgatctgttc

SEQ ID NO: 681207 - DNA, 25 bp, Homo sapien
gcaggtagctgtgaaactggaacca

SEQ ID NO: 681208 - DNA, 25 bp, Homo sapien
gttcagcagcgtcgtggcagggcag

SEQ ID NO: 681209 - DNA, 25 bp, Homo sapien
tggttcagcagcgtcgtggcagggc

SEQ ID NO: 681210 - DNA, 25 bp, Homo sapien
tcagcagcgtcgtggcagggcagga

SEQ ID NO: 681211 - DNA, 25 bp, Homo sapien
agctggttcagcagcgtcgtggcag

SEQ ID NO: 681212 - DNA, 25 bp, Homo sapien
tcaggcaccccttcgtccgcgaggc

SEQ ID NO: 681213 - DNA, 25 bp, Homo sapien
ccccagttcagaaacctgaatggtg

SEQ ID NO: 681214 - DNA, 25 bp, Homo sapien
ctgaaagccccagttcagaaacctg

SEQ ID NO: 681215 - DNA, 25 bp, Homo sapien
aaagccccagttcagaaacctgaat

SEQ ID NO: 681216 - DNA, 25 bp, Homo sapien
cccagttcagaaacctgaatggtga

SEQ ID NO: 681217 - DNA, 25 bp, Homo sapien
cacatgacaaggacccgaaaggttt

SEQ ID NO: 681218 - DNA, 25 bp, Homo sapien
gcacatgacaaggacccgaaaggtt

SEQ ID NO: 681219 - DNA, 25 bp, Homo sapien
gagcacatgacaaggacccgaaagg

SEQ ID NO: 681220 - DNA, 25 bp, Homo sapien
ggagagcacatgacaaggacccgaa

SEQ ID NO: 681221 - DNA, 25 bp, Homo sapien
gacggtgtggcttgatgcgaggtcc

SEQ ID NO: 681222 - DNA, 25 bp, Homo sapien
accagcctctccttacagacaagga

SEQ ID NO: 681223 - DNA, 25 bp, Homo sapien
tgacacgtgagcaactttggctcta

SEQ ID NO: 681224 - DNA, 25 bp, Homo sapien
ggcttgatgcgaggtcccttccctg

SEQ ID NO: 681225 - DNA, 25 bp, Homo sapien
aagtgtctccagaacgtgcttttgc

SEQ ID NO: 681226 - DNA, 25 bp, Homo sapien
tgtctccagaacgtgcttttgctgt

SEQ ID NO: 681227 - DNA, 25 bp, Homo sapien
aatggatgttgccttgccgaccttc

SEQ ID NO: 681228 - DNA, 25 bp, Homo sapien
gttgccttgccgaccttctcaaagt

SEQ ID NO: 681229 - DNA, 25 bp, Homo sapien
cttgataaattaggggaggccagtt

SEQ ID NO: 681230 - DNA, 25 bp, Homo sapien
gaccaacctgcctgaaagtgaagcc

SEQ ID NO: 681231 - DNA, 25 bp, Homo sapien
gggaatagcttcagtctcacgggct

SEQ ID NO: 681232 - DNA, 25 bp, Homo sapien
taagagccacacgagtattcaccca

SEQ ID NO: 681233 - DNA, 25 bp, Homo sapien
tagtcctgatagcatttgaacccgt

SEQ ID NO: 681234 - DNA, 25 bp, Homo sapien
gcagagctttgcagacttggaggtg

SEQ ID NO: 681235 - DNA, 25 bp, Homo sapien
gagctttgcagacttggaggtgtac

SEQ ID NO: 681236 - DNA, 25 bp, Homo sapien
tgcagcagagctttgcagacttgga

SEQ ID NO: 681237 - DNA, 25 bp, Homo sapien
ctgcagcagagctttgcagacttgg

SEQ ID NO: 681238 - DNA, 25 bp, Homo sapien
gatgacgctttcagtgatgacggtg

SEQ ID NO: 681239 - DNA, 25 bp, Homo sapien
tggatgacgctttcagtgatgacgg

SEQ ID NO: 681240 - DNA, 25 bp, Homo sapien
gagttccctggatgacgctttcagt

SEQ ID NO: 681241 - DNA, 25 bp, Homo sapien
ccctggatgacgctttcagtgatga

SEQ ID NO: 681242 - DNA, 25 bp, Homo sapien
caggtgactcatctatcaagggagg

SEQ ID NO: 681243 - DNA, 25 bp, Homo sapien
catgaaatacggtgggcaagagcgc

SEQ ID NO: 681244 - DNA, 25 bp, Homo sapien
gcgggcagtcgtcttccaggatgtc

SEQ ID NO: 681245 - DNA, 25 bp, Homo sapien
gtgacgctggacaagtctgcctccc

SEQ ID NO: 681246 - DNA, 25 bp, Homo sapien
gaagctgtcatgagaggtgtgggcc

SEQ ID NO: 681247 - DNA, 25 bp, Homo sapien
cgaggagaaggaattgagcctctgc

SEQ ID NO: 681248 - DNA, 25 bp, Homo sapien
tgcgtagcctcgagggaagctgtca

SEQ ID NO: 681249 - DNA, 25 bp, Homo sapien
gtgagatgcggatgcagaagccctc

SEQ ID NO: 681250 - DNA, 25 bp, Homo sapien
gaacttctactatatacttggtgat

SEQ ID NO: 681251 - DNA, 25 bp, Homo sapien
cacgatagagtgacaagagctgagc

SEQ ID NO: 681252 - DNA, 25 bp, Homo sapien
ggtgatctcacccacttcgtggtct

SEQ ID NO: 681253 - DNA, 25 bp, Homo sapien
tctgaggaccggctctgaggcaagt

SEQ ID NO: 681254 - DNA, 25 bp, Homo sapien
aggatgcactccatcaggctctcgg

SEQ ID NO: 681255 - DNA, 25 bp, Homo sapien
tcatccagggcgaagtcggcattga

SEQ ID NO: 681256 - DNA, 25 bp, Homo sapien
tcggcattgaggaaggcgaagctct

SEQ ID NO: 681257 - DNA, 25 bp, Homo sapien
aggtgtgctcctgccgtgctctgca

SEQ ID NO: 681258 - DNA, 25 bp, Homo sapien
gttttatcaactcagcaatgcagaa

SEQ ID NO: 681259 - DNA, 25 bp, Homo sapien
aactgaatcagcaaaagctgaacca

SEQ ID NO: 681260 - DNA, 25 bp, Homo sapien
aatgcagaactttgtatgtgtcttt

SEQ ID NO: 681261 - DNA, 25 bp, Homo sapien
tcagcaaaagctgaaccattgctcc

SEQ ID NO: 681262 - DNA, 25 bp, Homo sapien
tgtgtaaacacgagaggagaatgta

SEQ ID NO: 681263 - DNA, 25 bp, Homo sapien
tgtgcatgagcctatctactgtgaa

SEQ ID NO: 681264 - DNA, 25 bp, Homo sapien
tcctgtgaactgagaacagccccgg

SEQ ID NO: 681265 - DNA, 25 bp, Homo sapien
tgttatccccgcttgccagatgagg

SEQ ID NO: 681266 - DNA, 25 bp, Homo sapien
cgttctggctactcgaggctgtgcc

SEQ ID NO: 681267 - DNA, 25 bp, Homo sapien
ggacctggtactccagctcccggag

SEQ ID NO: 681268 - DNA, 25 bp, Homo sapien
ttcctcgtggccgttctggctactc

SEQ ID NO: 681269 - DNA, 25 bp, Homo sapien
cggaagccgaggacctggtactcca

SEQ ID NO: 681270 - DNA, 25 bp, Homo sapien
gcctcctcttcaatggaggcgtggg

SEQ ID NO: 681271 - DNA, 25 bp, Homo sapien
ccgagcctcctcttcaatggaggcg

SEQ ID NO: 681272 - DNA, 25 bp, Homo sapien
ctgcaaacgggcctccagagaggtg

SEQ ID NO: 681273 - DNA, 25 bp, Homo sapien
tcccctcctaagttcctccagccag

SEQ ID NO: 681274 - DNA, 25 bp, Homo sapien
cgacgtgctggtctccgtgtctcgg

SEQ ID NO: 681275 - DNA, 25 bp, Homo sapien
gctgaaggagtccatctcaggcagc

SEQ ID NO: 681276 - DNA, 25 bp, Homo sapien
ggtcctcagagctgaaggagtccat

SEQ ID NO: 681277 - DNA, 25 bp, Homo sapien
cccggaggtcgctgtcagacaggta

SEQ ID NO: 681278 - DNA, 25 bp, Homo sapien
caggtagtatctctcccggaagctg

SEQ ID NO: 681279 - DNA, 25 bp, Homo sapien
ggtagtatctctcccggaagctggg

SEQ ID NO: 681280 - DNA, 25 bp, Homo sapien
ggtgtccagttgtacaaggagccct

SEQ ID NO: 681281 - DNA, 25 bp, Homo sapien
tgctcgggggtgtccagttgtacaa

SEQ ID NO: 681282 - DNA, 25 bp, Homo sapien
gcaggtggtcgctcaacagaattca

SEQ ID NO: 681283 - DNA, 25 bp, Homo sapien
ggtgcaggtggtcgctcaacagaat

SEQ ID NO: 681284 - DNA, 25 bp, Homo sapien
gcagcagctttgtgacccccagctc

SEQ ID NO: 681285 - DNA, 25 bp, Homo sapien
aattcacccagctcacgagggagag

SEQ ID NO: 681286 - DNA, 25 bp, Homo sapien
cttgatggtacccaactccgtgatg

SEQ ID NO: 681287 - DNA, 25 bp, Homo sapien
gatggtacccaactccgtgatgtcc

SEQ ID NO: 681288 - DNA, 25 bp, Homo sapien
acctgcggccgcgtcgtgaagaagt

SEQ ID NO: 681289 - DNA, 25 bp, Homo sapien
gtcggcgatgtcacacgtcactgca

SEQ ID NO: 681290 - DNA, 25 bp, Homo sapien
gctggcggcccagacgcatgagcac

SEQ ID NO: 681291 - DNA, 25 bp, Homo sapien
catctgactcgatccgacccttgag

SEQ ID NO: 681292 - DNA, 25 bp, Homo sapien
ggccttctcctcttcgtcccaggtc

SEQ ID NO: 681293 - DNA, 25 bp, Homo sapien
gacccttgagcttccaacgctggcg

SEQ ID NO: 681294 - DNA, 25 bp, Homo sapien
cgggacagaggcgtgcgtagcccac

SEQ ID NO: 681295 - DNA, 25 bp, Homo sapien
cagaggcgtgcgtagcccaccaagc

SEQ ID NO: 681296 - DNA, 25 bp, Homo sapien
ctcatagtggtctccgggacagagg

SEQ ID NO: 681297 - DNA, 25 bp, Homo sapien
tcatagtggtctccgggacagaggc

SEQ ID NO: 681298 - DNA, 25 bp, Homo sapien
ccctccgccttccactctccctgac

SEQ ID NO: 681299 - DNA, 25 bp, Homo sapien
ctggaacacagacatggccggtctc

SEQ ID NO: 681300 - DNA, 25 bp, Homo sapien
ggaacacagacatggccggtctccc

SEQ ID NO: 681301 - DNA, 25 bp, Homo sapien
acacagacatggccggtctcccctc

SEQ ID NO: 681302 - DNA, 25 bp, Homo sapien
aactcgcccaggtgaacctccaggg

SEQ ID NO: 681303 - DNA, 25 bp, Homo sapien
agggccccctcgatgagccacatgt

SEQ ID NO: 681304 - DNA, 25 bp, Homo sapien
tgatgtggaactcgcccaggtgaac

SEQ ID NO: 681305 - DNA, 25 bp, Homo sapien
tttcatcctgatgtggaactcgccc

SEQ ID NO: 681306 - DNA, 25 bp, Homo sapien
caggcggcactggatgcagtagtcc

SEQ ID NO: 681307 - DNA, 25 bp, Homo sapien
ggcgaaggcccgctgcatgctggag

SEQ ID NO: 681308 - DNA, 25 bp, Homo sapien
ggctctctcgggctgcgcggctcgg

SEQ ID NO: 681309 - DNA, 25 bp, Homo sapien
tggaggcgccgtcgcgcaggcggca

SEQ ID NO: 681310 - DNA, 25 bp, Homo sapien
tgtggtgggcacacgggctggtggc

SEQ ID NO: 681311 - DNA, 25 bp, Homo sapien
ctgtggtgggcacacgggctggtgg

SEQ ID NO: 681312 - DNA, 25 bp, Homo sapien
gtggtgggcacacgggctggtggcg

SEQ ID NO: 681313 - DNA, 25 bp, Homo sapien
gaaactccatcttccgaatgtgcct

SEQ ID NO: 681314 - DNA, 25 bp, Homo sapien
tcttccgaatgtgcctttccacaca

SEQ ID NO: 681315 - DNA, 25 bp, Homo sapien
tccatcttccgaatgtgcctttcca

SEQ ID NO: 681316 - DNA, 25 bp, Homo sapien
actccatcttccgaatgtgcctttc

SEQ ID NO: 681317 - DNA, 25 bp, Homo sapien
ctggtgtctttgtggcgtccagaca

SEQ ID NO: 681318 - DNA, 25 bp, Homo sapien
tgtctttgtggcgtccagacaggtg

SEQ ID NO: 681319 - DNA, 25 bp, Homo sapien
cagcctggaattcctcctggtgtct

SEQ ID NO: 681320 - DNA, 25 bp, Homo sapien
agcctggaattcctcctggtgtctt

SEQ ID NO: 681321 - DNA, 25 bp, Homo sapien
cctcttttcaatgcttcgaagatct

SEQ ID NO: 681322 - DNA, 25 bp, Homo sapien
tttcaatgcttcgaagatcttcttc

SEQ ID NO: 681323 - DNA, 25 bp, Homo sapien
gaggcctcttttcaatgcttcgaag

SEQ ID NO: 681324 - DNA, 25 bp, Homo sapien
caatgcttcgaagatcttcttcacc

SEQ ID NO: 681325 - DNA, 25 bp, Homo sapien
cgaccccttccgcagcgtgccgtac

SEQ ID NO: 681326 - DNA, 25 bp, Homo sapien
accccttccgcagcgtgccgtacat

SEQ ID NO: 681327 - DNA, 25 bp, Homo sapien
acagaccgaccccttccgcagcgtg

SEQ ID NO: 681328 - DNA, 25 bp, Homo sapien
gaccgaccccttccgcagcgtgccg

SEQ ID NO: 681329 - DNA, 25 bp, Homo sapien
tcgcgatctcacggagttcctgttg

SEQ ID NO: 681330 - DNA, 25 bp, Homo sapien
gcgatctcacggagttcctgttgat

SEQ ID NO: 681331 - DNA, 25 bp, Homo sapien
cgatctcacggagttcctgttgatg

SEQ ID NO: 681332 - DNA, 25 bp, Homo sapien
cgcgatctcacggagttcctgttga

SEQ ID NO: 681333 - DNA, 25 bp, Homo sapien
gcatctgctaccacgtccagtaatt

SEQ ID NO: 681334 - DNA, 25 bp, Homo sapien
ctcttgaaccgggccctccgcaagt

SEQ ID NO: 681335 - DNA, 25 bp, Homo sapien
tgaaccgggccctccgcaagtttgc

SEQ ID NO: 681336 - DNA, 25 bp, Homo sapien
ggccctccgcaagtttgccatcttg

SEQ ID NO: 681337 - DNA, 25 bp, Homo sapien
ccgggccctccgcaagtttgccatc

SEQ ID NO: 681338 - DNA, 25 bp, Homo sapien
tggggcaggagctcgctcactccca

SEQ ID NO: 681339 - DNA, 25 bp, Homo sapien
aggtgtgcaccgttggcccagcccc

SEQ ID NO: 681340 - DNA, 25 bp, Homo sapien
ggaccttataccctcgctgctgcag

SEQ ID NO: 681341 - DNA, 25 bp, Homo sapien
ctgagaggttagggaccccggcagg

SEQ ID NO: 681342 - DNA, 25 bp, Homo sapien
acaggaaccgcaacctcaccgacat

SEQ ID NO: 681343 - DNA, 25 bp, Homo sapien
ccaggggacaggaaccgcaacctca

SEQ ID NO: 681344 - DNA, 25 bp, Homo sapien
actgctgaagcctgcgaaggaggcg

SEQ ID NO: 681345 - DNA, 25 bp, Homo sapien
ctgaagcctgcgaaggaggcgctcc

SEQ ID NO: 681346 - DNA, 25 bp, Homo sapien
cttcctgcacgatgagacccccatg

SEQ ID NO: 681347 - DNA, 25 bp, Homo sapien
cgatgagacccccatgttccaacat

SEQ ID NO: 681348 - DNA, 25 bp, Homo sapien
tcctgcacgatgagacccccatgtt

SEQ ID NO: 681349 - DNA, 25 bp, Homo sapien
tgcacgatgagacccccatgttcca

SEQ ID NO: 681350 - DNA, 25 bp, Homo sapien
cgctaagtctgtccgctcactgctg

SEQ ID NO: 681351 - DNA, 25 bp, Homo sapien
gaagcagagtctactcccgctaagt

SEQ ID NO: 681352 - DNA, 25 bp, Homo sapien
tgatgccgttcagacccggctggtg

SEQ ID NO: 681353 - DNA, 25 bp, Homo sapien
gcctggcacttagaactgatgccgt

SEQ ID NO: 681354 - DNA, 25 bp, Homo sapien
ttagagtgacccaaacattcagtcc

SEQ ID NO: 681355 - DNA, 25 bp, Homo sapien
gattacagatgtataatcagtctgt

SEQ ID NO: 681356 - DNA, 25 bp, Homo sapien
ctaatcacagcacgggggtttgggt

SEQ ID NO: 681357 - DNA, 25 bp, Homo sapien
tatgaattttagagtgacccaaaca

SEQ ID NO: 681358 - DNA, 25 bp, Homo sapien
gcagggtatgcatcgtaaggacaca

SEQ ID NO: 681359 - DNA, 25 bp, Homo sapien
tgagaactaacaccaatgcacctgt

SEQ ID NO: 681360 - DNA, 25 bp, Homo sapien
tgcactgcctacacaccagagaaga

SEQ ID NO: 681361 - DNA, 25 bp, Homo sapien
catggaaatcatcagagcagggtat

SEQ ID NO: 681362 - DNA, 25 bp, Homo sapien
cctcggatatttctcactggcataa

SEQ ID NO: 681363 - DNA, 25 bp, Homo sapien
gggcttgcatgatccagaggtcact

SEQ ID NO: 681364 - DNA, 25 bp, Homo sapien
ttatctgtaagtgtgaccaccggga

SEQ ID NO: 681365 - DNA, 25 bp, Homo sapien
tggtgtttgtcaccccaactagaag

SEQ ID NO: 681366 - DNA, 25 bp, Homo sapien
tattgtggattctaaatttggccaa

SEQ ID NO: 681367 - DNA, 25 bp, Homo sapien
acaagttcttccagaccgattagtg

SEQ ID NO: 681368 - DNA, 25 bp, Homo sapien
tagtgacgtggatacattgttttga

SEQ ID NO: 681369 - DNA, 25 bp, Homo sapien
cagaccgattagtgacgtggataca

SEQ ID NO: 681370 - DNA, 25 bp, Homo sapien
ggccctgtccgtcaatccatttgca

SEQ ID NO: 681371 - DNA, 25 bp, Homo sapien
agtcaccaagcaccagctgcgtgca

SEQ ID NO: 681372 - DNA, 25 bp, Homo sapien
tgcgtgcaccgcattgtgccaatgt

SEQ ID NO: 681373 - DNA, 25 bp, Homo sapien
gccaatgtctggaaggatgctcaca

SEQ ID NO: 681374 - DNA, 25 bp, Homo sapien
gaagatcgccttgaggacctgctgc

SEQ ID NO: 681375 - DNA, 25 bp, Homo sapien
cggactcgagctagggctctgcaaa

SEQ ID NO: 681376 - DNA, 25 bp, Homo sapien
cctgccgggctctgataatgcagcc

SEQ ID NO: 681377 - DNA, 25 bp, Homo sapien
taatgcagccgggactcttatctgg

SEQ ID NO: 681378 - DNA, 25 bp, Homo sapien
tcaggcccagacaaagagatgccaa

SEQ ID NO: 681379 - DNA, 25 bp, Homo sapien
catcttcaggcccagacaaagagat

SEQ ID NO: 681380 - DNA, 25 bp, Homo sapien
aaagagatgccaagaccagagggga

SEQ ID NO: 681381 - DNA, 25 bp, Homo sapien
acctccatcttcaggcccagacaaa

SEQ ID NO: 681382 - DNA, 25 bp, Homo sapien
acatattcgttgaatttttgtttca

SEQ ID NO: 681383 - DNA, 25 bp, Homo sapien
ctctgagcaataaccatcaaaaaca

SEQ ID NO: 681384 - DNA, 25 bp, Homo sapien
gctctgagcaataaccatcaaaaac

SEQ ID NO: 681385 - DNA, 25 bp, Homo sapien
aacaaatacatattcgttgaatttt

SEQ ID NO: 681386 - DNA, 25 bp, Homo sapien
cgctcgcgcttccggccggcctccc

SEQ ID NO: 681387 - DNA, 25 bp, Homo sapien
gctcgcgcttccggccggcctcccc

SEQ ID NO: 681388 - DNA, 25 bp, Homo sapien
gcgctcgcgcttccggccggcctcc

SEQ ID NO: 681389 - DNA, 25 bp, Homo sapien
gataatctagcccaattctctgaga

SEQ ID NO: 681390 - DNA, 25 bp, Homo sapien
gaacactttcagcaagcgtttcttg

SEQ ID NO: 681391 - DNA, 25 bp, Homo sapien
tgatcggcagccaagggaacacttt

SEQ ID NO: 681392 - DNA, 25 bp, Homo sapien
gaccaacggtatgccaatctgctga

SEQ ID NO: 681393 - DNA, 25 bp, Homo sapien
acccactgcactgcgctggctgcag

SEQ ID NO: 681394 - DNA, 25 bp, Homo sapien
tcctaatactgagagcctggagtca

SEQ ID NO: 681395 - DNA, 25 bp, Homo sapien
tagcaagcagctcaaacacggaatt

SEQ ID NO: 681396 - DNA, 25 bp, Homo sapien
tatacctctgaccagtgacgtggaa

SEQ ID NO: 681397 - DNA, 25 bp, Homo sapien
tgaaccaagctttgagccagaggat

SEQ ID NO: 681398 - DNA, 25 bp, Homo sapien
gaacaagctaagagtaaggctgcta

SEQ ID NO: 681399 - DNA, 25 bp, Homo sapien
cacctgtgacaggtagagtttatca

SEQ ID NO: 681400 - DNA, 25 bp, Homo sapien
gaaacactgcctacactttatgaaa

SEQ ID NO: 681401 - DNA, 25 bp, Homo sapien
attgcaggcatgagcgcctagccag

SEQ ID NO: 681402 - DNA, 25 bp, Homo sapien
ttctcaggtggaccagtgacgaacc

SEQ ID NO: 681403 - DNA, 25 bp, Homo sapien
gctgaacggtgtcacttctcaggtg

SEQ ID NO: 681404 - DNA, 25 bp, Homo sapien
gactgcctgagtacagcaacgctga

SEQ ID NO: 681405 - DNA, 25 bp, Homo sapien
agaacataggccttccagtaatgcc

SEQ ID NO: 681406 - DNA, 25 bp, Homo sapien
tgtctgggccttaaggtttaactca

SEQ ID NO: 681407 - DNA, 25 bp, Homo sapien
tcatgtctgggccttaaggtttaac

SEQ ID NO: 681408 - DNA, 25 bp, Homo sapien
tctgggccttaaggtttaactcaga

SEQ ID NO: 681409 - DNA, 25 bp, Homo sapien
tgggccttaaggtttaactcagagc

SEQ ID NO: 681410 - DNA, 25 bp, Homo sapien
ggaaggtgcccgagcaatactgtag

SEQ ID NO: 681411 - DNA, 25 bp, Homo sapien
taccatagtgtcttcaatactactc

SEQ ID NO: 681412 - DNA, 25 bp, Homo sapien
tagccaaccaaataccatagtgtct

SEQ ID NO: 681413 - DNA, 25 bp, Homo sapien
cgagcaatactgtagccaaccaaat

SEQ ID NO: 681414 - DNA, 25 bp, Homo sapien
ttcagacgggagtctcgctctctta

SEQ ID NO: 681415 - DNA, 25 bp, Homo sapien
aggctccgcctcctgggttcacgcg

SEQ ID NO: 681416 - DNA, 25 bp, Homo sapien
agacgggagtctcgctctcttaccc

SEQ ID NO: 681417 - DNA, 25 bp, Homo sapien
ggctccgcctcctgggttcacgcga

SEQ ID NO: 681418 - DNA, 25 bp, Homo sapien
tagaaatcgcctctagaggctgggt

SEQ ID NO: 681419 - DNA, 25 bp, Homo sapien
ggttggcccaaatctactagcctgg

SEQ ID NO: 681420 - DNA, 25 bp, Homo sapien
tggagttgggcatcgagttccttcc

SEQ ID NO: 681421 - DNA, 25 bp, Homo sapien
caccgtcccctgtgcaaacatggag

SEQ ID NO: 681422 - DNA, 25 bp, Homo sapien
aacgcctttctttgtgcccggcaca

SEQ ID NO: 681423 - DNA, 25 bp, Homo sapien
cgtgtccggaccctgagagtgtttg

SEQ ID NO: 681424 - DNA, 25 bp, Homo sapien
gagtcatccctacctattcagcgga

SEQ ID NO: 681425 - DNA, 25 bp, Homo sapien
caggtgggagctaggtaacaagaca

SEQ ID NO: 681426 - DNA, 25 bp, Homo sapien
tgtacagtgcatattgacggcacac

SEQ ID NO: 681427 - DNA, 25 bp, Homo sapien
ggcagtcgcggccttcgttgtcagt

SEQ ID NO: 681428 - DNA, 25 bp, Homo sapien
gtacagtgcatattgacggcacacg

SEQ ID NO: 681429 - DNA, 25 bp, Homo sapien
gaatgtacagtgcatattgacggca

SEQ ID NO: 681430 - DNA, 25 bp, Homo sapien
gcctgcttgcttctcctgttcaatc

SEQ ID NO: 681431 - DNA, 25 bp, Homo sapien
gacttatcgaatttctcgatctcag

SEQ ID NO: 681432 - DNA, 25 bp, Homo sapien
tgcttctcctgttcaatcgtttctt

SEQ ID NO: 681433 - DNA, 25 bp, Homo sapien
tgttcaatcgtttctttggaaggca

SEQ ID NO: 681434 - DNA, 25 bp, Homo sapien
tctggtctgcgtagtggccaccact

SEQ ID NO: 681435 - DNA, 25 bp, Homo sapien
tgcgtagtggccaccactgagttgt

SEQ ID NO: 681436 - DNA, 25 bp, Homo sapien
cgaggcacgcgagaacgagcgaagt

SEQ ID NO: 681437 - DNA, 25 bp, Homo sapien
acggaggagaagcggagcgaggcac

SEQ ID NO: 681438 - DNA, 25 bp, Homo sapien
agttagatggctgtttctaaagggg

SEQ ID NO: 681439 - DNA, 25 bp, Homo sapien
tagatggctgtttctaaagggggcc

SEQ ID NO: 681440 - DNA, 25 bp, Homo sapien
ttagatggctgtttctaaagggggc

SEQ ID NO: 681441 - DNA, 25 bp, Homo sapien
tccagtattgtgtctccatgaggcc

SEQ ID NO: 681442 - DNA, 25 bp, Homo sapien
gttagagatttgagcgtggagttca

SEQ ID NO: 681443 - DNA, 25 bp, Homo sapien
cagttagagatttgagcgtggagtt

SEQ ID NO: 681444 - DNA, 25 bp, Homo sapien
ttgtgtctccatgaggccaaatgaa

SEQ ID NO: 681445 - DNA, 25 bp, Homo sapien
tgggctgagatgcacgggcacagcc

SEQ ID NO: 681446 - DNA, 25 bp, Homo sapien
tccaaggacacctcatgtctgagga

SEQ ID NO: 681447 - DNA, 25 bp, Homo sapien
catcaggcaaggacagtgcaggaga

SEQ ID NO: 681448 - DNA, 25 bp, Homo sapien
agaaggacgggcctgggctgagatg

SEQ ID NO: 681449 - DNA, 25 bp, Homo sapien
aaatgtatgactctgatgtgacagc

SEQ ID NO: 681450 - DNA, 25 bp, Homo sapien
tgactgcaggcgtctgggcctaaag

SEQ ID NO: 681451 - DNA, 25 bp, Homo sapien
ccggactgtagccagctgttggtat

SEQ ID NO: 681452 - DNA, 25 bp, Homo sapien
cacccggcctagttggtgctatttt

SEQ ID NO: 681453 - DNA, 25 bp, Homo sapien
ctgtgcttctgtcactagggcctcg

SEQ ID NO: 681454 - DNA, 25 bp, Homo sapien
agccccaagccctgtgcttctgtca

SEQ ID NO: 681455 - DNA, 25 bp, Homo sapien
cctcggcagcctcccatgtccacca

SEQ ID NO: 681456 - DNA, 25 bp, Homo sapien
gcttctgtcactagggcctcggcag

SEQ ID NO: 681457 - DNA, 25 bp, Homo sapien
gactcattcccagccggagggcgag

SEQ ID NO: 681458 - DNA, 25 bp, Homo sapien
tcctggaccccagcggggactcatt

SEQ ID NO: 681459 - DNA, 25 bp, Homo sapien
cggagggcgagaggtgggacgtgga

SEQ ID NO: 681460 - DNA, 25 bp, Homo sapien
ggtgggacgtggagagctctgaagt

SEQ ID NO: 681461 - DNA, 25 bp, Homo sapien
gaacccacgtgtggtgatgcctccc

SEQ ID NO: 681462 - DNA, 25 bp, Homo sapien
tccctgcctcatgtgagaccacagg

SEQ ID NO: 681463 - DNA, 25 bp, Homo sapien
tcatgtgagaccacagggtttggag

SEQ ID NO: 681464 - DNA, 25 bp, Homo sapien
gctgatggacagtggggactttcct

SEQ ID NO: 681465 - DNA, 25 bp, Homo sapien
agagtgcagaggtcattaggacccc

SEQ ID NO: 681466 - DNA, 25 bp, Homo sapien
caaaggcttgtttacccacatttct

SEQ ID NO: 681467 - DNA, 25 bp, Homo sapien
gtcttcaaaggcttgtttacccaca

SEQ ID NO: 681468 - DNA, 25 bp, Homo sapien
cggcctttggatttccagcaagagt

SEQ ID NO: 681469 - DNA, 25 bp, Homo sapien
agcacgttgccatagccaacgatct

SEQ ID NO: 681470 - DNA, 25 bp, Homo sapien
ggcattctctaattaggtggcagca

SEQ ID NO: 681471 - DNA, 25 bp, Homo sapien
ctctaattaggtggcagcacgttgc

SEQ ID NO: 681472 - DNA, 25 bp, Homo sapien
gccatagccaacgatctccagatta

SEQ ID NO: 681473 - DNA, 25 bp, Homo sapien
gactcagaagttatggacatcagcc

SEQ ID NO: 681474 - DNA, 25 bp, Homo sapien
caagagtggcaaatagaggcagagc

SEQ ID NO: 681475 - DNA, 25 bp, Homo sapien
cactatccttgaggtgactgaccag

SEQ ID NO: 681476 - DNA, 25 bp, Homo sapien
aaacagattttgtaccaggtgcctc

SEQ ID NO: 681477 - DNA, 25 bp, Homo sapien
tatatatcttacgtggctggcctct

SEQ ID NO: 681478 - DNA, 25 bp, Homo sapien
tgttggccctacactaccatgtgaa

SEQ ID NO: 681479 - DNA, 25 bp, Homo sapien
gactggtagcttgtatgttggccct

SEQ ID NO: 681480 - DNA, 25 bp, Homo sapien
gagcgtttattacacagcaagggca

SEQ ID NO: 681481 - DNA, 25 bp, Homo sapien
gtttaactccggctaagctgccatg

SEQ ID NO: 681482 - DNA, 25 bp, Homo sapien
ttcgctttgggaagactcgtcagac

SEQ ID NO: 681483 - DNA, 25 bp, Homo sapien
tcagatggagaagcaccgtctttcc

SEQ ID NO: 681484 - DNA, 25 bp, Homo sapien
caaagtctgacacttgttgggatcc

SEQ ID NO: 681485 - DNA, 25 bp, Homo sapien
ttgaaccatcctctttttggtctag

SEQ ID NO: 681486 - DNA, 25 bp, Homo sapien
atagtttcgtattttgaaccatcct

SEQ ID NO: 681487 - DNA, 25 bp, Homo sapien
cgtattttgaaccatcctctttttg

SEQ ID NO: 681488 - DNA, 25 bp, Homo sapien
catcctctttttggtctagcttctc

SEQ ID NO: 681489 - DNA, 25 bp, Homo sapien
tcgtaagtgcgcttcacaggtgcca

SEQ ID NO: 681490 - DNA, 25 bp, Homo sapien
ggagactttaactggcccgatgaga

SEQ ID NO: 681491 - DNA, 25 bp, Homo sapien
gaaccgatccttggtgggagtccca

SEQ ID NO: 681492 - DNA, 25 bp, Homo sapien
gaactggactgacctaacactctgg

SEQ ID NO: 681493 - DNA, 25 bp, Homo sapien
aacgcatacgttagtctaggcctac

SEQ ID NO: 681494 - DNA, 25 bp, Homo sapien
ataagcccacggtgctttgtttcct

SEQ ID NO: 681495 - DNA, 25 bp, Homo sapien
gaatcaacagtatcactatcttcca

SEQ ID NO: 681496 - DNA, 25 bp, Homo sapien
tctcacacttaccaagaataagccc

SEQ ID NO: 681497 - DNA, 25 bp, Homo sapien
caagtgcccaatataggtgtaccaa

SEQ ID NO: 681498 - DNA, 25 bp, Homo sapien
acaggccataccatatagcgtaggg

SEQ ID NO: 681499 - DNA, 25 bp, Homo sapien
caatgcacgacggtattatacgctg

SEQ ID NO: 681500 - DNA, 25 bp, Homo sapien
tattcagtcaccactcagagcaact

SEQ ID NO: 681501 - DNA, 25 bp, Homo sapien
ttaaataaatgatgtgtcccactgg

SEQ ID NO: 681502 - DNA, 25 bp, Homo sapien
cagtcagtcctttgatgaaggcagg

SEQ ID NO: 681503 - DNA, 25 bp, Homo sapien
taaaaatgtcctacagactgtgagg

SEQ ID NO: 681504 - DNA, 25 bp, Homo sapien
gattgttaacacctatgcagtcagt

SEQ ID NO: 681505 - DNA, 25 bp, Homo sapien
catcctcccatgtagtgtttttcaa

SEQ ID NO: 681506 - DNA, 25 bp, Homo sapien
gggtcccacagtcctacatcctccc

SEQ ID NO: 681507 - DNA, 25 bp, Homo sapien
tttttcgtaagtgatgggtcccaca

SEQ ID NO: 681508 - DNA, 25 bp, Homo sapien
caaataaaagtcattaggttcaaat

SEQ ID NO: 681509 - DNA, 25 bp, Homo sapien
taattatttctatgaagatgacccc

SEQ ID NO: 681510 - DNA, 25 bp, Homo sapien
ttcatttgggcagatctacctgaac

SEQ ID NO: 681511 - DNA, 25 bp, Homo sapien
cccacagagtgcaaagtgaatggac

SEQ ID NO: 681512 - DNA, 25 bp, Homo sapien
ccctccagactaggaagattaaaag

SEQ ID NO: 681513 - DNA, 25 bp, Homo sapien
ccaatgtcactaagtatttttttca

SEQ ID NO: 681514 - DNA, 25 bp, Homo sapien
cgggcttttcttaaactgccaagat

SEQ ID NO: 681515 - DNA, 25 bp, Homo sapien
tatatgttctttacagtattccaac

SEQ ID NO: 681516 - DNA, 25 bp, Homo sapien
tttacagtattccaacccaatgtca

SEQ ID NO: 681517 - DNA, 25 bp, Homo sapien
cacgtacaacttgtaatatttacta

SEQ ID NO: 681518 - DNA, 25 bp, Homo sapien
gatatcctcatctagtgtgtacaca

SEQ ID NO: 681519 - DNA, 25 bp, Homo sapien
gacaaaaaaggtgcatagatatcct

SEQ ID NO: 681520 - DNA, 25 bp, Homo sapien
taggatcataaaacctacccatctg

SEQ ID NO: 681521 - DNA, 25 bp, Homo sapien
gactgcagtgcactcacgattcacc

SEQ ID NO: 681522 - DNA, 25 bp, Homo sapien
gcactcatggttcattgactgcagt

SEQ ID NO: 681523 - DNA, 25 bp, Homo sapien
gcagtgcactcacgattcaccatag

SEQ ID NO: 681524 - DNA, 25 bp, Homo sapien
gtgcactcacgattcaccatagcct

SEQ ID NO: 681525 - DNA, 25 bp, Homo sapien
tgcctgcaacgtacctgggcaaagg

SEQ ID NO: 681526 - DNA, 25 bp, Homo sapien
ttttgaatacttaaagcaggcaggc

SEQ ID NO: 681527 - DNA, 25 bp, Homo sapien
gccactgagccgagcacatatctac

SEQ ID NO: 681528 - DNA, 25 bp, Homo sapien
tatgtgactcgaccaatgcatgccc

SEQ ID NO: 681529 - DNA, 25 bp, Homo sapien
caaaggctgttactctgtaatacca

SEQ ID NO: 681530 - DNA, 25 bp, Homo sapien
gcatattgtgaagccaactacagac

SEQ ID NO: 681531 - DNA, 25 bp, Homo sapien
caatatcatctgtaaatggcaagtc

SEQ ID NO: 681532 - DNA, 25 bp, Homo sapien
gatagaattgctgctcactatgaag

SEQ ID NO: 681533 - DNA, 25 bp, Homo sapien
gtgacactgcttactgggaaatgct

SEQ ID NO: 681534 - DNA, 25 bp, Homo sapien
taggcttggcaactaggagaaatct

SEQ ID NO: 681535 - DNA, 25 bp, Homo sapien
aaaaagcggtatttcagccacagag

SEQ ID NO: 681536 - DNA, 25 bp, Homo sapien
tgcctacccacagcttaaaaagtcg

SEQ ID NO: 681537 - DNA, 25 bp, Homo sapien
tcattaatgttatctaggctgggcg

SEQ ID NO: 681538 - DNA, 25 bp, Homo sapien
agaaggaccctatgtttctttgcag

SEQ ID NO: 681539 - DNA, 25 bp, Homo sapien
taccctttcttgtgagtgttttgaa

SEQ ID NO: 681540 - DNA, 25 bp, Homo sapien
taagttcaaatcaatagctggctcc

SEQ ID NO: 681541 - DNA, 25 bp, Homo sapien
ttttcagagcacttgcacttagcca

SEQ ID NO: 681542 - DNA, 25 bp, Homo sapien
cctcaatcagtagggtttagacacc

SEQ ID NO: 681543 - DNA, 25 bp, Homo sapien
ttagaatacacatagccagccctca

SEQ ID NO: 681544 - DNA, 25 bp, Homo sapien
ggaaacgcctctgccacgattgatg

SEQ ID NO: 681545 - DNA, 25 bp, Homo sapien
gatgacagtcccagtttagcaggct

SEQ ID NO: 681546 - DNA, 25 bp, Homo sapien
gcactgagagctacacaaggatcct

SEQ ID NO: 681547 - DNA, 25 bp, Homo sapien
gatctggcacaccaagaattagtgg

SEQ ID NO: 681548 - DNA, 25 bp, Homo sapien
gctactttataatgttcgggaacca

SEQ ID NO: 681549 - DNA, 25 bp, Homo sapien
tctgggcctagtgggcaatcaaacc

SEQ ID NO: 681550 - DNA, 25 bp, Homo sapien
tattactagtgaagaaaacggcagc

SEQ ID NO: 681551 - DNA, 25 bp, Homo sapien
tactgaaatgtagaatctgggccta

SEQ ID NO: 681552 - DNA, 25 bp, Homo sapien
caagggctaggaatgacgctattac

SEQ ID NO: 681553 - DNA, 25 bp, Homo sapien
tttacatgtgccattaagccctaca

SEQ ID NO: 681554 - DNA, 25 bp, Homo sapien
tttaaagtacctatatcgagtcagc

SEQ ID NO: 681555 - DNA, 25 bp, Homo sapien
tttgcatctgaagtagtgaacatac

SEQ ID NO: 681556 - DNA, 25 bp, Homo sapien
tcactcattgagtcaaaaactgtgg

SEQ ID NO: 681557 - DNA, 25 bp, Homo sapien
ccatggaggccaagagtcactagat

SEQ ID NO: 681558 - DNA, 25 bp, Homo sapien
taagcaattgggaagcgggaacaca

SEQ ID NO: 681559 - DNA, 25 bp, Homo sapien
gaacacaggaccacacataaactcg

SEQ ID NO: 681560 - DNA, 25 bp, Homo sapien
tggtctgttctcaactacctccagg

SEQ ID NO: 681561 - DNA, 25 bp, Homo sapien
cattaatggaacctaggtggcccca

SEQ ID NO: 681562 - DNA, 25 bp, Homo sapien
gaacctctagaacaaaccgtggatg

SEQ ID NO: 681563 - DNA, 25 bp, Homo sapien
cacagcattttgaaggtctatacaa

SEQ ID NO: 681564 - DNA, 25 bp, Homo sapien
tgattagggaaggagacaaagtctg

SEQ ID NO: 681565 - DNA, 25 bp, Homo sapien
tggcactttaagaggattaatccag

SEQ ID NO: 681566 - DNA, 25 bp, Homo sapien
atggcactttaagaggattaatcca

SEQ ID NO: 681567 - DNA, 25 bp, Homo sapien
tatggcataagcagaaggacactat

SEQ ID NO: 681568 - DNA, 25 bp, Homo sapien
tacctgagggaccttacacccatgc

SEQ ID NO: 681569 - DNA, 25 bp, Homo sapien
tggtccaccctacagttagacagat

SEQ ID NO: 681570 - DNA, 25 bp, Homo sapien
aaaataaagatgcagtggtccaccc

SEQ ID NO: 681571 - DNA, 25 bp, Homo sapien
tccgtattcagatttcaggcaagaa

SEQ ID NO: 681572 - DNA, 25 bp, Homo sapien
gctgcttatcctgatactttccgta

SEQ ID NO: 681573 - DNA, 25 bp, Homo sapien
caggctgaactcctctaagagttta

SEQ ID NO: 681574 - DNA, 25 bp, Homo sapien
tttccagtacaccagtagaaccagt

SEQ ID NO: 681575 - DNA, 25 bp, Homo sapien
tagagaggatctcaagacctacaat

SEQ ID NO: 681576 - DNA, 25 bp, Homo sapien
tcctaaacttgtgatttgctcgccc

SEQ ID NO: 681577 - DNA, 25 bp, Homo sapien
gctgggtaaagatcagaatcttgcc

SEQ ID NO: 681578 - DNA, 25 bp, Homo sapien
gacctacaatcagaaagctgggtaa

SEQ ID NO: 681579 - DNA, 25 bp, Homo sapien
caggaaccgtggtggatgaaaacca

SEQ ID NO: 681580 - DNA, 25 bp, Homo sapien
tatgtatcacaacaccacaagagga

SEQ ID NO: 681581 - DNA, 25 bp, Homo sapien
caagtttttcgaagccatttcccag

SEQ ID NO: 681582 - DNA, 25 bp, Homo sapien
gatcaaggcttcaccgaaggtagct

SEQ ID NO: 681583 - DNA, 25 bp, Homo sapien
tgctgtttttaagtgtaactgatct

SEQ ID NO: 681584 - DNA, 25 bp, Homo sapien
gcacccatcctcttgttgctgtttt

SEQ ID NO: 681585 - DNA, 25 bp, Homo sapien
ttcttgcatttggatactcccagtc

SEQ ID NO: 681586 - DNA, 25 bp, Homo sapien
tgatcttgaagcaggattctgagca

SEQ ID NO: 681587 - DNA, 25 bp, Homo sapien
gagcaccataaaggcctgtgttgca

SEQ ID NO: 681588 - DNA, 25 bp, Homo sapien
aatgggaagcattcatgtgagcccc

SEQ ID NO: 681589 - DNA, 25 bp, Homo sapien
tgggaaccagcccagacatactctg

SEQ ID NO: 681590 - DNA, 25 bp, Homo sapien
tgtagacgccattggaatccttggg

SEQ ID NO: 681591 - DNA, 25 bp, Homo sapien
tagctcctaataagctagtctcagg

SEQ ID NO: 681592 - DNA, 25 bp, Homo sapien
tacttgcaagtggtaccaaaaccat

SEQ ID NO: 681593 - DNA, 25 bp, Homo sapien
agcctactggttggttacttgcaag

SEQ ID NO: 681594 - DNA, 25 bp, Homo sapien
gaagggccaagggtcattaagagat

SEQ ID NO: 681595 - DNA, 25 bp, Homo sapien
gcaccaactggttaactaggtatca

SEQ ID NO: 681596 - DNA, 25 bp, Homo sapien
gaagcaatgtctctagtcaaatacc

SEQ ID NO: 681597 - DNA, 25 bp, Homo sapien
gaaaatggctgttaccacttaggac

SEQ ID NO: 681598 - DNA, 25 bp, Homo sapien
gctttctaagagctcacagcaagtt

SEQ ID NO: 681599 - DNA, 25 bp, Homo sapien
tcagaacccactactgcaaccagct

SEQ ID NO: 681600 - DNA, 25 bp, Homo sapien
ctaaccggttccttgaggaatgtgg

SEQ ID NO: 681601 - DNA, 25 bp, Homo sapien
tggttttggtggtgaccaaggagaa

SEQ ID NO: 681602 - DNA, 25 bp, Homo sapien
caccctccaaaatgaatatacccac

SEQ ID NO: 681603 - DNA, 25 bp, Homo sapien
caaagagcaaggcaggaaacggagt

SEQ ID NO: 681604 - DNA, 25 bp, Homo sapien
tagtacagggcataaccactaggcc

SEQ ID NO: 681605 - DNA, 25 bp, Homo sapien
ggagtccagatcctcaaaatggtag

SEQ ID NO: 681606 - DNA, 25 bp, Homo sapien
aaaagtacaaccctgcgcatcatgg

SEQ ID NO: 681607 - DNA, 25 bp, Homo sapien
gccgacttggctgcggtgcattttg

SEQ ID NO: 681608 - DNA, 25 bp, Homo sapien
gcctttagccgacttggctgcggtg

SEQ ID NO: 681609 - DNA, 25 bp, Homo sapien
agtgcagagaatgcgccccctactg

SEQ ID NO: 681610 - DNA, 25 bp, Homo sapien
aacactcatcgcctttagccgactt

SEQ ID NO: 681611 - DNA, 25 bp, Homo sapien
tacaggcacaagaagcatcagggat

SEQ ID NO: 681612 - DNA, 25 bp, Homo sapien
cctagagtcttggtcttgggcagaa

SEQ ID NO: 681613 - DNA, 25 bp, Homo sapien
gaatgttcgaaagaggtgctgacca

SEQ ID NO: 681614 - DNA, 25 bp, Homo sapien
gaagagaagcaatcgcgccttttcc

SEQ ID NO: 681615 - DNA, 25 bp, Homo sapien
tccggagcagagtcgggtagcggtc

SEQ ID NO: 681616 - DNA, 25 bp, Homo sapien
caaaggagcgtgtgtgcggctggag

SEQ ID NO: 681617 - DNA, 25 bp, Homo sapien
ggcggcgatgcgaacaacaatgcgc

SEQ ID NO: 681618 - DNA, 25 bp, Homo sapien
cagagtcgggtagcggtccgtgccg

SEQ ID NO: 681619 - DNA, 25 bp, Homo sapien
ggagttcagctcatggatcccggcg

SEQ ID NO: 681620 - DNA, 25 bp, Homo sapien
tcagcagacaatacaagcgcctcgg

SEQ ID NO: 681621 - DNA, 25 bp, Homo sapien
tgtctgagaagacgccaaaatcccc

SEQ ID NO: 681622 - DNA, 25 bp, Homo sapien
gaacctgccctagccaaaatggcgg

SEQ ID NO: 681623 - DNA, 25 bp, Homo sapien
tgtgacttgacattcttcccagtca

SEQ ID NO: 681624 - DNA, 25 bp, Homo sapien
cagtcacagtgatggactcttctct

SEQ ID NO: 681625 - DNA, 25 bp, Homo sapien
cctgtgacttgacattcttcccagt

SEQ ID NO: 681626 - DNA, 25 bp, Homo sapien
tgacttgacattcttcccagtcaca

SEQ ID NO: 681627 - DNA, 25 bp, Homo sapien
gttaacattatcttacttctgagat

SEQ ID NO: 681628 - DNA, 25 bp, Homo sapien
cttctgagatcaattaggtataaag

SEQ ID NO: 681629 - DNA, 25 bp, Homo sapien
ttcacatactctaatgaaggcagca

SEQ ID NO: 681630 - DNA, 25 bp, Homo sapien
ttctgagatcaattaggtataaaga

SEQ ID NO: 681631 - DNA, 25 bp, Homo sapien
tataggtctcaatacagcaaaatga

SEQ ID NO: 681632 - DNA, 25 bp, Homo sapien
atttatttataggtctcaatacagc

SEQ ID NO: 681633 - DNA, 25 bp, Homo sapien
tgaaaacgaaaattgagaacattgc

SEQ ID NO: 681634 - DNA, 25 bp, Homo sapien
gaaaattgagaacattgctcattag

SEQ ID NO: 681635 - DNA, 25 bp, Homo sapien
catgaaatttaccttaccttatatt

SEQ ID NO: 681636 - DNA, 25 bp, Homo sapien
cctgaaatgaacgtaactataaatg

SEQ ID NO: 681637 - DNA, 25 bp, Homo sapien
tactttaagagtacattttatacaa

SEQ ID NO: 681638 - DNA, 25 bp, Homo sapien
gaaatataaaataggtggtcttcat

SEQ ID NO: 681639 - DNA, 25 bp, Homo sapien
aaaagagtcaataatcctttcaaga

SEQ ID NO: 681640 - DNA, 25 bp, Homo sapien
agagtcaataatcctttcaagaaag

SEQ ID NO: 681641 - DNA, 25 bp, Homo sapien
aagagtcaataatcctttcaagaaa

SEQ ID NO: 681642 - DNA, 25 bp, Homo sapien
gagtcaataatcctttcaagaaaga

SEQ ID NO: 681643 - DNA, 25 bp, Homo sapien
cataaacacgatccacaaatgatat

SEQ ID NO: 681644 - DNA, 25 bp, Homo sapien
caccataaacacgatccacaaatga

SEQ ID NO: 681645 - DNA, 25 bp, Homo sapien
tcaccataaacacgatccacaaatg

SEQ ID NO: 681646 - DNA, 25 bp, Homo sapien
ccataaacacgatccacaaatgata

SEQ ID NO: 681647 - DNA, 25 bp, Homo sapien
acaacagaaataggattagtcctac

SEQ ID NO: 681648 - DNA, 25 bp, Homo sapien
gccggtataccacattaccaacaca

SEQ ID NO: 681649 - DNA, 25 bp, Homo sapien
tagtcctacaacagaggtccttaaa

SEQ ID NO: 681650 - DNA, 25 bp, Homo sapien
aaaacaattaggcagcttagccggt

SEQ ID NO: 681651 - DNA, 25 bp, Homo sapien
gctacaatggtttagcattaagtaa

SEQ ID NO: 681652 - DNA, 25 bp, Homo sapien
aaatggccttgtgcgtagatttttc

SEQ ID NO: 681653 - DNA, 25 bp, Homo sapien
cacttgtcaaatttagctacaatgg

SEQ ID NO: 681654 - DNA, 25 bp, Homo sapien
gcactgattctaggtattaccttgg

SEQ ID NO: 681655 - DNA, 25 bp, Homo sapien
ctcgccaatagtataattcaactgt

SEQ ID NO: 681656 - DNA, 25 bp, Homo sapien
atcatctccatctggaagacgtagc

SEQ ID NO: 681657 - DNA, 25 bp, Homo sapien
cgccaatagtataattcaactgtct

SEQ ID NO: 681658 - DNA, 25 bp, Homo sapien
ttcaactgtcttgcccgaacaatca

SEQ ID NO: 681659 - DNA, 25 bp, Homo sapien
ctctagaacttcttttcggtataat

SEQ ID NO: 681660 - DNA, 25 bp, Homo sapien
tttctattaatttctctagaacttc

SEQ ID NO: 681661 - DNA, 25 bp, Homo sapien
ttctctagaacttcttttcggtata

SEQ ID NO: 681662 - DNA, 25 bp, Homo sapien
ctattaatttctctagaacttcttt

SEQ ID NO: 681663 - DNA, 25 bp, Homo sapien
ggcgaccttatcttttgactatgaa

SEQ ID NO: 681664 - DNA, 25 bp, Homo sapien
ggtataggacagcacagcccttaga

SEQ ID NO: 681665 - DNA, 25 bp, Homo sapien
ggccatctggacctactgtgcctca

SEQ ID NO: 681666 - DNA, 25 bp, Homo sapien
aaaacctgacagcttagtgtgtgca

SEQ ID NO: 681667 - DNA, 25 bp, Homo sapien
ccatgccaggctaagcaagaaaggc

SEQ ID NO: 681668 - DNA, 25 bp, Homo sapien
catccacatggtaactttaacactg

SEQ ID NO: 681669 - DNA, 25 bp, Homo sapien
cccataaatgcgattaggatccagg

SEQ ID NO: 681670 - DNA, 25 bp, Homo sapien
tcaagatatcctccatcactggcct

SEQ ID NO: 681671 - DNA, 25 bp, Homo sapien
tagtagacggggtatcaccatgtta

SEQ ID NO: 681672 - DNA, 25 bp, Homo sapien
gtgcagtggctcatgcctgtaatcc

SEQ ID NO: 681673 - DNA, 25 bp, Homo sapien
aaaattttttgggctgggtgcagtg

SEQ ID NO: 681674 - DNA, 25 bp, Homo sapien
gggtgcagtggctcatgcctgtaat

SEQ ID NO: 681675 - DNA, 25 bp, Homo sapien
gtcatttgccatggtcagtcacaca

SEQ ID NO: 681676 - DNA, 25 bp, Homo sapien
gacacgcaaaactcagagggaccga

SEQ ID NO: 681677 - DNA, 25 bp, Homo sapien
catttaaggacctagattttcctgc

SEQ ID NO: 681678 - DNA, 25 bp, Homo sapien
aagcagctcacatctactacagcaa

SEQ ID NO: 681679 - DNA, 25 bp, Homo sapien
tcctggtctcagcaagatctgagtt

SEQ ID NO: 681680 - DNA, 25 bp, Homo sapien
taaatcagatgctcctggtctcagc

SEQ ID NO: 681681 - DNA, 25 bp, Homo sapien
gttaaatcagatgctcctggtctca

SEQ ID NO: 681682 - DNA, 25 bp, Homo sapien
gcaagatctgagttaaaaaattggc

SEQ ID NO: 681683 - DNA, 25 bp, Homo sapien
taatcccaggaggccaagatggctg

SEQ ID NO: 681684 - DNA, 25 bp, Homo sapien
atcccaggaggccaagatggctgga

SEQ ID NO: 681685 - DNA, 25 bp, Homo sapien
tgtaatcccaggaggccaagatggc

SEQ ID NO: 681686 - DNA, 25 bp, Homo sapien
ccaggaggccaagatggctggatca

SEQ ID NO: 681687 - DNA, 25 bp, Homo sapien
ataaagaagttgtaacacatgtacc

SEQ ID NO: 681688 - DNA, 25 bp, Homo sapien
taaagaagttgtaacacatgtacct

SEQ ID NO: 681689 - DNA, 25 bp, Homo sapien
catttcctttgtagcgagttccaga

SEQ ID NO: 681690 - DNA, 25 bp, Homo sapien
tagcgagttccagagacaatatcaa

SEQ ID NO: 681691 - DNA, 25 bp, Homo sapien
gagacaatatcaaaattaccctcct

SEQ ID NO: 681692 - DNA, 25 bp, Homo sapien
tatacacctccatttcctttgtagc

SEQ ID NO: 681693 - DNA, 25 bp, Homo sapien
taagagaagtcgacacaggctgggt

SEQ ID NO: 681694 - DNA, 25 bp, Homo sapien
aagccactgagctttcaacagtcat

SEQ ID NO: 681695 - DNA, 25 bp, Homo sapien
aacttttaagagaagtcgacacagg

SEQ ID NO: 681696 - DNA, 25 bp, Homo sapien
acagtcattttcatgagctacacaa

SEQ ID NO: 681697 - DNA, 25 bp, Homo sapien
tgatgtcctgccacacttttctttg

SEQ ID NO: 681698 - DNA, 25 bp, Homo sapien
tttgtagagacaagtacttgttttg

SEQ ID NO: 681699 - DNA, 25 bp, Homo sapien
ctgacttcccaaactttgtttatat

SEQ ID NO: 681700 - DNA, 25 bp, Homo sapien
aaactgctgacttcaagcaaccctc

SEQ ID NO: 681701 - DNA, 25 bp, Homo sapien
ttttgatagaaaaaatagtatgtgt

SEQ ID NO: 681702 - DNA, 25 bp, Homo sapien
ctaataaattcaggaataaattttg

SEQ ID NO: 681703 - DNA, 25 bp, Homo sapien
aaaacaggctaagactaccataaat

SEQ ID NO: 681704 - DNA, 25 bp, Homo sapien
cagtaaaacaggctaagactaccat

SEQ ID NO: 681705 - DNA, 25 bp, Homo sapien
gtaaaacaggctaagactaccataa

SEQ ID NO: 681706 - DNA, 25 bp, Homo sapien
taaaacaggctaagactaccataaa

SEQ ID NO: 681707 - DNA, 25 bp, Homo sapien
atggtgtgagagatcagcatccata

SEQ ID NO: 681708 - DNA, 25 bp, Homo sapien
ggtgtgagagatcagcatccataat

SEQ ID NO: 681709 - DNA, 25 bp, Homo sapien
tgtgagagatcagcatccataataa

SEQ ID NO: 681710 - DNA, 25 bp, Homo sapien
gagagatcagcatccataataatga

SEQ ID NO: 681711 - DNA, 25 bp, Homo sapien
actttttctctcgtggtcttagaag

SEQ ID NO: 681712 - DNA, 25 bp, Homo sapien
caactttttctctcgtggtcttaga

SEQ ID NO: 681713 - DNA, 25 bp, Homo sapien
ctagtcccaactttttctctcgtgg

SEQ ID NO: 681714 - DNA, 25 bp, Homo sapien
ccaactttttctctcgtggtcttag

SEQ ID NO: 681715 - DNA, 25 bp, Homo sapien
tgccagtatataagcaggttgcctc

SEQ ID NO: 681716 - DNA, 25 bp, Homo sapien
tcactatatgcaatctgctggaggt

SEQ ID NO: 681717 - DNA, 25 bp, Homo sapien
aaatgccaaagttctcactgtgccc

SEQ ID NO: 681718 - DNA, 25 bp, Homo sapien
tgtgccctacgtttctgaggtatgg

SEQ ID NO: 681719 - DNA, 25 bp, Homo sapien
taaccccaagtgatactttctaaga

SEQ ID NO: 681720 - DNA, 25 bp, Homo sapien
taactttgttacagttgcacacccc

SEQ ID NO: 681721 - DNA, 25 bp, Homo sapien
cccaggagatgcctgaaatctccaa

SEQ ID NO: 681722 - DNA, 25 bp, Homo sapien
tgaaatctccaatagtaccaaacct

SEQ ID NO: 681723 - DNA, 25 bp, Homo sapien
cacagagcagttgaagtccttcaca

SEQ ID NO: 681724 - DNA, 25 bp, Homo sapien
gccagtctgaaaggctgacaaagca

SEQ ID NO: 681725 - DNA, 25 bp, Homo sapien
aaagcaagtgtcatccctagcatgg

SEQ ID NO: 681726 - DNA, 25 bp, Homo sapien
tctggtagtagagggaaatcgtaac

SEQ ID NO: 681727 - DNA, 25 bp, Homo sapien
gagttcatccaaaagctcactcttt

SEQ ID NO: 681728 - DNA, 25 bp, Homo sapien
tttaaatcccaaatgcgtaagttgc

SEQ ID NO: 681729 - DNA, 25 bp, Homo sapien
tctttgctgtaaaatgaccactgac

SEQ ID NO: 681730 - DNA, 25 bp, Homo sapien
gaccactgacccaacataccaaaga

SEQ ID NO: 681731 - DNA, 25 bp, Homo sapien
catagatcttctccaactgttcagc

SEQ ID NO: 681732 - DNA, 25 bp, Homo sapien
gatcttctccaactgttcagcaaca

SEQ ID NO: 681733 - DNA, 25 bp, Homo sapien
aattctgtctgacccatagatcttc

SEQ ID NO: 681734 - DNA, 25 bp, Homo sapien
cccatagatcttctccaactgttca

SEQ ID NO: 681735 - DNA, 25 bp, Homo sapien
aaaggagcaccgctatgtgtcaagc

SEQ ID NO: 681736 - DNA, 25 bp, Homo sapien
taagcacatttctgtcgacccagca

SEQ ID NO: 681737 - DNA, 25 bp, Homo sapien
taaaagtatgaacgcgtctgctgcc

SEQ ID NO: 681738 - DNA, 25 bp, Homo sapien
aagttacttcgtactgactccagga

SEQ ID NO: 681739 - DNA, 25 bp, Homo sapien
cagaaaggttatcgtgcccagcaat

SEQ ID NO: 681740 - DNA, 25 bp, Homo sapien
caccagtgatcagcgaagatgctct

SEQ ID NO: 681741 - DNA, 25 bp, Homo sapien
gcttatgtaagcactcggcaccgga

SEQ ID NO: 681742 - DNA, 25 bp, Homo sapien
gaggagtgggatcacgctttcagcc

SEQ ID NO: 681743 - DNA, 25 bp, Homo sapien
aaagcaccgaatatttgttctgtcg

SEQ ID NO: 681744 - DNA, 25 bp, Homo sapien
gacctgcgaggactacgactgactt

SEQ ID NO: 681745 - DNA, 25 bp, Homo sapien
tgttctgtcgtggactgcgcacttc

SEQ ID NO: 681746 - DNA, 25 bp, Homo sapien
tcgcgctcgttgtaggtaggtaaaa

SEQ ID NO: 681747 - DNA, 25 bp, Homo sapien
ggcggaactgagccagatgccggaa

SEQ ID NO: 681748 - DNA, 25 bp, Homo sapien
cggaactgagccagatgccggaagc

SEQ ID NO: 681749 - DNA, 25 bp, Homo sapien
gcggaactgagccagatgccggaag

SEQ ID NO: 681750 - DNA, 25 bp, Homo sapien
cttccggaagaggtcgccatggctt

SEQ ID NO: 681751 - DNA, 25 bp, Homo sapien
tagtttatcccagtcgctaggagac

SEQ ID NO: 681752 - DNA, 25 bp, Homo sapien
cagaagacggaagcggaaatgcctt

SEQ ID NO: 681753 - DNA, 25 bp, Homo sapien
gaggtactcgccttacaagctgaag

SEQ ID NO: 681754 - DNA, 25 bp, Homo sapien
ggtctgaatatgtggcctaggctga

SEQ ID NO: 681755 - DNA, 25 bp, Homo sapien
tgaatatgtggcctaggctgatctc

SEQ ID NO: 681756 - DNA, 25 bp, Homo sapien
ggggtctgaatatgtggcctaggct

SEQ ID NO: 681757 - DNA, 25 bp, Homo sapien
tctgaatatgtggcctaggctgatc

SEQ ID NO: 681758 - DNA, 25 bp, Homo sapien
ctcctctggaggatttgtttgggtc

SEQ ID NO: 681759 - DNA, 25 bp, Homo sapien
gctgctccagtctgccaagatctga

SEQ ID NO: 681760 - DNA, 25 bp, Homo sapien
ccttttctcctctggaggatttgtt

SEQ ID NO: 681761 - DNA, 25 bp, Homo sapien
cagtctgccaagatctgaccttttc

SEQ ID NO: 681762 - DNA, 25 bp, Homo sapien
agcagtcaggtgttctccctttttc

SEQ ID NO: 681763 - DNA, 25 bp, Homo sapien
tagcagtcaggtgttctcccttttt

SEQ ID NO: 681764 - DNA, 25 bp, Homo sapien
gtagcagtcaggtgttctccctttt

SEQ ID NO: 681765 - DNA, 25 bp, Homo sapien
ttctgacgatatgtccaggtcccct

SEQ ID NO: 681766 - DNA, 25 bp, Homo sapien
ctgacgatatgtccaggtcccctct

SEQ ID NO: 681767 - DNA, 25 bp, Homo sapien
ttggaacttctgacgatatgtccag

SEQ ID NO: 681768 - DNA, 25 bp, Homo sapien
aacttctgacgatatgtccaggtcc

SEQ ID NO: 681769 - DNA, 25 bp, Homo sapien
gaaatagacgagacttcgggaaaga

SEQ ID NO: 681770 - DNA, 25 bp, Homo sapien
cgagacttcgggaaagacagacaac

SEQ ID NO: 681771 - DNA, 25 bp, Homo sapien
agctggtgggagaaatagacgagac

SEQ ID NO: 681772 - DNA, 25 bp, Homo sapien
tagacgagacttcgggaaagacaga

SEQ ID NO: 681773 - DNA, 25 bp, Homo sapien
ggatgcatttctcaggtcgggccat

SEQ ID NO: 681774 - DNA, 25 bp, Homo sapien
cggtgagctccttcagcacggcagg

SEQ ID NO: 681775 - DNA, 25 bp, Homo sapien
cacggcagggatgcatttctcaggt

SEQ ID NO: 681776 - DNA, 25 bp, Homo sapien
ccttcagcacggcagggatgcattt

SEQ ID NO: 681777 - DNA, 25 bp, Homo sapien
tgacctgtcaactgtcaggggtgcc

SEQ ID NO: 681778 - DNA, 25 bp, Homo sapien
catagtcaacaacgctgacaggccc

SEQ ID NO: 681779 - DNA, 25 bp, Homo sapien
gatttcacctcatagtcaacaacgc

SEQ ID NO: 681780 - DNA, 25 bp, Homo sapien
aaaatgaactgatttcacctcatag

SEQ ID NO: 681781 - DNA, 25 bp, Homo sapien
accgggcctgaacaacccaagcaca

SEQ ID NO: 681782 - DNA, 25 bp, Homo sapien
gggagcacagtattcactggtcatt

SEQ ID NO: 681783 - DNA, 25 bp, Homo sapien
gtattcactggtcattttccttaaa

SEQ ID NO: 681784 - DNA, 25 bp, Homo sapien
gcacagtattcactggtcattttcc

SEQ ID NO: 681785 - DNA, 25 bp, Homo sapien
cagccccatggaaggcattctctct

SEQ ID NO: 681786 - DNA, 25 bp, Homo sapien
gacagccccatggaaggcattctct

SEQ ID NO: 681787 - DNA, 25 bp, Homo sapien
ttaagacagccccatggaaggcatt

SEQ ID NO: 681788 - DNA, 25 bp, Homo sapien
ccccatggaaggcattctctctttt

SEQ ID NO: 681789 - DNA, 25 bp, Homo sapien
tccacattagagacagacatgctgt

SEQ ID NO: 681790 - DNA, 25 bp, Homo sapien
gatggcaatggcttcgggccacaga

SEQ ID NO: 681791 - DNA, 25 bp, Homo sapien
ccaggcgtctgcagtggatggcaat

SEQ ID NO: 681792 - DNA, 25 bp, Homo sapien
tccaggcagacccataaagcaagtt

SEQ ID NO: 681793 - DNA, 25 bp, Homo sapien
tccgaggaggcacttccgaacaaga

SEQ ID NO: 681794 - DNA, 25 bp, Homo sapien
cagctgcgacttggttttgatgagg

SEQ ID NO: 681795 - DNA, 25 bp, Homo sapien
caccgtcgtcatggtgatgacagcc

SEQ ID NO: 681796 - DNA, 25 bp, Homo sapien
tcgttctcgatgacgtagagcaggg

SEQ ID NO: 681797 - DNA, 25 bp, Homo sapien
accagcagcgtgatgtagtagggca

SEQ ID NO: 681798 - DNA, 25 bp, Homo sapien
ttgctgggcgcctgaatgagccgca

SEQ ID NO: 681799 - DNA, 25 bp, Homo sapien
acaccgactccacgatgaagacgtt

SEQ ID NO: 681800 - DNA, 25 bp, Homo sapien
atggccaccaggtcgatcagcgtca

SEQ ID NO: 681801 - DNA, 25 bp, Homo sapien
tccaatggcttaggacaggagacct

SEQ ID NO: 681802 - DNA, 25 bp, Homo sapien
tagacctctgggatgggaagcccct

SEQ ID NO: 681803 - DNA, 25 bp, Homo sapien
taagtagctccagcagtgtcagtgg

SEQ ID NO: 681804 - DNA, 25 bp, Homo sapien
gggcatctcgaactcaccatgggat

SEQ ID NO: 681805 - DNA, 25 bp, Homo sapien
taagtacagcaatttccagacaggt

SEQ ID NO: 681806 - DNA, 25 bp, Homo sapien
cagacaggtctcaaatggtgagcac

SEQ ID NO: 681807 - DNA, 25 bp, Homo sapien
ttcatgtggcgtggactcagtcagc

SEQ ID NO: 681808 - DNA, 25 bp, Homo sapien
tcttgaccctaatccttaagagagg

SEQ ID NO: 681809 - DNA, 25 bp, Homo sapien
tgtgaggtgggcctgttcatacccg

SEQ ID NO: 681810 - DNA, 25 bp, Homo sapien
gaaagttgattttaccagctgggtg

SEQ ID NO: 681811 - DNA, 25 bp, Homo sapien
gctactacacagctagagaggagaa

SEQ ID NO: 681812 - DNA, 25 bp, Homo sapien
taatcacttcatgcgaactcactga

SEQ ID NO: 681813 - DNA, 25 bp, Homo sapien
cctgacatggtgagtacttctaatg

SEQ ID NO: 681814 - DNA, 25 bp, Homo sapien
ttagcacatgcagggtatacagtca

SEQ ID NO: 681815 - DNA, 25 bp, Homo sapien
taaattcgagagtgcacgtaaagca

SEQ ID NO: 681816 - DNA, 25 bp, Homo sapien
gtggaaaaatcctgacatggtgagt

SEQ ID NO: 681817 - DNA, 25 bp, Homo sapien
taagacgtagttggcacatgcagcc

SEQ ID NO: 681818 - DNA, 25 bp, Homo sapien
tgggagcccttagactgtagcacac

SEQ ID NO: 681819 - DNA, 25 bp, Homo sapien
tgtgtgggccaatcacatagtcctg

SEQ ID NO: 681820 - DNA, 25 bp, Homo sapien
gctatattaggtccccaagctgcca

SEQ ID NO: 681821 - DNA, 25 bp, Homo sapien
aatgtgtctgggctactatgatgca

SEQ ID NO: 681822 - DNA, 25 bp, Homo sapien
tgtaatgtgcttcgctcagggccag

SEQ ID NO: 681823 - DNA, 25 bp, Homo sapien
cagtgtgcaatcagaggaggctttc

SEQ ID NO: 681824 - DNA, 25 bp, Homo sapien
tattaacagggaggcagaccatgca

SEQ ID NO: 681825 - DNA, 25 bp, Homo sapien
ctcgtggtggcgcgtttccccgcgg

SEQ ID NO: 681826 - DNA, 25 bp, Homo sapien
tcagagtcccttccctcgtggtggc

SEQ ID NO: 681827 - DNA, 25 bp, Homo sapien
agtcccttccctcgtggtggcgcgt

SEQ ID NO: 681828 - DNA, 25 bp, Homo sapien
agagtcccttccctcgtggtggcgc

SEQ ID NO: 681829 - DNA, 25 bp, Homo sapien
tcagaattgtctcccggtaagaggg

SEQ ID NO: 681830 - DNA, 25 bp, Homo sapien
gccgcctacgttgatgatgatccga

SEQ ID NO: 681831 - DNA, 25 bp, Homo sapien
aaggtcaggatagtgccgaaggccc

SEQ ID NO: 681832 - DNA, 25 bp, Homo sapien
gtagaacgcgcccttgatggcctgg

SEQ ID NO: 681833 - DNA, 25 bp, Homo sapien
ttgggccttcacatccctctcgggc

SEQ ID NO: 681834 - DNA, 25 bp, Homo sapien
tttgggccttcacatccctctcggg

SEQ ID NO: 681835 - DNA, 25 bp, Homo sapien
caaaagacatgtggcaatgcctggg

SEQ ID NO: 681836 - DNA, 25 bp, Homo sapien
ggttatgaacgcagactttggagcc

SEQ ID NO: 681837 - DNA, 25 bp, Homo sapien
caagtgtccttaatgctgaggtgga

SEQ ID NO: 681838 - DNA, 25 bp, Homo sapien
tgtagacctacagttctcatagggc

SEQ ID NO: 681839 - DNA, 25 bp, Homo sapien
tggctccttcattaggcagcctgct

SEQ ID NO: 681840 - DNA, 25 bp, Homo sapien
gtgcaagcctggctccttcattagg

SEQ ID NO: 681841 - DNA, 25 bp, Homo sapien
caagcctggctccttcattaggcag

SEQ ID NO: 681842 - DNA, 25 bp, Homo sapien
ctggctccttcattaggcagcctgc

SEQ ID NO: 681843 - DNA, 25 bp, Homo sapien
gatcctttggaggcgtgggaataat

SEQ ID NO: 681844 - DNA, 25 bp, Homo sapien
cctgccaggatcctttggaggcgtg

SEQ ID NO: 681845 - DNA, 25 bp, Homo sapien
agcctgccaggatcctttggaggcg

SEQ ID NO: 681846 - DNA, 25 bp, Homo sapien
ctttggaggcgtgggaataatccct

SEQ ID NO: 681847 - DNA, 25 bp, Homo sapien
tctgtttggcaagaatggtgatgga

SEQ ID NO: 681848 - DNA, 25 bp, Homo sapien
ctgcccccacgtgagtttcctgtgt

SEQ ID NO: 681849 - DNA, 25 bp, Homo sapien
gctcttgtgaatccccatggctgta

SEQ ID NO: 681850 - DNA, 25 bp, Homo sapien
ggaggtaaacggaaaatgcctcaca

SEQ ID NO: 681851 - DNA, 25 bp, Homo sapien
cggcgaggctgcagcgcgcaaagtt

SEQ ID NO: 681852 - DNA, 25 bp, Homo sapien
tggcctccccgcaggcgggtttcga

SEQ ID NO: 681853 - DNA, 25 bp, Homo sapien
tccggttcgcgctttggtggcgccc

SEQ ID NO: 681854 - DNA, 25 bp, Homo sapien
ttggccgtaacaagcgcgctccacg

SEQ ID NO: 681855 - DNA, 25 bp, Homo sapien
aagtcgcccggggagcccgctctgc

SEQ ID NO: 681856 - DNA, 25 bp, Homo sapien
ccgtcgcggcgtccccgcctcggag

SEQ ID NO: 681857 - DNA, 25 bp, Homo sapien
ctcccgccctcggagccacggccgc

SEQ ID NO: 681858 - DNA, 25 bp, Homo sapien
cgggtccggggcgaggacgcgagag

SEQ ID NO: 681859 - DNA, 25 bp, Homo sapien
cagtcgcagggctgtcgacagctga

SEQ ID NO: 681860 - DNA, 25 bp, Homo sapien
gaccatttatttccgaggctgcagc

SEQ ID NO: 681861 - DNA, 25 bp, Homo sapien
agcagctgacgggaccatttatttc

SEQ ID NO: 681862 - DNA, 25 bp, Homo sapien
cagctgagtggaatgctctgggatt

SEQ ID NO: 681863 - DNA, 25 bp, Homo sapien
gttacggatcttttctctatgcagc

SEQ ID NO: 681864 - DNA, 25 bp, Homo sapien
aatggttacttcttgaaggcacaga

SEQ ID NO: 681865 - DNA, 25 bp, Homo sapien
cacagagttgagttacggatctttt

SEQ ID NO: 681866 - DNA, 25 bp, Homo sapien
ggttacttcttgaaggcacagagtt

SEQ ID NO: 681867 - DNA, 25 bp, Homo sapien
gttgatacattgagggaagccagga

SEQ ID NO: 681868 - DNA, 25 bp, Homo sapien
tctttttcagagagtgccttagtcc

SEQ ID NO: 681869 - DNA, 25 bp, Homo sapien
gcttgttgatacattgagggaagcc

SEQ ID NO: 681870 - DNA, 25 bp, Homo sapien
gagagtgccttagtccagctggatt

SEQ ID NO: 681871 - DNA, 25 bp, Homo sapien
acttcctcctaagaacaccagctct

SEQ ID NO: 681872 - DNA, 25 bp, Homo sapien
tggacttcctcctaagaacaccagc

SEQ ID NO: 681873 - DNA, 25 bp, Homo sapien
ttcctcctaagaacaccagctcttg

SEQ ID NO: 681874 - DNA, 25 bp, Homo sapien
ggacttcctcctaagaacaccagct

SEQ ID NO: 681875 - DNA, 25 bp, Homo sapien
tcgaagctgaactggtgacaacagc

SEQ ID NO: 681876 - DNA, 25 bp, Homo sapien
tggtgacatgcaaaattcgaagctg

SEQ ID NO: 681877 - DNA, 25 bp, Homo sapien
tttggtattccagtgtacgacgcta

SEQ ID NO: 681878 - DNA, 25 bp, Homo sapien
gaaactggtacagattagcctgcaa

SEQ ID NO: 681879 - DNA, 25 bp, Homo sapien
gctgggaccatggattgaaacgtgt

SEQ ID NO: 681880 - DNA, 25 bp, Homo sapien
agacctcctgggtaatagggcaggg

SEQ ID NO: 681881 - DNA, 25 bp, Homo sapien
gggtgcttcatatgtcacagtaaca

SEQ ID NO: 681882 - DNA, 25 bp, Homo sapien
cacagtaacaacagtattctcttcc

SEQ ID NO: 681883 - DNA, 25 bp, Homo sapien
aaacttgccatattctgaattaaat

SEQ ID NO: 681884 - DNA, 25 bp, Homo sapien
taggcccttgggttgatcgcctcat

SEQ ID NO: 681885 - DNA, 25 bp, Homo sapien
gctagaactcagaaggtctgctgtc

SEQ ID NO: 681886 - DNA, 25 bp, Homo sapien
tctgctgtcctcttaggcccttggg

SEQ ID NO: 681887 - DNA, 25 bp, Homo sapien
tgccttgcaagatgaaagggcctgg

SEQ ID NO: 681888 - DNA, 25 bp, Homo sapien
cattggagcttttgcttccgctcgt

SEQ ID NO: 681889 - DNA, 25 bp, Homo sapien
ttggagcttttgcttccgctcgttt

SEQ ID NO: 681890 - DNA, 25 bp, Homo sapien
tcattggagcttttgcttccgctcg

SEQ ID NO: 681891 - DNA, 25 bp, Homo sapien
gagcttttgcttccgctcgttttcc

SEQ ID NO: 681892 - DNA, 25 bp, Homo sapien
ctttttctttgttcagtggtggtgg

SEQ ID NO: 681893 - DNA, 25 bp, Homo sapien
cttccagactttttctttgttcagt

SEQ ID NO: 681894 - DNA, 25 bp, Homo sapien
cagactttttctttgttcagtggtg

SEQ ID NO: 681895 - DNA, 25 bp, Homo sapien
agactttttctttgttcagtggtgg

SEQ ID NO: 681896 - DNA, 25 bp, Homo sapien
tggcagattccttggatcctcgatg

SEQ ID NO: 681897 - DNA, 25 bp, Homo sapien
ggctatgacattcagggagttctca

SEQ ID NO: 681898 - DNA, 25 bp, Homo sapien
ttctgggagacaccagatgatggca

SEQ ID NO: 681899 - DNA, 25 bp, Homo sapien
tggatcctcgatggtggctatgaca

SEQ ID NO: 681900 - DNA, 25 bp, Homo sapien
gaaccccagagctgaggcacaggtt

SEQ ID NO: 681901 - DNA, 25 bp, Homo sapien
agaaccccagagctgaggcacaggt

SEQ ID NO: 681902 - DNA, 25 bp, Homo sapien
ctgcagaaccccagagctgaggcac

SEQ ID NO: 681903 - DNA, 25 bp, Homo sapien
gcagaaccccagagctgaggcacag

SEQ ID NO: 681904 - DNA, 25 bp, Homo sapien
taacattgctcatggcagaaactcg

SEQ ID NO: 681905 - DNA, 25 bp, Homo sapien
gtctgtaaaatggactccgacaaca

SEQ ID NO: 681906 - DNA, 25 bp, Homo sapien
tggactccgacaacaaccatgatgt

SEQ ID NO: 681907 - DNA, 25 bp, Homo sapien
catggcagaaactcggttaaaaaca

SEQ ID NO: 681908 - DNA, 25 bp, Homo sapien
ttagaattaaccaggtccctggcca

SEQ ID NO: 681909 - DNA, 25 bp, Homo sapien
caagttgcagggaggttagaattaa

SEQ ID NO: 681910 - DNA, 25 bp, Homo sapien
ctgtacattccaataggaagccggc

SEQ ID NO: 681911 - DNA, 25 bp, Homo sapien
gagctccaaccctgtacattccaat

SEQ ID NO: 681912 - DNA, 25 bp, Homo sapien
ctgacaaatggaattctttgccagc

SEQ ID NO: 681913 - DNA, 25 bp, Homo sapien
tcttgttatctacttgattggtggg

SEQ ID NO: 681914 - DNA, 25 bp, Homo sapien
caaatggaattctttgccagcgact

SEQ ID NO: 681915 - DNA, 25 bp, Homo sapien
ggtcttgttatctacttgattggtg

SEQ ID NO: 681916 - DNA, 25 bp, Homo sapien
aggttccaatcatctgggtctcaga

SEQ ID NO: 681917 - DNA, 25 bp, Homo sapien
tgtaggttccaatcatctgggtctc

SEQ ID NO: 681918 - DNA, 25 bp, Homo sapien
ggtgtaggttccaatcatctgggtc

SEQ ID NO: 681919 - DNA, 25 bp, Homo sapien
cttgtggtgtaggttccaatcatct

SEQ ID NO: 681920 - DNA, 25 bp, Homo sapien
ccattatctaaatcagtagaacatc

SEQ ID NO: 681921 - DNA, 25 bp, Homo sapien
cattatctaaatcagtagaacatct

SEQ ID NO: 681922 - DNA, 25 bp, Homo sapien
ctgtgaaaatttttgactgcgtggg

SEQ ID NO: 681923 - DNA, 25 bp, Homo sapien
taattttcactgtagagatatagac

SEQ ID NO: 681924 - DNA, 25 bp, Homo sapien
agtaaggtgttagtcagtattaggc

SEQ ID NO: 681925 - DNA, 25 bp, Homo sapien
gactcctgcatggttcaagtgtcaa

SEQ ID NO: 681926 - DNA, 25 bp, Homo sapien
gcatgcgtgccatctccgttgattg

SEQ ID NO: 681927 - DNA, 25 bp, Homo sapien
tgccatctccgttgattgtcgttgt

SEQ ID NO: 681928 - DNA, 25 bp, Homo sapien
tctccgttgattgtcgttgtctttc

SEQ ID NO: 681929 - DNA, 25 bp, Homo sapien
ctggctgcatgcgtgccatctccgt

SEQ ID NO: 681930 - DNA, 25 bp, Homo sapien
taagagcctgtgcaagaacagtgta

SEQ ID NO: 681931 - DNA, 25 bp, Homo sapien
gagcctgtgcaagaacagtgtaagg

SEQ ID NO: 681932 - DNA, 25 bp, Homo sapien
tatttccatgttgtttaagagcctg

SEQ ID NO: 681933 - DNA, 25 bp, Homo sapien
ttattttctgtcaaccttatttcca

SEQ ID NO: 681934 - DNA, 25 bp, Homo sapien
gagcactccagtcttgggtagggaa

SEQ ID NO: 681935 - DNA, 25 bp, Homo sapien
gctgagcactccagtcttgggtagg

SEQ ID NO: 681936 - DNA, 25 bp, Homo sapien
tgagcactccagtcttgggtaggga

SEQ ID NO: 681937 - DNA, 25 bp, Homo sapien
cactccagtcttgggtagggaactg

SEQ ID NO: 681938 - DNA, 25 bp, Homo sapien
acctcaggccaagtagcagtgaact

SEQ ID NO: 681939 - DNA, 25 bp, Homo sapien
gcaacctcaggccaagtagcagtga

SEQ ID NO: 681940 - DNA, 25 bp, Homo sapien
ctgcaacctcaggccaagtagcagt

SEQ ID NO: 681941 - DNA, 25 bp, Homo sapien
caacctcaggccaagtagcagtgaa

SEQ ID NO: 681942 - DNA, 25 bp, Homo sapien
tcctccttggtcaaagccttgtcag

SEQ ID NO: 681943 - DNA, 25 bp, Homo sapien
ggtcaaagccttgtcagcagcagcc

SEQ ID NO: 681944 - DNA, 25 bp, Homo sapien
tcaaagccttgtcagcagcagcctg

SEQ ID NO: 681945 - DNA, 25 bp, Homo sapien
tccttggtcaaagccttgtcagcag

SEQ ID NO: 681946 - DNA, 25 bp, Homo sapien
cagcatccacatcaagtccactgag

SEQ ID NO: 681947 - DNA, 25 bp, Homo sapien
ctgcatgggcagaatttcccgggcc

SEQ ID NO: 681948 - DNA, 25 bp, Homo sapien
tcaagtccactgagtgagcttcctg

SEQ ID NO: 681949 - DNA, 25 bp, Homo sapien
tgggcagaatttcccgggccagcat

SEQ ID NO: 681950 - DNA, 25 bp, Homo sapien
ggtggccggtcctgcaatcagtaac

SEQ ID NO: 681951 - DNA, 25 bp, Homo sapien
tggtggccggtcctgcaatcagtaa

SEQ ID NO: 681952 - DNA, 25 bp, Homo sapien
cacaagaacccgtggattcgggaat

SEQ ID NO: 681953 - DNA, 25 bp, Homo sapien
gccagtgctactggaggatatgaca

SEQ ID NO: 681954 - DNA, 25 bp, Homo sapien
ttcaatggcaacgatggcaggagcc

SEQ ID NO: 681955 - DNA, 25 bp, Homo sapien
attcgggaatgttgcctggatctgg

SEQ ID NO: 681956 - DNA, 25 bp, Homo sapien
agtcaaggtcggtgccacctaagtg

SEQ ID NO: 681957 - DNA, 25 bp, Homo sapien
caaggtcggtgccacctaagtgggt

SEQ ID NO: 681958 - DNA, 25 bp, Homo sapien
aagtcaaggtcggtgccacctaagt

SEQ ID NO: 681959 - DNA, 25 bp, Homo sapien
ggaagtcaaggtcggtgccacctaa

SEQ ID NO: 681960 - DNA, 25 bp, Homo sapien
tgcaggacatcaagggctgtggaca

SEQ ID NO: 681961 - DNA, 25 bp, Homo sapien
tttgcaggacatcaagggctgtgga

SEQ ID NO: 681962 - DNA, 25 bp, Homo sapien
cttaaggacatcctcctctttcatt

SEQ ID NO: 681963 - DNA, 25 bp, Homo sapien
aaggaacttaaggacatcctcctct

SEQ ID NO: 681964 - DNA, 25 bp, Homo sapien
gatgaagctaggctccttgccagaa

SEQ ID NO: 681965 - DNA, 25 bp, Homo sapien
gaagttttgctgcaacgtgcatgct

SEQ ID NO: 681966 - DNA, 25 bp, Homo sapien
gctttattgtcgtgttctgcacagg

SEQ ID NO: 681967 - DNA, 25 bp, Homo sapien
gctgtcgagggtctgcagaatccta

SEQ ID NO: 681968 - DNA, 25 bp, Homo sapien
tcttgacccggctcttttccacaag

SEQ ID NO: 681969 - DNA, 25 bp, Homo sapien
gacccggctcttttccacaaggtga

SEQ ID NO: 681970 - DNA, 25 bp, Homo sapien
gctcactccattacttgccgaatac

SEQ ID NO: 681971 - DNA, 25 bp, Homo sapien
ttacttgccgaatacactgggagaa

SEQ ID NO: 681972 - DNA, 25 bp, Homo sapien
tgagctcagcctacagccggatgag

SEQ ID NO: 681973 - DNA, 25 bp, Homo sapien
tccatggggtcgcatccgagagctg

SEQ ID NO: 681974 - DNA, 25 bp, Homo sapien
agcatttggtggagtgccagttact

SEQ ID NO: 681975 - DNA, 25 bp, Homo sapien
gccagttacttcagagtgttcacct

SEQ ID NO: 681976 - DNA, 25 bp, Homo sapien
cccagattgcttgtaggtggcaggt

SEQ ID NO: 681977 - DNA, 25 bp, Homo sapien
cagattgcttgtaggtggcaggtgc

SEQ ID NO: 681978 - DNA, 25 bp, Homo sapien
agattgcttgtaggtggcaggtgct

SEQ ID NO: 681979 - DNA, 25 bp, Homo sapien
gccccagattgcttgtaggtggcag

SEQ ID NO: 681980 - DNA, 25 bp, Homo sapien
gaaggtgttcttcacgtctaagccc

SEQ ID NO: 681981 - DNA, 25 bp, Homo sapien
taagcccccgagctctgtaagtagc

SEQ ID NO: 681982 - DNA, 25 bp, Homo sapien
gtctaagcccccgagctctgtaagt

SEQ ID NO: 681983 - DNA, 25 bp, Homo sapien
caggaaggtgttcttcacgtctaag

SEQ ID NO: 681984 - DNA, 25 bp, Homo sapien
atttggcataaacgggttctagcag

SEQ ID NO: 681985 - DNA, 25 bp, Homo sapien
gtgttgacggcgctggccacttcca

SEQ ID NO: 681986 - DNA, 25 bp, Homo sapien
ggaatggctctgtgttgacggcgct

SEQ ID NO: 681987 - DNA, 25 bp, Homo sapien
cataaacgggttctagcagtcgaac

SEQ ID NO: 681988 - DNA, 25 bp, Homo sapien
atgttctttgcccaccagtattgtg

SEQ ID NO: 681989 - DNA, 25 bp, Homo sapien
gaagggactcctataatctcaatgt

SEQ ID NO: 681990 - DNA, 25 bp, Homo sapien
gacacgcaacacacagttaggattt

SEQ ID NO: 681991 - DNA, 25 bp, Homo sapien
gaaattggatgcagaattatctgct

SEQ ID NO: 681992 - DNA, 25 bp, Homo sapien
gcaggtcagataggcaatcagggac

SEQ ID NO: 681993 - DNA, 25 bp, Homo sapien
gcctcggctcctccaagaactgatg

SEQ ID NO: 681994 - DNA, 25 bp, Homo sapien
cctccaagaactgatgccagtagca

SEQ ID NO: 681995 - DNA, 25 bp, Homo sapien
ccagtagcagggttgtgaggacaga

SEQ ID NO: 681996 - DNA, 25 bp, Homo sapien
tgggtgactccaagttaacaagctg

SEQ ID NO: 681997 - DNA, 25 bp, Homo sapien
ccatgatcaagatgtgaagctggtc

SEQ ID NO: 681998 - DNA, 25 bp, Homo sapien
agctggtctgtcactccacaaagag

SEQ ID NO: 681999 - DNA, 25 bp, Homo sapien
ctatcaatttgctggtagagagggc

SEQ ID NO: 682000 - DNA, 25 bp, Homo sapien
catctggccgtctcataattattgg

SEQ ID NO: 682001 - DNA, 25 bp, Homo sapien
agtttgagcctcaacaagggtgtag

SEQ ID NO: 682002 - DNA, 25 bp, Homo sapien
tgggaccaaggtcattcctgaagga

SEQ ID NO: 682003 - DNA, 25 bp, Homo sapien
tgagggtaaattctgcatcttggca

SEQ ID NO: 682004 - DNA, 25 bp, Homo sapien
ttcttgactgattggccagtttggg

SEQ ID NO: 682005 - DNA, 25 bp, Homo sapien
ggattttggtatccccacttctcag

SEQ ID NO: 682006 - DNA, 25 bp, Homo sapien
gataaaggggtaattagttgagaca

SEQ ID NO: 682007 - DNA, 25 bp, Homo sapien
atgatagtcttggataaaggggtaa

SEQ ID NO: 682008 - DNA, 25 bp, Homo sapien
tgaagtcaccatgagagcccttggg

SEQ ID NO: 682009 - DNA, 25 bp, Homo sapien
tacgttcctccagccacgatgagga

SEQ ID NO: 682010 - DNA, 25 bp, Homo sapien
gagctcccaagtttgagtcctgctg

SEQ ID NO: 682011 - DNA, 25 bp, Homo sapien
cctgccagggttttcagtgcagaca

SEQ ID NO: 682012 - DNA, 25 bp, Homo sapien
tggccaggcattactctaagtgttt

SEQ ID NO: 682013 - DNA, 25 bp, Homo sapien
tcacaaagaggttacatgaacttgc

SEQ ID NO: 682014 - DNA, 25 bp, Homo sapien
taaaagcaatgtgtgagccaaccac

SEQ ID NO: 682015 - DNA, 25 bp, Homo sapien
aaaaccataccctagagttggacag

SEQ ID NO: 682016 - DNA, 25 bp, Homo sapien
ctcccgcatccacgccactggccgt

SEQ ID NO: 682017 - DNA, 25 bp, Homo sapien
gggctggaggcacatgtgctgcacc

SEQ ID NO: 682018 - DNA, 25 bp, Homo sapien
tccagtctcaggatggccaccacag

SEQ ID NO: 682019 - DNA, 25 bp, Homo sapien
cgccactggccgtgcggacacccag

SEQ ID NO: 682020 - DNA, 25 bp, Homo sapien
tgtgggaagcttctgctaagtcagc

SEQ ID NO: 682021 - DNA, 25 bp, Homo sapien
tagccctttgcaaggagcagaggcc

SEQ ID NO: 682022 - DNA, 25 bp, Homo sapien
ggcctgagaacaaccgtatgtgatg

SEQ ID NO: 682023 - DNA, 25 bp, Homo sapien
gatttgcaggatggcctgaccagga

SEQ ID NO: 682024 - DNA, 25 bp, Homo sapien
cattatcatgtgtacagccccacag

SEQ ID NO: 682025 - DNA, 25 bp, Homo sapien
taacattatcatgtgtacagcccca

SEQ ID NO: 682026 - DNA, 25 bp, Homo sapien
tcatttaacattatcatgtgtacag

SEQ ID NO: 682027 - DNA, 25 bp, Homo sapien
tttaacattatcatgtgtacagccc

SEQ ID NO: 682028 - DNA, 25 bp, Homo sapien
gagccaggttctaggactctgttcc

SEQ ID NO: 682029 - DNA, 25 bp, Homo sapien
tgcagcagatgacaggggtgctttt

SEQ ID NO: 682030 - DNA, 25 bp, Homo sapien
cagctggagggatgtcatctgcctg

SEQ ID NO: 682031 - DNA, 25 bp, Homo sapien
ccactgcagcagatgacaggggtgc

SEQ ID NO: 682032 - DNA, 25 bp, Homo sapien
tcagggaatgaaaggcggctttgct

SEQ ID NO: 682033 - DNA, 25 bp, Homo sapien
gctttgctggtagatgtcatttccg

SEQ ID NO: 682034 - DNA, 25 bp, Homo sapien
cttcccgtgtgatgtacgtgcgctt

SEQ ID NO: 682035 - DNA, 25 bp, Homo sapien
tgtcatttccgaggacggcctcagg

SEQ ID NO: 682036 - DNA, 25 bp, Homo sapien
cctgtcctggtgttcgatgtcctga

SEQ ID NO: 682037 - DNA, 25 bp, Homo sapien
gcctaaatgctagtggtggccccag

SEQ ID NO: 682038 - DNA, 25 bp, Homo sapien
cagatctgggacacaagctgaagtg

SEQ ID NO: 682039 - DNA, 25 bp, Homo sapien
gatgtcacccaatgccacagcatgg

SEQ ID NO: 682040 - DNA, 25 bp, Homo sapien
tatagtccggggtgctcgctgtctg

SEQ ID NO: 682041 - DNA, 25 bp, Homo sapien
ggaggttggtgcacctctttcaggc

SEQ ID NO: 682042 - DNA, 25 bp, Homo sapien
aatccatgtaggaggttggtgcacc

SEQ ID NO: 682043 - DNA, 25 bp, Homo sapien
tgaatcaggatctgtggaatccatg

SEQ ID NO: 682044 - DNA, 25 bp, Homo sapien
gatggggcacagaccacaaatggcc

SEQ ID NO: 682045 - DNA, 25 bp, Homo sapien
tggatggggcacagaccacaaatgg

SEQ ID NO: 682046 - DNA, 25 bp, Homo sapien
ccgagattctgaggagtcacgaagg

SEQ ID NO: 682047 - DNA, 25 bp, Homo sapien
ggtgtccgagattctgaggagtcac

SEQ ID NO: 682048 - DNA, 25 bp, Homo sapien
gcaggaggacagaaggacaggctac

SEQ ID NO: 682049 - DNA, 25 bp, Homo sapien
cacatttcagcaggaggacagaagg

SEQ ID NO: 682050 - DNA, 25 bp, Homo sapien
tcagcaggaggacagaaggacaggc

SEQ ID NO: 682051 - DNA, 25 bp, Homo sapien
tcacatttcagcaggaggacagaag

SEQ ID NO: 682052 - DNA, 25 bp, Homo sapien
agaggagacacgtgaccagacctga

SEQ ID NO: 682053 - DNA, 25 bp, Homo sapien
actgttctgccggtgacagatggca

SEQ ID NO: 682054 - DNA, 25 bp, Homo sapien
agccagagacgagaggcaaaaccag

SEQ ID NO: 682055 - DNA, 25 bp, Homo sapien
ccagacctgagtggtctaccagagg

SEQ ID NO: 682056 - DNA, 25 bp, Homo sapien
ttctcaggatgactcaggcccagtt

SEQ ID NO: 682057 - DNA, 25 bp, Homo sapien
tgaatgttctgtctcgccactacgg

SEQ ID NO: 682058 - DNA, 25 bp, Homo sapien
cccagttgcatcttgacatcattca

SEQ ID NO: 682059 - DNA, 25 bp, Homo sapien
gccactacggatgtatagatttcag

SEQ ID NO: 682060 - DNA, 25 bp, Homo sapien
gtgccagctctcattgttttccggt

SEQ ID NO: 682061 - DNA, 25 bp, Homo sapien
gctctcattgttttccggtgtctag

SEQ ID NO: 682062 - DNA, 25 bp, Homo sapien
ttgttttccggtgtctagcacagtg

SEQ ID NO: 682063 - DNA, 25 bp, Homo sapien
agaaacagccttggttccatctctg

SEQ ID NO: 682064 - DNA, 25 bp, Homo sapien
tctgctttgaaacagggggcatcag

SEQ ID NO: 682065 - DNA, 25 bp, Homo sapien
tttgaaacagggggcatcagcgacc

SEQ ID NO: 682066 - DNA, 25 bp, Homo sapien
ctgctttgaaacagggggcatcagc

SEQ ID NO: 682067 - DNA, 25 bp, Homo sapien
ctgaggacagttgaccttcaaaaca

SEQ ID NO: 682068 - DNA, 25 bp, Homo sapien
ggaaccaggaggtgtacttgcaaac

SEQ ID NO: 682069 - DNA, 25 bp, Homo sapien
cttcaaaacaacgattgaccttggg

SEQ ID NO: 682070 - DNA, 25 bp, Homo sapien
tgacctactaaaggcatggcttcca

SEQ ID NO: 682071 - DNA, 25 bp, Homo sapien
tcatgggtggtacaaaaacctgcag

SEQ ID NO: 682072 - DNA, 25 bp, Homo sapien
tagataaacagccttagggcccaga

SEQ ID NO: 682073 - DNA, 25 bp, Homo sapien
ttcatgagctgatgagagctgcccc

SEQ ID NO: 682074 - DNA, 25 bp, Homo sapien
taacagttggattcagaggtcagca

SEQ ID NO: 682075 - DNA, 25 bp, Homo sapien
tcgaaattaagggtccatcccagcc

SEQ ID NO: 682076 - DNA, 25 bp, Homo sapien
aaatgtaccgtgtgcttccctcagc

SEQ ID NO: 682077 - DNA, 25 bp, Homo sapien
agctgacactgacatccgattgagg

SEQ ID NO: 682078 - DNA, 25 bp, Homo sapien
tcagggagctgcatatcaggaagct

SEQ ID NO: 682079 - DNA, 25 bp, Homo sapien
gataaatcaagaagtagaagcagac

SEQ ID NO: 682080 - DNA, 25 bp, Homo sapien
tgcccgaagttatacagccagtaag

SEQ ID NO: 682081 - DNA, 25 bp, Homo sapien
gaattcagactaacattagggtcca

SEQ ID NO: 682082 - DNA, 25 bp, Homo sapien
ttataactaacgtggatgggagagg

SEQ ID NO: 682083 - DNA, 25 bp, Homo sapien
tttggttttcgccttggctgcaggt

SEQ ID NO: 682084 - DNA, 25 bp, Homo sapien
ttggttttcgccttggctgcaggtc

SEQ ID NO: 682085 - DNA, 25 bp, Homo sapien
tggttttcgccttggctgcaggtcc

SEQ ID NO: 682086 - DNA, 25 bp, Homo sapien
gctgtgccgtcctcgctatctcggg

SEQ ID NO: 682087 - DNA, 25 bp, Homo sapien
gctatctcggggaaccggagatccc

SEQ ID NO: 682088 - DNA, 25 bp, Homo sapien
tggctctgctgtgccgtcctcgcta

SEQ ID NO: 682089 - DNA, 25 bp, Homo sapien
ggtggctctgctgtgccgtcctcgc

SEQ ID NO: 682090 - DNA, 25 bp, Homo sapien
tcttccccggagatgtggcacagtg

SEQ ID NO: 682091 - DNA, 25 bp, Homo sapien
gaccacattgcaaggatctcggagg

SEQ ID NO: 682092 - DNA, 25 bp, Homo sapien
tagtactcaaggagagggcacggca

SEQ ID NO: 682093 - DNA, 25 bp, Homo sapien
gaaacgtagtttgagtgtgaccaca

SEQ ID NO: 682094 - DNA, 25 bp, Homo sapien
ttgagctacagcctacggtccaggg

SEQ ID NO: 682095 - DNA, 25 bp, Homo sapien
tgtctgggacagagcaagccgagtt

SEQ ID NO: 682096 - DNA, 25 bp, Homo sapien
ggacatgtcctacttctcttaactc

SEQ ID NO: 682097 - DNA, 25 bp, Homo sapien
taaaagtctccggagaggactggca

SEQ ID NO: 682098 - DNA, 25 bp, Homo sapien
gagaacgtgggctcctgaactgcac

SEQ ID NO: 682099 - DNA, 25 bp, Homo sapien
gcttatttgcaccacggggaggata

SEQ ID NO: 682100 - DNA, 25 bp, Homo sapien
cacacagagggtgccctggcttatt

SEQ ID NO: 682101 - DNA, 25 bp, Homo sapien
ttgcaccacggggaggataaatgag

SEQ ID NO: 682102 - DNA, 25 bp, Homo sapien
tcgctccactgcaaacaatccgtta

SEQ ID NO: 682103 - DNA, 25 bp, Homo sapien
ccgagaagccggtttcagattgggc

SEQ ID NO: 682104 - DNA, 25 bp, Homo sapien
tattcaccttgtcaaacagactccc

SEQ ID NO: 682105 - DNA, 25 bp, Homo sapien
ttgggcttgtaaacggcagctggct

SEQ ID NO: 682106 - DNA, 25 bp, Homo sapien
cagagcttgaagtttttcgtaaatc

SEQ ID NO: 682107 - DNA, 25 bp, Homo sapien
ccagcgcaatgtttcagagcttgaa

SEQ ID NO: 682108 - DNA, 25 bp, Homo sapien
ttcctgtctcgagtccagcgcaatg

SEQ ID NO: 682109 - DNA, 25 bp, Homo sapien
cgtaaatcagggattcctagagggc

SEQ ID NO: 682110 - DNA, 25 bp, Homo sapien
tagcaagtgtgtcccctatacccca

SEQ ID NO: 682111 - DNA, 25 bp, Homo sapien
tgtcatgaggtttatagcaagtgtg

SEQ ID NO: 682112 - DNA, 25 bp, Homo sapien
tgaggtttatagcaagtgtgtcccc

SEQ ID NO: 682113 - DNA, 25 bp, Homo sapien
ggtttatagcaagtgtgtcccctat

SEQ ID NO: 682114 - DNA, 25 bp, Homo sapien
ttaagatgcgctgggtcaccgagca

SEQ ID NO: 682115 - DNA, 25 bp, Homo sapien
taaatgctaggtatcgaccgacagg

SEQ ID NO: 682116 - DNA, 25 bp, Homo sapien
tatctggagtgccaaacacacctgg

SEQ ID NO: 682117 - DNA, 25 bp, Homo sapien
gattttctaaacctaagcctgccag

SEQ ID NO: 682118 - DNA, 25 bp, Homo sapien
aaaggtacaggagctgtatctgtga

SEQ ID NO: 682119 - DNA, 25 bp, Homo sapien
aaggtacaggagctgtatctgtgac

SEQ ID NO: 682120 - DNA, 25 bp, Homo sapien
ctggaaaaacgaacgcaagggctgg

SEQ ID NO: 682121 - DNA, 25 bp, Homo sapien
cggaacaccattaagatcaaccagg

SEQ ID NO: 682122 - DNA, 25 bp, Homo sapien
ttaagtgagagtccgcttagtgccc

SEQ ID NO: 682123 - DNA, 25 bp, Homo sapien
caggtgcttactatttggacggaac

SEQ ID NO: 682124 - DNA, 25 bp, Homo sapien
ttgatccgcgtgtggactccgggct

SEQ ID NO: 682125 - DNA, 25 bp, Homo sapien
aggtgtcttgctataatggcttctt

SEQ ID NO: 682126 - DNA, 25 bp, Homo sapien
gggctccgaggggtcagatacagaa

SEQ ID NO: 682127 - DNA, 25 bp, Homo sapien
tccgggctgggagatgaacatgaaa

SEQ ID NO: 682128 - DNA, 25 bp, Homo sapien
tacgtctgatttctggcaggaggtc

SEQ ID NO: 682129 - DNA, 25 bp, Homo sapien
cgtctgatttctggcaggaggtcct

SEQ ID NO: 682130 - DNA, 25 bp, Homo sapien
acgtctgatttctggcaggaggtcc

SEQ ID NO: 682131 - DNA, 25 bp, Homo sapien
ttacgtctgatttctggcaggaggt

SEQ ID NO: 682132 - DNA, 25 bp, Homo sapien
ggaacccttacaaagagagcaagtg

SEQ ID NO: 682133 - DNA, 25 bp, Homo sapien
caaccagttgaaggatcatgtgcca

SEQ ID NO: 682134 - DNA, 25 bp, Homo sapien
gatttgagccatagggcatgtttga

SEQ ID NO: 682135 - DNA, 25 bp, Homo sapien
tcatgtgccagctcaggaaagtttg

SEQ ID NO: 682136 - DNA, 25 bp, Homo sapien
aattcagtgaccctatgcacttaga

SEQ ID NO: 682137 - DNA, 25 bp, Homo sapien
tctttctgaaatgtcggcacttgtt

SEQ ID NO: 682138 - DNA, 25 bp, Homo sapien
acttgttcccctgactgccaacaag

SEQ ID NO: 682139 - DNA, 25 bp, Homo sapien
tcagatagaagtgaagagttgcatc

SEQ ID NO: 682140 - DNA, 25 bp, Homo sapien
actgctgactttggaactgaatccc

SEQ ID NO: 682141 - DNA, 25 bp, Homo sapien
tctaggccctttccctttgactgct

SEQ ID NO: 682142 - DNA, 25 bp, Homo sapien
cctttccctttgactgctgactttg

SEQ ID NO: 682143 - DNA, 25 bp, Homo sapien
ggccctttccctttgactgctgact

SEQ ID NO: 682144 - DNA, 25 bp, Homo sapien
tggagagcctcatttaactggacac

SEQ ID NO: 682145 - DNA, 25 bp, Homo sapien
ggacacccacaacaaagtgtgcaaa

SEQ ID NO: 682146 - DNA, 25 bp, Homo sapien
cggacacccaccacggatggagagc

SEQ ID NO: 682147 - DNA, 25 bp, Homo sapien
aggagcaggctccaaagacgttgct

SEQ ID NO: 682148 - DNA, 25 bp, Homo sapien
tttgatttctcggatcaaagatcac

SEQ ID NO: 682149 - DNA, 25 bp, Homo sapien
atttctcggatcaaagatcacagtc

SEQ ID NO: 682150 - DNA, 25 bp, Homo sapien
cggatcaaagatcacagtcattctg

SEQ ID NO: 682151 - DNA, 25 bp, Homo sapien
taactttgatttctcggatcaaaga

SEQ ID NO: 682152 - DNA, 25 bp, Homo sapien
taatatgttttgtatccagctaagg

SEQ ID NO: 682153 - DNA, 25 bp, Homo sapien
tgttttgtatccagctaaggtgtgt

SEQ ID NO: 682154 - DNA, 25 bp, Homo sapien
tgtatccagctaaggtgtgtgtcta

SEQ ID NO: 682155 - DNA, 25 bp, Homo sapien
tatgttttgtatccagctaaggtgt

SEQ ID NO: 682156 - DNA, 25 bp, Homo sapien
caaggactgtattcatgggtgacac

SEQ ID NO: 682157 - DNA, 25 bp, Homo sapien
aaaggccacctggagtgaccagcaa

SEQ ID NO: 682158 - DNA, 25 bp, Homo sapien
caagatctgagtagggaccaggctc

SEQ ID NO: 682159 - DNA, 25 bp, Homo sapien
tccaagtgagatccacatgcgtggc

SEQ ID NO: 682160 - DNA, 25 bp, Homo sapien
cagtgaagtcatcgaggttcaggta

SEQ ID NO: 682161 - DNA, 25 bp, Homo sapien
ctggccagtgaagtcatcgaggttc

SEQ ID NO: 682162 - DNA, 25 bp, Homo sapien
ggcatctggccagtgaagtcatcga

SEQ ID NO: 682163 - DNA, 25 bp, Homo sapien
aagtcatcgaggttcaggtaagcag

SEQ ID NO: 682164 - DNA, 25 bp, Homo sapien
tagggaattctttccaggataggcc

SEQ ID NO: 682165 - DNA, 25 bp, Homo sapien
gagcctgttttggtgtgagccccca

SEQ ID NO: 682166 - DNA, 25 bp, Homo sapien
gagtcacaaggccatcctcagaacc

SEQ ID NO: 682167 - DNA, 25 bp, Homo sapien
cagccaagccgtctgcattctgagt

SEQ ID NO: 682168 - DNA, 25 bp, Homo sapien
caaagggggtgcaatctcatgggtc

SEQ ID NO: 682169 - DNA, 25 bp, Homo sapien
ctgggctagacgtttggcatgcaaa

SEQ ID NO: 682170 - DNA, 25 bp, Homo sapien
agttggaacgcagccctcagaacag

SEQ ID NO: 682171 - DNA, 25 bp, Homo sapien
tatcttcgggaggagcagggagttg

SEQ ID NO: 682172 - DNA, 25 bp, Homo sapien
cccagtggccagcacatttttgagg

SEQ ID NO: 682173 - DNA, 25 bp, Homo sapien
gcccagtggccagcacatttttgag

SEQ ID NO: 682174 - DNA, 25 bp, Homo sapien
ggcccagtggccagcacatttttga

SEQ ID NO: 682175 - DNA, 25 bp, Homo sapien
cggcccagtggccagcacatttttg

SEQ ID NO: 682176 - DNA, 25 bp, Homo sapien
catggcactaagagggccctgggtt

SEQ ID NO: 682177 - DNA, 25 bp, Homo sapien
tctgtcaatccactgtgccctctga

SEQ ID NO: 682178 - DNA, 25 bp, Homo sapien
ctgtcaatccactgtgccctctgag

SEQ ID NO: 682179 - DNA, 25 bp, Homo sapien
tggactgcatggcactaagagggcc

SEQ ID NO: 682180 - DNA, 25 bp, Homo sapien
tggcttctcactctgtctggctgaa

SEQ ID NO: 682181 - DNA, 25 bp, Homo sapien
aggggctgctccctcaaacaggaag

SEQ ID NO: 682182 - DNA, 25 bp, Homo sapien
ggctgctccctcaaacaggaagcca

SEQ ID NO: 682183 - DNA, 25 bp, Homo sapien
ctgggattcccagggtgccagctcc

SEQ ID NO: 682184 - DNA, 25 bp, Homo sapien
taggaaccctgaatgagtgaaatcg

SEQ ID NO: 682185 - DNA, 25 bp, Homo sapien
caattcaaacgcctaatgggtccag

SEQ ID NO: 682186 - DNA, 25 bp, Homo sapien
ggacaatccacctatcgtcggaaga

SEQ ID NO: 682187 - DNA, 25 bp, Homo sapien
tatctgcgggcgaaatgcagcccat

SEQ ID NO: 682188 - DNA, 25 bp, Homo sapien
gcttttggtaggaaagatgctgctc

SEQ ID NO: 682189 - DNA, 25 bp, Homo sapien
tctggagtcggctggaacgtagctc

SEQ ID NO: 682190 - DNA, 25 bp, Homo sapien
tgcagagtccacatcattcgggatg

SEQ ID NO: 682191 - DNA, 25 bp, Homo sapien
gatcactgagcgtttctgggtctgg

SEQ ID NO: 682192 - DNA, 25 bp, Homo sapien
catcgctgggttcctttccctgctt

SEQ ID NO: 682193 - DNA, 25 bp, Homo sapien
ttccatcgctgggttcctttccctg

SEQ ID NO: 682194 - DNA, 25 bp, Homo sapien
aacacttttccatcgctgggttcct

SEQ ID NO: 682195 - DNA, 25 bp, Homo sapien
acacttttccatcgctgggttcctt

SEQ ID NO: 682196 - DNA, 25 bp, Homo sapien
ccagcttctgcgtagagccttttca

SEQ ID NO: 682197 - DNA, 25 bp, Homo sapien
aaaacctgggccactggtccacact

SEQ ID NO: 682198 - DNA, 25 bp, Homo sapien
cagaggcacaactggcaaaacctgg

SEQ ID NO: 682199 - DNA, 25 bp, Homo sapien
ttttcaaagcacatccatggcccct

SEQ ID NO: 682200 - DNA, 25 bp, Homo sapien
tccctcatgcagatacacatcctga

SEQ ID NO: 682201 - DNA, 25 bp, Homo sapien
catgcagatacacatcctgaggtcc

SEQ ID NO: 682202 - DNA, 25 bp, Homo sapien
ctcatgcagatacacatcctgaggt

SEQ ID NO: 682203 - DNA, 25 bp, Homo sapien
ccggcgaggacatcatctccctcat

SEQ ID NO: 682204 - DNA, 25 bp, Homo sapien
ggcagctgtagtaagctctctactt

SEQ ID NO: 682205 - DNA, 25 bp, Homo sapien
agccatcaccgagaccacatccttt

SEQ ID NO: 682206 - DNA, 25 bp, Homo sapien
tctgggcagctgtagtaagctctct

SEQ ID NO: 682207 - DNA, 25 bp, Homo sapien
atcaccgagaccacatcctttcttt

SEQ ID NO: 682208 - DNA, 25 bp, Homo sapien
gtgagatggcccgatgacctctgca

SEQ ID NO: 682209 - DNA, 25 bp, Homo sapien
gagatggcccgatgacctctgcacc

SEQ ID NO: 682210 - DNA, 25 bp, Homo sapien
tggtgagatggcccgatgacctctg

SEQ ID NO: 682211 - DNA, 25 bp, Homo sapien
ttggtggtgagatggcccgatgacc

SEQ ID NO: 682212 - DNA, 25 bp, Homo sapien
ccaagacgtccaaatctcatatccc

SEQ ID NO: 682213 - DNA, 25 bp, Homo sapien
tccacggatgcacgggctacacaga

SEQ ID NO: 682214 - DNA, 25 bp, Homo sapien
accaagacgtccaaatctcatatcc

SEQ ID NO: 682215 - DNA, 25 bp, Homo sapien
catatctggaatgttccacggatgc

SEQ ID NO: 682216 - DNA, 25 bp, Homo sapien
tgcctgcgttgagaaagggcctcag

SEQ ID NO: 682217 - DNA, 25 bp, Homo sapien
tttggaaacggcaaggacatctgtg

SEQ ID NO: 682218 - DNA, 25 bp, Homo sapien
cacgggtgccccaatatccaaggca

SEQ ID NO: 682219 - DNA, 25 bp, Homo sapien
acctcgggccacttggacacgggtg

SEQ ID NO: 682220 - DNA, 25 bp, Homo sapien
gcagtgacaaaactcaagcgtctta

SEQ ID NO: 682221 - DNA, 25 bp, Homo sapien
ggcagtgacaaaactcaagcgtctt

SEQ ID NO: 682222 - DNA, 25 bp, Homo sapien
cagtgacaaaactcaagcgtcttac

SEQ ID NO: 682223 - DNA, 25 bp, Homo sapien
aggcagtgacaaaactcaagcgtct

SEQ ID NO: 682224 - DNA, 25 bp, Homo sapien
tcatccaagtaggtctggtccaagt

SEQ ID NO: 682225 - DNA, 25 bp, Homo sapien
cgaaattctcgcagtacatgatgtg

SEQ ID NO: 682226 - DNA, 25 bp, Homo sapien
tctttggctcgtggcattctgctgc

SEQ ID NO: 682227 - DNA, 25 bp, Homo sapien
tctggtggtgcctggtgcgaaattc

SEQ ID NO: 682228 - DNA, 25 bp, Homo sapien
tctggccctgggagccggcgtgcac

SEQ ID NO: 682229 - DNA, 25 bp, Homo sapien
gggtggagcagggctgagctctggc

SEQ ID NO: 682230 - DNA, 25 bp, Homo sapien
ctgctggttggtcggagaggggtgg

SEQ ID NO: 682231 - DNA, 25 bp, Homo sapien
aggggtggagcagggctgagctctg

SEQ ID NO: 682232 - DNA, 25 bp, Homo sapien
agcacagagcggtgagcgtccgcaa

SEQ ID NO: 682233 - DNA, 25 bp, Homo sapien
ggtcatattcatccgtgggctccgt

SEQ ID NO: 682234 - DNA, 25 bp, Homo sapien
ttgctccgctggtagagtacggccg

SEQ ID NO: 682235 - DNA, 25 bp, Homo sapien
atgagagccccgtgcggaactgctg

SEQ ID NO: 682236 - DNA, 25 bp, Homo sapien
acaggtgtgcggatatgcttgttcc

SEQ ID NO: 682237 - DNA, 25 bp, Homo sapien
aagttcacttttacaggtgtgcgga

SEQ ID NO: 682238 - DNA, 25 bp, Homo sapien
ccgatattcagggatctcaacaaaa

SEQ ID NO: 682239 - DNA, 25 bp, Homo sapien
tcccattgatgacgtagaagttcac

SEQ ID NO: 682240 - DNA, 25 bp, Homo sapien
tgtccttatccaccgtggcttccat

SEQ ID NO: 682241 - DNA, 25 bp, Homo sapien
gctcttgtccttatccaccgtggct

SEQ ID NO: 682242 - DNA, 25 bp, Homo sapien
ggctcttgtccttatccaccgtggc

SEQ ID NO: 682243 - DNA, 25 bp, Homo sapien
tcttgtccttatccaccgtggcttc

SEQ ID NO: 682244 - DNA, 25 bp, Homo sapien
cactcataactactgatgaagaggt

SEQ ID NO: 682245 - DNA, 25 bp, Homo sapien
aagaggttttgctcagtaaactctc

SEQ ID NO: 682246 - DNA, 25 bp, Homo sapien
ctgatgaagaggttttgctcagtaa

SEQ ID NO: 682247 - DNA, 25 bp, Homo sapien
tcatgtcactcataactactgatga

SEQ ID NO: 682248 - DNA, 25 bp, Homo sapien
aatgaacagcggaaatggcaacatg

SEQ ID NO: 682249 - DNA, 25 bp, Homo sapien
cagcggaaatggcaacatgttgatg

SEQ ID NO: 682250 - DNA, 25 bp, Homo sapien
taagaaatgaacagcggaaatggca

SEQ ID NO: 682251 - DNA, 25 bp, Homo sapien
gactgagtaagaaatgaacagcgga

SEQ ID NO: 682252 - DNA, 25 bp, Homo sapien
ttgcctgaattgaattcttgaattc

SEQ ID NO: 682253 - DNA, 25 bp, Homo sapien
ggccttccacaacacgctgactgga

SEQ ID NO: 682254 - DNA, 25 bp, Homo sapien
tgggtcacagggaaagacgcccatg

SEQ ID NO: 682255 - DNA, 25 bp, Homo sapien
ccccagagcctggtaagtgtgggtc

SEQ ID NO: 682256 - DNA, 25 bp, Homo sapien
tgccaggccttccacaacacgctga

SEQ ID NO: 682257 - DNA, 25 bp, Homo sapien
tatgcagcacgtgcaagacacactc

SEQ ID NO: 682258 - DNA, 25 bp, Homo sapien
caagtccccaacaggaagtgaaagc

SEQ ID NO: 682259 - DNA, 25 bp, Homo sapien
gaagtgaaagcccacatccgttgtc

SEQ ID NO: 682260 - DNA, 25 bp, Homo sapien
gaaggtctgcactcggttctggaca

SEQ ID NO: 682261 - DNA, 25 bp, Homo sapien
ggaagtgtgcggtttgcaaggtacc

SEQ ID NO: 682262 - DNA, 25 bp, Homo sapien
ctaagggaagtgtgcggtttgcaag

SEQ ID NO: 682263 - DNA, 25 bp, Homo sapien
agtgtgcggtttgcaaggtaccttg

SEQ ID NO: 682264 - DNA, 25 bp, Homo sapien
taagggaagtgtgcggtttgcaagg

SEQ ID NO: 682265 - DNA, 25 bp, Homo sapien
ccaccccgcatccacgggtgcacaa

SEQ ID NO: 682266 - DNA, 25 bp, Homo sapien
caccccgcatccacgggtgcacaag

SEQ ID NO: 682267 - DNA, 25 bp, Homo sapien
accccgcatccacgggtgcacaagt

SEQ ID NO: 682268 - DNA, 25 bp, Homo sapien
gatcctttgtgggaatcagctgatg

SEQ ID NO: 682269 - DNA, 25 bp, Homo sapien
tgcaaggaggaatcaccaagccctt

SEQ ID NO: 682270 - DNA, 25 bp, Homo sapien
caccaagcccttattacgggatcct

SEQ ID NO: 682271 - DNA, 25 bp, Homo sapien
tattacgggatcctttgtgggaatc

SEQ ID NO: 682272 - DNA, 25 bp, Homo sapien
cccgtttgctgatgtatggccccta

SEQ ID NO: 682273 - DNA, 25 bp, Homo sapien
gaagaatgggcatcgctaaccagcc

SEQ ID NO: 682274 - DNA, 25 bp, Homo sapien
gaagaaaacccctactagatgcaag

SEQ ID NO: 682275 - DNA, 25 bp, Homo sapien
tgtcagctcgtgttaggaaaccgca

SEQ ID NO: 682276 - DNA, 25 bp, Homo sapien
caagtttaggcaaatatttagatcc

SEQ ID NO: 682277 - DNA, 25 bp, Homo sapien
tgcaggattcttggacttaaaagcc

SEQ ID NO: 682278 - DNA, 25 bp, Homo sapien
cttaaaagcctgttcttcaatgcag

SEQ ID NO: 682279 - DNA, 25 bp, Homo sapien
tcaaatggatgcaaacggaatgaac

SEQ ID NO: 682280 - DNA, 25 bp, Homo sapien
tatctccacggcagcttcggagttg

SEQ ID NO: 682281 - DNA, 25 bp, Homo sapien
cagcttcggagttgcaatctggatc

SEQ ID NO: 682282 - DNA, 25 bp, Homo sapien
tcggagttgcaatctggatcgcatc

SEQ ID NO: 682283 - DNA, 25 bp, Homo sapien
tctggatcgcatctttggagagcag

SEQ ID NO: 682284 - DNA, 25 bp, Homo sapien
ccataccaggtctattgtttcagag

SEQ ID NO: 682285 - DNA, 25 bp, Homo sapien
ggtccggagagccttagtcatgccc

SEQ ID NO: 682286 - DNA, 25 bp, Homo sapien
ggaagccccatctagagactcccat

SEQ ID NO: 682287 - DNA, 25 bp, Homo sapien
tgtgggtaagtgatgggctccagcc

SEQ ID NO: 682288 - DNA, 25 bp, Homo sapien
cagagccagggagctagttggccaa

SEQ ID NO: 682289 - DNA, 25 bp, Homo sapien
caaagctgagtaatctgatgcaggc

SEQ ID NO: 682290 - DNA, 25 bp, Homo sapien
caggatatgatgactcagtgggaaa

SEQ ID NO: 682291 - DNA, 25 bp, Homo sapien
tgccatcagaccgttccaagaaaat

SEQ ID NO: 682292 - DNA, 25 bp, Homo sapien
tccaaaacattggatcccacccagg

SEQ ID NO: 682293 - DNA, 25 bp, Homo sapien
cagccgaaaaattccaaaactctgt

SEQ ID NO: 682294 - DNA, 25 bp, Homo sapien
caggcgcagcgagtcgctcaaagcc

SEQ ID NO: 682295 - DNA, 25 bp, Homo sapien
tgtgtcatgtgaaggaaccttccaa

SEQ ID NO: 682296 - DNA, 25 bp, Homo sapien
cgtgaactttgcctgaagggttaca

SEQ ID NO: 682297 - DNA, 25 bp, Homo sapien
tcccagcgtgaactttgcctgaagg

SEQ ID NO: 682298 - DNA, 25 bp, Homo sapien
gacttcccagcgtgaactttgcctg

SEQ ID NO: 682299 - DNA, 25 bp, Homo sapien
acagcctggacttcccagcgtgaac

SEQ ID NO: 682300 - DNA, 25 bp, Homo sapien
ggtgatttcaacagcgctaagtgcc

SEQ ID NO: 682301 - DNA, 25 bp, Homo sapien
tactcgagttgacgacaaatgctgc

SEQ ID NO: 682302 - DNA, 25 bp, Homo sapien
tcagaatgacggtcaaggaggaccc

SEQ ID NO: 682303 - DNA, 25 bp, Homo sapien
tctgctgtcaaggaactaagagtcc

SEQ ID NO: 682304 - DNA, 25 bp, Homo sapien
agccagatcacacaggctcttgaaa

SEQ ID NO: 682305 - DNA, 25 bp, Homo sapien
acagagggaagccaggtgttgctat

SEQ ID NO: 682306 - DNA, 25 bp, Homo sapien
gggagagagtcaaaaaagctgaggt

SEQ ID NO: 682307 - DNA, 25 bp, Homo sapien
caggtgttgctatggccaagtggca

SEQ ID NO: 682308 - DNA, 25 bp, Homo sapien
gagctgtgcaggcattccaccaagc

SEQ ID NO: 682309 - DNA, 25 bp, Homo sapien
agctgtgcaggcattccaccaagca

SEQ ID NO: 682310 - DNA, 25 bp, Homo sapien
caggacagctcgggggagctgtgca

SEQ ID NO: 682311 - DNA, 25 bp, Homo sapien
ggagctgtgcaggcattccaccaag

SEQ ID NO: 682312 - DNA, 25 bp, Homo sapien
gacagctcccatgacaacatctgca

SEQ ID NO: 682313 - DNA, 25 bp, Homo sapien
ttcttagtctagaccacgtggccac

SEQ ID NO: 682314 - DNA, 25 bp, Homo sapien
ggatctggtttcttagtctagacca

SEQ ID NO: 682315 - DNA, 25 bp, Homo sapien
gctgacagctcccatgacaacatct

SEQ ID NO: 682316 - DNA, 25 bp, Homo sapien
catcaacacccctttgaagtaacct

SEQ ID NO: 682317 - DNA, 25 bp, Homo sapien
tgtcttgtctttcaaccatgggcag

SEQ ID NO: 682318 - DNA, 25 bp, Homo sapien
tggactcggatgtaaagttctgccc

SEQ ID NO: 682319 - DNA, 25 bp, Homo sapien
gaggatcatttgctggccgccatag

SEQ ID NO: 682320 - DNA, 25 bp, Homo sapien
catgggcagctcgtgagcagatcgc

SEQ ID NO: 682321 - DNA, 25 bp, Homo sapien
ttcagcgaagaaaactgacaccggc

SEQ ID NO: 682322 - DNA, 25 bp, Homo sapien
agaaaactgacaccggcacagggtt

SEQ ID NO: 682323 - DNA, 25 bp, Homo sapien
gcagccaccgcaaaggttcagcgaa

SEQ ID NO: 682324 - DNA, 25 bp, Homo sapien
caaaggttcagcgaagaaaactgac

SEQ ID NO: 682325 - DNA, 25 bp, Homo sapien
taggtctaaacccaataagtgcatc

SEQ ID NO: 682326 - DNA, 25 bp, Homo sapien
tgtagtgggttacacatagtacccc

SEQ ID NO: 682327 - DNA, 25 bp, Homo sapien
cccgggtaattctaacatacagtca

SEQ ID NO: 682328 - DNA, 25 bp, Homo sapien
taagtgcatcctcgtaagcaacaga

SEQ ID NO: 682329 - DNA, 25 bp, Homo sapien
gaagggtcaggtcagtcttcctgag

SEQ ID NO: 682330 - DNA, 25 bp, Homo sapien
aagacgggggtgatccctctgacct

SEQ ID NO: 682331 - DNA, 25 bp, Homo sapien
tcttcctgagaataaggaaaggagc

SEQ ID NO: 682332 - DNA, 25 bp, Homo sapien
gaaggatctcctcggcaatgctgaa

SEQ ID NO: 682333 - DNA, 25 bp, Homo sapien
tcctgtgaggccacaaaaccttcca

SEQ ID NO: 682334 - DNA, 25 bp, Homo sapien
tacgctttctgaagaaagaccgggc

SEQ ID NO: 682335 - DNA, 25 bp, Homo sapien
cagaagtcaatagaagcagcaagag

SEQ ID NO: 682336 - DNA, 25 bp, Homo sapien
ggtacctcgcccagaatacactgct

SEQ ID NO: 682337 - DNA, 25 bp, Homo sapien
gtttctaagcttcaagatccccgca

SEQ ID NO: 682338 - DNA, 25 bp, Homo sapien
ctctgggatgtgaactcggaaaacc

SEQ ID NO: 682339 - DNA, 25 bp, Homo sapien
gcagctcaatgtcggcgtttctaag

SEQ ID NO: 682340 - DNA, 25 bp, Homo sapien
taaagagacgattctgccactggac

SEQ ID NO: 682341 - DNA, 25 bp, Homo sapien
tgccaggatgttaagaaccccattg

SEQ ID NO: 682342 - DNA, 25 bp, Homo sapien
catgttaacgcctgggaaagccgag

SEQ ID NO: 682343 - DNA, 25 bp, Homo sapien
gtcaccaactaccttcaggagcagg

SEQ ID NO: 682344 - DNA, 25 bp, Homo sapien
tcagccaggaatgtataccaagatg

SEQ ID NO: 682345 - DNA, 25 bp, Homo sapien
aaggcgtgcggcttaaggatccgct

SEQ ID NO: 682346 - DNA, 25 bp, Homo sapien
gtggtggtgacagttttccccgtga

SEQ ID NO: 682347 - DNA, 25 bp, Homo sapien
catcagctgtcccaatgaagatctg

SEQ ID NO: 682348 - DNA, 25 bp, Homo sapien
tttggtgttgcccactatcttctca

SEQ ID NO: 682349 - DNA, 25 bp, Homo sapien
tctggagatccttcggtaggatctc

SEQ ID NO: 682350 - DNA, 25 bp, Homo sapien
tggagatccttcggtaggatctcca

SEQ ID NO: 682351 - DNA, 25 bp, Homo sapien
ggagatccttcggtaggatctccag

SEQ ID NO: 682352 - DNA, 25 bp, Homo sapien
gagatccttcggtaggatctccagt

SEQ ID NO: 682353 - DNA, 25 bp, Homo sapien
gaagcagtgcttctagtgcacaccg

SEQ ID NO: 682354 - DNA, 25 bp, Homo sapien
caggcagttgaaaaggttccaggaa

SEQ ID NO: 682355 - DNA, 25 bp, Homo sapien
tcccgagcaaaggaaacgccacttc

SEQ ID NO: 682356 - DNA, 25 bp, Homo sapien
caaaggtgaggtcttctcggtggcc

SEQ ID NO: 682357 - DNA, 25 bp, Homo sapien
aggtgacagcatctccaggtatgat

SEQ ID NO: 682358 - DNA, 25 bp, Homo sapien
cctgttccgaacagaggtgacagca

SEQ ID NO: 682359 - DNA, 25 bp, Homo sapien
ggtgacagcatctccaggtatgatg

SEQ ID NO: 682360 - DNA, 25 bp, Homo sapien
ggctgccctgttccgaacagaggtg

SEQ ID NO: 682361 - DNA, 25 bp, Homo sapien
ctgtctggtttccgaattgcttttt

SEQ ID NO: 682362 - DNA, 25 bp, Homo sapien
tctgtctggtttccgaattgctttt

SEQ ID NO: 682363 - DNA, 25 bp, Homo sapien
ttctgtctggtttccgaattgcttt

SEQ ID NO: 682364 - DNA, 25 bp, Homo sapien
ccactcacaggaggacatgcttggg

SEQ ID NO: 682365 - DNA, 25 bp, Homo sapien
gggtgtcaacagcagcccacagcga

SEQ ID NO: 682366 - DNA, 25 bp, Homo sapien
ggccactcacaggaggacatgcttg

SEQ ID NO: 682367 - DNA, 25 bp, Homo sapien
gggggtgtcaacagcagcccacagc

SEQ ID NO: 682368 - DNA, 25 bp, Homo sapien
aaggtgaggctcaatgcctctgagc

SEQ ID NO: 682369 - DNA, 25 bp, Homo sapien
taatggcagcgccactatctctcca

SEQ ID NO: 682370 - DNA, 25 bp, Homo sapien
gagtcggcccatagtcttctaggag

SEQ ID NO: 682371 - DNA, 25 bp, Homo sapien
tcatcactggcgatgaggtgctcgt

SEQ ID NO: 682372 - DNA, 25 bp, Homo sapien
ttactgtcacgagtgcagctttcac

SEQ ID NO: 682373 - DNA, 25 bp, Homo sapien
cactgcttactgtcacgagtgcagc

SEQ ID NO: 682374 - DNA, 25 bp, Homo sapien
aaggagcactgcttactgtcacgag

SEQ ID NO: 682375 - DNA, 25 bp, Homo sapien
ggagcactgcttactgtcacgagtg

SEQ ID NO: 682376 - DNA, 25 bp, Homo sapien
gaattcctcgtaacagagctaccca

SEQ ID NO: 682377 - DNA, 25 bp, Homo sapien
aaagctcattactgttaccgggaat

SEQ ID NO: 682378 - DNA, 25 bp, Homo sapien
cgggaatgaaatggccatcgggttt

SEQ ID NO: 682379 - DNA, 25 bp, Homo sapien
atctgcaaggaattcctcgtaacag

SEQ ID NO: 682380 - DNA, 25 bp, Homo sapien
gcatcctgtcctgaaacagggcgag

SEQ ID NO: 682381 - DNA, 25 bp, Homo sapien
tggatgttttgtccaccggaggacc

SEQ ID NO: 682382 - DNA, 25 bp, Homo sapien
ttgcaaaaccgctctgaatggatgt

SEQ ID NO: 682383 - DNA, 25 bp, Homo sapien
aggaatgatggcagggctccaccaa

SEQ ID NO: 682384 - DNA, 25 bp, Homo sapien
aaaaacataatctattcaaatgact

SEQ ID NO: 682385 - DNA, 25 bp, Homo sapien
catatattggatcttcaaagttaca

SEQ ID NO: 682386 - DNA, 25 bp, Homo sapien
tcatatattggatcttcaaagttac

SEQ ID NO: 682387 - DNA, 25 bp, Homo sapien
aaaaaacataatctattcaaatgac

SEQ ID NO: 682388 - DNA, 25 bp, Homo sapien
tagctcccatgaggtgatgacaagg

SEQ ID NO: 682389 - DNA, 25 bp, Homo sapien
cagcctactggaccaatgggcggca

SEQ ID NO: 682390 - DNA, 25 bp, Homo sapien
caagacagggccaatcagcatctcc

SEQ ID NO: 682391 - DNA, 25 bp, Homo sapien
gacaaggctcatactggaacagcat

SEQ ID NO: 682392 - DNA, 25 bp, Homo sapien
tcagaaaccttctgtcaacacacaa

SEQ ID NO: 682393 - DNA, 25 bp, Homo sapien
agaaaccttctgtcaacacacaaac

SEQ ID NO: 682394 - DNA, 25 bp, Homo sapien
aggtgatggtttcagaaaccttctg

SEQ ID NO: 682395 - DNA, 25 bp, Homo sapien
taaggtgatggtttcagaaaccttc

SEQ ID NO: 682396 - DNA, 25 bp, Homo sapien
tcaaaggagtaagaggctgagacac

SEQ ID NO: 682397 - DNA, 25 bp, Homo sapien
gagtagctggattagcttctaatgc

SEQ ID NO: 682398 - DNA, 25 bp, Homo sapien
gggaagaagcatccgggcacatgaa

SEQ ID NO: 682399 - DNA, 25 bp, Homo sapien
tctcttctggcttatgagtagctgg

SEQ ID NO: 682400 - DNA, 25 bp, Homo sapien
tagtgggcccggtgatgtggcttgg

SEQ ID NO: 682401 - DNA, 25 bp, Homo sapien
ggcttgggctgcacctcgatccgca

SEQ ID NO: 682402 - DNA, 25 bp, Homo sapien
ctggacagcggccactcaagtggag

SEQ ID NO: 682403 - DNA, 25 bp, Homo sapien
tccgcagctcgtaagagcctgactg

SEQ ID NO: 682404 - DNA, 25 bp, Homo sapien
ctaaaggagaaaataaaatcagcca

SEQ ID NO: 682405 - DNA, 25 bp, Homo sapien
taaaggagaaaataaaatcagccat

SEQ ID NO: 682406 - DNA, 25 bp, Homo sapien
tggactaacattatcaaataatcac

SEQ ID NO: 682407 - DNA, 25 bp, Homo sapien
atggactaacattatcaaataatca

SEQ ID NO: 682408 - DNA, 25 bp, Homo sapien
ggctatgacatgaaccatgaagtat

SEQ ID NO: 682409 - DNA, 25 bp, Homo sapien
tctagggctatgacatgaaccatga

SEQ ID NO: 682410 - DNA, 25 bp, Homo sapien
atttttcactctctagggctatgac

SEQ ID NO: 682411 - DNA, 25 bp, Homo sapien
aatttttcactctctagggctatga

SEQ ID NO: 682412 - DNA, 25 bp, Homo sapien
gaatctgccacctagatgtttgaaa

SEQ ID NO: 682413 - DNA, 25 bp, Homo sapien
gccacctggtgagtcaggtacacga

SEQ ID NO: 682414 - DNA, 25 bp, Homo sapien
tattaaggcttgctttgtgcctacc

SEQ ID NO: 682415 - DNA, 25 bp, Homo sapien
gaataaaccaggtgccatatgagca

SEQ ID NO: 682416 - DNA, 25 bp, Homo sapien
tccgcttggcaccaggcgatgagga

SEQ ID NO: 682417 - DNA, 25 bp, Homo sapien
tgatctcgatccgagggctcaggcc

SEQ ID NO: 682418 - DNA, 25 bp, Homo sapien
ttggccgcgctcagaaacttctgcg

SEQ ID NO: 682419 - DNA, 25 bp, Homo sapien
tgaaactgcggacacaggtcgtcgg

SEQ ID NO: 682420 - DNA, 25 bp, Homo sapien
tggagtgctccgtttccctcgacct

SEQ ID NO: 682421 - DNA, 25 bp, Homo sapien
tgaggaactgtggagtgctccgttt

SEQ ID NO: 682422 - DNA, 25 bp, Homo sapien
ttccctcgacctccagtctgccctt

SEQ ID NO: 682423 - DNA, 25 bp, Homo sapien
tctgcccttccctcgacctcgagat

SEQ ID NO: 682424 - DNA, 25 bp, Homo sapien
cagggtgggatcagtggccccatca

SEQ ID NO: 682425 - DNA, 25 bp, Homo sapien
acatccttgcccaccgggtctttct

SEQ ID NO: 682426 - DNA, 25 bp, Homo sapien
tcactgtgtacttggttgtctcctc

SEQ ID NO: 682427 - DNA, 25 bp, Homo sapien
cttccagggtgggatcagtggcccc

SEQ ID NO: 682428 - DNA, 25 bp, Homo sapien
cctacacactagatggaggcaagcc

SEQ ID NO: 682429 - DNA, 25 bp, Homo sapien
gaagctactaacaggcctgccactg

SEQ ID NO: 682430 - DNA, 25 bp, Homo sapien
taaaagctgattaccaatctgggag

SEQ ID NO: 682431 - DNA, 25 bp, Homo sapien
tagatacccatctggtggccaccaa

SEQ ID NO: 682432 - DNA, 25 bp, Homo sapien
cttcgttcggattcaaatactcata

SEQ ID NO: 682433 - DNA, 25 bp, Homo sapien
tactcatagtcgaagaggatggaga

SEQ ID NO: 682434 - DNA, 25 bp, Homo sapien
ttcaaatactcatagtcgaagagga

SEQ ID NO: 682435 - DNA, 25 bp, Homo sapien
tcaagctcgtcttgggggctgcccc

SEQ ID NO: 682436 - DNA, 25 bp, Homo sapien
tccctttcctcgtagggacgcacgc

SEQ ID NO: 682437 - DNA, 25 bp, Homo sapien
ctggctctgggacccctcgcagtgg

SEQ ID NO: 682438 - DNA, 25 bp, Homo sapien
gcagcgggtcctggacgcgcccggg

SEQ ID NO: 682439 - DNA, 25 bp, Homo sapien
tcctcgtagggacgcacgccgggtc

SEQ ID NO: 682440 - DNA, 25 bp, Homo sapien
gtgcgacacgcgctgcgcgaaccag

SEQ ID NO: 682441 - DNA, 25 bp, Homo sapien
ggtctagacaagaaagctgccgcca

SEQ ID NO: 682442 - DNA, 25 bp, Homo sapien
cgccactaggacttttgccctaagg

SEQ ID NO: 682443 - DNA, 25 bp, Homo sapien
gctgcgcgaaccagggtctagacaa

SEQ ID NO: 682444 - DNA, 25 bp, Homo sapien
tgatcttaactgaacaggagatgcc

SEQ ID NO: 682445 - DNA, 25 bp, Homo sapien
ccttgatcttaactgaacaggagat

SEQ ID NO: 682446 - DNA, 25 bp, Homo sapien
tcttaactgaacaggagatgccgcc

SEQ ID NO: 682447 - DNA, 25 bp, Homo sapien
tccttgatcttaactgaacaggaga

SEQ ID NO: 682448 - DNA, 25 bp, Homo sapien
aggcaaaggccagcatggaagcagc

SEQ ID NO: 682449 - DNA, 25 bp, Homo sapien
aggaggagcgatagcacaggcaaag

SEQ ID NO: 682450 - DNA, 25 bp, Homo sapien
agggaccaacagtgcccgttgagga

SEQ ID NO: 682451 - DNA, 25 bp, Homo sapien
gcccgttgaggaggagcgatagcac

SEQ ID NO: 682452 - DNA, 25 bp, Homo sapien
cacagaaataggagacccgatccct

SEQ ID NO: 682453 - DNA, 25 bp, Homo sapien
taggagacccgatccctggcctcag

SEQ ID NO: 682454 - DNA, 25 bp, Homo sapien
tgtctggtgaaagtgtgattctctc

SEQ ID NO: 682455 - DNA, 25 bp, Homo sapien
aaagttcttaataaagttagtcatg

SEQ ID NO: 682456 - DNA, 25 bp, Homo sapien
cgacctctgccgggagctgaaagtg

SEQ ID NO: 682457 - DNA, 25 bp, Homo sapien
ctcccgcaccgacctctgccgggag

SEQ ID NO: 682458 - DNA, 25 bp, Homo sapien
ccaggcctcccgcaccgacctctgc

SEQ ID NO: 682459 - DNA, 25 bp, Homo sapien
gcaccgacctctgccgggagctgaa

SEQ ID NO: 682460 - DNA, 25 bp, Homo sapien
gggatggcagtgccccagtctgaac

SEQ ID NO: 682461 - DNA, 25 bp, Homo sapien
ggcagtgccccagtctgaacgcagc

SEQ ID NO: 682462 - DNA, 25 bp, Homo sapien
cagaccccatgatgcggaggggatg

SEQ ID NO: 682463 - DNA, 25 bp, Homo sapien
agtctgaacgcagcctctctctgca

SEQ ID NO: 682464 - DNA, 25 bp, Homo sapien
tgtttgtatcgaccagcagccgagg

SEQ ID NO: 682465 - DNA, 25 bp, Homo sapien
gagtcggcgcggctccgcgatccgg

SEQ ID NO: 682466 - DNA, 25 bp, Homo sapien
cagccgaggggacgccgtcttctct

SEQ ID NO: 682467 - DNA, 25 bp, Homo sapien
gagcctcggagcgacccgggagctg

SEQ ID NO: 682468 - DNA, 25 bp, Homo sapien
tgcagtaaaataacgggattccctc

SEQ ID NO: 682469 - DNA, 25 bp, Homo sapien
cgcgctccgtgtttataggctttca

SEQ ID NO: 682470 - DNA, 25 bp, Homo sapien
tatccagcgccatggaaaccactgg

SEQ ID NO: 682471 - DNA, 25 bp, Homo sapien
cacaagtccctgattgttcgggaga

SEQ ID NO: 682472 - DNA, 25 bp, Homo sapien
gcgatgccacgcatggttcacagca

SEQ ID NO: 682473 - DNA, 25 bp, Homo sapien
agaggtgcagcggtcaagatgcctt

SEQ ID NO: 682474 - DNA, 25 bp, Homo sapien
ccagaagaaagtccttgcgatgcca

SEQ ID NO: 682475 - DNA, 25 bp, Homo sapien
gtgcagcggtcaagatgccttttct

SEQ ID NO: 682476 - DNA, 25 bp, Homo sapien
tggcccacaatagcctcactgggca

SEQ ID NO: 682477 - DNA, 25 bp, Homo sapien
cttaaagaggcatcgagaggcagct

SEQ ID NO: 682478 - DNA, 25 bp, Homo sapien
tgggaccactctgttttccagtact

SEQ ID NO: 682479 - DNA, 25 bp, Homo sapien
gcagctggctccatccgtgggacca

SEQ ID NO: 682480 - DNA, 25 bp, Homo sapien
ctttaagggcgtagagaggattctt

SEQ ID NO: 682481 - DNA, 25 bp, Homo sapien
ttcttttcagtggagcctattgagg

SEQ ID NO: 682482 - DNA, 25 bp, Homo sapien
ggtgcagcctttaagggcgtagaga

SEQ ID NO: 682483 - DNA, 25 bp, Homo sapien
gagcctattgaggaagactcattcc

SEQ ID NO: 682484 - DNA, 25 bp, Homo sapien
caacaggaacgtgggctggaaatgc

SEQ ID NO: 682485 - DNA, 25 bp, Homo sapien
cagtgcatcctggtgagctctgacc

SEQ ID NO: 682486 - DNA, 25 bp, Homo sapien
gaacgagcagtagtgatcaacagca

SEQ ID NO: 682487 - DNA, 25 bp, Homo sapien
ttcacggaagttggtcagtgcatcc

SEQ ID NO: 682488 - DNA, 25 bp, Homo sapien
gcaagtttccggtgacagcctgccc

SEQ ID NO: 682489 - DNA, 25 bp, Homo sapien
agcctgcccatccacggggctccct

SEQ ID NO: 682490 - DNA, 25 bp, Homo sapien
acagcaagtttccggtgacagcctg

SEQ ID NO: 682491 - DNA, 25 bp, Homo sapien
cagcggcagccctaggaacgccccg

SEQ ID NO: 682492 - DNA, 25 bp, Homo sapien
tgagagggaattggcttttggccct

SEQ ID NO: 682493 - DNA, 25 bp, Homo sapien
tttggccctagaggctgcgatcagc

SEQ ID NO: 682494 - DNA, 25 bp, Homo sapien
cggggcggtatctcgtttgcagttt

SEQ ID NO: 682495 - DNA, 25 bp, Homo sapien
tgcgatcagcttggcttgtctttct

SEQ ID NO: 682496 - DNA, 25 bp, Homo sapien
ggggcataagctggtaatgggccat

SEQ ID NO: 682497 - DNA, 25 bp, Homo sapien
cccaggaataaagccaatgggccct

SEQ ID NO: 682498 - DNA, 25 bp, Homo sapien
tgtatccagagtggggcataagctg

SEQ ID NO: 682499 - DNA, 25 bp, Homo sapien
gtgacccaggaataaagccaatggg

SEQ ID NO: 682500 - DNA, 25 bp, Homo sapien
gttcttattctggagctctctgtgc

SEQ ID NO: 682501 - DNA, 25 bp, Homo sapien
taggatgggctgccctatccacagc

SEQ ID NO: 682502 - DNA, 25 bp, Homo sapien
ggtcccccgggcttgcattgccagg

SEQ ID NO: 682503 - DNA, 25 bp, Homo sapien
cagggagagcaggttctaggatggg

SEQ ID NO: 682504 - DNA, 25 bp, Homo sapien
agtccaggggcaaccagagctgggg

SEQ ID NO: 682505 - DNA, 25 bp, Homo sapien
tctccaagaacttattgcccttcct

SEQ ID NO: 682506 - DNA, 25 bp, Homo sapien
tttcccttctcagagttagggactc

SEQ ID NO: 682507 - DNA, 25 bp, Homo sapien
gactcagatgacaaggagacattat

SEQ ID NO: 682508 - DNA, 25 bp, Homo sapien
tgtccccataatgctctccaagaac

SEQ ID NO: 682509 - DNA, 25 bp, Homo sapien
aaatctgatttacactgctgttaaa

SEQ ID NO: 682510 - DNA, 25 bp, Homo sapien
aaaatctgatttacactgctgttaa

SEQ ID NO: 682511 - DNA, 25 bp, Homo sapien
tctcataaagtgaatcagacacctt

SEQ ID NO: 682512 - DNA, 25 bp, Homo sapien
ttaattgtaaccatcctagtaagga

SEQ ID NO: 682513 - DNA, 25 bp, Homo sapien
ggtcccatgggtgcaaacctatgca

SEQ ID NO: 682514 - DNA, 25 bp, Homo sapien
tattagcctactagatacactttgc

SEQ ID NO: 682515 - DNA, 25 bp, Homo sapien
cttcaggcatgaaggcgggacctcc

SEQ ID NO: 682516 - DNA, 25 bp, Homo sapien
caagcaatgtgtgggaactctggga

SEQ ID NO: 682517 - DNA, 25 bp, Homo sapien
tgaaggttccttagaatcccacgtc

SEQ ID NO: 682518 - DNA, 25 bp, Homo sapien
agcagccttaggatgggccagtgca

SEQ ID NO: 682519 - DNA, 25 bp, Homo sapien
tgagcagaagccaatagtgaagccc

SEQ ID NO: 682520 - DNA, 25 bp, Homo sapien
gcacctctggatcctatgagcagaa

SEQ ID NO: 682521 - DNA, 25 bp, Homo sapien
caaatccatgaaaggtgcacagaga

SEQ ID NO: 682522 - DNA, 25 bp, Homo sapien
cagacgcctggcttgctaaggataa

SEQ ID NO: 682523 - DNA, 25 bp, Homo sapien
ttagccagatatgctggcacacacc

SEQ ID NO: 682524 - DNA, 25 bp, Homo sapien
cacaagaatctcttaaccccgggag

SEQ ID NO: 682525 - DNA, 25 bp, Homo sapien
tgaggcacaagaatctcttaacccc

SEQ ID NO: 682526 - DNA, 25 bp, Homo sapien
aggcacaagaatctcttaaccccgg

SEQ ID NO: 682527 - DNA, 25 bp, Homo sapien
gcagcagcctcgagtgataatgaca

SEQ ID NO: 682528 - DNA, 25 bp, Homo sapien
tttagagcaaaagcctccacgtctg

SEQ ID NO: 682529 - DNA, 25 bp, Homo sapien
tctaagaactctagccagccaggtg

SEQ ID NO: 682530 - DNA, 25 bp, Homo sapien
tccccaagcgtgagcagaccatttt

SEQ ID NO: 682531 - DNA, 25 bp, Homo sapien
gcaatttccagggtaatcaactcac

SEQ ID NO: 682532 - DNA, 25 bp, Homo sapien
ccactcgaatcaacggggttctgga

SEQ ID NO: 682533 - DNA, 25 bp, Homo sapien
gggttctggatgtcattagctactc

SEQ ID NO: 682534 - DNA, 25 bp, Homo sapien
ctttctttcggcctgattagctgtt

SEQ ID NO: 682535 - DNA, 25 bp, Homo sapien
cctgattagctgtttgggccaattt

SEQ ID NO: 682536 - DNA, 25 bp, Homo sapien
cttcgaaatctgacccaagtgggca

SEQ ID NO: 682537 - DNA, 25 bp, Homo sapien
tcttccggaggaatttgaacacagc

SEQ ID NO: 682538 - DNA, 25 bp, Homo sapien
caatggaaagggttgcacctgagcc

SEQ ID NO: 682539 - DNA, 25 bp, Homo sapien
caggactgtcgaaggaaaaggcacc

SEQ ID NO: 682540 - DNA, 25 bp, Homo sapien
aaattctgacacgtctgggatggac

SEQ ID NO: 682541 - DNA, 25 bp, Homo sapien
tctgacacgtctgggatggacaata

SEQ ID NO: 682542 - DNA, 25 bp, Homo sapien
tctgggatggacaatagtacaaaat

SEQ ID NO: 682543 - DNA, 25 bp, Homo sapien
tctttacatttcatgtaccatgaaa

SEQ ID NO: 682544 - DNA, 25 bp, Homo sapien
ccacgctggcaaacaatgaaagtag

SEQ ID NO: 682545 - DNA, 25 bp, Homo sapien
tctaatcaaaaaacgctgtcctggt

SEQ ID NO: 682546 - DNA, 25 bp, Homo sapien
ttattgggcaacagcaacgagccac

SEQ ID NO: 682547 - DNA, 25 bp, Homo sapien
taaagcatactgtgccagagctccc

SEQ ID NO: 682548 - DNA, 25 bp, Homo sapien
aaaccatgctgtggcggagaagaca

SEQ ID NO: 682549 - DNA, 25 bp, Homo sapien
gacatggcccagctatattaacaga

SEQ ID NO: 682550 - DNA, 25 bp, Homo sapien
cctgagaagatgcttcggagctcca

SEQ ID NO: 682551 - DNA, 25 bp, Homo sapien
gaagacagattcacgggtaatgccg

SEQ ID NO: 682552 - DNA, 25 bp, Homo sapien
agaagaactggacataattcatggg

SEQ ID NO: 682553 - DNA, 25 bp, Homo sapien
gaagaactggacataattcatggga

SEQ ID NO: 682554 - DNA, 25 bp, Homo sapien
aagaagaactggacataattcatgg

SEQ ID NO: 682555 - DNA, 25 bp, Homo sapien
aagaactggacataattcatgggaa

SEQ ID NO: 682556 - DNA, 25 bp, Homo sapien
tagttccagcacgtggtctaatggc

SEQ ID NO: 682557 - DNA, 25 bp, Homo sapien
aatagctagtgttgtcagagggcgc

SEQ ID NO: 682558 - DNA, 25 bp, Homo sapien
tgtcaaagacttacggcccatggag

SEQ ID NO: 682559 - DNA, 25 bp, Homo sapien
cacaactaagatgacctccgagaag

SEQ ID NO: 682560 - DNA, 25 bp, Homo sapien
gcctttgcgtctccagtgtctgaga

SEQ ID NO: 682561 - DNA, 25 bp, Homo sapien
tcagggaccgtccagtgaatggcgt

SEQ ID NO: 682562 - DNA, 25 bp, Homo sapien
caacgacgtggcagtttgcacttga

SEQ ID NO: 682563 - DNA, 25 bp, Homo sapien
cactgatgggatgggccaacgacgt

SEQ ID NO: 682564 - DNA, 25 bp, Homo sapien
gaatctccgagcaaagccaggtaca

SEQ ID NO: 682565 - DNA, 25 bp, Homo sapien
taagacttcccagcgttacagagcc

SEQ ID NO: 682566 - DNA, 25 bp, Homo sapien
tatcaagagtgctccaaaggcaagg

SEQ ID NO: 682567 - DNA, 25 bp, Homo sapien
taaaactttctgacgaggctcccac

SEQ ID NO: 682568 - DNA, 25 bp, Homo sapien
gatcccagatcccaacgctgtagct

SEQ ID NO: 682569 - DNA, 25 bp, Homo sapien
tctgccggcagtggaacagatccca

SEQ ID NO: 682570 - DNA, 25 bp, Homo sapien
gctttataagaaacatgccggcatg

SEQ ID NO: 682571 - DNA, 25 bp, Homo sapien
tgttgttccgaaagatgcctctgcc

SEQ ID NO: 682572 - DNA, 25 bp, Homo sapien
ttggtcttggaggatctgagtcaca

SEQ ID NO: 682573 - DNA, 25 bp, Homo sapien
ggtcttggaggatctgagtcacatc

SEQ ID NO: 682574 - DNA, 25 bp, Homo sapien
ggaggatctgagtcacatctgccat

SEQ ID NO: 682575 - DNA, 25 bp, Homo sapien
tcttggaggatctgagtcacatctg

SEQ ID NO: 682576 - DNA, 25 bp, Homo sapien
ttaggactccgtttaggcgcagagc

SEQ ID NO: 682577 - DNA, 25 bp, Homo sapien
cccgttgatgcagcgttaggactcc

SEQ ID NO: 682578 - DNA, 25 bp, Homo sapien
gctttgtgattgttaccaggtccca

SEQ ID NO: 682579 - DNA, 25 bp, Homo sapien
caataaagcgggatcacacctctga

SEQ ID NO: 682580 - DNA, 25 bp, Homo sapien
ctttgagtagctggggggagagaac

SEQ ID NO: 682581 - DNA, 25 bp, Homo sapien
tatgatgtgagctttgagtagctgg

SEQ ID NO: 682582 - DNA, 25 bp, Homo sapien
gagctttgagtagctggggggagag

SEQ ID NO: 682583 - DNA, 25 bp, Homo sapien
ctatgatgtgagctttgagtagctg

SEQ ID NO: 682584 - DNA, 25 bp, Homo sapien
gtacttgaggacatagagggggagg

SEQ ID NO: 682585 - DNA, 25 bp, Homo sapien
tcgcaggtacttgaggacatagagg

SEQ ID NO: 682586 - DNA, 25 bp, Homo sapien
cgtcttcgcaggtacttgaggacat

SEQ ID NO: 682587 - DNA, 25 bp, Homo sapien
acttgaggacatagagggggaggca

SEQ ID NO: 682588 - DNA, 25 bp, Homo sapien
gagactttccacaagaatgacaagg

SEQ ID NO: 682589 - DNA, 25 bp, Homo sapien
cacaagaatgacaaggtggcgatga

SEQ ID NO: 682590 - DNA, 25 bp, Homo sapien
agagtgatgacggagactttccaca

SEQ ID NO: 682591 - DNA, 25 bp, Homo sapien
gacaaggtggcgatgaagtacacat

SEQ ID NO: 682592 - DNA, 25 bp, Homo sapien
acggcaggtgctcccacgtctacgg

SEQ ID NO: 682593 - DNA, 25 bp, Homo sapien
cacgtctacggaactggcgagtacc

SEQ ID NO: 682594 - DNA, 25 bp, Homo sapien
gaggagcagcagattgtattctgag

SEQ ID NO: 682595 - DNA, 25 bp, Homo sapien
gaactggcgagtaccttcagcactt

SEQ ID NO: 682596 - DNA, 25 bp, Homo sapien
aaggagatggccacgatgtgcacga

SEQ ID NO: 682597 - DNA, 25 bp, Homo sapien
gcagcgccccgtacatgatggtgct

SEQ ID NO: 682598 - DNA, 25 bp, Homo sapien
tgtgcacgaactccgactcaaacag

SEQ ID NO: 682599 - DNA, 25 bp, Homo sapien
agaacaccagggaggcgatgtagca

SEQ ID NO: 682600 - DNA, 25 bp, Homo sapien
atgtcttgtaggacaacggccgtcc

SEQ ID NO: 682601 - DNA, 25 bp, Homo sapien
atcaaaacccatattaagaatgtct

SEQ ID NO: 682602 - DNA, 25 bp, Homo sapien
cttgatagatgctaatcaaaaccca

SEQ ID NO: 682603 - DNA, 25 bp, Homo sapien
gaatgtcttgtaggacaacggccgt

SEQ ID NO: 682604 - DNA, 25 bp, Homo sapien
gaattggagggtctgtgtgaaataa

SEQ ID NO: 682605 - DNA, 25 bp, Homo sapien
gtgttcaaatcagaattggagggtc

SEQ ID NO: 682606 - DNA, 25 bp, Homo sapien
ccagttcaagtgtgttcaaatcaga

SEQ ID NO: 682607 - DNA, 25 bp, Homo sapien
caaatcagaattggagggtctgtgt

SEQ ID NO: 682608 - DNA, 25 bp, Homo sapien
tcaggatacagcatggcaacttccg

SEQ ID NO: 682609 - DNA, 25 bp, Homo sapien
ggcaacttccgatttgacatctttg

SEQ ID NO: 682610 - DNA, 25 bp, Homo sapien
caggaaacatggtgtaaattgtgga

SEQ ID NO: 682611 - DNA, 25 bp, Homo sapien
gaagatccttgtagagctcaggata

SEQ ID NO: 682612 - DNA, 25 bp, Homo sapien
taagacctggctgacgcgataggag

SEQ ID NO: 682613 - DNA, 25 bp, Homo sapien
agaaaaccgccataggtaagacctg

SEQ ID NO: 682614 - DNA, 25 bp, Homo sapien
tgaagagctttcatcccggtcagcg

SEQ ID NO: 682615 - DNA, 25 bp, Homo sapien
ccggtcagcgagtcaataaacaaat

SEQ ID NO: 682616 - DNA, 25 bp, Homo sapien
ctgggtgattcagagactgagcaca

SEQ ID NO: 682617 - DNA, 25 bp, Homo sapien
tgggtgattcagagactgagcacat

SEQ ID NO: 682618 - DNA, 25 bp, Homo sapien
ggtgattcagagactgagcacattc

SEQ ID NO: 682619 - DNA, 25 bp, Homo sapien
gtgattcagagactgagcacattct

SEQ ID NO: 682620 - DNA, 25 bp, Homo sapien
ccttgatagagagggacggaggcaa

SEQ ID NO: 682621 - DNA, 25 bp, Homo sapien
tgaggaatccttgatagagagggac

SEQ ID NO: 682622 - DNA, 25 bp, Homo sapien
gatagagagggacggaggcaaagta

SEQ ID NO: 682623 - DNA, 25 bp, Homo sapien
aatgatgaggaatccttgatagaga

SEQ ID NO: 682624 - DNA, 25 bp, Homo sapien
gagctcagagcgcaggtgatcctga

SEQ ID NO: 682625 - DNA, 25 bp, Homo sapien
gggtcatcctaaccacaaagtcttc

SEQ ID NO: 682626 - DNA, 25 bp, Homo sapien
tattttccagaccagtatcaggagc

SEQ ID NO: 682627 - DNA, 25 bp, Homo sapien
caaagtcttcatctcgacaagagca

SEQ ID NO: 682628 - DNA, 25 bp, Homo sapien
tgcagaggggccagctgtccactca

SEQ ID NO: 682629 - DNA, 25 bp, Homo sapien
gcagaggggccagctgtccactcac

SEQ ID NO: 682630 - DNA, 25 bp, Homo sapien
atggtatagccacaggcacatgtgc

SEQ ID NO: 682631 - DNA, 25 bp, Homo sapien
ccacaggcacatgtgcagaggggcc

SEQ ID NO: 682632 - DNA, 25 bp, Homo sapien
gaagtctgcagccaacgaagcctgt

SEQ ID NO: 682633 - DNA, 25 bp, Homo sapien
tgtgaatcacgaactggctgagggc

SEQ ID NO: 682634 - DNA, 25 bp, Homo sapien
tgcaccataagcaaccggccaagat

SEQ ID NO: 682635 - DNA, 25 bp, Homo sapien
gcttgtagctgttccggccatgcac

SEQ ID NO: 682636 - DNA, 25 bp, Homo sapien
ctcccacgccgcagtcagattcctg

SEQ ID NO: 682637 - DNA, 25 bp, Homo sapien
actcccacgccgcagtcagattcct

SEQ ID NO: 682638 - DNA, 25 bp, Homo sapien
agcctggtgcaccggcaggccaggg

SEQ ID NO: 682639 - DNA, 25 bp, Homo sapien
acatcggcagcagactacggccggg

SEQ ID NO: 682640 - DNA, 25 bp, Homo sapien
cacaggtgagcttgcccgtgcgctc

SEQ ID NO: 682641 - DNA, 25 bp, Homo sapien
tcctgaagcaggcgcacgatctggg

SEQ ID NO: 682642 - DNA, 25 bp, Homo sapien
cgtactcatagtacttgaggcaaac

SEQ ID NO: 682643 - DNA, 25 bp, Homo sapien
tcgctgccgagcctgcagtgcccct

SEQ ID NO: 682644 - DNA, 25 bp, Homo sapien
tgcccctgccgaagccgggtaagac

SEQ ID NO: 682645 - DNA, 25 bp, Homo sapien
gaggtcgctgccgagcctgcagtgc

SEQ ID NO: 682646 - DNA, 25 bp, Homo sapien
gtgcccctgccgaagccgggtaaga

SEQ ID NO: 682647 - DNA, 25 bp, Homo sapien
cttcctgcggaaggcgttcagctcg

SEQ ID NO: 682648 - DNA, 25 bp, Homo sapien
gttcagctcgaggtgagcctccccg

SEQ ID NO: 682649 - DNA, 25 bp, Homo sapien
tccagggagtctcccgagatgacca

SEQ ID NO: 682650 - DNA, 25 bp, Homo sapien
gatgaccagggcacaatcatgcttc

SEQ ID NO: 682651 - DNA, 25 bp, Homo sapien
aatgtctgccacaagggcgggcgat

SEQ ID NO: 682652 - DNA, 25 bp, Homo sapien
tcctcaatggtcctaaatgcttccc

SEQ ID NO: 682653 - DNA, 25 bp, Homo sapien
gcaataaagcctagcacagtcctca

SEQ ID NO: 682654 - DNA, 25 bp, Homo sapien
gcagcagttcctgatgtgcacattg

SEQ ID NO: 682655 - DNA, 25 bp, Homo sapien
ctcaggagggcagatggaccagtat

SEQ ID NO: 682656 - DNA, 25 bp, Homo sapien
tctcaggagggcagatggaccagta

SEQ ID NO: 682657 - DNA, 25 bp, Homo sapien
ctctcaggagggcagatggaccagt

SEQ ID NO: 682658 - DNA, 25 bp, Homo sapien
cagccgaaaaacgtggatgtcttgg

SEQ ID NO: 682659 - DNA, 25 bp, Homo sapien
tggtcaccagatgtgcattcttcgc

SEQ ID NO: 682660 - DNA, 25 bp, Homo sapien
tcgctgtgcacgtagctgtctccag

SEQ ID NO: 682661 - DNA, 25 bp, Homo sapien
aacgtggatgtcttggtttctggtc

SEQ ID NO: 682662 - DNA, 25 bp, Homo sapien
tgcaacagctgagtttccaacaaca

SEQ ID NO: 682663 - DNA, 25 bp, Homo sapien
cagaggtcctgtttattagtttttg

SEQ ID NO: 682664 - DNA, 25 bp, Homo sapien
ggccggcctgtcatctgcaacagct

SEQ ID NO: 682665 - DNA, 25 bp, Homo sapien
gaaatcatggcgtgacagaggtcct

SEQ ID NO: 682666 - DNA, 25 bp, Homo sapien
gcggccagacttccggaagcaaggt

SEQ ID NO: 682667 - DNA, 25 bp, Homo sapien
aaatgggcctccagcggccagactt

SEQ ID NO: 682668 - DNA, 25 bp, Homo sapien
tgcagaccccacgatgaagcagaaa

SEQ ID NO: 682669 - DNA, 25 bp, Homo sapien
agcaaggtcccgttggtgatttcct

SEQ ID NO: 682670 - DNA, 25 bp, Homo sapien
gatcaccgtggccactttgagggag

SEQ ID NO: 682671 - DNA, 25 bp, Homo sapien
atctccaggctctcgatcaccgtgg

SEQ ID NO: 682672 - DNA, 25 bp, Homo sapien
gatgccagcattcctcagggtctcc

SEQ ID NO: 682673 - DNA, 25 bp, Homo sapien
ttgagggagcggtcgtgcacactca

SEQ ID NO: 682674 - DNA, 25 bp, Homo sapien
cttctttgccaccacgagcacccgc

SEQ ID NO: 682675 - DNA, 25 bp, Homo sapien
tactgctcctctgcaagagacttct

SEQ ID NO: 682676 - DNA, 25 bp, Homo sapien
cgcagcccttctcgggccatgttgc

SEQ ID NO: 682677 - DNA, 25 bp, Homo sapien
agtcctgatactgctcctctgcaag

SEQ ID NO: 682678 - DNA, 25 bp, Homo sapien
tgcagaacatgcttccaaggcctgg

SEQ ID NO: 682679 - DNA, 25 bp, Homo sapien
cctctgcagaacatgcttccaaggc

SEQ ID NO: 682680 - DNA, 25 bp, Homo sapien
tgcctctgcagaacatgcttccaag

SEQ ID NO: 682681 - DNA, 25 bp, Homo sapien
caaggcctggtttaacttcctgcat

SEQ ID NO: 682682 - DNA, 25 bp, Homo sapien
tcttcctccaaccagtcattgtact

SEQ ID NO: 682683 - DNA, 25 bp, Homo sapien
tgtactgcacaatgccagccatgac

SEQ ID NO: 682684 - DNA, 25 bp, Homo sapien
cagtcattgtactgcacaatgccag

SEQ ID NO: 682685 - DNA, 25 bp, Homo sapien
tcatgtaaaacgtaatttctccagt

SEQ ID NO: 682686 - DNA, 25 bp, Homo sapien
ttcagcggcaaagcccgcttcccat

SEQ ID NO: 682687 - DNA, 25 bp, Homo sapien
aactgaaaggaacaccctctttcag

SEQ ID NO: 682688 - DNA, 25 bp, Homo sapien
aggccggaaggaatgagaaactgaa

SEQ ID NO: 682689 - DNA, 25 bp, Homo sapien
aaggaacaccctctttcagcggcaa

SEQ ID NO: 682690 - DNA, 25 bp, Homo sapien
cataaatttacagagatcggccggc

SEQ ID NO: 682691 - DNA, 25 bp, Homo sapien
caaccaaagggtgctcaacaacatg

SEQ ID NO: 682692 - DNA, 25 bp, Homo sapien
tcccacggagttcatcacaagttta

SEQ ID NO: 682693 - DNA, 25 bp, Homo sapien
ctgtaggaaatgatgctcccagccc

SEQ ID NO: 682694 - DNA, 25 bp, Homo sapien
cgatgatctacagccacgatccaaa

SEQ ID NO: 682695 - DNA, 25 bp, Homo sapien
aaaggcctcttttagtccagcaatg

SEQ ID NO: 682696 - DNA, 25 bp, Homo sapien
tccagcaatgacagcgctacgatga

SEQ ID NO: 682697 - DNA, 25 bp, Homo sapien
caaacccgtggctccacgtgggaag

SEQ ID NO: 682698 - DNA, 25 bp, Homo sapien
aaaagacatcacacgagtccttctc

SEQ ID NO: 682699 - DNA, 25 bp, Homo sapien
gcaaaaagacatcacacgagtcctt

SEQ ID NO: 682700 - DNA, 25 bp, Homo sapien
aaaaagacatcacacgagtccttct

SEQ ID NO: 682701 - DNA, 25 bp, Homo sapien
caaaaagacatcacacgagtccttc

SEQ ID NO: 682702 - DNA, 25 bp, Homo sapien
gttctaaatgccttaactgtgaatg

SEQ ID NO: 682703 - DNA, 25 bp, Homo sapien
tgttctaaatgccttaactgtgaat

SEQ ID NO: 682704 - DNA, 25 bp, Homo sapien
tctaaatgccttaactgtgaatgtt

SEQ ID NO: 682705 - DNA, 25 bp, Homo sapien
ttgttctaaatgccttaactgtgaa

SEQ ID NO: 682706 - DNA, 25 bp, Homo sapien
ccaatcccatccagtttgcagcgaa

SEQ ID NO: 682707 - DNA, 25 bp, Homo sapien
tttcacttagataatagtccccaat

SEQ ID NO: 682708 - DNA, 25 bp, Homo sapien
ttagataatagtccccaatcccatc

SEQ ID NO: 682709 - DNA, 25 bp, Homo sapien
cccatccagtttgcagcgaatgcca

SEQ ID NO: 682710 - DNA, 25 bp, Homo sapien
gagtcagccctggttttgcaagcct

SEQ ID NO: 682711 - DNA, 25 bp, Homo sapien
caccataagcggatcagagttacgg

SEQ ID NO: 682712 - DNA, 25 bp, Homo sapien
gaccaagtggcatatgaacaccaga

SEQ ID NO: 682713 - DNA, 25 bp, Homo sapien
taaatgatgtgaggaaccaccccac

SEQ ID NO: 682714 - DNA, 25 bp, Homo sapien
acactttccgtccactgtaccaggg

SEQ ID NO: 682715 - DNA, 25 bp, Homo sapien
tgctttcataggtgaaagggaagat

SEQ ID NO: 682716 - DNA, 25 bp, Homo sapien
ccgcacgatgatgcccatacgtttg

SEQ ID NO: 682717 - DNA, 25 bp, Homo sapien
tggtctcggcccaccagggttaagc

SEQ ID NO: 682718 - DNA, 25 bp, Homo sapien
tttctaggctcaaaacaggctgcac

SEQ ID NO: 682719 - DNA, 25 bp, Homo sapien
taacacagggtcgaaggtcagatgc

SEQ ID NO: 682720 - DNA, 25 bp, Homo sapien
ttagggacgccaagtgctctgtgct

SEQ ID NO: 682721 - DNA, 25 bp, Homo sapien
tctgggtctatgagggctcccacac

SEQ ID NO: 682722 - DNA, 25 bp, Homo sapien
ggcggaaagagatggcacagaatta

SEQ ID NO: 682723 - DNA, 25 bp, Homo sapien
gaattaagagtgattgtgactgggt

SEQ ID NO: 682724 - DNA, 25 bp, Homo sapien
agcaattggcacaattacggatcac

SEQ ID NO: 682725 - DNA, 25 bp, Homo sapien
aaaaggagcaattggcacaattacg

SEQ ID NO: 682726 - DNA, 25 bp, Homo sapien
ttggaaagttgcattatcaccaagg

SEQ ID NO: 682727 - DNA, 25 bp, Homo sapien
ggaaagttgcattatcaccaaggcc

SEQ ID NO: 682728 - DNA, 25 bp, Homo sapien
aaagttgcattatcaccaaggcccc

SEQ ID NO: 682729 - DNA, 25 bp, Homo sapien
acccactctcgacactgtggaacat

SEQ ID NO: 682730 - DNA, 25 bp, Homo sapien
ctcaatcatgattcagaatcttaga

SEQ ID NO: 682731 - DNA, 25 bp, Homo sapien
ttttctcaatcatgattcagaatct

SEQ ID NO: 682732 - DNA, 25 bp, Homo sapien
ttctcaatcatgattcagaatctta

SEQ ID NO: 682733 - DNA, 25 bp, Homo sapien
caatcatgattcagaatcttagaaa

SEQ ID NO: 682734 - DNA, 25 bp, Homo sapien
ttaaagcctccagagatgccaacag

SEQ ID NO: 682735 - DNA, 25 bp, Homo sapien
gtgggcaacgggcattaaagcctcc

SEQ ID NO: 682736 - DNA, 25 bp, Homo sapien
ctttgcacagccctaaaacaaatac

SEQ ID NO: 682737 - DNA, 25 bp, Homo sapien
cttgcttctcagatcatcagcatct

SEQ ID NO: 682738 - DNA, 25 bp, Homo sapien
gaattccatcaaatacccacaggtt

SEQ ID NO: 682739 - DNA, 25 bp, Homo sapien
ggttcaaatgtcaacagtcacggat

SEQ ID NO: 682740 - DNA, 25 bp, Homo sapien
tatggcacaagtccaagtagatcag

SEQ ID NO: 682741 - DNA, 25 bp, Homo sapien
tattccacagtatcattcccaaagg

SEQ ID NO: 682742 - DNA, 25 bp, Homo sapien
actcaagcgttcttccatttgtgaa

SEQ ID NO: 682743 - DNA, 25 bp, Homo sapien
tcactgatacttgcaaattggtcca

SEQ ID NO: 682744 - DNA, 25 bp, Homo sapien
cacagaagatgacactcaagcgttc

SEQ ID NO: 682745 - DNA, 25 bp, Homo sapien
ccaggaaccgcaggctcactgatac

SEQ ID NO: 682746 - DNA, 25 bp, Homo sapien
tacacgggagtcacgttgtggcaga

SEQ ID NO: 682747 - DNA, 25 bp, Homo sapien
gagtcttcgtactgcttctcggcct

SEQ ID NO: 682748 - DNA, 25 bp, Homo sapien
gcctgatcagtcacaccgttggact

SEQ ID NO: 682749 - DNA, 25 bp, Homo sapien
tggtatacgcggcaggagtcttcgt

SEQ ID NO: 682750 - DNA, 25 bp, Homo sapien
catggtccgccggaccttagtggtg

SEQ ID NO: 682751 - DNA, 25 bp, Homo sapien
ttagtggtgagcgttgggcccttct

SEQ ID NO: 682752 - DNA, 25 bp, Homo sapien
tccgccggaccttagtggtgagcgt

SEQ ID NO: 682753 - DNA, 25 bp, Homo sapien
tgggcccttctgagccggtgggtcc

SEQ ID NO: 682754 - DNA, 25 bp, Homo sapien
gatcccggtagttcagagcagggct

SEQ ID NO: 682755 - DNA, 25 bp, Homo sapien
gattgagtgaatctatcctccctgg

SEQ ID NO: 682756 - DNA, 25 bp, Homo sapien
aaagggatcccggtagttcagagca

SEQ ID NO: 682757 - DNA, 25 bp, Homo sapien
tgcactgaaagggatcccggtagtt

SEQ ID NO: 682758 - DNA, 25 bp, Homo sapien
ccttgcaggctgactttagacccca

SEQ ID NO: 682759 - DNA, 25 bp, Homo sapien
ttcgggtgtaatggtaactgtgctc

SEQ ID NO: 682760 - DNA, 25 bp, Homo sapien
gctcttgcctgagaggcagctccat

SEQ ID NO: 682761 - DNA, 25 bp, Homo sapien
cagctccatggcatacaactggcct

SEQ ID NO: 682762 - DNA, 25 bp, Homo sapien
tgatggtaccgagaggctcctgaga

SEQ ID NO: 682763 - DNA, 25 bp, Homo sapien
actgtgcagggggtcacggcagaca

SEQ ID NO: 682764 - DNA, 25 bp, Homo sapien
acaggcgaggaagggggtcaccttg

SEQ ID NO: 682765 - DNA, 25 bp, Homo sapien
gcaagaaggaaagccgggcagctac

SEQ ID NO: 682766 - DNA, 25 bp, Homo sapien
aaatgtggctttgtacttcgtccat

SEQ ID NO: 682767 - DNA, 25 bp, Homo sapien
gaaaatcatctcgttctgggtaaga

SEQ ID NO: 682768 - DNA, 25 bp, Homo sapien
ccattgagtcgaggccgtaggctac

SEQ ID NO: 682769 - DNA, 25 bp, Homo sapien
cgagatggagccgtttgaaaatcat

SEQ ID NO: 682770 - DNA, 25 bp, Homo sapien
aatcgtgctggagcgaaccacggtc

SEQ ID NO: 682771 - DNA, 25 bp, Homo sapien
ccagctgtacacgatcttgcccatg

SEQ ID NO: 682772 - DNA, 25 bp, Homo sapien
agtcccttcgaatcacccagctgta

SEQ ID NO: 682773 - DNA, 25 bp, Homo sapien
gagtaagtacgaaatcctgcccagc

SEQ ID NO: 682774 - DNA, 25 bp, Homo sapien
tttgcttagcataacgttctcaagg

SEQ ID NO: 682775 - DNA, 25 bp, Homo sapien
cactgtaaggtgcattagaatttcc

SEQ ID NO: 682776 - DNA, 25 bp, Homo sapien
ctggctagccctgggacaaatgaag

SEQ ID NO: 682777 - DNA, 25 bp, Homo sapien
tagaactttgaaggctaccacgtca

SEQ ID NO: 682778 - DNA, 25 bp, Homo sapien
ttatcacttggtagtgagagcagag

SEQ ID NO: 682779 - DNA, 25 bp, Homo sapien
tctaaaaaatgatgggacacacata

SEQ ID NO: 682780 - DNA, 25 bp, Homo sapien
cttttgctaatacaggccttcactt

SEQ ID NO: 682781 - DNA, 25 bp, Homo sapien
gtatatcccatactattaacaatga

SEQ ID NO: 682782 - DNA, 25 bp, Homo sapien
ctgaagggcaaccatgaccagcgag

SEQ ID NO: 682783 - DNA, 25 bp, Homo sapien
gaagcggatgatctgcaggtaccaa

SEQ ID NO: 682784 - DNA, 25 bp, Homo sapien
tgcaggtaccaacggcctgcaaagt

SEQ ID NO: 682785 - DNA, 25 bp, Homo sapien
tcacttccaagtcgaacaggccgat

SEQ ID NO: 682786 - DNA, 25 bp, Homo sapien
acttcggggatttgaggtattcatg

SEQ ID NO: 682787 - DNA, 25 bp, Homo sapien
ttcggggatttgaggtattcatgac

SEQ ID NO: 682788 - DNA, 25 bp, Homo sapien
tacttcggggatttgaggtattcat

SEQ ID NO: 682789 - DNA, 25 bp, Homo sapien
ttacttcggggatttgaggtattca

SEQ ID NO: 682790 - DNA, 25 bp, Homo sapien
gccagtgtaaagaacaacacccaca

SEQ ID NO: 682791 - DNA, 25 bp, Homo sapien
ccagtgtaaagaacaacacccacaa

SEQ ID NO: 682792 - DNA, 25 bp, Homo sapien
tctgccagtgtaaagaacaacaccc

SEQ ID NO: 682793 - DNA, 25 bp, Homo sapien
tgccagtgtaaagaacaacacccac

SEQ ID NO: 682794 - DNA, 25 bp, Homo sapien
ttcctcaacctgggctctgtaacat

SEQ ID NO: 682795 - DNA, 25 bp, Homo sapien
tcctcaacctgggctctgtaacatc

SEQ ID NO: 682796 - DNA, 25 bp, Homo sapien
caggatcctaatcgagtgtctacta

SEQ ID NO: 682797 - DNA, 25 bp, Homo sapien
gccacacaggatcctaatcgagtgt

SEQ ID NO: 682798 - DNA, 25 bp, Homo sapien
aagtagtgcatgtgtggatggtgac

SEQ ID NO: 682799 - DNA, 25 bp, Homo sapien
tactccagggatagtttgtgctgct

SEQ ID NO: 682800 - DNA, 25 bp, Homo sapien
tatgctcaggctctcgctgatcggg

SEQ ID NO: 682801 - DNA, 25 bp, Homo sapien
cagcgtgttctctatgctcaggctc

SEQ ID NO: 682802 - DNA, 25 bp, Homo sapien
gcccacagcgtgttctctatgctca

SEQ ID NO: 682803 - DNA, 25 bp, Homo sapien
tgccagcccacagcgtgttctctat

SEQ ID NO: 682804 - DNA, 25 bp, Homo sapien
cccagtttggaagccgacggctcca

SEQ ID NO: 682805 - DNA, 25 bp, Homo sapien
gatagaaagacaggctccccccgat

SEQ ID NO: 682806 - DNA, 25 bp, Homo sapien
aggctccccccgatgaacctggaag

SEQ ID NO: 682807 - DNA, 25 bp, Homo sapien
gcttctagcatggtccgctggagat

SEQ ID NO: 682808 - DNA, 25 bp, Homo sapien
tgacaggatcccatgtgaaggaagc

SEQ ID NO: 682809 - DNA, 25 bp, Homo sapien
gtcaatatttggctcttctgcgtac

SEQ ID NO: 682810 - DNA, 25 bp, Homo sapien
gctcttctgcgtacacatacgatcg

SEQ ID NO: 682811 - DNA, 25 bp, Homo sapien
gaagttgtgaatgtcaatatttggc

SEQ ID NO: 682812 - DNA, 25 bp, Homo sapien
catacgatcgaatctgaagaaggtc

SEQ ID NO: 682813 - DNA, 25 bp, Homo sapien
tcacgtcaggaaagccaactaggcc

SEQ ID NO: 682814 - DNA, 25 bp, Homo sapien
tgctaagataggttgcccgcatggg

SEQ ID NO: 682815 - DNA, 25 bp, Homo sapien
caattttggtgaggccccttggcaa

SEQ ID NO: 682816 - DNA, 25 bp, Homo sapien
ggtttttagcttcccgcaggagagc

SEQ ID NO: 682817 - DNA, 25 bp, Homo sapien
gtggggagcctctgcgtgcaggcca

SEQ ID NO: 682818 - DNA, 25 bp, Homo sapien
gccgtggggagcctctgcgtgcagg

SEQ ID NO: 682819 - DNA, 25 bp, Homo sapien
ggcggccgtggggagcctctgcgtg

SEQ ID NO: 682820 - DNA, 25 bp, Homo sapien
cggccgtggggagcctctgcgtgca

SEQ ID NO: 682821 - DNA, 25 bp, Homo sapien
gggaagccgcagcttccagtccgtc

SEQ ID NO: 682822 - DNA, 25 bp, Homo sapien
tgatccgtccgcaagaagcatgacc

SEQ ID NO: 682823 - DNA, 25 bp, Homo sapien
catccagctgatccgtccgcaagaa

SEQ ID NO: 682824 - DNA, 25 bp, Homo sapien
ggaagccgcagcttccagtccgtct

SEQ ID NO: 682825 - DNA, 25 bp, Homo sapien
caattaaagagctgattcgtgcgca

SEQ ID NO: 682826 - DNA, 25 bp, Homo sapien
gatcgatccaggcaagcactaggtc

SEQ ID NO: 682827 - DNA, 25 bp, Homo sapien
tacagatccgtgcaagtagtcagct

SEQ ID NO: 682828 - DNA, 25 bp, Homo sapien
ttcgtgcgcagagttcagaacagga

SEQ ID NO: 682829 - DNA, 25 bp, Homo sapien
atcatgtcggcagggacccgctggt

SEQ ID NO: 682830 - DNA, 25 bp, Homo sapien
atgtcctcaggaagatcatgtcggc

SEQ ID NO: 682831 - DNA, 25 bp, Homo sapien
tgatgtcctcaggaagatcatgtcg

SEQ ID NO: 682832 - DNA, 25 bp, Homo sapien
gtcctcaggaagatcatgtcggcag

SEQ ID NO: 682833 - DNA, 25 bp, Homo sapien
gcaagctaaaatggctcaaagggta

SEQ ID NO: 682834 - DNA, 25 bp, Homo sapien
taagcaggatttctggctaaccaac

SEQ ID NO: 682835 - DNA, 25 bp, Homo sapien
taggacccatgaagtggtatccaca

SEQ ID NO: 682836 - DNA, 25 bp, Homo sapien
cacaatggttaggtcaggaaatgca

SEQ ID NO: 682837 - DNA, 25 bp, Homo sapien
cttggatgttagaactcttcacctt

SEQ ID NO: 682838 - DNA, 25 bp, Homo sapien
tctccaacttggatgttagaactct

SEQ ID NO: 682839 - DNA, 25 bp, Homo sapien
caacgatgataaggtctccaacttg

SEQ ID NO: 682840 - DNA, 25 bp, Homo sapien
cttttcaacgatgataaggtctcca

SEQ ID NO: 682841 - DNA, 25 bp, Homo sapien
ctgcaaagcagcaggttcaagatac

SEQ ID NO: 682842 - DNA, 25 bp, Homo sapien
tgcaaagcagcaggttcaagataca

SEQ ID NO: 682843 - DNA, 25 bp, Homo sapien
caataacagacgaaaggcaccctga

SEQ ID NO: 682844 - DNA, 25 bp, Homo sapien
catgcacacggccaaaggctagaac

SEQ ID NO: 682845 - DNA, 25 bp, Homo sapien
ggctagaactccttcagcaagacgt

SEQ ID NO: 682846 - DNA, 25 bp, Homo sapien
caagacgtaaagcatcaggaaagca

SEQ ID NO: 682847 - DNA, 25 bp, Homo sapien
catcagccaacagggctcttgctcc

SEQ ID NO: 682848 - DNA, 25 bp, Homo sapien
cagccaacagggctcttgctccacc

SEQ ID NO: 682849 - DNA, 25 bp, Homo sapien
atcagccaacagggctcttgctcca

SEQ ID NO: 682850 - DNA, 25 bp, Homo sapien
ccatcagccaacagggctcttgctc

SEQ ID NO: 682851 - DNA, 25 bp, Homo sapien
taagggaggaagcaaggagccacac

SEQ ID NO: 682852 - DNA, 25 bp, Homo sapien
aagggaggaagcaaggagccacacc

SEQ ID NO: 682853 - DNA, 25 bp, Homo sapien
ctaagggaggaagcaaggagccaca

SEQ ID NO: 682854 - DNA, 25 bp, Homo sapien
gggaggaagcaaggagccacaccat

SEQ ID NO: 682855 - DNA, 25 bp, Homo sapien
acctggggttctgtagcctgccacc

SEQ ID NO: 682856 - DNA, 25 bp, Homo sapien
aaacttcgcctaattgggaacagca

SEQ ID NO: 682857 - DNA, 25 bp, Homo sapien
tgcagctttgcattcgacttgatgc

SEQ ID NO: 682858 - DNA, 25 bp, Homo sapien
gggaacagcaagctgctgttggaac

SEQ ID NO: 682859 - DNA, 25 bp, Homo sapien
cttaggggacaatcgaatagacttt

SEQ ID NO: 682860 - DNA, 25 bp, Homo sapien
aaggcatagcctttattcccctcca

SEQ ID NO: 682861 - DNA, 25 bp, Homo sapien
gcattaatccctgaatgggatcagt

SEQ ID NO: 682862 - DNA, 25 bp, Homo sapien
tgggatcagtcatcttaggggacaa

SEQ ID NO: 682863 - DNA, 25 bp, Homo sapien
tgtcagcggcccgtgattgagctgc

SEQ ID NO: 682864 - DNA, 25 bp, Homo sapien
ggcccgtgattgagctgcaaccctg

SEQ ID NO: 682865 - DNA, 25 bp, Homo sapien
ttctcccctgactgtcagcggcccg

SEQ ID NO: 682866 - DNA, 25 bp, Homo sapien
ccctgactgtcagcggcccgtgatt

SEQ ID NO: 682867 - DNA, 25 bp, Homo sapien
ccggctgtagacctgggagttgact

SEQ ID NO: 682868 - DNA, 25 bp, Homo sapien
ggagttgacttccttgtcccgcacg

SEQ ID NO: 682869 - DNA, 25 bp, Homo sapien
tccaccgcctcacggatgacagtga

SEQ ID NO: 682870 - DNA, 25 bp, Homo sapien
tgtcccgcacgtagcatcggatctc

SEQ ID NO: 682871 - DNA, 25 bp, Homo sapien
tacagtcattcgttttccttgtcat

SEQ ID NO: 682872 - DNA, 25 bp, Homo sapien
tgtttacagtcattcgttttccttg

SEQ ID NO: 682873 - DNA, 25 bp, Homo sapien
ttacagtcattcgttttccttgtca

SEQ ID NO: 682874 - DNA, 25 bp, Homo sapien
tttacagtcattcgttttccttgtc

SEQ ID NO: 682875 - DNA, 25 bp, Homo sapien
caccaagtctcatttcgggaacaaa

SEQ ID NO: 682876 - DNA, 25 bp, Homo sapien
gggaacccagtaggtatagagtgca

SEQ ID NO: 682877 - DNA, 25 bp, Homo sapien
taggtatagagtgcaccaagtctca

SEQ ID NO: 682878 - DNA, 25 bp, Homo sapien
tagagtgcaccaagtctcatttcgg

SEQ ID NO: 682879 - DNA, 25 bp, Homo sapien
agtatttgaactggttgaacagcac

SEQ ID NO: 682880 - DNA, 25 bp, Homo sapien
aagtatttgaactggttgaacagca

SEQ ID NO: 682881 - DNA, 25 bp, Homo sapien
aaagtatttgaactggttgaacagc

SEQ ID NO: 682882 - DNA, 25 bp, Homo sapien
caggaagaaaggtgaagaaattgta

SEQ ID NO: 682883 - DNA, 25 bp, Homo sapien
ctgattgttgatgacattccgagga

SEQ ID NO: 682884 - DNA, 25 bp, Homo sapien
attgttgatgacattccgaggatac

SEQ ID NO: 682885 - DNA, 25 bp, Homo sapien
agaaattgtacttctgattgttgat

SEQ ID NO: 682886 - DNA, 25 bp, Homo sapien
gccccagccagacagtgcggggcct

SEQ ID NO: 682887 - DNA, 25 bp, Homo sapien
tgccccagccagacagtgcggggcc

SEQ ID NO: 682888 - DNA, 25 bp, Homo sapien
ccccagccagacagtgcggggcctg

SEQ ID NO: 682889 - DNA, 25 bp, Homo sapien
cccagccagacagtgcggggcctgg

SEQ ID NO: 682890 - DNA, 25 bp, Homo sapien
tagggtactagggtacagactctcg

SEQ ID NO: 682891 - DNA, 25 bp, Homo sapien
gaaatgcacaatctctaaaatgtca

SEQ ID NO: 682892 - DNA, 25 bp, Homo sapien
tcatccaggcaagactatagagcag

SEQ ID NO: 682893 - DNA, 25 bp, Homo sapien
tatgttatagatgtagaaatgcaca

SEQ ID NO: 682894 - DNA, 25 bp, Homo sapien
cctgcgtgttgcatgcatggacttc

SEQ ID NO: 682895 - DNA, 25 bp, Homo sapien
actgaggagtggatttatacatgca

SEQ ID NO: 682896 - DNA, 25 bp, Homo sapien
gtcacgttggtgttgtgggtgctgc

SEQ ID NO: 682897 - DNA, 25 bp, Homo sapien
gctgttgttccttaacaccaaactg

SEQ ID NO: 682898 - DNA, 25 bp, Homo sapien
catcccacattccagacaggctggg

SEQ ID NO: 682899 - DNA, 25 bp, Homo sapien
gccatgacaaataaacttccatccc

SEQ ID NO: 682900 - DNA, 25 bp, Homo sapien
ctgccatgacaaataaacttccatc

SEQ ID NO: 682901 - DNA, 25 bp, Homo sapien
ttccatcccacattccagacaggct

SEQ ID NO: 682902 - DNA, 25 bp, Homo sapien
aagtctgaacacatccctgccacag

SEQ ID NO: 682903 - DNA, 25 bp, Homo sapien
gtagagacatatacactccagggaa

SEQ ID NO: 682904 - DNA, 25 bp, Homo sapien
caaaacctaagtcaggaaggatgca

SEQ ID NO: 682905 - DNA, 25 bp, Homo sapien
ggagatgcacgaggatgttcacagc

SEQ ID NO: 682906 - DNA, 25 bp, Homo sapien
tctgctgtccctttaccaagccacc

SEQ ID NO: 682907 - DNA, 25 bp, Homo sapien
tctctgctgtccctttaccaagcca

SEQ ID NO: 682908 - DNA, 25 bp, Homo sapien
gctgtccctttaccaagccaccctc

SEQ ID NO: 682909 - DNA, 25 bp, Homo sapien
atctctgctgtccctttaccaagcc

SEQ ID NO: 682910 - DNA, 25 bp, Homo sapien
gtgacagcgcctctaaagattagat

SEQ ID NO: 682911 - DNA, 25 bp, Homo sapien
tgggtgacagcgcctctaaagatta

SEQ ID NO: 682912 - DNA, 25 bp, Homo sapien
acaaactacagtactattcaattta

SEQ ID NO: 682913 - DNA, 25 bp, Homo sapien
aacaaactacagtactattcaattt

SEQ ID NO: 682914 - DNA, 25 bp, Homo sapien
tatggcagctggcactgctatggga

SEQ ID NO: 682915 - DNA, 25 bp, Homo sapien
gctggcactgctatgggagcgtcca

SEQ ID NO: 682916 - DNA, 25 bp, Homo sapien
cctccaagcctgctatggcagctgg

SEQ ID NO: 682917 - DNA, 25 bp, Homo sapien
agcctgctatggcagctggcactgc

SEQ ID NO: 682918 - DNA, 25 bp, Homo sapien
gtaactgagaccacaaacatgcaat

SEQ ID NO: 682919 - DNA, 25 bp, Homo sapien
aactgagaccacaaacatgcaatac

SEQ ID NO: 682920 - DNA, 25 bp, Homo sapien
gagaccacaaacatgcaataccatg

SEQ ID NO: 682921 - DNA, 25 bp, Homo sapien
tgagaccacaaacatgcaataccat

SEQ ID NO: 682922 - DNA, 25 bp, Homo sapien
tgttggtgcaactctctcctccagc

SEQ ID NO: 682923 - DNA, 25 bp, Homo sapien
tagtctggttttggtcagcacaagg

SEQ ID NO: 682924 - DNA, 25 bp, Homo sapien
cactgttctcatcccaggggggcaa

SEQ ID NO: 682925 - DNA, 25 bp, Homo sapien
gcaagggaggacctctgtaactgaa

SEQ ID NO: 682926 - DNA, 25 bp, Homo sapien
ggaagacggcgaggcgcaaaatacc

SEQ ID NO: 682927 - DNA, 25 bp, Homo sapien
tgccatcctccgaacaggaagacgg

SEQ ID NO: 682928 - DNA, 25 bp, Homo sapien
ctatggcaggcgatacgagagcccc

SEQ ID NO: 682929 - DNA, 25 bp, Homo sapien
cagaaaaacccttgcctgttccgcg

SEQ ID NO: 682930 - DNA, 25 bp, Homo sapien
gctgcagcgggatgttgtccgtcat

SEQ ID NO: 682931 - DNA, 25 bp, Homo sapien
ctgtccatccgcttcttctggcgca

SEQ ID NO: 682932 - DNA, 25 bp, Homo sapien
ttcttctggcgcaccggctgcagcg

SEQ ID NO: 682933 - DNA, 25 bp, Homo sapien
caccggctgcagcgggatgttgtcc

SEQ ID NO: 682934 - DNA, 25 bp, Homo sapien
gcccgaccgacggacacgggcgcac

SEQ ID NO: 682935 - DNA, 25 bp, Homo sapien
agcgagggggcgagctcgcgagcgc

SEQ ID NO: 682936 - DNA, 25 bp, Homo sapien
acgggcgcaccatgggcccgagctc

SEQ ID NO: 682937 - DNA, 25 bp, Homo sapien
agggggcgagctcgcgagcgccggg

SEQ ID NO: 682938 - DNA, 25 bp, Homo sapien
ccgcaaaatcccacattcacaatca

SEQ ID NO: 682939 - DNA, 25 bp, Homo sapien
gcaaaatcccacattcacaatcaca

SEQ ID NO: 682940 - DNA, 25 bp, Homo sapien
cgcaccccccgcaaaatcccacatt

SEQ ID NO: 682941 - DNA, 25 bp, Homo sapien
tcccacattcacaatcacatcccag

SEQ ID NO: 682942 - DNA, 25 bp, Homo sapien
tcttcaatagagtaggcactggcaa

SEQ ID NO: 682943 - DNA, 25 bp, Homo sapien
tgaacctgtgatgggaaacacgccc

SEQ ID NO: 682944 - DNA, 25 bp, Homo sapien
tcaactcttaggctttagacagggc

SEQ ID NO: 682945 - DNA, 25 bp, Homo sapien
cagggcctgggaatacttcagcggt

SEQ ID NO: 682946 - DNA, 25 bp, Homo sapien
gaggttgtggtcacaaccaacgtag

SEQ ID NO: 682947 - DNA, 25 bp, Homo sapien
agcaacaatcgtgattgtagcactt

SEQ ID NO: 682948 - DNA, 25 bp, Homo sapien
accaacgtagtaaacatcatttgca

SEQ ID NO: 682949 - DNA, 25 bp, Homo sapien
agagatttcactgtgtctgcattgc

SEQ ID NO: 682950 - DNA, 25 bp, Homo sapien
catctgcactgatacccgactggga

SEQ ID NO: 682951 - DNA, 25 bp, Homo sapien
tgggaacgccgtcagtagcacttgg

SEQ ID NO: 682952 - DNA, 25 bp, Homo sapien
tcgccccgtgtgtcatgtagtgaac

SEQ ID NO: 682953 - DNA, 25 bp, Homo sapien
gcgttattcacaacggaggtggccc

SEQ ID NO: 682954 - DNA, 25 bp, Homo sapien
tgaagagcgctagcagacgagaagt

SEQ ID NO: 682955 - DNA, 25 bp, Homo sapien
ggacaatgtcgagggtcccacaaat

SEQ ID NO: 682956 - DNA, 25 bp, Homo sapien
ttcaaccttgacataggtcggcggg

SEQ ID NO: 682957 - DNA, 25 bp, Homo sapien
aaagctcgcccacaaatgttgcaca

SEQ ID NO: 682958 - DNA, 25 bp, Homo sapien
tcatcatggcagatagcgccggtgc

SEQ ID NO: 682959 - DNA, 25 bp, Homo sapien
catcatggcaaaccctagcgtgggt

SEQ ID NO: 682960 - DNA, 25 bp, Homo sapien
gctcagaacccgtaaagtcacaggg

SEQ ID NO: 682961 - DNA, 25 bp, Homo sapien
gaccgcccatgtgcatccgaatatg

SEQ ID NO: 682962 - DNA, 25 bp, Homo sapien
cattcgttgggatcagtggtggcct

SEQ ID NO: 682963 - DNA, 25 bp, Homo sapien
gacagcttaagactcggtggcaaat

SEQ ID NO: 682964 - DNA, 25 bp, Homo sapien
ggtagaaaaggctcggccacagatc

SEQ ID NO: 682965 - DNA, 25 bp, Homo sapien
cccggtgtgggtgcgataatgcatc

SEQ ID NO: 682966 - DNA, 25 bp, Homo sapien
caatttcagggtctctgaccctggc

SEQ ID NO: 682967 - DNA, 25 bp, Homo sapien
tgaccctggctcaggggtcccactc

SEQ ID NO: 682968 - DNA, 25 bp, Homo sapien
ctgcaatttcagggtctctgaccct

SEQ ID NO: 682969 - DNA, 25 bp, Homo sapien
ctgaccctggctcaggggtcccact

SEQ ID NO: 682970 - DNA, 25 bp, Homo sapien
cccagggagtgtgggtccaccctca

SEQ ID NO: 682971 - DNA, 25 bp, Homo sapien
ccagcccttggggaattatagtttg

SEQ ID NO: 682972 - DNA, 25 bp, Homo sapien
cttggaagccaccagcccttgggga

SEQ ID NO: 682973 - DNA, 25 bp, Homo sapien
tcccaccccagggagtgtgggtcca

SEQ ID NO: 682974 - DNA, 25 bp, Homo sapien
tctgaggtagccctacagaggtggt

SEQ ID NO: 682975 - DNA, 25 bp, Homo sapien
gccactttgtcctggaactcggcaa

SEQ ID NO: 682976 - DNA, 25 bp, Homo sapien
tagtccccgaagaaagattctgagg

SEQ ID NO: 682977 - DNA, 25 bp, Homo sapien
tgaggtccttgggattagtccccga

SEQ ID NO: 682978 - DNA, 25 bp, Homo sapien
tgtgggagcggaggtggatctgcaa

SEQ ID NO: 682979 - DNA, 25 bp, Homo sapien
ggagcggaggtggatctgcaaggag

SEQ ID NO: 682980 - DNA, 25 bp, Homo sapien
tgggagcggaggtggatctgcaagg

SEQ ID NO: 682981 - DNA, 25 bp, Homo sapien
agcggaggtggatctgcaaggagct

SEQ ID NO: 682982 - DNA, 25 bp, Homo sapien
tcttggatgtgtctagcgccacagt

SEQ ID NO: 682983 - DNA, 25 bp, Homo sapien
aaggtcttcagagtgtcggcccctg

SEQ ID NO: 682984 - DNA, 25 bp, Homo sapien
tttgggtttgacatccaccgcggag

SEQ ID NO: 682985 - DNA, 25 bp, Homo sapien
gcttcagagtgaagggtgccagccc

SEQ ID NO: 682986 - DNA, 25 bp, Homo sapien
atgcggatctgctcggtgagctgga

SEQ ID NO: 682987 - DNA, 25 bp, Homo sapien
gatgcggatctgctcggtgagctgg

SEQ ID NO: 682988 - DNA, 25 bp, Homo sapien
gaagaactccgcacagcatttctca

SEQ ID NO: 682989 - DNA, 25 bp, Homo sapien
cctgtgacagtccttactgccggga

SEQ ID NO: 682990 - DNA, 25 bp, Homo sapien
ttggtgccccgtagtgcctgcaagg

SEQ ID NO: 682991 - DNA, 25 bp, Homo sapien
tttaggtacaccacagactccgcat

SEQ ID NO: 682992 - DNA, 25 bp, Homo sapien
tacacattgcaactccgaacttggg

SEQ ID NO: 682993 - DNA, 25 bp, Homo sapien
gggttagtgccagcctacacattgc

SEQ ID NO: 682994 - DNA, 25 bp, Homo sapien
tcaggtataccccatcatcaagata

SEQ ID NO: 682995 - DNA, 25 bp, Homo sapien
tgcctggaagtctctcgaagctact

SEQ ID NO: 682996 - DNA, 25 bp, Homo sapien
tcacacgagcatacaatgatctagg

SEQ ID NO: 682997 - DNA, 25 bp, Homo sapien
agcctataaatctaaaccacacaag

SEQ ID NO: 682998 - DNA, 25 bp, Homo sapien
cacaagacattcacacgagcataca

SEQ ID NO: 682999 - DNA, 25 bp, Homo sapien
taaaccacacaagacattcacacga

SEQ ID NO: 683000 - DNA, 25 bp, Homo sapien
tatgcagaatttctgtatgccacag

SEQ ID NO: 683001 - DNA, 25 bp, Homo sapien
ttaagtgaaagaaacgggttgcgca

SEQ ID NO: 683002 - DNA, 25 bp, Homo sapien
ttggcccacccacccatagtgtgag

SEQ ID NO: 683003 - DNA, 25 bp, Homo sapien
tggcagcgtccatgtatagttcaag

SEQ ID NO: 683004 - DNA, 25 bp, Homo sapien
gggtcacaatatgaagtcttgcaag

SEQ ID NO: 683005 - DNA, 25 bp, Homo sapien
gaagtcttgcaaggtatgtgtaggc

SEQ ID NO: 683006 - DNA, 25 bp, Homo sapien
ttatttcagactgggtcacaatatg

SEQ ID NO: 683007 - DNA, 25 bp, Homo sapien
agtcttgcaaggtatgtgtaggctg

SEQ ID NO: 683008 - DNA, 25 bp, Homo sapien
taatcgcgagatgacaacctcgtga

SEQ ID NO: 683009 - DNA, 25 bp, Homo sapien
gcctactgggcacgcgtaatcgcga

SEQ ID NO: 683010 - DNA, 25 bp, Homo sapien
cccaatggtgaaaagatgagcccca

SEQ ID NO: 683011 - DNA, 25 bp, Homo sapien
tattgataggcaagtcggcacaccc

SEQ ID NO: 683012 - DNA, 25 bp, Homo sapien
gtatacacaagcttgcctcttctgt

SEQ ID NO: 683013 - DNA, 25 bp, Homo sapien
tatacacaagcttgcctcttctgta

SEQ ID NO: 683014 - DNA, 25 bp, Homo sapien
tgtatacacaagcttgcctcttctg

SEQ ID NO: 683015 - DNA, 25 bp, Homo sapien
ctgtatacacaagcttgcctcttct

SEQ ID NO: 683016 - DNA, 25 bp, Homo sapien
agcaacatcccacttgactcttaaa

SEQ ID NO: 683017 - DNA, 25 bp, Homo sapien
aagtgcttctacatccaggccacca

SEQ ID NO: 683018 - DNA, 25 bp, Homo sapien
aggccaccactggtaaataccgcaa

SEQ ID NO: 683019 - DNA, 25 bp, Homo sapien
ccacttgactcttaaaacagcagca

SEQ ID NO: 683020 - DNA, 25 bp, Homo sapien
ctgtatttgccaaggagtaagaaga

SEQ ID NO: 683021 - DNA, 25 bp, Homo sapien
gtatttgccaaggagtaagaagatt

SEQ ID NO: 683022 - DNA, 25 bp, Homo sapien
tgtatttgccaaggagtaagaagat

SEQ ID NO: 683023 - DNA, 25 bp, Homo sapien
aattttaggaatgttatcttgcagc

SEQ ID NO: 683024 - DNA, 25 bp, Homo sapien
cgaattttaggaatgttatcttgca

SEQ ID NO: 683025 - DNA, 25 bp, Homo sapien
ccgaattttaggaatgttatcttgc

SEQ ID NO: 683026 - DNA, 25 bp, Homo sapien
cccgaattttaggaatgttatcttg

SEQ ID NO: 683027 - DNA, 25 bp, Homo sapien
taggaagtcggaaatcaaagatggc

SEQ ID NO: 683028 - DNA, 25 bp, Homo sapien
ttaggaagtcggaaatcaaagatgg

SEQ ID NO: 683029 - DNA, 25 bp, Homo sapien
gggtttcgcctgcttgcgcctcgac

SEQ ID NO: 683030 - DNA, 25 bp, Homo sapien
catctgcaaactccggggtctgctg

SEQ ID NO: 683031 - DNA, 25 bp, Homo sapien
ctggggtttcgcctgcttgcgcctc

SEQ ID NO: 683032 - DNA, 25 bp, Homo sapien
gtttcgcctgcttgcgcctcgacat

SEQ ID NO: 683033 - DNA, 25 bp, Homo sapien
tatcaataatgcattgcgatttatc

SEQ ID NO: 683034 - DNA, 25 bp, Homo sapien
ccgggagagccgcagttatttgccc

SEQ ID NO: 683035 - DNA, 25 bp, Homo sapien
tattattatcaataatgcattgcga

SEQ ID NO: 683036 - DNA, 25 bp, Homo sapien
ccgccacaaattcctggagttggga

SEQ ID NO: 683037 - DNA, 25 bp, Homo sapien
cagttttcacatctacacgcacaca

SEQ ID NO: 683038 - DNA, 25 bp, Homo sapien
caaagattacttggtaaggttgatg

SEQ ID NO: 683039 - DNA, 25 bp, Homo sapien
tcagttttcacatctacacgcacac

SEQ ID NO: 683040 - DNA, 25 bp, Homo sapien
ttttcacatctacacgcacacacat

SEQ ID NO: 683041 - DNA, 25 bp, Homo sapien
ctttccataactgctctgggcatgc

SEQ ID NO: 683042 - DNA, 25 bp, Homo sapien
tgtgcagatataaaccctccctcca

SEQ ID NO: 683043 - DNA, 25 bp, Homo sapien
ctgggcatgcgtctttgtttggcat

SEQ ID NO: 683044 - DNA, 25 bp, Homo sapien
acttcattgtaagggactgtgcaga

SEQ ID NO: 683045 - DNA, 25 bp, Homo sapien
gcagaggccgacatccatgagttta

SEQ ID NO: 683046 - DNA, 25 bp, Homo sapien
gaagttgcatgcacaattcctgccg

SEQ ID NO: 683047 - DNA, 25 bp, Homo sapien
taaatacttgcaagagacgaacggc

SEQ ID NO: 683048 - DNA, 25 bp, Homo sapien
tacaattcaacgcagagcagaggcc

SEQ ID NO: 683049 - DNA, 25 bp, Homo sapien
ctcattaagatcaggggtccagggt

SEQ ID NO: 683050 - DNA, 25 bp, Homo sapien
attaagatcaggggtccagggtctg

SEQ ID NO: 683051 - DNA, 25 bp, Homo sapien
gctcattaagatcaggggtccaggg

SEQ ID NO: 683052 - DNA, 25 bp, Homo sapien
tcattaagatcaggggtccagggtc

SEQ ID NO: 683053 - DNA, 25 bp, Homo sapien
ctggcacgttgctcccatccccatg

SEQ ID NO: 683054 - DNA, 25 bp, Homo sapien
gctgccatgcctggcacgttgctcc

SEQ ID NO: 683055 - DNA, 25 bp, Homo sapien
catccccatggtccaagggtcctct

SEQ ID NO: 683056 - DNA, 25 bp, Homo sapien
gcacgttgctcccatccccatggtc

SEQ ID NO: 683057 - DNA, 25 bp, Homo sapien
caatgcgaacaacttctgaaggtac

SEQ ID NO: 683058 - DNA, 25 bp, Homo sapien
tctttcaaagcaatgcgaacaactt

SEQ ID NO: 683059 - DNA, 25 bp, Homo sapien
aacttctgaaggtactggtctgggc

SEQ ID NO: 683060 - DNA, 25 bp, Homo sapien
acaacttctgaaggtactggtctgg

SEQ ID NO: 683061 - DNA, 25 bp, Homo sapien
ctgggtggcggaagattctatgaac

SEQ ID NO: 683062 - DNA, 25 bp, Homo sapien
tggcggaagattctatgaacaggtc

SEQ ID NO: 683063 - DNA, 25 bp, Homo sapien
ggtggcggaagattctatgaacagg

SEQ ID NO: 683064 - DNA, 25 bp, Homo sapien
tgggtggcggaagattctatgaaca

SEQ ID NO: 683065 - DNA, 25 bp, Homo sapien
ctctgacttgtcctcacgcagcccc

SEQ ID NO: 683066 - DNA, 25 bp, Homo sapien
tcacgcagccccttcaactgagcca

SEQ ID NO: 683067 - DNA, 25 bp, Homo sapien
ctgagccacagtgacgtcccccata

SEQ ID NO: 683068 - DNA, 25 bp, Homo sapien
ccacagtgacgtcccccataggcat

SEQ ID NO: 683069 - DNA, 25 bp, Homo sapien
cctggtgagtcctggtggggtatcg

SEQ ID NO: 683070 - DNA, 25 bp, Homo sapien
gtgagtcctggtggggtatcgtaga

SEQ ID NO: 683071 - DNA, 25 bp, Homo sapien
agtcctggtggggtatcgtagaggc

SEQ ID NO: 683072 - DNA, 25 bp, Homo sapien
tggtggggtatcgtagaggctcaat

SEQ ID NO: 683073 - DNA, 25 bp, Homo sapien
cagccagtcacagattaaccctgct

SEQ ID NO: 683074 - DNA, 25 bp, Homo sapien
gccagtcacagattaaccctgctgc

SEQ ID NO: 683075 - DNA, 25 bp, Homo sapien
agtcacagattaaccctgctgccat

SEQ ID NO: 683076 - DNA, 25 bp, Homo sapien
accagccagtcacagattaaccctg

SEQ ID NO: 683077 - DNA, 25 bp, Homo sapien
ccgatagccgtattgttgatggaaa

SEQ ID NO: 683078 - DNA, 25 bp, Homo sapien
ggattttccttcaagttaccctgca

SEQ ID NO: 683079 - DNA, 25 bp, Homo sapien
ggaagcaaatttacttcgccctctg

SEQ ID NO: 683080 - DNA, 25 bp, Homo sapien
gaaagaatacaatttggccagggaa

SEQ ID NO: 683081 - DNA, 25 bp, Homo sapien
aatgtagaacccgaagattggatct

SEQ ID NO: 683082 - DNA, 25 bp, Homo sapien
tcctaagatcgtggatcaagacttc

SEQ ID NO: 683083 - DNA, 25 bp, Homo sapien
taatctcgcaaatgaaaagggtccc

SEQ ID NO: 683084 - DNA, 25 bp, Homo sapien
tgtttcactgagaatagtcaacccc

SEQ ID NO: 683085 - DNA, 25 bp, Homo sapien
cataatctttgtcggaaggcgggag

SEQ ID NO: 683086 - DNA, 25 bp, Homo sapien
tttctgctggcgttccggcagacca

SEQ ID NO: 683087 - DNA, 25 bp, Homo sapien
ggagttttacatttgcaattctaga

SEQ ID NO: 683088 - DNA, 25 bp, Homo sapien
tcatcagcataatctttgtcggaag

SEQ ID NO: 683089 - DNA, 25 bp, Homo sapien
tcctggggagtaagttcttgggctg

SEQ ID NO: 683090 - DNA, 25 bp, Homo sapien
aaggttgttccgtatgccacaccac

SEQ ID NO: 683091 - DNA, 25 bp, Homo sapien
tacgctttcctctcattactttact

SEQ ID NO: 683092 - DNA, 25 bp, Homo sapien
caaagtttgaccagatctttacaaa

SEQ ID NO: 683093 - DNA, 25 bp, Homo sapien
tacaaagtacgctttcctctcatta

SEQ ID NO: 683094 - DNA, 25 bp, Homo sapien
tggcctcattcaagtccagcttcct

SEQ ID NO: 683095 - DNA, 25 bp, Homo sapien
cctggcagaatggcctcattcaagt

SEQ ID NO: 683096 - DNA, 25 bp, Homo sapien
gaatggcctcattcaagtccagctt

SEQ ID NO: 683097 - DNA, 25 bp, Homo sapien
cagaatggcctcattcaagtccagc

SEQ ID NO: 683098 - DNA, 25 bp, Homo sapien
gtagaggagcatgtagggctcaaaa

SEQ ID NO: 683099 - DNA, 25 bp, Homo sapien
ggaacatatttagcctttagtggtc

SEQ ID NO: 683100 - DNA, 25 bp, Homo sapien
ccaaatgttgagaggtagaggagca

SEQ ID NO: 683101 - DNA, 25 bp, Homo sapien
gcctttagtggtccaaatgttgaga

SEQ ID NO: 683102 - DNA, 25 bp, Homo sapien
gagatgcaaggtgttggcagcccat

SEQ ID NO: 683103 - DNA, 25 bp, Homo sapien
acccagcctgtggatccaaggagat

SEQ ID NO: 683104 - DNA, 25 bp, Homo sapien
tatggtcaatccgagctcttcaccc

SEQ ID NO: 683105 - DNA, 25 bp, Homo sapien
caactggggactaacaagtatggtc

SEQ ID NO: 683106 - DNA, 25 bp, Homo sapien
tgggcatagtggtacacgcatgtag

SEQ ID NO: 683107 - DNA, 25 bp, Homo sapien
tcccagctactcaggaggctgaggc

SEQ ID NO: 683108 - DNA, 25 bp, Homo sapien
agctgggcatagtggtacacgcatg

SEQ ID NO: 683109 - DNA, 25 bp, Homo sapien
aaaaaagaaatattagccgggcatg

SEQ ID NO: 683110 - DNA, 25 bp, Homo sapien
tttaaagggactctcagcctacagt

SEQ ID NO: 683111 - DNA, 25 bp, Homo sapien
ggtggtcagtttgctctcaagagct

SEQ ID NO: 683112 - DNA, 25 bp, Homo sapien
ctgggtgtgatcagcgacagcctga

SEQ ID NO: 683113 - DNA, 25 bp, Homo sapien
aatagaatggatcgcagaagtttcc

SEQ ID NO: 683114 - DNA, 25 bp, Homo sapien
tagagacagtgctggacccacaaca

SEQ ID NO: 683115 - DNA, 25 bp, Homo sapien
tggtctgatttgtcaaggttctggt

SEQ ID NO: 683116 - DNA, 25 bp, Homo sapien
ggctctggaatatcaggtgtgctaa

SEQ ID NO: 683117 - DNA, 25 bp, Homo sapien
ggacatcagcgccttgtcaccttgt

SEQ ID NO: 683118 - DNA, 25 bp, Homo sapien
gattccaagcaaatggagcagtgtg

SEQ ID NO: 683119 - DNA, 25 bp, Homo sapien
ccacaccgaggcaggctattttaaa

SEQ ID NO: 683120 - DNA, 25 bp, Homo sapien
tagtgacgagtgtgcagtgaacaaa

SEQ ID NO: 683121 - DNA, 25 bp, Homo sapien
tgaaaaaggctgtggctcatcccta

SEQ ID NO: 683122 - DNA, 25 bp, Homo sapien
cattgctgatgagggtgaaccggta

SEQ ID NO: 683123 - DNA, 25 bp, Homo sapien
tattaatgctataacaataatcagc

SEQ ID NO: 683124 - DNA, 25 bp, Homo sapien
cagcttatctaaattagtacagtac

SEQ ID NO: 683125 - DNA, 25 bp, Homo sapien
tactatatatcacctaaacaatgca

SEQ ID NO: 683126 - DNA, 25 bp, Homo sapien
tgatgactccgcccttcgggagcct

SEQ ID NO: 683127 - DNA, 25 bp, Homo sapien
ggagcctcatccgtaatgtgggtca

SEQ ID NO: 683128 - DNA, 25 bp, Homo sapien
cctcatccgtaatgtgggtcagcat

SEQ ID NO: 683129 - DNA, 25 bp, Homo sapien
cccttcgggagcctcatccgtaatg

SEQ ID NO: 683130 - DNA, 25 bp, Homo sapien
tattttcacttctatgtgggaacta

SEQ ID NO: 683131 - DNA, 25 bp, Homo sapien
tggtgaacagaggttggccaatgga

SEQ ID NO: 683132 - DNA, 25 bp, Homo sapien
gcactattcacaatgcgaaggtaaa

SEQ ID NO: 683133 - DNA, 25 bp, Homo sapien
ggagagtagattgatagataccaga

SEQ ID NO: 683134 - DNA, 25 bp, Homo sapien
aatactcgaggcgatagacacccca

SEQ ID NO: 683135 - DNA, 25 bp, Homo sapien
taacgcctatgggtcaactctagcc

SEQ ID NO: 683136 - DNA, 25 bp, Homo sapien
tacgtaatctaccaccatgagctaa

SEQ ID NO: 683137 - DNA, 25 bp, Homo sapien
aaaagcccttgtatgcttcgcccag

SEQ ID NO: 683138 - DNA, 25 bp, Homo sapien
gatttcataacctcctaagggtcca

SEQ ID NO: 683139 - DNA, 25 bp, Homo sapien
gaattccacaacagacaagcacagg

SEQ ID NO: 683140 - DNA, 25 bp, Homo sapien
tctaccgtaactgtctgtggagggc

SEQ ID NO: 683141 - DNA, 25 bp, Homo sapien
tagttagcttgatctttggcgccac

SEQ ID NO: 683142 - DNA, 25 bp, Homo sapien
gcagaccccgcctttgaatgaacaa

SEQ ID NO: 683143 - DNA, 25 bp, Homo sapien
aacactcttagaacgatcacccagg

SEQ ID NO: 683144 - DNA, 25 bp, Homo sapien
caaatgcgaggagtgtctccacagc

SEQ ID NO: 683145 - DNA, 25 bp, Homo sapien
gaatccgttacgtagaagctatccc

SEQ ID NO: 683146 - DNA, 25 bp, Homo sapien
gagagtcatccctgacgaaggaggc

SEQ ID NO: 683147 - DNA, 25 bp, Homo sapien
caccttgtcgacgtgcttggccagg

SEQ ID NO: 683148 - DNA, 25 bp, Homo sapien
aagtcacacttgaagggacggtcct

SEQ ID NO: 683149 - DNA, 25 bp, Homo sapien
gccgcttcgtgtcgaagctgcagaa

SEQ ID NO: 683150 - DNA, 25 bp, Homo sapien
tttgagattcgccttcatggtgcag

SEQ ID NO: 683151 - DNA, 25 bp, Homo sapien
gaaggtgtgcttgatgcggatgtgc

SEQ ID NO: 683152 - DNA, 25 bp, Homo sapien
gcggatgtgcgatttgagattcgcc

SEQ ID NO: 683153 - DNA, 25 bp, Homo sapien
cgccttcatggtgcagcggacgtcg

SEQ ID NO: 683154 - DNA, 25 bp, Homo sapien
tttccattagaacaggcaggcaaaa

SEQ ID NO: 683155 - DNA, 25 bp, Homo sapien
ttccattagaacaggcaggcaaaac

SEQ ID NO: 683156 - DNA, 25 bp, Homo sapien
tccattagaacaggcaggcaaaaca

SEQ ID NO: 683157 - DNA, 25 bp, Homo sapien
gatggttgggttttgtgaactctaa

SEQ ID NO: 683158 - DNA, 25 bp, Homo sapien
cttggccgccatgagatggttgggt

SEQ ID NO: 683159 - DNA, 25 bp, Homo sapien
tcctaatgacaacacttgttgtgca

SEQ ID NO: 683160 - DNA, 25 bp, Homo sapien
tgtgaactctaaacccaacctccta

SEQ ID NO: 683161 - DNA, 25 bp, Homo sapien
ttgttagaagtagctttcttttcac

SEQ ID NO: 683162 - DNA, 25 bp, Homo sapien
ggtatctactcccagctggattcta

SEQ ID NO: 683163 - DNA, 25 bp, Homo sapien
tccaaatttagccatgcaatcagtg

SEQ ID NO: 683164 - DNA, 25 bp, Homo sapien
tatcatttcagtagggtcccataaa

SEQ ID NO: 683165 - DNA, 25 bp, Homo sapien
tttccatgccacgatgagttggtcc

SEQ ID NO: 683166 - DNA, 25 bp, Homo sapien
tgtggcaccgcatgtgcatggtcag

SEQ ID NO: 683167 - DNA, 25 bp, Homo sapien
tcatcagagtggatccgcaggtgct

SEQ ID NO: 683168 - DNA, 25 bp, Homo sapien
gagctggcatttgtacggccgctca

SEQ ID NO: 683169 - DNA, 25 bp, Homo sapien
cacaggtgacacttgtgtggcttca

SEQ ID NO: 683170 - DNA, 25 bp, Homo sapien
cacataaggagtcaaagttaaaggt

SEQ ID NO: 683171 - DNA, 25 bp, Homo sapien
cttcaaacacataaggagtcaaagt

SEQ ID NO: 683172 - DNA, 25 bp, Homo sapien
acacataaggagtcaaagttaaagg

SEQ ID NO: 683173 - DNA, 25 bp, Homo sapien
caaacacataaggagtcaaagttaa

SEQ ID NO: 683174 - DNA, 25 bp, Homo sapien
ccaagatgatagcctgggcatatgg

SEQ ID NO: 683175 - DNA, 25 bp, Homo sapien
gggcatatgggtgtgccgcctcctc

SEQ ID NO: 683176 - DNA, 25 bp, Homo sapien
caagatgatagcctgggcatatggg

SEQ ID NO: 683177 - DNA, 25 bp, Homo sapien
gcctgggcatatgggtgtgccgcct

SEQ ID NO: 683178 - DNA, 25 bp, Homo sapien
aatggcagtggttatagaagtactc

SEQ ID NO: 683179 - DNA, 25 bp, Homo sapien
aatctgattgatggagaaaattaca

SEQ ID NO: 683180 - DNA, 25 bp, Homo sapien
gcatattgggaaacaagaatgtgta

SEQ ID NO: 683181 - DNA, 25 bp, Homo sapien
aaagatactgaagtctacatcagca

SEQ ID NO: 683182 - DNA, 25 bp, Homo sapien
tcatgaaccacatggagaatggtca

SEQ ID NO: 683183 - DNA, 25 bp, Homo sapien
tggtcaggtggaccccttcctctca

SEQ ID NO: 683184 - DNA, 25 bp, Homo sapien
gaatggtcaggtggaccccttcctc

SEQ ID NO: 683185 - DNA, 25 bp, Homo sapien
gaaccacatggagaatggtcaggtg

SEQ ID NO: 683186 - DNA, 25 bp, Homo sapien
aacagcaagcagcacggcatctccc

SEQ ID NO: 683187 - DNA, 25 bp, Homo sapien
cttccaaacagcaagcagcacggca

SEQ ID NO: 683188 - DNA, 25 bp, Homo sapien
cccctaggctgttggtcaaagggtg

SEQ ID NO: 683189 - DNA, 25 bp, Homo sapien
ggcatctccccctaggctgttggtc

SEQ ID NO: 683190 - DNA, 25 bp, Homo sapien
gaatacaagggcctggtaagttaga

SEQ ID NO: 683191 - DNA, 25 bp, Homo sapien
caagggcctggtaagttagagatgc

SEQ ID NO: 683192 - DNA, 25 bp, Homo sapien
tggtaagttagagatgccagggaca

SEQ ID NO: 683193 - DNA, 25 bp, Homo sapien
tacaagggcctggtaagttagagat

SEQ ID NO: 683194 - DNA, 25 bp, Homo sapien
ccaaggtgaagatcaaacatttcct

SEQ ID NO: 683195 - DNA, 25 bp, Homo sapien
gcttgtcatgatccactgtccccag

SEQ ID NO: 683196 - DNA, 25 bp, Homo sapien
ctgacatcgtcatcctggtagcctg

SEQ ID NO: 683197 - DNA, 25 bp, Homo sapien
aaagtggccctctattatagcacag

SEQ ID NO: 683198 - DNA, 25 bp, Homo sapien
ccgtgtggattctgagatggcggtc

SEQ ID NO: 683199 - DNA, 25 bp, Homo sapien
tctgagatggcggtccaagtctttc

SEQ ID NO: 683200 - DNA, 25 bp, Homo sapien
tcatgccatggacagttttgaagtg

SEQ ID NO: 683201 - DNA, 25 bp, Homo sapien
tccaagtctttcatgccatggacag

SEQ ID NO: 683202 - DNA, 25 bp, Homo sapien
gtagcaacagttgaacgtcctctct

SEQ ID NO: 683203 - DNA, 25 bp, Homo sapien
tgggtagcaacagttgaacgtcctc

SEQ ID NO: 683204 - DNA, 25 bp, Homo sapien
gggtagcaacagttgaacgtcctct

SEQ ID NO: 683205 - DNA, 25 bp, Homo sapien
ctgggtagcaacagttgaacgtcct

SEQ ID NO: 683206 - DNA, 25 bp, Homo sapien
gggccttcggagtgtcagtgctttc

SEQ ID NO: 683207 - DNA, 25 bp, Homo sapien
ccttcggagtgtcagtgctttcagt

SEQ ID NO: 683208 - DNA, 25 bp, Homo sapien
catttgttcccttgcctctgaggga

SEQ ID NO: 683209 - DNA, 25 bp, Homo sapien
ttcggagtgtcagtgctttcagtgg

SEQ ID NO: 683210 - DNA, 25 bp, Homo sapien
gcttagtttctcatttataaccacc

SEQ ID NO: 683211 - DNA, 25 bp, Homo sapien
tttgcttagtttctcatttataacc

SEQ ID NO: 683212 - DNA, 25 bp, Homo sapien
tgcttagtttctcatttataaccac

SEQ ID NO: 683213 - DNA, 25 bp, Homo sapien
gttttgcttagtttctcatttataa

SEQ ID NO: 683214 - DNA, 25 bp, Homo sapien
ggccttccctggacaacgcatttga

SEQ ID NO: 683215 - DNA, 25 bp, Homo sapien
gcatttgaaacgtaaccccaaggca

SEQ ID NO: 683216 - DNA, 25 bp, Homo sapien
gcatcccgaaaacagcctctgaggg

SEQ ID NO: 683217 - DNA, 25 bp, Homo sapien
gagcatccttccagcgtgtttggga

SEQ ID NO: 683218 - DNA, 25 bp, Homo sapien
gcaggccgcggctcctcggagttga

SEQ ID NO: 683219 - DNA, 25 bp, Homo sapien
gcggctcctcggagttgaggtgctg

SEQ ID NO: 683220 - DNA, 25 bp, Homo sapien
actcccggcgcgcaggccgcggctc

SEQ ID NO: 683221 - DNA, 25 bp, Homo sapien
gccacctccgcacactcccggcgcg

SEQ ID NO: 683222 - DNA, 25 bp, Homo sapien
cacacaacgaattcccggagttcgg

SEQ ID NO: 683223 - DNA, 25 bp, Homo sapien
caagagtcctgacggctgattggcc

SEQ ID NO: 683224 - DNA, 25 bp, Homo sapien
taggagtggcctacttcacacaacg

SEQ ID NO: 683225 - DNA, 25 bp, Homo sapien
gagcagggcgatttatcaagagtcc

SEQ ID NO: 683226 - DNA, 25 bp, Homo sapien
agttaggatgtttaagctcttctgg

SEQ ID NO: 683227 - DNA, 25 bp, Homo sapien
tccttcttcccgtcactcaacttgt

SEQ ID NO: 683228 - DNA, 25 bp, Homo sapien
tctggaaggcagttaggatgtttaa

SEQ ID NO: 683229 - DNA, 25 bp, Homo sapien
ttacaactcctcgttctcagccccc

SEQ ID NO: 683230 - DNA, 25 bp, Homo sapien
gctgggaagtcctctgcctagtcta

SEQ ID NO: 683231 - DNA, 25 bp, Homo sapien
cagggtgtcctatgcagctggccac

SEQ ID NO: 683232 - DNA, 25 bp, Homo sapien
tcacacttgagaggtggtcctgccg

SEQ ID NO: 683233 - DNA, 25 bp, Homo sapien
aggccacctggcatagctagctaga

SEQ ID NO: 683234 - DNA, 25 bp, Homo sapien
tctgccaccaagagatcatcgctgg

SEQ ID NO: 683235 - DNA, 25 bp, Homo sapien
ttgtagaaagtgaccgtatccaggg

SEQ ID NO: 683236 - DNA, 25 bp, Homo sapien
ggaagccgagttttcagcaagacgc

SEQ ID NO: 683237 - DNA, 25 bp, Homo sapien
gctggatggctccaaccttaactgc

SEQ ID NO: 683238 - DNA, 25 bp, Homo sapien
gaagcggcagggagagagacgcgga

SEQ ID NO: 683239 - DNA, 25 bp, Homo sapien
ggagaaggggaagcggcagggagag

SEQ ID NO: 683240 - DNA, 25 bp, Homo sapien
ctgccatgcggagcggagaggagca

SEQ ID NO: 683241 - DNA, 25 bp, Homo sapien
aaggggaagcggcagggagagagac

SEQ ID NO: 683242 - DNA, 25 bp, Homo sapien
ttgagcccactttattgcctgcctc

SEQ ID NO: 683243 - DNA, 25 bp, Homo sapien
gagcccactttattgcctgcctctg

SEQ ID NO: 683244 - DNA, 25 bp, Homo sapien
gccaccattagttcatctgataaca

SEQ ID NO: 683245 - DNA, 25 bp, Homo sapien
tgagcccactttattgcctgcctct

SEQ ID NO: 683246 - DNA, 25 bp, Homo sapien
tacctctacttaagtctatgaaggc

SEQ ID NO: 683247 - DNA, 25 bp, Homo sapien
acaacatgcttctacgccaaagcct

SEQ ID NO: 683248 - DNA, 25 bp, Homo sapien
gcctaattcagagcagggccctacc

SEQ ID NO: 683249 - DNA, 25 bp, Homo sapien
aacatgcttctacgccaaagcctaa

SEQ ID NO: 683250 - DNA, 25 bp, Homo sapien
ctgaaaacaggaataaaatcataca

SEQ ID NO: 683251 - DNA, 25 bp, Homo sapien
tgaaaacaggaataaaatcatacag

SEQ ID NO: 683252 - DNA, 25 bp, Homo sapien
taacgtccagtgcaccttagaatgc

SEQ ID NO: 683253 - DNA, 25 bp, Homo sapien
tcaattgtgtaactcctatgtagca

SEQ ID NO: 683254 - DNA, 25 bp, Homo sapien
aaataccctctgtctttccagactg

SEQ ID NO: 683255 - DNA, 25 bp, Homo sapien
tagcattttgactcagctcaggtgc

SEQ ID NO: 683256 - DNA, 25 bp, Homo sapien
ctgttgtaattgctccaggctgcca

SEQ ID NO: 683257 - DNA, 25 bp, Homo sapien
catgtccatataagacgacgaaatt

SEQ ID NO: 683258 - DNA, 25 bp, Homo sapien
caaacaagtcttacgggcaccattt

SEQ ID NO: 683259 - DNA, 25 bp, Homo sapien
caggctgccatgaaccatgtccata

SEQ ID NO: 683260 - DNA, 25 bp, Homo sapien
taaatctactgtctaggctctaaaa

SEQ ID NO: 683261 - DNA, 25 bp, Homo sapien
taccatctaggatgttcatagctag

SEQ ID NO: 683262 - DNA, 25 bp, Homo sapien
aatgaggctaaatctactgtctagg

SEQ ID NO: 683263 - DNA, 25 bp, Homo sapien
ctccacatcgtaaaagtgcaaagtg

SEQ ID NO: 683264 - DNA, 25 bp, Homo sapien
ttaatgctagtataatcaaatatgt

SEQ ID NO: 683265 - DNA, 25 bp, Homo sapien
cttaatgctagtataatcaaatatg

SEQ ID NO: 683266 - DNA, 25 bp, Homo sapien
cagaggtggtctcaaagttgttaca

SEQ ID NO: 683267 - DNA, 25 bp, Homo sapien
cctcattggaatcatcttggtaaca

SEQ ID NO: 683268 - DNA, 25 bp, Homo sapien
acattaagagcaaaccacggccagg

SEQ ID NO: 683269 - DNA, 25 bp, Homo sapien
tataatgcgacgattcagaggtggt

SEQ ID NO: 683270 - DNA, 25 bp, Homo sapien
aagagcaaaccttttagagaattct

SEQ ID NO: 683271 - DNA, 25 bp, Homo sapien
ccttttagagaattctacttaagat

SEQ ID NO: 683272 - DNA, 25 bp, Homo sapien
gagcaaaccttttagagaattctac

SEQ ID NO: 683273 - DNA, 25 bp, Homo sapien
aacattaagagcaaaccttttagag

SEQ ID NO: 683274 - DNA, 25 bp, Homo sapien
tcggcgggacagagcaaagctggat

SEQ ID NO: 683275 - DNA, 25 bp, Homo sapien
gggctgccccttgaatgatggagta

SEQ ID NO: 683276 - DNA, 25 bp, Homo sapien
taatctggaatggagtcggcgggac

SEQ ID NO: 683277 - DNA, 25 bp, Homo sapien
gaccggtggcgctgtggtggccact

SEQ ID NO: 683278 - DNA, 25 bp, Homo sapien
tgaaactggagaacggtcacgtccg

SEQ ID NO: 683279 - DNA, 25 bp, Homo sapien
taatgaaagtttgattgccagagcc

SEQ ID NO: 683280 - DNA, 25 bp, Homo sapien
tcaaagtcagtgcaagtaatacccg

SEQ ID NO: 683281 - DNA, 25 bp, Homo sapien
tgaaggaggcatcgcatatatcgca

SEQ ID NO: 683282 - DNA, 25 bp, Homo sapien
ttattcccgctgtgcttgatacgga

SEQ ID NO: 683283 - DNA, 25 bp, Homo sapien
tacggatgtgcgacttgaggttccc

SEQ ID NO: 683284 - DNA, 25 bp, Homo sapien
tgtcacccaggaagtcgcaatgagg

SEQ ID NO: 683285 - DNA, 25 bp, Homo sapien
caggagtagctgcattccgagcact

SEQ ID NO: 683286 - DNA, 25 bp, Homo sapien
gtgagtttcgataagaacaggcagg

SEQ ID NO: 683287 - DNA, 25 bp, Homo sapien
agcacacaccagaaaatcgcttata

SEQ ID NO: 683288 - DNA, 25 bp, Homo sapien
aggcaggcaacaaccacagcggatc

SEQ ID NO: 683289 - DNA, 25 bp, Homo sapien
aatcgcttatacaaggtgggtgggt

SEQ ID NO: 683290 - DNA, 25 bp, Homo sapien
tttgctgtatgttttttggtcaagc

SEQ ID NO: 683291 - DNA, 25 bp, Homo sapien
taattttgctgtatgttttttggtc

SEQ ID NO: 683292 - DNA, 25 bp, Homo sapien
atgttttttggtcaagctgttccat

SEQ ID NO: 683293 - DNA, 25 bp, Homo sapien
tctgctaattttgctgtatgttttt

SEQ ID NO: 683294 - DNA, 25 bp, Homo sapien
gatttatgccatagaaagtgaggag

SEQ ID NO: 683295 - DNA, 25 bp, Homo sapien
ggtgcttatgatttatgccatagaa

SEQ ID NO: 683296 - DNA, 25 bp, Homo sapien
tttaaggtgcttatgatttatgcca

SEQ ID NO: 683297 - DNA, 25 bp, Homo sapien
ccatagaaagtgaggagcgtagaga

SEQ ID NO: 683298 - DNA, 25 bp, Homo sapien
tgtctttccggctaaagcacttgcc

SEQ ID NO: 683299 - DNA, 25 bp, Homo sapien
gcccgtgtggcaccgcatgtgagtt

SEQ ID NO: 683300 - DNA, 25 bp, Homo sapien
tagtcacacgtcttacacttgtagg

SEQ ID NO: 683301 - DNA, 25 bp, Homo sapien
ctgctgtcggcagcggcgtagtcac

SEQ ID NO: 683302 - DNA, 25 bp, Homo sapien
acacacagatggcagcaggaaacaa

SEQ ID NO: 683303 - DNA, 25 bp, Homo sapien
atacacacacagatggcagcaggaa

SEQ ID NO: 683304 - DNA, 25 bp, Homo sapien
cacacagatggcagcaggaaacaag

SEQ ID NO: 683305 - DNA, 25 bp, Homo sapien
acacacacagatggcagcaggaaac

SEQ ID NO: 683306 - DNA, 25 bp, Homo sapien
gaagcaagttgcactgatagcgtgt

SEQ ID NO: 683307 - DNA, 25 bp, Homo sapien
gaacccattccttacttggccatga

SEQ ID NO: 683308 - DNA, 25 bp, Homo sapien
ccaaatcgtaactagccaagtgcta

SEQ ID NO: 683309 - DNA, 25 bp, Homo sapien
catagaggtctattaggagagctga

SEQ ID NO: 683310 - DNA, 25 bp, Homo sapien
taattatagtactcagccagatgcg

SEQ ID NO: 683311 - DNA, 25 bp, Homo sapien
tgtagacagagaccgcagaaactat

SEQ ID NO: 683312 - DNA, 25 bp, Homo sapien
tctctgaaggtaactaaggtgagga

SEQ ID NO: 683313 - DNA, 25 bp, Homo sapien
caaggtaggctaactgtagaagata

SEQ ID NO: 683314 - DNA, 25 bp, Homo sapien
gaatttttaaatgccgctccatgtc

SEQ ID NO: 683315 - DNA, 25 bp, Homo sapien
aatttttaaatgccgctccatgtcc

SEQ ID NO: 683316 - DNA, 25 bp, Homo sapien
gccataagcagtcttgaattggcaa

SEQ ID NO: 683317 - DNA, 25 bp, Homo sapien
ccataagcagtcttgaattggcaac

SEQ ID NO: 683318 - DNA, 25 bp, Homo sapien
tttttggtgcgtgacttggcaggga

SEQ ID NO: 683319 - DNA, 25 bp, Homo sapien
gtttgatagccatgttcaaaaacaa

SEQ ID NO: 683320 - DNA, 25 bp, Homo sapien
tttcattactttccgtgggcaggta

SEQ ID NO: 683321 - DNA, 25 bp, Homo sapien
agatgacagtggctgtctggttttc

SEQ ID NO: 683322 - DNA, 25 bp, Homo sapien
aagggctaacctcttttatatatag

SEQ ID NO: 683323 - DNA, 25 bp, Homo sapien
tcagctaaagggctaacctctttta

SEQ ID NO: 683324 - DNA, 25 bp, Homo sapien
tgatcagctaaagggctaacctctt

SEQ ID NO: 683325 - DNA, 25 bp, Homo sapien
taattaatgatcagctaaagggcta

SEQ ID NO: 683326 - DNA, 25 bp, Homo sapien
cggcctttaccgtccacagtgggcg

SEQ ID NO: 683327 - DNA, 25 bp, Homo sapien
ggtgagtggcgctgccctgttggaa

SEQ ID NO: 683328 - DNA, 25 bp, Homo sapien
cctccccaggggtgagtggcgctgc

SEQ ID NO: 683329 - DNA, 25 bp, Homo sapien
cagtgggcgttagaccggcccaaat

SEQ ID NO: 683330 - DNA, 25 bp, Homo sapien
ttcctccgatacaaactggaccgtg

SEQ ID NO: 683331 - DNA, 25 bp, Homo sapien
tgtttcctccgatacaaactggacc

SEQ ID NO: 683332 - DNA, 25 bp, Homo sapien
ggtctccgaggtgatggttctggtg

SEQ ID NO: 683333 - DNA, 25 bp, Homo sapien
ctgggtctccgaggtgatggttctg

SEQ ID NO: 683334 - DNA, 25 bp, Homo sapien
gcttgtgagctacaaaggcatccag

SEQ ID NO: 683335 - DNA, 25 bp, Homo sapien
atggatgtcgggagtcagctccacc

SEQ ID NO: 683336 - DNA, 25 bp, Homo sapien
gcagatgccgcagatatggatgtcg

SEQ ID NO: 683337 - DNA, 25 bp, Homo sapien
ggcatccaggttgttaaactgctgc

SEQ ID NO: 683338 - DNA, 25 bp, Homo sapien
cgagcccgcgaagctctcgccctcg

SEQ ID NO: 683339 - DNA, 25 bp, Homo sapien
tttgcaccgagcccgcgaagctctc

SEQ ID NO: 683340 - DNA, 25 bp, Homo sapien
gcccgcgaagctctcgccctcgctg

SEQ ID NO: 683341 - DNA, 25 bp, Homo sapien
caccgagcccgcgaagctctcgccc

SEQ ID NO: 683342 - DNA, 25 bp, Homo sapien
gctgatctacatggtgcaaggactt

SEQ ID NO: 683343 - DNA, 25 bp, Homo sapien
ccaaagtgggggacgctgatctaca

SEQ ID NO: 683344 - DNA, 25 bp, Homo sapien
gggacgctgatctacatggtgcaag

SEQ ID NO: 683345 - DNA, 25 bp, Homo sapien
tctacatggtgcaaggacttttcct

SEQ ID NO: 683346 - DNA, 25 bp, Homo sapien
cgtgctgggcgaccgcgggtggcga

SEQ ID NO: 683347 - DNA, 25 bp, Homo sapien
ttctcccaactctgcgaggcgggga

SEQ ID NO: 683348 - DNA, 25 bp, Homo sapien
acttccgctgcctagagggcgctgg

SEQ ID NO: 683349 - DNA, 25 bp, Homo sapien
cgggtggcgagggatgcgcccctgc

SEQ ID NO: 683350 - DNA, 25 bp, Homo sapien
tacttgttacttgagtggtagagtt

SEQ ID NO: 683351 - DNA, 25 bp, Homo sapien
gagtttaaattcgtaatcctgctgt

SEQ ID NO: 683352 - DNA, 25 bp, Homo sapien
ttctgagactgtaggtgatgggcat

SEQ ID NO: 683353 - DNA, 25 bp, Homo sapien
cgtaatcctgctgtatgtagggtgt

SEQ ID NO: 683354 - DNA, 25 bp, Homo sapien
ttgtggaatggctgcacagtctctg

SEQ ID NO: 683355 - DNA, 25 bp, Homo sapien
ctttgtggaatggctgcacagtctc

SEQ ID NO: 683356 - DNA, 25 bp, Homo sapien
tgggggatgtttaggctgacttttc

SEQ ID NO: 683357 - DNA, 25 bp, Homo sapien
acctgggggatgtttaggctgactt

SEQ ID NO: 683358 - DNA, 25 bp, Homo sapien
tatgattgcgtcaacgtgccagccc

SEQ ID NO: 683359 - DNA, 25 bp, Homo sapien
gcccacatcggcttcttgttcaggt

SEQ ID NO: 683360 - DNA, 25 bp, Homo sapien
cggtagacctggaattggcaaaatt

SEQ ID NO: 683361 - DNA, 25 bp, Homo sapien
tgtaaaggaagggtctgctagactc

SEQ ID NO: 683362 - DNA, 25 bp, Homo sapien
tctgctgactgcgacagattgagct

SEQ ID NO: 683363 - DNA, 25 bp, Homo sapien
ctgactgcgacagattgagctcttc

SEQ ID NO: 683364 - DNA, 25 bp, Homo sapien
aactgccagccgcagttgcctctgg

SEQ ID NO: 683365 - DNA, 25 bp, Homo sapien
ttttctgctgactgcgacagattga

SEQ ID NO: 683366 - DNA, 25 bp, Homo sapien
ctagagggcagtaaggattcgaggc

SEQ ID NO: 683367 - DNA, 25 bp, Homo sapien
gaaatgacggatcatcgttgtgcag

SEQ ID NO: 683368 - DNA, 25 bp, Homo sapien
ggcagtaaggattcgaggctctttc

SEQ ID NO: 683369 - DNA, 25 bp, Homo sapien
atttttctgaaatgacggatcatcg

SEQ ID NO: 683370 - DNA, 25 bp, Homo sapien
cgatattttgtgataacctgcagaa

SEQ ID NO: 683371 - DNA, 25 bp, Homo sapien
cctggtacgtcctgcaagccgatat

SEQ ID NO: 683372 - DNA, 25 bp, Homo sapien
cttggcttcctggtacgtcctgcaa

SEQ ID NO: 683373 - DNA, 25 bp, Homo sapien
gagtggccgaactctccagaaagga

SEQ ID NO: 683374 - DNA, 25 bp, Homo sapien
caggtggggaggacccttctgtgct

SEQ ID NO: 683375 - DNA, 25 bp, Homo sapien
gggaggacccttctgtgctgctggg

SEQ ID NO: 683376 - DNA, 25 bp, Homo sapien
gacccttctgtgctgctgggaattt

SEQ ID NO: 683377 - DNA, 25 bp, Homo sapien
ttccagcaggtggggaggacccttc

SEQ ID NO: 683378 - DNA, 25 bp, Homo sapien
gcgtccacagttatgaaaatttcct

SEQ ID NO: 683379 - DNA, 25 bp, Homo sapien
gagaattgcatccactgtgtttgta

SEQ ID NO: 683380 - DNA, 25 bp, Homo sapien
aaggcagagtcgtgtatttattcgc

SEQ ID NO: 683381 - DNA, 25 bp, Homo sapien
caattctaggatcaaaagcgtccac

SEQ ID NO: 683382 - DNA, 25 bp, Homo sapien
acctgttctggggcacgtgcttcac

SEQ ID NO: 683383 - DNA, 25 bp, Homo sapien
gttctggggcacgtgcttcacagag

SEQ ID NO: 683384 - DNA, 25 bp, Homo sapien
tctggggcacgtgcttcacagagga

SEQ ID NO: 683385 - DNA, 25 bp, Homo sapien
tggggcacgtgcttcacagaggaga

SEQ ID NO: 683386 - DNA, 25 bp, Homo sapien
gagggactgatctggctctcagaac

SEQ ID NO: 683387 - DNA, 25 bp, Homo sapien
gttggagaccaaatcgtgtacctcg

SEQ ID NO: 683388 - DNA, 25 bp, Homo sapien
gcaaaacctctgcatgaccacggag

SEQ ID NO: 683389 - DNA, 25 bp, Homo sapien
cacgctcaggttgaagttggagacc

SEQ ID NO: 683390 - DNA, 25 bp, Homo sapien
catagttataaatggccatgacctc

SEQ ID NO: 683391 - DNA, 25 bp, Homo sapien
taacttttgatgtgagcagctggat

SEQ ID NO: 683392 - DNA, 25 bp, Homo sapien
ccatcaagactcataaccaggaatt

SEQ ID NO: 683393 - DNA, 25 bp, Homo sapien
gcatcctagttgcaagggtaacttt

SEQ ID NO: 683394 - DNA, 25 bp, Homo sapien
ttgtgttttcgcgatgctgcagctg

SEQ ID NO: 683395 - DNA, 25 bp, Homo sapien
gggatcgtttacaggagcagcctct

SEQ ID NO: 683396 - DNA, 25 bp, Homo sapien
agaggttgtgttttcgcgatgctgc

SEQ ID NO: 683397 - DNA, 25 bp, Homo sapien
ctgcagcagggatcgtttacaggag

SEQ ID NO: 683398 - DNA, 25 bp, Homo sapien
gccttcctaaatgattccgagtgca

SEQ ID NO: 683399 - DNA, 25 bp, Homo sapien
tgtgcagctctctgtccgtgccttg

SEQ ID NO: 683400 - DNA, 25 bp, Homo sapien
gtgccttgttctctagccttcctaa

SEQ ID NO: 683401 - DNA, 25 bp, Homo sapien
ttcctgtggttagggatggaaagcc

SEQ ID NO: 683402 - DNA, 25 bp, Homo sapien
cccgttgctgcgtgctgccaatggg

SEQ ID NO: 683403 - DNA, 25 bp, Homo sapien
cctctgtgcccgttgctgcgtgctg

SEQ ID NO: 683404 - DNA, 25 bp, Homo sapien
ctgtgcccgttgctgcgtgctgcca

SEQ ID NO: 683405 - DNA, 25 bp, Homo sapien
gtgcccgttgctgcgtgctgccaat

SEQ ID NO: 683406 - DNA, 25 bp, Homo sapien
agtcaaccggtgcatagccctccat

SEQ ID NO: 683407 - DNA, 25 bp, Homo sapien
gatgtggttgtcagtctcttggcca

SEQ ID NO: 683408 - DNA, 25 bp, Homo sapien
aaccggtgcatagccctccatgttc

SEQ ID NO: 683409 - DNA, 25 bp, Homo sapien
tcatctgctcatgaacagatgtggt

SEQ ID NO: 683410 - DNA, 25 bp, Homo sapien
tgttttgctgctacatgaaggtgca

SEQ ID NO: 683411 - DNA, 25 bp, Homo sapien
gaaggctcaggaatggatgttgaca

SEQ ID NO: 683412 - DNA, 25 bp, Homo sapien
agagtgttttgctgctacatgaagg

SEQ ID NO: 683413 - DNA, 25 bp, Homo sapien
ctgctacatgaaggtgcacatgtct

SEQ ID NO: 683414 - DNA, 25 bp, Homo sapien
taaacccctattgtggtttcagtca

SEQ ID NO: 683415 - DNA, 25 bp, Homo sapien
gtcataaacccctattgtggtttca

SEQ ID NO: 683416 - DNA, 25 bp, Homo sapien
agttgggctgaaatccgtgagctga

SEQ ID NO: 683417 - DNA, 25 bp, Homo sapien
gagctgattactgccttgagcatgg

SEQ ID NO: 683418 - DNA, 25 bp, Homo sapien
gtttggggcacattttggcatctcc

SEQ ID NO: 683419 - DNA, 25 bp, Homo sapien
ttactgccttgagcatggcagcagc

SEQ ID NO: 683420 - DNA, 25 bp, Homo sapien
catctacctgctctcgtgcgtgttg

SEQ ID NO: 683421 - DNA, 25 bp, Homo sapien
tggctgcacagttcacatgtatggt

SEQ ID NO: 683422 - DNA, 25 bp, Homo sapien
ggagggcggtcctgaatattgccac

SEQ ID NO: 683423 - DNA, 25 bp, Homo sapien
tgtccatcgtgtatactggcttcca

SEQ ID NO: 683424 - DNA, 25 bp, Homo sapien
tagttcagtagaaagggagtgccac

SEQ ID NO: 683425 - DNA, 25 bp, Homo sapien
ctagttcagtagaaagggagtgcca

SEQ ID NO: 683426 - DNA, 25 bp, Homo sapien
tagattggaggggagtgagacgagg

SEQ ID NO: 683427 - DNA, 25 bp, Homo sapien
gattggaggggagtgagacgaggaa

SEQ ID NO: 683428 - DNA, 25 bp, Homo sapien
ctagattggaggggagtgagacgag

SEQ ID NO: 683429 - DNA, 25 bp, Homo sapien
tggaggggagtgagacgaggaaaca

SEQ ID NO: 683430 - DNA, 25 bp, Homo sapien
tccatctccgcagacatctcaaatg

SEQ ID NO: 683431 - DNA, 25 bp, Homo sapien
tctcaaatgtgtccattccccatgg

SEQ ID NO: 683432 - DNA, 25 bp, Homo sapien
ggtaacatctcttgtaaggagagga

SEQ ID NO: 683433 - DNA, 25 bp, Homo sapien
tgagtctgctcgagactccccaggt

SEQ ID NO: 683434 - DNA, 25 bp, Homo sapien
tctggagagttatgaggcaatttca

SEQ ID NO: 683435 - DNA, 25 bp, Homo sapien
tgacaagtacgtaattttcttcaga

SEQ ID NO: 683436 - DNA, 25 bp, Homo sapien
cagagatgctcttcacgtctggaga

SEQ ID NO: 683437 - DNA, 25 bp, Homo sapien
cataaattcccccttgctttgacaa

SEQ ID NO: 683438 - DNA, 25 bp, Homo sapien
cagctttcagagtgactaaccatac

SEQ ID NO: 683439 - DNA, 25 bp, Homo sapien
catcccggaaatcctttggtcctcg

SEQ ID NO: 683440 - DNA, 25 bp, Homo sapien
caggtaagttacttgagttttggca

SEQ ID NO: 683441 - DNA, 25 bp, Homo sapien
tggctgcagcacttaaaagctcaca

SEQ ID NO: 683442 - DNA, 25 bp, Homo sapien
tggttaccctattactgatgattgt

SEQ ID NO: 683443 - DNA, 25 bp, Homo sapien
cagctgaccgaaagcaaaacactga

SEQ ID NO: 683444 - DNA, 25 bp, Homo sapien
tagcatcctctttgtagacttgtac

SEQ ID NO: 683445 - DNA, 25 bp, Homo sapien
agacttgtacagctgaccgaaagca

SEQ ID NO: 683446 - DNA, 25 bp, Homo sapien
ttgtacagctgaccgaaagcaaaac

SEQ ID NO: 683447 - DNA, 25 bp, Homo sapien
tcccagagttaagcgattcttttgc

SEQ ID NO: 683448 - DNA, 25 bp, Homo sapien
tgaaatagaatctcatgctgtcgcc

SEQ ID NO: 683449 - DNA, 25 bp, Homo sapien
tttttgaaatagaatctcatgctgt

SEQ ID NO: 683450 - DNA, 25 bp, Homo sapien
tttgaaatagaatctcatgctgtcg

SEQ ID NO: 683451 - DNA, 25 bp, Homo sapien
tcgtagccttgggatcaggatgcag

SEQ ID NO: 683452 - DNA, 25 bp, Homo sapien
tcagtcagccacattgtattcccct

SEQ ID NO: 683453 - DNA, 25 bp, Homo sapien
cctggtgtctagcttagcacttgga

SEQ ID NO: 683454 - DNA, 25 bp, Homo sapien
gatgtagtaggaattaggagaccac

SEQ ID NO: 683455 - DNA, 25 bp, Homo sapien
ggagggcttcttaccaacccattga

SEQ ID NO: 683456 - DNA, 25 bp, Homo sapien
ctgcctcaattgatgggtagctgac

SEQ ID NO: 683457 - DNA, 25 bp, Homo sapien
taaggagtcagtgacaagcccagtg

SEQ ID NO: 683458 - DNA, 25 bp, Homo sapien
gctgacacatgacgttaacagtggc

SEQ ID NO: 683459 - DNA, 25 bp, Homo sapien
taatccagcgtagtttggaaccagc

SEQ ID NO: 683460 - DNA, 25 bp, Homo sapien
cccagggtgactccatgtacgtgaa

SEQ ID NO: 683461 - DNA, 25 bp, Homo sapien
tgagaagtccttagacctacagttc

SEQ ID NO: 683462 - DNA, 25 bp, Homo sapien
ttattcaactgaattgcagtgggac

SEQ ID NO: 683463 - DNA, 25 bp, Homo sapien
tgtacaagacgcttggatcctgcat

SEQ ID NO: 683464 - DNA, 25 bp, Homo sapien
gactgtacaagacgcttggatcctg

SEQ ID NO: 683465 - DNA, 25 bp, Homo sapien
tacaagacgcttggatcctgcatct

SEQ ID NO: 683466 - DNA, 25 bp, Homo sapien
gcagactgtacaagacgcttggatc

SEQ ID NO: 683467 - DNA, 25 bp, Homo sapien
taggtgctgagagaggctgcaaaat

SEQ ID NO: 683468 - DNA, 25 bp, Homo sapien
ggctgttaaaaccagctttcctgaa

SEQ ID NO: 683469 - DNA, 25 bp, Homo sapien
gaatcttgatcgttcatcagtgcac

SEQ ID NO: 683470 - DNA, 25 bp, Homo sapien
gaaaattatgaattggtagccctgt

SEQ ID NO: 683471 - DNA, 25 bp, Homo sapien
tacagcccagcccgttgctacgagg

SEQ ID NO: 683472 - DNA, 25 bp, Homo sapien
tctgatggggcttccgacagctgct

SEQ ID NO: 683473 - DNA, 25 bp, Homo sapien
tgctacgaggctcgcggttgcttcc

SEQ ID NO: 683474 - DNA, 25 bp, Homo sapien
tcgcggttgcttcccttctgatggg

SEQ ID NO: 683475 - DNA, 25 bp, Homo sapien
acatctctctcgctgagcgccacac

SEQ ID NO: 683476 - DNA, 25 bp, Homo sapien
tgagcgccacaccttggtgcatttg

SEQ ID NO: 683477 - DNA, 25 bp, Homo sapien
ctcctcgattcttgaaggtcttctc

SEQ ID NO: 683478 - DNA, 25 bp, Homo sapien
tgcatttggatattgatacgcaaac

SEQ ID NO: 683479 - DNA, 25 bp, Homo sapien
gacttcagcccaacgagggactggg

SEQ ID NO: 683480 - DNA, 25 bp, Homo sapien
gagcagacctttcacgctggggaga

SEQ ID NO: 683481 - DNA, 25 bp, Homo sapien
gagagctagaggaggcctcgacttc

SEQ ID NO: 683482 - DNA, 25 bp, Homo sapien
cattgcattttgttccgctgtggaa

SEQ ID NO: 683483 - DNA, 25 bp, Homo sapien
ttttccttcgaaatcaaatctaatc

SEQ ID NO: 683484 - DNA, 25 bp, Homo sapien
caaatctaatctctcccaaggccat

SEQ ID NO: 683485 - DNA, 25 bp, Homo sapien
aatcaaatctaatctctcccaaggc

SEQ ID NO: 683486 - DNA, 25 bp, Homo sapien
cttcgaaatcaaatctaatctctcc

SEQ ID NO: 683487 - DNA, 25 bp, Homo sapien
cttggagagttgagtatgttgcgat

SEQ ID NO: 683488 - DNA, 25 bp, Homo sapien
tatgttgcgattgaaaagcaaagca

SEQ ID NO: 683489 - DNA, 25 bp, Homo sapien
caaagcattaggattcagaataccc

SEQ ID NO: 683490 - DNA, 25 bp, Homo sapien
aagcaaagcattaggattcagaata

SEQ ID NO: 683491 - DNA, 25 bp, Homo sapien
cagagtctgagcaggtaatgccagg

SEQ ID NO: 683492 - DNA, 25 bp, Homo sapien
gcacctcggttaatgttgggccatg

SEQ ID NO: 683493 - DNA, 25 bp, Homo sapien
gcctgaggactctgtgggcacctcg

SEQ ID NO: 683494 - DNA, 25 bp, Homo sapien
tctgagcaggtaatgccagggtgcc

SEQ ID NO: 683495 - DNA, 25 bp, Homo sapien
ccatggtctgtcgggtatagagaat

SEQ ID NO: 683496 - DNA, 25 bp, Homo sapien
ttaattatcttaaacgttgcaggct

SEQ ID NO: 683497 - DNA, 25 bp, Homo sapien
tatcttaaacgttgcaggctcagcc

SEQ ID NO: 683498 - DNA, 25 bp, Homo sapien
ctgtcgggtatagagaatgttgatg

SEQ ID NO: 683499 - DNA, 25 bp, Homo sapien
gatgaggggtcccggtttacagctc

SEQ ID NO: 683500 - DNA, 25 bp, Homo sapien
tgatgcttttgataggcagattttc

SEQ ID NO: 683501 - DNA, 25 bp, Homo sapien
tgataggcagattttcagattctgt

SEQ ID NO: 683502 - DNA, 25 bp, Homo sapien
gaaaatcttttatgactgtcacctc

SEQ ID NO: 683503 - DNA, 25 bp, Homo sapien
aagacagctgtacttggtttcagag

SEQ ID NO: 683504 - DNA, 25 bp, Homo sapien
caaatataagacagctgtacttggt

SEQ ID NO: 683505 - DNA, 25 bp, Homo sapien
aaattatgggtagcaaaatgcacac

SEQ ID NO: 683506 - DNA, 25 bp, Homo sapien
tgaaaattgatgacaaaattatggg

SEQ ID NO: 683507 - DNA, 25 bp, Homo sapien
taaacatccaacatcgttgtatttt

SEQ ID NO: 683508 - DNA, 25 bp, Homo sapien
catcttctcgtgttgagtggttgag

SEQ ID NO: 683509 - DNA, 25 bp, Homo sapien
ttctcgtgttgagtggttgagtgtc

SEQ ID NO: 683510 - DNA, 25 bp, Homo sapien
tcataggacatcttctcgtgttgag

SEQ ID NO: 683511 - DNA, 25 bp, Homo sapien
gaatccttaggggtgaatttactgc

SEQ ID NO: 683512 - DNA, 25 bp, Homo sapien
tctattccaatctggcacctgaaag

SEQ ID NO: 683513 - DNA, 25 bp, Homo sapien
ttttatcttcccatctattccaatc

SEQ ID NO: 683514 - DNA, 25 bp, Homo sapien
tccaatctggcacctgaaagcacat

SEQ ID NO: 683515 - DNA, 25 bp, Homo sapien
tggtttctggtctcttataagctgt

SEQ ID NO: 683516 - DNA, 25 bp, Homo sapien
gcttcaccattgtgtagaaagtgtc

SEQ ID NO: 683517 - DNA, 25 bp, Homo sapien
cacttcctgagtaattctgttagct

SEQ ID NO: 683518 - DNA, 25 bp, Homo sapien
ccttgacactacagaaggcttcacc

SEQ ID NO: 683519 - DNA, 25 bp, Homo sapien
cccacatcgacaccatatagtactg

SEQ ID NO: 683520 - DNA, 25 bp, Homo sapien
gctttcccacatcgacaccatatag

SEQ ID NO: 683521 - DNA, 25 bp, Homo sapien
gaagctttcccacatcgacaccata

SEQ ID NO: 683522 - DNA, 25 bp, Homo sapien
tttcccacatcgacaccatatagta

SEQ ID NO: 683523 - DNA, 25 bp, Homo sapien
cactgagggcgacaataaacaaaat

SEQ ID NO: 683524 - DNA, 25 bp, Homo sapien
taaaaacagcctcctttaggctcca

SEQ ID NO: 683525 - DNA, 25 bp, Homo sapien
agcagtgccactgagggcgacaata

SEQ ID NO: 683526 - DNA, 25 bp, Homo sapien
aacagcctcctttaggctccatggg

SEQ ID NO: 683527 - DNA, 25 bp, Homo sapien
ctgttatcacatcagtggctctcag

SEQ ID NO: 683528 - DNA, 25 bp, Homo sapien
ggctgttatcacatcagtggctctc

SEQ ID NO: 683529 - DNA, 25 bp, Homo sapien
tggctctcaggaaaatgaataagac

SEQ ID NO: 683530 - DNA, 25 bp, Homo sapien
gctctcaggaaaatgaataagactt

SEQ ID NO: 683531 - DNA, 25 bp, Homo sapien
aagaccactcaggattgccctggta

SEQ ID NO: 683532 - DNA, 25 bp, Homo sapien
gaccactcaggattgccctggtaac

SEQ ID NO: 683533 - DNA, 25 bp, Homo sapien
agaccactcaggattgccctggtaa

SEQ ID NO: 683534 - DNA, 25 bp, Homo sapien
caagaccactcaggattgccctggt

SEQ ID NO: 683535 - DNA, 25 bp, Homo sapien
agactgaaggagtctgtgttgttcc

SEQ ID NO: 683536 - DNA, 25 bp, Homo sapien
tgtgttgttcctcccgcatgcttct

SEQ ID NO: 683537 - DNA, 25 bp, Homo sapien
aaatccctgagatcaagactgaagg

SEQ ID NO: 683538 - DNA, 25 bp, Homo sapien
ccaatggtttcctgcgtctttacaa

SEQ ID NO: 683539 - DNA, 25 bp, Homo sapien
gaatacctccggtaacacaagcaca

SEQ ID NO: 683540 - DNA, 25 bp, Homo sapien
tccggtaacacaagcacatacctgt

SEQ ID NO: 683541 - DNA, 25 bp, Homo sapien
taacacaagcacatacctgtgcctc

SEQ ID NO: 683542 - DNA, 25 bp, Homo sapien
actcgaatacctccggtaacacaag

SEQ ID NO: 683543 - DNA, 25 bp, Homo sapien
cataatacatttgcagaagaagcgc

SEQ ID NO: 683544 - DNA, 25 bp, Homo sapien
ttgtgaaactccatggccgcatact

SEQ ID NO: 683545 - DNA, 25 bp, Homo sapien
tccatggccgcatactccacaatta

SEQ ID NO: 683546 - DNA, 25 bp, Homo sapien
agaagaagcgctccaaatcattgtg

SEQ ID NO: 683547 - DNA, 25 bp, Homo sapien
aggcttcaagtctagatgttttatc

SEQ ID NO: 683548 - DNA, 25 bp, Homo sapien
acccctgaccgtggccttattagca

SEQ ID NO: 683549 - DNA, 25 bp, Homo sapien
tggccttattagcaccatgttctag

SEQ ID NO: 683550 - DNA, 25 bp, Homo sapien
tgttctagccaactgtgcttgctaa

SEQ ID NO: 683551 - DNA, 25 bp, Homo sapien
cagcccataagggaattgaacccct

SEQ ID NO: 683552 - DNA, 25 bp, Homo sapien
catgcactttatgaccagggctgcc

SEQ ID NO: 683553 - DNA, 25 bp, Homo sapien
gaagtgagataagaccggtgagtaa

SEQ ID NO: 683554 - DNA, 25 bp, Homo sapien
taaccagacatatgggaagtgttca

SEQ ID NO: 683555 - DNA, 25 bp, Homo sapien
agcatgtaacctctcaaacccttgg

SEQ ID NO: 683556 - DNA, 25 bp, Homo sapien
aataacacatgcacatcatgatctg

SEQ ID NO: 683557 - DNA, 25 bp, Homo sapien
caatgactggtcagtacgcatctgt

SEQ ID NO: 683558 - DNA, 25 bp, Homo sapien
gatcatgtcacttcttcgaaggcaa

SEQ ID NO: 683559 - DNA, 25 bp, Homo sapien
taattgcatgaagcacaaatttccc

SEQ ID NO: 683560 - DNA, 25 bp, Homo sapien
ggaagttaagtcctaaatgaccaga

SEQ ID NO: 683561 - DNA, 25 bp, Homo sapien
gaccagatttggatgttacatgaca

SEQ ID NO: 683562 - DNA, 25 bp, Homo sapien
tgaaagagatcatgaccaaggacag

SEQ ID NO: 683563 - DNA, 25 bp, Homo sapien
taaactgaggcagaactgtaagtga

SEQ ID NO: 683564 - DNA, 25 bp, Homo sapien
ttgaaaatctcagggtaatgttctg

SEQ ID NO: 683565 - DNA, 25 bp, Homo sapien
tgaaaatctcagggtaatgttctgg

SEQ ID NO: 683566 - DNA, 25 bp, Homo sapien
aaaatctcagggtaatgttctgggc

SEQ ID NO: 683567 - DNA, 25 bp, Homo sapien
gaaaatctcagggtaatgttctggg

SEQ ID NO: 683568 - DNA, 25 bp, Homo sapien
tgtagctgcggtaaacatgcacagg

SEQ ID NO: 683569 - DNA, 25 bp, Homo sapien
tggctctcacaatgaacctgacaac

SEQ ID NO: 683570 - DNA, 25 bp, Homo sapien
tagcgttcaaaaatgggcccctggc

SEQ ID NO: 683571 - DNA, 25 bp, Homo sapien
aattcaagtctaccacgttgccagg

SEQ ID NO: 683572 - DNA, 25 bp, Homo sapien
ggtcaaaggtacgaggatccaccat

SEQ ID NO: 683573 - DNA, 25 bp, Homo sapien
aaggtacgaggatccaccatttgga

SEQ ID NO: 683574 - DNA, 25 bp, Homo sapien
cccagtggtcaaaggtacgaggatc

SEQ ID NO: 683575 - DNA, 25 bp, Homo sapien
gaggatccaccatttggaacttcat

SEQ ID NO: 683576 - DNA, 25 bp, Homo sapien
tccacagtctatggctggaccagct

SEQ ID NO: 683577 - DNA, 25 bp, Homo sapien
atgtcacatttccacagtctatggc

SEQ ID NO: 683578 - DNA, 25 bp, Homo sapien
catttccacagtctatggctggacc

SEQ ID NO: 683579 - DNA, 25 bp, Homo sapien
cacatttccacagtctatggctgga

SEQ ID NO: 683580 - DNA, 25 bp, Homo sapien
catgtgaattatgatccaggacacc

SEQ ID NO: 683581 - DNA, 25 bp, Homo sapien
ggtttctacatcagatacggtcttt

SEQ ID NO: 683582 - DNA, 25 bp, Homo sapien
ttagagctgactcctaatgttcatg

SEQ ID NO: 683583 - DNA, 25 bp, Homo sapien
gcatgtggtttctacatcagatacg

SEQ ID NO: 683584 - DNA, 25 bp, Homo sapien
gatcaacatattgactaaaacactc

SEQ ID NO: 683585 - DNA, 25 bp, Homo sapien
taagcagggtcatcatataaatgat

SEQ ID NO: 683586 - DNA, 25 bp, Homo sapien
gaatttgagtcaatagcataaatat

SEQ ID NO: 683587 - DNA, 25 bp, Homo sapien
cacagacagccaaccagattggtca

SEQ ID NO: 683588 - DNA, 25 bp, Homo sapien
tgtatcgccccctggttataagcat

SEQ ID NO: 683589 - DNA, 25 bp, Homo sapien
gaatccatgcacttacagctggatt

SEQ ID NO: 683590 - DNA, 25 bp, Homo sapien
atccccgtaagatctcatcccaggg

SEQ ID NO: 683591 - DNA, 25 bp, Homo sapien
tctgttcagtgcatcctaaagcgcc

SEQ ID NO: 683592 - DNA, 25 bp, Homo sapien
ggaggagctgaagaactctcgatcc

SEQ ID NO: 683593 - DNA, 25 bp, Homo sapien
gaggtcccagtggacttgatttctc

SEQ ID NO: 683594 - DNA, 25 bp, Homo sapien
aactctcgatccttcgaagaggtcc

SEQ ID NO: 683595 - DNA, 25 bp, Homo sapien
tcgaagaggtcccagtggacttgat

SEQ ID NO: 683596 - DNA, 25 bp, Homo sapien
gcgttgtaaacagggcatccttgcc

SEQ ID NO: 683597 - DNA, 25 bp, Homo sapien
tgctgccagcccttcgaacaggctg

SEQ ID NO: 683598 - DNA, 25 bp, Homo sapien
ctgcgttgtaaacagggcatccttg

SEQ ID NO: 683599 - DNA, 25 bp, Homo sapien
tgccagcccttcgaacaggctgttt

SEQ ID NO: 683600 - DNA, 25 bp, Homo sapien
aacagctcagctgtgatagactgct

SEQ ID NO: 683601 - DNA, 25 bp, Homo sapien
gcgaacgacagattttcattatagg

SEQ ID NO: 683602 - DNA, 25 bp, Homo sapien
gatgatgagtcatttgcgaacgaca

SEQ ID NO: 683603 - DNA, 25 bp, Homo sapien
tgagccctgtctgtttccccggttc

SEQ ID NO: 683604 - DNA, 25 bp, Homo sapien
tagtcaagcgcctgtttgatcagat

SEQ ID NO: 683605 - DNA, 25 bp, Homo sapien
caagcgcctgtttgatcagatccat

SEQ ID NO: 683606 - DNA, 25 bp, Homo sapien
ttagcaaatagtcaagcgcctgttt

SEQ ID NO: 683607 - DNA, 25 bp, Homo sapien
gcaaatagtcaagcgcctgtttgat

SEQ ID NO: 683608 - DNA, 25 bp, Homo sapien
ggagttgagtcaaactgcctctggc

SEQ ID NO: 683609 - DNA, 25 bp, Homo sapien
gaaacttcagagctatcctgtcttt

SEQ ID NO: 683610 - DNA, 25 bp, Homo sapien
tgggctttgctattaggggcaccaa

SEQ ID NO: 683611 - DNA, 25 bp, Homo sapien
ccaaagaagatcagagggtcggaga

SEQ ID NO: 683612 - DNA, 25 bp, Homo sapien
aaatgtcctcgttatccccattagt

SEQ ID NO: 683613 - DNA, 25 bp, Homo sapien
aatgtcctcgttatccccattagta

SEQ ID NO: 683614 - DNA, 25 bp, Homo sapien
agctcaggctgcgtctccatccgaa

SEQ ID NO: 683615 - DNA, 25 bp, Homo sapien
tggtatttgcaacactctcattttc

SEQ ID NO: 683616 - DNA, 25 bp, Homo sapien
tccgaaagcctgctttctgcatagc

SEQ ID NO: 683617 - DNA, 25 bp, Homo sapien
gcatggtatttgcaacactctcatt

SEQ ID NO: 683618 - DNA, 25 bp, Homo sapien
gaaccaacgagcttcatctcccaag

SEQ ID NO: 683619 - DNA, 25 bp, Homo sapien
agtgacagaaccaacgagcttcatc

SEQ ID NO: 683620 - DNA, 25 bp, Homo sapien
gacagaaccaacgagcttcatctcc

SEQ ID NO: 683621 - DNA, 25 bp, Homo sapien
agaaccaacgagcttcatctcccaa

SEQ ID NO: 683622 - DNA, 25 bp, Homo sapien
gagccttcaccaatctcatctaagc

SEQ ID NO: 683623 - DNA, 25 bp, Homo sapien
tgtgagccttcaccaatctcatcta

SEQ ID NO: 683624 - DNA, 25 bp, Homo sapien
cattttgtgagccttcaccaatctc

SEQ ID NO: 683625 - DNA, 25 bp, Homo sapien
tttgtgagccttcaccaatctcatc

SEQ ID NO: 683626 - DNA, 25 bp, Homo sapien
tctctatgggtgtcccctaacaaaa

SEQ ID NO: 683627 - DNA, 25 bp, Homo sapien
ggtgtcccctaacaaaatgtcagaa

SEQ ID NO: 683628 - DNA, 25 bp, Homo sapien
acttttcccatctctatgggtgtcc

SEQ ID NO: 683629 - DNA, 25 bp, Homo sapien
tcccatctctatgggtgtcccctaa

SEQ ID NO: 683630 - DNA, 25 bp, Homo sapien
gcattttttagatctctaccatctc

SEQ ID NO: 683631 - DNA, 25 bp, Homo sapien
tttggattacaattaccttatgtac

SEQ ID NO: 683632 - DNA, 25 bp, Homo sapien
tctgtcataaacatcagtgagtttg

SEQ ID NO: 683633 - DNA, 25 bp, Homo sapien
ttgtctgtcataaacatcagtgagt

SEQ ID NO: 683634 - DNA, 25 bp, Homo sapien
caagacgagaagttttattggctgc

SEQ ID NO: 683635 - DNA, 25 bp, Homo sapien
cggccattgagagccaagacgagaa

SEQ ID NO: 683636 - DNA, 25 bp, Homo sapien
tcagcagttccacggccattgagag

SEQ ID NO: 683637 - DNA, 25 bp, Homo sapien
tggcccgttagatcagcagttccac

SEQ ID NO: 683638 - DNA, 25 bp, Homo sapien
cacgttgtgccgtggtagatcagca

SEQ ID NO: 683639 - DNA, 25 bp, Homo sapien
tagatcagcatggaaggatggcaca

SEQ ID NO: 683640 - DNA, 25 bp, Homo sapien
gataataacaatagttactgagcac

SEQ ID NO: 683641 - DNA, 25 bp, Homo sapien
ggatggcacacaatgataatggtcg

SEQ ID NO: 683642 - DNA, 25 bp, Homo sapien
ttttcagattccgtagcttcctgta

SEQ ID NO: 683643 - DNA, 25 bp, Homo sapien
gtagtagttgcagattctggcagcc

SEQ ID NO: 683644 - DNA, 25 bp, Homo sapien
tggcagcccggtgttaggtttataa

SEQ ID NO: 683645 - DNA, 25 bp, Homo sapien
cagattccgtagcttcctgtagtag

SEQ ID NO: 683646 - DNA, 25 bp, Homo sapien
tatatagcttcgttcattgtcttca

SEQ ID NO: 683647 - DNA, 25 bp, Homo sapien
gcctgatggagccaatctgatggag

SEQ ID NO: 683648 - DNA, 25 bp, Homo sapien
cacactttcaactgtggggcctgat

SEQ ID NO: 683649 - DNA, 25 bp, Homo sapien
ttgtcttcataacccgttagccagt

SEQ ID NO: 683650 - DNA, 25 bp, Homo sapien
tcaagcaggcttgtttttccacttc

SEQ ID NO: 683651 - DNA, 25 bp, Homo sapien
taatgccatcacacggctgcctcac

SEQ ID NO: 683652 - DNA, 25 bp, Homo sapien
ttcctaatgccatcacacggctgcc

SEQ ID NO: 683653 - DNA, 25 bp, Homo sapien
ttccacttcctcattttcctaatgc

SEQ ID NO: 683654 - DNA, 25 bp, Homo sapien
gaatgccagtcgctgattgaggcgg

SEQ ID NO: 683655 - DNA, 25 bp, Homo sapien
atgccagtcgctgattgaggcggca

SEQ ID NO: 683656 - DNA, 25 bp, Homo sapien
ccagtcgctgattgaggcggcagct

SEQ ID NO: 683657 - DNA, 25 bp, Homo sapien
ctgaatgccagtcgctgattgaggc

SEQ ID NO: 683658 - DNA, 25 bp, Homo sapien
agatccagggaaacaaaggagaagg

SEQ ID NO: 683659 - DNA, 25 bp, Homo sapien
ctagatccagggaaacaaaggagaa

SEQ ID NO: 683660 - DNA, 25 bp, Homo sapien
tagatccagggaaacaaaggagaag

SEQ ID NO: 683661 - DNA, 25 bp, Homo sapien
gatccctggcagtcattttgatctc

SEQ ID NO: 683662 - DNA, 25 bp, Homo sapien
ggatccctggcagtcattttgatct

SEQ ID NO: 683663 - DNA, 25 bp, Homo sapien
ccattttttcacactgccgtgattg

SEQ ID NO: 683664 - DNA, 25 bp, Homo sapien
ttaatgcggtcctatcaagtggtag

SEQ ID NO: 683665 - DNA, 25 bp, Homo sapien
gctgcttgttcttgtacaatactaa

SEQ ID NO: 683666 - DNA, 25 bp, Homo sapien
tatcaagagccacctcacaaggttt

SEQ ID NO: 683667 - DNA, 25 bp, Homo sapien
tggaaacaccgaagacactgtttct

SEQ ID NO: 683668 - DNA, 25 bp, Homo sapien
cggggtggaaacaccgaagacactg

SEQ ID NO: 683669 - DNA, 25 bp, Homo sapien
tcacatgtgcaaggagatacgctgg

SEQ ID NO: 683670 - DNA, 25 bp, Homo sapien
acatgtgcaaggagatacgctggta

SEQ ID NO: 683671 - DNA, 25 bp, Homo sapien
cttttctctgcgtctaatctcaatg

SEQ ID NO: 683672 - DNA, 25 bp, Homo sapien
tttcatccctgatcccagggcattg

SEQ ID NO: 683673 - DNA, 25 bp, Homo sapien
tgacagaatcaatggcatattgcac

SEQ ID NO: 683674 - DNA, 25 bp, Homo sapien
gaatcaatggcatattgcacattgc

SEQ ID NO: 683675 - DNA, 25 bp, Homo sapien
actttcatccctgatcccagggcat

SEQ ID NO: 683676 - DNA, 25 bp, Homo sapien
gagaagttgggccaatgcaaaggtg

SEQ ID NO: 683677 - DNA, 25 bp, Homo sapien
ttgggccaatgcaaaggtgattgca

SEQ ID NO: 683678 - DNA, 25 bp, Homo sapien
agaagttgggccaatgcaaaggtga

SEQ ID NO: 683679 - DNA, 25 bp, Homo sapien
ttgagtccaagtttggcagaatgaa

SEQ ID NO: 683680 - DNA, 25 bp, Homo sapien
gaatgaagaatatcagtgccctcca

SEQ ID NO: 683681 - DNA, 25 bp, Homo sapien
cagaatgaagaatatcagtgccctc

SEQ ID NO: 683682 - DNA, 25 bp, Homo sapien
atttccttgagtccaagtttggcag

SEQ ID NO: 683683 - DNA, 25 bp, Homo sapien
cttatcaggggcaaggatgctatta

SEQ ID NO: 683684 - DNA, 25 bp, Homo sapien
tatcaggggcaaggatgctattatg

SEQ ID NO: 683685 - DNA, 25 bp, Homo sapien
caaggatgctattatgggtcccaaa

SEQ ID NO: 683686 - DNA, 25 bp, Homo sapien
gggcaaggatgctattatgggtccc

SEQ ID NO: 683687 - DNA, 25 bp, Homo sapien
tggaaactgactgcaggtcccagct

SEQ ID NO: 683688 - DNA, 25 bp, Homo sapien
tgtcactgttgagaacgggtcgcat

SEQ ID NO: 683689 - DNA, 25 bp, Homo sapien
tgcttcaaaagctggtcagagggag

SEQ ID NO: 683690 - DNA, 25 bp, Homo sapien
tgggttgagaggtctggaaactgac

SEQ ID NO: 683691 - DNA, 25 bp, Homo sapien
tcaccgagatgactgtctttctgtt

SEQ ID NO: 683692 - DNA, 25 bp, Homo sapien
tttaaaggcggctgacgaaaagcag

SEQ ID NO: 683693 - DNA, 25 bp, Homo sapien
gcctctgcaggaccaaattgacagc

SEQ ID NO: 683694 - DNA, 25 bp, Homo sapien
tttctgtttcgttgacagcctctgc

SEQ ID NO: 683695 - DNA, 25 bp, Homo sapien
tgtactgcatcttgctgtgtaccag

SEQ ID NO: 683696 - DNA, 25 bp, Homo sapien
ttccaggaactggatcttaaaatgc

SEQ ID NO: 683697 - DNA, 25 bp, Homo sapien
tccaggaactggatcttaaaatgcc

SEQ ID NO: 683698 - DNA, 25 bp, Homo sapien
ctttccaggaactggatcttaaaat

SEQ ID NO: 683699 - DNA, 25 bp, Homo sapien
caggaactggatcttaaaatgccag

SEQ ID NO: 683700 - DNA, 25 bp, Homo sapien
gtcaggaaattgagttggaagagat

SEQ ID NO: 683701 - DNA, 25 bp, Homo sapien
tctttcctgggtgtcaggaaattga

SEQ ID NO: 683702 - DNA, 25 bp, Homo sapien
tcaggaaattgagttggaagagatg

SEQ ID NO: 683703 - DNA, 25 bp, Homo sapien
tcatctttcctgggtgtcaggaaat

SEQ ID NO: 683704 - DNA, 25 bp, Homo sapien
ttggtagttgtctggaagttctcca

SEQ ID NO: 683705 - DNA, 25 bp, Homo sapien
tagttgtctggaagttctccatcct

SEQ ID NO: 683706 - DNA, 25 bp, Homo sapien
ggtagttgtctggaagttctccatc

SEQ ID NO: 683707 - DNA, 25 bp, Homo sapien
ttgtctggaagttctccatccttct

SEQ ID NO: 683708 - DNA, 25 bp, Homo sapien
tctggggtcgctcactgtagaagca

SEQ ID NO: 683709 - DNA, 25 bp, Homo sapien
cagtatccagactctggtttgtggt

SEQ ID NO: 683710 - DNA, 25 bp, Homo sapien
tgttaaaagcgatcccagtatccag

SEQ ID NO: 683711 - DNA, 25 bp, Homo sapien
aatcaggaagtgttcttgaggccat

SEQ ID NO: 683712 - DNA, 25 bp, Homo sapien
aatctagtttaagctgcctggcagt

SEQ ID NO: 683713 - DNA, 25 bp, Homo sapien
catacgatctcactaggatcagtct

SEQ ID NO: 683714 - DNA, 25 bp, Homo sapien
tgaaaaatctagtttaagctgcctg

SEQ ID NO: 683715 - DNA, 25 bp, Homo sapien
tcatacgatctcactaggatcagtc

SEQ ID NO: 683716 - DNA, 25 bp, Homo sapien
cattacgaacttaatagccacattc

SEQ ID NO: 683717 - DNA, 25 bp, Homo sapien
attcagctccaagcgtccagtcccc

SEQ ID NO: 683718 - DNA, 25 bp, Homo sapien
ccttcctcattacgaacttaatagc

SEQ ID NO: 683719 - DNA, 25 bp, Homo sapien
ttgtgctcataattagtattcattt

SEQ ID NO: 683720 - DNA, 25 bp, Homo sapien
ccttttcaacatcatttttaggttg

SEQ ID NO: 683721 - DNA, 25 bp, Homo sapien
aaagcctttgctctgttcccgcact

SEQ ID NO: 683722 - DNA, 25 bp, Homo sapien
tgaatatttaattcctcccttttca

SEQ ID NO: 683723 - DNA, 25 bp, Homo sapien
catttttaggttgtgtgaatcattt

SEQ ID NO: 683724 - DNA, 25 bp, Homo sapien
ggattctctgacgaatcaccaccag

SEQ ID NO: 683725 - DNA, 25 bp, Homo sapien
ggcgagctcccatttggattcgaat

SEQ ID NO: 683726 - DNA, 25 bp, Homo sapien
tggagctgtgtgagcccccgataat

SEQ ID NO: 683727 - DNA, 25 bp, Homo sapien
tctccccatcgcagagagtttccag

SEQ ID NO: 683728 - DNA, 25 bp, Homo sapien
ggcaatctgaatgggaaacagggcc

SEQ ID NO: 683729 - DNA, 25 bp, Homo sapien
tggcaatctgaatgggaaacagggc

SEQ ID NO: 683730 - DNA, 25 bp, Homo sapien
caatctgaatgggaaacagggccat

SEQ ID NO: 683731 - DNA, 25 bp, Homo sapien
tggtggcaatctgaatgggaaacag

SEQ ID NO: 683732 - DNA, 25 bp, Homo sapien
tgggtgttgactcttcactggcttc

SEQ ID NO: 683733 - DNA, 25 bp, Homo sapien
acatttgttgggtgttgactcttca

SEQ ID NO: 683734 - DNA, 25 bp, Homo sapien
ctgcaaaagagcaccatctcgttgt

SEQ ID NO: 683735 - DNA, 25 bp, Homo sapien
tcgttgtggtatgcacagtaggtac

SEQ ID NO: 683736 - DNA, 25 bp, Homo sapien
gccagagaccgtttgtgttccactt

SEQ ID NO: 683737 - DNA, 25 bp, Homo sapien
tgtccctgaaatcctattactggtg

SEQ ID NO: 683738 - DNA, 25 bp, Homo sapien
tctcaaagtgctaatagcaagattc

SEQ ID NO: 683739 - DNA, 25 bp, Homo sapien
tcattgactaatgccagagaccgtt

SEQ ID NO: 683740 - DNA, 25 bp, Homo sapien
gagaagtcctatgttgaattcacac

SEQ ID NO: 683741 - DNA, 25 bp, Homo sapien
gactgagcctggagaagtcctatgt

SEQ ID NO: 683742 - DNA, 25 bp, Homo sapien
gtcctcatccactactctgctcctg

SEQ ID NO: 683743 - DNA, 25 bp, Homo sapien
aagacacccatggaccctggaatcc

SEQ ID NO: 683744 - DNA, 25 bp, Homo sapien
cttccaatagagctgtctgaggtag

SEQ ID NO: 683745 - DNA, 25 bp, Homo sapien
tgtctgaggtaggatacagatttgc

SEQ ID NO: 683746 - DNA, 25 bp, Homo sapien
gtgtctgcaacaccttccaatagag

SEQ ID NO: 683747 - DNA, 25 bp, Homo sapien
agtgtgtctgcaacaccttccaata

SEQ ID NO: 683748 - DNA, 25 bp, Homo sapien
cctcagagtccctaatgaggacagc

SEQ ID NO: 683749 - DNA, 25 bp, Homo sapien
cagggggcttttctatatggtaccg

SEQ ID NO: 683750 - DNA, 25 bp, Homo sapien
accgatcattttcagagcagtgata

SEQ ID NO: 683751 - DNA, 25 bp, Homo sapien
tatatggtaccgatcattttcagag

SEQ ID NO: 683752 - DNA, 25 bp, Homo sapien
gggcttttctatatggtaccgatca

SEQ ID NO: 683753 - DNA, 25 bp, Homo sapien
cacttggcttcctaattgggcctcg

SEQ ID NO: 683754 - DNA, 25 bp, Homo sapien
agaaagtgatccttgtgcagtttct

SEQ ID NO: 683755 - DNA, 25 bp, Homo sapien
aaagtgatccttgtgcagtttctgt

SEQ ID NO: 683756 - DNA, 25 bp, Homo sapien
ttggcttcctaattgggcctcgtac

SEQ ID NO: 683757 - DNA, 25 bp, Homo sapien
aaaaaaattgaggttgccgccagct

SEQ ID NO: 683758 - DNA, 25 bp, Homo sapien
tgaggttgccgccagcttggcagaa

SEQ ID NO: 683759 - DNA, 25 bp, Homo sapien
ttgaggttgccgccagcttggcaga

SEQ ID NO: 683760 - DNA, 25 bp, Homo sapien
aaaattgaggttgccgccagcttgg

SEQ ID NO: 683761 - DNA, 25 bp, Homo sapien
tagcttcacctggaaagttaattca

SEQ ID NO: 683762 - DNA, 25 bp, Homo sapien
agcttcacctggaaagttaattcag

SEQ ID NO: 683763 - DNA, 25 bp, Homo sapien
acagcttgtggacttagcttcacct

SEQ ID NO: 683764 - DNA, 25 bp, Homo sapien
acaacagcttgtggacttagcttca

SEQ ID NO: 683765 - DNA, 25 bp, Homo sapien
ctacggatgccctggctcagcaatc

SEQ ID NO: 683766 - DNA, 25 bp, Homo sapien
cataaagggataagtgtaatgcact

SEQ ID NO: 683767 - DNA, 25 bp, Homo sapien
taagaatgttgtgcttggaggtacc

SEQ ID NO: 683768 - DNA, 25 bp, Homo sapien
ccttcccatagattggaatgaacac

SEQ ID NO: 683769 - DNA, 25 bp, Homo sapien
tatgagtaattccacagcatgccac

SEQ ID NO: 683770 - DNA, 25 bp, Homo sapien
gaaatcacaactccataatatgctg

SEQ ID NO: 683771 - DNA, 25 bp, Homo sapien
ccaggattttgcactagtcatctgc

SEQ ID NO: 683772 - DNA, 25 bp, Homo sapien
gaaccaacatcagaagtcctctcag

SEQ ID NO: 683773 - DNA, 25 bp, Homo sapien
tacaactggatttccatcaagggtg

SEQ ID NO: 683774 - DNA, 25 bp, Homo sapien
caagggtgtttcatgctcagaggtg

SEQ ID NO: 683775 - DNA, 25 bp, Homo sapien
ggtaattcattggaggaccaggtca

SEQ ID NO: 683776 - DNA, 25 bp, Homo sapien
tcaagttgacaggtggagtgcatgc

SEQ ID NO: 683777 - DNA, 25 bp, Homo sapien
ggccaaattttgctaacgcctgata

SEQ ID NO: 683778 - DNA, 25 bp, Homo sapien
aaaatggccacttctgctactgggt

SEQ ID NO: 683779 - DNA, 25 bp, Homo sapien
tatgctgacaggtttaaaacccgag

SEQ ID NO: 683780 - DNA, 25 bp, Homo sapien
gggatataatcctgtctggcactca

SEQ ID NO: 683781 - DNA, 25 bp, Homo sapien
gagccgtgaaatgtattgtcaaaca

SEQ ID NO: 683782 - DNA, 25 bp, Homo sapien
tgaaaaatgtgaattcgctctctga

SEQ ID NO: 683783 - DNA, 25 bp, Homo sapien
caagtagcaggaaatgagccgtgaa

SEQ ID NO: 683784 - DNA, 25 bp, Homo sapien
gggagaaccataaggatatttgaca

SEQ ID NO: 683785 - DNA, 25 bp, Homo sapien
tcattgcccagcttgttttagattc

SEQ ID NO: 683786 - DNA, 25 bp, Homo sapien
cagaagggagcagcaaaagtattgc

SEQ ID NO: 683787 - DNA, 25 bp, Homo sapien
tcataactgatttattgggaataac

SEQ ID NO: 683788 - DNA, 25 bp, Homo sapien
aacacatgaagagttagattttctc

SEQ ID NO: 683789 - DNA, 25 bp, Homo sapien
gcatttgatgagtttccccttccca

SEQ ID NO: 683790 - DNA, 25 bp, Homo sapien
aagtaactcaggattgggtcccaag

SEQ ID NO: 683791 - DNA, 25 bp, Homo sapien
gaatggagttctggtgactatcagg

SEQ ID NO: 683792 - DNA, 25 bp, Homo sapien
tcccaagagcagatagcatttgatg

SEQ ID NO: 683793 - DNA, 25 bp, Homo sapien
tctctctggaccacaaagaaaaggt

SEQ ID NO: 683794 - DNA, 25 bp, Homo sapien
taactccgtgtgattcctctctgag

SEQ ID NO: 683795 - DNA, 25 bp, Homo sapien
gacattacgaatgagctgttctctc

SEQ ID NO: 683796 - DNA, 25 bp, Homo sapien
tatggtaattggaccagaggaacca

SEQ ID NO: 683797 - DNA, 25 bp, Homo sapien
ttgtttattgaggaagctgtgtgtg

SEQ ID NO: 683798 - DNA, 25 bp, Homo sapien
gactctattactagagcagtaagct

SEQ ID NO: 683799 - DNA, 25 bp, Homo sapien
aaatgactctattactagagcagta

SEQ ID NO: 683800 - DNA, 25 bp, Homo sapien
agcagtaagcttgtttattgaggaa

SEQ ID NO: 683801 - DNA, 25 bp, Homo sapien
gtcatcgcataaagaaatttccaag

SEQ ID NO: 683802 - DNA, 25 bp, Homo sapien
tgtggatcagagcaaggttgtaacc

SEQ ID NO: 683803 - DNA, 25 bp, Homo sapien
cccttgacaaatcagtgtggttgga

SEQ ID NO: 683804 - DNA, 25 bp, Homo sapien
tccaagtgtccactcttgtggatca

SEQ ID NO: 683805 - DNA, 25 bp, Homo sapien
gtgttcatcaggggtttttgccaat

SEQ ID NO: 683806 - DNA, 25 bp, Homo sapien
cttctgtgttcatcaggggtttttg

SEQ ID NO: 683807 - DNA, 25 bp, Homo sapien
tctgtgttcatcaggggtttttgcc

SEQ ID NO: 683808 - DNA, 25 bp, Homo sapien
gttcatcaggggtttttgccaatct

SEQ ID NO: 683809 - DNA, 25 bp, Homo sapien
tctgtctgcaatgactgccacatcc

SEQ ID NO: 683810 - DNA, 25 bp, Homo sapien
gccatggagttagcccaggtctcca

SEQ ID NO: 683811 - DNA, 25 bp, Homo sapien
tggcacgccatggagttagcccagg

SEQ ID NO: 683812 - DNA, 25 bp, Homo sapien
gctccatgtgcgtggcacgccatgg

SEQ ID NO: 683813 - DNA, 25 bp, Homo sapien
tgcgtggcacgccatggagttagcc

SEQ ID NO: 683814 - DNA, 25 bp, Homo sapien
tggacacctttccttgaagctattg

SEQ ID NO: 683815 - DNA, 25 bp, Homo sapien
tatgctggagtttaccagaaagact

SEQ ID NO: 683816 - DNA, 25 bp, Homo sapien
catctcaattggtaatgggtctttc

SEQ ID NO: 683817 - DNA, 25 bp, Homo sapien
ttcaaggagccagtaagaacctctc

SEQ ID NO: 683818 - DNA, 25 bp, Homo sapien
tagctggttagattttgagtaagtg

SEQ ID NO: 683819 - DNA, 25 bp, Homo sapien
taagtgttcgaatgagattaactct

SEQ ID NO: 683820 - DNA, 25 bp, Homo sapien
agagcagtgatttcatcgggagata

SEQ ID NO: 683821 - DNA, 25 bp, Homo sapien
cagtgatttcatcgggagataaagt

SEQ ID NO: 683822 - DNA, 25 bp, Homo sapien
tcctccagtttactttccaaaggca

SEQ ID NO: 683823 - DNA, 25 bp, Homo sapien
ctgaggataaacttcctccagttta

SEQ ID NO: 683824 - DNA, 25 bp, Homo sapien
tgaggataaacttcctccagtttac

SEQ ID NO: 683825 - DNA, 25 bp, Homo sapien
cctccagtttactttccaaaggcat

SEQ ID NO: 683826 - DNA, 25 bp, Homo sapien
gcagggatttatggggctcttgagc

SEQ ID NO: 683827 - DNA, 25 bp, Homo sapien
cagggatttatggggctcttgagct

SEQ ID NO: 683828 - DNA, 25 bp, Homo sapien
aagcagggatttatggggctcttga

SEQ ID NO: 683829 - DNA, 25 bp, Homo sapien
gggatttatggggctcttgagctac

SEQ ID NO: 683830 - DNA, 25 bp, Homo sapien
atgacgtgacatagttacaagatac

SEQ ID NO: 683831 - DNA, 25 bp, Homo sapien
gcctttatcttttaatgacgtgaca

SEQ ID NO: 683832 - DNA, 25 bp, Homo sapien
cttacaccgtggctgtcgcctttat

SEQ ID NO: 683833 - DNA, 25 bp, Homo sapien
gtctgttgtgttctaaggccacctt

SEQ ID NO: 683834 - DNA, 25 bp, Homo sapien
tgacaatttcctcccaaagatattt

SEQ ID NO: 683835 - DNA, 25 bp, Homo sapien
ttgcccctttgttcattctcacaag

SEQ ID NO: 683836 - DNA, 25 bp, Homo sapien
cctttgttcattctcacaaggtcaa

SEQ ID NO: 683837 - DNA, 25 bp, Homo sapien
cacaaggtcaaaaatgacaatttcc

SEQ ID NO: 683838 - DNA, 25 bp, Homo sapien
ggagtctctagtttaaccagattca

SEQ ID NO: 683839 - DNA, 25 bp, Homo sapien
gagtctctagtttaaccagattcat

SEQ ID NO: 683840 - DNA, 25 bp, Homo sapien
ctaggagtctctagtttaaccagat

SEQ ID NO: 683841 - DNA, 25 bp, Homo sapien
ccactaggagtctctagtttaacca

SEQ ID NO: 683842 - DNA, 25 bp, Homo sapien
tcaaccaaaccttgttaatgctgcc

SEQ ID NO: 683843 - DNA, 25 bp, Homo sapien
cataatgacatctgctggcggacac

SEQ ID NO: 683844 - DNA, 25 bp, Homo sapien
caaacactcgttttggctactgcct

SEQ ID NO: 683845 - DNA, 25 bp, Homo sapien
cataaaacttcgctgtgtccctaaa

SEQ ID NO: 683846 - DNA, 25 bp, Homo sapien
actttttcatctcgcatttgcagac

SEQ ID NO: 683847 - DNA, 25 bp, Homo sapien
gccactttttcatctcgcatttgca

SEQ ID NO: 683848 - DNA, 25 bp, Homo sapien
aaacagccactttttcatctcgcat

SEQ ID NO: 683849 - DNA, 25 bp, Homo sapien
cagccactttttcatctcgcatttg

SEQ ID NO: 683850 - DNA, 25 bp, Homo sapien
agggatagcgtctcctctcactggg

SEQ ID NO: 683851 - DNA, 25 bp, Homo sapien
ggcatacctaacactcgggctgcag

SEQ ID NO: 683852 - DNA, 25 bp, Homo sapien
ggcgctgaagtgtgaggcataccta

SEQ ID NO: 683853 - DNA, 25 bp, Homo sapien
gcatccctctgcgtggtcagtgcca

SEQ ID NO: 683854 - DNA, 25 bp, Homo sapien
tgacatttgattgatcacctgtcat

SEQ ID NO: 683855 - DNA, 25 bp, Homo sapien
cagctttccacttgattgctagttt

SEQ ID NO: 683856 - DNA, 25 bp, Homo sapien
ttgatttgacatttgattgatcacc

SEQ ID NO: 683857 - DNA, 25 bp, Homo sapien
gctttccacttgattgctagttttg

SEQ ID NO: 683858 - DNA, 25 bp, Homo sapien
ggccttgggaattgtgctgtccatt

SEQ ID NO: 683859 - DNA, 25 bp, Homo sapien
ctgagttgatctgtttcttttccca

SEQ ID NO: 683860 - DNA, 25 bp, Homo sapien
tcccagggccttgggaattgtgctg

SEQ ID NO: 683861 - DNA, 25 bp, Homo sapien
tgtgctgtccattgaatgggttttg

SEQ ID NO: 683862 - DNA, 25 bp, Homo sapien
gaccacaagtttgcaggcagggtgc

SEQ ID NO: 683863 - DNA, 25 bp, Homo sapien
tgctgacttggaccagatggatggc

SEQ ID NO: 683864 - DNA, 25 bp, Homo sapien
gatggatggcggaagagccatgaca

SEQ ID NO: 683865 - DNA, 25 bp, Homo sapien
caatgcagtcaaaggctatgctgac

SEQ ID NO: 683866 - DNA, 25 bp, Homo sapien
tgatggtgctaatgatgaacatgac

SEQ ID NO: 683867 - DNA, 25 bp, Homo sapien
tgaacatgacactaactgtcatcgc

SEQ ID NO: 683868 - DNA, 25 bp, Homo sapien
aatgtgataaaaacgatgatggtgc

SEQ ID NO: 683869 - DNA, 25 bp, Homo sapien
ggtgatccatgggtgaatgtgataa

SEQ ID NO: 683870 - DNA, 25 bp, Homo sapien
aaaaggcatttacgcttagcagtcc

SEQ ID NO: 683871 - DNA, 25 bp, Homo sapien
ttcctgatggccaagacgtaagatg

SEQ ID NO: 683872 - DNA, 25 bp, Homo sapien
tgaaatcggtcaagcttcctgatgg

SEQ ID NO: 683873 - DNA, 25 bp, Homo sapien
agttgaccatgtgcgaaagaccaga

SEQ ID NO: 683874 - DNA, 25 bp, Homo sapien
acactttacatgttccaggaaggac

SEQ ID NO: 683875 - DNA, 25 bp, Homo sapien
tgcctgccggattgtgagatgtgct

SEQ ID NO: 683876 - DNA, 25 bp, Homo sapien
gatgtgctggagatgggaataactt

SEQ ID NO: 683877 - DNA, 25 bp, Homo sapien
tcttggacctactgagtcagttggg

SEQ ID NO: 683878 - DNA, 25 bp, Homo sapien
ggtaaattcacagacgacactattc

SEQ ID NO: 683879 - DNA, 25 bp, Homo sapien
cagacgacactattctcaaggtttt

SEQ ID NO: 683880 - DNA, 25 bp, Homo sapien
agatgtgtatgtggtaaattcacag

SEQ ID NO: 683881 - DNA, 25 bp, Homo sapien
tatgtggtaaattcacagacgacac

SEQ ID NO: 683882 - DNA, 25 bp, Homo sapien
ttggttgggtctccacatgcgctca

SEQ ID NO: 683883 - DNA, 25 bp, Homo sapien
cacccaacttcatgagatgcacagg

SEQ ID NO: 683884 - DNA, 25 bp, Homo sapien
atccgctaccaacaggacttgcctg

SEQ ID NO: 683885 - DNA, 25 bp, Homo sapien
tgtcgctcatgctcgtattcactgt

SEQ ID NO: 683886 - DNA, 25 bp, Homo sapien
tccactttggaacctaccccgatca

SEQ ID NO: 683887 - DNA, 25 bp, Homo sapien
ccactttggaacctaccccgatcat

SEQ ID NO: 683888 - DNA, 25 bp, Homo sapien
tcatccactttggaacctaccccga

SEQ ID NO: 683889 - DNA, 25 bp, Homo sapien
catccactttggaacctaccccgat

SEQ ID NO: 683890 - DNA, 25 bp, Homo sapien
tcggagaaccctgtggcatagtaat

SEQ ID NO: 683891 - DNA, 25 bp, Homo sapien
cctccaggaccaacgacataaaggg

SEQ ID NO: 683892 - DNA, 25 bp, Homo sapien
catctgggaattgagtctccatgcc

SEQ ID NO: 683893 - DNA, 25 bp, Homo sapien
gagccagcatttgaatacagattcg

SEQ ID NO: 683894 - DNA, 25 bp, Homo sapien
ccaggaaatctgattatggtggcaa

SEQ ID NO: 683895 - DNA, 25 bp, Homo sapien
tgagctcattccttcttctaacttc

SEQ ID NO: 683896 - DNA, 25 bp, Homo sapien
caggtgaattggaagtctgttttcc

SEQ ID NO: 683897 - DNA, 25 bp, Homo sapien
tccttcttctaacttctttgaagca

SEQ ID NO: 683898 - DNA, 25 bp, Homo sapien
gaaatcacttcagtgtgctaggcat

SEQ ID NO: 683899 - DNA, 25 bp, Homo sapien
gaaagtgaaagtcagttactcagcc

SEQ ID NO: 683900 - DNA, 25 bp, Homo sapien
catctttttagagggtactgaatca

SEQ ID NO: 683901 - DNA, 25 bp, Homo sapien
gaattgggactcaaatttcgagttc

SEQ ID NO: 683902 - DNA, 25 bp, Homo sapien
agagccgatcaaagacagcccagga

SEQ ID NO: 683903 - DNA, 25 bp, Homo sapien
gagccccagggtagagccgatcaaa

SEQ ID NO: 683904 - DNA, 25 bp, Homo sapien
tggcctttcccgttgttctttgatc

SEQ ID NO: 683905 - DNA, 25 bp, Homo sapien
agcccaggacccattctgacttctg

SEQ ID NO: 683906 - DNA, 25 bp, Homo sapien
tccacgctgacttccgcagggatct

SEQ ID NO: 683907 - DNA, 25 bp, Homo sapien
tatccacgctgacttccgcagggat

SEQ ID NO: 683908 - DNA, 25 bp, Homo sapien
ctgtatccacgctgacttccgcagg

SEQ ID NO: 683909 - DNA, 25 bp, Homo sapien
tgtatccacgctgacttccgcaggg

SEQ ID NO: 683910 - DNA, 25 bp, Homo sapien
ccggaactgctggggctttcctaga

SEQ ID NO: 683911 - DNA, 25 bp, Homo sapien
tccggaactgctggggctttcctag

SEQ ID NO: 683912 - DNA, 25 bp, Homo sapien
ctgaaggctattccggaactgctgg

SEQ ID NO: 683913 - DNA, 25 bp, Homo sapien
cgactgaaggctattccggaactgc

SEQ ID NO: 683914 - DNA, 25 bp, Homo sapien
aggccccttgctcagttgcagcacg

SEQ ID NO: 683915 - DNA, 25 bp, Homo sapien
ttgctcagttgcagcacgcaagcat

SEQ ID NO: 683916 - DNA, 25 bp, Homo sapien
gcagcacgcaagcatctccagtctt

SEQ ID NO: 683917 - DNA, 25 bp, Homo sapien
tcagttgcagcacgcaagcatctcc

SEQ ID NO: 683918 - DNA, 25 bp, Homo sapien
ggtgcgtgtggaagaaggaatggcg

SEQ ID NO: 683919 - DNA, 25 bp, Homo sapien
tgcgtgtggaagaaggaatggcggc

SEQ ID NO: 683920 - DNA, 25 bp, Homo sapien
gtgcgtgtggaagaaggaatggcgg

SEQ ID NO: 683921 - DNA, 25 bp, Homo sapien
tacaaggcattggaacagagacctc

SEQ ID NO: 683922 - DNA, 25 bp, Homo sapien
gaacagagacctcttctgctcttga

SEQ ID NO: 683923 - DNA, 25 bp, Homo sapien
ttctgctcttgaatcgccaaactca

SEQ ID NO: 683924 - DNA, 25 bp, Homo sapien
ggaggtggagtttctttacaaggca

SEQ ID NO: 683925 - DNA, 25 bp, Homo sapien
ttccagagccttctaaagtactttc

SEQ ID NO: 683926 - DNA, 25 bp, Homo sapien
tccagagccttctaaagtactttcc

SEQ ID NO: 683927 - DNA, 25 bp, Homo sapien
gcttccagagccttctaaagtactt

SEQ ID NO: 683928 - DNA, 25 bp, Homo sapien
cagagccttctaaagtactttccca

SEQ ID NO: 683929 - DNA, 25 bp, Homo sapien
ttaatgttgggaaattctaccacag

SEQ ID NO: 683930 - DNA, 25 bp, Homo sapien
taatggagtcactttaatgttggga

SEQ ID NO: 683931 - DNA, 25 bp, Homo sapien
tcagagctcaagttgcatcaaatgg

SEQ ID NO: 683932 - DNA, 25 bp, Homo sapien
gataatgctttttggcaagctcctg

SEQ ID NO: 683933 - DNA, 25 bp, Homo sapien
agaaagtgctactggccaagagcca

SEQ ID NO: 683934 - DNA, 25 bp, Homo sapien
gccttttattgaacaacctctggac

SEQ ID NO: 683935 - DNA, 25 bp, Homo sapien
taattgctttatgcccaactcccct

SEQ ID NO: 683936 - DNA, 25 bp, Homo sapien
cacactcctcgcttaaggcaaagta

SEQ ID NO: 683937 - DNA, 25 bp, Homo sapien
ttttgatcatggatatctggttttt

SEQ ID NO: 683938 - DNA, 25 bp, Homo sapien
taatttcctgtaatccagcaaggaa

SEQ ID NO: 683939 - DNA, 25 bp, Homo sapien
ccagcaaggaatgccgttctaagga

SEQ ID NO: 683940 - DNA, 25 bp, Homo sapien
ggaatgccgttctaaggacatctgt

SEQ ID NO: 683941 - DNA, 25 bp, Homo sapien
ggcacgcgtgctgtgaattctgcat

SEQ ID NO: 683942 - DNA, 25 bp, Homo sapien
gaaatggacatctgagttctaagac

SEQ ID NO: 683943 - DNA, 25 bp, Homo sapien
taagacatcgcgctctgcagaggtg

SEQ ID NO: 683944 - DNA, 25 bp, Homo sapien
tagacccgcttcagccagtgtggaa

SEQ ID NO: 683945 - DNA, 25 bp, Homo sapien
cagacaccggaagacctgaaagaat

SEQ ID NO: 683946 - DNA, 25 bp, Homo sapien
ccacagacaccggaagacctgaaag

SEQ ID NO: 683947 - DNA, 25 bp, Homo sapien
accggaagacctgaaagaatgctga

SEQ ID NO: 683948 - DNA, 25 bp, Homo sapien
gacaccggaagacctgaaagaatgc

SEQ ID NO: 683949 - DNA, 25 bp, Homo sapien
cttcccaagctctgtgatgatgctt

SEQ ID NO: 683950 - DNA, 25 bp, Homo sapien
tcatgcccacagccaaattcccata

SEQ ID NO: 683951 - DNA, 25 bp, Homo sapien
catgcccacagccaaattcccatac

SEQ ID NO: 683952 - DNA, 25 bp, Homo sapien
ttgctgcagcccttcttctctatcc

SEQ ID NO: 683953 - DNA, 25 bp, Homo sapien
tctgagagagtgttcagatctggaa

SEQ ID NO: 683954 - DNA, 25 bp, Homo sapien
tccctttagcataaccttcagaact

SEQ ID NO: 683955 - DNA, 25 bp, Homo sapien
tgttccaataaatcccagactttct

SEQ ID NO: 683956 - DNA, 25 bp, Homo sapien
cgttgttcgttagcccactgccgtt

SEQ ID NO: 683957 - DNA, 25 bp, Homo sapien
tgagaacgcagtaagaatgatgctg

SEQ ID NO: 683958 - DNA, 25 bp, Homo sapien
cactgccgtttatctccctgaaata

SEQ ID NO: 683959 - DNA, 25 bp, Homo sapien
gaaatagttttgtgtatctaaccat

SEQ ID NO: 683960 - DNA, 25 bp, Homo sapien
aaatccaaagacaggacccctggtg

SEQ ID NO: 683961 - DNA, 25 bp, Homo sapien
aagacaggacccctggtgatattac

SEQ ID NO: 683962 - DNA, 25 bp, Homo sapien
ccaaagacaggacccctggtgatat

SEQ ID NO: 683963 - DNA, 25 bp, Homo sapien
tccaaagacaggacccctggtgata

SEQ ID NO: 683964 - DNA, 25 bp, Homo sapien
atttgtattttgccaagtgctatca

SEQ ID NO: 683965 - DNA, 25 bp, Homo sapien
ttgtattttgccaagtgctatcaag

SEQ ID NO: 683966 - DNA, 25 bp, Homo sapien
tgtattttgccaagtgctatcaagc

SEQ ID NO: 683967 - DNA, 25 bp, Homo sapien
gtattttgccaagtgctatcaagcc

SEQ ID NO: 683968 - DNA, 25 bp, Homo sapien
gacaatcaaatcatagaagatgtac

SEQ ID NO: 683969 - DNA, 25 bp, Homo sapien
gtgggcttcattactgacaatcaaa

SEQ ID NO: 683970 - DNA, 25 bp, Homo sapien
ctgagttgcataatttgccgtataa

SEQ ID NO: 683971 - DNA, 25 bp, Homo sapien
tttgccgtataagtgaaatagatac

SEQ ID NO: 683972 - DNA, 25 bp, Homo sapien
gagacgttcatcacaccagtcagga

SEQ ID NO: 683973 - DNA, 25 bp, Homo sapien
ccagtcaggatgctctctctggcat

SEQ ID NO: 683974 - DNA, 25 bp, Homo sapien
catgcttggaggatggatatttttc

SEQ ID NO: 683975 - DNA, 25 bp, Homo sapien
atggatatttttcggcaaggctgcc

SEQ ID NO: 683976 - DNA, 25 bp, Homo sapien
aatgaatgaaggtcggcgctgacgg

SEQ ID NO: 683977 - DNA, 25 bp, Homo sapien
tgtcagtctacgcagagtggctctg

SEQ ID NO: 683978 - DNA, 25 bp, Homo sapien
taaccttcggttggatgatccaccc

SEQ ID NO: 683979 - DNA, 25 bp, Homo sapien
cgctgacggtgcaagtttggctgtc

SEQ ID NO: 683980 - DNA, 25 bp, Homo sapien
gctggaggccattctctaattcctg

SEQ ID NO: 683981 - DNA, 25 bp, Homo sapien
tgcaatctagctggaggccattctc

SEQ ID NO: 683982 - DNA, 25 bp, Homo sapien
taagaagcaacagccttgtcatctt

SEQ ID NO: 683983 - DNA, 25 bp, Homo sapien
agaagcaacagccttgtcatcttca

SEQ ID NO: 683984 - DNA, 25 bp, Homo sapien
ggcttctacatgatccccatttgtg

SEQ ID NO: 683985 - DNA, 25 bp, Homo sapien
cattttgaccactgccatggttggc

SEQ ID NO: 683986 - DNA, 25 bp, Homo sapien
gatccccatttgtgtctcaacttgg

SEQ ID NO: 683987 - DNA, 25 bp, Homo sapien
tgtctcaacttggtctcctcagcca

SEQ ID NO: 683988 - DNA, 25 bp, Homo sapien
ctaagggctgagtaagccacagtgc

SEQ ID NO: 683989 - DNA, 25 bp, Homo sapien
tcagtgtgatgaagtgttcctgctg

SEQ ID NO: 683990 - DNA, 25 bp, Homo sapien
ttcctgctgataggcgctaagggct

SEQ ID NO: 683991 - DNA, 25 bp, Homo sapien
tcagcttgtcagtgtgatgaagtgt

SEQ ID NO: 683992 - DNA, 25 bp, Homo sapien
ggagcccaacgctgaggtcgccctt

SEQ ID NO: 683993 - DNA, 25 bp, Homo sapien
gctgaggtcgcccttcccacaacag

SEQ ID NO: 683994 - DNA, 25 bp, Homo sapien
agtgttgatgggagcccaacgctga

SEQ ID NO: 683995 - DNA, 25 bp, Homo sapien
gctggaaacctgtgggcttcacctc

SEQ ID NO: 683996 - DNA, 25 bp, Homo sapien
cttaatccggcgctgacgtgacccg

SEQ ID NO: 683997 - DNA, 25 bp, Homo sapien
attgcttgaactgtgtcagatcgca

SEQ ID NO: 683998 - DNA, 25 bp, Homo sapien
tgagtaactttgcttaatccggcgc

SEQ ID NO: 683999 - DNA, 25 bp, Homo sapien
tcagatcgcattgagtaactttgct

SEQ ID NO: 684000 - DNA, 25 bp, Homo sapien
gccagtttctccgtagataaatatt

SEQ ID NO: 684001 - DNA, 25 bp, Homo sapien
atgccagtttctccgtagataaata

SEQ ID NO: 684002 - DNA, 25 bp, Homo sapien
cagtttctccgtagataaatatttc

SEQ ID NO: 684003 - DNA, 25 bp, Homo sapien
ttgatgccagtttctccgtagataa

SEQ ID NO: 684004 - DNA, 25 bp, Homo sapien
tttgcataagcacgctcggaaaatg

SEQ ID NO: 684005 - DNA, 25 bp, Homo sapien
cagcatcctgtttgcataagcacgc

SEQ ID NO: 684006 - DNA, 25 bp, Homo sapien
taagcacgctcggaaaatgcccaag

SEQ ID NO: 684007 - DNA, 25 bp, Homo sapien
ctgtttgcataagcacgctcggaaa

SEQ ID NO: 684008 - DNA, 25 bp, Homo sapien
taatcttgaccctaaccctgactct

SEQ ID NO: 684009 - DNA, 25 bp, Homo sapien
tccctgaagttaggatgcatcctcc

SEQ ID NO: 684010 - DNA, 25 bp, Homo sapien
gacctttatcctgaccctgagcttg

SEQ ID NO: 684011 - DNA, 25 bp, Homo sapien
taaggagcttagatccaatccactg

SEQ ID NO: 684012 - DNA, 25 bp, Homo sapien
taaagcacatagcatagtatctccc

SEQ ID NO: 684013 - DNA, 25 bp, Homo sapien
cacacacttcccgtatgattctgag

SEQ ID NO: 684014 - DNA, 25 bp, Homo sapien
ctagaggtaactatgagagctgggc

SEQ ID NO: 684015 - DNA, 25 bp, Homo sapien
gagtatagaagtgtagctccctcca

SEQ ID NO: 684016 - DNA, 25 bp, Homo sapien
aactcgacttcagtttctctgatgg

SEQ ID NO: 684017 - DNA, 25 bp, Homo sapien
tgctgagacgttgcccactcgcttc

SEQ ID NO: 684018 - DNA, 25 bp, Homo sapien
tctttcctggtaactcgacttcagt

SEQ ID NO: 684019 - DNA, 25 bp, Homo sapien
tactcctttctatgctgagacgttg

SEQ ID NO: 684020 - DNA, 25 bp, Homo sapien
ccaaatctgtgaactctttgttcct

SEQ ID NO: 684021 - DNA, 25 bp, Homo sapien
tttctagtttcagatggtggcatat

SEQ ID NO: 684022 - DNA, 25 bp, Homo sapien
ttctagtttcagatggtggcatatg

SEQ ID NO: 684023 - DNA, 25 bp, Homo sapien
tagttgtcccgttcccaaatctgtg

SEQ ID NO: 684024 - DNA, 25 bp, Homo sapien
tgtacaaagttgatctccacgtggt

SEQ ID NO: 684025 - DNA, 25 bp, Homo sapien
gagttctgtaactgatgcccatcac

SEQ ID NO: 684026 - DNA, 25 bp, Homo sapien
catgtggcttccaaaaccattgaag

SEQ ID NO: 684027 - DNA, 25 bp, Homo sapien
ccattgaaggtgtgaatgagttctg

SEQ ID NO: 684028 - DNA, 25 bp, Homo sapien
tgtaccagcttctggcctctcaacg

SEQ ID NO: 684029 - DNA, 25 bp, Homo sapien
ggtaaactctccaagccataattgt

SEQ ID NO: 684030 - DNA, 25 bp, Homo sapien
tcagctcttcctccaatctggtaaa

SEQ ID NO: 684031 - DNA, 25 bp, Homo sapien
aactgtattgtcagctgggttcagc

SEQ ID NO: 684032 - DNA, 25 bp, Homo sapien
tccacactgctcagtaatctcttag

SEQ ID NO: 684033 - DNA, 25 bp, Homo sapien
tgctccagccgtgttgagctctagt

SEQ ID NO: 684034 - DNA, 25 bp, Homo sapien
gtctcccatgcttccttgaccaatg

SEQ ID NO: 684035 - DNA, 25 bp, Homo sapien
ttgaccaatgctccacactgctcag

SEQ ID NO: 684036 - DNA, 25 bp, Homo sapien
ctagtcagttaacagtttaagctgc

SEQ ID NO: 684037 - DNA, 25 bp, Homo sapien
tagtcagttaacagtttaagctgct

SEQ ID NO: 684038 - DNA, 25 bp, Homo sapien
tagctctaacggttttagcatggga

SEQ ID NO: 684039 - DNA, 25 bp, Homo sapien
tgaccagcatggctttatctgtgtg

SEQ ID NO: 684040 - DNA, 25 bp, Homo sapien
ctaggatagggttgtgcgcccagcc

SEQ ID NO: 684041 - DNA, 25 bp, Homo sapien
tgggctagagtaagaacaaagcgtt

SEQ ID NO: 684042 - DNA, 25 bp, Homo sapien
tgatagagaattaaggggaaagttg

SEQ ID NO: 684043 - DNA, 25 bp, Homo sapien
ctgatagagaattaaggggaaagtt

SEQ ID NO: 684044 - DNA, 25 bp, Homo sapien
agcgatgccacacgaacttctgcca

SEQ ID NO: 684045 - DNA, 25 bp, Homo sapien
cagcccctgatggatctggaattaa

SEQ ID NO: 684046 - DNA, 25 bp, Homo sapien
gaaggaccctatcatctcttggacg

SEQ ID NO: 684047 - DNA, 25 bp, Homo sapien
tcttggacgcagcagacagcgatgc

SEQ ID NO: 684048 - DNA, 25 bp, Homo sapien
gaccatagagctaatcacatgaggc

SEQ ID NO: 684049 - DNA, 25 bp, Homo sapien
ccatagagctaatcacatgaggcat

SEQ ID NO: 684050 - DNA, 25 bp, Homo sapien
gggaccatagagctaatcacatgag

SEQ ID NO: 684051 - DNA, 25 bp, Homo sapien
gaagggaccatagagctaatcacat

SEQ ID NO: 684052 - DNA, 25 bp, Homo sapien
gatagcatccagtcatagcatcgcc

SEQ ID NO: 684053 - DNA, 25 bp, Homo sapien
tcagtgctaggatgccaaaggatcc

SEQ ID NO: 684054 - DNA, 25 bp, Homo sapien
cataggtgagacttcaggtggacaa

SEQ ID NO: 684055 - DNA, 25 bp, Homo sapien
gggtcaaacccttgccagttggtca

SEQ ID NO: 684056 - DNA, 25 bp, Homo sapien
ggactgtggctttgcaacacagcat

SEQ ID NO: 684057 - DNA, 25 bp, Homo sapien
cccgttggcctcaggagtgttatcc

SEQ ID NO: 684058 - DNA, 25 bp, Homo sapien
tccagaagacgtgcaatgccaaggc

SEQ ID NO: 684059 - DNA, 25 bp, Homo sapien
tgggtcaaccattcgaaggaaacaa

SEQ ID NO: 684060 - DNA, 25 bp, Homo sapien
tcaaataaatcatctttccatgcat

SEQ ID NO: 684061 - DNA, 25 bp, Homo sapien
atcaaataaatcatctttccatgca

SEQ ID NO: 684062 - DNA, 25 bp, Homo sapien
catcaaataaatcatctttccatgc

SEQ ID NO: 684063 - DNA, 25 bp, Homo sapien
taatgtatgtgaagttcaaaaccaa

SEQ ID NO: 684064 - DNA, 25 bp, Homo sapien
tgataagccctagactttccccaag

SEQ ID NO: 684065 - DNA, 25 bp, Homo sapien
tgaacaccggatttcaaacccacat

SEQ ID NO: 684066 - DNA, 25 bp, Homo sapien
tgtatgtgaagttcaaaaccaacat

SEQ ID NO: 684067 - DNA, 25 bp, Homo sapien
caggaatggtctacagcctggcagg

SEQ ID NO: 684068 - DNA, 25 bp, Homo sapien
ttcagtgctcgtaccacaggaatgg

SEQ ID NO: 684069 - DNA, 25 bp, Homo sapien
tgccatccgctgtaggaaagcaggt

SEQ ID NO: 684070 - DNA, 25 bp, Homo sapien
agcacatcagagattgccactgcca

SEQ ID NO: 684071 - DNA, 25 bp, Homo sapien
ttaggggtatgtttcagggtcgctg

SEQ ID NO: 684072 - DNA, 25 bp, Homo sapien
aggaaactttgtaagatggcagttg

SEQ ID NO: 684073 - DNA, 25 bp, Homo sapien
taggggtatgtttcagggtcgctgt

SEQ ID NO: 684074 - DNA, 25 bp, Homo sapien
gaaggaaactttgtaagatggcagt

SEQ ID NO: 684075 - DNA, 25 bp, Homo sapien
cagtcatgcaggattaaggctttga

SEQ ID NO: 684076 - DNA, 25 bp, Homo sapien
tgagactgaaacttgcaggcagagg

SEQ ID NO: 684077 - DNA, 25 bp, Homo sapien
ggtgagactgaaacttgcaggcaga

SEQ ID NO: 684078 - DNA, 25 bp, Homo sapien
gccagatctccccttctggctgatt

SEQ ID NO: 684079 - DNA, 25 bp, Homo sapien
tctctctccataatcggtaattttt

SEQ ID NO: 684080 - DNA, 25 bp, Homo sapien
tctccataatcggtaatttttcctc

SEQ ID NO: 684081 - DNA, 25 bp, Homo sapien
tctctccataatcggtaatttttcc

SEQ ID NO: 684082 - DNA, 25 bp, Homo sapien
cttctctctccataatcggtaattt

SEQ ID NO: 684083 - DNA, 25 bp, Homo sapien
tgctcaacctgacaaattatcgact

SEQ ID NO: 684084 - DNA, 25 bp, Homo sapien
cttcccagggatataaatgatgcag

SEQ ID NO: 684085 - DNA, 25 bp, Homo sapien
gatgccctaataaacatacagttgt

SEQ ID NO: 684086 - DNA, 25 bp, Homo sapien
ttgaaattcaagcatgccacaacca

SEQ ID NO: 684087 - DNA, 25 bp, Homo sapien
caatatcgtggccaagacaaacctg

SEQ ID NO: 684088 - DNA, 25 bp, Homo sapien
tgtgtagagtgtccagtgcctgcct

SEQ ID NO: 684089 - DNA, 25 bp, Homo sapien
gaaggagcccgtaaacctgagagga

SEQ ID NO: 684090 - DNA, 25 bp, Homo sapien
taagaagacagtgttgcgagggctc

SEQ ID NO: 684091 - DNA, 25 bp, Homo sapien
gagaattccgtgcagggctccagcg

SEQ ID NO: 684092 - DNA, 25 bp, Homo sapien
agcggtgagcagagttggaaacggc

SEQ ID NO: 684093 - DNA, 25 bp, Homo sapien
ttctgttcctgagcgggcccgtttg

SEQ ID NO: 684094 - DNA, 25 bp, Homo sapien
tgagcagagttggaaacggcccatc

SEQ ID NO: 684095 - DNA, 25 bp, Homo sapien
caataatcagaacagcaacgccagt

SEQ ID NO: 684096 - DNA, 25 bp, Homo sapien
cagtgaaccgttgcacatcacttaa

SEQ ID NO: 684097 - DNA, 25 bp, Homo sapien
ggctgcaaacccacagacaaataat

SEQ ID NO: 684098 - DNA, 25 bp, Homo sapien
gagagccaggcgcaatataaggagt

SEQ ID NO: 684099 - DNA, 25 bp, Homo sapien
ctctgggacactgttgccaccaacc

SEQ ID NO: 684100 - DNA, 25 bp, Homo sapien
tccctctgggacactgttgccacca

SEQ ID NO: 684101 - DNA, 25 bp, Homo sapien
tctccctctgggacactgttgccac

SEQ ID NO: 684102 - DNA, 25 bp, Homo sapien
gacaaatgactttagaattctgtct

SEQ ID NO: 684103 - DNA, 25 bp, Homo sapien
tgccattggcttcacgctcacagag

SEQ ID NO: 684104 - DNA, 25 bp, Homo sapien
acactaagggccctcctatgtgttc

SEQ ID NO: 684105 - DNA, 25 bp, Homo sapien
gcatgatgcccgcatacactaaggg

SEQ ID NO: 684106 - DNA, 25 bp, Homo sapien
caacctgaactaaaccttctgtgct

SEQ ID NO: 684107 - DNA, 25 bp, Homo sapien
ccttcggccattccccaagatggga

SEQ ID NO: 684108 - DNA, 25 bp, Homo sapien
ccataaccaggacaagagtctgcct

SEQ ID NO: 684109 - DNA, 25 bp, Homo sapien
actcattcattatgacatatctaga

SEQ ID NO: 684110 - DNA, 25 bp, Homo sapien
agccatcgttccacagcaagcactg

SEQ ID NO: 684111 - DNA, 25 bp, Homo sapien
cccagggagtaagccataaccagga

SEQ ID NO: 684112 - DNA, 25 bp, Homo sapien
tcatgattgttcatcaaacggctcc

SEQ ID NO: 684113 - DNA, 25 bp, Homo sapien
caagtgacattctgtggtaaatggg

SEQ ID NO: 684114 - DNA, 25 bp, Homo sapien
taacgcattgacactaacttgccct

SEQ ID NO: 684115 - DNA, 25 bp, Homo sapien
acttgccctctattgttggaaatga

SEQ ID NO: 684116 - DNA, 25 bp, Homo sapien
tagaatatatttaggcacagaaggt

SEQ ID NO: 684117 - DNA, 25 bp, Homo sapien
ttcgcctccagaagcgaagttctgg

SEQ ID NO: 684118 - DNA, 25 bp, Homo sapien
tttacttgcaggaggcatagaatat

SEQ ID NO: 684119 - DNA, 25 bp, Homo sapien
tagctgttgagaacattcgcctcca

SEQ ID NO: 684120 - DNA, 25 bp, Homo sapien
ttagagagaggggttcccaagaagc

SEQ ID NO: 684121 - DNA, 25 bp, Homo sapien
agagagaggggttcccaagaagcgg

SEQ ID NO: 684122 - DNA, 25 bp, Homo sapien
tagagagaggggttcccaagaagcg

SEQ ID NO: 684123 - DNA, 25 bp, Homo sapien
ctcctctccaaccaccgaaggcgag

SEQ ID NO: 684124 - DNA, 25 bp, Homo sapien
tctccaaccaccgaaggcgagagca

SEQ ID NO: 684125 - DNA, 25 bp, Homo sapien
tgcagatgtatcaggggtcagggga

SEQ ID NO: 684126 - DNA, 25 bp, Homo sapien
ctgcagatgtatcaggggtcagggg

SEQ ID NO: 684127 - DNA, 25 bp, Homo sapien
ggagcaaggggagagcattgaaaat

SEQ ID NO: 684128 - DNA, 25 bp, Homo sapien
cttggggagcaaggggagagcattg

SEQ ID NO: 684129 - DNA, 25 bp, Homo sapien
ggggagcaaggggagagcattgaaa

SEQ ID NO: 684130 - DNA, 25 bp, Homo sapien
gcaaggggagagcattgaaaatgaa

SEQ ID NO: 684131 - DNA, 25 bp, Homo sapien
tggcaaaagggcaataggatatgtc

SEQ ID NO: 684132 - DNA, 25 bp, Homo sapien
caactggaatgcgaacagggcactc

SEQ ID NO: 684133 - DNA, 25 bp, Homo sapien
tgagcagctgcgtagatctatccac

SEQ ID NO: 684134 - DNA, 25 bp, Homo sapien
ggcactctgcctgggaatatgagca

SEQ ID NO: 684135 - DNA, 25 bp, Homo sapien
aagaatgaatagaaacctgtgctcg

SEQ ID NO: 684136 - DNA, 25 bp, Homo sapien
ctgcaatatgcaaaagaggcttgaa

SEQ ID NO: 684137 - DNA, 25 bp, Homo sapien
gcttgaatgtagagcttcgaggagt

SEQ ID NO: 684138 - DNA, 25 bp, Homo sapien
gtgctcgcctgctccatccaattga

SEQ ID NO: 684139 - DNA, 25 bp, Homo sapien
gcctgatcgtttcagttcagtgata

SEQ ID NO: 684140 - DNA, 25 bp, Homo sapien
gacaggcctgatcgtttcagttcag

SEQ ID NO: 684141 - DNA, 25 bp, Homo sapien
cttgacaggcctgatcgtttcagtt

SEQ ID NO: 684142 - DNA, 25 bp, Homo sapien
caggcctgatcgtttcagttcagtg

SEQ ID NO: 684143 - DNA, 25 bp, Homo sapien
agggccggcgctgcaattcggatcc

SEQ ID NO: 684144 - DNA, 25 bp, Homo sapien
cccgggtctgtcacgagggccggcg

SEQ ID NO: 684145 - DNA, 25 bp, Homo sapien
gctgcaattcggatccagctccacg

SEQ ID NO: 684146 - DNA, 25 bp, Homo sapien
tgtcacgagggccggcgctgcaatt

SEQ ID NO: 684147 - DNA, 25 bp, Homo sapien
ttttcagatctaggtctgcgttttt

SEQ ID NO: 684148 - DNA, 25 bp, Homo sapien
agatctaggtctgcgtttttgtctc

SEQ ID NO: 684149 - DNA, 25 bp, Homo sapien
tcagatctaggtctgcgtttttgtc

SEQ ID NO: 684150 - DNA, 25 bp, Homo sapien
tttcagatctaggtctgcgtttttg

SEQ ID NO: 684151 - DNA, 25 bp, Homo sapien
taacacttctaaggctgcttgagga

SEQ ID NO: 684152 - DNA, 25 bp, Homo sapien
cctggccatagagacttgatatgac

SEQ ID NO: 684153 - DNA, 25 bp, Homo sapien
cacagttagtagcaggaactctgca

SEQ ID NO: 684154 - DNA, 25 bp, Homo sapien
tagcgtgccgtcttacccaaggtag

SEQ ID NO: 684155 - DNA, 25 bp, Homo sapien
ggtaaaatatgaagtgcctctgtga

SEQ ID NO: 684156 - DNA, 25 bp, Homo sapien
tgttttggagcttatagatgagact

SEQ ID NO: 684157 - DNA, 25 bp, Homo sapien
tgggagttgttttggagcttataga

SEQ ID NO: 684158 - DNA, 25 bp, Homo sapien
ttatagatgagactctgctttccag

SEQ ID NO: 684159 - DNA, 25 bp, Homo sapien
ttcccacagacgttcacattttcat

SEQ ID NO: 684160 - DNA, 25 bp, Homo sapien
ggttctgtggtattgtttcgtaatg

SEQ ID NO: 684161 - DNA, 25 bp, Homo sapien
ctgttttagtaacttcccacagacg

SEQ ID NO: 684162 - DNA, 25 bp, Homo sapien
gacgttcacattttcataggttctg

SEQ ID NO: 684163 - DNA, 25 bp, Homo sapien
ctgccattccgcttgatatgagtga

SEQ ID NO: 684164 - DNA, 25 bp, Homo sapien
gggtgtcctagcactcggttttgcc

SEQ ID NO: 684165 - DNA, 25 bp, Homo sapien
cggttttgcccgatgttagcaaagc

SEQ ID NO: 684166 - DNA, 25 bp, Homo sapien
ttcagaaggacagccgagagtacat

SEQ ID NO: 684167 - DNA, 25 bp, Homo sapien
ttctctatgataatccagaaacgga

SEQ ID NO: 684168 - DNA, 25 bp, Homo sapien
tatgataatccagaaacggattgag

SEQ ID NO: 684169 - DNA, 25 bp, Homo sapien
atgaaattctctatgataatccaga

SEQ ID NO: 684170 - DNA, 25 bp, Homo sapien
aatccagaaacggattgagacccat

SEQ ID NO: 684171 - DNA, 25 bp, Homo sapien
tcctgtggcaaacatgatccttgaa

SEQ ID NO: 684172 - DNA, 25 bp, Homo sapien
ttggtcttatctcatcatcctgtgg

SEQ ID NO: 684173 - DNA, 25 bp, Homo sapien
tattaacagtgtttctcgaaccctc

SEQ ID NO: 684174 - DNA, 25 bp, Homo sapien
aattgtctttctaaccgtgtgtggg

SEQ ID NO: 684175 - DNA, 25 bp, Homo sapien
tcgaatgcacgttgagctgccctgg

SEQ ID NO: 684176 - DNA, 25 bp, Homo sapien
tctgtagagttcacacgcggtctgt

SEQ ID NO: 684177 - DNA, 25 bp, Homo sapien
tgttgtaccagcaaaaggccaccga

SEQ ID NO: 684178 - DNA, 25 bp, Homo sapien
tatgtatgtacacgtgcagccggaa

SEQ ID NO: 684179 - DNA, 25 bp, Homo sapien
gggcagacgggtagggcaagtcctg

SEQ ID NO: 684180 - DNA, 25 bp, Homo sapien
acgggtagggcaagtcctggctctt

SEQ ID NO: 684181 - DNA, 25 bp, Homo sapien
ttaagaccaactgacttggagtaaa

SEQ ID NO: 684182 - DNA, 25 bp, Homo sapien
cttggagtaaatcctgggctacagg

SEQ ID NO: 684183 - DNA, 25 bp, Homo sapien
gagagaatgcctccactcacaggaa

SEQ ID NO: 684184 - DNA, 25 bp, Homo sapien
cgggatgctcgggtcctaagataga

SEQ ID NO: 684185 - DNA, 25 bp, Homo sapien
tagctccggcgtttttgagagaatg

SEQ ID NO: 684186 - DNA, 25 bp, Homo sapien
atggtccaacagcaggcgggtccag

SEQ ID NO: 684187 - DNA, 25 bp, Homo sapien
tctccgagatgaaaattaggtcccg

SEQ ID NO: 684188 - DNA, 25 bp, Homo sapien
gcaggtctacaattatgatgatcgg

SEQ ID NO: 684189 - DNA, 25 bp, Homo sapien
gccttgcaaactggcgaaaattagc

SEQ ID NO: 684190 - DNA, 25 bp, Homo sapien
taggtcccgtgatacataagttcag

SEQ ID NO: 684191 - DNA, 25 bp, Homo sapien
gaagccacggaaagctctgaatcct

SEQ ID NO: 684192 - DNA, 25 bp, Homo sapien
caggagatttaatgtgagggagcac

SEQ ID NO: 684193 - DNA, 25 bp, Homo sapien
cagaaaagcaggcaaaaaccgaggt

SEQ ID NO: 684194 - DNA, 25 bp, Homo sapien
aggtggcaccgccaaccatgcacga

SEQ ID NO: 684195 - DNA, 25 bp, Homo sapien
cctgccgaagcctgaaggcaaaaca

SEQ ID NO: 684196 - DNA, 25 bp, Homo sapien
ctgccgaagcctgaaggcaaaacaa

SEQ ID NO: 684197 - DNA, 25 bp, Homo sapien
tgcttgtccttgaggaggtagatac

SEQ ID NO: 684198 - DNA, 25 bp, Homo sapien
caatagtatttgtcggggcagtgag

SEQ ID NO: 684199 - DNA, 25 bp, Homo sapien
ctcagtttgcttgtccttgaggagg

SEQ ID NO: 684200 - DNA, 25 bp, Homo sapien
gatgctcaatagtatttgtcggggc

SEQ ID NO: 684201 - DNA, 25 bp, Homo sapien
cattgattgcgatgctgagttgtgc

SEQ ID NO: 684202 - DNA, 25 bp, Homo sapien
caccaccagggaacgaatacaacaa

SEQ ID NO: 684203 - DNA, 25 bp, Homo sapien
taatcccagtttgcctgagactgag

SEQ ID NO: 684204 - DNA, 25 bp, Homo sapien
taaggttggagtgaccaataatccc

SEQ ID NO: 684205 - DNA, 25 bp, Homo sapien
tctttccagagacggcttgtctgac

SEQ ID NO: 684206 - DNA, 25 bp, Homo sapien
gaacttgccggctggaatgtcctct

SEQ ID NO: 684207 - DNA, 25 bp, Homo sapien
agacaacaaaggctcagggtgcacg

SEQ ID NO: 684208 - DNA, 25 bp, Homo sapien
aatctgttcctctcccgctgacatg

SEQ ID NO: 684209 - DNA, 25 bp, Homo sapien
cttattgtggttgtgaagctttgca

SEQ ID NO: 684210 - DNA, 25 bp, Homo sapien
tgagaaatgtgacatctgtgcgtgg

SEQ ID NO: 684211 - DNA, 25 bp, Homo sapien
tctctagggctattcgaaggaagct

SEQ ID NO: 684212 - DNA, 25 bp, Homo sapien
gcgtgggtttgatctctccgataaa

SEQ ID NO: 684213 - DNA, 25 bp, Homo sapien
ttcatccgcatctgatctgccaata

SEQ ID NO: 684214 - DNA, 25 bp, Homo sapien
cgcatctgatctgccaatatcagct

SEQ ID NO: 684215 - DNA, 25 bp, Homo sapien
aactttcatccgcatctgatctgcc

SEQ ID NO: 684216 - DNA, 25 bp, Homo sapien
catccgcatctgatctgccaatatc

SEQ ID NO: 684217 - DNA, 25 bp, Homo sapien
gaggctgtgactgcatagcaaacac

SEQ ID NO: 684218 - DNA, 25 bp, Homo sapien
tagtccaggatatcagttaaggagg

SEQ ID NO: 684219 - DNA, 25 bp, Homo sapien
cttcgtagaaaatgatagtccagga

SEQ ID NO: 684220 - DNA, 25 bp, Homo sapien
gcctggaagatttcccctgaggctg

SEQ ID NO: 684221 - DNA, 25 bp, Homo sapien
gaaggattcagtgtaatgccgtcgt

SEQ ID NO: 684222 - DNA, 25 bp, Homo sapien
cattgccagaaccatggtcagaaca

SEQ ID NO: 684223 - DNA, 25 bp, Homo sapien
caaggtgaaagtttaactacatcat

SEQ ID NO: 684224 - DNA, 25 bp, Homo sapien
tgccgtcgtaggcaccattgccaga

SEQ ID NO: 684225 - DNA, 25 bp, Homo sapien
ggaaaaatccacacgtgctgaattc

SEQ ID NO: 684226 - DNA, 25 bp, Homo sapien
acaggaaaaatccacacgtgctgaa

SEQ ID NO: 684227 - DNA, 25 bp, Homo sapien
aaaatccacacgtgctgaattctcc

SEQ ID NO: 684228 - DNA, 25 bp, Homo sapien
caggaaaaatccacacgtgctgaat

SEQ ID NO: 684229 - DNA, 25 bp, Homo sapien
caggatttgccccagcgtggctgtg

SEQ ID NO: 684230 - DNA, 25 bp, Homo sapien
cgcccagcccccaggatttgcccca

SEQ ID NO: 684231 - DNA, 25 bp, Homo sapien
ttgccccagcgtggctgtgctcact

SEQ ID NO: 684232 - DNA, 25 bp, Homo sapien
ggatttgccccagcgtggctgtgct

SEQ ID NO: 684233 - DNA, 25 bp, Homo sapien
tgtggcctggaatggccctggtttt

SEQ ID NO: 684234 - DNA, 25 bp, Homo sapien
cactaatggctgctctccaggatcc

SEQ ID NO: 684235 - DNA, 25 bp, Homo sapien
tgtaacgcgtggaggcactaatggc

SEQ ID NO: 684236 - DNA, 25 bp, Homo sapien
ccctggttttagaaacgagatgctc

SEQ ID NO: 684237 - DNA, 25 bp, Homo sapien
ctaatccaataaagtaatttctgca

SEQ ID NO: 684238 - DNA, 25 bp, Homo sapien
aatccaataaagtaatttctgcaca

SEQ ID NO: 684239 - DNA, 25 bp, Homo sapien
atccaataaagtaatttctgcacac

SEQ ID NO: 684240 - DNA, 25 bp, Homo sapien
taatccaataaagtaatttctgcac

SEQ ID NO: 684241 - DNA, 25 bp, Homo sapien
cacaaggactgccatctgatgattc

SEQ ID NO: 684242 - DNA, 25 bp, Homo sapien
gacaaagacccatgacagcagcttg

SEQ ID NO: 684243 - DNA, 25 bp, Homo sapien
tagcgccgatttcacagcttggact

SEQ ID NO: 684244 - DNA, 25 bp, Homo sapien
tgtttatacgtgacgtagcgccgat

SEQ ID NO: 684245 - DNA, 25 bp, Homo sapien
tcagtcattgcttttcgggcctacc

SEQ ID NO: 684246 - DNA, 25 bp, Homo sapien
gcctaggaatctgggaaccaccgaa

SEQ ID NO: 684247 - DNA, 25 bp, Homo sapien
caggattgtcctggctgcaagaccc

SEQ ID NO: 684248 - DNA, 25 bp, Homo sapien
gacagaattcaagccaccatgatgg

SEQ ID NO: 684249 - DNA, 25 bp, Homo sapien
atggccttttctaaccacagttctt

SEQ ID NO: 684250 - DNA, 25 bp, Homo sapien
tttctaaccacagttctttatgaat

SEQ ID NO: 684251 - DNA, 25 bp, Homo sapien
acatctctgatgagtctttctattg

SEQ ID NO: 684252 - DNA, 25 bp, Homo sapien
catctctgatgagtctttctattgc

SEQ ID NO: 684253 - DNA, 25 bp, Homo sapien
tcctccccatgacttttggtgtctg

SEQ ID NO: 684254 - DNA, 25 bp, Homo sapien
cacagggttacctgctgtcccatgt

SEQ ID NO: 684255 - DNA, 25 bp, Homo sapien
caaatccacagggttacctgctgtc

SEQ ID NO: 684256 - DNA, 25 bp, Homo sapien
tttgtgggcattgctttctctgcca

SEQ ID NO: 684257 - DNA, 25 bp, Homo sapien
ctttgtgggcattgctttctctgcc

SEQ ID NO: 684258 - DNA, 25 bp, Homo sapien
gacaactctccatacttagcagtca

SEQ ID NO: 684259 - DNA, 25 bp, Homo sapien
tggtgaaaggacaactctccatact

SEQ ID NO: 684260 - DNA, 25 bp, Homo sapien
aaacgcagatcacagccatcagatg

SEQ ID NO: 684261 - DNA, 25 bp, Homo sapien
gtaggaaacgcagatcacagccatc

SEQ ID NO: 684262 - DNA, 25 bp, Homo sapien
ggaagcctgccatattgtaatttgg

SEQ ID NO: 684263 - DNA, 25 bp, Homo sapien
tactcagcggaatgactgctagtca

SEQ ID NO: 684264 - DNA, 25 bp, Homo sapien
cactaatgatcctatggctccaggg

SEQ ID NO: 684265 - DNA, 25 bp, Homo sapien
ttgaaagtatgttgtgagctggcac

SEQ ID NO: 684266 - DNA, 25 bp, Homo sapien
tgtcactaaagtaaaggctcgggta

SEQ ID NO: 684267 - DNA, 25 bp, Homo sapien
acttccttgcttggatgtcactaaa

SEQ ID NO: 684268 - DNA, 25 bp, Homo sapien
tggatgtcactaaagtaaaggctcg

SEQ ID NO: 684269 - DNA, 25 bp, Homo sapien
tatgtggggatattctttgaagatg

SEQ ID NO: 684270 - DNA, 25 bp, Homo sapien
gcctctcgcctacagttgaagtgaa

SEQ ID NO: 684271 - DNA, 25 bp, Homo sapien
tgaaacttcattattgcctctcgcc

SEQ ID NO: 684272 - DNA, 25 bp, Homo sapien
tgacacttggactcccctcttgaag

SEQ ID NO: 684273 - DNA, 25 bp, Homo sapien
tggactcccctcttgaagtgaaact

SEQ ID NO: 684274 - DNA, 25 bp, Homo sapien
tattactggaaatcgctaacggagc

SEQ ID NO: 684275 - DNA, 25 bp, Homo sapien
ggtatcaagcaatcccctgagcatt

SEQ ID NO: 684276 - DNA, 25 bp, Homo sapien
caggaagactggatgacttgcccaa

SEQ ID NO: 684277 - DNA, 25 bp, Homo sapien
tattaacagttctatcaggccaggc

SEQ ID NO: 684278 - DNA, 25 bp, Homo sapien
tagccacacgttgtagagccctcag

SEQ ID NO: 684279 - DNA, 25 bp, Homo sapien
cgaggtggcctctgcatctgaaact

SEQ ID NO: 684280 - DNA, 25 bp, Homo sapien
ggctgctgaccaactctgaagaggg

SEQ ID NO: 684281 - DNA, 25 bp, Homo sapien
tgttccgacacagaaacgcagcata

SEQ ID NO: 684282 - DNA, 25 bp, Homo sapien
ctgaggcccataaggcgaagttact

SEQ ID NO: 684283 - DNA, 25 bp, Homo sapien
aactgaggcccataaggcgaagtta

SEQ ID NO: 684284 - DNA, 25 bp, Homo sapien
aggcccataaggcgaagttactctc

SEQ ID NO: 684285 - DNA, 25 bp, Homo sapien
tgaggcccataaggcgaagttactc

SEQ ID NO: 684286 - DNA, 25 bp, Homo sapien
cattcctgcatcgttggtgtgatcg

SEQ ID NO: 684287 - DNA, 25 bp, Homo sapien
cctgcaagttaagtaaccagcccga

SEQ ID NO: 684288 - DNA, 25 bp, Homo sapien
gtaaccagcccgagaacacacagca

SEQ ID NO: 684289 - DNA, 25 bp, Homo sapien
cgttggtgtgatcgatgcatgctta

SEQ ID NO: 684290 - DNA, 25 bp, Homo sapien
caggtgactgccctcagggacctac

SEQ ID NO: 684291 - DNA, 25 bp, Homo sapien
tgcctgaggcggtgctctgtttggg

SEQ ID NO: 684292 - DNA, 25 bp, Homo sapien
ctgtgtgcctgaggcggtgctctgt

SEQ ID NO: 684293 - DNA, 25 bp, Homo sapien
tcaggtgactgccctcagggaccta

SEQ ID NO: 684294 - DNA, 25 bp, Homo sapien
caatcaacaataggctgcacatagg

SEQ ID NO: 684295 - DNA, 25 bp, Homo sapien
cacagtcatgtgtccagtagtgaca

SEQ ID NO: 684296 - DNA, 25 bp, Homo sapien
aatatacaaattagacaacacagtc

SEQ ID NO: 684297 - DNA, 25 bp, Homo sapien
gacatttcaatcaacaataggctgc

SEQ ID NO: 684298 - DNA, 25 bp, Homo sapien
taacacctgggtcatacagaaacag

SEQ ID NO: 684299 - DNA, 25 bp, Homo sapien
gttctgtttacctagcccaggataa

SEQ ID NO: 684300 - DNA, 25 bp, Homo sapien
ggaggacaaactccgagtaactgag

SEQ ID NO: 684301 - DNA, 25 bp, Homo sapien
tgaaagaaattaccctcgatattgg

SEQ ID NO: 684302 - DNA, 25 bp, Homo sapien
tagccgtgatttttgtggggcacca

SEQ ID NO: 684303 - DNA, 25 bp, Homo sapien
tcacagggcttgattgacggggtca

SEQ ID NO: 684304 - DNA, 25 bp, Homo sapien
ccaatgattaaacttgtcacagggc

SEQ ID NO: 684305 - DNA, 25 bp, Homo sapien
gcgccgtgaagctcgcctgccttgt

SEQ ID NO: 684306 - DNA, 25 bp, Homo sapien
tttttctgcatacaagtggtcaccc

SEQ ID NO: 684307 - DNA, 25 bp, Homo sapien
gcagtaatatctcatcccgcttaag

SEQ ID NO: 684308 - DNA, 25 bp, Homo sapien
cactgagtatgttaatgccatccca

SEQ ID NO: 684309 - DNA, 25 bp, Homo sapien
gaagcgtctttactggaagcacttg

SEQ ID NO: 684310 - DNA, 25 bp, Homo sapien
tccacggacactagtgagagagcca

SEQ ID NO: 684311 - DNA, 25 bp, Homo sapien
tagagtttaagtacggtggccagcc

SEQ ID NO: 684312 - DNA, 25 bp, Homo sapien
tcttcagcccaagaaatggacaggt

SEQ ID NO: 684313 - DNA, 25 bp, Homo sapien
gccatcatcgttttcccgggactga

SEQ ID NO: 684314 - DNA, 25 bp, Homo sapien
cacatgagccagtggttaaggggca

SEQ ID NO: 684315 - DNA, 25 bp, Homo sapien
ttctgcagtgcacaaataggatggc

SEQ ID NO: 684316 - DNA, 25 bp, Homo sapien
gatgggagcaagtaaaaagggatcc

SEQ ID NO: 684317 - DNA, 25 bp, Homo sapien
ttccaccaggaggtcacatgagcca

SEQ ID NO: 684318 - DNA, 25 bp, Homo sapien
cattattaccgccatcattgccatc

SEQ ID NO: 684319 - DNA, 25 bp, Homo sapien
catccagtgcgtaagcctgagcctc

SEQ ID NO: 684320 - DNA, 25 bp, Homo sapien
tatcgacaatggaccgaagtgctga

SEQ ID NO: 684321 - DNA, 25 bp, Homo sapien
tgtcaccacccgcaaaatggtaggg

SEQ ID NO: 684322 - DNA, 25 bp, Homo sapien
gttaaggacacaaatgaaacctcca

SEQ ID NO: 684323 - DNA, 25 bp, Homo sapien
ccctgtttctgctggttgcgttcaa

SEQ ID NO: 684324 - DNA, 25 bp, Homo sapien
tgttctccaagatatcgccctgttt

SEQ ID NO: 684325 - DNA, 25 bp, Homo sapien
tctgctggttgcgttcaacagccat

SEQ ID NO: 684326 - DNA, 25 bp, Homo sapien
tactcaggcagctgaatcaggaggt

SEQ ID NO: 684327 - DNA, 25 bp, Homo sapien
agccaacccaggtgtttttgtagag

SEQ ID NO: 684328 - DNA, 25 bp, Homo sapien
caggcagctgaatcaggaggttcac

SEQ ID NO: 684329 - DNA, 25 bp, Homo sapien
cgtgcccagccaacccaggtgtttt

SEQ ID NO: 684330 - DNA, 25 bp, Homo sapien
cattctacgcatctgttggtggctc

SEQ ID NO: 684331 - DNA, 25 bp, Homo sapien
caactaccatttgagaggcaactaa

SEQ ID NO: 684332 - DNA, 25 bp, Homo sapien
tatctgccaggatctcctctttagg

SEQ ID NO: 684333 - DNA, 25 bp, Homo sapien
aataattacatctcttcgcctggct

SEQ ID NO: 684334 - DNA, 25 bp, Homo sapien
ccaaaagcccccaccacttccatca

SEQ ID NO: 684335 - DNA, 25 bp, Homo sapien
tccaaaagcccccaccacttccatc

SEQ ID NO: 684336 - DNA, 25 bp, Homo sapien
ccaaaagcccaccagttccatcagt

SEQ ID NO: 684337 - DNA, 25 bp, Homo sapien
aaagcccaccagttccatcagtcat

SEQ ID NO: 684338 - DNA, 25 bp, Homo sapien
ttaccaaaagcccaccagttccatc

SEQ ID NO: 684339 - DNA, 25 bp, Homo sapien
cttaccaaaagcccaccagttccat

SEQ ID NO: 684340 - DNA, 25 bp, Homo sapien
gatagtaagatgtagatgaatgcaa

SEQ ID NO: 684341 - DNA, 25 bp, Homo sapien
tctaaagagcaataacggtagtatc

SEQ ID NO: 684342 - DNA, 25 bp, Homo sapien
cggtagtatctatttcgaacatgca

SEQ ID NO: 684343 - DNA, 25 bp, Homo sapien
gcacatatgtagttctaaagagcaa

SEQ ID NO: 684344 - DNA, 25 bp, Homo sapien
ctccttatttattcggttgctgttg

SEQ ID NO: 684345 - DNA, 25 bp, Homo sapien
gccaacaggctgttttaatcaaaac

SEQ ID NO: 684346 - DNA, 25 bp, Homo sapien
gacatcggcgtgttcttcttctgca

SEQ ID NO: 684347 - DNA, 25 bp, Homo sapien
tacagagattattgagccaacaggc

SEQ ID NO: 684348 - DNA, 25 bp, Homo sapien
tgtcctccttcgtaatcatgaacaa

SEQ ID NO: 684349 - DNA, 25 bp, Homo sapien
gcgtccccttgctgaataaaaatga

SEQ ID NO: 684350 - DNA, 25 bp, Homo sapien
ctttcctgtcctgtggtgccaccat

SEQ ID NO: 684351 - DNA, 25 bp, Homo sapien
aaaatgactttgtttggaggcactt

SEQ ID NO: 684352 - DNA, 25 bp, Homo sapien
gtgtggtgccgcagcattgaaatta

SEQ ID NO: 684353 - DNA, 25 bp, Homo sapien
tgtgtggtgccgcagcattgaaatt

SEQ ID NO: 684354 - DNA, 25 bp, Homo sapien
taatgctgcagctattgaaccacct

SEQ ID NO: 684355 - DNA, 25 bp, Homo sapien
cattcgccaaggttatatggagccc

SEQ ID NO: 684356 - DNA, 25 bp, Homo sapien
tgatacggaatagcagagacatgcc

SEQ ID NO: 684357 - DNA, 25 bp, Homo sapien
taatttgcatcaggaaacccaactg

SEQ ID NO: 684358 - DNA, 25 bp, Homo sapien
tatctctggtctgcttatgcctgag

SEQ ID NO: 684359 - DNA, 25 bp, Homo sapien
agcagccgtgattgagatggcccga

SEQ ID NO: 684360 - DNA, 25 bp, Homo sapien
tatgatgtaatctcaacagaggcag

SEQ ID NO: 684361 - DNA, 25 bp, Homo sapien
tgggcggctgtgtcacaaattcaag

SEQ ID NO: 684362 - DNA, 25 bp, Homo sapien
gatggccctgcttaccactcagttt

SEQ ID NO: 684363 - DNA, 25 bp, Homo sapien
aaagcgatggccctgcttaccactc

SEQ ID NO: 684364 - DNA, 25 bp, Homo sapien
ctgcttaccactcagtttccctgtg

SEQ ID NO: 684365 - DNA, 25 bp, Homo sapien
gcgatggccctgcttaccactcagt

SEQ ID NO: 684366 - DNA, 25 bp, Homo sapien
cggcagtgaggctggcggaggggcg

SEQ ID NO: 684367 - DNA, 25 bp, Homo sapien
aggcggcagtgaggctggcggaggg

SEQ ID NO: 684368 - DNA, 25 bp, Homo sapien
caaggcggcagtgaggctggcggag

SEQ ID NO: 684369 - DNA, 25 bp, Homo sapien
gcgcaccacgagattatatccggca

SEQ ID NO: 684370 - DNA, 25 bp, Homo sapien
gtcatgtgagctgtctgcttgtctc

SEQ ID NO: 684371 - DNA, 25 bp, Homo sapien
gcttgtctcccacatgcactagggg

SEQ ID NO: 684372 - DNA, 25 bp, Homo sapien
gcagttgcggtcatgtgagctgtct

SEQ ID NO: 684373 - DNA, 25 bp, Homo sapien
aaaggtcctggcagttgcggtcatg

SEQ ID NO: 684374 - DNA, 25 bp, Homo sapien
cctgcgtccccagcaccacaccctg

SEQ ID NO: 684375 - DNA, 25 bp, Homo sapien
agcctgcgtccccagcaccacaccc

SEQ ID NO: 684376 - DNA, 25 bp, Homo sapien
gccccagcctgcgtccccagcacca

SEQ ID NO: 684377 - DNA, 25 bp, Homo sapien
gcgtccccagcaccacaccctgtgg

SEQ ID NO: 684378 - DNA, 25 bp, Homo sapien
cactcaggggattcacagattcact

SEQ ID NO: 684379 - DNA, 25 bp, Homo sapien
aactgtgcactcaggggattcacag

SEQ ID NO: 684380 - DNA, 25 bp, Homo sapien
aaaactgtgcactcaggggattcac

SEQ ID NO: 684381 - DNA, 25 bp, Homo sapien
gtgcactcaggggattcacagattc

SEQ ID NO: 684382 - DNA, 25 bp, Homo sapien
gtccaagagacccagtggcctccgg

SEQ ID NO: 684383 - DNA, 25 bp, Homo sapien
caagagacccagtggcctccggttt

SEQ ID NO: 684384 - DNA, 25 bp, Homo sapien
tccaagagacccagtggcctccggt

SEQ ID NO: 684385 - DNA, 25 bp, Homo sapien
ccaagagacccagtggcctccggtt

SEQ ID NO: 684386 - DNA, 25 bp, Homo sapien
tccgtgacgtcaccatgctggagag

SEQ ID NO: 684387 - DNA, 25 bp, Homo sapien
gaagcgttgcttgctgattctgcag

SEQ ID NO: 684388 - DNA, 25 bp, Homo sapien
catggtagattaaccaagaccccga

SEQ ID NO: 684389 - DNA, 25 bp, Homo sapien
aagaccccgaattatctgctgcgcg

SEQ ID NO: 684390 - DNA, 25 bp, Homo sapien
cccgcctggccatcctcattccttc

SEQ ID NO: 684391 - DNA, 25 bp, Homo sapien
ccccgcctggccatcctcattcctt

SEQ ID NO: 684392 - DNA, 25 bp, Homo sapien
ctttctggatgatgcccctggcttc

SEQ ID NO: 684393 - DNA, 25 bp, Homo sapien
ttaatgacccattgacacccaggct

SEQ ID NO: 684394 - DNA, 25 bp, Homo sapien
ccggctgcccggagaacattcttct

SEQ ID NO: 684395 - DNA, 25 bp, Homo sapien
cagaaagggttagcgtagaagagtc

SEQ ID NO: 684396 - DNA, 25 bp, Homo sapien
tctagcctgtctctaattatgatga

SEQ ID NO: 684397 - DNA, 25 bp, Homo sapien
gggccttctgcttctagcctgtctc

SEQ ID NO: 684398 - DNA, 25 bp, Homo sapien
tgctgcccaatgatgagccaactct

SEQ ID NO: 684399 - DNA, 25 bp, Homo sapien
aattatgatgattgttgctgcccaa

SEQ ID NO: 684400 - DNA, 25 bp, Homo sapien
cagtcctgcaaccttcagcatggaa

SEQ ID NO: 684401 - DNA, 25 bp, Homo sapien
ttctatctcattggccttagggccc

SEQ ID NO: 684402 - DNA, 25 bp, Homo sapien
gccactgtgcccatggaatatgtca

SEQ ID NO: 684403 - DNA, 25 bp, Homo sapien
caagttgttagcagagctgtgctcc

SEQ ID NO: 684404 - DNA, 25 bp, Homo sapien
ttgtgtgatctgaaggatccccagt

SEQ ID NO: 684405 - DNA, 25 bp, Homo sapien
tatccccattgtgtgatctgaagga

SEQ ID NO: 684406 - DNA, 25 bp, Homo sapien
cccattgtgtgatctgaaggatccc

SEQ ID NO: 684407 - DNA, 25 bp, Homo sapien
catatccccattgtgtgatctgaag

SEQ ID NO: 684408 - DNA, 25 bp, Homo sapien
tctactatcaacaatgcgtttctta

SEQ ID NO: 684409 - DNA, 25 bp, Homo sapien
tactatcaacaatgcgtttcttaga

SEQ ID NO: 684410 - DNA, 25 bp, Homo sapien
tatcaacaatgcgtttcttagaaga

SEQ ID NO: 684411 - DNA, 25 bp, Homo sapien
caacaatgcgtttcttagaagaaac

SEQ ID NO: 684412 - DNA, 25 bp, Homo sapien
ggtatccttacaacggcatcagttt

SEQ ID NO: 684413 - DNA, 25 bp, Homo sapien
aacttggtatccttacaacggcatc

SEQ ID NO: 684414 - DNA, 25 bp, Homo sapien
ttggtatccttacaacggcatcagt

SEQ ID NO: 684415 - DNA, 25 bp, Homo sapien
aaacttggtatccttacaacggcat

SEQ ID NO: 684416 - DNA, 25 bp, Homo sapien
tgcctggcctcttcagtgtcttttt

SEQ ID NO: 684417 - DNA, 25 bp, Homo sapien
catcatgcctggcctcttcagtgtc

SEQ ID NO: 684418 - DNA, 25 bp, Homo sapien
tggcctcttcagtgtctttttattg

SEQ ID NO: 684419 - DNA, 25 bp, Homo sapien
ctcggcctccagagtctctgggact

SEQ ID NO: 684420 - DNA, 25 bp, Homo sapien
gggcactgacagatgaagccttcca

SEQ ID NO: 684421 - DNA, 25 bp, Homo sapien
ggtgcaaaccctcccagatccttgt

SEQ ID NO: 684422 - DNA, 25 bp, Homo sapien
gatccttgtgcaagcctcagattag

SEQ ID NO: 684423 - DNA, 25 bp, Homo sapien
cggtgtctccgcatgaatattcagc

SEQ ID NO: 684424 - DNA, 25 bp, Homo sapien
cccggccaagattctttataaagca

SEQ ID NO: 684425 - DNA, 25 bp, Homo sapien
accgtgcccggccaagattctttat

SEQ ID NO: 684426 - DNA, 25 bp, Homo sapien
gtgcccggccaagattctttataaa

SEQ ID NO: 684427 - DNA, 25 bp, Homo sapien
ccgtgcccggccaagattctttata

SEQ ID NO: 684428 - DNA, 25 bp, Homo sapien
gaatggctgacctcgatatctgcag

SEQ ID NO: 684429 - DNA, 25 bp, Homo sapien
taggattacccttgctctatggaga

SEQ ID NO: 684430 - DNA, 25 bp, Homo sapien
tatctgcagcacatatcatagaggg

SEQ ID NO: 684431 - DNA, 25 bp, Homo sapien
aacgccctcagtcaaggatcctgga

SEQ ID NO: 684432 - DNA, 25 bp, Homo sapien
tatttcagtagctttcaccattcgc

SEQ ID NO: 684433 - DNA, 25 bp, Homo sapien
cattcgcttctcaaaggatgaagta

SEQ ID NO: 684434 - DNA, 25 bp, Homo sapien
gggagtaagcactgacatccaccaa

SEQ ID NO: 684435 - DNA, 25 bp, Homo sapien
tacacaactgtagtgttccttgcag

SEQ ID NO: 684436 - DNA, 25 bp, Homo sapien
tgtcatttggtcgataatgtgcatt

SEQ ID NO: 684437 - DNA, 25 bp, Homo sapien
ccatgctgttagataagtgttgata

SEQ ID NO: 684438 - DNA, 25 bp, Homo sapien
ttgtgccatgctgttagataagtgt

SEQ ID NO: 684439 - DNA, 25 bp, Homo sapien
gataatgtgcattcccaataaaatt

SEQ ID NO: 684440 - DNA, 25 bp, Homo sapien
tgagatcacaccattgcactccagc

SEQ ID NO: 684441 - DNA, 25 bp, Homo sapien
cctgggcaacagagcaagactccat

SEQ ID NO: 684442 - DNA, 25 bp, Homo sapien
tgaggtaggagaactgcttggacct

SEQ ID NO: 684443 - DNA, 25 bp, Homo sapien
aggcagagattgcagtgagctgaga

SEQ ID NO: 684444 - DNA, 25 bp, Homo sapien
cacaagtgtaaagtggcccggagcc

SEQ ID NO: 684445 - DNA, 25 bp, Homo sapien
tctaacgtcgagctggatgctggac

SEQ ID NO: 684446 - DNA, 25 bp, Homo sapien
ggactaccagcaggcacacaagtgt

SEQ ID NO: 684447 - DNA, 25 bp, Homo sapien
tttggagaatcgacctcgctggagc

SEQ ID NO: 684448 - DNA, 25 bp, Homo sapien
ccttggacccccacattctgctgtg

SEQ ID NO: 684449 - DNA, 25 bp, Homo sapien
cggccccttggacccccacattctg

SEQ ID NO: 684450 - DNA, 25 bp, Homo sapien
cccttggacccccacattctgctgt

SEQ ID NO: 684451 - DNA, 25 bp, Homo sapien
gccccttggacccccacattctgct

SEQ ID NO: 684452 - DNA, 25 bp, Homo sapien
tcttgaaggtacaaaatggacaggt

SEQ ID NO: 684453 - DNA, 25 bp, Homo sapien
gggcatccggtacgtcgacttctaa

SEQ ID NO: 684454 - DNA, 25 bp, Homo sapien
tttttcgtgacaatccacacttggc

SEQ ID NO: 684455 - DNA, 25 bp, Homo sapien
aattgccgggcaattgtgaagagcc

SEQ ID NO: 684456 - DNA, 25 bp, Homo sapien
cttcaaggttatgggtggtactgcc

SEQ ID NO: 684457 - DNA, 25 bp, Homo sapien
gcggtctccgtttgcttctctttgg

SEQ ID NO: 684458 - DNA, 25 bp, Homo sapien
gccatccggaggaggagtaacatcc

SEQ ID NO: 684459 - DNA, 25 bp, Homo sapien
tccgccttggttctacagatgaggt

SEQ ID NO: 684460 - DNA, 25 bp, Homo sapien
aatttttggtttgcgcactgtcagc

SEQ ID NO: 684461 - DNA, 25 bp, Homo sapien
tccaagtgatacctcagagatgtct

SEQ ID NO: 684462 - DNA, 25 bp, Homo sapien
tcagcggttaatagtgcatcttcag

SEQ ID NO: 684463 - DNA, 25 bp, Homo sapien
caggtggactgcctgtaacatcttt

SEQ ID NO: 684464 - DNA, 25 bp, Homo sapien
tctgagatgaatattgaggtaataa

SEQ ID NO: 684465 - DNA, 25 bp, Homo sapien
aataactacactctcttgaagatgt

SEQ ID NO: 684466 - DNA, 25 bp, Homo sapien
cacaataactacactctcttgaaga

SEQ ID NO: 684467 - DNA, 25 bp, Homo sapien
tccacaataactacactctcttgaa

SEQ ID NO: 684468 - DNA, 25 bp, Homo sapien
ccatcctcagatccgtcttcagaac

SEQ ID NO: 684469 - DNA, 25 bp, Homo sapien
tcctcagatccgtcttcagaaccac

SEQ ID NO: 684470 - DNA, 25 bp, Homo sapien
atcctcagatccgtcttcagaacca

SEQ ID NO: 684471 - DNA, 25 bp, Homo sapien
cccatcctcagatccgtcttcagaa

SEQ ID NO: 684472 - DNA, 25 bp, Homo sapien
ttggtagccagctgccaagcctgga

SEQ ID NO: 684473 - DNA, 25 bp, Homo sapien
gaatcgtcgttgtcggtgctccctt

SEQ ID NO: 684474 - DNA, 25 bp, Homo sapien
gctactgggtaacttgggatccgcg

SEQ ID NO: 684475 - DNA, 25 bp, Homo sapien
gattccttcacttcttggcaaatgg

SEQ ID NO: 684476 - DNA, 25 bp, Homo sapien
tgcgcgctgctggtaccgaaagcag

SEQ ID NO: 684477 - DNA, 25 bp, Homo sapien
tggtctcaagttgaacaactgcagg

SEQ ID NO: 684478 - DNA, 25 bp, Homo sapien
aggaagtcctccctcgaggacggca

SEQ ID NO: 684479 - DNA, 25 bp, Homo sapien
ctgagggatgcatctgacaggcttc

SEQ ID NO: 684480 - DNA, 25 bp, Homo sapien
tgagatactctgcttcaacccgaag

SEQ ID NO: 684481 - DNA, 25 bp, Homo sapien
gacctcgttgatcgttgctggacta

SEQ ID NO: 684482 - DNA, 25 bp, Homo sapien
ggcatatacccctcgatttggatga

SEQ ID NO: 684483 - DNA, 25 bp, Homo sapien
tgtagctcggaatggaacaacagcg

SEQ ID NO: 684484 - DNA, 25 bp, Homo sapien
tacattaagagggattgagttggca

SEQ ID NO: 684485 - DNA, 25 bp, Homo sapien
acattaagagggattgagttggcat

SEQ ID NO: 684486 - DNA, 25 bp, Homo sapien
gtacattaagagggattgagttggc

SEQ ID NO: 684487 - DNA, 25 bp, Homo sapien
cacaaacaaggcatacagggttccc

SEQ ID NO: 684488 - DNA, 25 bp, Homo sapien
taatctcaaagttccgttgggcaat

SEQ ID NO: 684489 - DNA, 25 bp, Homo sapien
gaagtcaatcccagcaacctggaga

SEQ ID NO: 684490 - DNA, 25 bp, Homo sapien
caatttctggagttggaataaggcc

SEQ ID NO: 684491 - DNA, 25 bp, Homo sapien
cactgctgataaagtaaattgtctt

SEQ ID NO: 684492 - DNA, 25 bp, Homo sapien
taacagcaaatcaccgttccaattg

SEQ ID NO: 684493 - DNA, 25 bp, Homo sapien
agaaggcagcagtaaaccgatggca

SEQ ID NO: 684494 - DNA, 25 bp, Homo sapien
caaatcaccgttccaattgaatggg

SEQ ID NO: 684495 - DNA, 25 bp, Homo sapien
tcagttaagggatcttagtaagaac

SEQ ID NO: 684496 - DNA, 25 bp, Homo sapien
ggaaagatgcttccaagttaagcga

SEQ ID NO: 684497 - DNA, 25 bp, Homo sapien
gggtcacacccatgaggctaaatgg

SEQ ID NO: 684498 - DNA, 25 bp, Homo sapien
tcttcaacttgggaagcttgtaaag

SEQ ID NO: 684499 - DNA, 25 bp, Homo sapien
tgtccccaaatttccagtaactcaa

SEQ ID NO: 684500 - DNA, 25 bp, Homo sapien
tttatcataaaattaccaaactgtc

SEQ ID NO: 684501 - DNA, 25 bp, Homo sapien
actttatcataaaattaccaaactg

SEQ ID NO: 684502 - DNA, 25 bp, Homo sapien
ccagtaactcaattatgctgatacc

SEQ ID NO: 684503 - DNA, 25 bp, Homo sapien
gttcaccttactccaaaaacatgag

SEQ ID NO: 684504 - DNA, 25 bp, Homo sapien
caggcttccttcacccgaatttaag

SEQ ID NO: 684505 - DNA, 25 bp, Homo sapien
cgcccgccattgtctcaagtttaat

SEQ ID NO: 684506 - DNA, 25 bp, Homo sapien
ttcctgccgtctttgtgtaatacat

SEQ ID NO: 684507 - DNA, 25 bp, Homo sapien
caaaagacacggggagccgcgggcg

SEQ ID NO: 684508 - DNA, 25 bp, Homo sapien
cggggagccgcgggcgaggggtgca

SEQ ID NO: 684509 - DNA, 25 bp, Homo sapien
agccgcgggcgaggggtgcagccat

SEQ ID NO: 684510 - DNA, 25 bp, Homo sapien
ctcccggattccgcgcccgcacccg

SEQ ID NO: 684511 - DNA, 25 bp, Homo sapien
gcgcgcgccgtgccaccctccccgc

SEQ ID NO: 684512 - DNA, 25 bp, Homo sapien
gcgcgccgtgccaccctccccgcgc

SEQ ID NO: 684513 - DNA, 25 bp, Homo sapien
gcgccgtgccaccctccccgcgccc

SEQ ID NO: 684514 - DNA, 25 bp, Homo sapien
cgccccgcacccctcctcccgccat

SEQ ID NO: 684515 - DNA, 25 bp, Homo sapien
cagggtctggaacctgataactctg

SEQ ID NO: 684516 - DNA, 25 bp, Homo sapien
taggacttcactctacctggctcca

SEQ ID NO: 684517 - DNA, 25 bp, Homo sapien
cctgataactctgtaggacttcact

SEQ ID NO: 684518 - DNA, 25 bp, Homo sapien
tctgtaggacttcactctacctggc

SEQ ID NO: 684519 - DNA, 25 bp, Homo sapien
tgcctcctttatgacactgtctgcg

SEQ ID NO: 684520 - DNA, 25 bp, Homo sapien
tgtctgcgttatgcctagccctggg

SEQ ID NO: 684521 - DNA, 25 bp, Homo sapien
tcctccatgttgtggaacggtcaac

SEQ ID NO: 684522 - DNA, 25 bp, Homo sapien
agccccaaggtcactcgaaatgcca

SEQ ID NO: 684523 - DNA, 25 bp, Homo sapien
gggcaatcctcatagaaggtcgggg

SEQ ID NO: 684524 - DNA, 25 bp, Homo sapien
aggtcggggacgacctgcccttcag

SEQ ID NO: 684525 - DNA, 25 bp, Homo sapien
gtcggggacgacctgcccttcagtg

SEQ ID NO: 684526 - DNA, 25 bp, Homo sapien
tgggcaatcctcatagaaggtcggg

SEQ ID NO: 684527 - DNA, 25 bp, Homo sapien
tgaaaacagtgaaatgcgaacaagg

SEQ ID NO: 684528 - DNA, 25 bp, Homo sapien
tacaaagaccaagtcagcatgtcct

SEQ ID NO: 684529 - DNA, 25 bp, Homo sapien
taaacttctccaaaccaatacagct

SEQ ID NO: 684530 - DNA, 25 bp, Homo sapien
aatgacttcgtcctggttgagtggg

SEQ ID NO: 684531 - DNA, 25 bp, Homo sapien
caggatgggtagaggcatgaagaaa

SEQ ID NO: 684532 - DNA, 25 bp, Homo sapien
ggaaactatctcattaccacatttt

SEQ ID NO: 684533 - DNA, 25 bp, Homo sapien
ctccgggccacgcttcccggctggg

SEQ ID NO: 684534 - DNA, 25 bp, Homo sapien
cgggccacgcttcccggctgggtgg

SEQ ID NO: 684535 - DNA, 25 bp, Homo sapien
cgggctgcaggtggcctttcctcat

SEQ ID NO: 684536 - DNA, 25 bp, Homo sapien
taaaccgggctgcaggtggcctttc

SEQ ID NO: 684537 - DNA, 25 bp, Homo sapien
aaccgggctgcaggtggcctttcct

SEQ ID NO: 684538 - DNA, 25 bp, Homo sapien
cagaattaaaccgggctgcaggtgg

SEQ ID NO: 684539 - DNA, 25 bp, Homo sapien
acatgcaggcagtaacagaggggac

SEQ ID NO: 684540 - DNA, 25 bp, Homo sapien
ccttccagacaaggagggcaagata

SEQ ID NO: 684541 - DNA, 25 bp, Homo sapien
tttatatgacgatcaggatagacaa

SEQ ID NO: 684542 - DNA, 25 bp, Homo sapien
tgagtttgggcagttttatatgacg

SEQ ID NO: 684543 - DNA, 25 bp, Homo sapien
acttgggtttgatacggttcagcat

SEQ ID NO: 684544 - DNA, 25 bp, Homo sapien
tgacttgggtttgatacggttcagc

SEQ ID NO: 684545 - DNA, 25 bp, Homo sapien
gatgacttgggtttgatacggttca

SEQ ID NO: 684546 - DNA, 25 bp, Homo sapien
tgatgacttgggtttgatacggttc

SEQ ID NO: 684547 - DNA, 25 bp, Homo sapien
atcacactaccaatagaaggatttc

SEQ ID NO: 684548 - DNA, 25 bp, Homo sapien
catcacactaccaatagaaggattt

SEQ ID NO: 684549 - DNA, 25 bp, Homo sapien
acatcacactaccaatagaaggatt

SEQ ID NO: 684550 - DNA, 25 bp, Homo sapien
ccgggaaggcattttgactttgcca

SEQ ID NO: 684551 - DNA, 25 bp, Homo sapien
ctttggctcagatggtattcaaaca

SEQ ID NO: 684552 - DNA, 25 bp, Homo sapien
tcagtcagtttatctaatcagccag

SEQ ID NO: 684553 - DNA, 25 bp, Homo sapien
tccaagccgcaaggccatagaaggg

SEQ ID NO: 684554 - DNA, 25 bp, Homo sapien
ccactgtaggttggtggcaatcaaa

SEQ ID NO: 684555 - DNA, 25 bp, Homo sapien
agtagcaggaacaactctctagaga

SEQ ID NO: 684556 - DNA, 25 bp, Homo sapien
ggcaatcaaagacatcggaatactt

SEQ ID NO: 684557 - DNA, 25 bp, Homo sapien
tttgtcgtcaccagagagagtagca

SEQ ID NO: 684558 - DNA, 25 bp, Homo sapien
ccagttcgtaagtagtctgcatcgc

SEQ ID NO: 684559 - DNA, 25 bp, Homo sapien
tgtatccaatatgctctcgtgctgt

SEQ ID NO: 684560 - DNA, 25 bp, Homo sapien
gattccatacaagataaacgccttg

SEQ ID NO: 684561 - DNA, 25 bp, Homo sapien
taatttaagtgtaactgcgcaggaa

SEQ ID NO: 684562 - DNA, 25 bp, Homo sapien
cgtgttttcaacagactagcttttt

SEQ ID NO: 684563 - DNA, 25 bp, Homo sapien
tgggaggagaagtccgtgttttcaa

SEQ ID NO: 684564 - DNA, 25 bp, Homo sapien
ttggccctaccaaaacaaaatgaca

SEQ ID NO: 684565 - DNA, 25 bp, Homo sapien
tggccctaccaaaacaaaatgacaa

SEQ ID NO: 684566 - DNA, 25 bp, Homo sapien
ggaatggctttctcctgaatgagaa

SEQ ID NO: 684567 - DNA, 25 bp, Homo sapien
ttagtggtctctaagctgacttgga

SEQ ID NO: 684568 - DNA, 25 bp, Homo sapien
taagctgacttggagtctcatgtag

SEQ ID NO: 684569 - DNA, 25 bp, Homo sapien
gtctctaagctgacttggagtctca

SEQ ID NO: 684570 - DNA, 25 bp, Homo sapien
ggagtctcatgtagatagagttctg

SEQ ID NO: 684571 - DNA, 25 bp, Homo sapien
cacagacttgtagccctttttgact

SEQ ID NO: 684572 - DNA, 25 bp, Homo sapien
gcttccatgcccctcagaaggagca

SEQ ID NO: 684573 - DNA, 25 bp, Homo sapien
gaaggagcagggagtcctccccggc

SEQ ID NO: 684574 - DNA, 25 bp, Homo sapien
gactgaaggcttccaaaatgaaagg

SEQ ID NO: 684575 - DNA, 25 bp, Homo sapien
cttttgaagaggtgaaagagagatc

SEQ ID NO: 684576 - DNA, 25 bp, Homo sapien
tgtcagaatccaactctgaataata

SEQ ID NO: 684577 - DNA, 25 bp, Homo sapien
gccagactgggtctgcagaaagttc

SEQ ID NO: 684578 - DNA, 25 bp, Homo sapien
ccaactctgaataatactgaacgtg

SEQ ID NO: 684579 - DNA, 25 bp, Homo sapien
tactgaacgtgattagagtccccag

SEQ ID NO: 684580 - DNA, 25 bp, Homo sapien
agctaccaaagatggcttgatatgt

SEQ ID NO: 684581 - DNA, 25 bp, Homo sapien
tgtggcctgtggttcctcacagcgg

SEQ ID NO: 684582 - DNA, 25 bp, Homo sapien
taccaaagatggcttgatatgtgtc

SEQ ID NO: 684583 - DNA, 25 bp, Homo sapien
gagtgtggcctgtggttcctcacag

SEQ ID NO: 684584 - DNA, 25 bp, Homo sapien
tggaagaaactgtcacttcacctgc

SEQ ID NO: 684585 - DNA, 25 bp, Homo sapien
gggtggaagaaactgtcacttcacc

SEQ ID NO: 684586 - DNA, 25 bp, Homo sapien
gaagaaactgtcacttcacctgcag

SEQ ID NO: 684587 - DNA, 25 bp, Homo sapien
tgtgggtggaagaaactgtcacttc

SEQ ID NO: 684588 - DNA, 25 bp, Homo sapien
gtgtctctcctgctcgagtgtcacc

SEQ ID NO: 684589 - DNA, 25 bp, Homo sapien
tgtctctcctgctcgagtgtcacct

SEQ ID NO: 684590 - DNA, 25 bp, Homo sapien
gccctggacgccgtcattttcctca

SEQ ID NO: 684591 - DNA, 25 bp, Homo sapien
gagccctggacgccgtcattttcct

SEQ ID NO: 684592 - DNA, 25 bp, Homo sapien
gggagccctggacgccgtcattttc

SEQ ID NO: 684593 - DNA, 25 bp, Homo sapien
aggggagccctggacgccgtcattt

SEQ ID NO: 684594 - DNA, 25 bp, Homo sapien
tatgcaaatctagatctatcatagg

SEQ ID NO: 684595 - DNA, 25 bp, Homo sapien
ggtctatcatacagatcttcctctc

SEQ ID NO: 684596 - DNA, 25 bp, Homo sapien
cataggtaggtctatcatacagatc

SEQ ID NO: 684597 - DNA, 25 bp, Homo sapien
gatctatcataggtaggtctatcat

SEQ ID NO: 684598 - DNA, 25 bp, Homo sapien
tggcagagagcattggatcagtgat

SEQ ID NO: 684599 - DNA, 25 bp, Homo sapien
tgtctgaaaccaccggagaaagccc

SEQ ID NO: 684600 - DNA, 25 bp, Homo sapien
cctgagagctgttctctaattttgc

SEQ ID NO: 684601 - DNA, 25 bp, Homo sapien
gagctgttctctaattttgctggca

SEQ ID NO: 684602 - DNA, 25 bp, Homo sapien
cagaaaacagcagacaggcaaggcc

SEQ ID NO: 684603 - DNA, 25 bp, Homo sapien
acagaaggccgttcacaggatggca

SEQ ID NO: 684604 - DNA, 25 bp, Homo sapien
tcacaggatggcagcgtaacagaaa

SEQ ID NO: 684605 - DNA, 25 bp, Homo sapien
acaggatggcagcgtaacagaaaac

SEQ ID NO: 684606 - DNA, 25 bp, Homo sapien
cacctccggttgagaagctttcctg

SEQ ID NO: 684607 - DNA, 25 bp, Homo sapien
attactggaatctcaatcacatgcg

SEQ ID NO: 684608 - DNA, 25 bp, Homo sapien
gcttttcttaggagaagagcatact

SEQ ID NO: 684609 - DNA, 25 bp, Homo sapien
tcaacaaatggtggctgccggcaac

SEQ ID NO: 684610 - DNA, 25 bp, Homo sapien
aagcacaatgcaccccaaatcctta

SEQ ID NO: 684611 - DNA, 25 bp, Homo sapien
ttaagcacaatgcaccccaaatcct

SEQ ID NO: 684612 - DNA, 25 bp, Homo sapien
agcacaatgcaccccaaatccttac

SEQ ID NO: 684613 - DNA, 25 bp, Homo sapien
taagcacaatgcaccccaaatcctt

SEQ ID NO: 684614 - DNA, 25 bp, Homo sapien
gcagctgttggtcttagagaaccgt

SEQ ID NO: 684615 - DNA, 25 bp, Homo sapien
ttgtcatcaggtacgtgccagaagc

SEQ ID NO: 684616 - DNA, 25 bp, Homo sapien
gaagcatttgtaagtcttgccagga

SEQ ID NO: 684617 - DNA, 25 bp, Homo sapien
ttgctttgtttattacctgagctgg

SEQ ID NO: 684618 - DNA, 25 bp, Homo sapien
tactgagattccatagaacctttct

SEQ ID NO: 684619 - DNA, 25 bp, Homo sapien
ggctctactgggagtattatgatca

SEQ ID NO: 684620 - DNA, 25 bp, Homo sapien
ccccaggctctactgggagtattat

SEQ ID NO: 684621 - DNA, 25 bp, Homo sapien
tcaagatgacctgctaaaataccat

SEQ ID NO: 684622 - DNA, 25 bp, Homo sapien
ctttgagattcttttagagtgttca

SEQ ID NO: 684623 - DNA, 25 bp, Homo sapien
tcttttagagtgttcaggattggag

SEQ ID NO: 684624 - DNA, 25 bp, Homo sapien
tatgcatctttactgatgggaaaac

SEQ ID NO: 684625 - DNA, 25 bp, Homo sapien
aagagatatgcatctttactgatgg

SEQ ID NO: 684626 - DNA, 25 bp, Homo sapien
taacatccagtaagacacctccgta

SEQ ID NO: 684627 - DNA, 25 bp, Homo sapien
gattcctggaccatatccttgaatg

SEQ ID NO: 684628 - DNA, 25 bp, Homo sapien
gattggttacaacctcctccattaa

SEQ ID NO: 684629 - DNA, 25 bp, Homo sapien
tctgctacaggacacaaatgcatgg

SEQ ID NO: 684630 - DNA, 25 bp, Homo sapien
gccttgaggactgtcagtcggcctc

SEQ ID NO: 684631 - DNA, 25 bp, Homo sapien
cttgaggactgtcagtcggcctctt

SEQ ID NO: 684632 - DNA, 25 bp, Homo sapien
aaacaatcgagttctctaccccagg

SEQ ID NO: 684633 - DNA, 25 bp, Homo sapien
caaaacaatcgagttctctacccca

SEQ ID NO: 684634 - DNA, 25 bp, Homo sapien
cagataaaacgaggcacctgccagg

SEQ ID NO: 684635 - DNA, 25 bp, Homo sapien
gccttgaggactgtcagtcggccac

SEQ ID NO: 684636 - DNA, 25 bp, Homo sapien
tgagtccacagctaaagggagtccc

SEQ ID NO: 684637 - DNA, 25 bp, Homo sapien
tgccaggtctctaggctggagcgaa

SEQ ID NO: 684638 - DNA, 25 bp, Homo sapien
aaagagatttggtgcacaataggac

SEQ ID NO: 684639 - DNA, 25 bp, Homo sapien
tttggtgcacaataggacctgagat

SEQ ID NO: 684640 - DNA, 25 bp, Homo sapien
ccctgataaagagatttggtgcaca

SEQ ID NO: 684641 - DNA, 25 bp, Homo sapien
cgtcttttaaccctgataaagagat

SEQ ID NO: 684642 - DNA, 25 bp, Homo sapien
tatctatcttctcacgcatttatcc

SEQ ID NO: 684643 - DNA, 25 bp, Homo sapien
ctcctgtgaggctaagactacaggt

SEQ ID NO: 684644 - DNA, 25 bp, Homo sapien
tcctctcccctaagcctcctgtgag

SEQ ID NO: 684645 - DNA, 25 bp, Homo sapien
tcaaaagatcctctcccctaagcct

SEQ ID NO: 684646 - DNA, 25 bp, Homo sapien
tttcacaactgcaaacaaatctatg

SEQ ID NO: 684647 - DNA, 25 bp, Homo sapien
cacaactgcaaacaaatctatgaac

SEQ ID NO: 684648 - DNA, 25 bp, Homo sapien
actgcaaacaaatctatgaactcac

SEQ ID NO: 684649 - DNA, 25 bp, Homo sapien
taattttcacaactgcaaacaaatc

SEQ ID NO: 684650 - DNA, 25 bp, Homo sapien
aaaccctatggcaagcaaggtggct

SEQ ID NO: 684651 - DNA, 25 bp, Homo sapien
cacagtctgtcaaggaacgctggga

SEQ ID NO: 684652 - DNA, 25 bp, Homo sapien
aaagacagggttaagaatgtcacac

SEQ ID NO: 684653 - DNA, 25 bp, Homo sapien
caaggtggcttaggtgtgctccaca

SEQ ID NO: 684654 - DNA, 25 bp, Homo sapien
ggagaaacaatatcctatacacagc

SEQ ID NO: 684655 - DNA, 25 bp, Homo sapien
gaaacaatatcctatacacagcttg

SEQ ID NO: 684656 - DNA, 25 bp, Homo sapien
aacaatatcctatacacagcttggc

SEQ ID NO: 684657 - DNA, 25 bp, Homo sapien
acaatatcctatacacagcttggca

SEQ ID NO: 684658 - DNA, 25 bp, Homo sapien
ctgcctagggtctcctctgtaagtc

SEQ ID NO: 684659 - DNA, 25 bp, Homo sapien
tctgagtcatttcagcatcgtgatc

SEQ ID NO: 684660 - DNA, 25 bp, Homo sapien
caataacccagtttgattgtattaa

SEQ ID NO: 684661 - DNA, 25 bp, Homo sapien
cgctggagtttcttaggtcaaaaag

SEQ ID NO: 684662 - DNA, 25 bp, Homo sapien
ggaataccttgacctgcctcctgag

SEQ ID NO: 684663 - DNA, 25 bp, Homo sapien
tggcatccatgaggagcagtgaatg

SEQ ID NO: 684664 - DNA, 25 bp, Homo sapien
tctgcttttgcacaagtggtgcctc

SEQ ID NO: 684665 - DNA, 25 bp, Homo sapien
tctccagcagagtcatcatggcctt

SEQ ID NO: 684666 - DNA, 25 bp, Homo sapien
caaatacgtagaatgctcaatttcc

SEQ ID NO: 684667 - DNA, 25 bp, Homo sapien
tcaaaacacaaatacgtagaatgct

SEQ ID NO: 684668 - DNA, 25 bp, Homo sapien
aacacaaatacgtagaatgctcaat

SEQ ID NO: 684669 - DNA, 25 bp, Homo sapien
tacgtagaatgctcaatttccacag

SEQ ID NO: 684670 - DNA, 25 bp, Homo sapien
aaagacacacttagatggagatgga

SEQ ID NO: 684671 - DNA, 25 bp, Homo sapien
tgtgcaaagacacacttagatggag

SEQ ID NO: 684672 - DNA, 25 bp, Homo sapien
gcaaagacacacttagatggagatg

SEQ ID NO: 684673 - DNA, 25 bp, Homo sapien
atggagagaagaagctaggatgaaa

SEQ ID NO: 684674 - DNA, 25 bp, Homo sapien
taggtaccgtgggaatctagcttct

SEQ ID NO: 684675 - DNA, 25 bp, Homo sapien
ctgtcatcacctgatcacacttcat

SEQ ID NO: 684676 - DNA, 25 bp, Homo sapien
ctgaatcctggtaggtaccgtggga

SEQ ID NO: 684677 - DNA, 25 bp, Homo sapien
tttccttgctgaatcctggtaggta

SEQ ID NO: 684678 - DNA, 25 bp, Homo sapien
tgggaacggatactagcagaaggct

SEQ ID NO: 684679 - DNA, 25 bp, Homo sapien
tcctgcagctggatattagggaagc

SEQ ID NO: 684680 - DNA, 25 bp, Homo sapien
tcttccgggcacgtcttcaaacaca

SEQ ID NO: 684681 - DNA, 25 bp, Homo sapien
tctgttgttgttagggacggctcac

SEQ ID NO: 684682 - DNA, 25 bp, Homo sapien
tctgagttaacaacagctctctgac

SEQ ID NO: 684683 - DNA, 25 bp, Homo sapien
tctgactgtgtgcacgggctgtttg

SEQ ID NO: 684684 - DNA, 25 bp, Homo sapien
tagaatctgagttaacaacagctct

SEQ ID NO: 684685 - DNA, 25 bp, Homo sapien
agctctctgactgtgtgcacgggct

SEQ ID NO: 684686 - DNA, 25 bp, Homo sapien
cgatgatcaggggtaatctcgccac

SEQ ID NO: 684687 - DNA, 25 bp, Homo sapien
aaagctgagaaagtatggattttgc

SEQ ID NO: 684688 - DNA, 25 bp, Homo sapien
gagaaagtatggattttgcgatgat

SEQ ID NO: 684689 - DNA, 25 bp, Homo sapien
aagtatggattttgcgatgatcagg

SEQ ID NO: 684690 - DNA, 25 bp, Homo sapien
gacaaacaatgcaggcatattgata

SEQ ID NO: 684691 - DNA, 25 bp, Homo sapien
aagacaaacaatgcaggcatattga

SEQ ID NO: 684692 - DNA, 25 bp, Homo sapien
agggccgatggaagacaaacaatgc

SEQ ID NO: 684693 - DNA, 25 bp, Homo sapien
ctgtgtacagagagggccgatggaa

SEQ ID NO: 684694 - DNA, 25 bp, Homo sapien
taaagagatggagtgcctgttttca

SEQ ID NO: 684695 - DNA, 25 bp, Homo sapien
accaaaagtcatagtccaggagtga

SEQ ID NO: 684696 - DNA, 25 bp, Homo sapien
caccttgacttaacctgatgctcct

SEQ ID NO: 684697 - DNA, 25 bp, Homo sapien
tggagttagtcgttactctcaacct

SEQ ID NO: 684698 - DNA, 25 bp, Homo sapien
tgtctctgacagtacgatttcttga

SEQ ID NO: 684699 - DNA, 25 bp, Homo sapien
ggaattcactggaacgccctgtctc

SEQ ID NO: 684700 - DNA, 25 bp, Homo sapien
tcttgagtttcttgagaggtgttgt

SEQ ID NO: 684701 - DNA, 25 bp, Homo sapien
caataaccctgagtttaatatcttc

SEQ ID NO: 684702 - DNA, 25 bp, Homo sapien
ggcattcacctgcaggtctccgaac

SEQ ID NO: 684703 - DNA, 25 bp, Homo sapien
cattcacctgcaggtctccgaacag

SEQ ID NO: 684704 - DNA, 25 bp, Homo sapien
gcattcacctgcaggtctccgaaca

SEQ ID NO: 684705 - DNA, 25 bp, Homo sapien
attcacctgcaggtctccgaacagc

SEQ ID NO: 684706 - DNA, 25 bp, Homo sapien
ttcgtcacagcacgacaccatggcg

SEQ ID NO: 684707 - DNA, 25 bp, Homo sapien
aatgccatctcccttcgtcacagca

SEQ ID NO: 684708 - DNA, 25 bp, Homo sapien
ggcggcagtcacttccgctatgcct

SEQ ID NO: 684709 - DNA, 25 bp, Homo sapien
gaacctcgctctggcgtttacaatg

SEQ ID NO: 684710 - DNA, 25 bp, Homo sapien
gggcccatctgaatgcaatcacttg

SEQ ID NO: 684711 - DNA, 25 bp, Homo sapien
tggggcccatctgaatgcaatcact

SEQ ID NO: 684712 - DNA, 25 bp, Homo sapien
gctggggcccatctgaatgcaatca

SEQ ID NO: 684713 - DNA, 25 bp, Homo sapien
gcccatctgaatgcaatcacttgtt

SEQ ID NO: 684714 - DNA, 25 bp, Homo sapien
gagcacaggctccactataggcagc

SEQ ID NO: 684715 - DNA, 25 bp, Homo sapien
gcagttgatggagaacctcgatttg

SEQ ID NO: 684716 - DNA, 25 bp, Homo sapien
gagaacctcgatttggacggaagaa

SEQ ID NO: 684717 - DNA, 25 bp, Homo sapien
tagtgaatgagtaaggttctcccag

SEQ ID NO: 684718 - DNA, 25 bp, Homo sapien
gatattgccccataatcctgtggcc

SEQ ID NO: 684719 - DNA, 25 bp, Homo sapien
tgagtcacccgttggctaacagttc

SEQ ID NO: 684720 - DNA, 25 bp, Homo sapien
tgtggccccagtatagacaggtacc

SEQ ID NO: 684721 - DNA, 25 bp, Homo sapien
tgagcctctatgttatgctctggca

SEQ ID NO: 684722 - DNA, 25 bp, Homo sapien
atttattttttctagccaccaccat

SEQ ID NO: 684723 - DNA, 25 bp, Homo sapien
tatttattttttctagccaccacca

SEQ ID NO: 684724 - DNA, 25 bp, Homo sapien
tcagggccagtctttggaccaaaca

SEQ ID NO: 684725 - DNA, 25 bp, Homo sapien
gaggctgctaaaacacaggttactg

SEQ ID NO: 684726 - DNA, 25 bp, Homo sapien
gataaggcaatccacaatgggtgtg

SEQ ID NO: 684727 - DNA, 25 bp, Homo sapien
tggtagctctacctggaccagtggt

SEQ ID NO: 684728 - DNA, 25 bp, Homo sapien
gaagcctaattctactcaccgtgca

SEQ ID NO: 684729 - DNA, 25 bp, Homo sapien
tatgcaaagggctggatcctgaccg

SEQ ID NO: 684730 - DNA, 25 bp, Homo sapien
tataatttccagtgggccggtgcca

SEQ ID NO: 684731 - DNA, 25 bp, Homo sapien
caaaatcttgaccacggagaagcct

SEQ ID NO: 684732 - DNA, 25 bp, Homo sapien
aatagctccattcctggaaaggcca

SEQ ID NO: 684733 - DNA, 25 bp, Homo sapien
cacttcttcttgacatgggagaaga

SEQ ID NO: 684734 - DNA, 25 bp, Homo sapien
gtgtgtacgcgcagtggcagccatt

SEQ ID NO: 684735 - DNA, 25 bp, Homo sapien
tatggttaccagtcaaaaagtcacc

SEQ ID NO: 684736 - DNA, 25 bp, Homo sapien
tcagacggaacagatgaagcgagcc

SEQ ID NO: 684737 - DNA, 25 bp, Homo sapien
cagctcgggcttaatttctaggcag

SEQ ID NO: 684738 - DNA, 25 bp, Homo sapien
gataagcacgcatttactacaacgc

SEQ ID NO: 684739 - DNA, 25 bp, Homo sapien
tatttgccagaaaagactggaccag

SEQ ID NO: 684740 - DNA, 25 bp, Homo sapien
ttacttggatttgccaactggtccg

SEQ ID NO: 684741 - DNA, 25 bp, Homo sapien
gatactgggtctgtttgcacttgag

SEQ ID NO: 684742 - DNA, 25 bp, Homo sapien
caactggtccgatggatactgggtc

SEQ ID NO: 684743 - DNA, 25 bp, Homo sapien
tgagcatccaacatccgctttggtc

SEQ ID NO: 684744 - DNA, 25 bp, Homo sapien
gtgagttcgtgtccaccgtggcctg

SEQ ID NO: 684745 - DNA, 25 bp, Homo sapien
ttgtccccattctgcagtgagttcg

SEQ ID NO: 684746 - DNA, 25 bp, Homo sapien
tgcttgttcatctcggctgctgact

SEQ ID NO: 684747 - DNA, 25 bp, Homo sapien
gacttcttgtccttcgaggagccct

SEQ ID NO: 684748 - DNA, 25 bp, Homo sapien
aaaagcaccagttcaagcaaggctg

SEQ ID NO: 684749 - DNA, 25 bp, Homo sapien
taaagccctgattgtggcaactggc

SEQ ID NO: 684750 - DNA, 25 bp, Homo sapien
gagataccacgtaggcttgcagccc

SEQ ID NO: 684751 - DNA, 25 bp, Homo sapien
tgatggtatcatgcgtgcctcctag

SEQ ID NO: 684752 - DNA, 25 bp, Homo sapien
gcatccagtgtaccttgagaagctc

SEQ ID NO: 684753 - DNA, 25 bp, Homo sapien
tggagaaggcatcaactgtaggaga

SEQ ID NO: 684754 - DNA, 25 bp, Homo sapien
tccttggagaaagaagcaacaggca

SEQ ID NO: 684755 - DNA, 25 bp, Homo sapien
tgcacgccccttagaagtaagcggg

SEQ ID NO: 684756 - DNA, 25 bp, Homo sapien
tgagtgggtgatccctccatcccct

SEQ ID NO: 684757 - DNA, 25 bp, Homo sapien
tctgagtgggtgatccctccatccc

SEQ ID NO: 684758 - DNA, 25 bp, Homo sapien
gagtgggtgatccctccatcccctt

SEQ ID NO: 684759 - DNA, 25 bp, Homo sapien
ctgagtgggtgatccctccatcccc

SEQ ID NO: 684760 - DNA, 25 bp, Homo sapien
taatcaatcagaagctttcagaggc

SEQ ID NO: 684761 - DNA, 25 bp, Homo sapien
gaggcagaggctcaatgatctgcat

SEQ ID NO: 684762 - DNA, 25 bp, Homo sapien
gaaaggcaaattctggagacccagg

SEQ ID NO: 684763 - DNA, 25 bp, Homo sapien
gacccaggctggatctaatcaatca

SEQ ID NO: 684764 - DNA, 25 bp, Homo sapien
cgtaaggatttcattcagcctccaa

SEQ ID NO: 684765 - DNA, 25 bp, Homo sapien
ccaaagctttggacacgtaaggatt

SEQ ID NO: 684766 - DNA, 25 bp, Homo sapien
acactgtggctttggatcatatctg

SEQ ID NO: 684767 - DNA, 25 bp, Homo sapien
caaattcgggctgtgtcgtaagagc

SEQ ID NO: 684768 - DNA, 25 bp, Homo sapien
cttcgtatcctttctgagaatacca

SEQ ID NO: 684769 - DNA, 25 bp, Homo sapien
caattacacatgagtcaaagggtga

SEQ ID NO: 684770 - DNA, 25 bp, Homo sapien
ggaagcagcaattacacatgagtca

SEQ ID NO: 684771 - DNA, 25 bp, Homo sapien
gcagcaattacacatgagtcaaagg

SEQ ID NO: 684772 - DNA, 25 bp, Homo sapien
aacttttcccaaacagcatctaaca

SEQ ID NO: 684773 - DNA, 25 bp, Homo sapien
tcccaaacagcatctaacagatagc

SEQ ID NO: 684774 - DNA, 25 bp, Homo sapien
ttcccaaacagcatctaacagatag

SEQ ID NO: 684775 - DNA, 25 bp, Homo sapien
ttttcccaaacagcatctaacagat

SEQ ID NO: 684776 - DNA, 25 bp, Homo sapien
taaatgaaggagcttcatgttggtt

SEQ ID NO: 684777 - DNA, 25 bp, Homo sapien
gaaaagctgatcactctcaatatta

SEQ ID NO: 684778 - DNA, 25 bp, Homo sapien
tggaagagaccatcattctatttac

SEQ ID NO: 684779 - DNA, 25 bp, Homo sapien
taagttagatgagttgccggaaaca

SEQ ID NO: 684780 - DNA, 25 bp, Homo sapien
ccatcagagaggttcttggtttgct

SEQ ID NO: 684781 - DNA, 25 bp, Homo sapien
tataatctctactggtgactcacac

SEQ ID NO: 684782 - DNA, 25 bp, Homo sapien
tgagtttcgcttctgtgggttcagg

SEQ ID NO: 684783 - DNA, 25 bp, Homo sapien
caggtgcagcatctccttcgttgag

SEQ ID NO: 684784 - DNA, 25 bp, Homo sapien
tattttgccaggtaataagaaaatg

SEQ ID NO: 684785 - DNA, 25 bp, Homo sapien
attttgccaggtaataagaaaatga

SEQ ID NO: 684786 - DNA, 25 bp, Homo sapien
ttttgccaggtaataagaaaatgaa

SEQ ID NO: 684787 - DNA, 25 bp, Homo sapien
caacaaacgaatcacactggcagca

SEQ ID NO: 684788 - DNA, 25 bp, Homo sapien
tggcagcatgcaagaacacaggacc

SEQ ID NO: 684789 - DNA, 25 bp, Homo sapien
cacatacgggataagagagtctaca

SEQ ID NO: 684790 - DNA, 25 bp, Homo sapien
ccagagctgaaaatgcccaattgta

SEQ ID NO: 684791 - DNA, 25 bp, Homo sapien
tggggactgagtcctctttaactga

SEQ ID NO: 684792 - DNA, 25 bp, Homo sapien
tgtggggactgagtcctctttaact

SEQ ID NO: 684793 - DNA, 25 bp, Homo sapien
attctcctccgcacctgtggggact

SEQ ID NO: 684794 - DNA, 25 bp, Homo sapien
gtggggactgagtcctctttaactg

SEQ ID NO: 684795 - DNA, 25 bp, Homo sapien
cattcattccggtccagtgtgggcc

SEQ ID NO: 684796 - DNA, 25 bp, Homo sapien
tagaaagataaagacgtcggcctgg

SEQ ID NO: 684797 - DNA, 25 bp, Homo sapien
tctggacgacggagtaaagctgaca

SEQ ID NO: 684798 - DNA, 25 bp, Homo sapien
gaaataagttctggagtcatccccg

SEQ ID NO: 684799 - DNA, 25 bp, Homo sapien
tgtgtgtgccccgatgggttgcatc

SEQ ID NO: 684800 - DNA, 25 bp, Homo sapien
ggtctcctgggatgtaaagttggct

SEQ ID NO: 684801 - DNA, 25 bp, Homo sapien
ggaattcttgccagccccttgggtc

SEQ ID NO: 684802 - DNA, 25 bp, Homo sapien
ccttcgcaggttcaggggttgtcac

SEQ ID NO: 684803 - DNA, 25 bp, Homo sapien
tccagtttacctaatgcattacata

SEQ ID NO: 684804 - DNA, 25 bp, Homo sapien
gtttacctaatgcattacatacttg

SEQ ID NO: 684805 - DNA, 25 bp, Homo sapien
acatacttggccgttttcaccgctc

SEQ ID NO: 684806 - DNA, 25 bp, Homo sapien
tctctgcttagtctccctggaccac

SEQ ID NO: 684807 - DNA, 25 bp, Homo sapien
tgaagacataatttccaactttaaa

SEQ ID NO: 684808 - DNA, 25 bp, Homo sapien
cttgaagacataatttccaacttta

SEQ ID NO: 684809 - DNA, 25 bp, Homo sapien
ttgaagacataatttccaactttaa

SEQ ID NO: 684810 - DNA, 25 bp, Homo sapien
tggatctcggatgtcttctgaccag

SEQ ID NO: 684811 - DNA, 25 bp, Homo sapien
agaattttctaaaggcgagtcctag

SEQ ID NO: 684812 - DNA, 25 bp, Homo sapien
ttctaaaggcgagtcctagcctggg

SEQ ID NO: 684813 - DNA, 25 bp, Homo sapien
gctttttcttggtgcctctagcctg

SEQ ID NO: 684814 - DNA, 25 bp, Homo sapien
ggggcaacagcagtcacaacctcag

SEQ ID NO: 684815 - DNA, 25 bp, Homo sapien
ctgggcaggacggtgagattttatc

SEQ ID NO: 684816 - DNA, 25 bp, Homo sapien
gctgggtacgttcagttttgaccac

SEQ ID NO: 684817 - DNA, 25 bp, Homo sapien
gtgagattttatcagctgggtacgt

SEQ ID NO: 684818 - DNA, 25 bp, Homo sapien
cttcctgggcaggacggtgagattt

SEQ ID NO: 684819 - DNA, 25 bp, Homo sapien
ttttgtttcagctttgttaggtgaa

SEQ ID NO: 684820 - DNA, 25 bp, Homo sapien
tttgtttcagctttgttaggtgaaa

SEQ ID NO: 684821 - DNA, 25 bp, Homo sapien
tttttgtttcagctttgttaggtga

SEQ ID NO: 684822 - DNA, 25 bp, Homo sapien
ttgtttcagctttgttaggtgaaac

SEQ ID NO: 684823 - DNA, 25 bp, Homo sapien
cctgggaatcgtcctttgcagtctc

SEQ ID NO: 684824 - DNA, 25 bp, Homo sapien
gggacagagcaatccgcagttccaa

SEQ ID NO: 684825 - DNA, 25 bp, Homo sapien
aagaaactcatgatggaattattat

SEQ ID NO: 684826 - DNA, 25 bp, Homo sapien
ctgctgcctgggaatcgtcctttgc

SEQ ID NO: 684827 - DNA, 25 bp, Homo sapien
atgatggacgccctctgaatgagga

SEQ ID NO: 684828 - DNA, 25 bp, Homo sapien
tatggatctaggtggccatcaggat

SEQ ID NO: 684829 - DNA, 25 bp, Homo sapien
ctatggatctaggtggccatcagga

SEQ ID NO: 684830 - DNA, 25 bp, Homo sapien
tcaggatctgccatgatggacgccc

SEQ ID NO: 684831 - DNA, 25 bp, Homo sapien
tacaatagcctcaaagttggaacaa

SEQ ID NO: 684832 - DNA, 25 bp, Homo sapien
tcaaactggtacttccacagcatgg

SEQ ID NO: 684833 - DNA, 25 bp, Homo sapien
actacttggcagtcgaaaaggacca

SEQ ID NO: 684834 - DNA, 25 bp, Homo sapien
ccaagacactcagtgattcggatta

SEQ ID NO: 684835 - DNA, 25 bp, Homo sapien
tttcaagcccatggcaaaaacaggg

SEQ ID NO: 684836 - DNA, 25 bp, Homo sapien
ggatgacagagctatggcacaggaa

SEQ ID NO: 684837 - DNA, 25 bp, Homo sapien
cttaatgcagtctagaggaggaatc

SEQ ID NO: 684838 - DNA, 25 bp, Homo sapien
tcgagaaattacctagatggtggca

SEQ ID NO: 684839 - DNA, 25 bp, Homo sapien
tatacaactcttaaattagagtcaa

SEQ ID NO: 684840 - DNA, 25 bp, Homo sapien
tacaactcttaaattagagtcaact

SEQ ID NO: 684841 - DNA, 25 bp, Homo sapien
ttatacaactcttaaattagagtca

SEQ ID NO: 684842 - DNA, 25 bp, Homo sapien
acaactcttaaattagagtcaactg

SEQ ID NO: 684843 - DNA, 25 bp, Homo sapien
gaaactctgcatggcaacactttat

SEQ ID NO: 684844 - DNA, 25 bp, Homo sapien
ctttggcctatgtagtaaacgcttc

SEQ ID NO: 684845 - DNA, 25 bp, Homo sapien
ggtttgtatgaatcacagctcagtg

SEQ ID NO: 684846 - DNA, 25 bp, Homo sapien
ttagtgcgaaagtaacgattgcagg

SEQ ID NO: 684847 - DNA, 25 bp, Homo sapien
gagcatgcattcagaaccaagtgga

SEQ ID NO: 684848 - DNA, 25 bp, Homo sapien
agtggatacaccttggcacacttac

SEQ ID NO: 684849 - DNA, 25 bp, Homo sapien
aaccaagtggatacaccttggcaca

SEQ ID NO: 684850 - DNA, 25 bp, Homo sapien
attagcgcccccgagcatgcattca

SEQ ID NO: 684851 - DNA, 25 bp, Homo sapien
cccctgtctcaggtgggagaagcgt

SEQ ID NO: 684852 - DNA, 25 bp, Homo sapien
cagagaggaccttgtcttgggccgg

SEQ ID NO: 684853 - DNA, 25 bp, Homo sapien
tgataagccaggaacctcatccacc

SEQ ID NO: 684854 - DNA, 25 bp, Homo sapien
caccttgtcttgatgctctgccctc

SEQ ID NO: 684855 - DNA, 25 bp, Homo sapien
tcaagcttcactgatccaagggatg

SEQ ID NO: 684856 - DNA, 25 bp, Homo sapien
gaagtggccacattatccgtcttga

SEQ ID NO: 684857 - DNA, 25 bp, Homo sapien
ctggtacaggccgagagagcatcaa

SEQ ID NO: 684858 - DNA, 25 bp, Homo sapien
gcttggtctccggtacgtcctggta

SEQ ID NO: 684859 - DNA, 25 bp, Homo sapien
tgctgaactgtgtgggtcgacacca

SEQ ID NO: 684860 - DNA, 25 bp, Homo sapien
cactggaaccccgttcagagcagac

SEQ ID NO: 684861 - DNA, 25 bp, Homo sapien
ccccgttcagagcagacgcgttgtc

SEQ ID NO: 684862 - DNA, 25 bp, Homo sapien
tgtgggtcgacaccaccactggaac

SEQ ID NO: 684863 - DNA, 25 bp, Homo sapien
aacagagcacgtggcattgtgagac

SEQ ID NO: 684864 - DNA, 25 bp, Homo sapien
gagcacgtggcattgtgagacaaat

SEQ ID NO: 684865 - DNA, 25 bp, Homo sapien
cagagcacgtggcattgtgagacaa

SEQ ID NO: 684866 - DNA, 25 bp, Homo sapien
aaacagagcacgtggcattgtgaga

SEQ ID NO: 684867 - DNA, 25 bp, Homo sapien
aactctttggggaacactcatttgg

SEQ ID NO: 684868 - DNA, 25 bp, Homo sapien
actctttggggaacactcatttggt

SEQ ID NO: 684869 - DNA, 25 bp, Homo sapien
tcaactctttggggaacactcattt

SEQ ID NO: 684870 - DNA, 25 bp, Homo sapien
tcttcaactctttggggaacactca

SEQ ID NO: 684871 - DNA, 25 bp, Homo sapien
tagtggctctcggaataaaaattag

SEQ ID NO: 684872 - DNA, 25 bp, Homo sapien
caccagggattcttgtggatctctc

SEQ ID NO: 684873 - DNA, 25 bp, Homo sapien
gcacatgtaattccaatgtagccca

SEQ ID NO: 684874 - DNA, 25 bp, Homo sapien
aaaggagtcaatgagtcaccaggga

SEQ ID NO: 684875 - DNA, 25 bp, Homo sapien
tgacctagacaaccaaacccacgga

SEQ ID NO: 684876 - DNA, 25 bp, Homo sapien
aggaatagctcaggcttcggagtcc

SEQ ID NO: 684877 - DNA, 25 bp, Homo sapien
aaacccacggattctcagacggagg

SEQ ID NO: 684878 - DNA, 25 bp, Homo sapien
tcacccaggcacctgaatacactca

SEQ ID NO: 684879 - DNA, 25 bp, Homo sapien
gggcactgctttgctgacgcactgt

SEQ ID NO: 684880 - DNA, 25 bp, Homo sapien
cccagatgccccaccggaggtgggt

SEQ ID NO: 684881 - DNA, 25 bp, Homo sapien
ctttccagctggttattcagaagca

SEQ ID NO: 684882 - DNA, 25 bp, Homo sapien
ctgtttcgtgagcttgcaaatcaag

SEQ ID NO: 684883 - DNA, 25 bp, Homo sapien
tgagcccctgtgggagtatcttcag

SEQ ID NO: 684884 - DNA, 25 bp, Homo sapien
gagtatcttcagtcccctcgtgtca

SEQ ID NO: 684885 - DNA, 25 bp, Homo sapien
tggctgtcggtggagcctggctccc

SEQ ID NO: 684886 - DNA, 25 bp, Homo sapien
cagtgcctggctgtcggtggagcct

SEQ ID NO: 684887 - DNA, 25 bp, Homo sapien
gctgccgggttgacctggggaagca

SEQ ID NO: 684888 - DNA, 25 bp, Homo sapien
tgaggctgccgggttgacctgggga

SEQ ID NO: 684889 - DNA, 25 bp, Homo sapien
ctactgaggctgccgggttgacctg

SEQ ID NO: 684890 - DNA, 25 bp, Homo sapien
gaggctgccgggttgacctggggaa

SEQ ID NO: 684891 - DNA, 25 bp, Homo sapien
ctgggaatcccagccgtctgccctt

SEQ ID NO: 684892 - DNA, 25 bp, Homo sapien
tgaaatcacatttgcaagaggaaag

SEQ ID NO: 684893 - DNA, 25 bp, Homo sapien
cagcatccactcagggataggaatc

SEQ ID NO: 684894 - DNA, 25 bp, Homo sapien
agtgaagccctgtccctgggaatcc

SEQ ID NO: 684895 - DNA, 25 bp, Homo sapien
gggtggctttggatccttgacaata

SEQ ID NO: 684896 - DNA, 25 bp, Homo sapien
tggccaccaagtttgttttctgaag

SEQ ID NO: 684897 - DNA, 25 bp, Homo sapien
gcatgtgttgtagggaacttctcaa

SEQ ID NO: 684898 - DNA, 25 bp, Homo sapien
ggacactgccctgtttgaaagccaa

SEQ ID NO: 684899 - DNA, 25 bp, Homo sapien
tcagcaagggtcaaaatgacacaga

SEQ ID NO: 684900 - DNA, 25 bp, Homo sapien
cacagatgacacactcgaatatgag

SEQ ID NO: 684901 - DNA, 25 bp, Homo sapien
tgaggataattcaagggacattcac

SEQ ID NO: 684902 - DNA, 25 bp, Homo sapien
attcaagggacattcactgcctgac

SEQ ID NO: 684903 - DNA, 25 bp, Homo sapien
gtggggcgtagcaggacaggataac

SEQ ID NO: 684904 - DNA, 25 bp, Homo sapien
cttcgagtggggcgtagcaggacag

SEQ ID NO: 684905 - DNA, 25 bp, Homo sapien
gagtggggcgtagcaggacaggata

SEQ ID NO: 684906 - DNA, 25 bp, Homo sapien
tcgagtggggcgtagcaggacagga

SEQ ID NO: 684907 - DNA, 25 bp, Homo sapien
gactctcagcctacggtcaggggaa

SEQ ID NO: 684908 - DNA, 25 bp, Homo sapien
tgggatggtagtggcatcaggcttc

SEQ ID NO: 684909 - DNA, 25 bp, Homo sapien
gggaaaggtcatctgtgaagagcat

SEQ ID NO: 684910 - DNA, 25 bp, Homo sapien
ggagcagcaatgtgagtctctgact

SEQ ID NO: 684911 - DNA, 25 bp, Homo sapien
accacagaaaacagcctgagttgcc

SEQ ID NO: 684912 - DNA, 25 bp, Homo sapien
tgtgaatgtgtagtaacgcaaggaa

SEQ ID NO: 684913 - DNA, 25 bp, Homo sapien
gagaaggatcccttcaactctagac

SEQ ID NO: 684914 - DNA, 25 bp, Homo sapien
caaggaagagtgaagtaaccacaga

SEQ ID NO: 684915 - DNA, 25 bp, Homo sapien
acaaccgctgagctttcttttgacc

SEQ ID NO: 684916 - DNA, 25 bp, Homo sapien
ttttgacctttggatagtagttgac

SEQ ID NO: 684917 - DNA, 25 bp, Homo sapien
tgacctttggatagtagttgacagt

SEQ ID NO: 684918 - DNA, 25 bp, Homo sapien
aaccgctgagctttcttttgacctt

SEQ ID NO: 684919 - DNA, 25 bp, Homo sapien
ggtcctggacatcgtgactggcaat

SEQ ID NO: 684920 - DNA, 25 bp, Homo sapien
tcctggacatcgtgactggcaatgt

SEQ ID NO: 684921 - DNA, 25 bp, Homo sapien
gggtcctggacatcgtgactggcaa

SEQ ID NO: 684922 - DNA, 25 bp, Homo sapien
ttgggtcctggacatcgtgactggc

SEQ ID NO: 684923 - DNA, 25 bp, Homo sapien
gagggatctctgaatcatcgctgtg

SEQ ID NO: 684924 - DNA, 25 bp, Homo sapien
agtgggtgattcatcatctggttcc

SEQ ID NO: 684925 - DNA, 25 bp, Homo sapien
cactcctcacgggcactctggagag

SEQ ID NO: 684926 - DNA, 25 bp, Homo sapien
ctgctttgctcaacagggacctcat

SEQ ID NO: 684927 - DNA, 25 bp, Homo sapien
ttatgaactgcgaggagcatgtgct

SEQ ID NO: 684928 - DNA, 25 bp, Homo sapien
gagcatgtgcttcaaatcgtttgca

SEQ ID NO: 684929 - DNA, 25 bp, Homo sapien
aatcgtttgcaaatttgggccaatg

SEQ ID NO: 684930 - DNA, 25 bp, Homo sapien
cattcatgggtctctgtatgagcag

SEQ ID NO: 684931 - DNA, 25 bp, Homo sapien
cagtattgtcgaagccctttggttt

SEQ ID NO: 684932 - DNA, 25 bp, Homo sapien
aatttgtttccctggttgagacata

SEQ ID NO: 684933 - DNA, 25 bp, Homo sapien
aaacatgtgtcttaatggttctgca

SEQ ID NO: 684934 - DNA, 25 bp, Homo sapien
taatggttctgcaatgtgctgggat

SEQ ID NO: 684935 - DNA, 25 bp, Homo sapien
gttctgcaatgtgctgggatttact

SEQ ID NO: 684936 - DNA, 25 bp, Homo sapien
caaaacaaatatgggtgcagtacaa

SEQ ID NO: 684937 - DNA, 25 bp, Homo sapien
tattcctagtagctaactgtgggag

SEQ ID NO: 684938 - DNA, 25 bp, Homo sapien
caatcaagtaggctcagggtaaaaa

SEQ ID NO: 684939 - DNA, 25 bp, Homo sapien
tatctacagatgtgggcaagaaaca

SEQ ID NO: 684940 - DNA, 25 bp, Homo sapien
tgtgcacagttgtgtggtgactgac

SEQ ID NO: 684941 - DNA, 25 bp, Homo sapien
tccatgcagactggaacgcactgtg

SEQ ID NO: 684942 - DNA, 25 bp, Homo sapien
ggtgactgacgcctgaccgcttcat

SEQ ID NO: 684943 - DNA, 25 bp, Homo sapien
gactggaacgcactgtgcacagttg

SEQ ID NO: 684944 - DNA, 25 bp, Homo sapien
tcagagaatttgaaggtatacagat

SEQ ID NO: 684945 - DNA, 25 bp, Homo sapien
ttactttcagagaatttgaaggtat

SEQ ID NO: 684946 - DNA, 25 bp, Homo sapien
atgaaatctgacaagacgtgaattt

SEQ ID NO: 684947 - DNA, 25 bp, Homo sapien
gagaatttgaaggtatacagatgaa

SEQ ID NO: 684948 - DNA, 25 bp, Homo sapien
cagtgaaccctgtagaatgccttgg

SEQ ID NO: 684949 - DNA, 25 bp, Homo sapien
caggaagaacgcaatttcatgggag

SEQ ID NO: 684950 - DNA, 25 bp, Homo sapien
tcatgggaggcctgataactttaac

SEQ ID NO: 684951 - DNA, 25 bp, Homo sapien
taacctctacctgactgacaagtgc

SEQ ID NO: 684952 - DNA, 25 bp, Homo sapien
aagtatcaacacctgggcctaaata

SEQ ID NO: 684953 - DNA, 25 bp, Homo sapien
gaagccataagcaccattcttgcag

SEQ ID NO: 684954 - DNA, 25 bp, Homo sapien
tggtgtggtgtttgaagtttgcttt

SEQ ID NO: 684955 - DNA, 25 bp, Homo sapien
ttgctttccggtaacgtagaagcca

SEQ ID NO: 684956 - DNA, 25 bp, Homo sapien
tagcatctcaacaggctcattgtct

SEQ ID NO: 684957 - DNA, 25 bp, Homo sapien
tggcaaaacgcgatggggagttccc

SEQ ID NO: 684958 - DNA, 25 bp, Homo sapien
tcaacaggctcattgtctgtggcct

SEQ ID NO: 684959 - DNA, 25 bp, Homo sapien
ggcctggatgtcgtatttgcggaca

SEQ ID NO: 684960 - DNA, 25 bp, Homo sapien
gaagccaacgttcaggtctaaactg

SEQ ID NO: 684961 - DNA, 25 bp, Homo sapien
cagttgaagctctgctaatcggcga

SEQ ID NO: 684962 - DNA, 25 bp, Homo sapien
tcaaaattgtcttcactggatccca

SEQ ID NO: 684963 - DNA, 25 bp, Homo sapien
taatcggcgaccaatgcacattctt

SEQ ID NO: 684964 - DNA, 25 bp, Homo sapien
gccttgtcaagagtccgagttgtaa

SEQ ID NO: 684965 - DNA, 25 bp, Homo sapien
cacccagaactgttgccttgtcaag

SEQ ID NO: 684966 - DNA, 25 bp, Homo sapien
caagagtccgagttgtaaatggtac

SEQ ID NO: 684967 - DNA, 25 bp, Homo sapien
cctttgggtaaagcatattcaccca

SEQ ID NO: 684968 - DNA, 25 bp, Homo sapien
ttcctcaaatcttctgcccgtggca

SEQ ID NO: 684969 - DNA, 25 bp, Homo sapien
tacgggataaattgtagagaatcca

SEQ ID NO: 684970 - DNA, 25 bp, Homo sapien
gagaatccacattagactgtttgct

SEQ ID NO: 684971 - DNA, 25 bp, Homo sapien
tttcagacaggcttttaaatacggc

SEQ ID NO: 684972 - DNA, 25 bp, Homo sapien
ttcatttagcaaactcaaatccagc

SEQ ID NO: 684973 - DNA, 25 bp, Homo sapien
aaaatggtacagaccgttcatttag

SEQ ID NO: 684974 - DNA, 25 bp, Homo sapien
gagttgatgctagtgaatcccagtg

SEQ ID NO: 684975 - DNA, 25 bp, Homo sapien
atttttgtggagttgatgctagtga

SEQ ID NO: 684976 - DNA, 25 bp, Homo sapien
tctttctttgaaagccgattctggt

SEQ ID NO: 684977 - DNA, 25 bp, Homo sapien
aatacttctctaaccggttgtcgat

SEQ ID NO: 684978 - DNA, 25 bp, Homo sapien
tctttgaaagccgattctggtgata

SEQ ID NO: 684979 - DNA, 25 bp, Homo sapien
aaccggttgtcgatacaagctttga

SEQ ID NO: 684980 - DNA, 25 bp, Homo sapien
gaaaatggtgtcccaggccagagtg

SEQ ID NO: 684981 - DNA, 25 bp, Homo sapien
ttgaaaatggtgtcccaggccagag

SEQ ID NO: 684982 - DNA, 25 bp, Homo sapien
tttgaaaatggtgtcccaggccaga

SEQ ID NO: 684983 - DNA, 25 bp, Homo sapien
tgaaaatggtgtcccaggccagagt

SEQ ID NO: 684984 - DNA, 25 bp, Homo sapien
ttggtgttgaggctcttgtgcagct

SEQ ID NO: 684985 - DNA, 25 bp, Homo sapien
agctcgactggagtgaccatcatcc

SEQ ID NO: 684986 - DNA, 25 bp, Homo sapien
tcatcctcccaaacgtgctcatcat

SEQ ID NO: 684987 - DNA, 25 bp, Homo sapien
tcttgtgcagctcgactggagtgac

SEQ ID NO: 684988 - DNA, 25 bp, Homo sapien
gagagaaatgcaaatgcctttttat

SEQ ID NO: 684989 - DNA, 25 bp, Homo sapien
tctccttctctcaaagacaatgttc

SEQ ID NO: 684990 - DNA, 25 bp, Homo sapien
tgaattctccttctctcaaagacaa

SEQ ID NO: 684991 - DNA, 25 bp, Homo sapien
ccttctctcaaagacaatgttcgtt

SEQ ID NO: 684992 - DNA, 25 bp, Homo sapien
tccactggatgtgtttgataaaaat

SEQ ID NO: 684993 - DNA, 25 bp, Homo sapien
ccactggatgtgtttgataaaaatt

SEQ ID NO: 684994 - DNA, 25 bp, Homo sapien
caatattgaaggtaatgtgggggat

SEQ ID NO: 684995 - DNA, 25 bp, Homo sapien
ctttcaatattgaaggtaatgtggg

SEQ ID NO: 684996 - DNA, 25 bp, Homo sapien
aaatctcttctcatacaacacgagg

SEQ ID NO: 684997 - DNA, 25 bp, Homo sapien
tctcttctcatacaacacgaggcag

SEQ ID NO: 684998 - DNA, 25 bp, Homo sapien
ttctcatacaacacgaggcagatac

SEQ ID NO: 684999 - DNA, 25 bp, Homo sapien
ccaaatctcttctcatacaacacga

SEQ ID NO: 685000 - DNA, 25 bp, Homo sapien
tgtacaagtcttcaacgtggcctct

SEQ ID NO: 685001 - DNA, 25 bp, Homo sapien
tcaacgtggcctctttcatcacaga

SEQ ID NO: 685002 - DNA, 25 bp, Homo sapien
tcagttcgctgtacaagtcttcaac

SEQ ID NO: 685003 - DNA, 25 bp, Homo sapien
tcaaacgaccatttgttcagttcgc

SEQ ID NO: 685004 - DNA, 25 bp, Homo sapien
tattctgcccataaaatcggccaag

SEQ ID NO: 685005 - DNA, 25 bp, Homo sapien
ttctgcccataaaatcggccaagac

SEQ ID NO: 685006 - DNA, 25 bp, Homo sapien
ctcatctattctgcccataaaatcg

SEQ ID NO: 685007 - DNA, 25 bp, Homo sapien
atctattctgcccataaaatcggcc

SEQ ID NO: 685008 - DNA, 25 bp, Homo sapien
gagccccaggaaagctggccccagc

SEQ ID NO: 685009 - DNA, 25 bp, Homo sapien
gccccaggaaagctggccccagcct

SEQ ID NO: 685010 - DNA, 25 bp, Homo sapien
cccaggaaagctggccccagcctgc

SEQ ID NO: 685011 - DNA, 25 bp, Homo sapien
caggaaagctggccccagcctgcag

SEQ ID NO: 685012 - DNA, 25 bp, Homo sapien
tttcattagtttcttttgaaaggca

SEQ ID NO: 685013 - DNA, 25 bp, Homo sapien
ttgaaaggcactccggacccgctgc

SEQ ID NO: 685014 - DNA, 25 bp, Homo sapien
ttttgttgtccagcttcatcacttc

SEQ ID NO: 685015 - DNA, 25 bp, Homo sapien
tcatcacttcccctggtttcattag

SEQ ID NO: 685016 - DNA, 25 bp, Homo sapien
taagatgtttgcctggtacgctgac

SEQ ID NO: 685017 - DNA, 25 bp, Homo sapien
gaacctcatcctgcccaagagtctg

SEQ ID NO: 685018 - DNA, 25 bp, Homo sapien
cagttggtacaaccctgttttggcg

SEQ ID NO: 685019 - DNA, 25 bp, Homo sapien
agagtctgaacaccacagttggtac

SEQ ID NO: 685020 - DNA, 25 bp, Homo sapien
agggaactctaactccgcctcttca

SEQ ID NO: 685021 - DNA, 25 bp, Homo sapien
ggcgccgtcaggctcatcaggtctg

SEQ ID NO: 685022 - DNA, 25 bp, Homo sapien
ttcacaatttccaggcgccgtcagg

SEQ ID NO: 685023 - DNA, 25 bp, Homo sapien
aggctcatcaggtctggccgcatgc

SEQ ID NO: 685024 - DNA, 25 bp, Homo sapien
tgcggtagtcgcgataggccttcca

SEQ ID NO: 685025 - DNA, 25 bp, Homo sapien
aggccttccacggtttgatctccag

SEQ ID NO: 685026 - DNA, 25 bp, Homo sapien
tcagcagcccgtagccttctttgcg

SEQ ID NO: 685027 - DNA, 25 bp, Homo sapien
tacgcgctctcggtgcggtacagcg

SEQ ID NO: 685028 - DNA, 25 bp, Homo sapien
gaacccaacttcatgcggaaaatct

SEQ ID NO: 685029 - DNA, 25 bp, Homo sapien
ggtgcaccgactcaaaggaacccaa

SEQ ID NO: 685030 - DNA, 25 bp, Homo sapien
catgcggaaaatcttgccatacttc

SEQ ID NO: 685031 - DNA, 25 bp, Homo sapien
cttccagcaggcatggcgagcccag

SEQ ID NO: 685032 - DNA, 25 bp, Homo sapien
tccgccgtgcccgaagcgctttccc

SEQ ID NO: 685033 - DNA, 25 bp, Homo sapien
cggccgggcacagcgcggtgtcagc

SEQ ID NO: 685034 - DNA, 25 bp, Homo sapien
gccgtgcccgaagcgctttccctcc

SEQ ID NO: 685035 - DNA, 25 bp, Homo sapien
gtgtcagcgcgcatcctccgccgtg

SEQ ID NO: 685036 - DNA, 25 bp, Homo sapien
catgcgcccgaggcgcgcatgtcgg

SEQ ID NO: 685037 - DNA, 25 bp, Homo sapien
ggagggtttggagcgccactgggag

SEQ ID NO: 685038 - DNA, 25 bp, Homo sapien
atgcgcccgaggcgcgcatgtcggg

SEQ ID NO: 685039 - DNA, 25 bp, Homo sapien
ttggagcgccactgggagggcggaa

SEQ ID NO: 685040 - DNA, 25 bp, Homo sapien
cagggtgtcgtgctgtttcttgaga

SEQ ID NO: 685041 - DNA, 25 bp, Homo sapien
agtctcgccaccagctgtcagcggg

SEQ ID NO: 685042 - DNA, 25 bp, Homo sapien
tacgccgtagatgtcaccagtctcg

SEQ ID NO: 685043 - DNA, 25 bp, Homo sapien
agactggcacctctcgcggctgagg

SEQ ID NO: 685044 - DNA, 25 bp, Homo sapien
gacagcctcagagcattggtgcctc

SEQ ID NO: 685045 - DNA, 25 bp, Homo sapien
gctgctggcgctgcgtttcctcctg

SEQ ID NO: 685046 - DNA, 25 bp, Homo sapien
gacctcggcgaggatgctcgacgct

SEQ ID NO: 685047 - DNA, 25 bp, Homo sapien
tcctcctgttggtccgcaaggctga

SEQ ID NO: 685048 - DNA, 25 bp, Homo sapien
aaatggacagtgttggttccaacct

SEQ ID NO: 685049 - DNA, 25 bp, Homo sapien
tcatggaaacaggagtagtaacaat

SEQ ID NO: 685050 - DNA, 25 bp, Homo sapien
gtagtaacaatagccaatttcacgg

SEQ ID NO: 685051 - DNA, 25 bp, Homo sapien
caacctcacggtaaagttcaagctt

SEQ ID NO: 685052 - DNA, 25 bp, Homo sapien
tgaatctgccctgttacatattacc

SEQ ID NO: 685053 - DNA, 25 bp, Homo sapien
gaatctgccctgttacatattacca

SEQ ID NO: 685054 - DNA, 25 bp, Homo sapien
ttgaatctgccctgttacatattac

SEQ ID NO: 685055 - DNA, 25 bp, Homo sapien
ttggtgttgacttggacagcattct

SEQ ID NO: 685056 - DNA, 25 bp, Homo sapien
ggtgttgacttggacagcattctgc

SEQ ID NO: 685057 - DNA, 25 bp, Homo sapien
tgacttggacagcattctgcagcat

SEQ ID NO: 685058 - DNA, 25 bp, Homo sapien
tgttgacttggacagcattctgcag

SEQ ID NO: 685059 - DNA, 25 bp, Homo sapien
taggaatagaccaatccccagatag

SEQ ID NO: 685060 - DNA, 25 bp, Homo sapien
cattcccacggctaatcgttttagg

SEQ ID NO: 685061 - DNA, 25 bp, Homo sapien
caaagaccctggaacagcttccggg

SEQ ID NO: 685062 - DNA, 25 bp, Homo sapien
ccccagatagtaagtgaagactcaa

SEQ ID NO: 685063 - DNA, 25 bp, Homo sapien
gcagaaagacttattctggaataca

SEQ ID NO: 685064 - DNA, 25 bp, Homo sapien
tctgaggtcttataggaagtttttg

SEQ ID NO: 685065 - DNA, 25 bp, Homo sapien
gaaaactctagatatgacaggtaaa

SEQ ID NO: 685066 - DNA, 25 bp, Homo sapien
tggtgtggcatcctagaaaactcta

SEQ ID NO: 685067 - DNA, 25 bp, Homo sapien
tgagagtgttcctttaccggaatcg

SEQ ID NO: 685068 - DNA, 25 bp, Homo sapien
tgcagcaggacaatttgccaagact

SEQ ID NO: 685069 - DNA, 25 bp, Homo sapien
tcgaaggttcgtctctcttgctctc

SEQ ID NO: 685070 - DNA, 25 bp, Homo sapien
caggggccatccgtttacttcaagg

SEQ ID NO: 685071 - DNA, 25 bp, Homo sapien
gcaacccttggctgaatggggctgg

SEQ ID NO: 685072 - DNA, 25 bp, Homo sapien
gctggagaccagagggtttgcagga

SEQ ID NO: 685073 - DNA, 25 bp, Homo sapien
acagggtcatcagcccagtggcagc

SEQ ID NO: 685074 - DNA, 25 bp, Homo sapien
cggggcaacccttggctgaatgggg

SEQ ID NO: 685075 - DNA, 25 bp, Homo sapien
ctgtgtgcgctctgtgagtgggggg

SEQ ID NO: 685076 - DNA, 25 bp, Homo sapien
cctgctggccgaatgtgccaggcca

SEQ ID NO: 685077 - DNA, 25 bp, Homo sapien
cgctctgtgagtgggggggtctgcc

SEQ ID NO: 685078 - DNA, 25 bp, Homo sapien
gagcctgctggccgaatgtgccagg

SEQ ID NO: 685079 - DNA, 25 bp, Homo sapien
acacaggtgcaatgtcaccaggatg

SEQ ID NO: 685080 - DNA, 25 bp, Homo sapien
caggcagaaacacaggtgcaatgtc

SEQ ID NO: 685081 - DNA, 25 bp, Homo sapien
gcccatcaggcagaaacacaggtgc

SEQ ID NO: 685082 - DNA, 25 bp, Homo sapien
gaaacacaggtgcaatgtcaccagg

SEQ ID NO: 685083 - DNA, 25 bp, Homo sapien
ccccatgcttctccccggagagcca

SEQ ID NO: 685084 - DNA, 25 bp, Homo sapien
gtaccccatgcttctccccggagag

SEQ ID NO: 685085 - DNA, 25 bp, Homo sapien
ctgcaggatccacatgcttccactt

SEQ ID NO: 685086 - DNA, 25 bp, Homo sapien
acttgtaccccatgcttctccccgg

SEQ ID NO: 685087 - DNA, 25 bp, Homo sapien
cagtgaccagctccacaccggccat

SEQ ID NO: 685088 - DNA, 25 bp, Homo sapien
ctgtgggacggatggagaaaaattc

SEQ ID NO: 685089 - DNA, 25 bp, Homo sapien
aaattccccgagccctttgatcctg

SEQ ID NO: 685090 - DNA, 25 bp, Homo sapien
tttaattggcatgtaccaagtcctt

SEQ ID NO: 685091 - DNA, 25 bp, Homo sapien
tccaagaggacggaatgtggagaca

SEQ ID NO: 685092 - DNA, 25 bp, Homo sapien
tgtgataagcagatatggaccatga

SEQ ID NO: 685093 - DNA, 25 bp, Homo sapien
cagaggcctcaaagttagtgaaaat

SEQ ID NO: 685094 - DNA, 25 bp, Homo sapien
gccagcaggcccaggataaactatt

SEQ ID NO: 685095 - DNA, 25 bp, Homo sapien
cttttccaaagtttagctccagagg

SEQ ID NO: 685096 - DNA, 25 bp, Homo sapien
atccacacagacccggcaaccatct

SEQ ID NO: 685097 - DNA, 25 bp, Homo sapien
ccggcaaccatctgatttctcaatt

SEQ ID NO: 685098 - DNA, 25 bp, Homo sapien
ctatccacacagacccggcaaccat

SEQ ID NO: 685099 - DNA, 25 bp, Homo sapien
tgtctacttctatccacacagaccc

SEQ ID NO: 685100 - DNA, 25 bp, Homo sapien
cagtggtgtaaacatcacaaaaaca

SEQ ID NO: 685101 - DNA, 25 bp, Homo sapien
ttccagtcacaagcaattatccagc

SEQ ID NO: 685102 - DNA, 25 bp, Homo sapien
gccttctatctagttgctaaatctc

SEQ ID NO: 685103 - DNA, 25 bp, Homo sapien
tcactcttgttaagtggatagttct

SEQ ID NO: 685104 - DNA, 25 bp, Homo sapien
tggaaagactgaaccttggaggcca

SEQ ID NO: 685105 - DNA, 25 bp, Homo sapien
gagacatgaggttaattgccagggc

SEQ ID NO: 685106 - DNA, 25 bp, Homo sapien
tgcagggctccaccggagatatgac

SEQ ID NO: 685107 - DNA, 25 bp, Homo sapien
gacaattgccaacatctgtatggga

SEQ ID NO: 685108 - DNA, 25 bp, Homo sapien
tctggagttggcaaagaagattaag

SEQ ID NO: 685109 - DNA, 25 bp, Homo sapien
ggtgctgttagtgggaacagccaag

SEQ ID NO: 685110 - DNA, 25 bp, Homo sapien
gctgttagtgggaacagccaaggct

SEQ ID NO: 685111 - DNA, 25 bp, Homo sapien
gaacagccaaggctctggagttggc

SEQ ID NO: 685112 - DNA, 25 bp, Homo sapien
acaggcaggtggagggaaacccagc

SEQ ID NO: 685113 - DNA, 25 bp, Homo sapien
caggcaggtggagggaaacccagca

SEQ ID NO: 685114 - DNA, 25 bp, Homo sapien
tgacaggcaggtggagggaaaccca

SEQ ID NO: 685115 - DNA, 25 bp, Homo sapien
gcaggtggagggaaacccagcacat

SEQ ID NO: 685116 - DNA, 25 bp, Homo sapien
atatgaaatactggcagttattttc

SEQ ID NO: 685117 - DNA, 25 bp, Homo sapien
ttaaatatgaaatactggcagttat

SEQ ID NO: 685118 - DNA, 25 bp, Homo sapien
aaatatgaaatactggcagttattt

SEQ ID NO: 685119 - DNA, 25 bp, Homo sapien
tttaaatatgaaatactggcagtta

SEQ ID NO: 685120 - DNA, 25 bp, Homo sapien
gagggctgccgactagaaaaagaat

SEQ ID NO: 685121 - DNA, 25 bp, Homo sapien
ttcctgtgagggctgccgactagaa

SEQ ID NO: 685122 - DNA, 25 bp, Homo sapien
tccactgatatcttcctgtgagggc

SEQ ID NO: 685123 - DNA, 25 bp, Homo sapien
ttttccactgatatcttcctgtgag

SEQ ID NO: 685124 - DNA, 25 bp, Homo sapien
ccagacctgagagccattcaaatgc

SEQ ID NO: 685125 - DNA, 25 bp, Homo sapien
gtgaagagtagtaagagaagcagcc

SEQ ID NO: 685126 - DNA, 25 bp, Homo sapien
ttgcaaagcacccagacctgagagc

SEQ ID NO: 685127 - DNA, 25 bp, Homo sapien
acagagggcgttgacagccagtgaa

SEQ ID NO: 685128 - DNA, 25 bp, Homo sapien
gttcctcatgaatataaattccaat

SEQ ID NO: 685129 - DNA, 25 bp, Homo sapien
tggcgtagttatatggagttagatc

SEQ ID NO: 685130 - DNA, 25 bp, Homo sapien
tccaatctctctggcgtagttatat

SEQ ID NO: 685131 - DNA, 25 bp, Homo sapien
gagttagatcatttgtgtgatgaca

SEQ ID NO: 685132 - DNA, 25 bp, Homo sapien
ttcacacttctgttggacaccttca

SEQ ID NO: 685133 - DNA, 25 bp, Homo sapien
tttcacacttctgttggacaccttc

SEQ ID NO: 685134 - DNA, 25 bp, Homo sapien
tcacacttctgttggacaccttcat

SEQ ID NO: 685135 - DNA, 25 bp, Homo sapien
atttcacacttctgttggacacctt

SEQ ID NO: 685136 - DNA, 25 bp, Homo sapien
aatgcgttctgatttggaggactca

SEQ ID NO: 685137 - DNA, 25 bp, Homo sapien
tgatttggaggactcagattgatcc

SEQ ID NO: 685138 - DNA, 25 bp, Homo sapien
caaaatcttgaaatgcgttctgatt

SEQ ID NO: 685139 - DNA, 25 bp, Homo sapien
gatcctgaaagcttcagtagttatt

SEQ ID NO: 685140 - DNA, 25 bp, Homo sapien
tatcatgtagagctgagtcataccc

SEQ ID NO: 685141 - DNA, 25 bp, Homo sapien
ccctggaggttattgaaggaagatc

SEQ ID NO: 685142 - DNA, 25 bp, Homo sapien
gatcatattggttatcatgtagagc

SEQ ID NO: 685143 - DNA, 25 bp, Homo sapien
tccaagtgggtgaatatagcaaagg

SEQ ID NO: 685144 - DNA, 25 bp, Homo sapien
tgggagggcaaaagtttctgcttcg

SEQ ID NO: 685145 - DNA, 25 bp, Homo sapien
gcttcgatactttggttggtctgat

SEQ ID NO: 685146 - DNA, 25 bp, Homo sapien
agggcaaaagtttctgcttcgatac

SEQ ID NO: 685147 - DNA, 25 bp, Homo sapien
ttctgcttcgatactttggttggtc

SEQ ID NO: 685148 - DNA, 25 bp, Homo sapien
cacatgcccgttctgcattctgcag

SEQ ID NO: 685149 - DNA, 25 bp, Homo sapien
ctgcaataattctgtaaaggagttg

SEQ ID NO: 685150 - DNA, 25 bp, Homo sapien
ggttggctccagctcgtcacatgcc

SEQ ID NO: 685151 - DNA, 25 bp, Homo sapien
ataattctgtaaaggagttgtctcc

SEQ ID NO: 685152 - DNA, 25 bp, Homo sapien
ctgttatattgagaacctacatcag

SEQ ID NO: 685153 - DNA, 25 bp, Homo sapien
tattgagaacctacatcagccagca

SEQ ID NO: 685154 - DNA, 25 bp, Homo sapien
tatattgagaacctacatcagccag

SEQ ID NO: 685155 - DNA, 25 bp, Homo sapien
gttatattgagaacctacatcagcc

SEQ ID NO: 685156 - DNA, 25 bp, Homo sapien
cattcacagagtcgagactcatttt

SEQ ID NO: 685157 - DNA, 25 bp, Homo sapien
cagagtcgagactcattttcaattt

SEQ ID NO: 685158 - DNA, 25 bp, Homo sapien
cttaaagtagcatttgccaaacaca

SEQ ID NO: 685159 - DNA, 25 bp, Homo sapien
cacagagtcgagactcattttcaat

SEQ ID NO: 685160 - DNA, 25 bp, Homo sapien
aagtcctatccacgttgtccagtgt

SEQ ID NO: 685161 - DNA, 25 bp, Homo sapien
gaacaaacaccatcttctacaggat

SEQ ID NO: 685162 - DNA, 25 bp, Homo sapien
aacaaacaccatcttctacaggatt

SEQ ID NO: 685163 - DNA, 25 bp, Homo sapien
agtcctatccacgttgtccagtgtc

SEQ ID NO: 685164 - DNA, 25 bp, Homo sapien
gcgaggttttctgttaaatcaacaa

SEQ ID NO: 685165 - DNA, 25 bp, Homo sapien
agtgtcatagatactcttcgttatg

SEQ ID NO: 685166 - DNA, 25 bp, Homo sapien
ctgcagcgtagactgtaagtccatc

SEQ ID NO: 685167 - DNA, 25 bp, Homo sapien
gcgtagactgtaagtccatctctta

SEQ ID NO: 685168 - DNA, 25 bp, Homo sapien
agatactcttcgttatgaatgtgca

SEQ ID NO: 685169 - DNA, 25 bp, Homo sapien
gtttcattagttcttccgttcatgt

SEQ ID NO: 685170 - DNA, 25 bp, Homo sapien
tgtttcattagttcttccgttcatg

SEQ ID NO: 685171 - DNA, 25 bp, Homo sapien
gccggttcgattgtctctctcttga

SEQ ID NO: 685172 - DNA, 25 bp, Homo sapien
tgagtatcgatcctctccgtgttgc

SEQ ID NO: 685173 - DNA, 25 bp, Homo sapien
tgacatagtgaagcaagggtacgtg

SEQ ID NO: 685174 - DNA, 25 bp, Homo sapien
tccgtgttgctgttcgccggttcga

SEQ ID NO: 685175 - DNA, 25 bp, Homo sapien
aaatatttctcggtagccatggaag

SEQ ID NO: 685176 - DNA, 25 bp, Homo sapien
cgcgtgttgggcttcagtagcccct

SEQ ID NO: 685177 - DNA, 25 bp, Homo sapien
ccctggagcccatctactcgaaata

SEQ ID NO: 685178 - DNA, 25 bp, Homo sapien
ctaggtatgtaatggatctatcttt

SEQ ID NO: 685179 - DNA, 25 bp, Homo sapien
gcgggggtgcctgccggatgccccc

SEQ ID NO: 685180 - DNA, 25 bp, Homo sapien
tcccctcttttcccactcgccgcca

SEQ ID NO: 685181 - DNA, 25 bp, Homo sapien
gtgcctgccggatgcccccggttcc

SEQ ID NO: 685182 - DNA, 25 bp, Homo sapien
ctgagaagcccgggcgggggtgcct

SEQ ID NO: 685183 - DNA, 25 bp, Homo sapien
gatggatcggctggttgagaaagag

SEQ ID NO: 685184 - DNA, 25 bp, Homo sapien
tgtgaacgaggtcacgaaccctctg

SEQ ID NO: 685185 - DNA, 25 bp, Homo sapien
aaagaggacacgcatactcggtgtg

SEQ ID NO: 685186 - DNA, 25 bp, Homo sapien
gagatttctgccaagcgtaaggtgt

SEQ ID NO: 685187 - DNA, 25 bp, Homo sapien
ctggattttccgtggttcgaagccg

SEQ ID NO: 685188 - DNA, 25 bp, Homo sapien
cttgggtagatacttgaatctggat

SEQ ID NO: 685189 - DNA, 25 bp, Homo sapien
gccaacttgggtagatacttgaatc

SEQ ID NO: 685190 - DNA, 25 bp, Homo sapien
tcccaggtgtcgtgtcaaaggcggt

SEQ ID NO: 685191 - DNA, 25 bp, Homo sapien
gtggaacctgatacctggcatagcg

SEQ ID NO: 685192 - DNA, 25 bp, Homo sapien
tggcatagcgcaagtgctccctaca

SEQ ID NO: 685193 - DNA, 25 bp, Homo sapien
atacctggcatagcgcaagtgctcc

SEQ ID NO: 685194 - DNA, 25 bp, Homo sapien
tggaacctgatacctggcatagcgc

SEQ ID NO: 685195 - DNA, 25 bp, Homo sapien
tccttgggactgaatgatggtggaa

SEQ ID NO: 685196 - DNA, 25 bp, Homo sapien
tctccttgggactgaatgatggtgg

SEQ ID NO: 685197 - DNA, 25 bp, Homo sapien
ttcctctccttgggactgaatgatg

SEQ ID NO: 685198 - DNA, 25 bp, Homo sapien
tcctctccttgggactgaatgatgg

SEQ ID NO: 685199 - DNA, 25 bp, Homo sapien
agctctgccaaagtttccttggttt

SEQ ID NO: 685200 - DNA, 25 bp, Homo sapien
tattctcatcttcaagagcacccat

SEQ ID NO: 685201 - DNA, 25 bp, Homo sapien
cttttctgctatgcaaatattctca

SEQ ID NO: 685202 - DNA, 25 bp, Homo sapien
tccatcagctctgccaaagtttcct

SEQ ID NO: 685203 - DNA, 25 bp, Homo sapien
ctatctatatttttttggcggagtc

SEQ ID NO: 685204 - DNA, 25 bp, Homo sapien
ctatctatctatatttttttggcgg

SEQ ID NO: 685205 - DNA, 25 bp, Homo sapien
tatctatatttttttggcggagtct

SEQ ID NO: 685206 - DNA, 25 bp, Homo sapien
atctatctatatttttttggcggag

SEQ ID NO: 685207 - DNA, 25 bp, Homo sapien
acctggtatgccacaaacgctttca

SEQ ID NO: 685208 - DNA, 25 bp, Homo sapien
cctggtatgccacaaacgctttcat

SEQ ID NO: 685209 - DNA, 25 bp, Homo sapien
ctgacctggtatgccacaaacgctt

SEQ ID NO: 685210 - DNA, 25 bp, Homo sapien
gacctggtatgccacaaacgctttc

SEQ ID NO: 685211 - DNA, 25 bp, Homo sapien
ctgctgtaatgtggttctggggaag

SEQ ID NO: 685212 - DNA, 25 bp, Homo sapien
catagctgctgtaatgtggttctgg

SEQ ID NO: 685213 - DNA, 25 bp, Homo sapien
ctacatagctgctgtaatgtggttc

SEQ ID NO: 685214 - DNA, 25 bp, Homo sapien
tgctgtaatgtggttctggggaagc

SEQ ID NO: 685215 - DNA, 25 bp, Homo sapien
ttcagattacttattctgaagggat

SEQ ID NO: 685216 - DNA, 25 bp, Homo sapien
attcagattacttattctgaaggga

SEQ ID NO: 685217 - DNA, 25 bp, Homo sapien
gattcagattacttattctgaaggg

SEQ ID NO: 685218 - DNA, 25 bp, Homo sapien
tcagattacttattctgaagggatt

SEQ ID NO: 685219 - DNA, 25 bp, Homo sapien
ctgcaggatgcaattcaagggaata

SEQ ID NO: 685220 - DNA, 25 bp, Homo sapien
ttctgatttcttgacaaagtcgttg

SEQ ID NO: 685221 - DNA, 25 bp, Homo sapien
gatttcttgacaaagtcgttggtac

SEQ ID NO: 685222 - DNA, 25 bp, Homo sapien
aatagctgggaagtccgaagtggtt

SEQ ID NO: 685223 - DNA, 25 bp, Homo sapien
tacagggctccttttggagtctccc

SEQ ID NO: 685224 - DNA, 25 bp, Homo sapien
taagccatcactgctccagttaagg

SEQ ID NO: 685225 - DNA, 25 bp, Homo sapien
tccagttaagggacatgtggctctg

SEQ ID NO: 685226 - DNA, 25 bp, Homo sapien
catgtggctctgaatacagggctcc

SEQ ID NO: 685227 - DNA, 25 bp, Homo sapien
ctaatgatggaatgcaaatgccgcc

SEQ ID NO: 685228 - DNA, 25 bp, Homo sapien
gttttgaaggcccagctaatgatgg

SEQ ID NO: 685229 - DNA, 25 bp, Homo sapien
gaaggcccagctaatgatggaatgc

SEQ ID NO: 685230 - DNA, 25 bp, Homo sapien
tgcaaatgccgccaaaaggcctgag

SEQ ID NO: 685231 - DNA, 25 bp, Homo sapien
cagtgttgctgccttgtcttttgaa

SEQ ID NO: 685232 - DNA, 25 bp, Homo sapien
cagaaactgaggttcggtgggtcac

SEQ ID NO: 685233 - DNA, 25 bp, Homo sapien
taaactcgggagtaggattgctgaa

SEQ ID NO: 685234 - DNA, 25 bp, Homo sapien
cttttgaaatgctggagtatcttgc

SEQ ID NO: 685235 - DNA, 25 bp, Homo sapien
gtcttattgccacgttccccacagt

SEQ ID NO: 685236 - DNA, 25 bp, Homo sapien
gtgaagtagtcttattgccacgttc

SEQ ID NO: 685237 - DNA, 25 bp, Homo sapien
agtagtcttattgccacgttcccca

SEQ ID NO: 685238 - DNA, 25 bp, Homo sapien
tattgccacgttccccacagtcagt

SEQ ID NO: 685239 - DNA, 25 bp, Homo sapien
actgtggttctgattaactactgga

SEQ ID NO: 685240 - DNA, 25 bp, Homo sapien
ttatatcaccaattagttaaatcag

SEQ ID NO: 685241 - DNA, 25 bp, Homo sapien
ttaaatcagtgcttcgactcactct

SEQ ID NO: 685242 - DNA, 25 bp, Homo sapien
agcctttattttgttcggagtctct

SEQ ID NO: 685243 - DNA, 25 bp, Homo sapien
gccagtgcctccattcgagtgggct

SEQ ID NO: 685244 - DNA, 25 bp, Homo sapien
gacgcttcccttgtcaggagatgca

SEQ ID NO: 685245 - DNA, 25 bp, Homo sapien
aattctggcacacaggtaaagacgc

SEQ ID NO: 685246 - DNA, 25 bp, Homo sapien
cattcgagtgggctgcccaagacgc

SEQ ID NO: 685247 - DNA, 25 bp, Homo sapien
taattgcagctccagaggtgggatt

SEQ ID NO: 685248 - DNA, 25 bp, Homo sapien
tgtaattgcagctccagaggtggga

SEQ ID NO: 685249 - DNA, 25 bp, Homo sapien
attgcagctccagaggtgggattcc

SEQ ID NO: 685250 - DNA, 25 bp, Homo sapien
gctgtaattgcagctccagaggtgg

SEQ ID NO: 685251 - DNA, 25 bp, Homo sapien
caacgtcgctgcaatagtttctttg

SEQ ID NO: 685252 - DNA, 25 bp, Homo sapien
ctgaagtttgaggccttcccacact

SEQ ID NO: 685253 - DNA, 25 bp, Homo sapien
tgttgctataacaactaataaggag

SEQ ID NO: 685254 - DNA, 25 bp, Homo sapien
aggagacttggtttgaccttctttg

SEQ ID NO: 685255 - DNA, 25 bp, Homo sapien
tgctctagctcaggcatcagcactg

SEQ ID NO: 685256 - DNA, 25 bp, Homo sapien
tcaggcatcagcactgagccaccag

SEQ ID NO: 685257 - DNA, 25 bp, Homo sapien
cagctgctctagctcaggcatcagc

SEQ ID NO: 685258 - DNA, 25 bp, Homo sapien
accagccaacctgtcttacttcctt

SEQ ID NO: 685259 - DNA, 25 bp, Homo sapien
ctcattggaagaagctgtcaggatt

SEQ ID NO: 685260 - DNA, 25 bp, Homo sapien
ttggaagaagctgtcaggatttcaa

SEQ ID NO: 685261 - DNA, 25 bp, Homo sapien
gaagaagctgtcaggatttcaaaca

SEQ ID NO: 685262 - DNA, 25 bp, Homo sapien
tcattggaagaagctgtcaggattt

SEQ ID NO: 685263 - DNA, 25 bp, Homo sapien
tggtccagcaccttagccaactctt

SEQ ID NO: 685264 - DNA, 25 bp, Homo sapien
gtccagcaccttagccaactctttt

SEQ ID NO: 685265 - DNA, 25 bp, Homo sapien
gcaccttagccaactcttttcaact

SEQ ID NO: 685266 - DNA, 25 bp, Homo sapien
ctctgtggtccagcaccttagccaa

SEQ ID NO: 685267 - DNA, 25 bp, Homo sapien
tttatgtctgctgcggttgctaggc

SEQ ID NO: 685268 - DNA, 25 bp, Homo sapien
gccaagcccgtaatgtttatgtctg

SEQ ID NO: 685269 - DNA, 25 bp, Homo sapien
tgctaggcaaactgtatacaaggag

SEQ ID NO: 685270 - DNA, 25 bp, Homo sapien
ttcagtttgtgccacgccaagcccg

SEQ ID NO: 685271 - DNA, 25 bp, Homo sapien
ggaagctggataagcctgtcccctg

SEQ ID NO: 685272 - DNA, 25 bp, Homo sapien
tcagcatgaaggaagaggttgggca

SEQ ID NO: 685273 - DNA, 25 bp, Homo sapien
ttctcagcatgaaggaagaggttgg

SEQ ID NO: 685274 - DNA, 25 bp, Homo sapien
ccttctcagcatgaaggaagaggtt

SEQ ID NO: 685275 - DNA, 25 bp, Homo sapien
cgtcatccttctcagcatgaaggaa

SEQ ID NO: 685276 - DNA, 25 bp, Homo sapien
cttctttgacgtgggaaggatgatg

SEQ ID NO: 685277 - DNA, 25 bp, Homo sapien
gtgccgggggtgaggaactgcctga

SEQ ID NO: 685278 - DNA, 25 bp, Homo sapien
tgggaaggatgatgggcgccagctc

SEQ ID NO: 685279 - DNA, 25 bp, Homo sapien
gccctcttctttgacgtgggaagga

SEQ ID NO: 685280 - DNA, 25 bp, Homo sapien
gccagcaagtgcaaagtgtgcagca

SEQ ID NO: 685281 - DNA, 25 bp, Homo sapien
agtgcaaagtgtgcagcaggactcg

SEQ ID NO: 685282 - DNA, 25 bp, Homo sapien
agtgtgcagcaggactcgctccatc

SEQ ID NO: 685283 - DNA, 25 bp, Homo sapien
ctgaggccagcaagtgcaaagtgtg

SEQ ID NO: 685284 - DNA, 25 bp, Homo sapien
ttggtaataatctggcatctagaac

SEQ ID NO: 685285 - DNA, 25 bp, Homo sapien
ctgtctgttctggactgcgatgtta

SEQ ID NO: 685286 - DNA, 25 bp, Homo sapien
tctcactggcctgcttggtaataat

SEQ ID NO: 685287 - DNA, 25 bp, Homo sapien
tctgttctggactgcgatgttaccc

SEQ ID NO: 685288 - DNA, 25 bp, Homo sapien
atctcccgggttcaagcaattctcc

SEQ ID NO: 685289 - DNA, 25 bp, Homo sapien
gcacccgccaccatgcctggctaat

SEQ ID NO: 685290 - DNA, 25 bp, Homo sapien
ggcacccgccaccatgcctggctaa

SEQ ID NO: 685291 - DNA, 25 bp, Homo sapien
atctcgggttactgcaacctccatc

SEQ ID NO: 685292 - DNA, 25 bp, Homo sapien
gcaatggtcagccatctggttagaa

SEQ ID NO: 685293 - DNA, 25 bp, Homo sapien
gagattgttttagtcttccggtagc

SEQ ID NO: 685294 - DNA, 25 bp, Homo sapien
aataacttgacagttggaaggagcc

SEQ ID NO: 685295 - DNA, 25 bp, Homo sapien
gccttttgatgttcggcaatggtca

SEQ ID NO: 685296 - DNA, 25 bp, Homo sapien
tgtctagaagtcgtcttgccatggg

SEQ ID NO: 685297 - DNA, 25 bp, Homo sapien
tgttacagtaagttccagcgggagg

SEQ ID NO: 685298 - DNA, 25 bp, Homo sapien
ttaggatgcctgtttataagagaca

SEQ ID NO: 685299 - DNA, 25 bp, Homo sapien
aatttctctttgtctagcctcaatg

SEQ ID NO: 685300 - DNA, 25 bp, Homo sapien
actccaaagggccttggtgtgtagc

SEQ ID NO: 685301 - DNA, 25 bp, Homo sapien
agacttggaagactctagggtgcag

SEQ ID NO: 685302 - DNA, 25 bp, Homo sapien
tgtgtagccattggctgtttcactg

SEQ ID NO: 685303 - DNA, 25 bp, Homo sapien
ctaagacttggaagactctagggtg

SEQ ID NO: 685304 - DNA, 25 bp, Homo sapien
tgtcttgttgatgatttggttttca

SEQ ID NO: 685305 - DNA, 25 bp, Homo sapien
gatgatttggttttcaattgttggt

SEQ ID NO: 685306 - DNA, 25 bp, Homo sapien
cttgttgatgatttggttttcaatt

SEQ ID NO: 685307 - DNA, 25 bp, Homo sapien
ttgatgatttggttttcaattgttg

SEQ ID NO: 685308 - DNA, 25 bp, Homo sapien
tatatgacccaaggtgattggctgg

SEQ ID NO: 685309 - DNA, 25 bp, Homo sapien
cagagaggtagagtggtcacttctt

SEQ ID NO: 685310 - DNA, 25 bp, Homo sapien
gatttacccaaaccacctagactca

SEQ ID NO: 685311 - DNA, 25 bp, Homo sapien
cactcagctgtcagaattgggtggg

SEQ ID NO: 685312 - DNA, 25 bp, Homo sapien
tcttctttctcttccccctttgtca

SEQ ID NO: 685313 - DNA, 25 bp, Homo sapien
cttctttctcttccccctttgtcat

SEQ ID NO: 685314 - DNA, 25 bp, Homo sapien
ctgtcttctttctcttccccctttg

SEQ ID NO: 685315 - DNA, 25 bp, Homo sapien
gctctttcaagcttatagcgggagc

SEQ ID NO: 685316 - DNA, 25 bp, Homo sapien
aggctctttcaagcttatagcggga

SEQ ID NO: 685317 - DNA, 25 bp, Homo sapien
acaagaaggtataagtccttattgg

SEQ ID NO: 685318 - DNA, 25 bp, Homo sapien
acacaagaaggtataagtccttatt

SEQ ID NO: 685319 - DNA, 25 bp, Homo sapien
ttatgaccacattcatcatgcttca

SEQ ID NO: 685320 - DNA, 25 bp, Homo sapien
tgccagatgtgcacaggtagccata

SEQ ID NO: 685321 - DNA, 25 bp, Homo sapien
tagccatagggtacccttcctttca

SEQ ID NO: 685322 - DNA, 25 bp, Homo sapien
gcctggtccatacttatgaccacat

SEQ ID NO: 685323 - DNA, 25 bp, Homo sapien
gcatttcattacatctgggtcgcgg

SEQ ID NO: 685324 - DNA, 25 bp, Homo sapien
atctgggtcgcggatgtatgtttgc

SEQ ID NO: 685325 - DNA, 25 bp, Homo sapien
ggtcgcggatgtatgtttgctttcc

SEQ ID NO: 685326 - DNA, 25 bp, Homo sapien
cattacatctgggtcgcggatgtat

SEQ ID NO: 685327 - DNA, 25 bp, Homo sapien
gaagccaagtgtatcttaaagtgga

SEQ ID NO: 685328 - DNA, 25 bp, Homo sapien
ggaataatctttcagccaacattcg

SEQ ID NO: 685329 - DNA, 25 bp, Homo sapien
gaagcaagacatttctgttcgtatc

SEQ ID NO: 685330 - DNA, 25 bp, Homo sapien
caactgatagttgttcagcaccaac

SEQ ID NO: 685331 - DNA, 25 bp, Homo sapien
ccaggccaaccagaaactgttccgt

SEQ ID NO: 685332 - DNA, 25 bp, Homo sapien
catagattcttccattaagctaaca

SEQ ID NO: 685333 - DNA, 25 bp, Homo sapien
agctaacatgctcgggtcgtgatac

SEQ ID NO: 685334 - DNA, 25 bp, Homo sapien
ccagaaactgttccgtttttcatag

SEQ ID NO: 685335 - DNA, 25 bp, Homo sapien
aaactgcaccgaggtgaagcaaagc

SEQ ID NO: 685336 - DNA, 25 bp, Homo sapien
tagtaggactgctcttgctgtgcac

SEQ ID NO: 685337 - DNA, 25 bp, Homo sapien
gcaggtgtgttatgtagggttagta

SEQ ID NO: 685338 - DNA, 25 bp, Homo sapien
tatgtagggttagtaggactgctct

SEQ ID NO: 685339 - DNA, 25 bp, Homo sapien
ttttagggacaggtattagcgagag

SEQ ID NO: 685340 - DNA, 25 bp, Homo sapien
tgtgtatggatttttagggacaggt

SEQ ID NO: 685341 - DNA, 25 bp, Homo sapien
acaggtattagcgagagtgaacagg

SEQ ID NO: 685342 - DNA, 25 bp, Homo sapien
aacaggggactgctatggcttcagc

SEQ ID NO: 685343 - DNA, 25 bp, Homo sapien
tgctggtgcatgctaagaactatat

SEQ ID NO: 685344 - DNA, 25 bp, Homo sapien
attctgttatatgtacattctgtgg

SEQ ID NO: 685345 - DNA, 25 bp, Homo sapien
ttagtgctggtgcatgctaagaact

SEQ ID NO: 685346 - DNA, 25 bp, Homo sapien
actgctggatctattctgttatatg

SEQ ID NO: 685347 - DNA, 25 bp, Homo sapien
taattgtttaggtgttttaccagca

SEQ ID NO: 685348 - DNA, 25 bp, Homo sapien
ggtgttttaccagcatctgtaaagg

SEQ ID NO: 685349 - DNA, 25 bp, Homo sapien
gtaaaggggtcattgctttgattac

SEQ ID NO: 685350 - DNA, 25 bp, Homo sapien
tgtttaggtgttttaccagcatctg

SEQ ID NO: 685351 - DNA, 25 bp, Homo sapien
gagaacagccagtgaatgcaaacct

SEQ ID NO: 685352 - DNA, 25 bp, Homo sapien
cacagtgttgtaggatgagaacagc

SEQ ID NO: 685353 - DNA, 25 bp, Homo sapien
cagccagtgaatgcaaacctgtgct

SEQ ID NO: 685354 - DNA, 25 bp, Homo sapien
ttgtaggatgagaacagccagtgaa

SEQ ID NO: 685355 - DNA, 25 bp, Homo sapien
aaagtaagggttgatcttctcgctg

SEQ ID NO: 685356 - DNA, 25 bp, Homo sapien
cattcgagtactgacgataggcctt

SEQ ID NO: 685357 - DNA, 25 bp, Homo sapien
cgataggcctttcggcattgacacc

SEQ ID NO: 685358 - DNA, 25 bp, Homo sapien
ttggagaggcatcctcccctacgga

SEQ ID NO: 685359 - DNA, 25 bp, Homo sapien
acatgtattcaatgaacaacgttga

SEQ ID NO: 685360 - DNA, 25 bp, Homo sapien
tgaacaacgttgaattcccataacc

SEQ ID NO: 685361 - DNA, 25 bp, Homo sapien
tcccataacctaatatgatgatagg

SEQ ID NO: 685362 - DNA, 25 bp, Homo sapien
cgttgaattcccataacctaatatg

SEQ ID NO: 685363 - DNA, 25 bp, Homo sapien
tcagactggtattgagtgaaggcag

SEQ ID NO: 685364 - DNA, 25 bp, Homo sapien
aaggcaggataagtctggcgctggc

SEQ ID NO: 685365 - DNA, 25 bp, Homo sapien
attttggacttccatgagttctgga

SEQ ID NO: 685366 - DNA, 25 bp, Homo sapien
taaaggacatactcaggactgtcag

SEQ ID NO: 685367 - DNA, 25 bp, Homo sapien
cacgtgatagatgtgaggttcttgc

SEQ ID NO: 685368 - DNA, 25 bp, Homo sapien
gggccacacctgagtgcacgtgata

SEQ ID NO: 685369 - DNA, 25 bp, Homo sapien
cctgagtgcacgtgatagatgtgag

SEQ ID NO: 685370 - DNA, 25 bp, Homo sapien
agatgtgaggttcttgctccagtga

SEQ ID NO: 685371 - DNA, 25 bp, Homo sapien
tatcttaggacaaaatcaggtcttg

SEQ ID NO: 685372 - DNA, 25 bp, Homo sapien
tcttaggacaaaatcaggtcttgaa

SEQ ID NO: 685373 - DNA, 25 bp, Homo sapien
atcttaggacaaaatcaggtcttga

SEQ ID NO: 685374 - DNA, 25 bp, Homo sapien
catatcttaggacaaaatcaggtct

SEQ ID NO: 685375 - DNA, 25 bp, Homo sapien
tcaccaaatgaacgtgagctcagtc

SEQ ID NO: 685376 - DNA, 25 bp, Homo sapien
catgttgatgtactgaccacagtca

SEQ ID NO: 685377 - DNA, 25 bp, Homo sapien
tgtctttccaaaggcattcatgttg

SEQ ID NO: 685378 - DNA, 25 bp, Homo sapien
cagccatctcggatgtctttccaaa

SEQ ID NO: 685379 - DNA, 25 bp, Homo sapien
caggtggatccgttattgtttttag

SEQ ID NO: 685380 - DNA, 25 bp, Homo sapien
ggatccgttattgtttttagatcaa

SEQ ID NO: 685381 - DNA, 25 bp, Homo sapien
tattgtttttagatcaattcccaag

SEQ ID NO: 685382 - DNA, 25 bp, Homo sapien
gttattgtttttagatcaattccca

SEQ ID NO: 685383 - DNA, 25 bp, Homo sapien
tgtaagaacacccattggtctttgt

SEQ ID NO: 685384 - DNA, 25 bp, Homo sapien
cattggtctttgttgacacaaggaa

SEQ ID NO: 685385 - DNA, 25 bp, Homo sapien
ttgttgacacaaggaatattaaggg

SEQ ID NO: 685386 - DNA, 25 bp, Homo sapien
gaacacccattggtctttgttgaca

SEQ ID NO: 685387 - DNA, 25 bp, Homo sapien
ttttgtacttagttagctctgccat

SEQ ID NO: 685388 - DNA, 25 bp, Homo sapien
gaaggagcaaaggtgtgttccacca

SEQ ID NO: 685389 - DNA, 25 bp, Homo sapien
aatgcactggtcccgccacagctgg

SEQ ID NO: 685390 - DNA, 25 bp, Homo sapien
catgctgccatgtcttagagctctt

SEQ ID NO: 685391 - DNA, 25 bp, Homo sapien
agacagaaggagcaaaggtgtgttc

SEQ ID NO: 685392 - DNA, 25 bp, Homo sapien
agtcagtcctatgcccctttccaga

SEQ ID NO: 685393 - DNA, 25 bp, Homo sapien
ttagtcagtcctatgcccctttcca

SEQ ID NO: 685394 - DNA, 25 bp, Homo sapien
tagtcagtcctatgcccctttccag

SEQ ID NO: 685395 - DNA, 25 bp, Homo sapien
tttctgtccatctggcaagtgctca

SEQ ID NO: 685396 - DNA, 25 bp, Homo sapien
cttgtcttccttggcaataggtcct

SEQ ID NO: 685397 - DNA, 25 bp, Homo sapien
tctggcaagtgctcaacattcctct

SEQ ID NO: 685398 - DNA, 25 bp, Homo sapien
aacattcctctaactaatttttctg

SEQ ID NO: 685399 - DNA, 25 bp, Homo sapien
cattcagctcagcacaaagatgcat

SEQ ID NO: 685400 - DNA, 25 bp, Homo sapien
aagcaacattttcattcagctcagc

SEQ ID NO: 685401 - DNA, 25 bp, Homo sapien
catcctttttgaaagcaacattttc

SEQ ID NO: 685402 - DNA, 25 bp, Homo sapien
ctttgcatcctttttgaaagcaaca

SEQ ID NO: 685403 - DNA, 25 bp, Homo sapien
tgttgagctttaaggaaacctggat

SEQ ID NO: 685404 - DNA, 25 bp, Homo sapien
ggcccaggtatattgaagccaagca

SEQ ID NO: 685405 - DNA, 25 bp, Homo sapien
tgctgtcaggcccaggtatattgaa

SEQ ID NO: 685406 - DNA, 25 bp, Homo sapien
ttcctgtgctgtcaggcccaggtat

SEQ ID NO: 685407 - DNA, 25 bp, Homo sapien
gatttgcaatcctgtcaagtgatct

SEQ ID NO: 685408 - DNA, 25 bp, Homo sapien
gggtcaccacagatccttgaacagt

SEQ ID NO: 685409 - DNA, 25 bp, Homo sapien
cctcgacaatcagatgatgactggg

SEQ ID NO: 685410 - DNA, 25 bp, Homo sapien
tccttgaacagtttgcatgatttgc

SEQ ID NO: 685411 - DNA, 25 bp, Homo sapien
agaatcaaaccgtccctcttcctgt

SEQ ID NO: 685412 - DNA, 25 bp, Homo sapien
cagaatcaaaccgtccctcttcctg

SEQ ID NO: 685413 - DNA, 25 bp, Homo sapien
tacagaatcaaaccgtccctcttcc

SEQ ID NO: 685414 - DNA, 25 bp, Homo sapien
ttacagaatcaaaccgtccctcttc

SEQ ID NO: 685415 - DNA, 25 bp, Homo sapien
tctgagaaagcgtaacaacgggctg

SEQ ID NO: 685416 - DNA, 25 bp, Homo sapien
cagcagcaggagcataattattaac

SEQ ID NO: 685417 - DNA, 25 bp, Homo sapien
caacgggctgactgctctatgtgac

SEQ ID NO: 685418 - DNA, 25 bp, Homo sapien
ttattaacataggatacaaaatctg

SEQ ID NO: 685419 - DNA, 25 bp, Homo sapien
tgtccaatctcaatttccaacatgg

SEQ ID NO: 685420 - DNA, 25 bp, Homo sapien
aattgtccaatctcaatttccaaca

SEQ ID NO: 685421 - DNA, 25 bp, Homo sapien
caatctcaatttccaacatggcttg

SEQ ID NO: 685422 - DNA, 25 bp, Homo sapien
tccaatctcaatttccaacatggct

SEQ ID NO: 685423 - DNA, 25 bp, Homo sapien
gctacctgagtgtacaatttctgtt

SEQ ID NO: 685424 - DNA, 25 bp, Homo sapien
tacctgagtgtacaatttctgttcc

SEQ ID NO: 685425 - DNA, 25 bp, Homo sapien
acctgagtgtacaatttctgttcct

SEQ ID NO: 685426 - DNA, 25 bp, Homo sapien
ctacctgagtgtacaatttctgttc

SEQ ID NO: 685427 - DNA, 25 bp, Homo sapien
agaaatgacaataaggcctcagtag

SEQ ID NO: 685428 - DNA, 25 bp, Homo sapien
gaaatgacaataaggcctcagtagc

SEQ ID NO: 685429 - DNA, 25 bp, Homo sapien
aaatgacaataaggcctcagtagcc

SEQ ID NO: 685430 - DNA, 25 bp, Homo sapien
agctgcctctcttgaatttcccgtg

SEQ ID NO: 685431 - DNA, 25 bp, Homo sapien
cctgggatgcaaagacatgggcagc

SEQ ID NO: 685432 - DNA, 25 bp, Homo sapien
gcagaatttcctgggatgcaaagac

SEQ ID NO: 685433 - DNA, 25 bp, Homo sapien
gaatttcccgtggttctctggaaga

SEQ ID NO: 685434 - DNA, 25 bp, Homo sapien
agccggggtggagggcaatgcctgg

SEQ ID NO: 685435 - DNA, 25 bp, Homo sapien
ttggtggagggccatccaaggagcc

SEQ ID NO: 685436 - DNA, 25 bp, Homo sapien
cctgcttggcatcaactttggattt

SEQ ID NO: 685437 - DNA, 25 bp, Homo sapien
ggcaatgcctggtgtcctgcttggc

SEQ ID NO: 685438 - DNA, 25 bp, Homo sapien
tgccagtttggatttcctttctctc

SEQ ID NO: 685439 - DNA, 25 bp, Homo sapien
ttgccagtttggatttcctttctct

SEQ ID NO: 685440 - DNA, 25 bp, Homo sapien
ctcacgggctgtattgttgaaatcc

SEQ ID NO: 685441 - DNA, 25 bp, Homo sapien
tacaagggttgtcagcgtccgatca

SEQ ID NO: 685442 - DNA, 25 bp, Homo sapien
cgtccgatcatagtgaaacctgctc

SEQ ID NO: 685443 - DNA, 25 bp, Homo sapien
taagcatggcttatgggaaaacggc

SEQ ID NO: 685444 - DNA, 25 bp, Homo sapien
acctgcttgataccctgctggctgc

SEQ ID NO: 685445 - DNA, 25 bp, Homo sapien
tcttcttggttgtgtgccagccaac

SEQ ID NO: 685446 - DNA, 25 bp, Homo sapien
gacttgggcggccttcccaatggca

SEQ ID NO: 685447 - DNA, 25 bp, Homo sapien
gccagccaacgtctgacagccttag

SEQ ID NO: 685448 - DNA, 25 bp, Homo sapien
tgtcttctcaaaatagaccctatca

SEQ ID NO: 685449 - DNA, 25 bp, Homo sapien
tctcaaaatagaccctatcacatac

SEQ ID NO: 685450 - DNA, 25 bp, Homo sapien
aaatgtcttctcaaaatagacccta

SEQ ID NO: 685451 - DNA, 25 bp, Homo sapien
tcaaatgtcttctcaaaatagaccc

SEQ ID NO: 685452 - DNA, 25 bp, Homo sapien
cagggatccaagtaatgcttttacc

SEQ ID NO: 685453 - DNA, 25 bp, Homo sapien
caagttttctccgaacaatgtcaac

SEQ ID NO: 685454 - DNA, 25 bp, Homo sapien
gtcaacttcaccagtggtaaatgtc

SEQ ID NO: 685455 - DNA, 25 bp, Homo sapien
ccatagtttgggaatcagttttgaa

SEQ ID NO: 685456 - DNA, 25 bp, Homo sapien
ttgaagtgtttaaacgcccacaaca

SEQ ID NO: 685457 - DNA, 25 bp, Homo sapien
aacgcccacaacagcaatgtaacag

SEQ ID NO: 685458 - DNA, 25 bp, Homo sapien
gcaatgtaacagctgccgttagaga

SEQ ID NO: 685459 - DNA, 25 bp, Homo sapien
gttagagatttgtctccaacatcag

SEQ ID NO: 685460 - DNA, 25 bp, Homo sapien
agcaaagttgattgcctaaagcagc

SEQ ID NO: 685461 - DNA, 25 bp, Homo sapien
gcaaagttgattgcctaaagcagcc

SEQ ID NO: 685462 - DNA, 25 bp, Homo sapien
aaagttgattgcctaaagcagccac

SEQ ID NO: 685463 - DNA, 25 bp, Homo sapien
aagcaaagttgattgcctaaagcag

SEQ ID NO: 685464 - DNA, 25 bp, Homo sapien
tgccagtgccatgttaaatttgtgg

SEQ ID NO: 685465 - DNA, 25 bp, Homo sapien
tcttcatctgaaatgccagtgccat

SEQ ID NO: 685466 - DNA, 25 bp, Homo sapien
ttcatctgaaatgccagtgccatgt

SEQ ID NO: 685467 - DNA, 25 bp, Homo sapien
gtgccatgttaaatttgtggtccat

SEQ ID NO: 685468 - DNA, 25 bp, Homo sapien
cgtcactgagaaagtgggataaggc

SEQ ID NO: 685469 - DNA, 25 bp, Homo sapien
gataaggcatcaatgcaagagggtt

SEQ ID NO: 685470 - DNA, 25 bp, Homo sapien
ggcatcaatgcaagagggttttctt

SEQ ID NO: 685471 - DNA, 25 bp, Homo sapien
gaaagtgggataaggcatcaatgca

SEQ ID NO: 685472 - DNA, 25 bp, Homo sapien
ccagttgttccttcccatgtttagt

SEQ ID NO: 685473 - DNA, 25 bp, Homo sapien
agagtttctgccgagcgatccgctg

SEQ ID NO: 685474 - DNA, 25 bp, Homo sapien
gtggctggtaccagttgttccttcc

SEQ ID NO: 685475 - DNA, 25 bp, Homo sapien
agtttctgccgagcgatccgctgtt

SEQ ID NO: 685476 - DNA, 25 bp, Homo sapien
tgtctaatgatgatcagtctctgac

SEQ ID NO: 685477 - DNA, 25 bp, Homo sapien
tctaatgatgatcagtctctgacca

SEQ ID NO: 685478 - DNA, 25 bp, Homo sapien
gtctaatgatgatcagtctctgacc

SEQ ID NO: 685479 - DNA, 25 bp, Homo sapien
cctgtctaatgatgatcagtctctg

SEQ ID NO: 685480 - DNA, 25 bp, Homo sapien
gaaagtccctaggtagaatgaaggc

SEQ ID NO: 685481 - DNA, 25 bp, Homo sapien
tagcaaggccagagagcagtttcag

SEQ ID NO: 685482 - DNA, 25 bp, Homo sapien
tcagtggtgaacttgtaaaatagcc

SEQ ID NO: 685483 - DNA, 25 bp, Homo sapien
tcacactggctatccagagaaggaa

SEQ ID NO: 685484 - DNA, 25 bp, Homo sapien
gtattgaggaaaggtcatgctgagc

SEQ ID NO: 685485 - DNA, 25 bp, Homo sapien
ttgaggaaaggtcatgctgagccat

SEQ ID NO: 685486 - DNA, 25 bp, Homo sapien
tattgaggaaaggtcatgctgagcc

SEQ ID NO: 685487 - DNA, 25 bp, Homo sapien
attgaggaaaggtcatgctgagcca

SEQ ID NO: 685488 - DNA, 25 bp, Homo sapien
ttgtctgggaattgtttccattggg

SEQ ID NO: 685489 - DNA, 25 bp, Homo sapien
ctgacatctggacttgaggtggaga

SEQ ID NO: 685490 - DNA, 25 bp, Homo sapien
cattggggaactgcgatgcatccaa

SEQ ID NO: 685491 - DNA, 25 bp, Homo sapien
tgcgatgcatccaaagaccatattt

SEQ ID NO: 685492 - DNA, 25 bp, Homo sapien
tgtccatgcaactgtcaaagatggc

SEQ ID NO: 685493 - DNA, 25 bp, Homo sapien
aaaaatagcttcactgacataggat

SEQ ID NO: 685494 - DNA, 25 bp, Homo sapien
aggtgacacaacatggtggtcccag

SEQ ID NO: 685495 - DNA, 25 bp, Homo sapien
cactgacataggattcaggtgacac

SEQ ID NO: 685496 - DNA, 25 bp, Homo sapien
gaatgccatctcaaacgcacgatag

SEQ ID NO: 685497 - DNA, 25 bp, Homo sapien
tagaaatatctgtgacacacagggc

SEQ ID NO: 685498 - DNA, 25 bp, Homo sapien
gaagcagtgccgataaagtctactc

SEQ ID NO: 685499 - DNA, 25 bp, Homo sapien
taccatcatcggcttcagtagaaat

SEQ ID NO: 685500 - DNA, 25 bp, Homo sapien
atttggtgactgcaaacatggtttg

SEQ ID NO: 685501 - DNA, 25 bp, Homo sapien
tttggtgactgcaaacatggtttgt

SEQ ID NO: 685502 - DNA, 25 bp, Homo sapien
tatttggtgactgcaaacatggttt

SEQ ID NO: 685503 - DNA, 25 bp, Homo sapien
tacccatatgtagtgtgacacagca

SEQ ID NO: 685504 - DNA, 25 bp, Homo sapien
catgatattggactgaagattcttc

SEQ ID NO: 685505 - DNA, 25 bp, Homo sapien
cattggccttaacttctatgaacac

SEQ ID NO: 685506 - DNA, 25 bp, Homo sapien
ggtgaccaagtttccaaccatgata

SEQ ID NO: 685507 - DNA, 25 bp, Homo sapien
ttacgcattacggccaatacctgtg

SEQ ID NO: 685508 - DNA, 25 bp, Homo sapien
ctctgagggattctccaagaaagta

SEQ ID NO: 685509 - DNA, 25 bp, Homo sapien
caatacctgtgacatccatggccat

SEQ ID NO: 685510 - DNA, 25 bp, Homo sapien
gagggattctccaagaaagtaacta

SEQ ID NO: 685511 - DNA, 25 bp, Homo sapien
acagctaagcccagtaatattggct

SEQ ID NO: 685512 - DNA, 25 bp, Homo sapien
tggcttggacaaccagatgttctct

SEQ ID NO: 685513 - DNA, 25 bp, Homo sapien
ttgacttctgggctaagtggtaact

SEQ ID NO: 685514 - DNA, 25 bp, Homo sapien
ctgggctaagtggtaactttgtgga

SEQ ID NO: 685515 - DNA, 25 bp, Homo sapien
ttctatgtatggctcttctaatccg

SEQ ID NO: 685516 - DNA, 25 bp, Homo sapien
tatggctcttctaatccggtccctc

SEQ ID NO: 685517 - DNA, 25 bp, Homo sapien
ttgacacatagaataaactccctgg

SEQ ID NO: 685518 - DNA, 25 bp, Homo sapien
ggttcttgtccatgacgcattctat

SEQ ID NO: 685519 - DNA, 25 bp, Homo sapien
tattccagtagaaccaagcagccta

SEQ ID NO: 685520 - DNA, 25 bp, Homo sapien
ccatctgtatgacgtgaccccagga

SEQ ID NO: 685521 - DNA, 25 bp, Homo sapien
tatcatggctcaattcctctcggag

SEQ ID NO: 685522 - DNA, 25 bp, Homo sapien
tcattttgctcatgccctggaggga

SEQ ID NO: 685523 - DNA, 25 bp, Homo sapien
tctctgacacgaacttgggctgcca

SEQ ID NO: 685524 - DNA, 25 bp, Homo sapien
ttgggctgccataaatccaaaatga

SEQ ID NO: 685525 - DNA, 25 bp, Homo sapien
ttattctctgacacgaacttgggct

SEQ ID NO: 685526 - DNA, 25 bp, Homo sapien
tctgacacgaacttgggctgccata

SEQ ID NO: 685527 - DNA, 25 bp, Homo sapien
tctgtcctgcaattgactcacagtg

SEQ ID NO: 685528 - DNA, 25 bp, Homo sapien
tgagttatcttgtagaaaagtggca

SEQ ID NO: 685529 - DNA, 25 bp, Homo sapien
gagaaattcgggctccattgtattg

SEQ ID NO: 685530 - DNA, 25 bp, Homo sapien
tattgtgtctgtcctgcaattgact

SEQ ID NO: 685531 - DNA, 25 bp, Homo sapien
gcaagagaaatacatgttctggctt

SEQ ID NO: 685532 - DNA, 25 bp, Homo sapien
aagcaagagaaatacatgttctggc

SEQ ID NO: 685533 - DNA, 25 bp, Homo sapien
ctgggataagcaagagaaatacatg

SEQ ID NO: 685534 - DNA, 25 bp, Homo sapien
ataagcaagagaaatacatgttctg

SEQ ID NO: 685535 - DNA, 25 bp, Homo sapien
caagagtcttccatatacctcttag

SEQ ID NO: 685536 - DNA, 25 bp, Homo sapien
gagtcttccatatacctcttaggga

SEQ ID NO: 685537 - DNA, 25 bp, Homo sapien
tattggtcgtactgattcctgaatg

SEQ ID NO: 685538 - DNA, 25 bp, Homo sapien
aaaccttaaagatgatatgtattgg

SEQ ID NO: 685539 - DNA, 25 bp, Homo sapien
tgggtggaccctgcactaaaggtca

SEQ ID NO: 685540 - DNA, 25 bp, Homo sapien
caagcggcctccatactgttgttca

SEQ ID NO: 685541 - DNA, 25 bp, Homo sapien
ggtcaaccagctatctgctataagg

SEQ ID NO: 685542 - DNA, 25 bp, Homo sapien
cttgattcctaaaacctggaggtgg

SEQ ID NO: 685543 - DNA, 25 bp, Homo sapien
ttttccccatgtgctaggctagaag

SEQ ID NO: 685544 - DNA, 25 bp, Homo sapien
tagaagtggggctgatggaaacgtc

SEQ ID NO: 685545 - DNA, 25 bp, Homo sapien
ctagaagtggggctgatggaaacgt

SEQ ID NO: 685546 - DNA, 25 bp, Homo sapien
tccccatgtgctaggctagaagtgg

SEQ ID NO: 685547 - DNA, 25 bp, Homo sapien
tgaggccttgaaagtcatttaacaa

SEQ ID NO: 685548 - DNA, 25 bp, Homo sapien
ttatgaatccgccaagacaccatac

SEQ ID NO: 685549 - DNA, 25 bp, Homo sapien
tctgaagtaaaagttagtctcaaca

SEQ ID NO: 685550 - DNA, 25 bp, Homo sapien
tctcaacaagttattgtatcttgtc

SEQ ID NO: 685551 - DNA, 25 bp, Homo sapien
aagacaccatactgttttaaatctg

SEQ ID NO: 685552 - DNA, 25 bp, Homo sapien
ctgtcttttacccacggtctttgct

SEQ ID NO: 685553 - DNA, 25 bp, Homo sapien
tctttccaatgagcatgagtataat

SEQ ID NO: 685554 - DNA, 25 bp, Homo sapien
ccaatgagcatgagtataatgcctt

SEQ ID NO: 685555 - DNA, 25 bp, Homo sapien
ttttacccacggtctttgctgagca

SEQ ID NO: 685556 - DNA, 25 bp, Homo sapien
gcttctaaggctttagctgatgacc

SEQ ID NO: 685557 - DNA, 25 bp, Homo sapien
cttctaaggctttagctgatgacct

SEQ ID NO: 685558 - DNA, 25 bp, Homo sapien
agcttctaaggctttagctgatgac

SEQ ID NO: 685559 - DNA, 25 bp, Homo sapien
cagctgtgcggacattatgaccctg

SEQ ID NO: 685560 - DNA, 25 bp, Homo sapien
tatgaccctggaggttctgccagag

SEQ ID NO: 685561 - DNA, 25 bp, Homo sapien
tgtgcggacattatgaccctggagg

SEQ ID NO: 685562 - DNA, 25 bp, Homo sapien
cggacattatgaccctggaggttct

SEQ ID NO: 685563 - DNA, 25 bp, Homo sapien
gggaacacaggagttagtatctgat

SEQ ID NO: 685564 - DNA, 25 bp, Homo sapien
tcagccaactgagacgaagattttc

SEQ ID NO: 685565 - DNA, 25 bp, Homo sapien
tagtatctgatgttcaatggaagaa

SEQ ID NO: 685566 - DNA, 25 bp, Homo sapien
gaccattttgggaactagacctatg

SEQ ID NO: 685567 - DNA, 25 bp, Homo sapien
gtgtggaccagacattgcctgccat

SEQ ID NO: 685568 - DNA, 25 bp, Homo sapien
gagtgtggaccagacattgcctgcc

SEQ ID NO: 685569 - DNA, 25 bp, Homo sapien
agtgtggaccagacattgcctgcca

SEQ ID NO: 685570 - DNA, 25 bp, Homo sapien
tgtccataattttgaagggtggaga

SEQ ID NO: 685571 - DNA, 25 bp, Homo sapien
gtatcctgttccagctgtaactgaa

SEQ ID NO: 685572 - DNA, 25 bp, Homo sapien
tgtatcctgttccagctgtaactga

SEQ ID NO: 685573 - DNA, 25 bp, Homo sapien
gatgaatgaggttgtgtgagataaa

SEQ ID NO: 685574 - DNA, 25 bp, Homo sapien
tgatgaatgaggttgtgtgagataa

SEQ ID NO: 685575 - DNA, 25 bp, Homo sapien
atgaatgaggttgtgtgagataaaa

SEQ ID NO: 685576 - DNA, 25 bp, Homo sapien
tttgctgaacgttcacaatcagcgg

SEQ ID NO: 685577 - DNA, 25 bp, Homo sapien
gtttttgctgaacgttcacaatcag

SEQ ID NO: 685578 - DNA, 25 bp, Homo sapien
ctgaacgttcacaatcagcggacat

SEQ ID NO: 685579 - DNA, 25 bp, Homo sapien
ctgtttttgctgaacgttcacaatc

SEQ ID NO: 685580 - DNA, 25 bp, Homo sapien
ttttgccagtgcaacatgatgagac

SEQ ID NO: 685581 - DNA, 25 bp, Homo sapien
ggtgggaggcttgagtccttaacaa

SEQ ID NO: 685582 - DNA, 25 bp, Homo sapien
ggaggcttgagtccttaacaagacc

SEQ ID NO: 685583 - DNA, 25 bp, Homo sapien
acatgatgagactgtccttgtttct

SEQ ID NO: 685584 - DNA, 25 bp, Homo sapien
tctgtatagattttgtggaagaaaa

SEQ ID NO: 685585 - DNA, 25 bp, Homo sapien
cttctatggtgaagtctgtatagat

SEQ ID NO: 685586 - DNA, 25 bp, Homo sapien
ccttctatggtgaagtctgtataga

SEQ ID NO: 685587 - DNA, 25 bp, Homo sapien
agtctgtatagattttgtggaagaa

SEQ ID NO: 685588 - DNA, 25 bp, Homo sapien
tcacataagttggattttaatttta

SEQ ID NO: 685589 - DNA, 25 bp, Homo sapien
gactccagacttctatctccaacta

SEQ ID NO: 685590 - DNA, 25 bp, Homo sapien
tcagtgcttaggatttctaaaagtc

SEQ ID NO: 685591 - DNA, 25 bp, Homo sapien
ctaaaagtcttaattgagccttgac

SEQ ID NO: 685592 - DNA, 25 bp, Homo sapien
tcagggtccgtattaattctataga

SEQ ID NO: 685593 - DNA, 25 bp, Homo sapien
tttcgggagcattcagtagactaag

SEQ ID NO: 685594 - DNA, 25 bp, Homo sapien
tagttctgccgctctggacattcat

SEQ ID NO: 685595 - DNA, 25 bp, Homo sapien
tgtgtccacctttgacatgaatccc

SEQ ID NO: 685596 - DNA, 25 bp, Homo sapien
tcaacatgctgctggatcggctgcc

SEQ ID NO: 685597 - DNA, 25 bp, Homo sapien
aatgacattagcatcccgtgtgagc

SEQ ID NO: 685598 - DNA, 25 bp, Homo sapien
tctcttcaggtgaggctagatccag

SEQ ID NO: 685599 - DNA, 25 bp, Homo sapien
gtcaggtcatgtaacagaaaagtcc

SEQ ID NO: 685600 - DNA, 25 bp, Homo sapien
ggaaatctcaggacatcgcctcgta

SEQ ID NO: 685601 - DNA, 25 bp, Homo sapien
caggaactgcacactgtcacagcaa

SEQ ID NO: 685602 - DNA, 25 bp, Homo sapien
tttgcctgactaaacagatgttgac

SEQ ID NO: 685603 - DNA, 25 bp, Homo sapien
tgcctgactaaacagatgttgacaa

SEQ ID NO: 685604 - DNA, 25 bp, Homo sapien
ttttgcctgactaaacagatgttga

SEQ ID NO: 685605 - DNA, 25 bp, Homo sapien
ttttcctaagttgatgagggtctga

SEQ ID NO: 685606 - DNA, 25 bp, Homo sapien
gttggaatgtcatttacaagtatga

SEQ ID NO: 685607 - DNA, 25 bp, Homo sapien
tcaataacgcaggtctaattttcct

SEQ ID NO: 685608 - DNA, 25 bp, Homo sapien
gtctgatagatctgatgaccttttg

SEQ ID NO: 685609 - DNA, 25 bp, Homo sapien
cccagtttccatggataacagtaca

SEQ ID NO: 685610 - DNA, 25 bp, Homo sapien
catggataacagtacagctgataga

SEQ ID NO: 685611 - DNA, 25 bp, Homo sapien
caaagcaatgcctggaatgaaagcc

SEQ ID NO: 685612 - DNA, 25 bp, Homo sapien
ttgtttccggctctccacaaagctg

SEQ ID NO: 685613 - DNA, 25 bp, Homo sapien
gtgtgtcggaatctctcagtcttca

SEQ ID NO: 685614 - DNA, 25 bp, Homo sapien
agtcttcataacacctaactggttt

SEQ ID NO: 685615 - DNA, 25 bp, Homo sapien
ggtgaattctcagtaatatcggcaa

SEQ ID NO: 685616 - DNA, 25 bp, Homo sapien
aacctctttgtcatatatgatggtg

SEQ ID NO: 685617 - DNA, 25 bp, Homo sapien
cttgtcccattgattgttctccagg

SEQ ID NO: 685618 - DNA, 25 bp, Homo sapien
ggcttggcccataagcaggtttttc

SEQ ID NO: 685619 - DNA, 25 bp, Homo sapien
cagcaatggcaacaatcttggaagg

SEQ ID NO: 685620 - DNA, 25 bp, Homo sapien
ttcacatttgtcagaaacgtggagc

SEQ ID NO: 685621 - DNA, 25 bp, Homo sapien
gtttctgctggcagaatactgggaa

SEQ ID NO: 685622 - DNA, 25 bp, Homo sapien
ctgggaaatgcagactagggcggca

SEQ ID NO: 685623 - DNA, 25 bp, Homo sapien
gctggcagaatactgggaaatgcag

SEQ ID NO: 685624 - DNA, 25 bp, Homo sapien
aaatgcagactagggcggcaaagac

SEQ ID NO: 685625 - DNA, 25 bp, Homo sapien
tgatttgaggacaatagttggtttt

SEQ ID NO: 685626 - DNA, 25 bp, Homo sapien
tattcatgttaacctcccttcccca

SEQ ID NO: 685627 - DNA, 25 bp, Homo sapien
caaatcctataaggatgggctaaac

SEQ ID NO: 685628 - DNA, 25 bp, Homo sapien
ctttgctaaaactggcagtccgaaa

SEQ ID NO: 685629 - DNA, 25 bp, Homo sapien
gacttgtggactcctttctgtcaag

SEQ ID NO: 685630 - DNA, 25 bp, Homo sapien
gagagcagagtccaacaggaatgtg

SEQ ID NO: 685631 - DNA, 25 bp, Homo sapien
gacacctatagcatggcaaacattg

SEQ ID NO: 685632 - DNA, 25 bp, Homo sapien
tgctgtggccaaatgattgggctga

SEQ ID NO: 685633 - DNA, 25 bp, Homo sapien
ccagccttccttcgtctgctgccat

SEQ ID NO: 685634 - DNA, 25 bp, Homo sapien
gtaattgttgatttccacacccagc

SEQ ID NO: 685635 - DNA, 25 bp, Homo sapien
acacccagccttccttcgtctgctg

SEQ ID NO: 685636 - DNA, 25 bp, Homo sapien
aattgttgatttccacacccagcct

SEQ ID NO: 685637 - DNA, 25 bp, Homo sapien
caagtgaaactcagccacagcgttt

SEQ ID NO: 685638 - DNA, 25 bp, Homo sapien
cccagagcaacgtcaggtcctctga

SEQ ID NO: 685639 - DNA, 25 bp, Homo sapien
tgaaactcagccacagcgtttttgc

SEQ ID NO: 685640 - DNA, 25 bp, Homo sapien
tctgacttgttaaaatgaagcacca

SEQ ID NO: 685641 - DNA, 25 bp, Homo sapien
aattgatttttccgttctgaggttg

SEQ ID NO: 685642 - DNA, 25 bp, Homo sapien
attgatttttccgttctgaggttgt

SEQ ID NO: 685643 - DNA, 25 bp, Homo sapien
caaatactgcagtccctgatataaa

SEQ ID NO: 685644 - DNA, 25 bp, Homo sapien
tatatgcagttgtccctcggtaccc

SEQ ID NO: 685645 - DNA, 25 bp, Homo sapien
ctaggtaaatcgctgttatagtgca

SEQ ID NO: 685646 - DNA, 25 bp, Homo sapien
catataacttatgcacatctgccca

SEQ ID NO: 685647 - DNA, 25 bp, Homo sapien
tggccagttctagcttcaaagtagc

SEQ ID NO: 685648 - DNA, 25 bp, Homo sapien
ccagttctagcttcaaagtagcaag

SEQ ID NO: 685649 - DNA, 25 bp, Homo sapien
gtttgacttcattagctccttgcag

SEQ ID NO: 685650 - DNA, 25 bp, Homo sapien
ttagctccttgcaggccactgcctg

SEQ ID NO: 685651 - DNA, 25 bp, Homo sapien
tctctgacttgtccgtgtgaaaggc

SEQ ID NO: 685652 - DNA, 25 bp, Homo sapien
tattgtgtcctctatagagcttctc

SEQ ID NO: 685653 - DNA, 25 bp, Homo sapien
ttctccagtcctttattgtgtcctc

SEQ ID NO: 685654 - DNA, 25 bp, Homo sapien
ttctctgacttgtccgtgtgaaagg

SEQ ID NO: 685655 - DNA, 25 bp, Homo sapien
ctagcaactgtcagtcccttcctgg

SEQ ID NO: 685656 - DNA, 25 bp, Homo sapien
ccattctcccttcttaagagaagca

SEQ ID NO: 685657 - DNA, 25 bp, Homo sapien
gatgaacagactatgattattacca

SEQ ID NO: 685658 - DNA, 25 bp, Homo sapien
aattatactagcaactgtcagtccc

SEQ ID NO: 685659 - DNA, 25 bp, Homo sapien
tgaaaacggtgcaactgctaactgt

SEQ ID NO: 685660 - DNA, 25 bp, Homo sapien
tgagcataagaatatcaccttgaac

SEQ ID NO: 685661 - DNA, 25 bp, Homo sapien
tcagacgggttagtgcacatgcagc

SEQ ID NO: 685662 - DNA, 25 bp, Homo sapien
atttagaagtatttccacacgtgtg

SEQ ID NO: 685663 - DNA, 25 bp, Homo sapien
aactgtatcctcacaaatgtgtatg

SEQ ID NO: 685664 - DNA, 25 bp, Homo sapien
ttcaagaactgtatcctcacaaatg

SEQ ID NO: 685665 - DNA, 25 bp, Homo sapien
caagaactgtatcctcacaaatgtg

SEQ ID NO: 685666 - DNA, 25 bp, Homo sapien
gcaatttcaagaactgtatcctcac

SEQ ID NO: 685667 - DNA, 25 bp, Homo sapien
caatgcaaggacagcgtacagtaca

SEQ ID NO: 685668 - DNA, 25 bp, Homo sapien
cacttgtagcattgtgattgacagg

SEQ ID NO: 685669 - DNA, 25 bp, Homo sapien
ctgtccagctctaagcaatgcagca

SEQ ID NO: 685670 - DNA, 25 bp, Homo sapien
gagagtggagacatcccaggactga

SEQ ID NO: 685671 - DNA, 25 bp, Homo sapien
tctaccaagccaatggaaaacaaaa

SEQ ID NO: 685672 - DNA, 25 bp, Homo sapien
aaatataaatggactaaattctgca

SEQ ID NO: 685673 - DNA, 25 bp, Homo sapien
aagatctaccaagccaatggaaaac

SEQ ID NO: 685674 - DNA, 25 bp, Homo sapien
gaggaagatctaccaagccaatgga

SEQ ID NO: 685675 - DNA, 25 bp, Homo sapien
cagctgccggacagctggtgatgag

SEQ ID NO: 685676 - DNA, 25 bp, Homo sapien
gcagttgtagaggtctcttaaggtc

SEQ ID NO: 685677 - DNA, 25 bp, Homo sapien
ccttctccaaagcagttgtagaggt

SEQ ID NO: 685678 - DNA, 25 bp, Homo sapien
tcatttcttcagctgccggacagct

SEQ ID NO: 685679 - DNA, 25 bp, Homo sapien
cttccctcttcaggtaagagagtat

SEQ ID NO: 685680 - DNA, 25 bp, Homo sapien
tcttcaggtaagagagtatgagcag

SEQ ID NO: 685681 - DNA, 25 bp, Homo sapien
ccctcttcaggtaagagagtatgag

SEQ ID NO: 685682 - DNA, 25 bp, Homo sapien
caggtaagagagtatgagcagttgc

SEQ ID NO: 685683 - DNA, 25 bp, Homo sapien
aagctcctgaacagctagaatactt

SEQ ID NO: 685684 - DNA, 25 bp, Homo sapien
tcctgaacagctagaatacttcttt

SEQ ID NO: 685685 - DNA, 25 bp, Homo sapien
gaacagctagaatacttctttctgc

SEQ ID NO: 685686 - DNA, 25 bp, Homo sapien
gctcctgaacagctagaatacttct

SEQ ID NO: 685687 - DNA, 25 bp, Homo sapien
ttcaatcttcccaccaaatgctccc

SEQ ID NO: 685688 - DNA, 25 bp, Homo sapien
tcaatcttcccaccaaatgctccca

SEQ ID NO: 685689 - DNA, 25 bp, Homo sapien
tgttcagctttattatcagtaaccc

SEQ ID NO: 685690 - DNA, 25 bp, Homo sapien
gtaaccctcccatcaataagcaaag

SEQ ID NO: 685691 - DNA, 25 bp, Homo sapien
tgtgctcagccttgtaggactgtca

SEQ ID NO: 685692 - DNA, 25 bp, Homo sapien
agccacttgctccattctgacatct

SEQ ID NO: 685693 - DNA, 25 bp, Homo sapien
cctggaagcgcatgaatcagtttgc

SEQ ID NO: 685694 - DNA, 25 bp, Homo sapien
cattcatatatgtggtttcaaaccc

SEQ ID NO: 685695 - DNA, 25 bp, Homo sapien
taatccctgctgtcaactctacgag

SEQ ID NO: 685696 - DNA, 25 bp, Homo sapien
tcttagatatctctgccccacgagg

SEQ ID NO: 685697 - DNA, 25 bp, Homo sapien
ctggctctatgcctcccatcatgag

SEQ ID NO: 685698 - DNA, 25 bp, Homo sapien
aaagtgataggcaccaaatgcccct

SEQ ID NO: 685699 - DNA, 25 bp, Homo sapien
tgcctcccatcatgagtgcatgaaa

SEQ ID NO: 685700 - DNA, 25 bp, Homo sapien
aaaagtgataggcaccaaatgcccc

SEQ ID NO: 685701 - DNA, 25 bp, Homo sapien
gacatcacaggcagtaagtgctaaa

SEQ ID NO: 685702 - DNA, 25 bp, Homo sapien
tactcccttgataatgacattgtgc

SEQ ID NO: 685703 - DNA, 25 bp, Homo sapien
tagctactctgcaccaagtgtgtca

SEQ ID NO: 685704 - DNA, 25 bp, Homo sapien
ggaaggaacctaagacatcagcgat

SEQ ID NO: 685705 - DNA, 25 bp, Homo sapien
tttgcatcatcacatgtccaaatac

SEQ ID NO: 685706 - DNA, 25 bp, Homo sapien
gttaccgctagtgaacagaggttca

SEQ ID NO: 685707 - DNA, 25 bp, Homo sapien
cagaggttcactaccttcggtttct

SEQ ID NO: 685708 - DNA, 25 bp, Homo sapien
tcttctacctttgcatcatcacatg

SEQ ID NO: 685709 - DNA, 25 bp, Homo sapien
cacccataagttgggcagcaagcca

SEQ ID NO: 685710 - DNA, 25 bp, Homo sapien
gagccagcgctttaaatagagtcag

SEQ ID NO: 685711 - DNA, 25 bp, Homo sapien
gagggtttctctctcgacattttca

SEQ ID NO: 685712 - DNA, 25 bp, Homo sapien
tcatttgctgccagcgggacagaag

SEQ ID NO: 685713 - DNA, 25 bp, Homo sapien
gactctgcacatcttagggtattgg

SEQ ID NO: 685714 - DNA, 25 bp, Homo sapien
tcagtgaatttttgggttctcccag

SEQ ID NO: 685715 - DNA, 25 bp, Homo sapien
caagaggaagctctcgcgacactta

SEQ ID NO: 685716 - DNA, 25 bp, Homo sapien
caagattaggacagggtaacccatg

SEQ ID NO: 685717 - DNA, 25 bp, Homo sapien
tggcagcccagactgactttcctgg

SEQ ID NO: 685718 - DNA, 25 bp, Homo sapien
aatttaaggcttgaatgtgttcagc

SEQ ID NO: 685719 - DNA, 25 bp, Homo sapien
tgcatatattgccagcattaatcac

SEQ ID NO: 685720 - DNA, 25 bp, Homo sapien
ccatcctcggggcaatttaaggctt

SEQ ID NO: 685721 - DNA, 25 bp, Homo sapien
tctttggcagtatcacactaaccgt

SEQ ID NO: 685722 - DNA, 25 bp, Homo sapien
taatccttagacctggttgccagtc

SEQ ID NO: 685723 - DNA, 25 bp, Homo sapien
taaagtggtcatgtctacggaaaaa

SEQ ID NO: 685724 - DNA, 25 bp, Homo sapien
tattggttcagacaggctagaatcc

SEQ ID NO: 685725 - DNA, 25 bp, Homo sapien
tcaatccaatgatgaaaaaatgatc

SEQ ID NO: 685726 - DNA, 25 bp, Homo sapien
aactcaggagtgggtcatccctcac

SEQ ID NO: 685727 - DNA, 25 bp, Homo sapien
aataactcaggagtgggtcatccct

SEQ ID NO: 685728 - DNA, 25 bp, Homo sapien
caatccaatgatgaaaaaatgatct

SEQ ID NO: 685729 - DNA, 25 bp, Homo sapien
atgaacatcatggagaaattgaatc

SEQ ID NO: 685730 - DNA, 25 bp, Homo sapien
ctggatgaacatcatggagaaattg

SEQ ID NO: 685731 - DNA, 25 bp, Homo sapien
ggatgaacatcatggagaaattgaa

SEQ ID NO: 685732 - DNA, 25 bp, Homo sapien
tggatgaacatcatggagaaattga

SEQ ID NO: 685733 - DNA, 25 bp, Homo sapien
gaaaacgtggaatactgccagcctc

SEQ ID NO: 685734 - DNA, 25 bp, Homo sapien
aacgtggaatactgccagcctccaa

SEQ ID NO: 685735 - DNA, 25 bp, Homo sapien
aaacgtggaatactgccagcctcca

SEQ ID NO: 685736 - DNA, 25 bp, Homo sapien
aaaacgtggaatactgccagcctcc

SEQ ID NO: 685737 - DNA, 25 bp, Homo sapien
cattcgtggcagcttcacgagtaac

SEQ ID NO: 685738 - DNA, 25 bp, Homo sapien
tatcctctttatctaggtagagcag

SEQ ID NO: 685739 - DNA, 25 bp, Homo sapien
gcttcacgagtaacatctttgtccc

SEQ ID NO: 685740 - DNA, 25 bp, Homo sapien
tagagcaggacaccattcgtggcag

SEQ ID NO: 685741 - DNA, 25 bp, Homo sapien
tcttggtgctacaaagacagactcc

SEQ ID NO: 685742 - DNA, 25 bp, Homo sapien
tttcttggtgctacaaagacagact

SEQ ID NO: 685743 - DNA, 25 bp, Homo sapien
tggatagtttggctctggtagactt

SEQ ID NO: 685744 - DNA, 25 bp, Homo sapien
ttaatcacgtgaaaactgaaactgt

SEQ ID NO: 685745 - DNA, 25 bp, Homo sapien
aatcggaccagcttagcctgggcag

SEQ ID NO: 685746 - DNA, 25 bp, Homo sapien
aagtttcagacccaggcatatttgg

SEQ ID NO: 685747 - DNA, 25 bp, Homo sapien
gcatatttgggaaggcgagtgcttt

SEQ ID NO: 685748 - DNA, 25 bp, Homo sapien
cgaaacttgccctgagctctcgctg

SEQ ID NO: 685749 - DNA, 25 bp, Homo sapien
tccgtggccgggttcgagtcgcaca

SEQ ID NO: 685750 - DNA, 25 bp, Homo sapien
tcttgttgctcatctcggatggctc

SEQ ID NO: 685751 - DNA, 25 bp, Homo sapien
ctgatcgaagtaaatgatgcgcgtc

SEQ ID NO: 685752 - DNA, 25 bp, Homo sapien
caccgccgagaaggcgaccttggag

SEQ ID NO: 685753 - DNA, 25 bp, Homo sapien
cggctggcgctggtgctcgcccgcg

SEQ ID NO: 685754 - DNA, 25 bp, Homo sapien
ggctggcgctggtgctcgcccgcgt

SEQ ID NO: 685755 - DNA, 25 bp, Homo sapien
ctggcgctggtgctcgcccgcgtcg

SEQ ID NO: 685756 - DNA, 25 bp, Homo sapien
tggcgctggtgctcgcccgcgtcgc

SEQ ID NO: 685757 - DNA, 25 bp, Homo sapien
tgctcgggaagatgctagcggctag

SEQ ID NO: 685758 - DNA, 25 bp, Homo sapien
tagcggctaggtcgacagcgctgca

SEQ ID NO: 685759 - DNA, 25 bp, Homo sapien
ccgggatcccggtgctcgggaagat

SEQ ID NO: 685760 - DNA, 25 bp, Homo sapien
agatgctagcggctaggtcgacagc

SEQ ID NO: 685761 - DNA, 25 bp, Homo sapien
tccggctgggttggcttatcgcgca

SEQ ID NO: 685762 - DNA, 25 bp, Homo sapien
tgattggcaaggttcgaggcccctc

SEQ ID NO: 685763 - DNA, 25 bp, Homo sapien
ctatttataggagcgcagcgtccgg

SEQ ID NO: 685764 - DNA, 25 bp, Homo sapien
ccgtggcgtaaaggatgcgtgccca

SEQ ID NO: 685765 - DNA, 25 bp, Homo sapien
gatttgtatggtccaacttggccag

SEQ ID NO: 685766 - DNA, 25 bp, Homo sapien
tgattaaacacggatagcccctggg

SEQ ID NO: 685767 - DNA, 25 bp, Homo sapien
taagcactacatgtggcagagacaa

SEQ ID NO: 685768 - DNA, 25 bp, Homo sapien
tgtagtctcccaaactgacgtggcc

SEQ ID NO: 685769 - DNA, 25 bp, Homo sapien
cctttgtaagcgtgagatgggaagt

SEQ ID NO: 685770 - DNA, 25 bp, Homo sapien
gcactcagtgaacatctgtcctttg

SEQ ID NO: 685771 - DNA, 25 bp, Homo sapien
cttcagtccaataggcaactctcct

SEQ ID NO: 685772 - DNA, 25 bp, Homo sapien
aataggcaactctcctcgccagggc

SEQ ID NO: 685773 - DNA, 25 bp, Homo sapien
agtccagatagccaaaagcccaggg

SEQ ID NO: 685774 - DNA, 25 bp, Homo sapien
tggaaaacgcttccacagttggaca

SEQ ID NO: 685775 - DNA, 25 bp, Homo sapien
cagggctttggcaactgttacccaa

SEQ ID NO: 685776 - DNA, 25 bp, Homo sapien
tgttacccaagaaccagtgcttttg

SEQ ID NO: 685777 - DNA, 25 bp, Homo sapien
tcgtattacaatgcctctgactttt

SEQ ID NO: 685778 - DNA, 25 bp, Homo sapien
tctacctaattccatgataaacttg

SEQ ID NO: 685779 - DNA, 25 bp, Homo sapien
aagcattagtaggtgctcctcctcc

SEQ ID NO: 685780 - DNA, 25 bp, Homo sapien
tattcaccaagtcgtattacaatgc

SEQ ID NO: 685781 - DNA, 25 bp, Homo sapien
tgttttgtgtttgtaagtagcagtt

SEQ ID NO: 685782 - DNA, 25 bp, Homo sapien
tatggtttaagcagataatagaagg

SEQ ID NO: 685783 - DNA, 25 bp, Homo sapien
gagccaaactgaaagcaggtgagca

SEQ ID NO: 685784 - DNA, 25 bp, Homo sapien
gttttaccatttaccgatgcatatg

SEQ ID NO: 685785 - DNA, 25 bp, Homo sapien
gccttgacacataatagaatctctg

SEQ ID NO: 685786 - DNA, 25 bp, Homo sapien
cataatagaatctctgtcatgtggc

SEQ ID NO: 685787 - DNA, 25 bp, Homo sapien
caatggctggaccttcttgtcgttt

SEQ ID NO: 685788 - DNA, 25 bp, Homo sapien
tgcagagtgaaatcctcgccagttt

SEQ ID NO: 685789 - DNA, 25 bp, Homo sapien
caaggacagggcaaccctttggtca

SEQ ID NO: 685790 - DNA, 25 bp, Homo sapien
ggcagtgtttgttggcagatgctat

SEQ ID NO: 685791 - DNA, 25 bp, Homo sapien
aatatactgaggtctgcaccaacag

SEQ ID NO: 685792 - DNA, 25 bp, Homo sapien
accaacaggatgctggaacactgag

SEQ ID NO: 685793 - DNA, 25 bp, Homo sapien
acacatgcaatttgaacttccccta

SEQ ID NO: 685794 - DNA, 25 bp, Homo sapien
acttcccctatgtcgttacaatcag

SEQ ID NO: 685795 - DNA, 25 bp, Homo sapien
ctatgtcgttacaatcaggccacaa

SEQ ID NO: 685796 - DNA, 25 bp, Homo sapien
catgcaatttgaacttcccctatgt

SEQ ID NO: 685797 - DNA, 25 bp, Homo sapien
tcttgcctaggtcaatcaagacagg

SEQ ID NO: 685798 - DNA, 25 bp, Homo sapien
tataccagaagcattaaatagtggg

SEQ ID NO: 685799 - DNA, 25 bp, Homo sapien
tgtgctttccccaataactcagaaa

SEQ ID NO: 685800 - DNA, 25 bp, Homo sapien
caagacaggaggttgatctaaataa

SEQ ID NO: 685801 - DNA, 25 bp, Homo sapien
gatggatttttccgtagtcccatct

SEQ ID NO: 685802 - DNA, 25 bp, Homo sapien
gatttttccgtagtcccatctgccc

SEQ ID NO: 685803 - DNA, 25 bp, Homo sapien
tggatttttccgtagtcccatctgc

SEQ ID NO: 685804 - DNA, 25 bp, Homo sapien
cagcaaataagccattgttttgatg

SEQ ID NO: 685805 - DNA, 25 bp, Homo sapien
gatatagaagattgccattatccca

SEQ ID NO: 685806 - DNA, 25 bp, Homo sapien
gtcacataaccactatagaagcctg

SEQ ID NO: 685807 - DNA, 25 bp, Homo sapien
cacatgaatggaatgatacagtatg

SEQ ID NO: 685808 - DNA, 25 bp, Homo sapien
agtcagtctttaccctcactccagg

SEQ ID NO: 685809 - DNA, 25 bp, Homo sapien
tctagtggatgtggaatggaatctc

SEQ ID NO: 685810 - DNA, 25 bp, Homo sapien
gttggcttatccaaggacatttggg

SEQ ID NO: 685811 - DNA, 25 bp, Homo sapien
gagttgcctgatcatatagtgactg

SEQ ID NO: 685812 - DNA, 25 bp, Homo sapien
ttctgcagaggctacaacatcttgc

SEQ ID NO: 685813 - DNA, 25 bp, Homo sapien
tttctgcacaaagctggtcaatgcc

SEQ ID NO: 685814 - DNA, 25 bp, Homo sapien
gcctctttgtagctagccataacgg

SEQ ID NO: 685815 - DNA, 25 bp, Homo sapien
taacggcaatatctggagtgaaagg

SEQ ID NO: 685816 - DNA, 25 bp, Homo sapien
gaagatgactgaattgtttctgcac

SEQ ID NO: 685817 - DNA, 25 bp, Homo sapien
cactgatacgacgaagctgagtctg

SEQ ID NO: 685818 - DNA, 25 bp, Homo sapien
aaatatcccctgatgttctcagcac

SEQ ID NO: 685819 - DNA, 25 bp, Homo sapien
cctgatgttctcagcactgatacga

SEQ ID NO: 685820 - DNA, 25 bp, Homo sapien
cgacgaagctgagtctgattcacat

SEQ ID NO: 685821 - DNA, 25 bp, Homo sapien
agatcaggatggttttagggtggta

SEQ ID NO: 685822 - DNA, 25 bp, Homo sapien
cccgaccctgcttaattcatgagat

SEQ ID NO: 685823 - DNA, 25 bp, Homo sapien
ccgaccctgcttaattcatgagatc

SEQ ID NO: 685824 - DNA, 25 bp, Homo sapien
atcaggatggttttagggtggtatg

SEQ ID NO: 685825 - DNA, 25 bp, Homo sapien
cttgctacgttccaaggaagaatgc

SEQ ID NO: 685826 - DNA, 25 bp, Homo sapien
cctctctacacgagatcactataca

SEQ ID NO: 685827 - DNA, 25 bp, Homo sapien
tagacagtgaatggggctgcaaccc

SEQ ID NO: 685828 - DNA, 25 bp, Homo sapien
tcactatacacattacagtgatttg

SEQ ID NO: 685829 - DNA, 25 bp, Homo sapien
gctaagtcctactgggctttcaaga

SEQ ID NO: 685830 - DNA, 25 bp, Homo sapien
tcagaatcccttgagctggctaagt

SEQ ID NO: 685831 - DNA, 25 bp, Homo sapien
caaagggtagacatgacttcaggca

SEQ ID NO: 685832 - DNA, 25 bp, Homo sapien
gcattgatctccaaaacacggcaca

SEQ ID NO: 685833 - DNA, 25 bp, Homo sapien
aagcttaacgcctgctctaaatccc

SEQ ID NO: 685834 - DNA, 25 bp, Homo sapien
tcattctcacagcagacttcagagc

SEQ ID NO: 685835 - DNA, 25 bp, Homo sapien
cattctcacagcagacttcagagct

SEQ ID NO: 685836 - DNA, 25 bp, Homo sapien
gacttcagagcttcaagcttaacgc

SEQ ID NO: 685837 - DNA, 25 bp, Homo sapien
ataaaggtagtgaaatctcaaggat

SEQ ID NO: 685838 - DNA, 25 bp, Homo sapien
taacaattatacacaacttttaaca

SEQ ID NO: 685839 - DNA, 25 bp, Homo sapien
agattttaacaattatacacaactt

SEQ ID NO: 685840 - DNA, 25 bp, Homo sapien
aaaggtagtgaaatctcaaggataa

SEQ ID NO: 685841 - DNA, 25 bp, Homo sapien
aatttccaaagggttacaatgtgtg

SEQ ID NO: 685842 - DNA, 25 bp, Homo sapien
atttccaaagggttacaatgtgtga

SEQ ID NO: 685843 - DNA, 25 bp, Homo sapien
gagggccagctttgtgatatgcatg

SEQ ID NO: 685844 - DNA, 25 bp, Homo sapien
tccatggtctcaaagcctgaactca

SEQ ID NO: 685845 - DNA, 25 bp, Homo sapien
tcctagatctcccaaggtaagtagc

SEQ ID NO: 685846 - DNA, 25 bp, Homo sapien
tgactactattaattgagggccagc

SEQ ID NO: 685847 - DNA, 25 bp, Homo sapien
tgggactccgcgaaacctcgaagtc

SEQ ID NO: 685848 - DNA, 25 bp, Homo sapien
tgggaaccgtttgaatgaccgggca

SEQ ID NO: 685849 - DNA, 25 bp, Homo sapien
cctcggagcgtgctggaaatgctga

SEQ ID NO: 685850 - DNA, 25 bp, Homo sapien
cacgtcgggtagaatcccaggaatc

SEQ ID NO: 685851 - DNA, 25 bp, Homo sapien
taaacatgtactaatatcaattctc

SEQ ID NO: 685852 - DNA, 25 bp, Homo sapien
ctttggagctaacacgtaaacatat

SEQ ID NO: 685853 - DNA, 25 bp, Homo sapien
gcagaataaggaaacccgccaacta

SEQ ID NO: 685854 - DNA, 25 bp, Homo sapien
gcccacctttgtgcccgcagaataa

SEQ ID NO: 685855 - DNA, 25 bp, Homo sapien
taatatgcagcgttcacaaaacagc

SEQ ID NO: 685856 - DNA, 25 bp, Homo sapien
taaaatgtcagcaaggcatcggaga

SEQ ID NO: 685857 - DNA, 25 bp, Homo sapien
gaggaattcggataccacaaacagc

SEQ ID NO: 685858 - DNA, 25 bp, Homo sapien
aatttcattaaggtaggtcagcgtc

SEQ ID NO: 685859 - DNA, 25 bp, Homo sapien
gaaatcccagcgtagatccaaactg

SEQ ID NO: 685860 - DNA, 25 bp, Homo sapien
tcaccagcaagatgtacagaacgcc

SEQ ID NO: 685861 - DNA, 25 bp, Homo sapien
tgatgcagggcacttgctccacact

SEQ ID NO: 685862 - DNA, 25 bp, Homo sapien
caaggaggtcaaaggatcagggaac

SEQ ID NO: 685863 - DNA, 25 bp, Homo sapien
ggaggactagaaacccaatcaggcc

SEQ ID NO: 685864 - DNA, 25 bp, Homo sapien
taaatggaggtagagcacgtgttcc

SEQ ID NO: 685865 - DNA, 25 bp, Homo sapien
tatttttcacactctcatatgggag

SEQ ID NO: 685866 - DNA, 25 bp, Homo sapien
aacagctctgagacacatggcctct

SEQ ID NO: 685867 - DNA, 25 bp, Homo sapien
caataagttacacactcactcaggt

SEQ ID NO: 685868 - DNA, 25 bp, Homo sapien
caacccaataagttacacactcact

SEQ ID NO: 685869 - DNA, 25 bp, Homo sapien
acccaataagttacacactcactca

SEQ ID NO: 685870 - DNA, 25 bp, Homo sapien
gccaacccaataagttacacactca

SEQ ID NO: 685871 - DNA, 25 bp, Homo sapien
tcttgtgtagcgttctagattgagg

SEQ ID NO: 685872 - DNA, 25 bp, Homo sapien
taaacttcagtagcatgttcctgtc

SEQ ID NO: 685873 - DNA, 25 bp, Homo sapien
tgtcaggttatatggcagccctggc

SEQ ID NO: 685874 - DNA, 25 bp, Homo sapien
tgttcctgtcaggttatatggcagc

SEQ ID NO: 685875 - DNA, 25 bp, Homo sapien
ctaagactgtttgctagctgattct

SEQ ID NO: 685876 - DNA, 25 bp, Homo sapien
aagactgtttgctagctgattcttt

SEQ ID NO: 685877 - DNA, 25 bp, Homo sapien
taagactgtttgctagctgattctt

SEQ ID NO: 685878 - DNA, 25 bp, Homo sapien
tctctgagcattggcctctggctgg

SEQ ID NO: 685879 - DNA, 25 bp, Homo sapien
acttctctgagcattggcctctggc

SEQ ID NO: 685880 - DNA, 25 bp, Homo sapien
agtacttctctgagcattggcctct

SEQ ID NO: 685881 - DNA, 25 bp, Homo sapien
ctgttacaaagtcagggaatgtgaa

SEQ ID NO: 685882 - DNA, 25 bp, Homo sapien
atattcttttgtaggtctcttggta

SEQ ID NO: 685883 - DNA, 25 bp, Homo sapien
gatattcttttgtaggtctcttggt

SEQ ID NO: 685884 - DNA, 25 bp, Homo sapien
ggttgatgtgcttctcgttttatga

SEQ ID NO: 685885 - DNA, 25 bp, Homo sapien
gatgtgcttctcgttttatgatcac

SEQ ID NO: 685886 - DNA, 25 bp, Homo sapien
gcttctcgttttatgatcacaacag

SEQ ID NO: 685887 - DNA, 25 bp, Homo sapien
gctcaggttgatgtgcttctcgttt

SEQ ID NO: 685888 - DNA, 25 bp, Homo sapien
catcagcaccgacggactgaatcgg

SEQ ID NO: 685889 - DNA, 25 bp, Homo sapien
gaagctaccactctggtcatctaac

SEQ ID NO: 685890 - DNA, 25 bp, Homo sapien
gagcacacaaacagtcactcaccac

SEQ ID NO: 685891 - DNA, 25 bp, Homo sapien
cactgaattgtgacgtaggattaag

SEQ ID NO: 685892 - DNA, 25 bp, Homo sapien
ggactatccctactattgacagagg

SEQ ID NO: 685893 - DNA, 25 bp, Homo sapien
gaggcagactgaagagaatctctca

SEQ ID NO: 685894 - DNA, 25 bp, Homo sapien
taaaatgccccacttcatgtgaagt

SEQ ID NO: 685895 - DNA, 25 bp, Homo sapien
cactctgagctctagatctttgtca

SEQ ID NO: 685896 - DNA, 25 bp, Homo sapien
acaacttccacctctaaagttacat

SEQ ID NO: 685897 - DNA, 25 bp, Homo sapien
tctctatgaataactctcttcgaat

SEQ ID NO: 685898 - DNA, 25 bp, Homo sapien
agggcatttgccaattctgttatat

SEQ ID NO: 685899 - DNA, 25 bp, Homo sapien
gtaagacagggcatttgccaattct

SEQ ID NO: 685900 - DNA, 25 bp, Homo sapien
gacagggcatttgccaattctgtta

SEQ ID NO: 685901 - DNA, 25 bp, Homo sapien
agtaagacagggcatttgccaattc

SEQ ID NO: 685902 - DNA, 25 bp, Homo sapien
acagcaatttctagacaggattgaa

SEQ ID NO: 685903 - DNA, 25 bp, Homo sapien
gcaatttctagacaggattgaacat

SEQ ID NO: 685904 - DNA, 25 bp, Homo sapien
tttctagacaggattgaacattatt

SEQ ID NO: 685905 - DNA, 25 bp, Homo sapien
atttagctctgcctaaagtttgaga

SEQ ID NO: 685906 - DNA, 25 bp, Homo sapien
tctctatatcataatggtggataca

SEQ ID NO: 685907 - DNA, 25 bp, Homo sapien
ttcttaagagcagcgaaactattct

SEQ ID NO: 685908 - DNA, 25 bp, Homo sapien
ggcattgtgtatttgtcgaaattca

SEQ ID NO: 685909 - DNA, 25 bp, Homo sapien
ttggaagggatgagtagttgagaca

SEQ ID NO: 685910 - DNA, 25 bp, Homo sapien
ttctgaagttctctataaactgttc

SEQ ID NO: 685911 - DNA, 25 bp, Homo sapien
gaagttctctataaactgttccaag

SEQ ID NO: 685912 - DNA, 25 bp, Homo sapien
aactgttccaagtggtgcatattcc

SEQ ID NO: 685913 - DNA, 25 bp, Homo sapien
tctataaactgttccaagtggtgca

SEQ ID NO: 685914 - DNA, 25 bp, Homo sapien
catacctcagaataaggggtgccat

SEQ ID NO: 685915 - DNA, 25 bp, Homo sapien
attcctgcatacctcagaataaggg

SEQ ID NO: 685916 - DNA, 25 bp, Homo sapien
cagccgtagtcaacctgcaggtagc

SEQ ID NO: 685917 - DNA, 25 bp, Homo sapien
caggtagctgctcgcaattcctgca

SEQ ID NO: 685918 - DNA, 25 bp, Homo sapien
tctcttgccaaataaacattaccaa

SEQ ID NO: 685919 - DNA, 25 bp, Homo sapien
tcttgccaaataaacattaccaaac

SEQ ID NO: 685920 - DNA, 25 bp, Homo sapien
ctcttgccaaataaacattaccaaa

SEQ ID NO: 685921 - DNA, 25 bp, Homo sapien
ttctgttttgatgccagttcctcct

SEQ ID NO: 685922 - DNA, 25 bp, Homo sapien
tttctgttttgatgccagttcctcc

SEQ ID NO: 685923 - DNA, 25 bp, Homo sapien
ttttctgttttgatgccagttcctc

SEQ ID NO: 685924 - DNA, 25 bp, Homo sapien
gtgcttgcaaaggaatgcgctggga

SEQ ID NO: 685925 - DNA, 25 bp, Homo sapien
ttgcaaaggaatgcgctgggaagaa

SEQ ID NO: 685926 - DNA, 25 bp, Homo sapien
aatgcgctgggaagaatttgaagga

SEQ ID NO: 685927 - DNA, 25 bp, Homo sapien
caaaggaatgcgctgggaagaattt

SEQ ID NO: 685928 - DNA, 25 bp, Homo sapien
atgcagttttctttagatcggtcca

SEQ ID NO: 685929 - DNA, 25 bp, Homo sapien
tgcagttttctttagatcggtccat

SEQ ID NO: 685930 - DNA, 25 bp, Homo sapien
ttatcaaatatccccgcactctggc

SEQ ID NO: 685931 - DNA, 25 bp, Homo sapien
gcccggccttcactgaagtttctta

SEQ ID NO: 685932 - DNA, 25 bp, Homo sapien
agtatcctacagggcgcctcggtgc

SEQ ID NO: 685933 - DNA, 25 bp, Homo sapien
actcagggacggaggaaccgacagg

SEQ ID NO: 685934 - DNA, 25 bp, Homo sapien
aaggcagcgccaaggacactcaggg

SEQ ID NO: 685935 - DNA, 25 bp, Homo sapien
ccaggagcggatgcaaaggcgctgg

SEQ ID NO: 685936 - DNA, 25 bp, Homo sapien
ctgcgctcgagcgaggctgccttgt

SEQ ID NO: 685937 - DNA, 25 bp, Homo sapien
aaccctctagctagaaagccgattg

SEQ ID NO: 685938 - DNA, 25 bp, Homo sapien
tagaaagccgattggcctgcgctcg

SEQ ID NO: 685939 - DNA, 25 bp, Homo sapien
gagctcagccgttagaattcaaagg

SEQ ID NO: 685940 - DNA, 25 bp, Homo sapien
caactgcgatgtatccggtcctgga

SEQ ID NO: 685941 - DNA, 25 bp, Homo sapien
gtcctggatcgggttcttgtcctcg

SEQ ID NO: 685942 - DNA, 25 bp, Homo sapien
catccagatggtcgcggcgcatata

SEQ ID NO: 685943 - DNA, 25 bp, Homo sapien
tccttagttcgcctctgcatccaga

SEQ ID NO: 685944 - DNA, 25 bp, Homo sapien
gtgtcctgacctccttgaacccatt

SEQ ID NO: 685945 - DNA, 25 bp, Homo sapien
taggtgtcctgacctccttgaaccc

SEQ ID NO: 685946 - DNA, 25 bp, Homo sapien
gttgagtaggtgtcctgacctcctt

SEQ ID NO: 685947 - DNA, 25 bp, Homo sapien
gacctccttgaacccatttcatcat

SEQ ID NO: 685948 - DNA, 25 bp, Homo sapien
tgcccgacgagaggacgatcagtct

SEQ ID NO: 685949 - DNA, 25 bp, Homo sapien
gacgtgcagcgatgacttcagagcg

SEQ ID NO: 685950 - DNA, 25 bp, Homo sapien
tctcagctgcagtcgtaagtccgtg

SEQ ID NO: 685951 - DNA, 25 bp, Homo sapien
gaggactatgtgttgctgcccgacg

SEQ ID NO: 685952 - DNA, 25 bp, Homo sapien
atctttttttaccttgatgtagaat

SEQ ID NO: 685953 - DNA, 25 bp, Homo sapien
ttaaagtgcttttgacatgaggaat

SEQ ID NO: 685954 - DNA, 25 bp, Homo sapien
tcatcggttttgtaagtacaggact

SEQ ID NO: 685955 - DNA, 25 bp, Homo sapien
cttttgatctcttgattgaaggagg

SEQ ID NO: 685956 - DNA, 25 bp, Homo sapien
acaggacttgccgtttcttttgatc

SEQ ID NO: 685957 - DNA, 25 bp, Homo sapien
ctccacatcaccgacatgaagggaa

SEQ ID NO: 685958 - DNA, 25 bp, Homo sapien
gaagggaacaggcatcatggactgt

SEQ ID NO: 685959 - DNA, 25 bp, Homo sapien
catcaccgacatgaagggaacaggc

SEQ ID NO: 685960 - DNA, 25 bp, Homo sapien
aacaggcatcatggactgtgcgccc

SEQ ID NO: 685961 - DNA, 25 bp, Homo sapien
tttccaaacataacgcctatgaagt

SEQ ID NO: 685962 - DNA, 25 bp, Homo sapien
aaacataacgcctatgaagtgtttg

SEQ ID NO: 685963 - DNA, 25 bp, Homo sapien
caggggaagagcagccttgtacaca

SEQ ID NO: 685964 - DNA, 25 bp, Homo sapien
gaaccatttccaaacataacgccta

SEQ ID NO: 685965 - DNA, 25 bp, Homo sapien
gctgtacacggtccaggccctttga

SEQ ID NO: 685966 - DNA, 25 bp, Homo sapien
atgctgtacacggtccaggcccttt

SEQ ID NO: 685967 - DNA, 25 bp, Homo sapien
tgctgtacacggtccaggccctttg

SEQ ID NO: 685968 - DNA, 25 bp, Homo sapien
ccatgctgtacacggtccaggccct

SEQ ID NO: 685969 - DNA, 25 bp, Homo sapien
taatttctcggtcaggaatcactta

SEQ ID NO: 685970 - DNA, 25 bp, Homo sapien
tgttttaatttctcggtcaggaatc

SEQ ID NO: 685971 - DNA, 25 bp, Homo sapien
atttctcggtcaggaatcacttaat

SEQ ID NO: 685972 - DNA, 25 bp, Homo sapien
tttaatttctcggtcaggaatcact

SEQ ID NO: 685973 - DNA, 25 bp, Homo sapien
attgcggtttttgccgtagacagta

SEQ ID NO: 685974 - DNA, 25 bp, Homo sapien
tattttgtctcaaatctgttacaat

SEQ ID NO: 685975 - DNA, 25 bp, Homo sapien
tagattctgggttgataaattctgc

SEQ ID NO: 685976 - DNA, 25 bp, Homo sapien
gttacaatttatattggttggtgca

SEQ ID NO: 685977 - DNA, 25 bp, Homo sapien
taggcatccttaatcgcagaaacag

SEQ ID NO: 685978 - DNA, 25 bp, Homo sapien
ggagggtcttacttcctagaatctg

SEQ ID NO: 685979 - DNA, 25 bp, Homo sapien
tgagtgcttgagtcacagttggcgc

SEQ ID NO: 685980 - DNA, 25 bp, Homo sapien
tatgcatggcaacaccagaaagttc

SEQ ID NO: 685981 - DNA, 25 bp, Homo sapien
tcaaccgaataaatgtgaattgatc

SEQ ID NO: 685982 - DNA, 25 bp, Homo sapien
ccaggttctgcttccttcggtgctg

SEQ ID NO: 685983 - DNA, 25 bp, Homo sapien
ccgaataaatgtgaattgatcatgt

SEQ ID NO: 685984 - DNA, 25 bp, Homo sapien
aattgatcatgtgattaatacagtc

SEQ ID NO: 685985 - DNA, 25 bp, Homo sapien
cacggtgagttcctgacatgtacca

SEQ ID NO: 685986 - DNA, 25 bp, Homo sapien
gaagtttgccacacggtgagttcct

SEQ ID NO: 685987 - DNA, 25 bp, Homo sapien
ttcctgacatgtaccatttgttcct

SEQ ID NO: 685988 - DNA, 25 bp, Homo sapien
aaaagcggaagtttgccacacggtg

SEQ ID NO: 685989 - DNA, 25 bp, Homo sapien
gtactgctggcccatcgaaagcgtg

SEQ ID NO: 685990 - DNA, 25 bp, Homo sapien
tgctggcccatcgaaagcgtgctgc

SEQ ID NO: 685991 - DNA, 25 bp, Homo sapien
catcgaaagcgtgctgcttcattta

SEQ ID NO: 685992 - DNA, 25 bp, Homo sapien
tgtgtgtgtcttgggtgtactgctg

SEQ ID NO: 685993 - DNA, 25 bp, Homo sapien
agcggttcagtctcatattgaaatg

SEQ ID NO: 685994 - DNA, 25 bp, Homo sapien
gcggttcagtctcatattgaaatga

SEQ ID NO: 685995 - DNA, 25 bp, Homo sapien
gcaggtctcctggtccgtatacgca

SEQ ID NO: 685996 - DNA, 25 bp, Homo sapien
tgtgccgccgctctaagcaggtaac

SEQ ID NO: 685997 - DNA, 25 bp, Homo sapien
gaaggcgactgaatgagccacggca

SEQ ID NO: 685998 - DNA, 25 bp, Homo sapien
caggtaaccacaagcgggtctgtcg

SEQ ID NO: 685999 - DNA, 25 bp, Homo sapien
catccatcatgaacatttccttcct

SEQ ID NO: 686000 - DNA, 25 bp, Homo sapien
tttacatccatcatgaacatttcct

SEQ ID NO: 686001 - DNA, 25 bp, Homo sapien
ctttacatccatcatgaacatttcc

SEQ ID NO: 686002 - DNA, 25 bp, Homo sapien
tacatccatcatgaacatttccttc

SEQ ID NO: 686003 - DNA, 25 bp, Homo sapien
tcccagccagcgtttggtgtagcac

SEQ ID NO: 686004 - DNA, 25 bp, Homo sapien
ttcccagccagcgtttggtgtagca

SEQ ID NO: 686005 - DNA, 25 bp, Homo sapien
gggctgcggatgtctttggaccact

SEQ ID NO: 686006 - DNA, 25 bp, Homo sapien
ctctgggctgcggatgtctttggac

SEQ ID NO: 686007 - DNA, 25 bp, Homo sapien
cccagtagtgttgctctgggctgcg

SEQ ID NO: 686008 - DNA, 25 bp, Homo sapien
ttcagggtcacccagtagtgttgct

SEQ ID NO: 686009 - DNA, 25 bp, Homo sapien
gcatggatgtcagtcagtatgaact

SEQ ID NO: 686010 - DNA, 25 bp, Homo sapien
gtcttttgcatggatgtcagtcagt

SEQ ID NO: 686011 - DNA, 25 bp, Homo sapien
tgcatggatgtcagtcagtatgaac

SEQ ID NO: 686012 - DNA, 25 bp, Homo sapien
ttttgcatggatgtcagtcagtatg

SEQ ID NO: 686013 - DNA, 25 bp, Homo sapien
tatctgcctgtagtcttgtaaagcc

SEQ ID NO: 686014 - DNA, 25 bp, Homo sapien
tgtaaagccagcataagccaccttc

SEQ ID NO: 686015 - DNA, 25 bp, Homo sapien
tatttggaggtgcatagatacttcc

SEQ ID NO: 686016 - DNA, 25 bp, Homo sapien
cctttaggaacgaattcgagatgac

SEQ ID NO: 686017 - DNA, 25 bp, Homo sapien
cattttgaggtacataaatagctct

SEQ ID NO: 686018 - DNA, 25 bp, Homo sapien
acagttaaccaaggtttgcacagca

SEQ ID NO: 686019 - DNA, 25 bp, Homo sapien
ggtacataaatagctctgagaagct

SEQ ID NO: 686020 - DNA, 25 bp, Homo sapien
gcagtcttatacttcattggggcct

SEQ ID NO: 686021 - DNA, 25 bp, Homo sapien
tatgccaaagagaaatcgccctctt

SEQ ID NO: 686022 - DNA, 25 bp, Homo sapien
atatgccaaagagaaatcgccctct

SEQ ID NO: 686023 - DNA, 25 bp, Homo sapien
gaaatgcagcccccgagaaatcctg

SEQ ID NO: 686024 - DNA, 25 bp, Homo sapien
cagactttgtggctcgaagctggct

SEQ ID NO: 686025 - DNA, 25 bp, Homo sapien
tcacgacaagtccagactttgtggc

SEQ ID NO: 686026 - DNA, 25 bp, Homo sapien
tgactgccctcacgacaagtccaga

SEQ ID NO: 686027 - DNA, 25 bp, Homo sapien
gactttgtggctcgaagctggctca

SEQ ID NO: 686028 - DNA, 25 bp, Homo sapien
aggttttgttgccatctgtccctgg

SEQ ID NO: 686029 - DNA, 25 bp, Homo sapien
tgttgccatctgtccctggagagtt

SEQ ID NO: 686030 - DNA, 25 bp, Homo sapien
agtagagttgcttggcaggttttgt

SEQ ID NO: 686031 - DNA, 25 bp, Homo sapien
tgcttggcaggttttgttgccatct

SEQ ID NO: 686032 - DNA, 25 bp, Homo sapien
cttctctgagtatttccttgggacc

SEQ ID NO: 686033 - DNA, 25 bp, Homo sapien
agcacagagtattagaaaaacactg

SEQ ID NO: 686034 - DNA, 25 bp, Homo sapien
taatcttcaggggttgtggcattca

SEQ ID NO: 686035 - DNA, 25 bp, Homo sapien
gttgccaaagcacagagtattagaa

SEQ ID NO: 686036 - DNA, 25 bp, Homo sapien
actgagcagacagaatgtagtcccc

SEQ ID NO: 686037 - DNA, 25 bp, Homo sapien
tgacagtgaagaatcggaggcctac

SEQ ID NO: 686038 - DNA, 25 bp, Homo sapien
tttagtttccacgtaggcaggtcgc

SEQ ID NO: 686039 - DNA, 25 bp, Homo sapien
tccgccaagcgctccaaggaggagt

SEQ ID NO: 686040 - DNA, 25 bp, Homo sapien
gagccacaaagaggtccatcgctga

SEQ ID NO: 686041 - DNA, 25 bp, Homo sapien
caggatccttgttggtctagctaaa

SEQ ID NO: 686042 - DNA, 25 bp, Homo sapien
gatggatttcaaatacactgtgccc

SEQ ID NO: 686043 - DNA, 25 bp, Homo sapien
agtcctcaccggtgcagagttggca

SEQ ID NO: 686044 - DNA, 25 bp, Homo sapien
tcatcatttcgaagatagcagagtc

SEQ ID NO: 686045 - DNA, 25 bp, Homo sapien
ggcatgatcatggctcaccatagcc

SEQ ID NO: 686046 - DNA, 25 bp, Homo sapien
catagccttgacctcctgggctcag

SEQ ID NO: 686047 - DNA, 25 bp, Homo sapien
atgatcatggctcaccatagccttg

SEQ ID NO: 686048 - DNA, 25 bp, Homo sapien
gcatgatcatggctcaccatagcct

SEQ ID NO: 686049 - DNA, 25 bp, Homo sapien
acaattttaatcgaactatactctt

SEQ ID NO: 686050 - DNA, 25 bp, Homo sapien
caattttaatcgaactatactcttt

SEQ ID NO: 686051 - DNA, 25 bp, Homo sapien
gaaagaaagcgtattctcccctaga

SEQ ID NO: 686052 - DNA, 25 bp, Homo sapien
gctgggcctcaaagtgaccataaac

SEQ ID NO: 686053 - DNA, 25 bp, Homo sapien
tttcatgatcctgtgcccaaactga

SEQ ID NO: 686054 - DNA, 25 bp, Homo sapien
gatgaaggtgtaaagtagtaacagc

SEQ ID NO: 686055 - DNA, 25 bp, Homo sapien
tgtttgatgtatatttatcctgaga

SEQ ID NO: 686056 - DNA, 25 bp, Homo sapien
tatcctgagactagccatctaacca

SEQ ID NO: 686057 - DNA, 25 bp, Homo sapien
gatgtatatttatcctgagactagc

SEQ ID NO: 686058 - DNA, 25 bp, Homo sapien
tatttatcctgagactagccatcta

SEQ ID NO: 686059 - DNA, 25 bp, Homo sapien
tcacagcagcccagttttcctttgg

SEQ ID NO: 686060 - DNA, 25 bp, Homo sapien
tccgtgccctgtgttgtcacagcag

SEQ ID NO: 686061 - DNA, 25 bp, Homo sapien
catccgtgccctgtgttgtcacagc

SEQ ID NO: 686062 - DNA, 25 bp, Homo sapien
agcatccgtgccctgtgttgtcaca

SEQ ID NO: 686063 - DNA, 25 bp, Homo sapien
tgctgaataaattgactggtgtgtt

SEQ ID NO: 686064 - DNA, 25 bp, Homo sapien
ttgcctaatgcagccatggctcgtg

SEQ ID NO: 686065 - DNA, 25 bp, Homo sapien
ctacgcacaccggaagacagaggtc

SEQ ID NO: 686066 - DNA, 25 bp, Homo sapien
ctctttccttgcctaatgcagccat

SEQ ID NO: 686067 - DNA, 25 bp, Homo sapien
tcaatggcaaggtccgtactgatat

SEQ ID NO: 686068 - DNA, 25 bp, Homo sapien
acagacttaagtatgtcctcactgg

SEQ ID NO: 686069 - DNA, 25 bp, Homo sapien
aagtatgtcctcactggaaatgaag

SEQ ID NO: 686070 - DNA, 25 bp, Homo sapien
caatggcaaggtccgtactgatata

SEQ ID NO: 686071 - DNA, 25 bp, Homo sapien
caacagcattgacaagtcgggagag

SEQ ID NO: 686072 - DNA, 25 bp, Homo sapien
cctctttggaagtggcgcgctgttg

SEQ ID NO: 686073 - DNA, 25 bp, Homo sapien
gaagaggagtcgcagatctgcccga

SEQ ID NO: 686074 - DNA, 25 bp, Homo sapien
agtccgcgtcttcacgtgggcaagg

SEQ ID NO: 686075 - DNA, 25 bp, Homo sapien
gagtaagtgagtttaggctccctag

SEQ ID NO: 686076 - DNA, 25 bp, Homo sapien
ggaatgaatggcctttgccaagcgg

SEQ ID NO: 686077 - DNA, 25 bp, Homo sapien
tttgccaagcggttccggatcctct

SEQ ID NO: 686078 - DNA, 25 bp, Homo sapien
cagggaagctccttgggaatgaatg

SEQ ID NO: 686079 - DNA, 25 bp, Homo sapien
agcggttccggatcctctgggtcct

SEQ ID NO: 686080 - DNA, 25 bp, Homo sapien
cacggtgctgcgcgagccctcagtg

SEQ ID NO: 686081 - DNA, 25 bp, Homo sapien
ggcacggtgctgcgcgagccctcag

SEQ ID NO: 686082 - DNA, 25 bp, Homo sapien
ggtgctgcgcgagccctcagtgccc

SEQ ID NO: 686083 - DNA, 25 bp, Homo sapien
acggtgctgcgcgagccctcagtgc

SEQ ID NO: 686084 - DNA, 25 bp, Homo sapien
tcctccgggcagctttggctagtgt

SEQ ID NO: 686085 - DNA, 25 bp, Homo sapien
ggaggcatatcggttcctccgggca

SEQ ID NO: 686086 - DNA, 25 bp, Homo sapien
tcctgcgtagacgctcccaggcggg

SEQ ID NO: 686087 - DNA, 25 bp, Homo sapien
ggctcccttcgcctcctgcgtagac

SEQ ID NO: 686088 - DNA, 25 bp, Homo sapien
cgtggcgctcgggttttattcctgc

SEQ ID NO: 686089 - DNA, 25 bp, Homo sapien
tcctgcccggcgcttctttcccagg

SEQ ID NO: 686090 - DNA, 25 bp, Homo sapien
tttcccagggcgagtagaggcttct

SEQ ID NO: 686091 - DNA, 25 bp, Homo sapien
gtagaggcttctgagtgaccggccc

SEQ ID NO: 686092 - DNA, 25 bp, Homo sapien
cgctgggctggtccagtgcgcgcgg

SEQ ID NO: 686093 - DNA, 25 bp, Homo sapien
gggccgctgggctggtccagtgcgc

SEQ ID NO: 686094 - DNA, 25 bp, Homo sapien
gccgctgggctggtccagtgcgcgc

SEQ ID NO: 686095 - DNA, 25 bp, Homo sapien
ggctggtccagtgcgcgcgggttcc

SEQ ID NO: 686096 - DNA, 25 bp, Homo sapien
tttctcggaaaagtgccccgtctgc

SEQ ID NO: 686097 - DNA, 25 bp, Homo sapien
cgggcgctttcctaagcggcaaaca

SEQ ID NO: 686098 - DNA, 25 bp, Homo sapien
tcctaagcggcaaacagccctgctt

SEQ ID NO: 686099 - DNA, 25 bp, Homo sapien
tctcggaaaagtgccccgtctgcaa

SEQ ID NO: 686100 - DNA, 25 bp, Homo sapien
ttggcggacactcctccaaggccgg

SEQ ID NO: 686101 - DNA, 25 bp, Homo sapien
tggcggacactcctccaaggccggc

SEQ ID NO: 686102 - DNA, 25 bp, Homo sapien
cttggcggacactcctccaaggccg

SEQ ID NO: 686103 - DNA, 25 bp, Homo sapien
gagtgctccagcctgtcggacaggt

SEQ ID NO: 686104 - DNA, 25 bp, Homo sapien
gccgtaagagctcgcgagtgctcca

SEQ ID NO: 686105 - DNA, 25 bp, Homo sapien
acgcaggcagcgctaggcgagctca

SEQ ID NO: 686106 - DNA, 25 bp, Homo sapien
acaggttgagctagagtttcggaga

SEQ ID NO: 686107 - DNA, 25 bp, Homo sapien
taactttgtctcgttcctgttgggc

SEQ ID NO: 686108 - DNA, 25 bp, Homo sapien
taaatactggtgcacttcttacgac

SEQ ID NO: 686109 - DNA, 25 bp, Homo sapien
cttgaaaagggtaggcacgaagcaa

SEQ ID NO: 686110 - DNA, 25 bp, Homo sapien
ccaagtccccgtggaggttctgtat

SEQ ID NO: 686111 - DNA, 25 bp, Homo sapien
cattcagtcgaatgcaagcagtgga

SEQ ID NO: 686112 - DNA, 25 bp, Homo sapien
gatcgtgctcatccacccaagacat

SEQ ID NO: 686113 - DNA, 25 bp, Homo sapien
tctctttggaaatgagatcgtgctc

SEQ ID NO: 686114 - DNA, 25 bp, Homo sapien
gacgtgcagcatgccagtgttttcc

SEQ ID NO: 686115 - DNA, 25 bp, Homo sapien
gaagcatgggaactttacagtggag

SEQ ID NO: 686116 - DNA, 25 bp, Homo sapien
cggtgctaacctcgccagaaaaggg

SEQ ID NO: 686117 - DNA, 25 bp, Homo sapien
gagacagacacttgacgaggagtgc

SEQ ID NO: 686118 - DNA, 25 bp, Homo sapien
gactctgactgccagagctgtgcaa

SEQ ID NO: 686119 - DNA, 25 bp, Homo sapien
taagtcttggtggtgatctaggagc

SEQ ID NO: 686120 - DNA, 25 bp, Homo sapien
ttagtaggggcatctctttcattgt

SEQ ID NO: 686121 - DNA, 25 bp, Homo sapien
ccctcattagtattcctgttagtag

SEQ ID NO: 686122 - DNA, 25 bp, Homo sapien
tgatctaggagctggtgtgcacggc

SEQ ID NO: 686123 - DNA, 25 bp, Homo sapien
cttgcacagggctacttgagaccat

SEQ ID NO: 686124 - DNA, 25 bp, Homo sapien
gttttggactgagctaggcacattc

SEQ ID NO: 686125 - DNA, 25 bp, Homo sapien
acattctcttgcacagggctacttg

SEQ ID NO: 686126 - DNA, 25 bp, Homo sapien
ttttggactgagctaggcacattct

SEQ ID NO: 686127 - DNA, 25 bp, Homo sapien
agttatagatgtcgccacgtctggt

SEQ ID NO: 686128 - DNA, 25 bp, Homo sapien
tatagatgtcgccacgtctggtgtt

SEQ ID NO: 686129 - DNA, 25 bp, Homo sapien
gatgtcgccacgtctggtgttttct

SEQ ID NO: 686130 - DNA, 25 bp, Homo sapien
tagatgtcgccacgtctggtgtttt

SEQ ID NO: 686131 - DNA, 25 bp, Homo sapien
gagccaggaccggacctttgtggat

SEQ ID NO: 686132 - DNA, 25 bp, Homo sapien
gactttgttgctacagaaccccaga

SEQ ID NO: 686133 - DNA, 25 bp, Homo sapien
tgcacagggcctatcatcctagggt

SEQ ID NO: 686134 - DNA, 25 bp, Homo sapien
cactggagttatttacaaggcctgc

SEQ ID NO: 686135 - DNA, 25 bp, Homo sapien
cactcaggcaagttgatgaaatagt

SEQ ID NO: 686136 - DNA, 25 bp, Homo sapien
acatagtaggcactccactcaggca

SEQ ID NO: 686137 - DNA, 25 bp, Homo sapien
ttctccatggactcacagcaccaaa

SEQ ID NO: 686138 - DNA, 25 bp, Homo sapien
cactggctcaggagcctgagatctc

SEQ ID NO: 686139 - DNA, 25 bp, Homo sapien
tacagaggacactcagtaatggcat

SEQ ID NO: 686140 - DNA, 25 bp, Homo sapien
acatacagaggacactcagtaatgg

SEQ ID NO: 686141 - DNA, 25 bp, Homo sapien
tgacacatacagaggacactcagta

SEQ ID NO: 686142 - DNA, 25 bp, Homo sapien
gacacatacagaggacactcagtaa

SEQ ID NO: 686143 - DNA, 25 bp, Homo sapien
ctttttctttgcctgcctaacaggc

SEQ ID NO: 686144 - DNA, 25 bp, Homo sapien
tttttctttgcctgcctaacaggca

SEQ ID NO: 686145 - DNA, 25 bp, Homo sapien
ttttctttgcctgcctaacaggcat

SEQ ID NO: 686146 - DNA, 25 bp, Homo sapien
tgccctctgtgaaccgcacaagcct

SEQ ID NO: 686147 - DNA, 25 bp, Homo sapien
cacaagcctggaataacttcttcct

SEQ ID NO: 686148 - DNA, 25 bp, Homo sapien
ctctgtgaaccgcacaagcctggaa

SEQ ID NO: 686149 - DNA, 25 bp, Homo sapien
tgaaccgcacaagcctggaataact

SEQ ID NO: 686150 - DNA, 25 bp, Homo sapien
attatggaacgtttcacaaatttgc

SEQ ID NO: 686151 - DNA, 25 bp, Homo sapien
tgtgcaggggacacgctaatcttct

SEQ ID NO: 686152 - DNA, 25 bp, Homo sapien
tagtgtatgtgctgccggagcgagc

SEQ ID NO: 686153 - DNA, 25 bp, Homo sapien
gtgtatgtgctgccggagcgagcac

SEQ ID NO: 686154 - DNA, 25 bp, Homo sapien
gatttactgccgacaccacatgggc

SEQ ID NO: 686155 - DNA, 25 bp, Homo sapien
cttaataaggagtccacacgctggg

SEQ ID NO: 686156 - DNA, 25 bp, Homo sapien
cacatctgtgctctgcggattccca

SEQ ID NO: 686157 - DNA, 25 bp, Homo sapien
gattgccttgcagatgggctccacc

SEQ ID NO: 686158 - DNA, 25 bp, Homo sapien
ctgctcctggttctcgaactctcgt

SEQ ID NO: 686159 - DNA, 25 bp, Homo sapien
ctcctggttctcgaactctcgttta

SEQ ID NO: 686160 - DNA, 25 bp, Homo sapien
tgctcctggttctcgaactctcgtt

SEQ ID NO: 686161 - DNA, 25 bp, Homo sapien
gctcctggttctcgaactctcgttt

SEQ ID NO: 686162 - DNA, 25 bp, Homo sapien
agctggtgcctgcaattgtcacccg

SEQ ID NO: 686163 - DNA, 25 bp, Homo sapien
gagctggtgcctgcaattgtcaccc

SEQ ID NO: 686164 - DNA, 25 bp, Homo sapien
gctggtgcctgcaattgtcacccgg

SEQ ID NO: 686165 - DNA, 25 bp, Homo sapien
ctggtgcctgcaattgtcacccggt

SEQ ID NO: 686166 - DNA, 25 bp, Homo sapien
ggtccagctgtgaaacacgtaaaga

SEQ ID NO: 686167 - DNA, 25 bp, Homo sapien
ccaaaaacatgagcccttgacccca

SEQ ID NO: 686168 - DNA, 25 bp, Homo sapien
gcctgggctaggtgcacccccaaaa

SEQ ID NO: 686169 - DNA, 25 bp, Homo sapien
ctcagttggaataaggcaggcctgg

SEQ ID NO: 686170 - DNA, 25 bp, Homo sapien
cccccaatacctggacttgttctga

SEQ ID NO: 686171 - DNA, 25 bp, Homo sapien
ggtgcacccccaatacctggacttg

SEQ ID NO: 686172 - DNA, 25 bp, Homo sapien
tgcacccccaatacctggacttgtt

SEQ ID NO: 686173 - DNA, 25 bp, Homo sapien
tgctctggggtgcacccccaatacc

SEQ ID NO: 686174 - DNA, 25 bp, Homo sapien
gtcctcattccccttagagcaggtc

SEQ ID NO: 686175 - DNA, 25 bp, Homo sapien
agtgtgtcctcattccccttagagc

SEQ ID NO: 686176 - DNA, 25 bp, Homo sapien
attccccttagagcaggtccacggc

SEQ ID NO: 686177 - DNA, 25 bp, Homo sapien
tcattccccttagagcaggtccacg

SEQ ID NO: 686178 - DNA, 25 bp, Homo sapien
cctggctgcgcccagtagtgatggc

SEQ ID NO: 686179 - DNA, 25 bp, Homo sapien
ggtctcatgtgaagtcgggcctcca

SEQ ID NO: 686180 - DNA, 25 bp, Homo sapien
gatttgcaggctgactcctatgggt

SEQ ID NO: 686181 - DNA, 25 bp, Homo sapien
ccagcatcctcggtcggtctgtgag

SEQ ID NO: 686182 - DNA, 25 bp, Homo sapien
atatttatcattttggcctccgtta

SEQ ID NO: 686183 - DNA, 25 bp, Homo sapien
agatgagctgcactgagaatattta

SEQ ID NO: 686184 - DNA, 25 bp, Homo sapien
catccggcatacactgctgtgtgca

SEQ ID NO: 686185 - DNA, 25 bp, Homo sapien
tggcctccgttataaggtatcctcc

SEQ ID NO: 686186 - DNA, 25 bp, Homo sapien
caggggtgaggaatcagtagaacct

SEQ ID NO: 686187 - DNA, 25 bp, Homo sapien
ccattgcaggggtgaggaatcagta

SEQ ID NO: 686188 - DNA, 25 bp, Homo sapien
ttccccattgcaggggtgaggaatc

SEQ ID NO: 686189 - DNA, 25 bp, Homo sapien
ggtgaggaatcagtagaacctgcat

SEQ ID NO: 686190 - DNA, 25 bp, Homo sapien
gttttccccaacaacagtcagccat

SEQ ID NO: 686191 - DNA, 25 bp, Homo sapien
agttttccccaacaacagtcagcca

SEQ ID NO: 686192 - DNA, 25 bp, Homo sapien
agttctgccctttgacataggattc

SEQ ID NO: 686193 - DNA, 25 bp, Homo sapien
cctttgacataggattctagttttc

SEQ ID NO: 686194 - DNA, 25 bp, Homo sapien
tgctctaagagtattggtgagcgcc

SEQ ID NO: 686195 - DNA, 25 bp, Homo sapien
ttatccacagccctagagctgcggg

SEQ ID NO: 686196 - DNA, 25 bp, Homo sapien
gatgcatgtgccgtctacagaggga

SEQ ID NO: 686197 - DNA, 25 bp, Homo sapien
gcaaacggcgtcaatccctgaagga

SEQ ID NO: 686198 - DNA, 25 bp, Homo sapien
ttatttatgaaattgggaggcatgc

SEQ ID NO: 686199 - DNA, 25 bp, Homo sapien
gacattatccagtattctcttgacc

SEQ ID NO: 686200 - DNA, 25 bp, Homo sapien
ggcatgcctcatggttacggaaact

SEQ ID NO: 686201 - DNA, 25 bp, Homo sapien
gcctctcctgcaggtttcacaggag

SEQ ID NO: 686202 - DNA, 25 bp, Homo sapien
tgcaaagagaagcgatttttttttc

SEQ ID NO: 686203 - DNA, 25 bp, Homo sapien
ctgcaaagagaagcgattttttttt

SEQ ID NO: 686204 - DNA, 25 bp, Homo sapien
ccctaggtaggcatttgagaactga

SEQ ID NO: 686205 - DNA, 25 bp, Homo sapien
tactcactagttatgaggccctggg

SEQ ID NO: 686206 - DNA, 25 bp, Homo sapien
ggagaagaaacactgccttaccctc

SEQ ID NO: 686207 - DNA, 25 bp, Homo sapien
taacagacttgttcgctgcaggaga

SEQ ID NO: 686208 - DNA, 25 bp, Homo sapien
cctcatcaatgatcttttgcacttt

SEQ ID NO: 686209 - DNA, 25 bp, Homo sapien
aaacctcatcaatgatcttttgcac

SEQ ID NO: 686210 - DNA, 25 bp, Homo sapien
tcaatgatcttttgcactttccgca

SEQ ID NO: 686211 - DNA, 25 bp, Homo sapien
gatcttttgcactttccgcaaagaa

SEQ ID NO: 686212 - DNA, 25 bp, Homo sapien
tctcctggctgggaatgcgagttga

SEQ ID NO: 686213 - DNA, 25 bp, Homo sapien
aatgcgagttgacggagggctccag

SEQ ID NO: 686214 - DNA, 25 bp, Homo sapien
tctggtgggcgtcccacatctcctg

SEQ ID NO: 686215 - DNA, 25 bp, Homo sapien
tcaaggattctgatctccacagtcc

SEQ ID NO: 686216 - DNA, 25 bp, Homo sapien
ctattccagagccagggcacacagg

SEQ ID NO: 686217 - DNA, 25 bp, Homo sapien
ccagagccagggcacacaggaggca

SEQ ID NO: 686218 - DNA, 25 bp, Homo sapien
agagccagggcacacaggaggcaag

SEQ ID NO: 686219 - DNA, 25 bp, Homo sapien
agccagggcacacaggaggcaaggc

SEQ ID NO: 686220 - DNA, 25 bp, Homo sapien
aggagggcacaagcgctcagaaagc

SEQ ID NO: 686221 - DNA, 25 bp, Homo sapien
gggcacaagcgctcagaaagctgac

SEQ ID NO: 686222 - DNA, 25 bp, Homo sapien
gagggcacaagcgctcagaaagctg

SEQ ID NO: 686223 - DNA, 25 bp, Homo sapien
agaggagggcacaagcgctcagaaa

SEQ ID NO: 686224 - DNA, 25 bp, Homo sapien
caccagcatcatgactggggcaagt

SEQ ID NO: 686225 - DNA, 25 bp, Homo sapien
cgggtgatgatccatgagctctgct

SEQ ID NO: 686226 - DNA, 25 bp, Homo sapien
atgagctctgctccgtcaccagcat

SEQ ID NO: 686227 - DNA, 25 bp, Homo sapien
ctccacgggtgatgatccatgagct

SEQ ID NO: 686228 - DNA, 25 bp, Homo sapien
cacagggctggaccttcttggaagg

SEQ ID NO: 686229 - DNA, 25 bp, Homo sapien
gtttgctgtaactttggattctggg

SEQ ID NO: 686230 - DNA, 25 bp, Homo sapien
ttggtgggccttgtatgagcttcag

SEQ ID NO: 686231 - DNA, 25 bp, Homo sapien
tcttggaaggcctcggatatgaaca

SEQ ID NO: 686232 - DNA, 25 bp, Homo sapien
tctccgtcagcccaggggtacttag

SEQ ID NO: 686233 - DNA, 25 bp, Homo sapien
tccatcccgtacctctgctaagatg

SEQ ID NO: 686234 - DNA, 25 bp, Homo sapien
gggtacttaggagagacaagcaaag

SEQ ID NO: 686235 - DNA, 25 bp, Homo sapien
gacaagcaaagggatacgtttccat

SEQ ID NO: 686236 - DNA, 25 bp, Homo sapien
gctctggtagagtgtggaggtgaaa

SEQ ID NO: 686237 - DNA, 25 bp, Homo sapien
ctctggtagagtgtggaggtgaaac

SEQ ID NO: 686238 - DNA, 25 bp, Homo sapien
cctattagattccaatcagtttcgc

SEQ ID NO: 686239 - DNA, 25 bp, Homo sapien
cggggcctacgcctattagattcca

SEQ ID NO: 686240 - DNA, 25 bp, Homo sapien
tacgcctattagattccaatcagtt

SEQ ID NO: 686241 - DNA, 25 bp, Homo sapien
gcctacgcctattagattccaatca

SEQ ID NO: 686242 - DNA, 25 bp, Homo sapien
ctgtgtaaactgtagggtgcctcgc

SEQ ID NO: 686243 - DNA, 25 bp, Homo sapien
aatggccggctcttttgcatgcagg

SEQ ID NO: 686244 - DNA, 25 bp, Homo sapien
ccctgggcgatgtcaatgggataat

SEQ ID NO: 686245 - DNA, 25 bp, Homo sapien
taattacgatgatctaatggccggc

SEQ ID NO: 686246 - DNA, 25 bp, Homo sapien
ggacggaagccctcgccgggcagat

SEQ ID NO: 686247 - DNA, 25 bp, Homo sapien
cctcgccgggcagatggacccgctc

SEQ ID NO: 686248 - DNA, 25 bp, Homo sapien
ccgccccgcgcacaggcgtgtctac

SEQ ID NO: 686249 - DNA, 25 bp, Homo sapien
cggctggcgggacggaagccctcgc

SEQ ID NO: 686250 - DNA, 25 bp, Homo sapien
gtgtgcgaggcgatgggcagccgcc

SEQ ID NO: 686251 - DNA, 25 bp, Homo sapien
ccgtctcccgatgcagccaagagaa

SEQ ID NO: 686252 - DNA, 25 bp, Homo sapien
ccaagagaacggtggttttgcattt

SEQ ID NO: 686253 - DNA, 25 bp, Homo sapien
caaacctcttcttgtcttaatgaca

SEQ ID NO: 686254 - DNA, 25 bp, Homo sapien
tgaggctgcaccgtaggagcttgcc

SEQ ID NO: 686255 - DNA, 25 bp, Homo sapien
ggagcttgccggtctccgaccgctg

SEQ ID NO: 686256 - DNA, 25 bp, Homo sapien
cgaaagaatgatcgatgatgaggct

SEQ ID NO: 686257 - DNA, 25 bp, Homo sapien
tatttgatatgtcgaaagaatgatc

SEQ ID NO: 686258 - DNA, 25 bp, Homo sapien
caagtggcatcgagtctgcaggata

SEQ ID NO: 686259 - DNA, 25 bp, Homo sapien
cagcaaatgacatcgcaaagtcgat

SEQ ID NO: 686260 - DNA, 25 bp, Homo sapien
ggaaacactactcggcacagcaaat

SEQ ID NO: 686261 - DNA, 25 bp, Homo sapien
aatgcaagccgtgcttcagaacgcg

SEQ ID NO: 686262 - DNA, 25 bp, Homo sapien
tgctttcaggatcatgcgagttttc

SEQ ID NO: 686263 - DNA, 25 bp, Homo sapien
ggatcatgcgagttttcacaggttt

SEQ ID NO: 686264 - DNA, 25 bp, Homo sapien
caggatttatggaggcctttgcttt

SEQ ID NO: 686265 - DNA, 25 bp, Homo sapien
tgtgcaggatttatggaggcctttg

SEQ ID NO: 686266 - DNA, 25 bp, Homo sapien
gacagatgaaatcggtggctgctcg

SEQ ID NO: 686267 - DNA, 25 bp, Homo sapien
tcgtcggcccaagattgacagatga

SEQ ID NO: 686268 - DNA, 25 bp, Homo sapien
aattctggccccagatgtcgtcggc

SEQ ID NO: 686269 - DNA, 25 bp, Homo sapien
tctctgtgagttacagctgcgtgca

SEQ ID NO: 686270 - DNA, 25 bp, Homo sapien
gctgggccacaaggatcgggctggg

SEQ ID NO: 686271 - DNA, 25 bp, Homo sapien
accctgaaagcggttagccactagc

SEQ ID NO: 686272 - DNA, 25 bp, Homo sapien
tgaaagcggttagccactagctggg

SEQ ID NO: 686273 - DNA, 25 bp, Homo sapien
cctgtagctggtgattgatgttgag

SEQ ID NO: 686274 - DNA, 25 bp, Homo sapien
tccagagtgtcctagggagagcagc

SEQ ID NO: 686275 - DNA, 25 bp, Homo sapien
tcatgagaccgtcaacagaagacag

SEQ ID NO: 686276 - DNA, 25 bp, Homo sapien
ggaccctggctgcatgccccgtgag

SEQ ID NO: 686277 - DNA, 25 bp, Homo sapien
attaacatccagctcatgagaccgt

SEQ ID NO: 686278 - DNA, 25 bp, Homo sapien
ctcccaagtagccactgtggtcgag

SEQ ID NO: 686279 - DNA, 25 bp, Homo sapien
tgccaccctgagctgaaagagctcc

SEQ ID NO: 686280 - DNA, 25 bp, Homo sapien
agtagccactgtggtcgaggctgcc

SEQ ID NO: 686281 - DNA, 25 bp, Homo sapien
gccaccctgagctgaaagagctcca

SEQ ID NO: 686282 - DNA, 25 bp, Homo sapien
cacaccactgcctgagtgcgaggtg

SEQ ID NO: 686283 - DNA, 25 bp, Homo sapien
tctgtgcatatctggtcttctggtg

SEQ ID NO: 686284 - DNA, 25 bp, Homo sapien
ggttcctgcacacatggcttcggtc

SEQ ID NO: 686285 - DNA, 25 bp, Homo sapien
tctccctctgtgcatatctggtctt

SEQ ID NO: 686286 - DNA, 25 bp, Homo sapien
catcacgtgacaacaagttggtgca

SEQ ID NO: 686287 - DNA, 25 bp, Homo sapien
cgtcttttaccatcacgtgacaaca

SEQ ID NO: 686288 - DNA, 25 bp, Homo sapien
cacgtgacaacaagttggtgcaaaa

SEQ ID NO: 686289 - DNA, 25 bp, Homo sapien
tttaccatcacgtgacaacaagttg

SEQ ID NO: 686290 - DNA, 25 bp, Homo sapien
gccctgcctcgcgactgtcagtcat

SEQ ID NO: 686291 - DNA, 25 bp, Homo sapien
gggccactgccctgcctcgcgactg

SEQ ID NO: 686292 - DNA, 25 bp, Homo sapien
gtgttgtgaatgagttggcgcaggg

SEQ ID NO: 686293 - DNA, 25 bp, Homo sapien
cacgtgatgacaggtgttgtgaatg

SEQ ID NO: 686294 - DNA, 25 bp, Homo sapien
ttatgctccattaagcccacgcagg

SEQ ID NO: 686295 - DNA, 25 bp, Homo sapien
ccttgagccgggaaaaatgcggtcg

SEQ ID NO: 686296 - DNA, 25 bp, Homo sapien
tagatgcgggcaaatgcaaggccac

SEQ ID NO: 686297 - DNA, 25 bp, Homo sapien
aaggctgctttcacccgggccagtg

SEQ ID NO: 686298 - DNA, 25 bp, Homo sapien
ggccctccttgaacccgagccagcc

SEQ ID NO: 686299 - DNA, 25 bp, Homo sapien
aggccctccttgaacccgagccagc

SEQ ID NO: 686300 - DNA, 25 bp, Homo sapien
acaggccctccttgaacccgagcca

SEQ ID NO: 686301 - DNA, 25 bp, Homo sapien
cacaggccctccttgaacccgagcc

SEQ ID NO: 686302 - DNA, 25 bp, Homo sapien
tggaaaggttttatcccagcggatc

SEQ ID NO: 686303 - DNA, 25 bp, Homo sapien
agatagaaccactcttcaatagatg

SEQ ID NO: 686304 - DNA, 25 bp, Homo sapien
cggatcataaccaccttgcaaagca

SEQ ID NO: 686305 - DNA, 25 bp, Homo sapien
ccttgcaaagcagatagaaccactc

SEQ ID NO: 686306 - DNA, 25 bp, Homo sapien
aaaggtgcactttgtctgatcaggc

SEQ ID NO: 686307 - DNA, 25 bp, Homo sapien
ctaactacatttcctggaggtgccc

SEQ ID NO: 686308 - DNA, 25 bp, Homo sapien
tctctactacatcgaagcagccggt

SEQ ID NO: 686309 - DNA, 25 bp, Homo sapien
gcagccggtacctcacatgtgtatt

SEQ ID NO: 686310 - DNA, 25 bp, Homo sapien
tctggggagcggagtgccttccagg

SEQ ID NO: 686311 - DNA, 25 bp, Homo sapien
ggagtgccttccaggcactttccct

SEQ ID NO: 686312 - DNA, 25 bp, Homo sapien
gcggagtgccttccaggcactttcc

SEQ ID NO: 686313 - DNA, 25 bp, Homo sapien
ggagcggagtgccttccaggcactt

SEQ ID NO: 686314 - DNA, 25 bp, Homo sapien
tctccggtgggtcgtttctgtaaca

SEQ ID NO: 686315 - DNA, 25 bp, Homo sapien
gttatagaggcttcccctgtgggct

SEQ ID NO: 686316 - DNA, 25 bp, Homo sapien
tgccattgccgacatcagcgtgagt

SEQ ID NO: 686317 - DNA, 25 bp, Homo sapien
aggctgcggagtgagatcccttcca

SEQ ID NO: 686318 - DNA, 25 bp, Homo sapien
tggtgtaacctttgttagcaagttc

SEQ ID NO: 686319 - DNA, 25 bp, Homo sapien
ggtgtaacctttgttagcaagttca

SEQ ID NO: 686320 - DNA, 25 bp, Homo sapien
acctttgttagcaagttcatgtcaa

SEQ ID NO: 686321 - DNA, 25 bp, Homo sapien
ttaatctaggtcagggagtacctgc

SEQ ID NO: 686322 - DNA, 25 bp, Homo sapien
gaaaatcattcgactcacaggaggt

SEQ ID NO: 686323 - DNA, 25 bp, Homo sapien
caaggagggaccgtggaacttgcca

SEQ ID NO: 686324 - DNA, 25 bp, Homo sapien
gaaagatcctgttccaaggtcatgc

SEQ ID NO: 686325 - DNA, 25 bp, Homo sapien
cagtggaaccgctgctgtgtaggcc

SEQ ID NO: 686326 - DNA, 25 bp, Homo sapien
gaagttgggtccagagccctttaca

SEQ ID NO: 686327 - DNA, 25 bp, Homo sapien
gccctttacagccacgaggccaagg

SEQ ID NO: 686328 - DNA, 25 bp, Homo sapien
gccttttccgaatctcagcctgggt

SEQ ID NO: 686329 - DNA, 25 bp, Homo sapien
ctgggtgagccgaattcttccaggg

SEQ ID NO: 686330 - DNA, 25 bp, Homo sapien
gggattggatccagccagtgatgct

SEQ ID NO: 686331 - DNA, 25 bp, Homo sapien
tggatccagccagtgatgcttacgc

SEQ ID NO: 686332 - DNA, 25 bp, Homo sapien
tctgcagggggattggatccagcca

SEQ ID NO: 686333 - DNA, 25 bp, Homo sapien
attggatccagccagtgatgcttac

SEQ ID NO: 686334 - DNA, 25 bp, Homo sapien
ttatctcgagtgaatattgccaggt

SEQ ID NO: 686335 - DNA, 25 bp, Homo sapien
tatctcgagtgaatattgccaggtt

SEQ ID NO: 686336 - DNA, 25 bp, Homo sapien
tctcgagtgaatattgccaggtttc

SEQ ID NO: 686337 - DNA, 25 bp, Homo sapien
atctcgagtgaatattgccaggttt

SEQ ID NO: 686338 - DNA, 25 bp, Homo sapien
tctgcttctagggatgcgtgctgct

SEQ ID NO: 686339 - DNA, 25 bp, Homo sapien
tgagcctttgattcctattttctgc

SEQ ID NO: 686340 - DNA, 25 bp, Homo sapien
tctgagcagggcgtctgagcctttg

SEQ ID NO: 686341 - DNA, 25 bp, Homo sapien
cctggaccggcactctgagcagggc

SEQ ID NO: 686342 - DNA, 25 bp, Homo sapien
gctgtgggatgtggacgaagatgct

SEQ ID NO: 686343 - DNA, 25 bp, Homo sapien
acctgagacacgagctccctcagcg

SEQ ID NO: 686344 - DNA, 25 bp, Homo sapien
ggatgtggacgaagatgctgagatg

SEQ ID NO: 686345 - DNA, 25 bp, Homo sapien
agcacctgagacacgagctccctca

SEQ ID NO: 686346 - DNA, 25 bp, Homo sapien
ctgggccatcagggagatcatggcc

SEQ ID NO: 686347 - DNA, 25 bp, Homo sapien
ggccatcagggagatcatggccagc

SEQ ID NO: 686348 - DNA, 25 bp, Homo sapien
tgggccatcagggagatcatggcca

SEQ ID NO: 686349 - DNA, 25 bp, Homo sapien
gccatcagggagatcatggccagca

SEQ ID NO: 686350 - DNA, 25 bp, Homo sapien
cctctgaagacctgtccctgagatt

SEQ ID NO: 686351 - DNA, 25 bp, Homo sapien
cgctcctccgcttcgcttcccactc

SEQ ID NO: 686352 - DNA, 25 bp, Homo sapien
agacctgtccctgagattccagggc

SEQ ID NO: 686353 - DNA, 25 bp, Homo sapien
gcttcgcttcccactcatcatccat

SEQ ID NO: 686354 - DNA, 25 bp, Homo sapien
caaactgagactgaggccgtgtcaa

SEQ ID NO: 686355 - DNA, 25 bp, Homo sapien
gaagggtagccctgctcagaactga

SEQ ID NO: 686356 - DNA, 25 bp, Homo sapien
tggctctcgaagctgtcaaacaggc

SEQ ID NO: 686357 - DNA, 25 bp, Homo sapien
caaacaggccctctgcaaactgaga

SEQ ID NO: 686358 - DNA, 25 bp, Homo sapien
cccagcgggacctgatgagacatca

SEQ ID NO: 686359 - DNA, 25 bp, Homo sapien
gagagctcacgtgacctccattatc

SEQ ID NO: 686360 - DNA, 25 bp, Homo sapien
cattacaagccgatactggctgccc

SEQ ID NO: 686361 - DNA, 25 bp, Homo sapien
gagacatcagagagctcacgtgacc

SEQ ID NO: 686362 - DNA, 25 bp, Homo sapien
ctaggtgcacatgcctgagtccacc

SEQ ID NO: 686363 - DNA, 25 bp, Homo sapien
gctcggcaaccacagctttggcttc

SEQ ID NO: 686364 - DNA, 25 bp, Homo sapien
gcttcattctcaggacctgcgtgta

SEQ ID NO: 686365 - DNA, 25 bp, Homo sapien
ctcaggacctgcgtgtagcgagcga

SEQ ID NO: 686366 - DNA, 25 bp, Homo sapien
tagcgagcgactccgcacgagcttg

SEQ ID NO: 686367 - DNA, 25 bp, Homo sapien
aatatgctgagcacccaccagaggg

SEQ ID NO: 686368 - DNA, 25 bp, Homo sapien
ctgagaatatgctgagcacccacca

SEQ ID NO: 686369 - DNA, 25 bp, Homo sapien
tgctgagcacccaccagagggcgtc

SEQ ID NO: 686370 - DNA, 25 bp, Homo sapien
acccaccagagggcgtccgcactca

SEQ ID NO: 686371 - DNA, 25 bp, Homo sapien
gacctgccaggtggccataacatcc

SEQ ID NO: 686372 - DNA, 25 bp, Homo sapien
cccagagcctcagacttgcggggag

SEQ ID NO: 686373 - DNA, 25 bp, Homo sapien
ctgccctgagcggtgaccccagagc

SEQ ID NO: 686374 - DNA, 25 bp, Homo sapien
aggtggccataacatccccagaggc

SEQ ID NO: 686375 - DNA, 25 bp, Homo sapien
gcggaggctccctgcaatggaagaa

SEQ ID NO: 686376 - DNA, 25 bp, Homo sapien
aagtatctcttgaatgccggctagg

SEQ ID NO: 686377 - DNA, 25 bp, Homo sapien
tccagtcggtggaaaggccttagag

SEQ ID NO: 686378 - DNA, 25 bp, Homo sapien
caatttgacgcatgaacctggtgag

SEQ ID NO: 686379 - DNA, 25 bp, Homo sapien
tcttgtgcttgctattataagctgc

SEQ ID NO: 686380 - DNA, 25 bp, Homo sapien
ccattaatgtcggatagatggcaat

SEQ ID NO: 686381 - DNA, 25 bp, Homo sapien
caatttcgagtcttgtgcttgctat

SEQ ID NO: 686382 - DNA, 25 bp, Homo sapien
tcggatagatggcaatttcgagtct

SEQ ID NO: 686383 - DNA, 25 bp, Homo sapien
caggaaggatccaggcttacaccac

SEQ ID NO: 686384 - DNA, 25 bp, Homo sapien
gatctcgtcgcctctccatctgatt

SEQ ID NO: 686385 - DNA, 25 bp, Homo sapien
caggattctgatcgatgggtacccc

SEQ ID NO: 686386 - DNA, 25 bp, Homo sapien
gaaagaagaatcagggccagcgtgg

SEQ ID NO: 686387 - DNA, 25 bp, Homo sapien
ttacgggttgtgatgtagatactcg

SEQ ID NO: 686388 - DNA, 25 bp, Homo sapien
gaggtgcatgcaggttctctcagat

SEQ ID NO: 686389 - DNA, 25 bp, Homo sapien
ttatacgagaccctgttcagagact

SEQ ID NO: 686390 - DNA, 25 bp, Homo sapien
gctggacggtgcttctttatacgag

SEQ ID NO: 686391 - DNA, 25 bp, Homo sapien
tcctgtttgtttcctgcacggccct

SEQ ID NO: 686392 - DNA, 25 bp, Homo sapien
ctgtttgtttcctgcacggcccttg

SEQ ID NO: 686393 - DNA, 25 bp, Homo sapien
gtttgtttcctgcacggcccttgct

SEQ ID NO: 686394 - DNA, 25 bp, Homo sapien
catcctgtttgtttcctgcacggcc

SEQ ID NO: 686395 - DNA, 25 bp, Homo sapien
tatctgttgactggatgaatacagg

SEQ ID NO: 686396 - DNA, 25 bp, Homo sapien
ctgggaagatgccacgatgcagttt

SEQ ID NO: 686397 - DNA, 25 bp, Homo sapien
tggtaccctggacttgtgataacgg

SEQ ID NO: 686398 - DNA, 25 bp, Homo sapien
tctccgtcttgtctcctgggaagat

SEQ ID NO: 686399 - DNA, 25 bp, Homo sapien
ggagctggcaaactccccacatctc

SEQ ID NO: 686400 - DNA, 25 bp, Homo sapien
gagctggcaaactccccacatctcc

SEQ ID NO: 686401 - DNA, 25 bp, Homo sapien
agactccgcccagcaccgtggatgc

SEQ ID NO: 686402 - DNA, 25 bp, Homo sapien
caaaatgagaagagaggtctccgag

SEQ ID NO: 686403 - DNA, 25 bp, Homo sapien
cacacaaaactctgctctggccaga

SEQ ID NO: 686404 - DNA, 25 bp, Homo sapien
ccgtggatgccagcagaaaccccat

SEQ ID NO: 686405 - DNA, 25 bp, Homo sapien
tctacgtttgttagtctgcgggtgg

SEQ ID NO: 686406 - DNA, 25 bp, Homo sapien
agttggaggcgatttcctgcggcac

SEQ ID NO: 686407 - DNA, 25 bp, Homo sapien
gggtggcagcccagtaatcagagcc

SEQ ID NO: 686408 - DNA, 25 bp, Homo sapien
taatcagagccagactgagggtgtg

SEQ ID NO: 686409 - DNA, 25 bp, Homo sapien
cacaaaatgaccgtgtatcatgtac

SEQ ID NO: 686410 - DNA, 25 bp, Homo sapien
caaaatgaccgtgtatcatgtactt

SEQ ID NO: 686411 - DNA, 25 bp, Homo sapien
ggtcacaaaatgaccgtgtatcatg

SEQ ID NO: 686412 - DNA, 25 bp, Homo sapien
tcagtggtcacaaaatgaccgtgta

SEQ ID NO: 686413 - DNA, 25 bp, Homo sapien
ggccaacgttgccaacttgcagctt

SEQ ID NO: 686414 - DNA, 25 bp, Homo sapien
aacgttgccaacttgcagcttttca

SEQ ID NO: 686415 - DNA, 25 bp, Homo sapien
gctcagggccaacgttgccaacttg

SEQ ID NO: 686416 - DNA, 25 bp, Homo sapien
cgggctcagggccaacgttgccaac

SEQ ID NO: 686417 - DNA, 25 bp, Homo sapien
ccagctgtgatcaaggtcctgaatc

SEQ ID NO: 686418 - DNA, 25 bp, Homo sapien
ctgaatcccaggcattgaggcagaa

SEQ ID NO: 686419 - DNA, 25 bp, Homo sapien
tctcaagagactaggagatggtggt

SEQ ID NO: 686420 - DNA, 25 bp, Homo sapien
ctgcacgtaggactggagagtagct

SEQ ID NO: 686421 - DNA, 25 bp, Homo sapien
gagtgctcacgattcattataaaag

SEQ ID NO: 686422 - DNA, 25 bp, Homo sapien
agagcgaacgatgtgctgagtgaac

SEQ ID NO: 686423 - DNA, 25 bp, Homo sapien
gaactcctgaggttcagcaaacctg

SEQ ID NO: 686424 - DNA, 25 bp, Homo sapien
agcaaacctgcgcaaaggttccagg

SEQ ID NO: 686425 - DNA, 25 bp, Homo sapien
catgagaaccgtgtctgagagggac

SEQ ID NO: 686426 - DNA, 25 bp, Homo sapien
tgtcttccaactcaggctgccggtg

SEQ ID NO: 686427 - DNA, 25 bp, Homo sapien
gagaagcaccgagactcagtcaagg

SEQ ID NO: 686428 - DNA, 25 bp, Homo sapien
tcagtcaagggaccgtggctcttcc

SEQ ID NO: 686429 - DNA, 25 bp, Homo sapien
atttcctcaaatccgagaccaagag

SEQ ID NO: 686430 - DNA, 25 bp, Homo sapien
tcaaatccgagaccaagagagatca

SEQ ID NO: 686431 - DNA, 25 bp, Homo sapien
agaccaagagagatcagtgccagag

SEQ ID NO: 686432 - DNA, 25 bp, Homo sapien
ggctgcagccactccaaagctttgg

SEQ ID NO: 686433 - DNA, 25 bp, Homo sapien
cactcccgtggagaactaggcttca

SEQ ID NO: 686434 - DNA, 25 bp, Homo sapien
gaaagcaagctcatcgtcctgaacg

SEQ ID NO: 686435 - DNA, 25 bp, Homo sapien
caacagctgtgagtacattggtcca

SEQ ID NO: 686436 - DNA, 25 bp, Homo sapien
gaaatgccacctccaaatcgggaca

SEQ ID NO: 686437 - DNA, 25 bp, Homo sapien
gccccaaagggtctgaattctcgga

SEQ ID NO: 686438 - DNA, 25 bp, Homo sapien
ttacctctggaaacgagtccgtgca

SEQ ID NO: 686439 - DNA, 25 bp, Homo sapien
tccgtgcatggctgagacttcccag

SEQ ID NO: 686440 - DNA, 25 bp, Homo sapien
ccaaggcgagcaatggaggatccag

SEQ ID NO: 686441 - DNA, 25 bp, Homo sapien
caccgtttccgggttgatgaagtgg

SEQ ID NO: 686442 - DNA, 25 bp, Homo sapien
cattgagctgcgtgggcgcacagca

SEQ ID NO: 686443 - DNA, 25 bp, Homo sapien
tgtcatcgaagtagaggacggagat

SEQ ID NO: 686444 - DNA, 25 bp, Homo sapien
ggatgacgttggagctgtcatcgaa

SEQ ID NO: 686445 - DNA, 25 bp, Homo sapien
ttataccaaaccagtcataaagtac

SEQ ID NO: 686446 - DNA, 25 bp, Homo sapien
tactcctctttataccaaaccagtc

SEQ ID NO: 686447 - DNA, 25 bp, Homo sapien
accaaaccagtcataaagtacaatt

SEQ ID NO: 686448 - DNA, 25 bp, Homo sapien
ctcctctttataccaaaccagtcat

SEQ ID NO: 686449 - DNA, 25 bp, Homo sapien
agcaggatctggtggccccgcagcc

SEQ ID NO: 686450 - DNA, 25 bp, Homo sapien
cacaccccaagatggcgtgacaccc

SEQ ID NO: 686451 - DNA, 25 bp, Homo sapien
acaccccaagatggcgtgacaccca

SEQ ID NO: 686452 - DNA, 25 bp, Homo sapien
aggatctggtggccccgcagcctgc

SEQ ID NO: 686453 - DNA, 25 bp, Homo sapien
ggtggcgttcatgtaggagttcaga

SEQ ID NO: 686454 - DNA, 25 bp, Homo sapien
cctcacagtagtaggcggcgtagcc

SEQ ID NO: 686455 - DNA, 25 bp, Homo sapien
cggcgtagccttcaggcgcgatgat

SEQ ID NO: 686456 - DNA, 25 bp, Homo sapien
cgttcatgtaggagttcagagggaa

SEQ ID NO: 686457 - DNA, 25 bp, Homo sapien
tctcggaagctgacatacagctcgt

SEQ ID NO: 686458 - DNA, 25 bp, Homo sapien
ccaggtctcggaagctgacatacag

SEQ ID NO: 686459 - DNA, 25 bp, Homo sapien
tcggaagctgacatacagctcgtgc

SEQ ID NO: 686460 - DNA, 25 bp, Homo sapien
aagctgacatacagctcgtgcttct

SEQ ID NO: 686461 - DNA, 25 bp, Homo sapien
cttttccagaacgagaggcgggtca

SEQ ID NO: 686462 - DNA, 25 bp, Homo sapien
tcgcggcctgcatgccttgtggagt

SEQ ID NO: 686463 - DNA, 25 bp, Homo sapien
tgtgcaggcatgagatgagtcccag

SEQ ID NO: 686464 - DNA, 25 bp, Homo sapien
gactttcggtgaagtgaacttgctg

SEQ ID NO: 686465 - DNA, 25 bp, Homo sapien
gggccacaggtagccatgcccctcc

SEQ ID NO: 686466 - DNA, 25 bp, Homo sapien
gtagccatgcccctccacgagcctc

SEQ ID NO: 686467 - DNA, 25 bp, Homo sapien
tcatggctgtggcaatgcccagggc

SEQ ID NO: 686468 - DNA, 25 bp, Homo sapien
ctaagatggccttcatggctgtggc

SEQ ID NO: 686469 - DNA, 25 bp, Homo sapien
ctggtgagcacctgaatggattttg

SEQ ID NO: 686470 - DNA, 25 bp, Homo sapien
tcttcctgctatatttgttccagag

SEQ ID NO: 686471 - DNA, 25 bp, Homo sapien
cagagccatctggtgagcacctgaa

SEQ ID NO: 686472 - DNA, 25 bp, Homo sapien
ctgaatggattttgagtcagtctcc

SEQ ID NO: 686473 - DNA, 25 bp, Homo sapien
tttgctccccgtggaccggatgctg

SEQ ID NO: 686474 - DNA, 25 bp, Homo sapien
ttcttgggcgtcttggagcggttct

SEQ ID NO: 686475 - DNA, 25 bp, Homo sapien
gcggttctggctgcgctgtttgctc

SEQ ID NO: 686476 - DNA, 25 bp, Homo sapien
ggacctccgtggccttgaagaaagc

SEQ ID NO: 686477 - DNA, 25 bp, Homo sapien
taaatccacgcgctgcaaaaagtct

SEQ ID NO: 686478 - DNA, 25 bp, Homo sapien
gctgcaaaaagtctctctgtacctc

SEQ ID NO: 686479 - DNA, 25 bp, Homo sapien
tgcaaaaagtctctctgtacctctg

SEQ ID NO: 686480 - DNA, 25 bp, Homo sapien
cacgcgctgcaaaaagtctctctgt

SEQ ID NO: 686481 - DNA, 25 bp, Homo sapien
ggacagggcccagccgtgcatcctg

SEQ ID NO: 686482 - DNA, 25 bp, Homo sapien
ccagacgacttgagcaaaatcggca

SEQ ID NO: 686483 - DNA, 25 bp, Homo sapien
gaggcatagagggaaaggccttcta

SEQ ID NO: 686484 - DNA, 25 bp, Homo sapien
gaacccagcgaactctgcggaaaga

SEQ ID NO: 686485 - DNA, 25 bp, Homo sapien
aagggctccccgatcatcttcttgg

SEQ ID NO: 686486 - DNA, 25 bp, Homo sapien
tccccaacgagggagtataacatga

SEQ ID NO: 686487 - DNA, 25 bp, Homo sapien
ggccctcctgagtcgcgagtgattt

SEQ ID NO: 686488 - DNA, 25 bp, Homo sapien
gagtataacatgaggcagacaaggg

SEQ ID NO: 686489 - DNA, 25 bp, Homo sapien
ggtgtccgggctccaaattccagca

SEQ ID NO: 686490 - DNA, 25 bp, Homo sapien
cgctagaatggaaacacgctggccc

SEQ ID NO: 686491 - DNA, 25 bp, Homo sapien
actgatttgtcggatgcacaccgcc

SEQ ID NO: 686492 - DNA, 25 bp, Homo sapien
aagaaggtctgcgatggctgcgccc

SEQ ID NO: 686493 - DNA, 25 bp, Homo sapien
gattgaccacccagtggttgctggt

SEQ ID NO: 686494 - DNA, 25 bp, Homo sapien
ggttgtgccgcggattgaccaccca

SEQ ID NO: 686495 - DNA, 25 bp, Homo sapien
cctccgaggcccagagggtacggct

SEQ ID NO: 686496 - DNA, 25 bp, Homo sapien
tgtcgagcaggaagagatccgattc

SEQ ID NO: 686497 - DNA, 25 bp, Homo sapien
tgctgcatgccataatatgttagac

SEQ ID NO: 686498 - DNA, 25 bp, Homo sapien
tgttagacattcgtcaggcacatca

SEQ ID NO: 686499 - DNA, 25 bp, Homo sapien
catcaatgtgaacaaggctcagaga

SEQ ID NO: 686500 - DNA, 25 bp, Homo sapien
tgaggtctgctagatcacccttctg

SEQ ID NO: 686501 - DNA, 25 bp, Homo sapien
ttcacatccaaactgaattaaagtc

SEQ ID NO: 686502 - DNA, 25 bp, Homo sapien
cacatccaaactgaattaaagtcat

SEQ ID NO: 686503 - DNA, 25 bp, Homo sapien
acatccaaactgaattaaagtcatg

SEQ ID NO: 686504 - DNA, 25 bp, Homo sapien
ctttcacatccaaactgaattaaag

SEQ ID NO: 686505 - DNA, 25 bp, Homo sapien
tgtcaaatcctgtatgatacgtgtt

SEQ ID NO: 686506 - DNA, 25 bp, Homo sapien
agatgtcaaatcctgtatgatacgt

SEQ ID NO: 686507 - DNA, 25 bp, Homo sapien
caaatcctgtatgatacgtgttgtc

SEQ ID NO: 686508 - DNA, 25 bp, Homo sapien
aatcctgtatgatacgtgttgtcat

SEQ ID NO: 686509 - DNA, 25 bp, Homo sapien
acagcgttgtgtggggcagagaaaa

SEQ ID NO: 686510 - DNA, 25 bp, Homo sapien
cagcgttgtgtggggcagagaaaat

SEQ ID NO: 686511 - DNA, 25 bp, Homo sapien
gtttgagcaccacctcggacagatg

SEQ ID NO: 686512 - DNA, 25 bp, Homo sapien
ttgtagtagtagctggtgtttggta

SEQ ID NO: 686513 - DNA, 25 bp, Homo sapien
tggtagctggtgttttgtagtagta

SEQ ID NO: 686514 - DNA, 25 bp, Homo sapien
cacctcggacagatgtgtgtgagga

SEQ ID NO: 686515 - DNA, 25 bp, Homo sapien
ttcccacaggtggtctacaagaggg

SEQ ID NO: 686516 - DNA, 25 bp, Homo sapien
ctttcccacaggtggtctacaagag

SEQ ID NO: 686517 - DNA, 25 bp, Homo sapien
tcccacaggtggtctacaagagggg

SEQ ID NO: 686518 - DNA, 25 bp, Homo sapien
ccacaggtggtctacaagaggggca

SEQ ID NO: 686519 - DNA, 25 bp, Homo sapien
ggcttcactgaacgtgatataacac

SEQ ID NO: 686520 - DNA, 25 bp, Homo sapien
acccgctcggcttcactgaacgtga

SEQ ID NO: 686521 - DNA, 25 bp, Homo sapien
gggacacccgctcggcttcactgaa

SEQ ID NO: 686522 - DNA, 25 bp, Homo sapien
gctcggcttcactgaacgtgatata

SEQ ID NO: 686523 - DNA, 25 bp, Homo sapien
gaaccaaagtctgcaccaatggaga

SEQ ID NO: 686524 - DNA, 25 bp, Homo sapien
ctggaaccaaagtctgcaccaatgg

SEQ ID NO: 686525 - DNA, 25 bp, Homo sapien
caaagtctgcaccaatggagacagg

SEQ ID NO: 686526 - DNA, 25 bp, Homo sapien
accaaagtctgcaccaatggagaca

SEQ ID NO: 686527 - DNA, 25 bp, Homo sapien
cagagggcagggactcgtgtctggt

SEQ ID NO: 686528 - DNA, 25 bp, Homo sapien
tctgctggaacgtgagcttccagag

SEQ ID NO: 686529 - DNA, 25 bp, Homo sapien
cgttctggtcgatgccctcaggcat

SEQ ID NO: 686530 - DNA, 25 bp, Homo sapien
cctctcctctgctggaacgtgagct

SEQ ID NO: 686531 - DNA, 25 bp, Homo sapien
gcctgacatcgtgcactgggtttca

SEQ ID NO: 686532 - DNA, 25 bp, Homo sapien
ttagcacccagccagatctagactg

SEQ ID NO: 686533 - DNA, 25 bp, Homo sapien
agagaggtagcccttcaaaaatgtt

SEQ ID NO: 686534 - DNA, 25 bp, Homo sapien
ttagatggccaccttaattggttgc

SEQ ID NO: 686535 - DNA, 25 bp, Homo sapien
tgtgccaatctgacccatcctctgg

SEQ ID NO: 686536 - DNA, 25 bp, Homo sapien
tacaccatacaccttctttagaagg

SEQ ID NO: 686537 - DNA, 25 bp, Homo sapien
cctgaatttgttgtcggtcatggtt

SEQ ID NO: 686538 - DNA, 25 bp, Homo sapien
gaagggataatctggtacagggcct

SEQ ID NO: 686539 - DNA, 25 bp, Homo sapien
gatcaaaccggaactctcgatggtg

SEQ ID NO: 686540 - DNA, 25 bp, Homo sapien
cattgtcgaagcgttcccggatgta

SEQ ID NO: 686541 - DNA, 25 bp, Homo sapien
tagatccggaattcggctgccgtga

SEQ ID NO: 686542 - DNA, 25 bp, Homo sapien
acctgataaacgctgatccggaacg

SEQ ID NO: 686543 - DNA, 25 bp, Homo sapien
cagttgagccatgggactccaaggg

SEQ ID NO: 686544 - DNA, 25 bp, Homo sapien
ccctcgtgtatctgtctctcttgga

SEQ ID NO: 686545 - DNA, 25 bp, Homo sapien
caagggagccaccatcttgttccat

SEQ ID NO: 686546 - DNA, 25 bp, Homo sapien
tctcttggagagtccatcatcactg

SEQ ID NO: 686547 - DNA, 25 bp, Homo sapien
tagctgtggcaacgattcaataagg

SEQ ID NO: 686548 - DNA, 25 bp, Homo sapien
gctcttggcacactcgatgcactcg

SEQ ID NO: 686549 - DNA, 25 bp, Homo sapien
aaattttgctcctgcctaatgccag

SEQ ID NO: 686550 - DNA, 25 bp, Homo sapien
tcaaagtgaaggttctgcatccgac

SEQ ID NO: 686551 - DNA, 25 bp, Homo sapien
caagagggtctttggagacactgcc

SEQ ID NO: 686552 - DNA, 25 bp, Homo sapien
ggtctttggagacactgcctccttg

SEQ ID NO: 686553 - DNA, 25 bp, Homo sapien
ggagacactgcctccttgttaggtg

SEQ ID NO: 686554 - DNA, 25 bp, Homo sapien
ggggggctgcgtccagagacatgag

SEQ ID NO: 686555 - DNA, 25 bp, Homo sapien
aacggaagaagcagtgatctgctgc

SEQ ID NO: 686556 - DNA, 25 bp, Homo sapien
caacggaagaagcagtgatctgctg

SEQ ID NO: 686557 - DNA, 25 bp, Homo sapien
gcaacggaagaagcagtgatctgct

SEQ ID NO: 686558 - DNA, 25 bp, Homo sapien
cttccctctcccaccccagagtaag

SEQ ID NO: 686559 - DNA, 25 bp, Homo sapien
agagttttaaagttctcagggcact

SEQ ID NO: 686560 - DNA, 25 bp, Homo sapien
ttttaaagttctcagggcactgtcc

SEQ ID NO: 686561 - DNA, 25 bp, Homo sapien
tcagggcactgtcctgtgggttttt

SEQ ID NO: 686562 - DNA, 25 bp, Homo sapien
gttttaaagttctcagggcactgtc

SEQ ID NO: 686563 - DNA, 25 bp, Homo sapien
tgattcgttattggccttcagggca

SEQ ID NO: 686564 - DNA, 25 bp, Homo sapien
gccttcagggcatcatactgaacag

SEQ ID NO: 686565 - DNA, 25 bp, Homo sapien
tgctgagtccctgtcgtgttaatgg

SEQ ID NO: 686566 - DNA, 25 bp, Homo sapien
taatgggtccgtagattgattcgtt

SEQ ID NO: 686567 - DNA, 25 bp, Homo sapien
aatgccttccgacacaaatgttgaa

SEQ ID NO: 686568 - DNA, 25 bp, Homo sapien
cattaattcaatccactccacgcgg

SEQ ID NO: 686569 - DNA, 25 bp, Homo sapien
aagctggtgctctcggagttgtcat

SEQ ID NO: 686570 - DNA, 25 bp, Homo sapien
aaatgttgaaaaggcggtattgcac

SEQ ID NO: 686571 - DNA, 25 bp, Homo sapien
gagagggctgcatctcaaaagcggt

SEQ ID NO: 686572 - DNA, 25 bp, Homo sapien
gctgccctgaaactgatttgcaagt

SEQ ID NO: 686573 - DNA, 25 bp, Homo sapien
ccccaaaccgtagcttgagagggct

SEQ ID NO: 686574 - DNA, 25 bp, Homo sapien
tgcaagtgggccatctctgttaccc

SEQ ID NO: 686575 - DNA, 25 bp, Homo sapien
tgtgttatctcggaaaccaaatatt

SEQ ID NO: 686576 - DNA, 25 bp, Homo sapien
gaaacagcgctatcggggtgtgtta

SEQ ID NO: 686577 - DNA, 25 bp, Homo sapien
aatatttgatcatcagtcccgcagc

SEQ ID NO: 686578 - DNA, 25 bp, Homo sapien
tatttgatcatcagtcccgcagcgc

SEQ ID NO: 686579 - DNA, 25 bp, Homo sapien
cggcgtcggtgaggaaatggctatc

SEQ ID NO: 686580 - DNA, 25 bp, Homo sapien
ggaaatggctatcttgcaggctggc

SEQ ID NO: 686581 - DNA, 25 bp, Homo sapien
aggaaatggctatcttgcaggctgg

SEQ ID NO: 686582 - DNA, 25 bp, Homo sapien
ccatgtcggcgtcggtgaggaaatg

SEQ ID NO: 686583 - DNA, 25 bp, Homo sapien
accgccatggcgttgtacaggtcca

SEQ ID NO: 686584 - DNA, 25 bp, Homo sapien
catgaacatgggtgccgagttgtgc

SEQ ID NO: 686585 - DNA, 25 bp, Homo sapien
caaaatggagaggatctcgcgctgc

SEQ ID NO: 686586 - DNA, 25 bp, Homo sapien
gatgaagctcgagtgcacctcgttg

SEQ ID NO: 686587 - DNA, 25 bp, Homo sapien
tgtgcgccctggatcgcacaagagg

SEQ ID NO: 686588 - DNA, 25 bp, Homo sapien
agccagcaagcctaggagtccagag

SEQ ID NO: 686589 - DNA, 25 bp, Homo sapien
gccgctcggtcacttgctgcagacg

SEQ ID NO: 686590 - DNA, 25 bp, Homo sapien
ggcttggaaagcagccccggcgaac

SEQ ID NO: 686591 - DNA, 25 bp, Homo sapien
acaggcacgcaccactacgcctagc

SEQ ID NO: 686592 - DNA, 25 bp, Homo sapien
caggcacgcaccactacgcctagct

SEQ ID NO: 686593 - DNA, 25 bp, Homo sapien
gccgtggcgcttcgatgagataaag

SEQ ID NO: 686594 - DNA, 25 bp, Homo sapien
cagattagggttcaaattgggcaca

SEQ ID NO: 686595 - DNA, 25 bp, Homo sapien
taaagggcacggaagattctggttc

SEQ ID NO: 686596 - DNA, 25 bp, Homo sapien
catgtgatctgggacgggccactta

SEQ ID NO: 686597 - DNA, 25 bp, Homo sapien
tcagaaggtgataggaagaaacata

SEQ ID NO: 686598 - DNA, 25 bp, Homo sapien
gcccaaagggaaagacatggacagg

SEQ ID NO: 686599 - DNA, 25 bp, Homo sapien
gcttagtgccactattcaccaaatc

SEQ ID NO: 686600 - DNA, 25 bp, Homo sapien
gcagcacccggagagtcagatgtaa

SEQ ID NO: 686601 - DNA, 25 bp, Homo sapien
gatggccctggttggtgacctcaga

SEQ ID NO: 686602 - DNA, 25 bp, Homo sapien
ttcattagcgtccagctccagtgct

SEQ ID NO: 686603 - DNA, 25 bp, Homo sapien
gatttcagtggcgacttcattagcg

SEQ ID NO: 686604 - DNA, 25 bp, Homo sapien
cttgaagttggctaaggaaatctgc

SEQ ID NO: 686605 - DNA, 25 bp, Homo sapien
ggagacctagacggcagttggctct

SEQ ID NO: 686606 - DNA, 25 bp, Homo sapien
aggtgggagacctagacggcagttg

SEQ ID NO: 686607 - DNA, 25 bp, Homo sapien
tagtgagggtgcagaggacctcatg

SEQ ID NO: 686608 - DNA, 25 bp, Homo sapien
gggtagtgagggtgcagaggacctc

SEQ ID NO: 686609 - DNA, 25 bp, Homo sapien
ctgggattcacgctagactgcttat

SEQ ID NO: 686610 - DNA, 25 bp, Homo sapien
caggtttgaccatagcttacttgaa

SEQ ID NO: 686611 - DNA, 25 bp, Homo sapien
tgagacaagtgcaacatcttcccca

SEQ ID NO: 686612 - DNA, 25 bp, Homo sapien
caatatctgggactgatgagttctc

SEQ ID NO: 686613 - DNA, 25 bp, Homo sapien
taatgctagtagctatttgggaacc

SEQ ID NO: 686614 - DNA, 25 bp, Homo sapien
gggaaccatctagaattctaattct

SEQ ID NO: 686615 - DNA, 25 bp, Homo sapien
catcatctaactgtatctaatttgg

SEQ ID NO: 686616 - DNA, 25 bp, Homo sapien
tataaaaactaatacaacaaggctg

SEQ ID NO: 686617 - DNA, 25 bp, Homo sapien
ccagagcaggttcgcaaactcctca

SEQ ID NO: 686618 - DNA, 25 bp, Homo sapien
ctaccgcaggcttaaggaggcttcg

SEQ ID NO: 686619 - DNA, 25 bp, Homo sapien
ctgggatttctgtccgcgctcctgg

SEQ ID NO: 686620 - DNA, 25 bp, Homo sapien
cgtccttcgcgccagagcaggttcg

SEQ ID NO: 686621 - DNA, 25 bp, Homo sapien
tgggccacagctcatagtgcgctga

SEQ ID NO: 686622 - DNA, 25 bp, Homo sapien
cattcgatgagtgtaaggaacgcta

SEQ ID NO: 686623 - DNA, 25 bp, Homo sapien
tgatagtagatgttaagggccgcga

SEQ ID NO: 686624 - DNA, 25 bp, Homo sapien
cttcatatgaaatcgtgtgggccac

SEQ ID NO: 686625 - DNA, 25 bp, Homo sapien
taaagtgttaagttttatgcaatcg

SEQ ID NO: 686626 - DNA, 25 bp, Homo sapien
tgttaagttttatgcaatcgctggg

SEQ ID NO: 686627 - DNA, 25 bp, Homo sapien
agtgttaagttttatgcaatcgctg

SEQ ID NO: 686628 - DNA, 25 bp, Homo sapien
gttaagttttatgcaatcgctgggc

SEQ ID NO: 686629 - DNA, 25 bp, Homo sapien
gtctgagtggtcaggtcatgatgaa

SEQ ID NO: 686630 - DNA, 25 bp, Homo sapien
aaatcttctggatgtaagccggatg

SEQ ID NO: 686631 - DNA, 25 bp, Homo sapien
atcttctggatgtaagccggatgct

SEQ ID NO: 686632 - DNA, 25 bp, Homo sapien
catgatgaaatcttctggatgtaag

SEQ ID NO: 686633 - DNA, 25 bp, Homo sapien
atctataaggttttgtggacccatc

SEQ ID NO: 686634 - DNA, 25 bp, Homo sapien
tcttgctttgagtggttaagctaca

SEQ ID NO: 686635 - DNA, 25 bp, Homo sapien
agtgtcttgctttgagtggttaagc

SEQ ID NO: 686636 - DNA, 25 bp, Homo sapien
ctatctataaggttttgtggaccca

SEQ ID NO: 686637 - DNA, 25 bp, Homo sapien
ccatagtcatctccccgaaaggttt

SEQ ID NO: 686638 - DNA, 25 bp, Homo sapien
tttctggcattatggactagtctga

SEQ ID NO: 686639 - DNA, 25 bp, Homo sapien
cacccatgctgttgagtgaatcact

SEQ ID NO: 686640 - DNA, 25 bp, Homo sapien
tatataagtggagccctacgctaca

SEQ ID NO: 686641 - DNA, 25 bp, Homo sapien
tagcttgctgcttgagttactgttc

SEQ ID NO: 686642 - DNA, 25 bp, Homo sapien
ccacatcgggctcttcattgaatct

SEQ ID NO: 686643 - DNA, 25 bp, Homo sapien
tagttcaaggacagttatctccagt

SEQ ID NO: 686644 - DNA, 25 bp, Homo sapien
ttaacttaaatgacgcgggactcta

SEQ ID NO: 686645 - DNA, 25 bp, Homo sapien
tagacgttagattgcgggcaccgcc

SEQ ID NO: 686646 - DNA, 25 bp, Homo sapien
gcagcgcttcagtgtacgtgttaga

SEQ ID NO: 686647 - DNA, 25 bp, Homo sapien
tattggaaaagcgtctgtgagcccc

SEQ ID NO: 686648 - DNA, 25 bp, Homo sapien
gcaccgccagggattttgcagcgct

SEQ ID NO: 686649 - DNA, 25 bp, Homo sapien
tcaaacttaatgtccgcgatggttt

SEQ ID NO: 686650 - DNA, 25 bp, Homo sapien
ttcctcgtggaacactgaagccttg

SEQ ID NO: 686651 - DNA, 25 bp, Homo sapien
taatgtccgcgatggtttcctcgtg

SEQ ID NO: 686652 - DNA, 25 bp, Homo sapien
tgagcactcccgtgccccatagcat

SEQ ID NO: 686653 - DNA, 25 bp, Homo sapien
tgaatcccagtgtcaagatacagcc

SEQ ID NO: 686654 - DNA, 25 bp, Homo sapien
gactggctgctaaaacaggtgcact

SEQ ID NO: 686655 - DNA, 25 bp, Homo sapien
gcctgatcgccccttaatacggtgc

SEQ ID NO: 686656 - DNA, 25 bp, Homo sapien
ttcactacccgtcagcatgataggt

SEQ ID NO: 686657 - DNA, 25 bp, Homo sapien
ttacttgaagcatggcacttgccac

SEQ ID NO: 686658 - DNA, 25 bp, Homo sapien
ggctttgctgtgagagtaccttgac

SEQ ID NO: 686659 - DNA, 25 bp, Homo sapien
tggaaggcccaagcatggttctgct

SEQ ID NO: 686660 - DNA, 25 bp, Homo sapien
acgtacctcgaatccaacctgtggg

SEQ ID NO: 686661 - DNA, 25 bp, Homo sapien
atccacagcaccagccaccgcgcac

SEQ ID NO: 686662 - DNA, 25 bp, Homo sapien
gatccacagcaccagccaccgcgca

SEQ ID NO: 686663 - DNA, 25 bp, Homo sapien
tgtctgcaggatccacagcaccagc

SEQ ID NO: 686664 - DNA, 25 bp, Homo sapien
ctggtgtctgcaggatccacagcac

SEQ ID NO: 686665 - DNA, 25 bp, Homo sapien
tgagcgtcttgtagcggcgctggtg

SEQ ID NO: 686666 - DNA, 25 bp, Homo sapien
agctcggggattcgctgccccagcg

SEQ ID NO: 686667 - DNA, 25 bp, Homo sapien
ccagggcaggcagtgttgagcgtct

SEQ ID NO: 686668 - DNA, 25 bp, Homo sapien
gggcaggatctccggcctgtgccac

SEQ ID NO: 686669 - DNA, 25 bp, Homo sapien
aaaaccagaagcagtagcgtccctg

SEQ ID NO: 686670 - DNA, 25 bp, Homo sapien
gagagttggggcgtttgtgccccac

SEQ ID NO: 686671 - DNA, 25 bp, Homo sapien
aagcagtagcgtccctgagagagtt

SEQ ID NO: 686672 - DNA, 25 bp, Homo sapien
agaaaaccagaagcagtagcgtccc

SEQ ID NO: 686673 - DNA, 25 bp, Homo sapien
ctttccttggcttgatcaaggcgct

SEQ ID NO: 686674 - DNA, 25 bp, Homo sapien
tggcttgatcaaggcgctgcctgca

SEQ ID NO: 686675 - DNA, 25 bp, Homo sapien
ccttggcttgatcaaggcgctgcct

SEQ ID NO: 686676 - DNA, 25 bp, Homo sapien
ggctgctttccttggcttgatcaag

SEQ ID NO: 686677 - DNA, 25 bp, Homo sapien
gctcagctcgcaagaattcttgttc

SEQ ID NO: 686678 - DNA, 25 bp, Homo sapien
ccgcccagctcagctcgcaagaatt

SEQ ID NO: 686679 - DNA, 25 bp, Homo sapien
gcccagctcagctcgcaagaattct

SEQ ID NO: 686680 - DNA, 25 bp, Homo sapien
cagctcagctcgcaagaattcttgt

SEQ ID NO: 686681 - DNA, 25 bp, Homo sapien
catcgtagtcatctcttcctagggc

SEQ ID NO: 686682 - DNA, 25 bp, Homo sapien
gctgtttcagatcgcagtggccggc

SEQ ID NO: 686683 - DNA, 25 bp, Homo sapien
gaattctgcgttccaagctcctgca

SEQ ID NO: 686684 - DNA, 25 bp, Homo sapien
gctgagtccccgaagagccttgata

SEQ ID NO: 686685 - DNA, 25 bp, Homo sapien
cttctcagaggaaagtctcggccct

SEQ ID NO: 686686 - DNA, 25 bp, Homo sapien
tcagaggagctttggctcaaggacc

SEQ ID NO: 686687 - DNA, 25 bp, Homo sapien
ctttgacgggaggagctggaatcca

SEQ ID NO: 686688 - DNA, 25 bp, Homo sapien
gcatagcgtcgcaaactccttctca

SEQ ID NO: 686689 - DNA, 25 bp, Homo sapien
tgaacctggcatatctgggcgccaa

SEQ ID NO: 686690 - DNA, 25 bp, Homo sapien
gctatcatgtgcctgcagagccggc

SEQ ID NO: 686691 - DNA, 25 bp, Homo sapien
tatctgtcgggtggaaagaggcccc

SEQ ID NO: 686692 - DNA, 25 bp, Homo sapien
cccagcagtggcagtcggctatcat

SEQ ID NO: 686693 - DNA, 25 bp, Homo sapien
gatctagaccccttctcacagcgtg

SEQ ID NO: 686694 - DNA, 25 bp, Homo sapien
gcagggagggtactgcaccccagtt

SEQ ID NO: 686695 - DNA, 25 bp, Homo sapien
ctcacagcgtgtggcccaaagaagg

SEQ ID NO: 686696 - DNA, 25 bp, Homo sapien
gtactgcaccccagttgccagctgt

SEQ ID NO: 686697 - DNA, 25 bp, Homo sapien
tgcttttgttggttccgcccgtgga

SEQ ID NO: 686698 - DNA, 25 bp, Homo sapien
tataataaagtgtctgccggctcgc

SEQ ID NO: 686699 - DNA, 25 bp, Homo sapien
aaaggcccctttccagtcatagcac

SEQ ID NO: 686700 - DNA, 25 bp, Homo sapien
cgcccgtggagacgacgatagtgtt

SEQ ID NO: 686701 - DNA, 25 bp, Homo sapien
agaagggtgcgcctcttccctctac

SEQ ID NO: 686702 - DNA, 25 bp, Homo sapien
gacatgaggtgagaggtatcctggc

SEQ ID NO: 686703 - DNA, 25 bp, Homo sapien
cccgctggagcggttgagtgcagaa

SEQ ID NO: 686704 - DNA, 25 bp, Homo sapien
gcctgagacggttcctgcctgtctt

SEQ ID NO: 686705 - DNA, 25 bp, Homo sapien
acggccagggcgaactggccctgcc

SEQ ID NO: 686706 - DNA, 25 bp, Homo sapien
cacggccagggcgaactggccctgc

SEQ ID NO: 686707 - DNA, 25 bp, Homo sapien
gccagggcgaactggccctgccacc

SEQ ID NO: 686708 - DNA, 25 bp, Homo sapien
tccccagcagccagcgtgccctggg

SEQ ID NO: 686709 - DNA, 25 bp, Homo sapien
cctgggatggctcgccctgcgcagg

SEQ ID NO: 686710 - DNA, 25 bp, Homo sapien
acaagccctcctgaaccacgggaga

SEQ ID NO: 686711 - DNA, 25 bp, Homo sapien
agagcggaacgtcaccaaaggctgc

SEQ ID NO: 686712 - DNA, 25 bp, Homo sapien
aggatccaggagactgtcgtggaaa

SEQ ID NO: 686713 - DNA, 25 bp, Homo sapien
ggagactgtcgtggaaagtctccct

SEQ ID NO: 686714 - DNA, 25 bp, Homo sapien
caattctcttctcccgaggcgtgca

SEQ ID NO: 686715 - DNA, 25 bp, Homo sapien
gatgtttactcttccccgcttcgag

SEQ ID NO: 686716 - DNA, 25 bp, Homo sapien
tcccactaaatgcatcttgaccagg

SEQ ID NO: 686717 - DNA, 25 bp, Homo sapien
actaaatgcatcttgaccaggcccc

SEQ ID NO: 686718 - DNA, 25 bp, Homo sapien
tgtctctttcccactaaatgcatct

SEQ ID NO: 686719 - DNA, 25 bp, Homo sapien
atgcatcttgaccaggccccttagc

SEQ ID NO: 686720 - DNA, 25 bp, Homo sapien
gggcgttcccatccccagcgatgga

SEQ ID NO: 686721 - DNA, 25 bp, Homo sapien
ctttctttgccgtcagctgcgtgct

SEQ ID NO: 686722 - DNA, 25 bp, Homo sapien
ggtgggcgttcccatccccagcgat

SEQ ID NO: 686723 - DNA, 25 bp, Homo sapien
gtcagctgcgtgctatctgtggcgt

SEQ ID NO: 686724 - DNA, 25 bp, Homo sapien
ccacggcatgaatggagacagtggg

SEQ ID NO: 686725 - DNA, 25 bp, Homo sapien
cccgaggctcctctgatagaaatca

SEQ ID NO: 686726 - DNA, 25 bp, Homo sapien
ccgtcccccgaggactggcatttgg

SEQ ID NO: 686727 - DNA, 25 bp, Homo sapien
tgtaggctccccgaggctcctctga

SEQ ID NO: 686728 - DNA, 25 bp, Homo sapien
aacgggccatccgtggaactgcagc

SEQ ID NO: 686729 - DNA, 25 bp, Homo sapien
tgaaaacgagagaggactcgagaag

SEQ ID NO: 686730 - DNA, 25 bp, Homo sapien
taaggaagacttcggtgtccttgga

SEQ ID NO: 686731 - DNA, 25 bp, Homo sapien
gtccttggaagattgaaaacgagag

SEQ ID NO: 686732 - DNA, 25 bp, Homo sapien
gcttcttgctaatagagaatctggg

SEQ ID NO: 686733 - DNA, 25 bp, Homo sapien
acagtacacggaggaatgcacagcc

SEQ ID NO: 686734 - DNA, 25 bp, Homo sapien
tggagcgctcacactacgcgaggtg

SEQ ID NO: 686735 - DNA, 25 bp, Homo sapien
cagccttgctgatcgaatgagaaaa

SEQ ID NO: 686736 - DNA, 25 bp, Homo sapien
gagcaaagggacacagtcatctggg

SEQ ID NO: 686737 - DNA, 25 bp, Homo sapien
caccctcttaagacgatatctccgg

SEQ ID NO: 686738 - DNA, 25 bp, Homo sapien
atgccaaacaccctcttaagacgat

SEQ ID NO: 686739 - DNA, 25 bp, Homo sapien
taagacgatatctccggggcctgca

SEQ ID NO: 686740 - DNA, 25 bp, Homo sapien
ggaatccaaggcctcgctcccaatg

SEQ ID NO: 686741 - DNA, 25 bp, Homo sapien
cttatatagtcaaaagccggggaat

SEQ ID NO: 686742 - DNA, 25 bp, Homo sapien
tatatagtcaaaagccggggaatcc

SEQ ID NO: 686743 - DNA, 25 bp, Homo sapien
ttatatagtcaaaagccggggaatc

SEQ ID NO: 686744 - DNA, 25 bp, Homo sapien
tgccacagccttggcctgaccccgg

SEQ ID NO: 686745 - DNA, 25 bp, Homo sapien
gggatctcccgcctccaaatcggcc

SEQ ID NO: 686746 - DNA, 25 bp, Homo sapien
gccttggcctgaccccgggatctcc

SEQ ID NO: 686747 - DNA, 25 bp, Homo sapien
gatctcccgcctccaaatcggccat

SEQ ID NO: 686748 - DNA, 25 bp, Homo sapien
gagagctccaccctaagaagcctgg

SEQ ID NO: 686749 - DNA, 25 bp, Homo sapien
gactgtggtcccctcgactcaaggg

SEQ ID NO: 686750 - DNA, 25 bp, Homo sapien
tgccagacgcgctgccatgaggaac

SEQ ID NO: 686751 - DNA, 25 bp, Homo sapien
ggtcccctcgactcaagggagagct

SEQ ID NO: 686752 - DNA, 25 bp, Homo sapien
agcctctgttgtccagtaggcttgg

SEQ ID NO: 686753 - DNA, 25 bp, Homo sapien
catcatagcctctgttgtccagtag

SEQ ID NO: 686754 - DNA, 25 bp, Homo sapien
tcatagcctctgttgtccagtaggc

SEQ ID NO: 686755 - DNA, 25 bp, Homo sapien
tggcaagaagggtctgtggaagttt

SEQ ID NO: 686756 - DNA, 25 bp, Homo sapien
ccatgacccggacacatacaggttg

SEQ ID NO: 686757 - DNA, 25 bp, Homo sapien
tggccaggacgcctgtgacgctgtg

SEQ ID NO: 686758 - DNA, 25 bp, Homo sapien
ttagcgttttagcaggaggcaggtg

SEQ ID NO: 686759 - DNA, 25 bp, Homo sapien
tgacgctgtgggtgacgatggccat

SEQ ID NO: 686760 - DNA, 25 bp, Homo sapien
gtgcttgaacgtgtcaactggtaac

SEQ ID NO: 686761 - DNA, 25 bp, Homo sapien
tccgctccctcagggatagacaggg

SEQ ID NO: 686762 - DNA, 25 bp, Homo sapien
atagacagggttcggctgctcatcg

SEQ ID NO: 686763 - DNA, 25 bp, Homo sapien
caactggtaacttgcagctgttctg

SEQ ID NO: 686764 - DNA, 25 bp, Homo sapien
agccgtgaacaaccatcctgcaaag

SEQ ID NO: 686765 - DNA, 25 bp, Homo sapien
aagccgtgaacaaccatcctgcaaa

SEQ ID NO: 686766 - DNA, 25 bp, Homo sapien
agaagccgtgaacaaccatcctgca

SEQ ID NO: 686767 - DNA, 25 bp, Homo sapien
ctagaagccgtgaacaaccatcctg

SEQ ID NO: 686768 - DNA, 25 bp, Homo sapien
gaaacattggctcttgccagcattc

SEQ ID NO: 686769 - DNA, 25 bp, Homo sapien
tggctgctgataggtacgtgtagaa

SEQ ID NO: 686770 - DNA, 25 bp, Homo sapien
gctgataggtacgtgtagaaacatt

SEQ ID NO: 686771 - DNA, 25 bp, Homo sapien
tacgtgtagaaacattggctcttgc

SEQ ID NO: 686772 - DNA, 25 bp, Homo sapien
ttgaattttgctttcctcagttgac

SEQ ID NO: 686773 - DNA, 25 bp, Homo sapien
tgaggccggagacaagagacttatt

SEQ ID NO: 686774 - DNA, 25 bp, Homo sapien
gagacttatttttcacctggctcag

SEQ ID NO: 686775 - DNA, 25 bp, Homo sapien
accctggccctgcagattgagaggc

SEQ ID NO: 686776 - DNA, 25 bp, Homo sapien
cctgagaggtccagattaaagagat

SEQ ID NO: 686777 - DNA, 25 bp, Homo sapien
gagaggtccagattaaagagatgag

SEQ ID NO: 686778 - DNA, 25 bp, Homo sapien
ccagattaaagagatgaggtggtaa

SEQ ID NO: 686779 - DNA, 25 bp, Homo sapien
gaggtccagattaaagagatgaggt

SEQ ID NO: 686780 - DNA, 25 bp, Homo sapien
cataagcacccctgattaaagctgg

SEQ ID NO: 686781 - DNA, 25 bp, Homo sapien
tcctcactgttggagggcccttgga

SEQ ID NO: 686782 - DNA, 25 bp, Homo sapien
taaagctggttcgtgcgtgggaccc

SEQ ID NO: 686783 - DNA, 25 bp, Homo sapien
tacatagaagtagttcagtgcctcc

SEQ ID NO: 686784 - DNA, 25 bp, Homo sapien
ttctcctgagtgatgtcccttgtca

SEQ ID NO: 686785 - DNA, 25 bp, Homo sapien
gttttctcctgagtgatgtcccttg

SEQ ID NO: 686786 - DNA, 25 bp, Homo sapien
cctgagtgatgtcccttgtcatggc

SEQ ID NO: 686787 - DNA, 25 bp, Homo sapien
caacaatttgggaatgtctgttttc

SEQ ID NO: 686788 - DNA, 25 bp, Homo sapien
agccattgaccttgagcgtgtcact

SEQ ID NO: 686789 - DNA, 25 bp, Homo sapien
gggcgagccattgacctcgagcgag

SEQ ID NO: 686790 - DNA, 25 bp, Homo sapien
ggcgagccattgacctcgagcgagc

SEQ ID NO: 686791 - DNA, 25 bp, Homo sapien
cattgaccttgagcgtgtcactgac

SEQ ID NO: 686792 - DNA, 25 bp, Homo sapien
tgtgttccggaagtccttctttgct

SEQ ID NO: 686793 - DNA, 25 bp, Homo sapien
ccaaaatggtgcagggttgccatga

SEQ ID NO: 686794 - DNA, 25 bp, Homo sapien
gttgccatgaggattgtgttccgga

SEQ ID NO: 686795 - DNA, 25 bp, Homo sapien
tcatctccaaaatggtgcagggttg

SEQ ID NO: 686796 - DNA, 25 bp, Homo sapien
ctacccaggccaggcaaggacttcc

SEQ ID NO: 686797 - DNA, 25 bp, Homo sapien
aggctcccgccctgatggctgaggt

SEQ ID NO: 686798 - DNA, 25 bp, Homo sapien
gggcttctcgagtgcctccaggctc

SEQ ID NO: 686799 - DNA, 25 bp, Homo sapien
tgtcctttttatagccggccatggg

SEQ ID NO: 686800 - DNA, 25 bp, Homo sapien
agacagtcgccagtgggaacattcc

SEQ ID NO: 686801 - DNA, 25 bp, Homo sapien
tctctgcctgtgcaccggagctgct

SEQ ID NO: 686802 - DNA, 25 bp, Homo sapien
agcgcccacaggcccgtgcgggtgg

SEQ ID NO: 686803 - DNA, 25 bp, Homo sapien
ccacaggcccgtgcgggtggcagca

SEQ ID NO: 686804 - DNA, 25 bp, Homo sapien
gcccgtgcgggtggcagcactgctc

SEQ ID NO: 686805 - DNA, 25 bp, Homo sapien
cccccaggatcacggagacatcctt

SEQ ID NO: 686806 - DNA, 25 bp, Homo sapien
tgtgaggactgtctggaagagggca

SEQ ID NO: 686807 - DNA, 25 bp, Homo sapien
acggagacatccttgcttgggggga

SEQ ID NO: 686808 - DNA, 25 bp, Homo sapien
cttgcttggggggaccattctctct

SEQ ID NO: 686809 - DNA, 25 bp, Homo sapien
tcgccaacaatggaaccacattttg

SEQ ID NO: 686810 - DNA, 25 bp, Homo sapien
gtacccgtgcagcagagatttccca

SEQ ID NO: 686811 - DNA, 25 bp, Homo sapien
agaactttcaggtacccgtgcagca

SEQ ID NO: 686812 - DNA, 25 bp, Homo sapien
attttgatcctgcatccgagttgcc

SEQ ID NO: 686813 - DNA, 25 bp, Homo sapien
aaccctgatctcaatatctgcttct

SEQ ID NO: 686814 - DNA, 25 bp, Homo sapien
tgcttctttgtaggaggatgagttt

SEQ ID NO: 686815 - DNA, 25 bp, Homo sapien
tgagtttggggaagtatagccctcg

SEQ ID NO: 686816 - DNA, 25 bp, Homo sapien
tggattttctggtacaaccctgatc

SEQ ID NO: 686817 - DNA, 25 bp, Homo sapien
aggctgtgtgaagcactgtactccc

SEQ ID NO: 686818 - DNA, 25 bp, Homo sapien
ccaggctgtgtgaagcactgtactc

SEQ ID NO: 686819 - DNA, 25 bp, Homo sapien
caggctgtgtgaagcactgtactcc

SEQ ID NO: 686820 - DNA, 25 bp, Homo sapien
tcagaatgtcaacaaaacagctgca

SEQ ID NO: 686821 - DNA, 25 bp, Homo sapien
ttcagaatgtcaacaaaacagctgc

SEQ ID NO: 686822 - DNA, 25 bp, Homo sapien
cattcagaatgtcaacaaaacagct

SEQ ID NO: 686823 - DNA, 25 bp, Homo sapien
attcagaatgtcaacaaaacagctg

SEQ ID NO: 686824 - DNA, 25 bp, Homo sapien
tttaaaaggagtgagttgtgtacag

SEQ ID NO: 686825 - DNA, 25 bp, Homo sapien
aaaggagtgagttgtgtacaggggc

SEQ ID NO: 686826 - DNA, 25 bp, Homo sapien
tgagttgtgtacaggggcgttaaat

SEQ ID NO: 686827 - DNA, 25 bp, Homo sapien
ggagtgagttgtgtacaggggcgtt

SEQ ID NO: 686828 - DNA, 25 bp, Homo sapien
agacaagaaaaaaaactgcgctaga

SEQ ID NO: 686829 - DNA, 25 bp, Homo sapien
agaaaaaaaactgcgctagagccaa

SEQ ID NO: 686830 - DNA, 25 bp, Homo sapien
gacaagaaaaaaaactgcgctagag

SEQ ID NO: 686831 - DNA, 25 bp, Homo sapien
caagaaaaaaaactgcgctagagcc

SEQ ID NO: 686832 - DNA, 25 bp, Homo sapien
tttttcttgcttttttcagctttga

SEQ ID NO: 686833 - DNA, 25 bp, Homo sapien
ttttcttgcttttttcagctttgac

SEQ ID NO: 686834 - DNA, 25 bp, Homo sapien
ctttttcttgcttttttcagctttg

SEQ ID NO: 686835 - DNA, 25 bp, Homo sapien
ggctttcctttagcttgatatgcag

SEQ ID NO: 686836 - DNA, 25 bp, Homo sapien
gcagcaatatccttttcgtattttt

SEQ ID NO: 686837 - DNA, 25 bp, Homo sapien
tcctttagcttgatatgcagcaata

SEQ ID NO: 686838 - DNA, 25 bp, Homo sapien
cccttttttgctgcctcaggctttc

SEQ ID NO: 686839 - DNA, 25 bp, Homo sapien
ttgtctttcataatgggtcttgtcc

SEQ ID NO: 686840 - DNA, 25 bp, Homo sapien
atttgtctttcataatgggtcttgt

SEQ ID NO: 686841 - DNA, 25 bp, Homo sapien
tcttgtccgcctttgccatatcctc

SEQ ID NO: 686842 - DNA, 25 bp, Homo sapien
gtctttcataatgggtcttgtccgc

SEQ ID NO: 686843 - DNA, 25 bp, Homo sapien
acagagtcgcccagtgcccgtacgg

SEQ ID NO: 686844 - DNA, 25 bp, Homo sapien
cccggcgctgtctctatggagctca

SEQ ID NO: 686845 - DNA, 25 bp, Homo sapien
cttgccccggcgctgtctctatgga

SEQ ID NO: 686846 - DNA, 25 bp, Homo sapien
tttcttcagcgaggcacagagtcgc

SEQ ID NO: 686847 - DNA, 25 bp, Homo sapien
tactcactcattgtgggccaccttg

SEQ ID NO: 686848 - DNA, 25 bp, Homo sapien
aagaggcatctctcacgctgctcga

SEQ ID NO: 686849 - DNA, 25 bp, Homo sapien
ggaaatactcactaatcactgggca

SEQ ID NO: 686850 - DNA, 25 bp, Homo sapien
gactgtggaagcactagctggtcta

SEQ ID NO: 686851 - DNA, 25 bp, Homo sapien
cacttatccatcgtgttgaggagca

SEQ ID NO: 686852 - DNA, 25 bp, Homo sapien
cttatccatcgtgttgaggagcatt

SEQ ID NO: 686853 - DNA, 25 bp, Homo sapien
tatccatcgtgttgaggagcatttc

SEQ ID NO: 686854 - DNA, 25 bp, Homo sapien
tcacttatccatcgtgttgaggagc

SEQ ID NO: 686855 - DNA, 25 bp, Homo sapien
tcctgggaactgttctcccttcgtg

SEQ ID NO: 686856 - DNA, 25 bp, Homo sapien
tcgtggtggaagcctcctcagcagc

SEQ ID NO: 686857 - DNA, 25 bp, Homo sapien
ctgggaactgttctcccttcgtggt

SEQ ID NO: 686858 - DNA, 25 bp, Homo sapien
cgtggtggaagcctcctcagcagca

SEQ ID NO: 686859 - DNA, 25 bp, Homo sapien
caggaccgactggtggacaaatagg

SEQ ID NO: 686860 - DNA, 25 bp, Homo sapien
atcccctggacagtaacactcggca

SEQ ID NO: 686861 - DNA, 25 bp, Homo sapien
ggcacccaggatagtcacaaccaga

SEQ ID NO: 686862 - DNA, 25 bp, Homo sapien
gacaaataggggctctggacacatc

SEQ ID NO: 686863 - DNA, 25 bp, Homo sapien
cttccatcccttcgcagcttccttc

SEQ ID NO: 686864 - DNA, 25 bp, Homo sapien
ttccttccatcccttcgcagcttcc

SEQ ID NO: 686865 - DNA, 25 bp, Homo sapien
catcccttcgcagcttccttctgac

SEQ ID NO: 686866 - DNA, 25 bp, Homo sapien
ctccgttcgcggcttccttccatcc

SEQ ID NO: 686867 - DNA, 25 bp, Homo sapien
tctccgaatgtctgtgcaggttaat

SEQ ID NO: 686868 - DNA, 25 bp, Homo sapien
ttcaggatggtctgcttcctctttc

SEQ ID NO: 686869 - DNA, 25 bp, Homo sapien
actttgcttcccctgatccacactt

SEQ ID NO: 686870 - DNA, 25 bp, Homo sapien
ccttcaggatggtctgcttcctctt

SEQ ID NO: 686871 - DNA, 25 bp, Homo sapien
cctgaagtgagcgtttagaagttgc

SEQ ID NO: 686872 - DNA, 25 bp, Homo sapien
gaaaggcaggtgaatggtttctctc

SEQ ID NO: 686873 - DNA, 25 bp, Homo sapien
gaatgtgagcggtcatatgacgttc

SEQ ID NO: 686874 - DNA, 25 bp, Homo sapien
gcttctgtcggaaacatttattgca

SEQ ID NO: 686875 - DNA, 25 bp, Homo sapien
actgcagtgtttgcacttgaacctc

SEQ ID NO: 686876 - DNA, 25 bp, Homo sapien
cagcagaacagtagcggcatttcag

SEQ ID NO: 686877 - DNA, 25 bp, Homo sapien
ctgaatgagggcatagcgttcatgg

SEQ ID NO: 686878 - DNA, 25 bp, Homo sapien
gcatagcgttcatggaagacagcag

SEQ ID NO: 686879 - DNA, 25 bp, Homo sapien
ctgtaagcatgcaagttgcgcatat

SEQ ID NO: 686880 - DNA, 25 bp, Homo sapien
taagcatgcaagttgcgcatatgca

SEQ ID NO: 686881 - DNA, 25 bp, Homo sapien
tgtaagcatgcaagttgcgcatatg

SEQ ID NO: 686882 - DNA, 25 bp, Homo sapien
agcatgcaagttgcgcatatgcaca

SEQ ID NO: 686883 - DNA, 25 bp, Homo sapien
tagcaactggctagacttgtgcccc

SEQ ID NO: 686884 - DNA, 25 bp, Homo sapien
aagaagaggctcgttcactcacgct

SEQ ID NO: 686885 - DNA, 25 bp, Homo sapien
aataagatcatggaaaagggaggcc

SEQ ID NO: 686886 - DNA, 25 bp, Homo sapien
tgccatggtgtcaaaaaagtctagc

SEQ ID NO: 686887 - DNA, 25 bp, Homo sapien
atgtattttcatggtcccgctctgg

SEQ ID NO: 686888 - DNA, 25 bp, Homo sapien
cttttccgtgcaatgatggtggcac

SEQ ID NO: 686889 - DNA, 25 bp, Homo sapien
cagaatatgtattttcatggtcccg

SEQ ID NO: 686890 - DNA, 25 bp, Homo sapien
gacattttcgccgtgtttctgcaga

SEQ ID NO: 686891 - DNA, 25 bp, Homo sapien
ggacatggcgcttcaatttacttgc

SEQ ID NO: 686892 - DNA, 25 bp, Homo sapien
cccagtgtgggatcggacatggcgc

SEQ ID NO: 686893 - DNA, 25 bp, Homo sapien
tgcgttctcatgtggcgtttcagct

SEQ ID NO: 686894 - DNA, 25 bp, Homo sapien
gggatcggacatggcgcttcaattt

SEQ ID NO: 686895 - DNA, 25 bp, Homo sapien
ttttcactaattagtaatcaaagaa

SEQ ID NO: 686896 - DNA, 25 bp, Homo sapien
gaccacagatggtttatttgtaatt

SEQ ID NO: 686897 - DNA, 25 bp, Homo sapien
ccacagatggtttatttgtaatttg

SEQ ID NO: 686898 - DNA, 25 bp, Homo sapien
tttacatattattttcactaattag

SEQ ID NO: 686899 - DNA, 25 bp, Homo sapien
tgttagttacacttggagtaacttg

SEQ ID NO: 686900 - DNA, 25 bp, Homo sapien
tacagcagcctctactaagatgcca

SEQ ID NO: 686901 - DNA, 25 bp, Homo sapien
aaagcctgtttgtaacagattctac

SEQ ID NO: 686902 - DNA, 25 bp, Homo sapien
taagatgccatgaagcttcaagtcc

SEQ ID NO: 686903 - DNA, 25 bp, Homo sapien
tgccatgttgcagtcgttacacttg

SEQ ID NO: 686904 - DNA, 25 bp, Homo sapien
actggtgacaaatgccatgttgcag

SEQ ID NO: 686905 - DNA, 25 bp, Homo sapien
tctcatgagtatgtttatagcgcct

SEQ ID NO: 686906 - DNA, 25 bp, Homo sapien
tgtcggacgagttctccactggtga

SEQ ID NO: 686907 - DNA, 25 bp, Homo sapien
ccgcagcagagtgaccgtacggaag

SEQ ID NO: 686908 - DNA, 25 bp, Homo sapien
ccgtacggaaggttttcaggcagag

SEQ ID NO: 686909 - DNA, 25 bp, Homo sapien
atggttccgcagcagagtgaccgta

SEQ ID NO: 686910 - DNA, 25 bp, Homo sapien
tgaccgtacggaaggttttcaggca

SEQ ID NO: 686911 - DNA, 25 bp, Homo sapien
tcatatgacgattaaaacttgacat

SEQ ID NO: 686912 - DNA, 25 bp, Homo sapien
cactggtgtgagttttcatatgacg

SEQ ID NO: 686913 - DNA, 25 bp, Homo sapien
ggtgtgagttttcatatgacgatta

SEQ ID NO: 686914 - DNA, 25 bp, Homo sapien
aacatgcagacatcacagtggaagg

SEQ ID NO: 686915 - DNA, 25 bp, Homo sapien
gaacaatttcgtcacttctttcatc

SEQ ID NO: 686916 - DNA, 25 bp, Homo sapien
tgcttgaccagctgtaggttgatcc

SEQ ID NO: 686917 - DNA, 25 bp, Homo sapien
tgaccagctgtaggttgatcctctt

SEQ ID NO: 686918 - DNA, 25 bp, Homo sapien
ctgtgagaacaatttcgtcacttct

SEQ ID NO: 686919 - DNA, 25 bp, Homo sapien
aattatttcgcatcagggttgtggc

SEQ ID NO: 686920 - DNA, 25 bp, Homo sapien
gcgccttacactattccaattagca

SEQ ID NO: 686921 - DNA, 25 bp, Homo sapien
ggaagattatgcatcacaatgttaa

SEQ ID NO: 686922 - DNA, 25 bp, Homo sapien
taattagacttttgcctggatgaag

SEQ ID NO: 686923 - DNA, 25 bp, Homo sapien
cttgtccagacataatattgcataa

SEQ ID NO: 686924 - DNA, 25 bp, Homo sapien
tccagacataatattgcataaaagc

SEQ ID NO: 686925 - DNA, 25 bp, Homo sapien
gacataatattgcataaaagccgac

SEQ ID NO: 686926 - DNA, 25 bp, Homo sapien
tattgcataaaagccgacttgaatt

SEQ ID NO: 686927 - DNA, 25 bp, Homo sapien
gatcagtccagtagtttcagccagg

SEQ ID NO: 686928 - DNA, 25 bp, Homo sapien
agtccagtagtttcagccaggctca

SEQ ID NO: 686929 - DNA, 25 bp, Homo sapien
cttgatcagtccagtagtttcagcc

SEQ ID NO: 686930 - DNA, 25 bp, Homo sapien
tcagtccagtagtttcagccaggct

SEQ ID NO: 686931 - DNA, 25 bp, Homo sapien
cactagggctccgatggtctttctc

SEQ ID NO: 686932 - DNA, 25 bp, Homo sapien
tttttccggcatcaactcgagttct

SEQ ID NO: 686933 - DNA, 25 bp, Homo sapien
gatactaatggccacacactgctgc

SEQ ID NO: 686934 - DNA, 25 bp, Homo sapien
tctagagcgtggaactgcaacacct

SEQ ID NO: 686935 - DNA, 25 bp, Homo sapien
ctctgcctcgtgcaccgcgtgctgc

SEQ ID NO: 686936 - DNA, 25 bp, Homo sapien
tccgtctttggcttgtgggctctgc

SEQ ID NO: 686937 - DNA, 25 bp, Homo sapien
aatgctcggcccactccgtctttgg

SEQ ID NO: 686938 - DNA, 25 bp, Homo sapien
ccgggctggcgcgagagtggagggt

SEQ ID NO: 686939 - DNA, 25 bp, Homo sapien
gtaaggagggcacgagggcctgcag

SEQ ID NO: 686940 - DNA, 25 bp, Homo sapien
gaagtaaggagggcacgagggcctg

SEQ ID NO: 686941 - DNA, 25 bp, Homo sapien
cttggggttgaagtggatgaggaag

SEQ ID NO: 686942 - DNA, 25 bp, Homo sapien
cgcagggggcgctgggagacccggg

SEQ ID NO: 686943 - DNA, 25 bp, Homo sapien
cttgtgggggaatggataaggaggg

SEQ ID NO: 686944 - DNA, 25 bp, Homo sapien
ggtcctgcagggggcgctgggagac

SEQ ID NO: 686945 - DNA, 25 bp, Homo sapien
ataaggaggggagggggtcctgcag

SEQ ID NO: 686946 - DNA, 25 bp, Homo sapien
gggggtcctgcagggggcgctggga

SEQ ID NO: 686947 - DNA, 25 bp, Homo sapien
tccctagtttctgcgtggtgtctgg

SEQ ID NO: 686948 - DNA, 25 bp, Homo sapien
tggggtttccgtcacagtatatgta

SEQ ID NO: 686949 - DNA, 25 bp, Homo sapien
cagtgggtactggtacacttgccag

SEQ ID NO: 686950 - DNA, 25 bp, Homo sapien
gccagtgactttcttcgctccctag

SEQ ID NO: 686951 - DNA, 25 bp, Homo sapien
agaactgtcctgattcaggaaatca

SEQ ID NO: 686952 - DNA, 25 bp, Homo sapien
gggagaggacgttgtttggtgcagc

SEQ ID NO: 686953 - DNA, 25 bp, Homo sapien
gtgcagcttgccctattcttctctt

SEQ ID NO: 686954 - DNA, 25 bp, Homo sapien
aactgtcctgattcaggaaatcacc

SEQ ID NO: 686955 - DNA, 25 bp, Homo sapien
tttgcttgtggtgcggtgtagcaaa

SEQ ID NO: 686956 - DNA, 25 bp, Homo sapien
taaaggactggttgtgcgtgcctcc

SEQ ID NO: 686957 - DNA, 25 bp, Homo sapien
actggttgtgcgtgcctccttcaag

SEQ ID NO: 686958 - DNA, 25 bp, Homo sapien
aggactggttgtgcgtgcctccttc

SEQ ID NO: 686959 - DNA, 25 bp, Homo sapien
gctcccagcgacatgacaattactt

SEQ ID NO: 686960 - DNA, 25 bp, Homo sapien
cccagcgacatgacaattacttcca

SEQ ID NO: 686961 - DNA, 25 bp, Homo sapien
gccagagctcccagcgacatgacaa

SEQ ID NO: 686962 - DNA, 25 bp, Homo sapien
agagctcccagcgacatgacaatta

SEQ ID NO: 686963 - DNA, 25 bp, Homo sapien
cacagggaggcgttttcagggccca

SEQ ID NO: 686964 - DNA, 25 bp, Homo sapien
cactcaaacgctgacagtgccttgc

SEQ ID NO: 686965 - DNA, 25 bp, Homo sapien
ttaagttcgtggagcagcttagctc

SEQ ID NO: 686966 - DNA, 25 bp, Homo sapien
tcaggttctcagttaaaatgccgca

SEQ ID NO: 686967 - DNA, 25 bp, Homo sapien
tattgaattcgcctaagtgttgcga

SEQ ID NO: 686968 - DNA, 25 bp, Homo sapien
tgttattgaattcgcctaagtgttg

SEQ ID NO: 686969 - DNA, 25 bp, Homo sapien
cgcctaagtgttgcgactcttgatg

SEQ ID NO: 686970 - DNA, 25 bp, Homo sapien
gaattcgcctaagtgttgcgactct

SEQ ID NO: 686971 - DNA, 25 bp, Homo sapien
gtgcagttcagaaaaatgcctccgt

SEQ ID NO: 686972 - DNA, 25 bp, Homo sapien
gcagttcagaaaaatgcctccgtgg

SEQ ID NO: 686973 - DNA, 25 bp, Homo sapien
cagttcagaaaaatgcctccgtggg

SEQ ID NO: 686974 - DNA, 25 bp, Homo sapien
tgcagttcagaaaaatgcctccgtg

SEQ ID NO: 686975 - DNA, 25 bp, Homo sapien
catgctgcataggagcaaagacctc

SEQ ID NO: 686976 - DNA, 25 bp, Homo sapien
caacaagaagggctgcttagcagac

SEQ ID NO: 686977 - DNA, 25 bp, Homo sapien
ggagtaaggcagacatcaaacccac

SEQ ID NO: 686978 - DNA, 25 bp, Homo sapien
tcagtagcccattttcatatgcgca

SEQ ID NO: 686979 - DNA, 25 bp, Homo sapien
tagtatccctggcaacagagaccca

SEQ ID NO: 686980 - DNA, 25 bp, Homo sapien
ggatgacctgaatcgccctggtgga

SEQ ID NO: 686981 - DNA, 25 bp, Homo sapien
caacccattgagctggagtgacgtc

SEQ ID NO: 686982 - DNA, 25 bp, Homo sapien
taaatacctttcgtcccaggacatg

SEQ ID NO: 686983 - DNA, 25 bp, Homo sapien
accaaggggcatttttgtggtcatc

SEQ ID NO: 686984 - DNA, 25 bp, Homo sapien
ttcggtgttcccgtcactgccgttg

SEQ ID NO: 686985 - DNA, 25 bp, Homo sapien
tgtggtcatcccttcggtgttcccg

SEQ ID NO: 686986 - DNA, 25 bp, Homo sapien
ggtgttcccgtcactgccgttggtg

SEQ ID NO: 686987 - DNA, 25 bp, Homo sapien
catgtgttgcaatcagactgtcctc

SEQ ID NO: 686988 - DNA, 25 bp, Homo sapien
tacaacaggtcaaatcagagatgcc

SEQ ID NO: 686989 - DNA, 25 bp, Homo sapien
tatggaagccggaaatgtacaacag

SEQ ID NO: 686990 - DNA, 25 bp, Homo sapien
taaatcccttagagcccagttggga

SEQ ID NO: 686991 - DNA, 25 bp, Homo sapien
tgtctttgtcactgctccatcctgc

SEQ ID NO: 686992 - DNA, 25 bp, Homo sapien
gtctttgtcactgctccatcctgca

SEQ ID NO: 686993 - DNA, 25 bp, Homo sapien
tcttggctgtccctgcgcgtgtttt

SEQ ID NO: 686994 - DNA, 25 bp, Homo sapien
gtccctgcgcgtgttttctgctgtc

SEQ ID NO: 686995 - DNA, 25 bp, Homo sapien
ctacaggctcgtcaaagtccagttc

SEQ ID NO: 686996 - DNA, 25 bp, Homo sapien
cattctacaggctcgtcaaagtcca

SEQ ID NO: 686997 - DNA, 25 bp, Homo sapien
ttctacaggctcgtcaaagtccagt

SEQ ID NO: 686998 - DNA, 25 bp, Homo sapien
gcattctacaggctcgtcaaagtcc

SEQ ID NO: 686999 - DNA, 25 bp, Homo sapien
gcagggagtctctaaggacaggaaa

SEQ ID NO: 687000 - DNA, 25 bp, Homo sapien
tccggccagccccttgaaattgttg

SEQ ID NO: 687001 - DNA, 25 bp, Homo sapien
gacagtcagatgaggaagacccatg

SEQ ID NO: 687002 - DNA, 25 bp, Homo sapien
gaaattgttgtcaatgagtccccac

SEQ ID NO: 687003 - DNA, 25 bp, Homo sapien
tgtggccaggatcgaaagcaagacg

SEQ ID NO: 687004 - DNA, 25 bp, Homo sapien
gaaagcgttcaatgccaggttccca

SEQ ID NO: 687005 - DNA, 25 bp, Homo sapien
gacggttatcgtcacccaagagcaa

SEQ ID NO: 687006 - DNA, 25 bp, Homo sapien
ttcccagggtgcatgaaaggtgagc

SEQ ID NO: 687007 - DNA, 25 bp, Homo sapien
gattagctagaatgcacaccaaaaa

SEQ ID NO: 687008 - DNA, 25 bp, Homo sapien
caaatttaaggttactcaggcattg

SEQ ID NO: 687009 - DNA, 25 bp, Homo sapien
tgggcaagatgacctactagttttc

SEQ ID NO: 687010 - DNA, 25 bp, Homo sapien
tttcactttagctatgtggattagc

SEQ ID NO: 687011 - DNA, 25 bp, Homo sapien
tgcggaacacgttcttgacatgtac

SEQ ID NO: 687012 - DNA, 25 bp, Homo sapien
cgttcttgacatgtacttgactcag

SEQ ID NO: 687013 - DNA, 25 bp, Homo sapien
tctccttttcactgcggaacacgtt

SEQ ID NO: 687014 - DNA, 25 bp, Homo sapien
ttgacatgtacttgactcagagtcc

SEQ ID NO: 687015 - DNA, 25 bp, Homo sapien
gcaccggatcgatgcgggactgatt

SEQ ID NO: 687016 - DNA, 25 bp, Homo sapien
gctcccgggaccactgggcagattc

SEQ ID NO: 687017 - DNA, 25 bp, Homo sapien
aacacaggcacttgtgaaggccccg

SEQ ID NO: 687018 - DNA, 25 bp, Homo sapien
cagcatagcgtggacctttgagagg

SEQ ID NO: 687019 - DNA, 25 bp, Homo sapien
ggttgagcacgaggatggcacaaac

SEQ ID NO: 687020 - DNA, 25 bp, Homo sapien
tctccgtggattcgggacttggcct

SEQ ID NO: 687021 - DNA, 25 bp, Homo sapien
ttttcaggccacaggacggcctggg

SEQ ID NO: 687022 - DNA, 25 bp, Homo sapien
attccaatgggggtgttctggtgac

SEQ ID NO: 687023 - DNA, 25 bp, Homo sapien
tgatctttccggacccaactgtggc

SEQ ID NO: 687024 - DNA, 25 bp, Homo sapien
aatccgagatgcatcctggctgcca

SEQ ID NO: 687025 - DNA, 25 bp, Homo sapien
gccctggtccaggaatcacagtggg

SEQ ID NO: 687026 - DNA, 25 bp, Homo sapien
accttgatctttccggacccaactg

SEQ ID NO: 687027 - DNA, 25 bp, Homo sapien
ctgggcagacgggcatgcgcagagc

SEQ ID NO: 687028 - DNA, 25 bp, Homo sapien
aactctgaccctggatgggacctcg

SEQ ID NO: 687029 - DNA, 25 bp, Homo sapien
tgtagggggtctcagaatcagaaac

SEQ ID NO: 687030 - DNA, 25 bp, Homo sapien
ctctgaccctggatgggacctcggg

SEQ ID NO: 687031 - DNA, 25 bp, Homo sapien
gaaactctgaccctggatgggacct

SEQ ID NO: 687032 - DNA, 25 bp, Homo sapien
ctttcttcacatgtgcacggatttc

SEQ ID NO: 687033 - DNA, 25 bp, Homo sapien
tcttcacatgtgcacggatttcttt

SEQ ID NO: 687034 - DNA, 25 bp, Homo sapien
cacatgtgcacggatttctttctag

SEQ ID NO: 687035 - DNA, 25 bp, Homo sapien
catgtgcacggatttctttctagac

SEQ ID NO: 687036 - DNA, 25 bp, Homo sapien
tgccgaagggctgaaatgcctcctt

SEQ ID NO: 687037 - DNA, 25 bp, Homo sapien
cgaagggctgaaatgcctccttggg

SEQ ID NO: 687038 - DNA, 25 bp, Homo sapien
ggctgaaatgcctccttgggggtca

SEQ ID NO: 687039 - DNA, 25 bp, Homo sapien
gctgaaatgcctccttgggggtcat

SEQ ID NO: 687040 - DNA, 25 bp, Homo sapien
cattgtcagactcaaacaaggagct

SEQ ID NO: 687041 - DNA, 25 bp, Homo sapien
ctgagcacattgtcagactcaaaca

SEQ ID NO: 687042 - DNA, 25 bp, Homo sapien
gcacattgtcagactcaaacaagga

SEQ ID NO: 687043 - DNA, 25 bp, Homo sapien
tgtcagactcaaacaaggagctaga

SEQ ID NO: 687044 - DNA, 25 bp, Homo sapien
aggccctggaagtttccgagcccag

SEQ ID NO: 687045 - DNA, 25 bp, Homo sapien
ccctggaagtttccgagcccagcct

SEQ ID NO: 687046 - DNA, 25 bp, Homo sapien
cctggaagtttccgagcccagcctg

SEQ ID NO: 687047 - DNA, 25 bp, Homo sapien
ggccctggaagtttccgagcccagc

SEQ ID NO: 687048 - DNA, 25 bp, Homo sapien
gctagtttgtgagtcaataagcacg

SEQ ID NO: 687049 - DNA, 25 bp, Homo sapien
tgctagtttgtgagtcaataagcac

SEQ ID NO: 687050 - DNA, 25 bp, Homo sapien
acatgagtgtcccttgattccccag

SEQ ID NO: 687051 - DNA, 25 bp, Homo sapien
gccattcaaagccaaaatgcccgtg

SEQ ID NO: 687052 - DNA, 25 bp, Homo sapien
gggagctaggcttcggccattcaaa

SEQ ID NO: 687053 - DNA, 25 bp, Homo sapien
aatgcccgtgagtccctctgtagac

SEQ ID NO: 687054 - DNA, 25 bp, Homo sapien
gctgtggcctgcctagagcaccatt

SEQ ID NO: 687055 - DNA, 25 bp, Homo sapien
gtgctgggctctccggcaataccca

SEQ ID NO: 687056 - DNA, 25 bp, Homo sapien
caaaccacggtggttctctgaataa

SEQ ID NO: 687057 - DNA, 25 bp, Homo sapien
gtccaaactcccaagcggccatggt

SEQ ID NO: 687058 - DNA, 25 bp, Homo sapien
aagcgggactaacaggctccctcaa

SEQ ID NO: 687059 - DNA, 25 bp, Homo sapien
caagccctttcatggcagcgctaat

SEQ ID NO: 687060 - DNA, 25 bp, Homo sapien
tgcttacagtttcggggtctgggaa

SEQ ID NO: 687061 - DNA, 25 bp, Homo sapien
atggcggacaggcaagcgggactaa

SEQ ID NO: 687062 - DNA, 25 bp, Homo sapien
tcaaacaagacgctaaggaatgcag

SEQ ID NO: 687063 - DNA, 25 bp, Homo sapien
tagccatgatggaaggtaactccag

SEQ ID NO: 687064 - DNA, 25 bp, Homo sapien
tgtccaagccccacgtgaggctgtg

SEQ ID NO: 687065 - DNA, 25 bp, Homo sapien
gagagcagcaggctagtctccctag

SEQ ID NO: 687066 - DNA, 25 bp, Homo sapien
gatgggctgaccaatgtctcgagga

SEQ ID NO: 687067 - DNA, 25 bp, Homo sapien
cagctttgtgactcctgtttccaag

SEQ ID NO: 687068 - DNA, 25 bp, Homo sapien
agctcccctcgtgtgaggcttcatc

SEQ ID NO: 687069 - DNA, 25 bp, Homo sapien
gtttccaagagtcatagtttccagc

SEQ ID NO: 687070 - DNA, 25 bp, Homo sapien
gacaatgcacctgttcatccacggg

SEQ ID NO: 687071 - DNA, 25 bp, Homo sapien
cacagagtgattcctcagatggatc

SEQ ID NO: 687072 - DNA, 25 bp, Homo sapien
ttatgagggcataagtgcaacacag

SEQ ID NO: 687073 - DNA, 25 bp, Homo sapien
gatcaccaatctacatgccgttaag

SEQ ID NO: 687074 - DNA, 25 bp, Homo sapien
gactgggaattcttgcttcaaacga

SEQ ID NO: 687075 - DNA, 25 bp, Homo sapien
cgatggtggcgtcctcgagaaagca

SEQ ID NO: 687076 - DNA, 25 bp, Homo sapien
ttcaaacgaagcttctgggccggca

SEQ ID NO: 687077 - DNA, 25 bp, Homo sapien
cacccctgggctgatagacattttg

SEQ ID NO: 687078 - DNA, 25 bp, Homo sapien
tctggacgtcagtgtcttcctctgg

SEQ ID NO: 687079 - DNA, 25 bp, Homo sapien
ctccgctcgtgctgttgtgctgtct

SEQ ID NO: 687080 - DNA, 25 bp, Homo sapien
gctgtctgggaagcgtctttctgct

SEQ ID NO: 687081 - DNA, 25 bp, Homo sapien
tttctgctccactgatcccgcagtg

SEQ ID NO: 687082 - DNA, 25 bp, Homo sapien
attgctgtgtcccagctgcacccgt

SEQ ID NO: 687083 - DNA, 25 bp, Homo sapien
gggacgccgtggagcctcatctcat

SEQ ID NO: 687084 - DNA, 25 bp, Homo sapien
tagggtcccccaagttgaggaatca

SEQ ID NO: 687085 - DNA, 25 bp, Homo sapien
cgtctcagtatggactgctccatgt

SEQ ID NO: 687086 - DNA, 25 bp, Homo sapien
ccattgaagggaggtggcgtggacc

SEQ ID NO: 687087 - DNA, 25 bp, Homo sapien
ttgaagggaggtggcgtggaccggc

SEQ ID NO: 687088 - DNA, 25 bp, Homo sapien
tgccattgaagggaggtggcgtgga

SEQ ID NO: 687089 - DNA, 25 bp, Homo sapien
cattgaagggaggtggcgtggaccg

SEQ ID NO: 687090 - DNA, 25 bp, Homo sapien
tgaggtagaaagtatcagagtacag

SEQ ID NO: 687091 - DNA, 25 bp, Homo sapien
tatcagagtacagggaaatcaggag

SEQ ID NO: 687092 - DNA, 25 bp, Homo sapien
ctcaggacggccgtaaaggtggact

SEQ ID NO: 687093 - DNA, 25 bp, Homo sapien
agaggatccggtggctccccaccga

SEQ ID NO: 687094 - DNA, 25 bp, Homo sapien
cctggagactgtctgtcttgtaatg

SEQ ID NO: 687095 - DNA, 25 bp, Homo sapien
gattgtgctggtaaataattgaggc

SEQ ID NO: 687096 - DNA, 25 bp, Homo sapien
gatgttcccgtgtccaatctggatg

SEQ ID NO: 687097 - DNA, 25 bp, Homo sapien
gcttcggagtttgcaatggaaatcc

SEQ ID NO: 687098 - DNA, 25 bp, Homo sapien
caaaataatattcaactgtatccct

SEQ ID NO: 687099 - DNA, 25 bp, Homo sapien
tgcaaaataatattcaactgtatcc

SEQ ID NO: 687100 - DNA, 25 bp, Homo sapien
ctgcaaaataatattcaactgtatc

SEQ ID NO: 687101 - DNA, 25 bp, Homo sapien
gcaaaataatattcaactgtatccc

SEQ ID NO: 687102 - DNA, 25 bp, Homo sapien
ctgggcggtaaatcgtccatgcttt

SEQ ID NO: 687103 - DNA, 25 bp, Homo sapien
catgctttggactgctcatccatgt

SEQ ID NO: 687104 - DNA, 25 bp, Homo sapien
tgcttgggcgatgaccagggccctc

SEQ ID NO: 687105 - DNA, 25 bp, Homo sapien
ggtgcctgctcttcatcctgtacaa

SEQ ID NO: 687106 - DNA, 25 bp, Homo sapien
cccgttgttggctgaactgagggcc

SEQ ID NO: 687107 - DNA, 25 bp, Homo sapien
ccgttgttggctgaactgagggcca

SEQ ID NO: 687108 - DNA, 25 bp, Homo sapien
gccaggggtctctggaattgtagct

SEQ ID NO: 687109 - DNA, 25 bp, Homo sapien
tggaattgtagctgcatgttgctgg

SEQ ID NO: 687110 - DNA, 25 bp, Homo sapien
caatgccggtagttgcaaactcaga

SEQ ID NO: 687111 - DNA, 25 bp, Homo sapien
tagtgttctgcagagtacctcctgt

SEQ ID NO: 687112 - DNA, 25 bp, Homo sapien
taagtgcatgataaatggcagctcc

SEQ ID NO: 687113 - DNA, 25 bp, Homo sapien
tatgttctgtgattgggaccatggc

SEQ ID NO: 687114 - DNA, 25 bp, Homo sapien
aaacctgtgagctcccatgtggcag

SEQ ID NO: 687115 - DNA, 25 bp, Homo sapien
tgtggcagagttcagattcgaaccc

SEQ ID NO: 687116 - DNA, 25 bp, Homo sapien
tcccatgtggcagagttcagattcg

SEQ ID NO: 687117 - DNA, 25 bp, Homo sapien
cagagagaggaaacctgtgagctcc

SEQ ID NO: 687118 - DNA, 25 bp, Homo sapien
cttcaggatcagtcccgcccaagca

SEQ ID NO: 687119 - DNA, 25 bp, Homo sapien
gccttcaggatcagtcccgcccaag

SEQ ID NO: 687120 - DNA, 25 bp, Homo sapien
tctgcaggaccctcgccttcaggat

SEQ ID NO: 687121 - DNA, 25 bp, Homo sapien
aggaccctcgccttcaggatcagtc

SEQ ID NO: 687122 - DNA, 25 bp, Homo sapien
tcaccagctgggcaagtttcaccgg

SEQ ID NO: 687123 - DNA, 25 bp, Homo sapien
ccttcaccagctgggcaagtttcac

SEQ ID NO: 687124 - DNA, 25 bp, Homo sapien
ctttttcattcggtagaggacttgg

SEQ ID NO: 687125 - DNA, 25 bp, Homo sapien
cttggttgagctccctcttgggtgc

SEQ ID NO: 687126 - DNA, 25 bp, Homo sapien
tcaggtaggtacgatggcatatgcc

SEQ ID NO: 687127 - DNA, 25 bp, Homo sapien
ttaatgaggactaagcaggacccca

SEQ ID NO: 687128 - DNA, 25 bp, Homo sapien
taggtacagtgataggctccccgtt

SEQ ID NO: 687129 - DNA, 25 bp, Homo sapien
tcagatgccacttcctagggaaagc

SEQ ID NO: 687130 - DNA, 25 bp, Homo sapien
ctctgcccgggtcagcaggagcctg

SEQ ID NO: 687131 - DNA, 25 bp, Homo sapien
ctgcccgggtcagcaggagcctggg

SEQ ID NO: 687132 - DNA, 25 bp, Homo sapien
tctgcccgggtcagcaggagcctgg

SEQ ID NO: 687133 - DNA, 25 bp, Homo sapien
tcggagagacttggcaggtgtgcag

SEQ ID NO: 687134 - DNA, 25 bp, Homo sapien
gctgcaaggagtcggagagacttgg

SEQ ID NO: 687135 - DNA, 25 bp, Homo sapien
agagggtgggctaggtcgaggctgg

SEQ ID NO: 687136 - DNA, 25 bp, Homo sapien
ccctgagagggtgggctaggtcgag

SEQ ID NO: 687137 - DNA, 25 bp, Homo sapien
aaggggagggatgccagcttccact

SEQ ID NO: 687138 - DNA, 25 bp, Homo sapien
ggccagattcggtttcaggagaaaa

SEQ ID NO: 687139 - DNA, 25 bp, Homo sapien
gcttacagcccggaaatagatgcct

SEQ ID NO: 687140 - DNA, 25 bp, Homo sapien
gaaatagatgcctagccaggccggc

SEQ ID NO: 687141 - DNA, 25 bp, Homo sapien
cttccccgttccaggcacagcccac

SEQ ID NO: 687142 - DNA, 25 bp, Homo sapien
tggacctctacatttttattttctg

SEQ ID NO: 687143 - DNA, 25 bp, Homo sapien
tattttctgaatcagcatcagagaa

SEQ ID NO: 687144 - DNA, 25 bp, Homo sapien
ctggacctctacatttttattttct

SEQ ID NO: 687145 - DNA, 25 bp, Homo sapien
ttttattttctgaatcagcatcaga

SEQ ID NO: 687146 - DNA, 25 bp, Homo sapien
tcttcttccagtttgtttcccttgc

SEQ ID NO: 687147 - DNA, 25 bp, Homo sapien
ccagctctcagtggcttttcttgtc

SEQ ID NO: 687148 - DNA, 25 bp, Homo sapien
ttccagtttgtttcccttgcccaca

SEQ ID NO: 687149 - DNA, 25 bp, Homo sapien
aggtgctacagaggcaccgtcccca

SEQ ID NO: 687150 - DNA, 25 bp, Homo sapien
gatcatttgccaaatactttctcat

SEQ ID NO: 687151 - DNA, 25 bp, Homo sapien
tgatcatttgccaaatactttctca

SEQ ID NO: 687152 - DNA, 25 bp, Homo sapien
ctgatcatttgccaaatactttctc

SEQ ID NO: 687153 - DNA, 25 bp, Homo sapien
cgcatgccacggaaagcttacataa

SEQ ID NO: 687154 - DNA, 25 bp, Homo sapien
caaatacagagtcttacgcagcggg

SEQ ID NO: 687155 - DNA, 25 bp, Homo sapien
accaatgaggacagggaatgaaccc

SEQ ID NO: 687156 - DNA, 25 bp, Homo sapien
gccaggaaccaacgtgaaagcattg

SEQ ID NO: 687157 - DNA, 25 bp, Homo sapien
tgtgaaatctgtgtagaaccgggct

SEQ ID NO: 687158 - DNA, 25 bp, Homo sapien
gctttgcaggggagataattttcct

SEQ ID NO: 687159 - DNA, 25 bp, Homo sapien
aacacggacggttcttagcacaatt

SEQ ID NO: 687160 - DNA, 25 bp, Homo sapien
aatctgtgtagaaccgggctttgca

SEQ ID NO: 687161 - DNA, 25 bp, Homo sapien
ggcagacccctgaaacgaagcttgt

SEQ ID NO: 687162 - DNA, 25 bp, Homo sapien
cataccatgaagcaacgagacccaa

SEQ ID NO: 687163 - DNA, 25 bp, Homo sapien
cctagatgggagtcgtgtacaaacc

SEQ ID NO: 687164 - DNA, 25 bp, Homo sapien
taacgtgacaactaccatctagagg

SEQ ID NO: 687165 - DNA, 25 bp, Homo sapien
gagcgacgggagtgtcactgcttct

SEQ ID NO: 687166 - DNA, 25 bp, Homo sapien
gacgggagtgtcactgcttcttcag

SEQ ID NO: 687167 - DNA, 25 bp, Homo sapien
gcgacgggagtgtcactgcttcttc

SEQ ID NO: 687168 - DNA, 25 bp, Homo sapien
cgagcgacgggagtgtcactgcttc

SEQ ID NO: 687169 - DNA, 25 bp, Homo sapien
aaagcacacgtttcacatgcatgag

SEQ ID NO: 687170 - DNA, 25 bp, Homo sapien
gaactttctactaggctggcggcat

SEQ ID NO: 687171 - DNA, 25 bp, Homo sapien
catgagctcgagtggctagaacttc

SEQ ID NO: 687172 - DNA, 25 bp, Homo sapien
tacctttcgggataacctgtactga

SEQ ID NO: 687173 - DNA, 25 bp, Homo sapien
tcctctggtcacctctatttacgct

SEQ ID NO: 687174 - DNA, 25 bp, Homo sapien
tctggtcacctctatttacgctcac

SEQ ID NO: 687175 - DNA, 25 bp, Homo sapien
ctctggtcacctctatttacgctca

SEQ ID NO: 687176 - DNA, 25 bp, Homo sapien
ctcctctggtcacctctatttacgc

SEQ ID NO: 687177 - DNA, 25 bp, Homo sapien
agcaggtcccgccaaccccaaatct

SEQ ID NO: 687178 - DNA, 25 bp, Homo sapien
caggtcccgccaaccccaaatctat

SEQ ID NO: 687179 - DNA, 25 bp, Homo sapien
gcaggtcccgccaaccccaaatcta

SEQ ID NO: 687180 - DNA, 25 bp, Homo sapien
caggaggaggtcagattgcgaatac

SEQ ID NO: 687181 - DNA, 25 bp, Homo sapien
gacacaccagaagggaagcgttgtt

SEQ ID NO: 687182 - DNA, 25 bp, Homo sapien
gaagctcgggttggtgtttgctcaa

SEQ ID NO: 687183 - DNA, 25 bp, Homo sapien
ggtgaagaattctgcgcccgaagct

SEQ ID NO: 687184 - DNA, 25 bp, Homo sapien
gggcttcctagggtccagtgcggca

SEQ ID NO: 687185 - DNA, 25 bp, Homo sapien
gcttcctagggtccagtgcggcagt

SEQ ID NO: 687186 - DNA, 25 bp, Homo sapien
ttcctagggtccagtgcggcagtta

SEQ ID NO: 687187 - DNA, 25 bp, Homo sapien
ctagggtccagtgcggcagttaccg

SEQ ID NO: 687188 - DNA, 25 bp, Homo sapien
gacaagtcatcgagccctctggcat

SEQ ID NO: 687189 - DNA, 25 bp, Homo sapien
ccttcaccggtgaacctttagccag

SEQ ID NO: 687190 - DNA, 25 bp, Homo sapien
tagccagctgaacaaccaccaaagc

SEQ ID NO: 687191 - DNA, 25 bp, Homo sapien
aaagcgccctgcagagacaagtcat

SEQ ID NO: 687192 - DNA, 25 bp, Homo sapien
gctccaccccacggggaccttcaca

SEQ ID NO: 687193 - DNA, 25 bp, Homo sapien
ccttcacagttggaaaaaagaagag

SEQ ID NO: 687194 - DNA, 25 bp, Homo sapien
caccccacggggaccttcacagttg

SEQ ID NO: 687195 - DNA, 25 bp, Homo sapien
tcacagttggaaaaaagaagaggaa

SEQ ID NO: 687196 - DNA, 25 bp, Homo sapien
tatataacgtggtgataacctgtca

SEQ ID NO: 687197 - DNA, 25 bp, Homo sapien
tttgcttgtgatttaaaggctgttc

SEQ ID NO: 687198 - DNA, 25 bp, Homo sapien
tctccttcggtagggaatatataac

SEQ ID NO: 687199 - DNA, 25 bp, Homo sapien
ctggaactcggtgcctccgtggtta

SEQ ID NO: 687200 - DNA, 25 bp, Homo sapien
cagctcaacaaagaaacgtggtttt

SEQ ID NO: 687201 - DNA, 25 bp, Homo sapien
caggcgactctgaaattccgacatt

SEQ ID NO: 687202 - DNA, 25 bp, Homo sapien
ctaagaagcgcggagtgttctgcct

SEQ ID NO: 687203 - DNA, 25 bp, Homo sapien
ctcttagcttgtgcattcagaccag

SEQ ID NO: 687204 - DNA, 25 bp, Homo sapien
tccccgtctgacagcgagatggtgg

SEQ ID NO: 687205 - DNA, 25 bp, Homo sapien
tagtggccgatgacctcgctgtagg

SEQ ID NO: 687206 - DNA, 25 bp, Homo sapien
ggcactatccatcaggtcactgtcg

SEQ ID NO: 687207 - DNA, 25 bp, Homo sapien
cacgtggcgctgatgcccgagttac

SEQ ID NO: 687208 - DNA, 25 bp, Homo sapien
tcctccaaacagtggcagcgtccgt

SEQ ID NO: 687209 - DNA, 25 bp, Homo sapien
gcagggagcagatgatctccggcaa

SEQ ID NO: 687210 - DNA, 25 bp, Homo sapien
tgatctccggcaaggaggatcccag

SEQ ID NO: 687211 - DNA, 25 bp, Homo sapien
cagtggcagcgtccgtgctcccgtg

SEQ ID NO: 687212 - DNA, 25 bp, Homo sapien
tctccgagggccacaggcatccttc

SEQ ID NO: 687213 - DNA, 25 bp, Homo sapien
tgggattccgttgcctgacactgtg

SEQ ID NO: 687214 - DNA, 25 bp, Homo sapien
ctgacactgtgctctccgagggcca

SEQ ID NO: 687215 - DNA, 25 bp, Homo sapien
ctctgggattccgttgcctgacact

SEQ ID NO: 687216 - DNA, 25 bp, Homo sapien
ccgctgctgtccactttcagttcca

SEQ ID NO: 687217 - DNA, 25 bp, Homo sapien
cctgcagacccttggagaccagcat

SEQ ID NO: 687218 - DNA, 25 bp, Homo sapien
agccccaggtcctttacacggcagg

SEQ ID NO: 687219 - DNA, 25 bp, Homo sapien
tgaagggcctctcccgtgaaccttg

SEQ ID NO: 687220 - DNA, 25 bp, Homo sapien
ccgctgctggcagattgtcgcacat

SEQ ID NO: 687221 - DNA, 25 bp, Homo sapien
ccatgggagtggacgctaggtcttt

SEQ ID NO: 687222 - DNA, 25 bp, Homo sapien
ttcctagtctgagcaggccttgggc

SEQ ID NO: 687223 - DNA, 25 bp, Homo sapien
tctgggtaaacctgaagtctgcgcc

SEQ ID NO: 687224 - DNA, 25 bp, Homo sapien
ggtacggtacactctccactaactg

SEQ ID NO: 687225 - DNA, 25 bp, Homo sapien
agtgaagcccctgcagtcggcctct

SEQ ID NO: 687226 - DNA, 25 bp, Homo sapien
cgtctcctgctccacaacagtgaag

SEQ ID NO: 687227 - DNA, 25 bp, Homo sapien
gcaggatcccaggtgccgtctcctg

SEQ ID NO: 687228 - DNA, 25 bp, Homo sapien
acagcttgtagtggctcagcaggca

SEQ ID NO: 687229 - DNA, 25 bp, Homo sapien
ggctcagcaggcacgtgatcaccac

SEQ ID NO: 687230 - DNA, 25 bp, Homo sapien
tggctgtgccggctgatgaaggacc

SEQ ID NO: 687231 - DNA, 25 bp, Homo sapien
tgaaggaccgtgcagacagcttgta

SEQ ID NO: 687232 - DNA, 25 bp, Homo sapien
atgatctgaacaaactccagctccg

SEQ ID NO: 687233 - DNA, 25 bp, Homo sapien
ccaccacgatgatgatgatctgaac

SEQ ID NO: 687234 - DNA, 25 bp, Homo sapien
atgatgatgatctgaacaaactcca

SEQ ID NO: 687235 - DNA, 25 bp, Homo sapien
caccacgatgatgatgatctgaaca

SEQ ID NO: 687236 - DNA, 25 bp, Homo sapien
aaaaacaggccgtgcagagccgatg

SEQ ID NO: 687237 - DNA, 25 bp, Homo sapien
tgactcaagcgggtctgtgccgaag

SEQ ID NO: 687238 - DNA, 25 bp, Homo sapien
ttattttgatcctgcctgagccggg

SEQ ID NO: 687239 - DNA, 25 bp, Homo sapien
taacaagcaattagccaggctccct

SEQ ID NO: 687240 - DNA, 25 bp, Homo sapien
gaggtcggtcgcaaaccagagaccc

SEQ ID NO: 687241 - DNA, 25 bp, Homo sapien
ctttaggggacaggaatgcattctc

SEQ ID NO: 687242 - DNA, 25 bp, Homo sapien
ttccaggagacgctcagctttaggg

SEQ ID NO: 687243 - DNA, 25 bp, Homo sapien
aagggcacgcgcaccgaccgtccct

SEQ ID NO: 687244 - DNA, 25 bp, Homo sapien
ttcgtgcctgcatttgttccgagga

SEQ ID NO: 687245 - DNA, 25 bp, Homo sapien
tcgcagcttgagagccggactctca

SEQ ID NO: 687246 - DNA, 25 bp, Homo sapien
tcaggatcagatgcctcgcgggcaa

SEQ ID NO: 687247 - DNA, 25 bp, Homo sapien
ggcagctcgcagaatcctcttcgtg

SEQ ID NO: 687248 - DNA, 25 bp, Homo sapien
ccggctgtgaagctgtggtccttta

SEQ ID NO: 687249 - DNA, 25 bp, Homo sapien
gccccaggtcacttagtgactactg

SEQ ID NO: 687250 - DNA, 25 bp, Homo sapien
caaggcatggacaaagacatcccag

SEQ ID NO: 687251 - DNA, 25 bp, Homo sapien
aatgcccagtatgacacctgcaggg

SEQ ID NO: 687252 - DNA, 25 bp, Homo sapien
cttaagcaggccccggtccagcgcc

SEQ ID NO: 687253 - DNA, 25 bp, Homo sapien
ccttaagcaggccccggtccagcgc

SEQ ID NO: 687254 - DNA, 25 bp, Homo sapien
ttaagcaggccccggtccagcgcca

SEQ ID NO: 687255 - DNA, 25 bp, Homo sapien
taagcaggccccggtccagcgccat

SEQ ID NO: 687256 - DNA, 25 bp, Homo sapien
ttaaacgactgttcctaatcttcgc

SEQ ID NO: 687257 - DNA, 25 bp, Homo sapien
agcccacaagctctgccgtctgtgg

SEQ ID NO: 687258 - DNA, 25 bp, Homo sapien
tggttctgccccagacgtggatgtg

SEQ ID NO: 687259 - DNA, 25 bp, Homo sapien
taatcttcgctcctcttgcagcaag

SEQ ID NO: 687260 - DNA, 25 bp, Homo sapien
cagctctatatatcggagggacaca

SEQ ID NO: 687261 - DNA, 25 bp, Homo sapien
ttcagacgtgtttgaccacagaagc

SEQ ID NO: 687262 - DNA, 25 bp, Homo sapien
cacagaagcctttgattgtgaatca

SEQ ID NO: 687263 - DNA, 25 bp, Homo sapien
gacctgtcgtaaaaagagaggctgt

SEQ ID NO: 687264 - DNA, 25 bp, Homo sapien
gccacccccgctgtgtggtcttgaa

SEQ ID NO: 687265 - DNA, 25 bp, Homo sapien
aagccacccccgctgtgtggtcttg

SEQ ID NO: 687266 - DNA, 25 bp, Homo sapien
tggtgcccgcagccctcgttccaaa

SEQ ID NO: 687267 - DNA, 25 bp, Homo sapien
tcgttccaaagccacccccgctgtg

SEQ ID NO: 687268 - DNA, 25 bp, Homo sapien
ggattcaattcctcgagggctgagg

SEQ ID NO: 687269 - DNA, 25 bp, Homo sapien
ctggcgggtcacgagcacggccact

SEQ ID NO: 687270 - DNA, 25 bp, Homo sapien
agcacggccacttttggccccagga

SEQ ID NO: 687271 - DNA, 25 bp, Homo sapien
aggaggattcaattcctcgagggct

SEQ ID NO: 687272 - DNA, 25 bp, Homo sapien
caccccatgccagccgggtgccact

SEQ ID NO: 687273 - DNA, 25 bp, Homo sapien
tggcagggcggcttgtggaagccat

SEQ ID NO: 687274 - DNA, 25 bp, Homo sapien
ctgccagatgcagaggaggccaagt

SEQ ID NO: 687275 - DNA, 25 bp, Homo sapien
aagtggctgtcccaccccatgccag

SEQ ID NO: 687276 - DNA, 25 bp, Homo sapien
acttgcttccaattgtctttctccc

SEQ ID NO: 687277 - DNA, 25 bp, Homo sapien
tcttcacttgcttccaattgtcttt

SEQ ID NO: 687278 - DNA, 25 bp, Homo sapien
tttcttcacttgcttccaattgtct

SEQ ID NO: 687279 - DNA, 25 bp, Homo sapien
tcacttgcttccaattgtctttctc

SEQ ID NO: 687280 - DNA, 25 bp, Homo sapien
ctgccatgactgtgacctggtatcc

SEQ ID NO: 687281 - DNA, 25 bp, Homo sapien
ccacaaagccggtaagtgaggctgc

SEQ ID NO: 687282 - DNA, 25 bp, Homo sapien
tgtgacctggtatcccggtgccaca

SEQ ID NO: 687283 - DNA, 25 bp, Homo sapien
cctgagagccacaaagccggtaagt

SEQ ID NO: 687284 - DNA, 25 bp, Homo sapien
gagtaaccacctccccaagacatga

SEQ ID NO: 687285 - DNA, 25 bp, Homo sapien
gaggaaggcagcctcggcgtttgcc

SEQ ID NO: 687286 - DNA, 25 bp, Homo sapien
agacatgattcatacctgtctgggg

SEQ ID NO: 687287 - DNA, 25 bp, Homo sapien
tttgccgcctctgagtaaccacctc

SEQ ID NO: 687288 - DNA, 25 bp, Homo sapien
cactcctgatgctgatgcgacttgc

SEQ ID NO: 687289 - DNA, 25 bp, Homo sapien
gacttgcatactgggaatccatgac

SEQ ID NO: 687290 - DNA, 25 bp, Homo sapien
catgctcccaaagccagtgatggaa

SEQ ID NO: 687291 - DNA, 25 bp, Homo sapien
gtattcttaaccactgacactcagg

SEQ ID NO: 687292 - DNA, 25 bp, Homo sapien
gttcagggacacaaccaacaacaac

SEQ ID NO: 687293 - DNA, 25 bp, Homo sapien
ggttcagggacacaaccaacaacaa

SEQ ID NO: 687294 - DNA, 25 bp, Homo sapien
tcagggacacaaccaacaacaaccc

SEQ ID NO: 687295 - DNA, 25 bp, Homo sapien
ttcagggacacaaccaacaacaacc

SEQ ID NO: 687296 - DNA, 25 bp, Homo sapien
tggcagacccgaagagaccgtctgg

SEQ ID NO: 687297 - DNA, 25 bp, Homo sapien
accctgctggcagacccgaagagac

SEQ ID NO: 687298 - DNA, 25 bp, Homo sapien
aagcctggcagtggattaagggaac

SEQ ID NO: 687299 - DNA, 25 bp, Homo sapien
agtggattaagggaaccctgctggc

SEQ ID NO: 687300 - DNA, 25 bp, Homo sapien
gacacaaggatgtgtgcccctcgag

SEQ ID NO: 687301 - DNA, 25 bp, Homo sapien
tgaagctcactgtataggctcaggg

SEQ ID NO: 687302 - DNA, 25 bp, Homo sapien
ctgagttcacaaagggcctctggga

SEQ ID NO: 687303 - DNA, 25 bp, Homo sapien
tctgggaaggcaagtcggttccgca

SEQ ID NO: 687304 - DNA, 25 bp, Homo sapien
gctagaagctagaagccagaacccg

SEQ ID NO: 687305 - DNA, 25 bp, Homo sapien
ggctgcgttagcgacaaggttcaaa

SEQ ID NO: 687306 - DNA, 25 bp, Homo sapien
aaccaaatgtccacctaggtgggct

SEQ ID NO: 687307 - DNA, 25 bp, Homo sapien
tatctgaacttttgggtgcccaggc

SEQ ID NO: 687308 - DNA, 25 bp, Homo sapien
tggtccactgatcccttatttaggg

SEQ ID NO: 687309 - DNA, 25 bp, Homo sapien
actgatcccttatttagggccaggc

SEQ ID NO: 687310 - DNA, 25 bp, Homo sapien
tccactgatcccttatttagggcca

SEQ ID NO: 687311 - DNA, 25 bp, Homo sapien
cgttggtccactgatcccttattta

SEQ ID NO: 687312 - DNA, 25 bp, Homo sapien
gatggacacgctcaagaaaggcacc

SEQ ID NO: 687313 - DNA, 25 bp, Homo sapien
gactgaaccaagctgtccagacaga

SEQ ID NO: 687314 - DNA, 25 bp, Homo sapien
gactcggtgacacgcactcttgggc

SEQ ID NO: 687315 - DNA, 25 bp, Homo sapien
acattcaagatccacgctgggccag

SEQ ID NO: 687316 - DNA, 25 bp, Homo sapien
tgttgacccccatcaagcggtgcat

SEQ ID NO: 687317 - DNA, 25 bp, Homo sapien
gaacaaagagcgtttgcagttgcac

SEQ ID NO: 687318 - DNA, 25 bp, Homo sapien
gcagttgcacgtgcaggagacattg

SEQ ID NO: 687319 - DNA, 25 bp, Homo sapien
agcgtttgcagttgcacgtgcagga

SEQ ID NO: 687320 - DNA, 25 bp, Homo sapien
ggtggcgtccggaaaatgggctggc

SEQ ID NO: 687321 - DNA, 25 bp, Homo sapien
gtttcgctccgagaccgcggtcgga

SEQ ID NO: 687322 - DNA, 25 bp, Homo sapien
ggctgagcctctgccgctagctttc

SEQ ID NO: 687323 - DNA, 25 bp, Homo sapien
gggccccgcatgcaggaggcgcgcg

SEQ ID NO: 687324 - DNA, 25 bp, Homo sapien
ttcgcaggagactgtccgccttcag

SEQ ID NO: 687325 - DNA, 25 bp, Homo sapien
gagactgtccgccttcagttctcca

SEQ ID NO: 687326 - DNA, 25 bp, Homo sapien
ctggtttcgcaggagactgtccgcc

SEQ ID NO: 687327 - DNA, 25 bp, Homo sapien
cagctcggggatcatggcccactga

SEQ ID NO: 687328 - DNA, 25 bp, Homo sapien
gcccttgtcatgtaaatagctgtcg

SEQ ID NO: 687329 - DNA, 25 bp, Homo sapien
acgggaactcgcgtagacacgcccg

SEQ ID NO: 687330 - DNA, 25 bp, Homo sapien
ggactggtgtattgtcgccgcccca

SEQ ID NO: 687331 - DNA, 25 bp, Homo sapien
tggggcgaatccacacccattgtct

SEQ ID NO: 687332 - DNA, 25 bp, Homo sapien
tagaccagagcgaattcatcctgaa

SEQ ID NO: 687333 - DNA, 25 bp, Homo sapien
ccagaaagaccaggaggcttgttct

SEQ ID NO: 687334 - DNA, 25 bp, Homo sapien
agaactcagagaaagccggtgcagg

SEQ ID NO: 687335 - DNA, 25 bp, Homo sapien
cttgttctggagaagtcaagcccag

SEQ ID NO: 687336 - DNA, 25 bp, Homo sapien
gtttggccgctgcaacttaagagaa

SEQ ID NO: 687337 - DNA, 25 bp, Homo sapien
tgccagcaggcaaaaataaccagtt

SEQ ID NO: 687338 - DNA, 25 bp, Homo sapien
tgatccatctgcgacaccggcagtg

SEQ ID NO: 687339 - DNA, 25 bp, Homo sapien
tctctggcgctagttccgaagttga

SEQ ID NO: 687340 - DNA, 25 bp, Homo sapien
ggttggcactgtgcccctggccgtc

SEQ ID NO: 687341 - DNA, 25 bp, Homo sapien
tgcctttgactgggtcctccctggc

SEQ ID NO: 687342 - DNA, 25 bp, Homo sapien
ccactggactcggttggcgccgtcc

SEQ ID NO: 687343 - DNA, 25 bp, Homo sapien
cactggacttggttggcgccgtccc

SEQ ID NO: 687344 - DNA, 25 bp, Homo sapien
acctccaagtatcctcttgcagctg

SEQ ID NO: 687345 - DNA, 25 bp, Homo sapien
caagtatcctcttgcagctgagtat

SEQ ID NO: 687346 - DNA, 25 bp, Homo sapien
ctccaagtatcctcttgcagctgag

SEQ ID NO: 687347 - DNA, 25 bp, Homo sapien
tccacctccaagtatcctcttgcag

SEQ ID NO: 687348 - DNA, 25 bp, Homo sapien
tttaacagcggccaagacaccgaag

SEQ ID NO: 687349 - DNA, 25 bp, Homo sapien
tgggcagcccgaaatgacacagcta

SEQ ID NO: 687350 - DNA, 25 bp, Homo sapien
ccagacaggctgacgtcatgggcag

SEQ ID NO: 687351 - DNA, 25 bp, Homo sapien
caagtttggattccgggagaagcac

SEQ ID NO: 687352 - DNA, 25 bp, Homo sapien
cttcttccccactgctctgccccat

SEQ ID NO: 687353 - DNA, 25 bp, Homo sapien
ccccttcttccccactgctctgccc

SEQ ID NO: 687354 - DNA, 25 bp, Homo sapien
ctccccttcttccccactgctctgc

SEQ ID NO: 687355 - DNA, 25 bp, Homo sapien
ccttcttccccactgctctgcccca

SEQ ID NO: 687356 - DNA, 25 bp, Homo sapien
actgagaagaagatcagcgttggct

SEQ ID NO: 687357 - DNA, 25 bp, Homo sapien
tcagcgttggctcgggccaagtctg

SEQ ID NO: 687358 - DNA, 25 bp, Homo sapien
aagaagatcagcgttggctcgggcc

SEQ ID NO: 687359 - DNA, 25 bp, Homo sapien
tggctcgggccaagtctgggagaca

SEQ ID NO: 687360 - DNA, 25 bp, Homo sapien
tgactaagctcttccaaaggagtgg

SEQ ID NO: 687361 - DNA, 25 bp, Homo sapien
gggtgccaagaactgcagagtcata

SEQ ID NO: 687362 - DNA, 25 bp, Homo sapien
agagcatcaaggagaagtgggtcca

SEQ ID NO: 687363 - DNA, 25 bp, Homo sapien
cccattagatgggagagcatcaagg

SEQ ID NO: 687364 - DNA, 25 bp, Homo sapien
agtcagctgctggtgttcacagggc

SEQ ID NO: 687365 - DNA, 25 bp, Homo sapien
gcatcccgtacgcacaagtcagctg

SEQ ID NO: 687366 - DNA, 25 bp, Homo sapien
ggagggtgtcgtgcgggcaaaggac

SEQ ID NO: 687367 - DNA, 25 bp, Homo sapien
ggatgtcttggatctcccacttgaa

SEQ ID NO: 687368 - DNA, 25 bp, Homo sapien
agagaccatgaagcacatccccaaa

SEQ ID NO: 687369 - DNA, 25 bp, Homo sapien
tcagcagagagaccatgaagcacat

SEQ ID NO: 687370 - DNA, 25 bp, Homo sapien
cgccttcatcaagggcgtgaaagaa

SEQ ID NO: 687371 - DNA, 25 bp, Homo sapien
ccaaaggaggttgccgagaatccaa

SEQ ID NO: 687372 - DNA, 25 bp, Homo sapien
tggtactgacgaagcggccaggctg

SEQ ID NO: 687373 - DNA, 25 bp, Homo sapien
ccttgcttgatgtcacttgatagct

SEQ ID NO: 687374 - DNA, 25 bp, Homo sapien
ttgatgtcacttgatagctccttga

SEQ ID NO: 687375 - DNA, 25 bp, Homo sapien
aggatgtggtactgacgaagcggcc

SEQ ID NO: 687376 - DNA, 25 bp, Homo sapien
cagccccagtgactctgacgtgtgg

SEQ ID NO: 687377 - DNA, 25 bp, Homo sapien
gcggtatggcaagcttgctgtcact

SEQ ID NO: 687378 - DNA, 25 bp, Homo sapien
aagactgaagggcacctgtggtgac

SEQ ID NO: 687379 - DNA, 25 bp, Homo sapien
cactgtcttttctgagggccacgtt

SEQ ID NO: 687380 - DNA, 25 bp, Homo sapien
tgggtcctcacttcaagggctgtct

SEQ ID NO: 687381 - DNA, 25 bp, Homo sapien
acttgggtcctcacttcaagggctg

SEQ ID NO: 687382 - DNA, 25 bp, Homo sapien
gtcctcacttcaagggctgtcttgg

SEQ ID NO: 687383 - DNA, 25 bp, Homo sapien
ctgacttgggtcctcacttcaaggg

SEQ ID NO: 687384 - DNA, 25 bp, Homo sapien
tgagggtgagtctccgagagcctgg

SEQ ID NO: 687385 - DNA, 25 bp, Homo sapien
tgagtctccgagagcctgggctgtc

SEQ ID NO: 687386 - DNA, 25 bp, Homo sapien
taagggcagacgaagggtgtcagcc

SEQ ID NO: 687387 - DNA, 25 bp, Homo sapien
tcagggggacagcgtctctcaagga

SEQ ID NO: 687388 - DNA, 25 bp, Homo sapien
acagcttagtggctgcccggggcca

SEQ ID NO: 687389 - DNA, 25 bp, Homo sapien
gagttctgcctctccggatcacagg

SEQ ID NO: 687390 - DNA, 25 bp, Homo sapien
ggggagttctgcctctccggatcac

SEQ ID NO: 687391 - DNA, 25 bp, Homo sapien
ttggacagcttagtggctgcccggg

SEQ ID NO: 687392 - DNA, 25 bp, Homo sapien
gttcgggaatctatgactcttatcc

SEQ ID NO: 687393 - DNA, 25 bp, Homo sapien
tctcctgttctcaccaactctgacc

SEQ ID NO: 687394 - DNA, 25 bp, Homo sapien
tatgactcttatccctgccctggag

SEQ ID NO: 687395 - DNA, 25 bp, Homo sapien
gtcccatagttagttcgggaatcta

SEQ ID NO: 687396 - DNA, 25 bp, Homo sapien
tcacacccgggcctttgaagattcg

SEQ ID NO: 687397 - DNA, 25 bp, Homo sapien
ccgggcctttgaagattcgaggaag

SEQ ID NO: 687398 - DNA, 25 bp, Homo sapien
ggttgagtcacacccgggcctttga

SEQ ID NO: 687399 - DNA, 25 bp, Homo sapien
cactggttgagtcacacccgggcct

SEQ ID NO: 687400 - DNA, 25 bp, Homo sapien
gcgtagacagcacaggatgtaacat

SEQ ID NO: 687401 - DNA, 25 bp, Homo sapien
gcatggggcgtagacagcacaggat

SEQ ID NO: 687402 - DNA, 25 bp, Homo sapien
gggcgtagacagcacaggatgtaac

SEQ ID NO: 687403 - DNA, 25 bp, Homo sapien
tggggcgtagacagcacaggatgta

SEQ ID NO: 687404 - DNA, 25 bp, Homo sapien
ggttatcttcgagctgacccagctt

SEQ ID NO: 687405 - DNA, 25 bp, Homo sapien
gacgtggttatcttcgagctgaccc

SEQ ID NO: 687406 - DNA, 25 bp, Homo sapien
cctgacgtggttatcttcgagctga

SEQ ID NO: 687407 - DNA, 25 bp, Homo sapien
ggaagggcctgacgtggttatcttc

SEQ ID NO: 687408 - DNA, 25 bp, Homo sapien
cagcatcgagaagggagctctccag

SEQ ID NO: 687409 - DNA, 25 bp, Homo sapien
cacagccccagcatcgagaagggag

SEQ ID NO: 687410 - DNA, 25 bp, Homo sapien
attccaggtagacacagccccagca

SEQ ID NO: 687411 - DNA, 25 bp, Homo sapien
ctccagggtgtccctacagtgatga

SEQ ID NO: 687412 - DNA, 25 bp, Homo sapien
tgttccaatccagccaataaatcaa

SEQ ID NO: 687413 - DNA, 25 bp, Homo sapien
aaggtcctgttccaatccagccaat

SEQ ID NO: 687414 - DNA, 25 bp, Homo sapien
ggaggaaggtcctgttccaatccag

SEQ ID NO: 687415 - DNA, 25 bp, Homo sapien
ggaaggtcctgttccaatccagcca

SEQ ID NO: 687416 - DNA, 25 bp, Homo sapien
gctgggcaccaagcttgtttgcaaa

SEQ ID NO: 687417 - DNA, 25 bp, Homo sapien
gagcagatgtagtggcccctctttg

SEQ ID NO: 687418 - DNA, 25 bp, Homo sapien
caccaagcttgtttgcaaatcttcc

SEQ ID NO: 687419 - DNA, 25 bp, Homo sapien
caagagcagatgtagtggcccctct

SEQ ID NO: 687420 - DNA, 25 bp, Homo sapien
gatcaatgtccattatcaccagcca

SEQ ID NO: 687421 - DNA, 25 bp, Homo sapien
tcaggtaccagttggagtcacagct

SEQ ID NO: 687422 - DNA, 25 bp, Homo sapien
ctggcattgaccatgatcaatgtcc

SEQ ID NO: 687423 - DNA, 25 bp, Homo sapien
gcctctgctgagtccggtgacacct

SEQ ID NO: 687424 - DNA, 25 bp, Homo sapien
ccgtctcaccgatgacgagatggga

SEQ ID NO: 687425 - DNA, 25 bp, Homo sapien
cagcagccccgtctcaccgatgacg

SEQ ID NO: 687426 - DNA, 25 bp, Homo sapien
ccccgtctcaccgatgacgagatgg

SEQ ID NO: 687427 - DNA, 25 bp, Homo sapien
agccccgtctcaccgatgacgagat

SEQ ID NO: 687428 - DNA, 25 bp, Homo sapien
agctgagccgtaatgggcacgagca

SEQ ID NO: 687429 - DNA, 25 bp, Homo sapien
gagccgtaatgggcacgagcagcat

SEQ ID NO: 687430 - DNA, 25 bp, Homo sapien
ctgagccgtaatgggcacgagcagc

SEQ ID NO: 687431 - DNA, 25 bp, Homo sapien
cagctgagccgtaatgggcacgagc

SEQ ID NO: 687432 - DNA, 25 bp, Homo sapien
ggctgctctggtgcacgaatttacg

SEQ ID NO: 687433 - DNA, 25 bp, Homo sapien
actcagatgagggtagggcttccgc

SEQ ID NO: 687434 - DNA, 25 bp, Homo sapien
cacacgctcgtgtgtgatcacggct

SEQ ID NO: 687435 - DNA, 25 bp, Homo sapien
gaactttagatgctctggtggccat

SEQ ID NO: 687436 - DNA, 25 bp, Homo sapien
gctgtagttgcggactggccctgct

SEQ ID NO: 687437 - DNA, 25 bp, Homo sapien
cagctgacccgcagactcgggatcc

SEQ ID NO: 687438 - DNA, 25 bp, Homo sapien
ctgtcactccgctggctgtagttgc

SEQ ID NO: 687439 - DNA, 25 bp, Homo sapien
ctgctgcaatgagaagaaccaccca

SEQ ID NO: 687440 - DNA, 25 bp, Homo sapien
agaagctagggtgtctcccctctcc

SEQ ID NO: 687441 - DNA, 25 bp, Homo sapien
ctgttgagggagaagctagggtgtc

SEQ ID NO: 687442 - DNA, 25 bp, Homo sapien
tgagggagaagctagggtgtctccc

SEQ ID NO: 687443 - DNA, 25 bp, Homo sapien
cagctgttgagggagaagctagggt

SEQ ID NO: 687444 - DNA, 25 bp, Homo sapien
cagctgtacagtccacaaaattggt

SEQ ID NO: 687445 - DNA, 25 bp, Homo sapien
ccagctgtacagtccacaaaattgg

SEQ ID NO: 687446 - DNA, 25 bp, Homo sapien
ctccagctgtacagtccacaaaatt

SEQ ID NO: 687447 - DNA, 25 bp, Homo sapien
agctgtacagtccacaaaattggtg

SEQ ID NO: 687448 - DNA, 25 bp, Homo sapien
ataacaacaaggttgacggggatgg

SEQ ID NO: 687449 - DNA, 25 bp, Homo sapien
agcgttgccgtggaccccagagatg

SEQ ID NO: 687450 - DNA, 25 bp, Homo sapien
ttcccagacaattgagctgcttaca

SEQ ID NO: 687451 - DNA, 25 bp, Homo sapien
ccagagatgccagcggccgcgctgt

SEQ ID NO: 687452 - DNA, 25 bp, Homo sapien
agcagccctgggcactagcagcctg

SEQ ID NO: 687453 - DNA, 25 bp, Homo sapien
gtgaagatcccgtgcatatctaatg

SEQ ID NO: 687454 - DNA, 25 bp, Homo sapien
gcatatctaatgccaaaggacagca

SEQ ID NO: 687455 - DNA, 25 bp, Homo sapien
ctgtggctccaagtgaagatcccgt

SEQ ID NO: 687456 - DNA, 25 bp, Homo sapien
ggtgctgaaaacctccatctcacag

SEQ ID NO: 687457 - DNA, 25 bp, Homo sapien
tggtgctgaaaacctccatctcaca

SEQ ID NO: 687458 - DNA, 25 bp, Homo sapien
aacctccatctcacagcataaacat

SEQ ID NO: 687459 - DNA, 25 bp, Homo sapien
tgaaaacctccatctcacagcataa

SEQ ID NO: 687460 - DNA, 25 bp, Homo sapien
gtaatggcaccagtcaggggctccc

SEQ ID NO: 687461 - DNA, 25 bp, Homo sapien
ttatcccagtctgtagaggagttac

SEQ ID NO: 687462 - DNA, 25 bp, Homo sapien
gggctcccgttatcccagtctgtag

SEQ ID NO: 687463 - DNA, 25 bp, Homo sapien
tcccgttatcccagtctgtagagga

SEQ ID NO: 687464 - DNA, 25 bp, Homo sapien
tccccaggcctcagaatctgcaact

SEQ ID NO: 687465 - DNA, 25 bp, Homo sapien
gtgagccttgtagccaggacgcctc

SEQ ID NO: 687466 - DNA, 25 bp, Homo sapien
aaagcacccagatgtcccctgtggt

SEQ ID NO: 687467 - DNA, 25 bp, Homo sapien
tgtggtgagccttgtagccaggacg

SEQ ID NO: 687468 - DNA, 25 bp, Homo sapien
tgctgtccgctagaagcagccctgt

SEQ ID NO: 687469 - DNA, 25 bp, Homo sapien
tcatcctgtctatggacgggaggct

SEQ ID NO: 687470 - DNA, 25 bp, Homo sapien
ttttcaaggctttgatgcggtgtct

SEQ ID NO: 687471 - DNA, 25 bp, Homo sapien
gctggcgatggtcatttttcaaggc

SEQ ID NO: 687472 - DNA, 25 bp, Homo sapien
cctcctggcaatccgtgttccacac

SEQ ID NO: 687473 - DNA, 25 bp, Homo sapien
ctggcaatccgtgttccacactgaa

SEQ ID NO: 687474 - DNA, 25 bp, Homo sapien
ggcaatccgtgttccacactgaacc

SEQ ID NO: 687475 - DNA, 25 bp, Homo sapien
tcctggcaatccgtgttccacactg

SEQ ID NO: 687476 - DNA, 25 bp, Homo sapien
agagccaactcccttgtgggtactt

SEQ ID NO: 687477 - DNA, 25 bp, Homo sapien
tataaacggcgcagaaacaacccat

SEQ ID NO: 687478 - DNA, 25 bp, Homo sapien
acagcagatggtgccctcaggcaag

SEQ ID NO: 687479 - DNA, 25 bp, Homo sapien
ccacctggatgcctatagtgccatt

SEQ ID NO: 687480 - DNA, 25 bp, Homo sapien
ccaggaagggtgaggttctatgcca

SEQ ID NO: 687481 - DNA, 25 bp, Homo sapien
cagatctgccgggattagggaagaa

SEQ ID NO: 687482 - DNA, 25 bp, Homo sapien
aacctgtggctgcaaagttggcgct

SEQ ID NO: 687483 - DNA, 25 bp, Homo sapien
gaaagagctcttcccgctgagaaca

SEQ ID NO: 687484 - DNA, 25 bp, Homo sapien
tgtcggccgctatgcacttgtgaaa

SEQ ID NO: 687485 - DNA, 25 bp, Homo sapien
tctttgaatttgaggcccgagcacc

SEQ ID NO: 687486 - DNA, 25 bp, Homo sapien
tgcaggccgcctctttgaaaatcag

SEQ ID NO: 687487 - DNA, 25 bp, Homo sapien
gcacttgtcagaaggcctgcgggaa

SEQ ID NO: 687488 - DNA, 25 bp, Homo sapien
tctccaaagctgacccctgaggaag

SEQ ID NO: 687489 - DNA, 25 bp, Homo sapien
gacgcagcccctgaatcggaaggtc

SEQ ID NO: 687490 - DNA, 25 bp, Homo sapien
tgtctgcgcagggtcttaacttcgg

SEQ ID NO: 687491 - DNA, 25 bp, Homo sapien
ttgggctcttggcaacaaaagcggg

SEQ ID NO: 687492 - DNA, 25 bp, Homo sapien
cttgggacacctcgggcaaagggat

SEQ ID NO: 687493 - DNA, 25 bp, Homo sapien
gggcaaagggatcagaatgaacaaa

SEQ ID NO: 687494 - DNA, 25 bp, Homo sapien
ccataggcagatgctgacttgggac

SEQ ID NO: 687495 - DNA, 25 bp, Homo sapien
ggctttgagcagtgaggatttccat

SEQ ID NO: 687496 - DNA, 25 bp, Homo sapien
gaataaattgtcactccgattaaaa

SEQ ID NO: 687497 - DNA, 25 bp, Homo sapien
tcagcatgtgtaagcattgtcaaat

SEQ ID NO: 687498 - DNA, 25 bp, Homo sapien
aggatgactcgtttctgctaaattg

SEQ ID NO: 687499 - DNA, 25 bp, Homo sapien
tgctaaattgtacccaaatagtctc

SEQ ID NO: 687500 - DNA, 25 bp, Homo sapien
tccagtccaagcaggtcgtgggcat

SEQ ID NO: 687501 - DNA, 25 bp, Homo sapien
gtccaagcaggtcgtgggcatccat

SEQ ID NO: 687502 - DNA, 25 bp, Homo sapien
tgtccagtccaagcaggtcgtgggc

SEQ ID NO: 687503 - DNA, 25 bp, Homo sapien
gatgtccagtccaagcaggtcgtgg

SEQ ID NO: 687504 - DNA, 25 bp, Homo sapien
aggcagacaggagcaagttggccat

SEQ ID NO: 687505 - DNA, 25 bp, Homo sapien
tgttccccaccctgtagaaatacat

SEQ ID NO: 687506 - DNA, 25 bp, Homo sapien
ctcatacactactggaagttccttc

SEQ ID NO: 687507 - DNA, 25 bp, Homo sapien
aaatgagatgtcctccaaaaattta

SEQ ID NO: 687508 - DNA, 25 bp, Homo sapien
gatggtgtggtgcaataggctttct

SEQ ID NO: 687509 - DNA, 25 bp, Homo sapien
tcgccgtcgatagagcagcatcagt

SEQ ID NO: 687510 - DNA, 25 bp, Homo sapien
aaaaatcacggtagcatgcagggcc

SEQ ID NO: 687511 - DNA, 25 bp, Homo sapien
gatccgaatttacctgtgcacctgg

SEQ ID NO: 687512 - DNA, 25 bp, Homo sapien
cagatgacctcagtgggagacagca

SEQ ID NO: 687513 - DNA, 25 bp, Homo sapien
gcaccaattgcccacacgtctgaaa

SEQ ID NO: 687514 - DNA, 25 bp, Homo sapien
aattgcccacacgtctgaaaccagg

SEQ ID NO: 687515 - DNA, 25 bp, Homo sapien
acacgtctgaaaccaggaggccagc

SEQ ID NO: 687516 - DNA, 25 bp, Homo sapien
gaatgatctcagcaccaattgccca

SEQ ID NO: 687517 - DNA, 25 bp, Homo sapien
gagtagcacaggtgagcactcaagt

SEQ ID NO: 687518 - DNA, 25 bp, Homo sapien
tcagaacgagttcagccctggattc

SEQ ID NO: 687519 - DNA, 25 bp, Homo sapien
cctctcgcaattgtccggcgtggaa

SEQ ID NO: 687520 - DNA, 25 bp, Homo sapien
cacccgaccaacaatggagctgtca

SEQ ID NO: 687521 - DNA, 25 bp, Homo sapien
tagggtgtagccctttctacatggc

SEQ ID NO: 687522 - DNA, 25 bp, Homo sapien
taaggcagttctatggtgctgggca

SEQ ID NO: 687523 - DNA, 25 bp, Homo sapien
gccaactctgtgatttagtgcagct

SEQ ID NO: 687524 - DNA, 25 bp, Homo sapien
tagagatgtccaacacaacagtggc

SEQ ID NO: 687525 - DNA, 25 bp, Homo sapien
gacattgattgggactgcactgcga

SEQ ID NO: 687526 - DNA, 25 bp, Homo sapien
cattgaatctctagcacacagggac

SEQ ID NO: 687527 - DNA, 25 bp, Homo sapien
catcagtagataggaaaggcagccc

SEQ ID NO: 687528 - DNA, 25 bp, Homo sapien
gcagttatcgacagagacggccgac

SEQ ID NO: 687529 - DNA, 25 bp, Homo sapien
ccttcggaagatgagcgtagaccct

SEQ ID NO: 687530 - DNA, 25 bp, Homo sapien
tctaagagatgaagtgaccgggact

SEQ ID NO: 687531 - DNA, 25 bp, Homo sapien
tgcctgacagccatcgcactgtgcg

SEQ ID NO: 687532 - DNA, 25 bp, Homo sapien
tgtccaacacataggaacatggcaa

SEQ ID NO: 687533 - DNA, 25 bp, Homo sapien
tcccaagtcaagacaatggtgactg

SEQ ID NO: 687534 - DNA, 25 bp, Homo sapien
ttcccaagtcaagacaatggtgact

SEQ ID NO: 687535 - DNA, 25 bp, Homo sapien
aagcaagtctttaaaggctacatac

SEQ ID NO: 687536 - DNA, 25 bp, Homo sapien
gcaagtctttaaaggctacatactg

SEQ ID NO: 687537 - DNA, 25 bp, Homo sapien
accattggtgcatttaataaacaaa

SEQ ID NO: 687538 - DNA, 25 bp, Homo sapien
ggaaccattggtgcatttaataaac

SEQ ID NO: 687539 - DNA, 25 bp, Homo sapien
tagattttggacttagtagacaaaa

SEQ ID NO: 687540 - DNA, 25 bp, Homo sapien
aaactgaaacaagatagtctagatt

SEQ ID NO: 687541 - DNA, 25 bp, Homo sapien
ctagattttggacttagtagacaaa

SEQ ID NO: 687542 - DNA, 25 bp, Homo sapien
gaaacaagatagtctagattttgga

SEQ ID NO: 687543 - DNA, 25 bp, Homo sapien
tgtgcttgatgggcaggttcccacc

SEQ ID NO: 687544 - DNA, 25 bp, Homo sapien
atgtgtgcttgatgggcaggttccc

SEQ ID NO: 687545 - DNA, 25 bp, Homo sapien
tgtgtgcttgatgggcaggttccca

SEQ ID NO: 687546 - DNA, 25 bp, Homo sapien
catgtgtgcttgatgggcaggttcc

SEQ ID NO: 687547 - DNA, 25 bp, Homo sapien
tctttgtgggtgtccaaatgggccc

SEQ ID NO: 687548 - DNA, 25 bp, Homo sapien
aaataccgcaacatttccaaggtcg

SEQ ID NO: 687549 - DNA, 25 bp, Homo sapien
tggtgaacctgcgtcgatgatgccg

SEQ ID NO: 687550 - DNA, 25 bp, Homo sapien
gacgggcctcggtcaaaatgaacca

SEQ ID NO: 687551 - DNA, 25 bp, Homo sapien
ttaaatcagatcttgatggaaaaga

SEQ ID NO: 687552 - DNA, 25 bp, Homo sapien
tggaaaagacgtgatgactttattt

SEQ ID NO: 687553 - DNA, 25 bp, Homo sapien
caggagagggccagattatgcccat

SEQ ID NO: 687554 - DNA, 25 bp, Homo sapien
attatgcccatactgcaggttagca

SEQ ID NO: 687555 - DNA, 25 bp, Homo sapien
atactgcaggttagcatctgtccca

SEQ ID NO: 687556 - DNA, 25 bp, Homo sapien
ctgtcccatagagaagggtcctggt

SEQ ID NO: 687557 - DNA, 25 bp, Homo sapien
cgcctctttaggctgcgtgaagaat

SEQ ID NO: 687558 - DNA, 25 bp, Homo sapien
gccgcctctttaggctgcgtgaaga

SEQ ID NO: 687559 - DNA, 25 bp, Homo sapien
ccgcctctttaggctgcgtgaagaa

SEQ ID NO: 687560 - DNA, 25 bp, Homo sapien
cgggtcagggtcgtttgcacgaagg

SEQ ID NO: 687561 - DNA, 25 bp, Homo sapien
ttaaagagcagtacccgggctgtcc

SEQ ID NO: 687562 - DNA, 25 bp, Homo sapien
gttaaagagcagtacccgggctgtc

SEQ ID NO: 687563 - DNA, 25 bp, Homo sapien
tttgcacgaaggcagagccgcggaa

SEQ ID NO: 687564 - DNA, 25 bp, Homo sapien
cggccacgcactggggtctcacagg

SEQ ID NO: 687565 - DNA, 25 bp, Homo sapien
tccccggccacgcactggggtctca

SEQ ID NO: 687566 - DNA, 25 bp, Homo sapien
cgcgccgcgtgggtgaagcgccctc

SEQ ID NO: 687567 - DNA, 25 bp, Homo sapien
ccgcgtgggtgaagcgccctccccg

SEQ ID NO: 687568 - DNA, 25 bp, Homo sapien
tgaaaaacaatgcacgccttaaagg

SEQ ID NO: 687569 - DNA, 25 bp, Homo sapien
aacgacctcctgcaaaggattgtcc

SEQ ID NO: 687570 - DNA, 25 bp, Homo sapien
aatgcacgccttaaaggcgggaggc

SEQ ID NO: 687571 - DNA, 25 bp, Homo sapien
gcgcaggctgaggaacactgatgaa

SEQ ID NO: 687572 - DNA, 25 bp, Homo sapien
gaggcagtgctctctcaaataggct

SEQ ID NO: 687573 - DNA, 25 bp, Homo sapien
gcagtgctctctcaaataggctggg

SEQ ID NO: 687574 - DNA, 25 bp, Homo sapien
ctcagaggcagtgctctctcaaata

SEQ ID NO: 687575 - DNA, 25 bp, Homo sapien
tctcaaataggctggggagcttcat

SEQ ID NO: 687576 - DNA, 25 bp, Homo sapien
tcagacaccacacgagtcgttgcag

SEQ ID NO: 687577 - DNA, 25 bp, Homo sapien
ccacacgagtcgttgcagagtccac

SEQ ID NO: 687578 - DNA, 25 bp, Homo sapien
ggaccaactcagacaccacacgagt

SEQ ID NO: 687579 - DNA, 25 bp, Homo sapien
gttgcagagtccaccggagacgtct

SEQ ID NO: 687580 - DNA, 25 bp, Homo sapien
tcacccacagagtggtctggtgaag

SEQ ID NO: 687581 - DNA, 25 bp, Homo sapien
tgaaggatggtccacctgaatcaga

SEQ ID NO: 687582 - DNA, 25 bp, Homo sapien
cccacagagtggtctggtgaaggat

SEQ ID NO: 687583 - DNA, 25 bp, Homo sapien
ggtgaaggatggtccacctgaatca

SEQ ID NO: 687584 - DNA, 25 bp, Homo sapien
acatggactggggttatcccaggga

SEQ ID NO: 687585 - DNA, 25 bp, Homo sapien
ggtttgccgagtgggttccagagca

SEQ ID NO: 687586 - DNA, 25 bp, Homo sapien
atcagagacccccccacatggactg

SEQ ID NO: 687587 - DNA, 25 bp, Homo sapien
ctcgcccagggggtttgccgagtgg

SEQ ID NO: 687588 - DNA, 25 bp, Homo sapien
ctggcgggagccgacgccggcaggc

SEQ ID NO: 687589 - DNA, 25 bp, Homo sapien
gattttcttcgtgaatccaagacag

SEQ ID NO: 687590 - DNA, 25 bp, Homo sapien
tgcggcaactgcgttcgacagcgcc

SEQ ID NO: 687591 - DNA, 25 bp, Homo sapien
ccggcaggcccggagaggattttct

SEQ ID NO: 687592 - DNA, 25 bp, Homo sapien
tacttttgccgctcagaacagtcac

SEQ ID NO: 687593 - DNA, 25 bp, Homo sapien
ttttgccgctcagaacagtcacatt

SEQ ID NO: 687594 - DNA, 25 bp, Homo sapien
gtggtggaacctctacttttgccgc

SEQ ID NO: 687595 - DNA, 25 bp, Homo sapien
gaacctctacttttgccgctcagaa

SEQ ID NO: 687596 - DNA, 25 bp, Homo sapien
atgccagacgaggcaaaggaactgg

SEQ ID NO: 687597 - DNA, 25 bp, Homo sapien
tacatataggagtcaagcagttggc

SEQ ID NO: 687598 - DNA, 25 bp, Homo sapien
tccccaggacctacgagtgttcaga

SEQ ID NO: 687599 - DNA, 25 bp, Homo sapien
ttgtctaaaatgaagcgctccccag

SEQ ID NO: 687600 - DNA, 25 bp, Homo sapien
tctccaaacaacgaaggcagctggg

SEQ ID NO: 687601 - DNA, 25 bp, Homo sapien
tcaccaagggcccccatgggattga

SEQ ID NO: 687602 - DNA, 25 bp, Homo sapien
aaccagcctcagcgggcaaacgttc

SEQ ID NO: 687603 - DNA, 25 bp, Homo sapien
tctgcaaagttgcccaaaccagcct

SEQ ID NO: 687604 - DNA, 25 bp, Homo sapien
agcgggcaaacgttcccaccaggag

SEQ ID NO: 687605 - DNA, 25 bp, Homo sapien
tcatcttctcagacctaaacccaga

SEQ ID NO: 687606 - DNA, 25 bp, Homo sapien
catcttctcagacctaaacccagac

SEQ ID NO: 687607 - DNA, 25 bp, Homo sapien
ctaatgaggggtcatcgtcatcttc

SEQ ID NO: 687608 - DNA, 25 bp, Homo sapien
taatgaggggtcatcgtcatcttct

SEQ ID NO: 687609 - DNA, 25 bp, Homo sapien
catctctgtcgtggatggaggcccc

SEQ ID NO: 687610 - DNA, 25 bp, Homo sapien
ggattatacagtctgaccggcccat

SEQ ID NO: 687611 - DNA, 25 bp, Homo sapien
tgcctctcgctcagtgtgtggttca

SEQ ID NO: 687612 - DNA, 25 bp, Homo sapien
gctatccggtggaggaggaccatct

SEQ ID NO: 687613 - DNA, 25 bp, Homo sapien
gaatcttcagtaagcccgagacaag

SEQ ID NO: 687614 - DNA, 25 bp, Homo sapien
tgtgtgaggccacatacaacgccac

SEQ ID NO: 687615 - DNA, 25 bp, Homo sapien
ctgaatttgcggttcggtagaagga

SEQ ID NO: 687616 - DNA, 25 bp, Homo sapien
acaaacgccctctgagacgtccagt

SEQ ID NO: 687617 - DNA, 25 bp, Homo sapien
cacaatttacggttgcttcgtaacg

SEQ ID NO: 687618 - DNA, 25 bp, Homo sapien
tcacatatccgtattaaagactaat

SEQ ID NO: 687619 - DNA, 25 bp, Homo sapien
tgttattcacatatccgtattaaag

SEQ ID NO: 687620 - DNA, 25 bp, Homo sapien
taatatccatttaaagaagcttgaa

SEQ ID NO: 687621 - DNA, 25 bp, Homo sapien
tcagggtagtgtcatccatcaaaac

SEQ ID NO: 687622 - DNA, 25 bp, Homo sapien
gaaataatccctccaggaacaacat

SEQ ID NO: 687623 - DNA, 25 bp, Homo sapien
ttccacagccgccaaaacaagttct

SEQ ID NO: 687624 - DNA, 25 bp, Homo sapien
aacaagttctgtccatccgtcatga

SEQ ID NO: 687625 - DNA, 25 bp, Homo sapien
tcagaagtggacagggtgcccttgc

SEQ ID NO: 687626 - DNA, 25 bp, Homo sapien
aagtggacagggtgcccttgcatgt

SEQ ID NO: 687627 - DNA, 25 bp, Homo sapien
ggacagggtgcccttgcatgtggcc

SEQ ID NO: 687628 - DNA, 25 bp, Homo sapien
acagggtgcccttgcatgtggccag

SEQ ID NO: 687629 - DNA, 25 bp, Homo sapien
ccgcggcagtttgccactcggaaca

SEQ ID NO: 687630 - DNA, 25 bp, Homo sapien
tactggagccgctggaggttgaagg

SEQ ID NO: 687631 - DNA, 25 bp, Homo sapien
gaaggggatgccgaccatcaggtcc

SEQ ID NO: 687632 - DNA, 25 bp, Homo sapien
agctcccgcacggtcatgtcgccgc

SEQ ID NO: 687633 - DNA, 25 bp, Homo sapien
tcgggtcacagacgagccgctggct

SEQ ID NO: 687634 - DNA, 25 bp, Homo sapien
agccgcacccgcaggacgaagacgt

SEQ ID NO: 687635 - DNA, 25 bp, Homo sapien
agtcgggcaaggcactcgcggcctt

SEQ ID NO: 687636 - DNA, 25 bp, Homo sapien
cacccgcaggacgaagacgtcaggg

SEQ ID NO: 687637 - DNA, 25 bp, Homo sapien
accctgggcccgccgcacccctgag

SEQ ID NO: 687638 - DNA, 25 bp, Homo sapien
gggagggcccgcgagtccgccgagc

SEQ ID NO: 687639 - DNA, 25 bp, Homo sapien
cgagtccgccgagcccaccctgggc

SEQ ID NO: 687640 - DNA, 25 bp, Homo sapien
tgggcccgccgcacccctgagcccc

SEQ ID NO: 687641 - DNA, 25 bp, Homo sapien
tgcaggcgagaggcgcccccagttg

SEQ ID NO: 687642 - DNA, 25 bp, Homo sapien
cgagaggcgcccccagttggccccg

SEQ ID NO: 687643 - DNA, 25 bp, Homo sapien
aggcgagaggcgcccccagttggcc

SEQ ID NO: 687644 - DNA, 25 bp, Homo sapien
gagaggcgcccccagttggccccgc

SEQ ID NO: 687645 - DNA, 25 bp, Homo sapien
ttagaaaatacaagcgccgaagtga

SEQ ID NO: 687646 - DNA, 25 bp, Homo sapien
gataaatacagagacatcgccgggc

SEQ ID NO: 687647 - DNA, 25 bp, Homo sapien
taggcaagaattaaacacacgacgg

SEQ ID NO: 687648 - DNA, 25 bp, Homo sapien
tgctgctgttaggaaacggttacca

SEQ ID NO: 687649 - DNA, 25 bp, Homo sapien
taactcactttttgccgacgctgcc

SEQ ID NO: 687650 - DNA, 25 bp, Homo sapien
tgaaacgcatgaaatctaagcggtg

SEQ ID NO: 687651 - DNA, 25 bp, Homo sapien
ggaagtcacatcctctatactagaa

SEQ ID NO: 687652 - DNA, 25 bp, Homo sapien
tagcagagctagctcttgaacccca

SEQ ID NO: 687653 - DNA, 25 bp, Homo sapien
tatggtaagccatatgtgccaagca

SEQ ID NO: 687654 - DNA, 25 bp, Homo sapien
gagtgcacagtatgaaaggttccaa

SEQ ID NO: 687655 - DNA, 25 bp, Homo sapien
cagattgcaactcatcacggaagta

SEQ ID NO: 687656 - DNA, 25 bp, Homo sapien
gaaaaggcgtcaatcactgagtgca

SEQ ID NO: 687657 - DNA, 25 bp, Homo sapien
gatattccgccgctttggttctagg

SEQ ID NO: 687658 - DNA, 25 bp, Homo sapien
gacttcaagatgagggttaccagca

SEQ ID NO: 687659 - DNA, 25 bp, Homo sapien
tggttctagggctgcaaaaaaggaa

SEQ ID NO: 687660 - DNA, 25 bp, Homo sapien
ggaaacatcttggtcccggtctgac

SEQ ID NO: 687661 - DNA, 25 bp, Homo sapien
gccttagggccttggctagcagaac

SEQ ID NO: 687662 - DNA, 25 bp, Homo sapien
ccttagggccttggctagcagaacc

SEQ ID NO: 687663 - DNA, 25 bp, Homo sapien
tgccttagggccttggctagcagaa

SEQ ID NO: 687664 - DNA, 25 bp, Homo sapien
ctgccttagggccttggctagcaga

SEQ ID NO: 687665 - DNA, 25 bp, Homo sapien
ggcacaggatctgatgcgaggctca

SEQ ID NO: 687666 - DNA, 25 bp, Homo sapien
ggtgctccatgaactggtccacggg

SEQ ID NO: 687667 - DNA, 25 bp, Homo sapien
ggtccacggggacacactccttgct

SEQ ID NO: 687668 - DNA, 25 bp, Homo sapien
ctgggaagcaggtgctccatgaact

SEQ ID NO: 687669 - DNA, 25 bp, Homo sapien
caagaaagtcacagccaaagaaatg

SEQ ID NO: 687670 - DNA, 25 bp, Homo sapien
aagaaatgatgttttccgcagtctt

SEQ ID NO: 687671 - DNA, 25 bp, Homo sapien
gccaaagaaatgatgttttccgcag

SEQ ID NO: 687672 - DNA, 25 bp, Homo sapien
agtcacagccaaagaaatgatgttt

SEQ ID NO: 687673 - DNA, 25 bp, Homo sapien
atacacttctttaatcccaaagaag

SEQ ID NO: 687674 - DNA, 25 bp, Homo sapien
aacatacacttctttaatcccaaag

SEQ ID NO: 687675 - DNA, 25 bp, Homo sapien
acatacacttctttaatcccaaaga

SEQ ID NO: 687676 - DNA, 25 bp, Homo sapien
gaaacatacacttctttaatcccaa

SEQ ID NO: 687677 - DNA, 25 bp, Homo sapien
tgtagtcatacccagcaagtgcata

SEQ ID NO: 687678 - DNA, 25 bp, Homo sapien
tgacttctggttaagcggcttagcc

SEQ ID NO: 687679 - DNA, 25 bp, Homo sapien
tgcatacagctgaccggtaaggaag

SEQ ID NO: 687680 - DNA, 25 bp, Homo sapien
caatccgtaaatgccagtcctgtag

SEQ ID NO: 687681 - DNA, 25 bp, Homo sapien
acttagaacagtgccggaaccttat

SEQ ID NO: 687682 - DNA, 25 bp, Homo sapien
cggaaccttatgatgagctcattga

SEQ ID NO: 687683 - DNA, 25 bp, Homo sapien
cactgttggaatagaacttctgcag

SEQ ID NO: 687684 - DNA, 25 bp, Homo sapien
caaatgaaagcgaaagcttgccttc

SEQ ID NO: 687685 - DNA, 25 bp, Homo sapien
taaaatgaatttataggcgcaggag

SEQ ID NO: 687686 - DNA, 25 bp, Homo sapien
tcacggtcatcattagaacacagag

SEQ ID NO: 687687 - DNA, 25 bp, Homo sapien
gaatactactctacacggaaactag

SEQ ID NO: 687688 - DNA, 25 bp, Homo sapien
caaattttagagcatgtccccttgc

SEQ ID NO: 687689 - DNA, 25 bp, Homo sapien
gatccaccgaacttcagaaacttga

SEQ ID NO: 687690 - DNA, 25 bp, Homo sapien
ggcaatgtgcattaggtaatcataa

SEQ ID NO: 687691 - DNA, 25 bp, Homo sapien
tagtttgaaggagatccaccgaact

SEQ ID NO: 687692 - DNA, 25 bp, Homo sapien
actttaaggcaatgtgcattaggta

SEQ ID NO: 687693 - DNA, 25 bp, Homo sapien
ctatagagttccagaatcagtatca

SEQ ID NO: 687694 - DNA, 25 bp, Homo sapien
tagagttccagaatcagtatcagct

SEQ ID NO: 687695 - DNA, 25 bp, Homo sapien
gagttccagaatcagtatcagctgt

SEQ ID NO: 687696 - DNA, 25 bp, Homo sapien
tatagagttccagaatcagtatcag

SEQ ID NO: 687697 - DNA, 25 bp, Homo sapien
tccacaccgtgaaaggcacattata

SEQ ID NO: 687698 - DNA, 25 bp, Homo sapien
acaaaatgatgtgcagataggagcc

SEQ ID NO: 687699 - DNA, 25 bp, Homo sapien
tgaaaactaaagacaccgaaatgaa

SEQ ID NO: 687700 - DNA, 25 bp, Homo sapien
aacattccttttgccagctcaagac

SEQ ID NO: 687701 - DNA, 25 bp, Homo sapien
taattcgaaagtgactcaagccctg

SEQ ID NO: 687702 - DNA, 25 bp, Homo sapien
tgaaaatgaatgtctccccggagac

SEQ ID NO: 687703 - DNA, 25 bp, Homo sapien
tctaaaagaacactattgctgctgc

SEQ ID NO: 687704 - DNA, 25 bp, Homo sapien
gaacagcagaacactctaattcgaa

SEQ ID NO: 687705 - DNA, 25 bp, Homo sapien
gataaagatagtctctcctcttgtc

SEQ ID NO: 687706 - DNA, 25 bp, Homo sapien
aagctgataaagatagtctctcctc

SEQ ID NO: 687707 - DNA, 25 bp, Homo sapien
tcatatcgaaacctccaattcctgc

SEQ ID NO: 687708 - DNA, 25 bp, Homo sapien
tctgctagttcatatcgaaacctcc

SEQ ID NO: 687709 - DNA, 25 bp, Homo sapien
cacagccagctcgtgaatggagaag

SEQ ID NO: 687710 - DNA, 25 bp, Homo sapien
agaaggctagggctcgccgtacctt

SEQ ID NO: 687711 - DNA, 25 bp, Homo sapien
gctgctgttaactgatccccaagaa

SEQ ID NO: 687712 - DNA, 25 bp, Homo sapien
gaagataggcaccaggtcagctgct

SEQ ID NO: 687713 - DNA, 25 bp, Homo sapien
ggccaataagccttgctgcagcttc

SEQ ID NO: 687714 - DNA, 25 bp, Homo sapien
tcaggccaataagccttgctgcagc

SEQ ID NO: 687715 - DNA, 25 bp, Homo sapien
ccttttctccctaatgaatgaccca

SEQ ID NO: 687716 - DNA, 25 bp, Homo sapien
taaacatgccaatttgcatccacat

SEQ ID NO: 687717 - DNA, 25 bp, Homo sapien
tggacacatactgatctagcagcgg

SEQ ID NO: 687718 - DNA, 25 bp, Homo sapien
tcgagctgggtcagtcatggacaca

SEQ ID NO: 687719 - DNA, 25 bp, Homo sapien
agtgccaattttgcctgcccagggt

SEQ ID NO: 687720 - DNA, 25 bp, Homo sapien
tatcgacagtctgggctcgagctgg

SEQ ID NO: 687721 - DNA, 25 bp, Homo sapien
ggaggccatcgtgaatgcaggaaaa

SEQ ID NO: 687722 - DNA, 25 bp, Homo sapien
gaggccatcgtgaatgcaggaaaat

SEQ ID NO: 687723 - DNA, 25 bp, Homo sapien
gatcctgcctctggtcagtctccag

SEQ ID NO: 687724 - DNA, 25 bp, Homo sapien
tttcttggtaatcagggattgcagc

SEQ ID NO: 687725 - DNA, 25 bp, Homo sapien
tcttggtaatcagggattgcagcaa

SEQ ID NO: 687726 - DNA, 25 bp, Homo sapien
ttcttggtaatcagggattgcagca

SEQ ID NO: 687727 - DNA, 25 bp, Homo sapien
gagggaaggtactttctggtgccca

SEQ ID NO: 687728 - DNA, 25 bp, Homo sapien
tgacacggtgctatcccaatgactg

SEQ ID NO: 687729 - DNA, 25 bp, Homo sapien
cagcagaagaggatatcaccccatt

SEQ ID NO: 687730 - DNA, 25 bp, Homo sapien
gaggcctcgtccacttgaaattcca

SEQ ID NO: 687731 - DNA, 25 bp, Homo sapien
ggttgtctagttatccaaaacatga

SEQ ID NO: 687732 - DNA, 25 bp, Homo sapien
gattgattggttgtctagttatcca

SEQ ID NO: 687733 - DNA, 25 bp, Homo sapien
ccgtcttcgtgggagcgcgtcggca

SEQ ID NO: 687734 - DNA, 25 bp, Homo sapien
gagcgcgtcggcactatcaatcacc

SEQ ID NO: 687735 - DNA, 25 bp, Homo sapien
ctgctgggatatattaataagagaa

SEQ ID NO: 687736 - DNA, 25 bp, Homo sapien
ttctgtcacatcctcggtggctgag

SEQ ID NO: 687737 - DNA, 25 bp, Homo sapien
tggctgagggatacggcaaatactt

SEQ ID NO: 687738 - DNA, 25 bp, Homo sapien
ctgctttgtgatttctgtcacatcc

SEQ ID NO: 687739 - DNA, 25 bp, Homo sapien
tcattcacgcagtcgagctgtgcag

SEQ ID NO: 687740 - DNA, 25 bp, Homo sapien
gaggccgccagagcgatctgattgt

SEQ ID NO: 687741 - DNA, 25 bp, Homo sapien
tgtgcagctctcagtgcagcggata

SEQ ID NO: 687742 - DNA, 25 bp, Homo sapien
gctgggatgtgaaatggacacttcc

SEQ ID NO: 687743 - DNA, 25 bp, Homo sapien
aagctaccaaggactttctgaatct

SEQ ID NO: 687744 - DNA, 25 bp, Homo sapien
taccaaggactttctgaatctcact

SEQ ID NO: 687745 - DNA, 25 bp, Homo sapien
cagatgctcctgcaagctaccaagg

SEQ ID NO: 687746 - DNA, 25 bp, Homo sapien
ctgaatctcactccgggccacacag

SEQ ID NO: 687747 - DNA, 25 bp, Homo sapien
tctgctgcagtcgtcctcctgaggc

SEQ ID NO: 687748 - DNA, 25 bp, Homo sapien
agcctcactcagaagcagctctaag

SEQ ID NO: 687749 - DNA, 25 bp, Homo sapien
tgttgtgcacaaccccaggtctgct

SEQ ID NO: 687750 - DNA, 25 bp, Homo sapien
actcagaagcagctctaagtccttg

SEQ ID NO: 687751 - DNA, 25 bp, Homo sapien
tgggcaatcactggttttcgctgag

SEQ ID NO: 687752 - DNA, 25 bp, Homo sapien
cacaggctttgctgaacgagttaaa

SEQ ID NO: 687753 - DNA, 25 bp, Homo sapien
cagggctttccgctgggccgtcaga

SEQ ID NO: 687754 - DNA, 25 bp, Homo sapien
gaggtcccttccacaggtagctctg

SEQ ID NO: 687755 - DNA, 25 bp, Homo sapien
caaaaggcgctgaaactggtaagag

SEQ ID NO: 687756 - DNA, 25 bp, Homo sapien
tgcacgctagcgacaatggagagac

SEQ ID NO: 687757 - DNA, 25 bp, Homo sapien
taccgctgttggtcaggagtgtcgc

SEQ ID NO: 687758 - DNA, 25 bp, Homo sapien
gacttccgctggagcaccttcggta

SEQ ID NO: 687759 - DNA, 25 bp, Homo sapien
ttaaggtacatcgagggtcctggtg

SEQ ID NO: 687760 - DNA, 25 bp, Homo sapien
acatcgagggtcctggtggtgaccc

SEQ ID NO: 687761 - DNA, 25 bp, Homo sapien
atcgagggtcctggtggtgacccta

SEQ ID NO: 687762 - DNA, 25 bp, Homo sapien
gtacatcgagggtcctggtggtgac

SEQ ID NO: 687763 - DNA, 25 bp, Homo sapien
ccagagtccaaatcctgggtgagtg

SEQ ID NO: 687764 - DNA, 25 bp, Homo sapien
tccaaatcctgggtgagtggccaga

SEQ ID NO: 687765 - DNA, 25 bp, Homo sapien
ctctcgaagataaaggccagccctg

SEQ ID NO: 687766 - DNA, 25 bp, Homo sapien
tgctcagggcgccatcctctcgaag

SEQ ID NO: 687767 - DNA, 25 bp, Homo sapien
ttagtttccctgagacctcacaagg

SEQ ID NO: 687768 - DNA, 25 bp, Homo sapien
cctgagacctcacaaggtctaaatg

SEQ ID NO: 687769 - DNA, 25 bp, Homo sapien
gacctcacaaggtctaaatgtgatt

SEQ ID NO: 687770 - DNA, 25 bp, Homo sapien
tcacaaggtctaaatgtgattatgg

SEQ ID NO: 687771 - DNA, 25 bp, Homo sapien
gcattctgcacaggctttccgcatg

SEQ ID NO: 687772 - DNA, 25 bp, Homo sapien
agagcagagctcaaagaactttggg

SEQ ID NO: 687773 - DNA, 25 bp, Homo sapien
cgacacagccgtgaagcattctgca

SEQ ID NO: 687774 - DNA, 25 bp, Homo sapien
tgacaagtctgatgaagagcgggaa

SEQ ID NO: 687775 - DNA, 25 bp, Homo sapien
aatatcaccaaaatttgcagcacaa

SEQ ID NO: 687776 - DNA, 25 bp, Homo sapien
tatcaccaaaatttgcagcacaaac

SEQ ID NO: 687777 - DNA, 25 bp, Homo sapien
atatcaccaaaatttgcagcacaaa

SEQ ID NO: 687778 - DNA, 25 bp, Homo sapien
gcaggcgttcaacggtactcttact

SEQ ID NO: 687779 - DNA, 25 bp, Homo sapien
cacacagttcacagaatcgggggag

SEQ ID NO: 687780 - DNA, 25 bp, Homo sapien
ggagtagcaggcgttcaacggtact

SEQ ID NO: 687781 - DNA, 25 bp, Homo sapien
cgttcaacggtactcttactcagca

SEQ ID NO: 687782 - DNA, 25 bp, Homo sapien
aagaaatagtcatcaaagagacaac

SEQ ID NO: 687783 - DNA, 25 bp, Homo sapien
gaaaagtgggccaatgatatgaata

SEQ ID NO: 687784 - DNA, 25 bp, Homo sapien
tagtcatcaaagagacaactcacag

SEQ ID NO: 687785 - DNA, 25 bp, Homo sapien
tgaaaagtgggccaatgatatgaat

SEQ ID NO: 687786 - DNA, 25 bp, Homo sapien
tcaatagacagcaacgctagcgggt

SEQ ID NO: 687787 - DNA, 25 bp, Homo sapien
taatctcggaatgctaatggcgtcc

SEQ ID NO: 687788 - DNA, 25 bp, Homo sapien
ttagtactgactctgggcctggcac

SEQ ID NO: 687789 - DNA, 25 bp, Homo sapien
taagtcaacttatgggacagtgccc

SEQ ID NO: 687790 - DNA, 25 bp, Homo sapien
tctgctttatattcgtcatcactgt

SEQ ID NO: 687791 - DNA, 25 bp, Homo sapien
tcacagcttctgctttatattcgtc

SEQ ID NO: 687792 - DNA, 25 bp, Homo sapien
tgctttatattcgtcatcactgtct

SEQ ID NO: 687793 - DNA, 25 bp, Homo sapien
cagcttctgctttatattcgtcatc

SEQ ID NO: 687794 - DNA, 25 bp, Homo sapien
ctgcaggagaatgggacatactttg

SEQ ID NO: 687795 - DNA, 25 bp, Homo sapien
gcaggagaatgggacatactttgtt

SEQ ID NO: 687796 - DNA, 25 bp, Homo sapien
ggagaatgggacatactttgttttc

SEQ ID NO: 687797 - DNA, 25 bp, Homo sapien
agaatgggacatactttgttttcaa

SEQ ID NO: 687798 - DNA, 25 bp, Homo sapien
gacttgattttctcacccagaaggg

SEQ ID NO: 687799 - DNA, 25 bp, Homo sapien
gaatcaatggatgacttcgtgcctt

SEQ ID NO: 687800 - DNA, 25 bp, Homo sapien
aacaatactcgactagtgccctgga

SEQ ID NO: 687801 - DNA, 25 bp, Homo sapien
tgtaaaccctggcatgccacacctg

SEQ ID NO: 687802 - DNA, 25 bp, Homo sapien
tggaggagcacttgttctttgcagt

SEQ ID NO: 687803 - DNA, 25 bp, Homo sapien
cactgacaaagggggatgctcccac

SEQ ID NO: 687804 - DNA, 25 bp, Homo sapien
aagggggatgctcccacagaaaaca

SEQ ID NO: 687805 - DNA, 25 bp, Homo sapien
gtggaggagcacttgttctttgcag

SEQ ID NO: 687806 - DNA, 25 bp, Homo sapien
ccccaacgttgtgaatttcatgcct

SEQ ID NO: 687807 - DNA, 25 bp, Homo sapien
cagacgctagctggaacctagcaca

SEQ ID NO: 687808 - DNA, 25 bp, Homo sapien
gagatgcagacgctagctggaacct

SEQ ID NO: 687809 - DNA, 25 bp, Homo sapien
ggcctgagatgcagacgctagctgg

SEQ ID NO: 687810 - DNA, 25 bp, Homo sapien
gatgcagacgctagctggaacctag

SEQ ID NO: 687811 - DNA, 25 bp, Homo sapien
gtctttgccgaattaagaatcctaa

SEQ ID NO: 687812 - DNA, 25 bp, Homo sapien
catgcacgagaatcttcgtctttgc

SEQ ID NO: 687813 - DNA, 25 bp, Homo sapien
acatgcacgagaatcttcgtctttg

SEQ ID NO: 687814 - DNA, 25 bp, Homo sapien
tgccgaattaagaatcctaatcggg

SEQ ID NO: 687815 - DNA, 25 bp, Homo sapien
tgtggatgtcggaaagagtcagcat

SEQ ID NO: 687816 - DNA, 25 bp, Homo sapien
ctgtggatgtcggaaagagtcagca

SEQ ID NO: 687817 - DNA, 25 bp, Homo sapien
ggtacctcactacaataggtatgag

SEQ ID NO: 687818 - DNA, 25 bp, Homo sapien
tgtttggatctgtgaggtacctcac

SEQ ID NO: 687819 - DNA, 25 bp, Homo sapien
catcagctcagtccgcactgtgggc

SEQ ID NO: 687820 - DNA, 25 bp, Homo sapien
gagatattcagagagcaccactgga

SEQ ID NO: 687821 - DNA, 25 bp, Homo sapien
gactacaatctccattaccgtgagg

SEQ ID NO: 687822 - DNA, 25 bp, Homo sapien
tctgacaatctgactacaatctcca

SEQ ID NO: 687823 - DNA, 25 bp, Homo sapien
tctgactacaatctccattaccgtg

SEQ ID NO: 687824 - DNA, 25 bp, Homo sapien
caatctccattaccgtgaggaagtc

SEQ ID NO: 687825 - DNA, 25 bp, Homo sapien
tgttaccgaagtcccggaagatatc

SEQ ID NO: 687826 - DNA, 25 bp, Homo sapien
gaagatatcaagcagccctctggca

SEQ ID NO: 687827 - DNA, 25 bp, Homo sapien
agatatcaagcagccctctggcaat

SEQ ID NO: 687828 - DNA, 25 bp, Homo sapien
ccgaagtcccggaagatatcaagca

SEQ ID NO: 687829 - DNA, 25 bp, Homo sapien
taataagcagacaaacagcccaatt

SEQ ID NO: 687830 - DNA, 25 bp, Homo sapien
tctgaggagccaaagtatacaaacc

SEQ ID NO: 687831 - DNA, 25 bp, Homo sapien
taaaaatcatgagccacagactgga

SEQ ID NO: 687832 - DNA, 25 bp, Homo sapien
caaaagtaaatgtcgaagtccagaa

SEQ ID NO: 687833 - DNA, 25 bp, Homo sapien
tgtcgcaatctgtaccatagtcttc

SEQ ID NO: 687834 - DNA, 25 bp, Homo sapien
aaagcatacttctccaggcgagtga

SEQ ID NO: 687835 - DNA, 25 bp, Homo sapien
ggccgttactctcatgttgtcgcaa

SEQ ID NO: 687836 - DNA, 25 bp, Homo sapien
gttgaaggtgttctcgctgaaagca

SEQ ID NO: 687837 - DNA, 25 bp, Homo sapien
tcaactgtgacaagtcacacttggg

SEQ ID NO: 687838 - DNA, 25 bp, Homo sapien
tgtgcatcaactgtgacaagtcaca

SEQ ID NO: 687839 - DNA, 25 bp, Homo sapien
caactgtgacaagtcacacttgggc

SEQ ID NO: 687840 - DNA, 25 bp, Homo sapien
aaaagtgtgcatcaactgtgacaag

SEQ ID NO: 687841 - DNA, 25 bp, Homo sapien
tgtgatctatggatgaagggaaagg

SEQ ID NO: 687842 - DNA, 25 bp, Homo sapien
cggtgtgatctatggatgaagggaa

SEQ ID NO: 687843 - DNA, 25 bp, Homo sapien
tctatggatgaagggaaagggtcca

SEQ ID NO: 687844 - DNA, 25 bp, Homo sapien
gatctatggatgaagggaaagggtc

SEQ ID NO: 687845 - DNA, 25 bp, Homo sapien
cagagccctcccttctcccactccc

SEQ ID NO: 687846 - DNA, 25 bp, Homo sapien
tggcagagccctcccttctcccact

SEQ ID NO: 687847 - DNA, 25 bp, Homo sapien
gcagagccctcccttctcccactcc

SEQ ID NO: 687848 - DNA, 25 bp, Homo sapien
ctggcagagccctcccttctcccac

SEQ ID NO: 687849 - DNA, 25 bp, Homo sapien
aaccttgtgctgtggaatttataac

SEQ ID NO: 687850 - DNA, 25 bp, Homo sapien
taaagcaggagcagtaaatggaact

SEQ ID NO: 687851 - DNA, 25 bp, Homo sapien
gcaatctagaacttgacatccagtg

SEQ ID NO: 687852 - DNA, 25 bp, Homo sapien
aaatggaactatgcagttgtcaggc

SEQ ID NO: 687853 - DNA, 25 bp, Homo sapien
caacagagtagtggtccctgggcac

SEQ ID NO: 687854 - DNA, 25 bp, Homo sapien
gcaaacctaattcaacagagtagtg

SEQ ID NO: 687855 - DNA, 25 bp, Homo sapien
atcatgtacatcaccacccacaatg

SEQ ID NO: 687856 - DNA, 25 bp, Homo sapien
cctaattcaacagagtagtggtccc

SEQ ID NO: 687857 - DNA, 25 bp, Homo sapien
gacgttagcagcacctgtatgcatg

SEQ ID NO: 687858 - DNA, 25 bp, Homo sapien
cttctctggccacttgacgttagca

SEQ ID NO: 687859 - DNA, 25 bp, Homo sapien
tcttcatgcgagtatctccagcgtg

SEQ ID NO: 687860 - DNA, 25 bp, Homo sapien
tgtatgcatgcaaccacactgtgct

SEQ ID NO: 687861 - DNA, 25 bp, Homo sapien
gaatgcattacaacaacgggaaggg

SEQ ID NO: 687862 - DNA, 25 bp, Homo sapien
ggctcaactaatccacagacctagg

SEQ ID NO: 687863 - DNA, 25 bp, Homo sapien
gaaagatactgatccggctggctca

SEQ ID NO: 687864 - DNA, 25 bp, Homo sapien
gctacaatagcagaccagagacctt

SEQ ID NO: 687865 - DNA, 25 bp, Homo sapien
ttcccataaatagaagtatatcgtc

SEQ ID NO: 687866 - DNA, 25 bp, Homo sapien
aatagaagtatatcgtcttccaagc

SEQ ID NO: 687867 - DNA, 25 bp, Homo sapien
tcgtcttccaagctctttcacagat

SEQ ID NO: 687868 - DNA, 25 bp, Homo sapien
cataaatagaagtatatcgtcttcc

SEQ ID NO: 687869 - DNA, 25 bp, Homo sapien
ctaagtcatcctgcaagtccacaaa

SEQ ID NO: 687870 - DNA, 25 bp, Homo sapien
agtcgtctaagtcatcctgcaagtc

SEQ ID NO: 687871 - DNA, 25 bp, Homo sapien
tcctgcaagtccacaaagtacaggg

SEQ ID NO: 687872 - DNA, 25 bp, Homo sapien
aagtcatcctgcaagtccacaaagt

SEQ ID NO: 687873 - DNA, 25 bp, Homo sapien
tagtatgctgttatgccgtcacctc

SEQ ID NO: 687874 - DNA, 25 bp, Homo sapien
tatccatcatggtgcaggtactcaa

SEQ ID NO: 687875 - DNA, 25 bp, Homo sapien
ggacagttaaccctcatctctgaag

SEQ ID NO: 687876 - DNA, 25 bp, Homo sapien
tctgaagtggaagtcagaaacggct

SEQ ID NO: 687877 - DNA, 25 bp, Homo sapien
ggggcttataacctgttttctctga

SEQ ID NO: 687878 - DNA, 25 bp, Homo sapien
gagaaggctgaaacaagctgttgtc

SEQ ID NO: 687879 - DNA, 25 bp, Homo sapien
gagtggaaattcgtctgttctctag

SEQ ID NO: 687880 - DNA, 25 bp, Homo sapien
tctctagttgaaagtgttgactggg

SEQ ID NO: 687881 - DNA, 25 bp, Homo sapien
ccccaaggtgtgatgttgaacttca

SEQ ID NO: 687882 - DNA, 25 bp, Homo sapien
gaaacccgttttgtcgatgaaatgc

SEQ ID NO: 687883 - DNA, 25 bp, Homo sapien
gcagctgttacttctccagccatct

SEQ ID NO: 687884 - DNA, 25 bp, Homo sapien
tgatgaatcgggtccccttggtgca

SEQ ID NO: 687885 - DNA, 25 bp, Homo sapien
gagaaagttaaagctcactcccttc

SEQ ID NO: 687886 - DNA, 25 bp, Homo sapien
caaactccgaagacagccttcagag

SEQ ID NO: 687887 - DNA, 25 bp, Homo sapien
tcagagccaaagcggagctgctgct

SEQ ID NO: 687888 - DNA, 25 bp, Homo sapien
ccatctggcggtaagggcttcaaac

SEQ ID NO: 687889 - DNA, 25 bp, Homo sapien
ggtttaggtcgaagaattccatcca

SEQ ID NO: 687890 - DNA, 25 bp, Homo sapien
tgccaccagttttcacctagccagt

SEQ ID NO: 687891 - DNA, 25 bp, Homo sapien
gactacatcgttggcttttgacctt

SEQ ID NO: 687892 - DNA, 25 bp, Homo sapien
tgttctccaaagactgcagcaatga

SEQ ID NO: 687893 - DNA, 25 bp, Homo sapien
tcttctccgtgcaaaaaggattcac

SEQ ID NO: 687894 - DNA, 25 bp, Homo sapien
cattgaatctcgcacccagtcttgc

SEQ ID NO: 687895 - DNA, 25 bp, Homo sapien
ccagtcttgcgtatgcctgcccagt

SEQ ID NO: 687896 - DNA, 25 bp, Homo sapien
ccagttttcagcctcttaacgggag

SEQ ID NO: 687897 - DNA, 25 bp, Homo sapien
tgtataaaggtatagagcacttagc

SEQ ID NO: 687898 - DNA, 25 bp, Homo sapien
gcctgagggtaaaagattaagctcc

SEQ ID NO: 687899 - DNA, 25 bp, Homo sapien
cctgagggtaaaagattaagctcca

SEQ ID NO: 687900 - DNA, 25 bp, Homo sapien
agcctgagggtaaaagattaagctc

SEQ ID NO: 687901 - DNA, 25 bp, Homo sapien
tagcctgagggtaaaagattaagct

SEQ ID NO: 687902 - DNA, 25 bp, Homo sapien
gtcatttacctggtcttggtaataa

SEQ ID NO: 687903 - DNA, 25 bp, Homo sapien
ctcaagtcatttacctggtcttggt

SEQ ID NO: 687904 - DNA, 25 bp, Homo sapien
caagtcatttacctggtcttggtaa

SEQ ID NO: 687905 - DNA, 25 bp, Homo sapien
catttacctggtcttggtaataagt

SEQ ID NO: 687906 - DNA, 25 bp, Homo sapien
tgattaagtgtccatcacctgcctg

SEQ ID NO: 687907 - DNA, 25 bp, Homo sapien
acttttgtgtgagaggcttgagcgc

SEQ ID NO: 687908 - DNA, 25 bp, Homo sapien
ggcgtccaatcctagaaaccaatgg

SEQ ID NO: 687909 - DNA, 25 bp, Homo sapien
cagccgtggtcagaataagttttac

SEQ ID NO: 687910 - DNA, 25 bp, Homo sapien
tggaatttagcctagaacttaaaga

SEQ ID NO: 687911 - DNA, 25 bp, Homo sapien
gatattacatttttcaggagcctcc

SEQ ID NO: 687912 - DNA, 25 bp, Homo sapien
caggcagtttgattatccgatttgc

SEQ ID NO: 687913 - DNA, 25 bp, Homo sapien
gggcatttgtcctgttttatgtgca

SEQ ID NO: 687914 - DNA, 25 bp, Homo sapien
cagcggagttgcttgtcttgacttc

SEQ ID NO: 687915 - DNA, 25 bp, Homo sapien
gataagcgaggtgaaggaaatccca

SEQ ID NO: 687916 - DNA, 25 bp, Homo sapien
tccgtggtcacagcaacagggactg

SEQ ID NO: 687917 - DNA, 25 bp, Homo sapien
tagcagcgctcgcttaccgtgggaa

SEQ ID NO: 687918 - DNA, 25 bp, Homo sapien
tgggctctcccttaaagacacatgg

SEQ ID NO: 687919 - DNA, 25 bp, Homo sapien
caaatgaaagttgatttgccatact

SEQ ID NO: 687920 - DNA, 25 bp, Homo sapien
ctatgctcatagtagatagtttgca

SEQ ID NO: 687921 - DNA, 25 bp, Homo sapien
gagtataacatgctaaatcactgtt

SEQ ID NO: 687922 - DNA, 25 bp, Homo sapien
tgttttcatgcctatgctcatagta

SEQ ID NO: 687923 - DNA, 25 bp, Homo sapien
tctagttgggagacagatagtaaaa

SEQ ID NO: 687924 - DNA, 25 bp, Homo sapien
tagagggtagagtgttcagcagaga

SEQ ID NO: 687925 - DNA, 25 bp, Homo sapien
ggagctggctctctagttgggagac

SEQ ID NO: 687926 - DNA, 25 bp, Homo sapien
ccaaacccttgccaggtgctagagg

SEQ ID NO: 687927 - DNA, 25 bp, Homo sapien
ggcccccacttctgagcaacgttcc

SEQ ID NO: 687928 - DNA, 25 bp, Homo sapien
tctgagcaacgttccctcatctgcc

SEQ ID NO: 687929 - DNA, 25 bp, Homo sapien
cacttctgagcaacgttccctcatc

SEQ ID NO: 687930 - DNA, 25 bp, Homo sapien
ccccacttctgagcaacgttccctc

SEQ ID NO: 687931 - DNA, 25 bp, Homo sapien
gacacacaccatagtctcttgggag

SEQ ID NO: 687932 - DNA, 25 bp, Homo sapien
tatgaggaatacacacgcagctctt

SEQ ID NO: 687933 - DNA, 25 bp, Homo sapien
gcctggcatggagcacttgaccaat

SEQ ID NO: 687934 - DNA, 25 bp, Homo sapien
gcctgggagcaatcaacactgcagt

SEQ ID NO: 687935 - DNA, 25 bp, Homo sapien
cgcggcctcgccctcgccctccgcc

SEQ ID NO: 687936 - DNA, 25 bp, Homo sapien
gcggcctcgccctcgccctccgccc

SEQ ID NO: 687937 - DNA, 25 bp, Homo sapien
tcactcacattgtatctgttcctct

SEQ ID NO: 687938 - DNA, 25 bp, Homo sapien
ttcactcacattgtatctgttcctc

SEQ ID NO: 687939 - DNA, 25 bp, Homo sapien
atccaaggattttgggactccgagg

SEQ ID NO: 687940 - DNA, 25 bp, Homo sapien
gtgcatggtgcatggcagtttctca

SEQ ID NO: 687941 - DNA, 25 bp, Homo sapien
tccgaggcaagcgaatcagttgagg

SEQ ID NO: 687942 - DNA, 25 bp, Homo sapien
tggtctctgggtctaaggcataggc

SEQ ID NO: 687943 - DNA, 25 bp, Homo sapien
gggtccttggatctgcctaaattaa

SEQ ID NO: 687944 - DNA, 25 bp, Homo sapien
agtctcaaaagggtccttggatctg

SEQ ID NO: 687945 - DNA, 25 bp, Homo sapien
atgagccagtgaatatatagatttc

SEQ ID NO: 687946 - DNA, 25 bp, Homo sapien
cactgtcccttgatcagaaatttct

SEQ ID NO: 687947 - DNA, 25 bp, Homo sapien
taaacattggtaggccttggtacat

SEQ ID NO: 687948 - DNA, 25 bp, Homo sapien
aatgtatgatgacatctcacaggtc

SEQ ID NO: 687949 - DNA, 25 bp, Homo sapien
tggtggatccaccatatcatgggat

SEQ ID NO: 687950 - DNA, 25 bp, Homo sapien
tagaggtagcatgcacaggatggta

SEQ ID NO: 687951 - DNA, 25 bp, Homo sapien
cccagttctgtttgactatgtagca

SEQ ID NO: 687952 - DNA, 25 bp, Homo sapien
tctagtactagttgagagtttgact

SEQ ID NO: 687953 - DNA, 25 bp, Homo sapien
gccataaaagaccaacccagttctg

SEQ ID NO: 687954 - DNA, 25 bp, Homo sapien
gagagaaactcttcagcgaatcctt

SEQ ID NO: 687955 - DNA, 25 bp, Homo sapien
tagaagtcacatacgttgagccacg

SEQ ID NO: 687956 - DNA, 25 bp, Homo sapien
ccttctaggtcagggaaccatgcca

SEQ ID NO: 687957 - DNA, 25 bp, Homo sapien
gaggccaccccaataggaattcgtc

SEQ ID NO: 687958 - DNA, 25 bp, Homo sapien
ccattgagactagtaacgggcgttc

SEQ ID NO: 687959 - DNA, 25 bp, Homo sapien
cttctctaaaggaatggcccatttc

SEQ ID NO: 687960 - DNA, 25 bp, Homo sapien
ctgagaccttctcggtgtagaggcc

SEQ ID NO: 687961 - DNA, 25 bp, Homo sapien
ctcattgtagtttgagaaatacatg

SEQ ID NO: 687962 - DNA, 25 bp, Homo sapien
gcatttcattgaagggcctctcgtg

SEQ ID NO: 687963 - DNA, 25 bp, Homo sapien
actcttctggaacaccaagagcagc

SEQ ID NO: 687964 - DNA, 25 bp, Homo sapien
aaatcccataaggccaacgaccact

SEQ ID NO: 687965 - DNA, 25 bp, Homo sapien
cataaggccaacgaccactcttctg

SEQ ID NO: 687966 - DNA, 25 bp, Homo sapien
gccaacgaccactcttctggaacac

SEQ ID NO: 687967 - DNA, 25 bp, Homo sapien
tgccaactaagggagactaatcaga

SEQ ID NO: 687968 - DNA, 25 bp, Homo sapien
caggacagatgctcgcttgctggcc

SEQ ID NO: 687969 - DNA, 25 bp, Homo sapien
ttgctttattacaccccagggctga

SEQ ID NO: 687970 - DNA, 25 bp, Homo sapien
gtatctacggcacttaacaataggg

SEQ ID NO: 687971 - DNA, 25 bp, Homo sapien
cctctatggaggtacgtttaagcag

SEQ ID NO: 687972 - DNA, 25 bp, Homo sapien
taaattgtgttagatggcttccaca

SEQ ID NO: 687973 - DNA, 25 bp, Homo sapien
ggtaccaattcatagtcctcgcagg

SEQ ID NO: 687974 - DNA, 25 bp, Homo sapien
tagtctcactgctaaagacaacgct

SEQ ID NO: 687975 - DNA, 25 bp, Homo sapien
ggacccttccggaaagatcgcagga

SEQ ID NO: 687976 - DNA, 25 bp, Homo sapien
gcaaataaggtcatttccgccagtg

SEQ ID NO: 687977 - DNA, 25 bp, Homo sapien
gctctttgggatgcgaatggtgaca

SEQ ID NO: 687978 - DNA, 25 bp, Homo sapien
caagagctcctgtgatcaagaaaca

SEQ ID NO: 687979 - DNA, 25 bp, Homo sapien
tgctcagccgtggacatatcatcga

SEQ ID NO: 687980 - DNA, 25 bp, Homo sapien
tcaagcttcggatacaagacctgct

SEQ ID NO: 687981 - DNA, 25 bp, Homo sapien
aaatggtggcatggttacttcaagc

SEQ ID NO: 687982 - DNA, 25 bp, Homo sapien
caaccctgatgtagtctgagaccgt

SEQ ID NO: 687983 - DNA, 25 bp, Homo sapien
tgccagttaatttcacagtgtacag

SEQ ID NO: 687984 - DNA, 25 bp, Homo sapien
caatcttggcaaccgaggatggctg

SEQ ID NO: 687985 - DNA, 25 bp, Homo sapien
tgggcccaaagatacacattcggag

SEQ ID NO: 687986 - DNA, 25 bp, Homo sapien
tgctggcccgggaaaactggattta

SEQ ID NO: 687987 - DNA, 25 bp, Homo sapien
tagatgtcgccatgtagcctggtga

SEQ ID NO: 687988 - DNA, 25 bp, Homo sapien
gaaggccagccctagaactaggggc

SEQ ID NO: 687989 - DNA, 25 bp, Homo sapien
gggctatgtgaagaccccctgtgct

SEQ ID NO: 687990 - DNA, 25 bp, Homo sapien
aagtcgggggcctccccatgacaga

SEQ ID NO: 687991 - DNA, 25 bp, Homo sapien
gcctgtgctgcggtggcctggagaa

SEQ ID NO: 687992 - DNA, 25 bp, Homo sapien
tgagccatcggtgggcctttgtccg

SEQ ID NO: 687993 - DNA, 25 bp, Homo sapien
aaaagctcgtactccacatgcggga

SEQ ID NO: 687994 - DNA, 25 bp, Homo sapien
tggtggctgtgacatcccgctcagt

SEQ ID NO: 687995 - DNA, 25 bp, Homo sapien
tcacatgggcccgtgtgacctcaaa

SEQ ID NO: 687996 - DNA, 25 bp, Homo sapien
cagcacgggcgggtggtgcacatcg

SEQ ID NO: 687997 - DNA, 25 bp, Homo sapien
ggaacaggactgctgggcgcacctc

SEQ ID NO: 687998 - DNA, 25 bp, Homo sapien
catcggagcgggcaatgaggccaca

SEQ ID NO: 687999 - DNA, 25 bp, Homo sapien
ctgtgcccgtggaaagtgaagagcc

SEQ ID NO: 688000 - DNA, 25 bp, Homo sapien
tgcacgcggaccaggctgagctcgt

SEQ ID NO: 688001 - DNA, 25 bp, Homo sapien
tctccgccgggtcggtgtggatgtc

SEQ ID NO: 688002 - DNA, 25 bp, Homo sapien
ctgagctcgtgcatggtgaggccca

SEQ ID NO: 688003 - DNA, 25 bp, Homo sapien
ccttgtgcaggtggtagtcggcctc

SEQ ID NO: 688004 - DNA, 25 bp, Homo sapien
ttgacgagcagcgagtgggcaggtt

SEQ ID NO: 688005 - DNA, 25 bp, Homo sapien
tcaggaactccggtcctgggcgcac

SEQ ID NO: 688006 - DNA, 25 bp, Homo sapien
gggtagaaggtgtaggcgcgggtca

SEQ ID NO: 688007 - DNA, 25 bp, Homo sapien
tcctcgtagtagaactggtgggctc

SEQ ID NO: 688008 - DNA, 25 bp, Homo sapien
cagggctgttggagcagaggaaaca

SEQ ID NO: 688009 - DNA, 25 bp, Homo sapien
agggctgttggagcagaggaaacat

SEQ ID NO: 688010 - DNA, 25 bp, Homo sapien
cagttacctttaatttatgacaagt

SEQ ID NO: 688011 - DNA, 25 bp, Homo sapien
gctccccatatccaggataatatta

SEQ ID NO: 688012 - DNA, 25 bp, Homo sapien
tcacattacactgtcaatgtatgcc

SEQ ID NO: 688013 - DNA, 25 bp, Homo sapien
gataagtaaatactagtataggtac

SEQ ID NO: 688014 - DNA, 25 bp, Homo sapien
gattttgaccatggacgtgatgccc

SEQ ID NO: 688015 - DNA, 25 bp, Homo sapien
gacccctggcacttagctcgtaata

SEQ ID NO: 688016 - DNA, 25 bp, Homo sapien
gcagcttggcaggtagaaggcctct

SEQ ID NO: 688017 - DNA, 25 bp, Homo sapien
tcaaagattggatgccgagtcccag

SEQ ID NO: 688018 - DNA, 25 bp, Homo sapien
tgctgggcactctatctggcaaggg

SEQ ID NO: 688019 - DNA, 25 bp, Homo sapien
cctgtggagatccaaggtccattaa

SEQ ID NO: 688020 - DNA, 25 bp, Homo sapien
tgggcactctatctggcaagggctg

SEQ ID NO: 688021 - DNA, 25 bp, Homo sapien
gcagtgctgggcactctatctggca

SEQ ID NO: 688022 - DNA, 25 bp, Homo sapien
tctactcggtgctcagcgagcgtgt

SEQ ID NO: 688023 - DNA, 25 bp, Homo sapien
cacctgctatctactcggtgctcag

SEQ ID NO: 688024 - DNA, 25 bp, Homo sapien
ctgggcacctgctatctactcggtg

SEQ ID NO: 688025 - DNA, 25 bp, Homo sapien
tcagcgagcgtgtggcaagggaaag

SEQ ID NO: 688026 - DNA, 25 bp, Homo sapien
cctctagagtgacccctagatgagc

SEQ ID NO: 688027 - DNA, 25 bp, Homo sapien
acacgggaagcaggcgctgcagcac

SEQ ID NO: 688028 - DNA, 25 bp, Homo sapien
tgactggaagatggacacgggaagc

SEQ ID NO: 688029 - DNA, 25 bp, Homo sapien
tgacccctagatgagcttggctggg

SEQ ID NO: 688030 - DNA, 25 bp, Homo sapien
tacgtaggcaccaaagttgggccag

SEQ ID NO: 688031 - DNA, 25 bp, Homo sapien
aatttgtggcaggatattgtagtgg

SEQ ID NO: 688032 - DNA, 25 bp, Homo sapien
tgacgggtgcacgtcagcgtcaaca

SEQ ID NO: 688033 - DNA, 25 bp, Homo sapien
gatccccatgcaactcgccaggagt

SEQ ID NO: 688034 - DNA, 25 bp, Homo sapien
tctcatttggctataatggaatctc

SEQ ID NO: 688035 - DNA, 25 bp, Homo sapien
gaatctcctcatccacctaatccga

SEQ ID NO: 688036 - DNA, 25 bp, Homo sapien
catccacctaatccgagaatcttcg

SEQ ID NO: 688037 - DNA, 25 bp, Homo sapien
agaatcttcgtgttcagggctggca

SEQ ID NO: 688038 - DNA, 25 bp, Homo sapien
gcagaagggcctttggattaagaag

SEQ ID NO: 688039 - DNA, 25 bp, Homo sapien
ctggcagagcaggtctgaggatgtg

SEQ ID NO: 688040 - DNA, 25 bp, Homo sapien
ggatgtgagaagcagaagggccttt

SEQ ID NO: 688041 - DNA, 25 bp, Homo sapien
cagagcaggtctgaggatgtgagaa

SEQ ID NO: 688042 - DNA, 25 bp, Homo sapien
ctggtgcttggaggagccggtgagg

SEQ ID NO: 688043 - DNA, 25 bp, Homo sapien
gggatgatgacagcttgtagcatca

SEQ ID NO: 688044 - DNA, 25 bp, Homo sapien
ggggatgatgacagcttgtagcatc

SEQ ID NO: 688045 - DNA, 25 bp, Homo sapien
tctgaatgtgcccagatctcactga

SEQ ID NO: 688046 - DNA, 25 bp, Homo sapien
gaaggggttctgaatgtgcccagat

SEQ ID NO: 688047 - DNA, 25 bp, Homo sapien
atgtgcccagatctcactgaatgtc

SEQ ID NO: 688048 - DNA, 25 bp, Homo sapien
gggttctgaatgtgcccagatctca

SEQ ID NO: 688049 - DNA, 25 bp, Homo sapien
cgattgggagccagtggcgaaccct

SEQ ID NO: 688050 - DNA, 25 bp, Homo sapien
gaaggagcccaccaaggccagctct

SEQ ID NO: 688051 - DNA, 25 bp, Homo sapien
tcgttccacccagtccttgcggaag

SEQ ID NO: 688052 - DNA, 25 bp, Homo sapien
caaactttcttccacgtgggagatc

SEQ ID NO: 688053 - DNA, 25 bp, Homo sapien
tagaaggtctgaacttgcagacacc

SEQ ID NO: 688054 - DNA, 25 bp, Homo sapien
ggttggcgggagtatgggagctggt

SEQ ID NO: 688055 - DNA, 25 bp, Homo sapien
gccatgcaggggacagctcgagaaa

SEQ ID NO: 688056 - DNA, 25 bp, Homo sapien
gtcagcagcgtggacaccagaggtc

SEQ ID NO: 688057 - DNA, 25 bp, Homo sapien
tgcgagaggcagacggaaatgcaaa

SEQ ID NO: 688058 - DNA, 25 bp, Homo sapien
gcagacggaaatgcaaaagtattgc

SEQ ID NO: 688059 - DNA, 25 bp, Homo sapien
gatttcctgcgagaggcagacggaa

SEQ ID NO: 688060 - DNA, 25 bp, Homo sapien
gaagtgatttcctgcgagaggcaga

SEQ ID NO: 688061 - DNA, 25 bp, Homo sapien
ctgatgggccaaacagtagacttca

SEQ ID NO: 688062 - DNA, 25 bp, Homo sapien
gaatttggttaaagctgatgggcca

SEQ ID NO: 688063 - DNA, 25 bp, Homo sapien
aagttggtcttaatttcagtctgtg

SEQ ID NO: 688064 - DNA, 25 bp, Homo sapien
gttggtcttaatttcagtctgtggt

SEQ ID NO: 688065 - DNA, 25 bp, Homo sapien
atttcccagaaacacctggtgccat

SEQ ID NO: 688066 - DNA, 25 bp, Homo sapien
gttacttctcaaattccatttccca

SEQ ID NO: 688067 - DNA, 25 bp, Homo sapien
ttccatttcccagaaacacctggtg

SEQ ID NO: 688068 - DNA, 25 bp, Homo sapien
catttcccagaaacacctggtgcca

SEQ ID NO: 688069 - DNA, 25 bp, Homo sapien
cagatgctaagtgacgtgtccaagc

SEQ ID NO: 688070 - DNA, 25 bp, Homo sapien
gctcaagctgaaatggcaacttcct

SEQ ID NO: 688071 - DNA, 25 bp, Homo sapien
tgttgaacacttccagcactctctg

SEQ ID NO: 688072 - DNA, 25 bp, Homo sapien
cacagagggttcaccaggttctcag

SEQ ID NO: 688073 - DNA, 25 bp, Homo sapien
tagccagcggtgaaaagagcttttc

SEQ ID NO: 688074 - DNA, 25 bp, Homo sapien
cagtggaaaatagtgcccggtgtag

SEQ ID NO: 688075 - DNA, 25 bp, Homo sapien
gagcttttcaaagaagcgttcagtg

SEQ ID NO: 688076 - DNA, 25 bp, Homo sapien
cagtggcaggctgaacggcaccctc

SEQ ID NO: 688077 - DNA, 25 bp, Homo sapien
ccaggccccgactggcgcagagagt

SEQ ID NO: 688078 - DNA, 25 bp, Homo sapien
catattgcgaggtgacgcgactccc

SEQ ID NO: 688079 - DNA, 25 bp, Homo sapien
cagcggctctcatattgcgaggtga

SEQ ID NO: 688080 - DNA, 25 bp, Homo sapien
gcgcagagagtgcagcggctctcat

SEQ ID NO: 688081 - DNA, 25 bp, Homo sapien
cccaaaagcaccaggacgcaagcgt

SEQ ID NO: 688082 - DNA, 25 bp, Homo sapien
accaggacgcaagcgtaggggagca

SEQ ID NO: 688083 - DNA, 25 bp, Homo sapien
caaaagcaccaggacgcaagcgtag

SEQ ID NO: 688084 - DNA, 25 bp, Homo sapien
aaagcaccaggacgcaagcgtaggg

SEQ ID NO: 688085 - DNA, 25 bp, Homo sapien
gggctggcaggaccgcccgccgggc

SEQ ID NO: 688086 - DNA, 25 bp, Homo sapien
gtcggggctggcaggaccgcccgcc

SEQ ID NO: 688087 - DNA, 25 bp, Homo sapien
ccgtcggggctggcaggaccgcccg

SEQ ID NO: 688088 - DNA, 25 bp, Homo sapien
cggggctggcaggaccgcccgccgg

SEQ ID NO: 688089 - DNA, 25 bp, Homo sapien
cctgcgaagaagttgcgagggtcct

SEQ ID NO: 688090 - DNA, 25 bp, Homo sapien
gtcctgcgaagaagttgcgagggtc

SEQ ID NO: 688091 - DNA, 25 bp, Homo sapien
gccacggtgcgcaaggggaggcgcg

SEQ ID NO: 688092 - DNA, 25 bp, Homo sapien
aagaagttgcgagggtcctgcgccc

SEQ ID NO: 688093 - DNA, 25 bp, Homo sapien
tcagccttcccggctgttgatagtt

SEQ ID NO: 688094 - DNA, 25 bp, Homo sapien
cagccttcccggctgttgatagttg

SEQ ID NO: 688095 - DNA, 25 bp, Homo sapien
agccttcccggctgttgatagttgt

SEQ ID NO: 688096 - DNA, 25 bp, Homo sapien
ctcattttcaaatggcctcttggga

SEQ ID NO: 688097 - DNA, 25 bp, Homo sapien
tttcaaatggcctcttgggagccac

SEQ ID NO: 688098 - DNA, 25 bp, Homo sapien
aggtccactcattttcaaatggcct

SEQ ID NO: 688099 - DNA, 25 bp, Homo sapien
caggtccactcattttcaaatggcc

SEQ ID NO: 688100 - DNA, 25 bp, Homo sapien
tggagcaatgagatacgcgatgacg

SEQ ID NO: 688101 - DNA, 25 bp, Homo sapien
ctgcaaagagggatccatggctgtt

SEQ ID NO: 688102 - DNA, 25 bp, Homo sapien
ctgtgaagactgcaaagagggatcc

SEQ ID NO: 688103 - DNA, 25 bp, Homo sapien
gacagatccggaaagcgcatcgtct

SEQ ID NO: 688104 - DNA, 25 bp, Homo sapien
acactcaggtccctctggccgtggc

SEQ ID NO: 688105 - DNA, 25 bp, Homo sapien
tgtgtgcagaagagctgcttggagc

SEQ ID NO: 688106 - DNA, 25 bp, Homo sapien
gcatggttcggtgcccattctctga

SEQ ID NO: 688107 - DNA, 25 bp, Homo sapien
gtagatccaccagggcttgcagaag

SEQ ID NO: 688108 - DNA, 25 bp, Homo sapien
gcagaagagcatggttcggtgccca

SEQ ID NO: 688109 - DNA, 25 bp, Homo sapien
cctgtttgtggactctgcgggtcgt

SEQ ID NO: 688110 - DNA, 25 bp, Homo sapien
tttctggcctgttttccccaagctc

SEQ ID NO: 688111 - DNA, 25 bp, Homo sapien
atcatagcttagatgtgtgtggcct

SEQ ID NO: 688112 - DNA, 25 bp, Homo sapien
atacaggatggtgtgcgtgacagtc

SEQ ID NO: 688113 - DNA, 25 bp, Homo sapien
tctgcatgtgttggcgagaaccagt

SEQ ID NO: 688114 - DNA, 25 bp, Homo sapien
cttggaagccagtccccaaggtggc

SEQ ID NO: 688115 - DNA, 25 bp, Homo sapien
cccaaggtggctctagatggcttac

SEQ ID NO: 688116 - DNA, 25 bp, Homo sapien
tcagcctgaacgttgtgggaagcca

SEQ ID NO: 688117 - DNA, 25 bp, Homo sapien
gaaaaagagagtgtatggtggattt

SEQ ID NO: 688118 - DNA, 25 bp, Homo sapien
tgtatggtggatttcaatatctata

SEQ ID NO: 688119 - DNA, 25 bp, Homo sapien
aagagagtgtatggtggatttcaat

SEQ ID NO: 688120 - DNA, 25 bp, Homo sapien
gagtgtatggtggatttcaatatct

SEQ ID NO: 688121 - DNA, 25 bp, Homo sapien
gatgtttgtacatttgttgtaccac

SEQ ID NO: 688122 - DNA, 25 bp, Homo sapien
tgtttgtacatttgttgtaccacat

SEQ ID NO: 688123 - DNA, 25 bp, Homo sapien
gattttgatgtttgtacatttgttg

SEQ ID NO: 688124 - DNA, 25 bp, Homo sapien
ttgatgtttgtacatttgttgtacc

SEQ ID NO: 688125 - DNA, 25 bp, Homo sapien
cttcattgctgccatcgggctcctt

SEQ ID NO: 688126 - DNA, 25 bp, Homo sapien
cctgagagttgtttgtgaagtctgg

SEQ ID NO: 688127 - DNA, 25 bp, Homo sapien
tcagacctgagagttgtttgtgaag

SEQ ID NO: 688128 - DNA, 25 bp, Homo sapien
ggaggtaggctgtgttctcgggata

SEQ ID NO: 688129 - DNA, 25 bp, Homo sapien
taggctgtgttctcgggatagaggt

SEQ ID NO: 688130 - DNA, 25 bp, Homo sapien
tggaagatgataccaacaatgagga

SEQ ID NO: 688131 - DNA, 25 bp, Homo sapien
ggaagatgataccaacaatgaggag

SEQ ID NO: 688132 - DNA, 25 bp, Homo sapien
gaagatgataccaacaatgaggagg

SEQ ID NO: 688133 - DNA, 25 bp, Homo sapien
agatgcagtccacacgccaggtcat

SEQ ID NO: 688134 - DNA, 25 bp, Homo sapien
atgcagtccacacgccaggtcataa

SEQ ID NO: 688135 - DNA, 25 bp, Homo sapien
cacagatgcagtccacacgccaggt

SEQ ID NO: 688136 - DNA, 25 bp, Homo sapien
agtccacacgccaggtcataaaacc

SEQ ID NO: 688137 - DNA, 25 bp, Homo sapien
ctaagagattgttttgcttctcctc

SEQ ID NO: 688138 - DNA, 25 bp, Homo sapien
cccaagccagctatagaactctgca

SEQ ID NO: 688139 - DNA, 25 bp, Homo sapien
tgcttctaagagattgttttgcttc

SEQ ID NO: 688140 - DNA, 25 bp, Homo sapien
agccagctatagaactctgcagctt

SEQ ID NO: 688141 - DNA, 25 bp, Homo sapien
aactccttgcacagcagccatgctc

SEQ ID NO: 688142 - DNA, 25 bp, Homo sapien
gaactccttgcacagcagccatgct

SEQ ID NO: 688143 - DNA, 25 bp, Homo sapien
ctccttgcacagcagccatgctcac

SEQ ID NO: 688144 - DNA, 25 bp, Homo sapien
ccgaactccttgcacagcagccatg

SEQ ID NO: 688145 - DNA, 25 bp, Homo sapien
cacaaatgggcacaacattccagcc

SEQ ID NO: 688146 - DNA, 25 bp, Homo sapien
tttgctacacaaatgggcacaacat

SEQ ID NO: 688147 - DNA, 25 bp, Homo sapien
ggcttttgctacacaaatgggcaca

SEQ ID NO: 688148 - DNA, 25 bp, Homo sapien
tacacaaatgggcacaacattccag

SEQ ID NO: 688149 - DNA, 25 bp, Homo sapien
tgaatcccgtttgagaaatagatgc

SEQ ID NO: 688150 - DNA, 25 bp, Homo sapien
tttgagaaatagatgcagaaacaga

SEQ ID NO: 688151 - DNA, 25 bp, Homo sapien
cttgaatcccgtttgagaaatagat

SEQ ID NO: 688152 - DNA, 25 bp, Homo sapien
tgagaaatagatgcagaaacagaag

SEQ ID NO: 688153 - DNA, 25 bp, Homo sapien
gtggagccaccgtcctgattcgagc

SEQ ID NO: 688154 - DNA, 25 bp, Homo sapien
ttccagagtgacaaaggcatggcgg

SEQ ID NO: 688155 - DNA, 25 bp, Homo sapien
ttccaccctgtgcacttccagagtg

SEQ ID NO: 688156 - DNA, 25 bp, Homo sapien
gtcctgattcgagccctgtctgctg

SEQ ID NO: 688157 - DNA, 25 bp, Homo sapien
agcatttagcttgcccactgcaaac

SEQ ID NO: 688158 - DNA, 25 bp, Homo sapien
ccaccacagcatttagcttgcccac

SEQ ID NO: 688159 - DNA, 25 bp, Homo sapien
ttagcttgcccactgcaaacgtcat

SEQ ID NO: 688160 - DNA, 25 bp, Homo sapien
ccacagcatttagcttgcccactgc

SEQ ID NO: 688161 - DNA, 25 bp, Homo sapien
gctggcttcctcaccgcctctgagt

SEQ ID NO: 688162 - DNA, 25 bp, Homo sapien
cgcctctgagtcttcaatatacatt

SEQ ID NO: 688163 - DNA, 25 bp, Homo sapien
tctctgacgaggagcccttctccat

SEQ ID NO: 688164 - DNA, 25 bp, Homo sapien
tcagcctggtatgcagacagctttc

SEQ ID NO: 688165 - DNA, 25 bp, Homo sapien
ttggcctcccccgactggtggatgg

SEQ ID NO: 688166 - DNA, 25 bp, Homo sapien
ggccgctgggaacaaaagactgtaa

SEQ ID NO: 688167 - DNA, 25 bp, Homo sapien
ttgtcttggcctcccccgactggtg

SEQ ID NO: 688168 - DNA, 25 bp, Homo sapien
gcagatgggcctgccacgatgtcag

SEQ ID NO: 688169 - DNA, 25 bp, Homo sapien
agaagatccatagtcagggagagca

SEQ ID NO: 688170 - DNA, 25 bp, Homo sapien
tcacacacgccaagagcaatcagag

SEQ ID NO: 688171 - DNA, 25 bp, Homo sapien
tcagagaaagtacccactgggtgcc

SEQ ID NO: 688172 - DNA, 25 bp, Homo sapien
ggtgccaaggatcgtttgaaaagga

SEQ ID NO: 688173 - DNA, 25 bp, Homo sapien
tagggcctggtagattgtcacttaa

SEQ ID NO: 688174 - DNA, 25 bp, Homo sapien
ttagccaacaccatctgaaagagag

SEQ ID NO: 688175 - DNA, 25 bp, Homo sapien
tctcctgggtggtagttctccgact

SEQ ID NO: 688176 - DNA, 25 bp, Homo sapien
aagagaggtgctaagtctcaggcca

SEQ ID NO: 688177 - DNA, 25 bp, Homo sapien
cacctccaatgagccccttccattt

SEQ ID NO: 688178 - DNA, 25 bp, Homo sapien
cccccgatgcttgaaaaaccctgat

SEQ ID NO: 688179 - DNA, 25 bp, Homo sapien
ttaggaactcctgggctggtgcagc

SEQ ID NO: 688180 - DNA, 25 bp, Homo sapien
ctgtagacccccgatgcttgaaaaa

SEQ ID NO: 688181 - DNA, 25 bp, Homo sapien
tatttgaagctgtattcaccgcgtg

SEQ ID NO: 688182 - DNA, 25 bp, Homo sapien
catttggatggcgttggcttcccga

SEQ ID NO: 688183 - DNA, 25 bp, Homo sapien
gcttcccgaagctccagatatttga

SEQ ID NO: 688184 - DNA, 25 bp, Homo sapien
tcaccgcgtgtggtgcttgcttctc

SEQ ID NO: 688185 - DNA, 25 bp, Homo sapien
gcaggaggtcttgagccacagagct

SEQ ID NO: 688186 - DNA, 25 bp, Homo sapien
tttccccatgaagctcggacaggag

SEQ ID NO: 688187 - DNA, 25 bp, Homo sapien
caacatggactgtgtaactgagacg

SEQ ID NO: 688188 - DNA, 25 bp, Homo sapien
gacgattcgcggttggtgttcccat

SEQ ID NO: 688189 - DNA, 25 bp, Homo sapien
agctcagactgtgcatccagcagac

SEQ ID NO: 688190 - DNA, 25 bp, Homo sapien
aggaggattgtgcagctcagactga

SEQ ID NO: 688191 - DNA, 25 bp, Homo sapien
gattgtgcagctcagactgagcagc

SEQ ID NO: 688192 - DNA, 25 bp, Homo sapien
gcagacggttgtcggaagcacagct

SEQ ID NO: 688193 - DNA, 25 bp, Homo sapien
gagggcagagccttggtttacttgt

SEQ ID NO: 688194 - DNA, 25 bp, Homo sapien
gccttggtttacttgtccctgctca

SEQ ID NO: 688195 - DNA, 25 bp, Homo sapien
gcatgtttttggcctcatggatggg

SEQ ID NO: 688196 - DNA, 25 bp, Homo sapien
gcagagccttggtttacttgtccct

SEQ ID NO: 688197 - DNA, 25 bp, Homo sapien
actgcaggtgcactcattcttcatt

SEQ ID NO: 688198 - DNA, 25 bp, Homo sapien
tacttcccgtggagaccactgcagg

SEQ ID NO: 688199 - DNA, 25 bp, Homo sapien
gagttatgggcaacttcagagcagc

SEQ ID NO: 688200 - DNA, 25 bp, Homo sapien
agtactgctctatagtgacctgaga

SEQ ID NO: 688201 - DNA, 25 bp, Homo sapien
tgctgcctttctgagtaatcagagg

SEQ ID NO: 688202 - DNA, 25 bp, Homo sapien
ggcatctctccctccgccgcagggg

SEQ ID NO: 688203 - DNA, 25 bp, Homo sapien
ttctgagtaatcagaggaggccaca

SEQ ID NO: 688204 - DNA, 25 bp, Homo sapien
actactgcctgtcccggcatctctc

SEQ ID NO: 688205 - DNA, 25 bp, Homo sapien
gagagcctcttatgggccaccaagt

SEQ ID NO: 688206 - DNA, 25 bp, Homo sapien
tggcggatctgctccatgtcgtgtg

SEQ ID NO: 688207 - DNA, 25 bp, Homo sapien
gctccatgtcgtgtgatgtgctgca

SEQ ID NO: 688208 - DNA, 25 bp, Homo sapien
gcgatgacgctcctggcccaggagt

SEQ ID NO: 688209 - DNA, 25 bp, Homo sapien
tagagacagtggagatgcaaattcc

SEQ ID NO: 688210 - DNA, 25 bp, Homo sapien
tacacgatgagaaccagaatttggg

SEQ ID NO: 688211 - DNA, 25 bp, Homo sapien
atttgagatcggctggcatgggcca

SEQ ID NO: 688212 - DNA, 25 bp, Homo sapien
taatattagtgatgcccagcttggt

SEQ ID NO: 688213 - DNA, 25 bp, Homo sapien
gacctccccgctgttaggctcttgg

SEQ ID NO: 688214 - DNA, 25 bp, Homo sapien
tccattatttgtgtgcaagcagtgt

SEQ ID NO: 688215 - DNA, 25 bp, Homo sapien
agcagtgttcatttcgctcaaagaa

SEQ ID NO: 688216 - DNA, 25 bp, Homo sapien
gcctttgggctgctatgccaacttc

SEQ ID NO: 688217 - DNA, 25 bp, Homo sapien
aaaacactgtccctgcgtaggaaga

SEQ ID NO: 688218 - DNA, 25 bp, Homo sapien
aatatttatccggagcctgttccaa

SEQ ID NO: 688219 - DNA, 25 bp, Homo sapien
taatctgattctcctaccgacgacc

SEQ ID NO: 688220 - DNA, 25 bp, Homo sapien
gggactaaatctcgagtctctcatt

SEQ ID NO: 688221 - DNA, 25 bp, Homo sapien
cagcctgtttgtgggtgccgtgctc

SEQ ID NO: 688222 - DNA, 25 bp, Homo sapien
gcgcgggaacattctccgtgagaga

SEQ ID NO: 688223 - DNA, 25 bp, Homo sapien
tttgcaagcgctcagcacacgggaa

SEQ ID NO: 688224 - DNA, 25 bp, Homo sapien
tgttccacgcagaaacaaaggacgc

SEQ ID NO: 688225 - DNA, 25 bp, Homo sapien
tccactctaattcagcgaccaaggg

SEQ ID NO: 688226 - DNA, 25 bp, Homo sapien
ggcctgcagaggcagtcgtctccaa

SEQ ID NO: 688227 - DNA, 25 bp, Homo sapien
cagtagagcgtgctcggcctgcaga

SEQ ID NO: 688228 - DNA, 25 bp, Homo sapien
tcctcgtggttgtttgtcggataca

SEQ ID NO: 688229 - DNA, 25 bp, Homo sapien
tgtctcttcaggagctggacgaggt

SEQ ID NO: 688230 - DNA, 25 bp, Homo sapien
gctttccccaactggatgggactga

SEQ ID NO: 688231 - DNA, 25 bp, Homo sapien
tctcaactgaccatgccttgtctgt

SEQ ID NO: 688232 - DNA, 25 bp, Homo sapien
gctttgggaagatcgtttactagtc

SEQ ID NO: 688233 - DNA, 25 bp, Homo sapien
caacgggtagctgactgagccaggt

SEQ ID NO: 688234 - DNA, 25 bp, Homo sapien
tgttaacagtggatacaccccaaga

SEQ ID NO: 688235 - DNA, 25 bp, Homo sapien
gaaacatctgggatagaaaacttcc

SEQ ID NO: 688236 - DNA, 25 bp, Homo sapien
aaaccatgtgcatgtatactttgcc

SEQ ID NO: 688237 - DNA, 25 bp, Homo sapien
gatactgctgcacaatagagattga

SEQ ID NO: 688238 - DNA, 25 bp, Homo sapien
gccatgtctgagcagaatgttaaca

SEQ ID NO: 688239 - DNA, 25 bp, Homo sapien
gctgagagtttacaggcactgcaga

SEQ ID NO: 688240 - DNA, 25 bp, Homo sapien
cctagtcctgctcaagcggtccggg

SEQ ID NO: 688241 - DNA, 25 bp, Homo sapien
gtgtgtccccatgggtatccccagc

SEQ ID NO: 688242 - DNA, 25 bp, Homo sapien
gtgaatttacacagaggccatttta

SEQ ID NO: 688243 - DNA, 25 bp, Homo sapien
caaaccagactctatttaatgaact

SEQ ID NO: 688244 - DNA, 25 bp, Homo sapien
tgggtcaccccatttaggattagtg

SEQ ID NO: 688245 - DNA, 25 bp, Homo sapien
catcagtcagccctgcaatgtgaga

SEQ ID NO: 688246 - DNA, 25 bp, Homo sapien
ggtcagaccgccaaagtaggacttc

SEQ ID NO: 688247 - DNA, 25 bp, Homo sapien
gccggagaataagaagccagcacct

SEQ ID NO: 688248 - DNA, 25 bp, Homo sapien
gaagcggacctggtattccctgaca

SEQ ID NO: 688249 - DNA, 25 bp, Homo sapien
aaataacggatctgattagaaactg

SEQ ID NO: 688250 - DNA, 25 bp, Homo sapien
tgggtaaaataacggatctgattag

SEQ ID NO: 688251 - DNA, 25 bp, Homo sapien
atttgggtaaaataacggatctgat

SEQ ID NO: 688252 - DNA, 25 bp, Homo sapien
acggatctgattagaaactgtttta

SEQ ID NO: 688253 - DNA, 25 bp, Homo sapien
gacatgtttaccacgcgttttccaa

SEQ ID NO: 688254 - DNA, 25 bp, Homo sapien
gcctcctttaaagtgtccgggtgca

SEQ ID NO: 688255 - DNA, 25 bp, Homo sapien
gaaaagaatcatggtacctcagggt

SEQ ID NO: 688256 - DNA, 25 bp, Homo sapien
tactgggccgtggaggtaacgatca

SEQ ID NO: 688257 - DNA, 25 bp, Homo sapien
tgggtcctctgtttcgacaccggga

SEQ ID NO: 688258 - DNA, 25 bp, Homo sapien
gcgtcttcgttttgaccatcccgca

SEQ ID NO: 688259 - DNA, 25 bp, Homo sapien
tcttgtggctttcagatgtctgcag

SEQ ID NO: 688260 - DNA, 25 bp, Homo sapien
gactgtcagagcgattctcagaagg

SEQ ID NO: 688261 - DNA, 25 bp, Homo sapien
tcagctcccggcctggaaattaaca

SEQ ID NO: 688262 - DNA, 25 bp, Homo sapien
taaattcgccacagatagtgcaccc

SEQ ID NO: 688263 - DNA, 25 bp, Homo sapien
tctggctggtagagtcgtggaccct

SEQ ID NO: 688264 - DNA, 25 bp, Homo sapien
tttgttcagagataccggcacacgg

SEQ ID NO: 688265 - DNA, 25 bp, Homo sapien
ggtcactcctcaaaaagcaagccgg

SEQ ID NO: 688266 - DNA, 25 bp, Homo sapien
ccgttctacgtggatttgggatcaa

SEQ ID NO: 688267 - DNA, 25 bp, Homo sapien
ccaacggcctggtgtgaaacgcaga

SEQ ID NO: 688268 - DNA, 25 bp, Homo sapien
tctgaaaatgcgactatagcccctg

SEQ ID NO: 688269 - DNA, 25 bp, Homo sapien
acagccccggttctggtcacagctg

SEQ ID NO: 688270 - DNA, 25 bp, Homo sapien
agatgaccatttccaggtcgtggcc

SEQ ID NO: 688271 - DNA, 25 bp, Homo sapien
accatttccaggtcgtggccacagc

SEQ ID NO: 688272 - DNA, 25 bp, Homo sapien
gggctgtgtcattgtagatgaccat

SEQ ID NO: 688273 - DNA, 25 bp, Homo sapien
gtgtgcgtgagcgtgcaggccagtg

SEQ ID NO: 688274 - DNA, 25 bp, Homo sapien
ggtctcgtgtttccttatccacgta

SEQ ID NO: 688275 - DNA, 25 bp, Homo sapien
tataccacgtgctcgctggctactt

SEQ ID NO: 688276 - DNA, 25 bp, Homo sapien
tacaggctctctcgggtgtgcgtga

SEQ ID NO: 688277 - DNA, 25 bp, Homo sapien
gagggagtggaatttgggctgtcag

SEQ ID NO: 688278 - DNA, 25 bp, Homo sapien
tgagggagtggaatttgggctgtca

SEQ ID NO: 688279 - DNA, 25 bp, Homo sapien
agtgagggagtggaatttgggctgt

SEQ ID NO: 688280 - DNA, 25 bp, Homo sapien
agagtgagggagtggaatttgggct

SEQ ID NO: 688281 - DNA, 25 bp, Homo sapien
gggctagttggtcatgtcacctgct

SEQ ID NO: 688282 - DNA, 25 bp, Homo sapien
gctgtcttcaacagggacataaaaa

SEQ ID NO: 688283 - DNA, 25 bp, Homo sapien
ttgtaactataaatggcaatcttga

SEQ ID NO: 688284 - DNA, 25 bp, Homo sapien
gaaccgcatgaggaagatcaaagca

SEQ ID NO: 688285 - DNA, 25 bp, Homo sapien
ttcatgatgaagacctttgcacaca

SEQ ID NO: 688286 - DNA, 25 bp, Homo sapien
catgatgaagacctttgcacacagg

SEQ ID NO: 688287 - DNA, 25 bp, Homo sapien
tcatgatgaagacctttgcacacag

SEQ ID NO: 688288 - DNA, 25 bp, Homo sapien
tacccagtctatgacagctctcggc

SEQ ID NO: 688289 - DNA, 25 bp, Homo sapien
agctctcggctccaagaggaaaggc

SEQ ID NO: 688290 - DNA, 25 bp, Homo sapien
tcggctccaagaggaaaggctcaag

SEQ ID NO: 688291 - DNA, 25 bp, Homo sapien
gcagtgtccatccatacccagtcta

SEQ ID NO: 688292 - DNA, 25 bp, Homo sapien
gcagtggccgggtacgtcagcttgg

SEQ ID NO: 688293 - DNA, 25 bp, Homo sapien
caggcagtggccgggtacgtcagct

SEQ ID NO: 688294 - DNA, 25 bp, Homo sapien
cagtggccgggtacgtcagcttggg

SEQ ID NO: 688295 - DNA, 25 bp, Homo sapien
ggcagtggccgggtacgtcagcttg

SEQ ID NO: 688296 - DNA, 25 bp, Homo sapien
tgagggcaaagttgaacacgtccac

SEQ ID NO: 688297 - DNA, 25 bp, Homo sapien
tgaagttgtggaagaattggcagat

SEQ ID NO: 688298 - DNA, 25 bp, Homo sapien
caggaacgtgaggacttaacctcca

SEQ ID NO: 688299 - DNA, 25 bp, Homo sapien
gaaggcctagtcagtacccaaagag

SEQ ID NO: 688300 - DNA, 25 bp, Homo sapien
tgcttttggctgaatgggaatttcc

SEQ ID NO: 688301 - DNA, 25 bp, Homo sapien
aatgggaatttcctgagtaggctcc

SEQ ID NO: 688302 - DNA, 25 bp, Homo sapien
cttggctgagttgcttttggctgaa

SEQ ID NO: 688303 - DNA, 25 bp, Homo sapien
gctgaatgggaatttcctgagtagg

SEQ ID NO: 688304 - DNA, 25 bp, Homo sapien
actcggccagcaaaccagatggagg

SEQ ID NO: 688305 - DNA, 25 bp, Homo sapien
cagcaaaccagatggaggatatggg

SEQ ID NO: 688306 - DNA, 25 bp, Homo sapien
ggccagcaaaccagatggaggatat

SEQ ID NO: 688307 - DNA, 25 bp, Homo sapien
tcggccagcaaaccagatggaggat

SEQ ID NO: 688308 - DNA, 25 bp, Homo sapien
tggcgtcccttcctggtagagcggt

SEQ ID NO: 688309 - DNA, 25 bp, Homo sapien
actgcaggagatcgcagaggacaca

SEQ ID NO: 688310 - DNA, 25 bp, Homo sapien
cggtgggtgaacagcacaagtaact

SEQ ID NO: 688311 - DNA, 25 bp, Homo sapien
agtgtatcattttgtggtccaggga

SEQ ID NO: 688312 - DNA, 25 bp, Homo sapien
gttcacacagggagataacggagga

SEQ ID NO: 688313 - DNA, 25 bp, Homo sapien
tggctgttgatgctcctgtgtggaa

SEQ ID NO: 688314 - DNA, 25 bp, Homo sapien
ggagtaggcgcagaaagatgcctcc

SEQ ID NO: 688315 - DNA, 25 bp, Homo sapien
tgtcaaaagtaatcctggcagccag

SEQ ID NO: 688316 - DNA, 25 bp, Homo sapien
gcattgcccacaggaaagataagat

SEQ ID NO: 688317 - DNA, 25 bp, Homo sapien
gcatctcagacttggacacggccat

SEQ ID NO: 688318 - DNA, 25 bp, Homo sapien
gagccttgggactgaaagcattgcc

SEQ ID NO: 688319 - DNA, 25 bp, Homo sapien
catctggagcaaggcgaaggccagc

SEQ ID NO: 688320 - DNA, 25 bp, Homo sapien
ggcaggctcccatgaaccctgtccg

SEQ ID NO: 688321 - DNA, 25 bp, Homo sapien
aggctcccatgaaccctgtccggct

SEQ ID NO: 688322 - DNA, 25 bp, Homo sapien
catgaaccctgtccggctgctcagc

SEQ ID NO: 688323 - DNA, 25 bp, Homo sapien
tcccatgaaccctgtccggctgctc

SEQ ID NO: 688324 - DNA, 25 bp, Homo sapien
aagttgtgcgtgtttctgcgtggat

SEQ ID NO: 688325 - DNA, 25 bp, Homo sapien
ggctgaggacggtgcgctatcacca

SEQ ID NO: 688326 - DNA, 25 bp, Homo sapien
gtttctgcgtggatctttacagcca

SEQ ID NO: 688327 - DNA, 25 bp, Homo sapien
ctatcaccattgaggagggcaacct

SEQ ID NO: 688328 - DNA, 25 bp, Homo sapien
tctcgttgtcggtaagccttaaata

SEQ ID NO: 688329 - DNA, 25 bp, Homo sapien
tctaattagaaccattgctaactgt

SEQ ID NO: 688330 - DNA, 25 bp, Homo sapien
aaatcgatgtcatatttgttccaag

SEQ ID NO: 688331 - DNA, 25 bp, Homo sapien
actaagcaagggagatggaaaatcg

SEQ ID NO: 688332 - DNA, 25 bp, Homo sapien
caggtagctcgtgctaacggccaaa

SEQ ID NO: 688333 - DNA, 25 bp, Homo sapien
ctttctgggcaggtagctcgtgcta

SEQ ID NO: 688334 - DNA, 25 bp, Homo sapien
cgtgctaacggccaaatcgtcagaa

SEQ ID NO: 688335 - DNA, 25 bp, Homo sapien
aaatcgtcagaactcctgcaggctc

SEQ ID NO: 688336 - DNA, 25 bp, Homo sapien
cagtcaaaacgcctttgccattttg

SEQ ID NO: 688337 - DNA, 25 bp, Homo sapien
ttggtttcagtgcttgcctttttcc

SEQ ID NO: 688338 - DNA, 25 bp, Homo sapien
gaacagtgaaacacttagcctccca

SEQ ID NO: 688339 - DNA, 25 bp, Homo sapien
tccggattggcgaccacatacaggt

SEQ ID NO: 688340 - DNA, 25 bp, Homo sapien
gaagctctgtcgctggacttgcaga

SEQ ID NO: 688341 - DNA, 25 bp, Homo sapien
ctttggtggcctccggattggcgac

SEQ ID NO: 688342 - DNA, 25 bp, Homo sapien
gttcatggattttgtcctcagggat

SEQ ID NO: 688343 - DNA, 25 bp, Homo sapien
cttcgggttcatggattttgtcctc

SEQ ID NO: 688344 - DNA, 25 bp, Homo sapien
tcatggattttgtcctcagggatag

SEQ ID NO: 688345 - DNA, 25 bp, Homo sapien
ctcttcgggttcatggattttgtcc

SEQ ID NO: 688346 - DNA, 25 bp, Homo sapien
gccagagcctagcatgggtcgcgtc

SEQ ID NO: 688347 - DNA, 25 bp, Homo sapien
ggtcagttccagtttggacagaccc

SEQ ID NO: 688348 - DNA, 25 bp, Homo sapien
cctagcatgggtcgcgtctctggat

SEQ ID NO: 688349 - DNA, 25 bp, Homo sapien
cccctttccgcccaaatggctgatt

SEQ ID NO: 688350 - DNA, 25 bp, Homo sapien
ccttcactgtgcagtttaagcccaa

SEQ ID NO: 688351 - DNA, 25 bp, Homo sapien
cttcactgtgcagtttaagcccaaa

SEQ ID NO: 688352 - DNA, 25 bp, Homo sapien
gaggtatccaaaggccaccaggtac

SEQ ID NO: 688353 - DNA, 25 bp, Homo sapien
gcaccgagcaggcaatcaggcagtc

SEQ ID NO: 688354 - DNA, 25 bp, Homo sapien
aacttcacgggcttcaagaggaggt

SEQ ID NO: 688355 - DNA, 25 bp, Homo sapien
tggcctccatgcagcatgaggtatc

SEQ ID NO: 688356 - DNA, 25 bp, Homo sapien
gcacacatccaaaatgataccaaaa

SEQ ID NO: 688357 - DNA, 25 bp, Homo sapien
cagagcacacatccaaaatgatacc

SEQ ID NO: 688358 - DNA, 25 bp, Homo sapien
aaaacaacaactttcaccatgtcca

SEQ ID NO: 688359 - DNA, 25 bp, Homo sapien
aactttcaccatgtccaagtaggat

SEQ ID NO: 688360 - DNA, 25 bp, Homo sapien
ctgaaaggttgaagagcgaggaaaa

SEQ ID NO: 688361 - DNA, 25 bp, Homo sapien
tgaaaggttgaagagcgaggaaaaa

SEQ ID NO: 688362 - DNA, 25 bp, Homo sapien
ttgaagagcgaggaaaaagtaaaga

SEQ ID NO: 688363 - DNA, 25 bp, Homo sapien
gaagagcgaggaaaaagtaaagatg

SEQ ID NO: 688364 - DNA, 25 bp, Homo sapien
tccccacgatgtacctgcctgcatc

SEQ ID NO: 688365 - DNA, 25 bp, Homo sapien
gatccccacgatgtacctgcctgca

SEQ ID NO: 688366 - DNA, 25 bp, Homo sapien
tctgctgatccccacgatgtacctg

SEQ ID NO: 688367 - DNA, 25 bp, Homo sapien
agctctctgctgatccccacgatgt

SEQ ID NO: 688368 - DNA, 25 bp, Homo sapien
cagggaggctaccaggagaagaaga

SEQ ID NO: 688369 - DNA, 25 bp, Homo sapien
tgcagggaggctaccaggagaagaa

SEQ ID NO: 688370 - DNA, 25 bp, Homo sapien
acactctgttcgcatctacaaacac

SEQ ID NO: 688371 - DNA, 25 bp, Homo sapien
tgttcgcatctacaaacacctgcca

SEQ ID NO: 688372 - DNA, 25 bp, Homo sapien
ctgtaaagatgcaaggagggctcat

SEQ ID NO: 688373 - DNA, 25 bp, Homo sapien
aactgtaaagatgcaaggagggctc

SEQ ID NO: 688374 - DNA, 25 bp, Homo sapien
ctcaactgtaaagatgcaaggaggg

SEQ ID NO: 688375 - DNA, 25 bp, Homo sapien
caactgtaaagatgcaaggagggct

SEQ ID NO: 688376 - DNA, 25 bp, Homo sapien
gagtaacaaattggcatccggcttc

SEQ ID NO: 688377 - DNA, 25 bp, Homo sapien
aaatctgggagatacaaccacttac

SEQ ID NO: 688378 - DNA, 25 bp, Homo sapien
ctgtactagtggttctctgcaaagg

SEQ ID NO: 688379 - DNA, 25 bp, Homo sapien
gacaccctcggtactcacagagtaa

SEQ ID NO: 688380 - DNA, 25 bp, Homo sapien
cacggatgcggagtagaaatccatg

SEQ ID NO: 688381 - DNA, 25 bp, Homo sapien
aatcaaccagatgacacggatgcgg

SEQ ID NO: 688382 - DNA, 25 bp, Homo sapien
caaccagatgacacggatgcggagt

SEQ ID NO: 688383 - DNA, 25 bp, Homo sapien
gatgacacggatgcggagtagaaat

SEQ ID NO: 688384 - DNA, 25 bp, Homo sapien
gcaaagtgttcatcagcccatcatc

SEQ ID NO: 688385 - DNA, 25 bp, Homo sapien
ctcaaggccaagcttataaaatcta

SEQ ID NO: 688386 - DNA, 25 bp, Homo sapien
actgcaaagtgttcatcagcccatc

SEQ ID NO: 688387 - DNA, 25 bp, Homo sapien
gcttataaaatctatagttgatgaa

SEQ ID NO: 688388 - DNA, 25 bp, Homo sapien
gatgtcaacgatcatgccagtgagg

SEQ ID NO: 688389 - DNA, 25 bp, Homo sapien
gccaagatggcaaactggttccacc

SEQ ID NO: 688390 - DNA, 25 bp, Homo sapien
tgctggagcgatgatgtcaacgatc

SEQ ID NO: 688391 - DNA, 25 bp, Homo sapien
caaagccagtgtaatatctgatgcc

SEQ ID NO: 688392 - DNA, 25 bp, Homo sapien
ggtacagcatcttgtgggtccccgt

SEQ ID NO: 688393 - DNA, 25 bp, Homo sapien
caggtcagaatctcatgcagggcag

SEQ ID NO: 688394 - DNA, 25 bp, Homo sapien
tgacacatgacagtaggtacagcat

SEQ ID NO: 688395 - DNA, 25 bp, Homo sapien
ggagtaggcagaggacatgacacat

SEQ ID NO: 688396 - DNA, 25 bp, Homo sapien
aacggcggcaccatgtcaaacggct

SEQ ID NO: 688397 - DNA, 25 bp, Homo sapien
caggcctgcatcacggaatgtggaa

SEQ ID NO: 688398 - DNA, 25 bp, Homo sapien
aagttgaaggatgcgtgctagcaga

SEQ ID NO: 688399 - DNA, 25 bp, Homo sapien
caatagaatcttagcgaacggcggc

SEQ ID NO: 688400 - DNA, 25 bp, Homo sapien
acagccaagttgaggggtgcaagct

SEQ ID NO: 688401 - DNA, 25 bp, Homo sapien
cattttcagagaaccatctagaaca

SEQ ID NO: 688402 - DNA, 25 bp, Homo sapien
cttttggcttggactcaacagccaa

SEQ ID NO: 688403 - DNA, 25 bp, Homo sapien
tttcagagaaccatctagaacacca

SEQ ID NO: 688404 - DNA, 25 bp, Homo sapien
cagacagccccagagtttggttgac

SEQ ID NO: 688405 - DNA, 25 bp, Homo sapien
taagtgtagacagccctaagggcca

SEQ ID NO: 688406 - DNA, 25 bp, Homo sapien
tccaaaagcgcttcaggacgctcct

SEQ ID NO: 688407 - DNA, 25 bp, Homo sapien
gagacaccatgaccgtccaaaagcg

SEQ ID NO: 688408 - DNA, 25 bp, Homo sapien
tcctgtgacttttgcttgagctggg

SEQ ID NO: 688409 - DNA, 25 bp, Homo sapien
aaccatgcctaatgcaggtcctgtg

SEQ ID NO: 688410 - DNA, 25 bp, Homo sapien
ccatcaggaaatgtcggccaaccat

SEQ ID NO: 688411 - DNA, 25 bp, Homo sapien
gggtcagatacttagctgagtgact

SEQ ID NO: 688412 - DNA, 25 bp, Homo sapien
gctactggagctgtcaaccacagca

SEQ ID NO: 688413 - DNA, 25 bp, Homo sapien
agctactggagctgtcaaccacagc

SEQ ID NO: 688414 - DNA, 25 bp, Homo sapien
cagctactggagctgtcaaccacag

SEQ ID NO: 688415 - DNA, 25 bp, Homo sapien
ccagctactggagctgtcaaccaca

SEQ ID NO: 688416 - DNA, 25 bp, Homo sapien
aacaatttgtacaaacgccaccagg

SEQ ID NO: 688417 - DNA, 25 bp, Homo sapien
caagagctctctgacgcatgttcct

SEQ ID NO: 688418 - DNA, 25 bp, Homo sapien
aggcccgtggaagcctcgctttcgt

SEQ ID NO: 688419 - DNA, 25 bp, Homo sapien
catgttccttgtggcatgaccagga

SEQ ID NO: 688420 - DNA, 25 bp, Homo sapien
cagggtctccgggatggcatgactc

SEQ ID NO: 688421 - DNA, 25 bp, Homo sapien
agggtctccgggatggcatgactca

SEQ ID NO: 688422 - DNA, 25 bp, Homo sapien
tctccgggatggcatgactcagggt

SEQ ID NO: 688423 - DNA, 25 bp, Homo sapien
cgggatggcatgactcagggtcaca

SEQ ID NO: 688424 - DNA, 25 bp, Homo sapien
tgtgaaggtggctcctacgctgaga

SEQ ID NO: 688425 - DNA, 25 bp, Homo sapien
ggtgtgaaggtggctcctacgctga

SEQ ID NO: 688426 - DNA, 25 bp, Homo sapien
ggacttgcttgggtgtgaaggtggc

SEQ ID NO: 688427 - DNA, 25 bp, Homo sapien
ttggacttgcttgggtgtgaaggtg

SEQ ID NO: 688428 - DNA, 25 bp, Homo sapien
agcagagttggctgtctgcagactt

SEQ ID NO: 688429 - DNA, 25 bp, Homo sapien
ctctgtattacaaaccatcccaggg

SEQ ID NO: 688430 - DNA, 25 bp, Homo sapien
gcagagttggctgtctgcagacttc

SEQ ID NO: 688431 - DNA, 25 bp, Homo sapien
tgtattacaaaccatcccagggtcc

SEQ ID NO: 688432 - DNA, 25 bp, Homo sapien
cagtgtgtaataggacagcagcaga

SEQ ID NO: 688433 - DNA, 25 bp, Homo sapien
caggaggaccagtgtgtaataggac

SEQ ID NO: 688434 - DNA, 25 bp, Homo sapien
gagtttccaggacactgcggttggt

SEQ ID NO: 688435 - DNA, 25 bp, Homo sapien
tgatgcatgcgatcatctccagcag

SEQ ID NO: 688436 - DNA, 25 bp, Homo sapien
cttcggaaaggtgtcaggtgccagc

SEQ ID NO: 688437 - DNA, 25 bp, Homo sapien
ctggaggagaaaaagtccaaaccag

SEQ ID NO: 688438 - DNA, 25 bp, Homo sapien
ccaagcatggaggtatacgctgcct

SEQ ID NO: 688439 - DNA, 25 bp, Homo sapien
aatgaatgacaacgggtggccaagc

SEQ ID NO: 688440 - DNA, 25 bp, Homo sapien
aagcatggaggtatacgctgccttc

SEQ ID NO: 688441 - DNA, 25 bp, Homo sapien
ctgtgtagtagatcgatgaatgaat

SEQ ID NO: 688442 - DNA, 25 bp, Homo sapien
tgtactggaaccctatccgcacact

SEQ ID NO: 688443 - DNA, 25 bp, Homo sapien
catgtactggaaccctatccgcaca

SEQ ID NO: 688444 - DNA, 25 bp, Homo sapien
ctggaaccctatccgcacactggcc

SEQ ID NO: 688445 - DNA, 25 bp, Homo sapien
tactggaaccctatccgcacactgg

SEQ ID NO: 688446 - DNA, 25 bp, Homo sapien
gtgccatctccacctctccgtccac

SEQ ID NO: 688447 - DNA, 25 bp, Homo sapien
ctgtgccatctccacctctccgtcc

SEQ ID NO: 688448 - DNA, 25 bp, Homo sapien
cacctctccgtccacctcttgctcc

SEQ ID NO: 688449 - DNA, 25 bp, Homo sapien
tccacctctccgtccacctcttgct

SEQ ID NO: 688450 - DNA, 25 bp, Homo sapien
agaggatgccaggacggcttgcagg

SEQ ID NO: 688451 - DNA, 25 bp, Homo sapien
agggcagtgaaagtggtcattgcgg

SEQ ID NO: 688452 - DNA, 25 bp, Homo sapien
tggtcattgcggacgagggctcgga

SEQ ID NO: 688453 - DNA, 25 bp, Homo sapien
ccaggacggcttgcaggaggtgctt

SEQ ID NO: 688454 - DNA, 25 bp, Homo sapien
attcctggaagctcaaaaccagcaa

SEQ ID NO: 688455 - DNA, 25 bp, Homo sapien
agaatggccaggtttacactccccg

SEQ ID NO: 688456 - DNA, 25 bp, Homo sapien
ggaattatccttaagccagcgtttc

SEQ ID NO: 688457 - DNA, 25 bp, Homo sapien
gtaagaatacagatgccggaacccc

SEQ ID NO: 688458 - DNA, 25 bp, Homo sapien
gttactccaccagcccctagaaatg

SEQ ID NO: 688459 - DNA, 25 bp, Homo sapien
atcccataattgtcctggcttccag

SEQ ID NO: 688460 - DNA, 25 bp, Homo sapien
aatctgtgttactccaccagcccct

SEQ ID NO: 688461 - DNA, 25 bp, Homo sapien
tgggaggtcaccagggtacagttct

SEQ ID NO: 688462 - DNA, 25 bp, Homo sapien
ctcggaagaggaacccagacgtcac

SEQ ID NO: 688463 - DNA, 25 bp, Homo sapien
cggcagggctcggaagaggaaccca

SEQ ID NO: 688464 - DNA, 25 bp, Homo sapien
ggctcggaagaggaacccagacgtc

SEQ ID NO: 688465 - DNA, 25 bp, Homo sapien
cagggctcggaagaggaacccagac

SEQ ID NO: 688466 - DNA, 25 bp, Homo sapien
tccccgaccaagcgcttttcagatt

SEQ ID NO: 688467 - DNA, 25 bp, Homo sapien
cctgccggtcctcctcgggcgatct

SEQ ID NO: 688468 - DNA, 25 bp, Homo sapien
ctcgggcgatctccccgaccaagcg

SEQ ID NO: 688469 - DNA, 25 bp, Homo sapien
ctcctgccggtcctcctcgggcgat

SEQ ID NO: 688470 - DNA, 25 bp, Homo sapien
tcacagcctccatgaaagtagaaag

SEQ ID NO: 688471 - DNA, 25 bp, Homo sapien
agaaactcaggttccccaggagctt

SEQ ID NO: 688472 - DNA, 25 bp, Homo sapien
agccagaaactcaggttccccagga

SEQ ID NO: 688473 - DNA, 25 bp, Homo sapien
tgaaagtagaaagactaacaagctt

SEQ ID NO: 688474 - DNA, 25 bp, Homo sapien
cttgccccattcacacaaggccttt

SEQ ID NO: 688475 - DNA, 25 bp, Homo sapien
ttgccccattcacacaaggcctttt

SEQ ID NO: 688476 - DNA, 25 bp, Homo sapien
tgcgcttgcgtgtgagtgaaggcct

SEQ ID NO: 688477 - DNA, 25 bp, Homo sapien
gcccctggggcgtgcgcttgcgtgt

SEQ ID NO: 688478 - DNA, 25 bp, Homo sapien
cagaggggccactggtttcctggcc

SEQ ID NO: 688479 - DNA, 25 bp, Homo sapien
gggcctggctggtgtaactcatggg

SEQ ID NO: 688480 - DNA, 25 bp, Homo sapien
ctggtgtaactcatggggccccagt

SEQ ID NO: 688481 - DNA, 25 bp, Homo sapien
tctgctgacagcgcccagcgcgggg

SEQ ID NO: 688482 - DNA, 25 bp, Homo sapien
cccagtctagcaggggtggaaaaca

SEQ ID NO: 688483 - DNA, 25 bp, Homo sapien
gcaaggcagctacggccttgccctg

SEQ ID NO: 688484 - DNA, 25 bp, Homo sapien
gagacaagctggacaacgtaacaat

SEQ ID NO: 688485 - DNA, 25 bp, Homo sapien
cacctgctgggtatcacgtgtggag

SEQ ID NO: 688486 - DNA, 25 bp, Homo sapien
tcccgaggaggcgtcagtgagggtg

SEQ ID NO: 688487 - DNA, 25 bp, Homo sapien
gcgaggatggcaccgcatcctgcag

SEQ ID NO: 688488 - DNA, 25 bp, Homo sapien
accggcgaggatggcaccgcatcct

SEQ ID NO: 688489 - DNA, 25 bp, Homo sapien
gcgggcaccggcgaggatggcaccg

SEQ ID NO: 688490 - DNA, 25 bp, Homo sapien
aggggcccctcttgtatcgactgtc

SEQ ID NO: 688491 - DNA, 25 bp, Homo sapien
gcgcggcacggcgagttcaccattc

SEQ ID NO: 688492 - DNA, 25 bp, Homo sapien
acacagctgcgggtgcagcgctctt

SEQ ID NO: 688493 - DNA, 25 bp, Homo sapien
gcagctgacatgacaggggcccctc

SEQ ID NO: 688494 - DNA, 25 bp, Homo sapien
cacaacaggattgagggggggccct

SEQ ID NO: 688495 - DNA, 25 bp, Homo sapien
gaattaggcacaacaggattgaggg

SEQ ID NO: 688496 - DNA, 25 bp, Homo sapien
tctgaattaggcacaacaggattga

SEQ ID NO: 688497 - DNA, 25 bp, Homo sapien
gcacaacaggattgagggggggccc

SEQ ID NO: 688498 - DNA, 25 bp, Homo sapien
ttcccaaacatgcacatccagcttg

SEQ ID NO: 688499 - DNA, 25 bp, Homo sapien
ggcccctacagcactttctacggag

SEQ ID NO: 688500 - DNA, 25 bp, Homo sapien
acagcactttctacggagccctctt

SEQ ID NO: 688501 - DNA, 25 bp, Homo sapien
cttcccaaacatgcacatccagctt

SEQ ID NO: 688502 - DNA, 25 bp, Homo sapien
aatcctttcattttaggtgcctgtg

SEQ ID NO: 688503 - DNA, 25 bp, Homo sapien
tgtggtcgccaccaagaatgagtca

SEQ ID NO: 688504 - DNA, 25 bp, Homo sapien
cacgtattgcctgaggtggtttggt

SEQ ID NO: 688505 - DNA, 25 bp, Homo sapien
aaagaatccacagtaggctctgtct

SEQ ID NO: 688506 - DNA, 25 bp, Homo sapien
gttcccagcggacgtcagagatcag

SEQ ID NO: 688507 - DNA, 25 bp, Homo sapien
ttttcaaaccaggaacgtggcacta

SEQ ID NO: 688508 - DNA, 25 bp, Homo sapien
ttcagagggcaaaggttaactccca

SEQ ID NO: 688509 - DNA, 25 bp, Homo sapien
tgatacagaaacctgcagagcagcc

SEQ ID NO: 688510 - DNA, 25 bp, Homo sapien
gaactcctgtgtggtcgaaacatac

SEQ ID NO: 688511 - DNA, 25 bp, Homo sapien
catgtatctgggtgagagcaggcct

SEQ ID NO: 688512 - DNA, 25 bp, Homo sapien
tgccttggcagataaataagtcgcc

SEQ ID NO: 688513 - DNA, 25 bp, Homo sapien
aatctgcggacacctaaacgttggc

SEQ ID NO: 688514 - DNA, 25 bp, Homo sapien
aagccaaggtcatgggcctcagaaa

SEQ ID NO: 688515 - DNA, 25 bp, Homo sapien
caacttttcttgacaggctagagaa

SEQ ID NO: 688516 - DNA, 25 bp, Homo sapien
acagctcagtcaccttcatgaagga

SEQ ID NO: 688517 - DNA, 25 bp, Homo sapien
cagaacctgggatacacttggcctc

SEQ ID NO: 688518 - DNA, 25 bp, Homo sapien
tagatagatgaaaaggctgcaatgt

SEQ ID NO: 688519 - DNA, 25 bp, Homo sapien
aatgtgaagcccaatgaaacacatg

SEQ ID NO: 688520 - DNA, 25 bp, Homo sapien
gaaacacatgaaactatgtttgtgt

SEQ ID NO: 688521 - DNA, 25 bp, Homo sapien
tgcaatgtgaagcccaatgaaacac

SEQ ID NO: 688522 - DNA, 25 bp, Homo sapien
ggactgattacagtgcccagattca

SEQ ID NO: 688523 - DNA, 25 bp, Homo sapien
ggagcctcagtgactagacatgtaa

SEQ ID NO: 688524 - DNA, 25 bp, Homo sapien
gaaatagtcccaatctactggagcc

SEQ ID NO: 688525 - DNA, 25 bp, Homo sapien
gctacagtgaatgacgccgatttct

SEQ ID NO: 688526 - DNA, 25 bp, Homo sapien
gagtggtcctttgcaatcagcagtg

SEQ ID NO: 688527 - DNA, 25 bp, Homo sapien
cgagagctttcctgacggttgagtg

SEQ ID NO: 688528 - DNA, 25 bp, Homo sapien
tctatgagcgtgtgcctaaaccgtg

SEQ ID NO: 688529 - DNA, 25 bp, Homo sapien
tggacaaaagacaaagctatgagcc

SEQ ID NO: 688530 - DNA, 25 bp, Homo sapien
cagacagccggaactcaagatgaag

SEQ ID NO: 688531 - DNA, 25 bp, Homo sapien
tagatgcttcccgttggatccagag

SEQ ID NO: 688532 - DNA, 25 bp, Homo sapien
tgaaccggagaatacagaatgccaa

SEQ ID NO: 688533 - DNA, 25 bp, Homo sapien
gaaatgagacaccacgtccaagagg

SEQ ID NO: 688534 - DNA, 25 bp, Homo sapien
ccttactggctgattgccacagtga

SEQ ID NO: 688535 - DNA, 25 bp, Homo sapien
tcatttctgtccaaaggaaagttgg

SEQ ID NO: 688536 - DNA, 25 bp, Homo sapien
tgcttctgcattgtacctggtcctc

SEQ ID NO: 688537 - DNA, 25 bp, Homo sapien
ggtagcgagtgctgcaaactccctg

SEQ ID NO: 688538 - DNA, 25 bp, Homo sapien
tactgtatgatactgtagtgagctg

SEQ ID NO: 688539 - DNA, 25 bp, Homo sapien
gacaaagcgccaactttctgacagc

SEQ ID NO: 688540 - DNA, 25 bp, Homo sapien
tgctacaactaccaccgataggttc

SEQ ID NO: 688541 - DNA, 25 bp, Homo sapien
tccacatgaaaatcctttaaggagc

SEQ ID NO: 688542 - DNA, 25 bp, Homo sapien
gcactttttaaagtcacgcacgtaa

SEQ ID NO: 688543 - DNA, 25 bp, Homo sapien
aattcactctgcagcgagcactttt

SEQ ID NO: 688544 - DNA, 25 bp, Homo sapien
aaagagcatctgctgtacggctcca

SEQ ID NO: 688545 - DNA, 25 bp, Homo sapien
cacgcacgtaatgcattttaaagag

SEQ ID NO: 688546 - DNA, 25 bp, Homo sapien
taatgcaggcaatctcggtgtatct

SEQ ID NO: 688547 - DNA, 25 bp, Homo sapien
tatattagtgaatcagctctgggct

SEQ ID NO: 688548 - DNA, 25 bp, Homo sapien
taatctacctcgttgctgacagctg

SEQ ID NO: 688549 - DNA, 25 bp, Homo sapien
tataggcataaaagcactccatctg

SEQ ID NO: 688550 - DNA, 25 bp, Homo sapien
cacgatctagtggtgtctgaccgcc

SEQ ID NO: 688551 - DNA, 25 bp, Homo sapien
tgcagagtacaacaacacgatctag

SEQ ID NO: 688552 - DNA, 25 bp, Homo sapien
ctagggccaagaaagagcggcacta

SEQ ID NO: 688553 - DNA, 25 bp, Homo sapien
ctcatgtggaattcaagctagatta

SEQ ID NO: 688554 - DNA, 25 bp, Homo sapien
aactgagagcgcaggaaagacttcc

SEQ ID NO: 688555 - DNA, 25 bp, Homo sapien
ggattccgtgtcaccctgaactgcc

SEQ ID NO: 688556 - DNA, 25 bp, Homo sapien
gagagaagtggttgtgtgaactgag

SEQ ID NO: 688557 - DNA, 25 bp, Homo sapien
gcctccagtgaggattccgtgtcac

SEQ ID NO: 688558 - DNA, 25 bp, Homo sapien
caaggcgcggagctttagaaagttc

SEQ ID NO: 688559 - DNA, 25 bp, Homo sapien
gagttcgactacgagaccgagagcg

SEQ ID NO: 688560 - DNA, 25 bp, Homo sapien
aatctaagactcagcgagaggagcc

SEQ ID NO: 688561 - DNA, 25 bp, Homo sapien
gaatcggaatctgaccacgagcacg

SEQ ID NO: 688562 - DNA, 25 bp, Homo sapien
gcgcgccggagctgacctctcccgg

SEQ ID NO: 688563 - DNA, 25 bp, Homo sapien
gacagagaccgcctcaaagagcgtg

SEQ ID NO: 688564 - DNA, 25 bp, Homo sapien
tcgcgggacagagaccgcctcaaag

SEQ ID NO: 688565 - DNA, 25 bp, Homo sapien
agaccgcctcaaagagcgtgcgcac

SEQ ID NO: 688566 - DNA, 25 bp, Homo sapien
taccagggttgaacgcacaggcatg

SEQ ID NO: 688567 - DNA, 25 bp, Homo sapien
accagggttgaacgcacaggcatgg

SEQ ID NO: 688568 - DNA, 25 bp, Homo sapien
ctaccagggttgaacgcacaggcat

SEQ ID NO: 688569 - DNA, 25 bp, Homo sapien
ccagggttgaacgcacaggcatggt

SEQ ID NO: 688570 - DNA, 25 bp, Homo sapien
catgcggcttagcaggagacgtcct

SEQ ID NO: 688571 - DNA, 25 bp, Homo sapien
gggtattgccaagcttttggcgcag

SEQ ID NO: 688572 - DNA, 25 bp, Homo sapien
tgccaagcttttggcgcagctggtc

SEQ ID NO: 688573 - DNA, 25 bp, Homo sapien
gccaggctgcatgcggcttagcagg

SEQ ID NO: 688574 - DNA, 25 bp, Homo sapien
cgagatcgtcgcaagtggaaaggta

SEQ ID NO: 688575 - DNA, 25 bp, Homo sapien
tctggaggccctcgagatcgtcgca

SEQ ID NO: 688576 - DNA, 25 bp, Homo sapien
ctgtttgcgcaggacctctggaggc

SEQ ID NO: 688577 - DNA, 25 bp, Homo sapien
tttgcgcaggacctctggaggccct

SEQ ID NO: 688578 - DNA, 25 bp, Homo sapien
attcgtttccaaagagcgcggtacg

SEQ ID NO: 688579 - DNA, 25 bp, Homo sapien
aaaggtgttggatccggcgccagtc

SEQ ID NO: 688580 - DNA, 25 bp, Homo sapien
cgatcagtcgtcgaaaaggaggcag

SEQ ID NO: 688581 - DNA, 25 bp, Homo sapien
gcgccagtccttggacgatcagtcg

SEQ ID NO: 688582 - DNA, 25 bp, Homo sapien
tctggtaacgcaccttcggaaggga

SEQ ID NO: 688583 - DNA, 25 bp, Homo sapien
tgatgacccagcacaaaaacggcag

SEQ ID NO: 688584 - DNA, 25 bp, Homo sapien
gaagggaaggcgtgctctcctcgcc

SEQ ID NO: 688585 - DNA, 25 bp, Homo sapien
cacgggtagagttaagtttaatctg

SEQ ID NO: 688586 - DNA, 25 bp, Homo sapien
gcttgagatgaatgacggtcaggtt

SEQ ID NO: 688587 - DNA, 25 bp, Homo sapien
ttggaggaatagtaaagcgttttga

SEQ ID NO: 688588 - DNA, 25 bp, Homo sapien
tacggatgacaacgatttggaggaa

SEQ ID NO: 688589 - DNA, 25 bp, Homo sapien
cgtgtctcattttgcgccggcttaa

SEQ ID NO: 688590 - DNA, 25 bp, Homo sapien
caagacttagttctgccgggctgca

SEQ ID NO: 688591 - DNA, 25 bp, Homo sapien
cagcgcagactgtggttggatgctt

SEQ ID NO: 688592 - DNA, 25 bp, Homo sapien
tccttccaggacctattccgtagga

SEQ ID NO: 688593 - DNA, 25 bp, Homo sapien
tattccgtaggaaaggcgtcgcggc

SEQ ID NO: 688594 - DNA, 25 bp, Homo sapien
tttcccatggtgctgttcatctttt

SEQ ID NO: 688595 - DNA, 25 bp, Homo sapien
ttcccatggtgctgttcatcttttc

SEQ ID NO: 688596 - DNA, 25 bp, Homo sapien
taggtttttcagagtctggtagcca

SEQ ID NO: 688597 - DNA, 25 bp, Homo sapien
aaggacttaggtttttcagagtctg

SEQ ID NO: 688598 - DNA, 25 bp, Homo sapien
tttttcagagtctggtagccagtca

SEQ ID NO: 688599 - DNA, 25 bp, Homo sapien
ggtttttcagagtctggtagccagt

SEQ ID NO: 688600 - DNA, 25 bp, Homo sapien
cagtggcaccccgttggctgggtta

SEQ ID NO: 688601 - DNA, 25 bp, Homo sapien
ggtcctcgtggtcttccaggcctag

SEQ ID NO: 688602 - DNA, 25 bp, Homo sapien
cgaggctcggcaacctgtggcatga

SEQ ID NO: 688603 - DNA, 25 bp, Homo sapien
agcagcacctcttcgggcgttccaa

SEQ ID NO: 688604 - DNA, 25 bp, Homo sapien
tcaacccggcattcagggaagctgg

SEQ ID NO: 688605 - DNA, 25 bp, Homo sapien
tagcccagccgaagagatggagacc

SEQ ID NO: 688606 - DNA, 25 bp, Homo sapien
ggaagcaatgcccttcgaggctgaa

SEQ ID NO: 688607 - DNA, 25 bp, Homo sapien
tccccgtcgagaatgatggcgaggc

SEQ ID NO: 688608 - DNA, 25 bp, Homo sapien
caagaggctgtcagacctccttcta

SEQ ID NO: 688609 - DNA, 25 bp, Homo sapien
gcagcagccagttcgcggcagtcgc

SEQ ID NO: 688610 - DNA, 25 bp, Homo sapien
tccttctaacttcacgggcagcagc

SEQ ID NO: 688611 - DNA, 25 bp, Homo sapien
acgacactcccgtcaacatggacag

SEQ ID NO: 688612 - DNA, 25 bp, Homo sapien
ccggagccccagataagagagagcg

SEQ ID NO: 688613 - DNA, 25 bp, Homo sapien
gagccccagataagagagagcgagc

SEQ ID NO: 688614 - DNA, 25 bp, Homo sapien
agagagacccccagttgaggaggaa

SEQ ID NO: 688615 - DNA, 25 bp, Homo sapien
ctccggagccccagataagagagag

SEQ ID NO: 688616 - DNA, 25 bp, Homo sapien
ggggccagacgcaagatccatctca

SEQ ID NO: 688617 - DNA, 25 bp, Homo sapien
gccgatccgcctactccgcggccta

SEQ ID NO: 688618 - DNA, 25 bp, Homo sapien
tgcctccggggccagacgcaagatc

SEQ ID NO: 688619 - DNA, 25 bp, Homo sapien
gtcgccccagctgcgccagacgcag

SEQ ID NO: 688620 - DNA, 25 bp, Homo sapien
tctctcaaggtcaagaaggtacccc

SEQ ID NO: 688621 - DNA, 25 bp, Homo sapien
gcttcggtcgatctgagagtcccca

SEQ ID NO: 688622 - DNA, 25 bp, Homo sapien
agacagatgcgcaaagaagccctgg

SEQ ID NO: 688623 - DNA, 25 bp, Homo sapien
caactttctcgtgcaagccttcggg

SEQ ID NO: 688624 - DNA, 25 bp, Homo sapien
ttaagacttgggctgcaagagcctc

SEQ ID NO: 688625 - DNA, 25 bp, Homo sapien
caggccagctcatgggaattgaaga

SEQ ID NO: 688626 - DNA, 25 bp, Homo sapien
ttttctacatgcaacaactgggagc

SEQ ID NO: 688627 - DNA, 25 bp, Homo sapien
ttcaagttagaatcagtggagcgct

SEQ ID NO: 688628 - DNA, 25 bp, Homo sapien
tcagatcgtagccttcagggtgcct

SEQ ID NO: 688629 - DNA, 25 bp, Homo sapien
tgacaagccccatgtttttctccag

SEQ ID NO: 688630 - DNA, 25 bp, Homo sapien
tccggtcgataatgacaagccccat

SEQ ID NO: 688631 - DNA, 25 bp, Homo sapien
gtgcctgactcattccggctccggt

SEQ ID NO: 688632 - DNA, 25 bp, Homo sapien
gaccttgcgtggatctaaagcccag

SEQ ID NO: 688633 - DNA, 25 bp, Homo sapien
catgagaggcgtttggattttaccc

SEQ ID NO: 688634 - DNA, 25 bp, Homo sapien
cgttcctcctgatgaaaatggcctc

SEQ ID NO: 688635 - DNA, 25 bp, Homo sapien
taaattgtgtaccatgacagtgact

SEQ ID NO: 688636 - DNA, 25 bp, Homo sapien
tagcaaatgagagaagcgaagagga

SEQ ID NO: 688637 - DNA, 25 bp, Homo sapien
aatttccatcaccaaagggcctgat

SEQ ID NO: 688638 - DNA, 25 bp, Homo sapien
cctcgcagggttaggattctgctta

SEQ ID NO: 688639 - DNA, 25 bp, Homo sapien
gcttagaactctgctttaagctaaa

SEQ ID NO: 688640 - DNA, 25 bp, Homo sapien
ctgagcctgtgcaccagtggcctat

SEQ ID NO: 688641 - DNA, 25 bp, Homo sapien
tgagctgccaaggtacagagtgcaa

SEQ ID NO: 688642 - DNA, 25 bp, Homo sapien
gttctcctagttgtgctctgctcca

SEQ ID NO: 688643 - DNA, 25 bp, Homo sapien
gtgcaaagcggctgtcactgccaaa

SEQ ID NO: 688644 - DNA, 25 bp, Homo sapien
cactaaattgtcatgctgctagaga

SEQ ID NO: 688645 - DNA, 25 bp, Homo sapien
gagccccatggccttgaactaaaca

SEQ ID NO: 688646 - DNA, 25 bp, Homo sapien
atctatgttagaagtgatgtcaccc

SEQ ID NO: 688647 - DNA, 25 bp, Homo sapien
cccaggaggcctgctatgcagcaac

SEQ ID NO: 688648 - DNA, 25 bp, Homo sapien
gatgtatagttatgccaagttgtgg

SEQ ID NO: 688649 - DNA, 25 bp, Homo sapien
cacatttaagaacgtgccaggtatg

SEQ ID NO: 688650 - DNA, 25 bp, Homo sapien
cacccaataaactgagtggatgtat

SEQ ID NO: 688651 - DNA, 25 bp, Homo sapien
gggattatgccagtcaacattttgg

SEQ ID NO: 688652 - DNA, 25 bp, Homo sapien
ccaatggttatgagtaaaaggagtg

SEQ ID NO: 688653 - DNA, 25 bp, Homo sapien
aaaggagtggtgctttaacttagag

SEQ ID NO: 688654 - DNA, 25 bp, Homo sapien
tagactttgggatgcctccaatggt

SEQ ID NO: 688655 - DNA, 25 bp, Homo sapien
tgtatggttgagctatttggcacca

SEQ ID NO: 688656 - DNA, 25 bp, Homo sapien
agtacaggtactgcttcctacgatc

SEQ ID NO: 688657 - DNA, 25 bp, Homo sapien
tactgcttcctacgatcagcagctt

SEQ ID NO: 688658 - DNA, 25 bp, Homo sapien
gcttcctacgatcagcagcttccat

SEQ ID NO: 688659 - DNA, 25 bp, Homo sapien
caggtactgcttcctacgatcagca

SEQ ID NO: 688660 - DNA, 25 bp, Homo sapien
gggctcaatatcacatctccaggtg

SEQ ID NO: 688661 - DNA, 25 bp, Homo sapien
ggaaagtaaactggtccatgtctat

SEQ ID NO: 688662 - DNA, 25 bp, Homo sapien
gccgtagagcggcaaaactcttaaa

SEQ ID NO: 688663 - DNA, 25 bp, Homo sapien
tagtaagatgttggatcaaagtgtc

SEQ ID NO: 688664 - DNA, 25 bp, Homo sapien
gaagggtaacatgtgcatcatatca

SEQ ID NO: 688665 - DNA, 25 bp, Homo sapien
tgatgtacctcaaagaaaatggagc

SEQ ID NO: 688666 - DNA, 25 bp, Homo sapien
taagagctccattaagtgggtccat

SEQ ID NO: 688667 - DNA, 25 bp, Homo sapien
gatatccaagttgtgtgtccaccta

SEQ ID NO: 688668 - DNA, 25 bp, Homo sapien
tgaggtagatggtggttttgttaaa

SEQ ID NO: 688669 - DNA, 25 bp, Homo sapien
acaaagtaatacatgtcatctcttt

SEQ ID NO: 688670 - DNA, 25 bp, Homo sapien
aacaaagtaatacatgtcatctctt

SEQ ID NO: 688671 - DNA, 25 bp, Homo sapien
caaagtaatacatgtcatctctttt

SEQ ID NO: 688672 - DNA, 25 bp, Homo sapien
cttttcttactcgaagtggagcaaa

SEQ ID NO: 688673 - DNA, 25 bp, Homo sapien
gctttccgggacgtaggcctgtgtc

SEQ ID NO: 688674 - DNA, 25 bp, Homo sapien
tagtaaccctgctcctaatcccgtg

SEQ ID NO: 688675 - DNA, 25 bp, Homo sapien
gtatcccagcagacaccatggtggc

SEQ ID NO: 688676 - DNA, 25 bp, Homo sapien
ggaactggcaggcaccaaacattta

SEQ ID NO: 688677 - DNA, 25 bp, Homo sapien
tctcgtccgaagatacgaaactccg

SEQ ID NO: 688678 - DNA, 25 bp, Homo sapien
ccatcgcacttttctcgtccgaaga

SEQ ID NO: 688679 - DNA, 25 bp, Homo sapien
aataattcgaattcggctctctgac

SEQ ID NO: 688680 - DNA, 25 bp, Homo sapien
tccgggcgtcgcaaataattcgaat

SEQ ID NO: 688681 - DNA, 25 bp, Homo sapien
tgggacacggactcgagcgacgagg

SEQ ID NO: 688682 - DNA, 25 bp, Homo sapien
ctcgagcgacgaggacgacgcctac

SEQ ID NO: 688683 - DNA, 25 bp, Homo sapien
acacggactcgagcgacgaggacga

SEQ ID NO: 688684 - DNA, 25 bp, Homo sapien
gactcgagcgacgaggacgacgcct

SEQ ID NO: 688685 - DNA, 25 bp, Homo sapien
caaggctggcgcgctgagcgcccac

SEQ ID NO: 688686 - DNA, 25 bp, Homo sapien
ggggcatcgtgtggcggcccgggcc

SEQ ID NO: 688687 - DNA, 25 bp, Homo sapien
cccgggccgctcaaggctggcgcgc

SEQ ID NO: 688688 - DNA, 25 bp, Homo sapien
gcggcgccgcgcgttgggggcatcg

SEQ ID NO: 688689 - DNA, 25 bp, Homo sapien
tcgtgggtgctcaacttcctgctgc

SEQ ID NO: 688690 - DNA, 25 bp, Homo sapien
gcccctcgtggtgttcctggtcttc

SEQ ID NO: 688691 - DNA, 25 bp, Homo sapien
ttctcggtgcgcagcccctcgtggg

SEQ ID NO: 688692 - DNA, 25 bp, Homo sapien
ttccgagtgttcctgggctgcgcct

SEQ ID NO: 688693 - DNA, 25 bp, Homo sapien
tacttgggcggccgcgccaagcgca

SEQ ID NO: 688694 - DNA, 25 bp, Homo sapien
ttgggcggccgcgccaagcgcagag

SEQ ID NO: 688695 - DNA, 25 bp, Homo sapien
gggcggccgcgccaagcgcagaggc

SEQ ID NO: 688696 - DNA, 25 bp, Homo sapien
ctacttgggcggccgcgccaagcgc

SEQ ID NO: 688697 - DNA, 25 bp, Homo sapien
cccgccaccgccaccagacaccacc

SEQ ID NO: 688698 - DNA, 25 bp, Homo sapien
ccgccaccgccaccagacaccacca

SEQ ID NO: 688699 - DNA, 25 bp, Homo sapien
cgccaccgccaccagacaccaccat

SEQ ID NO: 688700 - DNA, 25 bp, Homo sapien
gaggccaacaaaaagatcgagaagc

SEQ ID NO: 688701 - DNA, 25 bp, Homo sapien
aggccaacaaaaagatcgagaagca

SEQ ID NO: 688702 - DNA, 25 bp, Homo sapien
ggccaacaaaaagatcgagaagcag

SEQ ID NO: 688703 - DNA, 25 bp, Homo sapien
taggttaagacctagttcgtggtca

SEQ ID NO: 688704 - DNA, 25 bp, Homo sapien
tgctctttttgcataggtcatgact

SEQ ID NO: 688705 - DNA, 25 bp, Homo sapien
ccacttccttgataatttggctatc

SEQ ID NO: 688706 - DNA, 25 bp, Homo sapien
tcctttggtggcttttggtttgctc

SEQ ID NO: 688707 - DNA, 25 bp, Homo sapien
tagagatcctgctaaatattacgta

SEQ ID NO: 688708 - DNA, 25 bp, Homo sapien
cagatattgattacgggcttgtgaa

SEQ ID NO: 688709 - DNA, 25 bp, Homo sapien
ccagagttaggctcattaagatagt

SEQ ID NO: 688710 - DNA, 25 bp, Homo sapien
tattacgtattgtttccttggcctc

SEQ ID NO: 688711 - DNA, 25 bp, Homo sapien
gatgaggatcctgcatgttaatggg

SEQ ID NO: 688712 - DNA, 25 bp, Homo sapien
aaaagcaccattgtgaagcagatga

SEQ ID NO: 688713 - DNA, 25 bp, Homo sapien
cctgcatgttaatgggtttaatgga

SEQ ID NO: 688714 - DNA, 25 bp, Homo sapien
ggatcctgcatgttaatgggtttaa

SEQ ID NO: 688715 - DNA, 25 bp, Homo sapien
caatttagccagaaaggcgacctaa

SEQ ID NO: 688716 - DNA, 25 bp, Homo sapien
tactgcagcaaaggtgtgggattct

SEQ ID NO: 688717 - DNA, 25 bp, Homo sapien
gaattaggagccttatgcgctgcca

SEQ ID NO: 688718 - DNA, 25 bp, Homo sapien
gcgacctaagaattgccgggaggat

SEQ ID NO: 688719 - DNA, 25 bp, Homo sapien
cgatgggtaggcacattcaaaacca

SEQ ID NO: 688720 - DNA, 25 bp, Homo sapien
ctgcaaggagcaacagcgatgggta

SEQ ID NO: 688721 - DNA, 25 bp, Homo sapien
taaaggaccatcagccatattggca

SEQ ID NO: 688722 - DNA, 25 bp, Homo sapien
cattttggagcaagtaaagtgcgta

SEQ ID NO: 688723 - DNA, 25 bp, Homo sapien
cacatacaaagcagacagtcgcaca

SEQ ID NO: 688724 - DNA, 25 bp, Homo sapien
tgtacacaaggcctgaagctcgctc

SEQ ID NO: 688725 - DNA, 25 bp, Homo sapien
cacttttacttaaatggccctgagg

SEQ ID NO: 688726 - DNA, 25 bp, Homo sapien
gattctccggacctgcagcactttt

SEQ ID NO: 688727 - DNA, 25 bp, Homo sapien
gctcttgctaattaacctcccttcg

SEQ ID NO: 688728 - DNA, 25 bp, Homo sapien
tgctcgtctgctcttgctaattaac

SEQ ID NO: 688729 - DNA, 25 bp, Homo sapien
tctgctcttgctaattaacctccct

SEQ ID NO: 688730 - DNA, 25 bp, Homo sapien
cgtctgctcttgctaattaacctcc

SEQ ID NO: 688731 - DNA, 25 bp, Homo sapien
tgctagcaactgagttaattccaag

SEQ ID NO: 688732 - DNA, 25 bp, Homo sapien
tacccagatgttgataggaccagga

SEQ ID NO: 688733 - DNA, 25 bp, Homo sapien
caaaccatgggactgttttgttcca

SEQ ID NO: 688734 - DNA, 25 bp, Homo sapien
cacccgggctcctgtaatgaactat

SEQ ID NO: 688735 - DNA, 25 bp, Homo sapien
gaaggcaaccaaagtgcaggacatc

SEQ ID NO: 688736 - DNA, 25 bp, Homo sapien
caaccaaagtgcaggacatcaaaaa

SEQ ID NO: 688737 - DNA, 25 bp, Homo sapien
ggcaaccaaagtgcaggacatcaaa

SEQ ID NO: 688738 - DNA, 25 bp, Homo sapien
tgagaaggcaaccaaagtgcaggac

SEQ ID NO: 688739 - DNA, 25 bp, Homo sapien
cagagtggactacatcctgagtgtg

SEQ ID NO: 688740 - DNA, 25 bp, Homo sapien
cctgagtgtgatgaacgtgcctgac

SEQ ID NO: 688741 - DNA, 25 bp, Homo sapien
tgtgatgaacgtgcctgactttgac

SEQ ID NO: 688742 - DNA, 25 bp, Homo sapien
tggagctggccaaccccgagaacca

SEQ ID NO: 688743 - DNA, 25 bp, Homo sapien
tgaaggagtgcgtgcctgctacgaa

SEQ ID NO: 688744 - DNA, 25 bp, Homo sapien
tgctacgaacgctccaacgagtacc

SEQ ID NO: 688745 - DNA, 25 bp, Homo sapien
taccagctgattgactgtgcccagt

SEQ ID NO: 688746 - DNA, 25 bp, Homo sapien
caacgagtaccagctgattgactgt

SEQ ID NO: 688747 - DNA, 25 bp, Homo sapien
actttgtctgaaaacgcaccatttg

SEQ ID NO: 688748 - DNA, 25 bp, Homo sapien
cgtggccggcacgtttctggttgaa

SEQ ID NO: 688749 - DNA, 25 bp, Homo sapien
gatgtctctctcacaagatttggtg

SEQ ID NO: 688750 - DNA, 25 bp, Homo sapien
ggtagtgtgcccatttcttaagctg

SEQ ID NO: 688751 - DNA, 25 bp, Homo sapien
aaacaatctcgtgtgcccttgaggg

SEQ ID NO: 688752 - DNA, 25 bp, Homo sapien
gcacagaatgtgataggccagcctg

SEQ ID NO: 688753 - DNA, 25 bp, Homo sapien
tgtcaggcattaccaaatggcacag

SEQ ID NO: 688754 - DNA, 25 bp, Homo sapien
gggtcctttctctactggttgatat

SEQ ID NO: 688755 - DNA, 25 bp, Homo sapien
ggctgactatgtgccgagcgatcag

SEQ ID NO: 688756 - DNA, 25 bp, Homo sapien
aagatcgacgtgatcaagcaggctg

SEQ ID NO: 688757 - DNA, 25 bp, Homo sapien
ggacaagatcgacgtgatcaagcag

SEQ ID NO: 688758 - DNA, 25 bp, Homo sapien
cttcctggacaagatcgacgtgatc

SEQ ID NO: 688759 - DNA, 25 bp, Homo sapien
gacctgcttcgctgccgtgtcctga

SEQ ID NO: 688760 - DNA, 25 bp, Homo sapien
aatctttgagaccaagttccaggtg

SEQ ID NO: 688761 - DNA, 25 bp, Homo sapien
tccaggtggacaaagtcaacttcca

SEQ ID NO: 688762 - DNA, 25 bp, Homo sapien
aagttccaggtggacaaagtcaact

SEQ ID NO: 688763 - DNA, 25 bp, Homo sapien
gaacgccgcaagtggatccagtgct

SEQ ID NO: 688764 - DNA, 25 bp, Homo sapien
tggccagcgcgatgaacgccgcaag

SEQ ID NO: 688765 - DNA, 25 bp, Homo sapien
cgatgaacgccgcaagtggatccag

SEQ ID NO: 688766 - DNA, 25 bp, Homo sapien
catgtttgacgtgggtggccagcgc

SEQ ID NO: 688767 - DNA, 25 bp, Homo sapien
agaccaaccgcctgcaggaggctct

SEQ ID NO: 688768 - DNA, 25 bp, Homo sapien
tacaacatggtcatccgggaggaca

SEQ ID NO: 688769 - DNA, 25 bp, Homo sapien
ggaggacaaccagaccaaccgcctg

SEQ ID NO: 688770 - DNA, 25 bp, Homo sapien
atgtgactgccatcatcttcgtggt

SEQ ID NO: 688771 - DNA, 25 bp, Homo sapien
gaagattgaggactactttccagaa

SEQ ID NO: 688772 - DNA, 25 bp, Homo sapien
gaaagtccttgctgggaaatcgaag

SEQ ID NO: 688773 - DNA, 25 bp, Homo sapien
tcaacaagcaagatctgctcgctga

SEQ ID NO: 688774 - DNA, 25 bp, Homo sapien
tggctgcgcaccatctctgtgatcc

SEQ ID NO: 688775 - DNA, 25 bp, Homo sapien
tacttcattcgagatgagtttctgg

SEQ ID NO: 688776 - DNA, 25 bp, Homo sapien
cgtgacccgggccaagtacttcatt

SEQ ID NO: 688777 - DNA, 25 bp, Homo sapien
agcccggagaggacccacgcgtgac

SEQ ID NO: 688778 - DNA, 25 bp, Homo sapien
gggccaagtacttcattcgagatga

SEQ ID NO: 688779 - DNA, 25 bp, Homo sapien
tggagatgggcgtcactactgctac

SEQ ID NO: 688780 - DNA, 25 bp, Homo sapien
catagggcatgattaacaaagcaac

SEQ ID NO: 688781 - DNA, 25 bp, Homo sapien
gacactgagaacatccgccgtgtgt

SEQ ID NO: 688782 - DNA, 25 bp, Homo sapien
agcgcatgcaccttcgtcagtacga

SEQ ID NO: 688783 - DNA, 25 bp, Homo sapien
acgcaggcatgggaaaagggaattg

SEQ ID NO: 688784 - DNA, 25 bp, Homo sapien
aatgccttttgggacgcaggcatgg

SEQ ID NO: 688785 - DNA, 25 bp, Homo sapien
gggacgcaggcatgggaaaagggaa

SEQ ID NO: 688786 - DNA, 25 bp, Homo sapien
cttttgggacgcaggcatgggaaaa

SEQ ID NO: 688787 - DNA, 25 bp, Homo sapien
ccttgagaaacggattggtgaggaa

SEQ ID NO: 688788 - DNA, 25 bp, Homo sapien
cttggccttgagaaacggattggtg

SEQ ID NO: 688789 - DNA, 25 bp, Homo sapien
aaacggattggtgaggaatatggca

SEQ ID NO: 688790 - DNA, 25 bp, Homo sapien
tgagaaacggattggtgaggaatat

SEQ ID NO: 688791 - DNA, 25 bp, Homo sapien
ccggcgttggcttggtccacgtggc

SEQ ID NO: 688792 - DNA, 25 bp, Homo sapien
gttggcttggtccacgtggccacag

SEQ ID NO: 688793 - DNA, 25 bp, Homo sapien
gaggagccggcgttggcttggtcca

SEQ ID NO: 688794 - DNA, 25 bp, Homo sapien
gggaatgagaggagccggcgttggc

SEQ ID NO: 688795 - DNA, 25 bp, Homo sapien
gatagatggatctcctcagaatcag

SEQ ID NO: 688796 - DNA, 25 bp, Homo sapien
gatggatctcctcagaatcaggcat

SEQ ID NO: 688797 - DNA, 25 bp, Homo sapien
tttctgtccagatgtagatagatag

SEQ ID NO: 688798 - DNA, 25 bp, Homo sapien
gatagatagatggatctcctcagaa

SEQ ID NO: 688799 - DNA, 25 bp, Homo sapien
ggtttgactcagtaggcctttcaca

SEQ ID NO: 688800 - DNA, 25 bp, Homo sapien
agcacaaaggttttcagggtgaggt

SEQ ID NO: 688801 - DNA, 25 bp, Homo sapien
ggtgaggtttgactcagtaggcctt

SEQ ID NO: 688802 - DNA, 25 bp, Homo sapien
gactcagtaggcctttcacactcac

SEQ ID NO: 688803 - DNA, 25 bp, Homo sapien
actcccgagcagcacaaatgcctgt

SEQ ID NO: 688804 - DNA, 25 bp, Homo sapien
tttcgtgcatatactcccgagcagc

SEQ ID NO: 688805 - DNA, 25 bp, Homo sapien
gcatatactcccgagcagcacaaat

SEQ ID NO: 688806 - DNA, 25 bp, Homo sapien
tatactcccgagcagcacaaatgcc

SEQ ID NO: 688807 - DNA, 25 bp, Homo sapien
caggcagcaccaaaagcagtgacat

SEQ ID NO: 688808 - DNA, 25 bp, Homo sapien
tcactaagttcagctcacacacaag

SEQ ID NO: 688809 - DNA, 25 bp, Homo sapien
ttatgacctagtccatgaagtcccc

SEQ ID NO: 688810 - DNA, 25 bp, Homo sapien
gcccacttacttagctgctgtagga

SEQ ID NO: 688811 - DNA, 25 bp, Homo sapien
ttgcaagtggtatgtcagctgggac

SEQ ID NO: 688812 - DNA, 25 bp, Homo sapien
aagcggttctcgtgactcagcctct

SEQ ID NO: 688813 - DNA, 25 bp, Homo sapien
agcggttctcgtgactcagcctctt

SEQ ID NO: 688814 - DNA, 25 bp, Homo sapien
tcttgagtagctgagactacaggcg

SEQ ID NO: 688815 - DNA, 25 bp, Homo sapien
ggctgtgcacgaatccagtgggaaa

SEQ ID NO: 688816 - DNA, 25 bp, Homo sapien
acactttcgtgggtcctggacactt

SEQ ID NO: 688817 - DNA, 25 bp, Homo sapien
cgtgggtcctggacacttccggaag

SEQ ID NO: 688818 - DNA, 25 bp, Homo sapien
gctgtgcacgaatccagtgggaaac

SEQ ID NO: 688819 - DNA, 25 bp, Homo sapien
tatgtgagaaaggtgtctgtattgg

SEQ ID NO: 688820 - DNA, 25 bp, Homo sapien
tcaacactctgaagaggtatgtgag

SEQ ID NO: 688821 - DNA, 25 bp, Homo sapien
cgcgaactgaactaaaggcttcaag

SEQ ID NO: 688822 - DNA, 25 bp, Homo sapien
gtgctatgtaaagcaagagtaacgc

SEQ ID NO: 688823 - DNA, 25 bp, Homo sapien
tacagtggagcgtggcatatcatgt

SEQ ID NO: 688824 - DNA, 25 bp, Homo sapien
gcttgcacgcaagaggcacacaggt

SEQ ID NO: 688825 - DNA, 25 bp, Homo sapien
tgcaaattccctgtgtacagtggag

SEQ ID NO: 688826 - DNA, 25 bp, Homo sapien
tacccagggtcgtgacatgcttgca

SEQ ID NO: 688827 - DNA, 25 bp, Homo sapien
ctttcttatagagccagcaagctgt

SEQ ID NO: 688828 - DNA, 25 bp, Homo sapien
tcaagaggtcatgacgccagtcaga

SEQ ID NO: 688829 - DNA, 25 bp, Homo sapien
gatgttcacaagcatggaccctcct

SEQ ID NO: 688830 - DNA, 25 bp, Homo sapien
tccccaatgtcagctggtaaggtga

SEQ ID NO: 688831 - DNA, 25 bp, Homo sapien
tataggtaaagttatgcccacaaag

SEQ ID NO: 688832 - DNA, 25 bp, Homo sapien
cgtgtcctagaaatagtgtgtcctc

SEQ ID NO: 688833 - DNA, 25 bp, Homo sapien
cgcatgttgagtggctgctgatcca

SEQ ID NO: 688834 - DNA, 25 bp, Homo sapien
tactagggatgaagaaagagtttgc

SEQ ID NO: 688835 - DNA, 25 bp, Homo sapien
tctggcctgtttgtagatcagcacc

SEQ ID NO: 688836 - DNA, 25 bp, Homo sapien
ttttgtacctaactgagaactgtgc

SEQ ID NO: 688837 - DNA, 25 bp, Homo sapien
tcactgaggtcagcaatgcaccgtt

SEQ ID NO: 688838 - DNA, 25 bp, Homo sapien
taaggacctagcttcattgactgca

SEQ ID NO: 688839 - DNA, 25 bp, Homo sapien
tgttcatttccctcaaggcaggcgc

SEQ ID NO: 688840 - DNA, 25 bp, Homo sapien
cgtcttgaaaatgggcaccgctggg

SEQ ID NO: 688841 - DNA, 25 bp, Homo sapien
cagcttcagtgagaaactgccctta

SEQ ID NO: 688842 - DNA, 25 bp, Homo sapien
tttctcacaagaacccagttagctg

SEQ ID NO: 688843 - DNA, 25 bp, Homo sapien
cataggatcccctctggtcatgggt

SEQ ID NO: 688844 - DNA, 25 bp, Homo sapien
taaactgcgcttctagtgacatggc

SEQ ID NO: 688845 - DNA, 25 bp, Homo sapien
tgtgcaagtgtcataagtcatccca

SEQ ID NO: 688846 - DNA, 25 bp, Homo sapien
catcacttgggcgatttgaaactgc

SEQ ID NO: 688847 - DNA, 25 bp, Homo sapien
ataggtgctggtcacgatcctcagc

SEQ ID NO: 688848 - DNA, 25 bp, Homo sapien
agtgctcctcgatggcaaggttgta

SEQ ID NO: 688849 - DNA, 25 bp, Homo sapien
ggcaaggttgtatctggcgcccttc

SEQ ID NO: 688850 - DNA, 25 bp, Homo sapien
aaggttgtatctggcgcccttccca

SEQ ID NO: 688851 - DNA, 25 bp, Homo sapien
tctaggaatgaccttaagaaaatga

SEQ ID NO: 688852 - DNA, 25 bp, Homo sapien
ttctaggaatgaccttaagaaaatg

SEQ ID NO: 688853 - DNA, 25 bp, Homo sapien
tgaccttaagaaaatgaaaacatct

SEQ ID NO: 688854 - DNA, 25 bp, Homo sapien
ctaggaatgaccttaagaaaatgaa

SEQ ID NO: 688855 - DNA, 25 bp, Homo sapien
ggtttatatatgtggtgtcctggta

SEQ ID NO: 688856 - DNA, 25 bp, Homo sapien
ccagccacagaaacgacatggttta

SEQ ID NO: 688857 - DNA, 25 bp, Homo sapien
tgtcctggtattcggcatagatgcc

SEQ ID NO: 688858 - DNA, 25 bp, Homo sapien
gaattccggacaatccagtactcag

SEQ ID NO: 688859 - DNA, 25 bp, Homo sapien
attgagagaatttaccgtcattaga

SEQ ID NO: 688860 - DNA, 25 bp, Homo sapien
gagagcaagcagttaaagaattacc

SEQ ID NO: 688861 - DNA, 25 bp, Homo sapien
gagcaagcagttaaagaattaccac

SEQ ID NO: 688862 - DNA, 25 bp, Homo sapien
gaatttaccgtcattagaaataatc

SEQ ID NO: 688863 - DNA, 25 bp, Homo sapien
agtacaaccggccagaaggaaagtg

SEQ ID NO: 688864 - DNA, 25 bp, Homo sapien
atgcctacatgagcaccgacatgag

SEQ ID NO: 688865 - DNA, 25 bp, Homo sapien
tggcgaaggacggagatgcctacat

SEQ ID NO: 688866 - DNA, 25 bp, Homo sapien
gatgtggctgtctcgagcctactga

SEQ ID NO: 688867 - DNA, 25 bp, Homo sapien
cggatggcgtggcactctttgaatt

SEQ ID NO: 688868 - DNA, 25 bp, Homo sapien
ccagagagggagccgtagtctccca

SEQ ID NO: 688869 - DNA, 25 bp, Homo sapien
tctttgaattcattgcatgtcccac

SEQ ID NO: 688870 - DNA, 25 bp, Homo sapien
ccacattggttaaacttgtcacact

SEQ ID NO: 688871 - DNA, 25 bp, Homo sapien
ctgtcccccttctcgaaggactcac

SEQ ID NO: 688872 - DNA, 25 bp, Homo sapien
catctgatagcccttccctctgcac

SEQ ID NO: 688873 - DNA, 25 bp, Homo sapien
atctgatagcccttccctctgcacc

SEQ ID NO: 688874 - DNA, 25 bp, Homo sapien
gccatctgatagcccttccctctgc

SEQ ID NO: 688875 - DNA, 25 bp, Homo sapien
agaatttctggctgaacaataaggc

SEQ ID NO: 688876 - DNA, 25 bp, Homo sapien
ggagaatttctggctgaacaataag

SEQ ID NO: 688877 - DNA, 25 bp, Homo sapien
agccagtccaggagaatttctggct

SEQ ID NO: 688878 - DNA, 25 bp, Homo sapien
tcagccagtccaggagaatttctgg

SEQ ID NO: 688879 - DNA, 25 bp, Homo sapien
agccaccgcgcgcatggccaaggat

SEQ ID NO: 688880 - DNA, 25 bp, Homo sapien
caccgcgcgcatggccaaggatgct

SEQ ID NO: 688881 - DNA, 25 bp, Homo sapien
cgcgcatggccaaggatgctcttca

SEQ ID NO: 688882 - DNA, 25 bp, Homo sapien
cgcgcgcatggccaaggatgctctt

SEQ ID NO: 688883 - DNA, 25 bp, Homo sapien
tgggcgtagtcccacacggacaggt

SEQ ID NO: 688884 - DNA, 25 bp, Homo sapien
gagccagcgttaccgcagtcgatga

SEQ ID NO: 688885 - DNA, 25 bp, Homo sapien
cagtcgatgacgttctgcacggaca

SEQ ID NO: 688886 - DNA, 25 bp, Homo sapien
tagttgttgcaggtctcgtcaggga

SEQ ID NO: 688887 - DNA, 25 bp, Homo sapien
ggctgacctggccttgaatcacagg

SEQ ID NO: 688888 - DNA, 25 bp, Homo sapien
gattcagtcctagtcctgcctgtca

SEQ ID NO: 688889 - DNA, 25 bp, Homo sapien
gcttgggtcacctcagcagagggca

SEQ ID NO: 688890 - DNA, 25 bp, Homo sapien
aagccccagaatgacccagcttggg

SEQ ID NO: 688891 - DNA, 25 bp, Homo sapien
gctggcatagttgacaccatccaca

SEQ ID NO: 688892 - DNA, 25 bp, Homo sapien
ttgacaccatccacattgcgccagt

SEQ ID NO: 688893 - DNA, 25 bp, Homo sapien
gatgtgctggttccgggtgatgctg

SEQ ID NO: 688894 - DNA, 25 bp, Homo sapien
ttccgggtgatgctggcatagttga

SEQ ID NO: 688895 - DNA, 25 bp, Homo sapien
gtactcatgaggccgggggtatgtg

SEQ ID NO: 688896 - DNA, 25 bp, Homo sapien
aggtactcatgaggccgggggtatg

SEQ ID NO: 688897 - DNA, 25 bp, Homo sapien
ggtactcatgaggccgggggtatgt

SEQ ID NO: 688898 - DNA, 25 bp, Homo sapien
tgcgccccagcggagccagcccgtc

SEQ ID NO: 688899 - DNA, 25 bp, Homo sapien
ccccgcagaggccggtagcaggtct

SEQ ID NO: 688900 - DNA, 25 bp, Homo sapien
ccgcagaggccggtagcaggtctgt

SEQ ID NO: 688901 - DNA, 25 bp, Homo sapien
agaggccggtagcaggtctgtcccc

SEQ ID NO: 688902 - DNA, 25 bp, Homo sapien
cgccagcagcacgagcagcagaagc

SEQ ID NO: 688903 - DNA, 25 bp, Homo sapien
agaagcggccgccaccctggcccgc

SEQ ID NO: 688904 - DNA, 25 bp, Homo sapien
gccaccctggcccgcgcctcgccat

SEQ ID NO: 688905 - DNA, 25 bp, Homo sapien
agcagcacgagcagcagaagcggcc

SEQ ID NO: 688906 - DNA, 25 bp, Homo sapien
tcccgctccggatcccgctccgagt

SEQ ID NO: 688907 - DNA, 25 bp, Homo sapien
gctcctgggtcccgctccggatccc

SEQ ID NO: 688908 - DNA, 25 bp, Homo sapien
cctgggtcccgctccggatcccgct

SEQ ID NO: 688909 - DNA, 25 bp, Homo sapien
ggtcccgctccggatcccgctccga

SEQ ID NO: 688910 - DNA, 25 bp, Homo sapien
tgtggatactgactcttcttctcat

SEQ ID NO: 688911 - DNA, 25 bp, Homo sapien
tttgtggatactgactcttcttctc

SEQ ID NO: 688912 - DNA, 25 bp, Homo sapien
ttgtggatactgactcttcttctca

SEQ ID NO: 688913 - DNA, 25 bp, Homo sapien
cggaaaggtgtttcctcctgacttg

SEQ ID NO: 688914 - DNA, 25 bp, Homo sapien
tttcatcgactgtggaatggcctcg

SEQ ID NO: 688915 - DNA, 25 bp, Homo sapien
cagatgagttttcatcgactgtgga

SEQ ID NO: 688916 - DNA, 25 bp, Homo sapien
tggaatggcctcgaaatcctttttc

SEQ ID NO: 688917 - DNA, 25 bp, Homo sapien
ggagaacacagatgagttttcatcg

SEQ ID NO: 688918 - DNA, 25 bp, Homo sapien
ccaccccggcaagctgcagacattt

SEQ ID NO: 688919 - DNA, 25 bp, Homo sapien
tccaccccggcaagctgcagacatt

SEQ ID NO: 688920 - DNA, 25 bp, Homo sapien
agctgcagacatttcctattattcc

SEQ ID NO: 688921 - DNA, 25 bp, Homo sapien
gcagacatttcctattattccacat

SEQ ID NO: 688922 - DNA, 25 bp, Homo sapien
cactctggaatcgtatggtctagcg

SEQ ID NO: 688923 - DNA, 25 bp, Homo sapien
ttcagggtgatcaaaaggagtcttc

SEQ ID NO: 688924 - DNA, 25 bp, Homo sapien
tttaagatgaccaattgcaccgtgc

SEQ ID NO: 688925 - DNA, 25 bp, Homo sapien
gttattaagaccatggccagagcag

SEQ ID NO: 688926 - DNA, 25 bp, Homo sapien
taggaaatatgtgccccgagcagtc

SEQ ID NO: 688927 - DNA, 25 bp, Homo sapien
tcttggtggacctagaacctgggac

SEQ ID NO: 688928 - DNA, 25 bp, Homo sapien
taggagctctctttcaacccgacag

SEQ ID NO: 688929 - DNA, 25 bp, Homo sapien
cgagctgatcgagaatgtcctagag

SEQ ID NO: 688930 - DNA, 25 bp, Homo sapien
agaggagtacccggaccggatcatg

SEQ ID NO: 688931 - DNA, 25 bp, Homo sapien
ggagtacccggaccggatcatgaat

SEQ ID NO: 688932 - DNA, 25 bp, Homo sapien
tagagaggagtacccggaccggatc

SEQ ID NO: 688933 - DNA, 25 bp, Homo sapien
tacccggaccggatcatgaattcct

SEQ ID NO: 688934 - DNA, 25 bp, Homo sapien
ttgagaaagggcacaccatgcgctc

SEQ ID NO: 688935 - DNA, 25 bp, Homo sapien
tacctatttctgacatgcagcactg

SEQ ID NO: 688936 - DNA, 25 bp, Homo sapien
agcaatggctgcagtgtccttctca

SEQ ID NO: 688937 - DNA, 25 bp, Homo sapien
catgcgctcggcaaccattcaaatg

SEQ ID NO: 688938 - DNA, 25 bp, Homo sapien
cctgagatgctaaagacttacagcc

SEQ ID NO: 688939 - DNA, 25 bp, Homo sapien
tctacttgtggttcaagaagcacta

SEQ ID NO: 688940 - DNA, 25 bp, Homo sapien
tatacaaggatttacacatgcttcc

SEQ ID NO: 688941 - DNA, 25 bp, Homo sapien
cttacagcctgcgattatacaagga

SEQ ID NO: 688942 - DNA, 25 bp, Homo sapien
tatcctcggcattgctgacagtggc

SEQ ID NO: 688943 - DNA, 25 bp, Homo sapien
tattcgtcccatgtcaaaaaggccc

SEQ ID NO: 688944 - DNA, 25 bp, Homo sapien
tgaggtgccctaacttgccaacagc

SEQ ID NO: 688945 - DNA, 25 bp, Homo sapien
aacctacaggtcaagtgtcgggaca

SEQ ID NO: 688946 - DNA, 25 bp, Homo sapien
gtcaatttatgaacaagacaggatt

SEQ ID NO: 688947 - DNA, 25 bp, Homo sapien
cattgtcaatttatgaacaagacag

SEQ ID NO: 688948 - DNA, 25 bp, Homo sapien
tgtcaatttatgaacaagacaggat

SEQ ID NO: 688949 - DNA, 25 bp, Homo sapien
ttgtcaatttatgaacaagacagga

SEQ ID NO: 688950 - DNA, 25 bp, Homo sapien
tgtagcatttcaagctttagtcagg

SEQ ID NO: 688951 - DNA, 25 bp, Homo sapien
ggaaatgtagcatttcaagctttag

SEQ ID NO: 688952 - DNA, 25 bp, Homo sapien
cttggaaatgtagcatttcaagctt

SEQ ID NO: 688953 - DNA, 25 bp, Homo sapien
aatgtagcatttcaagctttagtca

SEQ ID NO: 688954 - DNA, 25 bp, Homo sapien
ttagcaaaacagtattcgctgcggg

SEQ ID NO: 688955 - DNA, 25 bp, Homo sapien
tcagcattagatgcagtctggcagc

SEQ ID NO: 688956 - DNA, 25 bp, Homo sapien
caaatacgatggctctctacctaag

SEQ ID NO: 688957 - DNA, 25 bp, Homo sapien
tgtcagggcccaagaagactttctt

SEQ ID NO: 688958 - DNA, 25 bp, Homo sapien
acgttgctgccagaagtcttctcag

SEQ ID NO: 688959 - DNA, 25 bp, Homo sapien
tttcacaatttttacgttgctgcca

SEQ ID NO: 688960 - DNA, 25 bp, Homo sapien
ttttacgttgctgccagaagtcttc

SEQ ID NO: 688961 - DNA, 25 bp, Homo sapien
gtcttcagtgcatctctcactgctt

SEQ ID NO: 688962 - DNA, 25 bp, Homo sapien
ggttgtaccttattgtagaattgga

SEQ ID NO: 688963 - DNA, 25 bp, Homo sapien
attatcaatattccagccagacagc

SEQ ID NO: 688964 - DNA, 25 bp, Homo sapien
tgttactgtgttttcgcttttcttc

SEQ ID NO: 688965 - DNA, 25 bp, Homo sapien
tgccaaaaagtatctatacaaagaa

SEQ ID NO: 688966 - DNA, 25 bp, Homo sapien
ttcctgtttggtagatggactccca

SEQ ID NO: 688967 - DNA, 25 bp, Homo sapien
tgccactgaaaataacctcctaatg

SEQ ID NO: 688968 - DNA, 25 bp, Homo sapien
actcagaggtatgagttccaatgcc

SEQ ID NO: 688969 - DNA, 25 bp, Homo sapien
gaattctgtctcacaagtctgccac

SEQ ID NO: 688970 - DNA, 25 bp, Homo sapien
taatacctgtcctgctgatagctgg

SEQ ID NO: 688971 - DNA, 25 bp, Homo sapien
taaacggtatctactactgggacta

SEQ ID NO: 688972 - DNA, 25 bp, Homo sapien
ggaagctccgctgtagtgtacccac

SEQ ID NO: 688973 - DNA, 25 bp, Homo sapien
caagacttcgctggcttgacctcag

SEQ ID NO: 688974 - DNA, 25 bp, Homo sapien
caatggtttgcggttccactatgag

SEQ ID NO: 688975 - DNA, 25 bp, Homo sapien
ctagaccaatggtttgcggttccac

SEQ ID NO: 688976 - DNA, 25 bp, Homo sapien
gaccaatggtttgcggttccactat

SEQ ID NO: 688977 - DNA, 25 bp, Homo sapien
gtttgcggttccactatgagacacc

SEQ ID NO: 688978 - DNA, 25 bp, Homo sapien
taagagctggcctctctctcgagaa

SEQ ID NO: 688979 - DNA, 25 bp, Homo sapien
gggctctcgacagttatggctttca

SEQ ID NO: 688980 - DNA, 25 bp, Homo sapien
tcaaagctgctaacggcggtcacgt

SEQ ID NO: 688981 - DNA, 25 bp, Homo sapien
tcgatgctggattaaaggtcaaagc

SEQ ID NO: 688982 - DNA, 25 bp, Homo sapien
agacgcgctcccacgcgaggtcgag

SEQ ID NO: 688983 - DNA, 25 bp, Homo sapien
cgtcgggaagcgaggcaggacacag

SEQ ID NO: 688984 - DNA, 25 bp, Homo sapien
ggtgctgggccgcaccgtcgggaag

SEQ ID NO: 688985 - DNA, 25 bp, Homo sapien
cgcctgagcgctttgcccacagcga

SEQ ID NO: 688986 - DNA, 25 bp, Homo sapien
ttggcggcgacgcccgaggcttggc

SEQ ID NO: 688987 - DNA, 25 bp, Homo sapien
cttggcggcgacgcccgaggcttgg

SEQ ID NO: 688988 - DNA, 25 bp, Homo sapien
tggcggcgacgcccgaggcttggcc

SEQ ID NO: 688989 - DNA, 25 bp, Homo sapien
gccggctcgcgaagcccttccctct

SEQ ID NO: 688990 - DNA, 25 bp, Homo sapien
tgacctctgggcaccgggatgcgcg

SEQ ID NO: 688991 - DNA, 25 bp, Homo sapien
tctgggcaccgggatgcgcgcgggc

SEQ ID NO: 688992 - DNA, 25 bp, Homo sapien
atgcgcgcgggccggctcgcgaagc

SEQ ID NO: 688993 - DNA, 25 bp, Homo sapien
gagtccagcctgtctccagtaggcc

SEQ ID NO: 688994 - DNA, 25 bp, Homo sapien
ctgagtccagcctgtctccagtagg

SEQ ID NO: 688995 - DNA, 25 bp, Homo sapien
tccagcctgtctccagtaggccacc

SEQ ID NO: 688996 - DNA, 25 bp, Homo sapien
cagcctgtctccagtaggccaccat

SEQ ID NO: 688997 - DNA, 25 bp, Homo sapien
aatgtcggctcagccgggcggttca

SEQ ID NO: 688998 - DNA, 25 bp, Homo sapien
agatcagaccacagaagcggaagag

SEQ ID NO: 688999 - DNA, 25 bp, Homo sapien
gcggttcagccgcaggaagatcaga

SEQ ID NO: 689000 - DNA, 25 bp, Homo sapien
gccgaatcgccaagacgccggcaat

SEQ ID NO: 689001 - DNA, 25 bp, Homo sapien
ccgagggcctggctttgcgcccgct

SEQ ID NO: 689002 - DNA, 25 bp, Homo sapien
tttcgggaagcgaggacgcgaggcg

SEQ ID NO: 689003 - DNA, 25 bp, Homo sapien
cactgagccgcgtgctttcgggaag

SEQ ID NO: 689004 - DNA, 25 bp, Homo sapien
gggtgtccccgctcgctaaggacca

SEQ ID NO: 689005 - DNA, 25 bp, Homo sapien
aggtaactaactgcactggaaaatg

SEQ ID NO: 689006 - DNA, 25 bp, Homo sapien
aattcatttgcttgttgtgcattta

SEQ ID NO: 689007 - DNA, 25 bp, Homo sapien
cacttattccagtttagttctctta

SEQ ID NO: 689008 - DNA, 25 bp, Homo sapien
ggcattacacctttttcagaacaag

SEQ ID NO: 689009 - DNA, 25 bp, Homo sapien
taagtacctgggatttatgcctcag

SEQ ID NO: 689010 - DNA, 25 bp, Homo sapien
tagaagtttatcacactaagcactg

SEQ ID NO: 689011 - DNA, 25 bp, Homo sapien
tcccgttaagtaaaacctgcagtgc

SEQ ID NO: 689012 - DNA, 25 bp, Homo sapien
taacctgacatatcatgccttagca

SEQ ID NO: 689013 - DNA, 25 bp, Homo sapien
gaatatcaataccagtttccaagga

SEQ ID NO: 689014 - DNA, 25 bp, Homo sapien
taaccagcccacgatacagcatact

SEQ ID NO: 689015 - DNA, 25 bp, Homo sapien
taagtgagctcccttgtgcaagctg

SEQ ID NO: 689016 - DNA, 25 bp, Homo sapien
agcagcagggcaatgggcgtctata

SEQ ID NO: 689017 - DNA, 25 bp, Homo sapien
tacccgatgttgtctaccaactgtc

SEQ ID NO: 689018 - DNA, 25 bp, Homo sapien
ctggagtacccgatgttgtctacca

SEQ ID NO: 689019 - DNA, 25 bp, Homo sapien
cgatgttgtctaccaactgtcacga

SEQ ID NO: 689020 - DNA, 25 bp, Homo sapien
ggagtacccgatgttgtctaccaac

SEQ ID NO: 689021 - DNA, 25 bp, Homo sapien
caaacgctgctgctgccattggagt

SEQ ID NO: 689022 - DNA, 25 bp, Homo sapien
ctctgcaaacgctgctgctgccatt

SEQ ID NO: 689023 - DNA, 25 bp, Homo sapien
ttctctgcaaacgctgctgctgcca

SEQ ID NO: 689024 - DNA, 25 bp, Homo sapien
aacgctgctgctgccattggagtcc

SEQ ID NO: 689025 - DNA, 25 bp, Homo sapien
agttcttcaatctcagcatttaatt

SEQ ID NO: 689026 - DNA, 25 bp, Homo sapien
atttatgtattacccattccattgc

SEQ ID NO: 689027 - DNA, 25 bp, Homo sapien
ctcttgctgaggctgtcagttcttc

SEQ ID NO: 689028 - DNA, 25 bp, Homo sapien
ttaatttatgtattacccattccat

SEQ ID NO: 689029 - DNA, 25 bp, Homo sapien
gatgacagatcgtttttgtcctggc

SEQ ID NO: 689030 - DNA, 25 bp, Homo sapien
caaggggcgtgacaagtttaactca

SEQ ID NO: 689031 - DNA, 25 bp, Homo sapien
gcaactggcttgatccataaactga

SEQ ID NO: 689032 - DNA, 25 bp, Homo sapien
tatatcgaactaatgacacaccagg

SEQ ID NO: 689033 - DNA, 25 bp, Homo sapien
taattatggcttcttgtgtcaaaac

SEQ ID NO: 689034 - DNA, 25 bp, Homo sapien
acggtaattatggcttcttgtgtca

SEQ ID NO: 689035 - DNA, 25 bp, Homo sapien
aattatggcttcttgtgtcaaaaca

SEQ ID NO: 689036 - DNA, 25 bp, Homo sapien
cggtaattatggcttcttgtgtcaa

SEQ ID NO: 689037 - DNA, 25 bp, Homo sapien
ggatcctgaggatgtggtttgtata

SEQ ID NO: 689038 - DNA, 25 bp, Homo sapien
ttttctggatcctgaggatgtggtt

SEQ ID NO: 689039 - DNA, 25 bp, Homo sapien
ctgaggatgtggtttgtatataagt

SEQ ID NO: 689040 - DNA, 25 bp, Homo sapien
ggatgtggtttgtatataagtctct

SEQ ID NO: 689041 - DNA, 25 bp, Homo sapien
caggatcaactacagaatgttcttg

SEQ ID NO: 689042 - DNA, 25 bp, Homo sapien
tcttgcacatatgttttcgttcttg

SEQ ID NO: 689043 - DNA, 25 bp, Homo sapien
attagtagatttaagttccattgtt

SEQ ID NO: 689044 - DNA, 25 bp, Homo sapien
aatgttcttgcacatatgttttcgt

SEQ ID NO: 689045 - DNA, 25 bp, Homo sapien
atttctccgggaataaagacacact

SEQ ID NO: 689046 - DNA, 25 bp, Homo sapien
ctccaaccacacttgggttcatagg

SEQ ID NO: 689047 - DNA, 25 bp, Homo sapien
tccaaccacacttgggttcataggg

SEQ ID NO: 689048 - DNA, 25 bp, Homo sapien
tgttcctgaacgtggcctcaaagag

SEQ ID NO: 689049 - DNA, 25 bp, Homo sapien
ccaaagtggtttcacagggcgggat

SEQ ID NO: 689050 - DNA, 25 bp, Homo sapien
tcaaagagctaacacgggtaggccc

SEQ ID NO: 689051 - DNA, 25 bp, Homo sapien
tctcagatgaaaatgggtaacccag

SEQ ID NO: 689052 - DNA, 25 bp, Homo sapien
aagacgtgctccgaagtccagatct

SEQ ID NO: 689053 - DNA, 25 bp, Homo sapien
tcaaagacgtgctccgaagtccaga

SEQ ID NO: 689054 - DNA, 25 bp, Homo sapien
gacgtgctccgaagtccagatcttc

SEQ ID NO: 689055 - DNA, 25 bp, Homo sapien
caaagacgtgctccgaagtccagat

SEQ ID NO: 689056 - DNA, 25 bp, Homo sapien
tagcgccaggggacaacgaggcaca

SEQ ID NO: 689057 - DNA, 25 bp, Homo sapien
ggtgccggcaccctgagagatgtcc

SEQ ID NO: 689058 - DNA, 25 bp, Homo sapien
cctgagagatgtccgggtagcgcca

SEQ ID NO: 689059 - DNA, 25 bp, Homo sapien
acgaggcacagaggctacacctgcc

SEQ ID NO: 689060 - DNA, 25 bp, Homo sapien
tgagatttcaacatccctatcagct

SEQ ID NO: 689061 - DNA, 25 bp, Homo sapien
gagaagtgaccagcacagctcaagc

SEQ ID NO: 689062 - DNA, 25 bp, Homo sapien
cagagtctgcgtggccatagaataa

SEQ ID NO: 689063 - DNA, 25 bp, Homo sapien
ccctgatggaatagagagccagagt

SEQ ID NO: 689064 - DNA, 25 bp, Homo sapien
tacggggagagaatcagcaggtgcc

SEQ ID NO: 689065 - DNA, 25 bp, Homo sapien
tggaacttgcaaggcataacatgaa

SEQ ID NO: 689066 - DNA, 25 bp, Homo sapien
ctgggtcccaaagccacgtctaggg

SEQ ID NO: 689067 - DNA, 25 bp, Homo sapien
ggtgcccaaatctgggcagtgccgc

SEQ ID NO: 689068 - DNA, 25 bp, Homo sapien
ttgccaaatgcatgcactgaaacca

SEQ ID NO: 689069 - DNA, 25 bp, Homo sapien
tccacttccatttttcatcacagaa

SEQ ID NO: 689070 - DNA, 25 bp, Homo sapien
caaaatgtaccaaaatccaccctgc

SEQ ID NO: 689071 - DNA, 25 bp, Homo sapien
gtgtgctgcaagtttgtttaatgtc

SEQ ID NO: 689072 - DNA, 25 bp, Homo sapien
gcacaaagctttacgccggacactg

SEQ ID NO: 689073 - DNA, 25 bp, Homo sapien
gatctaacctctccagagaccggag

SEQ ID NO: 689074 - DNA, 25 bp, Homo sapien
cccacgtccgtgtgggcgttgaatg

SEQ ID NO: 689075 - DNA, 25 bp, Homo sapien
cagcctcttaaattgcttcagcaga

SEQ ID NO: 689076 - DNA, 25 bp, Homo sapien
tcaaatagcgaagagggacccgtgt

SEQ ID NO: 689077 - DNA, 25 bp, Homo sapien
tgtgtcctcactgcctcaaatagcg

SEQ ID NO: 689078 - DNA, 25 bp, Homo sapien
ggtcctgggcctaaagtccactctc

SEQ ID NO: 689079 - DNA, 25 bp, Homo sapien
tgggcctaaagtccactctcccagg

SEQ ID NO: 689080 - DNA, 25 bp, Homo sapien
ctctgggtgtaccatgtccagcgct

SEQ ID NO: 689081 - DNA, 25 bp, Homo sapien
ggtgtaccatgtccagcgctgagga

SEQ ID NO: 689082 - DNA, 25 bp, Homo sapien
catgtccagcgctgaggattggttt

SEQ ID NO: 689083 - DNA, 25 bp, Homo sapien
ccagcgctgaggattggttttcttc

SEQ ID NO: 689084 - DNA, 25 bp, Homo sapien
gaaaaagcattaggctcggggcact

SEQ ID NO: 689085 - DNA, 25 bp, Homo sapien
tgggaaaaagcattaggctcggggc

SEQ ID NO: 689086 - DNA, 25 bp, Homo sapien
aaaagcattaggctcggggcactgc

SEQ ID NO: 689087 - DNA, 25 bp, Homo sapien
aagcattaggctcggggcactgctc

SEQ ID NO: 689088 - DNA, 25 bp, Homo sapien
agaagtcctgcccctcacacggagg

SEQ ID NO: 689089 - DNA, 25 bp, Homo sapien
gaagtcctgcccctcacacggaggc

SEQ ID NO: 689090 - DNA, 25 bp, Homo sapien
agtcctgcccctcacacggaggccc

SEQ ID NO: 689091 - DNA, 25 bp, Homo sapien
cagaagtcctgcccctcacacggag

SEQ ID NO: 689092 - DNA, 25 bp, Homo sapien
ctgctggtccaggtagatttttttc

SEQ ID NO: 689093 - DNA, 25 bp, Homo sapien
gctgctggtccaggtagattttttt

SEQ ID NO: 689094 - DNA, 25 bp, Homo sapien
cctacctgataacctaatggtttat

SEQ ID NO: 689095 - DNA, 25 bp, Homo sapien
ctacctgataacctaatggtttatt

SEQ ID NO: 689096 - DNA, 25 bp, Homo sapien
taagctctttaaaacctacctgata

SEQ ID NO: 689097 - DNA, 25 bp, Homo sapien
ccaggatataggtttggtgcagaga

SEQ ID NO: 689098 - DNA, 25 bp, Homo sapien
tggagagctgagaactcgaaactgg

SEQ ID NO: 689099 - DNA, 25 bp, Homo sapien
caggatataggtttggtgcagagat

SEQ ID NO: 689100 - DNA, 25 bp, Homo sapien
ctgagaactcgaaactggtggatgg

SEQ ID NO: 689101 - DNA, 25 bp, Homo sapien
caggcgatgaatccattttgacatg

SEQ ID NO: 689102 - DNA, 25 bp, Homo sapien
agcactaaaagtgcaggcgatgaat

SEQ ID NO: 689103 - DNA, 25 bp, Homo sapien
ccattttgacatgttgctttcctgt

SEQ ID NO: 689104 - DNA, 25 bp, Homo sapien
tcctgttgactttccagccattgaa

SEQ ID NO: 689105 - DNA, 25 bp, Homo sapien
tgacgtccgtaggatcactttgggc

SEQ ID NO: 689106 - DNA, 25 bp, Homo sapien
tgggcagttgctatgctccggtcct

SEQ ID NO: 689107 - DNA, 25 bp, Homo sapien
tctggtcctgcatgacgtccgtagg

SEQ ID NO: 689108 - DNA, 25 bp, Homo sapien
tccggtcctgcatgacgtccgtagg

SEQ ID NO: 689109 - DNA, 25 bp, Homo sapien
atgtatatgaatgcaggtctgtcca

SEQ ID NO: 689110 - DNA, 25 bp, Homo sapien
ttaaagcaatgtatatgaatgcagg

SEQ ID NO: 689111 - DNA, 25 bp, Homo sapien
ctttgggcagttgctatgcttgttt

SEQ ID NO: 689112 - DNA, 25 bp, Homo sapien
tatgaatgcaggtctgtccataggc

SEQ ID NO: 689113 - DNA, 25 bp, Homo sapien
gggccctgatatgggaacacctcac

SEQ ID NO: 689114 - DNA, 25 bp, Homo sapien
ggtcccagagaagagcgcatcattg

SEQ ID NO: 689115 - DNA, 25 bp, Homo sapien
gataagacgatgataagcacatgcc

SEQ ID NO: 689116 - DNA, 25 bp, Homo sapien
tcagcagtgccgtgggataagacga

SEQ ID NO: 689117 - DNA, 25 bp, Homo sapien
ctgggacttctctgccgtggaagaa

SEQ ID NO: 689118 - DNA, 25 bp, Homo sapien
gggcctgtggaattggaattgcacc

SEQ ID NO: 689119 - DNA, 25 bp, Homo sapien
gtggaattggaattgcaccttcggg

SEQ ID NO: 689120 - DNA, 25 bp, Homo sapien
tctgccgtggaagaaaaaaccatgt

SEQ ID NO: 689121 - DNA, 25 bp, Homo sapien
aaaccatatcaccagcgtcggccat

SEQ ID NO: 689122 - DNA, 25 bp, Homo sapien
cctctctagagtgagtagtgactca

SEQ ID NO: 689123 - DNA, 25 bp, Homo sapien
tttggggccctatgaaatggtcctc

SEQ ID NO: 689124 - DNA, 25 bp, Homo sapien
tgttgatttccaaccggggctgctg

SEQ ID NO: 689125 - DNA, 25 bp, Homo sapien
tcctgcctttgacttgacctgttga

SEQ ID NO: 689126 - DNA, 25 bp, Homo sapien
ggtgcagttgcagcgttctgggctg

SEQ ID NO: 689127 - DNA, 25 bp, Homo sapien
cactcgagttcagccctggccagag

SEQ ID NO: 689128 - DNA, 25 bp, Homo sapien
tccccagagcatcttgtgccttgga

SEQ ID NO: 689129 - DNA, 25 bp, Homo sapien
ttctgggctgcgggcactcgagttc

SEQ ID NO: 689130 - DNA, 25 bp, Homo sapien
tggccacagatgaataggatgggtg

SEQ ID NO: 689131 - DNA, 25 bp, Homo sapien
acagatgaataggatgggtgcccat

SEQ ID NO: 689132 - DNA, 25 bp, Homo sapien
gccacagatgaataggatgggtgcc

SEQ ID NO: 689133 - DNA, 25 bp, Homo sapien
cacagatgaataggatgggtgccca

SEQ ID NO: 689134 - DNA, 25 bp, Homo sapien
ccagcccgcatgctctgtgttcttc

SEQ ID NO: 689135 - DNA, 25 bp, Homo sapien
ctctgtgttcttcccaacagagcca

SEQ ID NO: 689136 - DNA, 25 bp, Homo sapien
gctgccgagcacacgtgcattggcc

SEQ ID NO: 689137 - DNA, 25 bp, Homo sapien
accacccttgctgccgagcacacgt

SEQ ID NO: 689138 - DNA, 25 bp, Homo sapien
acttggaacaaaacttctcctgtgg

SEQ ID NO: 689139 - DNA, 25 bp, Homo sapien
gagacaagtcctatgccacttggaa

SEQ ID NO: 689140 - DNA, 25 bp, Homo sapien
tctcctgtggcctaagctctatgtc

SEQ ID NO: 689141 - DNA, 25 bp, Homo sapien
ttaatgactttctctcggagacaag

SEQ ID NO: 689142 - DNA, 25 bp, Homo sapien
gccctttgccctcagatgtgcctgg

SEQ ID NO: 689143 - DNA, 25 bp, Homo sapien
ctcagatgtgcctggggctgaatct

SEQ ID NO: 689144 - DNA, 25 bp, Homo sapien
tcttatctcccaggtctgtcttcat

SEQ ID NO: 689145 - DNA, 25 bp, Homo sapien
gggctgaatctttcttatctcccag

SEQ ID NO: 689146 - DNA, 25 bp, Homo sapien
gcccatcgcgggcaccgccgaagcc

SEQ ID NO: 689147 - DNA, 25 bp, Homo sapien
ccgaagcccggctccctcctcgctc

SEQ ID NO: 689148 - DNA, 25 bp, Homo sapien
cgaagcccggctccctcctcgctcc

SEQ ID NO: 689149 - DNA, 25 bp, Homo sapien
ctagcgcccatcgcgggcaccgccg

SEQ ID NO: 689150 - DNA, 25 bp, Homo sapien
ataaacgccacccagaaatgcaaga

SEQ ID NO: 689151 - DNA, 25 bp, Homo sapien
aaatgcaagagtaagaatgttcacg

SEQ ID NO: 689152 - DNA, 25 bp, Homo sapien
gcctgtggatgatgtttcactgccc

SEQ ID NO: 689153 - DNA, 25 bp, Homo sapien
cagacgaccccagcctgtggatgat

SEQ ID NO: 689154 - DNA, 25 bp, Homo sapien
gctgacttctcatgtattccaggag

SEQ ID NO: 689155 - DNA, 25 bp, Homo sapien
tcatccgtggtttggtagcatcctc

SEQ ID NO: 689156 - DNA, 25 bp, Homo sapien
gcccatgggcttctcatccgtggtt

SEQ ID NO: 689157 - DNA, 25 bp, Homo sapien
ccgcctgggtgctttgaggtgccca

SEQ ID NO: 689158 - DNA, 25 bp, Homo sapien
atgctttcatgagagtttcattcct

SEQ ID NO: 689159 - DNA, 25 bp, Homo sapien
ttcatgagagtttcattccttggtt

SEQ ID NO: 689160 - DNA, 25 bp, Homo sapien
gctttcatgagagtttcattccttg

SEQ ID NO: 689161 - DNA, 25 bp, Homo sapien
ctttcatgagagtttcattccttgg

SEQ ID NO: 689162 - DNA, 25 bp, Homo sapien
catttgatgaaggaacactgttgaa

SEQ ID NO: 689163 - DNA, 25 bp, Homo sapien
gtacacgaccaagctttaaagtcac

SEQ ID NO: 689164 - DNA, 25 bp, Homo sapien
tgttgaattctgtacacgaccaagc

SEQ ID NO: 689165 - DNA, 25 bp, Homo sapien
tttcatttgatgaaggaacactgtt

SEQ ID NO: 689166 - DNA, 25 bp, Homo sapien
ctctccctccgcagtctgtctcctt

SEQ ID NO: 689167 - DNA, 25 bp, Homo sapien
ccctccgcagtctgtctccttgcgc

SEQ ID NO: 689168 - DNA, 25 bp, Homo sapien
tccgcagtctgtctccttgcgctca

SEQ ID NO: 689169 - DNA, 25 bp, Homo sapien
ccgcagtctgtctccttgcgctcac

SEQ ID NO: 689170 - DNA, 25 bp, Homo sapien
tttctgaggtatttggagccagcaa

SEQ ID NO: 689171 - DNA, 25 bp, Homo sapien
gggatttctgaggtatttggagcca

SEQ ID NO: 689172 - DNA, 25 bp, Homo sapien
atttctgaggtatttggagccagca

SEQ ID NO: 689173 - DNA, 25 bp, Homo sapien
gatttctgaggtatttggagccagc

SEQ ID NO: 689174 - DNA, 25 bp, Homo sapien
acagctgcattaggacatgtttcta

SEQ ID NO: 689175 - DNA, 25 bp, Homo sapien
ctgcattaggacatgtttctagagc

SEQ ID NO: 689176 - DNA, 25 bp, Homo sapien
gggcccacagtccggtatttcttca

SEQ ID NO: 689177 - DNA, 25 bp, Homo sapien
cagctgcattaggacatgtttctag

SEQ ID NO: 689178 - DNA, 25 bp, Homo sapien
gagaactgcagtccattaacccttg

SEQ ID NO: 689179 - DNA, 25 bp, Homo sapien
aaccacaagatttgagaactgcagt

SEQ ID NO: 689180 - DNA, 25 bp, Homo sapien
ccattaacccttggatgaaggagta

SEQ ID NO: 689181 - DNA, 25 bp, Homo sapien
tgaaggagtagatgacttgaatcat

SEQ ID NO: 689182 - DNA, 25 bp, Homo sapien
tgtgtatgcacttgagcagaaccac

SEQ ID NO: 689183 - DNA, 25 bp, Homo sapien
gagctgtaccccatgtgtgtatgca

SEQ ID NO: 689184 - DNA, 25 bp, Homo sapien
tgcacttgagcagaaccacactacc

SEQ ID NO: 689185 - DNA, 25 bp, Homo sapien
cagagaggagaaagcgtgcagacca

SEQ ID NO: 689186 - DNA, 25 bp, Homo sapien
tgtcttcaaggacccttcggcctga

SEQ ID NO: 689187 - DNA, 25 bp, Homo sapien
gaggtgtcgatgcatccttcatctc

SEQ ID NO: 689188 - DNA, 25 bp, Homo sapien
caaatgggttgagtgagtggttatt

SEQ ID NO: 689189 - DNA, 25 bp, Homo sapien
cccttcggcctgaggtgtcgatgca

SEQ ID NO: 689190 - DNA, 25 bp, Homo sapien
ccagaaagcgaagaactgtggcaat

SEQ ID NO: 689191 - DNA, 25 bp, Homo sapien
cagaaagcgaagaactgtggcaatt

SEQ ID NO: 689192 - DNA, 25 bp, Homo sapien
aaaccagaaagcgaagaactgtggc

SEQ ID NO: 689193 - DNA, 25 bp, Homo sapien
aaagcgaagaactgtggcaatttct

SEQ ID NO: 689194 - DNA, 25 bp, Homo sapien
cagcagggctgtatgcaacatctcc

SEQ ID NO: 689195 - DNA, 25 bp, Homo sapien
agcagggctgtatgcaacatctcca

SEQ ID NO: 689196 - DNA, 25 bp, Homo sapien
gcagggctgtatgcaacatctccaa

SEQ ID NO: 689197 - DNA, 25 bp, Homo sapien
agaggtaaaaagcaactctatcctt

SEQ ID NO: 689198 - DNA, 25 bp, Homo sapien
gaggtaaaaagcaactctatcctta

SEQ ID NO: 689199 - DNA, 25 bp, Homo sapien
cagaggtaaaaagcaactctatcct

SEQ ID NO: 689200 - DNA, 25 bp, Homo sapien
tttctgtttgccagaagtgtcggca

SEQ ID NO: 689201 - DNA, 25 bp, Homo sapien
ttttctgtttgccagaagtgtcggc

SEQ ID NO: 689202 - DNA, 25 bp, Homo sapien
ttctgtttgccagaagtgtcggcat

SEQ ID NO: 689203 - DNA, 25 bp, Homo sapien
caaaaaacaaatctaaaaatcgcat

SEQ ID NO: 689204 - DNA, 25 bp, Homo sapien
gcaaaaaacaaatctaaaaatcgca

SEQ ID NO: 689205 - DNA, 25 bp, Homo sapien
tgtggagcatctaccacctgtcagg

SEQ ID NO: 689206 - DNA, 25 bp, Homo sapien
taaacacctgtccagagggtgaggc

SEQ ID NO: 689207 - DNA, 25 bp, Homo sapien
caacgttgctgatgagtcactggct

SEQ ID NO: 689208 - DNA, 25 bp, Homo sapien
tgaggcatgctgttcggactttgga

SEQ ID NO: 689209 - DNA, 25 bp, Homo sapien
gctggttctggagacaattaccatg

SEQ ID NO: 689210 - DNA, 25 bp, Homo sapien
caatgaaccaacatagccattctgc

SEQ ID NO: 689211 - DNA, 25 bp, Homo sapien
tgaaccaacatagccattctgctgc

SEQ ID NO: 689212 - DNA, 25 bp, Homo sapien
gttctggagacaattaccatgagca

SEQ ID NO: 689213 - DNA, 25 bp, Homo sapien
taggaggtgggactgctcaaatcca

SEQ ID NO: 689214 - DNA, 25 bp, Homo sapien
ttgcttcttggtgtggttacgggag

SEQ ID NO: 689215 - DNA, 25 bp, Homo sapien
tcattcctggtgcaggatttttctt

SEQ ID NO: 689216 - DNA, 25 bp, Homo sapien
cgggagcagggcagacataggaggt

SEQ ID NO: 689217 - DNA, 25 bp, Homo sapien
tgctcaatcaataatctgttcgcct

SEQ ID NO: 689218 - DNA, 25 bp, Homo sapien
aatctgttcgcctggccttgtgtga

SEQ ID NO: 689219 - DNA, 25 bp, Homo sapien
tcaatcaataatctgttcgcctggc

SEQ ID NO: 689220 - DNA, 25 bp, Homo sapien
tcaataatctgttcgcctggccttg

SEQ ID NO: 689221 - DNA, 25 bp, Homo sapien
aggagctgcagcgttcactcgaggc

SEQ ID NO: 689222 - DNA, 25 bp, Homo sapien
taaagaatcagagaccgtgggaggc

SEQ ID NO: 689223 - DNA, 25 bp, Homo sapien
gatggctacctgatctgagaaaacc

SEQ ID NO: 689224 - DNA, 25 bp, Homo sapien
cactcgaggcactaacaggtcctgg

SEQ ID NO: 689225 - DNA, 25 bp, Homo sapien
gcgatgccatgaaaacgcggatgca

SEQ ID NO: 689226 - DNA, 25 bp, Homo sapien
tgttgtaagacttctgcaggccctg

SEQ ID NO: 689227 - DNA, 25 bp, Homo sapien
catgtgttcatcaaaaggcatgctg

SEQ ID NO: 689228 - DNA, 25 bp, Homo sapien
caatcgggtgcaatgagcctgcaga

SEQ ID NO: 689229 - DNA, 25 bp, Homo sapien
tctgacgtcacattttctgcacctg

SEQ ID NO: 689230 - DNA, 25 bp, Homo sapien
tctgacacggcatggattggagctt

SEQ ID NO: 689231 - DNA, 25 bp, Homo sapien
tctgcacctgcagggtttgcggtca

SEQ ID NO: 689232 - DNA, 25 bp, Homo sapien
aagcccagaacagcagaatttgtgc

SEQ ID NO: 689233 - DNA, 25 bp, Homo sapien
tgatttatagagcatcagcgctgac

SEQ ID NO: 689234 - DNA, 25 bp, Homo sapien
tatgtgtgggcctctccgaagttca

SEQ ID NO: 689235 - DNA, 25 bp, Homo sapien
tcagcgctgactccttgacagagag

SEQ ID NO: 689236 - DNA, 25 bp, Homo sapien
gtgcaggaaggactcttaggccgta

SEQ ID NO: 689237 - DNA, 25 bp, Homo sapien
ctgtgaaagtggccaactgttgctg

SEQ ID NO: 689238 - DNA, 25 bp, Homo sapien
caggttctctgtagcaccttctttc

SEQ ID NO: 689239 - DNA, 25 bp, Homo sapien
tgtgaaagtggccaactgttgctga

SEQ ID NO: 689240 - DNA, 25 bp, Homo sapien
ccaggttctctgtagcaccttcttt

SEQ ID NO: 689241 - DNA, 25 bp, Homo sapien
gctcaaagagtttagggcgagggta

SEQ ID NO: 689242 - DNA, 25 bp, Homo sapien
gagctgataccccttggccattggt

SEQ ID NO: 689243 - DNA, 25 bp, Homo sapien
atgagctgataccccttggccattg

SEQ ID NO: 689244 - DNA, 25 bp, Homo sapien
tgagctgataccccttggccattgg

SEQ ID NO: 689245 - DNA, 25 bp, Homo sapien
agaagatggaggagtacagcatgca

SEQ ID NO: 689246 - DNA, 25 bp, Homo sapien
tggaggagtacagcatgcagttcat

SEQ ID NO: 689247 - DNA, 25 bp, Homo sapien
cagagaagatggaggagtacagcat

SEQ ID NO: 689248 - DNA, 25 bp, Homo sapien
gatggaggagtacagcatgcagttc

SEQ ID NO: 689249 - DNA, 25 bp, Homo sapien
tttcttcctattcttatgtccttca

SEQ ID NO: 689250 - DNA, 25 bp, Homo sapien
tatgtatgggaaacttctggaaaat

SEQ ID NO: 689251 - DNA, 25 bp, Homo sapien
tcctattcttatgtccttcagtcat

SEQ ID NO: 689252 - DNA, 25 bp, Homo sapien
aaaatgcaatgttggggtgaaggag

SEQ ID NO: 689253 - DNA, 25 bp, Homo sapien
gcccatgtcgctcctttgccaggta

SEQ ID NO: 689254 - DNA, 25 bp, Homo sapien
catgtcgctcctttgccaggtatgt

SEQ ID NO: 689255 - DNA, 25 bp, Homo sapien
ccatgtcgctcctttgccaggtatg

SEQ ID NO: 689256 - DNA, 25 bp, Homo sapien
gggcccatgtcgctcctttgccagg

SEQ ID NO: 689257 - DNA, 25 bp, Homo sapien
caggagatccttagctaatatagtg

SEQ ID NO: 689258 - DNA, 25 bp, Homo sapien
aaaatgtgataaccacccatctgaa

SEQ ID NO: 689259 - DNA, 25 bp, Homo sapien
tgtatgaggctcttgggaacacaat

SEQ ID NO: 689260 - DNA, 25 bp, Homo sapien
cacaatagtgatcgcttcaggagat

SEQ ID NO: 689261 - DNA, 25 bp, Homo sapien
caggacatagaaagtgaaactaagt

SEQ ID NO: 689262 - DNA, 25 bp, Homo sapien
aggacatagaaagtgaaactaagtt

SEQ ID NO: 689263 - DNA, 25 bp, Homo sapien
gggatcctatactgcagccccagga

SEQ ID NO: 689264 - DNA, 25 bp, Homo sapien
tgcagtggtgtcagtgcagcccggg

SEQ ID NO: 689265 - DNA, 25 bp, Homo sapien
gcagcccgggatcctatactgcagc

SEQ ID NO: 689266 - DNA, 25 bp, Homo sapien
tgctcaacgtctgcagctccttggc

SEQ ID NO: 689267 - DNA, 25 bp, Homo sapien
gggatgtgactctaccaggcttcaa

SEQ ID NO: 689268 - DNA, 25 bp, Homo sapien
gacattcctactagagctgcacaag

SEQ ID NO: 689269 - DNA, 25 bp, Homo sapien
ccagggcatgagcttgtagaagaca

SEQ ID NO: 689270 - DNA, 25 bp, Homo sapien
aaagcttggcatggaatgggcacct

SEQ ID NO: 689271 - DNA, 25 bp, Homo sapien
tgctagctaggctcagagcacggac

SEQ ID NO: 689272 - DNA, 25 bp, Homo sapien
tatgctcatgagagtgcaaaaccaa

SEQ ID NO: 689273 - DNA, 25 bp, Homo sapien
cattcatttctaacacggcaagcat

SEQ ID NO: 689274 - DNA, 25 bp, Homo sapien
tacagtggatcctcctgtgtgtgct

SEQ ID NO: 689275 - DNA, 25 bp, Homo sapien
ccaggtgcacatagatcaagggaac

SEQ ID NO: 689276 - DNA, 25 bp, Homo sapien
cagcatccccaggtgcacatagatc

SEQ ID NO: 689277 - DNA, 25 bp, Homo sapien
gcatccccaggtgcacatagatcaa

SEQ ID NO: 689278 - DNA, 25 bp, Homo sapien
tccccaggtgcacatagatcaaggg

SEQ ID NO: 689279 - DNA, 25 bp, Homo sapien
catgtaataaccttgctgtggctct

SEQ ID NO: 689280 - DNA, 25 bp, Homo sapien
gaagctacaggtgagtccaggcctc

SEQ ID NO: 689281 - DNA, 25 bp, Homo sapien
tccaggcctcggtgcaatgcatgct

SEQ ID NO: 689282 - DNA, 25 bp, Homo sapien
agatgggcgagctcactcacaagca

SEQ ID NO: 689283 - DNA, 25 bp, Homo sapien
catgaatgactatctgccaaaggac

SEQ ID NO: 689284 - DNA, 25 bp, Homo sapien
gaaggagcgggtgcttatccgcaat

SEQ ID NO: 689285 - DNA, 25 bp, Homo sapien
taggtgtccgcaaaagggagatgtc

SEQ ID NO: 689286 - DNA, 25 bp, Homo sapien
taaggaacttccactaggtcacaca

SEQ ID NO: 689287 - DNA, 25 bp, Homo sapien
tgcaccaggatgtgctcttccagcc

SEQ ID NO: 689288 - DNA, 25 bp, Homo sapien
gctgcaccaggatgtgctcttccag

SEQ ID NO: 689289 - DNA, 25 bp, Homo sapien
cctgctgcaccaggatgtgctcttc

SEQ ID NO: 689290 - DNA, 25 bp, Homo sapien
tgctgcaccaggatgtgctcttcca

SEQ ID NO: 689291 - DNA, 25 bp, Homo sapien
ggtcacgtgagtgcatgaatgcatg

SEQ ID NO: 689292 - DNA, 25 bp, Homo sapien
cacggagtaggtcacgtgagtgcat

SEQ ID NO: 689293 - DNA, 25 bp, Homo sapien
gagtaggtcacgtgagtgcatgaat

SEQ ID NO: 689294 - DNA, 25 bp, Homo sapien
ctggcacggagtaggtcacgtgagt

SEQ ID NO: 689295 - DNA, 25 bp, Homo sapien
gccagttgcttgcagtccattcaga

SEQ ID NO: 689296 - DNA, 25 bp, Homo sapien
tatttgacttcagaggtgaccactg

SEQ ID NO: 689297 - DNA, 25 bp, Homo sapien
caaggccttgcggtgtaagtctcgg

SEQ ID NO: 689298 - DNA, 25 bp, Homo sapien
cctacctgccgcaatgctgggagac

SEQ ID NO: 689299 - DNA, 25 bp, Homo sapien
ctagattttccagtattgaccaaca

SEQ ID NO: 689300 - DNA, 25 bp, Homo sapien
acagaatcttcccattggctcgttt

SEQ ID NO: 689301 - DNA, 25 bp, Homo sapien
aacagaatcttcccattggctcgtt

SEQ ID NO: 689302 - DNA, 25 bp, Homo sapien
agattttccagtattgaccaacaga

SEQ ID NO: 689303 - DNA, 25 bp, Homo sapien
tcttccatgcgtgcttccgatatcc

SEQ ID NO: 689304 - DNA, 25 bp, Homo sapien
ctcttccatgcgtgcttccgatatc

SEQ ID NO: 689305 - DNA, 25 bp, Homo sapien
cttccatgcgtgcttccgatatccc

SEQ ID NO: 689306 - DNA, 25 bp, Homo sapien
gggagcattctgtgaatgtcctcag

SEQ ID NO: 689307 - DNA, 25 bp, Homo sapien
cattctgtgaatgtcctcagtgatg

SEQ ID NO: 689308 - DNA, 25 bp, Homo sapien
gcattctgtgaatgtcctcagtgat

SEQ ID NO: 689309 - DNA, 25 bp, Homo sapien
gagcattctgtgaatgtcctcagtg

SEQ ID NO: 689310 - DNA, 25 bp, Homo sapien
aaagctccttgcaagagggcgatgg

SEQ ID NO: 689311 - DNA, 25 bp, Homo sapien
tcttggtgtcctctatcctactctg

SEQ ID NO: 689312 - DNA, 25 bp, Homo sapien
tcagacactcttggtgtcctctatc

SEQ ID NO: 689313 - DNA, 25 bp, Homo sapien
tgtaaagctccttgcaagagggcga

SEQ ID NO: 689314 - DNA, 25 bp, Homo sapien
atcactgcattgtggggagaaccca

SEQ ID NO: 689315 - DNA, 25 bp, Homo sapien
catggagtaacaggttcttgagcac

SEQ ID NO: 689316 - DNA, 25 bp, Homo sapien
ggcggaagctccgtgctgggaaaga

SEQ ID NO: 689317 - DNA, 25 bp, Homo sapien
cagtgggaacatagagcctccaaca

SEQ ID NO: 689318 - DNA, 25 bp, Homo sapien
ggaggttggaggtttgacgaccagc

SEQ ID NO: 689319 - DNA, 25 bp, Homo sapien
tcaacttcggcattgaaggatctgg

SEQ ID NO: 689320 - DNA, 25 bp, Homo sapien
ttcggcattgaaggatctggcgcag

SEQ ID NO: 689321 - DNA, 25 bp, Homo sapien
ggaggtttgacgaccagcggctttc

SEQ ID NO: 689322 - DNA, 25 bp, Homo sapien
tgtgggcatctgtctacacagctct

SEQ ID NO: 689323 - DNA, 25 bp, Homo sapien
caccgtgaaagcaaacaaccctcgg

SEQ ID NO: 689324 - DNA, 25 bp, Homo sapien
acaaccctcggctgtgttgggagac

SEQ ID NO: 689325 - DNA, 25 bp, Homo sapien
gtggccctggaaccaccgtgaaagc

SEQ ID NO: 689326 - DNA, 25 bp, Homo sapien
tgaaagcaaacaaccctcggctgtg

SEQ ID NO: 689327 - DNA, 25 bp, Homo sapien
gatgtccgtcatcaacgcctgcctg

SEQ ID NO: 689328 - DNA, 25 bp, Homo sapien
gctggcccagaatgggcgctggatg

SEQ ID NO: 689329 - DNA, 25 bp, Homo sapien
gaatgggcgctggatgctgcagatg

SEQ ID NO: 689330 - DNA, 25 bp, Homo sapien
cagatgtccgtcatcaacgcctgcc

SEQ ID NO: 689331 - DNA, 25 bp, Homo sapien
tgggcctcccttctaaagctgcagc

SEQ ID NO: 689332 - DNA, 25 bp, Homo sapien
cctcccttctaaagctgcagcctgt

SEQ ID NO: 689333 - DNA, 25 bp, Homo sapien
gggcctcccttctaaagctgcagcc

SEQ ID NO: 689334 - DNA, 25 bp, Homo sapien
gcctcccttctaaagctgcagcctg

SEQ ID NO: 689335 - DNA, 25 bp, Homo sapien
tgtcttcagagacaacgtgtctgtc

SEQ ID NO: 689336 - DNA, 25 bp, Homo sapien
caggaaaggtgcacccctggaaagc

SEQ ID NO: 689337 - DNA, 25 bp, Homo sapien
tgaggaaagtctctctcggaggccc

SEQ ID NO: 689338 - DNA, 25 bp, Homo sapien
gaaacctgccggcattgcttgtctt

SEQ ID NO: 689339 - DNA, 25 bp, Homo sapien
gtgtggttataagcaaaaatgtctc

SEQ ID NO: 689340 - DNA, 25 bp, Homo sapien
aagcttttcatcaccgggcaacata

SEQ ID NO: 689341 - DNA, 25 bp, Homo sapien
tgtgtggatttgtctccctgtaagc

SEQ ID NO: 689342 - DNA, 25 bp, Homo sapien
agaagaaaactctgtgtgcattcat

SEQ ID NO: 689343 - DNA, 25 bp, Homo sapien
ggcaggcagtgcctttcactaggaa

SEQ ID NO: 689344 - DNA, 25 bp, Homo sapien
cagtgcctttcactaggaaagaagg

SEQ ID NO: 689345 - DNA, 25 bp, Homo sapien
tgtctttgtcacacgcacccccttt

SEQ ID NO: 689346 - DNA, 25 bp, Homo sapien
caggcagtgcctttcactaggaaag

SEQ ID NO: 689347 - DNA, 25 bp, Homo sapien
ttctcccgggcctggatacacaggt

SEQ ID NO: 689348 - DNA, 25 bp, Homo sapien
accggtctccccttgcagggaggcg

SEQ ID NO: 689349 - DNA, 25 bp, Homo sapien
agggaggcgctctgtcttctcccgg

SEQ ID NO: 689350 - DNA, 25 bp, Homo sapien
tgtcgcagcaggagttcaatgtacc

SEQ ID NO: 689351 - DNA, 25 bp, Homo sapien
gggccacagtctcctaggatgctcc

SEQ ID NO: 689352 - DNA, 25 bp, Homo sapien
tatctcggtgccaggcaagttggtc

SEQ ID NO: 689353 - DNA, 25 bp, Homo sapien
gaggggaccctccacttcactgaac

SEQ ID NO: 689354 - DNA, 25 bp, Homo sapien
ccagtcccctgaatcccttgtctct

SEQ ID NO: 689355 - DNA, 25 bp, Homo sapien
aatcaggggcgatgacaacaaccat

SEQ ID NO: 689356 - DNA, 25 bp, Homo sapien
caatcaggggcgatgacaacaacca

SEQ ID NO: 689357 - DNA, 25 bp, Homo sapien
tcaatcaggggcgatgacaacaacc

SEQ ID NO: 689358 - DNA, 25 bp, Homo sapien
tcaggggcgatgacaacaaccatga

SEQ ID NO: 689359 - DNA, 25 bp, Homo sapien
gcgggcggaactgccggcagcacag

SEQ ID NO: 689360 - DNA, 25 bp, Homo sapien
gctcactcgctgcacaacagcgcca

SEQ ID NO: 689361 - DNA, 25 bp, Homo sapien
gagctgccaggtctaagccgaccct

SEQ ID NO: 689362 - DNA, 25 bp, Homo sapien
ggatcccgaatccctgcttggctcg

SEQ ID NO: 689363 - DNA, 25 bp, Homo sapien
tgtggtgtctttgtatacaatgttc

SEQ ID NO: 689364 - DNA, 25 bp, Homo sapien
gggacacagtgaaccccacttagga

SEQ ID NO: 689365 - DNA, 25 bp, Homo sapien
cttctcgtagatgttcagattccaa

SEQ ID NO: 689366 - DNA, 25 bp, Homo sapien
ccaagagaccttgatttcagggaca

SEQ ID NO: 689367 - DNA, 25 bp, Homo sapien
ggcagcagtccaaacggtggaggga

SEQ ID NO: 689368 - DNA, 25 bp, Homo sapien
gcagcagtccaaacggtggagggat

SEQ ID NO: 689369 - DNA, 25 bp, Homo sapien
gcagtccaaacggtggagggatcat

SEQ ID NO: 689370 - DNA, 25 bp, Homo sapien
cagcagtccaaacggtggagggatc

SEQ ID NO: 689371 - DNA, 25 bp, Homo sapien
gaactttctctgatcgtgcacaccg

SEQ ID NO: 689372 - DNA, 25 bp, Homo sapien
tcctcattagcatgggaagtttggg

SEQ ID NO: 689373 - DNA, 25 bp, Homo sapien
tgctaggtacatgcggtctaagtcc

SEQ ID NO: 689374 - DNA, 25 bp, Homo sapien
gaggaccaagcagacataggaggaa

SEQ ID NO: 689375 - DNA, 25 bp, Homo sapien
gtgtttctgcagtgccatcaccagg

SEQ ID NO: 689376 - DNA, 25 bp, Homo sapien
cagaacaagggcgtcctcagcttcc

SEQ ID NO: 689377 - DNA, 25 bp, Homo sapien
taagtgtcaggaaagaacgtccctc

SEQ ID NO: 689378 - DNA, 25 bp, Homo sapien
gccttgttaaggagacgccagtgtt

SEQ ID NO: 689379 - DNA, 25 bp, Homo sapien
acctggcactgtgaccgtcagacac

SEQ ID NO: 689380 - DNA, 25 bp, Homo sapien
cggtggacaccgagcaaaaataagg

SEQ ID NO: 689381 - DNA, 25 bp, Homo sapien
aatgagagcatagcctgccacctgg

SEQ ID NO: 689382 - DNA, 25 bp, Homo sapien
catctggaagtagcgagccatgggc

SEQ ID NO: 689383 - DNA, 25 bp, Homo sapien
tgtttgcaaggctgtcacccaaggc

SEQ ID NO: 689384 - DNA, 25 bp, Homo sapien
gaaactgctggaccttgtttgcaag

SEQ ID NO: 689385 - DNA, 25 bp, Homo sapien
cagcctgggaaagtgttctagtgcc

SEQ ID NO: 689386 - DNA, 25 bp, Homo sapien
gacccgaatgatccagaaactgctg

SEQ ID NO: 689387 - DNA, 25 bp, Homo sapien
tcagatgatcttggacgtggtttgt

SEQ ID NO: 689388 - DNA, 25 bp, Homo sapien
atttcctacaagtcagatgatcttg

SEQ ID NO: 689389 - DNA, 25 bp, Homo sapien
gcagatgttgccaggttggctgcca

SEQ ID NO: 689390 - DNA, 25 bp, Homo sapien
tggacgtggtttgtgatcactgcag

SEQ ID NO: 689391 - DNA, 25 bp, Homo sapien
tcatgggggactcgtgctctgtgtc

SEQ ID NO: 689392 - DNA, 25 bp, Homo sapien
gccctgcagcacctgtcatggggga

SEQ ID NO: 689393 - DNA, 25 bp, Homo sapien
gctctgtgtcacgtagtagctgctc

SEQ ID NO: 689394 - DNA, 25 bp, Homo sapien
agagttgttgcagggctcggtgtgg

SEQ ID NO: 689395 - DNA, 25 bp, Homo sapien
tatgatagggcatgtcggtgcacgt

SEQ ID NO: 689396 - DNA, 25 bp, Homo sapien
cttttatgatagggcatgtcggtgc

SEQ ID NO: 689397 - DNA, 25 bp, Homo sapien
catgtcggtgcacgtggcactgcac

SEQ ID NO: 689398 - DNA, 25 bp, Homo sapien
tgtcggtgcacgtggcactgcacag

SEQ ID NO: 689399 - DNA, 25 bp, Homo sapien
ttctggagccttctgcccttttaat

SEQ ID NO: 689400 - DNA, 25 bp, Homo sapien
tgataccttggtgtcgccaatgagt

SEQ ID NO: 689401 - DNA, 25 bp, Homo sapien
ttgataccttggtgtcgccaatgag

SEQ ID NO: 689402 - DNA, 25 bp, Homo sapien
gttgataccttggtgtcgccaatga

SEQ ID NO: 689403 - DNA, 25 bp, Homo sapien
tttcccaaacactggcaccaagaag

SEQ ID NO: 689404 - DNA, 25 bp, Homo sapien
aaaacaaaagtctccgatgcacaag

SEQ ID NO: 689405 - DNA, 25 bp, Homo sapien
tctccgatgcacaagctccctagag

SEQ ID NO: 689406 - DNA, 25 bp, Homo sapien
cccagaagcaggtcttccagtttct

SEQ ID NO: 689407 - DNA, 25 bp, Homo sapien
tgccacgacttccaacagatggttg

SEQ ID NO: 689408 - DNA, 25 bp, Homo sapien
ttccagggttggaaagtacttctgc

SEQ ID NO: 689409 - DNA, 25 bp, Homo sapien
gtttcttcctatacctctgtcctgg

SEQ ID NO: 689410 - DNA, 25 bp, Homo sapien
ttcctgaatgccctggcgactcctg

SEQ ID NO: 689411 - DNA, 25 bp, Homo sapien
agagcacaatggctggactcaggtg

SEQ ID NO: 689412 - DNA, 25 bp, Homo sapien
ggctggactcaggtgtcagatgccc

SEQ ID NO: 689413 - DNA, 25 bp, Homo sapien
gttaatcagttgctccagatctgct

SEQ ID NO: 689414 - DNA, 25 bp, Homo sapien
tcagttgctccagatctgctggttg

SEQ ID NO: 689415 - DNA, 25 bp, Homo sapien
gcattttcctccgactggaattcag

SEQ ID NO: 689416 - DNA, 25 bp, Homo sapien
agttttcctctatgcgggctggctc

SEQ ID NO: 689417 - DNA, 25 bp, Homo sapien
gttttcctctatgcgggctggctct

SEQ ID NO: 689418 - DNA, 25 bp, Homo sapien
ttttcctctatgcgggctggctctg

SEQ ID NO: 689419 - DNA, 25 bp, Homo sapien
cagttttcctctatgcgggctggct

SEQ ID NO: 689420 - DNA, 25 bp, Homo sapien
caagtggctgcgtggtcctgtctcg

SEQ ID NO: 689421 - DNA, 25 bp, Homo sapien
ttgtgacatctctgcgagctcccct

SEQ ID NO: 689422 - DNA, 25 bp, Homo sapien
tccgggtgttgtcccattcagcctt

SEQ ID NO: 689423 - DNA, 25 bp, Homo sapien
actgccagcaagtggctgcgtggtc

SEQ ID NO: 689424 - DNA, 25 bp, Homo sapien
gatggctgtcagagaaacgcctgct

SEQ ID NO: 689425 - DNA, 25 bp, Homo sapien
agaaacgcctgctttaattagttct

SEQ ID NO: 689426 - DNA, 25 bp, Homo sapien
ctgtgatggctgtcagagaaacgcc

SEQ ID NO: 689427 - DNA, 25 bp, Homo sapien
gctctcttgagcaatctgtgatggc

SEQ ID NO: 689428 - DNA, 25 bp, Homo sapien
caggccgggaggacatatcagagct

SEQ ID NO: 689429 - DNA, 25 bp, Homo sapien
cttccctctagggtgccagcagcag

SEQ ID NO: 689430 - DNA, 25 bp, Homo sapien
gactatagcaccaatcaggccgtgg

SEQ ID NO: 689431 - DNA, 25 bp, Homo sapien
cctgtgtggccgtgctgcccagcag

SEQ ID NO: 689432 - DNA, 25 bp, Homo sapien
ggtctcgcacgccaggaagatgtcc

SEQ ID NO: 689433 - DNA, 25 bp, Homo sapien
tccagtgtgatggagtgtgagatct

SEQ ID NO: 689434 - DNA, 25 bp, Homo sapien
cagctcatgggtctcgcacgccagg

SEQ ID NO: 689435 - DNA, 25 bp, Homo sapien
tcatgggtctcgcacgccaggaaga

SEQ ID NO: 689436 - DNA, 25 bp, Homo sapien
cctcggcccacacctttataaactg

SEQ ID NO: 689437 - DNA, 25 bp, Homo sapien
tgaccagtgtgaccccctcggccca

SEQ ID NO: 689438 - DNA, 25 bp, Homo sapien
ggacttgcccgtgaccagtgtgacc

SEQ ID NO: 689439 - DNA, 25 bp, Homo sapien
ctcggcccacacctttataaactgt

SEQ ID NO: 689440 - DNA, 25 bp, Homo sapien
gaacagatatggaggtgctggtaca

SEQ ID NO: 689441 - DNA, 25 bp, Homo sapien
catctggaactaaaaggctgtggcc

SEQ ID NO: 689442 - DNA, 25 bp, Homo sapien
ccccttcgacgggaacagatatgga

SEQ ID NO: 689443 - DNA, 25 bp, Homo sapien
tgactcgggcgatggtgataccctc

SEQ ID NO: 689444 - DNA, 25 bp, Homo sapien
ggatgtttgtgacattgccagatga

SEQ ID NO: 689445 - DNA, 25 bp, Homo sapien
gcccttcacaccagctgcaacagtg

SEQ ID NO: 689446 - DNA, 25 bp, Homo sapien
agatggtaactaacggccctgccag

SEQ ID NO: 689447 - DNA, 25 bp, Homo sapien
cagatgagatggtaactaacggccc

SEQ ID NO: 689448 - DNA, 25 bp, Homo sapien
tgtggccgcaaacgggtccaccagg

SEQ ID NO: 689449 - DNA, 25 bp, Homo sapien
cacggcggcactgtggccgcaaacg

SEQ ID NO: 689450 - DNA, 25 bp, Homo sapien
ctccaatccccacggcggcactgtg

SEQ ID NO: 689451 - DNA, 25 bp, Homo sapien
atgcacaagtaaaatgtctccccac

SEQ ID NO: 689452 - DNA, 25 bp, Homo sapien
tcttggatgaggctcgtggtctgcc

SEQ ID NO: 689453 - DNA, 25 bp, Homo sapien
gatgtcaccagttgaccaccagtgt

SEQ ID NO: 689454 - DNA, 25 bp, Homo sapien
actgccctcggctcttgtcagatgt

SEQ ID NO: 689455 - DNA, 25 bp, Homo sapien
cgtggtctgccccatgtagggtagc

SEQ ID NO: 689456 - DNA, 25 bp, Homo sapien
gcagtgtgaatgcatcgcccagtcg

SEQ ID NO: 689457 - DNA, 25 bp, Homo sapien
gaatgcatcgcccagtcgcaggcat

SEQ ID NO: 689458 - DNA, 25 bp, Homo sapien
caaggcagtgtgaatgcatcgccca

SEQ ID NO: 689459 - DNA, 25 bp, Homo sapien
gtcccagacccaaggcagtgtgaat

SEQ ID NO: 689460 - DNA, 25 bp, Homo sapien
ctagtcaaggctgcctttgttcacc

SEQ ID NO: 689461 - DNA, 25 bp, Homo sapien
cagccctctctggaagtccgaatgg

SEQ ID NO: 689462 - DNA, 25 bp, Homo sapien
ctttttagccggcaactctccagcg

SEQ ID NO: 689463 - DNA, 25 bp, Homo sapien
gtccgaatggattggatggcattgt

SEQ ID NO: 689464 - DNA, 25 bp, Homo sapien
tttggaggggactgccgtctccgaa

SEQ ID NO: 689465 - DNA, 25 bp, Homo sapien
tgccgtctccgaattcagcacgcgg

SEQ ID NO: 689466 - DNA, 25 bp, Homo sapien
ccgaattcagcacgcgggtcgtgga

SEQ ID NO: 689467 - DNA, 25 bp, Homo sapien
gggactgccgtctccgaattcagca

SEQ ID NO: 689468 - DNA, 25 bp, Homo sapien
ctgtgtacacgaatgctcttctccc

SEQ ID NO: 689469 - DNA, 25 bp, Homo sapien
tgtgtacacgaatgctcttctcccg

SEQ ID NO: 689470 - DNA, 25 bp, Homo sapien
gctcttctcccgcaatcatttcctg

SEQ ID NO: 689471 - DNA, 25 bp, Homo sapien
cttctcccgcaatcatttcctgacc

SEQ ID NO: 689472 - DNA, 25 bp, Homo sapien
gggccttatctcaggtatgacctta

SEQ ID NO: 689473 - DNA, 25 bp, Homo sapien
tgcaactgcaaaggttctatttcca

SEQ ID NO: 689474 - DNA, 25 bp, Homo sapien
cattctctctggatcggcacaatat

SEQ ID NO: 689475 - DNA, 25 bp, Homo sapien
caggtatgaccttatcttgcctaat

SEQ ID NO: 689476 - DNA, 25 bp, Homo sapien
ccatgcttcttgggggtatgctgac

SEQ ID NO: 689477 - DNA, 25 bp, Homo sapien
tcttgggggtatgctgactggagga

SEQ ID NO: 689478 - DNA, 25 bp, Homo sapien
ggaattctatggtgaccatgcttct

SEQ ID NO: 689479 - DNA, 25 bp, Homo sapien
acttgggggaattctatggtgacca

SEQ ID NO: 689480 - DNA, 25 bp, Homo sapien
tagcctagcgcctacttaggagtga

SEQ ID NO: 689481 - DNA, 25 bp, Homo sapien
ttaagcctttgcatcctgatagcct

SEQ ID NO: 689482 - DNA, 25 bp, Homo sapien
agtctccagtcttatcaaggtctct

SEQ ID NO: 689483 - DNA, 25 bp, Homo sapien
tttgcatcctgatagcctagcgcct

SEQ ID NO: 689484 - DNA, 25 bp, Homo sapien
tgtttccatacaattgagggccatt

SEQ ID NO: 689485 - DNA, 25 bp, Homo sapien
caccagacggataaaagactgactg

SEQ ID NO: 689486 - DNA, 25 bp, Homo sapien
taaatgcgcatggaattttccggtg

SEQ ID NO: 689487 - DNA, 25 bp, Homo sapien
tacacagtgtgcaatccaagtactg

SEQ ID NO: 689488 - DNA, 25 bp, Homo sapien
ctctcctcacttgtagtaggaaaat

SEQ ID NO: 689489 - DNA, 25 bp, Homo sapien
ctcacttgtagtaggaaaataattg

SEQ ID NO: 689490 - DNA, 25 bp, Homo sapien
caaatccacatccatacagttgaga

SEQ ID NO: 689491 - DNA, 25 bp, Homo sapien
aatccacatccatacagttgagaag

SEQ ID NO: 689492 - DNA, 25 bp, Homo sapien
taaaggaccgtggatagatgttgga

SEQ ID NO: 689493 - DNA, 25 bp, Homo sapien
tttgcagcatcctcactagcctccc

SEQ ID NO: 689494 - DNA, 25 bp, Homo sapien
gtgaagtaaaggaccgtggatagat

SEQ ID NO: 689495 - DNA, 25 bp, Homo sapien
agatgttggattgcaccatacaggg

SEQ ID NO: 689496 - DNA, 25 bp, Homo sapien
gaggccaatgctcagccaaatccac

SEQ ID NO: 689497 - DNA, 25 bp, Homo sapien
catccaacaaccagcatctgtgtga

SEQ ID NO: 689498 - DNA, 25 bp, Homo sapien
gatcaggtttccctctagcggcggc

SEQ ID NO: 689499 - DNA, 25 bp, Homo sapien
gactgcggccgaggcgctgtaataa

SEQ ID NO: 689500 - DNA, 25 bp, Homo sapien
tctctggaagaaatgcgcccgatgt

SEQ ID NO: 689501 - DNA, 25 bp, Homo sapien
taggaatcgcgcacgggatcaggtt

SEQ ID NO: 689502 - DNA, 25 bp, Homo sapien
tggacacacgtgctctagtttatgt

SEQ ID NO: 689503 - DNA, 25 bp, Homo sapien
cacacgtgctctagtttatgtgcca

SEQ ID NO: 689504 - DNA, 25 bp, Homo sapien
cagccctgttgctggacacacgtgc

SEQ ID NO: 689505 - DNA, 25 bp, Homo sapien
tgttgctggacacacgtgctctagt

SEQ ID NO: 689506 - DNA, 25 bp, Homo sapien
ctgagtccaggtcgcctcgctatgc

SEQ ID NO: 689507 - DNA, 25 bp, Homo sapien
gatggcgcccgcgctgcaggcagag

SEQ ID NO: 689508 - DNA, 25 bp, Homo sapien
atggcgcccgcgctgcaggcagagc

SEQ ID NO: 689509 - DNA, 25 bp, Homo sapien
gcctcgctatgcacgccctggccct

SEQ ID NO: 689510 - DNA, 25 bp, Homo sapien
caggctctggttgattagcaatgtc

SEQ ID NO: 689511 - DNA, 25 bp, Homo sapien
tgaacttggccatgcagaagctgcc

SEQ ID NO: 689512 - DNA, 25 bp, Homo sapien
tagcaatgtctgcaaaggctgaggg

SEQ ID NO: 689513 - DNA, 25 bp, Homo sapien
ctgggacccaggctctggttgatta

SEQ ID NO: 689514 - DNA, 25 bp, Homo sapien
ggctgctgtcaagagcatggatcct

SEQ ID NO: 689515 - DNA, 25 bp, Homo sapien
tggctgctgtcaagagcatggatcc

SEQ ID NO: 689516 - DNA, 25 bp, Homo sapien
gctgctgtcaagagcatggatcctg

SEQ ID NO: 689517 - DNA, 25 bp, Homo sapien
tgggcaggtgggcggggcctgccat

SEQ ID NO: 689518 - DNA, 25 bp, Homo sapien
ctgaggctgggcaggtgggcggggc

SEQ ID NO: 689519 - DNA, 25 bp, Homo sapien
gaggctgggcaggtgggcggggcct

SEQ ID NO: 689520 - DNA, 25 bp, Homo sapien
gctgggcaggtgggcggggcctgcc

SEQ ID NO: 689521 - DNA, 25 bp, Homo sapien
gtgataaaccggtcacaaaggcgtc

SEQ ID NO: 689522 - DNA, 25 bp, Homo sapien
acagagcccggtttcgtgacagcgt

SEQ ID NO: 689523 - DNA, 25 bp, Homo sapien
ataaataacaaagcgaggccgcgca

SEQ ID NO: 689524 - DNA, 25 bp, Homo sapien
tgcagccggcgaggctattgtctcc

SEQ ID NO: 689525 - DNA, 25 bp, Homo sapien
cccatgggcgttgtgtagagaaggt

SEQ ID NO: 689526 - DNA, 25 bp, Homo sapien
ctttggtgcccatgggcgttgtgta

SEQ ID NO: 689527 - DNA, 25 bp, Homo sapien
tctgctttggtgcccatgggcgttg

SEQ ID NO: 689528 - DNA, 25 bp, Homo sapien
tgtgtagagaaggtgtcctgttttg

SEQ ID NO: 689529 - DNA, 25 bp, Homo sapien
gcttgtatctgtgaccgaatacctc

SEQ ID NO: 689530 - DNA, 25 bp, Homo sapien
gcatttggagggtgcaccgcttgta

SEQ ID NO: 689531 - DNA, 25 bp, Homo sapien
gctggttctagatctgggtggcatt

SEQ ID NO: 689532 - DNA, 25 bp, Homo sapien
ctctgttcgtttctggctggttcta

SEQ ID NO: 689533 - DNA, 25 bp, Homo sapien
attttagactcacgtgggggttgca

SEQ ID NO: 689534 - DNA, 25 bp, Homo sapien
aaaccagaggccttagcgaattcca

SEQ ID NO: 689535 - DNA, 25 bp, Homo sapien
tgggggttgcagagcttccctcaat

SEQ ID NO: 689536 - DNA, 25 bp, Homo sapien
accaactaaaccagaggccttagcg

SEQ ID NO: 689537 - DNA, 25 bp, Homo sapien
tgtggccttccgtcttcccactgac

SEQ ID NO: 689538 - DNA, 25 bp, Homo sapien
gtcctcaatacagttgcagtgggtg

SEQ ID NO: 689539 - DNA, 25 bp, Homo sapien
gtggcaccgaatgagtgtcgtgctt

SEQ ID NO: 689540 - DNA, 25 bp, Homo sapien
cttgtcaagacagccactgtggcct

SEQ ID NO: 689541 - DNA, 25 bp, Homo sapien
actccccgtgatggcattaaatgac

SEQ ID NO: 689542 - DNA, 25 bp, Homo sapien
taaatgacacccgtgggtgtggctg

SEQ ID NO: 689543 - DNA, 25 bp, Homo sapien
gaagcacccaactccccgtgatggc

SEQ ID NO: 689544 - DNA, 25 bp, Homo sapien
tggcattaaatgacacccgtgggtg

SEQ ID NO: 689545 - DNA, 25 bp, Homo sapien
ctggcggcctctcgtctaatgctac

SEQ ID NO: 689546 - DNA, 25 bp, Homo sapien
gactgtatcatctgggctgtggctg

SEQ ID NO: 689547 - DNA, 25 bp, Homo sapien
tgtggtgtacgggacgtgtggggac

SEQ ID NO: 689548 - DNA, 25 bp, Homo sapien
ggcctctcgtctaatgctaccacat

SEQ ID NO: 689549 - DNA, 25 bp, Homo sapien
ttaaatgcgtgtcttaagagccaac

SEQ ID NO: 689550 - DNA, 25 bp, Homo sapien
agagttgccacgtggatttgcaggc

SEQ ID NO: 689551 - DNA, 25 bp, Homo sapien
tgtgtgcaggcttttcatgatgccg

SEQ ID NO: 689552 - DNA, 25 bp, Homo sapien
cgtgtcttaagagccaacttctctg

SEQ ID NO: 689553 - DNA, 25 bp, Homo sapien
tggtgcatactaaggagcagctcct

SEQ ID NO: 689554 - DNA, 25 bp, Homo sapien
gggtttgcacattcaaacatgggcc

SEQ ID NO: 689555 - DNA, 25 bp, Homo sapien
cgtttgtattccagccagcattgct

SEQ ID NO: 689556 - DNA, 25 bp, Homo sapien
aacatgggccgtttgtattccagcc

SEQ ID NO: 689557 - DNA, 25 bp, Homo sapien
tgtctgttgaacctctcactgccat

SEQ ID NO: 689558 - DNA, 25 bp, Homo sapien
ggccccctcatgcttggcctttgag

SEQ ID NO: 689559 - DNA, 25 bp, Homo sapien
gagaaggcttgtctgttgaacctct

SEQ ID NO: 689560 - DNA, 25 bp, Homo sapien
ggcttgtctgttgaacctctcactg

SEQ ID NO: 689561 - DNA, 25 bp, Homo sapien
ttttcttcctcacctctcttaccat

SEQ ID NO: 689562 - DNA, 25 bp, Homo sapien
tcctcctttttcttcctcacctctc

SEQ ID NO: 689563 - DNA, 25 bp, Homo sapien
tcctttttcttcctcacctctctta

SEQ ID NO: 689564 - DNA, 25 bp, Homo sapien
cttggcattcaagcctcttccaggc

SEQ ID NO: 689565 - DNA, 25 bp, Homo sapien
gggtcaaatccagtgtgtgcagtgc

SEQ ID NO: 689566 - DNA, 25 bp, Homo sapien
agggtcaaatccagtgtgtgcagtg

SEQ ID NO: 689567 - DNA, 25 bp, Homo sapien
ggcacagtgctatcttgaagaccat

SEQ ID NO: 689568 - DNA, 25 bp, Homo sapien
gaagaccataacatctctcgagcag

SEQ ID NO: 689569 - DNA, 25 bp, Homo sapien
tctgcaggcccgtgttgtgtccata

SEQ ID NO: 689570 - DNA, 25 bp, Homo sapien
tagcatatctggtccgaaaagtcgc

SEQ ID NO: 689571 - DNA, 25 bp, Homo sapien
gtgtttgcaccttccagagtctctc

SEQ ID NO: 689572 - DNA, 25 bp, Homo sapien
ggaacctggcactactgttattcag

SEQ ID NO: 689573 - DNA, 25 bp, Homo sapien
gggtggctgctaatgtgtttgcacc

SEQ ID NO: 689574 - DNA, 25 bp, Homo sapien
cctctaatgcctcagaggtggcaga

SEQ ID NO: 689575 - DNA, 25 bp, Homo sapien
catccttcccctcgtgcaaagcatg

SEQ ID NO: 689576 - DNA, 25 bp, Homo sapien
cttggggagacctagcccatccttc

SEQ ID NO: 689577 - DNA, 25 bp, Homo sapien
cccctcgtgcaaagcatgctcagga

SEQ ID NO: 689578 - DNA, 25 bp, Homo sapien
ggagtcacagtcttgctcccatctg

SEQ ID NO: 689579 - DNA, 25 bp, Homo sapien
ggagtgtgtatgttcgcagggcgag

SEQ ID NO: 689580 - DNA, 25 bp, Homo sapien
gggagcaccccacgggtctgcgatc

SEQ ID NO: 689581 - DNA, 25 bp, Homo sapien
aaatcggagcctggttgggactcag

SEQ ID NO: 689582 - DNA, 25 bp, Homo sapien
gctcctgtggtagcagccgtgctgg

SEQ ID NO: 689583 - DNA, 25 bp, Homo sapien
ccagtccccctgtggacgggtatgt

SEQ ID NO: 689584 - DNA, 25 bp, Homo sapien
gtatgtaggtcggtatgagtctctt

SEQ ID NO: 689585 - DNA, 25 bp, Homo sapien
cggtatgagtctcttttacaacaaa

SEQ ID NO: 689586 - DNA, 25 bp, Homo sapien
atgagcttcctaggacgttcatctt

SEQ ID NO: 689587 - DNA, 25 bp, Homo sapien
catggccgtttcatggacaaggaag

SEQ ID NO: 689588 - DNA, 25 bp, Homo sapien
acatggccgtttcatggacaaggaa

SEQ ID NO: 689589 - DNA, 25 bp, Homo sapien
tggccgtttcatggacaaggaaggg

SEQ ID NO: 689590 - DNA, 25 bp, Homo sapien
aacatggccgtttcatggacaagga

SEQ ID NO: 689591 - DNA, 25 bp, Homo sapien
aagcgggattgcgatggctggtccc

SEQ ID NO: 689592 - DNA, 25 bp, Homo sapien
cagcttgggaactgcagccatgagg

SEQ ID NO: 689593 - DNA, 25 bp, Homo sapien
attgcgatggctggtcccgttgccc

SEQ ID NO: 689594 - DNA, 25 bp, Homo sapien
ccctggctctgtgggaagcgggatt

SEQ ID NO: 689595 - DNA, 25 bp, Homo sapien
cctgcaagggcattggaggtctcga

SEQ ID NO: 689596 - DNA, 25 bp, Homo sapien
accttcaggaccgccattcgggcat

SEQ ID NO: 689597 - DNA, 25 bp, Homo sapien
gggaccctgcaagggcattggaggt

SEQ ID NO: 689598 - DNA, 25 bp, Homo sapien
tggaggtctcgaggtttttacctgc

SEQ ID NO: 689599 - DNA, 25 bp, Homo sapien
gggagggtagagcctcgcagctgca

SEQ ID NO: 689600 - DNA, 25 bp, Homo sapien
ggagggtagagcctcgcagctgcat

SEQ ID NO: 689601 - DNA, 25 bp, Homo sapien
ggggagggtagagcctcgcagctgc

SEQ ID NO: 689602 - DNA, 25 bp, Homo sapien
atgtctgaggctagccaccatgagc

SEQ ID NO: 689603 - DNA, 25 bp, Homo sapien
cagtgcaggcaaagacctgtgatgt

SEQ ID NO: 689604 - DNA, 25 bp, Homo sapien
tagccaccatgagcaccgcctggtg

SEQ ID NO: 689605 - DNA, 25 bp, Homo sapien
tcgggaagtccttgagtcagtgcag

SEQ ID NO: 689606 - DNA, 25 bp, Homo sapien
gaagaagatgattgtggagcagccc

SEQ ID NO: 689607 - DNA, 25 bp, Homo sapien
agaagatgattgtggagcagcccga

SEQ ID NO: 689608 - DNA, 25 bp, Homo sapien
gaagatgattgtggagcagcccgag

SEQ ID NO: 689609 - DNA, 25 bp, Homo sapien
aagaagatgattgtggagcagcccg

SEQ ID NO: 689610 - DNA, 25 bp, Homo sapien
ctgtgtgtttgtgtgttgggcagcg

SEQ ID NO: 689611 - DNA, 25 bp, Homo sapien
gaagatggccggcaggcaaggccga

SEQ ID NO: 689612 - DNA, 25 bp, Homo sapien
gagaagaagatggccggcaggcaag

SEQ ID NO: 689613 - DNA, 25 bp, Homo sapien
ccgagaggagctcatcaagaagggg

SEQ ID NO: 689614 - DNA, 25 bp, Homo sapien
aagaagatggccggcaggcaaggcc

SEQ ID NO: 689615 - DNA, 25 bp, Homo sapien
tgggtgggatctgcgaggagcccga

SEQ ID NO: 689616 - DNA, 25 bp, Homo sapien
gggcggccacagtgcgagtgggtgg

SEQ ID NO: 689617 - DNA, 25 bp, Homo sapien
ggatctgcgaggagcccgagtgtct

SEQ ID NO: 689618 - DNA, 25 bp, Homo sapien
gtgcgagtgggtgggatctgcgagg

SEQ ID NO: 689619 - DNA, 25 bp, Homo sapien
caggggaggatcaggcttgagggct

SEQ ID NO: 689620 - DNA, 25 bp, Homo sapien
gctcaggggaggatcaggcttgagg

SEQ ID NO: 689621 - DNA, 25 bp, Homo sapien
tctggggtaggcacgcagtgccgcc

SEQ ID NO: 689622 - DNA, 25 bp, Homo sapien
ctctggggtaggcacgcagtgccgc

SEQ ID NO: 689623 - DNA, 25 bp, Homo sapien
tgtggatgtgaggactctccagggt

SEQ ID NO: 689624 - DNA, 25 bp, Homo sapien
gtggatgtgaggactctccagggtg

SEQ ID NO: 689625 - DNA, 25 bp, Homo sapien
ctgtggatgtgaggactctccaggg

SEQ ID NO: 689626 - DNA, 25 bp, Homo sapien
gatgtgaggactctccagggtgagg

SEQ ID NO: 689627 - DNA, 25 bp, Homo sapien
tgtggccggccaggctcatgagcct

SEQ ID NO: 689628 - DNA, 25 bp, Homo sapien
cctgtggccggccaggctcatgagc

SEQ ID NO: 689629 - DNA, 25 bp, Homo sapien
cttcagccaccgccttccactgctg

SEQ ID NO: 689630 - DNA, 25 bp, Homo sapien
tggccggccaggctcatgagcctcc

SEQ ID NO: 689631 - DNA, 25 bp, Homo sapien
tttttatagtggcagttgtgatgat

SEQ ID NO: 689632 - DNA, 25 bp, Homo sapien
ttttatagtggcagttgtgatgatt

SEQ ID NO: 689633 - DNA, 25 bp, Homo sapien
ctttttatagtggcagttgtgatga

SEQ ID NO: 689634 - DNA, 25 bp, Homo sapien
ttcagagcgggtggacacctggtcc

SEQ ID NO: 689635 - DNA, 25 bp, Homo sapien
tataagcgagtctcacacggtttgg

SEQ ID NO: 689636 - DNA, 25 bp, Homo sapien
tgaacgcgtctctccgtgagtgtgg

SEQ ID NO: 689637 - DNA, 25 bp, Homo sapien
gattcttacggagcttcactgttga

SEQ ID NO: 689638 - DNA, 25 bp, Homo sapien
gctgagtcctttgcccgctgatgtc

SEQ ID NO: 689639 - DNA, 25 bp, Homo sapien
tatggtccacgttcactgggctgag

SEQ ID NO: 689640 - DNA, 25 bp, Homo sapien
gctaaaggccagtttccggtgaatg

SEQ ID NO: 689641 - DNA, 25 bp, Homo sapien
ctgaagttctgtgctcggtatggtg

SEQ ID NO: 689642 - DNA, 25 bp, Homo sapien
gaatatctctctttgcatagtgggc

SEQ ID NO: 689643 - DNA, 25 bp, Homo sapien
cagggtctgcatacgcttctggcga

SEQ ID NO: 689644 - DNA, 25 bp, Homo sapien
tgaatagtgtgagccctcaggacct

SEQ ID NO: 689645 - DNA, 25 bp, Homo sapien
tcaggtgaggatactccagaagcct

SEQ ID NO: 689646 - DNA, 25 bp, Homo sapien
ttccctagcacggtagcacttggag

SEQ ID NO: 689647 - DNA, 25 bp, Homo sapien
tctaggaaaagcatacctgggtatc

SEQ ID NO: 689648 - DNA, 25 bp, Homo sapien
tgacgttccctatggacgaagtcct

SEQ ID NO: 689649 - DNA, 25 bp, Homo sapien
tggtctagagaacagctgcttcggt

SEQ ID NO: 689650 - DNA, 25 bp, Homo sapien
caaaccctggacgagactgtcagca

SEQ ID NO: 689651 - DNA, 25 bp, Homo sapien
cagataaggtacctaactgcctgtg

SEQ ID NO: 689652 - DNA, 25 bp, Homo sapien
caaaagcgcaggactatgacaggag

SEQ ID NO: 689653 - DNA, 25 bp, Homo sapien
cccactgttgatgaattaagagaca

SEQ ID NO: 689654 - DNA, 25 bp, Homo sapien
aagactaccctacctgctgtgtttg

SEQ ID NO: 689655 - DNA, 25 bp, Homo sapien
tgcaagaggagtaaccagaggacac

SEQ ID NO: 689656 - DNA, 25 bp, Homo sapien
cctgaagttcagctcaagactaccc

SEQ ID NO: 689657 - DNA, 25 bp, Homo sapien
tcccaggcctctgacatgagggaca

SEQ ID NO: 689658 - DNA, 25 bp, Homo sapien
tgcataaagctgaccaaaatgagaa

SEQ ID NO: 689659 - DNA, 25 bp, Homo sapien
gcaaccccgctactctatcaataaa

SEQ ID NO: 689660 - DNA, 25 bp, Homo sapien
aatgagaagggttttaagaagccag

SEQ ID NO: 689661 - DNA, 25 bp, Homo sapien
tcttagctgatgctaataattgcat

SEQ ID NO: 689662 - DNA, 25 bp, Homo sapien
tagcattatactttggatcaaataa

SEQ ID NO: 689663 - DNA, 25 bp, Homo sapien
gtatttgtcaaacagcctggttatg

SEQ ID NO: 689664 - DNA, 25 bp, Homo sapien
aaagtactgatctaccactcagtta

SEQ ID NO: 689665 - DNA, 25 bp, Homo sapien
gcaatgtagtagcttttttaggcca

SEQ ID NO: 689666 - DNA, 25 bp, Homo sapien
tcctaatacattagagccatatctg

SEQ ID NO: 689667 - DNA, 25 bp, Homo sapien
ggcttggactcatgttatagtggtt

SEQ ID NO: 689668 - DNA, 25 bp, Homo sapien
cttctgggcttggactcatgttata

SEQ ID NO: 689669 - DNA, 25 bp, Homo sapien
cacttgcttcggtgacatgtatatt

SEQ ID NO: 689670 - DNA, 25 bp, Homo sapien
ttcctataaagggtacacttgcttc

SEQ ID NO: 689671 - DNA, 25 bp, Homo sapien
tgacatcagttctctgcgtacatta

SEQ ID NO: 689672 - DNA, 25 bp, Homo sapien
catcagttctctgcgtacattaaga

SEQ ID NO: 689673 - DNA, 25 bp, Homo sapien
cagttctctgcgtacattaagaagc

SEQ ID NO: 689674 - DNA, 25 bp, Homo sapien
ctctgcgtacattaagaagctcctc

SEQ ID NO: 689675 - DNA, 25 bp, Homo sapien
gtccttaagaagcctgtcttgcagc

SEQ ID NO: 689676 - DNA, 25 bp, Homo sapien
ccttaagaagcctgtcttgcagcac

SEQ ID NO: 689677 - DNA, 25 bp, Homo sapien
tccttaagaagcctgtcttgcagca

SEQ ID NO: 689678 - DNA, 25 bp, Homo sapien
ttcttcactatcagtattacagaag

SEQ ID NO: 689679 - DNA, 25 bp, Homo sapien
tcttcactatcagtattacagaaga

SEQ ID NO: 689680 - DNA, 25 bp, Homo sapien
tttcttcactatcagtattacagaa

SEQ ID NO: 689681 - DNA, 25 bp, Homo sapien
tcactatcagtattacagaagacac

SEQ ID NO: 689682 - DNA, 25 bp, Homo sapien
tgttcgcttttttgatatgcactga

SEQ ID NO: 689683 - DNA, 25 bp, Homo sapien
ctctgttgttcgcttttttgatatg

SEQ ID NO: 689684 - DNA, 25 bp, Homo sapien
ctgttgttcgcttttttgatatgca

SEQ ID NO: 689685 - DNA, 25 bp, Homo sapien
tgttgttcgcttttttgatatgcac

SEQ ID NO: 689686 - DNA, 25 bp, Homo sapien
tttaaagactgtgaatctttttcaa

SEQ ID NO: 689687 - DNA, 25 bp, Homo sapien
ccaaatcttttaaagactgtgaatc

SEQ ID NO: 689688 - DNA, 25 bp, Homo sapien
aatcttttaaagactgtgaatcttt

SEQ ID NO: 689689 - DNA, 25 bp, Homo sapien
tttccaaatcttttaaagactgtga

SEQ ID NO: 689690 - DNA, 25 bp, Homo sapien
ctatgataatgaattggaatttatc

SEQ ID NO: 689691 - DNA, 25 bp, Homo sapien
atgaattggaatttatcaagttttt

SEQ ID NO: 689692 - DNA, 25 bp, Homo sapien
tgataatgaattggaatttatcaag

SEQ ID NO: 689693 - DNA, 25 bp, Homo sapien
taatgaattggaatttatcaagttt

SEQ ID NO: 689694 - DNA, 25 bp, Homo sapien
tccaagactgcgtagtaaaataact

SEQ ID NO: 689695 - DNA, 25 bp, Homo sapien
ttccaagactgcgtagtaaaataac

SEQ ID NO: 689696 - DNA, 25 bp, Homo sapien
ttttccaagactgcgtagtaaaata

SEQ ID NO: 689697 - DNA, 25 bp, Homo sapien
ccaagactgcgtagtaaaataactc

SEQ ID NO: 689698 - DNA, 25 bp, Homo sapien
gcctctcgtaagtctcataagtcat

SEQ ID NO: 689699 - DNA, 25 bp, Homo sapien
taaattctgaattgagcctctcgta

SEQ ID NO: 689700 - DNA, 25 bp, Homo sapien
gaattgagcctctcgtaagtctcat

SEQ ID NO: 689701 - DNA, 25 bp, Homo sapien
tcttaaattctgaattgagcctctc

SEQ ID NO: 689702 - DNA, 25 bp, Homo sapien
attcattttgccaggtctcccaagg

SEQ ID NO: 689703 - DNA, 25 bp, Homo sapien
ttcattttgccaggtctcccaagga

SEQ ID NO: 689704 - DNA, 25 bp, Homo sapien
cagttttttgggaagcaagtttgct

SEQ ID NO: 689705 - DNA, 25 bp, Homo sapien
tgtggatatgatgatctgcatcttc

SEQ ID NO: 689706 - DNA, 25 bp, Homo sapien
gatctgcatcttcaattttacacag

SEQ ID NO: 689707 - DNA, 25 bp, Homo sapien
ttttgtggatatgatgatctgcatc

SEQ ID NO: 689708 - DNA, 25 bp, Homo sapien
cttttgcgactaagatgttgggtgg

SEQ ID NO: 689709 - DNA, 25 bp, Homo sapien
ttctacttcattggaattacttaga

SEQ ID NO: 689710 - DNA, 25 bp, Homo sapien
tatatattcttttgcgactaagatg

SEQ ID NO: 689711 - DNA, 25 bp, Homo sapien
tacttcattggaattacttagatta

SEQ ID NO: 689712 - DNA, 25 bp, Homo sapien
ctgatacatgagtagcatcacaggg

SEQ ID NO: 689713 - DNA, 25 bp, Homo sapien
gataatgaagatgctaaatgacttt

SEQ ID NO: 689714 - DNA, 25 bp, Homo sapien
catgagtagcatcacagggcatgtc

SEQ ID NO: 689715 - DNA, 25 bp, Homo sapien
acagggcatgtcaaaccacgttttc

SEQ ID NO: 689716 - DNA, 25 bp, Homo sapien
gtttcttgtgtaagtaccagagaac

SEQ ID NO: 689717 - DNA, 25 bp, Homo sapien
caatttccataaaccgttcttctga

SEQ ID NO: 689718 - DNA, 25 bp, Homo sapien
tattactcttagttggagtatgtct

SEQ ID NO: 689719 - DNA, 25 bp, Homo sapien
ctgaactataactgcttacatctga

SEQ ID NO: 689720 - DNA, 25 bp, Homo sapien
gaacaactttcacttgcacacagga

SEQ ID NO: 689721 - DNA, 25 bp, Homo sapien
cactgttactatttaaggattcaag

SEQ ID NO: 689722 - DNA, 25 bp, Homo sapien
tgggtgactttattgtacctccaac

SEQ ID NO: 689723 - DNA, 25 bp, Homo sapien
cataatcctgagtaaaatccttttc

SEQ ID NO: 689724 - DNA, 25 bp, Homo sapien
gtagctttaccgttttcattctgga

SEQ ID NO: 689725 - DNA, 25 bp, Homo sapien
tctatagatgatggactgccagata

SEQ ID NO: 689726 - DNA, 25 bp, Homo sapien
gatctgggagataagtcaaggcaat

SEQ ID NO: 689727 - DNA, 25 bp, Homo sapien
caaggcaattatctcgtatagcatc

SEQ ID NO: 689728 - DNA, 25 bp, Homo sapien
gcttttcgtggaagtctgattcttc

SEQ ID NO: 689729 - DNA, 25 bp, Homo sapien
tccttccggaattgtcttgtccatc

SEQ ID NO: 689730 - DNA, 25 bp, Homo sapien
tgattctgaatttgagagatcttta

SEQ ID NO: 689731 - DNA, 25 bp, Homo sapien
tcttgttcacactctgattctgaat

SEQ ID NO: 689732 - DNA, 25 bp, Homo sapien
tttagagcttggctgtcccttttcc

SEQ ID NO: 689733 - DNA, 25 bp, Homo sapien
ttcggttctcttagccagctaatat

SEQ ID NO: 689734 - DNA, 25 bp, Homo sapien
tatttctgctatagtctattagctg

SEQ ID NO: 689735 - DNA, 25 bp, Homo sapien
tagtctattagctgtggttttgatt

SEQ ID NO: 689736 - DNA, 25 bp, Homo sapien
cttagccagctaatatcagtcttgc

SEQ ID NO: 689737 - DNA, 25 bp, Homo sapien
gaagatttaagttcatcatgattcc

SEQ ID NO: 689738 - DNA, 25 bp, Homo sapien
aagttcatcatgattccttggacct

SEQ ID NO: 689739 - DNA, 25 bp, Homo sapien
acagaagatttaagttcatcatgat

SEQ ID NO: 689740 - DNA, 25 bp, Homo sapien
gatttaagttcatcatgattccttg

SEQ ID NO: 689741 - DNA, 25 bp, Homo sapien
gacctatccgcacaagcttctttag

SEQ ID NO: 689742 - DNA, 25 bp, Homo sapien
tagctgtagcttgaaactcttggat

SEQ ID NO: 689743 - DNA, 25 bp, Homo sapien
gcttctttagctgtagcttgaaact

SEQ ID NO: 689744 - DNA, 25 bp, Homo sapien
aatctaattgacctatccgcacaag

SEQ ID NO: 689745 - DNA, 25 bp, Homo sapien
agttttatgatagggtcatcagctc

SEQ ID NO: 689746 - DNA, 25 bp, Homo sapien
catcagctccattcaaattaaaatt

SEQ ID NO: 689747 - DNA, 25 bp, Homo sapien
tccaagttttatgatagggtcatca

SEQ ID NO: 689748 - DNA, 25 bp, Homo sapien
tttatgatagggtcatcagctccat

SEQ ID NO: 689749 - DNA, 25 bp, Homo sapien
ctgggcattcagaagtaacattaac

SEQ ID NO: 689750 - DNA, 25 bp, Homo sapien
aggtagtcttcagttttctgtagct

SEQ ID NO: 689751 - DNA, 25 bp, Homo sapien
gggcattcagaagtaacattaacaa

SEQ ID NO: 689752 - DNA, 25 bp, Homo sapien
gtaacattaacaaaggtagtcttca

SEQ ID NO: 689753 - DNA, 25 bp, Homo sapien
ctgagttgtacaacaggtttgtttg

SEQ ID NO: 689754 - DNA, 25 bp, Homo sapien
cttactgagttgtacaacaggtttg

SEQ ID NO: 689755 - DNA, 25 bp, Homo sapien
tactgagttgtacaacaggtttgtt

SEQ ID NO: 689756 - DNA, 25 bp, Homo sapien
gagttgtacaacaggtttgtttgaa

SEQ ID NO: 689757 - DNA, 25 bp, Homo sapien
ttggcttatcaaggattctgctaca

SEQ ID NO: 689758 - DNA, 25 bp, Homo sapien
cttgtagacttgatgtcatcttttg

SEQ ID NO: 689759 - DNA, 25 bp, Homo sapien
ttcttgtagacttgatgtcatcttt

SEQ ID NO: 689760 - DNA, 25 bp, Homo sapien
tctgctacattggtaaattctttcc

SEQ ID NO: 689761 - DNA, 25 bp, Homo sapien
tgtttcgaatcccaggaattaagct

SEQ ID NO: 689762 - DNA, 25 bp, Homo sapien
caattgtcttatttaggagaaccga

SEQ ID NO: 689763 - DNA, 25 bp, Homo sapien
gattcaacaggccaatcactctgct

SEQ ID NO: 689764 - DNA, 25 bp, Homo sapien
gactttgcacatttttgctagcaga

SEQ ID NO: 689765 - DNA, 25 bp, Homo sapien
cagatgttgtctaaaacaccaggta

SEQ ID NO: 689766 - DNA, 25 bp, Homo sapien
tgtctcctgacgaagtacttgctct

SEQ ID NO: 689767 - DNA, 25 bp, Homo sapien
tcaatgtttgttacaggtgtccaac

SEQ ID NO: 689768 - DNA, 25 bp, Homo sapien
ccaacatgcccatttgctgtgtatt

SEQ ID NO: 689769 - DNA, 25 bp, Homo sapien
tatgatctcttttttccgctgcctg

SEQ ID NO: 689770 - DNA, 25 bp, Homo sapien
tctggtataacatcctggagttcac

SEQ ID NO: 689771 - DNA, 25 bp, Homo sapien
tagtatgatctcttttttccgctgc

SEQ ID NO: 689772 - DNA, 25 bp, Homo sapien
tcttttttccgctgcctgtgaatct

SEQ ID NO: 689773 - DNA, 25 bp, Homo sapien
tgtgttttctacacacttagcagtt

SEQ ID NO: 689774 - DNA, 25 bp, Homo sapien
ctacacacttagcagttttgatatg

SEQ ID NO: 689775 - DNA, 25 bp, Homo sapien
tctacacacttagcagttttgatat

SEQ ID NO: 689776 - DNA, 25 bp, Homo sapien
tttctacacacttagcagttttgat

SEQ ID NO: 689777 - DNA, 25 bp, Homo sapien
cagagctcgtcatttgcagtggtgg

SEQ ID NO: 689778 - DNA, 25 bp, Homo sapien
gatgatctagatttcagtgatgcag

SEQ ID NO: 689779 - DNA, 25 bp, Homo sapien
tctgcagagctcgtcatttgcagtg

SEQ ID NO: 689780 - DNA, 25 bp, Homo sapien
tctgatgatctagatttcagtgatg

SEQ ID NO: 689781 - DNA, 25 bp, Homo sapien
aaaagcactggacttctcatagtgt

SEQ ID NO: 689782 - DNA, 25 bp, Homo sapien
ggacttctcatagtgtatctatctg

SEQ ID NO: 689783 - DNA, 25 bp, Homo sapien
tatctatctgcaccagaaacaatca

SEQ ID NO: 689784 - DNA, 25 bp, Homo sapien
catagtgtatctatctgcaccagaa

SEQ ID NO: 689785 - DNA, 25 bp, Homo sapien
cctacgaggaggctactgtattaac

SEQ ID NO: 689786 - DNA, 25 bp, Homo sapien
ttgagcttagacttcaggaaaggtc

SEQ ID NO: 689787 - DNA, 25 bp, Homo sapien
cagtggtgacaaagtcctacgagga

SEQ ID NO: 689788 - DNA, 25 bp, Homo sapien
gaagctctctaagaaagaaggcaac

SEQ ID NO: 689789 - DNA, 25 bp, Homo sapien
tcctttaaactaacgagctcttctc

SEQ ID NO: 689790 - DNA, 25 bp, Homo sapien
attatttctattccctttgtcactg

SEQ ID NO: 689791 - DNA, 25 bp, Homo sapien
tcttctccgactggtgagatttgac

SEQ ID NO: 689792 - DNA, 25 bp, Homo sapien
caagctgactattatttctattccc

SEQ ID NO: 689793 - DNA, 25 bp, Homo sapien
gcagcgacgttttggcaactgaaat

SEQ ID NO: 689794 - DNA, 25 bp, Homo sapien
tgtgatccacttgcgtcaaaaagta

SEQ ID NO: 689795 - DNA, 25 bp, Homo sapien
tgcgtcaaaaagtatatgcagcgac

SEQ ID NO: 689796 - DNA, 25 bp, Homo sapien
aaagtatatgcagcgacgttttggc

SEQ ID NO: 689797 - DNA, 25 bp, Homo sapien
ttcagaattattgtcagtagcttct

SEQ ID NO: 689798 - DNA, 25 bp, Homo sapien
ctagtgatgcgtcaaaatacaaaag

SEQ ID NO: 689799 - DNA, 25 bp, Homo sapien
tagtgatttctagtgatgcgtcaaa

SEQ ID NO: 689800 - DNA, 25 bp, Homo sapien
tacattagtgatttctagtgatgcg

SEQ ID NO: 689801 - DNA, 25 bp, Homo sapien
taaatacattctggactctaacaaa

SEQ ID NO: 689802 - DNA, 25 bp, Homo sapien
caacactgattagtttacgtttcta

SEQ ID NO: 689803 - DNA, 25 bp, Homo sapien
caattctggcactacttacctatgt

SEQ ID NO: 689804 - DNA, 25 bp, Homo sapien
tacgtttctatgatactactctgca

SEQ ID NO: 689805 - DNA, 25 bp, Homo sapien
gatacaggtatcatcctcaggcata

SEQ ID NO: 689806 - DNA, 25 bp, Homo sapien
tagtctcatgggcttggaatcaatg

SEQ ID NO: 689807 - DNA, 25 bp, Homo sapien
gaatcaatgtactgcctgatacagg

SEQ ID NO: 689808 - DNA, 25 bp, Homo sapien
actgagtagagtgaacggctcgaga

SEQ ID NO: 689809 - DNA, 25 bp, Homo sapien
actttttcctctggcacagtaactg

SEQ ID NO: 689810 - DNA, 25 bp, Homo sapien
ctggcacagtaactgcttcccattg

SEQ ID NO: 689811 - DNA, 25 bp, Homo sapien
tttttcctctggcacagtaactgct

SEQ ID NO: 689812 - DNA, 25 bp, Homo sapien
ttcctctggcacagtaactgcttcc

SEQ ID NO: 689813 - DNA, 25 bp, Homo sapien
attatctccagcaatgtagaatgag

SEQ ID NO: 689814 - DNA, 25 bp, Homo sapien
agcaatgtagaatgagagagtctga

SEQ ID NO: 689815 - DNA, 25 bp, Homo sapien
agtttttcatctgatggtatttgca

SEQ ID NO: 689816 - DNA, 25 bp, Homo sapien
tccagcaatgtagaatgagagagtc

SEQ ID NO: 689817 - DNA, 25 bp, Homo sapien
tttatcaagaaatgctgataaacaa

SEQ ID NO: 689818 - DNA, 25 bp, Homo sapien
tatttatcaagaaatgctgataaac

SEQ ID NO: 689819 - DNA, 25 bp, Homo sapien
atttatcaagaaatgctgataaaca

SEQ ID NO: 689820 - DNA, 25 bp, Homo sapien
ttttgtctccaagcatgccatttac

SEQ ID NO: 689821 - DNA, 25 bp, Homo sapien
tacaaggttgagaaatatcctgcaa

SEQ ID NO: 689822 - DNA, 25 bp, Homo sapien
ttacaaggttgagaaatatcctgca

SEQ ID NO: 689823 - DNA, 25 bp, Homo sapien
tttacaaggttgagaaatatcctgc

SEQ ID NO: 689824 - DNA, 25 bp, Homo sapien
tacacaaagcttctacaatgcctac

SEQ ID NO: 689825 - DNA, 25 bp, Homo sapien
actgatgtgccagttcttgtctttg

SEQ ID NO: 689826 - DNA, 25 bp, Homo sapien
ttctacacaaagcttctacaatgcc

SEQ ID NO: 689827 - DNA, 25 bp, Homo sapien
tttaaatgccttagcaataaaatcc

SEQ ID NO: 689828 - DNA, 25 bp, Homo sapien
ctccagcatctaaaatcctttctcc

SEQ ID NO: 689829 - DNA, 25 bp, Homo sapien
ccagcatctaaaatcctttctccca

SEQ ID NO: 689830 - DNA, 25 bp, Homo sapien
agcatctaaaatcctttctcccata

SEQ ID NO: 689831 - DNA, 25 bp, Homo sapien
taaaatcctttctcccatactactc

SEQ ID NO: 689832 - DNA, 25 bp, Homo sapien
taaaaaccatataagtacagattat

SEQ ID NO: 689833 - DNA, 25 bp, Homo sapien
gcaaactcatagttgtctgtcttat

SEQ ID NO: 689834 - DNA, 25 bp, Homo sapien
aacattcttatggattttaagaata

SEQ ID NO: 689835 - DNA, 25 bp, Homo sapien
ctcatagttgtctgtcttataaaac

SEQ ID NO: 689836 - DNA, 25 bp, Homo sapien
ggttagagagtattttccgggcatc

SEQ ID NO: 689837 - DNA, 25 bp, Homo sapien
tccgggcatcttgaggcattttgtc

SEQ ID NO: 689838 - DNA, 25 bp, Homo sapien
gcattttgtcaagcatagcattcat

SEQ ID NO: 689839 - DNA, 25 bp, Homo sapien
gaattaacatttcttggttagagag

SEQ ID NO: 689840 - DNA, 25 bp, Homo sapien
tgcgaggtacgaaactttccactac

SEQ ID NO: 689841 - DNA, 25 bp, Homo sapien
gaatacaaatattcactcttgagtc

SEQ ID NO: 689842 - DNA, 25 bp, Homo sapien
tacaaatattcactcttgagtcaat

SEQ ID NO: 689843 - DNA, 25 bp, Homo sapien
cagggaacaaatgcgaggtacgaaa

SEQ ID NO: 689844 - DNA, 25 bp, Homo sapien
cttcatcactgacatcatgtatgac

SEQ ID NO: 689845 - DNA, 25 bp, Homo sapien
aactaagtcttctatcatatttaga

SEQ ID NO: 689846 - DNA, 25 bp, Homo sapien
gatcaactaagtcttctatcatatt

SEQ ID NO: 689847 - DNA, 25 bp, Homo sapien
tcaactaagtcttctatcatattta

SEQ ID NO: 689848 - DNA, 25 bp, Homo sapien
agatcaactaagtcttctatcatat

SEQ ID NO: 689849 - DNA, 25 bp, Homo sapien
ggctgaaacattgtggatatcctct

SEQ ID NO: 689850 - DNA, 25 bp, Homo sapien
cagaaaccaaaatggctgaaacatt

SEQ ID NO: 689851 - DNA, 25 bp, Homo sapien
tattagtccttgttttatcatcgtt

SEQ ID NO: 689852 - DNA, 25 bp, Homo sapien
tgttttatcatcgttagaagtccag

SEQ ID NO: 689853 - DNA, 25 bp, Homo sapien
cctgcatataaggttgtccaccttg

SEQ ID NO: 689854 - DNA, 25 bp, Homo sapien
taaaggcttatatgcactgttattg

SEQ ID NO: 689855 - DNA, 25 bp, Homo sapien
aggcttatatgcactgttattgata

SEQ ID NO: 689856 - DNA, 25 bp, Homo sapien
atatctgtgtaacaccagaggatac

SEQ ID NO: 689857 - DNA, 25 bp, Homo sapien
tatatctgtgtaacaccagaggata

SEQ ID NO: 689858 - DNA, 25 bp, Homo sapien
tctgggctccagtctactgaactgg

SEQ ID NO: 689859 - DNA, 25 bp, Homo sapien
ctctgggctccagtctactgaactg

SEQ ID NO: 689860 - DNA, 25 bp, Homo sapien
ggactggttagcgagcaacacagag

SEQ ID NO: 689861 - DNA, 25 bp, Homo sapien
cgagcaacacagagaactagtaaga

SEQ ID NO: 689862 - DNA, 25 bp, Homo sapien
tcgcgcctgcgcgagccaccctcgc

SEQ ID NO: 689863 - DNA, 25 bp, Homo sapien
gtgctgatggggagcctcgcgcctg

SEQ ID NO: 689864 - DNA, 25 bp, Homo sapien
cttgaccgagtcgcccacgcgcggg

SEQ ID NO: 689865 - DNA, 25 bp, Homo sapien
ctgatggggagcctcgcgcctgcgc

SEQ ID NO: 689866 - DNA, 25 bp, Homo sapien
tatgccgccgagcgtcgcaactctg

SEQ ID NO: 689867 - DNA, 25 bp, Homo sapien
gcgtcgcaactctgcgcctcaggga

SEQ ID NO: 689868 - DNA, 25 bp, Homo sapien
cggcaggaggcgtccgcgtagtgtc

SEQ ID NO: 689869 - DNA, 25 bp, Homo sapien
agtgtcggtggagccgccccctatg

SEQ ID NO: 689870 - DNA, 25 bp, Homo sapien
agcttggtcttctgtaattaggcca

SEQ ID NO: 689871 - DNA, 25 bp, Homo sapien
tcttctgtaattaggccacaagaaa

SEQ ID NO: 689872 - DNA, 25 bp, Homo sapien
tgtgaaatgatttagacaagaagtt

SEQ ID NO: 689873 - DNA, 25 bp, Homo sapien
gccaaggctctacgtttatcagtgt

SEQ ID NO: 689874 - DNA, 25 bp, Homo sapien
gacagtctcaatgcccaggaatggt

SEQ ID NO: 689875 - DNA, 25 bp, Homo sapien
aaccagatagatgtgagagcccagc

SEQ ID NO: 689876 - DNA, 25 bp, Homo sapien
tttcaagtagaagacaggatgggcc

SEQ ID NO: 689877 - DNA, 25 bp, Homo sapien
tattcctgaggaggcatccgctatg

SEQ ID NO: 689878 - DNA, 25 bp, Homo sapien
cagcccgagaaagtgtagcgcacag

SEQ ID NO: 689879 - DNA, 25 bp, Homo sapien
cacaggtccgagttgattgcgagcc

SEQ ID NO: 689880 - DNA, 25 bp, Homo sapien
tagtctcggtggtcgttgttgtccc

SEQ ID NO: 689881 - DNA, 25 bp, Homo sapien
tgatgccaaggtccgagcaagtgac

SEQ ID NO: 689882 - DNA, 25 bp, Homo sapien
gcaggcgggggtcgcagcccgacgg

SEQ ID NO: 689883 - DNA, 25 bp, Homo sapien
tgcagcccggccgacacgcagcgcc

SEQ ID NO: 689884 - DNA, 25 bp, Homo sapien
ccggccgacacgcagcgcccggcgc

SEQ ID NO: 689885 - DNA, 25 bp, Homo sapien
ccgcaggatgatgggccgcaggcgg

SEQ ID NO: 689886 - DNA, 25 bp, Homo sapien
ggcggcgcgcggcccgggctcccag

SEQ ID NO: 689887 - DNA, 25 bp, Homo sapien
ctggcgttggcggcggcgcgcggcc

SEQ ID NO: 689888 - DNA, 25 bp, Homo sapien
gcggcggcgcgcggcccgggctccc

SEQ ID NO: 689889 - DNA, 25 bp, Homo sapien
cggcgcgcggcccgggctcccaggg

SEQ ID NO: 689890 - DNA, 25 bp, Homo sapien
ccgcggagctcgggcctctggacat

SEQ ID NO: 689891 - DNA, 25 bp, Homo sapien
ccaggtccgacaggcagctgaggct

SEQ ID NO: 689892 - DNA, 25 bp, Homo sapien
cacgccgccgtccaggtccgacagg

SEQ ID NO: 689893 - DNA, 25 bp, Homo sapien
gatcccagggcgctaggcaggaccg

SEQ ID NO: 689894 - DNA, 25 bp, Homo sapien
tctctagtggaagctttcagaggcc

SEQ ID NO: 689895 - DNA, 25 bp, Homo sapien
tacaagaaggctgcgttccgggagc

SEQ ID NO: 689896 - DNA, 25 bp, Homo sapien
ttgctcctcgagtccttgtccaggt

SEQ ID NO: 689897 - DNA, 25 bp, Homo sapien
gagagtccaccgtatctgcaacctg

SEQ ID NO: 689898 - DNA, 25 bp, Homo sapien
ctcactgcgtagaggagcagcgtca

SEQ ID NO: 689899 - DNA, 25 bp, Homo sapien
gcctcactgcgtagaggagcagcgt

SEQ ID NO: 689900 - DNA, 25 bp, Homo sapien
cgagggagcctcactgcgtagagga

SEQ ID NO: 689901 - DNA, 25 bp, Homo sapien
gagcctcactgcgtagaggagcagc

SEQ ID NO: 689902 - DNA, 25 bp, Homo sapien
gaatggccagcagattcccttgagg

SEQ ID NO: 689903 - DNA, 25 bp, Homo sapien
ccttaatcagcctctggcgcttggg

SEQ ID NO: 689904 - DNA, 25 bp, Homo sapien
aatgctttgccgcaccgaatggcca

SEQ ID NO: 689905 - DNA, 25 bp, Homo sapien
agttattacccgctgatgacttctg

SEQ ID NO: 689906 - DNA, 25 bp, Homo sapien
agcctttggtgtaaagcataccagg

SEQ ID NO: 689907 - DNA, 25 bp, Homo sapien
agctttgagcacaaaaccccacagc

SEQ ID NO: 689908 - DNA, 25 bp, Homo sapien
cggtagctttgagcacaaaacccca

SEQ ID NO: 689909 - DNA, 25 bp, Homo sapien
aagcataccaggtgaaatgaagtag

SEQ ID NO: 689910 - DNA, 25 bp, Homo sapien
ggagacctttccaaatataagagga

SEQ ID NO: 689911 - DNA, 25 bp, Homo sapien
catcttccagcagattgagcaagaa

SEQ ID NO: 689912 - DNA, 25 bp, Homo sapien
ggaataaagaagtcacctccccagc

SEQ ID NO: 689913 - DNA, 25 bp, Homo sapien
ctgttgcttctagttccggtggtga

SEQ ID NO: 689914 - DNA, 25 bp, Homo sapien
tcaagaagaggaatagggtgaatga

SEQ ID NO: 689915 - DNA, 25 bp, Homo sapien
gaggaatagggtgaatgaatctcat

SEQ ID NO: 689916 - DNA, 25 bp, Homo sapien
ccgagatgatgatcagccacgtgat

SEQ ID NO: 689917 - DNA, 25 bp, Homo sapien
gatcagccacgtgattttttcaaga

SEQ ID NO: 689918 - DNA, 25 bp, Homo sapien
cttagagaccttgaatggttgaggg

SEQ ID NO: 689919 - DNA, 25 bp, Homo sapien
cgtgattaagaaatttagaggtggc

SEQ ID NO: 689920 - DNA, 25 bp, Homo sapien
cttgccttgtgtatgtctgagctga

SEQ ID NO: 689921 - DNA, 25 bp, Homo sapien
tctgagctgaaaacaatcgtgatta

SEQ ID NO: 689922 - DNA, 25 bp, Homo sapien
tattgtatttccgagaagtgcctct

SEQ ID NO: 689923 - DNA, 25 bp, Homo sapien
tatgtacatgtacaggacaccattc

SEQ ID NO: 689924 - DNA, 25 bp, Homo sapien
tagatgactaaatgggctgaagact

SEQ ID NO: 689925 - DNA, 25 bp, Homo sapien
cataccctgtgacaaaaaggatggg

SEQ ID NO: 689926 - DNA, 25 bp, Homo sapien
aagcaaactgtgaacgctgtgtagc

SEQ ID NO: 689927 - DNA, 25 bp, Homo sapien
ggagataatagtagggaagagcctc

SEQ ID NO: 689928 - DNA, 25 bp, Homo sapien
ctgtgaacgctgtgtagcctcagga

SEQ ID NO: 689929 - DNA, 25 bp, Homo sapien
gataatagtagggaagagcctctga

SEQ ID NO: 689930 - DNA, 25 bp, Homo sapien
tgtaattcccagagcagttgatgta

SEQ ID NO: 689931 - DNA, 25 bp, Homo sapien
tgtgtgatgtgcaaagttctttaca

SEQ ID NO: 689932 - DNA, 25 bp, Homo sapien
cagatgaaaggagtatgatcttcac

SEQ ID NO: 689933 - DNA, 25 bp, Homo sapien
gctgattggctttgtgtgatgtgca

SEQ ID NO: 689934 - DNA, 25 bp, Homo sapien
ctgcagggcaagtagggagttgtca

SEQ ID NO: 689935 - DNA, 25 bp, Homo sapien
gagccacgtaggatgtcagtgctga

SEQ ID NO: 689936 - DNA, 25 bp, Homo sapien
agaaggtctgccagcgcctgaaggg

SEQ ID NO: 689937 - DNA, 25 bp, Homo sapien
catggtctagggagctaggtgtgga

SEQ ID NO: 689938 - DNA, 25 bp, Homo sapien
agatggtctgtctcggactttctgg

SEQ ID NO: 689939 - DNA, 25 bp, Homo sapien
gtttgtgcaagttggtcccctgtag

SEQ ID NO: 689940 - DNA, 25 bp, Homo sapien
ctttgtggctggtaccgaggaccca

SEQ ID NO: 689941 - DNA, 25 bp, Homo sapien
gaacaaactcagaactggctttgtg

SEQ ID NO: 689942 - DNA, 25 bp, Homo sapien
tgtacatgtcaagcagcgcgcaaag

SEQ ID NO: 689943 - DNA, 25 bp, Homo sapien
ccatgggctggagcgtctgcgtctt

SEQ ID NO: 689944 - DNA, 25 bp, Homo sapien
tctgcgtcttggtcggcccggcagt

SEQ ID NO: 689945 - DNA, 25 bp, Homo sapien
cagccattcgtaggcactgctggcc

SEQ ID NO: 689946 - DNA, 25 bp, Homo sapien
catcgagaagttggagcataggccc

SEQ ID NO: 689947 - DNA, 25 bp, Homo sapien
catcctcttggacactttggctctg

SEQ ID NO: 689948 - DNA, 25 bp, Homo sapien
caataagcgctaggtggcatcatca

SEQ ID NO: 689949 - DNA, 25 bp, Homo sapien
aagccagtgcgcttcaaggtgaacc

SEQ ID NO: 689950 - DNA, 25 bp, Homo sapien
cagcgcctcgagtccacagggacgg

SEQ ID NO: 689951 - DNA, 25 bp, Homo sapien
cacagggacggcaatgctgagcgtc

SEQ ID NO: 689952 - DNA, 25 bp, Homo sapien
ctcgagtccacagggacggcaatgc

SEQ ID NO: 689953 - DNA, 25 bp, Homo sapien
acagggacggcaatgctgagcgtct

SEQ ID NO: 689954 - DNA, 25 bp, Homo sapien
aataaattattggcaatgtatgtta

SEQ ID NO: 689955 - DNA, 25 bp, Homo sapien
taaattattggcaatgtatgttaac

SEQ ID NO: 689956 - DNA, 25 bp, Homo sapien
caaataaattattggcaatgtatgt

SEQ ID NO: 689957 - DNA, 25 bp, Homo sapien
tccaaataaattattggcaatgtat

SEQ ID NO: 689958 - DNA, 25 bp, Homo sapien
gaaagtcttttagcgttctacaggc

SEQ ID NO: 689959 - DNA, 25 bp, Homo sapien
aacagagatgccgtaccataaaggc

SEQ ID NO: 689960 - DNA, 25 bp, Homo sapien
taaaatcgcatgtggagaaaggact

SEQ ID NO: 689961 - DNA, 25 bp, Homo sapien
acaggctaaatcacagggcttgaac

SEQ ID NO: 689962 - DNA, 25 bp, Homo sapien
ccacaagtcagtttcttatagtaaa

SEQ ID NO: 689963 - DNA, 25 bp, Homo sapien
tccctgcccagatgaagctaactaa

SEQ ID NO: 689964 - DNA, 25 bp, Homo sapien
catgtgccccgaggatggctgagac

SEQ ID NO: 689965 - DNA, 25 bp, Homo sapien
caatctgtgcagagtagggaaacag

SEQ ID NO: 689966 - DNA, 25 bp, Homo sapien
agcaaagattctatcctctggaggg

SEQ ID NO: 689967 - DNA, 25 bp, Homo sapien
ttagatctggctgtgggtgaaacaa

SEQ ID NO: 689968 - DNA, 25 bp, Homo sapien
tcctgcttctcatatccacacttat

SEQ ID NO: 689969 - DNA, 25 bp, Homo sapien
tcatatccacacttatccaaatcac

SEQ ID NO: 689970 - DNA, 25 bp, Homo sapien
tctggctgtgggtgaaacaaaaagt

SEQ ID NO: 689971 - DNA, 25 bp, Homo sapien
gcaaggatcgacttccatttctttg

SEQ ID NO: 689972 - DNA, 25 bp, Homo sapien
ttccagtgaagaaggttgagctcat

SEQ ID NO: 689973 - DNA, 25 bp, Homo sapien
tccagtgaagaaggttgagctcatc

SEQ ID NO: 689974 - DNA, 25 bp, Homo sapien
ttgaagggtggcttttctagcaagg

SEQ ID NO: 689975 - DNA, 25 bp, Homo sapien
taaaaactgattttgtggtccatct

SEQ ID NO: 689976 - DNA, 25 bp, Homo sapien
ccatctgtcttgttctcatcgttca

SEQ ID NO: 689977 - DNA, 25 bp, Homo sapien
ctctctggtgggtctttaaaaactg

SEQ ID NO: 689978 - DNA, 25 bp, Homo sapien
attttgtggtccatctgtcttgttc

SEQ ID NO: 689979 - DNA, 25 bp, Homo sapien
gacacctggtctgatgatgtgctga

SEQ ID NO: 689980 - DNA, 25 bp, Homo sapien
cctggtctgatgatgtgctgatcat

SEQ ID NO: 689981 - DNA, 25 bp, Homo sapien
tccacggggctcattccccgagcag

SEQ ID NO: 689982 - DNA, 25 bp, Homo sapien
aggacacctggtctgatgatgtgct

SEQ ID NO: 689983 - DNA, 25 bp, Homo sapien
gcttctggtccaggcctgctcggac

SEQ ID NO: 689984 - DNA, 25 bp, Homo sapien
ttctcgtgtgaacggctgctctttg

SEQ ID NO: 689985 - DNA, 25 bp, Homo sapien
tggtccaggcctgctcggactccat

SEQ ID NO: 689986 - DNA, 25 bp, Homo sapien
gaaggaaggcaatgcgttctcgtgt

SEQ ID NO: 689987 - DNA, 25 bp, Homo sapien
ttctcatcggaatcccccagctggt

SEQ ID NO: 689988 - DNA, 25 bp, Homo sapien
tctcatcggaatcccccagctggtg

SEQ ID NO: 689989 - DNA, 25 bp, Homo sapien
cttctcatcggaatcccccagctgg

SEQ ID NO: 689990 - DNA, 25 bp, Homo sapien
gcttctcatcggaatcccccagctg

SEQ ID NO: 689991 - DNA, 25 bp, Homo sapien
tcacgagatcagcagctgacggaaa

SEQ ID NO: 689992 - DNA, 25 bp, Homo sapien
ctgacggaaattgtcggaacaggag

SEQ ID NO: 689993 - DNA, 25 bp, Homo sapien
tggcacccgtgtagaaagcacagaa

SEQ ID NO: 689994 - DNA, 25 bp, Homo sapien
aggagctgctggcacccgtgtagaa

SEQ ID NO: 689995 - DNA, 25 bp, Homo sapien
tgctccatccctatcatccccaaaa

SEQ ID NO: 689996 - DNA, 25 bp, Homo sapien
ccaaagcccccatgtttcttttcat

SEQ ID NO: 689997 - DNA, 25 bp, Homo sapien
ctcctccttgtatgtgagatgcaaa

SEQ ID NO: 689998 - DNA, 25 bp, Homo sapien
ccttgtatgtgagatgcaaatagtg

SEQ ID NO: 689999 - DNA, 25 bp, Homo sapien
gggtacactgggaatgtactaagtg

SEQ ID NO: 690000 - DNA, 25 bp, Homo sapien
agtgccactgaattgctggctttag

SEQ ID NO: 690001 - DNA, 25 bp, Homo sapien
tacactgggaatgtactaagtgcca

SEQ ID NO: 690002 - DNA, 25 bp, Homo sapien
ctgggaatgtactaagtgccactga

SEQ ID NO: 690003 - DNA, 25 bp, Homo sapien
tatcgtaacaaaggcagtcagggca

SEQ ID NO: 690004 - DNA, 25 bp, Homo sapien
gcacaagcaagccacgggtaggtat

SEQ ID NO: 690005 - DNA, 25 bp, Homo sapien
ttgctaacacgagagctccctcagg

SEQ ID NO: 690006 - DNA, 25 bp, Homo sapien
tgaattatccagacagagcccaatg

SEQ ID NO: 690007 - DNA, 25 bp, Homo sapien
tcatcttggccacggaaggttggcc

SEQ ID NO: 690008 - DNA, 25 bp, Homo sapien
catcttggccacggaaggttggcct

SEQ ID NO: 690009 - DNA, 25 bp, Homo sapien
atcttggccacggaaggttggcctt

SEQ ID NO: 690010 - DNA, 25 bp, Homo sapien
ttcatcttggccacggaaggttggc

SEQ ID NO: 690011 - DNA, 25 bp, Homo sapien
taataatggaggaaccacttctgcc

SEQ ID NO: 690012 - DNA, 25 bp, Homo sapien
gctaataatggaggaaccacttctg

SEQ ID NO: 690013 - DNA, 25 bp, Homo sapien
ctgctaataatggaggaaccacttc

SEQ ID NO: 690014 - DNA, 25 bp, Homo sapien
taatggaggaaccacttctgcccca

SEQ ID NO: 690015 - DNA, 25 bp, Homo sapien
aagggcaaggccaacctactgcact

SEQ ID NO: 690016 - DNA, 25 bp, Homo sapien
atgaaaccagccacccgatggaaac

SEQ ID NO: 690017 - DNA, 25 bp, Homo sapien
cctcagatgtgttctcccttcaggg

SEQ ID NO: 690018 - DNA, 25 bp, Homo sapien
tatggcaactgagagagggaatctg

SEQ ID NO: 690019 - DNA, 25 bp, Homo sapien
accaactccaggtgaattctgtcca

SEQ ID NO: 690020 - DNA, 25 bp, Homo sapien
ggtccttgttggagcgttgttgatt

SEQ ID NO: 690021 - DNA, 25 bp, Homo sapien
aagaacagttatgaaaacaatggtg

SEQ ID NO: 690022 - DNA, 25 bp, Homo sapien
ttgttgattgttgctgcgcccatga

SEQ ID NO: 690023 - DNA, 25 bp, Homo sapien
tgaaaacaatggtgaagggtccttg

SEQ ID NO: 690024 - DNA, 25 bp, Homo sapien
cacccatgtgcttatgaaggtaaaa

SEQ ID NO: 690025 - DNA, 25 bp, Homo sapien
ggtccagggaggtgatcacccatgt

SEQ ID NO: 690026 - DNA, 25 bp, Homo sapien
aggtctcaatgcaactctgtctcca

SEQ ID NO: 690027 - DNA, 25 bp, Homo sapien
tagccttagtccacagtgggtccag

SEQ ID NO: 690028 - DNA, 25 bp, Homo sapien
aacatgatggaaaggcattctgcag

SEQ ID NO: 690029 - DNA, 25 bp, Homo sapien
tgcagggttttaggcagcaccaagc

SEQ ID NO: 690030 - DNA, 25 bp, Homo sapien
agaagttgcagggttttaggcagca

SEQ ID NO: 690031 - DNA, 25 bp, Homo sapien
ttaggcagcaccaagcattgaggag

SEQ ID NO: 690032 - DNA, 25 bp, Homo sapien
ccagggtaagacctgagaggtccag

SEQ ID NO: 690033 - DNA, 25 bp, Homo sapien
tggtcctgcacatctttgactaggg

SEQ ID NO: 690034 - DNA, 25 bp, Homo sapien
gtcctgcacatctttgactagggtc

SEQ ID NO: 690035 - DNA, 25 bp, Homo sapien
cgtggtcctgcacatctttgactag

SEQ ID NO: 690036 - DNA, 25 bp, Homo sapien
acgtggtcctgcacatctttgacta

SEQ ID NO: 690037 - DNA, 25 bp, Homo sapien
tgggtagacaggttctgggagctca

SEQ ID NO: 690038 - DNA, 25 bp, Homo sapien
gggtagacaggttctgggagctcac

SEQ ID NO: 690039 - DNA, 25 bp, Homo sapien
ctgggtagacaggttctgggagctc

SEQ ID NO: 690040 - DNA, 25 bp, Homo sapien
tcttcctccaggttcaggagggctg

SEQ ID NO: 690041 - DNA, 25 bp, Homo sapien
ctgctcttcctccaggttcaggagg

SEQ ID NO: 690042 - DNA, 25 bp, Homo sapien
ttcctccaggttcaggagggctgag

SEQ ID NO: 690043 - DNA, 25 bp, Homo sapien
tgctcttcctccaggttcaggaggg

SEQ ID NO: 690044 - DNA, 25 bp, Homo sapien
gggtatgggtgcagatacagagtgg

SEQ ID NO: 690045 - DNA, 25 bp, Homo sapien
ctgggtatgggtgcagatacagagt

SEQ ID NO: 690046 - DNA, 25 bp, Homo sapien
tgggtatgggtgcagatacagagtg

SEQ ID NO: 690047 - DNA, 25 bp, Homo sapien
ctggggcccgctttcctgggtatgg

SEQ ID NO: 690048 - DNA, 25 bp, Homo sapien
gcccccatgaagtgaacttgagctt

SEQ ID NO: 690049 - DNA, 25 bp, Homo sapien
tcagatattctggcaacagtgtttc

SEQ ID NO: 690050 - DNA, 25 bp, Homo sapien
ttcagccatgcgggctgccaggtcc

SEQ ID NO: 690051 - DNA, 25 bp, Homo sapien
ccaggtccacgtctcctgcccccat

SEQ ID NO: 690052 - DNA, 25 bp, Homo sapien
ttttacgaaagtagaagacttctga

SEQ ID NO: 690053 - DNA, 25 bp, Homo sapien
aagtagaagacttctgaggatcaaa

SEQ ID NO: 690054 - DNA, 25 bp, Homo sapien
tacgaaagtagaagacttctgagga

SEQ ID NO: 690055 - DNA, 25 bp, Homo sapien
cgaaagtagaagacttctgaggatc

SEQ ID NO: 690056 - DNA, 25 bp, Homo sapien
ttctgaattggtgtgatgctctcag

SEQ ID NO: 690057 - DNA, 25 bp, Homo sapien
aattggtgtgatgctctcagagcct

SEQ ID NO: 690058 - DNA, 25 bp, Homo sapien
cgcttgacacgactttttcacccct

SEQ ID NO: 690059 - DNA, 25 bp, Homo sapien
ctgaattggtgtgatgctctcagag

SEQ ID NO: 690060 - DNA, 25 bp, Homo sapien
cagtccatgagtgtagaacatcttc

SEQ ID NO: 690061 - DNA, 25 bp, Homo sapien
gattccatctgtgttgaggcccagt

SEQ ID NO: 690062 - DNA, 25 bp, Homo sapien
gattatagtgggcaagagagtccac

SEQ ID NO: 690063 - DNA, 25 bp, Homo sapien
caacttcgaggagacgtagttcttc

SEQ ID NO: 690064 - DNA, 25 bp, Homo sapien
gaaacaagctggttacaagtagtag

SEQ ID NO: 690065 - DNA, 25 bp, Homo sapien
tgaactgctacaaaatgtactatct

SEQ ID NO: 690066 - DNA, 25 bp, Homo sapien
taatgggatcctatgattaactggc

SEQ ID NO: 690067 - DNA, 25 bp, Homo sapien
gatgctagcaactttggctttgaac

SEQ ID NO: 690068 - DNA, 25 bp, Homo sapien
gaggaggccctcaatcaatgtgtgc

SEQ ID NO: 690069 - DNA, 25 bp, Homo sapien
gatgattgttgcactatcttcaccc

SEQ ID NO: 690070 - DNA, 25 bp, Homo sapien
ttcacccttcaataccacctggaga

SEQ ID NO: 690071 - DNA, 25 bp, Homo sapien
tcttgttgtagtgaagcacctagca

SEQ ID NO: 690072 - DNA, 25 bp, Homo sapien
ggtaaagctgagacctcccctagaa

SEQ ID NO: 690073 - DNA, 25 bp, Homo sapien
tgaaggatatcagtcagtgcacatc

SEQ ID NO: 690074 - DNA, 25 bp, Homo sapien
tactgaccaagtgcaagtcacaggg

SEQ ID NO: 690075 - DNA, 25 bp, Homo sapien
gacattctgtattagggccccacat

SEQ ID NO: 690076 - DNA, 25 bp, Homo sapien
gaatgactggcggtcgacactggtc

SEQ ID NO: 690077 - DNA, 25 bp, Homo sapien
tcatcagcttggagttgaactgggc

SEQ ID NO: 690078 - DNA, 25 bp, Homo sapien
tgggaagggctcaaccagtcagtct

SEQ ID NO: 690079 - DNA, 25 bp, Homo sapien
tcaggatagtcgagctccgtgcaca

SEQ ID NO: 690080 - DNA, 25 bp, Homo sapien
cagagtgggacggaatgatgcttta

SEQ ID NO: 690081 - DNA, 25 bp, Homo sapien
acggaatgatgctttaggcacaggc

SEQ ID NO: 690082 - DNA, 25 bp, Homo sapien
gacggaatgatgctttaggcacagg

SEQ ID NO: 690083 - DNA, 25 bp, Homo sapien
tgggacggaatgatgctttaggcac

SEQ ID NO: 690084 - DNA, 25 bp, Homo sapien
cctgtgagaaacagattgagcttgc

SEQ ID NO: 690085 - DNA, 25 bp, Homo sapien
tcaatgggagagcagacatgcaaac

SEQ ID NO: 690086 - DNA, 25 bp, Homo sapien
gacatgcaaacaatggaaggtaagg

SEQ ID NO: 690087 - DNA, 25 bp, Homo sapien
gagcttgcaccttcaaggccgttgt

SEQ ID NO: 690088 - DNA, 25 bp, Homo sapien
cgaaactcgtcatgagaatgtggaa

SEQ ID NO: 690089 - DNA, 25 bp, Homo sapien
tcctgacacagctccgtcgtgtgtt

SEQ ID NO: 690090 - DNA, 25 bp, Homo sapien
gtcgtgtgtttggtccccaggcctg

SEQ ID NO: 690091 - DNA, 25 bp, Homo sapien
tgcaatccgaacacgaaactcgtca

SEQ ID NO: 690092 - DNA, 25 bp, Homo sapien
tctgaagcccatgacttgcatcttt

SEQ ID NO: 690093 - DNA, 25 bp, Homo sapien
aggctgtgacggccagccaggcatc

SEQ ID NO: 690094 - DNA, 25 bp, Homo sapien
aggcatccccggcattctccccgtc

SEQ ID NO: 690095 - DNA, 25 bp, Homo sapien
tcagcatctgaagcccatgacttgc

SEQ ID NO: 690096 - DNA, 25 bp, Homo sapien
gtctgaaggtctggctactggagga

SEQ ID NO: 690097 - DNA, 25 bp, Homo sapien
gctcagagacttgcggctgcctctg

SEQ ID NO: 690098 - DNA, 25 bp, Homo sapien
ctgtctgaaggtctggctactggag

SEQ ID NO: 690099 - DNA, 25 bp, Homo sapien
tgaaggtctggctactggaggagtt

SEQ ID NO: 690100 - DNA, 25 bp, Homo sapien
tgaagatgtcgcatgtctgcctgat

SEQ ID NO: 690101 - DNA, 25 bp, Homo sapien
ttagctatgcggtgaccacacaggg

SEQ ID NO: 690102 - DNA, 25 bp, Homo sapien
ttgccctgggcggtctgcatccaga

SEQ ID NO: 690103 - DNA, 25 bp, Homo sapien
caaggcagggttggccggttcttca

SEQ ID NO: 690104 - DNA, 25 bp, Homo sapien
gccagtgcatggttttgcccaagaa

SEQ ID NO: 690105 - DNA, 25 bp, Homo sapien
aggaggccagtgcatggttttgccc

SEQ ID NO: 690106 - DNA, 25 bp, Homo sapien
gagggtaagcacaggctcagaggag

SEQ ID NO: 690107 - DNA, 25 bp, Homo sapien
ctggatggagggtaagcacaggctc

SEQ ID NO: 690108 - DNA, 25 bp, Homo sapien
ctctcggagcgaagccccaaagcct

SEQ ID NO: 690109 - DNA, 25 bp, Homo sapien
gctctggaagctgcactctcggagc

SEQ ID NO: 690110 - DNA, 25 bp, Homo sapien
tctggaagctgcactctcggagcga

SEQ ID NO: 690111 - DNA, 25 bp, Homo sapien
tggaagctgcactctcggagcgaag

SEQ ID NO: 690112 - DNA, 25 bp, Homo sapien
actggcggctgctccgtgagcgtac

SEQ ID NO: 690113 - DNA, 25 bp, Homo sapien
tggacgaggatgacacctgttctct

SEQ ID NO: 690114 - DNA, 25 bp, Homo sapien
gggctgaacggtccaggttctgact

SEQ ID NO: 690115 - DNA, 25 bp, Homo sapien
aagctcatcccactggacgaggatg

SEQ ID NO: 690116 - DNA, 25 bp, Homo sapien
ctggtacgctgattagtgtgtaggc

SEQ ID NO: 690117 - DNA, 25 bp, Homo sapien
actggtacgctgattagtgtgtagg

SEQ ID NO: 690118 - DNA, 25 bp, Homo sapien
aactggtacgctgattagtgtgtag

SEQ ID NO: 690119 - DNA, 25 bp, Homo sapien
tcacaggctacaatcctgttgggct

SEQ ID NO: 690120 - DNA, 25 bp, Homo sapien
ctgtgggtttccagagcgaccgtcc

SEQ ID NO: 690121 - DNA, 25 bp, Homo sapien
gccaccttgtcagcaggtgtgtctg

SEQ ID NO: 690122 - DNA, 25 bp, Homo sapien
aatcctgttgggctttgcggctgtg

SEQ ID NO: 690123 - DNA, 25 bp, Homo sapien
ctgccaccaccatccagggcttcat

SEQ ID NO: 690124 - DNA, 25 bp, Homo sapien
tgaaatgtgacagtgagagccacac

SEQ ID NO: 690125 - DNA, 25 bp, Homo sapien
tgtgaaatgtgacagtgagagccac

SEQ ID NO: 690126 - DNA, 25 bp, Homo sapien
ctcctttgtgaaatgtgacagtgag

SEQ ID NO: 690127 - DNA, 25 bp, Homo sapien
tttgtgaaatgtgacagtgagagcc

SEQ ID NO: 690128 - DNA, 25 bp, Homo sapien
ggtgaagtagccaggtctgtagaca

SEQ ID NO: 690129 - DNA, 25 bp, Homo sapien
gggcaggtacaagatgcttcttcga

SEQ ID NO: 690130 - DNA, 25 bp, Homo sapien
agcgtctacatggaaaggcactgag

SEQ ID NO: 690131 - DNA, 25 bp, Homo sapien
gccaggtctgtagacaagactttta

SEQ ID NO: 690132 - DNA, 25 bp, Homo sapien
gactgctcatcatagttgctactga

SEQ ID NO: 690133 - DNA, 25 bp, Homo sapien
ttgctactgagaagtattcggcatc

SEQ ID NO: 690134 - DNA, 25 bp, Homo sapien
gaagtattcggcatcaaatgattca

SEQ ID NO: 690135 - DNA, 25 bp, Homo sapien
atgactgctcatcatagttgctact

SEQ ID NO: 690136 - DNA, 25 bp, Homo sapien
cctgctgtctggtgtcagcggtgag

SEQ ID NO: 690137 - DNA, 25 bp, Homo sapien
cggtgaggtgtagcagatccacagt

SEQ ID NO: 690138 - DNA, 25 bp, Homo sapien
tcagcggtgaggtgtagcagatcca

SEQ ID NO: 690139 - DNA, 25 bp, Homo sapien
tgtagcagatccacagtggacgtac

SEQ ID NO: 690140 - DNA, 25 bp, Homo sapien
gttgcctatgagaagcttctggtcc

SEQ ID NO: 690141 - DNA, 25 bp, Homo sapien
gccccctccttgtagttgcctatga

SEQ ID NO: 690142 - DNA, 25 bp, Homo sapien
cttctggtcctgttggcttgatgct

SEQ ID NO: 690143 - DNA, 25 bp, Homo sapien
tctggtcctgttggcttgatgctgt

SEQ ID NO: 690144 - DNA, 25 bp, Homo sapien
tcttcagtgccgtgcactgggcatt

SEQ ID NO: 690145 - DNA, 25 bp, Homo sapien
cattgtactcttcagtgccgtgcac

SEQ ID NO: 690146 - DNA, 25 bp, Homo sapien
gcatttacgccattgtactcttcag

SEQ ID NO: 690147 - DNA, 25 bp, Homo sapien
aataacagcatttacgccattgtac

SEQ ID NO: 690148 - DNA, 25 bp, Homo sapien
ctactaagattttcacacgtaccat

SEQ ID NO: 690149 - DNA, 25 bp, Homo sapien
tttccaacgtctactaagattttca

SEQ ID NO: 690150 - DNA, 25 bp, Homo sapien
cctgttttccaacgtctactaagat

SEQ ID NO: 690151 - DNA, 25 bp, Homo sapien
caacgtctactaagattttcacacg

SEQ ID NO: 690152 - DNA, 25 bp, Homo sapien
gattgggtgagaaccagtccacaca

SEQ ID NO: 690153 - DNA, 25 bp, Homo sapien
ggacaacgatggtgcagcggcagtg

SEQ ID NO: 690154 - DNA, 25 bp, Homo sapien
tttcagtgccgtagtgattgggtga

SEQ ID NO: 690155 - DNA, 25 bp, Homo sapien
caccactgaacctcgaatgtcaggg

SEQ ID NO: 690156 - DNA, 25 bp, Homo sapien
gagggctggggagtgcctggccttg

SEQ ID NO: 690157 - DNA, 25 bp, Homo sapien
ggccttgctttaccagctcattcac

SEQ ID NO: 690158 - DNA, 25 bp, Homo sapien
cttgctttaccagctcattcaccat

SEQ ID NO: 690159 - DNA, 25 bp, Homo sapien
ctggggagtgcctggccttgcttta

SEQ ID NO: 690160 - DNA, 25 bp, Homo sapien
ttcctcttcaattggccggcctcat

SEQ ID NO: 690161 - DNA, 25 bp, Homo sapien
cttcctcttcaattggccggcctca

SEQ ID NO: 690162 - DNA, 25 bp, Homo sapien
tcaattggccggcctcatcttgtcc

SEQ ID NO: 690163 - DNA, 25 bp, Homo sapien
tcttcaattggccggcctcatcttg

SEQ ID NO: 690164 - DNA, 25 bp, Homo sapien
ttcattggtcgctgccagtccccga

SEQ ID NO: 690165 - DNA, 25 bp, Homo sapien
tgttcctttcattggtcgctgccag

SEQ ID NO: 690166 - DNA, 25 bp, Homo sapien
tctgttcctttcattggtcgctgcc

SEQ ID NO: 690167 - DNA, 25 bp, Homo sapien
tcctttcattggtcgctgccagtcc

SEQ ID NO: 690168 - DNA, 25 bp, Homo sapien
gactgtcagaagttggatgatgcta

SEQ ID NO: 690169 - DNA, 25 bp, Homo sapien
ctgtcagaagttggatgatgctaca

SEQ ID NO: 690170 - DNA, 25 bp, Homo sapien
actgtcagaagttggatgatgctac

SEQ ID NO: 690171 - DNA, 25 bp, Homo sapien
tgtcagaagttggatgatgctacat

SEQ ID NO: 690172 - DNA, 25 bp, Homo sapien
catttcaggcagatagccttattta

SEQ ID NO: 690173 - DNA, 25 bp, Homo sapien
tagccttatttagactcccagtgcc

SEQ ID NO: 690174 - DNA, 25 bp, Homo sapien
cagtgccatttgtgagattacagtc

SEQ ID NO: 690175 - DNA, 25 bp, Homo sapien
gattacagtctagagactcctgaaa

SEQ ID NO: 690176 - DNA, 25 bp, Homo sapien
ggcctctcggaggaaagcaggctgg

SEQ ID NO: 690177 - DNA, 25 bp, Homo sapien
gctgggaaggaggaaggtctttcat

SEQ ID NO: 690178 - DNA, 25 bp, Homo sapien
cctgttgtggcctctcggaggaaag

SEQ ID NO: 690179 - DNA, 25 bp, Homo sapien
tgttgtggcctctcggaggaaagca

SEQ ID NO: 690180 - DNA, 25 bp, Homo sapien
ggctgatttgctcatctcctctctg

SEQ ID NO: 690181 - DNA, 25 bp, Homo sapien
cagggaacttgtccactgcaggatc

SEQ ID NO: 690182 - DNA, 25 bp, Homo sapien
caaattgacccttagccactcctgt

SEQ ID NO: 690183 - DNA, 25 bp, Homo sapien
tgcaggatctgagataacaccggct

SEQ ID NO: 690184 - DNA, 25 bp, Homo sapien
ccacttcgatcactgtgcacagcca

SEQ ID NO: 690185 - DNA, 25 bp, Homo sapien
gcagggacactcaaactgttccttt

SEQ ID NO: 690186 - DNA, 25 bp, Homo sapien
gagcagggacactcaaactgttcct

SEQ ID NO: 690187 - DNA, 25 bp, Homo sapien
ctttcctcccacttcgatcactgtg

SEQ ID NO: 690188 - DNA, 25 bp, Homo sapien
tccttcaacgagatggtgctagcca

SEQ ID NO: 690189 - DNA, 25 bp, Homo sapien
tgtttccagagcaaagcacggcact

SEQ ID NO: 690190 - DNA, 25 bp, Homo sapien
tagagccctgaatgaggacacctgt

SEQ ID NO: 690191 - DNA, 25 bp, Homo sapien
tgctttatactagcgcctgccgagg

SEQ ID NO: 690192 - DNA, 25 bp, Homo sapien
tttgctgggaagaagaatcatggtc

SEQ ID NO: 690193 - DNA, 25 bp, Homo sapien
taaaatcaaattccagctcgttcat

SEQ ID NO: 690194 - DNA, 25 bp, Homo sapien
tatctgatctatgctctgcagctgt

SEQ ID NO: 690195 - DNA, 25 bp, Homo sapien
ggtccccaatgatcaaattatctga

SEQ ID NO: 690196 - DNA, 25 bp, Homo sapien
tctggttagtcatggccatgctgtc

SEQ ID NO: 690197 - DNA, 25 bp, Homo sapien
tgctgtctcgtgcataggaggtatc

SEQ ID NO: 690198 - DNA, 25 bp, Homo sapien
cgtgcataggaggtatcttctctgc

SEQ ID NO: 690199 - DNA, 25 bp, Homo sapien
cctgtggctctggttagtcatggcc

SEQ ID NO: 690200 - DNA, 25 bp, Homo sapien
gagcttctcaggatatggcagcacc

SEQ ID NO: 690201 - DNA, 25 bp, Homo sapien
aacctgggctggtattcagccggag

SEQ ID NO: 690202 - DNA, 25 bp, Homo sapien
tgttcacaagtgagagggcaaacct

SEQ ID NO: 690203 - DNA, 25 bp, Homo sapien
ccggagtcccagtagatggcactgt

SEQ ID NO: 690204 - DNA, 25 bp, Homo sapien
tttaccacttctggagacaactttg

SEQ ID NO: 690205 - DNA, 25 bp, Homo sapien
ttaccacttctggagacaactttgt

SEQ ID NO: 690206 - DNA, 25 bp, Homo sapien
ttctggagacaactttgtttactgt

SEQ ID NO: 690207 - DNA, 25 bp, Homo sapien
cttgtacttttaccacttctggaga

SEQ ID NO: 690208 - DNA, 25 bp, Homo sapien
caaacacagcctgagcggctccagt

SEQ ID NO: 690209 - DNA, 25 bp, Homo sapien
aaacacagcctgagcggctccagtt

SEQ ID NO: 690210 - DNA, 25 bp, Homo sapien
cattcttctggcaggaactggcaag

SEQ ID NO: 690211 - DNA, 25 bp, Homo sapien
ttgtcctaacaggcattcttctggc

SEQ ID NO: 690212 - DNA, 25 bp, Homo sapien
attcttctggcaggaactggcaagg

SEQ ID NO: 690213 - DNA, 25 bp, Homo sapien
ttcttctggcaggaactggcaagga

SEQ ID NO: 690214 - DNA, 25 bp, Homo sapien
ggagactcatcatgggatgggctcc

SEQ ID NO: 690215 - DNA, 25 bp, Homo sapien
gaaacggagactcatcatgggatgg

SEQ ID NO: 690216 - DNA, 25 bp, Homo sapien
atgtgcagtaaacgggtggtcccgc

SEQ ID NO: 690217 - DNA, 25 bp, Homo sapien
gtaaacgggtggtcccgctgacagc

SEQ ID NO: 690218 - DNA, 25 bp, Homo sapien
tctgctgggaactccgcagtgtgga

SEQ ID NO: 690219 - DNA, 25 bp, Homo sapien
gatgagcatcacgtacttagggccg

SEQ ID NO: 690220 - DNA, 25 bp, Homo sapien
acactcacacaattgaagttcccac

SEQ ID NO: 690221 - DNA, 25 bp, Homo sapien
gaagttcccaccttcaggctgaggc

SEQ ID NO: 690222 - DNA, 25 bp, Homo sapien
cactgtctagcaaagcacactgttg

SEQ ID NO: 690223 - DNA, 25 bp, Homo sapien
tagaccactgtctagcaaagcacac

SEQ ID NO: 690224 - DNA, 25 bp, Homo sapien
ctagcaaagcacactgttgattaaa

SEQ ID NO: 690225 - DNA, 25 bp, Homo sapien
gggtcttagaccactgtctagcaaa

SEQ ID NO: 690226 - DNA, 25 bp, Homo sapien
tatcatggcgccctccacagatgtt

SEQ ID NO: 690227 - DNA, 25 bp, Homo sapien
agattcaatcatgccttgatcatcg

SEQ ID NO: 690228 - DNA, 25 bp, Homo sapien
catggcaatctagagtatcatggcg

SEQ ID NO: 690229 - DNA, 25 bp, Homo sapien
gatcatcgactctcatccagttgcc

SEQ ID NO: 690230 - DNA, 25 bp, Homo sapien
aagagttattgttgtgatggtttca

SEQ ID NO: 690231 - DNA, 25 bp, Homo sapien
tcagcagagcgagtactaaggaacc

SEQ ID NO: 690232 - DNA, 25 bp, Homo sapien
ggaaccacatggtcaggccttccac

SEQ ID NO: 690233 - DNA, 25 bp, Homo sapien
tagcaagtctgcagtaactttactg

SEQ ID NO: 690234 - DNA, 25 bp, Homo sapien
ccccagggcaagagtcattctcaac

SEQ ID NO: 690235 - DNA, 25 bp, Homo sapien
ggcaagagtcattctcaacatctca

SEQ ID NO: 690236 - DNA, 25 bp, Homo sapien
cccagggcaagagtcattctcaaca

SEQ ID NO: 690237 - DNA, 25 bp, Homo sapien
cagggcaagagtcattctcaacatc

SEQ ID NO: 690238 - DNA, 25 bp, Homo sapien
taccccagggcaagagtcattctca

SEQ ID NO: 690239 - DNA, 25 bp, Homo sapien
ggcaagagtcattctcaacatctca

SEQ ID NO: 690240 - DNA, 25 bp, Homo sapien
ataccccagggcaagagtcattctc

SEQ ID NO: 690241 - DNA, 25 bp, Homo sapien
cagggcaagagtcattctcaacatc

SEQ ID NO: 690242 - DNA, 25 bp, Homo sapien
ggcaagagtcattctcaacatctca

SEQ ID NO: 690243 - DNA, 25 bp, Homo sapien
cccagggcaagagtcattctcaaca

SEQ ID NO: 690244 - DNA, 25 bp, Homo sapien
ataccccagggcaagagtcattctc

SEQ ID NO: 690245 - DNA, 25 bp, Homo sapien
cagggcaagagtcattctcaacatc

SEQ ID NO: 690246 - DNA, 25 bp, Homo sapien
tctgcgatggtaaaagaacagttcc

SEQ ID NO: 690247 - DNA, 25 bp, Homo sapien
cagaaactataatttgggcccagct

SEQ ID NO: 690248 - DNA, 25 bp, Homo sapien
cattttatccccaaggtggatgcca

SEQ ID NO: 690249 - DNA, 25 bp, Homo sapien
gaaaagtcctttcatagctgtccag

SEQ ID NO: 690250 - DNA, 25 bp, Homo sapien
ccaaagatggttcttgtatttgcat

SEQ ID NO: 690251 - DNA, 25 bp, Homo sapien
cctgatcctgactcaaaagccactt

SEQ ID NO: 690252 - DNA, 25 bp, Homo sapien
ccattaatcagctccctagaagcca

SEQ ID NO: 690253 - DNA, 25 bp, Homo sapien
actgggaaggaggattgagtcccct

SEQ ID NO: 690254 - DNA, 25 bp, Homo sapien
aaattccattaatcagctccctaga

SEQ ID NO: 690255 - DNA, 25 bp, Homo sapien
cacacggcttctctgcacctgagtt

SEQ ID NO: 690256 - DNA, 25 bp, Homo sapien
tccaaagacaccttctgatatgcgg

SEQ ID NO: 690257 - DNA, 25 bp, Homo sapien
catctctcacgttcagaatgtgcct

SEQ ID NO: 690258 - DNA, 25 bp, Homo sapien
gcaaagaaaggcatatcactcagga

SEQ ID NO: 690259 - DNA, 25 bp, Homo sapien
aaggagcaagcgctacggcttgtta

SEQ ID NO: 690260 - DNA, 25 bp, Homo sapien
cttgttagtaagaggcggctaatga

SEQ ID NO: 690261 - DNA, 25 bp, Homo sapien
gcggagtagtatccatggagacaca

SEQ ID NO: 690262 - DNA, 25 bp, Homo sapien
gacacaacaccaaggccttcagggt

SEQ ID NO: 690263 - DNA, 25 bp, Homo sapien
agctgactccgctcacacttctgat

SEQ ID NO: 690264 - DNA, 25 bp, Homo sapien
ctatcgctggtctaggcagctgact

SEQ ID NO: 690265 - DNA, 25 bp, Homo sapien
gattctcccatcgatggtgccacct

SEQ ID NO: 690266 - DNA, 25 bp, Homo sapien
ttctgattctcccatcgatggtgcc

SEQ ID NO: 690267 - DNA, 25 bp, Homo sapien
ctgcacggttgtccaggttactcac

SEQ ID NO: 690268 - DNA, 25 bp, Homo sapien
gacatcactgcacggttgtccaggt

SEQ ID NO: 690269 - DNA, 25 bp, Homo sapien
cactgcacggttgtccaggttactc

SEQ ID NO: 690270 - DNA, 25 bp, Homo sapien
tggacatcactgcacggttgtccag

SEQ ID NO: 690271 - DNA, 25 bp, Homo sapien
cagagccaggtgtgccacccaagca

SEQ ID NO: 690272 - DNA, 25 bp, Homo sapien
gggctcctccatgtggaaaccagag

SEQ ID NO: 690273 - DNA, 25 bp, Homo sapien
ttccacaaagcctgatgggctcctc

SEQ ID NO: 690274 - DNA, 25 bp, Homo sapien
tgtgccacccaagcaggtgccctca

SEQ ID NO: 690275 - DNA, 25 bp, Homo sapien
cagcgctggcgagtgtttgggaatg

SEQ ID NO: 690276 - DNA, 25 bp, Homo sapien
cgagtgtttgggaatgagcgcacat

SEQ ID NO: 690277 - DNA, 25 bp, Homo sapien
atgagcgcacatcagcacacgccag

SEQ ID NO: 690278 - DNA, 25 bp, Homo sapien
ctctggcggccagcgctggcgagtg

SEQ ID NO: 690279 - DNA, 25 bp, Homo sapien
ttgtatgcatgttgggatacacggg

SEQ ID NO: 690280 - DNA, 25 bp, Homo sapien
agtgctgctaggagacccgacagcc

SEQ ID NO: 690281 - DNA, 25 bp, Homo sapien
ctcctggcccgaggctccttgtgcc

SEQ ID NO: 690282 - DNA, 25 bp, Homo sapien
tgctgctaggagacccgacagcctc

SEQ ID NO: 690283 - DNA, 25 bp, Homo sapien
tcagttgtccaggcacttcctacag

SEQ ID NO: 690284 - DNA, 25 bp, Homo sapien
gggacaggatcgagtccacggagga

SEQ ID NO: 690285 - DNA, 25 bp, Homo sapien
ggcacttcctacagggggacaggat

SEQ ID NO: 690286 - DNA, 25 bp, Homo sapien
acaggatcgagtccacggaggagca

SEQ ID NO: 690287 - DNA, 25 bp, Homo sapien
tgccacacactccagggactggtgg

SEQ ID NO: 690288 - DNA, 25 bp, Homo sapien
tgtgccacacactccagggactggt

SEQ ID NO: 690289 - DNA, 25 bp, Homo sapien
gtgccacacactccagggactggtg

SEQ ID NO: 690290 - DNA, 25 bp, Homo sapien
ccacacactccagggactggtggaa

SEQ ID NO: 690291 - DNA, 25 bp, Homo sapien
ggttcctccattaggagctgttctg

SEQ ID NO: 690292 - DNA, 25 bp, Homo sapien
tccattaggagctgttctgtcagct

SEQ ID NO: 690293 - DNA, 25 bp, Homo sapien
cctgggttcctccattaggagctgt

SEQ ID NO: 690294 - DNA, 25 bp, Homo sapien
tcctccattaggagctgttctgtca

SEQ ID NO: 690295 - DNA, 25 bp, Homo sapien
cagagatctggtccacaacagaggc

SEQ ID NO: 690296 - DNA, 25 bp, Homo sapien
cagaggctgtaataggtggggacca

SEQ ID NO: 690297 - DNA, 25 bp, Homo sapien
agatctggtccacaacagaggctgt

SEQ ID NO: 690298 - DNA, 25 bp, Homo sapien
gaagaagagcccaagcaattgtcct

SEQ ID NO: 690299 - DNA, 25 bp, Homo sapien
atatccaatttacggagggagaagg

SEQ ID NO: 690300 - DNA, 25 bp, Homo sapien
taaacatatccaatttacggaggga

SEQ ID NO: 690301 - DNA, 25 bp, Homo sapien
aacatatccaatttacggagggaga

SEQ ID NO: 690302 - DNA, 25 bp, Homo sapien
catatccaatttacggagggagaag

SEQ ID NO: 690303 - DNA, 25 bp, Homo sapien
tgtccaacttgttggcgtcattgga

SEQ ID NO: 690304 - DNA, 25 bp, Homo sapien
tctgaattctgtccaacttgttggc

SEQ ID NO: 690305 - DNA, 25 bp, Homo sapien
tggcgtcattggatgccagcttccc

SEQ ID NO: 690306 - DNA, 25 bp, Homo sapien
caacttgttggcgtcattggatgcc

SEQ ID NO: 690307 - DNA, 25 bp, Homo sapien
tcagcgcaggacaaagaggagcctg

SEQ ID NO: 690308 - DNA, 25 bp, Homo sapien
cgcaggacaaagaggagcctgccat

SEQ ID NO: 690309 - DNA, 25 bp, Homo sapien
ctcatcagcgcaggacaaagaggag

SEQ ID NO: 690310 - DNA, 25 bp, Homo sapien
tcatcagcgcaggacaaagaggagc

SEQ ID NO: 690311 - DNA, 25 bp, Homo sapien
tggctgagctcatcgtgttgtgact

SEQ ID NO: 690312 - DNA, 25 bp, Homo sapien
agttggcaaccctgcacgtctgtgg

SEQ ID NO: 690313 - DNA, 25 bp, Homo sapien
tgacaaaggtgtgcccaggtgagct

SEQ ID NO: 690314 - DNA, 25 bp, Homo sapien
acgtctgtgggtttgactccatgca

SEQ ID NO: 690315 - DNA, 25 bp, Homo sapien
cttgtaaaggccagctttagcttca

SEQ ID NO: 690316 - DNA, 25 bp, Homo sapien
taaaggccagctttagcttcagctt

SEQ ID NO: 690317 - DNA, 25 bp, Homo sapien
tcagctttttcaggttgtcctgctt

SEQ ID NO: 690318 - DNA, 25 bp, Homo sapien
ccagctttagcttcagctttttcag

SEQ ID NO: 690319 - DNA, 25 bp, Homo sapien
ggcccgagtgccgttgggtgcctgc

SEQ ID NO: 690320 - DNA, 25 bp, Homo sapien
tgtggcccgagtgccgttgggtgcc

SEQ ID NO: 690321 - DNA, 25 bp, Homo sapien
gagctgtggcccgagtgccgttggg

SEQ ID NO: 690322 - DNA, 25 bp, Homo sapien
gagtgccgttgggtgcctgcgccct

SEQ ID NO: 690323 - DNA, 25 bp, Homo sapien
acacagcaggtcgtggcatccctgg

SEQ ID NO: 690324 - DNA, 25 bp, Homo sapien
acagcaggtcgtggcatccctgggg

SEQ ID NO: 690325 - DNA, 25 bp, Homo sapien
cacagcaggtcgtggcatccctggg

SEQ ID NO: 690326 - DNA, 25 bp, Homo sapien
ttctcaccgaggaaagaggcgttgt

SEQ ID NO: 690327 - DNA, 25 bp, Homo sapien
gggaacattctgtcctatgagcagc

SEQ ID NO: 690328 - DNA, 25 bp, Homo sapien
cattctgtcctatgagcagcagtaa

SEQ ID NO: 690329 - DNA, 25 bp, Homo sapien
tgagcagcagtaatttctcaccgag

SEQ ID NO: 690330 - DNA, 25 bp, Homo sapien
ttgaatagcctcataatttctgtgc

SEQ ID NO: 690331 - DNA, 25 bp, Homo sapien
aggcacaggtataaggctcttgttg

SEQ ID NO: 690332 - DNA, 25 bp, Homo sapien
tttctgtgcactaaaatcctgtggg

SEQ ID NO: 690333 - DNA, 25 bp, Homo sapien
ggtataaggctcttgttgaatagcc

SEQ ID NO: 690334 - DNA, 25 bp, Homo sapien
ccccttacacctcctttcaggctca

SEQ ID NO: 690335 - DNA, 25 bp, Homo sapien
ggggaaacatgcacatctgcaggtg

SEQ ID NO: 690336 - DNA, 25 bp, Homo sapien
actggggtccccaggtatgtctcca

SEQ ID NO: 690337 - DNA, 25 bp, Homo sapien
ggaaacatgcacatctgcaggtgtc

SEQ ID NO: 690338 - DNA, 25 bp, Homo sapien
tccccaggtatgtctccacaggtga

SEQ ID NO: 690339 - DNA, 25 bp, Homo sapien
tgtcatctgcaggtgtccacctcct

SEQ ID NO: 690340 - DNA, 25 bp, Homo sapien
ctggatctgctgcactggggtcccc

SEQ ID NO: 690341 - DNA, 25 bp, Homo sapien
ctggggtccccaggtgtgtctccac

SEQ ID NO: 690342 - DNA, 25 bp, Homo sapien
tctgcaggtgtccacctcctggatc

SEQ ID NO: 690343 - DNA, 25 bp, Homo sapien
gggaacacacctgtcatctgcaggt

SEQ ID NO: 690344 - DNA, 25 bp, Homo sapien
ggtctccaggtatgtctccacaggt

SEQ ID NO: 690345 - DNA, 25 bp, Homo sapien
ctggatctgctgcactggggtctcc

SEQ ID NO: 690346 - DNA, 25 bp, Homo sapien
ctgtcatctgtaggtgtccacctcc

SEQ ID NO: 690347 - DNA, 25 bp, Homo sapien
aaaggcctttcacacacctgtggcc

SEQ ID NO: 690348 - DNA, 25 bp, Homo sapien
gggagccactaagtttacaatcatt

SEQ ID NO: 690349 - DNA, 25 bp, Homo sapien
tttacaatcattgtcggggaactcg

SEQ ID NO: 690350 - DNA, 25 bp, Homo sapien
cactaagtttacaatcattgtcggg

SEQ ID NO: 690351 - DNA, 25 bp, Homo sapien
gagccactaagtttacaatcattgt

SEQ ID NO: 690352 - DNA, 25 bp, Homo sapien
tgacacgtagatcccaatggtaaaa

SEQ ID NO: 690353 - DNA, 25 bp, Homo sapien
aaggatcccttgaatgtatctggaa

SEQ ID NO: 690354 - DNA, 25 bp, Homo sapien
ctagacgtctggagatgacacgtag

SEQ ID NO: 690355 - DNA, 25 bp, Homo sapien
tgcactggaggccccgctgctggtc

SEQ ID NO: 690356 - DNA, 25 bp, Homo sapien
tttacccacgaggagtggagaatca

SEQ ID NO: 690357 - DNA, 25 bp, Homo sapien
gtcaggatccagttttacccacgag

SEQ ID NO: 690358 - DNA, 25 bp, Homo sapien
cactgtgtggcgtgcactgtcagga

SEQ ID NO: 690359 - DNA, 25 bp, Homo sapien
cagtaagtccttgtgcagcagagcc

SEQ ID NO: 690360 - DNA, 25 bp, Homo sapien
ttccaacaaggaagagaggtggcct

SEQ ID NO: 690361 - DNA, 25 bp, Homo sapien
gaactcagatgcgtgtcttccaggc

SEQ ID NO: 690362 - DNA, 25 bp, Homo sapien
ccaatgtcccgtggctgagaagtga

SEQ ID NO: 690363 - DNA, 25 bp, Homo sapien
gaggtggccttatccccatttcacg

SEQ ID NO: 690364 - DNA, 25 bp, Homo sapien
gcatagacaacatgccaatcctgag

SEQ ID NO: 690365 - DNA, 25 bp, Homo sapien
ccaagcctaggtggcatctggtgct

SEQ ID NO: 690366 - DNA, 25 bp, Homo sapien
taagtagcttgttcaggccaatgga

SEQ ID NO: 690367 - DNA, 25 bp, Homo sapien
tcatctcactgaagtagggcttgga

SEQ ID NO: 690368 - DNA, 25 bp, Homo sapien
taaaagcacggtccaacagcataga

SEQ ID NO: 690369 - DNA, 25 bp, Homo sapien
gaaaggctcaccactcttaaaagga

SEQ ID NO: 690370 - DNA, 25 bp, Homo sapien
gatacccggactggcaaggtcttaa

SEQ ID NO: 690371 - DNA, 25 bp, Homo sapien
cctgaacagtcagtgcagagacact

SEQ ID NO: 690372 - DNA, 25 bp, Homo sapien
tgcacccgtggaaaggttccgcagg

SEQ ID NO: 690373 - DNA, 25 bp, Homo sapien
cacccgtggaaaggttccgcaggag

SEQ ID NO: 690374 - DNA, 25 bp, Homo sapien
ccgtggaaaggttccgcaggaggag

SEQ ID NO: 690375 - DNA, 25 bp, Homo sapien
cctgcacccgtggaaaggttccgca

SEQ ID NO: 690376 - DNA, 25 bp, Homo sapien
ctgtggagtgatcggggtgatgaac

SEQ ID NO: 690377 - DNA, 25 bp, Homo sapien
ggcggatggccacgtcttctacttc

SEQ ID NO: 690378 - DNA, 25 bp, Homo sapien
cggatggccacgtcttctacttcct

SEQ ID NO: 690379 - DNA, 25 bp, Homo sapien
agggcggatggccacgtcttctact

SEQ ID NO: 690380 - DNA, 25 bp, Homo sapien
agtgagggcggatggccacgtcttc

SEQ ID NO: 690381 - DNA, 25 bp, Homo sapien
cggatggccacgtcttctacttcct

SEQ ID NO: 690382 - DNA, 25 bp, Homo sapien
ggcggatggccacgtcttctacttc

SEQ ID NO: 690383 - DNA, 25 bp, Homo sapien
agggcggatggccacgtcttctact

SEQ ID NO: 690384 - DNA, 25 bp, Homo sapien
agtgagggcggatggccacgtcttc

SEQ ID NO: 690385 - DNA, 25 bp, Homo sapien
ccccgagtgagggcagacggccaca

SEQ ID NO: 690386 - DNA, 25 bp, Homo sapien
cgagtgagggcagacggccacatcc

SEQ ID NO: 690387 - DNA, 25 bp, Homo sapien
agaccccgagtgagggcagacggcc

SEQ ID NO: 690388 - DNA, 25 bp, Homo sapien
gagtgagggcagacggccacatcct

SEQ ID NO: 690389 - DNA, 25 bp, Homo sapien
acatcctctaattcctgtgtcacac

SEQ ID NO: 690390 - DNA, 25 bp, Homo sapien
ggcagatggccacatcctctaattc

SEQ ID NO: 690391 - DNA, 25 bp, Homo sapien
cgagtgagggcagatggccacatcc

SEQ ID NO: 690392 - DNA, 25 bp, Homo sapien
agaccccgagtgagggcagatggcc

SEQ ID NO: 690393 - DNA, 25 bp, Homo sapien
agaagccacatgccttggtgtggtt

SEQ ID NO: 690394 - DNA, 25 bp, Homo sapien
aagaagccacatgccttggtgtggt

SEQ ID NO: 690395 - DNA, 25 bp, Homo sapien
gattgaccacagattagttttgcca

SEQ ID NO: 690396 - DNA, 25 bp, Homo sapien
gaacataggtaattcacccaactga

SEQ ID NO: 690397 - DNA, 25 bp, Homo sapien
gatttggtcctgtagcaaagcgttt

SEQ ID NO: 690398 - DNA, 25 bp, Homo sapien
tgttaaaaccagtccctgcacctga

SEQ ID NO: 690399 - DNA, 25 bp, Homo sapien
gatacttggaaagacgcttactgct

SEQ ID NO: 690400 - DNA, 25 bp, Homo sapien
cagattgctgaatggacttggatgc

SEQ ID NO: 690401 - DNA, 25 bp, Homo sapien
gcacatctgacgataagactctcgg

SEQ ID NO: 690402 - DNA, 25 bp, Homo sapien
gaaaatgattcccaattctgagagg

SEQ ID NO: 690403 - DNA, 25 bp, Homo sapien
gaaggagaggcgccatgccacgcca

SEQ ID NO: 690404 - DNA, 25 bp, Homo sapien
catgccacgccacttctatctgggc

SEQ ID NO: 690405 - DNA, 25 bp, Homo sapien
ctatctgggccagtcctcggtggtg

SEQ ID NO: 690406 - DNA, 25 bp, Homo sapien
cacgttgttgcccagcggattggaa

SEQ ID NO: 690407 - DNA, 25 bp, Homo sapien
gattcacggcgtctatattctgcca

SEQ ID NO: 690408 - DNA, 25 bp, Homo sapien
agcaagccctttctgcacggcgaac

SEQ ID NO: 690409 - DNA, 25 bp, Homo sapien
gctactgcgcttggcgagaagcaag

SEQ ID NO: 690410 - DNA, 25 bp, Homo sapien
tgagttgtcccctgtatcggtctgt

SEQ ID NO: 690411 - DNA, 25 bp, Homo sapien
ttgccagaaggctggatgccaatat

SEQ ID NO: 690412 - DNA, 25 bp, Homo sapien
taaaatacacatcccgtaacatcag

SEQ ID NO: 690413 - DNA, 25 bp, Homo sapien
gctttcctgaattgtgatctataga

SEQ ID NO: 690414 - DNA, 25 bp, Homo sapien
cacgatgtctccatcacgggtaaaa

SEQ ID NO: 690415 - DNA, 25 bp, Homo sapien
gaaggctttaccacgatgtctccat

SEQ ID NO: 690416 - DNA, 25 bp, Homo sapien
ttcattcaggtccataacaattgtc

SEQ ID NO: 690417 - DNA, 25 bp, Homo sapien
ttcaggtccataacaattgtcttac

SEQ ID NO: 690418 - DNA, 25 bp, Homo sapien
tgcttttcaattggctggcaaattc

SEQ ID NO: 690419 - DNA, 25 bp, Homo sapien
aattggctggcaaattctgtcttca

SEQ ID NO: 690420 - DNA, 25 bp, Homo sapien
actccttcgggagacagcaactggg

SEQ ID NO: 690421 - DNA, 25 bp, Homo sapien
cttcgggagacagcaactgggaatt

SEQ ID NO: 690422 - DNA, 25 bp, Homo sapien
gtacactccttcgggagacagcaac

SEQ ID NO: 690423 - DNA, 25 bp, Homo sapien
tccttcgggagacagcaactgggaa

SEQ ID NO: 690424 - DNA, 25 bp, Homo sapien
acagctcgagtctccttgtcattga

SEQ ID NO: 690425 - DNA, 25 bp, Homo sapien
ggtgtctttccaaacagctcgagtc

SEQ ID NO: 690426 - DNA, 25 bp, Homo sapien
ctgtgacaaggcaggcgtcagaacg

SEQ ID NO: 690427 - DNA, 25 bp, Homo sapien
tcagaacggtgtctttccaaacagc

SEQ ID NO: 690428 - DNA, 25 bp, Homo sapien
gtcattaaccttgggccagagggcc

SEQ ID NO: 690429 - DNA, 25 bp, Homo sapien
gatccgtgcgactgcagtgcaggcc

SEQ ID NO: 690430 - DNA, 25 bp, Homo sapien
tgcgcaagttgcacaggtcattaac

SEQ ID NO: 690431 - DNA, 25 bp, Homo sapien
actgcccttactgcgctgactttga

SEQ ID NO: 690432 - DNA, 25 bp, Homo sapien
caggtgtaaatacaggtgcaggtgt

SEQ ID NO: 690433 - DNA, 25 bp, Homo sapien
agacaggtacagatgcagatgggat

SEQ ID NO: 690434 - DNA, 25 bp, Homo sapien
caagtataggtgtagatgtagaggc

SEQ ID NO: 690435 - DNA, 25 bp, Homo sapien
acaggcaaagacataggttcaggtg

SEQ ID NO: 690436 - DNA, 25 bp, Homo sapien
acgtaggtgcgggtatagatgttgg

SEQ ID NO: 690437 - DNA, 25 bp, Homo sapien
agctgtagatgtagatttagatgca

SEQ ID NO: 690438 - DNA, 25 bp, Homo sapien
caggtacaggagtagacgtaggtgc

SEQ ID NO: 690439 - DNA, 25 bp, Homo sapien
caggtgtaggtacaagcgtacacac

SEQ ID NO: 690440 - DNA, 25 bp, Homo sapien
ctgcatccacgtggtcaggttgatc

SEQ ID NO: 690441 - DNA, 25 bp, Homo sapien
caccctgcatccacgtggtcaggtt

SEQ ID NO: 690442 - DNA, 25 bp, Homo sapien
tgttgctcattactcaagtgccatt

SEQ ID NO: 690443 - DNA, 25 bp, Homo sapien
tcctgttgctcattactcaagtgcc

SEQ ID NO: 690444 - DNA, 25 bp, Homo sapien
aaagggatcttgaagctatatccaa

SEQ ID NO: 690445 - DNA, 25 bp, Homo sapien
aagggatcttgaagctatatccaaa

SEQ ID NO: 690446 - DNA, 25 bp, Homo sapien
caaaagggatcttgaagctatatcc

SEQ ID NO: 690447 - DNA, 25 bp, Homo sapien
aaaagggatcttgaagctatatcca

SEQ ID NO: 690448 - DNA, 25 bp, Homo sapien
tcccttgggaatgtgttcttccttc

SEQ ID NO: 690449 - DNA, 25 bp, Homo sapien
aaccggttggtctgtgattctcgca

SEQ ID NO: 690450 - DNA, 25 bp, Homo sapien
ttcccgcaaccggttggtctgtgat

SEQ ID NO: 690451 - DNA, 25 bp, Homo sapien
tgattctcgcagtgtctcttttccc

SEQ ID NO: 690452 - DNA, 25 bp, Homo sapien
cagggagcgatctgtactggtctct

SEQ ID NO: 690453 - DNA, 25 bp, Homo sapien
gtggccctgatacaagcacttggtt

SEQ ID NO: 690454 - DNA, 25 bp, Homo sapien
tgagctgggtagcaggctgattcca

SEQ ID NO: 690455 - DNA, 25 bp, Homo sapien
tcacctcatcgagagggagacagag

SEQ ID NO: 690456 - DNA, 25 bp, Homo sapien
aacagggtgttttgatgcacacaca

SEQ ID NO: 690457 - DNA, 25 bp, Homo sapien
gagtccctgaaaccccagacaaaga

SEQ ID NO: 690458 - DNA, 25 bp, Homo sapien
tcttggcttctgaggcctaacaggg

SEQ ID NO: 690459 - DNA, 25 bp, Homo sapien
ccatcacccatgcagggcaaaggga

SEQ ID NO: 690460 - DNA, 25 bp, Homo sapien
tctcggattttagactctgccagcg

SEQ ID NO: 690461 - DNA, 25 bp, Homo sapien
gatgccagtgggagctttcaattct

SEQ ID NO: 690462 - DNA, 25 bp, Homo sapien
ttctgagcatgcagcgagcagtccc

SEQ ID NO: 690463 - DNA, 25 bp, Homo sapien
ttctgtgatgccagtgggagctttc

SEQ ID NO: 690464 - DNA, 25 bp, Homo sapien
ccctgagcacgttccatctgagctg

SEQ ID NO: 690465 - DNA, 25 bp, Homo sapien
cagagagaagagtccggctggtcct

SEQ ID NO: 690466 - DNA, 25 bp, Homo sapien
tctgagctgggtttatgcacggatc

SEQ ID NO: 690467 - DNA, 25 bp, Homo sapien
tgcacggatccattgttgtcaacac

SEQ ID NO: 690468 - DNA, 25 bp, Homo sapien
tccctgacggcctctcttgagctga

SEQ ID NO: 690469 - DNA, 25 bp, Homo sapien
gtctgcagagatctcgtactctaag

SEQ ID NO: 690470 - DNA, 25 bp, Homo sapien
ctgatgccgtgagagctggtcctga

SEQ ID NO: 690471 - DNA, 25 bp, Homo sapien
acagattgagagaaagtgccacgac

SEQ ID NO: 690472 - DNA, 25 bp, Homo sapien
ctctgggactgcgtggcgactgggt

SEQ ID NO: 690473 - DNA, 25 bp, Homo sapien
ccttgcggcgaagcccctttgcacg

SEQ ID NO: 690474 - DNA, 25 bp, Homo sapien
gcgactgggttggtgtaagcttcca

SEQ ID NO: 690475 - DNA, 25 bp, Homo sapien
ttcctgggcgcagggtcacttccac

SEQ ID NO: 690476 - DNA, 25 bp, Homo sapien
tgaagcttctttccgtcaagggcgg

SEQ ID NO: 690477 - DNA, 25 bp, Homo sapien
tggtgcctttttgcccgggctctgg

SEQ ID NO: 690478 - DNA, 25 bp, Homo sapien
tggtggcctccggtattgtctctgg

SEQ ID NO: 690479 - DNA, 25 bp, Homo sapien
tcaaaaggctcagaattttggtgcc

SEQ ID NO: 690480 - DNA, 25 bp, Homo sapien
gagatgccaggtccatctcatgagg

SEQ ID NO: 690481 - DNA, 25 bp, Homo sapien
gtgtccctgtgtatggaggcaccag

SEQ ID NO: 690482 - DNA, 25 bp, Homo sapien
tgccaggtccatctcatgagggcct

SEQ ID NO: 690483 - DNA, 25 bp, Homo sapien
tggaagacccagcagggtgatccgt

SEQ ID NO: 690484 - DNA, 25 bp, Homo sapien
ttcagagcctgcgttatggcccagg

SEQ ID NO: 690485 - DNA, 25 bp, Homo sapien
agcacgtctgttgccatttgataaa

SEQ ID NO: 690486 - DNA, 25 bp, Homo sapien
tatggcccaggtgaaaagcacgtct

SEQ ID NO: 690487 - DNA, 25 bp, Homo sapien
cagattcagagcctgcgttatggcc

SEQ ID NO: 690488 - DNA, 25 bp, Homo sapien
tgtctagagcaggtcaccctcagtg

SEQ ID NO: 690489 - DNA, 25 bp, Homo sapien
cagaggacattgtttcccgggaacg

SEQ ID NO: 690490 - DNA, 25 bp, Homo sapien
gtctccacgaaagcgcagaggacat

SEQ ID NO: 690491 - DNA, 25 bp, Homo sapien
cgggaacgtagacatggcccatcct

SEQ ID NO: 690492 - DNA, 25 bp, Homo sapien
cttgaagatacggatactcggaggg

SEQ ID NO: 690493 - DNA, 25 bp, Homo sapien
aagatacggatactcggagggaaag

SEQ ID NO: 690494 - DNA, 25 bp, Homo sapien
ctgcttgaagatacggatactcgga

SEQ ID NO: 690495 - DNA, 25 bp, Homo sapien
tgaagatacggatactcggagggaa

SEQ ID NO: 690496 - DNA, 25 bp, Homo sapien
gagagtaggtgtcggggtccaggaa

SEQ ID NO: 690497 - DNA, 25 bp, Homo sapien
ccccgagtgaaggagagtaggtgtc

SEQ ID NO: 690498 - DNA, 25 bp, Homo sapien
tgttcccccgagtgaaggagagtag

SEQ ID NO: 690499 - DNA, 25 bp, Homo sapien
ccctgttcccccgagtgaaggagag

SEQ ID NO: 690500 - DNA, 25 bp, Homo sapien
ttccagggtgactaaatgtttccca

SEQ ID NO: 690501 - DNA, 25 bp, Homo sapien
tgcctgctgcgttcctctttagggt

SEQ ID NO: 690502 - DNA, 25 bp, Homo sapien
tcctctttagggtggctttgctttc

SEQ ID NO: 690503 - DNA, 25 bp, Homo sapien
ccatttaagttatgagttattaaag

SEQ ID NO: 690504 - DNA, 25 bp, Homo sapien
ggcatcccagatccggacacctgat

SEQ ID NO: 690505 - DNA, 25 bp, Homo sapien
aggcggctcagaggcatcccagatc

SEQ ID NO: 690506 - DNA, 25 bp, Homo sapien
tattgcgctctggatgtgccagccc

SEQ ID NO: 690507 - DNA, 25 bp, Homo sapien
cccagattccatgtgttaagtattg

SEQ ID NO: 690508 - DNA, 25 bp, Homo sapien
gagtattgctctggttcacaagacg

SEQ ID NO: 690509 - DNA, 25 bp, Homo sapien
tactggatgtcacccttctcaatgg

SEQ ID NO: 690510 - DNA, 25 bp, Homo sapien
gaagaatcccgaatagctgacgagt

SEQ ID NO: 690511 - DNA, 25 bp, Homo sapien
gaagagttgtgtttgtcagcccagc

SEQ ID NO: 690512 - DNA, 25 bp, Homo sapien
gccctgggcctcttgctggggtggt

SEQ ID NO: 690513 - DNA, 25 bp, Homo sapien
tggccctgggcctcttgctggggtg

SEQ ID NO: 690514 - DNA, 25 bp, Homo sapien
cctcttgctggggtggtgcactcag

SEQ ID NO: 690515 - DNA, 25 bp, Homo sapien
cttgctggggtggtgcactcagcat

SEQ ID NO: 690516 - DNA, 25 bp, Homo sapien
catttgcagacactctgagcaagat

SEQ ID NO: 690517 - DNA, 25 bp, Homo sapien
atttgcagacactctgagcaagatt

SEQ ID NO: 690518 - DNA, 25 bp, Homo sapien
gagtgtagccacttccgcagatccc

SEQ ID NO: 690519 - DNA, 25 bp, Homo sapien
cctgagtgtagccacttccgcagat

SEQ ID NO: 690520 - DNA, 25 bp, Homo sapien
cagggctcccctgagtgtagccact

SEQ ID NO: 690521 - DNA, 25 bp, Homo sapien
tcagggctcccctgagtgtagccac

SEQ ID NO: 690522 - DNA, 25 bp, Homo sapien
cagtgccgggttttgcgggtccact

SEQ ID NO: 690523 - DNA, 25 bp, Homo sapien
gcgggtccactttgtggtctggaca

SEQ ID NO: 690524 - DNA, 25 bp, Homo sapien
catgcccgtaggcacagggaagctg

SEQ ID NO: 690525 - DNA, 25 bp, Homo sapien
tttgagaactgttcggcagtgccgg

SEQ ID NO: 690526 - DNA, 25 bp, Homo sapien
ggcttcagtcagactggccgggcca

SEQ ID NO: 690527 - DNA, 25 bp, Homo sapien
ttcagtcagactggccgggccagcc

SEQ ID NO: 690528 - DNA, 25 bp, Homo sapien
gcttcagtcagactggccgggccag

SEQ ID NO: 690529 - DNA, 25 bp, Homo sapien
cttcagtcagactggccgggccagc

SEQ ID NO: 690530 - DNA, 25 bp, Homo sapien
ggttcatatttctcggtgaggaaac

SEQ ID NO: 690531 - DNA, 25 bp, Homo sapien
gaagttgcagacttgcgagtggccc

SEQ ID NO: 690532 - DNA, 25 bp, Homo sapien
tggccctgggcgtcatcctgcggtt

SEQ ID NO: 690533 - DNA, 25 bp, Homo sapien
tatcagtatcgaataactccaggaa

SEQ ID NO: 690534 - DNA, 25 bp, Homo sapien
agaggctgagctggataaatggcag

SEQ ID NO: 690535 - DNA, 25 bp, Homo sapien
cagctcctcgtgcccaccagctgct

SEQ ID NO: 690536 - DNA, 25 bp, Homo sapien
accagctgctgcccggcctgtgtcc

SEQ ID NO: 690537 - DNA, 25 bp, Homo sapien
ctgctgcccggcctgtgtccactca

SEQ ID NO: 690538 - DNA, 25 bp, Homo sapien
agctgctgcccggcctgtgtccact

SEQ ID NO: 690539 - DNA, 25 bp, Homo sapien
tgaagggagctgacaccagtggaca

SEQ ID NO: 690540 - DNA, 25 bp, Homo sapien
cggccggccggaagcagctgcctcc

SEQ ID NO: 690541 - DNA, 25 bp, Homo sapien
gggcggccagcagggtgtgtcctgg

SEQ ID NO: 690542 - DNA, 25 bp, Homo sapien
gctttgaagggagctgacaccagtg

SEQ ID NO: 690543 - DNA, 25 bp, Homo sapien
aaagtgccatgggtatcgcggaggc

SEQ ID NO: 690544 - DNA, 25 bp, Homo sapien
cacgtgggagggtctacccccgctg

SEQ ID NO: 690545 - DNA, 25 bp, Homo sapien
gggtatcgcggaggccgtgggaaca

SEQ ID NO: 690546 - DNA, 25 bp, Homo sapien
gttaatggccgagccaggacggtgg

SEQ ID NO: 690547 - DNA, 25 bp, Homo sapien
gccacacgaaactggtgtcccaggt

SEQ ID NO: 690548 - DNA, 25 bp, Homo sapien
caggtttgagaagcgtgttctggaa

SEQ ID NO: 690549 - DNA, 25 bp, Homo sapien
aaagagcaggcatggccgaaggtcc

SEQ ID NO: 690550 - DNA, 25 bp, Homo sapien
gaaggtccctgaactgggcgtttca

SEQ ID NO: 690551 - DNA, 25 bp, Homo sapien
cgtggggaaccagagtgaatatatt

SEQ ID NO: 690552 - DNA, 25 bp, Homo sapien
gcttcccattgtcttagcgtgctcc

SEQ ID NO: 690553 - DNA, 25 bp, Homo sapien
tttcaggaatccgtggggaaccaga

SEQ ID NO: 690554 - DNA, 25 bp, Homo sapien
ttgtcttagcgtgctcctttcatct

SEQ ID NO: 690555 - DNA, 25 bp, Homo sapien
ttaacttcaaagctcacgactctta

SEQ ID NO: 690556 - DNA, 25 bp, Homo sapien
attaacttcaaagctcacgactctt

SEQ ID NO: 690557 - DNA, 25 bp, Homo sapien
taacttcaaagctcacgactcttac

SEQ ID NO: 690558 - DNA, 25 bp, Homo sapien
tgtctctgtgaaggtgccaaagccc

SEQ ID NO: 690559 - DNA, 25 bp, Homo sapien
ccggggctgcgcccaactccccatt

SEQ ID NO: 690560 - DNA, 25 bp, Homo sapien
gtctctgtgaaggtgccaaagccca

SEQ ID NO: 690561 - DNA, 25 bp, Homo sapien
tttagcaaggtggttgccgtggtca

SEQ ID NO: 690562 - DNA, 25 bp, Homo sapien
ccgcttcacagatggaaggagcgag

SEQ ID NO: 690563 - DNA, 25 bp, Homo sapien
tcagcccgcttcacagatggaagga

SEQ ID NO: 690564 - DNA, 25 bp, Homo sapien
aaggagcgaggctcggtttagcaag

SEQ ID NO: 690565 - DNA, 25 bp, Homo sapien
tggcctggtgctggtcaaggccacg

SEQ ID NO: 690566 - DNA, 25 bp, Homo sapien
tggtgctggtcaaggccacgagtcc

SEQ ID NO: 690567 - DNA, 25 bp, Homo sapien
gtcaaggagggcgatattagccatg

SEQ ID NO: 690568 - DNA, 25 bp, Homo sapien
aggagggcgatattagccatgagct

SEQ ID NO: 690569 - DNA, 25 bp, Homo sapien
gaaggtgtaagggatgtggagccag

SEQ ID NO: 690570 - DNA, 25 bp, Homo sapien
tccacccacggggacaagtcagtgt

SEQ ID NO: 690571 - DNA, 25 bp, Homo sapien
ccttccaaaagagtgaggtgctggc

SEQ ID NO: 690572 - DNA, 25 bp, Homo sapien
ggacaagtcagtgtggcctgatctc

SEQ ID NO: 690573 - DNA, 25 bp, Homo sapien
gatttgtccagtgtactcttcacag

SEQ ID NO: 690574 - DNA, 25 bp, Homo sapien
actgaacagccacatgccgagtcca

SEQ ID NO: 690575 - DNA, 25 bp, Homo sapien
tggtgtcaccgtaggagctgtcata

SEQ ID NO: 690576 - DNA, 25 bp, Homo sapien
tatctgggtgtcactagtggtgtca

SEQ ID NO: 690577 - DNA, 25 bp, Homo sapien
tcacaaagctgccatgagccgcagc

SEQ ID NO: 690578 - DNA, 25 bp, Homo sapien
acaaagctgccatgagccgcagcgc

SEQ ID NO: 690579 - DNA, 25 bp, Homo sapien
tgtcacaaagctgccatgagccgca

SEQ ID NO: 690580 - DNA, 25 bp, Homo sapien
gctgtcacaaagctgccatgagccg

SEQ ID NO: 690581 - DNA, 25 bp, Homo sapien
gctgattgaattagtgggatccgat

SEQ ID NO: 690582 - DNA, 25 bp, Homo sapien
tgattgaattagtgggatccgatgt

SEQ ID NO: 690583 - DNA, 25 bp, Homo sapien
ctgattgaattagtgggatccgatg

SEQ ID NO: 690584 - DNA, 25 bp, Homo sapien
gaggtgttcagctgtcttccttgag

SEQ ID NO: 690585 - DNA, 25 bp, Homo sapien
tgtgatgaccttgcaggtgtgcata

SEQ ID NO: 690586 - DNA, 25 bp, Homo sapien
ggtgttcagctgtcttcctcgagtt

SEQ ID NO: 690587 - DNA, 25 bp, Homo sapien
agtttccagaaccatgcaggtgtgc

SEQ ID NO: 690588 - DNA, 25 bp, Homo sapien
aagtaggtgcgagcactccccggga

SEQ ID NO: 690589 - DNA, 25 bp, Homo sapien
gcaaagggaagagcccggagaccca

SEQ ID NO: 690590 - DNA, 25 bp, Homo sapien
ttagcccgagtgtctgatgagggat

SEQ ID NO: 690591 - DNA, 25 bp, Homo sapien
gatttgcggagtggttcagcatgct

SEQ ID NO: 690592 - DNA, 25 bp, Homo sapien
cttccatgtagacgtgcggtgagcg

SEQ ID NO: 690593 - DNA, 25 bp, Homo sapien
ggacttccggcttcgtcaaattcag

SEQ ID NO: 690594 - DNA, 25 bp, Homo sapien
gagcggaggacttccggcttcgtca

SEQ ID NO: 690595 - DNA, 25 bp, Homo sapien
gatgtatgtgctgacaccttccatg

SEQ ID NO: 690596 - DNA, 25 bp, Homo sapien
tggctcctgcagtatctgagccgcc

SEQ ID NO: 690597 - DNA, 25 bp, Homo sapien
ctgaggcttcgcctggctctgtggg

SEQ ID NO: 690598 - DNA, 25 bp, Homo sapien
ctgcagctgaactgagcggagacct

SEQ ID NO: 690599 - DNA, 25 bp, Homo sapien
aggtgccggcatcaggatccgcagc

SEQ ID NO: 690600 - DNA, 25 bp, Homo sapien
aacgctgagacgcagccaccgaggg

SEQ ID NO: 690601 - DNA, 25 bp, Homo sapien
ctgagacgcagccaccgaggggtag

SEQ ID NO: 690602 - DNA, 25 bp, Homo sapien
gacgcagccaccgaggggtagcatc

SEQ ID NO: 690603 - DNA, 25 bp, Homo sapien
gagacgcagccaccgaggggtagca

SEQ ID NO: 690604 - DNA, 25 bp, Homo sapien
ttgacagttgatatgaaatattcac

SEQ ID NO: 690605 - DNA, 25 bp, Homo sapien
cagttgatatgaaatattcacatac

SEQ ID NO: 690606 - DNA, 25 bp, Homo sapien
tgacagttgatatgaaatattcaca

SEQ ID NO: 690607 - DNA, 25 bp, Homo sapien
gacagttgatatgaaatattcacat

SEQ ID NO: 690608 - DNA, 25 bp, Homo sapien
gctttaagcccagtgtgctgcagtg

SEQ ID NO: 690609 - DNA, 25 bp, Homo sapien
ttaagcccagtgtgctgcggtggat

SEQ ID NO: 690610 - DNA, 25 bp, Homo sapien
tgctccagtgtttaagcccagtgtg

SEQ ID NO: 690611 - DNA, 25 bp, Homo sapien
ggtcctcatggttccctcgtgggtc

SEQ ID NO: 690612 - DNA, 25 bp, Homo sapien
ggtctcgcggccattgacaaatgtc

SEQ ID NO: 690613 - DNA, 25 bp, Homo sapien
aaagctgccgtgtatttggtccaac

SEQ ID NO: 690614 - DNA, 25 bp, Homo sapien
ggtccaacggagatcgaaggtcatt

SEQ ID NO: 690615 - DNA, 25 bp, Homo sapien
ttcaacataacaggtaaagctgccg

SEQ ID NO: 690616 - DNA, 25 bp, Homo sapien
gctttcctggttcggcacgggacat

SEQ ID NO: 690617 - DNA, 25 bp, Homo sapien
ccattgttcagcttagtcgggagat

SEQ ID NO: 690618 - DNA, 25 bp, Homo sapien
tcatcgtggacctggaagtccattg

SEQ ID NO: 690619 - DNA, 25 bp, Homo sapien
cagctgatttgaattgggacccaca

SEQ ID NO: 690620 - DNA, 25 bp, Homo sapien
tcagatgagtcctgtgtctgcaaag

SEQ ID NO: 690621 - DNA, 25 bp, Homo sapien
ctggaatatcagatgagtcctgtgt

SEQ ID NO: 690622 - DNA, 25 bp, Homo sapien
aatatcagatgagtcctgtgtctgc

SEQ ID NO: 690623 - DNA, 25 bp, Homo sapien
cagatgagtcctgtgtctgcaaagt

SEQ ID NO: 690624 - DNA, 25 bp, Homo sapien
caggtgcccgggaagggtgagcgca

SEQ ID NO: 690625 - DNA, 25 bp, Homo sapien
gatgtccccgttgctggatgctgct

SEQ ID NO: 690626 - DNA, 25 bp, Homo sapien
tgctggctgatgtccccgttgctgg

SEQ ID NO: 690627 - DNA, 25 bp, Homo sapien
ggatccagacgaggccgggagctgg

SEQ ID NO: 690628 - DNA, 25 bp, Homo sapien
attttcttcctggccgtctgccgct

SEQ ID NO: 690629 - DNA, 25 bp, Homo sapien
cttcctggccgtctgccgcttgctg

SEQ ID NO: 690630 - DNA, 25 bp, Homo sapien
ttttctgctcttcggagttcttcat

SEQ ID NO: 690631 - DNA, 25 bp, Homo sapien
gctcttcggagttcttcatccggca

SEQ ID NO: 690632 - DNA, 25 bp, Homo sapien
gccttgcagaatataatcttcacag

SEQ ID NO: 690633 - DNA, 25 bp, Homo sapien
tcttcacagaaaaccgaatatattc

SEQ ID NO: 690634 - DNA, 25 bp, Homo sapien
gtaagctgccttaatacactgagcc

SEQ ID NO: 690635 - DNA, 25 bp, Homo sapien
cagaaaaccgaatatattccacagc

SEQ ID NO: 690636 - DNA, 25 bp, Homo sapien
gggacgctcatggatgtttctcccg

SEQ ID NO: 690637 - DNA, 25 bp, Homo sapien
ctgtgctcagctatgcagctgtcgg

SEQ ID NO: 690638 - DNA, 25 bp, Homo sapien
catggatgtttctcccgtggctctg

SEQ ID NO: 690639 - DNA, 25 bp, Homo sapien
tcagctatgcagctgtcggccagga

SEQ ID NO: 690640 - DNA, 25 bp, Homo sapien
cctgagctgtctgagtagtgacaag

SEQ ID NO: 690641 - DNA, 25 bp, Homo sapien
tcattgttcgcctttcctggaagaa

SEQ ID NO: 690642 - DNA, 25 bp, Homo sapien
gggtgaagttgacccctgtctcatt

SEQ ID NO: 690643 - DNA, 25 bp, Homo sapien
cgtaccactgctgttcgttgttggg

SEQ ID NO: 690644 - DNA, 25 bp, Homo sapien
tttccttctggtggaatgatgcggg

SEQ ID NO: 690645 - DNA, 25 bp, Homo sapien
cctggcatgcactgaacccgtactg

SEQ ID NO: 690646 - DNA, 25 bp, Homo sapien
ccgtactgtaagctctttccttctg

SEQ ID NO: 690647 - DNA, 25 bp, Homo sapien
tgcactgaacccgtactgtaagctc

SEQ ID NO: 690648 - DNA, 25 bp, Homo sapien
ttcctgaggcaagcccttgggtaca

SEQ ID NO: 690649 - DNA, 25 bp, Homo sapien
tgaggcaagcccttgggtacactga

SEQ ID NO: 690650 - DNA, 25 bp, Homo sapien
gctttcctgaggcaagcccttgggt

SEQ ID NO: 690651 - DNA, 25 bp, Homo sapien
gcaagcccttgggtacactgagacg

SEQ ID NO: 690652 - DNA, 25 bp, Homo sapien
gaaactcggtattgcacatttattt

SEQ ID NO: 690653 - DNA, 25 bp, Homo sapien
aatttgaaccttggactgtttctca

SEQ ID NO: 690654 - DNA, 25 bp, Homo sapien
tattcatcagaaactcggtattgca

SEQ ID NO: 690655 - DNA, 25 bp, Homo sapien
ctgtttctcacagtattcatcagaa

SEQ ID NO: 690656 - DNA, 25 bp, Homo sapien
tcttggtgacattgacaacactgtt

SEQ ID NO: 690657 - DNA, 25 bp, Homo sapien
tacagagcagtcttggtgacattga

SEQ ID NO: 690658 - DNA, 25 bp, Homo sapien
ctgagggccttcatttggtttatac

SEQ ID NO: 690659 - DNA, 25 bp, Homo sapien
gcagtcttggtgacattgacaacac

SEQ ID NO: 690660 - DNA, 25 bp, Homo sapien
ccagtgttccctccaacaagaggcc

SEQ ID NO: 690661 - DNA, 25 bp, Homo sapien
acaagaggccatctcacgggcgagc

SEQ ID NO: 690662 - DNA, 25 bp, Homo sapien
cctccaacaagaggccatctcacgg

SEQ ID NO: 690663 - DNA, 25 bp, Homo sapien
ccaacaagaggccatctcacgggcg

SEQ ID NO: 690664 - DNA, 25 bp, Homo sapien
tggcagtaagcgacacgctgaacca

SEQ ID NO: 690665 - DNA, 25 bp, Homo sapien
aggatcctcacgtagcccacattcg

SEQ ID NO: 690666 - DNA, 25 bp, Homo sapien
taaacctggatgctttgatcgctgg

SEQ ID NO: 690667 - DNA, 25 bp, Homo sapien
taattctgaatgacagcccagagtg

SEQ ID NO: 690668 - DNA, 25 bp, Homo sapien
tgtcgtttggaagcagtccatggcc

SEQ ID NO: 690669 - DNA, 25 bp, Homo sapien
ccttgaaatttgaagccactctcct

SEQ ID NO: 690670 - DNA, 25 bp, Homo sapien
gtccatcctggaaaagcgctccctg

SEQ ID NO: 690671 - DNA, 25 bp, Homo sapien
gagcccaacagaaggcacctgtcgt

SEQ ID NO: 690672 - DNA, 25 bp, Homo sapien
catcctggctacatcggaatttcca

SEQ ID NO: 690673 - DNA, 25 bp, Homo sapien
tcctggctacatcggaatttccagg

SEQ ID NO: 690674 - DNA, 25 bp, Homo sapien
cagggcccttgaagaccgaggtcga

SEQ ID NO: 690675 - DNA, 25 bp, Homo sapien
tggctacatcggaatttccagggcc

SEQ ID NO: 690676 - DNA, 25 bp, Homo sapien
tcagtcgccataggcacagtgaccc

SEQ ID NO: 690677 - DNA, 25 bp, Homo sapien
ataggcacagtgacccatcactagc

SEQ ID NO: 690678 - DNA, 25 bp, Homo sapien
cgttcaatcagtcgccataggcaca

SEQ ID NO: 690679 - DNA, 25 bp, Homo sapien
tcctccgttcaatcagtcgccatag

SEQ ID NO: 690680 - DNA, 25 bp, Homo sapien
atgccgagctgcgtgcctgggaacc

SEQ ID NO: 690681 - DNA, 25 bp, Homo sapien
agcaggacaaggctgaccgcatgcc

SEQ ID NO: 690682 - DNA, 25 bp, Homo sapien
aggctgaccgcatgccgagctgcgt

SEQ ID NO: 690683 - DNA, 25 bp, Homo sapien
cgagctgcgtgcctgggaaccacat

SEQ ID NO: 690684 - DNA, 25 bp, Homo sapien
agccagaagtgtgagcttctttcca

SEQ ID NO: 690685 - DNA, 25 bp, Homo sapien
agcttctttccaccgattcacttgc

SEQ ID NO: 690686 - DNA, 25 bp, Homo sapien
acctgcgtgtcctgaaccagccaga

SEQ ID NO: 690687 - DNA, 25 bp, Homo sapien
ccaccgattcacttgctgtgttcat

SEQ ID NO: 690688 - DNA, 25 bp, Homo sapien
ccaggccccgatcagtgcccacagg

SEQ ID NO: 690689 - DNA, 25 bp, Homo sapien
ccagccaggccccgatcagtgccca

SEQ ID NO: 690690 - DNA, 25 bp, Homo sapien
actgtgggccgatcagagtgggcag

SEQ ID NO: 690691 - DNA, 25 bp, Homo sapien
tcagcactgtgggccgatcagagtg

SEQ ID NO: 690692 - DNA, 25 bp, Homo sapien
ggcattgctataaacaggggcttgc

SEQ ID NO: 690693 - DNA, 25 bp, Homo sapien
attgttgcaagcacagcaggaagcg

SEQ ID NO: 690694 - DNA, 25 bp, Homo sapien
tataaacaggggcttgctggcagag

SEQ ID NO: 690695 - DNA, 25 bp, Homo sapien
ctattgttgcaagcacagcaggaag

SEQ ID NO: 690696 - DNA, 25 bp, Homo sapien
catgcctggctacttgtcgtatttt

SEQ ID NO: 690697 - DNA, 25 bp, Homo sapien
catgcctggcctctccttccttttt

SEQ ID NO: 690698 - DNA, 25 bp, Homo sapien
gccattttgcccaggttggactcaa

SEQ ID NO: 690699 - DNA, 25 bp, Homo sapien
acttctggcctcaaatgatccacct

SEQ ID NO: 690700 - DNA, 25 bp, Homo sapien
tgcctttgctcttttgctgttaaat

SEQ ID NO: 690701 - DNA, 25 bp, Homo sapien
tgattaaatggcaaatgctgatcaa

SEQ ID NO: 690702 - DNA, 25 bp, Homo sapien
gttaaatggcaaatgctgattaaat

SEQ ID NO: 690703 - DNA, 25 bp, Homo sapien
aagaaagtaaaggtgtccattggct

SEQ ID NO: 690704 - DNA, 25 bp, Homo sapien
gaagggaccccctgatgatgccagg

SEQ ID NO: 690705 - DNA, 25 bp, Homo sapien
ggagttgtaccaagagcatagagag

SEQ ID NO: 690706 - DNA, 25 bp, Homo sapien
tatttgcaaagcctgtgcattctca

SEQ ID NO: 690707 - DNA, 25 bp, Homo sapien
gccacagccctcttagtgggagttg

SEQ ID NO: 690708 - DNA, 25 bp, Homo sapien
ggagagtgactgcaaatctgggctc

SEQ ID NO: 690709 - DNA, 25 bp, Homo sapien
ctggagagtgactgcaaatctgggc

SEQ ID NO: 690710 - DNA, 25 bp, Homo sapien
tgccccgagagcaagcctccctctg

SEQ ID NO: 690711 - DNA, 25 bp, Homo sapien
gctcttacaagtggtctccagccac

SEQ ID NO: 690712 - DNA, 25 bp, Homo sapien
ctgtgcggggaaacgcagggagagg

SEQ ID NO: 690713 - DNA, 25 bp, Homo sapien
gtaggctcctggggccgatgtcttc

SEQ ID NO: 690714 - DNA, 25 bp, Homo sapien
tcctggggccgatgtcttccccttg

SEQ ID NO: 690715 - DNA, 25 bp, Homo sapien
tctggctccgaattctaaattagga

SEQ ID NO: 690716 - DNA, 25 bp, Homo sapien
gatgcaattgctgagcacctcagct

SEQ ID NO: 690717 - DNA, 25 bp, Homo sapien
taaattaggacaagatgcaattgct

SEQ ID NO: 690718 - DNA, 25 bp, Homo sapien
ggatctggctccgaattctaaatta

SEQ ID NO: 690719 - DNA, 25 bp, Homo sapien
gaggccactgcctcatgtttctttc

SEQ ID NO: 690720 - DNA, 25 bp, Homo sapien
agatgcagaggccactgcctcatgt

SEQ ID NO: 690721 - DNA, 25 bp, Homo sapien
ctcacagatgcagaggccactgcct

SEQ ID NO: 690722 - DNA, 25 bp, Homo sapien
gcagaggccactgcctcatgtttct

SEQ ID NO: 690723 - DNA, 25 bp, Homo sapien
gggctttggccccgcaaattcctgc

SEQ ID NO: 690724 - DNA, 25 bp, Homo sapien
ggctttggccccgcaaattcctgca

SEQ ID NO: 690725 - DNA, 25 bp, Homo sapien
agggctttggccccgcaaattcctg

SEQ ID NO: 690726 - DNA, 25 bp, Homo sapien
gctggatctgcaggtaaggaattcc

SEQ ID NO: 690727 - DNA, 25 bp, Homo sapien
tcaaaaagcgctacatctgtagcct

SEQ ID NO: 690728 - DNA, 25 bp, Homo sapien
aaaagcgctacatctgtagccttcc

SEQ ID NO: 690729 - DNA, 25 bp, Homo sapien
tggctggatctgcaggtaaggaatt

SEQ ID NO: 690730 - DNA, 25 bp, Homo sapien
cagaacggtgacatttttcatgggc

SEQ ID NO: 690731 - DNA, 25 bp, Homo sapien
ccatcgacagaacggtgacattttt

SEQ ID NO: 690732 - DNA, 25 bp, Homo sapien
tgggccgccgtgttctgaatcaaca

SEQ ID NO: 690733 - DNA, 25 bp, Homo sapien
cagcagatccacaccatcgacagaa

SEQ ID NO: 690734 - DNA, 25 bp, Homo sapien
tggcaaccggcttatggaacccatc

SEQ ID NO: 690735 - DNA, 25 bp, Homo sapien
ggaacccatcattaagaccagctgg

SEQ ID NO: 690736 - DNA, 25 bp, Homo sapien
ccataatcaaggtagggcatttcca

SEQ ID NO: 690737 - DNA, 25 bp, Homo sapien
aaagttcactttgccccttggacag

SEQ ID NO: 690738 - DNA, 25 bp, Homo sapien
gacgctgagtagttgagctgcaaat

SEQ ID NO: 690739 - DNA, 25 bp, Homo sapien
taaataagataagacgctgagtagt

SEQ ID NO: 690740 - DNA, 25 bp, Homo sapien
taaagccagcttacatagacccacc

SEQ ID NO: 690741 - DNA, 25 bp, Homo sapien
caaatgcttgtggattgaagtctaa

SEQ ID NO: 690742 - DNA, 25 bp, Homo sapien
agccaccaccatcgtcccatggcgc

SEQ ID NO: 690743 - DNA, 25 bp, Homo sapien
catttcctgccgtggcctcctgtgt

SEQ ID NO: 690744 - DNA, 25 bp, Homo sapien
ccagccaccaccatcgtcccatggc

SEQ ID NO: 690745 - DNA, 25 bp, Homo sapien
ccaccaccatcgtcccatggcgcat

SEQ ID NO: 690746 - DNA, 25 bp, Homo sapien
gcgttaccctctagcatgtaccact

SEQ ID NO: 690747 - DNA, 25 bp, Homo sapien
tctagcatgtaccactctccactgg

SEQ ID NO: 690748 - DNA, 25 bp, Homo sapien
aagggccaggcgttaccctctagca

SEQ ID NO: 690749 - DNA, 25 bp, Homo sapien
ccactggcttcgttcttggggctca

SEQ ID NO: 690750 - DNA, 25 bp, Homo sapien
tcgtggaactaacccacgagtggtg

SEQ ID NO: 690751 - DNA, 25 bp, Homo sapien
ggtcaaatcagccagtaactcgtgg

SEQ ID NO: 690752 - DNA, 25 bp, Homo sapien
gccagtaactcgtggaactaaccca

SEQ ID NO: 690753 - DNA, 25 bp, Homo sapien
ccacgagtggtgtttacccctggat

SEQ ID NO: 690754 - DNA, 25 bp, Homo sapien
tgtgtaggcagacgtggcttttctt

SEQ ID NO: 690755 - DNA, 25 bp, Homo sapien
ttgctgaagccggattgtgagattg

SEQ ID NO: 690756 - DNA, 25 bp, Homo sapien
tgggttccgtagtaacagggactga

SEQ ID NO: 690757 - DNA, 25 bp, Homo sapien
tgacaatgggttccgtagtaacagg

SEQ ID NO: 690758 - DNA, 25 bp, Homo sapien
atgagggtgtcgactccccagtacc

SEQ ID NO: 690759 - DNA, 25 bp, Homo sapien
tgagggtgtcgactccccagtaccc

SEQ ID NO: 690760 - DNA, 25 bp, Homo sapien
agacatgagggtgtcgactccccag

SEQ ID NO: 690761 - DNA, 25 bp, Homo sapien
acatgagggtgtcgactccccagta

SEQ ID NO: 690762 - DNA, 25 bp, Homo sapien
tcctaagagcagttgtaatcagagt

SEQ ID NO: 690763 - DNA, 25 bp, Homo sapien
cctaagagcagttgtaatcagagtt

SEQ ID NO: 690764 - DNA, 25 bp, Homo sapien
catcctaagagcagttgtaatcaga

SEQ ID NO: 690765 - DNA, 25 bp, Homo sapien
atcctaagagcagttgtaatcagag

SEQ ID NO: 690766 - DNA, 25 bp, Homo sapien
tacaaatggatcgtcagtgtgttcg

SEQ ID NO: 690767 - DNA, 25 bp, Homo sapien
cttttacaaatggatcgtcagtgtg

SEQ ID NO: 690768 - DNA, 25 bp, Homo sapien
aatggatcgtcagtgtgttcgggta

SEQ ID NO: 690769 - DNA, 25 bp, Homo sapien
cgtcagtgtgttcgggtaataagga

SEQ ID NO: 690770 - DNA, 25 bp, Homo sapien
ggcggcttctctcatggaatctggg

SEQ ID NO: 690771 - DNA, 25 bp, Homo sapien
cacttaaaaggacttaggtcgctgg

SEQ ID NO: 690772 - DNA, 25 bp, Homo sapien
ggaccctttcatgactgccctgatg

SEQ ID NO: 690773 - DNA, 25 bp, Homo sapien
tgttgacacactccacacgacggtt

SEQ ID NO: 690774 - DNA, 25 bp, Homo sapien
cagacggtcccgttttgttgacaca

SEQ ID NO: 690775 - DNA, 25 bp, Homo sapien
gcatgtgggtataattggttggcca

SEQ ID NO: 690776 - DNA, 25 bp, Homo sapien
gaaaatggcatgtgggtataattgg

SEQ ID NO: 690777 - DNA, 25 bp, Homo sapien
ccttgagaggacctcgtaaatcagt

SEQ ID NO: 690778 - DNA, 25 bp, Homo sapien
cagttggacacgttttgctataaaa

SEQ ID NO: 690779 - DNA, 25 bp, Homo sapien
cctccgaatactccacttgcagaac

SEQ ID NO: 690780 - DNA, 25 bp, Homo sapien
gtggagcctcatccacgatcagtga

SEQ ID NO: 690781 - DNA, 25 bp, Homo sapien
aaggcaaaacgtggggtgcttgcct

SEQ ID NO: 690782 - DNA, 25 bp, Homo sapien
caggaggctcccgggatgcactgaa

SEQ ID NO: 690783 - DNA, 25 bp, Homo sapien
tcatccacgatcagtgacttccaga

SEQ ID NO: 690784 - DNA, 25 bp, Homo sapien
ttttggaggtcatgggcttttccca

SEQ ID NO: 690785 - DNA, 25 bp, Homo sapien
gaggtcatgggcttttcccaagatt

SEQ ID NO: 690786 - DNA, 25 bp, Homo sapien
tttcccaagattctgccaccagcat

SEQ ID NO: 690787 - DNA, 25 bp, Homo sapien
tgggcttttcccaagattctgccac

SEQ ID NO: 690788 - DNA, 25 bp, Homo sapien
tgtctttcttgttcgtccctggggc

SEQ ID NO: 690789 - DNA, 25 bp, Homo sapien
gccttggtgggaccccagccttcaa

SEQ ID NO: 690790 - DNA, 25 bp, Homo sapien
ggccttggtgggaccccagccttca

SEQ ID NO: 690791 - DNA, 25 bp, Homo sapien
tattcctattaaaagctcagttccc

SEQ ID NO: 690792 - DNA, 25 bp, Homo sapien
gatgcgaacggctgctttgatattg

SEQ ID NO: 690793 - DNA, 25 bp, Homo sapien
gcaaatacgtttgaggttctatcta

SEQ ID NO: 690794 - DNA, 25 bp, Homo sapien
tcatcattgtcccaaaccgagaagg

SEQ ID NO: 690795 - DNA, 25 bp, Homo sapien
ccctggagaggccccagtggcccca

SEQ ID NO: 690796 - DNA, 25 bp, Homo sapien
cccagtggccccagcatggtctctg

SEQ ID NO: 690797 - DNA, 25 bp, Homo sapien
cacactgtgccctggagaggcccca

SEQ ID NO: 690798 - DNA, 25 bp, Homo sapien
agtggccccagcatggtctctgcct

SEQ ID NO: 690799 - DNA, 25 bp, Homo sapien
ggtcctgtgggagtatcgctttatc

SEQ ID NO: 690800 - DNA, 25 bp, Homo sapien
aggttggtcctgtgggagtatcgct

SEQ ID NO: 690801 - DNA, 25 bp, Homo sapien
tgggagtatcgctttatcccagttt

SEQ ID NO: 690802 - DNA, 25 bp, Homo sapien
ctgtgggagtatcgctttatcccag

SEQ ID NO: 690803 - DNA, 25 bp, Homo sapien
actggtcacgtattggtattgtgta

SEQ ID NO: 690804 - DNA, 25 bp, Homo sapien
cccaggactccagtgttggccattc

SEQ ID NO: 690805 - DNA, 25 bp, Homo sapien
gactccagtgttggccattcaccaa

SEQ ID NO: 690806 - DNA, 25 bp, Homo sapien
cgtattggtattgtgtagggagcca

SEQ ID NO: 690807 - DNA, 25 bp, Homo sapien
tgtggtccagggaccctgtcttcac

SEQ ID NO: 690808 - DNA, 25 bp, Homo sapien
gtggtccagggaccctgtcttcacc

SEQ ID NO: 690809 - DNA, 25 bp, Homo sapien
ctgtggtccagggaccctgtcttca

SEQ ID NO: 690810 - DNA, 25 bp, Homo sapien
ctgccgctggaagcagcctcatttt

SEQ ID NO: 690811 - DNA, 25 bp, Homo sapien
ggaagcagcctcattttacaagggt

SEQ ID NO: 690812 - DNA, 25 bp, Homo sapien
gaagcagcctcattttacaagggtc

SEQ ID NO: 690813 - DNA, 25 bp, Homo sapien
gcagcctcattttacaagggtccat

SEQ ID NO: 690814 - DNA, 25 bp, Homo sapien
tatctggctcgatgcatggccccag

SEQ ID NO: 690815 - DNA, 25 bp, Homo sapien
gcttgagaaggtcatccatgggtgt

SEQ ID NO: 690816 - DNA, 25 bp, Homo sapien
aaagggagccgtgtgtgttgaactt

SEQ ID NO: 690817 - DNA, 25 bp, Homo sapien
tgccagcacgggctctctgctttgg

SEQ ID NO: 690818 - DNA, 25 bp, Homo sapien
gctgcccttgtaccacaacagccag

SEQ ID NO: 690819 - DNA, 25 bp, Homo sapien
ctgtggctgcccttgtaccacaaca

SEQ ID NO: 690820 - DNA, 25 bp, Homo sapien
tgtggctgcccttgtaccacaacag

SEQ ID NO: 690821 - DNA, 25 bp, Homo sapien
tggctgcccttgtaccacaacagcc

SEQ ID NO: 690822 - DNA, 25 bp, Homo sapien
tctgtggttcttaatcagtgatgct

SEQ ID NO: 690823 - DNA, 25 bp, Homo sapien
gaagactctgtggttcttaatcagt

SEQ ID NO: 690824 - DNA, 25 bp, Homo sapien
gactctgtggttcttaatcagtgat

SEQ ID NO: 690825 - DNA, 25 bp, Homo sapien
aagactctgtggttcttaatcagtg

SEQ ID NO: 690826 - DNA, 25 bp, Homo sapien
cagcaatgggtgtgtatcctcataa

SEQ ID NO: 690827 - DNA, 25 bp, Homo sapien
catctctgccagaacggacatgatc

SEQ ID NO: 690828 - DNA, 25 bp, Homo sapien
aggaggcccgtctctagcagcaatg

SEQ ID NO: 690829 - DNA, 25 bp, Homo sapien
taactggctccgaagtagcacctgg

SEQ ID NO: 690830 - DNA, 25 bp, Homo sapien
gacataaaatagatctagttcagat

SEQ ID NO: 690831 - DNA, 25 bp, Homo sapien
gaggtttctgctgagcgtgacgtaa

SEQ ID NO: 690832 - DNA, 25 bp, Homo sapien
ctgcttgtcttccaacagagaacac

SEQ ID NO: 690833 - DNA, 25 bp, Homo sapien
cagatgtttgaccagtcagggccaa

SEQ ID NO: 690834 - DNA, 25 bp, Homo sapien
agctcaaaaccatgggagtcatcag

SEQ ID NO: 690835 - DNA, 25 bp, Homo sapien
ctttcctgttctaataacccaagct

SEQ ID NO: 690836 - DNA, 25 bp, Homo sapien
tcagtgtctcccttgagttcagtcc

SEQ ID NO: 690837 - DNA, 25 bp, Homo sapien
gtcatcagtgtctcccttgagttca

SEQ ID NO: 690838 - DNA, 25 bp, Homo sapien
agagggggctcagggggtgcgccca

SEQ ID NO: 690839 - DNA, 25 bp, Homo sapien
ctgaacacagagggggctcaggggg

SEQ ID NO: 690840 - DNA, 25 bp, Homo sapien
gggctcagggggtgcgcccagcagc

SEQ ID NO: 690841 - DNA, 25 bp, Homo sapien
agggggctcagggggtgcgcccagc

SEQ ID NO: 690842 - DNA, 25 bp, Homo sapien
tccgggaagcattgtcagatccagg

SEQ ID NO: 690843 - DNA, 25 bp, Homo sapien
cgcagtccgggaagcattgtcagat

SEQ ID NO: 690844 - DNA, 25 bp, Homo sapien
ctctcgcagtccgggaagcattgtc

SEQ ID NO: 690845 - DNA, 25 bp, Homo sapien
cagtccgggaagcattgtcagatcc

SEQ ID NO: 690846 - DNA, 25 bp, Homo sapien
gtttgtcacccccagaggcaaatgg

SEQ ID NO: 690847 - DNA, 25 bp, Homo sapien
tgtcacccccagaggcaaatggagg

SEQ ID NO: 690848 - DNA, 25 bp, Homo sapien
gatatctgtttgtcacccccagagg

SEQ ID NO: 690849 - DNA, 25 bp, Homo sapien
aatggaggcagttcaatcgatgatt

SEQ ID NO: 690850 - DNA, 25 bp, Homo sapien
agagcagtcttcccctctgcaggtc

SEQ ID NO: 690851 - DNA, 25 bp, Homo sapien
taggcaatgcctctacggctacaac

SEQ ID NO: 690852 - DNA, 25 bp, Homo sapien
gagataaaatggcagcctgtcgctt

SEQ ID NO: 690853 - DNA, 25 bp, Homo sapien
ggtgctgatgcgctgccttaggcaa

SEQ ID NO: 690854 - DNA, 25 bp, Homo sapien
gggatatccgctgcacacagggtag

SEQ ID NO: 690855 - DNA, 25 bp, Homo sapien
caggcacaatctggacgttgcagtg

SEQ ID NO: 690856 - DNA, 25 bp, Homo sapien
gcatgtcaggcacaatctggacgtt

SEQ ID NO: 690857 - DNA, 25 bp, Homo sapien
gcagtgacagcgtctttgccacatg

SEQ ID NO: 690858 - DNA, 25 bp, Homo sapien
tgcagtgacagcgtctttgccacat

SEQ ID NO: 690859 - DNA, 25 bp, Homo sapien
cttccaggtcgcccatttccacttc

SEQ ID NO: 690860 - DNA, 25 bp, Homo sapien
ccacttcataataagcttcatctgg

SEQ ID NO: 690861 - DNA, 25 bp, Homo sapien
ctggggacctacagcaggtggccct

SEQ ID NO: 690862 - DNA, 25 bp, Homo sapien
atcccaggagcacgtccattcctga

SEQ ID NO: 690863 - DNA, 25 bp, Homo sapien
cctgactcttcgaggaagctcatgg

SEQ ID NO: 690864 - DNA, 25 bp, Homo sapien
gctgatgacaagcacgcacatccca

SEQ ID NO: 690865 - DNA, 25 bp, Homo sapien
ctgtgagcacaggaagtgaaaattc

SEQ ID NO: 690866 - DNA, 25 bp, Homo sapien
ggacacctgtcccaggcaccacggg

SEQ ID NO: 690867 - DNA, 25 bp, Homo sapien
gcctggcatctgagccccacagcat

SEQ ID NO: 690868 - DNA, 25 bp, Homo sapien
caggcaccacgggcctggcatctga

SEQ ID NO: 690869 - DNA, 25 bp, Homo sapien
tggacacctgtcccaggcaccacgg

SEQ ID NO: 690870 - DNA, 25 bp, Homo sapien
tgcaggtcccagattgtcagaaagg

SEQ ID NO: 690871 - DNA, 25 bp, Homo sapien
gattgtcagaaaggacgccgcagtc

SEQ ID NO: 690872 - DNA, 25 bp, Homo sapien
tcccagattgtcagaaaggacgccg

SEQ ID NO: 690873 - DNA, 25 bp, Homo sapien
gcctgggaacctgcggtgagcatac

SEQ ID NO: 690874 - DNA, 25 bp, Homo sapien
cagcacaggacttaattctgcagcc

SEQ ID NO: 690875 - DNA, 25 bp, Homo sapien
ttaccctagaagctgcggcaggtgt

SEQ ID NO: 690876 - DNA, 25 bp, Homo sapien
gcctcgtgctctgcgttgcactggc

SEQ ID NO: 690877 - DNA, 25 bp, Homo sapien
ggctcgcctcgtgctctgcgttgca

SEQ ID NO: 690878 - DNA, 25 bp, Homo sapien
tgccgctgcggcttccattttacag

SEQ ID NO: 690879 - DNA, 25 bp, Homo sapien
cccagaggtcaagccagatgtccat

SEQ ID NO: 690880 - DNA, 25 bp, Homo sapien
accagatgccgctgcggcttccatt

SEQ ID NO: 690881 - DNA, 25 bp, Homo sapien
gccccagaggtcaagccagatgtcc

SEQ ID NO: 690882 - DNA, 25 bp, Homo sapien
gctgagccccttgagctgcaaagtg

SEQ ID NO: 690883 - DNA, 25 bp, Homo sapien
ctgcaaagtgaggagaatgacggca

SEQ ID NO: 690884 - DNA, 25 bp, Homo sapien
ccttgagctgcaaagtgaggagaat

SEQ ID NO: 690885 - DNA, 25 bp, Homo sapien
aatgacggcagcgccgctgtaggac

SEQ ID NO: 690886 - DNA, 25 bp, Homo sapien
tcttgtcagctattatatgtctgat

SEQ ID NO: 690887 - DNA, 25 bp, Homo sapien
gggttgtcggacgtgttcaggacag

SEQ ID NO: 690888 - DNA, 25 bp, Homo sapien
ctcaaggtcaccattcgtcttattc

SEQ ID NO: 690889 - DNA, 25 bp, Homo sapien
caccattcgtcttattcttgtcagc

SEQ ID NO: 690890 - DNA, 25 bp, Homo sapien
gcatatttctgcaagtcccgctgct

SEQ ID NO: 690891 - DNA, 25 bp, Homo sapien
gatgactaatttccagcacgtgtgg

SEQ ID NO: 690892 - DNA, 25 bp, Homo sapien
tgagctcctgccagataggcccatt

SEQ ID NO: 690893 - DNA, 25 bp, Homo sapien
cattgggagcgggtctgtgctcaca

SEQ ID NO: 690894 - DNA, 25 bp, Homo sapien
ccgacacgcaggtgcatctggcagt

SEQ ID NO: 690895 - DNA, 25 bp, Homo sapien
gcacacaaagctgccgacacgcagg

SEQ ID NO: 690896 - DNA, 25 bp, Homo sapien
tgttctgctgtacacagagtgcagg

SEQ ID NO: 690897 - DNA, 25 bp, Homo sapien
ttctgctgtacacagagtgcaggga

SEQ ID NO: 690898 - DNA, 25 bp, Homo sapien
aggagatggagggatccacaacagc

SEQ ID NO: 690899 - DNA, 25 bp, Homo sapien
agatggagggatccacaacagccag

SEQ ID NO: 690900 - DNA, 25 bp, Homo sapien
ggatccacaacagccagtgccacgg

SEQ ID NO: 690901 - DNA, 25 bp, Homo sapien
agcacggggaaggatcggacaccca

SEQ ID NO: 690902 - DNA, 25 bp, Homo sapien
aggctgaggccttgcggtgttgctg

SEQ ID NO: 690903 - DNA, 25 bp, Homo sapien
ggctgaggccttgcggtgttgctgt

SEQ ID NO: 690904 - DNA, 25 bp, Homo sapien
tgtctgcaggcacctgatgtgggag

SEQ ID NO: 690905 - DNA, 25 bp, Homo sapien
gaggccttgcggtgttgctgtcctc

SEQ ID NO: 690906 - DNA, 25 bp, Homo sapien
gcatcacacagcactaaccaggtat

SEQ ID NO: 690907 - DNA, 25 bp, Homo sapien
ccattgtgtagagaagcatcacaca

SEQ ID NO: 690908 - DNA, 25 bp, Homo sapien
tgtgtagagaagcatcacacagcac

SEQ ID NO: 690909 - DNA, 25 bp, Homo sapien
acacagcactaaccaggtatccctg

SEQ ID NO: 690910 - DNA, 25 bp, Homo sapien
gaggcaattcgatccgattggttgg

SEQ ID NO: 690911 - DNA, 25 bp, Homo sapien
ctgggaggcaattcgatccgattgg

SEQ ID NO: 690912 - DNA, 25 bp, Homo sapien
tgggaggcaattcgatccgattggt

SEQ ID NO: 690913 - DNA, 25 bp, Homo sapien
cgattggttggtggtcaggtgtaga

SEQ ID NO: 690914 - DNA, 25 bp, Homo sapien
gccatacgaaatgccggcaggaaga

SEQ ID NO: 690915 - DNA, 25 bp, Homo sapien
cgtgccatacgaaatgccggcagga

SEQ ID NO: 690916 - DNA, 25 bp, Homo sapien
ctggtgggttccacgtgccatacga

SEQ ID NO: 690917 - DNA, 25 bp, Homo sapien
gttccacgtgccatacgaaatgccg

SEQ ID NO: 690918 - DNA, 25 bp, Homo sapien
agacttccagaagggagctgttcat

SEQ ID NO: 690919 - DNA, 25 bp, Homo sapien
ggagacttccagaagggagctgttc

SEQ ID NO: 690920 - DNA, 25 bp, Homo sapien
ccgtgtgctcggagacttccagaag

SEQ ID NO: 690921 - DNA, 25 bp, Homo sapien
gctcggagacttccagaagggagct

SEQ ID NO: 690922 - DNA, 25 bp, Homo sapien
gaattaaagcagtccatgcaatggc

SEQ ID NO: 690923 - DNA, 25 bp, Homo sapien
cagccgccaagcagagacggtgacg

SEQ ID NO: 690924 - DNA, 25 bp, Homo sapien
tcttcgaaggaaagcccgtggatta

SEQ ID NO: 690925 - DNA, 25 bp, Homo sapien
acttcgtagctgttctgtggtggga

SEQ ID NO: 690926 - DNA, 25 bp, Homo sapien
tgtccctcattgctggcgtctggcg

SEQ ID NO: 690927 - DNA, 25 bp, Homo sapien
gtctgtcacgggaaggacgctgacc

SEQ ID NO: 690928 - DNA, 25 bp, Homo sapien
cgttcagtcactgtctgggcaccca

SEQ ID NO: 690929 - DNA, 25 bp, Homo sapien
aggtcatggcgatcagtctgtcacg

SEQ ID NO: 690930 - DNA, 25 bp, Homo sapien
gctgctggcagagccgtcaagagaa

SEQ ID NO: 690931 - DNA, 25 bp, Homo sapien
tgccgctcatgcttggcgccagcgg

SEQ ID NO: 690932 - DNA, 25 bp, Homo sapien
gctttggcaactggtgccgctcatg

SEQ ID NO: 690933 - DNA, 25 bp, Homo sapien
tcaagagaaccggaggctttggcaa

SEQ ID NO: 690934 - DNA, 25 bp, Homo sapien
tctgacttggaagtaaggagccagg

SEQ ID NO: 690935 - DNA, 25 bp, Homo sapien
tctggattaggacctggcctcctgg

SEQ ID NO: 690936 - DNA, 25 bp, Homo sapien
gcagagagccacatggtggtgtctg

SEQ ID NO: 690937 - DNA, 25 bp, Homo sapien
tcttgtgttgccttctggattagga

SEQ ID NO: 690938 - DNA, 25 bp, Homo sapien
gaagatggaacagcaatgctcccag

SEQ ID NO: 690939 - DNA, 25 bp, Homo sapien
tcaagctcgagttttggtggactca

SEQ ID NO: 690940 - DNA, 25 bp, Homo sapien
tccattagctgtgtggtgcaccgtc

SEQ ID NO: 690941 - DNA, 25 bp, Homo sapien
tgccagttggaatgagaacagttat

SEQ ID NO: 690942 - DNA, 25 bp, Homo sapien
gaattaggcctctgagatccattag

SEQ ID NO: 690943 - DNA, 25 bp, Homo sapien
ccccagacttggtgcgtccctgcag

SEQ ID NO: 690944 - DNA, 25 bp, Homo sapien
agaacggcctgcttcagcccggctg

SEQ ID NO: 690945 - DNA, 25 bp, Homo sapien
acagaacggcctgcttcagcccggc

SEQ ID NO: 690946 - DNA, 25 bp, Homo sapien
gcacagaacggcctgcttcagcccg

SEQ ID NO: 690947 - DNA, 25 bp, Homo sapien
cagtccctgagtcttcacggctcct

SEQ ID NO: 690948 - DNA, 25 bp, Homo sapien
gaagagcactgtcctgtccgggacc

SEQ ID NO: 690949 - DNA, 25 bp, Homo sapien
acagtcttgtccagcggctcccgga

SEQ ID NO: 690950 - DNA, 25 bp, Homo sapien
ggaccccagtccctgagtcttcacg

SEQ ID NO: 690951 - DNA, 25 bp, Homo sapien
gaacaacctctcttgacctgtgaat

SEQ ID NO: 690952 - DNA, 25 bp, Homo sapien
ttagctccagagtccggaacaacct

SEQ ID NO: 690953 - DNA, 25 bp, Homo sapien
cagagtccggaacaacctctcttga

SEQ ID NO: 690954 - DNA, 25 bp, Homo sapien
gctctgctcttagctccagagtccg

SEQ ID NO: 690955 - DNA, 25 bp, Homo sapien
gcccagcggcagctctgctcttagc

SEQ ID NO: 690956 - DNA, 25 bp, Homo sapien
ttctgctccttgaaacgccttggga

SEQ ID NO: 690957 - DNA, 25 bp, Homo sapien
catgttagcaatcagcttccgtttc

SEQ ID NO: 690958 - DNA, 25 bp, Homo sapien
aatcagcttccgtttctgctccttg

SEQ ID NO: 690959 - DNA, 25 bp, Homo sapien
tctgctccttgaaacgccttgggaa

SEQ ID NO: 690960 - DNA, 25 bp, Homo sapien
tgtctgaccatgagccgccttttta

SEQ ID NO: 690961 - DNA, 25 bp, Homo sapien
tattttctcagggaccattttcagc

SEQ ID NO: 690962 - DNA, 25 bp, Homo sapien
gatgggaggaccctcgtcttgtccc

SEQ ID NO: 690963 - DNA, 25 bp, Homo sapien
cagattggaccaagtgtttctcgcc

SEQ ID NO: 690964 - DNA, 25 bp, Homo sapien
tctgtgtctgcagcgctctgacatc

SEQ ID NO: 690965 - DNA, 25 bp, Homo sapien
cagtggttgccagcgtagaacgctc

SEQ ID NO: 690966 - DNA, 25 bp, Homo sapien
gacaggccccgcacatggacatggg

SEQ ID NO: 690967 - DNA, 25 bp, Homo sapien
tccttccatggagattgacaggccc

SEQ ID NO: 690968 - DNA, 25 bp, Homo sapien
gagacactcaacagctcgcttatcg

SEQ ID NO: 690969 - DNA, 25 bp, Homo sapien
cctcggggagttctgggtttgcgcg

SEQ ID NO: 690970 - DNA, 25 bp, Homo sapien
gtttgcgcgggaggctgccgatggc

SEQ ID NO: 690971 - DNA, 25 bp, Homo sapien
gctcgcttatcggtcactctccggg

SEQ ID NO: 690972 - DNA, 25 bp, Homo sapien
ttcagcacacggctgttgccagcgg

SEQ ID NO: 690973 - DNA, 25 bp, Homo sapien
ataatgcgggaatggactgcgtgtc

SEQ ID NO: 690974 - DNA, 25 bp, Homo sapien
tgccagcggcggtgatgggcttgcc

SEQ ID NO: 690975 - DNA, 25 bp, Homo sapien
gaatggactgcgtgtcttcctccca

SEQ ID NO: 690976 - DNA, 25 bp, Homo sapien
gagcagctctgttccaaacgcccat

SEQ ID NO: 690977 - DNA, 25 bp, Homo sapien
tggacactgaggagctctgtgaggt

SEQ ID NO: 690978 - DNA, 25 bp, Homo sapien
tggagagcagctctgttccaaacgc

SEQ ID NO: 690979 - DNA, 25 bp, Homo sapien
gaggagggggagctttgtggacact

SEQ ID NO: 690980 - DNA, 25 bp, Homo sapien
ccattgcttgctggagtgacatgaa

SEQ ID NO: 690981 - DNA, 25 bp, Homo sapien
aatggttactatggcgccgttacgc

SEQ ID NO: 690982 - DNA, 25 bp, Homo sapien
gagggcctcattcgaaaagtacaag

SEQ ID NO: 690983 - DNA, 25 bp, Homo sapien
tttagctggccgctcactgtctcgg

SEQ ID NO: 690984 - DNA, 25 bp, Homo sapien
caagtgtgttgcgtttggatgtgta

SEQ ID NO: 690985 - DNA, 25 bp, Homo sapien
ggctgttaagaagtttgtcagcttc

SEQ ID NO: 690986 - DNA, 25 bp, Homo sapien
tccccttccaagtgtgttgcgtttg

SEQ ID NO: 690987 - DNA, 25 bp, Homo sapien
tctgccgcgccagggggttgctgct

SEQ ID NO: 690988 - DNA, 25 bp, Homo sapien
aaacgtcagtatggaggcgcttaag

SEQ ID NO: 690989 - DNA, 25 bp, Homo sapien
gaaaacgtcagtatggaggcgctta

SEQ ID NO: 690990 - DNA, 25 bp, Homo sapien
cgtcagtatggaggcgcttaagtag

SEQ ID NO: 690991 - DNA, 25 bp, Homo sapien
aagaaaacgtcagtatggaggcgct

SEQ ID NO: 690992 - DNA, 25 bp, Homo sapien
ctccgtgggccacgtgatcagagca

SEQ ID NO: 690993 - DNA, 25 bp, Homo sapien
agcacggcaggtgccccactttaca

SEQ ID NO: 690994 - DNA, 25 bp, Homo sapien
gcgccatggcagggagtgactgcag

SEQ ID NO: 690995 - DNA, 25 bp, Homo sapien
tgggccacgtgatcagagcacggca

SEQ ID NO: 690996 - DNA, 25 bp, Homo sapien
actggcagccgtggggatctggggg

SEQ ID NO: 690997 - DNA, 25 bp, Homo sapien
aactggcagccgtggggatctgggg

SEQ ID NO: 690998 - DNA, 25 bp, Homo sapien
gaactggcagccgtggggatctggg

SEQ ID NO: 690999 - DNA, 25 bp, Homo sapien
ggagaaacagtaggctctggcttgt

SEQ ID NO: 691000 - DNA, 25 bp, Homo sapien
ggcgtggtgaccacaaaggtgcctt

SEQ ID NO: 691001 - DNA, 25 bp, Homo sapien
tgatctgagtgcctgtgagggcccc

SEQ ID NO: 691002 - DNA, 25 bp, Homo sapien
gcttcaagaacccattcaccagctg

SEQ ID NO: 691003 - DNA, 25 bp, Homo sapien
ttctcagctgccttgctgtgcgctg

SEQ ID NO: 691004 - DNA, 25 bp, Homo sapien
tcagctgccttgctgtgcgctgaag

SEQ ID NO: 691005 - DNA, 25 bp, Homo sapien
gctgccttgctgtgcgctgaaggca

SEQ ID NO: 691006 - DNA, 25 bp, Homo sapien
cttgctgtgcgctgaaggcagccca

SEQ ID NO: 691007 - DNA, 25 bp, Homo sapien
gaccagtgggatgtacttgccaggg

SEQ ID NO: 691008 - DNA, 25 bp, Homo sapien
ggcaggggaccagtgggatgtactt

SEQ ID NO: 691009 - DNA, 25 bp, Homo sapien
caggggaccagtgggatgtacttgc

SEQ ID NO: 691010 - DNA, 25 bp, Homo sapien
ggggaccagtgggatgtacttgcca

SEQ ID NO: 691011 - DNA, 25 bp, Homo sapien
cactgaataatgtgccttcgagggc

SEQ ID NO: 691012 - DNA, 25 bp, Homo sapien
aagccagcgtgcagagacttagcca

SEQ ID NO: 691013 - DNA, 25 bp, Homo sapien
gccacgacccttctggaaatgttac

SEQ ID NO: 691014 - DNA, 25 bp, Homo sapien
cggagtcaaccggcgttttctgctt

SEQ ID NO: 691015 - DNA, 25 bp, Homo sapien
ctttgattgtaagcctcgagggctg

SEQ ID NO: 691016 - DNA, 25 bp, Homo sapien
tatctgtcctactttgattgtaagc

SEQ ID NO: 691017 - DNA, 25 bp, Homo sapien
ccgctccgagcgcactgttggcatt

SEQ ID NO: 691018 - DNA, 25 bp, Homo sapien
tgtcctactttgattgtaagcctcg

SEQ ID NO: 691019 - DNA, 25 bp, Homo sapien
taaacgattgtggttcctctggctg

SEQ ID NO: 691020 - DNA, 25 bp, Homo sapien
caggagcttaaacgattgtggttcc

SEQ ID NO: 691021 - DNA, 25 bp, Homo sapien
ggaagcacaggagcttaaacgattg

SEQ ID NO: 691022 - DNA, 25 bp, Homo sapien
gcttaaacgattgtggttcctctgg

SEQ ID NO: 691023 - DNA, 25 bp, Homo sapien
ccttccaaccctagacacctgctgc

SEQ ID NO: 691024 - DNA, 25 bp, Homo sapien
ctaaattgctgaagacgccacagcc

SEQ ID NO: 691025 - DNA, 25 bp, Homo sapien
tccaaccctagacacctgctgccgc

SEQ ID NO: 691026 - DNA, 25 bp, Homo sapien
taaattgctgaagacgccacagccc

SEQ ID NO: 691027 - DNA, 25 bp, Homo sapien
catgagtggtgctcatcctggtccc

SEQ ID NO: 691028 - DNA, 25 bp, Homo sapien
ccatgagtggtgctcatcctggtcc

SEQ ID NO: 691029 - DNA, 25 bp, Homo sapien
ctctgggccatgagtggtgctcatc

SEQ ID NO: 691030 - DNA, 25 bp, Homo sapien
gggccatgagtggtgctcatcctgg

SEQ ID NO: 691031 - DNA, 25 bp, Homo sapien
tccccagtacagattccccaatacc

SEQ ID NO: 691032 - DNA, 25 bp, Homo sapien
gtcctggggcatcagggcgaacaga

SEQ ID NO: 691033 - DNA, 25 bp, Homo sapien
tcctggggcatcagggcgaacagag

SEQ ID NO: 691034 - DNA, 25 bp, Homo sapien
cagaggggccggttacttcatgcat

SEQ ID NO: 691035 - DNA, 25 bp, Homo sapien
gcgaacagaggggccggttacttca

SEQ ID NO: 691036 - DNA, 25 bp, Homo sapien
tggaccgggcgaagcaggcagggct

SEQ ID NO: 691037 - DNA, 25 bp, Homo sapien
ggatggaccgggcgaagcaggcagg

SEQ ID NO: 691038 - DNA, 25 bp, Homo sapien
ctgcacaggatggaccgggcgaagc

SEQ ID NO: 691039 - DNA, 25 bp, Homo sapien
tgcacaggatggaccgggcgaagca

SEQ ID NO: 691040 - DNA, 25 bp, Homo sapien
cagctgtgccgggtgtcggactggg

SEQ ID NO: 691041 - DNA, 25 bp, Homo sapien
agacaagagggggcacgctggatgg

SEQ ID NO: 691042 - DNA, 25 bp, Homo sapien
tgcagacaagagggggcacgctgga

SEQ ID NO: 691043 - DNA, 25 bp, Homo sapien
ctggggacctccttctgctggggga

SEQ ID NO: 691044 - DNA, 25 bp, Homo sapien
gtcccagccacagggtagaggaacg

SEQ ID NO: 691045 - DNA, 25 bp, Homo sapien
ggtagaggaacggcctctccacaga

SEQ ID NO: 691046 - DNA, 25 bp, Homo sapien
gtagaggaacggcctctccacagag

SEQ ID NO: 691047 - DNA, 25 bp, Homo sapien
agggtagaggaacggcctctccaca

SEQ ID NO: 691048 - DNA, 25 bp, Homo sapien
gtttgactcccaagaatgcaccttc

SEQ ID NO: 691049 - DNA, 25 bp, Homo sapien
aggacaccgtctgccctgacgcatg

SEQ ID NO: 691050 - DNA, 25 bp, Homo sapien
gctggcaaagcgtttgactcccaag

SEQ ID NO: 691051 - DNA, 25 bp, Homo sapien
ccaagctgcaggacgccaaggtagg

SEQ ID NO: 691052 - DNA, 25 bp, Homo sapien
gaatgcagcaggtcctcatcatgtg

SEQ ID NO: 691053 - DNA, 25 bp, Homo sapien
ctggtgaatgcagcaggtcctcatc

SEQ ID NO: 691054 - DNA, 25 bp, Homo sapien
ggtgaatgcagcaggtcctcatcat

SEQ ID NO: 691055 - DNA, 25 bp, Homo sapien
gtgaatgcagcaggtcctcatcatg

SEQ ID NO: 691056 - DNA, 25 bp, Homo sapien
ctgggctcggagggtgtccagctga

SEQ ID NO: 691057 - DNA, 25 bp, Homo sapien
tggacatcttggtgtaacaggcctt

SEQ ID NO: 691058 - DNA, 25 bp, Homo sapien
caggccttgcttaggagggaaacga

SEQ ID NO: 691059 - DNA, 25 bp, Homo sapien
ccttgcttaggagggaaacgaagca

SEQ ID NO: 691060 - DNA, 25 bp, Homo sapien
cttaacttccgggactccactgtca

SEQ ID NO: 691061 - DNA, 25 bp, Homo sapien
cagtggaagaaatgcttccttggcc

SEQ ID NO: 691062 - DNA, 25 bp, Homo sapien
gtggaagaaatgcttccttggcctc

SEQ ID NO: 691063 - DNA, 25 bp, Homo sapien
aagaaatgcttccttggcctctcct

SEQ ID NO: 691064 - DNA, 25 bp, Homo sapien
ggaagaaatgcttccttggcctctc

SEQ ID NO: 691065 - DNA, 25 bp, Homo sapien
cctttccatgaaacagtaagcagat

SEQ ID NO: 691066 - DNA, 25 bp, Homo sapien
cagtaagcagattgccgtgagaagc

SEQ ID NO: 691067 - DNA, 25 bp, Homo sapien
gaaacagtaagcagattgccgtgag

SEQ ID NO: 691068 - DNA, 25 bp, Homo sapien
gcagattgccgtgagaagctgtgac

SEQ ID NO: 691069 - DNA, 25 bp, Homo sapien
tttgcacatgagtgaaggtccttgc

SEQ ID NO: 691070 - DNA, 25 bp, Homo sapien
ggtccttgcaacatctagaatctgg

SEQ ID NO: 691071 - DNA, 25 bp, Homo sapien
aattttgttcccagtagcggtcaag

SEQ ID NO: 691072 - DNA, 25 bp, Homo sapien
tagaatctggatccttgtacagaga

SEQ ID NO: 691073 - DNA, 25 bp, Homo sapien
taaatgtttgtatgtcttgggttcc

SEQ ID NO: 691074 - DNA, 25 bp, Homo sapien
tgtggagccatcgactctacagact

SEQ ID NO: 691075 - DNA, 25 bp, Homo sapien
ggttccttgtgattgacaaacgtga

SEQ ID NO: 691076 - DNA, 25 bp, Homo sapien
cccacagtggttgctggcgcttgat

SEQ ID NO: 691077 - DNA, 25 bp, Homo sapien
ctaagtctctggtgcagatgttcgt

SEQ ID NO: 691078 - DNA, 25 bp, Homo sapien
taagtctctggtgcagatgttcgtc

SEQ ID NO: 691079 - DNA, 25 bp, Homo sapien
taatgggggcccgctcttcaggctc

SEQ ID NO: 691080 - DNA, 25 bp, Homo sapien
ctgtggttcccaagagacattgtca

SEQ ID NO: 691081 - DNA, 25 bp, Homo sapien
gagggttaggagaattaatgatttc

SEQ ID NO: 691082 - DNA, 25 bp, Homo sapien
cattatcaatgtagggatgcgaggg

SEQ ID NO: 691083 - DNA, 25 bp, Homo sapien
aagtgagggtaactgaatcttgcac

SEQ ID NO: 691084 - DNA, 25 bp, Homo sapien
cagggtccccgctgcacatccaggg

SEQ ID NO: 691085 - DNA, 25 bp, Homo sapien
gtagacctggtcagggtccccgctg

SEQ ID NO: 691086 - DNA, 25 bp, Homo sapien
ccttggcccagcacgtagacctggt

SEQ ID NO: 691087 - DNA, 25 bp, Homo sapien
cacatccaggggttcttcctgggtc

SEQ ID NO: 691088 - DNA, 25 bp, Homo sapien
atcaatgactggaggtgcatccagc

SEQ ID NO: 691089 - DNA, 25 bp, Homo sapien
tcaatgactggaggtgcatccagca

SEQ ID NO: 691090 - DNA, 25 bp, Homo sapien
tggaacccaggatccagtcccccaa

SEQ ID NO: 691091 - DNA, 25 bp, Homo sapien
aatcaatgactggaggtgcatccag

SEQ ID NO: 691092 - DNA, 25 bp, Homo sapien
tagggcctctgatgatggcagcgct

SEQ ID NO: 691093 - DNA, 25 bp, Homo sapien
gaagttgccgtagggcctctgatga

SEQ ID NO: 691094 - DNA, 25 bp, Homo sapien
aggcacatccgagccaagcacagct

SEQ ID NO: 691095 - DNA, 25 bp, Homo sapien
gacggccgagcatcagcgccaggca

SEQ ID NO: 691096 - DNA, 25 bp, Homo sapien
tccatgtaggaagcatgctctgcag

SEQ ID NO: 691097 - DNA, 25 bp, Homo sapien
ttgttaatctgtgccgatcgcctca

SEQ ID NO: 691098 - DNA, 25 bp, Homo sapien
gatcgcctcacagttgcgtcttgcc

SEQ ID NO: 691099 - DNA, 25 bp, Homo sapien
tgcgtcttgccctatcacggcaggc

SEQ ID NO: 691100 - DNA, 25 bp, Homo sapien
ctattaggatcaatactcaagggtt

SEQ ID NO: 691101 - DNA, 25 bp, Homo sapien
ggatcaatactcaagggttggctgc

SEQ ID NO: 691102 - DNA, 25 bp, Homo sapien
ttaggatcaatactcaagggttggc

SEQ ID NO: 691103 - DNA, 25 bp, Homo sapien
atcaatactcaagggttggctgctc

SEQ ID NO: 691104 - DNA, 25 bp, Homo sapien
ttggctgcagcatccgaggaccaga

SEQ ID NO: 691105 - DNA, 25 bp, Homo sapien
accagacacttgtggcccatgccaa

SEQ ID NO: 691106 - DNA, 25 bp, Homo sapien
gaagctgatgtcaggacatgatgga

SEQ ID NO: 691107 - DNA, 25 bp, Homo sapien
aagtgagacatttcttggatggctg

SEQ ID NO: 691108 - DNA, 25 bp, Homo sapien
cacactgcggcgcctgctttttcct

SEQ ID NO: 691109 - DNA, 25 bp, Homo sapien
cggcgcctgctttttccttgagcat

SEQ ID NO: 691110 - DNA, 25 bp, Homo sapien
tgcggcgcctgctttttccttgagc

SEQ ID NO: 691111 - DNA, 25 bp, Homo sapien
cactgcggcgcctgctttttccttg

SEQ ID NO: 691112 - DNA, 25 bp, Homo sapien
ccggacccaggcgtgatcctagtct

SEQ ID NO: 691113 - DNA, 25 bp, Homo sapien
tgaggtctccagaggcacccggacc

SEQ ID NO: 691114 - DNA, 25 bp, Homo sapien
ctgctcactcgaccgcagggaggga

SEQ ID NO: 691115 - DNA, 25 bp, Homo sapien
cgagctgtgcatggactatctgtga

SEQ ID NO: 691116 - DNA, 25 bp, Homo sapien
ggaatgtgtaacttgtcacctccac

SEQ ID NO: 691117 - DNA, 25 bp, Homo sapien
caggaaggaatgtgtaacttgtcac

SEQ ID NO: 691118 - DNA, 25 bp, Homo sapien
gagacagcttggttgctcgtgttga

SEQ ID NO: 691119 - DNA, 25 bp, Homo sapien
cttggttgctcgtgttgagtgaaca

SEQ ID NO: 691120 - DNA, 25 bp, Homo sapien
ggatccaggctccccgttttgcact

SEQ ID NO: 691121 - DNA, 25 bp, Homo sapien
ccgttttgcactgctcttgcatggg

SEQ ID NO: 691122 - DNA, 25 bp, Homo sapien
tgcatggggcttcagcgccttcctc

SEQ ID NO: 691123 - DNA, 25 bp, Homo sapien
tgctgggaagggcacggccacacct

SEQ ID NO: 691124 - DNA, 25 bp, Homo sapien
tctccaccagtgcaaccttcagaag

SEQ ID NO: 691125 - DNA, 25 bp, Homo sapien
tgagtttggagtctccaccagtgca

SEQ ID NO: 691126 - DNA, 25 bp, Homo sapien
aagcgcagggcacatgcattcagtg

SEQ ID NO: 691127 - DNA, 25 bp, Homo sapien
gggcaggctctgagtttgcttgctt

SEQ ID NO: 691128 - DNA, 25 bp, Homo sapien
ggagggccttttgcctgcgttttga

SEQ ID NO: 691129 - DNA, 25 bp, Homo sapien
cagagggagggccttttgcctgcgt

SEQ ID NO: 691130 - DNA, 25 bp, Homo sapien
agggccttttgcctgcgttttgaag

SEQ ID NO: 691131 - DNA, 25 bp, Homo sapien
cctgtgcccaagaggggctggcaga

SEQ ID NO: 691132 - DNA, 25 bp, Homo sapien
tcaatccctgttcccgtcgcagggc

SEQ ID NO: 691133 - DNA, 25 bp, Homo sapien
ccctgttcccgtcgcagggctgtcc

SEQ ID NO: 691134 - DNA, 25 bp, Homo sapien
atccctgttcccgtcgcagggctgt

SEQ ID NO: 691135 - DNA, 25 bp, Homo sapien
tgttcccgtcgcagggctgtccccg

SEQ ID NO: 691136 - DNA, 25 bp, Homo sapien
gtctatctttgcgaggctctggcct

SEQ ID NO: 691137 - DNA, 25 bp, Homo sapien
gcgagcgtggccttttgtctatctt

SEQ ID NO: 691138 - DNA, 25 bp, Homo sapien
tttgtctatctttgcgaggctctgg

SEQ ID NO: 691139 - DNA, 25 bp, Homo sapien
tctgagcccagcgagcgtggccttt

SEQ ID NO: 691140 - DNA, 25 bp, Homo sapien
gaagcctccacaggggcggtagaat

SEQ ID NO: 691141 - DNA, 25 bp, Homo sapien
cgtcactgtgaagcaccaggtgcct

SEQ ID NO: 691142 - DNA, 25 bp, Homo sapien
agactcctgagtcgctccgtcactg

SEQ ID NO: 691143 - DNA, 25 bp, Homo sapien
tggaggctccagagttccacgccct

SEQ ID NO: 691144 - DNA, 25 bp, Homo sapien
tttctggttttacttcgacatctgg

SEQ ID NO: 691145 - DNA, 25 bp, Homo sapien
tctggttttacttcgacatctgggt

SEQ ID NO: 691146 - DNA, 25 bp, Homo sapien
ctgcccacattgtgagttaaatcct

SEQ ID NO: 691147 - DNA, 25 bp, Homo sapien
ggttttacttcgacatctgggtaga

SEQ ID NO: 691148 - DNA, 25 bp, Homo sapien
caccattcatacagggctttccagg

SEQ ID NO: 691149 - DNA, 25 bp, Homo sapien
ccaccattcatacagggctttccag

SEQ ID NO: 691150 - DNA, 25 bp, Homo sapien
accattcatacagggctttccaggg

SEQ ID NO: 691151 - DNA, 25 bp, Homo sapien
ccattcatacagggctttccagggc

SEQ ID NO: 691152 - DNA, 25 bp, Homo sapien
aatcatcggagcactcctgagggtg

SEQ ID NO: 691153 - DNA, 25 bp, Homo sapien
ttaatcatcggagcactcctgaggg

SEQ ID NO: 691154 - DNA, 25 bp, Homo sapien
taatcatcggagcactcctgagggt

SEQ ID NO: 691155 - DNA, 25 bp, Homo sapien
atcatcggagcactcctgagggtgg

SEQ ID NO: 691156 - DNA, 25 bp, Homo sapien
tcatccagccagtatagcgccaggc

SEQ ID NO: 691157 - DNA, 25 bp, Homo sapien
cagctcagccttgggtaggatcagg

SEQ ID NO: 691158 - DNA, 25 bp, Homo sapien
cacgtgttcccaagcaggttccctt

SEQ ID NO: 691159 - DNA, 25 bp, Homo sapien
cacacgaatgtttagggaaggagat

SEQ ID NO: 691160 - DNA, 25 bp, Homo sapien
gatgacaggtgcatcgcttcctgca

SEQ ID NO: 691161 - DNA, 25 bp, Homo sapien
tcctgcaggaagagacttgtaggct

SEQ ID NO: 691162 - DNA, 25 bp, Homo sapien
gatatttggaaaccgcagagcagct

SEQ ID NO: 691163 - DNA, 25 bp, Homo sapien
cttgtaggcttgactcctgccggga

SEQ ID NO: 691164 - DNA, 25 bp, Homo sapien
cgtgtcagtgagttagcaccgtgct

SEQ ID NO: 691165 - DNA, 25 bp, Homo sapien
ctgaaggtggttttaacccatggcg

SEQ ID NO: 691166 - DNA, 25 bp, Homo sapien
taacatcgaacctttactgaaggtg

SEQ ID NO: 691167 - DNA, 25 bp, Homo sapien
catggcgtgcagcacagagggcact

SEQ ID NO: 691168 - DNA, 25 bp, Homo sapien
gttagcctcgtgcttggtcacgcac

SEQ ID NO: 691169 - DNA, 25 bp, Homo sapien
gtgagttagcctcgtgcttggtcac

SEQ ID NO: 691170 - DNA, 25 bp, Homo sapien
tgtgagtgagttagcctcgtgcttg

SEQ ID NO: 691171 - DNA, 25 bp, Homo sapien
ctcgtgtgagtgagttagcctcgtg

SEQ ID NO: 691172 - DNA, 25 bp, Homo sapien
tgtgtgagtgagttagcatcgtgct

SEQ ID NO: 691173 - DNA, 25 bp, Homo sapien
catgcttggccgtgcactggtgtgc

SEQ ID NO: 691174 - DNA, 25 bp, Homo sapien
cttgtgtgagttagcgtcatgcttg

SEQ ID NO: 691175 - DNA, 25 bp, Homo sapien
agtgagttagcatcgtgcttggcca

SEQ ID NO: 691176 - DNA, 25 bp, Homo sapien
ctcgcaggtggccatcgggggccat

SEQ ID NO: 691177 - DNA, 25 bp, Homo sapien
catttccgaggttcgtttggcatca

SEQ ID NO: 691178 - DNA, 25 bp, Homo sapien
gtccatttccgaggttcgtttggca

SEQ ID NO: 691179 - DNA, 25 bp, Homo sapien
ccatttccgaggttcgtttggcatc

SEQ ID NO: 691180 - DNA, 25 bp, Homo sapien
ttccgaggttcgtttggcatcaaaa

SEQ ID NO: 691181 - DNA, 25 bp, Homo sapien
gctgctcctctgagacgggcagacc

SEQ ID NO: 691182 - DNA, 25 bp, Homo sapien
ccagtggccgttaaaccagtgggca

SEQ ID NO: 691183 - DNA, 25 bp, Homo sapien
agctctccatgcaccagcacagact

SEQ ID NO: 691184 - DNA, 25 bp, Homo sapien
atggaaacgcgtctgcggagtcccc

SEQ ID NO: 691185 - DNA, 25 bp, Homo sapien
gcagtcggtgaacggcacagcccag

SEQ ID NO: 691186 - DNA, 25 bp, Homo sapien
agccgagctccaaggctgcatgtgc

SEQ ID NO: 691187 - DNA, 25 bp, Homo sapien
cacctgtatcacctgcatgcagtcg

SEQ ID NO: 691188 - DNA, 25 bp, Homo sapien
acctgcatgcagtcggtgaacggca

SEQ ID NO: 691189 - DNA, 25 bp, Homo sapien
ggctcgagggtgacagcttcagata

SEQ ID NO: 691190 - DNA, 25 bp, Homo sapien
taagagtgtgagaggctcgagggtg

SEQ ID NO: 691191 - DNA, 25 bp, Homo sapien
tgtgagaggctcgagggtgacagct

SEQ ID NO: 691192 - DNA, 25 bp, Homo sapien
acagcttcagatatcgtgaacagtc

SEQ ID NO: 691193 - DNA, 25 bp, Homo sapien
ctgaagggacccagaccacatgaag

SEQ ID NO: 691194 - DNA, 25 bp, Homo sapien
gaagggacccagaccacatgaagcc

SEQ ID NO: 691195 - DNA, 25 bp, Homo sapien
ggacccagaccacatgaagccacat

SEQ ID NO: 691196 - DNA, 25 bp, Homo sapien
agggacccagaccacatgaagccac

SEQ ID NO: 691197 - DNA, 25 bp, Homo sapien
ccctgcattcgtgaataggaggtga

SEQ ID NO: 691198 - DNA, 25 bp, Homo sapien
cattctgcatcgaactgaacctcag

SEQ ID NO: 691199 - DNA, 25 bp, Homo sapien
tgtgtggctgcgggcaagtcctgtg

SEQ ID NO: 691200 - DNA, 25 bp, Homo sapien
aaggcaggggtccattcctccagga

SEQ ID NO: 691201 - DNA, 25 bp, Homo sapien
tctcctttggcttcctcagtctgtc

SEQ ID NO: 691202 - DNA, 25 bp, Homo sapien
tgagttgtctattccatgcacagtg

SEQ ID NO: 691203 - DNA, 25 bp, Homo sapien
gggatctgcaccagcggtcttccac

SEQ ID NO: 691204 - DNA, 25 bp, Homo sapien
gatacccgctcccaagggggcagct

SEQ ID NO: 691205 - DNA, 25 bp, Homo sapien
gactcctgcttttccggctgtgata

SEQ ID NO: 691206 - DNA, 25 bp, Homo sapien
caagtcctgcgtgtatccattttca

SEQ ID NO: 691207 - DNA, 25 bp, Homo sapien
gcgcctgactgtttgaatatggatt

SEQ ID NO: 691208 - DNA, 25 bp, Homo sapien
tttcaaacatcagccgtggcaagtc

SEQ ID NO: 691209 - DNA, 25 bp, Homo sapien
tgttacatgtgggtgcgcctgactg

SEQ ID NO: 691210 - DNA, 25 bp, Homo sapien
tgcttcgtggagatacctggactcc

SEQ ID NO: 691211 - DNA, 25 bp, Homo sapien
gatacctggactcccgcgtggaaca

SEQ ID NO: 691212 - DNA, 25 bp, Homo sapien
agcctctttgcccggtttccacagt

SEQ ID NO: 691213 - DNA, 25 bp, Homo sapien
gaagtaggtgcttcgtggagatacc

SEQ ID NO: 691214 - DNA, 25 bp, Homo sapien
cctttctggagccatcgctggcttc

SEQ ID NO: 691215 - DNA, 25 bp, Homo sapien
tgatgaaacaacctgtcctcaacgt

SEQ ID NO: 691216 - DNA, 25 bp, Homo sapien
gcgcaacctctgtcagggcaagtgt

SEQ ID NO: 691217 - DNA, 25 bp, Homo sapien
tcaccattccgagcttgggaggacg

SEQ ID NO: 691218 - DNA, 25 bp, Homo sapien
cgcaggcagtgtcgacatgaagcaa

SEQ ID NO: 691219 - DNA, 25 bp, Homo sapien
gcccagcgcaggcagtgtcgacatg

SEQ ID NO: 691220 - DNA, 25 bp, Homo sapien
ggcagtgtcgacatgaagcaaacca

SEQ ID NO: 691221 - DNA, 25 bp, Homo sapien
gacatgaagcaaaccattgttaaaa

SEQ ID NO: 691222 - DNA, 25 bp, Homo sapien
gtagacatgcaccatgaagaccagg

SEQ ID NO: 691223 - DNA, 25 bp, Homo sapien
gccagcatctgtgcccgcggcagtt

SEQ ID NO: 691224 - DNA, 25 bp, Homo sapien
agtttagagtgacactgtcctctgt

SEQ ID NO: 691225 - DNA, 25 bp, Homo sapien
ccacgttgaggtgtctgtgtgccac

SEQ ID NO: 691226 - DNA, 25 bp, Homo sapien
gatttccactgaccctgcaccgtgg

SEQ ID NO: 691227 - DNA, 25 bp, Homo sapien
ggctgaccgggcctcagtcagtgcc

SEQ ID NO: 691228 - DNA, 25 bp, Homo sapien
gcctctagaatccacccactgggag

SEQ ID NO: 691229 - DNA, 25 bp, Homo sapien
tgggagagcaagtccaaggcagacc

SEQ ID NO: 691230 - DNA, 25 bp, Homo sapien
ccctgtagacgaacttgaaattcac

SEQ ID NO: 691231 - DNA, 25 bp, Homo sapien
ggagtcggccctgtagacgaacttg

SEQ ID NO: 691232 - DNA, 25 bp, Homo sapien
tggctgcacagatgagagccacggt

SEQ ID NO: 691233 - DNA, 25 bp, Homo sapien
gtcggccctgtagacgaacttgaaa

SEQ ID NO: 691234 - DNA, 25 bp, Homo sapien
ggagccaatcccactggcagtgcac

SEQ ID NO: 691235 - DNA, 25 bp, Homo sapien
gaagaaaagctgctaagtgaacacc

SEQ ID NO: 691236 - DNA, 25 bp, Homo sapien
agccatgggctcaggcggacagact

SEQ ID NO: 691237 - DNA, 25 bp, Homo sapien
tgcagcccgaagaaatccacttctg

SEQ ID NO: 691238 - DNA, 25 bp, Homo sapien
ctgcacacgtgcatgcacactcatg

SEQ ID NO: 691239 - DNA, 25 bp, Homo sapien
gcacacgtgcatgcacactcatgcc

SEQ ID NO: 691240 - DNA, 25 bp, Homo sapien
tgcacacgtgcatgcacactcatgc

SEQ ID NO: 691241 - DNA, 25 bp, Homo sapien
tgggtcctcggtgagtttcctggac

SEQ ID NO: 691242 - DNA, 25 bp, Homo sapien
gggtcctcggtgagtttcctggaca

SEQ ID NO: 691243 - DNA, 25 bp, Homo sapien
agaggagcaaggaactcgttctgaa

SEQ ID NO: 691244 - DNA, 25 bp, Homo sapien
caaggaactcgttctgaacaggaaa

SEQ ID NO: 691245 - DNA, 25 bp, Homo sapien
cccaccaagtctgaggctgccaaat

SEQ ID NO: 691246 - DNA, 25 bp, Homo sapien
ggagggaccccaccaagtctgaggc

SEQ ID NO: 691247 - DNA, 25 bp, Homo sapien
caccaagtctgaggctgccaaatgt

SEQ ID NO: 691248 - DNA, 25 bp, Homo sapien
ctgcaaggcggagggaccccaccaa

SEQ ID NO: 691249 - DNA, 25 bp, Homo sapien
agcccctgaatctcagcggcagctg

SEQ ID NO: 691250 - DNA, 25 bp, Homo sapien
caggacttcggagcccctgaatctc

SEQ ID NO: 691251 - DNA, 25 bp, Homo sapien
aggaggctcaggacttcggagcccc

SEQ ID NO: 691252 - DNA, 25 bp, Homo sapien
ggctcaggacttcggagcccctgaa

SEQ ID NO: 691253 - DNA, 25 bp, Homo sapien
ccggggcaatctttttgtgcctcct

SEQ ID NO: 691254 - DNA, 25 bp, Homo sapien
gcttccggggcaatctttttgtgcc

SEQ ID NO: 691255 - DNA, 25 bp, Homo sapien
cttccggggcaatctttttgtgcct

SEQ ID NO: 691256 - DNA, 25 bp, Homo sapien
ctgcttccggggcaatctttttgtg

SEQ ID NO: 691257 - DNA, 25 bp, Homo sapien
cacacagggaggctgcgtgcctggg

SEQ ID NO: 691258 - DNA, 25 bp, Homo sapien
ggtgcttatcaccgtggggcacaca

SEQ ID NO: 691259 - DNA, 25 bp, Homo sapien
acacagggaggctgcgtgcctgggc

SEQ ID NO: 691260 - DNA, 25 bp, Homo sapien
gcttatcaccgtggggcacacaggg

SEQ ID NO: 691261 - DNA, 25 bp, Homo sapien
tcctgtgacgatctcctccaaattg

SEQ ID NO: 691262 - DNA, 25 bp, Homo sapien
catttgcatcctgtgacgatctcct

SEQ ID NO: 691263 - DNA, 25 bp, Homo sapien
catctctcttctagacaatatgaca

SEQ ID NO: 691264 - DNA, 25 bp, Homo sapien
aattggcacccattgaaagattaca

SEQ ID NO: 691265 - DNA, 25 bp, Homo sapien
tggatcttccaaggcatccatcttt

SEQ ID NO: 691266 - DNA, 25 bp, Homo sapien
gatcttccaaggcatccatctttac

SEQ ID NO: 691267 - DNA, 25 bp, Homo sapien
tttggatcttccaaggcatccatct

SEQ ID NO: 691268 - DNA, 25 bp, Homo sapien
atttggatcttccaaggcatccatc

SEQ ID NO: 691269 - DNA, 25 bp, Homo sapien
agctgaggagcctgtccacagcctg

SEQ ID NO: 691270 - DNA, 25 bp, Homo sapien
cccaggaagctgaggagcctgtcca

SEQ ID NO: 691271 - DNA, 25 bp, Homo sapien
ccgagtgaagcttgcagcccccagg

SEQ ID NO: 691272 - DNA, 25 bp, Homo sapien
aggaagctgaggagcctgtccacag

SEQ ID NO: 691273 - DNA, 25 bp, Homo sapien
ctagaaagccctgcgtcggtgttgc

SEQ ID NO: 691274 - DNA, 25 bp, Homo sapien
cgtgcagctgacattcctttggctt

SEQ ID NO: 691275 - DNA, 25 bp, Homo sapien
tcaggcccgtgcagctgacattcct

SEQ ID NO: 691276 - DNA, 25 bp, Homo sapien
cctgcgtcggtgttgctgtgttctc

SEQ ID NO: 691277 - DNA, 25 bp, Homo sapien
caagaggaaatcatgcacttcagag

SEQ ID NO: 691278 - DNA, 25 bp, Homo sapien
gaggaaatcatgcacttcagaggca

SEQ ID NO: 691279 - DNA, 25 bp, Homo sapien
cacaagaggaaatcatgcacttcag

SEQ ID NO: 691280 - DNA, 25 bp, Homo sapien
aatcatgcacttcagaggcagtttc

SEQ ID NO: 691281 - DNA, 25 bp, Homo sapien
tgcagtgaacggcacgggttgcttt

SEQ ID NO: 691282 - DNA, 25 bp, Homo sapien
gtgccgtgctagaagagcaccccaa

SEQ ID NO: 691283 - DNA, 25 bp, Homo sapien
ctttccttggagctgtcacggtgta

SEQ ID NO: 691284 - DNA, 25 bp, Homo sapien
agtgcggcccaggcagatggtacca

SEQ ID NO: 691285 - DNA, 25 bp, Homo sapien
tctcccttgtcagtgaccgtctgta

SEQ ID NO: 691286 - DNA, 25 bp, Homo sapien
agtgaccgtctgtactcggaggcag

SEQ ID NO: 691287 - DNA, 25 bp, Homo sapien
tgaccgtctgtactcggaggcagcg

SEQ ID NO: 691288 - DNA, 25 bp, Homo sapien
aacctcgtctcccttgtcagtgacc

SEQ ID NO: 691289 - DNA, 25 bp, Homo sapien
cgtcgtgaccagaaacacccttctt

SEQ ID NO: 691290 - DNA, 25 bp, Homo sapien
tctttccaccaccattaaattgagc

SEQ ID NO: 691291 - DNA, 25 bp, Homo sapien
caatgttaggggtgacgtcgtgacc

SEQ ID NO: 691292 - DNA, 25 bp, Homo sapien
caccaccattaaattgagcaatacc

SEQ ID NO: 691293 - DNA, 25 bp, Homo sapien
cttggtcccctggaccgcactctgg

SEQ ID NO: 691294 - DNA, 25 bp, Homo sapien
gtcccctggaccgcactctgggcag

SEQ ID NO: 691295 - DNA, 25 bp, Homo sapien
ttggtcccctggaccgcactctggg

SEQ ID NO: 691296 - DNA, 25 bp, Homo sapien
tggtcccctggaccgcactctgggc

SEQ ID NO: 691297 - DNA, 25 bp, Homo sapien
gggcccacgctataaccatgtgcat

SEQ ID NO: 691298 - DNA, 25 bp, Homo sapien
tgactcgggcccacgctataaccat

SEQ ID NO: 691299 - DNA, 25 bp, Homo sapien
tccagggactcgcagcatctctgca

SEQ ID NO: 691300 - DNA, 25 bp, Homo sapien
ttctcggccgccttccggaagcact

SEQ ID NO: 691301 - DNA, 25 bp, Homo sapien
ttggtgaggtgatgtggattccgga

SEQ ID NO: 691302 - DNA, 25 bp, Homo sapien
ggtgaggtgatgtggattccggagg

SEQ ID NO: 691303 - DNA, 25 bp, Homo sapien
ctaagtaacgcagttgggcagggac

SEQ ID NO: 691304 - DNA, 25 bp, Homo sapien
ggcagggacattgtttggtgaggtg

SEQ ID NO: 691305 - DNA, 25 bp, Homo sapien
ttcggagtgctctgagcgttggacc

SEQ ID NO: 691306 - DNA, 25 bp, Homo sapien
agtgctctgagcgttggacctgagc

SEQ ID NO: 691307 - DNA, 25 bp, Homo sapien
ctgagcgttggacctgagctttgga

SEQ ID NO: 691308 - DNA, 25 bp, Homo sapien
tgttcctgttcggagtgctctgagc

SEQ ID NO: 691309 - DNA, 25 bp, Homo sapien
ggacttgctgcgagtcctcattggg

SEQ ID NO: 691310 - DNA, 25 bp, Homo sapien
agggagagtgtccacctctcctcac

SEQ ID NO: 691311 - DNA, 25 bp, Homo sapien
caatggacttgctgcgagtcctcat

SEQ ID NO: 691312 - DNA, 25 bp, Homo sapien
ctcacaatggacttgctgcgagtcc

SEQ ID NO: 691313 - DNA, 25 bp, Homo sapien
aagtcctggcctcttaaatcacgtg

SEQ ID NO: 691314 - DNA, 25 bp, Homo sapien
tgtgtgccatatgactccatttgcg

SEQ ID NO: 691315 - DNA, 25 bp, Homo sapien
ttgcggctactcatacacatttctg

SEQ ID NO: 691316 - DNA, 25 bp, Homo sapien
tcagatctgtgtccgtgcgagcaaa

SEQ ID NO: 691317 - DNA, 25 bp, Homo sapien
cctgctctgccgagcgctggcgata

SEQ ID NO: 691318 - DNA, 25 bp, Homo sapien
cttagatttccagtctcctgcgtgc

SEQ ID NO: 691319 - DNA, 25 bp, Homo sapien
tggcaccgtgaagaggagattagca

SEQ ID NO: 691320 - DNA, 25 bp, Homo sapien
gcgctggcgatacgcggcagatagt

SEQ ID NO: 691321 - DNA, 25 bp, Homo sapien
tgtcatagcttcagatcccgtgcgc

SEQ ID NO: 691322 - DNA, 25 bp, Homo sapien
gtgaaatgtcatagcttcagatccc

SEQ ID NO: 691323 - DNA, 25 bp, Homo sapien
ttcagatcccgtgcgccgccggaga

SEQ ID NO: 691324 - DNA, 25 bp, Homo sapien
aaatgtcatagcttcagatcccgtg

SEQ ID NO: 691325 - DNA, 25 bp, Homo sapien
gttgcccgcagaggcgtcctgcccg

SEQ ID NO: 691326 - DNA, 25 bp, Homo sapien
ctgcctctgccggaggttacaggcc

SEQ ID NO: 691327 - DNA, 25 bp, Homo sapien
gccagttgcccgcagaggcgtcctg

SEQ ID NO: 691328 - DNA, 25 bp, Homo sapien
tgcctctgccggaggttacaggcca

SEQ ID NO: 691329 - DNA, 25 bp, Homo sapien
agctcactcctccacaacatggtcc

SEQ ID NO: 691330 - DNA, 25 bp, Homo sapien
cagctgtgtacagcagagctcactc

SEQ ID NO: 691331 - DNA, 25 bp, Homo sapien
caacatggtccttaagacgggaccg

SEQ ID NO: 691332 - DNA, 25 bp, Homo sapien
gtactgagcgccagctgtgtacagc

SEQ ID NO: 691333 - DNA, 25 bp, Homo sapien
taggaggccccaattgcaaacattc

SEQ ID NO: 691334 - DNA, 25 bp, Homo sapien
gatgagaagcccagttcatagggcc

SEQ ID NO: 691335 - DNA, 25 bp, Homo sapien
cctgagaatgaggacgaaagatgga

SEQ ID NO: 691336 - DNA, 25 bp, Homo sapien
tcggatgtgcggatgaaggatccta

SEQ ID NO: 691337 - DNA, 25 bp, Homo sapien
taaaggtcacggtggctgtaaatgc

SEQ ID NO: 691338 - DNA, 25 bp, Homo sapien
ccttcggtaaaggtcacggtggctg

SEQ ID NO: 691339 - DNA, 25 bp, Homo sapien
ggatgctggccagcatgcggcctgg

SEQ ID NO: 691340 - DNA, 25 bp, Homo sapien
ctgtccttcggtaaaggtcacggtg

SEQ ID NO: 691341 - DNA, 25 bp, Homo sapien
ggtgctcacacctcgaacgccccca

SEQ ID NO: 691342 - DNA, 25 bp, Homo sapien
ctcacacctcgaacgcccccagtca

SEQ ID NO: 691343 - DNA, 25 bp, Homo sapien
tcacacctcgaacgcccccagtcat

SEQ ID NO: 691344 - DNA, 25 bp, Homo sapien
tgctcacacctcgaacgcccccagt

SEQ ID NO: 691345 - DNA, 25 bp, Homo sapien
tccaaccggaatgagtcatgtgacc

SEQ ID NO: 691346 - DNA, 25 bp, Homo sapien
tcatgtgaccgtcagcatccgacct

SEQ ID NO: 691347 - DNA, 25 bp, Homo sapien
cgttcatggtgaggttccaaccgga

SEQ ID NO: 691348 - DNA, 25 bp, Homo sapien
aactggctcgggcaggacgttcatg

SEQ ID NO: 691349 - DNA, 25 bp, Homo sapien
taaagcactcaacatgcaccaagtc

SEQ ID NO: 691350 - DNA, 25 bp, Homo sapien
tgagtaaagcactcaacatgcacca

SEQ ID NO: 691351 - DNA, 25 bp, Homo sapien
cctgcttggcagagatgagtaaagc

SEQ ID NO: 691352 - DNA, 25 bp, Homo sapien
cttggcagagatgagtaaagcactc

SEQ ID NO: 691353 - DNA, 25 bp, Homo sapien
caggtgtgatgaaaaggaatgctcc

SEQ ID NO: 691354 - DNA, 25 bp, Homo sapien
ccagtgtgctcaggtagccgtgaac

SEQ ID NO: 691355 - DNA, 25 bp, Homo sapien
gaggagcctgcatgacactgtgtga

SEQ ID NO: 691356 - DNA, 25 bp, Homo sapien
gggatgcggccctttactgtagcca

SEQ ID NO: 691357 - DNA, 25 bp, Homo sapien
actctcaccagctgcggaggaggct

SEQ ID NO: 691358 - DNA, 25 bp, Homo sapien
tcagcatcacgagtggctctaagtg

SEQ ID NO: 691359 - DNA, 25 bp, Homo sapien
tggccacactcgtgctaataggaag

SEQ ID NO: 691360 - DNA, 25 bp, Homo sapien
tgatcaaaatcgtatcccagcctct

SEQ ID NO: 691361 - DNA, 25 bp, Homo sapien
ccgtgtggcctcattgcagaatctt

SEQ ID NO: 691362 - DNA, 25 bp, Homo sapien
ccactgtttagtgtctggatgtaaa

SEQ ID NO: 691363 - DNA, 25 bp, Homo sapien
tcattgctaatacagagaaggatgc

SEQ ID NO: 691364 - DNA, 25 bp, Homo sapien
ttccaaggtacgagtcagccacgga

SEQ ID NO: 691365 - DNA, 25 bp, Homo sapien
tctcgaggtgtttccgagcagccgt

SEQ ID NO: 691366 - DNA, 25 bp, Homo sapien
ctgcaaagctgtgcgatccaatgtc

SEQ ID NO: 691367 - DNA, 25 bp, Homo sapien
gcaaagctgtgcgatccaatgtccc

SEQ ID NO: 691368 - DNA, 25 bp, Homo sapien
ctggtgtctctctcgaggtgtttcc

SEQ ID NO: 691369 - DNA, 25 bp, Homo sapien
ggaacggccaccacagacatcctgg

SEQ ID NO: 691370 - DNA, 25 bp, Homo sapien
gattctttcctcgtgctctttagaa

SEQ ID NO: 691371 - DNA, 25 bp, Homo sapien
tagaaacaggatttggatcaggaac

SEQ ID NO: 691372 - DNA, 25 bp, Homo sapien
tgagagtatccgctgattctttcct

SEQ ID NO: 691373 - DNA, 25 bp, Homo sapien
ttttcccgaagaagtcctcagcaat

SEQ ID NO: 691374 - DNA, 25 bp, Homo sapien
actcccagaggatcagagtccttgt

SEQ ID NO: 691375 - DNA, 25 bp, Homo sapien
ccgaagaagtcctcagcaatatcct

SEQ ID NO: 691376 - DNA, 25 bp, Homo sapien
ccagaggatcagagtccttgttttt

SEQ ID NO: 691377 - DNA, 25 bp, Homo sapien
tggtcatagacagtgcacactgcac

SEQ ID NO: 691378 - DNA, 25 bp, Homo sapien
caacgttcagatatgtgatgggagc

SEQ ID NO: 691379 - DNA, 25 bp, Homo sapien
cacgtcacatggacaacgttcagat

SEQ ID NO: 691380 - DNA, 25 bp, Homo sapien
gctttcagagacgacaggagccagc

SEQ ID NO: 691381 - DNA, 25 bp, Homo sapien
atgggagctttcagagacgacagga

SEQ ID NO: 691382 - DNA, 25 bp, Homo sapien
aacaggagccgaaaagcagctggga

SEQ ID NO: 691383 - DNA, 25 bp, Homo sapien
gaagaaacaggagccgaaaagcagc

SEQ ID NO: 691384 - DNA, 25 bp, Homo sapien
cagaagaaacaggagccgaaaagca

SEQ ID NO: 691385 - DNA, 25 bp, Homo sapien
gaaacaggagccgaaaagcagctgg

SEQ ID NO: 691386 - DNA, 25 bp, Homo sapien
tcatcgtcaccattggtgccatcat

SEQ ID NO: 691387 - DNA, 25 bp, Homo sapien
cctgctggacgagggtgacagatcc

SEQ ID NO: 691388 - DNA, 25 bp, Homo sapien
gaaggcgtgaaacgtccctgaggct

SEQ ID NO: 691389 - DNA, 25 bp, Homo sapien
caaaccatggagagatgcgtgcggc

SEQ ID NO: 691390 - DNA, 25 bp, Homo sapien
gaggctcagcttcctatctgcgaga

SEQ ID NO: 691391 - DNA, 25 bp, Homo sapien
tgggccagcaccatttgcgtaaccg

SEQ ID NO: 691392 - DNA, 25 bp, Homo sapien
cacaggagcaggtattgaaggttct

SEQ ID NO: 691393 - DNA, 25 bp, Homo sapien
gattctccacggctgaggactcaga

SEQ ID NO: 691394 - DNA, 25 bp, Homo sapien
tggagcggaacacccaagttatggt

SEQ ID NO: 691395 - DNA, 25 bp, Homo sapien
ggccaggtccccttcgccttgagtg

SEQ ID NO: 691396 - DNA, 25 bp, Homo sapien
gcatattccagcaatccagcaccag

SEQ ID NO: 691397 - DNA, 25 bp, Homo sapien
ccttgagtgtcctggcgttggttgc

SEQ ID NO: 691398 - DNA, 25 bp, Homo sapien
aacctgcgttcatccccagttctag

SEQ ID NO: 691399 - DNA, 25 bp, Homo sapien
acaagccacgccctggtgaacaagg

SEQ ID NO: 691400 - DNA, 25 bp, Homo sapien
tgtgagtccggcgtatgtcgttttc

SEQ ID NO: 691401 - DNA, 25 bp, Homo sapien
tcctgagtgattattacaagccacg

SEQ ID NO: 691402 - DNA, 25 bp, Homo sapien
gtcgttttcgtactttcctgagtga

SEQ ID NO: 691403 - DNA, 25 bp, Homo sapien
tgctacaggatagtaagccagactc

SEQ ID NO: 691404 - DNA, 25 bp, Homo sapien
aaatgcccagggtgcagacgcttga

SEQ ID NO: 691405 - DNA, 25 bp, Homo sapien
gctgtagcccacaggccttttatgg

SEQ ID NO: 691406 - DNA, 25 bp, Homo sapien
tttcgggaagagtaaagagctgact

SEQ ID NO: 691407 - DNA, 25 bp, Homo sapien
gcaaaaggcgtttcttacattacag

SEQ ID NO: 691408 - DNA, 25 bp, Homo sapien
ggcaaaaggcgtttcttacattaca

SEQ ID NO: 691409 - DNA, 25 bp, Homo sapien
tgtgagactgaaacgccacatggtg

SEQ ID NO: 691410 - DNA, 25 bp, Homo sapien
atggtggacgacagatccatgaagc

SEQ ID NO: 691411 - DNA, 25 bp, Homo sapien
catggacacagtcttttgtagctgg

SEQ ID NO: 691412 - DNA, 25 bp, Homo sapien
tcccagcaagaacaggggtgtctgt

SEQ ID NO: 691413 - DNA, 25 bp, Homo sapien
caacgtcttcccgaatcacacacgc

SEQ ID NO: 691414 - DNA, 25 bp, Homo sapien
gtcttcccgaatcacacacgctgat

SEQ ID NO: 691415 - DNA, 25 bp, Homo sapien
tcccgaatcacacacgctgatggca

SEQ ID NO: 691416 - DNA, 25 bp, Homo sapien
tcttcccgaatcacacacgctgatg

SEQ ID NO: 691417 - DNA, 25 bp, Homo sapien
gctcggggctgttgcaaatattctt

SEQ ID NO: 691418 - DNA, 25 bp, Homo sapien
cccagctcggggctgttgcaaatat

SEQ ID NO: 691419 - DNA, 25 bp, Homo sapien
tcggggctgttgcaaatattcttct

SEQ ID NO: 691420 - DNA, 25 bp, Homo sapien
cagctcggggctgttgcaaatattc

SEQ ID NO: 691421 - DNA, 25 bp, Homo sapien
actaggacccgtgcctggaggcttc

SEQ ID NO: 691422 - DNA, 25 bp, Homo sapien
atgcaggtcgcagggcccagcacta

SEQ ID NO: 691423 - DNA, 25 bp, Homo sapien
cagggaagcctcatgcaggtcgcag

SEQ ID NO: 691424 - DNA, 25 bp, Homo sapien
ctgctgccgcctccgtaaatcacca

SEQ ID NO: 691425 - DNA, 25 bp, Homo sapien
tcagcccagcaaaccgacatgcagg

SEQ ID NO: 691426 - DNA, 25 bp, Homo sapien
gatgtgctccgtgttttcagcagaa

SEQ ID NO: 691427 - DNA, 25 bp, Homo sapien
cacacataaggcacatcagggagga

SEQ ID NO: 691428 - DNA, 25 bp, Homo sapien
gaaaatcgttcctcatgtcgctgcg

SEQ ID NO: 691429 - DNA, 25 bp, Homo sapien
tgcagctgctgggtgcgcgggagtt

SEQ ID NO: 691430 - DNA, 25 bp, Homo sapien
gttaagtctgctgggctgattcccg

SEQ ID NO: 691431 - DNA, 25 bp, Homo sapien
tcttgttattaaagaggcttcctgc

SEQ ID NO: 691432 - DNA, 25 bp, Homo sapien
ttattaaagaggcttcctgccccag

SEQ ID NO: 691433 - DNA, 25 bp, Homo sapien
tcgcgtgcccatgccggcttgcttg

SEQ ID NO: 691434 - DNA, 25 bp, Homo sapien
tcctgacagtgaggctcgcgtgccc

SEQ ID NO: 691435 - DNA, 25 bp, Homo sapien
gccatacagcgccagctgtggcatc

SEQ ID NO: 691436 - DNA, 25 bp, Homo sapien
tgccggcttgcttgggagcgccata

SEQ ID NO: 691437 - DNA, 25 bp, Homo sapien
cagcccgtccggaccctccgctcct

SEQ ID NO: 691438 - DNA, 25 bp, Homo sapien
gcgtggccccggggtgcatcgcgct

SEQ ID NO: 691439 - DNA, 25 bp, Homo sapien
cccggggtgcatcgcgctgattcca

SEQ ID NO: 691440 - DNA, 25 bp, Homo sapien
ggtccagagcgtggccccggggtgc

SEQ ID NO: 691441 - DNA, 25 bp, Homo sapien
tggtccagagcgtggccccggggtg

SEQ ID NO: 691442 - DNA, 25 bp, Homo sapien
gaaaactactcaacagacgcggctg

SEQ ID NO: 691443 - DNA, 25 bp, Homo sapien
aactactcaacagacgcggctgctg

SEQ ID NO: 691444 - DNA, 25 bp, Homo sapien
gaagaaaactactcaacagacgcgg

SEQ ID NO: 691445 - DNA, 25 bp, Homo sapien
caggaagaaaactactcaacagacg

SEQ ID NO: 691446 - DNA, 25 bp, Homo sapien
tgtggccaccgccgtccacagaggc

SEQ ID NO: 691447 - DNA, 25 bp, Homo sapien
tctgtggccaccgccgtccacagag

SEQ ID NO: 691448 - DNA, 25 bp, Homo sapien
ctgtggccaccgccgtccacagagg

SEQ ID NO: 691449 - DNA, 25 bp, Homo sapien
gggcttctccgaattctgtttatcc

SEQ ID NO: 691450 - DNA, 25 bp, Homo sapien
ccttttgcgggatagtcgcaggctg

SEQ ID NO: 691451 - DNA, 25 bp, Homo sapien
gaattctgtttatcctgggtctggc

SEQ ID NO: 691452 - DNA, 25 bp, Homo sapien
aggtgcatgcagcgttcctccccgt

SEQ ID NO: 691453 - DNA, 25 bp, Homo sapien
cggggcctgatttaccaacaggtct

SEQ ID NO: 691454 - DNA, 25 bp, Homo sapien
cacgcccccactgctaattgcctgc

SEQ ID NO: 691455 - DNA, 25 bp, Homo sapien
ctgatttaccaacaggtctggacag

SEQ ID NO: 691456 - DNA, 25 bp, Homo sapien
ggcctgatttaccaacaggtctgga

SEQ ID NO: 691457 - DNA, 25 bp, Homo sapien
cacacgagcttgttgttggtaagga

SEQ ID NO: 691458 - DNA, 25 bp, Homo sapien
cagaaaacgtgtcaagctgggaccc

SEQ ID NO: 691459 - DNA, 25 bp, Homo sapien
cagcagtttgcaggatgtcggtcct

SEQ ID NO: 691460 - DNA, 25 bp, Homo sapien
tggtaaggaggcacgacagaaaacg

SEQ ID NO: 691461 - DNA, 25 bp, Homo sapien
gggctggagattcgccctcaggtga

SEQ ID NO: 691462 - DNA, 25 bp, Homo sapien
cggggctggagattcgccctcaggt

SEQ ID NO: 691463 - DNA, 25 bp, Homo sapien
aggacggggctggagattcgccctc

SEQ ID NO: 691464 - DNA, 25 bp, Homo sapien
gacggggctggagattcgccctcag

SEQ ID NO: 691465 - DNA, 25 bp, Homo sapien
cagaaacacagtttgtgcggccgtg

SEQ ID NO: 691466 - DNA, 25 bp, Homo sapien
ttgtgcggccgtgcacacccagggt

SEQ ID NO: 691467 - DNA, 25 bp, Homo sapien
aacacagtttgtgcggccgtgcaca

SEQ ID NO: 691468 - DNA, 25 bp, Homo sapien
gtttgtgcggccgtgcacacccagg

SEQ ID NO: 691469 - DNA, 25 bp, Homo sapien
tagcagaggccggactggaattgct

SEQ ID NO: 691470 - DNA, 25 bp, Homo sapien
cagaggccggactggaattgctcag

SEQ ID NO: 691471 - DNA, 25 bp, Homo sapien
ctgtagcagaggccggactggaatt

SEQ ID NO: 691472 - DNA, 25 bp, Homo sapien
gggctgtagcagaggccggactgga

SEQ ID NO: 691473 - DNA, 25 bp, Homo sapien
agaaggcatcccgagtcccagccac

SEQ ID NO: 691474 - DNA, 25 bp, Homo sapien
gaaggcatcccgagtcccagccaca

SEQ ID NO: 691475 - DNA, 25 bp, Homo sapien
agtcccagccacagacgcctggcac

SEQ ID NO: 691476 - DNA, 25 bp, Homo sapien
cacagaaggcatcccgagtcccagc

SEQ ID NO: 691477 - DNA, 25 bp, Homo sapien
gaaaatgcccgtgtccatggctgca

SEQ ID NO: 691478 - DNA, 25 bp, Homo sapien
cttggaaaatgcccgtgtccatggc

SEQ ID NO: 691479 - DNA, 25 bp, Homo sapien
aatgcccgtgtccatggctgcaggc

SEQ ID NO: 691480 - DNA, 25 bp, Homo sapien
tggaaaatgcccgtgtccatggctg

SEQ ID NO: 691481 - DNA, 25 bp, Homo sapien
tgtactattcagacgtgtttctagg

SEQ ID NO: 691482 - DNA, 25 bp, Homo sapien
tgtttctaggaaggacgtgctgtca

SEQ ID NO: 691483 - DNA, 25 bp, Homo sapien
cgtgctgtcatgacccgccatggtg

SEQ ID NO: 691484 - DNA, 25 bp, Homo sapien
tgtgatctgattccgcgaatccggg

SEQ ID NO: 691485 - DNA, 25 bp, Homo sapien
gatctcgtcatgcttctccacaggg

SEQ ID NO: 691486 - DNA, 25 bp, Homo sapien
tggagtagcttctgaatgtcctcct

SEQ ID NO: 691487 - DNA, 25 bp, Homo sapien
gcgatgagcacttgatggagtagct

SEQ ID NO: 691488 - DNA, 25 bp, Homo sapien
aattcctgatctcgtcatgcttctc

SEQ ID NO: 691489 - DNA, 25 bp, Homo sapien
cagtggggcatgacccgctgctgac

SEQ ID NO: 691490 - DNA, 25 bp, Homo sapien
tggggcatgacccgctgctgacaca

SEQ ID NO: 691491 - DNA, 25 bp, Homo sapien
ggggcatgacccgctgctgacacag

SEQ ID NO: 691492 - DNA, 25 bp, Homo sapien
agtggggcatgacccgctgctgaca

SEQ ID NO: 691493 - DNA, 25 bp, Homo sapien
cactgcacccgctgagcagagggga

SEQ ID NO: 691494 - DNA, 25 bp, Homo sapien
actctgtccacaccgatcctcacgt

SEQ ID NO: 691495 - DNA, 25 bp, Homo sapien
aaagtcacccaaggaggctcctcag

SEQ ID NO: 691496 - DNA, 25 bp, Homo sapien
tcctcagcagccatttgcccaaggg

SEQ ID NO: 691497 - DNA, 25 bp, Homo sapien
aactacaggtgtctggtgggtagct

SEQ ID NO: 691498 - DNA, 25 bp, Homo sapien
cattgccaccttgtcaactacaggt

SEQ ID NO: 691499 - DNA, 25 bp, Homo sapien
tgggtagctggattcatggataact

SEQ ID NO: 691500 - DNA, 25 bp, Homo sapien
tgtctccattgtcaagtacactgtc

SEQ ID NO: 691501 - DNA, 25 bp, Homo sapien
gctgcccaccttgctcacctggtgg

SEQ ID NO: 691502 - DNA, 25 bp, Homo sapien
cccaccttgctcacctggtggcctc

SEQ ID NO: 691503 - DNA, 25 bp, Homo sapien
gcccaccttgctcacctggtggcct

SEQ ID NO: 691504 - DNA, 25 bp, Homo sapien
caggctgcccaccttgctcacctgg

SEQ ID NO: 691505 - DNA, 25 bp, Homo sapien
cacgtgctgagtctcggagctgcag

SEQ ID NO: 691506 - DNA, 25 bp, Homo sapien
ttgttgatggtgcaggaacccgctg

SEQ ID NO: 691507 - DNA, 25 bp, Homo sapien
tcttgcctctacacatcttgctctt

SEQ ID NO: 691508 - DNA, 25 bp, Homo sapien
ccctgtttgttgatggtgcaggaac

SEQ ID NO: 691509 - DNA, 25 bp, Homo sapien
ttatgtccctggtagaccaggcggc

SEQ ID NO: 691510 - DNA, 25 bp, Homo sapien
ttccttcctgtggctgccctgacca

SEQ ID NO: 691511 - DNA, 25 bp, Homo sapien
cctcacactggcgttatgtccctgg

SEQ ID NO: 691512 - DNA, 25 bp, Homo sapien
cactggcgttatgtccctggtagac

SEQ ID NO: 691513 - DNA, 25 bp, Homo sapien
taatggactgagcacggtactcagc

SEQ ID NO: 691514 - DNA, 25 bp, Homo sapien
gtcagaatggtcaccctcataatgg

SEQ ID NO: 691515 - DNA, 25 bp, Homo sapien
tgagagccccgtcagaatggtcacc

SEQ ID NO: 691516 - DNA, 25 bp, Homo sapien
tcaccctcataatggactgagcacg

SEQ ID NO: 691517 - DNA, 25 bp, Homo sapien
gagtgaacacagtactcagcccgca

SEQ ID NO: 691518 - DNA, 25 bp, Homo sapien
agtgaacacagtactcagcccgcat

SEQ ID NO: 691519 - DNA, 25 bp, Homo sapien
gagtgagtgaacacagtactcagcc

SEQ ID NO: 691520 - DNA, 25 bp, Homo sapien
gtgagtgaacacagtactcagcccg

SEQ ID NO: 691521 - DNA, 25 bp, Homo sapien
agcccttataactgactgagcacag

SEQ ID NO: 691522 - DNA, 25 bp, Homo sapien
taactgactgagcacagtactcagc

SEQ ID NO: 691523 - DNA, 25 bp, Homo sapien
agtactcagcccttataactgactg

SEQ ID NO: 691524 - DNA, 25 bp, Homo sapien
caagcacagtactcagcccttataa

SEQ ID NO: 691525 - DNA, 25 bp, Homo sapien
actgggtgaccgttcctcggcagag

SEQ ID NO: 691526 - DNA, 25 bp, Homo sapien
tgggcaccccaggttagcgcagatg

SEQ ID NO: 691527 - DNA, 25 bp, Homo sapien
gcaccccaggttagcgcagatgcca

SEQ ID NO: 691528 - DNA, 25 bp, Homo sapien
atgccactgggtgaccgttcctcgg

SEQ ID NO: 691529 - DNA, 25 bp, Homo sapien
gtccgatgcgtgactggcccgagtt

SEQ ID NO: 691530 - DNA, 25 bp, Homo sapien
atgcacaaaagaccctcgggccagc

SEQ ID NO: 691531 - DNA, 25 bp, Homo sapien
gcagcaggccatccgtgagatttct

SEQ ID NO: 691532 - DNA, 25 bp, Homo sapien
tctctgagacatgacaaacccatgc

SEQ ID NO: 691533 - DNA, 25 bp, Homo sapien
aggtttcacagacgaaaatgccggg

SEQ ID NO: 691534 - DNA, 25 bp, Homo sapien
gcttcgggaagctggagtggcttct

SEQ ID NO: 691535 - DNA, 25 bp, Homo sapien
tgaaccagatgagccaaatgcggtc

SEQ ID NO: 691536 - DNA, 25 bp, Homo sapien
ggaacagtgagtgcttcgggaagct

SEQ ID NO: 691537 - DNA, 25 bp, Homo sapien
caccgtgtcatggtgattgtgtgga

SEQ ID NO: 691538 - DNA, 25 bp, Homo sapien
gatgattgcatggaagcaccgtgtc

SEQ ID NO: 691539 - DNA, 25 bp, Homo sapien
gcgtgtcttggtgattgcatggaaa

SEQ ID NO: 691540 - DNA, 25 bp, Homo sapien
acagtaattgcatggaagcatgtca

SEQ ID NO: 691541 - DNA, 25 bp, Homo sapien
ttagaaagtgattgtgagcccgggc

SEQ ID NO: 691542 - DNA, 25 bp, Homo sapien
tgtgcaaacgctcgtcccatagcag

SEQ ID NO: 691543 - DNA, 25 bp, Homo sapien
aaaccagccacgcagatgattcagg

SEQ ID NO: 691544 - DNA, 25 bp, Homo sapien
ccatagcaggtgaagacaggacgtg

SEQ ID NO: 691545 - DNA, 25 bp, Homo sapien
cgtgaatgccacaccccgctgtgtg

SEQ ID NO: 691546 - DNA, 25 bp, Homo sapien
aagcagcagttcttccacgcgatca

SEQ ID NO: 691547 - DNA, 25 bp, Homo sapien
ggctgtgagtttccacgtgaatgcc

SEQ ID NO: 691548 - DNA, 25 bp, Homo sapien
tctgccgtgtctgttgaggtgccgt

SEQ ID NO: 691549 - DNA, 25 bp, Homo sapien
ccttagaatacttccctggatgcag

SEQ ID NO: 691550 - DNA, 25 bp, Homo sapien
tacttccatcgggagagtgcctgtt

SEQ ID NO: 691551 - DNA, 25 bp, Homo sapien
tgaggccagccgtgaacatccttgc

SEQ ID NO: 691552 - DNA, 25 bp, Homo sapien
tgccggttgtcagttgactggaccc

SEQ ID NO: 691553 - DNA, 25 bp, Homo sapien
tgagagggtctgtgtcccggcaccc

SEQ ID NO: 691554 - DNA, 25 bp, Homo sapien
agtgacaactggcttcccgaggaag

SEQ ID NO: 691555 - DNA, 25 bp, Homo sapien
gctgggttgactcaagccagacagg

SEQ ID NO: 691556 - DNA, 25 bp, Homo sapien
agaaaactcagagggtgcattctcc

SEQ ID NO: 691557 - DNA, 25 bp, Homo sapien
aatcgtcaacagcacaactattttg

SEQ ID NO: 691558 - DNA, 25 bp, Homo sapien
tgagcatcgcgaggttaaacgttcc

SEQ ID NO: 691559 - DNA, 25 bp, Homo sapien
tgggcaaaatgtgtagcagcctgca

SEQ ID NO: 691560 - DNA, 25 bp, Homo sapien
gcctgcatgagcacagttgttttgg

SEQ ID NO: 691561 - DNA, 25 bp, Homo sapien
caacgatgaggagcatcgcggctgt

SEQ ID NO: 691562 - DNA, 25 bp, Homo sapien
ggagcactgcgaccgtctgcaccgt

SEQ ID NO: 691563 - DNA, 25 bp, Homo sapien
gacgaggagcactgcgaccgtctgc

SEQ ID NO: 691564 - DNA, 25 bp, Homo sapien
ccccttctcaccgacgacgaggagc

SEQ ID NO: 691565 - DNA, 25 bp, Homo sapien
ggagcaccgagactgtctgcactgt

SEQ ID NO: 691566 - DNA, 25 bp, Homo sapien
tgaggagcaccgagactgtctgcac

SEQ ID NO: 691567 - DNA, 25 bp, Homo sapien
cgatgctgaggagcaccgagactgt

SEQ ID NO: 691568 - DNA, 25 bp, Homo sapien
tgctgaggagcaccgagactgtctg

SEQ ID NO: 691569 - DNA, 25 bp, Homo sapien
acgacgaggagcactgcgaccatct

SEQ ID NO: 691570 - DNA, 25 bp, Homo sapien
ctgcgaccatctgcaccgtggccgc

SEQ ID NO: 691571 - DNA, 25 bp, Homo sapien
gacgaggagcactgcgaccatctgc

SEQ ID NO: 691572 - DNA, 25 bp, Homo sapien
gcgaccatctgcaccgtggccgccc

SEQ ID NO: 691573 - DNA, 25 bp, Homo sapien
tcactgacgatgaggagcactgcga

SEQ ID NO: 691574 - DNA, 25 bp, Homo sapien
acgacgaggagcactgcgactgtct

SEQ ID NO: 691575 - DNA, 25 bp, Homo sapien
agcactgcgactgtctgcaccgtgg

SEQ ID NO: 691576 - DNA, 25 bp, Homo sapien
actgcgactgtctgcaccgtggccg

SEQ ID NO: 691577 - DNA, 25 bp, Homo sapien
ctgatgataaggaacattgcgactg

SEQ ID NO: 691578 - DNA, 25 bp, Homo sapien
ttgcgactgtctgcaccgtggctgc

SEQ ID NO: 691579 - DNA, 25 bp, Homo sapien
gatgataaggaacattgcgactgtc

SEQ ID NO: 691580 - DNA, 25 bp, Homo sapien
gataaggaacattgcgactgtctgc

SEQ ID NO: 691581 - DNA, 25 bp, Homo sapien
gaggagcactgcgaccgtctgcacc

SEQ ID NO: 691582 - DNA, 25 bp, Homo sapien
acgaggagcactgcgaccgtctgca

SEQ ID NO: 691583 - DNA, 25 bp, Homo sapien
ggagcactgcgaccgtctgcaccgt

SEQ ID NO: 691584 - DNA, 25 bp, Homo sapien
gacgaggagcactgcgaccgtctgc

SEQ ID NO: 691585 - DNA, 25 bp, Homo sapien
agagcactgcgaccgtctgcaccat

SEQ ID NO: 691586 - DNA, 25 bp, Homo sapien
gaagagcactgcgaccgtctgcacc

SEQ ID NO: 691587 - DNA, 25 bp, Homo sapien
gacgaagagcactgcgaccgtctgc

SEQ ID NO: 691588 - DNA, 25 bp, Homo sapien
cgacgacgaagagcactgcgaccgt

SEQ ID NO: 691589 - DNA, 25 bp, Homo sapien
acgacgaggagcactgcgaccatct

SEQ ID NO: 691590 - DNA, 25 bp, Homo sapien
gacgaggagcactgcgaccatctgc

SEQ ID NO: 691591 - DNA, 25 bp, Homo sapien
ctgcgaccatctgcaccgtggccgc

SEQ ID NO: 691592 - DNA, 25 bp, Homo sapien
gcgaccatctgcaccgtggccgccc

SEQ ID NO: 691593 - DNA, 25 bp, Homo sapien
tcactgacgatgaggagcactgcga

SEQ ID NO: 691594 - DNA, 25 bp, Homo sapien
gactgatgataaggaacattgcgac

SEQ ID NO: 691595 - DNA, 25 bp, Homo sapien
acgaggagcactgcgactgtctgca

SEQ ID NO: 691596 - DNA, 25 bp, Homo sapien
cgtggccgccctttctgactgatga

SEQ ID NO: 691597 - DNA, 25 bp, Homo sapien
ctgaggagcactgcaaccatctgca

SEQ ID NO: 691598 - DNA, 25 bp, Homo sapien
agcactgcaaccatctgcaccgtgg

SEQ ID NO: 691599 - DNA, 25 bp, Homo sapien
gcaaccatctgcaccgtggccgccc

SEQ ID NO: 691600 - DNA, 25 bp, Homo sapien
catctgcaccgtggccgccccttct

SEQ ID NO: 691601 - DNA, 25 bp, Homo sapien
gcccgccccgactgatgatgaggaa

SEQ ID NO: 691602 - DNA, 25 bp, Homo sapien
attgcagctgtctgcaccgtgcccg

SEQ ID NO: 691603 - DNA, 25 bp, Homo sapien
gatgaggaacattgcgacggtctgc

SEQ ID NO: 691604 - DNA, 25 bp, Homo sapien
cgatgatgaggagcattgcagctgt

SEQ ID NO: 691605 - DNA, 25 bp, Homo sapien
tctggatcgtgggagccccttctca

SEQ ID NO: 691606 - DNA, 25 bp, Homo sapien
gagtagcactgcgactgtctggatc

SEQ ID NO: 691607 - DNA, 25 bp, Homo sapien
aacgatgaggagcattcggactgtc

SEQ ID NO: 691608 - DNA, 25 bp, Homo sapien
caacgatgaggagcattcggactgt

SEQ ID NO: 691609 - DNA, 25 bp, Homo sapien
gacgatgaggagcactgcgaccgtc

SEQ ID NO: 691610 - DNA, 25 bp, Homo sapien
atgaggagcactgcgaccgtctgca

SEQ ID NO: 691611 - DNA, 25 bp, Homo sapien
ggagcactgcgaccgtctgcaccgt

SEQ ID NO: 691612 - DNA, 25 bp, Homo sapien
acgatgaggagcactgcgaccgtct

SEQ ID NO: 691613 - DNA, 25 bp, Homo sapien
aggagcactgcgactgtctgcaccg

SEQ ID NO: 691614 - DNA, 25 bp, Homo sapien
acgacgaggagcactgcgactgtct

SEQ ID NO: 691615 - DNA, 25 bp, Homo sapien
acgaggagcactgcgactgtctgca

SEQ ID NO: 691616 - DNA, 25 bp, Homo sapien
actgcgactgtctgcaccgtggccg

SEQ ID NO: 691617 - DNA, 25 bp, Homo sapien
aggagcactgcgactgtctgcaccg

SEQ ID NO: 691618 - DNA, 25 bp, Homo sapien
acgacgaggagcactgcgactgtct

SEQ ID NO: 691619 - DNA, 25 bp, Homo sapien
ccgtggccgccccttctcactgatg

SEQ ID NO: 691620 - DNA, 25 bp, Homo sapien
actgcgactgtctgcaccgtggccg

SEQ ID NO: 691621 - DNA, 25 bp, Homo sapien
aggagcactgcgactgtctgcaccg

SEQ ID NO: 691622 - DNA, 25 bp, Homo sapien
agcactgcgactgtctgcaccgtgg

SEQ ID NO: 691623 - DNA, 25 bp, Homo sapien
cgatgaggagcactgcgactgtctg

SEQ ID NO: 691624 - DNA, 25 bp, Homo sapien
actgcgactgtctgcaccgtggccg

SEQ ID NO: 691625 - DNA, 25 bp, Homo sapien
tcactgacgatgaggagcactgcga

SEQ ID NO: 691626 - DNA, 25 bp, Homo sapien
accaacgatgaggagcactgcgact

SEQ ID NO: 691627 - DNA, 25 bp, Homo sapien
ccccaacgatgaggaacattgtgac

SEQ ID NO: 691628 - DNA, 25 bp, Homo sapien
cattgtgactgtctgcaccgtggcc

SEQ ID NO: 691629 - DNA, 25 bp, Homo sapien
ctcaccgatgctgaggagcactgtg

SEQ ID NO: 691630 - DNA, 25 bp, Homo sapien
tctcaccgatgctgaggagcactgt

SEQ ID NO: 691631 - DNA, 25 bp, Homo sapien
agagcatcgcggctgtctgcaccat

SEQ ID NO: 691632 - DNA, 25 bp, Homo sapien
cgaagagcatcgcggctgtctgcac

SEQ ID NO: 691633 - DNA, 25 bp, Homo sapien
caacgacgaagagcatcgcggctgt

SEQ ID NO: 691634 - DNA, 25 bp, Homo sapien
cgacgaagagcatcgcggctgtctg

SEQ ID NO: 691635 - DNA, 25 bp, Homo sapien
cttctccccaacgatgaggaacatt

SEQ ID NO: 691636 - DNA, 25 bp, Homo sapien
caacgatgaggagcatcgcggctgt

SEQ ID NO: 691637 - DNA, 25 bp, Homo sapien
gatgaggaacattgtgactgtctgc

SEQ ID NO: 691638 - DNA, 25 bp, Homo sapien
attgtgactgtctgcaccgtggccg

SEQ ID NO: 691639 - DNA, 25 bp, Homo sapien
atgctgaggagcaccgatactgtct

SEQ ID NO: 691640 - DNA, 25 bp, Homo sapien
actgtgactctctgcaccgtgggag

SEQ ID NO: 691641 - DNA, 25 bp, Homo sapien
cactgtgactctctgcaccgtggga

SEQ ID NO: 691642 - DNA, 25 bp, Homo sapien
ggcctccctgtctcactgacgatga

SEQ ID NO: 691643 - DNA, 25 bp, Homo sapien
tggcctccctgtctcactgacgatg

SEQ ID NO: 691644 - DNA, 25 bp, Homo sapien
gacccttgctcagcggctgcccagg

SEQ ID NO: 691645 - DNA, 25 bp, Homo sapien
gggacccttgctcagcggctgccca

SEQ ID NO: 691646 - DNA, 25 bp, Homo sapien
ggacccttgctcagcggctgcccag

SEQ ID NO: 691647 - DNA, 25 bp, Homo sapien
gggggacccttgctcagcggctgcc

SEQ ID NO: 691648 - DNA, 25 bp, Homo sapien
aagtctgagatcagtatccctgggc

SEQ ID NO: 691649 - DNA, 25 bp, Homo sapien
tcatcttagtgtaacctccctccat

SEQ ID NO: 691650 - DNA, 25 bp, Homo sapien
ttcccattggatttcgggcctatga

SEQ ID NO: 691651 - DNA, 25 bp, Homo sapien
gggcctatgactagtcctgaaagat

SEQ ID NO: 691652 - DNA, 25 bp, Homo sapien
ctcccatggggtggggctcgcatcc

SEQ ID NO: 691653 - DNA, 25 bp, Homo sapien
tggctgaacccacagtcaaggggca

SEQ ID NO: 691654 - DNA, 25 bp, Homo sapien
aggcacagggcaagcgtggttggca

SEQ ID NO: 691655 - DNA, 25 bp, Homo sapien
caatgcctggttccaagtgtcctcc

SEQ ID NO: 691656 - DNA, 25 bp, Homo sapien
ctgagcccgctgcttactgagtgcc

SEQ ID NO: 691657 - DNA, 25 bp, Homo sapien
cccgctgcttactgagtgccacgga

SEQ ID NO: 691658 - DNA, 25 bp, Homo sapien
agcccgctgcttactgagtgccacg

SEQ ID NO: 691659 - DNA, 25 bp, Homo sapien
gctgcttactgagtgccacggaggc

SEQ ID NO: 691660 - DNA, 25 bp, Homo sapien
caggtgtcccgtgtctccttgtctc

SEQ ID NO: 691661 - DNA, 25 bp, Homo sapien
catctgctgcccacgtgcaggctga

SEQ ID NO: 691662 - DNA, 25 bp, Homo sapien
ccaggtgtcccgtgtctccttgtct

SEQ ID NO: 691663 - DNA, 25 bp, Homo sapien
ctgagtgtgaaataacaaaggacat

SEQ ID NO: 691664 - DNA, 25 bp, Homo sapien
ccagatagaacaggaagatgtctcc

SEQ ID NO: 691665 - DNA, 25 bp, Homo sapien
gaacagcaggcaccgataatgacca

SEQ ID NO: 691666 - DNA, 25 bp, Homo sapien
gaaagcagagcattcctcggtggtg

SEQ ID NO: 691667 - DNA, 25 bp, Homo sapien
tctgactgatggctagacgccctat

SEQ ID NO: 691668 - DNA, 25 bp, Homo sapien
ttagtgtttcacattggcacgcgcc

SEQ ID NO: 691669 - DNA, 25 bp, Homo sapien
catttggaggccaccgtctgataga

SEQ ID NO: 691670 - DNA, 25 bp, Homo sapien
ccaccagatttgtagtcagagcagc

SEQ ID NO: 691671 - DNA, 25 bp, Homo sapien
tcccggttgcttaactgaggtgccc

SEQ ID NO: 691672 - DNA, 25 bp, Homo sapien
cgggcagacgtgcattcaacaccgg

SEQ ID NO: 691673 - DNA, 25 bp, Homo sapien
ccggttagacgtgcattcagcttca

SEQ ID NO: 691674 - DNA, 25 bp, Homo sapien
cattcaacaccggttagacgtgcat

SEQ ID NO: 691675 - DNA, 25 bp, Homo sapien
gacgtgcattcaacaccggttagac

SEQ ID NO: 691676 - DNA, 25 bp, Homo sapien
cacacgcgctcgaattaaagtctaa

SEQ ID NO: 691677 - DNA, 25 bp, Homo sapien
gatcagcgttcagttcacacgcgct

SEQ ID NO: 691678 - DNA, 25 bp, Homo sapien
cgtctgtaaagtcggcccaaggctt

SEQ ID NO: 691679 - DNA, 25 bp, Homo sapien
gaattcacacggagaaagccagagt

SEQ ID NO: 691680 - DNA, 25 bp, Homo sapien
gaaatgaggtcatcggctgtagaca

SEQ ID NO: 691681 - DNA, 25 bp, Homo sapien
catttgctcgttacaaaaaggcgta

SEQ ID NO: 691682 - DNA, 25 bp, Homo sapien
tgctgaccacacattcagaaggagc

SEQ ID NO: 691683 - DNA, 25 bp, Homo sapien
gaaatgcgattacactctgaggtgg

SEQ ID NO: 691684 - DNA, 25 bp, Homo sapien
tctgggggttccgacacccgagctg

SEQ ID NO: 691685 - DNA, 25 bp, Homo sapien
ggtccctgaggttgacccgcgtgat

SEQ ID NO: 691686 - DNA, 25 bp, Homo sapien
ttctttgtcgcgtgaactgtctggg

SEQ ID NO: 691687 - DNA, 25 bp, Homo sapien
cagtgaatggcttgtctcacgttca

SEQ ID NO: 691688 - DNA, 25 bp, Homo sapien
cgggctccttccggtaggcccacag

SEQ ID NO: 691689 - DNA, 25 bp, Homo sapien
gctccttccggtaggcccacagctg

SEQ ID NO: 691690 - DNA, 25 bp, Homo sapien
gcacgggctccttccggtaggccca

SEQ ID NO: 691691 - DNA, 25 bp, Homo sapien
ggctccttccggtaggcccacagct

SEQ ID NO: 691692 - DNA, 25 bp, Homo sapien
agggcaggggcaagggcaggaggcc

SEQ ID NO: 691693 - DNA, 25 bp, Homo sapien
caggggcaagggcaggaggccccat

SEQ ID NO: 691694 - DNA, 25 bp, Homo sapien
gccagggcaggggcaagggcaggag

SEQ ID NO: 691695 - DNA, 25 bp, Homo sapien
gggcaggggcaagggcaggaggccc

SEQ ID NO: 691696 - DNA, 25 bp, Homo sapien
tttggctcccgcagagagtttgttg

SEQ ID NO: 691697 - DNA, 25 bp, Homo sapien
cagaattctatgtggattttggctc

SEQ ID NO: 691698 - DNA, 25 bp, Homo sapien
tcccatagggtctttgcttgcagaa

SEQ ID NO: 691699 - DNA, 25 bp, Homo sapien
gagtggagatctcgtaggaacctcc

SEQ ID NO: 691700 - DNA, 25 bp, Homo sapien
ccatgcaggcgcgacggcctctaga

SEQ ID NO: 691701 - DNA, 25 bp, Homo sapien
cctctagagggactgtggcatgtgc

SEQ ID NO: 691702 - DNA, 25 bp, Homo sapien
acggcctctagagggactgtggcat

SEQ ID NO: 691703 - DNA, 25 bp, Homo sapien
gcgcgacggcctctagagggactgt

SEQ ID NO: 691704 - DNA, 25 bp, Homo sapien
gtgcaggcgcaatggcgcaaaacag

SEQ ID NO: 691705 - DNA, 25 bp, Homo sapien
caggcgcaatggcgcaaaacagagc

SEQ ID NO: 691706 - DNA, 25 bp, Homo sapien
tgcaggcgcaatggcgcaaaacaga

SEQ ID NO: 691707 - DNA, 25 bp, Homo sapien
gcaggcgcaatggcgcaaaacagag

SEQ ID NO: 691708 - DNA, 25 bp, Homo sapien
cactggcagcacgttttgaagaaca

SEQ ID NO: 691709 - DNA, 25 bp, Homo sapien
aaagttagcatcacttccgggaggc

SEQ ID NO: 691710 - DNA, 25 bp, Homo sapien
cagatgtggcaaataccccaaggcc

SEQ ID NO: 691711 - DNA, 25 bp, Homo sapien
gagggcgcctagacttcaaaatcac

SEQ ID NO: 691712 - DNA, 25 bp, Homo sapien
ctaacacggccatgggaatcggcca

SEQ ID NO: 691713 - DNA, 25 bp, Homo sapien
taacacggccatgggaatcggccac

SEQ ID NO: 691714 - DNA, 25 bp, Homo sapien
acggccatgggaatcggccacgacg

SEQ ID NO: 691715 - DNA, 25 bp, Homo sapien
acacggccatgggaatcggccacga

SEQ ID NO: 691716 - DNA, 25 bp, Homo sapien
tgacaggggtagcatagtttctgga

SEQ ID NO: 691717 - DNA, 25 bp, Homo sapien
gcaaaaccaaaagccagcggacaat

SEQ ID NO: 691718 - DNA, 25 bp, Homo sapien
cccaaagttccacataaaagagcaa

SEQ ID NO: 691719 - DNA, 25 bp, Homo sapien
tccacataaaagagcaacgacacag

SEQ ID NO: 691720 - DNA, 25 bp, Homo sapien
gatgaagatgaaccacaagcagcca

SEQ ID NO: 691721 - DNA, 25 bp, Homo sapien
tgaagatgaaccacaagcagccatc

SEQ ID NO: 691722 - DNA, 25 bp, Homo sapien
gaagatgaaccacaagcagccatca

SEQ ID NO: 691723 - DNA, 25 bp, Homo sapien
ctgatgaagatgaaccacaagcagc

SEQ ID NO: 691724 - DNA, 25 bp, Homo sapien
cagaactggaccccgacgggcctgg

SEQ ID NO: 691725 - DNA, 25 bp, Homo sapien
cgctgcagaactggaccccgacggg

SEQ ID NO: 691726 - DNA, 25 bp, Homo sapien
ctgcagaactggaccccgacgggcc

SEQ ID NO: 691727 - DNA, 25 bp, Homo sapien
gacgctgcagaactggaccccgacg

SEQ ID NO: 691728 - DNA, 25 bp, Homo sapien
tcagcaaacgctgcaaaccacgtgt

SEQ ID NO: 691729 - DNA, 25 bp, Homo sapien
gagtgaatcagtactgagcaggaca

SEQ ID NO: 691730 - DNA, 25 bp, Homo sapien
gagagaacctgctgggagtgaatca

SEQ ID NO: 691731 - DNA, 25 bp, Homo sapien
gaggactcccgttcttaacatcacg

SEQ ID NO: 691732 - DNA, 25 bp, Homo sapien
gcaagaccagccaatgtgcatcaga

SEQ ID NO: 691733 - DNA, 25 bp, Homo sapien
agaccagccaatgtgcatcagacag

SEQ ID NO: 691734 - DNA, 25 bp, Homo sapien
gaccagccaatgtgcatcagacagc

SEQ ID NO: 691735 - DNA, 25 bp, Homo sapien
caagaccagccaatgtgcatcagac

SEQ ID NO: 691736 - DNA, 25 bp, Homo sapien
caaaaataacatgtcaaggctgggt

SEQ ID NO: 691737 - DNA, 25 bp, Homo sapien
gaatgaagagtaccggagatggcaa

SEQ ID NO: 691738 - DNA, 25 bp, Homo sapien
aatggtggcagacggaaacagaccc

SEQ ID NO: 691739 - DNA, 25 bp, Homo sapien
aacagcagcgggcagcaattcttcc

SEQ ID NO: 691740 - DNA, 25 bp, Homo sapien
tgctcctgagcccggccccggacag

SEQ ID NO: 691741 - DNA, 25 bp, Homo sapien
ctgagcccggccccggacagtccac

SEQ ID NO: 691742 - DNA, 25 bp, Homo sapien
ctctgctcctgagcccggccccgga

SEQ ID NO: 691743 - DNA, 25 bp, Homo sapien
cctgagcccggccccggacagtcca

SEQ ID NO: 691744 - DNA, 25 bp, Homo sapien
tgctagtgctgtgaggttggcgtcc

SEQ ID NO: 691745 - DNA, 25 bp, Homo sapien
tggcgtcccgctgtctcatttgtgc

SEQ ID NO: 691746 - DNA, 25 bp, Homo sapien
tttcctgggcccgatcgctgctagt

SEQ ID NO: 691747 - DNA, 25 bp, Homo sapien
gctgtctcatttgtgccagttcctg

SEQ ID NO: 691748 - DNA, 25 bp, Homo sapien
caaggagcatcatttcttgcatgtt

SEQ ID NO: 691749 - DNA, 25 bp, Homo sapien
ttattttgaaaaggagacaaggagc

SEQ ID NO: 691750 - DNA, 25 bp, Homo sapien
tttgaaaaggagacaaggagcatca

SEQ ID NO: 691751 - DNA, 25 bp, Homo sapien
aaaggagacaaggagcatcatttct

SEQ ID NO: 691752 - DNA, 25 bp, Homo sapien
tgtttcagccttaactgttctggat

SEQ ID NO: 691753 - DNA, 25 bp, Homo sapien
gtttcagccttaactgttctggatc

SEQ ID NO: 691754 - DNA, 25 bp, Homo sapien
ctgtttcagccttaactgttctgga

SEQ ID NO: 691755 - DNA, 25 bp, Homo sapien
ttcagccttaactgttctggatctt

SEQ ID NO: 691756 - DNA, 25 bp, Homo sapien
gatcaagctgttcaaaaaacttgag

SEQ ID NO: 691757 - DNA, 25 bp, Homo sapien
cttcctctgcttttcgatttgatca

SEQ ID NO: 691758 - DNA, 25 bp, Homo sapien
aaaaacttgagctgtgcccggacgt

SEQ ID NO: 691759 - DNA, 25 bp, Homo sapien
ccggacgtcactcgcctgctcatat

SEQ ID NO: 691760 - DNA, 25 bp, Homo sapien
gattctgtagcctttgttgcgtggc

SEQ ID NO: 691761 - DNA, 25 bp, Homo sapien
ctgctgagctgtttctgatattttc

SEQ ID NO: 691762 - DNA, 25 bp, Homo sapien
gcgtggcatgtgatacataacttac

SEQ ID NO: 691763 - DNA, 25 bp, Homo sapien
attttctctacaagattctgtagcc

SEQ ID NO: 691764 - DNA, 25 bp, Homo sapien
tctggatgtaattccgttataccat

SEQ ID NO: 691765 - DNA, 25 bp, Homo sapien
ggatgtaattccgttataccatgtt

SEQ ID NO: 691766 - DNA, 25 bp, Homo sapien
catctggatgtaattccgttatacc

SEQ ID NO: 691767 - DNA, 25 bp, Homo sapien
gatgtaattccgttataccatgttt

SEQ ID NO: 691768 - DNA, 25 bp, Homo sapien
cttctctgcaaaggcgcttggagga

SEQ ID NO: 691769 - DNA, 25 bp, Homo sapien
gaggaaggtttcatctttacaggac

SEQ ID NO: 691770 - DNA, 25 bp, Homo sapien
gcgtgcccaccaattcagagttcgt

SEQ ID NO: 691771 - DNA, 25 bp, Homo sapien
ttacaggaccgcgttagcgtgccca

SEQ ID NO: 691772 - DNA, 25 bp, Homo sapien
cgatgcaacatcattaatgtcatca

SEQ ID NO: 691773 - DNA, 25 bp, Homo sapien
gcagagagggtgcctcgctgctttc

SEQ ID NO: 691774 - DNA, 25 bp, Homo sapien
agcagagagggtgcctcgctgcttt

SEQ ID NO: 691775 - DNA, 25 bp, Homo sapien
agagctgtgagttggcgccgggtta

SEQ ID NO: 691776 - DNA, 25 bp, Homo sapien
gagctgtgagttggcgccgggttaa

SEQ ID NO: 691777 - DNA, 25 bp, Homo sapien
ctgtgagttggcgccgggttaacat

SEQ ID NO: 691778 - DNA, 25 bp, Homo sapien
gctgtgagttggcgccgggttaaca

SEQ ID NO: 691779 - DNA, 25 bp, Homo sapien
tacgcctggagcagtacagcatttc

SEQ ID NO: 691780 - DNA, 25 bp, Homo sapien
gagcagtacagcatttctgagggtt

SEQ ID NO: 691781 - DNA, 25 bp, Homo sapien
gccactacgcctggagcagtacagc

SEQ ID NO: 691782 - DNA, 25 bp, Homo sapien
cctgtagtgctggcactgtaagcgt

SEQ ID NO: 691783 - DNA, 25 bp, Homo sapien
agcagctgcttgtgccgagacagca

SEQ ID NO: 691784 - DNA, 25 bp, Homo sapien
tgccgagacagcagaaagggctttg

SEQ ID NO: 691785 - DNA, 25 bp, Homo sapien
tgtgccgagacagcagaaagggctt

SEQ ID NO: 691786 - DNA, 25 bp, Homo sapien
tgcttgtgccgagacagcagaaagg

SEQ ID NO: 691787 - DNA, 25 bp, Homo sapien
gtgtctgcgtcaacgtcacctgcgg

SEQ ID NO: 691788 - DNA, 25 bp, Homo sapien
tgccgcagggcgaccatgggtgtct

SEQ ID NO: 691789 - DNA, 25 bp, Homo sapien
tggatctgctgaggcgtggtgagca

SEQ ID NO: 691790 - DNA, 25 bp, Homo sapien
ggtgagcatgatccggttgtgaggc

SEQ ID NO: 691791 - DNA, 25 bp, Homo sapien
tcctggcttcggaggctgctggatg

SEQ ID NO: 691792 - DNA, 25 bp, Homo sapien
agggctcctggcttcggaggctgct

SEQ ID NO: 691793 - DNA, 25 bp, Homo sapien
ggctcctggcttcggaggctgctgg

SEQ ID NO: 691794 - DNA, 25 bp, Homo sapien
gatcagggctcctggcttcggaggc

SEQ ID NO: 691795 - DNA, 25 bp, Homo sapien
tgcctgaacttggccctcaagggcc

SEQ ID NO: 691796 - DNA, 25 bp, Homo sapien
ggcagagatccaaaacctggcagca

SEQ ID NO: 691797 - DNA, 25 bp, Homo sapien
taaggcggctgagggcttttctact

SEQ ID NO: 691798 - DNA, 25 bp, Homo sapien
agcactgaccatggcctatgctctg

SEQ ID NO: 691799 - DNA, 25 bp, Homo sapien
ggtgaatccctctgcccatgaaagg

SEQ ID NO: 691800 - DNA, 25 bp, Homo sapien
caagaaaatgattgcccacaggctg

SEQ ID NO: 691801 - DNA, 25 bp, Homo sapien
taagcaccagaggtcaaaacttggc

SEQ ID NO: 691802 - DNA, 25 bp, Homo sapien
taagtgaaccgctatgagcagccgc

SEQ ID NO: 691803 - DNA, 25 bp, Homo sapien
gcggtgtgggttgcccctgcttgcc

SEQ ID NO: 691804 - DNA, 25 bp, Homo sapien
ggttgcccctgcttgccgacgccga

SEQ ID NO: 691805 - DNA, 25 bp, Homo sapien
tgtgggttgcccctgcttgccgacg

SEQ ID NO: 691806 - DNA, 25 bp, Homo sapien
cagcggtgtgggttgcccctgcttg

SEQ ID NO: 691807 - DNA, 25 bp, Homo sapien
cgtgggctgcgtgaggctgagcaca

SEQ ID NO: 691808 - DNA, 25 bp, Homo sapien
ggctgcgtgaggctgagcacagggg

SEQ ID NO: 691809 - DNA, 25 bp, Homo sapien
ctgcgtgggctgcgtgaggctgagc

SEQ ID NO: 691810 - DNA, 25 bp, Homo sapien
gctgcgtgaggctgagcacaggggg

SEQ ID NO: 691811 - DNA, 25 bp, Homo sapien
gcactggtcacggtggccgccgtct

SEQ ID NO: 691812 - DNA, 25 bp, Homo sapien
tgcgctggaccgagctactcagcac

SEQ ID NO: 691813 - DNA, 25 bp, Homo sapien
actggtcacggtggccgccgtcttc

SEQ ID NO: 691814 - DNA, 25 bp, Homo sapien
gtcttcccggccgtgcgctggaccg

SEQ ID NO: 691815 - DNA, 25 bp, Homo sapien
ggccgtgagcgcagtggtggcctgc

SEQ ID NO: 691816 - DNA, 25 bp, Homo sapien
ccgtgagcgcagtggtggcctgcga

SEQ ID NO: 691817 - DNA, 25 bp, Homo sapien
cgtgagcgcagtggtggcctgcgag

SEQ ID NO: 691818 - DNA, 25 bp, Homo sapien
cacggccgtgagcgcagtggtggcc

SEQ ID NO: 691819 - DNA, 25 bp, Homo sapien
aagttctcggtataacctgcttgtg

SEQ ID NO: 691820 - DNA, 25 bp, Homo sapien
gcacaaggtaaggttgaggtgaaga

SEQ ID NO: 691821 - DNA, 25 bp, Homo sapien
ggtgaagaattaagttctcggtata

SEQ ID NO: 691822 - DNA, 25 bp, Homo sapien
gaattaagttctcggtataacctgc

SEQ ID NO: 691823 - DNA, 25 bp, Homo sapien
gactgaaccctaagagactccggaa

SEQ ID NO: 691824 - DNA, 25 bp, Homo sapien
gcagatcagcctaaaagtaactcca

SEQ ID NO: 691825 - DNA, 25 bp, Homo sapien
caaggagaaggcacggtaagaccag

SEQ ID NO: 691826 - DNA, 25 bp, Homo sapien
gcgcgaatgtgcctcagctggtctg

SEQ ID NO: 691827 - DNA, 25 bp, Homo sapien
gcagcaacaggtgtctgtcctatgc

SEQ ID NO: 691828 - DNA, 25 bp, Homo sapien
tctgtcctatgcaacaggctttagg

SEQ ID NO: 691829 - DNA, 25 bp, Homo sapien
gaaggagtctccttagctaggccac

SEQ ID NO: 691830 - DNA, 25 bp, Homo sapien
ggccacacacgccttcgacacgtgt

SEQ ID NO: 691831 - DNA, 25 bp, Homo sapien
gccagttttattaacgtagatagga

SEQ ID NO: 691832 - DNA, 25 bp, Homo sapien
tgtagactgcttgccagatgaagcc

SEQ ID NO: 691833 - DNA, 25 bp, Homo sapien
cagtaaattctgcacgagctctttc

SEQ ID NO: 691834 - DNA, 25 bp, Homo sapien
gctctttcacattagctgctgtctc

SEQ ID NO: 691835 - DNA, 25 bp, Homo sapien
gtgcgctgaggagtccccgtctgaa

SEQ ID NO: 691836 - DNA, 25 bp, Homo sapien
caagtgaagccgtctgggcagcgcc

SEQ ID NO: 691837 - DNA, 25 bp, Homo sapien
gtggtcgcccctggtaccgtgcgct

SEQ ID NO: 691838 - DNA, 25 bp, Homo sapien
gtcgccgtcccaagtgaagccgtct

SEQ ID NO: 691839 - DNA, 25 bp, Homo sapien
taaataatcctaacaggcaacccag

SEQ ID NO: 691840 - DNA, 25 bp, Homo sapien
ctacagggcggtcagggctccacag

SEQ ID NO: 691841 - DNA, 25 bp, Homo sapien
agaagaacggctcctgaaagctcca

SEQ ID NO: 691842 - DNA, 25 bp, Homo sapien
aagtgagtgtcaacaagaagcctcc

SEQ ID NO: 691843 - DNA, 25 bp, Homo sapien
caaaggccagcacacatctccctgg

SEQ ID NO: 691844 - DNA, 25 bp, Homo sapien
cacaggactgagcaagctccttcag

SEQ ID NO: 691845 - DNA, 25 bp, Homo sapien
tgaaccgcccttccacccactttca

SEQ ID NO: 691846 - DNA, 25 bp, Homo sapien
atctccctggtactgaaccgccctt

SEQ ID NO: 691847 - DNA, 25 bp, Homo sapien
cttctgggatctgcaggccaaaggc

SEQ ID NO: 691848 - DNA, 25 bp, Homo sapien
cctctctgcagatgaaaacgctgtt

SEQ ID NO: 691849 - DNA, 25 bp, Homo sapien
gagcatcagcaccactaggagaggg

SEQ ID NO: 691850 - DNA, 25 bp, Homo sapien
agcacctgctctgggacacgctcct

SEQ ID NO: 691851 - DNA, 25 bp, Homo sapien
ggtcacctgccgtgcaatgataggt

SEQ ID NO: 691852 - DNA, 25 bp, Homo sapien
cactgggctgcaccgttgtctgggc

SEQ ID NO: 691853 - DNA, 25 bp, Homo sapien
gtctgggcctgagacacttgcttaa

SEQ ID NO: 691854 - DNA, 25 bp, Homo sapien
ctgcagggttgcactgggctgcacc

SEQ ID NO: 691855 - DNA, 25 bp, Homo sapien
tggagatctggacgggaggggcact

SEQ ID NO: 691856 - DNA, 25 bp, Homo sapien
tacggtggagatctggacgggaggg

SEQ ID NO: 691857 - DNA, 25 bp, Homo sapien
ctgtacggtggagatctggacggga

SEQ ID NO: 691858 - DNA, 25 bp, Homo sapien
tctggacgggaggggcacttgtggg

SEQ ID NO: 691859 - DNA, 25 bp, Homo sapien
aactgcccattctcacttcggacga

SEQ ID NO: 691860 - DNA, 25 bp, Homo sapien
ccattctcacttcggacgaggacca

SEQ ID NO: 691861 - DNA, 25 bp, Homo sapien
gcccattctcacttcggacgaggac

SEQ ID NO: 691862 - DNA, 25 bp, Homo sapien
ttctcacttcggacgaggaccattc

SEQ ID NO: 691863 - DNA, 25 bp, Homo sapien
cctgcctgtgccagggccacgtccg

SEQ ID NO: 691864 - DNA, 25 bp, Homo sapien
ggctgggcctagagggcacaaccat

SEQ ID NO: 691865 - DNA, 25 bp, Homo sapien
ctgtgccagggccacgtccgctggg

SEQ ID NO: 691866 - DNA, 25 bp, Homo sapien
ggccacgtccgctgggctgggccta

SEQ ID NO: 691867 - DNA, 25 bp, Homo sapien
aaaatgtgccctgtggtcgggccca

SEQ ID NO: 691868 - DNA, 25 bp, Homo sapien
gcccagtgtcccttgtggtcaggaa

SEQ ID NO: 691869 - DNA, 25 bp, Homo sapien
aaaagtggcattctggacatcacag

SEQ ID NO: 691870 - DNA, 25 bp, Homo sapien
tgtagggaaacagccatgggtcact

SEQ ID NO: 691871 - DNA, 25 bp, Homo sapien
gaggaagcagtcaaacctgcaacaa

SEQ ID NO: 691872 - DNA, 25 bp, Homo sapien
cctgcaacaagaaacacgacatccg

SEQ ID NO: 691873 - DNA, 25 bp, Homo sapien
caagatgggcaattccaggtggtga

SEQ ID NO: 691874 - DNA, 25 bp, Homo sapien
gcatcctcgtccaaccaagatgggc

SEQ ID NO: 691875 - DNA, 25 bp, Homo sapien
gccaaaatgtagagcatgcgaagct

SEQ ID NO: 691876 - DNA, 25 bp, Homo sapien
ccaaaatgtagagcatgcgaagctg

SEQ ID NO: 691877 - DNA, 25 bp, Homo sapien
caaaatgtagagcatgcgaagctgt

SEQ ID NO: 691878 - DNA, 25 bp, Homo sapien
aaatgtagagcatgcgaagctgtgc

SEQ ID NO: 691879 - DNA, 25 bp, Homo sapien
tactactggaactgtgtcaaattta

SEQ ID NO: 691880 - DNA, 25 bp, Homo sapien
aaccatactactggaactgtgtcaa

SEQ ID NO: 691881 - DNA, 25 bp, Homo sapien
tactggaactgtgtcaaatttatcc

SEQ ID NO: 691882 - DNA, 25 bp, Homo sapien
ccatactactggaactgtgtcaaat

SEQ ID NO: 691883 - DNA, 25 bp, Homo sapien
aaattcagcgctcttttcgggtcac

SEQ ID NO: 691884 - DNA, 25 bp, Homo sapien
aacaagtgtctttaccgtgaggatc

SEQ ID NO: 691885 - DNA, 25 bp, Homo sapien
gacctgaacctctggatttgcacga

SEQ ID NO: 691886 - DNA, 25 bp, Homo sapien
cgccctgtatggatgaacccgacca

SEQ ID NO: 691887 - DNA, 25 bp, Homo sapien
tgttatctggcccaacctgacagaa

SEQ ID NO: 691888 - DNA, 25 bp, Homo sapien
gagagtttggaatagtgagcgccac

SEQ ID NO: 691889 - DNA, 25 bp, Homo sapien
tgagcgccacctgacagctatgtta

SEQ ID NO: 691890 - DNA, 25 bp, Homo sapien
gaaacaccagattaaggcctctagc

SEQ ID NO: 691891 - DNA, 25 bp, Homo sapien
tagacaggagcgtgagaactgccag

SEQ ID NO: 691892 - DNA, 25 bp, Homo sapien
aagtggcgtcggagccccaggcatc

SEQ ID NO: 691893 - DNA, 25 bp, Homo sapien
caggcatccgcagcatagccagtat

SEQ ID NO: 691894 - DNA, 25 bp, Homo sapien
tgaggagtcgcagagacagcagact

SEQ ID NO: 691895 - DNA, 25 bp, Homo sapien
ttagcattccaccagcggagaactt

SEQ ID NO: 691896 - DNA, 25 bp, Homo sapien
attccaccagcggagaacttcctgg

SEQ ID NO: 691897 - DNA, 25 bp, Homo sapien
caccagcggagaacttcctggaact

SEQ ID NO: 691898 - DNA, 25 bp, Homo sapien
tggcgctgctgggagccgcccttcc

SEQ ID NO: 691899 - DNA, 25 bp, Homo sapien
tctggatgttggtcgggttctgagg

SEQ ID NO: 691900 - DNA, 25 bp, Homo sapien
gttctggatgttggtcgggttctga

SEQ ID NO: 691901 - DNA, 25 bp, Homo sapien
ctggatgttggtcgggttctgaggc

SEQ ID NO: 691902 - DNA, 25 bp, Homo sapien
aagttctggatgttggtcgggttct

SEQ ID NO: 691903 - DNA, 25 bp, Homo sapien
tgggcgtcagggtggcccgaatccc

SEQ ID NO: 691904 - DNA, 25 bp, Homo sapien
tggtggccgtgggcgtccgggacag

SEQ ID NO: 691905 - DNA, 25 bp, Homo sapien
gcacggtgggcgtcagggtggcccg

SEQ ID NO: 691906 - DNA, 25 bp, Homo sapien
gggccagcacggtgggcgtcagggt

SEQ ID NO: 691907 - DNA, 25 bp, Homo sapien
gctgggcagcgccccttgcatagtt

SEQ ID NO: 691908 - DNA, 25 bp, Homo sapien
tgggcagcgccccttgcatagttgg

SEQ ID NO: 691909 - DNA, 25 bp, Homo sapien
ctgggcagcgccccttgcatagttg

SEQ ID NO: 691910 - DNA, 25 bp, Homo sapien
ccgccagggtctgcgccgccggggg

SEQ ID NO: 691911 - DNA, 25 bp, Homo sapien
gccgccagggtctgcgccgccgggg

SEQ ID NO: 691912 - DNA, 25 bp, Homo sapien
tgccccggcgctgcccccgttctgg

SEQ ID NO: 691913 - DNA, 25 bp, Homo sapien
gcgccgggcccgggttggccgctga

SEQ ID NO: 691914 - DNA, 25 bp, Homo sapien
ggcgctgcccccgttctgggcggcg

SEQ ID NO: 691915 - DNA, 25 bp, Homo sapien
ccgggcggccgggccagagtggcgg

SEQ ID NO: 691916 - DNA, 25 bp, Homo sapien
aaggggggcgtctggatgacagtgc

SEQ ID NO: 691917 - DNA, 25 bp, Homo sapien
cgaaggggggcgtctggatgacagt

SEQ ID NO: 691918 - DNA, 25 bp, Homo sapien
ccacgaaggggggcgtctggatgac

SEQ ID NO: 691919 - DNA, 25 bp, Homo sapien
cgcccacgaaggggggcgtctggat

SEQ ID NO: 691920 - DNA, 25 bp, Homo sapien
tgcggcggcgtggtgcgagttcagc

SEQ ID NO: 691921 - DNA, 25 bp, Homo sapien
cgcggcgggcccgttgttgaccagg

SEQ ID NO: 691922 - DNA, 25 bp, Homo sapien
agcagcgcggcgctcccattcaaag

SEQ ID NO: 691923 - DNA, 25 bp, Homo sapien
cattcaaagtttgcgcggcgccggg

SEQ ID NO: 691924 - DNA, 25 bp, Homo sapien
gctctacctgcggggggcggctccg

SEQ ID NO: 691925 - DNA, 25 bp, Homo sapien
acaacatggttcccgagcgcgccgg

SEQ ID NO: 691926 - DNA, 25 bp, Homo sapien
gggctgccgctcacaacatggttcc

SEQ ID NO: 691927 - DNA, 25 bp, Homo sapien
gccgggctgccgctcacaacatggt

SEQ ID NO: 691928 - DNA, 25 bp, Homo sapien
gtgcgcggcgcgaggtggtggtggt

SEQ ID NO: 691929 - DNA, 25 bp, Homo sapien
cgccagctgcgactccagcgagccc

SEQ ID NO: 691930 - DNA, 25 bp, Homo sapien
gcgctggccgccagctgcgactcca

SEQ ID NO: 691931 - DNA, 25 bp, Homo sapien
ctcgggcgtgcgcggcgcgaggtgg

SEQ ID NO: 691932 - DNA, 25 bp, Homo sapien
tcgtccacctcgctgttgaagaaga

SEQ ID NO: 691933 - DNA, 25 bp, Homo sapien
actttctcgtccacctcgctgttga

SEQ ID NO: 691934 - DNA, 25 bp, Homo sapien
acctcgtccagcagatccgagcccg

SEQ ID NO: 691935 - DNA, 25 bp, Homo sapien
tcgctgttgaagaagacctcgtcca

SEQ ID NO: 691936 - DNA, 25 bp, Homo sapien
agcagacccgaactggacccttgtg

SEQ ID NO: 691937 - DNA, 25 bp, Homo sapien
acccttgtgcctgttcgaactgtag

SEQ ID NO: 691938 - DNA, 25 bp, Homo sapien
tagccttgcaaaggaatggacttac

SEQ ID NO: 691939 - DNA, 25 bp, Homo sapien
tagtctcgaaagcagacccgaactg

SEQ ID NO: 691940 - DNA, 25 bp, Homo sapien
gataactggaatacgggacttcacc

SEQ ID NO: 691941 - DNA, 25 bp, Homo sapien
cattgaggacggagcctaggagagg

SEQ ID NO: 691942 - DNA, 25 bp, Homo sapien
cccaggcttgtttctcgacagcagc

SEQ ID NO: 691943 - DNA, 25 bp, Homo sapien
cagcagcagccaatgagcattgagg

SEQ ID NO: 691944 - DNA, 25 bp, Homo sapien
gagtctttcattccaacgtgttcgc

SEQ ID NO: 691945 - DNA, 25 bp, Homo sapien
taatgagtctcctgccatctacgca

SEQ ID NO: 691946 - DNA, 25 bp, Homo sapien
ggactcgcaggaaacagaccaggtt

SEQ ID NO: 691947 - DNA, 25 bp, Homo sapien
tgcgagaagttaagggtctgtgccc

SEQ ID NO: 691948 - DNA, 25 bp, Homo sapien
ctattccagcttcccttgcaaggag

SEQ ID NO: 691949 - DNA, 25 bp, Homo sapien
ggagggtgttgggcaccagaaggcc

SEQ ID NO: 691950 - DNA, 25 bp, Homo sapien
cccttgcaaggagggtgttgggcac

SEQ ID NO: 691951 - DNA, 25 bp, Homo sapien
cagcttcccttgcaaggagggtgtt

SEQ ID NO: 691952 - DNA, 25 bp, Homo sapien
acccacacgcgctcctgtacactca

SEQ ID NO: 691953 - DNA, 25 bp, Homo sapien
gacgcacccacacgcgctcctgtac

SEQ ID NO: 691954 - DNA, 25 bp, Homo sapien
cacccacacgcgctcctgtacactc

SEQ ID NO: 691955 - DNA, 25 bp, Homo sapien
tgcagacgcacccacacgcgctcct

SEQ ID NO: 691956 - DNA, 25 bp, Homo sapien
ttcgccatctgaggccctctcagat

SEQ ID NO: 691957 - DNA, 25 bp, Homo sapien
cattcttcgccatctgaggccctct

SEQ ID NO: 691958 - DNA, 25 bp, Homo sapien
ttcttcgccatctgaggccctctca

SEQ ID NO: 691959 - DNA, 25 bp, Homo sapien
tcattcttcgccatctgaggccctc

SEQ ID NO: 691960 - DNA, 25 bp, Homo sapien
cctcctaggtgccacgatgggccgg

SEQ ID NO: 691961 - DNA, 25 bp, Homo sapien
gatgggccgggcacgttccaggcgc

SEQ ID NO: 691962 - DNA, 25 bp, Homo sapien
gggacacattcccaccatgcaggga

SEQ ID NO: 691963 - DNA, 25 bp, Homo sapien
acaagcacagttgtgccggcaggag

SEQ ID NO: 691964 - DNA, 25 bp, Homo sapien
tgggtttctcatccatgcagtaggg

SEQ ID NO: 691965 - DNA, 25 bp, Homo sapien
cagtagggacagtgtcccacctctg

SEQ ID NO: 691966 - DNA, 25 bp, Homo sapien
tccctcatggggcatggcaaggacc

SEQ ID NO: 691967 - DNA, 25 bp, Homo sapien
tcacccagaatggcactgggcgcct

SEQ ID NO: 691968 - DNA, 25 bp, Homo sapien
ggatttccacgccattccaggtcac

SEQ ID NO: 691969 - DNA, 25 bp, Homo sapien
ttccagctggtgaggatttccacgc

SEQ ID NO: 691970 - DNA, 25 bp, Homo sapien
tgaggatttccacgccattccaggt

SEQ ID NO: 691971 - DNA, 25 bp, Homo sapien
gctggtgaggatttccacgccattc

SEQ ID NO: 691972 - DNA, 25 bp, Homo sapien
acgaagagaagaacgtggccctgcc

SEQ ID NO: 691973 - DNA, 25 bp, Homo sapien
tcctgatggcgacagagctgactct

SEQ ID NO: 691974 - DNA, 25 bp, Homo sapien
gcatcaaaacgatctgaggccacag

SEQ ID NO: 691975 - DNA, 25 bp, Homo sapien
actctagaaagcgtgtcctgggcca

SEQ ID NO: 691976 - DNA, 25 bp, Homo sapien
cagctctttcgtgggactgggacct

SEQ ID NO: 691977 - DNA, 25 bp, Homo sapien
gcacattctctaggagttcactgag

SEQ ID NO: 691978 - DNA, 25 bp, Homo sapien
gacgaggatgcagagtagcttccca

SEQ ID NO: 691979 - DNA, 25 bp, Homo sapien
gctgtgaaggttttgcccgctgccg

SEQ ID NO: 691980 - DNA, 25 bp, Homo sapien
gctgcttcgaatgtgctgtcaccat

SEQ ID NO: 691981 - DNA, 25 bp, Homo sapien
tgtaaccactgctgcttcgaatgtg

SEQ ID NO: 691982 - DNA, 25 bp, Homo sapien
cactgctgcttcgaatgtgctgtca

SEQ ID NO: 691983 - DNA, 25 bp, Homo sapien
gaaggaaactgtaaccactgctgct

SEQ ID NO: 691984 - DNA, 25 bp, Homo sapien
ggagcctctgccctcggtcctccca

SEQ ID NO: 691985 - DNA, 25 bp, Homo sapien
ctggcccaagagctgaagcccggaa

SEQ ID NO: 691986 - DNA, 25 bp, Homo sapien
cccaagagctgaagcccggaagtgg

SEQ ID NO: 691987 - DNA, 25 bp, Homo sapien
ggttgggtgactgggccaggagcct

SEQ ID NO: 691988 - DNA, 25 bp, Homo sapien
cttgtggcagaatggcagtgattgc

SEQ ID NO: 691989 - DNA, 25 bp, Homo sapien
taagggacttaatctccaggaagtc

SEQ ID NO: 691990 - DNA, 25 bp, Homo sapien
cagcttgtggcagaatggcagtgat

SEQ ID NO: 691991 - DNA, 25 bp, Homo sapien
tcatgggtgaccttgaccacgacag

SEQ ID NO: 691992 - DNA, 25 bp, Homo sapien
cttcctagagggagcagcgccccca

SEQ ID NO: 691993 - DNA, 25 bp, Homo sapien
ctggcttgggcgcagaagtaaccag

SEQ ID NO: 691994 - DNA, 25 bp, Homo sapien
gagacagcccactggcttgggcgca

SEQ ID NO: 691995 - DNA, 25 bp, Homo sapien
ggcttgggcgcagaagtaaccagca

SEQ ID NO: 691996 - DNA, 25 bp, Homo sapien
gcccactggcttgggcgcagaagta

SEQ ID NO: 691997 - DNA, 25 bp, Homo sapien
tttcttgcatggacaagcgcggcca

SEQ ID NO: 691998 - DNA, 25 bp, Homo sapien
tggattccaagggtgctcagggtcc

SEQ ID NO: 691999 - DNA, 25 bp, Homo sapien
atggcaccccctggccggatcattt

SEQ ID NO: 692000 - DNA, 25 bp, Homo sapien
ggtccttttgggcatcatggcaccc

SEQ ID NO: 692001 - DNA, 25 bp, Homo sapien
tgggatgagcccgtaggcctcttca

SEQ ID NO: 692002 - DNA, 25 bp, Homo sapien
cagcaggcgctcgtgccgcatcagg

SEQ ID NO: 692003 - DNA, 25 bp, Homo sapien
gtaaagacaagtgcccagcctggct

SEQ ID NO: 692004 - DNA, 25 bp, Homo sapien
gagcccgtaggcctcttcagtaacc

SEQ ID NO: 692005 - DNA, 25 bp, Homo sapien
cacagccaccgggagagaaaagctg

SEQ ID NO: 692006 - DNA, 25 bp, Homo sapien
cagcatttgatcctgcattctgagg

SEQ ID NO: 692007 - DNA, 25 bp, Homo sapien
caccagggctggccctatcagaatc

SEQ ID NO: 692008 - DNA, 25 bp, Homo sapien
tgacatttcgaaagctggtgtctgg

SEQ ID NO: 692009 - DNA, 25 bp, Homo sapien
ctgtgcggttggagggtcttcctcg

SEQ ID NO: 692010 - DNA, 25 bp, Homo sapien
ccaatcccctctcctgcgccagatc

SEQ ID NO: 692011 - DNA, 25 bp, Homo sapien
gggcctccccaatcccctctcctgc

SEQ ID NO: 692012 - DNA, 25 bp, Homo sapien
tgtgcggttggagggtcttcctcgg

SEQ ID NO: 692013 - DNA, 25 bp, Homo sapien
gtgccaccccagctagactggtgat

SEQ ID NO: 692014 - DNA, 25 bp, Homo sapien
tagactggtgatgcaacgtggagca

SEQ ID NO: 692015 - DNA, 25 bp, Homo sapien
tggagcagggtccttactccatgtc

SEQ ID NO: 692016 - DNA, 25 bp, Homo sapien
agcagggtccttactccatgtctcc

SEQ ID NO: 692017 - DNA, 25 bp, Homo sapien
tcagacctgtgcacagtaaagagct

SEQ ID NO: 692018 - DNA, 25 bp, Homo sapien
cctgtgcacagtaaagagctgctta

SEQ ID NO: 692019 - DNA, 25 bp, Homo sapien
aagagctgcttatagtggaggtgct

SEQ ID NO: 692020 - DNA, 25 bp, Homo sapien
tatagtggaggtgctggatacatgt

SEQ ID NO: 692021 - DNA, 25 bp, Homo sapien
actcaggagacctggttggcacctc

SEQ ID NO: 692022 - DNA, 25 bp, Homo sapien
gacaggtgcaccctgtatatccaag

SEQ ID NO: 692023 - DNA, 25 bp, Homo sapien
gaaggactttgactccacatgggat

SEQ ID NO: 692024 - DNA, 25 bp, Homo sapien
agctgagagtctgggtcgcgcttcc

SEQ ID NO: 692025 - DNA, 25 bp, Homo sapien
tggccattgccgggctctggtggga

SEQ ID NO: 692026 - DNA, 25 bp, Homo sapien
ctgcccgggaacacccggcgcccag

SEQ ID NO: 692027 - DNA, 25 bp, Homo sapien
cactggggcgggagtcccggggctg

SEQ ID NO: 692028 - DNA, 25 bp, Homo sapien
ctgggcactggggcgggagtcccgg

SEQ ID NO: 692029 - DNA, 25 bp, Homo sapien
gcgcccagggcctccgccactcccc

SEQ ID NO: 692030 - DNA, 25 bp, Homo sapien
agaagcatccgttggcagccagatg

SEQ ID NO: 692031 - DNA, 25 bp, Homo sapien
gggccttgatcctgaacaaataccg

SEQ ID NO: 692032 - DNA, 25 bp, Homo sapien
caaataccgcgtcctaatgcggcct

SEQ ID NO: 692033 - DNA, 25 bp, Homo sapien
taaacggttctcctgctctatcctg

SEQ ID NO: 692034 - DNA, 25 bp, Homo sapien
cttttggtgacagccgcctgtgggt

SEQ ID NO: 692035 - DNA, 25 bp, Homo sapien
ctcgtaaccggctgtggccgctgga

SEQ ID NO: 692036 - DNA, 25 bp, Homo sapien
tgacagccgcctgtgggtgctcgta

SEQ ID NO: 692037 - DNA, 25 bp, Homo sapien
cctgtgggtgctcgtaaccggctgt

SEQ ID NO: 692038 - DNA, 25 bp, Homo sapien
cccttgagagaagtgtaggctgcta

SEQ ID NO: 692039 - DNA, 25 bp, Homo sapien
catgatgagcctttgcccttgagag

SEQ ID NO: 692040 - DNA, 25 bp, Homo sapien
tgtttagagtccctacaggtcctgg

SEQ ID NO: 692041 - DNA, 25 bp, Homo sapien
taggctgctacgtctcggaagtcag

SEQ ID NO: 692042 - DNA, 25 bp, Homo sapien
ctgggctagcctcagagggaatggc

SEQ ID NO: 692043 - DNA, 25 bp, Homo sapien
ggtgctttgcctggatttgatagaa

SEQ ID NO: 692044 - DNA, 25 bp, Homo sapien
gatagaacatctaggcagttgccct

SEQ ID NO: 692045 - DNA, 25 bp, Homo sapien
tgcctggagatataaggcttgcttc

SEQ ID NO: 692046 - DNA, 25 bp, Homo sapien
aaaagtggaaccaaatctgttggca

SEQ ID NO: 692047 - DNA, 25 bp, Homo sapien
gaggtggcagccaagtacatctctg

SEQ ID NO: 692048 - DNA, 25 bp, Homo sapien
cccatggatcatgttgtataagtga

SEQ ID NO: 692049 - DNA, 25 bp, Homo sapien
tataagtgaaccagaccaccctgat

SEQ ID NO: 692050 - DNA, 25 bp, Homo sapien
cactggcgttctcatccacttggaa

SEQ ID NO: 692051 - DNA, 25 bp, Homo sapien
gacctgggccggtcagtcattgctg

SEQ ID NO: 692052 - DNA, 25 bp, Homo sapien
ctagaagcatttgggagtagtggcc

SEQ ID NO: 692053 - DNA, 25 bp, Homo sapien
tgcaaggtcagttgaccaagagcat

SEQ ID NO: 692054 - DNA, 25 bp, Homo sapien
tttcccctctgttgtacatcgttgt

SEQ ID NO: 692055 - DNA, 25 bp, Homo sapien
atttcccctctgttgtacatcgttg

SEQ ID NO: 692056 - DNA, 25 bp, Homo sapien
tcctttcattacctgcctgtggcca

SEQ ID NO: 692057 - DNA, 25 bp, Homo sapien
agttctcctttcattacctgcctgt

SEQ ID NO: 692058 - DNA, 25 bp, Homo sapien
cagagaggacgaggagacacaccag

SEQ ID NO: 692059 - DNA, 25 bp, Homo sapien
gagaggacgaggagacacaccagct

SEQ ID NO: 692060 - DNA, 25 bp, Homo sapien
tgctctacagaatgaacccagggct

SEQ ID NO: 692061 - DNA, 25 bp, Homo sapien
cagagaatagccagaaccagtcttc

SEQ ID NO: 692062 - DNA, 25 bp, Homo sapien
caaaagccttaaactgtgggactag

SEQ ID NO: 692063 - DNA, 25 bp, Homo sapien
tagaagatacatgcccaaaaccaag

SEQ ID NO: 692064 - DNA, 25 bp, Homo sapien
tacggaagtttattgtaggacactc

SEQ ID NO: 692065 - DNA, 25 bp, Homo sapien
gagactcatccatgattgatatgaa

SEQ ID NO: 692066 - DNA, 25 bp, Homo sapien
gaaaggcctacacatcgagactcat

SEQ ID NO: 692067 - DNA, 25 bp, Homo sapien
aatggaatggaaaggcctacacatc

SEQ ID NO: 692068 - DNA, 25 bp, Homo sapien
tcatgatgctttcttttgtttcttc

SEQ ID NO: 692069 - DNA, 25 bp, Homo sapien
ttctttttcaatttcagcaacatac

SEQ ID NO: 692070 - DNA, 25 bp, Homo sapien
tgatgctttcttttgtttcttcttt

SEQ ID NO: 692071 - DNA, 25 bp, Homo sapien
tttttctttttcaatttcagcaaca

SEQ ID NO: 692072 - DNA, 25 bp, Homo sapien
tcatggttacctaagccacacaagg

SEQ ID NO: 692073 - DNA, 25 bp, Homo sapien
cacgcgtggaccatctaatcagagg

SEQ ID NO: 692074 - DNA, 25 bp, Homo sapien
gatgctggcctgacctagacaagta

SEQ ID NO: 692075 - DNA, 25 bp, Homo sapien
tactgctcagccctgatcatgggag

SEQ ID NO: 692076 - DNA, 25 bp, Homo sapien
tgtttttgccacctgactgaaccac

SEQ ID NO: 692077 - DNA, 25 bp, Homo sapien
aatgtttttgccacctgactgaacc

SEQ ID NO: 692078 - DNA, 25 bp, Homo sapien
atgtttttgccacctgactgaacca

SEQ ID NO: 692079 - DNA, 25 bp, Homo sapien
agacaggagcattaaccacctttcc

SEQ ID NO: 692080 - DNA, 25 bp, Homo sapien
aataggtgtgtacccaaacccagca

SEQ ID NO: 692081 - DNA, 25 bp, Homo sapien
tagtgatggctcgagaacagattcc

SEQ ID NO: 692082 - DNA, 25 bp, Homo sapien
taggatacaccatagaccagagcag

SEQ ID NO: 692083 - DNA, 25 bp, Homo sapien
gccccggctggataaagacactaat

SEQ ID NO: 692084 - DNA, 25 bp, Homo sapien
ttggcaccccgacctatggcattgg

SEQ ID NO: 692085 - DNA, 25 bp, Homo sapien
ccttgatcaccagcttaatggtcag

SEQ ID NO: 692086 - DNA, 25 bp, Homo sapien
caggaactcgcgcactgacttggca

SEQ ID NO: 692087 - DNA, 25 bp, Homo sapien
tcaatggcttcgtcagtatagttct

SEQ ID NO: 692088 - DNA, 25 bp, Homo sapien
tggcaagactgtccaaagccccttt

SEQ ID NO: 692089 - DNA, 25 bp, Homo sapien
gttttactgcgctatcaagaggcaa

SEQ ID NO: 692090 - DNA, 25 bp, Homo sapien
tgtggactacgcttacaccttgctg

SEQ ID NO: 692091 - DNA, 25 bp, Homo sapien
gttctcacgtggcatagggcatgac

SEQ ID NO: 692092 - DNA, 25 bp, Homo sapien
tggtatgtgcccgaggggtcagtct

SEQ ID NO: 692093 - DNA, 25 bp, Homo sapien
gcatggtatgtgcccgaggggtcag

SEQ ID NO: 692094 - DNA, 25 bp, Homo sapien
gcccgaggggtcagtctgatagagc

SEQ ID NO: 692095 - DNA, 25 bp, Homo sapien
tatgtgcccgaggggtcagtctgat

SEQ ID NO: 692096 - DNA, 25 bp, Homo sapien
ggcctgcgcccattgctctgcgtat

SEQ ID NO: 692097 - DNA, 25 bp, Homo sapien
ggcagagatgccaaacggcctgcgc

SEQ ID NO: 692098 - DNA, 25 bp, Homo sapien
agagatgccaaacggcctgcgccca

SEQ ID NO: 692099 - DNA, 25 bp, Homo sapien
tgcgcccattgctctgcgtataacg

SEQ ID NO: 692100 - DNA, 25 bp, Homo sapien
taatggcgtgtcctcatagggtggc

SEQ ID NO: 692101 - DNA, 25 bp, Homo sapien
gaatttggaatatcccatgccagga

SEQ ID NO: 692102 - DNA, 25 bp, Homo sapien
cactcaggatggcaagacaaaagct

SEQ ID NO: 692103 - DNA, 25 bp, Homo sapien
agtcaagattaggatcacgccccag

SEQ ID NO: 692104 - DNA, 25 bp, Homo sapien
gcaggaccctccatggcggagccgt

SEQ ID NO: 692105 - DNA, 25 bp, Homo sapien
aggaccctccatggcggagccgtga

SEQ ID NO: 692106 - DNA, 25 bp, Homo sapien
gtgagcatgcaagcgggcaggcacc

SEQ ID NO: 692107 - DNA, 25 bp, Homo sapien
gccctgctgccagaggtgagcatgc

SEQ ID NO: 692108 - DNA, 25 bp, Homo sapien
ctgcttcagactggcgatgtagcgg

SEQ ID NO: 692109 - DNA, 25 bp, Homo sapien
actggcgatgtagcgggtgatgtac

SEQ ID NO: 692110 - DNA, 25 bp, Homo sapien
tgtactccacagtgaccgggtcctc

SEQ ID NO: 692111 - DNA, 25 bp, Homo sapien
acagtgaccgggtcctccacagtca

SEQ ID NO: 692112 - DNA, 25 bp, Homo sapien
tgactatccttgcatcggcggtgag

SEQ ID NO: 692113 - DNA, 25 bp, Homo sapien
gccctgttgatgactatccttgcat

SEQ ID NO: 692114 - DNA, 25 bp, Homo sapien
tgttgatgactatccttgcatcggc

SEQ ID NO: 692115 - DNA, 25 bp, Homo sapien
gatgactatccttgcatcggcggtg

SEQ ID NO: 692116 - DNA, 25 bp, Homo sapien
ccaggaaattgggtacagatgcttc

SEQ ID NO: 692117 - DNA, 25 bp, Homo sapien
tgtaggctgccgtgcagaatctgga

SEQ ID NO: 692118 - DNA, 25 bp, Homo sapien
ggtatcccgctaaactcatcgtaag

SEQ ID NO: 692119 - DNA, 25 bp, Homo sapien
taactgactggcagcggaacctatc

SEQ ID NO: 692120 - DNA, 25 bp, Homo sapien
tttggccactgacttcttctccaca

SEQ ID NO: 692121 - DNA, 25 bp, Homo sapien
tcctgcagtttggccactgacttct

SEQ ID NO: 692122 - DNA, 25 bp, Homo sapien
acaacaatgtctcttcctcgaacac

SEQ ID NO: 692123 - DNA, 25 bp, Homo sapien
acaatgtctcttcctcgaacaccaa

SEQ ID NO: 692124 - DNA, 25 bp, Homo sapien
aagtgatacatggttctactgccag

SEQ ID NO: 692125 - DNA, 25 bp, Homo sapien
gatccacaaaccacgtaagaaagtg

SEQ ID NO: 692126 - DNA, 25 bp, Homo sapien
cagctcccactggaaggtgcgttca

SEQ ID NO: 692127 - DNA, 25 bp, Homo sapien
gtgctcacctaggtgcccaacctgg

SEQ ID NO: 692128 - DNA, 25 bp, Homo sapien
tcaaaatttacagaaccgtgtgtgc

SEQ ID NO: 692129 - DNA, 25 bp, Homo sapien
atcaaaatttacagaaccgtgtgtg

SEQ ID NO: 692130 - DNA, 25 bp, Homo sapien
caaaatttacagaaccgtgtgtgct

SEQ ID NO: 692131 - DNA, 25 bp, Homo sapien
aatcaaaatttacagaaccgtgtgt

SEQ ID NO: 692132 - DNA, 25 bp, Homo sapien
taaaagaataacgatctcacagact

SEQ ID NO: 692133 - DNA, 25 bp, Homo sapien
gataaaagaataacgatctcacaga

SEQ ID NO: 692134 - DNA, 25 bp, Homo sapien
aagaataacgatctcacagactgac

SEQ ID NO: 692135 - DNA, 25 bp, Homo sapien
atgataaaagaataacgatctcaca

SEQ ID NO: 692136 - DNA, 25 bp, Homo sapien
cacgagccctcgtcaaaacgaaacg

SEQ ID NO: 692137 - DNA, 25 bp, Homo sapien
taaactgacacgtcttgatggtacg

SEQ ID NO: 692138 - DNA, 25 bp, Homo sapien
tcctcccggcagagtgcggagacct

SEQ ID NO: 692139 - DNA, 25 bp, Homo sapien
cactaaggtcaatgtacacgagccc

SEQ ID NO: 692140 - DNA, 25 bp, Homo sapien
tgcaggcactcgtggagaccggcag

SEQ ID NO: 692141 - DNA, 25 bp, Homo sapien
gccaaacgccgcctctgcaggcact

SEQ ID NO: 692142 - DNA, 25 bp, Homo sapien
gagaacgagcgctcgcggctcacgc

SEQ ID NO: 692143 - DNA, 25 bp, Homo sapien
gctcaagatggcgtcgtcacggccc

SEQ ID NO: 692144 - DNA, 25 bp, Homo sapien
ggcctcctgcgcgtactccacttgg

SEQ ID NO: 692145 - DNA, 25 bp, Homo sapien
tggccgtcgggcgagaagacggtga

SEQ ID NO: 692146 - DNA, 25 bp, Homo sapien
ctgcgcgtactccacttggaagagg

SEQ ID NO: 692147 - DNA, 25 bp, Homo sapien
gcggtcgagcccttcttgacggcct

SEQ ID NO: 692148 - DNA, 25 bp, Homo sapien
accctcggcgccgtgtcctgcgctg

SEQ ID NO: 692149 - DNA, 25 bp, Homo sapien
gactctcaaaagcgcacactcacgg

SEQ ID NO: 692150 - DNA, 25 bp, Homo sapien
gcacccgcgactcccggcgccacta

SEQ ID NO: 692151 - DNA, 25 bp, Homo sapien
tccgccgcgactctcaaaagcgcac

SEQ ID NO: 692152 - DNA, 25 bp, Homo sapien
ggggccgggcggacgctggaggctg

SEQ ID NO: 692153 - DNA, 25 bp, Homo sapien
gagagcctgcgccaactttgttggg

SEQ ID NO: 692154 - DNA, 25 bp, Homo sapien
ttccccgcgtcccacgcctgcgcgc

SEQ ID NO: 692155 - DNA, 25 bp, Homo sapien
agtccgcggcgcgcgctgggaactg

SEQ ID NO: 692156 - DNA, 25 bp, Homo sapien
ggcgagggcttgtcgcgctccgcag

SEQ ID NO: 692157 - DNA, 25 bp, Homo sapien
gcgggcggtactcgttttctgcgct

SEQ ID NO: 692158 - DNA, 25 bp, Homo sapien
cctccgggcgcacttgcgaccgcgg

SEQ ID NO: 692159 - DNA, 25 bp, Homo sapien
tttctgcgctcattttggttagtgg

SEQ ID NO: 692160 - DNA, 25 bp, Homo sapien
tgggcctgcagtggtcacctcggac

SEQ ID NO: 692161 - DNA, 25 bp, Homo sapien
ctgggcctgcagtggtcacctcgga

SEQ ID NO: 692162 - DNA, 25 bp, Homo sapien
ggctgggcctgcagtggtcacctcg

SEQ ID NO: 692163 - DNA, 25 bp, Homo sapien
gcctgcagtggtcacctcggaccat

SEQ ID NO: 692164 - DNA, 25 bp, Homo sapien
cggaaatgggctgtttatatcctcc

SEQ ID NO: 692165 - DNA, 25 bp, Homo sapien
aggcaggtccttggtgttaccagga

SEQ ID NO: 692166 - DNA, 25 bp, Homo sapien
caaatgggaaataggtgtggaatgc

SEQ ID NO: 692167 - DNA, 25 bp, Homo sapien
ctgctgtgcacaatggggacggaaa

SEQ ID NO: 692168 - DNA, 25 bp, Homo sapien
tcacggattccacagttgggtgaat

SEQ ID NO: 692169 - DNA, 25 bp, Homo sapien
gattccacagttgggtgaatgttca

SEQ ID NO: 692170 - DNA, 25 bp, Homo sapien
ccacagttgggtgaatgttcagagg

SEQ ID NO: 692171 - DNA, 25 bp, Homo sapien
cgacttcacggattccacagttggg

SEQ ID NO: 692172 - DNA, 25 bp, Homo sapien
gagtctgtagtatcggcttgctgac

SEQ ID NO: 692173 - DNA, 25 bp, Homo sapien
tggagtctgtagtatcggcttgctg

SEQ ID NO: 692174 - DNA, 25 bp, Homo sapien
ggagtctgtagtatcggcttgctga

SEQ ID NO: 692175 - DNA, 25 bp, Homo sapien
aattgattctgcgtctgtgtccacg

SEQ ID NO: 692176 - DNA, 25 bp, Homo sapien
tgcgtctgtgtccacgccatgcgtg

SEQ ID NO: 692177 - DNA, 25 bp, Homo sapien
cctaggaattgattctgcgtctgtg

SEQ ID NO: 692178 - DNA, 25 bp, Homo sapien
tgattctgcgtctgtgtccacgcca

SEQ ID NO: 692179 - DNA, 25 bp, Homo sapien
ttgggactgggtcatcacacctcag

SEQ ID NO: 692180 - DNA, 25 bp, Homo sapien
aagtctccgtgaggtcgttgcaccc

SEQ ID NO: 692181 - DNA, 25 bp, Homo sapien
gtcggaatccactgtccttcacgtg

SEQ ID NO: 692182 - DNA, 25 bp, Homo sapien
tttctacgcagaagtctccctcagg

SEQ ID NO: 692183 - DNA, 25 bp, Homo sapien
tttatggctgtccacaccgtccaca

SEQ ID NO: 692184 - DNA, 25 bp, Homo sapien
gtgtgcatttctcaggccctcgcca

SEQ ID NO: 692185 - DNA, 25 bp, Homo sapien
cagcgtgtcccaggagtggacgaca

SEQ ID NO: 692186 - DNA, 25 bp, Homo sapien
cggctggcgtgtcgtgtgcatttct

SEQ ID NO: 692187 - DNA, 25 bp, Homo sapien
gaaatctgatcattaactagctggg

SEQ ID NO: 692188 - DNA, 25 bp, Homo sapien
ccgatgctccgttttgctgcccaag

SEQ ID NO: 692189 - DNA, 25 bp, Homo sapien
gatgatgatccgttgtcttcccctg

SEQ ID NO: 692190 - DNA, 25 bp, Homo sapien
tggctttcaccacaggtccgatgct

SEQ ID NO: 692191 - DNA, 25 bp, Homo sapien
gcaaatacttattaccgagaccagg

SEQ ID NO: 692192 - DNA, 25 bp, Homo sapien
gagaccaggtagatcgtcacctcgg

SEQ ID NO: 692193 - DNA, 25 bp, Homo sapien
gagttcgcgtgcgtccgcaccggat

SEQ ID NO: 692194 - DNA, 25 bp, Homo sapien
tgtcctcgtcagacccgggaggttc

SEQ ID NO: 692195 - DNA, 25 bp, Homo sapien
tttgtattgtaaacgcgcctcaggg

SEQ ID NO: 692196 - DNA, 25 bp, Homo sapien
gcctcagggagacgcatttccagat

SEQ ID NO: 692197 - DNA, 25 bp, Homo sapien
gaatttgccttgatccagcgctcta

SEQ ID NO: 692198 - DNA, 25 bp, Homo sapien
aagtgacgtgctttcccgagccggt

SEQ ID NO: 692199 - DNA, 25 bp, Homo sapien
cttataggcggagaatggagttacc

SEQ ID NO: 692200 - DNA, 25 bp, Homo sapien
gaatgaggacgtcctgtgcacagct

SEQ ID NO: 692201 - DNA, 25 bp, Homo sapien
ggaactcagccagtcggagaacaga

SEQ ID NO: 692202 - DNA, 25 bp, Homo sapien
gactttcctacagggagaggcactg

SEQ ID NO: 692203 - DNA, 25 bp, Homo sapien
cacctgcaaggtagccggctgtcat

SEQ ID NO: 692204 - DNA, 25 bp, Homo sapien
caacaattcgccagtcctctgcaga

SEQ ID NO: 692205 - DNA, 25 bp, Homo sapien
ctttgagagtgacagtagctggcac

SEQ ID NO: 692206 - DNA, 25 bp, Homo sapien
tcctgtgcgacctgctgaagactgg

SEQ ID NO: 692207 - DNA, 25 bp, Homo sapien
tagcgagctgggagtgaagccttca

SEQ ID NO: 692208 - DNA, 25 bp, Homo sapien
tcacactcagcatagacgcatagcg

SEQ ID NO: 692209 - DNA, 25 bp, Homo sapien
caataggccatggttgtcgtaacac

SEQ ID NO: 692210 - DNA, 25 bp, Homo sapien
tgacatgtcggtcgcgtgaaagcac

SEQ ID NO: 692211 - DNA, 25 bp, Homo sapien
tgtcggcgttgaccggcgagaacct

SEQ ID NO: 692212 - DNA, 25 bp, Homo sapien
cagctccgggatcacttgggacagg

SEQ ID NO: 692213 - DNA, 25 bp, Homo sapien
tgagccgtggactcaagttgacgat

SEQ ID NO: 692214 - DNA, 25 bp, Homo sapien
gaaggtgctgtatgacgcctacgcg

SEQ ID NO: 692215 - DNA, 25 bp, Homo sapien
ccatggcttgctacggagagagacc

SEQ ID NO: 692216 - DNA, 25 bp, Homo sapien
gagagagacctctggatccacactg

SEQ ID NO: 692217 - DNA, 25 bp, Homo sapien
cacgcgtggactctcggatgagctc

SEQ ID NO: 692218 - DNA, 25 bp, Homo sapien
gaagtgcagaccagggttctcagca

SEQ ID NO: 692219 - DNA, 25 bp, Homo sapien
cacgactgaatgcacccaatatccg

SEQ ID NO: 692220 - DNA, 25 bp, Homo sapien
tccttcagaacacttctctgtgctc

SEQ ID NO: 692221 - DNA, 25 bp, Homo sapien
ctcaggcttcacgactgaatgcacc

SEQ ID NO: 692222 - DNA, 25 bp, Homo sapien
atgcacccaatatccgacctggctg

SEQ ID NO: 692223 - DNA, 25 bp, Homo sapien
cccaagtagtctcaggcctctgaca

SEQ ID NO: 692224 - DNA, 25 bp, Homo sapien
tagtctcaggcctctgacatgtccc

SEQ ID NO: 692225 - DNA, 25 bp, Homo sapien
catgtccctgaggggcccctaagaa

SEQ ID NO: 692226 - DNA, 25 bp, Homo sapien
gggacactccagaggctgtcgtggg

SEQ ID NO: 692227 - DNA, 25 bp, Homo sapien
gtttgtctgtatgcagtgcccgggt

SEQ ID NO: 692228 - DNA, 25 bp, Homo sapien
gcagacatgctgaggcaaccggagc

SEQ ID NO: 692229 - DNA, 25 bp, Homo sapien
ctcctggagaacagagacctcgttt

SEQ ID NO: 692230 - DNA, 25 bp, Homo sapien
aaccggagcgtctcatcagtgaaca

SEQ ID NO: 692231 - DNA, 25 bp, Homo sapien
gtcctggtgccgctaaagaggctgc

SEQ ID NO: 692232 - DNA, 25 bp, Homo sapien
ctggtgccgctaaagaggctgcaga

SEQ ID NO: 692233 - DNA, 25 bp, Homo sapien
tgccgctaaagaggctgcagagccg

SEQ ID NO: 692234 - DNA, 25 bp, Homo sapien
gtgccgctaaagaggctgcagagcc

SEQ ID NO: 692235 - DNA, 25 bp, Homo sapien
tgttaaacattaagccccaggtcta

SEQ ID NO: 692236 - DNA, 25 bp, Homo sapien
tgccgcaaccgtgacaaacacacta

SEQ ID NO: 692237 - DNA, 25 bp, Homo sapien
caggtgctcaggtacgacagcatgg

SEQ ID NO: 692238 - DNA, 25 bp, Homo sapien
cccttgggcaggagtgacccgttct

SEQ ID NO: 692239 - DNA, 25 bp, Homo sapien
tcttcttgttactacggcctgagcg

SEQ ID NO: 692240 - DNA, 25 bp, Homo sapien
acagtgccgaaaacgtcgtgttgtg

SEQ ID NO: 692241 - DNA, 25 bp, Homo sapien
cgtgttgtgggccagaagccgttct

SEQ ID NO: 692242 - DNA, 25 bp, Homo sapien
caacaagatgggtttagctgaggaa

SEQ ID NO: 692243 - DNA, 25 bp, Homo sapien
ctcccagcctcctccagccggccac

SEQ ID NO: 692244 - DNA, 25 bp, Homo sapien
cttagcgacctctcccagcctcctc

SEQ ID NO: 692245 - DNA, 25 bp, Homo sapien
acctctcccagcctcctccagccgg

SEQ ID NO: 692246 - DNA, 25 bp, Homo sapien
ctctcccagcctcctccagccggcc

SEQ ID NO: 692247 - DNA, 25 bp, Homo sapien
gcacagtgctgtccgctgcgagcag

SEQ ID NO: 692248 - DNA, 25 bp, Homo sapien
gtgcaccgccaacaatggagcaatt

SEQ ID NO: 692249 - DNA, 25 bp, Homo sapien
gaggcccggcgcttaatgacgttag

SEQ ID NO: 692250 - DNA, 25 bp, Homo sapien
tggagcaattttcggtaatgatggg

SEQ ID NO: 692251 - DNA, 25 bp, Homo sapien
ctccatccacccccgagcgtggccg

SEQ ID NO: 692252 - DNA, 25 bp, Homo sapien
ccatccacccccgagcgtggccgag

SEQ ID NO: 692253 - DNA, 25 bp, Homo sapien
tccatccacccccgagcgtggccga

SEQ ID NO: 692254 - DNA, 25 bp, Homo sapien
gcttgtatcctccaatttgtagcca

SEQ ID NO: 692255 - DNA, 25 bp, Homo sapien
agaactcgggcccaatagactcggt

SEQ ID NO: 692256 - DNA, 25 bp, Homo sapien
gagagaggcccccttgtgtgtttgt

SEQ ID NO: 692257 - DNA, 25 bp, Homo sapien
tgtgtttgtttgctgcagaactcgg

SEQ ID NO: 692258 - DNA, 25 bp, Homo sapien
agctcagccggaagccttagcggag

SEQ ID NO: 692259 - DNA, 25 bp, Homo sapien
cacgggtgcacagcacatggcgaag

SEQ ID NO: 692260 - DNA, 25 bp, Homo sapien
tgtgacctcacggtttgcagggcag

SEQ ID NO: 692261 - DNA, 25 bp, Homo sapien
gtctctcttgattaaacatcccagg

SEQ ID NO: 692262 - DNA, 25 bp, Homo sapien
tcacagacatgttttcttcttcatc

SEQ ID NO: 692263 - DNA, 25 bp, Homo sapien
cacagacatgttttcttcttcatct

SEQ ID NO: 692264 - DNA, 25 bp, Homo sapien
acagacatgttttcttcttcatctt

SEQ ID NO: 692265 - DNA, 25 bp, Homo sapien
cagacatgttttcttcttcatcttt

SEQ ID NO: 692266 - DNA, 25 bp, Homo sapien
caggcctgaggcttatgcaagagac

SEQ ID NO: 692267 - DNA, 25 bp, Homo sapien
tgtgcacgtgcagaggcaaactgct

SEQ ID NO: 692268 - DNA, 25 bp, Homo sapien
gaacagcttcgaggttcctagggcc

SEQ ID NO: 692269 - DNA, 25 bp, Homo sapien
ccagtaactgcgaagggtgggcacc

SEQ ID NO: 692270 - DNA, 25 bp, Homo sapien
cagcttggtgaaggcccggcggaag

SEQ ID NO: 692271 - DNA, 25 bp, Homo sapien
agctgtggggctggattttgagctt

SEQ ID NO: 692272 - DNA, 25 bp, Homo sapien
tccagcagtgctccagggagctgtg

SEQ ID NO: 692273 - DNA, 25 bp, Homo sapien
ggcagagcagcttggtgaaggcccg

SEQ ID NO: 692274 - DNA, 25 bp, Homo sapien
acagggttgacagccgagttggccc

SEQ ID NO: 692275 - DNA, 25 bp, Homo sapien
gaaggaggtttcgtaccagtagtca

SEQ ID NO: 692276 - DNA, 25 bp, Homo sapien
atgctcacgatgacggccagcgact

SEQ ID NO: 692277 - DNA, 25 bp, Homo sapien
cagtagtcagggacgcagtggccat

SEQ ID NO: 692278 - DNA, 25 bp, Homo sapien
acagccgaaagcgctgggtgaagct

SEQ ID NO: 692279 - DNA, 25 bp, Homo sapien
agacagccgaaagcgctgggtgaag

SEQ ID NO: 692280 - DNA, 25 bp, Homo sapien
cgagacagccgaaagcgctgggtga

SEQ ID NO: 692281 - DNA, 25 bp, Homo sapien
cagccgaaagcgctgggtgaagctc

SEQ ID NO: 692282 - DNA, 25 bp, Homo sapien
gcttggagcccctcttgagtgagcg

SEQ ID NO: 692283 - DNA, 25 bp, Homo sapien
cctcttgagtgagcgcggcctctca

SEQ ID NO: 692284 - DNA, 25 bp, Homo sapien
gccgaggacgccgacggcttggagc

SEQ ID NO: 692285 - DNA, 25 bp, Homo sapien
ctctcagtgcccctcgaggagctgc

SEQ ID NO: 692286 - DNA, 25 bp, Homo sapien
gaggtgggtgaagccacggagccgc

SEQ ID NO: 692287 - DNA, 25 bp, Homo sapien
aggtgggtgaagccacggagccgcc

SEQ ID NO: 692288 - DNA, 25 bp, Homo sapien
ggaggtgggtgaagccacggagccg

SEQ ID NO: 692289 - DNA, 25 bp, Homo sapien
gaggaagtaccagttgtagaagaac

SEQ ID NO: 692290 - DNA, 25 bp, Homo sapien
tgaggaagggcgtaaagaactccag

SEQ ID NO: 692291 - DNA, 25 bp, Homo sapien
tgcgcctctggatgttcaggtagat

SEQ ID NO: 692292 - DNA, 25 bp, Homo sapien
aagaactcggcatagcagtggccct

SEQ ID NO: 692293 - DNA, 25 bp, Homo sapien
ccagcagcatcttccgcactgcccg

SEQ ID NO: 692294 - DNA, 25 bp, Homo sapien
actgcccgccgcgtgtcaccctgct

SEQ ID NO: 692295 - DNA, 25 bp, Homo sapien
tgcccgccgcgtgtcaccctgctgg

SEQ ID NO: 692296 - DNA, 25 bp, Homo sapien
cccgccgcgtgtcaccctgctgggc

SEQ ID NO: 692297 - DNA, 25 bp, Homo sapien
tgcacagcaggtagtccactaccag

SEQ ID NO: 692298 - DNA, 25 bp, Homo sapien
cactaccagccacagcttgcagagg

SEQ ID NO: 692299 - DNA, 25 bp, Homo sapien
ggcctgtcagcacgtagggtacata

SEQ ID NO: 692300 - DNA, 25 bp, Homo sapien
aagcggtcgtagctgatgagcacga

SEQ ID NO: 692301 - DNA, 25 bp, Homo sapien
catagctcccagcactatctgtgtc

SEQ ID NO: 692302 - DNA, 25 bp, Homo sapien
cgccagccttcacccccacatagct

SEQ ID NO: 692303 - DNA, 25 bp, Homo sapien
ctccacctggtgtcagccacaaact

SEQ ID NO: 692304 - DNA, 25 bp, Homo sapien
ccccacatagctcccagcactatct

SEQ ID NO: 692305 - DNA, 25 bp, Homo sapien
gcccggccacgctgggcgcccctgg

SEQ ID NO: 692306 - DNA, 25 bp, Homo sapien
ctcgagtcggccacgaaggcgagca

SEQ ID NO: 692307 - DNA, 25 bp, Homo sapien
gaagtcggagatggcgaggttgagc

SEQ ID NO: 692308 - DNA, 25 bp, Homo sapien
gcgagcatgaccagcgcgttgccca

SEQ ID NO: 692309 - DNA, 25 bp, Homo sapien
ttctgggtgcggaggctcgagtcgg

SEQ ID NO: 692310 - DNA, 25 bp, Homo sapien
gttcagcggcccgtcgggcggcgcg

SEQ ID NO: 692311 - DNA, 25 bp, Homo sapien
gccagcgcccccgaagcgttcagcg

SEQ ID NO: 692312 - DNA, 25 bp, Homo sapien
ccgaagcgttcagcggcccgtcggg

SEQ ID NO: 692313 - DNA, 25 bp, Homo sapien
agcgcccccgaagcgttcagcggcc

SEQ ID NO: 692314 - DNA, 25 bp, Homo sapien
gggcgcccagcgcatggtccgcggg

SEQ ID NO: 692315 - DNA, 25 bp, Homo sapien
gagcctcgtctttgcgggcccttgg

SEQ ID NO: 692316 - DNA, 25 bp, Homo sapien
gccccgcaggctcacgcggctccgg

SEQ ID NO: 692317 - DNA, 25 bp, Homo sapien
gctgccggtgcgaccgtgcagccgg

SEQ ID NO: 692318 - DNA, 25 bp, Homo sapien
ggctgggagcccggccggggcttga

SEQ ID NO: 692319 - DNA, 25 bp, Homo sapien
gctgggagcccggccggggcttgac

SEQ ID NO: 692320 - DNA, 25 bp, Homo sapien
agcagctggctgggagcccggccgg

SEQ ID NO: 692321 - DNA, 25 bp, Homo sapien
agctggctgggagcccggccggggc

SEQ ID NO: 692322 - DNA, 25 bp, Homo sapien
ggtctgggggctcgcctgcggtcag

SEQ ID NO: 692323 - DNA, 25 bp, Homo sapien
ggtcagtcagcccgcgcactcggag

SEQ ID NO: 692324 - DNA, 25 bp, Homo sapien
tggtgacccctgcccggtcatcatg

SEQ ID NO: 692325 - DNA, 25 bp, Homo sapien
acccctgcccggtcatcatggagag

SEQ ID NO: 692326 - DNA, 25 bp, Homo sapien
ggaatgtgggtctccggggcaagga

SEQ ID NO: 692327 - DNA, 25 bp, Homo sapien
gcatttcctcggtgcatgttttggg

SEQ ID NO: 692328 - DNA, 25 bp, Homo sapien
ccctgcggggcatttcctcggtgca

SEQ ID NO: 692329 - DNA, 25 bp, Homo sapien
gcgctccggggacttgccctgcggg

SEQ ID NO: 692330 - DNA, 25 bp, Homo sapien
ggcagtcgccactgcagcggacaga

SEQ ID NO: 692331 - DNA, 25 bp, Homo sapien
cagacgaggtcactgcgctcagggc

SEQ ID NO: 692332 - DNA, 25 bp, Homo sapien
acagaggggcagtcgccactgcagc

SEQ ID NO: 692333 - DNA, 25 bp, Homo sapien
actgcagcggacagacgaggtcact

SEQ ID NO: 692334 - DNA, 25 bp, Homo sapien
cctgtgtagcccgtctagccctggg

SEQ ID NO: 692335 - DNA, 25 bp, Homo sapien
gcttgatgtggccacggcaatgcag

SEQ ID NO: 692336 - DNA, 25 bp, Homo sapien
tgcatgtggctggtccctgtgtagc

SEQ ID NO: 692337 - DNA, 25 bp, Homo sapien
catggccacatgtccagcccagcct

SEQ ID NO: 692338 - DNA, 25 bp, Homo sapien
cctctgaatgtctgaccgccagcaa

SEQ ID NO: 692339 - DNA, 25 bp, Homo sapien
ctctgaatgtctgaccgccagcaag

SEQ ID NO: 692340 - DNA, 25 bp, Homo sapien
ctgaatgtctgaccgccagcaagcg

SEQ ID NO: 692341 - DNA, 25 bp, Homo sapien
tctgaatgtctgaccgccagcaagc

SEQ ID NO: 692342 - DNA, 25 bp, Homo sapien
ccctgcagacacggatgacagagca

SEQ ID NO: 692343 - DNA, 25 bp, Homo sapien
ctgccctgcagacacggatgacaga

SEQ ID NO: 692344 - DNA, 25 bp, Homo sapien
tgccctgcagacacggatgacagag

SEQ ID NO: 692345 - DNA, 25 bp, Homo sapien
tgcagacacggatgacagagcagag

SEQ ID NO: 692346 - DNA, 25 bp, Homo sapien
cgtcacgtctccaacaagaagacca

SEQ ID NO: 692347 - DNA, 25 bp, Homo sapien
ggcgtcacgtctccaacaagaagac

SEQ ID NO: 692348 - DNA, 25 bp, Homo sapien
tcacgtctccaacaagaagaccaca

SEQ ID NO: 692349 - DNA, 25 bp, Homo sapien
acgtctccaacaagaagaccacagg

SEQ ID NO: 692350 - DNA, 25 bp, Homo sapien
cctagggcaaacgcagcgccctgac

SEQ ID NO: 692351 - DNA, 25 bp, Homo sapien
ccctagggcaaacgcagcgccctga

SEQ ID NO: 692352 - DNA, 25 bp, Homo sapien
tgggctcagggagcctcgtcctgga

SEQ ID NO: 692353 - DNA, 25 bp, Homo sapien
cgtggaggagctgagcagtgcaggt

SEQ ID NO: 692354 - DNA, 25 bp, Homo sapien
tggagccttgggtcctcttcccctg

SEQ ID NO: 692355 - DNA, 25 bp, Homo sapien
aggtcgggaagaggcgccacgtgga

SEQ ID NO: 692356 - DNA, 25 bp, Homo sapien
ccttggtgtgcatcttgagtgccca

SEQ ID NO: 692357 - DNA, 25 bp, Homo sapien
cttggtgtgcatcttgagtgcccac

SEQ ID NO: 692358 - DNA, 25 bp, Homo sapien
tctgaagggtgaccccagcccggaa

SEQ ID NO: 692359 - DNA, 25 bp, Homo sapien
gaagggtgaccccagcccggaatgc

SEQ ID NO: 692360 - DNA, 25 bp, Homo sapien
gtgtgctcttctgaagggtgacccc

SEQ ID NO: 692361 - DNA, 25 bp, Homo sapien
tcttctgaagggtgaccccagcccg

SEQ ID NO: 692362 - DNA, 25 bp, Homo sapien
tctgagagtacactggtggtgccat

SEQ ID NO: 692363 - DNA, 25 bp, Homo sapien
cctgcatctgagagtacactggtgg

SEQ ID NO: 692364 - DNA, 25 bp, Homo sapien
aaactttgcctgcatctgagagtac

SEQ ID NO: 692365 - DNA, 25 bp, Homo sapien
tttgcctgcatctgagagtacactg

SEQ ID NO: 692366 - DNA, 25 bp, Homo sapien
gtgcagattgttcaggtcccaaaga

SEQ ID NO: 692367 - DNA, 25 bp, Homo sapien
tgctattgataacttgtctcgcttc

SEQ ID NO: 692368 - DNA, 25 bp, Homo sapien
cttttggcagaatttaatgggtgca

SEQ ID NO: 692369 - DNA, 25 bp, Homo sapien
ctcgcttcacgtggtgggttcaaaa

SEQ ID NO: 692370 - DNA, 25 bp, Homo sapien
gattccatggctttccataaaagag

SEQ ID NO: 692371 - DNA, 25 bp, Homo sapien
gagaagccagggctgtcacgtcgca

SEQ ID NO: 692372 - DNA, 25 bp, Homo sapien
agaatgtcctctctaaaggcctggg

SEQ ID NO: 692373 - DNA, 25 bp, Homo sapien
ctgtcacgtcgcagaggagactgga

SEQ ID NO: 692374 - DNA, 25 bp, Homo sapien
ggaagccaagccctgtttgatctaa

SEQ ID NO: 692375 - DNA, 25 bp, Homo sapien
ggcacccggcgttcctggaagccaa

SEQ ID NO: 692376 - DNA, 25 bp, Homo sapien
gataaagagataaacccagacccag

SEQ ID NO: 692377 - DNA, 25 bp, Homo sapien
agcaatgccaaggcacccggcgttc

SEQ ID NO: 692378 - DNA, 25 bp, Homo sapien
tgttgttcgtgtgcggatcctggtc

SEQ ID NO: 692379 - DNA, 25 bp, Homo sapien
ggcctgttgttcgtgtgcggatcct

SEQ ID NO: 692380 - DNA, 25 bp, Homo sapien
tcctggtccgggagcctggatgcgg

SEQ ID NO: 692381 - DNA, 25 bp, Homo sapien
tctgccttgccgacaagctcctggg

SEQ ID NO: 692382 - DNA, 25 bp, Homo sapien
gcttggagtgcctgcttgttgtgcc

SEQ ID NO: 692383 - DNA, 25 bp, Homo sapien
ctatgcttggagtgcctgcttgttg

SEQ ID NO: 692384 - DNA, 25 bp, Homo sapien
tgcttggagtgcctgcttgttgtgc

SEQ ID NO: 692385 - DNA, 25 bp, Homo sapien
ttggagtgcctgcttgttgtgcctg

SEQ ID NO: 692386 - DNA, 25 bp, Homo sapien
acagaggccacgttcattggctcac

SEQ ID NO: 692387 - DNA, 25 bp, Homo sapien
tgccctgaaatttatagagagtacc

SEQ ID NO: 692388 - DNA, 25 bp, Homo sapien
cacagatggggcaaaggcctgtccc

SEQ ID NO: 692389 - DNA, 25 bp, Homo sapien
atagagagtacccacgtctgccacg

SEQ ID NO: 692390 - DNA, 25 bp, Homo sapien
ccttttggctcaggggcggcataac

SEQ ID NO: 692391 - DNA, 25 bp, Homo sapien
gctctctgcagccacgccctttcct

SEQ ID NO: 692392 - DNA, 25 bp, Homo sapien
gcagccacgccctttcctccttgcc

SEQ ID NO: 692393 - DNA, 25 bp, Homo sapien
ctgctctctgcagccacgccctttc

SEQ ID NO: 692394 - DNA, 25 bp, Homo sapien
ttccgcctcggtgtcagtgggtcgc

SEQ ID NO: 692395 - DNA, 25 bp, Homo sapien
ttgccgtcactccgctgcgtgggcg

SEQ ID NO: 692396 - DNA, 25 bp, Homo sapien
ccttcgcgaagggattagcatagtc

SEQ ID NO: 692397 - DNA, 25 bp, Homo sapien
ggcacaggtagaggcccttcgcgaa

SEQ ID NO: 692398 - DNA, 25 bp, Homo sapien
tgaggagcccggaactggtgcaggg

SEQ ID NO: 692399 - DNA, 25 bp, Homo sapien
gtgaggacagcggagagttgaggag

SEQ ID NO: 692400 - DNA, 25 bp, Homo sapien
agagttgaggagcccggaactggtg

SEQ ID NO: 692401 - DNA, 25 bp, Homo sapien
agttgaggagcccggaactggtgca

SEQ ID NO: 692402 - DNA, 25 bp, Homo sapien
cagtcctgttgagctagtggctggc

SEQ ID NO: 692403 - DNA, 25 bp, Homo sapien
tcctgttgagctagtggctggctcc

SEQ ID NO: 692404 - DNA, 25 bp, Homo sapien
gagctagtggctggctccatagttt

SEQ ID NO: 692405 - DNA, 25 bp, Homo sapien
ttgagctagtggctggctccatagt

SEQ ID NO: 692406 - DNA, 25 bp, Homo sapien
ctctctcctgggtgtaaggtgtgta

SEQ ID NO: 692407 - DNA, 25 bp, Homo sapien
ctctcctgggtgtaaggtgtgtact

SEQ ID NO: 692408 - DNA, 25 bp, Homo sapien
tctcctgggtgtaaggtgtgtactt

SEQ ID NO: 692409 - DNA, 25 bp, Homo sapien
tctctcctgggtgtaaggtgtgtac

SEQ ID NO: 692410 - DNA, 25 bp, Homo sapien
gagctcctgcgagtgccctggctct

SEQ ID NO: 692411 - DNA, 25 bp, Homo sapien
tggcttggcctctcttgatgatgta

SEQ ID NO: 692412 - DNA, 25 bp, Homo sapien
tgtgaaagaggacacgggctgcgtc

SEQ ID NO: 692413 - DNA, 25 bp, Homo sapien
cagagctgggagtctcgctgtaatc

SEQ ID NO: 692414 - DNA, 25 bp, Homo sapien
gctcaggaagcacagttggcagcca

SEQ ID NO: 692415 - DNA, 25 bp, Homo sapien
tctcagcacagtggaccccattagg

SEQ ID NO: 692416 - DNA, 25 bp, Homo sapien
agccacgtgggcaggtctgatgtta

SEQ ID NO: 692417 - DNA, 25 bp, Homo sapien
tggtttgaagccctgcctgtaggtg

SEQ ID NO: 692418 - DNA, 25 bp, Homo sapien
catcagagatacacagcggcggcgg

SEQ ID NO: 692419 - DNA, 25 bp, Homo sapien
ggccgttggttttgatcatcagaga

SEQ ID NO: 692420 - DNA, 25 bp, Homo sapien
gggtacaaggtgtctccttctcctc

SEQ ID NO: 692421 - DNA, 25 bp, Homo sapien
ggcccttgctgggttgtgagatgtg

SEQ ID NO: 692422 - DNA, 25 bp, Homo sapien
tgtttgagaggtagctgtggcgcgg

SEQ ID NO: 692423 - DNA, 25 bp, Homo sapien
gcctggcggtgtccttgacggccct

SEQ ID NO: 692424 - DNA, 25 bp, Homo sapien
cttgacggccctccatcgttgtggg

SEQ ID NO: 692425 - DNA, 25 bp, Homo sapien
tcagtgagcacagacggagcaatcc

SEQ ID NO: 692426 - DNA, 25 bp, Homo sapien
agcacagactcaggccccagggttt

SEQ ID NO: 692427 - DNA, 25 bp, Homo sapien
gaggccagcagagatgcccagcaca

SEQ ID NO: 692428 - DNA, 25 bp, Homo sapien
gcccagcacagactcaggccccagg

SEQ ID NO: 692429 - DNA, 25 bp, Homo sapien
tcactggagaaggacaaagggcaag

SEQ ID NO: 692430 - DNA, 25 bp, Homo sapien
atgtggatcagatacgatgattcag

SEQ ID NO: 692431 - DNA, 25 bp, Homo sapien
gaagagcacatgtcaggggcagtgg

SEQ ID NO: 692432 - DNA, 25 bp, Homo sapien
gatcagatacgatgattcagtagaa

SEQ ID NO: 692433 - DNA, 25 bp, Homo sapien
tggctgctgaaggatgaacggagag

SEQ ID NO: 692434 - DNA, 25 bp, Homo sapien
tgtccttaggcgtcgggatcagaaa

SEQ ID NO: 692435 - DNA, 25 bp, Homo sapien
gatgaccctgtcttgcttggcactg

SEQ ID NO: 692436 - DNA, 25 bp, Homo sapien
tgtgcctcggagtcagcatctggaa

SEQ ID NO: 692437 - DNA, 25 bp, Homo sapien
tactgccgctcaaggatctgtcagg

SEQ ID NO: 692438 - DNA, 25 bp, Homo sapien
tcaaaggctcaatttcgaagtcatt

SEQ ID NO: 692439 - DNA, 25 bp, Homo sapien
ttcaaaggctcaatttcgaagtcat

SEQ ID NO: 692440 - DNA, 25 bp, Homo sapien
cggcttcaaaggctcaatttcgaag

SEQ ID NO: 692441 - DNA, 25 bp, Homo sapien
gcttcaaaggctcaatttcgaagtc

SEQ ID NO: 692442 - DNA, 25 bp, Homo sapien
tgtttgcctcggatgcactctcaga

SEQ ID NO: 692443 - DNA, 25 bp, Homo sapien
tctgtcacagagagcgcagccttga

SEQ ID NO: 692444 - DNA, 25 bp, Homo sapien
ggtgtgactgatactttcccgaata

SEQ ID NO: 692445 - DNA, 25 bp, Homo sapien
acacagcggagggattgtcaggctc

SEQ ID NO: 692446 - DNA, 25 bp, Homo sapien
tgagggtctcctggtgcaagcatga

SEQ ID NO: 692447 - DNA, 25 bp, Homo sapien
tctgctgggtgtgaggcaaaacgcc

SEQ ID NO: 692448 - DNA, 25 bp, Homo sapien
cagaactgtgaatggcgccctgtta

SEQ ID NO: 692449 - DNA, 25 bp, Homo sapien
gaagcgacttcagcgtgtggaccat

SEQ ID NO: 692450 - DNA, 25 bp, Homo sapien
gatttggtttgcttcagatggactc

SEQ ID NO: 692451 - DNA, 25 bp, Homo sapien
gaaggtgtgtcagcactgcctgtca

SEQ ID NO: 692452 - DNA, 25 bp, Homo sapien
taaagagtttaaaagtgcgtgccca

SEQ ID NO: 692453 - DNA, 25 bp, Homo sapien
ccattttgggaggatgcgttgttag

SEQ ID NO: 692454 - DNA, 25 bp, Homo sapien
tcttcataaagcttcacttgggatc

SEQ ID NO: 692455 - DNA, 25 bp, Homo sapien
ccctgatcaaggatgtaattctaat

SEQ ID NO: 692456 - DNA, 25 bp, Homo sapien
ttcactctgctgtgccgtctcttca

SEQ ID NO: 692457 - DNA, 25 bp, Homo sapien
cacttgggatcatcgtcttcattaa

SEQ ID NO: 692458 - DNA, 25 bp, Homo sapien
aaactcccgacctcaagtagtctgc

SEQ ID NO: 692459 - DNA, 25 bp, Homo sapien
caaactcccgacctcaagtagtctg

SEQ ID NO: 692460 - DNA, 25 bp, Homo sapien
tcccgacctcaagtagtctgcctgc

SEQ ID NO: 692461 - DNA, 25 bp, Homo sapien
actcccgacctcaagtagtctgcct

SEQ ID NO: 692462 - DNA, 25 bp, Homo sapien
acttctggaagtgaacactcgtttt

SEQ ID NO: 692463 - DNA, 25 bp, Homo sapien
cacctgcgtgtgtcttggcgtccac

SEQ ID NO: 692464 - DNA, 25 bp, Homo sapien
tgaacactcgttttgaaagcttgat

SEQ ID NO: 692465 - DNA, 25 bp, Homo sapien
cacatcacacctgtgacggaagcac

SEQ ID NO: 692466 - DNA, 25 bp, Homo sapien
cagactgtggttgtgaaccggctcc

SEQ ID NO: 692467 - DNA, 25 bp, Homo sapien
tgtggcgttattcaaagaggagact

SEQ ID NO: 692468 - DNA, 25 bp, Homo sapien
gtgtctgaacagaaccgctccgtga

SEQ ID NO: 692469 - DNA, 25 bp, Homo sapien
actggtagctgggtctgaggattca

SEQ ID NO: 692470 - DNA, 25 bp, Homo sapien
ggacatccggcattttgctggtgca

SEQ ID NO: 692471 - DNA, 25 bp, Homo sapien
ctgatggacatccggcattttgctg

SEQ ID NO: 692472 - DNA, 25 bp, Homo sapien
atggacatccggcattttgctggtg

SEQ ID NO: 692473 - DNA, 25 bp, Homo sapien
tgatggacatccggcattttgctgg

SEQ ID NO: 692474 - DNA, 25 bp, Homo sapien
cactctgcccgacaagcagtctggt

SEQ ID NO: 692475 - DNA, 25 bp, Homo sapien
tctgcccgacaagcagtctggtgca

SEQ ID NO: 692476 - DNA, 25 bp, Homo sapien
tgcaggggacgcaaatgtcagaccc

SEQ ID NO: 692477 - DNA, 25 bp, Homo sapien
tgcccgacaagcagtctggtgcagg

SEQ ID NO: 692478 - DNA, 25 bp, Homo sapien
aggacctgccccggtttgccaggca

SEQ ID NO: 692479 - DNA, 25 bp, Homo sapien
acctgccccggtttgccaggcacat

SEQ ID NO: 692480 - DNA, 25 bp, Homo sapien
gacctgccccggtttgccaggcaca

SEQ ID NO: 692481 - DNA, 25 bp, Homo sapien
gtccacgtgtctgagcatggagctg

SEQ ID NO: 692482 - DNA, 25 bp, Homo sapien
gccagctctgggtacgaagttcact

SEQ ID NO: 692483 - DNA, 25 bp, Homo sapien
gagagttcgatccatctgcaggaag

SEQ ID NO: 692484 - DNA, 25 bp, Homo sapien
cagtcggtccttcgcttggtgagct

SEQ ID NO: 692485 - DNA, 25 bp, Homo sapien
tggccagatgtttaggagcacgacg

SEQ ID NO: 692486 - DNA, 25 bp, Homo sapien
caggagcgtaagctgagcagactca

SEQ ID NO: 692487 - DNA, 25 bp, Homo sapien
gcagagggacacacggtccacaaga

SEQ ID NO: 692488 - DNA, 25 bp, Homo sapien
cagtcgtcccagtggtcagtgtggc

SEQ ID NO: 692489 - DNA, 25 bp, Homo sapien
cttcgtgcttttcaggagcgtaagc

SEQ ID NO: 692490 - DNA, 25 bp, Homo sapien
cctgctggtgtagaacgtgtttttc

SEQ ID NO: 692491 - DNA, 25 bp, Homo sapien
cacggttttgccaagaaatagtgtc

SEQ ID NO: 692492 - DNA, 25 bp, Homo sapien
cctgcagcttccatagccattcggg

SEQ ID NO: 692493 - DNA, 25 bp, Homo sapien
acagatggcggccacaatttgccac

SEQ ID NO: 692494 - DNA, 25 bp, Homo sapien
attgtgagcgcctgccgtggccctg

SEQ ID NO: 692495 - DNA, 25 bp, Homo sapien
cacacgcgtgtgctcgattgtgagc

SEQ ID NO: 692496 - DNA, 25 bp, Homo sapien
cagctctgtgagctcgcaggtcgat

SEQ ID NO: 692497 - DNA, 25 bp, Homo sapien
tgctgagcgggccagttcgctgcct

SEQ ID NO: 692498 - DNA, 25 bp, Homo sapien
ggagacgggtgtgtaaagaaccgca

SEQ ID NO: 692499 - DNA, 25 bp, Homo sapien
ggtgagagggcttggtctggcagca

SEQ ID NO: 692500 - DNA, 25 bp, Homo sapien
gagacgggtgtgtaaagaaccgcac

SEQ ID NO: 692501 - DNA, 25 bp, Homo sapien
agtcaacgagtatctgaacaacccc

SEQ ID NO: 692502 - DNA, 25 bp, Homo sapien
cagaccaggatgaggagcattgccg

SEQ ID NO: 692503 - DNA, 25 bp, Homo sapien
gtgtggccaggcacacgcgcctctg

SEQ ID NO: 692504 - DNA, 25 bp, Homo sapien
cacgaactctctgcgctaggcggta

SEQ ID NO: 692505 - DNA, 25 bp, Homo sapien
gggaggccagagtctactgtggatg

SEQ ID NO: 692506 - DNA, 25 bp, Homo sapien
cagagtctactgtggatgactcgcc

SEQ ID NO: 692507 - DNA, 25 bp, Homo sapien
ggccagagtctactgtggatgactc

SEQ ID NO: 692508 - DNA, 25 bp, Homo sapien
gagtctactgtggatgactcgcccc

SEQ ID NO: 692509 - DNA, 25 bp, Homo sapien
ctttctggtgggctagagggcatcc

SEQ ID NO: 692510 - DNA, 25 bp, Homo sapien
ccctttgggaatgcgcttgtttgcc

SEQ ID NO: 692511 - DNA, 25 bp, Homo sapien
acccgtgtgcttggcccttcagaaa

SEQ ID NO: 692512 - DNA, 25 bp, Homo sapien
agctcatggagtgcagacccgtgtg

SEQ ID NO: 692513 - DNA, 25 bp, Homo sapien
ccagtgatgattggtgacaaatctc

SEQ ID NO: 692514 - DNA, 25 bp, Homo sapien
aatttttaaggaggaaccagtgatg

SEQ ID NO: 692515 - DNA, 25 bp, Homo sapien
tctctcacaattaaaaatgggtgga

SEQ ID NO: 692516 - DNA, 25 bp, Homo sapien
aaatctctcacaattaaaaatgggt

SEQ ID NO: 692517 - DNA, 25 bp, Homo sapien
cacccgtagagcttagagtccaaat

SEQ ID NO: 692518 - DNA, 25 bp, Homo sapien
tagacacctatgaggcgagcacaag

SEQ ID NO: 692519 - DNA, 25 bp, Homo sapien
agaagctataacttaaaccatcttc

SEQ ID NO: 692520 - DNA, 25 bp, Homo sapien
ttcagaaacaagatctgtcacccgt

SEQ ID NO: 692521 - DNA, 25 bp, Homo sapien
gacctccacagagcgagtcatggcg

SEQ ID NO: 692522 - DNA, 25 bp, Homo sapien
tccacagagcgagtcatggcgacgg

SEQ ID NO: 692523 - DNA, 25 bp, Homo sapien
tcctcatgcagccgcagtaggcggg

SEQ ID NO: 692524 - DNA, 25 bp, Homo sapien
tggacctccacagagcgagtcatgg

SEQ ID NO: 692525 - DNA, 25 bp, Homo sapien
gccggagcacattcccgcttttcat

SEQ ID NO: 692526 - DNA, 25 bp, Homo sapien
aggcaggcccccgaggtacagaggg

SEQ ID NO: 692527 - DNA, 25 bp, Homo sapien
agccggagcacattcccgcttttca

SEQ ID NO: 692528 - DNA, 25 bp, Homo sapien
tgtggttgctctgcgcgtccacctc

SEQ ID NO: 692529 - DNA, 25 bp, Homo sapien
ctgctccgtcatccgcccgcagcag

SEQ ID NO: 692530 - DNA, 25 bp, Homo sapien
cacagcactgaggggcgggtcactg

SEQ ID NO: 692531 - DNA, 25 bp, Homo sapien
gacgtggagaactcccctgctccgt

SEQ ID NO: 692532 - DNA, 25 bp, Homo sapien
gggcgggtcactgacgtggagaact

SEQ ID NO: 692533 - DNA, 25 bp, Homo sapien
ctcggtcacctgcaactgcaagtag

SEQ ID NO: 692534 - DNA, 25 bp, Homo sapien
ttgcttctcggtcacctgcaactgc

SEQ ID NO: 692535 - DNA, 25 bp, Homo sapien
gcttctcggtcacctgcaactgcaa

SEQ ID NO: 692536 - DNA, 25 bp, Homo sapien
ttctcggtcacctgcaactgcaagt

SEQ ID NO: 692537 - DNA, 25 bp, Homo sapien
tcagtccggtgactgccaggggccg

SEQ ID NO: 692538 - DNA, 25 bp, Homo sapien
caggcccacatcaggcagtgtagct

SEQ ID NO: 692539 - DNA, 25 bp, Homo sapien
ccggtgactgccaggggccgcacct

SEQ ID NO: 692540 - DNA, 25 bp, Homo sapien
aggcccacatcaggcagtgtagctc

SEQ ID NO: 692541 - DNA, 25 bp, Homo sapien
gcccctccccagaacctcctggagc

SEQ ID NO: 692542 - DNA, 25 bp, Homo sapien
tgtgatggagaagaaagggggggcc

SEQ ID NO: 692543 - DNA, 25 bp, Homo sapien
ctgcggggaggggttgtgatggaga

SEQ ID NO: 692544 - DNA, 25 bp, Homo sapien
cccagaacctcctggagccccctgc

SEQ ID NO: 692545 - DNA, 25 bp, Homo sapien
taaagtgataactcccccgctgcct

SEQ ID NO: 692546 - DNA, 25 bp, Homo sapien
ctaaagtgataactcccccgctgcc

SEQ ID NO: 692547 - DNA, 25 bp, Homo sapien
tcagtctcttcacacagccgctgaa

SEQ ID NO: 692548 - DNA, 25 bp, Homo sapien
gcctcagtctcttcacacagccgct

SEQ ID NO: 692549 - DNA, 25 bp, Homo sapien
gtctcttcacacagccgctgaaccc

SEQ ID NO: 692550 - DNA, 25 bp, Homo sapien
tctcttcacacagccgctgaacccg

SEQ ID NO: 692551 - DNA, 25 bp, Homo sapien
ctataggagcagaccgggcagggat

SEQ ID NO: 692552 - DNA, 25 bp, Homo sapien
tataggagcagaccgggcagggatc

SEQ ID NO: 692553 - DNA, 25 bp, Homo sapien
agcagaccgggcagggatcagggcc

SEQ ID NO: 692554 - DNA, 25 bp, Homo sapien
agaccgggcagggatcagggcccag

SEQ ID NO: 692555 - DNA, 25 bp, Homo sapien
ggttcttctcccagcgcacggagac

SEQ ID NO: 692556 - DNA, 25 bp, Homo sapien
gagtcccgaggccttccatctgtgc

SEQ ID NO: 692557 - DNA, 25 bp, Homo sapien
catctgtgcaacgaagtggccattg

SEQ ID NO: 692558 - DNA, 25 bp, Homo sapien
ttgctcaggaagagcgccagggagg

SEQ ID NO: 692559 - DNA, 25 bp, Homo sapien
tctgggcgcggagccgagtcccgag

SEQ ID NO: 692560 - DNA, 25 bp, Homo sapien
gcctcagacgggcagtgaagaggag

SEQ ID NO: 692561 - DNA, 25 bp, Homo sapien
ctgccgggcctcagacgggcagtga

SEQ ID NO: 692562 - DNA, 25 bp, Homo sapien
ccgggcctcagacgggcagtgaaga

SEQ ID NO: 692563 - DNA, 25 bp, Homo sapien
ggcctcagacgggcagtgaagagga

SEQ ID NO: 692564 - DNA, 25 bp, Homo sapien
gaggacgtgcatggagagactgggc

SEQ ID NO: 692565 - DNA, 25 bp, Homo sapien
cttcgcgggaggacgtgcatggaga

SEQ ID NO: 692566 - DNA, 25 bp, Homo sapien
gcgggaggacgtgcatggagagact

SEQ ID NO: 692567 - DNA, 25 bp, Homo sapien
tcgcgggaggacgtgcatggagaga

SEQ ID NO: 692568 - DNA, 25 bp, Homo sapien
agttcctatgtcgggccaggatgcc

SEQ ID NO: 692569 - DNA, 25 bp, Homo sapien
cagttcctatgtcgggccaggatgc

SEQ ID NO: 692570 - DNA, 25 bp, Homo sapien
ggcaggatgccgggcgggctgacgg

SEQ ID NO: 692571 - DNA, 25 bp, Homo sapien
gttcctatgtcgggccaggatgccc

SEQ ID NO: 692572 - DNA, 25 bp, Homo sapien
cacattgacgctgcccaggttctgc

SEQ ID NO: 692573 - DNA, 25 bp, Homo sapien
tgcacagcccgtgctcacattgacg

SEQ ID NO: 692574 - DNA, 25 bp, Homo sapien
ggttctgctgcagatcaaatacgcg

SEQ ID NO: 692575 - DNA, 25 bp, Homo sapien
gcagatcaaatacgcgctgtgggcc

SEQ ID NO: 692576 - DNA, 25 bp, Homo sapien
gcacgaagacgttgctgatgcagcc

SEQ ID NO: 692577 - DNA, 25 bp, Homo sapien
ctgctggagctggtcatcgacatac

SEQ ID NO: 692578 - DNA, 25 bp, Homo sapien
gttgtaaatggtgccagactcaggc

SEQ ID NO: 692579 - DNA, 25 bp, Homo sapien
tgctgatgcagccactgaagttgta

SEQ ID NO: 692580 - DNA, 25 bp, Homo sapien
ttttcacttcagtcctcaggagctg

SEQ ID NO: 692581 - DNA, 25 bp, Homo sapien
cccgtggcattgctgtagaaggcga

SEQ ID NO: 692582 - DNA, 25 bp, Homo sapien
gcgaagcccgcttgagttttcactt

SEQ ID NO: 692583 - DNA, 25 bp, Homo sapien
tcaggagctgtaggctcacacggcc

SEQ ID NO: 692584 - DNA, 25 bp, Homo sapien
acgcccggtagtagagcagggcact

SEQ ID NO: 692585 - DNA, 25 bp, Homo sapien
agacgttgccagtgagcggtgccac

SEQ ID NO: 692586 - DNA, 25 bp, Homo sapien
agccgaagccggagtagacgttgcc

SEQ ID NO: 692587 - DNA, 25 bp, Homo sapien
ccacgttcgagagcgccaggcgaag

SEQ ID NO: 692588 - DNA, 25 bp, Homo sapien
ggcgctcacgcctgtcgtgttcagc

SEQ ID NO: 692589 - DNA, 25 bp, Homo sapien
tcacgcctgtcgtgttcagccgctt

SEQ ID NO: 692590 - DNA, 25 bp, Homo sapien
ctgtcgtgttcagccgcttgaggtc

SEQ ID NO: 692591 - DNA, 25 bp, Homo sapien
agccggcgctcacgcctgtcgtgtt

SEQ ID NO: 692592 - DNA, 25 bp, Homo sapien
ttgatgcctttgacgcagccacgga

SEQ ID NO: 692593 - DNA, 25 bp, Homo sapien
ctttgacgcagccacggactgagcc

SEQ ID NO: 692594 - DNA, 25 bp, Homo sapien
tgagcctccggtggggaagagccgt

SEQ ID NO: 692595 - DNA, 25 bp, Homo sapien
gggccttgatgcctttgacgcagcc

SEQ ID NO: 692596 - DNA, 25 bp, Homo sapien
cctgctccacgctgtacaccgtggc

SEQ ID NO: 692597 - DNA, 25 bp, Homo sapien
acgcaccagcacacgcttgcggctg

SEQ ID NO: 692598 - DNA, 25 bp, Homo sapien
ccccaggtagtaggcgtcggccagc

SEQ ID NO: 692599 - DNA, 25 bp, Homo sapien
tgccccccagcaggaacacctggat

SEQ ID NO: 692600 - DNA, 25 bp, Homo sapien
gccccgcccccatcgttccatctcc

SEQ ID NO: 692601 - DNA, 25 bp, Homo sapien
tgccccgcccccatcgttccatctc

SEQ ID NO: 692602 - DNA, 25 bp, Homo sapien
ccccgcccccatcgttccatctcct

SEQ ID NO: 692603 - DNA, 25 bp, Homo sapien
tgccttcttgcacggccaagcacag

SEQ ID NO: 692604 - DNA, 25 bp, Homo sapien
ctttttcaggccagccccaaagtca

SEQ ID NO: 692605 - DNA, 25 bp, Homo sapien
ggctgcagtgggacggcctttttca

SEQ ID NO: 692606 - DNA, 25 bp, Homo sapien
tacaacagcacgaggctgccttctt

SEQ ID NO: 692607 - DNA, 25 bp, Homo sapien
aggaagaagagcaccccgctgtagg

SEQ ID NO: 692608 - DNA, 25 bp, Homo sapien
ggaagaagagcaccccgctgtagga

SEQ ID NO: 692609 - DNA, 25 bp, Homo sapien
tgctgcttcaggaagaagagcaccc

SEQ ID NO: 692610 - DNA, 25 bp, Homo sapien
ttcaggaagaagagcaccccgctgt

SEQ ID NO: 692611 - DNA, 25 bp, Homo sapien
caggtaggagccgtccgtgagccac

SEQ ID NO: 692612 - DNA, 25 bp, Homo sapien
tgatgcgggcgaagccggtgccgtc

SEQ ID NO: 692613 - DNA, 25 bp, Homo sapien
tctgactgtcgaagctgatgcgggc

SEQ ID NO: 692614 - DNA, 25 bp, Homo sapien
cgcttggtggtgctgatctgactgt

SEQ ID NO: 692615 - DNA, 25 bp, Homo sapien
cctctcgaagttgtagaggctgacc

SEQ ID NO: 692616 - DNA, 25 bp, Homo sapien
acagccgtgtccagctggaaggtcc

SEQ ID NO: 692617 - DNA, 25 bp, Homo sapien
ctcattcagcgtgtccatctcgatg

SEQ ID NO: 692618 - DNA, 25 bp, Homo sapien
tgtccatctcgatgcagccccggta

SEQ ID NO: 692619 - DNA, 25 bp, Homo sapien
cttcagactacagcaggacggactg

SEQ ID NO: 692620 - DNA, 25 bp, Homo sapien
actacagcaggacggactgaggcaa

SEQ ID NO: 692621 - DNA, 25 bp, Homo sapien
cctcccctccaggatggaccaaggg

SEQ ID NO: 692622 - DNA, 25 bp, Homo sapien
gaccaaggggacttcagactacagc

SEQ ID NO: 692623 - DNA, 25 bp, Homo sapien
cccgacgtagaagacgaagtcgtct

SEQ ID NO: 692624 - DNA, 25 bp, Homo sapien
cactgtgacggacatgtggccaaac

SEQ ID NO: 692625 - DNA, 25 bp, Homo sapien
tagaagacgaagtcgtctggccgca

SEQ ID NO: 692626 - DNA, 25 bp, Homo sapien
tcctggatcatctgtctctccactg

SEQ ID NO: 692627 - DNA, 25 bp, Homo sapien
agagatggcgaacgggcaagggccc

SEQ ID NO: 692628 - DNA, 25 bp, Homo sapien
ggccctgcagttggaggcatccggc

SEQ ID NO: 692629 - DNA, 25 bp, Homo sapien
ggcgaacgggcaagggccctgcagt

SEQ ID NO: 692630 - DNA, 25 bp, Homo sapien
gggagagatggcgaacgggcaaggg

SEQ ID NO: 692631 - DNA, 25 bp, Homo sapien
tcttgtcacgcagagacacacccat

SEQ ID NO: 692632 - DNA, 25 bp, Homo sapien
tgtcctcatcgatgcttaggactgc

SEQ ID NO: 692633 - DNA, 25 bp, Homo sapien
tgtccaggctgacagctgcgaactg

SEQ ID NO: 692634 - DNA, 25 bp, Homo sapien
agctgatacacccagtgcaccttct

SEQ ID NO: 692635 - DNA, 25 bp, Homo sapien
agctcgggccgcatccacccagcca

SEQ ID NO: 692636 - DNA, 25 bp, Homo sapien
agtgacagacacacagtcgggatgg

SEQ ID NO: 692637 - DNA, 25 bp, Homo sapien
gcagtgacagacacacagtcgggat

SEQ ID NO: 692638 - DNA, 25 bp, Homo sapien
agggaccaggcaccgctcatttcca

SEQ ID NO: 692639 - DNA, 25 bp, Homo sapien
catgtacatcacaaagcgatcctcg

SEQ ID NO: 692640 - DNA, 25 bp, Homo sapien
cccgttgaacttcatgggcaccttg

SEQ ID NO: 692641 - DNA, 25 bp, Homo sapien
tgtaggcagcaaggtcggcaagatc

SEQ ID NO: 692642 - DNA, 25 bp, Homo sapien
ccctgagcgcccgttgaacttcatg

SEQ ID NO: 692643 - DNA, 25 bp, Homo sapien
cacggtccatcagcgtccaccacca

SEQ ID NO: 692644 - DNA, 25 bp, Homo sapien
ctgcggggcacggtccatcagcgtc

SEQ ID NO: 692645 - DNA, 25 bp, Homo sapien
gggcacggtccatcagcgtccacca

SEQ ID NO: 692646 - DNA, 25 bp, Homo sapien
gcggggcacggtccatcagcgtcca

SEQ ID NO: 692647 - DNA, 25 bp, Homo sapien
cctgggcaatgagctctcgcacgcg

SEQ ID NO: 692648 - DNA, 25 bp, Homo sapien
gtgcaccccacggttctccaggatg

SEQ ID NO: 692649 - DNA, 25 bp, Homo sapien
tcgcacgcggccaatgctggcggac

SEQ ID NO: 692650 - DNA, 25 bp, Homo sapien
caggctggcgttgtgcaccccacgg

SEQ ID NO: 692651 - DNA, 25 bp, Homo sapien
cagctgggactgcacacgggtggcg

SEQ ID NO: 692652 - DNA, 25 bp, Homo sapien
agccttggcatgtgcgatcttcttg

SEQ ID NO: 692653 - DNA, 25 bp, Homo sapien
ctgcacacgggtggcggtgtcctgg

SEQ ID NO: 692654 - DNA, 25 bp, Homo sapien
agtggcctgcgtcaagcactgcctg

SEQ ID NO: 692655 - DNA, 25 bp, Homo sapien
gaaactgggtgaggcacatcgtcct

SEQ ID NO: 692656 - DNA, 25 bp, Homo sapien
cttgctgggaacagtccgcagccac

SEQ ID NO: 692657 - DNA, 25 bp, Homo sapien
gctgctcagtgcaatccaaacccat

SEQ ID NO: 692658 - DNA, 25 bp, Homo sapien
ccctatggatcgtgtgagaccctca

SEQ ID NO: 692659 - DNA, 25 bp, Homo sapien
ctggtccttcttggcccggacatct

SEQ ID NO: 692660 - DNA, 25 bp, Homo sapien
catggcctgcgccgcctggatgtgc

SEQ ID NO: 692661 - DNA, 25 bp, Homo sapien
tcttggcccggacatctcggagctg

SEQ ID NO: 692662 - DNA, 25 bp, Homo sapien
cagctggtccttcttggcccggaca

SEQ ID NO: 692663 - DNA, 25 bp, Homo sapien
catggcctcttctagtgcagtgctg

SEQ ID NO: 692664 - DNA, 25 bp, Homo sapien
ggcctcttctagtgcagtgctgttg

SEQ ID NO: 692665 - DNA, 25 bp, Homo sapien
gcatggcctcttctagtgcagtgct

SEQ ID NO: 692666 - DNA, 25 bp, Homo sapien
ctcttctagtgcagtgctgttggcc

SEQ ID NO: 692667 - DNA, 25 bp, Homo sapien
tgtggatgccagggcagaccgtggc

SEQ ID NO: 692668 - DNA, 25 bp, Homo sapien
gcagaccgtggctcagacacgcagg

SEQ ID NO: 692669 - DNA, 25 bp, Homo sapien
ggcagaccgtggctcagacacgcag

SEQ ID NO: 692670 - DNA, 25 bp, Homo sapien
gatgcggctgtaggcgttggaggcc

SEQ ID NO: 692671 - DNA, 25 bp, Homo sapien
ccacgtgtggtccgcctgctgcagg

SEQ ID NO: 692672 - DNA, 25 bp, Homo sapien
cgcccacgtgtggtccgcctgctgc

SEQ ID NO: 692673 - DNA, 25 bp, Homo sapien
gcgttggaggcctcgatggccctct

SEQ ID NO: 692674 - DNA, 25 bp, Homo sapien
ccgccggggagaaggtctgcatcct

SEQ ID NO: 692675 - DNA, 25 bp, Homo sapien
agcagtggggtccgagccccatcca

SEQ ID NO: 692676 - DNA, 25 bp, Homo sapien
ggcctccactagacgcagcttgctg

SEQ ID NO: 692677 - DNA, 25 bp, Homo sapien
tggacagattgagtgccagctggcc

SEQ ID NO: 692678 - DNA, 25 bp, Homo sapien
ctgctcacagccacctgatccacga

SEQ ID NO: 692679 - DNA, 25 bp, Homo sapien
tggaatttgagtggacttagcccct

SEQ ID NO: 692680 - DNA, 25 bp, Homo sapien
ctggaatttgagtggacttagcccc

SEQ ID NO: 692681 - DNA, 25 bp, Homo sapien
gctcacagccacctgatccacgacc

SEQ ID NO: 692682 - DNA, 25 bp, Homo sapien
acgcaagtgtgcacacaaagctgcc

SEQ ID NO: 692683 - DNA, 25 bp, Homo sapien
cacaaagctgcccacgggcctggga

SEQ ID NO: 692684 - DNA, 25 bp, Homo sapien
agggcgggctctgcacgcaagtgtg

SEQ ID NO: 692685 - DNA, 25 bp, Homo sapien
gcgggctctgcacgcaagtgtgcac

SEQ ID NO: 692686 - DNA, 25 bp, Homo sapien
tccaggctgtgcagcaatctgaaga

SEQ ID NO: 692687 - DNA, 25 bp, Homo sapien
gggtggcattgtcccgggacagctc

SEQ ID NO: 692688 - DNA, 25 bp, Homo sapien
gctggccagggtgtccctagccgca

SEQ ID NO: 692689 - DNA, 25 bp, Homo sapien
tccctagccgcatgcagagtggcct

SEQ ID NO: 692690 - DNA, 25 bp, Homo sapien
gcccggttcaaagcctctcgcaggt

SEQ ID NO: 692691 - DNA, 25 bp, Homo sapien
cgcaggtccatgaggccggcctcgt

SEQ ID NO: 692692 - DNA, 25 bp, Homo sapien
gtgtggcgtccactgcccggttcaa

SEQ ID NO: 692693 - DNA, 25 bp, Homo sapien
tcgcgggtttgtgtggccagtgcct

SEQ ID NO: 692694 - DNA, 25 bp, Homo sapien
gctccacctcggccagtgtccggag

SEQ ID NO: 692695 - DNA, 25 bp, Homo sapien
ccacctcggccagtgtccggagcag

SEQ ID NO: 692696 - DNA, 25 bp, Homo sapien
ccgctccacctcggccagtgtccgg

SEQ ID NO: 692697 - DNA, 25 bp, Homo sapien
tccacctcggccagtgtccggagca

SEQ ID NO: 692698 - DNA, 25 bp, Homo sapien
gctcacctgatggagccgaggcatt

SEQ ID NO: 692699 - DNA, 25 bp, Homo sapien
tcacctgatggagccgaggcattgg

SEQ ID NO: 692700 - DNA, 25 bp, Homo sapien
ctgctcacctgatggagccgaggca

SEQ ID NO: 692701 - DNA, 25 bp, Homo sapien
cctgatggagccgaggcattggcca

SEQ ID NO: 692702 - DNA, 25 bp, Homo sapien
caattggctcgcctggtctcgggtc

SEQ ID NO: 692703 - DNA, 25 bp, Homo sapien
ggtgccggccagcaattggctcgcc

SEQ ID NO: 692704 - DNA, 25 bp, Homo sapien
tggccgccaacagcgtcttcgcatg

SEQ ID NO: 692705 - DNA, 25 bp, Homo sapien
agggtgcggtccacagcccggatgg

SEQ ID NO: 692706 - DNA, 25 bp, Homo sapien
tagccgccgtgcgtcctgcccgagg

SEQ ID NO: 692707 - DNA, 25 bp, Homo sapien
gccgtgcgtcctgcccgaggcttgt

SEQ ID NO: 692708 - DNA, 25 bp, Homo sapien
tggccgcctagccgccgtgcgtcct

SEQ ID NO: 692709 - DNA, 25 bp, Homo sapien
gcctagccgccgtgcgtcctgcccg

SEQ ID NO: 692710 - DNA, 25 bp, Homo sapien
ccagctgctgtgccgtctcatggcg

SEQ ID NO: 692711 - DNA, 25 bp, Homo sapien
gtgccgtctcatggcgggggcccag

SEQ ID NO: 692712 - DNA, 25 bp, Homo sapien
agctgctgtgccgtctcatggcggg

SEQ ID NO: 692713 - DNA, 25 bp, Homo sapien
ctgtgccgtctcatggcgggggccc

SEQ ID NO: 692714 - DNA, 25 bp, Homo sapien
gtgggaggcgaaaggtgaaggcctg

SEQ ID NO: 692715 - DNA, 25 bp, Homo sapien
ctgtgggaggcgaaaggtgaaggcc

SEQ ID NO: 692716 - DNA, 25 bp, Homo sapien
tgtgggaggcgaaaggtgaaggcct

SEQ ID NO: 692717 - DNA, 25 bp, Homo sapien
ccacgcagttgctcgtgaatggcgg

SEQ ID NO: 692718 - DNA, 25 bp, Homo sapien
gttcagcctgtgcagacgggcccag

SEQ ID NO: 692719 - DNA, 25 bp, Homo sapien
gctggcattgatgccacgcagttgc

SEQ ID NO: 692720 - DNA, 25 bp, Homo sapien
ctgcaggtcagcgatggaggcgttc

SEQ ID NO: 692721 - DNA, 25 bp, Homo sapien
cggcccgtgtgagggtcacagcggc

SEQ ID NO: 692722 - DNA, 25 bp, Homo sapien
cgtgtgagggtcacagcggccccca

SEQ ID NO: 692723 - DNA, 25 bp, Homo sapien
ggcccgcctggaacaggcacctgat

SEQ ID NO: 692724 - DNA, 25 bp, Homo sapien
agccccggggggcagttgcagcggc

SEQ ID NO: 692725 - DNA, 25 bp, Homo sapien
cctcctgtgaccggccagcactcac

SEQ ID NO: 692726 - DNA, 25 bp, Homo sapien
gtccctggtcggcagtggcactgtc

SEQ ID NO: 692727 - DNA, 25 bp, Homo sapien
cccgcagccatcgaaaccaaaatgt

SEQ ID NO: 692728 - DNA, 25 bp, Homo sapien
cggtccacaagcacacgggcggcag

SEQ ID NO: 692729 - DNA, 25 bp, Homo sapien
gggtggcactcggagccctcggcgg

SEQ ID NO: 692730 - DNA, 25 bp, Homo sapien
ggcagtgcccgctgtgggggtcgca

SEQ ID NO: 692731 - DNA, 25 bp, Homo sapien
gtcccacatggggtacagtcgcacc

SEQ ID NO: 692732 - DNA, 25 bp, Homo sapien
gtcacgcccgccttgcacaggcagt

SEQ ID NO: 692733 - DNA, 25 bp, Homo sapien
gcagcggtcacagcgccgcccagtc

SEQ ID NO: 692734 - DNA, 25 bp, Homo sapien
gcatccctcccagcccgacgcctac

SEQ ID NO: 692735 - DNA, 25 bp, Homo sapien
gcagttgccgggcagcagggcgttg

SEQ ID NO: 692736 - DNA, 25 bp, Homo sapien
ttgccgctgcagtcgcatggctggc

SEQ ID NO: 692737 - DNA, 25 bp, Homo sapien
ggttcccaaagaatccgggcgcaca

SEQ ID NO: 692738 - DNA, 25 bp, Homo sapien
ggtcgcagtcgctgaagagcaagtt

SEQ ID NO: 692739 - DNA, 25 bp, Homo sapien
tcgcaggacacagccctcggcgaag

SEQ ID NO: 692740 - DNA, 25 bp, Homo sapien
caggaggcacctgcataaccaggtt

SEQ ID NO: 692741 - DNA, 25 bp, Homo sapien
cacctgcataaccaggtttgcagag

SEQ ID NO: 692742 - DNA, 25 bp, Homo sapien
gaggcactgggtgcggccgcctcgc

SEQ ID NO: 692743 - DNA, 25 bp, Homo sapien
gggccccttcggtgttgtgctggca

SEQ ID NO: 692744 - DNA, 25 bp, Homo sapien
ggtcgtccctgctgctcacgaagcc

SEQ ID NO: 692745 - DNA, 25 bp, Homo sapien
tccctgctgctcacgaagccagcct

SEQ ID NO: 692746 - DNA, 25 bp, Homo sapien
gcctggcagcgctcacagtgggccc

SEQ ID NO: 692747 - DNA, 25 bp, Homo sapien
cagagtggacagtcagagctatggt

SEQ ID NO: 692748 - DNA, 25 bp, Homo sapien
gtcttccctggcacacttgactgtg

SEQ ID NO: 692749 - DNA, 25 bp, Homo sapien
catcctactgccgagtctgtgcagc

SEQ ID NO: 692750 - DNA, 25 bp, Homo sapien
gactgtgccttcagtgaatgctgcc

SEQ ID NO: 692751 - DNA, 25 bp, Homo sapien
ctttgacgtcccgatagaagccggg

SEQ ID NO: 692752 - DNA, 25 bp, Homo sapien
aggaagagacctttgacgtcccgat

SEQ ID NO: 692753 - DNA, 25 bp, Homo sapien
aggcagcggtctgagtgtccatggc

SEQ ID NO: 692754 - DNA, 25 bp, Homo sapien
gagacctttgacgtcccgatagaag

SEQ ID NO: 692755 - DNA, 25 bp, Homo sapien
tgtctcgggaatgaccaggccttgg

SEQ ID NO: 692756 - DNA, 25 bp, Homo sapien
cagaaggagcaaagttacagcagac

SEQ ID NO: 692757 - DNA, 25 bp, Homo sapien
cagggcagattagcagctggacaga

SEQ ID NO: 692758 - DNA, 25 bp, Homo sapien
catggtcaccgctgggtcagaggct

SEQ ID NO: 692759 - DNA, 25 bp, Homo sapien
atcatgagctcctcgcgggacacag

SEQ ID NO: 692760 - DNA, 25 bp, Homo sapien
aggctggccagcaccatcatgagct

SEQ ID NO: 692761 - DNA, 25 bp, Homo sapien
ggacacagtgttgcgcgtctccgta

SEQ ID NO: 692762 - DNA, 25 bp, Homo sapien
aagagggcacggatctgcagctgct

SEQ ID NO: 692763 - DNA, 25 bp, Homo sapien
ctgcccacggtgaacgtggccaggc

SEQ ID NO: 692764 - DNA, 25 bp, Homo sapien
cacggtgaacgtggccaggcgtggg

SEQ ID NO: 692765 - DNA, 25 bp, Homo sapien
cagctgcccacggtgaacgtggcca

SEQ ID NO: 692766 - DNA, 25 bp, Homo sapien
ggcgtggggtatgccggctccagga

SEQ ID NO: 692767 - DNA, 25 bp, Homo sapien
ggtctctgagtgcagttcataacgg

SEQ ID NO: 692768 - DNA, 25 bp, Homo sapien
cagttcataacggagggtcccaccg

SEQ ID NO: 692769 - DNA, 25 bp, Homo sapien
cgctgggtctctgagtgcagttcat

SEQ ID NO: 692770 - DNA, 25 bp, Homo sapien
cggagggtcccaccgtaggatgaca

SEQ ID NO: 692771 - DNA, 25 bp, Homo sapien
ggatacttgcgctcattccctaccg

SEQ ID NO: 692772 - DNA, 25 bp, Homo sapien
tcagagcccgtcagcagtggtctgg

SEQ ID NO: 692773 - DNA, 25 bp, Homo sapien
tgtgctgggcctggatacttgcgct

SEQ ID NO: 692774 - DNA, 25 bp, Homo sapien
tgcgctcattccctaccgggacagg

SEQ ID NO: 692775 - DNA, 25 bp, Homo sapien
tacagctcggggaaagcctcgggca

SEQ ID NO: 692776 - DNA, 25 bp, Homo sapien
gagcatctccgtccctggctgccgc

SEQ ID NO: 692777 - DNA, 25 bp, Homo sapien
ccacctgccggtcagtgctcagcag

SEQ ID NO: 692778 - DNA, 25 bp, Homo sapien
tgccgcaggtctgcacggagcatct

SEQ ID NO: 692779 - DNA, 25 bp, Homo sapien
agcatccagtgagaaggtcccaagg

SEQ ID NO: 692780 - DNA, 25 bp, Homo sapien
tttggggttggcagcatccagtgag

SEQ ID NO: 692781 - DNA, 25 bp, Homo sapien
cagaagcagcgggtgcaacctttgg

SEQ ID NO: 692782 - DNA, 25 bp, Homo sapien
tgtaggacgagctccggcagcgctc

SEQ ID NO: 692783 - DNA, 25 bp, Homo sapien
cttacagtagcactgccctgtgagg

SEQ ID NO: 692784 - DNA, 25 bp, Homo sapien
acagcggcgcccagtcacgttgggt

SEQ ID NO: 692785 - DNA, 25 bp, Homo sapien
catggaagcccggagagcaggtatc

SEQ ID NO: 692786 - DNA, 25 bp, Homo sapien
gtgcccgcctcgtgacagtcacagg

SEQ ID NO: 692787 - DNA, 25 bp, Homo sapien
gcagtcgggcgggatggtgcgtggc

SEQ ID NO: 692788 - DNA, 25 bp, Homo sapien
agatgcactggcccgtgagctcgtc

SEQ ID NO: 692789 - DNA, 25 bp, Homo sapien
tgagctcgtcacagaggcgggcacc

SEQ ID NO: 692790 - DNA, 25 bp, Homo sapien
gttacactcctcacagccgaccagg

SEQ ID NO: 692791 - DNA, 25 bp, Homo sapien
tcctgacatggaggcagctgctcag

SEQ ID NO: 692792 - DNA, 25 bp, Homo sapien
tctcagaggcccagaatgcagccct

SEQ ID NO: 692793 - DNA, 25 bp, Homo sapien
tcaacatcatcgtcagagactgtgg

SEQ ID NO: 692794 - DNA, 25 bp, Homo sapien
atcgtcagagactgtggaccacctg

SEQ ID NO: 692795 - DNA, 25 bp, Homo sapien
ctgccactgggcgcccaaggactgg

SEQ ID NO: 692796 - DNA, 25 bp, Homo sapien
gtcgacccgtccaccttgggctctg

SEQ ID NO: 692797 - DNA, 25 bp, Homo sapien
ggcgcccaaggactggggtactcac

SEQ ID NO: 692798 - DNA, 25 bp, Homo sapien
cctgctttctggtcgacccgtccac

SEQ ID NO: 692799 - DNA, 25 bp, Homo sapien
gaagcagcagcgtttcggcagaaca

SEQ ID NO: 692800 - DNA, 25 bp, Homo sapien
gggcctgtagcacctacttcgtggc

SEQ ID NO: 692801 - DNA, 25 bp, Homo sapien
gacgggctccgttgttatagaagag

SEQ ID NO: 692802 - DNA, 25 bp, Homo sapien
agcagtcacggccaatgacatgggc

SEQ ID NO: 692803 - DNA, 25 bp, Homo sapien
gctcctcccggaggtagccaaagct

SEQ ID NO: 692804 - DNA, 25 bp, Homo sapien
gatgaagtcataggatttatccagg

SEQ ID NO: 692805 - DNA, 25 bp, Homo sapien
aagctgtagacgttctcagggacca

SEQ ID NO: 692806 - DNA, 25 bp, Homo sapien
tctcagggaccacgagtacataatc

SEQ ID NO: 692807 - DNA, 25 bp, Homo sapien
ttgggcacacgcacggtcacagtga

SEQ ID NO: 692808 - DNA, 25 bp, Homo sapien
cacgcacggtcacagtgagctcgct

SEQ ID NO: 692809 - DNA, 25 bp, Homo sapien
tgcggcagccgtagccatgtggaca

SEQ ID NO: 692810 - DNA, 25 bp, Homo sapien
tagccatgtggacagaagctggcgt

SEQ ID NO: 692811 - DNA, 25 bp, Homo sapien
caggaaggcatagcggcccagcgtg

SEQ ID NO: 692812 - DNA, 25 bp, Homo sapien
catgggtggtgaagaccacggtggc

SEQ ID NO: 692813 - DNA, 25 bp, Homo sapien
ggtagccgtgcagcaggaaggcata

SEQ ID NO: 692814 - DNA, 25 bp, Homo sapien
tgccacacgcggccggcgttgatga

SEQ ID NO: 692815 - DNA, 25 bp, Homo sapien
tcagggtccacagcggtggggggcc

SEQ ID NO: 692816 - DNA, 25 bp, Homo sapien
gccgaggtcggggtccagctgggga

SEQ ID NO: 692817 - DNA, 25 bp, Homo sapien
ggagtgagatcctgcgcgtgggtca

SEQ ID NO: 692818 - DNA, 25 bp, Homo sapien
gctttgggaagcgcgagggcagaca

SEQ ID NO: 692819 - DNA, 25 bp, Homo sapien
tgttggggccaaaggcgccgtggct

SEQ ID NO: 692820 - DNA, 25 bp, Homo sapien
gccaaaggcgccgtggctgctgatg

SEQ ID NO: 692821 - DNA, 25 bp, Homo sapien
ggggccaaaggcgccgtggctgctg

SEQ ID NO: 692822 - DNA, 25 bp, Homo sapien
gttggggccaaaggcgccgtggctg

SEQ ID NO: 692823 - DNA, 25 bp, Homo sapien
ccgggctgaactcctcaatgggcac

SEQ ID NO: 692824 - DNA, 25 bp, Homo sapien
acgaactccgggctgaactcctcaa

SEQ ID NO: 692825 - DNA, 25 bp, Homo sapien
actccgggctgaactcctcaatggg

SEQ ID NO: 692826 - DNA, 25 bp, Homo sapien
gaactccgggctgaactcctcaatg

SEQ ID NO: 692827 - DNA, 25 bp, Homo sapien
tcagcaggcacaagccgcaaatggg

SEQ ID NO: 692828 - DNA, 25 bp, Homo sapien
cttatccgctgacacaacggtggga

SEQ ID NO: 692829 - DNA, 25 bp, Homo sapien
ttatctcgagtgctgcttggtgcca

SEQ ID NO: 692830 - DNA, 25 bp, Homo sapien
ccatgtgaggttggtgtctcggaac

SEQ ID NO: 692831 - DNA, 25 bp, Homo sapien
gaatccacaaaacgcttgcaggagg

SEQ ID NO: 692832 - DNA, 25 bp, Homo sapien
gggactgaatccacaaaacgcttgc

SEQ ID NO: 692833 - DNA, 25 bp, Homo sapien
catggaacagctcgggggtacgtca

SEQ ID NO: 692834 - DNA, 25 bp, Homo sapien
tgctgggctgggcatgagcgagtgt

SEQ ID NO: 692835 - DNA, 25 bp, Homo sapien
tggtcctgggtatcccgggcagtgc

SEQ ID NO: 692836 - DNA, 25 bp, Homo sapien
tgttcggctgtgagcctcacgctgg

SEQ ID NO: 692837 - DNA, 25 bp, Homo sapien
caggaagaagcgtgcctgttcggct

SEQ ID NO: 692838 - DNA, 25 bp, Homo sapien
gtgagcctcacgctggcctccgagt

SEQ ID NO: 692839 - DNA, 25 bp, Homo sapien
cgggcatcctcattggcgtactcca

SEQ ID NO: 692840 - DNA, 25 bp, Homo sapien
ctcctggcgggcatcctcattggcg

SEQ ID NO: 692841 - DNA, 25 bp, Homo sapien
ccaccactagggcatagcggcctgg

SEQ ID NO: 692842 - DNA, 25 bp, Homo sapien
cactagggcatagcggcctggctgt

SEQ ID NO: 692843 - DNA, 25 bp, Homo sapien
gatcagtggcgggtgcgacgggctg

SEQ ID NO: 692844 - DNA, 25 bp, Homo sapien
tgttgtcctggcgacacagggcctc

SEQ ID NO: 692845 - DNA, 25 bp, Homo sapien
tggcgggtgcgacgggctgagctgc

SEQ ID NO: 692846 - DNA, 25 bp, Homo sapien
actgcccgtgcaggtgatcagtggc

SEQ ID NO: 692847 - DNA, 25 bp, Homo sapien
cgctaggcagcagaaccacgtagtc

SEQ ID NO: 692848 - DNA, 25 bp, Homo sapien
gggacggtatgtgcaggcctcagtc

SEQ ID NO: 692849 - DNA, 25 bp, Homo sapien
gcgccgcctcgtagtatgcgctagg

SEQ ID NO: 692850 - DNA, 25 bp, Homo sapien
gctgggcagagggacggtatgtgca

SEQ ID NO: 692851 - DNA, 25 bp, Homo sapien
agcaccccttcggcctccacacgca

SEQ ID NO: 692852 - DNA, 25 bp, Homo sapien
gcccctctggggcacggtgatgaag

SEQ ID NO: 692853 - DNA, 25 bp, Homo sapien
aggagcaccccttcggcctccacac

SEQ ID NO: 692854 - DNA, 25 bp, Homo sapien
aagcccctctggggcacggtgatga

SEQ ID NO: 692855 - DNA, 25 bp, Homo sapien
catggccccccggttgacgtatcgg

SEQ ID NO: 692856 - DNA, 25 bp, Homo sapien
gagacccgcccgctcacactcatgg

SEQ ID NO: 692857 - DNA, 25 bp, Homo sapien
agttggcgcaggtggccgacctgcc

SEQ ID NO: 692858 - DNA, 25 bp, Homo sapien
gacgtatcggaagacgagccagaaa

SEQ ID NO: 692859 - DNA, 25 bp, Homo sapien
gttgaagccaaagcgcacggcgtga

SEQ ID NO: 692860 - DNA, 25 bp, Homo sapien
tggacaggtgccatctgcgcgtagc

SEQ ID NO: 692861 - DNA, 25 bp, Homo sapien
gcgtagcccctccagctgaagttct

SEQ ID NO: 692862 - DNA, 25 bp, Homo sapien
tgcaggtccgggaggtagtggtccc

SEQ ID NO: 692863 - DNA, 25 bp, Homo sapien
tgagggacacggagaggcccggagg

SEQ ID NO: 692864 - DNA, 25 bp, Homo sapien
ggtgagggacacggagaggcccgga

SEQ ID NO: 692865 - DNA, 25 bp, Homo sapien
gtgagggacacggagaggcccggag

SEQ ID NO: 692866 - DNA, 25 bp, Homo sapien
gtgcaccgccaatgtcacaccggca

SEQ ID NO: 692867 - DNA, 25 bp, Homo sapien
cgtcctcggttcacagctctggccc

SEQ ID NO: 692868 - DNA, 25 bp, Homo sapien
ctctggcccagtgcaccgccaatgt

SEQ ID NO: 692869 - DNA, 25 bp, Homo sapien
ggcaccggcagacgcccgtcctcgg

SEQ ID NO: 692870 - DNA, 25 bp, Homo sapien
ggcagccaaaatagtcagcctgatc

SEQ ID NO: 692871 - DNA, 25 bp, Homo sapien
tgcggcagccaaaatagtcagcctg

SEQ ID NO: 692872 - DNA, 25 bp, Homo sapien
ccaaaatagtcagcctgatccagtc

SEQ ID NO: 692873 - DNA, 25 bp, Homo sapien
caggcctggccgcacacgtggggct

SEQ ID NO: 692874 - DNA, 25 bp, Homo sapien
cagtgtgcccctgaggtcgcagctg

SEQ ID NO: 692875 - DNA, 25 bp, Homo sapien
gtgtgcccctgaggtcgcagctgca

SEQ ID NO: 692876 - DNA, 25 bp, Homo sapien
tgtgcccctgaggtcgcagctgcag

SEQ ID NO: 692877 - DNA, 25 bp, Homo sapien
agtgtgcccctgaggtcgcagctgc

SEQ ID NO: 692878 - DNA, 25 bp, Homo sapien
acgtgagcccggcacatacagggaa

SEQ ID NO: 692879 - DNA, 25 bp, Homo sapien
ccagaacccaggtttgcagcggtca

SEQ ID NO: 692880 - DNA, 25 bp, Homo sapien
aacccaggtttgcagcggtcacagc

SEQ ID NO: 692881 - DNA, 25 bp, Homo sapien
gcccggcacatacagggaacctgtg

SEQ ID NO: 692882 - DNA, 25 bp, Homo sapien
tctcccacacacgagcagacttggg

SEQ ID NO: 692883 - DNA, 25 bp, Homo sapien
tcccacacacgagcagacttgggct

SEQ ID NO: 692884 - DNA, 25 bp, Homo sapien
ccatctcccacacacgagcagactt

SEQ ID NO: 692885 - DNA, 25 bp, Homo sapien
cacacacgagcagacttgggctcac

SEQ ID NO: 692886 - DNA, 25 bp, Homo sapien
gggccagaccggcagggtggcaaga

SEQ ID NO: 692887 - DNA, 25 bp, Homo sapien
cagaccggcagggtggcaagagcca

SEQ ID NO: 692888 - DNA, 25 bp, Homo sapien
gccagaccggcagggtggcaagagc

SEQ ID NO: 692889 - DNA, 25 bp, Homo sapien
tggggccagaccggcagggtggcaa

SEQ ID NO: 692890 - DNA, 25 bp, Homo sapien
tgcacgcaaacgtgcaccgcgtggg

SEQ ID NO: 692891 - DNA, 25 bp, Homo sapien
tccacacgcagtgtgtgacacacgt

SEQ ID NO: 692892 - DNA, 25 bp, Homo sapien
gggtacccgtgtacattccacacgc

SEQ ID NO: 692893 - DNA, 25 bp, Homo sapien
cagcacctgctcatggacatgcacg

SEQ ID NO: 692894 - DNA, 25 bp, Homo sapien
ccactccgggggtcacaggctgcgt

SEQ ID NO: 692895 - DNA, 25 bp, Homo sapien
cgggcacacatgtgtcacaccgcag

SEQ ID NO: 692896 - DNA, 25 bp, Homo sapien
ggcaccgggcacacatgtgtcacac

SEQ ID NO: 692897 - DNA, 25 bp, Homo sapien
ttgtaggcaccgggcacacatgtgt

SEQ ID NO: 692898 - DNA, 25 bp, Homo sapien
cagtgcctgtgtagccggggcggca

SEQ ID NO: 692899 - DNA, 25 bp, Homo sapien
gggaagccgtgaaagccggggctgc

SEQ ID NO: 692900 - DNA, 25 bp, Homo sapien
ggcaggcagtgcctgtgtagccggg

SEQ ID NO: 692901 - DNA, 25 bp, Homo sapien
cggcagcggcacaaacctcccgccc

SEQ ID NO: 692902 - DNA, 25 bp, Homo sapien
tcatcgcagccctcgggcaaggttc

SEQ ID NO: 692903 - DNA, 25 bp, Homo sapien
tagccagggcggcaccggtcacaat

SEQ ID NO: 692904 - DNA, 25 bp, Homo sapien
gcagccctcgggcaaggttcctgca

SEQ ID NO: 692905 - DNA, 25 bp, Homo sapien
ccggtcacaatgaggtccagcaaac

SEQ ID NO: 692906 - DNA, 25 bp, Homo sapien
ggaagtgaaagtagccgggggcaca

SEQ ID NO: 692907 - DNA, 25 bp, Homo sapien
agcggtcatcggccactccagggct

SEQ ID NO: 692908 - DNA, 25 bp, Homo sapien
tcgaagcccactcggcacctgcact

SEQ ID NO: 692909 - DNA, 25 bp, Homo sapien
gcacagcgatcacatgtggccccct

SEQ ID NO: 692910 - DNA, 25 bp, Homo sapien
agagctcacaatgggtgccttggaa

SEQ ID NO: 692911 - DNA, 25 bp, Homo sapien
tgggtttgcacagacagcgtcccac

SEQ ID NO: 692912 - DNA, 25 bp, Homo sapien
ccgtagaaccctggcgcgcagagct

SEQ ID NO: 692913 - DNA, 25 bp, Homo sapien
tggaagttgggtttgcacagacagc

SEQ ID NO: 692914 - DNA, 25 bp, Homo sapien
ggtccctgccgcgctgcagtcacaa

SEQ ID NO: 692915 - DNA, 25 bp, Homo sapien
ctgggtccctgccgcgctgcagtca

SEQ ID NO: 692916 - DNA, 25 bp, Homo sapien
tgggtccctgccgcgctgcagtcac

SEQ ID NO: 692917 - DNA, 25 bp, Homo sapien
gtccctgccgcgctgcagtcacaat

SEQ ID NO: 692918 - DNA, 25 bp, Homo sapien
tacaggtgcacgctgccacgcccgg

SEQ ID NO: 692919 - DNA, 25 bp, Homo sapien
acaggtgcacgctgccacgcccggc

SEQ ID NO: 692920 - DNA, 25 bp, Homo sapien
actacaggtgcacgctgccacgccc

SEQ ID NO: 692921 - DNA, 25 bp, Homo sapien
ctacaggtgcacgctgccacgcccg

SEQ ID NO: 692922 - DNA, 25 bp, Homo sapien
ctcactgcagcttcggccttccagg

SEQ ID NO: 692923 - DNA, 25 bp, Homo sapien
agtagctcgaactacaggcacacat

SEQ ID NO: 692924 - DNA, 25 bp, Homo sapien
cactgcagcttcggccttccaggct

SEQ ID NO: 692925 - DNA, 25 bp, Homo sapien
tgcagcttcggccttccaggctcaa

SEQ ID NO: 692926 - DNA, 25 bp, Homo sapien
gtgtcattggaggacgagggcgtcg

SEQ ID NO: 692927 - DNA, 25 bp, Homo sapien
tggtgtcattggaggacgagggcgt

SEQ ID NO: 692928 - DNA, 25 bp, Homo sapien
ctgctccctggtgtcattggaggac

SEQ ID NO: 692929 - DNA, 25 bp, Homo sapien
gctccctggtgtcattggaggacga

SEQ ID NO: 692930 - DNA, 25 bp, Homo sapien
aagttgggccggcagtagcatcgac

SEQ ID NO: 692931 - DNA, 25 bp, Homo sapien
cttgggaagcccgtgaagccctcgg

SEQ ID NO: 692932 - DNA, 25 bp, Homo sapien
acaccgctccccagagaagttgggc

SEQ ID NO: 692933 - DNA, 25 bp, Homo sapien
caggtgccatccgtgaagtcggact

SEQ ID NO: 692934 - DNA, 25 bp, Homo sapien
gggcgagtcgagagggtggttggga

SEQ ID NO: 692935 - DNA, 25 bp, Homo sapien
ggagagcggtagaagccgggcaggc

SEQ ID NO: 692936 - DNA, 25 bp, Homo sapien
ttgggagagcggtagaagccgggca

SEQ ID NO: 692937 - DNA, 25 bp, Homo sapien
gcggcagacgtggggcgagtcgaga

SEQ ID NO: 692938 - DNA, 25 bp, Homo sapien
ggtggcatggccgtagcagttacag

SEQ ID NO: 692939 - DNA, 25 bp, Homo sapien
tccacctcagggtcgtagtaacagt

SEQ ID NO: 692940 - DNA, 25 bp, Homo sapien
gcgccggtccacctcagggtcgtag

SEQ ID NO: 692941 - DNA, 25 bp, Homo sapien
ctcagggtcgtagtaacagtcggtg

SEQ ID NO: 692942 - DNA, 25 bp, Homo sapien
ccccgcaggtgttgtgctggcaggt

SEQ ID NO: 692943 - DNA, 25 bp, Homo sapien
tggcactgttggcagtcgcaggctt

SEQ ID NO: 692944 - DNA, 25 bp, Homo sapien
ttggcagtcgcaggcttccacggct

SEQ ID NO: 692945 - DNA, 25 bp, Homo sapien
cactcgttggcactgttggcagtcg

SEQ ID NO: 692946 - DNA, 25 bp, Homo sapien
ggcacgccagaagcacaaagataaa

SEQ ID NO: 692947 - DNA, 25 bp, Homo sapien
gaaacaatgtggcaggtcagcagaa

SEQ ID NO: 692948 - DNA, 25 bp, Homo sapien
gataaaccctgctaaagaccttgca

SEQ ID NO: 692949 - DNA, 25 bp, Homo sapien
ccaagtacctataagcaagggcctg

SEQ ID NO: 692950 - DNA, 25 bp, Homo sapien
gcagatgtggggtgttggctgcccc

SEQ ID NO: 692951 - DNA, 25 bp, Homo sapien
gcccaggaatgtgccggtgccagca

SEQ ID NO: 692952 - DNA, 25 bp, Homo sapien
gctcccgggaggtggatgctctgca

SEQ ID NO: 692953 - DNA, 25 bp, Homo sapien
gggaggtggatgctctgcagtgccc

SEQ ID NO: 692954 - DNA, 25 bp, Homo sapien
tgtctgttgtgtcctgaaaggttgg

SEQ ID NO: 692955 - DNA, 25 bp, Homo sapien
gtctgttgtgtcctgaaaggttggg

SEQ ID NO: 692956 - DNA, 25 bp, Homo sapien
gggaagttgtctgttgtgtcctgaa

SEQ ID NO: 692957 - DNA, 25 bp, Homo sapien
gcagggaagttgtctgttgtgtcct

SEQ ID NO: 692958 - DNA, 25 bp, Homo sapien
gggtctttggcatcgcaggcatccg

SEQ ID NO: 692959 - DNA, 25 bp, Homo sapien
gatgctgatatccttgatgctgtaa

SEQ ID NO: 692960 - DNA, 25 bp, Homo sapien
acacagcggcctccgatgctgatat

SEQ ID NO: 692961 - DNA, 25 bp, Homo sapien
atccgcgtggccgtggcagacacag

SEQ ID NO: 692962 - DNA, 25 bp, Homo sapien
ccagcagcgtgttggtacgcaggaa

SEQ ID NO: 692963 - DNA, 25 bp, Homo sapien
gaagcgcaggcggacgttggtggcc

SEQ ID NO: 692964 - DNA, 25 bp, Homo sapien
tggccttggtgaactcacgtagcag

SEQ ID NO: 692965 - DNA, 25 bp, Homo sapien
tagcagcggcgagtaggagaaattc

SEQ ID NO: 692966 - DNA, 25 bp, Homo sapien
ctgtgggcagtatgcggtgacgcca

SEQ ID NO: 692967 - DNA, 25 bp, Homo sapien
agatggccgcgtcgtcccgtgtgat

SEQ ID NO: 692968 - DNA, 25 bp, Homo sapien
tgtggcccgaaccgctccagacagt

SEQ ID NO: 692969 - DNA, 25 bp, Homo sapien
tgtgatgcgctccagcgtctgtggc

SEQ ID NO: 692970 - DNA, 25 bp, Homo sapien
agtactcggtggtgcagatggccgc

SEQ ID NO: 692971 - DNA, 25 bp, Homo sapien
tttgggggacacgtgaccaggcctg

SEQ ID NO: 692972 - DNA, 25 bp, Homo sapien
tgggggacacgtgaccaggcctgcc

SEQ ID NO: 692973 - DNA, 25 bp, Homo sapien
tcaggccagggaattttgggggaca

SEQ ID NO: 692974 - DNA, 25 bp, Homo sapien
ttgggggacacgtgaccaggcctgc

SEQ ID NO: 692975 - DNA, 25 bp, Homo sapien
aggtgcggccgaagtccatggaccg

SEQ ID NO: 692976 - DNA, 25 bp, Homo sapien
tgatgaggacgtaggccacgtggaa

SEQ ID NO: 692977 - DNA, 25 bp, Homo sapien
ggccgaagtccatggaccgctccag

SEQ ID NO: 692978 - DNA, 25 bp, Homo sapien
catggaccgctccagcacccagagg

SEQ ID NO: 692979 - DNA, 25 bp, Homo sapien
ctccccacagcaggtacgcccggga

SEQ ID NO: 692980 - DNA, 25 bp, Homo sapien
ctcctcgggaccctgacccgccagt

SEQ ID NO: 692981 - DNA, 25 bp, Homo sapien
tcctcgggaccctgacccgccagtg

SEQ ID NO: 692982 - DNA, 25 bp, Homo sapien
ccacagcaggtacgcccgggaacag

SEQ ID NO: 692983 - DNA, 25 bp, Homo sapien
gggcacaggcctattcaccggctgc

SEQ ID NO: 692984 - DNA, 25 bp, Homo sapien
cgttgcggggactgtgggagccaag

SEQ ID NO: 692985 - DNA, 25 bp, Homo sapien
ttctcggagggcttggcgttgcggg

SEQ ID NO: 692986 - DNA, 25 bp, Homo sapien
caagcgcagccttccggggttgggg

SEQ ID NO: 692987 - DNA, 25 bp, Homo sapien
ctggtcgcggctcccagggccacac

SEQ ID NO: 692988 - DNA, 25 bp, Homo sapien
ctgacctttccgctgctacatggtt

SEQ ID NO: 692989 - DNA, 25 bp, Homo sapien
ggccgccctcgccatgacccggagc

SEQ ID NO: 692990 - DNA, 25 bp, Homo sapien
gagcgagcgcagacccctggcttcg

SEQ ID NO: 692991 - DNA, 25 bp, Homo sapien
agtgctgacctttccgctgctacat

SEQ ID NO: 692992 - DNA, 25 bp, Homo sapien
ccaatacttctagcctcatgcctaa

SEQ ID NO: 692993 - DNA, 25 bp, Homo sapien
tacttctagcctcatgcctaactgc

SEQ ID NO: 692994 - DNA, 25 bp, Homo sapien
aaccaatacttctagcctcatgcct

SEQ ID NO: 692995 - DNA, 25 bp, Homo sapien
cccaaccaatacttctagcctcatg

SEQ ID NO: 692996 - DNA, 25 bp, Homo sapien
acaaagccgctaccccacctgtagc

SEQ ID NO: 692997 - DNA, 25 bp, Homo sapien
cctcggggactgggacaaagccgct

SEQ ID NO: 692998 - DNA, 25 bp, Homo sapien
ggactgggacaaagccgctacccca

SEQ ID NO: 692999 - DNA, 25 bp, Homo sapien
gacaaagccgctaccccacctgtag

SEQ ID NO: 693000 - DNA, 25 bp, Homo sapien
cccgctgggctagcgtgctggtgta

SEQ ID NO: 693001 - DNA, 25 bp, Homo sapien
tgggctagcgtgctggtgtagtggg

SEQ ID NO: 693002 - DNA, 25 bp, Homo sapien
gctccttacaacctgggcccgctgg

SEQ ID NO: 693003 - DNA, 25 bp, Homo sapien
cctgcccagctccttacaacctggg

SEQ ID NO: 693004 - DNA, 25 bp, Homo sapien
tccagggtgacgttgacctcgttgt

SEQ ID NO: 693005 - DNA, 25 bp, Homo sapien
tgccatcgatggcattgctcgcggg

SEQ ID NO: 693006 - DNA, 25 bp, Homo sapien
gggacagcggtggactctgccacca

SEQ ID NO: 693007 - DNA, 25 bp, Homo sapien
gccgtgcagatgtcacagtactggc

SEQ ID NO: 693008 - DNA, 25 bp, Homo sapien
gagccacagaggacagggttgggaa

SEQ ID NO: 693009 - DNA, 25 bp, Homo sapien
cagaggacagggttgggaaaaccag

SEQ ID NO: 693010 - DNA, 25 bp, Homo sapien
gccacagaggacagggttgggaaaa

SEQ ID NO: 693011 - DNA, 25 bp, Homo sapien
tgagccacagaggacagggttggga

SEQ ID NO: 693012 - DNA, 25 bp, Homo sapien
agggtcccgtgagaacagagctagg

SEQ ID NO: 693013 - DNA, 25 bp, Homo sapien
gaaacagcagaagggccgataagga

SEQ ID NO: 693014 - DNA, 25 bp, Homo sapien
ctccgctgcggagggtcccgtgaga

SEQ ID NO: 693015 - DNA, 25 bp, Homo sapien
gcagaagggccgataaggacttccc

SEQ ID NO: 693016 - DNA, 25 bp, Homo sapien
ccccggtcaccgcagtcgaactgga

SEQ ID NO: 693017 - DNA, 25 bp, Homo sapien
tcaccgcagtcgaactggaccggcg

SEQ ID NO: 693018 - DNA, 25 bp, Homo sapien
gcagtcgaactggaccggcgcccag

SEQ ID NO: 693019 - DNA, 25 bp, Homo sapien
cggtcaccgcagtcgaactggaccg

SEQ ID NO: 693020 - DNA, 25 bp, Homo sapien
gtctggttggggtcgccgccggcca

SEQ ID NO: 693021 - DNA, 25 bp, Homo sapien
cccctaccagcttgcagtaaaggtc

SEQ ID NO: 693022 - DNA, 25 bp, Homo sapien
gggccccctaccagcttgcagtaaa

SEQ ID NO: 693023 - DNA, 25 bp, Homo sapien
ggatggtctggttggggtcgccgcc

SEQ ID NO: 693024 - DNA, 25 bp, Homo sapien
ccaggttgaagtagggcgggtgcag

SEQ ID NO: 693025 - DNA, 25 bp, Homo sapien
ggccaggttgaagtagggcgggtgc

SEQ ID NO: 693026 - DNA, 25 bp, Homo sapien
gccaggttgaagtagggcgggtgca

SEQ ID NO: 693027 - DNA, 25 bp, Homo sapien
tcctctccgcaggtcgcggaggcgg

SEQ ID NO: 693028 - DNA, 25 bp, Homo sapien
cagcgccagcccgaccagcagcagc

SEQ ID NO: 693029 - DNA, 25 bp, Homo sapien
gcccagcagcgccagcccgaccagc

SEQ ID NO: 693030 - DNA, 25 bp, Homo sapien
cagcagcagcggcgcggggccccgg

SEQ ID NO: 693031 - DNA, 25 bp, Homo sapien
ccgcgccgcgcccagcagcgccagc

SEQ ID NO: 693032 - DNA, 25 bp, Homo sapien
gcgctccccgcgcagagccgcttcg

SEQ ID NO: 693033 - DNA, 25 bp, Homo sapien
cgctccccgcgcagagccgcttcgc

SEQ ID NO: 693034 - DNA, 25 bp, Homo sapien
agtgcgctccccgcgcagagccgct

SEQ ID NO: 693035 - DNA, 25 bp, Homo sapien
tccccgcgcagagccgcttcgccat

SEQ ID NO: 693036 - DNA, 25 bp, Homo sapien
ccccgagctccagggacagcgcgcg

SEQ ID NO: 693037 - DNA, 25 bp, Homo sapien
tccccgagctccagggacagcgcgc

SEQ ID NO: 693038 - DNA, 25 bp, Homo sapien
ccacagccgccaaattggctcttaa

SEQ ID NO: 693039 - DNA, 25 bp, Homo sapien
aggacgggggcggtgctcatggccc

SEQ ID NO: 693040 - DNA, 25 bp, Homo sapien
agccgccaaattggctcttaaggag

SEQ ID NO: 693041 - DNA, 25 bp, Homo sapien
acagccgccaaattggctcttaagg

SEQ ID NO: 693042 - DNA, 25 bp, Homo sapien
tgcacagccgcgcacgcgttcctgc

SEQ ID NO: 693043 - DNA, 25 bp, Homo sapien
tcgaggacgcctggcaaacagcaca

SEQ ID NO: 693044 - DNA, 25 bp, Homo sapien
cacgatcggcggctcgaggacgcct

SEQ ID NO: 693045 - DNA, 25 bp, Homo sapien
tcctgccacgatcggcggctcgagg

SEQ ID NO: 693046 - DNA, 25 bp, Homo sapien
ccttgggctccggggccaaatctgc

SEQ ID NO: 693047 - DNA, 25 bp, Homo sapien
ctggcagcaaacccccatccctgag

SEQ ID NO: 693048 - DNA, 25 bp, Homo sapien
tgcagctgccgagctggcagcaaac

SEQ ID NO: 693049 - DNA, 25 bp, Homo sapien
cttgggctccggggccaaatctgcc

SEQ ID NO: 693050 - DNA, 25 bp, Homo sapien
ctgggacaaggtctgctgcggagcc

SEQ ID NO: 693051 - DNA, 25 bp, Homo sapien
gagggtaaaaggaggtggctcgcca

SEQ ID NO: 693052 - DNA, 25 bp, Homo sapien
tgctactccagtggcattcctgaga

SEQ ID NO: 693053 - DNA, 25 bp, Homo sapien
gagggccgtggaggagcctctgtcc

SEQ ID NO: 693054 - DNA, 25 bp, Homo sapien
ggcaggccctccacagacttggggc

SEQ ID NO: 693055 - DNA, 25 bp, Homo sapien
caggccaggcaccatgccaggagca

SEQ ID NO: 693056 - DNA, 25 bp, Homo sapien
aggccaggcaccatgccaggagcat

SEQ ID NO: 693057 - DNA, 25 bp, Homo sapien
ctccacagacttggggctcttcaaa

SEQ ID NO: 693058 - DNA, 25 bp, Homo sapien
ttagtctgggggctggtgccatcac

SEQ ID NO: 693059 - DNA, 25 bp, Homo sapien
tcgaacgtggggcttggcttagtct

SEQ ID NO: 693060 - DNA, 25 bp, Homo sapien
cactgggacacaacgggccacggtt

SEQ ID NO: 693061 - DNA, 25 bp, Homo sapien
tatttgactggatcgaacgtggggc

SEQ ID NO: 693062 - DNA, 25 bp, Homo sapien
caggtgaggaggtaaccccaggatc

SEQ ID NO: 693063 - DNA, 25 bp, Homo sapien
tgaaagtgccatccacaacagggat

SEQ ID NO: 693064 - DNA, 25 bp, Homo sapien
tattgccagcccagtttcacgaaag

SEQ ID NO: 693065 - DNA, 25 bp, Homo sapien
gacatcagtggacaggagcggcact

SEQ ID NO: 693066 - DNA, 25 bp, Homo sapien
gggaatgtaaacacacggagacttg

SEQ ID NO: 693067 - DNA, 25 bp, Homo sapien
cacacggagacttggaaggctcccg

SEQ ID NO: 693068 - DNA, 25 bp, Homo sapien
taaacacacggagacttggaaggct

SEQ ID NO: 693069 - DNA, 25 bp, Homo sapien
acttggaaggctcccgctgaccaca

SEQ ID NO: 693070 - DNA, 25 bp, Homo sapien
tgcgtggcctcccatggggctctct

SEQ ID NO: 693071 - DNA, 25 bp, Homo sapien
cccggcagccaggtcaggggtctgt

SEQ ID NO: 693072 - DNA, 25 bp, Homo sapien
ccaggtcaggggtctgtgcgtggcc

SEQ ID NO: 693073 - DNA, 25 bp, Homo sapien
ggtcaggggtctgtgcgtggcctcc

SEQ ID NO: 693074 - DNA, 25 bp, Homo sapien
ggatggcgtgcaagagagcagctgc

SEQ ID NO: 693075 - DNA, 25 bp, Homo sapien
tcctggcggccagggtagggcctgt

SEQ ID NO: 693076 - DNA, 25 bp, Homo sapien
tccagccccctgaacatgtgggggt

SEQ ID NO: 693077 - DNA, 25 bp, Homo sapien
tagggcctgtcggcccagttgccca

SEQ ID NO: 693078 - DNA, 25 bp, Homo sapien
cccgtgcagccgacatcaggccggg

SEQ ID NO: 693079 - DNA, 25 bp, Homo sapien
cgtgcagccgacatcaggccgggcg

SEQ ID NO: 693080 - DNA, 25 bp, Homo sapien
ggcagcccgtgcagccgacatcagg

SEQ ID NO: 693081 - DNA, 25 bp, Homo sapien
gccaggcagcccgtgcagccgacat

SEQ ID NO: 693082 - DNA, 25 bp, Homo sapien
tctccccacacagaaaggcgaaagg

SEQ ID NO: 693083 - DNA, 25 bp, Homo sapien
tgtgaaagtcccctgctcagagagg

SEQ ID NO: 693084 - DNA, 25 bp, Homo sapien
catgacgggtgttctgtgctctacg

SEQ ID NO: 693085 - DNA, 25 bp, Homo sapien
ggtttatcaggacgtggcctcacgg

SEQ ID NO: 693086 - DNA, 25 bp, Homo sapien
ggttctcatgtagccttgtcatgca

SEQ ID NO: 693087 - DNA, 25 bp, Homo sapien
atgtagccttgtcatgcaggcctgg

SEQ ID NO: 693088 - DNA, 25 bp, Homo sapien
gttctcatgtagccttgtcatgcag

SEQ ID NO: 693089 - DNA, 25 bp, Homo sapien
ctggttctcatgtagccttgtcatg

SEQ ID NO: 693090 - DNA, 25 bp, Homo sapien
agatggttcctggctcctggtgcag

SEQ ID NO: 693091 - DNA, 25 bp, Homo sapien
atggttcctggctcctggtgcaggc

SEQ ID NO: 693092 - DNA, 25 bp, Homo sapien
tcagatggttcctggctcctggtgc

SEQ ID NO: 693093 - DNA, 25 bp, Homo sapien
ggttcctggctcctggtgcaggctc

SEQ ID NO: 693094 - DNA, 25 bp, Homo sapien
ggcccattccttgcccagtcttggc

SEQ ID NO: 693095 - DNA, 25 bp, Homo sapien
ctgagcagggacaatggtgcctccc

SEQ ID NO: 693096 - DNA, 25 bp, Homo sapien
ggacaatggtgcctccctgctgggt

SEQ ID NO: 693097 - DNA, 25 bp, Homo sapien
gggcttcaagtgctgagcagggaca

SEQ ID NO: 693098 - DNA, 25 bp, Homo sapien
ttagggcttcaagtgctgagcaggg

SEQ ID NO: 693099 - DNA, 25 bp, Homo sapien
gcttgttgggtcccacaagaacttc

SEQ ID NO: 693100 - DNA, 25 bp, Homo sapien
tgggaaccttgagtggctgggaacc

SEQ ID NO: 693101 - DNA, 25 bp, Homo sapien
tgttgggtcccacaagaacttccag

SEQ ID NO: 693102 - DNA, 25 bp, Homo sapien
ggagtcccagcagatgagggcctct

SEQ ID NO: 693103 - DNA, 25 bp, Homo sapien
gcaaaacacagcctcgtctctgggc

SEQ ID NO: 693104 - DNA, 25 bp, Homo sapien
tgtttctgccgtgcgggcacgtcca

SEQ ID NO: 693105 - DNA, 25 bp, Homo sapien
gattccatcactccgcagaggcttt

SEQ ID NO: 693106 - DNA, 25 bp, Homo sapien
acgtccagcccgacgctctcagaag

SEQ ID NO: 693107 - DNA, 25 bp, Homo sapien
gtggagcaggagtcccagccgcctt

SEQ ID NO: 693108 - DNA, 25 bp, Homo sapien
gagcaggagtcccagccgccttcct

SEQ ID NO: 693109 - DNA, 25 bp, Homo sapien
ggagcaggagtcccagccgccttcc

SEQ ID NO: 693110 - DNA, 25 bp, Homo sapien
tggagcaggagtcccagccgccttc

SEQ ID NO: 693111 - DNA, 25 bp, Homo sapien
tggacgtgccgtgcccgaaatcccg

SEQ ID NO: 693112 - DNA, 25 bp, Homo sapien
cgttgcctctggacgtgccgtgccc

SEQ ID NO: 693113 - DNA, 25 bp, Homo sapien
catgccgggccctcgaatcctccat

SEQ ID NO: 693114 - DNA, 25 bp, Homo sapien
cgtgcccgaaatcccgccattccca

SEQ ID NO: 693115 - DNA, 25 bp, Homo sapien
tcagagaccctgactgggatcaccc

SEQ ID NO: 693116 - DNA, 25 bp, Homo sapien
caaaaaaggctcaggccgacggtgt

SEQ ID NO: 693117 - DNA, 25 bp, Homo sapien
cactgctaaagaggcacaaacctgg

SEQ ID NO: 693118 - DNA, 25 bp, Homo sapien
tgggtggctccatgacagtcgcttt

SEQ ID NO: 693119 - DNA, 25 bp, Homo sapien
ggtcttttatcagatacaggttttg

SEQ ID NO: 693120 - DNA, 25 bp, Homo sapien
tacaggtcttttatcagatacaggt

SEQ ID NO: 693121 - DNA, 25 bp, Homo sapien
cttttatcagatacaggttttgaaa

SEQ ID NO: 693122 - DNA, 25 bp, Homo sapien
tggatacaggtcttttatcagatac

SEQ ID NO: 693123 - DNA, 25 bp, Homo sapien
cagggttcaggctactaacaaggcc

SEQ ID NO: 693124 - DNA, 25 bp, Homo sapien
ggtgtttcagattccacggtgggcc

SEQ ID NO: 693125 - DNA, 25 bp, Homo sapien
ggtccaagggtatgcacctctagca

SEQ ID NO: 693126 - DNA, 25 bp, Homo sapien
cagggaaacggtgccccagtttgca

SEQ ID NO: 693127 - DNA, 25 bp, Homo sapien
ccctggttctaggaacttttgactg

SEQ ID NO: 693128 - DNA, 25 bp, Homo sapien
gagtgagtggactaggactgctcca

SEQ ID NO: 693129 - DNA, 25 bp, Homo sapien
gactgctccagaggcgtggtcttaa

SEQ ID NO: 693130 - DNA, 25 bp, Homo sapien
aggccgatggcatcgtctcaaagta

SEQ ID NO: 693131 - DNA, 25 bp, Homo sapien
gaattctcagaaatcccctcggagg

SEQ ID NO: 693132 - DNA, 25 bp, Homo sapien
tgcacgctgtgaacaaaaggtcctg

SEQ ID NO: 693133 - DNA, 25 bp, Homo sapien
taatgggctagagacaaagtcgtcc

SEQ ID NO: 693134 - DNA, 25 bp, Homo sapien
taatcctcgaataccacacagtggc

SEQ ID NO: 693135 - DNA, 25 bp, Homo sapien
caaggccacgagcactgtgaactca

SEQ ID NO: 693136 - DNA, 25 bp, Homo sapien
tgtgaactcaaaccctatcaggtcg

SEQ ID NO: 693137 - DNA, 25 bp, Homo sapien
tgaggcgcctgtaatgaggtaacac

SEQ ID NO: 693138 - DNA, 25 bp, Homo sapien
caggtcgcgcctgttgaatcgaaac

SEQ ID NO: 693139 - DNA, 25 bp, Homo sapien
aggtcactgctgatcttggcagcca

SEQ ID NO: 693140 - DNA, 25 bp, Homo sapien
tcgatgagctgcgtcacgccgctct

SEQ ID NO: 693141 - DNA, 25 bp, Homo sapien
gccgctcttgcgcaggtcactgctg

SEQ ID NO: 693142 - DNA, 25 bp, Homo sapien
aggcgccagcgcacagcttgcggtt

SEQ ID NO: 693143 - DNA, 25 bp, Homo sapien
cagcgtcagtttgacatgggggaac

SEQ ID NO: 693144 - DNA, 25 bp, Homo sapien
ggcttcacgtattctatcactgtgg

SEQ ID NO: 693145 - DNA, 25 bp, Homo sapien
ctcctgattttgctcagcgtcagtt

SEQ ID NO: 693146 - DNA, 25 bp, Homo sapien
tgtcctttttgaggtctgagggctt

SEQ ID NO: 693147 - DNA, 25 bp, Homo sapien
ttgtgcttgccgcagggccactgcg

SEQ ID NO: 693148 - DNA, 25 bp, Homo sapien
gatgaggacacgtttgtgcttgccg

SEQ ID NO: 693149 - DNA, 25 bp, Homo sapien
catgtacgacgcaaagatgaggaca

SEQ ID NO: 693150 - DNA, 25 bp, Homo sapien
gccactgcgggtcatccaggaggtt

SEQ ID NO: 693151 - DNA, 25 bp, Homo sapien
tgagcagtacccatctagccccaag

SEQ ID NO: 693152 - DNA, 25 bp, Homo sapien
caccaggagtcttgagcagtaccca

SEQ ID NO: 693153 - DNA, 25 bp, Homo sapien
ccaccaggagtcttgagcagtaccc

SEQ ID NO: 693154 - DNA, 25 bp, Homo sapien
ccagggcgttggtgggatacaggaa

SEQ ID NO: 693155 - DNA, 25 bp, Homo sapien
aggtttatgtcttgaccctggcaga

SEQ ID NO: 693156 - DNA, 25 bp, Homo sapien
ggctgtcactcttgtgtgtgaccag

SEQ ID NO: 693157 - DNA, 25 bp, Homo sapien
ttctgtgctggctggtgccgacttg

SEQ ID NO: 693158 - DNA, 25 bp, Homo sapien
aagcccagacgcacatgccaggagc

SEQ ID NO: 693159 - DNA, 25 bp, Homo sapien
gaagcccagacgcacatgccaggag

SEQ ID NO: 693160 - DNA, 25 bp, Homo sapien
ggaagcccagacgcacatgccagga

SEQ ID NO: 693161 - DNA, 25 bp, Homo sapien
agctccacaccttctagctcaaaga

SEQ ID NO: 693162 - DNA, 25 bp, Homo sapien
gctcctagctccacaccttctagct

SEQ ID NO: 693163 - DNA, 25 bp, Homo sapien
cttcccgtctgctcctagctccaca

SEQ ID NO: 693164 - DNA, 25 bp, Homo sapien
ccgtctgctcctagctccacacctt

SEQ ID NO: 693165 - DNA, 25 bp, Homo sapien
gccgccggacgggtgcctctgcttc

SEQ ID NO: 693166 - DNA, 25 bp, Homo sapien
catctcggaagacacagagacgccg

SEQ ID NO: 693167 - DNA, 25 bp, Homo sapien
aagacacagagacgccgccggacgg

SEQ ID NO: 693168 - DNA, 25 bp, Homo sapien
tcggaagacacagagacgccgccgg

SEQ ID NO: 693169 - DNA, 25 bp, Homo sapien
gtggtctgcgctgaactcaggctct

SEQ ID NO: 693170 - DNA, 25 bp, Homo sapien
tgtccgctggcccgaggtgctctcg

SEQ ID NO: 693171 - DNA, 25 bp, Homo sapien
tctcgggaacaatgtcagcacagcc

SEQ ID NO: 693172 - DNA, 25 bp, Homo sapien
ctgtggtctgcgctgaactcaggct

SEQ ID NO: 693173 - DNA, 25 bp, Homo sapien
gagaaggccgcgcacagggaccgct

SEQ ID NO: 693174 - DNA, 25 bp, Homo sapien
cccatagggcaggaccgagaaggcc

SEQ ID NO: 693175 - DNA, 25 bp, Homo sapien
cagggaccgcttggcacagatgagc

SEQ ID NO: 693176 - DNA, 25 bp, Homo sapien
ggccttccccatagggcaggaccga

SEQ ID NO: 693177 - DNA, 25 bp, Homo sapien
tcttcttcaggcctttatgtctcgg

SEQ ID NO: 693178 - DNA, 25 bp, Homo sapien
caggcctttatgtctcggtgatcca

SEQ ID NO: 693179 - DNA, 25 bp, Homo sapien
ttatgtctcggtgatccagatgtgt

SEQ ID NO: 693180 - DNA, 25 bp, Homo sapien
tcgtactgcctcatgttcttgatga

SEQ ID NO: 693181 - DNA, 25 bp, Homo sapien
ggcagcccgagcggagtcgtagagc

SEQ ID NO: 693182 - DNA, 25 bp, Homo sapien
cagcccgagcggagtcgtagagctc

SEQ ID NO: 693183 - DNA, 25 bp, Homo sapien
gtggcagcccgagcggagtcgtaga

SEQ ID NO: 693184 - DNA, 25 bp, Homo sapien
cagtggcagcccgagcggagtcgta

SEQ ID NO: 693185 - DNA, 25 bp, Homo sapien
catcccacggcatcttccagaaact

SEQ ID NO: 693186 - DNA, 25 bp, Homo sapien
ctctgtgctggagcgcatcccacgg

SEQ ID NO: 693187 - DNA, 25 bp, Homo sapien
gcagcgctgggacgtgactcgcttc

SEQ ID NO: 693188 - DNA, 25 bp, Homo sapien
agggagcagcgctgggacgtgactc

SEQ ID NO: 693189 - DNA, 25 bp, Homo sapien
ctgcaagatgacaatggagcctcaa

SEQ ID NO: 693190 - DNA, 25 bp, Homo sapien
tttgtggccagaaaccgagtgccgc

SEQ ID NO: 693191 - DNA, 25 bp, Homo sapien
agatgacaatggagcctcaaaacag

SEQ ID NO: 693192 - DNA, 25 bp, Homo sapien
ccgggtgccgcctttgtggccagaa

SEQ ID NO: 693193 - DNA, 25 bp, Homo sapien
ttccagagcccatgcagactgaggc

SEQ ID NO: 693194 - DNA, 25 bp, Homo sapien
gagcccatgcagactgaggcgggga

SEQ ID NO: 693195 - DNA, 25 bp, Homo sapien
tccagagcccatgcagactgaggcg

SEQ ID NO: 693196 - DNA, 25 bp, Homo sapien
cagagcccatgcagactgaggcggg

SEQ ID NO: 693197 - DNA, 25 bp, Homo sapien
gaatggtggccgctctccactgtct

SEQ ID NO: 693198 - DNA, 25 bp, Homo sapien
acgtggacggccgggctctggcacc

SEQ ID NO: 693199 - DNA, 25 bp, Homo sapien
gcattctgacgctcagttcatgggt

SEQ ID NO: 693200 - DNA, 25 bp, Homo sapien
tcagttcatgggtgggtaaattgag

SEQ ID NO: 693201 - DNA, 25 bp, Homo sapien
ggaacccatgagatggacccctgct

SEQ ID NO: 693202 - DNA, 25 bp, Homo sapien
cattttgtgaacctggccccgttgc

SEQ ID NO: 693203 - DNA, 25 bp, Homo sapien
gatcacgcatgtgcagatgtaccac

SEQ ID NO: 693204 - DNA, 25 bp, Homo sapien
cactggcaagtgcagatgggaccca

SEQ ID NO: 693205 - DNA, 25 bp, Homo sapien
gtcccaggtaaagcaaaagcgccca

SEQ ID NO: 693206 - DNA, 25 bp, Homo sapien
gaaacccaaagctgtgtgtacgagc

SEQ ID NO: 693207 - DNA, 25 bp, Homo sapien
ggagcctctgccgaatgactgcgct

SEQ ID NO: 693208 - DNA, 25 bp, Homo sapien
gactggaaccgtctctcgccaggaa

SEQ ID NO: 693209 - DNA, 25 bp, Homo sapien
tcacgcttgtaaacaaggtgccaga

SEQ ID NO: 693210 - DNA, 25 bp, Homo sapien
gcagcttggcgacgctgagtggctc

SEQ ID NO: 693211 - DNA, 25 bp, Homo sapien
cttgtaaacaaggtgccagatgctg

SEQ ID NO: 693212 - DNA, 25 bp, Homo sapien
ccccaaatcacgcttgtaaacaagg

SEQ ID NO: 693213 - DNA, 25 bp, Homo sapien
tagcgttgtggacactcaccaaggg

SEQ ID NO: 693214 - DNA, 25 bp, Homo sapien
ggatgccactctcacctcattagcg

SEQ ID NO: 693215 - DNA, 25 bp, Homo sapien
tgttgtaggttgaagggtatcgccc

SEQ ID NO: 693216 - DNA, 25 bp, Homo sapien
gggtctgtccacaccttgaggttgg

SEQ ID NO: 693217 - DNA, 25 bp, Homo sapien
tggttcaacacaaagtgccacacca

SEQ ID NO: 693218 - DNA, 25 bp, Homo sapien
gttcaacacaaagtgccacaccagg

SEQ ID NO: 693219 - DNA, 25 bp, Homo sapien
ttcaacacaaagtgccacaccaggc

SEQ ID NO: 693220 - DNA, 25 bp, Homo sapien
aacacaaagtgccacaccaggctga

SEQ ID NO: 693221 - DNA, 25 bp, Homo sapien
gcttagtgtgaacccgcttctcaga

SEQ ID NO: 693222 - DNA, 25 bp, Homo sapien
tcagggaggccatgcttagtgctta

SEQ ID NO: 693223 - DNA, 25 bp, Homo sapien
tcacaagaccaacatcagggctgcc

SEQ ID NO: 693224 - DNA, 25 bp, Homo sapien
caagacggatcacgtgagccagagt

SEQ ID NO: 693225 - DNA, 25 bp, Homo sapien
ccagggaacgcagggtgaaatggac

SEQ ID NO: 693226 - DNA, 25 bp, Homo sapien
aaatggacgtcctcacgctggggtc

SEQ ID NO: 693227 - DNA, 25 bp, Homo sapien
tagcagccccttttgccggggcagc

SEQ ID NO: 693228 - DNA, 25 bp, Homo sapien
acccttccctcgatcagcagccagg

SEQ ID NO: 693229 - DNA, 25 bp, Homo sapien
gcaccacgaacttggcagcagagcc

SEQ ID NO: 693230 - DNA, 25 bp, Homo sapien
gaacagagtggggttcaggaaagac

SEQ ID NO: 693231 - DNA, 25 bp, Homo sapien
catggccctcagaaacaaggtcagc

SEQ ID NO: 693232 - DNA, 25 bp, Homo sapien
tcagaaacaaggtcagcaccacgaa

SEQ ID NO: 693233 - DNA, 25 bp, Homo sapien
gggtggtggcgcttgggcccatggt

SEQ ID NO: 693234 - DNA, 25 bp, Homo sapien
ggtggtggcgcttgggcccatggtg

SEQ ID NO: 693235 - DNA, 25 bp, Homo sapien
tgtcccagggatgccggccacagcg

SEQ ID NO: 693236 - DNA, 25 bp, Homo sapien
atcctgtcccagggatgccggccac

SEQ ID NO: 693237 - DNA, 25 bp, Homo sapien
cttctaacaatcccacagggcaggg

SEQ ID NO: 693238 - DNA, 25 bp, Homo sapien
gcatgctgcgctcagaactgtcacc

SEQ ID NO: 693239 - DNA, 25 bp, Homo sapien
tggacactcaacatgcaggactgag

SEQ ID NO: 693240 - DNA, 25 bp, Homo sapien
ttccatgtcaaacaacagggcccgg

SEQ ID NO: 693241 - DNA, 25 bp, Homo sapien
gggtgagcccgcttcccctggagtc

SEQ ID NO: 693242 - DNA, 25 bp, Homo sapien
gggcctatgacagcacccagtctgc

SEQ ID NO: 693243 - DNA, 25 bp, Homo sapien
tgccctggagagtcaccaccttgtt

SEQ ID NO: 693244 - DNA, 25 bp, Homo sapien
gctctgccctggagagtcaccacct

SEQ ID NO: 693245 - DNA, 25 bp, Homo sapien
tctgccctggagagtcaccaccttg

SEQ ID NO: 693246 - DNA, 25 bp, Homo sapien
agggccttgccgctctgccctggag

SEQ ID NO: 693247 - DNA, 25 bp, Homo sapien
tacggccaggaacacttccaaggat

SEQ ID NO: 693248 - DNA, 25 bp, Homo sapien
acatttgggcaaatccatccctctg

SEQ ID NO: 693249 - DNA, 25 bp, Homo sapien
ccaaagaccttagaggaacccaatg

SEQ ID NO: 693250 - DNA, 25 bp, Homo sapien
cgcaacctgcatgtgacgtcatagt

SEQ ID NO: 693251 - DNA, 25 bp, Homo sapien
agagctctgtgtcggcccctttgct

SEQ ID NO: 693252 - DNA, 25 bp, Homo sapien
gcaaggagcacgtgccagccttgac

SEQ ID NO: 693253 - DNA, 25 bp, Homo sapien
caagagctctgtgtcggcccctttg

SEQ ID NO: 693254 - DNA, 25 bp, Homo sapien
ctccaggtaagcaaggagcacgtgc

SEQ ID NO: 693255 - DNA, 25 bp, Homo sapien
ggaaccgcaacaagcagccagtcct

SEQ ID NO: 693256 - DNA, 25 bp, Homo sapien
gaaggaaccgcaacaagcagccagt

SEQ ID NO: 693257 - DNA, 25 bp, Homo sapien
ctttgagaaggaaccgcaacaagca

SEQ ID NO: 693258 - DNA, 25 bp, Homo sapien
tttgagaaggaaccgcaacaagcag

SEQ ID NO: 693259 - DNA, 25 bp, Homo sapien
tggcgctgcccatccaggccgaggc

SEQ ID NO: 693260 - DNA, 25 bp, Homo sapien
ggcgctggcggttcgcgggcctcgg

SEQ ID NO: 693261 - DNA, 25 bp, Homo sapien
tgttgttgaggaagaaaagcgcggc

SEQ ID NO: 693262 - DNA, 25 bp, Homo sapien
ccgagcggccgaggtcggcgcggcg

SEQ ID NO: 693263 - DNA, 25 bp, Homo sapien
ttgttgaggaagaaaagcgcggcct

SEQ ID NO: 693264 - DNA, 25 bp, Homo sapien
ggtcttcgagggtgctgccgcccac

SEQ ID NO: 693265 - DNA, 25 bp, Homo sapien
cgtcactcaggggacccggtcttcg

SEQ ID NO: 693266 - DNA, 25 bp, Homo sapien
gggacccggtcttcgagggtgctgc

SEQ ID NO: 693267 - DNA, 25 bp, Homo sapien
tcactcaggggacccggtcttcgag

SEQ ID NO: 693268 - DNA, 25 bp, Homo sapien
tgtcagcccacgagggggcgtccaa

SEQ ID NO: 693269 - DNA, 25 bp, Homo sapien
tccgttgcctcccagagcgtgggca

SEQ ID NO: 693270 - DNA, 25 bp, Homo sapien
cagacatctgtttgctgtcagccca

SEQ ID NO: 693271 - DNA, 25 bp, Homo sapien
ccaagattgtgcttggagcttggcg

SEQ ID NO: 693272 - DNA, 25 bp, Homo sapien
ccctcttgaagtgggccaggatgtg

SEQ ID NO: 693273 - DNA, 25 bp, Homo sapien
atgtgcccgtcaccggctcttcggg

SEQ ID NO: 693274 - DNA, 25 bp, Homo sapien
gggtgaatcgccagcctgagacccc

SEQ ID NO: 693275 - DNA, 25 bp, Homo sapien
gctggagcctgagtgatcccgcctc

SEQ ID NO: 693276 - DNA, 25 bp, Homo sapien
gggcccctcagtggctgtcagtttc

SEQ ID NO: 693277 - DNA, 25 bp, Homo sapien
gggagggactgtggtcctcggcgtc

SEQ ID NO: 693278 - DNA, 25 bp, Homo sapien
gtggtcctcggcgtcccttgggctc

SEQ ID NO: 693279 - DNA, 25 bp, Homo sapien
ccgggcccctcagtggctgtcagtt

SEQ ID NO: 693280 - DNA, 25 bp, Homo sapien
ttgttcctacagaaaccggtgccca

SEQ ID NO: 693281 - DNA, 25 bp, Homo sapien
ggcagggtcataaggctcacaggca

SEQ ID NO: 693282 - DNA, 25 bp, Homo sapien
agtgatgatcctacctgctgggcag

SEQ ID NO: 693283 - DNA, 25 bp, Homo sapien
tagcccgatctgagggtgaaccctg

SEQ ID NO: 693284 - DNA, 25 bp, Homo sapien
ccgctccgggcagacgcaggccatg

SEQ ID NO: 693285 - DNA, 25 bp, Homo sapien
tccgggcagacgcaggccatggcca

SEQ ID NO: 693286 - DNA, 25 bp, Homo sapien
gctccgggcagacgcaggccatggc

SEQ ID NO: 693287 - DNA, 25 bp, Homo sapien
ccgggcagacgcaggccatggccac

SEQ ID NO: 693288 - DNA, 25 bp, Homo sapien
cctgccggcattactgggaggagct

SEQ ID NO: 693289 - DNA, 25 bp, Homo sapien
cggagaaaaaccagggccatacaat

SEQ ID NO: 693290 - DNA, 25 bp, Homo sapien
ccagagcaggaagtgaaaagttgtc

SEQ ID NO: 693291 - DNA, 25 bp, Homo sapien
gagctgccattgagcccagagcagg

SEQ ID NO: 693292 - DNA, 25 bp, Homo sapien
tttgtccccaggctccgaggcccgc

SEQ ID NO: 693293 - DNA, 25 bp, Homo sapien
ccccaggctccgaggcccgcttcct

SEQ ID NO: 693294 - DNA, 25 bp, Homo sapien
tgtccccaggctccgaggcccgctt

SEQ ID NO: 693295 - DNA, 25 bp, Homo sapien
ctttgtccccaggctccgaggcccg

SEQ ID NO: 693296 - DNA, 25 bp, Homo sapien
cgtgctcgtagtggcctccgcctgg

SEQ ID NO: 693297 - DNA, 25 bp, Homo sapien
ttccgtggtggaccctgcccgtgct

SEQ ID NO: 693298 - DNA, 25 bp, Homo sapien
gtggtggaccctgcccgtgctcctg

SEQ ID NO: 693299 - DNA, 25 bp, Homo sapien
tccccggtcgtgctcgtagtggcct

SEQ ID NO: 693300 - DNA, 25 bp, Homo sapien
gtctcatccagttcgtcggactctg

SEQ ID NO: 693301 - DNA, 25 bp, Homo sapien
ttcgtcggactctggtctcagcact

SEQ ID NO: 693302 - DNA, 25 bp, Homo sapien
ggactctggtctcagcacttcagcc

SEQ ID NO: 693303 - DNA, 25 bp, Homo sapien
tgtctcatccagttcgtcggactct

SEQ ID NO: 693304 - DNA, 25 bp, Homo sapien
caggcctagtgtccccatcagttgg

SEQ ID NO: 693305 - DNA, 25 bp, Homo sapien
tgccagccctaattgctaaggtgct

SEQ ID NO: 693306 - DNA, 25 bp, Homo sapien
ccagactaggatgggtggagccaac

SEQ ID NO: 693307 - DNA, 25 bp, Homo sapien
cactgagtgttgttagagaggctcc

SEQ ID NO: 693308 - DNA, 25 bp, Homo sapien
ctgggtggccgtccaggtcaggcgg

SEQ ID NO: 693309 - DNA, 25 bp, Homo sapien
gaggacaggctgagctgggaccctg

SEQ ID NO: 693310 - DNA, 25 bp, Homo sapien
ggtggcagaggcctccctgtgtctt

SEQ ID NO: 693311 - DNA, 25 bp, Homo sapien
gctgggaccctggaagtgggcgtga

SEQ ID NO: 693312 - DNA, 25 bp, Homo sapien
ttcatcttctgtactgcctggagag

SEQ ID NO: 693313 - DNA, 25 bp, Homo sapien
cagggctgagtgacccatgctggcc

SEQ ID NO: 693314 - DNA, 25 bp, Homo sapien
tggccggccggcttgggagtgtcct

SEQ ID NO: 693315 - DNA, 25 bp, Homo sapien
tccccttggtgccattgctgagtgc

SEQ ID NO: 693316 - DNA, 25 bp, Homo sapien
catgggagtggaagcctcctcctgc

SEQ ID NO: 693317 - DNA, 25 bp, Homo sapien
cctcagagtctgagccgactggtag

SEQ ID NO: 693318 - DNA, 25 bp, Homo sapien
cttggcctgacactgcctgccctgg

SEQ ID NO: 693319 - DNA, 25 bp, Homo sapien
tccaggcgaaggtcctgcatgcccg

SEQ ID NO: 693320 - DNA, 25 bp, Homo sapien
tctagggcacagtcctgcgtggctg

SEQ ID NO: 693321 - DNA, 25 bp, Homo sapien
accatggctgtgtggagccgtgacc

SEQ ID NO: 693322 - DNA, 25 bp, Homo sapien
gaggagaagccgaatgaccatggct

SEQ ID NO: 693323 - DNA, 25 bp, Homo sapien
aggccatgctgtgtggacctggcca

SEQ ID NO: 693324 - DNA, 25 bp, Homo sapien
ctggagggtcctagccacctgtcca

SEQ ID NO: 693325 - DNA, 25 bp, Homo sapien
gcctcggtcggcagggcaagcctgg

SEQ ID NO: 693326 - DNA, 25 bp, Homo sapien
cagggagaggccacgctcatacgct

SEQ ID NO: 693327 - DNA, 25 bp, Homo sapien
gccacgctcatacgctgggctgggt

SEQ ID NO: 693328 - DNA, 25 bp, Homo sapien
caatggtcccgtgcagctggttgga

SEQ ID NO: 693329 - DNA, 25 bp, Homo sapien
gtggcccctggggagattttggcca

SEQ ID NO: 693330 - DNA, 25 bp, Homo sapien
gtctggggctcgcgactcaggcagg

SEQ ID NO: 693331 - DNA, 25 bp, Homo sapien
tctggggctcgcgactcaggcaggg

SEQ ID NO: 693332 - DNA, 25 bp, Homo sapien
tggagatgtcctgtgccctgctggc

SEQ ID NO: 693333 - DNA, 25 bp, Homo sapien
gatgtcctgtgccctgctggctttt

SEQ ID NO: 693334 - DNA, 25 bp, Homo sapien
ctggagatgtcctgtgccctgctgg

SEQ ID NO: 693335 - DNA, 25 bp, Homo sapien
gagatgtcctgtgccctgctggctt

SEQ ID NO: 693336 - DNA, 25 bp, Homo sapien
cttctccccgtaggcccacgccctg

SEQ ID NO: 693337 - DNA, 25 bp, Homo sapien
ctcctcgtggcctcccggtggcttc

SEQ ID NO: 693338 - DNA, 25 bp, Homo sapien
cctcgtggcctcccggtggcttctc

SEQ ID NO: 693339 - DNA, 25 bp, Homo sapien
tcctcgtggcctcccggtggcttct

SEQ ID NO: 693340 - DNA, 25 bp, Homo sapien
tccttcaaggtctcgttctcttcct

SEQ ID NO: 693341 - DNA, 25 bp, Homo sapien
ggccccgaagccgcttcacctcctc

SEQ ID NO: 693342 - DNA, 25 bp, Homo sapien
ccttcaaggtctcgttctcttcctt

SEQ ID NO: 693343 - DNA, 25 bp, Homo sapien
cccaggccccgaagccgcttcacct

SEQ ID NO: 693344 - DNA, 25 bp, Homo sapien
ctggggtcgcctggccccgtgggag

SEQ ID NO: 693345 - DNA, 25 bp, Homo sapien
cgtgggagaggaccccggttgtctg

SEQ ID NO: 693346 - DNA, 25 bp, Homo sapien
tctgcaggtgggagctctcgaactc

SEQ ID NO: 693347 - DNA, 25 bp, Homo sapien
ctgcaggtgggagctctcgaactcc

SEQ ID NO: 693348 - DNA, 25 bp, Homo sapien
accatgcagcggtcgcacaggccgg

SEQ ID NO: 693349 - DNA, 25 bp, Homo sapien
gggtgaccatgcagcggtcgcacag

SEQ ID NO: 693350 - DNA, 25 bp, Homo sapien
tcctggccatgctgcgaggtgtcct

SEQ ID NO: 693351 - DNA, 25 bp, Homo sapien
gtcctggccatgctgcgaggtgtcc

SEQ ID NO: 693352 - DNA, 25 bp, Homo sapien
ggccatgctgcgaggtgtcctccca

SEQ ID NO: 693353 - DNA, 25 bp, Homo sapien
atgctgcgaggtgtcctcccaggcc

SEQ ID NO: 693354 - DNA, 25 bp, Homo sapien
gtgtcttctgctgttcccggagctg

SEQ ID NO: 693355 - DNA, 25 bp, Homo sapien
tcttggagaagagctcctcgatcct

SEQ ID NO: 693356 - DNA, 25 bp, Homo sapien
agcacccgcaggttctccttcagtg

SEQ ID NO: 693357 - DNA, 25 bp, Homo sapien
agagctcctcgatcctctgggcgtc

SEQ ID NO: 693358 - DNA, 25 bp, Homo sapien
ctcctctgtgacgtctgtcccgtcc

SEQ ID NO: 693359 - DNA, 25 bp, Homo sapien
tgcacgctcctctgtgatgtctgtc

SEQ ID NO: 693360 - DNA, 25 bp, Homo sapien
tgtgacgtctgtcccgtccacgcac

SEQ ID NO: 693361 - DNA, 25 bp, Homo sapien
ctgcacgctcctctgtgatgtctgt

SEQ ID NO: 693362 - DNA, 25 bp, Homo sapien
acgtattgttgatattctgatcatg

SEQ ID NO: 693363 - DNA, 25 bp, Homo sapien
gtattgttgatattctgatcatgat

SEQ ID NO: 693364 - DNA, 25 bp, Homo sapien
gaacgtattgttgatattctgatca

SEQ ID NO: 693365 - DNA, 25 bp, Homo sapien
cgtattgttgatattctgatcatga

SEQ ID NO: 693366 - DNA, 25 bp, Homo sapien
gagttcagttccagaagcttgttct

SEQ ID NO: 693367 - DNA, 25 bp, Homo sapien
ttcagttccagaagcttgttctgca

SEQ ID NO: 693368 - DNA, 25 bp, Homo sapien
tgagttcagttccagaagcttgttc

SEQ ID NO: 693369 - DNA, 25 bp, Homo sapien
cggcacctctctgagttcagttcca

SEQ ID NO: 693370 - DNA, 25 bp, Homo sapien
tctcgtggatctccttcagcctgtt

SEQ ID NO: 693371 - DNA, 25 bp, Homo sapien
tcagcctgttcagcgactccatgaa

SEQ ID NO: 693372 - DNA, 25 bp, Homo sapien
tcgtggatctccttcagcctgttca

SEQ ID NO: 693373 - DNA, 25 bp, Homo sapien
cttcagcctgttcagcgactccatg

SEQ ID NO: 693374 - DNA, 25 bp, Homo sapien
tggagacgcctgcagcctctactgc

SEQ ID NO: 693375 - DNA, 25 bp, Homo sapien
tggccctggcccgggcccctctgcg

SEQ ID NO: 693376 - DNA, 25 bp, Homo sapien
ctgcagcctctactgcccctctgtg

SEQ ID NO: 693377 - DNA, 25 bp, Homo sapien
ctctgcgctggggttgtggagacgc

SEQ ID NO: 693378 - DNA, 25 bp, Homo sapien
tgggcaccagtgctccaaggacgtc

SEQ ID NO: 693379 - DNA, 25 bp, Homo sapien
tccaaggacgtctgccaggccggct

SEQ ID NO: 693380 - DNA, 25 bp, Homo sapien
agcaggaggcatccggggcatcact

SEQ ID NO: 693381 - DNA, 25 bp, Homo sapien
tccgagggcactcaaccagagaagc

SEQ ID NO: 693382 - DNA, 25 bp, Homo sapien
cgcggagtcccccacgctcttcaca

SEQ ID NO: 693383 - DNA, 25 bp, Homo sapien
ggagagagaagtgagcgggctgtga

SEQ ID NO: 693384 - DNA, 25 bp, Homo sapien
acctctgtcgacctctgcgcggagt

SEQ ID NO: 693385 - DNA, 25 bp, Homo sapien
tgcctcaacctctgtcgacctctgc

SEQ ID NO: 693386 - DNA, 25 bp, Homo sapien
caggcaacatcgtcggccccctggc

SEQ ID NO: 693387 - DNA, 25 bp, Homo sapien
tgaactccaggcaacatcgtcggcc

SEQ ID NO: 693388 - DNA, 25 bp, Homo sapien
ctgaactccaggcaacatcgtcggc

SEQ ID NO: 693389 - DNA, 25 bp, Homo sapien
gcaacatcgtcggccccctggcact

SEQ ID NO: 693390 - DNA, 25 bp, Homo sapien
gggtcgtctcctagagcagcagcca

SEQ ID NO: 693391 - DNA, 25 bp, Homo sapien
cattgtgacgttcctggagttgtga

SEQ ID NO: 693392 - DNA, 25 bp, Homo sapien
gtttccccggtcaacagaggctgag

SEQ ID NO: 693393 - DNA, 25 bp, Homo sapien
tagacaccactgtgatggatgagtg

SEQ ID NO: 693394 - DNA, 25 bp, Homo sapien
tgggtgtcactgactggtttgcaaa

SEQ ID NO: 693395 - DNA, 25 bp, Homo sapien
actggtttgcaaagttccacgccat

SEQ ID NO: 693396 - DNA, 25 bp, Homo sapien
cactgactggtttgcaaagttccac

SEQ ID NO: 693397 - DNA, 25 bp, Homo sapien
ttggctgggtgtcactgactggttt

SEQ ID NO: 693398 - DNA, 25 bp, Homo sapien
ccccaggctgggcctcgtcccccat

SEQ ID NO: 693399 - DNA, 25 bp, Homo sapien
ctgccagccaccagtccccaggctg

SEQ ID NO: 693400 - DNA, 25 bp, Homo sapien
gccagccaccagtccccaggctggg

SEQ ID NO: 693401 - DNA, 25 bp, Homo sapien
ccaggctgggcctcgtcccccatgc

SEQ ID NO: 693402 - DNA, 25 bp, Homo sapien
ggctgaccgtggcaccaactctttt

SEQ ID NO: 693403 - DNA, 25 bp, Homo sapien
cagtaagacagaagagtcttgggcc

SEQ ID NO: 693404 - DNA, 25 bp, Homo sapien
ccagagcccttcacggtttcttgac

SEQ ID NO: 693405 - DNA, 25 bp, Homo sapien
ccagtgaattctggcggccactgag

SEQ ID NO: 693406 - DNA, 25 bp, Homo sapien
taacttccgccggacagaacttaca

SEQ ID NO: 693407 - DNA, 25 bp, Homo sapien
gccggacagaacttacagatgttac

SEQ ID NO: 693408 - DNA, 25 bp, Homo sapien
acttccgccggacagaacttacaga

SEQ ID NO: 693409 - DNA, 25 bp, Homo sapien
tccgccggacagaacttacagatgt

SEQ ID NO: 693410 - DNA, 25 bp, Homo sapien
gaggttcctctaacctcgtctctac

SEQ ID NO: 693411 - DNA, 25 bp, Homo sapien
cctggcatttgtgggcacattcatc

SEQ ID NO: 693412 - DNA, 25 bp, Homo sapien
gagctggagcggtcctggcatttgt

SEQ ID NO: 693413 - DNA, 25 bp, Homo sapien
agctggagcggtcctggcatttgtg

SEQ ID NO: 693414 - DNA, 25 bp, Homo sapien
ggcatttgtgggcacattcatccat

SEQ ID NO: 693415 - DNA, 25 bp, Homo sapien
aacactgaccgtcaggcgggcacat

SEQ ID NO: 693416 - DNA, 25 bp, Homo sapien
cagcaaggatgtctcagggactgga

SEQ ID NO: 693417 - DNA, 25 bp, Homo sapien
attcaggagtaaaggcagcaaggat

SEQ ID NO: 693418 - DNA, 25 bp, Homo sapien
aagtggcagccccacccgtggaagg

SEQ ID NO: 693419 - DNA, 25 bp, Homo sapien
aggtcaagatcaagggccctgcacg

SEQ ID NO: 693420 - DNA, 25 bp, Homo sapien
ggatcctgccgattacgaaatgaag

SEQ ID NO: 693421 - DNA, 25 bp, Homo sapien
cagaacgaggcctcaaagtggcgga

SEQ ID NO: 693422 - DNA, 25 bp, Homo sapien
agtggcggaccctccacagtgtttg

SEQ ID NO: 693423 - DNA, 25 bp, Homo sapien
ggcaggacagcacgagccggcgctt

SEQ ID NO: 693424 - DNA, 25 bp, Homo sapien
caggacagcacgagccggcgcttct

SEQ ID NO: 693425 - DNA, 25 bp, Homo sapien
gtggcaggacagcacgagccggcgc

SEQ ID NO: 693426 - DNA, 25 bp, Homo sapien
aggacagcacgagccggcgcttctg

SEQ ID NO: 693427 - DNA, 25 bp, Homo sapien
ctatcctccttggggtgtgtcccag

SEQ ID NO: 693428 - DNA, 25 bp, Homo sapien
cctccttggggtgtgtcccaggtga

SEQ ID NO: 693429 - DNA, 25 bp, Homo sapien
ctccttggggtgtgtcccaggtgag

SEQ ID NO: 693430 - DNA, 25 bp, Homo sapien
atcctccttggggtgtgtcccaggt

SEQ ID NO: 693431 - DNA, 25 bp, Homo sapien
cctgggcagcccctcttgtttcgaa

SEQ ID NO: 693432 - DNA, 25 bp, Homo sapien
gtgagggctccttgacacacgtgcc

SEQ ID NO: 693433 - DNA, 25 bp, Homo sapien
ttggaccgttgccattgtcccaggg

SEQ ID NO: 693434 - DNA, 25 bp, Homo sapien
tccatctgttggagactgggcagcg

SEQ ID NO: 693435 - DNA, 25 bp, Homo sapien
tcgcaatgtccccacacctggtgca

SEQ ID NO: 693436 - DNA, 25 bp, Homo sapien
caggacggctctgtgtaccgtgacc

SEQ ID NO: 693437 - DNA, 25 bp, Homo sapien
aaaggagggcccgacgccgctcatc

SEQ ID NO: 693438 - DNA, 25 bp, Homo sapien
gcacacgcacatccgggtctcaggt

SEQ ID NO: 693439 - DNA, 25 bp, Homo sapien
tccatagagacgtggattcccaagg

SEQ ID NO: 693440 - DNA, 25 bp, Homo sapien
ccatagagacgtggattcccaaggt

SEQ ID NO: 693441 - DNA, 25 bp, Homo sapien
accatcagggcctggagatgtcctt

SEQ ID NO: 693442 - DNA, 25 bp, Homo sapien
ccatcagggcctggagatgtccttg

SEQ ID NO: 693443 - DNA, 25 bp, Homo sapien
taaggtatcatccaacccagtgtgg

SEQ ID NO: 693444 - DNA, 25 bp, Homo sapien
gacagtttcagaatgaccggacccg

SEQ ID NO: 693445 - DNA, 25 bp, Homo sapien
gacaagagactaaactgcgtggccc

SEQ ID NO: 693446 - DNA, 25 bp, Homo sapien
caacagcgcttggatgggtcaggac

SEQ ID NO: 693447 - DNA, 25 bp, Homo sapien
cattgatgacggaattcaagttggt

SEQ ID NO: 693448 - DNA, 25 bp, Homo sapien
agtgtggtccggagccttgggccgc

SEQ ID NO: 693449 - DNA, 25 bp, Homo sapien
tggtccggagccttgggccgcacct

SEQ ID NO: 693450 - DNA, 25 bp, Homo sapien
acatattgacggtgagcattgatga

SEQ ID NO: 693451 - DNA, 25 bp, Homo sapien
tggggcccgactgccgtctgtccag

SEQ ID NO: 693452 - DNA, 25 bp, Homo sapien
cgactgccgtctgtccagaaggcct

SEQ ID NO: 693453 - DNA, 25 bp, Homo sapien
gctctggggcccgactgccgtctgt

SEQ ID NO: 693454 - DNA, 25 bp, Homo sapien
ctgtgtggagactccagcagaccca

SEQ ID NO: 693455 - DNA, 25 bp, Homo sapien
tccaggctgttcccctgacatgggc

SEQ ID NO: 693456 - DNA, 25 bp, Homo sapien
tggagcaaagcaggcacggaggtga

SEQ ID NO: 693457 - DNA, 25 bp, Homo sapien
ttccaggctgttcccctgacatggg

SEQ ID NO: 693458 - DNA, 25 bp, Homo sapien
ctggagcaaagcaggcacggaggtg

SEQ ID NO: 693459 - DNA, 25 bp, Homo sapien
cgtggaggggaaggcaaagtcctca

SEQ ID NO: 693460 - DNA, 25 bp, Homo sapien
ttgaactccaagtggccgggggcaa

SEQ ID NO: 693461 - DNA, 25 bp, Homo sapien
aaagtcctcaggctcgaacttgaac

SEQ ID NO: 693462 - DNA, 25 bp, Homo sapien
ccgggggcaagagagtcatcctcct

SEQ ID NO: 693463 - DNA, 25 bp, Homo sapien
tgggcttggctttcgaagtggctgc

SEQ ID NO: 693464 - DNA, 25 bp, Homo sapien
tggctttcgaagtggctgctgagct

SEQ ID NO: 693465 - DNA, 25 bp, Homo sapien
gggaggccgaggcattccttgtgga

SEQ ID NO: 693466 - DNA, 25 bp, Homo sapien
tgctgagctgtcagtgctggcgaca

SEQ ID NO: 693467 - DNA, 25 bp, Homo sapien
cccggcccagagaggtttggagact

SEQ ID NO: 693468 - DNA, 25 bp, Homo sapien
tttggagactcctcacggtcacacc

SEQ ID NO: 693469 - DNA, 25 bp, Homo sapien
gccatgtagcgggtctcctctggcc

SEQ ID NO: 693470 - DNA, 25 bp, Homo sapien
cttcctgccatgtagcgggtctcct

SEQ ID NO: 693471 - DNA, 25 bp, Homo sapien
tggcgatggtctttggcttccgctt

SEQ ID NO: 693472 - DNA, 25 bp, Homo sapien
gcccctggccttggcgatggtcttt

SEQ ID NO: 693473 - DNA, 25 bp, Homo sapien
cttccgtgtctggatgctttccttc

SEQ ID NO: 693474 - DNA, 25 bp, Homo sapien
ccgcttccgtgtctggatgctttcc

SEQ ID NO: 693475 - DNA, 25 bp, Homo sapien
gagttccgccgccacagcgtggtgt

SEQ ID NO: 693476 - DNA, 25 bp, Homo sapien
tggtcgtgtggcagttggtgcagca

SEQ ID NO: 693477 - DNA, 25 bp, Homo sapien
tgtggcagttggtgcagcagaggcc

SEQ ID NO: 693478 - DNA, 25 bp, Homo sapien
cagcgtggtgttggtcgtgtggcag

SEQ ID NO: 693479 - DNA, 25 bp, Homo sapien
tccgggtcccacctgcctatgtctc

SEQ ID NO: 693480 - DNA, 25 bp, Homo sapien
ctccgggtcccacctgcctatgtct

SEQ ID NO: 693481 - DNA, 25 bp, Homo sapien
ccgggtcccacctgcctatgtctcc

SEQ ID NO: 693482 - DNA, 25 bp, Homo sapien
ggctccgggtcccacctgcctatgt

SEQ ID NO: 693483 - DNA, 25 bp, Homo sapien
gttcagagctgcaccggcatagcac

SEQ ID NO: 693484 - DNA, 25 bp, Homo sapien
cagcctgtaactgagggatgttcag

SEQ ID NO: 693485 - DNA, 25 bp, Homo sapien
tcagcctgtaactgagggatgttca

SEQ ID NO: 693486 - DNA, 25 bp, Homo sapien
accggcatagcacgcgaatccaggc

SEQ ID NO: 693487 - DNA, 25 bp, Homo sapien
tcaagcctcatcccaggtagggtca

SEQ ID NO: 693488 - DNA, 25 bp, Homo sapien
caagcctcatcccaggtagggtcac

SEQ ID NO: 693489 - DNA, 25 bp, Homo sapien
gctgacaccgttgctccagagcctg

SEQ ID NO: 693490 - DNA, 25 bp, Homo sapien
agcctggctgacaccgttgctccag

SEQ ID NO: 693491 - DNA, 25 bp, Homo sapien
agccaccaccgactcgtagggctga

SEQ ID NO: 693492 - DNA, 25 bp, Homo sapien
accaccgactcgtagggctgagctc

SEQ ID NO: 693493 - DNA, 25 bp, Homo sapien
tgcgcccaggcgcccctctgcccag

SEQ ID NO: 693494 - DNA, 25 bp, Homo sapien
tgcaagaggtcccctcgggggagca

SEQ ID NO: 693495 - DNA, 25 bp, Homo sapien
caagaggtcccctcgggggagcact

SEQ ID NO: 693496 - DNA, 25 bp, Homo sapien
gattgcaagaggtcccctcggggga

SEQ ID NO: 693497 - DNA, 25 bp, Homo sapien
cgccacagcggtgtggacagggccc

SEQ ID NO: 693498 - DNA, 25 bp, Homo sapien
cgcttctgaggccgaacgagcggcc

SEQ ID NO: 693499 - DNA, 25 bp, Homo sapien
cgagcggccggttgacgccattcat

SEQ ID NO: 693500 - DNA, 25 bp, Homo sapien
gcggtgtggacagggccccgcagtt

SEQ ID NO: 693501 - DNA, 25 bp, Homo sapien
cacatacgataaaattcgctagggt

SEQ ID NO: 693502 - DNA, 25 bp, Homo sapien
ttcgaggatggggtgttaataaaca

SEQ ID NO: 693503 - DNA, 25 bp, Homo sapien
cagggtgtctacactggcgggggag

SEQ ID NO: 693504 - DNA, 25 bp, Homo sapien
cgctagggttggtttttcgaggatg

SEQ ID NO: 693505 - DNA, 25 bp, Homo sapien
tcacacccggacaggtaggacagca

SEQ ID NO: 693506 - DNA, 25 bp, Homo sapien
acgaatccgcggtggctgtctgcgc

SEQ ID NO: 693507 - DNA, 25 bp, Homo sapien
gaactgttctcgaggcaacagcgcg

SEQ ID NO: 693508 - DNA, 25 bp, Homo sapien
cggcacaaacatcggagagccggcg

SEQ ID NO: 693509 - DNA, 25 bp, Homo sapien
gggcagtcacaacgccgagcccacc

SEQ ID NO: 693510 - DNA, 25 bp, Homo sapien
gaggtcacgggagctctgcgccctc

SEQ ID NO: 693511 - DNA, 25 bp, Homo sapien
cagcgcccgagcttatgccgggcag

SEQ ID NO: 693512 - DNA, 25 bp, Homo sapien
ggtgccgccgcttcgggcagcgctt

SEQ ID NO: 693513 - DNA, 25 bp, Homo sapien
tgggaaggacgggcctggcgcggcc

SEQ ID NO: 693514 - DNA, 25 bp, Homo sapien
agggcggcagggcacggcggtggcg

SEQ ID NO: 693515 - DNA, 25 bp, Homo sapien
gagggcggcagggcacggcggtggc

SEQ ID NO: 693516 - DNA, 25 bp, Homo sapien
gggagggcggcagggcacggcggtg

SEQ ID NO: 693517 - DNA, 25 bp, Homo sapien
cagggagggcggcagggcacggcgg

SEQ ID NO: 693518 - DNA, 25 bp, Homo sapien
gctcggtgcagggaaccggcttcca

SEQ ID NO: 693519 - DNA, 25 bp, Homo sapien
gctcgggtcgctggactgggacggg

SEQ ID NO: 693520 - DNA, 25 bp, Homo sapien
tgcactggcgggagccccgcgattt

SEQ ID NO: 693521 - DNA, 25 bp, Homo sapien
ccggcttccatagggacggccggct

SEQ ID NO: 693522 - DNA, 25 bp, Homo sapien
tcctccaggcgccagaaatgcgtgt

SEQ ID NO: 693523 - DNA, 25 bp, Homo sapien
gactcgggaagagtttcctccaggc

SEQ ID NO: 693524 - DNA, 25 bp, Homo sapien
tgggtgccaggctcgaaggccccaa

SEQ ID NO: 693525 - DNA, 25 bp, Homo sapien
gggtccagcctctaaggcccgatct

SEQ ID NO: 693526 - DNA, 25 bp, Homo sapien
gctccgcaggttgcgggaaacggaa

SEQ ID NO: 693527 - DNA, 25 bp, Homo sapien
gctcggagcacaccgggtggaccca

SEQ ID NO: 693528 - DNA, 25 bp, Homo sapien
cggaacggcgggctcggagcacacc

SEQ ID NO: 693529 - DNA, 25 bp, Homo sapien
tcccggtgagggctgcatggaggcg

SEQ ID NO: 693530 - DNA, 25 bp, Homo sapien
ttgggaccccacagacggttccgca

SEQ ID NO: 693531 - DNA, 25 bp, Homo sapien
gcccacagcagataaggattcaggg

SEQ ID NO: 693532 - DNA, 25 bp, Homo sapien
gcttgtggaggcgtccagggtccct

SEQ ID NO: 693533 - DNA, 25 bp, Homo sapien
agacggttccgcagcaggttcaggc

SEQ ID NO: 693534 - DNA, 25 bp, Homo sapien
ggtgcagcgcggcaggctggggtgg

SEQ ID NO: 693535 - DNA, 25 bp, Homo sapien
tggcgtgttttccacgtggatccag

SEQ ID NO: 693536 - DNA, 25 bp, Homo sapien
actggtggcgtgttttccacgtgga

SEQ ID NO: 693537 - DNA, 25 bp, Homo sapien
gaagccactggtggcgtgttttcca

SEQ ID NO: 693538 - DNA, 25 bp, Homo sapien
cgtgttttccacgtggatccagctg

SEQ ID NO: 693539 - DNA, 25 bp, Homo sapien
caggtgggtcctcgccttgtacgct

SEQ ID NO: 693540 - DNA, 25 bp, Homo sapien
tcaggaggataaggaccagctccca

SEQ ID NO: 693541 - DNA, 25 bp, Homo sapien
caccggggatggtcccacttgaggc

SEQ ID NO: 693542 - DNA, 25 bp, Homo sapien
gggatgacccctatcaatcccagtc

SEQ ID NO: 693543 - DNA, 25 bp, Homo sapien
tcctgccaacggaagatgctgggcc

SEQ ID NO: 693544 - DNA, 25 bp, Homo sapien
ggccacatcgcctgtgtaaccgaat

SEQ ID NO: 693545 - DNA, 25 bp, Homo sapien
ctccgcattcggcagggcaggcact

SEQ ID NO: 693546 - DNA, 25 bp, Homo sapien
aggaaaacagctctcggccacatcg

SEQ ID NO: 693547 - DNA, 25 bp, Homo sapien
aacagggctggtgatgaccttggcc

SEQ ID NO: 693548 - DNA, 25 bp, Homo sapien
ctggggatgcaaacagggctggtga

SEQ ID NO: 693549 - DNA, 25 bp, Homo sapien
tgcaaacagggctggtgatgacctt

SEQ ID NO: 693550 - DNA, 25 bp, Homo sapien
gggatgcaaacagggctggtgatga

SEQ ID NO: 693551 - DNA, 25 bp, Homo sapien
gggcacgactagactgtggccccgt

SEQ ID NO: 693552 - DNA, 25 bp, Homo sapien
gctgggcacgactagactgtggccc

SEQ ID NO: 693553 - DNA, 25 bp, Homo sapien
tgggctgggcacgactagactgtgg

SEQ ID NO: 693554 - DNA, 25 bp, Homo sapien
tttcaggtctagatgcggggaccgg

SEQ ID NO: 693555 - DNA, 25 bp, Homo sapien
cacgtgtgctcacagaggcctggaa

SEQ ID NO: 693556 - DNA, 25 bp, Homo sapien
tacgtgtacgcccatgggcacgtgt

SEQ ID NO: 693557 - DNA, 25 bp, Homo sapien
gaaggtgctgtttttccacgcgacg

SEQ ID NO: 693558 - DNA, 25 bp, Homo sapien
tcgcacacatgcctctacgtgtacg

SEQ ID NO: 693559 - DNA, 25 bp, Homo sapien
aagggcaggcattcccagtgatcag

SEQ ID NO: 693560 - DNA, 25 bp, Homo sapien
agggcaggcattcccagtgatcagg

SEQ ID NO: 693561 - DNA, 25 bp, Homo sapien
aggggctccgaagcgtgcccagcac

SEQ ID NO: 693562 - DNA, 25 bp, Homo sapien
gagtgaggggctccgaagcgtgccc

SEQ ID NO: 693563 - DNA, 25 bp, Homo sapien
tgctctgtagctgtggcccactcca

SEQ ID NO: 693564 - DNA, 25 bp, Homo sapien
caggggactgctctgtagctgtggc

SEQ ID NO: 693565 - DNA, 25 bp, Homo sapien
ggaggagtgttcctccggacagaca

SEQ ID NO: 693566 - DNA, 25 bp, Homo sapien
gaggagtgttcctccggacagacat

SEQ ID NO: 693567 - DNA, 25 bp, Homo sapien
gatgtcagttggcttgaaaaaccgc

SEQ ID NO: 693568 - DNA, 25 bp, Homo sapien
ccaacaggttgacatgagcatcaca

SEQ ID NO: 693569 - DNA, 25 bp, Homo sapien
gacaggaaaaccgagtacacaccag

SEQ ID NO: 693570 - DNA, 25 bp, Homo sapien
taaatatagctgtgaaacttcccgg

SEQ ID NO: 693571 - DNA, 25 bp, Homo sapien
gctgctcaacctgcgaggaggtgca

SEQ ID NO: 693572 - DNA, 25 bp, Homo sapien
ttcctctggtgcttgacctcgccct

SEQ ID NO: 693573 - DNA, 25 bp, Homo sapien
ttcctgatcatggtcgggaccccag

SEQ ID NO: 693574 - DNA, 25 bp, Homo sapien
gcatctgcccctacgttggcctttg

SEQ ID NO: 693575 - DNA, 25 bp, Homo sapien
gagcggccagacaacagctttgcag

SEQ ID NO: 693576 - DNA, 25 bp, Homo sapien
tgttcctggaccgacccatgatgga

SEQ ID NO: 693577 - DNA, 25 bp, Homo sapien
tgtgttcccacagcgcaaaggtgtt

SEQ ID NO: 693578 - DNA, 25 bp, Homo sapien
ccatgatggaagtgtgtttggttcc

SEQ ID NO: 693579 - DNA, 25 bp, Homo sapien
gtccagtacgctcaggacatgcagg

SEQ ID NO: 693580 - DNA, 25 bp, Homo sapien
ccagtacgctcaggacatgcaggga

SEQ ID NO: 693581 - DNA, 25 bp, Homo sapien
agtacgctcaggacatgcagggacc

SEQ ID NO: 693582 - DNA, 25 bp, Homo sapien
acgctcaggacatgcagggacccag

SEQ ID NO: 693583 - DNA, 25 bp, Homo sapien
gtgtgccagaggggcaaggcagaac

SEQ ID NO: 693584 - DNA, 25 bp, Homo sapien
gggtgtgccagaggggcaaggcaga

SEQ ID NO: 693585 - DNA, 25 bp, Homo sapien
tgtgccagaggggcaaggcagaacc

SEQ ID NO: 693586 - DNA, 25 bp, Homo sapien
ggtgtgccagaggggcaaggcagaa

SEQ ID NO: 693587 - DNA, 25 bp, Homo sapien
ttggcctcgcagatggaatttccca

SEQ ID NO: 693588 - DNA, 25 bp, Homo sapien
tgctgatgaagatgtcttggaaagg

SEQ ID NO: 693589 - DNA, 25 bp, Homo sapien
catgaaaggcttggcctcgcagatg

SEQ ID NO: 693590 - DNA, 25 bp, Homo sapien
tcttggaaaggtacagcatgaaagg

SEQ ID NO: 693591 - DNA, 25 bp, Homo sapien
tcctgtgccctggtgagcaaagcct

SEQ ID NO: 693592 - DNA, 25 bp, Homo sapien
aacttttgcagtatcccgtgggcga

SEQ ID NO: 693593 - DNA, 25 bp, Homo sapien
gcaaagcctgtgagccctagtgtcc

SEQ ID NO: 693594 - DNA, 25 bp, Homo sapien
gatggcatcagtagtcacggtaaca

SEQ ID NO: 693595 - DNA, 25 bp, Homo sapien
agacttgcttttgtccgaccctggc

SEQ ID NO: 693596 - DNA, 25 bp, Homo sapien
tgggctgctcggtgttgggacccac

SEQ ID NO: 693597 - DNA, 25 bp, Homo sapien
tctctccatcgtgggggcctgtcgg

SEQ ID NO: 693598 - DNA, 25 bp, Homo sapien
aggtgctcccggttcctcctggctg

SEQ ID NO: 693599 - DNA, 25 bp, Homo sapien
gaacggtgttgggtcagtgctctca

SEQ ID NO: 693600 - DNA, 25 bp, Homo sapien
caggtccacgtgaaaccgaagctgg

SEQ ID NO: 693601 - DNA, 25 bp, Homo sapien
tgccgagggcgacagtttaaaatca

SEQ ID NO: 693602 - DNA, 25 bp, Homo sapien
tgagtgtgacgcgtttatccgaggc

SEQ ID NO: 693603 - DNA, 25 bp, Homo sapien
ctgggcatcaacctcgctgcagcct

SEQ ID NO: 693604 - DNA, 25 bp, Homo sapien
gcatcaacctcgctgcagcctgtga

SEQ ID NO: 693605 - DNA, 25 bp, Homo sapien
catcaacctcgctgcagcctgtgac

SEQ ID NO: 693606 - DNA, 25 bp, Homo sapien
gggcatcaacctcgctgcagcctgt

SEQ ID NO: 693607 - DNA, 25 bp, Homo sapien
cggtcacccacatggagtcggcagt

SEQ ID NO: 693608 - DNA, 25 bp, Homo sapien
tccacggtcacccacatggagtcgg

SEQ ID NO: 693609 - DNA, 25 bp, Homo sapien
cacggtcacccacatggagtcggca

SEQ ID NO: 693610 - DNA, 25 bp, Homo sapien
gtccacggtcacccacatggagtcg

SEQ ID NO: 693611 - DNA, 25 bp, Homo sapien
tatcatttcagctccacgcagaatg

SEQ ID NO: 693612 - DNA, 25 bp, Homo sapien
tcgcgattccgtaggtgcactggcg

SEQ ID NO: 693613 - DNA, 25 bp, Homo sapien
gtactgaatcagtgaagccaggtgg

SEQ ID NO: 693614 - DNA, 25 bp, Homo sapien
gaagaacccacatttactggctcag

SEQ ID NO: 693615 - DNA, 25 bp, Homo sapien
cagggagttcccgaatagaccaagt

SEQ ID NO: 693616 - DNA, 25 bp, Homo sapien
gcatattagaagcttggcagctcca

SEQ ID NO: 693617 - DNA, 25 bp, Homo sapien
catctgtcggagctctagtctgtgg

SEQ ID NO: 693618 - DNA, 25 bp, Homo sapien
tcattccaaattgcacccgggacca

SEQ ID NO: 693619 - DNA, 25 bp, Homo sapien
tgtcctcgtgtggccagagactcaa

SEQ ID NO: 693620 - DNA, 25 bp, Homo sapien
tagctgattctgtcctcgtgtggcc

SEQ ID NO: 693621 - DNA, 25 bp, Homo sapien
tcttcagatgtagctgattctgtcc

SEQ ID NO: 693622 - DNA, 25 bp, Homo sapien
tccaggttcttcagatgtagctgat

SEQ ID NO: 693623 - DNA, 25 bp, Homo sapien
ggtaaatgttgtgcccaggatccca

SEQ ID NO: 693624 - DNA, 25 bp, Homo sapien
gctgattcacaacagagagtgcctg

SEQ ID NO: 693625 - DNA, 25 bp, Homo sapien
tatttggtgtgagccatgacagggc

SEQ ID NO: 693626 - DNA, 25 bp, Homo sapien
tacccaggcctgagaaagatcggct

SEQ ID NO: 693627 - DNA, 25 bp, Homo sapien
gaaactgcaatttggctcgttctga

SEQ ID NO: 693628 - DNA, 25 bp, Homo sapien
tgcattatccacagagtgccacgtg

SEQ ID NO: 693629 - DNA, 25 bp, Homo sapien
gcagcctcacgtccaaaagatgcag

SEQ ID NO: 693630 - DNA, 25 bp, Homo sapien
gggtgacaggcgcactttgcaaaaa

SEQ ID NO: 693631 - DNA, 25 bp, Homo sapien
tggcactcacgtctttctgttttca

SEQ ID NO: 693632 - DNA, 25 bp, Homo sapien
ctttctgtcgctggcgttggcactc

SEQ ID NO: 693633 - DNA, 25 bp, Homo sapien
gcctctgcgctgttcacagagcctg

SEQ ID NO: 693634 - DNA, 25 bp, Homo sapien
ctctgcgctgttcacagagcctgct

SEQ ID NO: 693635 - DNA, 25 bp, Homo sapien
caaaacgagtgggctttttcttcat

SEQ ID NO: 693636 - DNA, 25 bp, Homo sapien
ctaccttctacaaaacgagtgggct

SEQ ID NO: 693637 - DNA, 25 bp, Homo sapien
aacttcagcccacaggaggtagtct

SEQ ID NO: 693638 - DNA, 25 bp, Homo sapien
gaagtgttttccagcagcgtagatc

SEQ ID NO: 693639 - DNA, 25 bp, Homo sapien
agtgttttccagcagcgtagatctc

SEQ ID NO: 693640 - DNA, 25 bp, Homo sapien
agaacttcagcccacaggaggtagt

SEQ ID NO: 693641 - DNA, 25 bp, Homo sapien
agcgctctccaaggtggcccgcttc

SEQ ID NO: 693642 - DNA, 25 bp, Homo sapien
gatgccgtattgaccaggaactcca

SEQ ID NO: 693643 - DNA, 25 bp, Homo sapien
gacgatgccgtattgaccaggaact

SEQ ID NO: 693644 - DNA, 25 bp, Homo sapien
acgcagacgatgccgtattgaccag

SEQ ID NO: 693645 - DNA, 25 bp, Homo sapien
ttggtgttgccggagccgtgcctgg

SEQ ID NO: 693646 - DNA, 25 bp, Homo sapien
ctgttggtgttgccggagccgtgcc

SEQ ID NO: 693647 - DNA, 25 bp, Homo sapien
tgttggtgttgccggagccgtgcct

SEQ ID NO: 693648 - DNA, 25 bp, Homo sapien
ggtgttgccggagccgtgcctggag

SEQ ID NO: 693649 - DNA, 25 bp, Homo sapien
tgctcctctaccgacttcgtgttca

SEQ ID NO: 693650 - DNA, 25 bp, Homo sapien
tcctctaccgacttcgtgttcaggc

SEQ ID NO: 693651 - DNA, 25 bp, Homo sapien
acagtgcggtgtctgcttccacgtc

SEQ ID NO: 693652 - DNA, 25 bp, Homo sapien
gttcaggcccccgacacagtgcggt

SEQ ID NO: 693653 - DNA, 25 bp, Homo sapien
cttgctgagatggacagatgtgccc

SEQ ID NO: 693654 - DNA, 25 bp, Homo sapien
taaaggtgaacaagctgcaagccca

SEQ ID NO: 693655 - DNA, 25 bp, Homo sapien
gtaaaggtgaacaagctgcaagccc

SEQ ID NO: 693656 - DNA, 25 bp, Homo sapien
aaaggtgaacaagctgcaagcccac

SEQ ID NO: 693657 - DNA, 25 bp, Homo sapien
agtaaaggtgaacaagctgcaagcc

SEQ ID NO: 693658 - DNA, 25 bp, Homo sapien
ggtgcaaagctttctcataactcag

SEQ ID NO: 693659 - DNA, 25 bp, Homo sapien
gtacgacgaagtgcctctgtcccag

SEQ ID NO: 693660 - DNA, 25 bp, Homo sapien
ctgggctctgtattccttgcggtgg

SEQ ID NO: 693661 - DNA, 25 bp, Homo sapien
gctcccaggtgcgtacgacgaagtg

SEQ ID NO: 693662 - DNA, 25 bp, Homo sapien
atctttttaaaaactcctgtctcag

SEQ ID NO: 693663 - DNA, 25 bp, Homo sapien
tggctttcaaagcatctttttaaaa

SEQ ID NO: 693664 - DNA, 25 bp, Homo sapien
ttttaaaaactcctgtctcaggcac

SEQ ID NO: 693665 - DNA, 25 bp, Homo sapien
cttggctttcaaagcatctttttaa

SEQ ID NO: 693666 - DNA, 25 bp, Homo sapien
ttcgatgccgtccacagttcctgct

SEQ ID NO: 693667 - DNA, 25 bp, Homo sapien
tcactgctccataaggggcttctgg

SEQ ID NO: 693668 - DNA, 25 bp, Homo sapien
gaaatccttcactgctccataaggg

SEQ ID NO: 693669 - DNA, 25 bp, Homo sapien
cttcccttcgatgccgtccacagtt

SEQ ID NO: 693670 - DNA, 25 bp, Homo sapien
cctgcttcctctggacagtggcact

SEQ ID NO: 693671 - DNA, 25 bp, Homo sapien
gaggagaagcacatgccaatgctgc

SEQ ID NO: 693672 - DNA, 25 bp, Homo sapien
tgctggtgctcggtggcatgaccgc

SEQ ID NO: 693673 - DNA, 25 bp, Homo sapien
ggagaagcacatgccaatgctgctg

SEQ ID NO: 693674 - DNA, 25 bp, Homo sapien
ggcatgaccgctgtcattctgaagt

SEQ ID NO: 693675 - DNA, 25 bp, Homo sapien
ccgttcaggggccattggtggcata

SEQ ID NO: 693676 - DNA, 25 bp, Homo sapien
cctagatacccgttcaggggccatt

SEQ ID NO: 693677 - DNA, 25 bp, Homo sapien
agggtgggcctagatacccgttcag

SEQ ID NO: 693678 - DNA, 25 bp, Homo sapien
tggcataggtgccaggtggagtccc

SEQ ID NO: 693679 - DNA, 25 bp, Homo sapien
catagcagaggaggcgttcccagct

SEQ ID NO: 693680 - DNA, 25 bp, Homo sapien
gccatagcagaggaggcgttcccag

SEQ ID NO: 693681 - DNA, 25 bp, Homo sapien
ccatagcagaggaggcgttcccagc

SEQ ID NO: 693682 - DNA, 25 bp, Homo sapien
tcacacactggagcactgtggggct

SEQ ID NO: 693683 - DNA, 25 bp, Homo sapien
gagagaatgcctcagcattgacaaa

SEQ ID NO: 693684 - DNA, 25 bp, Homo sapien
gatgtgctgaacttccccgtcagct

SEQ ID NO: 693685 - DNA, 25 bp, Homo sapien
tgagtaatggacatttcagggctga

SEQ ID NO: 693686 - DNA, 25 bp, Homo sapien
cctccacaaatacacctggaggaag

SEQ ID NO: 693687 - DNA, 25 bp, Homo sapien
cacaaatacacctggaggaagtccc

SEQ ID NO: 693688 - DNA, 25 bp, Homo sapien
gaagtcccaggccacggacacggga

SEQ ID NO: 693689 - DNA, 25 bp, Homo sapien
aagtcccaggccacggacacgggag

SEQ ID NO: 693690 - DNA, 25 bp, Homo sapien
gggagaggggagattccacagtgac

SEQ ID NO: 693691 - DNA, 25 bp, Homo sapien
gaggggagattccacagtgacccac

SEQ ID NO: 693692 - DNA, 25 bp, Homo sapien
caccctccacccaaggctgcgggga

SEQ ID NO: 693693 - DNA, 25 bp, Homo sapien
ctccacccaaggctgcggggagagg

SEQ ID NO: 693694 - DNA, 25 bp, Homo sapien
agagacgtactgctgagaggccggg

SEQ ID NO: 693695 - DNA, 25 bp, Homo sapien
tgatggcggctgctagagtatagag

SEQ ID NO: 693696 - DNA, 25 bp, Homo sapien
aacagggtcccgagtgtgatggcgg

SEQ ID NO: 693697 - DNA, 25 bp, Homo sapien
atagaggagagagacgtactgctga

SEQ ID NO: 693698 - DNA, 25 bp, Homo sapien
gctgggggcaagttcagcccaaagc

SEQ ID NO: 693699 - DNA, 25 bp, Homo sapien
tgctgggggcaagttcagcccaaag

SEQ ID NO: 693700 - DNA, 25 bp, Homo sapien
tctgctgggggcaagttcagcccaa

SEQ ID NO: 693701 - DNA, 25 bp, Homo sapien
tgggggcaagttcagcccaaagcca

SEQ ID NO: 693702 - DNA, 25 bp, Homo sapien
aggtcctcggctgcgtggatgtcca

SEQ ID NO: 693703 - DNA, 25 bp, Homo sapien
caggcctcacccaatggacagatgt

SEQ ID NO: 693704 - DNA, 25 bp, Homo sapien
gcgtggatgtccaaagtctcccctc

SEQ ID NO: 693705 - DNA, 25 bp, Homo sapien
aaggttgagggcaggccgaccaggt

SEQ ID NO: 693706 - DNA, 25 bp, Homo sapien
tgaagactgggctgccgtccactac

SEQ ID NO: 693707 - DNA, 25 bp, Homo sapien
ctgtgctgaagactgggctgccgtc

SEQ ID NO: 693708 - DNA, 25 bp, Homo sapien
gtgctgaagactgggctgccgtcca

SEQ ID NO: 693709 - DNA, 25 bp, Homo sapien
ctcggccactcccactatctgggga

SEQ ID NO: 693710 - DNA, 25 bp, Homo sapien
gggccggcagctggtggcccctgag

SEQ ID NO: 693711 - DNA, 25 bp, Homo sapien
cccacgtctgcaactctgggcagaa

SEQ ID NO: 693712 - DNA, 25 bp, Homo sapien
aggggtcactcctgacaggccctgg

SEQ ID NO: 693713 - DNA, 25 bp, Homo sapien
aagtcaggggtcactcctgacaggc

SEQ ID NO: 693714 - DNA, 25 bp, Homo sapien
gcccaggcctccaatctgctggcgc

SEQ ID NO: 693715 - DNA, 25 bp, Homo sapien
ctccaatctgctggcgcccagcagc

SEQ ID NO: 693716 - DNA, 25 bp, Homo sapien
agcctgagccccttcatgccagccc

SEQ ID NO: 693717 - DNA, 25 bp, Homo sapien
tagagatgcccagcaggagcccccg

SEQ ID NO: 693718 - DNA, 25 bp, Homo sapien
aggtcaccagcgcagcatccgtgct

SEQ ID NO: 693719 - DNA, 25 bp, Homo sapien
acaggtcaccagcgcagcatccgtg

SEQ ID NO: 693720 - DNA, 25 bp, Homo sapien
ccccacaggtcaccagcgcagcatc

SEQ ID NO: 693721 - DNA, 25 bp, Homo sapien
ccacaggtcaccagcgcagcatccg

SEQ ID NO: 693722 - DNA, 25 bp, Homo sapien
ccctggaggtgccttagagtccagg

SEQ ID NO: 693723 - DNA, 25 bp, Homo sapien
gaggtgccttagagtccaggccatt

SEQ ID NO: 693724 - DNA, 25 bp, Homo sapien
ggaggtgccttagagtccaggccat

SEQ ID NO: 693725 - DNA, 25 bp, Homo sapien
gggcccagctcctaagcccacattt

SEQ ID NO: 693726 - DNA, 25 bp, Homo sapien
ccacagggcccagctcctaagccca

SEQ ID NO: 693727 - DNA, 25 bp, Homo sapien
acagggcccagctcctaagcccaca

SEQ ID NO: 693728 - DNA, 25 bp, Homo sapien
agcaaagctcttgtgtgagcaatga

SEQ ID NO: 693729 - DNA, 25 bp, Homo sapien
gaccacgtgccgagccgggctctcc

SEQ ID NO: 693730 - DNA, 25 bp, Homo sapien
agctgaccacgtgccgagccgggct

SEQ ID NO: 693731 - DNA, 25 bp, Homo sapien
ggctctccccgcgccacctgctggg

SEQ ID NO: 693732 - DNA, 25 bp, Homo sapien
tgggtcctctccacggctgcgggac

SEQ ID NO: 693733 - DNA, 25 bp, Homo sapien
cattggacagtcgatttggttccat

SEQ ID NO: 693734 - DNA, 25 bp, Homo sapien
tccattggacagtcgatttggttcc

SEQ ID NO: 693735 - DNA, 25 bp, Homo sapien
aaatccattggacagtcgatttggt

SEQ ID NO: 693736 - DNA, 25 bp, Homo sapien
ggaccaaatccattggacagtcgat

SEQ ID NO: 693737 - DNA, 25 bp, Homo sapien
caccctctcgctctgcccgggctcc

SEQ ID NO: 693738 - DNA, 25 bp, Homo sapien
ggagggccagagccacgcctgccat

SEQ ID NO: 693739 - DNA, 25 bp, Homo sapien
caggagggccagagccacgcctgcc

SEQ ID NO: 693740 - DNA, 25 bp, Homo sapien
aggagggccagagccacgcctgcca

SEQ ID NO: 693741 - DNA, 25 bp, Homo sapien
gcaggagggccagagccacgcctgc

SEQ ID NO: 693742 - DNA, 25 bp, Homo sapien
gaatgcactactaagccagaatcac

SEQ ID NO: 693743 - DNA, 25 bp, Homo sapien
aacactgtattgcacttgaatgcac

SEQ ID NO: 693744 - DNA, 25 bp, Homo sapien
aagggggtgccactatgtcctcggc

SEQ ID NO: 693745 - DNA, 25 bp, Homo sapien
gaatgcttgtgcaataaaacactgt

SEQ ID NO: 693746 - DNA, 25 bp, Homo sapien
ttgctgctacgccagatggggctga

SEQ ID NO: 693747 - DNA, 25 bp, Homo sapien
ggcactgaccctccgggtccagagg

SEQ ID NO: 693748 - DNA, 25 bp, Homo sapien
gggcactgaccctccgggtccagag

SEQ ID NO: 693749 - DNA, 25 bp, Homo sapien
aacacccgcccccttgctgctacgc

SEQ ID NO: 693750 - DNA, 25 bp, Homo sapien
ggccctttctgccggctgatggcct

SEQ ID NO: 693751 - DNA, 25 bp, Homo sapien
tccaggatggccatcagtggagccc

SEQ ID NO: 693752 - DNA, 25 bp, Homo sapien
tctgccgcagtcagcaagctgaata

SEQ ID NO: 693753 - DNA, 25 bp, Homo sapien
tgcccttttccaaactcgctcttgt

SEQ ID NO: 693754 - DNA, 25 bp, Homo sapien
gctgacacaggcaaagtgacagaac

SEQ ID NO: 693755 - DNA, 25 bp, Homo sapien
acacaggcaaagtgacagaacaatg

SEQ ID NO: 693756 - DNA, 25 bp, Homo sapien
ctgctgacacaggcaaagtgacaga

SEQ ID NO: 693757 - DNA, 25 bp, Homo sapien
tgacacaggcaaagtgacagaacaa

SEQ ID NO: 693758 - DNA, 25 bp, Homo sapien
ttacattccatagcttagcaggtcc

SEQ ID NO: 693759 - DNA, 25 bp, Homo sapien
ccatagcttagcaggtccatatggg

SEQ ID NO: 693760 - DNA, 25 bp, Homo sapien
ggtccatatgggcatataaagaagt

SEQ ID NO: 693761 - DNA, 25 bp, Homo sapien
cattccatagcttagcaggtccata

SEQ ID NO: 693762 - DNA, 25 bp, Homo sapien
ggcagtctgcatgcagttccaagac

SEQ ID NO: 693763 - DNA, 25 bp, Homo sapien
cgggacgccgccccggtagaagctg

SEQ ID NO: 693764 - DNA, 25 bp, Homo sapien
gcagtctgcatgcagttccaagacc

SEQ ID NO: 693765 - DNA, 25 bp, Homo sapien
gacgccgccccggtagaagctgacc

SEQ ID NO: 693766 - DNA, 25 bp, Homo sapien
catgtcccaaactttcaaagccaac

SEQ ID NO: 693767 - DNA, 25 bp, Homo sapien
agagcagggaggcatcatccatgtc

SEQ ID NO: 693768 - DNA, 25 bp, Homo sapien
catccatgtcccaaactttcaaagc

SEQ ID NO: 693769 - DNA, 25 bp, Homo sapien
tcaaagccaacactttcctgtcccc

SEQ ID NO: 693770 - DNA, 25 bp, Homo sapien
cttgctcctgaggccagacgaggaa

SEQ ID NO: 693771 - DNA, 25 bp, Homo sapien
tgggcaggtccctggtgaaggctgc

SEQ ID NO: 693772 - DNA, 25 bp, Homo sapien
ctgcctcccgggaccccgtatccat

SEQ ID NO: 693773 - DNA, 25 bp, Homo sapien
gctgcctcccgggaccccgtatcca

SEQ ID NO: 693774 - DNA, 25 bp, Homo sapien
aggtccctggtgaaggctgcctccc

SEQ ID NO: 693775 - DNA, 25 bp, Homo sapien
agatgcaggcgagaaagacgatgct

SEQ ID NO: 693776 - DNA, 25 bp, Homo sapien
ggggggcaactccctaggtgcctca

SEQ ID NO: 693777 - DNA, 25 bp, Homo sapien
ggggcaactccctaggtgcctcagc

SEQ ID NO: 693778 - DNA, 25 bp, Homo sapien
gggggcaactccctaggtgcctcag

SEQ ID NO: 693779 - DNA, 25 bp, Homo sapien
cagggcagggcaatgtctccgcaga

SEQ ID NO: 693780 - DNA, 25 bp, Homo sapien
cacccagggcagggcaatgtctccg

SEQ ID NO: 693781 - DNA, 25 bp, Homo sapien
gggcagggcaatgtctccgcagagc

SEQ ID NO: 693782 - DNA, 25 bp, Homo sapien
cccagggcagggcaatgtctccgca

SEQ ID NO: 693783 - DNA, 25 bp, Homo sapien
tcctccggggctcttcagcggtgaa

SEQ ID NO: 693784 - DNA, 25 bp, Homo sapien
tcttcagcggtgaataccgcccggc

SEQ ID NO: 693785 - DNA, 25 bp, Homo sapien
cgtgagccgagctggctcctgtgcc

SEQ ID NO: 693786 - DNA, 25 bp, Homo sapien
gaggccacgcgggaagtcaagctcc

SEQ ID NO: 693787 - DNA, 25 bp, Homo sapien
agggtcgcggctccctaggagatgc

SEQ ID NO: 693788 - DNA, 25 bp, Homo sapien
ggagccaatcgcgaatgcaggggtg

SEQ ID NO: 693789 - DNA, 25 bp, Homo sapien
ggggccgaagctcgatgcgtccgca

SEQ ID NO: 693790 - DNA, 25 bp, Homo sapien
gggtgggggccgaagctcgatgcgt

SEQ ID NO: 693791 - DNA, 25 bp, Homo sapien
gcagcagcgcagacttagcaggagg

SEQ ID NO: 693792 - DNA, 25 bp, Homo sapien
gcagcgcagacttagcaggagggag

SEQ ID NO: 693793 - DNA, 25 bp, Homo sapien
agcgcagacttagcaggagggagat

SEQ ID NO: 693794 - DNA, 25 bp, Homo sapien
gaagacaccaggcaccccctctcca

SEQ ID NO: 693795 - DNA, 25 bp, Homo sapien
cacaaggtagagaaggtagaggtca

SEQ ID NO: 693796 - DNA, 25 bp, Homo sapien
gggtgtgcacgctctcgcaggcaca

SEQ ID NO: 693797 - DNA, 25 bp, Homo sapien
tgcagagttagggagaggcggccga

SEQ ID NO: 693798 - DNA, 25 bp, Homo sapien
acacagccggctcgcggagacacag

SEQ ID NO: 693799 - DNA, 25 bp, Homo sapien
tatatacccggccaagcatcccaaa

SEQ ID NO: 693800 - DNA, 25 bp, Homo sapien
acacgcggccctggccaagtggccc

SEQ ID NO: 693801 - DNA, 25 bp, Homo sapien
aagcatcccaaacacgcggccctgg

SEQ ID NO: 693802 - DNA, 25 bp, Homo sapien
ctttgcagttcttatatacccggcc

SEQ ID NO: 693803 - DNA, 25 bp, Homo sapien
cagtgcctcccggacttaggaaggc

SEQ ID NO: 693804 - DNA, 25 bp, Homo sapien
accaggtcgtggaatgacagtggac

SEQ ID NO: 693805 - DNA, 25 bp, Homo sapien
tgagtcctgtccagagcataggtcc

SEQ ID NO: 693806 - DNA, 25 bp, Homo sapien
tgagctttggtatttgtgagtcctg

SEQ ID NO: 693807 - DNA, 25 bp, Homo sapien
ccgccacagccgtggattcggggtc

SEQ ID NO: 693808 - DNA, 25 bp, Homo sapien
cgccacagccgtggattcggggtct

SEQ ID NO: 693809 - DNA, 25 bp, Homo sapien
tcacacagtcaaggtgagggtccca

SEQ ID NO: 693810 - DNA, 25 bp, Homo sapien
agggtcccaggagcagctgtgacca

SEQ ID NO: 693811 - DNA, 25 bp, Homo sapien
caggagcagctgtgaccaggccccg

SEQ ID NO: 693812 - DNA, 25 bp, Homo sapien
cacacagtcaaggtgagggtcccag

SEQ ID NO: 693813 - DNA, 25 bp, Homo sapien
ctggagctcagaggaccaagtgaat

SEQ ID NO: 693814 - DNA, 25 bp, Homo sapien
aatcaactgatccatgaatccatgg

SEQ ID NO: 693815 - DNA, 25 bp, Homo sapien
ggagctcagaggaccaagtgaatga

SEQ ID NO: 693816 - DNA, 25 bp, Homo sapien
gaatgaatgactcgatcaatcaact

SEQ ID NO: 693817 - DNA, 25 bp, Homo sapien
tgctcccacttcatccgcaggattc

SEQ ID NO: 693818 - DNA, 25 bp, Homo sapien
gggagccgtggtcccagtcagcggt

SEQ ID NO: 693819 - DNA, 25 bp, Homo sapien
ggtggcttgatgagggctgctccca

SEQ ID NO: 693820 - DNA, 25 bp, Homo sapien
ttcatccgcaggattccagccgcag

SEQ ID NO: 693821 - DNA, 25 bp, Homo sapien
cgtgaacacttagggctctctcggg

SEQ ID NO: 693822 - DNA, 25 bp, Homo sapien
cagtgagtcgagtgtgcacctggca

SEQ ID NO: 693823 - DNA, 25 bp, Homo sapien
ttctggaaatccacgaacaatgggc

SEQ ID NO: 693824 - DNA, 25 bp, Homo sapien
taggtacagggtggccgtgaacact

SEQ ID NO: 693825 - DNA, 25 bp, Homo sapien
ttctcgagccatttcacagagcgca

SEQ ID NO: 693826 - DNA, 25 bp, Homo sapien
gatggtcgtgctaatcgcttctcga

SEQ ID NO: 693827 - DNA, 25 bp, Homo sapien
tccagagcggtagggtgtttaccag

SEQ ID NO: 693828 - DNA, 25 bp, Homo sapien
gccggccagagagcacaaagtttca

SEQ ID NO: 693829 - DNA, 25 bp, Homo sapien
gaacgtgcattcttcccagcaccga

SEQ ID NO: 693830 - DNA, 25 bp, Homo sapien
cccaaattcaggcttgagagaggct

SEQ ID NO: 693831 - DNA, 25 bp, Homo sapien
tggccgcagtcttcccaaattcagg

SEQ ID NO: 693832 - DNA, 25 bp, Homo sapien
tgaaagagggccctggaacgtgcat

SEQ ID NO: 693833 - DNA, 25 bp, Homo sapien
tttgctgagccagggtcgcgtgcat

SEQ ID NO: 693834 - DNA, 25 bp, Homo sapien
tgcagtttgctgagccagggtcgcg

SEQ ID NO: 693835 - DNA, 25 bp, Homo sapien
agtttgctgagccagggtcgcgtgc

SEQ ID NO: 693836 - DNA, 25 bp, Homo sapien
ctgagccagggtcgcgtgcattcca

SEQ ID NO: 693837 - DNA, 25 bp, Homo sapien
gaagatgggctacctgtgctcacaa

SEQ ID NO: 693838 - DNA, 25 bp, Homo sapien
agattccccggattcccaggctagg

SEQ ID NO: 693839 - DNA, 25 bp, Homo sapien
caattatgagccctgatatgagcca

SEQ ID NO: 693840 - DNA, 25 bp, Homo sapien
cgtggcctcgtgtctgcttccagaa

SEQ ID NO: 693841 - DNA, 25 bp, Homo sapien
gagcgaatcccgagtccgttcggaa

SEQ ID NO: 693842 - DNA, 25 bp, Homo sapien
gctccggagagagacgccctggtcc

SEQ ID NO: 693843 - DNA, 25 bp, Homo sapien
gaccctgcggcagcctttcggaagg

SEQ ID NO: 693844 - DNA, 25 bp, Homo sapien
cggagctgaaaaacggccgcttggc

SEQ ID NO: 693845 - DNA, 25 bp, Homo sapien
tgctgccgagtcaaggaggaaacct

SEQ ID NO: 693846 - DNA, 25 bp, Homo sapien
gctgccgagtcaaggaggaaacctt

SEQ ID NO: 693847 - DNA, 25 bp, Homo sapien
ccgctgctgccgagtcaaggaggaa

SEQ ID NO: 693848 - DNA, 25 bp, Homo sapien
gctgctgccgagtcaaggaggaaac

SEQ ID NO: 693849 - DNA, 25 bp, Homo sapien
cagcagcgggagcaaatggatctca

SEQ ID NO: 693850 - DNA, 25 bp, Homo sapien
gagcatcgtctcattcagtccctag

SEQ ID NO: 693851 - DNA, 25 bp, Homo sapien
tagaccgggaacctggaagcagatc

SEQ ID NO: 693852 - DNA, 25 bp, Homo sapien
gccggctccgcttgtgaatctggta

SEQ ID NO: 693853 - DNA, 25 bp, Homo sapien
ggctaaatgtctaggcacccaaggc

SEQ ID NO: 693854 - DNA, 25 bp, Homo sapien
cgagacctgtcgttggcaagctgga

SEQ ID NO: 693855 - DNA, 25 bp, Homo sapien
gagaccatcgcacatagcgtcagag

SEQ ID NO: 693856 - DNA, 25 bp, Homo sapien
catgaaattcgctatcacagtgctc

SEQ ID NO: 693857 - DNA, 25 bp, Homo sapien
cactgttacagggaccagcttggga

SEQ ID NO: 693858 - DNA, 25 bp, Homo sapien
aaccaaaggtgtgggctgccgagct

SEQ ID NO: 693859 - DNA, 25 bp, Homo sapien
tgtggatcggaagaagccgctgcct

SEQ ID NO: 693860 - DNA, 25 bp, Homo sapien
cagtctccattagcagtgaacgcag

SEQ ID NO: 693861 - DNA, 25 bp, Homo sapien
gatggaatgggtactgtcacacaca

SEQ ID NO: 693862 - DNA, 25 bp, Homo sapien
gctgaaactcttgggcatgatgaag

SEQ ID NO: 693863 - DNA, 25 bp, Homo sapien
catgctgcttgcgtgagattcagat

SEQ ID NO: 693864 - DNA, 25 bp, Homo sapien
tgtaattctcatcgtctgcggccgt

SEQ ID NO: 693865 - DNA, 25 bp, Homo sapien
acggcagccagcgtcttggttcgca

SEQ ID NO: 693866 - DNA, 25 bp, Homo sapien
caaactgcctgtatgaggcaagccc

SEQ ID NO: 693867 - DNA, 25 bp, Homo sapien
tgggcttgcccaccattgagcatcc

SEQ ID NO: 693868 - DNA, 25 bp, Homo sapien
tgcagaagtgctgccgaatccgacc

SEQ ID NO: 693869 - DNA, 25 bp, Homo sapien
tgctggtaccgccagatctctccag

SEQ ID NO: 693870 - DNA, 25 bp, Homo sapien
tgagagggcgagacctccgattcca

SEQ ID NO: 693871 - DNA, 25 bp, Homo sapien
gctgaggcatccattcgctgagagg

SEQ ID NO: 693872 - DNA, 25 bp, Homo sapien
cacagcgggtgttagcaccctgcca

SEQ ID NO: 693873 - DNA, 25 bp, Homo sapien
tgtcatctcccaaattcgggggcat

SEQ ID NO: 693874 - DNA, 25 bp, Homo sapien
aattcgggggcatatgtgacacctg

SEQ ID NO: 693875 - DNA, 25 bp, Homo sapien
gtgacacctgtttgcctccgtgggg

SEQ ID NO: 693876 - DNA, 25 bp, Homo sapien
tctaactctgcctcaaccccaaggt

SEQ ID NO: 693877 - DNA, 25 bp, Homo sapien
acagctaccagagcgggctcatcgc

SEQ ID NO: 693878 - DNA, 25 bp, Homo sapien
tgggcgtcacctacctggatgagaa

SEQ ID NO: 693879 - DNA, 25 bp, Homo sapien
cagttcctgcatggcgtgggtgcca

SEQ ID NO: 693880 - DNA, 25 bp, Homo sapien
tggatgagaacgtcaagtccagctg

SEQ ID NO: 693881 - DNA, 25 bp, Homo sapien
ctgggaaacgacagtccatctacag

SEQ ID NO: 693882 - DNA, 25 bp, Homo sapien
ctgtagatggactgtcgtttcccag

SEQ ID NO: 693883 - DNA, 25 bp, Homo sapien
cttgtcctcactgtgaagacgcgtc

SEQ ID NO: 693884 - DNA, 25 bp, Homo sapien
tcactgtgaagacacatccccgaaa

SEQ ID NO: 693885 - DNA, 25 bp, Homo sapien
acgtgcacaacagtcccttcgtggg

SEQ ID NO: 693886 - DNA, 25 bp, Homo sapien
acttatgtgcaaattgccacgtgca

SEQ ID NO: 693887 - DNA, 25 bp, Homo sapien
cgttcatcggaaccaggctctaggt

SEQ ID NO: 693888 - DNA, 25 bp, Homo sapien
gaatttcagccgagcaatcagtgat

SEQ ID NO: 693889 - DNA, 25 bp, Homo sapien
cagaggctaactagggctgcaccgt

SEQ ID NO: 693890 - DNA, 25 bp, Homo sapien
tgcctttttcaagacgtgggaccca

SEQ ID NO: 693891 - DNA, 25 bp, Homo sapien
taggtttacaggatgtcactaagct

SEQ ID NO: 693892 - DNA, 25 bp, Homo sapien
atgtcactaagctgcagacgcaggg

SEQ ID NO: 693893 - DNA, 25 bp, Homo sapien
gacgcaggggttcaagtcagcgaca

SEQ ID NO: 693894 - DNA, 25 bp, Homo sapien
cagacgcaggggttcaagtcagcga

SEQ ID NO: 693895 - DNA, 25 bp, Homo sapien
ggcatcttctagaaagacccagaca

SEQ ID NO: 693896 - DNA, 25 bp, Homo sapien
tgccctctttgtgggacatgctccg

SEQ ID NO: 693897 - DNA, 25 bp, Homo sapien
tcttggagtcccagttcagcctgag

SEQ ID NO: 693898 - DNA, 25 bp, Homo sapien
catgctccgtaggtggaagggtcca

SEQ ID NO: 693899 - DNA, 25 bp, Homo sapien
gtcagcccagaagctagatgccagc

SEQ ID NO: 693900 - DNA, 25 bp, Homo sapien
gccagctaatcgcaattttttactg

SEQ ID NO: 693901 - DNA, 25 bp, Homo sapien
gcccagaagctagatgccagctaat

SEQ ID NO: 693902 - DNA, 25 bp, Homo sapien
gctagatgccagctaatcgcaattt

SEQ ID NO: 693903 - DNA, 25 bp, Homo sapien
ctgcagggactcggcagaggcccct

SEQ ID NO: 693904 - DNA, 25 bp, Homo sapien
gcagggactcggcagaggcccctgg

SEQ ID NO: 693905 - DNA, 25 bp, Homo sapien
tgcagggactcggcagaggcccctg

SEQ ID NO: 693906 - DNA, 25 bp, Homo sapien
agcgggtggtggcggcaccttcctg

SEQ ID NO: 693907 - DNA, 25 bp, Homo sapien
tctgcaccgttgtcagcctgctggg

SEQ ID NO: 693908 - DNA, 25 bp, Homo sapien
tctgcctgttctgcaccgttgtcag

SEQ ID NO: 693909 - DNA, 25 bp, Homo sapien
gggcatcctcgtcttctcactgcac

SEQ ID NO: 693910 - DNA, 25 bp, Homo sapien
tcacagccagctacggcgggaggtg

SEQ ID NO: 693911 - DNA, 25 bp, Homo sapien
tttgaaaagggctacgtcacaggac

SEQ ID NO: 693912 - DNA, 25 bp, Homo sapien
gctacgtcacaggacagcggcaagg

SEQ ID NO: 693913 - DNA, 25 bp, Homo sapien
gaggagtggtgcagcacttgggaga

SEQ ID NO: 693914 - DNA, 25 bp, Homo sapien
tgacagtgccacagatagccagctc

SEQ ID NO: 693915 - DNA, 25 bp, Homo sapien
tggtgtgcgtgaggacaaactccgc

SEQ ID NO: 693916 - DNA, 25 bp, Homo sapien
ttcctgatgacagaacagtgccgtt

SEQ ID NO: 693917 - DNA, 25 bp, Homo sapien
gtttaaagtcggctgtgacctcctg

SEQ ID NO: 693918 - DNA, 25 bp, Homo sapien
gtacaggcacataaccaccacgccc

SEQ ID NO: 693919 - DNA, 25 bp, Homo sapien
agtacaggcacataaccaccacgcc

SEQ ID NO: 693920 - DNA, 25 bp, Homo sapien
acaggcacataaccaccacgcccag

SEQ ID NO: 693921 - DNA, 25 bp, Homo sapien
aggcacataaccaccacgcccagct

SEQ ID NO: 693922 - DNA, 25 bp, Homo sapien
caccatgcctggtttatggaatcac

SEQ ID NO: 693923 - DNA, 25 bp, Homo sapien
gccaccatgcctggtttatggaatc

SEQ ID NO: 693924 - DNA, 25 bp, Homo sapien
catgcctggtttatggaatcacttt

SEQ ID NO: 693925 - DNA, 25 bp, Homo sapien
accatgcctggtttatggaatcact

SEQ ID NO: 693926 - DNA, 25 bp, Homo sapien
acctgtgggcaacgtggaccgtgct

SEQ ID NO: 693927 - DNA, 25 bp, Homo sapien
gcgttattcacaccacgcccctgat

SEQ ID NO: 693928 - DNA, 25 bp, Homo sapien
tctcttcctgctgtgaagctgcggg

SEQ ID NO: 693929 - DNA, 25 bp, Homo sapien
tcactctggatttgagcaggaacct

SEQ ID NO: 693930 - DNA, 25 bp, Homo sapien
gaaggaagggcgggcatgacaagac

SEQ ID NO: 693931 - DNA, 25 bp, Homo sapien
aggaagggcgggcatgacaagaccc

SEQ ID NO: 693932 - DNA, 25 bp, Homo sapien
gggcgggcatgacaagaccctcagc

SEQ ID NO: 693933 - DNA, 25 bp, Homo sapien
aagggcgggcatgacaagaccctca

SEQ ID NO: 693934 - DNA, 25 bp, Homo sapien
ccccacaggtgaggcaggcctcagg

SEQ ID NO: 693935 - DNA, 25 bp, Homo sapien
ggcagcaagggggtacagccaccct

SEQ ID NO: 693936 - DNA, 25 bp, Homo sapien
tgtgcttgccaagaaccaccacaag

SEQ ID NO: 693937 - DNA, 25 bp, Homo sapien
ggtacagccaccctgtgcttgccaa

SEQ ID NO: 693938 - DNA, 25 bp, Homo sapien
tggggtgtcacttcccagttgattg

SEQ ID NO: 693939 - DNA, 25 bp, Homo sapien
tgcttgggcatcactcaattgtaac

SEQ ID NO: 693940 - DNA, 25 bp, Homo sapien
tgtttgggaatcattcctgcttggg

SEQ ID NO: 693941 - DNA, 25 bp, Homo sapien
attcagagagtacgggagctgtttg

SEQ ID NO: 693942 - DNA, 25 bp, Homo sapien
gatgcgctctctccggctcacaggg

SEQ ID NO: 693943 - DNA, 25 bp, Homo sapien
ctgtcaccacgtagatgcgctctct

SEQ ID NO: 693944 - DNA, 25 bp, Homo sapien
acgtagatgcgctctctccggctca

SEQ ID NO: 693945 - DNA, 25 bp, Homo sapien
ctctccggctcacagggcctgagga

SEQ ID NO: 693946 - DNA, 25 bp, Homo sapien
catcagtcttgtaccttctgtgggt

SEQ ID NO: 693947 - DNA, 25 bp, Homo sapien
aggatcctgcagaagagtttcattg

SEQ ID NO: 693948 - DNA, 25 bp, Homo sapien
tcattgcccgaaaaaatccttggag

SEQ ID NO: 693949 - DNA, 25 bp, Homo sapien
aatgtcctatatctaccatcccagg

SEQ ID NO: 693950 - DNA, 25 bp, Homo sapien
taatgccggcctcgtagagtgagtt

SEQ ID NO: 693951 - DNA, 25 bp, Homo sapien
aattctaagtccgtgtccctgcgtg

SEQ ID NO: 693952 - DNA, 25 bp, Homo sapien
tgcgtggctccaggcacgctggttc

SEQ ID NO: 693953 - DNA, 25 bp, Homo sapien
tgttcatgagacatcctggtctgcg

SEQ ID NO: 693954 - DNA, 25 bp, Homo sapien
ctgaggccacgtatccaagcagcag

SEQ ID NO: 693955 - DNA, 25 bp, Homo sapien
gtggacttgtcacatcacccgcagg

SEQ ID NO: 693956 - DNA, 25 bp, Homo sapien
gaatgtttctcggtgagaagccgcc

SEQ ID NO: 693957 - DNA, 25 bp, Homo sapien
tcatcggcagtgtgtagacgttctt

SEQ ID NO: 693958 - DNA, 25 bp, Homo sapien
cattttggggccatctttttaggtg

SEQ ID NO: 693959 - DNA, 25 bp, Homo sapien
gacctggaggctctgggttctctgc

SEQ ID NO: 693960 - DNA, 25 bp, Homo sapien
ttgtgcaatgcccacgccctgtgtc

SEQ ID NO: 693961 - DNA, 25 bp, Homo sapien
aaatgagtaactcattcttgacctt

SEQ ID NO: 693962 - DNA, 25 bp, Homo sapien
gacactgtgctggaaggtcagcctg

SEQ ID NO: 693963 - DNA, 25 bp, Homo sapien
accaggaggacactgtgctggaagg

SEQ ID NO: 693964 - DNA, 25 bp, Homo sapien
aggacactgtgctggaaggtcagcc

SEQ ID NO: 693965 - DNA, 25 bp, Homo sapien
gctggaaggtcagcctgttcccaca

SEQ ID NO: 693966 - DNA, 25 bp, Homo sapien
cctacggcctcttccggtgggtgag

SEQ ID NO: 693967 - DNA, 25 bp, Homo sapien
cactaattccactgacaccgctgag

SEQ ID NO: 693968 - DNA, 25 bp, Homo sapien
aatcagattcaccacaacagggcag

SEQ ID NO: 693969 - DNA, 25 bp, Homo sapien
caccgctgagatgctgtgtagagcc

SEQ ID NO: 693970 - DNA, 25 bp, Homo sapien
aacccagggcttgcgtttgcaggtc

SEQ ID NO: 693971 - DNA, 25 bp, Homo sapien
acccagggcttgcgtttgcaggtct

SEQ ID NO: 693972 - DNA, 25 bp, Homo sapien
cccagggcttgcgtttgcaggtctc

SEQ ID NO: 693973 - DNA, 25 bp, Homo sapien
gagcattctcatgggcttgaagctg

SEQ ID NO: 693974 - DNA, 25 bp, Homo sapien
tccttcccgctcagatccccagaga

SEQ ID NO: 693975 - DNA, 25 bp, Homo sapien
gccgtgaccggggccagaattccac

SEQ ID NO: 693976 - DNA, 25 bp, Homo sapien
cagggatccttcccgctcagatccc

SEQ ID NO: 693977 - DNA, 25 bp, Homo sapien
aatgaaaagtctctgcacagcaaaa

SEQ ID NO: 693978 - DNA, 25 bp, Homo sapien
gaagagctacatatggccaatgggt

SEQ ID NO: 693979 - DNA, 25 bp, Homo sapien
acagcaaaacgaaaaggcagtctct

SEQ ID NO: 693980 - DNA, 25 bp, Homo sapien
aaagcaacataaatgagactacatt

SEQ ID NO: 693981 - DNA, 25 bp, Homo sapien
gtgtctatgcacaacagctctcgtg

SEQ ID NO: 693982 - DNA, 25 bp, Homo sapien
gacgtgatctcaacgggtccttctg

SEQ ID NO: 693983 - DNA, 25 bp, Homo sapien
cagctccttacccagagcgggagag

SEQ ID NO: 693984 - DNA, 25 bp, Homo sapien
tagggactggatgcacagacgtgat

SEQ ID NO: 693985 - DNA, 25 bp, Homo sapien
gatggcatcctttgatacacagaaa

SEQ ID NO: 693986 - DNA, 25 bp, Homo sapien
gaggatccaccttcatacaagtgga

SEQ ID NO: 693987 - DNA, 25 bp, Homo sapien
tacaagtggatgtcccgttttccta

SEQ ID NO: 693988 - DNA, 25 bp, Homo sapien
gggttcgtttctgagatttctagtc

SEQ ID NO: 693989 - DNA, 25 bp, Homo sapien
gatggcttccgtgtgctgcatgact

SEQ ID NO: 693990 - DNA, 25 bp, Homo sapien
tcatttcaaatgcagggagagtctc

SEQ ID NO: 693991 - DNA, 25 bp, Homo sapien
gcaggactgtactcactggctcggg

SEQ ID NO: 693992 - DNA, 25 bp, Homo sapien
gcattttcatgacttgggaacagga

SEQ ID NO: 693993 - DNA, 25 bp, Homo sapien
gcttgtcccagcgagtacagtgagc

SEQ ID NO: 693994 - DNA, 25 bp, Homo sapien
tgtcccagcgagtacagtgagcaca

SEQ ID NO: 693995 - DNA, 25 bp, Homo sapien
cttgcttgtcccagcgagtacagtg

SEQ ID NO: 693996 - DNA, 25 bp, Homo sapien
tcccagcgagtacagtgagcacatc

SEQ ID NO: 693997 - DNA, 25 bp, Homo sapien
tcccacccggtgatgatagcagccg

SEQ ID NO: 693998 - DNA, 25 bp, Homo sapien
cttctgaagcacaaggagggccctg

SEQ ID NO: 693999 - DNA, 25 bp, Homo sapien
gaaagagtggatctccgctaatccc

SEQ ID NO: 694000 - DNA, 25 bp, Homo sapien
tagcagccgacagatgggcgagcat

SEQ ID NO: 694001 - DNA, 25 bp, Homo sapien
cctgttaagcatccaagtcccaagt

SEQ ID NO: 694002 - DNA, 25 bp, Homo sapien
caagtcccaagtcaccggccggcat

SEQ ID NO: 694003 - DNA, 25 bp, Homo sapien
ctgttaagcatccaagtcccaagtc

SEQ ID NO: 694004 - DNA, 25 bp, Homo sapien
tgttaagcatccaagtcccaagtca

SEQ ID NO: 694005 - DNA, 25 bp, Homo sapien
tgtgtgtggagacatctcattctgg

SEQ ID NO: 694006 - DNA, 25 bp, Homo sapien
ctgtgtgtggagacatctcattctg

SEQ ID NO: 694007 - DNA, 25 bp, Homo sapien
ctcggctgatcccaagggggtccac

SEQ ID NO: 694008 - DNA, 25 bp, Homo sapien
cggctgatcccaagggggtccacag

SEQ ID NO: 694009 - DNA, 25 bp, Homo sapien
tcggctgatcccaagggggtccaca

SEQ ID NO: 694010 - DNA, 25 bp, Homo sapien
caatggggcggtgactgagaactca

SEQ ID NO: 694011 - DNA, 25 bp, Homo sapien
tctcccccagcagattggaaaaaga

SEQ ID NO: 694012 - DNA, 25 bp, Homo sapien
ttaaaaacagctcgagtggcaattg

SEQ ID NO: 694013 - DNA, 25 bp, Homo sapien
tggcaattgcgtggcctctcccact

SEQ ID NO: 694014 - DNA, 25 bp, Homo sapien
cagggaaaacctcggattagcaagc

SEQ ID NO: 694015 - DNA, 25 bp, Homo sapien
tgtcagttggaccatgtgggaccct

SEQ ID NO: 694016 - DNA, 25 bp, Homo sapien
ggatcggtccagctcagatattgag

SEQ ID NO: 694017 - DNA, 25 bp, Homo sapien
gattagcgctacgtgggctgcagca

SEQ ID NO: 694018 - DNA, 25 bp, Homo sapien
tctgcgctgactgtgacattggaac

SEQ ID NO: 694019 - DNA, 25 bp, Homo sapien
acattggaacgtggccttcctgtca

SEQ ID NO: 694020 - DNA, 25 bp, Homo sapien
tgcaagcctctttctgcgctgactg

SEQ ID NO: 694021 - DNA, 25 bp, Homo sapien
tgtttgtcccgctgcaagcctcttt

SEQ ID NO: 694022 - DNA, 25 bp, Homo sapien
aaagctgcggctgtgagatgagacc

SEQ ID NO: 694023 - DNA, 25 bp, Homo sapien
gatgccactttcgtgtgactgcgaa

SEQ ID NO: 694024 - DNA, 25 bp, Homo sapien
tgcggacgaggagacaagctgtcct

SEQ ID NO: 694025 - DNA, 25 bp, Homo sapien
gaaatccagcgttccgtgtgcggac

SEQ ID NO: 694026 - DNA, 25 bp, Homo sapien
ccatgtcatgtagaaggtgccgact

SEQ ID NO: 694027 - DNA, 25 bp, Homo sapien
tagaaggtgccgactgaaccccaat

SEQ ID NO: 694028 - DNA, 25 bp, Homo sapien
tgggggctttatgtaatgcacactc

SEQ ID NO: 694029 - DNA, 25 bp, Homo sapien
acactccaccatgtcatgtagaagg

SEQ ID NO: 694030 - DNA, 25 bp, Homo sapien
ggttatataagactcggcaccctag

SEQ ID NO: 694031 - DNA, 25 bp, Homo sapien
tctgccagtgcttagagagagggcc

SEQ ID NO: 694032 - DNA, 25 bp, Homo sapien
tagagagaaagactcccctggtggc

SEQ ID NO: 694033 - DNA, 25 bp, Homo sapien
cttcttacaactgagagatggcggc

SEQ ID NO: 694034 - DNA, 25 bp, Homo sapien
ctgggaacgccacactgtcgcagtc

SEQ ID NO: 694035 - DNA, 25 bp, Homo sapien
tcatcgccggggttacttttgttgc

SEQ ID NO: 694036 - DNA, 25 bp, Homo sapien
accgccgggcgcctgtcatcgccgg

SEQ ID NO: 694037 - DNA, 25 bp, Homo sapien
gttacttttgttgccgcgctgggaa

SEQ ID NO: 694038 - DNA, 25 bp, Homo sapien
gacacagaaggtcgaacggggccca

SEQ ID NO: 694039 - DNA, 25 bp, Homo sapien
atcggggcaccccaaggctggacac

SEQ ID NO: 694040 - DNA, 25 bp, Homo sapien
gccagggtggccgacaaggtgagga

SEQ ID NO: 694041 - DNA, 25 bp, Homo sapien
aggaagtgggcggtcaggaccctgg

SEQ ID NO: 694042 - DNA, 25 bp, Homo sapien
ccagccgagagcccatcggagaccc

SEQ ID NO: 694043 - DNA, 25 bp, Homo sapien
gccagccgagagcccatcggagacc

SEQ ID NO: 694044 - DNA, 25 bp, Homo sapien
cctgcgcccctgtctttgtaaattg

SEQ ID NO: 694045 - DNA, 25 bp, Homo sapien
accagaagccgcgaggccctcaggg

SEQ ID NO: 694046 - DNA, 25 bp, Homo sapien
tgtggggccactatagcagccacca

SEQ ID NO: 694047 - DNA, 25 bp, Homo sapien
caggctctgcttcgtgacccgtgac

SEQ ID NO: 694048 - DNA, 25 bp, Homo sapien
gtagcctcccctcacctgtggtcgc

SEQ ID NO: 694049 - DNA, 25 bp, Homo sapien
ctcacctgtggtcgctgtccgtgga

SEQ ID NO: 694050 - DNA, 25 bp, Homo sapien
ggatggctggctttagcctgtagcc

SEQ ID NO: 694051 - DNA, 25 bp, Homo sapien
ctttagcgtggctggagtgatcaga

SEQ ID NO: 694052 - DNA, 25 bp, Homo sapien
gggcactgcccagatccgagatgta

SEQ ID NO: 694053 - DNA, 25 bp, Homo sapien
tgagtgcccggcgactgttccgatg

SEQ ID NO: 694054 - DNA, 25 bp, Homo sapien
tcccaacggcaccagcggtgttcag

SEQ ID NO: 694055 - DNA, 25 bp, Homo sapien
tgttccgatgacaccatccatgggc

SEQ ID NO: 694056 - DNA, 25 bp, Homo sapien
ccttcagattaatgactggctacag

SEQ ID NO: 694057 - DNA, 25 bp, Homo sapien
agcgagcaccctcatcgggctgtcg

SEQ ID NO: 694058 - DNA, 25 bp, Homo sapien
cagcatacctcaaaaggccctagct

SEQ ID NO: 694059 - DNA, 25 bp, Homo sapien
ggccctagctaataaacctgtaagc

SEQ ID NO: 694060 - DNA, 25 bp, Homo sapien
ggtttaaaatggtcctgcacgttgc

SEQ ID NO: 694061 - DNA, 25 bp, Homo sapien
tggagtcccgtcagcttgagtcacg

SEQ ID NO: 694062 - DNA, 25 bp, Homo sapien
tcgagtcagactagccgagcagagc

SEQ ID NO: 694063 - DNA, 25 bp, Homo sapien
tacagcagcacgtgactcagagtca

SEQ ID NO: 694064 - DNA, 25 bp, Homo sapien
gttttaccgcaaaatacgctctcaa

SEQ ID NO: 694065 - DNA, 25 bp, Homo sapien
gacaggtcaccaaggagtccggtct

SEQ ID NO: 694066 - DNA, 25 bp, Homo sapien
gctctgtaaactcccctgtgcagga

SEQ ID NO: 694067 - DNA, 25 bp, Homo sapien
tctggtcagctttagccttcggcca

SEQ ID NO: 694068 - DNA, 25 bp, Homo sapien
ttaaacactaactccacaccgctcc

SEQ ID NO: 694069 - DNA, 25 bp, Homo sapien
gccttttaagcatgtgtaagtgtac

SEQ ID NO: 694070 - DNA, 25 bp, Homo sapien
cttttaagcatgtgtaagtgtacag

SEQ ID NO: 694071 - DNA, 25 bp, Homo sapien
aaacactaactccacaccgctccgg

SEQ ID NO: 694072 - DNA, 25 bp, Homo sapien
gacttccaatatgacgaggactcgg

SEQ ID NO: 694073 - DNA, 25 bp, Homo sapien
ggtgccttgtttacggaatcccgca

SEQ ID NO: 694074 - DNA, 25 bp, Homo sapien
cctaatgactaacggcttggcgcat

SEQ ID NO: 694075 - DNA, 25 bp, Homo sapien
ttctgaaccacctggagtgactgga

SEQ ID NO: 694076 - DNA, 25 bp, Homo sapien
tcaggaatccgaaccctgaacagct

SEQ ID NO: 694077 - DNA, 25 bp, Homo sapien
ttgctgttctgtaggcgtgttgtgg

SEQ ID NO: 694078 - DNA, 25 bp, Homo sapien
tgtaggcgtgttgtggattctttcc

SEQ ID NO: 694079 - DNA, 25 bp, Homo sapien
tcctggcttcgtggagacacagcca

SEQ ID NO: 694080 - DNA, 25 bp, Homo sapien
catctaaatttaaaagacgataatt

SEQ ID NO: 694081 - DNA, 25 bp, Homo sapien
tatccatctaaatttaaaagacgat

SEQ ID NO: 694082 - DNA, 25 bp, Homo sapien
ttggaagcattcttaattatccatc

SEQ ID NO: 694083 - DNA, 25 bp, Homo sapien
gaagcattcttaattatccatctaa

SEQ ID NO: 694084 - DNA, 25 bp, Homo sapien
tacggtaaatgttcattgctgagac

SEQ ID NO: 694085 - DNA, 25 bp, Homo sapien
tgtctttgaaattgtgcgtgtgtac

SEQ ID NO: 694086 - DNA, 25 bp, Homo sapien
gaagcatgggtgtacaggtgttcac

SEQ ID NO: 694087 - DNA, 25 bp, Homo sapien
tatttagagatgaaggttcgtgtct

SEQ ID NO: 694088 - DNA, 25 bp, Homo sapien
ccagtccatggaagtatagtcaccc

SEQ ID NO: 694089 - DNA, 25 bp, Homo sapien
aagacaaactattgcctggcgctga

SEQ ID NO: 694090 - DNA, 25 bp, Homo sapien
tgctcactcctagagggccaaagag

SEQ ID NO: 694091 - DNA, 25 bp, Homo sapien
tcctgagggactgcatatgctggcg

SEQ ID NO: 694092 - DNA, 25 bp, Homo sapien
cacccggtcggctgaagtacattca

SEQ ID NO: 694093 - DNA, 25 bp, Homo sapien
agcagaagtatattcacccagtccg

SEQ ID NO: 694094 - DNA, 25 bp, Homo sapien
tgcagaagtacattcacccagtcag

SEQ ID NO: 694095 - DNA, 25 bp, Homo sapien
tatagtcacctagtccgcagaagca

SEQ ID NO: 694096 - DNA, 25 bp, Homo sapien
caatataccgtacacagcaggtgcc

SEQ ID NO: 694097 - DNA, 25 bp, Homo sapien
caggtgcccaatttgctatctgaca

SEQ ID NO: 694098 - DNA, 25 bp, Homo sapien
gagtgtaacacatgtaggctgtgac

SEQ ID NO: 694099 - DNA, 25 bp, Homo sapien
gcaaatatcatgtcctacacacccg

SEQ ID NO: 694100 - DNA, 25 bp, Homo sapien
tgaaaatctacctggcctaccacta

SEQ ID NO: 694101 - DNA, 25 bp, Homo sapien
gaaaatctacctggcctaccactaa

SEQ ID NO: 694102 - DNA, 25 bp, Homo sapien
ttctgaaaatctacctggcctacca

SEQ ID NO: 694103 - DNA, 25 bp, Homo sapien
tctgaaaatctacctggcctaccac

SEQ ID NO: 694104 - DNA, 25 bp, Homo sapien
gaacggcactaagagattcaactca

SEQ ID NO: 694105 - DNA, 25 bp, Homo sapien
ccttgtcagtctcggcattgcagaa

SEQ ID NO: 694106 - DNA, 25 bp, Homo sapien
ctgcagagttgtggccttgtcagtc

SEQ ID NO: 694107 - DNA, 25 bp, Homo sapien
ggcattgcagaacggcactaagaga

SEQ ID NO: 694108 - DNA, 25 bp, Homo sapien
tacactgtgcaaacgatatggctga

SEQ ID NO: 694109 - DNA, 25 bp, Homo sapien
catctgggaaagctaacgatgctcc

SEQ ID NO: 694110 - DNA, 25 bp, Homo sapien
cagggcgcgctcttagaagcttgca

SEQ ID NO: 694111 - DNA, 25 bp, Homo sapien
tagattcagggagttaagagtgccc

SEQ ID NO: 694112 - DNA, 25 bp, Homo sapien
actgccaagcgccttgtgtggcggt

SEQ ID NO: 694113 - DNA, 25 bp, Homo sapien
aagggctcttcgctctacatttgtg

SEQ ID NO: 694114 - DNA, 25 bp, Homo sapien
ccaggtttgcctgtgaggactccga

SEQ ID NO: 694115 - DNA, 25 bp, Homo sapien
ggttatgcctctccctacgttgaga

SEQ ID NO: 694116 - DNA, 25 bp, Homo sapien
tgacgcattctactccgattcctct

SEQ ID NO: 694117 - DNA, 25 bp, Homo sapien
ttcagtgcttgtttgcatagcgctg

SEQ ID NO: 694118 - DNA, 25 bp, Homo sapien
ttctactccgattcctcttcagtgc

SEQ ID NO: 694119 - DNA, 25 bp, Homo sapien
tcctcttcagtgcttgtttgcatag

SEQ ID NO: 694120 - DNA, 25 bp, Homo sapien
gaccatgaagcccaagcctatttta

SEQ ID NO: 694121 - DNA, 25 bp, Homo sapien
aacattattgggtaagcagcacaga

SEQ ID NO: 694122 - DNA, 25 bp, Homo sapien
gatgtactaatgcagtttttcagca

SEQ ID NO: 694123 - DNA, 25 bp, Homo sapien
cagagaaccgaaacacaaagagatg

SEQ ID NO: 694124 - DNA, 25 bp, Homo sapien
ctttaatccaaacttgctcaggcaa

SEQ ID NO: 694125 - DNA, 25 bp, Homo sapien
tgctctaggcaatccaatatcctgg

SEQ ID NO: 694126 - DNA, 25 bp, Homo sapien
cctaacgtctgtttagtggattcaa

SEQ ID NO: 694127 - DNA, 25 bp, Homo sapien
ggcagcttcaagtacagaacatgag

SEQ ID NO: 694128 - DNA, 25 bp, Homo sapien
gcaaagcagtagttgtagccgcagt

SEQ ID NO: 694129 - DNA, 25 bp, Homo sapien
agatggatgtcgaatgagagttacc

SEQ ID NO: 694130 - DNA, 25 bp, Homo sapien
caagcatttgtagtaaacagtgggt

SEQ ID NO: 694131 - DNA, 25 bp, Homo sapien
tttccactagtagagcaagcatttg

SEQ ID NO: 694132 - DNA, 25 bp, Homo sapien
tccagtgtgaccacgatgggcaact

SEQ ID NO: 694133 - DNA, 25 bp, Homo sapien
tgagcagaaaactgcggacgcagcc

SEQ ID NO: 694134 - DNA, 25 bp, Homo sapien
tgtcagcaatacgtggcagacaagc

SEQ ID NO: 694135 - DNA, 25 bp, Homo sapien
gcaactatcgctgctgtggaagtcc

SEQ ID NO: 694136 - DNA, 25 bp, Homo sapien
gccccagacccggtgaggtccgcgc

SEQ ID NO: 694137 - DNA, 25 bp, Homo sapien
ccagcccccggccgccgggcacgca

SEQ ID NO: 694138 - DNA, 25 bp, Homo sapien
cagcccccggccgccgggcacgcac

SEQ ID NO: 694139 - DNA, 25 bp, Homo sapien
gccagcccccggccgccgggcacgc

SEQ ID NO: 694140 - DNA, 25 bp, Homo sapien
cgccagcccccggccgccgggcacg

SEQ ID NO: 694141 - DNA, 25 bp, Homo sapien
gggatgctgttgaagcggtcctcca

SEQ ID NO: 694142 - DNA, 25 bp, Homo sapien
ttgttgagcgccccgcccggctcgg

SEQ ID NO: 694143 - DNA, 25 bp, Homo sapien
cggctcggcggggatgctgttgaag

SEQ ID NO: 694144 - DNA, 25 bp, Homo sapien
atgctgttgaagcggtcctccaggc

SEQ ID NO: 694145 - DNA, 25 bp, Homo sapien
cgcttagcagcatcatgcgcagctc

SEQ ID NO: 694146 - DNA, 25 bp, Homo sapien
gcccgcctcgcttagcagcatcatg

SEQ ID NO: 694147 - DNA, 25 bp, Homo sapien
cgcgccctccttggcggcgccgtcg

SEQ ID NO: 694148 - DNA, 25 bp, Homo sapien
gccgcccgacgtcttctccgccgcg

SEQ ID NO: 694149 - DNA, 25 bp, Homo sapien
tccatgtgcgagcagaggatgtgct

SEQ ID NO: 694150 - DNA, 25 bp, Homo sapien
tgtgctgcagctgcgtgtactccac

SEQ ID NO: 694151 - DNA, 25 bp, Homo sapien
ccagcagcgccgagttgaggcgcgt

SEQ ID NO: 694152 - DNA, 25 bp, Homo sapien
aggcgcgtctcgagctcgccgtcag

SEQ ID NO: 694153 - DNA, 25 bp, Homo sapien
ggctcaggtcggtggtcgtgaagct

SEQ ID NO: 694154 - DNA, 25 bp, Homo sapien
cgcccgcgccctcgacggccgcctc

SEQ ID NO: 694155 - DNA, 25 bp, Homo sapien
ccgcgcctgcctccggcggcggctc

SEQ ID NO: 694156 - DNA, 25 bp, Homo sapien
gcccgcgccctcgacggccgcctcg

SEQ ID NO: 694157 - DNA, 25 bp, Homo sapien
gcctgccgcgcctgcctccggcggc

SEQ ID NO: 694158 - DNA, 25 bp, Homo sapien
cccaacggcggcgagggcgacgcgg

SEQ ID NO: 694159 - DNA, 25 bp, Homo sapien
ggcgcggcgcggcccaacggcggcg

SEQ ID NO: 694160 - DNA, 25 bp, Homo sapien
gcggcgcggcccaacggcggcgagg

SEQ ID NO: 694161 - DNA, 25 bp, Homo sapien
caacggcggcgagggcgacgcgggc

SEQ ID NO: 694162 - DNA, 25 bp, Homo sapien
actgcaatacagcaacaaagggtga

SEQ ID NO: 694163 - DNA, 25 bp, Homo sapien
tgcaatacagcaacaaagggtgatg

SEQ ID NO: 694164 - DNA, 25 bp, Homo sapien
ccactgcaatacagcaacaaagggt

SEQ ID NO: 694165 - DNA, 25 bp, Homo sapien
cacaaccactgcaatacagcaacaa

SEQ ID NO: 694166 - DNA, 25 bp, Homo sapien
agagcagtggcgctgcgtctccaca

SEQ ID NO: 694167 - DNA, 25 bp, Homo sapien
tggctggctcatctgtcgtcacact

SEQ ID NO: 694168 - DNA, 25 bp, Homo sapien
cgagcgctgggcaaaccctgtttgt

SEQ ID NO: 694169 - DNA, 25 bp, Homo sapien
tctgtcgtcacactgatggcccgag

SEQ ID NO: 694170 - DNA, 25 bp, Homo sapien
agccttttctgcagcgcgtccgcca

SEQ ID NO: 694171 - DNA, 25 bp, Homo sapien
cagcgcgtccgccacttcccgaatt

SEQ ID NO: 694172 - DNA, 25 bp, Homo sapien
tttctgcagcgcgtccgccacttcc

SEQ ID NO: 694173 - DNA, 25 bp, Homo sapien
cgcgtccgccacttcccgaattctt

SEQ ID NO: 694174 - DNA, 25 bp, Homo sapien
gcttccagagaagcctaattacatc

SEQ ID NO: 694175 - DNA, 25 bp, Homo sapien
gaagcctaattacatcttgaccatg

SEQ ID NO: 694176 - DNA, 25 bp, Homo sapien
taattacatcttgaccatgaacatc

SEQ ID NO: 694177 - DNA, 25 bp, Homo sapien
tacatcttgaccatgaacatcccac

SEQ ID NO: 694178 - DNA, 25 bp, Homo sapien
caatggcaggaactgtggtgagtac

SEQ ID NO: 694179 - DNA, 25 bp, Homo sapien
aaccaatggcaggaactgtggtgag

SEQ ID NO: 694180 - DNA, 25 bp, Homo sapien
taaaaccaatggcaggaactgtggt

SEQ ID NO: 694181 - DNA, 25 bp, Homo sapien
atgttaaaaccaatggcaggaactg

SEQ ID NO: 694182 - DNA, 25 bp, Homo sapien
cagtttatacacaatgtataggcag

SEQ ID NO: 694183 - DNA, 25 bp, Homo sapien
tgtataggcagcatccaatcgaacc

SEQ ID NO: 694184 - DNA, 25 bp, Homo sapien
aatcgaaccgtccaaatgtgcatct

SEQ ID NO: 694185 - DNA, 25 bp, Homo sapien
gcagcatccaatcgaaccgtccaaa

SEQ ID NO: 694186 - DNA, 25 bp, Homo sapien
aagaggcgggagaagagagaggaga

SEQ ID NO: 694187 - DNA, 25 bp, Homo sapien
ctgaagaggcgggagaagagagagg

SEQ ID NO: 694188 - DNA, 25 bp, Homo sapien
agaggcgggagaagagagaggagat

SEQ ID NO: 694189 - DNA, 25 bp, Homo sapien
tgaagaggcgggagaagagagagga

SEQ ID NO: 694190 - DNA, 25 bp, Homo sapien
gcgggaacgtcccaccggcgtctgc

SEQ ID NO: 694191 - DNA, 25 bp, Homo sapien
cctgcaccggtctgcgcgggaacgt

SEQ ID NO: 694192 - DNA, 25 bp, Homo sapien
cccatacgcttgttcggaagccaag

SEQ ID NO: 694193 - DNA, 25 bp, Homo sapien
ggctgggctgtggacccatacgctt

SEQ ID NO: 694194 - DNA, 25 bp, Homo sapien
tgtacagtgatataagcctccgcaa

SEQ ID NO: 694195 - DNA, 25 bp, Homo sapien
tactgcgagtaacaaaacctaggtc

SEQ ID NO: 694196 - DNA, 25 bp, Homo sapien
tactagatgttggaacgtgacacct

SEQ ID NO: 694197 - DNA, 25 bp, Homo sapien
gtaatttaacctatggacacttggc

SEQ ID NO: 694198 - DNA, 25 bp, Homo sapien
tacacgacaagcaagagactgtttc

SEQ ID NO: 694199 - DNA, 25 bp, Homo sapien
agtgatcactagttcccgtctcaga

SEQ ID NO: 694200 - DNA, 25 bp, Homo sapien
gagcgtacttttcccgggatacaga

SEQ ID NO: 694201 - DNA, 25 bp, Homo sapien
tgctcagaaggcgaaactggaccaa

SEQ ID NO: 694202 - DNA, 25 bp, Homo sapien
tcaagactccagatacaagctacta

SEQ ID NO: 694203 - DNA, 25 bp, Homo sapien
gcagcttttggaaacacaaacggat

SEQ ID NO: 694204 - DNA, 25 bp, Homo sapien
gcggcggctaagacctgtaaaagca

SEQ ID NO: 694205 - DNA, 25 bp, Homo sapien
tatggctctagggtccaacgaaact

SEQ ID NO: 694206 - DNA, 25 bp, Homo sapien
tctatcctgaatctaagatcgtggc

SEQ ID NO: 694207 - DNA, 25 bp, Homo sapien
gcatcttacgaacgtggctttaaaa

SEQ ID NO: 694208 - DNA, 25 bp, Homo sapien
agctatttgttcaacgcatcttacg

SEQ ID NO: 694209 - DNA, 25 bp, Homo sapien
gaaatcttgtaagaaaccatttaca

SEQ ID NO: 694210 - DNA, 25 bp, Homo sapien
tggagtccttgtcccggtgtcggtc

SEQ ID NO: 694211 - DNA, 25 bp, Homo sapien
tttgctcttgctccggtccttgcgg

SEQ ID NO: 694212 - DNA, 25 bp, Homo sapien
tctcggtcgcggttggcgctcctct

SEQ ID NO: 694213 - DNA, 25 bp, Homo sapien
gggtcccgagcgctctctttgctct

SEQ ID NO: 694214 - DNA, 25 bp, Homo sapien
tggtttctgtattcgtggcctttcc

SEQ ID NO: 694215 - DNA, 25 bp, Homo sapien
ggcttctctttgggccccacgtcaa

SEQ ID NO: 694216 - DNA, 25 bp, Homo sapien
aagtcggccgatgcccactgtccgt

SEQ ID NO: 694217 - DNA, 25 bp, Homo sapien
tctgcctcccttcgaaagtctggtt

SEQ ID NO: 694218 - DNA, 25 bp, Homo sapien
cccctgggacctggcataaagttag

SEQ ID NO: 694219 - DNA, 25 bp, Homo sapien
tgctgtccccataaggaggtggccc

SEQ ID NO: 694220 - DNA, 25 bp, Homo sapien
tcgaactgctgaggctgaatgcccc

SEQ ID NO: 694221 - DNA, 25 bp, Homo sapien
catgttgccccgagaataaggaagg

SEQ ID NO: 694222 - DNA, 25 bp, Homo sapien
caggttcccgctgaccctgaaacgg

SEQ ID NO: 694223 - DNA, 25 bp, Homo sapien
ggtcctcatactgggctgagccgag

SEQ ID NO: 694224 - DNA, 25 bp, Homo sapien
tctcaccgtcgtgctgcagcgggaa

SEQ ID NO: 694225 - DNA, 25 bp, Homo sapien
agagccttgtcctgcgacgcgaacc

SEQ ID NO: 694226 - DNA, 25 bp, Homo sapien
tggccgagctgtctccaaccgtggc

SEQ ID NO: 694227 - DNA, 25 bp, Homo sapien
ggaagcatctctctcgggcagggca

SEQ ID NO: 694228 - DNA, 25 bp, Homo sapien
ctgggcaccacgtgccgagagcctg

SEQ ID NO: 694229 - DNA, 25 bp, Homo sapien
ttcctccgggactggcatgggcgcc

SEQ ID NO: 694230 - DNA, 25 bp, Homo sapien
ggcgggcttgtctgcagactgctgc

SEQ ID NO: 694231 - DNA, 25 bp, Homo sapien
ccctgtggtttgacgcctggctggc

SEQ ID NO: 694232 - DNA, 25 bp, Homo sapien
cagtgaggcgggcttgtctgcagac

SEQ ID NO: 694233 - DNA, 25 bp, Homo sapien
tctcagtggccaggcgcctcgcctg

SEQ ID NO: 694234 - DNA, 25 bp, Homo sapien
gtccgacaccgagaagtgggccatg

SEQ ID NO: 694235 - DNA, 25 bp, Homo sapien
accggctcggcaggcctctccacgg

SEQ ID NO: 694236 - DNA, 25 bp, Homo sapien
accagggagggcgtcgcagccccgg

SEQ ID NO: 694237 - DNA, 25 bp, Homo sapien
gcctctccacggagttccttctcac

SEQ ID NO: 694238 - DNA, 25 bp, Homo sapien
agaactgaccgaactgctggacgat

SEQ ID NO: 694239 - DNA, 25 bp, Homo sapien
gcaggtcatcaacagtcactttcgc

SEQ ID NO: 694240 - DNA, 25 bp, Homo sapien
tcgctccacaagctgagtgtcgaag

SEQ ID NO: 694241 - DNA, 25 bp, Homo sapien
tcctcagggtcgtatggcctgtcgt

SEQ ID NO: 694242 - DNA, 25 bp, Homo sapien
ggtggaggaagctgccgtggaggct

SEQ ID NO: 694243 - DNA, 25 bp, Homo sapien
gcggacgggtcgaatgatttcttct

SEQ ID NO: 694244 - DNA, 25 bp, Homo sapien
ggaagcagacgaagcggtggaggaa

SEQ ID NO: 694245 - DNA, 25 bp, Homo sapien
gacagcacttttagcaccggtggtt

SEQ ID NO: 694246 - DNA, 25 bp, Homo sapien
tgtggtgctgacagccgcgtctgca

SEQ ID NO: 694247 - DNA, 25 bp, Homo sapien
tatattcggacgtggtgactcaaga

SEQ ID NO: 694248 - DNA, 25 bp, Homo sapien
taactctccactgtttgcgggacgt

SEQ ID NO: 694249 - DNA, 25 bp, Homo sapien
gagggcttcttttccgactgcggga

SEQ ID NO: 694250 - DNA, 25 bp, Homo sapien
taacatatcaaagactccctaaggc

SEQ ID NO: 694251 - DNA, 25 bp, Homo sapien
tgtggtaacttcaatcaggagtact

SEQ ID NO: 694252 - DNA, 25 bp, Homo sapien
gatattcccaacgtcgtaagttgtg

SEQ ID NO: 694253 - DNA, 25 bp, Homo sapien
ggacagacaccacgctcacgtaaag

SEQ ID NO: 694254 - DNA, 25 bp, Homo sapien
tctgattacaatttccatgcaaagc

SEQ ID NO: 694255 - DNA, 25 bp, Homo sapien
tgaagaaatgcttacctgacaatat

SEQ ID NO: 694256 - DNA, 25 bp, Homo sapien
catgcaaagctactgttacatacac

SEQ ID NO: 694257 - DNA, 25 bp, Homo sapien
tccattcgagcagctacagagggcg

SEQ ID NO: 694258 - DNA, 25 bp, Homo sapien
tatggaccgaggttactccacaggc

SEQ ID NO: 694259 - DNA, 25 bp, Homo sapien
gatgctgagttacagagagtgcccc

SEQ ID NO: 694260 - DNA, 25 bp, Homo sapien
gtaatcagtacgtgaagcgggccga

SEQ ID NO: 694261 - DNA, 25 bp, Homo sapien
gacaacccggtgtttctgtggacaa

SEQ ID NO: 694262 - DNA, 25 bp, Homo sapien
tagagaagtgatccctgatggagcc

SEQ ID NO: 694263 - DNA, 25 bp, Homo sapien
gcatggccacggagacacttcagtt

SEQ ID NO: 694264 - DNA, 25 bp, Homo sapien
tcagcagacaaggtgagtgacccca

SEQ ID NO: 694265 - DNA, 25 bp, Homo sapien
gaagtcccgcccaagatgtggagtg

SEQ ID NO: 694266 - DNA, 25 bp, Homo sapien
tcacctccacccagaaagccggcgc

SEQ ID NO: 694267 - DNA, 25 bp, Homo sapien
acctccacccagaaagccggcgctt

SEQ ID NO: 694268 - DNA, 25 bp, Homo sapien
cctccacccagaaagccggcgctta

SEQ ID NO: 694269 - DNA, 25 bp, Homo sapien
ctccacccagaaagccggcgcttac

SEQ ID NO: 694270 - DNA, 25 bp, Homo sapien
gctgaaataggagtagagagagata

SEQ ID NO: 694271 - DNA, 25 bp, Homo sapien
cggccacggctgctgaaataggagt

SEQ ID NO: 694272 - DNA, 25 bp, Homo sapien
tgcctgttgttattagctacaacac

SEQ ID NO: 694273 - DNA, 25 bp, Homo sapien
ggtggaagcggatcagacagagctc

SEQ ID NO: 694274 - DNA, 25 bp, Homo sapien
aactgtcttcggtgcgatcctccca

SEQ ID NO: 694275 - DNA, 25 bp, Homo sapien
cttgagtttgccaacataatcccaa

SEQ ID NO: 694276 - DNA, 25 bp, Homo sapien
caatgtgaattgtgtcaggcaaatc

SEQ ID NO: 694277 - DNA, 25 bp, Homo sapien
gatcctcccaccaatgtgaattgtg

SEQ ID NO: 694278 - DNA, 25 bp, Homo sapien
taacgattcactatgagccagggtg

SEQ ID NO: 694279 - DNA, 25 bp, Homo sapien
cccgcaagtggccaggtgtgtgtaa

SEQ ID NO: 694280 - DNA, 25 bp, Homo sapien
gccagggtgactccttgcattaaag

SEQ ID NO: 694281 - DNA, 25 bp, Homo sapien
tgtaaagcaggctccgaacacctgg

SEQ ID NO: 694282 - DNA, 25 bp, Homo sapien
cacggccatcgccactttgcattta

SEQ ID NO: 694283 - DNA, 25 bp, Homo sapien
gaaaccgatcactgagaggccagac

SEQ ID NO: 694284 - DNA, 25 bp, Homo sapien
tttccgaccctgtccaaactgctga

SEQ ID NO: 694285 - DNA, 25 bp, Homo sapien
tggtcagtgccccagcgaaaccgat

SEQ ID NO: 694286 - DNA, 25 bp, Homo sapien
gagacaggatacgccttagtgacaa

SEQ ID NO: 694287 - DNA, 25 bp, Homo sapien
ccagagacaggatacgccttagtga

SEQ ID NO: 694288 - DNA, 25 bp, Homo sapien
cagagacaggatacgccttagtgac

SEQ ID NO: 694289 - DNA, 25 bp, Homo sapien
gacaggatacgccttagtgacaaat

SEQ ID NO: 694290 - DNA, 25 bp, Homo sapien
cactctgcatgttaataaatccttt

SEQ ID NO: 694291 - DNA, 25 bp, Homo sapien
aaaaagagggtcgtgtctccctctg

SEQ ID NO: 694292 - DNA, 25 bp, Homo sapien
gctgagtcgagacaaaaagagggtc

SEQ ID NO: 694293 - DNA, 25 bp, Homo sapien
tttccaaatggtgctgagtcgagac

SEQ ID NO: 694294 - DNA, 25 bp, Homo sapien
aaagtgaacgcttgcaagttttacg

SEQ ID NO: 694295 - DNA, 25 bp, Homo sapien
tggtagcttacttttgccaattact

SEQ ID NO: 694296 - DNA, 25 bp, Homo sapien
tgcggtggtgcaacacagctggctg

SEQ ID NO: 694297 - DNA, 25 bp, Homo sapien
tacaaagactttatatgtaaaagca

SEQ ID NO: 694298 - DNA, 25 bp, Homo sapien
tgatatttggtgacggaggaactga

SEQ ID NO: 694299 - DNA, 25 bp, Homo sapien
ctgatatttggtgacggaggaactg

SEQ ID NO: 694300 - DNA, 25 bp, Homo sapien
gatatttggtgacggaggaactgac

SEQ ID NO: 694301 - DNA, 25 bp, Homo sapien
gaggcccagggaaatacgttctgtc

SEQ ID NO: 694302 - DNA, 25 bp, Homo sapien
tgggcaccatcacagaagtcaagac

SEQ ID NO: 694303 - DNA, 25 bp, Homo sapien
cttagctagtatggacttgggcacc

SEQ ID NO: 694304 - DNA, 25 bp, Homo sapien
tgagaagcactttctaggcctggct

SEQ ID NO: 694305 - DNA, 25 bp, Homo sapien
tacagttgagatcgaagaggtgtgc

SEQ ID NO: 694306 - DNA, 25 bp, Homo sapien
tgctgactggtggtgtctttcaaca

SEQ ID NO: 694307 - DNA, 25 bp, Homo sapien
aacatgctgctgaagacgtcgagaa

SEQ ID NO: 694308 - DNA, 25 bp, Homo sapien
gcggcgctgtgctcttctcagggac

SEQ ID NO: 694309 - DNA, 25 bp, Homo sapien
cactggcggagagtcctccagatcg

SEQ ID NO: 694310 - DNA, 25 bp, Homo sapien
cagatcggggatggcctcctgcctg

SEQ ID NO: 694311 - DNA, 25 bp, Homo sapien
cctgggggccgtcttcttgctttca

SEQ ID NO: 694312 - DNA, 25 bp, Homo sapien
ctctgaatccgacactggcggagag

SEQ ID NO: 694313 - DNA, 25 bp, Homo sapien
gatttcctcacgcagaacacgatgg

SEQ ID NO: 694314 - DNA, 25 bp, Homo sapien
aagtttcgccaaagagatttcctca

SEQ ID NO: 694315 - DNA, 25 bp, Homo sapien
tccacgtggaaagctctttagatac

SEQ ID NO: 694316 - DNA, 25 bp, Homo sapien
tctttagatacaagttcttctggct

SEQ ID NO: 694317 - DNA, 25 bp, Homo sapien
tcaggttgaacatgatgctgcgata

SEQ ID NO: 694318 - DNA, 25 bp, Homo sapien
tactcttgtagcgattatctgtaac

SEQ ID NO: 694319 - DNA, 25 bp, Homo sapien
tgtcatgattaagtcatcgctgtca

SEQ ID NO: 694320 - DNA, 25 bp, Homo sapien
tccttctcaatatggagggcaattt

SEQ ID NO: 694321 - DNA, 25 bp, Homo sapien
cacgaggtttctaggtgcaggctgc

SEQ ID NO: 694322 - DNA, 25 bp, Homo sapien
gaacttcttggaggcagccgttgcc

SEQ ID NO: 694323 - DNA, 25 bp, Homo sapien
agcagcggagccagggaacttcttg

SEQ ID NO: 694324 - DNA, 25 bp, Homo sapien
ggtaccactggcttccttacggctc

SEQ ID NO: 694325 - DNA, 25 bp, Homo sapien
gctttctcctcggacctcctgtctt

SEQ ID NO: 694326 - DNA, 25 bp, Homo sapien
tcggacctcctgtcttccttcgtgg

SEQ ID NO: 694327 - DNA, 25 bp, Homo sapien
tcctcggacctcctgtcttccttcg

SEQ ID NO: 694328 - DNA, 25 bp, Homo sapien
tttctcctcggacctcctgtcttcc

SEQ ID NO: 694329 - DNA, 25 bp, Homo sapien
cagcagcatttatgacggtgactac

SEQ ID NO: 694330 - DNA, 25 bp, Homo sapien
taaaaggcagatttacagcagcact

SEQ ID NO: 694331 - DNA, 25 bp, Homo sapien
taaaggcttgacttgcgcactagct

SEQ ID NO: 694332 - DNA, 25 bp, Homo sapien
tgcccacctggcattactgaatagg

SEQ ID NO: 694333 - DNA, 25 bp, Homo sapien
actggagtccattggaggcgatgcc

SEQ ID NO: 694334 - DNA, 25 bp, Homo sapien
ctggagtccattggaggcgatgcca

SEQ ID NO: 694335 - DNA, 25 bp, Homo sapien
agactggagtccattggaggcgatg

SEQ ID NO: 694336 - DNA, 25 bp, Homo sapien
gactggagtccattggaggcgatgc

SEQ ID NO: 694337 - DNA, 25 bp, Homo sapien
cttataaccccatgtgagatcgtca

SEQ ID NO: 694338 - DNA, 25 bp, Homo sapien
tgtgagatcgtcagagcccaaaggc

SEQ ID NO: 694339 - DNA, 25 bp, Homo sapien
acagggctcgttgaggtgcaccgca

SEQ ID NO: 694340 - DNA, 25 bp, Homo sapien
ctcgttgaggtgcaccgcatgccgg

SEQ ID NO: 694341 - DNA, 25 bp, Homo sapien
ctcgggtgatcaagtcaacaaggca

SEQ ID NO: 694342 - DNA, 25 bp, Homo sapien
aaggcttttccaacgatcggtacag

SEQ ID NO: 694343 - DNA, 25 bp, Homo sapien
tgatcaagtcaacaaggcacctcct

SEQ ID NO: 694344 - DNA, 25 bp, Homo sapien
gcaagcctccaaaactcccaaaggc

SEQ ID NO: 694345 - DNA, 25 bp, Homo sapien
ctgtttcttcactccaagattgccc

SEQ ID NO: 694346 - DNA, 25 bp, Homo sapien
agctcttcttgccgaactcttccag

SEQ ID NO: 694347 - DNA, 25 bp, Homo sapien
ttccaggtttgcggcaaatgaaagt

SEQ ID NO: 694348 - DNA, 25 bp, Homo sapien
ctcttccaggtttgcggcaaatgaa

SEQ ID NO: 694349 - DNA, 25 bp, Homo sapien
ccaggtttgcggcaaatgaaagttg

SEQ ID NO: 694350 - DNA, 25 bp, Homo sapien
cattggaggaattgtagcaggcgtc

SEQ ID NO: 694351 - DNA, 25 bp, Homo sapien
tgctgatgtgggacttcaccgtgca

SEQ ID NO: 694352 - DNA, 25 bp, Homo sapien
cactctgtgacaccgagaatgccga

SEQ ID NO: 694353 - DNA, 25 bp, Homo sapien
gagtagatccacagctccgaaaggt

SEQ ID NO: 694354 - DNA, 25 bp, Homo sapien
cagtctcgttttattgccgctgaca

SEQ ID NO: 694355 - DNA, 25 bp, Homo sapien
tcccagtctcgttttattgccgctg

SEQ ID NO: 694356 - DNA, 25 bp, Homo sapien
tctcgttttattgccgctgacaact

SEQ ID NO: 694357 - DNA, 25 bp, Homo sapien
atgactcccagtctcgttttattgc

SEQ ID NO: 694358 - DNA, 25 bp, Homo sapien
tctgtggcagcacgtgggaacaaga

SEQ ID NO: 694359 - DNA, 25 bp, Homo sapien
aaaaaagagctcacgcgaccagtga

SEQ ID NO: 694360 - DNA, 25 bp, Homo sapien
caccatgagttatccttgtgaacgg

SEQ ID NO: 694361 - DNA, 25 bp, Homo sapien
tccaacggttagatgaaacgaactg

SEQ ID NO: 694362 - DNA, 25 bp, Homo sapien
aggacctactgatatcttagcaggg

SEQ ID NO: 694363 - DNA, 25 bp, Homo sapien
caagtgtgagtcagctcatgggaca

SEQ ID NO: 694364 - DNA, 25 bp, Homo sapien
caggtcaaccgagtgccatgggaag

SEQ ID NO: 694365 - DNA, 25 bp, Homo sapien
tccttctagcaatggcagagtgtct

SEQ ID NO: 694366 - DNA, 25 bp, Homo sapien
ggcaggctccccagtacttgttgag

SEQ ID NO: 694367 - DNA, 25 bp, Homo sapien
gtggcaggctccccagtacttgttg

SEQ ID NO: 694368 - DNA, 25 bp, Homo sapien
gcaggctccccagtacttgttgagc

SEQ ID NO: 694369 - DNA, 25 bp, Homo sapien
tggcaggctccccagtacttgttga

SEQ ID NO: 694370 - DNA, 25 bp, Homo sapien
tagctcaaaagtgtgtcgtccccat

SEQ ID NO: 694371 - DNA, 25 bp, Homo sapien
caatcaatcaccttttgggaagaca

SEQ ID NO: 694372 - DNA, 25 bp, Homo sapien
cagagtaccccgctatgggcagaag

SEQ ID NO: 694373 - DNA, 25 bp, Homo sapien
cgggataacaaaacgagcagaagct

SEQ ID NO: 694374 - DNA, 25 bp, Homo sapien
tagggaatctgctcaaagtctgacg

SEQ ID NO: 694375 - DNA, 25 bp, Homo sapien
tgcatgagtgccttcccttagggaa

SEQ ID NO: 694376 - DNA, 25 bp, Homo sapien
gcacaaaatgcactatagacagaag

SEQ ID NO: 694377 - DNA, 25 bp, Homo sapien
tcttttttgtaaggcacaccagacc

SEQ ID NO: 694378 - DNA, 25 bp, Homo sapien
gatgctttcatgtgctggccgtgga

SEQ ID NO: 694379 - DNA, 25 bp, Homo sapien
gagtgtgtggccttcgaagttcgaa

SEQ ID NO: 694380 - DNA, 25 bp, Homo sapien
tagaataccaagtccaaggcacgcg

SEQ ID NO: 694381 - DNA, 25 bp, Homo sapien
tatacagcgctgttgtcagaacaac

SEQ ID NO: 694382 - DNA, 25 bp, Homo sapien
aagagaatacgaatacttaccagag

SEQ ID NO: 694383 - DNA, 25 bp, Homo sapien
gaagagaatacgaatacttaccaga

SEQ ID NO: 694384 - DNA, 25 bp, Homo sapien
agagaatacgaatacttaccagagc

SEQ ID NO: 694385 - DNA, 25 bp, Homo sapien
ctatgcaatcagactgggatgaaga

SEQ ID NO: 694386 - DNA, 25 bp, Homo sapien
tcaatcattaaggtgaacgttcacc

SEQ ID NO: 694387 - DNA, 25 bp, Homo sapien
tgcttcccgctgatggtgcagccgg

SEQ ID NO: 694388 - DNA, 25 bp, Homo sapien
aacgttcaccagtgaggtttacagc

SEQ ID NO: 694389 - DNA, 25 bp, Homo sapien
gacaggaagtcctgacagactaggg

SEQ ID NO: 694390 - DNA, 25 bp, Homo sapien
aggcccaggggatggctatccagaa

SEQ ID NO: 694391 - DNA, 25 bp, Homo sapien
aggccaacccctaggtgatacatac

SEQ ID NO: 694392 - DNA, 25 bp, Homo sapien
atggctatccagaaagaacgggagg

SEQ ID NO: 694393 - DNA, 25 bp, Homo sapien
gacaggcccaggggatggctatcca

SEQ ID NO: 694394 - DNA, 25 bp, Homo sapien
ccgagtgcttcactccgcgcaggga

SEQ ID NO: 694395 - DNA, 25 bp, Homo sapien
tgtaattgtgatcgctcgcccacga

SEQ ID NO: 694396 - DNA, 25 bp, Homo sapien
ggcgtgctgctctcacaagctgctt

SEQ ID NO: 694397 - DNA, 25 bp, Homo sapien
tatacaacagtgacggcgagggagc

SEQ ID NO: 694398 - DNA, 25 bp, Homo sapien
tcttcctgaggccatctgaagaccc

SEQ ID NO: 694399 - DNA, 25 bp, Homo sapien
taagaaatcataccttcacttcatt

SEQ ID NO: 694400 - DNA, 25 bp, Homo sapien
cctgcttggcagcagttcaacacac

SEQ ID NO: 694401 - DNA, 25 bp, Homo sapien
tcctgaggccatctgaagaccctgc

SEQ ID NO: 694402 - DNA, 25 bp, Homo sapien
gaacttcaaccacttgtgctccgtg

SEQ ID NO: 694403 - DNA, 25 bp, Homo sapien
acctgcaaccctgatgaggtgccaa

SEQ ID NO: 694404 - DNA, 25 bp, Homo sapien
gtgggcccgcagtttccccgtgcaa

SEQ ID NO: 694405 - DNA, 25 bp, Homo sapien
tccccgtgcaaaactgagaacttca

SEQ ID NO: 694406 - DNA, 25 bp, Homo sapien
aggctgtgcccaacgccgagggttc

SEQ ID NO: 694407 - DNA, 25 bp, Homo sapien
agaggaaaggcctgcgcgcgaggct

SEQ ID NO: 694408 - DNA, 25 bp, Homo sapien
attaagtcattcaaaggctaaataa

SEQ ID NO: 694409 - DNA, 25 bp, Homo sapien
gcggcaatgaaccaaatgagccaaa

SEQ ID NO: 694410 - DNA, 25 bp, Homo sapien
tgagcaccgcatttcggaagactgg

SEQ ID NO: 694411 - DNA, 25 bp, Homo sapien
tttgaggcaccaggcgcctctatca

SEQ ID NO: 694412 - DNA, 25 bp, Homo sapien
tactgcagtacaccgagtcgggctg

SEQ ID NO: 694413 - DNA, 25 bp, Homo sapien
tagaaacttcattgtcgctgcggcg

SEQ ID NO: 694414 - DNA, 25 bp, Homo sapien
caagagtgtgaaggcagagatgctt

SEQ ID NO: 694415 - DNA, 25 bp, Homo sapien
gcttctagacacagcaatttccaat

SEQ ID NO: 694416 - DNA, 25 bp, Homo sapien
tgcagctaatgcagtgcaagagtgt

SEQ ID NO: 694417 - DNA, 25 bp, Homo sapien
gcagagatgcttctagacacagcaa

SEQ ID NO: 694418 - DNA, 25 bp, Homo sapien
aggcagctgggtggggacaggcccg

SEQ ID NO: 694419 - DNA, 25 bp, Homo sapien
gaggacaggcagctgggtggggaca

SEQ ID NO: 694420 - DNA, 25 bp, Homo sapien
caggcagctgggtggggacaggccc

SEQ ID NO: 694421 - DNA, 25 bp, Homo sapien
cagctgggtggggacaggcccggga

SEQ ID NO: 694422 - DNA, 25 bp, Homo sapien
tacttgtacaatcggtgccatcagc

SEQ ID NO: 694423 - DNA, 25 bp, Homo sapien
tcttcacagcggtcacagcaaatca

SEQ ID NO: 694424 - DNA, 25 bp, Homo sapien
gaaatgcccacacaatcgccatgaa

SEQ ID NO: 694425 - DNA, 25 bp, Homo sapien
gaatgagtctcatcctgcacttgca

SEQ ID NO: 694426 - DNA, 25 bp, Homo sapien
ttcaggcttcggtcggcccaagtct

SEQ ID NO: 694427 - DNA, 25 bp, Homo sapien
catctttgatgtcctgagccgcctt

SEQ ID NO: 694428 - DNA, 25 bp, Homo sapien
aaccctcacattcaggcttcggtcg

SEQ ID NO: 694429 - DNA, 25 bp, Homo sapien
gcggcaaatgcaatacagggcgttg

SEQ ID NO: 694430 - DNA, 25 bp, Homo sapien
cagaagaggctggtcgttccttcac

SEQ ID NO: 694431 - DNA, 25 bp, Homo sapien
cattgctcgggtcgcctttgtcgtc

SEQ ID NO: 694432 - DNA, 25 bp, Homo sapien
tctttcaaggtcaggccatcgctgt

SEQ ID NO: 694433 - DNA, 25 bp, Homo sapien
tcctgcgaaggcgattctgaagctc

SEQ ID NO: 694434 - DNA, 25 bp, Homo sapien
aaaggtgacattgccgccaaacacg

SEQ ID NO: 694435 - DNA, 25 bp, Homo sapien
cacatagtgaccaactgaccacaga

SEQ ID NO: 694436 - DNA, 25 bp, Homo sapien
ctagcggtaaagtgtaagcacatag

SEQ ID NO: 694437 - DNA, 25 bp, Homo sapien
ttgccgccaaacacgcgcagcaggg

SEQ ID NO: 694438 - DNA, 25 bp, Homo sapien
taattacatttcaatgctaatgatg

SEQ ID NO: 694439 - DNA, 25 bp, Homo sapien
catttcaatgctaatgatgactctg

SEQ ID NO: 694440 - DNA, 25 bp, Homo sapien
taatgatgactctgattttatgcca

SEQ ID NO: 694441 - DNA, 25 bp, Homo sapien
caatgctaatgatgactctgatttt

SEQ ID NO: 694442 - DNA, 25 bp, Homo sapien
cactgaaagcttggacacttttccc

SEQ ID NO: 694443 - DNA, 25 bp, Homo sapien
acactgaaagcttggacacttttcc

SEQ ID NO: 694444 - DNA, 25 bp, Homo sapien
aacactgaaagcttggacacttttc

SEQ ID NO: 694445 - DNA, 25 bp, Homo sapien
actgaaagcttggacacttttccct

SEQ ID NO: 694446 - DNA, 25 bp, Homo sapien
caactcagattatctagaggctgtt

SEQ ID NO: 694447 - DNA, 25 bp, Homo sapien
tggcagacgaaacctctgggtccaa

SEQ ID NO: 694448 - DNA, 25 bp, Homo sapien
tgttcacgagtaacaggcttcgtat

SEQ ID NO: 694449 - DNA, 25 bp, Homo sapien
ggcttcgtattttcaacaactcaga

SEQ ID NO: 694450 - DNA, 25 bp, Homo sapien
agggccagagaggagtcgccaagca

SEQ ID NO: 694451 - DNA, 25 bp, Homo sapien
ccggggcagcgcaggaaggagtgga

SEQ ID NO: 694452 - DNA, 25 bp, Homo sapien
gagtcgccaagcatcagcttctttt

SEQ ID NO: 694453 - DNA, 25 bp, Homo sapien
gagaggagtcgccaagcatcagctt

SEQ ID NO: 694454 - DNA, 25 bp, Homo sapien
gaaatccacctcatgccgcaagtgt

SEQ ID NO: 694455 - DNA, 25 bp, Homo sapien
ataaaagattaccacttgggccctg

SEQ ID NO: 694456 - DNA, 25 bp, Homo sapien
ttcaaacacttaagatacggtccca

SEQ ID NO: 694457 - DNA, 25 bp, Homo sapien
cacaatgcacaggttcttatcccca

SEQ ID NO: 694458 - DNA, 25 bp, Homo sapien
tatccacacaatatatatccacacg

SEQ ID NO: 694459 - DNA, 25 bp, Homo sapien
tatatatccactacatatacccgct

SEQ ID NO: 694460 - DNA, 25 bp, Homo sapien
tatccactacatatacccgctatat

SEQ ID NO: 694461 - DNA, 25 bp, Homo sapien
ggcaatggagcgactgatcacggct

SEQ ID NO: 694462 - DNA, 25 bp, Homo sapien
tcaaccccagctgcaaacgatagcg

SEQ ID NO: 694463 - DNA, 25 bp, Homo sapien
tacaaggttttctgaagcgacatcc

SEQ ID NO: 694464 - DNA, 25 bp, Homo sapien
tgcaacagacggtaggtgccaccta

SEQ ID NO: 694465 - DNA, 25 bp, Homo sapien
agtgcttcacgatgacccaggagaa

SEQ ID NO: 694466 - DNA, 25 bp, Homo sapien
ggcctctagggtctcgcagccattt

SEQ ID NO: 694467 - DNA, 25 bp, Homo sapien
cggacggccaccgagatggcgcggg

SEQ ID NO: 694468 - DNA, 25 bp, Homo sapien
ggagtgggcggacggccaccgagat

SEQ ID NO: 694469 - DNA, 25 bp, Homo sapien
catttccccgaacgccgcggagtgg

SEQ ID NO: 694470 - DNA, 25 bp, Homo sapien
ggcgggcggaggacgagaccggcca

SEQ ID NO: 694471 - DNA, 25 bp, Homo sapien
cggaggacgagaccggccaccgaga

SEQ ID NO: 694472 - DNA, 25 bp, Homo sapien
gacgagaccggccaccgagacgctg

SEQ ID NO: 694473 - DNA, 25 bp, Homo sapien
ggcggaggacgagaccggccaccga

SEQ ID NO: 694474 - DNA, 25 bp, Homo sapien
tgctagtttctgaggcagacttagt

SEQ ID NO: 694475 - DNA, 25 bp, Homo sapien
taataataccgctgaagattacagg

SEQ ID NO: 694476 - DNA, 25 bp, Homo sapien
tggcccattaggaccacattaatag

SEQ ID NO: 694477 - DNA, 25 bp, Homo sapien
tcttgagtgtgatctcaggttgcaa

SEQ ID NO: 694478 - DNA, 25 bp, Homo sapien
aggatactggaacctgcctctcgtt

SEQ ID NO: 694479 - DNA, 25 bp, Homo sapien
cccagcagaagctggctcggctgtg

SEQ ID NO: 694480 - DNA, 25 bp, Homo sapien
ggaggcctggccagactatccactc

SEQ ID NO: 694481 - DNA, 25 bp, Homo sapien
tcagcgatacgcagaatgccttcct

SEQ ID NO: 694482 - DNA, 25 bp, Homo sapien
caagtagcaccgatttacaacagga

SEQ ID NO: 694483 - DNA, 25 bp, Homo sapien
gaggcagccggctttacttcgttta

SEQ ID NO: 694484 - DNA, 25 bp, Homo sapien
cttagtcccgtgaaagcgaaggagc

SEQ ID NO: 694485 - DNA, 25 bp, Homo sapien
catggagaaaaacacgatgggtgca

SEQ ID NO: 694486 - DNA, 25 bp, Homo sapien
ttcagagaggcagcggccaaggaca

SEQ ID NO: 694487 - DNA, 25 bp, Homo sapien
cccgccgaggccaccgggcagcgtc

SEQ ID NO: 694488 - DNA, 25 bp, Homo sapien
ccccgccgaggccaccgggcagcgt

SEQ ID NO: 694489 - DNA, 25 bp, Homo sapien
tttctggccggagatcggcccggtc

SEQ ID NO: 694490 - DNA, 25 bp, Homo sapien
ccggtcgtgagtcgtgtctgtgcca

SEQ ID NO: 694491 - DNA, 25 bp, Homo sapien
atcggcccggtcgtgagtcgtgtct

SEQ ID NO: 694492 - DNA, 25 bp, Homo sapien
tagttctttctggccggagatcggc

SEQ ID NO: 694493 - DNA, 25 bp, Homo sapien
caaagacctctagaaagctgtggga

SEQ ID NO: 694494 - DNA, 25 bp, Homo sapien
caggctcttcacaccacggaataga

SEQ ID NO: 694495 - DNA, 25 bp, Homo sapien
ggaaacgaacccatagacgactgaa

SEQ ID NO: 694496 - DNA, 25 bp, Homo sapien
ggagctacacgttctatgcggcata

SEQ ID NO: 694497 - DNA, 25 bp, Homo sapien
actgcattccagacgcaatgggccc

SEQ ID NO: 694498 - DNA, 25 bp, Homo sapien
tcagacacgtgatcacaacagctgc

SEQ ID NO: 694499 - DNA, 25 bp, Homo sapien
tcaatgccttgggagtatgggacct

SEQ ID NO: 694500 - DNA, 25 bp, Homo sapien
cagtttccaaaagacacccaaatgg

SEQ ID NO: 694501 - DNA, 25 bp, Homo sapien
catcagctgggctactcacccgcat

SEQ ID NO: 694502 - DNA, 25 bp, Homo sapien
tcatgatcattctcagttggtgcca

SEQ ID NO: 694503 - DNA, 25 bp, Homo sapien
ttggtgccaccacctcatcagctgg

SEQ ID NO: 694504 - DNA, 25 bp, Homo sapien
gatcattctcagttggtgccaccac

SEQ ID NO: 694505 - DNA, 25 bp, Homo sapien
tggcgccaacccgtagtgcgtggtc

SEQ ID NO: 694506 - DNA, 25 bp, Homo sapien
gagggccgacgccttttgactctgg

SEQ ID NO: 694507 - DNA, 25 bp, Homo sapien
gggcgcttcattggtcatcggctcg

SEQ ID NO: 694508 - DNA, 25 bp, Homo sapien
ggagttctgcgcaagtacggaagct

SEQ ID NO: 694509 - DNA, 25 bp, Homo sapien
taaacatgcagttctgtgcgccaca

SEQ ID NO: 694510 - DNA, 25 bp, Homo sapien
acattcctgccgctttgaacggtgc

SEQ ID NO: 694511 - DNA, 25 bp, Homo sapien
cacgctgctgttgaatgaacgctca

SEQ ID NO: 694512 - DNA, 25 bp, Homo sapien
catgctcagtgtgggattctccggc

SEQ ID NO: 694513 - DNA, 25 bp, Homo sapien
cctggtcacaggtaatggcttacag

SEQ ID NO: 694514 - DNA, 25 bp, Homo sapien
ctcatcatgaactacctggtcacag

SEQ ID NO: 694515 - DNA, 25 bp, Homo sapien
ccagagagcagacatgaaccgcctc

SEQ ID NO: 694516 - DNA, 25 bp, Homo sapien
gagcagacatgaaccgcctcatcat

SEQ ID NO: 694517 - DNA, 25 bp, Homo sapien
ctggcactcgctgaagaatctggaa

SEQ ID NO: 694518 - DNA, 25 bp, Homo sapien
tgaaggattcggtctaccacggagg

SEQ ID NO: 694519 - DNA, 25 bp, Homo sapien
ttctggtacctgcagctggaaaggc

SEQ ID NO: 694520 - DNA, 25 bp, Homo sapien
tcattagagcgaggcagcccttggc

SEQ ID NO: 694521 - DNA, 25 bp, Homo sapien
tgctttcagggccatgagcgtcttc

SEQ ID NO: 694522 - DNA, 25 bp, Homo sapien
taaaaacagagggaatacgccagca

SEQ ID NO: 694523 - DNA, 25 bp, Homo sapien
tccctatgtggcagtggcatgtcac

SEQ ID NO: 694524 - DNA, 25 bp, Homo sapien
tcagaaactgcccatgcagagaagc

SEQ ID NO: 694525 - DNA, 25 bp, Homo sapien
cgcgtcggacagtcagggcgaccca

SEQ ID NO: 694526 - DNA, 25 bp, Homo sapien
gccagggcgcgtcggacagtcaggg

SEQ ID NO: 694527 - DNA, 25 bp, Homo sapien
agggcgcgtcggacagtcagggcga

SEQ ID NO: 694528 - DNA, 25 bp, Homo sapien
gtcggacagtcagggcgacccagcc

SEQ ID NO: 694529 - DNA, 25 bp, Homo sapien
ccgaagctctgtgctcattaaaggc

SEQ ID NO: 694530 - DNA, 25 bp, Homo sapien
cattaggtacattcgcattgtgcag

SEQ ID NO: 694531 - DNA, 25 bp, Homo sapien
catgggtacagcctagagcatcacc

SEQ ID NO: 694532 - DNA, 25 bp, Homo sapien
ccaaccctgtggcaccatgggtaca

SEQ ID NO: 694533 - DNA, 25 bp, Homo sapien
aacccagaagggatacaggactagg

SEQ ID NO: 694534 - DNA, 25 bp, Homo sapien
tccaggagctgttcggccatagctg

SEQ ID NO: 694535 - DNA, 25 bp, Homo sapien
taaaatctctgagagcaaggaggca

SEQ ID NO: 694536 - DNA, 25 bp, Homo sapien
ccaggcttgggtggcagtcctgaca

SEQ ID NO: 694537 - DNA, 25 bp, Homo sapien
tgctgtcagtgccacgtcagacccg

SEQ ID NO: 694538 - DNA, 25 bp, Homo sapien
tccaggccccgtggtcatttgcgga

SEQ ID NO: 694539 - DNA, 25 bp, Homo sapien
agcctggaggcctctatgcaggcca

SEQ ID NO: 694540 - DNA, 25 bp, Homo sapien
gctagaaggcagaacgtgctgtcag

SEQ ID NO: 694541 - DNA, 25 bp, Homo sapien
agatcctgatgctggcccacgagga

SEQ ID NO: 694542 - DNA, 25 bp, Homo sapien
ccacgaggagctcccatttctgggt

SEQ ID NO: 694543 - DNA, 25 bp, Homo sapien
tctgggtctggattttcagaacccc

SEQ ID NO: 694544 - DNA, 25 bp, Homo sapien
aacaaaccactctgctgctaggttg

SEQ ID NO: 694545 - DNA, 25 bp, Homo sapien
acggcacctctcatcagcgcccttg

SEQ ID NO: 694546 - DNA, 25 bp, Homo sapien
gcacctctcatcagcgcccttgtgc

SEQ ID NO: 694547 - DNA, 25 bp, Homo sapien
ccacggcacctctcatcagcgccct

SEQ ID NO: 694548 - DNA, 25 bp, Homo sapien
ctcatcagcgcccttgtgccctgga

SEQ ID NO: 694549 - DNA, 25 bp, Homo sapien
tgggcaccggatcttctcaggactg

SEQ ID NO: 694550 - DNA, 25 bp, Homo sapien
cggtcattcgctgtcgggccgacag

SEQ ID NO: 694551 - DNA, 25 bp, Homo sapien
gaatatgcacgtctgtgtgttcacg

SEQ ID NO: 694552 - DNA, 25 bp, Homo sapien
cctgagtgtgcgagttgccgcatgt

SEQ ID NO: 694553 - DNA, 25 bp, Homo sapien
cacgcccaatagaatggctggcacg

SEQ ID NO: 694554 - DNA, 25 bp, Homo sapien
cacgcccactagattggctggcact

SEQ ID NO: 694555 - DNA, 25 bp, Homo sapien
gcccaatagaatggctggcacggtg

SEQ ID NO: 694556 - DNA, 25 bp, Homo sapien
cgcccactagattggctggcactgt

SEQ ID NO: 694557 - DNA, 25 bp, Homo sapien
atgtcaccttgatagacgtcacaga

SEQ ID NO: 694558 - DNA, 25 bp, Homo sapien
ccttgatagacgtcacagaaaccgc

SEQ ID NO: 694559 - DNA, 25 bp, Homo sapien
gacgtcacagaaaccgcataccgtt

SEQ ID NO: 694560 - DNA, 25 bp, Homo sapien
ggccatctcccctcctggcgcactt

SEQ ID NO: 694561 - DNA, 25 bp, Homo sapien
gctgggtttacagagaggacgaggc

SEQ ID NO: 694562 - DNA, 25 bp, Homo sapien
tgagcctccgagaaacaggccagga

SEQ ID NO: 694563 - DNA, 25 bp, Homo sapien
gagaaacaggccaggactctacaga

SEQ ID NO: 694564 - DNA, 25 bp, Homo sapien
ccctgtgagcctccgagaaacaggc

SEQ ID NO: 694565 - DNA, 25 bp, Homo sapien
cagagtccttctgagaggacccgct

SEQ ID NO: 694566 - DNA, 25 bp, Homo sapien
tgttagaacacgaaacctgacaggt

SEQ ID NO: 694567 - DNA, 25 bp, Homo sapien
tggttctcaggctgccgcaaggact

SEQ ID NO: 694568 - DNA, 25 bp, Homo sapien
tggaggcaagtgtctccttcctgat

SEQ ID NO: 694569 - DNA, 25 bp, Homo sapien
tctctcgggcattggttcaggctct

SEQ ID NO: 694570 - DNA, 25 bp, Homo sapien
tcacagaccaggatacggaggctca

SEQ ID NO: 694571 - DNA, 25 bp, Homo sapien
gaaaatgtgaccctagaacaggact

SEQ ID NO: 694572 - DNA, 25 bp, Homo sapien
gctcacagtagtcagcggcttgcct

SEQ ID NO: 694573 - DNA, 25 bp, Homo sapien
aggatagagcgatgggcacagacct

SEQ ID NO: 694574 - DNA, 25 bp, Homo sapien
ggatagagcgatgggcacagacctc

SEQ ID NO: 694575 - DNA, 25 bp, Homo sapien
tgaggatagagcgatgggcacagac

SEQ ID NO: 694576 - DNA, 25 bp, Homo sapien
agtgaggatagagcgatgggcacag

SEQ ID NO: 694577 - DNA, 25 bp, Homo sapien
gatggacattccttcgtatgtggcc

SEQ ID NO: 694578 - DNA, 25 bp, Homo sapien
gatgttcgcttctaactccagagct

SEQ ID NO: 694579 - DNA, 25 bp, Homo sapien
cgtatgtggcccctcttttgggatg

SEQ ID NO: 694580 - DNA, 25 bp, Homo sapien
cgattggtcttgaagggtcgatgat

SEQ ID NO: 694581 - DNA, 25 bp, Homo sapien
ttctgttcaagaatgcaaatgcctg

SEQ ID NO: 694582 - DNA, 25 bp, Homo sapien
cactgcggagtgcttaggacctgac

SEQ ID NO: 694583 - DNA, 25 bp, Homo sapien
tcggtgtgtgccagagagccgcctc

SEQ ID NO: 694584 - DNA, 25 bp, Homo sapien
ccatctgcaagacgggaacgagagc

SEQ ID NO: 694585 - DNA, 25 bp, Homo sapien
gatgctctttggtctcgggccacat

SEQ ID NO: 694586 - DNA, 25 bp, Homo sapien
ccacagccacgaaggctcaggcgtt

SEQ ID NO: 694587 - DNA, 25 bp, Homo sapien
gagccacagccacgagatgctcttt

SEQ ID NO: 694588 - DNA, 25 bp, Homo sapien
gagccacagccacgaaggctcaggc

SEQ ID NO: 694589 - DNA, 25 bp, Homo sapien
cttttggagagcgatggtgaaacca

SEQ ID NO: 694590 - DNA, 25 bp, Homo sapien
tggagacggtttgtgcatttcaccc

SEQ ID NO: 694591 - DNA, 25 bp, Homo sapien
tggtggctggttccatcaggaagtc

SEQ ID NO: 694592 - DNA, 25 bp, Homo sapien
tcctcttaggagaacggtgtttgtc

SEQ ID NO: 694593 - DNA, 25 bp, Homo sapien
tgctgtttgccagatgtgggcacac

SEQ ID NO: 694594 - DNA, 25 bp, Homo sapien
aggagcacagccgtcagagaaaaga

SEQ ID NO: 694595 - DNA, 25 bp, Homo sapien
cacccacgtgggttctgctttgctg

SEQ ID NO: 694596 - DNA, 25 bp, Homo sapien
gccgtcagagaaaagacgagcagcc

SEQ ID NO: 694597 - DNA, 25 bp, Homo sapien
taataaagccggatactgcggcggg

SEQ ID NO: 694598 - DNA, 25 bp, Homo sapien
gaaaaacggtgtctggcactcagct

SEQ ID NO: 694599 - DNA, 25 bp, Homo sapien
gatcacgttgaaatgaccctagaag

SEQ ID NO: 694600 - DNA, 25 bp, Homo sapien
gagttaaacgctgtagacaggcgcg

SEQ ID NO: 694601 - DNA, 25 bp, Homo sapien
aggcagccggcgacggcgtccaatt

SEQ ID NO: 694602 - DNA, 25 bp, Homo sapien
gggacaaattcctcagacttcgagg

SEQ ID NO: 694603 - DNA, 25 bp, Homo sapien
ttcctcagacttcgaggcagccggc

SEQ ID NO: 694604 - DNA, 25 bp, Homo sapien
gcgacggcgtccaattcccaaataa

SEQ ID NO: 694605 - DNA, 25 bp, Homo sapien
ctgccctgcagtttagcacgaaggg

SEQ ID NO: 694606 - DNA, 25 bp, Homo sapien
tgcagtttagcacgaagggccggct

SEQ ID NO: 694607 - DNA, 25 bp, Homo sapien
tgcggagtctcggagtcaccgaggt

SEQ ID NO: 694608 - DNA, 25 bp, Homo sapien
gagtctcggagtcaccgaggtggga

SEQ ID NO: 694609 - DNA, 25 bp, Homo sapien
gcctgtccggaatctgaccagtgcc

SEQ ID NO: 694610 - DNA, 25 bp, Homo sapien
agtgcccgaaggatgctctacccac

SEQ ID NO: 694611 - DNA, 25 bp, Homo sapien
taagtccggcttttcttcgtctcca

SEQ ID NO: 694612 - DNA, 25 bp, Homo sapien
tcctagacttgctgggtcccgacaa

SEQ ID NO: 694613 - DNA, 25 bp, Homo sapien
agagtccagcgtccggctctcgagc

SEQ ID NO: 694614 - DNA, 25 bp, Homo sapien
taaactgtccaccgcgcacaggctg

SEQ ID NO: 694615 - DNA, 25 bp, Homo sapien
atcggaggacgcgtgcgggagggcc

SEQ ID NO: 694616 - DNA, 25 bp, Homo sapien
gcacaggctggaagcgaagtcgggc

SEQ ID NO: 694617 - DNA, 25 bp, Homo sapien
acggcttctcgtgacagtgtttgca

SEQ ID NO: 694618 - DNA, 25 bp, Homo sapien
agtgtttgcaaagcgcggagggcgt

SEQ ID NO: 694619 - DNA, 25 bp, Homo sapien
cttctcgtgacagtgtttgcaaagc

SEQ ID NO: 694620 - DNA, 25 bp, Homo sapien
tcacggcttctcgtgacagtgtttg

SEQ ID NO: 694621 - DNA, 25 bp, Homo sapien
tgtcagggcagggccccagggcggc

SEQ ID NO: 694622 - DNA, 25 bp, Homo sapien
ttgtcagggcagggccccagggcgg

SEQ ID NO: 694623 - DNA, 25 bp, Homo sapien
tggccgaagggcgtcaagggcgcgg

SEQ ID NO: 694624 - DNA, 25 bp, Homo sapien
caagggcgcggcgtttacgggcgcg

SEQ ID NO: 694625 - DNA, 25 bp, Homo sapien
gcgcggcgtttacgggcgcggccag

SEQ ID NO: 694626 - DNA, 25 bp, Homo sapien
caccaggcgccgcatctcgtccagg

SEQ ID NO: 694627 - DNA, 25 bp, Homo sapien
cgctgctcgaaggcgtcgtcctcgt

SEQ ID NO: 694628 - DNA, 25 bp, Homo sapien
tcgcgcgcgttgatgctgagccgca

SEQ ID NO: 694629 - DNA, 25 bp, Homo sapien
tagccgcgggccgcttcgggttctc

SEQ ID NO: 694630 - DNA, 25 bp, Homo sapien
gtcgtttaggtcgtgcatgcgccgc

SEQ ID NO: 694631 - DNA, 25 bp, Homo sapien
tcccccgacagcgacttgagctcgg

SEQ ID NO: 694632 - DNA, 25 bp, Homo sapien
cgtagccgtggcttagtgccaggta

SEQ ID NO: 694633 - DNA, 25 bp, Homo sapien
tggcttagtgccaggtacgcgtccc

SEQ ID NO: 694634 - DNA, 25 bp, Homo sapien
gccgcgtagccgtggcttagtgcca

SEQ ID NO: 694635 - DNA, 25 bp, Homo sapien
gggctcgccgggtgggcggatgctc

SEQ ID NO: 694636 - DNA, 25 bp, Homo sapien
ccgggtgggcggatgctcatgtggg

SEQ ID NO: 694637 - DNA, 25 bp, Homo sapien
ccggctctgcgcgtcggtctggctt

SEQ ID NO: 694638 - DNA, 25 bp, Homo sapien
gctgccgctgcgatgaggctcccgg

SEQ ID NO: 694639 - DNA, 25 bp, Homo sapien
ctctccctcccagccgcgacgcgca

SEQ ID NO: 694640 - DNA, 25 bp, Homo sapien
tctccctcccagccgcgacgcgcag

SEQ ID NO: 694641 - DNA, 25 bp, Homo sapien
ggtcagggtcgtgggcgctctggtg

SEQ ID NO: 694642 - DNA, 25 bp, Homo sapien
cctagcgcaagagtccctggcgaca

SEQ ID NO: 694643 - DNA, 25 bp, Homo sapien
agccgcggcgcagcgtgtacccgga

SEQ ID NO: 694644 - DNA, 25 bp, Homo sapien
ggagcccgcacactccctgctcggg

SEQ ID NO: 694645 - DNA, 25 bp, Homo sapien
gggggagcattcaggtggccggagg

SEQ ID NO: 694646 - DNA, 25 bp, Homo sapien
gggagcattcaggtggccggaggag

SEQ ID NO: 694647 - DNA, 25 bp, Homo sapien
gggtgtcattgtggccacgggccgg

SEQ ID NO: 694648 - DNA, 25 bp, Homo sapien
agtgggtgtcattgtggccacgggc

SEQ ID NO: 694649 - DNA, 25 bp, Homo sapien
ccagaggctcagaacccgtgtttct

SEQ ID NO: 694650 - DNA, 25 bp, Homo sapien
cggcgttttcggtgcgacgctgcca

SEQ ID NO: 694651 - DNA, 25 bp, Homo sapien
cctcccggattctgcgcaggtggac

SEQ ID NO: 694652 - DNA, 25 bp, Homo sapien
cgggaccagccacgaattccgggct

SEQ ID NO: 694653 - DNA, 25 bp, Homo sapien
ctgtgctcggccgtgctccgtgaat

SEQ ID NO: 694654 - DNA, 25 bp, Homo sapien
tcagatgagatgtccagccccacgt

SEQ ID NO: 694655 - DNA, 25 bp, Homo sapien
tgggcttctagggtcttgactacgg

SEQ ID NO: 694656 - DNA, 25 bp, Homo sapien
tcattgaagacaggaggcatcccgc

SEQ ID NO: 694657 - DNA, 25 bp, Homo sapien
ccccgtggccatgacagatgccgca

SEQ ID NO: 694658 - DNA, 25 bp, Homo sapien
tgctcgctcactgcccggcatctcc

SEQ ID NO: 694659 - DNA, 25 bp, Homo sapien
gccgcagaggcgtcacatcctttct

SEQ ID NO: 694660 - DNA, 25 bp, Homo sapien
gcccggcatctccagtccagcttct

SEQ ID NO: 694661 - DNA, 25 bp, Homo sapien
ttccaggtgccctgagtggactgga

SEQ ID NO: 694662 - DNA, 25 bp, Homo sapien
gccctgagtggactggaggggcaca

SEQ ID NO: 694663 - DNA, 25 bp, Homo sapien
tgctgagcaccttatggggacatga

SEQ ID NO: 694664 - DNA, 25 bp, Homo sapien
tctttccaggtgccctgagtggact

SEQ ID NO: 694665 - DNA, 25 bp, Homo sapien
gcaggaggccgtccttcggggccac

SEQ ID NO: 694666 - DNA, 25 bp, Homo sapien
gccatgccccggctccacacagcgg

SEQ ID NO: 694667 - DNA, 25 bp, Homo sapien
actggagtgccccccgcagagacag

SEQ ID NO: 694668 - DNA, 25 bp, Homo sapien
caccactgtgaccatgagatgccca

SEQ ID NO: 694669 - DNA, 25 bp, Homo sapien
taggtaggcttctggtacgtgcttc

SEQ ID NO: 694670 - DNA, 25 bp, Homo sapien
tcagtaggtaggcttctggtacgtg

SEQ ID NO: 694671 - DNA, 25 bp, Homo sapien
taggcttctggtacgtgcttccaga

SEQ ID NO: 694672 - DNA, 25 bp, Homo sapien
gcttccagatcaccaaggcgtagct

SEQ ID NO: 694673 - DNA, 25 bp, Homo sapien
tgggttcccggatggttccagacga

SEQ ID NO: 694674 - DNA, 25 bp, Homo sapien
cgatgtgggtgcaggcggtaggtct

SEQ ID NO: 694675 - DNA, 25 bp, Homo sapien
gatgattccagatgatgtgggcgca

SEQ ID NO: 694676 - DNA, 25 bp, Homo sapien
ggtccagacgacgtgggtgcaggtg

SEQ ID NO: 694677 - DNA, 25 bp, Homo sapien
cattgctgtgcggtgcttgagtgcc

SEQ ID NO: 694678 - DNA, 25 bp, Homo sapien
tactcattcagacgcagagtgcgtg

SEQ ID NO: 694679 - DNA, 25 bp, Homo sapien
cctgccaggacagacgtcattgctg

SEQ ID NO: 694680 - DNA, 25 bp, Homo sapien
gcacaatcattgcaggccacagggc

SEQ ID NO: 694681 - DNA, 25 bp, Homo sapien
tgattccgtgccacggcgtcaggag

SEQ ID NO: 694682 - DNA, 25 bp, Homo sapien
cgtcaggagcggcatgtagcatctt

SEQ ID NO: 694683 - DNA, 25 bp, Homo sapien
gaaatccggaaacaagggacgcgca

SEQ ID NO: 694684 - DNA, 25 bp, Homo sapien
gagagtaaaattccgcaatcagaaa

SEQ ID NO: 694685 - DNA, 25 bp, Homo sapien
gaaagggctattggccatcgtgacg

SEQ ID NO: 694686 - DNA, 25 bp, Homo sapien
tcttctggccgcctctcctggccac

SEQ ID NO: 694687 - DNA, 25 bp, Homo sapien
tccttggagaaagggctattggcca

SEQ ID NO: 694688 - DNA, 25 bp, Homo sapien
caggcccacggttgcatctgctgtg

SEQ ID NO: 694689 - DNA, 25 bp, Homo sapien
ttgagccattcccctgctccgtcac

SEQ ID NO: 694690 - DNA, 25 bp, Homo sapien
cttgagccattcccctgctccgtca

SEQ ID NO: 694691 - DNA, 25 bp, Homo sapien
cagcgggatccaccatggaaagaca

SEQ ID NO: 694692 - DNA, 25 bp, Homo sapien
ggcatccagcgggatccaccatgga

SEQ ID NO: 694693 - DNA, 25 bp, Homo sapien
gtgttcacgggcatccagcgggatc

SEQ ID NO: 694694 - DNA, 25 bp, Homo sapien
agctggccccgtgttcacgggcatc

SEQ ID NO: 694695 - DNA, 25 bp, Homo sapien
ccagccagaacctcgagggcttctg

SEQ ID NO: 694696 - DNA, 25 bp, Homo sapien
gccagaacctcgagggcttctgtcc

SEQ ID NO: 694697 - DNA, 25 bp, Homo sapien
tgggcccagccagaacctcgagggc

SEQ ID NO: 694698 - DNA, 25 bp, Homo sapien
gcccagccagaacctcgagggcttc

SEQ ID NO: 694699 - DNA, 25 bp, Homo sapien
tcagcctcgatgtgggaagtctctc

SEQ ID NO: 694700 - DNA, 25 bp, Homo sapien
tgagcttggccgaaaagggacaaac

SEQ ID NO: 694701 - DNA, 25 bp, Homo sapien
tgtcacctacgtgggtaaaacgcca

SEQ ID NO: 694702 - DNA, 25 bp, Homo sapien
taggcgattccacctacggcgtgag

SEQ ID NO: 694703 - DNA, 25 bp, Homo sapien
ttcaataggatcagtagcagtgttc

SEQ ID NO: 694704 - DNA, 25 bp, Homo sapien
tttttcatgggcattcttgctaaac

SEQ ID NO: 694705 - DNA, 25 bp, Homo sapien
ataggatcagtagcagtgttctctc

SEQ ID NO: 694706 - DNA, 25 bp, Homo sapien
tttaatttcaataggatcagtagca

SEQ ID NO: 694707 - DNA, 25 bp, Homo sapien
tctgtaccctacaggctctgcctgg

SEQ ID NO: 694708 - DNA, 25 bp, Homo sapien
ggaatgctcctgagaaaacgctggc

SEQ ID NO: 694709 - DNA, 25 bp, Homo sapien
gttggtctagcactgaccgtgtgga

SEQ ID NO: 694710 - DNA, 25 bp, Homo sapien
tgtggacccacgtgcttctgtctgg

SEQ ID NO: 694711 - DNA, 25 bp, Homo sapien
tgctccaaaggactggcgatttagc

SEQ ID NO: 694712 - DNA, 25 bp, Homo sapien
tgttttaaattagtctaactgctcc

SEQ ID NO: 694713 - DNA, 25 bp, Homo sapien
tgctcctttatgtagaggacactgt

SEQ ID NO: 694714 - DNA, 25 bp, Homo sapien
caaaggactggcgatttagcagttg

SEQ ID NO: 694715 - DNA, 25 bp, Homo sapien
gacgccatgcacgtgagtgtgcatg

SEQ ID NO: 694716 - DNA, 25 bp, Homo sapien
tgccgacgccatgcacgtgagtgtg

SEQ ID NO: 694717 - DNA, 25 bp, Homo sapien
acagaagtgggggcacctctgcagc

SEQ ID NO: 694718 - DNA, 25 bp, Homo sapien
tcctgccgacgccatgcacgtgagt

SEQ ID NO: 694719 - DNA, 25 bp, Homo sapien
tgagcctggtgtgccgggcgggcag

SEQ ID NO: 694720 - DNA, 25 bp, Homo sapien
tttgagcctggtgtgccgggcgggc

SEQ ID NO: 694721 - DNA, 25 bp, Homo sapien
ttcattgaacctggccccttgcttg

SEQ ID NO: 694722 - DNA, 25 bp, Homo sapien
gggagttgtgaaggcctgatttgat

SEQ ID NO: 694723 - DNA, 25 bp, Homo sapien
caggctgggacccttgcccactccc

SEQ ID NO: 694724 - DNA, 25 bp, Homo sapien
tagaaacctctcaacggaacgtcga

SEQ ID NO: 694725 - DNA, 25 bp, Homo sapien
ctggacgcacatccgcccgccgctg

SEQ ID NO: 694726 - DNA, 25 bp, Homo sapien
ggctgctgagttcaaggatgcccct

SEQ ID NO: 694727 - DNA, 25 bp, Homo sapien
ggcgtcaccctctttttagcctcag

SEQ ID NO: 694728 - DNA, 25 bp, Homo sapien
tagagaatgcggacagagctgcttg

SEQ ID NO: 694729 - DNA, 25 bp, Homo sapien
ggcatcccatccatagcctcaaggt

SEQ ID NO: 694730 - DNA, 25 bp, Homo sapien
aggtaccattgatacacacacaggg

SEQ ID NO: 694731 - DNA, 25 bp, Homo sapien
tgtgcctgtcttggccgggcccacg

SEQ ID NO: 694732 - DNA, 25 bp, Homo sapien
tggccgggcccacggctctcaatgt

SEQ ID NO: 694733 - DNA, 25 bp, Homo sapien
cggctctcaatgtggtggccgccat

SEQ ID NO: 694734 - DNA, 25 bp, Homo sapien
tcagaggttcgccaggcctgtgcct

SEQ ID NO: 694735 - DNA, 25 bp, Homo sapien
tcttctgtctggcacgcatgacctt

SEQ ID NO: 694736 - DNA, 25 bp, Homo sapien
cacactccaggatgtttgtcatggg

SEQ ID NO: 694737 - DNA, 25 bp, Homo sapien
cgtggtcaccaaaagaggacagagg

SEQ ID NO: 694738 - DNA, 25 bp, Homo sapien
tgcctcttgcagatgctggtctctt

SEQ ID NO: 694739 - DNA, 25 bp, Homo sapien
agcacatgcccgctgtgtcctgctg

SEQ ID NO: 694740 - DNA, 25 bp, Homo sapien
agtgtccactgcacgtcgctcgctg

SEQ ID NO: 694741 - DNA, 25 bp, Homo sapien
caggaaagcacatgcccgctgtgtc

SEQ ID NO: 694742 - DNA, 25 bp, Homo sapien
tgctcacacaggaaagcacatgccc

SEQ ID NO: 694743 - DNA, 25 bp, Homo sapien
atcagcctcgtaaaaagagcctcag

SEQ ID NO: 694744 - DNA, 25 bp, Homo sapien
cgaggtgatgggtctggtgggctct

SEQ ID NO: 694745 - DNA, 25 bp, Homo sapien
gggaagccaaattatctaagaccac

SEQ ID NO: 694746 - DNA, 25 bp, Homo sapien
ttgtctcggtccagggacagccaga

SEQ ID NO: 694747 - DNA, 25 bp, Homo sapien
gatgtgcatctacagacagacccag

SEQ ID NO: 694748 - DNA, 25 bp, Homo sapien
ttcatcacacatccgcgtgcgtggg

SEQ ID NO: 694749 - DNA, 25 bp, Homo sapien
tctaagtgactatgaatcagaggcc

SEQ ID NO: 694750 - DNA, 25 bp, Homo sapien
cttcatccgtgctgtcaagggcgac

SEQ ID NO: 694751 - DNA, 25 bp, Homo sapien
tagaagaaaccttgttgtaaggatc

SEQ ID NO: 694752 - DNA, 25 bp, Homo sapien
gaagtcactgtatttacttgaagtt

SEQ ID NO: 694753 - DNA, 25 bp, Homo sapien
cactgtatttacttgaagtttgcac

SEQ ID NO: 694754 - DNA, 25 bp, Homo sapien
aaggatcgtcagggaggaagtcact

SEQ ID NO: 694755 - DNA, 25 bp, Homo sapien
tctgaagtcctctcccgcaatgcga

SEQ ID NO: 694756 - DNA, 25 bp, Homo sapien
caaagtagaccgtggctatggccgg

SEQ ID NO: 694757 - DNA, 25 bp, Homo sapien
tcccgcaatgcgacgtattagccca

SEQ ID NO: 694758 - DNA, 25 bp, Homo sapien
gtattagcccaaagtagaccgtggc

SEQ ID NO: 694759 - DNA, 25 bp, Homo sapien
ctgccttctctcagggagtacagat

SEQ ID NO: 694760 - DNA, 25 bp, Homo sapien
ccttctctcagggagtacagatgct

SEQ ID NO: 694761 - DNA, 25 bp, Homo sapien
tgtcaaatgcactcacggctgcgtg

SEQ ID NO: 694762 - DNA, 25 bp, Homo sapien
gttcacaaactcatcgtggagggtg

SEQ ID NO: 694763 - DNA, 25 bp, Homo sapien
gccaagcgtgacttcttgtcaaggg

SEQ ID NO: 694764 - DNA, 25 bp, Homo sapien
tcaggcaccccacgcgtgttgacag

SEQ ID NO: 694765 - DNA, 25 bp, Homo sapien
gaaggtttcaagcagctgccctcag

SEQ ID NO: 694766 - DNA, 25 bp, Homo sapien
ttgtcaagggcatcgttaaaggaga

SEQ ID NO: 694767 - DNA, 25 bp, Homo sapien
tgccatgggatcccggcactgcagc

SEQ ID NO: 694768 - DNA, 25 bp, Homo sapien
ccactgccatgggatcccggcactg

SEQ ID NO: 694769 - DNA, 25 bp, Homo sapien
ccatgggatcccggcactgcagcct

SEQ ID NO: 694770 - DNA, 25 bp, Homo sapien
actgccatgggatcccggcactgca

SEQ ID NO: 694771 - DNA, 25 bp, Homo sapien
caggtcccaagcagctcaggactag

SEQ ID NO: 694772 - DNA, 25 bp, Homo sapien
tctgttggcaaaagaggaacctgct

SEQ ID NO: 694773 - DNA, 25 bp, Homo sapien
ctggcactgagaccaccagtcccag

SEQ ID NO: 694774 - DNA, 25 bp, Homo sapien
gcttctgggtcctcccgggaagtca

SEQ ID NO: 694775 - DNA, 25 bp, Homo sapien
tttctacagcatctaatgagcctgg

SEQ ID NO: 694776 - DNA, 25 bp, Homo sapien
taacgtgctcatagaaggaggtgct

SEQ ID NO: 694777 - DNA, 25 bp, Homo sapien
tacaggcgcatctcttactaacgtg

SEQ ID NO: 694778 - DNA, 25 bp, Homo sapien
taatcaaggccagggtgccgttcag

SEQ ID NO: 694779 - DNA, 25 bp, Homo sapien
gagagagagccttgagatggactca

SEQ ID NO: 694780 - DNA, 25 bp, Homo sapien
ggacatccagactttgtcacagctg

SEQ ID NO: 694781 - DNA, 25 bp, Homo sapien
ggcacacactatccaagaggagaga

SEQ ID NO: 694782 - DNA, 25 bp, Homo sapien
cagcctcctagtggcttcaccaggg

SEQ ID NO: 694783 - DNA, 25 bp, Homo sapien
ctggagatgtcccaagagcctaagg

SEQ ID NO: 694784 - DNA, 25 bp, Homo sapien
tcagtgccatatcagcctggtgatg

SEQ ID NO: 694785 - DNA, 25 bp, Homo sapien
catcaccatggaccctgcagagtgg

SEQ ID NO: 694786 - DNA, 25 bp, Homo sapien
aagacatagtggctaccctgggaga

SEQ ID NO: 694787 - DNA, 25 bp, Homo sapien
tgcacacctgtacccagactgagga

SEQ ID NO: 694788 - DNA, 25 bp, Homo sapien
acctggtattctgaggccccgtcaa

SEQ ID NO: 694789 - DNA, 25 bp, Homo sapien
tacgttagcccagcttggacgagcc

SEQ ID NO: 694790 - DNA, 25 bp, Homo sapien
gatgagaacatcacggcagaagccg

SEQ ID NO: 694791 - DNA, 25 bp, Homo sapien
taacagttcagaggaagtgacacgc

SEQ ID NO: 694792 - DNA, 25 bp, Homo sapien
tctgctctctaggacggtaaggatc

SEQ ID NO: 694793 - DNA, 25 bp, Homo sapien
caggtggtagtgagctcaacggtcc

SEQ ID NO: 694794 - DNA, 25 bp, Homo sapien
ggtaaggatcctctacaagggcacg

SEQ ID NO: 694795 - DNA, 25 bp, Homo sapien
gaaccagacctaaagcaccttccag

SEQ ID NO: 694796 - DNA, 25 bp, Homo sapien
aaacaacaaagaatgcccgaccctg

SEQ ID NO: 694797 - DNA, 25 bp, Homo sapien
cacgatgaaatttacaaccagcagc

SEQ ID NO: 694798 - DNA, 25 bp, Homo sapien
aattagcactttagaccgataacag

SEQ ID NO: 694799 - DNA, 25 bp, Homo sapien
atttcacattagatcagtctgattg

SEQ ID NO: 694800 - DNA, 25 bp, Homo sapien
tttcacattagatcagtctgattga

SEQ ID NO: 694801 - DNA, 25 bp, Homo sapien
ggcaaaaatcaacgacaagaaaggc

SEQ ID NO: 694802 - DNA, 25 bp, Homo sapien
caaataaatgcagatccatctgggc

SEQ ID NO: 694803 - DNA, 25 bp, Homo sapien
aacgttagaacatgtaagaaactgg

SEQ ID NO: 694804 - DNA, 25 bp, Homo sapien
gaccaagcacacgtgttttaaactg

SEQ ID NO: 694805 - DNA, 25 bp, Homo sapien
tcattgtttgtttcgactctgccgt

SEQ ID NO: 694806 - DNA, 25 bp, Homo sapien
attgtttgtttcgactctgccgttc

SEQ ID NO: 694807 - DNA, 25 bp, Homo sapien
cattgtttgtttcgactctgccgtt

SEQ ID NO: 694808 - DNA, 25 bp, Homo sapien
gaggtactgctgttcctaaaaagca

SEQ ID NO: 694809 - DNA, 25 bp, Homo sapien
tcaatctcttaacaaaagaggtact

SEQ ID NO: 694810 - DNA, 25 bp, Homo sapien
gctgatgttaaagccactcacaggt

SEQ ID NO: 694811 - DNA, 25 bp, Homo sapien
tctcttgagttcaaatagctgatgt

SEQ ID NO: 694812 - DNA, 25 bp, Homo sapien
cacctggtctaagtacggcaccaag

SEQ ID NO: 694813 - DNA, 25 bp, Homo sapien
ccaaggacacatctgcatggcagtt

SEQ ID NO: 694814 - DNA, 25 bp, Homo sapien
ctgcatggcagttgcctgcaacacc

SEQ ID NO: 694815 - DNA, 25 bp, Homo sapien
ggcaccaaggacacatctgcatggc

SEQ ID NO: 694816 - DNA, 25 bp, Homo sapien
gatactgcggttgagccaaagctgg

SEQ ID NO: 694817 - DNA, 25 bp, Homo sapien
taatggagcggtggatgtcgtcctc

SEQ ID NO: 694818 - DNA, 25 bp, Homo sapien
caggagagttgctatcgctgccagc

SEQ ID NO: 694819 - DNA, 25 bp, Homo sapien
ttgatgatgaacacacgcccgcttt

SEQ ID NO: 694820 - DNA, 25 bp, Homo sapien
ggcagcccaccccccatgacaggcc

SEQ ID NO: 694821 - DNA, 25 bp, Homo sapien
gggcagcccaccccccatgacaggc

SEQ ID NO: 694822 - DNA, 25 bp, Homo sapien
cagcccaccccccatgacaggcccg

SEQ ID NO: 694823 - DNA, 25 bp, Homo sapien
ggggcagcccaccccccatgacagg

SEQ ID NO: 694824 - DNA, 25 bp, Homo sapien
aggagctgacgtccccaatcttcag

SEQ ID NO: 694825 - DNA, 25 bp, Homo sapien
agcccaccgtcttgacggcggagga

SEQ ID NO: 694826 - DNA, 25 bp, Homo sapien
caccgttgccagaaaggacaccagt

SEQ ID NO: 694827 - DNA, 25 bp, Homo sapien
cacgaggtcggctttgaaactggca

SEQ ID NO: 694828 - DNA, 25 bp, Homo sapien
gaatcggagggtcccctgcagtaga

SEQ ID NO: 694829 - DNA, 25 bp, Homo sapien
gctgatagatgttgttccccaggcc

SEQ ID NO: 694830 - DNA, 25 bp, Homo sapien
aaaatgatggtctccgttactgagc

SEQ ID NO: 694831 - DNA, 25 bp, Homo sapien
ccatgctgagaacgcagggttttca

SEQ ID NO: 694832 - DNA, 25 bp, Homo sapien
tccatttttacctcaatctcactga

SEQ ID NO: 694833 - DNA, 25 bp, Homo sapien
catttttacctcaatctcactgaca

SEQ ID NO: 694834 - DNA, 25 bp, Homo sapien
tctgtgggccggatttccattttta

SEQ ID NO: 694835 - DNA, 25 bp, Homo sapien
tttttacctcaatctcactgacagc

SEQ ID NO: 694836 - DNA, 25 bp, Homo sapien
ctaccaggatgacctgttcttcagg

SEQ ID NO: 694837 - DNA, 25 bp, Homo sapien
aggcctaccaggatgacctgttctt

SEQ ID NO: 694838 - DNA, 25 bp, Homo sapien
ggactgggaacaggcctaccaggat

SEQ ID NO: 694839 - DNA, 25 bp, Homo sapien
aggactgggaacaggcctaccagga

SEQ ID NO: 694840 - DNA, 25 bp, Homo sapien
ggcctacacagggtctggatcttcc

SEQ ID NO: 694841 - DNA, 25 bp, Homo sapien
ttccgcccaggtgagggagagaccc

SEQ ID NO: 694842 - DNA, 25 bp, Homo sapien
gagtcatgactgcacttccgcccag

SEQ ID NO: 694843 - DNA, 25 bp, Homo sapien
tacacagggtctggatcttccacct

SEQ ID NO: 694844 - DNA, 25 bp, Homo sapien
tgaggagctcacagaggtgcagccc

SEQ ID NO: 694845 - DNA, 25 bp, Homo sapien
tcatgaactgtatccttctgatgta

SEQ ID NO: 694846 - DNA, 25 bp, Homo sapien
cattgtcatgaactgtatccttctg

SEQ ID NO: 694847 - DNA, 25 bp, Homo sapien
gtcattgtcatgaactgtatccttc

SEQ ID NO: 694848 - DNA, 25 bp, Homo sapien
tgtcatgaactgtatccttctgatg

SEQ ID NO: 694849 - DNA, 25 bp, Homo sapien
gcccctctcctagagcagcccctgc

SEQ ID NO: 694850 - DNA, 25 bp, Homo sapien
ggcggaaaaaggcaagtcgctcaac

SEQ ID NO: 694851 - DNA, 25 bp, Homo sapien
aaaaaggcaagtcgctcaacccctg

SEQ ID NO: 694852 - DNA, 25 bp, Homo sapien
aaggcaagtcgctcaacccctgcgg

SEQ ID NO: 694853 - DNA, 25 bp, Homo sapien
ctttattatcttgtccttttgttct

SEQ ID NO: 694854 - DNA, 25 bp, Homo sapien
gggtgtccacgctggtggccgacat

SEQ ID NO: 694855 - DNA, 25 bp, Homo sapien
ctgggtgtccacgctggtggccgac

SEQ ID NO: 694856 - DNA, 25 bp, Homo sapien
tgggtgtccacgctggtggccgaca

SEQ ID NO: 694857 - DNA, 25 bp, Homo sapien
gacgcactgaggaggcgtcgactcc

SEQ ID NO: 694858 - DNA, 25 bp, Homo sapien
gggcctgtcaccctagctcgcgcgg

SEQ ID NO: 694859 - DNA, 25 bp, Homo sapien
catgaacaactagacgcggggccgg

SEQ ID NO: 694860 - DNA, 25 bp, Homo sapien
gtgagcccgggacgcggacgcactg

SEQ ID NO: 694861 - DNA, 25 bp, Homo sapien
agccctggcacctgccctgtccttg

SEQ ID NO: 694862 - DNA, 25 bp, Homo sapien
ccctggcacctgccctgtccttggc

SEQ ID NO: 694863 - DNA, 25 bp, Homo sapien
tggcacctgccctgtccttggccct

SEQ ID NO: 694864 - DNA, 25 bp, Homo sapien
gtccttggccctgctccatcggcat

SEQ ID NO: 694865 - DNA, 25 bp, Homo sapien
cagagggagctctgaatcaggagtt

SEQ ID NO: 694866 - DNA, 25 bp, Homo sapien
cctgctttatgtccagcagagggag

SEQ ID NO: 694867 - DNA, 25 bp, Homo sapien
gcattctgtaacttgtggcctgctg

SEQ ID NO: 694868 - DNA, 25 bp, Homo sapien
caggagttaggtccttggtgtgcac

SEQ ID NO: 694869 - DNA, 25 bp, Homo sapien
ggagacatcggcatcagttagtaca

SEQ ID NO: 694870 - DNA, 25 bp, Homo sapien
catggcctgaggtacagtcttatta

SEQ ID NO: 694871 - DNA, 25 bp, Homo sapien
cctaataccggtggccatggcctga

SEQ ID NO: 694872 - DNA, 25 bp, Homo sapien
ttgagcacatgtgtcccggtggttg

SEQ ID NO: 694873 - DNA, 25 bp, Homo sapien
aatgttaacgctggtcagtcgttcc

SEQ ID NO: 694874 - DNA, 25 bp, Homo sapien
ggctcacatatggtgcccgggcgta

SEQ ID NO: 694875 - DNA, 25 bp, Homo sapien
agggtctcacgaggcctgtctggcc

SEQ ID NO: 694876 - DNA, 25 bp, Homo sapien
cagatttccttgagtaccgttggcc

SEQ ID NO: 694877 - DNA, 25 bp, Homo sapien
tacaaactctcttgacgctgcagcc

SEQ ID NO: 694878 - DNA, 25 bp, Homo sapien
tcgggcctcacattgacttcctggg

SEQ ID NO: 694879 - DNA, 25 bp, Homo sapien
cattgtcactggtcggtcgctgagg

SEQ ID NO: 694880 - DNA, 25 bp, Homo sapien
tccagtacttagaacccagggcagg

SEQ ID NO: 694881 - DNA, 25 bp, Homo sapien
tctctgtgccggcaggtcagcgtct

SEQ ID NO: 694882 - DNA, 25 bp, Homo sapien
ggaacaaagtccaagcagtggacgg

SEQ ID NO: 694883 - DNA, 25 bp, Homo sapien
cttcaggcctttggcagaaaggaga

SEQ ID NO: 694884 - DNA, 25 bp, Homo sapien
agcgtcttgtgcctgtttgctgaca

SEQ ID NO: 694885 - DNA, 25 bp, Homo sapien
tgtggacactgcctttcaagaaaca

SEQ ID NO: 694886 - DNA, 25 bp, Homo sapien
gaaacaagtctggttctgccagata

SEQ ID NO: 694887 - DNA, 25 bp, Homo sapien
ggctcagggtctgcgtgtgacccca

SEQ ID NO: 694888 - DNA, 25 bp, Homo sapien
tattctgagccccaaactaggattg

SEQ ID NO: 694889 - DNA, 25 bp, Homo sapien
aagtacacctgcttggacaagagac

SEQ ID NO: 694890 - DNA, 25 bp, Homo sapien
agtacacctgcttggacaagagact

SEQ ID NO: 694891 - DNA, 25 bp, Homo sapien
gtagagaggaaatggatcaaatcca

SEQ ID NO: 694892 - DNA, 25 bp, Homo sapien
gaggaaatggatcaaatccaccaat

SEQ ID NO: 694893 - DNA, 25 bp, Homo sapien
gtgggacagcccggatcttcagcct

SEQ ID NO: 694894 - DNA, 25 bp, Homo sapien
gggacagcccggatcttcagcctgt

SEQ ID NO: 694895 - DNA, 25 bp, Homo sapien
gtcctcggcctgtgcggggacggca

SEQ ID NO: 694896 - DNA, 25 bp, Homo sapien
cggggacggcatcgggggacagtgg

SEQ ID NO: 694897 - DNA, 25 bp, Homo sapien
ggcctacggccgtgagcaaggccct

SEQ ID NO: 694898 - DNA, 25 bp, Homo sapien
cccagacgggacagactcagagctg

SEQ ID NO: 694899 - DNA, 25 bp, Homo sapien
tcttccctggtgtgtggcgagtcct

SEQ ID NO: 694900 - DNA, 25 bp, Homo sapien
gggaggtctctcgccttgccccaga

SEQ ID NO: 694901 - DNA, 25 bp, Homo sapien
tcctcttcctccgtaaacacgctga

SEQ ID NO: 694902 - DNA, 25 bp, Homo sapien
tccgtaaacacgctgaccacctggc

SEQ ID NO: 694903 - DNA, 25 bp, Homo sapien
gtaaacacgctgaccacctggcagc

SEQ ID NO: 694904 - DNA, 25 bp, Homo sapien
tcttcctccgtaaacacgctgacca

SEQ ID NO: 694905 - DNA, 25 bp, Homo sapien
cctctgtggagcaagccatctggga

SEQ ID NO: 694906 - DNA, 25 bp, Homo sapien
tctgtggagcaagccatctgggatt

SEQ ID NO: 694907 - DNA, 25 bp, Homo sapien
ctctgtggagcaagccatctgggat

SEQ ID NO: 694908 - DNA, 25 bp, Homo sapien
accagccgtgctgcagtcacattgg

SEQ ID NO: 694909 - DNA, 25 bp, Homo sapien
gtcagaagttcctccagcgacggca

SEQ ID NO: 694910 - DNA, 25 bp, Homo sapien
agccagggagcctcgagatcggtca

SEQ ID NO: 694911 - DNA, 25 bp, Homo sapien
gtgtgttgcgtcgacaccaccgtgc

SEQ ID NO: 694912 - DNA, 25 bp, Homo sapien
atacgccagggttcccgacaaggct

SEQ ID NO: 694913 - DNA, 25 bp, Homo sapien
gcgccagccttgccagatgcatacg

SEQ ID NO: 694914 - DNA, 25 bp, Homo sapien
ctgggtcacgtggcgccagccttgc

SEQ ID NO: 694915 - DNA, 25 bp, Homo sapien
cttgccagatgcatacgccagggtt

SEQ ID NO: 694916 - DNA, 25 bp, Homo sapien
tgctggcacctcctcatgcagacag

SEQ ID NO: 694917 - DNA, 25 bp, Homo sapien
gagcgatgccgggagaggctgaagg

SEQ ID NO: 694918 - DNA, 25 bp, Homo sapien
ggctgaaggtcagtagctcgctgtc

SEQ ID NO: 694919 - DNA, 25 bp, Homo sapien
agcgctcacgccaccaggagcgatg

SEQ ID NO: 694920 - DNA, 25 bp, Homo sapien
agcagggccggttagcaccaggagg

SEQ ID NO: 694921 - DNA, 25 bp, Homo sapien
agaactcgctctcaggggcaccggg

SEQ ID NO: 694922 - DNA, 25 bp, Homo sapien
ttcctcgtgtcgctggccaaagctg

SEQ ID NO: 694923 - DNA, 25 bp, Homo sapien
gccaaagctgccatgtgacgtgtgt

SEQ ID NO: 694924 - DNA, 25 bp, Homo sapien
cgtgtgtctgcctcgggacagtctt

SEQ ID NO: 694925 - DNA, 25 bp, Homo sapien
gctgggacaaaggaccccacgtggc

SEQ ID NO: 694926 - DNA, 25 bp, Homo sapien
gagggtggtgtccattcacctgcag

SEQ ID NO: 694927 - DNA, 25 bp, Homo sapien
caggagggtggtgtccattcacctg

SEQ ID NO: 694928 - DNA, 25 bp, Homo sapien
tggagggttggtcgggctgggacaa

SEQ ID NO: 694929 - DNA, 25 bp, Homo sapien
acttccaggtagaagcagatgatga

SEQ ID NO: 694930 - DNA, 25 bp, Homo sapien
ccaccgacttccaggtagaagcaga

SEQ ID NO: 694931 - DNA, 25 bp, Homo sapien
ctttaagaggccaccgacttccagg

SEQ ID NO: 694932 - DNA, 25 bp, Homo sapien
aagaggccaccgacttccaggtaga

SEQ ID NO: 694933 - DNA, 25 bp, Homo sapien
tcctgagtctggcggcccccagatg

SEQ ID NO: 694934 - DNA, 25 bp, Homo sapien
tgcttgcatccagcccccgggggaa

SEQ ID NO: 694935 - DNA, 25 bp, Homo sapien
caccctgggacacgtctcagagctt

SEQ ID NO: 694936 - DNA, 25 bp, Homo sapien
gaaggggtcccatgatcgcatagga

SEQ ID NO: 694937 - DNA, 25 bp, Homo sapien
tgggacagccagctcaagggagccc

SEQ ID NO: 694938 - DNA, 25 bp, Homo sapien
cctggctgagctgccgtgacctgtc

SEQ ID NO: 694939 - DNA, 25 bp, Homo sapien
gacattacacgtggacagcacaggc

SEQ ID NO: 694940 - DNA, 25 bp, Homo sapien
gtcggcgtacggacacagcatccct

SEQ ID NO: 694941 - DNA, 25 bp, Homo sapien
agaagccacccccaagagagcaccc

SEQ ID NO: 694942 - DNA, 25 bp, Homo sapien
cacccccaagagagcaccccaaaga

SEQ ID NO: 694943 - DNA, 25 bp, Homo sapien
ccagaagccacccccaagagagcac

SEQ ID NO: 694944 - DNA, 25 bp, Homo sapien
ccaagagagcaccccaaagagctgc

SEQ ID NO: 694945 - DNA, 25 bp, Homo sapien
ccgaagagtcccaggatgacgatga

SEQ ID NO: 694946 - DNA, 25 bp, Homo sapien
cgcagccggtactggatggtgccga

SEQ ID NO: 694947 - DNA, 25 bp, Homo sapien
gacatagcgcagccggtactggatg

SEQ ID NO: 694948 - DNA, 25 bp, Homo sapien
gccgaagagtcccaggatgacgatg

SEQ ID NO: 694949 - DNA, 25 bp, Homo sapien
gccatgaccaggacgctaactgcag

SEQ ID NO: 694950 - DNA, 25 bp, Homo sapien
ttcacaagagtactggacgccgagg

SEQ ID NO: 694951 - DNA, 25 bp, Homo sapien
ggctgctctaaatcacgaactgtgg

SEQ ID NO: 694952 - DNA, 25 bp, Homo sapien
ggtgagcgttcctcccttgagtagg

SEQ ID NO: 694953 - DNA, 25 bp, Homo sapien
gaaagcgccggaagctccttccttc

SEQ ID NO: 694954 - DNA, 25 bp, Homo sapien
gaaagataccaactgttccaaggcc

SEQ ID NO: 694955 - DNA, 25 bp, Homo sapien
aggaaggacacgatgcctccgccgt

SEQ ID NO: 694956 - DNA, 25 bp, Homo sapien
caggacctcaggttatctccgcggc

SEQ ID NO: 694957 - DNA, 25 bp, Homo sapien
tagcagcccggggtccgaggcatcc

SEQ ID NO: 694958 - DNA, 25 bp, Homo sapien
cagccgccgtgggtcgggcaccggg

SEQ ID NO: 694959 - DNA, 25 bp, Homo sapien
agctggcgcgggacccagcgaacgg

SEQ ID NO: 694960 - DNA, 25 bp, Homo sapien
gcgacgccaccttcggccgtagcag

SEQ ID NO: 694961 - DNA, 25 bp, Homo sapien
tgaaaagcgcagaggacgacgagcg

SEQ ID NO: 694962 - DNA, 25 bp, Homo sapien
ctgaaaagcgcagaggacgacgagc

SEQ ID NO: 694963 - DNA, 25 bp, Homo sapien
agctgaaaagcgcagaggacgacga

SEQ ID NO: 694964 - DNA, 25 bp, Homo sapien
cagctgaaaagcgcagaggacgacg

SEQ ID NO: 694965 - DNA, 25 bp, Homo sapien
tgcccgcctatacaggaggcccccg

SEQ ID NO: 694966 - DNA, 25 bp, Homo sapien
ggtgcccgcctatacaggaggcccc

SEQ ID NO: 694967 - DNA, 25 bp, Homo sapien
gcctatacaggaggcccccgggtgc

SEQ ID NO: 694968 - DNA, 25 bp, Homo sapien
cgcctatacaggaggcccccgggtg

SEQ ID NO: 694969 - DNA, 25 bp, Homo sapien
gattcgcaaaggtgccacgtaagca

SEQ ID NO: 694970 - DNA, 25 bp, Homo sapien
tgccacgtaagcagaggaaggcccg

SEQ ID NO: 694971 - DNA, 25 bp, Homo sapien
ccacgtaagcagaggagccgggtaa

SEQ ID NO: 694972 - DNA, 25 bp, Homo sapien
ctagaaggtgattcgcaaaggtgcc

SEQ ID NO: 694973 - DNA, 25 bp, Homo sapien
tcgtgaacgttagagcagcctccag

SEQ ID NO: 694974 - DNA, 25 bp, Homo sapien
tccagaggcgggttcggtctgcaca

SEQ ID NO: 694975 - DNA, 25 bp, Homo sapien
tgccctggtgcacactgacggcagc

SEQ ID NO: 694976 - DNA, 25 bp, Homo sapien
caggcgcagtgttgcctcgtgaacg

SEQ ID NO: 694977 - DNA, 25 bp, Homo sapien
gctggccgtagagacatggcctccg

SEQ ID NO: 694978 - DNA, 25 bp, Homo sapien
gggacgcatcaaccacgtcctcggg

SEQ ID NO: 694979 - DNA, 25 bp, Homo sapien
tctccctggtactataagccctcgg

SEQ ID NO: 694980 - DNA, 25 bp, Homo sapien
gtgtggccgtcagactctccctggt

SEQ ID NO: 694981 - DNA, 25 bp, Homo sapien
cactcggtcaccagtgttggtaccg

SEQ ID NO: 694982 - DNA, 25 bp, Homo sapien
tgttggtaccgctctggctgtcggc

SEQ ID NO: 694983 - DNA, 25 bp, Homo sapien
ggtcaccagtgttggtaccgctctg

SEQ ID NO: 694984 - DNA, 25 bp, Homo sapien
cgctctggctgtcggcaactggctg

SEQ ID NO: 694985 - DNA, 25 bp, Homo sapien
ggtggtggaagatgatcaacaggag

SEQ ID NO: 694986 - DNA, 25 bp, Homo sapien
accgtcgtgggcagccccgcactaa

SEQ ID NO: 694987 - DNA, 25 bp, Homo sapien
agttcttctggacgccacgcacagg

SEQ ID NO: 694988 - DNA, 25 bp, Homo sapien
caggtggagtcccaccatgcagcag

SEQ ID NO: 694989 - DNA, 25 bp, Homo sapien
tcacaggtgacctggactcctgcct

SEQ ID NO: 694990 - DNA, 25 bp, Homo sapien
ttccacagatggatgacctgagtct

SEQ ID NO: 694991 - DNA, 25 bp, Homo sapien
gaaattggagaccttgttccacaga

SEQ ID NO: 694992 - DNA, 25 bp, Homo sapien
gaaaggcagtgctttgctgcaggtc

SEQ ID NO: 694993 - DNA, 25 bp, Homo sapien
tttgtaccttcctagtgcagactca

SEQ ID NO: 694994 - DNA, 25 bp, Homo sapien
tccatcatttcgaaagtcacccaga

SEQ ID NO: 694995 - DNA, 25 bp, Homo sapien
tacgtggaatgcacagaaaagtaca

SEQ ID NO: 694996 - DNA, 25 bp, Homo sapien
tcccacaggtgatcgctttttcagc

SEQ ID NO: 694997 - DNA, 25 bp, Homo sapien
ctcagcttggttccgcggatgaacg

SEQ ID NO: 694998 - DNA, 25 bp, Homo sapien
ccactacgaccagctgcggtccggg

SEQ ID NO: 694999 - DNA, 25 bp, Homo sapien
gcggatgaacggacgcttctcccgc

SEQ ID NO: 695000 - DNA, 25 bp, Homo sapien
gttccgcggatgaacggacgcttct

SEQ ID NO: 695001 - DNA, 25 bp, Homo sapien
gctggtttgcgctgtgttgggagca

SEQ ID NO: 695002 - DNA, 25 bp, Homo sapien
tgagatactctgctcagcgccgggt

SEQ ID NO: 695003 - DNA, 25 bp, Homo sapien
tagagggtgcgtttctgttgtgccc

SEQ ID NO: 695004 - DNA, 25 bp, Homo sapien
agagcaggttacgctggtcgtgacc

SEQ ID NO: 695005 - DNA, 25 bp, Homo sapien
gtttccacgccagcaccttgacttg

SEQ ID NO: 695006 - DNA, 25 bp, Homo sapien
tgtggtgttccacatgtgcctgttt

SEQ ID NO: 695007 - DNA, 25 bp, Homo sapien
cccgtccacggagggtgatggcctt

SEQ ID NO: 695008 - DNA, 25 bp, Homo sapien
ccttttgatgggaagtgcagtcagc

SEQ ID NO: 695009 - DNA, 25 bp, Homo sapien
tgacgccagaattataggtataaag

SEQ ID NO: 695010 - DNA, 25 bp, Homo sapien
ccaactaggaatatgatgtgtataa

SEQ ID NO: 695011 - DNA, 25 bp, Homo sapien
aggcaaggagggatatcggtaacat

SEQ ID NO: 695012 - DNA, 25 bp, Homo sapien
ggaaaaccaactaggaatatgatgt

SEQ ID NO: 695013 - DNA, 25 bp, Homo sapien
tacaagggagcctgagtgacaactc

SEQ ID NO: 695014 - DNA, 25 bp, Homo sapien
gaggccagccattgagagattacca

SEQ ID NO: 695015 - DNA, 25 bp, Homo sapien
tttagaaatccgaagccgcctctgc

SEQ ID NO: 695016 - DNA, 25 bp, Homo sapien
gagattaccacgcttcctgagagga

SEQ ID NO: 695017 - DNA, 25 bp, Homo sapien
tgagccggagaggtcaatccacggt

SEQ ID NO: 695018 - DNA, 25 bp, Homo sapien
aatccacggtgcttaagtcagagcc

SEQ ID NO: 695019 - DNA, 25 bp, Homo sapien
aaaggctccaactgcaggattctga

SEQ ID NO: 695020 - DNA, 25 bp, Homo sapien
aacagacagcaaggagctacggaca

SEQ ID NO: 695021 - DNA, 25 bp, Homo sapien
tggatcgggcttcttacatctgaaa

SEQ ID NO: 695022 - DNA, 25 bp, Homo sapien
tgaaatctgcgtctctatccctcct

SEQ ID NO: 695023 - DNA, 25 bp, Homo sapien
cagctgggtccacttatgcaatgtg

SEQ ID NO: 695024 - DNA, 25 bp, Homo sapien
cgtggtgggaatatggtgctttatt

SEQ ID NO: 695025 - DNA, 25 bp, Homo sapien
cagctactgtagcaggaagtccttc

SEQ ID NO: 695026 - DNA, 25 bp, Homo sapien
tgaaccgatgtcactcacaggcagg

SEQ ID NO: 695027 - DNA, 25 bp, Homo sapien
cagaatgtggaccactcagcaggag

SEQ ID NO: 695028 - DNA, 25 bp, Homo sapien
aatgagactcagtgggacgcagagc

SEQ ID NO: 695029 - DNA, 25 bp, Homo sapien
ggtcgggaccatcaccagatctgct

SEQ ID NO: 695030 - DNA, 25 bp, Homo sapien
tggaccctctcctagcgaagcagat

SEQ ID NO: 695031 - DNA, 25 bp, Homo sapien
taggcacaagacttgagttctcact

SEQ ID NO: 695032 - DNA, 25 bp, Homo sapien
caaccaaacacaatccctgcctgga

SEQ ID NO: 695033 - DNA, 25 bp, Homo sapien
cagaggccgtgtccccgtccaaggc

SEQ ID NO: 695034 - DNA, 25 bp, Homo sapien
tggcaaacgtgtggccccacagagt

SEQ ID NO: 695035 - DNA, 25 bp, Homo sapien
caaggccgtcttacagcagacacag

SEQ ID NO: 695036 - DNA, 25 bp, Homo sapien
aatttggcaaacgtgtggccccaca

SEQ ID NO: 695037 - DNA, 25 bp, Homo sapien
gatcatgccagccagccagggcggc

SEQ ID NO: 695038 - DNA, 25 bp, Homo sapien
ctagatcatgccagccagccagggc

SEQ ID NO: 695039 - DNA, 25 bp, Homo sapien
agccagggcggcaggaagaggccca

SEQ ID NO: 695040 - DNA, 25 bp, Homo sapien
gccagggcggcaggaagaggcccac

SEQ ID NO: 695041 - DNA, 25 bp, Homo sapien
aggcagacgatgatgaacatccaga

SEQ ID NO: 695042 - DNA, 25 bp, Homo sapien
tgcggtcgatgaccatggccacgta

SEQ ID NO: 695043 - DNA, 25 bp, Homo sapien
gaagatgcggtcgatgaccatggcc

SEQ ID NO: 695044 - DNA, 25 bp, Homo sapien
ggcagacgatgatgaacatccagag

SEQ ID NO: 695045 - DNA, 25 bp, Homo sapien
cttccacccgaggcagccattgctg

SEQ ID NO: 695046 - DNA, 25 bp, Homo sapien
tgcaccgaggggaggaattggggtg

SEQ ID NO: 695047 - DNA, 25 bp, Homo sapien
ccacccgaggcagccattgctgctg

SEQ ID NO: 695048 - DNA, 25 bp, Homo sapien
gctgctggtgcacgcggcacacagc

SEQ ID NO: 695049 - DNA, 25 bp, Homo sapien
aaatgtggcccggtgggcgcacaga

SEQ ID NO: 695050 - DNA, 25 bp, Homo sapien
aatgtggcccggtgggcgcacagag

SEQ ID NO: 695051 - DNA, 25 bp, Homo sapien
gtgggcgcacagagggcggacgaaa

SEQ ID NO: 695052 - DNA, 25 bp, Homo sapien
cagagggcggacgaaagcagcacac

SEQ ID NO: 695053 - DNA, 25 bp, Homo sapien
cttcagacggaggtggcccactgag

SEQ ID NO: 695054 - DNA, 25 bp, Homo sapien
ggcaggcaccagatgcgtccgaata

SEQ ID NO: 695055 - DNA, 25 bp, Homo sapien
ggccccttcagacggaggtggccca

SEQ ID NO: 695056 - DNA, 25 bp, Homo sapien
taaaccatcgaggatggcgctctgg

SEQ ID NO: 695057 - DNA, 25 bp, Homo sapien
aagtctgtgtcttcggccttcaggt

SEQ ID NO: 695058 - DNA, 25 bp, Homo sapien
acatgtgctggacgctgagggacct

SEQ ID NO: 695059 - DNA, 25 bp, Homo sapien
gaacacagtactggatgctccgaga

SEQ ID NO: 695060 - DNA, 25 bp, Homo sapien
gtctgcaatgtactggacgccctcc

SEQ ID NO: 695061 - DNA, 25 bp, Homo sapien
gagctggtcggagggtgacttgcag

SEQ ID NO: 695062 - DNA, 25 bp, Homo sapien
tctgggtgccgctcgtggcaggggg

SEQ ID NO: 695063 - DNA, 25 bp, Homo sapien
gagggagctggtcggagggtgactt

SEQ ID NO: 695064 - DNA, 25 bp, Homo sapien
caggctcagccggcacatccagggg

SEQ ID NO: 695065 - DNA, 25 bp, Homo sapien
tgagccgccggcaattgtccttgac

SEQ ID NO: 695066 - DNA, 25 bp, Homo sapien
acggacggccgcttcatgaggagca

SEQ ID NO: 695067 - DNA, 25 bp, Homo sapien
tacttcctggtgttgtaggtgccca

SEQ ID NO: 695068 - DNA, 25 bp, Homo sapien
gtaggtccaggagccgaatttcatg

SEQ ID NO: 695069 - DNA, 25 bp, Homo sapien
agaggacgatgtccggccgccagat

SEQ ID NO: 695070 - DNA, 25 bp, Homo sapien
tctcatagtcagctgggtcccagcg

SEQ ID NO: 695071 - DNA, 25 bp, Homo sapien
tggaggtgacattctcatagtcagc

SEQ ID NO: 695072 - DNA, 25 bp, Homo sapien
ggtcccagcgcagcttgtagtcgtg

SEQ ID NO: 695073 - DNA, 25 bp, Homo sapien
tcacccatacgttcgtggtcatcat

SEQ ID NO: 695074 - DNA, 25 bp, Homo sapien
tacgttcgtggtcatcatctggttc

SEQ ID NO: 695075 - DNA, 25 bp, Homo sapien
cccatacgttcgtggtcatcatctg

SEQ ID NO: 695076 - DNA, 25 bp, Homo sapien
ctgcttcacccatacgttcgtggtc

SEQ ID NO: 695077 - DNA, 25 bp, Homo sapien
aacccacaggaccacatctccactg

SEQ ID NO: 695078 - DNA, 25 bp, Homo sapien
aggaccacgtcccacagaccacgtc

SEQ ID NO: 695079 - DNA, 25 bp, Homo sapien
aggaccacgtctccacggaccgtgt

SEQ ID NO: 695080 - DNA, 25 bp, Homo sapien
cacaggaccacatctccactgacca

SEQ ID NO: 695081 - DNA, 25 bp, Homo sapien
agtcacagtgcacgatggccacgcc

SEQ ID NO: 695082 - DNA, 25 bp, Homo sapien
acagtgcacgatggccacgccctca

SEQ ID NO: 695083 - DNA, 25 bp, Homo sapien
tcagtcacagtgcacgatggccacg

SEQ ID NO: 695084 - DNA, 25 bp, Homo sapien
tcacagtgcacgatggccacgccct

SEQ ID NO: 695085 - DNA, 25 bp, Homo sapien
gccgaagcggacgaggaccacgtcc

SEQ ID NO: 695086 - DNA, 25 bp, Homo sapien
cacgtccgagatgttggccacgggt

SEQ ID NO: 695087 - DNA, 25 bp, Homo sapien
gaccacttgttgtaaccggagaaga

SEQ ID NO: 695088 - DNA, 25 bp, Homo sapien
gaagagtttcttcaggagccgctcc

SEQ ID NO: 695089 - DNA, 25 bp, Homo sapien
cgcgcaggaggccggtccccagaag

SEQ ID NO: 695090 - DNA, 25 bp, Homo sapien
ttcgtcttctcctgtggggcgcggt

SEQ ID NO: 695091 - DNA, 25 bp, Homo sapien
ttcgaggcccgtgcgcgcccaactt

SEQ ID NO: 695092 - DNA, 25 bp, Homo sapien
aacttcatgcctcccgcgcctcgcg

SEQ ID NO: 695093 - DNA, 25 bp, Homo sapien
cgcgggctctagatgcgggcggctc

SEQ ID NO: 695094 - DNA, 25 bp, Homo sapien
tgccaacagtgccagtccttgaggg

SEQ ID NO: 695095 - DNA, 25 bp, Homo sapien
gctaagggagggttggcccagagca

SEQ ID NO: 695096 - DNA, 25 bp, Homo sapien
ggacggatgcctgtccaagggctaa

SEQ ID NO: 695097 - DNA, 25 bp, Homo sapien
gcttggcaggcgaagcctggctctt

SEQ ID NO: 695098 - DNA, 25 bp, Homo sapien
tttgctgaaaagatgtagggcacag

SEQ ID NO: 695099 - DNA, 25 bp, Homo sapien
ctgcctttgctgaaaagatgtaggg

SEQ ID NO: 695100 - DNA, 25 bp, Homo sapien
agctgcttccatcccgggccctgct

SEQ ID NO: 695101 - DNA, 25 bp, Homo sapien
gctgaaaagatgtagggcacagccg

SEQ ID NO: 695102 - DNA, 25 bp, Homo sapien
gacgcttctgcacgttgccccagag

SEQ ID NO: 695103 - DNA, 25 bp, Homo sapien
aggctccggacgcttctgcacgttg

SEQ ID NO: 695104 - DNA, 25 bp, Homo sapien
gtgaaggctccggacgcttctgcac

SEQ ID NO: 695105 - DNA, 25 bp, Homo sapien
gtgggtgaaggctccggacgcttct

SEQ ID NO: 695106 - DNA, 25 bp, Homo sapien
cagactttccggaacaattcctggg

SEQ ID NO: 695107 - DNA, 25 bp, Homo sapien
ttgttaagatcaaagattccctggg

SEQ ID NO: 695108 - DNA, 25 bp, Homo sapien
agcagggctgtctctaaccgaggga

SEQ ID NO: 695109 - DNA, 25 bp, Homo sapien
agggtgctgcaaactccagaaggcc

SEQ ID NO: 695110 - DNA, 25 bp, Homo sapien
tactcccatgatgacagagccaagg

SEQ ID NO: 695111 - DNA, 25 bp, Homo sapien
tttcaaaaatgagcggagccaacgc

SEQ ID NO: 695112 - DNA, 25 bp, Homo sapien
caaggctgccggctcatgaatattc

SEQ ID NO: 695113 - DNA, 25 bp, Homo sapien
gagagttctgtcaaccagtgccgtt

SEQ ID NO: 695114 - DNA, 25 bp, Homo sapien
tttaatttgcttcctccgcgctgga

SEQ ID NO: 695115 - DNA, 25 bp, Homo sapien
cgttctcttcctcgcagcagatggg

SEQ ID NO: 695116 - DNA, 25 bp, Homo sapien
ggataattaccctgacgctcgtttg

SEQ ID NO: 695117 - DNA, 25 bp, Homo sapien
tatgtgttatgatggccacgtgtcc

SEQ ID NO: 695118 - DNA, 25 bp, Homo sapien
gtgagcccagcagcatctcgtggag

SEQ ID NO: 695119 - DNA, 25 bp, Homo sapien
tctgagtcccgtgaggacaaggacg

SEQ ID NO: 695120 - DNA, 25 bp, Homo sapien
tgcacctctgataggtccaggagaa

SEQ ID NO: 695121 - DNA, 25 bp, Homo sapien
tgtgctggcgcaaggcagctcttcc

SEQ ID NO: 695122 - DNA, 25 bp, Homo sapien
gcatcccggagctcaggtccaggag

SEQ ID NO: 695123 - DNA, 25 bp, Homo sapien
cgctcctgcatcccggagctcaggt

SEQ ID NO: 695124 - DNA, 25 bp, Homo sapien
ctgcatcccggagctcaggtccagg

SEQ ID NO: 695125 - DNA, 25 bp, Homo sapien
tcctgcatcccggagctcaggtcca

SEQ ID NO: 695126 - DNA, 25 bp, Homo sapien
catccgtagagtgggacgaacaacg

SEQ ID NO: 695127 - DNA, 25 bp, Homo sapien
gatattagaagagcccaagacagtg

SEQ ID NO: 695128 - DNA, 25 bp, Homo sapien
catttaaccctaagtcaagaggccg

SEQ ID NO: 695129 - DNA, 25 bp, Homo sapien
ggcagacctattacccagggcagag

SEQ ID NO: 695130 - DNA, 25 bp, Homo sapien
gaggcatgggcggcgttccacctcc

SEQ ID NO: 695131 - DNA, 25 bp, Homo sapien
tctccttcggactccggaggcatgg

SEQ ID NO: 695132 - DNA, 25 bp, Homo sapien
catggtcgggtcctgtatctccttc

SEQ ID NO: 695133 - DNA, 25 bp, Homo sapien
gatgcacgattttaacaggctctct

SEQ ID NO: 695134 - DNA, 25 bp, Homo sapien
ctctgtcaggtggcgtttctaacct

SEQ ID NO: 695135 - DNA, 25 bp, Homo sapien
tgtcaggtggcgtttctaaccttgt

SEQ ID NO: 695136 - DNA, 25 bp, Homo sapien
cagtgatgggcattgcaggccgctc

SEQ ID NO: 695137 - DNA, 25 bp, Homo sapien
atgggcattgcaggccgctctgtca

SEQ ID NO: 695138 - DNA, 25 bp, Homo sapien
ccacaccagagtgggggtgttgagg

SEQ ID NO: 695139 - DNA, 25 bp, Homo sapien
gaggtatgaggtgcggttccccacc

SEQ ID NO: 695140 - DNA, 25 bp, Homo sapien
gagcggaggtatgaggtgcggttcc

SEQ ID NO: 695141 - DNA, 25 bp, Homo sapien
caggagcggaggtatgaggtgcggt

SEQ ID NO: 695142 - DNA, 25 bp, Homo sapien
gccgctgaggagctccaccagggga

SEQ ID NO: 695143 - DNA, 25 bp, Homo sapien
ctcgccgtggacctccccgacctgg

SEQ ID NO: 695144 - DNA, 25 bp, Homo sapien
cctcgccgtggacctccccgacctg

SEQ ID NO: 695145 - DNA, 25 bp, Homo sapien
caccaggggaaagcccctcgccgtg

SEQ ID NO: 695146 - DNA, 25 bp, Homo sapien
cgcagagcccccgggcgaccaccgg

SEQ ID NO: 695147 - DNA, 25 bp, Homo sapien
ggtcactgtcagagaatccccaagc

SEQ ID NO: 695148 - DNA, 25 bp, Homo sapien
gcaaatctcccgtcagaagctggtg

SEQ ID NO: 695149 - DNA, 25 bp, Homo sapien
tattaaagcagacacggctgcagcc

SEQ ID NO: 695150 - DNA, 25 bp, Homo sapien
tggagttagcgagcacccattctgc

SEQ ID NO: 695151 - DNA, 25 bp, Homo sapien
gctgggattttcccgtgggccatgc

SEQ ID NO: 695152 - DNA, 25 bp, Homo sapien
gatggcatagagagccgccctcgga

SEQ ID NO: 695153 - DNA, 25 bp, Homo sapien
gtccgcgggcagcagccatgaggga

SEQ ID NO: 695154 - DNA, 25 bp, Homo sapien
agacttcagggcaaggagcaccaca

SEQ ID NO: 695155 - DNA, 25 bp, Homo sapien
cactgcgttttactgagtgcacagg

SEQ ID NO: 695156 - DNA, 25 bp, Homo sapien
caggttgaatcactgcgttttactg

SEQ ID NO: 695157 - DNA, 25 bp, Homo sapien
cgttttactgagtgcacaggtccac

SEQ ID NO: 695158 - DNA, 25 bp, Homo sapien
gaatcactgcgttttactgagtgca

SEQ ID NO: 695159 - DNA, 25 bp, Homo sapien
aaaactagagttcattccctgggcg

SEQ ID NO: 695160 - DNA, 25 bp, Homo sapien
tacgtcggtactgaaggcattatga

SEQ ID NO: 695161 - DNA, 25 bp, Homo sapien
caaaatggtcagaagtgtacgtcgg

SEQ ID NO: 695162 - DNA, 25 bp, Homo sapien
tatccctagaaaatggacggtgcac

SEQ ID NO: 695163 - DNA, 25 bp, Homo sapien
atctgccgggcaccctccatggcag

SEQ ID NO: 695164 - DNA, 25 bp, Homo sapien
tccatggcaggtccaagccctgtga

SEQ ID NO: 695165 - DNA, 25 bp, Homo sapien
cacaccacgtctgccgggcaccctc

SEQ ID NO: 695166 - DNA, 25 bp, Homo sapien
aagccctgtgaaccatccctctcac

SEQ ID NO: 695167 - DNA, 25 bp, Homo sapien
cacacacgctgcctttgggaacaga

SEQ ID NO: 695168 - DNA, 25 bp, Homo sapien
tgtgcactctaacaaacactgcggg

SEQ ID NO: 695169 - DNA, 25 bp, Homo sapien
caagggcgtttctgcaaagctctca

SEQ ID NO: 695170 - DNA, 25 bp, Homo sapien
tacggcattcatagctcaggagggc

SEQ ID NO: 695171 - DNA, 25 bp, Homo sapien
tagggactcgctcccgcattagagc

SEQ ID NO: 695172 - DNA, 25 bp, Homo sapien
caagaggccccgctaaggaatcggt

SEQ ID NO: 695173 - DNA, 25 bp, Homo sapien
gccgtcacgccaaatgccagatgct

SEQ ID NO: 695174 - DNA, 25 bp, Homo sapien
tcttaagtctggagctagggactcg

SEQ ID NO: 695175 - DNA, 25 bp, Homo sapien
tgctcaccaggtgggtctcgcagtg

SEQ ID NO: 695176 - DNA, 25 bp, Homo sapien
tcaccaggtgggtctcgcagtgccg

SEQ ID NO: 695177 - DNA, 25 bp, Homo sapien
gccccaggtctgtcggggcactggt

SEQ ID NO: 695178 - DNA, 25 bp, Homo sapien
agtgccggcacccggccagggcagt

SEQ ID NO: 695179 - DNA, 25 bp, Homo sapien
aatagctctgtatttgggcgcccct

SEQ ID NO: 695180 - DNA, 25 bp, Homo sapien
gagccctcagatcccagaaggtaca

SEQ ID NO: 695181 - DNA, 25 bp, Homo sapien
gagaagacgccaaccaatagctctg

SEQ ID NO: 695182 - DNA, 25 bp, Homo sapien
tttgaagaccctttggagccggctc

SEQ ID NO: 695183 - DNA, 25 bp, Homo sapien
ttcccgcctcaaaacctcggaggca

SEQ ID NO: 695184 - DNA, 25 bp, Homo sapien
gcctcaaaacctcggaggcaccgtg

SEQ ID NO: 695185 - DNA, 25 bp, Homo sapien
ggccgcgggcgggtccactggccca

SEQ ID NO: 695186 - DNA, 25 bp, Homo sapien
ggcgggtccactggcccagcgccgc

SEQ ID NO: 695187 - DNA, 25 bp, Homo sapien
tgctgaagccgctgaaggaacgctc

SEQ ID NO: 695188 - DNA, 25 bp, Homo sapien
gcgtagcagctgttgagagcatcca

SEQ ID NO: 695189 - DNA, 25 bp, Homo sapien
caatgtagggcctgactttggcaca

SEQ ID NO: 695190 - DNA, 25 bp, Homo sapien
gcaggaactccatgctggcgcggtt

SEQ ID NO: 695191 - DNA, 25 bp, Homo sapien
gggcgccgagaagttcttctggccc

SEQ ID NO: 695192 - DNA, 25 bp, Homo sapien
gccgagaagttcttctggcccgtgg

SEQ ID NO: 695193 - DNA, 25 bp, Homo sapien
cgagaagttcttctggcccgtggag

SEQ ID NO: 695194 - DNA, 25 bp, Homo sapien
agaagttcttctggcccgtggagct

SEQ ID NO: 695195 - DNA, 25 bp, Homo sapien
gatcttgacaatgcagccgtgcctg

SEQ ID NO: 695196 - DNA, 25 bp, Homo sapien
gatgcccatccgctgcatgtagata

SEQ ID NO: 695197 - DNA, 25 bp, Homo sapien
caaagtaggcctcggtctctgtcgg

SEQ ID NO: 695198 - DNA, 25 bp, Homo sapien
tgcctgtcgacatgctcccggctgt

SEQ ID NO: 695199 - DNA, 25 bp, Homo sapien
gcccttggtgcggtccttgtccgtg

SEQ ID NO: 695200 - DNA, 25 bp, Homo sapien
gtccttgtccgtgatcgctgggccc

SEQ ID NO: 695201 - DNA, 25 bp, Homo sapien
ttcccgagccgtcccatcatgctgg

SEQ ID NO: 695202 - DNA, 25 bp, Homo sapien
tgggccccgccccacgatctggtcc

SEQ ID NO: 695203 - DNA, 25 bp, Homo sapien
ctttggtggggtacttcttgtgccg

SEQ ID NO: 695204 - DNA, 25 bp, Homo sapien
gcgggggacccacaatcatatctat

SEQ ID NO: 695205 - DNA, 25 bp, Homo sapien
gggcgggggacccacaatcatatct

SEQ ID NO: 695206 - DNA, 25 bp, Homo sapien
tgagtactggggtgactctctcgga

SEQ ID NO: 695207 - DNA, 25 bp, Homo sapien
caagaaaagagacaccggcgaaacg

SEQ ID NO: 695208 - DNA, 25 bp, Homo sapien
cgaaacgcatcgtaaagccacagga

SEQ ID NO: 695209 - DNA, 25 bp, Homo sapien
gagacaccggcgaaacgcatcgtaa

SEQ ID NO: 695210 - DNA, 25 bp, Homo sapien
accggcgaaacgcatcgtaaagcca

SEQ ID NO: 695211 - DNA, 25 bp, Homo sapien
cgcacttgcccaccgcggtgtggat

SEQ ID NO: 695212 - DNA, 25 bp, Homo sapien
cagagcagagccacacgtgcataca

SEQ ID NO: 695213 - DNA, 25 bp, Homo sapien
acacgtgcatacatggcagagcaga

SEQ ID NO: 695214 - DNA, 25 bp, Homo sapien
tgtgtgcatgcgtgacttacacaca

SEQ ID NO: 695215 - DNA, 25 bp, Homo sapien
gaagctgacagaggccgacgtgggt

SEQ ID NO: 695216 - DNA, 25 bp, Homo sapien
cagaagctgacagaggccgacgtgg

SEQ ID NO: 695217 - DNA, 25 bp, Homo sapien
agaagctgacagaggccgacgtggg

SEQ ID NO: 695218 - DNA, 25 bp, Homo sapien
cagtgggctttgtcccagaagccca

SEQ ID NO: 695219 - DNA, 25 bp, Homo sapien
catgggccacagtgggctttgtccc

SEQ ID NO: 695220 - DNA, 25 bp, Homo sapien
atgggccacagtgggctttgtccca

SEQ ID NO: 695221 - DNA, 25 bp, Homo sapien
gccacagtgggctttgtcccagaag

SEQ ID NO: 695222 - DNA, 25 bp, Homo sapien
tgcaggctcttaattcgggacagca

SEQ ID NO: 695223 - DNA, 25 bp, Homo sapien
tccatcacgtcgtagggccgcaggc

SEQ ID NO: 695224 - DNA, 25 bp, Homo sapien
cttgaacttccgcttggacaccagg

SEQ ID NO: 695225 - DNA, 25 bp, Homo sapien
cttggacaccaggaaccgcatgaca

SEQ ID NO: 695226 - DNA, 25 bp, Homo sapien
cacaatgtcctctccggggaggctt

SEQ ID NO: 695227 - DNA, 25 bp, Homo sapien
tgctgactttgaggcccggggtcag

SEQ ID NO: 695228 - DNA, 25 bp, Homo sapien
ggtcctcggtcacaaactcgcaggg

SEQ ID NO: 695229 - DNA, 25 bp, Homo sapien
ctcgcaggggcagctcttgtcatcc

SEQ ID NO: 695230 - DNA, 25 bp, Homo sapien
cttctgagttctgccgtgacgcggc

SEQ ID NO: 695231 - DNA, 25 bp, Homo sapien
ttgatgcggaaagcctggcgtgccc

SEQ ID NO: 695232 - DNA, 25 bp, Homo sapien
gcggtccccgaagctccagctcttg

SEQ ID NO: 695233 - DNA, 25 bp, Homo sapien
tgacgcggcacccttgatgcggaaa

SEQ ID NO: 695234 - DNA, 25 bp, Homo sapien
gggtgaccgcctcacagtctgggcc

SEQ ID NO: 695235 - DNA, 25 bp, Homo sapien
tgggtgaccgcctcacagtctgggc

SEQ ID NO: 695236 - DNA, 25 bp, Homo sapien
ctgggtgaccgcctcacagtctggg

SEQ ID NO: 695237 - DNA, 25 bp, Homo sapien
ctggagaagacacgatctttcaaac

SEQ ID NO: 695238 - DNA, 25 bp, Homo sapien
ggagaagacacgatctttcaaactg

SEQ ID NO: 695239 - DNA, 25 bp, Homo sapien
gagaagacacgatctttcaaactga

SEQ ID NO: 695240 - DNA, 25 bp, Homo sapien
agaagacacgatctttcaaactgac

SEQ ID NO: 695241 - DNA, 25 bp, Homo sapien
ctcccacgggaaccgacagacagac

SEQ ID NO: 695242 - DNA, 25 bp, Homo sapien
ggaatggataacggggctcctccgc

SEQ ID NO: 695243 - DNA, 25 bp, Homo sapien
caggtccgtgtcagagaactgctcc

SEQ ID NO: 695244 - DNA, 25 bp, Homo sapien
gctgggcctcactatccaagtcctg

SEQ ID NO: 695245 - DNA, 25 bp, Homo sapien
gccagctgggcctcactatccaagt

SEQ ID NO: 695246 - DNA, 25 bp, Homo sapien
cagccccgacgtctgcttcccattt

SEQ ID NO: 695247 - DNA, 25 bp, Homo sapien
cgctgaccacgacaaggagccacag

SEQ ID NO: 695248 - DNA, 25 bp, Homo sapien
gtcaaatacccaggcggccacacag

SEQ ID NO: 695249 - DNA, 25 bp, Homo sapien
agacgtgcgggccaggaagggtcag

SEQ ID NO: 695250 - DNA, 25 bp, Homo sapien
ctagagcgtccggggcagcatccac

SEQ ID NO: 695251 - DNA, 25 bp, Homo sapien
tagagcgtccggggcagcatccaca

SEQ ID NO: 695252 - DNA, 25 bp, Homo sapien
ggaaatgaggagagcacagttagtc

SEQ ID NO: 695253 - DNA, 25 bp, Homo sapien
ctggaaatgaggagagcacagttag

SEQ ID NO: 695254 - DNA, 25 bp, Homo sapien
tggaaatgaggagagcacagttagt

SEQ ID NO: 695255 - DNA, 25 bp, Homo sapien
ctgggcgccggcaacagcacacggc

SEQ ID NO: 695256 - DNA, 25 bp, Homo sapien
cggcaacagcacacggccgggagca

SEQ ID NO: 695257 - DNA, 25 bp, Homo sapien
tgggcgccggcaacagcacacggcc

SEQ ID NO: 695258 - DNA, 25 bp, Homo sapien
cgccggcaacagcacacggccggga

SEQ ID NO: 695259 - DNA, 25 bp, Homo sapien
gggctcagcagacgtagaattaact

SEQ ID NO: 695260 - DNA, 25 bp, Homo sapien
gaattaacttgtgaaaggatcttga

SEQ ID NO: 695261 - DNA, 25 bp, Homo sapien
cagcagagcccttacacgagtcctg

SEQ ID NO: 695262 - DNA, 25 bp, Homo sapien
ggagagggaaccaggctaagcacct

SEQ ID NO: 695263 - DNA, 25 bp, Homo sapien
gacagagaggatgtcccaccctcct

SEQ ID NO: 695264 - DNA, 25 bp, Homo sapien
atctccacccaggggcgtgagacag

SEQ ID NO: 695265 - DNA, 25 bp, Homo sapien
tgagacagagaggatgtcccaccct

SEQ ID NO: 695266 - DNA, 25 bp, Homo sapien
acccaggggcgtgagacagagagga

SEQ ID NO: 695267 - DNA, 25 bp, Homo sapien
ctgcccggatccacagtgctgcaaa

SEQ ID NO: 695268 - DNA, 25 bp, Homo sapien
tgtgagctcgggctatgtgcctgca

SEQ ID NO: 695269 - DNA, 25 bp, Homo sapien
tgcaaagtaaaaccgaatcactggg

SEQ ID NO: 695270 - DNA, 25 bp, Homo sapien
ggagggagcgcactaacagagaccc

SEQ ID NO: 695271 - DNA, 25 bp, Homo sapien
ggggtctggacccgcagtcacacag

SEQ ID NO: 695272 - DNA, 25 bp, Homo sapien
gtctggacccgcagtcacacagtca

SEQ ID NO: 695273 - DNA, 25 bp, Homo sapien
tcacacacggaagcacacacaaggc

SEQ ID NO: 695274 - DNA, 25 bp, Homo sapien
gacccgcagtcacacagtcacacac

SEQ ID NO: 695275 - DNA, 25 bp, Homo sapien
ttgcgcacacgtgtgggagagagac

SEQ ID NO: 695276 - DNA, 25 bp, Homo sapien
tctccatgacaggttgcgcacacgt

SEQ ID NO: 695277 - DNA, 25 bp, Homo sapien
gaccagacggccgtgcacacggcag

SEQ ID NO: 695278 - DNA, 25 bp, Homo sapien
cgtgcacacggcagacaccagggta

SEQ ID NO: 695279 - DNA, 25 bp, Homo sapien
agccggcactctgacagccgtgggc

SEQ ID NO: 695280 - DNA, 25 bp, Homo sapien
cggcactctgacagccgtgggcttt

SEQ ID NO: 695281 - DNA, 25 bp, Homo sapien
gacagccggcactctgacagccgtg

SEQ ID NO: 695282 - DNA, 25 bp, Homo sapien
ctcgacagccggcactctgacagcc

SEQ ID NO: 695283 - DNA, 25 bp, Homo sapien
gacactttgtcgtacgacccacgcg

SEQ ID NO: 695284 - DNA, 25 bp, Homo sapien
agcacctgagttaccaccaggcact

SEQ ID NO: 695285 - DNA, 25 bp, Homo sapien
cgacgggctgggacactttgtcgta

SEQ ID NO: 695286 - DNA, 25 bp, Homo sapien
caccaggcactcgagaggacgacgg

SEQ ID NO: 695287 - DNA, 25 bp, Homo sapien
cagatttactcttgaggttcctcag

SEQ ID NO: 695288 - DNA, 25 bp, Homo sapien
gatttactcttgaggttcctcagca

SEQ ID NO: 695289 - DNA, 25 bp, Homo sapien
atttactcttgaggttcctcagcag

SEQ ID NO: 695290 - DNA, 25 bp, Homo sapien
tccagatttactcttgaggttcctc

SEQ ID NO: 695291 - DNA, 25 bp, Homo sapien
tcaaaataatgaacaacaaaaagtg

SEQ ID NO: 695292 - DNA, 25 bp, Homo sapien
aaatcaatcaaaataatgaacaaca

SEQ ID NO: 695293 - DNA, 25 bp, Homo sapien
tcaatcaaaataatgaacaacaaaa

SEQ ID NO: 695294 - DNA, 25 bp, Homo sapien
caaaataatgaacaacaaaaagtgg

SEQ ID NO: 695295 - DNA, 25 bp, Homo sapien
aaaatgaaacagttgcttggtggca

SEQ ID NO: 695296 - DNA, 25 bp, Homo sapien
atgaaacagttgcttggtggcaggt

SEQ ID NO: 695297 - DNA, 25 bp, Homo sapien
aaaaatgaaacagttgcttggtggc

SEQ ID NO: 695298 - DNA, 25 bp, Homo sapien
ggtggcaggtgcccggcggcggtac

SEQ ID NO: 695299 - DNA, 25 bp, Homo sapien
tactgccacgtggagtgcaggtctg

SEQ ID NO: 695300 - DNA, 25 bp, Homo sapien
tgtacatgggcacggtgaccgttcg

SEQ ID NO: 695301 - DNA, 25 bp, Homo sapien
tctgtgcgcgagaggttggtggcgt

SEQ ID NO: 695302 - DNA, 25 bp, Homo sapien
tgaccgttcgctcgtagtactgcca

SEQ ID NO: 695303 - DNA, 25 bp, Homo sapien
cctgagcgagctcgcagggaggctg

SEQ ID NO: 695304 - DNA, 25 bp, Homo sapien
ctgtaggccaggcactcaggactct

SEQ ID NO: 695305 - DNA, 25 bp, Homo sapien
caggcaagcccgcttgtcagacggt

SEQ ID NO: 695306 - DNA, 25 bp, Homo sapien
cagtttaccctctgtaggacagaca

SEQ ID NO: 695307 - DNA, 25 bp, Homo sapien
gggcatgagcctgtacgtcagactg

SEQ ID NO: 695308 - DNA, 25 bp, Homo sapien
gtcagactgaacctcgcctggctgg

SEQ ID NO: 695309 - DNA, 25 bp, Homo sapien
cctggcgggtatcacctgtcctggg

SEQ ID NO: 695310 - DNA, 25 bp, Homo sapien
tgggagtatgggtagggccagggac

SEQ ID NO: 695311 - DNA, 25 bp, Homo sapien
agtgctgtgcgaccactgcccctat

SEQ ID NO: 695312 - DNA, 25 bp, Homo sapien
tgttagccatgttaaagcgtgcact

SEQ ID NO: 695313 - DNA, 25 bp, Homo sapien
cttcagtagcgcctgcacacacagt

SEQ ID NO: 695314 - DNA, 25 bp, Homo sapien
cacacacagtgctgtgcgaccactg

SEQ ID NO: 695315 - DNA, 25 bp, Homo sapien
ccccgacgttcagcaggcgctcctg

SEQ ID NO: 695316 - DNA, 25 bp, Homo sapien
agggcatcgcaagctgcacggcctt

SEQ ID NO: 695317 - DNA, 25 bp, Homo sapien
cctggccaccgccagggtgtacggg

SEQ ID NO: 695318 - DNA, 25 bp, Homo sapien
ggcatttcctgccaagggcatcgca

SEQ ID NO: 695319 - DNA, 25 bp, Homo sapien
gaagagtgaatcgatgcggcaaacc

SEQ ID NO: 695320 - DNA, 25 bp, Homo sapien
gagaggactgactgcgatgctgaaa

SEQ ID NO: 695321 - DNA, 25 bp, Homo sapien
cttagttgatacagcagtggcagca

SEQ ID NO: 695322 - DNA, 25 bp, Homo sapien
tctactccaggcaaagatgttgtga

SEQ ID NO: 695323 - DNA, 25 bp, Homo sapien
agcttgcagtgagctgagatcgcac

SEQ ID NO: 695324 - DNA, 25 bp, Homo sapien
tgagatcgcaccactgcactccagc

SEQ ID NO: 695325 - DNA, 25 bp, Homo sapien
aggagaatggcaggaaccagggagg

SEQ ID NO: 695326 - DNA, 25 bp, Homo sapien
agaatggcaggaaccagggaggtgg

SEQ ID NO: 695327 - DNA, 25 bp, Homo sapien
gcacaaagattgcaactcgcagaag

SEQ ID NO: 695328 - DNA, 25 bp, Homo sapien
ggccaccagcatcgaggtgagaccc

SEQ ID NO: 695329 - DNA, 25 bp, Homo sapien
ttgcaactcgcagaaggctcaggtg

SEQ ID NO: 695330 - DNA, 25 bp, Homo sapien
tgagaccccctaccagcacaaagat

SEQ ID NO: 695331 - DNA, 25 bp, Homo sapien
gagctgcaagaatggctggtcccaa

SEQ ID NO: 695332 - DNA, 25 bp, Homo sapien
caccttaaggtaggctggacccaga

SEQ ID NO: 695333 - DNA, 25 bp, Homo sapien
tattgccgtatctctaccgtagtgg

SEQ ID NO: 695334 - DNA, 25 bp, Homo sapien
gagagagcctatagccacattccgc

SEQ ID NO: 695335 - DNA, 25 bp, Homo sapien
tgccgggttccgcctcttctcaaag

SEQ ID NO: 695336 - DNA, 25 bp, Homo sapien
ctgctgccgggttccgcctcttctc

SEQ ID NO: 695337 - DNA, 25 bp, Homo sapien
ctgccgggttccgcctcttctcaaa

SEQ ID NO: 695338 - DNA, 25 bp, Homo sapien
tgctgccgggttccgcctcttctca

SEQ ID NO: 695339 - DNA, 25 bp, Homo sapien
cgtagccaatggtggtcagcgtgat

SEQ ID NO: 695340 - DNA, 25 bp, Homo sapien
tgaaggttgccgcaaggagcctgcc

SEQ ID NO: 695341 - DNA, 25 bp, Homo sapien
gtacttgtccccgtagccaatggtg

SEQ ID NO: 695342 - DNA, 25 bp, Homo sapien
gaaggagacaccgatgagggtgaag

SEQ ID NO: 695343 - DNA, 25 bp, Homo sapien
catccacacggaggcccagtgaggc

SEQ ID NO: 695344 - DNA, 25 bp, Homo sapien
caggctctagtcacacgaagggcct

SEQ ID NO: 695345 - DNA, 25 bp, Homo sapien
ccagtgaggccagggtcggtgtcgg

SEQ ID NO: 695346 - DNA, 25 bp, Homo sapien
ctgtgggaccgcaggctctagtcac

SEQ ID NO: 695347 - DNA, 25 bp, Homo sapien
ctgtgtccccatctcacatcgagaa

SEQ ID NO: 695348 - DNA, 25 bp, Homo sapien
actcccacgaggctcggctaggaca

SEQ ID NO: 695349 - DNA, 25 bp, Homo sapien
cagaggaacgggcagggcgtgcagg

SEQ ID NO: 695350 - DNA, 25 bp, Homo sapien
aaccagaggcccagcgacgtgactc

SEQ ID NO: 695351 - DNA, 25 bp, Homo sapien
tgtgcttagtttctctaggggtggt

SEQ ID NO: 695352 - DNA, 25 bp, Homo sapien
tgcttagtttctctaggggtggtgg

SEQ ID NO: 695353 - DNA, 25 bp, Homo sapien
gttgtgcttagtttctctaggggtg

SEQ ID NO: 695354 - DNA, 25 bp, Homo sapien
ttgtgcttagtttctctaggggtgg

SEQ ID NO: 695355 - DNA, 25 bp, Homo sapien
cctgggttccgaggacgctgctgtg

SEQ ID NO: 695356 - DNA, 25 bp, Homo sapien
ttccgaggacgctgctgtgtggtct

SEQ ID NO: 695357 - DNA, 25 bp, Homo sapien
accaccacgcggagcgcacaggaga

SEQ ID NO: 695358 - DNA, 25 bp, Homo sapien
ccggctgggccgcacctgctccaca

SEQ ID NO: 695359 - DNA, 25 bp, Homo sapien
tctgccaagtacaccaggaacgagg

SEQ ID NO: 695360 - DNA, 25 bp, Homo sapien
caaaggaagccgatgtaccaggcag

SEQ ID NO: 695361 - DNA, 25 bp, Homo sapien
caggaacgaggccaggatgagacaa

SEQ ID NO: 695362 - DNA, 25 bp, Homo sapien
gcatccgcgtaggtgtcaaagtggt

SEQ ID NO: 695363 - DNA, 25 bp, Homo sapien
gccagcaccgcaatggaggcgatga

SEQ ID NO: 695364 - DNA, 25 bp, Homo sapien
tggcaaagacgttgccctgggagcc

SEQ ID NO: 695365 - DNA, 25 bp, Homo sapien
tgtgggcatagaccacagagcccag

SEQ ID NO: 695366 - DNA, 25 bp, Homo sapien
tccggagcgcagatgtggcaaagac

SEQ ID NO: 695367 - DNA, 25 bp, Homo sapien
gcacgaagtactccacgccaaacac

SEQ ID NO: 695368 - DNA, 25 bp, Homo sapien
agcctgcggcccagatccgcacgaa

SEQ ID NO: 695369 - DNA, 25 bp, Homo sapien
gccaaacaccacgatagtcacgatt

SEQ ID NO: 695370 - DNA, 25 bp, Homo sapien
caatcacacagaacggtttccgggc

SEQ ID NO: 695371 - DNA, 25 bp, Homo sapien
gaaagctgaggccaccttgaggcct

SEQ ID NO: 695372 - DNA, 25 bp, Homo sapien
tctggcccagggaccaagccacagg

SEQ ID NO: 695373 - DNA, 25 bp, Homo sapien
ccaaaggaaactgcaagctgacccc

SEQ ID NO: 695374 - DNA, 25 bp, Homo sapien
acccacaggagcagttctggcccag

SEQ ID NO: 695375 - DNA, 25 bp, Homo sapien
tcttctcatactccttgatggtgga

SEQ ID NO: 695376 - DNA, 25 bp, Homo sapien
ggaaaacacagacagcacgaggcag

SEQ ID NO: 695377 - DNA, 25 bp, Homo sapien
gctcttctcatactccttgatggtg

SEQ ID NO: 695378 - DNA, 25 bp, Homo sapien
cagacagcacgaggcaggagaaaac

SEQ ID NO: 695379 - DNA, 25 bp, Homo sapien
caaaggccgagctccacagcccggg

SEQ ID NO: 695380 - DNA, 25 bp, Homo sapien
agggaaaagccccagcgtctgagct

SEQ ID NO: 695381 - DNA, 25 bp, Homo sapien
tccacagcccgggagaagagggaaa

SEQ ID NO: 695382 - DNA, 25 bp, Homo sapien
gggaaaagccccagcgtctgagctc

SEQ ID NO: 695383 - DNA, 25 bp, Homo sapien
agggccaggccatccgggcacaaac

SEQ ID NO: 695384 - DNA, 25 bp, Homo sapien
ttttggccgcggaggcagaaggaca

SEQ ID NO: 695385 - DNA, 25 bp, Homo sapien
agccccagtgtctgcggcctgcagg

SEQ ID NO: 695386 - DNA, 25 bp, Homo sapien
tgcagggagacttctcagacttttg

SEQ ID NO: 695387 - DNA, 25 bp, Homo sapien
tggccaagttcttcaattaactgag

SEQ ID NO: 695388 - DNA, 25 bp, Homo sapien
catacgcaagggacgtcccatttcc

SEQ ID NO: 695389 - DNA, 25 bp, Homo sapien
aatttcctgtgctcgttggccaagt

SEQ ID NO: 695390 - DNA, 25 bp, Homo sapien
tcccatttccaagccgcgattaatt

SEQ ID NO: 695391 - DNA, 25 bp, Homo sapien
gggatcaggcaccccgaatgcagtc

SEQ ID NO: 695392 - DNA, 25 bp, Homo sapien
agacagccccagatcacaagagagg

SEQ ID NO: 695393 - DNA, 25 bp, Homo sapien
ccccagatcacaagagaggccatgg

SEQ ID NO: 695394 - DNA, 25 bp, Homo sapien
tgagcatggagcagcgggggatctc

SEQ ID NO: 695395 - DNA, 25 bp, Homo sapien
caccttgcgtgaagatgtgcatgga

SEQ ID NO: 695396 - DNA, 25 bp, Homo sapien
catttgcagcggcaaagtcctagca

SEQ ID NO: 695397 - DNA, 25 bp, Homo sapien
cactgcaaaccggtcagagaagtcg

SEQ ID NO: 695398 - DNA, 25 bp, Homo sapien
tgcttcaaggtccatcactgcaaac

SEQ ID NO: 695399 - DNA, 25 bp, Homo sapien
agccgctgaccaatgggactgagaa

SEQ ID NO: 695400 - DNA, 25 bp, Homo sapien
cggtcacggcgatgacagctacgag

SEQ ID NO: 695401 - DNA, 25 bp, Homo sapien
ccaatgggactgagaatcggccgga

SEQ ID NO: 695402 - DNA, 25 bp, Homo sapien
gccctcaacagcagcgcaggcctct

SEQ ID NO: 695403 - DNA, 25 bp, Homo sapien
aaaccacaactctccgaggcttctt

SEQ ID NO: 695404 - DNA, 25 bp, Homo sapien
gggtccaggaaccagagaaatccag

SEQ ID NO: 695405 - DNA, 25 bp, Homo sapien
cagaaaccacaactctccgaggctt

SEQ ID NO: 695406 - DNA, 25 bp, Homo sapien
cccagaaaccacaactctccgaggc

SEQ ID NO: 695407 - DNA, 25 bp, Homo sapien
atgcgaacacccaggtgcacacgga

SEQ ID NO: 695408 - DNA, 25 bp, Homo sapien
tgcacacggacgcaggcttcggccg

SEQ ID NO: 695409 - DNA, 25 bp, Homo sapien
ttccctgagcctcgcccgggaagag

SEQ ID NO: 695410 - DNA, 25 bp, Homo sapien
acgcagcgggccgtgcaattccaca

SEQ ID NO: 695411 - DNA, 25 bp, Homo sapien
gcagcttgcggtagaaggcgttgcg

SEQ ID NO: 695412 - DNA, 25 bp, Homo sapien
attctgcagcttgcggtagaaggcg

SEQ ID NO: 695413 - DNA, 25 bp, Homo sapien
tgcagcttgcggtagaaggcgttgc

SEQ ID NO: 695414 - DNA, 25 bp, Homo sapien
gaaattctgcagcttgcggtagaag

SEQ ID NO: 695415 - DNA, 25 bp, Homo sapien
ttgggggcctcggagccggcgatca

SEQ ID NO: 695416 - DNA, 25 bp, Homo sapien
ccgcccgcgcgaggtttgctgagga

SEQ ID NO: 695417 - DNA, 25 bp, Homo sapien
gagccggcgatcagcagcgccccgt

SEQ ID NO: 695418 - DNA, 25 bp, Homo sapien
gctgaggatgctgccgcgcttgggg

SEQ ID NO: 695419 - DNA, 25 bp, Homo sapien
atacgccgccgttgcgcgacttctg

SEQ ID NO: 695420 - DNA, 25 bp, Homo sapien
gggtatacgccgccgttgcgcgact

SEQ ID NO: 695421 - DNA, 25 bp, Homo sapien
cgccgttgcgcgacttctgcaccat

SEQ ID NO: 695422 - DNA, 25 bp, Homo sapien
gtatacgccgccgttgcgcgacttc

SEQ ID NO: 695423 - DNA, 25 bp, Homo sapien
gccgggagccgcatggccgaggcgg

SEQ ID NO: 695424 - DNA, 25 bp, Homo sapien
ttgggccgcgcgcggagacgctgcg

SEQ ID NO: 695425 - DNA, 25 bp, Homo sapien
gcggttccgcactcctgccgggctt

SEQ ID NO: 695426 - DNA, 25 bp, Homo sapien
gccgaggcggcggttccgcactcct

SEQ ID NO: 695427 - DNA, 25 bp, Homo sapien
tgaagaacttccactggaccttgat

SEQ ID NO: 695428 - DNA, 25 bp, Homo sapien
gctcagtttattggtaaaacgggca

SEQ ID NO: 695429 - DNA, 25 bp, Homo sapien
ggcactgagcgtggcgagcgctggg

SEQ ID NO: 695430 - DNA, 25 bp, Homo sapien
tgatggcgagcatccagtcgctgac

SEQ ID NO: 695431 - DNA, 25 bp, Homo sapien
ggcaagcggaggtgcagacatgcgc

SEQ ID NO: 695432 - DNA, 25 bp, Homo sapien
caagcggaggtgcagacatgcgcct

SEQ ID NO: 695433 - DNA, 25 bp, Homo sapien
ctggcaagcggaggtgcagacatgc

SEQ ID NO: 695434 - DNA, 25 bp, Homo sapien
gaggtgcagacatgcgcctggcggg

SEQ ID NO: 695435 - DNA, 25 bp, Homo sapien
cttctccacgttcttgatgacgcct

SEQ ID NO: 695436 - DNA, 25 bp, Homo sapien
cttctgcgccgacttggtgaccttg

SEQ ID NO: 695437 - DNA, 25 bp, Homo sapien
ttctgcgccttctgcgccgacttgg

SEQ ID NO: 695438 - DNA, 25 bp, Homo sapien
tcttgatgacgcctacggccaccgt

SEQ ID NO: 695439 - DNA, 25 bp, Homo sapien
ctcatgtcgcgcacggcgaagcggc

SEQ ID NO: 695440 - DNA, 25 bp, Homo sapien
cctcatgtcgcgcacggcgaagcgg

SEQ ID NO: 695441 - DNA, 25 bp, Homo sapien
ctgcctcatgtcgcgcacggcgaag

SEQ ID NO: 695442 - DNA, 25 bp, Homo sapien
tgcctcatgtcgcgcacggcgaagc

SEQ ID NO: 695443 - DNA, 25 bp, Homo sapien
acgatggccgcgtctccagacttca

SEQ ID NO: 695444 - DNA, 25 bp, Homo sapien
cagagcgccggtcaatcttctcctt

SEQ ID NO: 695445 - DNA, 25 bp, Homo sapien
tctgccccgggtggttcaggatgat

SEQ ID NO: 695446 - DNA, 25 bp, Homo sapien
tccgcaaacttgcaggcgatgtggg

SEQ ID NO: 695447 - DNA, 25 bp, Homo sapien
catcaggcacatcggcggtgggcac

SEQ ID NO: 695448 - DNA, 25 bp, Homo sapien
cgagcggagccacaggcggccatca

SEQ ID NO: 695449 - DNA, 25 bp, Homo sapien
cacatcggcggtgggcaccgggagg

SEQ ID NO: 695450 - DNA, 25 bp, Homo sapien
tgcgagcggagccacaggcggccat

SEQ ID NO: 695451 - DNA, 25 bp, Homo sapien
tcctgcggcgggtcagacttgctgt

SEQ ID NO: 695452 - DNA, 25 bp, Homo sapien
cacattgaagccgacgttgtcgccg

SEQ ID NO: 695453 - DNA, 25 bp, Homo sapien
gagcctcgtggtgcatctccactga

SEQ ID NO: 695454 - DNA, 25 bp, Homo sapien
tgttcactggcgcaaaggtcaccac

SEQ ID NO: 695455 - DNA, 25 bp, Homo sapien
ttgcgttgccctccttacgctccac

SEQ ID NO: 695456 - DNA, 25 bp, Homo sapien
gttgccctccttacgctccaccttc

SEQ ID NO: 695457 - DNA, 25 bp, Homo sapien
agcagggacacgccgcttgcgttgc

SEQ ID NO: 695458 - DNA, 25 bp, Homo sapien
aggggcttgtccgtggggcgcgtgg

SEQ ID NO: 695459 - DNA, 25 bp, Homo sapien
gatgtaggcgctgacttccttgacg

SEQ ID NO: 695460 - DNA, 25 bp, Homo sapien
gatgagctgcttcacacccagcgtg

SEQ ID NO: 695461 - DNA, 25 bp, Homo sapien
gagtccattttgttcacgcccacga

SEQ ID NO: 695462 - DNA, 25 bp, Homo sapien
atgttgtcaccgtgccagccggaga

SEQ ID NO: 695463 - DNA, 25 bp, Homo sapien
tgcccggcaggggacacagtgagcc

SEQ ID NO: 695464 - DNA, 25 bp, Homo sapien
gcaggggacacagtgagccctgccc

SEQ ID NO: 695465 - DNA, 25 bp, Homo sapien
cccggcaggggacacagtgagccct

SEQ ID NO: 695466 - DNA, 25 bp, Homo sapien
aggggacacagtgagccctgccccg

SEQ ID NO: 695467 - DNA, 25 bp, Homo sapien
gtcccttgaagggtgcagcggcctc

SEQ ID NO: 695468 - DNA, 25 bp, Homo sapien
ccagtgtcccttgaagggtgcagcg

SEQ ID NO: 695469 - DNA, 25 bp, Homo sapien
cttgaagggtgcagcggcctctccc

SEQ ID NO: 695470 - DNA, 25 bp, Homo sapien
gcccccagtgtcccttgaagggtgc

SEQ ID NO: 695471 - DNA, 25 bp, Homo sapien
tgggatgtacccgtgatcatgttct

SEQ ID NO: 695472 - DNA, 25 bp, Homo sapien
ttcttgatgaagtcgcggtggccgg

SEQ ID NO: 695473 - DNA, 25 bp, Homo sapien
gggagatgtcgatggtgatgccgcg

SEQ ID NO: 695474 - DNA, 25 bp, Homo sapien
tgtcgatggtgatgccgcgctcacg

SEQ ID NO: 695475 - DNA, 25 bp, Homo sapien
cctcccaggagtgggcttctcccca

SEQ ID NO: 695476 - DNA, 25 bp, Homo sapien
tggcctccgccctcatcatccaggt

SEQ ID NO: 695477 - DNA, 25 bp, Homo sapien
atcatccaggtgagagctcccacag

SEQ ID NO: 695478 - DNA, 25 bp, Homo sapien
atccaggtgagagctcccacaggcc

SEQ ID NO: 695479 - DNA, 25 bp, Homo sapien
caatacctccgcatttgtagatgag

SEQ ID NO: 695480 - DNA, 25 bp, Homo sapien
cacgatgttgatgtgggtcttctcc

SEQ ID NO: 695481 - DNA, 25 bp, Homo sapien
tccacgtggccgatgaccacgatgt

SEQ ID NO: 695482 - DNA, 25 bp, Homo sapien
gcctccttctcgaacttctcaatgg

SEQ ID NO: 695483 - DNA, 25 bp, Homo sapien
gcgggacccggggtgctctggctca

SEQ ID NO: 695484 - DNA, 25 bp, Homo sapien
ccggggtgctctggctcagggcgag

SEQ ID NO: 695485 - DNA, 25 bp, Homo sapien
ggacccggggtgctctggctcaggg

SEQ ID NO: 695486 - DNA, 25 bp, Homo sapien
tgctctggctcagggcgaggggggc

SEQ ID NO: 695487 - DNA, 25 bp, Homo sapien
tgcagcacgccaatgcggaaccgcg

SEQ ID NO: 695488 - DNA, 25 bp, Homo sapien
cacctattgacggtggcggcgcagt

SEQ ID NO: 695489 - DNA, 25 bp, Homo sapien
tcagccagagggactggcggcgccg

SEQ ID NO: 695490 - DNA, 25 bp, Homo sapien
gggctgcaaagacggacgcgggagg

SEQ ID NO: 695491 - DNA, 25 bp, Homo sapien
tgcgtctgccccataggagtccagg

SEQ ID NO: 695492 - DNA, 25 bp, Homo sapien
ctgcgtctgccccataggagtccag

SEQ ID NO: 695493 - DNA, 25 bp, Homo sapien
cgtctgccccataggagtccaggga

SEQ ID NO: 695494 - DNA, 25 bp, Homo sapien
tctgccccataggagtccagggact

SEQ ID NO: 695495 - DNA, 25 bp, Homo sapien
gcatctgagtccctggtcacagtgc

SEQ ID NO: 695496 - DNA, 25 bp, Homo sapien
tgggcccctcttcttgcatctgagt

SEQ ID NO: 695497 - DNA, 25 bp, Homo sapien
tcacagtgccgtcctcaccaacaac

SEQ ID NO: 695498 - DNA, 25 bp, Homo sapien
cctggtcacagtgccgtcctcacca

SEQ ID NO: 695499 - DNA, 25 bp, Homo sapien
ctgggccccctggacggccaccagg

SEQ ID NO: 695500 - DNA, 25 bp, Homo sapien
ccctggacggccaccaggacaaggc

SEQ ID NO: 695501 - DNA, 25 bp, Homo sapien
tggacggccaccaggacaaggccca

SEQ ID NO: 695502 - DNA, 25 bp, Homo sapien
tgggccccctggacggccaccagga

SEQ ID NO: 695503 - DNA, 25 bp, Homo sapien
caccagcggcaacggtacctttgat

SEQ ID NO: 695504 - DNA, 25 bp, Homo sapien
tctggttaaactggcatccacaagc

SEQ ID NO: 695505 - DNA, 25 bp, Homo sapien
gattgtccccgcattgagcgttcct

SEQ ID NO: 695506 - DNA, 25 bp, Homo sapien
tcacggtatatacattgggcctgtc

SEQ ID NO: 695507 - DNA, 25 bp, Homo sapien
taataaggaactttcgctgagcacc

SEQ ID NO: 695508 - DNA, 25 bp, Homo sapien
caatatacatactggacgcctgcct

SEQ ID NO: 695509 - DNA, 25 bp, Homo sapien
ggaagcatcttaccctcaaggtggc

SEQ ID NO: 695510 - DNA, 25 bp, Homo sapien
ccacaggagttagctatgcccgtct

SEQ ID NO: 695511 - DNA, 25 bp, Homo sapien
accagggccgtggtgtgaacacacc

SEQ ID NO: 695512 - DNA, 25 bp, Homo sapien
gccgtggtgtgaacacaccactctc

SEQ ID NO: 695513 - DNA, 25 bp, Homo sapien
gtggtgacaccatctaagaggcact

SEQ ID NO: 695514 - DNA, 25 bp, Homo sapien
tttggcagaactctcacctcgcccc

SEQ ID NO: 695515 - DNA, 25 bp, Homo sapien
ccgtcaatctcatccctgccaatga

SEQ ID NO: 695516 - DNA, 25 bp, Homo sapien
cgtcaatctcatccctgccaatgat

SEQ ID NO: 695517 - DNA, 25 bp, Homo sapien
aatctcatccctgccaatgatcaca

SEQ ID NO: 695518 - DNA, 25 bp, Homo sapien
tcaatctcatccctgccaatgatca

SEQ ID NO: 695519 - DNA, 25 bp, Homo sapien
ctcagccactggcaagagcaggcag

SEQ ID NO: 695520 - DNA, 25 bp, Homo sapien
ggccagcgtcgtctgcacttcagag

SEQ ID NO: 695521 - DNA, 25 bp, Homo sapien
tctgtctgcggccactgtcatggga

SEQ ID NO: 695522 - DNA, 25 bp, Homo sapien
cacttcagaggagacgagaaccagg

SEQ ID NO: 695523 - DNA, 25 bp, Homo sapien
aatgaacacacagagcggtgcaggg

SEQ ID NO: 695524 - DNA, 25 bp, Homo sapien
gcccagccaggaccgggtgtataaa

SEQ ID NO: 695525 - DNA, 25 bp, Homo sapien
ctcgatctccggaacaacacgggca

SEQ ID NO: 695526 - DNA, 25 bp, Homo sapien
gacagagtacggcatccgttggcct

SEQ ID NO: 695527 - DNA, 25 bp, Homo sapien
atccgccccgctctccgactgggcc

SEQ ID NO: 695528 - DNA, 25 bp, Homo sapien
cgctctccgactgggccccgcctcc

SEQ ID NO: 695529 - DNA, 25 bp, Homo sapien
ctcacccgcccaaatccgccccgct

SEQ ID NO: 695530 - DNA, 25 bp, Homo sapien
aaatccgccccgctctccgactggg

SEQ ID NO: 695531 - DNA, 25 bp, Homo sapien
cctcccgttcatggccacggtgttg

SEQ ID NO: 695532 - DNA, 25 bp, Homo sapien
aggaagcagcccggcggtcagtcca

SEQ ID NO: 695533 - DNA, 25 bp, Homo sapien
ggagtccgcagagcactcggaacct

SEQ ID NO: 695534 - DNA, 25 bp, Homo sapien
gccagcttctttttcgggaagtcca

SEQ ID NO: 695535 - DNA, 25 bp, Homo sapien
gcatcaacacagcagacaccaaaaa

SEQ ID NO: 695536 - DNA, 25 bp, Homo sapien
gctgcagcaagcagaccttcgcatc

SEQ ID NO: 695537 - DNA, 25 bp, Homo sapien
tgacacctggaactgtgcacctggc

SEQ ID NO: 695538 - DNA, 25 bp, Homo sapien
ccctgtaaactaggcggctgcagca

SEQ ID NO: 695539 - DNA, 25 bp, Homo sapien
tccaacagacccttgaacaaaagac

SEQ ID NO: 695540 - DNA, 25 bp, Homo sapien
caaaagacagattaaactgggcgca

SEQ ID NO: 695541 - DNA, 25 bp, Homo sapien
actatgcacgagttaaatggagaac

SEQ ID NO: 695542 - DNA, 25 bp, Homo sapien
gaactgaacatacatgctgagtcct

SEQ ID NO: 695543 - DNA, 25 bp, Homo sapien
caccattcctcatggagtcactgaa

SEQ ID NO: 695544 - DNA, 25 bp, Homo sapien
tctagcccggtttgctgtctggagg

SEQ ID NO: 695545 - DNA, 25 bp, Homo sapien
tggaggttttgtcgcccacctgtgg

SEQ ID NO: 695546 - DNA, 25 bp, Homo sapien
gtacagacggctttcgtgcccaggc

SEQ ID NO: 695547 - DNA, 25 bp, Homo sapien
caaggcacacacgatggagtaagga

SEQ ID NO: 695548 - DNA, 25 bp, Homo sapien
caaatttacatgagcgtcccgagcc

SEQ ID NO: 695549 - DNA, 25 bp, Homo sapien
caaaatcaggtgcaaaggaggcagc

SEQ ID NO: 695550 - DNA, 25 bp, Homo sapien
cacagacagtagagaagggcccttg

SEQ ID NO: 695551 - DNA, 25 bp, Homo sapien
cttgtgcacgctgggcgggcactcc

SEQ ID NO: 695552 - DNA, 25 bp, Homo sapien
agggcagggcatgcggtagccggcg

SEQ ID NO: 695553 - DNA, 25 bp, Homo sapien
ggtccctgcaccagcatgtcagcat

SEQ ID NO: 695554 - DNA, 25 bp, Homo sapien
agggccttgaagcagggtctctgct

SEQ ID NO: 695555 - DNA, 25 bp, Homo sapien
ggtgctcagagaatggtgcaggtgt

SEQ ID NO: 695556 - DNA, 25 bp, Homo sapien
ctgcggccgacagggatgagaagag

SEQ ID NO: 695557 - DNA, 25 bp, Homo sapien
caggtgtggagttcaggcgatggcc

SEQ ID NO: 695558 - DNA, 25 bp, Homo sapien
agctgccatgccttggcgccaccca

SEQ ID NO: 695559 - DNA, 25 bp, Homo sapien
gaacatctcatgcaggagaatccca

SEQ ID NO: 695560 - DNA, 25 bp, Homo sapien
ggtagggcacctgacccctgctgaa

SEQ ID NO: 695561 - DNA, 25 bp, Homo sapien
tcggatttggtggagtaatggcctc

SEQ ID NO: 695562 - DNA, 25 bp, Homo sapien
taatggcctcgggagagcgcttcag

SEQ ID NO: 695563 - DNA, 25 bp, Homo sapien
ccgacgaggatgttcctggcggcca

SEQ ID NO: 695564 - DNA, 25 bp, Homo sapien
tgcgactccaggtaacacatgccct

SEQ ID NO: 695565 - DNA, 25 bp, Homo sapien
ttgcagagggtgttttccccgacga

SEQ ID NO: 695566 - DNA, 25 bp, Homo sapien
ggtcccggtggatgtaattctgcga

SEQ ID NO: 695567 - DNA, 25 bp, Homo sapien
tcttcatggcctggatctccgactg

SEQ ID NO: 695568 - DNA, 25 bp, Homo sapien
gtgtttgtgccgcagcttcttcatg

SEQ ID NO: 695569 - DNA, 25 bp, Homo sapien
tggcctggatctccgactgcagcat

SEQ ID NO: 695570 - DNA, 25 bp, Homo sapien
ccacggcgtacagcgccaggatgtg

SEQ ID NO: 695571 - DNA, 25 bp, Homo sapien
ggtggccacccgatttcttcctgtg

SEQ ID NO: 695572 - DNA, 25 bp, Homo sapien
tacccatttccagtgatctatttta

SEQ ID NO: 695573 - DNA, 25 bp, Homo sapien
cctggctcccgaggccacgaaatgg

SEQ ID NO: 695574 - DNA, 25 bp, Homo sapien
ccacgaaatggcagatgcagccggc

SEQ ID NO: 695575 - DNA, 25 bp, Homo sapien
ctctcgcatggacgctgtgggtgct

SEQ ID NO: 695576 - DNA, 25 bp, Homo sapien
aaagggaaccactctcgcatggacg

SEQ ID NO: 695577 - DNA, 25 bp, Homo sapien
aaaaacataggtgcaattgaaaggg

SEQ ID NO: 695578 - DNA, 25 bp, Homo sapien
cataggtgcaattgaaagggaacca

SEQ ID NO: 695579 - DNA, 25 bp, Homo sapien
cttaatggccacctggacccggtct

SEQ ID NO: 695580 - DNA, 25 bp, Homo sapien
gcttcctgcagagcgtgaactcctc

SEQ ID NO: 695581 - DNA, 25 bp, Homo sapien
caaagtagccggaccccagcttcct

SEQ ID NO: 695582 - DNA, 25 bp, Homo sapien
gaaatcaccttaatggccacctgga

SEQ ID NO: 695583 - DNA, 25 bp, Homo sapien
ctctgggccctgtggtagttcacaa

SEQ ID NO: 695584 - DNA, 25 bp, Homo sapien
tgtagtgccgcacagcctgcgtgtc

SEQ ID NO: 695585 - DNA, 25 bp, Homo sapien
aggacaccgcctcgttcaggtgcag

SEQ ID NO: 695586 - DNA, 25 bp, Homo sapien
ggctgaggaaggacaccgcctcgtt

SEQ ID NO: 695587 - DNA, 25 bp, Homo sapien
acaggacgtagtcggcactcggctt

SEQ ID NO: 695588 - DNA, 25 bp, Homo sapien
ggacgtagtcggcactcggcttctc

SEQ ID NO: 695589 - DNA, 25 bp, Homo sapien
gtagtcggcactcggcttctcgctg

SEQ ID NO: 695590 - DNA, 25 bp, Homo sapien
ccgacaggacgtagtcggcactcgg

SEQ ID NO: 695591 - DNA, 25 bp, Homo sapien
aggaaggcgcccgtggcgttgccct

SEQ ID NO: 695592 - DNA, 25 bp, Homo sapien
gacgcacagcttccgagcgggagat

SEQ ID NO: 695593 - DNA, 25 bp, Homo sapien
tgcagccgacgcacagcttccgagc

SEQ ID NO: 695594 - DNA, 25 bp, Homo sapien
cctgatcaggaaggcgcccgtggcg

SEQ ID NO: 695595 - DNA, 25 bp, Homo sapien
tcactaacgaggtcgtgggtctgcg

SEQ ID NO: 695596 - DNA, 25 bp, Homo sapien
caatcactgatgagaaacgcgggat

SEQ ID NO: 695597 - DNA, 25 bp, Homo sapien
ctgcgcgtgaccctgctaacgaggt

SEQ ID NO: 695598 - DNA, 25 bp, Homo sapien
ggagctaaccctacacagcctgtga

SEQ ID NO: 695599 - DNA, 25 bp, Homo sapien
gcccacatacttggggcccaggtga

SEQ ID NO: 695600 - DNA, 25 bp, Homo sapien
cacgtggaagacgtcccccgcgcgg

SEQ ID NO: 695601 - DNA, 25 bp, Homo sapien
ccaggtagttgtggggcacatagcc

SEQ ID NO: 695602 - DNA, 25 bp, Homo sapien
gctcctcgtccgtccgggacttgaa

SEQ ID NO: 695603 - DNA, 25 bp, Homo sapien
ggcgggcgggcgcagcggcaggacc

SEQ ID NO: 695604 - DNA, 25 bp, Homo sapien
cggcaggaccaggctgtggcccagc

SEQ ID NO: 695605 - DNA, 25 bp, Homo sapien
cagcggcaggaccaggctgtggccc

SEQ ID NO: 695606 - DNA, 25 bp, Homo sapien
gcgggcgggcgcagcggcaggacca

SEQ ID NO: 695607 - DNA, 25 bp, Homo sapien
ccgtgagtctatgtccaggaagcct

SEQ ID NO: 695608 - DNA, 25 bp, Homo sapien
gagttcggacgtgcaggactttcag

SEQ ID NO: 695609 - DNA, 25 bp, Homo sapien
gactttcagtctaagccacaccagg

SEQ ID NO: 695610 - DNA, 25 bp, Homo sapien
gctcatagatttctgggcagcccag

SEQ ID NO: 695611 - DNA, 25 bp, Homo sapien
agaccggcatcccttcgagttggcg

SEQ ID NO: 695612 - DNA, 25 bp, Homo sapien
cattttctagccacgtggacccgta

SEQ ID NO: 695613 - DNA, 25 bp, Homo sapien
ggcctttggctcttcaccctgggag

SEQ ID NO: 695614 - DNA, 25 bp, Homo sapien
gtcatttccacaaacccaagctggg

SEQ ID NO: 695615 - DNA, 25 bp, Homo sapien
cagcgtggcgaaggagggccgttcc

SEQ ID NO: 695616 - DNA, 25 bp, Homo sapien
gggtggcatctgtggatggcgtgca

SEQ ID NO: 695617 - DNA, 25 bp, Homo sapien
cgtggcgaaggagggccgttcctcg

SEQ ID NO: 695618 - DNA, 25 bp, Homo sapien
tggcatctgtggatggcgtgcagct

SEQ ID NO: 695619 - DNA, 25 bp, Homo sapien
tgcagcgtctcgtggttggtcatcc

SEQ ID NO: 695620 - DNA, 25 bp, Homo sapien
gcagccggtaccctcgcatgatctg

SEQ ID NO: 695621 - DNA, 25 bp, Homo sapien
cggtaccctcgcatgatctgctgca

SEQ ID NO: 695622 - DNA, 25 bp, Homo sapien
tccagcatgagcacgtagacctccg

SEQ ID NO: 695623 - DNA, 25 bp, Homo sapien
cgtccaggcccggggccagtgactc

SEQ ID NO: 695624 - DNA, 25 bp, Homo sapien
ccgacagcgtccaggcccggggcca

SEQ ID NO: 695625 - DNA, 25 bp, Homo sapien
cagcgtccaggcccggggccagtga

SEQ ID NO: 695626 - DNA, 25 bp, Homo sapien
gggcagagcctgcatcctccctctg

SEQ ID NO: 695627 - DNA, 25 bp, Homo sapien
actggccataggtgaaaacctcgtg

SEQ ID NO: 695628 - DNA, 25 bp, Homo sapien
gaagacacgataattggccgcctca

SEQ ID NO: 695629 - DNA, 25 bp, Homo sapien
cgtgcagcaggacgccgaaggacca

SEQ ID NO: 695630 - DNA, 25 bp, Homo sapien
acttgaccgggatcttggagctgct

SEQ ID NO: 695631 - DNA, 25 bp, Homo sapien
gggtcaggggcccagagcctccgct

SEQ ID NO: 695632 - DNA, 25 bp, Homo sapien
caccccctctgggtcaggggcccag

SEQ ID NO: 695633 - DNA, 25 bp, Homo sapien
cctctgggtcaggggcccagagcct

SEQ ID NO: 695634 - DNA, 25 bp, Homo sapien
gtcaggggcccagagcctccgctga

SEQ ID NO: 695635 - DNA, 25 bp, Homo sapien
tcgtccacgagcacgttccgggcgg

SEQ ID NO: 695636 - DNA, 25 bp, Homo sapien
gtgcacaacgcgctgctcctccagg

SEQ ID NO: 695637 - DNA, 25 bp, Homo sapien
ttgcaggccaggccgtcgtccacga

SEQ ID NO: 695638 - DNA, 25 bp, Homo sapien
tcccggtgcacaacgcgctgctcct

SEQ ID NO: 695639 - DNA, 25 bp, Homo sapien
tgtcacattagaccaaggctggtga

SEQ ID NO: 695640 - DNA, 25 bp, Homo sapien
gctcccggtagagaggcccggttca

SEQ ID NO: 695641 - DNA, 25 bp, Homo sapien
agaccagacagggatgggatctgca

SEQ ID NO: 695642 - DNA, 25 bp, Homo sapien
gctgggctgggtctatgtcacatta

SEQ ID NO: 695643 - DNA, 25 bp, Homo sapien
tctggatctccttggcgaggtcagt

SEQ ID NO: 695644 - DNA, 25 bp, Homo sapien
gttccccttgcgcatgagttccgtg

SEQ ID NO: 695645 - DNA, 25 bp, Homo sapien
gagttccgtgacgatgtacacaggc

SEQ ID NO: 695646 - DNA, 25 bp, Homo sapien
gagcacactgcgtgcagccggatga

SEQ ID NO: 695647 - DNA, 25 bp, Homo sapien
aattcggagtgtggccgctcccaca

SEQ ID NO: 695648 - DNA, 25 bp, Homo sapien
accttgatcgccacgggcagggagc

SEQ ID NO: 695649 - DNA, 25 bp, Homo sapien
cctcccaagggcgaattcggagtgt

SEQ ID NO: 695650 - DNA, 25 bp, Homo sapien
tgacttgatgaccttgatcgccacg

SEQ ID NO: 695651 - DNA, 25 bp, Homo sapien
ggaaagagccgtcccttctgcaggt

SEQ ID NO: 695652 - DNA, 25 bp, Homo sapien
cttccagttggccttgtagtaggtg

SEQ ID NO: 695653 - DNA, 25 bp, Homo sapien
tggagacccggtagtggcagacctt

SEQ ID NO: 695654 - DNA, 25 bp, Homo sapien
ttctggatcagcttccagttggcct

SEQ ID NO: 695655 - DNA, 25 bp, Homo sapien
tgagtagcccccgaggctgctctcg

SEQ ID NO: 695656 - DNA, 25 bp, Homo sapien
ctgctgtgcctgggtccgactgacc

SEQ ID NO: 695657 - DNA, 25 bp, Homo sapien
acagtgagtagcccccgaggctgct

SEQ ID NO: 695658 - DNA, 25 bp, Homo sapien
ctgggtccgactgaccccgctaaag

SEQ ID NO: 695659 - DNA, 25 bp, Homo sapien
ctgcgtgcgaagatgtagccgcccc

SEQ ID NO: 695660 - DNA, 25 bp, Homo sapien
gtcatagagcgcaaggaagagctga

SEQ ID NO: 695661 - DNA, 25 bp, Homo sapien
cacaccgcgccgtgaagtcatagag

SEQ ID NO: 695662 - DNA, 25 bp, Homo sapien
gctggcccgaaagcctgcgtgcgaa

SEQ ID NO: 695663 - DNA, 25 bp, Homo sapien
cggtgggacccggtgtccagcgctc

SEQ ID NO: 695664 - DNA, 25 bp, Homo sapien
ccggccctgcggtcactcagaggtc

SEQ ID NO: 695665 - DNA, 25 bp, Homo sapien
cccggaagaggaactggcagggccg

SEQ ID NO: 695666 - DNA, 25 bp, Homo sapien
gcccgagggccatgggagcccgcga

SEQ ID NO: 695667 - DNA, 25 bp, Homo sapien
ggccaggtgcggagggaccccagtc

SEQ ID NO: 695668 - DNA, 25 bp, Homo sapien
agaatagacatggtcttcaaggcag

SEQ ID NO: 695669 - DNA, 25 bp, Homo sapien
tggcctcagggactttggacttggc

SEQ ID NO: 695670 - DNA, 25 bp, Homo sapien
agggcccgtccagcacaccaacggg

SEQ ID NO: 695671 - DNA, 25 bp, Homo sapien
ccgaacactcagtccagggtggaag

SEQ ID NO: 695672 - DNA, 25 bp, Homo sapien
tacaggtggcgtccaaaggtcaaag

SEQ ID NO: 695673 - DNA, 25 bp, Homo sapien
tgagcgtgcgagaaacatacagccg

SEQ ID NO: 695674 - DNA, 25 bp, Homo sapien
gctgaggtctctgttccagtaacag

SEQ ID NO: 695675 - DNA, 25 bp, Homo sapien
tccttgcactggtcccaaggaagcc

SEQ ID NO: 695676 - DNA, 25 bp, Homo sapien
cctgagaggtgttcctgtccccaga

SEQ ID NO: 695677 - DNA, 25 bp, Homo sapien
tggtcccaaggaagcccctcttggc

SEQ ID NO: 695678 - DNA, 25 bp, Homo sapien
agcagaacttccttgcactggtccc

SEQ ID NO: 695679 - DNA, 25 bp, Homo sapien
tagttggcctcctgcagacgcgcac

SEQ ID NO: 695680 - DNA, 25 bp, Homo sapien
tcaggaaggcatagttggcctcctg

SEQ ID NO: 695681 - DNA, 25 bp, Homo sapien
gaaggcatagttggcctcctgcaga

SEQ ID NO: 695682 - DNA, 25 bp, Homo sapien
catagttggcctcctgcagacgcgc

SEQ ID NO: 695683 - DNA, 25 bp, Homo sapien
tgagcctcgcagaagtccaggaggc

SEQ ID NO: 695684 - DNA, 25 bp, Homo sapien
ggtctgctgagcctcgcagaagtcc

SEQ ID NO: 695685 - DNA, 25 bp, Homo sapien
cagaagtccaggaggctacgccaga

SEQ ID NO: 695686 - DNA, 25 bp, Homo sapien
agaagtccaggaggctacgccagag

SEQ ID NO: 695687 - DNA, 25 bp, Homo sapien
ctgtgttcccaccctggaagagccc

SEQ ID NO: 695688 - DNA, 25 bp, Homo sapien
tgttcccaccctggaagagcccagc

SEQ ID NO: 695689 - DNA, 25 bp, Homo sapien
ttcccaccctggaagagcccagccc

SEQ ID NO: 695690 - DNA, 25 bp, Homo sapien
gtgttcccaccctggaagagcccag

SEQ ID NO: 695691 - DNA, 25 bp, Homo sapien
gcccagaaacttcttgagccagctc

SEQ ID NO: 695692 - DNA, 25 bp, Homo sapien
gcacaggtgcggacggtgctcacca

SEQ ID NO: 695693 - DNA, 25 bp, Homo sapien
ggtccaggtcgctcttggcacaggt

SEQ ID NO: 695694 - DNA, 25 bp, Homo sapien
gtccacaacgaagcccagaaacttc

SEQ ID NO: 695695 - DNA, 25 bp, Homo sapien
gaggacacggccaccccggcgatgc

SEQ ID NO: 695696 - DNA, 25 bp, Homo sapien
cggcgatgccctctcgccgaagggc

SEQ ID NO: 695697 - DNA, 25 bp, Homo sapien
ggccaccccggcgatgccctctcgc

SEQ ID NO: 695698 - DNA, 25 bp, Homo sapien
caccccggcgatgccctctcgccga

SEQ ID NO: 695699 - DNA, 25 bp, Homo sapien
ggcgtgaggacggcgatgtcctggg

SEQ ID NO: 695700 - DNA, 25 bp, Homo sapien
atctcagaggcctgcgcgttgtagg

SEQ ID NO: 695701 - DNA, 25 bp, Homo sapien
tcctggggctctacggtcctcccca

SEQ ID NO: 695702 - DNA, 25 bp, Homo sapien
tgctgatctcagaggcctgcgcgtt

SEQ ID NO: 695703 - DNA, 25 bp, Homo sapien
ggagttctcattcccttcgtccgtg

SEQ ID NO: 695704 - DNA, 25 bp, Homo sapien
agttctcattcccttcgtccgtgga

SEQ ID NO: 695705 - DNA, 25 bp, Homo sapien
ttctcattcccttcgtccgtggaca

SEQ ID NO: 695706 - DNA, 25 bp, Homo sapien
ccttggagttctcattcccttcgtc

SEQ ID NO: 695707 - DNA, 25 bp, Homo sapien
gcttgctcttgtagaacgccacaga

SEQ ID NO: 695708 - DNA, 25 bp, Homo sapien
cttgtagaacgccacagaggggaag

SEQ ID NO: 695709 - DNA, 25 bp, Homo sapien
tgctcttgtagaacgccacagaggg

SEQ ID NO: 695710 - DNA, 25 bp, Homo sapien
tcttgtagaacgccacagaggggaa

SEQ ID NO: 695711 - DNA, 25 bp, Homo sapien
tgagtgtccagcatatgtgcgtcct

SEQ ID NO: 695712 - DNA, 25 bp, Homo sapien
tcattcttgaccacaggccgcagct

SEQ ID NO: 695713 - DNA, 25 bp, Homo sapien
gtccagacccaggttttgcagccgc

SEQ ID NO: 695714 - DNA, 25 bp, Homo sapien
tcgtggtaccgctcgaacagagacc

SEQ ID NO: 695715 - DNA, 25 bp, Homo sapien
tgcctgcctcgtcaacaaggatctg

SEQ ID NO: 695716 - DNA, 25 bp, Homo sapien
atgagggtttcaggttccgtggcca

SEQ ID NO: 695717 - DNA, 25 bp, Homo sapien
cagaggatgacctcatgccggtcca

SEQ ID NO: 695718 - DNA, 25 bp, Homo sapien
caaggatctgcctcacgtccaggat

SEQ ID NO: 695719 - DNA, 25 bp, Homo sapien
gccggatccggtggtgcagggtgat

SEQ ID NO: 695720 - DNA, 25 bp, Homo sapien
tctgcagccgggtgtcaaaggcctt

SEQ ID NO: 695721 - DNA, 25 bp, Homo sapien
cttgatttccgacgagtaagggttg

SEQ ID NO: 695722 - DNA, 25 bp, Homo sapien
aaggccttgatttccgacgagtaag

SEQ ID NO: 695723 - DNA, 25 bp, Homo sapien
ttcctgctgcccacacgcggcactg

SEQ ID NO: 695724 - DNA, 25 bp, Homo sapien
acgcggcactgggaactcgctggcc

SEQ ID NO: 695725 - DNA, 25 bp, Homo sapien
gcctgctcactgtacacacggaggg

SEQ ID NO: 695726 - DNA, 25 bp, Homo sapien
tgaggctctggttcggcctcccctc

SEQ ID NO: 695727 - DNA, 25 bp, Homo sapien
gccgcagtacaagatgcagggaccc

SEQ ID NO: 695728 - DNA, 25 bp, Homo sapien
gatgtggaggcccacgatcgtcttc

SEQ ID NO: 695729 - DNA, 25 bp, Homo sapien
tgccaggacatccaccgacttgttg

SEQ ID NO: 695730 - DNA, 25 bp, Homo sapien
tgatttatgaaaccagaatacgatg

SEQ ID NO: 695731 - DNA, 25 bp, Homo sapien
aatgaccgtgaaaggcttctccaga

SEQ ID NO: 695732 - DNA, 25 bp, Homo sapien
tgttgtaggtctgccgctccaggaa

SEQ ID NO: 695733 - DNA, 25 bp, Homo sapien
ctccctgaccgccacgttctggctg

SEQ ID NO: 695734 - DNA, 25 bp, Homo sapien
ccctgaatgaccgtgaaaggcttct

SEQ ID NO: 695735 - DNA, 25 bp, Homo sapien
ctccctgagcactcatgcagggtgg

SEQ ID NO: 695736 - DNA, 25 bp, Homo sapien
cagcctccctgagcactcatgcagg

SEQ ID NO: 695737 - DNA, 25 bp, Homo sapien
gcctccctgagcactcatgcagggt

SEQ ID NO: 695738 - DNA, 25 bp, Homo sapien
tccctgagcactcatgcagggtggg

SEQ ID NO: 695739 - DNA, 25 bp, Homo sapien
gggacgcctcctctagtccacgcac

SEQ ID NO: 695740 - DNA, 25 bp, Homo sapien
tcctctagtccacgcacggcttcct

SEQ ID NO: 695741 - DNA, 25 bp, Homo sapien
cggcccagtgcgatgctggtgacca

SEQ ID NO: 695742 - DNA, 25 bp, Homo sapien
ggctgcgggacaggccggcccagtg

SEQ ID NO: 695743 - DNA, 25 bp, Homo sapien
agaggtgcacccgtctgggagcctc

SEQ ID NO: 695744 - DNA, 25 bp, Homo sapien
ttgggcagcagctcaacggtgaaca

SEQ ID NO: 695745 - DNA, 25 bp, Homo sapien
cggaaccttctccatgcccatgtgg

SEQ ID NO: 695746 - DNA, 25 bp, Homo sapien
cccatgtggtggacgaagaggtgca

SEQ ID NO: 695747 - DNA, 25 bp, Homo sapien
tgccggtctgcccggcgctcctggt

SEQ ID NO: 695748 - DNA, 25 bp, Homo sapien
agtcctgcgtctgcccgtgggccac

SEQ ID NO: 695749 - DNA, 25 bp, Homo sapien
cccggcgctcctggtcccagtcctg

SEQ ID NO: 695750 - DNA, 25 bp, Homo sapien
tggtcccagtcctgcgtctgcccgt

SEQ ID NO: 695751 - DNA, 25 bp, Homo sapien
agaatggttcccacacgcaggcgta

SEQ ID NO: 695752 - DNA, 25 bp, Homo sapien
tgacggagtcattctcggcaaccgc

SEQ ID NO: 695753 - DNA, 25 bp, Homo sapien
catcgatgtccctggcagagtaggc

SEQ ID NO: 695754 - DNA, 25 bp, Homo sapien
gatgtcggcacagttctcctcgagg

SEQ ID NO: 695755 - DNA, 25 bp, Homo sapien
tgtaccagtccacctgcagcgagta

SEQ ID NO: 695756 - DNA, 25 bp, Homo sapien
tgctcatagaagcagtcggaccgca

SEQ ID NO: 695757 - DNA, 25 bp, Homo sapien
catctgttcgtagtcctgggtgcgg

SEQ ID NO: 695758 - DNA, 25 bp, Homo sapien
tgcatgtcgtccgtggtgaccaagt

SEQ ID NO: 695759 - DNA, 25 bp, Homo sapien
gcaccccgtccctgggcacgaagct

SEQ ID NO: 695760 - DNA, 25 bp, Homo sapien
ggcatagaacgcagcgccctgcctt

SEQ ID NO: 695761 - DNA, 25 bp, Homo sapien
cacatcagtgatgtgcacagccacc

SEQ ID NO: 695762 - DNA, 25 bp, Homo sapien
ctgggcacgaagctggccacatcag

SEQ ID NO: 695763 - DNA, 25 bp, Homo sapien
tgcccagcgggtagtagaagccttg

SEQ ID NO: 695764 - DNA, 25 bp, Homo sapien
caggtctcggacactgagggcatca

SEQ ID NO: 695765 - DNA, 25 bp, Homo sapien
caatttggacccagaagagccggct

SEQ ID NO: 695766 - DNA, 25 bp, Homo sapien
cacgaagatcttggtcacggagcca

SEQ ID NO: 695767 - DNA, 25 bp, Homo sapien
gccttgtctcccgaaaggagctgca

SEQ ID NO: 695768 - DNA, 25 bp, Homo sapien
ctcgggcgccttgtctcccgaaagg

SEQ ID NO: 695769 - DNA, 25 bp, Homo sapien
ggcgccttgtctcccgaaaggagct

SEQ ID NO: 695770 - DNA, 25 bp, Homo sapien
ccttgtctcccgaaaggagctgcac

SEQ ID NO: 695771 - DNA, 25 bp, Homo sapien
atggggcccgaggaggcatcgtcca

SEQ ID NO: 695772 - DNA, 25 bp, Homo sapien
ccacagtccaggcggcccctgacct

SEQ ID NO: 695773 - DNA, 25 bp, Homo sapien
tcgtccagcgggatggctgacgccc

SEQ ID NO: 695774 - DNA, 25 bp, Homo sapien
gcacctcatccccggcgaaggccat

SEQ ID NO: 695775 - DNA, 25 bp, Homo sapien
gcgtgcagcagcttccgtagcgcag

SEQ ID NO: 695776 - DNA, 25 bp, Homo sapien
tcgggcctggcgacagtgtccagca

SEQ ID NO: 695777 - DNA, 25 bp, Homo sapien
tctcgtccagaagctcccgtaggat

SEQ ID NO: 695778 - DNA, 25 bp, Homo sapien
gcaggttctcgtacagccgggcctg

SEQ ID NO: 695779 - DNA, 25 bp, Homo sapien
tcctcggccaggtcccctactggct

SEQ ID NO: 695780 - DNA, 25 bp, Homo sapien
gggcaccacgtcttccttcactgcg

SEQ ID NO: 695781 - DNA, 25 bp, Homo sapien
tgcgctgtggttgccgtgatgtcac

SEQ ID NO: 695782 - DNA, 25 bp, Homo sapien
gtgatgtcacgggatgctgggctca

SEQ ID NO: 695783 - DNA, 25 bp, Homo sapien
tcaggacggtgttgagcacgcgggc

SEQ ID NO: 695784 - DNA, 25 bp, Homo sapien
acgcgggcgtcggtgaagaactcag

SEQ ID NO: 695785 - DNA, 25 bp, Homo sapien
gctccacgcactcacggatgaagct

SEQ ID NO: 695786 - DNA, 25 bp, Homo sapien
gaagctctcccagagcttgccgcag

SEQ ID NO: 695787 - DNA, 25 bp, Homo sapien
ctcaaaactgccgacagacacctgg

SEQ ID NO: 695788 - DNA, 25 bp, Homo sapien
aactgccgacagacacctggcctag

SEQ ID NO: 695789 - DNA, 25 bp, Homo sapien
tgccgacagacacctggcctaggtc

SEQ ID NO: 695790 - DNA, 25 bp, Homo sapien
aaaactgccgacagacacctggcct

SEQ ID NO: 695791 - DNA, 25 bp, Homo sapien
gccacgtagaagtgccgcgagatga

SEQ ID NO: 695792 - DNA, 25 bp, Homo sapien
tagttctcgtggaagaccaggcggc

SEQ ID NO: 695793 - DNA, 25 bp, Homo sapien
cgtgggaaacgacacagatgcacct

SEQ ID NO: 695794 - DNA, 25 bp, Homo sapien
tgacaatggcgtccgtgcagcggta

SEQ ID NO: 695795 - DNA, 25 bp, Homo sapien
tgctgtccgctaaagcacctactgt

SEQ ID NO: 695796 - DNA, 25 bp, Homo sapien
cagtgctgtccgctaaagcacctac

SEQ ID NO: 695797 - DNA, 25 bp, Homo sapien
cagcccttgtctggctgtcagaggt

SEQ ID NO: 695798 - DNA, 25 bp, Homo sapien
tgagcacagcccttgtctggctgtc

SEQ ID NO: 695799 - DNA, 25 bp, Homo sapien
agcggctcctctgacactgcagaca

SEQ ID NO: 695800 - DNA, 25 bp, Homo sapien
cacggagggcttcaggcaacacctg

SEQ ID NO: 695801 - DNA, 25 bp, Homo sapien
agcccgggacgtatggccactgtcc

SEQ ID NO: 695802 - DNA, 25 bp, Homo sapien
caatccagaaatcagcccgggacgt

SEQ ID NO: 695803 - DNA, 25 bp, Homo sapien
cggctacagggagtgcagaatcaga

SEQ ID NO: 695804 - DNA, 25 bp, Homo sapien
cccaaagctggtcggctacagggag

SEQ ID NO: 695805 - DNA, 25 bp, Homo sapien
caaagcccaaagctggtcggctaca

SEQ ID NO: 695806 - DNA, 25 bp, Homo sapien
gagctgggcctgataaagccaaagc

SEQ ID NO: 695807 - DNA, 25 bp, Homo sapien
gaagagcatgttcagcgctggcgtc

SEQ ID NO: 695808 - DNA, 25 bp, Homo sapien
aggccatggccagcgtgtaggtctt

SEQ ID NO: 695809 - DNA, 25 bp, Homo sapien
gcacctcgaacaccgtattgtcggg

SEQ ID NO: 695810 - DNA, 25 bp, Homo sapien
gaaggtcatcgggtcaatctggaac

SEQ ID NO: 695811 - DNA, 25 bp, Homo sapien
tcaaaggtgccgaacgaggcagcct

SEQ ID NO: 695812 - DNA, 25 bp, Homo sapien
cacgctgctgcggttgaactccagg

SEQ ID NO: 695813 - DNA, 25 bp, Homo sapien
gagcgccagattcctgcagggtcct

SEQ ID NO: 695814 - DNA, 25 bp, Homo sapien
gaaactggtgcatcctctgccgata

SEQ ID NO: 695815 - DNA, 25 bp, Homo sapien
tctgcccgggctgaagtcaccactt

SEQ ID NO: 695816 - DNA, 25 bp, Homo sapien
tactccatagaataaccctgccaag

SEQ ID NO: 695817 - DNA, 25 bp, Homo sapien
gagcggcagtgcctcggtattagct

SEQ ID NO: 695818 - DNA, 25 bp, Homo sapien
atgacccaggctgttgacgtctgcc

SEQ ID NO: 695819 - DNA, 25 bp, Homo sapien
gagtggacggcaaacgtccagctgt

SEQ ID NO: 695820 - DNA, 25 bp, Homo sapien
aacgtccagctgtactgggtcttcc

SEQ ID NO: 695821 - DNA, 25 bp, Homo sapien
aaacgtccagctgtactgggtcttc

SEQ ID NO: 695822 - DNA, 25 bp, Homo sapien
ctcagagtggacggcaaacgtccag

SEQ ID NO: 695823 - DNA, 25 bp, Homo sapien
ggttgcaggtgacacgcactccatc

SEQ ID NO: 695824 - DNA, 25 bp, Homo sapien
ctggttgcaggtgacacgcactcca

SEQ ID NO: 695825 - DNA, 25 bp, Homo sapien
gggctggttgcaggtgacacgcact

SEQ ID NO: 695826 - DNA, 25 bp, Homo sapien
ggctggttgcaggtgacacgcactc

SEQ ID NO: 695827 - DNA, 25 bp, Homo sapien
agctccacagcctgcgtgcgccgga

SEQ ID NO: 695828 - DNA, 25 bp, Homo sapien
cagccgctcctggtagggcaccagc

SEQ ID NO: 695829 - DNA, 25 bp, Homo sapien
tgctgagtgtgccttggtgcaggcg

SEQ ID NO: 695830 - DNA, 25 bp, Homo sapien
tggtgcaggcgtccccatactcaca

SEQ ID NO: 695831 - DNA, 25 bp, Homo sapien
caaacatgaacctcccttatccggg

SEQ ID NO: 695832 - DNA, 25 bp, Homo sapien
aagctcctgcctcgagtatccttac

SEQ ID NO: 695833 - DNA, 25 bp, Homo sapien
gccacatggctttagccctcagcag

SEQ ID NO: 695834 - DNA, 25 bp, Homo sapien
gtgctgagttcaaaggccgggaccc

SEQ ID NO: 695835 - DNA, 25 bp, Homo sapien
tttgggcagagctcgaacttggaga

SEQ ID NO: 695836 - DNA, 25 bp, Homo sapien
tgctccgaggatgcgcagtggttct

SEQ ID NO: 695837 - DNA, 25 bp, Homo sapien
aggccaccatctgtgcgtgctccga

SEQ ID NO: 695838 - DNA, 25 bp, Homo sapien
cgcagtggttctcgaaggcctcctg

SEQ ID NO: 695839 - DNA, 25 bp, Homo sapien
gctggccaaggggggccgtgcgccc

SEQ ID NO: 695840 - DNA, 25 bp, Homo sapien
tgcgcccgtcgccatcaggggcagg

SEQ ID NO: 695841 - DNA, 25 bp, Homo sapien
ccgggcagtacagctgggccccagg

SEQ ID NO: 695842 - DNA, 25 bp, Homo sapien
aagcaggccgggcagtacagctggg

SEQ ID NO: 695843 - DNA, 25 bp, Homo sapien
ggcagcgggactccccacgccagca

SEQ ID NO: 695844 - DNA, 25 bp, Homo sapien
ctggcagcgggactccccacgccag

SEQ ID NO: 695845 - DNA, 25 bp, Homo sapien
cagcgggactccccacgccagcacg

SEQ ID NO: 695846 - DNA, 25 bp, Homo sapien
tggcagcgggactccccacgccagc

SEQ ID NO: 695847 - DNA, 25 bp, Homo sapien
cacaaacctgcagtaggcaggaggc

SEQ ID NO: 695848 - DNA, 25 bp, Homo sapien
acaaacctgcagtaggcaggaggct

SEQ ID NO: 695849 - DNA, 25 bp, Homo sapien
ccccacaaacctgcagtaggcagga

SEQ ID NO: 695850 - DNA, 25 bp, Homo sapien
cccacaaacctgcagtaggcaggag

SEQ ID NO: 695851 - DNA, 25 bp, Homo sapien
acaaactgttgcttgcggcggccct

SEQ ID NO: 695852 - DNA, 25 bp, Homo sapien
gggacagcgcctgaagcagagggag

SEQ ID NO: 695853 - DNA, 25 bp, Homo sapien
gagcaaagcagctcgaagcggccgc

SEQ ID NO: 695854 - DNA, 25 bp, Homo sapien
cctgggggtccacgcgacagatgca

SEQ ID NO: 695855 - DNA, 25 bp, Homo sapien
ctccgtaaggatggcgtcggccgcc

SEQ ID NO: 695856 - DNA, 25 bp, Homo sapien
ctccctgggccccgctgccctgcac

SEQ ID NO: 695857 - DNA, 25 bp, Homo sapien
taaggatggcgtcggccgcccggcc

SEQ ID NO: 695858 - DNA, 25 bp, Homo sapien
ccctccctgggccccgctgccctgc

SEQ ID NO: 695859 - DNA, 25 bp, Homo sapien
tgctttcattgagccgctgggtgca

SEQ ID NO: 695860 - DNA, 25 bp, Homo sapien
gttgtgctgacgctcgaaggtccag

SEQ ID NO: 695861 - DNA, 25 bp, Homo sapien
tcttggtggcctgcttaaagcgggc

SEQ ID NO: 695862 - DNA, 25 bp, Homo sapien
tagtagtggcagacttggtagcaca

SEQ ID NO: 695863 - DNA, 25 bp, Homo sapien
tggctctccagggaggcgtctgagg

SEQ ID NO: 695864 - DNA, 25 bp, Homo sapien
ctccagggaggcgtctgaggctcct

SEQ ID NO: 695865 - DNA, 25 bp, Homo sapien
ctcgaacaccagcttggctctccag

SEQ ID NO: 695866 - DNA, 25 bp, Homo sapien
aggcgtctgaggctcctgagctcac

SEQ ID NO: 695867 - DNA, 25 bp, Homo sapien
ggaactgttggccacggttcgaagc

SEQ ID NO: 695868 - DNA, 25 bp, Homo sapien
ggtccacgcagtccactggaactgt

SEQ ID NO: 695869 - DNA, 25 bp, Homo sapien
cactggaactgttggccacggttcg

SEQ ID NO: 695870 - DNA, 25 bp, Homo sapien
gggtccacgcagtccactggaactg

SEQ ID NO: 695871 - DNA, 25 bp, Homo sapien
tgcccaggagctctcagtttcgatt

SEQ ID NO: 695872 - DNA, 25 bp, Homo sapien
ctgcccaggagctctcagtttcgat

SEQ ID NO: 695873 - DNA, 25 bp, Homo sapien
gcccaggagctctcagtttcgattc

SEQ ID NO: 695874 - DNA, 25 bp, Homo sapien
cccaggagctctcagtttcgattct

SEQ ID NO: 695875 - DNA, 25 bp, Homo sapien
cagagacgccccgatgatgtgccag

SEQ ID NO: 695876 - DNA, 25 bp, Homo sapien
ggccctggacggcaggatggtctgg

SEQ ID NO: 695877 - DNA, 25 bp, Homo sapien
aggggtgagaccctgcccggccctg

SEQ ID NO: 695878 - DNA, 25 bp, Homo sapien
cgccccgatgatgtgccaggcggaa

SEQ ID NO: 695879 - DNA, 25 bp, Homo sapien
tgggccgtcaaccaccagggagcct

SEQ ID NO: 695880 - DNA, 25 bp, Homo sapien
caggccctcgacaatagcagcccca

SEQ ID NO: 695881 - DNA, 25 bp, Homo sapien
caatcacgttggagctcctgggaga

SEQ ID NO: 695882 - DNA, 25 bp, Homo sapien
ctctccgcagaccaatcacgttgga

SEQ ID NO: 695883 - DNA, 25 bp, Homo sapien
gggacagagttccacgtacacacag

SEQ ID NO: 695884 - DNA, 25 bp, Homo sapien
acggccaacaacacgctcacacggg

SEQ ID NO: 695885 - DNA, 25 bp, Homo sapien
ggacagagttccacgtacacacagc

SEQ ID NO: 695886 - DNA, 25 bp, Homo sapien
acagcacacggccaacaacacgctc

SEQ ID NO: 695887 - DNA, 25 bp, Homo sapien
ggccatgtgctctcgggcaggaact

SEQ ID NO: 695888 - DNA, 25 bp, Homo sapien
cgcttaagcaggtctttaacacccg

SEQ ID NO: 695889 - DNA, 25 bp, Homo sapien
gggtataactcgcttaagcaggtct

SEQ ID NO: 695890 - DNA, 25 bp, Homo sapien
actgacggcctctgggtataactcg

SEQ ID NO: 695891 - DNA, 25 bp, Homo sapien
ggtgggaatgcgagatggtgctgcc

SEQ ID NO: 695892 - DNA, 25 bp, Homo sapien
gcgggtgggaatgcgagatggtgct

SEQ ID NO: 695893 - DNA, 25 bp, Homo sapien
atctcagtcattgcgggtgggaatg

SEQ ID NO: 695894 - DNA, 25 bp, Homo sapien
ggaatctcagtcattgcgggtggga

SEQ ID NO: 695895 - DNA, 25 bp, Homo sapien
ccagtgacccggctttcgatgccat

SEQ ID NO: 695896 - DNA, 25 bp, Homo sapien
ggacatgcctgtgcgtttatcagct

SEQ ID NO: 695897 - DNA, 25 bp, Homo sapien
tggtcccgtgccaatgtgtgctgga

SEQ ID NO: 695898 - DNA, 25 bp, Homo sapien
agagtggactcttggaaccagcgcc

SEQ ID NO: 695899 - DNA, 25 bp, Homo sapien
gacttgccagcgtgcagaactgcat

SEQ ID NO: 695900 - DNA, 25 bp, Homo sapien
tcaccaggcaccaaatcggctgatg

SEQ ID NO: 695901 - DNA, 25 bp, Homo sapien
tgaacctctgttgcttgcaagcccc

SEQ ID NO: 695902 - DNA, 25 bp, Homo sapien
tattgtcctccagcgatttgcagga

SEQ ID NO: 695903 - DNA, 25 bp, Homo sapien
aggcagccatgaaaacccgtgttct

SEQ ID NO: 695904 - DNA, 25 bp, Homo sapien
ccaggcagatacttgcaaaacaaca

SEQ ID NO: 695905 - DNA, 25 bp, Homo sapien
tacgtggttgagaaggtcctcctct

SEQ ID NO: 695906 - DNA, 25 bp, Homo sapien
atccaatcctatcttctcagaaaac

SEQ ID NO: 695907 - DNA, 25 bp, Homo sapien
ctggctggccccaaggcgcagaact

SEQ ID NO: 695908 - DNA, 25 bp, Homo sapien
ggaaccctgcccccgaggagccagc

SEQ ID NO: 695909 - DNA, 25 bp, Homo sapien
gctaactcgggaagcctaggcactc

SEQ ID NO: 695910 - DNA, 25 bp, Homo sapien
gatcaaggcccaatgtgtaaacagt

SEQ ID NO: 695911 - DNA, 25 bp, Homo sapien
catgagttagtaacgtccccaggga

SEQ ID NO: 695912 - DNA, 25 bp, Homo sapien
cagaggtttcacacttgggcttagc

SEQ ID NO: 695913 - DNA, 25 bp, Homo sapien
ccaggcaacgtgagcagctgtagcg

SEQ ID NO: 695914 - DNA, 25 bp, Homo sapien
ccggaagaggccaagactgtgtatc

SEQ ID NO: 695915 - DNA, 25 bp, Homo sapien
gcgtcagcgtcatgagcacgttgct

SEQ ID NO: 695916 - DNA, 25 bp, Homo sapien
ttggctcggcgacgatgctcatcac

SEQ ID NO: 695917 - DNA, 25 bp, Homo sapien
ccatctggcacttgtggctggccag

SEQ ID NO: 695918 - DNA, 25 bp, Homo sapien
ctgctcccgcgagcggtccatctgg

SEQ ID NO: 695919 - DNA, 25 bp, Homo sapien
caggtccagcatgccgaagttctgc

SEQ ID NO: 695920 - DNA, 25 bp, Homo sapien
aggtcccgggcgtactgctcccgcg

SEQ ID NO: 695921 - DNA, 25 bp, Homo sapien
ctggtggaactcctggatgacctcg

SEQ ID NO: 695922 - DNA, 25 bp, Homo sapien
ccccgccagaaggtaaatgtgtcat

SEQ ID NO: 695923 - DNA, 25 bp, Homo sapien
cagcccccgccagaaggtaaatgtg

SEQ ID NO: 695924 - DNA, 25 bp, Homo sapien
gcaggccggcgtccttcagcccccg

SEQ ID NO: 695925 - DNA, 25 bp, Homo sapien
tatggtgatggtcgcaggagaccca

SEQ ID NO: 695926 - DNA, 25 bp, Homo sapien
aggtctctatggtgatggtcgcagg

SEQ ID NO: 695927 - DNA, 25 bp, Homo sapien
gtgatggtcgcaggagacccattca

SEQ ID NO: 695928 - DNA, 25 bp, Homo sapien
ccaatggccgcggtccagtcgccag

SEQ ID NO: 695929 - DNA, 25 bp, Homo sapien
tcaatctttgtgctgcggcaggtgt

SEQ ID NO: 695930 - DNA, 25 bp, Homo sapien
gggacacacgggctcctgagaggtc

SEQ ID NO: 695931 - DNA, 25 bp, Homo sapien
accttgtcatgctggtagaagtcca

SEQ ID NO: 695932 - DNA, 25 bp, Homo sapien
agaagtccagttccccggagtccat

SEQ ID NO: 695933 - DNA, 25 bp, Homo sapien
tacttccctcttagcgcgagctcgg

SEQ ID NO: 695934 - DNA, 25 bp, Homo sapien
gtggggcaggcctagcagaggcgct

SEQ ID NO: 695935 - DNA, 25 bp, Homo sapien
ctcttagcgcgagctcggcgtgcag

SEQ ID NO: 695936 - DNA, 25 bp, Homo sapien
tgggctctacttccctcttagcgcg

SEQ ID NO: 695937 - DNA, 25 bp, Homo sapien
gctgtgccaccagccacgttccaga

SEQ ID NO: 695938 - DNA, 25 bp, Homo sapien
caccagccacgttccagaaaatcag

SEQ ID NO: 695939 - DNA, 25 bp, Homo sapien
accagccacgttccagaaaatcaga

SEQ ID NO: 695940 - DNA, 25 bp, Homo sapien
tgccaccagccacgttccagaaaat

SEQ ID NO: 695941 - DNA, 25 bp, Homo sapien
gccgttcatgcggatggctctcttc

SEQ ID NO: 695942 - DNA, 25 bp, Homo sapien
tttgggctgattacatgctcgtcgt

SEQ ID NO: 695943 - DNA, 25 bp, Homo sapien
cacaaattcctttgggctgattaca

SEQ ID NO: 695944 - DNA, 25 bp, Homo sapien
acttcccggccaggtgcacaaattc

SEQ ID NO: 695945 - DNA, 25 bp, Homo sapien
taacgattttatcttctaagcctta

SEQ ID NO: 695946 - DNA, 25 bp, Homo sapien
cttaaaaccccaacagccgaggctg

SEQ ID NO: 695947 - DNA, 25 bp, Homo sapien
atataacgattttatcttctaagcc

SEQ ID NO: 695948 - DNA, 25 bp, Homo sapien
aaaaccccaacagccgaggctgctg

SEQ ID NO: 695949 - DNA, 25 bp, Homo sapien
gagcactacttcttgtgtgtccagg

SEQ ID NO: 695950 - DNA, 25 bp, Homo sapien
tgtggcttccgtgctgcctgtggct

SEQ ID NO: 695951 - DNA, 25 bp, Homo sapien
ctgctccaggagcactacttcttgt

SEQ ID NO: 695952 - DNA, 25 bp, Homo sapien
tccaggagcactacttcttgtgtgt

SEQ ID NO: 695953 - DNA, 25 bp, Homo sapien
tttcacattgatgccgggacacaca

SEQ ID NO: 695954 - DNA, 25 bp, Homo sapien
ttgatgccgggacacacaaacttcc

SEQ ID NO: 695955 - DNA, 25 bp, Homo sapien
caaacttcctccagatgaggttggc

SEQ ID NO: 695956 - DNA, 25 bp, Homo sapien
ggttggctctgctgtctccacaggt

SEQ ID NO: 695957 - DNA, 25 bp, Homo sapien
gaggctgtgaaggccgcggcagctg

SEQ ID NO: 695958 - DNA, 25 bp, Homo sapien
aggctgtgaaggccgcggcagctgc

SEQ ID NO: 695959 - DNA, 25 bp, Homo sapien
gctgctgccgctgcattttctgtct

SEQ ID NO: 695960 - DNA, 25 bp, Homo sapien
gagagaatagaatcaggatcccgga

SEQ ID NO: 695961 - DNA, 25 bp, Homo sapien
aggagagaatagaatcaggatcccg

SEQ ID NO: 695962 - DNA, 25 bp, Homo sapien
aatagaatcaggatcccggagggca

SEQ ID NO: 695963 - DNA, 25 bp, Homo sapien
gagaatagaatcaggatcccggagg

SEQ ID NO: 695964 - DNA, 25 bp, Homo sapien
tttctagaaacatgtccctctgacc

SEQ ID NO: 695965 - DNA, 25 bp, Homo sapien
ctccatttctagaaacatgtccctc

SEQ ID NO: 695966 - DNA, 25 bp, Homo sapien
ccatttctagaaacatgcccctctg

SEQ ID NO: 695967 - DNA, 25 bp, Homo sapien
catttctagaaacatgcccctgtga

SEQ ID NO: 695968 - DNA, 25 bp, Homo sapien
tttctagaaacatgcccctctgacc

SEQ ID NO: 695969 - DNA, 25 bp, Homo sapien
cacctccatttctagaaacatgccc

SEQ ID NO: 695970 - DNA, 25 bp, Homo sapien
ccatttctagaaacatgcccctctg

SEQ ID NO: 695971 - DNA, 25 bp, Homo sapien
atccatttctagaaacatgcccctc

SEQ ID NO: 695972 - DNA, 25 bp, Homo sapien
cacggtgtcacggctcggatgagat

SEQ ID NO: 695973 - DNA, 25 bp, Homo sapien
cacggctcggatgagatgactcgga

SEQ ID NO: 695974 - DNA, 25 bp, Homo sapien
tgagatgactcggacaccaccccgg

SEQ ID NO: 695975 - DNA, 25 bp, Homo sapien
ggcagccgcggccacggtgtcacgg

SEQ ID NO: 695976 - DNA, 25 bp, Homo sapien
tggtcgtcaccaacacggtcttcac

SEQ ID NO: 695977 - DNA, 25 bp, Homo sapien
tccatgtgcacactcacgtcgggag

SEQ ID NO: 695978 - DNA, 25 bp, Homo sapien
gggccaagttggtcgtcaccaacac

SEQ ID NO: 695979 - DNA, 25 bp, Homo sapien
ccactgcagtgtccggagttgtcac

SEQ ID NO: 695980 - DNA, 25 bp, Homo sapien
ctcagcggaaggggacgcccaggcc

SEQ ID NO: 695981 - DNA, 25 bp, Homo sapien
ggctcagcggaaggggacgcccagg

SEQ ID NO: 695982 - DNA, 25 bp, Homo sapien
ggccagcagcgtcagtcctccaggg

SEQ ID NO: 695983 - DNA, 25 bp, Homo sapien
gctcagcggaaggggacgcccaggc

SEQ ID NO: 695984 - DNA, 25 bp, Homo sapien
agaaagcactccaagaagtcctcgc

SEQ ID NO: 695985 - DNA, 25 bp, Homo sapien
tacctcctgacaaaaacgagcggca

SEQ ID NO: 695986 - DNA, 25 bp, Homo sapien
ttccgagggcggtgtaagcgcactc

SEQ ID NO: 695987 - DNA, 25 bp, Homo sapien
cccactggataagccgaaacccttg

SEQ ID NO: 695988 - DNA, 25 bp, Homo sapien
cgggcctgcttaggcacccggcggg

SEQ ID NO: 695989 - DNA, 25 bp, Homo sapien
ccgcgccgggcctgcttaggcaccc

SEQ ID NO: 695990 - DNA, 25 bp, Homo sapien
gggccgcgccgggcctgcttaggca

SEQ ID NO: 695991 - DNA, 25 bp, Homo sapien
cgccgggcctgcttaggcacccggc

SEQ ID NO: 695992 - DNA, 25 bp, Homo sapien
ggacacttatttggcgctcgcggag

SEQ ID NO: 695993 - DNA, 25 bp, Homo sapien
tgtcagctcctaacgccgcaggttc

SEQ ID NO: 695994 - DNA, 25 bp, Homo sapien
ttcaggcctccaggtacgggcgctc

SEQ ID NO: 695995 - DNA, 25 bp, Homo sapien
gtgcgcggaccgacactgtcagctc

SEQ ID NO: 695996 - DNA, 25 bp, Homo sapien
tcaccccgatcgcatagcatagctg

SEQ ID NO: 695997 - DNA, 25 bp, Homo sapien
tcgatcccatagatgacaccccgat

SEQ ID NO: 695998 - DNA, 25 bp, Homo sapien
atagccagcacctcgatcccataga

SEQ ID NO: 695999 - DNA, 25 bp, Homo sapien
catagcatagctgataccccgatcc

SEQ ID NO: 696000 - DNA, 25 bp, Homo sapien
ccagcccagaacgtcttcttacttt

SEQ ID NO: 696001 - DNA, 25 bp, Homo sapien
gaccgtgaacaaccggctgcccagg

SEQ ID NO: 696002 - DNA, 25 bp, Homo sapien
catcctgggtccagacctgtgaccg

SEQ ID NO: 696003 - DNA, 25 bp, Homo sapien
tgagtccacagaacagtggggtgca

SEQ ID NO: 696004 - DNA, 25 bp, Homo sapien
cgctatgagcgctgccaccatgagg

SEQ ID NO: 696005 - DNA, 25 bp, Homo sapien
attacagtaggctttcgctatgagc

SEQ ID NO: 696006 - DNA, 25 bp, Homo sapien
cgtggtccctgggtgtgactctgga

SEQ ID NO: 696007 - DNA, 25 bp, Homo sapien
taggctttcgctatgagcgctgcca

SEQ ID NO: 696008 - DNA, 25 bp, Homo sapien
cagtggtacaaagacagcctccccc

SEQ ID NO: 696009 - DNA, 25 bp, Homo sapien
agtggtacaaagacagcctccccca

SEQ ID NO: 696010 - DNA, 25 bp, Homo sapien
gagaggcctggagtcaggcctccac

SEQ ID NO: 696011 - DNA, 25 bp, Homo sapien
tgggtgccaagtgggaagggtgttg

SEQ ID NO: 696012 - DNA, 25 bp, Homo sapien
aaagaaggaactcagcccagagggt

SEQ ID NO: 696013 - DNA, 25 bp, Homo sapien
agggaaagaaggaactcagcccaga

SEQ ID NO: 696014 - DNA, 25 bp, Homo sapien
ctctagggtgggtctttcaaggaca

SEQ ID NO: 696015 - DNA, 25 bp, Homo sapien
gggtccctggcagagaatgcccact

SEQ ID NO: 696016 - DNA, 25 bp, Homo sapien
atgcagcctgctcatgggtccctgg

SEQ ID NO: 696017 - DNA, 25 bp, Homo sapien
gacccctgtgcaaccacattaagga

SEQ ID NO: 696018 - DNA, 25 bp, Homo sapien
ccagacagcccagcgtaaggacccg

SEQ ID NO: 696019 - DNA, 25 bp, Homo sapien
gcccggcctggtgtctgcaccgagg

SEQ ID NO: 696020 - DNA, 25 bp, Homo sapien
tgacctgcacgtgctgaccagacag

SEQ ID NO: 696021 - DNA, 25 bp, Homo sapien
acggtcaccgccacctctctcacag

SEQ ID NO: 696022 - DNA, 25 bp, Homo sapien
gaggaacaaaagttgcatctagaca

SEQ ID NO: 696023 - DNA, 25 bp, Homo sapien
cgactcaccacgaggacagggcagg

SEQ ID NO: 696024 - DNA, 25 bp, Homo sapien
gggaagccgtggtcagcgactcacc

SEQ ID NO: 696025 - DNA, 25 bp, Homo sapien
tagacagaggtgaacgaaacaaaac

SEQ ID NO: 696026 - DNA, 25 bp, Homo sapien
gtgttctgtcgcaggatgggcgccg

SEQ ID NO: 696027 - DNA, 25 bp, Homo sapien
ttctgtcgcaggatgggcgccgccc

SEQ ID NO: 696028 - DNA, 25 bp, Homo sapien
tgttctgtcgcaggatgggcgccgc

SEQ ID NO: 696029 - DNA, 25 bp, Homo sapien
ctgtcgcaggatgggcgccgcccgt

SEQ ID NO: 696030 - DNA, 25 bp, Homo sapien
tctcttctcgctgctccttgttcct

SEQ ID NO: 696031 - DNA, 25 bp, Homo sapien
ttcctgcgcacctcggccgcgtgca

SEQ ID NO: 696032 - DNA, 25 bp, Homo sapien
ttagcccgacatctcttctcgctgc

SEQ ID NO: 696033 - DNA, 25 bp, Homo sapien
cgacatctcttctcgctgctccttg

SEQ ID NO: 696034 - DNA, 25 bp, Homo sapien
gccgctcgcgcagtgcggccaggtg

SEQ ID NO: 696035 - DNA, 25 bp, Homo sapien
tcgcggatctccttgctgagctcca

SEQ ID NO: 696036 - DNA, 25 bp, Homo sapien
cgcctggcggctgaagttgttattc

SEQ ID NO: 696037 - DNA, 25 bp, Homo sapien
ttctcctccgcctggcggctgaagt

SEQ ID NO: 696038 - DNA, 25 bp, Homo sapien
cctcgcgcgcgggtcccgcggtcct

SEQ ID NO: 696039 - DNA, 25 bp, Homo sapien
agggccagggggtcgcgatccgccg

SEQ ID NO: 696040 - DNA, 25 bp, Homo sapien
gccctgggaaccctcgcctgccatc

SEQ ID NO: 696041 - DNA, 25 bp, Homo sapien
gcctgccatccggcctgtggtcggg

SEQ ID NO: 696042 - DNA, 25 bp, Homo sapien
tgggccgcctccgttgaaactcctg

SEQ ID NO: 696043 - DNA, 25 bp, Homo sapien
tccagggaggtgtccttcttcttgg

SEQ ID NO: 696044 - DNA, 25 bp, Homo sapien
tcggctgcctccagccgcttttgca

SEQ ID NO: 696045 - DNA, 25 bp, Homo sapien
ggaggagagcatagggctctctggg

SEQ ID NO: 696046 - DNA, 25 bp, Homo sapien
tgcctccagccgcttttgcagctcc

SEQ ID NO: 696047 - DNA, 25 bp, Homo sapien
tctggcctgaggcccgcttgtccag

SEQ ID NO: 696048 - DNA, 25 bp, Homo sapien
gcaggagcagatgagcgacagcacc

SEQ ID NO: 696049 - DNA, 25 bp, Homo sapien
caggagcagatgagcgacagcaccg

SEQ ID NO: 696050 - DNA, 25 bp, Homo sapien
cgtactggtagacggtattggggtg

SEQ ID NO: 696051 - DNA, 25 bp, Homo sapien
gtagacggtattggggtgcggctgt

SEQ ID NO: 696052 - DNA, 25 bp, Homo sapien
cagcacgctctcttgtgtgtctcca

SEQ ID NO: 696053 - DNA, 25 bp, Homo sapien
tcggcactgtctccgtggtgtgtcc

SEQ ID NO: 696054 - DNA, 25 bp, Homo sapien
gtctctgtgagacacggagctgccc

SEQ ID NO: 696055 - DNA, 25 bp, Homo sapien
tctcgcttccagacgtcggcactgt

SEQ ID NO: 696056 - DNA, 25 bp, Homo sapien
atgacgggaccagcacagatgcaaa

SEQ ID NO: 696057 - DNA, 25 bp, Homo sapien
ctttcttgggctgtaaacctggatg

SEQ ID NO: 696058 - DNA, 25 bp, Homo sapien
gattccttgtcactgtgtgtctttc

SEQ ID NO: 696059 - DNA, 25 bp, Homo sapien
tttccttcccaatgattgtgtggtc

SEQ ID NO: 696060 - DNA, 25 bp, Homo sapien
gcttctatcccaagagactgtccct

SEQ ID NO: 696061 - DNA, 25 bp, Homo sapien
tgcggctcagcatctgatggccacg

SEQ ID NO: 696062 - DNA, 25 bp, Homo sapien
ggtggcccatgaggagcttctatcc

SEQ ID NO: 696063 - DNA, 25 bp, Homo sapien
caaggagcaagtgggaccaggtacc

SEQ ID NO: 696064 - DNA, 25 bp, Homo sapien
ctctccccgggtcaagcaattatcc

SEQ ID NO: 696065 - DNA, 25 bp, Homo sapien
tcttgacctcagtttatccaccggc

SEQ ID NO: 696066 - DNA, 25 bp, Homo sapien
tagaaagagtttctactcttgctgc

SEQ ID NO: 696067 - DNA, 25 bp, Homo sapien
ttttagaaagagtttctactcttgc

SEQ ID NO: 696068 - DNA, 25 bp, Homo sapien
cgctcacagcgggacagctgcttct

SEQ ID NO: 696069 - DNA, 25 bp, Homo sapien
gggctacccgaactgcaacaagacc

SEQ ID NO: 696070 - DNA, 25 bp, Homo sapien
gctggcgccaacagggtccaggtct

SEQ ID NO: 696071 - DNA, 25 bp, Homo sapien
gcctgccatcggagaggatgccaca

SEQ ID NO: 696072 - DNA, 25 bp, Homo sapien
accaagttgtggcactgtcaccggg

SEQ ID NO: 696073 - DNA, 25 bp, Homo sapien
ggaccatcttccctgtgcgtccagg

SEQ ID NO: 696074 - DNA, 25 bp, Homo sapien
catgagccgctggtgtgacttggac

SEQ ID NO: 696075 - DNA, 25 bp, Homo sapien
ctgtggtcggactgtcttccctgga

SEQ ID NO: 696076 - DNA, 25 bp, Homo sapien
agctttttcataaaactggttgtag

SEQ ID NO: 696077 - DNA, 25 bp, Homo sapien
ttttcataaaactggttgtagttgc

SEQ ID NO: 696078 - DNA, 25 bp, Homo sapien
cataaaactggttgtagttgcacag

SEQ ID NO: 696079 - DNA, 25 bp, Homo sapien
ttcataaaactggttgtagttgcac

SEQ ID NO: 696080 - DNA, 25 bp, Homo sapien
cccctgaagctcagcgagggtcagg

SEQ ID NO: 696081 - DNA, 25 bp, Homo sapien
tcaggccagccctagtcgccggggc

SEQ ID NO: 696082 - DNA, 25 bp, Homo sapien
aggctgcctgccatcagaactgctg

SEQ ID NO: 696083 - DNA, 25 bp, Homo sapien
cctgggagggtatcattgctggaag

SEQ ID NO: 696084 - DNA, 25 bp, Homo sapien
ccgatgcacccagagcaaccggggg

SEQ ID NO: 696085 - DNA, 25 bp, Homo sapien
caggcctcccatgctttccgggaag

SEQ ID NO: 696086 - DNA, 25 bp, Homo sapien
gagaggggacctgccaaagacctcc

SEQ ID NO: 696087 - DNA, 25 bp, Homo sapien
aggctctgaagcctcccgatgcacc

SEQ ID NO: 696088 - DNA, 25 bp, Homo sapien
agggcccgactcctgtgagtcacag

SEQ ID NO: 696089 - DNA, 25 bp, Homo sapien
cctggagaggacgcggggacttcca

SEQ ID NO: 696090 - DNA, 25 bp, Homo sapien
ccatgtccttcccacatccgcagga

SEQ ID NO: 696091 - DNA, 25 bp, Homo sapien
cctgtgagtcacagccccgcagctg

SEQ ID NO: 696092 - DNA, 25 bp, Homo sapien
caccatcaccgtgtccaacagccag

SEQ ID NO: 696093 - DNA, 25 bp, Homo sapien
atcaccgtgtccaacagccaggagc

SEQ ID NO: 696094 - DNA, 25 bp, Homo sapien
ccatcaccgtgtccaacagccagga

SEQ ID NO: 696095 - DNA, 25 bp, Homo sapien
gtaacaccatcaccgtgtccaacag

SEQ ID NO: 696096 - DNA, 25 bp, Homo sapien
accctgggtgacactgggcaggccg

SEQ ID NO: 696097 - DNA, 25 bp, Homo sapien
tcaccctgggtgacactgggcaggc

SEQ ID NO: 696098 - DNA, 25 bp, Homo sapien
tgggcaggccgctcctgcccacagc

SEQ ID NO: 696099 - DNA, 25 bp, Homo sapien
caccctgggtgacactgggcaggcc

SEQ ID NO: 696100 - DNA, 25 bp, Homo sapien
tgggtcttcctcaaggcaagatcag

SEQ ID NO: 696101 - DNA, 25 bp, Homo sapien
cccgaggctgcatcacaatccaggg

SEQ ID NO: 696102 - DNA, 25 bp, Homo sapien
agatcagcagcatgggagccaacag

SEQ ID NO: 696103 - DNA, 25 bp, Homo sapien
gatgcctacgcttttccagacatag

SEQ ID NO: 696104 - DNA, 25 bp, Homo sapien
gcggcggccggtgcacattccgcac

SEQ ID NO: 696105 - DNA, 25 bp, Homo sapien
ggtgcacattccgcacgacacactt

SEQ ID NO: 696106 - DNA, 25 bp, Homo sapien
gacacacttcaccatccactcgatg

SEQ ID NO: 696107 - DNA, 25 bp, Homo sapien
attccgcacgacacacttcaccatc

SEQ ID NO: 696108 - DNA, 25 bp, Homo sapien
ctgtgaagacagcgggtgtgaggcg

SEQ ID NO: 696109 - DNA, 25 bp, Homo sapien
tgtgaagacagcgggtgtgaggcgg

SEQ ID NO: 696110 - DNA, 25 bp, Homo sapien
aggcaatctcgcctgccgatcttgc

SEQ ID NO: 696111 - DNA, 25 bp, Homo sapien
gccgtcttgatgtcagggattgaga

SEQ ID NO: 696112 - DNA, 25 bp, Homo sapien
tgccgatcttgctggtgcagtcgct

SEQ ID NO: 696113 - DNA, 25 bp, Homo sapien
tgcagtcgctgaaggccgtcttgat

SEQ ID NO: 696114 - DNA, 25 bp, Homo sapien
ctgggggaggtaaggccgtgaggag

SEQ ID NO: 696115 - DNA, 25 bp, Homo sapien
aggtaaggccgtgaggagcagcccc

SEQ ID NO: 696116 - DNA, 25 bp, Homo sapien
ggaggtaaggccgtgaggagcagcc

SEQ ID NO: 696117 - DNA, 25 bp, Homo sapien
ggggaggtaaggccgtgaggagcag

SEQ ID NO: 696118 - DNA, 25 bp, Homo sapien
caaagccactccaagagaacagcta

SEQ ID NO: 696119 - DNA, 25 bp, Homo sapien
cctcttgtcggctgagattgtaggg

SEQ ID NO: 696120 - DNA, 25 bp, Homo sapien
aagattcacctggccctctggacgc

SEQ ID NO: 696121 - DNA, 25 bp, Homo sapien
agaacagctagaactcagcgtggcc

SEQ ID NO: 696122 - DNA, 25 bp, Homo sapien
cagcaccaagacggggacaccgcac

SEQ ID NO: 696123 - DNA, 25 bp, Homo sapien
ggccagcaccaagacggggacaccg

SEQ ID NO: 696124 - DNA, 25 bp, Homo sapien
cgcacagcgcctcgctggtcaccac

SEQ ID NO: 696125 - DNA, 25 bp, Homo sapien
ccagcaccaagacggggacaccgca

SEQ ID NO: 696126 - DNA, 25 bp, Homo sapien
tcccagagcagccaggccgcactca

SEQ ID NO: 696127 - DNA, 25 bp, Homo sapien
cccagagcagccaggccgcactcac

SEQ ID NO: 696128 - DNA, 25 bp, Homo sapien
catccatccctcccagagcagccag

SEQ ID NO: 696129 - DNA, 25 bp, Homo sapien
ccctcccagagcagccaggccgcac

SEQ ID NO: 696130 - DNA, 25 bp, Homo sapien
tgacgccgtgacactccgcataata

SEQ ID NO: 696131 - DNA, 25 bp, Homo sapien
agccagcctctcctcgtcggtggag

SEQ ID NO: 696132 - DNA, 25 bp, Homo sapien
caaacgcctgcttggactcagccag

SEQ ID NO: 696133 - DNA, 25 bp, Homo sapien
caatgacgtagatgacgccgtgaca

SEQ ID NO: 696134 - DNA, 25 bp, Homo sapien
aagcttatggtaatgtgcgcctgca

SEQ ID NO: 696135 - DNA, 25 bp, Homo sapien
tgtggccatgcggataagactgacc

SEQ ID NO: 696136 - DNA, 25 bp, Homo sapien
tgtgtcaaaataggagactgccgct

SEQ ID NO: 696137 - DNA, 25 bp, Homo sapien
cagagatcacttggccatgggagaa

SEQ ID NO: 696138 - DNA, 25 bp, Homo sapien
ccatcctgccgtccccacatctggt

SEQ ID NO: 696139 - DNA, 25 bp, Homo sapien
agcaaggtctctgagccgaaaggag

SEQ ID NO: 696140 - DNA, 25 bp, Homo sapien
cgaaaggaggcactcactttggagg

SEQ ID NO: 696141 - DNA, 25 bp, Homo sapien
tctgagccgaaaggaggcactcact

SEQ ID NO: 696142 - DNA, 25 bp, Homo sapien
ttaggttgttaacataatgttcagg

SEQ ID NO: 696143 - DNA, 25 bp, Homo sapien
gccagcgaggttgcccttaggctca

SEQ ID NO: 696144 - DNA, 25 bp, Homo sapien
gcatgaccagtgaacacgcccttct

SEQ ID NO: 696145 - DNA, 25 bp, Homo sapien
tgacctctctgacttggccagcgag

SEQ ID NO: 696146 - DNA, 25 bp, Homo sapien
tcctaagtcccagaacatgagccga

SEQ ID NO: 696147 - DNA, 25 bp, Homo sapien
cttcctgccctcctaagtcccagaa

SEQ ID NO: 696148 - DNA, 25 bp, Homo sapien
gtcccagaacatgagccgagccttt

SEQ ID NO: 696149 - DNA, 25 bp, Homo sapien
tgccctcctaagtcccagaacatga

SEQ ID NO: 696150 - DNA, 25 bp, Homo sapien
tcgggttttcgactgctccaggaag

SEQ ID NO: 696151 - DNA, 25 bp, Homo sapien
tgtttaggcccacggtggtggtgat

SEQ ID NO: 696152 - DNA, 25 bp, Homo sapien
tagactcatccccttgtagttcttg

SEQ ID NO: 696153 - DNA, 25 bp, Homo sapien
gattttggatagactcatccccttg

SEQ ID NO: 696154 - DNA, 25 bp, Homo sapien
tctcaggtgaaatttggcttccgtc

SEQ ID NO: 696155 - DNA, 25 bp, Homo sapien
gctgacagcacaaaaccgaaggggg

SEQ ID NO: 696156 - DNA, 25 bp, Homo sapien
gctggtggtgactatcctgccgtct

SEQ ID NO: 696157 - DNA, 25 bp, Homo sapien
tctgggtagtgaacgtgcagctgac

SEQ ID NO: 696158 - DNA, 25 bp, Homo sapien
acaagcccgacagcagcgtgtacat

SEQ ID NO: 696159 - DNA, 25 bp, Homo sapien
ttgtacaagcccgacagcagcgtgt

SEQ ID NO: 696160 - DNA, 25 bp, Homo sapien
tctgaaacatgtacttgtacaagcc

SEQ ID NO: 696161 - DNA, 25 bp, Homo sapien
catgtacttgtacaagcccgacagc

SEQ ID NO: 696162 - DNA, 25 bp, Homo sapien
gcaatgactgcgacctctccgcata

SEQ ID NO: 696163 - DNA, 25 bp, Homo sapien
tccagccgaccgctcaggacgagag

SEQ ID NO: 696164 - DNA, 25 bp, Homo sapien
ctacccagccgggtgttcacagtga

SEQ ID NO: 696165 - DNA, 25 bp, Homo sapien
caccccaacataggtcagtgtgcag

SEQ ID NO: 696166 - DNA, 25 bp, Homo sapien
ctcgagtcctgggccgcccctcggg

SEQ ID NO: 696167 - DNA, 25 bp, Homo sapien
tcgagtcctgggccgcccctcgggc

SEQ ID NO: 696168 - DNA, 25 bp, Homo sapien
ctgaccccgcgctaaccccgcgcgg

SEQ ID NO: 696169 - DNA, 25 bp, Homo sapien
acgcgggccggcctcagggaatgag

SEQ ID NO: 696170 - DNA, 25 bp, Homo sapien
gaatgagctgaaccgcgtcccagcg

SEQ ID NO: 696171 - DNA, 25 bp, Homo sapien
gctgacctccgctgaccccgcgcta

SEQ ID NO: 696172 - DNA, 25 bp, Homo sapien
ctccaagggtttcatatactttcat

SEQ ID NO: 696173 - DNA, 25 bp, Homo sapien
atctgtgcaacagccctgtaggtag

SEQ ID NO: 696174 - DNA, 25 bp, Homo sapien
cattcatctgtgcaacagccctgta

SEQ ID NO: 696175 - DNA, 25 bp, Homo sapien
gatactacaagtgtgcactgccacg

SEQ ID NO: 696176 - DNA, 25 bp, Homo sapien
gtttaagaaaccacctcatccatag

SEQ ID NO: 696177 - DNA, 25 bp, Homo sapien
taggatcggcttgtccaattctgca

SEQ ID NO: 696178 - DNA, 25 bp, Homo sapien
tatatgttattaggtgagggtccac

SEQ ID NO: 696179 - DNA, 25 bp, Homo sapien
tccatagttatgaggattttcacct

SEQ ID NO: 696180 - DNA, 25 bp, Homo sapien
tggaagctaaaacgtataactgtag

SEQ ID NO: 696181 - DNA, 25 bp, Homo sapien
gtataactgtagtgaaagtttctga

SEQ ID NO: 696182 - DNA, 25 bp, Homo sapien
gctaaaacgtataactgtagtgaaa

SEQ ID NO: 696183 - DNA, 25 bp, Homo sapien
cgtataactgtagtgaaagtttctg

SEQ ID NO: 696184 - DNA, 25 bp, Homo sapien
atgacaccacgcctggctaattttt

SEQ ID NO: 696185 - DNA, 25 bp, Homo sapien
gtagcagggagtacaggctcatgac

SEQ ID NO: 696186 - DNA, 25 bp, Homo sapien
aagtagcagggagtacaggctcatg

SEQ ID NO: 696187 - DNA, 25 bp, Homo sapien
tagcagggagtacaggctcatgaca

SEQ ID NO: 696188 - DNA, 25 bp, Homo sapien
taggcactagaaggaaccgcccaaa

SEQ ID NO: 696189 - DNA, 25 bp, Homo sapien
ggccctgtgtgcctaagaacagtag

SEQ ID NO: 696190 - DNA, 25 bp, Homo sapien
tgcatttgaggcacagtcctgtagc

SEQ ID NO: 696191 - DNA, 25 bp, Homo sapien
gaggccacctttgtctacgcatgag

SEQ ID NO: 696192 - DNA, 25 bp, Homo sapien
tacagtctcattgatgggaggccat

SEQ ID NO: 696193 - DNA, 25 bp, Homo sapien
acctgacccaagcatggcgggctga

SEQ ID NO: 696194 - DNA, 25 bp, Homo sapien
tatcttcaaggagtgtgggtgcaac

SEQ ID NO: 696195 - DNA, 25 bp, Homo sapien
gacagaggttgtgtccagacagcca

SEQ ID NO: 696196 - DNA, 25 bp, Homo sapien
tccatgctgtggtgttgcctcgagg

SEQ ID NO: 696197 - DNA, 25 bp, Homo sapien
ggtgagtacaagctgccctggagaa

SEQ ID NO: 696198 - DNA, 25 bp, Homo sapien
tgcacacgcgaggtataggctccag

SEQ ID NO: 696199 - DNA, 25 bp, Homo sapien
gactcctcaccaagatgggctatga

SEQ ID NO: 696200 - DNA, 25 bp, Homo sapien
ctgtcctgagcaccgttgctaaccc

SEQ ID NO: 696201 - DNA, 25 bp, Homo sapien
cacagtgaccgtgtctaccaggtgg

SEQ ID NO: 696202 - DNA, 25 bp, Homo sapien
gcagcccacggaggtcggagcctgc

SEQ ID NO: 696203 - DNA, 25 bp, Homo sapien
tgtagggctgcctgacgcccgcccg

SEQ ID NO: 696204 - DNA, 25 bp, Homo sapien
tgcaccaggcgaagagagaaattaa

SEQ ID NO: 696205 - DNA, 25 bp, Homo sapien
gaagctcaggtgtctcacgtctggg

SEQ ID NO: 696206 - DNA, 25 bp, Homo sapien
ttatcaagggtgttatgggcccagc

SEQ ID NO: 696207 - DNA, 25 bp, Homo sapien
cctgtcggcccgtagatttatcaag

SEQ ID NO: 696208 - DNA, 25 bp, Homo sapien
gatgtctaagctaatcccgtcacag

SEQ ID NO: 696209 - DNA, 25 bp, Homo sapien
gagtcagttccctacgtagccctgg

SEQ ID NO: 696210 - DNA, 25 bp, Homo sapien
gatttcccaccgagcgattacgaga

SEQ ID NO: 696211 - DNA, 25 bp, Homo sapien
gaaacttggagactcaccgcagagg

SEQ ID NO: 696212 - DNA, 25 bp, Homo sapien
tattagtttgaacatcgatttaaaa

SEQ ID NO: 696213 - DNA, 25 bp, Homo sapien
ctgggcctcggaaatcccacactct

SEQ ID NO: 696214 - DNA, 25 bp, Homo sapien
tgagatggacgtgctcacctgggcc

SEQ ID NO: 696215 - DNA, 25 bp, Homo sapien
ctccacgcctcctgagatggacgtg

SEQ ID NO: 696216 - DNA, 25 bp, Homo sapien
aaaatgcccctgtagctccggcggg

SEQ ID NO: 696217 - DNA, 25 bp, Homo sapien
atctgccacgcagcaaacacttggg

SEQ ID NO: 696218 - DNA, 25 bp, Homo sapien
accccaaaacggtcagcaaaggcag

SEQ ID NO: 696219 - DNA, 25 bp, Homo sapien
gagagcagggactggtacaaaaccc

SEQ ID NO: 696220 - DNA, 25 bp, Homo sapien
cttgctcggtaagagtgggcagggc

SEQ ID NO: 696221 - DNA, 25 bp, Homo sapien
gggccagcgcttggcccggctccta

SEQ ID NO: 696222 - DNA, 25 bp, Homo sapien
cactccgtgtgcagaaaaatcttgg

SEQ ID NO: 696223 - DNA, 25 bp, Homo sapien
ggctcctatccccacactccgtgtg

SEQ ID NO: 696224 - DNA, 25 bp, Homo sapien
caaaagccgtgactcctgcgctgta

SEQ ID NO: 696225 - DNA, 25 bp, Homo sapien
aaggctctccgaggaagtgcacacg

SEQ ID NO: 696226 - DNA, 25 bp, Homo sapien
aaagcccagaggtaagacggtggca

SEQ ID NO: 696227 - DNA, 25 bp, Homo sapien
gctgaccgggtgtctgtaaaactct

SEQ ID NO: 696228 - DNA, 25 bp, Homo sapien
cgaggcagccaccgaccctgccggc

SEQ ID NO: 696229 - DNA, 25 bp, Homo sapien
cagccaccgaccctgccggcgggcg

SEQ ID NO: 696230 - DNA, 25 bp, Homo sapien
ggcagccaccgaccctgccggcggg

SEQ ID NO: 696231 - DNA, 25 bp, Homo sapien
aggcagccaccgaccctgccggcgg

SEQ ID NO: 696232 - DNA, 25 bp, Homo sapien
tcagggtcctccagatagggcccgt

SEQ ID NO: 696233 - DNA, 25 bp, Homo sapien
cgtggcgcctggagccatgcctgat

SEQ ID NO: 696234 - DNA, 25 bp, Homo sapien
agcacagtcggtgcacacaccgtgg

SEQ ID NO: 696235 - DNA, 25 bp, Homo sapien
gagagccaggcgaagtccttgtcag

SEQ ID NO: 696236 - DNA, 25 bp, Homo sapien
cgcatgtgtcgcttgaggatgcact

SEQ ID NO: 696237 - DNA, 25 bp, Homo sapien
tgaacttcttcctgatcaccgtgaa

SEQ ID NO: 696238 - DNA, 25 bp, Homo sapien
gctgcagtacggacacttgaacttc

SEQ ID NO: 696239 - DNA, 25 bp, Homo sapien
gcttcatgtgctcgcgccgcgtgaa

SEQ ID NO: 696240 - DNA, 25 bp, Homo sapien
ccactgagagagcccggagcagcca

SEQ ID NO: 696241 - DNA, 25 bp, Homo sapien
actgagagagcccggagcagccacg

SEQ ID NO: 696242 - DNA, 25 bp, Homo sapien
tgagagagcccggagcagccacgtc

SEQ ID NO: 696243 - DNA, 25 bp, Homo sapien
gagagagcccggagcagccacgtcc

SEQ ID NO: 696244 - DNA, 25 bp, Homo sapien
tctcaccctgacagcgcctggttct

SEQ ID NO: 696245 - DNA, 25 bp, Homo sapien
ctcaccctgacagcgcctggttctc

SEQ ID NO: 696246 - DNA, 25 bp, Homo sapien
attcagacctacatgttaaatattt

SEQ ID NO: 696247 - DNA, 25 bp, Homo sapien
cattatttctgttgggcatgccctg

SEQ ID NO: 696248 - DNA, 25 bp, Homo sapien
gcagagtgggctttctggtgcctca

SEQ ID NO: 696249 - DNA, 25 bp, Homo sapien
tattgaacaatggagatctgatggc

SEQ ID NO: 696250 - DNA, 25 bp, Homo sapien
ccttagccatgtgtaggaaccctgg

SEQ ID NO: 696251 - DNA, 25 bp, Homo sapien
agttcttggaatgagcctgcggacc

SEQ ID NO: 696252 - DNA, 25 bp, Homo sapien
gaagatatgtctaacgttggcgtca

SEQ ID NO: 696253 - DNA, 25 bp, Homo sapien
tgtattgcacagcttgggacaaggg

SEQ ID NO: 696254 - DNA, 25 bp, Homo sapien
tgggatcaagaccatgccagcttag

SEQ ID NO: 696255 - DNA, 25 bp, Homo sapien
tctaaaaatgttcttagagccctta

SEQ ID NO: 696256 - DNA, 25 bp, Homo sapien
tagggataaagtcatactgctatct

SEQ ID NO: 696257 - DNA, 25 bp, Homo sapien
ggaaagaatgttagaagtagggata

SEQ ID NO: 696258 - DNA, 25 bp, Homo sapien
gcacccacttcatatgctgaatgaa

SEQ ID NO: 696259 - DNA, 25 bp, Homo sapien
cattcatgacgaggagaactgggca

SEQ ID NO: 696260 - DNA, 25 bp, Homo sapien
caaccagcacatggagatggtcgca

SEQ ID NO: 696261 - DNA, 25 bp, Homo sapien
gctgtttgttgaaccacggcgcatt

SEQ ID NO: 696262 - DNA, 25 bp, Homo sapien
tagagaccacgctaacaagaggccc

SEQ ID NO: 696263 - DNA, 25 bp, Homo sapien
tcccgcacggtgttgagagacttag

SEQ ID NO: 696264 - DNA, 25 bp, Homo sapien
gggctacgccacaagctgcaatgag

SEQ ID NO: 696265 - DNA, 25 bp, Homo sapien
cacattcagcaatgggaggacacgg

SEQ ID NO: 696266 - DNA, 25 bp, Homo sapien
cttcagatcagcagacggcgtcaga

SEQ ID NO: 696267 - DNA, 25 bp, Homo sapien
cacacacagaagtgcggggtgtgcc

SEQ ID NO: 696268 - DNA, 25 bp, Homo sapien
tttaggacacactcaggatgcagag

SEQ ID NO: 696269 - DNA, 25 bp, Homo sapien
ctcaccccaccttcaggatttagga

SEQ ID NO: 696270 - DNA, 25 bp, Homo sapien
agaggacacagcactctcactgcag

SEQ ID NO: 696271 - DNA, 25 bp, Homo sapien
tcaatactcagcaaacaatgtgtcc

SEQ ID NO: 696272 - DNA, 25 bp, Homo sapien
caatactcagcaaacaatgtgtcca

SEQ ID NO: 696273 - DNA, 25 bp, Homo sapien
tactcagcaaacaatgtgtccacac

SEQ ID NO: 696274 - DNA, 25 bp, Homo sapien
aatactcagcaaacaatgtgtccac

SEQ ID NO: 696275 - DNA, 25 bp, Homo sapien
acgagctcgcattcagccaacgact

SEQ ID NO: 696276 - DNA, 25 bp, Homo sapien
gagcctcagcacgaaggcgacagag

SEQ ID NO: 696277 - DNA, 25 bp, Homo sapien
tgcgcgacccggacgagctcgcatt

SEQ ID NO: 696278 - DNA, 25 bp, Homo sapien
cccgagcccgtctctggagcacaaa

SEQ ID NO: 696279 - DNA, 25 bp, Homo sapien
gcctcatctcatcttggcccgggac

SEQ ID NO: 696280 - DNA, 25 bp, Homo sapien
gccgcgctcacaaccgcgtccattc

SEQ ID NO: 696281 - DNA, 25 bp, Homo sapien
attccctcctcactctaaagccagc

SEQ ID NO: 696282 - DNA, 25 bp, Homo sapien
gaaacattccagcaagcactcggct

SEQ ID NO: 696283 - DNA, 25 bp, Homo sapien
gatgcagggcgtcgtccttctctgg

SEQ ID NO: 696284 - DNA, 25 bp, Homo sapien
tgttcttactcatgagcgccgcgcg

SEQ ID NO: 696285 - DNA, 25 bp, Homo sapien
gcttcggtgacggacaggtccgcat

SEQ ID NO: 696286 - DNA, 25 bp, Homo sapien
tctgggcaggtactcgaacagcagg

SEQ ID NO: 696287 - DNA, 25 bp, Homo sapien
ttcctgctttatccccagcaaagag

SEQ ID NO: 696288 - DNA, 25 bp, Homo sapien
cctgctttatccccagcaaagagct

SEQ ID NO: 696289 - DNA, 25 bp, Homo sapien
gttcctgctttatccccagcaaaga

SEQ ID NO: 696290 - DNA, 25 bp, Homo sapien
cagttcctgctttatccccagcaaa

SEQ ID NO: 696291 - DNA, 25 bp, Homo sapien
cacggcatctgcgacatttttcagg

SEQ ID NO: 696292 - DNA, 25 bp, Homo sapien
atatccttccttgacttgggccaca

SEQ ID NO: 696293 - DNA, 25 bp, Homo sapien
tctcgcagatctctcagcgacggag

SEQ ID NO: 696294 - DNA, 25 bp, Homo sapien
tatcgagctgtgttcactcccggct

SEQ ID NO: 696295 - DNA, 25 bp, Homo sapien
aagaattggcaggactcgttcgccg

SEQ ID NO: 696296 - DNA, 25 bp, Homo sapien
ccaggtgcgctgagtacatgaagtc

SEQ ID NO: 696297 - DNA, 25 bp, Homo sapien
catcacggccgagatgagagcttcc

SEQ ID NO: 696298 - DNA, 25 bp, Homo sapien
gaactccgcaagctcatctgaggcg

SEQ ID NO: 696299 - DNA, 25 bp, Homo sapien
cctggtgtcgcctcttctacagact

SEQ ID NO: 696300 - DNA, 25 bp, Homo sapien
aagccctggtgtcgcctcttctaca

SEQ ID NO: 696301 - DNA, 25 bp, Homo sapien
ttggaagccctggtgtcgcctcttc

SEQ ID NO: 696302 - DNA, 25 bp, Homo sapien
ggaagccctggtgtcgcctcttcta

SEQ ID NO: 696303 - DNA, 25 bp, Homo sapien
tctgaacagaatcccacatacggca

SEQ ID NO: 696304 - DNA, 25 bp, Homo sapien
tatcccaggaacgatgagaacaccc

SEQ ID NO: 696305 - DNA, 25 bp, Homo sapien
ggttaaatgacctacactgtggcca

SEQ ID NO: 696306 - DNA, 25 bp, Homo sapien
tgtttccgtgctcgaggctaatggg

SEQ ID NO: 696307 - DNA, 25 bp, Homo sapien
gattatgctcgttaaacaagtgctg

SEQ ID NO: 696308 - DNA, 25 bp, Homo sapien
tgtttgctgcacgtaaattatgcct

SEQ ID NO: 696309 - DNA, 25 bp, Homo sapien
ggcagctccacccaagagttcgagc

SEQ ID NO: 696310 - DNA, 25 bp, Homo sapien
tataatcctgtgcttatccaaggac

SEQ ID NO: 696311 - DNA, 25 bp, Homo sapien
ttagcagagtcgtctttcgacagcg

SEQ ID NO: 696312 - DNA, 25 bp, Homo sapien
cggtggtactatccacatcatctcc

SEQ ID NO: 696313 - DNA, 25 bp, Homo sapien
gcgatgaggactttaggttttccac

SEQ ID NO: 696314 - DNA, 25 bp, Homo sapien
tttcgacagcgagaccggtggtact

SEQ ID NO: 696315 - DNA, 25 bp, Homo sapien
gaaatcaacaaccaggccttcgagt

SEQ ID NO: 696316 - DNA, 25 bp, Homo sapien
tggttctatccctgcacttgctgtt

SEQ ID NO: 696317 - DNA, 25 bp, Homo sapien
tgtgtctggatgtgcccctccacag

SEQ ID NO: 696318 - DNA, 25 bp, Homo sapien
tctgcaaagcggctggctatggcca

SEQ ID NO: 696319 - DNA, 25 bp, Homo sapien
agggcgctgcgtccgggcgggtccg

SEQ ID NO: 696320 - DNA, 25 bp, Homo sapien
cgggagggcgctgcgtccgggcggg

SEQ ID NO: 696321 - DNA, 25 bp, Homo sapien
gggcgggtccgagctgcgcgctcgc

SEQ ID NO: 696322 - DNA, 25 bp, Homo sapien
gtgaccccatggggcgcgggcgagg

SEQ ID NO: 696323 - DNA, 25 bp, Homo sapien
cctggtgattcccagcatccgggaa

SEQ ID NO: 696324 - DNA, 25 bp, Homo sapien
tgtcctggctagaactggagttacc

SEQ ID NO: 696325 - DNA, 25 bp, Homo sapien
ctgtgtggcttgtgtgtgcccctga

SEQ ID NO: 696326 - DNA, 25 bp, Homo sapien
ggctgcccagccgagggctgattcc

SEQ ID NO: 696327 - DNA, 25 bp, Homo sapien
tacatacaacgatatttaccaattt

SEQ ID NO: 696328 - DNA, 25 bp, Homo sapien
taattttacatacaacgatatttac

SEQ ID NO: 696329 - DNA, 25 bp, Homo sapien
aattttaagcatcctacttgaagag

SEQ ID NO: 696330 - DNA, 25 bp, Homo sapien
tcctacttgaagagcctggacaaag

SEQ ID NO: 696331 - DNA, 25 bp, Homo sapien
gctttgcgaacgctgctgctacaaa

SEQ ID NO: 696332 - DNA, 25 bp, Homo sapien
gctaggatttcacgtaaaggaggcc

SEQ ID NO: 696333 - DNA, 25 bp, Homo sapien
tacaaaggtttgaggcgagtcttcc

SEQ ID NO: 696334 - DNA, 25 bp, Homo sapien
tgttcgcttatccactcgccagctg

SEQ ID NO: 696335 - DNA, 25 bp, Homo sapien
gccaaactccctgattgtagcatgt

SEQ ID NO: 696336 - DNA, 25 bp, Homo sapien
aggcagtgcctctaacccagacgct

SEQ ID NO: 696337 - DNA, 25 bp, Homo sapien
taatgtctcaagcagaagttggaac

SEQ ID NO: 696338 - DNA, 25 bp, Homo sapien
cccagacgctgagcaggagagcaga

SEQ ID NO: 696339 - DNA, 25 bp, Homo sapien
tcttccgggagcaagtaggagccaa

SEQ ID NO: 696340 - DNA, 25 bp, Homo sapien
tcgacactatgttcatggaccgccg

SEQ ID NO: 696341 - DNA, 25 bp, Homo sapien
tggctcggaagcacctcaagaacgt

SEQ ID NO: 696342 - DNA, 25 bp, Homo sapien
tacggctggtctgttggcggcttca

SEQ ID NO: 696343 - DNA, 25 bp, Homo sapien
tggtgtgttttttgcccgcggccca

SEQ ID NO: 696344 - DNA, 25 bp, Homo sapien
cggattacgaaacgccgcggagctg

SEQ ID NO: 696345 - DNA, 25 bp, Homo sapien
gggccactgacctcgaagcttatga

SEQ ID NO: 696346 - DNA, 25 bp, Homo sapien
cagttccgctggctagtgtgtacgc

SEQ ID NO: 696347 - DNA, 25 bp, Homo sapien
ttgggcagcaactctgctcggagct

SEQ ID NO: 696348 - DNA, 25 bp, Homo sapien
gggtcttcgcgttcagcagagctcc

SEQ ID NO: 696349 - DNA, 25 bp, Homo sapien
tggccctggacccagtccgaggtgt

SEQ ID NO: 696350 - DNA, 25 bp, Homo sapien
ggccctcgggttcacgctgtctggc

SEQ ID NO: 696351 - DNA, 25 bp, Homo sapien
tgggccattcctcatgaccacaaat

SEQ ID NO: 696352 - DNA, 25 bp, Homo sapien
taaagagctcggacaaacctggcat

SEQ ID NO: 696353 - DNA, 25 bp, Homo sapien
gagtcaagttcctagtaccagataa

SEQ ID NO: 696354 - DNA, 25 bp, Homo sapien
catgcccagtcctagtaaagagctc

SEQ ID NO: 696355 - DNA, 25 bp, Homo sapien
cccaggctccctttgggaatcatgt

SEQ ID NO: 696356 - DNA, 25 bp, Homo sapien
acagaaggaatgcaatcacccagca

SEQ ID NO: 696357 - DNA, 25 bp, Homo sapien
ggaatgcaatcacccagcaagtcct

SEQ ID NO: 696358 - DNA, 25 bp, Homo sapien
tccctttgggaatcatgttagccca

SEQ ID NO: 696359 - DNA, 25 bp, Homo sapien
cttgctgtacttgggatgaaacgac

SEQ ID NO: 696360 - DNA, 25 bp, Homo sapien
caaggtgtcctgttcggtagagcaa

SEQ ID NO: 696361 - DNA, 25 bp, Homo sapien
gcagctgcctgattgttacgcgaat

SEQ ID NO: 696362 - DNA, 25 bp, Homo sapien
tgaaacgaccccacaggtcaggtgg

SEQ ID NO: 696363 - DNA, 25 bp, Homo sapien
cagataatttagtccctgggtcgtt

SEQ ID NO: 696364 - DNA, 25 bp, Homo sapien
aagactctctttttcgtgtgccgaa

SEQ ID NO: 696365 - DNA, 25 bp, Homo sapien
ccatcgctggtcttagggaggcaga

SEQ ID NO: 696366 - DNA, 25 bp, Homo sapien
gagtattaggaactcgtccgttcag

SEQ ID NO: 696367 - DNA, 25 bp, Homo sapien
cccatcccaaccacctgagtaactg

SEQ ID NO: 696368 - DNA, 25 bp, Homo sapien
tcccatcccaaccacctgagtaact

SEQ ID NO: 696369 - DNA, 25 bp, Homo sapien
gcccagaatgatcaaacttctaggt

SEQ ID NO: 696370 - DNA, 25 bp, Homo sapien
tgcccagaatgatcaaacttctagg

SEQ ID NO: 696371 - DNA, 25 bp, Homo sapien
gtccaacctggccaatatagcaaaa

SEQ ID NO: 696372 - DNA, 25 bp, Homo sapien
ttatctgggcatggcggcagatgcc

SEQ ID NO: 696373 - DNA, 25 bp, Homo sapien
gccgggagtttgagtccaacctggc

SEQ ID NO: 696374 - DNA, 25 bp, Homo sapien
gcatggcggcagatgcctgtgatcc

SEQ ID NO: 696375 - DNA, 25 bp, Homo sapien
gaggtccctgtagagataaagctga

SEQ ID NO: 696376 - DNA, 25 bp, Homo sapien
cagaagggtaggttcaggttgacca

SEQ ID NO: 696377 - DNA, 25 bp, Homo sapien
tacatctggacgtgcttaggaacag

SEQ ID NO: 696378 - DNA, 25 bp, Homo sapien
tgcagaatgtccatggtggccgctg

SEQ ID NO: 696379 - DNA, 25 bp, Homo sapien
cagcactaggtcctgggcagctttg

SEQ ID NO: 696380 - DNA, 25 bp, Homo sapien
ggcagctttgtttgtcccacttttc

SEQ ID NO: 696381 - DNA, 25 bp, Homo sapien
tgagccggctgccagcactaggtcc

SEQ ID NO: 696382 - DNA, 25 bp, Homo sapien
ttctcactaaaatgatcacgaagac

SEQ ID NO: 696383 - DNA, 25 bp, Homo sapien
tgagttatttttccgcagactggcc

SEQ ID NO: 696384 - DNA, 25 bp, Homo sapien
gaaattcattgtttggcccatcctg

SEQ ID NO: 696385 - DNA, 25 bp, Homo sapien
ggacctaaggtagaaagctgcccat

SEQ ID NO: 696386 - DNA, 25 bp, Homo sapien
ggcccttcggtacccatcagagtgg

SEQ ID NO: 696387 - DNA, 25 bp, Homo sapien
ccctgttggctttaaggctttgtct

SEQ ID NO: 696388 - DNA, 25 bp, Homo sapien
tggtggcagtgacgggaccccgact

SEQ ID NO: 696389 - DNA, 25 bp, Homo sapien
cctagaagcagaaccgttttcagcg

SEQ ID NO: 696390 - DNA, 25 bp, Homo sapien
cacgtgctaacagatcaggacgccc

SEQ ID NO: 696391 - DNA, 25 bp, Homo sapien
agaatgtccctttggacgccgctgc

SEQ ID NO: 696392 - DNA, 25 bp, Homo sapien
cctctggggtcgtgctttgaggccc

SEQ ID NO: 696393 - DNA, 25 bp, Homo sapien
tctcgggccgcagacaatgctgtga

SEQ ID NO: 696394 - DNA, 25 bp, Homo sapien
ctttgaggcccgtccggttcacgag

SEQ ID NO: 696395 - DNA, 25 bp, Homo sapien
gttctctatgttgttagtgcagcca

SEQ ID NO: 696396 - DNA, 25 bp, Homo sapien
ctctatgttgttagtgcagccagca

SEQ ID NO: 696397 - DNA, 25 bp, Homo sapien
ctgctcagtgtttgtgaactttcct

SEQ ID NO: 696398 - DNA, 25 bp, Homo sapien
cagtgtttgtgaactttcctagttc

SEQ ID NO: 696399 - DNA, 25 bp, Homo sapien
gcatgcacacgtgcccagcaggaaa

SEQ ID NO: 696400 - DNA, 25 bp, Homo sapien
gaggctgctctcaggcgttctgttc

SEQ ID NO: 696401 - DNA, 25 bp, Homo sapien
gcttcgtcttcacgtcggctgctgc

SEQ ID NO: 696402 - DNA, 25 bp, Homo sapien
tagaaaaaggaactggcatgcacac

SEQ ID NO: 696403 - DNA, 25 bp, Homo sapien
gtatatatcacgcagcaggagtgtc

SEQ ID NO: 696404 - DNA, 25 bp, Homo sapien
tgcgggcagagttcagcgcttgtcc

SEQ ID NO: 696405 - DNA, 25 bp, Homo sapien
tgtcccctggtgaagtgacaagtac

SEQ ID NO: 696406 - DNA, 25 bp, Homo sapien
tgtccttaccagcaacagtttgcgt

SEQ ID NO: 696407 - DNA, 25 bp, Homo sapien
cagatacggtcagtggcaaagctgc

SEQ ID NO: 696408 - DNA, 25 bp, Homo sapien
tctgagcagcagatacggtcagtgg

SEQ ID NO: 696409 - DNA, 25 bp, Homo sapien
aacatgaaagctgattttctgagca

SEQ ID NO: 696410 - DNA, 25 bp, Homo sapien
catgaaagctgattttctgagcagc

SEQ ID NO: 696411 - DNA, 25 bp, Homo sapien
gatctccgtcttgtatgtctgaatg

SEQ ID NO: 696412 - DNA, 25 bp, Homo sapien
taatcgaggtgccaggctccgagga

SEQ ID NO: 696413 - DNA, 25 bp, Homo sapien
tccgaggacgccacgcttttggccg

SEQ ID NO: 696414 - DNA, 25 bp, Homo sapien
caggatccgggatccggcataatcg

SEQ ID NO: 696415 - DNA, 25 bp, Homo sapien
gacttccacgcagaaagacactggc

SEQ ID NO: 696416 - DNA, 25 bp, Homo sapien
gggaggctgattcagttatctgggc

SEQ ID NO: 696417 - DNA, 25 bp, Homo sapien
tcttcctcagtaaaccacggcggcg

SEQ ID NO: 696418 - DNA, 25 bp, Homo sapien
gcctgctcggaaagcagggtgggca

SEQ ID NO: 696419 - DNA, 25 bp, Homo sapien
gtgtcccgtgtcagatgcgcctggc

SEQ ID NO: 696420 - DNA, 25 bp, Homo sapien
gcgtgggcacggcagagagcacggg

SEQ ID NO: 696421 - DNA, 25 bp, Homo sapien
agagagcacgggatgcgggtgggcc

SEQ ID NO: 696422 - DNA, 25 bp, Homo sapien
cagagagcacgggatgcgggtgggc

SEQ ID NO: 696423 - DNA, 25 bp, Homo sapien
gcagagagcacgggatgcgggtggg

SEQ ID NO: 696424 - DNA, 25 bp, Homo sapien
tgcatagaataaattatactagtaa

SEQ ID NO: 696425 - DNA, 25 bp, Homo sapien
ttgtattcagcagtcctgggtcagg

SEQ ID NO: 696426 - DNA, 25 bp, Homo sapien
tggggacgggatggctcactgggca

SEQ ID NO: 696427 - DNA, 25 bp, Homo sapien
ttaacatctttgtattcagcagtcc

SEQ ID NO: 696428 - DNA, 25 bp, Homo sapien
gggaccgcgtctgtcccaaagtagc

SEQ ID NO: 696429 - DNA, 25 bp, Homo sapien
gcgtctgtcccaaagtagcggtcgc

SEQ ID NO: 696430 - DNA, 25 bp, Homo sapien
tgtcccaaagtagcggtcgccaaag

SEQ ID NO: 696431 - DNA, 25 bp, Homo sapien
tcgtcactgccatcggggaccgcgt

SEQ ID NO: 696432 - DNA, 25 bp, Homo sapien
ccctgccctcatgtgcggctgaagg

SEQ ID NO: 696433 - DNA, 25 bp, Homo sapien
ctgccctcatgtgcggctgaagggc

SEQ ID NO: 696434 - DNA, 25 bp, Homo sapien
cctgccctcatgtgcggctgaaggg

SEQ ID NO: 696435 - DNA, 25 bp, Homo sapien
agtgcacgcccatctctgccatgag

SEQ ID NO: 696436 - DNA, 25 bp, Homo sapien
tgatgcggaaaaggtcattgacccg

SEQ ID NO: 696437 - DNA, 25 bp, Homo sapien
cggaaatgcataggccactgagtgc

SEQ ID NO: 696438 - DNA, 25 bp, Homo sapien
gatgattctcactcgcggaaatgca

SEQ ID NO: 696439 - DNA, 25 bp, Homo sapien
gagtgtattgggcaggtaaatccca

SEQ ID NO: 696440 - DNA, 25 bp, Homo sapien
gtgtattgggcaggtaaatcccacc

SEQ ID NO: 696441 - DNA, 25 bp, Homo sapien
accgagtgtattgggcaggtaaatc

SEQ ID NO: 696442 - DNA, 25 bp, Homo sapien
ctaccgagtgtattgggcaggtaaa

SEQ ID NO: 696443 - DNA, 25 bp, Homo sapien
cgtggtcatcgctgatgtccttggg

SEQ ID NO: 696444 - DNA, 25 bp, Homo sapien
cgtggacacggtgcagtccatgagg

SEQ ID NO: 696445 - DNA, 25 bp, Homo sapien
gccgcgcccgtggacacggtgcagt

SEQ ID NO: 696446 - DNA, 25 bp, Homo sapien
aggagcacgcgcactgccatcatgg

SEQ ID NO: 696447 - DNA, 25 bp, Homo sapien
ggctccctgcgtccccttgctgtga

SEQ ID NO: 696448 - DNA, 25 bp, Homo sapien
acccccgggctcatcaccccggctg

SEQ ID NO: 696449 - DNA, 25 bp, Homo sapien
cccccgggctcatcaccccggctgc

SEQ ID NO: 696450 - DNA, 25 bp, Homo sapien
ccccgggctcatcaccccggctgcc

SEQ ID NO: 696451 - DNA, 25 bp, Homo sapien
aggatggtgccgatgcgcacgtctt

SEQ ID NO: 696452 - DNA, 25 bp, Homo sapien
ctcgggctccccggtaagctggttg

SEQ ID NO: 696453 - DNA, 25 bp, Homo sapien
tctttgcacacagcgcgcagcgcgg

SEQ ID NO: 696454 - DNA, 25 bp, Homo sapien
gatgcgcacgtctttgcacacagcg

SEQ ID NO: 696455 - DNA, 25 bp, Homo sapien
tcaccggcgcgcagaatggacacac

SEQ ID NO: 696456 - DNA, 25 bp, Homo sapien
cccctgcggggtctgtacgacgcag

SEQ ID NO: 696457 - DNA, 25 bp, Homo sapien
cctgcggggtctgtacgacgcagtc

SEQ ID NO: 696458 - DNA, 25 bp, Homo sapien
ccctgcggggtctgtacgacgcagt

SEQ ID NO: 696459 - DNA, 25 bp, Homo sapien
gagcagccgcatcagtctcttggag

SEQ ID NO: 696460 - DNA, 25 bp, Homo sapien
tgctcgatgagcagccgcatcagtc

SEQ ID NO: 696461 - DNA, 25 bp, Homo sapien
tctcttggagtagaagatgaactcg

SEQ ID NO: 696462 - DNA, 25 bp, Homo sapien
agatgaactcgtcgcgactggtctc

SEQ ID NO: 696463 - DNA, 25 bp, Homo sapien
caacagttgagcgggagcacgcgcc

SEQ ID NO: 696464 - DNA, 25 bp, Homo sapien
agttgagcgggagcacgcgcccggg

SEQ ID NO: 696465 - DNA, 25 bp, Homo sapien
gggccaacagttgagcgggagcacg

SEQ ID NO: 696466 - DNA, 25 bp, Homo sapien
ctgtggggccaacagttgagcggga

SEQ ID NO: 696467 - DNA, 25 bp, Homo sapien
tggcactggtgtgccgaggccagcg

SEQ ID NO: 696468 - DNA, 25 bp, Homo sapien
gacgctcagcgtccggggcagcggg

SEQ ID NO: 696469 - DNA, 25 bp, Homo sapien
actggtgtgccgaggccagcgcagc

SEQ ID NO: 696470 - DNA, 25 bp, Homo sapien
tgcggcgtgctcttcaggacgctca

SEQ ID NO: 696471 - DNA, 25 bp, Homo sapien
ggacaaaccgatggggaacactcaa

SEQ ID NO: 696472 - DNA, 25 bp, Homo sapien
accgatggggaacactcaagaaggg

SEQ ID NO: 696473 - DNA, 25 bp, Homo sapien
gggacaaaccgatggggaacactca

SEQ ID NO: 696474 - DNA, 25 bp, Homo sapien
caaaccgatggggaacactcaagaa

SEQ ID NO: 696475 - DNA, 25 bp, Homo sapien
tgataggtgtcataccccagaatgg

SEQ ID NO: 696476 - DNA, 25 bp, Homo sapien
ctgtcaggcaaaggcgaaagatggc

SEQ ID NO: 696477 - DNA, 25 bp, Homo sapien
tcaccatcaggcagaaagctagcgg

SEQ ID NO: 696478 - DNA, 25 bp, Homo sapien
cagaatgggtagcttgtccccagcc

SEQ ID NO: 696479 - DNA, 25 bp, Homo sapien
tggcagagctgtgcgggctgcgagg

SEQ ID NO: 696480 - DNA, 25 bp, Homo sapien
gagctgtgcgggctgcgaggacaga

SEQ ID NO: 696481 - DNA, 25 bp, Homo sapien
gggacagtgggatgcggccccggcc

SEQ ID NO: 696482 - DNA, 25 bp, Homo sapien
gagggacagtgggatgcggccccgg

SEQ ID NO: 696483 - DNA, 25 bp, Homo sapien
caagggaacggtggcgcgtcagtga

SEQ ID NO: 696484 - DNA, 25 bp, Homo sapien
gcgtcagtgaccagggcaggcggcc

SEQ ID NO: 696485 - DNA, 25 bp, Homo sapien
gaacggtggcgcgtcagtgaccagg

SEQ ID NO: 696486 - DNA, 25 bp, Homo sapien
cacaggaagacacaagggaacggtg

SEQ ID NO: 696487 - DNA, 25 bp, Homo sapien
ccagcttcctcagggaacccaggcc

SEQ ID NO: 696488 - DNA, 25 bp, Homo sapien
cccagcttcctcagggaacccaggc

SEQ ID NO: 696489 - DNA, 25 bp, Homo sapien
ggggatgaggtgaccaggccactgg

SEQ ID NO: 696490 - DNA, 25 bp, Homo sapien
tggtggcagcggagaagtgggtaga

SEQ ID NO: 696491 - DNA, 25 bp, Homo sapien
gggtggtggcagcggagaagtgggt

SEQ ID NO: 696492 - DNA, 25 bp, Homo sapien
ggacagtgaacgcagggggatgagg

SEQ ID NO: 696493 - DNA, 25 bp, Homo sapien
tgcacaatcaggtcgatggccaccg

SEQ ID NO: 696494 - DNA, 25 bp, Homo sapien
gtcgatggccaccgtgttgccgctc

SEQ ID NO: 696495 - DNA, 25 bp, Homo sapien
cgtgctgcacaatcaggtcgatggc

SEQ ID NO: 696496 - DNA, 25 bp, Homo sapien
ctggctgtgcacgtgctgcacaatc

SEQ ID NO: 696497 - DNA, 25 bp, Homo sapien
tgacaaacttgttgtactgcttgat

SEQ ID NO: 696498 - DNA, 25 bp, Homo sapien
tactggtcgaaggagggcttgacaa

SEQ ID NO: 696499 - DNA, 25 bp, Homo sapien
gcggatgtcggagtctgtgtccaca

SEQ ID NO: 696500 - DNA, 25 bp, Homo sapien
cgcagccgccgtaccaggcggatgt

SEQ ID NO: 696501 - DNA, 25 bp, Homo sapien
tggtggagacagcgggccagtgagt

SEQ ID NO: 696502 - DNA, 25 bp, Homo sapien
ctgcactgaggccgcctggtccgtg

SEQ ID NO: 696503 - DNA, 25 bp, Homo sapien
aggccgcctggtccgtgggcctggc

SEQ ID NO: 696504 - DNA, 25 bp, Homo sapien
acagcgggccagtgagtggccagat

SEQ ID NO: 696505 - DNA, 25 bp, Homo sapien
gggtaacttgcaccaacacactggg

SEQ ID NO: 696506 - DNA, 25 bp, Homo sapien
gtggcgagtttagggtctgtcccca

SEQ ID NO: 696507 - DNA, 25 bp, Homo sapien
tatgtgccggatgatggagtcctct

SEQ ID NO: 696508 - DNA, 25 bp, Homo sapien
cagcacacagtagttggcccgtgaa

SEQ ID NO: 696509 - DNA, 25 bp, Homo sapien
aaagatgatgacgtttgcaccatac

SEQ ID NO: 696510 - DNA, 25 bp, Homo sapien
tgacgtttgcaccatacagtgtttt

SEQ ID NO: 696511 - DNA, 25 bp, Homo sapien
cagtgtcttgtcagcaaaggccatg

SEQ ID NO: 696512 - DNA, 25 bp, Homo sapien
tgtcttgtcagcaaaggccatgatg

SEQ ID NO: 696513 - DNA, 25 bp, Homo sapien
taaatgggcaccttgacactcttcc

SEQ ID NO: 696514 - DNA, 25 bp, Homo sapien
tcttccggctgtgcgtggtgaagtc

SEQ ID NO: 696515 - DNA, 25 bp, Homo sapien
tgaagtcataaatgggcaccttgac

SEQ ID NO: 696516 - DNA, 25 bp, Homo sapien
gcgtggtgaagtcataaatgggcac

SEQ ID NO: 696517 - DNA, 25 bp, Homo sapien
ttgaagttgttgtgtgcggcctgtt

SEQ ID NO: 696518 - DNA, 25 bp, Homo sapien
aagttgttgtgtgcggcctgttcct

SEQ ID NO: 696519 - DNA, 25 bp, Homo sapien
ggtcgaagttgaagttgttgtgtgc

SEQ ID NO: 696520 - DNA, 25 bp, Homo sapien
aagttgaagttgttgtgtgcggcct

SEQ ID NO: 696521 - DNA, 25 bp, Homo sapien
ctgagaccagggacctacttttgca

SEQ ID NO: 696522 - DNA, 25 bp, Homo sapien
ctcacccaatgccagcggacagggg

SEQ ID NO: 696523 - DNA, 25 bp, Homo sapien
ggcacagtagggccctcacccaatg

SEQ ID NO: 696524 - DNA, 25 bp, Homo sapien
ggctgagaccagggacctacttttg

SEQ ID NO: 696525 - DNA, 25 bp, Homo sapien
tccagggcctcgatgatcattctgg

SEQ ID NO: 696526 - DNA, 25 bp, Homo sapien
ccagggcctcgatgatcattctggc

SEQ ID NO: 696527 - DNA, 25 bp, Homo sapien
cagggcctcgatgatcattctggcc

SEQ ID NO: 696528 - DNA, 25 bp, Homo sapien
tgcctgcggttgcccggcttccttc

SEQ ID NO: 696529 - DNA, 25 bp, Homo sapien
ctgccggcacagataggtcccagag

SEQ ID NO: 696530 - DNA, 25 bp, Homo sapien
aggctgccggcacagataggtccca

SEQ ID NO: 696531 - DNA, 25 bp, Homo sapien
gccggcacagataggtcccagaggt

SEQ ID NO: 696532 - DNA, 25 bp, Homo sapien
gcaggcgtccggcagcaggtcccac

SEQ ID NO: 696533 - DNA, 25 bp, Homo sapien
gagccggaggcaggcgtccggcagc

SEQ ID NO: 696534 - DNA, 25 bp, Homo sapien
ggaggcaggcgtccggcagcaggtc

SEQ ID NO: 696535 - DNA, 25 bp, Homo sapien
aggcgtccggcagcaggtcccaccc

SEQ ID NO: 696536 - DNA, 25 bp, Homo sapien
gcgaaggcctctttggattgcgtgc

SEQ ID NO: 696537 - DNA, 25 bp, Homo sapien
cggtgtagatggtacgcttgcttgt

SEQ ID NO: 696538 - DNA, 25 bp, Homo sapien
ttcattgtaccagggcggccgcccg

SEQ ID NO: 696539 - DNA, 25 bp, Homo sapien
gtacgcttgcttgtacgcagcaggg

SEQ ID NO: 696540 - DNA, 25 bp, Homo sapien
catggccggcccacagggcaccccc

SEQ ID NO: 696541 - DNA, 25 bp, Homo sapien
gcgggcaggctcattgggggtacat

SEQ ID NO: 696542 - DNA, 25 bp, Homo sapien
gctcattgggggtacataagaactc

SEQ ID NO: 696543 - DNA, 25 bp, Homo sapien
agagggatgtactcggatgtggccc

SEQ ID NO: 696544 - DNA, 25 bp, Homo sapien
tatcttggggccatgctcatcctgc

SEQ ID NO: 696545 - DNA, 25 bp, Homo sapien
gcccgaaaacgacacagaacacagg

SEQ ID NO: 696546 - DNA, 25 bp, Homo sapien
acagatgccagttacgcccgaaaac

SEQ ID NO: 696547 - DNA, 25 bp, Homo sapien
acagggaacggcatcctcagagcat

SEQ ID NO: 696548 - DNA, 25 bp, Homo sapien
gaaatggaacgctccacagatgcca

SEQ ID NO: 696549 - DNA, 25 bp, Homo sapien
aaacgaaggacgctcaccgccatgc

SEQ ID NO: 696550 - DNA, 25 bp, Homo sapien
aggaaacgaaggacgctcaccgcca

SEQ ID NO: 696551 - DNA, 25 bp, Homo sapien
accgccatgcgcctcggtgtgagga

SEQ ID NO: 696552 - DNA, 25 bp, Homo sapien
aaatccaggaaacgaaggacgctca

SEQ ID NO: 696553 - DNA, 25 bp, Homo sapien
ccctgagatcctgatgccagggtaa

SEQ ID NO: 696554 - DNA, 25 bp, Homo sapien
tgagatcctgatgccagggtaagct

SEQ ID NO: 696555 - DNA, 25 bp, Homo sapien
cggcaccctgagatcctgatgccag

SEQ ID NO: 696556 - DNA, 25 bp, Homo sapien
ggcaccctgagatcctgatgccagg

SEQ ID NO: 696557 - DNA, 25 bp, Homo sapien
ctggcccttccatgggcaggaccac

SEQ ID NO: 696558 - DNA, 25 bp, Homo sapien
agcagtcccctagggcagctcagga

SEQ ID NO: 696559 - DNA, 25 bp, Homo sapien
gcagcacagtgggtgcagagccggg

SEQ ID NO: 696560 - DNA, 25 bp, Homo sapien
aggagctccggccacctgaactggc

SEQ ID NO: 696561 - DNA, 25 bp, Homo sapien
cagagcaccttctgcctaaggcttc

SEQ ID NO: 696562 - DNA, 25 bp, Homo sapien
ggttctaacttcctgagctgggccg

SEQ ID NO: 696563 - DNA, 25 bp, Homo sapien
acccacaggtgctgatgccgcgctg

SEQ ID NO: 696564 - DNA, 25 bp, Homo sapien
gggccggtccagagaactcccattc

SEQ ID NO: 696565 - DNA, 25 bp, Homo sapien
acagtcgaatgtggctcagtcccct

SEQ ID NO: 696566 - DNA, 25 bp, Homo sapien
agcacagtcgaatgtggctcagtcc

SEQ ID NO: 696567 - DNA, 25 bp, Homo sapien
acagcacagtcgaatgtggctcagt

SEQ ID NO: 696568 - DNA, 25 bp, Homo sapien
cacagtcgaatgtggctcagtcccc

SEQ ID NO: 696569 - DNA, 25 bp, Homo sapien
gcctcatcggtgatcaggccccata

SEQ ID NO: 696570 - DNA, 25 bp, Homo sapien
tcgtcaagaaataggcacaggtggc

SEQ ID NO: 696571 - DNA, 25 bp, Homo sapien
ggccccataactgatgtcatcgtca

SEQ ID NO: 696572 - DNA, 25 bp, Homo sapien
caggtgggtcagctcataaagtcca

SEQ ID NO: 696573 - DNA, 25 bp, Homo sapien
gccctattagactccagccatgcaa

SEQ ID NO: 696574 - DNA, 25 bp, Homo sapien
ttgcttgaactgagctcgggaaagg

SEQ ID NO: 696575 - DNA, 25 bp, Homo sapien
attgcttgaactgagctcgggaaag

SEQ ID NO: 696576 - DNA, 25 bp, Homo sapien
gaggaacagactcaggccctattag

SEQ ID NO: 696577 - DNA, 25 bp, Homo sapien
ggtctcgcttttctcagcctgccgg

SEQ ID NO: 696578 - DNA, 25 bp, Homo sapien
tcgcacgcggtctcgcttttctcag

SEQ ID NO: 696579 - DNA, 25 bp, Homo sapien
acgcggtctcgcttttctcagcctg

SEQ ID NO: 696580 - DNA, 25 bp, Homo sapien
ggtcctcgcacgcggtctcgctttt

SEQ ID NO: 696581 - DNA, 25 bp, Homo sapien
aggtggcgacgtgggcgaaggatca

SEQ ID NO: 696582 - DNA, 25 bp, Homo sapien
gtgtctcgggccgtaggtggcgacg

SEQ ID NO: 696583 - DNA, 25 bp, Homo sapien
tgggcgaaggatcagcgtccgcgcg

SEQ ID NO: 696584 - DNA, 25 bp, Homo sapien
cgaaggatcagcgtccgcgcgggcc

SEQ ID NO: 696585 - DNA, 25 bp, Homo sapien
ggaggcctctttgcgggcctggccg

SEQ ID NO: 696586 - DNA, 25 bp, Homo sapien
tcggaggcctctttgcgggcctggc

SEQ ID NO: 696587 - DNA, 25 bp, Homo sapien
ggcgctcggaggcctctttgcgggc

SEQ ID NO: 696588 - DNA, 25 bp, Homo sapien
gctcggaggcctctttgcgggcctg

SEQ ID NO: 696589 - DNA, 25 bp, Homo sapien
gaactcaccgttgaaacatctcgca

SEQ ID NO: 696590 - DNA, 25 bp, Homo sapien
aatgcacttatgtactgagaactgg

SEQ ID NO: 696591 - DNA, 25 bp, Homo sapien
taatacatacagtgatggcccgtcc

SEQ ID NO: 696592 - DNA, 25 bp, Homo sapien
tatatggttacaagtgatagctgga

SEQ ID NO: 696593 - DNA, 25 bp, Homo sapien
gcgtcggcccggtgagtcagccctt

SEQ ID NO: 696594 - DNA, 25 bp, Homo sapien
gggtcagctatgctggtccctctca

SEQ ID NO: 696595 - DNA, 25 bp, Homo sapien
tgcgctgagccagaggtagatctgc

SEQ ID NO: 696596 - DNA, 25 bp, Homo sapien
tcccattttcgtgtgagcgtcggcc

SEQ ID NO: 696597 - DNA, 25 bp, Homo sapien
cattggtggcaaggacaaagtgcac

SEQ ID NO: 696598 - DNA, 25 bp, Homo sapien
ccaagggccaagtacctgagaggct

SEQ ID NO: 696599 - DNA, 25 bp, Homo sapien
taaacatcaaggtatccaggactcc

SEQ ID NO: 696600 - DNA, 25 bp, Homo sapien
agctccaccagtgaagctctgggac

SEQ ID NO: 696601 - DNA, 25 bp, Homo sapien
ggaagtgttctgcaaccccagtccc

SEQ ID NO: 696602 - DNA, 25 bp, Homo sapien
gggttggagccttctggcccaagga

SEQ ID NO: 696603 - DNA, 25 bp, Homo sapien
ttggagccttctggcccaaggatga

SEQ ID NO: 696604 - DNA, 25 bp, Homo sapien
tgtctccctactactgcaggccaag

SEQ ID NO: 696605 - DNA, 25 bp, Homo sapien
cagggatcgcactgacaaaggagga

SEQ ID NO: 696606 - DNA, 25 bp, Homo sapien
gaaacccttagcaccaaatgtcgga

SEQ ID NO: 696607 - DNA, 25 bp, Homo sapien
gggcctacccagattggcagacaga

SEQ ID NO: 696608 - DNA, 25 bp, Homo sapien
tctggagctgccatcaacctgctgt

SEQ ID NO: 696609 - DNA, 25 bp, Homo sapien
ctgagccttggggtagccagggaag

SEQ ID NO: 696610 - DNA, 25 bp, Homo sapien
cccagaaccacaggtcaccagggat

SEQ ID NO: 696611 - DNA, 25 bp, Homo sapien
agcccagaaccacaggtcaccaggg

SEQ ID NO: 696612 - DNA, 25 bp, Homo sapien
gtcaccagggatgcctgagccttgg

SEQ ID NO: 696613 - DNA, 25 bp, Homo sapien
gctgccccactggacggatgaagag

SEQ ID NO: 696614 - DNA, 25 bp, Homo sapien
aaggccatctgcctactctgcgctg

SEQ ID NO: 696615 - DNA, 25 bp, Homo sapien
aaccctcctggctattgcacttctg

SEQ ID NO: 696616 - DNA, 25 bp, Homo sapien
ccctgccttgaacagagggcggtgt

SEQ ID NO: 696617 - DNA, 25 bp, Homo sapien
tttcaggcgccttgctgactcccac

SEQ ID NO: 696618 - DNA, 25 bp, Homo sapien
ttttcaggcgccttgctgactccca

SEQ ID NO: 696619 - DNA, 25 bp, Homo sapien
gctcctgtgtttgggaggtgggtct

SEQ ID NO: 696620 - DNA, 25 bp, Homo sapien
cttcttgggcaccaatgagtcctgg

SEQ ID NO: 696621 - DNA, 25 bp, Homo sapien
gtgggtctgctgatgttcggaacca

SEQ ID NO: 696622 - DNA, 25 bp, Homo sapien
cgctccttgggctttcggccccgct

SEQ ID NO: 696623 - DNA, 25 bp, Homo sapien
acacagccttcaggaccaggcaggc

SEQ ID NO: 696624 - DNA, 25 bp, Homo sapien
cacagccttcaggaccaggcaggca

SEQ ID NO: 696625 - DNA, 25 bp, Homo sapien
gccttcgggaccaggcaagcacctg

SEQ ID NO: 696626 - DNA, 25 bp, Homo sapien
cagccttcgggaccaggcaagcacc

SEQ ID NO: 696627 - DNA, 25 bp, Homo sapien
acagccttcgggaccaggcaagcac

SEQ ID NO: 696628 - DNA, 25 bp, Homo sapien
agccttcgggaccaggcaagcacct

SEQ ID NO: 696629 - DNA, 25 bp, Homo sapien
gaactgaactccttcggacacagca

SEQ ID NO: 696630 - DNA, 25 bp, Homo sapien
gatgtggtatttgacgccactctca

SEQ ID NO: 696631 - DNA, 25 bp, Homo sapien
acagcggtacttccctgccaggtgg

SEQ ID NO: 696632 - DNA, 25 bp, Homo sapien
tatttgacgccactctcagaactga

SEQ ID NO: 696633 - DNA, 25 bp, Homo sapien
tgagtccggacacgctggagtagat

SEQ ID NO: 696634 - DNA, 25 bp, Homo sapien
atgagccttgagtccggacacgctg

SEQ ID NO: 696635 - DNA, 25 bp, Homo sapien
gcgagatgagccttgagtccggaca

SEQ ID NO: 696636 - DNA, 25 bp, Homo sapien
actgcagctggcgagatgagccttg

SEQ ID NO: 696637 - DNA, 25 bp, Homo sapien
ggagccctggtcgagtgtagttgag

SEQ ID NO: 696638 - DNA, 25 bp, Homo sapien
gacagttgacgtggcctttctcctt

SEQ ID NO: 696639 - DNA, 25 bp, Homo sapien
tcgttgggacagttgacgtggcctt

SEQ ID NO: 696640 - DNA, 25 bp, Homo sapien
attcttccatgcctctagcagctgg

SEQ ID NO: 696641 - DNA, 25 bp, Homo sapien
ccgtgcggtctcgggcacaaggtca

SEQ ID NO: 696642 - DNA, 25 bp, Homo sapien
aggtcatccttcatgcgccgcttgg

SEQ ID NO: 696643 - DNA, 25 bp, Homo sapien
tcctccgctatctcctgcaggtgga

SEQ ID NO: 696644 - DNA, 25 bp, Homo sapien
cgcttggtccagtcgcgggccagct

SEQ ID NO: 696645 - DNA, 25 bp, Homo sapien
tgctccgagcgcacgtggtagtcgt

SEQ ID NO: 696646 - DNA, 25 bp, Homo sapien
tggtggtactggtagcccatgaggc

SEQ ID NO: 696647 - DNA, 25 bp, Homo sapien
ggctgtccacctcgcagggcggctt

SEQ ID NO: 696648 - DNA, 25 bp, Homo sapien
gatcggtacgtcttgccacagtggg

SEQ ID NO: 696649 - DNA, 25 bp, Homo sapien
cagcgcagccgtcccatctgcttca

SEQ ID NO: 696650 - DNA, 25 bp, Homo sapien
cctcctgctcgcccccttcggaggc

SEQ ID NO: 696651 - DNA, 25 bp, Homo sapien
gcaccttgcgcagcctctcgcgctc

SEQ ID NO: 696652 - DNA, 25 bp, Homo sapien
cctgctcgcccccttcggaggcctc

SEQ ID NO: 696653 - DNA, 25 bp, Homo sapien
tgtgctcggccatagtgtggtagtt

SEQ ID NO: 696654 - DNA, 25 bp, Homo sapien
ttgaggccggctttggacttgaact

SEQ ID NO: 696655 - DNA, 25 bp, Homo sapien
tgctggcacttgagtgcatcctgaa

SEQ ID NO: 696656 - DNA, 25 bp, Homo sapien
gacttgaactgcttccggcagtgct

SEQ ID NO: 696657 - DNA, 25 bp, Homo sapien
atgtgcttcttaagccccacgagag

SEQ ID NO: 696658 - DNA, 25 bp, Homo sapien
tcttccgggtgaccacgttgcaggt

SEQ ID NO: 696659 - DNA, 25 bp, Homo sapien
cccacgagagtcttccgggtgacca

SEQ ID NO: 696660 - DNA, 25 bp, Homo sapien
tcttaagccccacgagagtcttccg

SEQ ID NO: 696661 - DNA, 25 bp, Homo sapien
cctgcttcttggagcggtgaactcg

SEQ ID NO: 696662 - DNA, 25 bp, Homo sapien
gagcggtgaactcgggccttgtcct

SEQ ID NO: 696663 - DNA, 25 bp, Homo sapien
tcttggagcggtgaactcgggcctt

SEQ ID NO: 696664 - DNA, 25 bp, Homo sapien
acaggggccggtgcctccttgctga

SEQ ID NO: 696665 - DNA, 25 bp, Homo sapien
atggctgctcccctgtaaacttttt

SEQ ID NO: 696666 - DNA, 25 bp, Homo sapien
tggctgctcccctgtaaactttttg

SEQ ID NO: 696667 - DNA, 25 bp, Homo sapien
tgacggcctgctgcctggcgacaag

SEQ ID NO: 696668 - DNA, 25 bp, Homo sapien
ctggaaggccgagctctggcccatg

SEQ ID NO: 696669 - DNA, 25 bp, Homo sapien
gaggggccgtactccccattctctg

SEQ ID NO: 696670 - DNA, 25 bp, Homo sapien
gcctggcgacaaggagccactgctg

SEQ ID NO: 696671 - DNA, 25 bp, Homo sapien
cgacctgggacgagcccccatacct

SEQ ID NO: 696672 - DNA, 25 bp, Homo sapien
cttaccactgttcctccccgacctg

SEQ ID NO: 696673 - DNA, 25 bp, Homo sapien
ttttctcaccactgttcctccccaa

SEQ ID NO: 696674 - DNA, 25 bp, Homo sapien
tgttcctccccgacctgggacgagc

SEQ ID NO: 696675 - DNA, 25 bp, Homo sapien
cttaccactgttcctccccgacctg

SEQ ID NO: 696676 - DNA, 25 bp, Homo sapien
cactgttccctgacctgggacgagc

SEQ ID NO: 696677 - DNA, 25 bp, Homo sapien
tgttccctgacctgggacgagcccc

SEQ ID NO: 696678 - DNA, 25 bp, Homo sapien
taccttttctcaccactgttccctg

SEQ ID NO: 696679 - DNA, 25 bp, Homo sapien
cactgttcctccccgacctgggacg

SEQ ID NO: 696680 - DNA, 25 bp, Homo sapien
ctgttcctccccgacctgggacgag

SEQ ID NO: 696681 - DNA, 25 bp, Homo sapien
tgttcctccccgacctgggacgagc

SEQ ID NO: 696682 - DNA, 25 bp, Homo sapien
gacaggtttgctcactccgatgggc

SEQ ID NO: 696683 - DNA, 25 bp, Homo sapien
tgtctgctgatagcaatgggcctgc

SEQ ID NO: 696684 - DNA, 25 bp, Homo sapien
cacaatgggcctgctgactgtcact

SEQ ID NO: 696685 - DNA, 25 bp, Homo sapien
tacgggtttggtgaccggcacagac

SEQ ID NO: 696686 - DNA, 25 bp, Homo sapien
gcctctgcccaaacacaccccgagg

SEQ ID NO: 696687 - DNA, 25 bp, Homo sapien
cctctgcccaaacacaccccgaggc

SEQ ID NO: 696688 - DNA, 25 bp, Homo sapien
gggcctctgcccaaacacaccccga

SEQ ID NO: 696689 - DNA, 25 bp, Homo sapien
tctgcccaaacacaccccgaggcct

SEQ ID NO: 696690 - DNA, 25 bp, Homo sapien
taatggtacttgagcccgtagatgc

SEQ ID NO: 696691 - DNA, 25 bp, Homo sapien
cctcgagtgtgccttgaactcatcc

SEQ ID NO: 696692 - DNA, 25 bp, Homo sapien
ccttggcaccgctggtaatggtact

SEQ ID NO: 696693 - DNA, 25 bp, Homo sapien
ccttccagtcgttcatcagggagag

SEQ ID NO: 696694 - DNA, 25 bp, Homo sapien
gccacgtgaagtctgccaggccagt

SEQ ID NO: 696695 - DNA, 25 bp, Homo sapien
ggccagtgcccacatcttgaggcat

SEQ ID NO: 696696 - DNA, 25 bp, Homo sapien
tgcacaagacccgttctaggagccc

SEQ ID NO: 696697 - DNA, 25 bp, Homo sapien
gaatctcccggcacatcagatacaa

SEQ ID NO: 696698 - DNA, 25 bp, Homo sapien
actggctggacttcccgggtcaaag

SEQ ID NO: 696699 - DNA, 25 bp, Homo sapien
acttcccgggtcaaagcagagaggg

SEQ ID NO: 696700 - DNA, 25 bp, Homo sapien
cttctgtcttgtcactggctggact

SEQ ID NO: 696701 - DNA, 25 bp, Homo sapien
gagggcctggttctcggcttttggc

SEQ ID NO: 696702 - DNA, 25 bp, Homo sapien
aatggtccactcctaccacttgctg

SEQ ID NO: 696703 - DNA, 25 bp, Homo sapien
gaccctgggctatgtccaaggcaac

SEQ ID NO: 696704 - DNA, 25 bp, Homo sapien
ctggaattgactctggccctgactc

SEQ ID NO: 696705 - DNA, 25 bp, Homo sapien
cctagctgggtacctggagacagga

SEQ ID NO: 696706 - DNA, 25 bp, Homo sapien
ggaccactcttgctggaccccggga

SEQ ID NO: 696707 - DNA, 25 bp, Homo sapien
catcttcggtgggtcatgcagcatt

SEQ ID NO: 696708 - DNA, 25 bp, Homo sapien
gacggcctccaacgcagaaaggatc

SEQ ID NO: 696709 - DNA, 25 bp, Homo sapien
ggaagtcggacctcctttcggctgc

SEQ ID NO: 696710 - DNA, 25 bp, Homo sapien
agatgatgccgaaggtgatgcactc

SEQ ID NO: 696711 - DNA, 25 bp, Homo sapien
tgtgcgtagccccacagctgcgaag

SEQ ID NO: 696712 - DNA, 25 bp, Homo sapien
aacacgcagctctacagtgtacgca

SEQ ID NO: 696713 - DNA, 25 bp, Homo sapien
gctctacagtgtacgcagctccaca

SEQ ID NO: 696714 - DNA, 25 bp, Homo sapien
ggcgcggggcgcgggcctcggcctg

SEQ ID NO: 696715 - DNA, 25 bp, Homo sapien
gcggggcgcgggcctcggcctggcc

SEQ ID NO: 696716 - DNA, 25 bp, Homo sapien
gcgcggggcgcgggcctcggcctgg

SEQ ID NO: 696717 - DNA, 25 bp, Homo sapien
cggggcgcgggcctcggcctggccg

SEQ ID NO: 696718 - DNA, 25 bp, Homo sapien
gcggcgcccagcggggctgcggccg

SEQ ID NO: 696719 - DNA, 25 bp, Homo sapien
tgcggcgcccagcggggctgcggcc

SEQ ID NO: 696720 - DNA, 25 bp, Homo sapien
ctgcggcgcccagcggggctgcggc

SEQ ID NO: 696721 - DNA, 25 bp, Homo sapien
ggcgcccagcggggctgcggccggg

SEQ ID NO: 696722 - DNA, 25 bp, Homo sapien
tctgccccacagcttgggcttctgc

SEQ ID NO: 696723 - DNA, 25 bp, Homo sapien
actggggtccggtgtgggctgagtg

SEQ ID NO: 696724 - DNA, 25 bp, Homo sapien
ttgggtcaccctttcccagctctgg

SEQ ID NO: 696725 - DNA, 25 bp, Homo sapien
tgaaccagtgccagggccttctctg

SEQ ID NO: 696726 - DNA, 25 bp, Homo sapien
tgtgtccccttaggtgcagccaagg

SEQ ID NO: 696727 - DNA, 25 bp, Homo sapien
tgtaccccgtggagcaagctcagag

SEQ ID NO: 696728 - DNA, 25 bp, Homo sapien
tatagaagaggcagtcagtcaatcc

SEQ ID NO: 696729 - DNA, 25 bp, Homo sapien
ggcattccctgtgaggctagcgtca

SEQ ID NO: 696730 - DNA, 25 bp, Homo sapien
tgtgagcatctacatgccagggtgt

SEQ ID NO: 696731 - DNA, 25 bp, Homo sapien
gggatgtgccgtgtcccatgtgttt

SEQ ID NO: 696732 - DNA, 25 bp, Homo sapien
gatttcagtatccatgtgtccaggc

SEQ ID NO: 696733 - DNA, 25 bp, Homo sapien
catgtctcagtgtcagggtgctggt

SEQ ID NO: 696734 - DNA, 25 bp, Homo sapien
gatggccactactctagatgatggg

SEQ ID NO: 696735 - DNA, 25 bp, Homo sapien
ggcagaatacttgcgcagccacaca

SEQ ID NO: 696736 - DNA, 25 bp, Homo sapien
tgggtggacagacaagtgactcagc

SEQ ID NO: 696737 - DNA, 25 bp, Homo sapien
ccaggccttcttgggaaagcagcaa

SEQ ID NO: 696738 - DNA, 25 bp, Homo sapien
cttctccgcattcagccgcagcagt

SEQ ID NO: 696739 - DNA, 25 bp, Homo sapien
agcttctccgcattcagccgcagca

SEQ ID NO: 696740 - DNA, 25 bp, Homo sapien
gcagcttctccgcattcagccgcag

SEQ ID NO: 696741 - DNA, 25 bp, Homo sapien
ttctccgcattcagccgcagcagtg

SEQ ID NO: 696742 - DNA, 25 bp, Homo sapien
tacaggccatagtggtcagagtaca

SEQ ID NO: 696743 - DNA, 25 bp, Homo sapien
ttcttgagccacttgcagacgtcct

SEQ ID NO: 696744 - DNA, 25 bp, Homo sapien
gggcttgtatggtacaggccatagt

SEQ ID NO: 696745 - DNA, 25 bp, Homo sapien
gagaaggcctccacgtagacgaggt

SEQ ID NO: 696746 - DNA, 25 bp, Homo sapien
tgacaccgtgtgctccaggagggtc

SEQ ID NO: 696747 - DNA, 25 bp, Homo sapien
ccaggtgtccgaggcaagtggcagg

SEQ ID NO: 696748 - DNA, 25 bp, Homo sapien
tcatgccacgtgaggctggtgccag

SEQ ID NO: 696749 - DNA, 25 bp, Homo sapien
tgctgcaggagcttgattggcctgc

SEQ ID NO: 696750 - DNA, 25 bp, Homo sapien
gactatgactcattgacagcctgaa

SEQ ID NO: 696751 - DNA, 25 bp, Homo sapien
catatgacaagaggagctatcctgg

SEQ ID NO: 696752 - DNA, 25 bp, Homo sapien
gattcttagatcagaggatgtgccc

SEQ ID NO: 696753 - DNA, 25 bp, Homo sapien
aactgtgggccaactgacaagcagg

SEQ ID NO: 696754 - DNA, 25 bp, Homo sapien
gtctggttacagaggggcaccccac

SEQ ID NO: 696755 - DNA, 25 bp, Homo sapien
gaggcaggcgtcttgatccaggtct

SEQ ID NO: 696756 - DNA, 25 bp, Homo sapien
agaggggcaccccacattcattgtc

SEQ ID NO: 696757 - DNA, 25 bp, Homo sapien
aggcgtcttgatccaggtctggtta

SEQ ID NO: 696758 - DNA, 25 bp, Homo sapien
gcttggacctcagctcggtgaacat

SEQ ID NO: 696759 - DNA, 25 bp, Homo sapien
agcttggacctcagctcggtgaaca

SEQ ID NO: 696760 - DNA, 25 bp, Homo sapien
gggcccgcgggtgccaggcccgcgc

SEQ ID NO: 696761 - DNA, 25 bp, Homo sapien
cccgcgggtgccaggcccgcgcaca

SEQ ID NO: 696762 - DNA, 25 bp, Homo sapien
ccgcgggtgccaggcccgcgcacac

SEQ ID NO: 696763 - DNA, 25 bp, Homo sapien
gggtgccaggcccgcgcacacgccc

SEQ ID NO: 696764 - DNA, 25 bp, Homo sapien
tcgccgagtgcagggcggccggtgt

SEQ ID NO: 696765 - DNA, 25 bp, Homo sapien
ctcgccgagtgcagggcggccggtg

SEQ ID NO: 696766 - DNA, 25 bp, Homo sapien
gcccgcgagtgtgcgcgacgaggca

SEQ ID NO: 696767 - DNA, 25 bp, Homo sapien
cgcggcccgcgagtgtgcgcgacga

SEQ ID NO: 696768 - DNA, 25 bp, Homo sapien
ggcgcgcgggcctgcgtgcaccaag

SEQ ID NO: 696769 - DNA, 25 bp, Homo sapien
tccgaggtgtgtcggcggcgcgcgg

SEQ ID NO: 696770 - DNA, 25 bp, Homo sapien
cgtgcaccaaggctgtccgccaggg

SEQ ID NO: 696771 - DNA, 25 bp, Homo sapien
ccgggagctccgaggtgtgtcggcg

SEQ ID NO: 696772 - DNA, 25 bp, Homo sapien
ctccgcggaggagagtccccgtgaa

SEQ ID NO: 696773 - DNA, 25 bp, Homo sapien
agagtccccgtgaacctgccgggcg

SEQ ID NO: 696774 - DNA, 25 bp, Homo sapien
acctgccgggcgtcctctgaggtcg

SEQ ID NO: 696775 - DNA, 25 bp, Homo sapien
tctgaggtcgggcccctctgtgcgt

SEQ ID NO: 696776 - DNA, 25 bp, Homo sapien
ttactcgccttcaaataggcacccg

SEQ ID NO: 696777 - DNA, 25 bp, Homo sapien
acaaggggcaggtcaacgcctccca

SEQ ID NO: 696778 - DNA, 25 bp, Homo sapien
cctcggtctcctacgtctttactcg

SEQ ID NO: 696779 - DNA, 25 bp, Homo sapien
aaaccagcttgactcttgcttaccg

SEQ ID NO: 696780 - DNA, 25 bp, Homo sapien
ttgccacagtgacgcttctgatcac

SEQ ID NO: 696781 - DNA, 25 bp, Homo sapien
gcctctccgtccggggacccagctc

SEQ ID NO: 696782 - DNA, 25 bp, Homo sapien
aagtctttgccacagtgacgcttct

SEQ ID NO: 696783 - DNA, 25 bp, Homo sapien
atttattgtggcctctccgtccggg

SEQ ID NO: 696784 - DNA, 25 bp, Homo sapien
aaggccgagcatcactggctcctag

SEQ ID NO: 696785 - DNA, 25 bp, Homo sapien
tgtgacatggaaccaaacatacacg

SEQ ID NO: 696786 - DNA, 25 bp, Homo sapien
tacacgcgtatgagagagcagagcg

SEQ ID NO: 696787 - DNA, 25 bp, Homo sapien
aaaatgtaaccctggcaactctgcc

SEQ ID NO: 696788 - DNA, 25 bp, Homo sapien
cgctgtaatagaccgcgctgctggc

SEQ ID NO: 696789 - DNA, 25 bp, Homo sapien
ctggcgtccgacagcgcggagatca

SEQ ID NO: 696790 - DNA, 25 bp, Homo sapien
tagccggagatgcacgcgctgtaat

SEQ ID NO: 696791 - DNA, 25 bp, Homo sapien
ccgagtccggctgcagttgaggtac

SEQ ID NO: 696792 - DNA, 25 bp, Homo sapien
cccagggtgccgtagtacaggccag

SEQ ID NO: 696793 - DNA, 25 bp, Homo sapien
tggtcgcgcaagtgctgcacgcgca

SEQ ID NO: 696794 - DNA, 25 bp, Homo sapien
agccgttcggcttcctccacgaagg

SEQ ID NO: 696795 - DNA, 25 bp, Homo sapien
tcccgcgacaactcggtgggcgcgt

SEQ ID NO: 696796 - DNA, 25 bp, Homo sapien
aggtccgggttctgctgagccagcc

SEQ ID NO: 696797 - DNA, 25 bp, Homo sapien
agccagccgcttgcgctcgtccttt

SEQ ID NO: 696798 - DNA, 25 bp, Homo sapien
caccgcgttgtgcaggtccgggttc

SEQ ID NO: 696799 - DNA, 25 bp, Homo sapien
cagcatcttgctgagcaccgcgttg

SEQ ID NO: 696800 - DNA, 25 bp, Homo sapien
ggcgttcatgggccgccggatgcgc

SEQ ID NO: 696801 - DNA, 25 bp, Homo sapien
gttcatgggccgccggatgcgcgac

SEQ ID NO: 696802 - DNA, 25 bp, Homo sapien
gaaggcgttcatgggccgccggatg

SEQ ID NO: 696803 - DNA, 25 bp, Homo sapien
cgttcatgggccgccggatgcgcga

SEQ ID NO: 696804 - DNA, 25 bp, Homo sapien
gccggccgggctgaggccatagcgc

SEQ ID NO: 696805 - DNA, 25 bp, Homo sapien
cgggcgggtcgtcctgtgcgccgta

SEQ ID NO: 696806 - DNA, 25 bp, Homo sapien
gcgaggccgcgcgtgtcagcggcgg

SEQ ID NO: 696807 - DNA, 25 bp, Homo sapien
gggcccatgcacagtcgcggcgggc

SEQ ID NO: 696808 - DNA, 25 bp, Homo sapien
cctgggcggaacggagcgcgggagc

SEQ ID NO: 696809 - DNA, 25 bp, Homo sapien
ctgggcggaacggagcgcgggagcg

SEQ ID NO: 696810 - DNA, 25 bp, Homo sapien
actcaggtgtccggctgtcatgtcc

SEQ ID NO: 696811 - DNA, 25 bp, Homo sapien
tggactcaggtgtccggctgtcatg

SEQ ID NO: 696812 - DNA, 25 bp, Homo sapien
gctgggcggggagcctcctgaggtg

SEQ ID NO: 696813 - DNA, 25 bp, Homo sapien
tgtggactcaggtgtccggctgtca

SEQ ID NO: 696814 - DNA, 25 bp, Homo sapien
tagcatcttggtctccttctgtctg

SEQ ID NO: 696815 - DNA, 25 bp, Homo sapien
ctttgggacccgtggaggcatgtct

SEQ ID NO: 696816 - DNA, 25 bp, Homo sapien
gctctgtatttagtgggccttgtcc

SEQ ID NO: 696817 - DNA, 25 bp, Homo sapien
tgctgcctcggtaggcttcctttgg

SEQ ID NO: 696818 - DNA, 25 bp, Homo sapien
tcgtcgtgtggtgtcagggtctctt

SEQ ID NO: 696819 - DNA, 25 bp, Homo sapien
agcggacccgagagttgcatgcaga

SEQ ID NO: 696820 - DNA, 25 bp, Homo sapien
tactcggtgctaagggccagcagga

SEQ ID NO: 696821 - DNA, 25 bp, Homo sapien
tttgccgcagtccagcggacccgag

SEQ ID NO: 696822 - DNA, 25 bp, Homo sapien
cctgcacgtcatgtggctgtggctc

SEQ ID NO: 696823 - DNA, 25 bp, Homo sapien
tgtgagccacccttcaggctacgtg

SEQ ID NO: 696824 - DNA, 25 bp, Homo sapien
gagcgggtgagtgaacgtccctctc

SEQ ID NO: 696825 - DNA, 25 bp, Homo sapien
taaccgtagccctaacgcggctgag

SEQ ID NO: 696826 - DNA, 25 bp, Homo sapien
tgagggcccgggagcgtctggcggc

SEQ ID NO: 696827 - DNA, 25 bp, Homo sapien
aatcgatggttctgatgctgtcagc

SEQ ID NO: 696828 - DNA, 25 bp, Homo sapien
tctgggtgcaaattctgagggcccg

SEQ ID NO: 696829 - DNA, 25 bp, Homo sapien
aggccccacaggagaatcgatggtt

SEQ ID NO: 696830 - DNA, 25 bp, Homo sapien
gccagccgttgtccttaagacgcca

SEQ ID NO: 696831 - DNA, 25 bp, Homo sapien
atgaaccaggccaccagtgacccca

SEQ ID NO: 696832 - DNA, 25 bp, Homo sapien
ttcctgagggatccccgacctgcca

SEQ ID NO: 696833 - DNA, 25 bp, Homo sapien
acgtgccctaatgcagccccgtagg

SEQ ID NO: 696834 - DNA, 25 bp, Homo sapien
cgttagggccggaagacgacctgag

SEQ ID NO: 696835 - DNA, 25 bp, Homo sapien
tgctcctgaggcgatgatgggcaag

SEQ ID NO: 696836 - DNA, 25 bp, Homo sapien
ccggcagagactaaccgggacgcag

SEQ ID NO: 696837 - DNA, 25 bp, Homo sapien
ggaagaggagattgcgcggatcgcc

SEQ ID NO: 696838 - DNA, 25 bp, Homo sapien
ccatggaggtggacactgagtgtgc

SEQ ID NO: 696839 - DNA, 25 bp, Homo sapien
ggtgggacccacttgttgcggatac

SEQ ID NO: 696840 - DNA, 25 bp, Homo sapien
tgctgcatgaatttcccgagcctct

SEQ ID NO: 696841 - DNA, 25 bp, Homo sapien
tctcagtccctgagtaggctaaggc

SEQ ID NO: 696842 - DNA, 25 bp, Homo sapien
gatcaggtcacctgtgggagctcag

SEQ ID NO: 696843 - DNA, 25 bp, Homo sapien
agcatggaggtgaccctgggttcac

SEQ ID NO: 696844 - DNA, 25 bp, Homo sapien
tctgcaacgagtgtggaaaccgctg

SEQ ID NO: 696845 - DNA, 25 bp, Homo sapien
tgggttcacccagccctgttcacag

SEQ ID NO: 696846 - DNA, 25 bp, Homo sapien
gatgagaaagatgacattgggcctg

SEQ ID NO: 696847 - DNA, 25 bp, Homo sapien
atgagaaagatgacattgggcctgg

SEQ ID NO: 696848 - DNA, 25 bp, Homo sapien
atgccccgggcagggttaagcacag

SEQ ID NO: 696849 - DNA, 25 bp, Homo sapien
ggctgaggccgagggcgtggagctc

SEQ ID NO: 696850 - DNA, 25 bp, Homo sapien
aggccgagggcgtggagctcatgcc

SEQ ID NO: 696851 - DNA, 25 bp, Homo sapien
agctcatgccccgggcagggttaag

SEQ ID NO: 696852 - DNA, 25 bp, Homo sapien
tgggacaaggacacttctccccagc

SEQ ID NO: 696853 - DNA, 25 bp, Homo sapien
cacacggctgtgtgtcccctccaag

SEQ ID NO: 696854 - DNA, 25 bp, Homo sapien
tgccctgggacaaggacacttctcc

SEQ ID NO: 696855 - DNA, 25 bp, Homo sapien
tgtcccctccaaggggcactggagc

SEQ ID NO: 696856 - DNA, 25 bp, Homo sapien
ctccccagacttggacaaaaatgag

SEQ ID NO: 696857 - DNA, 25 bp, Homo sapien
tctccccagacttggacaaaaatga

SEQ ID NO: 696858 - DNA, 25 bp, Homo sapien
tccccagacttggacaaaaatgagt

SEQ ID NO: 696859 - DNA, 25 bp, Homo sapien
ggggttagggatagagataaatatg

SEQ ID NO: 696860 - DNA, 25 bp, Homo sapien
gacagctcaagtaggaggtctcctt

SEQ ID NO: 696861 - DNA, 25 bp, Homo sapien
tgccaccttgagtgcaggattctga

SEQ ID NO: 696862 - DNA, 25 bp, Homo sapien
tgccgacaacaacacctgaagggaa

SEQ ID NO: 696863 - DNA, 25 bp, Homo sapien
cacgatgcggaggttctgttcccca

SEQ ID NO: 696864 - DNA, 25 bp, Homo sapien
gaggaggactgtgatggcccctgca

SEQ ID NO: 696865 - DNA, 25 bp, Homo sapien
tcccggtgcatgagcgtgtagatct

SEQ ID NO: 696866 - DNA, 25 bp, Homo sapien
tcgaacgtgtgtgcggacggctcct

SEQ ID NO: 696867 - DNA, 25 bp, Homo sapien
ttgttgatgccctcccgcacacggg

SEQ ID NO: 696868 - DNA, 25 bp, Homo sapien
aggcggcccccggcctgttctggtg

SEQ ID NO: 696869 - DNA, 25 bp, Homo sapien
cccggcctgttctggtgtctggcgc

SEQ ID NO: 696870 - DNA, 25 bp, Homo sapien
ccggcctgttctggtgtctggcgca

SEQ ID NO: 696871 - DNA, 25 bp, Homo sapien
cggcctgttctggtgtctggcgcac

SEQ ID NO: 696872 - DNA, 25 bp, Homo sapien
cagcttgtcaaaagactgcgcccag

SEQ ID NO: 696873 - DNA, 25 bp, Homo sapien
tcgctgtactctgtccgcaggaacg

SEQ ID NO: 696874 - DNA, 25 bp, Homo sapien
tagtcctcgtagatgagcctcgcct

SEQ ID NO: 696875 - DNA, 25 bp, Homo sapien
cacctcctcaggacttggcgtggca

SEQ ID NO: 696876 - DNA, 25 bp, Homo sapien
cgggaggcctgccacgcgcgccgcc

SEQ ID NO: 696877 - DNA, 25 bp, Homo sapien
tgcagcttgctctcccgggaggcct

SEQ ID NO: 696878 - DNA, 25 bp, Homo sapien
gggaggcctgccacgcgcgccgccg

SEQ ID NO: 696879 - DNA, 25 bp, Homo sapien
ggctgcagcttgctctcccgggagg

SEQ ID NO: 696880 - DNA, 25 bp, Homo sapien
tgtgcctgtcttactccaccgcagg

SEQ ID NO: 696881 - DNA, 25 bp, Homo sapien
cacagcagcatggataaagcacatg

SEQ ID NO: 696882 - DNA, 25 bp, Homo sapien
cgcgtgaacgggcacatgcatgtac

SEQ ID NO: 696883 - DNA, 25 bp, Homo sapien
ggacacacccttggcaagacaggta

SEQ ID NO: 696884 - DNA, 25 bp, Homo sapien
ctggagaggctgtatcatgactgga

SEQ ID NO: 696885 - DNA, 25 bp, Homo sapien
ggagaggctgtatcatgactggaca

SEQ ID NO: 696886 - DNA, 25 bp, Homo sapien
ctgtatcatgactggacattgaagg

SEQ ID NO: 696887 - DNA, 25 bp, Homo sapien
gaggctgtatcatgactggacattg

SEQ ID NO: 696888 - DNA, 25 bp, Homo sapien
tctcagcctcatgcggggtgggcat

SEQ ID NO: 696889 - DNA, 25 bp, Homo sapien
ttctcagcctcatgcggggtgggca

SEQ ID NO: 696890 - DNA, 25 bp, Homo sapien
cttctcagcctcatgcggggtgggc

SEQ ID NO: 696891 - DNA, 25 bp, Homo sapien
gcttctcagcctcatgcggggtggg

SEQ ID NO: 696892 - DNA, 25 bp, Homo sapien
aggaggttgcccaggctccgtggta

SEQ ID NO: 696893 - DNA, 25 bp, Homo sapien
ggtgggcggaggaggttgcccaggc

SEQ ID NO: 696894 - DNA, 25 bp, Homo sapien
aggttgcccaggctccgtggtacca

SEQ ID NO: 696895 - DNA, 25 bp, Homo sapien
gttgcccaggctccgtggtaccagc

SEQ ID NO: 696896 - DNA, 25 bp, Homo sapien
tcagaccctcaccacagcctggggg

SEQ ID NO: 696897 - DNA, 25 bp, Homo sapien
cagaccctcaccacagcctgggggt

SEQ ID NO: 696898 - DNA, 25 bp, Homo sapien
ctcagaccctcaccacagcctgggg

SEQ ID NO: 696899 - DNA, 25 bp, Homo sapien
gccccaccctggctgccgaaggggc

SEQ ID NO: 696900 - DNA, 25 bp, Homo sapien
ctgagtggctgccagatccagcggg

SEQ ID NO: 696901 - DNA, 25 bp, Homo sapien
tcccctacagctcgaagggctgagt

SEQ ID NO: 696902 - DNA, 25 bp, Homo sapien
ctggagggaggctagcgccaggagc

SEQ ID NO: 696903 - DNA, 25 bp, Homo sapien
cagggactcaagtcagacggcagga

SEQ ID NO: 696904 - DNA, 25 bp, Homo sapien
ccacgtggacctggcggcgggagcc

SEQ ID NO: 696905 - DNA, 25 bp, Homo sapien
actgcggcccagggtccacgtggac

SEQ ID NO: 696906 - DNA, 25 bp, Homo sapien
caggctttgagctccagaaaaaggg

SEQ ID NO: 696907 - DNA, 25 bp, Homo sapien
ctttgagcaatcacttccccaggct

SEQ ID NO: 696908 - DNA, 25 bp, Homo sapien
gcgctccaaggtccggcccgacagt

SEQ ID NO: 696909 - DNA, 25 bp, Homo sapien
ccgcgcgctccaaggtccggcccga

SEQ ID NO: 696910 - DNA, 25 bp, Homo sapien
gcgcgctccaaggtccggcccgaca

SEQ ID NO: 696911 - DNA, 25 bp, Homo sapien
cggcccgcgcgctccaaggtccggc

SEQ ID NO: 696912 - DNA, 25 bp, Homo sapien
aggctggggcgcgtcgcacactctc

SEQ ID NO: 696913 - DNA, 25 bp, Homo sapien
gaggctggggcgcgtcgcacactct

SEQ ID NO: 696914 - DNA, 25 bp, Homo sapien
gaagatggtgccatccacgttctcc

SEQ ID NO: 696915 - DNA, 25 bp, Homo sapien
atggtgccatccacgttctcctcca

SEQ ID NO: 696916 - DNA, 25 bp, Homo sapien
aagatggtgccatccacgttctcct

SEQ ID NO: 696917 - DNA, 25 bp, Homo sapien
agatggtgccatccacgttctcctc

SEQ ID NO: 696918 - DNA, 25 bp, Homo sapien
agaggctggggtccggcgtgtgcgg

SEQ ID NO: 696919 - DNA, 25 bp, Homo sapien
ccgcccctaccggggcttgtctgca

SEQ ID NO: 696920 - DNA, 25 bp, Homo sapien
cgcccctaccggggcttgtctgcac

SEQ ID NO: 696921 - DNA, 25 bp, Homo sapien
tggggtccggcgtgtgcggaggcgg

SEQ ID NO: 696922 - DNA, 25 bp, Homo sapien
acttctgccgctggatgagcagcgc

SEQ ID NO: 696923 - DNA, 25 bp, Homo sapien
agctccagccggatggcggcgcgcg

SEQ ID NO: 696924 - DNA, 25 bp, Homo sapien
cgcgcgcggacttctgccgctggat

SEQ ID NO: 696925 - DNA, 25 bp, Homo sapien
ggatgagcagcgcgatctcctcggc

SEQ ID NO: 696926 - DNA, 25 bp, Homo sapien
tcgggcatgcggtaccccggttcca

SEQ ID NO: 696927 - DNA, 25 bp, Homo sapien
cgggcagctcgagcgactgcgtcca

SEQ ID NO: 696928 - DNA, 25 bp, Homo sapien
ggacgccgaggagccggttctggcg

SEQ ID NO: 696929 - DNA, 25 bp, Homo sapien
caggtcgccgaagagcagatggcgg

SEQ ID NO: 696930 - DNA, 25 bp, Homo sapien
cgccctccttcgctggcggcggcat

SEQ ID NO: 696931 - DNA, 25 bp, Homo sapien
ttggcacgctcctcaccctgcgccg

SEQ ID NO: 696932 - DNA, 25 bp, Homo sapien
gctcttcccgcttcgctcccgcggg

SEQ ID NO: 696933 - DNA, 25 bp, Homo sapien
cctgcgccgtgcctggcgcgctctt

SEQ ID NO: 696934 - DNA, 25 bp, Homo sapien
ggctctccgcagtcggttttgagtt

SEQ ID NO: 696935 - DNA, 25 bp, Homo sapien
ctccgcagtcggttttgagttccgc

SEQ ID NO: 696936 - DNA, 25 bp, Homo sapien
agggccccaacgtgcgccccagctc

SEQ ID NO: 696937 - DNA, 25 bp, Homo sapien
ctgggctctccgcagtcggttttga

SEQ ID NO: 696938 - DNA, 25 bp, Homo sapien
ggttgcccagcaaccgggagtcctg

SEQ ID NO: 696939 - DNA, 25 bp, Homo sapien
tctggtcggaagaacctccgccgta

SEQ ID NO: 696940 - DNA, 25 bp, Homo sapien
tccgccgtagcccagactctttggg

SEQ ID NO: 696941 - DNA, 25 bp, Homo sapien
ccagcttgggtgagcgtcctttcca

SEQ ID NO: 696942 - DNA, 25 bp, Homo sapien
gctcccataggggtgagtcctttga

SEQ ID NO: 696943 - DNA, 25 bp, Homo sapien
tgtgctcccataggggtgagtcctt

SEQ ID NO: 696944 - DNA, 25 bp, Homo sapien
tttgtgctcccataggggtgagtcc

SEQ ID NO: 696945 - DNA, 25 bp, Homo sapien
tgctcccataggggtgagtcctttg

SEQ ID NO: 696946 - DNA, 25 bp, Homo sapien
ctagtatccttgcatattgtttcgc

SEQ ID NO: 696947 - DNA, 25 bp, Homo sapien
gtcttgggctatccctagtatcctt

SEQ ID NO: 696948 - DNA, 25 bp, Homo sapien
ttgggctatccctagtatccttgca

SEQ ID NO: 696949 - DNA, 25 bp, Homo sapien
tatccctagtatccttgcatattgt

SEQ ID NO: 696950 - DNA, 25 bp, Homo sapien
tctaggtctacccatgtgcctgcgt

SEQ ID NO: 696951 - DNA, 25 bp, Homo sapien
tgtgttcacccgtatgcctgtctgg

SEQ ID NO: 696952 - DNA, 25 bp, Homo sapien
tgagtgtctctgttgacgtgccccg

SEQ ID NO: 696953 - DNA, 25 bp, Homo sapien
tgcctgcgtgcacgttggcgtcatc

SEQ ID NO: 696954 - DNA, 25 bp, Homo sapien
tgccctgggcactgatctggggccc

SEQ ID NO: 696955 - DNA, 25 bp, Homo sapien
cagccactgatctggggcccagctg

SEQ ID NO: 696956 - DNA, 25 bp, Homo sapien
gccctgggcactgatctggggccca

SEQ ID NO: 696957 - DNA, 25 bp, Homo sapien
gcccagctgtggcagaggtgccctg

SEQ ID NO: 696958 - DNA, 25 bp, Homo sapien
ctttgatctgtcgagagctggccgg

SEQ ID NO: 696959 - DNA, 25 bp, Homo sapien
cgcttgtttacgacgaagctttgat

SEQ ID NO: 696960 - DNA, 25 bp, Homo sapien
tgtttacgacgaagctttgatctgt

SEQ ID NO: 696961 - DNA, 25 bp, Homo sapien
gacgaagctttgatctgtcgagagc

SEQ ID NO: 696962 - DNA, 25 bp, Homo sapien
tgcagaagtaagggcctgagccgct

SEQ ID NO: 696963 - DNA, 25 bp, Homo sapien
tgcagcaaagcagggcgggtggagg

SEQ ID NO: 696964 - DNA, 25 bp, Homo sapien
ctgtgctcgactgccagccggctga

SEQ ID NO: 696965 - DNA, 25 bp, Homo sapien
ctgctctgcacctgtgctcgactgc

SEQ ID NO: 696966 - DNA, 25 bp, Homo sapien
gcaggggtgtacaggccatggcgag

SEQ ID NO: 696967 - DNA, 25 bp, Homo sapien
tatgagaggagcatcggccacagca

SEQ ID NO: 696968 - DNA, 25 bp, Homo sapien
agtatgagaggagcatcggccacag

SEQ ID NO: 696969 - DNA, 25 bp, Homo sapien
cagcaggggtgtacaggccatggcg

SEQ ID NO: 696970 - DNA, 25 bp, Homo sapien
tggtggccagcgtgtgagggtctgt

SEQ ID NO: 696971 - DNA, 25 bp, Homo sapien
gtctccttgcgtggagaggacagca

SEQ ID NO: 696972 - DNA, 25 bp, Homo sapien
gagacatgggaggtatatgcccacg

SEQ ID NO: 696973 - DNA, 25 bp, Homo sapien
tgcccacggctgtctgtaggtctgg

SEQ ID NO: 696974 - DNA, 25 bp, Homo sapien
tccgcgatgttgacgggcagtacca

SEQ ID NO: 696975 - DNA, 25 bp, Homo sapien
cattgtcctgagagacgttggcacc

SEQ ID NO: 696976 - DNA, 25 bp, Homo sapien
tgttgtagtggtcgacggccagcac

SEQ ID NO: 696977 - DNA, 25 bp, Homo sapien
taggattacaaggatgacggccgtg

SEQ ID NO: 696978 - DNA, 25 bp, Homo sapien
cgttgacgatttgcgccctgggcag

SEQ ID NO: 696979 - DNA, 25 bp, Homo sapien
ggaccgttgacgatttgcgccctgg

SEQ ID NO: 696980 - DNA, 25 bp, Homo sapien
gtagctgggaccgttgacgatttgc

SEQ ID NO: 696981 - DNA, 25 bp, Homo sapien
gctgggaccgttgacgatttgcgcc

SEQ ID NO: 696982 - DNA, 25 bp, Homo sapien
ccctcagtccgtgctgcgacttgga

SEQ ID NO: 696983 - DNA, 25 bp, Homo sapien
ccagagattcatacagactccagtg

SEQ ID NO: 696984 - DNA, 25 bp, Homo sapien
catatgtgtagcaggcatacagacc

SEQ ID NO: 696985 - DNA, 25 bp, Homo sapien
gcgacttggatcttcacacgggcat

SEQ ID NO: 696986 - DNA, 25 bp, Homo sapien
cctggaatgggcccgccctgagttt

SEQ ID NO: 696987 - DNA, 25 bp, Homo sapien
ccccagtggtgactgctccctgttc

SEQ ID NO: 696988 - DNA, 25 bp, Homo sapien
tgggcccgccctgagtttggaagct

SEQ ID NO: 696989 - DNA, 25 bp, Homo sapien
agtcccaggccctaataaccaggca

SEQ ID NO: 696990 - DNA, 25 bp, Homo sapien
ggtcctgtggccttcgggctgccac

SEQ ID NO: 696991 - DNA, 25 bp, Homo sapien
acgaggccaagtcagtagcggaagc

SEQ ID NO: 696992 - DNA, 25 bp, Homo sapien
ccgtgccctcggctgggtcctgtgg

SEQ ID NO: 696993 - DNA, 25 bp, Homo sapien
gtggcctcagtcatcaacggacgag

SEQ ID NO: 696994 - DNA, 25 bp, Homo sapien
ggcgatggcaatggccactggcaat

SEQ ID NO: 696995 - DNA, 25 bp, Homo sapien
gaattttggtgcatttgtcctggac

SEQ ID NO: 696996 - DNA, 25 bp, Homo sapien
gaacaagaggtcgagtggaagacta

SEQ ID NO: 696997 - DNA, 25 bp, Homo sapien
tgtcctggaccactgacgctttctt

SEQ ID NO: 696998 - DNA, 25 bp, Homo sapien
gacgctgggatgagctttgccagat

SEQ ID NO: 696999 - DNA, 25 bp, Homo sapien
cagatgtggctccattactgaacca

SEQ ID NO: 697000 - DNA, 25 bp, Homo sapien
ccagcagcccggagtcaggcagccg

SEQ ID NO: 697001 - DNA, 25 bp, Homo sapien
tggacaggtgcagcacaggacgctg

SEQ ID NO: 697002 - DNA, 25 bp, Homo sapien
gagcagctcgcccagtgagagaggc

SEQ ID NO: 697003 - DNA, 25 bp, Homo sapien
agctcgcccagtgagagaggcttgg

SEQ ID NO: 697004 - DNA, 25 bp, Homo sapien
gcagctcgcccagtgagagaggctt

SEQ ID NO: 697005 - DNA, 25 bp, Homo sapien
agcagctcgcccagtgagagaggct

SEQ ID NO: 697006 - DNA, 25 bp, Homo sapien
gatagcaggggtgtgggcagacagc

SEQ ID NO: 697007 - DNA, 25 bp, Homo sapien
aggctgatagcaggggtgtgggcag

SEQ ID NO: 697008 - DNA, 25 bp, Homo sapien
ctgatagcaggggtgtgggcagaca

SEQ ID NO: 697009 - DNA, 25 bp, Homo sapien
gcaggggtgtgggcagacagccgcc

SEQ ID NO: 697010 - DNA, 25 bp, Homo sapien
tcaaagctcatcttcggaaactgct

SEQ ID NO: 697011 - DNA, 25 bp, Homo sapien
gaagcccgtgttgcgcaggttcatc

SEQ ID NO: 697012 - DNA, 25 bp, Homo sapien
catagcactttaacctcccggtggg

SEQ ID NO: 697013 - DNA, 25 bp, Homo sapien
tgccagcaggcaccgatttcaagtt

SEQ ID NO: 697014 - DNA, 25 bp, Homo sapien
tgtcattccggttgctgctattagg

SEQ ID NO: 697015 - DNA, 25 bp, Homo sapien
ttcgctgtagccatgctaacccggg

SEQ ID NO: 697016 - DNA, 25 bp, Homo sapien
ggtagatcatattcctcaccaccaa

SEQ ID NO: 697017 - DNA, 25 bp, Homo sapien
gctattaggaattattggactgaac

SEQ ID NO: 697018 - DNA, 25 bp, Homo sapien
tgggtagcgtatttacaaaggagcc

SEQ ID NO: 697019 - DNA, 25 bp, Homo sapien
cgtgccaccgctgctaatgagagca

SEQ ID NO: 697020 - DNA, 25 bp, Homo sapien
tattggagccccaagggttcatggg

SEQ ID NO: 697021 - DNA, 25 bp, Homo sapien
gagtaaacagatatattggagcccc

SEQ ID NO: 697022 - DNA, 25 bp, Homo sapien
catggactctgtcacgatgatgata

SEQ ID NO: 697023 - DNA, 25 bp, Homo sapien
cagcatcacctttgaatcagtggac

SEQ ID NO: 697024 - DNA, 25 bp, Homo sapien
aaccaaacatttgcggtggtgcggg

SEQ ID NO: 697025 - DNA, 25 bp, Homo sapien
gacaccattggctggtaaagttggg

SEQ ID NO: 697026 - DNA, 25 bp, Homo sapien
tcttttgttgcctgttctcttgtag

SEQ ID NO: 697027 - DNA, 25 bp, Homo sapien
catcttgaagagtggatgctctgcc

SEQ ID NO: 697028 - DNA, 25 bp, Homo sapien
ctgatctgcgagcaggcagggtact

SEQ ID NO: 697029 - DNA, 25 bp, Homo sapien
cagccagactttcatgttactcagg

SEQ ID NO: 697030 - DNA, 25 bp, Homo sapien
gactgatgggtatccctgcttgctt

SEQ ID NO: 697031 - DNA, 25 bp, Homo sapien
ctgctgtgacattgcatcagactga

SEQ ID NO: 697032 - DNA, 25 bp, Homo sapien
tcacatttgaaatcccgctctcggg

SEQ ID NO: 697033 - DNA, 25 bp, Homo sapien
tctcgggatgcaatgtctctgctgt

SEQ ID NO: 697034 - DNA, 25 bp, Homo sapien
tgagcacatcatggacttcagggtc

SEQ ID NO: 697035 - DNA, 25 bp, Homo sapien
gcttgtcagactttctcaggtgcct

SEQ ID NO: 697036 - DNA, 25 bp, Homo sapien
cccgcagtttctagggcatgggttc

SEQ ID NO: 697037 - DNA, 25 bp, Homo sapien
agccccatgggacccgcagtttcta

SEQ ID NO: 697038 - DNA, 25 bp, Homo sapien
atctggtcctcagacccattcaggg

SEQ ID NO: 697039 - DNA, 25 bp, Homo sapien
tgggttcagaaccacgtgctgtgcg

SEQ ID NO: 697040 - DNA, 25 bp, Homo sapien
gtggtcctggtgtctcgttcgtctg

SEQ ID NO: 697041 - DNA, 25 bp, Homo sapien
gaagtcgtttttagcactcctcgcc

SEQ ID NO: 697042 - DNA, 25 bp, Homo sapien
gtctgggggtgtagcctggacctca

SEQ ID NO: 697043 - DNA, 25 bp, Homo sapien
gataggcatcaaggtggtccagttt

SEQ ID NO: 697044 - DNA, 25 bp, Homo sapien
gtctcgtgtcactcgcatgacccat

SEQ ID NO: 697045 - DNA, 25 bp, Homo sapien
tccgtggcctgtctcgtgtcactcg

SEQ ID NO: 697046 - DNA, 25 bp, Homo sapien
gacccatcctcctgttgtatccctg

SEQ ID NO: 697047 - DNA, 25 bp, Homo sapien
ctggaagggcgtctttatggaacac

SEQ ID NO: 697048 - DNA, 25 bp, Homo sapien
catggagcagcatgacttctggaag

SEQ ID NO: 697049 - DNA, 25 bp, Homo sapien
cttctggaagggcgtctttatggaa

SEQ ID NO: 697050 - DNA, 25 bp, Homo sapien
atggagcagcatgacttctggaagg

SEQ ID NO: 697051 - DNA, 25 bp, Homo sapien
ccccggcatgttgtttgggtgcatg

SEQ ID NO: 697052 - DNA, 25 bp, Homo sapien
tggcacgtggccccggcatgttgtt

SEQ ID NO: 697053 - DNA, 25 bp, Homo sapien
ggacttaatgtgctgctagagatgc

SEQ ID NO: 697054 - DNA, 25 bp, Homo sapien
catggggacttaatgtgctgctaga

SEQ ID NO: 697055 - DNA, 25 bp, Homo sapien
tgatagccgtttgctgccaagacat

SEQ ID NO: 697056 - DNA, 25 bp, Homo sapien
gtagtgatagccgtttgctgccaag

SEQ ID NO: 697057 - DNA, 25 bp, Homo sapien
cttctagtagtgatagccgtttgct

SEQ ID NO: 697058 - DNA, 25 bp, Homo sapien
ctagtagtgatagccgtttgctgcc

SEQ ID NO: 697059 - DNA, 25 bp, Homo sapien
ctgggcagacactgcaaggtgagac

SEQ ID NO: 697060 - DNA, 25 bp, Homo sapien
acgtgagagggcagcccctgtcgta

SEQ ID NO: 697061 - DNA, 25 bp, Homo sapien
tgagacgtgagagggcagcccctgt

SEQ ID NO: 697062 - DNA, 25 bp, Homo sapien
agacactgcaaggtgagacgtgaga

SEQ ID NO: 697063 - DNA, 25 bp, Homo sapien
tcatcaaggtcagagggtaaattcc

SEQ ID NO: 697064 - DNA, 25 bp, Homo sapien
cattctccgggtcatggccgagctt

SEQ ID NO: 697065 - DNA, 25 bp, Homo sapien
gaaagttaggaataggcctcccaga

SEQ ID NO: 697066 - DNA, 25 bp, Homo sapien
tctgggatccacgtctagggaccac

SEQ ID NO: 697067 - DNA, 25 bp, Homo sapien
gctcttgcggtggagtcctgttgct

SEQ ID NO: 697068 - DNA, 25 bp, Homo sapien
gttgaacccacagcactccgtggtg

SEQ ID NO: 697069 - DNA, 25 bp, Homo sapien
ttcaggcacggataacagcaaatgg

SEQ ID NO: 697070 - DNA, 25 bp, Homo sapien
cttcctcaggaagcgcgttgaaccc

SEQ ID NO: 697071 - DNA, 25 bp, Homo sapien
gtcacagctctctctgtagaagttg

SEQ ID NO: 697072 - DNA, 25 bp, Homo sapien
ttcggtcacagctctctctgtagaa

SEQ ID NO: 697073 - DNA, 25 bp, Homo sapien
ctgtagaagttgtcaaaatagcaga

SEQ ID NO: 697074 - DNA, 25 bp, Homo sapien
tctgtagaagttgtcaaaatagcag

SEQ ID NO: 697075 - DNA, 25 bp, Homo sapien
tgcccagggagtggaaacatcctct

SEQ ID NO: 697076 - DNA, 25 bp, Homo sapien
gtgcccagggagtggaaacatcctc

SEQ ID NO: 697077 - DNA, 25 bp, Homo sapien
tcgtcctcacgactagtctggtcca

SEQ ID NO: 697078 - DNA, 25 bp, Homo sapien
taccacctcgtcctcacgactagtc

SEQ ID NO: 697079 - DNA, 25 bp, Homo sapien
tgacggatgtcggaaaacagactgg

SEQ ID NO: 697080 - DNA, 25 bp, Homo sapien
cggtgacaccttgcggtaaattcct

SEQ ID NO: 697081 - DNA, 25 bp, Homo sapien
tggcttgttccactctggctacggg

SEQ ID NO: 697082 - DNA, 25 bp, Homo sapien
tagcacagaagctttgacggatgtc

SEQ ID NO: 697083 - DNA, 25 bp, Homo sapien
gacaggatacatccatcgatacatg

SEQ ID NO: 697084 - DNA, 25 bp, Homo sapien
ttagggagacaggatacatccatcg

SEQ ID NO: 697085 - DNA, 25 bp, Homo sapien
catgtaagaagcacatcggttcggt

SEQ ID NO: 697086 - DNA, 25 bp, Homo sapien
cgatacatgtaagaagcacatcggt

SEQ ID NO: 697087 - DNA, 25 bp, Homo sapien
tggctaaacagctcctatctgggcg

SEQ ID NO: 697088 - DNA, 25 bp, Homo sapien
gaatgtttgctccagcgttgcacct

SEQ ID NO: 697089 - DNA, 25 bp, Homo sapien
tatctgggcgtttgatagactgtca

SEQ ID NO: 697090 - DNA, 25 bp, Homo sapien
aactcagaaattgttgtggccacgc

SEQ ID NO: 697091 - DNA, 25 bp, Homo sapien
gaacatgggcggtgctgtgagtgct

SEQ ID NO: 697092 - DNA, 25 bp, Homo sapien
aacatgggcggtgctgtgagtgctg

SEQ ID NO: 697093 - DNA, 25 bp, Homo sapien
catgggcggtgctgtgagtgctggt

SEQ ID NO: 697094 - DNA, 25 bp, Homo sapien
tgaacatgggcggtgctgtgagtgc

SEQ ID NO: 697095 - DNA, 25 bp, Homo sapien
ttcgccgccgtcgaatggaaacgat

SEQ ID NO: 697096 - DNA, 25 bp, Homo sapien
agtcggatttccaacccctcagatg

SEQ ID NO: 697097 - DNA, 25 bp, Homo sapien
ggaaataggaagagcagattgctga

SEQ ID NO: 697098 - DNA, 25 bp, Homo sapien
caaagaagtctttgccagtcggatt

SEQ ID NO: 697099 - DNA, 25 bp, Homo sapien
tagtagctccattgcatgagaagag

SEQ ID NO: 697100 - DNA, 25 bp, Homo sapien
gagagctttctatcttaccaagtgg

SEQ ID NO: 697101 - DNA, 25 bp, Homo sapien
gcctttttggtagtcacatagcaga

SEQ ID NO: 697102 - DNA, 25 bp, Homo sapien
tccatcctcagagcaggtcgaaaat

SEQ ID NO: 697103 - DNA, 25 bp, Homo sapien
cagtccagtttgcatgtatagctag

SEQ ID NO: 697104 - DNA, 25 bp, Homo sapien
aaacatgtattgctctagattgggc

SEQ ID NO: 697105 - DNA, 25 bp, Homo sapien
tgagtcatttttaccacacagtcca

SEQ ID NO: 697106 - DNA, 25 bp, Homo sapien
tgtaagtaaagtttcctgcgcacct

SEQ ID NO: 697107 - DNA, 25 bp, Homo sapien
gtgacagtcacaatagatgtagaga

SEQ ID NO: 697108 - DNA, 25 bp, Homo sapien
cttgattctgtgacagtcacaatag

SEQ ID NO: 697109 - DNA, 25 bp, Homo sapien
tctgtgacagtcacaatagatgtag

SEQ ID NO: 697110 - DNA, 25 bp, Homo sapien
gattctgtgacagtcacaatagatg

SEQ ID NO: 697111 - DNA, 25 bp, Homo sapien
tttaatgacggtcatggcaactttt

SEQ ID NO: 697112 - DNA, 25 bp, Homo sapien
aacaggtttaatgacggtcatggca

SEQ ID NO: 697113 - DNA, 25 bp, Homo sapien
acaatgaaaaatatcgcccatgatc

SEQ ID NO: 697114 - DNA, 25 bp, Homo sapien
atatcgcccatgatcaacgtgttct

SEQ ID NO: 697115 - DNA, 25 bp, Homo sapien
ggtttgtgtgcagaacatcctgccc

SEQ ID NO: 697116 - DNA, 25 bp, Homo sapien
ggcagcagcagtggacccgctatgc

SEQ ID NO: 697117 - DNA, 25 bp, Homo sapien
gcttcagttggcacctgccccagtc

SEQ ID NO: 697118 - DNA, 25 bp, Homo sapien
agcagtggacccgctatgcacacat

SEQ ID NO: 697119 - DNA, 25 bp, Homo sapien
agatgtgtgcatagtgggcctggag

SEQ ID NO: 697120 - DNA, 25 bp, Homo sapien
ggggaagatgtgtgcatagtgggcc

SEQ ID NO: 697121 - DNA, 25 bp, Homo sapien
gaagatgtgtgcatagtgggcctgg

SEQ ID NO: 697122 - DNA, 25 bp, Homo sapien
gtgtgcatagtgggcctggagggcg

SEQ ID NO: 697123 - DNA, 25 bp, Homo sapien
aggacagctccttctcggtctccgg

SEQ ID NO: 697124 - DNA, 25 bp, Homo sapien
ctgagcctgtcctcggcttctccac

SEQ ID NO: 697125 - DNA, 25 bp, Homo sapien
cgtgcagtgaagaggacagctcctt

SEQ ID NO: 697126 - DNA, 25 bp, Homo sapien
gggccggcactggtccagggcacgt

SEQ ID NO: 697127 - DNA, 25 bp, Homo sapien
gcaaaggggaagctgtccgcatcac

SEQ ID NO: 697128 - DNA, 25 bp, Homo sapien
aggcaaaggggaagctgtccgcatc

SEQ ID NO: 697129 - DNA, 25 bp, Homo sapien
aaaggggaagctgtccgcatcacac

SEQ ID NO: 697130 - DNA, 25 bp, Homo sapien
acaggcaaaggggaagctgtccgca

SEQ ID NO: 697131 - DNA, 25 bp, Homo sapien
tgccccgaccccgaaagcccagtca

SEQ ID NO: 697132 - DNA, 25 bp, Homo sapien
cctgcctaggaaagccttagtgttg

SEQ ID NO: 697133 - DNA, 25 bp, Homo sapien
gggtgtgaccatagactgccaaaag

SEQ ID NO: 697134 - DNA, 25 bp, Homo sapien
ccagctcctgcctaggaaagcctta

SEQ ID NO: 697135 - DNA, 25 bp, Homo sapien
ccttgaacttgagatcggtgtcggt

SEQ ID NO: 697136 - DNA, 25 bp, Homo sapien
ggtgtcggtggtgctaaagccatca

SEQ ID NO: 697137 - DNA, 25 bp, Homo sapien
atcggtgtcggtggtgctaaagcca

SEQ ID NO: 697138 - DNA, 25 bp, Homo sapien
ctcgtcactcgctatgtcctcactg

SEQ ID NO: 697139 - DNA, 25 bp, Homo sapien
atgagcagctcacgtgggcggcagc

SEQ ID NO: 697140 - DNA, 25 bp, Homo sapien
gagcagctcacgtgggcggcagcag

SEQ ID NO: 697141 - DNA, 25 bp, Homo sapien
tgggaatgagcagctcacgtgggcg

SEQ ID NO: 697142 - DNA, 25 bp, Homo sapien
gaatgagcagctcacgtgggcggca

SEQ ID NO: 697143 - DNA, 25 bp, Homo sapien
cccacgagcccttgttacactgctg

SEQ ID NO: 697144 - DNA, 25 bp, Homo sapien
cgagcccttgttacactgctgctag

SEQ ID NO: 697145 - DNA, 25 bp, Homo sapien
agcccttgttacactgctgctagcc

SEQ ID NO: 697146 - DNA, 25 bp, Homo sapien
ttgttacactgctgctagcccctgg

SEQ ID NO: 697147 - DNA, 25 bp, Homo sapien
gccaggtcgtatttctgcatctcac

SEQ ID NO: 697148 - DNA, 25 bp, Homo sapien
aggccaggtcgtatttctgcatctc

SEQ ID NO: 697149 - DNA, 25 bp, Homo sapien
caggtcgtatttctgcatctcactg

SEQ ID NO: 697150 - DNA, 25 bp, Homo sapien
aggtcgtatttctgcatctcactgg

SEQ ID NO: 697151 - DNA, 25 bp, Homo sapien
ggccaccagatgtggtccttgtccc

SEQ ID NO: 697152 - DNA, 25 bp, Homo sapien
agcgccactcatgggccaccagatg

SEQ ID NO: 697153 - DNA, 25 bp, Homo sapien
caccagatgtggtccttgtcccatt

SEQ ID NO: 697154 - DNA, 25 bp, Homo sapien
cagatgtggtccttgtcccatttgt

SEQ ID NO: 697155 - DNA, 25 bp, Homo sapien
atggtcattctctgtctcactgtcc

SEQ ID NO: 697156 - DNA, 25 bp, Homo sapien
tggagaggaaagcatcatcatggtc

SEQ ID NO: 697157 - DNA, 25 bp, Homo sapien
gcaactgggtgtcaggagacatgat

SEQ ID NO: 697158 - DNA, 25 bp, Homo sapien
gacatcatctgagtggtagaggcaa

SEQ ID NO: 697159 - DNA, 25 bp, Homo sapien
ctgacgccacgggaggcctcactga

SEQ ID NO: 697160 - DNA, 25 bp, Homo sapien
gccacgggaggcctcactgaacgca

SEQ ID NO: 697161 - DNA, 25 bp, Homo sapien
tgacgccacgggaggcctcactgaa

SEQ ID NO: 697162 - DNA, 25 bp, Homo sapien
acgggaggcctcactgaacgcaggc

SEQ ID NO: 697163 - DNA, 25 bp, Homo sapien
aacaggtacaaaggtcaggttctgg

SEQ ID NO: 697164 - DNA, 25 bp, Homo sapien
tagtgtttgttcagcccttactgca

SEQ ID NO: 697165 - DNA, 25 bp, Homo sapien
aaacttgattcgatactatgtggcc

SEQ ID NO: 697166 - DNA, 25 bp, Homo sapien
caggcactattctgactgtggcagg

SEQ ID NO: 697167 - DNA, 25 bp, Homo sapien
gtgcctgccaccacacccagctaat

SEQ ID NO: 697168 - DNA, 25 bp, Homo sapien
actccacctcctgggttcaagcgat

SEQ ID NO: 697169 - DNA, 25 bp, Homo sapien
gattttggctcactgtaaactccac

SEQ ID NO: 697170 - DNA, 25 bp, Homo sapien
gcgtgattttggctcactgtaaact

SEQ ID NO: 697171 - DNA, 25 bp, Homo sapien
ggcttctaggtcagagtccagctgc

SEQ ID NO: 697172 - DNA, 25 bp, Homo sapien
tttcgtatctaagctcggtccctcc

SEQ ID NO: 697173 - DNA, 25 bp, Homo sapien
ggcaagaaggaggaccaagaacgtc

SEQ ID NO: 697174 - DNA, 25 bp, Homo sapien
tgacctcagtactcaggagttccgg

SEQ ID NO: 697175 - DNA, 25 bp, Homo sapien
tcaagactgtcggagatgccagatg

SEQ ID NO: 697176 - DNA, 25 bp, Homo sapien
gatgccagatgatgccggttcggaa

SEQ ID NO: 697177 - DNA, 25 bp, Homo sapien
cggaagcatccagggtaaagaccgg

SEQ ID NO: 697178 - DNA, 25 bp, Homo sapien
catgcgttaagtcgcatcaagactg

SEQ ID NO: 697179 - DNA, 25 bp, Homo sapien
caagcaggaaattcccacccgcttt

SEQ ID NO: 697180 - DNA, 25 bp, Homo sapien
aagcaggaaattcccacccgctttg

SEQ ID NO: 697181 - DNA, 25 bp, Homo sapien
tccaagaccaccacctttgtgtctc

SEQ ID NO: 697182 - DNA, 25 bp, Homo sapien
ccaagaccaccacctttgtgtctcc

SEQ ID NO: 697183 - DNA, 25 bp, Homo sapien
cattagcaatggtgattccgtcctg

SEQ ID NO: 697184 - DNA, 25 bp, Homo sapien
gaaacatgtcattagcaatggtgat

SEQ ID NO: 697185 - DNA, 25 bp, Homo sapien
catgtcattagcaatggtgattccg

SEQ ID NO: 697186 - DNA, 25 bp, Homo sapien
tagcaatggtgattccgtcctgagc

SEQ ID NO: 697187 - DNA, 25 bp, Homo sapien
tccgtggtgctgacgcggcggccga

SEQ ID NO: 697188 - DNA, 25 bp, Homo sapien
atcgggcgcgggatgcggcgcggct

SEQ ID NO: 697189 - DNA, 25 bp, Homo sapien
ccttgtcagtcacggccccttgtgt

SEQ ID NO: 697190 - DNA, 25 bp, Homo sapien
agcgcagcaactcgggggacgctcc

SEQ ID NO: 697191 - DNA, 25 bp, Homo sapien
ggcggcaggagcggtggccggagcg

SEQ ID NO: 697192 - DNA, 25 bp, Homo sapien
gcagcggggccgatgacggggggac

SEQ ID NO: 697193 - DNA, 25 bp, Homo sapien
ggcagcggggccgatgacgggggga

SEQ ID NO: 697194 - DNA, 25 bp, Homo sapien
gagcggtggccggagcggccggcag

SEQ ID NO: 697195 - DNA, 25 bp, Homo sapien
gggcggaggctgggcttgcagcagc

SEQ ID NO: 697196 - DNA, 25 bp, Homo sapien
gagcccgggcggaggctgggcttgc

SEQ ID NO: 697197 - DNA, 25 bp, Homo sapien
agcccgggcggaggctgggcttgca

SEQ ID NO: 697198 - DNA, 25 bp, Homo sapien
ccgggcggaggctgggcttgcagca

SEQ ID NO: 697199 - DNA, 25 bp, Homo sapien
tcgtcgatacgctctcgctgggtgt

SEQ ID NO: 697200 - DNA, 25 bp, Homo sapien
atacgctctcgctgggtgtggatga

SEQ ID NO: 697201 - DNA, 25 bp, Homo sapien
tcgatacgctctcgctgggtgtgga

SEQ ID NO: 697202 - DNA, 25 bp, Homo sapien
cagctcgtcgatacgctctcgctgg

SEQ ID NO: 697203 - DNA, 25 bp, Homo sapien
gcctcttggcgtcagcgaaggctct

SEQ ID NO: 697204 - DNA, 25 bp, Homo sapien
cctcttggcgtcagcgaaggctctg

SEQ ID NO: 697205 - DNA, 25 bp, Homo sapien
ctcttggcgtcagcgaaggctctgc

SEQ ID NO: 697206 - DNA, 25 bp, Homo sapien
cagagcttatgcacctaccgaaggt

SEQ ID NO: 697207 - DNA, 25 bp, Homo sapien
tgttcgcaactttgagtgatcagcc

SEQ ID NO: 697208 - DNA, 25 bp, Homo sapien
tgtacatttcgagcagtgctggccc

SEQ ID NO: 697209 - DNA, 25 bp, Homo sapien
cctgtggacctcgaatgcagagctt

SEQ ID NO: 697210 - DNA, 25 bp, Homo sapien
agaaatgttgcaccttctctgaact

SEQ ID NO: 697211 - DNA, 25 bp, Homo sapien
aagcaccttgtagggggtcagaaat

SEQ ID NO: 697212 - DNA, 25 bp, Homo sapien
gtatggaaagggtgcctggcaggta

SEQ ID NO: 697213 - DNA, 25 bp, Homo sapien
ggtcagaaatgttgcaccttctctg

SEQ ID NO: 697214 - DNA, 25 bp, Homo sapien
aattttgatgcttaggtcagagtcc

SEQ ID NO: 697215 - DNA, 25 bp, Homo sapien
aagctaccagatataggaagaaggg

SEQ ID NO: 697216 - DNA, 25 bp, Homo sapien
tttggaatcacaggacgctgagtga

SEQ ID NO: 697217 - DNA, 25 bp, Homo sapien
tgtagcataagaaaataccgtctgc

SEQ ID NO: 697218 - DNA, 25 bp, Homo sapien
taggcaggaaatatcgcagacctag

SEQ ID NO: 697219 - DNA, 25 bp, Homo sapien
ggtttctcataaaactccctgatag

SEQ ID NO: 697220 - DNA, 25 bp, Homo sapien
cccactgtggaactgaggagctagg

SEQ ID NO: 697221 - DNA, 25 bp, Homo sapien
cgatacacatgtacaagttttgtca

SEQ ID NO: 697222 - DNA, 25 bp, Homo sapien
actataggtaagtctgagcaaatct

SEQ ID NO: 697223 - DNA, 25 bp, Homo sapien
aagtctttcctgacccccgatgctg

SEQ ID NO: 697224 - DNA, 25 bp, Homo sapien
cccgatgctgctgactataggtaag

SEQ ID NO: 697225 - DNA, 25 bp, Homo sapien
aggtgctgccccgagaaggatgcat

SEQ ID NO: 697226 - DNA, 25 bp, Homo sapien
cctacagagggcaggcccttcagct

SEQ ID NO: 697227 - DNA, 25 bp, Homo sapien
ctacagagggcaggcccttcagctc

SEQ ID NO: 697228 - DNA, 25 bp, Homo sapien
gaaacagtcatagatgttcagccct

SEQ ID NO: 697229 - DNA, 25 bp, Homo sapien
ttcaattggcaacgtaatggcacat

SEQ ID NO: 697230 - DNA, 25 bp, Homo sapien
ccctctctacagtggaagaatagca

SEQ ID NO: 697231 - DNA, 25 bp, Homo sapien
tcattaaggcagttctagctacagc

SEQ ID NO: 697232 - DNA, 25 bp, Homo sapien
tagataccgcagaattatttactct

SEQ ID NO: 697233 - DNA, 25 bp, Homo sapien
aagagcttgaaagtccaatcaatac

SEQ ID NO: 697234 - DNA, 25 bp, Homo sapien
caatacaaatttagataccgcagaa

SEQ ID NO: 697235 - DNA, 25 bp, Homo sapien
gataattcccatgtagaacacagag

SEQ ID NO: 697236 - DNA, 25 bp, Homo sapien
tatgacatcctgctagaacctgcaa

SEQ ID NO: 697237 - DNA, 25 bp, Homo sapien
tggtggcaagttaaagatacctctg

SEQ ID NO: 697238 - DNA, 25 bp, Homo sapien
tatcacaataatgctggtagccatg

SEQ ID NO: 697239 - DNA, 25 bp, Homo sapien
tcaagtttactcctgcaaatcagct

SEQ ID NO: 697240 - DNA, 25 bp, Homo sapien
acttggtccactgaatcagatagaa

SEQ ID NO: 697241 - DNA, 25 bp, Homo sapien
tccactgaatcagatagaagggaag

SEQ ID NO: 697242 - DNA, 25 bp, Homo sapien
ttggtccactgaatcagatagaagg

SEQ ID NO: 697243 - DNA, 25 bp, Homo sapien
ggtccactgaatcagatagaaggga

SEQ ID NO: 697244 - DNA, 25 bp, Homo sapien
aaggctcaagtcaatgagcgatagg

SEQ ID NO: 697245 - DNA, 25 bp, Homo sapien
caatcagtaaaaagatcgtagatca

SEQ ID NO: 697246 - DNA, 25 bp, Homo sapien
cgataggttggccagcagaatatac

SEQ ID NO: 697247 - DNA, 25 bp, Homo sapien
tcgtagatcaacctaggaactgtgg

SEQ ID NO: 697248 - DNA, 25 bp, Homo sapien
cattttgggattcataatagttgga

SEQ ID NO: 697249 - DNA, 25 bp, Homo sapien
catgcacattttgggattcataata

SEQ ID NO: 697250 - DNA, 25 bp, Homo sapien
tgcacattttgggattcataatagt

SEQ ID NO: 697251 - DNA, 25 bp, Homo sapien
ttttgggattcataatagttggata

SEQ ID NO: 697252 - DNA, 25 bp, Homo sapien
taaaagctccccacattattagggc

SEQ ID NO: 697253 - DNA, 25 bp, Homo sapien
gaaggtgcccatcgatatgaatcca

SEQ ID NO: 697254 - DNA, 25 bp, Homo sapien
tgcatgcaagtttaataacccgagg

SEQ ID NO: 697255 - DNA, 25 bp, Homo sapien
tgtcgttggacagtgaccagaataa

SEQ ID NO: 697256 - DNA, 25 bp, Homo sapien
ttatgtcgtctccatagaatttaaa

SEQ ID NO: 697257 - DNA, 25 bp, Homo sapien
gtcgtctccatagaatttaaaatat

SEQ ID NO: 697258 - DNA, 25 bp, Homo sapien
taaaatatgttgattcagccttctc

SEQ ID NO: 697259 - DNA, 25 bp, Homo sapien
cagccttctcattgcaaacttcata

SEQ ID NO: 697260 - DNA, 25 bp, Homo sapien
acctgaaagatgtcaatcgccttct

SEQ ID NO: 697261 - DNA, 25 bp, Homo sapien
gaaagatgtcaatcgccttctttgt

SEQ ID NO: 697262 - DNA, 25 bp, Homo sapien
gtcaatcgccttctttgtcctaagc

SEQ ID NO: 697263 - DNA, 25 bp, Homo sapien
caatcgccttctttgtcctaagcac

SEQ ID NO: 697264 - DNA, 25 bp, Homo sapien
ggtttccaaacacgattcctccata

SEQ ID NO: 697265 - DNA, 25 bp, Homo sapien
tcaatgagtgagaggttggctagca

SEQ ID NO: 697266 - DNA, 25 bp, Homo sapien
caacataaataggaaggtctggagt

SEQ ID NO: 697267 - DNA, 25 bp, Homo sapien
tgaaggtgggagtcagataccactg

SEQ ID NO: 697268 - DNA, 25 bp, Homo sapien
tttgcgctggctgaaaaagtcagta

SEQ ID NO: 697269 - DNA, 25 bp, Homo sapien
acaaggcagcccttgaaagagatga

SEQ ID NO: 697270 - DNA, 25 bp, Homo sapien
atattgctatatatctgtcaaagcc

SEQ ID NO: 697271 - DNA, 25 bp, Homo sapien
gacagccataatgccgacacatgcg

SEQ ID NO: 697272 - DNA, 25 bp, Homo sapien
tggacagagctttggacgacttatc

SEQ ID NO: 697273 - DNA, 25 bp, Homo sapien
gattaccctaggaaggtcacaataa

SEQ ID NO: 697274 - DNA, 25 bp, Homo sapien
caatgaccataatatctagcctgta

SEQ ID NO: 697275 - DNA, 25 bp, Homo sapien
taaaaactatcgacctcattgggac

SEQ ID NO: 697276 - DNA, 25 bp, Homo sapien
aaaactttacactagaatgtgcatc

SEQ ID NO: 697277 - DNA, 25 bp, Homo sapien
taaaactttacactagaatgtgcat

SEQ ID NO: 697278 - DNA, 25 bp, Homo sapien
ctaaaactttacactagaatgtgca

SEQ ID NO: 697279 - DNA, 25 bp, Homo sapien
tacttttcgtcatgtcatatagttt

SEQ ID NO: 697280 - DNA, 25 bp, Homo sapien
ttacttttcgtcatgtcatatagtt

SEQ ID NO: 697281 - DNA, 25 bp, Homo sapien
gcccatagcagtgtcctgttgtgtc

SEQ ID NO: 697282 - DNA, 25 bp, Homo sapien
acactgagactgcccatagcagtgt

SEQ ID NO: 697283 - DNA, 25 bp, Homo sapien
gtagtagttacaacactgagactgc

SEQ ID NO: 697284 - DNA, 25 bp, Homo sapien
agactgcccatagcagtgtcctgtt

SEQ ID NO: 697285 - DNA, 25 bp, Homo sapien
accaaaatgaccataggcggtaatt

SEQ ID NO: 697286 - DNA, 25 bp, Homo sapien
ggtaattccccaggccgtgtgatct

SEQ ID NO: 697287 - DNA, 25 bp, Homo sapien
tctcagtctggcattctcggatctc

SEQ ID NO: 697288 - DNA, 25 bp, Homo sapien
ctggcattctcggatctccaaggca

SEQ ID NO: 697289 - DNA, 25 bp, Homo sapien
ctgacgccacgggaggcctcactga

SEQ ID NO: 697290 - DNA, 25 bp, Homo sapien
gccacgggaggcctcactgaacgca

SEQ ID NO: 697291 - DNA, 25 bp, Homo sapien
tgacgccacgggaggcctcactgaa

SEQ ID NO: 697292 - DNA, 25 bp, Homo sapien
acgggaggcctcactgaacgcaggc

SEQ ID NO: 697293 - DNA, 25 bp, Homo sapien
ccgcctgctgaagatcatgagcgcc

SEQ ID NO: 697294 - DNA, 25 bp, Homo sapien
ggccaccggatgtggtccttgtctg

SEQ ID NO: 697295 - DNA, 25 bp, Homo sapien
ccgccagggcctggtgccgcctgct

SEQ ID NO: 697296 - DNA, 25 bp, Homo sapien
ccttgtctgatttgttggggctgcg

SEQ ID NO: 697297 - DNA, 25 bp, Homo sapien
tccggttatcctggttgggatgacc

SEQ ID NO: 697298 - DNA, 25 bp, Homo sapien
catctggctgacggtccggttatcc

SEQ ID NO: 697299 - DNA, 25 bp, Homo sapien
gaaggccaggttgtatttctgcatc

SEQ ID NO: 697300 - DNA, 25 bp, Homo sapien
ctggaaggccaggttgtatttctgc

SEQ ID NO: 697301 - DNA, 25 bp, Homo sapien
ctcttcgtcactcgctatgacctcg

SEQ ID NO: 697302 - DNA, 25 bp, Homo sapien
ttcgtcactcgctatgacctcgctg

SEQ ID NO: 697303 - DNA, 25 bp, Homo sapien
tgctcttcgtcactcgctatgacct

SEQ ID NO: 697304 - DNA, 25 bp, Homo sapien
tgtgctcttcgtcactcgctatgac

SEQ ID NO: 697305 - DNA, 25 bp, Homo sapien
ggtgtcggtggtgctaaagccatca

SEQ ID NO: 697306 - DNA, 25 bp, Homo sapien
atcggtgtcggtggtgctaaagcca

SEQ ID NO: 697307 - DNA, 25 bp, Homo sapien
cttgaacttgagatcggtgtcggtg

SEQ ID NO: 697308 - DNA, 25 bp, Homo sapien
ccttgaacttgagatcggtgtcggt

SEQ ID NO: 697309 - DNA, 25 bp, Homo sapien
ggccggcactggtccagggtacgtg

SEQ ID NO: 697310 - DNA, 25 bp, Homo sapien
ctgagcctgtcctcggcttctccac

SEQ ID NO: 697311 - DNA, 25 bp, Homo sapien
cagggccggcactggtccagggtac

SEQ ID NO: 697312 - DNA, 25 bp, Homo sapien
ccggcactggtccagggtacgtgca

SEQ ID NO: 697313 - DNA, 25 bp, Homo sapien
ggggaagatgtgtgcatagtgggcc

SEQ ID NO: 697314 - DNA, 25 bp, Homo sapien
gaagatgtgtgcatagtgggcctgg

SEQ ID NO: 697315 - DNA, 25 bp, Homo sapien
gtgtgcatagtgggcctggagggcg

SEQ ID NO: 697316 - DNA, 25 bp, Homo sapien
agatgtgtgcatagtgggcctggag

SEQ ID NO: 697317 - DNA, 25 bp, Homo sapien
ccagggcagcgtcaagagtctgagc

SEQ ID NO: 697318 - DNA, 25 bp, Homo sapien
gccagggcagcgtcaagagtctgag

SEQ ID NO: 697319 - DNA, 25 bp, Homo sapien
agaagatcatgcagtcatcagtccc

SEQ ID NO: 697320 - DNA, 25 bp, Homo sapien
gaagatcatgcagtcatcagtccca

SEQ ID NO: 697321 - DNA, 25 bp, Homo sapien
aaggtcccacaattcatggtatgta

SEQ ID NO: 697322 - DNA, 25 bp, Homo sapien
cccacaattcatggtatgtacaggg

SEQ ID NO: 697323 - DNA, 25 bp, Homo sapien
cggaggagggaaactgcccagcttt

SEQ ID NO: 697324 - DNA, 25 bp, Homo sapien
gaaactgcccagctttcccccggca

SEQ ID NO: 697325 - DNA, 25 bp, Homo sapien
tggcacaatgaaaaatgtcgcccac

SEQ ID NO: 697326 - DNA, 25 bp, Homo sapien
cacaatgaaaaatgtcgcccacgat

SEQ ID NO: 697327 - DNA, 25 bp, Homo sapien
gcacaatgaaaaatgtcgcccacga

SEQ ID NO: 697328 - DNA, 25 bp, Homo sapien
aatgaaaaatgtcgcccacgatcaa

SEQ ID NO: 697329 - DNA, 25 bp, Homo sapien
cagctcattcctcacgtcggccatt

SEQ ID NO: 697330 - DNA, 25 bp, Homo sapien
cacgtcggccattccaggccccgtt

SEQ ID NO: 697331 - DNA, 25 bp, Homo sapien
cattcctcacgtcggccattccagg

SEQ ID NO: 697332 - DNA, 25 bp, Homo sapien
tcacgtcggccattccaggccccgt

SEQ ID NO: 697333 - DNA, 25 bp, Homo sapien
acagaggtcagcgtgagccccttgc

SEQ ID NO: 697334 - DNA, 25 bp, Homo sapien
tcccacgctgagagaggtcagtgtg

SEQ ID NO: 697335 - DNA, 25 bp, Homo sapien
gtgtgagccccttgtctcacaccgg

SEQ ID NO: 697336 - DNA, 25 bp, Homo sapien
agagaggtcagtgtgagcccttgcc

SEQ ID NO: 697337 - DNA, 25 bp, Homo sapien
tgtcatgtcacgacatactgccgct

SEQ ID NO: 697338 - DNA, 25 bp, Homo sapien
tcatgtcacgacatactgccgctgc

SEQ ID NO: 697339 - DNA, 25 bp, Homo sapien
gtatgtcatgtcacgacatactgcc

SEQ ID NO: 697340 - DNA, 25 bp, Homo sapien
gtcacgacatactgccgctgcacga

SEQ ID NO: 697341 - DNA, 25 bp, Homo sapien
taataactggtgtggtgttgtgcac

SEQ ID NO: 697342 - DNA, 25 bp, Homo sapien
tggtgttgtgcacctagagttccaa

SEQ ID NO: 697343 - DNA, 25 bp, Homo sapien
ctgagatgagaggataccttgagct

SEQ ID NO: 697344 - DNA, 25 bp, Homo sapien
tagagttccaactactagggaagct

SEQ ID NO: 697345 - DNA, 25 bp, Homo sapien
acatctggctagtttcttttatttt

SEQ ID NO: 697346 - DNA, 25 bp, Homo sapien
aggctggccacaaattcctggtctc

SEQ ID NO: 697347 - DNA, 25 bp, Homo sapien
accacatctggctagtttcttttat

SEQ ID NO: 697348 - DNA, 25 bp, Homo sapien
atagatggggtcttgttgtgttggc

SEQ ID NO: 697349 - DNA, 25 bp, Homo sapien
tcagcctcccaaaattcaaggagta

SEQ ID NO: 697350 - DNA, 25 bp, Homo sapien
attggccaggctcctctggagctcc

SEQ ID NO: 697351 - DNA, 25 bp, Homo sapien
catattggccaggctcctctggagc

SEQ ID NO: 697352 - DNA, 25 bp, Homo sapien
agcctcccaaaattcaaggagtaca

SEQ ID NO: 697353 - DNA, 25 bp, Homo sapien
tgtagggtactttgttgtagcaaca

SEQ ID NO: 697354 - DNA, 25 bp, Homo sapien
cctcatgttacagttgctcacgcct

SEQ ID NO: 697355 - DNA, 25 bp, Homo sapien
tgccactaaatgtagggtactttgt

SEQ ID NO: 697356 - DNA, 25 bp, Homo sapien
catgaagctgggacctcatgttaca

SEQ ID NO: 697357 - DNA, 25 bp, Homo sapien
tgagctacacgttgcagtgcacacc

SEQ ID NO: 697358 - DNA, 25 bp, Homo sapien
tgctaagagcaagactgcatttctt

SEQ ID NO: 697359 - DNA, 25 bp, Homo sapien
ctttgctaagagcaagactgcattt

SEQ ID NO: 697360 - DNA, 25 bp, Homo sapien
aaaaaatgagctacacgttgcagtg

SEQ ID NO: 697361 - DNA, 25 bp, Homo sapien
aacgagccgccacagccaccagtcc

SEQ ID NO: 697362 - DNA, 25 bp, Homo sapien
taagagacaaagaccaacgagccgc

SEQ ID NO: 697363 - DNA, 25 bp, Homo sapien
ccaccagtcccagaacccgccaatg

SEQ ID NO: 697364 - DNA, 25 bp, Homo sapien
ttctaagagacaaagaccaacgagc

SEQ ID NO: 697365 - DNA, 25 bp, Homo sapien
gggttgcatattctggtttcctacc

SEQ ID NO: 697366 - DNA, 25 bp, Homo sapien
catattctggtttcctaccattata

SEQ ID NO: 697367 - DNA, 25 bp, Homo sapien
tattttggtcttatacactgtgttc

SEQ ID NO: 697368 - DNA, 25 bp, Homo sapien
cactgtgttccaccggcaatgaaaa

SEQ ID NO: 697369 - DNA, 25 bp, Homo sapien
aatgaatcaatttgccattggaaca

SEQ ID NO: 697370 - DNA, 25 bp, Homo sapien
cccatcacaatgaatcaatttgcca

SEQ ID NO: 697371 - DNA, 25 bp, Homo sapien
gttgtatcatggctaaaaggtaggc

SEQ ID NO: 697372 - DNA, 25 bp, Homo sapien
gtaggcatggcaacaaaataaagac

SEQ ID NO: 697373 - DNA, 25 bp, Homo sapien
tacctccccacacgaaataacatgt

SEQ ID NO: 697374 - DNA, 25 bp, Homo sapien
gagtcgccagcgctttcattcgtgt

SEQ ID NO: 697375 - DNA, 25 bp, Homo sapien
aatcctaatacagacgtatgtgcag

SEQ ID NO: 697376 - DNA, 25 bp, Homo sapien
atagctcatttgtctcacagcactg

SEQ ID NO: 697377 - DNA, 25 bp, Homo sapien
tgttgtaaaacggtgtcccttcagc

SEQ ID NO: 697378 - DNA, 25 bp, Homo sapien
gggaactgcgcgtcctgacagcgca

SEQ ID NO: 697379 - DNA, 25 bp, Homo sapien
gatcctggcgccgagaaaggagcaa

SEQ ID NO: 697380 - DNA, 25 bp, Homo sapien
gcctccggatctgcgctggttcctg

SEQ ID NO: 697381 - DNA, 25 bp, Homo sapien
gacggccagtgaagagtaaggagca

SEQ ID NO: 697382 - DNA, 25 bp, Homo sapien
ggagatgacgcagctgagtccagcc

SEQ ID NO: 697383 - DNA, 25 bp, Homo sapien
gggagtctccgtgcttcacaaagac

SEQ ID NO: 697384 - DNA, 25 bp, Homo sapien
ctgagtccagccgttggccttgact

SEQ ID NO: 697385 - DNA, 25 bp, Homo sapien
agggacttggctccacgcaggtgtc

SEQ ID NO: 697386 - DNA, 25 bp, Homo sapien
cgcaggtgtcagacaggttcctggc

SEQ ID NO: 697387 - DNA, 25 bp, Homo sapien
tatcccaggacgcagactaccagga

SEQ ID NO: 697388 - DNA, 25 bp, Homo sapien
caagaaagtcacactgaagcttccc

SEQ ID NO: 697389 - DNA, 25 bp, Homo sapien
gcggccagacgtgagagcttagctt

SEQ ID NO: 697390 - DNA, 25 bp, Homo sapien
ctcccgtccacagttgcaaataaag

SEQ ID NO: 697391 - DNA, 25 bp, Homo sapien
gaatgtccagtcaggtgagatcaag

SEQ ID NO: 697392 - DNA, 25 bp, Homo sapien
ttagcccagtggtcagtgataggac

SEQ ID NO: 697393 - DNA, 25 bp, Homo sapien
gccaggccaaataatcttaattgac

SEQ ID NO: 697394 - DNA, 25 bp, Homo sapien
accgtgccaggccaaataatcttaa

SEQ ID NO: 697395 - DNA, 25 bp, Homo sapien
gtgccaggccaaataatcttaattg

SEQ ID NO: 697396 - DNA, 25 bp, Homo sapien
ccgtgccaggccaaataatcttaat

SEQ ID NO: 697397 - DNA, 25 bp, Homo sapien
gaacaaaggccgagtgtttgctctg

SEQ ID NO: 697398 - DNA, 25 bp, Homo sapien
agacaatggccctggaattctatct

SEQ ID NO: 697399 - DNA, 25 bp, Homo sapien
cgtcggcgggattcgaacccgtgca

SEQ ID NO: 697400 - DNA, 25 bp, Homo sapien
acactggcggaatgggcatcccgag

SEQ ID NO: 697401 - DNA, 25 bp, Homo sapien
gtgtcacggccctgggtgtcccaca

SEQ ID NO: 697402 - DNA, 25 bp, Homo sapien
agtcactggtgtcacggccctgggt

SEQ ID NO: 697403 - DNA, 25 bp, Homo sapien
ctgggtgtcccacagtctccagtca

SEQ ID NO: 697404 - DNA, 25 bp, Homo sapien
ctccagtcactggtgtcacggccat

SEQ ID NO: 697405 - DNA, 25 bp, Homo sapien
tcacggccctgggtgttgtcccaca

SEQ ID NO: 697406 - DNA, 25 bp, Homo sapien
cggccctgggtgttgtcccacagtc

SEQ ID NO: 697407 - DNA, 25 bp, Homo sapien
gtgtcacggccctgggtgttgtccc

SEQ ID NO: 697408 - DNA, 25 bp, Homo sapien
ggccctgggtgttgtcccacagtct

SEQ ID NO: 697409 - DNA, 25 bp, Homo sapien
tgtcacggccatgggtgtcccacag

SEQ ID NO: 697410 - DNA, 25 bp, Homo sapien
atgggtgtcccacagtctccagtca

SEQ ID NO: 697411 - DNA, 25 bp, Homo sapien
tcacggccatgggtgtcccacagtc

SEQ ID NO: 697412 - DNA, 25 bp, Homo sapien
ccacagtctctgcagtcactggtgt

SEQ ID NO: 697413 - DNA, 25 bp, Homo sapien
gtgtcacggccctgggtgtcccaca

SEQ ID NO: 697414 - DNA, 25 bp, Homo sapien
tgtcacggccatgggtgtcccacag

SEQ ID NO: 697415 - DNA, 25 bp, Homo sapien
ccatgggtgtcccacagtctctcca

SEQ ID NO: 697416 - DNA, 25 bp, Homo sapien
ctgggtgtcccacagtctccagtca

SEQ ID NO: 697417 - DNA, 25 bp, Homo sapien
atgtgctttggtgtattgacgagga

SEQ ID NO: 697418 - DNA, 25 bp, Homo sapien
ctttggtgtattgacgaggatgtgc

SEQ ID NO: 697419 - DNA, 25 bp, Homo sapien
tgctttggtgtattgacgaggatgt

SEQ ID NO: 697420 - DNA, 25 bp, Homo sapien
tggtgtattgacgaggatgtgcttt

SEQ ID NO: 697421 - DNA, 25 bp, Homo sapien
attgaggagtctgatgaggatgtgc

SEQ ID NO: 697422 - DNA, 25 bp, Homo sapien
gctttggtgtattgaggtgtctgat

SEQ ID NO: 697423 - DNA, 25 bp, Homo sapien
tgtattgagtctgatgaggatgtgc

SEQ ID NO: 697424 - DNA, 25 bp, Homo sapien
tttggtgtattgagtctgatgagga

SEQ ID NO: 697425 - DNA, 25 bp, Homo sapien
tcacgtcagtaagggaattgtggcc

SEQ ID NO: 697426 - DNA, 25 bp, Homo sapien
gataagtcgtgagcaacacgggcga

SEQ ID NO: 697427 - DNA, 25 bp, Homo sapien
aattgtggccacgatgacgggatgt

SEQ ID NO: 697428 - DNA, 25 bp, Homo sapien
tgacgtggtgggctacgtattgttc

SEQ ID NO: 697429 - DNA, 25 bp, Homo sapien
aggtgtcctcgtcatctcacttggg

SEQ ID NO: 697430 - DNA, 25 bp, Homo sapien
cactgtgaagtgataactgccttga

SEQ ID NO: 697431 - DNA, 25 bp, Homo sapien
acttgatttgaagcccggggtgcct

SEQ ID NO: 697432 - DNA, 25 bp, Homo sapien
gcggcaggtgtcctcgtcatctcac

SEQ ID NO: 697433 - DNA, 25 bp, Homo sapien
gccactcgctggatggtatagacag

SEQ ID NO: 697434 - DNA, 25 bp, Homo sapien
ggtgtagacgcctccgggtatcctg

SEQ ID NO: 697435 - DNA, 25 bp, Homo sapien
caattaaaaccacgtatcagggagg

SEQ ID NO: 697436 - DNA, 25 bp, Homo sapien
gggatgtagacacccctgatgtcac

SEQ ID NO: 697437 - DNA, 25 bp, Homo sapien
gactgtatcattcgagttgtctgcg

SEQ ID NO: 697438 - DNA, 25 bp, Homo sapien
tggtttggatgccatggtttttgag

SEQ ID NO: 697439 - DNA, 25 bp, Homo sapien
tttggatgccatggtttttgagtct

SEQ ID NO: 697440 - DNA, 25 bp, Homo sapien
cttgtgtattgcattatgatgacga

SEQ ID NO: 697441 - DNA, 25 bp, Homo sapien
tcatcacagatgagggcgtctgcct

SEQ ID NO: 697442 - DNA, 25 bp, Homo sapien
cagtcgtgatgcttgatgaagggtc

SEQ ID NO: 697443 - DNA, 25 bp, Homo sapien
ggatgtaggtgactctgtccccata

SEQ ID NO: 697444 - DNA, 25 bp, Homo sapien
gagacgcaatcatctgctgacgacc

SEQ ID NO: 697445 - DNA, 25 bp, Homo sapien
ctgcaagcccaggagcctctgcctt

SEQ ID NO: 697446 - DNA, 25 bp, Homo sapien
tgatcctctgggtgattcggcccct

SEQ ID NO: 697447 - DNA, 25 bp, Homo sapien
gcatttgtcaatcccaagcagcgtc

SEQ ID NO: 697448 - DNA, 25 bp, Homo sapien
tttactaaggaacggcaggactgga

SEQ ID NO: 697449 - DNA, 25 bp, Homo sapien
ctgccgctcagggacaaaactcatc

SEQ ID NO: 697450 - DNA, 25 bp, Homo sapien
gacaggcactgggatcggcattctt

SEQ ID NO: 697451 - DNA, 25 bp, Homo sapien
cattcttgcttgcacgcgaggagac

SEQ ID NO: 697452 - DNA, 25 bp, Homo sapien
ggctcctgtaaagcacctgaaactg

SEQ ID NO: 697453 - DNA, 25 bp, Homo sapien
cgttggtgaccccagaaataacctg

SEQ ID NO: 697454 - DNA, 25 bp, Homo sapien
ggtttctccacgtgacgccgacatt

SEQ ID NO: 697455 - DNA, 25 bp, Homo sapien
tgatgccgagccttccttgtgggcc

SEQ ID NO: 697456 - DNA, 25 bp, Homo sapien
tctgccggatgcaaggacgcacgtg

SEQ ID NO: 697457 - DNA, 25 bp, Homo sapien
tgcagacaggatctcgacacggacc

SEQ ID NO: 697458 - DNA, 25 bp, Homo sapien
acaacattgggctgttttcaggacg

SEQ ID NO: 697459 - DNA, 25 bp, Homo sapien
tccaaggccagacaacattgggctg

SEQ ID NO: 697460 - DNA, 25 bp, Homo sapien
ttccaaggccagacaacattgggct

SEQ ID NO: 697461 - DNA, 25 bp, Homo sapien
cattgggctgttttcaggacggtgt

SEQ ID NO: 697462 - DNA, 25 bp, Homo sapien
atctgttagggcagccacgggagac

SEQ ID NO: 697463 - DNA, 25 bp, Homo sapien
ctttgccgtgggtctcatgagccca

SEQ ID NO: 697464 - DNA, 25 bp, Homo sapien
cttaagccccgtttgtggggatctg

SEQ ID NO: 697465 - DNA, 25 bp, Homo sapien
gccgactttgccgtgggtctcatga

SEQ ID NO: 697466 - DNA, 25 bp, Homo sapien
ctccccaagaccctcttctgcctcc

SEQ ID NO: 697467 - DNA, 25 bp, Homo sapien
tccgcctccccaagaccctcttctg

SEQ ID NO: 697468 - DNA, 25 bp, Homo sapien
cgcttccgcctccccaagacccgct

SEQ ID NO: 697469 - DNA, 25 bp, Homo sapien
ctcttctgcctccccgggaccggct

SEQ ID NO: 697470 - DNA, 25 bp, Homo sapien
cgcgcggcccccgcagctgaaccac

SEQ ID NO: 697471 - DNA, 25 bp, Homo sapien
acagctcccggcagctcccgcgcgg

SEQ ID NO: 697472 - DNA, 25 bp, Homo sapien
tcccgcgcggcccccgcagctgaac

SEQ ID NO: 697473 - DNA, 25 bp, Homo sapien
cccgcccacagctcccggcagctcc

SEQ ID NO: 697474 - DNA, 25 bp, Homo sapien
gctgatgacattctcgacccgcagg

SEQ ID NO: 697475 - DNA, 25 bp, Homo sapien
aggaggcactaaccctaacgtggca

SEQ ID NO: 697476 - DNA, 25 bp, Homo sapien
tcttctttctatcgtggccgccgga

SEQ ID NO: 697477 - DNA, 25 bp, Homo sapien
caaatgtgggtgttcgccctgggtc

SEQ ID NO: 697478 - DNA, 25 bp, Homo sapien
gtgcagaggaggcaaaatgaggctc

SEQ ID NO: 697479 - DNA, 25 bp, Homo sapien
agggcagggcctgggtgcaaaggag

SEQ ID NO: 697480 - DNA, 25 bp, Homo sapien
cagaggaggcaaaatgaggctcggg

SEQ ID NO: 697481 - DNA, 25 bp, Homo sapien
ggctgggtgcagaggaggcaaaatg

SEQ ID NO: 697482 - DNA, 25 bp, Homo sapien
ctgtgagaccctccaggacgtggga

SEQ ID NO: 697483 - DNA, 25 bp, Homo sapien
cctggatctcggtccacaagaggga

SEQ ID NO: 697484 - DNA, 25 bp, Homo sapien
ggacgtgggacaagtcaccccatct

SEQ ID NO: 697485 - DNA, 25 bp, Homo sapien
catcagcgagtcctgggaacctcat

SEQ ID NO: 697486 - DNA, 25 bp, Homo sapien
gccccagaagccccgccagcaggag

SEQ ID NO: 697487 - DNA, 25 bp, Homo sapien
gcaggagggccagtccgaaatccat

SEQ ID NO: 697488 - DNA, 25 bp, Homo sapien
cagcaggagggccagtccgaaatcc

SEQ ID NO: 697489 - DNA, 25 bp, Homo sapien
ggaggagccccagaagccccgccag

SEQ ID NO: 697490 - DNA, 25 bp, Homo sapien
gtgagctggcgcgaggcgcccaagg

SEQ ID NO: 697491 - DNA, 25 bp, Homo sapien
gccgccgacagcgaggcgttgcgca

SEQ ID NO: 697492 - DNA, 25 bp, Homo sapien
gcgttgcgcacggtgaggacgctgc

SEQ ID NO: 697493 - DNA, 25 bp, Homo sapien
tacacaaggagctgcacggtgtgct

SEQ ID NO: 697494 - DNA, 25 bp, Homo sapien
agcagggagaaggagagcgcgttgg

SEQ ID NO: 697495 - DNA, 25 bp, Homo sapien
cctcatcgtggcctggcagtagagg

SEQ ID NO: 697496 - DNA, 25 bp, Homo sapien
ggagacggtcagctggtccgggaag

SEQ ID NO: 697497 - DNA, 25 bp, Homo sapien
actttgtgggccgtacaggccacct

SEQ ID NO: 697498 - DNA, 25 bp, Homo sapien
gggatcacttctccctgcgtgggcc

SEQ ID NO: 697499 - DNA, 25 bp, Homo sapien
tctcagggcggcgagtcctggtgga

SEQ ID NO: 697500 - DNA, 25 bp, Homo sapien
gggcggcgagtcctggtggagcctg

SEQ ID NO: 697501 - DNA, 25 bp, Homo sapien
gggagatctcagggcggcgagtcct

SEQ ID NO: 697502 - DNA, 25 bp, Homo sapien
gtgtcgtcctcagccaggtgccggc

SEQ ID NO: 697503 - DNA, 25 bp, Homo sapien
agctggtcacccgcaggtttggacg

SEQ ID NO: 697504 - DNA, 25 bp, Homo sapien
gcagtcccagcaccgcactgctggt

SEQ ID NO: 697505 - DNA, 25 bp, Homo sapien
gccggcagcgtttccagaggtgata

SEQ ID NO: 697506 - DNA, 25 bp, Homo sapien
ggaggggctgatcccgacctggccg

SEQ ID NO: 697507 - DNA, 25 bp, Homo sapien
caggaggggctgatcccgacctggc

SEQ ID NO: 697508 - DNA, 25 bp, Homo sapien
tcaggaggggctgatcccgacctgg

SEQ ID NO: 697509 - DNA, 25 bp, Homo sapien
aggggctgatcccgacctggccggt

SEQ ID NO: 697510 - DNA, 25 bp, Homo sapien
taggtgagacaaacagtggccttct

SEQ ID NO: 697511 - DNA, 25 bp, Homo sapien
cgcatttttagggagacgtgagaca

SEQ ID NO: 697512 - DNA, 25 bp, Homo sapien
tgatgagcttctccaaagaggcaat

SEQ ID NO: 697513 - DNA, 25 bp, Homo sapien
agggcacagcttggtcttacgcatt

SEQ ID NO: 697514 - DNA, 25 bp, Homo sapien
aaatggctgcctcggaagtgcttcg

SEQ ID NO: 697515 - DNA, 25 bp, Homo sapien
cctggctttggcctcggtcctgaat

SEQ ID NO: 697516 - DNA, 25 bp, Homo sapien
tgggaagtgacaagggtacgctacc

SEQ ID NO: 697517 - DNA, 25 bp, Homo sapien
ggtcctgaattttgccagactccaa

SEQ ID NO: 697518 - DNA, 25 bp, Homo sapien
atattccactgtgcgctagagcccc

SEQ ID NO: 697519 - DNA, 25 bp, Homo sapien
gcggccatcttgattaagggcagag

SEQ ID NO: 697520 - DNA, 25 bp, Homo sapien
agagggcaccggtatcccgctggga

SEQ ID NO: 697521 - DNA, 25 bp, Homo sapien
gcgggaccggaagcaccgccatatt

SEQ ID NO: 697522 - DNA, 25 bp, Homo sapien
ggccggcggtggtaccgcttgccgc

SEQ ID NO: 697523 - DNA, 25 bp, Homo sapien
gactggcggccgctgtccgtgaaac

SEQ ID NO: 697524 - DNA, 25 bp, Homo sapien
ggtggtaccgcttgccgccgcttct

SEQ ID NO: 697525 - DNA, 25 bp, Homo sapien
ctgtccgtgaaaccggccggcggtg

SEQ ID NO: 697526 - DNA, 25 bp, Homo sapien
gcagggccgcacgtagcatttccgt

SEQ ID NO: 697527 - DNA, 25 bp, Homo sapien
gtttacaggcgagcgcaggcccatg

SEQ ID NO: 697528 - DNA, 25 bp, Homo sapien
caggcccatgttctcgaagtagtga

SEQ ID NO: 697529 - DNA, 25 bp, Homo sapien
gtcacgccgacctgccgcaggaagt

SEQ ID NO: 697530 - DNA, 25 bp, Homo sapien
cgggtagggagccgcgcgcggcatg

SEQ ID NO: 697531 - DNA, 25 bp, Homo sapien
gcatgctgggagttgaagtccatcg

SEQ ID NO: 697532 - DNA, 25 bp, Homo sapien
ggagttgaagtccatcgctgcccca

SEQ ID NO: 697533 - DNA, 25 bp, Homo sapien
ccacccgcccaagccggcccactgc

SEQ ID NO: 697534 - DNA, 25 bp, Homo sapien
cttgtccgatccatcccacccaaga

SEQ ID NO: 697535 - DNA, 25 bp, Homo sapien
ccaagaaggcatcgcgcactacaac

SEQ ID NO: 697536 - DNA, 25 bp, Homo sapien
tgtccgatccatcccacccaagaag

SEQ ID NO: 697537 - DNA, 25 bp, Homo sapien
acccaagaaggcatcgcgcactaca

SEQ ID NO: 697538 - DNA, 25 bp, Homo sapien
tgaacaaccatacgtggtgggcctg

SEQ ID NO: 697539 - DNA, 25 bp, Homo sapien
cacagaatcagatgccacgcaggtc

SEQ ID NO: 697540 - DNA, 25 bp, Homo sapien
tctgagtatgatcttggacacctgt

SEQ ID NO: 697541 - DNA, 25 bp, Homo sapien
gggtgactgcgctgctctctgtaaa

SEQ ID NO: 697542 - DNA, 25 bp, Homo sapien
attgcaaaatggaaagcgggagccc

SEQ ID NO: 697543 - DNA, 25 bp, Homo sapien
tgtgtcggctcctacacagagcggt

SEQ ID NO: 697544 - DNA, 25 bp, Homo sapien
tcccagcagaatcatcgggtgaggg

SEQ ID NO: 697545 - DNA, 25 bp, Homo sapien
tatggaacgtctccagaaagagaca

SEQ ID NO: 697546 - DNA, 25 bp, Homo sapien
gaggctgccacgcaaagctgaaatg

SEQ ID NO: 697547 - DNA, 25 bp, Homo sapien
tcagcctgagggtcaaatacgacct

SEQ ID NO: 697548 - DNA, 25 bp, Homo sapien
tcagtccgctgacatgtggcctgtg

SEQ ID NO: 697549 - DNA, 25 bp, Homo sapien
gcttccgaccagaaccgtagagctg

SEQ ID NO: 697550 - DNA, 25 bp, Homo sapien
ggcgctcaggcactcgtaggccacg

SEQ ID NO: 697551 - DNA, 25 bp, Homo sapien
gccacgctcacgttgttgttgaagg

SEQ ID NO: 697552 - DNA, 25 bp, Homo sapien
tcgtggtcacggcactgcaccttgc

SEQ ID NO: 697553 - DNA, 25 bp, Homo sapien
gtcccggcagatgcgcctgagcagc

SEQ ID NO: 697554 - DNA, 25 bp, Homo sapien
gacggcgcggtccagcgccagcgcc

SEQ ID NO: 697555 - DNA, 25 bp, Homo sapien
cgacggcgcggtccagcgccagcgc

SEQ ID NO: 697556 - DNA, 25 bp, Homo sapien
cccccgacggcgcggtccagcgcca

SEQ ID NO: 697557 - DNA, 25 bp, Homo sapien
cccgacggcgcggtccagcgccagc

SEQ ID NO: 697558 - DNA, 25 bp, Homo sapien
ccagaaactcctcgcgggtcatggg

SEQ ID NO: 697559 - DNA, 25 bp, Homo sapien
tgaccttcgcgatgaagagcgcggc

SEQ ID NO: 697560 - DNA, 25 bp, Homo sapien
ggcttgaccttcgcgatgaagagcg

SEQ ID NO: 697561 - DNA, 25 bp, Homo sapien
ctccagaaactcctcgcgggtcatg

SEQ ID NO: 697562 - DNA, 25 bp, Homo sapien
gcgcctggttatggcagggcctcac

SEQ ID NO: 697563 - DNA, 25 bp, Homo sapien
aaaagcgtcttctgcgggcaccggg

SEQ ID NO: 697564 - DNA, 25 bp, Homo sapien
gaggcgggcgctcgcatacacacca

SEQ ID NO: 697565 - DNA, 25 bp, Homo sapien
cacattttattagcgtggggcaggg

SEQ ID NO: 697566 - DNA, 25 bp, Homo sapien
gtttccggcctcgaatccagcctcc

SEQ ID NO: 697567 - DNA, 25 bp, Homo sapien
ggcgtttccggcctcgaatccagcc

SEQ ID NO: 697568 - DNA, 25 bp, Homo sapien
ggcctcgaatccagcctccagtcgc

SEQ ID NO: 697569 - DNA, 25 bp, Homo sapien
tcgaatccagcctccagtcgccgcg

SEQ ID NO: 697570 - DNA, 25 bp, Homo sapien
cccttgctgagggtgtaacctccgc

SEQ ID NO: 697571 - DNA, 25 bp, Homo sapien
acgcccggctggattcgctcttgca

SEQ ID NO: 697572 - DNA, 25 bp, Homo sapien
tagggctgttgtctcaccaatgtca

SEQ ID NO: 697573 - DNA, 25 bp, Homo sapien
gaatcaatcacatgaggcacttcag

SEQ ID NO: 697574 - DNA, 25 bp, Homo sapien
gatgtgtcaggcttgggatgtcccc

SEQ ID NO: 697575 - DNA, 25 bp, Homo sapien
agccggccggaagctccgtcttgga

SEQ ID NO: 697576 - DNA, 25 bp, Homo sapien
tcagtgctcagtggatcgggtgaga

SEQ ID NO: 697577 - DNA, 25 bp, Homo sapien
cgtctggccgtggtctcagtgctca

SEQ ID NO: 697578 - DNA, 25 bp, Homo sapien
gctggaccagccgggggcgcggtga

SEQ ID NO: 697579 - DNA, 25 bp, Homo sapien
ctggaccagccgggggcgtggtgaa

SEQ ID NO: 697580 - DNA, 25 bp, Homo sapien
tggctggaccagccgggggcgcggt

SEQ ID NO: 697581 - DNA, 25 bp, Homo sapien
tgggagtccatttgggcgagggtgt

SEQ ID NO: 697582 - DNA, 25 bp, Homo sapien
agggatgctttgactggctggtggg

SEQ ID NO: 697583 - DNA, 25 bp, Homo sapien
ggggagggatgctttgactggctgg

SEQ ID NO: 697584 - DNA, 25 bp, Homo sapien
ggagggatgctttgactggctggtg

SEQ ID NO: 697585 - DNA, 25 bp, Homo sapien
tgggggagggatgctttgactggct

SEQ ID NO: 697586 - DNA, 25 bp, Homo sapien
gcttcatgagtctggtccccggaag

SEQ ID NO: 697587 - DNA, 25 bp, Homo sapien
ggcttcatgagtctggtccccggaa

SEQ ID NO: 697588 - DNA, 25 bp, Homo sapien
ccggcttcatgagtctggtccccgg

SEQ ID NO: 697589 - DNA, 25 bp, Homo sapien
cttcatgagtctggtccccggaaga

SEQ ID NO: 697590 - DNA, 25 bp, Homo sapien
cggtcccgcctacggcgccgagcgc

SEQ ID NO: 697591 - DNA, 25 bp, Homo sapien
ccctgctcgaccagcaccgcggacg

SEQ ID NO: 697592 - DNA, 25 bp, Homo sapien
cggccaggtccgacttgcgcctgcg

SEQ ID NO: 697593 - DNA, 25 bp, Homo sapien
cgggctcttccgatccccgaggccg

SEQ ID NO: 697594 - DNA, 25 bp, Homo sapien
ggccgcgcgaccaccgcgagttcgc

SEQ ID NO: 697595 - DNA, 25 bp, Homo sapien
gggaccccgagcgctccagcagctc

SEQ ID NO: 697596 - DNA, 25 bp, Homo sapien
accaccgcgagttcgcgagacgggc

SEQ ID NO: 697597 - DNA, 25 bp, Homo sapien
gcgcgaccaccgcgagttcgcgaga

SEQ ID NO: 697598 - DNA, 25 bp, Homo sapien
ctcccagttgtatagatcgccctcg

SEQ ID NO: 697599 - DNA, 25 bp, Homo sapien
ctcgtccaccagtgtcacgcggaat

SEQ ID NO: 697600 - DNA, 25 bp, Homo sapien
atagatcgccctcgtccaccagtgt

SEQ ID NO: 697601 - DNA, 25 bp, Homo sapien
gtgtcacgcggaatccctcgaccgg

SEQ ID NO: 697602 - DNA, 25 bp, Homo sapien
cttgaagtagccgccctcgtagtag

SEQ ID NO: 697603 - DNA, 25 bp, Homo sapien
gaagtagccgccctcgtagtaggtg

SEQ ID NO: 697604 - DNA, 25 bp, Homo sapien
aagtagccgccctcgtagtaggtgt

SEQ ID NO: 697605 - DNA, 25 bp, Homo sapien
tagccgccctcgtagtaggtgttgg

SEQ ID NO: 697606 - DNA, 25 bp, Homo sapien
tcttggtcaggaaccgaaaggctgg

SEQ ID NO: 697607 - DNA, 25 bp, Homo sapien
cgaaaggctggtggagagtatgggt

SEQ ID NO: 697608 - DNA, 25 bp, Homo sapien
gccacatcttggtcaggaaccgaaa

SEQ ID NO: 697609 - DNA, 25 bp, Homo sapien
tagtcgatggggaacttgaggcgcg

SEQ ID NO: 697610 - DNA, 25 bp, Homo sapien
ccctgggtcccggaggatgaggact

SEQ ID NO: 697611 - DNA, 25 bp, Homo sapien
cgggtcccggaaggatgaggacgtg

SEQ ID NO: 697612 - DNA, 25 bp, Homo sapien
cagcgccccgggtcccggaaggatg

SEQ ID NO: 697613 - DNA, 25 bp, Homo sapien
ctgacgttctgcgtggggttccacc

SEQ ID NO: 697614 - DNA, 25 bp, Homo sapien
cgctctgggggtcgtccaccggcgg

SEQ ID NO: 697615 - DNA, 25 bp, Homo sapien
ggaggatggagatacacacgtcccc

SEQ ID NO: 697616 - DNA, 25 bp, Homo sapien
ttctgcgtggggttccacctctctg

SEQ ID NO: 697617 - DNA, 25 bp, Homo sapien
tctgggtggatacgggacggagccc

SEQ ID NO: 697618 - DNA, 25 bp, Homo sapien
acggagcccggcctacctgatgttc

SEQ ID NO: 697619 - DNA, 25 bp, Homo sapien
gcccggcctacctgatgttctgggt

SEQ ID NO: 697620 - DNA, 25 bp, Homo sapien
ggagcccggcctacctgatggtctg

SEQ ID NO: 697621 - DNA, 25 bp, Homo sapien
tggcaggtcccgaatcaggccttgg

SEQ ID NO: 697622 - DNA, 25 bp, Homo sapien
aggtgaccaacccagagacggctgg

SEQ ID NO: 697623 - DNA, 25 bp, Homo sapien
cacctaccgtgcaggtacagcgagg

SEQ ID NO: 697624 - DNA, 25 bp, Homo sapien
gagtctgcaccgacacacggtgccg

SEQ ID NO: 697625 - DNA, 25 bp, Homo sapien
gagagtgggtcggagtggggcggcc

SEQ ID NO: 697626 - DNA, 25 bp, Homo sapien
ggagagtgggtcggagtggggcggc

SEQ ID NO: 697627 - DNA, 25 bp, Homo sapien
gcaccccagccttccggctcttctc

SEQ ID NO: 697628 - DNA, 25 bp, Homo sapien
cggggcaccccagccttccggctct

SEQ ID NO: 697629 - DNA, 25 bp, Homo sapien
atgatgtctgtgtactcccgatcct

SEQ ID NO: 697630 - DNA, 25 bp, Homo sapien
atcacggaggcgtccacgtttgcgg

SEQ ID NO: 697631 - DNA, 25 bp, Homo sapien
acttcctgtacatcacggaggcgtc

SEQ ID NO: 697632 - DNA, 25 bp, Homo sapien
ggctcgttcaggagggagatcacac

SEQ ID NO: 697633 - DNA, 25 bp, Homo sapien
tgctccaacccgagtagtggaggct

SEQ ID NO: 697634 - DNA, 25 bp, Homo sapien
ctgcttggcaggatgaagggggaga

SEQ ID NO: 697635 - DNA, 25 bp, Homo sapien
ctgctccaacccgagtagtggaggc

SEQ ID NO: 697636 - DNA, 25 bp, Homo sapien
actgctccaacccgagtagtggagg

SEQ ID NO: 697637 - DNA, 25 bp, Homo sapien
gcaggaaccattaaggccgtcaacc

SEQ ID NO: 697638 - DNA, 25 bp, Homo sapien
actgcaggtacagaaggcgccggta

SEQ ID NO: 697639 - DNA, 25 bp, Homo sapien
gaagggcctctatgtaacaggaaga

SEQ ID NO: 697640 - DNA, 25 bp, Homo sapien
catgcgttaaactgaaaagcctgga

SEQ ID NO: 697641 - DNA, 25 bp, Homo sapien
accaggatgctgccccgagatgacc

SEQ ID NO: 697642 - DNA, 25 bp, Homo sapien
tcagagccgagaccgcccagcacca

SEQ ID NO: 697643 - DNA, 25 bp, Homo sapien
aggtaccagcgagtgcaggatggaa

SEQ ID NO: 697644 - DNA, 25 bp, Homo sapien
atgaccccacgacaccaggtaccag

SEQ ID NO: 697645 - DNA, 25 bp, Homo sapien
tttgagggataaaaatagtgtggct

SEQ ID NO: 697646 - DNA, 25 bp, Homo sapien
agggcagctaccctgtgacctccag

SEQ ID NO: 697647 - DNA, 25 bp, Homo sapien
tttctgtgctgggatctcaaggagg

SEQ ID NO: 697648 - DNA, 25 bp, Homo sapien
acatctgcaccagagggacggccag

SEQ ID NO: 697649 - DNA, 25 bp, Homo sapien
tctggaggtcctgttcagcaagacc

SEQ ID NO: 697650 - DNA, 25 bp, Homo sapien
gcctgcccgacacagctcagcggga

SEQ ID NO: 697651 - DNA, 25 bp, Homo sapien
aacatccctgaccaagccgggctcc

SEQ ID NO: 697652 - DNA, 25 bp, Homo sapien
ctgcaccgtggaggtgccgccggca

SEQ ID NO: 697653 - DNA, 25 bp, Homo sapien
gcacgctgaccccatttgacagaaa

SEQ ID NO: 697654 - DNA, 25 bp, Homo sapien
cccagcggacgccaagctttgcttt

SEQ ID NO: 697655 - DNA, 25 bp, Homo sapien
agaaaacaggaacgaggctgcagcc

SEQ ID NO: 697656 - DNA, 25 bp, Homo sapien
tttgctttccaagctctccgatggg

SEQ ID NO: 697657 - DNA, 25 bp, Homo sapien
tcttaaaacggcgtgtggcgaccac

SEQ ID NO: 697658 - DNA, 25 bp, Homo sapien
acttaggacaaagccctgtgcgtga

SEQ ID NO: 697659 - DNA, 25 bp, Homo sapien
gagaaaataacgatgccggcaacag

SEQ ID NO: 697660 - DNA, 25 bp, Homo sapien
ccaagggacccatcaggagctggga

SEQ ID NO: 697661 - DNA, 25 bp, Homo sapien
agggtgggtgagggcgccacccacg

SEQ ID NO: 697662 - DNA, 25 bp, Homo sapien
ggtgagggcgccacccacgtgcctg

SEQ ID NO: 697663 - DNA, 25 bp, Homo sapien
ggtgggtgagggcgccacccacgtg

SEQ ID NO: 697664 - DNA, 25 bp, Homo sapien
tgggtgagggcgccacccacgtgcc

SEQ ID NO: 697665 - DNA, 25 bp, Homo sapien
gccttggtcttcacgcagtactcgg

SEQ ID NO: 697666 - DNA, 25 bp, Homo sapien
gtcgtcgtagaagaggtctgagccc

SEQ ID NO: 697667 - DNA, 25 bp, Homo sapien
ttcacgcagtactcggccagcgtgg

SEQ ID NO: 697668 - DNA, 25 bp, Homo sapien
acctcgccgtcctcgtagtagtcgt

SEQ ID NO: 697669 - DNA, 25 bp, Homo sapien
tgaggtaaactcggcaagtttattc

SEQ ID NO: 697670 - DNA, 25 bp, Homo sapien
aggtaaactcggcaagtttattctg

SEQ ID NO: 697671 - DNA, 25 bp, Homo sapien
taaactcggcaagtttattctggtg

SEQ ID NO: 697672 - DNA, 25 bp, Homo sapien
actcggcaagtttattctggtggtg

SEQ ID NO: 697673 - DNA, 25 bp, Homo sapien
ttctctgaagcacgtgaaaacccag

SEQ ID NO: 697674 - DNA, 25 bp, Homo sapien
aaaagagtcggccacggtgaatccg

SEQ ID NO: 697675 - DNA, 25 bp, Homo sapien
gctggtagtgtcaggaaacggcccc

SEQ ID NO: 697676 - DNA, 25 bp, Homo sapien
tctgtcgtctaaggagccacgggtc

SEQ ID NO: 697677 - DNA, 25 bp, Homo sapien
ccaagcagctatggatgatcctgag

SEQ ID NO: 697678 - DNA, 25 bp, Homo sapien
gaatcagccactgagcgactttccg

SEQ ID NO: 697679 - DNA, 25 bp, Homo sapien
ccagaagcggaacgcaggcaggttc

SEQ ID NO: 697680 - DNA, 25 bp, Homo sapien
ggctgtgccagtaacacttcactca

SEQ ID NO: 697681 - DNA, 25 bp, Homo sapien
gctgtggagacccagtgtgggtgct

SEQ ID NO: 697682 - DNA, 25 bp, Homo sapien
tgtggagacccagtgtgggtgctgg

SEQ ID NO: 697683 - DNA, 25 bp, Homo sapien
gccgctgtggagacccagtgtgggt

SEQ ID NO: 697684 - DNA, 25 bp, Homo sapien
ggagacccagtgtgggtgctggccc

SEQ ID NO: 697685 - DNA, 25 bp, Homo sapien
accagcagtgaagacacgcaggcct

SEQ ID NO: 697686 - DNA, 25 bp, Homo sapien
agcagtgaagacacgcaggcctcca

SEQ ID NO: 697687 - DNA, 25 bp, Homo sapien
ccagcagtgaagacacgcaggcctc

SEQ ID NO: 697688 - DNA, 25 bp, Homo sapien
caccagcagtgaagacacgcaggcc

SEQ ID NO: 697689 - DNA, 25 bp, Homo sapien
tctctgcagtgaggccatgtacggg

SEQ ID NO: 697690 - DNA, 25 bp, Homo sapien
acgggcgcgagtgggggatcacctc

SEQ ID NO: 697691 - DNA, 25 bp, Homo sapien
gcagtgaggccatgtacgggcgcga

SEQ ID NO: 697692 - DNA, 25 bp, Homo sapien
tgaggccatgtacgggcgcgagtgg

SEQ ID NO: 697693 - DNA, 25 bp, Homo sapien
gagaccggggctgtccagggtgtgg

SEQ ID NO: 697694 - DNA, 25 bp, Homo sapien
ctgaagcagcgcgaggtcgttctcc

SEQ ID NO: 697695 - DNA, 25 bp, Homo sapien
tgtagcgagggtgctggatggctgc

SEQ ID NO: 697696 - DNA, 25 bp, Homo sapien
ggcagggacgggcttgtagcgaggg

SEQ ID NO: 697697 - DNA, 25 bp, Homo sapien
caccacctggcgcttactgggcagg

SEQ ID NO: 697698 - DNA, 25 bp, Homo sapien
cagaagcggctgttgttacacatgc

SEQ ID NO: 697699 - DNA, 25 bp, Homo sapien
cggatggtccggctgggcttcactt

SEQ ID NO: 697700 - DNA, 25 bp, Homo sapien
tacacatgcgggtgtccagcacttg

SEQ ID NO: 697701 - DNA, 25 bp, Homo sapien
gcagggacgacacaccgcagctcag

SEQ ID NO: 697702 - DNA, 25 bp, Homo sapien
ctgcagggacgacacaccgcagctc

SEQ ID NO: 697703 - DNA, 25 bp, Homo sapien
tgcagggacgacacaccgcagctca

SEQ ID NO: 697704 - DNA, 25 bp, Homo sapien
cttcctgatccaggacacgtaaggc

SEQ ID NO: 697705 - DNA, 25 bp, Homo sapien
ccacgggaggcttgaagatgtcagt

SEQ ID NO: 697706 - DNA, 25 bp, Homo sapien
acgtaaggcgccacagcggtggcca

SEQ ID NO: 697707 - DNA, 25 bp, Homo sapien
actctggccaacacccggcctttgc

SEQ ID NO: 697708 - DNA, 25 bp, Homo sapien
cattatgatttattggtccctccct

SEQ ID NO: 697709 - DNA, 25 bp, Homo sapien
tgtccctcccacccgtcctcaccca

SEQ ID NO: 697710 - DNA, 25 bp, Homo sapien
tatgatttattggtccctccctgtc

SEQ ID NO: 697711 - DNA, 25 bp, Homo sapien
cttcattatgatttattggtccctc

SEQ ID NO: 697712 - DNA, 25 bp, Homo sapien
aatgcaagaggaccgcagactaagc

SEQ ID NO: 697713 - DNA, 25 bp, Homo sapien
taaactcggagtcgcaatgcaagag

SEQ ID NO: 697714 - DNA, 25 bp, Homo sapien
agactctcagcaacgcgggtaggaa

SEQ ID NO: 697715 - DNA, 25 bp, Homo sapien
cacggtgagaaaagtcgctattggg

SEQ ID NO: 697716 - DNA, 25 bp, Homo sapien
ttggggagacgcgtccgactgcttc

SEQ ID NO: 697717 - DNA, 25 bp, Homo sapien
ttcttggggagacgcgtccgactgc

SEQ ID NO: 697718 - DNA, 25 bp, Homo sapien
ctttcttggggagacgcgtccgact

SEQ ID NO: 697719 - DNA, 25 bp, Homo sapien
ggggagacgcgtccgactgcttcat

SEQ ID NO: 697720 - DNA, 25 bp, Homo sapien
aaagttgcaatgagcgcagagcggt

SEQ ID NO: 697721 - DNA, 25 bp, Homo sapien
cgtgacccggcgttgctaggaaacg

SEQ ID NO: 697722 - DNA, 25 bp, Homo sapien
tatctgagttaaacacgggccggcc

SEQ ID NO: 697723 - DNA, 25 bp, Homo sapien
cgcggctggagcctgcgcatttctt

SEQ ID NO: 697724 - DNA, 25 bp, Homo sapien
cagcgcgaatcccagcagcacgaac

SEQ ID NO: 697725 - DNA, 25 bp, Homo sapien
gcgaatcccagcagcacgaacagcg

SEQ ID NO: 697726 - DNA, 25 bp, Homo sapien
gcgcgaatcccagcagcacgaacag

SEQ ID NO: 697727 - DNA, 25 bp, Homo sapien
aatcccagcagcacgaacagcgcag

SEQ ID NO: 697728 - DNA, 25 bp, Homo sapien
gcgctgaatcgggtggccagggccc

SEQ ID NO: 697729 - DNA, 25 bp, Homo sapien
tatttcctgcgctgaatcgggtggc

SEQ ID NO: 697730 - DNA, 25 bp, Homo sapien
tgcgctgaatcgggtggccagggcc

SEQ ID NO: 697731 - DNA, 25 bp, Homo sapien
ttcctgcgctgaatcgggtggccag

SEQ ID NO: 697732 - DNA, 25 bp, Homo sapien
cccgtgggtggaaagctcgtgtcct

SEQ ID NO: 697733 - DNA, 25 bp, Homo sapien
ggaccacacgtggtttcaaaacaca

SEQ ID NO: 697734 - DNA, 25 bp, Homo sapien
acacatgaaactgggcagaagagcc

SEQ ID NO: 697735 - DNA, 25 bp, Homo sapien
tgagggcacaactgtgggaccacac

SEQ ID NO: 697736 - DNA, 25 bp, Homo sapien
tggcccggcactcgtaagtgcccgt

SEQ ID NO: 697737 - DNA, 25 bp, Homo sapien
gttccaggactagcacgactgcctg

SEQ ID NO: 697738 - DNA, 25 bp, Homo sapien
tcctcctccacgagcgtgtcgatgg

SEQ ID NO: 697739 - DNA, 25 bp, Homo sapien
gtgtcgttgggaccctgcccttcaa

SEQ ID NO: 697740 - DNA, 25 bp, Homo sapien
taaaaacgtagccagctgggcgcgg

SEQ ID NO: 697741 - DNA, 25 bp, Homo sapien
gggaccagggcatcgagctcttgta

SEQ ID NO: 697742 - DNA, 25 bp, Homo sapien
ggcgatgttcctgcccagagacaca

SEQ ID NO: 697743 - DNA, 25 bp, Homo sapien
tgcccttctctaggaggcactcagg

SEQ ID NO: 697744 - DNA, 25 bp, Homo sapien
tatcttggagccaaggtcttctacg

SEQ ID NO: 697745 - DNA, 25 bp, Homo sapien
tgtggcgctgtcattcaaggagcag

SEQ ID NO: 697746 - DNA, 25 bp, Homo sapien
caggtgaggagtatcttggagccaa

SEQ ID NO: 697747 - DNA, 25 bp, Homo sapien
agccaaggtcttctacggtagtgaa

SEQ ID NO: 697748 - DNA, 25 bp, Homo sapien
ctccgttttctggccgggcagcgcg

SEQ ID NO: 697749 - DNA, 25 bp, Homo sapien
ccgttttctggccgggcagcgcgtc

SEQ ID NO: 697750 - DNA, 25 bp, Homo sapien
tccttcagcaccacgccccccttca

SEQ ID NO: 697751 - DNA, 25 bp, Homo sapien
ctccttcagcaccacgccccccttc

SEQ ID NO: 697752 - DNA, 25 bp, Homo sapien
caggagtactctccccactggtcgt

SEQ ID NO: 697753 - DNA, 25 bp, Homo sapien
tactctccccactggtcgtcggagt

SEQ ID NO: 697754 - DNA, 25 bp, Homo sapien
aagacgcaggagtactctccccact

SEQ ID NO: 697755 - DNA, 25 bp, Homo sapien
agtactctccccactggtcgtcgga

SEQ ID NO: 697756 - DNA, 25 bp, Homo sapien
ggagctggatgttggccgtgcccat

SEQ ID NO: 697757 - DNA, 25 bp, Homo sapien
cgtggagctggatgttggccgtgcc

SEQ ID NO: 697758 - DNA, 25 bp, Homo sapien
tggagctggatgttggccgtgccca

SEQ ID NO: 697759 - DNA, 25 bp, Homo sapien
gtggagctggatgttggccgtgccc

SEQ ID NO: 697760 - DNA, 25 bp, Homo sapien
tcccgacagtcggtggtgcccggta

SEQ ID NO: 697761 - DNA, 25 bp, Homo sapien
acttctcccgacagtcggtggtgcc

SEQ ID NO: 697762 - DNA, 25 bp, Homo sapien
agagaggagcctggaaccgcaggcc

SEQ ID NO: 697763 - DNA, 25 bp, Homo sapien
cctcccgcaggagggctgttcccct

SEQ ID NO: 697764 - DNA, 25 bp, Homo sapien
ggtggcacggactctgacttgcaga

SEQ ID NO: 697765 - DNA, 25 bp, Homo sapien
cagagtcagtgatcttgtaccaggc

SEQ ID NO: 697766 - DNA, 25 bp, Homo sapien
gacttgcagaccagcatggccgtct

SEQ ID NO: 697767 - DNA, 25 bp, Homo sapien
gatgtgttctgacgacttcacagcc

SEQ ID NO: 697768 - DNA, 25 bp, Homo sapien
agctggtgccgttgcaccggtactg

SEQ ID NO: 697769 - DNA, 25 bp, Homo sapien
tcaatgtgtagctctgaccggccct

SEQ ID NO: 697770 - DNA, 25 bp, Homo sapien
cctgctctcggagccgttcatgagg

SEQ ID NO: 697771 - DNA, 25 bp, Homo sapien
gaggaactcacgaagaacctgctct

SEQ ID NO: 697772 - DNA, 25 bp, Homo sapien
gggccaccccgagagcagggcatgt

SEQ ID NO: 697773 - DNA, 25 bp, Homo sapien
gccaccccgagagcagggcatgtgg

SEQ ID NO: 697774 - DNA, 25 bp, Homo sapien
ctgggccaccccgagagcagggcat

SEQ ID NO: 697775 - DNA, 25 bp, Homo sapien
accccgagagcagggcatgtgggca

SEQ ID NO: 697776 - DNA, 25 bp, Homo sapien
ccgagcaggggcatctgtgctgcca

SEQ ID NO: 697777 - DNA, 25 bp, Homo sapien
ccatgaaaaagaggacgagaggaca

SEQ ID NO: 697778 - DNA, 25 bp, Homo sapien
aaagaggacgagaggacagcctgtc

SEQ ID NO: 697779 - DNA, 25 bp, Homo sapien
aaggaccgccgccatgaaaaagagg

SEQ ID NO: 697780 - DNA, 25 bp, Homo sapien
aggggtgcagagccggcgtcgtcat

SEQ ID NO: 697781 - DNA, 25 bp, Homo sapien
aggaagagttcctctggcggacgtt

SEQ ID NO: 697782 - DNA, 25 bp, Homo sapien
tcctctggcggacgttcttgccttt

SEQ ID NO: 697783 - DNA, 25 bp, Homo sapien
gttcctctggcggacgttcttgcct

SEQ ID NO: 697784 - DNA, 25 bp, Homo sapien
gaagagttcctctggcggacgttct

SEQ ID NO: 697785 - DNA, 25 bp, Homo sapien
tggctcaggaggagctcccgcccac

SEQ ID NO: 697786 - DNA, 25 bp, Homo sapien
acacctggctcaggaggagctcccg

SEQ ID NO: 697787 - DNA, 25 bp, Homo sapien
gctcaggagttcccgcccacccacc

SEQ ID NO: 697788 - DNA, 25 bp, Homo sapien
tcaggaggagctcccgcccaccgca

SEQ ID NO: 697789 - DNA, 25 bp, Homo sapien
gacccaggagcccacacctggctag

SEQ ID NO: 697790 - DNA, 25 bp, Homo sapien
cgggacccaggagcccacacctggc

SEQ ID NO: 697791 - DNA, 25 bp, Homo sapien
acaggcgggacccaggagcccacac

SEQ ID NO: 697792 - DNA, 25 bp, Homo sapien
gcgggacccaggagcccacacctgg

SEQ ID NO: 697793 - DNA, 25 bp, Homo sapien
agacagcattggcttcagacaggca

SEQ ID NO: 697794 - DNA, 25 bp, Homo sapien
aggctgagtcgaacacagacccgtg

SEQ ID NO: 697795 - DNA, 25 bp, Homo sapien
gggcccctcgtgtgacctgtgactt

SEQ ID NO: 697796 - DNA, 25 bp, Homo sapien
ccgggctctcgtgaaacacttcaga

SEQ ID NO: 697797 - DNA, 25 bp, Homo sapien
ggtcgccctcggtgtgggcaagtga

SEQ ID NO: 697798 - DNA, 25 bp, Homo sapien
tgcccccggatgcacagacaaggag

SEQ ID NO: 697799 - DNA, 25 bp, Homo sapien
gcaagtgagtcctctgtggccaaga

SEQ ID NO: 697800 - DNA, 25 bp, Homo sapien
gagtcccggcgatggcgccagttcc

SEQ ID NO: 697801 - DNA, 25 bp, Homo sapien
cgatctttattgtggcggtgggtgg

SEQ ID NO: 697802 - DNA, 25 bp, Homo sapien
gatctttattgtggcggtgggtggg

SEQ ID NO: 697803 - DNA, 25 bp, Homo sapien
ggtgggggcgatctttattgtggcg

SEQ ID NO: 697804 - DNA, 25 bp, Homo sapien
gggcgatctttattgtggcggtggg

SEQ ID NO: 697805 - DNA, 25 bp, Homo sapien
gtacagagcatgaggcgtccacaag

SEQ ID NO: 697806 - DNA, 25 bp, Homo sapien
catgaggcgtccacaagcacggtgg

SEQ ID NO: 697807 - DNA, 25 bp, Homo sapien
ctcccacccggtacagagcatgagg

SEQ ID NO: 697808 - DNA, 25 bp, Homo sapien
acccggtacagagcatgaggcgtcc

SEQ ID NO: 697809 - DNA, 25 bp, Homo sapien
tgggaagatgtcaggccgggcaggt

SEQ ID NO: 697810 - DNA, 25 bp, Homo sapien
tgtcaggccgggcaggtcgccagag

SEQ ID NO: 697811 - DNA, 25 bp, Homo sapien
cgcacggcacgagaaccgcccatgc

SEQ ID NO: 697812 - DNA, 25 bp, Homo sapien
agagccccagggctcgcggctggga

SEQ ID NO: 697813 - DNA, 25 bp, Homo sapien
tgaagacttccacgacgaaagggtg

SEQ ID NO: 697814 - DNA, 25 bp, Homo sapien
cacggccagcgcctccttgctttct

SEQ ID NO: 697815 - DNA, 25 bp, Homo sapien
acggccagcgcctccttgctttctg

SEQ ID NO: 697816 - DNA, 25 bp, Homo sapien
ggccagcgcctccttgctttctgtg

SEQ ID NO: 697817 - DNA, 25 bp, Homo sapien
ccgggcagtgcggagcggagccgcc

SEQ ID NO: 697818 - DNA, 25 bp, Homo sapien
gggcagtgcggagcggagccgccgc

SEQ ID NO: 697819 - DNA, 25 bp, Homo sapien
cggcgccgggcagtgcggagcggag

SEQ ID NO: 697820 - DNA, 25 bp, Homo sapien
ggcgaggcggcgccgggcagtgcgg

SEQ ID NO: 697821 - DNA, 25 bp, Homo sapien
cgcacgagctgtcgcggctgcggag

SEQ ID NO: 697822 - DNA, 25 bp, Homo sapien
gcactcgccgttcgggctgcccttg

SEQ ID NO: 697823 - DNA, 25 bp, Homo sapien
ggcacgagaacgacaccttgggccc

SEQ ID NO: 697824 - DNA, 25 bp, Homo sapien
ctgcccttggccgtgctcgccgcgc

SEQ ID NO: 697825 - DNA, 25 bp, Homo sapien
tgccgaacatccgcagcgagaactt

SEQ ID NO: 697826 - DNA, 25 bp, Homo sapien
gctgccgaacatccgcagcgagaac

SEQ ID NO: 697827 - DNA, 25 bp, Homo sapien
ctgccgaacatccgcagcgagaact

SEQ ID NO: 697828 - DNA, 25 bp, Homo sapien
ttgggcgtggcggagacagctgggc

SEQ ID NO: 697829 - DNA, 25 bp, Homo sapien
gtggacttgggcgtggcggagacag

SEQ ID NO: 697830 - DNA, 25 bp, Homo sapien
gggcgtgaaagaggccacttccgag

SEQ ID NO: 697831 - DNA, 25 bp, Homo sapien
aggccacttccgagcacgggagcag

SEQ ID NO: 697832 - DNA, 25 bp, Homo sapien
gcaggagacggcagggcggccacag

SEQ ID NO: 697833 - DNA, 25 bp, Homo sapien
agcaggagacggcagggcggccaca

SEQ ID NO: 697834 - DNA, 25 bp, Homo sapien
caccagcttgattgcggacgacaac

SEQ ID NO: 697835 - DNA, 25 bp, Homo sapien
tgccccgagattatacccaaagaaa

SEQ ID NO: 697836 - DNA, 25 bp, Homo sapien
aatgaaaacaaggacggacgagcac

SEQ ID NO: 697837 - DNA, 25 bp, Homo sapien
tgttcacaccagctcgatccacagt

SEQ ID NO: 697838 - DNA, 25 bp, Homo sapien
cccacacctcgagccagtgcctcct

SEQ ID NO: 697839 - DNA, 25 bp, Homo sapien
gacgaggggcgcccacacctcgagc

SEQ ID NO: 697840 - DNA, 25 bp, Homo sapien
acacctcgagccagtgcctcctccg

SEQ ID NO: 697841 - DNA, 25 bp, Homo sapien
gggacgaggggcgcccacacctcga

SEQ ID NO: 697842 - DNA, 25 bp, Homo sapien
cacgtgcgcagatacttcttcttga

SEQ ID NO: 697843 - DNA, 25 bp, Homo sapien
gcgcacgatgcgcagggcgcgtgcc

SEQ ID NO: 697844 - DNA, 25 bp, Homo sapien
accacgaaccacgtgcgcagatact

SEQ ID NO: 697845 - DNA, 25 bp, Homo sapien
tgcgcagggcgcgtgccgtcttgta

SEQ ID NO: 697846 - DNA, 25 bp, Homo sapien
cgccgtgagcccaccctacccgctg

SEQ ID NO: 697847 - DNA, 25 bp, Homo sapien
tgagcccaccctacccgctgacccc

SEQ ID NO: 697848 - DNA, 25 bp, Homo sapien
cgtgagcccaccctacccgctgacc

SEQ ID NO: 697849 - DNA, 25 bp, Homo sapien
gccgtgagcccaccctacccgctga

SEQ ID NO: 697850 - DNA, 25 bp, Homo sapien
gattgcagatcctcatcaccgcgct

SEQ ID NO: 697851 - DNA, 25 bp, Homo sapien
gagattgcagatcctcatcaccgcg

SEQ ID NO: 697852 - DNA, 25 bp, Homo sapien
attgcagatcctcatcaccgcgctg

SEQ ID NO: 697853 - DNA, 25 bp, Homo sapien
agattgcagatcctcatcaccgcgc

SEQ ID NO: 697854 - DNA, 25 bp, Homo sapien
gcgaaggagtacagttcactccacg

SEQ ID NO: 697855 - DNA, 25 bp, Homo sapien
gaaggagtacagttcactccacgag

SEQ ID NO: 697856 - DNA, 25 bp, Homo sapien
gagtacagttcactccacgagtggt

SEQ ID NO: 697857 - DNA, 25 bp, Homo sapien
aggagtacagttcactccacgagtg

SEQ ID NO: 697858 - DNA, 25 bp, Homo sapien
gggcccgttgagctcgcccaggatg

SEQ ID NO: 697859 - DNA, 25 bp, Homo sapien
ccgcaggggcccgttgagctcgccc

SEQ ID NO: 697860 - DNA, 25 bp, Homo sapien
gcaggggcccgttgagctcgcccag

SEQ ID NO: 697861 - DNA, 25 bp, Homo sapien
tcccgcaggggcccgttgagctcgc

SEQ ID NO: 697862 - DNA, 25 bp, Homo sapien
tggaagacctcgaacttgagcttgg

SEQ ID NO: 697863 - DNA, 25 bp, Homo sapien
tcttcccgatggtgccttcgcggat

SEQ ID NO: 697864 - DNA, 25 bp, Homo sapien
cttcccgatggtgccttcgcggatg

SEQ ID NO: 697865 - DNA, 25 bp, Homo sapien
ctggaagacctcgaacttgagcttg

SEQ ID NO: 697866 - DNA, 25 bp, Homo sapien
gtcgatggccaccgtctcgaaggcg

SEQ ID NO: 697867 - DNA, 25 bp, Homo sapien
gatggccaccgtctcgaaggcgcgc

SEQ ID NO: 697868 - DNA, 25 bp, Homo sapien
gaaggcgcgccgcatcatggggtac

SEQ ID NO: 697869 - DNA, 25 bp, Homo sapien
cgaaggcgcgccgcatcatggggta

SEQ ID NO: 697870 - DNA, 25 bp, Homo sapien
gaatacgcccgagttgaggtcatgc

SEQ ID NO: 697871 - DNA, 25 bp, Homo sapien
ggatgatggcgttctcctggttgtt

SEQ ID NO: 697872 - DNA, 25 bp, Homo sapien
ggttgttgaatacgcccgagttgag

SEQ ID NO: 697873 - DNA, 25 bp, Homo sapien
cgttctcctggttgttgaatacgcc

SEQ ID NO: 697874 - DNA, 25 bp, Homo sapien
cggcctgctgcaccatctcgcggtc

SEQ ID NO: 697875 - DNA, 25 bp, Homo sapien
gctcggcctgctgcaccatctcgcg

SEQ ID NO: 697876 - DNA, 25 bp, Homo sapien
ctgctgcaccatctcgcggtcgtac

SEQ ID NO: 697877 - DNA, 25 bp, Homo sapien
gcctgctgcaccatctcgcggtcgt

SEQ ID NO: 697878 - DNA, 25 bp, Homo sapien
cgatggccgaggtgacctgcggcgg

SEQ ID NO: 697879 - DNA, 25 bp, Homo sapien
gcgatggccgaggtgacctgcggcg

SEQ ID NO: 697880 - DNA, 25 bp, Homo sapien
ctgcgaggcggacagtgggcgcgac

SEQ ID NO: 697881 - DNA, 25 bp, Homo sapien
caggccgccgtagggcgaggtccgc

SEQ ID NO: 697882 - DNA, 25 bp, Homo sapien
gcgggcaggccgccgtagggcgagg

SEQ ID NO: 697883 - DNA, 25 bp, Homo sapien
gggcaggccgccgtagggcgaggtc

SEQ ID NO: 697884 - DNA, 25 bp, Homo sapien
agctgctggccgggcgtgtggaggc

SEQ ID NO: 697885 - DNA, 25 bp, Homo sapien
tgctggccgggcgtgtggaggccgc

SEQ ID NO: 697886 - DNA, 25 bp, Homo sapien
ctgctggccgggcgtgtggaggccg

SEQ ID NO: 697887 - DNA, 25 bp, Homo sapien
ggcgccgggtgaggccgagtccctg

SEQ ID NO: 697888 - DNA, 25 bp, Homo sapien
ccgggtgaggccgagtccctgcggt

SEQ ID NO: 697889 - DNA, 25 bp, Homo sapien
cggcggcgccgggtgaggccgagtc

SEQ ID NO: 697890 - DNA, 25 bp, Homo sapien
gtgaggccgagtccctgcggtccgg

SEQ ID NO: 697891 - DNA, 25 bp, Homo sapien
tcacaagttggacgagaggcgcgag

SEQ ID NO: 697892 - DNA, 25 bp, Homo sapien
caagttggacgagaggcgcgagcgc

SEQ ID NO: 697893 - DNA, 25 bp, Homo sapien
cacaagttggacgagaggcgcgagc

SEQ ID NO: 697894 - DNA, 25 bp, Homo sapien
agttggacgagaggcgcgagcgcgc

SEQ ID NO: 697895 - DNA, 25 bp, Homo sapien
ctgggcccgcggggcggtcggcgag

SEQ ID NO: 697896 - DNA, 25 bp, Homo sapien
gccggcgggccaagtattgcactta

SEQ ID NO: 697897 - DNA, 25 bp, Homo sapien
cctacgtctcgtctatggcttctgg

SEQ ID NO: 697898 - DNA, 25 bp, Homo sapien
cgggccggttattgcgtgagcgcga

SEQ ID NO: 697899 - DNA, 25 bp, Homo sapien
cttagaaaacgatcctcctcggacg

SEQ ID NO: 697900 - DNA, 25 bp, Homo sapien
ctgctggagttcgcccagggccgcc

SEQ ID NO: 697901 - DNA, 25 bp, Homo sapien
acctgggcagcgacgtggcgcgggc

SEQ ID NO: 697902 - DNA, 25 bp, Homo sapien
gattggctcaagatccacctggtca

SEQ ID NO: 697903 - DNA, 25 bp, Homo sapien
ggcctggattggctcaagatccacc

SEQ ID NO: 697904 - DNA, 25 bp, Homo sapien
gaagcccacgttgccaagcaaggag

SEQ ID NO: 697905 - DNA, 25 bp, Homo sapien
ccagcaacttgcaggagacgcagaa

SEQ ID NO: 697906 - DNA, 25 bp, Homo sapien
gcactgctggcactgactttacccg

SEQ ID NO: 697907 - DNA, 25 bp, Homo sapien
gaagaccctgcagtgcctctttgag

SEQ ID NO: 697908 - DNA, 25 bp, Homo sapien
ggcttgcacagcagaaacgcactct

SEQ ID NO: 697909 - DNA, 25 bp, Homo sapien
taacagggcgcttttgggatcggcc

SEQ ID NO: 697910 - DNA, 25 bp, Homo sapien
tgaagtccgcagtgctcttaccgcg

SEQ ID NO: 697911 - DNA, 25 bp, Homo sapien
gcactcttagcacgagcccagaagt

SEQ ID NO: 697912 - DNA, 25 bp, Homo sapien
cccaccacctgctggtcgtccacca

SEQ ID NO: 697913 - DNA, 25 bp, Homo sapien
tgagcctcgatgtggagcaggcccc

SEQ ID NO: 697914 - DNA, 25 bp, Homo sapien
gggcagcactcgcaggcccagctct

SEQ ID NO: 697915 - DNA, 25 bp, Homo sapien
aagtgctgcctgctcactgaccagc

SEQ ID NO: 697916 - DNA, 25 bp, Homo sapien
tgtacccggcttatttcaacagtct

SEQ ID NO: 697917 - DNA, 25 bp, Homo sapien
gtgcgcggccctgtacccggcttat

SEQ ID NO: 697918 - DNA, 25 bp, Homo sapien
ggtgcgcggccctgtacccggctta

SEQ ID NO: 697919 - DNA, 25 bp, Homo sapien
tcgagtgcgaggaaccctctctcgg

SEQ ID NO: 697920 - DNA, 25 bp, Homo sapien
caacttaagcccgtgctccgagagt

SEQ ID NO: 697921 - DNA, 25 bp, Homo sapien
tttgacctgctgcacctcgagtgcg

SEQ ID NO: 697922 - DNA, 25 bp, Homo sapien
ttgactcgtggtttcttatgcagcc

SEQ ID NO: 697923 - DNA, 25 bp, Homo sapien
gcgtgtccgtgagtcagccgagtcc

SEQ ID NO: 697924 - DNA, 25 bp, Homo sapien
cggcctccgcgcgtttgttgtttgt

SEQ ID NO: 697925 - DNA, 25 bp, Homo sapien
acttgggcgggaccaggctagggcg

SEQ ID NO: 697926 - DNA, 25 bp, Homo sapien
gcgccggccaatgggacgtctcggg

SEQ ID NO: 697927 - DNA, 25 bp, Homo sapien
cgccgggatccacgcgcaggaagaa

SEQ ID NO: 697928 - DNA, 25 bp, Homo sapien
agaagaggcgccgccagcgcacgtc

SEQ ID NO: 697929 - DNA, 25 bp, Homo sapien
tgcgggtagctgcgcggtccccgcg

SEQ ID NO: 697930 - DNA, 25 bp, Homo sapien
gccagcgcacgtcgccctccaggtg

SEQ ID NO: 697931 - DNA, 25 bp, Homo sapien
caaggtgcccgattagtgaccagcg

SEQ ID NO: 697932 - DNA, 25 bp, Homo sapien
ccttggcgcccagatgaaagcggtg

SEQ ID NO: 697933 - DNA, 25 bp, Homo sapien
tgttcacgtgtctaactgctgcgcg

SEQ ID NO: 697934 - DNA, 25 bp, Homo sapien
ggttgtaccacacggacgcttctct

SEQ ID NO: 697935 - DNA, 25 bp, Homo sapien
gccaaccgttcactgttctgtgcac

SEQ ID NO: 697936 - DNA, 25 bp, Homo sapien
ggccaaccgttcactgttctgtgca

SEQ ID NO: 697937 - DNA, 25 bp, Homo sapien
acccggccaaccgttcactgttctg

SEQ ID NO: 697938 - DNA, 25 bp, Homo sapien
ccggccaaccgttcactgttctgtg

SEQ ID NO: 697939 - DNA, 25 bp, Homo sapien
acgacgcccacgtgtacagagcgga

SEQ ID NO: 697940 - DNA, 25 bp, Homo sapien
catggccacgtagaagcctgaggac

SEQ ID NO: 697941 - DNA, 25 bp, Homo sapien
tgtacagagcggatctccaggatgc

SEQ ID NO: 697942 - DNA, 25 bp, Homo sapien
cggccccggcggttcatggccacgt

SEQ ID NO: 697943 - DNA, 25 bp, Homo sapien
gttctcttcgatgcgctcccggaac

SEQ ID NO: 697944 - DNA, 25 bp, Homo sapien
gccagcgctgtgaggcgtaggtgtt

SEQ ID NO: 697945 - DNA, 25 bp, Homo sapien
acctgcagtccacggtgtagagtcg

SEQ ID NO: 697946 - DNA, 25 bp, Homo sapien
tcccggaacctgcagtccacggtgt

SEQ ID NO: 697947 - DNA, 25 bp, Homo sapien
ggacgggcaggaagtgggcggacag

SEQ ID NO: 697948 - DNA, 25 bp, Homo sapien
gacaggtggtaccgccgcgtccggc

SEQ ID NO: 697949 - DNA, 25 bp, Homo sapien
caggtggtaccgccgcgtccggccg

SEQ ID NO: 697950 - DNA, 25 bp, Homo sapien
acgggcaggaagtgggcggacaggt

SEQ ID NO: 697951 - DNA, 25 bp, Homo sapien
ggctgctgccgcaacgccgtggcgg

SEQ ID NO: 697952 - DNA, 25 bp, Homo sapien
gttgcggagccgagagaagcgttgg

SEQ ID NO: 697953 - DNA, 25 bp, Homo sapien
cgagagaagcgttgggacttccatg

SEQ ID NO: 697954 - DNA, 25 bp, Homo sapien
ccgtgcgcagggcaccttctgggct

SEQ ID NO: 697955 - DNA, 25 bp, Homo sapien
ccttggccaggtaactcggatccca

SEQ ID NO: 697956 - DNA, 25 bp, Homo sapien
actgtgtcccgcgacgtgtctgcgt

SEQ ID NO: 697957 - DNA, 25 bp, Homo sapien
gacgtgtctgcgtcagcccccttgg

SEQ ID NO: 697958 - DNA, 25 bp, Homo sapien
cttggccaggtaactcggatcccac

SEQ ID NO: 697959 - DNA, 25 bp, Homo sapien
tgattgggccagaactaacctcaga

SEQ ID NO: 697960 - DNA, 25 bp, Homo sapien
tgcatcgggagggaatcagtgccac

SEQ ID NO: 697961 - DNA, 25 bp, Homo sapien
aaaaatccctttgctgcgcagctga

SEQ ID NO: 697962 - DNA, 25 bp, Homo sapien
gaaagaaatacacgcatgaggccgg

SEQ ID NO: 697963 - DNA, 25 bp, Homo sapien
gatcatggtgctcgatactgttggg

SEQ ID NO: 697964 - DNA, 25 bp, Homo sapien
cacttgatgaagcaacggtggccca

SEQ ID NO: 697965 - DNA, 25 bp, Homo sapien
tacacaaccactaggtctacctggg

SEQ ID NO: 697966 - DNA, 25 bp, Homo sapien
tcagcagacgtttgtggcacaggcc

SEQ ID NO: 697967 - DNA, 25 bp, Homo sapien
aacatggagtagagctcatgcttca

SEQ ID NO: 697968 - DNA, 25 bp, Homo sapien
gaaacgtctgaccacaaattcacca

SEQ ID NO: 697969 - DNA, 25 bp, Homo sapien
tagcgatatcctccctacttgcatg

SEQ ID NO: 697970 - DNA, 25 bp, Homo sapien
gataaacatcttgaacaaaaaatag

SEQ ID NO: 697971 - DNA, 25 bp, Homo sapien
caggcttctgtctccctccaggtac

SEQ ID NO: 697972 - DNA, 25 bp, Homo sapien
cccccaggcttctgtctccctccag

SEQ ID NO: 697973 - DNA, 25 bp, Homo sapien
aggcttctgtctccctccaggtaca

SEQ ID NO: 697974 - DNA, 25 bp, Homo sapien
cccaggcttctgtctccctccaggt

SEQ ID NO: 697975 - DNA, 25 bp, Homo sapien
ccatggagctcacgaagcccacggc

SEQ ID NO: 697976 - DNA, 25 bp, Homo sapien
gcccatggagctcacgaagcccacg

SEQ ID NO: 697977 - DNA, 25 bp, Homo sapien
tcacgaagcccacggcccaagccag

SEQ ID NO: 697978 - DNA, 25 bp, Homo sapien
atggagctcacgaagcccacggccc

SEQ ID NO: 697979 - DNA, 25 bp, Homo sapien
ctggcccgcctcttactcactccaa

SEQ ID NO: 697980 - DNA, 25 bp, Homo sapien
cttgggaacattccccttgcatgag

SEQ ID NO: 697981 - DNA, 25 bp, Homo sapien
tgctctccctttggcgcagggctgg

SEQ ID NO: 697982 - DNA, 25 bp, Homo sapien
cctctgtctagacagcacccgaggg

SEQ ID NO: 697983 - DNA, 25 bp, Homo sapien
tggaccaggcggtgtcaatgttgcc

SEQ ID NO: 697984 - DNA, 25 bp, Homo sapien
aatgttgccggaggcacagcactcg

SEQ ID NO: 697985 - DNA, 25 bp, Homo sapien
cgaggaggttgatcttgttccccgg

SEQ ID NO: 697986 - DNA, 25 bp, Homo sapien
tcggcccgggtgacatcagtctgga

SEQ ID NO: 697987 - DNA, 25 bp, Homo sapien
tccctgcgccccttctgcagggcgg

SEQ ID NO: 697988 - DNA, 25 bp, Homo sapien
cggacagaggacacgcgcgtggggc

SEQ ID NO: 697989 - DNA, 25 bp, Homo sapien
gcgccgtcccaggtcagggtcagtc

SEQ ID NO: 697990 - DNA, 25 bp, Homo sapien
tcccaggtcagggtcagtcggagtc

SEQ ID NO: 697991 - DNA, 25 bp, Homo sapien
cagcatgcggcacgccttgcccggg

SEQ ID NO: 697992 - DNA, 25 bp, Homo sapien
gtggcgccgtctgagccgcagacct

SEQ ID NO: 697993 - DNA, 25 bp, Homo sapien
agcggccccggtacatgacgctcag

SEQ ID NO: 697994 - DNA, 25 bp, Homo sapien
cactcgtcgcggtaggtggcgccgt

SEQ ID NO: 697995 - DNA, 25 bp, Homo sapien
tcaggccccaccgccacccatgtga

SEQ ID NO: 697996 - DNA, 25 bp, Homo sapien
ccgtgatactccctcggaagtataa

SEQ ID NO: 697997 - DNA, 25 bp, Homo sapien
ctaccccgtgatactccctcggaag

SEQ ID NO: 697998 - DNA, 25 bp, Homo sapien
tactccctcggaagtataaagacgc

SEQ ID NO: 697999 - DNA, 25 bp, Homo sapien
gatactccctcggaagtataaagac

SEQ ID NO: 698000 - DNA, 25 bp, Homo sapien
tgtggccgcgggcacaccacgtgct

SEQ ID NO: 698001 - DNA, 25 bp, Homo sapien
acagggcagggcgccgctcgacaca

SEQ ID NO: 698002 - DNA, 25 bp, Homo sapien
tctggtccacgacgcacgactgtgg

SEQ ID NO: 698003 - DNA, 25 bp, Homo sapien
tcgacacaccacgcagtgggcgctg

SEQ ID NO: 698004 - DNA, 25 bp, Homo sapien
gttgttgccgcaaagctcctggccg

SEQ ID NO: 698005 - DNA, 25 bp, Homo sapien
agatgtaggtgacgttgttgttgcc

SEQ ID NO: 698006 - DNA, 25 bp, Homo sapien
ccgcgtggcgcacgccgatggagcg

SEQ ID NO: 698007 - DNA, 25 bp, Homo sapien
ggtggcctggcgcatgtggcacgag

SEQ ID NO: 698008 - DNA, 25 bp, Homo sapien
ggtcgataagagcattgagggcgca

SEQ ID NO: 698009 - DNA, 25 bp, Homo sapien
taagagcattgagggcgcagggcag

SEQ ID NO: 698010 - DNA, 25 bp, Homo sapien
ctgcaagggtcgataagagcattga

SEQ ID NO: 698011 - DNA, 25 bp, Homo sapien
tgcaagggtcgataagagcattgag

SEQ ID NO: 698012 - DNA, 25 bp, Homo sapien
gttctcttcctcttctgcagactca

SEQ ID NO: 698013 - DNA, 25 bp, Homo sapien
ttctcttcctcttctgcagactcac

SEQ ID NO: 698014 - DNA, 25 bp, Homo sapien
gaagttctcttcctcttctgcagac

SEQ ID NO: 698015 - DNA, 25 bp, Homo sapien
tcacacgaagttctcttcctcttct

SEQ ID NO: 698016 - DNA, 25 bp, Homo sapien
tgtccgtggcatataaattagactc

SEQ ID NO: 698017 - DNA, 25 bp, Homo sapien
tctgggatccccaagtggtccgaat

SEQ ID NO: 698018 - DNA, 25 bp, Homo sapien
caagtggtccgaatccgggctctaa

SEQ ID NO: 698019 - DNA, 25 bp, Homo sapien
gctctaaggagtgtccgtggcatat

SEQ ID NO: 698020 - DNA, 25 bp, Homo sapien
tagagaagggccctaaatcaggcgc

SEQ ID NO: 698021 - DNA, 25 bp, Homo sapien
tcagtgtccggaacgcaggtctatc

SEQ ID NO: 698022 - DNA, 25 bp, Homo sapien
cacatgcgtgagtcttggcgtctac

SEQ ID NO: 698023 - DNA, 25 bp, Homo sapien
tttacacgcaggcacaggtaggcga

SEQ ID NO: 698024 - DNA, 25 bp, Homo sapien
atttccttggtgaggcagggcccca

SEQ ID NO: 698025 - DNA, 25 bp, Homo sapien
tttatttccttggtgaggcagggcc

SEQ ID NO: 698026 - DNA, 25 bp, Homo sapien
gagtctttatttccttggtgaggca

SEQ ID NO: 698027 - DNA, 25 bp, Homo sapien
gtctttatttccttggtgaggcagg

SEQ ID NO: 698028 - DNA, 25 bp, Homo sapien
atgcaaatgagatggccgctccagg

SEQ ID NO: 698029 - DNA, 25 bp, Homo sapien
tggaatgttccgtggctgggcccca

SEQ ID NO: 698030 - DNA, 25 bp, Homo sapien
gccccacgggaagcctgatgttcag

SEQ ID NO: 698031 - DNA, 25 bp, Homo sapien
gcctgagccacaaccttgcggcatg

SEQ ID NO: 698032 - DNA, 25 bp, Homo sapien
gtgggaacagacgcctcgaacctgg

SEQ ID NO: 698033 - DNA, 25 bp, Homo sapien
cggtgggaacagacgcctcgaacct

SEQ ID NO: 698034 - DNA, 25 bp, Homo sapien
ggtgggaacagacgcctcgaacctg

SEQ ID NO: 698035 - DNA, 25 bp, Homo sapien
ttggagcactcaacacccagaccga

SEQ ID NO: 698036 - DNA, 25 bp, Homo sapien
cttggagcactcaacacccagaccg

SEQ ID NO: 698037 - DNA, 25 bp, Homo sapien
tggagcactcaacacccagaccgac

SEQ ID NO: 698038 - DNA, 25 bp, Homo sapien
tggccaggatgacggccccgatgat

SEQ ID NO: 698039 - DNA, 25 bp, Homo sapien
ttggccaggatgacggccccgatga

SEQ ID NO: 698040 - DNA, 25 bp, Homo sapien
ccaggatgacggccccgatgatggc

SEQ ID NO: 698041 - DNA, 25 bp, Homo sapien
gcttggccaggatgacggccccgat

SEQ ID NO: 698042 - DNA, 25 bp, Homo sapien
gagactctggtgtgagtcttcacaa

SEQ ID NO: 698043 - DNA, 25 bp, Homo sapien
gtgtgagtcttcacaagatggccag

SEQ ID NO: 698044 - DNA, 25 bp, Homo sapien
cttagagaggatatcagaggcggcc

SEQ ID NO: 698045 - DNA, 25 bp, Homo sapien
tgaatacctgaaagagagacttggg

SEQ ID NO: 698046 - DNA, 25 bp, Homo sapien
agctgctgtttattgtccgggcggc

SEQ ID NO: 698047 - DNA, 25 bp, Homo sapien
gcggcaccggctcgggcatcgcccc

SEQ ID NO: 698048 - DNA, 25 bp, Homo sapien
cggctcgggcatcgccccgcgcaaa

SEQ ID NO: 698049 - DNA, 25 bp, Homo sapien
atcgccccgcgcaaagctgctgttt

SEQ ID NO: 698050 - DNA, 25 bp, Homo sapien
acaggcggcctccagatccggtctt

SEQ ID NO: 698051 - DNA, 25 bp, Homo sapien
aaaacacgcccagtgggaagggcag

SEQ ID NO: 698052 - DNA, 25 bp, Homo sapien
atccggtcttcggtcctcgggctgg

SEQ ID NO: 698053 - DNA, 25 bp, Homo sapien
gcgtggcgggtcacgggtgaatccc

SEQ ID NO: 698054 - DNA, 25 bp, Homo sapien
agctcccgtgtcttcgactggaaaa

SEQ ID NO: 698055 - DNA, 25 bp, Homo sapien
gctcccgtgtcttcgactggaaaat

SEQ ID NO: 698056 - DNA, 25 bp, Homo sapien
accgccaagatcagctcaagcacag

SEQ ID NO: 698057 - DNA, 25 bp, Homo sapien
cttctccaccgccaagatcagctca

SEQ ID NO: 698058 - DNA, 25 bp, Homo sapien
tccaccgccaagatcagctcaagca

SEQ ID NO: 698059 - DNA, 25 bp, Homo sapien
caggatgcagcacggaggcccccag

SEQ ID NO: 698060 - DNA, 25 bp, Homo sapien
cagccagaacgagggggtccctgcc

SEQ ID NO: 698061 - DNA, 25 bp, Homo sapien
gggcgtcgcactcgtccttccagaa

SEQ ID NO: 698062 - DNA, 25 bp, Homo sapien
cagctccagccagaacgagggggtc

SEQ ID NO: 698063 - DNA, 25 bp, Homo sapien
gggatgggggcgtcgcactcgtcct

SEQ ID NO: 698064 - DNA, 25 bp, Homo sapien
cgtccccgcgatgctttttacggcg

SEQ ID NO: 698065 - DNA, 25 bp, Homo sapien
gatagtcctgctccaggagatgagt

SEQ ID NO: 698066 - DNA, 25 bp, Homo sapien
cgtctggagcgcgtgagatagtcct

SEQ ID NO: 698067 - DNA, 25 bp, Homo sapien
ttcatgaggcccaaacccgacggga

SEQ ID NO: 698068 - DNA, 25 bp, Homo sapien
ggacgtggtctctgccgccaggacc

SEQ ID NO: 698069 - DNA, 25 bp, Homo sapien
tgggacgtggtctctgccgccagga

SEQ ID NO: 698070 - DNA, 25 bp, Homo sapien
agccgctcctgctgggacgtggtct

SEQ ID NO: 698071 - DNA, 25 bp, Homo sapien
ctgctgggacgtggtctctgccgcc

SEQ ID NO: 698072 - DNA, 25 bp, Homo sapien
ggtctccacttccattctctgcggg

SEQ ID NO: 698073 - DNA, 25 bp, Homo sapien
gttccaggtcctaggacaggtccag

SEQ ID NO: 698074 - DNA, 25 bp, Homo sapien
cacgtcacaggagggtcgggtcaca

SEQ ID NO: 698075 - DNA, 25 bp, Homo sapien
caggatccaagtttcccaagcaaat

SEQ ID NO: 698076 - DNA, 25 bp, Homo sapien
tgccggcgcttgttctcgatctccg

SEQ ID NO: 698077 - DNA, 25 bp, Homo sapien
ggcgcttgttctcgatctccgcctg

SEQ ID NO: 698078 - DNA, 25 bp, Homo sapien
tccagctgccggcgcttgttctcga

SEQ ID NO: 698079 - DNA, 25 bp, Homo sapien
gctgccggcgcttgttctcgatctc

SEQ ID NO: 698080 - DNA, 25 bp, Homo sapien
tgctcgtcgtcctgcatctgcctcc

SEQ ID NO: 698081 - DNA, 25 bp, Homo sapien
ctccagcagccagcgctcccgcagt

SEQ ID NO: 698082 - DNA, 25 bp, Homo sapien
gtcctcatccccctctgaggccgag

SEQ ID NO: 698083 - DNA, 25 bp, Homo sapien
gccgaggacggcgtcccctccagca

SEQ ID NO: 698084 - DNA, 25 bp, Homo sapien
accgagtcctccagcagccgtgtct

SEQ ID NO: 698085 - DNA, 25 bp, Homo sapien
cgagtcctccagcagccgtgtcttc

SEQ ID NO: 698086 - DNA, 25 bp, Homo sapien
acaccgagtcctccagcagccgtgt

SEQ ID NO: 698087 - DNA, 25 bp, Homo sapien
ctggacaccgagtcctccagcagcc

SEQ ID NO: 698088 - DNA, 25 bp, Homo sapien
cgctccagcacctcaatttccttct

SEQ ID NO: 698089 - DNA, 25 bp, Homo sapien
acgctccagcacctcaatttccttc

SEQ ID NO: 698090 - DNA, 25 bp, Homo sapien
tcctccttggctggactcggggctg

SEQ ID NO: 698091 - DNA, 25 bp, Homo sapien
caccacctctgtcttgcgctcctcc

SEQ ID NO: 698092 - DNA, 25 bp, Homo sapien
ctccttggctggactcggggctggg

SEQ ID NO: 698093 - DNA, 25 bp, Homo sapien
ggccgccgcgttctccttggcagtg

SEQ ID NO: 698094 - DNA, 25 bp, Homo sapien
tcatcatgggggagccgtcaaccgt

SEQ ID NO: 698095 - DNA, 25 bp, Homo sapien
cctcaggggcgtgttggagactcgc

SEQ ID NO: 698096 - DNA, 25 bp, Homo sapien
ccgtcaaccgtcctcaggggcgtgt

SEQ ID NO: 698097 - DNA, 25 bp, Homo sapien
ctgccttcatcatgggggagccgtc

SEQ ID NO: 698098 - DNA, 25 bp, Homo sapien
ctttggtctcgtcctcgtagacttt

SEQ ID NO: 698099 - DNA, 25 bp, Homo sapien
tctcgtcctcgtagactttgatgcc

SEQ ID NO: 698100 - DNA, 25 bp, Homo sapien
tcctcgtagactttgatgcccagag

SEQ ID NO: 698101 - DNA, 25 bp, Homo sapien
ccacagtgatctcaaccgagtacat

SEQ ID NO: 698102 - DNA, 25 bp, Homo sapien
aaaggagtcaggctccgacccaggc

SEQ ID NO: 698103 - DNA, 25 bp, Homo sapien
acccaacccgtggaatagtattcag

SEQ ID NO: 698104 - DNA, 25 bp, Homo sapien
ctactcactgcagccaaagggtaga

SEQ ID NO: 698105 - DNA, 25 bp, Homo sapien
gaagaagggataaacccaccatggc

SEQ ID NO: 698106 - DNA, 25 bp, Homo sapien
ccggccaatgttattcattttcaag

SEQ ID NO: 698107 - DNA, 25 bp, Homo sapien
tattcattttcaagtgtaaatagtt

SEQ ID NO: 698108 - DNA, 25 bp, Homo sapien
catgcccggccaatgttattcattt

SEQ ID NO: 698109 - DNA, 25 bp, Homo sapien
gcccggccaatgttattcattttca

SEQ ID NO: 698110 - DNA, 25 bp, Homo sapien
gagccaccgtgcctgctgctttttt

SEQ ID NO: 698111 - DNA, 25 bp, Homo sapien
accaggctgatttttgtacgtttag

SEQ ID NO: 698112 - DNA, 25 bp, Homo sapien
cacaccaggctgatttttgtacgtt

SEQ ID NO: 698113 - DNA, 25 bp, Homo sapien
tacgtttagtagagatggggtttca

SEQ ID NO: 698114 - DNA, 25 bp, Homo sapien
ggatgagttcgtccacctcggagga

SEQ ID NO: 698115 - DNA, 25 bp, Homo sapien
taacccatgaagatcattgtgaccg

SEQ ID NO: 698116 - DNA, 25 bp, Homo sapien
tgacctcgtccgctttgtggatgag

SEQ ID NO: 698117 - DNA, 25 bp, Homo sapien
agctccgccgtgatggtatcttgaa

SEQ ID NO: 698118 - DNA, 25 bp, Homo sapien
cactgccgttgggtggtgcaggctc

SEQ ID NO: 698119 - DNA, 25 bp, Homo sapien
tccttgggctcagccgcgtcttcga

SEQ ID NO: 698120 - DNA, 25 bp, Homo sapien
cagcatttacaacggtgcttcttca

SEQ ID NO: 698121 - DNA, 25 bp, Homo sapien
tgcttcttcatgtcgaggtcctggg

SEQ ID NO: 698122 - DNA, 25 bp, Homo sapien
tggttcgccccgtctagaagatagc

SEQ ID NO: 698123 - DNA, 25 bp, Homo sapien
catgtaacaacacgccaagtcctgg

SEQ ID NO: 698124 - DNA, 25 bp, Homo sapien
gctcgggacaaggagtggctcactc

SEQ ID NO: 698125 - DNA, 25 bp, Homo sapien
tatagcaagggcacttcagcgaagg

SEQ ID NO: 698126 - DNA, 25 bp, Homo sapien
tcagcctccctttaatggctcaaag

SEQ ID NO: 698127 - DNA, 25 bp, Homo sapien
cgccttcctcgccaggttgaaaggc

SEQ ID NO: 698128 - DNA, 25 bp, Homo sapien
caccccaaggcgctcagggtgagcg

SEQ ID NO: 698129 - DNA, 25 bp, Homo sapien
ggtgaagccagcacaccgcaaccct

SEQ ID NO: 698130 - DNA, 25 bp, Homo sapien
ctgccggctcccggctccacagtct

SEQ ID NO: 698131 - DNA, 25 bp, Homo sapien
gccggctcccggctccacagtctgc

SEQ ID NO: 698132 - DNA, 25 bp, Homo sapien
tcccggctccacagtctgcagcctc

SEQ ID NO: 698133 - DNA, 25 bp, Homo sapien
ggctcccggctccacagtctgcagc

SEQ ID NO: 698134 - DNA, 25 bp, Homo sapien
tcctcccgtggggtggagacctctg

SEQ ID NO: 698135 - DNA, 25 bp, Homo sapien
tcccgtggggtggagacctctgggc

SEQ ID NO: 698136 - DNA, 25 bp, Homo sapien
cgtggggtggagacctctgggctta

SEQ ID NO: 698137 - DNA, 25 bp, Homo sapien
ccgtggggtggagacctctgggctt

SEQ ID NO: 698138 - DNA, 25 bp, Homo sapien
tgtgcctgagggatgcccaggatgg

SEQ ID NO: 698139 - DNA, 25 bp, Homo sapien
gggcccatgcacaccagatggtatg

SEQ ID NO: 698140 - DNA, 25 bp, Homo sapien
tggggtatctggtcacgcggtccat

SEQ ID NO: 698141 - DNA, 25 bp, Homo sapien
gatggtatgtgtagctggtgtctcc

SEQ ID NO: 698142 - DNA, 25 bp, Homo sapien
tgtaggcatgcacgctgtaggacac

SEQ ID NO: 698143 - DNA, 25 bp, Homo sapien
gagccagggtcatccacaacttgga

SEQ ID NO: 698144 - DNA, 25 bp, Homo sapien
gagtgcccatgttggacgtccctgg

SEQ ID NO: 698145 - DNA, 25 bp, Homo sapien
gcttgatgggaaccacgtgcccgtt

SEQ ID NO: 698146 - DNA, 25 bp, Homo sapien
gcttgccgaatgctccgaaggctga

SEQ ID NO: 698147 - DNA, 25 bp, Homo sapien
gctcaggtacggctggtaggcatca

SEQ ID NO: 698148 - DNA, 25 bp, Homo sapien
actatgtcccgctgcacgtagaggg

SEQ ID NO: 698149 - DNA, 25 bp, Homo sapien
tcctggtggtcggttgcctgccgaa

SEQ ID NO: 698150 - DNA, 25 bp, Homo sapien
gcctttggtgaagtcgcagccttgg

SEQ ID NO: 698151 - DNA, 25 bp, Homo sapien
tccagaggattctgagagatgcctc

SEQ ID NO: 698152 - DNA, 25 bp, Homo sapien
cctcggggacatcgtggcctttggt

SEQ ID NO: 698153 - DNA, 25 bp, Homo sapien
aggacgcaggcggaagtactcccac

SEQ ID NO: 698154 - DNA, 25 bp, Homo sapien
tcagatgactgggacttctgcagcc

SEQ ID NO: 698155 - DNA, 25 bp, Homo sapien
tggtcagagttctcatctggcgttg

SEQ ID NO: 698156 - DNA, 25 bp, Homo sapien
tcttgctcccggcgcaggacactct

SEQ ID NO: 698157 - DNA, 25 bp, Homo sapien
agcagatcagatgactgggacttct

SEQ ID NO: 698158 - DNA, 25 bp, Homo sapien
gggagactcagacaccgagtaactg

SEQ ID NO: 698159 - DNA, 25 bp, Homo sapien
gacaccgagtaactgcccgtgatgc

SEQ ID NO: 698160 - DNA, 25 bp, Homo sapien
gactcagacaccgagtaactgcccg

SEQ ID NO: 698161 - DNA, 25 bp, Homo sapien
agaagggagactcagacaccgagta

SEQ ID NO: 698162 - DNA, 25 bp, Homo sapien
ttgataccgtccgaggggttgatgc

SEQ ID NO: 698163 - DNA, 25 bp, Homo sapien
gataccgtccgaggggttgatgcca

SEQ ID NO: 698164 - DNA, 25 bp, Homo sapien
cgtccgaggggttgatgccagcgta

SEQ ID NO: 698165 - DNA, 25 bp, Homo sapien
accgtccgaggggttgatgccagcg

SEQ ID NO: 698166 - DNA, 25 bp, Homo sapien
ggattcccagcgctctgccatggcg

SEQ ID NO: 698167 - DNA, 25 bp, Homo sapien
tctgccatggcgttcttgtgacggg

SEQ ID NO: 698168 - DNA, 25 bp, Homo sapien
gggtcacccgtatggcttccaggac

SEQ ID NO: 698169 - DNA, 25 bp, Homo sapien
tcttgtgacgggtcacccgtatggc

SEQ ID NO: 698170 - DNA, 25 bp, Homo sapien
tgtgcccatggtgggattgttggca

SEQ ID NO: 698171 - DNA, 25 bp, Homo sapien
catggtgggattgttggcagatgag

SEQ ID NO: 698172 - DNA, 25 bp, Homo sapien
catttcctagggtgggggcttggcg

SEQ ID NO: 698173 - DNA, 25 bp, Homo sapien
gtcttggcagttcccacgagggtca

SEQ ID NO: 698174 - DNA, 25 bp, Homo sapien
tgaaagtggaggagcgggtctcttt

SEQ ID NO: 698175 - DNA, 25 bp, Homo sapien
catttggcaaagtcttagaagcaga

SEQ ID NO: 698176 - DNA, 25 bp, Homo sapien
tggaggagcgggtctctttctttct

SEQ ID NO: 698177 - DNA, 25 bp, Homo sapien
cagggcatttggcaaagtcttagaa

SEQ ID NO: 698178 - DNA, 25 bp, Homo sapien
gccctcagactagcggaagcaaatt

SEQ ID NO: 698179 - DNA, 25 bp, Homo sapien
ccctctcagcttgggacttctcaga

SEQ ID NO: 698180 - DNA, 25 bp, Homo sapien
cctcaaggtgctgcgatctgtgcca

SEQ ID NO: 698181 - DNA, 25 bp, Homo sapien
catgggatcctatcgatgtgagagc

SEQ ID NO: 698182 - DNA, 25 bp, Homo sapien
gaaactgatgggactcacccaggac

SEQ ID NO: 698183 - DNA, 25 bp, Homo sapien
gtagccagtggaggctcacacatcc

SEQ ID NO: 698184 - DNA, 25 bp, Homo sapien
ttggaatagaattgccccgacatga

SEQ ID NO: 698185 - DNA, 25 bp, Homo sapien
cattaggtgggtggtgatttgttat

SEQ ID NO: 698186 - DNA, 25 bp, Homo sapien
taatgcaccccttggtgacgcggtg

SEQ ID NO: 698187 - DNA, 25 bp, Homo sapien
gggtggacatcacttcctgcaacga

SEQ ID NO: 698188 - DNA, 25 bp, Homo sapien
catcttgctggcaggacgatgggca

SEQ ID NO: 698189 - DNA, 25 bp, Homo sapien
tgaggtgaccgtccaactgggatga

SEQ ID NO: 698190 - DNA, 25 bp, Homo sapien
cgcagcctccgggttctggaatttt

SEQ ID NO: 698191 - DNA, 25 bp, Homo sapien
aagcaaattcggtcgggtcctccag

SEQ ID NO: 698192 - DNA, 25 bp, Homo sapien
gagaattccggaagagcaccgcaga

SEQ ID NO: 698193 - DNA, 25 bp, Homo sapien
gaggaaagggcgcttgaccctgtca

SEQ ID NO: 698194 - DNA, 25 bp, Homo sapien
ggggacgtgcagggggaacacaggc

SEQ ID NO: 698195 - DNA, 25 bp, Homo sapien
ctggggacgtgcagggggaacacag

SEQ ID NO: 698196 - DNA, 25 bp, Homo sapien
tggggacgtgcagggggaacacagg

SEQ ID NO: 698197 - DNA, 25 bp, Homo sapien
gggacgtgcagggggaacacaggcc

SEQ ID NO: 698198 - DNA, 25 bp, Homo sapien
gcgttggcccctcattctgctggtc

SEQ ID NO: 698199 - DNA, 25 bp, Homo sapien
tttgaacacttgcagaccgtccttc

SEQ ID NO: 698200 - DNA, 25 bp, Homo sapien
gctggtagctgagggtgtcatctgt

SEQ ID NO: 698201 - DNA, 25 bp, Homo sapien
ggccgggcagtgctgcccctggcgt

SEQ ID NO: 698202 - DNA, 25 bp, Homo sapien
gtattacaagcgcgcccggcctgga

SEQ ID NO: 698203 - DNA, 25 bp, Homo sapien
ggtattcaagctgttcaaaatttgc

SEQ ID NO: 698204 - DNA, 25 bp, Homo sapien
ccctggcctgtctcaggtattcaag

SEQ ID NO: 698205 - DNA, 25 bp, Homo sapien
cctgtctcaggtattcaagctgttc

SEQ ID NO: 698206 - DNA, 25 bp, Homo sapien
gctgttcaaaatttgctccatttgc

SEQ ID NO: 698207 - DNA, 25 bp, Homo sapien
tgaattggcttgctaggaaacatgc

SEQ ID NO: 698208 - DNA, 25 bp, Homo sapien
ttggcttgctaggaaacatgcttct

SEQ ID NO: 698209 - DNA, 25 bp, Homo sapien
attctgaattggcttgctaggaaac

SEQ ID NO: 698210 - DNA, 25 bp, Homo sapien
tttttattctgaattggcttgctag

SEQ ID NO: 698211 - DNA, 25 bp, Homo sapien
ctttgtgcgagaatcacgttggttt

SEQ ID NO: 698212 - DNA, 25 bp, Homo sapien
cctttgtgcgagaatcacgttggtt

SEQ ID NO: 698213 - DNA, 25 bp, Homo sapien
gcctttgtgcgagaatcacgttggt

SEQ ID NO: 698214 - DNA, 25 bp, Homo sapien
aagggagtcgcatcgccatcttgga

SEQ ID NO: 698215 - DNA, 25 bp, Homo sapien
ggctttgcgggagacgccatcttga

SEQ ID NO: 698216 - DNA, 25 bp, Homo sapien
tgagcgctcacatctgggtgatcgc

SEQ ID NO: 698217 - DNA, 25 bp, Homo sapien
ggcacatggccaaaaagtccgattc

SEQ ID NO: 698218 - DNA, 25 bp, Homo sapien
gaatagcaggaaccgacccaacggc

SEQ ID NO: 698219 - DNA, 25 bp, Homo sapien
gacccaacggctccgagttatagac

SEQ ID NO: 698220 - DNA, 25 bp, Homo sapien
gggacggagtggaggcgccggaata

SEQ ID NO: 698221 - DNA, 25 bp, Homo sapien
cacacagagcagacccgcgggggac

SEQ ID NO: 698222 - DNA, 25 bp, Homo sapien
gggtccagacccactctagggctgc

SEQ ID NO: 698223 - DNA, 25 bp, Homo sapien
tgcccgcacgcatgctaaggggtcc

SEQ ID NO: 698224 - DNA, 25 bp, Homo sapien
tcttctgacaccacagactgcacgg

SEQ ID NO: 698225 - DNA, 25 bp, Homo sapien
tgcacggaccacgtttaacagactt

SEQ ID NO: 698226 - DNA, 25 bp, Homo sapien
tgtaccaacggctatatctgggaca

SEQ ID NO: 698227 - DNA, 25 bp, Homo sapien
taccaacggctatatctgggacaat

SEQ ID NO: 698228 - DNA, 25 bp, Homo sapien
ctttgtaccaacggctatatctggg

SEQ ID NO: 698229 - DNA, 25 bp, Homo sapien
accaacggctatatctgggacaatg

SEQ ID NO: 698230 - DNA, 25 bp, Homo sapien
tggaggctccgaggctccacagggc

SEQ ID NO: 698231 - DNA, 25 bp, Homo sapien
gagacacgagctgggcctagcgcct

SEQ ID NO: 698232 - DNA, 25 bp, Homo sapien
gcagcaaccaggagacacgagctgg

SEQ ID NO: 698233 - DNA, 25 bp, Homo sapien
tgggcctagcgcctccactgccttc

SEQ ID NO: 698234 - DNA, 25 bp, Homo sapien
aatgagacctctaactgcagccctg

SEQ ID NO: 698235 - DNA, 25 bp, Homo sapien
tagggtcagagaatgaacagtgtcc

SEQ ID NO: 698236 - DNA, 25 bp, Homo sapien
gccggaaccaggaatcactcagggt

SEQ ID NO: 698237 - DNA, 25 bp, Homo sapien
gggcgtcaccaaacaagcaatcgag

SEQ ID NO: 698238 - DNA, 25 bp, Homo sapien
gctgcaaggattgaagacacacgtt

SEQ ID NO: 698239 - DNA, 25 bp, Homo sapien
tggttacggcccttagttacacaga

SEQ ID NO: 698240 - DNA, 25 bp, Homo sapien
tctgcacacgcgagactgaggacta

SEQ ID NO: 698241 - DNA, 25 bp, Homo sapien
tgatcctaggctcaggacggcagac

SEQ ID NO: 698242 - DNA, 25 bp, Homo sapien
aacggtccgttagtgacacaagtag

SEQ ID NO: 698243 - DNA, 25 bp, Homo sapien
cggtccgttagtgacacaagtagag

SEQ ID NO: 698244 - DNA, 25 bp, Homo sapien
acggtccgttagtgacacaagtaga

SEQ ID NO: 698245 - DNA, 25 bp, Homo sapien
tccgtgacgtcgatggggagcttcc

SEQ ID NO: 698246 - DNA, 25 bp, Homo sapien
tccggatgtggatcactctagaggg

SEQ ID NO: 698247 - DNA, 25 bp, Homo sapien
cctgcacttcggctgtcacctttga

SEQ ID NO: 698248 - DNA, 25 bp, Homo sapien
agggagatgacttccccctccgtga

SEQ ID NO: 698249 - DNA, 25 bp, Homo sapien
ccttcagcatcaggaggttggtgac

SEQ ID NO: 698250 - DNA, 25 bp, Homo sapien
tttccccttcagcatcaggaggttg

SEQ ID NO: 698251 - DNA, 25 bp, Homo sapien
tccccttcagcatcaggaggttggt

SEQ ID NO: 698252 - DNA, 25 bp, Homo sapien
cccttcagcatcaggaggttggtga

SEQ ID NO: 698253 - DNA, 25 bp, Homo sapien
tcgtccccgcctgcacggtgtgagc

SEQ ID NO: 698254 - DNA, 25 bp, Homo sapien
gtccccgcctgcacggtgtgagcac

SEQ ID NO: 698255 - DNA, 25 bp, Homo sapien
ctcctcgtccccgcctgcacggtgt

SEQ ID NO: 698256 - DNA, 25 bp, Homo sapien
cctcgtccccgcctgcacggtgtga

SEQ ID NO: 698257 - DNA, 25 bp, Homo sapien
gcctcctccgtgttcatctcgatga

SEQ ID NO: 698258 - DNA, 25 bp, Homo sapien
gggtcaccgaggtgtagtagttcac

SEQ ID NO: 698259 - DNA, 25 bp, Homo sapien
ttgggagagctgtcggtcttcagct

SEQ ID NO: 698260 - DNA, 25 bp, Homo sapien
tccttgtggttggagaactggatgt

SEQ ID NO: 698261 - DNA, 25 bp, Homo sapien
aggcacagccgtgagtccccggccc

SEQ ID NO: 698262 - DNA, 25 bp, Homo sapien
gaggcacagccgtgagtccccggcc

SEQ ID NO: 698263 - DNA, 25 bp, Homo sapien
tggaccgagttcaccgcctgcaggg

SEQ ID NO: 698264 - DNA, 25 bp, Homo sapien
ctggaccgagttcaccgcctgcagg

SEQ ID NO: 698265 - DNA, 25 bp, Homo sapien
atagcagccgacctgccctggcggt

SEQ ID NO: 698266 - DNA, 25 bp, Homo sapien
cctggcggtgatgggaccacctcac

SEQ ID NO: 698267 - DNA, 25 bp, Homo sapien
acagcaatagcagccgacctgccct

SEQ ID NO: 698268 - DNA, 25 bp, Homo sapien
caggcccctcccgtgtgcctgtgcc

SEQ ID NO: 698269 - DNA, 25 bp, Homo sapien
ggcgctcacggggtccgcatactgc

SEQ ID NO: 698270 - DNA, 25 bp, Homo sapien
gcttggcgtgctgggcgctcacggg

SEQ ID NO: 698271 - DNA, 25 bp, Homo sapien
cagcttggcgtgctgggcgctcacg

SEQ ID NO: 698272 - DNA, 25 bp, Homo sapien
tcacggggtccgcatactgcagcag

SEQ ID NO: 698273 - DNA, 25 bp, Homo sapien
gaaggcaggtctgggcgtgtgtagt

SEQ ID NO: 698274 - DNA, 25 bp, Homo sapien
ttggaaaagtcgatgcgcagcgtgc

SEQ ID NO: 698275 - DNA, 25 bp, Homo sapien
aaagtcgatgcgcagcgtgcagcag

SEQ ID NO: 698276 - DNA, 25 bp, Homo sapien
tgtagtcacggctcttgtcattgtt

SEQ ID NO: 698277 - DNA, 25 bp, Homo sapien
taatagaccactctgcacactggcg

SEQ ID NO: 698278 - DNA, 25 bp, Homo sapien
gactgagcggccctaatagaccact

SEQ ID NO: 698279 - DNA, 25 bp, Homo sapien
taaatgagacactaatcatcgcacc

SEQ ID NO: 698280 - DNA, 25 bp, Homo sapien
agccttcgcgggcagatccgctgct

SEQ ID NO: 698281 - DNA, 25 bp, Homo sapien
aaaccagctcctgcatacggagagg

SEQ ID NO: 698282 - DNA, 25 bp, Homo sapien
tggcaaaggtgggagggaaaccagc

SEQ ID NO: 698283 - DNA, 25 bp, Homo sapien
ctgcagcttgaggaatggcaaaggt

SEQ ID NO: 698284 - DNA, 25 bp, Homo sapien
aaggtgggagggaaaccagctcctg

SEQ ID NO: 698285 - DNA, 25 bp, Homo sapien
caaagactgtgcgattagcggcttc

SEQ ID NO: 698286 - DNA, 25 bp, Homo sapien
ggtgcttgaagggaaccagaccaca

SEQ ID NO: 698287 - DNA, 25 bp, Homo sapien
agcctgctctgtggacgtggcgtcc

SEQ ID NO: 698288 - DNA, 25 bp, Homo sapien
ggaaccaagaccaagcgtttgaata

SEQ ID NO: 698289 - DNA, 25 bp, Homo sapien
cagggcgccgtggacgttcggaacg

SEQ ID NO: 698290 - DNA, 25 bp, Homo sapien
tgaggttgctgaccagcaatacaga

SEQ ID NO: 698291 - DNA, 25 bp, Homo sapien
gcccgggatggcgatccgacctgcc

SEQ ID NO: 698292 - DNA, 25 bp, Homo sapien
ggccagggcgccgtggacgttcgga

SEQ ID NO: 698293 - DNA, 25 bp, Homo sapien
cattctgggaaataacggatccacc

SEQ ID NO: 698294 - DNA, 25 bp, Homo sapien
gagttgccgggaaacagaacagcct

SEQ ID NO: 698295 - DNA, 25 bp, Homo sapien
ccatcttggaaaaggagggtctcag

SEQ ID NO: 698296 - DNA, 25 bp, Homo sapien
agatcgagtctgttagtgcacggcc

SEQ ID NO: 698297 - DNA, 25 bp, Homo sapien
cacacggtaagagaagcaccttcac

SEQ ID NO: 698298 - DNA, 25 bp, Homo sapien
acatgccggcagagacagcgctgct

SEQ ID NO: 698299 - DNA, 25 bp, Homo sapien
ctcgacgggcacacggtaagagaag

SEQ ID NO: 698300 - DNA, 25 bp, Homo sapien
cttcactcacatgccggcagagaca

SEQ ID NO: 698301 - DNA, 25 bp, Homo sapien
tgttctatcagtcacactccacaca

SEQ ID NO: 698302 - DNA, 25 bp, Homo sapien
taagaatcaggtagtgttctatcag

SEQ ID NO: 698303 - DNA, 25 bp, Homo sapien
gaagtaccgtgcagtcagttggcaa

SEQ ID NO: 698304 - DNA, 25 bp, Homo sapien
aacacaggtcagtaaatacataaga

SEQ ID NO: 698305 - DNA, 25 bp, Homo sapien
tgatgaagttgtcaggatgttaata

SEQ ID NO: 698306 - DNA, 25 bp, Homo sapien
gggcgagttgccaatcgtccacacg

SEQ ID NO: 698307 - DNA, 25 bp, Homo sapien
atattcaagggcaggttggtttccg

SEQ ID NO: 698308 - DNA, 25 bp, Homo sapien
atcgtccacacgaggaagacagtcc

SEQ ID NO: 698309 - DNA, 25 bp, Homo sapien
ataaagaggctttggggtgtgactc

SEQ ID NO: 698310 - DNA, 25 bp, Homo sapien
aagaataaagaggctttggggtgtg

SEQ ID NO: 698311 - DNA, 25 bp, Homo sapien
taaagaggctttggggtgtgactct

SEQ ID NO: 698312 - DNA, 25 bp, Homo sapien
gaataaagaggctttggggtgtgac

SEQ ID NO: 698313 - DNA, 25 bp, Homo sapien
caaggtaataaaagtgtgaacgata

SEQ ID NO: 698314 - DNA, 25 bp, Homo sapien
gatgccacggagcatcagagtgcca

SEQ ID NO: 698315 - DNA, 25 bp, Homo sapien
tacgtctcagggcatcaaaatcatc

SEQ ID NO: 698316 - DNA, 25 bp, Homo sapien
caaaccataaaacgaggcggatgcc

SEQ ID NO: 698317 - DNA, 25 bp, Homo sapien
tagcatccaggacaggtaagctgcc

SEQ ID NO: 698318 - DNA, 25 bp, Homo sapien
gtggcatatgccaccgacaggtcta

SEQ ID NO: 698319 - DNA, 25 bp, Homo sapien
tccgttcagcaaagtcatagcatcc

SEQ ID NO: 698320 - DNA, 25 bp, Homo sapien
cagggcgataaaccatgcgtacgta

SEQ ID NO: 698321 - DNA, 25 bp, Homo sapien
tgctttatcggccactgcggagctg

SEQ ID NO: 698322 - DNA, 25 bp, Homo sapien
cagcccggccgggtttgctttatcg

SEQ ID NO: 698323 - DNA, 25 bp, Homo sapien
agctgcgtctcgcagccacagggcg

SEQ ID NO: 698324 - DNA, 25 bp, Homo sapien
tgcggagctgcgtctcgcagccaca

SEQ ID NO: 698325 - DNA, 25 bp, Homo sapien
gccatctgcactagggcgttctcct

SEQ ID NO: 698326 - DNA, 25 bp, Homo sapien
tccgccatctgcactagggcgttct

SEQ ID NO: 698327 - DNA, 25 bp, Homo sapien
ccatctgcactagggcgttctcctt

SEQ ID NO: 698328 - DNA, 25 bp, Homo sapien
gccgtccgccatctgcactagggcg

SEQ ID NO: 698329 - DNA, 25 bp, Homo sapien
ctggtgcttcgagagcgtgatgcgg

SEQ ID NO: 698330 - DNA, 25 bp, Homo sapien
gttctggtgcttcgagagcgtgatg

SEQ ID NO: 698331 - DNA, 25 bp, Homo sapien
ggtgcttcgagagcgtgatgcggat

SEQ ID NO: 698332 - DNA, 25 bp, Homo sapien
tgcttcgagagcgtgatgcggatgg

SEQ ID NO: 698333 - DNA, 25 bp, Homo sapien
ttggagcccggcttcttgaagcggt

SEQ ID NO: 698334 - DNA, 25 bp, Homo sapien
gagttgccgtagtccttggtcaggc

SEQ ID NO: 698335 - DNA, 25 bp, Homo sapien
gatgttggagaggtgcagcgtggcc

SEQ ID NO: 698336 - DNA, 25 bp, Homo sapien
tatgttctggaagttcttggagccc

SEQ ID NO: 698337 - DNA, 25 bp, Homo sapien
gaaaacaggaccttgagatcctcct

SEQ ID NO: 698338 - DNA, 25 bp, Homo sapien
tgacgacgcccccattgctggaaaa

SEQ ID NO: 698339 - DNA, 25 bp, Homo sapien
ttgaatcctttgacgacgcccccat

SEQ ID NO: 698340 - DNA, 25 bp, Homo sapien
aacaggaccttgagatcctcctcgg

SEQ ID NO: 698341 - DNA, 25 bp, Homo sapien
gagcccatctggatcagtgccatct

SEQ ID NO: 698342 - DNA, 25 bp, Homo sapien
ggagcccatctggatcagtgccatc

SEQ ID NO: 698343 - DNA, 25 bp, Homo sapien
gtgcaggtcaatgagggcctggacc

SEQ ID NO: 698344 - DNA, 25 bp, Homo sapien
gaggtcgtggttgtgcaggtcaatg

SEQ ID NO: 698345 - DNA, 25 bp, Homo sapien
cagtcaccaagagcctgagctgtcc

SEQ ID NO: 698346 - DNA, 25 bp, Homo sapien
aaataaaatctctggtctgctaagg

SEQ ID NO: 698347 - DNA, 25 bp, Homo sapien
ggtgagcaaggtgaactagatttaa

SEQ ID NO: 698348 - DNA, 25 bp, Homo sapien
ctctggaatgatggaagttgtcgcc

SEQ ID NO: 698349 - DNA, 25 bp, Homo sapien
tgtgtcaccataaaaaaccgcgccg

SEQ ID NO: 698350 - DNA, 25 bp, Homo sapien
gagattatgtcgaccagctccgcag

SEQ ID NO: 698351 - DNA, 25 bp, Homo sapien
aatattgctaggcacagacgtctgc

SEQ ID NO: 698352 - DNA, 25 bp, Homo sapien
tttctaggcgactgcaggtgaaggc

SEQ ID NO: 698353 - DNA, 25 bp, Homo sapien
ggtaaggcaacggaatgtgcgtggg

SEQ ID NO: 698354 - DNA, 25 bp, Homo sapien
cctgtggctccgcggtcacaatact

SEQ ID NO: 698355 - DNA, 25 bp, Homo sapien
tgtggctccgcggtcacaatactga

SEQ ID NO: 698356 - DNA, 25 bp, Homo sapien
ggtcccctgtggctccgcggtcaca

SEQ ID NO: 698357 - DNA, 25 bp, Homo sapien
gttctctccgcgtcacaagccatcg

SEQ ID NO: 698358 - DNA, 25 bp, Homo sapien
aatcggttctctccgcgtcacaagc

SEQ ID NO: 698359 - DNA, 25 bp, Homo sapien
ggttctctccgcgtcacaagccatc

SEQ ID NO: 698360 - DNA, 25 bp, Homo sapien
tttaatcggttctctccgcgtcaca

SEQ ID NO: 698361 - DNA, 25 bp, Homo sapien
tccacagcgaacacagggctagaca

SEQ ID NO: 698362 - DNA, 25 bp, Homo sapien
acagcgaacacagggctagacaagg

SEQ ID NO: 698363 - DNA, 25 bp, Homo sapien
tctacagcgtccacagcgaacacag

SEQ ID NO: 698364 - DNA, 25 bp, Homo sapien
agcgtccacagcgaacacagggcta

SEQ ID NO: 698365 - DNA, 25 bp, Homo sapien
aagatttattcgaagtccaggtaca

SEQ ID NO: 698366 - DNA, 25 bp, Homo sapien
gaagatttattcgaagtccaggtac

SEQ ID NO: 698367 - DNA, 25 bp, Homo sapien
aagcggcagaaaccgaggtccggct

SEQ ID NO: 698368 - DNA, 25 bp, Homo sapien
ggtccggctcttggtcattcgctct

SEQ ID NO: 698369 - DNA, 25 bp, Homo sapien
cgtggccccacctggcgcttcggcg

SEQ ID NO: 698370 - DNA, 25 bp, Homo sapien
ttggtcattcgctctggcccgcacg

SEQ ID NO: 698371 - DNA, 25 bp, Homo sapien
tgtcctggccaaacgtgggcctcag

SEQ ID NO: 698372 - DNA, 25 bp, Homo sapien
ccctgtcctggccaaacgtgggcct

SEQ ID NO: 698373 - DNA, 25 bp, Homo sapien
ctgtcctggccaaacgtgggcctca

SEQ ID NO: 698374 - DNA, 25 bp, Homo sapien
tcctggccaaacgtgggcctcagct

SEQ ID NO: 698375 - DNA, 25 bp, Homo sapien
ccctcgaggacgccagcagaccagc

SEQ ID NO: 698376 - DNA, 25 bp, Homo sapien
tcgaggacgccagcagaccagccag

SEQ ID NO: 698377 - DNA, 25 bp, Homo sapien
ggccctcgaggacgccagcagacca

SEQ ID NO: 698378 - DNA, 25 bp, Homo sapien
cggccctcgaggacgccagcagacc

SEQ ID NO: 698379 - DNA, 25 bp, Homo sapien
ccttccggccgccaacgatgtccaa

SEQ ID NO: 698380 - DNA, 25 bp, Homo sapien
caacgatgtccaaaagggggctgga

SEQ ID NO: 698381 - DNA, 25 bp, Homo sapien
ttccggccgccaacgatgtccaaaa

SEQ ID NO: 698382 - DNA, 25 bp, Homo sapien
cggccgccaacgatgtccaaaaggg

SEQ ID NO: 698383 - DNA, 25 bp, Homo sapien
ctggccgcggtcatcacgaagcggg

SEQ ID NO: 698384 - DNA, 25 bp, Homo sapien
ccgcggtcatcacgaagcgggcatg

SEQ ID NO: 698385 - DNA, 25 bp, Homo sapien
ggtcatcacgaagcgggcatggatc

SEQ ID NO: 698386 - DNA, 25 bp, Homo sapien
tggatcagggcacccccgcagaagt

SEQ ID NO: 698387 - DNA, 25 bp, Homo sapien
tggaaaacgtctggcgggactgcct

SEQ ID NO: 698388 - DNA, 25 bp, Homo sapien
gggtcgtagccattctcgctcatgc

SEQ ID NO: 698389 - DNA, 25 bp, Homo sapien
tgaagcagcatcaggtcgttcaggt

SEQ ID NO: 698390 - DNA, 25 bp, Homo sapien
gcatcaggtcgttcaggttctgctg

SEQ ID NO: 698391 - DNA, 25 bp, Homo sapien
cgttgttggggcgacactggtcctc

SEQ ID NO: 698392 - DNA, 25 bp, Homo sapien
cagtggcagtatcgtcacgctgctg

SEQ ID NO: 698393 - DNA, 25 bp, Homo sapien
cagtcacgttgacaaacctgggaaa

SEQ ID NO: 698394 - DNA, 25 bp, Homo sapien
cttccaccgtggcgttctgcagagg

SEQ ID NO: 698395 - DNA, 25 bp, Homo sapien
attgcagatgccaccgcggcgggtg

SEQ ID NO: 698396 - DNA, 25 bp, Homo sapien
ttgcagatgccaccgcggcgggtga

SEQ ID NO: 698397 - DNA, 25 bp, Homo sapien
atgccaccgcggcgggtgagcacac

SEQ ID NO: 698398 - DNA, 25 bp, Homo sapien
cagatgccaccgcggcgggtgagca

SEQ ID NO: 698399 - DNA, 25 bp, Homo sapien
cacggagagctcagtacctctcagg

SEQ ID NO: 698400 - DNA, 25 bp, Homo sapien
gagagctcagtacctctcaggaccc

SEQ ID NO: 698401 - DNA, 25 bp, Homo sapien
ctgccacggagagctcagtacctct

SEQ ID NO: 698402 - DNA, 25 bp, Homo sapien
cggagagctcagtacctctcaggac

SEQ ID NO: 698403 - DNA, 25 bp, Homo sapien
aagatactgtttctcctaccgtgaa

SEQ ID NO: 698404 - DNA, 25 bp, Homo sapien
taccgtgaaaatgctcaatcctggg

SEQ ID NO: 698405 - DNA, 25 bp, Homo sapien
tgagtccctcagtgaccggctctac

SEQ ID NO: 698406 - DNA, 25 bp, Homo sapien
cacagccggcgtttgatagctactg

SEQ ID NO: 698407 - DNA, 25 bp, Homo sapien
tctctgccctggttaactgctagtg

SEQ ID NO: 698408 - DNA, 25 bp, Homo sapien
gtggactttgggatcagttgctttc

SEQ ID NO: 698409 - DNA, 25 bp, Homo sapien
ggaacctacaagtcctgatccagcc

SEQ ID NO: 698410 - DNA, 25 bp, Homo sapien
ttgctgcccctggaacctacaagtc

SEQ ID NO: 698411 - DNA, 25 bp, Homo sapien
agcgccactcgggtgaagaagtcag

SEQ ID NO: 698412 - DNA, 25 bp, Homo sapien
tcccgggttgttgagaacaccatcg

SEQ ID NO: 698413 - DNA, 25 bp, Homo sapien
tgggccaggccctcgcagacgaggg

SEQ ID NO: 698414 - DNA, 25 bp, Homo sapien
gaaaaggaggccacgccgtgggcca

SEQ ID NO: 698415 - DNA, 25 bp, Homo sapien
gggtgcggagcgccggaggtgtgga

SEQ ID NO: 698416 - DNA, 25 bp, Homo sapien
cccctctggccggagcgggggcagg

SEQ ID NO: 698417 - DNA, 25 bp, Homo sapien
ggtgggtgcggagcgccggaggtgt

SEQ ID NO: 698418 - DNA, 25 bp, Homo sapien
tgcggagcgccggaggtgtggaggg

SEQ ID NO: 698419 - DNA, 25 bp, Homo sapien
acccacggtcaagctcctcttatag

SEQ ID NO: 698420 - DNA, 25 bp, Homo sapien
ggtccagggtgcacccacggtcaag

SEQ ID NO: 698421 - DNA, 25 bp, Homo sapien
agggtgcacccacggtcaagctcct

SEQ ID NO: 698422 - DNA, 25 bp, Homo sapien
gcacccacggtcaagctcctcttat

SEQ ID NO: 698423 - DNA, 25 bp, Homo sapien
cagcacggacgccagggcagggctg

SEQ ID NO: 698424 - DNA, 25 bp, Homo sapien
gccagcagcacggacgccagggcag

SEQ ID NO: 698425 - DNA, 25 bp, Homo sapien
cagggctggggggccggtgagccat

SEQ ID NO: 698426 - DNA, 25 bp, Homo sapien
agcaaggccagcagcacggacgcca

SEQ ID NO: 698427 - DNA, 25 bp, Homo sapien
gctgcgcctcgtgcccgcccacgat

SEQ ID NO: 698428 - DNA, 25 bp, Homo sapien
gtgcccgcccacgatctccgcagct

SEQ ID NO: 698429 - DNA, 25 bp, Homo sapien
ctcgtgcccgcccacgatctccgca

SEQ ID NO: 698430 - DNA, 25 bp, Homo sapien
gtgtggctgcgcctcgtgcccgccc

SEQ ID NO: 698431 - DNA, 25 bp, Homo sapien
ggttcccccgcatctgcagggaggc

SEQ ID NO: 698432 - DNA, 25 bp, Homo sapien
tgcccgggttcccccgcatctgcag

SEQ ID NO: 698433 - DNA, 25 bp, Homo sapien
agctggggtggatcaaggtgcctcc

SEQ ID NO: 698434 - DNA, 25 bp, Homo sapien
gggtggatcaaggtgcctccgcaga

SEQ ID NO: 698435 - DNA, 25 bp, Homo sapien
gttcagtttgttctccgcgtcgtag

SEQ ID NO: 698436 - DNA, 25 bp, Homo sapien
ctggatgaggagaacgtcgttcagt

SEQ ID NO: 698437 - DNA, 25 bp, Homo sapien
gtccgcacgttgtgggctccgagca

SEQ ID NO: 698438 - DNA, 25 bp, Homo sapien
ctgagccaccgagaagtgctgctgg

SEQ ID NO: 698439 - DNA, 25 bp, Homo sapien
caaatgttatgtggccggcagaaga

SEQ ID NO: 698440 - DNA, 25 bp, Homo sapien
accacggtgacattgagctcctgca

SEQ ID NO: 698441 - DNA, 25 bp, Homo sapien
tgtggcagctggactgtggcgacgg

SEQ ID NO: 698442 - DNA, 25 bp, Homo sapien
cttgcggcgagggacgaaagtgcaa

SEQ ID NO: 698443 - DNA, 25 bp, Homo sapien
agggctacccgcgtgaagaagtcag

SEQ ID NO: 698444 - DNA, 25 bp, Homo sapien
ggaaaaggcgggtggcacatcccca

SEQ ID NO: 698445 - DNA, 25 bp, Homo sapien
cgcagcgtggaacggatccagtcca

SEQ ID NO: 698446 - DNA, 25 bp, Homo sapien
cccagatcacgaaggagtctattcc

SEQ ID NO: 698447 - DNA, 25 bp, Homo sapien
tcaggggcggcccttggcctccaca

SEQ ID NO: 698448 - DNA, 25 bp, Homo sapien
caggggcggcccttggcctccacac

SEQ ID NO: 698449 - DNA, 25 bp, Homo sapien
tgcttctgtccaaagatccgcctcg

SEQ ID NO: 698450 - DNA, 25 bp, Homo sapien
gagtttcaacgtttattgaggtcac

SEQ ID NO: 698451 - DNA, 25 bp, Homo sapien
caacgtttattgaggtcacggtggg

SEQ ID NO: 698452 - DNA, 25 bp, Homo sapien
gatccgcctcgagggtttggagcca

SEQ ID NO: 698453 - DNA, 25 bp, Homo sapien
ggaggccgttgcattgccccacggc

SEQ ID NO: 698454 - DNA, 25 bp, Homo sapien
tgggaggccgttgcattgccccacg

SEQ ID NO: 698455 - DNA, 25 bp, Homo sapien
tgtgctgggaggccgttgcattgcc

SEQ ID NO: 698456 - DNA, 25 bp, Homo sapien
tgctgggaggccgttgcattgcccc

SEQ ID NO: 698457 - DNA, 25 bp, Homo sapien
cacaggcgaggaaaagacacgcgag

SEQ ID NO: 698458 - DNA, 25 bp, Homo sapien
gccggcaggacacaggcgaggaaaa

SEQ ID NO: 698459 - DNA, 25 bp, Homo sapien
caggacacaggcgaggaaaagacac

SEQ ID NO: 698460 - DNA, 25 bp, Homo sapien
agcaaggccggcaggacacaggcga

SEQ ID NO: 698461 - DNA, 25 bp, Homo sapien
cgcaatcagggtggcgccgcagaag

SEQ ID NO: 698462 - DNA, 25 bp, Homo sapien
gcagaagtggcctccgcgcagctgc

SEQ ID NO: 698463 - DNA, 25 bp, Homo sapien
agtgcgcggccgacatgacgaagtt

SEQ ID NO: 698464 - DNA, 25 bp, Homo sapien
agggacaccatgaagggccacgcgt

SEQ ID NO: 698465 - DNA, 25 bp, Homo sapien
agatgcgctgcacggcgaacacctg

SEQ ID NO: 698466 - DNA, 25 bp, Homo sapien
cgccgcgagaggttatgggctccca

SEQ ID NO: 698467 - DNA, 25 bp, Homo sapien
gggtcgtagccgttttcgaagatgc

SEQ ID NO: 698468 - DNA, 25 bp, Homo sapien
gagaatcacgatgtcgttgagcaag

SEQ ID NO: 698469 - DNA, 25 bp, Homo sapien
tgggccacctgcacgttggcgttga

SEQ ID NO: 698470 - DNA, 25 bp, Homo sapien
gacgctggcgatcccacggttcctg

SEQ ID NO: 698471 - DNA, 25 bp, Homo sapien
gggacgtcaccaccgtcacgttgag

SEQ ID NO: 698472 - DNA, 25 bp, Homo sapien
gagtgcagacgttgctgcgacggca

SEQ ID NO: 698473 - DNA, 25 bp, Homo sapien
agacgccggcctgccggcccctcac

SEQ ID NO: 698474 - DNA, 25 bp, Homo sapien
gaaacagacgccggcctgccggccc

SEQ ID NO: 698475 - DNA, 25 bp, Homo sapien
aacagacgccggcctgccggcccct

SEQ ID NO: 698476 - DNA, 25 bp, Homo sapien
acagacgccggcctgccggcccctc

SEQ ID NO: 698477 - DNA, 25 bp, Homo sapien
ccagtttacaaactgtgccaccggg

SEQ ID NO: 698478 - DNA, 25 bp, Homo sapien
tggattagcccgttgcagaccaagg

SEQ ID NO: 698479 - DNA, 25 bp, Homo sapien
ggtagagccctgaggcgcagcctcc

SEQ ID NO: 698480 - DNA, 25 bp, Homo sapien
gacgaaggaggcaattccgtggatt

SEQ ID NO: 698481 - DNA, 25 bp, Homo sapien
cctcggagcgttggatgatagagtc

SEQ ID NO: 698482 - DNA, 25 bp, Homo sapien
gggttgtcctcggagcgttggatga

SEQ ID NO: 698483 - DNA, 25 bp, Homo sapien
gacaggggttgtcctcggagcgttg

SEQ ID NO: 698484 - DNA, 25 bp, Homo sapien
tgtcctcggagcgttggatgataga

SEQ ID NO: 698485 - DNA, 25 bp, Homo sapien
gggcagctgaggtgacccgggcagc

SEQ ID NO: 698486 - DNA, 25 bp, Homo sapien
gcagctgaggtgacccgggcagccc

SEQ ID NO: 698487 - DNA, 25 bp, Homo sapien
ggcagctgaggtgacccgggcagcc

SEQ ID NO: 698488 - DNA, 25 bp, Homo sapien
cagctgaggtgacccgggcagccct

SEQ ID NO: 698489 - DNA, 25 bp, Homo sapien
tgccagactcacaccagagtcgaca

SEQ ID NO: 698490 - DNA, 25 bp, Homo sapien
ccgctgtggctgagacactgaccca

SEQ ID NO: 698491 - DNA, 25 bp, Homo sapien
acaagtcgctgggagaccctcgggc

SEQ ID NO: 698492 - DNA, 25 bp, Homo sapien
tggctgagacactgacccaggcagg

SEQ ID NO: 698493 - DNA, 25 bp, Homo sapien
cggccgctcctaggaggaccagaac

SEQ ID NO: 698494 - DNA, 25 bp, Homo sapien
ggtgcgcgccgttcagctgcaccga

SEQ ID NO: 698495 - DNA, 25 bp, Homo sapien
cgccgcacaggtgcgcgccgttcag

SEQ ID NO: 698496 - DNA, 25 bp, Homo sapien
cgttcagctgcaccgacgccatgta

SEQ ID NO: 698497 - DNA, 25 bp, Homo sapien
accgacgccatgtagggccgcgcgt

SEQ ID NO: 698498 - DNA, 25 bp, Homo sapien
ggcactgcgcggagcacgtcgtaca

SEQ ID NO: 698499 - DNA, 25 bp, Homo sapien
caggaggtcgtggtcgatggtgtcg

SEQ ID NO: 698500 - DNA, 25 bp, Homo sapien
tacaggcgcttggagggctccggct

SEQ ID NO: 698501 - DNA, 25 bp, Homo sapien
tgcgacagggagtgcgcgcccagga

SEQ ID NO: 698502 - DNA, 25 bp, Homo sapien
agggtggaggcggacgtcagggttg

SEQ ID NO: 698503 - DNA, 25 bp, Homo sapien
tgagggtggaggcggacgtcagggt

SEQ ID NO: 698504 - DNA, 25 bp, Homo sapien
ctgagggtggaggcggacgtcaggg

SEQ ID NO: 698505 - DNA, 25 bp, Homo sapien
tcaagcgctcggtgatggcgccgtc

SEQ ID NO: 698506 - DNA, 25 bp, Homo sapien
gcactggcaagagcacgtgctgcag

SEQ ID NO: 698507 - DNA, 25 bp, Homo sapien
gcggcccgcgtggttgactatgccc

SEQ ID NO: 698508 - DNA, 25 bp, Homo sapien
acgtcgcagagagttcccggtgcca

SEQ ID NO: 698509 - DNA, 25 bp, Homo sapien
tcaatagccccgcgccacgcctatc

SEQ ID NO: 698510 - DNA, 25 bp, Homo sapien
aatagccccgcgccacgcctatcgc

SEQ ID NO: 698511 - DNA, 25 bp, Homo sapien
caatagccccgcgccacgcctatcg

SEQ ID NO: 698512 - DNA, 25 bp, Homo sapien
gcgggtgtagatcccgggcttcttg

SEQ ID NO: 698513 - DNA, 25 bp, Homo sapien
cgcatagctcgccacgcgggtgtag

SEQ ID NO: 698514 - DNA, 25 bp, Homo sapien
ttgcggttgccgcaaacgcgcgagc

SEQ ID NO: 698515 - DNA, 25 bp, Homo sapien
acgcgcgagcccgaggtgaccacgc

SEQ ID NO: 698516 - DNA, 25 bp, Homo sapien
gatgacttcattgctcgggactttg

SEQ ID NO: 698517 - DNA, 25 bp, Homo sapien
cattgctcgggactttgttgcttgg

SEQ ID NO: 698518 - DNA, 25 bp, Homo sapien
aggagtggatgacttcattgctcgg

SEQ ID NO: 698519 - DNA, 25 bp, Homo sapien
actttgttgcttgggtgaccctgac

SEQ ID NO: 698520 - DNA, 25 bp, Homo sapien
gatggagtcgcgctacgtggcccat

SEQ ID NO: 698521 - DNA, 25 bp, Homo sapien
agatggagtcgcgctacgtggccca

SEQ ID NO: 698522 - DNA, 25 bp, Homo sapien
tggagtcgcgctacgtggcccatgc

SEQ ID NO: 698523 - DNA, 25 bp, Homo sapien
atggagtcgcgctacgtggcccatg

SEQ ID NO: 698524 - DNA, 25 bp, Homo sapien
tacaagcacccacctccatgcccgc

SEQ ID NO: 698525 - DNA, 25 bp, Homo sapien
ggaactacaagcacccacctccatg

SEQ ID NO: 698526 - DNA, 25 bp, Homo sapien
tggaactacaagcacccacctccat

SEQ ID NO: 698527 - DNA, 25 bp, Homo sapien
aagcacccacctccatgcccgccaa

SEQ ID NO: 698528 - DNA, 25 bp, Homo sapien
gcgtgagccaccacgcagaattttt

SEQ ID NO: 698529 - DNA, 25 bp, Homo sapien
cgtgagccaccacgcagaatttttt

SEQ ID NO: 698530 - DNA, 25 bp, Homo sapien
gccttgccaagaagggtgacctgag

SEQ ID NO: 698531 - DNA, 25 bp, Homo sapien
ttttctacgatagcgcctggctgcc

SEQ ID NO: 698532 - DNA, 25 bp, Homo sapien
cccagggtggtttgtgaaggcaggc

SEQ ID NO: 698533 - DNA, 25 bp, Homo sapien
gtgccgctgctcgtcgtcctggtgt

SEQ ID NO: 698534 - DNA, 25 bp, Homo sapien
gagaggagatgggagcgctggcgag

SEQ ID NO: 698535 - DNA, 25 bp, Homo sapien
acggggaggacatgggagcgctggc

SEQ ID NO: 698536 - DNA, 25 bp, Homo sapien
gggaggagatgggagcgctggcgag

SEQ ID NO: 698537 - DNA, 25 bp, Homo sapien
gggaggacatgggagcgctggcgag

SEQ ID NO: 698538 - DNA, 25 bp, Homo sapien
ggatggggcggccatcgtcagggtg

SEQ ID NO: 698539 - DNA, 25 bp, Homo sapien
atggggcggccatcgtcagggtggc

SEQ ID NO: 698540 - DNA, 25 bp, Homo sapien
ggggcggccatcgtcagggtggctt

SEQ ID NO: 698541 - DNA, 25 bp, Homo sapien
tggggcggccatcgtcagggtggct

SEQ ID NO: 698542 - DNA, 25 bp, Homo sapien
aatcttgtcgttcagaggtcccggc

SEQ ID NO: 698543 - DNA, 25 bp, Homo sapien
taatgagagcagaataagccggccc

SEQ ID NO: 698544 - DNA, 25 bp, Homo sapien
cgagggcagcttttgccaccagaat

SEQ ID NO: 698545 - DNA, 25 bp, Homo sapien
tccagcctcaaatgggagcgtcaca

SEQ ID NO: 698546 - DNA, 25 bp, Homo sapien
gccagctgcttatccccagcctgga

SEQ ID NO: 698547 - DNA, 25 bp, Homo sapien
ctgccagccagcgacggcctggtta

SEQ ID NO: 698548 - DNA, 25 bp, Homo sapien
gacggcctggttagccgcctgcagc

SEQ ID NO: 698549 - DNA, 25 bp, Homo sapien
cagcgacggcctggttagccgcctg

SEQ ID NO: 698550 - DNA, 25 bp, Homo sapien
ccacctcggatacccaggacagcat

SEQ ID NO: 698551 - DNA, 25 bp, Homo sapien
ccagctgcctgcccgtgtatacggc

SEQ ID NO: 698552 - DNA, 25 bp, Homo sapien
cgtgtatacggccacctcggatacc

SEQ ID NO: 698553 - DNA, 25 bp, Homo sapien
ggacagcatgtccctgctcttccgc

SEQ ID NO: 698554 - DNA, 25 bp, Homo sapien
ctcctcagctggagccttggcgggc

SEQ ID NO: 698555 - DNA, 25 bp, Homo sapien
ttgcccagctgaccgagcgcctggt

SEQ ID NO: 698556 - DNA, 25 bp, Homo sapien
tgtcagagtcgaactgctcttctcc

SEQ ID NO: 698557 - DNA, 25 bp, Homo sapien
gtgcagaggcgaagcagcttgccca

SEQ ID NO: 698558 - DNA, 25 bp, Homo sapien
acaaacagcccacaattctcaaatg

SEQ ID NO: 698559 - DNA, 25 bp, Homo sapien
ggcgacaaacagcccacaattctca

SEQ ID NO: 698560 - DNA, 25 bp, Homo sapien
tggcgacaaacagcccacaattctc

SEQ ID NO: 698561 - DNA, 25 bp, Homo sapien
cgacaaacagcccacaattctcaaa

SEQ ID NO: 698562 - DNA, 25 bp, Homo sapien
gcttttgtgcgcgtccagccagacc

SEQ ID NO: 698563 - DNA, 25 bp, Homo sapien
cctgcgcaaggagggactccccgtg

SEQ ID NO: 698564 - DNA, 25 bp, Homo sapien
ttttgtgcgcgtccagccagaccag

SEQ ID NO: 698565 - DNA, 25 bp, Homo sapien
cccgtgaacaacatcttccagcaga

SEQ ID NO: 698566 - DNA, 25 bp, Homo sapien
tgagcgagaagtgccgtatcgacac

SEQ ID NO: 698567 - DNA, 25 bp, Homo sapien
caacatcgtggtggccacggcggac

SEQ ID NO: 698568 - DNA, 25 bp, Homo sapien
tcaaccgcaaggacaagtttcccgc

SEQ ID NO: 698569 - DNA, 25 bp, Homo sapien
cgtcgcccgtgcagttctacaaggt

SEQ ID NO: 698570 - DNA, 25 bp, Homo sapien
tagaaacggagtttctccatattgg

SEQ ID NO: 698571 - DNA, 25 bp, Homo sapien
agaaacggagtttctccatattggt

SEQ ID NO: 698572 - DNA, 25 bp, Homo sapien
gtagaaacggagtttctccatattg

SEQ ID NO: 698573 - DNA, 25 bp, Homo sapien
tagtagaaacggagtttctccatat

SEQ ID NO: 698574 - DNA, 25 bp, Homo sapien
gctgcgcctgtggaactcaggaagg

SEQ ID NO: 698575 - DNA, 25 bp, Homo sapien
gggctgcgcctgtggaactcaggaa

SEQ ID NO: 698576 - DNA, 25 bp, Homo sapien
aggattgcgccctggcaccgccccg

SEQ ID NO: 698577 - DNA, 25 bp, Homo sapien
gccgccctccaggattgcgccctgg

SEQ ID NO: 698578 - DNA, 25 bp, Homo sapien
gcggcagatgacgtagatgaccagc

SEQ ID NO: 698579 - DNA, 25 bp, Homo sapien
gatgtagaagttggtcacggtccgc

SEQ ID NO: 698580 - DNA, 25 bp, Homo sapien
gtccggacgtagccacggtgtgcat

SEQ ID NO: 698581 - DNA, 25 bp, Homo sapien
tccgcatcggcttgtggcggcagat

SEQ ID NO: 698582 - DNA, 25 bp, Homo sapien
aggtcacgtccgtggccgccaggtt

SEQ ID NO: 698583 - DNA, 25 bp, Homo sapien
ctgctggatgtagttgacgaacttg

SEQ ID NO: 698584 - DNA, 25 bp, Homo sapien
tgtagttgacgaacttgcacatgaa

SEQ ID NO: 698585 - DNA, 25 bp, Homo sapien
acccagccgggcagcgggtacagca

SEQ ID NO: 698586 - DNA, 25 bp, Homo sapien
ggaacaccgtcacgtaccagcggtc

SEQ ID NO: 698587 - DNA, 25 bp, Homo sapien
cagggcgcgcaacgggaacaccgtc

SEQ ID NO: 698588 - DNA, 25 bp, Homo sapien
ctcatggcggtcagagtggcacacg

SEQ ID NO: 698589 - DNA, 25 bp, Homo sapien
acgtaccagcggtccacactcatgg

SEQ ID NO: 698590 - DNA, 25 bp, Homo sapien
tccccgggaggcgttcacccagcca

SEQ ID NO: 698591 - DNA, 25 bp, Homo sapien
aaggcctcactgcagtaggcgcgcg

SEQ ID NO: 698592 - DNA, 25 bp, Homo sapien
aggcgcaggtggcgagcagcggcag

SEQ ID NO: 698593 - DNA, 25 bp, Homo sapien
tgcagggcgagcaccggcgcagaca

SEQ ID NO: 698594 - DNA, 25 bp, Homo sapien
gtggcgcagcatggccgcatagcag

SEQ ID NO: 698595 - DNA, 25 bp, Homo sapien
cggccgccaccagccgcgagacctt

SEQ ID NO: 698596 - DNA, 25 bp, Homo sapien
gcggcgaagagcaggaccacggccg

SEQ ID NO: 698597 - DNA, 25 bp, Homo sapien
gcgaagagcaggaccacggccgcca

SEQ ID NO: 698598 - DNA, 25 bp, Homo sapien
gagaccttggcccgcacggcgcctg

SEQ ID NO: 698599 - DNA, 25 bp, Homo sapien
aaggcctgtcggaagtgcgagccca

SEQ ID NO: 698600 - DNA, 25 bp, Homo sapien
tcttaagcgcgtaggcggcgtagct

SEQ ID NO: 698601 - DNA, 25 bp, Homo sapien
agtgagcccaggtcttaagcgcgta

SEQ ID NO: 698602 - DNA, 25 bp, Homo sapien
tcagcgcggagttgctgtaggacat

SEQ ID NO: 698603 - DNA, 25 bp, Homo sapien
gcaccgaacgtcacaagagaccaaa

SEQ ID NO: 698604 - DNA, 25 bp, Homo sapien
ccacagttgatcttggacagtaaga

SEQ ID NO: 698605 - DNA, 25 bp, Homo sapien
gaatagccgctgttccagcagtccc

SEQ ID NO: 698606 - DNA, 25 bp, Homo sapien
tatcaatagcaaacttcacaacgaa

SEQ ID NO: 698607 - DNA, 25 bp, Homo sapien
ctcaaaagtaaagtgcctaagaccg

SEQ ID NO: 698608 - DNA, 25 bp, Homo sapien
ttcacagcggggatacctccaaccg

SEQ ID NO: 698609 - DNA, 25 bp, Homo sapien
agaccgggataattcacaatgtgcc

SEQ ID NO: 698610 - DNA, 25 bp, Homo sapien
ttgggatccgaaggagcgacaccgc

SEQ ID NO: 698611 - DNA, 25 bp, Homo sapien
tcaccaggggacgagtcgctctcgg

SEQ ID NO: 698612 - DNA, 25 bp, Homo sapien
gggacgagtcgctctcggatgcaaa

SEQ ID NO: 698613 - DNA, 25 bp, Homo sapien
ccagacaaatcaccaggggacgagt

SEQ ID NO: 698614 - DNA, 25 bp, Homo sapien
gacgagtcgctctcggatgcaaata

SEQ ID NO: 698615 - DNA, 25 bp, Homo sapien
ctggcatccggctcattcacgcatt

SEQ ID NO: 698616 - DNA, 25 bp, Homo sapien
tccggctcattcacgcatttgcaga

SEQ ID NO: 698617 - DNA, 25 bp, Homo sapien
ggctcattcacgcatttgcagaaac

SEQ ID NO: 698618 - DNA, 25 bp, Homo sapien
gacagaggctggcatccggctcatt

SEQ ID NO: 698619 - DNA, 25 bp, Homo sapien
ggccgccgggctcaagctgaaggct

SEQ ID NO: 698620 - DNA, 25 bp, Homo sapien
gggccgccgggctcaagctgaaggc

SEQ ID NO: 698621 - DNA, 25 bp, Homo sapien
cacgggcgctaggggtgggcggcgg

SEQ ID NO: 698622 - DNA, 25 bp, Homo sapien
caccacgggcgctaggggtgggcgg

SEQ ID NO: 698623 - DNA, 25 bp, Homo sapien
ccaccacgggcgctaggggtgggcg

SEQ ID NO: 698624 - DNA, 25 bp, Homo sapien
ccaccaccacgggcgctaggggtgg

SEQ ID NO: 698625 - DNA, 25 bp, Homo sapien
agcgtctccatcacggcctgtagtt

SEQ ID NO: 698626 - DNA, 25 bp, Homo sapien
cagcgtctccatcacggcctgtagt

SEQ ID NO: 698627 - DNA, 25 bp, Homo sapien
gcgtctccatcacggcctgtagttt

SEQ ID NO: 698628 - DNA, 25 bp, Homo sapien
cgtctccatcacggcctgtagtttc

SEQ ID NO: 698629 - DNA, 25 bp, Homo sapien
tgccagtgcggccatctgagcccgc

SEQ ID NO: 698630 - DNA, 25 bp, Homo sapien
atccgggcactctcgggctctctgt

SEQ ID NO: 698631 - DNA, 25 bp, Homo sapien
tgagcccgctgcatccgggcactct

SEQ ID NO: 698632 - DNA, 25 bp, Homo sapien
tgtcctcgtcggaggccatgtcctc

SEQ ID NO: 698633 - DNA, 25 bp, Homo sapien
tcctcatcctcgtaatcctcctcct

SEQ ID NO: 698634 - DNA, 25 bp, Homo sapien
ctcctcatcctccccgaggtcttcc

SEQ ID NO: 698635 - DNA, 25 bp, Homo sapien
ctcatcctccccgaggtcttcctcc

SEQ ID NO: 698636 - DNA, 25 bp, Homo sapien
ctcctcctcatcctcgtaatcctcc

SEQ ID NO: 698637 - DNA, 25 bp, Homo sapien
ctttcgggggaacagtgccgtggtg

SEQ ID NO: 698638 - DNA, 25 bp, Homo sapien
ggggaacagtgccgtggtgcccaag

SEQ ID NO: 698639 - DNA, 25 bp, Homo sapien
tttcgggggaacagtgccgtggtgc

SEQ ID NO: 698640 - DNA, 25 bp, Homo sapien
tcgggggaacagtgccgtggtgccc

SEQ ID NO: 698641 - DNA, 25 bp, Homo sapien
aacgccatcgccgcggaaggcctgg

SEQ ID NO: 698642 - DNA, 25 bp, Homo sapien
ggaacgccatcgccgcggaaggcct

SEQ ID NO: 698643 - DNA, 25 bp, Homo sapien
ctgggaacgccatcgccgcggaagg

SEQ ID NO: 698644 - DNA, 25 bp, Homo sapien
catcgccgcggaaggcctggggtgg

SEQ ID NO: 698645 - DNA, 25 bp, Homo sapien
ctgcttaaactgctcctcgtaagtc

SEQ ID NO: 698646 - DNA, 25 bp, Homo sapien
cgtaagtccagtcgccgtggtcagg

SEQ ID NO: 698647 - DNA, 25 bp, Homo sapien
gtcgccgtggtcaggcggctgcagc

SEQ ID NO: 698648 - DNA, 25 bp, Homo sapien
tcctcgtaagtccagtcgccgtggt

SEQ ID NO: 698649 - DNA, 25 bp, Homo sapien
aggcggaagttagccccgagccctg

SEQ ID NO: 698650 - DNA, 25 bp, Homo sapien
agctgtcgaggatttgcaggcggaa

SEQ ID NO: 698651 - DNA, 25 bp, Homo sapien
agccgacagcagaatttcacagctg

SEQ ID NO: 698652 - DNA, 25 bp, Homo sapien
gcagccgacagcagaatttcacagc

SEQ ID NO: 698653 - DNA, 25 bp, Homo sapien
gaaagggtcgggctcagacacatgt

SEQ ID NO: 698654 - DNA, 25 bp, Homo sapien
ggtcgggctggcatacagatgcccc

SEQ ID NO: 698655 - DNA, 25 bp, Homo sapien
gcccatgaaagggtcgggctcagac

SEQ ID NO: 698656 - DNA, 25 bp, Homo sapien
tcgggctcagacacatgtgtgccca

SEQ ID NO: 698657 - DNA, 25 bp, Homo sapien
gggcccctgcctccgcgagcctcat

SEQ ID NO: 698658 - DNA, 25 bp, Homo sapien
tcagcaattaactccgtcctggggt

SEQ ID NO: 698659 - DNA, 25 bp, Homo sapien
ctgagaaatgggctcggagtaaccg

SEQ ID NO: 698660 - DNA, 25 bp, Homo sapien
tcggagtaaccgcagggtccaagca

SEQ ID NO: 698661 - DNA, 25 bp, Homo sapien
tgaatctcgctgtttttcccgtccc

SEQ ID NO: 698662 - DNA, 25 bp, Homo sapien
catcaagaagcggaagctggcgctg

SEQ ID NO: 698663 - DNA, 25 bp, Homo sapien
agagctgagcgtggaccacagggcc

SEQ ID NO: 698664 - DNA, 25 bp, Homo sapien
aggccgggggattttgaatctcgct

SEQ ID NO: 698665 - DNA, 25 bp, Homo sapien
cagcagcaatagatctgagtcagca

SEQ ID NO: 698666 - DNA, 25 bp, Homo sapien
ccagatataggtctgcggatgctca

SEQ ID NO: 698667 - DNA, 25 bp, Homo sapien
tgttctaaaaggcacgtttttgcac

SEQ ID NO: 698668 - DNA, 25 bp, Homo sapien
tgttttcctctaaggccagatatag

SEQ ID NO: 698669 - DNA, 25 bp, Homo sapien
ctgtaaagaaaccgcctgtctgcag

SEQ ID NO: 698670 - DNA, 25 bp, Homo sapien
aaagaaaccgcctgtctgcagggcc

SEQ ID NO: 698671 - DNA, 25 bp, Homo sapien
aggctccaaagtccatgaggcccca

SEQ ID NO: 698672 - DNA, 25 bp, Homo sapien
agtctcccaggaggctccaaagtcc

SEQ ID NO: 698673 - DNA, 25 bp, Homo sapien
cccagggcggtgtccttgggcccag

SEQ ID NO: 698674 - DNA, 25 bp, Homo sapien
gcccagggcggtgtccttgggccca

SEQ ID NO: 698675 - DNA, 25 bp, Homo sapien
ggtcccagcagctgcggggggccca

SEQ ID NO: 698676 - DNA, 25 bp, Homo sapien
ccaccaggtcccagcagctgcgggg

SEQ ID NO: 698677 - DNA, 25 bp, Homo sapien
ggtgcaagataagtcccagggccac

SEQ ID NO: 698678 - DNA, 25 bp, Homo sapien
tgctggcggacagggtgcaagataa

SEQ ID NO: 698679 - DNA, 25 bp, Homo sapien
agaaacgacagctccgagggggtca

SEQ ID NO: 698680 - DNA, 25 bp, Homo sapien
gacagggtgcaagataagtcccagg

SEQ ID NO: 698681 - DNA, 25 bp, Homo sapien
gatgaggaccgggcccctctggagg

SEQ ID NO: 698682 - DNA, 25 bp, Homo sapien
ctgatgaggaccgggcccctctgga

SEQ ID NO: 698683 - DNA, 25 bp, Homo sapien
atgaggaccgggcccctctggaggg

SEQ ID NO: 698684 - DNA, 25 bp, Homo sapien
tgatgaggaccgggcccctctggag

SEQ ID NO: 698685 - DNA, 25 bp, Homo sapien
gggagccattaactcccaggccaaa

SEQ ID NO: 698686 - DNA, 25 bp, Homo sapien
atggtgggcgaactgggccggtggc

SEQ ID NO: 698687 - DNA, 25 bp, Homo sapien
ggccggtggcgaggcacggtcagac

SEQ ID NO: 698688 - DNA, 25 bp, Homo sapien
aaaccgaggcgccaggcagcaatca

SEQ ID NO: 698689 - DNA, 25 bp, Homo sapien
tcctgcgctgatttatggtggccgg

SEQ ID NO: 698690 - DNA, 25 bp, Homo sapien
gggccctcaggtagacccggctggc

SEQ ID NO: 698691 - DNA, 25 bp, Homo sapien
catgagcacaggcacgcacacatgg

SEQ ID NO: 698692 - DNA, 25 bp, Homo sapien
tccagctgcctggtctttgtctccg

SEQ ID NO: 698693 - DNA, 25 bp, Homo sapien
catgaagctgaacaagtcatccagg

SEQ ID NO: 698694 - DNA, 25 bp, Homo sapien
cttctgcatgaagctgaacaagtca

SEQ ID NO: 698695 - DNA, 25 bp, Homo sapien
ctcgcttctgcatgaagctgaacaa

SEQ ID NO: 698696 - DNA, 25 bp, Homo sapien
aagtcatccaggaattccttcctct

SEQ ID NO: 698697 - DNA, 25 bp, Homo sapien
taaacctatcgttctgtccgtgaaa

SEQ ID NO: 698698 - DNA, 25 bp, Homo sapien
gtaggcgctcagtgaagaccagtga

SEQ ID NO: 698699 - DNA, 25 bp, Homo sapien
gcactcagtggcatacagtaggcgc

SEQ ID NO: 698700 - DNA, 25 bp, Homo sapien
tgacagtaggcaagacccacttaaa

SEQ ID NO: 698701 - DNA, 25 bp, Homo sapien
cgacatggggggttgggctagccca

SEQ ID NO: 698702 - DNA, 25 bp, Homo sapien
acatggggggttgggctagcccagg

SEQ ID NO: 698703 - DNA, 25 bp, Homo sapien
ggggatgggctagccccgacatggg

SEQ ID NO: 698704 - DNA, 25 bp, Homo sapien
ggaaggggatgggctagccccgaca

SEQ ID NO: 698705 - DNA, 25 bp, Homo sapien
aatttcaagtctggagaatggaggg

SEQ ID NO: 698706 - DNA, 25 bp, Homo sapien
ccaatttcaagtctggagaatggag

SEQ ID NO: 698707 - DNA, 25 bp, Homo sapien
caagtctggagaatggagggctgtg

SEQ ID NO: 698708 - DNA, 25 bp, Homo sapien
tcaagtctggagaatggagggctgt

SEQ ID NO: 698709 - DNA, 25 bp, Homo sapien
gagacgcccggatctttgttattcc

SEQ ID NO: 698710 - DNA, 25 bp, Homo sapien
tatccaccagtaacctgggcttagg

SEQ ID NO: 698711 - DNA, 25 bp, Homo sapien
gggcagctctgcctcggtttatcca

SEQ ID NO: 698712 - DNA, 25 bp, Homo sapien
ccctctgtgggtgcaggatcatcca

SEQ ID NO: 698713 - DNA, 25 bp, Homo sapien
ggcccttggtgatctcacgccacag

SEQ ID NO: 698714 - DNA, 25 bp, Homo sapien
ccagcacgtacagcatgaacaggtc

SEQ ID NO: 698715 - DNA, 25 bp, Homo sapien
gcttcttgttgatgacctccacgag

SEQ ID NO: 698716 - DNA, 25 bp, Homo sapien
aacaggtcaaggacctgtttggcca

SEQ ID NO: 698717 - DNA, 25 bp, Homo sapien
tgccattggtgcttgcggccaggcc

SEQ ID NO: 698718 - DNA, 25 bp, Homo sapien
cgtcggttgctgtctatggctgcct

SEQ ID NO: 698719 - DNA, 25 bp, Homo sapien
ccccgcctggcgagtaggcaaagag

SEQ ID NO: 698720 - DNA, 25 bp, Homo sapien
ggagccaccaaagctctggcgccgg

SEQ ID NO: 698721 - DNA, 25 bp, Homo sapien
cagaggactggtagattggaagccc

SEQ ID NO: 698722 - DNA, 25 bp, Homo sapien
tgatcaactgatgatgcctgcctca

SEQ ID NO: 698723 - DNA, 25 bp, Homo sapien
gaaatggtaactcagacaggcaaac

SEQ ID NO: 698724 - DNA, 25 bp, Homo sapien
gcctgcctcagtgtagactggaaaa

SEQ ID NO: 698725 - DNA, 25 bp, Homo sapien
tcttcttctccggaggctctgcaga

SEQ ID NO: 698726 - DNA, 25 bp, Homo sapien
tgttgatccgaatgctcatgggcag

SEQ ID NO: 698727 - DNA, 25 bp, Homo sapien
tgcatcagccgttgctgctcatcgg

SEQ ID NO: 698728 - DNA, 25 bp, Homo sapien
gaagttctgctggagtgcacgttgc

SEQ ID NO: 698729 - DNA, 25 bp, Homo sapien
tatttgtccatactccactttgttt

SEQ ID NO: 698730 - DNA, 25 bp, Homo sapien
tgttgaataagtgtatttgtccata

SEQ ID NO: 698731 - DNA, 25 bp, Homo sapien
tacatatgtaggctccaaggccctc

SEQ ID NO: 698732 - DNA, 25 bp, Homo sapien
ttgatttgttggcactctttacata

SEQ ID NO: 698733 - DNA, 25 bp, Homo sapien
aactgccatttctgatcataaagac

SEQ ID NO: 698734 - DNA, 25 bp, Homo sapien
cataaagacacctgtgacatgttct

SEQ ID NO: 698735 - DNA, 25 bp, Homo sapien
ttctgtctgtctcgccaactagatt

SEQ ID NO: 698736 - DNA, 25 bp, Homo sapien
cgccaactagattttagctttacaa

SEQ ID NO: 698737 - DNA, 25 bp, Homo sapien
tgtgtacatgatgccgttgatctcc

SEQ ID NO: 698738 - DNA, 25 bp, Homo sapien
gatctccaccgacatgctgatgctg

SEQ ID NO: 698739 - DNA, 25 bp, Homo sapien
ccgttggtgcccgtcaggttcacag

SEQ ID NO: 698740 - DNA, 25 bp, Homo sapien
gatgctgttgctgccgttggtgccc

SEQ ID NO: 698741 - DNA, 25 bp, Homo sapien
gaaccatccaacgtcacactgaata

SEQ ID NO: 698742 - DNA, 25 bp, Homo sapien
cacctaggttcaagcaggtgggacc

SEQ ID NO: 698743 - DNA, 25 bp, Homo sapien
tgactgtttgtcctgcaaagcccct

SEQ ID NO: 698744 - DNA, 25 bp, Homo sapien
cgggtgaacgatggtatcctctcca

SEQ ID NO: 698745 - DNA, 25 bp, Homo sapien
caagggagacccaatggggtgctcc

SEQ ID NO: 698746 - DNA, 25 bp, Homo sapien
gagtttaagaagatgcgaggcgggc

SEQ ID NO: 698747 - DNA, 25 bp, Homo sapien
atatgccatgcagagtttaagaaga

SEQ ID NO: 698748 - DNA, 25 bp, Homo sapien
taagaagatgcgaggcgggccacaa

SEQ ID NO: 698749 - DNA, 25 bp, Homo sapien
tggccgccgctggttccggtgtttc

SEQ ID NO: 698750 - DNA, 25 bp, Homo sapien
ggccggcggctgagcaaacagaact

SEQ ID NO: 698751 - DNA, 25 bp, Homo sapien
ttaaggcaacgagttatttgaggta

SEQ ID NO: 698752 - DNA, 25 bp, Homo sapien
acgagttatttgaggtagatgtgga

SEQ ID NO: 698753 - DNA, 25 bp, Homo sapien
tatgaggtaaacaggatcggcccac

SEQ ID NO: 698754 - DNA, 25 bp, Homo sapien
ttcactggacacgagaagctgggag

SEQ ID NO: 698755 - DNA, 25 bp, Homo sapien
agagccttcggtccatcagggctgc

SEQ ID NO: 698756 - DNA, 25 bp, Homo sapien
cacagtgcagggatgtatgaggtaa

SEQ ID NO: 698757 - DNA, 25 bp, Homo sapien
gcatcgtggaatatcacagtcagca

SEQ ID NO: 698758 - DNA, 25 bp, Homo sapien
agcagacaagcacggcacaagcaaa

SEQ ID NO: 698759 - DNA, 25 bp, Homo sapien
agttcattggctccgcggctctagc

SEQ ID NO: 698760 - DNA, 25 bp, Homo sapien
cacagtcagcaattcactgtcaggg

SEQ ID NO: 698761 - DNA, 25 bp, Homo sapien
agagaaatgaaagcccagagctccc

SEQ ID NO: 698762 - DNA, 25 bp, Homo sapien
gaatagctgagttaatccccactgc

SEQ ID NO: 698763 - DNA, 25 bp, Homo sapien
attgtgctgctacggtgctggcccc

SEQ ID NO: 698764 - DNA, 25 bp, Homo sapien
cagagctcccgtgtaggacacgaca

SEQ ID NO: 698765 - DNA, 25 bp, Homo sapien
gccccacggtcccaagtgaactaga

SEQ ID NO: 698766 - DNA, 25 bp, Homo sapien
gctgagtttacatttgccaaggaaa

SEQ ID NO: 698767 - DNA, 25 bp, Homo sapien
cctgaatgttctgcgaaaactgaaa

SEQ ID NO: 698768 - DNA, 25 bp, Homo sapien
caactgtacagatgcgtgaccctta

SEQ ID NO: 698769 - DNA, 25 bp, Homo sapien
acacctgggcttaggccttggcctc

SEQ ID NO: 698770 - DNA, 25 bp, Homo sapien
taataaagttccgacgtcacaggcc

SEQ ID NO: 698771 - DNA, 25 bp, Homo sapien
ggtctccggcgatcagttagtagct

SEQ ID NO: 698772 - DNA, 25 bp, Homo sapien
tcacaggcctaaatgacacattgcg

SEQ ID NO: 698773 - DNA, 25 bp, Homo sapien
tcgcgcggcctgcttagagatctgg

SEQ ID NO: 698774 - DNA, 25 bp, Homo sapien
atcatgagcgagacgcggacgactg

SEQ ID NO: 698775 - DNA, 25 bp, Homo sapien
ggacgtgcgtcatcatgagcgagac

SEQ ID NO: 698776 - DNA, 25 bp, Homo sapien
agcgggtggccgacccgcgcatgcg

SEQ ID NO: 698777 - DNA, 25 bp, Homo sapien
cgcatgcgcccgtgcctcggagaga

SEQ ID NO: 698778 - DNA, 25 bp, Homo sapien
gttggcgcccgagtgaagttcccac

SEQ ID NO: 698779 - DNA, 25 bp, Homo sapien
atcggggccgccgagtccgtacaca

SEQ ID NO: 698780 - DNA, 25 bp, Homo sapien
agatactcgccattgagcagcgcca

SEQ ID NO: 698781 - DNA, 25 bp, Homo sapien
gttcccacacgatgcagctccacat

SEQ ID NO: 698782 - DNA, 25 bp, Homo sapien
acagtcagcctcgtgagccccatgc

SEQ ID NO: 698783 - DNA, 25 bp, Homo sapien
tcagcctcgtgagccccatgcagga

SEQ ID NO: 698784 - DNA, 25 bp, Homo sapien
agtcagcctcgtgagccccatgcag

SEQ ID NO: 698785 - DNA, 25 bp, Homo sapien
cacagtcagcctcgtgagccccatg

SEQ ID NO: 698786 - DNA, 25 bp, Homo sapien
tcctgccaggacgtagagaccattg

SEQ ID NO: 698787 - DNA, 25 bp, Homo sapien
gtagagaccattgggtgatgcagtc

SEQ ID NO: 698788 - DNA, 25 bp, Homo sapien
caggcccggggcacatgatcttctg

SEQ ID NO: 698789 - DNA, 25 bp, Homo sapien
tgcaactcctgccaggacgtagaga

SEQ ID NO: 698790 - DNA, 25 bp, Homo sapien
tgccctgcaggcaaagctcagatgg

SEQ ID NO: 698791 - DNA, 25 bp, Homo sapien
gccgcatggttgttccctggtgccc

SEQ ID NO: 698792 - DNA, 25 bp, Homo sapien
tgggaaacgctcacgctttgctcct

SEQ ID NO: 698793 - DNA, 25 bp, Homo sapien
gcttaggctataacccctgagcagt

SEQ ID NO: 698794 - DNA, 25 bp, Homo sapien
tgtggggggttgtggattcgagagc

SEQ ID NO: 698795 - DNA, 25 bp, Homo sapien
gtggggggttgtggattcgagagct

SEQ ID NO: 698796 - DNA, 25 bp, Homo sapien
caggagacgtcctggtagtgtcgac

SEQ ID NO: 698797 - DNA, 25 bp, Homo sapien
gctgctgtcccctgtgaactgaagg

SEQ ID NO: 698798 - DNA, 25 bp, Homo sapien
cccctgagatgaagtggctgctgtc

SEQ ID NO: 698799 - DNA, 25 bp, Homo sapien
tgtcgactcaggatgaccagaaggt

SEQ ID NO: 698800 - DNA, 25 bp, Homo sapien
ccccaaagccgcagtgcaggtccgt

SEQ ID NO: 698801 - DNA, 25 bp, Homo sapien
tgcaggtccgtgatggggagcgcgt

SEQ ID NO: 698802 - DNA, 25 bp, Homo sapien
ggagcgcgtggtgagaccagacgtg

SEQ ID NO: 698803 - DNA, 25 bp, Homo sapien
accagacgtgcctgggcgccggaat

SEQ ID NO: 698804 - DNA, 25 bp, Homo sapien
gactcaagcatagtgatgacctccg

SEQ ID NO: 698805 - DNA, 25 bp, Homo sapien
cctagggcttgcgactttgggtgaa

SEQ ID NO: 698806 - DNA, 25 bp, Homo sapien
gattaaaagccgtctggagtcctga

SEQ ID NO: 698807 - DNA, 25 bp, Homo sapien
gaaagccgtcaccatgtgggtcttg

SEQ ID NO: 698808 - DNA, 25 bp, Homo sapien
gccaggtccatggtcactgccatga

SEQ ID NO: 698809 - DNA, 25 bp, Homo sapien
ccccgcagaacatatggtgctcagc

SEQ ID NO: 698810 - DNA, 25 bp, Homo sapien
ggtgaagaggtcgacctggaagatg

SEQ ID NO: 698811 - DNA, 25 bp, Homo sapien
tgccatgatggacacgtcaaagagg

SEQ ID NO: 698812 - DNA, 25 bp, Homo sapien
gccgagacgtgtgtgagccgcaggc

SEQ ID NO: 698813 - DNA, 25 bp, Homo sapien
ctgcgaaggccgagacgtgtgtgag

SEQ ID NO: 698814 - DNA, 25 bp, Homo sapien
aaggccgagacgtgtgtgagccgca

SEQ ID NO: 698815 - DNA, 25 bp, Homo sapien
agccgcaggcccgatgccctcagcc

SEQ ID NO: 698816 - DNA, 25 bp, Homo sapien
tttgaagaccttcccggcgtcctgc

SEQ ID NO: 698817 - DNA, 25 bp, Homo sapien
ttgaagaccttcccggcgtcctgct

SEQ ID NO: 698818 - DNA, 25 bp, Homo sapien
cccagaggcgcacggtctcgtcgtg

SEQ ID NO: 698819 - DNA, 25 bp, Homo sapien
tctcgtcgtgggagcctgagagcag

SEQ ID NO: 698820 - DNA, 25 bp, Homo sapien
ctttgagggccaccgtccggatgca

SEQ ID NO: 698821 - DNA, 25 bp, Homo sapien
gcacgctgccgtcagtggacactga

SEQ ID NO: 698822 - DNA, 25 bp, Homo sapien
aggatggcggcattggtgactgggc

SEQ ID NO: 698823 - DNA, 25 bp, Homo sapien
cgccagcaggatggcggcattggtg

SEQ ID NO: 698824 - DNA, 25 bp, Homo sapien
ctgacgggcgccagcaggatggcgg

SEQ ID NO: 698825 - DNA, 25 bp, Homo sapien
agcaggatggcggcattggtgactg

SEQ ID NO: 698826 - DNA, 25 bp, Homo sapien
gggcctgaagtctgagctcagcatg

SEQ ID NO: 698827 - DNA, 25 bp, Homo sapien
aggctgggcctgaagtctgagctca

SEQ ID NO: 698828 - DNA, 25 bp, Homo sapien
cccgtggcgcggctcgtccccgtgc

SEQ ID NO: 698829 - DNA, 25 bp, Homo sapien
gctcggcgcccagcaggtgcttgtt

SEQ ID NO: 698830 - DNA, 25 bp, Homo sapien
aggaccaagggagcgaaggagccca

SEQ ID NO: 698831 - DNA, 25 bp, Homo sapien
acgcgccctccagtgccgggcttgt

SEQ ID NO: 698832 - DNA, 25 bp, Homo sapien
cgcacgggcgccaggaccaagggag

SEQ ID NO: 698833 - DNA, 25 bp, Homo sapien
cgggcttgtggggaaccgccgcacg

SEQ ID NO: 698834 - DNA, 25 bp, Homo sapien
gcacagagcgggggtcggtgctgag

SEQ ID NO: 698835 - DNA, 25 bp, Homo sapien
gcgcctcagatcctccacgactgcg

SEQ ID NO: 698836 - DNA, 25 bp, Homo sapien
gcagtcattacccagcgcctcagat

SEQ ID NO: 698837 - DNA, 25 bp, Homo sapien
cacgactgcgcccaaggatgtggct

SEQ ID NO: 698838 - DNA, 25 bp, Homo sapien
ctggccatgcagtcattacccagcg

SEQ ID NO: 698839 - DNA, 25 bp, Homo sapien
gcagctgctccgtgcggtccaggta

SEQ ID NO: 698840 - DNA, 25 bp, Homo sapien
tgcagctgctccgtgcggtccaggt

SEQ ID NO: 698841 - DNA, 25 bp, Homo sapien
gaagtcgaacaggtcccgattgatc

SEQ ID NO: 698842 - DNA, 25 bp, Homo sapien
tcttgcgcaggttgcgcacctcgtc

SEQ ID NO: 698843 - DNA, 25 bp, Homo sapien
ccggccgcgtgatgaagcgcgtgga

SEQ ID NO: 698844 - DNA, 25 bp, Homo sapien
tccgtcacacggacgcgcagctggt

SEQ ID NO: 698845 - DNA, 25 bp, Homo sapien
accaagacggcccagtcacagagga

SEQ ID NO: 698846 - DNA, 25 bp, Homo sapien
tcacagaggaaaaacccgaacacga

SEQ ID NO: 698847 - DNA, 25 bp, Homo sapien
tgacgcgtgccacgagacaccaaga

SEQ ID NO: 698848 - DNA, 25 bp, Homo sapien
cagactagcaccactgtgacgcgtg

SEQ ID NO: 698849 - DNA, 25 bp, Homo sapien
ctgggttcacccttgggcggctcca

SEQ ID NO: 698850 - DNA, 25 bp, Homo sapien
tgggttcacccttgggcggctccag

SEQ ID NO: 698851 - DNA, 25 bp, Homo sapien
tgcccggagaaccaccctgggttca

SEQ ID NO: 698852 - DNA, 25 bp, Homo sapien
gggttcacccttgggcggctccagc

SEQ ID NO: 698853 - DNA, 25 bp, Homo sapien
aggcagctgtccctctacggctctg

SEQ ID NO: 698854 - DNA, 25 bp, Homo sapien
gggttgtgccgatacccttgagttg

SEQ ID NO: 698855 - DNA, 25 bp, Homo sapien
gccacagggttgtgccgataccctt

SEQ ID NO: 698856 - DNA, 25 bp, Homo sapien
accagccacagggttgtgccgatac

SEQ ID NO: 698857 - DNA, 25 bp, Homo sapien
ctcttgcagcggctggagccgagtc

SEQ ID NO: 698858 - DNA, 25 bp, Homo sapien
gcagcggctggagccgagtccgggc

SEQ ID NO: 698859 - DNA, 25 bp, Homo sapien
tgggctcttgcagcggctggagccg

SEQ ID NO: 698860 - DNA, 25 bp, Homo sapien
cttgggctcttgcagcggctggagc

SEQ ID NO: 698861 - DNA, 25 bp, Homo sapien
atcgcacccagaccggcaattacga

SEQ ID NO: 698862 - DNA, 25 bp, Homo sapien
ccgcggtgcctgagcacgtctggga

SEQ ID NO: 698863 - DNA, 25 bp, Homo sapien
caattacgacgcagggtggagccgc

SEQ ID NO: 698864 - DNA, 25 bp, Homo sapien
accggcaattacgacgcagggtgga

SEQ ID NO: 698865 - DNA, 25 bp, Homo sapien
gtcccggcgccgtccctctgagaat

SEQ ID NO: 698866 - DNA, 25 bp, Homo sapien
ccggcgtccccgctcgtcaacgcct

SEQ ID NO: 698867 - DNA, 25 bp, Homo sapien
cggggggtctgaacgatgacgtcac

SEQ ID NO: 698868 - DNA, 25 bp, Homo sapien
tccccgctcgtcaacgccttggcct

SEQ ID NO: 698869 - DNA, 25 bp, Homo sapien
tcataacatgaaacctgccatcttg

SEQ ID NO: 698870 - DNA, 25 bp, Homo sapien
cacattaagcacactccttgctatg

SEQ ID NO: 698871 - DNA, 25 bp, Homo sapien
tccttgctatgtagcccttaccacc

SEQ ID NO: 698872 - DNA, 25 bp, Homo sapien
aaaatagtcataacatgaaacctgc

SEQ ID NO: 698873 - DNA, 25 bp, Homo sapien
gggggagtgggacgtgccctgccca

SEQ ID NO: 698874 - DNA, 25 bp, Homo sapien
gcctccgggttcccagcaaccgcgc

SEQ ID NO: 698875 - DNA, 25 bp, Homo sapien
cgcggggggagtgggacgtgccctg

SEQ ID NO: 698876 - DNA, 25 bp, Homo sapien
tcccagcaaccgcgcggggggagtg

SEQ ID NO: 698877 - DNA, 25 bp, Homo sapien
aggagggcgcccaggcgcacggagc

SEQ ID NO: 698878 - DNA, 25 bp, Homo sapien
gggcgcggcgaccaccagctccaag

SEQ ID NO: 698879 - DNA, 25 bp, Homo sapien
tccaagctcaggttgtgcggcagcc

SEQ ID NO: 698880 - DNA, 25 bp, Homo sapien
gccaggacgccgcacggctgagggt

SEQ ID NO: 698881 - DNA, 25 bp, Homo sapien
ctgcagcagctcgggccgagcctcg

SEQ ID NO: 698882 - DNA, 25 bp, Homo sapien
cagcagctcgggccgagcctcggga

SEQ ID NO: 698883 - DNA, 25 bp, Homo sapien
agctcgggccgagcctcgggaaagg

SEQ ID NO: 698884 - DNA, 25 bp, Homo sapien
ccgccacgcccggaggcaccagcgc

SEQ ID NO: 698885 - DNA, 25 bp, Homo sapien
cattgctcctcctctattcagactt

SEQ ID NO: 698886 - DNA, 25 bp, Homo sapien
gccttgtgcttagagccaaaccagg

SEQ ID NO: 698887 - DNA, 25 bp, Homo sapien
taaaggtgagcccaccgatggcctt

SEQ ID NO: 698888 - DNA, 25 bp, Homo sapien
tgccattccccggatggaatatctt

SEQ ID NO: 698889 - DNA, 25 bp, Homo sapien
aggccgacgtcttcccaggcgtgcg

SEQ ID NO: 698890 - DNA, 25 bp, Homo sapien
tgcacaatgtcatggatggcggcct

SEQ ID NO: 698891 - DNA, 25 bp, Homo sapien
ttgggcggcagtggtgtccccaaca

SEQ ID NO: 698892 - DNA, 25 bp, Homo sapien
gtgtcccgccggcttaggtccagga

SEQ ID NO: 698893 - DNA, 25 bp, Homo sapien
gagggctcgcttcggctgcacctgg

SEQ ID NO: 698894 - DNA, 25 bp, Homo sapien
agggctcgcttcggctgcacctggg

SEQ ID NO: 698895 - DNA, 25 bp, Homo sapien
tgccaagaagcgccccggggactcg

SEQ ID NO: 698896 - DNA, 25 bp, Homo sapien
ggagggctcgcttcggctgcacctg

SEQ ID NO: 698897 - DNA, 25 bp, Homo sapien
ttgatactgaagctggtgaccgcca

SEQ ID NO: 698898 - DNA, 25 bp, Homo sapien
taaagtgccgagacatgtgtacctg

SEQ ID NO: 698899 - DNA, 25 bp, Homo sapien
gtgaagtccaccacctgtgagcggg

SEQ ID NO: 698900 - DNA, 25 bp, Homo sapien
ggatcacgggcaaacacaaatgggt

SEQ ID NO: 698901 - DNA, 25 bp, Homo sapien
tagccccccaaggccacccgcagcc

SEQ ID NO: 698902 - DNA, 25 bp, Homo sapien
ctgcgcgggggaccccgtcagcgcc

SEQ ID NO: 698903 - DNA, 25 bp, Homo sapien
cgggggaccccgtcagcgcctctgc

SEQ ID NO: 698904 - DNA, 25 bp, Homo sapien
cgcgggggaccccgtcagcgcctct

SEQ ID NO: 698905 - DNA, 25 bp, Homo sapien
gggggaccccgtcagcgcctctgcc

SEQ ID NO: 698906 - DNA, 25 bp, Homo sapien
gctgtggcgccgcatgtgtgcgtgc

SEQ ID NO: 698907 - DNA, 25 bp, Homo sapien
aagctcttcttgatgtacgcctcgg

SEQ ID NO: 698908 - DNA, 25 bp, Homo sapien
tgatgtacgcctcggcgctgctctc

SEQ ID NO: 698909 - DNA, 25 bp, Homo sapien
ctcccacacggtgccgaagcggaag

SEQ ID NO: 698910 - DNA, 25 bp, Homo sapien
caggagcgacttgtccatgatgaag

SEQ ID NO: 698911 - DNA, 25 bp, Homo sapien
gatggagacctcgtagtccaggagc

SEQ ID NO: 698912 - DNA, 25 bp, Homo sapien
tttgcagtcggcgtcgatggagacc

SEQ ID NO: 698913 - DNA, 25 bp, Homo sapien
tcccacggtcagcagtttgcagtcg

SEQ ID NO: 698914 - DNA, 25 bp, Homo sapien
gcaaggcaccatcttgtaccacttg

SEQ ID NO: 698915 - DNA, 25 bp, Homo sapien
cacttgtcgtggagcaggtcgatga

SEQ ID NO: 698916 - DNA, 25 bp, Homo sapien
tcgatgaagccggaggacttgtagc

SEQ ID NO: 698917 - DNA, 25 bp, Homo sapien
tgtaaccgcaaagacccgcttgccg

SEQ ID NO: 698918 - DNA, 25 bp, Homo sapien
tgctccccttgcggatgcgcggcag

SEQ ID NO: 698919 - DNA, 25 bp, Homo sapien
aagaaggcgtgctcgcccagcgagc

SEQ ID NO: 698920 - DNA, 25 bp, Homo sapien
gcccgcgaagtggtagatgctcatc

SEQ ID NO: 698921 - DNA, 25 bp, Homo sapien
aggcacagcaacacgaagaggcccg

SEQ ID NO: 698922 - DNA, 25 bp, Homo sapien
ggctccgtgttgagggcgcggtgga

SEQ ID NO: 698923 - DNA, 25 bp, Homo sapien
cctctggtggctccgtgttgagggc

SEQ ID NO: 698924 - DNA, 25 bp, Homo sapien
ctccttcgacccctctggtggctcc

SEQ ID NO: 698925 - DNA, 25 bp, Homo sapien
ctctgccgtctcctccttcgacccc

SEQ ID NO: 698926 - DNA, 25 bp, Homo sapien
ctgctgctgctccacctcggggccg

SEQ ID NO: 698927 - DNA, 25 bp, Homo sapien
gctgctgctgctgctccacctcggg

SEQ ID NO: 698928 - DNA, 25 bp, Homo sapien
tgctgctgctgctccacctcggggc

SEQ ID NO: 698929 - DNA, 25 bp, Homo sapien
ctgctgctgctgctccacctcgggg

SEQ ID NO: 698930 - DNA, 25 bp, Homo sapien
tgtgtgtgtcttgagcccaaacggc

SEQ ID NO: 698931 - DNA, 25 bp, Homo sapien
taaactgtctgttgacagcggctca

SEQ ID NO: 698932 - DNA, 25 bp, Homo sapien
tcacgcgcgacttcgatgcggcgct

SEQ ID NO: 698933 - DNA, 25 bp, Homo sapien
gtgacgtgcgctgtccccgagctgt

SEQ ID NO: 698934 - DNA, 25 bp, Homo sapien
ggtaggtctgcagtgaaccgtcctg

SEQ ID NO: 698935 - DNA, 25 bp, Homo sapien
agagcagagcttgcgcctcgggcat

SEQ ID NO: 698936 - DNA, 25 bp, Homo sapien
ccgaggcttgtacccgctagtgagg

SEQ ID NO: 698937 - DNA, 25 bp, Homo sapien
ggtgcaggcgccaacatcagtggca

SEQ ID NO: 698938 - DNA, 25 bp, Homo sapien
ccctgctggctgggcctgaccttcc

SEQ ID NO: 698939 - DNA, 25 bp, Homo sapien
ctggctgggcctgaccttcccgagc

SEQ ID NO: 698940 - DNA, 25 bp, Homo sapien
ctgctggctgggcctgaccttcccg

SEQ ID NO: 698941 - DNA, 25 bp, Homo sapien
tgctggctgggcctgaccttcccga

SEQ ID NO: 698942 - DNA, 25 bp, Homo sapien
gggctgcggtaggcgggcctagccc

SEQ ID NO: 698943 - DNA, 25 bp, Homo sapien
cagcaggtccgcatccaggagatgc

SEQ ID NO: 698944 - DNA, 25 bp, Homo sapien
atgacatgaacaacaactcgggcgc

SEQ ID NO: 698945 - DNA, 25 bp, Homo sapien
tacttcttccaccactacgagctgc

SEQ ID NO: 698946 - DNA, 25 bp, Homo sapien
tggatggcagagaccgctgccatca

SEQ ID NO: 698947 - DNA, 25 bp, Homo sapien
tatctctaccacttcgccttctatg

SEQ ID NO: 698948 - DNA, 25 bp, Homo sapien
acttcgccttctatgcctatcacta

SEQ ID NO: 698949 - DNA, 25 bp, Homo sapien
ctatcactaccgcttcaatgggcag

SEQ ID NO: 698950 - DNA, 25 bp, Homo sapien
gcttcaatgggcagtatagcagcct

SEQ ID NO: 698951 - DNA, 25 bp, Homo sapien
atcatcctcatcgtgtggctcgcgg

SEQ ID NO: 698952 - DNA, 25 bp, Homo sapien
ggaccagtatgacgccatctgctgc

SEQ ID NO: 698953 - DNA, 25 bp, Homo sapien
atgtcggagttcttcaacgacacca

SEQ ID NO: 698954 - DNA, 25 bp, Homo sapien
tggaggccatcatgtcggagttctt

SEQ ID NO: 698955 - DNA, 25 bp, Homo sapien
ccccgcagcgcccctgctgaccgtc

SEQ ID NO: 698956 - DNA, 25 bp, Homo sapien
ccctgctgaccgtcatcctggccct

SEQ ID NO: 698957 - DNA, 25 bp, Homo sapien
ctgaccgtcatcctggccctcgtcg

SEQ ID NO: 698958 - DNA, 25 bp, Homo sapien
ggagatgaacatggccatcgccttc

SEQ ID NO: 698959 - DNA, 25 bp, Homo sapien
ggtactcacaccaccagatcttcgt

SEQ ID NO: 698960 - DNA, 25 bp, Homo sapien
tgtccatgctgctgcggtactcaca

SEQ ID NO: 698961 - DNA, 25 bp, Homo sapien
ctgctgcggtactcacaccaccaga

SEQ ID NO: 698962 - DNA, 25 bp, Homo sapien
gtccatgctgctgcggtactcacac

SEQ ID NO: 698963 - DNA, 25 bp, Homo sapien
tcctgcggaatgtggtgtcgggcga

SEQ ID NO: 698964 - DNA, 25 bp, Homo sapien
atggcgcggacgtcctacctggccg

SEQ ID NO: 698965 - DNA, 25 bp, Homo sapien
accgctttgtgagcatgtggatggc

SEQ ID NO: 698966 - DNA, 25 bp, Homo sapien
tgtcgggcgagcactaccgctttgt

SEQ ID NO: 698967 - DNA, 25 bp, Homo sapien
cagtgcttcggggaccgcttcagcc

SEQ ID NO: 698968 - DNA, 25 bp, Homo sapien
tcctgggctacgatgacatcctcat

SEQ ID NO: 698969 - DNA, 25 bp, Homo sapien
ggcctggccgagaacgaggagaaca

SEQ ID NO: 698970 - DNA, 25 bp, Homo sapien
acatcctcatgtccagcgtgaaggg

SEQ ID NO: 698971 - DNA, 25 bp, Homo sapien
tatggcttccttcgcctgtcgcagg

SEQ ID NO: 698972 - DNA, 25 bp, Homo sapien
tacatcgtggagtactcactagagt

SEQ ID NO: 698973 - DNA, 25 bp, Homo sapien
actcactagagtatggcttccttcg

SEQ ID NO: 698974 - DNA, 25 bp, Homo sapien
tgtggccgcaggacgagtacatcgt

SEQ ID NO: 698975 - DNA, 25 bp, Homo sapien
ggacatcgagcccaaggtgttcaag

SEQ ID NO: 698976 - DNA, 25 bp, Homo sapien
aagccgccgagtagcacagaggccc

SEQ ID NO: 698977 - DNA, 25 bp, Homo sapien
caaggtgttcaagccgccgagtagc

SEQ ID NO: 698978 - DNA, 25 bp, Homo sapien
catcgagcccaaggtgttcaagccg

SEQ ID NO: 698979 - DNA, 25 bp, Homo sapien
tcgcccatcaactgcctggagcatg

SEQ ID NO: 698980 - DNA, 25 bp, Homo sapien
ctacagttctgtgacagcggcggcc

SEQ ID NO: 698981 - DNA, 25 bp, Homo sapien
acaagtggccgcgtgagggcatcct

SEQ ID NO: 698982 - DNA, 25 bp, Homo sapien
catcctgcgtgtggaagtgcggcac

SEQ ID NO: 698983 - DNA, 25 bp, Homo sapien
tcttcgagttcttcgtgctgctcaa

SEQ ID NO: 698984 - DNA, 25 bp, Homo sapien
agatggctgtcacctattcgcggct

SEQ ID NO: 698985 - DNA, 25 bp, Homo sapien
catgtcggagcacgtggagcccgca

SEQ ID NO: 698986 - DNA, 25 bp, Homo sapien
tcttccacgcgctgttcttcaagat

SEQ ID NO: 698987 - DNA, 25 bp, Homo sapien
aactctactagctgggaggtggacc

SEQ ID NO: 698988 - DNA, 25 bp, Homo sapien
cctttgatgccacgggaaactgagg

SEQ ID NO: 698989 - DNA, 25 bp, Homo sapien
taggattcttactgggtgcggtagc

SEQ ID NO: 698990 - DNA, 25 bp, Homo sapien
ggcccggagcgcaaatgtccttata

SEQ ID NO: 698991 - DNA, 25 bp, Homo sapien
ttgacctcggccgacagcccgtacg

SEQ ID NO: 698992 - DNA, 25 bp, Homo sapien
acctcggccgacagcccgtacgagg

SEQ ID NO: 698993 - DNA, 25 bp, Homo sapien
cctcggccgacagcccgtacgaggg

SEQ ID NO: 698994 - DNA, 25 bp, Homo sapien
ccggttcttgacctcggccgacagc

SEQ ID NO: 698995 - DNA, 25 bp, Homo sapien
ataagatagttccatccttcaggcc

SEQ ID NO: 698996 - DNA, 25 bp, Homo sapien
gcataagatagttccatccttcagg

SEQ ID NO: 698997 - DNA, 25 bp, Homo sapien
gtgcataagatagttccatccttca

SEQ ID NO: 698998 - DNA, 25 bp, Homo sapien
cggtgagtccctcgatccaggtgcg

SEQ ID NO: 698999 - DNA, 25 bp, Homo sapien
catggagcggttgatcttggggacg

SEQ ID NO: 699000 - DNA, 25 bp, Homo sapien
cttggggacggagcccggctgtagc

SEQ ID NO: 699001 - DNA, 25 bp, Homo sapien
gggacggagcccggctgtagcttgt

SEQ ID NO: 699002 - DNA, 25 bp, Homo sapien
acggagcccggctgtagcttgttca

SEQ ID NO: 699003 - DNA, 25 bp, Homo sapien
tccctgctccgctccaccagcccct

SEQ ID NO: 699004 - DNA, 25 bp, Homo sapien
caccatccctgctccgctccaccag

SEQ ID NO: 699005 - DNA, 25 bp, Homo sapien
tgttagatgggcccccagcaccatc

SEQ ID NO: 699006 - DNA, 25 bp, Homo sapien
ctgttagatgggcccccagcaccat

SEQ ID NO: 699007 - DNA, 25 bp, Homo sapien
catggccttgatgaagttggacagg

SEQ ID NO: 699008 - DNA, 25 bp, Homo sapien
atggccttgatgaagttggacaggt

SEQ ID NO: 699009 - DNA, 25 bp, Homo sapien
ccttgatgaagttggacaggttttc

SEQ ID NO: 699010 - DNA, 25 bp, Homo sapien
tgatgaagttggacaggttttctag

SEQ ID NO: 699011 - DNA, 25 bp, Homo sapien
ttggcctcgaacaggtccacagggt

SEQ ID NO: 699012 - DNA, 25 bp, Homo sapien
gtccacagggttcatgccgtagctg

SEQ ID NO: 699013 - DNA, 25 bp, Homo sapien
tccacagggttcatgccgtagctga

SEQ ID NO: 699014 - DNA, 25 bp, Homo sapien
ctcgaacaggtccacagggttcatg

SEQ ID NO: 699015 - DNA, 25 bp, Homo sapien
ttccccgccagggcgagaagagaca

SEQ ID NO: 699016 - DNA, 25 bp, Homo sapien
cttccccgccagggcgagaagagac

SEQ ID NO: 699017 - DNA, 25 bp, Homo sapien
tccccgccagggcgagaagagacac

SEQ ID NO: 699018 - DNA, 25 bp, Homo sapien
gaaaggggccgggagtaccagcaga

SEQ ID NO: 699019 - DNA, 25 bp, Homo sapien
tccgagtacttgacgccaatgtcca

SEQ ID NO: 699020 - DNA, 25 bp, Homo sapien
cgagtacttgacgccaatgtccacc

SEQ ID NO: 699021 - DNA, 25 bp, Homo sapien
ccgagtacttgacgccaatgtccac

SEQ ID NO: 699022 - DNA, 25 bp, Homo sapien
tggtggcatcgtcgaaattccgctc

SEQ ID NO: 699023 - DNA, 25 bp, Homo sapien
tcatggtggcatcgtcgaaattccg

SEQ ID NO: 699024 - DNA, 25 bp, Homo sapien
catggtggcatcgtcgaaattccgc

SEQ ID NO: 699025 - DNA, 25 bp, Homo sapien
cttcatggtggcatcgtcgaaattc

SEQ ID NO: 699026 - DNA, 25 bp, Homo sapien
gagatgccttctcgtgccgtaggca

SEQ ID NO: 699027 - DNA, 25 bp, Homo sapien
tgccgtaggcagtcatgcccgactg

SEQ ID NO: 699028 - DNA, 25 bp, Homo sapien
atagagatgccttctcgtgccgtag

SEQ ID NO: 699029 - DNA, 25 bp, Homo sapien
ccttctcgtgccgtaggcagtcatg

SEQ ID NO: 699030 - DNA, 25 bp, Homo sapien
acacttgtcggttcccagcttggta

SEQ ID NO: 699031 - DNA, 25 bp, Homo sapien
gcttggtatcatagatgtgccgccg

SEQ ID NO: 699032 - DNA, 25 bp, Homo sapien
ggccgctctggttggcgccctgcgt

SEQ ID NO: 699033 - DNA, 25 bp, Homo sapien
ctggttggcgccctgcgtgtagccc

SEQ ID NO: 699034 - DNA, 25 bp, Homo sapien
ggtccgggcagtcgccggtgcccga

SEQ ID NO: 699035 - DNA, 25 bp, Homo sapien
gtccgggcagtcgccggtgcccgag

SEQ ID NO: 699036 - DNA, 25 bp, Homo sapien
tccgggcagtcgccggtgcccgagg

SEQ ID NO: 699037 - DNA, 25 bp, Homo sapien
gaaacttgcgggcatagaaaccaca

SEQ ID NO: 699038 - DNA, 25 bp, Homo sapien
tggctcagccttgcgaaggatcaag

SEQ ID NO: 699039 - DNA, 25 bp, Homo sapien
tctgaaggtcctaggcaaatccagt

SEQ ID NO: 699040 - DNA, 25 bp, Homo sapien
gatatttaacatcacggcccggtcc

SEQ ID NO: 699041 - DNA, 25 bp, Homo sapien
caaacagaggttttattgcgtttgg

SEQ ID NO: 699042 - DNA, 25 bp, Homo sapien
tgtgcagtacttggcggggcatgtg

SEQ ID NO: 699043 - DNA, 25 bp, Homo sapien
tgcgtttggtccacagtcgtatttc

SEQ ID NO: 699044 - DNA, 25 bp, Homo sapien
tcacattatctcacggagcaggtcc

SEQ ID NO: 699045 - DNA, 25 bp, Homo sapien
gggctccgcagctcttgccgccttc

SEQ ID NO: 699046 - DNA, 25 bp, Homo sapien
ggctccgcagctcttgccgccttcc

SEQ ID NO: 699047 - DNA, 25 bp, Homo sapien
aggggctccgcagctcttgccgcct

SEQ ID NO: 699048 - DNA, 25 bp, Homo sapien
tccaggggctccgcagctcttgccg

SEQ ID NO: 699049 - DNA, 25 bp, Homo sapien
gacagagaggtcaggacaacggtcg

SEQ ID NO: 699050 - DNA, 25 bp, Homo sapien
tcaggacaacggtcgggctgaagac

SEQ ID NO: 699051 - DNA, 25 bp, Homo sapien
gggacgggacagagaggtcaggaca

SEQ ID NO: 699052 - DNA, 25 bp, Homo sapien
ggctgaagacgtgcggtgcggctgc

SEQ ID NO: 699053 - DNA, 25 bp, Homo sapien
gtctccggcgatacatgaaattctt

SEQ ID NO: 699054 - DNA, 25 bp, Homo sapien
tgtctccggcgatacatgaaattct

SEQ ID NO: 699055 - DNA, 25 bp, Homo sapien
cggctgtctccggcgatacatgaaa

SEQ ID NO: 699056 - DNA, 25 bp, Homo sapien
acagcaattcgaccaggagctggac

SEQ ID NO: 699057 - DNA, 25 bp, Homo sapien
gaggccacagcaattcgaccaggag

SEQ ID NO: 699058 - DNA, 25 bp, Homo sapien
ggagtggcgaacagccaccaggatg

SEQ ID NO: 699059 - DNA, 25 bp, Homo sapien
ggcgggtgggagtggcgaacagcca

SEQ ID NO: 699060 - DNA, 25 bp, Homo sapien
gagtcgttgaagttgctcaggcgcc

SEQ ID NO: 699061 - DNA, 25 bp, Homo sapien
cggtgcccgccgatggcagtggctt

SEQ ID NO: 699062 - DNA, 25 bp, Homo sapien
tcctcgcccggtgtcagctgcggaa

SEQ ID NO: 699063 - DNA, 25 bp, Homo sapien
tcagctgcggaaagcaggtgttgtt

SEQ ID NO: 699064 - DNA, 25 bp, Homo sapien
cgtgctgcgtgcagccctcagcgtg

SEQ ID NO: 699065 - DNA, 25 bp, Homo sapien
agccctcagcgtggcgatcagcttc

SEQ ID NO: 699066 - DNA, 25 bp, Homo sapien
cagccagcgtcctgtgggcactggc

SEQ ID NO: 699067 - DNA, 25 bp, Homo sapien
acagtgcgggcatcggctagcagcc

SEQ ID NO: 699068 - DNA, 25 bp, Homo sapien
agctccgcgacatccagcatgggtg

SEQ ID NO: 699069 - DNA, 25 bp, Homo sapien
tgcgcagcagtgacgtcagcagctc

SEQ ID NO: 699070 - DNA, 25 bp, Homo sapien
cagtggagactgcttggttggttga

SEQ ID NO: 699071 - DNA, 25 bp, Homo sapien
catccagcatgggtggttccagtgg

SEQ ID NO: 699072 - DNA, 25 bp, Homo sapien
ttgaacactcactaggggtccagcg

SEQ ID NO: 699073 - DNA, 25 bp, Homo sapien
atgattttgaacactcactaggggt

SEQ ID NO: 699074 - DNA, 25 bp, Homo sapien
ctcactaggggtccagcgctctggc

SEQ ID NO: 699075 - DNA, 25 bp, Homo sapien
gaacactcactaggggtccagcgct

SEQ ID NO: 699076 - DNA, 25 bp, Homo sapien
ggcttggcccagtgccaaccccagg

SEQ ID NO: 699077 - DNA, 25 bp, Homo sapien
cctcagcggcctccaacaagctgtg

SEQ ID NO: 699078 - DNA, 25 bp, Homo sapien
ctcagcggcctccaacaagctgtgc

SEQ ID NO: 699079 - DNA, 25 bp, Homo sapien
tcctcagcggcctccaacaagctgt

SEQ ID NO: 699080 - DNA, 25 bp, Homo sapien
aggtcactagcctcgtaccagttga

SEQ ID NO: 699081 - DNA, 25 bp, Homo sapien
tcgtaccagttgagggaggggccca

SEQ ID NO: 699082 - DNA, 25 bp, Homo sapien
ctgctgtctggcagggcggattctg

SEQ ID NO: 699083 - DNA, 25 bp, Homo sapien
catcaggtcactagcctcgtaccag

SEQ ID NO: 699084 - DNA, 25 bp, Homo sapien
gcttcccgaggatcagaggcttcag

SEQ ID NO: 699085 - DNA, 25 bp, Homo sapien
tgggccatgagcttccgggtaaaag

SEQ ID NO: 699086 - DNA, 25 bp, Homo sapien
ctggtgcaaagagtagcttcccgag

SEQ ID NO: 699087 - DNA, 25 bp, Homo sapien
cgggtaaaaggtgtatctggtgcaa

SEQ ID NO: 699088 - DNA, 25 bp, Homo sapien
tgaagatccggggtcccagcatctc

SEQ ID NO: 699089 - DNA, 25 bp, Homo sapien
gcagcatggccacattggaactgtc

SEQ ID NO: 699090 - DNA, 25 bp, Homo sapien
ttggaactgtcgttcatgaaggtga

SEQ ID NO: 699091 - DNA, 25 bp, Homo sapien
gccacattggaactgtcgttcatga

SEQ ID NO: 699092 - DNA, 25 bp, Homo sapien
ttccttcatcctgcatctgcaggag

SEQ ID NO: 699093 - DNA, 25 bp, Homo sapien
gccttcttccttcatcctgcatctg

SEQ ID NO: 699094 - DNA, 25 bp, Homo sapien
catgtggtcccggcctccaggtctg

SEQ ID NO: 699095 - DNA, 25 bp, Homo sapien
ctccatgtggtcccggcctccaggt

SEQ ID NO: 699096 - DNA, 25 bp, Homo sapien
tcagcgtgtgcgtcctgccagctgt

SEQ ID NO: 699097 - DNA, 25 bp, Homo sapien
cgtgtgcgtcctgccagctgtagcc

SEQ ID NO: 699098 - DNA, 25 bp, Homo sapien
caggtgccccacatcagcgtgtgcg

SEQ ID NO: 699099 - DNA, 25 bp, Homo sapien
ggtgccccacatcagcgtgtgcgtc

SEQ ID NO: 699100 - DNA, 25 bp, Homo sapien
tgtccctgatcttattggtcctcgt

SEQ ID NO: 699101 - DNA, 25 bp, Homo sapien
acgacgccggcccagaatcgatgtt

SEQ ID NO: 699102 - DNA, 25 bp, Homo sapien
tgcggattttgatgcgcacgtggcc

SEQ ID NO: 699103 - DNA, 25 bp, Homo sapien
tcgatgttccgcgagcagttgcagg

SEQ ID NO: 699104 - DNA, 25 bp, Homo sapien
ccacacgtagcgcaggtcggtcagg

SEQ ID NO: 699105 - DNA, 25 bp, Homo sapien
acgtcgtccacatagcacggatagg

SEQ ID NO: 699106 - DNA, 25 bp, Homo sapien
aggtcttgcaggtacacgaagccgc

SEQ ID NO: 699107 - DNA, 25 bp, Homo sapien
gcgccgctgagcacgcggacggctg

SEQ ID NO: 699108 - DNA, 25 bp, Homo sapien
tgtcacggagtagatccaggccagc

SEQ ID NO: 699109 - DNA, 25 bp, Homo sapien
gctgaggaaccagcctagccagagc

SEQ ID NO: 699110 - DNA, 25 bp, Homo sapien
accagaaccagcagtgcggcgctga

SEQ ID NO: 699111 - DNA, 25 bp, Homo sapien
ccatggcgcgcatggtgtcccgcag

SEQ ID NO: 699112 - DNA, 25 bp, Homo sapien
acaggaagaccacgcccgggtggct

SEQ ID NO: 699113 - DNA, 25 bp, Homo sapien
gcgggcagccggtcccgccaagcca

SEQ ID NO: 699114 - DNA, 25 bp, Homo sapien
ccgcagccaggttggcgcgggagaa

SEQ ID NO: 699115 - DNA, 25 bp, Homo sapien
cgcgggagaagaaggcgctgagcag

SEQ ID NO: 699116 - DNA, 25 bp, Homo sapien
acgttgtgccactgcgcgccctcgc

SEQ ID NO: 699117 - DNA, 25 bp, Homo sapien
cagcttccaggtaccaggtggcgag

SEQ ID NO: 699118 - DNA, 25 bp, Homo sapien
caggctctcgcagccgaagccgaag

SEQ ID NO: 699119 - DNA, 25 bp, Homo sapien
aagccgaaggccacgggcgacagca

SEQ ID NO: 699120 - DNA, 25 bp, Homo sapien
gtgccagcttctggccatacacctg

SEQ ID NO: 699121 - DNA, 25 bp, Homo sapien
cttctggccatacacctggaatcag

SEQ ID NO: 699122 - DNA, 25 bp, Homo sapien
ccagcttctggccatacacctggaa

SEQ ID NO: 699123 - DNA, 25 bp, Homo sapien
gcgcccggcgactgtgccagcttct

SEQ ID NO: 699124 - DNA, 25 bp, Homo sapien
cgaaatcccgacctcagatgacccg

SEQ ID NO: 699125 - DNA, 25 bp, Homo sapien
gtagctaggaaacaggcacccgcca

SEQ ID NO: 699126 - DNA, 25 bp, Homo sapien
atcccgacctcagatgacccgcccg

SEQ ID NO: 699127 - DNA, 25 bp, Homo sapien
gccttccaagtagctaggaaacagg

SEQ ID NO: 699128 - DNA, 25 bp, Homo sapien
caccagtagctcctccgaaaaggaa

SEQ ID NO: 699129 - DNA, 25 bp, Homo sapien
gaggtccgcaccagtagctcctccg

SEQ ID NO: 699130 - DNA, 25 bp, Homo sapien
gggccgaggtccgcaccagtagctc

SEQ ID NO: 699131 - DNA, 25 bp, Homo sapien
catggttcagggatcccgtactggc

SEQ ID NO: 699132 - DNA, 25 bp, Homo sapien
gggaactgggcatatgtggacaacc

SEQ ID NO: 699133 - DNA, 25 bp, Homo sapien
tatgtggacaaccagctattaagcc

SEQ ID NO: 699134 - DNA, 25 bp, Homo sapien
catctgtggaatctcgttttggggg

SEQ ID NO: 699135 - DNA, 25 bp, Homo sapien
gctattaagcctcgtagtgcctcac

SEQ ID NO: 699136 - DNA, 25 bp, Homo sapien
ctgcgaacggagacgccaggactca

SEQ ID NO: 699137 - DNA, 25 bp, Homo sapien
actcaggccgggcggtgcctcttct

SEQ ID NO: 699138 - DNA, 25 bp, Homo sapien
aacggagacgccaggactcaggccg

SEQ ID NO: 699139 - DNA, 25 bp, Homo sapien
aggccgggcggtgcctcttctacca

SEQ ID NO: 699140 - DNA, 25 bp, Homo sapien
ctgcgggcttccaggaaagcgcttc

SEQ ID NO: 699141 - DNA, 25 bp, Homo sapien
ttgccggccccgttgtggcccagga

SEQ ID NO: 699142 - DNA, 25 bp, Homo sapien
cccaggaaggcggtgatgtggccct

SEQ ID NO: 699143 - DNA, 25 bp, Homo sapien
tggccctggtagaagtccaggctga

SEQ ID NO: 699144 - DNA, 25 bp, Homo sapien
tggcgccattactgctcacagggag

SEQ ID NO: 699145 - DNA, 25 bp, Homo sapien
gggggcctcacagggagctcacagg

SEQ ID NO: 699146 - DNA, 25 bp, Homo sapien
ccactcccgccctatttattttgag

SEQ ID NO: 699147 - DNA, 25 bp, Homo sapien
ggagggactggtcgggggcctcaca

SEQ ID NO: 699148 - DNA, 25 bp, Homo sapien
gttgtactgaggacagacgcccagg

SEQ ID NO: 699149 - DNA, 25 bp, Homo sapien
atgctggagcggacgtcgtggccca

SEQ ID NO: 699150 - DNA, 25 bp, Homo sapien
gcggccatgctggagcggacgtcgt

SEQ ID NO: 699151 - DNA, 25 bp, Homo sapien
agcggacgtcgtggcccaggatgaa

SEQ ID NO: 699152 - DNA, 25 bp, Homo sapien
tgcactctgggcctgccgagacgca

SEQ ID NO: 699153 - DNA, 25 bp, Homo sapien
gcagagtcccagagggcgtccagtc

SEQ ID NO: 699154 - DNA, 25 bp, Homo sapien
cagagtgacccacatggcaggcaga

SEQ ID NO: 699155 - DNA, 25 bp, Homo sapien
cggccagtgcacagagcagagtgac

SEQ ID NO: 699156 - DNA, 25 bp, Homo sapien
aaccagacgtgctcgtccacggtca

SEQ ID NO: 699157 - DNA, 25 bp, Homo sapien
ttcagccgcccatagaaccagacgt

SEQ ID NO: 699158 - DNA, 25 bp, Homo sapien
ctacagcggcactcagacccttcag

SEQ ID NO: 699159 - DNA, 25 bp, Homo sapien
gaggtggcgagtctgcacactctgc

SEQ ID NO: 699160 - DNA, 25 bp, Homo sapien
agctcccaaataccgcggcgggaag

SEQ ID NO: 699161 - DNA, 25 bp, Homo sapien
ggaagcaggatccacgccagccgta

SEQ ID NO: 699162 - DNA, 25 bp, Homo sapien
ttgggagccgcccacaaaggcaatg

SEQ ID NO: 699163 - DNA, 25 bp, Homo sapien
cgtaggctcgtccaggataacaact

SEQ ID NO: 699164 - DNA, 25 bp, Homo sapien
aggcgggccttcaccagcgtcaggt

SEQ ID NO: 699165 - DNA, 25 bp, Homo sapien
ccttcaccagcgtcaggtagtagcc

SEQ ID NO: 699166 - DNA, 25 bp, Homo sapien
caggtgacggcgcaggaagagtggg

SEQ ID NO: 699167 - DNA, 25 bp, Homo sapien
tgggtggagaggatcagcgtgcgac

SEQ ID NO: 699168 - DNA, 25 bp, Homo sapien
ggctgccattcttcttttcctgcct

SEQ ID NO: 699169 - DNA, 25 bp, Homo sapien
cactgccctccatgtcagtgtcagc

SEQ ID NO: 699170 - DNA, 25 bp, Homo sapien
acactgccctccatgtcagtgtcag

SEQ ID NO: 699171 - DNA, 25 bp, Homo sapien
tcctgcctggtgtccacactgccct

SEQ ID NO: 699172 - DNA, 25 bp, Homo sapien
aagaggcattggtgacctgtgaggg

SEQ ID NO: 699173 - DNA, 25 bp, Homo sapien
gggaagaggcattggtgacctgtga

SEQ ID NO: 699174 - DNA, 25 bp, Homo sapien
tggggaagaggcattggtgacctgt

SEQ ID NO: 699175 - DNA, 25 bp, Homo sapien
ttggtgacctgtgaggggactgtcc

SEQ ID NO: 699176 - DNA, 25 bp, Homo sapien
agccgcgtgtctagctctcggaaga

SEQ ID NO: 699177 - DNA, 25 bp, Homo sapien
tcatgggcacccgtgtagggcagca

SEQ ID NO: 699178 - DNA, 25 bp, Homo sapien
aagagtgtggcgaagctgccgtcat

SEQ ID NO: 699179 - DNA, 25 bp, Homo sapien
gtcggagatcccgtagccagtgagc

SEQ ID NO: 699180 - DNA, 25 bp, Homo sapien
cctccatatctgtgtccgcagcaca

SEQ ID NO: 699181 - DNA, 25 bp, Homo sapien
atatctgtgtccgcagcacactcct

SEQ ID NO: 699182 - DNA, 25 bp, Homo sapien
atctgtgtccgcagcacactcctcc

SEQ ID NO: 699183 - DNA, 25 bp, Homo sapien
tccatatctgtgtccgcagcacact

SEQ ID NO: 699184 - DNA, 25 bp, Homo sapien
gcggcatcttgagccgtagggttac

SEQ ID NO: 699185 - DNA, 25 bp, Homo sapien
agcgctgtctcctgtggcggcatct

SEQ ID NO: 699186 - DNA, 25 bp, Homo sapien
gggttacgtctaggccagcaatgcc

SEQ ID NO: 699187 - DNA, 25 bp, Homo sapien
caatgcctgtgcataggtgctgccc

SEQ ID NO: 699188 - DNA, 25 bp, Homo sapien
ggcccagagccctggtcagtctctg

SEQ ID NO: 699189 - DNA, 25 bp, Homo sapien
tggcccagagccctggtcagtctct

SEQ ID NO: 699190 - DNA, 25 bp, Homo sapien
tgctggcgggtcagtgcccagccct

SEQ ID NO: 699191 - DNA, 25 bp, Homo sapien
tgtacccggcccacggcgtctggcc

SEQ ID NO: 699192 - DNA, 25 bp, Homo sapien
ctgggcgaacaggccgcggcggctg

SEQ ID NO: 699193 - DNA, 25 bp, Homo sapien
cggcgggcaagcagaaagcgcttga

SEQ ID NO: 699194 - DNA, 25 bp, Homo sapien
ggctgcggcgggcaagcagaaagcg

SEQ ID NO: 699195 - DNA, 25 bp, Homo sapien
cgggcaagcagaaagcgcttgagaa

SEQ ID NO: 699196 - DNA, 25 bp, Homo sapien
gggaccagcccatcagctgctgctt

SEQ ID NO: 699197 - DNA, 25 bp, Homo sapien
gggggaccagcccatcagctgctgc

SEQ ID NO: 699198 - DNA, 25 bp, Homo sapien
ccagcccatcagctgctgcttccat

SEQ ID NO: 699199 - DNA, 25 bp, Homo sapien
ctgggggaccagcccatcagctgct

SEQ ID NO: 699200 - DNA, 25 bp, Homo sapien
ccgaaaggaggcacgatgaggctga

SEQ ID NO: 699201 - DNA, 25 bp, Homo sapien
ctgaagaaggacacctgagcaccgt

SEQ ID NO: 699202 - DNA, 25 bp, Homo sapien
cgggtagtgcccgaaaggaggcacg

SEQ ID NO: 699203 - DNA, 25 bp, Homo sapien
cctgagcaccgtacatggtgggact

SEQ ID NO: 699204 - DNA, 25 bp, Homo sapien
ctcgagcagccgggcacgtccaggg

SEQ ID NO: 699205 - DNA, 25 bp, Homo sapien
cagcgcctcgagcagccgggcacgt

SEQ ID NO: 699206 - DNA, 25 bp, Homo sapien
gcgcctcgagcagccgggcacgtcc

SEQ ID NO: 699207 - DNA, 25 bp, Homo sapien
cgagcagccgggcacgtccagggtc

SEQ ID NO: 699208 - DNA, 25 bp, Homo sapien
caggcgcgggtaggtcttgaccagg

SEQ ID NO: 699209 - DNA, 25 bp, Homo sapien
gggtccagttgccactggccaagac

SEQ ID NO: 699210 - DNA, 25 bp, Homo sapien
caggttctgaaccacttccccagag

SEQ ID NO: 699211 - DNA, 25 bp, Homo sapien
gaagtcagacaggttccggcctgtc

SEQ ID NO: 699212 - DNA, 25 bp, Homo sapien
cctcattcacccacttcttagtctt

SEQ ID NO: 699213 - DNA, 25 bp, Homo sapien
attcacccacttcttagtcttcagg

SEQ ID NO: 699214 - DNA, 25 bp, Homo sapien
acctcattcacccacttcttagtct

SEQ ID NO: 699215 - DNA, 25 bp, Homo sapien
tcattcacccacttcttagtcttca

SEQ ID NO: 699216 - DNA, 25 bp, Homo sapien
tccactgagcggcccaactcttggc

SEQ ID NO: 699217 - DNA, 25 bp, Homo sapien
aggggactcagcagcgcccacaact

SEQ ID NO: 699218 - DNA, 25 bp, Homo sapien
gctgtgaggtttttcaggacacggt

SEQ ID NO: 699219 - DNA, 25 bp, Homo sapien
ttcaggacacggtcgagggccccgc

SEQ ID NO: 699220 - DNA, 25 bp, Homo sapien
gcacggaggattgcgttgctggctc

SEQ ID NO: 699221 - DNA, 25 bp, Homo sapien
gattgcgttgctggctcggttgaca

SEQ ID NO: 699222 - DNA, 25 bp, Homo sapien
gacaaaggccaccatggagtgccag

SEQ ID NO: 699223 - DNA, 25 bp, Homo sapien
tggtgatgctgtgggcgtggcgggc

SEQ ID NO: 699224 - DNA, 25 bp, Homo sapien
cacacagatggagacgaggacgtcc

SEQ ID NO: 699225 - DNA, 25 bp, Homo sapien
gagaaagttgccaagccagtagagg

SEQ ID NO: 699226 - DNA, 25 bp, Homo sapien
cgggtgactcgctcctcaatgagga

SEQ ID NO: 699227 - DNA, 25 bp, Homo sapien
catgtcccagagaaagttgccaagc

SEQ ID NO: 699228 - DNA, 25 bp, Homo sapien
cagaaagatgagcaccacgatgcat

SEQ ID NO: 699229 - DNA, 25 bp, Homo sapien
agaaagatgagcaccacgatgcatg

SEQ ID NO: 699230 - DNA, 25 bp, Homo sapien
ggaaggccagaaagatgagcaccac

SEQ ID NO: 699231 - DNA, 25 bp, Homo sapien
gaaagatgagcaccacgatgcatgc

SEQ ID NO: 699232 - DNA, 25 bp, Homo sapien
tgggagtcactgcagagttctatct

SEQ ID NO: 699233 - DNA, 25 bp, Homo sapien
tcagtaagaataggccctgagggac

SEQ ID NO: 699234 - DNA, 25 bp, Homo sapien
caggcatgggctgccttagaactct

SEQ ID NO: 699235 - DNA, 25 bp, Homo sapien
atctcagcagcattaatgtggaagg

SEQ ID NO: 699236 - DNA, 25 bp, Homo sapien
ggagtcactggagtaaccactcaga

SEQ ID NO: 699237 - DNA, 25 bp, Homo sapien
caataggagtcactggagtaaccac

SEQ ID NO: 699238 - DNA, 25 bp, Homo sapien
aataggagtcactggagtaaccact

SEQ ID NO: 699239 - DNA, 25 bp, Homo sapien
gacaataggagtcactggagtaacc

SEQ ID NO: 699240 - DNA, 25 bp, Homo sapien
gtacatgagcggtgtgatcgaccag

SEQ ID NO: 699241 - DNA, 25 bp, Homo sapien
agagaagagctcaagcacaaaggtg

SEQ ID NO: 699242 - DNA, 25 bp, Homo sapien
gagaagagctcaagcacaaaggtgg

SEQ ID NO: 699243 - DNA, 25 bp, Homo sapien
agaagagctcaagcacaaaggtggc

SEQ ID NO: 699244 - DNA, 25 bp, Homo sapien
agccatggcctggttccgcaccatg

SEQ ID NO: 699245 - DNA, 25 bp, Homo sapien
ggttccgcaccatgtcaatgagccc

SEQ ID NO: 699246 - DNA, 25 bp, Homo sapien
gaagacctgtttcaagatccggctc

SEQ ID NO: 699247 - DNA, 25 bp, Homo sapien
aggaagacctgtttcaagatccggc

SEQ ID NO: 699248 - DNA, 25 bp, Homo sapien
caagggtgctagctatctgtagcca

SEQ ID NO: 699249 - DNA, 25 bp, Homo sapien
catgagagtcttggtttctggccct

SEQ ID NO: 699250 - DNA, 25 bp, Homo sapien
aattaactctaggtctccaagggtg

SEQ ID NO: 699251 - DNA, 25 bp, Homo sapien
aacacaaattggataggccactcag

SEQ ID NO: 699252 - DNA, 25 bp, Homo sapien
ggccaagaggttcttgccgaccacc

SEQ ID NO: 699253 - DNA, 25 bp, Homo sapien
gccaagaggttcttgccgaccacct

SEQ ID NO: 699254 - DNA, 25 bp, Homo sapien
ccaagaggttcttgccgaccacctc

SEQ ID NO: 699255 - DNA, 25 bp, Homo sapien
tggccaagaggttcttgccgaccac

SEQ ID NO: 699256 - DNA, 25 bp, Homo sapien
gaaggaagaggggcccctgtatcac

SEQ ID NO: 699257 - DNA, 25 bp, Homo sapien
agaaggaagaggggcccctgtatca

SEQ ID NO: 699258 - DNA, 25 bp, Homo sapien
agagaaggaagaggggcccctgtat

SEQ ID NO: 699259 - DNA, 25 bp, Homo sapien
gagaaggaagaggggcccctgtatc

SEQ ID NO: 699260 - DNA, 25 bp, Homo sapien
agttggcttcggtgctgcagcagta

SEQ ID NO: 699261 - DNA, 25 bp, Homo sapien
gtggcaggagttggcttcggtgctg

SEQ ID NO: 699262 - DNA, 25 bp, Homo sapien
ttggcttcggtgctgcagcagtagt

SEQ ID NO: 699263 - DNA, 25 bp, Homo sapien
caggagttggcttcggtgctgcagc

SEQ ID NO: 699264 - DNA, 25 bp, Homo sapien
tctgtgggcttaaagtaggtccttg

SEQ ID NO: 699265 - DNA, 25 bp, Homo sapien
ctgccaccctctccatagacctcac

SEQ ID NO: 699266 - DNA, 25 bp, Homo sapien
ctggggacagaatatctgtgggctt

SEQ ID NO: 699267 - DNA, 25 bp, Homo sapien
taaagtaggtccttggcccctgcca

SEQ ID NO: 699268 - DNA, 25 bp, Homo sapien
aggagtggcagagacctcaccctgg

SEQ ID NO: 699269 - DNA, 25 bp, Homo sapien
gagtggcagagacctcaccctgggc

SEQ ID NO: 699270 - DNA, 25 bp, Homo sapien
ggagtggcagagacctcaccctggg

SEQ ID NO: 699271 - DNA, 25 bp, Homo sapien
tcagcaccaacacatccccctgggt

SEQ ID NO: 699272 - DNA, 25 bp, Homo sapien
cacccgctcccgttcacgggctaca

SEQ ID NO: 699273 - DNA, 25 bp, Homo sapien
gttcacgggctacatcctcgtcctc

SEQ ID NO: 699274 - DNA, 25 bp, Homo sapien
cgctcccgttcacgggctacatcct

SEQ ID NO: 699275 - DNA, 25 bp, Homo sapien
ccccacccagcagtcgacctgacca

SEQ ID NO: 699276 - DNA, 25 bp, Homo sapien
cagcagtcgacctgaccacacctac

SEQ ID NO: 699277 - DNA, 25 bp, Homo sapien
tgggagagtgcaggtctttcagaaa

SEQ ID NO: 699278 - DNA, 25 bp, Homo sapien
gtctttcagaaaggtgagtgggcca

SEQ ID NO: 699279 - DNA, 25 bp, Homo sapien
caggcacaagcggtcaacagctggc

SEQ ID NO: 699280 - DNA, 25 bp, Homo sapien
agcggtcaacagctggcatcctctg

SEQ ID NO: 699281 - DNA, 25 bp, Homo sapien
acaagcggtcaacagctggcatcct

SEQ ID NO: 699282 - DNA, 25 bp, Homo sapien
ggcacaagcggtcaacagctggcat

SEQ ID NO: 699283 - DNA, 25 bp, Homo sapien
taggtgcccaataaaaggtggtgga

SEQ ID NO: 699284 - DNA, 25 bp, Homo sapien
tgttcagtaaaggatgatgggcagg

SEQ ID NO: 699285 - DNA, 25 bp, Homo sapien
taaaaataggagcacaaatattggc

SEQ ID NO: 699286 - DNA, 25 bp, Homo sapien
taggagcacaaatattggcatacag

SEQ ID NO: 699287 - DNA, 25 bp, Homo sapien
gaaacgtggacgtcttccctgctcc

SEQ ID NO: 699288 - DNA, 25 bp, Homo sapien
catgcgaaacgtggacgtcttccct

SEQ ID NO: 699289 - DNA, 25 bp, Homo sapien
ccgtcaccatgcgaaacgtggacgt

SEQ ID NO: 699290 - DNA, 25 bp, Homo sapien
acgtggacgtcttccctgctccatt

SEQ ID NO: 699291 - DNA, 25 bp, Homo sapien
ctgaggtgcgcagcactgggttccc

SEQ ID NO: 699292 - DNA, 25 bp, Homo sapien
caaagatggcatcggattgagggca

SEQ ID NO: 699293 - DNA, 25 bp, Homo sapien
cagtatcccatgctgaggtgcgcag

SEQ ID NO: 699294 - DNA, 25 bp, Homo sapien
cggcccgtcagcagctcaaagatgg

SEQ ID NO: 699295 - DNA, 25 bp, Homo sapien
ggacagaggtataggggaaggaagc

SEQ ID NO: 699296 - DNA, 25 bp, Homo sapien
gttccctccgctgtaggtgcctgca

SEQ ID NO: 699297 - DNA, 25 bp, Homo sapien
cagcttgcgtttgttccctccgctg

SEQ ID NO: 699298 - DNA, 25 bp, Homo sapien
atgagagtcccagacgcgccaggcc

SEQ ID NO: 699299 - DNA, 25 bp, Homo sapien
gcctgcaggccggtctgcgtaccat

SEQ ID NO: 699300 - DNA, 25 bp, Homo sapien
ctatgggaggtgagcatcactgaac

SEQ ID NO: 699301 - DNA, 25 bp, Homo sapien
gttccaaaggaagcgccgcgcgctg

SEQ ID NO: 699302 - DNA, 25 bp, Homo sapien
gcaccacggccaaaaggctgttcca

SEQ ID NO: 699303 - DNA, 25 bp, Homo sapien
ggtgagcatcactgaacggccctcc

SEQ ID NO: 699304 - DNA, 25 bp, Homo sapien
aaccacagcccagggcatcagagcc

SEQ ID NO: 699305 - DNA, 25 bp, Homo sapien
acagcccagggcatcagagcccggc

SEQ ID NO: 699306 - DNA, 25 bp, Homo sapien
ttaaccacagcccagggcatcagag

SEQ ID NO: 699307 - DNA, 25 bp, Homo sapien
gcccagggcatcagagcccggccca

SEQ ID NO: 699308 - DNA, 25 bp, Homo sapien
gtgcctggcgccacactgcctgctt

SEQ ID NO: 699309 - DNA, 25 bp, Homo sapien
tcgggacccggcaccacgagctccg

SEQ ID NO: 699310 - DNA, 25 bp, Homo sapien
ctgtcgggacccggcaccacgagct

SEQ ID NO: 699311 - DNA, 25 bp, Homo sapien
ccacctgtgcctggcgccacactgc

SEQ ID NO: 699312 - DNA, 25 bp, Homo sapien
cccttgagatgttgcgggctgccca

SEQ ID NO: 699313 - DNA, 25 bp, Homo sapien
gcggaaccgcccattcaccatgatg

SEQ ID NO: 699314 - DNA, 25 bp, Homo sapien
ctgcccttgagatgttgcgggctgc

SEQ ID NO: 699315 - DNA, 25 bp, Homo sapien
agcagagcgcttcacactcctccat

SEQ ID NO: 699316 - DNA, 25 bp, Homo sapien
tccctaggttgcccaggttgctctc

SEQ ID NO: 699317 - DNA, 25 bp, Homo sapien
tctccctaggttgcccaggttgctc

SEQ ID NO: 699318 - DNA, 25 bp, Homo sapien
ggtctccctaggttgcccaggttgc

SEQ ID NO: 699319 - DNA, 25 bp, Homo sapien
gtctccctaggttgcccaggttgct

SEQ ID NO: 699320 - DNA, 25 bp, Homo sapien
ttgcggcgggcacccgcagggtcag

SEQ ID NO: 699321 - DNA, 25 bp, Homo sapien
tgcggcgggcacccgcagggtcagt

SEQ ID NO: 699322 - DNA, 25 bp, Homo sapien
cttgcggcgggcacccgcagggtca

SEQ ID NO: 699323 - DNA, 25 bp, Homo sapien
ggtcagtgtgtgacccgccgcgaat

SEQ ID NO: 699324 - DNA, 25 bp, Homo sapien
acggaaaagtcctccacgccgtgct

SEQ ID NO: 699325 - DNA, 25 bp, Homo sapien
aggcggcctccatgtgcctcgcgca

SEQ ID NO: 699326 - DNA, 25 bp, Homo sapien
aactcggccgccacgaaggccgctg

SEQ ID NO: 699327 - DNA, 25 bp, Homo sapien
ctcctccagcatcgtctggctcacg

SEQ ID NO: 699328 - DNA, 25 bp, Homo sapien
tccttctgctcttcggtgtcctcgt

SEQ ID NO: 699329 - DNA, 25 bp, Homo sapien
tgcctccttctgctcttcggtgtcc

SEQ ID NO: 699330 - DNA, 25 bp, Homo sapien
tctgctcttcggtgtcctcgtcctt

SEQ ID NO: 699331 - DNA, 25 bp, Homo sapien
tggcgcggggtccactcccactcct

SEQ ID NO: 699332 - DNA, 25 bp, Homo sapien
tcagagcacagtctcggcagtgcta

SEQ ID NO: 699333 - DNA, 25 bp, Homo sapien
catcgaggaactggctgacgcgttt

SEQ ID NO: 699334 - DNA, 25 bp, Homo sapien
gtcatcgaggaactggctgacgcgt

SEQ ID NO: 699335 - DNA, 25 bp, Homo sapien
tctcggcagtgctagggtcatcgag

SEQ ID NO: 699336 - DNA, 25 bp, Homo sapien
gctcctaggcactctaccttgccct

SEQ ID NO: 699337 - DNA, 25 bp, Homo sapien
tgccagcctgagtccagggctccta

SEQ ID NO: 699338 - DNA, 25 bp, Homo sapien
agggctcctaggcactctaccttgc

SEQ ID NO: 699339 - DNA, 25 bp, Homo sapien
gagtccagggctcctaggcactcta

SEQ ID NO: 699340 - DNA, 25 bp, Homo sapien
tggtgtggaccccaccatcggcaga

SEQ ID NO: 699341 - DNA, 25 bp, Homo sapien
aaagtgtggtgtggaccccaccatc

SEQ ID NO: 699342 - DNA, 25 bp, Homo sapien
ccccaccatcggcagaatatgctga

SEQ ID NO: 699343 - DNA, 25 bp, Homo sapien
cacaggggtccccaaagtgtggtgt

SEQ ID NO: 699344 - DNA, 25 bp, Homo sapien
acgtgacaggcccggccgtcactgg

SEQ ID NO: 699345 - DNA, 25 bp, Homo sapien
tcgggaccacattgtcgccggccac

SEQ ID NO: 699346 - DNA, 25 bp, Homo sapien
ctccccagctgtcaggcccacgtga

SEQ ID NO: 699347 - DNA, 25 bp, Homo sapien
gcgctggccgcttcgggaccacatt

SEQ ID NO: 699348 - DNA, 25 bp, Homo sapien
ttcatgagctctcgtttcttcctgg

SEQ ID NO: 699349 - DNA, 25 bp, Homo sapien
tggaaggggttttcatgagctctcg

SEQ ID NO: 699350 - DNA, 25 bp, Homo sapien
tcccgcgcggttctttttcgagatg

SEQ ID NO: 699351 - DNA, 25 bp, Homo sapien
gggttttcatgagctctcgtttctt

SEQ ID NO: 699352 - DNA, 25 bp, Homo sapien
ccggtaggggctgtagctggcacga

SEQ ID NO: 699353 - DNA, 25 bp, Homo sapien
cgcccggtaggggctgtagctggca

SEQ ID NO: 699354 - DNA, 25 bp, Homo sapien
ctgccgtcccgcccggtaggggctg

SEQ ID NO: 699355 - DNA, 25 bp, Homo sapien
tcccgcccggtaggggctgtagctg

SEQ ID NO: 699356 - DNA, 25 bp, Homo sapien
ccctagagctttcacaaacaacggt

SEQ ID NO: 699357 - DNA, 25 bp, Homo sapien
tcacaaacaacggtccttgcccaaa

SEQ ID NO: 699358 - DNA, 25 bp, Homo sapien
ttacccaacatcctcttccctagag

SEQ ID NO: 699359 - DNA, 25 bp, Homo sapien
gagctttcacaaacaacggtccttg

SEQ ID NO: 699360 - DNA, 25 bp, Homo sapien
tttccggcctggacacggcctcagt

SEQ ID NO: 699361 - DNA, 25 bp, Homo sapien
tccggcctggacacggcctcagttt

SEQ ID NO: 699362 - DNA, 25 bp, Homo sapien
caggtccgaggggagctcgttaaag

SEQ ID NO: 699363 - DNA, 25 bp, Homo sapien
gattttccggcctggacacggcctc

SEQ ID NO: 699364 - DNA, 25 bp, Homo sapien
ggaacaccgcgtcagccccatcctt

SEQ ID NO: 699365 - DNA, 25 bp, Homo sapien
tggtccggggaacaccgcgtcagcc

SEQ ID NO: 699366 - DNA, 25 bp, Homo sapien
cttggtccggggaacaccgcgtcag

SEQ ID NO: 699367 - DNA, 25 bp, Homo sapien
ggggaacaccgcgtcagccccatcc

SEQ ID NO: 699368 - DNA, 25 bp, Homo sapien
tccctgtggccttgacgccggagga

SEQ ID NO: 699369 - DNA, 25 bp, Homo sapien
tttctcaaggccctcagcgaagcgg

SEQ ID NO: 699370 - DNA, 25 bp, Homo sapien
tggcggctgtcagtgggctccggtg

SEQ ID NO: 699371 - DNA, 25 bp, Homo sapien
cagcagatgggagatgtcctcgacg

SEQ ID NO: 699372 - DNA, 25 bp, Homo sapien
tgcgccgtcccgcagatacacatgg

SEQ ID NO: 699373 - DNA, 25 bp, Homo sapien
gcagatacacatggcgcagccgtcg

SEQ ID NO: 699374 - DNA, 25 bp, Homo sapien
cttaaccgcagagcttcgaggtggg

SEQ ID NO: 699375 - DNA, 25 bp, Homo sapien
gcctgggtccttccttaaccgcaga

SEQ ID NO: 699376 - DNA, 25 bp, Homo sapien
gtacttggagatgatctgatgcatg

SEQ ID NO: 699377 - DNA, 25 bp, Homo sapien
tgccggctgcggtgagcgtctccac

SEQ ID NO: 699378 - DNA, 25 bp, Homo sapien
ccacggtgttcagcagcgggtactt

SEQ ID NO: 699379 - DNA, 25 bp, Homo sapien
gatctgatgcatgacacgcagagcc

SEQ ID NO: 699380 - DNA, 25 bp, Homo sapien
tgaaggccacagcaatcgtctccag

SEQ ID NO: 699381 - DNA, 25 bp, Homo sapien
aggccacagcaatcgtctccagggc

SEQ ID NO: 699382 - DNA, 25 bp, Homo sapien
cctgtttctccagatcattgttgct

SEQ ID NO: 699383 - DNA, 25 bp, Homo sapien
tcattgttgctctcataatggaagg

SEQ ID NO: 699384 - DNA, 25 bp, Homo sapien
tgctgctgtccacttcacccatgag

SEQ ID NO: 699385 - DNA, 25 bp, Homo sapien
ctgctgtccacttcacccatgagga

SEQ ID NO: 699386 - DNA, 25 bp, Homo sapien
gctgctgtccacttcacccatgagg

SEQ ID NO: 699387 - DNA, 25 bp, Homo sapien
gtgctgctgtccacttcacccatga

SEQ ID NO: 699388 - DNA, 25 bp, Homo sapien
ccggtccatacaggctttccatgga

SEQ ID NO: 699389 - DNA, 25 bp, Homo sapien
aggctgggaggcgtgccctcactgc

SEQ ID NO: 699390 - DNA, 25 bp, Homo sapien
tcactgcccggtccatacaggcttt

SEQ ID NO: 699391 - DNA, 25 bp, Homo sapien
ggcgtcacagtcttccaggctggga

SEQ ID NO: 699392 - DNA, 25 bp, Homo sapien
agcagtgcggcatccacgcccccct

SEQ ID NO: 699393 - DNA, 25 bp, Homo sapien
cagcgtcgtccgcttctccaggtag

SEQ ID NO: 699394 - DNA, 25 bp, Homo sapien
tcacagcgctgtagcagcacgtcca

SEQ ID NO: 699395 - DNA, 25 bp, Homo sapien
cccctcacagcgctgtagcagcacg

SEQ ID NO: 699396 - DNA, 25 bp, Homo sapien
ctgcagttgtgagcgatcttctgca

SEQ ID NO: 699397 - DNA, 25 bp, Homo sapien
catgacgctctgtctgcagttgtga

SEQ ID NO: 699398 - DNA, 25 bp, Homo sapien
ctgcatgacgctctgtctgcagttg

SEQ ID NO: 699399 - DNA, 25 bp, Homo sapien
gttgtgagcgatcttctgcaggccc

SEQ ID NO: 699400 - DNA, 25 bp, Homo sapien
aggtctgggtctgcaaggtgcccac

SEQ ID NO: 699401 - DNA, 25 bp, Homo sapien
cagggccagcgagtagatggacagg

SEQ ID NO: 699402 - DNA, 25 bp, Homo sapien
tgcaccatgctgtggccgaactcca

SEQ ID NO: 699403 - DNA, 25 bp, Homo sapien
gggtctgcaaggtgcccaccgcctg

SEQ ID NO: 699404 - DNA, 25 bp, Homo sapien
tgcgcttctcgtgttcaagccgccg

SEQ ID NO: 699405 - DNA, 25 bp, Homo sapien
ccttcctgcgcttctcgtgttcaag

SEQ ID NO: 699406 - DNA, 25 bp, Homo sapien
tctcgtgttcaagccgccgcagggt

SEQ ID NO: 699407 - DNA, 25 bp, Homo sapien
gatctccttcctgcgcttctcgtgt

SEQ ID NO: 699408 - DNA, 25 bp, Homo sapien
agttccaaccctatcctcggatggg

SEQ ID NO: 699409 - DNA, 25 bp, Homo sapien
caatcggcagcggaaaaacaggagg

SEQ ID NO: 699410 - DNA, 25 bp, Homo sapien
ctagaatcgcgaacagcttgaaccc

SEQ ID NO: 699411 - DNA, 25 bp, Homo sapien
agaggaccctgcacaacaatcggca

SEQ ID NO: 699412 - DNA, 25 bp, Homo sapien
agcgctgcacgtaaccctgcttggc

SEQ ID NO: 699413 - DNA, 25 bp, Homo sapien
ttggccttgcgcaggttggactccg

SEQ ID NO: 699414 - DNA, 25 bp, Homo sapien
gagccttgtcgtggtcctcgcagcg

SEQ ID NO: 699415 - DNA, 25 bp, Homo sapien
ttggccacgaggaagcgagccttgt

SEQ ID NO: 699416 - DNA, 25 bp, Homo sapien
ctctgccggatgacctcctggatct

SEQ ID NO: 699417 - DNA, 25 bp, Homo sapien
tgcttctgcgtcttcgcgtcggcca

SEQ ID NO: 699418 - DNA, 25 bp, Homo sapien
tgccgcagcgccgtcaccttggtat

SEQ ID NO: 699419 - DNA, 25 bp, Homo sapien
gacttgatggtttggtcgctctgcc

SEQ ID NO: 699420 - DNA, 25 bp, Homo sapien
cacgtgggaggcgtactgctggcct

SEQ ID NO: 699421 - DNA, 25 bp, Homo sapien
aaagtcgtagtgcacatcgggctcc

SEQ ID NO: 699422 - DNA, 25 bp, Homo sapien
acagcatctggaagtgcacgggcag

SEQ ID NO: 699423 - DNA, 25 bp, Homo sapien
agcggcgccgtctgcatatgcatca

SEQ ID NO: 699424 - DNA, 25 bp, Homo sapien
cagtgcacccgccttcttctggggg

SEQ ID NO: 699425 - DNA, 25 bp, Homo sapien
ctcttccgggcacgcatgacggggg

SEQ ID NO: 699426 - DNA, 25 bp, Homo sapien
ccacatcactcacgttgaagctgct

SEQ ID NO: 699427 - DNA, 25 bp, Homo sapien
ggccgcgccacatcactcacgttga

SEQ ID NO: 699428 - DNA, 25 bp, Homo sapien
gcggccatgacttgtgaacctggtg

SEQ ID NO: 699429 - DNA, 25 bp, Homo sapien
tctgagatcgagagcggccatgact

SEQ ID NO: 699430 - DNA, 25 bp, Homo sapien
gggtccagcccactgtccgagtctg

SEQ ID NO: 699431 - DNA, 25 bp, Homo sapien
gcccactgtccgagtctgagatcga

SEQ ID NO: 699432 - DNA, 25 bp, Homo sapien
tccgtggacgacatggtaccactgg

SEQ ID NO: 699433 - DNA, 25 bp, Homo sapien
gtaccactggatgacgtccgctcga

SEQ ID NO: 699434 - DNA, 25 bp, Homo sapien
gctcctccgtggacgacatggtacc

SEQ ID NO: 699435 - DNA, 25 bp, Homo sapien
tgacgtccgctcgaacttcttaaag

SEQ ID NO: 699436 - DNA, 25 bp, Homo sapien
ttggacagcccctcgtggcggaacg

SEQ ID NO: 699437 - DNA, 25 bp, Homo sapien
cggaacggtccactgggcacggcca

SEQ ID NO: 699438 - DNA, 25 bp, Homo sapien
agtagacgtagctgttgcactcgcg

SEQ ID NO: 699439 - DNA, 25 bp, Homo sapien
tgagtacgggccgccttggacagcc

SEQ ID NO: 699440 - DNA, 25 bp, Homo sapien
ttctgcaaacacaagctggacagtg

SEQ ID NO: 699441 - DNA, 25 bp, Homo sapien
tggacagtggctcgtggcttccacc

SEQ ID NO: 699442 - DNA, 25 bp, Homo sapien
gcctcgctgcctcagagagccaacc

SEQ ID NO: 699443 - DNA, 25 bp, Homo sapien
agagagccaaccctgctccccagaa

SEQ ID NO: 699444 - DNA, 25 bp, Homo sapien
cagacgcacttcttgacgatgaagg

SEQ ID NO: 699445 - DNA, 25 bp, Homo sapien
tgcccgcactgtatggccagcgtct

SEQ ID NO: 699446 - DNA, 25 bp, Homo sapien
ctggccgaacagctgcaggcggcct

SEQ ID NO: 699447 - DNA, 25 bp, Homo sapien
aggcggccttgcagcttcttgtgcc

SEQ ID NO: 699448 - DNA, 25 bp, Homo sapien
tccacgcgtgtctttaccccattga

SEQ ID NO: 699449 - DNA, 25 bp, Homo sapien
tgccgttctcgaaggcctggcacag

SEQ ID NO: 699450 - DNA, 25 bp, Homo sapien
tagagcttgaggacgttgctgatgt

SEQ ID NO: 699451 - DNA, 25 bp, Homo sapien
gaggcctgcgacagctcgaccagct

SEQ ID NO: 699452 - DNA, 25 bp, Homo sapien
ggcccggttctcaggcggcaggtcc

SEQ ID NO: 699453 - DNA, 25 bp, Homo sapien
gctcgtggtagaggcggaaggagat

SEQ ID NO: 699454 - DNA, 25 bp, Homo sapien
aggagctcccgcagccgacctgcca

SEQ ID NO: 699455 - DNA, 25 bp, Homo sapien
cttggccagccctacgagctcgtgg

SEQ ID NO: 699456 - DNA, 25 bp, Homo sapien
cgccctccactccatatgccgggac

SEQ ID NO: 699457 - DNA, 25 bp, Homo sapien
ctccactccatatgccgggactcac

SEQ ID NO: 699458 - DNA, 25 bp, Homo sapien
cctccactccatatgccgggactca

SEQ ID NO: 699459 - DNA, 25 bp, Homo sapien
gccctccactccatatgccgggact

SEQ ID NO: 699460 - DNA, 25 bp, Homo sapien
tcggtgggccgtggccgaagcagcg

SEQ ID NO: 699461 - DNA, 25 bp, Homo sapien
gacacggtggcctcggtgggccgtg

SEQ ID NO: 699462 - DNA, 25 bp, Homo sapien
gggcccgaacacgatgcccaggttc

SEQ ID NO: 699463 - DNA, 25 bp, Homo sapien
gatggggataatccaccagggagga

SEQ ID NO: 699464 - DNA, 25 bp, Homo sapien
tagtggacgatgagagtctcgatga

SEQ ID NO: 699465 - DNA, 25 bp, Homo sapien
tggacgatgagagtctcgatgacgc

SEQ ID NO: 699466 - DNA, 25 bp, Homo sapien
ccgtagtggacgatgagagtctcga

SEQ ID NO: 699467 - DNA, 25 bp, Homo sapien
aagaccaggccgtagtggacgatga

SEQ ID NO: 699468 - DNA, 25 bp, Homo sapien
acctcagctcgctggttggatgact

SEQ ID NO: 699469 - DNA, 25 bp, Homo sapien
tccaggtacggcacctggacgacta

SEQ ID NO: 699470 - DNA, 25 bp, Homo sapien
tggacgactacctcagctcgctggt

SEQ ID NO: 699471 - DNA, 25 bp, Homo sapien
tacggcacctggacgactacctcag

SEQ ID NO: 699472 - DNA, 25 bp, Homo sapien
ccgcctcctgcagcgggtagaccac

SEQ ID NO: 699473 - DNA, 25 bp, Homo sapien
ctcctgcagcgggtagaccaccgcc

SEQ ID NO: 699474 - DNA, 25 bp, Homo sapien
tcctgcagcgggtagaccaccgcct

SEQ ID NO: 699475 - DNA, 25 bp, Homo sapien
tgcagcgggtagaccaccgcctcgc

SEQ ID NO: 699476 - DNA, 25 bp, Homo sapien
ggagtttccggacacaagctctccc

SEQ ID NO: 699477 - DNA, 25 bp, Homo sapien
cagctacatggaactgtaactccat

SEQ ID NO: 699478 - DNA, 25 bp, Homo sapien
ccccagctacatggaactgtaactc

SEQ ID NO: 699479 - DNA, 25 bp, Homo sapien
gcctgccaccatccatgcaagatgt

SEQ ID NO: 699480 - DNA, 25 bp, Homo sapien
cggaggcctcctctaggtccgagtc

SEQ ID NO: 699481 - DNA, 25 bp, Homo sapien
gctgccagaagccacctctaggctg

SEQ ID NO: 699482 - DNA, 25 bp, Homo sapien
cgaatcgttggacacaactcgggat

SEQ ID NO: 699483 - DNA, 25 bp, Homo sapien
cgttgttggactggttggtgttgaa

SEQ ID NO: 699484 - DNA, 25 bp, Homo sapien
tgctgtactgcaccctggaaactgc

SEQ ID NO: 699485 - DNA, 25 bp, Homo sapien
gagagaccccactgtgtacctgagc

SEQ ID NO: 699486 - DNA, 25 bp, Homo sapien
gaaccacacggtggcttccgagaga

SEQ ID NO: 699487 - DNA, 25 bp, Homo sapien
tgtgacttcacacgacagcagtgtt

SEQ ID NO: 699488 - DNA, 25 bp, Homo sapien
cagagtgtgtcatgtgcacagtttt

SEQ ID NO: 699489 - DNA, 25 bp, Homo sapien
gacagagtgtgtcatgtgcacagtt

SEQ ID NO: 699490 - DNA, 25 bp, Homo sapien
gggacagagtgtgtcatgtgcacag

SEQ ID NO: 699491 - DNA, 25 bp, Homo sapien
gaggggacagagtgtgtcatgtgca

SEQ ID NO: 699492 - DNA, 25 bp, Homo sapien
agatgtaattcaccctcgggcggtc

SEQ ID NO: 699493 - DNA, 25 bp, Homo sapien
ggtggtctgtaacgcgcccactgtt

SEQ ID NO: 699494 - DNA, 25 bp, Homo sapien
cactagagtcgtcagagactggaag

SEQ ID NO: 699495 - DNA, 25 bp, Homo sapien
ggaggtcactagagtcgtcagagac

SEQ ID NO: 699496 - DNA, 25 bp, Homo sapien
gggtcttcacccagaccacgctggg

SEQ ID NO: 699497 - DNA, 25 bp, Homo sapien
attcacagccatgcacgcgctcaag

SEQ ID NO: 699498 - DNA, 25 bp, Homo sapien
accagggtgcgagatgccagctctg

SEQ ID NO: 699499 - DNA, 25 bp, Homo sapien
cattcacctgtggatttgtgcgaga

SEQ ID NO: 699500 - DNA, 25 bp, Homo sapien
tctccaactcgcagaaaagtgtccc

SEQ ID NO: 699501 - DNA, 25 bp, Homo sapien
tgagccaaaggctcggccgggattt

SEQ ID NO: 699502 - DNA, 25 bp, Homo sapien
gggtttggtttctccaactcgcaga

SEQ ID NO: 699503 - DNA, 25 bp, Homo sapien
agcgaacctcccgtctctgcttccc

SEQ ID NO: 699504 - DNA, 25 bp, Homo sapien
aatggacgcgcgtcggctttccgcg

SEQ ID NO: 699505 - DNA, 25 bp, Homo sapien
ccgaccaatggacgcgcgtcggctt

SEQ ID NO: 699506 - DNA, 25 bp, Homo sapien
tcagacgcgtcggtgttgagcgctc

SEQ ID NO: 699507 - DNA, 25 bp, Homo sapien
ccctccagagcgctcattggtcaga

SEQ ID NO: 699508 - DNA, 25 bp, Homo sapien
gtaggcggcaaaggcggccgaggct

SEQ ID NO: 699509 - DNA, 25 bp, Homo sapien
ttcagtaggcggcaaaggcggccga

SEQ ID NO: 699510 - DNA, 25 bp, Homo sapien
gagcagcgccggcttcagtaggcgg

SEQ ID NO: 699511 - DNA, 25 bp, Homo sapien
agcgccggcttcagtaggcggcaaa

SEQ ID NO: 699512 - DNA, 25 bp, Homo sapien
cccgagcgccgctagcggggacaaa

SEQ ID NO: 699513 - DNA, 25 bp, Homo sapien
caaagggcccggaggccgtagtcag

SEQ ID NO: 699514 - DNA, 25 bp, Homo sapien
cgcgtgatccgggatttccagccct

SEQ ID NO: 699515 - DNA, 25 bp, Homo sapien
tcaggactgcgcgactgtgacgcca

SEQ ID NO: 699516 - DNA, 25 bp, Homo sapien
ttgggacattcgtggatctccggtc

SEQ ID NO: 699517 - DNA, 25 bp, Homo sapien
ggacattcgtggatctccggtcgca

SEQ ID NO: 699518 - DNA, 25 bp, Homo sapien
cgtggatctccggtcgcaagctgcg

SEQ ID NO: 699519 - DNA, 25 bp, Homo sapien
cattcgtggatctccggtcgcaagc

SEQ ID NO: 699520 - DNA, 25 bp, Homo sapien
gcagggagcgtggacgggaggctga

SEQ ID NO: 699521 - DNA, 25 bp, Homo sapien
gagcagggagcgtggacgggaggct

SEQ ID NO: 699522 - DNA, 25 bp, Homo sapien
gagcgtggacgggaggctgagcccg

SEQ ID NO: 699523 - DNA, 25 bp, Homo sapien
ctgagcagggagcgtggacgggagg

SEQ ID NO: 699524 - DNA, 25 bp, Homo sapien
ttgtccaggttaaccatgtgcccgt

SEQ ID NO: 699525 - DNA, 25 bp, Homo sapien
gtccttggcggaaaactcgtgcatg

SEQ ID NO: 699526 - DNA, 25 bp, Homo sapien
ggaaaactcgtgcatggagcgcgca

SEQ ID NO: 699527 - DNA, 25 bp, Homo sapien
aaccatgtgcccgtcgatgtccttg

SEQ ID NO: 699528 - DNA, 25 bp, Homo sapien
aggatcggcggcgtcagcgcagaag

SEQ ID NO: 699529 - DNA, 25 bp, Homo sapien
cggcgtcagcgcagaagaacacggc

SEQ ID NO: 699530 - DNA, 25 bp, Homo sapien
gcgccccaccccaggcgagcgccca

SEQ ID NO: 699531 - DNA, 25 bp, Homo sapien
ctgcgaggatcggcggcgtcagcgc

SEQ ID NO: 699532 - DNA, 25 bp, Homo sapien
gttggtgacgatgcacacgaagccc

SEQ ID NO: 699533 - DNA, 25 bp, Homo sapien
gagtgtagtttacttcggtcttgcc

SEQ ID NO: 699534 - DNA, 25 bp, Homo sapien
tgtagtttacttcggtcttgcctca

SEQ ID NO: 699535 - DNA, 25 bp, Homo sapien
tagtttacttcggtcttgcctcact

SEQ ID NO: 699536 - DNA, 25 bp, Homo sapien
tgagtgtagtttacttcggtcttgc

SEQ ID NO: 699537 - DNA, 25 bp, Homo sapien
ggatccgcaaaccacactcagcgta

SEQ ID NO: 699538 - DNA, 25 bp, Homo sapien
cactcagcgtatcgggcgtgcaggt

SEQ ID NO: 699539 - DNA, 25 bp, Homo sapien
cgcaaaccacactcagcgtatcggg

SEQ ID NO: 699540 - DNA, 25 bp, Homo sapien
ggaaggccaggatccgcaaaccaca

SEQ ID NO: 699541 - DNA, 25 bp, Homo sapien
tagcccgcggcgaactctttgatct

SEQ ID NO: 699542 - DNA, 25 bp, Homo sapien
ttgatctcttcgttactccctggct

SEQ ID NO: 699543 - DNA, 25 bp, Homo sapien
tctttgatctcttcgttactccctg

SEQ ID NO: 699544 - DNA, 25 bp, Homo sapien
atcgaatttgacgttgtagcccgcg

SEQ ID NO: 699545 - DNA, 25 bp, Homo sapien
ggtgggcgtcgtccccgttcacgca

SEQ ID NO: 699546 - DNA, 25 bp, Homo sapien
cgttcacgcagatcttgctgaacat

SEQ ID NO: 699547 - DNA, 25 bp, Homo sapien
gtcgtccccgttcacgcagatcttg

SEQ ID NO: 699548 - DNA, 25 bp, Homo sapien
tccccgttcacgcagatcttgctga

SEQ ID NO: 699549 - DNA, 25 bp, Homo sapien
atgcccttgcccttgggttggatct

SEQ ID NO: 699550 - DNA, 25 bp, Homo sapien
tcccaggatgcccttgcccttgggt

SEQ ID NO: 699551 - DNA, 25 bp, Homo sapien
gcccttgcccttgggttggatcttc

SEQ ID NO: 699552 - DNA, 25 bp, Homo sapien
ccttgcccttgggttggatcttcat

SEQ ID NO: 699553 - DNA, 25 bp, Homo sapien
agccgtactgtccccagaggtcacg

SEQ ID NO: 699554 - DNA, 25 bp, Homo sapien
cgtactgtccccagaggtcacgcac

SEQ ID NO: 699555 - DNA, 25 bp, Homo sapien
cagcagccgtactgtccccagaggt

SEQ ID NO: 699556 - DNA, 25 bp, Homo sapien
cccagcagccgtactgtccccagag

SEQ ID NO: 699557 - DNA, 25 bp, Homo sapien
ggaggccacaaaggtgtgggcatcc

SEQ ID NO: 699558 - DNA, 25 bp, Homo sapien
aggccacgcgatgtgagagtcccag

SEQ ID NO: 699559 - DNA, 25 bp, Homo sapien
gccatgcagtgtgagagtcccaaca

SEQ ID NO: 699560 - DNA, 25 bp, Homo sapien
ccccaggaggccacgcgatgtgaga

SEQ ID NO: 699561 - DNA, 25 bp, Homo sapien
agcacatggacgtgagcgtccccag

SEQ ID NO: 699562 - DNA, 25 bp, Homo sapien
cacatggacgtgagcgtccccagca

SEQ ID NO: 699563 - DNA, 25 bp, Homo sapien
aagcacatggacgtgagcgtcccca

SEQ ID NO: 699564 - DNA, 25 bp, Homo sapien
agaagcacatggacgtgagcgtccc

SEQ ID NO: 699565 - DNA, 25 bp, Homo sapien
cttggtgaagttccacttgatggca

SEQ ID NO: 699566 - DNA, 25 bp, Homo sapien
catgggtccgtagcgcttcaccacg

SEQ ID NO: 699567 - DNA, 25 bp, Homo sapien
gggtccgtagcgcttcaccacgcag

SEQ ID NO: 699568 - DNA, 25 bp, Homo sapien
atgggtccgtagcgcttcaccacgc

SEQ ID NO: 699569 - DNA, 25 bp, Homo sapien
ggtccgtagcgcttcaccacgcagc

SEQ ID NO: 699570 - DNA, 25 bp, Homo sapien
agtggggcaggtccttctctatcac

SEQ ID NO: 699571 - DNA, 25 bp, Homo sapien
aatagtggggcaggtccttctctat

SEQ ID NO: 699572 - DNA, 25 bp, Homo sapien
tagaaatagtggggcaggtccttct

SEQ ID NO: 699573 - DNA, 25 bp, Homo sapien
ctagaaatagtggggcaggtccttc

SEQ ID NO: 699574 - DNA, 25 bp, Homo sapien
tttgcaggcaggccgtcatgagtgc

SEQ ID NO: 699575 - DNA, 25 bp, Homo sapien
ggattttcgggtctgccccaccagc

SEQ ID NO: 699576 - DNA, 25 bp, Homo sapien
tcgggcggggccacacacttgtgga

SEQ ID NO: 699577 - DNA, 25 bp, Homo sapien
gaaggctccaagggcgtgggcaggg

SEQ ID NO: 699578 - DNA, 25 bp, Homo sapien
tgggggcgccgagccaagcccagca

SEQ ID NO: 699579 - DNA, 25 bp, Homo sapien
caagttctgatgtacatatgtaaag

SEQ ID NO: 699580 - DNA, 25 bp, Homo sapien
gggcagacccctgctaatatatgca

SEQ ID NO: 699581 - DNA, 25 bp, Homo sapien
gcgcctgcggtttctatgtatttat

SEQ ID NO: 699582 - DNA, 25 bp, Homo sapien
ccctaagttattgcccgctcacctc

SEQ ID NO: 699583 - DNA, 25 bp, Homo sapien
agccacgcacccggcgggattctcc

SEQ ID NO: 699584 - DNA, 25 bp, Homo sapien
tggccccaaaagatctcgcccgttc

SEQ ID NO: 699585 - DNA, 25 bp, Homo sapien
aaaagatctcgcccgttctgcctct

SEQ ID NO: 699586 - DNA, 25 bp, Homo sapien
tagctgggtccatagacacacgaca

SEQ ID NO: 699587 - DNA, 25 bp, Homo sapien
tggtctacagggtcctcacatgggc

SEQ ID NO: 699588 - DNA, 25 bp, Homo sapien
gagtctggagggactgtagtcaccc

SEQ ID NO: 699589 - DNA, 25 bp, Homo sapien
tcattgtaaccaaccacgtgtgcaa

SEQ ID NO: 699590 - DNA, 25 bp, Homo sapien
tcacatgggctagggaaaccagcgt

SEQ ID NO: 699591 - DNA, 25 bp, Homo sapien
gccagggagggtcacggagaaagtc

SEQ ID NO: 699592 - DNA, 25 bp, Homo sapien
ggagggtcacggagaaagtccctgc

SEQ ID NO: 699593 - DNA, 25 bp, Homo sapien
gcttctgaacagttcgtgcctcagt

SEQ ID NO: 699594 - DNA, 25 bp, Homo sapien
ggtaataccagtcgctaccccagag

SEQ ID NO: 699595 - DNA, 25 bp, Homo sapien
gatgtggcagagatcgagcccacgc

SEQ ID NO: 699596 - DNA, 25 bp, Homo sapien
agtttcctccctcgtgaaatgcagg

SEQ ID NO: 699597 - DNA, 25 bp, Homo sapien
ttccacaattctctcgaaggggctg

SEQ ID NO: 699598 - DNA, 25 bp, Homo sapien
gtgtcttgtgtttgatctggcaacc

SEQ ID NO: 699599 - DNA, 25 bp, Homo sapien
cacaattctctcgaaggggctggga

SEQ ID NO: 699600 - DNA, 25 bp, Homo sapien
ttttaactgggtgtcttgtgtttga

SEQ ID NO: 699601 - DNA, 25 bp, Homo sapien
gcaacaatggctgacatagactgac

SEQ ID NO: 699602 - DNA, 25 bp, Homo sapien
ggctaaagttcctccatgccgtcca

SEQ ID NO: 699603 - DNA, 25 bp, Homo sapien
ctctgagatgtccctgaatccttgc

SEQ ID NO: 699604 - DNA, 25 bp, Homo sapien
gcccagacgacctgaaggctgatag

SEQ ID NO: 699605 - DNA, 25 bp, Homo sapien
tgtgactgcctgctcccactggtgc

SEQ ID NO: 699606 - DNA, 25 bp, Homo sapien
gaaggtgtgactgcctgctcccact

SEQ ID NO: 699607 - DNA, 25 bp, Homo sapien
ggtgtgactgcctgctcccactggt

SEQ ID NO: 699608 - DNA, 25 bp, Homo sapien
aggaaggtgtgactgcctgctccca

SEQ ID NO: 699609 - DNA, 25 bp, Homo sapien
aggttctgctatggttctcactcac

SEQ ID NO: 699610 - DNA, 25 bp, Homo sapien
aaggttctgctatggttctcactca

SEQ ID NO: 699611 - DNA, 25 bp, Homo sapien
ttgctcctcggtttgttggggtgtc

SEQ ID NO: 699612 - DNA, 25 bp, Homo sapien
ggacattttgctcctcggtttgttg

SEQ ID NO: 699613 - DNA, 25 bp, Homo sapien
acattttgctcctcggtttgttggg

SEQ ID NO: 699614 - DNA, 25 bp, Homo sapien
gaggacattttgctcctcggtttgt

SEQ ID NO: 699615 - DNA, 25 bp, Homo sapien
tggagaattccacgaaattgacaga

SEQ ID NO: 699616 - DNA, 25 bp, Homo sapien
aaacacttcttggagaattccacga

SEQ ID NO: 699617 - DNA, 25 bp, Homo sapien
cacgaaattgacagaagagtccggg

SEQ ID NO: 699618 - DNA, 25 bp, Homo sapien
gaattccacgaaattgacagaagag

SEQ ID NO: 699619 - DNA, 25 bp, Homo sapien
acttctcctttgcagacgtggtctt

SEQ ID NO: 699620 - DNA, 25 bp, Homo sapien
gccttctcttcaaacttcacttctc

SEQ ID NO: 699621 - DNA, 25 bp, Homo sapien
tgccttctcttcaaacttcacttct

SEQ ID NO: 699622 - DNA, 25 bp, Homo sapien
ttcacttctcctttgcagacgtggt

SEQ ID NO: 699623 - DNA, 25 bp, Homo sapien
ccctttcttacatttcggaggaatg

SEQ ID NO: 699624 - DNA, 25 bp, Homo sapien
tggccttctaggagcattgcgatcc

SEQ ID NO: 699625 - DNA, 25 bp, Homo sapien
ccacgacaaataggcctgggtgtcc

SEQ ID NO: 699626 - DNA, 25 bp, Homo sapien
gagcattgcgatcctttttctttcc

SEQ ID NO: 699627 - DNA, 25 bp, Homo sapien
ttttgcccttagcacgatatgcagc

SEQ ID NO: 699628 - DNA, 25 bp, Homo sapien
tgcagcaatacccttttcatatctc

SEQ ID NO: 699629 - DNA, 25 bp, Homo sapien
cttagcacgatatgcagcaataccc

SEQ ID NO: 699630 - DNA, 25 bp, Homo sapien
gcagcaatacccttttcatatctct

SEQ ID NO: 699631 - DNA, 25 bp, Homo sapien
tttgagcccttctttcctgcttcac

SEQ ID NO: 699632 - DNA, 25 bp, Homo sapien
cctcctcatcttctggtttgttctt

SEQ ID NO: 699633 - DNA, 25 bp, Homo sapien
tcctcatcttctggtttgttcttct

SEQ ID NO: 699634 - DNA, 25 bp, Homo sapien
ttgttcttctttgagcccttctttc

SEQ ID NO: 699635 - DNA, 25 bp, Homo sapien
ggccgccgcgcgtgtggaggaggcg

SEQ ID NO: 699636 - DNA, 25 bp, Homo sapien
aaggccgcggcagcaagtgccgcca

SEQ ID NO: 699637 - DNA, 25 bp, Homo sapien
cccagcccatccaaggccgcggcag

SEQ ID NO: 699638 - DNA, 25 bp, Homo sapien
gccccgcgcctcactcgcgggcgcc

SEQ ID NO: 699639 - DNA, 25 bp, Homo sapien
cccgcgagggcccgcactgggcgcc

SEQ ID NO: 699640 - DNA, 25 bp, Homo sapien
cgcccgcgagggcccgcactgggcg

SEQ ID NO: 699641 - DNA, 25 bp, Homo sapien
cggcgcccgcgagggcccgcactgg

SEQ ID NO: 699642 - DNA, 25 bp, Homo sapien
cccggcgcccgcgagggcccgcact

SEQ ID NO: 699643 - DNA, 25 bp, Homo sapien
gctcagacgcgagttccagtgggac

SEQ ID NO: 699644 - DNA, 25 bp, Homo sapien
gattgttctacacgtcagtcccggc

SEQ ID NO: 699645 - DNA, 25 bp, Homo sapien
tttcagtgctaggtcatcctccggg

SEQ ID NO: 699646 - DNA, 25 bp, Homo sapien
tcaggcccacggacaagtatgaaca

SEQ ID NO: 699647 - DNA, 25 bp, Homo sapien
tcttgaggatcttgacggccctcct

SEQ ID NO: 699648 - DNA, 25 bp, Homo sapien
tcgatgcggtggatgaacgtgtcca

SEQ ID NO: 699649 - DNA, 25 bp, Homo sapien
tagatgacctcggtggagtcgatgc

SEQ ID NO: 699650 - DNA, 25 bp, Homo sapien
tccttcgcaacttcttcttcttgag

SEQ ID NO: 699651 - DNA, 25 bp, Homo sapien
cattttaactggagtccaagagccc

SEQ ID NO: 699652 - DNA, 25 bp, Homo sapien
gagtgaaagtccgtaacgcaggccc

SEQ ID NO: 699653 - DNA, 25 bp, Homo sapien
ctctccctggcacggaggacacagg

SEQ ID NO: 699654 - DNA, 25 bp, Homo sapien
tcaggagggtttcgctaccagggca

SEQ ID NO: 699655 - DNA, 25 bp, Homo sapien
ctcaaggattctagagggacgccgg

SEQ ID NO: 699656 - DNA, 25 bp, Homo sapien
tgtggctgaaacaaggccctcaagg

SEQ ID NO: 699657 - DNA, 25 bp, Homo sapien
cactggaaagtgacgcagccgtgaa

SEQ ID NO: 699658 - DNA, 25 bp, Homo sapien
cacagatgagcagtcaaacgcagcg

SEQ ID NO: 699659 - DNA, 25 bp, Homo sapien
gtggaggggatggagagtgacacaa

SEQ ID NO: 699660 - DNA, 25 bp, Homo sapien
ggtggaggggatggagagtgacaca

SEQ ID NO: 699661 - DNA, 25 bp, Homo sapien
tggaggggatggagagtgacacaat

SEQ ID NO: 699662 - DNA, 25 bp, Homo sapien
ctggtggaggggatggagagtgaca

SEQ ID NO: 699663 - DNA, 25 bp, Homo sapien
tctcttgctctcgtgagtcaccgcg

SEQ ID NO: 699664 - DNA, 25 bp, Homo sapien
ccaggaagtggattcagagtggcca

SEQ ID NO: 699665 - DNA, 25 bp, Homo sapien
tctatgcaatatccaggacaagcca

SEQ ID NO: 699666 - DNA, 25 bp, Homo sapien
gcccggccgacaggatcccatttct

SEQ ID NO: 699667 - DNA, 25 bp, Homo sapien
tgactcagcccctgagtcgctggga

SEQ ID NO: 699668 - DNA, 25 bp, Homo sapien
ctacaggtgcccgcaaccacgccca

SEQ ID NO: 699669 - DNA, 25 bp, Homo sapien
ggtgcccgcaaccacgcccagctaa

SEQ ID NO: 699670 - DNA, 25 bp, Homo sapien
tctcctgactcagcccctgagtcgc

SEQ ID NO: 699671 - DNA, 25 bp, Homo sapien
acatttttgtgccgtaacctcctca

SEQ ID NO: 699672 - DNA, 25 bp, Homo sapien
catttttgtgccgtaacctcctcag

SEQ ID NO: 699673 - DNA, 25 bp, Homo sapien
tttttgtgccgtaacctcctcagta

SEQ ID NO: 699674 - DNA, 25 bp, Homo sapien
tttgtgccgtaacctcctcagtagt

SEQ ID NO: 699675 - DNA, 25 bp, Homo sapien
ttctgcttctcttcgttgtataaca

SEQ ID NO: 699676 - DNA, 25 bp, Homo sapien
tctgcttctcttcgttgtataacac

SEQ ID NO: 699677 - DNA, 25 bp, Homo sapien
tttctgcttctcttcgttgtataac

SEQ ID NO: 699678 - DNA, 25 bp, Homo sapien
attttctgcttctcttcgttgtata

SEQ ID NO: 699679 - DNA, 25 bp, Homo sapien
cacagctcagggggcggccccactc

SEQ ID NO: 699680 - DNA, 25 bp, Homo sapien
cacactgggaaacgcttctccggca

SEQ ID NO: 699681 - DNA, 25 bp, Homo sapien
gggaaacgcttctccggcacgctgt

SEQ ID NO: 699682 - DNA, 25 bp, Homo sapien
ctggcacactgggaaacgcttctcc

SEQ ID NO: 699683 - DNA, 25 bp, Homo sapien
ttctccggcacgctgtccagcattt

SEQ ID NO: 699684 - DNA, 25 bp, Homo sapien
tgcaccccaaagtcttgctggaaca

SEQ ID NO: 699685 - DNA, 25 bp, Homo sapien
ccacgtctggcagggccccggatgt

SEQ ID NO: 699686 - DNA, 25 bp, Homo sapien
caggacagaggaaaggctaggtcca

SEQ ID NO: 699687 - DNA, 25 bp, Homo sapien
ggagccacacctgcgcctgcagtgg

SEQ ID NO: 699688 - DNA, 25 bp, Homo sapien
acaatgccctggctatgcaggtact

SEQ ID NO: 699689 - DNA, 25 bp, Homo sapien
tgagcagcaggttccccggcttgat

SEQ ID NO: 699690 - DNA, 25 bp, Homo sapien
tccaggccgtcaatcagctgacaga

SEQ ID NO: 699691 - DNA, 25 bp, Homo sapien
gccacgcccaggtcggagattttga

SEQ ID NO: 699692 - DNA, 25 bp, Homo sapien
tgccgtgcagccctcagggagtgcc

SEQ ID NO: 699693 - DNA, 25 bp, Homo sapien
tggcggtgccgtgcagccctcaggg

SEQ ID NO: 699694 - DNA, 25 bp, Homo sapien
cggtgccgtgcagccctcagggagt

SEQ ID NO: 699695 - DNA, 25 bp, Homo sapien
ctgtggcggtgccgtgcagccctca

SEQ ID NO: 699696 - DNA, 25 bp, Homo sapien
agggtgaccccagccgaccagatgt

SEQ ID NO: 699697 - DNA, 25 bp, Homo sapien
tccggcaggtgtcgtccgccgcgaa

SEQ ID NO: 699698 - DNA, 25 bp, Homo sapien
tgtccaggccgttggcaatctcggg

SEQ ID NO: 699699 - DNA, 25 bp, Homo sapien
gatgtccaccttgaagccggagaag

SEQ ID NO: 699700 - DNA, 25 bp, Homo sapien
ctcaaacaacttgtagatgttgtcc

SEQ ID NO: 699701 - DNA, 25 bp, Homo sapien
ggtacagacccgtggtgatgttgta

SEQ ID NO: 699702 - DNA, 25 bp, Homo sapien
ccttcccgatgttctcaaacaactt

SEQ ID NO: 699703 - DNA, 25 bp, Homo sapien
acagtcgcccgggatggcgtagctc

SEQ ID NO: 699704 - DNA, 25 bp, Homo sapien
tgccggatggagaacctcttggccg

SEQ ID NO: 699705 - DNA, 25 bp, Homo sapien
gatggagaacctcttggccggttcg

SEQ ID NO: 699706 - DNA, 25 bp, Homo sapien
ccggatctgccggatggagaacctc

SEQ ID NO: 699707 - DNA, 25 bp, Homo sapien
tcttggccggttcgtactcaagcat

SEQ ID NO: 699708 - DNA, 25 bp, Homo sapien
tgtcatcctcgatgtcgaagaggtc

SEQ ID NO: 699709 - DNA, 25 bp, Homo sapien
tgcttcagccggaggatgtttcttc

SEQ ID NO: 699710 - DNA, 25 bp, Homo sapien
catgctgcgccaccggtccttggtg

SEQ ID NO: 699711 - DNA, 25 bp, Homo sapien
agtacggcaccacagtcatgctgcg

SEQ ID NO: 699712 - DNA, 25 bp, Homo sapien
aggcaggcaccctgctcccgtggga

SEQ ID NO: 699713 - DNA, 25 bp, Homo sapien
gagggcagaagctgtccttgttgca

SEQ ID NO: 699714 - DNA, 25 bp, Homo sapien
tttcagccatgtcccagcggcccgc

SEQ ID NO: 699715 - DNA, 25 bp, Homo sapien
gacgtgggattggccaccagagggc

SEQ ID NO: 699716 - DNA, 25 bp, Homo sapien
tcctgaaaggtctgagccctcgctc

SEQ ID NO: 699717 - DNA, 25 bp, Homo sapien
aatgtgggccgcccctacgctaagg

SEQ ID NO: 699718 - DNA, 25 bp, Homo sapien
tcctcaggcactactgcggcgccgg

SEQ ID NO: 699719 - DNA, 25 bp, Homo sapien
tgggccgaacacagccaagccggga

SEQ ID NO: 699720 - DNA, 25 bp, Homo sapien
tgaagcctgaagttgagcctgtccc

SEQ ID NO: 699721 - DNA, 25 bp, Homo sapien
cgttccaacagaccagacgcgatgg

SEQ ID NO: 699722 - DNA, 25 bp, Homo sapien
catggttggttctagaggcccagga

SEQ ID NO: 699723 - DNA, 25 bp, Homo sapien
gactgcaggaacctcacgagtagga

SEQ ID NO: 699724 - DNA, 25 bp, Homo sapien
cggagcaggccttgcgggcagggtt

SEQ ID NO: 699725 - DNA, 25 bp, Homo sapien
acagccggcggatcttgctgctggc

SEQ ID NO: 699726 - DNA, 25 bp, Homo sapien
ccctccgccctggatttggtgctca

SEQ ID NO: 699727 - DNA, 25 bp, Homo sapien
tgccgttcatacacacggccttggg

SEQ ID NO: 699728 - DNA, 25 bp, Homo sapien
gggcggaaccggcaggaagactgag

SEQ ID NO: 699729 - DNA, 25 bp, Homo sapien
cgaagtcaacaagccgcgtgcactg

SEQ ID NO: 699730 - DNA, 25 bp, Homo sapien
gcggggccagtagtctccacataaa

SEQ ID NO: 699731 - DNA, 25 bp, Homo sapien
aagcatggcggccacctctccggga

SEQ ID NO: 699732 - DNA, 25 bp, Homo sapien
ccatcccgcgatggcgtttctcgtg

SEQ ID NO: 699733 - DNA, 25 bp, Homo sapien
tataaatattgaccgcacactcctg

SEQ ID NO: 699734 - DNA, 25 bp, Homo sapien
aaagcagggtgacccgagagcgcaa

SEQ ID NO: 699735 - DNA, 25 bp, Homo sapien
cactcctgcttgctccgggttttct

SEQ ID NO: 699736 - DNA, 25 bp, Homo sapien
ctaacggtcgcagacgagttcgccg

SEQ ID NO: 699737 - DNA, 25 bp, Homo sapien
ggcggctcaacaccgtgactgccga

SEQ ID NO: 699738 - DNA, 25 bp, Homo sapien
ttgagacgcgaacaaaacccagacg

SEQ ID NO: 699739 - DNA, 25 bp, Homo sapien
gagaccgtttacctcactgcggcgt

SEQ ID NO: 699740 - DNA, 25 bp, Homo sapien
ctcgggctgcagagtcgtgaattcc

SEQ ID NO: 699741 - DNA, 25 bp, Homo sapien
gggctgcagagtcgtgaattccagg

SEQ ID NO: 699742 - DNA, 25 bp, Homo sapien
tcgggctgcagagtcgtgaattcca

SEQ ID NO: 699743 - DNA, 25 bp, Homo sapien
cgggctgcagagtcgtgaattccag

SEQ ID NO: 699744 - DNA, 25 bp, Homo sapien
tctgtgagtgcacgtttgggccccg

SEQ ID NO: 699745 - DNA, 25 bp, Homo sapien
cgttctgatgtcaccccacgaggag

SEQ ID NO: 699746 - DNA, 25 bp, Homo sapien
tcacagctatcggagtggtggcccc

SEQ ID NO: 699747 - DNA, 25 bp, Homo sapien
gcagaagcgccgagactgtgaagct

SEQ ID NO: 699748 - DNA, 25 bp, Homo sapien
aaatcagaaacctggcggggtgtgg

SEQ ID NO: 699749 - DNA, 25 bp, Homo sapien
ctgtagtcccaacaatttaggagac

SEQ ID NO: 699750 - DNA, 25 bp, Homo sapien
cacagccagagggagtctttattaa

SEQ ID NO: 699751 - DNA, 25 bp, Homo sapien
tcccaacaatttaggagactgagac

SEQ ID NO: 699752 - DNA, 25 bp, Homo sapien
aagaaggccctgctggtccgactca

SEQ ID NO: 699753 - DNA, 25 bp, Homo sapien
tgacggtcacttggagcctggtcat

SEQ ID NO: 699754 - DNA, 25 bp, Homo sapien
ctgctggtccgactcaggatgaagg

SEQ ID NO: 699755 - DNA, 25 bp, Homo sapien
ctgtgacggtcacttggagcctggt

SEQ ID NO: 699756 - DNA, 25 bp, Homo sapien
aagcgggtagctggcggacagcgga

SEQ ID NO: 699757 - DNA, 25 bp, Homo sapien
ggaagcgggtagctggcggacagcg

SEQ ID NO: 699758 - DNA, 25 bp, Homo sapien
gggtagctggcggacagcggactcc

SEQ ID NO: 699759 - DNA, 25 bp, Homo sapien
cgaggaggacgacgcgcagggacgt

SEQ ID NO: 699760 - DNA, 25 bp, Homo sapien
ggcgaaggtgaaggacatctggttg

SEQ ID NO: 699761 - DNA, 25 bp, Homo sapien
cgaaggtgaaggacatctggttggg

SEQ ID NO: 699762 - DNA, 25 bp, Homo sapien
cgtggcggacgaggcggccaagtcc

SEQ ID NO: 699763 - DNA, 25 bp, Homo sapien
cggcggcctcggcataggcacgggc

SEQ ID NO: 699764 - DNA, 25 bp, Homo sapien
ctcggcctgtcctgctaagtaatgg

SEQ ID NO: 699765 - DNA, 25 bp, Homo sapien
gaaatgggaatgcaacgatccggcg

SEQ ID NO: 699766 - DNA, 25 bp, Homo sapien
taagtaatgggtcagggcaggacct

SEQ ID NO: 699767 - DNA, 25 bp, Homo sapien
ccgaagttgcagctttggtcctcaa

SEQ ID NO: 699768 - DNA, 25 bp, Homo sapien
ccaggatgccgaaggctccggtcag

SEQ ID NO: 699769 - DNA, 25 bp, Homo sapien
gaggtggtgccgtcctctgcatgca

SEQ ID NO: 699770 - DNA, 25 bp, Homo sapien
ggcacgtccacctgccggacgttgg

SEQ ID NO: 699771 - DNA, 25 bp, Homo sapien
cggacgttggcaccgttgaagaaca

SEQ ID NO: 699772 - DNA, 25 bp, Homo sapien
actggaaaccagtgaggcttagaac

SEQ ID NO: 699773 - DNA, 25 bp, Homo sapien
caacatggcgggcaactgctagaga

SEQ ID NO: 699774 - DNA, 25 bp, Homo sapien
gaaaggactagaagctggaggaacc

SEQ ID NO: 699775 - DNA, 25 bp, Homo sapien
tgtcctgagtgtgcaaacagaccca

SEQ ID NO: 699776 - DNA, 25 bp, Homo sapien
ggtccaacatgtccagcgtcacggc

SEQ ID NO: 699777 - DNA, 25 bp, Homo sapien
gcgtcacggcctcttcggccaacaa

SEQ ID NO: 699778 - DNA, 25 bp, Homo sapien
agagtcggcgttcactgcgatggaa

SEQ ID NO: 699779 - DNA, 25 bp, Homo sapien
ttcggccaacaactgcaccgaagag

SEQ ID NO: 699780 - DNA, 25 bp, Homo sapien
ccttctccaagtttgccttggctgc

SEQ ID NO: 699781 - DNA, 25 bp, Homo sapien
ctgggccttctccaagtttgccttg

SEQ ID NO: 699782 - DNA, 25 bp, Homo sapien
atctggatctctgcccgcgtggcct

SEQ ID NO: 699783 - DNA, 25 bp, Homo sapien
gcctcgttggcctcgattcggatct

SEQ ID NO: 699784 - DNA, 25 bp, Homo sapien
gcctccttggcaggcgcggcttccc

SEQ ID NO: 699785 - DNA, 25 bp, Homo sapien
cctccttggcaggcgcggcttcccc

SEQ ID NO: 699786 - DNA, 25 bp, Homo sapien
ctggtggcctccttggcaggcgcgg

SEQ ID NO: 699787 - DNA, 25 bp, Homo sapien
tggtggcctccttggcaggcgcggc

SEQ ID NO: 699788 - DNA, 25 bp, Homo sapien
gatggtaagcggcccgtcaggctgg

SEQ ID NO: 699789 - DNA, 25 bp, Homo sapien
aggggatggtaagcggcccgtcagg

SEQ ID NO: 699790 - DNA, 25 bp, Homo sapien
gggatggtaagcggcccgtcaggct

SEQ ID NO: 699791 - DNA, 25 bp, Homo sapien
gcagaggggatggtaagcggcccgt

SEQ ID NO: 699792 - DNA, 25 bp, Homo sapien
agttcatccagaggtggctccgaag

SEQ ID NO: 699793 - DNA, 25 bp, Homo sapien
ggctccgaagctgaggtcaaccttg

SEQ ID NO: 699794 - DNA, 25 bp, Homo sapien
ctgaggtcaaccttggcggctggct

SEQ ID NO: 699795 - DNA, 25 bp, Homo sapien
atccagaggtggctccgaagctgag

SEQ ID NO: 699796 - DNA, 25 bp, Homo sapien
tccggggccgaatgcgcgctggccg

SEQ ID NO: 699797 - DNA, 25 bp, Homo sapien
gcggccggttctgcgctccaagtgc

SEQ ID NO: 699798 - DNA, 25 bp, Homo sapien
gggcgcggccggttctgcgctccaa

SEQ ID NO: 699799 - DNA, 25 bp, Homo sapien
tgcgagtaccttcgtccggggccga

SEQ ID NO: 699800 - DNA, 25 bp, Homo sapien
cttctccttcaaagggcggcgggcg

SEQ ID NO: 699801 - DNA, 25 bp, Homo sapien
agcgcgcgtcctcctcgagaaagtc

SEQ ID NO: 699802 - DNA, 25 bp, Homo sapien
aatccaaaatccgagtggcgctccg

SEQ ID NO: 699803 - DNA, 25 bp, Homo sapien
cggccgcggaatgcgagaccgaaat

SEQ ID NO: 699804 - DNA, 25 bp, Homo sapien
gatggcgaggctcatgggcgccgcc

SEQ ID NO: 699805 - DNA, 25 bp, Homo sapien
cgaggctcatgggcgccgcctcggc

SEQ ID NO: 699806 - DNA, 25 bp, Homo sapien
atggcgaggctcatgggcgccgcct

SEQ ID NO: 699807 - DNA, 25 bp, Homo sapien
ggcgaggctcatgggcgccgcctcg

SEQ ID NO: 699808 - DNA, 25 bp, Homo sapien
ggccaggtcgtagcgggtgcccgtg

SEQ ID NO: 699809 - DNA, 25 bp, Homo sapien
gccaggtcgtagcgggtgcccgtgg

SEQ ID NO: 699810 - DNA, 25 bp, Homo sapien
actttgaggcgctgggacaaccgct

SEQ ID NO: 699811 - DNA, 25 bp, Homo sapien
agcccctccaccgtctcgtcgggcg

SEQ ID NO: 699812 - DNA, 25 bp, Homo sapien
gcgctgggacaaccgcttgcgcagc

SEQ ID NO: 699813 - DNA, 25 bp, Homo sapien
gcgctccttgggcactttgaggcgc

SEQ ID NO: 699814 - DNA, 25 bp, Homo sapien
tggctcctctttgtaggaaccacgg

SEQ ID NO: 699815 - DNA, 25 bp, Homo sapien
gtcctggctcctctttgtaggaacc

SEQ ID NO: 699816 - DNA, 25 bp, Homo sapien
tcctggctcctctttgtaggaacca

SEQ ID NO: 699817 - DNA, 25 bp, Homo sapien
tagtcctggctcctctttgtaggaa

SEQ ID NO: 699818 - DNA, 25 bp, Homo sapien
tgccatcacccacgccgaactcctg

SEQ ID NO: 699819 - DNA, 25 bp, Homo sapien
catgaggcccgcttccacggtgggt

SEQ ID NO: 699820 - DNA, 25 bp, Homo sapien
ctcctgcagcttccccgaactgagc

SEQ ID NO: 699821 - DNA, 25 bp, Homo sapien
cggtgggtaccaaggtcagcttgct

SEQ ID NO: 699822 - DNA, 25 bp, Homo sapien
gactctcgagagcttgcatcacgga

SEQ ID NO: 699823 - DNA, 25 bp, Homo sapien
gactgttccggccttgaggcctgag

SEQ ID NO: 699824 - DNA, 25 bp, Homo sapien
ctgcgtctccgtgagactctcgaga

SEQ ID NO: 699825 - DNA, 25 bp, Homo sapien
agagcttgcatcacggactgttccg

SEQ ID NO: 699826 - DNA, 25 bp, Homo sapien
tgggagcacagacaacccccaggcc

SEQ ID NO: 699827 - DNA, 25 bp, Homo sapien
cagggctgccctgttaggaaggggc

SEQ ID NO: 699828 - DNA, 25 bp, Homo sapien
cctgggagcacagacaacccccagg

SEQ ID NO: 699829 - DNA, 25 bp, Homo sapien
caggccccgtcggtggccaaggcac

SEQ ID NO: 699830 - DNA, 25 bp, Homo sapien
cataggctgggatgactcagaaccg

SEQ ID NO: 699831 - DNA, 25 bp, Homo sapien
taatgggcgggcatgactcggtgcc

SEQ ID NO: 699832 - DNA, 25 bp, Homo sapien
gcaggactctacatgccgctgggaa

SEQ ID NO: 699833 - DNA, 25 bp, Homo sapien
actggcagtagctggcgtaaccttc

SEQ ID NO: 699834 - DNA, 25 bp, Homo sapien
ggtggaattcctgcacgaattcttc

SEQ ID NO: 699835 - DNA, 25 bp, Homo sapien
caactaggtcggtcttgcaagggga

SEQ ID NO: 699836 - DNA, 25 bp, Homo sapien
attcttctgtcctaacctttgcttt

SEQ ID NO: 699837 - DNA, 25 bp, Homo sapien
agtcactgacctcaaacaaccttca

SEQ ID NO: 699838 - DNA, 25 bp, Homo sapien
tcggtgccacggacgcttaaataaa

SEQ ID NO: 699839 - DNA, 25 bp, Homo sapien
ggtccctgtcggtgccacggacgct

SEQ ID NO: 699840 - DNA, 25 bp, Homo sapien
tctgtatttccggaagcctcctccg

SEQ ID NO: 699841 - DNA, 25 bp, Homo sapien
taaaatgaatctgtatttccggaag

SEQ ID NO: 699842 - DNA, 25 bp, Homo sapien
ggagagcggtccgtcagctgggagc

SEQ ID NO: 699843 - DNA, 25 bp, Homo sapien
aggagagcggtccgtcagctgggag

SEQ ID NO: 699844 - DNA, 25 bp, Homo sapien
gcaaggagagcggtccgtcagctgg

SEQ ID NO: 699845 - DNA, 25 bp, Homo sapien
ctgcaaggagagcggtccgtcagct

SEQ ID NO: 699846 - DNA, 25 bp, Homo sapien
gaacggcccgacaggaagtcactga

SEQ ID NO: 699847 - DNA, 25 bp, Homo sapien
cacgcaaggccagtgtcagtggcga

SEQ ID NO: 699848 - DNA, 25 bp, Homo sapien
cacatggcggtgttgcagtggagcg

SEQ ID NO: 699849 - DNA, 25 bp, Homo sapien
gctgcacgaacatcatgtggtcgcc

SEQ ID NO: 699850 - DNA, 25 bp, Homo sapien
ccctggggtagacgtggtgctggca

SEQ ID NO: 699851 - DNA, 25 bp, Homo sapien
ttcacaaagctctcgatgacggcgc

SEQ ID NO: 699852 - DNA, 25 bp, Homo sapien
agctctcgatgacggcgccgggttt

SEQ ID NO: 699853 - DNA, 25 bp, Homo sapien
tgctggcaccaggactggcactgct

SEQ ID NO: 699854 - DNA, 25 bp, Homo sapien
gtggccgtgagtgcccggcacgggc

SEQ ID NO: 699855 - DNA, 25 bp, Homo sapien
aggtggccgtgagtgcccggcacgg

SEQ ID NO: 699856 - DNA, 25 bp, Homo sapien
caggacgggcgtccacgggtgtgag

SEQ ID NO: 699857 - DNA, 25 bp, Homo sapien
tcccgcatgtccaggacgggcgtcc

SEQ ID NO: 699858 - DNA, 25 bp, Homo sapien
tcttggcagttggggtgtagcgtgc

SEQ ID NO: 699859 - DNA, 25 bp, Homo sapien
gtcttggcagttggggtgtagcgtg

SEQ ID NO: 699860 - DNA, 25 bp, Homo sapien
ttgcacatgcggatctggctctggc

SEQ ID NO: 699861 - DNA, 25 bp, Homo sapien
cgggtggcgctcaggaggtcgttca

SEQ ID NO: 699862 - DNA, 25 bp, Homo sapien
cagccgtgagcttctcgcaggaggt

SEQ ID NO: 699863 - DNA, 25 bp, Homo sapien
ggatctgcaggatggtgccgatgtc

SEQ ID NO: 699864 - DNA, 25 bp, Homo sapien
gggcttggccgcttctgtgatccga

SEQ ID NO: 699865 - DNA, 25 bp, Homo sapien
gagcccaagggcagtacagtagcca

SEQ ID NO: 699866 - DNA, 25 bp, Homo sapien
tcttcctggagtcctacatggaggg

SEQ ID NO: 699867 - DNA, 25 bp, Homo sapien
agactctggagggagtaacccgccg

SEQ ID NO: 699868 - DNA, 25 bp, Homo sapien
tccacacggagtcctcgaagtcgag

SEQ ID NO: 699869 - DNA, 25 bp, Homo sapien
cgcgtggcgcggttttctgtctgcc

SEQ ID NO: 699870 - DNA, 25 bp, Homo sapien
tctacggagccgtttctgctgcaga

SEQ ID NO: 699871 - DNA, 25 bp, Homo sapien
taagccaccacgaactctgacttga

SEQ ID NO: 699872 - DNA, 25 bp, Homo sapien
taatgctacacggagttgtcgcccc

SEQ ID NO: 699873 - DNA, 25 bp, Homo sapien
catgaagagtccaggaaaccacggt

SEQ ID NO: 699874 - DNA, 25 bp, Homo sapien
gaaacagtcccctcgttggcttctg

SEQ ID NO: 699875 - DNA, 25 bp, Homo sapien
ccttcccgacaggaaagggtgccat

SEQ ID NO: 699876 - DNA, 25 bp, Homo sapien
gaggttccaccctcaaccagtggag

SEQ ID NO: 699877 - DNA, 25 bp, Homo sapien
cgagccggttcctgcctggaggttc

SEQ ID NO: 699878 - DNA, 25 bp, Homo sapien
tacagcgctacagttataacacgtg

SEQ ID NO: 699879 - DNA, 25 bp, Homo sapien
cccgagggcgggtaatgctttcttg

SEQ ID NO: 699880 - DNA, 25 bp, Homo sapien
tacttgaaatcacggtgctcgtgta

SEQ ID NO: 699881 - DNA, 25 bp, Homo sapien
attacttgaaatcacggtgctcgtg

SEQ ID NO: 699882 - DNA, 25 bp, Homo sapien
ttgaaatcacggtgctcgtgtaggt

SEQ ID NO: 699883 - DNA, 25 bp, Homo sapien
cttgaaatcacggtgctcgtgtagg

SEQ ID NO: 699884 - DNA, 25 bp, Homo sapien
agtggccgacttggggaatcaccgt

SEQ ID NO: 699885 - DNA, 25 bp, Homo sapien
aatcaccgtttagggtccttgtcag

SEQ ID NO: 699886 - DNA, 25 bp, Homo sapien
aagtcatccctccagtggccgactt

SEQ ID NO: 699887 - DNA, 25 bp, Homo sapien
gaatcaccgtttagggtccttgtca

SEQ ID NO: 699888 - DNA, 25 bp, Homo sapien
gaatcatcccgtatgcaggccggga

SEQ ID NO: 699889 - DNA, 25 bp, Homo sapien
acatggaatcatcccgtatgcaggc

SEQ ID NO: 699890 - DNA, 25 bp, Homo sapien
gtccacatggaatcatcccgtatgc

SEQ ID NO: 699891 - DNA, 25 bp, Homo sapien
cccagcactttcgtttgagtccagg

SEQ ID NO: 699892 - DNA, 25 bp, Homo sapien
tcctgcaccctgatactcctcccgg

SEQ ID NO: 699893 - DNA, 25 bp, Homo sapien
cctgcaccctgatactcctcccggg

SEQ ID NO: 699894 - DNA, 25 bp, Homo sapien
ctcctgcaccctgatactcctcccg

SEQ ID NO: 699895 - DNA, 25 bp, Homo sapien
ctgcaccctgatactcctcccgggc

SEQ ID NO: 699896 - DNA, 25 bp, Homo sapien
ggcgagactgctattccgggcccga

SEQ ID NO: 699897 - DNA, 25 bp, Homo sapien
ggaggagctcaaaatagccgcgccg

SEQ ID NO: 699898 - DNA, 25 bp, Homo sapien
gaggacgcagcctgcgtgtcgaccc

SEQ ID NO: 699899 - DNA, 25 bp, Homo sapien
ccacgcagacgcctcgcgtgggaga

SEQ ID NO: 699900 - DNA, 25 bp, Homo sapien
gggtcagctgcgtctgcgagcaccc

SEQ ID NO: 699901 - DNA, 25 bp, Homo sapien
gtcagctgcgtctgcgagcacccgt

SEQ ID NO: 699902 - DNA, 25 bp, Homo sapien
gctgcgtctgcgagcacccgtgact

SEQ ID NO: 699903 - DNA, 25 bp, Homo sapien
tctggggtcagctgcgtctgcgagc

SEQ ID NO: 699904 - DNA, 25 bp, Homo sapien
acgacccgagcctcctaacgcgcga

SEQ ID NO: 699905 - DNA, 25 bp, Homo sapien
gggaagacagcgcaccacaacgacc

SEQ ID NO: 699906 - DNA, 25 bp, Homo sapien
ggtccctgacgcaagcgggaagaca

SEQ ID NO: 699907 - DNA, 25 bp, Homo sapien
cactgagtcgggcaggtccctgacg

SEQ ID NO: 699908 - DNA, 25 bp, Homo sapien
caaggccgggaaagcggccctggag

SEQ ID NO: 699909 - DNA, 25 bp, Homo sapien
gcggccctggagaccgggggcgcca

SEQ ID NO: 699910 - DNA, 25 bp, Homo sapien
tggagaccgggggcgccacgtggcc

SEQ ID NO: 699911 - DNA, 25 bp, Homo sapien
ctccagccccaaggccgggaaagcg

SEQ ID NO: 699912 - DNA, 25 bp, Homo sapien
tgtggcagacaccaatgaaatcctc

SEQ ID NO: 699913 - DNA, 25 bp, Homo sapien
ggcagacaccaatgaaatcctcaac

SEQ ID NO: 699914 - DNA, 25 bp, Homo sapien
acaggggtcatctctcaccacctct

SEQ ID NO: 699915 - DNA, 25 bp, Homo sapien
aacaggggtcatctctcaccacctc

SEQ ID NO: 699916 - DNA, 25 bp, Homo sapien
tcagccctccaacaaaaagtttgcc

SEQ ID NO: 699917 - DNA, 25 bp, Homo sapien
cttcagagatctgtccgtactttga

SEQ ID NO: 699918 - DNA, 25 bp, Homo sapien
actgctcattggtgtcaaaactcag

SEQ ID NO: 699919 - DNA, 25 bp, Homo sapien
tccagcgactgctcattggtgtcaa

SEQ ID NO: 699920 - DNA, 25 bp, Homo sapien
cacccagctgtacttccaggtagga

SEQ ID NO: 699921 - DNA, 25 bp, Homo sapien
gctgtacttccaggtaggaggagca

SEQ ID NO: 699922 - DNA, 25 bp, Homo sapien
cagctgtacttccaggtaggaggag

SEQ ID NO: 699923 - DNA, 25 bp, Homo sapien
ccagctgtacttccaggtaggagga

SEQ ID NO: 699924 - DNA, 25 bp, Homo sapien
catccttagcgtcgtcaatgttctc

SEQ ID NO: 699925 - DNA, 25 bp, Homo sapien
gtgacaaacccaaatccccgagatc

SEQ ID NO: 699926 - DNA, 25 bp, Homo sapien
ggccatcatggcatccttagcgtcg

SEQ ID NO: 699927 - DNA, 25 bp, Homo sapien
aaatccccgagatctctgggtctcc

SEQ ID NO: 699928 - DNA, 25 bp, Homo sapien
gagacagagggcgggacgggttagc

SEQ ID NO: 699929 - DNA, 25 bp, Homo sapien
gggtgccccatcctcgagacgggac

SEQ ID NO: 699930 - DNA, 25 bp, Homo sapien
ggtgccccatcctcgagacgggact

SEQ ID NO: 699931 - DNA, 25 bp, Homo sapien
cagagggcgggacgggttagcaggt

SEQ ID NO: 699932 - DNA, 25 bp, Homo sapien
ggtctactcggatctgccgtccatc

SEQ ID NO: 699933 - DNA, 25 bp, Homo sapien
ctcggatctgccgtccatctacaga

SEQ ID NO: 699934 - DNA, 25 bp, Homo sapien
ctggtctactcggatctgccgtcca

SEQ ID NO: 699935 - DNA, 25 bp, Homo sapien
tctactcggatctgccgtccatcta

SEQ ID NO: 699936 - DNA, 25 bp, Homo sapien
ggtacccacgggatcggttgtctga

SEQ ID NO: 699937 - DNA, 25 bp, Homo sapien
agagccaccacggtacccacgggat

SEQ ID NO: 699938 - DNA, 25 bp, Homo sapien
cccacgggatcggttgtctgacgac

SEQ ID NO: 699939 - DNA, 25 bp, Homo sapien
cgggatcggttgtctgacgacttgc

SEQ ID NO: 699940 - DNA, 25 bp, Homo sapien
tagtagtctctggagcctccgtagc

SEQ ID NO: 699941 - DNA, 25 bp, Homo sapien
gtctctggagcctccgtagccccca

SEQ ID NO: 699942 - DNA, 25 bp, Homo sapien
gtagtctctggagcctccgtagccc

SEQ ID NO: 699943 - DNA, 25 bp, Homo sapien
tatagtagtctctggagcctccgta

SEQ ID NO: 699944 - DNA, 25 bp, Homo sapien
tgcaagacagacaaacgttgagtac

SEQ ID NO: 699945 - DNA, 25 bp, Homo sapien
cagacaaacgttgagtaccggaagg

SEQ ID NO: 699946 - DNA, 25 bp, Homo sapien
aggtacccgtctacttctgctctgc

SEQ ID NO: 699947 - DNA, 25 bp, Homo sapien
tcccgcttctgcgaatgtcctgagc

SEQ ID NO: 699948 - DNA, 25 bp, Homo sapien
agctccggtcactgtagccaccact

SEQ ID NO: 699949 - DNA, 25 bp, Homo sapien
cgtaactgtcataactgtctctgta

SEQ ID NO: 699950 - DNA, 25 bp, Homo sapien
cataactgtctctgtaggacccgcc

SEQ ID NO: 699951 - DNA, 25 bp, Homo sapien
tgtctctgtaggacccgcccgagct

SEQ ID NO: 699952 - DNA, 25 bp, Homo sapien
tgcgtcctgcgatagaaatggctct

SEQ ID NO: 699953 - DNA, 25 bp, Homo sapien
tctgagtgtccagcctaaagtgctt

SEQ ID NO: 699954 - DNA, 25 bp, Homo sapien
ggacagatgcgcctcttctgggcaa

SEQ ID NO: 699955 - DNA, 25 bp, Homo sapien
taaaggcaccgaagcaacaagaggc

SEQ ID NO: 699956 - DNA, 25 bp, Homo sapien
gaaaactcatggctcgtggtcaaaa

SEQ ID NO: 699957 - DNA, 25 bp, Homo sapien
aagtctagtaacgaggccatcccgg

SEQ ID NO: 699958 - DNA, 25 bp, Homo sapien
cacagtccgttcgatctcagagaag

SEQ ID NO: 699959 - DNA, 25 bp, Homo sapien
taacgttcagcgaagctcccacaat

SEQ ID NO: 699960 - DNA, 25 bp, Homo sapien
gcgcacagcacagatggacgcaggg

SEQ ID NO: 699961 - DNA, 25 bp, Homo sapien
ctctcagggacgtctgcacgtctac

SEQ ID NO: 699962 - DNA, 25 bp, Homo sapien
agggacgtctgcacgtctactgtgg

SEQ ID NO: 699963 - DNA, 25 bp, Homo sapien
tgcacgtctactgtggggcgcacag

SEQ ID NO: 699964 - DNA, 25 bp, Homo sapien
aatataaataaacatcttcaagaac

SEQ ID NO: 699965 - DNA, 25 bp, Homo sapien
gacaatataaataaacatcttcaag

SEQ ID NO: 699966 - DNA, 25 bp, Homo sapien
aaaaggacaatataaataaacatct

SEQ ID NO: 699967 - DNA, 25 bp, Homo sapien
aaaggacaatataaataaacatctt

SEQ ID NO: 699968 - DNA, 25 bp, Homo sapien
ctgcaaatacaacatcgatggagta

SEQ ID NO: 699969 - DNA, 25 bp, Homo sapien
caaatacaacatcgatggagtatgc

SEQ ID NO: 699970 - DNA, 25 bp, Homo sapien
caacatcgatggagtatgcgtacgt

SEQ ID NO: 699971 - DNA, 25 bp, Homo sapien
tacaacatcgatggagtatgcgtac

SEQ ID NO: 699972 - DNA, 25 bp, Homo sapien
gcaggagcccgcagcaaggagtgtg

SEQ ID NO: 699973 - DNA, 25 bp, Homo sapien
aggagcccgcagcaaggagtgtgtg

SEQ ID NO: 699974 - DNA, 25 bp, Homo sapien
agtgtgtggtgcaatgcaagggaat

SEQ ID NO: 699975 - DNA, 25 bp, Homo sapien
tggtgcaatgcaagggaattgtcag

SEQ ID NO: 699976 - DNA, 25 bp, Homo sapien
cagcgccagtctgctgggcctccct

SEQ ID NO: 699977 - DNA, 25 bp, Homo sapien
gaaggcttgcagacccgctgcttct

SEQ ID NO: 699978 - DNA, 25 bp, Homo sapien
gcgccagtctgctgggcctcccttt

SEQ ID NO: 699979 - DNA, 25 bp, Homo sapien
ggaaggcttgcagacccgctgcttc

SEQ ID NO: 699980 - DNA, 25 bp, Homo sapien
cagtccaggtcagcgtcaggtgcac

SEQ ID NO: 699981 - DNA, 25 bp, Homo sapien
ccctgctaagctgcccgcacagtcc

SEQ ID NO: 699982 - DNA, 25 bp, Homo sapien
caggtgcacgtccactgtccctgct

SEQ ID NO: 699983 - DNA, 25 bp, Homo sapien
ccaggtcagcgtcaggtgcacgtcc

SEQ ID NO: 699984 - DNA, 25 bp, Homo sapien
tgggatgccacgtgcctctgctctc

SEQ ID NO: 699985 - DNA, 25 bp, Homo sapien
caacagcagaactagctaaccggct

SEQ ID NO: 699986 - DNA, 25 bp, Homo sapien
gctcagaactcgtgaagcaacagca

SEQ ID NO: 699987 - DNA, 25 bp, Homo sapien
aaccggctggccgtctgaggtcgcc

SEQ ID NO: 699988 - DNA, 25 bp, Homo sapien
gagggttctgttgggcgcacaacac

SEQ ID NO: 699989 - DNA, 25 bp, Homo sapien
acagggctatttccacatatgagct

SEQ ID NO: 699990 - DNA, 25 bp, Homo sapien
ccaagggagcagcttgcgtctcaga

SEQ ID NO: 699991 - DNA, 25 bp, Homo sapien
gcacaacacttctgtcctccgaggg

SEQ ID NO: 699992 - DNA, 25 bp, Homo sapien
cattccccgggcacatgactttcag

SEQ ID NO: 699993 - DNA, 25 bp, Homo sapien
taatggcggcaacagacatcagaga

SEQ ID NO: 699994 - DNA, 25 bp, Homo sapien
tggagccagctacccgtatgggatg

SEQ ID NO: 699995 - DNA, 25 bp, Homo sapien
tatgagccaggcatgactgggccca

SEQ ID NO: 699996 - DNA, 25 bp, Homo sapien
ctctcaggccacccttccccgagtc

SEQ ID NO: 699997 - DNA, 25 bp, Homo sapien
tcaggccacccttccccgagtcctg

SEQ ID NO: 699998 - DNA, 25 bp, Homo sapien
caggccacccttccccgagtcctgg

SEQ ID NO: 699999 - DNA, 25 bp, Homo sapien
ctcaggccacccttccccgagtcct

SEQ ID NO: 700000 - DNA, 25 bp, Homo sapien
acagtgaccccagaggtcatcgctg

SEQ ID NO: 700001 - DNA, 25 bp, Homo sapien
ggacaagcctcctgggcaagcggct

SEQ ID NO: 700002 - DNA, 25 bp, Homo sapien
tcttgttccaggtgaagtccctcct

SEQ ID NO: 700003 - DNA, 25 bp, Homo sapien
aagcctcctgggcaagcggctgcct

SEQ ID NO: 700004 - DNA, 25 bp, Homo sapien
aggactcactgaaacgcccaggtgc

SEQ ID NO: 700005 - DNA, 25 bp, Homo sapien
agggctcagcgccacatgccactct

SEQ ID NO: 700006 - DNA, 25 bp, Homo sapien
aaaggcgcccgccatggggccatag

SEQ ID NO: 700007 - DNA, 25 bp, Homo sapien
gcacccaacacacaccgaaaggcgc

SEQ ID NO: 700008 - DNA, 25 bp, Homo sapien
cgcaccgcagcccgtgctccaggag

SEQ ID NO: 700009 - DNA, 25 bp, Homo sapien
actggccgccccgtaagctgccggc

SEQ ID NO: 700010 - DNA, 25 bp, Homo sapien
cgccccgtaagctgccggcgcaccg

SEQ ID NO: 700011 - DNA, 25 bp, Homo sapien
ggcaaggactggccgccccgtaagc

SEQ ID NO: 700012 - DNA, 25 bp, Homo sapien
ttcgaatccgactttcacagggctc

SEQ ID NO: 700013 - DNA, 25 bp, Homo sapien
ctttattcgaatccgactttcacag

SEQ ID NO: 700014 - DNA, 25 bp, Homo sapien
gccctttattcgaatccgactttca

SEQ ID NO: 700015 - DNA, 25 bp, Homo sapien
tattcgaatccgactttcacagggc

SEQ ID NO: 700016 - DNA, 25 bp, Homo sapien
agtggccccgctccgccgacagacc

SEQ ID NO: 700017 - DNA, 25 bp, Homo sapien
tcgtgcgctgaaccgaggtccgcag

SEQ ID NO: 700018 - DNA, 25 bp, Homo sapien
gctgaaccgaggtccgcaggctttt

SEQ ID NO: 700019 - DNA, 25 bp, Homo sapien
ccgaggtccgcaggcttttcttcca

SEQ ID NO: 700020 - DNA, 25 bp, Homo sapien
agactggagtctccgcgctgcgaac

SEQ ID NO: 700021 - DNA, 25 bp, Homo sapien
cgagtgcgcctcagatcccgcgaga

SEQ ID NO: 700022 - DNA, 25 bp, Homo sapien
tcactgctcggacaatgacccttgc

SEQ ID NO: 700023 - DNA, 25 bp, Homo sapien
tgacccttgcagtcttccctgtcgg

SEQ ID NO: 700024 - DNA, 25 bp, Homo sapien
gaacttgcttcgtcgaaccgctcca

SEQ ID NO: 700025 - DNA, 25 bp, Homo sapien
ccgccgcggaacttgcttcgtcgaa

SEQ ID NO: 700026 - DNA, 25 bp, Homo sapien
gcccgtgggagtcccggcaaggcgc

SEQ ID NO: 700027 - DNA, 25 bp, Homo sapien
tcgaaccgctccaagggatcaggac

SEQ ID NO: 700028 - DNA, 25 bp, Homo sapien
gctgcagcacgcgcggccccatggc

SEQ ID NO: 700029 - DNA, 25 bp, Homo sapien
tcttcggcaccgcacggcagcgccg

SEQ ID NO: 700030 - DNA, 25 bp, Homo sapien
cggcgaggcctcttcggcaccgcac

SEQ ID NO: 700031 - DNA, 25 bp, Homo sapien
aggcctcttcggcaccgcacggcag

SEQ ID NO: 700032 - DNA, 25 bp, Homo sapien
ggctggctcccgttcgtcacggccg

SEQ ID NO: 700033 - DNA, 25 bp, Homo sapien
gatcacgtagaaggagcgcgtcagc

SEQ ID NO: 700034 - DNA, 25 bp, Homo sapien
acgcgtgtgcgtgctgttgtgtggc

SEQ ID NO: 700035 - DNA, 25 bp, Homo sapien
ctaaacgcccggatcaggaagtaga

SEQ ID NO: 700036 - DNA, 25 bp, Homo sapien
acgtgacgcactaggcgcgcgctaa

SEQ ID NO: 700037 - DNA, 25 bp, Homo sapien
agagacggcgcccacgtgcgcctga

SEQ ID NO: 700038 - DNA, 25 bp, Homo sapien
agcgtcacccccgagttaagaggcg

SEQ ID NO: 700039 - DNA, 25 bp, Homo sapien
agagcgggtgagtcccgtggcccct

SEQ ID NO: 700040 - DNA, 25 bp, Homo sapien
ggcggcaggcgggaagatgagaacg

SEQ ID NO: 700041 - DNA, 25 bp, Homo sapien
catccggcgacaaggagccaaggag

SEQ ID NO: 700042 - DNA, 25 bp, Homo sapien
gcccggcatgctccggcttcagtgg

SEQ ID NO: 700043 - DNA, 25 bp, Homo sapien
agatgagaacgaggacgggcatccg

SEQ ID NO: 700044 - DNA, 25 bp, Homo sapien
gcctgaacacgcagaagcccctcct

SEQ ID NO: 700045 - DNA, 25 bp, Homo sapien
gcacgtggccgaccctggcgacgaa

SEQ ID NO: 700046 - DNA, 25 bp, Homo sapien
gcacctcccgggctgtgggagcacc

SEQ ID NO: 700047 - DNA, 25 bp, Homo sapien
tgggagcacccaaggcgggcacgtg

SEQ ID NO: 700048 - DNA, 25 bp, Homo sapien
tgatggggagggataaggtcctcgc

SEQ ID NO: 700049 - DNA, 25 bp, Homo sapien
gtgtctctcccacccgggagaagca

SEQ ID NO: 700050 - DNA, 25 bp, Homo sapien
aaagcggcttgactttgccagggtg

SEQ ID NO: 700051 - DNA, 25 bp, Homo sapien
gagttcagaccagcgcgggtaacat

SEQ ID NO: 700052 - DNA, 25 bp, Homo sapien
cgatgacagtaagaagacatgtgcc

SEQ ID NO: 700053 - DNA, 25 bp, Homo sapien
taggtccaggcatagtcagtggccc

SEQ ID NO: 700054 - DNA, 25 bp, Homo sapien
ccaggagaggcacgctgatgtcact

SEQ ID NO: 700055 - DNA, 25 bp, Homo sapien
gatgtcactcccattgcactgatga

SEQ ID NO: 700056 - DNA, 25 bp, Homo sapien
tcagattccgggactcaaacaccgt

SEQ ID NO: 700057 - DNA, 25 bp, Homo sapien
ggtcctcagtgttggcgaggaggcc

SEQ ID NO: 700058 - DNA, 25 bp, Homo sapien
tccagcgaggccatctccgtggggt

SEQ ID NO: 700059 - DNA, 25 bp, Homo sapien
gaggaggccgtatcgcctccgctga

SEQ ID NO: 700060 - DNA, 25 bp, Homo sapien
gaagggccgcctccctggctcagca

SEQ ID NO: 700061 - DNA, 25 bp, Homo sapien
aagggccgcctccctggctcagcat

SEQ ID NO: 700062 - DNA, 25 bp, Homo sapien
tgctggaagggccgcctccctggct

SEQ ID NO: 700063 - DNA, 25 bp, Homo sapien
ggctgctggaagggccgcctccctg

SEQ ID NO: 700064 - DNA, 25 bp, Homo sapien
tgcaggtggcaacaggtcggcgggc

SEQ ID NO: 700065 - DNA, 25 bp, Homo sapien
caaaaggagctctcgggttggcact

SEQ ID NO: 700066 - DNA, 25 bp, Homo sapien
agaggcacaagtcacagtcaggcaa

SEQ ID NO: 700067 - DNA, 25 bp, Homo sapien
tcacagtcaggcaagggagcctcag

SEQ ID NO: 700068 - DNA, 25 bp, Homo sapien
tgttcccagcccggcgagaaggtgt

SEQ ID NO: 700069 - DNA, 25 bp, Homo sapien
tcccagcccggcgagaaggtgttcc

SEQ ID NO: 700070 - DNA, 25 bp, Homo sapien
ttattgttcccagcccggcgagaag

SEQ ID NO: 700071 - DNA, 25 bp, Homo sapien
cagcccggcgagaaggtgttcccag

SEQ ID NO: 700072 - DNA, 25 bp, Homo sapien
aatcattgccagaggtattcatgag

SEQ ID NO: 700073 - DNA, 25 bp, Homo sapien
gaatcattgccagaggtattcatga

SEQ ID NO: 700074 - DNA, 25 bp, Homo sapien
cagggcagggcccatgagacccagg

SEQ ID NO: 700075 - DNA, 25 bp, Homo sapien
ccagggcagggcccatgagacccag

SEQ ID NO: 700076 - DNA, 25 bp, Homo sapien
cgtgcctgttaaaagtgtgtcccaa

SEQ ID NO: 700077 - DNA, 25 bp, Homo sapien
gagacagacgcaacggccagacaga

SEQ ID NO: 700078 - DNA, 25 bp, Homo sapien
cagcagagcccgagtcataggtgtg

SEQ ID NO: 700079 - DNA, 25 bp, Homo sapien
caaacgggagtttggagacagacgc

SEQ ID NO: 700080 - DNA, 25 bp, Homo sapien
tgtgccttttgaagctggtgaaagc

SEQ ID NO: 700081 - DNA, 25 bp, Homo sapien
atgtgccttttgaagctggtgaaag

SEQ ID NO: 700082 - DNA, 25 bp, Homo sapien
tgagactgtattttgtgggtgcctg

SEQ ID NO: 700083 - DNA, 25 bp, Homo sapien
gagactgtattttgtgggtgcctgc

SEQ ID NO: 700084 - DNA, 25 bp, Homo sapien
agactgtattttgtgggtgcctgcg

SEQ ID NO: 700085 - DNA, 25 bp, Homo sapien
gactgtattttgtgggtgcctgcgt

SEQ ID NO: 700086 - DNA, 25 bp, Homo sapien
tctgagctccaggtctcatcccctg

SEQ ID NO: 700087 - DNA, 25 bp, Homo sapien
ttccagaaaggtctgtcccacccag

SEQ ID NO: 700088 - DNA, 25 bp, Homo sapien
ccagggagctcagcccgtctgttct

SEQ ID NO: 700089 - DNA, 25 bp, Homo sapien
acccagtgctctagcgtccctgcca

SEQ ID NO: 700090 - DNA, 25 bp, Homo sapien
ctgagcttgtggagggtaggctgtc

SEQ ID NO: 700091 - DNA, 25 bp, Homo sapien
tggcgatgcccagatcgtgttgtac

SEQ ID NO: 700092 - DNA, 25 bp, Homo sapien
cgtctctgaattagtgtcattcacc

SEQ ID NO: 700093 - DNA, 25 bp, Homo sapien
gtcatcaaacgctggctggactttg

SEQ ID NO: 700094 - DNA, 25 bp, Homo sapien
tgcccggttccagcgctatccgcag

SEQ ID NO: 700095 - DNA, 25 bp, Homo sapien
ggttccagcgctatccgcagcctca

SEQ ID NO: 700096 - DNA, 25 bp, Homo sapien
aatcgggctcggccaactccagtct

SEQ ID NO: 700097 - DNA, 25 bp, Homo sapien
caaccccgacgcacgcgtcccaaat

SEQ ID NO: 700098 - DNA, 25 bp, Homo sapien
cccggtccggccgccgcgctcgctc

SEQ ID NO: 700099 - DNA, 25 bp, Homo sapien
gccgccgcctgccagccttctccgc

SEQ ID NO: 700100 - DNA, 25 bp, Homo sapien
ccggccgccgcctgccagccttctc

SEQ ID NO: 700101 - DNA, 25 bp, Homo sapien
ccgccgcgctcgctctcccggccgc

SEQ ID NO: 700102 - DNA, 25 bp, Homo sapien
tcggcgcgcgcgaagggcggcggcg

SEQ ID NO: 700103 - DNA, 25 bp, Homo sapien
ggcggcagcggtaacagcaggagca

SEQ ID NO: 700104 - DNA, 25 bp, Homo sapien
agcagcgggagcagcgggcgctgcg

SEQ ID NO: 700105 - DNA, 25 bp, Homo sapien
gcagcgggcgctgcgcgggcgccat

SEQ ID NO: 700106 - DNA, 25 bp, Homo sapien
gtagcggtccgagttggcgcgggcg

SEQ ID NO: 700107 - DNA, 25 bp, Homo sapien
tccagtagacggcgtagcggtccga

SEQ ID NO: 700108 - DNA, 25 bp, Homo sapien
gacggcgtagcggtccgagttggcg

SEQ ID NO: 700109 - DNA, 25 bp, Homo sapien
agtagacggcgtagcggtccgagtt

SEQ ID NO: 700110 - DNA, 25 bp, Homo sapien
caaccctggataccgcaggcaggag

SEQ ID NO: 700111 - DNA, 25 bp, Homo sapien
aggcagcctcggtgctgcccaggtc

SEQ ID NO: 700112 - DNA, 25 bp, Homo sapien
agggtgtcggctccgtccccagcaa

SEQ ID NO: 700113 - DNA, 25 bp, Homo sapien
agcctcggtgctgcccaggtcggct

SEQ ID NO: 700114 - DNA, 25 bp, Homo sapien
cggccaggtccaacaggacaggtga

SEQ ID NO: 700115 - DNA, 25 bp, Homo sapien
cacacgcggtgttgtggccaggaca

SEQ ID NO: 700116 - DNA, 25 bp, Homo sapien
ctgcagccggatgcgactccaggca

SEQ ID NO: 700117 - DNA, 25 bp, Homo sapien
acatgagcagccgtgggaatgcaca

SEQ ID NO: 700118 - DNA, 25 bp, Homo sapien
ggaccgactcggccacagagttcaa

SEQ ID NO: 700119 - DNA, 25 bp, Homo sapien
gcctgcttgaggttaaagcaaaaac

SEQ ID NO: 700120 - DNA, 25 bp, Homo sapien
gccacagagttcaaacgcctgcttg

SEQ ID NO: 700121 - DNA, 25 bp, Homo sapien
aaaccccgccggctcgtctgctcct

SEQ ID NO: 700122 - DNA, 25 bp, Homo sapien
ggcaagcccgaggtgggcgcgttgc

SEQ ID NO: 700123 - DNA, 25 bp, Homo sapien
gaggtgggcgcgttgcccctgttga

SEQ ID NO: 700124 - DNA, 25 bp, Homo sapien
tgtgttggcattcccggttccaagt

SEQ ID NO: 700125 - DNA, 25 bp, Homo sapien
ttccaagttggcgggcaagcccgag

SEQ ID NO: 700126 - DNA, 25 bp, Homo sapien
cgccgtcgtcccccgcgcctgcgtg

SEQ ID NO: 700127 - DNA, 25 bp, Homo sapien
gtcgtcccccgcgcctgcgtggaac

SEQ ID NO: 700128 - DNA, 25 bp, Homo sapien
ctccaccgtgtagcccccgccgtcg

SEQ ID NO: 700129 - DNA, 25 bp, Homo sapien
ccgtcgtcccccgcgcctgcgtgga

SEQ ID NO: 700130 - DNA, 25 bp, Homo sapien
gcgccccatagtgcgggcagtagat

SEQ ID NO: 700131 - DNA, 25 bp, Homo sapien
catgtacagcacgtagtgctccatg

SEQ ID NO: 700132 - DNA, 25 bp, Homo sapien
gcagtagatgtccaggtagtcattg

SEQ ID NO: 700133 - DNA, 25 bp, Homo sapien
gtagtgctccatgcgctcggccggc

SEQ ID NO: 700134 - DNA, 25 bp, Homo sapien
ggttgcactcccagcgcttgaagcc

SEQ ID NO: 700135 - DNA, 25 bp, Homo sapien
ggccggttgcactcccagcgcttga

SEQ ID NO: 700136 - DNA, 25 bp, Homo sapien
cggttgcactcccagcgcttgaagc

SEQ ID NO: 700137 - DNA, 25 bp, Homo sapien
gccggttgcactcccagcgcttgaa

SEQ ID NO: 700138 - DNA, 25 bp, Homo sapien
tagtaatactcgtggccgggccgga

SEQ ID NO: 700139 - DNA, 25 bp, Homo sapien
tggccgggccggaactcgaagccca

SEQ ID NO: 700140 - DNA, 25 bp, Homo sapien
ccggaactcgaagcccagggagaag

SEQ ID NO: 700141 - DNA, 25 bp, Homo sapien
tgtagtaatactcgtggccgggccg

SEQ ID NO: 700142 - DNA, 25 bp, Homo sapien
gggccggtccacagcattgggaggc

SEQ ID NO: 700143 - DNA, 25 bp, Homo sapien
acgtacaccttcagtcgcaggcagg

SEQ ID NO: 700144 - DNA, 25 bp, Homo sapien
gtccacagcattgggaggcgtggca

SEQ ID NO: 700145 - DNA, 25 bp, Homo sapien
tggtcggccgcacgtacaccttcag

SEQ ID NO: 700146 - DNA, 25 bp, Homo sapien
tcaggagcctcgtacagggtctcgt

SEQ ID NO: 700147 - DNA, 25 bp, Homo sapien
cgcccgggctgctacacgagttatt

SEQ ID NO: 700148 - DNA, 25 bp, Homo sapien
ggctcaggagcctcgtacagggtct

SEQ ID NO: 700149 - DNA, 25 bp, Homo sapien
gctgctacacgagttattgctggtg

SEQ ID NO: 700150 - DNA, 25 bp, Homo sapien
gcgagggagaagcagcgtctctatt

SEQ ID NO: 700151 - DNA, 25 bp, Homo sapien
agcagcgtctctatttggtctcgga

SEQ ID NO: 700152 - DNA, 25 bp, Homo sapien
cgtctctatttggtctcggaggcgg

SEQ ID NO: 700153 - DNA, 25 bp, Homo sapien
agatggcctggccacggtccgcatc

SEQ ID NO: 700154 - DNA, 25 bp, Homo sapien
cagacgacacgagcttattgccaag

SEQ ID NO: 700155 - DNA, 25 bp, Homo sapien
gacacggcgggactgtgattccgaa

SEQ ID NO: 700156 - DNA, 25 bp, Homo sapien
gccggcggccgtacacaatatatat

SEQ ID NO: 700157 - DNA, 25 bp, Homo sapien
cagaaggtcttctcggcctcggaga

SEQ ID NO: 700158 - DNA, 25 bp, Homo sapien
gctcaagcgcctgcgcaaggccaag

SEQ ID NO: 700159 - DNA, 25 bp, Homo sapien
caagcgcctgcgcaaggccaagaag

SEQ ID NO: 700160 - DNA, 25 bp, Homo sapien
ctgctcaagcgcctgcgcaaggcca

SEQ ID NO: 700161 - DNA, 25 bp, Homo sapien
tcaagcgcctgcgcaaggccaagaa

SEQ ID NO: 700162 - DNA, 25 bp, Homo sapien
agtgctcagccgggacttgaaccag

SEQ ID NO: 700163 - DNA, 25 bp, Homo sapien
gctcagccgggacttgaaccaggtc

SEQ ID NO: 700164 - DNA, 25 bp, Homo sapien
cttgagtgctcagccgggacttgaa

SEQ ID NO: 700165 - DNA, 25 bp, Homo sapien
ctgacccgacggaggctgctcccag

SEQ ID NO: 700166 - DNA, 25 bp, Homo sapien
cttcaaagggcctgcgacggcggca

SEQ ID NO: 700167 - DNA, 25 bp, Homo sapien
aacggtaggtgattaataaagacat

SEQ ID NO: 700168 - DNA, 25 bp, Homo sapien
gacggcggcaggagatgcgggccgg

SEQ ID NO: 700169 - DNA, 25 bp, Homo sapien
ccacctctggcttggcaaacggtag

SEQ ID NO: 700170 - DNA, 25 bp, Homo sapien
aaatcactcgcctccctttcattcc

SEQ ID NO: 700171 - DNA, 25 bp, Homo sapien
ctgggagttggaggaattcggaggc

SEQ ID NO: 700172 - DNA, 25 bp, Homo sapien
gaaatcactcgcctccctttcattc

SEQ ID NO: 700173 - DNA, 25 bp, Homo sapien
ttatcccgtcgctgtgcactgcaag

SEQ ID NO: 700174 - DNA, 25 bp, Homo sapien
cccttgctgtatcgtctctgacttg

SEQ ID NO: 700175 - DNA, 25 bp, Homo sapien
ccttctgtgcgtgactgtgactttc

SEQ ID NO: 700176 - DNA, 25 bp, Homo sapien
tgcagagctggttcctttatcccgt

SEQ ID NO: 700177 - DNA, 25 bp, Homo sapien
aatgacatgttctcgctctgcctga

SEQ ID NO: 700178 - DNA, 25 bp, Homo sapien
gacatgttctcgctctgcctgagag

SEQ ID NO: 700179 - DNA, 25 bp, Homo sapien
ggaatgacatgttctcgctctgcct

SEQ ID NO: 700180 - DNA, 25 bp, Homo sapien
acatgttctcgctctgcctgagaga

SEQ ID NO: 700181 - DNA, 25 bp, Homo sapien
tctggatgttccccgaggcccaagg

SEQ ID NO: 700182 - DNA, 25 bp, Homo sapien
gtctggatgttccccgaggcccaag

SEQ ID NO: 700183 - DNA, 25 bp, Homo sapien
ggaatcgtataaacagtactggttc

SEQ ID NO: 700184 - DNA, 25 bp, Homo sapien
cacatgccgggtcgtgactggaatc

SEQ ID NO: 700185 - DNA, 25 bp, Homo sapien
aattttctaggttcccgatgtcctg

SEQ ID NO: 700186 - DNA, 25 bp, Homo sapien
ctgggtggaggtgctaagagtctga

SEQ ID NO: 700187 - DNA, 25 bp, Homo sapien
ggaaataaacgcaggtcacagctca

SEQ ID NO: 700188 - DNA, 25 bp, Homo sapien
gctcaggatgctgctacggacaatg

SEQ ID NO: 700189 - DNA, 25 bp, Homo sapien
acgggtggtgcccacaatgcctgca

SEQ ID NO: 700190 - DNA, 25 bp, Homo sapien
gctgctacggacaatgatcttcctg

SEQ ID NO: 700191 - DNA, 25 bp, Homo sapien
ggcaccggaaacagccgcgggtggc

SEQ ID NO: 700192 - DNA, 25 bp, Homo sapien
cgcgggtggcgggagccccggagcg

SEQ ID NO: 700193 - DNA, 25 bp, Homo sapien
gcaccggaaacagccgcgggtggcg

SEQ ID NO: 700194 - DNA, 25 bp, Homo sapien
agcggccgcaacagcggaggacccg

SEQ ID NO: 700195 - DNA, 25 bp, Homo sapien
gccaaccgctgccgtccgcgccgcc

SEQ ID NO: 700196 - DNA, 25 bp, Homo sapien
ggaggacccgcccgccaaccgctgc

SEQ ID NO: 700197 - DNA, 25 bp, Homo sapien
ccaagcccgggcaaggaggccgcag

SEQ ID NO: 700198 - DNA, 25 bp, Homo sapien
actcccaggtctcacgccaatgtgt

SEQ ID NO: 700199 - DNA, 25 bp, Homo sapien
gtactcccaggtctcacgccaatgt

SEQ ID NO: 700200 - DNA, 25 bp, Homo sapien
gcaatgatttggcacaacgtactcc

SEQ ID NO: 700201 - DNA, 25 bp, Homo sapien
tggcacaacgtactcccaggtctca

SEQ ID NO: 700202 - DNA, 25 bp, Homo sapien
aggccataatcgcttttcccatcgg

SEQ ID NO: 700203 - DNA, 25 bp, Homo sapien
agaggacatacttggcatccgccat

SEQ ID NO: 700204 - DNA, 25 bp, Homo sapien
ataatcgcttttcccatcggcagag

SEQ ID NO: 700205 - DNA, 25 bp, Homo sapien
cttcgcaggccataatcgcttttcc

SEQ ID NO: 700206 - DNA, 25 bp, Homo sapien
tttctaagtcctgaagttacagaat

SEQ ID NO: 700207 - DNA, 25 bp, Homo sapien
taagtcctgaagttacagaataatg

SEQ ID NO: 700208 - DNA, 25 bp, Homo sapien
agtcctgaagttacagaataatggc

SEQ ID NO: 700209 - DNA, 25 bp, Homo sapien
tcctgaagttacagaataatggctg

SEQ ID NO: 700210 - DNA, 25 bp, Homo sapien
tttgttgaagtcgcggttcgggcca

SEQ ID NO: 700211 - DNA, 25 bp, Homo sapien
ttcctctagagagaggatttgcaca

SEQ ID NO: 700212 - DNA, 25 bp, Homo sapien
tttgcacagctagaaaatattcctt

SEQ ID NO: 700213 - DNA, 25 bp, Homo sapien
tgttgaagtcgcggttcgggccaaa

SEQ ID NO: 700214 - DNA, 25 bp, Homo sapien
gaagtatcagaaatctacacgggaa

SEQ ID NO: 700215 - DNA, 25 bp, Homo sapien
taagagtgggctgggcttcaactgt

SEQ ID NO: 700216 - DNA, 25 bp, Homo sapien
cctggcatggcactgattaagaaac

SEQ ID NO: 700217 - DNA, 25 bp, Homo sapien
agatctcacagaatgcctcgtttgg

SEQ ID NO: 700218 - DNA, 25 bp, Homo sapien
ggagcagaacaatgtgccgcctggt

SEQ ID NO: 700219 - DNA, 25 bp, Homo sapien
taaacgctggtttagagtgacaggc

SEQ ID NO: 700220 - DNA, 25 bp, Homo sapien
aaattgatgggcctgtcacagacgt

SEQ ID NO: 700221 - DNA, 25 bp, Homo sapien
cgcctggtcatcagttatttgcctt

SEQ ID NO: 700222 - DNA, 25 bp, Homo sapien
gaccaagcgagcttcagaggcagct

SEQ ID NO: 700223 - DNA, 25 bp, Homo sapien
tgggaattctcacgacagatgcacc

SEQ ID NO: 700224 - DNA, 25 bp, Homo sapien
caatgccttggactacgcgggatca

SEQ ID NO: 700225 - DNA, 25 bp, Homo sapien
tagatgatctacaccttcccggtgc

SEQ ID NO: 700226 - DNA, 25 bp, Homo sapien
ttcccagccgcagggaaagtgtgag

SEQ ID NO: 700227 - DNA, 25 bp, Homo sapien
cttcccagccgcagggaaagtgtga

SEQ ID NO: 700228 - DNA, 25 bp, Homo sapien
ggttacaggcagcaagaaccctggt

SEQ ID NO: 700229 - DNA, 25 bp, Homo sapien
taggaattcatctgcctgaggttac

SEQ ID NO: 700230 - DNA, 25 bp, Homo sapien
tgcagagacaaaatcgacgttacac

SEQ ID NO: 700231 - DNA, 25 bp, Homo sapien
agccaacgccgccaagacattttca

SEQ ID NO: 700232 - DNA, 25 bp, Homo sapien
ggcttcaatttgagacttctctagg

SEQ ID NO: 700233 - DNA, 25 bp, Homo sapien
gacttctctaggatctcaacttcag

SEQ ID NO: 700234 - DNA, 25 bp, Homo sapien
caacttcagtgcttttcaccttaat

SEQ ID NO: 700235 - DNA, 25 bp, Homo sapien
ctaacgaggaagcaatggcttcaat

SEQ ID NO: 700236 - DNA, 25 bp, Homo sapien
ctgaccattctgggcgtcaagaata

SEQ ID NO: 700237 - DNA, 25 bp, Homo sapien
tccttcagctcaggggattcgcgtt

SEQ ID NO: 700238 - DNA, 25 bp, Homo sapien
cattctgggcgtcaagaataggagt

SEQ ID NO: 700239 - DNA, 25 bp, Homo sapien
taggagtggttctaggggcaaattc

SEQ ID NO: 700240 - DNA, 25 bp, Homo sapien
gacagtgcctcaaacaatgggtgcc

SEQ ID NO: 700241 - DNA, 25 bp, Homo sapien
tcagcccggcctaagttatgcagag

SEQ ID NO: 700242 - DNA, 25 bp, Homo sapien
caaggacgacgccatccaagatgat

SEQ ID NO: 700243 - DNA, 25 bp, Homo sapien
tatcacaactcagcgggcataatgc

SEQ ID NO: 700244 - DNA, 25 bp, Homo sapien
gaagcgaccgtctgtaggccagttc

SEQ ID NO: 700245 - DNA, 25 bp, Homo sapien
gagccctcgctcagaacgtccagag

SEQ ID NO: 700246 - DNA, 25 bp, Homo sapien
ttcttccaggggtgccgcaggaacc

SEQ ID NO: 700247 - DNA, 25 bp, Homo sapien
agagccacgcgaagcgaccgtctgt

SEQ ID NO: 700248 - DNA, 25 bp, Homo sapien
aatcacagggcgaggagacatgctc

SEQ ID NO: 700249 - DNA, 25 bp, Homo sapien
gaatccgggcaaggaagacatctgg

SEQ ID NO: 700250 - DNA, 25 bp, Homo sapien
tgacaggctttgttgcacacatggc

SEQ ID NO: 700251 - DNA, 25 bp, Homo sapien
cctgtgaggtctggaactgcccaac

SEQ ID NO: 700252 - DNA, 25 bp, Homo sapien
ccatggactcttcggaagactggca

SEQ ID NO: 700253 - DNA, 25 bp, Homo sapien
catggaattagaccccatggactct

SEQ ID NO: 700254 - DNA, 25 bp, Homo sapien
gatagaacgcatggaattagacccc

SEQ ID NO: 700255 - DNA, 25 bp, Homo sapien
gactcttggtggctcctcgtcttcc

SEQ ID NO: 700256 - DNA, 25 bp, Homo sapien
tatgtttatgccagactagcattcc

SEQ ID NO: 700257 - DNA, 25 bp, Homo sapien
gtttatgccagactagcattcctac

SEQ ID NO: 700258 - DNA, 25 bp, Homo sapien
tgtttatgccagactagcattccta

SEQ ID NO: 700259 - DNA, 25 bp, Homo sapien
atgccagactagcattcctacttca

SEQ ID NO: 700260 - DNA, 25 bp, Homo sapien
tccttcgatgtatagcacacttgct

SEQ ID NO: 700261 - DNA, 25 bp, Homo sapien
tatctctctgcctgacgcttttgac

SEQ ID NO: 700262 - DNA, 25 bp, Homo sapien
tttcattttcgggttcatgtgtcct

SEQ ID NO: 700263 - DNA, 25 bp, Homo sapien
ttcttatctctctgcctgacgcttt

SEQ ID NO: 700264 - DNA, 25 bp, Homo sapien
tttcagccggctgatccatccacgt

SEQ ID NO: 700265 - DNA, 25 bp, Homo sapien
atccacgtgtgctttcatcccatga

SEQ ID NO: 700266 - DNA, 25 bp, Homo sapien
cagatgacaccggttctgcgcgttc

SEQ ID NO: 700267 - DNA, 25 bp, Homo sapien
tatgcaatgcgatggttctaaaggc

SEQ ID NO: 700268 - DNA, 25 bp, Homo sapien
tttaaacttttaagagacactgtga

SEQ ID NO: 700269 - DNA, 25 bp, Homo sapien
tgctttaaacttttaagagacactg

SEQ ID NO: 700270 - DNA, 25 bp, Homo sapien
cagaagcgtctgtttctctttacaa

SEQ ID NO: 700271 - DNA, 25 bp, Homo sapien
tctttacaatcaaagtgctttaaac

SEQ ID NO: 700272 - DNA, 25 bp, Homo sapien
gatctaactctaacggccagagcgc

SEQ ID NO: 700273 - DNA, 25 bp, Homo sapien
gaattcagcgcagtgactgagccca

SEQ ID NO: 700274 - DNA, 25 bp, Homo sapien
tctgccacgtggtatcggccaggct

SEQ ID NO: 700275 - DNA, 25 bp, Homo sapien
tggaagtcgccacaacaaaatgagt

SEQ ID NO: 700276 - DNA, 25 bp, Homo sapien
tgggctgctctaacagcacctgggc

SEQ ID NO: 700277 - DNA, 25 bp, Homo sapien
cacagccgtcccaaagatgccataa

SEQ ID NO: 700278 - DNA, 25 bp, Homo sapien
ataaagccacgaccatcacacaatg

SEQ ID NO: 700279 - DNA, 25 bp, Homo sapien
gctgctctaacagcacctgggctgg

SEQ ID NO: 700280 - DNA, 25 bp, Homo sapien
tgaacgcatcgacggtgcaaacacc

SEQ ID NO: 700281 - DNA, 25 bp, Homo sapien
gaacgcatcgacggtgcaaacacct

SEQ ID NO: 700282 - DNA, 25 bp, Homo sapien
ctgaacgcatcgacggtgcaaacac

SEQ ID NO: 700283 - DNA, 25 bp, Homo sapien
tctggcagacgcctcgcacagggac

SEQ ID NO: 700284 - DNA, 25 bp, Homo sapien
tctggtaaatgggaaacgcaccagg

SEQ ID NO: 700285 - DNA, 25 bp, Homo sapien
gaccctctggtaaatgggaaacgca

SEQ ID NO: 700286 - DNA, 25 bp, Homo sapien
gctctggcagacgcctcgcacaggg

SEQ ID NO: 700287 - DNA, 25 bp, Homo sapien
tcctggttgaagtcctccctggctt

SEQ ID NO: 700288 - DNA, 25 bp, Homo sapien
cggtgatgagggagacacaccagcc

SEQ ID NO: 700289 - DNA, 25 bp, Homo sapien
ccagccgatgtcctggttgaagtcc

SEQ ID NO: 700290 - DNA, 25 bp, Homo sapien
taaccggaccctgtagtcggtgatg

SEQ ID NO: 700291 - DNA, 25 bp, Homo sapien
atatcagccgcgtaatattccagga

SEQ ID NO: 700292 - DNA, 25 bp, Homo sapien
tatatcagccgcgtaatattccagg

SEQ ID NO: 700293 - DNA, 25 bp, Homo sapien
tatcagccgcgtaatattccaggaa

SEQ ID NO: 700294 - DNA, 25 bp, Homo sapien
ttatatcagccgcgtaatattccag

SEQ ID NO: 700295 - DNA, 25 bp, Homo sapien
cagttgaggaagcttggtccccaag

SEQ ID NO: 700296 - DNA, 25 bp, Homo sapien
gacgtcctgctggatggattttcgg

SEQ ID NO: 700297 - DNA, 25 bp, Homo sapien
tcagttgaggaagcttggtccccaa

SEQ ID NO: 700298 - DNA, 25 bp, Homo sapien
gctccccttgctcagttgaggaagc

SEQ ID NO: 700299 - DNA, 25 bp, Homo sapien
caggtcacgtactggctggagctca

SEQ ID NO: 700300 - DNA, 25 bp, Homo sapien
tcgggcagaagcacgtccagaatga

SEQ ID NO: 700301 - DNA, 25 bp, Homo sapien
tggtagacgccctgcaggtacttca

SEQ ID NO: 700302 - DNA, 25 bp, Homo sapien
tgctctttaggatggcccgcaggtg

SEQ ID NO: 700303 - DNA, 25 bp, Homo sapien
gatgtacacatatgcccagcaatgt

SEQ ID NO: 700304 - DNA, 25 bp, Homo sapien
ttccaggcaggttatgggcacatta

SEQ ID NO: 700305 - DNA, 25 bp, Homo sapien
tatttgaaaattcccatagttataa

SEQ ID NO: 700306 - DNA, 25 bp, Homo sapien
gcacattagagttcattatgctatt

SEQ ID NO: 700307 - DNA, 25 bp, Homo sapien
tccattcggttcagagcagagtctc

SEQ ID NO: 700308 - DNA, 25 bp, Homo sapien
tgcaaacctagtccatgaatccctg

SEQ ID NO: 700309 - DNA, 25 bp, Homo sapien
gaagcacccttagctgtgacaagca

SEQ ID NO: 700310 - DNA, 25 bp, Homo sapien
gccccaagtggcctgcggttaagaa

SEQ ID NO: 700311 - DNA, 25 bp, Homo sapien
tgatgtacttctcctcagccgtctt

SEQ ID NO: 700312 - DNA, 25 bp, Homo sapien
gccgtcttgtagtccacctcgtcca

SEQ ID NO: 700313 - DNA, 25 bp, Homo sapien
ccgcagagatcgcacagatgatggc

SEQ ID NO: 700314 - DNA, 25 bp, Homo sapien
gtagctcagcgaaggccccttgatg

SEQ ID NO: 700315 - DNA, 25 bp, Homo sapien
gctgcggcagcctggagtcaaactg

SEQ ID NO: 700316 - DNA, 25 bp, Homo sapien
gacccacagggtgagttcagcgtat

SEQ ID NO: 700317 - DNA, 25 bp, Homo sapien
ggtgtggaaatagaaactgcaaggc

SEQ ID NO: 700318 - DNA, 25 bp, Homo sapien
ctgcaaggcagagacgcaagtggct

SEQ ID NO: 700319 - DNA, 25 bp, Homo sapien
cctgttttggtaagccagctgggcc

SEQ ID NO: 700320 - DNA, 25 bp, Homo sapien
tgcccagagacaggattaggcgctc

SEQ ID NO: 700321 - DNA, 25 bp, Homo sapien
caagggcagctaagcacacggatgt

SEQ ID NO: 700322 - DNA, 25 bp, Homo sapien
ggaaccatgaagatccagcaggaaa

SEQ ID NO: 700323 - DNA, 25 bp, Homo sapien
tcctaacgggttttgatgtcggcaa

SEQ ID NO: 700324 - DNA, 25 bp, Homo sapien
tgttattttgagcatgtccccggcg

SEQ ID NO: 700325 - DNA, 25 bp, Homo sapien
cacgggaggctttcatggcaactgg

SEQ ID NO: 700326 - DNA, 25 bp, Homo sapien
gaagctgtgatgaactcctaacggg

SEQ ID NO: 700327 - DNA, 25 bp, Homo sapien
aaagatcaagtgcgatgctgctcac

SEQ ID NO: 700328 - DNA, 25 bp, Homo sapien
tgtgcgccccagcagacctggaaat

SEQ ID NO: 700329 - DNA, 25 bp, Homo sapien
aaagagatcaacaacggctgctggc

SEQ ID NO: 700330 - DNA, 25 bp, Homo sapien
tagggctgccctggatcaaaagaga

SEQ ID NO: 700331 - DNA, 25 bp, Homo sapien
gagccactgtgactgactaaaaata

SEQ ID NO: 700332 - DNA, 25 bp, Homo sapien
gagaggactgggtgtggtcgctcac

SEQ ID NO: 700333 - DNA, 25 bp, Homo sapien
aattaatcattgtgtgttaaagaat

SEQ ID NO: 700334 - DNA, 25 bp, Homo sapien
tgttaaagaatatgagagagaggac

SEQ ID NO: 700335 - DNA, 25 bp, Homo sapien
cattttagtaattaatcattgtgtg

SEQ ID NO: 700336 - DNA, 25 bp, Homo sapien
caaggagctggttgtcaaatatttc

SEQ ID NO: 700337 - DNA, 25 bp, Homo sapien
aaggagctggttgtcaaatatttct

SEQ ID NO: 700338 - DNA, 25 bp, Homo sapien
cgacggcgccggttccgctcttcaa

SEQ ID NO: 700339 - DNA, 25 bp, Homo sapien
gcgccggttccgctcttcaaggagc

SEQ ID NO: 700340 - DNA, 25 bp, Homo sapien
actggaggcgcttccaccgccaggc

SEQ ID NO: 700341 - DNA, 25 bp, Homo sapien
gcacactggaggcgcttccaccgcc

SEQ ID NO: 700342 - DNA, 25 bp, Homo sapien
acactggaggcgcttccaccgccag

SEQ ID NO: 700343 - DNA, 25 bp, Homo sapien
cactggaggcgcttccaccgccagg

SEQ ID NO: 700344 - DNA, 25 bp, Homo sapien
tactggcgcacagtgaatacgcttc

SEQ ID NO: 700345 - DNA, 25 bp, Homo sapien
tcagtgttaacgaaatggattctcc

SEQ ID NO: 700346 - DNA, 25 bp, Homo sapien
tgtgcacgtcgggagaaaccacagc

SEQ ID NO: 700347 - DNA, 25 bp, Homo sapien
tatcagatgccacacatacgagatc

SEQ ID NO: 700348 - DNA, 25 bp, Homo sapien
cacactgagtgggagagcaaattct

SEQ ID NO: 700349 - DNA, 25 bp, Homo sapien
gccgatgactgagaccgcggtgact

SEQ ID NO: 700350 - DNA, 25 bp, Homo sapien
gttgggcctccatacaaaggctgcg

SEQ ID NO: 700351 - DNA, 25 bp, Homo sapien
caaattctggaactgtcgcaggcgg

SEQ ID NO: 700352 - DNA, 25 bp, Homo sapien
gggtcacagcccctcaaagcaaggc

SEQ ID NO: 700353 - DNA, 25 bp, Homo sapien
gggaagagggtcacagcccctcaaa

SEQ ID NO: 700354 - DNA, 25 bp, Homo sapien
caccgggccctggaaccctggacat

SEQ ID NO: 700355 - DNA, 25 bp, Homo sapien
aagagggtcacagcccctcaaagca

SEQ ID NO: 700356 - DNA, 25 bp, Homo sapien
cctctccggtggctgtcgtcggctg

SEQ ID NO: 700357 - DNA, 25 bp, Homo sapien
ccaagggcccgatacgagagtcctt

SEQ ID NO: 700358 - DNA, 25 bp, Homo sapien
gagacaatcgtgttccgatctcctc

SEQ ID NO: 700359 - DNA, 25 bp, Homo sapien
tacgagagtccttgcggcttcgtcc

SEQ ID NO: 700360 - DNA, 25 bp, Homo sapien
tgccaggccacggccgggtttcctg

SEQ ID NO: 700361 - DNA, 25 bp, Homo sapien
ctctcggagtcgagcagaggcaagt

SEQ ID NO: 700362 - DNA, 25 bp, Homo sapien
gcagaggcaagtgaaacaaaggtca

SEQ ID NO: 700363 - DNA, 25 bp, Homo sapien
cgggtttcctgctctcggagtcgag

SEQ ID NO: 700364 - DNA, 25 bp, Homo sapien
ccgcctcaggcggtggtactggccg

SEQ ID NO: 700365 - DNA, 25 bp, Homo sapien
cctccggggtgtgccccactgctcc

SEQ ID NO: 700366 - DNA, 25 bp, Homo sapien
gtccccgaaacagcgaccagcaggg

SEQ ID NO: 700367 - DNA, 25 bp, Homo sapien
tacatgcaacgctgctgagccccgc

SEQ ID NO: 700368 - DNA, 25 bp, Homo sapien
gctccggaggattttccatgaggca

SEQ ID NO: 700369 - DNA, 25 bp, Homo sapien
gaggattttccatgaggcagtacga

SEQ ID NO: 700370 - DNA, 25 bp, Homo sapien
ggcggctccggaggattttccatga

SEQ ID NO: 700371 - DNA, 25 bp, Homo sapien
tttccatgaggcagtacgaggcccg

SEQ ID NO: 700372 - DNA, 25 bp, Homo sapien
aaaaccatggcaatgtgtcctactc

SEQ ID NO: 700373 - DNA, 25 bp, Homo sapien
ttccacctcgaacaacttggcaagg

SEQ ID NO: 700374 - DNA, 25 bp, Homo sapien
tctgggaggtgtttaattccacctc

SEQ ID NO: 700375 - DNA, 25 bp, Homo sapien
ggataaaagtacttcacaacagcag

SEQ ID NO: 700376 - DNA, 25 bp, Homo sapien
tggggcctgctgacgcgaaacgact

SEQ ID NO: 700377 - DNA, 25 bp, Homo sapien
gggcctgctgacgcgaaacgactgc

SEQ ID NO: 700378 - DNA, 25 bp, Homo sapien
gcctgctgacgcgaaacgactgcgc

SEQ ID NO: 700379 - DNA, 25 bp, Homo sapien
gtggggcctgctgacgcgaaacgac

SEQ ID NO: 700380 - DNA, 25 bp, Homo sapien
gctaaccgattgcgccacagagacg

SEQ ID NO: 700381 - DNA, 25 bp, Homo sapien
tttcggttaacagccgaacgcgcta

SEQ ID NO: 700382 - DNA, 25 bp, Homo sapien
gaacgcgctaaccgattgcgccaca

SEQ ID NO: 700383 - DNA, 25 bp, Homo sapien
tccctgggtgggctcgaaccaccaa

SEQ ID NO: 700384 - DNA, 25 bp, Homo sapien
tcacccgaggcggaaaggtcatcgg

SEQ ID NO: 700385 - DNA, 25 bp, Homo sapien
cgcatgcggaaaccggaacctggag

SEQ ID NO: 700386 - DNA, 25 bp, Homo sapien
aggtccgttctccttagcgctccgg

SEQ ID NO: 700387 - DNA, 25 bp, Homo sapien
ttcggcctccgtggtcgtgttgcgc

SEQ ID NO: 700388 - DNA, 25 bp, Homo sapien
tactctggacgcaataacggcgacc

SEQ ID NO: 700389 - DNA, 25 bp, Homo sapien
ccggctcggagaagcccggagagga

SEQ ID NO: 700390 - DNA, 25 bp, Homo sapien
tcggtttccccgactgtactctgga

SEQ ID NO: 700391 - DNA, 25 bp, Homo sapien
gcgaccgttcatcgcaagccgggcg

SEQ ID NO: 700392 - DNA, 25 bp, Homo sapien
atggccacgggcaagccaaggacag

SEQ ID NO: 700393 - DNA, 25 bp, Homo sapien
ggtgggccctcatccgatatgactt

SEQ ID NO: 700394 - DNA, 25 bp, Homo sapien
gcccaggtgatggtactttgtcgct

SEQ ID NO: 700395 - DNA, 25 bp, Homo sapien
ccttgtaagaaaaggcgatcaggac

SEQ ID NO: 700396 - DNA, 25 bp, Homo sapien
agtgagcagaggctgcgccactgca

SEQ ID NO: 700397 - DNA, 25 bp, Homo sapien
cttgggtgacagagggagactccat

SEQ ID NO: 700398 - DNA, 25 bp, Homo sapien
ttgcagtgagcagaggctgcgccac

SEQ ID NO: 700399 - DNA, 25 bp, Homo sapien
ctccagcttgggtgacagagggaga

SEQ ID NO: 700400 - DNA, 25 bp, Homo sapien
gaccaaggatccggaagccgcgcag

SEQ ID NO: 700401 - DNA, 25 bp, Homo sapien
agaccaaggatccggaagccgcgca

SEQ ID NO: 700402 - DNA, 25 bp, Homo sapien
accaaggatccggaagccgcgcagg

SEQ ID NO: 700403 - DNA, 25 bp, Homo sapien
ccaaggatccggaagccgcgcaggc

SEQ ID NO: 700404 - DNA, 25 bp, Homo sapien
agtgtccaagcaaggacggtcccag

SEQ ID NO: 700405 - DNA, 25 bp, Homo sapien
agctctgacggcactgagccgggcc

SEQ ID NO: 700406 - DNA, 25 bp, Homo sapien
ccctgtcagtcacctgggtctgcag

SEQ ID NO: 700407 - DNA, 25 bp, Homo sapien
ccactgcgtggactgtcccagggag

SEQ ID NO: 700408 - DNA, 25 bp, Homo sapien
gatggaacgcgggtcagtggctgtc

SEQ ID NO: 700409 - DNA, 25 bp, Homo sapien
ctgccgggagatggaacgcgggtca

SEQ ID NO: 700410 - DNA, 25 bp, Homo sapien
cgggagatggaacgcgggtcagtgg

SEQ ID NO: 700411 - DNA, 25 bp, Homo sapien
gaacgcgggtcagtggctgtcccag

SEQ ID NO: 700412 - DNA, 25 bp, Homo sapien
cggtggccacgctctgatggacacc

SEQ ID NO: 700413 - DNA, 25 bp, Homo sapien
catcggtggccacgctctgatggac

SEQ ID NO: 700414 - DNA, 25 bp, Homo sapien
gccatcggtggccacgctctgatgg

SEQ ID NO: 700415 - DNA, 25 bp, Homo sapien
tcggtggccacgctctgatggacac

SEQ ID NO: 700416 - DNA, 25 bp, Homo sapien
tgcggcactgatgcagaaaataagg

SEQ ID NO: 700417 - DNA, 25 bp, Homo sapien
aggtgcttcccagaggcggatgcga

SEQ ID NO: 700418 - DNA, 25 bp, Homo sapien
cacaggaggcgtcagccacgcaggt

SEQ ID NO: 700419 - DNA, 25 bp, Homo sapien
gcacagagacacacgggcacaggag

SEQ ID NO: 700420 - DNA, 25 bp, Homo sapien
ggcacagagacacacgggcacagga

SEQ ID NO: 700421 - DNA, 25 bp, Homo sapien
tgggagccacggctctggcctttgg

SEQ ID NO: 700422 - DNA, 25 bp, Homo sapien
ctgggtttgggagccacggctctgg

SEQ ID NO: 700423 - DNA, 25 bp, Homo sapien
gtttgggagccacggctctggcctt

SEQ ID NO: 700424 - DNA, 25 bp, Homo sapien
gggtttgggagccacggctctggcc

SEQ ID NO: 700425 - DNA, 25 bp, Homo sapien
ccggcgggcccagttgacgaggtca

SEQ ID NO: 700426 - DNA, 25 bp, Homo sapien
gttgacgaggtcatccagcttggcc

SEQ ID NO: 700427 - DNA, 25 bp, Homo sapien
ggcccagttgacgaggtcatccagc

SEQ ID NO: 700428 - DNA, 25 bp, Homo sapien
agcttggccaccacatactcgcccc

SEQ ID NO: 700429 - DNA, 25 bp, Homo sapien
tagaaactatcctgcattagccggg

SEQ ID NO: 700430 - DNA, 25 bp, Homo sapien
gcagggtccgaatcctcagatggaa

SEQ ID NO: 700431 - DNA, 25 bp, Homo sapien
tgcgttaactagatctgggtccaca

SEQ ID NO: 700432 - DNA, 25 bp, Homo sapien
tagtagcgcaggtctaaccgggaac

SEQ ID NO: 700433 - DNA, 25 bp, Homo sapien
ggctggcgcggaagaccacgccaaa

SEQ ID NO: 700434 - DNA, 25 bp, Homo sapien
cacgatcatgacgtcggactggcgc

SEQ ID NO: 700435 - DNA, 25 bp, Homo sapien
catgtgcatcatctccacggcgcag

SEQ ID NO: 700436 - DNA, 25 bp, Homo sapien
ccaaagcggtccatgtcgtagcggg

SEQ ID NO: 700437 - DNA, 25 bp, Homo sapien
gctgggcggctgggacgaggcctac

SEQ ID NO: 700438 - DNA, 25 bp, Homo sapien
ctggaagagaggcggggtccgtgcg

SEQ ID NO: 700439 - DNA, 25 bp, Homo sapien
tggaagagaggcggggtccgtgcgc

SEQ ID NO: 700440 - DNA, 25 bp, Homo sapien
atggagaccacgtagcgcggctccg

SEQ ID NO: 700441 - DNA, 25 bp, Homo sapien
cacgtagcgcggctccggcatctgg

SEQ ID NO: 700442 - DNA, 25 bp, Homo sapien
gcggctccggcatctggtcgtagac

SEQ ID NO: 700443 - DNA, 25 bp, Homo sapien
catggagaccacgtagcgcggctcc

SEQ ID NO: 700444 - DNA, 25 bp, Homo sapien
ggtagtagcctcctccgttggcgca

SEQ ID NO: 700445 - DNA, 25 bp, Homo sapien
agcccctcaccaccgagtaggaata

SEQ ID NO: 700446 - DNA, 25 bp, Homo sapien
gaatagtggtagtagcctcctccgt

SEQ ID NO: 700447 - DNA, 25 bp, Homo sapien
ccgagtaggaatagtggtagtagcc

SEQ ID NO: 700448 - DNA, 25 bp, Homo sapien
ggagtcctgcgtgcccttctgtaag

SEQ ID NO: 700449 - DNA, 25 bp, Homo sapien
tccgagtcggcccatccataggatg

SEQ ID NO: 700450 - DNA, 25 bp, Homo sapien
tgccaggtaggaccatatgaaactg

SEQ ID NO: 700451 - DNA, 25 bp, Homo sapien
gaaactgctgtaaaccaggcgtgtg

SEQ ID NO: 700452 - DNA, 25 bp, Homo sapien
acagggtggccaagaacaggactct

SEQ ID NO: 700453 - DNA, 25 bp, Homo sapien
gatataaagaatgttcccggtgcga

SEQ ID NO: 700454 - DNA, 25 bp, Homo sapien
gacctgaaccgtgcagaacgctgaa

SEQ ID NO: 700455 - DNA, 25 bp, Homo sapien
gaccacgtgaggtgcaagagtccca

SEQ ID NO: 700456 - DNA, 25 bp, Homo sapien
ccagacagggagcacagtccgcagg

SEQ ID NO: 700457 - DNA, 25 bp, Homo sapien
cccaaggagggaggagcgcagtccc

SEQ ID NO: 700458 - DNA, 25 bp, Homo sapien
gccgagcgcggtccgcagggaggga

SEQ ID NO: 700459 - DNA, 25 bp, Homo sapien
gagggaggagcacggtccccaagga

SEQ ID NO: 700460 - DNA, 25 bp, Homo sapien
ggctgccacgcaggttcagaacaaa

SEQ ID NO: 700461 - DNA, 25 bp, Homo sapien
gctcagcagacacacttagcagtgg

SEQ ID NO: 700462 - DNA, 25 bp, Homo sapien
gcttgagcaagaggacgaagcccag

SEQ ID NO: 700463 - DNA, 25 bp, Homo sapien
agggacctctcggacaagacgctga

SEQ ID NO: 700464 - DNA, 25 bp, Homo sapien
agggcctcggccgtaggtgggcagc

SEQ ID NO: 700465 - DNA, 25 bp, Homo sapien
cagggcctcggccgtaggtgggcag

SEQ ID NO: 700466 - DNA, 25 bp, Homo sapien
ggatgccgtagagcagggcctcggc

SEQ ID NO: 700467 - DNA, 25 bp, Homo sapien
gcaggatgccgtagagcagggcctc

SEQ ID NO: 700468 - DNA, 25 bp, Homo sapien
acctcacgggacacaagcaggctgg

SEQ ID NO: 700469 - DNA, 25 bp, Homo sapien
caggacggcgacaggctccggcggc

SEQ ID NO: 700470 - DNA, 25 bp, Homo sapien
ttgacaacctcacgggacacaagca

SEQ ID NO: 700471 - DNA, 25 bp, Homo sapien
ggtttattgacaacctcacgggaca

SEQ ID NO: 700472 - DNA, 25 bp, Homo sapien
gcggcccggatctgcgcaacggcgg

SEQ ID NO: 700473 - DNA, 25 bp, Homo sapien
acagccgcggcccggatctgcgcaa

SEQ ID NO: 700474 - DNA, 25 bp, Homo sapien
tcggcgccaacggtcaccgcgcgtc

SEQ ID NO: 700475 - DNA, 25 bp, Homo sapien
ctcggcgccaacggtcaccgcgcgt

SEQ ID NO: 700476 - DNA, 25 bp, Homo sapien
tctcgtcggcgcccgagttgttcat

SEQ ID NO: 700477 - DNA, 25 bp, Homo sapien
gatctcgtcggcgcccgagttgttc

SEQ ID NO: 700478 - DNA, 25 bp, Homo sapien
ccgatctcgtcggcgcccgagttgt

SEQ ID NO: 700479 - DNA, 25 bp, Homo sapien
atctcgtcggcgcccgagttgttca

SEQ ID NO: 700480 - DNA, 25 bp, Homo sapien
acggccacaagtgtcccagaacagg

SEQ ID NO: 700481 - DNA, 25 bp, Homo sapien
gctccaagtctcctgaggcgttgac

SEQ ID NO: 700482 - DNA, 25 bp, Homo sapien
tgaccccgcacccatgcatgctcca

SEQ ID NO: 700483 - DNA, 25 bp, Homo sapien
cttccaggtgtggattcccagggca

SEQ ID NO: 700484 - DNA, 25 bp, Homo sapien
gctactcaacaggatgtggcgaccc

SEQ ID NO: 700485 - DNA, 25 bp, Homo sapien
cagaggcgctcaagccagactttaa

SEQ ID NO: 700486 - DNA, 25 bp, Homo sapien
tcacatccaccatgtagggtccgcg

SEQ ID NO: 700487 - DNA, 25 bp, Homo sapien
cgctcccaaaggaggacactgtcca

SEQ ID NO: 700488 - DNA, 25 bp, Homo sapien
tgagagcagcttctaacgctaaagc

SEQ ID NO: 700489 - DNA, 25 bp, Homo sapien
accttctccctggtctacagacaga

SEQ ID NO: 700490 - DNA, 25 bp, Homo sapien
cagcaacagatagctttcgtttcac

SEQ ID NO: 700491 - DNA, 25 bp, Homo sapien
gtcttttactaccactcaggagcca

SEQ ID NO: 700492 - DNA, 25 bp, Homo sapien
agcagggcccggcacccagcaggag

SEQ ID NO: 700493 - DNA, 25 bp, Homo sapien
cagggcccggcacccagcaggagcc

SEQ ID NO: 700494 - DNA, 25 bp, Homo sapien
atccctgccagcagggcccggcacc

SEQ ID NO: 700495 - DNA, 25 bp, Homo sapien
ccagcagggcccggcacccagcagg

SEQ ID NO: 700496 - DNA, 25 bp, Homo sapien
tccataggctgtgcccgcgctgagt

SEQ ID NO: 700497 - DNA, 25 bp, Homo sapien
ctgtgcccgcgctgagtcagggcca

SEQ ID NO: 700498 - DNA, 25 bp, Homo sapien
ggctgtgcccgcgctgagtcagggc

SEQ ID NO: 700499 - DNA, 25 bp, Homo sapien
ataggctgtgcccgcgctgagtcag

SEQ ID NO: 700500 - DNA, 25 bp, Homo sapien
tagagacgagatctgaaaaggcaaa

SEQ ID NO: 700501 - DNA, 25 bp, Homo sapien
gccgtcttcaaaacgtcaacaagca

SEQ ID NO: 700502 - DNA, 25 bp, Homo sapien
gcacccactgccgtcttcaaaacgt

SEQ ID NO: 700503 - DNA, 25 bp, Homo sapien
tcctgacccttagagacgagatctg

SEQ ID NO: 700504 - DNA, 25 bp, Homo sapien
catgtctgagacaccacaaggctta

SEQ ID NO: 700505 - DNA, 25 bp, Homo sapien
tggcttcggctttcagcaaaaacgt

SEQ ID NO: 700506 - DNA, 25 bp, Homo sapien
caaaaacgtcgctgtcaggttgaac

SEQ ID NO: 700507 - DNA, 25 bp, Homo sapien
gaagaggtggttctatcggcgactc

SEQ ID NO: 700508 - DNA, 25 bp, Homo sapien
agggccttggctgtgccaactccca

SEQ ID NO: 700509 - DNA, 25 bp, Homo sapien
ttccacctcactgccgctccaggtg

SEQ ID NO: 700510 - DNA, 25 bp, Homo sapien
gactgtgccaactcccaatggggac

SEQ ID NO: 700511 - DNA, 25 bp, Homo sapien
actcccaatggggactgtgccaact

SEQ ID NO: 700512 - DNA, 25 bp, Homo sapien
aaacgtccttgtgcacgtgacggca

SEQ ID NO: 700513 - DNA, 25 bp, Homo sapien
attcaggatcaagacagcgctcgcc

SEQ ID NO: 700514 - DNA, 25 bp, Homo sapien
taaactagaagcctatgccacacgg

SEQ ID NO: 700515 - DNA, 25 bp, Homo sapien
aagatgatcccaatccttgccatgg

SEQ ID NO: 700516 - DNA, 25 bp, Homo sapien
gtgctccagtcaagaccgcccacga

SEQ ID NO: 700517 - DNA, 25 bp, Homo sapien
gtcaagaccgcccacgaagagcttc

SEQ ID NO: 700518 - DNA, 25 bp, Homo sapien
gtcgtgctccagtcaagaccgccca

SEQ ID NO: 700519 - DNA, 25 bp, Homo sapien
tccagtcaagaccgcccacgaagag

SEQ ID NO: 700520 - DNA, 25 bp, Homo sapien
gtccaccagccacgcaccgagcgat

SEQ ID NO: 700521 - DNA, 25 bp, Homo sapien
tggcagtgctgccggcacgcacact

SEQ ID NO: 700522 - DNA, 25 bp, Homo sapien
acacttgaggtcctcacgtaaatca

SEQ ID NO: 700523 - DNA, 25 bp, Homo sapien
acgcaccgagcgatgctgcactggg

SEQ ID NO: 700524 - DNA, 25 bp, Homo sapien
tttcatgataacacaatctacgact

SEQ ID NO: 700525 - DNA, 25 bp, Homo sapien
gtttcggccatctagcgtgtgcggt

SEQ ID NO: 700526 - DNA, 25 bp, Homo sapien
aatctacgacttctccatattggga

SEQ ID NO: 700527 - DNA, 25 bp, Homo sapien
caaacccaaagcctcgagactggtt

SEQ ID NO: 700528 - DNA, 25 bp, Homo sapien
tcccccggggtgtgcatggcttggg

SEQ ID NO: 700529 - DNA, 25 bp, Homo sapien
tctccggctgcatcccccggggtgt

SEQ ID NO: 700530 - DNA, 25 bp, Homo sapien
ggggtgtgcatggcttggggtcgat

SEQ ID NO: 700531 - DNA, 25 bp, Homo sapien
atcccccggggtgtgcatggcttgg

SEQ ID NO: 700532 - DNA, 25 bp, Homo sapien
taaatacatatagaccccaccctgc

SEQ ID NO: 700533 - DNA, 25 bp, Homo sapien
ggtggccgtcattttaggagacgca

SEQ ID NO: 700534 - DNA, 25 bp, Homo sapien
cgcaccctccggtccttaggaatgg

SEQ ID NO: 700535 - DNA, 25 bp, Homo sapien
tggagaggctggcacccggtgcctc

SEQ ID NO: 700536 - DNA, 25 bp, Homo sapien
caagtggtgcagtttactacgtgcc

SEQ ID NO: 700537 - DNA, 25 bp, Homo sapien
ccagctatgagagacacttgtgaaa

SEQ ID NO: 700538 - DNA, 25 bp, Homo sapien
tgctcgctgccgttgacgatcggga

SEQ ID NO: 700539 - DNA, 25 bp, Homo sapien
gacacagatgacacgggattccctg

SEQ ID NO: 700540 - DNA, 25 bp, Homo sapien
taaacctttgagggtgagtgctcgc

SEQ ID NO: 700541 - DNA, 25 bp, Homo sapien
aaacctttgagggtgagtgctcgcc

SEQ ID NO: 700542 - DNA, 25 bp, Homo sapien
tgaagtattccctgagctctgtctc

SEQ ID NO: 700543 - DNA, 25 bp, Homo sapien
ttgatttactgttatcgctcctggg

SEQ ID NO: 700544 - DNA, 25 bp, Homo sapien
ggaattccaccgacaaatatcttat

SEQ ID NO: 700545 - DNA, 25 bp, Homo sapien
agctctgtctcaccacaattgtgag

SEQ ID NO: 700546 - DNA, 25 bp, Homo sapien
ctttccacctttccggagggcgcag

SEQ ID NO: 700547 - DNA, 25 bp, Homo sapien
gagctcccagcctgaaaggcccgtg

SEQ ID NO: 700548 - DNA, 25 bp, Homo sapien
gcctgaaaggcccgtgcacctgtgg

SEQ ID NO: 700549 - DNA, 25 bp, Homo sapien
ggaaatacgagacagcgagctccca

SEQ ID NO: 700550 - DNA, 25 bp, Homo sapien
ctcggccctcactcgaagtggcggg

SEQ ID NO: 700551 - DNA, 25 bp, Homo sapien
ggaagcaaagggcacgctcggccct

SEQ ID NO: 700552 - DNA, 25 bp, Homo sapien
gctcggccctcactcgaagtggcgg

SEQ ID NO: 700553 - DNA, 25 bp, Homo sapien
ccaaacgcgggaagcaaagggcacg

SEQ ID NO: 700554 - DNA, 25 bp, Homo sapien
tccagggcaggcgtctggatacccg

SEQ ID NO: 700555 - DNA, 25 bp, Homo sapien
accacaggtggtcttccgagggcac

SEQ ID NO: 700556 - DNA, 25 bp, Homo sapien
tgctgacggacatgaagggccaaca

SEQ ID NO: 700557 - DNA, 25 bp, Homo sapien
gaacccaaactctcgcacagggtgc

SEQ ID NO: 700558 - DNA, 25 bp, Homo sapien
tgcttctcggcgtcatagatcatga

SEQ ID NO: 700559 - DNA, 25 bp, Homo sapien
catagatcatgactacctccgtgac

SEQ ID NO: 700560 - DNA, 25 bp, Homo sapien
tctcggcgtcatagatcatgactac

SEQ ID NO: 700561 - DNA, 25 bp, Homo sapien
gggcctctgcttctcggcgtcatag

SEQ ID NO: 700562 - DNA, 25 bp, Homo sapien
accggccacactgggaggactggat

SEQ ID NO: 700563 - DNA, 25 bp, Homo sapien
ggaaaatccaaactccacaccgagc

SEQ ID NO: 700564 - DNA, 25 bp, Homo sapien
caaaccagcatggatgggtgtgcaa

SEQ ID NO: 700565 - DNA, 25 bp, Homo sapien
tgacgacacgaaatgagaccggcca

SEQ ID NO: 700566 - DNA, 25 bp, Homo sapien
ttttttgcccatgatgtcgtgaaaa

SEQ ID NO: 700567 - DNA, 25 bp, Homo sapien
gattgttcgtcctcgaaagtaataa

SEQ ID NO: 700568 - DNA, 25 bp, Homo sapien
agcctggtccactgattgttcgtcc

SEQ ID NO: 700569 - DNA, 25 bp, Homo sapien
tcgtcctcgaaagtaataaatccaa

SEQ ID NO: 700570 - DNA, 25 bp, Homo sapien
catggagggttaactaccacgcggt

SEQ ID NO: 700571 - DNA, 25 bp, Homo sapien
cactcaagtaaaatggcagcgtcct

SEQ ID NO: 700572 - DNA, 25 bp, Homo sapien
gaacaggatccgttagctcaaggca

SEQ ID NO: 700573 - DNA, 25 bp, Homo sapien
tccgttaacgggagaagctgccgca

SEQ ID NO: 700574 - DNA, 25 bp, Homo sapien
gctgtcccgaggctcagctcgttta

SEQ ID NO: 700575 - DNA, 25 bp, Homo sapien
atatccttgctgccacgtgggcggg

SEQ ID NO: 700576 - DNA, 25 bp, Homo sapien
attggcagcgttgggcacaacccgg

SEQ ID NO: 700577 - DNA, 25 bp, Homo sapien
ccagccattggcagcgttgggcaca

SEQ ID NO: 700578 - DNA, 25 bp, Homo sapien
tcgcgaggtgcagacgctcactgca

SEQ ID NO: 700579 - DNA, 25 bp, Homo sapien
ctcaaggacactgtgaaccgcggct

SEQ ID NO: 700580 - DNA, 25 bp, Homo sapien
cctctcagggtttcgtgctcagacc

SEQ ID NO: 700581 - DNA, 25 bp, Homo sapien
tcttcccggtgacaatgagtcccag

SEQ ID NO: 700582 - DNA, 25 bp, Homo sapien
caatcgcctgtcctgccggcaccca

SEQ ID NO: 700583 - DNA, 25 bp, Homo sapien
aatcgcctgtcctgccggcacccac

SEQ ID NO: 700584 - DNA, 25 bp, Homo sapien
tcgcctgtcctgccggcacccacat

SEQ ID NO: 700585 - DNA, 25 bp, Homo sapien
atcgcctgtcctgccggcacccaca

SEQ ID NO: 700586 - DNA, 25 bp, Homo sapien
cacgatgtaggaggtgaacggtggg

SEQ ID NO: 700587 - DNA, 25 bp, Homo sapien
gggtggacacgatgtaggaggtgaa

SEQ ID NO: 700588 - DNA, 25 bp, Homo sapien
caggaggggtggacacgatgtagga

SEQ ID NO: 700589 - DNA, 25 bp, Homo sapien
tggacacgatgtaggaggtgaacgg

SEQ ID NO: 700590 - DNA, 25 bp, Homo sapien
tgtggcggggcaccgtagccctgag

SEQ ID NO: 700591 - DNA, 25 bp, Homo sapien
tgaactgtggcggggcaccgtagcc

SEQ ID NO: 700592 - DNA, 25 bp, Homo sapien
gggcaccgtagccctgagggaagcc

SEQ ID NO: 700593 - DNA, 25 bp, Homo sapien
gcggggcaccgtagccctgagggaa

SEQ ID NO: 700594 - DNA, 25 bp, Homo sapien
tctttcagaaggacaaaaacctgcc

SEQ ID NO: 700595 - DNA, 25 bp, Homo sapien
ggtgggcctcagacaagaactcaag

SEQ ID NO: 700596 - DNA, 25 bp, Homo sapien
catcctgacgtgcttggaagggact

SEQ ID NO: 700597 - DNA, 25 bp, Homo sapien
tccccatgtttaggaagctgccagc

SEQ ID NO: 700598 - DNA, 25 bp, Homo sapien
agctgtcgggggcttgctcatgtcc

SEQ ID NO: 700599 - DNA, 25 bp, Homo sapien
agacggaggcggtgggaaagccaga

SEQ ID NO: 700600 - DNA, 25 bp, Homo sapien
ccccggaggggcaaactgatctggc

SEQ ID NO: 700601 - DNA, 25 bp, Homo sapien
atactgaccataggggaagtctggc

SEQ ID NO: 700602 - DNA, 25 bp, Homo sapien
gccagtctcagacacgccagggttt

SEQ ID NO: 700603 - DNA, 25 bp, Homo sapien
caggcctagaggaagcgtgttcaca

SEQ ID NO: 700604 - DNA, 25 bp, Homo sapien
aaccctgcttgtgaatgacccctgg

SEQ ID NO: 700605 - DNA, 25 bp, Homo sapien
tatgacgagtgctctgctgcgacaa

SEQ ID NO: 700606 - DNA, 25 bp, Homo sapien
tgaccataagactgtaaacaaagtg

SEQ ID NO: 700607 - DNA, 25 bp, Homo sapien
ctgaccataagactgtaaacaaagt

SEQ ID NO: 700608 - DNA, 25 bp, Homo sapien
cctgaccataagactgtaaacaaag

SEQ ID NO: 700609 - DNA, 25 bp, Homo sapien
acctcccggtgcaggcgggtgggag

SEQ ID NO: 700610 - DNA, 25 bp, Homo sapien
ccaatgtcttggcaccggcaagggc

SEQ ID NO: 700611 - DNA, 25 bp, Homo sapien
cccattcgggtgcacgtgggcacag

SEQ ID NO: 700612 - DNA, 25 bp, Homo sapien
gcccgctgaaggcttgtggccaatg

SEQ ID NO: 700613 - DNA, 25 bp, Homo sapien
tccatcggtggcacgtgtcagggaa

SEQ ID NO: 700614 - DNA, 25 bp, Homo sapien
aaggcacggtggaccaggcttctag

SEQ ID NO: 700615 - DNA, 25 bp, Homo sapien
ggacagcggtgtctttacaaggaca

SEQ ID NO: 700616 - DNA, 25 bp, Homo sapien
tgttcaatcccgaagacgtggttgg

SEQ ID NO: 700617 - DNA, 25 bp, Homo sapien
aaagtcctgtgagctcggggcggtc

SEQ ID NO: 700618 - DNA, 25 bp, Homo sapien
tccctgggcggttggcactgccgtc

SEQ ID NO: 700619 - DNA, 25 bp, Homo sapien
ttggcactgccgtcgagcgaggcca

SEQ ID NO: 700620 - DNA, 25 bp, Homo sapien
gccgagcctgccttgagtccacggg

SEQ ID NO: 700621 - DNA, 25 bp, Homo sapien
cgaagccactcaagtcctgcccgta

SEQ ID NO: 700622 - DNA, 25 bp, Homo sapien
aagccctgtccgaagccactcaagt

SEQ ID NO: 700623 - DNA, 25 bp, Homo sapien
tgagaagccctgtccgaagccactc

SEQ ID NO: 700624 - DNA, 25 bp, Homo sapien
gaagccactcaagtcctgcccgtaa

SEQ ID NO: 700625 - DNA, 25 bp, Homo sapien
ttgcacgttgtggttctgccctcgt

SEQ ID NO: 700626 - DNA, 25 bp, Homo sapien
gtggaacccttgcacgttgtggttc

SEQ ID NO: 700627 - DNA, 25 bp, Homo sapien
acccttgcacgttgtggttctgccc

SEQ ID NO: 700628 - DNA, 25 bp, Homo sapien
cgttgtggttctgccctcgtccaaa

SEQ ID NO: 700629 - DNA, 25 bp, Homo sapien
ccccaaggttgagtcgccactttgc

SEQ ID NO: 700630 - DNA, 25 bp, Homo sapien
tcacgagttcacaagtttggaatcc

SEQ ID NO: 700631 - DNA, 25 bp, Homo sapien
tggaatcctgggtctgggccgtgca

SEQ ID NO: 700632 - DNA, 25 bp, Homo sapien
gccgccaagtttgtgattgtcacga

SEQ ID NO: 700633 - DNA, 25 bp, Homo sapien
cagtatacatcgtagaaaatttctc

SEQ ID NO: 700634 - DNA, 25 bp, Homo sapien
taagccagtatacatcgtagaaaat

SEQ ID NO: 700635 - DNA, 25 bp, Homo sapien
taaaaaataagccagtatacatcgt

SEQ ID NO: 700636 - DNA, 25 bp, Homo sapien
aaataagccagtatacatcgtagaa

SEQ ID NO: 700637 - DNA, 25 bp, Homo sapien
caggtcagtcgacaaaagcaaggaa

SEQ ID NO: 700638 - DNA, 25 bp, Homo sapien
aaactggtcaatgggaaacgccctg

SEQ ID NO: 700639 - DNA, 25 bp, Homo sapien
aggcttcctactcggttcggttcag

SEQ ID NO: 700640 - DNA, 25 bp, Homo sapien
tcagacactaccaagcaggtcagtc

SEQ ID NO: 700641 - DNA, 25 bp, Homo sapien
aatccaaacgcacttctctttattc

SEQ ID NO: 700642 - DNA, 25 bp, Homo sapien
gaagagatcgctttggtccgcgcct

SEQ ID NO: 700643 - DNA, 25 bp, Homo sapien
tcctcagaagagatcgctttggtcc

SEQ ID NO: 700644 - DNA, 25 bp, Homo sapien
gatcgctttggtccgcgcctgcgca

SEQ ID NO: 700645 - DNA, 25 bp, Homo sapien
ggatcctcagaagagatcgctttgg

SEQ ID NO: 700646 - DNA, 25 bp, Homo sapien
cccgcgagacggtcagaggttggat

SEQ ID NO: 700647 - DNA, 25 bp, Homo sapien
aggttggatggagccggataggccc

SEQ ID NO: 700648 - DNA, 25 bp, Homo sapien
gagacgcgccaaatcgcaacactca

SEQ ID NO: 700649 - DNA, 25 bp, Homo sapien
gataggcccggcagagacgcgccaa

SEQ ID NO: 700650 - DNA, 25 bp, Homo sapien
gccccaacatccagccgcctgcagg

SEQ ID NO: 700651 - DNA, 25 bp, Homo sapien
gtcgggagcaagccgccgtagccgc

SEQ ID NO: 700652 - DNA, 25 bp, Homo sapien
cgcccctcgccccaacatccagccg

SEQ ID NO: 700653 - DNA, 25 bp, Homo sapien
caagccgccgtagccgcggggacga

SEQ ID NO: 700654 - DNA, 25 bp, Homo sapien
tacgaggacccggacatgaaggccc

SEQ ID NO: 700655 - DNA, 25 bp, Homo sapien
aggacaccgcggaagacgcgcggcg

SEQ ID NO: 700656 - DNA, 25 bp, Homo sapien
ggatcgggcgtcagcgggatcccga

SEQ ID NO: 700657 - DNA, 25 bp, Homo sapien
tcactcgcggctccgggttacgagg

SEQ ID NO: 700658 - DNA, 25 bp, Homo sapien
ccagcagctggtcgaggtccacgcc

SEQ ID NO: 700659 - DNA, 25 bp, Homo sapien
gctggtcgaggtccacgccgcggta

SEQ ID NO: 700660 - DNA, 25 bp, Homo sapien
agcagctggtcgaggtccacgccgc

SEQ ID NO: 700661 - DNA, 25 bp, Homo sapien
tccacgccgcggtaggtgaacttgc

SEQ ID NO: 700662 - DNA, 25 bp, Homo sapien
ggacagttttctgggcgcaagacca

SEQ ID NO: 700663 - DNA, 25 bp, Homo sapien
taagcaaaaacctcaacgtctctgg

SEQ ID NO: 700664 - DNA, 25 bp, Homo sapien
tattctaagtcacgtgggctacaga

SEQ ID NO: 700665 - DNA, 25 bp, Homo sapien
aaatctaaggagtctaacgcagccc

SEQ ID NO: 700666 - DNA, 25 bp, Homo sapien
ggcaacactgaaactcgtctctact

SEQ ID NO: 700667 - DNA, 25 bp, Homo sapien
ctgcagtgagctgggacggagccat

SEQ ID NO: 700668 - DNA, 25 bp, Homo sapien
ctgggcaacactgaaactcgtctct

SEQ ID NO: 700669 - DNA, 25 bp, Homo sapien
tgagctgggacggagccattgcact

SEQ ID NO: 700670 - DNA, 25 bp, Homo sapien
cgcaggggaaggcaggtagggcgca

SEQ ID NO: 700671 - DNA, 25 bp, Homo sapien
aacgcaggggaaggcaggtagggcg

SEQ ID NO: 700672 - DNA, 25 bp, Homo sapien
acgcaggggaaggcaggtagggcgc

SEQ ID NO: 700673 - DNA, 25 bp, Homo sapien
gagattcagagagaacaagcggccc

SEQ ID NO: 700674 - DNA, 25 bp, Homo sapien
tgcagcgtacagctcgggccaaagg

SEQ ID NO: 700675 - DNA, 25 bp, Homo sapien
acaaggtgctgcagcgtacagctcg

SEQ ID NO: 700676 - DNA, 25 bp, Homo sapien
caccgtgtgactgcagagattcaga

SEQ ID NO: 700677 - DNA, 25 bp, Homo sapien
ggacagagccgcagtggacctgtca

SEQ ID NO: 700678 - DNA, 25 bp, Homo sapien
gacagagaactaaggcttggttctc

SEQ ID NO: 700679 - DNA, 25 bp, Homo sapien
gagaactaaggcttggttctctcca

SEQ ID NO: 700680 - DNA, 25 bp, Homo sapien
gacctgtcactgtccattgtagtga

SEQ ID NO: 700681 - DNA, 25 bp, Homo sapien
ggcagttttgtgagcggcccggcct

SEQ ID NO: 700682 - DNA, 25 bp, Homo sapien
caggcagttttgtgagcggcccggc

SEQ ID NO: 700683 - DNA, 25 bp, Homo sapien
aggcagttttgtgagcggcccggcc

SEQ ID NO: 700684 - DNA, 25 bp, Homo sapien
gcagttttgtgagcggcccggcctg

SEQ ID NO: 700685 - DNA, 25 bp, Homo sapien
aggcgcttcagcagggagtgctgct

SEQ ID NO: 700686 - DNA, 25 bp, Homo sapien
tcagcagggagtgctgcttccgccg

SEQ ID NO: 700687 - DNA, 25 bp, Homo sapien
ggcgcgcactgtacagctgcatcag

SEQ ID NO: 700688 - DNA, 25 bp, Homo sapien
gccgctggcgcgcactgtacagctg

SEQ ID NO: 700689 - DNA, 25 bp, Homo sapien
ccaccatctcgggtaggatgatcat

SEQ ID NO: 700690 - DNA, 25 bp, Homo sapien
catgctgcccaccatctcgggtagg

SEQ ID NO: 700691 - DNA, 25 bp, Homo sapien
gctgcccaccatctcgggtaggatg

SEQ ID NO: 700692 - DNA, 25 bp, Homo sapien
tgcccaccatctcgggtaggatgat

SEQ ID NO: 700693 - DNA, 25 bp, Homo sapien
ctgcgggagaccaagagcaaagctg

SEQ ID NO: 700694 - DNA, 25 bp, Homo sapien
agctgatcccgcctgcatcaggcga

SEQ ID NO: 700695 - DNA, 25 bp, Homo sapien
gtgtcagctgatcccgcctgcatca

SEQ ID NO: 700696 - DNA, 25 bp, Homo sapien
accaagagcaaagctgggtgtcagc

SEQ ID NO: 700697 - DNA, 25 bp, Homo sapien
atgccgggccggccatgctttacgg

SEQ ID NO: 700698 - DNA, 25 bp, Homo sapien
ccgggccggccatgctttacgggct

SEQ ID NO: 700699 - DNA, 25 bp, Homo sapien
cgggccggccatgctttacgggctt

SEQ ID NO: 700700 - DNA, 25 bp, Homo sapien
cgatgccgggccggccatgctttac

SEQ ID NO: 700701 - DNA, 25 bp, Homo sapien
cgcgcctggctgcaaatcatgttta

SEQ ID NO: 700702 - DNA, 25 bp, Homo sapien
ggagctacacacctgggcttgggca

SEQ ID NO: 700703 - DNA, 25 bp, Homo sapien
tacggccatcagagagcccatggag

SEQ ID NO: 700704 - DNA, 25 bp, Homo sapien
taaatttgaagatatagccagctgc

SEQ ID NO: 700705 - DNA, 25 bp, Homo sapien
tttcaagcccggtgggttcaggtca

SEQ ID NO: 700706 - DNA, 25 bp, Homo sapien
ttaagaccacactccaaactttgga

SEQ ID NO: 700707 - DNA, 25 bp, Homo sapien
ggtcaacccacaggcgaattttcaa

SEQ ID NO: 700708 - DNA, 25 bp, Homo sapien
tactggagccaagcttataaccctg

SEQ ID NO: 700709 - DNA, 25 bp, Homo sapien
gtccccgaagaaggccgagtgcagc

SEQ ID NO: 700710 - DNA, 25 bp, Homo sapien
aagaaggccgagtgcagcaggctca

SEQ ID NO: 700711 - DNA, 25 bp, Homo sapien
ccccgaagaaggccgagtgcagcag

SEQ ID NO: 700712 - DNA, 25 bp, Homo sapien
tggtccccgaagaaggccgagtgca

SEQ ID NO: 700713 - DNA, 25 bp, Homo sapien
gggccagggaacgtgttgcctgagt

SEQ ID NO: 700714 - DNA, 25 bp, Homo sapien
gggatccaaggtcagtcctgtcctt

SEQ ID NO: 700715 - DNA, 25 bp, Homo sapien
ctcccttcttatccctctgggggtg

SEQ ID NO: 700716 - DNA, 25 bp, Homo sapien
ttgcctgagttcacctgtgccagcc

SEQ ID NO: 700717 - DNA, 25 bp, Homo sapien
tcctgttgggccttgagctgaagac

SEQ ID NO: 700718 - DNA, 25 bp, Homo sapien
gctgtttcctgttgggccttgagct

SEQ ID NO: 700719 - DNA, 25 bp, Homo sapien
agggccttgtcccgggccagcactg

SEQ ID NO: 700720 - DNA, 25 bp, Homo sapien
agctgaagacccgagggccttgtcc

SEQ ID NO: 700721 - DNA, 25 bp, Homo sapien
gcaggtgcgtcagggtgggacaggg

SEQ ID NO: 700722 - DNA, 25 bp, Homo sapien
acagggttcgggtccaggctggagc

SEQ ID NO: 700723 - DNA, 25 bp, Homo sapien
tgcaggtgcgtcagggtgggacagg

SEQ ID NO: 700724 - DNA, 25 bp, Homo sapien
cggggtctccgcggcgcgggcaggg

SEQ ID NO: 700725 - DNA, 25 bp, Homo sapien
gggtgtgtgcgcaggaccggctgca

SEQ ID NO: 700726 - DNA, 25 bp, Homo sapien
ccagctcaccgggactcagtttccc

SEQ ID NO: 700727 - DNA, 25 bp, Homo sapien
cagggaggtccggatggtgaagccc

SEQ ID NO: 700728 - DNA, 25 bp, Homo sapien
tccggatggtgaagcccgtgagtgg

SEQ ID NO: 700729 - DNA, 25 bp, Homo sapien
tgaaaacaccacgaaggccagtggg

SEQ ID NO: 700730 - DNA, 25 bp, Homo sapien
ttgtctcagacgcaccaatggcagc

SEQ ID NO: 700731 - DNA, 25 bp, Homo sapien
taagctgtgcagaaacggcaggaca

SEQ ID NO: 700732 - DNA, 25 bp, Homo sapien
caaggctgttcaggtctccagtggg

SEQ ID NO: 700733 - DNA, 25 bp, Homo sapien
atgcccgacgtctctgtctccagct

SEQ ID NO: 700734 - DNA, 25 bp, Homo sapien
tcatgcccgacgtctctgtctccag

SEQ ID NO: 700735 - DNA, 25 bp, Homo sapien
ccagctgctcgtagggcgccacgga

SEQ ID NO: 700736 - DNA, 25 bp, Homo sapien
aggtggctggagttgtcccttagct

SEQ ID NO: 700737 - DNA, 25 bp, Homo sapien
gacaccagcactcgggcctcctgct

SEQ ID NO: 700738 - DNA, 25 bp, Homo sapien
aggacaccagcactcgggcctcctg

SEQ ID NO: 700739 - DNA, 25 bp, Homo sapien
ggacaccagcactcgggcctcctgc

SEQ ID NO: 700740 - DNA, 25 bp, Homo sapien
gcccggagccgtgtactgggctgcc

SEQ ID NO: 700741 - DNA, 25 bp, Homo sapien
ccggagccgtgtactgggctgccct

SEQ ID NO: 700742 - DNA, 25 bp, Homo sapien
agggcccggagccgtgtactgggct

SEQ ID NO: 700743 - DNA, 25 bp, Homo sapien
ggcccggagccgtgtactgggctgc

SEQ ID NO: 700744 - DNA, 25 bp, Homo sapien
ggcaaggtctctcccgtggcactcc

SEQ ID NO: 700745 - DNA, 25 bp, Homo sapien
ttactgtatgccaaggttaacaggc

SEQ ID NO: 700746 - DNA, 25 bp, Homo sapien
ggtattgaaattaactgggggatgc

SEQ ID NO: 700747 - DNA, 25 bp, Homo sapien
ttgaaattaactgggggatgcaaaa

SEQ ID NO: 700748 - DNA, 25 bp, Homo sapien
tgagagtagtaccagagcttctcct

SEQ ID NO: 700749 - DNA, 25 bp, Homo sapien
gccctgcagctgagagtagtaccag

SEQ ID NO: 700750 - DNA, 25 bp, Homo sapien
tcgtccaggcgcttggacaggccct

SEQ ID NO: 700751 - DNA, 25 bp, Homo sapien
tccaggcgcttggacaggccctgca

SEQ ID NO: 700752 - DNA, 25 bp, Homo sapien
atctcgtccgaggtgccgaagcgct

SEQ ID NO: 700753 - DNA, 25 bp, Homo sapien
gctcctccatcagcgagcggatgtg

SEQ ID NO: 700754 - DNA, 25 bp, Homo sapien
cgaactcaagctgctgccggatcag

SEQ ID NO: 700755 - DNA, 25 bp, Homo sapien
gatgtgctgggcctcgaactcaagc

SEQ ID NO: 700756 - DNA, 25 bp, Homo sapien
tgcactcggtcctgcgcctccagca

SEQ ID NO: 700757 - DNA, 25 bp, Homo sapien
ctgctgcactcggtcctgcgcctcc

SEQ ID NO: 700758 - DNA, 25 bp, Homo sapien
tctgctccaggcgcgaggcgcggat

SEQ ID NO: 700759 - DNA, 25 bp, Homo sapien
ctggggctccgtctgctgcactcgg

SEQ ID NO: 700760 - DNA, 25 bp, Homo sapien
tctgtctcggggtcctcgtccaccg

SEQ ID NO: 700761 - DNA, 25 bp, Homo sapien
tcgtccaccggcaccgacttcaccg

SEQ ID NO: 700762 - DNA, 25 bp, Homo sapien
tgctgttgcccggctgaggggtgcc

SEQ ID NO: 700763 - DNA, 25 bp, Homo sapien
tcagggtgtgtggggacctctgtct

SEQ ID NO: 700764 - DNA, 25 bp, Homo sapien
gccagcagcgtgcgcgctgtatcct

SEQ ID NO: 700765 - DNA, 25 bp, Homo sapien
cagcgtgcgcgctgtatcctcctgg

SEQ ID NO: 700766 - DNA, 25 bp, Homo sapien
tcctggtcgcgcgtcgccaacatgg

SEQ ID NO: 700767 - DNA, 25 bp, Homo sapien
gcgtcgccaacatggacaacagcca

SEQ ID NO: 700768 - DNA, 25 bp, Homo sapien
ctcggtgccgtggaggatttgcagc

SEQ ID NO: 700769 - DNA, 25 bp, Homo sapien
cagacagcccgagcggcgcatggcc

SEQ ID NO: 700770 - DNA, 25 bp, Homo sapien
tcggtgccgtggaggatttgcagca

SEQ ID NO: 700771 - DNA, 25 bp, Homo sapien
gacagcccgagcggcgcatggccac

SEQ ID NO: 700772 - DNA, 25 bp, Homo sapien
ctgcgagaagacgatgttgtgcagc

SEQ ID NO: 700773 - DNA, 25 bp, Homo sapien
cgagaagacgatgttgtgcagcgcc

SEQ ID NO: 700774 - DNA, 25 bp, Homo sapien
agacgatgttgtgcagcgccgcgtt

SEQ ID NO: 700775 - DNA, 25 bp, Homo sapien
gccgcgttggcgcgcatgcgtgcgt

SEQ ID NO: 700776 - DNA, 25 bp, Homo sapien
ggtctcgcagtaggcccggatctgc

SEQ ID NO: 700777 - DNA, 25 bp, Homo sapien
gcagtaggcccggatctgctccagc

SEQ ID NO: 700778 - DNA, 25 bp, Homo sapien
tgcaggacgcgcatctccttgcgcg

SEQ ID NO: 700779 - DNA, 25 bp, Homo sapien
tccagcacgtgcaggacgcgcatct

SEQ ID NO: 700780 - DNA, 25 bp, Homo sapien
ccaggtacgatcatgggcgggtctt

SEQ ID NO: 700781 - DNA, 25 bp, Homo sapien
tagctgcacgttaattgcgcggagg

SEQ ID NO: 700782 - DNA, 25 bp, Homo sapien
ggatcccgggagctttgcaaatggc

SEQ ID NO: 700783 - DNA, 25 bp, Homo sapien
tgcattcagcgacttcccgagcgtt

SEQ ID NO: 700784 - DNA, 25 bp, Homo sapien
cacggcggtactcctcatcaaagga

SEQ ID NO: 700785 - DNA, 25 bp, Homo sapien
gcttcataacagcacaggtggcctg

SEQ ID NO: 700786 - DNA, 25 bp, Homo sapien
cctggcagatctgcggctcgatggg

SEQ ID NO: 700787 - DNA, 25 bp, Homo sapien
ctagctcgttcatggcacggcggta

SEQ ID NO: 700788 - DNA, 25 bp, Homo sapien
cagggtgacggtccactcatgagag

SEQ ID NO: 700789 - DNA, 25 bp, Homo sapien
tgtgtccctttagcggccgaggagc

SEQ ID NO: 700790 - DNA, 25 bp, Homo sapien
ccgaagcctcagaccagatcgggag

SEQ ID NO: 700791 - DNA, 25 bp, Homo sapien
gatgttgcaatgtcctcaaacgtaa

SEQ ID NO: 700792 - DNA, 25 bp, Homo sapien
ggtcccgggtcatcttgtgcatctc

SEQ ID NO: 700793 - DNA, 25 bp, Homo sapien
caggttcagcgggtcccgggtcatc

SEQ ID NO: 700794 - DNA, 25 bp, Homo sapien
gtcatgcccgcgtagcggcgcagcg

SEQ ID NO: 700795 - DNA, 25 bp, Homo sapien
tgttggcaacgtccccaaaggtgag

SEQ ID NO: 700796 - DNA, 25 bp, Homo sapien
cctgaggccccctctacaatgaggg

SEQ ID NO: 700797 - DNA, 25 bp, Homo sapien
tgatcctgaccactaccggggacgg

SEQ ID NO: 700798 - DNA, 25 bp, Homo sapien
agccccgtctgtgtgctgcagctgc

SEQ ID NO: 700799 - DNA, 25 bp, Homo sapien
ggacggttaccccatgctcaggtcg

SEQ ID NO: 700800 - DNA, 25 bp, Homo sapien
gctcctcactgtcggaggccagctg

SEQ ID NO: 700801 - DNA, 25 bp, Homo sapien
ccagctgggccacgatggcctccat

SEQ ID NO: 700802 - DNA, 25 bp, Homo sapien
ggccagctgggccacgatggcctcc

SEQ ID NO: 700803 - DNA, 25 bp, Homo sapien
gagctcctcactgtcggaggccagc

SEQ ID NO: 700804 - DNA, 25 bp, Homo sapien
tgctgttgatgtcggccctccagga

SEQ ID NO: 700805 - DNA, 25 bp, Homo sapien
actgcaccagggcagtcacgctgcc

SEQ ID NO: 700806 - DNA, 25 bp, Homo sapien
aagttccgaaggatgctggacacca

SEQ ID NO: 700807 - DNA, 25 bp, Homo sapien
tccaggacaagttccgaaggatgct

SEQ ID NO: 700808 - DNA, 25 bp, Homo sapien
ctgtagtcctcacgggtggcgacga

SEQ ID NO: 700809 - DNA, 25 bp, Homo sapien
tcagcacgctcttcagggtggactc

SEQ ID NO: 700810 - DNA, 25 bp, Homo sapien
agacagattccacagggcgctcagc

SEQ ID NO: 700811 - DNA, 25 bp, Homo sapien
tgatggccagcgagttgctctgaca

SEQ ID NO: 700812 - DNA, 25 bp, Homo sapien
tcccaaagattgcatgacagagact

SEQ ID NO: 700813 - DNA, 25 bp, Homo sapien
tggatcttggaaagactaatttttg

SEQ ID NO: 700814 - DNA, 25 bp, Homo sapien
agatgtggcaggtaaaagtaaacgc

SEQ ID NO: 700815 - DNA, 25 bp, Homo sapien
catctggttaggtttggatcttgga

SEQ ID NO: 700816 - DNA, 25 bp, Homo sapien
ctgtaggcacagggcgggttagcct

SEQ ID NO: 700817 - DNA, 25 bp, Homo sapien
taggcacagggcgggttagcctggg

SEQ ID NO: 700818 - DNA, 25 bp, Homo sapien
tgtaggcacagggcgggttagcctg

SEQ ID NO: 700819 - DNA, 25 bp, Homo sapien
cacagggcgggttagcctgggccac

SEQ ID NO: 700820 - DNA, 25 bp, Homo sapien
cgaatcggaagcatagtcttgggcc

SEQ ID NO: 700821 - DNA, 25 bp, Homo sapien
tctgcagacagttgtgatcccggag

SEQ ID NO: 700822 - DNA, 25 bp, Homo sapien
tgaggctgaagctatcgtcggacga

SEQ ID NO: 700823 - DNA, 25 bp, Homo sapien
gcatatgttcgcgtgggcagtaccc

SEQ ID NO: 700824 - DNA, 25 bp, Homo sapien
tcttgcgccgccagtttctgcagtg

SEQ ID NO: 700825 - DNA, 25 bp, Homo sapien
ttgaggcaccctcaagcagtggcac

SEQ ID NO: 700826 - DNA, 25 bp, Homo sapien
cacgtgctgataggtaggcgacagc

SEQ ID NO: 700827 - DNA, 25 bp, Homo sapien
tctcgggaaccttgctcaggtggtc

SEQ ID NO: 700828 - DNA, 25 bp, Homo sapien
caagcggtgtctcctgcacgtagtt

SEQ ID NO: 700829 - DNA, 25 bp, Homo sapien
tccagggaggagtcactgtcatcca

SEQ ID NO: 700830 - DNA, 25 bp, Homo sapien
gcacgtagttctccgacgagctgga

SEQ ID NO: 700831 - DNA, 25 bp, Homo sapien
gatgtccaggaagcgcttcacgtag

SEQ ID NO: 700832 - DNA, 25 bp, Homo sapien
cgctagagaagttgaccggcgtgcc

SEQ ID NO: 700833 - DNA, 25 bp, Homo sapien
gcaccaacatgtagacgggcacggg

SEQ ID NO: 700834 - DNA, 25 bp, Homo sapien
gcacgtagtgctcgtgcaaggccag

SEQ ID NO: 700835 - DNA, 25 bp, Homo sapien
gtgggtctttgcctgcccgctggtc

SEQ ID NO: 700836 - DNA, 25 bp, Homo sapien
tcgtccgagtcgttgccgtagaagc

SEQ ID NO: 700837 - DNA, 25 bp, Homo sapien
gacaattgaattggcgccctcctgg

SEQ ID NO: 700838 - DNA, 25 bp, Homo sapien
gggctttgagccgtccttgtctgcg

SEQ ID NO: 700839 - DNA, 25 bp, Homo sapien
tctcgtcagcaatgaggctgggctg

SEQ ID NO: 700840 - DNA, 25 bp, Homo sapien
gtagatcactgttcgtccccggagc

SEQ ID NO: 700841 - DNA, 25 bp, Homo sapien
gatctctgcgtcttgtgctgcttcg

SEQ ID NO: 700842 - DNA, 25 bp, Homo sapien
actgacagcccggatacgaaggaca

SEQ ID NO: 700843 - DNA, 25 bp, Homo sapien
tcccgctggtcttgactgaggctgc

SEQ ID NO: 700844 - DNA, 25 bp, Homo sapien
gcctctgcatgaacgggatccgcac

SEQ ID NO: 700845 - DNA, 25 bp, Homo sapien
ggccggcctctgcatgaacgggatc

SEQ ID NO: 700846 - DNA, 25 bp, Homo sapien
cggcctctgcatgaacgggatccgc

SEQ ID NO: 700847 - DNA, 25 bp, Homo sapien
ccgggccggcctctgcatgaacggg

SEQ ID NO: 700848 - DNA, 25 bp, Homo sapien
gcccgagccagcggtggcggcccac

SEQ ID NO: 700849 - DNA, 25 bp, Homo sapien
cccggctccgggactgcccgagcca

SEQ ID NO: 700850 - DNA, 25 bp, Homo sapien
gactgcccgagccagcggtggcggc

SEQ ID NO: 700851 - DNA, 25 bp, Homo sapien
ctgcccgagccagcggtggcggccc

SEQ ID NO: 700852 - DNA, 25 bp, Homo sapien
gaggacagctcggagcggcggcgcc

SEQ ID NO: 700853 - DNA, 25 bp, Homo sapien
agcccgagcggtcggaggactcgct

SEQ ID NO: 700854 - DNA, 25 bp, Homo sapien
gcaagcccggcgactccttgatgaa

SEQ ID NO: 700855 - DNA, 25 bp, Homo sapien
tgaaggttagctgtcgccggaagcc

SEQ ID NO: 700856 - DNA, 25 bp, Homo sapien
ctcggagctcttcgcagcgcgagga

SEQ ID NO: 700857 - DNA, 25 bp, Homo sapien
acgggctctcggaggtggtgcgccg

SEQ ID NO: 700858 - DNA, 25 bp, Homo sapien
cgaggagcagaggaagacggcgggc

SEQ ID NO: 700859 - DNA, 25 bp, Homo sapien
ggcgcgcgcacaggcaggcgggacg

SEQ ID NO: 700860 - DNA, 25 bp, Homo sapien
gccacgctgatgtgcggcagcgacg

SEQ ID NO: 700861 - DNA, 25 bp, Homo sapien
gcagcgacgcgtagcgcttgacagt

SEQ ID NO: 700862 - DNA, 25 bp, Homo sapien
atctcggatgcgccgccaggtcgtg

SEQ ID NO: 700863 - DNA, 25 bp, Homo sapien
gggcctgcgggccacgctgatgtgc

SEQ ID NO: 700864 - DNA, 25 bp, Homo sapien
gggcggcgacctcctcggtctggac

SEQ ID NO: 700865 - DNA, 25 bp, Homo sapien
ggccgtggcgggaagcgtgctgcgc

SEQ ID NO: 700866 - DNA, 25 bp, Homo sapien
gtcctcgggcgtggagccccgcagt

SEQ ID NO: 700867 - DNA, 25 bp, Homo sapien
accacggcgtcgctggtcttgcgcg

SEQ ID NO: 700868 - DNA, 25 bp, Homo sapien
ccttggcgaggctgggaccgtccac

SEQ ID NO: 700869 - DNA, 25 bp, Homo sapien
ctttctccgcggccgagtcggtggt

SEQ ID NO: 700870 - DNA, 25 bp, Homo sapien
ccaggccctcgtgcacgaagggtgc

SEQ ID NO: 700871 - DNA, 25 bp, Homo sapien
agtcggtggtggctgcgaccaccat

SEQ ID NO: 700872 - DNA, 25 bp, Homo sapien
cattagcgaattaccggcggctgca

SEQ ID NO: 700873 - DNA, 25 bp, Homo sapien
tgcagaaaagaggtcgtcggctccc

SEQ ID NO: 700874 - DNA, 25 bp, Homo sapien
ccttgagttgattgtccagagaccg

SEQ ID NO: 700875 - DNA, 25 bp, Homo sapien
catgtgatggtctccgtaacgtgca

SEQ ID NO: 700876 - DNA, 25 bp, Homo sapien
gcttgtccactcctgatttacgagg

SEQ ID NO: 700877 - DNA, 25 bp, Homo sapien
aaagaaacaagaatgtctgccccag

SEQ ID NO: 700878 - DNA, 25 bp, Homo sapien
aatgaagatgaatcggccaggtgcg

SEQ ID NO: 700879 - DNA, 25 bp, Homo sapien
tacgaggtggaagctagtcagagac

SEQ ID NO: 700880 - DNA, 25 bp, Homo sapien
gaagccttctgcgttgctatggcgc

SEQ ID NO: 700881 - DNA, 25 bp, Homo sapien
gttatcgcaacagtgaacccgcttc

SEQ ID NO: 700882 - DNA, 25 bp, Homo sapien
caaagggtaggacgcgttatcgcaa

SEQ ID NO: 700883 - DNA, 25 bp, Homo sapien
gaatgattctgattaggccggacag

SEQ ID NO: 700884 - DNA, 25 bp, Homo sapien
cggggttggctgctcgagctcgccc

SEQ ID NO: 700885 - DNA, 25 bp, Homo sapien
gctcgcccgcggaccagggcaccca

SEQ ID NO: 700886 - DNA, 25 bp, Homo sapien
agcctgagccgcgatgctccggccc

SEQ ID NO: 700887 - DNA, 25 bp, Homo sapien
gctgcacgcgcaccgctttcccgca

SEQ ID NO: 700888 - DNA, 25 bp, Homo sapien
ggaagtgctccacgcgctgcctcag

SEQ ID NO: 700889 - DNA, 25 bp, Homo sapien
ctgcagccagataccgcttctccac

SEQ ID NO: 700890 - DNA, 25 bp, Homo sapien
ccaggaagtgctccacgcgctgcct

SEQ ID NO: 700891 - DNA, 25 bp, Homo sapien
gcttctccaccccggtcttggcctc

SEQ ID NO: 700892 - DNA, 25 bp, Homo sapien
aggagtccggtctgcgacccccagg

SEQ ID NO: 700893 - DNA, 25 bp, Homo sapien
gcctcggtgtgcccgtcggcgaaac

SEQ ID NO: 700894 - DNA, 25 bp, Homo sapien
gaaggagtccggtctgcgaccccca

SEQ ID NO: 700895 - DNA, 25 bp, Homo sapien
cgaaacgggctagcgccgacggctc

SEQ ID NO: 700896 - DNA, 25 bp, Homo sapien
gcatatgcggggtacacaaatccga

SEQ ID NO: 700897 - DNA, 25 bp, Homo sapien
agattgcacagcagagacgctccgt

SEQ ID NO: 700898 - DNA, 25 bp, Homo sapien
tccgtagccgaacagcagatacagg

SEQ ID NO: 700899 - DNA, 25 bp, Homo sapien
tacacaaatccgatgagattgcaca

SEQ ID NO: 700900 - DNA, 25 bp, Homo sapien
ggaaccaggacaggagtagatcgct

SEQ ID NO: 700901 - DNA, 25 bp, Homo sapien
cagtaggtgagccacacagtgtcgt

SEQ ID NO: 700902 - DNA, 25 bp, Homo sapien
actcggccagcccaaacagggcgta

SEQ ID NO: 700903 - DNA, 25 bp, Homo sapien
cagggcgtacaccacccagtaggtg

SEQ ID NO: 700904 - DNA, 25 bp, Homo sapien
tggtgccttaggaacagcggacgca

SEQ ID NO: 700905 - DNA, 25 bp, Homo sapien
gggctcgcccgctgaggtcgttcat

SEQ ID NO: 700906 - DNA, 25 bp, Homo sapien
gttcatgattctgtctacggccccg

SEQ ID NO: 700907 - DNA, 25 bp, Homo sapien
cacgacgcgctgatacagcatgaga

SEQ ID NO: 700908 - DNA, 25 bp, Homo sapien
tgatgcctgcccggctacgggccag

SEQ ID NO: 700909 - DNA, 25 bp, Homo sapien
atgcctgcccggctacgggccagga

SEQ ID NO: 700910 - DNA, 25 bp, Homo sapien
ccacagccaccggggtgatgcctgc

SEQ ID NO: 700911 - DNA, 25 bp, Homo sapien
tgcctgcccggctacgggccaggac

SEQ ID NO: 700912 - DNA, 25 bp, Homo sapien
tgtccttcggctgcggggtctggct

SEQ ID NO: 700913 - DNA, 25 bp, Homo sapien
acttgtccttcggctgcggggtctg

SEQ ID NO: 700914 - DNA, 25 bp, Homo sapien
ttgtccttcggctgcggggtctggc

SEQ ID NO: 700915 - DNA, 25 bp, Homo sapien
tcacttgtccttcggctgcggggtc

SEQ ID NO: 700916 - DNA, 25 bp, Homo sapien
ggggatgcgctgaagactctgtgga

SEQ ID NO: 700917 - DNA, 25 bp, Homo sapien
gctgttgggggatgcgctgaagact

SEQ ID NO: 700918 - DNA, 25 bp, Homo sapien
ttgggggatgcgctgaagactctgt

SEQ ID NO: 700919 - DNA, 25 bp, Homo sapien
ctgttgggggatgcgctgaagactc

SEQ ID NO: 700920 - DNA, 25 bp, Homo sapien
gcccgaggtggcatttaaggagacc

SEQ ID NO: 700921 - DNA, 25 bp, Homo sapien
ctggaggaagtaccaggcggctggg

SEQ ID NO: 700922 - DNA, 25 bp, Homo sapien
ttgccgagaccagtgggagctgccc

SEQ ID NO: 700923 - DNA, 25 bp, Homo sapien
ccatgggtgagaccgggctggaggt

SEQ ID NO: 700924 - DNA, 25 bp, Homo sapien
ctgtttcgacgattccttctggcgc

SEQ ID NO: 700925 - DNA, 25 bp, Homo sapien
ctccggcttgccagaggacttgctg

SEQ ID NO: 700926 - DNA, 25 bp, Homo sapien
ttctggcgctgtccgctggtcttgg

SEQ ID NO: 700927 - DNA, 25 bp, Homo sapien
tgcgtcctccggcttgccagaggac

SEQ ID NO: 700928 - DNA, 25 bp, Homo sapien
ggtggactccgaagtgtactccaga

SEQ ID NO: 700929 - DNA, 25 bp, Homo sapien
ctgcaggtgatctcggtggtggact

SEQ ID NO: 700930 - DNA, 25 bp, Homo sapien
tccgaagtgtactccagagaggtcc

SEQ ID NO: 700931 - DNA, 25 bp, Homo sapien
actccagagaggtcccggaatggca

SEQ ID NO: 700932 - DNA, 25 bp, Homo sapien
tcaggcaccagtagtgctgcaggca

SEQ ID NO: 700933 - DNA, 25 bp, Homo sapien
tccgggttagctttattggagcctc

SEQ ID NO: 700934 - DNA, 25 bp, Homo sapien
tagctttattggagcctcctagcag

SEQ ID NO: 700935 - DNA, 25 bp, Homo sapien
agcaggccaggtgtttcaggcacca

SEQ ID NO: 700936 - DNA, 25 bp, Homo sapien
aggagacccgctatgaggtgcgcat

SEQ ID NO: 700937 - DNA, 25 bp, Homo sapien
ccaccgggactacctgatggctgtc

SEQ ID NO: 700938 - DNA, 25 bp, Homo sapien
tgcgcatccagctcgtctacaagaa

SEQ ID NO: 700939 - DNA, 25 bp, Homo sapien
tgaccagcctcaacgtcaacgtatt

SEQ ID NO: 700940 - DNA, 25 bp, Homo sapien
tggccgctgccttgtaaggactcgt

SEQ ID NO: 700941 - DNA, 25 bp, Homo sapien
gtgcgacctcaactgcctggctgag

SEQ ID NO: 700942 - DNA, 25 bp, Homo sapien
caggttgctggacgcagagcaccta

SEQ ID NO: 700943 - DNA, 25 bp, Homo sapien
tcatctgcccaaagtgatggttgcc

SEQ ID NO: 700944 - DNA, 25 bp, Homo sapien
ctgtatcctagagcttggaacagtg

SEQ ID NO: 700945 - DNA, 25 bp, Homo sapien
tgtatcctagagcttggaacagtgt

SEQ ID NO: 700946 - DNA, 25 bp, Homo sapien
ttctgtatcctagagcttggaacag

SEQ ID NO: 700947 - DNA, 25 bp, Homo sapien
tctgtatcctagagcttggaacagt

SEQ ID NO: 700948 - DNA, 25 bp, Homo sapien
cccccactgattgtggtttatgctg

SEQ ID NO: 700949 - DNA, 25 bp, Homo sapien
gacccccactgattgtggtttatgc

SEQ ID NO: 700950 - DNA, 25 bp, Homo sapien
ccccactgattgtggtttatgctgc

SEQ ID NO: 700951 - DNA, 25 bp, Homo sapien
acccccactgattgtggtttatgct

SEQ ID NO: 700952 - DNA, 25 bp, Homo sapien
gacagcaggcacccgactccctgga

SEQ ID NO: 700953 - DNA, 25 bp, Homo sapien
tgagacagcaggcacccgactccct

SEQ ID NO: 700954 - DNA, 25 bp, Homo sapien
gagacagcaggcacccgactccctg

SEQ ID NO: 700955 - DNA, 25 bp, Homo sapien
agacagcaggcacccgactccctgg

SEQ ID NO: 700956 - DNA, 25 bp, Homo sapien
gtgtccacctggtgtcacgaatggg

SEQ ID NO: 700957 - DNA, 25 bp, Homo sapien
cagatttcggaatctggcccggcca

SEQ ID NO: 700958 - DNA, 25 bp, Homo sapien
ctcgggcacctttgcggggtttctg

SEQ ID NO: 700959 - DNA, 25 bp, Homo sapien
ttctgagccgtcacgtgtccacctg

SEQ ID NO: 700960 - DNA, 25 bp, Homo sapien
aatgtgtgccatttcgggtcctccc

SEQ ID NO: 700961 - DNA, 25 bp, Homo sapien
tatgagcctcgacgttctgaatgtg

SEQ ID NO: 700962 - DNA, 25 bp, Homo sapien
ccacagcagaattcggagcggcaga

SEQ ID NO: 700963 - DNA, 25 bp, Homo sapien
tttaccgagcgggaaactgaggctc

SEQ ID NO: 700964 - DNA, 25 bp, Homo sapien
agccgggccgagaccaccgcgctgc

SEQ ID NO: 700965 - DNA, 25 bp, Homo sapien
gaccaccgcgctgcggccgctccgg

SEQ ID NO: 700966 - DNA, 25 bp, Homo sapien
ctggcgcagccgggccgagaccacc

SEQ ID NO: 700967 - DNA, 25 bp, Homo sapien
gagaccaccgcgctgcggccgctcc

SEQ ID NO: 700968 - DNA, 25 bp, Homo sapien
cgccgccgccgcggccggggctcca

SEQ ID NO: 700969 - DNA, 25 bp, Homo sapien
gccgccgccgcggccggggctccat

SEQ ID NO: 700970 - DNA, 25 bp, Homo sapien
caggaaggcggcgaccagggggcga

SEQ ID NO: 700971 - DNA, 25 bp, Homo sapien
cgcaggaaggcggcgaccagggggc

SEQ ID NO: 700972 - DNA, 25 bp, Homo sapien
tcgcaggaaggcggcgaccaggggg

SEQ ID NO: 700973 - DNA, 25 bp, Homo sapien
ctcgcaggaaggcggcgaccagggg

SEQ ID NO: 700974 - DNA, 25 bp, Homo sapien
agcttcccgcgcctgtacacgcggc

SEQ ID NO: 700975 - DNA, 25 bp, Homo sapien
cttgccgatcagcttcccgcgcctg

SEQ ID NO: 700976 - DNA, 25 bp, Homo sapien
tgccgatcagcttcccgcgcctgta

SEQ ID NO: 700977 - DNA, 25 bp, Homo sapien
cccgcgcctgtacacgcggcccgag

SEQ ID NO: 700978 - DNA, 25 bp, Homo sapien
acggacacgacgcacagcgcgctca

SEQ ID NO: 700979 - DNA, 25 bp, Homo sapien
ggacacgcaacccacggacacgacg

SEQ ID NO: 700980 - DNA, 25 bp, Homo sapien
gcgcgctcaacacggttcccgccat

SEQ ID NO: 700981 - DNA, 25 bp, Homo sapien
gacgcacagcgcgctcaacacggtt

SEQ ID NO: 700982 - DNA, 25 bp, Homo sapien
cacagagtcaccatgcatggacaca

SEQ ID NO: 700983 - DNA, 25 bp, Homo sapien
gcctgaatacgacacacaaacacgc

SEQ ID NO: 700984 - DNA, 25 bp, Homo sapien
gcctggtgcatagaggccacggacc

SEQ ID NO: 700985 - DNA, 25 bp, Homo sapien
cgcctggacacacaagacatgatgc

SEQ ID NO: 700986 - DNA, 25 bp, Homo sapien
cgaacacggcgctggtggacatgtc

SEQ ID NO: 700987 - DNA, 25 bp, Homo sapien
ttccctgcgggcgaagccacccggc

SEQ ID NO: 700988 - DNA, 25 bp, Homo sapien
cacacggcaccaccttgagggcgaa

SEQ ID NO: 700989 - DNA, 25 bp, Homo sapien
gcaccaccttgagggcgaacacggc

SEQ ID NO: 700990 - DNA, 25 bp, Homo sapien
caccatgtacacgtggtcgcggtca

SEQ ID NO: 700991 - DNA, 25 bp, Homo sapien
tcagcaaagtgtccgtggaaagcca

SEQ ID NO: 700992 - DNA, 25 bp, Homo sapien
gcagtactccagcaccatgtacacg

SEQ ID NO: 700993 - DNA, 25 bp, Homo sapien
gcaggcggctatgcagggcaatctc

SEQ ID NO: 700994 - DNA, 25 bp, Homo sapien
tgaacacggcgctggtggacatgct

SEQ ID NO: 700995 - DNA, 25 bp, Homo sapien
gcacttctggctccgtcaggatctg

SEQ ID NO: 700996 - DNA, 25 bp, Homo sapien
aggccccgcaggtagtcgcgcactt

SEQ ID NO: 700997 - DNA, 25 bp, Homo sapien
cttcaggtcgcggtgcaggatgcac

SEQ ID NO: 700998 - DNA, 25 bp, Homo sapien
tgcaggtagcgcaggccgctgacca

SEQ ID NO: 700999 - DNA, 25 bp, Homo sapien
ccgcccacagttccccttcctggca

SEQ ID NO: 701000 - DNA, 25 bp, Homo sapien
cacagttccccttcctggcactcac

SEQ ID NO: 701001 - DNA, 25 bp, Homo sapien
gcccacagttccccttcctggcact

SEQ ID NO: 701002 - DNA, 25 bp, Homo sapien
ccacagttccccttcctggcactca

SEQ ID NO: 701003 - DNA, 25 bp, Homo sapien
ccagtcccaggtctccaatcttcac

SEQ ID NO: 701004 - DNA, 25 bp, Homo sapien
cacctccatgttcttgttaaggaag

SEQ ID NO: 701005 - DNA, 25 bp, Homo sapien
caccttggccgccagtcccaggtct

SEQ ID NO: 701006 - DNA, 25 bp, Homo sapien
ggtctccaatcttcacctccatgtt

SEQ ID NO: 701007 - DNA, 25 bp, Homo sapien
cagagcccagatgtcctactggcag

SEQ ID NO: 701008 - DNA, 25 bp, Homo sapien
gaccgtttctggagacaacctcagg

SEQ ID NO: 701009 - DNA, 25 bp, Homo sapien
tggagacaacctcagggtccaggaa

SEQ ID NO: 701010 - DNA, 25 bp, Homo sapien
cctactggcaggagtgaccgtttct

SEQ ID NO: 701011 - DNA, 25 bp, Homo sapien
ggccctcacggatgttttggtacat

SEQ ID NO: 701012 - DNA, 25 bp, Homo sapien
atgaggcggcgcgcattggcagaca

SEQ ID NO: 701013 - DNA, 25 bp, Homo sapien
cgctcggccgggttgggtgctagga

SEQ ID NO: 701014 - DNA, 25 bp, Homo sapien
ggtgctaggaggtgcacgatgaggc

SEQ ID NO: 701015 - DNA, 25 bp, Homo sapien
ccggcagccggtctggagtgaaacc

SEQ ID NO: 701016 - DNA, 25 bp, Homo sapien
ttccggaagatcctgcccagaggcg

SEQ ID NO: 701017 - DNA, 25 bp, Homo sapien
agggtggccggcactgggtgagcag

SEQ ID NO: 701018 - DNA, 25 bp, Homo sapien
gctggcccaccttccggaagatcct

SEQ ID NO: 701019 - DNA, 25 bp, Homo sapien
gacccgaggcctctttaggcgtgaa

SEQ ID NO: 701020 - DNA, 25 bp, Homo sapien
acccgaggcctctttaggcgtgaag

SEQ ID NO: 701021 - DNA, 25 bp, Homo sapien
ccgaggcctctttaggcgtgaaggg

SEQ ID NO: 701022 - DNA, 25 bp, Homo sapien
tggacccgaggcctctttaggcgtg

SEQ ID NO: 701023 - DNA, 25 bp, Homo sapien
agcatgccctccacctgtgtctccc

SEQ ID NO: 701024 - DNA, 25 bp, Homo sapien
cgtgtcccccaccccgatgtctcac

SEQ ID NO: 701025 - DNA, 25 bp, Homo sapien
ccgtgtcccccaccccgatgtctca

SEQ ID NO: 701026 - DNA, 25 bp, Homo sapien
gccagcatgccctccacctgtgtct

SEQ ID NO: 701027 - DNA, 25 bp, Homo sapien
gggaacctctttcgcagacagggag

SEQ ID NO: 701028 - DNA, 25 bp, Homo sapien
caggtcactctgcagggtcccttgt

SEQ ID NO: 701029 - DNA, 25 bp, Homo sapien
gcagggaacctctttcgcagacagg

SEQ ID NO: 701030 - DNA, 25 bp, Homo sapien
tgcagggtcccttgtgcgaccaggt

SEQ ID NO: 701031 - DNA, 25 bp, Homo sapien
gccccgggctgggacggggatctgc

SEQ ID NO: 701032 - DNA, 25 bp, Homo sapien
ccccgggctgggacggggatctgct

SEQ ID NO: 701033 - DNA, 25 bp, Homo sapien
gcaggtgtctgagggccgcctccac

SEQ ID NO: 701034 - DNA, 25 bp, Homo sapien
ccggggggcctacatccaggcacag

SEQ ID NO: 701035 - DNA, 25 bp, Homo sapien
tctggccgccggctcccctcgggcc

SEQ ID NO: 701036 - DNA, 25 bp, Homo sapien
agctgcaggtgtctgagggccgcct

SEQ ID NO: 701037 - DNA, 25 bp, Homo sapien
tgctgctctcccagggggtcctgtg

SEQ ID NO: 701038 - DNA, 25 bp, Homo sapien
ctggaataatccacccatttggggg

SEQ ID NO: 701039 - DNA, 25 bp, Homo sapien
ctgctctcccagggggtcctgtgtg

SEQ ID NO: 701040 - DNA, 25 bp, Homo sapien
atccacccatttgggggcccagagg

SEQ ID NO: 701041 - DNA, 25 bp, Homo sapien
cgccccccgtccaagagctggtagc

SEQ ID NO: 701042 - DNA, 25 bp, Homo sapien
ggccatgtgggtgccgtcccgtgcg

SEQ ID NO: 701043 - DNA, 25 bp, Homo sapien
atgtgggtgccgtcccgtgcgcccc

SEQ ID NO: 701044 - DNA, 25 bp, Homo sapien
ccccgtccaagagctggtagccaaa

SEQ ID NO: 701045 - DNA, 25 bp, Homo sapien
tggggccaggacacagggcctctgt

SEQ ID NO: 701046 - DNA, 25 bp, Homo sapien
ggggccaggacacagggcctctgtc

SEQ ID NO: 701047 - DNA, 25 bp, Homo sapien
ctggggccaggacacagggcctctg

SEQ ID NO: 701048 - DNA, 25 bp, Homo sapien
tccagcctcccgcagttgggcatgt

SEQ ID NO: 701049 - DNA, 25 bp, Homo sapien
cagcctcccgcagttgggcatgtag

SEQ ID NO: 701050 - DNA, 25 bp, Homo sapien
cctcccgcagttgggcatgtagcac

SEQ ID NO: 701051 - DNA, 25 bp, Homo sapien
gcctcccgcagttgggcatgtagca

SEQ ID NO: 701052 - DNA, 25 bp, Homo sapien
caggcagccggcaaagagctgcagc

SEQ ID NO: 701053 - DNA, 25 bp, Homo sapien
agccgccgccgcaggcagccggcaa

SEQ ID NO: 701054 - DNA, 25 bp, Homo sapien
gccggcaaagagctgcagcacggcc

SEQ ID NO: 701055 - DNA, 25 bp, Homo sapien
gcacggccagcttggcgcccagcag

SEQ ID NO: 701056 - DNA, 25 bp, Homo sapien
tgcaccatcccattgctgaacagca

SEQ ID NO: 701057 - DNA, 25 bp, Homo sapien
gcaccatcccattgctgaacagcag

SEQ ID NO: 701058 - DNA, 25 bp, Homo sapien
gctcagaggccaggaagcgcaggag

SEQ ID NO: 701059 - DNA, 25 bp, Homo sapien
cagcagcagggcgtgctcagaggcc

SEQ ID NO: 701060 - DNA, 25 bp, Homo sapien
gccacaggaatggaaatggagcctg

SEQ ID NO: 701061 - DNA, 25 bp, Homo sapien
agatactctgcagcatgcggagggc

SEQ ID NO: 701062 - DNA, 25 bp, Homo sapien
ggttgaacagtcatgccacaaggca

SEQ ID NO: 701063 - DNA, 25 bp, Homo sapien
tgctcccagagggtgagctgcaaac

SEQ ID NO: 701064 - DNA, 25 bp, Homo sapien
gggcatgatgacgcctgtagtacca

SEQ ID NO: 701065 - DNA, 25 bp, Homo sapien
gaggcacgagaaaaatctcctgaac

SEQ ID NO: 701066 - DNA, 25 bp, Homo sapien
aggacaagttttccctctctcaggg

SEQ ID NO: 701067 - DNA, 25 bp, Homo sapien
gggatcctgaggcacgagaaaaatc

SEQ ID NO: 701068 - DNA, 25 bp, Homo sapien
aaacacgacttttccagcgctcagc

SEQ ID NO: 701069 - DNA, 25 bp, Homo sapien
catatcttttcctagagcgcggacc

SEQ ID NO: 701070 - DNA, 25 bp, Homo sapien
tacagatgagctttaactgccgcct

SEQ ID NO: 701071 - DNA, 25 bp, Homo sapien
ttttgtacatcaaccgtgcgcggcc

SEQ ID NO: 701072 - DNA, 25 bp, Homo sapien
acaaatcctcaggacgggctcaagg

SEQ ID NO: 701073 - DNA, 25 bp, Homo sapien
gcattgaccttaggcccatagagag

SEQ ID NO: 701074 - DNA, 25 bp, Homo sapien
acgtcttcctgaggttggtgcccac

SEQ ID NO: 701075 - DNA, 25 bp, Homo sapien
tcctacgggtgggttcattggcctg

SEQ ID NO: 701076 - DNA, 25 bp, Homo sapien
cagcctctccgtggcccatgctgaa

SEQ ID NO: 701077 - DNA, 25 bp, Homo sapien
gtggcgccgttactactcacagcag

SEQ ID NO: 701078 - DNA, 25 bp, Homo sapien
gaagtacagtggcgccgttactact

SEQ ID NO: 701079 - DNA, 25 bp, Homo sapien
tacagtggcgccgttactactcaca

SEQ ID NO: 701080 - DNA, 25 bp, Homo sapien
ttgagacagggtcggctgggtacag

SEQ ID NO: 701081 - DNA, 25 bp, Homo sapien
gaatgcagctcttgcatggttttgg

SEQ ID NO: 701082 - DNA, 25 bp, Homo sapien
agacagggtcggctgggtacagtgg

SEQ ID NO: 701083 - DNA, 25 bp, Homo sapien
aagaatgcagctcttgcatggtttt

SEQ ID NO: 701084 - DNA, 25 bp, Homo sapien
gattgagctaagcatgggaccaagc

SEQ ID NO: 701085 - DNA, 25 bp, Homo sapien
gatcctggatagaggcgattgagct

SEQ ID NO: 701086 - DNA, 25 bp, Homo sapien
gagactgccctagaggattctggga

SEQ ID NO: 701087 - DNA, 25 bp, Homo sapien
tatcggcccagtacatagatcctgg

SEQ ID NO: 701088 - DNA, 25 bp, Homo sapien
tctctttggggtgaccggaggcaaa

SEQ ID NO: 701089 - DNA, 25 bp, Homo sapien
ttggggtgaccggaggcaaagagct

SEQ ID NO: 701090 - DNA, 25 bp, Homo sapien
tttggggtgaccggaggcaaagagc

SEQ ID NO: 701091 - DNA, 25 bp, Homo sapien
gcctctctttggggtgaccggaggc

SEQ ID NO: 701092 - DNA, 25 bp, Homo sapien
cagtcatttaaagtgcacgagtcaa

SEQ ID NO: 701093 - DNA, 25 bp, Homo sapien
cacgagtcaatggtttttcagcata

SEQ ID NO: 701094 - DNA, 25 bp, Homo sapien
gctagagtgcaatgttgcagtgcaa

SEQ ID NO: 701095 - DNA, 25 bp, Homo sapien
tataggcagctatcctcagattcaa

SEQ ID NO: 701096 - DNA, 25 bp, Homo sapien
ctaggagagtgttccaatggctgac

SEQ ID NO: 701097 - DNA, 25 bp, Homo sapien
tggcttaaagcaacgaacattcact

SEQ ID NO: 701098 - DNA, 25 bp, Homo sapien
agtgcttctatgagccaccctgaga

SEQ ID NO: 701099 - DNA, 25 bp, Homo sapien
agccaaggccacttcgtctgaggaa

SEQ ID NO: 701100 - DNA, 25 bp, Homo sapien
gctggctggatgattgggactttaa

SEQ ID NO: 701101 - DNA, 25 bp, Homo sapien
tacgccctgggagtttgatctctta

SEQ ID NO: 701102 - DNA, 25 bp, Homo sapien
ttcaaacgagattcacccagcgcga

SEQ ID NO: 701103 - DNA, 25 bp, Homo sapien
ttgtatacgtgtcaacacagctggc

SEQ ID NO: 701104 - DNA, 25 bp, Homo sapien
aaagtgatgcgtgggcgttccctga

SEQ ID NO: 701105 - DNA, 25 bp, Homo sapien
caaagcagcctgtttgaaacggcga

SEQ ID NO: 701106 - DNA, 25 bp, Homo sapien
cccgccgggcacatgtgaaaggtat

SEQ ID NO: 701107 - DNA, 25 bp, Homo sapien
aaaggtatgcctccgtgggacgagc

SEQ ID NO: 701108 - DNA, 25 bp, Homo sapien
tgtgccagatgcacctcaagtcgga

SEQ ID NO: 701109 - DNA, 25 bp, Homo sapien
tattaacgaggccttccgggagctg

SEQ ID NO: 701110 - DNA, 25 bp, Homo sapien
agcagtacggacgaggtgctgtccc

SEQ ID NO: 701111 - DNA, 25 bp, Homo sapien
tcaagtcggacaaagcgcagaccaa

SEQ ID NO: 701112 - DNA, 25 bp, Homo sapien
ctgaacttggagcagcaagtgcgag

SEQ ID NO: 701113 - DNA, 25 bp, Homo sapien
caactgcacctcaacagcgagaagc

SEQ ID NO: 701114 - DNA, 25 bp, Homo sapien
cgtgacatcaacgaggcctttaagg

SEQ ID NO: 701115 - DNA, 25 bp, Homo sapien
acgaggagaacacgtcagcggctga

SEQ ID NO: 701116 - DNA, 25 bp, Homo sapien
ccatagcccagacgaggacgaggac

SEQ ID NO: 701117 - DNA, 25 bp, Homo sapien
gtattttgtagagggctgggtcagc

SEQ ID NO: 701118 - DNA, 25 bp, Homo sapien
ctgggtcagcggctcacactggtaa

SEQ ID NO: 701119 - DNA, 25 bp, Homo sapien
cagctgcgaccacctaattaaaaaa

SEQ ID NO: 701120 - DNA, 25 bp, Homo sapien
agccttgtgagcagctgcgaccacc

SEQ ID NO: 701121 - DNA, 25 bp, Homo sapien
tttagtacagagtggatttcatcat

SEQ ID NO: 701122 - DNA, 25 bp, Homo sapien
ggcgcctgcctctgtgctcggctaa

SEQ ID NO: 701123 - DNA, 25 bp, Homo sapien
tacaggcgcctgcctctgtgctcgg

SEQ ID NO: 701124 - DNA, 25 bp, Homo sapien
tagtacagagtggatttcatcatgt

SEQ ID NO: 701125 - DNA, 25 bp, Homo sapien
acacacacggccaccctttggcggc

SEQ ID NO: 701126 - DNA, 25 bp, Homo sapien
gacagagatggagaccaaccgagaa

SEQ ID NO: 701127 - DNA, 25 bp, Homo sapien
tggagaccaaccgagaaaggctgag

SEQ ID NO: 701128 - DNA, 25 bp, Homo sapien
ccagaggcagcgtgagccgacccag

SEQ ID NO: 701129 - DNA, 25 bp, Homo sapien
ggagtctggcgaagctccgtgtccc

SEQ ID NO: 701130 - DNA, 25 bp, Homo sapien
gacggggacaacaccagaagaccca

SEQ ID NO: 701131 - DNA, 25 bp, Homo sapien
tccctcggtctgggcgtcacgcagg

SEQ ID NO: 701132 - DNA, 25 bp, Homo sapien
ttcttcccatgacgcgcccgagttt

SEQ ID NO: 701133 - DNA, 25 bp, Homo sapien
tgcagccgtggaccccagacacggc

SEQ ID NO: 701134 - DNA, 25 bp, Homo sapien
ctggttaccgcgtgccggctggata

SEQ ID NO: 701135 - DNA, 25 bp, Homo sapien
cgtgccggctggataccagagatca

SEQ ID NO: 701136 - DNA, 25 bp, Homo sapien
accgcgtgccggctggataccagag

SEQ ID NO: 701137 - DNA, 25 bp, Homo sapien
gtgggggcacttggagagaccacag

SEQ ID NO: 701138 - DNA, 25 bp, Homo sapien
ccccatgaggcccttcccggcagga

SEQ ID NO: 701139 - DNA, 25 bp, Homo sapien
tgggggcacttggagagaccacagc

SEQ ID NO: 701140 - DNA, 25 bp, Homo sapien
cccatctgtccagcgggaagtgacc

SEQ ID NO: 701141 - DNA, 25 bp, Homo sapien
ttgaggagtggataggaccaaagcc

SEQ ID NO: 701142 - DNA, 25 bp, Homo sapien
cagggacgtgcaggccgagcccctt

SEQ ID NO: 701143 - DNA, 25 bp, Homo sapien
ttcacgctcatgacgatgctcctgg

SEQ ID NO: 701144 - DNA, 25 bp, Homo sapien
tccggaaggactgcctggattttcg

SEQ ID NO: 701145 - DNA, 25 bp, Homo sapien
ccttccggaaggactgcctggattt

SEQ ID NO: 701146 - DNA, 25 bp, Homo sapien
tccttccggaaggactgcctggatt

SEQ ID NO: 701147 - DNA, 25 bp, Homo sapien
gctccttccggaaggactgcctgga

SEQ ID NO: 701148 - DNA, 25 bp, Homo sapien
ccggcggccgatggacctattgatc

SEQ ID NO: 701149 - DNA, 25 bp, Homo sapien
gccttatccgccttcctggagggtg

SEQ ID NO: 701150 - DNA, 25 bp, Homo sapien
tattgatcgcatggccttatccacg

SEQ ID NO: 701151 - DNA, 25 bp, Homo sapien
tcctcggaagacgtggtccgtgcca

SEQ ID NO: 701152 - DNA, 25 bp, Homo sapien
ccaaccaacccgtgccaggaagtgg

SEQ ID NO: 701153 - DNA, 25 bp, Homo sapien
caaccaacccgtgccaggaagtggg

SEQ ID NO: 701154 - DNA, 25 bp, Homo sapien
gccaaccaacccgtgccaggaagtg

SEQ ID NO: 701155 - DNA, 25 bp, Homo sapien
tgaggggccaaccaacccgtgccag

SEQ ID NO: 701156 - DNA, 25 bp, Homo sapien
gcgcacactctcgtagggctgtcgt

SEQ ID NO: 701157 - DNA, 25 bp, Homo sapien
tctcgtagggctgtcgttgaaccat

SEQ ID NO: 701158 - DNA, 25 bp, Homo sapien
gctcgcgcacactctcgtagggctg

SEQ ID NO: 701159 - DNA, 25 bp, Homo sapien
cacactctcgtagggctgtcgttga

SEQ ID NO: 701160 - DNA, 25 bp, Homo sapien
cagggatcacgggagaaaagccctg

SEQ ID NO: 701161 - DNA, 25 bp, Homo sapien
aggagcagggatcacgggagaaaag

SEQ ID NO: 701162 - DNA, 25 bp, Homo sapien
gatcacgggagaaaagccctgggtc

SEQ ID NO: 701163 - DNA, 25 bp, Homo sapien
gagcagggatcacgggagaaaagcc

SEQ ID NO: 701164 - DNA, 25 bp, Homo sapien
gctcagagctggtgagtttcgggaa

SEQ ID NO: 701165 - DNA, 25 bp, Homo sapien
tgctcagagctggtgagtttcggga

SEQ ID NO: 701166 - DNA, 25 bp, Homo sapien
ctgctcagagctggtgagtttcggg

SEQ ID NO: 701167 - DNA, 25 bp, Homo sapien
gctcagcgaattttatattgcccgg

SEQ ID NO: 701168 - DNA, 25 bp, Homo sapien
accgccatgctcagcgaattttata

SEQ ID NO: 701169 - DNA, 25 bp, Homo sapien
catgctcagcgaattttatattgcc

SEQ ID NO: 701170 - DNA, 25 bp, Homo sapien
tcagcgaattttatattgcccgggc

SEQ ID NO: 701171 - DNA, 25 bp, Homo sapien
ttccgggccggaatggcgcctcgat

SEQ ID NO: 701172 - DNA, 25 bp, Homo sapien
tttatctggacacgcccgggcgctt

SEQ ID NO: 701173 - DNA, 25 bp, Homo sapien
taaggcgcggtttatctggacacgc

SEQ ID NO: 701174 - DNA, 25 bp, Homo sapien
cgcctcgattaaggcgcggtttatc

SEQ ID NO: 701175 - DNA, 25 bp, Homo sapien
gggacccgagcaaggctgcagcggg

SEQ ID NO: 701176 - DNA, 25 bp, Homo sapien
ggttctgcgggacccgagctcgccg

SEQ ID NO: 701177 - DNA, 25 bp, Homo sapien
tctagatttaattctctgcgcactc

SEQ ID NO: 701178 - DNA, 25 bp, Homo sapien
gacacctgggagtgtccactctgca

SEQ ID NO: 701179 - DNA, 25 bp, Homo sapien
tacggtgcagagtccaaaaccagcc

SEQ ID NO: 701180 - DNA, 25 bp, Homo sapien
gggtgaccactaagagcccctgtca

SEQ ID NO: 701181 - DNA, 25 bp, Homo sapien
cctgtcttctgagacgtcgctggtg

SEQ ID NO: 701182 - DNA, 25 bp, Homo sapien
tcttgtaggccagaggctacggtgc

SEQ ID NO: 701183 - DNA, 25 bp, Homo sapien
cccccaggctctccaggctcagctc

SEQ ID NO: 701184 - DNA, 25 bp, Homo sapien
ctgtgcaggccccccaggctctcca

SEQ ID NO: 701185 - DNA, 25 bp, Homo sapien
ccaggctctccaggctcagctccat

SEQ ID NO: 701186 - DNA, 25 bp, Homo sapien
gctgtgcaggccccccaggctctcc

SEQ ID NO: 701187 - DNA, 25 bp, Homo sapien
agctcgcccgcctgcgcgtgggcca

SEQ ID NO: 701188 - DNA, 25 bp, Homo sapien
gcgcccgggcgccaccaggccgcgg

SEQ ID NO: 701189 - DNA, 25 bp, Homo sapien
tggcccgggctcagcagctcgcccg

SEQ ID NO: 701190 - DNA, 25 bp, Homo sapien
caccaggccgcggtgctgcgccgcc

SEQ ID NO: 701191 - DNA, 25 bp, Homo sapien
gctggtggaacttgtcggccacggc

SEQ ID NO: 701192 - DNA, 25 bp, Homo sapien
gccatgcccattgccgggtgcagcg

SEQ ID NO: 701193 - DNA, 25 bp, Homo sapien
gtgagcgtcgtgtaggtgccgccca

SEQ ID NO: 701194 - DNA, 25 bp, Homo sapien
cagttccccgcggaagtccgcgccg

SEQ ID NO: 701195 - DNA, 25 bp, Homo sapien
agctccttgccgtagggtccgtaga

SEQ ID NO: 701196 - DNA, 25 bp, Homo sapien
ggcagctccttgccgtagggtccgt

SEQ ID NO: 701197 - DNA, 25 bp, Homo sapien
gcgacagcggcgaccccatggcggg

SEQ ID NO: 701198 - DNA, 25 bp, Homo sapien
ctccttgccgtagggtccgtagagg

SEQ ID NO: 701199 - DNA, 25 bp, Homo sapien
cgtgcggcccgtgcgccccggccgc

SEQ ID NO: 701200 - DNA, 25 bp, Homo sapien
gcggcgctcccgctgcccgctccgc

SEQ ID NO: 701201 - DNA, 25 bp, Homo sapien
gccgcctcccccgtgcggcccgtgc

SEQ ID NO: 701202 - DNA, 25 bp, Homo sapien
tcggccgctgcgcccgcgctggggc

SEQ ID NO: 701203 - DNA, 25 bp, Homo sapien
gcgccacctccttggtgttgatctc

SEQ ID NO: 701204 - DNA, 25 bp, Homo sapien
tgcgccacctccttggtgttgatct

SEQ ID NO: 701205 - DNA, 25 bp, Homo sapien
ctgcgccacctccttggtgttgatc

SEQ ID NO: 701206 - DNA, 25 bp, Homo sapien
ccctgagagcgacacaggatccgct

SEQ ID NO: 701207 - DNA, 25 bp, Homo sapien
gatccgctgcgcgaagattgcctgc

SEQ ID NO: 701208 - DNA, 25 bp, Homo sapien
caagcgcagcgccgacatgcgctgg

SEQ ID NO: 701209 - DNA, 25 bp, Homo sapien
cagcaggtcggagagcgtgccctga

SEQ ID NO: 701210 - DNA, 25 bp, Homo sapien
tgctcgggagtccagagccggcgcc

SEQ ID NO: 701211 - DNA, 25 bp, Homo sapien
gccgccccgctaggtgctcgggagt

SEQ ID NO: 701212 - DNA, 25 bp, Homo sapien
agggtctggccctgcgcgccacgct

SEQ ID NO: 701213 - DNA, 25 bp, Homo sapien
cccgctaggtgctcgggagtccaga

SEQ ID NO: 701214 - DNA, 25 bp, Homo sapien
ctatggtgagcgcacgagtgccgct

SEQ ID NO: 701215 - DNA, 25 bp, Homo sapien
gactgaaatcgtccaggttcccgga

SEQ ID NO: 701216 - DNA, 25 bp, Homo sapien
tgaggcctcgcactgcacctcgagg

SEQ ID NO: 701217 - DNA, 25 bp, Homo sapien
tgtgtgcggatatgaccgccggtct

SEQ ID NO: 701218 - DNA, 25 bp, Homo sapien
cattagttacataacgtgacagtgg

SEQ ID NO: 701219 - DNA, 25 bp, Homo sapien
gttacataacgtgacagtgggaaaa

SEQ ID NO: 701220 - DNA, 25 bp, Homo sapien
ccagtactgctaatgggtcattagt

SEQ ID NO: 701221 - DNA, 25 bp, Homo sapien
taatgggtcattagttacataacgt

SEQ ID NO: 701222 - DNA, 25 bp, Homo sapien
ggtgtccactcagggcgggtgctgg

SEQ ID NO: 701223 - DNA, 25 bp, Homo sapien
gcgaagcaggcggtgtccactcagg

SEQ ID NO: 701224 - DNA, 25 bp, Homo sapien
ccttctgtgacgctctggctgatgt

SEQ ID NO: 701225 - DNA, 25 bp, Homo sapien
ttctcgcctgcggtttgcccttctg

SEQ ID NO: 701226 - DNA, 25 bp, Homo sapien
ccctgagacggcgactgttctaact

SEQ ID NO: 701227 - DNA, 25 bp, Homo sapien
aaggcgaggcacaaacggagcctgt

SEQ ID NO: 701228 - DNA, 25 bp, Homo sapien
ttcctcgacaggaaacccagactcc

SEQ ID NO: 701229 - DNA, 25 bp, Homo sapien
gcaactctccccgtggcagaaaggg

SEQ ID NO: 701230 - DNA, 25 bp, Homo sapien
tggccctgggcacggtctcggtcta

SEQ ID NO: 701231 - DNA, 25 bp, Homo sapien
tgggcacggtctcggtctatccaca

SEQ ID NO: 701232 - DNA, 25 bp, Homo sapien
gttctcgtggccctgggcacggtct

SEQ ID NO: 701233 - DNA, 25 bp, Homo sapien
ggtctcggtctatccacactccgtg

SEQ ID NO: 701234 - DNA, 25 bp, Homo sapien
gcctcaccacccctaaaggatgtgg

SEQ ID NO: 701235 - DNA, 25 bp, Homo sapien
gggaagcgcagcgcaggcctcacca

SEQ ID NO: 701236 - DNA, 25 bp, Homo sapien
ggaggtggaactggccggtcacctg

SEQ ID NO: 701237 - DNA, 25 bp, Homo sapien
gggcacagggggaagcgcagcgcag

SEQ ID NO: 701238 - DNA, 25 bp, Homo sapien
ctgcgggacggcgtttgctgggtga

SEQ ID NO: 701239 - DNA, 25 bp, Homo sapien
gacggcgtttgctgggtgatggaaa

SEQ ID NO: 701240 - DNA, 25 bp, Homo sapien
cgactccgcagcttcccgggtgctg

SEQ ID NO: 701241 - DNA, 25 bp, Homo sapien
caaggaccgatgtgcgcaacgcggc

SEQ ID NO: 701242 - DNA, 25 bp, Homo sapien
ggtttgggtcctgacaggatgccca

SEQ ID NO: 701243 - DNA, 25 bp, Homo sapien
caacggttatcagtctttttggaat

SEQ ID NO: 701244 - DNA, 25 bp, Homo sapien
cccccgagaggctctgatctgagga

SEQ ID NO: 701245 - DNA, 25 bp, Homo sapien
tgattccaggagcaatcacccccga

SEQ ID NO: 701246 - DNA, 25 bp, Homo sapien
agcactgcatactcagcccctggtt

SEQ ID NO: 701247 - DNA, 25 bp, Homo sapien
gcactgcatactcagcccctggttc

SEQ ID NO: 701248 - DNA, 25 bp, Homo sapien
ccagcactgcatactcagcccctgg

SEQ ID NO: 701249 - DNA, 25 bp, Homo sapien
cagcactgcatactcagcccctggt

SEQ ID NO: 701250 - DNA, 25 bp, Homo sapien
aggaccacagaaattgatattggta

SEQ ID NO: 701251 - DNA, 25 bp, Homo sapien
aaggaccacagaaattgatattggt

SEQ ID NO: 701252 - DNA, 25 bp, Homo sapien
ttgaagatggcgatcagcgtgcgtc

SEQ ID NO: 701253 - DNA, 25 bp, Homo sapien
gctgctgcgagatggtgacctgcat

SEQ ID NO: 701254 - DNA, 25 bp, Homo sapien
tgttgagctccaagccgagctgctg

SEQ ID NO: 701255 - DNA, 25 bp, Homo sapien
tggacggccgcttgttctccttgaa

SEQ ID NO: 701256 - DNA, 25 bp, Homo sapien
gcccagcggttcatgcagcggcgcc

SEQ ID NO: 701257 - DNA, 25 bp, Homo sapien
ccagcggttcatgcagcggcgccgc

SEQ ID NO: 701258 - DNA, 25 bp, Homo sapien
cagcggttcatgcagcggcgccgcg

SEQ ID NO: 701259 - DNA, 25 bp, Homo sapien
cagcccagcggttcatgcagcggcg

SEQ ID NO: 701260 - DNA, 25 bp, Homo sapien
gactttaaggcaggcgattcttggc

SEQ ID NO: 701261 - DNA, 25 bp, Homo sapien
tgcctaaaggtaaagtgaactcaac

SEQ ID NO: 701262 - DNA, 25 bp, Homo sapien
gtctggaatttacccgcacgtggga

SEQ ID NO: 701263 - DNA, 25 bp, Homo sapien
gattcttggcacgaggaatcctggc

SEQ ID NO: 701264 - DNA, 25 bp, Homo sapien
tgtcatccagcacaaatccttggga

SEQ ID NO: 701265 - DNA, 25 bp, Homo sapien
ggaggtcacccagaccagatgagag

SEQ ID NO: 701266 - DNA, 25 bp, Homo sapien
gagaaatctttggtatcaggcgtga

SEQ ID NO: 701267 - DNA, 25 bp, Homo sapien
tctttggcgagagtggaaaccaaca

SEQ ID NO: 701268 - DNA, 25 bp, Homo sapien
tgggcccataggctacgtcagtccg

SEQ ID NO: 701269 - DNA, 25 bp, Homo sapien
acctgctgggcccataggctacgtc

SEQ ID NO: 701270 - DNA, 25 bp, Homo sapien
cagtccggcctggagtggacaggac

SEQ ID NO: 701271 - DNA, 25 bp, Homo sapien
taggctacgtcagtccggcctggag

SEQ ID NO: 701272 - DNA, 25 bp, Homo sapien
tcgtcaaagaaacgacatgccatcg

SEQ ID NO: 701273 - DNA, 25 bp, Homo sapien
catgccatcgtctgcaaaattataa

SEQ ID NO: 701274 - DNA, 25 bp, Homo sapien
gacattcaatgcgtctcccacggaa

SEQ ID NO: 701275 - DNA, 25 bp, Homo sapien
taaataagaaatctgtaaacgccac

SEQ ID NO: 701276 - DNA, 25 bp, Homo sapien
gagaacagaaaggtatacctctgcc

SEQ ID NO: 701277 - DNA, 25 bp, Homo sapien
aaatactcttataagacatgactcc

SEQ ID NO: 701278 - DNA, 25 bp, Homo sapien
aacagaaaggtatacctctgcctct

SEQ ID NO: 701279 - DNA, 25 bp, Homo sapien
agaaaggtatacctctgcctctctc

SEQ ID NO: 701280 - DNA, 25 bp, Homo sapien
cctgattttgcttaaaccgcttggg

SEQ ID NO: 701281 - DNA, 25 bp, Homo sapien
tggcctcatggcacaagaggagtca

SEQ ID NO: 701282 - DNA, 25 bp, Homo sapien
cctggccccggcatcatttcagatt

SEQ ID NO: 701283 - DNA, 25 bp, Homo sapien
tcagatttgaggtcagctgagccct

SEQ ID NO: 701284 - DNA, 25 bp, Homo sapien
agcctttatttgtggatgctgaaat

SEQ ID NO: 701285 - DNA, 25 bp, Homo sapien
tatttgtggatgctgaaattcgaat

SEQ ID NO: 701286 - DNA, 25 bp, Homo sapien
ggatgctgaaattcgaattgctgag

SEQ ID NO: 701287 - DNA, 25 bp, Homo sapien
aattcgaattgctgagtatttctca

SEQ ID NO: 701288 - DNA, 25 bp, Homo sapien
tgaaccagggaaccgtagccagatg

SEQ ID NO: 701289 - DNA, 25 bp, Homo sapien
cacctccgcccgaatctgaaccagg

SEQ ID NO: 701290 - DNA, 25 bp, Homo sapien
ccagggaaccgtagccagatggcct

SEQ ID NO: 701291 - DNA, 25 bp, Homo sapien
cctgagaaccagagccacgtctggc

SEQ ID NO: 701292 - DNA, 25 bp, Homo sapien
gcttctgtgtaggacggacctggcc

SEQ ID NO: 701293 - DNA, 25 bp, Homo sapien
tcagacaaaaggaaagcgcggtgct

SEQ ID NO: 701294 - DNA, 25 bp, Homo sapien
tgaatgtggccgtgaacaccctcaa

SEQ ID NO: 701295 - DNA, 25 bp, Homo sapien
caagttctgtacctccaaccaggag

SEQ ID NO: 701296 - DNA, 25 bp, Homo sapien
cagctgaaaacacgcacattgtcgg

SEQ ID NO: 701297 - DNA, 25 bp, Homo sapien
gggatggcgtccaagactaccacca

SEQ ID NO: 701298 - DNA, 25 bp, Homo sapien
gcccacagtccatccttacaggtag

SEQ ID NO: 701299 - DNA, 25 bp, Homo sapien
acaggtgccaagaggacccttgcgg

SEQ ID NO: 701300 - DNA, 25 bp, Homo sapien
cacagacgtacatgcccaggttgca

SEQ ID NO: 701301 - DNA, 25 bp, Homo sapien
agctagagcctgatgccattgcgca

SEQ ID NO: 701302 - DNA, 25 bp, Homo sapien
gacttcatcaaagggcaaggcagaa

SEQ ID NO: 701303 - DNA, 25 bp, Homo sapien
cccgcggtagcatgagcagactcat

SEQ ID NO: 701304 - DNA, 25 bp, Homo sapien
tgtagagcgagaaagtatccctgga

SEQ ID NO: 701305 - DNA, 25 bp, Homo sapien
atcccacggccctccttagggagag

SEQ ID NO: 701306 - DNA, 25 bp, Homo sapien
cccagaaagctcctaaaaaatgcag

SEQ ID NO: 701307 - DNA, 25 bp, Homo sapien
ttagggagagctctccaggctactc

SEQ ID NO: 701308 - DNA, 25 bp, Homo sapien
cagggtcttgtagaaagtcgggcca

SEQ ID NO: 701309 - DNA, 25 bp, Homo sapien
tcctgcgtcttcacatcagtggtgt

SEQ ID NO: 701310 - DNA, 25 bp, Homo sapien
tgtatttcctttactccgaggggca

SEQ ID NO: 701311 - DNA, 25 bp, Homo sapien
cttgtagaaagtcgggccaggcctc

SEQ ID NO: 701312 - DNA, 25 bp, Homo sapien
gagaagaggaggatcgcccacatcc

SEQ ID NO: 701313 - DNA, 25 bp, Homo sapien
cagctccggggttactaggagtcca

SEQ ID NO: 701314 - DNA, 25 bp, Homo sapien
tactaggagtccaacagcctgctgg

SEQ ID NO: 701315 - DNA, 25 bp, Homo sapien
caggagaggtggcaccctgaggtct

SEQ ID NO: 701316 - DNA, 25 bp, Homo sapien
gggcatcggcgagcttgctgcaggc

SEQ ID NO: 701317 - DNA, 25 bp, Homo sapien
cagcaggcgcagagggcatcggcga

SEQ ID NO: 701318 - DNA, 25 bp, Homo sapien
aggctggcagagaagtcgccctccg

SEQ ID NO: 701319 - DNA, 25 bp, Homo sapien
gagaagtcgccctccgtccacattt

SEQ ID NO: 701320 - DNA, 25 bp, Homo sapien
tatcagggctgaggacatagcctgg

SEQ ID NO: 701321 - DNA, 25 bp, Homo sapien
ttggattggagtgccagtgtaatcg

SEQ ID NO: 701322 - DNA, 25 bp, Homo sapien
cccgacggcgcaggaggtgtgctac

SEQ ID NO: 701323 - DNA, 25 bp, Homo sapien
cttagcatttgtggtgacgcaggtg

SEQ ID NO: 701324 - DNA, 25 bp, Homo sapien
aggagagtcccagttgctccagtcc

SEQ ID NO: 701325 - DNA, 25 bp, Homo sapien
ggagagtcccagttgctccagtccc

SEQ ID NO: 701326 - DNA, 25 bp, Homo sapien
agagtcccagttgctccagtcccag

SEQ ID NO: 701327 - DNA, 25 bp, Homo sapien
gcagccaggagagtcccagttgctc

SEQ ID NO: 701328 - DNA, 25 bp, Homo sapien
aagccatgcaagtttcgtcacaacg

SEQ ID NO: 701329 - DNA, 25 bp, Homo sapien
tgtagcccggagacagtagcgcttg

SEQ ID NO: 701330 - DNA, 25 bp, Homo sapien
tcacaacgcacgttttccatgagct

SEQ ID NO: 701331 - DNA, 25 bp, Homo sapien
tatctttgacgctgcccgagttcca

SEQ ID NO: 701332 - DNA, 25 bp, Homo sapien
caggggctcagcacgccgtaccccc

SEQ ID NO: 701333 - DNA, 25 bp, Homo sapien
tcagcacgccgtaccccctgttctg

SEQ ID NO: 701334 - DNA, 25 bp, Homo sapien
gctcagcacgccgtaccccctgttc

SEQ ID NO: 701335 - DNA, 25 bp, Homo sapien
gggctcagcacgccgtaccccctgt

SEQ ID NO: 701336 - DNA, 25 bp, Homo sapien
tggaagttcaggttgggatcttcgt

SEQ ID NO: 701337 - DNA, 25 bp, Homo sapien
tctggaagttcaggttgggatcttc

SEQ ID NO: 701338 - DNA, 25 bp, Homo sapien
ttctggaagttcaggttgggatctt

SEQ ID NO: 701339 - DNA, 25 bp, Homo sapien
cttcgtgctccatgatcttgtcatt

SEQ ID NO: 701340 - DNA, 25 bp, Homo sapien
gcactggctggacttttcctcgaag

SEQ ID NO: 701341 - DNA, 25 bp, Homo sapien
gagcagcgggttcctatctgtccag

SEQ ID NO: 701342 - DNA, 25 bp, Homo sapien
gatttcagagagggtattggaagct

SEQ ID NO: 701343 - DNA, 25 bp, Homo sapien
ttgcctctgagcagcgggttcctat

SEQ ID NO: 701344 - DNA, 25 bp, Homo sapien
tgcactggctgtttcggggcgatcc

SEQ ID NO: 701345 - DNA, 25 bp, Homo sapien
ggcgatccctcccttaggctccgag

SEQ ID NO: 701346 - DNA, 25 bp, Homo sapien
ggacctctcgagttgccattcctct

SEQ ID NO: 701347 - DNA, 25 bp, Homo sapien
gatccctcccttaggctccgagagg

SEQ ID NO: 701348 - DNA, 25 bp, Homo sapien
ggatcccgcagtcgggttcaggatc

SEQ ID NO: 701349 - DNA, 25 bp, Homo sapien
tctggcagcccggtgccagtggttc

SEQ ID NO: 701350 - DNA, 25 bp, Homo sapien
cagtcgggttcaggatctggcagcc

SEQ ID NO: 701351 - DNA, 25 bp, Homo sapien
tccaggcgactctccagaactgcat

SEQ ID NO: 701352 - DNA, 25 bp, Homo sapien
ctctcagggacctgccgacagctgt

SEQ ID NO: 701353 - DNA, 25 bp, Homo sapien
gtggacagatgcaagcaatcacttg

SEQ ID NO: 701354 - DNA, 25 bp, Homo sapien
attcagagctgcgtacgatgccggc

SEQ ID NO: 701355 - DNA, 25 bp, Homo sapien
tacagatcccgtagcataggtcgtg

SEQ ID NO: 701356 - DNA, 25 bp, Homo sapien
tgtgtttgtcgagccctgtgtccag

SEQ ID NO: 701357 - DNA, 25 bp, Homo sapien
gatcgtctcttgtgtttgtcgagcc

SEQ ID NO: 701358 - DNA, 25 bp, Homo sapien
ttaggatggtccgaggatcgtctct

SEQ ID NO: 701359 - DNA, 25 bp, Homo sapien
cagtctccagtcgttgagttaggat

SEQ ID NO: 701360 - DNA, 25 bp, Homo sapien
tggcactggtgtgcacctggaccca

SEQ ID NO: 701361 - DNA, 25 bp, Homo sapien
tttgttccagaaccgtcctgcctct

SEQ ID NO: 701362 - DNA, 25 bp, Homo sapien
aatgagaagggtccccggttccatg

SEQ ID NO: 701363 - DNA, 25 bp, Homo sapien
ggttccatgtcagacccagaaaggt

SEQ ID NO: 701364 - DNA, 25 bp, Homo sapien
gcatctaaaattgttactggtcatt

SEQ ID NO: 701365 - DNA, 25 bp, Homo sapien
ttctccgctgtaagatcataaaaca

SEQ ID NO: 701366 - DNA, 25 bp, Homo sapien
tttgtgtcatctcaggaatatcttc

SEQ ID NO: 701367 - DNA, 25 bp, Homo sapien
gaataccatttctcggctgacccgg

SEQ ID NO: 701368 - DNA, 25 bp, Homo sapien
tctatgcaggaacatctacgtgcgt

SEQ ID NO: 701369 - DNA, 25 bp, Homo sapien
tatacttaacgtagctcggagagcg

SEQ ID NO: 701370 - DNA, 25 bp, Homo sapien
cgttccatggtaagcggtgctacgg

SEQ ID NO: 701371 - DNA, 25 bp, Homo sapien
gaaacggagttttatagcaccagac

SEQ ID NO: 701372 - DNA, 25 bp, Homo sapien
gccctgcccctttccggccgctctc

SEQ ID NO: 701373 - DNA, 25 bp, Homo sapien
cctgcccctttccggccgctctcac

SEQ ID NO: 701374 - DNA, 25 bp, Homo sapien
ccctgcccctttccggccgctctca

SEQ ID NO: 701375 - DNA, 25 bp, Homo sapien
cagaaggcttaggaccgggaggact

SEQ ID NO: 701376 - DNA, 25 bp, Homo sapien
ctggaagagggagccgacactggag

SEQ ID NO: 701377 - DNA, 25 bp, Homo sapien
cactggagctgggatcacgagaaga

SEQ ID NO: 701378 - DNA, 25 bp, Homo sapien
gagttcctacgatctctagggcaga

SEQ ID NO: 701379 - DNA, 25 bp, Homo sapien
ggccgcttccttcgtagatggcgaa

SEQ ID NO: 701380 - DNA, 25 bp, Homo sapien
tataggttttactctgcggaagtgg

SEQ ID NO: 701381 - DNA, 25 bp, Homo sapien
tgagtccctaggagagatcggcacg

SEQ ID NO: 701382 - DNA, 25 bp, Homo sapien
ttgacggacctcagagctcggacag

SEQ ID NO: 701383 - DNA, 25 bp, Homo sapien
tgaaaagcaaggcttcccaccaatt

SEQ ID NO: 701384 - DNA, 25 bp, Homo sapien
catatgagagaaggcctgaaaagca

SEQ ID NO: 701385 - DNA, 25 bp, Homo sapien
gcttatctcagaacagtggagctaa

SEQ ID NO: 701386 - DNA, 25 bp, Homo sapien
gagctaagatgagagtccctgggac

SEQ ID NO: 701387 - DNA, 25 bp, Homo sapien
ggtccaacaacaccggaaaatcaga

SEQ ID NO: 701388 - DNA, 25 bp, Homo sapien
gggcgccagaggtccaacaacaccg

SEQ ID NO: 701389 - DNA, 25 bp, Homo sapien
gccagaggtccaacaacaccggaaa

SEQ ID NO: 701390 - DNA, 25 bp, Homo sapien
cagaggtccaacaacaccggaaaat

SEQ ID NO: 701391 - DNA, 25 bp, Homo sapien
gcttcgccaagtcttagcaaccggc

SEQ ID NO: 701392 - DNA, 25 bp, Homo sapien
gcgagcgcagcgcttcgccaagtct

SEQ ID NO: 701393 - DNA, 25 bp, Homo sapien
ggatccgggcgcgagcgcagcgctt

SEQ ID NO: 701394 - DNA, 25 bp, Homo sapien
gcagcgcttcgccaagtcttagcaa

SEQ ID NO: 701395 - DNA, 25 bp, Homo sapien
agacgcgcgcgaggctggcctgggc

SEQ ID NO: 701396 - DNA, 25 bp, Homo sapien
gcgtcgcccaccggcccgcccgaga

SEQ ID NO: 701397 - DNA, 25 bp, Homo sapien
gcacgcgcattcgcgccgcctcccc

SEQ ID NO: 701398 - DNA, 25 bp, Homo sapien
ggccggcgcccctcaccgccgagac

SEQ ID NO: 701399 - DNA, 25 bp, Homo sapien
ggactgcgggacatgacctgaggaa

SEQ ID NO: 701400 - DNA, 25 bp, Homo sapien
gggaatctccacataaaggcgaatc

SEQ ID NO: 701401 - DNA, 25 bp, Homo sapien
aggacgcgaaggctacggaaactcg

SEQ ID NO: 701402 - DNA, 25 bp, Homo sapien
aaactcgcgagagcgcggttcagag

SEQ ID NO: 701403 - DNA, 25 bp, Homo sapien
tccacggagtcgatcctctgtttct

SEQ ID NO: 701404 - DNA, 25 bp, Homo sapien
tggccaccctacaaggaggccttct

SEQ ID NO: 701405 - DNA, 25 bp, Homo sapien
gaggccttctctgcaagacagcggg

SEQ ID NO: 701406 - DNA, 25 bp, Homo sapien
ccagccgtccttgtttccacggagt

SEQ ID NO: 701407 - DNA, 25 bp, Homo sapien
tgctcagttccagggcacaccaata

SEQ ID NO: 701408 - DNA, 25 bp, Homo sapien
gctaatgctcagttccagggcacac

SEQ ID NO: 701409 - DNA, 25 bp, Homo sapien
aacagctaatgctcagttccagggc

SEQ ID NO: 701410 - DNA, 25 bp, Homo sapien
cacaccaatagtctgcgtgggggct

SEQ ID NO: 701411 - DNA, 25 bp, Homo sapien
tacacatccccgctggtatggacgg

SEQ ID NO: 701412 - DNA, 25 bp, Homo sapien
caaagcacagaaccggagatgcagt

SEQ ID NO: 701413 - DNA, 25 bp, Homo sapien
tcttaaaatgactccagccgggtga

SEQ ID NO: 701414 - DNA, 25 bp, Homo sapien
tgtgggtgctactcctcgacatgca

SEQ ID NO: 701415 - DNA, 25 bp, Homo sapien
ctctggctcccacatctctggcatc

SEQ ID NO: 701416 - DNA, 25 bp, Homo sapien
tggcatccaccccacctgaacaccc

SEQ ID NO: 701417 - DNA, 25 bp, Homo sapien
tctctggcatccaccccacctgaac

SEQ ID NO: 701418 - DNA, 25 bp, Homo sapien
tcccacatctctggcatccacccca

SEQ ID NO: 701419 - DNA, 25 bp, Homo sapien
cacagagtttaaacagccattggtt

SEQ ID NO: 701420 - DNA, 25 bp, Homo sapien
ctggtgtgcacagagtttaaacagc

SEQ ID NO: 701421 - DNA, 25 bp, Homo sapien
taaaaacgaagatataattcaccta

SEQ ID NO: 701422 - DNA, 25 bp, Homo sapien
tgtgcacagagtttaaacagccatt

SEQ ID NO: 701423 - DNA, 25 bp, Homo sapien
aaagctgaggctagtccgagggctc

SEQ ID NO: 701424 - DNA, 25 bp, Homo sapien
ggagcagaggatcatccggcggctg

SEQ ID NO: 701425 - DNA, 25 bp, Homo sapien
agggctccggcccaggtcaccgcat

SEQ ID NO: 701426 - DNA, 25 bp, Homo sapien
cagagctacactccctcatgtcctg

SEQ ID NO: 701427 - DNA, 25 bp, Homo sapien
tccgggctcccggcctccaagcact

SEQ ID NO: 701428 - DNA, 25 bp, Homo sapien
ggctcccggcctccaagcacttggg

SEQ ID NO: 701429 - DNA, 25 bp, Homo sapien
acttgggctgctccacgaggcccgg

SEQ ID NO: 701430 - DNA, 25 bp, Homo sapien
caagcacttgggctgctccacgagg

SEQ ID NO: 701431 - DNA, 25 bp, Homo sapien
caccgtagaagacgcgcaggatgcg

SEQ ID NO: 701432 - DNA, 25 bp, Homo sapien
ggtcacgtacaggtcgtagccagtg

SEQ ID NO: 701433 - DNA, 25 bp, Homo sapien
ccctgactgcttctcggacaggaca

SEQ ID NO: 701434 - DNA, 25 bp, Homo sapien
aggtccacgcacaccatgacggcgt

SEQ ID NO: 701435 - DNA, 25 bp, Homo sapien
agaaatcgaggcccggaagtccagg

SEQ ID NO: 701436 - DNA, 25 bp, Homo sapien
aatcgaggcccggaagtccaggagg

SEQ ID NO: 701437 - DNA, 25 bp, Homo sapien
cttgtgcggaagaaatcgaggcccg

SEQ ID NO: 701438 - DNA, 25 bp, Homo sapien
gaagaaatcgaggcccggaagtcca

SEQ ID NO: 701439 - DNA, 25 bp, Homo sapien
tccccgctggaggcggtatgtgtcc

SEQ ID NO: 701440 - DNA, 25 bp, Homo sapien
gtatgtgtccctgaaatccacggtc

SEQ ID NO: 701441 - DNA, 25 bp, Homo sapien
agtccaggaaagctcgatccgcacg

SEQ ID NO: 701442 - DNA, 25 bp, Homo sapien
gggtggccccaatgaccgagtccag

SEQ ID NO: 701443 - DNA, 25 bp, Homo sapien
atcagagcagtttcccggcccgcga

SEQ ID NO: 701444 - DNA, 25 bp, Homo sapien
attttcccatcagagcagtttcccg

SEQ ID NO: 701445 - DNA, 25 bp, Homo sapien
gcccgcgagacagaggggacacaaa

SEQ ID NO: 701446 - DNA, 25 bp, Homo sapien
ggacacaaacgcagcaagggcggcc

SEQ ID NO: 701447 - DNA, 25 bp, Homo sapien
gaaaagcccttcatcgtgccctgtg

SEQ ID NO: 701448 - DNA, 25 bp, Homo sapien
aaaagcccttcatcgtgccctgtgc

SEQ ID NO: 701449 - DNA, 25 bp, Homo sapien
aaagcccttcatcgtgccctgtgct

SEQ ID NO: 701450 - DNA, 25 bp, Homo sapien
tgaaaagcccttcatcgtgccctgt

SEQ ID NO: 701451 - DNA, 25 bp, Homo sapien
agcgcaggctgaagcctgcagccgc

SEQ ID NO: 701452 - DNA, 25 bp, Homo sapien
cagcgcaggctgaagcctgcagccg

SEQ ID NO: 701453 - DNA, 25 bp, Homo sapien
cttcacagggatgaacttgggcagt

SEQ ID NO: 701454 - DNA, 25 bp, Homo sapien
gcagtggcgggaagttgttctcctt

SEQ ID NO: 701455 - DNA, 25 bp, Homo sapien
gacctggtgctccactgggatctcg

SEQ ID NO: 701456 - DNA, 25 bp, Homo sapien
gaagttctggtagaagcagggcttc

SEQ ID NO: 701457 - DNA, 25 bp, Homo sapien
tccacagccggtagatcctcttcac

SEQ ID NO: 701458 - DNA, 25 bp, Homo sapien
acatccacagccggtagatcctctt

SEQ ID NO: 701459 - DNA, 25 bp, Homo sapien
catccacagccggtagatcctcttc

SEQ ID NO: 701460 - DNA, 25 bp, Homo sapien
atccacagccggtagatcctcttca

SEQ ID NO: 701461 - DNA, 25 bp, Homo sapien
ggaggacggatgagcaggcacggga

SEQ ID NO: 701462 - DNA, 25 bp, Homo sapien
gcccagtgaccccatgtcgaggatg

SEQ ID NO: 701463 - DNA, 25 bp, Homo sapien
gaggatgaactgtgcaagccaagac

SEQ ID NO: 701464 - DNA, 25 bp, Homo sapien
gggtgtggccgtgggaaagcatggg

SEQ ID NO: 701465 - DNA, 25 bp, Homo sapien
tagccgcaaggcgtgaacaggagca

SEQ ID NO: 701466 - DNA, 25 bp, Homo sapien
caggccgaagttggtccccgagcct

SEQ ID NO: 701467 - DNA, 25 bp, Homo sapien
gcagccacacgaaggccaggccgaa

SEQ ID NO: 701468 - DNA, 25 bp, Homo sapien
gccttgtagacaggccggaaccagc

SEQ ID NO: 701469 - DNA, 25 bp, Homo sapien
cggtcaggacaaactgggctccgaa

SEQ ID NO: 701470 - DNA, 25 bp, Homo sapien
catgaaattaaaggagctgtcggct

SEQ ID NO: 701471 - DNA, 25 bp, Homo sapien
caatcgcctggatgacggtcaggac

SEQ ID NO: 701472 - DNA, 25 bp, Homo sapien
gggctccgaagatgaagaaaaacgc

SEQ ID NO: 701473 - DNA, 25 bp, Homo sapien
tgtggtaacagcaccaggtatgtgt

SEQ ID NO: 701474 - DNA, 25 bp, Homo sapien
ctccctaggagagcgcgtacaatcc

SEQ ID NO: 701475 - DNA, 25 bp, Homo sapien
gcagcgatccgtgcagaaacatcag

SEQ ID NO: 701476 - DNA, 25 bp, Homo sapien
ggagagtgcctacaatcgcgaacca

SEQ ID NO: 701477 - DNA, 25 bp, Homo sapien
cggcacatccgaggggtgcacaaac

SEQ ID NO: 701478 - DNA, 25 bp, Homo sapien
gcacatccgaggggtgcacaaacca

SEQ ID NO: 701479 - DNA, 25 bp, Homo sapien
catccgaggggtgcacaaaccacag

SEQ ID NO: 701480 - DNA, 25 bp, Homo sapien
acatccgaggggtgcacaaaccaca

SEQ ID NO: 701481 - DNA, 25 bp, Homo sapien
gaggatgacgagcagtgccttgacc

SEQ ID NO: 701482 - DNA, 25 bp, Homo sapien
actcggaggatgacgagcagtgcct

SEQ ID NO: 701483 - DNA, 25 bp, Homo sapien
ggaggactcggaggatgacgagcag

SEQ ID NO: 701484 - DNA, 25 bp, Homo sapien
atgacgagcagtgccttgacctgca

SEQ ID NO: 701485 - DNA, 25 bp, Homo sapien
gcagggaccgcatgctcagcttctc

SEQ ID NO: 701486 - DNA, 25 bp, Homo sapien
tcagcttctcccgtgacctgcggga

SEQ ID NO: 701487 - DNA, 25 bp, Homo sapien
ttctgtccacctcgggcagggaccg

SEQ ID NO: 701488 - DNA, 25 bp, Homo sapien
tgctgccgcacgtgcacgagggccg

SEQ ID NO: 701489 - DNA, 25 bp, Homo sapien
tgggctgcatgctccgcttagaggc

SEQ ID NO: 701490 - DNA, 25 bp, Homo sapien
tagatttatgaaaagcggcaaaggc

SEQ ID NO: 701491 - DNA, 25 bp, Homo sapien
caccacagatgctgccgtggctcat

SEQ ID NO: 701492 - DNA, 25 bp, Homo sapien
caagtgtcaggtctagggaggcacc

SEQ ID NO: 701493 - DNA, 25 bp, Homo sapien
taaaggcaggcacgacgtacagtct

SEQ ID NO: 701494 - DNA, 25 bp, Homo sapien
tgagaggcaccaacttcaacgcgtg

SEQ ID NO: 701495 - DNA, 25 bp, Homo sapien
attagaaacaatgaggaggccgggc

SEQ ID NO: 701496 - DNA, 25 bp, Homo sapien
tgcagtggacacaaacttcgacgcg

SEQ ID NO: 701497 - DNA, 25 bp, Homo sapien
atcatggcagccgacacggagaaca

SEQ ID NO: 701498 - DNA, 25 bp, Homo sapien
actggaagaatccaattgccgacag

SEQ ID NO: 701499 - DNA, 25 bp, Homo sapien
gaagaatccaattgccgacagccag

SEQ ID NO: 701500 - DNA, 25 bp, Homo sapien
catgatcgcgatggccatcatggca

SEQ ID NO: 701501 - DNA, 25 bp, Homo sapien
tgggttccgccaagtgcccgtgttc

SEQ ID NO: 701502 - DNA, 25 bp, Homo sapien
aagttgttgtactgggcctccctcg

SEQ ID NO: 701503 - DNA, 25 bp, Homo sapien
gttgcctgagaagttgttgtactgg

SEQ ID NO: 701504 - DNA, 25 bp, Homo sapien
tgttccactccgtctgtgccttctg

SEQ ID NO: 701505 - DNA, 25 bp, Homo sapien
gccactggccactgcccgggtagct

SEQ ID NO: 701506 - DNA, 25 bp, Homo sapien
cactggccactgcccgggtagctgg

SEQ ID NO: 701507 - DNA, 25 bp, Homo sapien
taaggccactggccactgcccgggt

SEQ ID NO: 701508 - DNA, 25 bp, Homo sapien
aggccactggccactgcccgggtag

SEQ ID NO: 701509 - DNA, 25 bp, Homo sapien
ggagtgcttgtgaggaactccgctc

SEQ ID NO: 701510 - DNA, 25 bp, Homo sapien
agatgaacacgggttctgtggccct

SEQ ID NO: 701511 - DNA, 25 bp, Homo sapien
ggaactccgctctcggatgagatga

SEQ ID NO: 701512 - DNA, 25 bp, Homo sapien
tctcggatgagatgaacacgggttc

SEQ ID NO: 701513 - DNA, 25 bp, Homo sapien
aaggccgtaccagccgtgcagtgga

SEQ ID NO: 701514 - DNA, 25 bp, Homo sapien
gaccacacgtttccgggagcaagag

SEQ ID NO: 701515 - DNA, 25 bp, Homo sapien
ccggagtcaggcctcgagacctgaa

SEQ ID NO: 701516 - DNA, 25 bp, Homo sapien
tggacggcgggtgaccacacgtttc

SEQ ID NO: 701517 - DNA, 25 bp, Homo sapien
ttagttccggccaagggcatctgcc

SEQ ID NO: 701518 - DNA, 25 bp, Homo sapien
gccagggatccctgttttggaggca

SEQ ID NO: 701519 - DNA, 25 bp, Homo sapien
ccaggaactccccaggtatggtgca

SEQ ID NO: 701520 - DNA, 25 bp, Homo sapien
tgggtccccgactctgaactcaggg

SEQ ID NO: 701521 - DNA, 25 bp, Homo sapien
ccaaagttgtggtcagcgagtgcag

SEQ ID NO: 701522 - DNA, 25 bp, Homo sapien
gacaagacaattgtggccgctgccg

SEQ ID NO: 701523 - DNA, 25 bp, Homo sapien
ctccataaggcacagatttgacggg

SEQ ID NO: 701524 - DNA, 25 bp, Homo sapien
gcccaaccgttgtgaatggtgctgt

SEQ ID NO: 701525 - DNA, 25 bp, Homo sapien
gctgccgtccatcgagacaccatgg

SEQ ID NO: 701526 - DNA, 25 bp, Homo sapien
agggcagcaggcgtcctacagcaac

SEQ ID NO: 701527 - DNA, 25 bp, Homo sapien
cagcggcattccgtaccagcgaggg

SEQ ID NO: 701528 - DNA, 25 bp, Homo sapien
aagaccctgaagcatggccgtgaga

SEQ ID NO: 701529 - DNA, 25 bp, Homo sapien
ggtgcctcttggcagactggccggg

SEQ ID NO: 701530 - DNA, 25 bp, Homo sapien
ataacaaaaccccaacgatgcggcg

SEQ ID NO: 701531 - DNA, 25 bp, Homo sapien
tctgcatcagtgcaggcgagaggct

SEQ ID NO: 701532 - DNA, 25 bp, Homo sapien
gggcctgccaggtgagattttgtct

SEQ ID NO: 701533 - DNA, 25 bp, Homo sapien
catgggggggggcacacgatgcccc

SEQ ID NO: 701534 - DNA, 25 bp, Homo sapien
ggggggggcacacgatgcccccagc

SEQ ID NO: 701535 - DNA, 25 bp, Homo sapien
agtagccatgggggggggcacacga

SEQ ID NO: 701536 - DNA, 25 bp, Homo sapien
cagtagccatgggggggggcacacg

SEQ ID NO: 701537 - DNA, 25 bp, Homo sapien
gcagcaacgcggaatgacacagccc

SEQ ID NO: 701538 - DNA, 25 bp, Homo sapien
gtttgtggaggcgtaggcagggtga

SEQ ID NO: 701539 - DNA, 25 bp, Homo sapien
ggctccctcatgtggaagaaggatt

SEQ ID NO: 701540 - DNA, 25 bp, Homo sapien
gtgaggggcagcaacgcggaatgac

SEQ ID NO: 701541 - DNA, 25 bp, Homo sapien
gcttgtgcctccagccacgtgtctt

SEQ ID NO: 701542 - DNA, 25 bp, Homo sapien
cactcattctgaggccgggttggct

SEQ ID NO: 701543 - DNA, 25 bp, Homo sapien
tcatgcctcgcaggaaggaaagctg

SEQ ID NO: 701544 - DNA, 25 bp, Homo sapien
ctgttacagctggaggtgtccccac

SEQ ID NO: 701545 - DNA, 25 bp, Homo sapien
gccttacgccgccagcgtctgccag

SEQ ID NO: 701546 - DNA, 25 bp, Homo sapien
cgcatgttcgggacgggaggcgccg

SEQ ID NO: 701547 - DNA, 25 bp, Homo sapien
ctccggtgccgcttgggcccccgct

SEQ ID NO: 701548 - DNA, 25 bp, Homo sapien
cctgggccggcctccgcatgttcgg

SEQ ID NO: 701549 - DNA, 25 bp, Homo sapien
ccacgagctaccagggcctccggga

SEQ ID NO: 701550 - DNA, 25 bp, Homo sapien
tgggccacacggtggagcgtaacgg

SEQ ID NO: 701551 - DNA, 25 bp, Homo sapien
cacatggccttgtggaccgccccgg

SEQ ID NO: 701552 - DNA, 25 bp, Homo sapien
gaagatgctggactccacctacaca

SEQ ID NO: 701553 - DNA, 25 bp, Homo sapien
gggctgcccgcagtgcattgaatac

SEQ ID NO: 701554 - DNA, 25 bp, Homo sapien
tcctgggcacagctagctcacgctg

SEQ ID NO: 701555 - DNA, 25 bp, Homo sapien
gaatacaccgttctggtggtcccag

SEQ ID NO: 701556 - DNA, 25 bp, Homo sapien
gggatgctagaggttcctgccccac

SEQ ID NO: 701557 - DNA, 25 bp, Homo sapien
tggtcccgtgcgctgccctcaggct

SEQ ID NO: 701558 - DNA, 25 bp, Homo sapien
gcggacaggatgagccctcgcacgc

SEQ ID NO: 701559 - DNA, 25 bp, Homo sapien
aagcccgaggggcacaactgccgcg

SEQ ID NO: 701560 - DNA, 25 bp, Homo sapien
acaactgccgcggacaggatgagcc

SEQ ID NO: 701561 - DNA, 25 bp, Homo sapien
tgtctgtcccactggccgtgctcgt

SEQ ID NO: 701562 - DNA, 25 bp, Homo sapien
ggtcacgggcagcacatccatctgt

SEQ ID NO: 701563 - DNA, 25 bp, Homo sapien
tgaactcgctgtggcgaaggtcacg

SEQ ID NO: 701564 - DNA, 25 bp, Homo sapien
ccgtgctcgtcacagggtgcaggat

SEQ ID NO: 701565 - DNA, 25 bp, Homo sapien
tctccactgagtgatgtcacagtcc

SEQ ID NO: 701566 - DNA, 25 bp, Homo sapien
gggtcctccatctggtctgggccca

SEQ ID NO: 701567 - DNA, 25 bp, Homo sapien
ttttcggggtcctccatctggtctg

SEQ ID NO: 701568 - DNA, 25 bp, Homo sapien
cttctctgactgtctccactgagtg

SEQ ID NO: 701569 - DNA, 25 bp, Homo sapien
cccctcgtctgggtggtgaccatca

SEQ ID NO: 701570 - DNA, 25 bp, Homo sapien
tctgggtggtgaccatcacctctca

SEQ ID NO: 701571 - DNA, 25 bp, Homo sapien
ggtggtgaccatcacctctcaggtc

SEQ ID NO: 701572 - DNA, 25 bp, Homo sapien
tcgtctgggtggtgaccatcacctc

SEQ ID NO: 701573 - DNA, 25 bp, Homo sapien
ctgggagagctgagctgctgcagcc

SEQ ID NO: 701574 - DNA, 25 bp, Homo sapien
aaaccctcgttgaggacaagagact

SEQ ID NO: 701575 - DNA, 25 bp, Homo sapien
gccactgagagggagctgccaaaac

SEQ ID NO: 701576 - DNA, 25 bp, Homo sapien
aaccctcgttgaggacaagagactg

SEQ ID NO: 701577 - DNA, 25 bp, Homo sapien
actgagagggagctgccaaaaccct

SEQ ID NO: 701578 - DNA, 25 bp, Homo sapien
cccagacaagggagtggggacactc

SEQ ID NO: 701579 - DNA, 25 bp, Homo sapien
tttcccagacaagggagtggggaca

SEQ ID NO: 701580 - DNA, 25 bp, Homo sapien
tcccagacaagggagtggggacact

SEQ ID NO: 701581 - DNA, 25 bp, Homo sapien
ccagacaagggagtggggacactca

SEQ ID NO: 701582 - DNA, 25 bp, Homo sapien
agctccacccaacgcctctgtgtag

SEQ ID NO: 701583 - DNA, 25 bp, Homo sapien
tctgtgtaggggaacaagcagcagc

SEQ ID NO: 701584 - DNA, 25 bp, Homo sapien
aagcagcagcgctgaccactgagcc

SEQ ID NO: 701585 - DNA, 25 bp, Homo sapien
gggaacaagcagcagcgctgaccac

SEQ ID NO: 701586 - DNA, 25 bp, Homo sapien
gatcacacacggcatgtcctctgtg

SEQ ID NO: 701587 - DNA, 25 bp, Homo sapien
tccacctgggtacatagctgggagt

SEQ ID NO: 701588 - DNA, 25 bp, Homo sapien
tgttccagtgcatggagggccacac

SEQ ID NO: 701589 - DNA, 25 bp, Homo sapien
agcctggcgtcctgaaggtgcgtcc

SEQ ID NO: 701590 - DNA, 25 bp, Homo sapien
cagccatcgccgaaaatgttaggac

SEQ ID NO: 701591 - DNA, 25 bp, Homo sapien
gccgtgggtgcacagccatcgccga

SEQ ID NO: 701592 - DNA, 25 bp, Homo sapien
gaaaatgttaggacaggaactccca

SEQ ID NO: 701593 - DNA, 25 bp, Homo sapien
ggaagaggtttcctgccaaccggca

SEQ ID NO: 701594 - DNA, 25 bp, Homo sapien
gaactgaagggtggtcgggggcagc

SEQ ID NO: 701595 - DNA, 25 bp, Homo sapien
tgcagaactgaagggtggtcggggg

SEQ ID NO: 701596 - DNA, 25 bp, Homo sapien
ctgcagaactgaagggtggtcgggg

SEQ ID NO: 701597 - DNA, 25 bp, Homo sapien
cagaactgaagggtggtcgggggca

SEQ ID NO: 701598 - DNA, 25 bp, Homo sapien
tgcagaactgaagggtggtcggggg

SEQ ID NO: 701599 - DNA, 25 bp, Homo sapien
gaactgaagggtggtcgggggcagc

SEQ ID NO: 701600 - DNA, 25 bp, Homo sapien
ctgcagaactgaagggtggtcgggg

SEQ ID NO: 701601 - DNA, 25 bp, Homo sapien
cagaactgaagggtggtcgggggca

SEQ ID NO: 701602 - DNA, 25 bp, Homo sapien
gaactgaagggtggtcgggggcagc

SEQ ID NO: 701603 - DNA, 25 bp, Homo sapien
tgcagaactgaagggtggtcggggg

SEQ ID NO: 701604 - DNA, 25 bp, Homo sapien
ctgcagaactgaagggtggtcgggg

SEQ ID NO: 701605 - DNA, 25 bp, Homo sapien
cagaactgaagggtggtcgggggca

SEQ ID NO: 701606 - DNA, 25 bp, Homo sapien
gaactgaagggtggtcgggggcagc

SEQ ID NO: 701607 - DNA, 25 bp, Homo sapien
tgcagaactgaagggtggtcggggg

SEQ ID NO: 701608 - DNA, 25 bp, Homo sapien
cagaactgaagggtggtcgggggca

SEQ ID NO: 701609 - DNA, 25 bp, Homo sapien
ctgcagaactgaagggtggtcgggg

SEQ ID NO: 701610 - DNA, 25 bp, Homo sapien
ctgcagaactgaagggtggtcgggg

SEQ ID NO: 701611 - DNA, 25 bp, Homo sapien
tgcagaactgaagggtggtcggggg

SEQ ID NO: 701612 - DNA, 25 bp, Homo sapien
gaactgaagggtggtcgggggcagc

SEQ ID NO: 701613 - DNA, 25 bp, Homo sapien
cagaactgaagggtggtcgggggca

SEQ ID NO: 701614 - DNA, 25 bp, Homo sapien
gggacagcctggggaggagccccac

SEQ ID NO: 701615 - DNA, 25 bp, Homo sapien
gtggtcagggacagcctggggagga

SEQ ID NO: 701616 - DNA, 25 bp, Homo sapien
tcagggacagcctggggaggagccc

SEQ ID NO: 701617 - DNA, 25 bp, Homo sapien
ctgcagaactgaagggtggtcaggg

SEQ ID NO: 701618 - DNA, 25 bp, Homo sapien
ctgcagaactgaagggtggtctggg

SEQ ID NO: 701619 - DNA, 25 bp, Homo sapien
gaactgaagggtggtctggggcagc

SEQ ID NO: 701620 - DNA, 25 bp, Homo sapien
tgcagaactgaagggtggtctgggg

SEQ ID NO: 701621 - DNA, 25 bp, Homo sapien
cagaactgaagggtggtctggggca

SEQ ID NO: 701622 - DNA, 25 bp, Homo sapien
ggtcggacccatccccttcggtgca

SEQ ID NO: 701623 - DNA, 25 bp, Homo sapien
ggacgccactcgaggctgtgatgat

SEQ ID NO: 701624 - DNA, 25 bp, Homo sapien
ccatccccttcggtgcagagcggag

SEQ ID NO: 701625 - DNA, 25 bp, Homo sapien
gatgccaggctgggtcggacccatc

SEQ ID NO: 701626 - DNA, 25 bp, Homo sapien
ctagaacatcactgcggccggtggg

SEQ ID NO: 701627 - DNA, 25 bp, Homo sapien
gagacattctgctgacacatcccac

SEQ ID NO: 701628 - DNA, 25 bp, Homo sapien
cccagctactgagacgcaggcgttc

SEQ ID NO: 701629 - DNA, 25 bp, Homo sapien
tgccgtgcaaatcccaagtctctgg

SEQ ID NO: 701630 - DNA, 25 bp, Homo sapien
aagtttgtgataccctggcctctcc

SEQ ID NO: 701631 - DNA, 25 bp, Homo sapien
agtttgtgataccctggcctctcca

SEQ ID NO: 701632 - DNA, 25 bp, Homo sapien
gaagttgccgcagccgatcttcttg

SEQ ID NO: 701633 - DNA, 25 bp, Homo sapien
tcttcttgccgacgcggaagttggg

SEQ ID NO: 701634 - DNA, 25 bp, Homo sapien
gccttggacattctccggccctcct

SEQ ID NO: 701635 - DNA, 25 bp, Homo sapien
cgagctccggatgccgtggctgctc

SEQ ID NO: 701636 - DNA, 25 bp, Homo sapien
tgactctccagagcggagttccggc

SEQ ID NO: 701637 - DNA, 25 bp, Homo sapien
gagttccggcgaacacggctgtgta

SEQ ID NO: 701638 - DNA, 25 bp, Homo sapien
tgccccaggtttgaagttttagagc

SEQ ID NO: 701639 - DNA, 25 bp, Homo sapien
tgcaggttcagtccagcatttgcgt

SEQ ID NO: 701640 - DNA, 25 bp, Homo sapien
aatttgatagccacgtattcatttg

SEQ ID NO: 701641 - DNA, 25 bp, Homo sapien
atttgatagccacgtattcatttgt

SEQ ID NO: 701642 - DNA, 25 bp, Homo sapien
tttgatagccacgtattcatttgta

SEQ ID NO: 701643 - DNA, 25 bp, Homo sapien
caatttgatagccacgtattcattt

SEQ ID NO: 701644 - DNA, 25 bp, Homo sapien
cacaagagcgagtcaccaggggacc

SEQ ID NO: 701645 - DNA, 25 bp, Homo sapien
ctgggggcacaagagcgagtcacca

SEQ ID NO: 701646 - DNA, 25 bp, Homo sapien
cctggggggcacgtcagcgggggtg

SEQ ID NO: 701647 - DNA, 25 bp, Homo sapien
cgggtcgctgccctgaaatccctgg

SEQ ID NO: 701648 - DNA, 25 bp, Homo sapien
cgctgagctgcttgtagaaccggta

SEQ ID NO: 701649 - DNA, 25 bp, Homo sapien
ggcgctgagctgcttgtagaaccgg

SEQ ID NO: 701650 - DNA, 25 bp, Homo sapien
gcgctgagctgcttgtagaaccggt

SEQ ID NO: 701651 - DNA, 25 bp, Homo sapien
gctgagctgcttgtagaaccggtac

SEQ ID NO: 701652 - DNA, 25 bp, Homo sapien
ctgcggcggaggacagacgcacggg

SEQ ID NO: 701653 - DNA, 25 bp, Homo sapien
ggaggacagacgcacgggcgtgcgg

SEQ ID NO: 701654 - DNA, 25 bp, Homo sapien
gcggaggacagacgcacgggcgtgc

SEQ ID NO: 701655 - DNA, 25 bp, Homo sapien
cggcggaggacagacgcacgggcgt

SEQ ID NO: 701656 - DNA, 25 bp, Homo sapien
cacggaccgaagtagtagacctgag

SEQ ID NO: 701657 - DNA, 25 bp, Homo sapien
tgtacttcccgcacggaccgaagta

SEQ ID NO: 701658 - DNA, 25 bp, Homo sapien
ttcccgcacggaccgaagtagtaga

SEQ ID NO: 701659 - DNA, 25 bp, Homo sapien
catggcgttgtacttcccgcacgga

SEQ ID NO: 701660 - DNA, 25 bp, Homo sapien
gtccggtcgcacaggtcgaacaggt

SEQ ID NO: 701661 - DNA, 25 bp, Homo sapien
aaggtccggtcgcacaggtcgaaca

SEQ ID NO: 701662 - DNA, 25 bp, Homo sapien
cgtcttgagcgtgaaggtccggtcg

SEQ ID NO: 701663 - DNA, 25 bp, Homo sapien
ccggtcgcacaggtcgaacaggtcc

SEQ ID NO: 701664 - DNA, 25 bp, Homo sapien
gatgctcatgtagcgcgccgtgccc

SEQ ID NO: 701665 - DNA, 25 bp, Homo sapien
gggtcgatgtactccttggccagcc

SEQ ID NO: 701666 - DNA, 25 bp, Homo sapien
tcaggctcttgtgctcgcggtacgg

SEQ ID NO: 701667 - DNA, 25 bp, Homo sapien
ttcacgtcccggtagattaggctct

SEQ ID NO: 701668 - DNA, 25 bp, Homo sapien
gggacaggggcgcagcctcagcggg

SEQ ID NO: 701669 - DNA, 25 bp, Homo sapien
aggggcgcagcctcagcggggtccg

SEQ ID NO: 701670 - DNA, 25 bp, Homo sapien
gacaggggcgcagcctcagcggggt

SEQ ID NO: 701671 - DNA, 25 bp, Homo sapien
ggcgcagcctcagcggggtccgggc

SEQ ID NO: 701672 - DNA, 25 bp, Homo sapien
cagcgcctccaggtcgtcgcggcgg

SEQ ID NO: 701673 - DNA, 25 bp, Homo sapien
cgcctccaggtcgtcgcggcggctc

SEQ ID NO: 701674 - DNA, 25 bp, Homo sapien
ggctgccgcgcaggaagtacatgaa

SEQ ID NO: 701675 - DNA, 25 bp, Homo sapien
acatgaacatgtggcccagcgcctc

SEQ ID NO: 701676 - DNA, 25 bp, Homo sapien
ctgcgggggtctgtggtcagccttg

SEQ ID NO: 701677 - DNA, 25 bp, Homo sapien
tgcgggggtctgtggtcagccttgc

SEQ ID NO: 701678 - DNA, 25 bp, Homo sapien
gcgggggtctgtggtcagccttgct

SEQ ID NO: 701679 - DNA, 25 bp, Homo sapien
cgggggtctgtggtcagccttgctc

SEQ ID NO: 701680 - DNA, 25 bp, Homo sapien
ccgatcttctggtaccgctccttga

SEQ ID NO: 701681 - DNA, 25 bp, Homo sapien
ggcgcgtttggtgtccccgatcttc

SEQ ID NO: 701682 - DNA, 25 bp, Homo sapien
gatcttctggtaccgctccttgagc

SEQ ID NO: 701683 - DNA, 25 bp, Homo sapien
ggcgtggcgcgtttggtgtccccga

SEQ ID NO: 701684 - DNA, 25 bp, Homo sapien
cgaagccactgcggtcgaagaggtc

SEQ ID NO: 701685 - DNA, 25 bp, Homo sapien
ggtagtcatagtcgggcttctcgaa

SEQ ID NO: 701686 - DNA, 25 bp, Homo sapien
tcgaagaggtcggtgaagagcttcc

SEQ ID NO: 701687 - DNA, 25 bp, Homo sapien
acatagcgcaggtacgtggccatct

SEQ ID NO: 701688 - DNA, 25 bp, Homo sapien
caggtcggtgtggacggtgccgatg

SEQ ID NO: 701689 - DNA, 25 bp, Homo sapien
ggtcggtgtggacggtgccgatggg

SEQ ID NO: 701690 - DNA, 25 bp, Homo sapien
ctgggttttgtcccggagctgaggc

SEQ ID NO: 701691 - DNA, 25 bp, Homo sapien
gggttttgtcccggagctgaggctg

SEQ ID NO: 701692 - DNA, 25 bp, Homo sapien
ggcagtagggggtcacgctggccgc

SEQ ID NO: 701693 - DNA, 25 bp, Homo sapien
agggggtcacgctggccgcccatgc

SEQ ID NO: 701694 - DNA, 25 bp, Homo sapien
agtagggggtcacgctggccgccca

SEQ ID NO: 701695 - DNA, 25 bp, Homo sapien
ggtcacgctggccgcccatgcccct

SEQ ID NO: 701696 - DNA, 25 bp, Homo sapien
ttggtttcatcggccacctccacct

SEQ ID NO: 701697 - DNA, 25 bp, Homo sapien
tccacctctgcaggcgctgtgatcg

SEQ ID NO: 701698 - DNA, 25 bp, Homo sapien
tgatcggggcgttggagtggccggc

SEQ ID NO: 701699 - DNA, 25 bp, Homo sapien
acctccacctctgcaggcgctgtga

SEQ ID NO: 701700 - DNA, 25 bp, Homo sapien
tttctcctcttgaagaaacagcagc

SEQ ID NO: 701701 - DNA, 25 bp, Homo sapien
tcacttgtgtcgctgcagcgatttt

SEQ ID NO: 701702 - DNA, 25 bp, Homo sapien
ctttctcctcttgaagaaacagcag

SEQ ID NO: 701703 - DNA, 25 bp, Homo sapien
gtcgctgcagcgattttctctttct

SEQ ID NO: 701704 - DNA, 25 bp, Homo sapien
gagcaagtgcgtcgagaagcacccg

SEQ ID NO: 701705 - DNA, 25 bp, Homo sapien
caggtgtagaaatttcggccaaagt

SEQ ID NO: 701706 - DNA, 25 bp, Homo sapien
ggccaaagtcttacatgaaggaagt

SEQ ID NO: 701707 - DNA, 25 bp, Homo sapien
tctatggcttcaagggagcatcaga

SEQ ID NO: 701708 - DNA, 25 bp, Homo sapien
tggtcttccacccttgctgccgggt

SEQ ID NO: 701709 - DNA, 25 bp, Homo sapien
gacaagtagtccttatccccaagct

SEQ ID NO: 701710 - DNA, 25 bp, Homo sapien
tactgccgggaaaaccatcgatgag

SEQ ID NO: 701711 - DNA, 25 bp, Homo sapien
catattacggtggtactggtcttcc

SEQ ID NO: 701712 - DNA, 25 bp, Homo sapien
aaagtccgacgcagacatcttaggg

SEQ ID NO: 701713 - DNA, 25 bp, Homo sapien
aggtccctgcaccttgaaagtccga

SEQ ID NO: 701714 - DNA, 25 bp, Homo sapien
cgagtggagttcattgaccggcccc

SEQ ID NO: 701715 - DNA, 25 bp, Homo sapien
ggaaggagtgcagcatcaaccgctt

SEQ ID NO: 701716 - DNA, 25 bp, Homo sapien
aaacctggcttgtgaggacgcgtcc

SEQ ID NO: 701717 - DNA, 25 bp, Homo sapien
tcatgaccatcgaggagttcgctgc

SEQ ID NO: 701718 - DNA, 25 bp, Homo sapien
taccagtgtctgtgacgagctcagg

SEQ ID NO: 701719 - DNA, 25 bp, Homo sapien
ggattatggacatgggccaccgagc

SEQ ID NO: 701720 - DNA, 25 bp, Homo sapien
ccggctttaactgctggtcctcacg

SEQ ID NO: 701721 - DNA, 25 bp, Homo sapien
catgtgggtgtcgtgttcacgcagc

SEQ ID NO: 701722 - DNA, 25 bp, Homo sapien
gccatagttgccagcccggctttaa

SEQ ID NO: 701723 - DNA, 25 bp, Homo sapien
cgttagtctcactgcctcctgcagg

SEQ ID NO: 701724 - DNA, 25 bp, Homo sapien
tgaatagccacaacgatcttgaaaa

SEQ ID NO: 701725 - DNA, 25 bp, Homo sapien
ccactgcgatctgcagtcagtataa

SEQ ID NO: 701726 - DNA, 25 bp, Homo sapien
ttgttaagatgtccacacaacccac

SEQ ID NO: 701727 - DNA, 25 bp, Homo sapien
gggtgccaaggccattcaacagaaa

SEQ ID NO: 701728 - DNA, 25 bp, Homo sapien
catccacgtgcgacctggaggactg

SEQ ID NO: 701729 - DNA, 25 bp, Homo sapien
tgtaccaggtgaactgacggagctc

SEQ ID NO: 701730 - DNA, 25 bp, Homo sapien
catagccatcgggtctctaaagctg

SEQ ID NO: 701731 - DNA, 25 bp, Homo sapien
tacaccaactgtcaatgccggaatt

SEQ ID NO: 701732 - DNA, 25 bp, Homo sapien
tgctgcccctcctgaatctcgtatg

SEQ ID NO: 701733 - DNA, 25 bp, Homo sapien
tccctgttcttgaagaatacttgaa

SEQ ID NO: 701734 - DNA, 25 bp, Homo sapien
aaaacaacacatcgatggactttgc

SEQ ID NO: 701735 - DNA, 25 bp, Homo sapien
tatgatggtcacagtccggtggccg

SEQ ID NO: 701736 - DNA, 25 bp, Homo sapien
gttaaaagcattgcaggcacccggg

SEQ ID NO: 701737 - DNA, 25 bp, Homo sapien
tgtccccatgatagttgacaatcgg

SEQ ID NO: 701738 - DNA, 25 bp, Homo sapien
cacagcgtttgccatcttgcagagc

SEQ ID NO: 701739 - DNA, 25 bp, Homo sapien
cagcccgcagtatttcagggacagg

SEQ ID NO: 701740 - DNA, 25 bp, Homo sapien
gaggaggaccgcttctacctggtgt

SEQ ID NO: 701741 - DNA, 25 bp, Homo sapien
aagatctgtgacttcgacctgggca

SEQ ID NO: 701742 - DNA, 25 bp, Homo sapien
attgagttcttcgaggaggaggacc

SEQ ID NO: 701743 - DNA, 25 bp, Homo sapien
gcataacaaaggtaggtggtgaccc

SEQ ID NO: 701744 - DNA, 25 bp, Homo sapien
cagggcgttaagtgtggtgaattcc

SEQ ID NO: 701745 - DNA, 25 bp, Homo sapien
gctgtgtcctttcgcctgtttcaga

SEQ ID NO: 701746 - DNA, 25 bp, Homo sapien
agtggagtttctggccccttctcga

SEQ ID NO: 701747 - DNA, 25 bp, Homo sapien
ccaggccacattcggagcagggttt

SEQ ID NO: 701748 - DNA, 25 bp, Homo sapien
ttccaccgttcgttcaaggtgaggc

SEQ ID NO: 701749 - DNA, 25 bp, Homo sapien
tccgggctggaccaccggaatggcc

SEQ ID NO: 701750 - DNA, 25 bp, Homo sapien
agaagaaaccagccgaacttcaggg

SEQ ID NO: 701751 - DNA, 25 bp, Homo sapien
cgggccggccgtgcgctgaagcggg

SEQ ID NO: 701752 - DNA, 25 bp, Homo sapien
caggcatcaggtgcccatgtgcgca

SEQ ID NO: 701753 - DNA, 25 bp, Homo sapien
cctggctccggttcgtcatgggata

SEQ ID NO: 701754 - DNA, 25 bp, Homo sapien
tgagtttggcatctgtgactgagca

SEQ ID NO: 701755 - DNA, 25 bp, Homo sapien
tgttcaggccgtgctgtcctctcgg

SEQ ID NO: 701756 - DNA, 25 bp, Homo sapien
cctgaccttgtgttctgcgtccctt

SEQ ID NO: 701757 - DNA, 25 bp, Homo sapien
gaccttgtgttctgcgtcccttggc

SEQ ID NO: 701758 - DNA, 25 bp, Homo sapien
ctcctgaccttgtgttctgcgtccc

SEQ ID NO: 701759 - DNA, 25 bp, Homo sapien
tgaccttgtgttctgcgtcccttgg

SEQ ID NO: 701760 - DNA, 25 bp, Homo sapien
tcgataacatagtgagctctctgcc

SEQ ID NO: 701761 - DNA, 25 bp, Homo sapien
gaattggcctttcccagatgctgca

SEQ ID NO: 701762 - DNA, 25 bp, Homo sapien
gggctgcgagaccaaaatccatgag

SEQ ID NO: 701763 - DNA, 25 bp, Homo sapien
cagaattgtcagtggcctttcacca

SEQ ID NO: 701764 - DNA, 25 bp, Homo sapien
tgggtccagatcattctctggtggg

SEQ ID NO: 701765 - DNA, 25 bp, Homo sapien
caggccctgtgaacatttgggtcca

SEQ ID NO: 701766 - DNA, 25 bp, Homo sapien
aggctggggttcgaggctcactgca

SEQ ID NO: 701767 - DNA, 25 bp, Homo sapien
gatccagctctgctcacaccttatt

SEQ ID NO: 701768 - DNA, 25 bp, Homo sapien
ggaagtttacaagctcctcgggctg

SEQ ID NO: 701769 - DNA, 25 bp, Homo sapien
tcttggtgtgagtctggtagacaag

SEQ ID NO: 701770 - DNA, 25 bp, Homo sapien
gccaagaggaagtttacaagctcct

SEQ ID NO: 701771 - DNA, 25 bp, Homo sapien
tgttttctggaactgtcttggtgtg

SEQ ID NO: 701772 - DNA, 25 bp, Homo sapien
cggttgctaggcaacggagacctcc

SEQ ID NO: 701773 - DNA, 25 bp, Homo sapien
gctgctgcccggaacttggctccgt

SEQ ID NO: 701774 - DNA, 25 bp, Homo sapien
agaagactccgccactgggtgggcc

SEQ ID NO: 701775 - DNA, 25 bp, Homo sapien
gcatgcgccaatggcccgtgcctgt

SEQ ID NO: 701776 - DNA, 25 bp, Homo sapien
ccttcagccgcgcaccaaccaacgg

SEQ ID NO: 701777 - DNA, 25 bp, Homo sapien
aaccaacgacgctgctcgcgccaca

SEQ ID NO: 701778 - DNA, 25 bp, Homo sapien
cgccgccggccaaccaacgacgctg

SEQ ID NO: 701779 - DNA, 25 bp, Homo sapien
ttcagccgcgcaccaaccaacggcc

SEQ ID NO: 701780 - DNA, 25 bp, Homo sapien
ctgtggcagtgcagacagccgtggg

SEQ ID NO: 701781 - DNA, 25 bp, Homo sapien
cagcgccgccgtcaggcacaccagg

SEQ ID NO: 701782 - DNA, 25 bp, Homo sapien
agcgccgccgtcaggcacaccaggc

SEQ ID NO: 701783 - DNA, 25 bp, Homo sapien
cacccaccaggacttgaagttcaca

SEQ ID NO: 701784 - DNA, 25 bp, Homo sapien
agtcggtgagcagcgcccctgacac

SEQ ID NO: 701785 - DNA, 25 bp, Homo sapien
atggtggcggtagaaggagaacttc

SEQ ID NO: 701786 - DNA, 25 bp, Homo sapien
tcgtgtcgtcgctccagtcggtgag

SEQ ID NO: 701787 - DNA, 25 bp, Homo sapien
catcatctggtacactgctgtcgcc

SEQ ID NO: 701788 - DNA, 25 bp, Homo sapien
gaagtacatcttcccctggtacagc

SEQ ID NO: 701789 - DNA, 25 bp, Homo sapien
gggaagtacatcttcccctggtaca

SEQ ID NO: 701790 - DNA, 25 bp, Homo sapien
gctgtcgccacttggtccagcttct

SEQ ID NO: 701791 - DNA, 25 bp, Homo sapien
ctgagtcgtcgaggcaggagaaggt

SEQ ID NO: 701792 - DNA, 25 bp, Homo sapien
aggagaaggtcaggctcaggcggtg

SEQ ID NO: 701793 - DNA, 25 bp, Homo sapien
gcaggagaaggtcaggctcaggcgg

SEQ ID NO: 701794 - DNA, 25 bp, Homo sapien
gagaaggtcaggctcaggcggtggg

SEQ ID NO: 701795 - DNA, 25 bp, Homo sapien
cggaagatgtttcgcagctcgttgg

SEQ ID NO: 701796 - DNA, 25 bp, Homo sapien
cctgctcccggaagatgtttcgcag

SEQ ID NO: 701797 - DNA, 25 bp, Homo sapien
atggcgttctggatgaggtgcacct

SEQ ID NO: 701798 - DNA, 25 bp, Homo sapien
cgatgatggcgttctggatgaggtg

SEQ ID NO: 701799 - DNA, 25 bp, Homo sapien
gatccttcaggtgctaggctgggtc

SEQ ID NO: 701800 - DNA, 25 bp, Homo sapien
cttcaggtgctaggctgggtccctc

SEQ ID NO: 701801 - DNA, 25 bp, Homo sapien
gtccccgcggggtgatggcattgat

SEQ ID NO: 701802 - DNA, 25 bp, Homo sapien
attgatccttcaggtgctaggctgg

SEQ ID NO: 701803 - DNA, 25 bp, Homo sapien
aggttgacccccagcgtgagatgga

SEQ ID NO: 701804 - DNA, 25 bp, Homo sapien
cagcgtgagatggagcaaacttcag

SEQ ID NO: 701805 - DNA, 25 bp, Homo sapien
ccccagcgtgagatggagcaaactt

SEQ ID NO: 701806 - DNA, 25 bp, Homo sapien
agggcggtggcaacactcccagcgc

SEQ ID NO: 701807 - DNA, 25 bp, Homo sapien
acagcggtgctgacagtcgatgcgg

SEQ ID NO: 701808 - DNA, 25 bp, Homo sapien
cagcggtgctgacagtcgatgcggc

SEQ ID NO: 701809 - DNA, 25 bp, Homo sapien
acacgtacaagagccgccagggctc

SEQ ID NO: 701810 - DNA, 25 bp, Homo sapien
ctgaaacacgtacaagagccgccag

SEQ ID NO: 701811 - DNA, 25 bp, Homo sapien
ggcacgcccctcagcctggacggag

SEQ ID NO: 701812 - DNA, 25 bp, Homo sapien
tcagcctggacggagccttgcttac

SEQ ID NO: 701813 - DNA, 25 bp, Homo sapien
cgcagttatagccaaagcaggcgac

SEQ ID NO: 701814 - DNA, 25 bp, Homo sapien
cgtgcgagtctgtgcagttgttgca

SEQ ID NO: 701815 - DNA, 25 bp, Homo sapien
tatagccaaagcaggcgacgtgcga

SEQ ID NO: 701816 - DNA, 25 bp, Homo sapien
tgttgcaggagatggtctcgtactg

SEQ ID NO: 701817 - DNA, 25 bp, Homo sapien
cttggaagtggtgcgcccctgaacc

SEQ ID NO: 701818 - DNA, 25 bp, Homo sapien
cctggcacgggtgggtgtgatgcct

SEQ ID NO: 701819 - DNA, 25 bp, Homo sapien
ctgtgggacacaggcttggaagtgg

SEQ ID NO: 701820 - DNA, 25 bp, Homo sapien
acggccccgccctacccgatgacag

SEQ ID NO: 701821 - DNA, 25 bp, Homo sapien
acagctgacttccactgcgccgagg

SEQ ID NO: 701822 - DNA, 25 bp, Homo sapien
gacagctgacttccactgcgccgag

SEQ ID NO: 701823 - DNA, 25 bp, Homo sapien
tatggggaccctttaggaaagatgc

SEQ ID NO: 701824 - DNA, 25 bp, Homo sapien
cctcgggagcccctctaggacgtgg

SEQ ID NO: 701825 - DNA, 25 bp, Homo sapien
tactcacccacgaggtgctcacata

SEQ ID NO: 701826 - DNA, 25 bp, Homo sapien
cgcctcctgcgcagagctgggttga

SEQ ID NO: 701827 - DNA, 25 bp, Homo sapien
ctgttcatgaaaccaccacatgggt

SEQ ID NO: 701828 - DNA, 25 bp, Homo sapien
agtgcccccactgatctagaggacc

SEQ ID NO: 701829 - DNA, 25 bp, Homo sapien
tgtcccaggtatagggagagcccca

SEQ ID NO: 701830 - DNA, 25 bp, Homo sapien
tcatgaaaccaccacatgggtgtgg

SEQ ID NO: 701831 - DNA, 25 bp, Homo sapien
ccggggtggctctgtgtgtcccagg

SEQ ID NO: 701832 - DNA, 25 bp, Homo sapien
ggccggggtggctctgtgtgtccca

SEQ ID NO: 701833 - DNA, 25 bp, Homo sapien
aaggccggggtggctctgtgtgtcc

SEQ ID NO: 701834 - DNA, 25 bp, Homo sapien
tctgtgtgtcccaggccaggagaag

SEQ ID NO: 701835 - DNA, 25 bp, Homo sapien
gcacgctggtgttggcttacgagca

SEQ ID NO: 701836 - DNA, 25 bp, Homo sapien
gtgttggcttacgagcaccccttct

SEQ ID NO: 701837 - DNA, 25 bp, Homo sapien
ccgcggcacgctggtgttggcttac

SEQ ID NO: 701838 - DNA, 25 bp, Homo sapien
agcagggtgtgcaggccgcggcacg

SEQ ID NO: 701839 - DNA, 25 bp, Homo sapien
tgcggggagacgaggctgcctcagc

SEQ ID NO: 701840 - DNA, 25 bp, Homo sapien
ccagctgggacgtgtggtcctatgt

SEQ ID NO: 701841 - DNA, 25 bp, Homo sapien
tggccacatccacgacaccctcgtg

SEQ ID NO: 701842 - DNA, 25 bp, Homo sapien
cccagctgggacgtgtggtcctatg

SEQ ID NO: 701843 - DNA, 25 bp, Homo sapien
acaccttaaggctggcgataccagg

SEQ ID NO: 701844 - DNA, 25 bp, Homo sapien
tgtgggggctccagacaccttaagg

SEQ ID NO: 701845 - DNA, 25 bp, Homo sapien
gctccagacaccttaaggctggcga

SEQ ID NO: 701846 - DNA, 25 bp, Homo sapien
cagacaccttaaggctggcgatacc

SEQ ID NO: 701847 - DNA, 25 bp, Homo sapien
tgtccagctgagtctccgcccccac

SEQ ID NO: 701848 - DNA, 25 bp, Homo sapien
ccagctgagtctccgcccccacgtt

SEQ ID NO: 701849 - DNA, 25 bp, Homo sapien
gctcagctctgtccggggtcggaga

SEQ ID NO: 701850 - DNA, 25 bp, Homo sapien
agctcagctctgtccggggtcggag

SEQ ID NO: 701851 - DNA, 25 bp, Homo sapien
cccgcagctctgcggacctgcccag

SEQ ID NO: 701852 - DNA, 25 bp, Homo sapien
cgcagctctgcggacctgcccaggc

SEQ ID NO: 701853 - DNA, 25 bp, Homo sapien
actttaatcacatcccgcagctctg

SEQ ID NO: 701854 - DNA, 25 bp, Homo sapien
tcagggactttaatcacatcccgca

SEQ ID NO: 701855 - DNA, 25 bp, Homo sapien
gcatgtaatccattacagaatccca

SEQ ID NO: 701856 - DNA, 25 bp, Homo sapien
cccatgcagtgattccaggatttga

SEQ ID NO: 701857 - DNA, 25 bp, Homo sapien
tgatgaaaactgtcactttagcatg

SEQ ID NO: 701858 - DNA, 25 bp, Homo sapien
caggactgacccttcttcagagata

SEQ ID NO: 701859 - DNA, 25 bp, Homo sapien
gcagaagtgcatctcggcttgggtt

SEQ ID NO: 701860 - DNA, 25 bp, Homo sapien
tgtcgccaaggttttctctcccaga

SEQ ID NO: 701861 - DNA, 25 bp, Homo sapien
tgacccaaaggtcctgacggttgcg

SEQ ID NO: 701862 - DNA, 25 bp, Homo sapien
tccattgtcagtgtgctcgtgggct

SEQ ID NO: 701863 - DNA, 25 bp, Homo sapien
cacacagggagggtcttatttttca

SEQ ID NO: 701864 - DNA, 25 bp, Homo sapien
gatgccctggtgatctgttggagca

SEQ ID NO: 701865 - DNA, 25 bp, Homo sapien
gttctgccattgagcccacacaggg

SEQ ID NO: 701866 - DNA, 25 bp, Homo sapien
ccgtattcagatgggttcatggctg

SEQ ID NO: 701867 - DNA, 25 bp, Homo sapien
cctggcctagatcattgttatgctt

SEQ ID NO: 701868 - DNA, 25 bp, Homo sapien
gcctggcctagatcattgttatgct

SEQ ID NO: 701869 - DNA, 25 bp, Homo sapien
ggcctagatcattgttatgcttttg

SEQ ID NO: 701870 - DNA, 25 bp, Homo sapien
tagatcattgttatgcttttgcgtc

SEQ ID NO: 701871 - DNA, 25 bp, Homo sapien
tagatcgtggccgatgggccctgtc

SEQ ID NO: 701872 - DNA, 25 bp, Homo sapien
acctggtgtctagatcgtggccgat

SEQ ID NO: 701873 - DNA, 25 bp, Homo sapien
agatcgtggccgatgggccctgtcc

SEQ ID NO: 701874 - DNA, 25 bp, Homo sapien
cacctggtgtctagatcgtggccga

SEQ ID NO: 701875 - DNA, 25 bp, Homo sapien
ggctcttgggtcatggccatgtagc

SEQ ID NO: 701876 - DNA, 25 bp, Homo sapien
cggccccctacagcattgacttcct

SEQ ID NO: 701877 - DNA, 25 bp, Homo sapien
gatcgcggccccctacagcattgac

SEQ ID NO: 701878 - DNA, 25 bp, Homo sapien
tggtgcgatcgcggccccctacagc

SEQ ID NO: 701879 - DNA, 25 bp, Homo sapien
tcgcggccccctacagcattgactt

SEQ ID NO: 701880 - DNA, 25 bp, Homo sapien
tatatctcatttaccgctgcatgcc

SEQ ID NO: 701881 - DNA, 25 bp, Homo sapien
ggcagggactcagtatatctcattt

SEQ ID NO: 701882 - DNA, 25 bp, Homo sapien
caatgatgtatctcggaaggcaggg

SEQ ID NO: 701883 - DNA, 25 bp, Homo sapien
cacaatgggccttcgacaaatgttt

SEQ ID NO: 701884 - DNA, 25 bp, Homo sapien
gcgcctccgccatcttgggccggcg

SEQ ID NO: 701885 - DNA, 25 bp, Homo sapien
gcccccgactccctctttgtagtca

SEQ ID NO: 701886 - DNA, 25 bp, Homo sapien
cagcgcctccgccatcttgggccgg

SEQ ID NO: 701887 - DNA, 25 bp, Homo sapien
gcctccgccatcttgggccggcgtg

SEQ ID NO: 701888 - DNA, 25 bp, Homo sapien
gcgggagggaggggcgggaggctga

SEQ ID NO: 701889 - DNA, 25 bp, Homo sapien
cgggagggaggggcgggaggctgag

SEQ ID NO: 701890 - DNA, 25 bp, Homo sapien
gaggctgaggggagggggcctggcc

SEQ ID NO: 701891 - DNA, 25 bp, Homo sapien
gagggggcctggcctcggcctcggc

SEQ ID NO: 701892 - DNA, 25 bp, Homo sapien
gtccgcgcgcgcggccgccgcacca

SEQ ID NO: 701893 - DNA, 25 bp, Homo sapien
ccgcgcgcgcggccgccgcaccatg

SEQ ID NO: 701894 - DNA, 25 bp, Homo sapien
tccgcgcgcgcggccgccgcaccat

SEQ ID NO: 701895 - DNA, 25 bp, Homo sapien
gccacgggtagacggcgggctcagc

SEQ ID NO: 701896 - DNA, 25 bp, Homo sapien
agcccccacgggcgacttcagtctc

SEQ ID NO: 701897 - DNA, 25 bp, Homo sapien
agcggccacgggtagacggcgggct

SEQ ID NO: 701898 - DNA, 25 bp, Homo sapien
ggcagcggccacgggtagacggcgg

SEQ ID NO: 701899 - DNA, 25 bp, Homo sapien
cggatggtctcgatgatttcatgag

SEQ ID NO: 701900 - DNA, 25 bp, Homo sapien
tcatgagcagcatcgtgatgtttat

SEQ ID NO: 701901 - DNA, 25 bp, Homo sapien
tgatttcatgagcagcatcgtgatg

SEQ ID NO: 701902 - DNA, 25 bp, Homo sapien
tttcatgagcagcatcgtgatgttt

SEQ ID NO: 701903 - DNA, 25 bp, Homo sapien
gggcacagacacaggaggccgtcga

SEQ ID NO: 701904 - DNA, 25 bp, Homo sapien
tcgagggcgcgtgagggtgaaggtc

SEQ ID NO: 701905 - DNA, 25 bp, Homo sapien
tccaagtcacccccagaatgctcct

SEQ ID NO: 701906 - DNA, 25 bp, Homo sapien
caggaggccgtcgagggcgcgtgag

SEQ ID NO: 701907 - DNA, 25 bp, Homo sapien
gacactggccgtatggggactgaat

SEQ ID NO: 701908 - DNA, 25 bp, Homo sapien
cactgtgggaggacgtgcttgggac

SEQ ID NO: 701909 - DNA, 25 bp, Homo sapien
ggtgtttgctgtgtaagaacgtcgt

SEQ ID NO: 701910 - DNA, 25 bp, Homo sapien
gctgtgtaagaacgtcgtcggtgtt

SEQ ID NO: 701911 - DNA, 25 bp, Homo sapien
atcaggacggtaccctccaagaggc

SEQ ID NO: 701912 - DNA, 25 bp, Homo sapien
aggacacgccttccgcttggaaagg

SEQ ID NO: 701913 - DNA, 25 bp, Homo sapien
cttggaaagggcacgggaccagtca

SEQ ID NO: 701914 - DNA, 25 bp, Homo sapien
gacggcattcggtgccatcaggacg

SEQ ID NO: 701915 - DNA, 25 bp, Homo sapien
cagaaacgatcaggaagggtttggt

SEQ ID NO: 701916 - DNA, 25 bp, Homo sapien
ctgaaacacagcagcagaaacgatc

SEQ ID NO: 701917 - DNA, 25 bp, Homo sapien
aaacacagcagcagaaacgatcagg

SEQ ID NO: 701918 - DNA, 25 bp, Homo sapien
gcagcagaaacgatcaggaagggtt

SEQ ID NO: 701919 - DNA, 25 bp, Homo sapien
tagcgagcttgagatccgggatttc

SEQ ID NO: 701920 - DNA, 25 bp, Homo sapien
attaaaacgtaattctccatagcga

SEQ ID NO: 701921 - DNA, 25 bp, Homo sapien
tctccatagcgagcttgagatccgg

SEQ ID NO: 701922 - DNA, 25 bp, Homo sapien
cgtaattctccatagcgagcttgag

SEQ ID NO: 701923 - DNA, 25 bp, Homo sapien
gtttccaattctgtccggcctctga

SEQ ID NO: 701924 - DNA, 25 bp, Homo sapien
taaaaagagcgatcactagcgcggg

SEQ ID NO: 701925 - DNA, 25 bp, Homo sapien
tggccacggccaactctaaaaggaa

SEQ ID NO: 701926 - DNA, 25 bp, Homo sapien
gctaattataggatgcgtcctcctg

SEQ ID NO: 701927 - DNA, 25 bp, Homo sapien
ggcacaggatctcgaggtttactga

SEQ ID NO: 701928 - DNA, 25 bp, Homo sapien
tcacgacagcacagcccttgatgga

SEQ ID NO: 701929 - DNA, 25 bp, Homo sapien
ccggagagccaggtaaagtgcagcc

SEQ ID NO: 701930 - DNA, 25 bp, Homo sapien
cgaaattgctaacgcagccacaggg

SEQ ID NO: 701931 - DNA, 25 bp, Homo sapien
ttccacttctacacgccgccttcaa

SEQ ID NO: 701932 - DNA, 25 bp, Homo sapien
tgacaaccagaccttcccaaaatca

SEQ ID NO: 701933 - DNA, 25 bp, Homo sapien
gggaagagactcttccctggcaggc

SEQ ID NO: 701934 - DNA, 25 bp, Homo sapien
aaaatcacctctgcacgctcctggg

SEQ ID NO: 701935 - DNA, 25 bp, Homo sapien
tcataggaaaaccagtgctccacag

SEQ ID NO: 701936 - DNA, 25 bp, Homo sapien
ggcactgcatgtgccgaggttcaca

SEQ ID NO: 701937 - DNA, 25 bp, Homo sapien
ccccttcctcataggaaaaccagtg

SEQ ID NO: 701938 - DNA, 25 bp, Homo sapien
tccacaggccaagttcatgttttcc

SEQ ID NO: 701939 - DNA, 25 bp, Homo sapien
ggttgtacttgtcgcagagcctctg

SEQ ID NO: 701940 - DNA, 25 bp, Homo sapien
tgctgtcgatggcacggttgtactt

SEQ ID NO: 701941 - DNA, 25 bp, Homo sapien
tcgatggcacggttgtacttgtcgc

SEQ ID NO: 701942 - DNA, 25 bp, Homo sapien
gcagagcctctgcatgctctcgaag

SEQ ID NO: 701943 - DNA, 25 bp, Homo sapien
ggagtccagtggacggccgcgtgtt

SEQ ID NO: 701944 - DNA, 25 bp, Homo sapien
ctgcaggatatggcgcaggagtcca

SEQ ID NO: 701945 - DNA, 25 bp, Homo sapien
tcatgggctgcgtggtgcccttcca

SEQ ID NO: 701946 - DNA, 25 bp, Homo sapien
tggacggccgcgtgttcagcttcat

SEQ ID NO: 701947 - DNA, 25 bp, Homo sapien
gggagaagggctcgtagttgttgag

SEQ ID NO: 701948 - DNA, 25 bp, Homo sapien
cacaaacaggtcgtcgtcggtcatc

SEQ ID NO: 701949 - DNA, 25 bp, Homo sapien
ttgttgagcttctcggggtcggtca

SEQ ID NO: 701950 - DNA, 25 bp, Homo sapien
caagtccacaaacaggtcgtcgtcg

SEQ ID NO: 701951 - DNA, 25 bp, Homo sapien
aagtgcacaggagccgggcatggcg

SEQ ID NO: 701952 - DNA, 25 bp, Homo sapien
gtgcacaggagccgggcatggcggg

SEQ ID NO: 701953 - DNA, 25 bp, Homo sapien
agtgcacaggagccgggcatggcgg

SEQ ID NO: 701954 - DNA, 25 bp, Homo sapien
gctcgcgtgcctgcaggcacaaggt

SEQ ID NO: 701955 - DNA, 25 bp, Homo sapien
acccagtctgtgcaaagtcctcttg

SEQ ID NO: 701956 - DNA, 25 bp, Homo sapien
catgtccatcgaggtccaaggagcc

SEQ ID NO: 701957 - DNA, 25 bp, Homo sapien
cccagggacagcctagacactgtgg

SEQ ID NO: 701958 - DNA, 25 bp, Homo sapien
tccgcatacttggccgggatgtctg

SEQ ID NO: 701959 - DNA, 25 bp, Homo sapien
tctcgacgccatagtgatgtttgca

SEQ ID NO: 701960 - DNA, 25 bp, Homo sapien
tgtctgctttctcgacgccatagtg

SEQ ID NO: 701961 - DNA, 25 bp, Homo sapien
agcagcaacctggagcacgacctgg

SEQ ID NO: 701962 - DNA, 25 bp, Homo sapien
ccacttcctgaactcgcggtccatg

SEQ ID NO: 701963 - DNA, 25 bp, Homo sapien
cacttcctgaactcgcggtccatgg

SEQ ID NO: 701964 - DNA, 25 bp, Homo sapien
acttcctgaactcgcggtccatggt

SEQ ID NO: 701965 - DNA, 25 bp, Homo sapien
gtattctgcatgcttttttccatac

SEQ ID NO: 701966 - DNA, 25 bp, Homo sapien
gtgtattctgcatgcttttttccat

SEQ ID NO: 701967 - DNA, 25 bp, Homo sapien
tgtattctgcatgcttttttccata

SEQ ID NO: 701968 - DNA, 25 bp, Homo sapien
tgtgtattctgcatgcttttttcca

SEQ ID NO: 701969 - DNA, 25 bp, Homo sapien
ctcgtgttggcgattcgctccctcc

SEQ ID NO: 701970 - DNA, 25 bp, Homo sapien
tcgtgttggcgattcgctccctcca

SEQ ID NO: 701971 - DNA, 25 bp, Homo sapien
catgtttgcaaaccgctccttcagc

SEQ ID NO: 701972 - DNA, 25 bp, Homo sapien
ccttcatgtttgcaaaccgctcctt

SEQ ID NO: 701973 - DNA, 25 bp, Homo sapien
ttcatgtttgcaaaccgctccttca

SEQ ID NO: 701974 - DNA, 25 bp, Homo sapien
tccttcatgtttgcaaaccgctcct

SEQ ID NO: 701975 - DNA, 25 bp, Homo sapien
caagtttctactgtttattctgaag

SEQ ID NO: 701976 - DNA, 25 bp, Homo sapien
gtgcaaagggtttcgaggacacgat

SEQ ID NO: 701977 - DNA, 25 bp, Homo sapien
ggtttcgaggacacgattctgccac

SEQ ID NO: 701978 - DNA, 25 bp, Homo sapien
tattctgaagttcagaggtgcaaag

SEQ ID NO: 701979 - DNA, 25 bp, Homo sapien
gacaccgagcccttcaggggcgaga

SEQ ID NO: 701980 - DNA, 25 bp, Homo sapien
accacgcgcatgatggtgccgatgt

SEQ ID NO: 701981 - DNA, 25 bp, Homo sapien
gggcgagagctccaccacgcgcatg

SEQ ID NO: 701982 - DNA, 25 bp, Homo sapien
cgatagtgtgcaggtagtaggagac

SEQ ID NO: 701983 - DNA, 25 bp, Homo sapien
tgagttttgggtttttcagactaga

SEQ ID NO: 701984 - DNA, 25 bp, Homo sapien
tttcagactagaaaaatagttttca

SEQ ID NO: 701985 - DNA, 25 bp, Homo sapien
ctgagttttgggtttttcagactag

SEQ ID NO: 701986 - DNA, 25 bp, Homo sapien
tcagactagaaaaatagttttcaag

SEQ ID NO: 701987 - DNA, 25 bp, Homo sapien
aggagagcaggttgagccacaggaa

SEQ ID NO: 701988 - DNA, 25 bp, Homo sapien
tggaaggagagcaggttgagccaca

SEQ ID NO: 701989 - DNA, 25 bp, Homo sapien
aggaagccccagcgctgcccacggc

SEQ ID NO: 701990 - DNA, 25 bp, Homo sapien
agcaggttgagccacaggaagcccc

SEQ ID NO: 701991 - DNA, 25 bp, Homo sapien
cttagtgggcgtggccgcgttgctc

SEQ ID NO: 701992 - DNA, 25 bp, Homo sapien
cccttagtgggcgtggccgcgttgc

SEQ ID NO: 701993 - DNA, 25 bp, Homo sapien
ggcgtggccgcgttgctcttgctct

SEQ ID NO: 701994 - DNA, 25 bp, Homo sapien
tggccgcgttgctcttgctctcgcg

SEQ ID NO: 701995 - DNA, 25 bp, Homo sapien
ttcacggtggctgctcccgccttct

SEQ ID NO: 701996 - DNA, 25 bp, Homo sapien
agtgttcatcttcttggggcgcccg

SEQ ID NO: 701997 - DNA, 25 bp, Homo sapien
ccgctcggggttcgcagtgttcatc

SEQ ID NO: 701998 - DNA, 25 bp, Homo sapien
ttcttgcgggctttggagggagacg

SEQ ID NO: 701999 - DNA, 25 bp, Homo sapien
gaggccgccgtctgagacacggtct

SEQ ID NO: 702000 - DNA, 25 bp, Homo sapien
aggccgccgtctgagacacggtctg

SEQ ID NO: 702001 - DNA, 25 bp, Homo sapien
acggtctgagcgtgcagggcatcca

SEQ ID NO: 702002 - DNA, 25 bp, Homo sapien
gagacacggtctgagcgtgcagggc

SEQ ID NO: 702003 - DNA, 25 bp, Homo sapien
aacgggctgtgaggggatctgtagg

SEQ ID NO: 702004 - DNA, 25 bp, Homo sapien
gggctgtgaggggatctgtaggcat

SEQ ID NO: 702005 - DNA, 25 bp, Homo sapien
aggtagctggtagaacgggctgtga

SEQ ID NO: 702006 - DNA, 25 bp, Homo sapien
tagctggtagaacgggctgtgaggg

SEQ ID NO: 702007 - DNA, 25 bp, Homo sapien
agaagcttctgcagcgcgggcgggg

SEQ ID NO: 702008 - DNA, 25 bp, Homo sapien
tagaagcttctgcagcgcgggcggg

SEQ ID NO: 702009 - DNA, 25 bp, Homo sapien
caggctggccttgtactggggggtc

SEQ ID NO: 702010 - DNA, 25 bp, Homo sapien
tgcaggtactggatcttgaaggact

SEQ ID NO: 702011 - DNA, 25 bp, Homo sapien
tgtgtatgccaggaactgcaggtac

SEQ ID NO: 702012 - DNA, 25 bp, Homo sapien
cttgtactggggggtctttgtgtat

SEQ ID NO: 702013 - DNA, 25 bp, Homo sapien
cacccaggagctgggcgttcttctc

SEQ ID NO: 702014 - DNA, 25 bp, Homo sapien
tccttctgggcctggcagtggctga

SEQ ID NO: 702015 - DNA, 25 bp, Homo sapien
ctgaggagctgctgagccgcaccca

SEQ ID NO: 702016 - DNA, 25 bp, Homo sapien
tcatccaatttttgctgaaacagcc

SEQ ID NO: 702017 - DNA, 25 bp, Homo sapien
cggagcgcgcggttgtcctgctcca

SEQ ID NO: 702018 - DNA, 25 bp, Homo sapien
cccgcagctgctggttatgggcgga

SEQ ID NO: 702019 - DNA, 25 bp, Homo sapien
tgcgcttgaatcaggtcgttgtagg

SEQ ID NO: 702020 - DNA, 25 bp, Homo sapien
gagatctccttctgcgcttgaatca

SEQ ID NO: 702021 - DNA, 25 bp, Homo sapien
cctgccagagtgtggctccatgaca

SEQ ID NO: 702022 - DNA, 25 bp, Homo sapien
ccagggccgctgagaaaccatccag

SEQ ID NO: 702023 - DNA, 25 bp, Homo sapien
ctcgagcctgccagagtgtggctcc

SEQ ID NO: 702024 - DNA, 25 bp, Homo sapien
cgctgagaaaccatccagccgaggg

SEQ ID NO: 702025 - DNA, 25 bp, Homo sapien
gcagctcctcgcagcgagccttgag

SEQ ID NO: 702026 - DNA, 25 bp, Homo sapien
agcttctccagcgacagcgtggccc

SEQ ID NO: 702027 - DNA, 25 bp, Homo sapien
acagcttctccagcgacagcgtggc

SEQ ID NO: 702028 - DNA, 25 bp, Homo sapien
ttctccagcgacagcgtggcccagt

SEQ ID NO: 702029 - DNA, 25 bp, Homo sapien
tcaacgacgtcacagggaggctgat

SEQ ID NO: 702030 - DNA, 25 bp, Homo sapien
gacaccacggagtgcagcctcgcgc

SEQ ID NO: 702031 - DNA, 25 bp, Homo sapien
gctgatgggagaggctcggacacca

SEQ ID NO: 702032 - DNA, 25 bp, Homo sapien
cctaggctgctgcaaccgcaaccac

SEQ ID NO: 702033 - DNA, 25 bp, Homo sapien
cacgtgagtggtgcttcccgacgtc

SEQ ID NO: 702034 - DNA, 25 bp, Homo sapien
caacggtttggtgcagtcatttgaa

SEQ ID NO: 702035 - DNA, 25 bp, Homo sapien
taatgtacgctggtgaggctcgcct

SEQ ID NO: 702036 - DNA, 25 bp, Homo sapien
gaacccaaatatgctcttcccgagg

SEQ ID NO: 702037 - DNA, 25 bp, Homo sapien
gaccactccagggaaccaagactgc

SEQ ID NO: 702038 - DNA, 25 bp, Homo sapien
gagagatggtgtcaggcccgcccca

SEQ ID NO: 702039 - DNA, 25 bp, Homo sapien
agagatggtgtcaggcccgccccac

SEQ ID NO: 702040 - DNA, 25 bp, Homo sapien
ctgccacagatggacacccggaggg

SEQ ID NO: 702041 - DNA, 25 bp, Homo sapien
tctgcttcgacgaaggccggctcag

SEQ ID NO: 702042 - DNA, 25 bp, Homo sapien
gcagcctggccgttcatggagagct

SEQ ID NO: 702043 - DNA, 25 bp, Homo sapien
tccgggctcatgctgctcaagtgag

SEQ ID NO: 702044 - DNA, 25 bp, Homo sapien
aggcagcgagaacttggtgcagtcc

SEQ ID NO: 702045 - DNA, 25 bp, Homo sapien
ggaaggccgttctccttggtgtgct

SEQ ID NO: 702046 - DNA, 25 bp, Homo sapien
gccgttctccttggtgtgctcagct

SEQ ID NO: 702047 - DNA, 25 bp, Homo sapien
ctctggtagggaaggccgttctcct

SEQ ID NO: 702048 - DNA, 25 bp, Homo sapien
gctctggtagggaaggccgttctcc

SEQ ID NO: 702049 - DNA, 25 bp, Homo sapien
gctgaccgggagcttgttgggctgc

SEQ ID NO: 702050 - DNA, 25 bp, Homo sapien
gctgccgtaggcgcgctctctcagg

SEQ ID NO: 702051 - DNA, 25 bp, Homo sapien
cccgctgctgccgtaggcgcgctct

SEQ ID NO: 702052 - DNA, 25 bp, Homo sapien
gggaatgctgaccgggagcttgttg

SEQ ID NO: 702053 - DNA, 25 bp, Homo sapien
cagaacccagctggaaacagtgagt

SEQ ID NO: 702054 - DNA, 25 bp, Homo sapien
gagagtgcgcggtgcctgcgtgtga

SEQ ID NO: 702055 - DNA, 25 bp, Homo sapien
aggcgagtggcgcagcgagagtgcg

SEQ ID NO: 702056 - DNA, 25 bp, Homo sapien
caccgtccagtaccgcgtgggaaga

SEQ ID NO: 702057 - DNA, 25 bp, Homo sapien
ttttcaagtgtggacgaggggtcac

SEQ ID NO: 702058 - DNA, 25 bp, Homo sapien
tgggcattagcaccaatctgctttt

SEQ ID NO: 702059 - DNA, 25 bp, Homo sapien
caccaatctgcttttcaagtgtgga

SEQ ID NO: 702060 - DNA, 25 bp, Homo sapien
ttagcaccaatctgcttttcaagtg

SEQ ID NO: 702061 - DNA, 25 bp, Homo sapien
gaaagccttgctgtgggagcaccac

SEQ ID NO: 702062 - DNA, 25 bp, Homo sapien
tgaattaatacacccaagcaggagg

SEQ ID NO: 702063 - DNA, 25 bp, Homo sapien
gcatcataccgcatctcaacctggg

SEQ ID NO: 702064 - DNA, 25 bp, Homo sapien
tcaaggaaccagaaaccatgccgct

SEQ ID NO: 702065 - DNA, 25 bp, Homo sapien
tggtgaacacaatcctcctcttggc

SEQ ID NO: 702066 - DNA, 25 bp, Homo sapien
tggccaccgagccagcgtaggagaa

SEQ ID NO: 702067 - DNA, 25 bp, Homo sapien
gaatcggagggcaggtctcccttgc

SEQ ID NO: 702068 - DNA, 25 bp, Homo sapien
gctggaggactcatccaaggtggcc

SEQ ID NO: 702069 - DNA, 25 bp, Homo sapien
cagccctgccggtccccatccttac

SEQ ID NO: 702070 - DNA, 25 bp, Homo sapien
ctctggtctttctttcacaggccgc

SEQ ID NO: 702071 - DNA, 25 bp, Homo sapien
tggtctttctttcacaggccgcgct

SEQ ID NO: 702072 - DNA, 25 bp, Homo sapien
tctttctttcacaggccgcgctccc

SEQ ID NO: 702073 - DNA, 25 bp, Homo sapien
ctggtcgtggtcctggtagggcaca

SEQ ID NO: 702074 - DNA, 25 bp, Homo sapien
gcctggctcctcgtctgaggtgagt

SEQ ID NO: 702075 - DNA, 25 bp, Homo sapien
tagtgtgccccattggtctggctca

SEQ ID NO: 702076 - DNA, 25 bp, Homo sapien
gacgagatggctgtaatctccaggg

SEQ ID NO: 702077 - DNA, 25 bp, Homo sapien
ctcctgcccctgctgccaggccccg

SEQ ID NO: 702078 - DNA, 25 bp, Homo sapien
tgctgccaggccccgcccccctccg

SEQ ID NO: 702079 - DNA, 25 bp, Homo sapien
ccctgctgccaggccccgcccccct

SEQ ID NO: 702080 - DNA, 25 bp, Homo sapien
tcctgcccctgctgccaggccccgc

SEQ ID NO: 702081 - DNA, 25 bp, Homo sapien
gggagatttgctttctaaggagatt

SEQ ID NO: 702082 - DNA, 25 bp, Homo sapien
atttgctttctaaggagattgttgc

SEQ ID NO: 702083 - DNA, 25 bp, Homo sapien
tctaaggagattgttgcaatttttc

SEQ ID NO: 702084 - DNA, 25 bp, Homo sapien
tcgggggagatttgctttctaagga

SEQ ID NO: 702085 - DNA, 25 bp, Homo sapien
ttgctgctattgactggctcgccgg

SEQ ID NO: 702086 - DNA, 25 bp, Homo sapien
gaaaagctgcccatggcgtgcgagt

SEQ ID NO: 702087 - DNA, 25 bp, Homo sapien
gctgtgtaaactcaggtccgcggcc

SEQ ID NO: 702088 - DNA, 25 bp, Homo sapien
gagaagcaccatcactgaagctgtg

SEQ ID NO: 702089 - DNA, 25 bp, Homo sapien
cacgggagaaagtaatgctctggtg

SEQ ID NO: 702090 - DNA, 25 bp, Homo sapien
tgacctccacgggagaaagtaatgc

SEQ ID NO: 702091 - DNA, 25 bp, Homo sapien
tctggtggccctgcgcacggtggcc

SEQ ID NO: 702092 - DNA, 25 bp, Homo sapien
cctccacgggagaaagtaatgctct

SEQ ID NO: 702093 - DNA, 25 bp, Homo sapien
cagtgtggcgctgccacatgcagcc

SEQ ID NO: 702094 - DNA, 25 bp, Homo sapien
gacacgggctccaaacggatgagca

SEQ ID NO: 702095 - DNA, 25 bp, Homo sapien
gagggcaccgcgtggttaaagacac

SEQ ID NO: 702096 - DNA, 25 bp, Homo sapien
agcagaggcggagggcaccgcgtgg

SEQ ID NO: 702097 - DNA, 25 bp, Homo sapien
ctcagggttagaggccagcagcgtt

SEQ ID NO: 702098 - DNA, 25 bp, Homo sapien
ggaggaggcaaggcggcgttaggtg

SEQ ID NO: 702099 - DNA, 25 bp, Homo sapien
ggctcagggttagaggccagcagcg

SEQ ID NO: 702100 - DNA, 25 bp, Homo sapien
aggcaaggcggcgttaggtggaggg

SEQ ID NO: 702101 - DNA, 25 bp, Homo sapien
cttggttaggcgggagggacgcgag

SEQ ID NO: 702102 - DNA, 25 bp, Homo sapien
tggttaggcgggagggacgcgaggc

SEQ ID NO: 702103 - DNA, 25 bp, Homo sapien
aagaggcgttagcaggcggcagaga

SEQ ID NO: 702104 - DNA, 25 bp, Homo sapien
agaggcgttagcaggcggcagagag

SEQ ID NO: 702105 - DNA, 25 bp, Homo sapien
caaagaggcgttagcaggcggcaga

SEQ ID NO: 702106 - DNA, 25 bp, Homo sapien
aaagaggcgttagcaggcggcagag

SEQ ID NO: 702107 - DNA, 25 bp, Homo sapien
gcgggcgcccttgtgcgggagggag

SEQ ID NO: 702108 - DNA, 25 bp, Homo sapien
ggctggtggtgcaccgtgaaggagg

SEQ ID NO: 702109 - DNA, 25 bp, Homo sapien
gctggtggtgcaccgtgaaggaggg

SEQ ID NO: 702110 - DNA, 25 bp, Homo sapien
gaggggcgggcgcccttgtgcggga

SEQ ID NO: 702111 - DNA, 25 bp, Homo sapien
ccccgaaaggtgcgcggcataggga

SEQ ID NO: 702112 - DNA, 25 bp, Homo sapien
tagggaggcggcatgccgagggaca

SEQ ID NO: 702113 - DNA, 25 bp, Homo sapien
ccgaaaggtgcgcggcatagggagg

SEQ ID NO: 702114 - DNA, 25 bp, Homo sapien
atagggaggcggcatgccgagggac

SEQ ID NO: 702115 - DNA, 25 bp, Homo sapien
ttacacaatacgcactgctagctaa

SEQ ID NO: 702116 - DNA, 25 bp, Homo sapien
cacaatacgcactgctagctaagca

SEQ ID NO: 702117 - DNA, 25 bp, Homo sapien
tacgcactgctagctaagcaaggtc

SEQ ID NO: 702118 - DNA, 25 bp, Homo sapien
aatacgcactgctagctaagcaagg

SEQ ID NO: 702119 - DNA, 25 bp, Homo sapien
caaaggtgggcaccgtctacactaa

SEQ ID NO: 702120 - DNA, 25 bp, Homo sapien
caagcagagggcacctttgcactac

SEQ ID NO: 702121 - DNA, 25 bp, Homo sapien
ctaaccacaacagacgacgggcgtg

SEQ ID NO: 702122 - DNA, 25 bp, Homo sapien
gaagagcggcctgaggttaccatcg

SEQ ID NO: 702123 - DNA, 25 bp, Homo sapien
cgttgtcagcgtctagtcagcacca

SEQ ID NO: 702124 - DNA, 25 bp, Homo sapien
cgtgtgtccatcctgcccttgggaa

SEQ ID NO: 702125 - DNA, 25 bp, Homo sapien
tcttgttctagaccagggactcggc

SEQ ID NO: 702126 - DNA, 25 bp, Homo sapien
taagaggacaggtccggagcaccat

SEQ ID NO: 702127 - DNA, 25 bp, Homo sapien
gacccagtgggctcaaggagacttc

SEQ ID NO: 702128 - DNA, 25 bp, Homo sapien
ccatctgcaggacccgtgatggcac

SEQ ID NO: 702129 - DNA, 25 bp, Homo sapien
tggtgacacgcatatgacccagtgg

SEQ ID NO: 702130 - DNA, 25 bp, Homo sapien
gctctgagacccagtgcgtgtcctg

SEQ ID NO: 702131 - DNA, 25 bp, Homo sapien
gagggtgtccgcaggcagccaccac

SEQ ID NO: 702132 - DNA, 25 bp, Homo sapien
ctgcccacggaaactcaggccaggt

SEQ ID NO: 702133 - DNA, 25 bp, Homo sapien
tcctatcaattcctgagcaagagcc

SEQ ID NO: 702134 - DNA, 25 bp, Homo sapien
ataagtcactgtgcgtgcctcatgg

SEQ ID NO: 702135 - DNA, 25 bp, Homo sapien
agttcacccggaagacacggcagag

SEQ ID NO: 702136 - DNA, 25 bp, Homo sapien
tgcgcgcaatccaaatacagttcac

SEQ ID NO: 702137 - DNA, 25 bp, Homo sapien
gagcctcccacgttacaaaggctga

SEQ ID NO: 702138 - DNA, 25 bp, Homo sapien
ctgtttattacagcgtctagaggtg

SEQ ID NO: 702139 - DNA, 25 bp, Homo sapien
ccctgagacatttttggcgccggcc

SEQ ID NO: 702140 - DNA, 25 bp, Homo sapien
ccatgcggtacaacgagaaggagct

SEQ ID NO: 702141 - DNA, 25 bp, Homo sapien
tggttatgtaacaacggtccgtctc

SEQ ID NO: 702142 - DNA, 25 bp, Homo sapien
acccgggagaccgagacagtgccag

SEQ ID NO: 702143 - DNA, 25 bp, Homo sapien
tccacgacttcgtttggcgaacggc

SEQ ID NO: 702144 - DNA, 25 bp, Homo sapien
ccaactttcgcgagggagcggctga

SEQ ID NO: 702145 - DNA, 25 bp, Homo sapien
ggctgacactctccgggcgacgtta

SEQ ID NO: 702146 - DNA, 25 bp, Homo sapien
tgaaagcgcggcctggaaggcaaac

SEQ ID NO: 702147 - DNA, 25 bp, Homo sapien
gccctcaaccgcctctactcctcac

SEQ ID NO: 702148 - DNA, 25 bp, Homo sapien
ggccgccgccctcaaccgcctctac

SEQ ID NO: 702149 - DNA, 25 bp, Homo sapien
cgccgccctcaaccgcctctactcc

SEQ ID NO: 702150 - DNA, 25 bp, Homo sapien
cgccctcaaccgcctctactcctca

SEQ ID NO: 702151 - DNA, 25 bp, Homo sapien
ccgcgcgcggcctcccaacaggagt

SEQ ID NO: 702152 - DNA, 25 bp, Homo sapien
ggcctcaggatgcacaaggccggac

SEQ ID NO: 702153 - DNA, 25 bp, Homo sapien
gaaatagagttcctggcgggcccga

SEQ ID NO: 702154 - DNA, 25 bp, Homo sapien
gagtttggaaatagagttcctggcg

SEQ ID NO: 702155 - DNA, 25 bp, Homo sapien
tgtttggtgtcgtccaaggatacac

SEQ ID NO: 702156 - DNA, 25 bp, Homo sapien
ggtgtcgtccaaggatacacaagaa

SEQ ID NO: 702157 - DNA, 25 bp, Homo sapien
tacacaagaacaacggtcacagcgg

SEQ ID NO: 702158 - DNA, 25 bp, Homo sapien
gctccgcctggctgtttggtgtcgt

SEQ ID NO: 702159 - DNA, 25 bp, Homo sapien
aggggacagcctggccaacctggta

SEQ ID NO: 702160 - DNA, 25 bp, Homo sapien
tcaggggacagcctggccaacctgg

SEQ ID NO: 702161 - DNA, 25 bp, Homo sapien
gggacagcctggccaacctggtaaa

SEQ ID NO: 702162 - DNA, 25 bp, Homo sapien
atcaggggacagcctggccaacctg

SEQ ID NO: 702163 - DNA, 25 bp, Homo sapien
tgtcgcccaggcagtagctcgatct

SEQ ID NO: 702164 - DNA, 25 bp, Homo sapien
cacgcccggcctacaaatacagatt

SEQ ID NO: 702165 - DNA, 25 bp, Homo sapien
actcgttttcagacaatcaaggact

SEQ ID NO: 702166 - DNA, 25 bp, Homo sapien
aaataaactcgttttcagacaatca

SEQ ID NO: 702167 - DNA, 25 bp, Homo sapien
tggccttagggctttagcagactgg

SEQ ID NO: 702168 - DNA, 25 bp, Homo sapien
agggctttagcagactgggagacac

SEQ ID NO: 702169 - DNA, 25 bp, Homo sapien
ggtgatggccttagggctttagcag

SEQ ID NO: 702170 - DNA, 25 bp, Homo sapien
gccttagggctttagcagactggga

SEQ ID NO: 702171 - DNA, 25 bp, Homo sapien
tccctgcggtcacggttgctctcgg

SEQ ID NO: 702172 - DNA, 25 bp, Homo sapien
gttgatgtcgatggtctccagggcc

SEQ ID NO: 702173 - DNA, 25 bp, Homo sapien
ggcgctccctgcggtcacggttgct

SEQ ID NO: 702174 - DNA, 25 bp, Homo sapien
tgccggaggcgctccctgcggtcac

SEQ ID NO: 702175 - DNA, 25 bp, Homo sapien
cattgttgtgaagtgtcaggcagag

SEQ ID NO: 702176 - DNA, 25 bp, Homo sapien
ctcattgttgtgaagtgtcaggcag

SEQ ID NO: 702177 - DNA, 25 bp, Homo sapien
agagtttgcattcataggagcccag

SEQ ID NO: 702178 - DNA, 25 bp, Homo sapien
gtttgcattcataggagcccaggtg

SEQ ID NO: 702179 - DNA, 25 bp, Homo sapien
aaggaaacacgcatgactcgaggcc

SEQ ID NO: 702180 - DNA, 25 bp, Homo sapien
gtggaaaggaaacacgcatgactcg

SEQ ID NO: 702181 - DNA, 25 bp, Homo sapien
aaacacgcatgactcgaggccgggc

SEQ ID NO: 702182 - DNA, 25 bp, Homo sapien
gaggccgggcggacagacacaggca

SEQ ID NO: 702183 - DNA, 25 bp, Homo sapien
gcttcttcccctgcgtatgtgccag

SEQ ID NO: 702184 - DNA, 25 bp, Homo sapien
tcttcccctgcgtatgtgccaggta

SEQ ID NO: 702185 - DNA, 25 bp, Homo sapien
ccctgcgtatgtgccaggtagctcc

SEQ ID NO: 702186 - DNA, 25 bp, Homo sapien
tcccctgcgtatgtgccaggtagct

SEQ ID NO: 702187 - DNA, 25 bp, Homo sapien
gctgtggagcagtggcccgcgaggc

SEQ ID NO: 702188 - DNA, 25 bp, Homo sapien
tactcaagcgcccagggaggctcag

SEQ ID NO: 702189 - DNA, 25 bp, Homo sapien
tcacagagacttgagccaacggctg

SEQ ID NO: 702190 - DNA, 25 bp, Homo sapien
tctaatgctccccaggaaccgtact

SEQ ID NO: 702191 - DNA, 25 bp, Homo sapien
tagcccgggcggccgatcttcacaa

SEQ ID NO: 702192 - DNA, 25 bp, Homo sapien
agcccgggcggccgatcttcacaaa

SEQ ID NO: 702193 - DNA, 25 bp, Homo sapien
cgggcggccgatcttcacaaacttc

SEQ ID NO: 702194 - DNA, 25 bp, Homo sapien
cccgggcggccgatcttcacaaact

SEQ ID NO: 702195 - DNA, 25 bp, Homo sapien
agctctcaggtcccggctgcttgtc

SEQ ID NO: 702196 - DNA, 25 bp, Homo sapien
cacagaaagctctcaggtcccggct

SEQ ID NO: 702197 - DNA, 25 bp, Homo sapien
cttgtcctctccgaagctgaggaac

SEQ ID NO: 702198 - DNA, 25 bp, Homo sapien
ctgcttgtcctctccgaagctgagg

SEQ ID NO: 702199 - DNA, 25 bp, Homo sapien
gctctgctggcccatctccgagtct

SEQ ID NO: 702200 - DNA, 25 bp, Homo sapien
ctgctggcccatctccgagtctctc

SEQ ID NO: 702201 - DNA, 25 bp, Homo sapien
tgctggcccatctccgagtctctct

SEQ ID NO: 702202 - DNA, 25 bp, Homo sapien
tctgctggcccatctccgagtctct

SEQ ID NO: 702203 - DNA, 25 bp, Homo sapien
cccccacgcccaagtccctgatctc

SEQ ID NO: 702204 - DNA, 25 bp, Homo sapien
tggcagagccgcctcttgggtgcct

SEQ ID NO: 702205 - DNA, 25 bp, Homo sapien
gccgggtggcagagccgcctcttgg

SEQ ID NO: 702206 - DNA, 25 bp, Homo sapien
ggtggcagagccgcctcttgggtgc

SEQ ID NO: 702207 - DNA, 25 bp, Homo sapien
cggtccggaggctcgatcctctgct

SEQ ID NO: 702208 - DNA, 25 bp, Homo sapien
tgctcgtacgcagacatgaagcggt

SEQ ID NO: 702209 - DNA, 25 bp, Homo sapien
atgagcaggtactgccagcgccggt

SEQ ID NO: 702210 - DNA, 25 bp, Homo sapien
aagcggtgacgtggcatgatgccct

SEQ ID NO: 702211 - DNA, 25 bp, Homo sapien
cttggtctcccggttccagtgtgtc

SEQ ID NO: 702212 - DNA, 25 bp, Homo sapien
agtgtgtccagaacttgccctccgc

SEQ ID NO: 702213 - DNA, 25 bp, Homo sapien
cagaacttgccctccgccttgtcga

SEQ ID NO: 702214 - DNA, 25 bp, Homo sapien
gccttgtcgatctctctgctcggca

SEQ ID NO: 702215 - DNA, 25 bp, Homo sapien
agcggtggccgagggggcagaccgt

SEQ ID NO: 702216 - DNA, 25 bp, Homo sapien
tggccgagggggcagaccgttcatc

SEQ ID NO: 702217 - DNA, 25 bp, Homo sapien
cgagggggcagaccgttcatcagcg

SEQ ID NO: 702218 - DNA, 25 bp, Homo sapien
caaagactcaggcagcggtggccga

SEQ ID NO: 702219 - DNA, 25 bp, Homo sapien
tggtcccgggggccctgagggcgca

SEQ ID NO: 702220 - DNA, 25 bp, Homo sapien
tggacccctggagctggcgggggta

SEQ ID NO: 702221 - DNA, 25 bp, Homo sapien
cctggagctggcgggggtagctggg

SEQ ID NO: 702222 - DNA, 25 bp, Homo sapien
tcccgggggccctgagggcgcaggc

SEQ ID NO: 702223 - DNA, 25 bp, Homo sapien
ggaccccagatgcagggggatgcac

SEQ ID NO: 702224 - DNA, 25 bp, Homo sapien
tggaccccagaggttggtgggtgga

SEQ ID NO: 702225 - DNA, 25 bp, Homo sapien
cctgagggtgaacggcgggggctgc

SEQ ID NO: 702226 - DNA, 25 bp, Homo sapien
caggagccgacggatggaccccggg

SEQ ID NO: 702227 - DNA, 25 bp, Homo sapien
gaggtatgttccctgggccttcgga

SEQ ID NO: 702228 - DNA, 25 bp, Homo sapien
ccaggatttgaggggtgaactcccg

SEQ ID NO: 702229 - DNA, 25 bp, Homo sapien
tgggaaaaggcaagagcacctggcg

SEQ ID NO: 702230 - DNA, 25 bp, Homo sapien
ttaatgagcggggggcagtacaaaa

SEQ ID NO: 702231 - DNA, 25 bp, Homo sapien
ggaggctgtttaatgagcggggggc

SEQ ID NO: 702232 - DNA, 25 bp, Homo sapien
tttaatgagcggggggcagtacaaa

SEQ ID NO: 702233 - DNA, 25 bp, Homo sapien
ggctgtttaatgagcggggggcagt

SEQ ID NO: 702234 - DNA, 25 bp, Homo sapien
tgtgcctggcactcccacacacact

SEQ ID NO: 702235 - DNA, 25 bp, Homo sapien
aggaccccagatcccctcctagctg

SEQ ID NO: 702236 - DNA, 25 bp, Homo sapien
tccaaggtacagccatctctcaggc

SEQ ID NO: 702237 - DNA, 25 bp, Homo sapien
cccagtcggcccaaactgggggatg

SEQ ID NO: 702238 - DNA, 25 bp, Homo sapien
ggcaaccaaactagacagcgctggg

SEQ ID NO: 702239 - DNA, 25 bp, Homo sapien
tgtttgtgcaggacagacccctatc

SEQ ID NO: 702240 - DNA, 25 bp, Homo sapien
tgatgtgtcaacatgccgtccttga

SEQ ID NO: 702241 - DNA, 25 bp, Homo sapien
ctgccttaagtgagccgagtggaag

SEQ ID NO: 702242 - DNA, 25 bp, Homo sapien
gtgggtgctgccaggggctgggctg

SEQ ID NO: 702243 - DNA, 25 bp, Homo sapien
cgtgggtgctgccaggggctgggct

SEQ ID NO: 702244 - DNA, 25 bp, Homo sapien
tgggtgctgccaggggctgggctgc

SEQ ID NO: 702245 - DNA, 25 bp, Homo sapien
ccagggcagacagcactagggccag

SEQ ID NO: 702246 - DNA, 25 bp, Homo sapien
tgctctgagggcctcagtccccagc

SEQ ID NO: 702247 - DNA, 25 bp, Homo sapien
ctggtgcccacagctggctcctctg

SEQ ID NO: 702248 - DNA, 25 bp, Homo sapien
gcccccagggcagacagcactaggg

SEQ ID NO: 702249 - DNA, 25 bp, Homo sapien
tgcctgtcaccggtgttgcagaccc

SEQ ID NO: 702250 - DNA, 25 bp, Homo sapien
ttcctccaggtgtaggaccaccagg

SEQ ID NO: 702251 - DNA, 25 bp, Homo sapien
gaaggcctgctcataggcgcttaga

SEQ ID NO: 702252 - DNA, 25 bp, Homo sapien
tgcagaccccgaaggtggccaggtc

SEQ ID NO: 702253 - DNA, 25 bp, Homo sapien
ggacgcctgagccattgaaggccac

SEQ ID NO: 702254 - DNA, 25 bp, Homo sapien
cacctgaaggaagacggcggtgcca

SEQ ID NO: 702255 - DNA, 25 bp, Homo sapien
cagtcctaggaacaagaccacagcc

SEQ ID NO: 702256 - DNA, 25 bp, Homo sapien
tccccgcagggagtatcttaggcca

SEQ ID NO: 702257 - DNA, 25 bp, Homo sapien
ggaacctcagcgagggtgttggctc

SEQ ID NO: 702258 - DNA, 25 bp, Homo sapien
gaacctcagcgagggtgttggctcc

SEQ ID NO: 702259 - DNA, 25 bp, Homo sapien
tggaacctcagcgagggtgttggct

SEQ ID NO: 702260 - DNA, 25 bp, Homo sapien
gcagcccagccctcgtcacagtgac

SEQ ID NO: 702261 - DNA, 25 bp, Homo sapien
cggcagcccagccctcgtcacagtg

SEQ ID NO: 702262 - DNA, 25 bp, Homo sapien
cccggcagcccagccctcgtcacag

SEQ ID NO: 702263 - DNA, 25 bp, Homo sapien
acccggcagcccagccctcgtcaca

SEQ ID NO: 702264 - DNA, 25 bp, Homo sapien
actgccccatgcaactccctggtac

SEQ ID NO: 702265 - DNA, 25 bp, Homo sapien
gctgttctcagtactgcagaccctg

SEQ ID NO: 702266 - DNA, 25 bp, Homo sapien
ggctcagcccggctggatggaggct

SEQ ID NO: 702267 - DNA, 25 bp, Homo sapien
catcgccactggttctacgctgttc

SEQ ID NO: 702268 - DNA, 25 bp, Homo sapien
cccgcagggcggtccaccgctaaca

SEQ ID NO: 702269 - DNA, 25 bp, Homo sapien
ggcggtccaccgctaacaccaggta

SEQ ID NO: 702270 - DNA, 25 bp, Homo sapien
taacaccaggtagcgggtgtctcgg

SEQ ID NO: 702271 - DNA, 25 bp, Homo sapien
tccaccgctaacaccaggtagcggg

SEQ ID NO: 702272 - DNA, 25 bp, Homo sapien
cgtcgccgaacagcagtgcctgcag

SEQ ID NO: 702273 - DNA, 25 bp, Homo sapien
cacggtgtccagctggccgtgcgca

SEQ ID NO: 702274 - DNA, 25 bp, Homo sapien
ccggggtcatccgtgtgaagcagcg

SEQ ID NO: 702275 - DNA, 25 bp, Homo sapien
cggcgggaagggcacggtgtccagc

SEQ ID NO: 702276 - DNA, 25 bp, Homo sapien
aagggcacggtgtccagctggccgt

SEQ ID NO: 702277 - DNA, 25 bp, Homo sapien
gtggcgactcctcgagttccgcgga

SEQ ID NO: 702278 - DNA, 25 bp, Homo sapien
gctgggtggcgactcctcgagttcc

SEQ ID NO: 702279 - DNA, 25 bp, Homo sapien
cgactcctcgagttccgcggatggc

SEQ ID NO: 702280 - DNA, 25 bp, Homo sapien
tctgcgctgggtggcgactcctcga

SEQ ID NO: 702281 - DNA, 25 bp, Homo sapien
tgcgggaagccggccagcgcgtccg

SEQ ID NO: 702282 - DNA, 25 bp, Homo sapien
ggaagccggccagcgcgtccggatc

SEQ ID NO: 702283 - DNA, 25 bp, Homo sapien
ccagcgcgtccggatccagggccag

SEQ ID NO: 702284 - DNA, 25 bp, Homo sapien
cagcgcgtccggatccagggccagg

SEQ ID NO: 702285 - DNA, 25 bp, Homo sapien
tcgccgtcgagtaggcgctccagcg

SEQ ID NO: 702286 - DNA, 25 bp, Homo sapien
gcagacccgggaggcttcgcagctc

SEQ ID NO: 702287 - DNA, 25 bp, Homo sapien
aggatccccggtggtggccgcagtg

SEQ ID NO: 702288 - DNA, 25 bp, Homo sapien
gcagccgccgcttgcagttcagcag

SEQ ID NO: 702289 - DNA, 25 bp, Homo sapien
gcgctcgcaggggatcgccgaggcc

SEQ ID NO: 702290 - DNA, 25 bp, Homo sapien
agcgctcgcaggggatcgccgaggc

SEQ ID NO: 702291 - DNA, 25 bp, Homo sapien
cgcaggggatcgccgaggccgccgg

SEQ ID NO: 702292 - DNA, 25 bp, Homo sapien
gctcgcaggggatcgccgaggccgc

SEQ ID NO: 702293 - DNA, 25 bp, Homo sapien
ctgcgctgtgcccgacccggcccgc

SEQ ID NO: 702294 - DNA, 25 bp, Homo sapien
ctacgctgagctcgcgcagcgcgca

SEQ ID NO: 702295 - DNA, 25 bp, Homo sapien
ctgagctcgcgcagcgcgcacggcc

SEQ ID NO: 702296 - DNA, 25 bp, Homo sapien
gcgcagcgcgcacggcccgtcggcg

SEQ ID NO: 702297 - DNA, 25 bp, Homo sapien
gcgcacggcccgtcggcggcggtgg

SEQ ID NO: 702298 - DNA, 25 bp, Homo sapien
gcagcagcaccacgtggttgccgta

SEQ ID NO: 702299 - DNA, 25 bp, Homo sapien
acgtggtgcgcgctgatgcgctcct

SEQ ID NO: 702300 - DNA, 25 bp, Homo sapien
gctcctccgacaggctgatgagcag

SEQ ID NO: 702301 - DNA, 25 bp, Homo sapien
tgatgagcagcttgcccgcgtaggc

SEQ ID NO: 702302 - DNA, 25 bp, Homo sapien
gcgatgcttggggtccgaataaata

SEQ ID NO: 702303 - DNA, 25 bp, Homo sapien
gttgcttgctggtctttattggggc

SEQ ID NO: 702304 - DNA, 25 bp, Homo sapien
ctggtctttattggggcgatgcttg

SEQ ID NO: 702305 - DNA, 25 bp, Homo sapien
tccgaataaatatgggaaggggcgc

SEQ ID NO: 702306 - DNA, 25 bp, Homo sapien
ggccgtgcgcgaggagagacggcaa

SEQ ID NO: 702307 - DNA, 25 bp, Homo sapien
aaagacggtggtggggcgcttcagg

SEQ ID NO: 702308 - DNA, 25 bp, Homo sapien
ctacagggcggacccgggccgtgcg

SEQ ID NO: 702309 - DNA, 25 bp, Homo sapien
gagagacagcgagcgctacagggcg

SEQ ID NO: 702310 - DNA, 25 bp, Homo sapien
ctggcctccaactgaccatttgtaa

SEQ ID NO: 702311 - DNA, 25 bp, Homo sapien
gcaccgtgcagcctgcaataagctc

SEQ ID NO: 702312 - DNA, 25 bp, Homo sapien
accatttgtaatgtgcaccgtgcag

SEQ ID NO: 702313 - DNA, 25 bp, Homo sapien
ccatttgtaatgtgcaccgtgcagc

SEQ ID NO: 702314 - DNA, 25 bp, Homo sapien
ctccgcctcctggggaaccgaccat

SEQ ID NO: 702315 - DNA, 25 bp, Homo sapien
gagacgcagcggaggttttcctggt

SEQ ID NO: 702316 - DNA, 25 bp, Homo sapien
aggcgccattttgcgaacggcgagc

SEQ ID NO: 702317 - DNA, 25 bp, Homo sapien
cgccattttgcgaacggcgagcagc

SEQ ID NO: 702318 - DNA, 25 bp, Homo sapien
gcgccattttgcgaacggcgagcag

SEQ ID NO: 702319 - DNA, 25 bp, Homo sapien
gccattttgcgaacggcgagcagcg

SEQ ID NO: 702320 - DNA, 25 bp, Homo sapien
ccattttgcgaacggcgagcagcgg

SEQ ID NO: 702321 - DNA, 25 bp, Homo sapien
gctgctcgccgttcgcaaaatggcg

SEQ ID NO: 702322 - DNA, 25 bp, Homo sapien
gctcgccgttcgcaaaatggcgcct

SEQ ID NO: 702323 - DNA, 25 bp, Homo sapien
cgctgctcgccgttcgcaaaatggc

SEQ ID NO: 702324 - DNA, 25 bp, Homo sapien
ccaggaaaacctccgctgcgtctct

SEQ ID NO: 702325 - DNA, 25 bp, Homo sapien
ccgctgctcgccgttcgcaaaatgg

SEQ ID NO: 702326 - DNA, 25 bp, Homo sapien
ctgctcgccgttcgcaaaatggcgc

SEQ ID NO: 702327 - DNA, 25 bp, Homo sapien
gatcctcaatagccactgcttcgcc

SEQ ID NO: 702328 - DNA, 25 bp, Homo sapien
cggatcctcaatagccactgcttcg

SEQ ID NO: 702329 - DNA, 25 bp, Homo sapien
gaaggggataaacccagcgccacca

SEQ ID NO: 702330 - DNA, 25 bp, Homo sapien
aggggataaacccagcgccaccatc

SEQ ID NO: 702331 - DNA, 25 bp, Homo sapien
gcggatcctcaatagccactgcttc

SEQ ID NO: 702332 - DNA, 25 bp, Homo sapien
ggatcctcaatagccactgcttcgc

SEQ ID NO: 702333 - DNA, 25 bp, Homo sapien
gcgaagcagtggctattgaggatcc

SEQ ID NO: 702334 - DNA, 25 bp, Homo sapien
gatggtggcgctgggtttatcccct

SEQ ID NO: 702335 - DNA, 25 bp, Homo sapien
ggatggtggcgctgggtttatcccc

SEQ ID NO: 702336 - DNA, 25 bp, Homo sapien
tggtggcgctgggtttatccccttc

SEQ ID NO: 702337 - DNA, 25 bp, Homo sapien
gaagcagtggctattgaggatccgc

SEQ ID NO: 702338 - DNA, 25 bp, Homo sapien
cgaagcagtggctattgaggatccg

SEQ ID NO: 702339 - DNA, 25 bp, Homo sapien
ctgttgcctcgatgtggcccctgca

SEQ ID NO: 702340 - DNA, 25 bp, Homo sapien
tgcacgcgacggacctcgtgggccc

SEQ ID NO: 702341 - DNA, 25 bp, Homo sapien
gatgtggcccctgcacgcgacggac

SEQ ID NO: 702342 - DNA, 25 bp, Homo sapien
cgcgggtccctgttgcctcgatgtg

SEQ ID NO: 702343 - DNA, 25 bp, Homo sapien
agcgctttgcggtggacgagctccc

SEQ ID NO: 702344 - DNA, 25 bp, Homo sapien
ttgcggtggacgagctcccgcgggt

SEQ ID NO: 702345 - DNA, 25 bp, Homo sapien
gtccgtcgcgtgcaggggccacatc

SEQ ID NO: 702346 - DNA, 25 bp, Homo sapien
gggagctcgtccaccgcaaagcgct

SEQ ID NO: 702347 - DNA, 25 bp, Homo sapien
gggcccacgaggtccgtcgcgtgca

SEQ ID NO: 702348 - DNA, 25 bp, Homo sapien
gggccacatcgaggcaacagggacc

SEQ ID NO: 702349 - DNA, 25 bp, Homo sapien
gtgcaggggccacatcgaggcaaca

SEQ ID NO: 702350 - DNA, 25 bp, Homo sapien
acatcgaggcaacagggacccgcgg

SEQ ID NO: 702351 - DNA, 25 bp, Homo sapien
tcggtcgagctttcccgactgcgtc

SEQ ID NO: 702352 - DNA, 25 bp, Homo sapien
ctcggtcgagctttcccgactgcgt

SEQ ID NO: 702353 - DNA, 25 bp, Homo sapien
ggtctcggtcgagctttcccgactg

SEQ ID NO: 702354 - DNA, 25 bp, Homo sapien
gtctcggtcgagctttcccgactgc

SEQ ID NO: 702355 - DNA, 25 bp, Homo sapien
tctcggtcgagctttcccgactgcg

SEQ ID NO: 702356 - DNA, 25 bp, Homo sapien
gtggcgcactccgacagcccggcag

SEQ ID NO: 702357 - DNA, 25 bp, Homo sapien
gccgcgcacgtagacggcacccagg

SEQ ID NO: 702358 - DNA, 25 bp, Homo sapien
ggcgaggccgcgcacgtagacggca

SEQ ID NO: 702359 - DNA, 25 bp, Homo sapien
aggccgcgcacgtagacggcaccca

SEQ ID NO: 702360 - DNA, 25 bp, Homo sapien
gcgaggccgcgcacgtagacggcac

SEQ ID NO: 702361 - DNA, 25 bp, Homo sapien
cgaggccgcgcacgtagacggcacc

SEQ ID NO: 702362 - DNA, 25 bp, Homo sapien
cgcgcacgtagacggcacccagggc

SEQ ID NO: 702363 - DNA, 25 bp, Homo sapien
ccctgggtgccgtctacgtgcgcgg

SEQ ID NO: 702364 - DNA, 25 bp, Homo sapien
gccctgggtgccgtctacgtgcgcg

SEQ ID NO: 702365 - DNA, 25 bp, Homo sapien
ggtgccgtctacgtgcgcggcctcg

SEQ ID NO: 702366 - DNA, 25 bp, Homo sapien
gtgccgtctacgtgcgcggcctcgc

SEQ ID NO: 702367 - DNA, 25 bp, Homo sapien
tgggtgccgtctacgtgcgcggcct

SEQ ID NO: 702368 - DNA, 25 bp, Homo sapien
cctgggtgccgtctacgtgcgcggc

SEQ ID NO: 702369 - DNA, 25 bp, Homo sapien
cagtcgggaaagctcgaccgagacc

SEQ ID NO: 702370 - DNA, 25 bp, Homo sapien
ggcgctgccgggctgtcggagtgcg

SEQ ID NO: 702371 - DNA, 25 bp, Homo sapien
ctgccgggctgtcggagtgcgccac

SEQ ID NO: 702372 - DNA, 25 bp, Homo sapien
cgcagtcgggaaagctcgaccgaga

SEQ ID NO: 702373 - DNA, 25 bp, Homo sapien
ctcgggggacgcagtcgggaaagct

SEQ ID NO: 702374 - DNA, 25 bp, Homo sapien
gacgcagtcgggaaagctcgaccga

SEQ ID NO: 702375 - DNA, 25 bp, Homo sapien
gtgggcgtcgctcagccccggatcg

SEQ ID NO: 702376 - DNA, 25 bp, Homo sapien
gcgtcgctcagccccggatcgggag

SEQ ID NO: 702377 - DNA, 25 bp, Homo sapien
ggcgtcgctcagccccggatcggga

SEQ ID NO: 702378 - DNA, 25 bp, Homo sapien
gggcgtcgctcagccccggatcggg

SEQ ID NO: 702379 - DNA, 25 bp, Homo sapien
tgggcgtcgctcagccccggatcgg

SEQ ID NO: 702380 - DNA, 25 bp, Homo sapien
ctcccgatccggggctgagcgacgc

SEQ ID NO: 702381 - DNA, 25 bp, Homo sapien
tcccgatccggggctgagcgacgcc

SEQ ID NO: 702382 - DNA, 25 bp, Homo sapien
cgatccggggctgagcgacgcccac

SEQ ID NO: 702383 - DNA, 25 bp, Homo sapien
ccgatccggggctgagcgacgccca

SEQ ID NO: 702384 - DNA, 25 bp, Homo sapien
cccgatccggggctgagcgacgccc

SEQ ID NO: 702385 - DNA, 25 bp, Homo sapien
gcaagagtcccagattttggccgta

SEQ ID NO: 702386 - DNA, 25 bp, Homo sapien
tgactgctgcccttgtaggtgcttg

SEQ ID NO: 702387 - DNA, 25 bp, Homo sapien
gtttaccctgcgcagcaaatggctg

SEQ ID NO: 702388 - DNA, 25 bp, Homo sapien
gggccgtgcaaaatggaggcaactt

SEQ ID NO: 702389 - DNA, 25 bp, Homo sapien
tcctccatgaggtcaggctaggccc

SEQ ID NO: 702390 - DNA, 25 bp, Homo sapien
gccggctgcgcgattgtgaaaatct

SEQ ID NO: 702391 - DNA, 25 bp, Homo sapien
ggactcttgcttgtccccgcgaaga

SEQ ID NO: 702392 - DNA, 25 bp, Homo sapien
tagcctgacctcatggaggacgcgc

SEQ ID NO: 702393 - DNA, 25 bp, Homo sapien
tgcactacggccaaaatctgggact

SEQ ID NO: 702394 - DNA, 25 bp, Homo sapien
catttgctgcgcagggtaaacaggc

SEQ ID NO: 702395 - DNA, 25 bp, Homo sapien
gagattttcacaatcgcgcagccgg

SEQ ID NO: 702396 - DNA, 25 bp, Homo sapien
caagcacctacaagggcagcagtca

SEQ ID NO: 702397 - DNA, 25 bp, Homo sapien
tccggggcctcggtggtgctcctga

SEQ ID NO: 702398 - DNA, 25 bp, Homo sapien
ctccactgctgtagtaacccgggtc

SEQ ID NO: 702399 - DNA, 25 bp, Homo sapien
tccactgctgtagtaacccgggtcc

SEQ ID NO: 702400 - DNA, 25 bp, Homo sapien
ggtctccctccactgctgtagtaac

SEQ ID NO: 702401 - DNA, 25 bp, Homo sapien
cactgctgtagtaacccgggtccgg

SEQ ID NO: 702402 - DNA, 25 bp, Homo sapien
cctccactgctgtagtaacccgggt

SEQ ID NO: 702403 - DNA, 25 bp, Homo sapien
cggacccgggttactacagcagtgg

SEQ ID NO: 702404 - DNA, 25 bp, Homo sapien
gttactacagcagtggagggagacc

SEQ ID NO: 702405 - DNA, 25 bp, Homo sapien
gacccgggttactacagcagtggag

SEQ ID NO: 702406 - DNA, 25 bp, Homo sapien
tcaggagcaccaccgaggccccgga

SEQ ID NO: 702407 - DNA, 25 bp, Homo sapien
ccggacccgggttactacagcagtg

SEQ ID NO: 702408 - DNA, 25 bp, Homo sapien
acccgggttactacagcagtggagg

SEQ ID NO: 702409 - DNA, 25 bp, Homo sapien
tcacccacccctgaagatcccaggt

SEQ ID NO: 702410 - DNA, 25 bp, Homo sapien
gtcagagggatcacaatctttcagc

SEQ ID NO: 702411 - DNA, 25 bp, Homo sapien
caatctttcagctaacttattctac

SEQ ID NO: 702412 - DNA, 25 bp, Homo sapien
tctttcagctaacttattctactcc

SEQ ID NO: 702413 - DNA, 25 bp, Homo sapien
cacaatctttcagctaacttattct

SEQ ID NO: 702414 - DNA, 25 bp, Homo sapien
tgggcgagggaatagtcagagggat

SEQ ID NO: 702415 - DNA, 25 bp, Homo sapien
cacctgggatcttcaggggtgggtg

SEQ ID NO: 702416 - DNA, 25 bp, Homo sapien
gctgaaagattgtgatccctctgac

SEQ ID NO: 702417 - DNA, 25 bp, Homo sapien
agaataagttagctgaaagattgtg

SEQ ID NO: 702418 - DNA, 25 bp, Homo sapien
atccctctgactattccctcgccca

SEQ ID NO: 702419 - DNA, 25 bp, Homo sapien
gtagaataagttagctgaaagattg

SEQ ID NO: 702420 - DNA, 25 bp, Homo sapien
ggagtagaataagttagctgaaaga

SEQ ID NO: 702421 - DNA, 25 bp, Homo sapien
tgctgcccgtacctgtgattgaatg

SEQ ID NO: 702422 - DNA, 25 bp, Homo sapien
tcaacacggcctaggcccaagcttt

SEQ ID NO: 702423 - DNA, 25 bp, Homo sapien
cagcccaggcgttgcctgagctcaa

SEQ ID NO: 702424 - DNA, 25 bp, Homo sapien
gaaccctgagtttcatcagagccgg

SEQ ID NO: 702425 - DNA, 25 bp, Homo sapien
tgaatgtaatcgtgggaaccctgag

SEQ ID NO: 702426 - DNA, 25 bp, Homo sapien
caagctttagcgctgccgggttctt

SEQ ID NO: 702427 - DNA, 25 bp, Homo sapien
cattcaatcacaggtacgggcagca

SEQ ID NO: 702428 - DNA, 25 bp, Homo sapien
aagaacccggcagcgctaaagcttg

SEQ ID NO: 702429 - DNA, 25 bp, Homo sapien
taaagcttgggcctaggccgtgttg

SEQ ID NO: 702430 - DNA, 25 bp, Homo sapien
tgtgcgccggctctgatgaaactca

SEQ ID NO: 702431 - DNA, 25 bp, Homo sapien
tcagggttcccacgattacattcaa

SEQ ID NO: 702432 - DNA, 25 bp, Homo sapien
gttgagctcaggcaacgcctgggct

SEQ ID NO: 702433 - DNA, 25 bp, Homo sapien
ggttctgaattgggctgcaccccct

SEQ ID NO: 702434 - DNA, 25 bp, Homo sapien
agggggtgcagcccaattcagaacc

SEQ ID NO: 702435 - DNA, 25 bp, Homo sapien
ttctgaattgggctgcaccccctgg

SEQ ID NO: 702436 - DNA, 25 bp, Homo sapien
ctgaattgggctgcaccccctggac

SEQ ID NO: 702437 - DNA, 25 bp, Homo sapien
tctgaattgggctgcaccccctgga

SEQ ID NO: 702438 - DNA, 25 bp, Homo sapien
gaattgggctgcaccccctggacag

SEQ ID NO: 702439 - DNA, 25 bp, Homo sapien
ggttctgaattgggctgcaccccct

SEQ ID NO: 702440 - DNA, 25 bp, Homo sapien
tgaattgggctgcaccccctggaca

SEQ ID NO: 702441 - DNA, 25 bp, Homo sapien
tgtccagggggtgcagcccaattca

SEQ ID NO: 702442 - DNA, 25 bp, Homo sapien
agggggtgcagcccaattcagaacc

SEQ ID NO: 702443 - DNA, 25 bp, Homo sapien
ctgtccagggggtgcagcccaattc

SEQ ID NO: 702444 - DNA, 25 bp, Homo sapien
tccagggggtgcagcccaattcaga

SEQ ID NO: 702445 - DNA, 25 bp, Homo sapien
ccagggggtgcagcccaattcagaa

SEQ ID NO: 702446 - DNA, 25 bp, Homo sapien
gtccagggggtgcagcccaattcag

SEQ ID NO: 702447 - DNA, 25 bp, Homo sapien
ggattctcaacgtccagtccaggct

SEQ ID NO: 702448 - DNA, 25 bp, Homo sapien
tgaatgtaacagaggaactaacgtc

SEQ ID NO: 702449 - DNA, 25 bp, Homo sapien
ccaacgacaagacgaggattctcaa

SEQ ID NO: 702450 - DNA, 25 bp, Homo sapien
tggcggcagcctctacatcgagatc

SEQ ID NO: 702451 - DNA, 25 bp, Homo sapien
taactggcgaacagtgctgagtggc

SEQ ID NO: 702452 - DNA, 25 bp, Homo sapien
caggctcacagacgccaaacgcatt

SEQ ID NO: 702453 - DNA, 25 bp, Homo sapien
tgagaatcctcgtcttgtcgttgga

SEQ ID NO: 702454 - DNA, 25 bp, Homo sapien
gccactcagcactgttcgccagtta

SEQ ID NO: 702455 - DNA, 25 bp, Homo sapien
gcctggactggacgttgagaatcct

SEQ ID NO: 702456 - DNA, 25 bp, Homo sapien
gatctcgatgtagaggctgccgcca

SEQ ID NO: 702457 - DNA, 25 bp, Homo sapien
aatgcgtttggcgtctgtgagcctg

SEQ ID NO: 702458 - DNA, 25 bp, Homo sapien
tagttcctctgttacattcagccga

SEQ ID NO: 702459 - DNA, 25 bp, Homo sapien
tgcagcggtgctgctcaacactgtg

SEQ ID NO: 702460 - DNA, 25 bp, Homo sapien
tccaaattcgtaccctgggattcta

SEQ ID NO: 702461 - DNA, 25 bp, Homo sapien
tctaccctccaagggatgccaggca

SEQ ID NO: 702462 - DNA, 25 bp, Homo sapien
caacactgtggtgtcaggacggccc

SEQ ID NO: 702463 - DNA, 25 bp, Homo sapien
taaaaagtgcactccaaattcgtac

SEQ ID NO: 702464 - DNA, 25 bp, Homo sapien
acccagaggacgatctgggccccag

SEQ ID NO: 702465 - DNA, 25 bp, Homo sapien
accaacaaagcgatggtggccccca

SEQ ID NO: 702466 - DNA, 25 bp, Homo sapien
tagaatcccagggtacgaatttgga

SEQ ID NO: 702467 - DNA, 25 bp, Homo sapien
tgcctggcatcccttggagggtaga

SEQ ID NO: 702468 - DNA, 25 bp, Homo sapien
gggccgtcctgacaccacagtgttg

SEQ ID NO: 702469 - DNA, 25 bp, Homo sapien
cacagtgttgagcagcaccgctgca

SEQ ID NO: 702470 - DNA, 25 bp, Homo sapien
cagggtacgaatttggagtgcactt

SEQ ID NO: 702471 - DNA, 25 bp, Homo sapien
catttgcttccacaagaaccgcgag

SEQ ID NO: 702472 - DNA, 25 bp, Homo sapien
gagccgaccatgtcttcatttgctt

SEQ ID NO: 702473 - DNA, 25 bp, Homo sapien
ttctcctggagttcgctgaggagca

SEQ ID NO: 702474 - DNA, 25 bp, Homo sapien
gctgcgagccgaccatgtcttcatt

SEQ ID NO: 702475 - DNA, 25 bp, Homo sapien
cttccacaagaaccgcgaggacaga

SEQ ID NO: 702476 - DNA, 25 bp, Homo sapien
tcctggagttcgctgaggagcagct

SEQ ID NO: 702477 - DNA, 25 bp, Homo sapien
tcgcggttcttgtggaagcaaatga

SEQ ID NO: 702478 - DNA, 25 bp, Homo sapien
tgctcctcagcgaactccaggagaa

SEQ ID NO: 702479 - DNA, 25 bp, Homo sapien
tctgtcctcgcggttcttgtggaag

SEQ ID NO: 702480 - DNA, 25 bp, Homo sapien
agctgctcctcagcgaactccagga

SEQ ID NO: 702481 - DNA, 25 bp, Homo sapien
aatgaagacatggtcggctcgcagc

SEQ ID NO: 702482 - DNA, 25 bp, Homo sapien
aagcaaatgaagacatggtcggctc

SEQ ID NO: 702483 - DNA, 25 bp, Homo sapien
gacccgtatcgcctgcagtagggtg

SEQ ID NO: 702484 - DNA, 25 bp, Homo sapien
aggtgacccgtatcgcctgcagtag

SEQ ID NO: 702485 - DNA, 25 bp, Homo sapien
ccgtatcgcctgcagtagggtgcgt

SEQ ID NO: 702486 - DNA, 25 bp, Homo sapien
ttcattctcagcccgcaggcacggt

SEQ ID NO: 702487 - DNA, 25 bp, Homo sapien
gtaggtgacccgtatcgcctgcagt

SEQ ID NO: 702488 - DNA, 25 bp, Homo sapien
agcccgcaggcacggtctccctgcg

SEQ ID NO: 702489 - DNA, 25 bp, Homo sapien
acgcaccctactgcaggcgatacgg

SEQ ID NO: 702490 - DNA, 25 bp, Homo sapien
ctactgcaggcgatacgggtcacct

SEQ ID NO: 702491 - DNA, 25 bp, Homo sapien
cgcagggagaccgtgcctgcgggct

SEQ ID NO: 702492 - DNA, 25 bp, Homo sapien
accgtgcctgcgggctgagaatgaa

SEQ ID NO: 702493 - DNA, 25 bp, Homo sapien
actgcaggcgatacgggtcacctac

SEQ ID NO: 702494 - DNA, 25 bp, Homo sapien
agaagccgtcagaacccctgccgac

SEQ ID NO: 702495 - DNA, 25 bp, Homo sapien
tgctccgaaccttcagctttttggg

SEQ ID NO: 702496 - DNA, 25 bp, Homo sapien
gaaccttcagctttttgggctttga

SEQ ID NO: 702497 - DNA, 25 bp, Homo sapien
ccttcagctttttgggctttgagat

SEQ ID NO: 702498 - DNA, 25 bp, Homo sapien
gccttgctccgaaccttcagctttt

SEQ ID NO: 702499 - DNA, 25 bp, Homo sapien
ctccgaaccttcagctttttgggct

SEQ ID NO: 702500 - DNA, 25 bp, Homo sapien
gctccgaaccttcagctttttgggc

SEQ ID NO: 702501 - DNA, 25 bp, Homo sapien
aaaagctgaaggttcggagcaaggc

SEQ ID NO: 702502 - DNA, 25 bp, Homo sapien
cccaaaaagctgaaggttcggagca

SEQ ID NO: 702503 - DNA, 25 bp, Homo sapien
agcccaaaaagctgaaggttcggag

SEQ ID NO: 702504 - DNA, 25 bp, Homo sapien
tcaaagcccaaaaagctgaaggttc

SEQ ID NO: 702505 - DNA, 25 bp, Homo sapien
ccaaaaagctgaaggttcggagcaa

SEQ ID NO: 702506 - DNA, 25 bp, Homo sapien
aatctcaaagcccaaaaagctgaag

SEQ ID NO: 702507 - DNA, 25 bp, Homo sapien
cacgttcgagagagagtcttcggga

SEQ ID NO: 702508 - DNA, 25 bp, Homo sapien
catggcctacacgttcgagagagag

SEQ ID NO: 702509 - DNA, 25 bp, Homo sapien
cctacacgttcgagagagagtcttc

SEQ ID NO: 702510 - DNA, 25 bp, Homo sapien
tcatggcctacacgttcgagagaga

SEQ ID NO: 702511 - DNA, 25 bp, Homo sapien
ggcctacacgttcgagagagagtct

SEQ ID NO: 702512 - DNA, 25 bp, Homo sapien
tacacgttcgagagagagtcttcgg

SEQ ID NO: 702513 - DNA, 25 bp, Homo sapien
tcccgaagactctctctcgaacgtg

SEQ ID NO: 702514 - DNA, 25 bp, Homo sapien
ccgaagactctctctcgaacgtgta

SEQ ID NO: 702515 - DNA, 25 bp, Homo sapien
gaagactctctctcgaacgtgtagg

SEQ ID NO: 702516 - DNA, 25 bp, Homo sapien
agactctctctcgaacgtgtaggcc

SEQ ID NO: 702517 - DNA, 25 bp, Homo sapien
tctctctcgaacgtgtaggccatga

SEQ ID NO: 702518 - DNA, 25 bp, Homo sapien
ctctctctcgaacgtgtaggccatg

SEQ ID NO: 702519 - DNA, 25 bp, Homo sapien
tctcgcctgggtttgtccgcatgtt

SEQ ID NO: 702520 - DNA, 25 bp, Homo sapien
catctcgcctgggtttgtccgcatg

SEQ ID NO: 702521 - DNA, 25 bp, Homo sapien
ggaaccgtagactcgctcatctcgc

SEQ ID NO: 702522 - DNA, 25 bp, Homo sapien
ggtaggaaccgtagactcgctcatc

SEQ ID NO: 702523 - DNA, 25 bp, Homo sapien
gcctgggtttgtccgcatgttgtaa

SEQ ID NO: 702524 - DNA, 25 bp, Homo sapien
tgggtaggaaccgtagactcgctca

SEQ ID NO: 702525 - DNA, 25 bp, Homo sapien
ttacaacatgcggacaaacccaggc

SEQ ID NO: 702526 - DNA, 25 bp, Homo sapien
gatgagcgagtctacggttcctacc

SEQ ID NO: 702527 - DNA, 25 bp, Homo sapien
catgcggacaaacccaggcgagatg

SEQ ID NO: 702528 - DNA, 25 bp, Homo sapien
tgagcgagtctacggttcctaccca

SEQ ID NO: 702529 - DNA, 25 bp, Homo sapien
gcgagatgagcgagtctacggttcc

SEQ ID NO: 702530 - DNA, 25 bp, Homo sapien
gagatgagcgagtctacggttccta

SEQ ID NO: 702531 - DNA, 25 bp, Homo sapien
ttgaagtttaatattgtgtttgtga

SEQ ID NO: 702532 - DNA, 25 bp, Homo sapien
tcttgaagtttaatattgtgtttgt

SEQ ID NO: 702533 - DNA, 25 bp, Homo sapien
ttcttgaagtttaatattgtgtttg

SEQ ID NO: 702534 - DNA, 25 bp, Homo sapien
cttgaagtttaatattgtgtttgtg

SEQ ID NO: 702535 - DNA, 25 bp, Homo sapien
acaaacacaatattaaacttcaaga

SEQ ID NO: 702536 - DNA, 25 bp, Homo sapien
caaacacaatattaaacttcaagaa

SEQ ID NO: 702537 - DNA, 25 bp, Homo sapien
cacaaacacaatattaaacttcaag

SEQ ID NO: 702538 - DNA, 25 bp, Homo sapien
tcacaaacacaatattaaacttcaa

SEQ ID NO: 702539 - DNA, 25 bp, Homo sapien
ctgaagtatttgctttaattctaaa

SEQ ID NO: 702540 - DNA, 25 bp, Homo sapien
ttcttgaagtttaatattgtgtttg

SEQ ID NO: 702541 - DNA, 25 bp, Homo sapien
taatattgtgtttgtgatactgaag

SEQ ID NO: 702542 - DNA, 25 bp, Homo sapien
cttgaagtttaatattgtgtttgtg

SEQ ID NO: 702543 - DNA, 25 bp, Homo sapien
tgtttgtgatactgaagtatttgct

SEQ ID NO: 702544 - DNA, 25 bp, Homo sapien
gatactgaagtatttgctttaattc

SEQ ID NO: 702545 - DNA, 25 bp, Homo sapien
taaagcaaatacttcagtatcacaa

SEQ ID NO: 702546 - DNA, 25 bp, Homo sapien
tacttcagtatcacaaacacaatat

SEQ ID NO: 702547 - DNA, 25 bp, Homo sapien
caaacacaatattaaacttcaagaa

SEQ ID NO: 702548 - DNA, 25 bp, Homo sapien
cacaaacacaatattaaacttcaag

SEQ ID NO: 702549 - DNA, 25 bp, Homo sapien
tttagaattaaagcaaatacttcag

SEQ ID NO: 702550 - DNA, 25 bp, Homo sapien
cagtatcacaaacacaatattaaac

SEQ ID NO: 702551 - DNA, 25 bp, Homo sapien
gctggtttaagatgattcagattat

SEQ ID NO: 702552 - DNA, 25 bp, Homo sapien
tgctggtttaagatgattcagatta

SEQ ID NO: 702553 - DNA, 25 bp, Homo sapien
tttaagatgattcagattatccttg

SEQ ID NO: 702554 - DNA, 25 bp, Homo sapien
ttaagatgattcagattatccttgt

SEQ ID NO: 702555 - DNA, 25 bp, Homo sapien
ggtttaagatgattcagattatcct

SEQ ID NO: 702556 - DNA, 25 bp, Homo sapien
tggtttaagatgattcagattatcc

SEQ ID NO: 702557 - DNA, 25 bp, Homo sapien
aggataatctgaatcatcttaaacc

SEQ ID NO: 702558 - DNA, 25 bp, Homo sapien
ggataatctgaatcatcttaaacca

SEQ ID NO: 702559 - DNA, 25 bp, Homo sapien
caaggataatctgaatcatcttaaa

SEQ ID NO: 702560 - DNA, 25 bp, Homo sapien
acaaggataatctgaatcatcttaa

SEQ ID NO: 702561 - DNA, 25 bp, Homo sapien
gataatctgaatcatcttaaaccag

SEQ ID NO: 702562 - DNA, 25 bp, Homo sapien
taatctgaatcatcttaaaccagca

SEQ ID NO: 702563 - DNA, 25 bp, Homo sapien
tgctggtttaagatgattcagatta

SEQ ID NO: 702564 - DNA, 25 bp, Homo sapien
tcttatttggagtcttttggaaaca

SEQ ID NO: 702565 - DNA, 25 bp, Homo sapien
ttaagatgattcagattatccttgt

SEQ ID NO: 702566 - DNA, 25 bp, Homo sapien
aacttggaaagatgaggtattaatc

SEQ ID NO: 702567 - DNA, 25 bp, Homo sapien
gagtcttttggaaacagtcttagtc

SEQ ID NO: 702568 - DNA, 25 bp, Homo sapien
ccttgtactttgaggagaagtttct

SEQ ID NO: 702569 - DNA, 25 bp, Homo sapien
gaaacttctcctcaaagtacaagga

SEQ ID NO: 702570 - DNA, 25 bp, Homo sapien
gactccaaataagaaacttctcctc

SEQ ID NO: 702571 - DNA, 25 bp, Homo sapien
taagactgtttccaaaagactccaa

SEQ ID NO: 702572 - DNA, 25 bp, Homo sapien
caaggataatctgaatcatcttaaa

SEQ ID NO: 702573 - DNA, 25 bp, Homo sapien
taatctgaatcatcttaaaccagca

SEQ ID NO: 702574 - DNA, 25 bp, Homo sapien
gattaatacctcatctttccaagtt

SEQ ID NO: 702575 - DNA, 25 bp, Homo sapien
attgctctccaaaagccaataaagt

SEQ ID NO: 702576 - DNA, 25 bp, Homo sapien
ctctccaaaagccaataaagtgatt

SEQ ID NO: 702577 - DNA, 25 bp, Homo sapien
tgctctccaaaagccaataaagtga

SEQ ID NO: 702578 - DNA, 25 bp, Homo sapien
cattgctctccaaaagccaataaag

SEQ ID NO: 702579 - DNA, 25 bp, Homo sapien
ttgctctccaaaagccaataaagtg

SEQ ID NO: 702580 - DNA, 25 bp, Homo sapien
ccctccattgctctccaaaagccaa

SEQ ID NO: 702581 - DNA, 25 bp, Homo sapien
tattggcttttggagagcaatggag

SEQ ID NO: 702582 - DNA, 25 bp, Homo sapien
ttggcttttggagagcaatggaggg

SEQ ID NO: 702583 - DNA, 25 bp, Homo sapien
actttattggcttttggagagcaat

SEQ ID NO: 702584 - DNA, 25 bp, Homo sapien
aatcactttattggcttttggagag

SEQ ID NO: 702585 - DNA, 25 bp, Homo sapien
cactttattggcttttggagagcaa

SEQ ID NO: 702586 - DNA, 25 bp, Homo sapien
ctttattggcttttggagagcaatg

SEQ ID NO: 702587 - DNA, 25 bp, Homo sapien
acagacatccccatgcgcaggccca

SEQ ID NO: 702588 - DNA, 25 bp, Homo sapien
taacacggcgaactcaaaagttgag

SEQ ID NO: 702589 - DNA, 25 bp, Homo sapien
gggcggccagtaacacggcgaactc

SEQ ID NO: 702590 - DNA, 25 bp, Homo sapien
cagtaacacggcgaactcaaaagtt

SEQ ID NO: 702591 - DNA, 25 bp, Homo sapien
gctgctgccccgaacggcgctgcag

SEQ ID NO: 702592 - DNA, 25 bp, Homo sapien
ggcggggttgcagacccggaagcgc

SEQ ID NO: 702593 - DNA, 25 bp, Homo sapien
tgattttccgggtggcgctcccgga

SEQ ID NO: 702594 - DNA, 25 bp, Homo sapien
cggcccgctcgccaagtctacaatc

SEQ ID NO: 702595 - DNA, 25 bp, Homo sapien
gaggtcagcgtctccatgatagcca

SEQ ID NO: 702596 - DNA, 25 bp, Homo sapien
gctgctggtcctgcgcctagcagag

SEQ ID NO: 702597 - DNA, 25 bp, Homo sapien
aagctcccagcctcgaggactggct

SEQ ID NO: 702598 - DNA, 25 bp, Homo sapien
tgtgttgcgaatacctggccgaggc

SEQ ID NO: 702599 - DNA, 25 bp, Homo sapien
cgcccaaccgcaggactgtttttca

SEQ ID NO: 702600 - DNA, 25 bp, Homo sapien
tactccttccgcaaggtggatgggc

SEQ ID NO: 702601 - DNA, 25 bp, Homo sapien
ggaggcgcgcgcaagttcaacatga

SEQ ID NO: 702602 - DNA, 25 bp, Homo sapien
caacttctcggtggagtactccttc

SEQ ID NO: 702603 - DNA, 25 bp, Homo sapien
tctgccccccacccagaggcccctc

SEQ ID NO: 702604 - DNA, 25 bp, Homo sapien
cacccagaggcccctcctaacccag

SEQ ID NO: 702605 - DNA, 25 bp, Homo sapien
gtcatctgccccccacccagaggcc

SEQ ID NO: 702606 - DNA, 25 bp, Homo sapien
cccagaggcccctcctaacccagct

SEQ ID NO: 702607 - DNA, 25 bp, Homo sapien
gatgccaaaaatagccggccggctg

SEQ ID NO: 702608 - DNA, 25 bp, Homo sapien
cgtgaggagacgcacaacctggttt

SEQ ID NO: 702609 - DNA, 25 bp, Homo sapien
caatgccgcctggtagttctggctg

SEQ ID NO: 702610 - DNA, 25 bp, Homo sapien
gagcattggcgcctgttcctctggg

SEQ ID NO: 702611 - DNA, 25 bp, Homo sapien
tgtgttgtgacttggccgttgcctg

SEQ ID NO: 702612 - DNA, 25 bp, Homo sapien
tcaagcaggtccagcttcctttggg

SEQ ID NO: 702613 - DNA, 25 bp, Homo sapien
tctggaagtcgaagctcaagcaggt

SEQ ID NO: 702614 - DNA, 25 bp, Homo sapien
tgggattaaattcgcgtaggcactg

SEQ ID NO: 702615 - DNA, 25 bp, Homo sapien
gagacttcgatgtctctgcccaagg

SEQ ID NO: 702616 - DNA, 25 bp, Homo sapien
tcagtggccgattcaggtgaggacc

SEQ ID NO: 702617 - DNA, 25 bp, Homo sapien
gccaggagcaaaccagggcctagga

SEQ ID NO: 702618 - DNA, 25 bp, Homo sapien
gaatgaggtgaacacatggccagga

SEQ ID NO: 702619 - DNA, 25 bp, Homo sapien
catattcagttattcgggccagtgg

SEQ ID NO: 702620 - DNA, 25 bp, Homo sapien
tattgacagagctcagtgccttacc

SEQ ID NO: 702621 - DNA, 25 bp, Homo sapien
tcgggactctgttccaccgtggtgg

SEQ ID NO: 702622 - DNA, 25 bp, Homo sapien
tgttggctagggacacttgcagctc

SEQ ID NO: 702623 - DNA, 25 bp, Homo sapien
gattgtagacaactgggtggcatga

SEQ ID NO: 702624 - DNA, 25 bp, Homo sapien
atgtaatgtaattgaggcagctctc

SEQ ID NO: 702625 - DNA, 25 bp, Homo sapien
ccagcctagcatttttgactgggca

SEQ ID NO: 702626 - DNA, 25 bp, Homo sapien
gcagtcagacaacacgtcacttatt

SEQ ID NO: 702627 - DNA, 25 bp, Homo sapien
gtgcccgccgcaaccaacggcagat

SEQ ID NO: 702628 - DNA, 25 bp, Homo sapien
gcaaccaacggcagatgtttcccag

SEQ ID NO: 702629 - DNA, 25 bp, Homo sapien
cggtgcccgccgcaaccaacggcag

SEQ ID NO: 702630 - DNA, 25 bp, Homo sapien
ccgccgcaaccaacggcagatgttt

SEQ ID NO: 702631 - DNA, 25 bp, Homo sapien
ggccgcgaggagcagaaaggccgcc

SEQ ID NO: 702632 - DNA, 25 bp, Homo sapien
agaaaggccgccaaaagccgcgcca

SEQ ID NO: 702633 - DNA, 25 bp, Homo sapien
gcgaggagcagaaaggccgccaaaa

SEQ ID NO: 702634 - DNA, 25 bp, Homo sapien
gaaaggccgccaaaagccgcgccag

SEQ ID NO: 702635 - DNA, 25 bp, Homo sapien
cgtccaaggtcacggagtaaaagat

SEQ ID NO: 702636 - DNA, 25 bp, Homo sapien
tggagaccccgaaacggagaagcag

SEQ ID NO: 702637 - DNA, 25 bp, Homo sapien
tccttctgcacacgaattccatcgt

SEQ ID NO: 702638 - DNA, 25 bp, Homo sapien
tgaggttagcttagcaccgtgcccg

SEQ ID NO: 702639 - DNA, 25 bp, Homo sapien
ttggccctgggcgctggtcaccctg

SEQ ID NO: 702640 - DNA, 25 bp, Homo sapien
tggacagaacctccagaatccacac

SEQ ID NO: 702641 - DNA, 25 bp, Homo sapien
tgaacataatgaaggcctgttggcc

SEQ ID NO: 702642 - DNA, 25 bp, Homo sapien
gccctgggcgctggtcaccctggac

SEQ ID NO: 702643 - DNA, 25 bp, Homo sapien
cggcgacgccttaagagtgagaact

SEQ ID NO: 702644 - DNA, 25 bp, Homo sapien
gaacctgacactctttacatcaaat

SEQ ID NO: 702645 - DNA, 25 bp, Homo sapien
tagtgaaggttaagggctgcatttg

SEQ ID NO: 702646 - DNA, 25 bp, Homo sapien
agtgcgatctcgtagactgtcccca

SEQ ID NO: 702647 - DNA, 25 bp, Homo sapien
actaggaggctgaatgctctgcctt

SEQ ID NO: 702648 - DNA, 25 bp, Homo sapien
agcattattccaccctacactccag

SEQ ID NO: 702649 - DNA, 25 bp, Homo sapien
tgccgacccggcaaactcctactca

SEQ ID NO: 702650 - DNA, 25 bp, Homo sapien
ggcctccttggtggtgacatctttc

SEQ ID NO: 702651 - DNA, 25 bp, Homo sapien
acagccaagcccattcctaaggaag

SEQ ID NO: 702652 - DNA, 25 bp, Homo sapien
ctaaggaagggtctccggctctgga

SEQ ID NO: 702653 - DNA, 25 bp, Homo sapien
caagctctgttctatgggatcaggg

SEQ ID NO: 702654 - DNA, 25 bp, Homo sapien
taaaatgggaactgatagaactgct

SEQ ID NO: 702655 - DNA, 25 bp, Homo sapien
cggcctgggagaccacgtgcaccat

SEQ ID NO: 702656 - DNA, 25 bp, Homo sapien
tgccttgctgaggtcgtgcggaaga

SEQ ID NO: 702657 - DNA, 25 bp, Homo sapien
cccactgcgggttgtagaggatgca

SEQ ID NO: 702658 - DNA, 25 bp, Homo sapien
tgcagtagtctttgccttcggggcc

SEQ ID NO: 702659 - DNA, 25 bp, Homo sapien
agacatggctgtcccctgatacctg

SEQ ID NO: 702660 - DNA, 25 bp, Homo sapien
acagccggaccctgggcgacgggct

SEQ ID NO: 702661 - DNA, 25 bp, Homo sapien
cggggccggagtcctcacagacatg

SEQ ID NO: 702662 - DNA, 25 bp, Homo sapien
acggcctcggcccacctaggcagag

SEQ ID NO: 702663 - DNA, 25 bp, Homo sapien
aggccgtccagttgcgcagctgcag

SEQ ID NO: 702664 - DNA, 25 bp, Homo sapien
gggaggtcggctgcggagcagagca

SEQ ID NO: 702665 - DNA, 25 bp, Homo sapien
gccaccagcgggatctggttgctga

SEQ ID NO: 702666 - DNA, 25 bp, Homo sapien
gcctctccctgctgacgatgagcag

SEQ ID NO: 702667 - DNA, 25 bp, Homo sapien
gaaccgcacatacaagtcctgagtg

SEQ ID NO: 702668 - DNA, 25 bp, Homo sapien
tctctcaactacgacggcagcgtgt

SEQ ID NO: 702669 - DNA, 25 bp, Homo sapien
tgatacttgtcacagcccatgcctg

SEQ ID NO: 702670 - DNA, 25 bp, Homo sapien
ttagcgagaagtcggaagaccagcc

SEQ ID NO: 702671 - DNA, 25 bp, Homo sapien
gccaatctcatcatactgcgtctta

SEQ ID NO: 702672 - DNA, 25 bp, Homo sapien
tcatcatactgcgtcttattacccc

SEQ ID NO: 702673 - DNA, 25 bp, Homo sapien
agggccacgggaatgccaatctcat

SEQ ID NO: 702674 - DNA, 25 bp, Homo sapien
ggaatgccaatctcatcatactgcg

SEQ ID NO: 702675 - DNA, 25 bp, Homo sapien
gaagatgtccagcatgtctttgtag

SEQ ID NO: 702676 - DNA, 25 bp, Homo sapien
cgtgaagatgtccagcatgtctttg

SEQ ID NO: 702677 - DNA, 25 bp, Homo sapien
tgaagatgtccagcatgtctttgta

SEQ ID NO: 702678 - DNA, 25 bp, Homo sapien
gtgaagatgtccagcatgtctttgt

SEQ ID NO: 702679 - DNA, 25 bp, Homo sapien
gccgccctcaccgtgcggccgaaac

SEQ ID NO: 702680 - DNA, 25 bp, Homo sapien
ccgccctcaccgtgcggccgaaacg

SEQ ID NO: 702681 - DNA, 25 bp, Homo sapien
ctccttaggcgcatacagcgccgcc

SEQ ID NO: 702682 - DNA, 25 bp, Homo sapien
ttaggcgcatacagcgccgccctca

SEQ ID NO: 702683 - DNA, 25 bp, Homo sapien
tgaccatgttgtagtccagcaccgg

SEQ ID NO: 702684 - DNA, 25 bp, Homo sapien
cgatggcgacggtgcccacagccat

SEQ ID NO: 702685 - DNA, 25 bp, Homo sapien
cccagtagccgccgatggcgacggt

SEQ ID NO: 702686 - DNA, 25 bp, Homo sapien
tcacgtcccgactcccggcccagta

SEQ ID NO: 702687 - DNA, 25 bp, Homo sapien
ctggggccggctggccgacacgggg

SEQ ID NO: 702688 - DNA, 25 bp, Homo sapien
cggctggccgacacggggctcggga

SEQ ID NO: 702689 - DNA, 25 bp, Homo sapien
gacaccatggggtcgtggggccctg

SEQ ID NO: 702690 - DNA, 25 bp, Homo sapien
cttgggagacaccatggggtcgtgg

SEQ ID NO: 702691 - DNA, 25 bp, Homo sapien
acaaacacgcaggtcatcaccggcg

SEQ ID NO: 702692 - DNA, 25 bp, Homo sapien
acgcaggtcatcaccggcgtcacgt

SEQ ID NO: 702693 - DNA, 25 bp, Homo sapien
ggcgtcacgtccaccgcctcgtcct

SEQ ID NO: 702694 - DNA, 25 bp, Homo sapien
cgggcccatcgtcgcgcttgtgctt

SEQ ID NO: 702695 - DNA, 25 bp, Homo sapien
gagatcgtagaaatagtagagcagc

SEQ ID NO: 702696 - DNA, 25 bp, Homo sapien
ggagatcgtagaaatagtagagcag

SEQ ID NO: 702697 - DNA, 25 bp, Homo sapien
cagaagatcccgatgaccacgtaca

SEQ ID NO: 702698 - DNA, 25 bp, Homo sapien
ccaggcagaagatcccgatgaccac

SEQ ID NO: 702699 - DNA, 25 bp, Homo sapien
cacttgccgaaggcagccgccgcac

SEQ ID NO: 702700 - DNA, 25 bp, Homo sapien
gtggaagtagggcaggctgttgttg

SEQ ID NO: 702701 - DNA, 25 bp, Homo sapien
tgtggaagtagggcaggctgttgtt

SEQ ID NO: 702702 - DNA, 25 bp, Homo sapien
tggaagtagggcaggctgttgttgg

SEQ ID NO: 702703 - DNA, 25 bp, Homo sapien
ggaagtagggcaggctgttgttggg

SEQ ID NO: 702704 - DNA, 25 bp, Homo sapien
ccacgcagaagagcgccaggagcag

SEQ ID NO: 702705 - DNA, 25 bp, Homo sapien
cgccaggagcagcatacgggcctgc

SEQ ID NO: 702706 - DNA, 25 bp, Homo sapien
acgctgacggccacgcagaagagcg

SEQ ID NO: 702707 - DNA, 25 bp, Homo sapien
tggtcctcgttgcggaagacgcccc

SEQ ID NO: 702708 - DNA, 25 bp, Homo sapien
ccagttaaacgtgccgtggctccaa

SEQ ID NO: 702709 - DNA, 25 bp, Homo sapien
gcagtcatgaccaagaggaccgggt

SEQ ID NO: 702710 - DNA, 25 bp, Homo sapien
aattccaggcgccacgtacttcaag

SEQ ID NO: 702711 - DNA, 25 bp, Homo sapien
tctaacttcatgtgacggagcgagt

SEQ ID NO: 702712 - DNA, 25 bp, Homo sapien
ggtgggcagacggatggtcttcagc

SEQ ID NO: 702713 - DNA, 25 bp, Homo sapien
tgaaggtgggcagacggatggtctt

SEQ ID NO: 702714 - DNA, 25 bp, Homo sapien
tgggcagacggatggtcttcagcat

SEQ ID NO: 702715 - DNA, 25 bp, Homo sapien
aaggtgggcagacggatggtcttca

SEQ ID NO: 702716 - DNA, 25 bp, Homo sapien
aagggcgtgatgaacacgaagaaga

SEQ ID NO: 702717 - DNA, 25 bp, Homo sapien
gatgaacacgaagaagatgtcgtag

SEQ ID NO: 702718 - DNA, 25 bp, Homo sapien
cacgaagaagatgtcgtagaggaac

SEQ ID NO: 702719 - DNA, 25 bp, Homo sapien
gaagatgtcgtagaggaacagcacc

SEQ ID NO: 702720 - DNA, 25 bp, Homo sapien
gggtggctgagtccgagggcccagt

SEQ ID NO: 702721 - DNA, 25 bp, Homo sapien
acgggtggctgagtccgagggccca

SEQ ID NO: 702722 - DNA, 25 bp, Homo sapien
tcacgggtggctgagtccgagggcc

SEQ ID NO: 702723 - DNA, 25 bp, Homo sapien
cttctcacgggtggctgagtccgag

SEQ ID NO: 702724 - DNA, 25 bp, Homo sapien
gcaccaaaatgtctccgaaacccag

SEQ ID NO: 702725 - DNA, 25 bp, Homo sapien
aatgtctccgaaacccaggagggag

SEQ ID NO: 702726 - DNA, 25 bp, Homo sapien
caaaatgtctccgaaacccaggagg

SEQ ID NO: 702727 - DNA, 25 bp, Homo sapien
ctggcaccaaaatgtctccgaaacc

SEQ ID NO: 702728 - DNA, 25 bp, Homo sapien
tcaaacctgtggcagtaggccacca

SEQ ID NO: 702729 - DNA, 25 bp, Homo sapien
ccacgaagtataccctggaggactg

SEQ ID NO: 702730 - DNA, 25 bp, Homo sapien
tataccctggaggactgtacctgga

SEQ ID NO: 702731 - DNA, 25 bp, Homo sapien
gcaggccacgaagtataccctggag

SEQ ID NO: 702732 - DNA, 25 bp, Homo sapien
gtcacaaggaggccaacgccatagg

SEQ ID NO: 702733 - DNA, 25 bp, Homo sapien
gcaccaggtagaggagagcgggctg

SEQ ID NO: 702734 - DNA, 25 bp, Homo sapien
ctgcatcagggccagtgccacgaat

SEQ ID NO: 702735 - DNA, 25 bp, Homo sapien
cagctcgtcaccagcgtgcagggca

SEQ ID NO: 702736 - DNA, 25 bp, Homo sapien
ctctagttagggctcactaggcgag

SEQ ID NO: 702737 - DNA, 25 bp, Homo sapien
ctcactaggcgagtatttctcacag

SEQ ID NO: 702738 - DNA, 25 bp, Homo sapien
ggctcactaggcgagtatttctcac

SEQ ID NO: 702739 - DNA, 25 bp, Homo sapien
tagttagggctcactaggcgagtat

SEQ ID NO: 702740 - DNA, 25 bp, Homo sapien
gcccatcagaatggggagacctttg

SEQ ID NO: 702741 - DNA, 25 bp, Homo sapien
aaaagcctggactaccgtctctcgc

SEQ ID NO: 702742 - DNA, 25 bp, Homo sapien
tctgaaatgcccatcagaatgggga

SEQ ID NO: 702743 - DNA, 25 bp, Homo sapien
aaatgcccatcagaatggggagacc

SEQ ID NO: 702744 - DNA, 25 bp, Homo sapien
ctggtcccggccctcggattcagct

SEQ ID NO: 702745 - DNA, 25 bp, Homo sapien
ccggccctcggattcagctgggctc

SEQ ID NO: 702746 - DNA, 25 bp, Homo sapien
tctcctcggacgtgcgtgattttgg

SEQ ID NO: 702747 - DNA, 25 bp, Homo sapien
tgtggctggttcttcgctgggcggc

SEQ ID NO: 702748 - DNA, 25 bp, Homo sapien
ctaggccgaggcgccaggctgggtt

SEQ ID NO: 702749 - DNA, 25 bp, Homo sapien
aggccgaggcgccaggctgggttac

SEQ ID NO: 702750 - DNA, 25 bp, Homo sapien
taggccgaggcgccaggctgggtta

SEQ ID NO: 702751 - DNA, 25 bp, Homo sapien
tctcggcaaggatgagcaccatgtt

SEQ ID NO: 702752 - DNA, 25 bp, Homo sapien
ccaacatcttggtgtggcgggcacg

SEQ ID NO: 702753 - DNA, 25 bp, Homo sapien
cactggtccgtgtcctaggcttgga

SEQ ID NO: 702754 - DNA, 25 bp, Homo sapien
gaaaagcgatgccttctgggagaca

SEQ ID NO: 702755 - DNA, 25 bp, Homo sapien
cagtgagtagaccatgccagtggca

SEQ ID NO: 702756 - DNA, 25 bp, Homo sapien
agaagctcctagctgctgggtccag

SEQ ID NO: 702757 - DNA, 25 bp, Homo sapien
cagaagggcagtctgagagacgtcc

SEQ ID NO: 702758 - DNA, 25 bp, Homo sapien
cagtggcagatgtcctcgtgggttc

SEQ ID NO: 702759 - DNA, 25 bp, Homo sapien
tctgcggccacagggagcgctgctt

SEQ ID NO: 702760 - DNA, 25 bp, Homo sapien
gtgcgggctctgtctctgcggccac

SEQ ID NO: 702761 - DNA, 25 bp, Homo sapien
gtcagttcccgcacggacgtctctg

SEQ ID NO: 702762 - DNA, 25 bp, Homo sapien
cttcggaagtgaccacgtgcagcga

SEQ ID NO: 702763 - DNA, 25 bp, Homo sapien
tgtccggaacagacccgtgagagcg

SEQ ID NO: 702764 - DNA, 25 bp, Homo sapien
tgaaggcgccattactccctgggaa

SEQ ID NO: 702765 - DNA, 25 bp, Homo sapien
tttaatgatcagacggaatggcagc

SEQ ID NO: 702766 - DNA, 25 bp, Homo sapien
tttttgtaagggatcagggctcacc

SEQ ID NO: 702767 - DNA, 25 bp, Homo sapien
cgggacctgcacagagcagatgccc

SEQ ID NO: 702768 - DNA, 25 bp, Homo sapien
gggacctgcacagagcagatgcccc

SEQ ID NO: 702769 - DNA, 25 bp, Homo sapien
agtgacgctgggcacctcacagcac

SEQ ID NO: 702770 - DNA, 25 bp, Homo sapien
cgagaaaattacttgagggatgggc

SEQ ID NO: 702771 - DNA, 25 bp, Homo sapien
ggcaattccaatccgtcctctgcag

SEQ ID NO: 702772 - DNA, 25 bp, Homo sapien
atggtctgtgatgctttccagcaac

SEQ ID NO: 702773 - DNA, 25 bp, Homo sapien
ccgggggtgccgcccaggcttggag

SEQ ID NO: 702774 - DNA, 25 bp, Homo sapien
ggcttggagtctccggaggacaggg

SEQ ID NO: 702775 - DNA, 25 bp, Homo sapien
tggagtctccggaggacaggggtcc

SEQ ID NO: 702776 - DNA, 25 bp, Homo sapien
gccgggggtgccgcccaggcttgga

SEQ ID NO: 702777 - DNA, 25 bp, Homo sapien
cttgctttaggtgaagttcacgggt

SEQ ID NO: 702778 - DNA, 25 bp, Homo sapien
agtagctgtcagcccctttcccgcc

SEQ ID NO: 702779 - DNA, 25 bp, Homo sapien
tcccagtagctgtcagcccctttcc

SEQ ID NO: 702780 - DNA, 25 bp, Homo sapien
ggctgatgcttggttcttgctttag

SEQ ID NO: 702781 - DNA, 25 bp, Homo sapien
gggcatccctgatctgcaaggcggt

SEQ ID NO: 702782 - DNA, 25 bp, Homo sapien
tgtttccggccatgcagtcctgcgg

SEQ ID NO: 702783 - DNA, 25 bp, Homo sapien
agtgcctgaaccctttggcaagtcc

SEQ ID NO: 702784 - DNA, 25 bp, Homo sapien
tggcaagtccccaaaacctctggca

SEQ ID NO: 702785 - DNA, 25 bp, Homo sapien
ctaaactgccacgtgtagacgtggg

SEQ ID NO: 702786 - DNA, 25 bp, Homo sapien
tgtagacgtggggccattggcctcc

SEQ ID NO: 702787 - DNA, 25 bp, Homo sapien
tagacgtggggccattggcctccat

SEQ ID NO: 702788 - DNA, 25 bp, Homo sapien
tcctaaactgccacgtgtagacgtg

SEQ ID NO: 702789 - DNA, 25 bp, Homo sapien
accagcatgcggatagccaggagtg

SEQ ID NO: 702790 - DNA, 25 bp, Homo sapien
ctccaagcagaaatgaccagcatgc

SEQ ID NO: 702791 - DNA, 25 bp, Homo sapien
cagaaatgaccagcatgcggatagc

SEQ ID NO: 702792 - DNA, 25 bp, Homo sapien
aatgaccagcatgcggatagccagg

SEQ ID NO: 702793 - DNA, 25 bp, Homo sapien
ctggccgctcgacagcacgcggcat

SEQ ID NO: 702794 - DNA, 25 bp, Homo sapien
tggtggccaccacgccaatgctggc

SEQ ID NO: 702795 - DNA, 25 bp, Homo sapien
gggtgaggacgacaaggctggtggc

SEQ ID NO: 702796 - DNA, 25 bp, Homo sapien
cagagcggggacttccttggttgtc

SEQ ID NO: 702797 - DNA, 25 bp, Homo sapien
cagggtgggcgtcagcgtgcggtga

SEQ ID NO: 702798 - DNA, 25 bp, Homo sapien
cgtgcggtgatagtccgaggtctcc

SEQ ID NO: 702799 - DNA, 25 bp, Homo sapien
aggtctcccgccgcaaactgctggt

SEQ ID NO: 702800 - DNA, 25 bp, Homo sapien
aactgctggtccaccggattccccg

SEQ ID NO: 702801 - DNA, 25 bp, Homo sapien
agtaccgagcaacccacgcagcttg

SEQ ID NO: 702802 - DNA, 25 bp, Homo sapien
cccacgcagcttgcctctaactctg

SEQ ID NO: 702803 - DNA, 25 bp, Homo sapien
attcagtaccgagcaacccacgcag

SEQ ID NO: 702804 - DNA, 25 bp, Homo sapien
ctataattcagtaccgagcaaccca

SEQ ID NO: 702805 - DNA, 25 bp, Homo sapien
aatgtacgaggacactggagttccc

SEQ ID NO: 702806 - DNA, 25 bp, Homo sapien
gaaatgtacgaggacactggagttc

SEQ ID NO: 702807 - DNA, 25 bp, Homo sapien
tacgaggacactggagttcccatcc

SEQ ID NO: 702808 - DNA, 25 bp, Homo sapien
ctggaaatgtacgaggacactggag

SEQ ID NO: 702809 - DNA, 25 bp, Homo sapien
ttgcccggatccctcgctgcaatag

SEQ ID NO: 702810 - DNA, 25 bp, Homo sapien
cagccgacacaattgtgccataggc

SEQ ID NO: 702811 - DNA, 25 bp, Homo sapien
cagggagatgccgtgctcccgcagc

SEQ ID NO: 702812 - DNA, 25 bp, Homo sapien
gtgagctcagccgacacaattgtgc

SEQ ID NO: 702813 - DNA, 25 bp, Homo sapien
tctgccaagggtcccttatgtctcc

SEQ ID NO: 702814 - DNA, 25 bp, Homo sapien
ttctgccaagggtcccttatgtctc

SEQ ID NO: 702815 - DNA, 25 bp, Homo sapien
tcacactccgggttcaccttggtca

SEQ ID NO: 702816 - DNA, 25 bp, Homo sapien
tcgtcggacccatcggagcagtcct

SEQ ID NO: 702817 - DNA, 25 bp, Homo sapien
gaaaaggagttccctggacagcggc

SEQ ID NO: 702818 - DNA, 25 bp, Homo sapien
tggctgttcccgcaggaaaaggagt

SEQ ID NO: 702819 - DNA, 25 bp, Homo sapien
gggatgcttccatgccgcccacgat

SEQ ID NO: 702820 - DNA, 25 bp, Homo sapien
gcccacgatcctgccggccatcctc

SEQ ID NO: 702821 - DNA, 25 bp, Homo sapien
ccatgccgcccacgatcctgccggc

SEQ ID NO: 702822 - DNA, 25 bp, Homo sapien
atgccgcccacgatcctgccggcca

SEQ ID NO: 702823 - DNA, 25 bp, Homo sapien
gaagtgctccttgttctctcgaagg

SEQ ID NO: 702824 - DNA, 25 bp, Homo sapien
gctccttgttctctcgaaggctggc

SEQ ID NO: 702825 - DNA, 25 bp, Homo sapien
cacctggcgttgatgatggcggccc

SEQ ID NO: 702826 - DNA, 25 bp, Homo sapien
caccagccacctggcgttgatgatg

SEQ ID NO: 702827 - DNA, 25 bp, Homo sapien
gccgctgaggtaggtcgcacccacg

SEQ ID NO: 702828 - DNA, 25 bp, Homo sapien
aggtaggtcgcacccacgtaggcca

SEQ ID NO: 702829 - DNA, 25 bp, Homo sapien
gccacccacttcgtcgggtcttgga

SEQ ID NO: 702830 - DNA, 25 bp, Homo sapien
aggccacccacttcgtcgggtcttg

SEQ ID NO: 702831 - DNA, 25 bp, Homo sapien
aagtcggccgtgtccgcgttgtaca

SEQ ID NO: 702832 - DNA, 25 bp, Homo sapien
agcacagccacgtcaaagtcggccg

SEQ ID NO: 702833 - DNA, 25 bp, Homo sapien
cagcctgagatcaggcacttcttgc

SEQ ID NO: 702834 - DNA, 25 bp, Homo sapien
ggtgcttgacgatctggaccacctg

SEQ ID NO: 702835 - DNA, 25 bp, Homo sapien
tgagagtgccggagccctggcagcc

SEQ ID NO: 702836 - DNA, 25 bp, Homo sapien
aagcagggtgagagtgccggagccc

SEQ ID NO: 702837 - DNA, 25 bp, Homo sapien
ctggccgaatggggagagaaaagca

SEQ ID NO: 702838 - DNA, 25 bp, Homo sapien
cagggtgagagtgccggagccctgg

SEQ ID NO: 702839 - DNA, 25 bp, Homo sapien
gaatggccgtacaagctggcacaca

SEQ ID NO: 702840 - DNA, 25 bp, Homo sapien
aggtagccagcgcacaccatcctgt

SEQ ID NO: 702841 - DNA, 25 bp, Homo sapien
cagcgcacaccatcctgtcagtgag

SEQ ID NO: 702842 - DNA, 25 bp, Homo sapien
tcagtgagtgaatggccgtacaagc

SEQ ID NO: 702843 - DNA, 25 bp, Homo sapien
gtggcctccaggatccagtcacgta

SEQ ID NO: 702844 - DNA, 25 bp, Homo sapien
gtgactcgggcatagacccctggac

SEQ ID NO: 702845 - DNA, 25 bp, Homo sapien
gcatagacccctggacgccgggctt

SEQ ID NO: 702846 - DNA, 25 bp, Homo sapien
tcacgtagcctggtgactcgggcat

SEQ ID NO: 702847 - DNA, 25 bp, Homo sapien
cttgtagcttaggaacggtgaccca

SEQ ID NO: 702848 - DNA, 25 bp, Homo sapien
gaacggtgacccagtcaagaggcac

SEQ ID NO: 702849 - DNA, 25 bp, Homo sapien
tcaagaggcacggtactgagggcct

SEQ ID NO: 702850 - DNA, 25 bp, Homo sapien
tactgagggcctgcatcgatttggt

SEQ ID NO: 702851 - DNA, 25 bp, Homo sapien
ccaccacagttgctccgcagaagtg

SEQ ID NO: 702852 - DNA, 25 bp, Homo sapien
ggtgggcttctccattgcaggcctg

SEQ ID NO: 702853 - DNA, 25 bp, Homo sapien
gttgctccgcagaagtgccgggacc

SEQ ID NO: 702854 - DNA, 25 bp, Homo sapien
gggcttctccattgcaggcctggcc

SEQ ID NO: 702855 - DNA, 25 bp, Homo sapien
tcctgcgtatttccccatccggaga

SEQ ID NO: 702856 - DNA, 25 bp, Homo sapien
agatcatgcacttccggcccacagg

SEQ ID NO: 702857 - DNA, 25 bp, Homo sapien
ttgtagagggggtgcagcactaccc

SEQ ID NO: 702858 - DNA, 25 bp, Homo sapien
gacagccaggtcgaagtccaggatg

SEQ ID NO: 702859 - DNA, 25 bp, Homo sapien
gcaggagtcgactttgccttccagg

SEQ ID NO: 702860 - DNA, 25 bp, Homo sapien
ctatgatgcccacggacgccttctg

SEQ ID NO: 702861 - DNA, 25 bp, Homo sapien
aggaagcctgcgcagatcatgcggt

SEQ ID NO: 702862 - DNA, 25 bp, Homo sapien
acaggttttctggtctatgatgccc

SEQ ID NO: 702863 - DNA, 25 bp, Homo sapien
tacacgcccggcttcttaacctgag

SEQ ID NO: 702864 - DNA, 25 bp, Homo sapien
tcttaacctgagcgcagccaatacc

SEQ ID NO: 702865 - DNA, 25 bp, Homo sapien
gatccctgccagataaaacacgcca

SEQ ID NO: 702866 - DNA, 25 bp, Homo sapien
ctggtgatgcgcgtgtacacgcccg

SEQ ID NO: 702867 - DNA, 25 bp, Homo sapien
cagtggtgctcacggcagataaggt

SEQ ID NO: 702868 - DNA, 25 bp, Homo sapien
cacggcagataaggttgagttggca

SEQ ID NO: 702869 - DNA, 25 bp, Homo sapien
aaatggcgtctgtcccctagcagtg

SEQ ID NO: 702870 - DNA, 25 bp, Homo sapien
agttggcaggttggcccgtcaccct

SEQ ID NO: 702871 - DNA, 25 bp, Homo sapien
ttcctatgacttcagttttgggacc

SEQ ID NO: 702872 - DNA, 25 bp, Homo sapien
gtgggcaggcggacccagggcacct

SEQ ID NO: 702873 - DNA, 25 bp, Homo sapien
ttctcaaataacattggaaatgcat

SEQ ID NO: 702874 - DNA, 25 bp, Homo sapien
tgatgggggacctatcccaggaaaa

SEQ ID NO: 702875 - DNA, 25 bp, Homo sapien
ccgcccacaatcctggtgagcgcgg

SEQ ID NO: 702876 - DNA, 25 bp, Homo sapien
cacggccactccccacggcccgctg

SEQ ID NO: 702877 - DNA, 25 bp, Homo sapien
cgcccacaatcctggtgagcgcggc

SEQ ID NO: 702878 - DNA, 25 bp, Homo sapien
ggccactccccacggcccgctgcgc

SEQ ID NO: 702879 - DNA, 25 bp, Homo sapien
ccagcacggccccgcaacggtgttc

SEQ ID NO: 702880 - DNA, 25 bp, Homo sapien
caccagcacggccccgcaacggtgt

SEQ ID NO: 702881 - DNA, 25 bp, Homo sapien
cagcacggccccgcaacggtgttcc

SEQ ID NO: 702882 - DNA, 25 bp, Homo sapien
accagcacggccccgcaacggtgtt

SEQ ID NO: 702883 - DNA, 25 bp, Homo sapien
ttcggttccgggtgagctacagaga

SEQ ID NO: 702884 - DNA, 25 bp, Homo sapien
tgtaggggcatttggagcgtttgga

SEQ ID NO: 702885 - DNA, 25 bp, Homo sapien
tgagctacagagacatgtaggggca

SEQ ID NO: 702886 - DNA, 25 bp, Homo sapien
ggcaacagttcggttccgggtgagc

SEQ ID NO: 702887 - DNA, 25 bp, Homo sapien
acggcgtgcctaggaaggccgccca

SEQ ID NO: 702888 - DNA, 25 bp, Homo sapien
tagagattgtagaacgggtgcttgt

SEQ ID NO: 702889 - DNA, 25 bp, Homo sapien
cgccacgtcgtagtcgagcgtgtag

SEQ ID NO: 702890 - DNA, 25 bp, Homo sapien
cccagccggtgatgacgcagcgcgt

SEQ ID NO: 702891 - DNA, 25 bp, Homo sapien
tgctcgctgaggaggcgcacggccg

SEQ ID NO: 702892 - DNA, 25 bp, Homo sapien
caggtctgctcgctgaggaggcgca

SEQ ID NO: 702893 - DNA, 25 bp, Homo sapien
agcggcggcaggtctgctcgctgag

SEQ ID NO: 702894 - DNA, 25 bp, Homo sapien
tagaagcggcggcaggtctgctcgc

SEQ ID NO: 702895 - DNA, 25 bp, Homo sapien
gtcctatccagcctctcacagctgc

SEQ ID NO: 702896 - DNA, 25 bp, Homo sapien
atagccccagctagtgaccccagtt

SEQ ID NO: 702897 - DNA, 25 bp, Homo sapien
ctgccacccgggtatagacacctgg

SEQ ID NO: 702898 - DNA, 25 bp, Homo sapien
agttagcacccaccgtccagagggc

SEQ ID NO: 702899 - DNA, 25 bp, Homo sapien
tcctgttgctttcacgtagagtctc

SEQ ID NO: 702900 - DNA, 25 bp, Homo sapien
agagtctcggcctgggcagtcacgt

SEQ ID NO: 702901 - DNA, 25 bp, Homo sapien
tgttgctttcacgtagagtctcggc

SEQ ID NO: 702902 - DNA, 25 bp, Homo sapien
tttcacgtagagtctcggcctgggc

SEQ ID NO: 702903 - DNA, 25 bp, Homo sapien
aacctgcaaaaacggagctgggctg

SEQ ID NO: 702904 - DNA, 25 bp, Homo sapien
tgtccccaaatacgcttagctgtgt

SEQ ID NO: 702905 - DNA, 25 bp, Homo sapien
cagaagtcccggtcccatgtagata

SEQ ID NO: 702906 - DNA, 25 bp, Homo sapien
tgtgatttgccgacagccttgcagg

SEQ ID NO: 702907 - DNA, 25 bp, Homo sapien
gagttttcccgcagttcagttcctg

SEQ ID NO: 702908 - DNA, 25 bp, Homo sapien
gccaccatgttgaccctctggagga

SEQ ID NO: 702909 - DNA, 25 bp, Homo sapien
ctgtcacaacaataagcagggaggg

SEQ ID NO: 702910 - DNA, 25 bp, Homo sapien
cattggtcagtacacaggtcaggag

SEQ ID NO: 702911 - DNA, 25 bp, Homo sapien
ggattagaggctcacaccaccttgc

SEQ ID NO: 702912 - DNA, 25 bp, Homo sapien
attagaggctcacaccaccttgccc

SEQ ID NO: 702913 - DNA, 25 bp, Homo sapien
ttgggattagaggctcacaccacct

SEQ ID NO: 702914 - DNA, 25 bp, Homo sapien
gaatagttgggattagaggctcaca

SEQ ID NO: 702915 - DNA, 25 bp, Homo sapien
ggggctgcgaggcgcggtggcgcca

SEQ ID NO: 702916 - DNA, 25 bp, Homo sapien
gggcacgaaatgtcccggggctgcg

SEQ ID NO: 702917 - DNA, 25 bp, Homo sapien
gggctgcgaggcgcggtggcgccat

SEQ ID NO: 702918 - DNA, 25 bp, Homo sapien
cgctggggcacgaaatgtcccgggg

SEQ ID NO: 702919 - DNA, 25 bp, Homo sapien
taggtgaccgcgaatgccagaaaag

SEQ ID NO: 702920 - DNA, 25 bp, Homo sapien
gacttgaacattgggcgtggcctca

SEQ ID NO: 702921 - DNA, 25 bp, Homo sapien
tctgagtaatgggtctgcagcgccg

SEQ ID NO: 702922 - DNA, 25 bp, Homo sapien
gagaaattgcaaaatccgagccaga

SEQ ID NO: 702923 - DNA, 25 bp, Homo sapien
gcgttgtcgcacgccacgagctctt

SEQ ID NO: 702924 - DNA, 25 bp, Homo sapien
tgcgccgcgttgtcgcacgccacga

SEQ ID NO: 702925 - DNA, 25 bp, Homo sapien
ttctgcgccgcgttgtcgcacgcca

SEQ ID NO: 702926 - DNA, 25 bp, Homo sapien
gccgcgttgtcgcacgccacgagct

SEQ ID NO: 702927 - DNA, 25 bp, Homo sapien
ggcggcggcagccccggctacttac

SEQ ID NO: 702928 - DNA, 25 bp, Homo sapien
aggcggcggcagccccggctactta

SEQ ID NO: 702929 - DNA, 25 bp, Homo sapien
caggcggcggcagccccggctactt

SEQ ID NO: 702930 - DNA, 25 bp, Homo sapien
ctcaggcggcggcagccccggctac

SEQ ID NO: 702931 - DNA, 25 bp, Homo sapien
gtgacgggcggaccaccgggtgcta

SEQ ID NO: 702932 - DNA, 25 bp, Homo sapien
ccaggaaagagggatcagtgacggg

SEQ ID NO: 702933 - DNA, 25 bp, Homo sapien
tgctacgttccgctcccggcccggc

SEQ ID NO: 702934 - DNA, 25 bp, Homo sapien
agggatcagtgacgggcggaccacc

SEQ ID NO: 702935 - DNA, 25 bp, Homo sapien
ccccactgtgaggcgatcctggcgc

SEQ ID NO: 702936 - DNA, 25 bp, Homo sapien
attcatcaacttggccgactcgtac

SEQ ID NO: 702937 - DNA, 25 bp, Homo sapien
tggcgctgagcggccaccaaaagct

SEQ ID NO: 702938 - DNA, 25 bp, Homo sapien
ccaccgcggcggtcaccgtctgcat

SEQ ID NO: 702939 - DNA, 25 bp, Homo sapien
caaaaaaggagcgtgcaagagcaaa

SEQ ID NO: 702940 - DNA, 25 bp, Homo sapien
gacgatacatcaggatacggcagcc

SEQ ID NO: 702941 - DNA, 25 bp, Homo sapien
caagacaagcgtgcggaaagcgtcc

SEQ ID NO: 702942 - DNA, 25 bp, Homo sapien
cgatccacaaaacggcagagaagct

SEQ ID NO: 702943 - DNA, 25 bp, Homo sapien
gatttgcagggcgatgtcatcctcc

SEQ ID NO: 702944 - DNA, 25 bp, Homo sapien
cctcctcctcgtcaatggccaagag

SEQ ID NO: 702945 - DNA, 25 bp, Homo sapien
cccgacacccgcacgatgttgatgt

SEQ ID NO: 702946 - DNA, 25 bp, Homo sapien
ttgatgtcgttgtcacagcagaagg

SEQ ID NO: 702947 - DNA, 25 bp, Homo sapien
agtcaggctcaaaatagcttcctgg

SEQ ID NO: 702948 - DNA, 25 bp, Homo sapien
ctgcccacgggacatgccaaacgtg

SEQ ID NO: 702949 - DNA, 25 bp, Homo sapien
gccaaacgtggctgagcgctgagct

SEQ ID NO: 702950 - DNA, 25 bp, Homo sapien
cagtcagcccgactttgttgacaaa

SEQ ID NO: 702951 - DNA, 25 bp, Homo sapien
tttcttcgcagtagctggccacctc

SEQ ID NO: 702952 - DNA, 25 bp, Homo sapien
gtggctcttccaggcgtccgtgtga

SEQ ID NO: 702953 - DNA, 25 bp, Homo sapien
tgttgccccggctttcttcgcagta

SEQ ID NO: 702954 - DNA, 25 bp, Homo sapien
tggccacctccaccaagccgtggct

SEQ ID NO: 702955 - DNA, 25 bp, Homo sapien
ctgaagagagatgtaggggacccac

SEQ ID NO: 702956 - DNA, 25 bp, Homo sapien
cctgaagagagatgtaggggaccca

SEQ ID NO: 702957 - DNA, 25 bp, Homo sapien
gtggcagcaactcaacagattctgc

SEQ ID NO: 702958 - DNA, 25 bp, Homo sapien
tggcagcaactcaacagattctgct

SEQ ID NO: 702959 - DNA, 25 bp, Homo sapien
ggcagcaactcaacagattctgctg

SEQ ID NO: 702960 - DNA, 25 bp, Homo sapien
tgtggcagcaactcaacagattctg

SEQ ID NO: 702961 - DNA, 25 bp, Homo sapien
cctcttcagtctccaacgactctgc

SEQ ID NO: 702962 - DNA, 25 bp, Homo sapien
ccgatggtcctcgtgggttgggttg

SEQ ID NO: 702963 - DNA, 25 bp, Homo sapien
cgatggtcctcgtgggttgggttgt

SEQ ID NO: 702964 - DNA, 25 bp, Homo sapien
ccaacgactctgcccccgatggtcc

SEQ ID NO: 702965 - DNA, 25 bp, Homo sapien
agctcctggatctccgccctggggg

SEQ ID NO: 702966 - DNA, 25 bp, Homo sapien
ttctccatcggatcggcggccgcca

SEQ ID NO: 702967 - DNA, 25 bp, Homo sapien
gtccccccttctccatcggatcggc

SEQ ID NO: 702968 - DNA, 25 bp, Homo sapien
cagcttcgggggtcctgtctcctgc

SEQ ID NO: 702969 - DNA, 25 bp, Homo sapien
ccgagtggacagtctggaccctccg

SEQ ID NO: 702970 - DNA, 25 bp, Homo sapien
agtggacagtctggaccctccgtga

SEQ ID NO: 702971 - DNA, 25 bp, Homo sapien
tccacccccgagtggacagtctgga

SEQ ID NO: 702972 - DNA, 25 bp, Homo sapien
ccccgagtggacagtctggaccctc

SEQ ID NO: 702973 - DNA, 25 bp, Homo sapien
caaactgggagttcatgggtacaga

SEQ ID NO: 702974 - DNA, 25 bp, Homo sapien
tctcagtggttcgaataacaagtgc

SEQ ID NO: 702975 - DNA, 25 bp, Homo sapien
ggtgcagacaaggaccaaccaagtt

SEQ ID NO: 702976 - DNA, 25 bp, Homo sapien
cagctcccaagtcccaaagtgtggt

SEQ ID NO: 702977 - DNA, 25 bp, Homo sapien
gcctccatatgtgcccagagcttgg

SEQ ID NO: 702978 - DNA, 25 bp, Homo sapien
ttgaccgatccggaccttgggctgc

SEQ ID NO: 702979 - DNA, 25 bp, Homo sapien
agtaacagtggtggcacggcggcca

SEQ ID NO: 702980 - DNA, 25 bp, Homo sapien
ttgggctgcggtggccgcctaggcg

SEQ ID NO: 702981 - DNA, 25 bp, Homo sapien
gcacctggcagatcaacgtgtgtcc

SEQ ID NO: 702982 - DNA, 25 bp, Homo sapien
cctggcagatcaacgtgtgtccctt

SEQ ID NO: 702983 - DNA, 25 bp, Homo sapien
tggcagatcaacgtgtgtcccttag

SEQ ID NO: 702984 - DNA, 25 bp, Homo sapien
cgtgtgtcccttagggccgaaactg

SEQ ID NO: 702985 - DNA, 25 bp, Homo sapien
ctgcgtacagacactcaccgagaac

SEQ ID NO: 702986 - DNA, 25 bp, Homo sapien
tgcgtacagacactcaccgagaacc

SEQ ID NO: 702987 - DNA, 25 bp, Homo sapien
cgtacagacactcaccgagaacccc

SEQ ID NO: 702988 - DNA, 25 bp, Homo sapien
tacagacactcaccgagaaccccct

SEQ ID NO: 702989 - DNA, 25 bp, Homo sapien
gcagcgcgttttgctaagtgcctta

SEQ ID NO: 702990 - DNA, 25 bp, Homo sapien
gggatttctccgtctcgagcacccg

SEQ ID NO: 702991 - DNA, 25 bp, Homo sapien
tgcagggaaactaggacaggcccct

SEQ ID NO: 702992 - DNA, 25 bp, Homo sapien
taataagggttctcaaggcagcgcg

SEQ ID NO: 702993 - DNA, 25 bp, Homo sapien
aggagggagacgccgccggagctgc

SEQ ID NO: 702994 - DNA, 25 bp, Homo sapien
gaggagggagacgccgccggagctg

SEQ ID NO: 702995 - DNA, 25 bp, Homo sapien
tttcacacaaaagacgggctgcgca

SEQ ID NO: 702996 - DNA, 25 bp, Homo sapien
cacgaagacggagatctgcacacag

SEQ ID NO: 702997 - DNA, 25 bp, Homo sapien
cacacagtaggccttgcatgcaaga

SEQ ID NO: 702998 - DNA, 25 bp, Homo sapien
gaagacagcgatctgcacacagtgg

SEQ ID NO: 702999 - DNA, 25 bp, Homo sapien
gtgggcgatgactctcaggctgttc

SEQ ID NO: 703000 - DNA, 25 bp, Homo sapien
tccccaccagtctgggagctaatta

SEQ ID NO: 703001 - DNA, 25 bp, Homo sapien
cccggtgcccgtggcctgtgggcgt

SEQ ID NO: 703002 - DNA, 25 bp, Homo sapien
gggcgtggagccgtgggcgatgact

SEQ ID NO: 703003 - DNA, 25 bp, Homo sapien
caaaggtaggcatgcgtgtgcacga

SEQ ID NO: 703004 - DNA, 25 bp, Homo sapien
gcacaatcccgcgtgaaatgcaaag

SEQ ID NO: 703005 - DNA, 25 bp, Homo sapien
ccttcgtggaatgaacagtgggtat

SEQ ID NO: 703006 - DNA, 25 bp, Homo sapien
tctgcagggacgcatcgcatgggca

SEQ ID NO: 703007 - DNA, 25 bp, Homo sapien
ctctgcactgactggttgtggctgc

SEQ ID NO: 703008 - DNA, 25 bp, Homo sapien
gagggagctcctagcatgcaagcag

SEQ ID NO: 703009 - DNA, 25 bp, Homo sapien
cttattaaaaagtccacggcctgag

SEQ ID NO: 703010 - DNA, 25 bp, Homo sapien
gagttgtcgataccacgtgaattca

SEQ ID NO: 703011 - DNA, 25 bp, Homo sapien
ctgagcgagacaccagtagccaggt

SEQ ID NO: 703012 - DNA, 25 bp, Homo sapien
ccgggaatccctggggtgaacgcat

SEQ ID NO: 703013 - DNA, 25 bp, Homo sapien
cgcgtgcacctccagacggggagct

SEQ ID NO: 703014 - DNA, 25 bp, Homo sapien
tttatgggcgtttccaggagcgcgc

SEQ ID NO: 703015 - DNA, 25 bp, Homo sapien
ggtgaacgcatgttttatgggcgtt

SEQ ID NO: 703016 - DNA, 25 bp, Homo sapien
catcttggtaactgggaacaaacac

SEQ ID NO: 703017 - DNA, 25 bp, Homo sapien
aatacctttgcagacgtggcacccg

SEQ ID NO: 703018 - DNA, 25 bp, Homo sapien
aggcgtctaagaacccgtgccgaga

SEQ ID NO: 703019 - DNA, 25 bp, Homo sapien
ggccccagtggagacaggcgtctaa

SEQ ID NO: 703020 - DNA, 25 bp, Homo sapien
tctgaggccgggagatgccttagac

SEQ ID NO: 703021 - DNA, 25 bp, Homo sapien
ctgtcgctcgaacccgatctttttg

SEQ ID NO: 703022 - DNA, 25 bp, Homo sapien
gccttagacgcaggatgggccactc

SEQ ID NO: 703023 - DNA, 25 bp, Homo sapien
cccagcggcaagtggaaatcgaaga

SEQ ID NO: 703024 - DNA, 25 bp, Homo sapien
ggtgagacgttgtcccggagatcaa

SEQ ID NO: 703025 - DNA, 25 bp, Homo sapien
cgcgcccagtgtgttttaagcatga

SEQ ID NO: 703026 - DNA, 25 bp, Homo sapien
ttaagcatgaggcatccgcgtggct

SEQ ID NO: 703027 - DNA, 25 bp, Homo sapien
tgggagaggctttgaccatccttgg

SEQ ID NO: 703028 - DNA, 25 bp, Homo sapien
caccgtattggccaggccgctctca

SEQ ID NO: 703029 - DNA, 25 bp, Homo sapien
tgcagctgcatgatttcagctcacc

SEQ ID NO: 703030 - DNA, 25 bp, Homo sapien
gctgcatgatttcagctcaccgcaa

SEQ ID NO: 703031 - DNA, 25 bp, Homo sapien
ccgtattggccaggccgctctcaaa

SEQ ID NO: 703032 - DNA, 25 bp, Homo sapien
tgaattttcaggtccgaccccatgg

SEQ ID NO: 703033 - DNA, 25 bp, Homo sapien
taaaaagacttcatagggtcactgg

SEQ ID NO: 703034 - DNA, 25 bp, Homo sapien
gtttcaattgtggaccggcgccgag

SEQ ID NO: 703035 - DNA, 25 bp, Homo sapien
gatggaggctttacggccacttccc

SEQ ID NO: 703036 - DNA, 25 bp, Homo sapien
cccctcagagggttggagtcatcag

SEQ ID NO: 703037 - DNA, 25 bp, Homo sapien
tctggcaacgcttgctgaaggaagc

SEQ ID NO: 703038 - DNA, 25 bp, Homo sapien
caagagaaacatggagacgggctta

SEQ ID NO: 703039 - DNA, 25 bp, Homo sapien
tacgggatgagatccagggccagat

SEQ ID NO: 703040 - DNA, 25 bp, Homo sapien
aggagggccgcttcccaaatagaag

SEQ ID NO: 703041 - DNA, 25 bp, Homo sapien
tgccaaggtgccacgtgctggagcc

SEQ ID NO: 703042 - DNA, 25 bp, Homo sapien
tggaggctatttctgtcgtccagga

SEQ ID NO: 703043 - DNA, 25 bp, Homo sapien
gctattttcggggtctggaggctat

SEQ ID NO: 703044 - DNA, 25 bp, Homo sapien
cagtttaccatccatggcatcaggg

SEQ ID NO: 703045 - DNA, 25 bp, Homo sapien
agggcctccgtagccactgcagctt

SEQ ID NO: 703046 - DNA, 25 bp, Homo sapien
agcacggctttccttattcctgatg

SEQ ID NO: 703047 - DNA, 25 bp, Homo sapien
tcatcatcgtcagaagataccagtt

SEQ ID NO: 703048 - DNA, 25 bp, Homo sapien
tttggatagcatcgtggagggatct

SEQ ID NO: 703049 - DNA, 25 bp, Homo sapien
tgctttggatagcatcgtggaggga

SEQ ID NO: 703050 - DNA, 25 bp, Homo sapien
ttggatagcatcgtggagggatctc

SEQ ID NO: 703051 - DNA, 25 bp, Homo sapien
ctttggatagcatcgtggagggatc

SEQ ID NO: 703052 - DNA, 25 bp, Homo sapien
caatgcagtgaggaattcaggaatc

SEQ ID NO: 703053 - DNA, 25 bp, Homo sapien
gctgttagagtagtgaaccttgtaa

SEQ ID NO: 703054 - DNA, 25 bp, Homo sapien
tatatatatctaggaagtctgaagc

SEQ ID NO: 703055 - DNA, 25 bp, Homo sapien
tctaggaagtctgaagccatcagca

SEQ ID NO: 703056 - DNA, 25 bp, Homo sapien
agaaagcctccgtgccgtgtcgttg

SEQ ID NO: 703057 - DNA, 25 bp, Homo sapien
tgtcgcctgaacgtattgctgtcct

SEQ ID NO: 703058 - DNA, 25 bp, Homo sapien
aactttctggatggtgtggtctgcg

SEQ ID NO: 703059 - DNA, 25 bp, Homo sapien
tgcctctgaagtgagaagcggagac

SEQ ID NO: 703060 - DNA, 25 bp, Homo sapien
caggaaggcggccacgtcacccctt

SEQ ID NO: 703061 - DNA, 25 bp, Homo sapien
caaggtcacagaacccagcctcaaa

SEQ ID NO: 703062 - DNA, 25 bp, Homo sapien
gcatttccaccgcaggagtctgttc

SEQ ID NO: 703063 - DNA, 25 bp, Homo sapien
gccacgtcaccccttttataaatga

SEQ ID NO: 703064 - DNA, 25 bp, Homo sapien
gaaatggaccctggcaccatgtatg

SEQ ID NO: 703065 - DNA, 25 bp, Homo sapien
tcacatgtatcttcacagtttcccc

SEQ ID NO: 703066 - DNA, 25 bp, Homo sapien
aaccaggaaatggaccctggcacca

SEQ ID NO: 703067 - DNA, 25 bp, Homo sapien
tcacacagagcaaaaaacatcacat

SEQ ID NO: 703068 - DNA, 25 bp, Homo sapien
ctttttctggcgtccatcccttcct

SEQ ID NO: 703069 - DNA, 25 bp, Homo sapien
tttttctggcgtccatcccttcctc

SEQ ID NO: 703070 - DNA, 25 bp, Homo sapien
ttttctggcgtccatcccttcctct

SEQ ID NO: 703071 - DNA, 25 bp, Homo sapien
agttgtccttattggagatcttggg

SEQ ID NO: 703072 - DNA, 25 bp, Homo sapien
ttagcctagtcgatgctagttgtcc

SEQ ID NO: 703073 - DNA, 25 bp, Homo sapien
gatgtccccgcagaacaggccgtca

SEQ ID NO: 703074 - DNA, 25 bp, Homo sapien
gccgtcacgggattagcctagtcga

SEQ ID NO: 703075 - DNA, 25 bp, Homo sapien
gagatggatccagtcccgatgtcca

SEQ ID NO: 703076 - DNA, 25 bp, Homo sapien
tcggacatggatctgaattattatt

SEQ ID NO: 703077 - DNA, 25 bp, Homo sapien
tttttatcggacatggatctgaatt

SEQ ID NO: 703078 - DNA, 25 bp, Homo sapien
cagagatggatccagtcccgatgtc

SEQ ID NO: 703079 - DNA, 25 bp, Homo sapien
tctgcgcagacactcccggtgccgc

SEQ ID NO: 703080 - DNA, 25 bp, Homo sapien
aggctaacaccctcggatctctgcg

SEQ ID NO: 703081 - DNA, 25 bp, Homo sapien
gatgcgtgtcatagatggttaaggt

SEQ ID NO: 703082 - DNA, 25 bp, Homo sapien
gtgtcatagatggttaaggtgcagc

SEQ ID NO: 703083 - DNA, 25 bp, Homo sapien
cggtgacagtcgcatatgatgagat

SEQ ID NO: 703084 - DNA, 25 bp, Homo sapien
ttgactcaaaatacacacggcggtg

SEQ ID NO: 703085 - DNA, 25 bp, Homo sapien
tacacacggcggtgacagtcgcata

SEQ ID NO: 703086 - DNA, 25 bp, Homo sapien
tcatcgagccttggccgcctttgac

SEQ ID NO: 703087 - DNA, 25 bp, Homo sapien
cccggagagggctcagacttagcat

SEQ ID NO: 703088 - DNA, 25 bp, Homo sapien
gacttagcatttccggtgccaatgg

SEQ ID NO: 703089 - DNA, 25 bp, Homo sapien
tttccagtgcggacagtgcaaggcc

SEQ ID NO: 703090 - DNA, 25 bp, Homo sapien
gactttgcatttccagtgcggacag

SEQ ID NO: 703091 - DNA, 25 bp, Homo sapien
ggctgtttgtatccaccaagtatgg

SEQ ID NO: 703092 - DNA, 25 bp, Homo sapien
gtttcgggatctcggtgctgcagac

SEQ ID NO: 703093 - DNA, 25 bp, Homo sapien
acagcggtgctgcatgcctttccgg

SEQ ID NO: 703094 - DNA, 25 bp, Homo sapien
tttgcaccctggatgtaagacgtgg

SEQ ID NO: 703095 - DNA, 25 bp, Homo sapien
ggtgtagcagatcctgcaagattcc

SEQ ID NO: 703096 - DNA, 25 bp, Homo sapien
tagcagatcctgcaagattccagct

SEQ ID NO: 703097 - DNA, 25 bp, Homo sapien
gcagatcctgcaagattccagctgc

SEQ ID NO: 703098 - DNA, 25 bp, Homo sapien
gagcccaagggtgccagggcattcc

SEQ ID NO: 703099 - DNA, 25 bp, Homo sapien
agtggagctattttcacattgaggg

SEQ ID NO: 703100 - DNA, 25 bp, Homo sapien
tagaaatccgttcgttctcattttc

SEQ ID NO: 703101 - DNA, 25 bp, Homo sapien
atccttcctcgggactcagtggagc

SEQ ID NO: 703102 - DNA, 25 bp, Homo sapien
ggaaatagaaatccgttcgttctca

SEQ ID NO: 703103 - DNA, 25 bp, Homo sapien
tcgagggtggaaatgcgagttacga

SEQ ID NO: 703104 - DNA, 25 bp, Homo sapien
gggtggaaatgcgagttacgaccat

SEQ ID NO: 703105 - DNA, 25 bp, Homo sapien
gagggtggaaatgcgagttacgacc

SEQ ID NO: 703106 - DNA, 25 bp, Homo sapien
ctgtcgagggtggaaatgcgagtta

SEQ ID NO: 703107 - DNA, 25 bp, Homo sapien
caaacttgactatgtagaaaagctg

SEQ ID NO: 703108 - DNA, 25 bp, Homo sapien
tgtagaaaagctgcccgatggagtc

SEQ ID NO: 703109 - DNA, 25 bp, Homo sapien
caatggcacagttttcaaacttgac

SEQ ID NO: 703110 - DNA, 25 bp, Homo sapien
cgagtccgtttctggtgacgtacaa

SEQ ID NO: 703111 - DNA, 25 bp, Homo sapien
gttccagggtttgaccagtcgtcca

SEQ ID NO: 703112 - DNA, 25 bp, Homo sapien
tccaccgttgcagagagagacctgt

SEQ ID NO: 703113 - DNA, 25 bp, Homo sapien
cagatttttggtgggtcacaccggg

SEQ ID NO: 703114 - DNA, 25 bp, Homo sapien
ccgagcccgtgcacttgctgctgtt

SEQ ID NO: 703115 - DNA, 25 bp, Homo sapien
tgcaagtgtaattaagcggccgttt

SEQ ID NO: 703116 - DNA, 25 bp, Homo sapien
tcttgcgagcatatatgcaagtgta

SEQ ID NO: 703117 - DNA, 25 bp, Homo sapien
cctggaagaattcttgcgagcatat

SEQ ID NO: 703118 - DNA, 25 bp, Homo sapien
acaccgagctcagcgtctcctggaa

SEQ ID NO: 703119 - DNA, 25 bp, Homo sapien
ttgtctggaaatcggagggaccgtc

SEQ ID NO: 703120 - DNA, 25 bp, Homo sapien
tttttcctcacggacaccatgggcg

SEQ ID NO: 703121 - DNA, 25 bp, Homo sapien
gaaggccactcctagctctgagagc

SEQ ID NO: 703122 - DNA, 25 bp, Homo sapien
ccatgggcgtggaccaaattcagaa

SEQ ID NO: 703123 - DNA, 25 bp, Homo sapien
gagagagagattgcacacatgtgtc

SEQ ID NO: 703124 - DNA, 25 bp, Homo sapien
gccaggtgggactatgtaggtaaca

SEQ ID NO: 703125 - DNA, 25 bp, Homo sapien
tgctgttgcaagactgaaggcctca

SEQ ID NO: 703126 - DNA, 25 bp, Homo sapien
tgttgctatccagcacgtggaccgg

SEQ ID NO: 703127 - DNA, 25 bp, Homo sapien
tcttccaccaagacagagacgttag

SEQ ID NO: 703128 - DNA, 25 bp, Homo sapien
ggccccggccagagatacatcaatt

SEQ ID NO: 703129 - DNA, 25 bp, Homo sapien
cgtcctggagtcgagtgtacctgca

SEQ ID NO: 703130 - DNA, 25 bp, Homo sapien
tgtgtccaacatacacggaagtggc

SEQ ID NO: 703131 - DNA, 25 bp, Homo sapien
tcatcgtgcagatcaagggcagcgt

SEQ ID NO: 703132 - DNA, 25 bp, Homo sapien
ggaagatgccggaacagagtaacga

SEQ ID NO: 703133 - DNA, 25 bp, Homo sapien
gacatccccgtgatgctcgtgggca

SEQ ID NO: 703134 - DNA, 25 bp, Homo sapien
tcagctgcgacaagagcgtgtgcac

SEQ ID NO: 703135 - DNA, 25 bp, Homo sapien
cctgccgagcccgccccaccgaggc

SEQ ID NO: 703136 - DNA, 25 bp, Homo sapien
ccctgccgagcccgccccaccgagg

SEQ ID NO: 703137 - DNA, 25 bp, Homo sapien
gccttcacctcgatgctcggaggct

SEQ ID NO: 703138 - DNA, 25 bp, Homo sapien
gcttttgggacagccggtgagcagc

SEQ ID NO: 703139 - DNA, 25 bp, Homo sapien
tgtcaccaataaagactcctcggcc

SEQ ID NO: 703140 - DNA, 25 bp, Homo sapien
ttcacctcgatgctcggaggctgcc

SEQ ID NO: 703141 - DNA, 25 bp, Homo sapien
agaaaatgatgaggcagcgcccagg

SEQ ID NO: 703142 - DNA, 25 bp, Homo sapien
ctggatccggagacaaaaggggaga

SEQ ID NO: 703143 - DNA, 25 bp, Homo sapien
gggagaaaatgatgaggcagcgccc

SEQ ID NO: 703144 - DNA, 25 bp, Homo sapien
tggatccggagacaaaaggggagaa

SEQ ID NO: 703145 - DNA, 25 bp, Homo sapien
acccagtgccatcttcgtccgaatg

SEQ ID NO: 703146 - DNA, 25 bp, Homo sapien
aactccaagcgcagagcacccagtg

SEQ ID NO: 703147 - DNA, 25 bp, Homo sapien
gaagcccctcgttgggttctcagca

SEQ ID NO: 703148 - DNA, 25 bp, Homo sapien
aattaactccgggacttgagctcgg

SEQ ID NO: 703149 - DNA, 25 bp, Homo sapien
agaggagcctctgacaccacgttgt

SEQ ID NO: 703150 - DNA, 25 bp, Homo sapien
gcagaaggatgtctcttgagccact

SEQ ID NO: 703151 - DNA, 25 bp, Homo sapien
gagccacttttggtcggctgtcacc

SEQ ID NO: 703152 - DNA, 25 bp, Homo sapien
tcaggaggcacgaaaggagctttcc

SEQ ID NO: 703153 - DNA, 25 bp, Homo sapien
ggagtagtcacacagcccctgtaag

SEQ ID NO: 703154 - DNA, 25 bp, Homo sapien
gtataggagcttcgcagtgtcctga

SEQ ID NO: 703155 - DNA, 25 bp, Homo sapien
gaacctgtgtctgaacctcttaccg

SEQ ID NO: 703156 - DNA, 25 bp, Homo sapien
cagtccatcaatctagtcagatggg

SEQ ID NO: 703157 - DNA, 25 bp, Homo sapien
gaactctggccctgccgtgacgagg

SEQ ID NO: 703158 - DNA, 25 bp, Homo sapien
gcctttcatgagacatttcatcctg

SEQ ID NO: 703159 - DNA, 25 bp, Homo sapien
tgttgtgggcgtttacagcctgcct

SEQ ID NO: 703160 - DNA, 25 bp, Homo sapien
cactttggtctcgaggtctctctgg

SEQ ID NO: 703161 - DNA, 25 bp, Homo sapien
ttggccctaaaacagccaccaggaa

SEQ ID NO: 703162 - DNA, 25 bp, Homo sapien
ggtaggcgcagtaccgtgtatcgta

SEQ ID NO: 703163 - DNA, 25 bp, Homo sapien
cagggttgtcagtcggagcatcctg

SEQ ID NO: 703164 - DNA, 25 bp, Homo sapien
tgtatcgtaggtagcagtaggaacg

SEQ ID NO: 703165 - DNA, 25 bp, Homo sapien
cctggatgtttcatgggcccggggc

SEQ ID NO: 703166 - DNA, 25 bp, Homo sapien
cccagggaagcttacccctcctgtg

SEQ ID NO: 703167 - DNA, 25 bp, Homo sapien
tggatgtttcatgggcccggggccc

SEQ ID NO: 703168 - DNA, 25 bp, Homo sapien
ctgtcctggatgtttcatgggcccg

SEQ ID NO: 703169 - DNA, 25 bp, Homo sapien
cgttcgttgaaatagccgctgtggc

SEQ ID NO: 703170 - DNA, 25 bp, Homo sapien
taggtcatggcgatgttctctgcgc

SEQ ID NO: 703171 - DNA, 25 bp, Homo sapien
acacgtggccccgagtgtgtggaac

SEQ ID NO: 703172 - DNA, 25 bp, Homo sapien
tgtggaacgcttctggtgcagctgt

SEQ ID NO: 703173 - DNA, 25 bp, Homo sapien
ctttgaagctgccgtgcatttctac

SEQ ID NO: 703174 - DNA, 25 bp, Homo sapien
aactttgaagctgccgtgcatttct

SEQ ID NO: 703175 - DNA, 25 bp, Homo sapien
aaaactttgaagctgccgtgcattt

SEQ ID NO: 703176 - DNA, 25 bp, Homo sapien
ttgaagctgccgtgcatttctacgg

SEQ ID NO: 703177 - DNA, 25 bp, Homo sapien
cagaggcagagcgcctcaaaaccga

SEQ ID NO: 703178 - DNA, 25 bp, Homo sapien
ttccgaggaggactcagcagaggca

SEQ ID NO: 703179 - DNA, 25 bp, Homo sapien
aggcagagcgcctcaaaaccgaagg

SEQ ID NO: 703180 - DNA, 25 bp, Homo sapien
aggacctgaggagccccgcgcgaac

SEQ ID NO: 703181 - DNA, 25 bp, Homo sapien
cagactctgccggagatatttgaag

SEQ ID NO: 703182 - DNA, 25 bp, Homo sapien
gagatatttgaagcggctgccacgg

SEQ ID NO: 703183 - DNA, 25 bp, Homo sapien
tctgccggagatatttgaagcggct

SEQ ID NO: 703184 - DNA, 25 bp, Homo sapien
atttgaagcggctgccacgggcaag

SEQ ID NO: 703185 - DNA, 25 bp, Homo sapien
gcacgggggcctctcgtccgatgct

SEQ ID NO: 703186 - DNA, 25 bp, Homo sapien
tgcatgaccagctccggcacggggg

SEQ ID NO: 703187 - DNA, 25 bp, Homo sapien
ggcctacgccatcatccagttcctg

SEQ ID NO: 703188 - DNA, 25 bp, Homo sapien
gcctctcgtccgatgctcaggagag

SEQ ID NO: 703189 - DNA, 25 bp, Homo sapien
ggcagctgtcactgtagaagattcc

SEQ ID NO: 703190 - DNA, 25 bp, Homo sapien
tagaagattccttcaggcctcgccc

SEQ ID NO: 703191 - DNA, 25 bp, Homo sapien
tcaggcctcgcccttcctcgtccat

SEQ ID NO: 703192 - DNA, 25 bp, Homo sapien
tcactgtagaagattccttcaggcc

SEQ ID NO: 703193 - DNA, 25 bp, Homo sapien
tttgtacactgggtttcacctgttg

SEQ ID NO: 703194 - DNA, 25 bp, Homo sapien
aaattaccatcttaatcagttataa

SEQ ID NO: 703195 - DNA, 25 bp, Homo sapien
gccacggccgcctgaggaccaaggg

SEQ ID NO: 703196 - DNA, 25 bp, Homo sapien
ctgctacgcgtccagccacctcggc

SEQ ID NO: 703197 - DNA, 25 bp, Homo sapien
cgccacggccgcctgaggaccaagg

SEQ ID NO: 703198 - DNA, 25 bp, Homo sapien
tccctccttccacctgctacgcgtc

SEQ ID NO: 703199 - DNA, 25 bp, Homo sapien
ccaccgcaggtcgtttaccacagag

SEQ ID NO: 703200 - DNA, 25 bp, Homo sapien
cctggtcatacacgcgcttggtctg

SEQ ID NO: 703201 - DNA, 25 bp, Homo sapien
taccacagagcacggagatgctgcg

SEQ ID NO: 703202 - DNA, 25 bp, Homo sapien
aaactcctgggtgccaacctggtca

SEQ ID NO: 703203 - DNA, 25 bp, Homo sapien
ggggaagtcaaggatattcctctga

SEQ ID NO: 703204 - DNA, 25 bp, Homo sapien
ctgggggaagtcaaggatattcctc

SEQ ID NO: 703205 - DNA, 25 bp, Homo sapien
gggaagtcaaggatattcctctgaa

SEQ ID NO: 703206 - DNA, 25 bp, Homo sapien
tgggggaagtcaaggatattcctct

SEQ ID NO: 703207 - DNA, 25 bp, Homo sapien
tctccacgtcgaactcagagagctt

SEQ ID NO: 703208 - DNA, 25 bp, Homo sapien
gagccacacgatcctctggtacacg

SEQ ID NO: 703209 - DNA, 25 bp, Homo sapien
tgctggctgtccggatgtccttgga

SEQ ID NO: 703210 - DNA, 25 bp, Homo sapien
agagcttcttgtcggcctctgtgct

SEQ ID NO: 703211 - DNA, 25 bp, Homo sapien
attagccgctccaggtaccgcgcag

SEQ ID NO: 703212 - DNA, 25 bp, Homo sapien
ttgattagccgctccaggtaccgcg

SEQ ID NO: 703213 - DNA, 25 bp, Homo sapien
gcttgattagccgctccaggtaccg

SEQ ID NO: 703214 - DNA, 25 bp, Homo sapien
tgattagccgctccaggtaccgcgc

SEQ ID NO: 703215 - DNA, 25 bp, Homo sapien
aggttcttgttgaagtcgatgcaca

SEQ ID NO: 703216 - DNA, 25 bp, Homo sapien
gaagtcgatgcacagaaggctcagc

SEQ ID NO: 703217 - DNA, 25 bp, Homo sapien
aaggtcgtgtcctcgttcaggttct

SEQ ID NO: 703218 - DNA, 25 bp, Homo sapien
gcttcttcttgatgcgtttgatgtt

SEQ ID NO: 703219 - DNA, 25 bp, Homo sapien
ctcaggaaacatacgcccaggtgac

SEQ ID NO: 703220 - DNA, 25 bp, Homo sapien
caggctgggaaacgtgctttacggc

SEQ ID NO: 703221 - DNA, 25 bp, Homo sapien
attgtagcccgtcgtctctcctgag

SEQ ID NO: 703222 - DNA, 25 bp, Homo sapien
gacctgcgagtgttccctcaggaaa

SEQ ID NO: 703223 - DNA, 25 bp, Homo sapien
caggctgcaatggatagttcacgaa

SEQ ID NO: 703224 - DNA, 25 bp, Homo sapien
gctccctggcagtggtgaacacatc

SEQ ID NO: 703225 - DNA, 25 bp, Homo sapien
taactgttaacggtgcccaggaatg

SEQ ID NO: 703226 - DNA, 25 bp, Homo sapien
catgtccaacagtaagagtgggctc

SEQ ID NO: 703227 - DNA, 25 bp, Homo sapien
gagggtgaccttcaacttgccgtcc

SEQ ID NO: 703228 - DNA, 25 bp, Homo sapien
aggcacgtggcatttcttcaggagg

SEQ ID NO: 703229 - DNA, 25 bp, Homo sapien
tccagggagttcagaaagtcctcgg

SEQ ID NO: 703230 - DNA, 25 bp, Homo sapien
ttgcaccggcagttgaaggcctcct

SEQ ID NO: 703231 - DNA, 25 bp, Homo sapien
cacgtgaggcgtttacgaggagaaa

SEQ ID NO: 703232 - DNA, 25 bp, Homo sapien
cagttgaccttctaaggcgcagtgg

SEQ ID NO: 703233 - DNA, 25 bp, Homo sapien
agcaaggtctctgaggcggcacatc

SEQ ID NO: 703234 - DNA, 25 bp, Homo sapien
tgtaaccagcaggtgcgtgcagagc

SEQ ID NO: 703235 - DNA, 25 bp, Homo sapien
ggctctgcctatcgccaccagcaaa

SEQ ID NO: 703236 - DNA, 25 bp, Homo sapien
ttggttcccagtctcacgggctctg

SEQ ID NO: 703237 - DNA, 25 bp, Homo sapien
catgtccaggccttggttcccagtc

SEQ ID NO: 703238 - DNA, 25 bp, Homo sapien
tgtccgaggagcctccgagggcatc

SEQ ID NO: 703239 - DNA, 25 bp, Homo sapien
ttttggaaccagaaggggtgcagat

SEQ ID NO: 703240 - DNA, 25 bp, Homo sapien
ggtgcagatgactctaaggcctcac

SEQ ID NO: 703241 - DNA, 25 bp, Homo sapien
ctttttggaaccagaaggggtgcag

SEQ ID NO: 703242 - DNA, 25 bp, Homo sapien
aaggggtgcagatgactctaaggcc

SEQ ID NO: 703243 - DNA, 25 bp, Homo sapien
aaggtggccacggtctggctggtct

SEQ ID NO: 703244 - DNA, 25 bp, Homo sapien
accccagcaggcgggacttctgggc

SEQ ID NO: 703245 - DNA, 25 bp, Homo sapien
acatagtcggcgtgcgtgtggaacc

SEQ ID NO: 703246 - DNA, 25 bp, Homo sapien
gctccttgaggatagcgcagttctc

SEQ ID NO: 703247 - DNA, 25 bp, Homo sapien
caggttctggtccacgcagtagcgc

SEQ ID NO: 703248 - DNA, 25 bp, Homo sapien
tccacctggttcatgtagtagcgca

SEQ ID NO: 703249 - DNA, 25 bp, Homo sapien
gcgtccctcgcggtgtagagccgca

SEQ ID NO: 703250 - DNA, 25 bp, Homo sapien
cactggcgccctcctcgtggtggaa

SEQ ID NO: 703251 - DNA, 25 bp, Homo sapien
cgcgggtacaggtccaggtagaact

SEQ ID NO: 703252 - DNA, 25 bp, Homo sapien
tcagacgggcacaccgggctccgag

SEQ ID NO: 703253 - DNA, 25 bp, Homo sapien
gtgtgcccacgggtgctacgtctcg

SEQ ID NO: 703254 - DNA, 25 bp, Homo sapien
ggtgctacgtctcggggttcatccc

SEQ ID NO: 703255 - DNA, 25 bp, Homo sapien
tctcagacgggcacaccgggctccg

SEQ ID NO: 703256 - DNA, 25 bp, Homo sapien
caaactcatggaagtaggtctccac

SEQ ID NO: 703257 - DNA, 25 bp, Homo sapien
accatggccgcgatggcgatctggc

SEQ ID NO: 703258 - DNA, 25 bp, Homo sapien
aaagcaggccgcgtgcccgtacttt

SEQ ID NO: 703259 - DNA, 25 bp, Homo sapien
cacctcgtcatgctgcagcagcgag

SEQ ID NO: 703260 - DNA, 25 bp, Homo sapien
tcagtgacttcataggacagagcct

SEQ ID NO: 703261 - DNA, 25 bp, Homo sapien
taaaaggccccaagcgttgtgcaga

SEQ ID NO: 703262 - DNA, 25 bp, Homo sapien
gatcagttggcgaacacgtgaccag

SEQ ID NO: 703263 - DNA, 25 bp, Homo sapien
tgtctaaggaggtcactacggtcaa

SEQ ID NO: 703264 - DNA, 25 bp, Homo sapien
agctgccacagtgcaaacagggcga

SEQ ID NO: 703265 - DNA, 25 bp, Homo sapien
gaaaggtggacacacggtcgatcct

SEQ ID NO: 703266 - DNA, 25 bp, Homo sapien
gctcgtgtgtgtgtggaaccttccc

SEQ ID NO: 703267 - DNA, 25 bp, Homo sapien
cacacgcgtgtgctggctacgagtg

SEQ ID NO: 703268 - DNA, 25 bp, Homo sapien
tgccgggactcaatgagcttctcca

SEQ ID NO: 703269 - DNA, 25 bp, Homo sapien
cggtagtgccgcgacatccgcagca

SEQ ID NO: 703270 - DNA, 25 bp, Homo sapien
ctgtgttggcctgccgggactcaat

SEQ ID NO: 703271 - DNA, 25 bp, Homo sapien
ctccacgtgggtcccgctgaacatg

SEQ ID NO: 703272 - DNA, 25 bp, Homo sapien
gcgtccgtctgcgtgtgcagggcct

SEQ ID NO: 703273 - DNA, 25 bp, Homo sapien
accttggcgaggacgatctggcgca

SEQ ID NO: 703274 - DNA, 25 bp, Homo sapien
agagccgcgcatactcctcggcggg

SEQ ID NO: 703275 - DNA, 25 bp, Homo sapien
gccgggaccccgaggatctcctggc

SEQ ID NO: 703276 - DNA, 25 bp, Homo sapien
ccgaaggttgcaggcatgttggttc

SEQ ID NO: 703277 - DNA, 25 bp, Homo sapien
ctgccagatggccgaaggttgcagg

SEQ ID NO: 703278 - DNA, 25 bp, Homo sapien
cagatggccgaaggttgcaggcatg

SEQ ID NO: 703279 - DNA, 25 bp, Homo sapien
tggccgaaggttgcaggcatgttgg

SEQ ID NO: 703280 - DNA, 25 bp, Homo sapien
gacaccctcctgcttgaagcgcgtg

SEQ ID NO: 703281 - DNA, 25 bp, Homo sapien
ttgaagcgcgtgtggaacatgtcca

SEQ ID NO: 703282 - DNA, 25 bp, Homo sapien
gctccacaggtacccgtagtactgg

SEQ ID NO: 703283 - DNA, 25 bp, Homo sapien
aacatgtccatggaatacacctcgc

SEQ ID NO: 703284 - DNA, 25 bp, Homo sapien
tgccgttcaggacgccctccctgtc

SEQ ID NO: 703285 - DNA, 25 bp, Homo sapien
gccgttcaggacgccctccctgtcc

SEQ ID NO: 703286 - DNA, 25 bp, Homo sapien
ttgccgttcaggacgccctccctgt

SEQ ID NO: 703287 - DNA, 25 bp, Homo sapien
cttgccgttcaggacgccctccctg

SEQ ID NO: 703288 - DNA, 25 bp, Homo sapien
aaggactcgtatgggaagacacgga

SEQ ID NO: 703289 - DNA, 25 bp, Homo sapien
gaggagcaaatgaatggcaaacgcc

SEQ ID NO: 703290 - DNA, 25 bp, Homo sapien
ggcaaacgccaagccttctccagag

SEQ ID NO: 703291 - DNA, 25 bp, Homo sapien
gctctgaggccgatcacgcagatcc

SEQ ID NO: 703292 - DNA, 25 bp, Homo sapien
atggcgtaacggccgcacttcatag

SEQ ID NO: 703293 - DNA, 25 bp, Homo sapien
taacggccgcacttcatagtgagga

SEQ ID NO: 703294 - DNA, 25 bp, Homo sapien
gcgtaacggccgcacttcatagtga

SEQ ID NO: 703295 - DNA, 25 bp, Homo sapien
aacggccgcacttcatagtgaggaa

SEQ ID NO: 703296 - DNA, 25 bp, Homo sapien
ctgggtcacaccaagtcagcgggag

SEQ ID NO: 703297 - DNA, 25 bp, Homo sapien
ttccttgtgagggactctggcggct

SEQ ID NO: 703298 - DNA, 25 bp, Homo sapien
aaagctggtagccacctgttccttg

SEQ ID NO: 703299 - DNA, 25 bp, Homo sapien
agtgcaatgttgcacccaggcaggg

SEQ ID NO: 703300 - DNA, 25 bp, Homo sapien
ggccgcctgcatcagcacaggtggg

SEQ ID NO: 703301 - DNA, 25 bp, Homo sapien
gagagcgcaggtgcctttcatcaga

SEQ ID NO: 703302 - DNA, 25 bp, Homo sapien
ggagagcgcaggtgcctttcatcag

SEQ ID NO: 703303 - DNA, 25 bp, Homo sapien
agagcgcaggtgcctttcatcagaa

SEQ ID NO: 703304 - DNA, 25 bp, Homo sapien
tggcatcctcggaaccgccgggtct

SEQ ID NO: 703305 - DNA, 25 bp, Homo sapien
ggcgctggcatcctcggaaccgccg

SEQ ID NO: 703306 - DNA, 25 bp, Homo sapien
gtctcaggatgcagcttctgtaatc

SEQ ID NO: 703307 - DNA, 25 bp, Homo sapien
tgcagcttctgtaatccatgccaac

SEQ ID NO: 703308 - DNA, 25 bp, Homo sapien
tgcggctcgggctcgcagcccccga

SEQ ID NO: 703309 - DNA, 25 bp, Homo sapien
gcggctcgggctcgcagcccccgac

SEQ ID NO: 703310 - DNA, 25 bp, Homo sapien
gaaagccctccagatgccttgagga

SEQ ID NO: 703311 - DNA, 25 bp, Homo sapien
caaagaagagccgtctcctgacaag

SEQ ID NO: 703312 - DNA, 25 bp, Homo sapien
ttgaggacgccgtctctagccgggt

SEQ ID NO: 703313 - DNA, 25 bp, Homo sapien
tcccagagaggagacgtgttagtgc

SEQ ID NO: 703314 - DNA, 25 bp, Homo sapien
caaggggccaaggagagtgacaacc

SEQ ID NO: 703315 - DNA, 25 bp, Homo sapien
caaagcccccgctctgtcctggagt

SEQ ID NO: 703316 - DNA, 25 bp, Homo sapien
ccaaggagagtgacaacctggacgg

SEQ ID NO: 703317 - DNA, 25 bp, Homo sapien
agccccctccctgtgatcaaagccc

SEQ ID NO: 703318 - DNA, 25 bp, Homo sapien
gcgctcggagcggacgccccccgca

SEQ ID NO: 703319 - DNA, 25 bp, Homo sapien
ctcggagcggacgccccccgcaggc

SEQ ID NO: 703320 - DNA, 25 bp, Homo sapien
cggcgctcggagcggacgccccccg

SEQ ID NO: 703321 - DNA, 25 bp, Homo sapien
cgcaggcgcccctcaggaactcgcc

SEQ ID NO: 703322 - DNA, 25 bp, Homo sapien
tcccctgcgtgtccctgggacgcct

SEQ ID NO: 703323 - DNA, 25 bp, Homo sapien
gaggcgccagacagggcccccgagg

SEQ ID NO: 703324 - DNA, 25 bp, Homo sapien
ggcgggagcgccccgtgcaggccgg

SEQ ID NO: 703325 - DNA, 25 bp, Homo sapien
gggcgcgcgctgaggcgccagacag

SEQ ID NO: 703326 - DNA, 25 bp, Homo sapien
gcgcgccggcccaggtgggcgcagg

SEQ ID NO: 703327 - DNA, 25 bp, Homo sapien
cgcgccggcccaggtgggcgcaggt

SEQ ID NO: 703328 - DNA, 25 bp, Homo sapien
ggggcaggtacccagcagccattct

SEQ ID NO: 703329 - DNA, 25 bp, Homo sapien
ggcaggtacccagcagccattctct

SEQ ID NO: 703330 - DNA, 25 bp, Homo sapien
agcggggcaggtacccagcagccat

SEQ ID NO: 703331 - DNA, 25 bp, Homo sapien
accagcggggcaggtacccagcagc

SEQ ID NO: 703332 - DNA, 25 bp, Homo sapien
cacactccatggagctagtgggagc

SEQ ID NO: 703333 - DNA, 25 bp, Homo sapien
acagttacagaaatattctttcagg

SEQ ID NO: 703334 - DNA, 25 bp, Homo sapien
agtggctgatgccatcatgtcagca

SEQ ID NO: 703335 - DNA, 25 bp, Homo sapien
tggagctagtgggagccccgtcctc

SEQ ID NO: 703336 - DNA, 25 bp, Homo sapien
tgagcggagattgtgccacggcaat

SEQ ID NO: 703337 - DNA, 25 bp, Homo sapien
agcggagattgtgccacggcaatcc

SEQ ID NO: 703338 - DNA, 25 bp, Homo sapien
gtgagcggagattgtgccacggcaa

SEQ ID NO: 703339 - DNA, 25 bp, Homo sapien
cagtgagcggagattgtgccacggc

SEQ ID NO: 703340 - DNA, 25 bp, Homo sapien
cacctctctgtacaggttcttctga

SEQ ID NO: 703341 - DNA, 25 bp, Homo sapien
cctctctgtacaggttcttctgagc

SEQ ID NO: 703342 - DNA, 25 bp, Homo sapien
tctgagcaggctccagcaactccca

SEQ ID NO: 703343 - DNA, 25 bp, Homo sapien
gcatcacctctctgtacaggttctt

SEQ ID NO: 703344 - DNA, 25 bp, Homo sapien
tatacatgctgatacaaaacccagt

SEQ ID NO: 703345 - DNA, 25 bp, Homo sapien
aaaattacagatctggttgggcgtg

SEQ ID NO: 703346 - DNA, 25 bp, Homo sapien
caagagtatacttgagaggtagcac

SEQ ID NO: 703347 - DNA, 25 bp, Homo sapien
tgctcgatgtcattggtcattaggg

SEQ ID NO: 703348 - DNA, 25 bp, Homo sapien
atcagtacattggttcttcaaggct

SEQ ID NO: 703349 - DNA, 25 bp, Homo sapien
tcagtacattggttcttcaaggctt

SEQ ID NO: 703350 - DNA, 25 bp, Homo sapien
taaataccccgtccatgaggaaaga

SEQ ID NO: 703351 - DNA, 25 bp, Homo sapien
gaagaagccactggttgaaaaagta

SEQ ID NO: 703352 - DNA, 25 bp, Homo sapien
ccatgaggaaagactagtgacttgt

SEQ ID NO: 703353 - DNA, 25 bp, Homo sapien
gactagtgacttgtgaggtttgtgc

SEQ ID NO: 703354 - DNA, 25 bp, Homo sapien
ggtcttcatggctgtcctctaactg

SEQ ID NO: 703355 - DNA, 25 bp, Homo sapien
ctgtgataaaacaagggctgggctc

SEQ ID NO: 703356 - DNA, 25 bp, Homo sapien
gccactacgtgaagggatgcctttt

SEQ ID NO: 703357 - DNA, 25 bp, Homo sapien
tgccttttggctcaaaagcccctgg

SEQ ID NO: 703358 - DNA, 25 bp, Homo sapien
tagtcagggccataccgtggttcaa

SEQ ID NO: 703359 - DNA, 25 bp, Homo sapien
tgttcgctcaaagaatgcctccggt

SEQ ID NO: 703360 - DNA, 25 bp, Homo sapien
gactgaatcggatgccaagcttgta

SEQ ID NO: 703361 - DNA, 25 bp, Homo sapien
caagatcaggtaagagctctggcag

SEQ ID NO: 703362 - DNA, 25 bp, Homo sapien
gatgtctgttctggtagaacgcttt

SEQ ID NO: 703363 - DNA, 25 bp, Homo sapien
tctgttctggtagaacgctttccca

SEQ ID NO: 703364 - DNA, 25 bp, Homo sapien
cccacagtcaatgattttataggtt

SEQ ID NO: 703365 - DNA, 25 bp, Homo sapien
tgtctgttctggtagaacgctttcc

SEQ ID NO: 703366 - DNA, 25 bp, Homo sapien
taacacgtgatggttcttggcaaga

SEQ ID NO: 703367 - DNA, 25 bp, Homo sapien
aatggcaactcctcccactaaaagg

SEQ ID NO: 703368 - DNA, 25 bp, Homo sapien
tactggacgtagtgtaatggcaact

SEQ ID NO: 703369 - DNA, 25 bp, Homo sapien
aaagtggcttacaaagcagcgtgca

SEQ ID NO: 703370 - DNA, 25 bp, Homo sapien
caaacggatctagctaagtggccaa

SEQ ID NO: 703371 - DNA, 25 bp, Homo sapien
ccaaagcgctttccgtcttagcata

SEQ ID NO: 703372 - DNA, 25 bp, Homo sapien
tatactctggatcagcacagtactg

SEQ ID NO: 703373 - DNA, 25 bp, Homo sapien
tggccaatgtgaaacactgaaacag

SEQ ID NO: 703374 - DNA, 25 bp, Homo sapien
tagaggactgacataggaaagcagc

SEQ ID NO: 703375 - DNA, 25 bp, Homo sapien
tttagaggactgacataggaaagca

SEQ ID NO: 703376 - DNA, 25 bp, Homo sapien
aaaatagtgtgcccgggctcggtgg

SEQ ID NO: 703377 - DNA, 25 bp, Homo sapien
aaaaatagtgtgcccgggctcggtg

SEQ ID NO: 703378 - DNA, 25 bp, Homo sapien
tgggggcgggacccgcagacgtgac

SEQ ID NO: 703379 - DNA, 25 bp, Homo sapien
gtgggggcgggacccgcagacgtga

SEQ ID NO: 703380 - DNA, 25 bp, Homo sapien
gggcgggacccgcagacgtgacgtc

SEQ ID NO: 703381 - DNA, 25 bp, Homo sapien
gcgggacccgcagacgtgacgtcat

SEQ ID NO: 703382 - DNA, 25 bp, Homo sapien
caacgtcggcgactctgattggaga

SEQ ID NO: 703383 - DNA, 25 bp, Homo sapien
ggctaggacagaggcgtcccgtccc

SEQ ID NO: 703384 - DNA, 25 bp, Homo sapien
gaagccgcgcttctgattggacagt

SEQ ID NO: 703385 - DNA, 25 bp, Homo sapien
gattagacagagctcgggaagccgc

SEQ ID NO: 703386 - DNA, 25 bp, Homo sapien
gcgcgacaggaaccgggacgccagg

SEQ ID NO: 703387 - DNA, 25 bp, Homo sapien
gcaggtgagcgcgacaggaaccggg

SEQ ID NO: 703388 - DNA, 25 bp, Homo sapien
aggtgagcgcgacaggaaccgggac

SEQ ID NO: 703389 - DNA, 25 bp, Homo sapien
gtgagcgcgacaggaaccgggacgc

SEQ ID NO: 703390 - DNA, 25 bp, Homo sapien
ctactaattaaatgtacgtttcact

SEQ ID NO: 703391 - DNA, 25 bp, Homo sapien
tctaagagacgaggaatactaccgc

SEQ ID NO: 703392 - DNA, 25 bp, Homo sapien
ggagagactgaattatggtgccaca

SEQ ID NO: 703393 - DNA, 25 bp, Homo sapien
tttaaaagcactacagggatcatct

SEQ ID NO: 703394 - DNA, 25 bp, Homo sapien
aaacacacacggaaggtggccacgt

SEQ ID NO: 703395 - DNA, 25 bp, Homo sapien
tgaggccaggttctgaaaggtctcc

SEQ ID NO: 703396 - DNA, 25 bp, Homo sapien
ctactgaggccaggttctgaaaggt

SEQ ID NO: 703397 - DNA, 25 bp, Homo sapien
tagaggtccctctgagcagaatcca

SEQ ID NO: 703398 - DNA, 25 bp, Homo sapien
tactgaggccaggttctgaaaggtc

SEQ ID NO: 703399 - DNA, 25 bp, Homo sapien
tctggtgaacgtggctattttagat

SEQ ID NO: 703400 - DNA, 25 bp, Homo sapien
gtgaacgtggctattttagattcct

SEQ ID NO: 703401 - DNA, 25 bp, Homo sapien
tttctggtgaacgtggctattttag

SEQ ID NO: 703402 - DNA, 25 bp, Homo sapien
tgagaaactgacccactggccttaa

SEQ ID NO: 703403 - DNA, 25 bp, Homo sapien
tcgatgctaagactgtcccaaattt

SEQ ID NO: 703404 - DNA, 25 bp, Homo sapien
tggtttgtggtttgatcttcgatgc

SEQ ID NO: 703405 - DNA, 25 bp, Homo sapien
ttgatcttcgatgctaagactgtcc

SEQ ID NO: 703406 - DNA, 25 bp, Homo sapien
ttctcccctggtttgtggtttgatc

SEQ ID NO: 703407 - DNA, 25 bp, Homo sapien
caggtggaattttcttgtacagatt

SEQ ID NO: 703408 - DNA, 25 bp, Homo sapien
gatgtgcggcgatgcatgaagactt

SEQ ID NO: 703409 - DNA, 25 bp, Homo sapien
tacagattaagatgtggaatctggc

SEQ ID NO: 703410 - DNA, 25 bp, Homo sapien
gacttttccgtacgtgttgtattca

SEQ ID NO: 703411 - DNA, 25 bp, Homo sapien
actgaatgctttcccgcactggttg

SEQ ID NO: 703412 - DNA, 25 bp, Homo sapien
tgaatccttacatgccgattgaggg

SEQ ID NO: 703413 - DNA, 25 bp, Homo sapien
tgtgaacgacaactgtaggcctgcc

SEQ ID NO: 703414 - DNA, 25 bp, Homo sapien
tccggtgtgacttctgagatgacta

SEQ ID NO: 703415 - DNA, 25 bp, Homo sapien
gggtgcattctcacatgttctcgaa

SEQ ID NO: 703416 - DNA, 25 bp, Homo sapien
gatttgtcttcagggtgcattctca

SEQ ID NO: 703417 - DNA, 25 bp, Homo sapien
ttctcacatgttctcgaaagcaagc

SEQ ID NO: 703418 - DNA, 25 bp, Homo sapien
catgttctcgaaagcaagcagacaa

SEQ ID NO: 703419 - DNA, 25 bp, Homo sapien
atgttgttgcaaaagttcaggccaa

SEQ ID NO: 703420 - DNA, 25 bp, Homo sapien
gttgcaaaagttcaggccaactgaa

SEQ ID NO: 703421 - DNA, 25 bp, Homo sapien
agtgtgcgttctcacatgttgttgc

SEQ ID NO: 703422 - DNA, 25 bp, Homo sapien
ttgttgcaaaagttcaggccaactg

SEQ ID NO: 703423 - DNA, 25 bp, Homo sapien
atgtcgccttaaggatgaggaacaa

SEQ ID NO: 703424 - DNA, 25 bp, Homo sapien
ccttaaggatgaggaacaattgaat

SEQ ID NO: 703425 - DNA, 25 bp, Homo sapien
cagtgtgcagtctcatatgtattgg

SEQ ID NO: 703426 - DNA, 25 bp, Homo sapien
ctcatatgtattggtaaagatgatg

SEQ ID NO: 703427 - DNA, 25 bp, Homo sapien
caccatatttacaactttgatcaga

SEQ ID NO: 703428 - DNA, 25 bp, Homo sapien
gatgtcctacattacacttatactg

SEQ ID NO: 703429 - DNA, 25 bp, Homo sapien
tctgaagcactgcacatgaattcat

SEQ ID NO: 703430 - DNA, 25 bp, Homo sapien
ttacaactttgatcagatctctctc

SEQ ID NO: 703431 - DNA, 25 bp, Homo sapien
gaatcagtggtcaagaggtcatgca

SEQ ID NO: 703432 - DNA, 25 bp, Homo sapien
gaaatcttaattcgcggtgcctcag

SEQ ID NO: 703433 - DNA, 25 bp, Homo sapien
tacagaacgggagaatcagaagctc

SEQ ID NO: 703434 - DNA, 25 bp, Homo sapien
tgttctcacataggactcggcaggc

SEQ ID NO: 703435 - DNA, 25 bp, Homo sapien
gagcccgtgttgcatcctgggaaca

SEQ ID NO: 703436 - DNA, 25 bp, Homo sapien
cccagggagctcagttaggacatca

SEQ ID NO: 703437 - DNA, 25 bp, Homo sapien
cacttcatggaaggcggaaactccc

SEQ ID NO: 703438 - DNA, 25 bp, Homo sapien
accacaccggaagctgaagagggca

SEQ ID NO: 703439 - DNA, 25 bp, Homo sapien
caagcgagcctcaccatatctggct

SEQ ID NO: 703440 - DNA, 25 bp, Homo sapien
gctgcgactacaagcgagcctcacc

SEQ ID NO: 703441 - DNA, 25 bp, Homo sapien
gactacaagcgagcctcaccatatc

SEQ ID NO: 703442 - DNA, 25 bp, Homo sapien
tacaagcgagcctcaccatatctgg

SEQ ID NO: 703443 - DNA, 25 bp, Homo sapien
tcctgttccaacacaacactgggct

SEQ ID NO: 703444 - DNA, 25 bp, Homo sapien
aagcgagagacaaagagagttattc

SEQ ID NO: 703445 - DNA, 25 bp, Homo sapien
tcaattaattgagacgtgcattaca

SEQ ID NO: 703446 - DNA, 25 bp, Homo sapien
gacaaagagagttattcaattaatt

SEQ ID NO: 703447 - DNA, 25 bp, Homo sapien
cctgtccgttcctgagctctttgag

SEQ ID NO: 703448 - DNA, 25 bp, Homo sapien
ctgctcctcgcagccggtgcaggtg

SEQ ID NO: 703449 - DNA, 25 bp, Homo sapien
gtgcaggtgagcacgacggggacac

SEQ ID NO: 703450 - DNA, 25 bp, Homo sapien
agctctttgaggagctccctgctcc

SEQ ID NO: 703451 - DNA, 25 bp, Homo sapien
agcgtgaaatccacaaccacgtctt

SEQ ID NO: 703452 - DNA, 25 bp, Homo sapien
gcgtgaaatccacaaccacgtcttc

SEQ ID NO: 703453 - DNA, 25 bp, Homo sapien
caaaccagaatcatctgagggaagg

SEQ ID NO: 703454 - DNA, 25 bp, Homo sapien
aaccaaaccagaatcatctgaggga

SEQ ID NO: 703455 - DNA, 25 bp, Homo sapien
ccaaaccagaatcatctgagggaag

SEQ ID NO: 703456 - DNA, 25 bp, Homo sapien
accaaaccagaatcatctgagggaa

SEQ ID NO: 703457 - DNA, 25 bp, Homo sapien
aaagtgaaccaatatgatgaggaag

SEQ ID NO: 703458 - DNA, 25 bp, Homo sapien
aaaaagtgaaccaatatgatgagga

SEQ ID NO: 703459 - DNA, 25 bp, Homo sapien
agtgaaccaatatgatgaggaaggc

SEQ ID NO: 703460 - DNA, 25 bp, Homo sapien
acaaaaaagtgaaccaatatgatga

SEQ ID NO: 703461 - DNA, 25 bp, Homo sapien
aatagacccactggctttaagctga

SEQ ID NO: 703462 - DNA, 25 bp, Homo sapien
gtctttaacgctatgttcttcccaa

SEQ ID NO: 703463 - DNA, 25 bp, Homo sapien
ctctccttggtgttgtgcttgtctt

SEQ ID NO: 703464 - DNA, 25 bp, Homo sapien
ctgctgagaaatagacccactggct

SEQ ID NO: 703465 - DNA, 25 bp, Homo sapien
ggtcacaaactcctcaccccaggtg

SEQ ID NO: 703466 - DNA, 25 bp, Homo sapien
tggtcacaaactcctcaccccaggt

SEQ ID NO: 703467 - DNA, 25 bp, Homo sapien
ctcaccccaggtgatccgcctccct

SEQ ID NO: 703468 - DNA, 25 bp, Homo sapien
gagcagctaggattacagccacatg

SEQ ID NO: 703469 - DNA, 25 bp, Homo sapien
cacgtgtcgttgaaaggatgttgcc

SEQ ID NO: 703470 - DNA, 25 bp, Homo sapien
tcacatgtgcgcgaaaggatttggg

SEQ ID NO: 703471 - DNA, 25 bp, Homo sapien
tttttggaagagcaaagcccgcctg

SEQ ID NO: 703472 - DNA, 25 bp, Homo sapien
gatgagggccaaccgaatgctttcc

SEQ ID NO: 703473 - DNA, 25 bp, Homo sapien
gaaccatgtatgtgaattaatttgc

SEQ ID NO: 703474 - DNA, 25 bp, Homo sapien
atgtgaattaatttgcacaggtttt

SEQ ID NO: 703475 - DNA, 25 bp, Homo sapien
tgaaccatgtatgtgaattaatttg

SEQ ID NO: 703476 - DNA, 25 bp, Homo sapien
tccatttgtatagaatccaacttct

SEQ ID NO: 703477 - DNA, 25 bp, Homo sapien
tctatgtgacaggaaatttccagag

SEQ ID NO: 703478 - DNA, 25 bp, Homo sapien
tccagagtttacctgataagccagt

SEQ ID NO: 703479 - DNA, 25 bp, Homo sapien
gagattgtattcagctctatgtgac

SEQ ID NO: 703480 - DNA, 25 bp, Homo sapien
cctagatatcactgtgcacatggga

SEQ ID NO: 703481 - DNA, 25 bp, Homo sapien
cgcaacgggctacaactgtgcagat

SEQ ID NO: 703482 - DNA, 25 bp, Homo sapien
acatgggaaaacactcgcaacgggc

SEQ ID NO: 703483 - DNA, 25 bp, Homo sapien
tctaatagctgctggaagtctaagc

SEQ ID NO: 703484 - DNA, 25 bp, Homo sapien
acgtcaccgcgctgccccgcgtggg

SEQ ID NO: 703485 - DNA, 25 bp, Homo sapien
ggaggggcgagcgagcggcgtgggt

SEQ ID NO: 703486 - DNA, 25 bp, Homo sapien
gcggggtcctcagccgtgacgtcac

SEQ ID NO: 703487 - DNA, 25 bp, Homo sapien
gagcgagcggcgtgggtcgcgtggg

SEQ ID NO: 703488 - DNA, 25 bp, Homo sapien
aacgggcacgagaagtccagactca

SEQ ID NO: 703489 - DNA, 25 bp, Homo sapien
gtggacactcccgtttgcgcgaact

SEQ ID NO: 703490 - DNA, 25 bp, Homo sapien
ccccggagcacctgattggaagata

SEQ ID NO: 703491 - DNA, 25 bp, Homo sapien
tgattggacagttttccggacccgc

SEQ ID NO: 703492 - DNA, 25 bp, Homo sapien
tctccaaggcgagctctccgtggcc

SEQ ID NO: 703493 - DNA, 25 bp, Homo sapien
tcgcggccggcgcagctgaaaggta

SEQ ID NO: 703494 - DNA, 25 bp, Homo sapien
gcggccggcgcagctgaaaggtaca

SEQ ID NO: 703495 - DNA, 25 bp, Homo sapien
ctctccgtggcctcgcggccggcgc

SEQ ID NO: 703496 - DNA, 25 bp, Homo sapien
tcagcagcctcaatcagcatgaaca

SEQ ID NO: 703497 - DNA, 25 bp, Homo sapien
gcatgaacagttcccgctgcggctg

SEQ ID NO: 703498 - DNA, 25 bp, Homo sapien
ggacaatcgtctttcccatgctcag

SEQ ID NO: 703499 - DNA, 25 bp, Homo sapien
atctccaggacaatcgtctttccca

SEQ ID NO: 703500 - DNA, 25 bp, Homo sapien
gaccgtgtggctttggactgtttct

SEQ ID NO: 703501 - DNA, 25 bp, Homo sapien
cagatgaccgtgtggctttggactg

SEQ ID NO: 703502 - DNA, 25 bp, Homo sapien
ttcacagccaggacgacgctccctg

SEQ ID NO: 703503 - DNA, 25 bp, Homo sapien
acgctccctggtagccacgcagcag

SEQ ID NO: 703504 - DNA, 25 bp, Homo sapien
ctgacccatctgtgcgatcagaaat

SEQ ID NO: 703505 - DNA, 25 bp, Homo sapien
tgacccatctgtgcgatcagaaatc

SEQ ID NO: 703506 - DNA, 25 bp, Homo sapien
gacccatctgtgcgatcagaaatca

SEQ ID NO: 703507 - DNA, 25 bp, Homo sapien
tgtggaaagagatgtatcccccatc

SEQ ID NO: 703508 - DNA, 25 bp, Homo sapien
ggaagaactgagaagcacttgtgaa

SEQ ID NO: 703509 - DNA, 25 bp, Homo sapien
cacttgtgaagttcagtgtcgcggg

SEQ ID NO: 703510 - DNA, 25 bp, Homo sapien
ttgtcccgccaagtgagaggagaag

SEQ ID NO: 703511 - DNA, 25 bp, Homo sapien
ctactgaggccaggttccggaaggt

SEQ ID NO: 703512 - DNA, 25 bp, Homo sapien
ccaggttccggaaggtctccagcat

SEQ ID NO: 703513 - DNA, 25 bp, Homo sapien
tgaggccaggttccggaaggtctcc

SEQ ID NO: 703514 - DNA, 25 bp, Homo sapien
gccaggttccggaaggtctccagca

SEQ ID NO: 703515 - DNA, 25 bp, Homo sapien
taaaaaccaagggaaggaatgatgc

SEQ ID NO: 703516 - DNA, 25 bp, Homo sapien
caagggaaggaatgatgccatcctc

SEQ ID NO: 703517 - DNA, 25 bp, Homo sapien
accaagggaaggaatgatgccatcc

SEQ ID NO: 703518 - DNA, 25 bp, Homo sapien
agggaaggaatgatgccatcctcac

SEQ ID NO: 703519 - DNA, 25 bp, Homo sapien
gaagtttggtattgtctgttcctta

SEQ ID NO: 703520 - DNA, 25 bp, Homo sapien
attggctttaaattgagtcccatca

SEQ ID NO: 703521 - DNA, 25 bp, Homo sapien
cccgtacatatcctgcagagaaact

SEQ ID NO: 703522 - DNA, 25 bp, Homo sapien
ggtggtcttcagtgccatagccttc

SEQ ID NO: 703523 - DNA, 25 bp, Homo sapien
gaagaaagatgcgtgaagactgtcc

SEQ ID NO: 703524 - DNA, 25 bp, Homo sapien
cagtgagacttgacgtgccttttaa

SEQ ID NO: 703525 - DNA, 25 bp, Homo sapien
cagaaactttcttgtgcagggtaag

SEQ ID NO: 703526 - DNA, 25 bp, Homo sapien
gaggtgcttttcgtccacagtgaga

SEQ ID NO: 703527 - DNA, 25 bp, Homo sapien
catgtggactcgcaaggtttcagac

SEQ ID NO: 703528 - DNA, 25 bp, Homo sapien
taaacgttgaggaccaagtgaaggc

SEQ ID NO: 703529 - DNA, 25 bp, Homo sapien
gaaagtttgcccacatgcttgacac

SEQ ID NO: 703530 - DNA, 25 bp, Homo sapien
tgtctagtgaagcttgcgaacccat

SEQ ID NO: 703531 - DNA, 25 bp, Homo sapien
caaatgaggtattgacaaagacaat

SEQ ID NO: 703532 - DNA, 25 bp, Homo sapien
ttcacgactaatgggtctgttttac

SEQ ID NO: 703533 - DNA, 25 bp, Homo sapien
caaagacaatatcatacttgtaaga

SEQ ID NO: 703534 - DNA, 25 bp, Homo sapien
gaaagagctggaaattcacgactaa

SEQ ID NO: 703535 - DNA, 25 bp, Homo sapien
aagtatgcttcaaatcaccatgggt

SEQ ID NO: 703536 - DNA, 25 bp, Homo sapien
actatagctgaaagaggacttagag

SEQ ID NO: 703537 - DNA, 25 bp, Homo sapien
tagctgaaagaggacttagagaatt

SEQ ID NO: 703538 - DNA, 25 bp, Homo sapien
tgggtctaatacagttcgaaatgaa

SEQ ID NO: 703539 - DNA, 25 bp, Homo sapien
ggttcaggatgtccgtaatctcccg

SEQ ID NO: 703540 - DNA, 25 bp, Homo sapien
tacacagagcatcgtccatcgtggg

SEQ ID NO: 703541 - DNA, 25 bp, Homo sapien
ctcgcagaagtagggaagttcgccc

SEQ ID NO: 703542 - DNA, 25 bp, Homo sapien
gaagatgaccgcaagctgctgcaac

SEQ ID NO: 703543 - DNA, 25 bp, Homo sapien
tgttggtcacctctcacaaggacat

SEQ ID NO: 703544 - DNA, 25 bp, Homo sapien
ctgttgggaaggtactcacggcatt

SEQ ID NO: 703545 - DNA, 25 bp, Homo sapien
tcattgcgctttgctccctgttggg

SEQ ID NO: 703546 - DNA, 25 bp, Homo sapien
tgtgtggctcagttccccaggctgt

SEQ ID NO: 703547 - DNA, 25 bp, Homo sapien
gtctggggtgacagcaaaagcggtc

SEQ ID NO: 703548 - DNA, 25 bp, Homo sapien
acagcaaaagcggtcaggggctcga

SEQ ID NO: 703549 - DNA, 25 bp, Homo sapien
gtgacagcaaaagcggtcaggggct

SEQ ID NO: 703550 - DNA, 25 bp, Homo sapien
acagcggccgaggggtagggctggg

SEQ ID NO: 703551 - DNA, 25 bp, Homo sapien
tgacacaatgtgagtatcctaagct

SEQ ID NO: 703552 - DNA, 25 bp, Homo sapien
ggaagtcacctattaagatgaagag

SEQ ID NO: 703553 - DNA, 25 bp, Homo sapien
aacaaaacgtgtcgttcaaatggcg

SEQ ID NO: 703554 - DNA, 25 bp, Homo sapien
catggtggtgcaacataagacaagc

SEQ ID NO: 703555 - DNA, 25 bp, Homo sapien
caactgataccatctgggtctgtcc

SEQ ID NO: 703556 - DNA, 25 bp, Homo sapien
caaggaaggcatttagcgagctaga

SEQ ID NO: 703557 - DNA, 25 bp, Homo sapien
cagctctcgggtgatattaggcaag

SEQ ID NO: 703558 - DNA, 25 bp, Homo sapien
taggcagatactttctcagtcggag

SEQ ID NO: 703559 - DNA, 25 bp, Homo sapien
ccttgatggtcccagccccgggcta

SEQ ID NO: 703560 - DNA, 25 bp, Homo sapien
gccccgggctatgcatttatcaccg

SEQ ID NO: 703561 - DNA, 25 bp, Homo sapien
gggctatgcatttatcaccgaattt

SEQ ID NO: 703562 - DNA, 25 bp, Homo sapien
tatcaccgaattttcccaactgctc

SEQ ID NO: 703563 - DNA, 25 bp, Homo sapien
atgctgtcactcagcgagccgggag

SEQ ID NO: 703564 - DNA, 25 bp, Homo sapien
gccggccatgctgtcactcagcgag

SEQ ID NO: 703565 - DNA, 25 bp, Homo sapien
gcgccggccaatagcgaggccgttt

SEQ ID NO: 703566 - DNA, 25 bp, Homo sapien
gtgggtcgcgtacgccctccctgat

SEQ ID NO: 703567 - DNA, 25 bp, Homo sapien
cgggcggaagctgcggaggtcagcc

SEQ ID NO: 703568 - DNA, 25 bp, Homo sapien
gtcagccaagttcaggccaagagga

SEQ ID NO: 703569 - DNA, 25 bp, Homo sapien
gcggaggtcagccaagttcaggcca

SEQ ID NO: 703570 - DNA, 25 bp, Homo sapien
gcggaagctgcggaggtcagccaag

SEQ ID NO: 703571 - DNA, 25 bp, Homo sapien
gcagtagcctccaagactttagcca

SEQ ID NO: 703572 - DNA, 25 bp, Homo sapien
ggtctgggctggtccctagaggtca

SEQ ID NO: 703573 - DNA, 25 bp, Homo sapien
gcccttgggtctgggctggtcccta

SEQ ID NO: 703574 - DNA, 25 bp, Homo sapien
gtcatcttcaaggcagtagcctcca

SEQ ID NO: 703575 - DNA, 25 bp, Homo sapien
cagagttcgagatcccaggacaagg

SEQ ID NO: 703576 - DNA, 25 bp, Homo sapien
gcttgagccgatttagaatgccctg

SEQ ID NO: 703577 - DNA, 25 bp, Homo sapien
gaatgccctgataattcagcgtcgg

SEQ ID NO: 703578 - DNA, 25 bp, Homo sapien
aattcagcgtcggagagctctcaga

SEQ ID NO: 703579 - DNA, 25 bp, Homo sapien
gcagcctctagaccactcactagga

SEQ ID NO: 703580 - DNA, 25 bp, Homo sapien
gggtattgccgggttctccatgctg

SEQ ID NO: 703581 - DNA, 25 bp, Homo sapien
cgtgagacctccggcccctggaatt

SEQ ID NO: 703582 - DNA, 25 bp, Homo sapien
gtttaatcaaaagctgggatgggta

SEQ ID NO: 703583 - DNA, 25 bp, Homo sapien
tccaactccgcagcaaaatgaggag

SEQ ID NO: 703584 - DNA, 25 bp, Homo sapien
tagtaaatgctctccaactccgcag

SEQ ID NO: 703585 - DNA, 25 bp, Homo sapien
tgctctccaactccgcagcaaaatg

SEQ ID NO: 703586 - DNA, 25 bp, Homo sapien
cgagtagtaaatgctctccaactcc

SEQ ID NO: 703587 - DNA, 25 bp, Homo sapien
ctgcttgtgatgttctgccacatcc

SEQ ID NO: 703588 - DNA, 25 bp, Homo sapien
cttgtgatgttctgccacatcctgc

SEQ ID NO: 703589 - DNA, 25 bp, Homo sapien
tgccacatcctgctggatcttgtgc

SEQ ID NO: 703590 - DNA, 25 bp, Homo sapien
gccacatcctgctggatcttgtgca

SEQ ID NO: 703591 - DNA, 25 bp, Homo sapien
tgaccaccctgaattgcaaccctcg

SEQ ID NO: 703592 - DNA, 25 bp, Homo sapien
agatgtcaccttctcgcatgccttc

SEQ ID NO: 703593 - DNA, 25 bp, Homo sapien
tttaagcctccgctcagatgtcacc

SEQ ID NO: 703594 - DNA, 25 bp, Homo sapien
tcatcccctaacactccatctacca

SEQ ID NO: 703595 - DNA, 25 bp, Homo sapien
gctctccacaatctgtaagacgttt

SEQ ID NO: 703596 - DNA, 25 bp, Homo sapien
tccacaatctgtaagacgtttccta

SEQ ID NO: 703597 - DNA, 25 bp, Homo sapien
ccacaatctgtaagacgtttcctat

SEQ ID NO: 703598 - DNA, 25 bp, Homo sapien
tctccacaatctgtaagacgtttcc

SEQ ID NO: 703599 - DNA, 25 bp, Homo sapien
agctttgaggatgagccttcaccca

SEQ ID NO: 703600 - DNA, 25 bp, Homo sapien
aggatgagccttcacccaagcctgt

SEQ ID NO: 703601 - DNA, 25 bp, Homo sapien
ctttgaggatgagccttcacccaag

SEQ ID NO: 703602 - DNA, 25 bp, Homo sapien
ttgaggatgagccttcacccaagcc

SEQ ID NO: 703603 - DNA, 25 bp, Homo sapien
gatgtcctcaaagctcgactcctgc

SEQ ID NO: 703604 - DNA, 25 bp, Homo sapien
cagagttgctcggtcagagtgtcgt

SEQ ID NO: 703605 - DNA, 25 bp, Homo sapien
tcagagtgtcgtgccaaaaccaagg

SEQ ID NO: 703606 - DNA, 25 bp, Homo sapien
gccggcaaaaatccgccagagttgc

SEQ ID NO: 703607 - DNA, 25 bp, Homo sapien
gccggagccagtcggaggacctggt

SEQ ID NO: 703608 - DNA, 25 bp, Homo sapien
ctgtctctgggctttgccttctcat

SEQ ID NO: 703609 - DNA, 25 bp, Homo sapien
tgggctttgccttctcatcgtggac

SEQ ID NO: 703610 - DNA, 25 bp, Homo sapien
gtctgtctctgggctttgccttctc

SEQ ID NO: 703611 - DNA, 25 bp, Homo sapien
ctctgggctttgccttctcatcgtg

SEQ ID NO: 703612 - DNA, 25 bp, Homo sapien
ctgcctgttaggaccagaagacctc

SEQ ID NO: 703613 - DNA, 25 bp, Homo sapien
cggattcctgggcagcttgcacagg

SEQ ID NO: 703614 - DNA, 25 bp, Homo sapien
cttgcacagggcttgtcagctgcct

SEQ ID NO: 703615 - DNA, 25 bp, Homo sapien
agacctcggattcctgggcagcttg

SEQ ID NO: 703616 - DNA, 25 bp, Homo sapien
tcacaggatcctggtgccttgcttt

SEQ ID NO: 703617 - DNA, 25 bp, Homo sapien
gggtcacaggatcctggtgccttgc

SEQ ID NO: 703618 - DNA, 25 bp, Homo sapien
cacaggatcctggtgccttgctttc

SEQ ID NO: 703619 - DNA, 25 bp, Homo sapien
caggatcctggtgccttgctttcct

SEQ ID NO: 703620 - DNA, 25 bp, Homo sapien
ctaagcggcttgcattggctcctca

SEQ ID NO: 703621 - DNA, 25 bp, Homo sapien
cctggagtcggtcggcccctgcccg

SEQ ID NO: 703622 - DNA, 25 bp, Homo sapien
gggctaagcggcttgcattggctcc

SEQ ID NO: 703623 - DNA, 25 bp, Homo sapien
acaagaggggctaagcggcttgcat

SEQ ID NO: 703624 - DNA, 25 bp, Homo sapien
acaccccaacttgtgttcctgtctt

SEQ ID NO: 703625 - DNA, 25 bp, Homo sapien
gaccacaccccaacttgtgttcctg

SEQ ID NO: 703626 - DNA, 25 bp, Homo sapien
ccccaacttgtgttcctgtcttggg

SEQ ID NO: 703627 - DNA, 25 bp, Homo sapien
tggaccacaccccaacttgtgttcc

SEQ ID NO: 703628 - DNA, 25 bp, Homo sapien
ggactgtagaaaccgagaggctctt

SEQ ID NO: 703629 - DNA, 25 bp, Homo sapien
atggactgtagaaaccgagaggctc

SEQ ID NO: 703630 - DNA, 25 bp, Homo sapien
tgtagaaaccgagaggctcttccag

SEQ ID NO: 703631 - DNA, 25 bp, Homo sapien
actgtagaaaccgagaggctcttcc

SEQ ID NO: 703632 - DNA, 25 bp, Homo sapien
tgttttaccctctagactcccctca

SEQ ID NO: 703633 - DNA, 25 bp, Homo sapien
ggagccacacatcaaggcctagagg

SEQ ID NO: 703634 - DNA, 25 bp, Homo sapien
cttcaagtattgtccctttgccaca

SEQ ID NO: 703635 - DNA, 25 bp, Homo sapien
actgacctgcttgtgagcccctttg

SEQ ID NO: 703636 - DNA, 25 bp, Homo sapien
cacgggacggcgagtctctttgact

SEQ ID NO: 703637 - DNA, 25 bp, Homo sapien
acgggacggcgagtctctttgactg

SEQ ID NO: 703638 - DNA, 25 bp, Homo sapien
gcacgggacggcgagtctctttgac

SEQ ID NO: 703639 - DNA, 25 bp, Homo sapien
tggcgagcacgagctccccgtgtgc

SEQ ID NO: 703640 - DNA, 25 bp, Homo sapien
cacgtgccgcgtgaagctgctgatg

SEQ ID NO: 703641 - DNA, 25 bp, Homo sapien
caggtgaacacgtgccgcgtgaagc

SEQ ID NO: 703642 - DNA, 25 bp, Homo sapien
tgctgatggccgtggcgagcacgag

SEQ ID NO: 703643 - DNA, 25 bp, Homo sapien
agggaacctgtcctcagccacctgt

SEQ ID NO: 703644 - DNA, 25 bp, Homo sapien
gccacctgtccagtcaggctccaca

SEQ ID NO: 703645 - DNA, 25 bp, Homo sapien
aggtggctctcagggaacctgtcct

SEQ ID NO: 703646 - DNA, 25 bp, Homo sapien
cagccacctgtccagtcaggctcca

SEQ ID NO: 703647 - DNA, 25 bp, Homo sapien
ggacagcaggcaggtgcgcaggaag

SEQ ID NO: 703648 - DNA, 25 bp, Homo sapien
ctgctgtttgaggacagcaggcagg

SEQ ID NO: 703649 - DNA, 25 bp, Homo sapien
aggcaggtgcgcaggaaggccccag

SEQ ID NO: 703650 - DNA, 25 bp, Homo sapien
gcaggcaggtgcgcaggaaggcccc

SEQ ID NO: 703651 - DNA, 25 bp, Homo sapien
tcacgctggccaggttgtagccacc

SEQ ID NO: 703652 - DNA, 25 bp, Homo sapien
ctggccaggttgtagccaccggtga

SEQ ID NO: 703653 - DNA, 25 bp, Homo sapien
acgctcacgctggccaggttgtagc

SEQ ID NO: 703654 - DNA, 25 bp, Homo sapien
ccaggttgtagccaccggtgagcag

SEQ ID NO: 703655 - DNA, 25 bp, Homo sapien
cacatgcagggagggcgccgccagg

SEQ ID NO: 703656 - DNA, 25 bp, Homo sapien
ccttcacatgcagggagggcgccgc

SEQ ID NO: 703657 - DNA, 25 bp, Homo sapien
gctccttcacatgcagggagggcgc

SEQ ID NO: 703658 - DNA, 25 bp, Homo sapien
ttcacatgcagggagggcgccgcca

SEQ ID NO: 703659 - DNA, 25 bp, Homo sapien
gaccacaccactggtgaagctggcg

SEQ ID NO: 703660 - DNA, 25 bp, Homo sapien
tgaccacaccactggtgaagctggc

SEQ ID NO: 703661 - DNA, 25 bp, Homo sapien
ctgaccacaccactggtgaagctgg

SEQ ID NO: 703662 - DNA, 25 bp, Homo sapien
gaccacactctgatcccgcaggtcc

SEQ ID NO: 703663 - DNA, 25 bp, Homo sapien
acactctgatcccgcaggtcccaga

SEQ ID NO: 703664 - DNA, 25 bp, Homo sapien
ctgaccacactctgatcccgcaggt

SEQ ID NO: 703665 - DNA, 25 bp, Homo sapien
actctgatcccgcaggtcccagatc

SEQ ID NO: 703666 - DNA, 25 bp, Homo sapien
gatactcttgactccatcaggataa

SEQ ID NO: 703667 - DNA, 25 bp, Homo sapien
gagacttgaattggtactccagagg

SEQ ID NO: 703668 - DNA, 25 bp, Homo sapien
gatgttgtagcccttgaccacgata

SEQ ID NO: 703669 - DNA, 25 bp, Homo sapien
cagaggtttcatgatggtcctctgg

SEQ ID NO: 703670 - DNA, 25 bp, Homo sapien
tttttgccccaccatgtgccgctgg

SEQ ID NO: 703671 - DNA, 25 bp, Homo sapien
gagaacttgacgctcaggatgacgc

SEQ ID NO: 703672 - DNA, 25 bp, Homo sapien
gctggctcccgctggtgctttgcag

SEQ ID NO: 703673 - DNA, 25 bp, Homo sapien
actgctggccattggccatgcccag

SEQ ID NO: 703674 - DNA, 25 bp, Homo sapien
caaggaagtcgtccattccaacgct

SEQ ID NO: 703675 - DNA, 25 bp, Homo sapien
gaagtcgtccattccaacgcttgcc

SEQ ID NO: 703676 - DNA, 25 bp, Homo sapien
gccggcatgctgtagacgccaagga

SEQ ID NO: 703677 - DNA, 25 bp, Homo sapien
tgctgtagacgccaaggaagtcgtc

SEQ ID NO: 703678 - DNA, 25 bp, Homo sapien
gaggcggttgttggaagagacgtca

SEQ ID NO: 703679 - DNA, 25 bp, Homo sapien
agcctgtgacaacgaggcggttgtt

SEQ ID NO: 703680 - DNA, 25 bp, Homo sapien
acggaggcgtgctccccggagcctg

SEQ ID NO: 703681 - DNA, 25 bp, Homo sapien
tggaagagacgtcacagcacgtgac

SEQ ID NO: 703682 - DNA, 25 bp, Homo sapien
ttcccgggtgctttattacacgtga

SEQ ID NO: 703683 - DNA, 25 bp, Homo sapien
ggcgaccagtctacaccacagacta

SEQ ID NO: 703684 - DNA, 25 bp, Homo sapien
cacagactagatcgtgcgatgccac

SEQ ID NO: 703685 - DNA, 25 bp, Homo sapien
tagatcgtgcgatgccacagaagag

SEQ ID NO: 703686 - DNA, 25 bp, Homo sapien
ctgtgtgtcttgaggcaagtcacta

SEQ ID NO: 703687 - DNA, 25 bp, Homo sapien
cctctggcgccgtggatacaaacgc

SEQ ID NO: 703688 - DNA, 25 bp, Homo sapien
tccctctctgggcattgatctgaat

SEQ ID NO: 703689 - DNA, 25 bp, Homo sapien
gagggataatccaccacttgcaagg

SEQ ID NO: 703690 - DNA, 25 bp, Homo sapien
gcttatctcgtgttcaatcgtctga

SEQ ID NO: 703691 - DNA, 25 bp, Homo sapien
aaatgctgtatcaagggtgggctta

SEQ ID NO: 703692 - DNA, 25 bp, Homo sapien
cacgagggacgagcttagctgagct

SEQ ID NO: 703693 - DNA, 25 bp, Homo sapien
cacacctgtgtctgtatatagtcag

SEQ ID NO: 703694 - DNA, 25 bp, Homo sapien
tgtgtaaccgacagtctgcctgggc

SEQ ID NO: 703695 - DNA, 25 bp, Homo sapien
ccctgacatgtgaggcaagctaagg

SEQ ID NO: 703696 - DNA, 25 bp, Homo sapien
tcaccctggtactgcatgcacgcaa

SEQ ID NO: 703697 - DNA, 25 bp, Homo sapien
caagctaaggcctggagggtcagat

SEQ ID NO: 703698 - DNA, 25 bp, Homo sapien
acgatggtgacacccaccaggagga

SEQ ID NO: 703699 - DNA, 25 bp, Homo sapien
aaggaagacaagaacgggcacgatg

SEQ ID NO: 703700 - DNA, 25 bp, Homo sapien
ggattggctaaactcccatagtatt

SEQ ID NO: 703701 - DNA, 25 bp, Homo sapien
tgtttagcacaagacacagcggagc

SEQ ID NO: 703702 - DNA, 25 bp, Homo sapien
caccctgcgaggttgttagtggtac

SEQ ID NO: 703703 - DNA, 25 bp, Homo sapien
gagctttgaacccagtccgagaggg

SEQ ID NO: 703704 - DNA, 25 bp, Homo sapien
cccagagaggtagtggagtttgcct

SEQ ID NO: 703705 - DNA, 25 bp, Homo sapien
ggcacactcttctccggtggagcaa

SEQ ID NO: 703706 - DNA, 25 bp, Homo sapien
aagacgaatttcagctactgcaagc

SEQ ID NO: 703707 - DNA, 25 bp, Homo sapien
gctactgcaagctcagtaccacagg

SEQ ID NO: 703708 - DNA, 25 bp, Homo sapien
cctgcgaccgcatcaaagacgaatt

SEQ ID NO: 703709 - DNA, 25 bp, Homo sapien
ttcttctgcgcagatggcaaggctg

SEQ ID NO: 703710 - DNA, 25 bp, Homo sapien
cccccgccgcgattgacatgatgtt

SEQ ID NO: 703711 - DNA, 25 bp, Homo sapien
ccccgccgcgattgacatgatgttt

SEQ ID NO: 703712 - DNA, 25 bp, Homo sapien
ccgccgcgattgacatgatgtttcc

SEQ ID NO: 703713 - DNA, 25 bp, Homo sapien
gccgcgattgacatgatgtttccac

SEQ ID NO: 703714 - DNA, 25 bp, Homo sapien
ggggccctggacaaaagcacgaagc

SEQ ID NO: 703715 - DNA, 25 bp, Homo sapien
tgcttcaccagctacagagttagca

SEQ ID NO: 703716 - DNA, 25 bp, Homo sapien
ccagctacagagttagcagggccca

SEQ ID NO: 703717 - DNA, 25 bp, Homo sapien
gtccttgctggactggcctgcttca

SEQ ID NO: 703718 - DNA, 25 bp, Homo sapien
acctcactcccaggtacattcaccc

SEQ ID NO: 703719 - DNA, 25 bp, Homo sapien
tagccctgcctcagtcaaataggga

SEQ ID NO: 703720 - DNA, 25 bp, Homo sapien
gacctcactcccaggtacattcacc

SEQ ID NO: 703721 - DNA, 25 bp, Homo sapien
ggacctcactcccaggtacattcac

SEQ ID NO: 703722 - DNA, 25 bp, Homo sapien
cagggaaaacgctgacctcatgacc

SEQ ID NO: 703723 - DNA, 25 bp, Homo sapien
gaacattgtactcaggccataaggt

SEQ ID NO: 703724 - DNA, 25 bp, Homo sapien
cacgcggaatatgggttgaggcctc

SEQ ID NO: 703725 - DNA, 25 bp, Homo sapien
taattctgcaacaacctggtgtgtc

SEQ ID NO: 703726 - DNA, 25 bp, Homo sapien
gctcgtgcccggtttctgcagacat

SEQ ID NO: 703727 - DNA, 25 bp, Homo sapien
agctcgtgcccggtttctgcagaca

SEQ ID NO: 703728 - DNA, 25 bp, Homo sapien
tggattttatgagggcccggggtga

SEQ ID NO: 703729 - DNA, 25 bp, Homo sapien
tcctggaccttgaggaactggattt

SEQ ID NO: 703730 - DNA, 25 bp, Homo sapien
ggcctcctggaccttgaggaactgg

SEQ ID NO: 703731 - DNA, 25 bp, Homo sapien
cagtgccttcatggcgttggcggcc

SEQ ID NO: 703732 - DNA, 25 bp, Homo sapien
cacaacctcccaagcagcggggatt

SEQ ID NO: 703733 - DNA, 25 bp, Homo sapien
ctgccacaacctcccaagcagcggg

SEQ ID NO: 703734 - DNA, 25 bp, Homo sapien
gccacaacctcccaagcagcgggga

SEQ ID NO: 703735 - DNA, 25 bp, Homo sapien
tcctgccacaacctcccaagcagcg

SEQ ID NO: 703736 - DNA, 25 bp, Homo sapien
gccgcggccctccggcctcggccac

SEQ ID NO: 703737 - DNA, 25 bp, Homo sapien
ggcgttgatccgcttggactccttc

SEQ ID NO: 703738 - DNA, 25 bp, Homo sapien
atctcggcgttgatccgcttggact

SEQ ID NO: 703739 - DNA, 25 bp, Homo sapien
atcgctcaggcaacacgccatcatg

SEQ ID NO: 703740 - DNA, 25 bp, Homo sapien
ctcggcgttgatccgcttggactcc

SEQ ID NO: 703741 - DNA, 25 bp, Homo sapien
cttcgtccttgaaccccgtgtcaat

SEQ ID NO: 703742 - DNA, 25 bp, Homo sapien
ttgaaccccgtgtcaatctcaagtc

SEQ ID NO: 703743 - DNA, 25 bp, Homo sapien
caagtccaaagtgcaggcacagaag

SEQ ID NO: 703744 - DNA, 25 bp, Homo sapien
cagaagaccgggtgcatgcagggat

SEQ ID NO: 703745 - DNA, 25 bp, Homo sapien
aaacacccaacacatcccgagtggg

SEQ ID NO: 703746 - DNA, 25 bp, Homo sapien
ggatgcaatctgaggccagggatcc

SEQ ID NO: 703747 - DNA, 25 bp, Homo sapien
tctactgaccggtgctgaaccctgg

SEQ ID NO: 703748 - DNA, 25 bp, Homo sapien
cccgaattgtgaccaccacagatgt

SEQ ID NO: 703749 - DNA, 25 bp, Homo sapien
gagcttggtgaagccgcgcttgtcc

SEQ ID NO: 703750 - DNA, 25 bp, Homo sapien
cctccccaggcgcccgcgggctcac

SEQ ID NO: 703751 - DNA, 25 bp, Homo sapien
caccaagcccacagctgcccaggcg

SEQ ID NO: 703752 - DNA, 25 bp, Homo sapien
cacagctgcccaggcgctcccctcc

SEQ ID NO: 703753 - DNA, 25 bp, Homo sapien
ccctccccaggcgcccgcgggctca

SEQ ID NO: 703754 - DNA, 25 bp, Homo sapien
actgacgtactgatgctcgaaggtg

SEQ ID NO: 703755 - DNA, 25 bp, Homo sapien
tagcattcctggatgcccgggtcct

SEQ ID NO: 703756 - DNA, 25 bp, Homo sapien
cggtcgtagcattcctggatgcccg

SEQ ID NO: 703757 - DNA, 25 bp, Homo sapien
gcactgacgtactgatgctcgaagg

SEQ ID NO: 703758 - DNA, 25 bp, Homo sapien
ctgcaacacagcggtgggtgctcag

SEQ ID NO: 703759 - DNA, 25 bp, Homo sapien
gtagcccaaggtggcgatgcggtca

SEQ ID NO: 703760 - DNA, 25 bp, Homo sapien
gatgcggtcaacgtcggtcaggtag

SEQ ID NO: 703761 - DNA, 25 bp, Homo sapien
cgaaagggtactcgatgatgccggt

SEQ ID NO: 703762 - DNA, 25 bp, Homo sapien
tccaggtcgaaagggtactcgatga

SEQ ID NO: 703763 - DNA, 25 bp, Homo sapien
gcatgagccggcacaccgggcaaat

SEQ ID NO: 703764 - DNA, 25 bp, Homo sapien
gtgcgcaggcatgagccggcacacc

SEQ ID NO: 703765 - DNA, 25 bp, Homo sapien
gcacaccgggcaaatgagcctctca

SEQ ID NO: 703766 - DNA, 25 bp, Homo sapien
cactgggtgcgcaggcatgagccgg

SEQ ID NO: 703767 - DNA, 25 bp, Homo sapien
aagacgaaacagggtctccctctgt

SEQ ID NO: 703768 - DNA, 25 bp, Homo sapien
accacaggtgcacacaaccacgccc

SEQ ID NO: 703769 - DNA, 25 bp, Homo sapien
cacaggtgcacacaaccacgcccag

SEQ ID NO: 703770 - DNA, 25 bp, Homo sapien
gggaccacaggtgcacacaaccacg

SEQ ID NO: 703771 - DNA, 25 bp, Homo sapien
cagaggcctgcgctgttaagaggcc

SEQ ID NO: 703772 - DNA, 25 bp, Homo sapien
aggagcctctcctcacgcactggga

SEQ ID NO: 703773 - DNA, 25 bp, Homo sapien
tggctcgcctcagctgtatcctggg

SEQ ID NO: 703774 - DNA, 25 bp, Homo sapien
ccctctgccagcgtgtggtggacag

SEQ ID NO: 703775 - DNA, 25 bp, Homo sapien
agtgggtgtgccgacaccaggccac

SEQ ID NO: 703776 - DNA, 25 bp, Homo sapien
gacagtgggtgtgccgacaccaggc

SEQ ID NO: 703777 - DNA, 25 bp, Homo sapien
acagcccgtctggagcgcgaggcct

SEQ ID NO: 703778 - DNA, 25 bp, Homo sapien
aggccacagcccgtctggagcgcga

SEQ ID NO: 703779 - DNA, 25 bp, Homo sapien
tacaaaggcagaagcggagagtgcc

SEQ ID NO: 703780 - DNA, 25 bp, Homo sapien
gaaatccacctggtctggtctgcgg

SEQ ID NO: 703781 - DNA, 25 bp, Homo sapien
ggatgacagatgtgccaggtgactc

SEQ ID NO: 703782 - DNA, 25 bp, Homo sapien
tgtctgcgggcgtgcgttccttacg

SEQ ID NO: 703783 - DNA, 25 bp, Homo sapien
acagatgttcaccaagcgtcactcg

SEQ ID NO: 703784 - DNA, 25 bp, Homo sapien
gcatctggatgtcaccctgagcaca

SEQ ID NO: 703785 - DNA, 25 bp, Homo sapien
cagggaccctacatctggcatctgg

SEQ ID NO: 703786 - DNA, 25 bp, Homo sapien
cactcgcaggagtaaacactgatgc

SEQ ID NO: 703787 - DNA, 25 bp, Homo sapien
tgggcccagggaagcgggcgctagt

SEQ ID NO: 703788 - DNA, 25 bp, Homo sapien
cccactcttagaacgggcaaggacg

SEQ ID NO: 703789 - DNA, 25 bp, Homo sapien
aacccagaggattctgggcgccagc

SEQ ID NO: 703790 - DNA, 25 bp, Homo sapien
aggacgctctcagagagcggccgca

SEQ ID NO: 703791 - DNA, 25 bp, Homo sapien
caaggcccaatctgcaatcccagga

SEQ ID NO: 703792 - DNA, 25 bp, Homo sapien
ccaaggcccaatctgcaatcccagg

SEQ ID NO: 703793 - DNA, 25 bp, Homo sapien
cccaaggcccaatctgcaatcccag

SEQ ID NO: 703794 - DNA, 25 bp, Homo sapien
ccacttcctccgctccgaccgctgg

SEQ ID NO: 703795 - DNA, 25 bp, Homo sapien
gagaaacatgatggatgtcacgttc

SEQ ID NO: 703796 - DNA, 25 bp, Homo sapien
ggcgacgagaaacatgatggatgtc

SEQ ID NO: 703797 - DNA, 25 bp, Homo sapien
acatgatggatgtcacgttctcaaa

SEQ ID NO: 703798 - DNA, 25 bp, Homo sapien
gggacccaggcttggcaggtgggga

SEQ ID NO: 703799 - DNA, 25 bp, Homo sapien
tccaccaggtgcgagtacaggatct

SEQ ID NO: 703800 - DNA, 25 bp, Homo sapien
aagaggatgacggaggagttctgga

SEQ ID NO: 703801 - DNA, 25 bp, Homo sapien
caggtgcgagtacaggatcttgtcc

SEQ ID NO: 703802 - DNA, 25 bp, Homo sapien
ggtgcgagtacaggatcttgtcctc

SEQ ID NO: 703803 - DNA, 25 bp, Homo sapien
tctccgtgtcggtggcacacgtgaa

SEQ ID NO: 703804 - DNA, 25 bp, Homo sapien
atgttctccgtgtcggtggcacacg

SEQ ID NO: 703805 - DNA, 25 bp, Homo sapien
cacacgtgaagtgtgagtagatgat

SEQ ID NO: 703806 - DNA, 25 bp, Homo sapien
cacgtgaagtgtgagtagatgatct

SEQ ID NO: 703807 - DNA, 25 bp, Homo sapien
gccccgtgtctccatcccgtctccc

SEQ ID NO: 703808 - DNA, 25 bp, Homo sapien
tgccccgtgtctccatcccgtctcc

SEQ ID NO: 703809 - DNA, 25 bp, Homo sapien
ctgccccgtgtctccatcccgtctc

SEQ ID NO: 703810 - DNA, 25 bp, Homo sapien
ccccgtgtctccatcccgtctccct

SEQ ID NO: 703811 - DNA, 25 bp, Homo sapien
gagaaccagtctcggtgcctcagtg

SEQ ID NO: 703812 - DNA, 25 bp, Homo sapien
ccagtgggcaaagcacagcgttgat

SEQ ID NO: 703813 - DNA, 25 bp, Homo sapien
cagggcgctgtagtgttcagtcaac

SEQ ID NO: 703814 - DNA, 25 bp, Homo sapien
gcgcgctgggcgtcaataacttaaa

SEQ ID NO: 703815 - DNA, 25 bp, Homo sapien
gcttctggcaccaaccctcttaggt

SEQ ID NO: 703816 - DNA, 25 bp, Homo sapien
agaaatgtagctgccctgacctggt

SEQ ID NO: 703817 - DNA, 25 bp, Homo sapien
aaaaggacgcttccgggtgagacag

SEQ ID NO: 703818 - DNA, 25 bp, Homo sapien
tggaaaaggttgtagcggccctgcc

SEQ ID NO: 703819 - DNA, 25 bp, Homo sapien
caggtcaccttgtgcaatctaggcc

SEQ ID NO: 703820 - DNA, 25 bp, Homo sapien
gaaggcctaatacttagccccgcag

SEQ ID NO: 703821 - DNA, 25 bp, Homo sapien
gaggatccaggccacgacgttttgg

SEQ ID NO: 703822 - DNA, 25 bp, Homo sapien
cacgagaaatcgttggcaggtgaga

SEQ ID NO: 703823 - DNA, 25 bp, Homo sapien
catggtcggagaaggtggtcggcac

SEQ ID NO: 703824 - DNA, 25 bp, Homo sapien
cgcccgggcgtaacatggtcggaga

SEQ ID NO: 703825 - DNA, 25 bp, Homo sapien
cgggcgtaacatggtcggagaaggt

SEQ ID NO: 703826 - DNA, 25 bp, Homo sapien
tgctgccgcccgggcgtaacatggt

SEQ ID NO: 703827 - DNA, 25 bp, Homo sapien
gaaagatatgaaaagtcgacttcca

SEQ ID NO: 703828 - DNA, 25 bp, Homo sapien
aaatcaggactgtgtaatatacaag

SEQ ID NO: 703829 - DNA, 25 bp, Homo sapien
attaaggttgaaattgtctgaaatc

SEQ ID NO: 703830 - DNA, 25 bp, Homo sapien
ccatcggtgtctggattaagggtca

SEQ ID NO: 703831 - DNA, 25 bp, Homo sapien
ctcgctccgagggaaatagctgttg

SEQ ID NO: 703832 - DNA, 25 bp, Homo sapien
aaggtcttgggccttgatcctggcc

SEQ ID NO: 703833 - DNA, 25 bp, Homo sapien
ttgggccttgatcctggccgttgct

SEQ ID NO: 703834 - DNA, 25 bp, Homo sapien
ccgctcgctccgagggaaatagctg

SEQ ID NO: 703835 - DNA, 25 bp, Homo sapien
tcttagggagcttggaggccgcgcc

SEQ ID NO: 703836 - DNA, 25 bp, Homo sapien
ttagggagcttggaggccgcgccgc

SEQ ID NO: 703837 - DNA, 25 bp, Homo sapien
gcttggaggccgcgccgcccgtcac

SEQ ID NO: 703838 - DNA, 25 bp, Homo sapien
agggagcttggaggccgcgccgccc

SEQ ID NO: 703839 - DNA, 25 bp, Homo sapien
aaccgtgagaacacgggcaatggat

SEQ ID NO: 703840 - DNA, 25 bp, Homo sapien
acacgggcaatggatttgcggacga

SEQ ID NO: 703841 - DNA, 25 bp, Homo sapien
gttaataaccgtgagaacacgggca

SEQ ID NO: 703842 - DNA, 25 bp, Homo sapien
tgagaacacgggcaatggatttgcg

SEQ ID NO: 703843 - DNA, 25 bp, Homo sapien
tgacaacgcgccactcgggccttga

SEQ ID NO: 703844 - DNA, 25 bp, Homo sapien
attgacaacgcgccactcgggcctt

SEQ ID NO: 703845 - DNA, 25 bp, Homo sapien
ttattgacaacgcgccactcgggcc

SEQ ID NO: 703846 - DNA, 25 bp, Homo sapien
ttgacaacgcgccactcgggccttg

SEQ ID NO: 703847 - DNA, 25 bp, Homo sapien
ccggcccgacaggttgacggtgaag

SEQ ID NO: 703848 - DNA, 25 bp, Homo sapien
ggcaaggcttgagtgctgggaacag

SEQ ID NO: 703849 - DNA, 25 bp, Homo sapien
ccaccgcagactgggtcctgtgtga

SEQ ID NO: 703850 - DNA, 25 bp, Homo sapien
cctcagtcggcaccgggtggcatcg

SEQ ID NO: 703851 - DNA, 25 bp, Homo sapien
agcgccaggtcagcgagcgggccat

SEQ ID NO: 703852 - DNA, 25 bp, Homo sapien
tccacccgggcggcggccttctcat

SEQ ID NO: 703853 - DNA, 25 bp, Homo sapien
gccttctcatcctccgtcaggcacc

SEQ ID NO: 703854 - DNA, 25 bp, Homo sapien
tctcatcctccgtcaggcaccaggg

SEQ ID NO: 703855 - DNA, 25 bp, Homo sapien
gcctcgatcatggcccgcatggaca

SEQ ID NO: 703856 - DNA, 25 bp, Homo sapien
tggcccgcatggacacgaagatgtt

SEQ ID NO: 703857 - DNA, 25 bp, Homo sapien
gatcatggcccgcatggacacgaag

SEQ ID NO: 703858 - DNA, 25 bp, Homo sapien
gcatggacacgaagatgttctggta

SEQ ID NO: 703859 - DNA, 25 bp, Homo sapien
gcgcttctcaaacgtggtcacttta

SEQ ID NO: 703860 - DNA, 25 bp, Homo sapien
gaatcgagcaggtggaattcccgcc

SEQ ID NO: 703861 - DNA, 25 bp, Homo sapien
gccgacgctcatagtaggcccggat

SEQ ID NO: 703862 - DNA, 25 bp, Homo sapien
tggctcatgaccaggctagcgtggt

SEQ ID NO: 703863 - DNA, 25 bp, Homo sapien
catgcggctgcggagcacgtcctga

SEQ ID NO: 703864 - DNA, 25 bp, Homo sapien
agcagtactcgttgatgccagtggt

SEQ ID NO: 703865 - DNA, 25 bp, Homo sapien
ttggttttctgcacggagaagcagt

SEQ ID NO: 703866 - DNA, 25 bp, Homo sapien
cacggagaagcagtactcgttgatg

SEQ ID NO: 703867 - DNA, 25 bp, Homo sapien
tgtctctgggcatgactttgcaccc

SEQ ID NO: 703868 - DNA, 25 bp, Homo sapien
gggtaggtcaaacacaatcgctgtc

SEQ ID NO: 703869 - DNA, 25 bp, Homo sapien
cctagtaaggactattgaagaggcc

SEQ ID NO: 703870 - DNA, 25 bp, Homo sapien
tgtctgccagctaaggtggagtccc

SEQ ID NO: 703871 - DNA, 25 bp, Homo sapien
tcacgttctcgaaacaatggatcca

SEQ ID NO: 703872 - DNA, 25 bp, Homo sapien
gatgagggcgatcacgttctcgaaa

SEQ ID NO: 703873 - DNA, 25 bp, Homo sapien
aatggatccatttcttacgctctga

SEQ ID NO: 703874 - DNA, 25 bp, Homo sapien
tccaggcactggtcgtattcactca

SEQ ID NO: 703875 - DNA, 25 bp, Homo sapien
tttgaaccagggtagttccaggata

SEQ ID NO: 703876 - DNA, 25 bp, Homo sapien
gtcccaaacaatgcgaggctctcct

SEQ ID NO: 703877 - DNA, 25 bp, Homo sapien
ccagggtagttccaggatagtccca

SEQ ID NO: 703878 - DNA, 25 bp, Homo sapien
ttccaggatagtcccaaacaatgcg

SEQ ID NO: 703879 - DNA, 25 bp, Homo sapien
ccaggatgtcggttttgttgagaaa

SEQ ID NO: 703880 - DNA, 25 bp, Homo sapien
cctccaggatgtcggttttgttgag

SEQ ID NO: 703881 - DNA, 25 bp, Homo sapien
ctcctccaggatgtcggttttgttg

SEQ ID NO: 703882 - DNA, 25 bp, Homo sapien
tggaaactggggaaataggtagcca

SEQ ID NO: 703883 - DNA, 25 bp, Homo sapien
cacccggtgtacatcctcgtgtaca

SEQ ID NO: 703884 - DNA, 25 bp, Homo sapien
gagtcccgcacgtccttgaagacct

SEQ ID NO: 703885 - DNA, 25 bp, Homo sapien
gcgtcgggatcgtgcgcccttcttg

SEQ ID NO: 703886 - DNA, 25 bp, Homo sapien
ttgatctcgtccaggtagcgggcga

SEQ ID NO: 703887 - DNA, 25 bp, Homo sapien
tctttaatttcagcccgcacggagc

SEQ ID NO: 703888 - DNA, 25 bp, Homo sapien
tgtgggccgcgatttctctcgtccg

SEQ ID NO: 703889 - DNA, 25 bp, Homo sapien
agcggtctgttaccccttgcaaagg

SEQ ID NO: 703890 - DNA, 25 bp, Homo sapien
tgagtcaagcaagggcaggagtacc

SEQ ID NO: 703891 - DNA, 25 bp, Homo sapien
aggctccatgcgaggaactgactgg

SEQ ID NO: 703892 - DNA, 25 bp, Homo sapien
ggttcagttctgaagcaggacagtg

SEQ ID NO: 703893 - DNA, 25 bp, Homo sapien
gggaggctccatgcgaggaactgac

SEQ ID NO: 703894 - DNA, 25 bp, Homo sapien
aggacagtgtcgggaggctccatgc

SEQ ID NO: 703895 - DNA, 25 bp, Homo sapien
acgggggctgatcgcagcacatgct

SEQ ID NO: 703896 - DNA, 25 bp, Homo sapien
gagacgggggctgatcgcagcacat

SEQ ID NO: 703897 - DNA, 25 bp, Homo sapien
caggagacgggggctgatcgcagca

SEQ ID NO: 703898 - DNA, 25 bp, Homo sapien
gacgggggctgatcgcagcacatgc

SEQ ID NO: 703899 - DNA, 25 bp, Homo sapien
acacacaggcgtcccatgaagggta

SEQ ID NO: 703900 - DNA, 25 bp, Homo sapien
agaatgcaggcgtcccatgagaacg

SEQ ID NO: 703901 - DNA, 25 bp, Homo sapien
tcccatgagcggcacagtatcggcc

SEQ ID NO: 703902 - DNA, 25 bp, Homo sapien
aggcgtcccatgagcggcacagtat

SEQ ID NO: 703903 - DNA, 25 bp, Homo sapien
tggggtctgagcggagaggctcagc

SEQ ID NO: 703904 - DNA, 25 bp, Homo sapien
gggccaggcgcccattttgggattc

SEQ ID NO: 703905 - DNA, 25 bp, Homo sapien
cccagggacaagctggtagggtctc

SEQ ID NO: 703906 - DNA, 25 bp, Homo sapien
gccaggcgcccattttgggattcat

SEQ ID NO: 703907 - DNA, 25 bp, Homo sapien
gagacccccagggacaagctggtag

SEQ ID NO: 703908 - DNA, 25 bp, Homo sapien
cccgagtggttgtagtgcagaacaa

SEQ ID NO: 703909 - DNA, 25 bp, Homo sapien
gagtggttgtagtgcagaacaatga

SEQ ID NO: 703910 - DNA, 25 bp, Homo sapien
gtggttgtagtgcagaacaatgagc

SEQ ID NO: 703911 - DNA, 25 bp, Homo sapien
ccgagtggttgtagtgcagaacaat

SEQ ID NO: 703912 - DNA, 25 bp, Homo sapien
gaagagcaggccctcccgtaggaac

SEQ ID NO: 703913 - DNA, 25 bp, Homo sapien
tcaccaggcaatagtagacccagcg

SEQ ID NO: 703914 - DNA, 25 bp, Homo sapien
gtaggaaccactgggcgggcgccag

SEQ ID NO: 703915 - DNA, 25 bp, Homo sapien
aggccgcgcccgtgagcaggtcact

SEQ ID NO: 703916 - DNA, 25 bp, Homo sapien
gccggcgaagatcaccaggcagaag

SEQ ID NO: 703917 - DNA, 25 bp, Homo sapien
ttgaccgccgagttgaggacggcca

SEQ ID NO: 703918 - DNA, 25 bp, Homo sapien
ttggagccaaagacgtcggccagca

SEQ ID NO: 703919 - DNA, 25 bp, Homo sapien
cagaggccgatgaagccgtagacgc

SEQ ID NO: 703920 - DNA, 25 bp, Homo sapien
gggccgggacttccccagaatcaca

SEQ ID NO: 703921 - DNA, 25 bp, Homo sapien
ggaagcccatttggcgtcagaagcc

SEQ ID NO: 703922 - DNA, 25 bp, Homo sapien
ccatgatcgaacttcaatgttgcca

SEQ ID NO: 703923 - DNA, 25 bp, Homo sapien
gttgccagggcatgcatcccacagt

SEQ ID NO: 703924 - DNA, 25 bp, Homo sapien
gggagcgtgtacaatcaaccctgtg

SEQ ID NO: 703925 - DNA, 25 bp, Homo sapien
agtttcacggggcaggcagttgtca

SEQ ID NO: 703926 - DNA, 25 bp, Homo sapien
tgtgcttcggcttcagtgattaaac

SEQ ID NO: 703927 - DNA, 25 bp, Homo sapien
cgggaaagccgaggccgttcatgct

SEQ ID NO: 703928 - DNA, 25 bp, Homo sapien
aatggtgtggagctgaaacgtctcc

SEQ ID NO: 703929 - DNA, 25 bp, Homo sapien
gggctggcgtctcccatactgaatg

SEQ ID NO: 703930 - DNA, 25 bp, Homo sapien
cagttatctgcttgcaccgtagccc

SEQ ID NO: 703931 - DNA, 25 bp, Homo sapien
tctgcttgcaccgtagccccgtggg

SEQ ID NO: 703932 - DNA, 25 bp, Homo sapien
tcagacactggactggacgggactg

SEQ ID NO: 703933 - DNA, 25 bp, Homo sapien
ggaggcttccggatttacatctgca

SEQ ID NO: 703934 - DNA, 25 bp, Homo sapien
tacatctgcactgaaactgtggcca

SEQ ID NO: 703935 - DNA, 25 bp, Homo sapien
tgaattttcaatagccgtgtgtgcc

SEQ ID NO: 703936 - DNA, 25 bp, Homo sapien
aaggaacatcaaggacgccggccac

SEQ ID NO: 703937 - DNA, 25 bp, Homo sapien
agactgtcatggctgccctagcaaa

SEQ ID NO: 703938 - DNA, 25 bp, Homo sapien
cagagatgcggctgacgcttctcca

SEQ ID NO: 703939 - DNA, 25 bp, Homo sapien
ggcttccagaattatggcagcataa

SEQ ID NO: 703940 - DNA, 25 bp, Homo sapien
gttgtaggcccactctggaactccc

SEQ ID NO: 703941 - DNA, 25 bp, Homo sapien
caggctgttcggctaataccgttga

SEQ ID NO: 703942 - DNA, 25 bp, Homo sapien
gggacaggacgtgaccttgcgacct

SEQ ID NO: 703943 - DNA, 25 bp, Homo sapien
taccgttgaggtttcacataaactc

SEQ ID NO: 703944 - DNA, 25 bp, Homo sapien
tgtcgggaattgtagtccgtccgtc

SEQ ID NO: 703945 - DNA, 25 bp, Homo sapien
aattgtagtccgtccgtccggcgct

SEQ ID NO: 703946 - DNA, 25 bp, Homo sapien
cccgcactcgccctgaggtcctgtg

SEQ ID NO: 703947 - DNA, 25 bp, Homo sapien
cagccgcgctgcctgtcgggaattg

SEQ ID NO: 703948 - DNA, 25 bp, Homo sapien
gcggcagctgggacgggacggcggc

SEQ ID NO: 703949 - DNA, 25 bp, Homo sapien
ggccgcgcggggcggcagctgggac

SEQ ID NO: 703950 - DNA, 25 bp, Homo sapien
ggggcggcagctgggacgggacggc

SEQ ID NO: 703951 - DNA, 25 bp, Homo sapien
gcggggccgcgcggggcggcagctg

SEQ ID NO: 703952 - DNA, 25 bp, Homo sapien
gttctccagcacctcgcccgcttcc

SEQ ID NO: 703953 - DNA, 25 bp, Homo sapien
tctccagcacctcgcccgcttcctc

SEQ ID NO: 703954 - DNA, 25 bp, Homo sapien
gcggcagacaagacgccttcagcat

SEQ ID NO: 703955 - DNA, 25 bp, Homo sapien
gctggccctgcaggtcgtactgctg

SEQ ID NO: 703956 - DNA, 25 bp, Homo sapien
tgctgcatgcggtacacggtgaact

SEQ ID NO: 703957 - DNA, 25 bp, Homo sapien
gacgatgaagccgagcggcagacaa

SEQ ID NO: 703958 - DNA, 25 bp, Homo sapien
agggtggcctcaaaggcagcacgct

SEQ ID NO: 703959 - DNA, 25 bp, Homo sapien
cagctgggcgaatgccacatacagg

SEQ ID NO: 703960 - DNA, 25 bp, Homo sapien
cacatacagggaaagctgcgtccag

SEQ ID NO: 703961 - DNA, 25 bp, Homo sapien
taccctgcgagagctggactgtgct

SEQ ID NO: 703962 - DNA, 25 bp, Homo sapien
tagctgtatcccagatgaaggagtt

SEQ ID NO: 703963 - DNA, 25 bp, Homo sapien
agagagccagacgtgacctacaggc

SEQ ID NO: 703964 - DNA, 25 bp, Homo sapien
ggtgctaaggttcccacctcacatg

SEQ ID NO: 703965 - DNA, 25 bp, Homo sapien
caagtctgatggacttgacgggtcc

SEQ ID NO: 703966 - DNA, 25 bp, Homo sapien
cgtgttcagcactgcattccgtgtg

SEQ ID NO: 703967 - DNA, 25 bp, Homo sapien
cgcatgagcacgcagcggcggctca

SEQ ID NO: 703968 - DNA, 25 bp, Homo sapien
cagggccttctggtactgctcgtag

SEQ ID NO: 703969 - DNA, 25 bp, Homo sapien
gagaagtccagtagccgcatgagca

SEQ ID NO: 703970 - DNA, 25 bp, Homo sapien
ctgtggagcagacacacacttaggg

SEQ ID NO: 703971 - DNA, 25 bp, Homo sapien
gtgactgtccctggtgggggtagca

SEQ ID NO: 703972 - DNA, 25 bp, Homo sapien
gacacacacttagggggctgctggc

SEQ ID NO: 703973 - DNA, 25 bp, Homo sapien
gcagggggcccagtgactgtccctg

SEQ ID NO: 703974 - DNA, 25 bp, Homo sapien
tctccggctcgatctccatgaattg

SEQ ID NO: 703975 - DNA, 25 bp, Homo sapien
ggacggcggtctccatggccagcat

SEQ ID NO: 703976 - DNA, 25 bp, Homo sapien
cgtcctccacggcaaagtacacggg

SEQ ID NO: 703977 - DNA, 25 bp, Homo sapien
ctgcttgtagatagacagcagggcc

SEQ ID NO: 703978 - DNA, 25 bp, Homo sapien
ttgctctgtaccccgctggtgacca

SEQ ID NO: 703979 - DNA, 25 bp, Homo sapien
tctggaagccgttggcagtggccgt

SEQ ID NO: 703980 - DNA, 25 bp, Homo sapien
cagtcactcacggccttgctctgta

SEQ ID NO: 703981 - DNA, 25 bp, Homo sapien
tggcaatcagccagtcactcacggc

SEQ ID NO: 703982 - DNA, 25 bp, Homo sapien
acgatggtgggaaggtcctctccgc

SEQ ID NO: 703983 - DNA, 25 bp, Homo sapien
caaaggcgtcgtagtgggccacgat

SEQ ID NO: 703984 - DNA, 25 bp, Homo sapien
ggccactccaaaggcgtcgtagtgg

SEQ ID NO: 703985 - DNA, 25 bp, Homo sapien
tggtgggaaggtcctctccgcccag

SEQ ID NO: 703986 - DNA, 25 bp, Homo sapien
tttgcctcggcactggactggagcc

SEQ ID NO: 703987 - DNA, 25 bp, Homo sapien
caggatgacgggcaaaggccgtcac

SEQ ID NO: 703988 - DNA, 25 bp, Homo sapien
gtcacagggagagccgctgaccctg

SEQ ID NO: 703989 - DNA, 25 bp, Homo sapien
gccatcccctacaggcgctttgcct

SEQ ID NO: 703990 - DNA, 25 bp, Homo sapien
gagaagaggcgtgccagctccagca

SEQ ID NO: 703991 - DNA, 25 bp, Homo sapien
agagacgccgctcccgttggagtcc

SEQ ID NO: 703992 - DNA, 25 bp, Homo sapien
cgtgcgtgcgcttgtaggtgtagag

SEQ ID NO: 703993 - DNA, 25 bp, Homo sapien
cgcttgtaggtgtagagccgggaga

SEQ ID NO: 703994 - DNA, 25 bp, Homo sapien
ccagcgcttggttccctggtagtta

SEQ ID NO: 703995 - DNA, 25 bp, Homo sapien
ctggtagttaaacttgcctcctcca

SEQ ID NO: 703996 - DNA, 25 bp, Homo sapien
cagcgcttggttccctggtagttaa

SEQ ID NO: 703997 - DNA, 25 bp, Homo sapien
ctgtgtggtccaggttgtcttccag

SEQ ID NO: 703998 - DNA, 25 bp, Homo sapien
ggccacattgtcctgaagcaggctg

SEQ ID NO: 703999 - DNA, 25 bp, Homo sapien
tcccgcaggaaggcgtgctgcaggg

SEQ ID NO: 704000 - DNA, 25 bp, Homo sapien
cccgcaggaaggcgtgctgcagggt

SEQ ID NO: 704001 - DNA, 25 bp, Homo sapien
gtgccctcccgaggcggcttggaca

SEQ ID NO: 704002 - DNA, 25 bp, Homo sapien
tgccctcccgaggcggcttggacac

SEQ ID NO: 704003 - DNA, 25 bp, Homo sapien
tgaaggcgggcagtcggcggatggc

SEQ ID NO: 704004 - DNA, 25 bp, Homo sapien
ggcggatggcgaagcgctcgtgctc

SEQ ID NO: 704005 - DNA, 25 bp, Homo sapien
tcctccgccaggttgatccgcttgt

SEQ ID NO: 704006 - DNA, 25 bp, Homo sapien
tggccgtcacggtggctctccaggt

SEQ ID NO: 704007 - DNA, 25 bp, Homo sapien
aaatgtggactttgggccaggcaag

SEQ ID NO: 704008 - DNA, 25 bp, Homo sapien
actttgggccaggcaaggtagctct

SEQ ID NO: 704009 - DNA, 25 bp, Homo sapien
ttaaaatgtggactttgggccaggc

SEQ ID NO: 704010 - DNA, 25 bp, Homo sapien
ctttgggccaggcaaggtagctctc

SEQ ID NO: 704011 - DNA, 25 bp, Homo sapien
tcagggtcttagaatccacccggga

SEQ ID NO: 704012 - DNA, 25 bp, Homo sapien
gggcctctgcaatgatcctcgtgtt

SEQ ID NO: 704013 - DNA, 25 bp, Homo sapien
ctcgtgttacgggtcagggtcttag

SEQ ID NO: 704014 - DNA, 25 bp, Homo sapien
tcaggttgtagatgactcgagtcag

SEQ ID NO: 704015 - DNA, 25 bp, Homo sapien
catctgctctgtgaacaccggcatg

SEQ ID NO: 704016 - DNA, 25 bp, Homo sapien
gctctgtgaacaccggcatgtctgg

SEQ ID NO: 704017 - DNA, 25 bp, Homo sapien
tctgctctgtgaacaccggcatgtc

SEQ ID NO: 704018 - DNA, 25 bp, Homo sapien
tgctctgtgaacaccggcatgtctg

SEQ ID NO: 704019 - DNA, 25 bp, Homo sapien
aggtagcggctcaggtggtgctcca

SEQ ID NO: 704020 - DNA, 25 bp, Homo sapien
gtgagccagtccatcaccgagtcca

SEQ ID NO: 704021 - DNA, 25 bp, Homo sapien
gccttgacgtggtgctgcttcacgt

SEQ ID NO: 704022 - DNA, 25 bp, Homo sapien
ggtgctccagcgtgctgaggaaggt

SEQ ID NO: 704023 - DNA, 25 bp, Homo sapien
tgtagagatggagactgggcacgat

SEQ ID NO: 704024 - DNA, 25 bp, Homo sapien
aaaagggtttgtagagatggagact

SEQ ID NO: 704025 - DNA, 25 bp, Homo sapien
tttgtagagatggagactgggcacg

SEQ ID NO: 704026 - DNA, 25 bp, Homo sapien
tagagatggagactgggcacgatgg

SEQ ID NO: 704027 - DNA, 25 bp, Homo sapien
cagctggtcgtagaagacaaactct

SEQ ID NO: 704028 - DNA, 25 bp, Homo sapien
tcacttgcttcagctggtcgtagaa

SEQ ID NO: 704029 - DNA, 25 bp, Homo sapien
gcttcagctggtcgtagaagacaaa

SEQ ID NO: 704030 - DNA, 25 bp, Homo sapien
gctggtcgtagaagacaaactctgg

SEQ ID NO: 704031 - DNA, 25 bp, Homo sapien
caggagcaggtcaaagacggccggc

SEQ ID NO: 704032 - DNA, 25 bp, Homo sapien
agccacgtaggccatgccgaggtag

SEQ ID NO: 704033 - DNA, 25 bp, Homo sapien
taggccatgccgaggtaggcagcaa

SEQ ID NO: 704034 - DNA, 25 bp, Homo sapien
ctggacagccacgtaggccatgccg

SEQ ID NO: 704035 - DNA, 25 bp, Homo sapien
ctctggacggtcttgtagaggaggc

SEQ ID NO: 704036 - DNA, 25 bp, Homo sapien
gggactgtggagcggcgggggctcc

SEQ ID NO: 704037 - DNA, 25 bp, Homo sapien
ccagtctcggagagcaacagaaaaa

SEQ ID NO: 704038 - DNA, 25 bp, Homo sapien
tgtgtgcttacaccagaccgagggc

SEQ ID NO: 704039 - DNA, 25 bp, Homo sapien
ggctcgtccgcaagtccgtagcctg

SEQ ID NO: 704040 - DNA, 25 bp, Homo sapien
ccggcgtctcctctttaatcgtgca

SEQ ID NO: 704041 - DNA, 25 bp, Homo sapien
tcctctctgagttccaggaagggtg

SEQ ID NO: 704042 - DNA, 25 bp, Homo sapien
acgtcctaggacagacacggagcag

SEQ ID NO: 704043 - DNA, 25 bp, Homo sapien
gagataaataaccatgtccacgcca

SEQ ID NO: 704044 - DNA, 25 bp, Homo sapien
tattgctaaagaacggacacaccgg

SEQ ID NO: 704045 - DNA, 25 bp, Homo sapien
tgggccacggaagggagacggctgc

SEQ ID NO: 704046 - DNA, 25 bp, Homo sapien
gaagggagacggctgcgggtgccag

SEQ ID NO: 704047 - DNA, 25 bp, Homo sapien
ccacggaagggagacggctgcgggt

SEQ ID NO: 704048 - DNA, 25 bp, Homo sapien
agacggctgcgggtgccaggccagg

SEQ ID NO: 704049 - DNA, 25 bp, Homo sapien
ctggtcctatctggacagaacccca

SEQ ID NO: 704050 - DNA, 25 bp, Homo sapien
agaccccctggtcctatctggacag

SEQ ID NO: 704051 - DNA, 25 bp, Homo sapien
cccctggtcctatctggacagaacc

SEQ ID NO: 704052 - DNA, 25 bp, Homo sapien
aggtccttcggacagcaaacacctc

SEQ ID NO: 704053 - DNA, 25 bp, Homo sapien
ccctccaggctgcaggttctggagg

SEQ ID NO: 704054 - DNA, 25 bp, Homo sapien
ctccaggctgcaggttctggagggc

SEQ ID NO: 704055 - DNA, 25 bp, Homo sapien
tccaggctgcaggttctggagggca

SEQ ID NO: 704056 - DNA, 25 bp, Homo sapien
caggctgcaggttctggagggcaga

SEQ ID NO: 704057 - DNA, 25 bp, Homo sapien
ctctggaggaggcgggcaacccgca

SEQ ID NO: 704058 - DNA, 25 bp, Homo sapien
ggaggcgggcaacccgcagggcaga

SEQ ID NO: 704059 - DNA, 25 bp, Homo sapien
gcgggcaacccgcagggcagacggg

SEQ ID NO: 704060 - DNA, 25 bp, Homo sapien
ggaggaggcgggcaacccgcagggc

SEQ ID NO: 704061 - DNA, 25 bp, Homo sapien
ggccccgtggcacccagacaggagc

SEQ ID NO: 704062 - DNA, 25 bp, Homo sapien
agcatgcaagcactccccaaattct

SEQ ID NO: 704063 - DNA, 25 bp, Homo sapien
caggagcctgctggctagcatgcaa

SEQ ID NO: 704064 - DNA, 25 bp, Homo sapien
tagcatgcaagcactccccaaattc

SEQ ID NO: 704065 - DNA, 25 bp, Homo sapien
ttattttctcatcggccggctgcat

SEQ ID NO: 704066 - DNA, 25 bp, Homo sapien
agcctgagccccagacggtcagtca

SEQ ID NO: 704067 - DNA, 25 bp, Homo sapien
cccagacggtcagtcagtgcatcca

SEQ ID NO: 704068 - DNA, 25 bp, Homo sapien
ctgagccccagacggtcagtcagtg

SEQ ID NO: 704069 - DNA, 25 bp, Homo sapien
ctgtgtatgttagcagggaagatga

SEQ ID NO: 704070 - DNA, 25 bp, Homo sapien
tgggtccacgatggggccaaagcca

SEQ ID NO: 704071 - DNA, 25 bp, Homo sapien
aatggggtttgcctgggtccacgat

SEQ ID NO: 704072 - DNA, 25 bp, Homo sapien
tatgttagcagggaagatgatgggc

SEQ ID NO: 704073 - DNA, 25 bp, Homo sapien
gacactggttatcccggtgacctaa

SEQ ID NO: 704074 - DNA, 25 bp, Homo sapien
ggcgtggccctcagattcgtccaat

SEQ ID NO: 704075 - DNA, 25 bp, Homo sapien
cagtatgtggctaatggcgtggccc

SEQ ID NO: 704076 - DNA, 25 bp, Homo sapien
tctgtggcctcaggtaagtgccgtc

SEQ ID NO: 704077 - DNA, 25 bp, Homo sapien
gcctgaggtcctcaagatgcctccg

SEQ ID NO: 704078 - DNA, 25 bp, Homo sapien
gcacagttcagcagcgttaaaaaca

SEQ ID NO: 704079 - DNA, 25 bp, Homo sapien
gaatcacacggcatttgtccctctg

SEQ ID NO: 704080 - DNA, 25 bp, Homo sapien
gatgcctccgcactgtagcctgcgt

SEQ ID NO: 704081 - DNA, 25 bp, Homo sapien
tgcaggatgcccgtgccatggatgt

SEQ ID NO: 704082 - DNA, 25 bp, Homo sapien
caggatgcccgtgccatggatgtta

SEQ ID NO: 704083 - DNA, 25 bp, Homo sapien
actgcaggatgcccgtgccatggat

SEQ ID NO: 704084 - DNA, 25 bp, Homo sapien
tcactgcaggatgcccgtgccatgg

SEQ ID NO: 704085 - DNA, 25 bp, Homo sapien
gcgggcgcgggaccgagccggcggc

SEQ ID NO: 704086 - DNA, 25 bp, Homo sapien
cgggaccgagccggcggcggcggcg

SEQ ID NO: 704087 - DNA, 25 bp, Homo sapien
tgcccacgggcgagggccgcggctg

SEQ ID NO: 704088 - DNA, 25 bp, Homo sapien
tgctgcccacgggcgagggccgcgg

SEQ ID NO: 704089 - DNA, 25 bp, Homo sapien
cctcgctctccgtcaggcgggccat

SEQ ID NO: 704090 - DNA, 25 bp, Homo sapien
tgctgctgccggcgcgcctcgctct

SEQ ID NO: 704091 - DNA, 25 bp, Homo sapien
caggtccttcatgccgtcgggctgc

SEQ ID NO: 704092 - DNA, 25 bp, Homo sapien
aagagtttgatggcgtccaggtcct

SEQ ID NO: 704093 - DNA, 25 bp, Homo sapien
tccaggtgccgcgggatctggccca

SEQ ID NO: 704094 - DNA, 25 bp, Homo sapien
taggggtctttgagcaccgtgagct

SEQ ID NO: 704095 - DNA, 25 bp, Homo sapien
gtgggtgtaaaataggtcatgggcc

SEQ ID NO: 704096 - DNA, 25 bp, Homo sapien
aaagtgggtgtaaaataggtcatgg

SEQ ID NO: 704097 - DNA, 25 bp, Homo sapien
agtgggtgtaaaataggtcatgggc

SEQ ID NO: 704098 - DNA, 25 bp, Homo sapien
aaaagtgggtgtaaaataggtcatg

SEQ ID NO: 704099 - DNA, 25 bp, Homo sapien
tcaccctccaaggaaagcccgcaaa

SEQ ID NO: 704100 - DNA, 25 bp, Homo sapien
ggtgattgccggctgtcgtgcacac

SEQ ID NO: 704101 - DNA, 25 bp, Homo sapien
ctaaaaagtggagggtgattgccgg

SEQ ID NO: 704102 - DNA, 25 bp, Homo sapien
cgtgcacacggcttctcaattctca

SEQ ID NO: 704103 - DNA, 25 bp, Homo sapien
ctccatggcgatgggttccatgggg

SEQ ID NO: 704104 - DNA, 25 bp, Homo sapien
ccccagatggcaagggcaccagagg

SEQ ID NO: 704105 - DNA, 25 bp, Homo sapien
gccccagatggcaagggcaccagag

SEQ ID NO: 704106 - DNA, 25 bp, Homo sapien
ctgccccagatggcaagggcaccag

SEQ ID NO: 704107 - DNA, 25 bp, Homo sapien
tgccccagatggcaagggcaccaga

SEQ ID NO: 704108 - DNA, 25 bp, Homo sapien
tctgctcgtgcagggcagtctgagc

SEQ ID NO: 704109 - DNA, 25 bp, Homo sapien
ttctgctcgtgcagggcagtctgag

SEQ ID NO: 704110 - DNA, 25 bp, Homo sapien
tttgatggcggaatccctggcacag

SEQ ID NO: 704111 - DNA, 25 bp, Homo sapien
gagctttgatggcggaatccctggc

SEQ ID NO: 704112 - DNA, 25 bp, Homo sapien
ccaccggcctggagacgcgcgccag

SEQ ID NO: 704113 - DNA, 25 bp, Homo sapien
gcggctttcactgtccgcaggcttc

SEQ ID NO: 704114 - DNA, 25 bp, Homo sapien
tccgcggctttcactgtccgcaggc

SEQ ID NO: 704115 - DNA, 25 bp, Homo sapien
ctccgcggctttcactgtccgcagg

SEQ ID NO: 704116 - DNA, 25 bp, Homo sapien
cgcggctttcactgtccgcaggctt

SEQ ID NO: 704117 - DNA, 25 bp, Homo sapien
aatgaccccgaagggctggaacagc

SEQ ID NO: 704118 - DNA, 25 bp, Homo sapien
tggaacagccgcagcacgtcctcct

SEQ ID NO: 704119 - DNA, 25 bp, Homo sapien
cggagcacggtgcactcgtcaatga

SEQ ID NO: 704120 - DNA, 25 bp, Homo sapien
ttgttcagcatccccacgaacagct

SEQ ID NO: 704121 - DNA, 25 bp, Homo sapien
ctggctcccatgcaaggcgtggatg

SEQ ID NO: 704122 - DNA, 25 bp, Homo sapien
ccatgcaaggcgtggatggccgcct

SEQ ID NO: 704123 - DNA, 25 bp, Homo sapien
gaggagaacttcacgaaagcacagc

SEQ ID NO: 704124 - DNA, 25 bp, Homo sapien
gccgcctgcgcctccgtgtgggagg

SEQ ID NO: 704125 - DNA, 25 bp, Homo sapien
tgctgcatgcgccggagcgtccgct

SEQ ID NO: 704126 - DNA, 25 bp, Homo sapien
ggcaatgtgagggacggcgtcagga

SEQ ID NO: 704127 - DNA, 25 bp, Homo sapien
gaagggcaatgtgagggacggcgtc

SEQ ID NO: 704128 - DNA, 25 bp, Homo sapien
caatgtgagggacggcgtcaggatg

SEQ ID NO: 704129 - DNA, 25 bp, Homo sapien
agactgagagagacggagccggagc

SEQ ID NO: 704130 - DNA, 25 bp, Homo sapien
gaggaccctgagtcagggagatgga

SEQ ID NO: 704131 - DNA, 25 bp, Homo sapien
gacagagagtagacagagactgaga

SEQ ID NO: 704132 - DNA, 25 bp, Homo sapien
gcaggagcccgacagagagtagaca

SEQ ID NO: 704133 - DNA, 25 bp, Homo sapien
caacttgggatcaggtctcagccag

SEQ ID NO: 704134 - DNA, 25 bp, Homo sapien
caggtcaggtctcagtttgggatca

SEQ ID NO: 704135 - DNA, 25 bp, Homo sapien
tcagttagaaaagcgaggctcagcc

SEQ ID NO: 704136 - DNA, 25 bp, Homo sapien
gctcaatctaggatcaaggctcggt

SEQ ID NO: 704137 - DNA, 25 bp, Homo sapien
gacaggactgttgtctgctgttgca

SEQ ID NO: 704138 - DNA, 25 bp, Homo sapien
aggccacgccgggactcaggtagct

SEQ ID NO: 704139 - DNA, 25 bp, Homo sapien
tgacggcgcctatctgctggatgtg

SEQ ID NO: 704140 - DNA, 25 bp, Homo sapien
ggtgtggcaggcagcccgttgaggc

SEQ ID NO: 704141 - DNA, 25 bp, Homo sapien
ccaggcacagcggtggtgcccagca

SEQ ID NO: 704142 - DNA, 25 bp, Homo sapien
ccattggcatagacggtttccaggg

SEQ ID NO: 704143 - DNA, 25 bp, Homo sapien
acctggaaagggcacgacacctgca

SEQ ID NO: 704144 - DNA, 25 bp, Homo sapien
aagccattggtgatgggagccacga

SEQ ID NO: 704145 - DNA, 25 bp, Homo sapien
ccccgatccttaagagccgcaagga

SEQ ID NO: 704146 - DNA, 25 bp, Homo sapien
agcagaagtcttccatccacccccg

SEQ ID NO: 704147 - DNA, 25 bp, Homo sapien
cttaagagccgcaaggacagcaaca

SEQ ID NO: 704148 - DNA, 25 bp, Homo sapien
cagcaacaaacaccccgcccagctt

SEQ ID NO: 704149 - DNA, 25 bp, Homo sapien
aggcaggatgcagtgtctcggccac

SEQ ID NO: 704150 - DNA, 25 bp, Homo sapien
gatgcagtgtctcggccacagtcgg

SEQ ID NO: 704151 - DNA, 25 bp, Homo sapien
ggcaggatgcagtgtctcggccaca

SEQ ID NO: 704152 - DNA, 25 bp, Homo sapien
aggatgcagtgtctcggccacagtc

SEQ ID NO: 704153 - DNA, 25 bp, Homo sapien
gggccaagatcacagacgaaacggg

SEQ ID NO: 704154 - DNA, 25 bp, Homo sapien
ctgcggagaccggagcgagacacag

SEQ ID NO: 704155 - DNA, 25 bp, Homo sapien
ccggagcgagacacagggcgaggag

SEQ ID NO: 704156 - DNA, 25 bp, Homo sapien
ggcggggccaagatcacagacgaaa

SEQ ID NO: 704157 - DNA, 25 bp, Homo sapien
gtgatggccgcggtggggtacatgg

SEQ ID NO: 704158 - DNA, 25 bp, Homo sapien
gcgtgatggccgcggtggggtacat

SEQ ID NO: 704159 - DNA, 25 bp, Homo sapien
ggctgggggacgctgtgcgcgatgg

SEQ ID NO: 704160 - DNA, 25 bp, Homo sapien
tgtgcgcgatgggcgtgatggccgc

SEQ ID NO: 704161 - DNA, 25 bp, Homo sapien
tccttcgacagccttggctttactg

SEQ ID NO: 704162 - DNA, 25 bp, Homo sapien
catggcaagaactgtatggatttga

SEQ ID NO: 704163 - DNA, 25 bp, Homo sapien
tatgtaattacaggcgggatctacc

SEQ ID NO: 704164 - DNA, 25 bp, Homo sapien
tgaaccctgactgtcagactccaga

SEQ ID NO: 704165 - DNA, 25 bp, Homo sapien
ggtgcctcagacacccagaaagaag

SEQ ID NO: 704166 - DNA, 25 bp, Homo sapien
cagctgtcgggagaggggtgcctca

SEQ ID NO: 704167 - DNA, 25 bp, Homo sapien
tggcttctccagctgtcgggagagg

SEQ ID NO: 704168 - DNA, 25 bp, Homo sapien
tggagcccgcatctggcttctccag

SEQ ID NO: 704169 - DNA, 25 bp, Homo sapien
gagaaagacataaagcccccaagga

SEQ ID NO: 704170 - DNA, 25 bp, Homo sapien
agacataaagcccccaaggagagga

SEQ ID NO: 704171 - DNA, 25 bp, Homo sapien
gaaagacataaagcccccaaggaga

SEQ ID NO: 704172 - DNA, 25 bp, Homo sapien
aagacataaagcccccaaggagagg

SEQ ID NO: 704173 - DNA, 25 bp, Homo sapien
gataaacaggttacagccctcggga

SEQ ID NO: 704174 - DNA, 25 bp, Homo sapien
ggtagataaacaggttacagccctc

SEQ ID NO: 704175 - DNA, 25 bp, Homo sapien
ggaggtggtagataaacaggttaca

SEQ ID NO: 704176 - DNA, 25 bp, Homo sapien
tagataaacaggttacagccctcgg

SEQ ID NO: 704177 - DNA, 25 bp, Homo sapien
aatgatattgccgaagggtaggaac

SEQ ID NO: 704178 - DNA, 25 bp, Homo sapien
ttgccgaagggtaggaacatctgcg

SEQ ID NO: 704179 - DNA, 25 bp, Homo sapien
cttggaggaaatgatattgccgaag

SEQ ID NO: 704180 - DNA, 25 bp, Homo sapien
gaggaaatgatattgccgaagggta

SEQ ID NO: 704181 - DNA, 25 bp, Homo sapien
ggttggtagctcgatccataaacac

SEQ ID NO: 704182 - DNA, 25 bp, Homo sapien
tggttggtagctcgatccataaaca

SEQ ID NO: 704183 - DNA, 25 bp, Homo sapien
ctggttggtagctcgatccataaac

SEQ ID NO: 704184 - DNA, 25 bp, Homo sapien
caaaaccctcccattccctgtcagg

SEQ ID NO: 704185 - DNA, 25 bp, Homo sapien
ccctcccattccctgtcagggggca

SEQ ID NO: 704186 - DNA, 25 bp, Homo sapien
ccattccctgtcagggggcaggcga

SEQ ID NO: 704187 - DNA, 25 bp, Homo sapien
tcccattccctgtcagggggcaggc

SEQ ID NO: 704188 - DNA, 25 bp, Homo sapien
gggcgctggccgggttatcaaagct

SEQ ID NO: 704189 - DNA, 25 bp, Homo sapien
ggcgctggccgggttatcaaagctc

SEQ ID NO: 704190 - DNA, 25 bp, Homo sapien
catgcctacagcctcagggcggctg

SEQ ID NO: 704191 - DNA, 25 bp, Homo sapien
tgcctacagcctcagggcggctgtg

SEQ ID NO: 704192 - DNA, 25 bp, Homo sapien
atgcctacagcctcagggcggctgt

SEQ ID NO: 704193 - DNA, 25 bp, Homo sapien
gctgcgaaaagatgccccactctgt

SEQ ID NO: 704194 - DNA, 25 bp, Homo sapien
cagactcataggacaggacagaacc

SEQ ID NO: 704195 - DNA, 25 bp, Homo sapien
aactcattgggtaggaatgacaccc

SEQ ID NO: 704196 - DNA, 25 bp, Homo sapien
taggcgagactctgatgacgacagc

SEQ ID NO: 704197 - DNA, 25 bp, Homo sapien
ttaatgtcaccatcaccaagcccat

SEQ ID NO: 704198 - DNA, 25 bp, Homo sapien
ccaggctgggatctaggaacacagg

SEQ ID NO: 704199 - DNA, 25 bp, Homo sapien
gaggccaacaaacccagctttcaaa

SEQ ID NO: 704200 - DNA, 25 bp, Homo sapien
aagaacagatcccacaaaggccaga

SEQ ID NO: 704201 - DNA, 25 bp, Homo sapien
tggaatttatgggtaagtcctggat

SEQ ID NO: 704202 - DNA, 25 bp, Homo sapien
ctggtgtccaaagaacggttggaat

SEQ ID NO: 704203 - DNA, 25 bp, Homo sapien
tggatcggttggaagcagaaaaccc

SEQ ID NO: 704204 - DNA, 25 bp, Homo sapien
taagtcctggatcggttggaagcag

SEQ ID NO: 704205 - DNA, 25 bp, Homo sapien
gattggcatggcacacgcttgcaca

SEQ ID NO: 704206 - DNA, 25 bp, Homo sapien
cacaggcacgctagaggagagtctc

SEQ ID NO: 704207 - DNA, 25 bp, Homo sapien
gaagcgagagcgtttcccaaagcag

SEQ ID NO: 704208 - DNA, 25 bp, Homo sapien
tagggtcttccgctacgcttggcaa

SEQ ID NO: 704209 - DNA, 25 bp, Homo sapien
agtacattgtacaaatcacgcaggt

SEQ ID NO: 704210 - DNA, 25 bp, Homo sapien
gctgcttctcacctgaaacacgtaa

SEQ ID NO: 704211 - DNA, 25 bp, Homo sapien
cagaccaaagagaggcgttttgaac

SEQ ID NO: 704212 - DNA, 25 bp, Homo sapien
cagccgcgggaaatcttctttgaca

SEQ ID NO: 704213 - DNA, 25 bp, Homo sapien
cgtcgtgtcgtagcacagttgccat

SEQ ID NO: 704214 - DNA, 25 bp, Homo sapien
tctctcccggcttgctggacacggg

SEQ ID NO: 704215 - DNA, 25 bp, Homo sapien
gccatttgaccgaggtctctcccgg

SEQ ID NO: 704216 - DNA, 25 bp, Homo sapien
catccaccacattttagccgtcgtg

SEQ ID NO: 704217 - DNA, 25 bp, Homo sapien
tccaatgggcaattcattgcctgat

SEQ ID NO: 704218 - DNA, 25 bp, Homo sapien
cctgattccctgagccaatcacaaa

SEQ ID NO: 704219 - DNA, 25 bp, Homo sapien
cttccctctgttctattccttgtct

SEQ ID NO: 704220 - DNA, 25 bp, Homo sapien
ctctgttctattccttgtcttctcc

SEQ ID NO: 704221 - DNA, 25 bp, Homo sapien
acgccttccttggtgtccgggtatg

SEQ ID NO: 704222 - DNA, 25 bp, Homo sapien
cttggtgtccgggtatgggagtggg

SEQ ID NO: 704223 - DNA, 25 bp, Homo sapien
ggagtggggctgtcatttcaggccc

SEQ ID NO: 704224 - DNA, 25 bp, Homo sapien
catcacgccttccttggtgtccggg

SEQ ID NO: 704225 - DNA, 25 bp, Homo sapien
tgaacatatttcgagaacttagggc

SEQ ID NO: 704226 - DNA, 25 bp, Homo sapien
gacctgctcagtcacctgcaaaaaa

SEQ ID NO: 704227 - DNA, 25 bp, Homo sapien
tcaggaccacgctttgcactcagca

SEQ ID NO: 704228 - DNA, 25 bp, Homo sapien
catttgagcattgcgaaaccggcca

SEQ ID NO: 704229 - DNA, 25 bp, Homo sapien
tcgtggacatctcggaggcccaatt

SEQ ID NO: 704230 - DNA, 25 bp, Homo sapien
tggacatctcggaggcccaattggc

SEQ ID NO: 704231 - DNA, 25 bp, Homo sapien
caggcatcgtggacatctcggaggc

SEQ ID NO: 704232 - DNA, 25 bp, Homo sapien
ggcatcgtggacatctcggaggccc

SEQ ID NO: 704233 - DNA, 25 bp, Homo sapien
cagtatgcagtctcccagccagtgg

SEQ ID NO: 704234 - DNA, 25 bp, Homo sapien
agccagtatgcagtctcccagccag

SEQ ID NO: 704235 - DNA, 25 bp, Homo sapien
cccagccagtggccgaaaggagcag

SEQ ID NO: 704236 - DNA, 25 bp, Homo sapien
ctcccagccagtggccgaaaggagc

SEQ ID NO: 704237 - DNA, 25 bp, Homo sapien
gtctctgattgggccctgctttccg

SEQ ID NO: 704238 - DNA, 25 bp, Homo sapien
ctctgattgggccctgctttccggc

SEQ ID NO: 704239 - DNA, 25 bp, Homo sapien
tctctgattgggccctgctttccgg

SEQ ID NO: 704240 - DNA, 25 bp, Homo sapien
tctgattgggccctgctttccggca

SEQ ID NO: 704241 - DNA, 25 bp, Homo sapien
tggccaggacatatgcagccatctt

SEQ ID NO: 704242 - DNA, 25 bp, Homo sapien
caatgggcttcacttgggggggcgt

SEQ ID NO: 704243 - DNA, 25 bp, Homo sapien
tcactggggcattctcattggccag

SEQ ID NO: 704244 - DNA, 25 bp, Homo sapien
caagccctttcatggggccaatggg

SEQ ID NO: 704245 - DNA, 25 bp, Homo sapien
ctctcccacccaaaggacgtctggg

SEQ ID NO: 704246 - DNA, 25 bp, Homo sapien
gctcctccctctcccacccaaagga

SEQ ID NO: 704247 - DNA, 25 bp, Homo sapien
ccctctcccacccaaaggacgtctg

SEQ ID NO: 704248 - DNA, 25 bp, Homo sapien
ctgctcctccctctcccacccaaag

SEQ ID NO: 704249 - DNA, 25 bp, Homo sapien
catctgttcatcgttgaaaacctcg

SEQ ID NO: 704250 - DNA, 25 bp, Homo sapien
tgtgaccatctgttcatcgttgaaa

SEQ ID NO: 704251 - DNA, 25 bp, Homo sapien
catcgttgaaaacctcgtggcgttg

SEQ ID NO: 704252 - DNA, 25 bp, Homo sapien
cgcctgtgaccatctgttcatcgtt

SEQ ID NO: 704253 - DNA, 25 bp, Homo sapien
gggacccatgctcgaagccggtggg

SEQ ID NO: 704254 - DNA, 25 bp, Homo sapien
cacgcgcggcgcctacagcgtgtga

SEQ ID NO: 704255 - DNA, 25 bp, Homo sapien
cgcacacggacacgcgcagagatcc

SEQ ID NO: 704256 - DNA, 25 bp, Homo sapien
tacagcgtgtgacggacacacggcc

SEQ ID NO: 704257 - DNA, 25 bp, Homo sapien
gccggagcgagcgcgctcggtcccc

SEQ ID NO: 704258 - DNA, 25 bp, Homo sapien
gcgccggagcgagcgcgctcggtcc

SEQ ID NO: 704259 - DNA, 25 bp, Homo sapien
ggcgccggagcgagcgcgctcggtc

SEQ ID NO: 704260 - DNA, 25 bp, Homo sapien
ggcgctgctgcgaggaggcgaggcc

SEQ ID NO: 704261 - DNA, 25 bp, Homo sapien
acacacagcacgccacctccctgct

SEQ ID NO: 704262 - DNA, 25 bp, Homo sapien
tatgcagctgagtaaaaccagtggc

SEQ ID NO: 704263 - DNA, 25 bp, Homo sapien
aacacaggctgggacactatgcagc

SEQ ID NO: 704264 - DNA, 25 bp, Homo sapien
tcccaactggttatgtccccaagag

SEQ ID NO: 704265 - DNA, 25 bp, Homo sapien
aaactaatgcccacaatttggaggc

SEQ ID NO: 704266 - DNA, 25 bp, Homo sapien
taaaacacgctagggacacatacag

SEQ ID NO: 704267 - DNA, 25 bp, Homo sapien
aatattattggtggcggtagctgca

SEQ ID NO: 704268 - DNA, 25 bp, Homo sapien
acagttggttccctaaattgccgcg

SEQ ID NO: 704269 - DNA, 25 bp, Homo sapien
tgcaagtgtacgaacagcagcctat

SEQ ID NO: 704270 - DNA, 25 bp, Homo sapien
agcgggcgcgctgaacttactgagt

SEQ ID NO: 704271 - DNA, 25 bp, Homo sapien
cgggcgcgctgaacttactgagtca

SEQ ID NO: 704272 - DNA, 25 bp, Homo sapien
ccggagcgggcgcgctgaacttact

SEQ ID NO: 704273 - DNA, 25 bp, Homo sapien
ggcgcgctgaacttactgagtcatt

SEQ ID NO: 704274 - DNA, 25 bp, Homo sapien
ggtgaggcagagcggggacgaatac

SEQ ID NO: 704275 - DNA, 25 bp, Homo sapien
tgggtgaggcagagcggggacgaat

SEQ ID NO: 704276 - DNA, 25 bp, Homo sapien
gggtgaggcagagcggggacgaata

SEQ ID NO: 704277 - DNA, 25 bp, Homo sapien
tgaggcagagcggggacgaatacat

SEQ ID NO: 704278 - DNA, 25 bp, Homo sapien
agaaatggaggctcgggaagaccaa

SEQ ID NO: 704279 - DNA, 25 bp, Homo sapien
ttattttatgttggcggagaaatgg

SEQ ID NO: 704280 - DNA, 25 bp, Homo sapien
gggaagaccaaagtcccgcctctca

SEQ ID NO: 704281 - DNA, 25 bp, Homo sapien
ttcattcattcgtgcaacaggtatt

SEQ ID NO: 704282 - DNA, 25 bp, Homo sapien
ggccggagaggcgagaggtcaggag

SEQ ID NO: 704283 - DNA, 25 bp, Homo sapien
ggacgcagagggcggacccactgcc

SEQ ID NO: 704284 - DNA, 25 bp, Homo sapien
ggcgagaggtcaggagcgccaggga

SEQ ID NO: 704285 - DNA, 25 bp, Homo sapien
actgcccggccccgaaggctgaggt

SEQ ID NO: 704286 - DNA, 25 bp, Homo sapien
tgaacaggatgaccatgaccaggtc

SEQ ID NO: 704287 - DNA, 25 bp, Homo sapien
cacgaagtaggccaggtagaggtcc

SEQ ID NO: 704288 - DNA, 25 bp, Homo sapien
ctccagcgggatgcccttgaacagg

SEQ ID NO: 704289 - DNA, 25 bp, Homo sapien
gtagaggtccagctccttgacggcc

SEQ ID NO: 704290 - DNA, 25 bp, Homo sapien
tcctggccccgtgtcaccaccatca

SEQ ID NO: 704291 - DNA, 25 bp, Homo sapien
gtcaccaccatcagacaccctcccc

SEQ ID NO: 704292 - DNA, 25 bp, Homo sapien
ggccccgtgtcaccaccatcagaca

SEQ ID NO: 704293 - DNA, 25 bp, Homo sapien
ctccgctcaggccaccacacctcac

SEQ ID NO: 704294 - DNA, 25 bp, Homo sapien
accacgcctggctaatattttcata

SEQ ID NO: 704295 - DNA, 25 bp, Homo sapien
cacgcctggctaatattttcatatt

SEQ ID NO: 704296 - DNA, 25 bp, Homo sapien
caggtccacaccattctcctctctc

SEQ ID NO: 704297 - DNA, 25 bp, Homo sapien
cccaggtccacaccattctcctctc

SEQ ID NO: 704298 - DNA, 25 bp, Homo sapien
ctgggttagggctgggaccctggca

SEQ ID NO: 704299 - DNA, 25 bp, Homo sapien
agcccagagccccacgggcctcccg

SEQ ID NO: 704300 - DNA, 25 bp, Homo sapien
aggagcccagagccccacgggcctc

SEQ ID NO: 704301 - DNA, 25 bp, Homo sapien
ctggcaggagcccagagccccacgg

SEQ ID NO: 704302 - DNA, 25 bp, Homo sapien
tccagatgtttctccggccttggcg

SEQ ID NO: 704303 - DNA, 25 bp, Homo sapien
gccttggcggccattttgtaggtct

SEQ ID NO: 704304 - DNA, 25 bp, Homo sapien
aaccgtccccagcatcgggctgttg

SEQ ID NO: 704305 - DNA, 25 bp, Homo sapien
gacatcatccctctggcggccattt

SEQ ID NO: 704306 - DNA, 25 bp, Homo sapien
gcagagggcacggtgaaccaagatt

SEQ ID NO: 704307 - DNA, 25 bp, Homo sapien
cggcgaaggttcaactttctctgtc

SEQ ID NO: 704308 - DNA, 25 bp, Homo sapien
ccggcgaaggttcaactttctctgt

SEQ ID NO: 704309 - DNA, 25 bp, Homo sapien
tgatgatagcattttgtcaaactcc

SEQ ID NO: 704310 - DNA, 25 bp, Homo sapien
taaagtctgttttgatgatagcatt

SEQ ID NO: 704311 - DNA, 25 bp, Homo sapien
aaactccaggagttaaatgaacatt

SEQ ID NO: 704312 - DNA, 25 bp, Homo sapien
tagctagaggttctgtgataaagtc

SEQ ID NO: 704313 - DNA, 25 bp, Homo sapien
cccgttctgttgctatgctcagagg

SEQ ID NO: 704314 - DNA, 25 bp, Homo sapien
ccgttctgttgctatgctcagagga

SEQ ID NO: 704315 - DNA, 25 bp, Homo sapien
cttcccgttctgttgctatgctcag

SEQ ID NO: 704316 - DNA, 25 bp, Homo sapien
tcccgttctgttgctatgctcagag

SEQ ID NO: 704317 - DNA, 25 bp, Homo sapien
acctgcgttcgatggagttccagcc

SEQ ID NO: 704318 - DNA, 25 bp, Homo sapien
taacgcgggcgtttccaatcgctgc

SEQ ID NO: 704319 - DNA, 25 bp, Homo sapien
tttaaagaagaggtggcaagtccca

SEQ ID NO: 704320 - DNA, 25 bp, Homo sapien
agcggctctccgctcatctataacg

SEQ ID NO: 704321 - DNA, 25 bp, Homo sapien
gctccttctcattggcggtttggga

SEQ ID NO: 704322 - DNA, 25 bp, Homo sapien
tctcattggcggtttgggatgattc

SEQ ID NO: 704323 - DNA, 25 bp, Homo sapien
tcattggcggtttgggatgattcct

SEQ ID NO: 704324 - DNA, 25 bp, Homo sapien
atgattcctggtgtttgaatcccat

SEQ ID NO: 704325 - DNA, 25 bp, Homo sapien
cctgtccggggactgccgctttgct

SEQ ID NO: 704326 - DNA, 25 bp, Homo sapien
catccctgtccggggactgccgctt

SEQ ID NO: 704327 - DNA, 25 bp, Homo sapien
tccctgtccggggactgccgctttg

SEQ ID NO: 704328 - DNA, 25 bp, Homo sapien
tgtccggggactgccgctttgctct

SEQ ID NO: 704329 - DNA, 25 bp, Homo sapien
tctgaagaggacagagcggtggccc

SEQ ID NO: 704330 - DNA, 25 bp, Homo sapien
cacctccgtgtttggctagtgtgtg

SEQ ID NO: 704331 - DNA, 25 bp, Homo sapien
ctgggaggttcagggccacgcattc

SEQ ID NO: 704332 - DNA, 25 bp, Homo sapien
gagtgaaggcaatgaaccaaccctg

SEQ ID NO: 704333 - DNA, 25 bp, Homo sapien
tgaacacgccggaggtgacaaagct

SEQ ID NO: 704334 - DNA, 25 bp, Homo sapien
cagtgacgctgaacacgccggaggt

SEQ ID NO: 704335 - DNA, 25 bp, Homo sapien
tccgggacacttggatgagctcagt

SEQ ID NO: 704336 - DNA, 25 bp, Homo sapien
ccgggacacttggatgagctcagtg

SEQ ID NO: 704337 - DNA, 25 bp, Homo sapien
gctgggcagcgttcttctgaggcca

SEQ ID NO: 704338 - DNA, 25 bp, Homo sapien
gaggtgctgggcagcgttcttctga

SEQ ID NO: 704339 - DNA, 25 bp, Homo sapien
gttcaggtcgtatgccaggtgcccc

SEQ ID NO: 704340 - DNA, 25 bp, Homo sapien
ggctgggttcaggtcgtatgccagg

SEQ ID NO: 704341 - DNA, 25 bp, Homo sapien
ccagttgcggctgctactcgtgggc

SEQ ID NO: 704342 - DNA, 25 bp, Homo sapien
tcgagcccgatttgtgccgcttgct

SEQ ID NO: 704343 - DNA, 25 bp, Homo sapien
aagtgtagtaatcgccgccagggct

SEQ ID NO: 704344 - DNA, 25 bp, Homo sapien
gtcttcctccatcgagcccgatttg

SEQ ID NO: 704345 - DNA, 25 bp, Homo sapien
caacctgatcgtatagcagaggaaa

SEQ ID NO: 704346 - DNA, 25 bp, Homo sapien
taaggaacctgccaaatgtcacaca

SEQ ID NO: 704347 - DNA, 25 bp, Homo sapien
tgtcagcctgattctcctcctcggg

SEQ ID NO: 704348 - DNA, 25 bp, Homo sapien
tccaagttctatcagggtcctcttg

SEQ ID NO: 704349 - DNA, 25 bp, Homo sapien
gtttccctatgttatcaaactacta

SEQ ID NO: 704350 - DNA, 25 bp, Homo sapien
cagcctcagcactgtagacattggg

SEQ ID NO: 704351 - DNA, 25 bp, Homo sapien
tatgttatcaaactactaggctcaa

SEQ ID NO: 704352 - DNA, 25 bp, Homo sapien
gacattggggctggctcgttccctg

SEQ ID NO: 704353 - DNA, 25 bp, Homo sapien
ggtgagctgccacgtctaccccttt

SEQ ID NO: 704354 - DNA, 25 bp, Homo sapien
tctggaatttccatcgggagcagtg

SEQ ID NO: 704355 - DNA, 25 bp, Homo sapien
atggccgtcccagatccctgggcat

SEQ ID NO: 704356 - DNA, 25 bp, Homo sapien
aaaaacggatggactcagggaggct

SEQ ID NO: 704357 - DNA, 25 bp, Homo sapien
tgcacggcgatgacgggccggtggt

SEQ ID NO: 704358 - DNA, 25 bp, Homo sapien
cgggctgttgaatggtgacttgtcc

SEQ ID NO: 704359 - DNA, 25 bp, Homo sapien
ctgtcttcttcaccggggacgagat

SEQ ID NO: 704360 - DNA, 25 bp, Homo sapien
gctgtgcacggcgatgacgggccgg

SEQ ID NO: 704361 - DNA, 25 bp, Homo sapien
ggtcgcaggccagcgagacaagatc

SEQ ID NO: 704362 - DNA, 25 bp, Homo sapien
gatggacgtcgtagggaaatgcaga

SEQ ID NO: 704363 - DNA, 25 bp, Homo sapien
acaagatctttgagcgggtcctggg

SEQ ID NO: 704364 - DNA, 25 bp, Homo sapien
aaatgcagagcggaggacgggtgtg

SEQ ID NO: 704365 - DNA, 25 bp, Homo sapien
cgacgtggctcctccctcggaggtg

SEQ ID NO: 704366 - DNA, 25 bp, Homo sapien
gaggtcggcgacgtggctcctccct

SEQ ID NO: 704367 - DNA, 25 bp, Homo sapien
agtggctgggcattttgagctgacc

SEQ ID NO: 704368 - DNA, 25 bp, Homo sapien
gcattttgagctgaccacttccatt

SEQ ID NO: 704369 - DNA, 25 bp, Homo sapien
actgtgagatccgtgtccactgtca

SEQ ID NO: 704370 - DNA, 25 bp, Homo sapien
taaaatgataacaaccgattctctt

SEQ ID NO: 704371 - DNA, 25 bp, Homo sapien
ttggtccggccagcccctaaggctg

SEQ ID NO: 704372 - DNA, 25 bp, Homo sapien
tggccactgggctgttttccggaga

SEQ ID NO: 704373 - DNA, 25 bp, Homo sapien
tgcatgggggtcgtggggagagtct

SEQ ID NO: 704374 - DNA, 25 bp, Homo sapien
gcatgggggtcgtggggagagtctg

SEQ ID NO: 704375 - DNA, 25 bp, Homo sapien
ctgcatgggggtcgtggggagagtc

SEQ ID NO: 704376 - DNA, 25 bp, Homo sapien
catgggggtcgtggggagagtctgg

SEQ ID NO: 704377 - DNA, 25 bp, Homo sapien
gatcccttggtcctaatcccacaaa

SEQ ID NO: 704378 - DNA, 25 bp, Homo sapien
atcccacaaaggaacggtttgcagg

SEQ ID NO: 704379 - DNA, 25 bp, Homo sapien
cccgcaggatcccttggtcctaatc

SEQ ID NO: 704380 - DNA, 25 bp, Homo sapien
tgtgcctgataaatgcccgcaggat

SEQ ID NO: 704381 - DNA, 25 bp, Homo sapien
caaggcagggtacttaatatttacg

SEQ ID NO: 704382 - DNA, 25 bp, Homo sapien
tcaaaggctcttggtgcgggtgccc

SEQ ID NO: 704383 - DNA, 25 bp, Homo sapien
tcccaaagcgaggagtcctggacgt

SEQ ID NO: 704384 - DNA, 25 bp, Homo sapien
ccatagcacatggatctcctctgaa

SEQ ID NO: 704385 - DNA, 25 bp, Homo sapien
gatgcccagtttggggacctcgcct

SEQ ID NO: 704386 - DNA, 25 bp, Homo sapien
tgctcttagtccagtcagggcagca

SEQ ID NO: 704387 - DNA, 25 bp, Homo sapien
aacccaggtgctcttagtccagtca

SEQ ID NO: 704388 - DNA, 25 bp, Homo sapien
gacaatgtgtcacctcctttctgtg

SEQ ID NO: 704389 - DNA, 25 bp, Homo sapien
taagtctagcccacgcaacattggg

SEQ ID NO: 704390 - DNA, 25 bp, Homo sapien
tctgctgcagacatggtttacctct

SEQ ID NO: 704391 - DNA, 25 bp, Homo sapien
gggaggcttccagacacagtacagg

SEQ ID NO: 704392 - DNA, 25 bp, Homo sapien
taacaacctgctgggtgacccatgg

SEQ ID NO: 704393 - DNA, 25 bp, Homo sapien
tcccgagagttggaaacgttgcgtc

SEQ ID NO: 704394 - DNA, 25 bp, Homo sapien
tgaataacttaggaagacgccctgt

SEQ ID NO: 704395 - DNA, 25 bp, Homo sapien
gggccaattgcatagagacttctcc

SEQ ID NO: 704396 - DNA, 25 bp, Homo sapien
caggcggagaggagatgaataactt

SEQ ID NO: 704397 - DNA, 25 bp, Homo sapien
tcctcggaaagtgcatttcttacag

SEQ ID NO: 704398 - DNA, 25 bp, Homo sapien
ccaactcggggagctctgggtgtcc

SEQ ID NO: 704399 - DNA, 25 bp, Homo sapien
cagtgtgtgcaatgtgggtccctcc

SEQ ID NO: 704400 - DNA, 25 bp, Homo sapien
catccccttcctcggaaagtgcatt

SEQ ID NO: 704401 - DNA, 25 bp, Homo sapien
taatcaggcacttaaaccactcgct

SEQ ID NO: 704402 - DNA, 25 bp, Homo sapien
aggacgcttgcgaagtgacgcccag

SEQ ID NO: 704403 - DNA, 25 bp, Homo sapien
ggcacggcgatgagggttgactgga

SEQ ID NO: 704404 - DNA, 25 bp, Homo sapien
ggccattccgtgtcccagctggaca

SEQ ID NO: 704405 - DNA, 25 bp, Homo sapien
tttgagctcggtggccctaaaacac

SEQ ID NO: 704406 - DNA, 25 bp, Homo sapien
ttggagcggctcaacggaaaaacgc

SEQ ID NO: 704407 - DNA, 25 bp, Homo sapien
gcgatgaaagtgcaaacggcggtcc

SEQ ID NO: 704408 - DNA, 25 bp, Homo sapien
taaagagttggttctcgtcgcgccc

SEQ ID NO: 704409 - DNA, 25 bp, Homo sapien
tgtactcagccaaggtgccaagtga

SEQ ID NO: 704410 - DNA, 25 bp, Homo sapien
ggatctgattgtccagcccagggtg

SEQ ID NO: 704411 - DNA, 25 bp, Homo sapien
tgggtccctacacgagatgcttgga

SEQ ID NO: 704412 - DNA, 25 bp, Homo sapien
ttacttaagggcaatgtcgtggcca

SEQ ID NO: 704413 - DNA, 25 bp, Homo sapien
taaatggtacttaggtaggcgcgtc

SEQ ID NO: 704414 - DNA, 25 bp, Homo sapien
ggcgcgtccgcgaaaaccaaaatga

SEQ ID NO: 704415 - DNA, 25 bp, Homo sapien
ttgagagatgtatgtcccagcgccc

SEQ ID NO: 704416 - DNA, 25 bp, Homo sapien
tccagtgtgcggtaagcagaaagct

SEQ ID NO: 704417 - DNA, 25 bp, Homo sapien
tggttgaggagacacccgcaatcct

SEQ ID NO: 704418 - DNA, 25 bp, Homo sapien
tctctgcctgatgtctactgaacag

SEQ ID NO: 704419 - DNA, 25 bp, Homo sapien
tcttcttatactcggagagcatccc

SEQ ID NO: 704420 - DNA, 25 bp, Homo sapien
tgaagcccgtgaaatgactccatct

SEQ ID NO: 704421 - DNA, 25 bp, Homo sapien
tccctgagtgggtcaggtagggcac

SEQ ID NO: 704422 - DNA, 25 bp, Homo sapien
tggcttcagcttcactaggaatggg

SEQ ID NO: 704423 - DNA, 25 bp, Homo sapien
ttcactaggaatgggacacagggtc

SEQ ID NO: 704424 - DNA, 25 bp, Homo sapien
aagaggctgacgttatggtggcttc

SEQ ID NO: 704425 - DNA, 25 bp, Homo sapien
tggacatgtatgagcacgagaccgg

SEQ ID NO: 704426 - DNA, 25 bp, Homo sapien
cagagctttggcgtctaaaccgggt

SEQ ID NO: 704427 - DNA, 25 bp, Homo sapien
cagggctgtagcgtggaagtttcca

SEQ ID NO: 704428 - DNA, 25 bp, Homo sapien
tgccgttgtgctgtgactccctgag

SEQ ID NO: 704429 - DNA, 25 bp, Homo sapien
atgccatagccagcctgtcttgaga

SEQ ID NO: 704430 - DNA, 25 bp, Homo sapien
ccatagccagcctgtcttgagatga

SEQ ID NO: 704431 - DNA, 25 bp, Homo sapien
gcatgccatagccagcctgtcttga

SEQ ID NO: 704432 - DNA, 25 bp, Homo sapien
gccatagccagcctgtcttgagatg

SEQ ID NO: 704433 - DNA, 25 bp, Homo sapien
cgttggtgccgtccggcacggtcac

SEQ ID NO: 704434 - DNA, 25 bp, Homo sapien
gtctccagagctcggtgaggcgtcc

SEQ ID NO: 704435 - DNA, 25 bp, Homo sapien
caccgggagcgcctcgttagggaat

SEQ ID NO: 704436 - DNA, 25 bp, Homo sapien
gcacggtcacgtgggcgagaaaatg

SEQ ID NO: 704437 - DNA, 25 bp, Homo sapien
tggagtctgaccacgcctagaaaca

SEQ ID NO: 704438 - DNA, 25 bp, Homo sapien
tttcccatgaaagggcatacgttgc

SEQ ID NO: 704439 - DNA, 25 bp, Homo sapien
gctgaatcggcacaaaccagtctca

SEQ ID NO: 704440 - DNA, 25 bp, Homo sapien
tacttaaggttcgagctccctgagc

SEQ ID NO: 704441 - DNA, 25 bp, Homo sapien
ccctcgtagccttcctgagtcagca

SEQ ID NO: 704442 - DNA, 25 bp, Homo sapien
cgtagccttcctgagtcagcacagc

SEQ ID NO: 704443 - DNA, 25 bp, Homo sapien
ctcgtagccttcctgagtcagcaca

SEQ ID NO: 704444 - DNA, 25 bp, Homo sapien
gccctcgtagccttcctgagtcagc

SEQ ID NO: 704445 - DNA, 25 bp, Homo sapien
gaacagaagacgcagacttggttct

SEQ ID NO: 704446 - DNA, 25 bp, Homo sapien
gcgtcctgcaccctgggattatctc

SEQ ID NO: 704447 - DNA, 25 bp, Homo sapien
gaggcttcgatatctgcgtcctgca

SEQ ID NO: 704448 - DNA, 25 bp, Homo sapien
tttctcgaaggtctacagaggccag

SEQ ID NO: 704449 - DNA, 25 bp, Homo sapien
tcagtgcggcattgacgtcgcgcct

SEQ ID NO: 704450 - DNA, 25 bp, Homo sapien
gcatctcgggaggacgtgacgtctc

SEQ ID NO: 704451 - DNA, 25 bp, Homo sapien
tcaaatcaatacaggaagcgcggct

SEQ ID NO: 704452 - DNA, 25 bp, Homo sapien
ggtccctaatatggcggcggtcgct

SEQ ID NO: 704453 - DNA, 25 bp, Homo sapien
atggagcgccatcaggttcccgagg

SEQ ID NO: 704454 - DNA, 25 bp, Homo sapien
gtctctcaggatcggatggagcgcc

SEQ ID NO: 704455 - DNA, 25 bp, Homo sapien
aagacccgaggttgctcatctccag

SEQ ID NO: 704456 - DNA, 25 bp, Homo sapien
cggtagcaatagaaacccagtccgg

SEQ ID NO: 704457 - DNA, 25 bp, Homo sapien
tgtgccctcccatgaaagtaaacca

SEQ ID NO: 704458 - DNA, 25 bp, Homo sapien
gaaaaggttctagcagggtccatca

SEQ ID NO: 704459 - DNA, 25 bp, Homo sapien
tctagatggctctctcgggtcacat

SEQ ID NO: 704460 - DNA, 25 bp, Homo sapien
tttcgacgggatcagcccaggctga

SEQ ID NO: 704461 - DNA, 25 bp, Homo sapien
aaaaaacaaaccacggtcagagatg

SEQ ID NO: 704462 - DNA, 25 bp, Homo sapien
aggctccggatgagaccgggcacca

SEQ ID NO: 704463 - DNA, 25 bp, Homo sapien
agaattctgtatcacgtgaactgtg

SEQ ID NO: 704464 - DNA, 25 bp, Homo sapien
acaaaccacggtcagagatgggcca

SEQ ID NO: 704465 - DNA, 25 bp, Homo sapien
caaaatccaggagccataagaggca

SEQ ID NO: 704466 - DNA, 25 bp, Homo sapien
gaacaaaatccaggagccataagag

SEQ ID NO: 704467 - DNA, 25 bp, Homo sapien
aatccaggagccataagaggcatgg

SEQ ID NO: 704468 - DNA, 25 bp, Homo sapien
aaatccaggagccataagaggcatg

SEQ ID NO: 704469 - DNA, 25 bp, Homo sapien
cccggtgctgctagcggtgctcagc

SEQ ID NO: 704470 - DNA, 25 bp, Homo sapien
gacacttgcccggtgctgctagcgg

SEQ ID NO: 704471 - DNA, 25 bp, Homo sapien
cctctaagcccctcgctcagctgcg

SEQ ID NO: 704472 - DNA, 25 bp, Homo sapien
tgctagcggtgctcagctcagctcc

SEQ ID NO: 704473 - DNA, 25 bp, Homo sapien
gtttcttctgcaagagcccgcaggc

SEQ ID NO: 704474 - DNA, 25 bp, Homo sapien
ccgcagtcaagggacgcatgtggtc

SEQ ID NO: 704475 - DNA, 25 bp, Homo sapien
tctgcaaggcctcatggacgggtgc

SEQ ID NO: 704476 - DNA, 25 bp, Homo sapien
gagataggatcaaccgcagggctgt

SEQ ID NO: 704477 - DNA, 25 bp, Homo sapien
cgaggcagggctcggcccgcggcaa

SEQ ID NO: 704478 - DNA, 25 bp, Homo sapien
agggctcggcccgcggcaaggttag

SEQ ID NO: 704479 - DNA, 25 bp, Homo sapien
ggcagggctcggcccgcggcaaggt

SEQ ID NO: 704480 - DNA, 25 bp, Homo sapien
gggctcggcccgcggcaaggttagc

SEQ ID NO: 704481 - DNA, 25 bp, Homo sapien
aagcaggcgccgctcatagtcctgg

SEQ ID NO: 704482 - DNA, 25 bp, Homo sapien
acgatctggcgaagcaggcgccgct

SEQ ID NO: 704483 - DNA, 25 bp, Homo sapien
tctggcgaagcaggcgccgctcata

SEQ ID NO: 704484 - DNA, 25 bp, Homo sapien
tctggatgacgatctggcgaagcag

SEQ ID NO: 704485 - DNA, 25 bp, Homo sapien
gcaggcgtcagggtccgccgcatct

SEQ ID NO: 704486 - DNA, 25 bp, Homo sapien
gaagttcacgctccagttggctccg

SEQ ID NO: 704487 - DNA, 25 bp, Homo sapien
tccgtgcttgctgggcgaggacact

SEQ ID NO: 704488 - DNA, 25 bp, Homo sapien
ggatgaagcggtctccgtgcttgct

SEQ ID NO: 704489 - DNA, 25 bp, Homo sapien
tctgaggtggcgtccttggctttcc

SEQ ID NO: 704490 - DNA, 25 bp, Homo sapien
cttggctttccggttctgactggga

SEQ ID NO: 704491 - DNA, 25 bp, Homo sapien
gcgtccttggctttccggttctgac

SEQ ID NO: 704492 - DNA, 25 bp, Homo sapien
ctttgccgttgtctgaggtggcgtc

SEQ ID NO: 704493 - DNA, 25 bp, Homo sapien
tgccggcacccagcagctcattctt

SEQ ID NO: 704494 - DNA, 25 bp, Homo sapien
cagcctgcggtcctcagtctgcggg

SEQ ID NO: 704495 - DNA, 25 bp, Homo sapien
ggtcctcagtctgcgggtcctgcac

SEQ ID NO: 704496 - DNA, 25 bp, Homo sapien
cttctcaggcgtggagggctgcagc

SEQ ID NO: 704497 - DNA, 25 bp, Homo sapien
tagggagacacatcgttgccgtcat

SEQ ID NO: 704498 - DNA, 25 bp, Homo sapien
gggagtagggagacacatcgttgcc

SEQ ID NO: 704499 - DNA, 25 bp, Homo sapien
tcttgttgctgacgggagacaggga

SEQ ID NO: 704500 - DNA, 25 bp, Homo sapien
gagacacatcgttgccgtcatcggg

SEQ ID NO: 704501 - DNA, 25 bp, Homo sapien
ctagccccacgctgagcacattgag

SEQ ID NO: 704502 - DNA, 25 bp, Homo sapien
acaggtacacgcaggtgcctagccc

SEQ ID NO: 704503 - DNA, 25 bp, Homo sapien
ggacgaccagtccaccagattgagg

SEQ ID NO: 704504 - DNA, 25 bp, Homo sapien
cttggagatcttgcgggtgggtttc

SEQ ID NO: 704505 - DNA, 25 bp, Homo sapien
ctctcccatccgctctcccatccgc

SEQ ID NO: 704506 - DNA, 25 bp, Homo sapien
tctcccatccgctcacccatctgct

SEQ ID NO: 704507 - DNA, 25 bp, Homo sapien
cactctcatccactcttgcatctgc

SEQ ID NO: 704508 - DNA, 25 bp, Homo sapien
accactctcatccactcttgcatct

SEQ ID NO: 704509 - DNA, 25 bp, Homo sapien
ctcccatgcgctctcccatccgctc

SEQ ID NO: 704510 - DNA, 25 bp, Homo sapien
tctcccatgcgctctcccatccgct

SEQ ID NO: 704511 - DNA, 25 bp, Homo sapien
tgcgctctcccatccgctctcccat

SEQ ID NO: 704512 - DNA, 25 bp, Homo sapien
tctcccatccgctctcccatccgct

SEQ ID NO: 704513 - DNA, 25 bp, Homo sapien
acggaggtcactgagtccccttcca

SEQ ID NO: 704514 - DNA, 25 bp, Homo sapien
ccgctcagaccagcccacggaggtc

SEQ ID NO: 704515 - DNA, 25 bp, Homo sapien
aggtcactgagtccccttccactga

SEQ ID NO: 704516 - DNA, 25 bp, Homo sapien
cttccactgagaggtcacagagccg

SEQ ID NO: 704517 - DNA, 25 bp, Homo sapien
ccatgatatgcttcaaagctgctgc

SEQ ID NO: 704518 - DNA, 25 bp, Homo sapien
cataatctaaaatggaactaaagcc

SEQ ID NO: 704519 - DNA, 25 bp, Homo sapien
taaaatggaactaaagcccactcga

SEQ ID NO: 704520 - DNA, 25 bp, Homo sapien
aagctgctgctgagatgttttcatc

SEQ ID NO: 704521 - DNA, 25 bp, Homo sapien
ttccctgcggctgcgtcccagatct

SEQ ID NO: 704522 - DNA, 25 bp, Homo sapien
gtggccctccaacatggacagcttc

SEQ ID NO: 704523 - DNA, 25 bp, Homo sapien
cgacgcgtgccgtgtggccctccaa

SEQ ID NO: 704524 - DNA, 25 bp, Homo sapien
atctgcacgaagcccttgtgtgtgc

SEQ ID NO: 704525 - DNA, 25 bp, Homo sapien
cctctgcaggatcatgcggtcgcgg

SEQ ID NO: 704526 - DNA, 25 bp, Homo sapien
cttgttgtcgttgccccccgaggcg

SEQ ID NO: 704527 - DNA, 25 bp, Homo sapien
gctcccggacgacagctgctcagca

SEQ ID NO: 704528 - DNA, 25 bp, Homo sapien
tggcggggtgcggatgtccctctgc

SEQ ID NO: 704529 - DNA, 25 bp, Homo sapien
gaccaggccagattgcacacttggg

SEQ ID NO: 704530 - DNA, 25 bp, Homo sapien
cagctcgttggcgtgcttggaccag

SEQ ID NO: 704531 - DNA, 25 bp, Homo sapien
ccagaagcggatacagcggtcagct

SEQ ID NO: 704532 - DNA, 25 bp, Homo sapien
tgggagcccgtgtcgatacactgca

SEQ ID NO: 704533 - DNA, 25 bp, Homo sapien
ggtacagcacgcggtaggagtgccc

SEQ ID NO: 704534 - DNA, 25 bp, Homo sapien
caggtacagcacgcggtaggagtgc

SEQ ID NO: 704535 - DNA, 25 bp, Homo sapien
ggggtacttccagacaaggatctgg

SEQ ID NO: 704536 - DNA, 25 bp, Homo sapien
gtcagggaggggtacttccagacaa

SEQ ID NO: 704537 - DNA, 25 bp, Homo sapien
tcagatgcgcggatgaaagcacaga

SEQ ID NO: 704538 - DNA, 25 bp, Homo sapien
gggagttcggtagagcccattccaa

SEQ ID NO: 704539 - DNA, 25 bp, Homo sapien
tgtgtaggacgttcacagggtcatc

SEQ ID NO: 704540 - DNA, 25 bp, Homo sapien
aaatcttggcaagtgagggcacgtg

SEQ ID NO: 704541 - DNA, 25 bp, Homo sapien
gacaggagggaagcaccccatgtct

SEQ ID NO: 704542 - DNA, 25 bp, Homo sapien
caggagggaagcaccccatgtctct

SEQ ID NO: 704543 - DNA, 25 bp, Homo sapien
agggaagcaccccatgtctctgggc

SEQ ID NO: 704544 - DNA, 25 bp, Homo sapien
ggagggaagcaccccatgtctctgg

SEQ ID NO: 704545 - DNA, 25 bp, Homo sapien
agtgacgatggcctccccatcaggg

SEQ ID NO: 704546 - DNA, 25 bp, Homo sapien
gaacctcagggtctcgtctccagca

SEQ ID NO: 704547 - DNA, 25 bp, Homo sapien
ctaaagacgttccagaacctcaggg

SEQ ID NO: 704548 - DNA, 25 bp, Homo sapien
tccagcaccagtgacgatggcctcc

SEQ ID NO: 704549 - DNA, 25 bp, Homo sapien
gggatggcagatgcgctgagccgca

SEQ ID NO: 704550 - DNA, 25 bp, Homo sapien
catggggatggcagatgcgctgagc

SEQ ID NO: 704551 - DNA, 25 bp, Homo sapien
tggggatggcagatgcgctgagccg

SEQ ID NO: 704552 - DNA, 25 bp, Homo sapien
atggggatggcagatgcgctgagcc

SEQ ID NO: 704553 - DNA, 25 bp, Homo sapien
cggatcctggtgaagaggttgagca

SEQ ID NO: 704554 - DNA, 25 bp, Homo sapien
gatcctggtgaagaggttgagcaca

SEQ ID NO: 704555 - DNA, 25 bp, Homo sapien
gaagaggttgagcacagacacagac

SEQ ID NO: 704556 - DNA, 25 bp, Homo sapien
agaggttgagcacagacacagactc

SEQ ID NO: 704557 - DNA, 25 bp, Homo sapien
tggacatggttcacaatcaggcatt

SEQ ID NO: 704558 - DNA, 25 bp, Homo sapien
caggcatttaatgagactccaggat

SEQ ID NO: 704559 - DNA, 25 bp, Homo sapien
gcccaccccagatactggtggacat

SEQ ID NO: 704560 - DNA, 25 bp, Homo sapien
gggacaagcgctgggaaggcagagt

SEQ ID NO: 704561 - DNA, 25 bp, Homo sapien
tctgtgcagacgtgggcagttccag

SEQ ID NO: 704562 - DNA, 25 bp, Homo sapien
gggcatccgtcgctctgagtacaga

SEQ ID NO: 704563 - DNA, 25 bp, Homo sapien
tctgagccgggaccgtccaatgtgg

SEQ ID NO: 704564 - DNA, 25 bp, Homo sapien
tctgagtacagacggtctgagccgg

SEQ ID NO: 704565 - DNA, 25 bp, Homo sapien
gggactgtctcttggatccacaggc

SEQ ID NO: 704566 - DNA, 25 bp, Homo sapien
ccatgaatgggcaaccggggtctca

SEQ ID NO: 704567 - DNA, 25 bp, Homo sapien
tgcaaggatgccgtgaagcccaggt

SEQ ID NO: 704568 - DNA, 25 bp, Homo sapien
cctgcccaggcctacatgccttggt

SEQ ID NO: 704569 - DNA, 25 bp, Homo sapien
cagtgagcaggtccgggttcagttc

SEQ ID NO: 704570 - DNA, 25 bp, Homo sapien
ggccaggatgcacaggcccatctga

SEQ ID NO: 704571 - DNA, 25 bp, Homo sapien
tgaccgccgggcgatggccatgaca

SEQ ID NO: 704572 - DNA, 25 bp, Homo sapien
ttggcgaatgcacgaagacgtggca

SEQ ID NO: 704573 - DNA, 25 bp, Homo sapien
ccactgtgggttgtgcactgagcca

SEQ ID NO: 704574 - DNA, 25 bp, Homo sapien
gacagcgtcactgcattacatgaga

SEQ ID NO: 704575 - DNA, 25 bp, Homo sapien
gagaaacaaggctggtctgtcctgg

SEQ ID NO: 704576 - DNA, 25 bp, Homo sapien
aatgtggaagatcgacccgcttgaa

SEQ ID NO: 704577 - DNA, 25 bp, Homo sapien
tcagccacaaggaggtgcgaagctc

SEQ ID NO: 704578 - DNA, 25 bp, Homo sapien
gatcaacagaaaagttgcagcccgc

SEQ ID NO: 704579 - DNA, 25 bp, Homo sapien
tgaacgccacctcactgtaagacgg

SEQ ID NO: 704580 - DNA, 25 bp, Homo sapien
cacagaagggtacgctgtgatccca

SEQ ID NO: 704581 - DNA, 25 bp, Homo sapien
ggcctctgaggccaccgttgacagc

SEQ ID NO: 704582 - DNA, 25 bp, Homo sapien
ataaaggccacccagtgtctcggca

SEQ ID NO: 704583 - DNA, 25 bp, Homo sapien
ggctggagagtcgttctgagtattt

SEQ ID NO: 704584 - DNA, 25 bp, Homo sapien
ggagagtcgttctgagtatttaaca

SEQ ID NO: 704585 - DNA, 25 bp, Homo sapien
ccgaggggatacagggccgtgcagc

SEQ ID NO: 704586 - DNA, 25 bp, Homo sapien
cagcctcttgcctgagggtttgcat

SEQ ID NO: 704587 - DNA, 25 bp, Homo sapien
gccgtgcagcctcttgcctgagggt

SEQ ID NO: 704588 - DNA, 25 bp, Homo sapien
agctggcctcgagggtccccgaggg

SEQ ID NO: 704589 - DNA, 25 bp, Homo sapien
tttgagggaccccacatagactcgg

SEQ ID NO: 704590 - DNA, 25 bp, Homo sapien
tatgtcccaaggaagtcatcccaga

SEQ ID NO: 704591 - DNA, 25 bp, Homo sapien
gacagtctagcagggttcaaaacaa

SEQ ID NO: 704592 - DNA, 25 bp, Homo sapien
ggttgctggccccaagacagtctag

SEQ ID NO: 704593 - DNA, 25 bp, Homo sapien
catgggcgtgtacttccagcgtgtg

SEQ ID NO: 704594 - DNA, 25 bp, Homo sapien
gcaggttgtaccaggcttcccaggc

SEQ ID NO: 704595 - DNA, 25 bp, Homo sapien
aggcctgtgtaccacagctggccgg

SEQ ID NO: 704596 - DNA, 25 bp, Homo sapien
gcttcccaggcgtccgagttggtca

SEQ ID NO: 704597 - DNA, 25 bp, Homo sapien
ggctggcggtcattcctgtccccct

SEQ ID NO: 704598 - DNA, 25 bp, Homo sapien
gggctggcggtcattcctgtccccc

SEQ ID NO: 704599 - DNA, 25 bp, Homo sapien
ggggctggcggtcattcctgtcccc

SEQ ID NO: 704600 - DNA, 25 bp, Homo sapien
ggtcatgccaggcggtctcccgcag

SEQ ID NO: 704601 - DNA, 25 bp, Homo sapien
atggggtcatgccaggcggtctccc

SEQ ID NO: 704602 - DNA, 25 bp, Homo sapien
tactgggcagggacgatggggtcat

SEQ ID NO: 704603 - DNA, 25 bp, Homo sapien
atgccaggcggtctcccgcaggtgc

SEQ ID NO: 704604 - DNA, 25 bp, Homo sapien
cgtattccttgccccggattggcct

SEQ ID NO: 704605 - DNA, 25 bp, Homo sapien
agcgcgctcccccaccgggtgctgg

SEQ ID NO: 704606 - DNA, 25 bp, Homo sapien
gtattccttgccccggattggcctg

SEQ ID NO: 704607 - DNA, 25 bp, Homo sapien
taggtgggactcgggtcaccatgtg

SEQ ID NO: 704608 - DNA, 25 bp, Homo sapien
ggactcgggtcaccatgtgccccca

SEQ ID NO: 704609 - DNA, 25 bp, Homo sapien
tgggactcgggtcaccatgtgcccc

SEQ ID NO: 704610 - DNA, 25 bp, Homo sapien
ggtgggactcgggtcaccatgtgcc

SEQ ID NO: 704611 - DNA, 25 bp, Homo sapien
caggacccactcccggtagttctgg

SEQ ID NO: 704612 - DNA, 25 bp, Homo sapien
ggagggcacgtagtctgatgccctc

SEQ ID NO: 704613 - DNA, 25 bp, Homo sapien
ggaggggcagtatggttccaggacc

SEQ ID NO: 704614 - DNA, 25 bp, Homo sapien
gcgggcgctggggtgccgacaggga

SEQ ID NO: 704615 - DNA, 25 bp, Homo sapien
gggacaagtagtgccaaagccctgg

SEQ ID NO: 704616 - DNA, 25 bp, Homo sapien
tgtaaaggtgaacgctcagagaaac

SEQ ID NO: 704617 - DNA, 25 bp, Homo sapien
gcagagccagccgtgttaatagtca

SEQ ID NO: 704618 - DNA, 25 bp, Homo sapien
caaacgttgggtccatgtgtgcagt

SEQ ID NO: 704619 - DNA, 25 bp, Homo sapien
gagacgaccctcagaatcagacaca

SEQ ID NO: 704620 - DNA, 25 bp, Homo sapien
tgaaggttaccctggcaatggcacc

SEQ ID NO: 704621 - DNA, 25 bp, Homo sapien
cagccgctcttgatgcctgagcagg

SEQ ID NO: 704622 - DNA, 25 bp, Homo sapien
gctggtggctaaggactcactttgc

SEQ ID NO: 704623 - DNA, 25 bp, Homo sapien
tgagctacgccgtgggccacttcct

SEQ ID NO: 704624 - DNA, 25 bp, Homo sapien
tgctgctctacctgcactcggtgcg

SEQ ID NO: 704625 - DNA, 25 bp, Homo sapien
tgtgcgcgtccatgtggttcaccta

SEQ ID NO: 704626 - DNA, 25 bp, Homo sapien
tgtgcacaccgctcgtgggctacga

SEQ ID NO: 704627 - DNA, 25 bp, Homo sapien
cttgtaaccgcccttcttggtctga

SEQ ID NO: 704628 - DNA, 25 bp, Homo sapien
tcggcgcgccggccggcgattggtt

SEQ ID NO: 704629 - DNA, 25 bp, Homo sapien
gatcggcgcgccggccggcgattgg

SEQ ID NO: 704630 - DNA, 25 bp, Homo sapien
atcggcgcgccggccggcgattggt

SEQ ID NO: 704631 - DNA, 25 bp, Homo sapien
cgatcggcgcgccggccggcgattg

SEQ ID NO: 704632 - DNA, 25 bp, Homo sapien
tttcccggacctcccgactgcgcga

SEQ ID NO: 704633 - DNA, 25 bp, Homo sapien
tcccggacctcccgactgcgcgacg

SEQ ID NO: 704634 - DNA, 25 bp, Homo sapien
ctttcccggacctcccgactgcgcg

SEQ ID NO: 704635 - DNA, 25 bp, Homo sapien
cggacctcccgactgcgcgacgctc

SEQ ID NO: 704636 - DNA, 25 bp, Homo sapien
tcagggcccggagttccgcggctgt

SEQ ID NO: 704637 - DNA, 25 bp, Homo sapien
cgagggcgggcgccccaagaatcct

SEQ ID NO: 704638 - DNA, 25 bp, Homo sapien
gaatcctttgttgggcgattgcccc

SEQ ID NO: 704639 - DNA, 25 bp, Homo sapien
ggcagggaagtcctcgagggcgggc

SEQ ID NO: 704640 - DNA, 25 bp, Homo sapien
ccgcgaactggggtaccccgcgatg

SEQ ID NO: 704641 - DNA, 25 bp, Homo sapien
gctgcccgatggcagaccgcgaact

SEQ ID NO: 704642 - DNA, 25 bp, Homo sapien
accccgcgatggagagccccgggat

SEQ ID NO: 704643 - DNA, 25 bp, Homo sapien
ctggaacacggacgcgggcggaggt

SEQ ID NO: 704644 - DNA, 25 bp, Homo sapien
gccgcgccgggctgcttggggccgt

SEQ ID NO: 704645 - DNA, 25 bp, Homo sapien
tcgccgcgctcttgcttgacagtca

SEQ ID NO: 704646 - DNA, 25 bp, Homo sapien
ttgcttgacagtcaccacgaagccc

SEQ ID NO: 704647 - DNA, 25 bp, Homo sapien
gcgctcttgcttgacagtcaccacg

SEQ ID NO: 704648 - DNA, 25 bp, Homo sapien
accctcgccgcgctcttgcttgaca

SEQ ID NO: 704649 - DNA, 25 bp, Homo sapien
ctcctcctcgtgggaccccttctcg

SEQ ID NO: 704650 - DNA, 25 bp, Homo sapien
tcctcctcgtgggaccccttctcgc

SEQ ID NO: 704651 - DNA, 25 bp, Homo sapien
ggcggagccacaagcaattcaaatc

SEQ ID NO: 704652 - DNA, 25 bp, Homo sapien
tgggcggagccacaagcaattcaaa

SEQ ID NO: 704653 - DNA, 25 bp, Homo sapien
gtgggcggagccacaagcaattcaa

SEQ ID NO: 704654 - DNA, 25 bp, Homo sapien
gggcggagccacaagcaattcaaat

SEQ ID NO: 704655 - DNA, 25 bp, Homo sapien
actatgggccgaggtttgagtacag

SEQ ID NO: 704656 - DNA, 25 bp, Homo sapien
acagggttggcgttgacttcggttg

SEQ ID NO: 704657 - DNA, 25 bp, Homo sapien
cacggtgggttagagggatccctgg

SEQ ID NO: 704658 - DNA, 25 bp, Homo sapien
aggtagggcccggtcagcagtcggg

SEQ ID NO: 704659 - DNA, 25 bp, Homo sapien
tgggcccattcggcagaatcttctt

SEQ ID NO: 704660 - DNA, 25 bp, Homo sapien
gggcccattcggcagaatcttcttc

SEQ ID NO: 704661 - DNA, 25 bp, Homo sapien
ttgggcccattcggcagaatcttct

SEQ ID NO: 704662 - DNA, 25 bp, Homo sapien
tccgggtggcgcgtgcggatctgct

SEQ ID NO: 704663 - DNA, 25 bp, Homo sapien
ggaaagggcagatccgggtggcgcg

SEQ ID NO: 704664 - DNA, 25 bp, Homo sapien
gcagatccgggtggcgcgtgcggat

SEQ ID NO: 704665 - DNA, 25 bp, Homo sapien
gggcagatccgggtggcgcgtgcgg

SEQ ID NO: 704666 - DNA, 25 bp, Homo sapien
tgcttttccgttggctgcagcttgc

SEQ ID NO: 704667 - DNA, 25 bp, Homo sapien
ctgcttttccgttggctgcagcttg

SEQ ID NO: 704668 - DNA, 25 bp, Homo sapien
gcttttccgttggctgcagcttgct

SEQ ID NO: 704669 - DNA, 25 bp, Homo sapien
tcagactgctggtacgcccgcagct

SEQ ID NO: 704670 - DNA, 25 bp, Homo sapien
aggcttcagactgctggtacgcccg

SEQ ID NO: 704671 - DNA, 25 bp, Homo sapien
tcctggatcttctccgtgcacatct

SEQ ID NO: 704672 - DNA, 25 bp, Homo sapien
atcttctccgtgcacatcttatagg

SEQ ID NO: 704673 - DNA, 25 bp, Homo sapien
ctgggctgaggtcgcaccccacaga

SEQ ID NO: 704674 - DNA, 25 bp, Homo sapien
cctgtctggctatgtatctttcccc

SEQ ID NO: 704675 - DNA, 25 bp, Homo sapien
gcaccctaggtcagcgctgctcagc

SEQ ID NO: 704676 - DNA, 25 bp, Homo sapien
atcccccatcgctgtaccgagtgag

SEQ ID NO: 704677 - DNA, 25 bp, Homo sapien
cttgtgtccattcaggagagtgttc

SEQ ID NO: 704678 - DNA, 25 bp, Homo sapien
ttgtgtccattcaggagagtgttca

SEQ ID NO: 704679 - DNA, 25 bp, Homo sapien
caggagagtgttcatgagcccagag

SEQ ID NO: 704680 - DNA, 25 bp, Homo sapien
ccattcaggagagtgttcatgagcc

SEQ ID NO: 704681 - DNA, 25 bp, Homo sapien
ttgcacacatctgggcgagcactgg

SEQ ID NO: 704682 - DNA, 25 bp, Homo sapien
aatttactggtggtaggaggcagcc

SEQ ID NO: 704683 - DNA, 25 bp, Homo sapien
gactcagggttctagaagcctccag

SEQ ID NO: 704684 - DNA, 25 bp, Homo sapien
cccggtgggagtacaatcaacagcg

SEQ ID NO: 704685 - DNA, 25 bp, Homo sapien
tttggtccaagaactcttcagtgaa

SEQ ID NO: 704686 - DNA, 25 bp, Homo sapien
tgggaacatcgaaggtggagaagcc

SEQ ID NO: 704687 - DNA, 25 bp, Homo sapien
tttgttttggtccaagaactcttca

SEQ ID NO: 704688 - DNA, 25 bp, Homo sapien
gttttggtccaagaactcttcagtg

SEQ ID NO: 704689 - DNA, 25 bp, Homo sapien
agtaccgcgttctgctcctcgaagg

SEQ ID NO: 704690 - DNA, 25 bp, Homo sapien
cggcaccggcagtgaggcgaagctg

SEQ ID NO: 704691 - DNA, 25 bp, Homo sapien
cgtgtgcctctgcagtaccgcgttc

SEQ ID NO: 704692 - DNA, 25 bp, Homo sapien
cggtgagcgcctggcgcacggcctg

SEQ ID NO: 704693 - DNA, 25 bp, Homo sapien
agggggtgactcagggcgggtcgcg

SEQ ID NO: 704694 - DNA, 25 bp, Homo sapien
gggacaggcgggaaggtcaggcgag

SEQ ID NO: 704695 - DNA, 25 bp, Homo sapien
actcagggcgggtcgcgcgggcgct

SEQ ID NO: 704696 - DNA, 25 bp, Homo sapien
ggcgggaaggtcaggcgagggtgcc

SEQ ID NO: 704697 - DNA, 25 bp, Homo sapien
tgatgcggacgatgagcttctcgtg

SEQ ID NO: 704698 - DNA, 25 bp, Homo sapien
gtcgcgctcgatggctccgtgaagc

SEQ ID NO: 704699 - DNA, 25 bp, Homo sapien
tggctccgtgaagccgggccatgta

SEQ ID NO: 704700 - DNA, 25 bp, Homo sapien
gatgcggacgatgagcttctcgtgc

SEQ ID NO: 704701 - DNA, 25 bp, Homo sapien
ccctccgggaggtgatctctagtaa

SEQ ID NO: 704702 - DNA, 25 bp, Homo sapien
tctctagtaagctgcggagtcccac

SEQ ID NO: 704703 - DNA, 25 bp, Homo sapien
tagtaagctgcggagtcccacccag

SEQ ID NO: 704704 - DNA, 25 bp, Homo sapien
gaggtgatctctagtaagctgcgga

SEQ ID NO: 704705 - DNA, 25 bp, Homo sapien
cttctcctctgcatcgtgggcccgc

SEQ ID NO: 704706 - DNA, 25 bp, Homo sapien
cctctgcatcgtgggcccgcccact

SEQ ID NO: 704707 - DNA, 25 bp, Homo sapien
ccagcctctcgtccacggggtgggg

SEQ ID NO: 704708 - DNA, 25 bp, Homo sapien
ctcctctgcatcgtgggcccgccca

SEQ ID NO: 704709 - DNA, 25 bp, Homo sapien
ggggagattgaaagctaaagggatg

SEQ ID NO: 704710 - DNA, 25 bp, Homo sapien
ctggggagattgaaagctaaaggga

SEQ ID NO: 704711 - DNA, 25 bp, Homo sapien
tggggagattgaaagctaaagggat

SEQ ID NO: 704712 - DNA, 25 bp, Homo sapien
agtgtagcgcgtggctgtcctccga

SEQ ID NO: 704713 - DNA, 25 bp, Homo sapien
gcgcagcgagtgctttttccgggtt

SEQ ID NO: 704714 - DNA, 25 bp, Homo sapien
gcaccctcggctgtgaggttcttct

SEQ ID NO: 704715 - DNA, 25 bp, Homo sapien
tcttctgggtgtatcgcgcagcgag

SEQ ID NO: 704716 - DNA, 25 bp, Homo sapien
gggtgggtttcgtctgccctgtgtc

SEQ ID NO: 704717 - DNA, 25 bp, Homo sapien
tagtgagtaatttggggggtcctgc

SEQ ID NO: 704718 - DNA, 25 bp, Homo sapien
gtccccacaaggcagcttcctgtgt

SEQ ID NO: 704719 - DNA, 25 bp, Homo sapien
tggggtacaggcatgcgggggacac

SEQ ID NO: 704720 - DNA, 25 bp, Homo sapien
ccaccagggtccctcggctggagga

SEQ ID NO: 704721 - DNA, 25 bp, Homo sapien
aggagagcaggatgggcaaagccgg

SEQ ID NO: 704722 - DNA, 25 bp, Homo sapien
ttatttaaaaagtccggatccagca

SEQ ID NO: 704723 - DNA, 25 bp, Homo sapien
tatttaaaaagtccggatccagcag

SEQ ID NO: 704724 - DNA, 25 bp, Homo sapien
atttaaaaagtccggatccagcagt

SEQ ID NO: 704725 - DNA, 25 bp, Homo sapien
tgaggctctgctagaggtaaagaga

SEQ ID NO: 704726 - DNA, 25 bp, Homo sapien
aactctgaggctctgctagaggtaa

SEQ ID NO: 704727 - DNA, 25 bp, Homo sapien
tgctagaggtaaagagagcaggcct

SEQ ID NO: 704728 - DNA, 25 bp, Homo sapien
cagcagggaatgtcatggggggccc

SEQ ID NO: 704729 - DNA, 25 bp, Homo sapien
tccgggggggcctgagctcaggacc

SEQ ID NO: 704730 - DNA, 25 bp, Homo sapien
ccgcagtccgggggggcctgagctc

SEQ ID NO: 704731 - DNA, 25 bp, Homo sapien
gcagtccgggggggcctgagctcag

SEQ ID NO: 704732 - DNA, 25 bp, Homo sapien
agtccgggggggcctgagctcagga

SEQ ID NO: 704733 - DNA, 25 bp, Homo sapien
cgcgggcgggggcgcagacgcgcgc

SEQ ID NO: 704734 - DNA, 25 bp, Homo sapien
gcgtgcggaagacgaggcgcgggcg

SEQ ID NO: 704735 - DNA, 25 bp, Homo sapien
cgtgcggaagacgaggcgcgggcgg

SEQ ID NO: 704736 - DNA, 25 bp, Homo sapien
tgcgtgcggaagacgaggcgcgggc

SEQ ID NO: 704737 - DNA, 25 bp, Homo sapien
ctgcgtgcggaagacgaggcgcggg

SEQ ID NO: 704738 - DNA, 25 bp, Homo sapien
tcttggcgtacagctcgcggacgtt

SEQ ID NO: 704739 - DNA, 25 bp, Homo sapien
acagctcgcggacgttggtgaagcc

SEQ ID NO: 704740 - DNA, 25 bp, Homo sapien
tcggtgggcgcgatcccgaaggctt

SEQ ID NO: 704741 - DNA, 25 bp, Homo sapien
aaggcttcggcgatcttggcgtaca

SEQ ID NO: 704742 - DNA, 25 bp, Homo sapien
tgggcgccggtgtccgggctcctta

SEQ ID NO: 704743 - DNA, 25 bp, Homo sapien
gcgggtggtcttgggcgccggtgtc

SEQ ID NO: 704744 - DNA, 25 bp, Homo sapien
tggtcttgggcgccggtgtccgggc

SEQ ID NO: 704745 - DNA, 25 bp, Homo sapien
cttgggcgccggtgtccgggctcct

SEQ ID NO: 704746 - DNA, 25 bp, Homo sapien
aaggcgtagccagccccgttgtccg

SEQ ID NO: 704747 - DNA, 25 bp, Homo sapien
gtagccagccccgttgtccgtgatg

SEQ ID NO: 704748 - DNA, 25 bp, Homo sapien
cttgatgaaggcgtagccagccccg

SEQ ID NO: 704749 - DNA, 25 bp, Homo sapien
agccagccccgttgtccgtgatggt

SEQ ID NO: 704750 - DNA, 25 bp, Homo sapien
cacaatggagtggtcgttgatggct

SEQ ID NO: 704751 - DNA, 25 bp, Homo sapien
gatggcttcgatgctgtcacccacg

SEQ ID NO: 704752 - DNA, 25 bp, Homo sapien
cggttgatgatactgccttccttga

SEQ ID NO: 704753 - DNA, 25 bp, Homo sapien
cacactgcctcgatccggttgatga

SEQ ID NO: 704754 - DNA, 25 bp, Homo sapien
ggaagagctcccgccagcccacccg

SEQ ID NO: 704755 - DNA, 25 bp, Homo sapien
agagctcccgccagcccacccgcct

SEQ ID NO: 704756 - DNA, 25 bp, Homo sapien
tcgggaagagctcccgccagcccac

SEQ ID NO: 704757 - DNA, 25 bp, Homo sapien
ttcgggaagagctcccgccagccca

SEQ ID NO: 704758 - DNA, 25 bp, Homo sapien
ttcgcctctactggacatttgctgg

SEQ ID NO: 704759 - DNA, 25 bp, Homo sapien
tttcgcctctactggacatttgctg

SEQ ID NO: 704760 - DNA, 25 bp, Homo sapien
gccgcagggtctccctcccgctggt

SEQ ID NO: 704761 - DNA, 25 bp, Homo sapien
cccagaacgaagccgcagggtctcc

SEQ ID NO: 704762 - DNA, 25 bp, Homo sapien
gcagcccccccagaacgaagccgca

SEQ ID NO: 704763 - DNA, 25 bp, Homo sapien
ccgcagggtctccctcccgctggtc

SEQ ID NO: 704764 - DNA, 25 bp, Homo sapien
ggtcatcaaccttccgagatgcctc

SEQ ID NO: 704765 - DNA, 25 bp, Homo sapien
gaatgcccatgtagctttccagcag

SEQ ID NO: 704766 - DNA, 25 bp, Homo sapien
gtcccgaatgcccatgtagctttcc

SEQ ID NO: 704767 - DNA, 25 bp, Homo sapien
tagctttccagcaggtcatcaacct

SEQ ID NO: 704768 - DNA, 25 bp, Homo sapien
gctgtcttcttggacgtctccacca

SEQ ID NO: 704769 - DNA, 25 bp, Homo sapien
caccacaaactcgtcggggaaggcg

SEQ ID NO: 704770 - DNA, 25 bp, Homo sapien
gtctaaacagcgtgcaaactcctgg

SEQ ID NO: 704771 - DNA, 25 bp, Homo sapien
tcgcccaagacggagtctaaacagc

SEQ ID NO: 704772 - DNA, 25 bp, Homo sapien
ggaacttgtcctccgatctgggctg

SEQ ID NO: 704773 - DNA, 25 bp, Homo sapien
catagcttggcctcagatctgggct

SEQ ID NO: 704774 - DNA, 25 bp, Homo sapien
ggtctcaatactgggctctgtctca

SEQ ID NO: 704775 - DNA, 25 bp, Homo sapien
ccagagtttggcttgttgtcagggc

SEQ ID NO: 704776 - DNA, 25 bp, Homo sapien
taattctattgctgcgatggcctgg

SEQ ID NO: 704777 - DNA, 25 bp, Homo sapien
ccttgaaattggtctgggtcctgga

SEQ ID NO: 704778 - DNA, 25 bp, Homo sapien
tctggagctggtatctagaacctgg

SEQ ID NO: 704779 - DNA, 25 bp, Homo sapien
caaagtccagttgaataccagagct

SEQ ID NO: 704780 - DNA, 25 bp, Homo sapien
tgggttcccgaactaagctgacttc

SEQ ID NO: 704781 - DNA, 25 bp, Homo sapien
ggttccagaactaaggtgggctcca

SEQ ID NO: 704782 - DNA, 25 bp, Homo sapien
tgtgggcagattccatttccagggc

SEQ ID NO: 704783 - DNA, 25 bp, Homo sapien
gcctcaagctggattctagggtcaa

SEQ ID NO: 704784 - DNA, 25 bp, Homo sapien
tggaaggtgcctttattcaccatga

SEQ ID NO: 704785 - DNA, 25 bp, Homo sapien
agccaggaccggtgaagcccctgtt

SEQ ID NO: 704786 - DNA, 25 bp, Homo sapien
ttttccctccaaggacctggatctg

SEQ ID NO: 704787 - DNA, 25 bp, Homo sapien
tgagccctcagggtacatgcggtgc

SEQ ID NO: 704788 - DNA, 25 bp, Homo sapien
gacatagaggattcggttcctcccc

SEQ ID NO: 704789 - DNA, 25 bp, Homo sapien
ggtggtaccacctagaattcttcca

SEQ ID NO: 704790 - DNA, 25 bp, Homo sapien
cctaatcacttgatgggtggtacca

SEQ ID NO: 704791 - DNA, 25 bp, Homo sapien
agtttgtgcattgggcctcacccgg

SEQ ID NO: 704792 - DNA, 25 bp, Homo sapien
atctacttgcgcgtggccacctgga

SEQ ID NO: 704793 - DNA, 25 bp, Homo sapien
gggtgtatatcctgttccgccgcgc

SEQ ID NO: 704794 - DNA, 25 bp, Homo sapien
gagaaggagctgctcatctacttgc

SEQ ID NO: 704795 - DNA, 25 bp, Homo sapien
tccgggctgcagtaggaagtggaca

SEQ ID NO: 704796 - DNA, 25 bp, Homo sapien
cagtctggctgtgtcgtctggtgca

SEQ ID NO: 704797 - DNA, 25 bp, Homo sapien
tactactactgtgtgccgcgttcca

SEQ ID NO: 704798 - DNA, 25 bp, Homo sapien
gggcctcaaatatgtcctgtatgta

SEQ ID NO: 704799 - DNA, 25 bp, Homo sapien
cctgtatgtattaagcagggcatac

SEQ ID NO: 704800 - DNA, 25 bp, Homo sapien
ttgttctcatggaattggcctattg

SEQ ID NO: 704801 - DNA, 25 bp, Homo sapien
gcctattggcaagatcgcatgtttt

SEQ ID NO: 704802 - DNA, 25 bp, Homo sapien
agacaccccgcctcatctggaaata

SEQ ID NO: 704803 - DNA, 25 bp, Homo sapien
caccccgcctcatctggaaatagtt

SEQ ID NO: 704804 - DNA, 25 bp, Homo sapien
gccttggagcatgagaccagtgacc

SEQ ID NO: 704805 - DNA, 25 bp, Homo sapien
tcaaggtcgtgggaaccaaaagtca

SEQ ID NO: 704806 - DNA, 25 bp, Homo sapien
cctttctcaggccaggagggccgag

SEQ ID NO: 704807 - DNA, 25 bp, Homo sapien
accagtgaccccgagttttgcccat

SEQ ID NO: 704808 - DNA, 25 bp, Homo sapien
catttccccgcagcgggtatggagg

SEQ ID NO: 704809 - DNA, 25 bp, Homo sapien
ccgcagcgggtatggaggatgcgtc

SEQ ID NO: 704810 - DNA, 25 bp, Homo sapien
ggaggatgcgtcgaggtccctgtct

SEQ ID NO: 704811 - DNA, 25 bp, Homo sapien
ggtatggaggatgcgtcgaggtccc

SEQ ID NO: 704812 - DNA, 25 bp, Homo sapien
tttctttcgccaggcctcagtttcc

SEQ ID NO: 704813 - DNA, 25 bp, Homo sapien
ttctttcgccaggcctcagtttcct

SEQ ID NO: 704814 - DNA, 25 bp, Homo sapien
ctttctttcgccaggcctcagtttc

SEQ ID NO: 704815 - DNA, 25 bp, Homo sapien
tctttcgccaggcctcagtttcctc

SEQ ID NO: 704816 - DNA, 25 bp, Homo sapien
gatcgtgcagggatacaagttcaac

SEQ ID NO: 704817 - DNA, 25 bp, Homo sapien
gcacacgggcttcgagtggaacaag

SEQ ID NO: 704818 - DNA, 25 bp, Homo sapien
ttcaagatcgtcaaccgcgagtggg

SEQ ID NO: 704819 - DNA, 25 bp, Homo sapien
gcctgcgccgacaacaaggatttcg

SEQ ID NO: 704820 - DNA, 25 bp, Homo sapien
ccaggacgaggcgcagttcagcgtg

SEQ ID NO: 704821 - DNA, 25 bp, Homo sapien
aggacatcttcttccggcgggccaa

SEQ ID NO: 704822 - DNA, 25 bp, Homo sapien
ggccaggacgaggcgcagttcagcg

SEQ ID NO: 704823 - DNA, 25 bp, Homo sapien
gccaggacgaggcgcagttcagcgt

SEQ ID NO: 704824 - DNA, 25 bp, Homo sapien
tgcacgcgcactggggcgttccttc

SEQ ID NO: 704825 - DNA, 25 bp, Homo sapien
ttttaccggccgctgtccgagcact

SEQ ID NO: 704826 - DNA, 25 bp, Homo sapien
gtggaagcttttaccggccgctgtc

SEQ ID NO: 704827 - DNA, 25 bp, Homo sapien
actggggcgttccttcattcatcct

SEQ ID NO: 704828 - DNA, 25 bp, Homo sapien
tgctggaaccggatgaggacctgca

SEQ ID NO: 704829 - DNA, 25 bp, Homo sapien
tgagactgcagcgtgagacagagac

SEQ ID NO: 704830 - DNA, 25 bp, Homo sapien
cggcagaagctgtacaaactgaagc

SEQ ID NO: 704831 - DNA, 25 bp, Homo sapien
cataagccttgaccctgaactgacc

SEQ ID NO: 704832 - DNA, 25 bp, Homo sapien
gaaggaggccaaggagcgcaagaag

SEQ ID NO: 704833 - DNA, 25 bp, Homo sapien
ggagcgcaagaagcgggagaagatg

SEQ ID NO: 704834 - DNA, 25 bp, Homo sapien
aggccttcgagacgcccgaggagaa

SEQ ID NO: 704835 - DNA, 25 bp, Homo sapien
cgcacggcggctggccaagaaggag

SEQ ID NO: 704836 - DNA, 25 bp, Homo sapien
gcagagtgcgcttgtgggcgctaca

SEQ ID NO: 704837 - DNA, 25 bp, Homo sapien
ccttgctagctgtgaaaccgctggg

SEQ ID NO: 704838 - DNA, 25 bp, Homo sapien
accccacgctggaggacgaaggtga

SEQ ID NO: 704839 - DNA, 25 bp, Homo sapien
cagccagatccctagcgagcgggag

SEQ ID NO: 704840 - DNA, 25 bp, Homo sapien
gagccttcactttggtacctgttca

SEQ ID NO: 704841 - DNA, 25 bp, Homo sapien
gcagtgctgagattgtgccctggtc

SEQ ID NO: 704842 - DNA, 25 bp, Homo sapien
gctgaggaaataggctcctaggttg

SEQ ID NO: 704843 - DNA, 25 bp, Homo sapien
tcagtcttcacagcggccttggagg

SEQ ID NO: 704844 - DNA, 25 bp, Homo sapien
atgggagaacctttagaacctagct

SEQ ID NO: 704845 - DNA, 25 bp, Homo sapien
ggagggctgagtgacgtggtgcggc

SEQ ID NO: 704846 - DNA, 25 bp, Homo sapien
gaatcgacccttttgctaagttgga

SEQ ID NO: 704847 - DNA, 25 bp, Homo sapien
ctagctagccaacaggactgggagg

SEQ ID NO: 704848 - DNA, 25 bp, Homo sapien
catagcagcggtaccgttttcacac

SEQ ID NO: 704849 - DNA, 25 bp, Homo sapien
tacatgtgttcgtttgtctcgggca

SEQ ID NO: 704850 - DNA, 25 bp, Homo sapien
tgccaagtcacgtgtaactcggtgt

SEQ ID NO: 704851 - DNA, 25 bp, Homo sapien
tgtctctgattctggcgtcctcatg

SEQ ID NO: 704852 - DNA, 25 bp, Homo sapien
aatagcaactctgtccctgttagca

SEQ ID NO: 704853 - DNA, 25 bp, Homo sapien
cctggacgtgtcatagaagtggaat

SEQ ID NO: 704854 - DNA, 25 bp, Homo sapien
tgcgtctgtggatcagcctgtcctg

SEQ ID NO: 704855 - DNA, 25 bp, Homo sapien
tcatggctgagtcgtgttctggtgc

SEQ ID NO: 704856 - DNA, 25 bp, Homo sapien
cagcctgtgtcgtggagtgccgctg

SEQ ID NO: 704857 - DNA, 25 bp, Homo sapien
agagctgagggtcggccctgccgcc

SEQ ID NO: 704858 - DNA, 25 bp, Homo sapien
cctgtgtcgtggagtgccgctgccc

SEQ ID NO: 704859 - DNA, 25 bp, Homo sapien
ctgtgtcgtggagtgccgctgccca

SEQ ID NO: 704860 - DNA, 25 bp, Homo sapien
ggttcttctgtaggtcatacctggg

SEQ ID NO: 704861 - DNA, 25 bp, Homo sapien
gattctgttatttgggttgggttca

SEQ ID NO: 704862 - DNA, 25 bp, Homo sapien
gcaggaaattcaagctcgtcctaca

SEQ ID NO: 704863 - DNA, 25 bp, Homo sapien
tagttccatggctgtggtcggcagt

SEQ ID NO: 704864 - DNA, 25 bp, Homo sapien
cccctcgcaggtgaggaacaggagc

SEQ ID NO: 704865 - DNA, 25 bp, Homo sapien
tgctgccctggaaatagccttccgg

SEQ ID NO: 704866 - DNA, 25 bp, Homo sapien
tgctggagacggagcgcgcaaggag

SEQ ID NO: 704867 - DNA, 25 bp, Homo sapien
ttcagggacactgtactccccggag

SEQ ID NO: 704868 - DNA, 25 bp, Homo sapien
tgggctccagacctttgttgagcac

SEQ ID NO: 704869 - DNA, 25 bp, Homo sapien
tcttctggtgctaacgggactgcct

SEQ ID NO: 704870 - DNA, 25 bp, Homo sapien
gaaagtgtgagttccactcctgggc

SEQ ID NO: 704871 - DNA, 25 bp, Homo sapien
tccgccatgggagtcggctcgtgaa

SEQ ID NO: 704872 - DNA, 25 bp, Homo sapien
agtggcctcgcccctttctttgcgg

SEQ ID NO: 704873 - DNA, 25 bp, Homo sapien
tgaaagacactcgtggcttccctcc

SEQ ID NO: 704874 - DNA, 25 bp, Homo sapien
tttctttgcgggcagccggtgtcct

SEQ ID NO: 704875 - DNA, 25 bp, Homo sapien
tctggaaccgcttggtaggtgaccc

SEQ ID NO: 704876 - DNA, 25 bp, Homo sapien
catggtaggtgcttaggaaaccctc

SEQ ID NO: 704877 - DNA, 25 bp, Homo sapien
gaaaccctcgttggctacattcaga

SEQ ID NO: 704878 - DNA, 25 bp, Homo sapien
atgaatggaccgcactcccggagtc

SEQ ID NO: 704879 - DNA, 25 bp, Homo sapien
ggtatcaagcgtccgcacatggtag

SEQ ID NO: 704880 - DNA, 25 bp, Homo sapien
gagggaacccgaggcttgtagctct

SEQ ID NO: 704881 - DNA, 25 bp, Homo sapien
tggaactgacgaccacagacacagg

SEQ ID NO: 704882 - DNA, 25 bp, Homo sapien
tttcctctcttgtggtggcaacagg

SEQ ID NO: 704883 - DNA, 25 bp, Homo sapien
cctgccagtggaactgacgaccaca

SEQ ID NO: 704884 - DNA, 25 bp, Homo sapien
aataaatgcccgttcgctccctggg

SEQ ID NO: 704885 - DNA, 25 bp, Homo sapien
ccattccaaagggtgtcaggttcca

SEQ ID NO: 704886 - DNA, 25 bp, Homo sapien
gactttctcgagatgctgagcctga

SEQ ID NO: 704887 - DNA, 25 bp, Homo sapien
tcttgaccccagaatgaccgagaat

SEQ ID NO: 704888 - DNA, 25 bp, Homo sapien
ccaaaagggaggacggctgagctct

SEQ ID NO: 704889 - DNA, 25 bp, Homo sapien
ggatcccggttttgaccctgagcag

SEQ ID NO: 704890 - DNA, 25 bp, Homo sapien
tacgctaaggtgctgtcattctggg

SEQ ID NO: 704891 - DNA, 25 bp, Homo sapien
aaagcagagcccatgtgaattccag

SEQ ID NO: 704892 - DNA, 25 bp, Homo sapien
gagtgtggaacctgctagaagcttg

SEQ ID NO: 704893 - DNA, 25 bp, Homo sapien
agattctaggtgtggccggctcagc

SEQ ID NO: 704894 - DNA, 25 bp, Homo sapien
tccaaacgacctttgaggaagggca

SEQ ID NO: 704895 - DNA, 25 bp, Homo sapien
tgtgggttgccaagatccaaacgac

SEQ ID NO: 704896 - DNA, 25 bp, Homo sapien
gaagcttgtcgaaggccagagacct

SEQ ID NO: 704897 - DNA, 25 bp, Homo sapien
gcgcttggaacggagcctactattt

SEQ ID NO: 704898 - DNA, 25 bp, Homo sapien
ttttcctgcggtcttggcctgcggg

SEQ ID NO: 704899 - DNA, 25 bp, Homo sapien
tctgaagatacaacagcggctgcgt

SEQ ID NO: 704900 - DNA, 25 bp, Homo sapien
gctgaggagagtcacagcgggctga

SEQ ID NO: 704901 - DNA, 25 bp, Homo sapien
gacgcggcggaggtttctctcccca

SEQ ID NO: 704902 - DNA, 25 bp, Homo sapien
cctggaaacagtcaatcggccccca

SEQ ID NO: 704903 - DNA, 25 bp, Homo sapien
ccctggacgcggcggaggtttctct

SEQ ID NO: 704904 - DNA, 25 bp, Homo sapien
cagagagggcggtttcagcgaacaa

SEQ ID NO: 704905 - DNA, 25 bp, Homo sapien
gagggcggtttcagcgaacaaatac

SEQ ID NO: 704906 - DNA, 25 bp, Homo sapien
ggcggtttcagcgaacaaatacacc

SEQ ID NO: 704907 - DNA, 25 bp, Homo sapien
tcagcgaacaaatacaccgattggg

SEQ ID NO: 704908 - DNA, 25 bp, Homo sapien
acggtggattctgcctataatctca

SEQ ID NO: 704909 - DNA, 25 bp, Homo sapien
taacctgctttgatgttatactttg

SEQ ID NO: 704910 - DNA, 25 bp, Homo sapien
gggcacggtggattctgcctataat

SEQ ID NO: 704911 - DNA, 25 bp, Homo sapien
ttaaccaccaggctacagtggcttt

SEQ ID NO: 704912 - DNA, 25 bp, Homo sapien
aagatgggcatgaggccacacaggt

SEQ ID NO: 704913 - DNA, 25 bp, Homo sapien
gaagatgggcatgaggccacacagg

SEQ ID NO: 704914 - DNA, 25 bp, Homo sapien
tgggcatgaggccacacaggttcat

SEQ ID NO: 704915 - DNA, 25 bp, Homo sapien
gatgggcatgaggccacacaggttc

SEQ ID NO: 704916 - DNA, 25 bp, Homo sapien
tgtggccgtgtgctgttcccagatg

SEQ ID NO: 704917 - DNA, 25 bp, Homo sapien
aaccatggatccaccgggccggtct

SEQ ID NO: 704918 - DNA, 25 bp, Homo sapien
ggtctcggcctccagagatcgcaat

SEQ ID NO: 704919 - DNA, 25 bp, Homo sapien
tccagagatcgcaatgccaaagccc

SEQ ID NO: 704920 - DNA, 25 bp, Homo sapien
cacgtcagatacaaccatggatcca

SEQ ID NO: 704921 - DNA, 25 bp, Homo sapien
tgccctccgccggccctccaggtac

SEQ ID NO: 704922 - DNA, 25 bp, Homo sapien
gccatcttggtgcaggtcttgagta

SEQ ID NO: 704923 - DNA, 25 bp, Homo sapien
tggcaaacgcggaggtggcattctc

SEQ ID NO: 704924 - DNA, 25 bp, Homo sapien
ttctccatggaaaccccgttcacca

SEQ ID NO: 704925 - DNA, 25 bp, Homo sapien
gtatctgaatggcaaacgcggaggt

SEQ ID NO: 704926 - DNA, 25 bp, Homo sapien
tgggcctcaatgtccaaactgtaag

SEQ ID NO: 704927 - DNA, 25 bp, Homo sapien
ccacagcggcacgacccaggctggg

SEQ ID NO: 704928 - DNA, 25 bp, Homo sapien
taagatgagaagatgactccttgct

SEQ ID NO: 704929 - DNA, 25 bp, Homo sapien
ctcagaagcttacaacccccacagc

SEQ ID NO: 704930 - DNA, 25 bp, Homo sapien
tcatctgcacgtcctgccgtggcag

SEQ ID NO: 704931 - DNA, 25 bp, Homo sapien
gccactggatgagtcgccgtcatag

SEQ ID NO: 704932 - DNA, 25 bp, Homo sapien
cgtggcagccgcttaaagccggaca

SEQ ID NO: 704933 - DNA, 25 bp, Homo sapien
catcgtcttcatccgagtcctggcg

SEQ ID NO: 704934 - DNA, 25 bp, Homo sapien
ggcccgaatctgtaatgtgcttgat

SEQ ID NO: 704935 - DNA, 25 bp, Homo sapien
gcagccaggcccgaatctgtaatgt

SEQ ID NO: 704936 - DNA, 25 bp, Homo sapien
tagaatgagatctccttcctgcagc

SEQ ID NO: 704937 - DNA, 25 bp, Homo sapien
tgcttgatgaagatctgactgccca

SEQ ID NO: 704938 - DNA, 25 bp, Homo sapien
gaatgttcaccaggaactgcccacg

SEQ ID NO: 704939 - DNA, 25 bp, Homo sapien
cttctcaatcagtcgccgggtgtcg

SEQ ID NO: 704940 - DNA, 25 bp, Homo sapien
ggttctggctagacaccccgttgat

SEQ ID NO: 704941 - DNA, 25 bp, Homo sapien
tcactgacagcaggcggaatgttca

SEQ ID NO: 704942 - DNA, 25 bp, Homo sapien
ctgcagggggagaggacatctcatc

SEQ ID NO: 704943 - DNA, 25 bp, Homo sapien
acgggagagtcggtctggctggcct

SEQ ID NO: 704944 - DNA, 25 bp, Homo sapien
tcggggctccgctgagcatgccggg

SEQ ID NO: 704945 - DNA, 25 bp, Homo sapien
tgcctgcgatagctccgaggcgagg

SEQ ID NO: 704946 - DNA, 25 bp, Homo sapien
gatggtggtgcctgcgatagctccg

SEQ ID NO: 704947 - DNA, 25 bp, Homo sapien
aatctactgaactttcccgccgaag

SEQ ID NO: 704948 - DNA, 25 bp, Homo sapien
ccgagatggttctggaatctactga

SEQ ID NO: 704949 - DNA, 25 bp, Homo sapien
tggaatctactgaactttcccgccg

SEQ ID NO: 704950 - DNA, 25 bp, Homo sapien
ctggttccgagatggttctggaatc

SEQ ID NO: 704951 - DNA, 25 bp, Homo sapien
tctgactgctgggcactctgtagat

SEQ ID NO: 704952 - DNA, 25 bp, Homo sapien
tgactgctgggcactctgtagatgt

SEQ ID NO: 704953 - DNA, 25 bp, Homo sapien
ctgactgctgggcactctgtagatg

SEQ ID NO: 704954 - DNA, 25 bp, Homo sapien
gccgcagcccgatgctcttgccctt

SEQ ID NO: 704955 - DNA, 25 bp, Homo sapien
acgaagatgcccacgtcattgcccc

SEQ ID NO: 704956 - DNA, 25 bp, Homo sapien
ttgaggaagcggaccacacgcgtgt

SEQ ID NO: 704957 - DNA, 25 bp, Homo sapien
agaatctgatctccctcctggatgc

SEQ ID NO: 704958 - DNA, 25 bp, Homo sapien
tagcacactgcacgcccatgatcag

SEQ ID NO: 704959 - DNA, 25 bp, Homo sapien
cacactgcacgcccatgatcagtgg

SEQ ID NO: 704960 - DNA, 25 bp, Homo sapien
ctagcacactgcacgcccatgatca

SEQ ID NO: 704961 - DNA, 25 bp, Homo sapien
agcacactgcacgcccatgatcagt

SEQ ID NO: 704962 - DNA, 25 bp, Homo sapien
tgctgccaagggacccggcagttcc

SEQ ID NO: 704963 - DNA, 25 bp, Homo sapien
gtgcatgagatcctggaccttcctc

SEQ ID NO: 704964 - DNA, 25 bp, Homo sapien
gagggctttccgactggggtatcac

SEQ ID NO: 704965 - DNA, 25 bp, Homo sapien
gggcgtgcatgagatcctggacctt

SEQ ID NO: 704966 - DNA, 25 bp, Homo sapien
gtcaggttctggaatggcacgtcat

SEQ ID NO: 704967 - DNA, 25 bp, Homo sapien
caggttctggaatggcacgtcattc

SEQ ID NO: 704968 - DNA, 25 bp, Homo sapien
gtgtcaggttctggaatggcacgtc

SEQ ID NO: 704969 - DNA, 25 bp, Homo sapien
cccgtgtcaggttctggaatggcac

SEQ ID NO: 704970 - DNA, 25 bp, Homo sapien
tgggctccagctcaaagtgagtgcg

SEQ ID NO: 704971 - DNA, 25 bp, Homo sapien
aagacgtcgccacgggtgaagccca

SEQ ID NO: 704972 - DNA, 25 bp, Homo sapien
agcccaggccagacggtggactggg

SEQ ID NO: 704973 - DNA, 25 bp, Homo sapien
aaggagtcacccacgcgggactgca

SEQ ID NO: 704974 - DNA, 25 bp, Homo sapien
ggccggggtgcagcgtgtccagcac

SEQ ID NO: 704975 - DNA, 25 bp, Homo sapien
tggcctcctcgtgcgtggctctgcc

SEQ ID NO: 704976 - DNA, 25 bp, Homo sapien
ccagtggcctcctcgtgcgtggctc

SEQ ID NO: 704977 - DNA, 25 bp, Homo sapien
agtggcctcctcgtgcgtggctctg

SEQ ID NO: 704978 - DNA, 25 bp, Homo sapien
gttgggaatgatgccccgctcttgc

SEQ ID NO: 704979 - DNA, 25 bp, Homo sapien
cccgctcttgctcccgcaggtcacg

SEQ ID NO: 704980 - DNA, 25 bp, Homo sapien
ggttgggaatgatgccccgctcttg

SEQ ID NO: 704981 - DNA, 25 bp, Homo sapien
cttgctcccgcaggtcacgacccat

SEQ ID NO: 704982 - DNA, 25 bp, Homo sapien
agtggtcttcttggctcctcgacga

SEQ ID NO: 704983 - DNA, 25 bp, Homo sapien
agaactcggcccgagcattggagcc

SEQ ID NO: 704984 - DNA, 25 bp, Homo sapien
ctgagaggtcctcacggctccgctg

SEQ ID NO: 704985 - DNA, 25 bp, Homo sapien
caccactcgttcgtagggcgggtag

SEQ ID NO: 704986 - DNA, 25 bp, Homo sapien
atgtgggccaggctggtgcgatcat

SEQ ID NO: 704987 - DNA, 25 bp, Homo sapien
ccatgtgggccaggctggtgcgatc

SEQ ID NO: 704988 - DNA, 25 bp, Homo sapien
tgggccaggctggtgcgatcatagc

SEQ ID NO: 704989 - DNA, 25 bp, Homo sapien
tgtgggccaggctggtgcgatcata

SEQ ID NO: 704990 - DNA, 25 bp, Homo sapien
agacacaaatagatttttaaggaat

SEQ ID NO: 704991 - DNA, 25 bp, Homo sapien
gttctcctgccttagcctcctgagt

SEQ ID NO: 704992 - DNA, 25 bp, Homo sapien
ggcgtgagccaccgcacgtggccta

SEQ ID NO: 704993 - DNA, 25 bp, Homo sapien
aaccttcaccttccaggttcatgca

SEQ ID NO: 704994 - DNA, 25 bp, Homo sapien
cttcaccttccaggttcatgcagtt

SEQ ID NO: 704995 - DNA, 25 bp, Homo sapien
aatcagggtcccatttgcgatcaaa

SEQ ID NO: 704996 - DNA, 25 bp, Homo sapien
catttctgggttccgccttcaaggg

SEQ ID NO: 704997 - DNA, 25 bp, Homo sapien
tttaaccaggaccatagctacccag

SEQ ID NO: 704998 - DNA, 25 bp, Homo sapien
tggccaatggaacactagcagaatt

SEQ ID NO: 704999 - DNA, 25 bp, Homo sapien
gcatctcagcagtcaacttctgcat

SEQ ID NO: 705000 - DNA, 25 bp, Homo sapien
acttctgcatagcaatgtcggccac

SEQ ID NO: 705001 - DNA, 25 bp, Homo sapien
ccaggatcactaccgggcgcttgaa

SEQ ID NO: 705002 - DNA, 25 bp, Homo sapien
gtcggccacgggtcccaggatcact

SEQ ID NO: 705003 - DNA, 25 bp, Homo sapien
tttttctgcaatcacccgcacggtg

SEQ ID NO: 705004 - DNA, 25 bp, Homo sapien
tgcaatcacccgcacggtgtctagt

SEQ ID NO: 705005 - DNA, 25 bp, Homo sapien
cgcacggtgtctagtttgatgatct

SEQ ID NO: 705006 - DNA, 25 bp, Homo sapien
gggctgtcggtcctggacacagtct

SEQ ID NO: 705007 - DNA, 25 bp, Homo sapien
gctctcggggatgaagaagaccaca

SEQ ID NO: 705008 - DNA, 25 bp, Homo sapien
ctgctgtgttttcgcagcttctggg

SEQ ID NO: 705009 - DNA, 25 bp, Homo sapien
cagccactggcgcagtgccttgagg

SEQ ID NO: 705010 - DNA, 25 bp, Homo sapien
tgcacatagttgaggcgctcgatgg

SEQ ID NO: 705011 - DNA, 25 bp, Homo sapien
tcactcgtgccattcagagggatgg

SEQ ID NO: 705012 - DNA, 25 bp, Homo sapien
gtccagatgggccgcgtctgctgct

SEQ ID NO: 705013 - DNA, 25 bp, Homo sapien
atcttccgccgtccagatgggccgc

SEQ ID NO: 705014 - DNA, 25 bp, Homo sapien
tcctggtaccaggtgtcactcgtgc

SEQ ID NO: 705015 - DNA, 25 bp, Homo sapien
ccgtctcgtagtcgctgttaacgcg

SEQ ID NO: 705016 - DNA, 25 bp, Homo sapien
cctcgccgtctgtgtagccctcgcc

SEQ ID NO: 705017 - DNA, 25 bp, Homo sapien
tcgtagtcgctgttaacgcggctgt

SEQ ID NO: 705018 - DNA, 25 bp, Homo sapien
ccaggccgtggtgagggaggtctag

SEQ ID NO: 705019 - DNA, 25 bp, Homo sapien
ctgatgagccgagattctcccacga

SEQ ID NO: 705020 - DNA, 25 bp, Homo sapien
cctgatgagccgagattctcccacg

SEQ ID NO: 705021 - DNA, 25 bp, Homo sapien
ccctgatgagccgagattctcccac

SEQ ID NO: 705022 - DNA, 25 bp, Homo sapien
cccctgatgagccgagattctccca

SEQ ID NO: 705023 - DNA, 25 bp, Homo sapien
aacacccaactacagctgggcgctg

SEQ ID NO: 705024 - DNA, 25 bp, Homo sapien
aaacacccaactacagctgggcgct

SEQ ID NO: 705025 - DNA, 25 bp, Homo sapien
taaacacccaactacagctgggcgc

SEQ ID NO: 705026 - DNA, 25 bp, Homo sapien
cccagagcatggtgagtcgagatca

SEQ ID NO: 705027 - DNA, 25 bp, Homo sapien
agcatggtgagtcgagatcaataac

SEQ ID NO: 705028 - DNA, 25 bp, Homo sapien
gaggagcttcaaaactccccccaga

SEQ ID NO: 705029 - DNA, 25 bp, Homo sapien
ccccccagagcatggtgagtcgaga

SEQ ID NO: 705030 - DNA, 25 bp, Homo sapien
ctgtcctgtcgccactgtccctggg

SEQ ID NO: 705031 - DNA, 25 bp, Homo sapien
atgctgtcctgtcgccactgtccct

SEQ ID NO: 705032 - DNA, 25 bp, Homo sapien
gcatgctgtcctgtcgccactgtcc

SEQ ID NO: 705033 - DNA, 25 bp, Homo sapien
cgcatgctgtcctgtcgccactgtc

SEQ ID NO: 705034 - DNA, 25 bp, Homo sapien
catcggaggactccgcatcatgtac

SEQ ID NO: 705035 - DNA, 25 bp, Homo sapien
tagccgtcttcatcggaggactccg

SEQ ID NO: 705036 - DNA, 25 bp, Homo sapien
ccagtcatagccgtcttcatcggag

SEQ ID NO: 705037 - DNA, 25 bp, Homo sapien
gcatcatgtactcgcataaactttt

SEQ ID NO: 705038 - DNA, 25 bp, Homo sapien
gggagaaggaggacggaccagctgg

SEQ ID NO: 705039 - DNA, 25 bp, Homo sapien
agggagaaggaggacggaccagctg

SEQ ID NO: 705040 - DNA, 25 bp, Homo sapien
gacgtattgcgggcagcttgcaagt

SEQ ID NO: 705041 - DNA, 25 bp, Homo sapien
cgtattgcgggcagcttgcaagtgc

SEQ ID NO: 705042 - DNA, 25 bp, Homo sapien
acgtattgcgggcagcttgcaagtg

SEQ ID NO: 705043 - DNA, 25 bp, Homo sapien
agtggcggggtttaggagctcccag

SEQ ID NO: 705044 - DNA, 25 bp, Homo sapien
gggccaggagtcttccggaagtggc

SEQ ID NO: 705045 - DNA, 25 bp, Homo sapien
ataatcccgggccaggagtcttccg

SEQ ID NO: 705046 - DNA, 25 bp, Homo sapien
tttcttggcataatcccgggccagg

SEQ ID NO: 705047 - DNA, 25 bp, Homo sapien
gcccttccttgtagatgttgacgcc

SEQ ID NO: 705048 - DNA, 25 bp, Homo sapien
tggacaggatctgtgcatacgtcgg

SEQ ID NO: 705049 - DNA, 25 bp, Homo sapien
gggtactcagcatccggtttcaggg

SEQ ID NO: 705050 - DNA, 25 bp, Homo sapien
tgttgacgcccatggcatatgtggt

SEQ ID NO: 705051 - DNA, 25 bp, Homo sapien
gccgccagtactcccggctctcggg

SEQ ID NO: 705052 - DNA, 25 bp, Homo sapien
cggttgtggcgccagatgttctgtt

SEQ ID NO: 705053 - DNA, 25 bp, Homo sapien
agccgccgccagtactcccggctct

SEQ ID NO: 705054 - DNA, 25 bp, Homo sapien
ctcagccggttgtggcgccagatgt

SEQ ID NO: 705055 - DNA, 25 bp, Homo sapien
gtgggggtcagcgatgccgggccct

SEQ ID NO: 705056 - DNA, 25 bp, Homo sapien
ggtcagcgatgccgggccctccatg

SEQ ID NO: 705057 - DNA, 25 bp, Homo sapien
ctggggagccgcctcttgtctcaca

SEQ ID NO: 705058 - DNA, 25 bp, Homo sapien
ttgtctcacaaaagtccacgtcctc

SEQ ID NO: 705059 - DNA, 25 bp, Homo sapien
gacaccagacaataccaaggggaaa

SEQ ID NO: 705060 - DNA, 25 bp, Homo sapien
ttaggtttgagtcccttgcaaccaa

SEQ ID NO: 705061 - DNA, 25 bp, Homo sapien
gcctcgtgagcagtgtcaggaattc

SEQ ID NO: 705062 - DNA, 25 bp, Homo sapien
ctctgatggcttgagatagttaggt

SEQ ID NO: 705063 - DNA, 25 bp, Homo sapien
tgaaagaatagcgaggaggcccatg

SEQ ID NO: 705064 - DNA, 25 bp, Homo sapien
gcctcgtgcattgaaagaatagcga

SEQ ID NO: 705065 - DNA, 25 bp, Homo sapien
gcaggaccacgcctcgtgcattgaa

SEQ ID NO: 705066 - DNA, 25 bp, Homo sapien
aggctggcgtgaaggtagagaccgg

SEQ ID NO: 705067 - DNA, 25 bp, Homo sapien
ttttttctttggccagctgcccagt

SEQ ID NO: 705068 - DNA, 25 bp, Homo sapien
tgtttgaaggacagcctgcatgtgg

SEQ ID NO: 705069 - DNA, 25 bp, Homo sapien
ggcattgaatgagaaaagtccacct

SEQ ID NO: 705070 - DNA, 25 bp, Homo sapien
caatccccccttgtggtagcagggc

SEQ ID NO: 705071 - DNA, 25 bp, Homo sapien
cggctgcggcatggatttgaaatca

SEQ ID NO: 705072 - DNA, 25 bp, Homo sapien
aaaactttctttggatgcggctgcg

SEQ ID NO: 705073 - DNA, 25 bp, Homo sapien
gatttgaaatcacgtgggcaggccc

SEQ ID NO: 705074 - DNA, 25 bp, Homo sapien
aactttctttggatgcggctgcggc

SEQ ID NO: 705075 - DNA, 25 bp, Homo sapien
gctgacttgacaaccaacgctggct

SEQ ID NO: 705076 - DNA, 25 bp, Homo sapien
tgagcccctgaaagctaaccgtgtg

SEQ ID NO: 705077 - DNA, 25 bp, Homo sapien
tcgtggccactcaacagcctggtgg

SEQ ID NO: 705078 - DNA, 25 bp, Homo sapien
gcttcctggccgagtgctgacttga

SEQ ID NO: 705079 - DNA, 25 bp, Homo sapien
ggtggagcccctgtgtctattagca

SEQ ID NO: 705080 - DNA, 25 bp, Homo sapien
accggatgcgtaggcctgtgactca

SEQ ID NO: 705081 - DNA, 25 bp, Homo sapien
gaaaccttatgtctagcagtctgag

SEQ ID NO: 705082 - DNA, 25 bp, Homo sapien
tacgtgactatccttcgggcagcag

SEQ ID NO: 705083 - DNA, 25 bp, Homo sapien
caggttctacctggcactggagagc

SEQ ID NO: 705084 - DNA, 25 bp, Homo sapien
tgcccccgcgtctctgttatctgtg

SEQ ID NO: 705085 - DNA, 25 bp, Homo sapien
tcttcagagcagttggcatgcccct

SEQ ID NO: 705086 - DNA, 25 bp, Homo sapien
cctgcggcgaggtcaagggtatctt

SEQ ID NO: 705087 - DNA, 25 bp, Homo sapien
gtgatacagtatacacgcaacccat

SEQ ID NO: 705088 - DNA, 25 bp, Homo sapien
gatggcttaggtgatacagtataca

SEQ ID NO: 705089 - DNA, 25 bp, Homo sapien
gcttaggtgatacagtatacacgca

SEQ ID NO: 705090 - DNA, 25 bp, Homo sapien
tctgtgttctgatggcttaggtgat

SEQ ID NO: 705091 - DNA, 25 bp, Homo sapien
gagaggaaatcagcgggtggtcgga

SEQ ID NO: 705092 - DNA, 25 bp, Homo sapien
acactgtggaagcaagagacggatc

SEQ ID NO: 705093 - DNA, 25 bp, Homo sapien
gaagtgagttcccggatctgttcca

SEQ ID NO: 705094 - DNA, 25 bp, Homo sapien
gagacggatccgcgggaccgccaaa

SEQ ID NO: 705095 - DNA, 25 bp, Homo sapien
acggcgttggttggtccgagaagca

SEQ ID NO: 705096 - DNA, 25 bp, Homo sapien
agcaggagatggctgagccgatgct

SEQ ID NO: 705097 - DNA, 25 bp, Homo sapien
aagcaggagatggctgagccgatgc

SEQ ID NO: 705098 - DNA, 25 bp, Homo sapien
gcgttggttggtccgagaagcagga

SEQ ID NO: 705099 - DNA, 25 bp, Homo sapien
taggaggcccgcaggtgcaaactga

SEQ ID NO: 705100 - DNA, 25 bp, Homo sapien
ggaggtgtaggaggcccgcaggtgc

SEQ ID NO: 705101 - DNA, 25 bp, Homo sapien
aggaggcccgcaggtgcaaactgac

SEQ ID NO: 705102 - DNA, 25 bp, Homo sapien
gtgtaggaggcccgcaggtgcaaac

SEQ ID NO: 705103 - DNA, 25 bp, Homo sapien
tggtgatcgaaatagaagcgcagac

SEQ ID NO: 705104 - DNA, 25 bp, Homo sapien
tcatggaagaagtaagccccgcatt

SEQ ID NO: 705105 - DNA, 25 bp, Homo sapien
tggaagaagtaagccccgcattccg

SEQ ID NO: 705106 - DNA, 25 bp, Homo sapien
ttccggagccacatcttggtgatcg

SEQ ID NO: 705107 - DNA, 25 bp, Homo sapien
tcaggagacgctcaacacccttgcg

SEQ ID NO: 705108 - DNA, 25 bp, Homo sapien
cttcaggagacgctcaacacccttg

SEQ ID NO: 705109 - DNA, 25 bp, Homo sapien
aggagacgctcaacacccttgcgct

SEQ ID NO: 705110 - DNA, 25 bp, Homo sapien
ggagacgctcaacacccttgcgctt

SEQ ID NO: 705111 - DNA, 25 bp, Homo sapien
caaaagactctggttgagatttttc

SEQ ID NO: 705112 - DNA, 25 bp, Homo sapien
atccaaaagactctggttgagattt

SEQ ID NO: 705113 - DNA, 25 bp, Homo sapien
tctgtaggggcggaacccagtgcat

SEQ ID NO: 705114 - DNA, 25 bp, Homo sapien
ggtctgtaggggcggaacccagtgc

SEQ ID NO: 705115 - DNA, 25 bp, Homo sapien
aggtctgcactcttccgaggcataa

SEQ ID NO: 705116 - DNA, 25 bp, Homo sapien
tggaggtctgcactcttccgaggca

SEQ ID NO: 705117 - DNA, 25 bp, Homo sapien
gaggtctgcactcttccgaggcata

SEQ ID NO: 705118 - DNA, 25 bp, Homo sapien
ggaggtctgcactcttccgaggcat

SEQ ID NO: 705119 - DNA, 25 bp, Homo sapien
cccgaagacggttaatttatgctgc

SEQ ID NO: 705120 - DNA, 25 bp, Homo sapien
cggctgcgccccctctcatcgccgc

SEQ ID NO: 705121 - DNA, 25 bp, Homo sapien
cctccgaggtagctgcttcttccca

SEQ ID NO: 705122 - DNA, 25 bp, Homo sapien
ggtgcagggttagcggtgggctccc

SEQ ID NO: 705123 - DNA, 25 bp, Homo sapien
atccgaggaaggtcacccagggcga

SEQ ID NO: 705124 - DNA, 25 bp, Homo sapien
ccagcgcccgccagctcttttgtgc

SEQ ID NO: 705125 - DNA, 25 bp, Homo sapien
cggattctgcatccgaggaaggtca

SEQ ID NO: 705126 - DNA, 25 bp, Homo sapien
ctgcatccgaggaaggtcacccagg

SEQ ID NO: 705127 - DNA, 25 bp, Homo sapien
tgggcatcgctcacgctccccgggc

SEQ ID NO: 705128 - DNA, 25 bp, Homo sapien
ccgggccttcagagcctaggaggaa

SEQ ID NO: 705129 - DNA, 25 bp, Homo sapien
cgggtgcagctgggcatcgctcacg

SEQ ID NO: 705130 - DNA, 25 bp, Homo sapien
ttactggcaaacaaaggcgagccct

SEQ ID NO: 705131 - DNA, 25 bp, Homo sapien
cctccctcttgtgccttggacctca

SEQ ID NO: 705132 - DNA, 25 bp, Homo sapien
ctccctcttgtgccttggacctcaa

SEQ ID NO: 705133 - DNA, 25 bp, Homo sapien
ttcacgtccacgttttccatccgga

SEQ ID NO: 705134 - DNA, 25 bp, Homo sapien
cacgttttccatccggagcgtggct

SEQ ID NO: 705135 - DNA, 25 bp, Homo sapien
cgtccacgttttccatccggagcgt

SEQ ID NO: 705136 - DNA, 25 bp, Homo sapien
tttccatccggagcgtggcttcggt

SEQ ID NO: 705137 - DNA, 25 bp, Homo sapien
ggctgccaagcagttccacccccgt

SEQ ID NO: 705138 - DNA, 25 bp, Homo sapien
gccaagcagttccacccccgtctct

SEQ ID NO: 705139 - DNA, 25 bp, Homo sapien
caagcagttccacccccgtctcttc

SEQ ID NO: 705140 - DNA, 25 bp, Homo sapien
ctgccaagcagttccacccccgtct

SEQ ID NO: 705141 - DNA, 25 bp, Homo sapien
gcttcagagcctgatacattatgat

SEQ ID NO: 705142 - DNA, 25 bp, Homo sapien
caatcgccaggttacggctaaaact

SEQ ID NO: 705143 - DNA, 25 bp, Homo sapien
ccatattctgcttaactgaatgtcg

SEQ ID NO: 705144 - DNA, 25 bp, Homo sapien
tgcctccggaggcacgttgcaatcg

SEQ ID NO: 705145 - DNA, 25 bp, Homo sapien
gggacccctcactctgatccagaga

SEQ ID NO: 705146 - DNA, 25 bp, Homo sapien
accagcgtcttcctcttacgatgcg

SEQ ID NO: 705147 - DNA, 25 bp, Homo sapien
agaagtcatcggacagcagggaccc

SEQ ID NO: 705148 - DNA, 25 bp, Homo sapien
acgatgcgctccgttgaaatttagc

SEQ ID NO: 705149 - DNA, 25 bp, Homo sapien
ccagttcgttgccattccccaggaa

SEQ ID NO: 705150 - DNA, 25 bp, Homo sapien
tcatcgggggtctcgatgtcatcca

SEQ ID NO: 705151 - DNA, 25 bp, Homo sapien
tcatccacgttaatatccaggtcat

SEQ ID NO: 705152 - DNA, 25 bp, Homo sapien
actccagcgagtcggtctcatcggg

SEQ ID NO: 705153 - DNA, 25 bp, Homo sapien
tcttggcggtggccacgggggtgtc

SEQ ID NO: 705154 - DNA, 25 bp, Homo sapien
cttggcggtggccacgggggtgtcg

SEQ ID NO: 705155 - DNA, 25 bp, Homo sapien
ctccgtgggtgaccactttcatgta

SEQ ID NO: 705156 - DNA, 25 bp, Homo sapien
ggtgctcttgctccccgatgatcac

SEQ ID NO: 705157 - DNA, 25 bp, Homo sapien
tcatgtgcaggtctatacggtgctc

SEQ ID NO: 705158 - DNA, 25 bp, Homo sapien
tccgtcgtgccgtccccaaatagat

SEQ ID NO: 705159 - DNA, 25 bp, Homo sapien
gaagcaggctgcgaagacgatgatg

SEQ ID NO: 705160 - DNA, 25 bp, Homo sapien
gcgttgaggccttcgccgtagtacc

SEQ ID NO: 705161 - DNA, 25 bp, Homo sapien
acgatgatggcgttgaggccttcgc

SEQ ID NO: 705162 - DNA, 25 bp, Homo sapien
tctccatgatgtagtggtagtcggg

SEQ ID NO: 705163 - DNA, 25 bp, Homo sapien
ctgcggtgccgaccctgcctgcctc

SEQ ID NO: 705164 - DNA, 25 bp, Homo sapien
agggtcaggacacctgcggtgccga

SEQ ID NO: 705165 - DNA, 25 bp, Homo sapien
ggtcaggacacctgcggtgccgacc

SEQ ID NO: 705166 - DNA, 25 bp, Homo sapien
ccccactggtccaggtgttgtctgc

SEQ ID NO: 705167 - DNA, 25 bp, Homo sapien
caggagctctaagctgctgatgacg

SEQ ID NO: 705168 - DNA, 25 bp, Homo sapien
ggcgtggcaccgttcaggtacacga

SEQ ID NO: 705169 - DNA, 25 bp, Homo sapien
caggtacacgatcatgtagtcctca

SEQ ID NO: 705170 - DNA, 25 bp, Homo sapien
caccaggagctctaagctgctgatg

SEQ ID NO: 705171 - DNA, 25 bp, Homo sapien
tgaaagggcgagagatggccagcac

SEQ ID NO: 705172 - DNA, 25 bp, Homo sapien
ggtggacgatgatcaaggacttcag

SEQ ID NO: 705173 - DNA, 25 bp, Homo sapien
agcacagtccgaatgaaccacgagg

SEQ ID NO: 705174 - DNA, 25 bp, Homo sapien
gacgatgatcaaggacttcaggttt

SEQ ID NO: 705175 - DNA, 25 bp, Homo sapien
ctggatcttgttgatgaacttgacg

SEQ ID NO: 705176 - DNA, 25 bp, Homo sapien
ggtcttccaagctgtgcacgtactg

SEQ ID NO: 705177 - DNA, 25 bp, Homo sapien
acgtgttccatagggatgagttgct

SEQ ID NO: 705178 - DNA, 25 bp, Homo sapien
tctggacgtgttccatagggatgag

SEQ ID NO: 705179 - DNA, 25 bp, Homo sapien
ctctccctcctggccttcagtcttt

SEQ ID NO: 705180 - DNA, 25 bp, Homo sapien
tccctcctggccttcagtctttcct

SEQ ID NO: 705181 - DNA, 25 bp, Homo sapien
ctcctggccttcagtctttcctctt

SEQ ID NO: 705182 - DNA, 25 bp, Homo sapien
cctcctggccttcagtctttcctct

SEQ ID NO: 705183 - DNA, 25 bp, Homo sapien
cctgggcagcacaaactccggctgg

SEQ ID NO: 705184 - DNA, 25 bp, Homo sapien
ctgggcagcacaaactccggctggg

SEQ ID NO: 705185 - DNA, 25 bp, Homo sapien
ctgatcttctgagaccagagcagac

SEQ ID NO: 705186 - DNA, 25 bp, Homo sapien
gtttcctgatcttctgagaccagag

SEQ ID NO: 705187 - DNA, 25 bp, Homo sapien
tcctgatcttctgagaccagagcag

SEQ ID NO: 705188 - DNA, 25 bp, Homo sapien
tgtttcctgatcttctgagaccaga

SEQ ID NO: 705189 - DNA, 25 bp, Homo sapien
tggaacttgggccacgtggcatcag

SEQ ID NO: 705190 - DNA, 25 bp, Homo sapien
catcagcttgatctgtgcaggggct

SEQ ID NO: 705191 - DNA, 25 bp, Homo sapien
tgacttagggttggaacttgggcca

SEQ ID NO: 705192 - DNA, 25 bp, Homo sapien
acttgggccacgtggcatcagcttg

SEQ ID NO: 705193 - DNA, 25 bp, Homo sapien
tctggaacgcacaaatactgcatcg

SEQ ID NO: 705194 - DNA, 25 bp, Homo sapien
cacccttggaagattgggactcagg

SEQ ID NO: 705195 - DNA, 25 bp, Homo sapien
aacctggagcgggtgacaagcaaga

SEQ ID NO: 705196 - DNA, 25 bp, Homo sapien
gccttcctcggctgagagttcgtga

SEQ ID NO: 705197 - DNA, 25 bp, Homo sapien
ccaagctttgaatgcaggtggctgc

SEQ ID NO: 705198 - DNA, 25 bp, Homo sapien
tagagtccatctgaccagtgatccg

SEQ ID NO: 705199 - DNA, 25 bp, Homo sapien
ttgagcttctaggtctgaggccgca

SEQ ID NO: 705200 - DNA, 25 bp, Homo sapien
cccggtggcttgacatctgagttaa

SEQ ID NO: 705201 - DNA, 25 bp, Homo sapien
gcacttgctgagaggtcaaccacag

SEQ ID NO: 705202 - DNA, 25 bp, Homo sapien
catgtgtcaccagagggaaacccaa

SEQ ID NO: 705203 - DNA, 25 bp, Homo sapien
tccatgacggttaaggcccagcagt

SEQ ID NO: 705204 - DNA, 25 bp, Homo sapien
tggtcacctgggacaaatcgtggca

SEQ ID NO: 705205 - DNA, 25 bp, Homo sapien
cgtcaatcgtagtgatcatttctgt

SEQ ID NO: 705206 - DNA, 25 bp, Homo sapien
tcacgaccgtcgtcaatcgtagtga

SEQ ID NO: 705207 - DNA, 25 bp, Homo sapien
cccaaagctcatggagacgacgtct

SEQ ID NO: 705208 - DNA, 25 bp, Homo sapien
ggagacgacgtcttaacatcacgac

SEQ ID NO: 705209 - DNA, 25 bp, Homo sapien
gcagccctagaggccgggaccctgc

SEQ ID NO: 705210 - DNA, 25 bp, Homo sapien
ggagcttcgttttccaacgaggtca

SEQ ID NO: 705211 - DNA, 25 bp, Homo sapien
ctgcggggagcttcgttttccaacg

SEQ ID NO: 705212 - DNA, 25 bp, Homo sapien
agcttcgttttccaacgaggtcagg

SEQ ID NO: 705213 - DNA, 25 bp, Homo sapien
agtgcgtcccggcttcattgagaaa

SEQ ID NO: 705214 - DNA, 25 bp, Homo sapien
cattgagaaaacctggcgcctttat

SEQ ID NO: 705215 - DNA, 25 bp, Homo sapien
cctttataggtctcggcagcctgga

SEQ ID NO: 705216 - DNA, 25 bp, Homo sapien
tcccgccgccgaatggaaatagctc

SEQ ID NO: 705217 - DNA, 25 bp, Homo sapien
ctccgatgcccacgatgagcttcat

SEQ ID NO: 705218 - DNA, 25 bp, Homo sapien
cctccgatgcccacgatgagcttca

SEQ ID NO: 705219 - DNA, 25 bp, Homo sapien
cttgaagaagtcatcctgatggatc

SEQ ID NO: 705220 - DNA, 25 bp, Homo sapien
ctgttggtcagcgtggtcttgccgc

SEQ ID NO: 705221 - DNA, 25 bp, Homo sapien
tcctgatggatcacgcagcagttgg

SEQ ID NO: 705222 - DNA, 25 bp, Homo sapien
cagcgtggtcttgccgccgttggtc

SEQ ID NO: 705223 - DNA, 25 bp, Homo sapien
gtttgaagccgtcttccccaactgc

SEQ ID NO: 705224 - DNA, 25 bp, Homo sapien
tcttccccaactgctatttggtctt

SEQ ID NO: 705225 - DNA, 25 bp, Homo sapien
cttccccaactgctatttggtcttg

SEQ ID NO: 705226 - DNA, 25 bp, Homo sapien
cgtcccactgtttgaagccgtcttc

SEQ ID NO: 705227 - DNA, 25 bp, Homo sapien
cgctgaccccgtgggcacgggcaaa

SEQ ID NO: 705228 - DNA, 25 bp, Homo sapien
ctggctggacgctgaccccgtgggc

SEQ ID NO: 705229 - DNA, 25 bp, Homo sapien
gggcaaacttctgcgggctgctcag

SEQ ID NO: 705230 - DNA, 25 bp, Homo sapien
ggatgtgggtgtccgaggcctctgg

SEQ ID NO: 705231 - DNA, 25 bp, Homo sapien
tcaggaagtaccggcggctgtacaa

SEQ ID NO: 705232 - DNA, 25 bp, Homo sapien
cggcggctgtacaagtccaccaggg

SEQ ID NO: 705233 - DNA, 25 bp, Homo sapien
cggtcaggaagtaccggcggctgta

SEQ ID NO: 705234 - DNA, 25 bp, Homo sapien
aagtaccggcggctgtacaagtcca

SEQ ID NO: 705235 - DNA, 25 bp, Homo sapien
cttctcctccacttgcactcttcat

SEQ ID NO: 705236 - DNA, 25 bp, Homo sapien
tctcctccacttgcactcttcatac

SEQ ID NO: 705237 - DNA, 25 bp, Homo sapien
ttctcctccacttgcactcttcata

SEQ ID NO: 705238 - DNA, 25 bp, Homo sapien
agaggccggggggatcagggactgt

SEQ ID NO: 705239 - DNA, 25 bp, Homo sapien
cacacgtggccatcgaagaggccgg

SEQ ID NO: 705240 - DNA, 25 bp, Homo sapien
atcgaagaggccggggggatcaggg

SEQ ID NO: 705241 - DNA, 25 bp, Homo sapien
cttctggtacatgggccacacgtgg

SEQ ID NO: 705242 - DNA, 25 bp, Homo sapien
cttccacaccgttggcctccatctc

SEQ ID NO: 705243 - DNA, 25 bp, Homo sapien
acttccacaccgttggcctccatct

SEQ ID NO: 705244 - DNA, 25 bp, Homo sapien
ttccacaccgttggcctccatctcc

SEQ ID NO: 705245 - DNA, 25 bp, Homo sapien
cctctcgggacttcatgccgtccag

SEQ ID NO: 705246 - DNA, 25 bp, Homo sapien
tcctctcgggacttcatgccgtcca

SEQ ID NO: 705247 - DNA, 25 bp, Homo sapien
ttctgaatgtcttccaggacttcac

SEQ ID NO: 705248 - DNA, 25 bp, Homo sapien
caggcctggccgttctgtggccgca

SEQ ID NO: 705249 - DNA, 25 bp, Homo sapien
tctgtggccgcatccgcgtccgggt

SEQ ID NO: 705250 - DNA, 25 bp, Homo sapien
cagcagcgagttctgaatgtcttcc

SEQ ID NO: 705251 - DNA, 25 bp, Homo sapien
aacaggacccagtttactactgaag

SEQ ID NO: 705252 - DNA, 25 bp, Homo sapien
tgcagcgaggttacagaggcgtctt

SEQ ID NO: 705253 - DNA, 25 bp, Homo sapien
tgagctccgggacgcccaactggga

SEQ ID NO: 705254 - DNA, 25 bp, Homo sapien
cagaggcgtcttggggctcagtccc

SEQ ID NO: 705255 - DNA, 25 bp, Homo sapien
aggaccccactgtgggcacgagaat

SEQ ID NO: 705256 - DNA, 25 bp, Homo sapien
tgtgggcacgagaatcccgccctcg

SEQ ID NO: 705257 - DNA, 25 bp, Homo sapien
cacgggagctcggaaggccagcttc

SEQ ID NO: 705258 - DNA, 25 bp, Homo sapien
agaatcccgccctcgcacgggagct

SEQ ID NO: 705259 - DNA, 25 bp, Homo sapien
gaagctcagtggtttctcgacctcg

SEQ ID NO: 705260 - DNA, 25 bp, Homo sapien
cagtggtttctcgacctcgttgaat

SEQ ID NO: 705261 - DNA, 25 bp, Homo sapien
tctcgacctcgttgaatgctgcaga

SEQ ID NO: 705262 - DNA, 25 bp, Homo sapien
ctcccggaagctcagtggtttctcg

SEQ ID NO: 705263 - DNA, 25 bp, Homo sapien
gcccctgcagaatctggcctgtcga

SEQ ID NO: 705264 - DNA, 25 bp, Homo sapien
tccatgtatgggcagacaacctctt

SEQ ID NO: 705265 - DNA, 25 bp, Homo sapien
tctggcctgtcgaattcggctttca

SEQ ID NO: 705266 - DNA, 25 bp, Homo sapien
gacaacctcttggtcatgccagtag

SEQ ID NO: 705267 - DNA, 25 bp, Homo sapien
ggaaattgaggtccacggaagcaca

SEQ ID NO: 705268 - DNA, 25 bp, Homo sapien
aaattgaggtccacggaagcacagc

SEQ ID NO: 705269 - DNA, 25 bp, Homo sapien
gaaattgaggtccacggaagcacag

SEQ ID NO: 705270 - DNA, 25 bp, Homo sapien
tagctgggtttacaggcatgtacca

SEQ ID NO: 705271 - DNA, 25 bp, Homo sapien
gattcttctgccccaacctcgcgag

SEQ ID NO: 705272 - DNA, 25 bp, Homo sapien
agcgattcttctgccccaacctcgc

SEQ ID NO: 705273 - DNA, 25 bp, Homo sapien
caccacaccgggctaattttgtatt

SEQ ID NO: 705274 - DNA, 25 bp, Homo sapien
tagcctccgagatgcgcttcgtgca

SEQ ID NO: 705275 - DNA, 25 bp, Homo sapien
tggccgccatctacgaggagaagga

SEQ ID NO: 705276 - DNA, 25 bp, Homo sapien
gacttcgagcgcttctccaaggtgc

SEQ ID NO: 705277 - DNA, 25 bp, Homo sapien
cacgcgtctgaaggagtacaccatc

SEQ ID NO: 705278 - DNA, 25 bp, Homo sapien
atttttcatgaacacgaacgttatg

SEQ ID NO: 705279 - DNA, 25 bp, Homo sapien
tttttcatgaacacgaacgttatga

SEQ ID NO: 705280 - DNA, 25 bp, Homo sapien
catttttcatgaacacgaacgttat

SEQ ID NO: 705281 - DNA, 25 bp, Homo sapien
ttttcatgaacacgaacgttatgaa

SEQ ID NO: 705282 - DNA, 25 bp, Homo sapien
actggaccggtctctttgggctgga

SEQ ID NO: 705283 - DNA, 25 bp, Homo sapien
taggtagccttctacgtggtggccc

SEQ ID NO: 705284 - DNA, 25 bp, Homo sapien
cttaggcaggcttcttaggtagcct

SEQ ID NO: 705285 - DNA, 25 bp, Homo sapien
ggcttatgtgccacccgcagtgcct

SEQ ID NO: 705286 - DNA, 25 bp, Homo sapien
cacaaccggctgtacatgaaggcgc

SEQ ID NO: 705287 - DNA, 25 bp, Homo sapien
gctacctggccgagaagtacgagtg

SEQ ID NO: 705288 - DNA, 25 bp, Homo sapien
ccgaggacatcgataaaggcgaggt

SEQ ID NO: 705289 - DNA, 25 bp, Homo sapien
gaagagtcgaacgtgctctgcctct

SEQ ID NO: 705290 - DNA, 25 bp, Homo sapien
ctttgacccagccaacggcaagttc

SEQ ID NO: 705291 - DNA, 25 bp, Homo sapien
cccagccaacggcaagttcagcaag

SEQ ID NO: 705292 - DNA, 25 bp, Homo sapien
ttgacccagccaacggcaagttcag

SEQ ID NO: 705293 - DNA, 25 bp, Homo sapien
tgacccagccaacggcaagttcagc

SEQ ID NO: 705294 - DNA, 25 bp, Homo sapien
ccacgggtgggccttcaccctgaag

SEQ ID NO: 705295 - DNA, 25 bp, Homo sapien
gatgtatgtggccaagttcgccgcc

SEQ ID NO: 705296 - DNA, 25 bp, Homo sapien
cgatcctgtcctcggtaccgtgggc

SEQ ID NO: 705297 - DNA, 25 bp, Homo sapien
gaaagtagaggacatgatgaagaag

SEQ ID NO: 705298 - DNA, 25 bp, Homo sapien
gcatcgtggagaacgtgaacgtcat

SEQ ID NO: 705299 - DNA, 25 bp, Homo sapien
tgccgagcgcatcaagcctgtgctg

SEQ ID NO: 705300 - DNA, 25 bp, Homo sapien
taccagactttccagcgcatcgtgg

SEQ ID NO: 705301 - DNA, 25 bp, Homo sapien
gtcatcatctccacctacggcgagg

SEQ ID NO: 705302 - DNA, 25 bp, Homo sapien
ggagctaagtggcttcgtgcccgta

SEQ ID NO: 705303 - DNA, 25 bp, Homo sapien
aacggccgccagtgcgtacagtgag

SEQ ID NO: 705304 - DNA, 25 bp, Homo sapien
cgtgcccgtagaagtggatttcaaa

SEQ ID NO: 705305 - DNA, 25 bp, Homo sapien
aaattccttggagatcgtacagccc

SEQ ID NO: 705306 - DNA, 25 bp, Homo sapien
gtcacgtgaccgctcaccactcgcg

SEQ ID NO: 705307 - DNA, 25 bp, Homo sapien
agcccccagccgtcgcgtcacgtga

SEQ ID NO: 705308 - DNA, 25 bp, Homo sapien
tgaccgctcaccactcgcgggcggg

SEQ ID NO: 705309 - DNA, 25 bp, Homo sapien
gggccaattagcacccgcgcgcgct

SEQ ID NO: 705310 - DNA, 25 bp, Homo sapien
tttggcctccaccagctccgccgcc

SEQ ID NO: 705311 - DNA, 25 bp, Homo sapien
tggcctccaccagctccgccgccat

SEQ ID NO: 705312 - DNA, 25 bp, Homo sapien
ttggcctccaccagctccgccgcca

SEQ ID NO: 705313 - DNA, 25 bp, Homo sapien
ttgccgtcagagctgtgtttataaa

SEQ ID NO: 705314 - DNA, 25 bp, Homo sapien
ctgcttgccgtcagagctgtgttta

SEQ ID NO: 705315 - DNA, 25 bp, Homo sapien
gcttgccgtcagagctgtgtttata

SEQ ID NO: 705316 - DNA, 25 bp, Homo sapien
caggccccggcagcttccagagttt

SEQ ID NO: 705317 - DNA, 25 bp, Homo sapien
cacactggctatggggacctgcatg

SEQ ID NO: 705318 - DNA, 25 bp, Homo sapien
agcacactggctatggggacctgca

SEQ ID NO: 705319 - DNA, 25 bp, Homo sapien
gctatggggacctgcatggtctgct

SEQ ID NO: 705320 - DNA, 25 bp, Homo sapien
actggctatggggacctgcatggtc

SEQ ID NO: 705321 - DNA, 25 bp, Homo sapien
tcttgaacagctcagggctacagtc

SEQ ID NO: 705322 - DNA, 25 bp, Homo sapien
caggctccgagttcttcttggcgta

SEQ ID NO: 705323 - DNA, 25 bp, Homo sapien
tagcgggtctcgtacagctccttga

SEQ ID NO: 705324 - DNA, 25 bp, Homo sapien
ttaaagaacggcagcttcaccaggc

SEQ ID NO: 705325 - DNA, 25 bp, Homo sapien
aaggcaagggcaccactgaaccaga

SEQ ID NO: 705326 - DNA, 25 bp, Homo sapien
cactgaagcatgaagttccccaagg

SEQ ID NO: 705327 - DNA, 25 bp, Homo sapien
ctaaggagcgactcagtttccctac

SEQ ID NO: 705328 - DNA, 25 bp, Homo sapien
ccaaggccacgggaccaaggcaagg

SEQ ID NO: 705329 - DNA, 25 bp, Homo sapien
gaccggtgccgggtctgtggctggc

SEQ ID NO: 705330 - DNA, 25 bp, Homo sapien
cagccggttcccgtttatatgctca

SEQ ID NO: 705331 - DNA, 25 bp, Homo sapien
ccgtttatatgctcagggcacagcc

SEQ ID NO: 705332 - DNA, 25 bp, Homo sapien
ggttcccgtttatatgctcagggca

SEQ ID NO: 705333 - DNA, 25 bp, Homo sapien
ggccactcagattgctgggtgacct

SEQ ID NO: 705334 - DNA, 25 bp, Homo sapien
gaccttcgcagcctgtgggatgcag

SEQ ID NO: 705335 - DNA, 25 bp, Homo sapien
tgttgacggccactcagattgctgg

SEQ ID NO: 705336 - DNA, 25 bp, Homo sapien
gcctgtgtcctgttgacggccactc

SEQ ID NO: 705337 - DNA, 25 bp, Homo sapien
tgaagcttctcgttgttctgtggga

SEQ ID NO: 705338 - DNA, 25 bp, Homo sapien
gatgcacgggctctcctgaagcttc

SEQ ID NO: 705339 - DNA, 25 bp, Homo sapien
tccacctgtcttggcgtcaatgcga

SEQ ID NO: 705340 - DNA, 25 bp, Homo sapien
ggagttccggatcaactccacctgt

SEQ ID NO: 705341 - DNA, 25 bp, Homo sapien
catgcgggaatctagcagctggctc

SEQ ID NO: 705342 - DNA, 25 bp, Homo sapien
cctgcacggctttaactccgggctg

SEQ ID NO: 705343 - DNA, 25 bp, Homo sapien
cgacctgcacggctttaactccggg

SEQ ID NO: 705344 - DNA, 25 bp, Homo sapien
ctcaggacgacctgcacggctttaa

SEQ ID NO: 705345 - DNA, 25 bp, Homo sapien
acggctttaactccgggctgcagtt

SEQ ID NO: 705346 - DNA, 25 bp, Homo sapien
atgttgggcgggtactggtcctcct

SEQ ID NO: 705347 - DNA, 25 bp, Homo sapien
cgggacggagcagtagctgtggttg

SEQ ID NO: 705348 - DNA, 25 bp, Homo sapien
gcagtagctgtggttgaccttcaca

SEQ ID NO: 705349 - DNA, 25 bp, Homo sapien
tcacagcgatgttgggcgggtactg

SEQ ID NO: 705350 - DNA, 25 bp, Homo sapien
gacaggtacatgaggtgggtgaggt

SEQ ID NO: 705351 - DNA, 25 bp, Homo sapien
gacagtgatgcggttggtggccgag

SEQ ID NO: 705352 - DNA, 25 bp, Homo sapien
ggtgaggttgatggggcggcacggc

SEQ ID NO: 705353 - DNA, 25 bp, Homo sapien
cttgccgtagttcccccaggtgaca

SEQ ID NO: 705354 - DNA, 25 bp, Homo sapien
ccttgcacagctccgggtgctttac

SEQ ID NO: 705355 - DNA, 25 bp, Homo sapien
agctccgatgaggtcagctgccgca

SEQ ID NO: 705356 - DNA, 25 bp, Homo sapien
cagcagctccgatgaggtcagctgc

SEQ ID NO: 705357 - DNA, 25 bp, Homo sapien
gctttaccccaatggtcttcagcct

SEQ ID NO: 705358 - DNA, 25 bp, Homo sapien
ctccacgaccctggccgtccgtgac

SEQ ID NO: 705359 - DNA, 25 bp, Homo sapien
ctggccgtccgtgacccgccaggtc

SEQ ID NO: 705360 - DNA, 25 bp, Homo sapien
caacgtgaggtcagaccgccgccgc

SEQ ID NO: 705361 - DNA, 25 bp, Homo sapien
cagcaactgcctccacgaccctggc

SEQ ID NO: 705362 - DNA, 25 bp, Homo sapien
gagaaagccgggtggcaaccaccat

SEQ ID NO: 705363 - DNA, 25 bp, Homo sapien
gatgagtcccaagcttcgctgtgtg

SEQ ID NO: 705364 - DNA, 25 bp, Homo sapien
ttcgagttctctccggcactgacgt

SEQ ID NO: 705365 - DNA, 25 bp, Homo sapien
cagaacaggcccctgacgatgagtc

SEQ ID NO: 705366 - DNA, 25 bp, Homo sapien
tcaggatcaaggcgcagcttctcct

SEQ ID NO: 705367 - DNA, 25 bp, Homo sapien
tgtcaggatcaaggcgcagcttctc

SEQ ID NO: 705368 - DNA, 25 bp, Homo sapien
ctgtcaggatcaaggcgcagcttct

SEQ ID NO: 705369 - DNA, 25 bp, Homo sapien
aggatcaaggcgcagcttctccttg

SEQ ID NO: 705370 - DNA, 25 bp, Homo sapien
ggacagatgagggacacccgcacac

SEQ ID NO: 705371 - DNA, 25 bp, Homo sapien
cggacagatgagggacacccgcaca

SEQ ID NO: 705372 - DNA, 25 bp, Homo sapien
aagacggcgtcgaagcactgcaggt

SEQ ID NO: 705373 - DNA, 25 bp, Homo sapien
cgttcatctgcaggtagaagacggc

SEQ ID NO: 705374 - DNA, 25 bp, Homo sapien
gctggcttgtcgcacacggggcaca

SEQ ID NO: 705375 - DNA, 25 bp, Homo sapien
cccggcagggcacggagagccgcat

SEQ ID NO: 705376 - DNA, 25 bp, Homo sapien
gaagggaacgagttccctgaggcca

SEQ ID NO: 705377 - DNA, 25 bp, Homo sapien
tgcacgcacacctgctttcacattg

SEQ ID NO: 705378 - DNA, 25 bp, Homo sapien
caaggccaactggaggcaggccctg

SEQ ID NO: 705379 - DNA, 25 bp, Homo sapien
ctgtgtgcccgccagatcaggaaac

SEQ ID NO: 705380 - DNA, 25 bp, Homo sapien
tgcatgtgatggtgtggactgtata

SEQ ID NO: 705381 - DNA, 25 bp, Homo sapien
atggtgtggactgtatagatgtgtg

SEQ ID NO: 705382 - DNA, 25 bp, Homo sapien
gtgatggtgtggactgtatagatgt

SEQ ID NO: 705383 - DNA, 25 bp, Homo sapien
gtgcatgtgatggtgtggactgtat

SEQ ID NO: 705384 - DNA, 25 bp, Homo sapien
cggtgtggactgtacagatatgtga

SEQ ID NO: 705385 - DNA, 25 bp, Homo sapien
tgtatggatgtgtggcatgcgggtg

SEQ ID NO: 705386 - DNA, 25 bp, Homo sapien
gactgtacagatatgtgacggtgtg

SEQ ID NO: 705387 - DNA, 25 bp, Homo sapien
gatatgtgacggtgtggactgtata

SEQ ID NO: 705388 - DNA, 25 bp, Homo sapien
ttttcggcgcggatcgggcaccacg

SEQ ID NO: 705389 - DNA, 25 bp, Homo sapien
gctgcagctgcgctccttttcggcg

SEQ ID NO: 705390 - DNA, 25 bp, Homo sapien
caggtactcgatctcgtcggcgtcc

SEQ ID NO: 705391 - DNA, 25 bp, Homo sapien
ggatggcgccctgcgggctgcagct

SEQ ID NO: 705392 - DNA, 25 bp, Homo sapien
gccgccacccgtgctgcccagggca

SEQ ID NO: 705393 - DNA, 25 bp, Homo sapien
cgggcaggagcccattggcgtccga

SEQ ID NO: 705394 - DNA, 25 bp, Homo sapien
agggcaccgctcccgttgacgctgg

SEQ ID NO: 705395 - DNA, 25 bp, Homo sapien
gcaggagcccattggcgtccgaggg

SEQ ID NO: 705396 - DNA, 25 bp, Homo sapien
gcgcccggcttcccattctccatgc

SEQ ID NO: 705397 - DNA, 25 bp, Homo sapien
cgcccggcttcccattctccatgct

SEQ ID NO: 705398 - DNA, 25 bp, Homo sapien
tcctccgaggacgatgagctgtcca

SEQ ID NO: 705399 - DNA, 25 bp, Homo sapien
ctcatcctccgaggacgatgagctg

SEQ ID NO: 705400 - DNA, 25 bp, Homo sapien
gaaggggcagcggcgcttgggccgg

SEQ ID NO: 705401 - DNA, 25 bp, Homo sapien
tccgaggacgatgagctgtccagcg

SEQ ID NO: 705402 - DNA, 25 bp, Homo sapien
taatcccccgataggagagtccaga

SEQ ID NO: 705403 - DNA, 25 bp, Homo sapien
tgcccctctgcgtggtgagcaccag

SEQ ID NO: 705404 - DNA, 25 bp, Homo sapien
tctgcgtggtgagcaccaggaaagt

SEQ ID NO: 705405 - DNA, 25 bp, Homo sapien
caccaggaaagtcgagtgtgcggcc

SEQ ID NO: 705406 - DNA, 25 bp, Homo sapien
cccgcgcactggctggaatggtcgt

SEQ ID NO: 705407 - DNA, 25 bp, Homo sapien
cacacgccgggtcttcaaaatacca

SEQ ID NO: 705408 - DNA, 25 bp, Homo sapien
tagctggctagaaaactgagacccc

SEQ ID NO: 705409 - DNA, 25 bp, Homo sapien
gacaaacgtcaaagtggtcgccaga

SEQ ID NO: 705410 - DNA, 25 bp, Homo sapien
gaaatgatattgcttcctgactagg

SEQ ID NO: 705411 - DNA, 25 bp, Homo sapien
gacatctgtgctgttccgtagggaa

SEQ ID NO: 705412 - DNA, 25 bp, Homo sapien
caaaagcaaaacagaccgcaggcag

SEQ ID NO: 705413 - DNA, 25 bp, Homo sapien
gagaggaatcaacccaaaccgagag

SEQ ID NO: 705414 - DNA, 25 bp, Homo sapien
gtggctggcgcaggacgggtcaggg

SEQ ID NO: 705415 - DNA, 25 bp, Homo sapien
gggtggctggcgcaggacgggtcag

SEQ ID NO: 705416 - DNA, 25 bp, Homo sapien
ggtgggtggctggcgcaggacgggt

SEQ ID NO: 705417 - DNA, 25 bp, Homo sapien
tgggtggctggcgcaggacgggtca

SEQ ID NO: 705418 - DNA, 25 bp, Homo sapien
gtctttgcacgattcagaccccggg

SEQ ID NO: 705419 - DNA, 25 bp, Homo sapien
ctcgagcgggcgataccaaagtctg

SEQ ID NO: 705420 - DNA, 25 bp, Homo sapien
tcccgcccggcaaccagaatggttg

SEQ ID NO: 705421 - DNA, 25 bp, Homo sapien
caccattgtggccatgcagtcctgt

SEQ ID NO: 705422 - DNA, 25 bp, Homo sapien
gagccctctgggacttccgtaggaa

SEQ ID NO: 705423 - DNA, 25 bp, Homo sapien
gactccgcgcaatcacatactgtat

SEQ ID NO: 705424 - DNA, 25 bp, Homo sapien
gattgcactaaaccctcgttcctag

SEQ ID NO: 705425 - DNA, 25 bp, Homo sapien
aaatcacagctgtcgtcctagccag

SEQ ID NO: 705426 - DNA, 25 bp, Homo sapien
ggataaacagagtcacgatcagagg

SEQ ID NO: 705427 - DNA, 25 bp, Homo sapien
agtcttggcactttgtaacggaacg

SEQ ID NO: 705428 - DNA, 25 bp, Homo sapien
gacgccccgaggtgtttgtgcttca

SEQ ID NO: 705429 - DNA, 25 bp, Homo sapien
cgatcagaggaaccccagggtctgg

SEQ ID NO: 705430 - DNA, 25 bp, Homo sapien
cgcaacggccaggagaagcacttta

SEQ ID NO: 705431 - DNA, 25 bp, Homo sapien
aagcactttaaggacgaggacgagg

SEQ ID NO: 705432 - DNA, 25 bp, Homo sapien
tatatgacgcgtcacagaatctagg

SEQ ID NO: 705433 - DNA, 25 bp, Homo sapien
tagggtagcgctttctcagatttcc

SEQ ID NO: 705434 - DNA, 25 bp, Homo sapien
ccacgcctggcagatttgttttttg

SEQ ID NO: 705435 - DNA, 25 bp, Homo sapien
cgcctggcctagactttgtctctta

SEQ ID NO: 705436 - DNA, 25 bp, Homo sapien
gccttcctaatagctggcattacgg

SEQ ID NO: 705437 - DNA, 25 bp, Homo sapien
ctaatagctggcattacgggcgcct

SEQ ID NO: 705438 - DNA, 25 bp, Homo sapien
gaagtgccccatctgcgagaaggtc

SEQ ID NO: 705439 - DNA, 25 bp, Homo sapien
cgggcgactgcaacggcttagactt

SEQ ID NO: 705440 - DNA, 25 bp, Homo sapien
gcttagacttctatgggccgggccc

SEQ ID NO: 705441 - DNA, 25 bp, Homo sapien
gacaagggcgtcatggactactacc

SEQ ID NO: 705442 - DNA, 25 bp, Homo sapien
ccatccaggttcaccacaaccttcg

SEQ ID NO: 705443 - DNA, 25 bp, Homo sapien
ctggagtacggtggctccatccagg

SEQ ID NO: 705444 - DNA, 25 bp, Homo sapien
ggagtacggtggctccatccaggtt

SEQ ID NO: 705445 - DNA, 25 bp, Homo sapien
ctccatccaggttcaccacaacctt

SEQ ID NO: 705446 - DNA, 25 bp, Homo sapien
gctgctttgagggagggcctcagtg

SEQ ID NO: 705447 - DNA, 25 bp, Homo sapien
cctcagtgatatttaggggggaaca

SEQ ID NO: 705448 - DNA, 25 bp, Homo sapien
gtaaaacgcggccacagtcctctca

SEQ ID NO: 705449 - DNA, 25 bp, Homo sapien
ttggctgacatcaccccgggcctcg

SEQ ID NO: 705450 - DNA, 25 bp, Homo sapien
tgagtccctctgacctatagctggg

SEQ ID NO: 705451 - DNA, 25 bp, Homo sapien
gcagatccccgttgccatatgagga

SEQ ID NO: 705452 - DNA, 25 bp, Homo sapien
gaaactccggaggttagagcaagcc

SEQ ID NO: 705453 - DNA, 25 bp, Homo sapien
tgcctgcaaatggagtgtcaccgag

SEQ ID NO: 705454 - DNA, 25 bp, Homo sapien
gtgtaaaaccctgcggctgaaccag

SEQ ID NO: 705455 - DNA, 25 bp, Homo sapien
ggattttgccggctggttgtgtaaa

SEQ ID NO: 705456 - DNA, 25 bp, Homo sapien
acccctgcggagagcaccgtggcgg

SEQ ID NO: 705457 - DNA, 25 bp, Homo sapien
acgcgcaccgccgtgtgacagtggc

SEQ ID NO: 705458 - DNA, 25 bp, Homo sapien
gaatcccagtgcagcgttaggcagg

SEQ ID NO: 705459 - DNA, 25 bp, Homo sapien
agctttcgggagaaggccacctctg

SEQ ID NO: 705460 - DNA, 25 bp, Homo sapien
taagctgcccaacggtgtgttcacc

SEQ ID NO: 705461 - DNA, 25 bp, Homo sapien
ggtccctgacgatgcccagggctga

SEQ ID NO: 705462 - DNA, 25 bp, Homo sapien
ccatattggctagcctagtcttaac

SEQ ID NO: 705463 - DNA, 25 bp, Homo sapien
tattggctagcctagtcttaactcc

SEQ ID NO: 705464 - DNA, 25 bp, Homo sapien
tggctagcctagtcttaactcctgg

SEQ ID NO: 705465 - DNA, 25 bp, Homo sapien
ttggctagcctagtcttaactcctg

SEQ ID NO: 705466 - DNA, 25 bp, Homo sapien
gggcctccacggaacagagcatgtt

SEQ ID NO: 705467 - DNA, 25 bp, Homo sapien
ctcaggctagaatctagtagtggca

SEQ ID NO: 705468 - DNA, 25 bp, Homo sapien
agaggcaacagtgcgctggcttcca

SEQ ID NO: 705469 - DNA, 25 bp, Homo sapien
ccttctcaaggcagtcgatgccata

SEQ ID NO: 705470 - DNA, 25 bp, Homo sapien
agctgcaggtcctgcacgaatgcaa

SEQ ID NO: 705471 - DNA, 25 bp, Homo sapien
ctgcaggtcctgcacgaatgcaact

SEQ ID NO: 705472 - DNA, 25 bp, Homo sapien
gctgcaggtcctgcacgaatgcaac

SEQ ID NO: 705473 - DNA, 25 bp, Homo sapien
gagctggaacttgacgagcagcaga

SEQ ID NO: 705474 - DNA, 25 bp, Homo sapien
gcggggtggtcaccaaagtccagca

SEQ ID NO: 705475 - DNA, 25 bp, Homo sapien
cagaaagccaaggtcggcgaactca

SEQ ID NO: 705476 - DNA, 25 bp, Homo sapien
ctcaaagacgatgacttcgaaagga

SEQ ID NO: 705477 - DNA, 25 bp, Homo sapien
accatcaaccctaccatcgccgagg

SEQ ID NO: 705478 - DNA, 25 bp, Homo sapien
atcaaccctaccatcgccgagggcc

SEQ ID NO: 705479 - DNA, 25 bp, Homo sapien
tcaccatcaaccctaccatcgccga

SEQ ID NO: 705480 - DNA, 25 bp, Homo sapien
tgctgccggcgctcaccatcaaccc

SEQ ID NO: 705481 - DNA, 25 bp, Homo sapien
ctcaagccctggagttcccgatcag

SEQ ID NO: 705482 - DNA, 25 bp, Homo sapien
aagccctggagttcccgatcagcct

SEQ ID NO: 705483 - DNA, 25 bp, Homo sapien
gctcaagccctggagttcccgatca

SEQ ID NO: 705484 - DNA, 25 bp, Homo sapien
tcaagccctggagttcccgatcagc

SEQ ID NO: 705485 - DNA, 25 bp, Homo sapien
ccacccaccgccagcgttacctggg

SEQ ID NO: 705486 - DNA, 25 bp, Homo sapien
tctgcagatgcctcggggggtctct

SEQ ID NO: 705487 - DNA, 25 bp, Homo sapien
ccaggtgctgattggtggacagggt

SEQ ID NO: 705488 - DNA, 25 bp, Homo sapien
aaaagatgctgaagcggtcacaggc

SEQ ID NO: 705489 - DNA, 25 bp, Homo sapien
ttccagcagctaaatccgtattcat

SEQ ID NO: 705490 - DNA, 25 bp, Homo sapien
ctttccagcagctaaatccgtattc

SEQ ID NO: 705491 - DNA, 25 bp, Homo sapien
tttccagcagctaaatccgtattca

SEQ ID NO: 705492 - DNA, 25 bp, Homo sapien
cctgccggtcaaacaggagatccag

SEQ ID NO: 705493 - DNA, 25 bp, Homo sapien
caaagctgtcgatggggtccatgga

SEQ ID NO: 705494 - DNA, 25 bp, Homo sapien
tccacgtgtctcaggatgccgtcct

SEQ ID NO: 705495 - DNA, 25 bp, Homo sapien
aggatgccgtcctgccggtcaaaca

SEQ ID NO: 705496 - DNA, 25 bp, Homo sapien
gctgggcagtgagtctccagagccc

SEQ ID NO: 705497 - DNA, 25 bp, Homo sapien
ggtcttcggagatgccactatcact

SEQ ID NO: 705498 - DNA, 25 bp, Homo sapien
agcaagagttgccaggatgatagga

SEQ ID NO: 705499 - DNA, 25 bp, Homo sapien
cactatcactgccttcgggggacca

SEQ ID NO: 705500 - DNA, 25 bp, Homo sapien
ccaggtctatggtcacagaggcttc

SEQ ID NO: 705501 - DNA, 25 bp, Homo sapien
aggtctatggtcacagaggcttcag

SEQ ID NO: 705502 - DNA, 25 bp, Homo sapien
gtctatggtcacagaggcttcaggt

SEQ ID NO: 705503 - DNA, 25 bp, Homo sapien
ctatggtcacagaggcttcaggtac

SEQ ID NO: 705504 - DNA, 25 bp, Homo sapien
tcgtggggacaggtccaccggatca

SEQ ID NO: 705505 - DNA, 25 bp, Homo sapien
actgctgcccgaaaggaggaggtct

SEQ ID NO: 705506 - DNA, 25 bp, Homo sapien
acaggtccaccggatcagccggctt

SEQ ID NO: 705507 - DNA, 25 bp, Homo sapien
tttcacggtgagattgcatcgtggg

SEQ ID NO: 705508 - DNA, 25 bp, Homo sapien
gggtgatgccttctttagccagcag

SEQ ID NO: 705509 - DNA, 25 bp, Homo sapien
ctcatcctcggtgagcaccagctcc

SEQ ID NO: 705510 - DNA, 25 bp, Homo sapien
gcagggtgatgccttctttagccag

SEQ ID NO: 705511 - DNA, 25 bp, Homo sapien
gatgccttctttagccagcagcttc

SEQ ID NO: 705512 - DNA, 25 bp, Homo sapien
atttttttcagcactcgctcctcgt

SEQ ID NO: 705513 - DNA, 25 bp, Homo sapien
tttttttcagcactcgctcctcgta

SEQ ID NO: 705514 - DNA, 25 bp, Homo sapien
tgcttgttccggattttccggcgga

SEQ ID NO: 705515 - DNA, 25 bp, Homo sapien
agtctccaggccatcgatatattcc

SEQ ID NO: 705516 - DNA, 25 bp, Homo sapien
gagtctccaggccatcgatatattc

SEQ ID NO: 705517 - DNA, 25 bp, Homo sapien
caggccatcgatatattccttcttc

SEQ ID NO: 705518 - DNA, 25 bp, Homo sapien
ctccaggccatcgatatattccttc

SEQ ID NO: 705519 - DNA, 25 bp, Homo sapien
tttgcttctcgagatgcaagacttt

SEQ ID NO: 705520 - DNA, 25 bp, Homo sapien
ggttttgcttctcgagatgcaagac

SEQ ID NO: 705521 - DNA, 25 bp, Homo sapien
gttttgcttctcgagatgcaagact

SEQ ID NO: 705522 - DNA, 25 bp, Homo sapien
aggttttgcttctcgagatgcaaga

SEQ ID NO: 705523 - DNA, 25 bp, Homo sapien
tgcttctcgtccatttccggggtcc

SEQ ID NO: 705524 - DNA, 25 bp, Homo sapien
tctgcttctcgtccatttccggggt

SEQ ID NO: 705525 - DNA, 25 bp, Homo sapien
ctgagccctaaagggcctcggttct

SEQ ID NO: 705526 - DNA, 25 bp, Homo sapien
tccgctgagccctaaagggcctcgg

SEQ ID NO: 705527 - DNA, 25 bp, Homo sapien
gtggactgcaccacaatggcctgga

SEQ ID NO: 705528 - DNA, 25 bp, Homo sapien
cctgtctgggctgacttgctggtgg

SEQ ID NO: 705529 - DNA, 25 bp, Homo sapien
ctgtctgggctgacttgctggtgga

SEQ ID NO: 705530 - DNA, 25 bp, Homo sapien
tgtctgggctgacttgctggtggac

SEQ ID NO: 705531 - DNA, 25 bp, Homo sapien
tgttggggccaaaagggctgatgga

SEQ ID NO: 705532 - DNA, 25 bp, Homo sapien
ctcgtacaggcgcaaagtccccagg

SEQ ID NO: 705533 - DNA, 25 bp, Homo sapien
tttgttggggccaaaagggctgatg

SEQ ID NO: 705534 - DNA, 25 bp, Homo sapien
gtacaggcgcaaagtccccagggct

SEQ ID NO: 705535 - DNA, 25 bp, Homo sapien
tgttgcattcctcaggaccagggtg

SEQ ID NO: 705536 - DNA, 25 bp, Homo sapien
tctcgggttgtgtcagcctcgggtc

SEQ ID NO: 705537 - DNA, 25 bp, Homo sapien
ggcagcatcgttgtgcaaagttctg

SEQ ID NO: 705538 - DNA, 25 bp, Homo sapien
gaattggtcaggttcgcggtgtcct

SEQ ID NO: 705539 - DNA, 25 bp, Homo sapien
cgcctccagccctgcacgtcctgag

SEQ ID NO: 705540 - DNA, 25 bp, Homo sapien
tcacagctcgtctcccgccgcctcc

SEQ ID NO: 705541 - DNA, 25 bp, Homo sapien
tgcacgtcctgagccagtgctcggc

SEQ ID NO: 705542 - DNA, 25 bp, Homo sapien
cctgagccagtgctcggcccaggcg

SEQ ID NO: 705543 - DNA, 25 bp, Homo sapien
tgtgtctgagtgtcggttcctgcgt

SEQ ID NO: 705544 - DNA, 25 bp, Homo sapien
gggtctctttcaggctgcgtcggtc

SEQ ID NO: 705545 - DNA, 25 bp, Homo sapien
tgtgtggctatgagctgtgcctccc

SEQ ID NO: 705546 - DNA, 25 bp, Homo sapien
aaatactttatttcggatcaggcag

SEQ ID NO: 705547 - DNA, 25 bp, Homo sapien
aaggaggaatctcccacccggatca

SEQ ID NO: 705548 - DNA, 25 bp, Homo sapien
gcatccatggctacgttgacgaggt

SEQ ID NO: 705549 - DNA, 25 bp, Homo sapien
gatcagtagaggcttgcactgcctt

SEQ ID NO: 705550 - DNA, 25 bp, Homo sapien
tccagcttaaacaggagtgaactcc

SEQ ID NO: 705551 - DNA, 25 bp, Homo sapien
tgggcctgttctacgttccgcatgg

SEQ ID NO: 705552 - DNA, 25 bp, Homo sapien
tatctactcgtgaattctccaagcc

SEQ ID NO: 705553 - DNA, 25 bp, Homo sapien
tgtgactgtgaggccctatgtgtga

SEQ ID NO: 705554 - DNA, 25 bp, Homo sapien
tatttgcctcttaccaaggagtagg

SEQ ID NO: 705555 - DNA, 25 bp, Homo sapien
tgacagcaattcacccatagtgggt

SEQ ID NO: 705556 - DNA, 25 bp, Homo sapien
catgcatgtgtgtgacgttgagtgt

SEQ ID NO: 705557 - DNA, 25 bp, Homo sapien
ctccatgtgacagcaattcacccat

SEQ ID NO: 705558 - DNA, 25 bp, Homo sapien
ttcacccatagtgggtggaggtctg

SEQ ID NO: 705559 - DNA, 25 bp, Homo sapien
tgtgtttctcctctccacaggccac

SEQ ID NO: 705560 - DNA, 25 bp, Homo sapien
gccctgtgtttctcctctccacagg

SEQ ID NO: 705561 - DNA, 25 bp, Homo sapien
agttggtgccctgtgtttctcctct

SEQ ID NO: 705562 - DNA, 25 bp, Homo sapien
gttggtgccctgtgtttctcctctc

SEQ ID NO: 705563 - DNA, 25 bp, Homo sapien
gtcttcttaaatcgcgccctgagag

SEQ ID NO: 705564 - DNA, 25 bp, Homo sapien
ctctgtcttcttaaatcgcgccctg

SEQ ID NO: 705565 - DNA, 25 bp, Homo sapien
cttaaatcgcgccctgagagtcttc

SEQ ID NO: 705566 - DNA, 25 bp, Homo sapien
tgtcttcttaaatcgcgccctgaga

SEQ ID NO: 705567 - DNA, 25 bp, Homo sapien
ctgattctatcccaggcttggctgg

SEQ ID NO: 705568 - DNA, 25 bp, Homo sapien
atcaaatcaaatgagcccaaacaac

SEQ ID NO: 705569 - DNA, 25 bp, Homo sapien
cagagggggcatgacatccccagag

SEQ ID NO: 705570 - DNA, 25 bp, Homo sapien
atcaaatgagcccaaacaactgaag

SEQ ID NO: 705571 - DNA, 25 bp, Homo sapien
tcggagcccactgaggtgtgtacca

SEQ ID NO: 705572 - DNA, 25 bp, Homo sapien
tgtgtaccatggatactgtcagccc

SEQ ID NO: 705573 - DNA, 25 bp, Homo sapien
aatcagagcaaatgcccctcggagc

SEQ ID NO: 705574 - DNA, 25 bp, Homo sapien
tagtctagccccatcactgcaggtt

SEQ ID NO: 705575 - DNA, 25 bp, Homo sapien
cacagacacagctgcttcatggcgt

SEQ ID NO: 705576 - DNA, 25 bp, Homo sapien
gacacagctgcttcatggcgtccgg

SEQ ID NO: 705577 - DNA, 25 bp, Homo sapien
cagacacagctgcttcatggcgtcc

SEQ ID NO: 705578 - DNA, 25 bp, Homo sapien
acacagctgcttcatggcgtccggg

SEQ ID NO: 705579 - DNA, 25 bp, Homo sapien
gaggtgcatcgttgttttccacggc

SEQ ID NO: 705580 - DNA, 25 bp, Homo sapien
cgaggtgcatcgttgttttccacgg

SEQ ID NO: 705581 - DNA, 25 bp, Homo sapien
cagcctctcgtcactcttgccccag

SEQ ID NO: 705582 - DNA, 25 bp, Homo sapien
ccgaggtgcatcgttgttttccacg

SEQ ID NO: 705583 - DNA, 25 bp, Homo sapien
ttgccctcggggtctagcttcgtgg

SEQ ID NO: 705584 - DNA, 25 bp, Homo sapien
ggcaccagccccttgcgggcgatga

SEQ ID NO: 705585 - DNA, 25 bp, Homo sapien
caccagccccttgcgggcgatgagg

SEQ ID NO: 705586 - DNA, 25 bp, Homo sapien
gggtctagcttcgtgggcaccagcc

SEQ ID NO: 705587 - DNA, 25 bp, Homo sapien
gacagctggccgcaccccgcatggc

SEQ ID NO: 705588 - DNA, 25 bp, Homo sapien
gctatcatcacctccagacagctgg

SEQ ID NO: 705589 - DNA, 25 bp, Homo sapien
gtccgcgctcatgacattgctgcca

SEQ ID NO: 705590 - DNA, 25 bp, Homo sapien
ctcatgacattgctgccatgagcta

SEQ ID NO: 705591 - DNA, 25 bp, Homo sapien
tgtgggtgcccgtatttggcggcca

SEQ ID NO: 705592 - DNA, 25 bp, Homo sapien
gcccgtatttggcggccaggtggag

SEQ ID NO: 705593 - DNA, 25 bp, Homo sapien
ggtgcccgtatttggcggccaggtg

SEQ ID NO: 705594 - DNA, 25 bp, Homo sapien
tgggtgcccgtatttggcggccagg

SEQ ID NO: 705595 - DNA, 25 bp, Homo sapien
gtccacgacgtccaccacgcaggaa

SEQ ID NO: 705596 - DNA, 25 bp, Homo sapien
ccgctgctgtccacgacgtccacca

SEQ ID NO: 705597 - DNA, 25 bp, Homo sapien
acccgctgctgtccacgacgtccac

SEQ ID NO: 705598 - DNA, 25 bp, Homo sapien
tgctgtccacgacgtccaccacgca

SEQ ID NO: 705599 - DNA, 25 bp, Homo sapien
tttagatgtgccttaaaggagcaga

SEQ ID NO: 705600 - DNA, 25 bp, Homo sapien
ctctgagcaggagagacagccacca

SEQ ID NO: 705601 - DNA, 25 bp, Homo sapien
ccttaaaggagcagagcacctctga

SEQ ID NO: 705602 - DNA, 25 bp, Homo sapien
ccgatcttgggggtttagatgtgcc

SEQ ID NO: 705603 - DNA, 25 bp, Homo sapien
tgcctgagatactgccacttggtgg

SEQ ID NO: 705604 - DNA, 25 bp, Homo sapien
caaactttctcagactttcaaaggg

SEQ ID NO: 705605 - DNA, 25 bp, Homo sapien
ggcagcatacctcaagcataacatc

SEQ ID NO: 705606 - DNA, 25 bp, Homo sapien
gcctatataactgcccttgagtttc

SEQ ID NO: 705607 - DNA, 25 bp, Homo sapien
gcaggtcctgatcgttcgcggcagc

SEQ ID NO: 705608 - DNA, 25 bp, Homo sapien
ctataatgaggggtgttgcgcctga

SEQ ID NO: 705609 - DNA, 25 bp, Homo sapien
ctgcagtaggagacggcacaggtct

SEQ ID NO: 705610 - DNA, 25 bp, Homo sapien
tgtgtgacacatctgagctgctata

SEQ ID NO: 705611 - DNA, 25 bp, Homo sapien
tgggccgcctcttgcagaaggtgca

SEQ ID NO: 705612 - DNA, 25 bp, Homo sapien
aggatgagtttgtcccccgccaggg

SEQ ID NO: 705613 - DNA, 25 bp, Homo sapien
ctgccccagcgcatcggtgatgccc

SEQ ID NO: 705614 - DNA, 25 bp, Homo sapien
ccagggcgccatagtgagccgcgtc

SEQ ID NO: 705615 - DNA, 25 bp, Homo sapien
gatgacgcctcgcctgaatcatcct

SEQ ID NO: 705616 - DNA, 25 bp, Homo sapien
gagatgacgcctcgcctgaatcatc

SEQ ID NO: 705617 - DNA, 25 bp, Homo sapien
tgagatgacgcctcgcctgaatcat

SEQ ID NO: 705618 - DNA, 25 bp, Homo sapien
ctgagatgacgcctcgcctgaatca

SEQ ID NO: 705619 - DNA, 25 bp, Homo sapien
cctgctttccatggctggacataga

SEQ ID NO: 705620 - DNA, 25 bp, Homo sapien
ggcatgggaatgctggcgggaggtg

SEQ ID NO: 705621 - DNA, 25 bp, Homo sapien
cggcatgggaatgctggcgggaggt

SEQ ID NO: 705622 - DNA, 25 bp, Homo sapien
aggccccggatcttctgcaggaggc

SEQ ID NO: 705623 - DNA, 25 bp, Homo sapien
tcacgatctcctcataggcatctcg

SEQ ID NO: 705624 - DNA, 25 bp, Homo sapien
gcctccgttccttgtgctgttccag

SEQ ID NO: 705625 - DNA, 25 bp, Homo sapien
tctcctcataggcatctcgatcatc

SEQ ID NO: 705626 - DNA, 25 bp, Homo sapien
tgtgcagggagctggcctccgggga

SEQ ID NO: 705627 - DNA, 25 bp, Homo sapien
ctgtctctccaggatgtgcagggag

SEQ ID NO: 705628 - DNA, 25 bp, Homo sapien
gtctctccaggatgtgcagggagct

SEQ ID NO: 705629 - DNA, 25 bp, Homo sapien
gatgtgcagggagctggcctccggg

SEQ ID NO: 705630 - DNA, 25 bp, Homo sapien
gagcagcagtggaggctcagctgcc

SEQ ID NO: 705631 - DNA, 25 bp, Homo sapien
ctgggagcagcagtggaggctcagc

SEQ ID NO: 705632 - DNA, 25 bp, Homo sapien
gggagcagcagtggaggctcagctg

SEQ ID NO: 705633 - DNA, 25 bp, Homo sapien
agcagcagtggaggctcagctgcct

SEQ ID NO: 705634 - DNA, 25 bp, Homo sapien
acagccggctctgcaaactctccac

SEQ ID NO: 705635 - DNA, 25 bp, Homo sapien
cagccggctctgcaaactctccacc

SEQ ID NO: 705636 - DNA, 25 bp, Homo sapien
agccggctctgcaaactctccacct

SEQ ID NO: 705637 - DNA, 25 bp, Homo sapien
gccggctctgcaaactctccacctc

SEQ ID NO: 705638 - DNA, 25 bp, Homo sapien
cctgcagggtggttacgtcatagct

SEQ ID NO: 705639 - DNA, 25 bp, Homo sapien
tcatagctagtattctcccgctcgt

SEQ ID NO: 705640 - DNA, 25 bp, Homo sapien
gggtggttacgtcatagctagtatt

SEQ ID NO: 705641 - DNA, 25 bp, Homo sapien
catagctagtattctcccgctcgtt

SEQ ID NO: 705642 - DNA, 25 bp, Homo sapien
ctggagggggacgcagagtcaggcc

SEQ ID NO: 705643 - DNA, 25 bp, Homo sapien
gggacgcagagtcaggccctgggga

SEQ ID NO: 705644 - DNA, 25 bp, Homo sapien
gagggggacgcagagtcaggccctg

SEQ ID NO: 705645 - DNA, 25 bp, Homo sapien
ggacgcagagtcaggccctggggac

SEQ ID NO: 705646 - DNA, 25 bp, Homo sapien
gacggactgagttgtctggacagca

SEQ ID NO: 705647 - DNA, 25 bp, Homo sapien
tgcagcgaggccaggtgttcctggg

SEQ ID NO: 705648 - DNA, 25 bp, Homo sapien
cctgggccgacggactgagttgtct

SEQ ID NO: 705649 - DNA, 25 bp, Homo sapien
ccaggtgttcctgggccgacggact

SEQ ID NO: 705650 - DNA, 25 bp, Homo sapien
ctggaccttctccatcagttcctgg

SEQ ID NO: 705651 - DNA, 25 bp, Homo sapien
ttctgtctggtgagcacagccacct

SEQ ID NO: 705652 - DNA, 25 bp, Homo sapien
cctggttctgtctggtgagcacagc

SEQ ID NO: 705653 - DNA, 25 bp, Homo sapien
tgtctggtgagcacagccacctgtt

SEQ ID NO: 705654 - DNA, 25 bp, Homo sapien
tgcctgcgtagctggtcaaactcgg

SEQ ID NO: 705655 - DNA, 25 bp, Homo sapien
ggcctcagcgtgctgcctgcgtagc

SEQ ID NO: 705656 - DNA, 25 bp, Homo sapien
catctgtgtctcgtccttctcaaag

SEQ ID NO: 705657 - DNA, 25 bp, Homo sapien
aactcggcccggagagagtcataga

SEQ ID NO: 705658 - DNA, 25 bp, Homo sapien
gcagcctcctcatctatggtctcgg

SEQ ID NO: 705659 - DNA, 25 bp, Homo sapien
actgagccatttagctccatgtggg

SEQ ID NO: 705660 - DNA, 25 bp, Homo sapien
tatggtctcggctccgttaactttg

SEQ ID NO: 705661 - DNA, 25 bp, Homo sapien
gccactgagccatttagctccatgt

SEQ ID NO: 705662 - DNA, 25 bp, Homo sapien
ggcctccatgtttgtggtccctgtg

SEQ ID NO: 705663 - DNA, 25 bp, Homo sapien
tgtggccctagagcccgtggcctcc

SEQ ID NO: 705664 - DNA, 25 bp, Homo sapien
gcacccactccgtaggcctgcattt

SEQ ID NO: 705665 - DNA, 25 bp, Homo sapien
gcactgactcctgtggattccatcc

SEQ ID NO: 705666 - DNA, 25 bp, Homo sapien
tgcggcaccaggatgtaggatgggg

SEQ ID NO: 705667 - DNA, 25 bp, Homo sapien
ttgaagcttttccgaggcctctgcg

SEQ ID NO: 705668 - DNA, 25 bp, Homo sapien
caccaggatgtaggatggggccagc

SEQ ID NO: 705669 - DNA, 25 bp, Homo sapien
aagcttttccgaggcctctgcggca

SEQ ID NO: 705670 - DNA, 25 bp, Homo sapien
ggcctccgcggcctcgcacttcccc

SEQ ID NO: 705671 - DNA, 25 bp, Homo sapien
acacgctctcgcagccggcctgcct

SEQ ID NO: 705672 - DNA, 25 bp, Homo sapien
ctcggcctcgcggacacgctctcgc

SEQ ID NO: 705673 - DNA, 25 bp, Homo sapien
ctcgcggacacgctctcgcagccgg

SEQ ID NO: 705674 - DNA, 25 bp, Homo sapien
gcaggcgggagtcccggtctcggag

SEQ ID NO: 705675 - DNA, 25 bp, Homo sapien
ccgcaggcgggagtcccggtctcgg

SEQ ID NO: 705676 - DNA, 25 bp, Homo sapien
cggctggcccgagcctcatccaggc

SEQ ID NO: 705677 - DNA, 25 bp, Homo sapien
gccagcagccggctggcccgagcct

SEQ ID NO: 705678 - DNA, 25 bp, Homo sapien
cagttccgcggccgccgtgcgctgc

SEQ ID NO: 705679 - DNA, 25 bp, Homo sapien
gcctcagcggcgtcccgtgcccggc

SEQ ID NO: 705680 - DNA, 25 bp, Homo sapien
tcgggcctcagcggcgtcccgtgcc

SEQ ID NO: 705681 - DNA, 25 bp, Homo sapien
ccggcccagttccgcggccgccgtg

SEQ ID NO: 705682 - DNA, 25 bp, Homo sapien
ctccgagagcgccacgctgcacaca

SEQ ID NO: 705683 - DNA, 25 bp, Homo sapien
ctcctgcagccggcggtgctcagag

SEQ ID NO: 705684 - DNA, 25 bp, Homo sapien
cacggactggcggagggcctcggag

SEQ ID NO: 705685 - DNA, 25 bp, Homo sapien
gccggcaccacggactggcggaggg

SEQ ID NO: 705686 - DNA, 25 bp, Homo sapien
tgcagggtgcccacgatgcgttcgt

SEQ ID NO: 705687 - DNA, 25 bp, Homo sapien
gcagggtgcccacgatgcgttcgtg

SEQ ID NO: 705688 - DNA, 25 bp, Homo sapien
tccagctgggccacgttggcctgca

SEQ ID NO: 705689 - DNA, 25 bp, Homo sapien
cacgcatgactctcaggacactaag

SEQ ID NO: 705690 - DNA, 25 bp, Homo sapien
gactctcaggacactaagactccaa

SEQ ID NO: 705691 - DNA, 25 bp, Homo sapien
gtggcccaagcccacgcatgactct

SEQ ID NO: 705692 - DNA, 25 bp, Homo sapien
tcaggacactaagactccaatgatg

SEQ ID NO: 705693 - DNA, 25 bp, Homo sapien
tcggtccgtagcccccgtagctgct

SEQ ID NO: 705694 - DNA, 25 bp, Homo sapien
gtggccagctgtgcctcggctgcgt

SEQ ID NO: 705695 - DNA, 25 bp, Homo sapien
ctctgggcctggcgagccctttccg

SEQ ID NO: 705696 - DNA, 25 bp, Homo sapien
ctcttcatgaacagggcctcacgct

SEQ ID NO: 705697 - DNA, 25 bp, Homo sapien
cggccggctgctccttcaaggcttc

SEQ ID NO: 705698 - DNA, 25 bp, Homo sapien
gcggccggctgctccttcaaggctt

SEQ ID NO: 705699 - DNA, 25 bp, Homo sapien
aaatccttcacctggtcacggagag

SEQ ID NO: 705700 - DNA, 25 bp, Homo sapien
agctgctgctgtaaatccttcacct

SEQ ID NO: 705701 - DNA, 25 bp, Homo sapien
ttcacctggtcacggagagcctcca

SEQ ID NO: 705702 - DNA, 25 bp, Homo sapien
tgtaaatccttcacctggtcacgga

SEQ ID NO: 705703 - DNA, 25 bp, Homo sapien
ggcttctgtacaaagccaccacgct

SEQ ID NO: 705704 - DNA, 25 bp, Homo sapien
ggcatataggaggtggcttctgtac

SEQ ID NO: 705705 - DNA, 25 bp, Homo sapien
cttctgtacaaagccaccacgctgg

SEQ ID NO: 705706 - DNA, 25 bp, Homo sapien
taggaggtggcttctgtacaaagcc

SEQ ID NO: 705707 - DNA, 25 bp, Homo sapien
ctggctgagaatccgctgcacatct

SEQ ID NO: 705708 - DNA, 25 bp, Homo sapien
ctggtctccaagtgcatgggcctgg

SEQ ID NO: 705709 - DNA, 25 bp, Homo sapien
cagggaatcacagtctccggtggtg

SEQ ID NO: 705710 - DNA, 25 bp, Homo sapien
tattcctgggctggcgtctggatgt

SEQ ID NO: 705711 - DNA, 25 bp, Homo sapien
ttccttcaggtctgactcactggtg

SEQ ID NO: 705712 - DNA, 25 bp, Homo sapien
ccgctagggagatgaattagggtgt

SEQ ID NO: 705713 - DNA, 25 bp, Homo sapien
ggtgaggacttgggacctgcccagg

SEQ ID NO: 705714 - DNA, 25 bp, Homo sapien
tgggaacgtcgtgggagacttgaga

SEQ ID NO: 705715 - DNA, 25 bp, Homo sapien
gcccagaggacaagggccaggagaa

SEQ ID NO: 705716 - DNA, 25 bp, Homo sapien
tccttccactgcagggcgggcagct

SEQ ID NO: 705717 - DNA, 25 bp, Homo sapien
gcgggcagctggcccagaggacaag

SEQ ID NO: 705718 - DNA, 25 bp, Homo sapien
ctttccttccactgcagggcgggca

SEQ ID NO: 705719 - DNA, 25 bp, Homo sapien
gggtccaggagcaatccacggcgat

SEQ ID NO: 705720 - DNA, 25 bp, Homo sapien
atccacggcgatcgggtaccgagag

SEQ ID NO: 705721 - DNA, 25 bp, Homo sapien
ttgcacccggggcagtgtcagagct

SEQ ID NO: 705722 - DNA, 25 bp, Homo sapien
ctcggcattgcacccggggcagtgt

SEQ ID NO: 705723 - DNA, 25 bp, Homo sapien
ccctgaggcccccttccaggctctc

SEQ ID NO: 705724 - DNA, 25 bp, Homo sapien
tcagggccagagttctgggctctcc

SEQ ID NO: 705725 - DNA, 25 bp, Homo sapien
ctctcagggccagagttctgggctc

SEQ ID NO: 705726 - DNA, 25 bp, Homo sapien
ctccaggaagtccagtgtccctgag

SEQ ID NO: 705727 - DNA, 25 bp, Homo sapien
caccaggatgcagtgcagcgatgca

SEQ ID NO: 705728 - DNA, 25 bp, Homo sapien
tctatcaccaggatgcagtgcagcg

SEQ ID NO: 705729 - DNA, 25 bp, Homo sapien
cactctatcaccaggatgcagtgca

SEQ ID NO: 705730 - DNA, 25 bp, Homo sapien
tatcaccaggatgcagtgcagcgat

SEQ ID NO: 705731 - DNA, 25 bp, Homo sapien
ggtgcagctggtggacgttggcgtc

SEQ ID NO: 705732 - DNA, 25 bp, Homo sapien
tgacattgagcacgtagggagccat

SEQ ID NO: 705733 - DNA, 25 bp, Homo sapien
gagaacagctggacatccgtgatgg

SEQ ID NO: 705734 - DNA, 25 bp, Homo sapien
tctgttatgaaaggcacgaagctgc

SEQ ID NO: 705735 - DNA, 25 bp, Homo sapien
tccctgacgcttgtaacggatccag

SEQ ID NO: 705736 - DNA, 25 bp, Homo sapien
gcagctccctgacgcttgtaacgga

SEQ ID NO: 705737 - DNA, 25 bp, Homo sapien
cacgccttctggagggtcgggcttg

SEQ ID NO: 705738 - DNA, 25 bp, Homo sapien
taacggatccagtacttcagtgaga

SEQ ID NO: 705739 - DNA, 25 bp, Homo sapien
aaggacgtggcttcaatgggcccca

SEQ ID NO: 705740 - DNA, 25 bp, Homo sapien
tcagttccccgtagtctgtgaggtc

SEQ ID NO: 705741 - DNA, 25 bp, Homo sapien
cagtcactcagttccccgtagtctg

SEQ ID NO: 705742 - DNA, 25 bp, Homo sapien
ctgagccgccacttggacgtagtac

SEQ ID NO: 705743 - DNA, 25 bp, Homo sapien
cgtagtctgtgaggtcctgagccgc

SEQ ID NO: 705744 - DNA, 25 bp, Homo sapien
tcattgtggcagtggcggggagact

SEQ ID NO: 705745 - DNA, 25 bp, Homo sapien
ttgcccaggctcattgtggcagtgg

SEQ ID NO: 705746 - DNA, 25 bp, Homo sapien
ccaggctcattgtggcagtggcggg

SEQ ID NO: 705747 - DNA, 25 bp, Homo sapien
ctcattgtggcagtggcggggagac

SEQ ID NO: 705748 - DNA, 25 bp, Homo sapien
tgtgtggcccggactggtttcgagc

SEQ ID NO: 705749 - DNA, 25 bp, Homo sapien
gagtagtacatctccatttctcagc

SEQ ID NO: 705750 - DNA, 25 bp, Homo sapien
gctcaaagggaaaagtcggtcatct

SEQ ID NO: 705751 - DNA, 25 bp, Homo sapien
aatatctcacagtgacagttcagtc

SEQ ID NO: 705752 - DNA, 25 bp, Homo sapien
ctggggttacgggctcaggccacca

SEQ ID NO: 705753 - DNA, 25 bp, Homo sapien
cacccggcctcaactatgattaaaa

SEQ ID NO: 705754 - DNA, 25 bp, Homo sapien
tagttgggactgtgggcgcgcaaca

SEQ ID NO: 705755 - DNA, 25 bp, Homo sapien
cccggcctcaactatgattaaaaca

SEQ ID NO: 705756 - DNA, 25 bp, Homo sapien
tagggctaagtcctcgctggatctc

SEQ ID NO: 705757 - DNA, 25 bp, Homo sapien
tgacttttgactggagacccaggtg

SEQ ID NO: 705758 - DNA, 25 bp, Homo sapien
tgttactctacctgccacagatggg

SEQ ID NO: 705759 - DNA, 25 bp, Homo sapien
taaagttcctttggctgcatcaggc

SEQ ID NO: 705760 - DNA, 25 bp, Homo sapien
tgagactaggagttggaatctagtc

SEQ ID NO: 705761 - DNA, 25 bp, Homo sapien
ggtggagtgcggttctatgatcata

SEQ ID NO: 705762 - DNA, 25 bp, Homo sapien
gagtgcggttctatgatcatagtca

SEQ ID NO: 705763 - DNA, 25 bp, Homo sapien
aatctagtctgaggaacatggtgag

SEQ ID NO: 705764 - DNA, 25 bp, Homo sapien
aaacattctgaaactggtccaattg

SEQ ID NO: 705765 - DNA, 25 bp, Homo sapien
aatgttgtctgctcagctcatggaa

SEQ ID NO: 705766 - DNA, 25 bp, Homo sapien
tgaaactggtccaattgttccataa

SEQ ID NO: 705767 - DNA, 25 bp, Homo sapien
agaacccctaatgttgtctgctcag

SEQ ID NO: 705768 - DNA, 25 bp, Homo sapien
catgcggaagttttacaccaagctg

SEQ ID NO: 705769 - DNA, 25 bp, Homo sapien
ccaaaatgaagtccctcatgcggaa

SEQ ID NO: 705770 - DNA, 25 bp, Homo sapien
ctgaggtgttcaagaggtgatccac

SEQ ID NO: 705771 - DNA, 25 bp, Homo sapien
aagccatgggtttggactgagctcc

SEQ ID NO: 705772 - DNA, 25 bp, Homo sapien
tgctgtggcaattgtttgtttattt

SEQ ID NO: 705773 - DNA, 25 bp, Homo sapien
tgatgttgctgtggcaattgtttgt

SEQ ID NO: 705774 - DNA, 25 bp, Homo sapien
tcttgatgttgctgtggcaattgtt

SEQ ID NO: 705775 - DNA, 25 bp, Homo sapien
atgttgctgtggcaattgtttgttt

SEQ ID NO: 705776 - DNA, 25 bp, Homo sapien
tgccttctgatcacctcgcaagcac

SEQ ID NO: 705777 - DNA, 25 bp, Homo sapien
ctttgccttctgatcacctcgcaag

SEQ ID NO: 705778 - DNA, 25 bp, Homo sapien
ttgccttctgatcacctcgcaagca

SEQ ID NO: 705779 - DNA, 25 bp, Homo sapien
tttgccttctgatcacctcgcaagc

SEQ ID NO: 705780 - DNA, 25 bp, Homo sapien
tcctagaaagacctgcgtggggccg

SEQ ID NO: 705781 - DNA, 25 bp, Homo sapien
aggagttcctacagcaagcctgaga

SEQ ID NO: 705782 - DNA, 25 bp, Homo sapien
ccaggagttcctacagcaagcctga

SEQ ID NO: 705783 - DNA, 25 bp, Homo sapien
actccctttgtatcccagggctcct

SEQ ID NO: 705784 - DNA, 25 bp, Homo sapien
gggatctttgatgggtcaaagtccg

SEQ ID NO: 705785 - DNA, 25 bp, Homo sapien
tctttgatgggtcaaagtccggcgg

SEQ ID NO: 705786 - DNA, 25 bp, Homo sapien
gcaccacgtactgccggtctttggg

SEQ ID NO: 705787 - DNA, 25 bp, Homo sapien
atcagccgcaccacgtactgccggt

SEQ ID NO: 705788 - DNA, 25 bp, Homo sapien
cccttgtagatgtattctccgcacg

SEQ ID NO: 705789 - DNA, 25 bp, Homo sapien
caggtagacctcgttctgcaccgtc

SEQ ID NO: 705790 - DNA, 25 bp, Homo sapien
caggcagcgcgtgcacttgatgtaa

SEQ ID NO: 705791 - DNA, 25 bp, Homo sapien
gcaccgtctccttccgagcattgaa

SEQ ID NO: 705792 - DNA, 25 bp, Homo sapien
tctcagcctggaaattccgcgtggc

SEQ ID NO: 705793 - DNA, 25 bp, Homo sapien
tccatggtgtagtctgtgttttcag

SEQ ID NO: 705794 - DNA, 25 bp, Homo sapien
aattccgcgtggctccatgctccat

SEQ ID NO: 705795 - DNA, 25 bp, Homo sapien
tggaaattccgcgtggctccatgct

SEQ ID NO: 705796 - DNA, 25 bp, Homo sapien
ccacgcctggcaagcacctggctaa

SEQ ID NO: 705797 - DNA, 25 bp, Homo sapien
ctgtctcaacccctaaagtagctgg

SEQ ID NO: 705798 - DNA, 25 bp, Homo sapien
ctcagcatagcctcgaagtccacgt

SEQ ID NO: 705799 - DNA, 25 bp, Homo sapien
tagcctcgaagtccacgtgcgcctg

SEQ ID NO: 705800 - DNA, 25 bp, Homo sapien
tgccgctggttcaggtctttcagct

SEQ ID NO: 705801 - DNA, 25 bp, Homo sapien
gctgcctcagcatagcctcgaagtc

SEQ ID NO: 705802 - DNA, 25 bp, Homo sapien
tgttctgcacggtatcgctgctctg

SEQ ID NO: 705803 - DNA, 25 bp, Homo sapien
aggtggtcggcgtcaaaggcattca

SEQ ID NO: 705804 - DNA, 25 bp, Homo sapien
tgggtagtgaggttacagccacgcc

SEQ ID NO: 705805 - DNA, 25 bp, Homo sapien
cacccggaaggtgcaggatgaacgc

SEQ ID NO: 705806 - DNA, 25 bp, Homo sapien
gtcctccagcagtcttcgctttctg

SEQ ID NO: 705807 - DNA, 25 bp, Homo sapien
tcggagtcctccagcagtcttcgct

SEQ ID NO: 705808 - DNA, 25 bp, Homo sapien
ctctgagtcggagtcctccagcagt

SEQ ID NO: 705809 - DNA, 25 bp, Homo sapien
gggttgggccgaagggctggctgca

SEQ ID NO: 705810 - DNA, 25 bp, Homo sapien
gagttcggtcatactgatgcagctc

SEQ ID NO: 705811 - DNA, 25 bp, Homo sapien
ttcggtcatactgatgcagctcact

SEQ ID NO: 705812 - DNA, 25 bp, Homo sapien
tggagttcggtcatactgatgcagc

SEQ ID NO: 705813 - DNA, 25 bp, Homo sapien
ggctggagttcggtcatactgatgc

SEQ ID NO: 705814 - DNA, 25 bp, Homo sapien
atgagtcagctgtggtggaaaatgc

SEQ ID NO: 705815 - DNA, 25 bp, Homo sapien
gaacaaaccagagtggctgaggcca

SEQ ID NO: 705816 - DNA, 25 bp, Homo sapien
ccggccgagaacaatcgtttctgtg

SEQ ID NO: 705817 - DNA, 25 bp, Homo sapien
tctgtgttattggtttatgagcccc

SEQ ID NO: 705818 - DNA, 25 bp, Homo sapien
aatgtacttgagagaacgagtgaaa

SEQ ID NO: 705819 - DNA, 25 bp, Homo sapien
tacttgagagaacgagtgaaaatgg

SEQ ID NO: 705820 - DNA, 25 bp, Homo sapien
cttgagagaacgagtgaaaatggag

SEQ ID NO: 705821 - DNA, 25 bp, Homo sapien
ggaggtgctcaatgtacttgagaga

SEQ ID NO: 705822 - DNA, 25 bp, Homo sapien
cgctctgctcccagacctccacctt

SEQ ID NO: 705823 - DNA, 25 bp, Homo sapien
gaccagcctcgacagcgggggccgg

SEQ ID NO: 705824 - DNA, 25 bp, Homo sapien
tgcagtccgggtcggcctttgcctt

SEQ ID NO: 705825 - DNA, 25 bp, Homo sapien
tgaggctgcccgttgctgcagtccg

SEQ ID NO: 705826 - DNA, 25 bp, Homo sapien
cagggaggacgcgccaggcgtcagg

SEQ ID NO: 705827 - DNA, 25 bp, Homo sapien
gaggacgcgccaggcgtcaggggtg

SEQ ID NO: 705828 - DNA, 25 bp, Homo sapien
gacgcgccaggcgtcaggggtgtag

SEQ ID NO: 705829 - DNA, 25 bp, Homo sapien
cgcgccaggcgtcaggggtgtaggg

SEQ ID NO: 705830 - DNA, 25 bp, Homo sapien
agttgctgccgttgctgtcgtcact

SEQ ID NO: 705831 - DNA, 25 bp, Homo sapien
cgttgctgtcgtcactgtccaggta

SEQ ID NO: 705832 - DNA, 25 bp, Homo sapien
ctgccgttgctgtcgtcactgtcca

SEQ ID NO: 705833 - DNA, 25 bp, Homo sapien
ctgtcgtcactgtccaggtatgcac

SEQ ID NO: 705834 - DNA, 25 bp, Homo sapien
caatgctggcctcaatgtggctgaa

SEQ ID NO: 705835 - DNA, 25 bp, Homo sapien
gatgttgcagccctaagcacagtga

SEQ ID NO: 705836 - DNA, 25 bp, Homo sapien
gacgtgtgactttgaccccgtgagg

SEQ ID NO: 705837 - DNA, 25 bp, Homo sapien
ccctgaagtagtgttggaagctgct

SEQ ID NO: 705838 - DNA, 25 bp, Homo sapien
aagaaacctcatacccaattagctg

SEQ ID NO: 705839 - DNA, 25 bp, Homo sapien
gtttctcactgagcgtgatgtcctc

SEQ ID NO: 705840 - DNA, 25 bp, Homo sapien
tgtcctcaagctgcgtccattctgg

SEQ ID NO: 705841 - DNA, 25 bp, Homo sapien
tgtgtccacaaggttgtgcgaccat

SEQ ID NO: 705842 - DNA, 25 bp, Homo sapien
cagcgggtaattgtcctgctttctg

SEQ ID NO: 705843 - DNA, 25 bp, Homo sapien
agccgcaaggcaattccgggccacg

SEQ ID NO: 705844 - DNA, 25 bp, Homo sapien
gcggccagggagcacagcgggtaat

SEQ ID NO: 705845 - DNA, 25 bp, Homo sapien
gttgacagatctcatcaaatccaag

SEQ ID NO: 705846 - DNA, 25 bp, Homo sapien
gagatggtatctgtgcctggcgcct

SEQ ID NO: 705847 - DNA, 25 bp, Homo sapien
ccagtgagggtcgaaatggaaccga

SEQ ID NO: 705848 - DNA, 25 bp, Homo sapien
gaaagatcaggtgcgccctttggcg

SEQ ID NO: 705849 - DNA, 25 bp, Homo sapien
caaattggtggagaggtcactggct

SEQ ID NO: 705850 - DNA, 25 bp, Homo sapien
cggtaggccctcaggatgtcgctct

SEQ ID NO: 705851 - DNA, 25 bp, Homo sapien
aagcggctctccgcgtcctcatagg

SEQ ID NO: 705852 - DNA, 25 bp, Homo sapien
gagaaccatacttggcatctccggg

SEQ ID NO: 705853 - DNA, 25 bp, Homo sapien
aaagctcaggtagtcccgtagccac

SEQ ID NO: 705854 - DNA, 25 bp, Homo sapien
cactcatgacccattgggcatcgta

SEQ ID NO: 705855 - DNA, 25 bp, Homo sapien
gcatcgtagggctccatgtacccat

SEQ ID NO: 705856 - DNA, 25 bp, Homo sapien
gggtctaaatactcagtgtcggctt

SEQ ID NO: 705857 - DNA, 25 bp, Homo sapien
atgtacccatcatccgggggtgcag

SEQ ID NO: 705858 - DNA, 25 bp, Homo sapien
agctgcacccctctgccgggaagtt

SEQ ID NO: 705859 - DNA, 25 bp, Homo sapien
gcatccggctctgccgaggcttctg

SEQ ID NO: 705860 - DNA, 25 bp, Homo sapien
tcataaggggtgtcatagagctgca

SEQ ID NO: 705861 - DNA, 25 bp, Homo sapien
tgggtcctgttcctcataaggggtg

SEQ ID NO: 705862 - DNA, 25 bp, Homo sapien
tctttcttccactcccagggctgat

SEQ ID NO: 705863 - DNA, 25 bp, Homo sapien
agatgtggtctttcttccactccca

SEQ ID NO: 705864 - DNA, 25 bp, Homo sapien
ctgcaaacgccctggagatgtggtc

SEQ ID NO: 705865 - DNA, 25 bp, Homo sapien
tgtggtctttcttccactcccaggg

SEQ ID NO: 705866 - DNA, 25 bp, Homo sapien
ttggactctactttgtaaactgaaa

SEQ ID NO: 705867 - DNA, 25 bp, Homo sapien
gacaagtaattggactctactttgt

SEQ ID NO: 705868 - DNA, 25 bp, Homo sapien
ggggcattcagatgtcagagtgtgg

SEQ ID NO: 705869 - DNA, 25 bp, Homo sapien
aattggactctactttgtaaactga

SEQ ID NO: 705870 - DNA, 25 bp, Homo sapien
taggtgcggtcatttataaatctgg

SEQ ID NO: 705871 - DNA, 25 bp, Homo sapien
ttccaaagaggagccctagtcccta

SEQ ID NO: 705872 - DNA, 25 bp, Homo sapien
ttggccttcctaagaaataggtgcg

SEQ ID NO: 705873 - DNA, 25 bp, Homo sapien
aatctggtggcaaggagcacaaggg

SEQ ID NO: 705874 - DNA, 25 bp, Homo sapien
ctcccactctggactgtcaaactgc

SEQ ID NO: 705875 - DNA, 25 bp, Homo sapien
tgggcggaggtctccggagctcctt

SEQ ID NO: 705876 - DNA, 25 bp, Homo sapien
tcccactctggactgtcaaactgca

SEQ ID NO: 705877 - DNA, 25 bp, Homo sapien
ggcttctgggcggaggtctccggag

SEQ ID NO: 705878 - DNA, 25 bp, Homo sapien
agggctgggtccacacgctccgcag

SEQ ID NO: 705879 - DNA, 25 bp, Homo sapien
gcagggctgggtccacacgctccgc

SEQ ID NO: 705880 - DNA, 25 bp, Homo sapien
ggggcagggctgggtccacacgctc

SEQ ID NO: 705881 - DNA, 25 bp, Homo sapien
gggcagggctgggtccacacgctcc

SEQ ID NO: 705882 - DNA, 25 bp, Homo sapien
ctagcgagtatggacagatgtctca

SEQ ID NO: 705883 - DNA, 25 bp, Homo sapien
tagcgagtatggacagatgtctcat

SEQ ID NO: 705884 - DNA, 25 bp, Homo sapien
cgcactaggtagctgccttccttgc

SEQ ID NO: 705885 - DNA, 25 bp, Homo sapien
tgagccgcactaggtagctgccttc

SEQ ID NO: 705886 - DNA, 25 bp, Homo sapien
gccgcactaggtagctgccttcctt

SEQ ID NO: 705887 - DNA, 25 bp, Homo sapien
cactaggtagctgccttccttgcag

SEQ ID NO: 705888 - DNA, 25 bp, Homo sapien
cctgcaccggcagtgggcgtgaact

SEQ ID NO: 705889 - DNA, 25 bp, Homo sapien
gggtccgcgcgaacttcagatgcag

SEQ ID NO: 705890 - DNA, 25 bp, Homo sapien
tgaactgtagtggaggacgagctcg

SEQ ID NO: 705891 - DNA, 25 bp, Homo sapien
agagccagatgctcggcaccctgca

SEQ ID NO: 705892 - DNA, 25 bp, Homo sapien
ggatacgattctgggcccgaggact

SEQ ID NO: 705893 - DNA, 25 bp, Homo sapien
ctcaaaagggggccgagggtcactg

SEQ ID NO: 705894 - DNA, 25 bp, Homo sapien
attctgggcccgaggactcaaaagg

SEQ ID NO: 705895 - DNA, 25 bp, Homo sapien
tttgggatacgattctgggcccgag

SEQ ID NO: 705896 - DNA, 25 bp, Homo sapien
cttatttattttctaggccatggga

SEQ ID NO: 705897 - DNA, 25 bp, Homo sapien
aacttatttattttctaggccatgg

SEQ ID NO: 705898 - DNA, 25 bp, Homo sapien
tatttattttctaggccatgggagg

SEQ ID NO: 705899 - DNA, 25 bp, Homo sapien
tttattttctaggccatgggagggc

SEQ ID NO: 705900 - DNA, 25 bp, Homo sapien
tgcagctgcttgacaaagacccact

SEQ ID NO: 705901 - DNA, 25 bp, Homo sapien
cagctgcttgacaaagacccactgc

SEQ ID NO: 705902 - DNA, 25 bp, Homo sapien
catgggtgtggctgcgatcgtgtgg

SEQ ID NO: 705903 - DNA, 25 bp, Homo sapien
tggctgcgatcgtgtggggtgcctg

SEQ ID NO: 705904 - DNA, 25 bp, Homo sapien
aatggcccgccgagccctcgccgcc

SEQ ID NO: 705905 - DNA, 25 bp, Homo sapien
ggccggtagccaatggcccgccgag

SEQ ID NO: 705906 - DNA, 25 bp, Homo sapien
agctgcctttgccgcggccggtagc

SEQ ID NO: 705907 - DNA, 25 bp, Homo sapien
cctttgccgcggccggtagccaatg

SEQ ID NO: 705908 - DNA, 25 bp, Homo sapien
gacgcccctgcgggcccgccctgcc

SEQ ID NO: 705909 - DNA, 25 bp, Homo sapien
ccgacgcccctgcgggcccgccctg

SEQ ID NO: 705910 - DNA, 25 bp, Homo sapien
gcccctgcgggcccgccctgcccca

SEQ ID NO: 705911 - DNA, 25 bp, Homo sapien
cgacgcccctgcgggcccgccctgc

SEQ ID NO: 705912 - DNA, 25 bp, Homo sapien
tgcgggggcgccaggtaagcgggga

SEQ ID NO: 705913 - DNA, 25 bp, Homo sapien
gccagggatgcgggggcgccaggta

SEQ ID NO: 705914 - DNA, 25 bp, Homo sapien
agggatgcgggggcgccaggtaagc

SEQ ID NO: 705915 - DNA, 25 bp, Homo sapien
gatgcgggggcgccaggtaagcggg

SEQ ID NO: 705916 - DNA, 25 bp, Homo sapien
tgtttcagggagtagataaagctct

SEQ ID NO: 705917 - DNA, 25 bp, Homo sapien
cggctggcacggtcctgttttatct

SEQ ID NO: 705918 - DNA, 25 bp, Homo sapien
ctgcagctcgtaggtacggctggca

SEQ ID NO: 705919 - DNA, 25 bp, Homo sapien
gactggaactctgcttcgaggtcct

SEQ ID NO: 705920 - DNA, 25 bp, Homo sapien
aagagggactggaactctgcttcga

SEQ ID NO: 705921 - DNA, 25 bp, Homo sapien
tccagggcccgcgtgcaggcagcca

SEQ ID NO: 705922 - DNA, 25 bp, Homo sapien
gagtctggttggctgtctccagaag

SEQ ID NO: 705923 - DNA, 25 bp, Homo sapien
gaagctcctcggagctctccagggc

SEQ ID NO: 705924 - DNA, 25 bp, Homo sapien
agtcctcgctgtccatggcctgcag

SEQ ID NO: 705925 - DNA, 25 bp, Homo sapien
ctttcaatgatagccggaaggcagg

SEQ ID NO: 705926 - DNA, 25 bp, Homo sapien
ttgcgcgaagtccaccatgaggtga

SEQ ID NO: 705927 - DNA, 25 bp, Homo sapien
tagcatctgccgctcttgcgcgaag

SEQ ID NO: 705928 - DNA, 25 bp, Homo sapien
catgaggtgactcatgttgtcactg

SEQ ID NO: 705929 - DNA, 25 bp, Homo sapien
ccccacagggcgtggaattctcaga

SEQ ID NO: 705930 - DNA, 25 bp, Homo sapien
tcccacctggtgagtttgaccttct

SEQ ID NO: 705931 - DNA, 25 bp, Homo sapien
ggaattcagacaccgggtcgtccac

SEQ ID NO: 705932 - DNA, 25 bp, Homo sapien
cccacaggacatggtattctcacag

SEQ ID NO: 705933 - DNA, 25 bp, Homo sapien
ccacatgttggacaattttgggggc

SEQ ID NO: 705934 - DNA, 25 bp, Homo sapien
tggccacaaaggggttccatgtttg

SEQ ID NO: 705935 - DNA, 25 bp, Homo sapien
atggccacaaaggggttccatgttt

SEQ ID NO: 705936 - DNA, 25 bp, Homo sapien
ccaaccacatgttggacaattttgg

SEQ ID NO: 705937 - DNA, 25 bp, Homo sapien
tcgggattctgtgcctggttcaggg

SEQ ID NO: 705938 - DNA, 25 bp, Homo sapien
gggtcgggattctgtgcctggttca

SEQ ID NO: 705939 - DNA, 25 bp, Homo sapien
agagggggtcgggattctgtgcctg

SEQ ID NO: 705940 - DNA, 25 bp, Homo sapien
ctgaccaagacggaaaggagagggg

SEQ ID NO: 705941 - DNA, 25 bp, Homo sapien
agggtcacacagttatctgccacca

SEQ ID NO: 705942 - DNA, 25 bp, Homo sapien
cagggactcagccaggtcgatcacg

SEQ ID NO: 705943 - DNA, 25 bp, Homo sapien
cagttatctgccaccagggactcag

SEQ ID NO: 705944 - DNA, 25 bp, Homo sapien
cagccaggtcgatcacgggtgcgct

SEQ ID NO: 705945 - DNA, 25 bp, Homo sapien
cacgtagtggtcaatcttgctgtcc

SEQ ID NO: 705946 - DNA, 25 bp, Homo sapien
tgtctgccggatgccctcgatgacc

SEQ ID NO: 705947 - DNA, 25 bp, Homo sapien
ctgtcagggtgtactctgtctgccg

SEQ ID NO: 705948 - DNA, 25 bp, Homo sapien
ttggtccgccggtactccagcacgt

SEQ ID NO: 705949 - DNA, 25 bp, Homo sapien
gcaactgccttgttacaggccttca

SEQ ID NO: 705950 - DNA, 25 bp, Homo sapien
cagagtcaccggctcagagaactct

SEQ ID NO: 705951 - DNA, 25 bp, Homo sapien
agagaactctcctgcaactgccttg

SEQ ID NO: 705952 - DNA, 25 bp, Homo sapien
acaggccttcacacggaagttcatg

SEQ ID NO: 705953 - DNA, 25 bp, Homo sapien
gtgcttccatggaggactaatccca

SEQ ID NO: 705954 - DNA, 25 bp, Homo sapien
catggaggactaatcccaaaaaagg

SEQ ID NO: 705955 - DNA, 25 bp, Homo sapien
tttcaagccaattgcactaccctgt

SEQ ID NO: 705956 - DNA, 25 bp, Homo sapien
caagccaattgcactaccctgtgct

SEQ ID NO: 705957 - DNA, 25 bp, Homo sapien
gatgtggacgcatccaggcggaaca

SEQ ID NO: 705958 - DNA, 25 bp, Homo sapien
gggatgtggacgcatccaggcggaa

SEQ ID NO: 705959 - DNA, 25 bp, Homo sapien
tggtgggatgtggacgcatccaggc

SEQ ID NO: 705960 - DNA, 25 bp, Homo sapien
gtgggatgtggacgcatccaggcgg

SEQ ID NO: 705961 - DNA, 25 bp, Homo sapien
cccactccacggagagatcatccac

SEQ ID NO: 705962 - DNA, 25 bp, Homo sapien
tctcgcgagccttgatatcctgcac

SEQ ID NO: 705963 - DNA, 25 bp, Homo sapien
cttgccatctttctcgcgagccttg

SEQ ID NO: 705964 - DNA, 25 bp, Homo sapien
agttgatgggagacgccgtccgccc

SEQ ID NO: 705965 - DNA, 25 bp, Homo sapien
catcctcttgggagatggagtacct

SEQ ID NO: 705966 - DNA, 25 bp, Homo sapien
actcagcggtgaagcggtcccgtcc

SEQ ID NO: 705967 - DNA, 25 bp, Homo sapien
gcatcctcttgggagatggagtacc

SEQ ID NO: 705968 - DNA, 25 bp, Homo sapien
cagaactgtgtaggactcagcggtg

SEQ ID NO: 705969 - DNA, 25 bp, Homo sapien
ctccccgccgtcgatcagcgtgtcc

SEQ ID NO: 705970 - DNA, 25 bp, Homo sapien
agtaatgctccccgccgtcgatcag

SEQ ID NO: 705971 - DNA, 25 bp, Homo sapien
atgctccccgccgtcgatcagcgtg

SEQ ID NO: 705972 - DNA, 25 bp, Homo sapien
tcccagtaatgctccccgccgtcga

SEQ ID NO: 705973 - DNA, 25 bp, Homo sapien
gccaattgttgacgtgcaggcacca

SEQ ID NO: 705974 - DNA, 25 bp, Homo sapien
gaacgccttgctgtccggctcgtag

SEQ ID NO: 705975 - DNA, 25 bp, Homo sapien
ggccgtcttgcccagttgctcgaag

SEQ ID NO: 705976 - DNA, 25 bp, Homo sapien
ccagttgctcgaagcggcccaggct

SEQ ID NO: 705977 - DNA, 25 bp, Homo sapien
agtcgggcacgggggcgtccagcac

SEQ ID NO: 705978 - DNA, 25 bp, Homo sapien
ccaggcagtcgggcacgggggcgtc

SEQ ID NO: 705979 - DNA, 25 bp, Homo sapien
cttgaccttgttggcgtgcttggcc

SEQ ID NO: 705980 - DNA, 25 bp, Homo sapien
ggcagtcgggcacgggggcgtccag

SEQ ID NO: 705981 - DNA, 25 bp, Homo sapien
ggggcagccagagacggcagctggg

SEQ ID NO: 705982 - DNA, 25 bp, Homo sapien
gcaggggcagccagagacggcagct

SEQ ID NO: 705983 - DNA, 25 bp, Homo sapien
aggcaggggcagccagagacggcag

SEQ ID NO: 705984 - DNA, 25 bp, Homo sapien
aggggcagccagagacggcagctgg

SEQ ID NO: 705985 - DNA, 25 bp, Homo sapien
gaacctggtcttgaaagtgtgcagc

SEQ ID NO: 705986 - DNA, 25 bp, Homo sapien
cacttgtttggtgcgggcattgtag

SEQ ID NO: 705987 - DNA, 25 bp, Homo sapien
tgcagcacttgtttggtgcgggcat

SEQ ID NO: 705988 - DNA, 25 bp, Homo sapien
tgtgaacctggtcttgaaagtgtgc

SEQ ID NO: 705989 - DNA, 25 bp, Homo sapien
cgcttttgcaggcagcgcacagcac

SEQ ID NO: 705990 - DNA, 25 bp, Homo sapien
ggtagcactgcctcgcttttgcagg

SEQ ID NO: 705991 - DNA, 25 bp, Homo sapien
aggcctgtcgtcacctggaagctgc

SEQ ID NO: 705992 - DNA, 25 bp, Homo sapien
ggacctgcaggcctgtcgtcacctg

SEQ ID NO: 705993 - DNA, 25 bp, Homo sapien
cagcctgggcttggcggcgactccc

SEQ ID NO: 705994 - DNA, 25 bp, Homo sapien
ggagttaaggctccaagcagcaagt

SEQ ID NO: 705995 - DNA, 25 bp, Homo sapien
agggtgcccactccctcttggtgac

SEQ ID NO: 705996 - DNA, 25 bp, Homo sapien
tggtgacccccccatctggagttaa

SEQ ID NO: 705997 - DNA, 25 bp, Homo sapien
gtagatcactgcagttaagaaagat

SEQ ID NO: 705998 - DNA, 25 bp, Homo sapien
tgactgcctcattttctaatacaga

SEQ ID NO: 705999 - DNA, 25 bp, Homo sapien
ccaacaaaccctttagagccagtag

SEQ ID NO: 706000 - DNA, 25 bp, Homo sapien
tacctgtagtggagtagactttcct

SEQ ID NO: 706001 - DNA, 25 bp, Homo sapien
ctccgggtataaggccagccgagtc

SEQ ID NO: 706002 - DNA, 25 bp, Homo sapien
aatcagctccgggtataaggccagc

SEQ ID NO: 706003 - DNA, 25 bp, Homo sapien
cagccaatcagctccgggtataagg

SEQ ID NO: 706004 - DNA, 25 bp, Homo sapien
ggtataaggccagccgagtccggcc

SEQ ID NO: 706005 - DNA, 25 bp, Homo sapien
ccggagctctagactccggcttccc

SEQ ID NO: 706006 - DNA, 25 bp, Homo sapien
ccccgcgcccggagctctagactcc

SEQ ID NO: 706007 - DNA, 25 bp, Homo sapien
gcccggagctctagactccggcttc

SEQ ID NO: 706008 - DNA, 25 bp, Homo sapien
gcgcccggagctctagactccggct

SEQ ID NO: 706009 - DNA, 25 bp, Homo sapien
cgccactgcgtccaccgcccgctcc

SEQ ID NO: 706010 - DNA, 25 bp, Homo sapien
cgctcccgcattcggccgctcaggg

SEQ ID NO: 706011 - DNA, 25 bp, Homo sapien
ctcctccgctgacgctactgccgcc

SEQ ID NO: 706012 - DNA, 25 bp, Homo sapien
cctcggcctccgcttcgtcctcgtc

SEQ ID NO: 706013 - DNA, 25 bp, Homo sapien
tttgaggagcacccgcagtgtgacc

SEQ ID NO: 706014 - DNA, 25 bp, Homo sapien
tgaggagcacccgcagtgtgaccgc

SEQ ID NO: 706015 - DNA, 25 bp, Homo sapien
ctttgaggagcacccgcagtgtgac

SEQ ID NO: 706016 - DNA, 25 bp, Homo sapien
aggagcacccgcagtgtgaccgcgc

SEQ ID NO: 706017 - DNA, 25 bp, Homo sapien
caggtagtagatggacagcaccccg

SEQ ID NO: 706018 - DNA, 25 bp, Homo sapien
ggtagtagatggacagcaccccggc

SEQ ID NO: 706019 - DNA, 25 bp, Homo sapien
tagtagatggacagcaccccggcgc

SEQ ID NO: 706020 - DNA, 25 bp, Homo sapien
agatggacagcaccccggcgccagg

SEQ ID NO: 706021 - DNA, 25 bp, Homo sapien
cacatgatccttccgtctggctgca

SEQ ID NO: 706022 - DNA, 25 bp, Homo sapien
tgagttgaaggtctgcccggtctcc

SEQ ID NO: 706023 - DNA, 25 bp, Homo sapien
ggcctttgtacttgacagaggccca

SEQ ID NO: 706024 - DNA, 25 bp, Homo sapien
tgcaggtcgcccaggaacttcttcc

SEQ ID NO: 706025 - DNA, 25 bp, Homo sapien
ttgccagttccttgtagacactgga

SEQ ID NO: 706026 - DNA, 25 bp, Homo sapien
cagtggtctccgactcttgtcctct

SEQ ID NO: 706027 - DNA, 25 bp, Homo sapien
tctgctgagacccctgccagaacgt

SEQ ID NO: 706028 - DNA, 25 bp, Homo sapien
tctccgactcttgtcctctgctgag

SEQ ID NO: 706029 - DNA, 25 bp, Homo sapien
tgaagggctcttccccagtggtctc

SEQ ID NO: 706030 - DNA, 25 bp, Homo sapien
tagcggaccggaacccggatcttgc

SEQ ID NO: 706031 - DNA, 25 bp, Homo sapien
accggaacccggatcttgctgtcca

SEQ ID NO: 706032 - DNA, 25 bp, Homo sapien
tggccaagtcgcggctgcccagcat

SEQ ID NO: 706033 - DNA, 25 bp, Homo sapien
ccagcatgcagtagcggaccggaac

SEQ ID NO: 706034 - DNA, 25 bp, Homo sapien
gcacgttgctagaaacagccacgtt

SEQ ID NO: 706035 - DNA, 25 bp, Homo sapien
cagcaggaacagcacgttgctagaa

SEQ ID NO: 706036 - DNA, 25 bp, Homo sapien
tgttgatggctgcaaaggatgttac

SEQ ID NO: 706037 - DNA, 25 bp, Homo sapien
cacgttgaacggctggaacttgttg

SEQ ID NO: 706038 - DNA, 25 bp, Homo sapien
ccggagccccttgcccctagacagg

SEQ ID NO: 706039 - DNA, 25 bp, Homo sapien
gctctcatggagctgatacgcaggg

SEQ ID NO: 706040 - DNA, 25 bp, Homo sapien
gagcacccacagtgtaccagtagca

SEQ ID NO: 706041 - DNA, 25 bp, Homo sapien
cgctgcccaccgactgggctccgga

SEQ ID NO: 706042 - DNA, 25 bp, Homo sapien
cacgacctcactccgtgtcaggtga

SEQ ID NO: 706043 - DNA, 25 bp, Homo sapien
tctggctgttgacgtcccagcggcc

SEQ ID NO: 706044 - DNA, 25 bp, Homo sapien
aggtaacccacgacctcactccgtg

SEQ ID NO: 706045 - DNA, 25 bp, Homo sapien
cactccgtgtcaggtgactgtggaa

SEQ ID NO: 706046 - DNA, 25 bp, Homo sapien
agctgcagtctctgcgtccccgagc

SEQ ID NO: 706047 - DNA, 25 bp, Homo sapien
ctcttcgatggcagctgcagtctct

SEQ ID NO: 706048 - DNA, 25 bp, Homo sapien
agccggctccgacaagggaaggctc

SEQ ID NO: 706049 - DNA, 25 bp, Homo sapien
tccccgagccggctccgacaaggga

SEQ ID NO: 706050 - DNA, 25 bp, Homo sapien
gtgggtggctgtggtaccagcccac

SEQ ID NO: 706051 - DNA, 25 bp, Homo sapien
gcagccgcagctggtagtccatctg

SEQ ID NO: 706052 - DNA, 25 bp, Homo sapien
agctggtagtccatctgtgcgtcga

SEQ ID NO: 706053 - DNA, 25 bp, Homo sapien
gctggaagccattgctggagccctg

SEQ ID NO: 706054 - DNA, 25 bp, Homo sapien
ggtagtccatctgtgcgtcgatgtc

SEQ ID NO: 706055 - DNA, 25 bp, Homo sapien
ggttggccctgggaggctcggctgg

SEQ ID NO: 706056 - DNA, 25 bp, Homo sapien
gccctgggaggctcggctggcccag

SEQ ID NO: 706057 - DNA, 25 bp, Homo sapien
gctggcccagcatcccccctccttg

SEQ ID NO: 706058 - DNA, 25 bp, Homo sapien
ttggccctgggaggctcggctggcc

SEQ ID NO: 706059 - DNA, 25 bp, Homo sapien
ggcctgggttgccagaatagtaagg

SEQ ID NO: 706060 - DNA, 25 bp, Homo sapien
cagaaaggtgagatcttggactcgg

SEQ ID NO: 706061 - DNA, 25 bp, Homo sapien
gcctgggttgccagaatagtaaggg

SEQ ID NO: 706062 - DNA, 25 bp, Homo sapien
ctcgggaggaggcatcacccagaaa

SEQ ID NO: 706063 - DNA, 25 bp, Homo sapien
catggcagctggggacaattggcag

SEQ ID NO: 706064 - DNA, 25 bp, Homo sapien
ccatggggatgccatagtcactggg

SEQ ID NO: 706065 - DNA, 25 bp, Homo sapien
ggatgccatagtcactgggcctttg

SEQ ID NO: 706066 - DNA, 25 bp, Homo sapien
tggacgtaggccatctccacatcca

SEQ ID NO: 706067 - DNA, 25 bp, Homo sapien
gaagctgtcctggacgtaggccatc

SEQ ID NO: 706068 - DNA, 25 bp, Homo sapien
cgtggccccctggttcggcctcatc

SEQ ID NO: 706069 - DNA, 25 bp, Homo sapien
cagaaccacgcgggcctgacgtggc

SEQ ID NO: 706070 - DNA, 25 bp, Homo sapien
cccctggttcggcctcatccccagc

SEQ ID NO: 706071 - DNA, 25 bp, Homo sapien
agaaccacgcgggcctgacgtggcc

SEQ ID NO: 706072 - DNA, 25 bp, Homo sapien
ggaacccttgtagaactccaccagc

SEQ ID NO: 706073 - DNA, 25 bp, Homo sapien
agggttcctggagcctcacgaggtc

SEQ ID NO: 706074 - DNA, 25 bp, Homo sapien
tcaggggaacccttgtagaactcca

SEQ ID NO: 706075 - DNA, 25 bp, Homo sapien
tgtcgaggtaggtgtgctcctggct

SEQ ID NO: 706076 - DNA, 25 bp, Homo sapien
ccaggacgtgacacaggctctggtc

SEQ ID NO: 706077 - DNA, 25 bp, Homo sapien
gaggacgccgcacacctgttccagg

SEQ ID NO: 706078 - DNA, 25 bp, Homo sapien
ctgttccaggacgtgacacaggctc

SEQ ID NO: 706079 - DNA, 25 bp, Homo sapien
ctgcttgaggacgccgcacacctgt

SEQ ID NO: 706080 - DNA, 25 bp, Homo sapien
tgcttccgtttctttattacctgag

SEQ ID NO: 706081 - DNA, 25 bp, Homo sapien
tccgtttctttattacctgagccca

SEQ ID NO: 706082 - DNA, 25 bp, Homo sapien
tgctgcttccgtttctttattacct

SEQ ID NO: 706083 - DNA, 25 bp, Homo sapien
ccgtttctttattacctgagcccat

SEQ ID NO: 706084 - DNA, 25 bp, Homo sapien
caccctcaccccagccttggggaga

SEQ ID NO: 706085 - DNA, 25 bp, Homo sapien
cccagccaccctcaccccagccttg

SEQ ID NO: 706086 - DNA, 25 bp, Homo sapien
ccagccaccctcaccccagccttgg

SEQ ID NO: 706087 - DNA, 25 bp, Homo sapien
ctcaccccagccttggggagaccag

SEQ ID NO: 706088 - DNA, 25 bp, Homo sapien
cacggtccagggcaaactgaaatgt

SEQ ID NO: 706089 - DNA, 25 bp, Homo sapien
tctatcgcccaatgcaaaatcgatg

SEQ ID NO: 706090 - DNA, 25 bp, Homo sapien
gcacacagctttgggcacggtccag

SEQ ID NO: 706091 - DNA, 25 bp, Homo sapien
ctgtggtccagtgaagcctccggac

SEQ ID NO: 706092 - DNA, 25 bp, Homo sapien
ctgtgtcactctggcacaagctgcc

SEQ ID NO: 706093 - DNA, 25 bp, Homo sapien
aaaggttccagtgagcgcatgtccc

SEQ ID NO: 706094 - DNA, 25 bp, Homo sapien
cagggaggcctgtgtcactctggca

SEQ ID NO: 706095 - DNA, 25 bp, Homo sapien
ggccaagcacaaaggttccagtgag

SEQ ID NO: 706096 - DNA, 25 bp, Homo sapien
ctggttttaaatccctcccagcctg

SEQ ID NO: 706097 - DNA, 25 bp, Homo sapien
tggtgatgggccctggccctactcc

SEQ ID NO: 706098 - DNA, 25 bp, Homo sapien
tgaggacagagaacatggtctcctg

SEQ ID NO: 706099 - DNA, 25 bp, Homo sapien
taacaggatgggatcgagggtcccc

SEQ ID NO: 706100 - DNA, 25 bp, Homo sapien
tctggccgctactggtgtgacccat

SEQ ID NO: 706101 - DNA, 25 bp, Homo sapien
aagatccccgatgaggagctacgcc

SEQ ID NO: 706102 - DNA, 25 bp, Homo sapien
tgactacaagaagaagcggcagggc

SEQ ID NO: 706103 - DNA, 25 bp, Homo sapien
tgagaagacctatgcccttgggagg

SEQ ID NO: 706104 - DNA, 25 bp, Homo sapien
aggtgctgctcctgcgccagcctgg

SEQ ID NO: 706105 - DNA, 25 bp, Homo sapien
tgccggatggggcagccccattcct

SEQ ID NO: 706106 - DNA, 25 bp, Homo sapien
ctgtgcgagaaagacctgaaggaga

SEQ ID NO: 706107 - DNA, 25 bp, Homo sapien
ctgaaggagatccaggtgctgctcc

SEQ ID NO: 706108 - DNA, 25 bp, Homo sapien
tccagcctgtgaaacgctatttcaa

SEQ ID NO: 706109 - DNA, 25 bp, Homo sapien
agtgtctcagtctagtggtcccagg

SEQ ID NO: 706110 - DNA, 25 bp, Homo sapien
tgagctggtacagcgccactgcgtt

SEQ ID NO: 706111 - DNA, 25 bp, Homo sapien
cacaggtgacgcattgctggatgcc

SEQ ID NO: 706112 - DNA, 25 bp, Homo sapien
tctggtgacaggtgactcatgccca

SEQ ID NO: 706113 - DNA, 25 bp, Homo sapien
gtgttgacgtcgcagcagcagccat

SEQ ID NO: 706114 - DNA, 25 bp, Homo sapien
tcctttggggcgatgacaacagaga

SEQ ID NO: 706115 - DNA, 25 bp, Homo sapien
taagcacaaggcagagcggcgtgct

SEQ ID NO: 706116 - DNA, 25 bp, Homo sapien
cggcgtgctttgtgttgacgtcgca

SEQ ID NO: 706117 - DNA, 25 bp, Homo sapien
tagctgccacgctgtgggaaatgcc

SEQ ID NO: 706118 - DNA, 25 bp, Homo sapien
tgcagtctcgcctcttaggatcggg

SEQ ID NO: 706119 - DNA, 25 bp, Homo sapien
cacactgggatttgggctcaggaaa

SEQ ID NO: 706120 - DNA, 25 bp, Homo sapien
tgggttggtaacagccaggtcctga

SEQ ID NO: 706121 - DNA, 25 bp, Homo sapien
cggcggcagctcgacctcctctcag

SEQ ID NO: 706122 - DNA, 25 bp, Homo sapien
ccggcggcagctcgacctcctctca

SEQ ID NO: 706123 - DNA, 25 bp, Homo sapien
gctcccctggcgccgggcgccccgc

SEQ ID NO: 706124 - DNA, 25 bp, Homo sapien
caaacaatatggtcgcggctacaac

SEQ ID NO: 706125 - DNA, 25 bp, Homo sapien
agtcctggagggacgaactgacgca

SEQ ID NO: 706126 - DNA, 25 bp, Homo sapien
gaactgacgcaaaagcgccggaaac

SEQ ID NO: 706127 - DNA, 25 bp, Homo sapien
caataacgtcaacaagggtgccctt

SEQ ID NO: 706128 - DNA, 25 bp, Homo sapien
actggaaaagctggtctatctttgc

SEQ ID NO: 706129 - DNA, 25 bp, Homo sapien
tggaaaagctggtctatctttgcaa

SEQ ID NO: 706130 - DNA, 25 bp, Homo sapien
gaaaagctggtctatctttgcaatc

SEQ ID NO: 706131 - DNA, 25 bp, Homo sapien
ggaaaagctggtctatctttgcaat

SEQ ID NO: 706132 - DNA, 25 bp, Homo sapien
ctgaaacaaagacagaaagccatct

SEQ ID NO: 706133 - DNA, 25 bp, Homo sapien
tcccctttgggacaagattcaggcg

SEQ ID NO: 706134 - DNA, 25 bp, Homo sapien
tccaaggtgtccaaagaggcctcta

SEQ ID NO: 706135 - DNA, 25 bp, Homo sapien
ttcaggcgcttaaacggcagacggg

SEQ ID NO: 706136 - DNA, 25 bp, Homo sapien
gaagtaccctgatcgtctgacatgt

SEQ ID NO: 706137 - DNA, 25 bp, Homo sapien
tgtctggctgctcattcgagtcctc

SEQ ID NO: 706138 - DNA, 25 bp, Homo sapien
tcggtctaaagtctatgtcagaacc

SEQ ID NO: 706139 - DNA, 25 bp, Homo sapien
tactggtttcgattctatttcttaa

SEQ ID NO: 706140 - DNA, 25 bp, Homo sapien
tcctctgtcaaatcaatgatgactg

SEQ ID NO: 706141 - DNA, 25 bp, Homo sapien
aaagggtctctccaggaaatgccaa

SEQ ID NO: 706142 - DNA, 25 bp, Homo sapien
cagctccgtggcgaacattcctggg

SEQ ID NO: 706143 - DNA, 25 bp, Homo sapien
tttgcaaggaatgtctgaaagggtc

SEQ ID NO: 706144 - DNA, 25 bp, Homo sapien
tgtcgttctgaatggccttcaacaa

SEQ ID NO: 706145 - DNA, 25 bp, Homo sapien
cggtggtctcacagccaagatgtcc

SEQ ID NO: 706146 - DNA, 25 bp, Homo sapien
ctcagggacgaatggctgagtacag

SEQ ID NO: 706147 - DNA, 25 bp, Homo sapien
aagggacttgatttgcggtggtctc

SEQ ID NO: 706148 - DNA, 25 bp, Homo sapien
tcttcggggaaagattccagcacct

SEQ ID NO: 706149 - DNA, 25 bp, Homo sapien
tgctcagtgtctttgcagccccgtc

SEQ ID NO: 706150 - DNA, 25 bp, Homo sapien
ttgaagtgatcttcaagcgatcctc

SEQ ID NO: 706151 - DNA, 25 bp, Homo sapien
aagtcatgcttcctgccgtctcact

SEQ ID NO: 706152 - DNA, 25 bp, Homo sapien
ccaggtaaggtttttaagatggctg

SEQ ID NO: 706153 - DNA, 25 bp, Homo sapien
ggctcacatcacaggacgaaatttt

SEQ ID NO: 706154 - DNA, 25 bp, Homo sapien
gaaattttgcaaagcggcagcagcc

SEQ ID NO: 706155 - DNA, 25 bp, Homo sapien
gtagaagctgaaatgtgtacatgcc

SEQ ID NO: 706156 - DNA, 25 bp, Homo sapien
tcgaatgtacactacaggatgccca

SEQ ID NO: 706157 - DNA, 25 bp, Homo sapien
gttcttctctgtagagcctttgacg

SEQ ID NO: 706158 - DNA, 25 bp, Homo sapien
tctttgcagtctgagcttgttcttc

SEQ ID NO: 706159 - DNA, 25 bp, Homo sapien
ctttgcagtctgagcttgttcttct

SEQ ID NO: 706160 - DNA, 25 bp, Homo sapien
tagagcctttgacgaatttcttagt

SEQ ID NO: 706161 - DNA, 25 bp, Homo sapien
tgagctgcttgcccagacgctcctg

SEQ ID NO: 706162 - DNA, 25 bp, Homo sapien
tttctgcacgtaacttgagctgctt

SEQ ID NO: 706163 - DNA, 25 bp, Homo sapien
acttgagctgcttgcccagacgctc

SEQ ID NO: 706164 - DNA, 25 bp, Homo sapien
cctttctgcacgtaacttgagctgc

SEQ ID NO: 706165 - DNA, 25 bp, Homo sapien
ttggcccgcttggcctcctctttca

SEQ ID NO: 706166 - DNA, 25 bp, Homo sapien
gcctcctccttggcccgcttggcct

SEQ ID NO: 706167 - DNA, 25 bp, Homo sapien
ctccttggcccgcttggcctcctct

SEQ ID NO: 706168 - DNA, 25 bp, Homo sapien
cgcctctccttttccttaagctcct

SEQ ID NO: 706169 - DNA, 25 bp, Homo sapien
cttcctgtctctccttgcgccgctc

SEQ ID NO: 706170 - DNA, 25 bp, Homo sapien
cagggcttcctgtctctccttgcgc

SEQ ID NO: 706171 - DNA, 25 bp, Homo sapien
ttgcgccgctcctccttgagccgct

SEQ ID NO: 706172 - DNA, 25 bp, Homo sapien
gggcttcctgtctctccttgcgccg

SEQ ID NO: 706173 - DNA, 25 bp, Homo sapien
aatgacatttcagccgactctttgc

SEQ ID NO: 706174 - DNA, 25 bp, Homo sapien
gacatttcagccgactctttgcttt

SEQ ID NO: 706175 - DNA, 25 bp, Homo sapien
cagcaaatgacatttcagccgactc

SEQ ID NO: 706176 - DNA, 25 bp, Homo sapien
atttcagccgactctttgctttggc

SEQ ID NO: 706177 - DNA, 25 bp, Homo sapien
ctcttcttctcttaaccgtttctct

SEQ ID NO: 706178 - DNA, 25 bp, Homo sapien
tctcttcttctcttaaccgtttctc

SEQ ID NO: 706179 - DNA, 25 bp, Homo sapien
gtgatttcggccttctctgctttaa

SEQ ID NO: 706180 - DNA, 25 bp, Homo sapien
tttggtttctggaagaacctcgtga

SEQ ID NO: 706181 - DNA, 25 bp, Homo sapien
ctttggtttctggaagaacctcgtg

SEQ ID NO: 706182 - DNA, 25 bp, Homo sapien
gaacctcgtgatttcggccttctct

SEQ ID NO: 706183 - DNA, 25 bp, Homo sapien
tctgcattccgggtggaaacgtgcg

SEQ ID NO: 706184 - DNA, 25 bp, Homo sapien
tctggatggaaagcggtccgacgcc

SEQ ID NO: 706185 - DNA, 25 bp, Homo sapien
aaacgtgcgtgggtccggacctcag

SEQ ID NO: 706186 - DNA, 25 bp, Homo sapien
ctttcaagaaggagaactcgccgct

SEQ ID NO: 706187 - DNA, 25 bp, Homo sapien
ggagcttcatcctgccaaacttcct

SEQ ID NO: 706188 - DNA, 25 bp, Homo sapien
ttcccacgctccacgatgacgacat

SEQ ID NO: 706189 - DNA, 25 bp, Homo sapien
gatgagtgccgtcttcttattccag

SEQ ID NO: 706190 - DNA, 25 bp, Homo sapien
ccccagtaggcaggccggtggttct

SEQ ID NO: 706191 - DNA, 25 bp, Homo sapien
ccctcactgtgggacagggactccc

SEQ ID NO: 706192 - DNA, 25 bp, Homo sapien
tgtgggacagggactccccaggctc

SEQ ID NO: 706193 - DNA, 25 bp, Homo sapien
tcactgtgggacagggactccccag

SEQ ID NO: 706194 - DNA, 25 bp, Homo sapien
cactgtccacctcatagtccaggag

SEQ ID NO: 706195 - DNA, 25 bp, Homo sapien
agacaggtacccatggggcacaaag

SEQ ID NO: 706196 - DNA, 25 bp, Homo sapien
tgtcacaccttcgtcctcagacagg

SEQ ID NO: 706197 - DNA, 25 bp, Homo sapien
cagacaggtacccatggggcacaaa

SEQ ID NO: 706198 - DNA, 25 bp, Homo sapien
atcctctcccatgtcgtcatcatca

SEQ ID NO: 706199 - DNA, 25 bp, Homo sapien
gttgcaggacgcgaaagcgcttccc

SEQ ID NO: 706200 - DNA, 25 bp, Homo sapien
gaactgctgcagtaccttcaggtca

SEQ ID NO: 706201 - DNA, 25 bp, Homo sapien
cagtttctggcggaccttatggttc

SEQ ID NO: 706202 - DNA, 25 bp, Homo sapien
cttatggttctcagggtcggcacac

SEQ ID NO: 706203 - DNA, 25 bp, Homo sapien
cccgcttggaggccttgggcgtctg

SEQ ID NO: 706204 - DNA, 25 bp, Homo sapien
tcccgcttggaggccttgggcgtct

SEQ ID NO: 706205 - DNA, 25 bp, Homo sapien
tggaagctctgtagcacctgcgggt

SEQ ID NO: 706206 - DNA, 25 bp, Homo sapien
gaaatgagccgcttgagccgggact

SEQ ID NO: 706207 - DNA, 25 bp, Homo sapien
tcctcttcagcgagatgggagtgcc

SEQ ID NO: 706208 - DNA, 25 bp, Homo sapien
ggaactcccggatgatgaccttgct

SEQ ID NO: 706209 - DNA, 25 bp, Homo sapien
ccaccgcttggctaatctaaaaatt

SEQ ID NO: 706210 - DNA, 25 bp, Homo sapien
taagagtcccctgtagacgctgctg

SEQ ID NO: 706211 - DNA, 25 bp, Homo sapien
caggagacgcgttgacacattaggc

SEQ ID NO: 706212 - DNA, 25 bp, Homo sapien
caagtgctaaacacagacacggagg

SEQ ID NO: 706213 - DNA, 25 bp, Homo sapien
catagactggtttcatgggctgtca

SEQ ID NO: 706214 - DNA, 25 bp, Homo sapien
gaaagacaggatgcgtagaggccac

SEQ ID NO: 706215 - DNA, 25 bp, Homo sapien
tgaccctagtaagattcctgagctg

SEQ ID NO: 706216 - DNA, 25 bp, Homo sapien
tatttcagtagggaggatagtcctc

SEQ ID NO: 706217 - DNA, 25 bp, Homo sapien
ggatgtgtaagagcaacctagcccc

SEQ ID NO: 706218 - DNA, 25 bp, Homo sapien
ggacatccacgatcatacagtcgcc

SEQ ID NO: 706219 - DNA, 25 bp, Homo sapien
catccgggacatccacgatcataca

SEQ ID NO: 706220 - DNA, 25 bp, Homo sapien
tccgggacatccacgatcatacagt

SEQ ID NO: 706221 - DNA, 25 bp, Homo sapien
cagcatccgggacatccacgatcat

SEQ ID NO: 706222 - DNA, 25 bp, Homo sapien
cgaggtcagggtggccttgccggtg

SEQ ID NO: 706223 - DNA, 25 bp, Homo sapien
ctcgaggtcagggtggccttgccgg

SEQ ID NO: 706224 - DNA, 25 bp, Homo sapien
ccggaagcggctccacacggggctt

SEQ ID NO: 706225 - DNA, 25 bp, Homo sapien
cccagctccggaagcggctccacac

SEQ ID NO: 706226 - DNA, 25 bp, Homo sapien
ggaggacaccctaagcattctacat

SEQ ID NO: 706227 - DNA, 25 bp, Homo sapien
tctttacacaggaattgagtcggtt

SEQ ID NO: 706228 - DNA, 25 bp, Homo sapien
ggaactaatccagcatcctatatag

SEQ ID NO: 706229 - DNA, 25 bp, Homo sapien
tgagtcggttcaagtatctgctctg

SEQ ID NO: 706230 - DNA, 25 bp, Homo sapien
tctcaataatgctttattaaagggc

SEQ ID NO: 706231 - DNA, 25 bp, Homo sapien
caataatgctttattaaagggcaga

SEQ ID NO: 706232 - DNA, 25 bp, Homo sapien
tcaataatgctttattaaagggcag

SEQ ID NO: 706233 - DNA, 25 bp, Homo sapien
ctcaataatgctttattaaagggca

SEQ ID NO: 706234 - DNA, 25 bp, Homo sapien
tattggattccacgcctgctcctgt

SEQ ID NO: 706235 - DNA, 25 bp, Homo sapien
cgggtggtcctgacgcttcaattca

SEQ ID NO: 706236 - DNA, 25 bp, Homo sapien
cgcgcacgtggccaggcgggtggtc

SEQ ID NO: 706237 - DNA, 25 bp, Homo sapien
cactgcctcgttaggtccaggggcc

SEQ ID NO: 706238 - DNA, 25 bp, Homo sapien
agatgcgcaacttcacctggcaaga

SEQ ID NO: 706239 - DNA, 25 bp, Homo sapien
tctccgttgaaaccgtgggacacag

SEQ ID NO: 706240 - DNA, 25 bp, Homo sapien
ggaccatgtggatacctgttctcag

SEQ ID NO: 706241 - DNA, 25 bp, Homo sapien
gacccagtgtcctcacaagaggtgg

SEQ ID NO: 706242 - DNA, 25 bp, Homo sapien
cacgttcaacaaagaccaggaccgg

SEQ ID NO: 706243 - DNA, 25 bp, Homo sapien
cattgccaagtgagcgtgtggcccc

SEQ ID NO: 706244 - DNA, 25 bp, Homo sapien
ggtgtgccttccacccggagatggt

SEQ ID NO: 706245 - DNA, 25 bp, Homo sapien
ccaccgctgtggttaattgtgccct

SEQ ID NO: 706246 - DNA, 25 bp, Homo sapien
tcagcaactaaaccggcagactggg

SEQ ID NO: 706247 - DNA, 25 bp, Homo sapien
gaggcccgcttttggagctgacacg

SEQ ID NO: 706248 - DNA, 25 bp, Homo sapien
tttcagttggcatgagccccggctc

SEQ ID NO: 706249 - DNA, 25 bp, Homo sapien
tgccgagcgtggatttgtgccccaa

SEQ ID NO: 706250 - DNA, 25 bp, Homo sapien
tgacacagcccgtaagttcatggga

SEQ ID NO: 706251 - DNA, 25 bp, Homo sapien
tgtgccacgtgggttacggaactct

SEQ ID NO: 706252 - DNA, 25 bp, Homo sapien
ggttttaatagacctacggcacaga

SEQ ID NO: 706253 - DNA, 25 bp, Homo sapien
ttaggaggagtaaaccaagcgagcc

SEQ ID NO: 706254 - DNA, 25 bp, Homo sapien
gcctagtttaggttgagcagcgaaa

SEQ ID NO: 706255 - DNA, 25 bp, Homo sapien
tagtcgattgtcacgtggcaggcca

SEQ ID NO: 706256 - DNA, 25 bp, Homo sapien
acatcaagttcaagagcgcgggacc

SEQ ID NO: 706257 - DNA, 25 bp, Homo sapien
ggccagccgccaccatgaagaaatt

SEQ ID NO: 706258 - DNA, 25 bp, Homo sapien
cggcccaggtgcatcctcttaaaca

SEQ ID NO: 706259 - DNA, 25 bp, Homo sapien
tcttaaacagctcctacctagggta

SEQ ID NO: 706260 - DNA, 25 bp, Homo sapien
caggtgcatcctcttaaacagctcc

SEQ ID NO: 706261 - DNA, 25 bp, Homo sapien
gcccaggtgcatcctcttaaacagc

SEQ ID NO: 706262 - DNA, 25 bp, Homo sapien
cagcgggaggcgaagccgggggcgg

SEQ ID NO: 706263 - DNA, 25 bp, Homo sapien
gcagcgggaggcgaagccgggggcg

SEQ ID NO: 706264 - DNA, 25 bp, Homo sapien
gtccccgggcttgaaggcgtgtggc

SEQ ID NO: 706265 - DNA, 25 bp, Homo sapien
ccccgggcttgaaggcgtgtggcat

SEQ ID NO: 706266 - DNA, 25 bp, Homo sapien
caccaagtccccgggcttgaaggcg

SEQ ID NO: 706267 - DNA, 25 bp, Homo sapien
caagtccccgggcttgaaggcgtgt

SEQ ID NO: 706268 - DNA, 25 bp, Homo sapien
tgagcaaagccagatccggccctct

SEQ ID NO: 706269 - DNA, 25 bp, Homo sapien
caagctcagcgtctatggactccca

SEQ ID NO: 706270 - DNA, 25 bp, Homo sapien
atccggccctctgaagcaaccaggg

SEQ ID NO: 706271 - DNA, 25 bp, Homo sapien
gggccaagctcagcgtctatggact

SEQ ID NO: 706272 - DNA, 25 bp, Homo sapien
ttcacggcgccatccgcgatgtcgt

SEQ ID NO: 706273 - DNA, 25 bp, Homo sapien
ggcttcacggcgccatccgcgatgt

SEQ ID NO: 706274 - DNA, 25 bp, Homo sapien
gggcttcacggcgccatccgcgatg

SEQ ID NO: 706275 - DNA, 25 bp, Homo sapien
gggtgggggcttcacggcgccatcc

SEQ ID NO: 706276 - DNA, 25 bp, Homo sapien
tgggcttcccgtacttgtctttaca

SEQ ID NO: 706277 - DNA, 25 bp, Homo sapien
tgggggttgttctggatctcccaca

SEQ ID NO: 706278 - DNA, 25 bp, Homo sapien
tacatttgtcgtaggggaacaggtc

SEQ ID NO: 706279 - DNA, 25 bp, Homo sapien
ctgtagctggcgtgggggttgttct

SEQ ID NO: 706280 - DNA, 25 bp, Homo sapien
ccaggccgaaacaaaggagaggcac

SEQ ID NO: 706281 - DNA, 25 bp, Homo sapien
cgtctgcggatcctggagcaaatgc

SEQ ID NO: 706282 - DNA, 25 bp, Homo sapien
ggcaggtgtcaccaccgaaacgtct

SEQ ID NO: 706283 - DNA, 25 bp, Homo sapien
cccagtgcggcacgtgtgcgtggca

SEQ ID NO: 706284 - DNA, 25 bp, Homo sapien
aaataccctcagcatgcaacatcgg

SEQ ID NO: 706285 - DNA, 25 bp, Homo sapien
taatgagctcaggacggaaccaaag

SEQ ID NO: 706286 - DNA, 25 bp, Homo sapien
tagatgggccagagaagctaagagc

SEQ ID NO: 706287 - DNA, 25 bp, Homo sapien
tagcaagtatgaaaccagggaaacc

SEQ ID NO: 706288 - DNA, 25 bp, Homo sapien
aaatacttcccgctgttgggcgcgg

SEQ ID NO: 706289 - DNA, 25 bp, Homo sapien
gtttcacctactggcttcgcaaggg

SEQ ID NO: 706290 - DNA, 25 bp, Homo sapien
ccaaaaggcgatgcaagtggaacca

SEQ ID NO: 706291 - DNA, 25 bp, Homo sapien
cacctgggccactctgaggattact

SEQ ID NO: 706292 - DNA, 25 bp, Homo sapien
tttggagcatccctggtaaggagac

SEQ ID NO: 706293 - DNA, 25 bp, Homo sapien
ttctctttggagcatccctggtaag

SEQ ID NO: 706294 - DNA, 25 bp, Homo sapien
ggtttctctttggagcatccctggt

SEQ ID NO: 706295 - DNA, 25 bp, Homo sapien
tctttggagcatccctggtaaggag

SEQ ID NO: 706296 - DNA, 25 bp, Homo sapien
agcagggagtacacggtgcagggct

SEQ ID NO: 706297 - DNA, 25 bp, Homo sapien
ctgagtagaaatgcccggacagaat

SEQ ID NO: 706298 - DNA, 25 bp, Homo sapien
ctgggcggatgctgcaggcgaggcc

SEQ ID NO: 706299 - DNA, 25 bp, Homo sapien
tgtgaccgggtgttgcggccgggca

SEQ ID NO: 706300 - DNA, 25 bp, Homo sapien
gaaacagctaaaacgcagtccctgc

SEQ ID NO: 706301 - DNA, 25 bp, Homo sapien
gtccctgctgtcagggagctcatgg

SEQ ID NO: 706302 - DNA, 25 bp, Homo sapien
gacacctgctaggtcctccaacaaa

SEQ ID NO: 706303 - DNA, 25 bp, Homo sapien
aacatcatgacacacctgctatgtg

SEQ ID NO: 706304 - DNA, 25 bp, Homo sapien
gcaagaccccgtttgtaagagagaa

SEQ ID NO: 706305 - DNA, 25 bp, Homo sapien
agcaagaccccgtttgtaagagaga

SEQ ID NO: 706306 - DNA, 25 bp, Homo sapien
caattccaaatcgtggtgacaggca

SEQ ID NO: 706307 - DNA, 25 bp, Homo sapien
gagctggttttctagcgggagaccc

SEQ ID NO: 706308 - DNA, 25 bp, Homo sapien
tgagcagtcatgagtgtcgggcact

SEQ ID NO: 706309 - DNA, 25 bp, Homo sapien
caagctaggacaagacctctgggct

SEQ ID NO: 706310 - DNA, 25 bp, Homo sapien
tagcgcaggcgtcttcctcttcagg

SEQ ID NO: 706311 - DNA, 25 bp, Homo sapien
tcgtcagcgtcactgccgtcggcgg

SEQ ID NO: 706312 - DNA, 25 bp, Homo sapien
ggttaccgctgtgacggccatgacc

SEQ ID NO: 706313 - DNA, 25 bp, Homo sapien
gagtctgagtcgctctccatcctgt

SEQ ID NO: 706314 - DNA, 25 bp, Homo sapien
gactcagatgagctttccgagttct

SEQ ID NO: 706315 - DNA, 25 bp, Homo sapien
tttcgggctcgtttcgagaccgaca

SEQ ID NO: 706316 - DNA, 25 bp, Homo sapien
tcgctggtcttctccgactcagatg

SEQ ID NO: 706317 - DNA, 25 bp, Homo sapien
ggacacgctggcctgatccaggtcg

SEQ ID NO: 706318 - DNA, 25 bp, Homo sapien
cggaccgctgctttcttctcaggtg

SEQ ID NO: 706319 - DNA, 25 bp, Homo sapien
cgctgctttcttctcaggtgtgaag

SEQ ID NO: 706320 - DNA, 25 bp, Homo sapien
ccgtggcgcccggaccgctgctttc

SEQ ID NO: 706321 - DNA, 25 bp, Homo sapien
gtggcgcccggaccgctgctttctt

SEQ ID NO: 706322 - DNA, 25 bp, Homo sapien
ccgaatcggccttggagtcggagtc

SEQ ID NO: 706323 - DNA, 25 bp, Homo sapien
agtcggagtcggaggctgatggcgc

SEQ ID NO: 706324 - DNA, 25 bp, Homo sapien
ggctcaggcttggccccgtccgaat

SEQ ID NO: 706325 - DNA, 25 bp, Homo sapien
gcgccatggccaccggctcaggctt

SEQ ID NO: 706326 - DNA, 25 bp, Homo sapien
tcacagacacatcggagtcggagga

SEQ ID NO: 706327 - DNA, 25 bp, Homo sapien
tcctgcccctcggaggcttcttcac

SEQ ID NO: 706328 - DNA, 25 bp, Homo sapien
cctcggaggcttcttcacagacaca

SEQ ID NO: 706329 - DNA, 25 bp, Homo sapien
tcttcacagacacatcggagtcgga

SEQ ID NO: 706330 - DNA, 25 bp, Homo sapien
caggcttcggtttccgccctcgcgg

SEQ ID NO: 706331 - DNA, 25 bp, Homo sapien
ttcaggcttcggtttccgccctcgc

SEQ ID NO: 706332 - DNA, 25 bp, Homo sapien
ggagctggacggaggccgttcaggc

SEQ ID NO: 706333 - DNA, 25 bp, Homo sapien
tggacggaggccgttcaggcttcgg

SEQ ID NO: 706334 - DNA, 25 bp, Homo sapien
cccgccgcttccactcactgatgcg

SEQ ID NO: 706335 - DNA, 25 bp, Homo sapien
ctcgtcccgccgcttccactcactg

SEQ ID NO: 706336 - DNA, 25 bp, Homo sapien
gcgcctcgtcccgccgcttccactc

SEQ ID NO: 706337 - DNA, 25 bp, Homo sapien
gtcccgccgcttccactcactgatg

SEQ ID NO: 706338 - DNA, 25 bp, Homo sapien
ctcggcctcgggctcggagtcagag

SEQ ID NO: 706339 - DNA, 25 bp, Homo sapien
cggcccttgcgtccccgcttcttga

SEQ ID NO: 706340 - DNA, 25 bp, Homo sapien
gcttcttgacgggctcatcgtcctc

SEQ ID NO: 706341 - DNA, 25 bp, Homo sapien
cctcgggctcggagtcagaggagga

SEQ ID NO: 706342 - DNA, 25 bp, Homo sapien
ttctggccaggtttcctggcgggct

SEQ ID NO: 706343 - DNA, 25 bp, Homo sapien
tggcgggctctgtgcttgaggactg

SEQ ID NO: 706344 - DNA, 25 bp, Homo sapien
tccttctggccaggtttcctggcgg

SEQ ID NO: 706345 - DNA, 25 bp, Homo sapien
ctgtgcttgaggactgcggcttctt

SEQ ID NO: 706346 - DNA, 25 bp, Homo sapien
ctaccttcctgtccatcgagaagcc

SEQ ID NO: 706347 - DNA, 25 bp, Homo sapien
ttcctgtccatcgagaagccctcgg

SEQ ID NO: 706348 - DNA, 25 bp, Homo sapien
tgtccatcgagaagccctcggaccg

SEQ ID NO: 706349 - DNA, 25 bp, Homo sapien
cttccgggtccgctccaccttcacg

SEQ ID NO: 706350 - DNA, 25 bp, Homo sapien
gccacgccacggctgtccccgttcc

SEQ ID NO: 706351 - DNA, 25 bp, Homo sapien
tcccctcagtgaactcagtgtgggc

SEQ ID NO: 706352 - DNA, 25 bp, Homo sapien
tgagcaccctctctagggacaggcg

SEQ ID NO: 706353 - DNA, 25 bp, Homo sapien
aggccggccgaggatgtgctgagca

SEQ ID NO: 706354 - DNA, 25 bp, Homo sapien
tagggcaaacttgatctcactgtgc

SEQ ID NO: 706355 - DNA, 25 bp, Homo sapien
gctgtcgacctttagggcaaacttg

SEQ ID NO: 706356 - DNA, 25 bp, Homo sapien
gacctttagggcaaacttgatctca

SEQ ID NO: 706357 - DNA, 25 bp, Homo sapien
acttgatctcactgtgcagcttctg

SEQ ID NO: 706358 - DNA, 25 bp, Homo sapien
tcttctggaggatctgagaggtcac

SEQ ID NO: 706359 - DNA, 25 bp, Homo sapien
gttcttctggaggatctgagaggtc

SEQ ID NO: 706360 - DNA, 25 bp, Homo sapien
ttcttctggaggatctgagaggtca

SEQ ID NO: 706361 - DNA, 25 bp, Homo sapien
cttctggaggatctgagaggtcacc

SEQ ID NO: 706362 - DNA, 25 bp, Homo sapien
tgcgcctctgattcccccgccatac

SEQ ID NO: 706363 - DNA, 25 bp, Homo sapien
ctgcgcctctgattcccccgccata

SEQ ID NO: 706364 - DNA, 25 bp, Homo sapien
cctgcgcctctgattcccccgccat

SEQ ID NO: 706365 - DNA, 25 bp, Homo sapien
accctgcgcctctgattcccccgcc

SEQ ID NO: 706366 - DNA, 25 bp, Homo sapien
caggcatttctacccagcagcccac

SEQ ID NO: 706367 - DNA, 25 bp, Homo sapien
agcagcccacggcctcctcgctgac

SEQ ID NO: 706368 - DNA, 25 bp, Homo sapien
ccacggcctcctcgctgacccaggg

SEQ ID NO: 706369 - DNA, 25 bp, Homo sapien
cagcccacggcctcctcgctgaccc

SEQ ID NO: 706370 - DNA, 25 bp, Homo sapien
ccattacgtccttgttcgctttgta

SEQ ID NO: 706371 - DNA, 25 bp, Homo sapien
cgtccttgttcgctttgtaacggcg

SEQ ID NO: 706372 - DNA, 25 bp, Homo sapien
cttctccattacgtccttgttcgct

SEQ ID NO: 706373 - DNA, 25 bp, Homo sapien
ccttgttcgctttgtaacggcgaat

SEQ ID NO: 706374 - DNA, 25 bp, Homo sapien
tgagccgggtatagacttctgctgc

SEQ ID NO: 706375 - DNA, 25 bp, Homo sapien
cttgagccgggtatagacttctgct

SEQ ID NO: 706376 - DNA, 25 bp, Homo sapien
ccgcgacttgagccgggtatagact

SEQ ID NO: 706377 - DNA, 25 bp, Homo sapien
gacttgagccgggtatagacttctg

SEQ ID NO: 706378 - DNA, 25 bp, Homo sapien
gcaccgcctcgatctttgggccgag

SEQ ID NO: 706379 - DNA, 25 bp, Homo sapien
tttctgcaccgcctcgatctttggg

SEQ ID NO: 706380 - DNA, 25 bp, Homo sapien
tgcaccgcctcgatctttgggccga

SEQ ID NO: 706381 - DNA, 25 bp, Homo sapien
ccgcctcgatctttgggccgaggac

SEQ ID NO: 706382 - DNA, 25 bp, Homo sapien
ctcggccttctccttctccatccca

SEQ ID NO: 706383 - DNA, 25 bp, Homo sapien
cctcggccttctccttctccatccc

SEQ ID NO: 706384 - DNA, 25 bp, Homo sapien
ctcctccccggccagcttctcctcg

SEQ ID NO: 706385 - DNA, 25 bp, Homo sapien
ccccggccagcttctcctcggcctt

SEQ ID NO: 706386 - DNA, 25 bp, Homo sapien
tgtcctccgccttctcctggggggc

SEQ ID NO: 706387 - DNA, 25 bp, Homo sapien
gggcctcctccccggccagctcctc

SEQ ID NO: 706388 - DNA, 25 bp, Homo sapien
cggtgctgggcttgtcctccgcctt

SEQ ID NO: 706389 - DNA, 25 bp, Homo sapien
ccccggccagctcctccccggccag

SEQ ID NO: 706390 - DNA, 25 bp, Homo sapien
cccaagaaatgagggaacgtgggca

SEQ ID NO: 706391 - DNA, 25 bp, Homo sapien
gcccaagaaatgagggaacgtgggc

SEQ ID NO: 706392 - DNA, 25 bp, Homo sapien
caagaaatgagggaacgtgggcagc

SEQ ID NO: 706393 - DNA, 25 bp, Homo sapien
ggcagccctgagaaaagcccacagc

SEQ ID NO: 706394 - DNA, 25 bp, Homo sapien
gtgctccttgtcctctgcgctctcc

SEQ ID NO: 706395 - DNA, 25 bp, Homo sapien
tgcgctctcccccttctgtgatgtg

SEQ ID NO: 706396 - DNA, 25 bp, Homo sapien
tgtgatgtggcctcgccattcactg

SEQ ID NO: 706397 - DNA, 25 bp, Homo sapien
tcctcgtgctccttgtcctctgcgc

SEQ ID NO: 706398 - DNA, 25 bp, Homo sapien
ctgccgctcaggagtccaaacccca

SEQ ID NO: 706399 - DNA, 25 bp, Homo sapien
ggaggagcggctcggacccagggtg

SEQ ID NO: 706400 - DNA, 25 bp, Homo sapien
gggtgcgcgtcacaccgctgccgct

SEQ ID NO: 706401 - DNA, 25 bp, Homo sapien
cgagtaaggacgacatccctgggac

SEQ ID NO: 706402 - DNA, 25 bp, Homo sapien
gtgctcggggcctacctacctgggc

SEQ ID NO: 706403 - DNA, 25 bp, Homo sapien
tgggcacaggcaccgtcagatagcc

SEQ ID NO: 706404 - DNA, 25 bp, Homo sapien
tcagatagccgggtgcccgtgctcg

SEQ ID NO: 706405 - DNA, 25 bp, Homo sapien
ctggaggctcggcaagaagccacct

SEQ ID NO: 706406 - DNA, 25 bp, Homo sapien
ttctgccactagagaccacaaccat

SEQ ID NO: 706407 - DNA, 25 bp, Homo sapien
ccctgccctgcctgtagggcggttg

SEQ ID NO: 706408 - DNA, 25 bp, Homo sapien
cagctgctgggtaagtgagtgactc

SEQ ID NO: 706409 - DNA, 25 bp, Homo sapien
tggcgccagccaggcatagcacaag

SEQ ID NO: 706410 - DNA, 25 bp, Homo sapien
tccccccgtgccctctcgcgctcct

SEQ ID NO: 706411 - DNA, 25 bp, Homo sapien
tcgcgctcctgccggtcgctcccag

SEQ ID NO: 706412 - DNA, 25 bp, Homo sapien
gcgctcctgccggtcgctcccaggc

SEQ ID NO: 706413 - DNA, 25 bp, Homo sapien
cccgtgccctctcgcgctcctgccg

SEQ ID NO: 706414 - DNA, 25 bp, Homo sapien
ttcatgttggttggaaatcacagaa

SEQ ID NO: 706415 - DNA, 25 bp, Homo sapien
ctctgctctcctgcgagccggggaa

SEQ ID NO: 706416 - DNA, 25 bp, Homo sapien
aaccatttatagtcatttcatgttg

SEQ ID NO: 706417 - DNA, 25 bp, Homo sapien
gcgttccccacagttctctgctctg

SEQ ID NO: 706418 - DNA, 25 bp, Homo sapien
gcagtggggtcaccggtgctgcgaa

SEQ ID NO: 706419 - DNA, 25 bp, Homo sapien
cgtggccaagggtgctgtgcaaact

SEQ ID NO: 706420 - DNA, 25 bp, Homo sapien
gtgctgcgaacgtggccaagggtgc

SEQ ID NO: 706421 - DNA, 25 bp, Homo sapien
gaccggtaccaaggacactgtctgc

SEQ ID NO: 706422 - DNA, 25 bp, Homo sapien
gtgaagttggccaaagggactgtcc

SEQ ID NO: 706423 - DNA, 25 bp, Homo sapien
aagttggccaaagggactgtccaga

SEQ ID NO: 706424 - DNA, 25 bp, Homo sapien
ggccaaagggactgtccagaccggc

SEQ ID NO: 706425 - DNA, 25 bp, Homo sapien
ttggccaaagggactgtccagaccg

SEQ ID NO: 706426 - DNA, 25 bp, Homo sapien
caaagggaccgtccagacaggcatg

SEQ ID NO: 706427 - DNA, 25 bp, Homo sapien
ggcagtgaatgtcgccaaagggacc

SEQ ID NO: 706428 - DNA, 25 bp, Homo sapien
accagtgctgtgaacgtggccaaag

SEQ ID NO: 706429 - DNA, 25 bp, Homo sapien
ccaagtctgtggtcataggtacaaa

SEQ ID NO: 706430 - DNA, 25 bp, Homo sapien
tatggtcatgggtacgaaagacacg

SEQ ID NO: 706431 - DNA, 25 bp, Homo sapien
gcattcagaccggtgtggacaccag

SEQ ID NO: 706432 - DNA, 25 bp, Homo sapien
tccagactggcgtggaaacctccaa

SEQ ID NO: 706433 - DNA, 25 bp, Homo sapien
gctgaccggcaccaaagatgctgtg

SEQ ID NO: 706434 - DNA, 25 bp, Homo sapien
caacttgagccacaagctgggttct

SEQ ID NO: 706435 - DNA, 25 bp, Homo sapien
acacgtaagctcgaggccttggcct

SEQ ID NO: 706436 - DNA, 25 bp, Homo sapien
ttgacccttctttggaatcaggccc

SEQ ID NO: 706437 - DNA, 25 bp, Homo sapien
gggacatctgcgagcaggaacccga

SEQ ID NO: 706438 - DNA, 25 bp, Homo sapien
caaataatcctgcctttggccgggt

SEQ ID NO: 706439 - DNA, 25 bp, Homo sapien
ataatcctgcctttggccgggtgcg

SEQ ID NO: 706440 - DNA, 25 bp, Homo sapien
ggggctcacgcctgtaatcccagca

SEQ ID NO: 706441 - DNA, 25 bp, Homo sapien
ctttgggaggcccaggtgggcggat

SEQ ID NO: 706442 - DNA, 25 bp, Homo sapien
ccccgggatgcagtacaatgcctcc

SEQ ID NO: 706443 - DNA, 25 bp, Homo sapien
ctccagcgccttgccggatgacatc

SEQ ID NO: 706444 - DNA, 25 bp, Homo sapien
cagcccccgggatgcagtacaatgc

SEQ ID NO: 706445 - DNA, 25 bp, Homo sapien
gcctccagcgccttgccggatgaca

SEQ ID NO: 706446 - DNA, 25 bp, Homo sapien
agctgtgtttgaaggccgcttccga

SEQ ID NO: 706447 - DNA, 25 bp, Homo sapien
tctgcgcctttgacctgacacaggt

SEQ ID NO: 706448 - DNA, 25 bp, Homo sapien
gcttccgagagcagaagtcccccga

SEQ ID NO: 706449 - DNA, 25 bp, Homo sapien
agtccatctggacgccggtgccgga

SEQ ID NO: 706450 - DNA, 25 bp, Homo sapien
gtcttcttcaagttcattcgccagg

SEQ ID NO: 706451 - DNA, 25 bp, Homo sapien
gttcattcgccaggtcttccgttcc

SEQ ID NO: 706452 - DNA, 25 bp, Homo sapien
acttgtggtccgctctgaccccggg

SEQ ID NO: 706453 - DNA, 25 bp, Homo sapien
caggacttgtggtccgctctgaccc

SEQ ID NO: 706454 - DNA, 25 bp, Homo sapien
cttggaaaggtgaccatgacgtcag

SEQ ID NO: 706455 - DNA, 25 bp, Homo sapien
ccttggaaaggtgaccatgacgtca

SEQ ID NO: 706456 - DNA, 25 bp, Homo sapien
ttggaaaggtgaccatgacgtcagc

SEQ ID NO: 706457 - DNA, 25 bp, Homo sapien
cccttggaaaggtgaccatgacgtc

SEQ ID NO: 706458 - DNA, 25 bp, Homo sapien
aactctccgggaagttgtctgggag

SEQ ID NO: 706459 - DNA, 25 bp, Homo sapien
agcctcttgtctgttctgaaccggc

SEQ ID NO: 706460 - DNA, 25 bp, Homo sapien
cacagagacgcctcggatattgggt

SEQ ID NO: 706461 - DNA, 25 bp, Homo sapien
tggcagcctggcgtcagcctcttgt

SEQ ID NO: 706462 - DNA, 25 bp, Homo sapien
tgacccctagactggagcggaacgg

SEQ ID NO: 706463 - DNA, 25 bp, Homo sapien
acttggagttactggggtgctctga

SEQ ID NO: 706464 - DNA, 25 bp, Homo sapien
agttactggggtgctctgaggcttt

SEQ ID NO: 706465 - DNA, 25 bp, Homo sapien
ctttgacccctagactggagcggaa

SEQ ID NO: 706466 - DNA, 25 bp, Homo sapien
ccagcccagaacaggacgagtcgcg

SEQ ID NO: 706467 - DNA, 25 bp, Homo sapien
cagaacaggacgagtcgcgggtcca

SEQ ID NO: 706468 - DNA, 25 bp, Homo sapien
gcccagaacaggacgagtcgcgggt

SEQ ID NO: 706469 - DNA, 25 bp, Homo sapien
ccagaacaggacgagtcgcgggtcc

SEQ ID NO: 706470 - DNA, 25 bp, Homo sapien
gaaggtgtcggtggccgcgggcgcc

SEQ ID NO: 706471 - DNA, 25 bp, Homo sapien
aagaaggtgtcggtggccgcgggcg

SEQ ID NO: 706472 - DNA, 25 bp, Homo sapien
ggccgcactgggaagaaggtgtcgg

SEQ ID NO: 706473 - DNA, 25 bp, Homo sapien
ccgcactgggaagaaggtgtcggtg

SEQ ID NO: 706474 - DNA, 25 bp, Homo sapien
taaagctgtacccttggcatttcag

SEQ ID NO: 706475 - DNA, 25 bp, Homo sapien
tacccttggcatttcagaatggagc

SEQ ID NO: 706476 - DNA, 25 bp, Homo sapien
cactggctgtcccaataaagctgta

SEQ ID NO: 706477 - DNA, 25 bp, Homo sapien
ggctgtcccaataaagctgtaccct

SEQ ID NO: 706478 - DNA, 25 bp, Homo sapien
ccccgggggagatgtgcacccagag

SEQ ID NO: 706479 - DNA, 25 bp, Homo sapien
agccccgggggagatgtgcacccag

SEQ ID NO: 706480 - DNA, 25 bp, Homo sapien
cccgggggagatgtgcacccagagc

SEQ ID NO: 706481 - DNA, 25 bp, Homo sapien
agctctgggtgcttaggcaggtggg

SEQ ID NO: 706482 - DNA, 25 bp, Homo sapien
gtgtaggttgggcacattcctgtct

SEQ ID NO: 706483 - DNA, 25 bp, Homo sapien
ctctgggtgcttaggcaggtgggca

SEQ ID NO: 706484 - DNA, 25 bp, Homo sapien
tgggtgcttaggcaggtgggcatcc

SEQ ID NO: 706485 - DNA, 25 bp, Homo sapien
ttgggagtcttggagggcactcacc

SEQ ID NO: 706486 - DNA, 25 bp, Homo sapien
tccagacgtttaggccaaggtctac

SEQ ID NO: 706487 - DNA, 25 bp, Homo sapien
catcatggagacactagataccctc

SEQ ID NO: 706488 - DNA, 25 bp, Homo sapien
accatgtccaccaccaaatccacct

SEQ ID NO: 706489 - DNA, 25 bp, Homo sapien
cgaggtggctgaccatgtccaccac

SEQ ID NO: 706490 - DNA, 25 bp, Homo sapien
ctgaccatgtccaccaccaaatcca

SEQ ID NO: 706491 - DNA, 25 bp, Homo sapien
accgaggtggctgaccatgtccacc

SEQ ID NO: 706492 - DNA, 25 bp, Homo sapien
acgatgacttcatcagagcctgagc

SEQ ID NO: 706493 - DNA, 25 bp, Homo sapien
cacgatgacttcatcagagcctgag

SEQ ID NO: 706494 - DNA, 25 bp, Homo sapien
tcacgatgacttcatcagagcctga

SEQ ID NO: 706495 - DNA, 25 bp, Homo sapien
attgttgagggcctgttgtgtgtcc

SEQ ID NO: 706496 - DNA, 25 bp, Homo sapien
gccagacaacaaattgttgagggcc

SEQ ID NO: 706497 - DNA, 25 bp, Homo sapien
tagggagcccatagcaacctcgctg

SEQ ID NO: 706498 - DNA, 25 bp, Homo sapien
caactctgggtcccggttgcagcta

SEQ ID NO: 706499 - DNA, 25 bp, Homo sapien
ccgtccagccgcctccgtgggccgg

SEQ ID NO: 706500 - DNA, 25 bp, Homo sapien
cagagtccgtacgtccaaccgtcgg

SEQ ID NO: 706501 - DNA, 25 bp, Homo sapien
actctcgaagcagagtccgtacgtc

SEQ ID NO: 706502 - DNA, 25 bp, Homo sapien
ctcgaagcagagtccgtacgtccaa

SEQ ID NO: 706503 - DNA, 25 bp, Homo sapien
caggccacttgggagctcattaggg

SEQ ID NO: 706504 - DNA, 25 bp, Homo sapien
gacggtcccagttcacagctggcaa

SEQ ID NO: 706505 - DNA, 25 bp, Homo sapien
tggcaaaactgaggccaagtcccca

SEQ ID NO: 706506 - DNA, 25 bp, Homo sapien
ttagcagcgacggtcccagttcaca

SEQ ID NO: 706507 - DNA, 25 bp, Homo sapien
tgggaaattctctagatggacctgc

SEQ ID NO: 706508 - DNA, 25 bp, Homo sapien
ggtattacagacacgtgccaccatg

SEQ ID NO: 706509 - DNA, 25 bp, Homo sapien
tggtattacagacacgtgccaccat

SEQ ID NO: 706510 - DNA, 25 bp, Homo sapien
caccgtgaacggccaattttattat

SEQ ID NO: 706511 - DNA, 25 bp, Homo sapien
acagggtctgcgggaagatgctcca

SEQ ID NO: 706512 - DNA, 25 bp, Homo sapien
cacccctggcttaaatgtactttat

SEQ ID NO: 706513 - DNA, 25 bp, Homo sapien
ggctgtgtcacgcttgttacaggaa

SEQ ID NO: 706514 - DNA, 25 bp, Homo sapien
ttttttgagacggatcctcctgcct

SEQ ID NO: 706515 - DNA, 25 bp, Homo sapien
ctcattacaaaatcatctgggccag

SEQ ID NO: 706516 - DNA, 25 bp, Homo sapien
caggtgttaacacccattcagtggc

SEQ ID NO: 706517 - DNA, 25 bp, Homo sapien
gcagaagcttgtaaccaaaccccag

SEQ ID NO: 706518 - DNA, 25 bp, Homo sapien
tgagccagcgacctgtgcctattcg

SEQ ID NO: 706519 - DNA, 25 bp, Homo sapien
tagagcgcagccaggaagtcgcagt

SEQ ID NO: 706520 - DNA, 25 bp, Homo sapien
gcttcagggccaccttgaccaggtt

SEQ ID NO: 706521 - DNA, 25 bp, Homo sapien
cctggtggaagctgacggccgtcat

SEQ ID NO: 706522 - DNA, 25 bp, Homo sapien
tggacgccatcttactcaggagctt

SEQ ID NO: 706523 - DNA, 25 bp, Homo sapien
tgtctctcggcctaagataagtgga

SEQ ID NO: 706524 - DNA, 25 bp, Homo sapien
tgtgaacccgtagtccttgtgcgag

SEQ ID NO: 706525 - DNA, 25 bp, Homo sapien
gaaactccaaatccagacaggtgtg

SEQ ID NO: 706526 - DNA, 25 bp, Homo sapien
gatgtctcaacagcacagggttcca

SEQ ID NO: 706527 - DNA, 25 bp, Homo sapien
aaatttacaagagtccagactgtct

SEQ ID NO: 706528 - DNA, 25 bp, Homo sapien
ttatttaaattgttccgcagtccta

SEQ ID NO: 706529 - DNA, 25 bp, Homo sapien
ccactgcacttggccttatatatat

SEQ ID NO: 706530 - DNA, 25 bp, Homo sapien
tatttttagagatagggtctcgcta

SEQ ID NO: 706531 - DNA, 25 bp, Homo sapien
actgcacttggccttatatatatat

SEQ ID NO: 706532 - DNA, 25 bp, Homo sapien
tgcacttggccttatatatatatat

SEQ ID NO: 706533 - DNA, 25 bp, Homo sapien
tgccaccctgactggctataatttt

SEQ ID NO: 706534 - DNA, 25 bp, Homo sapien
atgccaccctgactggctataattt

SEQ ID NO: 706535 - DNA, 25 bp, Homo sapien
gccaccctgactggctataattttt

SEQ ID NO: 706536 - DNA, 25 bp, Homo sapien
ccgagcatccttcatgagcctgcag

SEQ ID NO: 706537 - DNA, 25 bp, Homo sapien
gcagaactgctttcctatgtttacc

SEQ ID NO: 706538 - DNA, 25 bp, Homo sapien
acctccagccgagcatccttcatga

SEQ ID NO: 706539 - DNA, 25 bp, Homo sapien
actgctttcctatgtttacccaggg

SEQ ID NO: 706540 - DNA, 25 bp, Homo sapien
gaccagcagccctgttgcgggtggc

SEQ ID NO: 706541 - DNA, 25 bp, Homo sapien
caccttctcatctccggtgaagctg

SEQ ID NO: 706542 - DNA, 25 bp, Homo sapien
tgtggccaaggcatcgcgcactgag

SEQ ID NO: 706543 - DNA, 25 bp, Homo sapien
tttctacctgggctgacgttgcctt

SEQ ID NO: 706544 - DNA, 25 bp, Homo sapien
gctgcatggcgccaatgctaagcag

SEQ ID NO: 706545 - DNA, 25 bp, Homo sapien
ttcttcggttgcctgagcagcaccg

SEQ ID NO: 706546 - DNA, 25 bp, Homo sapien
ccatcagggctttgaggttgggact

SEQ ID NO: 706547 - DNA, 25 bp, Homo sapien
agcagaaagaggaatcggaggcgcc

SEQ ID NO: 706548 - DNA, 25 bp, Homo sapien
atgtggagctcagatccccccggct

SEQ ID NO: 706549 - DNA, 25 bp, Homo sapien
tgagtcctattccagagggctccct

SEQ ID NO: 706550 - DNA, 25 bp, Homo sapien
agatccccccggctgaaggaggcag

SEQ ID NO: 706551 - DNA, 25 bp, Homo sapien
tcctggctgagtcctattccagagg

SEQ ID NO: 706552 - DNA, 25 bp, Homo sapien
gaacttccacgctctgctggtcagt

SEQ ID NO: 706553 - DNA, 25 bp, Homo sapien
gggttgcaacccagcacctggtagg

SEQ ID NO: 706554 - DNA, 25 bp, Homo sapien
ttcccaagcccgagcagagggtcat

SEQ ID NO: 706555 - DNA, 25 bp, Homo sapien
tgtccccaagctttcaggcaggcac

SEQ ID NO: 706556 - DNA, 25 bp, Homo sapien
aagaaaccgctgagtgctgaaggcc

SEQ ID NO: 706557 - DNA, 25 bp, Homo sapien
tgagaaattgcgtagaagaaaccgc

SEQ ID NO: 706558 - DNA, 25 bp, Homo sapien
tagcaggctccttcctaaggcgctg

SEQ ID NO: 706559 - DNA, 25 bp, Homo sapien
gggccaagcattccctgaggaggca

SEQ ID NO: 706560 - DNA, 25 bp, Homo sapien
cttgccggccccatgtgcatgagcg

SEQ ID NO: 706561 - DNA, 25 bp, Homo sapien
tgtaggacccgacgcctgtttctct

SEQ ID NO: 706562 - DNA, 25 bp, Homo sapien
aaaccccgccagcagctctctgtgg

SEQ ID NO: 706563 - DNA, 25 bp, Homo sapien
gccgaccgcaggatggcatccggct

SEQ ID NO: 706564 - DNA, 25 bp, Homo sapien
aattatcaactctcgggaagcccag

SEQ ID NO: 706565 - DNA, 25 bp, Homo sapien
ttttcatccaagagggagagacgcc

SEQ ID NO: 706566 - DNA, 25 bp, Homo sapien
gcagttggaccatcttaggcgcaca

SEQ ID NO: 706567 - DNA, 25 bp, Homo sapien
gcttgaaggccgcagtagtgatctc

SEQ ID NO: 706568 - DNA, 25 bp, Homo sapien
agccccaccccggaggatggtccag

SEQ ID NO: 706569 - DNA, 25 bp, Homo sapien
tggaccaggtgcacgcttccccatt

SEQ ID NO: 706570 - DNA, 25 bp, Homo sapien
tggtccaggcccgaatgtaattagg

SEQ ID NO: 706571 - DNA, 25 bp, Homo sapien
actggaccaggtgcacgcttcccca

SEQ ID NO: 706572 - DNA, 25 bp, Homo sapien
gagggtcacacacattgtgccgaga

SEQ ID NO: 706573 - DNA, 25 bp, Homo sapien
cagagacatgcgtaggtggaaagcc

SEQ ID NO: 706574 - DNA, 25 bp, Homo sapien
aagccgcggcttactgatgaaatac

SEQ ID NO: 706575 - DNA, 25 bp, Homo sapien
tgattgcgccttccgcagtaagacc

SEQ ID NO: 706576 - DNA, 25 bp, Homo sapien
gatgtctccagatgtcaccaagtgt

SEQ ID NO: 706577 - DNA, 25 bp, Homo sapien
cactcctgggtaagaactgctgatc

SEQ ID NO: 706578 - DNA, 25 bp, Homo sapien
tctggttatttcaagcgaggaggca

SEQ ID NO: 706579 - DNA, 25 bp, Homo sapien
gcacgtccccaagactgttctggtt

SEQ ID NO: 706580 - DNA, 25 bp, Homo sapien
aatcgaacccgggtcaactgcttgg

SEQ ID NO: 706581 - DNA, 25 bp, Homo sapien
gaaggcagctatgctaaccactata

SEQ ID NO: 706582 - DNA, 25 bp, Homo sapien
atcgaacccgggtcaactgcttgga

SEQ ID NO: 706583 - DNA, 25 bp, Homo sapien
tatgctaaccactataccaccaacg

SEQ ID NO: 706584 - DNA, 25 bp, Homo sapien
gccgagcacgtgatacacgccgcgg

SEQ ID NO: 706585 - DNA, 25 bp, Homo sapien
acgccgcggacttgttgctgggcat

SEQ ID NO: 706586 - DNA, 25 bp, Homo sapien
tgcttcccggcgggccctcggattg

SEQ ID NO: 706587 - DNA, 25 bp, Homo sapien
tcggattggtccgcgccgagcacgt

SEQ ID NO: 706588 - DNA, 25 bp, Homo sapien
gcctaatgaacgcttcgatggtggg

SEQ ID NO: 706589 - DNA, 25 bp, Homo sapien
aggcgcctaatgaacgcttcgatgg

SEQ ID NO: 706590 - DNA, 25 bp, Homo sapien
gcaggtgcacactgtaggcgcctaa

SEQ ID NO: 706591 - DNA, 25 bp, Homo sapien
agcaggtgcacactgtaggcgccta

SEQ ID NO: 706592 - DNA, 25 bp, Homo sapien
ttcccattcccaatttttgctattg

SEQ ID NO: 706593 - DNA, 25 bp, Homo sapien
ccattcccaatttttgctattgctc

SEQ ID NO: 706594 - DNA, 25 bp, Homo sapien
ttcttcccattcccaatttttgcta

SEQ ID NO: 706595 - DNA, 25 bp, Homo sapien
cccattcccaatttttgctattgct

SEQ ID NO: 706596 - DNA, 25 bp, Homo sapien
tgcttccagtcttgttggcagatgc

SEQ ID NO: 706597 - DNA, 25 bp, Homo sapien
cacgcagctgcgggcctccccctct

SEQ ID NO: 706598 - DNA, 25 bp, Homo sapien
acgcagctgcgggcctccccctctg

SEQ ID NO: 706599 - DNA, 25 bp, Homo sapien
ccacgcagctgcgggcctccccctc

SEQ ID NO: 706600 - DNA, 25 bp, Homo sapien
cgcagctgcgggcctccccctctgt

SEQ ID NO: 706601 - DNA, 25 bp, Homo sapien
ctgggaaaatgtccatgcgccaacc

SEQ ID NO: 706602 - DNA, 25 bp, Homo sapien
gggaaaatgtccatgcgccaacctg

SEQ ID NO: 706603 - DNA, 25 bp, Homo sapien
acctgcaaaccagcctcattcccgg

SEQ ID NO: 706604 - DNA, 25 bp, Homo sapien
cgccaacctgcaaaccagcctcatt

SEQ ID NO: 706605 - DNA, 25 bp, Homo sapien
tgctggtctctgctttccagaccgt

SEQ ID NO: 706606 - DNA, 25 bp, Homo sapien
gaccgtcaaacttcgccgtctctgt

SEQ ID NO: 706607 - DNA, 25 bp, Homo sapien
ttccagaccgtcaaacttcgccgtc

SEQ ID NO: 706608 - DNA, 25 bp, Homo sapien
gctttccagaccgtcaaacttcgcc

SEQ ID NO: 706609 - DNA, 25 bp, Homo sapien
tctcctccttcggtcggtggagagc

SEQ ID NO: 706610 - DNA, 25 bp, Homo sapien
cttcggtcggtggagagctgtccct

SEQ ID NO: 706611 - DNA, 25 bp, Homo sapien
aataaatagcattctcctccttcgg

SEQ ID NO: 706612 - DNA, 25 bp, Homo sapien
tccttcggtcggtggagagctgtcc

SEQ ID NO: 706613 - DNA, 25 bp, Homo sapien
cagatcgcggttctcttctcggacc

SEQ ID NO: 706614 - DNA, 25 bp, Homo sapien
cctgagccccggtgctgaaacagat

SEQ ID NO: 706615 - DNA, 25 bp, Homo sapien
ctggagacgaaacggagcccgctgg

SEQ ID NO: 706616 - DNA, 25 bp, Homo sapien
gtgctgaaacagatcgcggttctct

SEQ ID NO: 706617 - DNA, 25 bp, Homo sapien
aatcagggtcaaagggctctcccgt

SEQ ID NO: 706618 - DNA, 25 bp, Homo sapien
ctccccctgcaaaatcagggtcaaa

SEQ ID NO: 706619 - DNA, 25 bp, Homo sapien
aaatcagggtcaaagggctctcccg

SEQ ID NO: 706620 - DNA, 25 bp, Homo sapien
gacggatgaagaggtcaagagtttg

SEQ ID NO: 706621 - DNA, 25 bp, Homo sapien
aggtggacggatgaagaggtcaaga

SEQ ID NO: 706622 - DNA, 25 bp, Homo sapien
ggacggatgaagaggtcaagagttt

SEQ ID NO: 706623 - DNA, 25 bp, Homo sapien
ctgaggtggacggatgaagaggtca

SEQ ID NO: 706624 - DNA, 25 bp, Homo sapien
tgaaaattccggacttgggccaggc

SEQ ID NO: 706625 - DNA, 25 bp, Homo sapien
tgttgaaaattccggacttgggcca

SEQ ID NO: 706626 - DNA, 25 bp, Homo sapien
ccccaaatgtcacatgggcacagta

SEQ ID NO: 706627 - DNA, 25 bp, Homo sapien
gctgagagtccctgcgtgggttatt

SEQ ID NO: 706628 - DNA, 25 bp, Homo sapien
ccctgcgtgggttatttttctgcct

SEQ ID NO: 706629 - DNA, 25 bp, Homo sapien
caaatgtcacatgggcacagtaaca

SEQ ID NO: 706630 - DNA, 25 bp, Homo sapien
aagctatgacacctgagtttcctgc

SEQ ID NO: 706631 - DNA, 25 bp, Homo sapien
gctatgacacctgagtttcctgcct

SEQ ID NO: 706632 - DNA, 25 bp, Homo sapien
tatgacacctgagtttcctgcctct

SEQ ID NO: 706633 - DNA, 25 bp, Homo sapien
ccaagctatgacacctgagtttcct

SEQ ID NO: 706634 - DNA, 25 bp, Homo sapien
ttgtcgtagtacatcagaacaacaa

SEQ ID NO: 706635 - DNA, 25 bp, Homo sapien
cgaagggagtctgcgctatgaggcc

SEQ ID NO: 706636 - DNA, 25 bp, Homo sapien
tcttccacacagcactagaccacag

SEQ ID NO: 706637 - DNA, 25 bp, Homo sapien
ccggctgtgacttgttgtcgtagta

SEQ ID NO: 706638 - DNA, 25 bp, Homo sapien
caggtaaccatgtgcagtttttcac

SEQ ID NO: 706639 - DNA, 25 bp, Homo sapien
ttatgatgtcataagtcaccactgg

SEQ ID NO: 706640 - DNA, 25 bp, Homo sapien
tcaccactgggcacaagttcacact

SEQ ID NO: 706641 - DNA, 25 bp, Homo sapien
cacttgtcctatgattggcccatga

SEQ ID NO: 706642 - DNA, 25 bp, Homo sapien
tacagacttcacgtgggaaatggtg

SEQ ID NO: 706643 - DNA, 25 bp, Homo sapien
gcaataaggatcgtttcccttgatg

SEQ ID NO: 706644 - DNA, 25 bp, Homo sapien
cacgtgggaaatggtgaggcaataa

SEQ ID NO: 706645 - DNA, 25 bp, Homo sapien
ctatgagaatgtcaatacagacttc

SEQ ID NO: 706646 - DNA, 25 bp, Homo sapien
tcacggagctcacagtgtaacaggg

SEQ ID NO: 706647 - DNA, 25 bp, Homo sapien
tagacctgtcagtagataacatgaa

SEQ ID NO: 706648 - DNA, 25 bp, Homo sapien
tatgtgctgcagacacaatatccca

SEQ ID NO: 706649 - DNA, 25 bp, Homo sapien
cttattatatgcctgctgtgtgccg

SEQ ID NO: 706650 - DNA, 25 bp, Homo sapien
tcagagcccggacgggcgggaggca

SEQ ID NO: 706651 - DNA, 25 bp, Homo sapien
atcagagcccggacgggcgggaggc

SEQ ID NO: 706652 - DNA, 25 bp, Homo sapien
cagagcccggacgggcgggaggcaa

SEQ ID NO: 706653 - DNA, 25 bp, Homo sapien
aggctgccggactcggcgcagtcat

SEQ ID NO: 706654 - DNA, 25 bp, Homo sapien
acacggcacccctgtaacggatgta

SEQ ID NO: 706655 - DNA, 25 bp, Homo sapien
cgtagccgtcacgttccatgcgggc

SEQ ID NO: 706656 - DNA, 25 bp, Homo sapien
gatgcagcgctcgaaattgcccgag

SEQ ID NO: 706657 - DNA, 25 bp, Homo sapien
tcttggcactcgacgtcttagctag

SEQ ID NO: 706658 - DNA, 25 bp, Homo sapien
cagggcgcgatcatgctggaagaaa

SEQ ID NO: 706659 - DNA, 25 bp, Homo sapien
actcagaatgagtgagcgggctccc

SEQ ID NO: 706660 - DNA, 25 bp, Homo sapien
aaagctatgcaagtggcaggctgcc

SEQ ID NO: 706661 - DNA, 25 bp, Homo sapien
caaaaatcttgctggggcaggtcct

SEQ ID NO: 706662 - DNA, 25 bp, Homo sapien
agcaccttaccctgagtcacgggaa

SEQ ID NO: 706663 - DNA, 25 bp, Homo sapien
cctgagactttgtccaaacctcggc

SEQ ID NO: 706664 - DNA, 25 bp, Homo sapien
tgctgtctacgctggccaagaacct

SEQ ID NO: 706665 - DNA, 25 bp, Homo sapien
ccacctcggctgagttaaaacctgt

SEQ ID NO: 706666 - DNA, 25 bp, Homo sapien
ggagactcgccatgtaaacggcctc

SEQ ID NO: 706667 - DNA, 25 bp, Homo sapien
gacctagtttccatccagggacagg

SEQ ID NO: 706668 - DNA, 25 bp, Homo sapien
gtcactgctcctcctaagggcctgg

SEQ ID NO: 706669 - DNA, 25 bp, Homo sapien
gagagcacctgctgattcaaaccca

SEQ ID NO: 706670 - DNA, 25 bp, Homo sapien
caggcagtgcatttaaccacagaaa

SEQ ID NO: 706671 - DNA, 25 bp, Homo sapien
cgcacagggattaaccggacgttca

SEQ ID NO: 706672 - DNA, 25 bp, Homo sapien
cggacgttcatatcgacagctcaat

SEQ ID NO: 706673 - DNA, 25 bp, Homo sapien
agctggtagagctttaagatggcct

SEQ ID NO: 706674 - DNA, 25 bp, Homo sapien
ggctgggtaagcttagacaagcccc

SEQ ID NO: 706675 - DNA, 25 bp, Homo sapien
ttgaccccgatgcttccgggctggg

SEQ ID NO: 706676 - DNA, 25 bp, Homo sapien
ctgggaagggcagtcggcgagcttg

SEQ ID NO: 706677 - DNA, 25 bp, Homo sapien
gataacagtcctgcaattccatggg

SEQ ID NO: 706678 - DNA, 25 bp, Homo sapien
ggtaaacactcggtcagagcaccct

SEQ ID NO: 706679 - DNA, 25 bp, Homo sapien
ggtgctatctttaacctcgggcagg

SEQ ID NO: 706680 - DNA, 25 bp, Homo sapien
aaggtgtcttgtacaacccactggg

SEQ ID NO: 706681 - DNA, 25 bp, Homo sapien
aatcgacatcaaatgattaataagt

SEQ ID NO: 706682 - DNA, 25 bp, Homo sapien
gacatcaaatgattaataagttaat

SEQ ID NO: 706683 - DNA, 25 bp, Homo sapien
taatcgacatcaaatgattaataag

SEQ ID NO: 706684 - DNA, 25 bp, Homo sapien
tcgacatcaaatgattaataagtta

SEQ ID NO: 706685 - DNA, 25 bp, Homo sapien
tttcggactggagccaagggtgctc

SEQ ID NO: 706686 - DNA, 25 bp, Homo sapien
gggcttcccgaagtggccccagatg

SEQ ID NO: 706687 - DNA, 25 bp, Homo sapien
ttgcctattctggagccggtcaaaa

SEQ ID NO: 706688 - DNA, 25 bp, Homo sapien
tttctgtagaagataccacctctcc

SEQ ID NO: 706689 - DNA, 25 bp, Homo sapien
aaatgaaacttgctgggtctcgaga

SEQ ID NO: 706690 - DNA, 25 bp, Homo sapien
acagaccacacaagccggcaggtgg

SEQ ID NO: 706691 - DNA, 25 bp, Homo sapien
aaatagagttgagttcaggcccggg

SEQ ID NO: 706692 - DNA, 25 bp, Homo sapien
tgtcccagccatggacagtgagaaa

SEQ ID NO: 706693 - DNA, 25 bp, Homo sapien
gccagggctagtcttgaacgcctgg

SEQ ID NO: 706694 - DNA, 25 bp, Homo sapien
ctgcacccggccctcattttttctt

SEQ ID NO: 706695 - DNA, 25 bp, Homo sapien
gttgccagggctagtcttgaacgcc

SEQ ID NO: 706696 - DNA, 25 bp, Homo sapien
cactgtgttgccagggctagtcttg

SEQ ID NO: 706697 - DNA, 25 bp, Homo sapien
cacgcccagccgaaagtatttattg

SEQ ID NO: 706698 - DNA, 25 bp, Homo sapien
gcccagccgaaagtatttattgtct

SEQ ID NO: 706699 - DNA, 25 bp, Homo sapien
cgcccagccgaaagtatttattgtc

SEQ ID NO: 706700 - DNA, 25 bp, Homo sapien
acgcccagccgaaagtatttattgt

SEQ ID NO: 706701 - DNA, 25 bp, Homo sapien
tgcatacaggccatgtgtgtacgtg

SEQ ID NO: 706702 - DNA, 25 bp, Homo sapien
cagcctgtagctaatggacttggga

SEQ ID NO: 706703 - DNA, 25 bp, Homo sapien
gcctgtgtggtaagccttgttgaaa

SEQ ID NO: 706704 - DNA, 25 bp, Homo sapien
atttctggtctaagtgggcctcctg

SEQ ID NO: 706705 - DNA, 25 bp, Homo sapien
cgggcatggtagcaggtgtctgtta

SEQ ID NO: 706706 - DNA, 25 bp, Homo sapien
ggcatggtagcaggtgtctgttatc

SEQ ID NO: 706707 - DNA, 25 bp, Homo sapien
atggtagcaggtgtctgttatccca

SEQ ID NO: 706708 - DNA, 25 bp, Homo sapien
catggtagcaggtgtctgttatccc

SEQ ID NO: 706709 - DNA, 25 bp, Homo sapien
agatcgtacggctacactctagcct

SEQ ID NO: 706710 - DNA, 25 bp, Homo sapien
cgagatcgtacggctacactctagc

SEQ ID NO: 706711 - DNA, 25 bp, Homo sapien
gagatcgtacggctacactctagcc

SEQ ID NO: 706712 - DNA, 25 bp, Homo sapien
cacatacagtacgagggcttcacgc

SEQ ID NO: 706713 - DNA, 25 bp, Homo sapien
gagatcatgcacactcgctacgagc

SEQ ID NO: 706714 - DNA, 25 bp, Homo sapien
tggacagcagcgagcttctgaggca

SEQ ID NO: 706715 - DNA, 25 bp, Homo sapien
gcagcacgcaggacggtgagatcat

SEQ ID NO: 706716 - DNA, 25 bp, Homo sapien
tcctgaaaaggctgaagagaagcca

SEQ ID NO: 706717 - DNA, 25 bp, Homo sapien
gcctggtcaccccccgcacgtggac

SEQ ID NO: 706718 - DNA, 25 bp, Homo sapien
tcaccccccgcacgtggacacccca

SEQ ID NO: 706719 - DNA, 25 bp, Homo sapien
cccagcgtgcaaaggggctgcgtgg

SEQ ID NO: 706720 - DNA, 25 bp, Homo sapien
cctgcgcgctctgctgggcgcgccc

SEQ ID NO: 706721 - DNA, 25 bp, Homo sapien
tccggtcgccgcgaacagcttgtct

SEQ ID NO: 706722 - DNA, 25 bp, Homo sapien
atgaaaccgcgtgcgtggcccggac

SEQ ID NO: 706723 - DNA, 25 bp, Homo sapien
agcttgtctgcctgcgcgcgtggcc

SEQ ID NO: 706724 - DNA, 25 bp, Homo sapien
gcgcggacttgcgtgcgacccggag

SEQ ID NO: 706725 - DNA, 25 bp, Homo sapien
gggaactcaaccaagtgccactgag

SEQ ID NO: 706726 - DNA, 25 bp, Homo sapien
accaagtgccactgagagggaaaaa

SEQ ID NO: 706727 - DNA, 25 bp, Homo sapien
cccagaagtccagcgcgggccggaa

SEQ ID NO: 706728 - DNA, 25 bp, Homo sapien
aagagggaatcccagaagtccagcg

SEQ ID NO: 706729 - DNA, 25 bp, Homo sapien
caagtggccgagttggttcgtttat

SEQ ID NO: 706730 - DNA, 25 bp, Homo sapien
ggttgcttttgtccggcctgtggac

SEQ ID NO: 706731 - DNA, 25 bp, Homo sapien
gcattaacgactagccaagtgttga

SEQ ID NO: 706732 - DNA, 25 bp, Homo sapien
gattcattcattcctcggattccta

SEQ ID NO: 706733 - DNA, 25 bp, Homo sapien
ctgtttgcccctgtagaacagcctc

SEQ ID NO: 706734 - DNA, 25 bp, Homo sapien
gtgtgggtctgcctcccgtccatgg

SEQ ID NO: 706735 - DNA, 25 bp, Homo sapien
cctggctccacgtggaacagctcct

SEQ ID NO: 706736 - DNA, 25 bp, Homo sapien
gacagcgagtccaccgtgtgggtct

SEQ ID NO: 706737 - DNA, 25 bp, Homo sapien
agcgtgtcaatctgtgagtcctccc

SEQ ID NO: 706738 - DNA, 25 bp, Homo sapien
ccagaccctatagattcgagggcca

SEQ ID NO: 706739 - DNA, 25 bp, Homo sapien
ctatagattcgagggccagccgcca

SEQ ID NO: 706740 - DNA, 25 bp, Homo sapien
aaagcccagaccctatagattcgag

SEQ ID NO: 706741 - DNA, 25 bp, Homo sapien
gcggcgtgagcatcctgagctccag

SEQ ID NO: 706742 - DNA, 25 bp, Homo sapien
gcagctgctcctcctatgtttgcag

SEQ ID NO: 706743 - DNA, 25 bp, Homo sapien
gcagcgatatctgccagagcggcgt

SEQ ID NO: 706744 - DNA, 25 bp, Homo sapien
atgtgtccgaaggccacgtgcgcag

SEQ ID NO: 706745 - DNA, 25 bp, Homo sapien
tgaggtcttgctgctttgcccaagc

SEQ ID NO: 706746 - DNA, 25 bp, Homo sapien
ctcactgcagcatcgaaccttgggc

SEQ ID NO: 706747 - DNA, 25 bp, Homo sapien
gatgaggtcttgctgctttgcccaa

SEQ ID NO: 706748 - DNA, 25 bp, Homo sapien
ctgcagcatcgaaccttgggctcaa

SEQ ID NO: 706749 - DNA, 25 bp, Homo sapien
gagctcatcacctgagctgtatctg

SEQ ID NO: 706750 - DNA, 25 bp, Homo sapien
gaggagctcatcacctgagctgtat

SEQ ID NO: 706751 - DNA, 25 bp, Homo sapien
aggaggagctcatcacctgagctgt

SEQ ID NO: 706752 - DNA, 25 bp, Homo sapien
ggagctcatcacctgagctgtatct

SEQ ID NO: 706753 - DNA, 25 bp, Homo sapien
cagaggcagacgctgtttagccacc

SEQ ID NO: 706754 - DNA, 25 bp, Homo sapien
agaggcagacgctgtttagccacca

SEQ ID NO: 706755 - DNA, 25 bp, Homo sapien
gaggcagacgctgtttagccaccaa

SEQ ID NO: 706756 - DNA, 25 bp, Homo sapien
tgtcggagagctcggagtcccgctc

SEQ ID NO: 706757 - DNA, 25 bp, Homo sapien
ttcaggcggacctcgtagtcgaaga

SEQ ID NO: 706758 - DNA, 25 bp, Homo sapien
ggaggacttgtctgactcactctgg

SEQ ID NO: 706759 - DNA, 25 bp, Homo sapien
tagtcgaagagggtatggccgtcct

SEQ ID NO: 706760 - DNA, 25 bp, Homo sapien
tggtaaatgacgtcctcctccagcg

SEQ ID NO: 706761 - DNA, 25 bp, Homo sapien
cccgagcatcgacgtactcattgac

SEQ ID NO: 706762 - DNA, 25 bp, Homo sapien
cccatgttcgtgtcccgagcatcga

SEQ ID NO: 706763 - DNA, 25 bp, Homo sapien
tcgtcgtatttcacgtggtaaatga

SEQ ID NO: 706764 - DNA, 25 bp, Homo sapien
gcgctcggacgtccctggagttcat

SEQ ID NO: 706765 - DNA, 25 bp, Homo sapien
cagcaccacgttggcgtagagttcc

SEQ ID NO: 706766 - DNA, 25 bp, Homo sapien
ttgtagttgagcatgaccacctggc

SEQ ID NO: 706767 - DNA, 25 bp, Homo sapien
ggagatctccgcgtcgtaccagaag

SEQ ID NO: 706768 - DNA, 25 bp, Homo sapien
ggttgtcaaccatggggctcccttc

SEQ ID NO: 706769 - DNA, 25 bp, Homo sapien
ccacgaagatgatccgacagtcgtt

SEQ ID NO: 706770 - DNA, 25 bp, Homo sapien
aatcttgaagacttcgtccacgaag

SEQ ID NO: 706771 - DNA, 25 bp, Homo sapien
ttcacccggccgctcaatcttgaag

SEQ ID NO: 706772 - DNA, 25 bp, Homo sapien
tgttcacgtcgtccttgcagtgctt

SEQ ID NO: 706773 - DNA, 25 bp, Homo sapien
cccggcagagtctgttcacgtcgtc

SEQ ID NO: 706774 - DNA, 25 bp, Homo sapien
cgtcgtccttgcagtgcttgcagga

SEQ ID NO: 706775 - DNA, 25 bp, Homo sapien
gtgcttgcaggacggcccgctcttc

SEQ ID NO: 706776 - DNA, 25 bp, Homo sapien
tcgctggcatcattccggcactcag

SEQ ID NO: 706777 - DNA, 25 bp, Homo sapien
atcattccggcactcagggcagtac

SEQ ID NO: 706778 - DNA, 25 bp, Homo sapien
cccgccagtaccacctcgctggcat

SEQ ID NO: 706779 - DNA, 25 bp, Homo sapien
ccagtcccgctgtgaggacgatgtg

SEQ ID NO: 706780 - DNA, 25 bp, Homo sapien
acattccttggtgcggcccacacag

SEQ ID NO: 706781 - DNA, 25 bp, Homo sapien
ggtacattccttggtgcggcccaca

SEQ ID NO: 706782 - DNA, 25 bp, Homo sapien
ggaaccgccacatggtgcccacggg

SEQ ID NO: 706783 - DNA, 25 bp, Homo sapien
tggactcggaaccgccacatggtgc

SEQ ID NO: 706784 - DNA, 25 bp, Homo sapien
ccccgccaggactagggagtacgct

SEQ ID NO: 706785 - DNA, 25 bp, Homo sapien
gactagggagtacgctccgtcgttg

SEQ ID NO: 706786 - DNA, 25 bp, Homo sapien
gagtacgctccgtcgttgctccggc

SEQ ID NO: 706787 - DNA, 25 bp, Homo sapien
ggccgatggacacccgactcgctga

SEQ ID NO: 706788 - DNA, 25 bp, Homo sapien
gatcacaagactgttccgcggtcct

SEQ ID NO: 706789 - DNA, 25 bp, Homo sapien
gtgagtttctgatcacaagactgtt

SEQ ID NO: 706790 - DNA, 25 bp, Homo sapien
tcgaccaccactacccgtgtatgtg

SEQ ID NO: 706791 - DNA, 25 bp, Homo sapien
tttctgatcacaagactgttccgcg

SEQ ID NO: 706792 - DNA, 25 bp, Homo sapien
gtagatgccatcgtagcggttgccc

SEQ ID NO: 706793 - DNA, 25 bp, Homo sapien
tcttggtcattgatgggagcaaagc

SEQ ID NO: 706794 - DNA, 25 bp, Homo sapien
attcttgccacccttgacattgcgc

SEQ ID NO: 706795 - DNA, 25 bp, Homo sapien
tcagcgggggcgtacttgctattct

SEQ ID NO: 706796 - DNA, 25 bp, Homo sapien
ccttctcgggccagtatttcacaac

SEQ ID NO: 706797 - DNA, 25 bp, Homo sapien
gccccagcttcttgatccggtcctt

SEQ ID NO: 706798 - DNA, 25 bp, Homo sapien
tcatcatcgtccctccgcagaaggt

SEQ ID NO: 706799 - DNA, 25 bp, Homo sapien
agaaggtagcgccacacgagaaacc

SEQ ID NO: 706800 - DNA, 25 bp, Homo sapien
ccttctctcgctctcggttggccag

SEQ ID NO: 706801 - DNA, 25 bp, Homo sapien
tgcccgtcctgggggacgcgaagcc

SEQ ID NO: 706802 - DNA, 25 bp, Homo sapien
cttgcccgtcctgggggacgcgaag

SEQ ID NO: 706803 - DNA, 25 bp, Homo sapien
ctctcgctctcggttggccagggct

SEQ ID NO: 706804 - DNA, 25 bp, Homo sapien
tggatgtccggcgcggggacccgcc

SEQ ID NO: 706805 - DNA, 25 bp, Homo sapien
gcgcggggacccgccctgctcgggc

SEQ ID NO: 706806 - DNA, 25 bp, Homo sapien
ggacccgccctgctcgggccacctc

SEQ ID NO: 706807 - DNA, 25 bp, Homo sapien
cttggatgtccggcgcggggacccg

SEQ ID NO: 706808 - DNA, 25 bp, Homo sapien
cagcttggcgttgctcttgtcctct

SEQ ID NO: 706809 - DNA, 25 bp, Homo sapien
ccacagcttggcgttgctcttgtcc

SEQ ID NO: 706810 - DNA, 25 bp, Homo sapien
cacagcttggcgttgctcttgtcct

SEQ ID NO: 706811 - DNA, 25 bp, Homo sapien
gcttggcgttgctcttgtcctctct

SEQ ID NO: 706812 - DNA, 25 bp, Homo sapien
gtccttgagtgacgccaggacctca

SEQ ID NO: 706813 - DNA, 25 bp, Homo sapien
gccggtccttgagtgacgccaggac

SEQ ID NO: 706814 - DNA, 25 bp, Homo sapien
gccggccggtccttgagtgacgcca

SEQ ID NO: 706815 - DNA, 25 bp, Homo sapien
ccggccggtccttgagtgacgccag

SEQ ID NO: 706816 - DNA, 25 bp, Homo sapien
agctcctgacagcagatacactgga

SEQ ID NO: 706817 - DNA, 25 bp, Homo sapien
cacggtcgtgatgggccggaacacc

SEQ ID NO: 706818 - DNA, 25 bp, Homo sapien
acagcagatacactggaacgtctcc

SEQ ID NO: 706819 - DNA, 25 bp, Homo sapien
cacacgttgtgctggcacacggtcg

SEQ ID NO: 706820 - DNA, 25 bp, Homo sapien
tcacctgcatggcatagctgcggcc

SEQ ID NO: 706821 - DNA, 25 bp, Homo sapien
tgtgcccgaaaggatctgtccaggc

SEQ ID NO: 706822 - DNA, 25 bp, Homo sapien
gagctggttgaggacggtctgcaga

SEQ ID NO: 706823 - DNA, 25 bp, Homo sapien
caggcagggcagctgaacacctgtg

SEQ ID NO: 706824 - DNA, 25 bp, Homo sapien
tctataaggctcaaacggttcccaa

SEQ ID NO: 706825 - DNA, 25 bp, Homo sapien
caaaggtttgaactaggcccgagat

SEQ ID NO: 706826 - DNA, 25 bp, Homo sapien
aaatcagtgccgatgaacgagccct

SEQ ID NO: 706827 - DNA, 25 bp, Homo sapien
ggcagaggacttttcacgcggatct

SEQ ID NO: 706828 - DNA, 25 bp, Homo sapien
tagagttggggtctacaggctggtc

SEQ ID NO: 706829 - DNA, 25 bp, Homo sapien
agagaccagcaagctttgctggcca

SEQ ID NO: 706830 - DNA, 25 bp, Homo sapien
gaccagcaagctttgctggccaggc

SEQ ID NO: 706831 - DNA, 25 bp, Homo sapien
tcagactcctacactcaagtcatcc

SEQ ID NO: 706832 - DNA, 25 bp, Homo sapien
caggcaaggtgtggagcgcaaaaat

SEQ ID NO: 706833 - DNA, 25 bp, Homo sapien
tccccttatgggttggtctgctgca

SEQ ID NO: 706834 - DNA, 25 bp, Homo sapien
ctcaatctttctagacaggcaaggt

SEQ ID NO: 706835 - DNA, 25 bp, Homo sapien
tgttcaatgcttcaatagatgcccc

SEQ ID NO: 706836 - DNA, 25 bp, Homo sapien
taatgggcagattaatttaggcaac

SEQ ID NO: 706837 - DNA, 25 bp, Homo sapien
tgcagtcagatgcaaatctcacaaa

SEQ ID NO: 706838 - DNA, 25 bp, Homo sapien
tgctgtcagataagtagaagtcctc

SEQ ID NO: 706839 - DNA, 25 bp, Homo sapien
tagacggtaggtctgagggttcacc

SEQ ID NO: 706840 - DNA, 25 bp, Homo sapien
ctgaggcggcgtgcgcggcccggtc

SEQ ID NO: 706841 - DNA, 25 bp, Homo sapien
gccccgctcggttgctggcgaccga

SEQ ID NO: 706842 - DNA, 25 bp, Homo sapien
agctccgccccgactgccattggct

SEQ ID NO: 706843 - DNA, 25 bp, Homo sapien
gggcttataaggccgcgcgccagct

SEQ ID NO: 706844 - DNA, 25 bp, Homo sapien
ccaaagggccagaaacgcaggcggg

SEQ ID NO: 706845 - DNA, 25 bp, Homo sapien
tgataggcatttagggggcatccct

SEQ ID NO: 706846 - DNA, 25 bp, Homo sapien
caggagcaatgataggcatttaggg

SEQ ID NO: 706847 - DNA, 25 bp, Homo sapien
ccaaggcatagcaggttgaccggag

SEQ ID NO: 706848 - DNA, 25 bp, Homo sapien
gacagaagttgactctaccacggct

SEQ ID NO: 706849 - DNA, 25 bp, Homo sapien
cgtctgtgcggcagaatctccgtta

SEQ ID NO: 706850 - DNA, 25 bp, Homo sapien
gcagctcctgacacagtagacgctt

SEQ ID NO: 706851 - DNA, 25 bp, Homo sapien
tccaatcagacacacggagacgagg

SEQ ID NO: 706852 - DNA, 25 bp, Homo sapien
tcattgcagggcgtgcaggggaccc

SEQ ID NO: 706853 - DNA, 25 bp, Homo sapien
tgtcctctcaggtggaagctgccac

SEQ ID NO: 706854 - DNA, 25 bp, Homo sapien
tcctgtcctctcaggtggaagctgc

SEQ ID NO: 706855 - DNA, 25 bp, Homo sapien
gggctcctgtcctctcaggtggaag

SEQ ID NO: 706856 - DNA, 25 bp, Homo sapien
catagctttccgtagtgtggccctc

SEQ ID NO: 706857 - DNA, 25 bp, Homo sapien
cgcccacgggagctttcttgctaca

SEQ ID NO: 706858 - DNA, 25 bp, Homo sapien
aatatttattctccggcccttccag

SEQ ID NO: 706859 - DNA, 25 bp, Homo sapien
ttgctacaacggcaaagcagagtgg

SEQ ID NO: 706860 - DNA, 25 bp, Homo sapien
gcctggccaagatgccttatgttct

SEQ ID NO: 706861 - DNA, 25 bp, Homo sapien
aagagaacgacttcctccgcctcgt

SEQ ID NO: 706862 - DNA, 25 bp, Homo sapien
ttctaggggtgtcaagagaacgact

SEQ ID NO: 706863 - DNA, 25 bp, Homo sapien
ggccaagatgccttatgttctaggg

SEQ ID NO: 706864 - DNA, 25 bp, Homo sapien
atgtgccactgcgtctggctttttt

SEQ ID NO: 706865 - DNA, 25 bp, Homo sapien
catgtgccactgcgtctggcttttt

SEQ ID NO: 706866 - DNA, 25 bp, Homo sapien
gcatgtgccactgcgtctggctttt

SEQ ID NO: 706867 - DNA, 25 bp, Homo sapien
gagagaaaagtaagtgctcattagt

SEQ ID NO: 706868 - DNA, 25 bp, Homo sapien
aaattacacatatctgtaccaaaat

SEQ ID NO: 706869 - DNA, 25 bp, Homo sapien
taaattacacatatctgtaccaaaa

SEQ ID NO: 706870 - DNA, 25 bp, Homo sapien
ggagaatgggtaagtaaattacaca

SEQ ID NO: 706871 - DNA, 25 bp, Homo sapien
tgcacctggccaagcagggatttat

SEQ ID NO: 706872 - DNA, 25 bp, Homo sapien
cacctggccaagcagggatttattt

SEQ ID NO: 706873 - DNA, 25 bp, Homo sapien
cctggccaagcagggatttatttat

SEQ ID NO: 706874 - DNA, 25 bp, Homo sapien
ctgcacctggccaagcagggattta

SEQ ID NO: 706875 - DNA, 25 bp, Homo sapien
ggagatgctccaaaaattcgctagg

SEQ ID NO: 706876 - DNA, 25 bp, Homo sapien
ccaaaaattcgctaggatttgtcag

SEQ ID NO: 706877 - DNA, 25 bp, Homo sapien
tctggatggcgaggttcctgggtgg

SEQ ID NO: 706878 - DNA, 25 bp, Homo sapien
ggatttgtcaggtgcctccagcaac

SEQ ID NO: 706879 - DNA, 25 bp, Homo sapien
caacatccacaccaacacctgcaca

SEQ ID NO: 706880 - DNA, 25 bp, Homo sapien
aacatccacaccaacacctgcacac

SEQ ID NO: 706881 - DNA, 25 bp, Homo sapien
caccaacatccacaccaacacctgc

SEQ ID NO: 706882 - DNA, 25 bp, Homo sapien
cacaccaacacctgcacaccaacac

SEQ ID NO: 706883 - DNA, 25 bp, Homo sapien
caacatccacaccaacacctgcaca

SEQ ID NO: 706884 - DNA, 25 bp, Homo sapien
acgtgcacaccaacacccacaccaa

SEQ ID NO: 706885 - DNA, 25 bp, Homo sapien
ccaacacccacaccaacacccacac

SEQ ID NO: 706886 - DNA, 25 bp, Homo sapien
atacctgcacaccaacacccacacc

SEQ ID NO: 706887 - DNA, 25 bp, Homo sapien
acctgcacaccaacacccacaccaa

SEQ ID NO: 706888 - DNA, 25 bp, Homo sapien
caatacctgcacaccaacacccaca

SEQ ID NO: 706889 - DNA, 25 bp, Homo sapien
ctgcacaccaacacccacaccaaca

SEQ ID NO: 706890 - DNA, 25 bp, Homo sapien
cacaccaacatccacaccaacacct

SEQ ID NO: 706891 - DNA, 25 bp, Homo sapien
caacatccacaccaacacctgcaca

SEQ ID NO: 706892 - DNA, 25 bp, Homo sapien
tgcacaccaacacccacaccaacat

SEQ ID NO: 706893 - DNA, 25 bp, Homo sapien
acaccgacacctgcacaccaacgtc

SEQ ID NO: 706894 - DNA, 25 bp, Homo sapien
tgcacaccaacgtccacaccaacac

SEQ ID NO: 706895 - DNA, 25 bp, Homo sapien
aacacccacaccgacacctgcacac

SEQ ID NO: 706896 - DNA, 25 bp, Homo sapien
cacaccaacacccacaccgacacct

SEQ ID NO: 706897 - DNA, 25 bp, Homo sapien
gctggttcctgctgccaaagcacgg

SEQ ID NO: 706898 - DNA, 25 bp, Homo sapien
acagaggagccccaagccaccagaa

SEQ ID NO: 706899 - DNA, 25 bp, Homo sapien
acagaggcagcacgagaacgccact

SEQ ID NO: 706900 - DNA, 25 bp, Homo sapien
gaggaacccgcgatgcagccaggtt

SEQ ID NO: 706901 - DNA, 25 bp, Homo sapien
tgggccggcatcctgtccacatgac

SEQ ID NO: 706902 - DNA, 25 bp, Homo sapien
tgtccccaagatctgaggactctcc

SEQ ID NO: 706903 - DNA, 25 bp, Homo sapien
gtccccaagatctgaggactctcct

SEQ ID NO: 706904 - DNA, 25 bp, Homo sapien
ggctgggccggcatcctgtccacat

SEQ ID NO: 706905 - DNA, 25 bp, Homo sapien
gtgaccatgacatgggaccagcagc

SEQ ID NO: 706906 - DNA, 25 bp, Homo sapien
agccctcctgctgtgaccatgacat

SEQ ID NO: 706907 - DNA, 25 bp, Homo sapien
cagcagctgcatcttatgggcggcc

SEQ ID NO: 706908 - DNA, 25 bp, Homo sapien
agctgcatcttatgggcggccccac

SEQ ID NO: 706909 - DNA, 25 bp, Homo sapien
tcccgctcacgggactctgggcctc

SEQ ID NO: 706910 - DNA, 25 bp, Homo sapien
cctcggggtgccgtgaaggcctcag

SEQ ID NO: 706911 - DNA, 25 bp, Homo sapien
ctgtctcccgctcacgggactctgg

SEQ ID NO: 706912 - DNA, 25 bp, Homo sapien
ggcctcggggtgccgtgaaggcctc

SEQ ID NO: 706913 - DNA, 25 bp, Homo sapien
tggcagacagaggacacaggatgac

SEQ ID NO: 706914 - DNA, 25 bp, Homo sapien
agacagaggacacaggatgactcgg

SEQ ID NO: 706915 - DNA, 25 bp, Homo sapien
ggcagacagaggacacaggatgact

SEQ ID NO: 706916 - DNA, 25 bp, Homo sapien
cacaggatgactcgggggcatcaga

SEQ ID NO: 706917 - DNA, 25 bp, Homo sapien
gttgccctggctgctaataaacgcc

SEQ ID NO: 706918 - DNA, 25 bp, Homo sapien
gctgctaataaacgcctggcctgaa

SEQ ID NO: 706919 - DNA, 25 bp, Homo sapien
aaatgacatgcttaggaagtaaatc

SEQ ID NO: 706920 - DNA, 25 bp, Homo sapien
ttggaaatgacatgcttaggaagta

SEQ ID NO: 706921 - DNA, 25 bp, Homo sapien
ctgtcagggcagccctctgggagga

SEQ ID NO: 706922 - DNA, 25 bp, Homo sapien
ggccatgtagtgttcacccagggcc

SEQ ID NO: 706923 - DNA, 25 bp, Homo sapien
gccatgtagtgttcacccagggcct

SEQ ID NO: 706924 - DNA, 25 bp, Homo sapien
agctggaccactgtgggaccctcag

SEQ ID NO: 706925 - DNA, 25 bp, Homo sapien
cagaggccgcagctggaccactgtg

SEQ ID NO: 706926 - DNA, 25 bp, Homo sapien
ggaagacgagagagggtgaaccagc

SEQ ID NO: 706927 - DNA, 25 bp, Homo sapien
ctgtggaggaagacgagagagggtg

SEQ ID NO: 706928 - DNA, 25 bp, Homo sapien
tgtggaggaagacgagagagggtga

SEQ ID NO: 706929 - DNA, 25 bp, Homo sapien
ggaggaagacgagagagggtgaacc

SEQ ID NO: 706930 - DNA, 25 bp, Homo sapien
ggctgcagctgtgcgggaagcacac

SEQ ID NO: 706931 - DNA, 25 bp, Homo sapien
tgtaggccacgtatttgttgaagtc

SEQ ID NO: 706932 - DNA, 25 bp, Homo sapien
tgggctccctgcgactctatgtagg

SEQ ID NO: 706933 - DNA, 25 bp, Homo sapien
ttctgggcgccgtggtcctcagacc

SEQ ID NO: 706934 - DNA, 25 bp, Homo sapien
gaaacgtcatgattttacagctggg

SEQ ID NO: 706935 - DNA, 25 bp, Homo sapien
gaattcgcctcttcagtgctattag

SEQ ID NO: 706936 - DNA, 25 bp, Homo sapien
cgcctcttcagtgctattagaggaa

SEQ ID NO: 706937 - DNA, 25 bp, Homo sapien
cagtgctattagaggaaactcgccc

SEQ ID NO: 706938 - DNA, 25 bp, Homo sapien
tcttcagtgctattagaggaaactc

SEQ ID NO: 706939 - DNA, 25 bp, Homo sapien
atgggcgccgggatcaccacgtcgt

SEQ ID NO: 706940 - DNA, 25 bp, Homo sapien
accacgtcgtcgatgtcatcatacg

SEQ ID NO: 706941 - DNA, 25 bp, Homo sapien
tgtcatcatacgtctgccgcggctt

SEQ ID NO: 706942 - DNA, 25 bp, Homo sapien
ggcttccactccttcggggggatga

SEQ ID NO: 706943 - DNA, 25 bp, Homo sapien
aggcggcggtactcgcccactgtca

SEQ ID NO: 706944 - DNA, 25 bp, Homo sapien
ggtactcgcccactgtcatggcctt

SEQ ID NO: 706945 - DNA, 25 bp, Homo sapien
ttctcgctgttggccaggcggcggt

SEQ ID NO: 706946 - DNA, 25 bp, Homo sapien
ctggatattgtactgcgtgaagagg

SEQ ID NO: 706947 - DNA, 25 bp, Homo sapien
tcttccagtatttgcgttcaaggtc

SEQ ID NO: 706948 - DNA, 25 bp, Homo sapien
tgtcagccccgtagatcggggagac

SEQ ID NO: 706949 - DNA, 25 bp, Homo sapien
caaagtcctggtgccgcggggtaca

SEQ ID NO: 706950 - DNA, 25 bp, Homo sapien
tacaaagagccgctgatgtcagccc

SEQ ID NO: 706951 - DNA, 25 bp, Homo sapien
ttcttccccggagcctcatacttac

SEQ ID NO: 706952 - DNA, 25 bp, Homo sapien
tgttcttccccggagcctcatactt

SEQ ID NO: 706953 - DNA, 25 bp, Homo sapien
gctggtccctgttcttccccggagc

SEQ ID NO: 706954 - DNA, 25 bp, Homo sapien
agctggtccctgttcttccccggag

SEQ ID NO: 706955 - DNA, 25 bp, Homo sapien
gactgggaaagtacacgtgtttgta

SEQ ID NO: 706956 - DNA, 25 bp, Homo sapien
tttgtaacacgctgtgggccggctg

SEQ ID NO: 706957 - DNA, 25 bp, Homo sapien
gctgaggactcgaggctccacagtg

SEQ ID NO: 706958 - DNA, 25 bp, Homo sapien
tcaggaccgggttggagccgaatcc

SEQ ID NO: 706959 - DNA, 25 bp, Homo sapien
aggcccacttctggcgtccagcggg

SEQ ID NO: 706960 - DNA, 25 bp, Homo sapien
aaggtccactaagcagggcagagcc

SEQ ID NO: 706961 - DNA, 25 bp, Homo sapien
tcggctcagagagcaaacccagtcc

SEQ ID NO: 706962 - DNA, 25 bp, Homo sapien
gaatcctccgtgtcataaaccggcg

SEQ ID NO: 706963 - DNA, 25 bp, Homo sapien
aaattcgaaatactctggtctcatg

SEQ ID NO: 706964 - DNA, 25 bp, Homo sapien
taatccagacttagggcccatctcc

SEQ ID NO: 706965 - DNA, 25 bp, Homo sapien
tggtctcatgtttgcttctggtggg

SEQ ID NO: 706966 - DNA, 25 bp, Homo sapien
tctccaagatatctcaggatgtata

SEQ ID NO: 706967 - DNA, 25 bp, Homo sapien
ctgggtggaggccttgttgtgaagc

SEQ ID NO: 706968 - DNA, 25 bp, Homo sapien
acatgccagcgtgcaccaggcaggc

SEQ ID NO: 706969 - DNA, 25 bp, Homo sapien
ggcagggcctgtcagattccactga

SEQ ID NO: 706970 - DNA, 25 bp, Homo sapien
gcagggcctgtcagattccactgag

SEQ ID NO: 706971 - DNA, 25 bp, Homo sapien
ggctcaatggtccctcccactttgg

SEQ ID NO: 706972 - DNA, 25 bp, Homo sapien
taacctgtgtgagattcttgcccag

SEQ ID NO: 706973 - DNA, 25 bp, Homo sapien
taggctataggcgtgagaaaccaca

SEQ ID NO: 706974 - DNA, 25 bp, Homo sapien
tgcaggctaattctccccagagtcc

SEQ ID NO: 706975 - DNA, 25 bp, Homo sapien
cgaagtacaggtagggcgtgttcac

SEQ ID NO: 706976 - DNA, 25 bp, Homo sapien
catgtccaggatggtccggaggctc

SEQ ID NO: 706977 - DNA, 25 bp, Homo sapien
cgtgttcacgccctcgatgatggtg

SEQ ID NO: 706978 - DNA, 25 bp, Homo sapien
ggaggctcccgatgttccactgggc

SEQ ID NO: 706979 - DNA, 25 bp, Homo sapien
gggtcacctggtctatgcctgtcgc

SEQ ID NO: 706980 - DNA, 25 bp, Homo sapien
cgtagtagacgttggctaatgctgg

SEQ ID NO: 706981 - DNA, 25 bp, Homo sapien
tggtctatgcctgtcgcaggcatgg

SEQ ID NO: 706982 - DNA, 25 bp, Homo sapien
ggaggactgatagcccgtagtagac

SEQ ID NO: 706983 - DNA, 25 bp, Homo sapien
tcagctcctggcccgagttctcgca

SEQ ID NO: 706984 - DNA, 25 bp, Homo sapien
acacgccacgctctaggccacacgg

SEQ ID NO: 706985 - DNA, 25 bp, Homo sapien
aagcacggcaccagcgccacacgcc

SEQ ID NO: 706986 - DNA, 25 bp, Homo sapien
taggccacacggctgcaatgccctg

SEQ ID NO: 706987 - DNA, 25 bp, Homo sapien
tggtagtgacaagagcgaggcagag

SEQ ID NO: 706988 - DNA, 25 bp, Homo sapien
tgggctgatggcgtcaggccgacag

SEQ ID NO: 706989 - DNA, 25 bp, Homo sapien
cagtcttgataagcaggcctgggct

SEQ ID NO: 706990 - DNA, 25 bp, Homo sapien
ccccagtcttgataagcaggcctgg

SEQ ID NO: 706991 - DNA, 25 bp, Homo sapien
ttaattaggagcagactcgccgagg

SEQ ID NO: 706992 - DNA, 25 bp, Homo sapien
tcaggttcggacacagtgccaggga

SEQ ID NO: 706993 - DNA, 25 bp, Homo sapien
tacttgcttgggagataggatctgc

SEQ ID NO: 706994 - DNA, 25 bp, Homo sapien
cctgaggatccgtgcgaacttcata

SEQ ID NO: 706995 - DNA, 25 bp, Homo sapien
aatataaacgtctaagtaaggcgtg

SEQ ID NO: 706996 - DNA, 25 bp, Homo sapien
acgtctaagtaaggcgtgatggtgc

SEQ ID NO: 706997 - DNA, 25 bp, Homo sapien
tcataatataaacgtctaagtaagg

SEQ ID NO: 706998 - DNA, 25 bp, Homo sapien
taaacgtctaagtaaggcgtgatgg

SEQ ID NO: 706999 - DNA, 25 bp, Homo sapien
ggcgggcagctcatgagccggagcc

SEQ ID NO: 707000 - DNA, 25 bp, Homo sapien
ggcagctcatgagccggagccggag

SEQ ID NO: 707001 - DNA, 25 bp, Homo sapien
gagctggagccggaaccagggaatg

SEQ ID NO: 707002 - DNA, 25 bp, Homo sapien
agctggagccggaaccagggaatga

SEQ ID NO: 707003 - DNA, 25 bp, Homo sapien
acactggtcacacgggaggtcagga

SEQ ID NO: 707004 - DNA, 25 bp, Homo sapien
tctgactggtgtccagagacactgg

SEQ ID NO: 707005 - DNA, 25 bp, Homo sapien
aacgagccgcatgtccctgtttcag

SEQ ID NO: 707006 - DNA, 25 bp, Homo sapien
tgggcccaacgtaggcagcaacgag

SEQ ID NO: 707007 - DNA, 25 bp, Homo sapien
caaagtcatagaaactcggctccgc

SEQ ID NO: 707008 - DNA, 25 bp, Homo sapien
tggtagccacccttggtgtctggtg

SEQ ID NO: 707009 - DNA, 25 bp, Homo sapien
gagccatatacctggtagccaccct

SEQ ID NO: 707010 - DNA, 25 bp, Homo sapien
agtcatagaaactcggctccgcatc

SEQ ID NO: 707011 - DNA, 25 bp, Homo sapien
cgggacgcaggacgcgggacccagg

SEQ ID NO: 707012 - DNA, 25 bp, Homo sapien
ggacccgggcatcgccactcctctg

SEQ ID NO: 707013 - DNA, 25 bp, Homo sapien
tccatctccgtgttctcaaagccct

SEQ ID NO: 707014 - DNA, 25 bp, Homo sapien
ccaggacccgggcatcgccactcct

SEQ ID NO: 707015 - DNA, 25 bp, Homo sapien
tcagggcgaatgctattaggaggtc

SEQ ID NO: 707016 - DNA, 25 bp, Homo sapien
cgaatgctattaggaggtctgagga

SEQ ID NO: 707017 - DNA, 25 bp, Homo sapien
ctaaatcagggcgaatgctattagg

SEQ ID NO: 707018 - DNA, 25 bp, Homo sapien
gctattaggaggtctgaggactcac

SEQ ID NO: 707019 - DNA, 25 bp, Homo sapien
aaggctctccggatgtcctgaaaag

SEQ ID NO: 707020 - DNA, 25 bp, Homo sapien
gaactggcggactgaagcagatgca

SEQ ID NO: 707021 - DNA, 25 bp, Homo sapien
ctgaaaagcccagtccaaaggacgg

SEQ ID NO: 707022 - DNA, 25 bp, Homo sapien
aggacacggcttaggacacacagaa

SEQ ID NO: 707023 - DNA, 25 bp, Homo sapien
gcactccacctcgaggaggctgaaa

SEQ ID NO: 707024 - DNA, 25 bp, Homo sapien
gggatgctcccggttaagcggcact

SEQ ID NO: 707025 - DNA, 25 bp, Homo sapien
cacgtcagaggcaagatcggtggca

SEQ ID NO: 707026 - DNA, 25 bp, Homo sapien
tggctcggtggcttgtgacacactc

SEQ ID NO: 707027 - DNA, 25 bp, Homo sapien
ctccaggcgcttgccgtgctctggt

SEQ ID NO: 707028 - DNA, 25 bp, Homo sapien
agccgctccaggcgcttgccgtgct

SEQ ID NO: 707029 - DNA, 25 bp, Homo sapien
tgccgtgctctggtgggatggcgta

SEQ ID NO: 707030 - DNA, 25 bp, Homo sapien
gccgtgctctggtgggatggcgtac

SEQ ID NO: 707031 - DNA, 25 bp, Homo sapien
cattgggtcattggtggaaggcggc

SEQ ID NO: 707032 - DNA, 25 bp, Homo sapien
ccacggtgaggttttgcaaagtaca

SEQ ID NO: 707033 - DNA, 25 bp, Homo sapien
ggtttgccgaatccagcaacttttc

SEQ ID NO: 707034 - DNA, 25 bp, Homo sapien
agctgtgtgcgagagcaccagcaca

SEQ ID NO: 707035 - DNA, 25 bp, Homo sapien
ggtcagagctcacaacctcttcctg

SEQ ID NO: 707036 - DNA, 25 bp, Homo sapien
tgctcagcatggtgggctgcgtaca

SEQ ID NO: 707037 - DNA, 25 bp, Homo sapien
tctgtctaggagtgcgctctgcagc

SEQ ID NO: 707038 - DNA, 25 bp, Homo sapien
tgacttaaagcagcgcctgggaaac

SEQ ID NO: 707039 - DNA, 25 bp, Homo sapien
cttgtgtgacaaggtgcccacccat

SEQ ID NO: 707040 - DNA, 25 bp, Homo sapien
gaaggaccagggttacttgtgtgac

SEQ ID NO: 707041 - DNA, 25 bp, Homo sapien
tggcctctgcgcagtgaccatgtga

SEQ ID NO: 707042 - DNA, 25 bp, Homo sapien
cacagggcacggctatgcagagact

SEQ ID NO: 707043 - DNA, 25 bp, Homo sapien
ttcttcaggatgatgggcgagatga

SEQ ID NO: 707044 - DNA, 25 bp, Homo sapien
gctgaaggggatcccgtacttcttc

SEQ ID NO: 707045 - DNA, 25 bp, Homo sapien
gggtcatcttatgccgcaggaaggc

SEQ ID NO: 707046 - DNA, 25 bp, Homo sapien
gaaggcgtcgcagccctgcgagctc

SEQ ID NO: 707047 - DNA, 25 bp, Homo sapien
tctgatgaatgcctgcagcggctgg

SEQ ID NO: 707048 - DNA, 25 bp, Homo sapien
tcttcccgtggaacctcatgagctg

SEQ ID NO: 707049 - DNA, 25 bp, Homo sapien
gaaatgcgcacttctccgagcgaga

SEQ ID NO: 707050 - DNA, 25 bp, Homo sapien
ggacgttcatctcaagcccatggcg

SEQ ID NO: 707051 - DNA, 25 bp, Homo sapien
tgacttctaccgatgctgggcactg

SEQ ID NO: 707052 - DNA, 25 bp, Homo sapien
aacagtactcggttgcgcgtggatc

SEQ ID NO: 707053 - DNA, 25 bp, Homo sapien
cagtaaaacgcagggatcacaggct

SEQ ID NO: 707054 - DNA, 25 bp, Homo sapien
aaacctaattactgggccgggcatg

SEQ ID NO: 707055 - DNA, 25 bp, Homo sapien
gtgggagaaccgcagatggagccgt

SEQ ID NO: 707056 - DNA, 25 bp, Homo sapien
cacaatgcccgtgggggtgtctcca

SEQ ID NO: 707057 - DNA, 25 bp, Homo sapien
gtgtctccagccggaccttcatggg

SEQ ID NO: 707058 - DNA, 25 bp, Homo sapien
agccgtggctggacacaatgcccgt

SEQ ID NO: 707059 - DNA, 25 bp, Homo sapien
tagccgtagggaaatgtgatcatga

SEQ ID NO: 707060 - DNA, 25 bp, Homo sapien
gagtggccactttgccgtagtcaat

SEQ ID NO: 707061 - DNA, 25 bp, Homo sapien
tgaacccgtgattgaagccggcgtg

SEQ ID NO: 707062 - DNA, 25 bp, Homo sapien
tagattctgcgcagttgaacccgtg

SEQ ID NO: 707063 - DNA, 25 bp, Homo sapien
tcctctccagtcttcgaggtaagga

SEQ ID NO: 707064 - DNA, 25 bp, Homo sapien
tctccagtcttcgaggtaaggagcg

SEQ ID NO: 707065 - DNA, 25 bp, Homo sapien
gaggtaaggagcgttctgggcaaaa

SEQ ID NO: 707066 - DNA, 25 bp, Homo sapien
cagtcttcgaggtaaggagcgttct

SEQ ID NO: 707067 - DNA, 25 bp, Homo sapien
gtcctgctgcatcacgagcagccac

SEQ ID NO: 707068 - DNA, 25 bp, Homo sapien
gctgcatcacgagcagccacatgac

SEQ ID NO: 707069 - DNA, 25 bp, Homo sapien
gcccgtcctgctgcatcacgagcag

SEQ ID NO: 707070 - DNA, 25 bp, Homo sapien
gctgcccgtcctgctgcatcacgag

SEQ ID NO: 707071 - DNA, 25 bp, Homo sapien
ctgtgagctcaggcaggcgccagcc

SEQ ID NO: 707072 - DNA, 25 bp, Homo sapien
tgtgagctcaggcaggcgccagccc

SEQ ID NO: 707073 - DNA, 25 bp, Homo sapien
agctcaggcaggcgccagccctgct

SEQ ID NO: 707074 - DNA, 25 bp, Homo sapien
tgagctcaggcaggcgccagccctg

SEQ ID NO: 707075 - DNA, 25 bp, Homo sapien
tcagagcgagtttttgcaggagccg

SEQ ID NO: 707076 - DNA, 25 bp, Homo sapien
ccgctaagagctggatgtgagcgca

SEQ ID NO: 707077 - DNA, 25 bp, Homo sapien
tgtgagcgcatctggctgatggaac

SEQ ID NO: 707078 - DNA, 25 bp, Homo sapien
tgatggaaccgtgctccagaggaag

SEQ ID NO: 707079 - DNA, 25 bp, Homo sapien
ggtatgcacgtgttccagagacaga

SEQ ID NO: 707080 - DNA, 25 bp, Homo sapien
aattcaccaggtgtgcgacgcagga

SEQ ID NO: 707081 - DNA, 25 bp, Homo sapien
tcagtgagattcgtgtgccctacaa

SEQ ID NO: 707082 - DNA, 25 bp, Homo sapien
gatatccctagacatggaaccggta

SEQ ID NO: 707083 - DNA, 25 bp, Homo sapien
caagcagacaccaaccggggcgagt

SEQ ID NO: 707084 - DNA, 25 bp, Homo sapien
ttccacccttgttcgtgtcctgtct

SEQ ID NO: 707085 - DNA, 25 bp, Homo sapien
tctcacagccatctcgaccatctgt

SEQ ID NO: 707086 - DNA, 25 bp, Homo sapien
ctgcgcggtgaccactgccaagcag

SEQ ID NO: 707087 - DNA, 25 bp, Homo sapien
ggcggttctacagccgacggtgaca

SEQ ID NO: 707088 - DNA, 25 bp, Homo sapien
tgaatgctctcgtcagctgcagcgc

SEQ ID NO: 707089 - DNA, 25 bp, Homo sapien
cattgcatggctggtgcttgccctg

SEQ ID NO: 707090 - DNA, 25 bp, Homo sapien
aaccagggcggaacattgaggacaa

SEQ ID NO: 707091 - DNA, 25 bp, Homo sapien
caagcccgtggagacctgggaccgt

SEQ ID NO: 707092 - DNA, 25 bp, Homo sapien
gtagggttgtgaatattccccacgc

SEQ ID NO: 707093 - DNA, 25 bp, Homo sapien
gaatattccccacgccatggccagg

SEQ ID NO: 707094 - DNA, 25 bp, Homo sapien
tgggaccgtgctccccatccaaggt

SEQ ID NO: 707095 - DNA, 25 bp, Homo sapien
taaggcaaatccagaaacggaggga

SEQ ID NO: 707096 - DNA, 25 bp, Homo sapien
tagaaatgccacatcgcacggaagt

SEQ ID NO: 707097 - DNA, 25 bp, Homo sapien
ccagcgactccagtgtagaaatgcc

SEQ ID NO: 707098 - DNA, 25 bp, Homo sapien
cagccttctctgagctattaaggca

SEQ ID NO: 707099 - DNA, 25 bp, Homo sapien
tcacaagcccttccctagcatggga

SEQ ID NO: 707100 - DNA, 25 bp, Homo sapien
cagcccgtgctctttaaagtgtcga

SEQ ID NO: 707101 - DNA, 25 bp, Homo sapien
aagtgtcgattctggtggaagccac

SEQ ID NO: 707102 - DNA, 25 bp, Homo sapien
gactcttcttcgtgaacaggcacca

SEQ ID NO: 707103 - DNA, 25 bp, Homo sapien
caaaaatcagacacgtatcaggtac

SEQ ID NO: 707104 - DNA, 25 bp, Homo sapien
tcaagaaagtttaccagaatcatgg

SEQ ID NO: 707105 - DNA, 25 bp, Homo sapien
gacaggagagcaaataatcaatgaa

SEQ ID NO: 707106 - DNA, 25 bp, Homo sapien
aagggttcaataagcctccagaagg

SEQ ID NO: 707107 - DNA, 25 bp, Homo sapien
tgggttcaagtgattctcctacctc

SEQ ID NO: 707108 - DNA, 25 bp, Homo sapien
gttggagcgcaatggcacaacctcg

SEQ ID NO: 707109 - DNA, 25 bp, Homo sapien
ctgcaacttctgcctcctgggttca

SEQ ID NO: 707110 - DNA, 25 bp, Homo sapien
agcgcaatggcacaacctcggttca

SEQ ID NO: 707111 - DNA, 25 bp, Homo sapien
cccccaactgccccacacatctgcc

SEQ ID NO: 707112 - DNA, 25 bp, Homo sapien
ccccaactgccccacacatctgccc

SEQ ID NO: 707113 - DNA, 25 bp, Homo sapien
tggcccgtcagctggtgcccaaaca

SEQ ID NO: 707114 - DNA, 25 bp, Homo sapien
tggctggcccgtcagctggtgccca

SEQ ID NO: 707115 - DNA, 25 bp, Homo sapien
gctggcccgtcagctggtgcccaaa

SEQ ID NO: 707116 - DNA, 25 bp, Homo sapien
ctggctggcccgtcagctggtgccc

SEQ ID NO: 707117 - DNA, 25 bp, Homo sapien
tgccgcttgccagcgaatcagcaga

SEQ ID NO: 707118 - DNA, 25 bp, Homo sapien
tgctcctgcacgcaggagacacgcg

SEQ ID NO: 707119 - DNA, 25 bp, Homo sapien
ggcctggacagtgccgcttgccagc

SEQ ID NO: 707120 - DNA, 25 bp, Homo sapien
tcctgcacgcaggagacacgcgctg

SEQ ID NO: 707121 - DNA, 25 bp, Homo sapien
actgccacggcctggagcacggcct

SEQ ID NO: 707122 - DNA, 25 bp, Homo sapien
gagcattcctgcaagtctccacgtg

SEQ ID NO: 707123 - DNA, 25 bp, Homo sapien
agacacgctccacggagtgcactgc

SEQ ID NO: 707124 - DNA, 25 bp, Homo sapien
gggctggcacggctccagatgcatc

SEQ ID NO: 707125 - DNA, 25 bp, Homo sapien
cctggtttgcctccacggagttgga

SEQ ID NO: 707126 - DNA, 25 bp, Homo sapien
cactgagcaaacacccaagagaaat

SEQ ID NO: 707127 - DNA, 25 bp, Homo sapien
ggttcagatgcctcctgttggtcca

SEQ ID NO: 707128 - DNA, 25 bp, Homo sapien
tctatcacaagtcaggaaacggcat

SEQ ID NO: 707129 - DNA, 25 bp, Homo sapien
gaacacgtccatggagatcttgacc

SEQ ID NO: 707130 - DNA, 25 bp, Homo sapien
gcttggccttcagcgaggcccggga

SEQ ID NO: 707131 - DNA, 25 bp, Homo sapien
tgaccatgtccttccggcacgtgca

SEQ ID NO: 707132 - DNA, 25 bp, Homo sapien
tgggccgcgtgtggtccagcaccgt

SEQ ID NO: 707133 - DNA, 25 bp, Homo sapien
ctgggagggtctgtgcggcgatacg

SEQ ID NO: 707134 - DNA, 25 bp, Homo sapien
tggatctcctcctaggccgggacct

SEQ ID NO: 707135 - DNA, 25 bp, Homo sapien
tctgtgcggcgatacgcagggaggg

SEQ ID NO: 707136 - DNA, 25 bp, Homo sapien
tcactctgggcatgaagtggatctc

SEQ ID NO: 707137 - DNA, 25 bp, Homo sapien
tcgagacgtcgagacacaggaggcc

SEQ ID NO: 707138 - DNA, 25 bp, Homo sapien
catctgcaagggtcttgagttgcca

SEQ ID NO: 707139 - DNA, 25 bp, Homo sapien
ttgccatgcggagtcgagacgtcga

SEQ ID NO: 707140 - DNA, 25 bp, Homo sapien
tcttgagttgccatgcggagtcgag

SEQ ID NO: 707141 - DNA, 25 bp, Homo sapien
gtaaacaaagcttcacggacacagc

SEQ ID NO: 707142 - DNA, 25 bp, Homo sapien
ttcagaaaccagttccaaggcctgt

SEQ ID NO: 707143 - DNA, 25 bp, Homo sapien
ggtacgacccacaagctaggaacag

SEQ ID NO: 707144 - DNA, 25 bp, Homo sapien
tgttgaaaaagaaggcgcccattta

SEQ ID NO: 707145 - DNA, 25 bp, Homo sapien
tctgttgaccaattagcctgagcca

SEQ ID NO: 707146 - DNA, 25 bp, Homo sapien
caaagaaggttccaagcagcggtga

SEQ ID NO: 707147 - DNA, 25 bp, Homo sapien
gaacattctccgagagaggccgcga

SEQ ID NO: 707148 - DNA, 25 bp, Homo sapien
aaatagcacgtctggctgggcctgg

SEQ ID NO: 707149 - DNA, 25 bp, Homo sapien
tgcctttgtcatgggagcgcagcct

SEQ ID NO: 707150 - DNA, 25 bp, Homo sapien
gactttaggagagccccagtatcag

SEQ ID NO: 707151 - DNA, 25 bp, Homo sapien
ttttccataatgcaaagtcccggcc

SEQ ID NO: 707152 - DNA, 25 bp, Homo sapien
gctgcagttttaggcgacccatcca

SEQ ID NO: 707153 - DNA, 25 bp, Homo sapien
cacgtttacgcttttatgccccata

SEQ ID NO: 707154 - DNA, 25 bp, Homo sapien
tacatccttgtttagctggagcaca

SEQ ID NO: 707155 - DNA, 25 bp, Homo sapien
ggcctcctgctttggacgcctagct

SEQ ID NO: 707156 - DNA, 25 bp, Homo sapien
tagggctcaatgcacagacacagca

SEQ ID NO: 707157 - DNA, 25 bp, Homo sapien
tcctttctagacttggtttcctctc

SEQ ID NO: 707158 - DNA, 25 bp, Homo sapien
cttcgggcttcggcttcttgggctg

SEQ ID NO: 707159 - DNA, 25 bp, Homo sapien
cttgggctggctccgtttccggtga

SEQ ID NO: 707160 - DNA, 25 bp, Homo sapien
gggctggctccgtttccggtgagac

SEQ ID NO: 707161 - DNA, 25 bp, Homo sapien
gtcttcgggcttcggcttcttgggc

SEQ ID NO: 707162 - DNA, 25 bp, Homo sapien
gcctcccggccgtgtggcagtggct

SEQ ID NO: 707163 - DNA, 25 bp, Homo sapien
ggcctcccggccgtgtggcagtggc

SEQ ID NO: 707164 - DNA, 25 bp, Homo sapien
ctcggcctcccggccgtgtggcagt

SEQ ID NO: 707165 - DNA, 25 bp, Homo sapien
cgccctcggcctcccggccgtgtgg

SEQ ID NO: 707166 - DNA, 25 bp, Homo sapien
tcgtgcccctgactgtgaacatgca

SEQ ID NO: 707167 - DNA, 25 bp, Homo sapien
cattcaaggaggaccagaaaccgct

SEQ ID NO: 707168 - DNA, 25 bp, Homo sapien
tgaaaggtgcctcagcgtcatagct

SEQ ID NO: 707169 - DNA, 25 bp, Homo sapien
taggaaatctttcccgcagcactgt

SEQ ID NO: 707170 - DNA, 25 bp, Homo sapien
gtgggggcagcaggccgaagctctt

SEQ ID NO: 707171 - DNA, 25 bp, Homo sapien
ttggccttggttggccgcagcttgc

SEQ ID NO: 707172 - DNA, 25 bp, Homo sapien
cttcttcttccgctcgctcttggcc

SEQ ID NO: 707173 - DNA, 25 bp, Homo sapien
gcacgacattaaggggtgccggcag

SEQ ID NO: 707174 - DNA, 25 bp, Homo sapien
agcatggggatgatgggccgaggct

SEQ ID NO: 707175 - DNA, 25 bp, Homo sapien
gcatggggatgatgggccgaggctt

SEQ ID NO: 707176 - DNA, 25 bp, Homo sapien
tgctggcaggacacgtgctcctggt

SEQ ID NO: 707177 - DNA, 25 bp, Homo sapien
cttccaggtcggacccttctgggca

SEQ ID NO: 707178 - DNA, 25 bp, Homo sapien
cgtcagctccatgggggaaactggt

SEQ ID NO: 707179 - DNA, 25 bp, Homo sapien
tgggcaaagtgctcaaaggcctgct

SEQ ID NO: 707180 - DNA, 25 bp, Homo sapien
cggcccgggctttggtctccatgcg

SEQ ID NO: 707181 - DNA, 25 bp, Homo sapien
tccggcccgggctttggtctccatg

SEQ ID NO: 707182 - DNA, 25 bp, Homo sapien
gcccgggctttggtctccatgcgac

SEQ ID NO: 707183 - DNA, 25 bp, Homo sapien
tctccggcccgggctttggtctcca

SEQ ID NO: 707184 - DNA, 25 bp, Homo sapien
tggcgccggctcttcttgatctcca

SEQ ID NO: 707185 - DNA, 25 bp, Homo sapien
gccggctcttcttgatctccatctt

SEQ ID NO: 707186 - DNA, 25 bp, Homo sapien
tcctgcttcaccaccgacagtgggg

SEQ ID NO: 707187 - DNA, 25 bp, Homo sapien
cttcaccaccgacagtggggaccgg

SEQ ID NO: 707188 - DNA, 25 bp, Homo sapien
cctgttcccattgaactctaatggc

SEQ ID NO: 707189 - DNA, 25 bp, Homo sapien
tcctgtggcccaatcctcagcccaa

SEQ ID NO: 707190 - DNA, 25 bp, Homo sapien
ttgcctgttcccattgaactctaat

SEQ ID NO: 707191 - DNA, 25 bp, Homo sapien
aatggcctccattgccagctgccgc

SEQ ID NO: 707192 - DNA, 25 bp, Homo sapien
tagaagagcgtgcagatggcgcagt

SEQ ID NO: 707193 - DNA, 25 bp, Homo sapien
aaggcgtccgggtcactcacatctt

SEQ ID NO: 707194 - DNA, 25 bp, Homo sapien
gcagagacagcagcggcctcaaggc

SEQ ID NO: 707195 - DNA, 25 bp, Homo sapien
gcgttgaacttcctctcggcctgga

SEQ ID NO: 707196 - DNA, 25 bp, Homo sapien
ggagggtaatgtggccgggcagccc

SEQ ID NO: 707197 - DNA, 25 bp, Homo sapien
gagggaggctatgggtgcctccttc

SEQ ID NO: 707198 - DNA, 25 bp, Homo sapien
atgtggccgggcagccctttccgag

SEQ ID NO: 707199 - DNA, 25 bp, Homo sapien
ctttccgagggaggctatgggtgcc

SEQ ID NO: 707200 - DNA, 25 bp, Homo sapien
catctcagggatgagcggtcgggtc

SEQ ID NO: 707201 - DNA, 25 bp, Homo sapien
cccgtcgtcgccgatgtaggagttg

SEQ ID NO: 707202 - DNA, 25 bp, Homo sapien
agcggctccgtgttctcaccgccag

SEQ ID NO: 707203 - DNA, 25 bp, Homo sapien
gcacttgccgcaggcgatcaggggg

SEQ ID NO: 707204 - DNA, 25 bp, Homo sapien
agctcgggacggatgccatagcaac

SEQ ID NO: 707205 - DNA, 25 bp, Homo sapien
cttcattgaccagctcgggacggat

SEQ ID NO: 707206 - DNA, 25 bp, Homo sapien
tccagccttcattgaccagctcggg

SEQ ID NO: 707207 - DNA, 25 bp, Homo sapien
aacacgtccagccttcattgaccag

SEQ ID NO: 707208 - DNA, 25 bp, Homo sapien
cgcagtccaggcgtgggccgcgcac

SEQ ID NO: 707209 - DNA, 25 bp, Homo sapien
gtggtcatctgcagcgcacctcctc

SEQ ID NO: 707210 - DNA, 25 bp, Homo sapien
ctcctcgcaggttgcacaggcagca

SEQ ID NO: 707211 - DNA, 25 bp, Homo sapien
ctcctatcggtggtcatctgcagcg

SEQ ID NO: 707212 - DNA, 25 bp, Homo sapien
ctcgcaggttgcacaggcagcactc

SEQ ID NO: 707213 - DNA, 25 bp, Homo sapien
ggactgcgatggcacagatcacgtg

SEQ ID NO: 707214 - DNA, 25 bp, Homo sapien
cgctgatgtccacagggtggcgctc

SEQ ID NO: 707215 - DNA, 25 bp, Homo sapien
cagggtggcgctcaatcacgttcag

SEQ ID NO: 707216 - DNA, 25 bp, Homo sapien
tcaatcacgttcaggaagcgcgcct

SEQ ID NO: 707217 - DNA, 25 bp, Homo sapien
agaccgcttcagatcgcgcaggtgg

SEQ ID NO: 707218 - DNA, 25 bp, Homo sapien
acccccatggagacgcagagcttgg

SEQ ID NO: 707219 - DNA, 25 bp, Homo sapien
cagagcttggaggaaagaccgcttc

SEQ ID NO: 707220 - DNA, 25 bp, Homo sapien
gaggaaagaccgcttcagatcgcgc

SEQ ID NO: 707221 - DNA, 25 bp, Homo sapien
gatttaaagggccagctgagtgtca

SEQ ID NO: 707222 - DNA, 25 bp, Homo sapien
tgcacagggacaaatgcgtcctccc

SEQ ID NO: 707223 - DNA, 25 bp, Homo sapien
gccccaagtgccttgtgcgcaggtg

SEQ ID NO: 707224 - DNA, 25 bp, Homo sapien
tcccgccatgcagagctaagttttg

SEQ ID NO: 707225 - DNA, 25 bp, Homo sapien
ggctttgtggccggcatcagtccca

SEQ ID NO: 707226 - DNA, 25 bp, Homo sapien
cctgccagactgatctgtctgcttc

SEQ ID NO: 707227 - DNA, 25 bp, Homo sapien
acctccacgcaagcctgaatgtcaa

SEQ ID NO: 707228 - DNA, 25 bp, Homo sapien
gtcaacaccaggcactgtgtccgcg

SEQ ID NO: 707229 - DNA, 25 bp, Homo sapien
tgtggactgagtcactggtgcctcg

SEQ ID NO: 707230 - DNA, 25 bp, Homo sapien
gcgtcgggcaggaggacttatcact

SEQ ID NO: 707231 - DNA, 25 bp, Homo sapien
cagatgatccataaggcgtcgggca

SEQ ID NO: 707232 - DNA, 25 bp, Homo sapien
aatcatgaggccttttacgcccacg

SEQ ID NO: 707233 - DNA, 25 bp, Homo sapien
catcgttacaagcaccggtaatgaa

SEQ ID NO: 707234 - DNA, 25 bp, Homo sapien
ttttaattcatcgttacaagcaccg

SEQ ID NO: 707235 - DNA, 25 bp, Homo sapien
tacaagcaccggtaatgaagaggct

SEQ ID NO: 707236 - DNA, 25 bp, Homo sapien
gcaccggtaatgaagaggctgcgtt

SEQ ID NO: 707237 - DNA, 25 bp, Homo sapien
ttgggcgagcaggaattaaccgccg

SEQ ID NO: 707238 - DNA, 25 bp, Homo sapien
tgagaacgtggtgataacttggccc

SEQ ID NO: 707239 - DNA, 25 bp, Homo sapien
cccagccggtaggtgagaagcttct

SEQ ID NO: 707240 - DNA, 25 bp, Homo sapien
caaactgacggatgggtaaccagga

SEQ ID NO: 707241 - DNA, 25 bp, Homo sapien
ccaggcactggtgtttggttcgaag

SEQ ID NO: 707242 - DNA, 25 bp, Homo sapien
tttgaagacccacatccagtgctgg

SEQ ID NO: 707243 - DNA, 25 bp, Homo sapien
ctgtgaggacgacgcgggtgggctt

SEQ ID NO: 707244 - DNA, 25 bp, Homo sapien
ctgggagccgcagtttgaagaccca

SEQ ID NO: 707245 - DNA, 25 bp, Homo sapien
gttgctgagccgtcttgaacacgtc

SEQ ID NO: 707246 - DNA, 25 bp, Homo sapien
cgttcaaaagccagataagccaagg

SEQ ID NO: 707247 - DNA, 25 bp, Homo sapien
gatcgacggcatcgagatctcgtta

SEQ ID NO: 707248 - DNA, 25 bp, Homo sapien
cctccggcagagtagccagtgtgta

SEQ ID NO: 707249 - DNA, 25 bp, Homo sapien
tggagcacacggcgcgatcatagct

SEQ ID NO: 707250 - DNA, 25 bp, Homo sapien
ctggagcacacggcgcgatcatagc

SEQ ID NO: 707251 - DNA, 25 bp, Homo sapien
agaggaaccacgtggcgacagagat

SEQ ID NO: 707252 - DNA, 25 bp, Homo sapien
aaccacgtggcgacagagatgtgcc

SEQ ID NO: 707253 - DNA, 25 bp, Homo sapien
cagccagaggaaccacgtggcgaca

SEQ ID NO: 707254 - DNA, 25 bp, Homo sapien
gaaccacgtggcgacagagatgtgc

SEQ ID NO: 707255 - DNA, 25 bp, Homo sapien
tgatggagaccacatagggccagtc

SEQ ID NO: 707256 - DNA, 25 bp, Homo sapien
gctccatgagcacgcctgcggcgtg

SEQ ID NO: 707257 - DNA, 25 bp, Homo sapien
tccgcttccggcagtacacgcattt

SEQ ID NO: 707258 - DNA, 25 bp, Homo sapien
agcagtgctcgtaggagcactggat

SEQ ID NO: 707259 - DNA, 25 bp, Homo sapien
caccgatgacgcgacagcggtagta

SEQ ID NO: 707260 - DNA, 25 bp, Homo sapien
tctcagggtacaggttgtcgctgta

SEQ ID NO: 707261 - DNA, 25 bp, Homo sapien
aagttcacttcgtagcaggtctgcg

SEQ ID NO: 707262 - DNA, 25 bp, Homo sapien
tgtaggagccatcgtcgaagttcac

SEQ ID NO: 707263 - DNA, 25 bp, Homo sapien
tctcagggtacaggttgtcgctgtg

SEQ ID NO: 707264 - DNA, 25 bp, Homo sapien
gccttgtagaggttgccgtcagtcc

SEQ ID NO: 707265 - DNA, 25 bp, Homo sapien
ggtagatgtggctggtgacggagga

SEQ ID NO: 707266 - DNA, 25 bp, Homo sapien
aggttgccgtcagtccaccggagct

SEQ ID NO: 707267 - DNA, 25 bp, Homo sapien
gtagaggttgccgtcagtccaccgg

SEQ ID NO: 707268 - DNA, 25 bp, Homo sapien
tctggagattggtggtagctcccac

SEQ ID NO: 707269 - DNA, 25 bp, Homo sapien
gcctaacacaatcaggaagtccaag

SEQ ID NO: 707270 - DNA, 25 bp, Homo sapien
gaccttgcccttggtctaagcctaa

SEQ ID NO: 707271 - DNA, 25 bp, Homo sapien
ggaagaccctgcaaggtccgagagt

SEQ ID NO: 707272 - DNA, 25 bp, Homo sapien
ctgcgtcagcgcctcttctgtggga

SEQ ID NO: 707273 - DNA, 25 bp, Homo sapien
gggatgttgtcaagacccaccctga

SEQ ID NO: 707274 - DNA, 25 bp, Homo sapien
gcttccttgaggtgagctcccctga

SEQ ID NO: 707275 - DNA, 25 bp, Homo sapien
ggctctggtgacatgacaatgatcc

SEQ ID NO: 707276 - DNA, 25 bp, Homo sapien
tgttccaagtgttccggacaggcgg

SEQ ID NO: 707277 - DNA, 25 bp, Homo sapien
ggtcacgtgcgagggaaacatgttc

SEQ ID NO: 707278 - DNA, 25 bp, Homo sapien
tgattgtgtgatcgaggtcctgccg

SEQ ID NO: 707279 - DNA, 25 bp, Homo sapien
ctacaggaaatcagaggcgtgcgcc

SEQ ID NO: 707280 - DNA, 25 bp, Homo sapien
gggatgtggctctcaggggcctggc

SEQ ID NO: 707281 - DNA, 25 bp, Homo sapien
ggatgtggctctcaggggcctggca

SEQ ID NO: 707282 - DNA, 25 bp, Homo sapien
ctgcagggggatgtggctctcaggg

SEQ ID NO: 707283 - DNA, 25 bp, Homo sapien
agggggatgtggctctcaggggcct

SEQ ID NO: 707284 - DNA, 25 bp, Homo sapien
tgaagatgtccccacgcttcaccgt

SEQ ID NO: 707285 - DNA, 25 bp, Homo sapien
cagccgagagcggaccctcttgggc

SEQ ID NO: 707286 - DNA, 25 bp, Homo sapien
gtcagctgggacccgtcctcaaact

SEQ ID NO: 707287 - DNA, 25 bp, Homo sapien
gagcggaccctcttgggcagctcct

SEQ ID NO: 707288 - DNA, 25 bp, Homo sapien
ggctgggaccgtccatctggcagct

SEQ ID NO: 707289 - DNA, 25 bp, Homo sapien
catctgttttccgagggacccctct

SEQ ID NO: 707290 - DNA, 25 bp, Homo sapien
gtttgtaaacccctgatcctgccag

SEQ ID NO: 707291 - DNA, 25 bp, Homo sapien
agagcggaagcacagtggttagcac

SEQ ID NO: 707292 - DNA, 25 bp, Homo sapien
tggctccgcccggagtcctccgtgg

SEQ ID NO: 707293 - DNA, 25 bp, Homo sapien
tggcaagcggggtgcccacacgcgg

SEQ ID NO: 707294 - DNA, 25 bp, Homo sapien
acacgcgggcgcttggcggccttgg

SEQ ID NO: 707295 - DNA, 25 bp, Homo sapien
gcccggagtcctccgtggcaagcgg

SEQ ID NO: 707296 - DNA, 25 bp, Homo sapien
cagcgtatccttcatctcgggtggg

SEQ ID NO: 707297 - DNA, 25 bp, Homo sapien
aatgaaaggcttgctcctgcgtaac

SEQ ID NO: 707298 - DNA, 25 bp, Homo sapien
gaggacaggaattcacagcaagcga

SEQ ID NO: 707299 - DNA, 25 bp, Homo sapien
tcagtagggcattgcagtagcacct

SEQ ID NO: 707300 - DNA, 25 bp, Homo sapien
tttaattcattatgaacctagaggc

SEQ ID NO: 707301 - DNA, 25 bp, Homo sapien
tcaccacgaaggtccgcggcttcat

SEQ ID NO: 707302 - DNA, 25 bp, Homo sapien
gtcttacaagaggtttgtaaaatgc

SEQ ID NO: 707303 - DNA, 25 bp, Homo sapien
gttcttttggtcttcataataaatc

SEQ ID NO: 707304 - DNA, 25 bp, Homo sapien
tcagcaggacatgggcagggacaaa

SEQ ID NO: 707305 - DNA, 25 bp, Homo sapien
catgggctttgtggggcaagaactt

SEQ ID NO: 707306 - DNA, 25 bp, Homo sapien
gtgcaagggctcagtagcagctggc

SEQ ID NO: 707307 - DNA, 25 bp, Homo sapien
gtgtgggcttgggaaaaactagcac

SEQ ID NO: 707308 - DNA, 25 bp, Homo sapien
ggaaaaactagcacagtgcaagggc

SEQ ID NO: 707309 - DNA, 25 bp, Homo sapien
aggtatttattcaattacttatagc

SEQ ID NO: 707310 - DNA, 25 bp, Homo sapien
gggtctggtgtcctttctatatatc

SEQ ID NO: 707311 - DNA, 25 bp, Homo sapien
cactgggagctgcttcggttgggtc

SEQ ID NO: 707312 - DNA, 25 bp, Homo sapien
tattctctaggtgataatcccacac

SEQ ID NO: 707313 - DNA, 25 bp, Homo sapien
gatctgtgatataagctcggcccgt

SEQ ID NO: 707314 - DNA, 25 bp, Homo sapien
tgggctaccattgcgggagaatcag

SEQ ID NO: 707315 - DNA, 25 bp, Homo sapien
aattgcatggatgcttgggctacca

SEQ ID NO: 707316 - DNA, 25 bp, Homo sapien
gagccacagagcctagcctgatttt

SEQ ID NO: 707317 - DNA, 25 bp, Homo sapien
caaaggttggatgttctaacttaca

SEQ ID NO: 707318 - DNA, 25 bp, Homo sapien
ggatgttctaacttacagattgaga

SEQ ID NO: 707319 - DNA, 25 bp, Homo sapien
acttacagattgagataagaggttg

SEQ ID NO: 707320 - DNA, 25 bp, Homo sapien
cccagccaaaggttggatgttctaa

SEQ ID NO: 707321 - DNA, 25 bp, Homo sapien
tttattccagcggaagcagccgggt

SEQ ID NO: 707322 - DNA, 25 bp, Homo sapien
ggcaggtctgcggttactttcaaca

SEQ ID NO: 707323 - DNA, 25 bp, Homo sapien
tagttacgttcgcaaacgcgcacgc

SEQ ID NO: 707324 - DNA, 25 bp, Homo sapien
gcctaccctgagcaagcgagttgtt

SEQ ID NO: 707325 - DNA, 25 bp, Homo sapien
gataggtctagaccagattggcctg

SEQ ID NO: 707326 - DNA, 25 bp, Homo sapien
tttgaaggcagagccgacagtcccg

SEQ ID NO: 707327 - DNA, 25 bp, Homo sapien
tgcctggtcatgcaggatcctgtgg

SEQ ID NO: 707328 - DNA, 25 bp, Homo sapien
gattggcctgcatggagaacatgga

SEQ ID NO: 707329 - DNA, 25 bp, Homo sapien
tattctccttatgggttcacagcca

SEQ ID NO: 707330 - DNA, 25 bp, Homo sapien
ttcaggagcctaaagacgatgttta

SEQ ID NO: 707331 - DNA, 25 bp, Homo sapien
ggatatatccctagcaaggtacaga

SEQ ID NO: 707332 - DNA, 25 bp, Homo sapien
gttccctgtagattaaagtcacctg

SEQ ID NO: 707333 - DNA, 25 bp, Homo sapien
ccggctagttttttgtatcttgtag

SEQ ID NO: 707334 - DNA, 25 bp, Homo sapien
cttccgcctcccaggttcaagtgat

SEQ ID NO: 707335 - DNA, 25 bp, Homo sapien
gctagttttttgtatcttgtagtag

SEQ ID NO: 707336 - DNA, 25 bp, Homo sapien
ttccgcctcccaggttcaagtgatt

SEQ ID NO: 707337 - DNA, 25 bp, Homo sapien
ccagcagtgctctttgcaagttcag

SEQ ID NO: 707338 - DNA, 25 bp, Homo sapien
tcccgtatgaaaatcagaggcaggt

SEQ ID NO: 707339 - DNA, 25 bp, Homo sapien
gcttctttttccgaagggctgccag

SEQ ID NO: 707340 - DNA, 25 bp, Homo sapien
gatttccagctaggaaccgaggctg

SEQ ID NO: 707341 - DNA, 25 bp, Homo sapien
gaaagtgaccacttaggcacaaggg

SEQ ID NO: 707342 - DNA, 25 bp, Homo sapien
gttctgtggttgttctccaaacgca

SEQ ID NO: 707343 - DNA, 25 bp, Homo sapien
gaagcttaagcaggcatgttcccat

SEQ ID NO: 707344 - DNA, 25 bp, Homo sapien
tttccccagaggtagtaactcagct

SEQ ID NO: 707345 - DNA, 25 bp, Homo sapien
gccggatgaacgccttgatcctctt

SEQ ID NO: 707346 - DNA, 25 bp, Homo sapien
gtgccggatgaacgccttgatcctc

SEQ ID NO: 707347 - DNA, 25 bp, Homo sapien
cggatgaacgccttgatcctctttt

SEQ ID NO: 707348 - DNA, 25 bp, Homo sapien
tggtgccggatgaacgccttgatcc

SEQ ID NO: 707349 - DNA, 25 bp, Homo sapien
cacgttggttttgcgtttcttggag

SEQ ID NO: 707350 - DNA, 25 bp, Homo sapien
cagctgggcggccctttccacgttg

SEQ ID NO: 707351 - DNA, 25 bp, Homo sapien
caaaacatgcacacgagccgtctac

SEQ ID NO: 707352 - DNA, 25 bp, Homo sapien
ggcagctgggcggccctttccacgt

SEQ ID NO: 707353 - DNA, 25 bp, Homo sapien
gtaacattcttgacccggccacagt

SEQ ID NO: 707354 - DNA, 25 bp, Homo sapien
gccacagtgacttttcctcatgtcc

SEQ ID NO: 707355 - DNA, 25 bp, Homo sapien
ctgaggacgcatggccccgggtcac

SEQ ID NO: 707356 - DNA, 25 bp, Homo sapien
cagaagtaacattcttgacccggcc

SEQ ID NO: 707357 - DNA, 25 bp, Homo sapien
cagctccagagggagggatttttac

SEQ ID NO: 707358 - DNA, 25 bp, Homo sapien
tccagcagctccagagggagggatt

SEQ ID NO: 707359 - DNA, 25 bp, Homo sapien
agcagctccagagggagggattttt

SEQ ID NO: 707360 - DNA, 25 bp, Homo sapien
cctcagccagcttctgcccttcctt

SEQ ID NO: 707361 - DNA, 25 bp, Homo sapien
tgcaggggtctgcgtgtttgtttac

SEQ ID NO: 707362 - DNA, 25 bp, Homo sapien
ctgtgcagcagaaggtaagaagccg

SEQ ID NO: 707363 - DNA, 25 bp, Homo sapien
cagcagaaggtaagaagccggcacg

SEQ ID NO: 707364 - DNA, 25 bp, Homo sapien
taagaagccggcacgggatgtgcag

SEQ ID NO: 707365 - DNA, 25 bp, Homo sapien
ggttggtcccatgggcctccttgtg

SEQ ID NO: 707366 - DNA, 25 bp, Homo sapien
ttggtcccatgggcctccttgtggt

SEQ ID NO: 707367 - DNA, 25 bp, Homo sapien
ctgtggttggtcccatgggcctcct

SEQ ID NO: 707368 - DNA, 25 bp, Homo sapien
tgtggttggtcccatgggcctcctt

SEQ ID NO: 707369 - DNA, 25 bp, Homo sapien
tccagtcctggaaatgacgttccag

SEQ ID NO: 707370 - DNA, 25 bp, Homo sapien
acgttccaggcggtggcacgggaga

SEQ ID NO: 707371 - DNA, 25 bp, Homo sapien
gatgtgggagtgacccaggtgtcca

SEQ ID NO: 707372 - DNA, 25 bp, Homo sapien
gaggccagggtccagtcctggaaat

SEQ ID NO: 707373 - DNA, 25 bp, Homo sapien
ccccagtgagggaggcatttattcg

SEQ ID NO: 707374 - DNA, 25 bp, Homo sapien
ccgtgggagcggaattgtttctgct

SEQ ID NO: 707375 - DNA, 25 bp, Homo sapien
gccccactgagtaatggcttctaga

SEQ ID NO: 707376 - DNA, 25 bp, Homo sapien
gatggccctgtacctagataaaccc

SEQ ID NO: 707377 - DNA, 25 bp, Homo sapien
cctcttttctgtacatccccaaatg

SEQ ID NO: 707378 - DNA, 25 bp, Homo sapien
catccccaaatgagccgtttagaaa

SEQ ID NO: 707379 - DNA, 25 bp, Homo sapien
tattgggtctgcctagaatgtgcct

SEQ ID NO: 707380 - DNA, 25 bp, Homo sapien
gcagctgagcatgtctgtgagtacc

SEQ ID NO: 707381 - DNA, 25 bp, Homo sapien
tcacacattttccaggaaggggaag

SEQ ID NO: 707382 - DNA, 25 bp, Homo sapien
tccaggaaggggaaggtagcctggc

SEQ ID NO: 707383 - DNA, 25 bp, Homo sapien
cacacattttccaggaaggggaagg

SEQ ID NO: 707384 - DNA, 25 bp, Homo sapien
acacatcacacggagacaggtaggg

SEQ ID NO: 707385 - DNA, 25 bp, Homo sapien
gacatttcccgtcctcttgataaac

SEQ ID NO: 707386 - DNA, 25 bp, Homo sapien
gaggtccccgttgactctggctcag

SEQ ID NO: 707387 - DNA, 25 bp, Homo sapien
tgccgcctgcccttgatggtcgtga

SEQ ID NO: 707388 - DNA, 25 bp, Homo sapien
cccactccatctaagaagcgcccac

SEQ ID NO: 707389 - DNA, 25 bp, Homo sapien
ccactccatctaagaagcgcccaca

SEQ ID NO: 707390 - DNA, 25 bp, Homo sapien
ccccactccatctaagaagcgccca

SEQ ID NO: 707391 - DNA, 25 bp, Homo sapien
cactccatctaagaagcgcccacac

SEQ ID NO: 707392 - DNA, 25 bp, Homo sapien
gatgtctcgaatcttcagctctctg

SEQ ID NO: 707393 - DNA, 25 bp, Homo sapien
gcagggataacctgtgatgtctcga

SEQ ID NO: 707394 - DNA, 25 bp, Homo sapien
ctctgccctggctactaacaaggct

SEQ ID NO: 707395 - DNA, 25 bp, Homo sapien
agctctctgccctggctactaacaa

SEQ ID NO: 707396 - DNA, 25 bp, Homo sapien
gtttgaggttcatctgaagcccctg

SEQ ID NO: 707397 - DNA, 25 bp, Homo sapien
ccctgatctaagcccctgatctgaa

SEQ ID NO: 707398 - DNA, 25 bp, Homo sapien
gaagcccctgatctaagcccctgat

SEQ ID NO: 707399 - DNA, 25 bp, Homo sapien
tttgaggttcatctgaagcccctga

SEQ ID NO: 707400 - DNA, 25 bp, Homo sapien
aatctgaatgacgccatgtgggtgt

SEQ ID NO: 707401 - DNA, 25 bp, Homo sapien
caaatctgaatgacgccatgtgggt

SEQ ID NO: 707402 - DNA, 25 bp, Homo sapien
aaatctgaatgacgccatgtgggtg

SEQ ID NO: 707403 - DNA, 25 bp, Homo sapien
ccaaatctgaatgacgccatgtggg

SEQ ID NO: 707404 - DNA, 25 bp, Homo sapien
gcgtggaggcttccgccgtcagcct

SEQ ID NO: 707405 - DNA, 25 bp, Homo sapien
gctgtgtcacaacaggtgttgagcc

SEQ ID NO: 707406 - DNA, 25 bp, Homo sapien
ttgagccgccggatggcagagggca

SEQ ID NO: 707407 - DNA, 25 bp, Homo sapien
aggccccggctggagtaggcgtgga

SEQ ID NO: 707408 - DNA, 25 bp, Homo sapien
tcctccattgcaaccatcagatctg

SEQ ID NO: 707409 - DNA, 25 bp, Homo sapien
tccattgcaaccatcagatctggcc

SEQ ID NO: 707410 - DNA, 25 bp, Homo sapien
attgcaaccatcagatctggccctg

SEQ ID NO: 707411 - DNA, 25 bp, Homo sapien
cattgcaaccatcagatctggccct

SEQ ID NO: 707412 - DNA, 25 bp, Homo sapien
gccctctggaagcaaggtcgcagga

SEQ ID NO: 707413 - DNA, 25 bp, Homo sapien
aaatacagcttgatgatcagtgccc

SEQ ID NO: 707414 - DNA, 25 bp, Homo sapien
tattgagttgcgcttggagtgtgcc

SEQ ID NO: 707415 - DNA, 25 bp, Homo sapien
caaggtcgcaggacctgcatatggg

SEQ ID NO: 707416 - DNA, 25 bp, Homo sapien
gatcatggggactccctcctccggt

SEQ ID NO: 707417 - DNA, 25 bp, Homo sapien
tttttggatcatggggactccctcc

SEQ ID NO: 707418 - DNA, 25 bp, Homo sapien
gggttcagagcctggatttttggat

SEQ ID NO: 707419 - DNA, 25 bp, Homo sapien
tcagagcctggatttttggatcatg

SEQ ID NO: 707420 - DNA, 25 bp, Homo sapien
gaaggggattgaggctcaaatgcat

SEQ ID NO: 707421 - DNA, 25 bp, Homo sapien
tgctctggaatcggaaagctgccag

SEQ ID NO: 707422 - DNA, 25 bp, Homo sapien
ttgctctggaatcggaaagctgcca

SEQ ID NO: 707423 - DNA, 25 bp, Homo sapien
gctctggaatcggaaagctgccagc

SEQ ID NO: 707424 - DNA, 25 bp, Homo sapien
gagaacccttctcgggcaaagcctg

SEQ ID NO: 707425 - DNA, 25 bp, Homo sapien
ccttctcgggcaaagcctgtgcagg

SEQ ID NO: 707426 - DNA, 25 bp, Homo sapien
atgagaacccttctcgggcaaagcc

SEQ ID NO: 707427 - DNA, 25 bp, Homo sapien
gtgcaggttgcccttcctccgtcct

SEQ ID NO: 707428 - DNA, 25 bp, Homo sapien
tcctctgcatccagggtaggctcct

SEQ ID NO: 707429 - DNA, 25 bp, Homo sapien
ctgtagcccccttctgggagggtct

SEQ ID NO: 707430 - DNA, 25 bp, Homo sapien
tgtagcccccttctgggagggtctc

SEQ ID NO: 707431 - DNA, 25 bp, Homo sapien
cgctgtagcccccttctgggagggt

SEQ ID NO: 707432 - DNA, 25 bp, Homo sapien
gctgtagcccccttctgggagggtc

SEQ ID NO: 707433 - DNA, 25 bp, Homo sapien
ctccatttgcagagtcggtcggagc

SEQ ID NO: 707434 - DNA, 25 bp, Homo sapien
cgggaagatcttgagatgagcttta

SEQ ID NO: 707435 - DNA, 25 bp, Homo sapien
ccatttgcagagtcggtcggagcca

SEQ ID NO: 707436 - DNA, 25 bp, Homo sapien
gagccacgggaagatcttgagatga

SEQ ID NO: 707437 - DNA, 25 bp, Homo sapien
gctactggttggcaggtcagctccg

SEQ ID NO: 707438 - DNA, 25 bp, Homo sapien
ctccaggaaaccttgagagcctctg

SEQ ID NO: 707439 - DNA, 25 bp, Homo sapien
tgacaggtcattttggcgtggcccg

SEQ ID NO: 707440 - DNA, 25 bp, Homo sapien
gtcagtggccgtccagagatgccgt

SEQ ID NO: 707441 - DNA, 25 bp, Homo sapien
tagtgaagcgggtgtccgaggtgtc

SEQ ID NO: 707442 - DNA, 25 bp, Homo sapien
cggcagccgcggctagtgaagcggg

SEQ ID NO: 707443 - DNA, 25 bp, Homo sapien
cctaaaaacacatcccggcagccgc

SEQ ID NO: 707444 - DNA, 25 bp, Homo sapien
aggtgtcggagtcccggctgagcag

SEQ ID NO: 707445 - DNA, 25 bp, Homo sapien
cgtcacaatctaggggagccccctt

SEQ ID NO: 707446 - DNA, 25 bp, Homo sapien
ccgtcacaatctaggggagccccct

SEQ ID NO: 707447 - DNA, 25 bp, Homo sapien
ctgtccccccccgtcacaatctagg

SEQ ID NO: 707448 - DNA, 25 bp, Homo sapien
cctgtccccccccgtcacaatctag

SEQ ID NO: 707449 - DNA, 25 bp, Homo sapien
ctctggcaggcagacgcgcacgccc

SEQ ID NO: 707450 - DNA, 25 bp, Homo sapien
tggggatcccgagagtggggaagcc

SEQ ID NO: 707451 - DNA, 25 bp, Homo sapien
ctggcaggcagacgcgcacgcccag

SEQ ID NO: 707452 - DNA, 25 bp, Homo sapien
gagagtggggaagccgcccctggaa

SEQ ID NO: 707453 - DNA, 25 bp, Homo sapien
tgcgcccggacaatgccccgaggga

SEQ ID NO: 707454 - DNA, 25 bp, Homo sapien
aaaaaaaatgcaggcgctccaaggg

SEQ ID NO: 707455 - DNA, 25 bp, Homo sapien
agcctgcacggccattgtgctcgga

SEQ ID NO: 707456 - DNA, 25 bp, Homo sapien
gatgctcggctgcagccagttgcac

SEQ ID NO: 707457 - DNA, 25 bp, Homo sapien
gccagcctccaggtaaagccaaaaa

SEQ ID NO: 707458 - DNA, 25 bp, Homo sapien
agcgcgagccgcagtgagtgtcctc

SEQ ID NO: 707459 - DNA, 25 bp, Homo sapien
gggctccgctcggatcccatgcaac

SEQ ID NO: 707460 - DNA, 25 bp, Homo sapien
tgcaacagccacgatgtgaagcggg

SEQ ID NO: 707461 - DNA, 25 bp, Homo sapien
cgctggcggaagggatgacgtcacc

SEQ ID NO: 707462 - DNA, 25 bp, Homo sapien
gcgctggcggaagggatgacgtcac

SEQ ID NO: 707463 - DNA, 25 bp, Homo sapien
gctggcggaagggatgacgtcaccg

SEQ ID NO: 707464 - DNA, 25 bp, Homo sapien
ctggcggaagggatgacgtcaccgg

SEQ ID NO: 707465 - DNA, 25 bp, Homo sapien
gacaacggaggcctgatctgaattt

SEQ ID NO: 707466 - DNA, 25 bp, Homo sapien
ctggcaggagacaacggaggcctga

SEQ ID NO: 707467 - DNA, 25 bp, Homo sapien
cggaggcctgatctgaatttgtcat

SEQ ID NO: 707468 - DNA, 25 bp, Homo sapien
caggagacaacggaggcctgatctg

SEQ ID NO: 707469 - DNA, 25 bp, Homo sapien
ggtggagaatccaagcctttctcct

SEQ ID NO: 707470 - DNA, 25 bp, Homo sapien
tctccttgagaagggatgaaccaag

SEQ ID NO: 707471 - DNA, 25 bp, Homo sapien
caagcctttctccttgagaagggat

SEQ ID NO: 707472 - DNA, 25 bp, Homo sapien
cttgagaagggatgaaccaagaggc

SEQ ID NO: 707473 - DNA, 25 bp, Homo sapien
ggccctcattggtgcctgcaggttg

SEQ ID NO: 707474 - DNA, 25 bp, Homo sapien
gcatgtggccctcattggtgcctgc

SEQ ID NO: 707475 - DNA, 25 bp, Homo sapien
ggttaatgatgagcatgtggccctc

SEQ ID NO: 707476 - DNA, 25 bp, Homo sapien
cccatcatctgggttaatgatgagc

SEQ ID NO: 707477 - DNA, 25 bp, Homo sapien
ctgatcaggcagcagccccctgaac

SEQ ID NO: 707478 - DNA, 25 bp, Homo sapien
tcctgatcaggcagcagccccctga

SEQ ID NO: 707479 - DNA, 25 bp, Homo sapien
aatcctgatcaggcagcagccccct

SEQ ID NO: 707480 - DNA, 25 bp, Homo sapien
tcaaatcctgatcaggcagcagccc

SEQ ID NO: 707481 - DNA, 25 bp, Homo sapien
cacttccgactgcatcatcacattt

SEQ ID NO: 707482 - DNA, 25 bp, Homo sapien
cttccgactgcatcatcacattttt

SEQ ID NO: 707483 - DNA, 25 bp, Homo sapien
acacttccgactgcatcatcacatt

SEQ ID NO: 707484 - DNA, 25 bp, Homo sapien
acttccgactgcatcatcacatttt

SEQ ID NO: 707485 - DNA, 25 bp, Homo sapien
cacccaaggtcgctcaggcagggct

SEQ ID NO: 707486 - DNA, 25 bp, Homo sapien
ctcaggaaggcttgagaccagatcc

SEQ ID NO: 707487 - DNA, 25 bp, Homo sapien
gcaggacagatgatacacccaaggt

SEQ ID NO: 707488 - DNA, 25 bp, Homo sapien
tccggttcctcacagactcggcact

SEQ ID NO: 707489 - DNA, 25 bp, Homo sapien
gcaatgggctcagatctcatcactg

SEQ ID NO: 707490 - DNA, 25 bp, Homo sapien
aggttgcaatgggctcagatctcat

SEQ ID NO: 707491 - DNA, 25 bp, Homo sapien
ggttgcaatgggctcagatctcatc

SEQ ID NO: 707492 - DNA, 25 bp, Homo sapien
gttgcaatgggctcagatctcatca

SEQ ID NO: 707493 - DNA, 25 bp, Homo sapien
tggtggatcaatggttggaggtcga

SEQ ID NO: 707494 - DNA, 25 bp, Homo sapien
gatcaatggttggaggtcgaagcca

SEQ ID NO: 707495 - DNA, 25 bp, Homo sapien
atcaatggttggaggtcgaagccag

SEQ ID NO: 707496 - DNA, 25 bp, Homo sapien
tggatcaatggttggaggtcgaagc

SEQ ID NO: 707497 - DNA, 25 bp, Homo sapien
taaatcaggaagtgcatcccacaga

SEQ ID NO: 707498 - DNA, 25 bp, Homo sapien
aatcaggaagtgcatcccacagagc

SEQ ID NO: 707499 - DNA, 25 bp, Homo sapien
ctaaatcaggaagtgcatcccacag

SEQ ID NO: 707500 - DNA, 25 bp, Homo sapien
caggaagtgcatcccacagagcagc

SEQ ID NO: 707501 - DNA, 25 bp, Homo sapien
atgtgtctgcgttgggggtgcctga

SEQ ID NO: 707502 - DNA, 25 bp, Homo sapien
gagctgactgtagggccatcgatca

SEQ ID NO: 707503 - DNA, 25 bp, Homo sapien
tgactgtagggccatcgatcacccc

SEQ ID NO: 707504 - DNA, 25 bp, Homo sapien
agggccatcgatcaccccgctgtag

SEQ ID NO: 707505 - DNA, 25 bp, Homo sapien
tgtctctctccagcttccatgagtt

SEQ ID NO: 707506 - DNA, 25 bp, Homo sapien
ctcttgatctctgctgagtcttcag

SEQ ID NO: 707507 - DNA, 25 bp, Homo sapien
ttccagaagtacaggaaatattgtc

SEQ ID NO: 707508 - DNA, 25 bp, Homo sapien
ctctccagcttccatgagttccaga

SEQ ID NO: 707509 - DNA, 25 bp, Homo sapien
gagatttgccactttacccatcttt

SEQ ID NO: 707510 - DNA, 25 bp, Homo sapien
cagcatgccacccagtggtgttaag

SEQ ID NO: 707511 - DNA, 25 bp, Homo sapien
tggtgttaagcacattcagattgtc

SEQ ID NO: 707512 - DNA, 25 bp, Homo sapien
cacattcagattgtcgtgtaaccat

SEQ ID NO: 707513 - DNA, 25 bp, Homo sapien
gagttcacaagttcccatcacaagt

SEQ ID NO: 707514 - DNA, 25 bp, Homo sapien
ccacttcagacgcttggagttcaca

SEQ ID NO: 707515 - DNA, 25 bp, Homo sapien
gacgcttggagttcacaagttccca

SEQ ID NO: 707516 - DNA, 25 bp, Homo sapien
catggaacgggagaaggctgggctc

SEQ ID NO: 707517 - DNA, 25 bp, Homo sapien
tgagtttcatctgtggcagcagcat

SEQ ID NO: 707518 - DNA, 25 bp, Homo sapien
cagcaacatgcagcccagatgttcc

SEQ ID NO: 707519 - DNA, 25 bp, Homo sapien
cttccccagcatcaagtgagtttca

SEQ ID NO: 707520 - DNA, 25 bp, Homo sapien
agcagcatcgtctgggatgcctccg

SEQ ID NO: 707521 - DNA, 25 bp, Homo sapien
gccatgtcaactcagcttcaaggca

SEQ ID NO: 707522 - DNA, 25 bp, Homo sapien
ctgccatgtcaactcagcttcaagg

SEQ ID NO: 707523 - DNA, 25 bp, Homo sapien
agtcccttcatacccccagccacat

SEQ ID NO: 707524 - DNA, 25 bp, Homo sapien
aaggcagtcccttcatacccccagc

SEQ ID NO: 707525 - DNA, 25 bp, Homo sapien
gggccgagaccctgtactcaggagc

SEQ ID NO: 707526 - DNA, 25 bp, Homo sapien
accctgtactcaggagcagaggaca

SEQ ID NO: 707527 - DNA, 25 bp, Homo sapien
gctgcttcagagtaggagctgaggg

SEQ ID NO: 707528 - DNA, 25 bp, Homo sapien
gctgaggggccgagaccctgtactc

SEQ ID NO: 707529 - DNA, 25 bp, Homo sapien
ggacatcctcgaagcacccacaagt

SEQ ID NO: 707530 - DNA, 25 bp, Homo sapien
gcattcctcccacagaattccaggg

SEQ ID NO: 707531 - DNA, 25 bp, Homo sapien
agcgcgcatggtccacggacatcct

SEQ ID NO: 707532 - DNA, 25 bp, Homo sapien
tggagctgcccgagaccgcagcatt

SEQ ID NO: 707533 - DNA, 25 bp, Homo sapien
tgaaggccggtctcaggaggtgctg

SEQ ID NO: 707534 - DNA, 25 bp, Homo sapien
aggtgctggcgcaggtggcctttct

SEQ ID NO: 707535 - DNA, 25 bp, Homo sapien
cgtgtctttgaaggccggtctcagg

SEQ ID NO: 707536 - DNA, 25 bp, Homo sapien
gcgtcgtgtctttgaaggccggtct

SEQ ID NO: 707537 - DNA, 25 bp, Homo sapien
catgaggcctttgggcatctccggg

SEQ ID NO: 707538 - DNA, 25 bp, Homo sapien
ttgagttggaatgaccgcgtggctc

SEQ ID NO: 707539 - DNA, 25 bp, Homo sapien
taggcattaagtgctccggacggca

SEQ ID NO: 707540 - DNA, 25 bp, Homo sapien
tgctaggtcccactggaggcggcag

SEQ ID NO: 707541 - DNA, 25 bp, Homo sapien
ggagcagcgacaagaccagcaaggc

SEQ ID NO: 707542 - DNA, 25 bp, Homo sapien
ctggagcagcgacaagaccagcaag

SEQ ID NO: 707543 - DNA, 25 bp, Homo sapien
ttgactgccacgagggctcggcccg

SEQ ID NO: 707544 - DNA, 25 bp, Homo sapien
ctttgactgccacgagggctcggcc

SEQ ID NO: 707545 - DNA, 25 bp, Homo sapien
tggcttgacctccatcaggtagccc

SEQ ID NO: 707546 - DNA, 25 bp, Homo sapien
atggcgcccagagagcggttgccca

SEQ ID NO: 707547 - DNA, 25 bp, Homo sapien
gagctcgagttgtcttccagcacgg

SEQ ID NO: 707548 - DNA, 25 bp, Homo sapien
atggcacgcgttggctggcttgacc

SEQ ID NO: 707549 - DNA, 25 bp, Homo sapien
tcctcgtagacgtgggtcatgctca

SEQ ID NO: 707550 - DNA, 25 bp, Homo sapien
cggcctcgctcacgaacactgaggg

SEQ ID NO: 707551 - DNA, 25 bp, Homo sapien
tcatgctcacgaggtcgtcggagtg

SEQ ID NO: 707552 - DNA, 25 bp, Homo sapien
tggacgttgtgcacgatggccgcct

SEQ ID NO: 707553 - DNA, 25 bp, Homo sapien
tcaaagctgtcttctgtggcggcca

SEQ ID NO: 707554 - DNA, 25 bp, Homo sapien
caggatcttgagttggtcgccctcc

SEQ ID NO: 707555 - DNA, 25 bp, Homo sapien
cacacaggtcgttgtgccacgtgaa

SEQ ID NO: 707556 - DNA, 25 bp, Homo sapien
caaagaaggctgatacgaccagggc

SEQ ID NO: 707557 - DNA, 25 bp, Homo sapien
tccgggagcgtagctggacttgaat

SEQ ID NO: 707558 - DNA, 25 bp, Homo sapien
agcctccgggagcgtagctggactt

SEQ ID NO: 707559 - DNA, 25 bp, Homo sapien
gggactggcgcggcccagcagctcc

SEQ ID NO: 707560 - DNA, 25 bp, Homo sapien
cctccgggagcgtagctggacttga

SEQ ID NO: 707561 - DNA, 25 bp, Homo sapien
aggagacagtggtatactctgcctc

SEQ ID NO: 707562 - DNA, 25 bp, Homo sapien
gagacagtggtatactctgcctcca

SEQ ID NO: 707563 - DNA, 25 bp, Homo sapien
ggagacagtggtatactctgcctcc

SEQ ID NO: 707564 - DNA, 25 bp, Homo sapien
agacagtggtatactctgcctccag

SEQ ID NO: 707565 - DNA, 25 bp, Homo sapien
cagaccagaaacattcctcattgca

SEQ ID NO: 707566 - DNA, 25 bp, Homo sapien
gaccagaaacattcctcattgcacc

SEQ ID NO: 707567 - DNA, 25 bp, Homo sapien
cttttcagaccagaaacattcctca

SEQ ID NO: 707568 - DNA, 25 bp, Homo sapien
tttattcttttcagaccagaaacat

SEQ ID NO: 707569 - DNA, 25 bp, Homo sapien
tctcgtcggagcatggtcaaacagc

SEQ ID NO: 707570 - DNA, 25 bp, Homo sapien
gttccagggaatgtctcagaggcga

SEQ ID NO: 707571 - DNA, 25 bp, Homo sapien
cggaatcttgcacgtgactctcaca

SEQ ID NO: 707572 - DNA, 25 bp, Homo sapien
gactcaagcgatttgctaacctcag

SEQ ID NO: 707573 - DNA, 25 bp, Homo sapien
cactactggggccaagatgctgtca

SEQ ID NO: 707574 - DNA, 25 bp, Homo sapien
gccactggcttgggttgcactactg

SEQ ID NO: 707575 - DNA, 25 bp, Homo sapien
catcactcagacctggcatgggagg

SEQ ID NO: 707576 - DNA, 25 bp, Homo sapien
cactggcttgggttgcactactggg

SEQ ID NO: 707577 - DNA, 25 bp, Homo sapien
gaaatgaccagaaacccgtcactgg

SEQ ID NO: 707578 - DNA, 25 bp, Homo sapien
agagagatgcgtccagcagccttca

SEQ ID NO: 707579 - DNA, 25 bp, Homo sapien
tagcggacgaggactcacatcctgg

SEQ ID NO: 707580 - DNA, 25 bp, Homo sapien
aagcatccacaccagaacgtcaagg

SEQ ID NO: 707581 - DNA, 25 bp, Homo sapien
ccttctgactgcagagagagcgaga

SEQ ID NO: 707582 - DNA, 25 bp, Homo sapien
aaagctggaggaattgtattttgcc

SEQ ID NO: 707583 - DNA, 25 bp, Homo sapien
catctctggcgagtgttgacgggca

SEQ ID NO: 707584 - DNA, 25 bp, Homo sapien
gccaaaagtgtcagccggagagaaa

SEQ ID NO: 707585 - DNA, 25 bp, Homo sapien
gtccccaagcctgttggatccagac

SEQ ID NO: 707586 - DNA, 25 bp, Homo sapien
ccccaagcctgttggatccagacca

SEQ ID NO: 707587 - DNA, 25 bp, Homo sapien
tgtccccaagcctgttggatccaga

SEQ ID NO: 707588 - DNA, 25 bp, Homo sapien
cccaagcctgttggatccagaccac

SEQ ID NO: 707589 - DNA, 25 bp, Homo sapien
gggcaccaccttcatgaggcccatg

SEQ ID NO: 707590 - DNA, 25 bp, Homo sapien
ttgggtctcttgtaagcagggctgt

SEQ ID NO: 707591 - DNA, 25 bp, Homo sapien
ggctgccttgggtctcttgtaagca

SEQ ID NO: 707592 - DNA, 25 bp, Homo sapien
caacagccagaaaggggtggctaag

SEQ ID NO: 707593 - DNA, 25 bp, Homo sapien
ggctcttctacagcacaggtgcaat

SEQ ID NO: 707594 - DNA, 25 bp, Homo sapien
acacatggctcacagtccaggcagg

SEQ ID NO: 707595 - DNA, 25 bp, Homo sapien
ttcctggtgcccgaacctgtgctgg

SEQ ID NO: 707596 - DNA, 25 bp, Homo sapien
accatgcccggacccacattcatca

SEQ ID NO: 707597 - DNA, 25 bp, Homo sapien
agcaccacagacctgaccccatcca

SEQ ID NO: 707598 - DNA, 25 bp, Homo sapien
tccaggatcctgacagcgcctggcc

SEQ ID NO: 707599 - DNA, 25 bp, Homo sapien
tcaggaaccacaatagggactttaa

SEQ ID NO: 707600 - DNA, 25 bp, Homo sapien
tggcgaagccaagctgccaacacct

SEQ ID NO: 707601 - DNA, 25 bp, Homo sapien
agctcaagggacaaaggcgccggcc

SEQ ID NO: 707602 - DNA, 25 bp, Homo sapien
ttctctccacatgaggtggtgggag

SEQ ID NO: 707603 - DNA, 25 bp, Homo sapien
ctacgtcgggggtgaggatcatctc

SEQ ID NO: 707604 - DNA, 25 bp, Homo sapien
tgaggttctctccacatgaggtggt

SEQ ID NO: 707605 - DNA, 25 bp, Homo sapien
gaggatcatctcatcttcccggaga

SEQ ID NO: 707606 - DNA, 25 bp, Homo sapien
ttgttgagtgaataagcaactccac

SEQ ID NO: 707607 - DNA, 25 bp, Homo sapien
gagtgaataagcaactccactagtg

SEQ ID NO: 707608 - DNA, 25 bp, Homo sapien
gaataagcaactccactagtgattt

SEQ ID NO: 707609 - DNA, 25 bp, Homo sapien
cactgggtcggtgtttgttgagtga

SEQ ID NO: 707610 - DNA, 25 bp, Homo sapien
gtatctagaactacaggtatgcatc

SEQ ID NO: 707611 - DNA, 25 bp, Homo sapien
aagtatctagaactacaggtatgca

SEQ ID NO: 707612 - DNA, 25 bp, Homo sapien
tatctagaactacaggtatgcatca

SEQ ID NO: 707613 - DNA, 25 bp, Homo sapien
ccaagtatctagaactacaggtatg

SEQ ID NO: 707614 - DNA, 25 bp, Homo sapien
tctggggactgtcgcaggtccctcc

SEQ ID NO: 707615 - DNA, 25 bp, Homo sapien
ccttgtggccctgtcgtgtcctgca

SEQ ID NO: 707616 - DNA, 25 bp, Homo sapien
gccctgtcgtgtcctgcaacggaga

SEQ ID NO: 707617 - DNA, 25 bp, Homo sapien
tgtcctgcaacggagagctcagagg

SEQ ID NO: 707618 - DNA, 25 bp, Homo sapien
gacacttcgcattgcagactcagca

SEQ ID NO: 707619 - DNA, 25 bp, Homo sapien
gcagtgtcgctcagtctttttgcac

SEQ ID NO: 707620 - DNA, 25 bp, Homo sapien
gggcgacattgatcatctgcacagc

SEQ ID NO: 707621 - DNA, 25 bp, Homo sapien
ttttcaggacgctctgcagtgtcgc

SEQ ID NO: 707622 - DNA, 25 bp, Homo sapien
tgtagagctggcacctcactatgtt

SEQ ID NO: 707623 - DNA, 25 bp, Homo sapien
cagctcctggcctaagcatttattt

SEQ ID NO: 707624 - DNA, 25 bp, Homo sapien
tcaagtgggctcattcctgtctctg

SEQ ID NO: 707625 - DNA, 25 bp, Homo sapien
tgttcgtaagtctacagataaaacc

SEQ ID NO: 707626 - DNA, 25 bp, Homo sapien
gatcagtcagctactgctgcgtacg

SEQ ID NO: 707627 - DNA, 25 bp, Homo sapien
gacgctattgctggttggatcagtc

SEQ ID NO: 707628 - DNA, 25 bp, Homo sapien
tattgaaggcaagtgggtgcccatt

SEQ ID NO: 707629 - DNA, 25 bp, Homo sapien
gctgcgtacgtaacaagtagccctg

SEQ ID NO: 707630 - DNA, 25 bp, Homo sapien
ggtctctgaacactgcatatcccag

SEQ ID NO: 707631 - DNA, 25 bp, Homo sapien
cgggagtgtctttatttaccacgtg

SEQ ID NO: 707632 - DNA, 25 bp, Homo sapien
ggagcctctctagggctgggtctct

SEQ ID NO: 707633 - DNA, 25 bp, Homo sapien
cccagctcgggtgggatcctataat

SEQ ID NO: 707634 - DNA, 25 bp, Homo sapien
tctgattaaaccttaattcctgatg

SEQ ID NO: 707635 - DNA, 25 bp, Homo sapien
gattaaaccttaattcctgatgatt

SEQ ID NO: 707636 - DNA, 25 bp, Homo sapien
ccttaattcctgatgattaagccca

SEQ ID NO: 707637 - DNA, 25 bp, Homo sapien
cctgatgattaagcccagggaactg

SEQ ID NO: 707638 - DNA, 25 bp, Homo sapien
aaagatgccagatggtaaacgtgtc

SEQ ID NO: 707639 - DNA, 25 bp, Homo sapien
taactgatcgtcagcttgaactact

SEQ ID NO: 707640 - DNA, 25 bp, Homo sapien
tgtaagaactgatctaactgatcgt

SEQ ID NO: 707641 - DNA, 25 bp, Homo sapien
cactctctggtggtcggtgcaaagg

SEQ ID NO: 707642 - DNA, 25 bp, Homo sapien
ggggtcccacacagatgggacgcgg

SEQ ID NO: 707643 - DNA, 25 bp, Homo sapien
tcccacacagatgggacgcggctta

SEQ ID NO: 707644 - DNA, 25 bp, Homo sapien
cccacacagatgggacgcggcttag

SEQ ID NO: 707645 - DNA, 25 bp, Homo sapien
ggtcccacacagatgggacgcggct

SEQ ID NO: 707646 - DNA, 25 bp, Homo sapien
tggagaaagctcacactgactcttc

SEQ ID NO: 707647 - DNA, 25 bp, Homo sapien
tctttgtttggcaagctcctattca

SEQ ID NO: 707648 - DNA, 25 bp, Homo sapien
tgcatggtcctcgtgacacaaagag

SEQ ID NO: 707649 - DNA, 25 bp, Homo sapien
gcctgataggcttgacagggccaag

SEQ ID NO: 707650 - DNA, 25 bp, Homo sapien
tctttttggactaacacgtggacca

SEQ ID NO: 707651 - DNA, 25 bp, Homo sapien
cgtgttgcccctgacttgctgggtg

SEQ ID NO: 707652 - DNA, 25 bp, Homo sapien
cagccaagttccaagagaatcgctt

SEQ ID NO: 707653 - DNA, 25 bp, Homo sapien
tttgcctgcaattcctgtgactgcc

SEQ ID NO: 707654 - DNA, 25 bp, Homo sapien
taacataatcgtgagcagaggcaag

SEQ ID NO: 707655 - DNA, 25 bp, Homo sapien
cagaatagggaagccttgaacgcca

SEQ ID NO: 707656 - DNA, 25 bp, Homo sapien
tgtgagggtactgccgtccatcttg

SEQ ID NO: 707657 - DNA, 25 bp, Homo sapien
tatttttctggagctctagcggtgc

SEQ ID NO: 707658 - DNA, 25 bp, Homo sapien
gacctgactcaatgctcacaggcaa

SEQ ID NO: 707659 - DNA, 25 bp, Homo sapien
ctcaatgctcacaggcaacccctgg

SEQ ID NO: 707660 - DNA, 25 bp, Homo sapien
tgactcaatgctcacaggcaacccc

SEQ ID NO: 707661 - DNA, 25 bp, Homo sapien
acctgactcaatgctcacaggcaac

SEQ ID NO: 707662 - DNA, 25 bp, Homo sapien
gcgcctgcaggacggctcggtgctg

SEQ ID NO: 707663 - DNA, 25 bp, Homo sapien
tgctgctcgtcagcgaccccaggtg

SEQ ID NO: 707664 - DNA, 25 bp, Homo sapien
tggaagcgcgccttctactacaacg

SEQ ID NO: 707665 - DNA, 25 bp, Homo sapien
tggacgaccaccagacggtgcgcga

SEQ ID NO: 707666 - DNA, 25 bp, Homo sapien
tagatcgcggattcaggtgtggctc

SEQ ID NO: 707667 - DNA, 25 bp, Homo sapien
gaatatgcggatagaaggctgtatc

SEQ ID NO: 707668 - DNA, 25 bp, Homo sapien
cagatacttacaaaatagatcgcgg

SEQ ID NO: 707669 - DNA, 25 bp, Homo sapien
tgaaccttgtattagatgatgcaga

SEQ ID NO: 707670 - DNA, 25 bp, Homo sapien
gagttacctggaatacaatgtgcga

SEQ ID NO: 707671 - DNA, 25 bp, Homo sapien
caagcgctctaaaggctgcgggacc

SEQ ID NO: 707672 - DNA, 25 bp, Homo sapien
ccatgttacgatgaaaacgctgagc

SEQ ID NO: 707673 - DNA, 25 bp, Homo sapien
gactttgttcctaggcgaggcggct

SEQ ID NO: 707674 - DNA, 25 bp, Homo sapien
tagatttggccagcgagtcaacagc

SEQ ID NO: 707675 - DNA, 25 bp, Homo sapien
gaagaggacctatttgacagcgccc

SEQ ID NO: 707676 - DNA, 25 bp, Homo sapien
agttgagcagagtagtgcggcctcc

SEQ ID NO: 707677 - DNA, 25 bp, Homo sapien
gaagaaagttccgagctggagcagc

SEQ ID NO: 707678 - DNA, 25 bp, Homo sapien
tatcaggctcctagcacaaaatggc

SEQ ID NO: 707679 - DNA, 25 bp, Homo sapien
cacagaaccgggccggttttatcag

SEQ ID NO: 707680 - DNA, 25 bp, Homo sapien
cgggccggttttatcaggctcctag

SEQ ID NO: 707681 - DNA, 25 bp, Homo sapien
gcctgcgagggaaccgctccagtcg

SEQ ID NO: 707682 - DNA, 25 bp, Homo sapien
ctaggcctgacagagtctccgccat

SEQ ID NO: 707683 - DNA, 25 bp, Homo sapien
tcgatcactcgcaggtcgctgaggc

SEQ ID NO: 707684 - DNA, 25 bp, Homo sapien
tcttcagccgctccatcaaaacgct

SEQ ID NO: 707685 - DNA, 25 bp, Homo sapien
tcccggtctctgacgaggcggagct

SEQ ID NO: 707686 - DNA, 25 bp, Homo sapien
tcttgttgccgctcgagtccacatt

SEQ ID NO: 707687 - DNA, 25 bp, Homo sapien
cgtttctcctgcacgcgtgccgttt

SEQ ID NO: 707688 - DNA, 25 bp, Homo sapien
agccggccaaggaactctctccggg

SEQ ID NO: 707689 - DNA, 25 bp, Homo sapien
tgccgtttttgtggttctcctggcc

SEQ ID NO: 707690 - DNA, 25 bp, Homo sapien
cattgcggcgttaggatttgaaccc

SEQ ID NO: 707691 - DNA, 25 bp, Homo sapien
aagagaagcaatgccctaggcaggt

SEQ ID NO: 707692 - DNA, 25 bp, Homo sapien
agaagcaatgccctaggcaggtgtc

SEQ ID NO: 707693 - DNA, 25 bp, Homo sapien
agagaagcaatgccctaggcaggtg

SEQ ID NO: 707694 - DNA, 25 bp, Homo sapien
gagaagcaatgccctaggcaggtgt

SEQ ID NO: 707695 - DNA, 25 bp, Homo sapien
taatttcaatttcgtcaggattacc

SEQ ID NO: 707696 - DNA, 25 bp, Homo sapien
tttcaatttcgtcaggattaccacc

SEQ ID NO: 707697 - DNA, 25 bp, Homo sapien
ctcggaggtaatttcaatttcgtca

SEQ ID NO: 707698 - DNA, 25 bp, Homo sapien
gaggtaatttcaatttcgtcaggat

SEQ ID NO: 707699 - DNA, 25 bp, Homo sapien
ctgatttgattacacaaacacactt

SEQ ID NO: 707700 - DNA, 25 bp, Homo sapien
gatttgattacacaaacacacttcc

SEQ ID NO: 707701 - DNA, 25 bp, Homo sapien
tgatttgattacacaaacacacttc

SEQ ID NO: 707702 - DNA, 25 bp, Homo sapien
tggtctcagctatgggcatgaccgt

SEQ ID NO: 707703 - DNA, 25 bp, Homo sapien
tcgtagctccctgcctgggattcca

SEQ ID NO: 707704 - DNA, 25 bp, Homo sapien
tcagagactgtccaatctcactgct

SEQ ID NO: 707705 - DNA, 25 bp, Homo sapien
tgggatgctcccatagtacccaggg

SEQ ID NO: 707706 - DNA, 25 bp, Homo sapien
tcctccagcccgttatcttccacac

SEQ ID NO: 707707 - DNA, 25 bp, Homo sapien
tccagcccgttatcttccacaccct

SEQ ID NO: 707708 - DNA, 25 bp, Homo sapien
ctccagcccgttatcttccacaccc

SEQ ID NO: 707709 - DNA, 25 bp, Homo sapien
cctccagcccgttatcttccacacc

SEQ ID NO: 707710 - DNA, 25 bp, Homo sapien
cagggactcctggaggttatcagca

SEQ ID NO: 707711 - DNA, 25 bp, Homo sapien
catgatgtcgatgtcctgcaagttc

SEQ ID NO: 707712 - DNA, 25 bp, Homo sapien
gactagctctctactatccgacagg

SEQ ID NO: 707713 - DNA, 25 bp, Homo sapien
gacacaatctgcaacgcttccatta

SEQ ID NO: 707714 - DNA, 25 bp, Homo sapien
gatgatgaagtatctaaattgttta

SEQ ID NO: 707715 - DNA, 25 bp, Homo sapien
ctgtaatatagtgaagtcagatgat

SEQ ID NO: 707716 - DNA, 25 bp, Homo sapien
aatatagtgaagtcagatgatgaag

SEQ ID NO: 707717 - DNA, 25 bp, Homo sapien
tatagtgaagtcagatgatgaagta

SEQ ID NO: 707718 - DNA, 25 bp, Homo sapien
gctacctaggtaagtgtgttctaac

SEQ ID NO: 707719 - DNA, 25 bp, Homo sapien
ctcccttgcccttgcatggcagaag

SEQ ID NO: 707720 - DNA, 25 bp, Homo sapien
cagagatgccaatgaaacaggtagg

SEQ ID NO: 707721 - DNA, 25 bp, Homo sapien
aaggctgggcaaaagctggctcgat

SEQ ID NO: 707722 - DNA, 25 bp, Homo sapien
gctccagggatggctcttcaatttc

SEQ ID NO: 707723 - DNA, 25 bp, Homo sapien
tggctccagggatggctcttcaatt

SEQ ID NO: 707724 - DNA, 25 bp, Homo sapien
ggctccagggatggctcttcaattt

SEQ ID NO: 707725 - DNA, 25 bp, Homo sapien
ctggctccagggatggctcttcaat

SEQ ID NO: 707726 - DNA, 25 bp, Homo sapien
gatcctggtaggttttggattgtaa

SEQ ID NO: 707727 - DNA, 25 bp, Homo sapien
ctagaatggttccaaacccccgctg

SEQ ID NO: 707728 - DNA, 25 bp, Homo sapien
gggtttccaatctctatgatcctgg

SEQ ID NO: 707729 - DNA, 25 bp, Homo sapien
acagatctggtgatatggctgggtt

SEQ ID NO: 707730 - DNA, 25 bp, Homo sapien
taagctactgcccaatatcacaaga

SEQ ID NO: 707731 - DNA, 25 bp, Homo sapien
agaatctcttccatccgtgctctga

SEQ ID NO: 707732 - DNA, 25 bp, Homo sapien
tagcttccaaagtccaagttgctta

SEQ ID NO: 707733 - DNA, 25 bp, Homo sapien
gaacagtccaacatgaaaaccagaa

SEQ ID NO: 707734 - DNA, 25 bp, Homo sapien
tgtctgccttgctcgactgagcgtg

SEQ ID NO: 707735 - DNA, 25 bp, Homo sapien
tgtgctgttgactcgctggccaaat

SEQ ID NO: 707736 - DNA, 25 bp, Homo sapien
taaatcaccctcttccggatgggcg

SEQ ID NO: 707737 - DNA, 25 bp, Homo sapien
gatgggcgctgtcaaataggtcctc

SEQ ID NO: 707738 - DNA, 25 bp, Homo sapien
ggctctagccctacaggctcacagt

SEQ ID NO: 707739 - DNA, 25 bp, Homo sapien
gaggccgcactactctgctcaactg

SEQ ID NO: 707740 - DNA, 25 bp, Homo sapien
gtcctctcgccatcgcctggctgct

SEQ ID NO: 707741 - DNA, 25 bp, Homo sapien
tgctccgcgggctcccttttcacta

SEQ ID NO: 707742 - DNA, 25 bp, Homo sapien
gcttccgtgggtgcttctgcgagct

SEQ ID NO: 707743 - DNA, 25 bp, Homo sapien
tgatcagcgccctcactggttgagg

SEQ ID NO: 707744 - DNA, 25 bp, Homo sapien
ctttaggagccggagggacttcatt

SEQ ID NO: 707745 - DNA, 25 bp, Homo sapien
gagggacttcattacaagcgtcaaa

SEQ ID NO: 707746 - DNA, 25 bp, Homo sapien
taattaattctgctgggctaaaggt

SEQ ID NO: 707747 - DNA, 25 bp, Homo sapien
gataccccgacaaacttgtattgaa

SEQ ID NO: 707748 - DNA, 25 bp, Homo sapien
cataagatttcagacccacaggagt

SEQ ID NO: 707749 - DNA, 25 bp, Homo sapien
aaaattcgtgctgaggttgcatacc

SEQ ID NO: 707750 - DNA, 25 bp, Homo sapien
aaagcctttttgtatccgagtcatc

SEQ ID NO: 707751 - DNA, 25 bp, Homo sapien
gcctttttgtatccgagtcatcttc

SEQ ID NO: 707752 - DNA, 25 bp, Homo sapien
ggaaagcctttttgtatccgagtca

SEQ ID NO: 707753 - DNA, 25 bp, Homo sapien
ttttgtatccgagtcatcttcggga

SEQ ID NO: 707754 - DNA, 25 bp, Homo sapien
tgtagaagagagtccactaacccag

SEQ ID NO: 707755 - DNA, 25 bp, Homo sapien
tccactaacccagaaatttctacca

SEQ ID NO: 707756 - DNA, 25 bp, Homo sapien
cactaacccagaaatttctaccaca

SEQ ID NO: 707757 - DNA, 25 bp, Homo sapien
gttgtagaagagagtccactaaccc

SEQ ID NO: 707758 - DNA, 25 bp, Homo sapien
gaaaagattcttcaaatctgtagct

SEQ ID NO: 707759 - DNA, 25 bp, Homo sapien
cagacaagaggccactagaactgcc

SEQ ID NO: 707760 - DNA, 25 bp, Homo sapien
gtgaactgaggcagcaactttgaga

SEQ ID NO: 707761 - DNA, 25 bp, Homo sapien
agtcaatggacccaagacacccgtg

SEQ ID NO: 707762 - DNA, 25 bp, Homo sapien
tgaggtgaggttcagtcaatggacc

SEQ ID NO: 707763 - DNA, 25 bp, Homo sapien
ttctatattgcaatgtgttgaaccc

SEQ ID NO: 707764 - DNA, 25 bp, Homo sapien
taacacaaaggattggactccttcc

SEQ ID NO: 707765 - DNA, 25 bp, Homo sapien
taagttcttcgaagtcagtatcagg

SEQ ID NO: 707766 - DNA, 25 bp, Homo sapien
caatgtgttgaaccctcactgtgta

SEQ ID NO: 707767 - DNA, 25 bp, Homo sapien
aaggaaagcaggcaaatatgactca

SEQ ID NO: 707768 - DNA, 25 bp, Homo sapien
ggcaaatatgactcagacatgaagc

SEQ ID NO: 707769 - DNA, 25 bp, Homo sapien
aaatatgactcagacatgaagccca

SEQ ID NO: 707770 - DNA, 25 bp, Homo sapien
aggaaagcaggcaaatatgactcag

SEQ ID NO: 707771 - DNA, 25 bp, Homo sapien
gagatcatctttccgtggagctccg

SEQ ID NO: 707772 - DNA, 25 bp, Homo sapien
tgtggacatcgtgacaaaaccgtaa

SEQ ID NO: 707773 - DNA, 25 bp, Homo sapien
gcatttgtcacaaccttggcgccca

SEQ ID NO: 707774 - DNA, 25 bp, Homo sapien
aaaaccgtaacagcgagctccagga

SEQ ID NO: 707775 - DNA, 25 bp, Homo sapien
tcactgtctcttttgtcagaggttt

SEQ ID NO: 707776 - DNA, 25 bp, Homo sapien
cttctcctttttcccgtcactgtct

SEQ ID NO: 707777 - DNA, 25 bp, Homo sapien
tgctcgacttctcctttttcccgtc

SEQ ID NO: 707778 - DNA, 25 bp, Homo sapien
gtcactgtctcttttgtcagaggtt

SEQ ID NO: 707779 - DNA, 25 bp, Homo sapien
tccacttccgtcgtcacccttctta

SEQ ID NO: 707780 - DNA, 25 bp, Homo sapien
cgtcgtcacccttcttagcatcatc

SEQ ID NO: 707781 - DNA, 25 bp, Homo sapien
acttccgtcgtcacccttcttagca

SEQ ID NO: 707782 - DNA, 25 bp, Homo sapien
ttctccacttccgtcgtcacccttc

SEQ ID NO: 707783 - DNA, 25 bp, Homo sapien
tgactttgtggctcgagatcgctct

SEQ ID NO: 707784 - DNA, 25 bp, Homo sapien
actttgtggctcgagatcgctctga

SEQ ID NO: 707785 - DNA, 25 bp, Homo sapien
ctgactttgtggctcgagatcgctc

SEQ ID NO: 707786 - DNA, 25 bp, Homo sapien
tttgtggctcgagatcgctctgagg

SEQ ID NO: 707787 - DNA, 25 bp, Homo sapien
taatcacaggcacccctttggattt

SEQ ID NO: 707788 - DNA, 25 bp, Homo sapien
tggatttatccattactacagtccg

SEQ ID NO: 707789 - DNA, 25 bp, Homo sapien
tttttacactaatcacaggcacccc

SEQ ID NO: 707790 - DNA, 25 bp, Homo sapien
tactacagtccgttcggtccctcga

SEQ ID NO: 707791 - DNA, 25 bp, Homo sapien
gagatgggccaggtcaccatggcat

SEQ ID NO: 707792 - DNA, 25 bp, Homo sapien
gcccagcaagaagataagagtacag

SEQ ID NO: 707793 - DNA, 25 bp, Homo sapien
agatgcataccaccgagcctgccta

SEQ ID NO: 707794 - DNA, 25 bp, Homo sapien
gcaatgaacgtggctcactacagtc

SEQ ID NO: 707795 - DNA, 25 bp, Homo sapien
acttgacaagtaccttatttgtgcc

SEQ ID NO: 707796 - DNA, 25 bp, Homo sapien
gactgaaagctcctaagcaatccgc

SEQ ID NO: 707797 - DNA, 25 bp, Homo sapien
gaagcacttccggtacacttgacaa

SEQ ID NO: 707798 - DNA, 25 bp, Homo sapien
taatactggcacacagagactgaaa

SEQ ID NO: 707799 - DNA, 25 bp, Homo sapien
ttatcaaaggacacgacggaccgct

SEQ ID NO: 707800 - DNA, 25 bp, Homo sapien
aggacacgacggaccgcttctctct

SEQ ID NO: 707801 - DNA, 25 bp, Homo sapien
ctgctggctgatttgcgatcctggc

SEQ ID NO: 707802 - DNA, 25 bp, Homo sapien
gacttccgaggctccttgaccttat

SEQ ID NO: 707803 - DNA, 25 bp, Homo sapien
tgcatgcgttcgcgctccagccgtt

SEQ ID NO: 707804 - DNA, 25 bp, Homo sapien
cgcctgcatgcgttgttcgcgttca

SEQ ID NO: 707805 - DNA, 25 bp, Homo sapien
tagcgcagttcctgctggcgcctca

SEQ ID NO: 707806 - DNA, 25 bp, Homo sapien
aaggccagcctctctcgggcaatct

SEQ ID NO: 707807 - DNA, 25 bp, Homo sapien
taagcaaaaacaaattacaatggat

SEQ ID NO: 707808 - DNA, 25 bp, Homo sapien
aattacaatggatttaaaaagccag

SEQ ID NO: 707809 - DNA, 25 bp, Homo sapien
agccaggacaaggccgggggtggtg

SEQ ID NO: 707810 - DNA, 25 bp, Homo sapien
tggatttaaaaagccaggacaaggc

SEQ ID NO: 707811 - DNA, 25 bp, Homo sapien
cagagatagagggatcccccacccc

SEQ ID NO: 707812 - DNA, 25 bp, Homo sapien
tgtgaggggacatgagacagagata

SEQ ID NO: 707813 - DNA, 25 bp, Homo sapien
gacagagatagagggatcccccacc

SEQ ID NO: 707814 - DNA, 25 bp, Homo sapien
tgaggggacatgagacagagataga

SEQ ID NO: 707815 - DNA, 25 bp, Homo sapien
tggtcaaagtcgtggaagcggtcct

SEQ ID NO: 707816 - DNA, 25 bp, Homo sapien
gcccgcttggcttccggccaatagg

SEQ ID NO: 707817 - DNA, 25 bp, Homo sapien
tagcggccgcggtccctgtggtcaa

SEQ ID NO: 707818 - DNA, 25 bp, Homo sapien
taaagtcagaatggtagcgctcatc

SEQ ID NO: 707819 - DNA, 25 bp, Homo sapien
ttctcgttctcccatcattgacctt

SEQ ID NO: 707820 - DNA, 25 bp, Homo sapien
tgtccttctcgttctcccatcattg

SEQ ID NO: 707821 - DNA, 25 bp, Homo sapien
ctcgttctcccatcattgaccttga

SEQ ID NO: 707822 - DNA, 25 bp, Homo sapien
tctcccatcattgaccttgaacctt

SEQ ID NO: 707823 - DNA, 25 bp, Homo sapien
tgacagccaagactaaccccaaata

SEQ ID NO: 707824 - DNA, 25 bp, Homo sapien
gagtaactgtttggactgacagcca

SEQ ID NO: 707825 - DNA, 25 bp, Homo sapien
tggcacacagaaccccagggtcaag

SEQ ID NO: 707826 - DNA, 25 bp, Homo sapien
ctggcactgttgcacatgtgtggtg

SEQ ID NO: 707827 - DNA, 25 bp, Homo sapien
caccaaggtgtgacgccagttctga

SEQ ID NO: 707828 - DNA, 25 bp, Homo sapien
ggtgacaccaaggtgtgacgccagt

SEQ ID NO: 707829 - DNA, 25 bp, Homo sapien
caccaccgcaccctttgtaggagga

SEQ ID NO: 707830 - DNA, 25 bp, Homo sapien
gtttgtacagatgcgcccacctcat

SEQ ID NO: 707831 - DNA, 25 bp, Homo sapien
cactgagagataaacggctggcctt

SEQ ID NO: 707832 - DNA, 25 bp, Homo sapien
tggcaggctgtatcggttcacacaa

SEQ ID NO: 707833 - DNA, 25 bp, Homo sapien
caaatggttagttcccagagccaac

SEQ ID NO: 707834 - DNA, 25 bp, Homo sapien
cacgtggctaacacagaccaggagt

SEQ ID NO: 707835 - DNA, 25 bp, Homo sapien
aagcttcagtgtcagcgcccagacc

SEQ ID NO: 707836 - DNA, 25 bp, Homo sapien
aaaagcttcagtgtcagcgcccaga

SEQ ID NO: 707837 - DNA, 25 bp, Homo sapien
aaaaaagcttcagtgtcagcgccca

SEQ ID NO: 707838 - DNA, 25 bp, Homo sapien
gaaaaaaaagcttcagtgtcagcgc

SEQ ID NO: 707839 - DNA, 25 bp, Homo sapien
ggccgtggcgctctggtcctccatg

SEQ ID NO: 707840 - DNA, 25 bp, Homo sapien
agccatcgcgggagtcccggccgtg

SEQ ID NO: 707841 - DNA, 25 bp, Homo sapien
gtcctccatggcgttctgggtaatg

SEQ ID NO: 707842 - DNA, 25 bp, Homo sapien
tcatcctcttgtcagagccatagcc

SEQ ID NO: 707843 - DNA, 25 bp, Homo sapien
aggtactgtcgggtgtgggacacaa

SEQ ID NO: 707844 - DNA, 25 bp, Homo sapien
gtactgtcgggtgtgggacacaaac

SEQ ID NO: 707845 - DNA, 25 bp, Homo sapien
gggtcaggtactgtcgggtgtggga

SEQ ID NO: 707846 - DNA, 25 bp, Homo sapien
cagcgacttgcgggcccccttgtgg

SEQ ID NO: 707847 - DNA, 25 bp, Homo sapien
tcttgtgatccctgtccatcatgcc

SEQ ID NO: 707848 - DNA, 25 bp, Homo sapien
gccgtgccctgccatgaccggtcat

SEQ ID NO: 707849 - DNA, 25 bp, Homo sapien
ctcttgtgatccctgtccatcatgc

SEQ ID NO: 707850 - DNA, 25 bp, Homo sapien
ccggtcatcctctcttcggccatgg

SEQ ID NO: 707851 - DNA, 25 bp, Homo sapien
acagacgtgctttcacacagggaac

SEQ ID NO: 707852 - DNA, 25 bp, Homo sapien
tggaacccacggcacatttagccca

SEQ ID NO: 707853 - DNA, 25 bp, Homo sapien
tacccacaactagcgggtcccagga

SEQ ID NO: 707854 - DNA, 25 bp, Homo sapien
gaacttgcgcacacggcgtggaacc

SEQ ID NO: 707855 - DNA, 25 bp, Homo sapien
ctgacattcctcctcggttcatcat

SEQ ID NO: 707856 - DNA, 25 bp, Homo sapien
ttcctcctcggttcatcatgtggcc

SEQ ID NO: 707857 - DNA, 25 bp, Homo sapien
cattcctcctcggttcatcatgtgg

SEQ ID NO: 707858 - DNA, 25 bp, Homo sapien
gacattcctcctcggttcatcatgt

SEQ ID NO: 707859 - DNA, 25 bp, Homo sapien
cattggtttgactgcgaagtcctcc

SEQ ID NO: 707860 - DNA, 25 bp, Homo sapien
aattcacattggtttgactgcgaag

SEQ ID NO: 707861 - DNA, 25 bp, Homo sapien
tggtttgactgcgaagtcctcctgc

SEQ ID NO: 707862 - DNA, 25 bp, Homo sapien
cacattggtttgactgcgaagtcct

SEQ ID NO: 707863 - DNA, 25 bp, Homo sapien
aaacccgccctgcatgccaccgtgt

SEQ ID NO: 707864 - DNA, 25 bp, Homo sapien
tggcctccaaacccgccctgcatgc

SEQ ID NO: 707865 - DNA, 25 bp, Homo sapien
gcctccaaacccgccctgcatgcca

SEQ ID NO: 707866 - DNA, 25 bp, Homo sapien
tccaaacccgccctgcatgccaccg

SEQ ID NO: 707867 - DNA, 25 bp, Homo sapien
tgccacgagacaggacacaggattc

SEQ ID NO: 707868 - DNA, 25 bp, Homo sapien
ctacaatatggcagcagattaaaaa

SEQ ID NO: 707869 - DNA, 25 bp, Homo sapien
cagaacatagccttgttgccacgag

SEQ ID NO: 707870 - DNA, 25 bp, Homo sapien
cacagtttaaggtaactcctaacag

SEQ ID NO: 707871 - DNA, 25 bp, Homo sapien
tttgaggtatgtcccaagtctggcc

SEQ ID NO: 707872 - DNA, 25 bp, Homo sapien
caggcttggttcgagtgtgatccgc

SEQ ID NO: 707873 - DNA, 25 bp, Homo sapien
ccgactctgccgtgaaaatagtttg

SEQ ID NO: 707874 - DNA, 25 bp, Homo sapien
gctaacattaaaggagaactcggtg

SEQ ID NO: 707875 - DNA, 25 bp, Homo sapien
aggaccgagttctggctaaggagcc

SEQ ID NO: 707876 - DNA, 25 bp, Homo sapien
gagaaacattccgtcttcgccaggg

SEQ ID NO: 707877 - DNA, 25 bp, Homo sapien
tcctgctggatagccccgatgatgc

SEQ ID NO: 707878 - DNA, 25 bp, Homo sapien
tgccaagaggcctgtgagttcaagt

SEQ ID NO: 707879 - DNA, 25 bp, Homo sapien
agagcctagcattgttgggctggct

SEQ ID NO: 707880 - DNA, 25 bp, Homo sapien
agcctagcattgttgggctggctgc

SEQ ID NO: 707881 - DNA, 25 bp, Homo sapien
cacggccaacaatgaagacgtttcc

SEQ ID NO: 707882 - DNA, 25 bp, Homo sapien
gctggctgccactagaggcacggcc

SEQ ID NO: 707883 - DNA, 25 bp, Homo sapien
tgcaggagagtaagacccctcccgt

SEQ ID NO: 707884 - DNA, 25 bp, Homo sapien
gcaggagagtaagacccctcccgtc

SEQ ID NO: 707885 - DNA, 25 bp, Homo sapien
aagacccctcccgtcctcatcctgg

SEQ ID NO: 707886 - DNA, 25 bp, Homo sapien
cccctcccgtcctcatcctggcaga

SEQ ID NO: 707887 - DNA, 25 bp, Homo sapien
tgccatacgggccagcggcaacctg

SEQ ID NO: 707888 - DNA, 25 bp, Homo sapien
tccggtgccatacgggccagcggca

SEQ ID NO: 707889 - DNA, 25 bp, Homo sapien
cccatccatccggtgccatacgggc

SEQ ID NO: 707890 - DNA, 25 bp, Homo sapien
acgggccagcggcaacctggcttct

SEQ ID NO: 707891 - DNA, 25 bp, Homo sapien
ctgcagctccacgaatgtggcttag

SEQ ID NO: 707892 - DNA, 25 bp, Homo sapien
ttcgtcctcacccatccactggcac

SEQ ID NO: 707893 - DNA, 25 bp, Homo sapien
cgtcactgttagaggggaaggactg

SEQ ID NO: 707894 - DNA, 25 bp, Homo sapien
cagctccacgaatgtggcttagttc

SEQ ID NO: 707895 - DNA, 25 bp, Homo sapien
gacgaagaaacttgcacagacagac

SEQ ID NO: 707896 - DNA, 25 bp, Homo sapien
agacgaagaaacttgcacagacaga

SEQ ID NO: 707897 - DNA, 25 bp, Homo sapien
acgaagaaacttgcacagacagaca

SEQ ID NO: 707898 - DNA, 25 bp, Homo sapien
gtcccctgacactgtccaccaagtc

SEQ ID NO: 707899 - DNA, 25 bp, Homo sapien
tactgggccttagcagtggtggggg

SEQ ID NO: 707900 - DNA, 25 bp, Homo sapien
actgggccttagcagtggtgggggc

SEQ ID NO: 707901 - DNA, 25 bp, Homo sapien
ccagggtaggacagtggaagagcca

SEQ ID NO: 707902 - DNA, 25 bp, Homo sapien
tcagagcggctgctcccggtgctcc

SEQ ID NO: 707903 - DNA, 25 bp, Homo sapien
ccggtgctccagaggctgtgctctg

SEQ ID NO: 707904 - DNA, 25 bp, Homo sapien
aggaaagtgctttggccaagcctgg

SEQ ID NO: 707905 - DNA, 25 bp, Homo sapien
cttgcgcgtggatccgagcgaccat

SEQ ID NO: 707906 - DNA, 25 bp, Homo sapien
aagcggcgggcgagccgagtgtcct

SEQ ID NO: 707907 - DNA, 25 bp, Homo sapien
gggcgagccgagtgtccttgcgcgt

SEQ ID NO: 707908 - DNA, 25 bp, Homo sapien
ccgagtgtccttgcgcgtggatccg

SEQ ID NO: 707909 - DNA, 25 bp, Homo sapien
tgttttcgggtcaccttcaggcttc

SEQ ID NO: 707910 - DNA, 25 bp, Homo sapien
tagggcacgggtcacgtgactcgaa

SEQ ID NO: 707911 - DNA, 25 bp, Homo sapien
cgttgccgtgacaaccgccttgtag

SEQ ID NO: 707912 - DNA, 25 bp, Homo sapien
cgggtggatctctcgggctctgact

SEQ ID NO: 707913 - DNA, 25 bp, Homo sapien
tttggtgatgccaccgccttggatc

SEQ ID NO: 707914 - DNA, 25 bp, Homo sapien
catctgcacaccttgcctctcctgg

SEQ ID NO: 707915 - DNA, 25 bp, Homo sapien
ggtggctccatgaaccaccgcggct

SEQ ID NO: 707916 - DNA, 25 bp, Homo sapien
ggcccacagccacccgtgtttggtg

SEQ ID NO: 707917 - DNA, 25 bp, Homo sapien
ggacaggggacagaggtggccggca

SEQ ID NO: 707918 - DNA, 25 bp, Homo sapien
acaggggacagaggtggccggcaca

SEQ ID NO: 707919 - DNA, 25 bp, Homo sapien
ggggacagaggtggccggcacaggc

SEQ ID NO: 707920 - DNA, 25 bp, Homo sapien
tgcagagggacaggggacagaggtg

SEQ ID NO: 707921 - DNA, 25 bp, Homo sapien
ctgggtcgaagttgtcatcccaata

SEQ ID NO: 707922 - DNA, 25 bp, Homo sapien
gtcgaagttgtcatcccaataatag

SEQ ID NO: 707923 - DNA, 25 bp, Homo sapien
atcccaataataggcgaagaacagg

SEQ ID NO: 707924 - DNA, 25 bp, Homo sapien
tgtcatcccaataataggcgaagaa

SEQ ID NO: 707925 - DNA, 25 bp, Homo sapien
aggacagctggcccggtttctccct

SEQ ID NO: 707926 - DNA, 25 bp, Homo sapien
gctggcccggtttctccctccctca

SEQ ID NO: 707927 - DNA, 25 bp, Homo sapien
cagctggcccggtttctccctccct

SEQ ID NO: 707928 - DNA, 25 bp, Homo sapien
gacaggacagctggcccggtttctc

SEQ ID NO: 707929 - DNA, 25 bp, Homo sapien
tcagcagcactcgcgctccctggag

SEQ ID NO: 707930 - DNA, 25 bp, Homo sapien
cagcagcactcgcgctccctggagg

SEQ ID NO: 707931 - DNA, 25 bp, Homo sapien
gcccagacgcgcgtagtgataggcc

SEQ ID NO: 707932 - DNA, 25 bp, Homo sapien
cgcgtagtgataggccagctcctca

SEQ ID NO: 707933 - DNA, 25 bp, Homo sapien
agacgcgcgtagtgataggccagct

SEQ ID NO: 707934 - DNA, 25 bp, Homo sapien
acgcgcgtagtgataggccagctcc

SEQ ID NO: 707935 - DNA, 25 bp, Homo sapien
caaggtcacacgggaagcctggatc

SEQ ID NO: 707936 - DNA, 25 bp, Homo sapien
gtcacacgggaagcctggatcattg

SEQ ID NO: 707937 - DNA, 25 bp, Homo sapien
ggtcacacgggaagcctggatcatt

SEQ ID NO: 707938 - DNA, 25 bp, Homo sapien
cacacgggaagcctggatcattgca

SEQ ID NO: 707939 - DNA, 25 bp, Homo sapien
ctggcctaatttttgtcttcttagt

SEQ ID NO: 707940 - DNA, 25 bp, Homo sapien
cttcttagtagagaccaggtttcgc

SEQ ID NO: 707941 - DNA, 25 bp, Homo sapien
tggcctaatttttgtcttcttagta

SEQ ID NO: 707942 - DNA, 25 bp, Homo sapien
cctggcctaatttttgtcttcttag

SEQ ID NO: 707943 - DNA, 25 bp, Homo sapien
ccaaaaatttaccactgcttgaggg

SEQ ID NO: 707944 - DNA, 25 bp, Homo sapien
aacatcctaacccatgagaaggtgg

SEQ ID NO: 707945 - DNA, 25 bp, Homo sapien
tagtcaccgtctcactgcattggca

SEQ ID NO: 707946 - DNA, 25 bp, Homo sapien
cacaggcctggacactcaatactct

SEQ ID NO: 707947 - DNA, 25 bp, Homo sapien
atgtagaagaccttgggggcgccca

SEQ ID NO: 707948 - DNA, 25 bp, Homo sapien
gtccgccgcgatgtagaagaccttg

SEQ ID NO: 707949 - DNA, 25 bp, Homo sapien
ttgggggcgcccagcttccggcagt

SEQ ID NO: 707950 - DNA, 25 bp, Homo sapien
cttgggggcgcccagcttccggcag

SEQ ID NO: 707951 - DNA, 25 bp, Homo sapien
tgtccagcgcaaactgcaccacgct

SEQ ID NO: 707952 - DNA, 25 bp, Homo sapien
actgcaccacgctctcgggcgcctc

SEQ ID NO: 707953 - DNA, 25 bp, Homo sapien
agcttgtccagcgcaaactgcacca

SEQ ID NO: 707954 - DNA, 25 bp, Homo sapien
gcaccacgctctcgggcgcctcagg

SEQ ID NO: 707955 - DNA, 25 bp, Homo sapien
ttcagcacgaggtagtccagcccgc

SEQ ID NO: 707956 - DNA, 25 bp, Homo sapien
tggttcagcacgaggtagtccagcc

SEQ ID NO: 707957 - DNA, 25 bp, Homo sapien
ggctcgcgtgccggccggggcgccg

SEQ ID NO: 707958 - DNA, 25 bp, Homo sapien
gccagcgagttgcctgggggctgcg

SEQ ID NO: 707959 - DNA, 25 bp, Homo sapien
ggcagcgcccgcgacgtcagttgca

SEQ ID NO: 707960 - DNA, 25 bp, Homo sapien
gttgcacgtagctcacaaagtttac

SEQ ID NO: 707961 - DNA, 25 bp, Homo sapien
cttgctgtccgtcaggctgggcagc

SEQ ID NO: 707962 - DNA, 25 bp, Homo sapien
cccttgctgtccgtcaggctgggca

SEQ ID NO: 707963 - DNA, 25 bp, Homo sapien
cccactccccgtcccgcagagccgg

SEQ ID NO: 707964 - DNA, 25 bp, Homo sapien
gcagagccggggccgggtgcacgca

SEQ ID NO: 707965 - DNA, 25 bp, Homo sapien
ccgcatcgagctccccactccccgt

SEQ ID NO: 707966 - DNA, 25 bp, Homo sapien
catcgagctccccactccccgtccc

SEQ ID NO: 707967 - DNA, 25 bp, Homo sapien
gctccccctcgtccgggaagcctgc

SEQ ID NO: 707968 - DNA, 25 bp, Homo sapien
aagaagccgtccagcgcaaacttgg

SEQ ID NO: 707969 - DNA, 25 bp, Homo sapien
atctcggaggcccaggacgcacatg

SEQ ID NO: 707970 - DNA, 25 bp, Homo sapien
caaacttggccgccgagtagggagt

SEQ ID NO: 707971 - DNA, 25 bp, Homo sapien
tgatggccacgttcacgtcctgcac

SEQ ID NO: 707972 - DNA, 25 bp, Homo sapien
gacaggagggcacggtggggactgc

SEQ ID NO: 707973 - DNA, 25 bp, Homo sapien
agcccccagcttgtccgggcctcac

SEQ ID NO: 707974 - DNA, 25 bp, Homo sapien
cagcccccagcttgtccgggcctca

SEQ ID NO: 707975 - DNA, 25 bp, Homo sapien
gggcacggtggggactgcggctggg

SEQ ID NO: 707976 - DNA, 25 bp, Homo sapien
ctggcggataaaccaggcccgcggg

SEQ ID NO: 707977 - DNA, 25 bp, Homo sapien
acgggtagaagacgccggccgcgcg

SEQ ID NO: 707978 - DNA, 25 bp, Homo sapien
agcaggcggaaacgccacgggtaga

SEQ ID NO: 707979 - DNA, 25 bp, Homo sapien
gcgggcgcggtagccagcgccggag

SEQ ID NO: 707980 - DNA, 25 bp, Homo sapien
aggctgccgcggccgtgacgttgag

SEQ ID NO: 707981 - DNA, 25 bp, Homo sapien
ctgccgcggccgtgacgttgagctc

SEQ ID NO: 707982 - DNA, 25 bp, Homo sapien
gctgccgcggccgtgacgttgagct

SEQ ID NO: 707983 - DNA, 25 bp, Homo sapien
tcaggctgccgcggccgtgacgttg

SEQ ID NO: 707984 - DNA, 25 bp, Homo sapien
agttggagggaggaacattgccgtc

SEQ ID NO: 707985 - DNA, 25 bp, Homo sapien
aggaacattgccgtctgggactgga

SEQ ID NO: 707986 - DNA, 25 bp, Homo sapien
gggaggaacattgccgtctgggact

SEQ ID NO: 707987 - DNA, 25 bp, Homo sapien
ttggagggaggaacattgccgtctg

SEQ ID NO: 707988 - DNA, 25 bp, Homo sapien
aggggtgtctctgtgagtgttctgg

SEQ ID NO: 707989 - DNA, 25 bp, Homo sapien
tcaggggtgtctctgtgagtgttct

SEQ ID NO: 707990 - DNA, 25 bp, Homo sapien
caggggtgtctctgtgagtgttctg

SEQ ID NO: 707991 - DNA, 25 bp, Homo sapien
cccaagccgtgactggttccaggtg

SEQ ID NO: 707992 - DNA, 25 bp, Homo sapien
ctcccaagccgtgactggttccagg

SEQ ID NO: 707993 - DNA, 25 bp, Homo sapien
tcccaagccgtgactggttccaggt

SEQ ID NO: 707994 - DNA, 25 bp, Homo sapien
ccaagccgtgactggttccaggtgc

SEQ ID NO: 707995 - DNA, 25 bp, Homo sapien
gacaaaggcgcctaacacggggcac

SEQ ID NO: 707996 - DNA, 25 bp, Homo sapien
gcaagtccccgacaaaggcgcctaa

SEQ ID NO: 707997 - DNA, 25 bp, Homo sapien
gaggccttgcaagtccccgacaaag

SEQ ID NO: 707998 - DNA, 25 bp, Homo sapien
ttgcaagtccccgacaaaggcgcct

SEQ ID NO: 707999 - DNA, 25 bp, Homo sapien
ctgcaaaatggaagcagtcacgtca

SEQ ID NO: 708000 - DNA, 25 bp, Homo sapien
gttcctcccagatggaatgaatgga

SEQ ID NO: 708001 - DNA, 25 bp, Homo sapien
atggaaagaataaatcagggactta

SEQ ID NO: 708002 - DNA, 25 bp, Homo sapien
atcagggacttaaaggcgcaggcag

SEQ ID NO: 708003 - DNA, 25 bp, Homo sapien
ggtgtgaagagtaccagagacccca

SEQ ID NO: 708004 - DNA, 25 bp, Homo sapien
tgcaggtgtgaagagtaccagagac

SEQ ID NO: 708005 - DNA, 25 bp, Homo sapien
gtgtgaagagtaccagagaccccag

SEQ ID NO: 708006 - DNA, 25 bp, Homo sapien
ctgcaggtgtgaagagtaccagaga

SEQ ID NO: 708007 - DNA, 25 bp, Homo sapien
ccaggtagacgaacagtgtagacgc

SEQ ID NO: 708008 - DNA, 25 bp, Homo sapien
aggtagacgaacagtgtagacgccc

SEQ ID NO: 708009 - DNA, 25 bp, Homo sapien
caccaggtagacgaacagtgtagac

SEQ ID NO: 708010 - DNA, 25 bp, Homo sapien
gccaccaggtagacgaacagtgtag

SEQ ID NO: 708011 - DNA, 25 bp, Homo sapien
tattctcgaacaagaggctgggtcc

SEQ ID NO: 708012 - DNA, 25 bp, Homo sapien
aagagtttttattctcgaacaagag

SEQ ID NO: 708013 - DNA, 25 bp, Homo sapien
gagtttttattctcgaacaagaggc

SEQ ID NO: 708014 - DNA, 25 bp, Homo sapien
tttttattctcgaacaagaggctgg

SEQ ID NO: 708015 - DNA, 25 bp, Homo sapien
atatctactcggctcaggaggcgca

SEQ ID NO: 708016 - DNA, 25 bp, Homo sapien
gccgcgcggaactccgggatatcta

SEQ ID NO: 708017 - DNA, 25 bp, Homo sapien
gcctgtgaaatgagttcgaatccca

SEQ ID NO: 708018 - DNA, 25 bp, Homo sapien
gagctccctgagcatgcgcgtttac

SEQ ID NO: 708019 - DNA, 25 bp, Homo sapien
ccgggagtccggatggcggcggata

SEQ ID NO: 708020 - DNA, 25 bp, Homo sapien
agaggacccgggagtccggatggcg

SEQ ID NO: 708021 - DNA, 25 bp, Homo sapien
cccgggagtccggatggcggcggat

SEQ ID NO: 708022 - DNA, 25 bp, Homo sapien
cagaggacccgggagtccggatggc

SEQ ID NO: 708023 - DNA, 25 bp, Homo sapien
ctgcggacagcgacggggagaaggg

SEQ ID NO: 708024 - DNA, 25 bp, Homo sapien
gtcccggctccttcagcctcgctcg

SEQ ID NO: 708025 - DNA, 25 bp, Homo sapien
gggcggaggtgagtaccggctcagt

SEQ ID NO: 708026 - DNA, 25 bp, Homo sapien
tgagtaccggctcagttcccgaggc

SEQ ID NO: 708027 - DNA, 25 bp, Homo sapien
gcccacggccatagggtagcgtagg

SEQ ID NO: 708028 - DNA, 25 bp, Homo sapien
cggccatagggtagcgtagggccat

SEQ ID NO: 708029 - DNA, 25 bp, Homo sapien
cacggccatagggtagcgtagggcc

SEQ ID NO: 708030 - DNA, 25 bp, Homo sapien
cccacggccatagggtagcgtaggg

SEQ ID NO: 708031 - DNA, 25 bp, Homo sapien
cggcgtcggctgtgcctgggcttgc

SEQ ID NO: 708032 - DNA, 25 bp, Homo sapien
cccgcggcgtcggctgtgcctgggc

SEQ ID NO: 708033 - DNA, 25 bp, Homo sapien
cgtcggctgtgcctgggcttgctca

SEQ ID NO: 708034 - DNA, 25 bp, Homo sapien
gtcggctgtgcctgggcttgctcac

SEQ ID NO: 708035 - DNA, 25 bp, Homo sapien
ctctgtgggtagctgtgagaaccaa

SEQ ID NO: 708036 - DNA, 25 bp, Homo sapien
gaacgcgcgttctttcaggtcgaga

SEQ ID NO: 708037 - DNA, 25 bp, Homo sapien
acccgctgcccgcttaataaaggcg

SEQ ID NO: 708038 - DNA, 25 bp, Homo sapien
tattaacgcctagcgcttttcgccg

SEQ ID NO: 708039 - DNA, 25 bp, Homo sapien
ccgaatcatgtcccgcacgaacttg

SEQ ID NO: 708040 - DNA, 25 bp, Homo sapien
gcgccgctcgtacggggcaaagcca

SEQ ID NO: 708041 - DNA, 25 bp, Homo sapien
actccatggcgcgccgctcgtacgg

SEQ ID NO: 708042 - DNA, 25 bp, Homo sapien
tgataaatttgagggcccgtttgtc

SEQ ID NO: 708043 - DNA, 25 bp, Homo sapien
ccagggacgaggccgccgtcagccc

SEQ ID NO: 708044 - DNA, 25 bp, Homo sapien
gccagggacgaggccgccgtcagcc

SEQ ID NO: 708045 - DNA, 25 bp, Homo sapien
tgccagggacgaggccgccgtcagc

SEQ ID NO: 708046 - DNA, 25 bp, Homo sapien
gaggccgccgtcagcccggccctga

SEQ ID NO: 708047 - DNA, 25 bp, Homo sapien
ccgcttcctcttggcgcggatgtgc

SEQ ID NO: 708048 - DNA, 25 bp, Homo sapien
cctcatggcggccagtacgttgctc

SEQ ID NO: 708049 - DNA, 25 bp, Homo sapien
atggcggccagtacgttgctcagct

SEQ ID NO: 708050 - DNA, 25 bp, Homo sapien
agctttcctcatggcggccagtacg

SEQ ID NO: 708051 - DNA, 25 bp, Homo sapien
gcgggccacggcttttgattcacga

SEQ ID NO: 708052 - DNA, 25 bp, Homo sapien
gtcatttgcagtacggcggcttcct

SEQ ID NO: 708053 - DNA, 25 bp, Homo sapien
cagcacccggagagggtgtggctca

SEQ ID NO: 708054 - DNA, 25 bp, Homo sapien
ttttgattcacgaccaggcagcacc

SEQ ID NO: 708055 - DNA, 25 bp, Homo sapien
ccggccacctgtgagtattgagcac

SEQ ID NO: 708056 - DNA, 25 bp, Homo sapien
cggccacctgtgagtattgagcact

SEQ ID NO: 708057 - DNA, 25 bp, Homo sapien
ggccacctgtgagtattgagcactt

SEQ ID NO: 708058 - DNA, 25 bp, Homo sapien
tgtactttgcacctttgacccctga

SEQ ID NO: 708059 - DNA, 25 bp, Homo sapien
tacctgaaagtcgagctagctgctc

SEQ ID NO: 708060 - DNA, 25 bp, Homo sapien
tagaaatgagttccatgggccgggc

SEQ ID NO: 708061 - DNA, 25 bp, Homo sapien
agaaggaaagttcgtctcgcccagc

SEQ ID NO: 708062 - DNA, 25 bp, Homo sapien
tcagcatcgacttgggcttccgccg

SEQ ID NO: 708063 - DNA, 25 bp, Homo sapien
tcaacatcagcatcgacttgggctt

SEQ ID NO: 708064 - DNA, 25 bp, Homo sapien
accagcatcaacatcagcatcgact

SEQ ID NO: 708065 - DNA, 25 bp, Homo sapien
accagcggtcggagccacatggtca

SEQ ID NO: 708066 - DNA, 25 bp, Homo sapien
tgagcgaggcgtcaagttcgattcc

SEQ ID NO: 708067 - DNA, 25 bp, Homo sapien
gcgtcaagttcgattcctaaaaaga

SEQ ID NO: 708068 - DNA, 25 bp, Homo sapien
agcaggcctcggctccaagatgaac

SEQ ID NO: 708069 - DNA, 25 bp, Homo sapien
agagcttaatatcgggctgggagga

SEQ ID NO: 708070 - DNA, 25 bp, Homo sapien
cccttgaacgtcctgtatcagatta

SEQ ID NO: 708071 - DNA, 25 bp, Homo sapien
ccttgaacgtcctgtatcagattaa

SEQ ID NO: 708072 - DNA, 25 bp, Homo sapien
tgaacgtcctgtatcagattaaaca

SEQ ID NO: 708073 - DNA, 25 bp, Homo sapien
ttgaacgtcctgtatcagattaaac

SEQ ID NO: 708074 - DNA, 25 bp, Homo sapien
tttaatcaagcgtgttgttgtagga

SEQ ID NO: 708075 - DNA, 25 bp, Homo sapien
ttgtaggatgaaaatacaggcggtc

SEQ ID NO: 708076 - DNA, 25 bp, Homo sapien
gcaaggatgtttaatcaagcgtgtt

SEQ ID NO: 708077 - DNA, 25 bp, Homo sapien
tatttttctcgcaaggatgtttaat

SEQ ID NO: 708078 - DNA, 25 bp, Homo sapien
gaaggagactagtctcaaagttatc

SEQ ID NO: 708079 - DNA, 25 bp, Homo sapien
taaatggaaggagactagtctcaaa

SEQ ID NO: 708080 - DNA, 25 bp, Homo sapien
ggagactagtctcaaagttatccat

SEQ ID NO: 708081 - DNA, 25 bp, Homo sapien
ctgcattgatgtagggatggtaaat

SEQ ID NO: 708082 - DNA, 25 bp, Homo sapien
tgtgctgatgtcacttctggtacgc

SEQ ID NO: 708083 - DNA, 25 bp, Homo sapien
gatccactactaacagcaataacga

SEQ ID NO: 708084 - DNA, 25 bp, Homo sapien
ttttgatccactactaacagcaata

SEQ ID NO: 708085 - DNA, 25 bp, Homo sapien
atgtgctgatgtcacttctggtacg

SEQ ID NO: 708086 - DNA, 25 bp, Homo sapien
caacaattatcaccagagacatgtg

SEQ ID NO: 708087 - DNA, 25 bp, Homo sapien
tcaccagagacatgtgtaacagggt

SEQ ID NO: 708088 - DNA, 25 bp, Homo sapien
agtataacaacaattatcaccagag

SEQ ID NO: 708089 - DNA, 25 bp, Homo sapien
caaacttccagtataacaacaatta

SEQ ID NO: 708090 - DNA, 25 bp, Homo sapien
tctccacggaaatatgcaaaaacca

SEQ ID NO: 708091 - DNA, 25 bp, Homo sapien
tgaatcccccagtatttgaataata

SEQ ID NO: 708092 - DNA, 25 bp, Homo sapien
taatatatataagtctgggatatct

SEQ ID NO: 708093 - DNA, 25 bp, Homo sapien
tagtgatacttccaaaaactgaatc

SEQ ID NO: 708094 - DNA, 25 bp, Homo sapien
gtggaagattccgcctaaagaccca

SEQ ID NO: 708095 - DNA, 25 bp, Homo sapien
gaagattccgcctaaagacccaatg

SEQ ID NO: 708096 - DNA, 25 bp, Homo sapien
gattccgcctaaagacccaatgatt

SEQ ID NO: 708097 - DNA, 25 bp, Homo sapien
cgcctaaagacccaatgatttctgc

SEQ ID NO: 708098 - DNA, 25 bp, Homo sapien
tcccttgattcactacaagcatcgc

SEQ ID NO: 708099 - DNA, 25 bp, Homo sapien
ccttgattcactacaagcatcgcaa

SEQ ID NO: 708100 - DNA, 25 bp, Homo sapien
cttcccttgattcactacaagcatc

SEQ ID NO: 708101 - DNA, 25 bp, Homo sapien
cttgattcactacaagcatcgcaac

SEQ ID NO: 708102 - DNA, 25 bp, Homo sapien
ggcgatgaggatgtctagagtccca

SEQ ID NO: 708103 - DNA, 25 bp, Homo sapien
tagagtcccattatagtcaaaagac

SEQ ID NO: 708104 - DNA, 25 bp, Homo sapien
ggtgatctgagtacttgaacatgcc

SEQ ID NO: 708105 - DNA, 25 bp, Homo sapien
aagacagcccgaaactccggttgag

SEQ ID NO: 708106 - DNA, 25 bp, Homo sapien
ttgagcctgagaggtggggaggctg

SEQ ID NO: 708107 - DNA, 25 bp, Homo sapien
tgcactccagtctcgatgacagagt

SEQ ID NO: 708108 - DNA, 25 bp, Homo sapien
actccagtctcgatgacagagtgaa

SEQ ID NO: 708109 - DNA, 25 bp, Homo sapien
cagtgagccacgattgcaccattgc

SEQ ID NO: 708110 - DNA, 25 bp, Homo sapien
tgatcttggcttcaaaaatggaaga

SEQ ID NO: 708111 - DNA, 25 bp, Homo sapien
tcacccggacggtgtcgacgagctg

SEQ ID NO: 708112 - DNA, 25 bp, Homo sapien
acccggacggtgtcgacgagctgac

SEQ ID NO: 708113 - DNA, 25 bp, Homo sapien
tttcacccggacggtgtcgacgagc

SEQ ID NO: 708114 - DNA, 25 bp, Homo sapien
aattatcctcccgagttataactgc

SEQ ID NO: 708115 - DNA, 25 bp, Homo sapien
taatacaaattatcctcccgagtta

SEQ ID NO: 708116 - DNA, 25 bp, Homo sapien
gatgcccagattgccataatacaaa

SEQ ID NO: 708117 - DNA, 25 bp, Homo sapien
tatggaacttggcacgatgcccaga

SEQ ID NO: 708118 - DNA, 25 bp, Homo sapien
aagctggaaaggctgtgtcacgcag

SEQ ID NO: 708119 - DNA, 25 bp, Homo sapien
gtccctgggctcctgaacatcaggg

SEQ ID NO: 708120 - DNA, 25 bp, Homo sapien
gagaagcgcctggatattcacgagg

SEQ ID NO: 708121 - DNA, 25 bp, Homo sapien
gagttcagggtccatgagaagcgcc

SEQ ID NO: 708122 - DNA, 25 bp, Homo sapien
cactgcgcctgacctctttctgttt

SEQ ID NO: 708123 - DNA, 25 bp, Homo sapien
aagtgcttgaggttacagttgtgag

SEQ ID NO: 708124 - DNA, 25 bp, Homo sapien
cccaaagtgcttgaggttacagttg

SEQ ID NO: 708125 - DNA, 25 bp, Homo sapien
tgttgccacgctggtcccaaattcc

SEQ ID NO: 708126 - DNA, 25 bp, Homo sapien
tataaattctcctgtcagaaactct

SEQ ID NO: 708127 - DNA, 25 bp, Homo sapien
ataaattctcctgtcagaaactcta

SEQ ID NO: 708128 - DNA, 25 bp, Homo sapien
tggggtatcaacgaagcagtcaatt

SEQ ID NO: 708129 - DNA, 25 bp, Homo sapien
tggctggggtatcaacgaagcagtc

SEQ ID NO: 708130 - DNA, 25 bp, Homo sapien
gtatcaacgaagcagtcaattccag

SEQ ID NO: 708131 - DNA, 25 bp, Homo sapien
ggctgtgcatgtcaatggtatacat

SEQ ID NO: 708132 - DNA, 25 bp, Homo sapien
ggtgttcccatctgatgtgtaaccg

SEQ ID NO: 708133 - DNA, 25 bp, Homo sapien
tcccatctgatgtgtaaccgttctc

SEQ ID NO: 708134 - DNA, 25 bp, Homo sapien
gtacttggtgttcccatctgatgtg

SEQ ID NO: 708135 - DNA, 25 bp, Homo sapien
gatgtgtaaccgttctcgtagaagg

SEQ ID NO: 708136 - DNA, 25 bp, Homo sapien
aagtgaagttggagtcggtcctgcc

SEQ ID NO: 708137 - DNA, 25 bp, Homo sapien
gtgaagttggagtcggtcctgcccc

SEQ ID NO: 708138 - DNA, 25 bp, Homo sapien
aagttggagtcggtcctgccccagt

SEQ ID NO: 708139 - DNA, 25 bp, Homo sapien
ttggagtcggtcctgccccagtgct

SEQ ID NO: 708140 - DNA, 25 bp, Homo sapien
tgcaaggcaacggaacctgtgttat

SEQ ID NO: 708141 - DNA, 25 bp, Homo sapien
acggaacctgtgttattagagaata

SEQ ID NO: 708142 - DNA, 25 bp, Homo sapien
ggcaacggaacctgtgttattagag

SEQ ID NO: 708143 - DNA, 25 bp, Homo sapien
caaggcaacggaacctgtgttatta

SEQ ID NO: 708144 - DNA, 25 bp, Homo sapien
taaggtagacatggtggctttcttt

SEQ ID NO: 708145 - DNA, 25 bp, Homo sapien
atttccttgtttgctatgtccacag

SEQ ID NO: 708146 - DNA, 25 bp, Homo sapien
tgctatgtccacagttaaggtagac

SEQ ID NO: 708147 - DNA, 25 bp, Homo sapien
cagtggcttgatatccacacatgaa

SEQ ID NO: 708148 - DNA, 25 bp, Homo sapien
tgagtcttaacacttatgacaccga

SEQ ID NO: 708149 - DNA, 25 bp, Homo sapien
cgaatatgggacagcaaagatttgg

SEQ ID NO: 708150 - DNA, 25 bp, Homo sapien
ttatgacaccgaatatgggacagca

SEQ ID NO: 708151 - DNA, 25 bp, Homo sapien
gcaacctcagggccagcttccatga

SEQ ID NO: 708152 - DNA, 25 bp, Homo sapien
ttttatccaggtcgcagccaactga

SEQ ID NO: 708153 - DNA, 25 bp, Homo sapien
ttatccaggtcgcagccaactgaaa

SEQ ID NO: 708154 - DNA, 25 bp, Homo sapien
atccaggtcgcagccaactgaaatc

SEQ ID NO: 708155 - DNA, 25 bp, Homo sapien
ctttttatccaggtcgcagccaact

SEQ ID NO: 708156 - DNA, 25 bp, Homo sapien
atgcccatggaacaggcggaaactt

SEQ ID NO: 708157 - DNA, 25 bp, Homo sapien
taattgtcttgcagggtcaaggggt

SEQ ID NO: 708158 - DNA, 25 bp, Homo sapien
tgtaattgtcttgcagggtcaaggg

SEQ ID NO: 708159 - DNA, 25 bp, Homo sapien
aggatgcccatggaacaggcggaaa

SEQ ID NO: 708160 - DNA, 25 bp, Homo sapien
aacacgtgcaggtcctcggaggact

SEQ ID NO: 708161 - DNA, 25 bp, Homo sapien
aaacacgtgcaggtcctcggaggac

SEQ ID NO: 708162 - DNA, 25 bp, Homo sapien
acacgtgcaggtcctcggaggactg

SEQ ID NO: 708163 - DNA, 25 bp, Homo sapien
catagggtgtcatagtagacgagga

SEQ ID NO: 708164 - DNA, 25 bp, Homo sapien
cgggcttccatagggtgtcatagta

SEQ ID NO: 708165 - DNA, 25 bp, Homo sapien
atagtagacgaggagaggacagccc

SEQ ID NO: 708166 - DNA, 25 bp, Homo sapien
tccaccacgggcttccatagggtgt

SEQ ID NO: 708167 - DNA, 25 bp, Homo sapien
gcattgtggtatgcaactgcagtcc

SEQ ID NO: 708168 - DNA, 25 bp, Homo sapien
ccgggcattgtggtatgcaactgca

SEQ ID NO: 708169 - DNA, 25 bp, Homo sapien
attaaccgggcattgtggtatgcaa

SEQ ID NO: 708170 - DNA, 25 bp, Homo sapien
cattgtggtatgcaactgcagtccc

SEQ ID NO: 708171 - DNA, 25 bp, Homo sapien
ccgtcagggaataggagtatgagaa

SEQ ID NO: 708172 - DNA, 25 bp, Homo sapien
tccagtaacacatactcggcgtcga

SEQ ID NO: 708173 - DNA, 25 bp, Homo sapien
cagttctgcggctgggaggtacaca

SEQ ID NO: 708174 - DNA, 25 bp, Homo sapien
agtatgagaactgcccgttcacctc

SEQ ID NO: 708175 - DNA, 25 bp, Homo sapien
ccccccgaattcctttatcatggtg

SEQ ID NO: 708176 - DNA, 25 bp, Homo sapien
ccccgaattcctttatcatggtggt

SEQ ID NO: 708177 - DNA, 25 bp, Homo sapien
cccccgaattcctttatcatggtgg

SEQ ID NO: 708178 - DNA, 25 bp, Homo sapien
tctctgttccagaagaagggccccc

SEQ ID NO: 708179 - DNA, 25 bp, Homo sapien
cagtagcaagcattgggatggtccc

SEQ ID NO: 708180 - DNA, 25 bp, Homo sapien
tgtgtaacatactgaagccctgcct

SEQ ID NO: 708181 - DNA, 25 bp, Homo sapien
cccgggaagatacacgtggactgat

SEQ ID NO: 708182 - DNA, 25 bp, Homo sapien
tacaaaacattgtgtcccgggaaga

SEQ ID NO: 708183 - DNA, 25 bp, Homo sapien
gaagcggggagctctcttcttcccc

SEQ ID NO: 708184 - DNA, 25 bp, Homo sapien
aagcggggagctctcttcttcccca

SEQ ID NO: 708185 - DNA, 25 bp, Homo sapien
tagaagcggggagctctcttcttcc

SEQ ID NO: 708186 - DNA, 25 bp, Homo sapien
agaagcggggagctctcttcttccc

SEQ ID NO: 708187 - DNA, 25 bp, Homo sapien
aatgatctggtttgctgtccggccg

SEQ ID NO: 708188 - DNA, 25 bp, Homo sapien
gccattgtggccgaaaatgatctgg

SEQ ID NO: 708189 - DNA, 25 bp, Homo sapien
gtccggccgcccaagatctgatact

SEQ ID NO: 708190 - DNA, 25 bp, Homo sapien
tctgatactggacgtctggccacct

SEQ ID NO: 708191 - DNA, 25 bp, Homo sapien
atatactatcttcacaacattatta

SEQ ID NO: 708192 - DNA, 25 bp, Homo sapien
taataatgttgtgaagatagtatat

SEQ ID NO: 708193 - DNA, 25 bp, Homo sapien
ttctcccccaatgcccaggctctgg

SEQ ID NO: 708194 - DNA, 25 bp, Homo sapien
tattctcccccaatgcccaggctct

SEQ ID NO: 708195 - DNA, 25 bp, Homo sapien
ctattctcccccaatgcccaggctc

SEQ ID NO: 708196 - DNA, 25 bp, Homo sapien
attctcccccaatgcccaggctctg

SEQ ID NO: 708197 - DNA, 25 bp, Homo sapien
gggaatgctccatacacgtagatgc

SEQ ID NO: 708198 - DNA, 25 bp, Homo sapien
cttcttgatcctgcggccgcgtgct

SEQ ID NO: 708199 - DNA, 25 bp, Homo sapien
tggagatgatcagtaggatgacgac

SEQ ID NO: 708200 - DNA, 25 bp, Homo sapien
ggatgacgactccagcagagaccag

SEQ ID NO: 708201 - DNA, 25 bp, Homo sapien
tgcggtggcgtcccgggggctctgt

SEQ ID NO: 708202 - DNA, 25 bp, Homo sapien
gagtgcggtggcgtcccgggggctc

SEQ ID NO: 708203 - DNA, 25 bp, Homo sapien
gtgcggtggcgtcccgggggctctg

SEQ ID NO: 708204 - DNA, 25 bp, Homo sapien
agtgcggtggcgtcccgggggctct

SEQ ID NO: 708205 - DNA, 25 bp, Homo sapien
cattatactttatttgaagacaagg

SEQ ID NO: 708206 - DNA, 25 bp, Homo sapien
attatactttatttgaagacaaggg

SEQ ID NO: 708207 - DNA, 25 bp, Homo sapien
acattatactttatttgaagacaag

SEQ ID NO: 708208 - DNA, 25 bp, Homo sapien
agacagtgcccacgcgtgaaggggt

SEQ ID NO: 708209 - DNA, 25 bp, Homo sapien
gcagggcgggaagggccacgctctt

SEQ ID NO: 708210 - DNA, 25 bp, Homo sapien
gggacagcctggctactcgttccaa

SEQ ID NO: 708211 - DNA, 25 bp, Homo sapien
cgggaagggccacgctcttgttcag

SEQ ID NO: 708212 - DNA, 25 bp, Homo sapien
tcacggagggtactttgcaggtcct

SEQ ID NO: 708213 - DNA, 25 bp, Homo sapien
gactggatccgcatcaggtgcctgg

SEQ ID NO: 708214 - DNA, 25 bp, Homo sapien
caaacctcttagctgcctccatggg

SEQ ID NO: 708215 - DNA, 25 bp, Homo sapien
caacgcgtacaagtagcctcaggct

SEQ ID NO: 708216 - DNA, 25 bp, Homo sapien
tcattggaacgacatgagcatgcgc

SEQ ID NO: 708217 - DNA, 25 bp, Homo sapien
cacaatcagggaagacacgcgtgac

SEQ ID NO: 708218 - DNA, 25 bp, Homo sapien
tagtttatataggacctgaggctcc

SEQ ID NO: 708219 - DNA, 25 bp, Homo sapien
cagttcgcaattggccaggctctag

SEQ ID NO: 708220 - DNA, 25 bp, Homo sapien
ctgtcctgaagccaggagataagga

SEQ ID NO: 708221 - DNA, 25 bp, Homo sapien
cagctgcagccacagataaaggagt

SEQ ID NO: 708222 - DNA, 25 bp, Homo sapien
ggagtcgcagccacaaatccggggc

SEQ ID NO: 708223 - DNA, 25 bp, Homo sapien
ggcagcatcgggcactgagcccggg

SEQ ID NO: 708224 - DNA, 25 bp, Homo sapien
actcacacacttggacgcttccacc

SEQ ID NO: 708225 - DNA, 25 bp, Homo sapien
tcacacacttggacgcttccacctt

SEQ ID NO: 708226 - DNA, 25 bp, Homo sapien
cacacacttggacgcttccaccttc

SEQ ID NO: 708227 - DNA, 25 bp, Homo sapien
cacacttggacgcttccaccttcat

SEQ ID NO: 708228 - DNA, 25 bp, Homo sapien
gctcacatgctagggcgttttcaca

SEQ ID NO: 708229 - DNA, 25 bp, Homo sapien
atttgaatacgtcgtgctcacatgc

SEQ ID NO: 708230 - DNA, 25 bp, Homo sapien
tacgtcgtgctcacatgctagggcg

SEQ ID NO: 708231 - DNA, 25 bp, Homo sapien
tagggcgttttcacagtcacactca

SEQ ID NO: 708232 - DNA, 25 bp, Homo sapien
tctgttctcgggggccacctaactg

SEQ ID NO: 708233 - DNA, 25 bp, Homo sapien
cagccatgaacaatgggcctctctg

SEQ ID NO: 708234 - DNA, 25 bp, Homo sapien
gactctccccacctagagctctggt

SEQ ID NO: 708235 - DNA, 25 bp, Homo sapien
ccctggaggccttggagcttcagac

SEQ ID NO: 708236 - DNA, 25 bp, Homo sapien
gtcccggagtgccttcctgaggagc

SEQ ID NO: 708237 - DNA, 25 bp, Homo sapien
caaggaaccattgaacaaggaaggg

SEQ ID NO: 708238 - DNA, 25 bp, Homo sapien
gcctttgactttgaacgcctgccga

SEQ ID NO: 708239 - DNA, 25 bp, Homo sapien
cttgaataaacgtaggagttggcca

SEQ ID NO: 708240 - DNA, 25 bp, Homo sapien
caatccgggcgtccagggttcgagg

SEQ ID NO: 708241 - DNA, 25 bp, Homo sapien
ggggaccagcgcaggtccgaggcgg

SEQ ID NO: 708242 - DNA, 25 bp, Homo sapien
gccaggcgggcaatccgggcgtcca

SEQ ID NO: 708243 - DNA, 25 bp, Homo sapien
gcaggcggtgcagggggaccagcgc

SEQ ID NO: 708244 - DNA, 25 bp, Homo sapien
gggtatctgaccccacacagaggag

SEQ ID NO: 708245 - DNA, 25 bp, Homo sapien
ggggtatctgaccccacacagagga

SEQ ID NO: 708246 - DNA, 25 bp, Homo sapien
ggtatctgaccccacacagaggagg

SEQ ID NO: 708247 - DNA, 25 bp, Homo sapien
gggggtatctgaccccacacagagg

SEQ ID NO: 708248 - DNA, 25 bp, Homo sapien
tgcacctggctgtcaaaagaatgag

SEQ ID NO: 708249 - DNA, 25 bp, Homo sapien
ggtgcacctggctgtcaaaagaatg

SEQ ID NO: 708250 - DNA, 25 bp, Homo sapien
gcacctggctgtcaaaagaatgagc

SEQ ID NO: 708251 - DNA, 25 bp, Homo sapien
cacctggctgtcaaaagaatgagcc

SEQ ID NO: 708252 - DNA, 25 bp, Homo sapien
ctcgcgcagcccgcaaggccgcgcc

SEQ ID NO: 708253 - DNA, 25 bp, Homo sapien
ctcgcgcagctccatcgcatccggg

SEQ ID NO: 708254 - DNA, 25 bp, Homo sapien
gcgcccccaaccgcgcacgcgcgcg

SEQ ID NO: 708255 - DNA, 25 bp, Homo sapien
agctcgcgcagctccatcgcatccg

SEQ ID NO: 708256 - DNA, 25 bp, Homo sapien
tgcgcagtagcggaacagcaccgtc

SEQ ID NO: 708257 - DNA, 25 bp, Homo sapien
tcctcgtaggccgtcgggcggcagc

SEQ ID NO: 708258 - DNA, 25 bp, Homo sapien
agcctcgcaggcgcctgcgcagtag

SEQ ID NO: 708259 - DNA, 25 bp, Homo sapien
tcgtcgcagcccgaggtcgtagacg

SEQ ID NO: 708260 - DNA, 25 bp, Homo sapien
ggctgtgcgcgtccaggaaggacac

SEQ ID NO: 708261 - DNA, 25 bp, Homo sapien
gcgccgacagctcgtgcaccgtgtg

SEQ ID NO: 708262 - DNA, 25 bp, Homo sapien
cactcgcgcgccgacagctcgtgca

SEQ ID NO: 708263 - DNA, 25 bp, Homo sapien
gtgtggtagcggctgtgcgcgtcca

SEQ ID NO: 708264 - DNA, 25 bp, Homo sapien
gttgccacactttatctcagtacag

SEQ ID NO: 708265 - DNA, 25 bp, Homo sapien
gccggccagtggtgccgtcgaggcg

SEQ ID NO: 708266 - DNA, 25 bp, Homo sapien
cagtacagttatcgcgagagtcccg

SEQ ID NO: 708267 - DNA, 25 bp, Homo sapien
tctacgcacgcgcagtctttcgcgg

SEQ ID NO: 708268 - DNA, 25 bp, Homo sapien
tcccagaaggtgtcagacgcagcag

SEQ ID NO: 708269 - DNA, 25 bp, Homo sapien
aaggcctgtctccagatccccgagt

SEQ ID NO: 708270 - DNA, 25 bp, Homo sapien
ttgaggttcacggacacagtcccct

SEQ ID NO: 708271 - DNA, 25 bp, Homo sapien
catccagacgggatccagtgcatcc

SEQ ID NO: 708272 - DNA, 25 bp, Homo sapien
cacatcgcattgaagccacaggtgg

SEQ ID NO: 708273 - DNA, 25 bp, Homo sapien
gttttcaaaggatgtccgggctcca

SEQ ID NO: 708274 - DNA, 25 bp, Homo sapien
gaaagcggaaaggtagaaattctgc

SEQ ID NO: 708275 - DNA, 25 bp, Homo sapien
ggtcatgcatgacctgagtctccaa

SEQ ID NO: 708276 - DNA, 25 bp, Homo sapien
ttggcctggcacttagtgctcagga

SEQ ID NO: 708277 - DNA, 25 bp, Homo sapien
tatttggtgatgggccaactgagtg

SEQ ID NO: 708278 - DNA, 25 bp, Homo sapien
tgatgggccaactgagtgagaaggt

SEQ ID NO: 708279 - DNA, 25 bp, Homo sapien
cggtttcctgcaagatcccttggcc

SEQ ID NO: 708280 - DNA, 25 bp, Homo sapien
ccttccaaggttcatgagttgcctg

SEQ ID NO: 708281 - DNA, 25 bp, Homo sapien
ggttcatgagttgcctgacttgccc

SEQ ID NO: 708282 - DNA, 25 bp, Homo sapien
ccaaggttcatgagttgcctgactt

SEQ ID NO: 708283 - DNA, 25 bp, Homo sapien
ttccaaggttcatgagttgcctgac

SEQ ID NO: 708284 - DNA, 25 bp, Homo sapien
ggaagtttgcatagctccctggact

SEQ ID NO: 708285 - DNA, 25 bp, Homo sapien
caggaagtttgcatagctccctgga

SEQ ID NO: 708286 - DNA, 25 bp, Homo sapien
tccattccaggaagtttgcatagct

SEQ ID NO: 708287 - DNA, 25 bp, Homo sapien
ttccaggaagtttgcatagctccct

SEQ ID NO: 708288 - DNA, 25 bp, Homo sapien
tgctgctgtctacaaaatgccaagg

SEQ ID NO: 708289 - DNA, 25 bp, Homo sapien
ttctggaacattccaaatattctgg

SEQ ID NO: 708290 - DNA, 25 bp, Homo sapien
cattccaaatattctggggttgagg

SEQ ID NO: 708291 - DNA, 25 bp, Homo sapien
aattgctgctgtctacaaaatgcca

SEQ ID NO: 708292 - DNA, 25 bp, Homo sapien
tgctgtcccgaaggagtcccgctga

SEQ ID NO: 708293 - DNA, 25 bp, Homo sapien
taggtggatctcttcagggagtgaa

SEQ ID NO: 708294 - DNA, 25 bp, Homo sapien
ccgctgacccgggtcttcggcacca

SEQ ID NO: 708295 - DNA, 25 bp, Homo sapien
cggcaccaaatgtctcatgcgtccg

SEQ ID NO: 708296 - DNA, 25 bp, Homo sapien
tgtcacactcgcccgtgtgaagaga

SEQ ID NO: 708297 - DNA, 25 bp, Homo sapien
gtcacactcgcccgtgtgaagagag

SEQ ID NO: 708298 - DNA, 25 bp, Homo sapien
tcacactcgcccgtgtgaagagagt

SEQ ID NO: 708299 - DNA, 25 bp, Homo sapien
ggcttccgaggcgaccaggcagcat

SEQ ID NO: 708300 - DNA, 25 bp, Homo sapien
cttccgaggcgaccaggcagcatca

SEQ ID NO: 708301 - DNA, 25 bp, Homo sapien
ccgaggcgaccaggcagcatcagtc

SEQ ID NO: 708302 - DNA, 25 bp, Homo sapien
ttccgaggcgaccaggcagcatcag

SEQ ID NO: 708303 - DNA, 25 bp, Homo sapien
ttctgcaaacattgtgtcacgcacg

SEQ ID NO: 708304 - DNA, 25 bp, Homo sapien
gaccacgtgacagccaccttcatat

SEQ ID NO: 708305 - DNA, 25 bp, Homo sapien
gattcttttctctacgtggaatgct

SEQ ID NO: 708306 - DNA, 25 bp, Homo sapien
gtcacaaagttaattgatcagtaaa

SEQ ID NO: 708307 - DNA, 25 bp, Homo sapien
ttaaaattgagatgtcgtctcgctc

SEQ ID NO: 708308 - DNA, 25 bp, Homo sapien
taaaattgagatgtcgtctcgctct

SEQ ID NO: 708309 - DNA, 25 bp, Homo sapien
cctcttccacgtcctgagaatccag

SEQ ID NO: 708310 - DNA, 25 bp, Homo sapien
tcttccacgtcctgagaatccagct

SEQ ID NO: 708311 - DNA, 25 bp, Homo sapien
tgctgctacctggtctggcctcttc

SEQ ID NO: 708312 - DNA, 25 bp, Homo sapien
ttcagctccaggtatacttcctcct

SEQ ID NO: 708313 - DNA, 25 bp, Homo sapien
tccaaatccctgcaccctttccaat

SEQ ID NO: 708314 - DNA, 25 bp, Homo sapien
atgacctaggcctccaaatccctgc

SEQ ID NO: 708315 - DNA, 25 bp, Homo sapien
tcaaagccgcattgcattgaggcca

SEQ ID NO: 708316 - DNA, 25 bp, Homo sapien
gcattgaggccaccggtaggaccag

SEQ ID NO: 708317 - DNA, 25 bp, Homo sapien
ctggctccttggacttctacactgc

SEQ ID NO: 708318 - DNA, 25 bp, Homo sapien
tggctccttggacttctacactgcc

SEQ ID NO: 708319 - DNA, 25 bp, Homo sapien
accacctggctgcaagccaggggtc

SEQ ID NO: 708320 - DNA, 25 bp, Homo sapien
cccaccacctggctgcaagccaggg

SEQ ID NO: 708321 - DNA, 25 bp, Homo sapien
tccccaccacctggctgcaagccag

SEQ ID NO: 708322 - DNA, 25 bp, Homo sapien
tctccccaccacctggctgcaagcc

SEQ ID NO: 708323 - DNA, 25 bp, Homo sapien
ccagcctgtagagggggtacgcaga

SEQ ID NO: 708324 - DNA, 25 bp, Homo sapien
agggacccaggccaaacattccagc

SEQ ID NO: 708325 - DNA, 25 bp, Homo sapien
gagggggtacgcagagaccctgtgg

SEQ ID NO: 708326 - DNA, 25 bp, Homo sapien
cctgtagagggggtacgcagagacc

SEQ ID NO: 708327 - DNA, 25 bp, Homo sapien
catcttcccaaggtgagtggcatct

SEQ ID NO: 708328 - DNA, 25 bp, Homo sapien
gtaatttttgccgatggagagacag

SEQ ID NO: 708329 - DNA, 25 bp, Homo sapien
tactcttcagagaacgccaacaggg

SEQ ID NO: 708330 - DNA, 25 bp, Homo sapien
agagtggaccgtaactcctggtgca

SEQ ID NO: 708331 - DNA, 25 bp, Homo sapien
caccattggcgcacacaggtccttc

SEQ ID NO: 708332 - DNA, 25 bp, Homo sapien
gaaagctgggtggtcgggccgagct

SEQ ID NO: 708333 - DNA, 25 bp, Homo sapien
ctgtggtcctcctcagagcgtgggc

SEQ ID NO: 708334 - DNA, 25 bp, Homo sapien
cctcctcagagcgtgggcgctcaga

SEQ ID NO: 708335 - DNA, 25 bp, Homo sapien
tctgtctctactgcggccggcaggg

SEQ ID NO: 708336 - DNA, 25 bp, Homo sapien
gctgggcagtgtggacccgggcggt

SEQ ID NO: 708337 - DNA, 25 bp, Homo sapien
gggcatcgcatccactcgagggcac

SEQ ID NO: 708338 - DNA, 25 bp, Homo sapien
gggcagtgtggacccgggcggtcat

SEQ ID NO: 708339 - DNA, 25 bp, Homo sapien
tccacttccggagctgggtgcccgg

SEQ ID NO: 708340 - DNA, 25 bp, Homo sapien
gtccacttccggagctgggtgcccg

SEQ ID NO: 708341 - DNA, 25 bp, Homo sapien
acgtccacttccggagctgggtgcc

SEQ ID NO: 708342 - DNA, 25 bp, Homo sapien
tcacgtccacttccggagctgggtg

SEQ ID NO: 708343 - DNA, 25 bp, Homo sapien
gtgtcaggtgtgctccatgagctag

SEQ ID NO: 708344 - DNA, 25 bp, Homo sapien
catgagctaggggtcccttggtcag

SEQ ID NO: 708345 - DNA, 25 bp, Homo sapien
tgtaaggaggttccgcccaggagtc

SEQ ID NO: 708346 - DNA, 25 bp, Homo sapien
tggtgtaaggaggttccgcccagga

SEQ ID NO: 708347 - DNA, 25 bp, Homo sapien
ccttatcgagggtcttcaagagaaa

SEQ ID NO: 708348 - DNA, 25 bp, Homo sapien
gcaagtccaggtcggctgacctgct

SEQ ID NO: 708349 - DNA, 25 bp, Homo sapien
gacagacgttattgtgtctccattt

SEQ ID NO: 708350 - DNA, 25 bp, Homo sapien
gttcccatcaggtccttatcgaggg

SEQ ID NO: 708351 - DNA, 25 bp, Homo sapien
cgcagctgctggtcgtggagggcca

SEQ ID NO: 708352 - DNA, 25 bp, Homo sapien
aggcgctcggcttgggcgtgcaccg

SEQ ID NO: 708353 - DNA, 25 bp, Homo sapien
cacggctgccaggtgtgcgtttgcc

SEQ ID NO: 708354 - DNA, 25 bp, Homo sapien
acccagttcgtctagggcggcgcgc

SEQ ID NO: 708355 - DNA, 25 bp, Homo sapien
ggctgcaactgcctaatgagctcgt

SEQ ID NO: 708356 - DNA, 25 bp, Homo sapien
tcgtccctctggtgcacggtggcct

SEQ ID NO: 708357 - DNA, 25 bp, Homo sapien
tgcctaatgagctcgtccctctggt

SEQ ID NO: 708358 - DNA, 25 bp, Homo sapien
gcaactgcctaatgagctcgtccct

SEQ ID NO: 708359 - DNA, 25 bp, Homo sapien
actgtggtcccaaacactgcaggct

SEQ ID NO: 708360 - DNA, 25 bp, Homo sapien
tgttgtcaaggggtggaccaggccc

SEQ ID NO: 708361 - DNA, 25 bp, Homo sapien
gtggtcccaaacactgcaggctgga

SEQ ID NO: 708362 - DNA, 25 bp, Homo sapien
tgtggtcccaaacactgcaggctgg

SEQ ID NO: 708363 - DNA, 25 bp, Homo sapien
tggtgactcccaaggacactgacag

SEQ ID NO: 708364 - DNA, 25 bp, Homo sapien
ccctggctaaagagggtgccctgaa

SEQ ID NO: 708365 - DNA, 25 bp, Homo sapien
catgctacaaaagctaggctagggc

SEQ ID NO: 708366 - DNA, 25 bp, Homo sapien
gccaagtcttgccagaaatccagat

SEQ ID NO: 708367 - DNA, 25 bp, Homo sapien
gaaggccttcaacggagacatcgga

SEQ ID NO: 708368 - DNA, 25 bp, Homo sapien
ttgtgaccccgagtggaagagcagc

SEQ ID NO: 708369 - DNA, 25 bp, Homo sapien
tatacctgcccgctaagataggtgg

SEQ ID NO: 708370 - DNA, 25 bp, Homo sapien
tgccctggatggagacaagtccgtg

SEQ ID NO: 708371 - DNA, 25 bp, Homo sapien
ggccgactgccccttgttcagatgc

SEQ ID NO: 708372 - DNA, 25 bp, Homo sapien
accctggccgactgccccttgttca

SEQ ID NO: 708373 - DNA, 25 bp, Homo sapien
gggactcccgcaagcccaccctggc

SEQ ID NO: 708374 - DNA, 25 bp, Homo sapien
gactgccccttgttcagatgctcac

SEQ ID NO: 708375 - DNA, 25 bp, Homo sapien
aggcactgtgcccggagtttctcca

SEQ ID NO: 708376 - DNA, 25 bp, Homo sapien
cgaggccccgcgggacaggcactgt

SEQ ID NO: 708377 - DNA, 25 bp, Homo sapien
tggatgcccgaggccccgcgggaca

SEQ ID NO: 708378 - DNA, 25 bp, Homo sapien
ggcactgtgcccggagtttctccat

SEQ ID NO: 708379 - DNA, 25 bp, Homo sapien
gggacacggttggaacagtggtctc

SEQ ID NO: 708380 - DNA, 25 bp, Homo sapien
aggcaggggacacggttggaacagt

SEQ ID NO: 708381 - DNA, 25 bp, Homo sapien
caggggacacggttggaacagtggt

SEQ ID NO: 708382 - DNA, 25 bp, Homo sapien
ggacacggttggaacagtggtctca

SEQ ID NO: 708383 - DNA, 25 bp, Homo sapien
gctgccattgcggtcccacttcctg

SEQ ID NO: 708384 - DNA, 25 bp, Homo sapien
gaactcatcagcgtccagggatctg

SEQ ID NO: 708385 - DNA, 25 bp, Homo sapien
cagatccagcgtcccgctgccattg

SEQ ID NO: 708386 - DNA, 25 bp, Homo sapien
agcaccagcccgagtttggccagac

SEQ ID NO: 708387 - DNA, 25 bp, Homo sapien
cagggcacacgccttgactgtgagg

SEQ ID NO: 708388 - DNA, 25 bp, Homo sapien
atctcagcatcctctgtcgccccat

SEQ ID NO: 708389 - DNA, 25 bp, Homo sapien
tcttaacagcagctcttagggagga

SEQ ID NO: 708390 - DNA, 25 bp, Homo sapien
tagggaggagtccccgtctccgcat

SEQ ID NO: 708391 - DNA, 25 bp, Homo sapien
ccccactgcggtccagcttggcaaa

SEQ ID NO: 708392 - DNA, 25 bp, Homo sapien
cccactgcggtccagcttggcaaat

SEQ ID NO: 708393 - DNA, 25 bp, Homo sapien
gccgtccccactgcggtccagcttg

SEQ ID NO: 708394 - DNA, 25 bp, Homo sapien
gacgccgtccccactgcggtccagc

SEQ ID NO: 708395 - DNA, 25 bp, Homo sapien
ggccactgtacaccccgcggaggtc

SEQ ID NO: 708396 - DNA, 25 bp, Homo sapien
tgtacaccccgcggaggtcgtccac

SEQ ID NO: 708397 - DNA, 25 bp, Homo sapien
acggccactgtacaccccgcggagg

SEQ ID NO: 708398 - DNA, 25 bp, Homo sapien
gggcacggccactgtacaccccgcg

SEQ ID NO: 708399 - DNA, 25 bp, Homo sapien
ttctcagaggagtcgaagttgtcca

SEQ ID NO: 708400 - DNA, 25 bp, Homo sapien
ctcagaggagtcgaagttgtccagg

SEQ ID NO: 708401 - DNA, 25 bp, Homo sapien
agcacctcgtcctcggtccactccc

SEQ ID NO: 708402 - DNA, 25 bp, Homo sapien
caggaagcggcgcagcacctcgtcc

SEQ ID NO: 708403 - DNA, 25 bp, Homo sapien
gcactcacgccgctgtagtagtcct

SEQ ID NO: 708404 - DNA, 25 bp, Homo sapien
tgccaggcactggtcatcatggcca

SEQ ID NO: 708405 - DNA, 25 bp, Homo sapien
agtcctggaattccgccagtgtgac

SEQ ID NO: 708406 - DNA, 25 bp, Homo sapien
tcctcatccgtgttcatggaggcac

SEQ ID NO: 708407 - DNA, 25 bp, Homo sapien
tctgaggttaggatgcccctgtgcc

SEQ ID NO: 708408 - DNA, 25 bp, Homo sapien
tgagccagtgactcctgttaggacc

SEQ ID NO: 708409 - DNA, 25 bp, Homo sapien
tgcaagatctctggtcagcatggcg

SEQ ID NO: 708410 - DNA, 25 bp, Homo sapien
ctttgtcccacctccgcctggtgga

SEQ ID NO: 708411 - DNA, 25 bp, Homo sapien
tcgggccgctcaccagaatgtagat

SEQ ID NO: 708412 - DNA, 25 bp, Homo sapien
atgctcccacccagcgtgtcaccag

SEQ ID NO: 708413 - DNA, 25 bp, Homo sapien
accagaatgtagatactgggcccgc

SEQ ID NO: 708414 - DNA, 25 bp, Homo sapien
gaagcccctgaccaggaacggcctc

SEQ ID NO: 708415 - DNA, 25 bp, Homo sapien
gctctcgagcgttgagcaggcacag

SEQ ID NO: 708416 - DNA, 25 bp, Homo sapien
ccctgtctgtcctaggcctggagag

SEQ ID NO: 708417 - DNA, 25 bp, Homo sapien
ggcgcaaactgcttcccgctgttgg

SEQ ID NO: 708418 - DNA, 25 bp, Homo sapien
tggtcccagaacaggcagtctcaca

SEQ ID NO: 708419 - DNA, 25 bp, Homo sapien
tgggcccattggacgtgctgttaac

SEQ ID NO: 708420 - DNA, 25 bp, Homo sapien
cagactcgggaactgcctgaatgtg

SEQ ID NO: 708421 - DNA, 25 bp, Homo sapien
tggtttgggacacgagacctcatca

SEQ ID NO: 708422 - DNA, 25 bp, Homo sapien
tcgtacgagtgtagacactgggccc

SEQ ID NO: 708423 - DNA, 25 bp, Homo sapien
atccaacgaggaggacgacagcgac

SEQ ID NO: 708424 - DNA, 25 bp, Homo sapien
gggcagccccatccaacgaggagga

SEQ ID NO: 708425 - DNA, 25 bp, Homo sapien
aggaggccaagatgcccgcgcctga

SEQ ID NO: 708426 - DNA, 25 bp, Homo sapien
cgacgatgacgatgtcctggctcct

SEQ ID NO: 708427 - DNA, 25 bp, Homo sapien
taaatggcatcaacgcactatgtgg

SEQ ID NO: 708428 - DNA, 25 bp, Homo sapien
cccacatgggtatagccgtcctaga

SEQ ID NO: 708429 - DNA, 25 bp, Homo sapien
taaagcctgttctagcttgagggca

SEQ ID NO: 708430 - DNA, 25 bp, Homo sapien
tcctagagtgcgcagagaggcttct

SEQ ID NO: 708431 - DNA, 25 bp, Homo sapien
ggatgttgtcatcatggtgttgaaa

SEQ ID NO: 708432 - DNA, 25 bp, Homo sapien
ttgaaatggatgctgacccagcatt

SEQ ID NO: 708433 - DNA, 25 bp, Homo sapien
agcattccccggtgtcatcctgaag

SEQ ID NO: 708434 - DNA, 25 bp, Homo sapien
gcttccttattattactctgggatg

SEQ ID NO: 708435 - DNA, 25 bp, Homo sapien
gcatgtgggaaacctctgtgctgag

SEQ ID NO: 708436 - DNA, 25 bp, Homo sapien
acttctgtcactcgcacttctgtgg

SEQ ID NO: 708437 - DNA, 25 bp, Homo sapien
ctgtggcaccgtcgctgaagaggca

SEQ ID NO: 708438 - DNA, 25 bp, Homo sapien
agccaattctaaatggacttctaaa

SEQ ID NO: 708439 - DNA, 25 bp, Homo sapien
agtcccactgatgcccagcggcggc

SEQ ID NO: 708440 - DNA, 25 bp, Homo sapien
cagtcccactgatgcccagcggcgg

SEQ ID NO: 708441 - DNA, 25 bp, Homo sapien
cagtgtggttggaagtacctcgcct

SEQ ID NO: 708442 - DNA, 25 bp, Homo sapien
tgattcatggcgatgagctggcagc

SEQ ID NO: 708443 - DNA, 25 bp, Homo sapien
tatatttatcccgtgtccatgaggc

SEQ ID NO: 708444 - DNA, 25 bp, Homo sapien
gctgcttctcccttggattcagggt

SEQ ID NO: 708445 - DNA, 25 bp, Homo sapien
cacagtggtccttgaaacgtcattc

SEQ ID NO: 708446 - DNA, 25 bp, Homo sapien
tggaggacagacctgacacgtcagt

SEQ ID NO: 708447 - DNA, 25 bp, Homo sapien
tatgtaaagtacctacctcggagtc

SEQ ID NO: 708448 - DNA, 25 bp, Homo sapien
tcagctccaaaaagtgtgtccccat

SEQ ID NO: 708449 - DNA, 25 bp, Homo sapien
gagcatgctatacacggagatccgc

SEQ ID NO: 708450 - DNA, 25 bp, Homo sapien
aactgccgagatggctggtattggc

SEQ ID NO: 708451 - DNA, 25 bp, Homo sapien
cagaggaccacaaaactgccgagat

SEQ ID NO: 708452 - DNA, 25 bp, Homo sapien
cacaaaactgccgagatggctggta

SEQ ID NO: 708453 - DNA, 25 bp, Homo sapien
gaccacaaaactgccgagatggctg

SEQ ID NO: 708454 - DNA, 25 bp, Homo sapien
ggcctgatggtacccaaggggtatc

SEQ ID NO: 708455 - DNA, 25 bp, Homo sapien
aaatctttatactctttgaagagac

SEQ ID NO: 708456 - DNA, 25 bp, Homo sapien
tcctgtatctgtagcagaaggggcc

SEQ ID NO: 708457 - DNA, 25 bp, Homo sapien
cccaaggggtatccaggctgcaaaa

SEQ ID NO: 708458 - DNA, 25 bp, Homo sapien
ttgacaaggttacacttccagatcc

SEQ ID NO: 708459 - DNA, 25 bp, Homo sapien
cccgagaaggcaccataaggctgat

SEQ ID NO: 708460 - DNA, 25 bp, Homo sapien
tctgcttccatccatagtcgtgttg

SEQ ID NO: 708461 - DNA, 25 bp, Homo sapien
accataaggctgatgtctgcttcca

SEQ ID NO: 708462 - DNA, 25 bp, Homo sapien
atctgggccgccgaaaaccctggct

SEQ ID NO: 708463 - DNA, 25 bp, Homo sapien
tcatttaggccccgccgcaggatct

SEQ ID NO: 708464 - DNA, 25 bp, Homo sapien
acaagagaccgtgcgagtccctcct

SEQ ID NO: 708465 - DNA, 25 bp, Homo sapien
ccctttttgctgcacttccagacaa

SEQ ID NO: 708466 - DNA, 25 bp, Homo sapien
gatccttcggggcgcttcgtctccc

SEQ ID NO: 708467 - DNA, 25 bp, Homo sapien
ccggatccttcggggcgcttcgtct

SEQ ID NO: 708468 - DNA, 25 bp, Homo sapien
cggatccttcggggcgcttcgtctc

SEQ ID NO: 708469 - DNA, 25 bp, Homo sapien
ggatccttcggggcgcttcgtctcc

SEQ ID NO: 708470 - DNA, 25 bp, Homo sapien
ctatctcctaagcccgtgaggccct

SEQ ID NO: 708471 - DNA, 25 bp, Homo sapien
gcacaccgcggacggaggaagccca

SEQ ID NO: 708472 - DNA, 25 bp, Homo sapien
tccgcgggccagccgcacaccgcgg

SEQ ID NO: 708473 - DNA, 25 bp, Homo sapien
cctaagcccgtgaggccctcgtcct

SEQ ID NO: 708474 - DNA, 25 bp, Homo sapien
ggccatcgggatcgcagccctaagg

SEQ ID NO: 708475 - DNA, 25 bp, Homo sapien
ctctgcgtcgcagccaagctcgggg

SEQ ID NO: 708476 - DNA, 25 bp, Homo sapien
actgcagccgtctggctagaggagc

SEQ ID NO: 708477 - DNA, 25 bp, Homo sapien
agaggagccgggtggccatcgggat

SEQ ID NO: 708478 - DNA, 25 bp, Homo sapien
ctcggctgcggcgccctgaactgct

SEQ ID NO: 708479 - DNA, 25 bp, Homo sapien
tgcggcgccctgaactgctcactgt

SEQ ID NO: 708480 - DNA, 25 bp, Homo sapien
aacgagtgggaaaacgagtgcttca

SEQ ID NO: 708481 - DNA, 25 bp, Homo sapien
tgctcactgtcccaccgcgggggaa

SEQ ID NO: 708482 - DNA, 25 bp, Homo sapien
aatacatgtgtcctggattaggaac

SEQ ID NO: 708483 - DNA, 25 bp, Homo sapien
tataaatgagtaagcattggctgtt

SEQ ID NO: 708484 - DNA, 25 bp, Homo sapien
aaattagctctaatgtcacagctca

SEQ ID NO: 708485 - DNA, 25 bp, Homo sapien
cttgtggtcttaagaaagtgataga

SEQ ID NO: 708486 - DNA, 25 bp, Homo sapien
cagctgtgaagaccccttttcctga

SEQ ID NO: 708487 - DNA, 25 bp, Homo sapien
agctgcagaagccatcgtcctcttt

SEQ ID NO: 708488 - DNA, 25 bp, Homo sapien
ttaattgcagctgtgaagacccctt

SEQ ID NO: 708489 - DNA, 25 bp, Homo sapien
ctgcagaagccatcgtcctctttgg

SEQ ID NO: 708490 - DNA, 25 bp, Homo sapien
cctctgggtaggtccccagggtgca

SEQ ID NO: 708491 - DNA, 25 bp, Homo sapien
cttggtcttaccaagcacctctagg

SEQ ID NO: 708492 - DNA, 25 bp, Homo sapien
gcaggccatcatgtgcctccaaagc

SEQ ID NO: 708493 - DNA, 25 bp, Homo sapien
agcccgcttgaggtccgcaggccat

SEQ ID NO: 708494 - DNA, 25 bp, Homo sapien
tacatttgttacaggctagacccac

SEQ ID NO: 708495 - DNA, 25 bp, Homo sapien
tcaaaaatggccgattcctggaccc

SEQ ID NO: 708496 - DNA, 25 bp, Homo sapien
gacccactcggatctagcggaggaa

SEQ ID NO: 708497 - DNA, 25 bp, Homo sapien
gactttgaagaaaccctacagagga

SEQ ID NO: 708498 - DNA, 25 bp, Homo sapien
gggactttcgaagccctgaacttga

SEQ ID NO: 708499 - DNA, 25 bp, Homo sapien
tgtccaacagggtcagtgtcacagc

SEQ ID NO: 708500 - DNA, 25 bp, Homo sapien
aacacgtagccgctgcagttggaca

SEQ ID NO: 708501 - DNA, 25 bp, Homo sapien
cagatccgcagctcgaaaaagaaca

SEQ ID NO: 708502 - DNA, 25 bp, Homo sapien
gacagagactaaagcaccctggctt

SEQ ID NO: 708503 - DNA, 25 bp, Homo sapien
cctgtgctctgattcggagtccgaa

SEQ ID NO: 708504 - DNA, 25 bp, Homo sapien
gaaacccctgctttcgctgacagag

SEQ ID NO: 708505 - DNA, 25 bp, Homo sapien
cacgtgccaccgaatataattattc

SEQ ID NO: 708506 - DNA, 25 bp, Homo sapien
ctggaaagccctggttattttctgg

SEQ ID NO: 708507 - DNA, 25 bp, Homo sapien
aggcttgagacatctccaggatcct

SEQ ID NO: 708508 - DNA, 25 bp, Homo sapien
tctgctgccaggcttgagacatctc

SEQ ID NO: 708509 - DNA, 25 bp, Homo sapien
tgggcaaacctggctccgtctccac

SEQ ID NO: 708510 - DNA, 25 bp, Homo sapien
gctgccaggcttgagacatctccag

SEQ ID NO: 708511 - DNA, 25 bp, Homo sapien
tatgtgtgagccagtatgtcctcct

SEQ ID NO: 708512 - DNA, 25 bp, Homo sapien
ttttagcctgaaaatccgcatcgtc

SEQ ID NO: 708513 - DNA, 25 bp, Homo sapien
tgtcaacgtaattacccaagcaaag

SEQ ID NO: 708514 - DNA, 25 bp, Homo sapien
ggattctactcttaaatagcctggg

SEQ ID NO: 708515 - DNA, 25 bp, Homo sapien
gatcgtttgtttcatgacctttctg

SEQ ID NO: 708516 - DNA, 25 bp, Homo sapien
ttgtttcataagtccagtggctcga

SEQ ID NO: 708517 - DNA, 25 bp, Homo sapien
gaatagtttaacatggtgacgctga

SEQ ID NO: 708518 - DNA, 25 bp, Homo sapien
tttgcgtgcctcataatttttgtgg

SEQ ID NO: 708519 - DNA, 25 bp, Homo sapien
ggattctttgtttgtgacgccactt

SEQ ID NO: 708520 - DNA, 25 bp, Homo sapien
gattaagtcgtttcactgccctctg

SEQ ID NO: 708521 - DNA, 25 bp, Homo sapien
catgtgggtttttccgctttctggc

SEQ ID NO: 708522 - DNA, 25 bp, Homo sapien
gaaatcagccattactcatattctg

SEQ ID NO: 708523 - DNA, 25 bp, Homo sapien
agcacttgcagtgaaatgttgaaca

SEQ ID NO: 708524 - DNA, 25 bp, Homo sapien
ttttacatatgtaagcatcagcata

SEQ ID NO: 708525 - DNA, 25 bp, Homo sapien
tcactgctaagtatgtgatgttagc

SEQ ID NO: 708526 - DNA, 25 bp, Homo sapien
ttttgcactggctagcacttgcagt

SEQ ID NO: 708527 - DNA, 25 bp, Homo sapien
agatatactgtaagtccctcccggc

SEQ ID NO: 708528 - DNA, 25 bp, Homo sapien
aagagccggcgcagtgatgtcaaag

SEQ ID NO: 708529 - DNA, 25 bp, Homo sapien
ccttcatgggtcgagattgcccaac

SEQ ID NO: 708530 - DNA, 25 bp, Homo sapien
gaaaacacttgtgcagctatgaact

SEQ ID NO: 708531 - DNA, 25 bp, Homo sapien
tgttactcatccttctggacatggg

SEQ ID NO: 708532 - DNA, 25 bp, Homo sapien
cctccaggactagcattcaaggttg

SEQ ID NO: 708533 - DNA, 25 bp, Homo sapien
gtctgtctcaaagggcaaacctccg

SEQ ID NO: 708534 - DNA, 25 bp, Homo sapien
tagccatacattaacagcccaagag

SEQ ID NO: 708535 - DNA, 25 bp, Homo sapien
gttaaaatgcaagtcaaaccaggcc

SEQ ID NO: 708536 - DNA, 25 bp, Homo sapien
agagcccctacaatggcctgtgtgg

SEQ ID NO: 708537 - DNA, 25 bp, Homo sapien
tatccagagtctgacggctttgccc

SEQ ID NO: 708538 - DNA, 25 bp, Homo sapien
ttggaggtacccttgacccgtcagc

SEQ ID NO: 708539 - DNA, 25 bp, Homo sapien
tcatgtgcataaacctgaggagtgg

SEQ ID NO: 708540 - DNA, 25 bp, Homo sapien
catatgtgactatgaacccagggtc

SEQ ID NO: 708541 - DNA, 25 bp, Homo sapien
tatcgtgtggcttcaagcccgtcca

SEQ ID NO: 708542 - DNA, 25 bp, Homo sapien
tggcgaggagtaaacacagggattc

SEQ ID NO: 708543 - DNA, 25 bp, Homo sapien
tgccacctccgtaggcagcactgaa

SEQ ID NO: 708544 - DNA, 25 bp, Homo sapien
acctccgtaggcagcactgaagaga

SEQ ID NO: 708545 - DNA, 25 bp, Homo sapien
ttctttgttatgtccttggaaggaa

SEQ ID NO: 708546 - DNA, 25 bp, Homo sapien
tatgtccttggaaggaagacttcat

SEQ ID NO: 708547 - DNA, 25 bp, Homo sapien
gcttcacgaggggtctgagggcggc

SEQ ID NO: 708548 - DNA, 25 bp, Homo sapien
tctgggtttcctccagttacactta

SEQ ID NO: 708549 - DNA, 25 bp, Homo sapien
tgacatgttggtctgactggtgcca

SEQ ID NO: 708550 - DNA, 25 bp, Homo sapien
tacacttaattttgacatgttggtc

SEQ ID NO: 708551 - DNA, 25 bp, Homo sapien
tatctggtccttgaaccttctgcaa

SEQ ID NO: 708552 - DNA, 25 bp, Homo sapien
atctggtccttgaaccttctgcaaa

SEQ ID NO: 708553 - DNA, 25 bp, Homo sapien
tctggtccttgaaccttctgcaaac

SEQ ID NO: 708554 - DNA, 25 bp, Homo sapien
ctttccacgatggttttgtttcttg

SEQ ID NO: 708555 - DNA, 25 bp, Homo sapien
tgtgcctcagccttgccgagcacca

SEQ ID NO: 708556 - DNA, 25 bp, Homo sapien
cccgtgtgaccccacatgtcccgtg

SEQ ID NO: 708557 - DNA, 25 bp, Homo sapien
gtgcctcagccttgccgagcaccat

SEQ ID NO: 708558 - DNA, 25 bp, Homo sapien
tgacccgtgtgaccccacatgtccc

SEQ ID NO: 708559 - DNA, 25 bp, Homo sapien
ttatagctagctctttgtctctgac

SEQ ID NO: 708560 - DNA, 25 bp, Homo sapien
tgtgtaggtttgaacatctcgtaag

SEQ ID NO: 708561 - DNA, 25 bp, Homo sapien
aggtttgaacatctcgtaagtcttg

SEQ ID NO: 708562 - DNA, 25 bp, Homo sapien
gaccccacttatagctagctctttg

SEQ ID NO: 708563 - DNA, 25 bp, Homo sapien
cataaggtcactgacaaagtctgag

SEQ ID NO: 708564 - DNA, 25 bp, Homo sapien
cagatacttcatagccgtgaaaaca

SEQ ID NO: 708565 - DNA, 25 bp, Homo sapien
tcatagccgtgaaaacataaggtca

SEQ ID NO: 708566 - DNA, 25 bp, Homo sapien
gtagcgtgggtccacctgacctcag

SEQ ID NO: 708567 - DNA, 25 bp, Homo sapien
tcaacaatggccttaagatggtggg

SEQ ID NO: 708568 - DNA, 25 bp, Homo sapien
cccttagatgaagggtatggtgctg

SEQ ID NO: 708569 - DNA, 25 bp, Homo sapien
gtgcttccagctgccctcaacaatg

SEQ ID NO: 708570 - DNA, 25 bp, Homo sapien
aacttccgatttcttcccttagatg

SEQ ID NO: 708571 - DNA, 25 bp, Homo sapien
aacacgtggatctgctaccactgga

SEQ ID NO: 708572 - DNA, 25 bp, Homo sapien
tttaggccttcccagtaggctgagg

SEQ ID NO: 708573 - DNA, 25 bp, Homo sapien
accactggatctgccaaagcagaat

SEQ ID NO: 708574 - DNA, 25 bp, Homo sapien
gcagttacagagaattaacagagtt

SEQ ID NO: 708575 - DNA, 25 bp, Homo sapien
cctcttctcccaaccgccttgtcat

SEQ ID NO: 708576 - DNA, 25 bp, Homo sapien
tcccaaccgccttgtcatgtctctt

SEQ ID NO: 708577 - DNA, 25 bp, Homo sapien
ttctcccaaccgccttgtcatgtct

SEQ ID NO: 708578 - DNA, 25 bp, Homo sapien
ctcttctcccaaccgccttgtcatg

SEQ ID NO: 708579 - DNA, 25 bp, Homo sapien
tcctgcctaatcacttcctgtattg

SEQ ID NO: 708580 - DNA, 25 bp, Homo sapien
tcctgttacagaggcaataattctc

SEQ ID NO: 708581 - DNA, 25 bp, Homo sapien
tattgtctccctgcggctctttgca

SEQ ID NO: 708582 - DNA, 25 bp, Homo sapien
ttcttactggaagtagccctcctct

SEQ ID NO: 708583 - DNA, 25 bp, Homo sapien
cagcgcaggcttcgatgagttcttt

SEQ ID NO: 708584 - DNA, 25 bp, Homo sapien
agcgcaggcttcgatgagttctttt

SEQ ID NO: 708585 - DNA, 25 bp, Homo sapien
gcgcaggcttcgatgagttcttttc

SEQ ID NO: 708586 - DNA, 25 bp, Homo sapien
cgcaggcttcgatgagttcttttcc

SEQ ID NO: 708587 - DNA, 25 bp, Homo sapien
gggttcgtgcgtccgccagtctttc

SEQ ID NO: 708588 - DNA, 25 bp, Homo sapien
tgtgaccccatattcctgagtatag

SEQ ID NO: 708589 - DNA, 25 bp, Homo sapien
agtctttccacgtgcccccaagatg

SEQ ID NO: 708590 - DNA, 25 bp, Homo sapien
atcctcgcgttcaggtcgcctcgga

SEQ ID NO: 708591 - DNA, 25 bp, Homo sapien
caaactccccgagcgagcttccccg

SEQ ID NO: 708592 - DNA, 25 bp, Homo sapien
gagcttccccgggaactgtttctca

SEQ ID NO: 708593 - DNA, 25 bp, Homo sapien
cttttcatcccaaactccccgagcg

SEQ ID NO: 708594 - DNA, 25 bp, Homo sapien
tcatcccaaactccccgagcgagct

SEQ ID NO: 708595 - DNA, 25 bp, Homo sapien
caaactcgctgagttgggggcgccc

SEQ ID NO: 708596 - DNA, 25 bp, Homo sapien
cttcaaactcgctgagttgggggcg

SEQ ID NO: 708597 - DNA, 25 bp, Homo sapien
actcgctgagttgggggcgccccgg

SEQ ID NO: 708598 - DNA, 25 bp, Homo sapien
tcaaactcgctgagttgggggcgcc

SEQ ID NO: 708599 - DNA, 25 bp, Homo sapien
aggtgaccgatgcgaccgccccggg

SEQ ID NO: 708600 - DNA, 25 bp, Homo sapien
gtgaccgatgcgaccgccccgggcc

SEQ ID NO: 708601 - DNA, 25 bp, Homo sapien
tgaccgatgcgaccgccccgggccc

SEQ ID NO: 708602 - DNA, 25 bp, Homo sapien
ccaggtgaccgatgcgaccgccccg

SEQ ID NO: 708603 - DNA, 25 bp, Homo sapien
gcagccgctgccgccgccgcgggag

SEQ ID NO: 708604 - DNA, 25 bp, Homo sapien
caacggggaccaacacgcagcagcc

SEQ ID NO: 708605 - DNA, 25 bp, Homo sapien
aacggggaccaacacgcagcagccg

SEQ ID NO: 708606 - DNA, 25 bp, Homo sapien
gccgctgccgccgccgcgggagccg

SEQ ID NO: 708607 - DNA, 25 bp, Homo sapien
gccgccatagagactgtagccgtgg

SEQ ID NO: 708608 - DNA, 25 bp, Homo sapien
tgtagccgtggagactgttacttac

SEQ ID NO: 708609 - DNA, 25 bp, Homo sapien
actgtagccgtggagactgttactt

SEQ ID NO: 708610 - DNA, 25 bp, Homo sapien
gactgtagccgtggagactgttact

SEQ ID NO: 708611 - DNA, 25 bp, Homo sapien
gaacgcctcctccttccgacagact

SEQ ID NO: 708612 - DNA, 25 bp, Homo sapien
gggaacgcctcctccttccgacaga

SEQ ID NO: 708613 - DNA, 25 bp, Homo sapien
ggaacgcctcctccttccgacagac

SEQ ID NO: 708614 - DNA, 25 bp, Homo sapien
gcggcgagcgagagtttgctgaccc

SEQ ID NO: 708615 - DNA, 25 bp, Homo sapien
ggtccgtgaaaaacaggcggcgagc

SEQ ID NO: 708616 - DNA, 25 bp, Homo sapien
tccgtgaaaaacaggcggcgagcga

SEQ ID NO: 708617 - DNA, 25 bp, Homo sapien
aaacaggcggcgagcgagagtttgc

SEQ ID NO: 708618 - DNA, 25 bp, Homo sapien
tttagcagggatcaagccagcaact

SEQ ID NO: 708619 - DNA, 25 bp, Homo sapien
gcaaattagagcatcattatcattt

SEQ ID NO: 708620 - DNA, 25 bp, Homo sapien
tcttcacgtgtatcagattcttctg

SEQ ID NO: 708621 - DNA, 25 bp, Homo sapien
gcagctccagataaagcctccaagt

SEQ ID NO: 708622 - DNA, 25 bp, Homo sapien
gagtccatgttccaggtgccaaggt

SEQ ID NO: 708623 - DNA, 25 bp, Homo sapien
catgttccaggtgccaaggtaaggc

SEQ ID NO: 708624 - DNA, 25 bp, Homo sapien
ctgaaggagtccatgttccaggtgc

SEQ ID NO: 708625 - DNA, 25 bp, Homo sapien
aaggagtccatgttccaggtgccaa

SEQ ID NO: 708626 - DNA, 25 bp, Homo sapien
tgtccaccacgaacatcctgtgtca

SEQ ID NO: 708627 - DNA, 25 bp, Homo sapien
tggtgtgtcatctacagccatgagc

SEQ ID NO: 708628 - DNA, 25 bp, Homo sapien
tgatccctacgtctgacactcgctg

SEQ ID NO: 708629 - DNA, 25 bp, Homo sapien
cacgaacatcctgtgtcactgtgga

SEQ ID NO: 708630 - DNA, 25 bp, Homo sapien
tgacacacatttgacagaatgcagt

SEQ ID NO: 708631 - DNA, 25 bp, Homo sapien
actgctatggccgagaacaggagtg

SEQ ID NO: 708632 - DNA, 25 bp, Homo sapien
acactgctatggccgagaacaggag

SEQ ID NO: 708633 - DNA, 25 bp, Homo sapien
tttgacagaatgcagtggacattga

SEQ ID NO: 708634 - DNA, 25 bp, Homo sapien
tttgtagaggtagagttgtccagcc

SEQ ID NO: 708635 - DNA, 25 bp, Homo sapien
tatgtctgcagctgcgttgccaggg

SEQ ID NO: 708636 - DNA, 25 bp, Homo sapien
caaaagtgggtgtccctactggcaa

SEQ ID NO: 708637 - DNA, 25 bp, Homo sapien
taaatccttagggatggtcccacca

SEQ ID NO: 708638 - DNA, 25 bp, Homo sapien
cactacttggctggttctaggatcc

SEQ ID NO: 708639 - DNA, 25 bp, Homo sapien
caagggggcggttggatcctcacta

SEQ ID NO: 708640 - DNA, 25 bp, Homo sapien
ggttggatcctcactacttggctgg

SEQ ID NO: 708641 - DNA, 25 bp, Homo sapien
tgtgcgtcctccactggtgcctctc

SEQ ID NO: 708642 - DNA, 25 bp, Homo sapien
caaagacagtcaacaggtagcccct

SEQ ID NO: 708643 - DNA, 25 bp, Homo sapien
cctcctggaaacctgaacatgagct

SEQ ID NO: 708644 - DNA, 25 bp, Homo sapien
caggtagcccctcctggaaacctga

SEQ ID NO: 708645 - DNA, 25 bp, Homo sapien
aaagacagtcaacaggtagcccctc

SEQ ID NO: 708646 - DNA, 25 bp, Homo sapien
gagctgggacatctggtcactcagg

SEQ ID NO: 708647 - DNA, 25 bp, Homo sapien
gctgggacatctggtcactcaggtg

SEQ ID NO: 708648 - DNA, 25 bp, Homo sapien
agctgggacatctggtcactcaggt

SEQ ID NO: 708649 - DNA, 25 bp, Homo sapien
ctgtcactcttcaagaggtgtggtt

SEQ ID NO: 708650 - DNA, 25 bp, Homo sapien
tcttcaagaggtgtggttctggcca

SEQ ID NO: 708651 - DNA, 25 bp, Homo sapien
actcttcaagaggtgtggttctggc

SEQ ID NO: 708652 - DNA, 25 bp, Homo sapien
tcactcttcaagaggtgtggttctg

SEQ ID NO: 708653 - DNA, 25 bp, Homo sapien
cagggagtttaacaggattggcaaa

SEQ ID NO: 708654 - DNA, 25 bp, Homo sapien
agcaaaaaagcagggagtttaacag

SEQ ID NO: 708655 - DNA, 25 bp, Homo sapien
aagcagggagtttaacaggattggc

SEQ ID NO: 708656 - DNA, 25 bp, Homo sapien
aaaagcagggagtttaacaggattg

SEQ ID NO: 708657 - DNA, 25 bp, Homo sapien
tccaggtgtgcagaaaccatgctcc

SEQ ID NO: 708658 - DNA, 25 bp, Homo sapien
tgtgcagaaaccatgctccacagca

SEQ ID NO: 708659 - DNA, 25 bp, Homo sapien
ccaggtgtgcagaaaccatgctcca

SEQ ID NO: 708660 - DNA, 25 bp, Homo sapien
aggtgtgcagaaaccatgctccaca

SEQ ID NO: 708661 - DNA, 25 bp, Homo sapien
tacttcaagatctttagctccttct

SEQ ID NO: 708662 - DNA, 25 bp, Homo sapien
ctgttttattcatgtctacttcaag

SEQ ID NO: 708663 - DNA, 25 bp, Homo sapien
atgtctacttcaagatctttagctc

SEQ ID NO: 708664 - DNA, 25 bp, Homo sapien
tctgttttattcatgtctacttcaa

SEQ ID NO: 708665 - DNA, 25 bp, Homo sapien
tcagcaccagctcacaaagaaacca

SEQ ID NO: 708666 - DNA, 25 bp, Homo sapien
cagcaccagctcacaaagaaaccac

SEQ ID NO: 708667 - DNA, 25 bp, Homo sapien
gggtctcatggcctggtccgtgttt

SEQ ID NO: 708668 - DNA, 25 bp, Homo sapien
gaaggacttctccatctcgacaggt

SEQ ID NO: 708669 - DNA, 25 bp, Homo sapien
tccatctcgacaggtggtccacagc

SEQ ID NO: 708670 - DNA, 25 bp, Homo sapien
gtccgtgtttggatagcctcagaag

SEQ ID NO: 708671 - DNA, 25 bp, Homo sapien
ccattcttggatgcgagggctggat

SEQ ID NO: 708672 - DNA, 25 bp, Homo sapien
ggataagttccaaatcggttgactg

SEQ ID NO: 708673 - DNA, 25 bp, Homo sapien
tccgacaagcctcatagtactggtt

SEQ ID NO: 708674 - DNA, 25 bp, Homo sapien
caaggattttgcagccttccgacaa

SEQ ID NO: 708675 - DNA, 25 bp, Homo sapien
taccaactccgtggaaacgctccaa

SEQ ID NO: 708676 - DNA, 25 bp, Homo sapien
aaccactctgcagagttaaacccca

SEQ ID NO: 708677 - DNA, 25 bp, Homo sapien
ccggctaggatggcaccaacagcag

SEQ ID NO: 708678 - DNA, 25 bp, Homo sapien
ctgcagagttaaaccccaggatacc

SEQ ID NO: 708679 - DNA, 25 bp, Homo sapien
acaaacctcggcagagttggtggca

SEQ ID NO: 708680 - DNA, 25 bp, Homo sapien
tgttcactttggcatgagtgatgac

SEQ ID NO: 708681 - DNA, 25 bp, Homo sapien
tgatcattctcaaccagcaagatgt

SEQ ID NO: 708682 - DNA, 25 bp, Homo sapien
ggcatgagtgatgacatattgacaa

SEQ ID NO: 708683 - DNA, 25 bp, Homo sapien
caggcagtgctgggtaggggtttac

SEQ ID NO: 708684 - DNA, 25 bp, Homo sapien
cagaagcccgtatagcagctggaca

SEQ ID NO: 708685 - DNA, 25 bp, Homo sapien
tctgttcatgccaaagaaagcggga

SEQ ID NO: 708686 - DNA, 25 bp, Homo sapien
ttgctaatcataaccacgcctctgg

SEQ ID NO: 708687 - DNA, 25 bp, Homo sapien
catgaaagaatggtgaggcccagat

SEQ ID NO: 708688 - DNA, 25 bp, Homo sapien
ctgtgggcttcatggcaacccagcc

SEQ ID NO: 708689 - DNA, 25 bp, Homo sapien
cctgtgggcttcatggcaacccagc

SEQ ID NO: 708690 - DNA, 25 bp, Homo sapien
ctgtactggatgatcgcttttaggg

SEQ ID NO: 708691 - DNA, 25 bp, Homo sapien
tgatcgcttttaggggctctaggct

SEQ ID NO: 708692 - DNA, 25 bp, Homo sapien
cagtctgtactggatgatcgctttt

SEQ ID NO: 708693 - DNA, 25 bp, Homo sapien
tggcagtctgtactggatgatcgct

SEQ ID NO: 708694 - DNA, 25 bp, Homo sapien
gagtacaagttgttgttcttcttca

SEQ ID NO: 708695 - DNA, 25 bp, Homo sapien
agagtacaagttgttgttcttcttc

SEQ ID NO: 708696 - DNA, 25 bp, Homo sapien
agtacaagttgttgttcttcttcat

SEQ ID NO: 708697 - DNA, 25 bp, Homo sapien
ctgctcacatttcacgtcctttgaa

SEQ ID NO: 708698 - DNA, 25 bp, Homo sapien
catttcacgtcctttgaaaggtcac

SEQ ID NO: 708699 - DNA, 25 bp, Homo sapien
cacatttcacgtcctttgaaaggtc

SEQ ID NO: 708700 - DNA, 25 bp, Homo sapien
tcacgtcctttgaaaggtcacaccc

SEQ ID NO: 708701 - DNA, 25 bp, Homo sapien
acccatgctggtccaatccaatccc

SEQ ID NO: 708702 - DNA, 25 bp, Homo sapien
caatcccctgtcttggagatctggg

SEQ ID NO: 708703 - DNA, 25 bp, Homo sapien
tgactggattgggatgggcaccaga

SEQ ID NO: 708704 - DNA, 25 bp, Homo sapien
tgttccttcaaaggccggtagaaga

SEQ ID NO: 708705 - DNA, 25 bp, Homo sapien
tctcagagatgcccctaggtctccc

SEQ ID NO: 708706 - DNA, 25 bp, Homo sapien
gtcctttctcagagatgcccctagg

SEQ ID NO: 708707 - DNA, 25 bp, Homo sapien
tttctcagagatgcccctaggtctc

SEQ ID NO: 708708 - DNA, 25 bp, Homo sapien
tcagagatgcccctaggtctcccta

SEQ ID NO: 708709 - DNA, 25 bp, Homo sapien
tagatgagcactgcgcattgattcg

SEQ ID NO: 708710 - DNA, 25 bp, Homo sapien
tgctccagttgggtgtcagggatac

SEQ ID NO: 708711 - DNA, 25 bp, Homo sapien
gccttctggctctcgatgacctgct

SEQ ID NO: 708712 - DNA, 25 bp, Homo sapien
gttgtcatgactgagcatcactccc

SEQ ID NO: 708713 - DNA, 25 bp, Homo sapien
atttcttatctgttcccaaggtcca

SEQ ID NO: 708714 - DNA, 25 bp, Homo sapien
gcaaagtatgtgagcgccccaatct

SEQ ID NO: 708715 - DNA, 25 bp, Homo sapien
caatctttatgggtacccagatgtc

SEQ ID NO: 708716 - DNA, 25 bp, Homo sapien
tgagagcatctgcttgagcaaagta

SEQ ID NO: 708717 - DNA, 25 bp, Homo sapien
tgtgagcgccccaatctttatgggt

SEQ ID NO: 708718 - DNA, 25 bp, Homo sapien
ttttgagttgaccttgaagccaatg

SEQ ID NO: 708719 - DNA, 25 bp, Homo sapien
gccaatgtttcttgcccacacgaat

SEQ ID NO: 708720 - DNA, 25 bp, Homo sapien
tcctttagagtacttaccaaggtgc

SEQ ID NO: 708721 - DNA, 25 bp, Homo sapien
tttgaggcactccaatgaagacagt

SEQ ID NO: 708722 - DNA, 25 bp, Homo sapien
gtgaataagaatgccgtcaagtgga

SEQ ID NO: 708723 - DNA, 25 bp, Homo sapien
aataagaatgccgtcaagtggagaa

SEQ ID NO: 708724 - DNA, 25 bp, Homo sapien
taagaatgccgtcaagtggagaagg

SEQ ID NO: 708725 - DNA, 25 bp, Homo sapien
gaataagaatgccgtcaagtggaga

SEQ ID NO: 708726 - DNA, 25 bp, Homo sapien
caactcgcctataggtatgtccaag

SEQ ID NO: 708727 - DNA, 25 bp, Homo sapien
gcttagaaagaactcggcagtctct

SEQ ID NO: 708728 - DNA, 25 bp, Homo sapien
tagccatgcggtagctcacgggagt

SEQ ID NO: 708729 - DNA, 25 bp, Homo sapien
tgaacacgagagtcttagccatgcg

SEQ ID NO: 708730 - DNA, 25 bp, Homo sapien
gctggaacagcatattcttacaccc

SEQ ID NO: 708731 - DNA, 25 bp, Homo sapien
ggcccagatccccagagtgtagcca

SEQ ID NO: 708732 - DNA, 25 bp, Homo sapien
tcttacacccagtcaagatcttgcc

SEQ ID NO: 708733 - DNA, 25 bp, Homo sapien
tgtgcctaccccagaggcagatctc

SEQ ID NO: 708734 - DNA, 25 bp, Homo sapien
gtcagcaacatgctcagaaacttca

SEQ ID NO: 708735 - DNA, 25 bp, Homo sapien
cagtttatctcctactaacatggcg

SEQ ID NO: 708736 - DNA, 25 bp, Homo sapien
ctaacatggcgttactgatgatggg

SEQ ID NO: 708737 - DNA, 25 bp, Homo sapien
cagcaacatgctcagaaacttcagt

SEQ ID NO: 708738 - DNA, 25 bp, Homo sapien
ttgaacccacagatgcatcctcttg

SEQ ID NO: 708739 - DNA, 25 bp, Homo sapien
aacccacagatgcatcctcttgacc

SEQ ID NO: 708740 - DNA, 25 bp, Homo sapien
tgaacccacagatgcatcctcttga

SEQ ID NO: 708741 - DNA, 25 bp, Homo sapien
cttgaacccacagatgcatcctctt

SEQ ID NO: 708742 - DNA, 25 bp, Homo sapien
caggcccacagaccaagaagtgggt

SEQ ID NO: 708743 - DNA, 25 bp, Homo sapien
ccccaggcccacagaccaagaagtg

SEQ ID NO: 708744 - DNA, 25 bp, Homo sapien
cccaggcccacagaccaagaagtgg

SEQ ID NO: 708745 - DNA, 25 bp, Homo sapien
ctccccaggcccacagaccaagaag

SEQ ID NO: 708746 - DNA, 25 bp, Homo sapien
accacccatgctccttgaccagcac

SEQ ID NO: 708747 - DNA, 25 bp, Homo sapien
cacccatgctccttgaccagcaccc

SEQ ID NO: 708748 - DNA, 25 bp, Homo sapien
caccacccatgctccttgaccagca

SEQ ID NO: 708749 - DNA, 25 bp, Homo sapien
gacacctctgtcaccacccatgctc

SEQ ID NO: 708750 - DNA, 25 bp, Homo sapien
gccttgctggatggccttgtagacc

SEQ ID NO: 708751 - DNA, 25 bp, Homo sapien
gcttgtccagaggttctccgctcat

SEQ ID NO: 708752 - DNA, 25 bp, Homo sapien
tcacaatctcagtcacggtggatgc

SEQ ID NO: 708753 - DNA, 25 bp, Homo sapien
cagaccccgacagaagttgatggcc

SEQ ID NO: 708754 - DNA, 25 bp, Homo sapien
tgggctacaaaatgtctcttaagtt

SEQ ID NO: 708755 - DNA, 25 bp, Homo sapien
ctgggctacaaaatgtctcttaagt

SEQ ID NO: 708756 - DNA, 25 bp, Homo sapien
gctgagagcagctccatcaaagcag

SEQ ID NO: 708757 - DNA, 25 bp, Homo sapien
gacagcactggtgtaagagggtcca

SEQ ID NO: 708758 - DNA, 25 bp, Homo sapien
caagctgagttgtatccctccacaa

SEQ ID NO: 708759 - DNA, 25 bp, Homo sapien
ggtttggacagaccacatagtggcc

SEQ ID NO: 708760 - DNA, 25 bp, Homo sapien
aatgtggtacgttgaactgctgggc

SEQ ID NO: 708761 - DNA, 25 bp, Homo sapien
tatggcaggttcttctagggagcac

SEQ ID NO: 708762 - DNA, 25 bp, Homo sapien
tagtagacttcccaataggcttccc

SEQ ID NO: 708763 - DNA, 25 bp, Homo sapien
gggagagcttctacctagagcagca

SEQ ID NO: 708764 - DNA, 25 bp, Homo sapien
tagggagcacctctccaacagacga

SEQ ID NO: 708765 - DNA, 25 bp, Homo sapien
tgctttattatcaggacttattgga

SEQ ID NO: 708766 - DNA, 25 bp, Homo sapien
cttcaaatctgtgaggctttttctt

SEQ ID NO: 708767 - DNA, 25 bp, Homo sapien
tgaagtgctttattatcaggactta

SEQ ID NO: 708768 - DNA, 25 bp, Homo sapien
tatcaggacttattggaagggtttc

SEQ ID NO: 708769 - DNA, 25 bp, Homo sapien
tttttatcagcttgatcactccccc

SEQ ID NO: 708770 - DNA, 25 bp, Homo sapien
gttcctgtccatggccagcctggtg

SEQ ID NO: 708771 - DNA, 25 bp, Homo sapien
cagaatgttcctgtccatggccagc

SEQ ID NO: 708772 - DNA, 25 bp, Homo sapien
cagggggacagtggtccctagacca

SEQ ID NO: 708773 - DNA, 25 bp, Homo sapien
ctcgcgaccatgtcgtgcacagtga

SEQ ID NO: 708774 - DNA, 25 bp, Homo sapien
cgcgaccatgtcgtgcacagtgagg

SEQ ID NO: 708775 - DNA, 25 bp, Homo sapien
gcgaccatgtcgtgcacagtgagga

SEQ ID NO: 708776 - DNA, 25 bp, Homo sapien
tcgcgaccatgtcgtgcacagtgag

SEQ ID NO: 708777 - DNA, 25 bp, Homo sapien
tgttgttggcgtacttgatggccgt

SEQ ID NO: 708778 - DNA, 25 bp, Homo sapien
actgctggtggtactcgatgtaggt

SEQ ID NO: 708779 - DNA, 25 bp, Homo sapien
tttgaagaaagacttctcgacgccg

SEQ ID NO: 708780 - DNA, 25 bp, Homo sapien
tcgacgccgagacactgctggtggt

SEQ ID NO: 708781 - DNA, 25 bp, Homo sapien
tgatggcaccaatgctggcgatgac

SEQ ID NO: 708782 - DNA, 25 bp, Homo sapien
ccactcttctgagttgagacccatg

SEQ ID NO: 708783 - DNA, 25 bp, Homo sapien
gattcccacgctgtggaagcgctcc

SEQ ID NO: 708784 - DNA, 25 bp, Homo sapien
gagacccatgattcccacgctgtgg

SEQ ID NO: 708785 - DNA, 25 bp, Homo sapien
cgtgccttaccagagaaaggttctt

SEQ ID NO: 708786 - DNA, 25 bp, Homo sapien
tttccctgccccgtgccttaccaga

SEQ ID NO: 708787 - DNA, 25 bp, Homo sapien
accaaaagatccattcccagcatca

SEQ ID NO: 708788 - DNA, 25 bp, Homo sapien
tgccccgtgccttaccagagaaagg

SEQ ID NO: 708789 - DNA, 25 bp, Homo sapien
ccgacgccggaaagcaaatggtatc

SEQ ID NO: 708790 - DNA, 25 bp, Homo sapien
ggcctggcactttgtgattgccacg

SEQ ID NO: 708791 - DNA, 25 bp, Homo sapien
ggctccgtgaccacctgatggacgt

SEQ ID NO: 708792 - DNA, 25 bp, Homo sapien
ctaggaactaggacactcatcggcc

SEQ ID NO: 708793 - DNA, 25 bp, Homo sapien
tgttgtggcttttactgccccctgg

SEQ ID NO: 708794 - DNA, 25 bp, Homo sapien
cccttgtgtccttgttgtggctttt

SEQ ID NO: 708795 - DNA, 25 bp, Homo sapien
ttgttgtggcttttactgccccctg

SEQ ID NO: 708796 - DNA, 25 bp, Homo sapien
tgtgtccttgttgtggcttttactg

SEQ ID NO: 708797 - DNA, 25 bp, Homo sapien
cccggtggactgcattttaacaaag

SEQ ID NO: 708798 - DNA, 25 bp, Homo sapien
caaagtgcgttgtgattcacctacc

SEQ ID NO: 708799 - DNA, 25 bp, Homo sapien
tacacctgcgagcttaggctgctgg

SEQ ID NO: 708800 - DNA, 25 bp, Homo sapien
gatgtctcgagcttctcagcagtgt

SEQ ID NO: 708801 - DNA, 25 bp, Homo sapien
agttccaaggtagccgcctgaagca

SEQ ID NO: 708802 - DNA, 25 bp, Homo sapien
tgcctagttccaaggtagccgcctg

SEQ ID NO: 708803 - DNA, 25 bp, Homo sapien
agggctcgctgcctagttccaaggt

SEQ ID NO: 708804 - DNA, 25 bp, Homo sapien
gaagcagagcaaggcgtttgctgct

SEQ ID NO: 708805 - DNA, 25 bp, Homo sapien
ggccatctttccgactgtttgtgcc

SEQ ID NO: 708806 - DNA, 25 bp, Homo sapien
gccatctttccgactgtttgtgcct

SEQ ID NO: 708807 - DNA, 25 bp, Homo sapien
ccatctttccgactgtttgtgcctc

SEQ ID NO: 708808 - DNA, 25 bp, Homo sapien
cttggtgtgcttggcaaaaccgaga

SEQ ID NO: 708809 - DNA, 25 bp, Homo sapien
ctcctgtggccggtgtcggctcgca

SEQ ID NO: 708810 - DNA, 25 bp, Homo sapien
tgtcgctttcatgccagtgctggct

SEQ ID NO: 708811 - DNA, 25 bp, Homo sapien
tgctggctgccaagtagtcctgcgt

SEQ ID NO: 708812 - DNA, 25 bp, Homo sapien
ccaaacaggaagtgcttgtctgtgc

SEQ ID NO: 708813 - DNA, 25 bp, Homo sapien
cactgtgcccaagctcagtgaggtt

SEQ ID NO: 708814 - DNA, 25 bp, Homo sapien
tgaggttcagaagcagtttgggcca

SEQ ID NO: 708815 - DNA, 25 bp, Homo sapien
tgggcagtttaaactcgcctctggg

SEQ ID NO: 708816 - DNA, 25 bp, Homo sapien
cattctacttcctagtgccctcagg

SEQ ID NO: 708817 - DNA, 25 bp, Homo sapien
tatcccgatgacaggctaacgttcc

SEQ ID NO: 708818 - DNA, 25 bp, Homo sapien
gacatccacctgagtcgggcaaact

SEQ ID NO: 708819 - DNA, 25 bp, Homo sapien
ggcaaacttgtgcagccttctctgg

SEQ ID NO: 708820 - DNA, 25 bp, Homo sapien
tttgccgtggaagtcaatcctgtcg

SEQ ID NO: 708821 - DNA, 25 bp, Homo sapien
gcttgctgtgcgcacagaccctcag

SEQ ID NO: 708822 - DNA, 25 bp, Homo sapien
cttgctgtgcgcacagaccctcagc

SEQ ID NO: 708823 - DNA, 25 bp, Homo sapien
ctggcttgctgtgcgcacagaccct

SEQ ID NO: 708824 - DNA, 25 bp, Homo sapien
ggcttgctgtgcgcacagaccctca

SEQ ID NO: 708825 - DNA, 25 bp, Homo sapien
tggggttacctgaatgtcctccacc

SEQ ID NO: 708826 - DNA, 25 bp, Homo sapien
ctggggtcgtgaatgtccctgctgc

SEQ ID NO: 708827 - DNA, 25 bp, Homo sapien
tgctgcccggatcttggggttacct

SEQ ID NO: 708828 - DNA, 25 bp, Homo sapien
tcccacactggggtcgtgaatgtcc

SEQ ID NO: 708829 - DNA, 25 bp, Homo sapien
ttatgagtgcgcctgatcttccgtc

SEQ ID NO: 708830 - DNA, 25 bp, Homo sapien
aatccgcagcgccgggggtttatga

SEQ ID NO: 708831 - DNA, 25 bp, Homo sapien
tgagtgcgcctgatcttccgtccat

SEQ ID NO: 708832 - DNA, 25 bp, Homo sapien
gggtttatgagtgcgcctgatcttc

SEQ ID NO: 708833 - DNA, 25 bp, Homo sapien
catttccagccgtctattccagagg

SEQ ID NO: 708834 - DNA, 25 bp, Homo sapien
agatggcccttggagcgctcgtgcc

SEQ ID NO: 708835 - DNA, 25 bp, Homo sapien
gtgagacggacagctctttccggga

SEQ ID NO: 708836 - DNA, 25 bp, Homo sapien
cagatggtttcccagaagtgagacg

SEQ ID NO: 708837 - DNA, 25 bp, Homo sapien
cacgctgcgttgagaaagccccggg

SEQ ID NO: 708838 - DNA, 25 bp, Homo sapien
tttgcctgatttgggattttggccc

SEQ ID NO: 708839 - DNA, 25 bp, Homo sapien
gagaaccgcacgctgcgttgagaaa

SEQ ID NO: 708840 - DNA, 25 bp, Homo sapien
gccctttggttccaagtgccctctg

SEQ ID NO: 708841 - DNA, 25 bp, Homo sapien
ttcagatgaactggttgttgaagac

SEQ ID NO: 708842 - DNA, 25 bp, Homo sapien
gggtacattggctgaaggaattgtg

SEQ ID NO: 708843 - DNA, 25 bp, Homo sapien
gaccaggggaaatcttcagatgaac

SEQ ID NO: 708844 - DNA, 25 bp, Homo sapien
tgaagctgttggaacaaggctggct

SEQ ID NO: 708845 - DNA, 25 bp, Homo sapien
cctcaagcccagaagcattgctggc

SEQ ID NO: 708846 - DNA, 25 bp, Homo sapien
ctcaagcccagaagcattgctggcc

SEQ ID NO: 708847 - DNA, 25 bp, Homo sapien
gcccgtgatcggtgcgcgacccggg

SEQ ID NO: 708848 - DNA, 25 bp, Homo sapien
cggcgggggcccgtgatcggtgcgc

SEQ ID NO: 708849 - DNA, 25 bp, Homo sapien
gggggcccgtgatcggtgcgcgacc

SEQ ID NO: 708850 - DNA, 25 bp, Homo sapien
gtgatcggtgcgcgacccgggctgg

SEQ ID NO: 708851 - DNA, 25 bp, Homo sapien
cagccccaactttgctttgagatgg

SEQ ID NO: 708852 - DNA, 25 bp, Homo sapien
tatgctcgttggtgcccgaagtcca

SEQ ID NO: 708853 - DNA, 25 bp, Homo sapien
tgagagcccagtaatgcccaggtct

SEQ ID NO: 708854 - DNA, 25 bp, Homo sapien
tggctttagtggctgcagcaccacc

SEQ ID NO: 708855 - DNA, 25 bp, Homo sapien
gctctgtcctccctagtcagcacca

SEQ ID NO: 708856 - DNA, 25 bp, Homo sapien
tgctctgtcctccctagtcagcacc

SEQ ID NO: 708857 - DNA, 25 bp, Homo sapien
tggggtacagctcctgttgtttttg

SEQ ID NO: 708858 - DNA, 25 bp, Homo sapien
cattggggtacagctcctgttgttt

SEQ ID NO: 708859 - DNA, 25 bp, Homo sapien
cagcattggggtacagctcctgttg

SEQ ID NO: 708860 - DNA, 25 bp, Homo sapien
cacagcattggggtacagctcctgt

SEQ ID NO: 708861 - DNA, 25 bp, Homo sapien
ctgtgagtcaggtgggtggccctgc

SEQ ID NO: 708862 - DNA, 25 bp, Homo sapien
tgtgagtcaggtgggtggccctgcc

SEQ ID NO: 708863 - DNA, 25 bp, Homo sapien
gtgagtcaggtgggtggccctgccc

SEQ ID NO: 708864 - DNA, 25 bp, Homo sapien
tgagtcaggtgggtggccctgcccg

SEQ ID NO: 708865 - DNA, 25 bp, Homo sapien
caggtccgcaaagcagaaagcccac

SEQ ID NO: 708866 - DNA, 25 bp, Homo sapien
tgcaggtccgcaaagcagaaagccc

SEQ ID NO: 708867 - DNA, 25 bp, Homo sapien
ggtccgcaaagcagaaagcccacat

SEQ ID NO: 708868 - DNA, 25 bp, Homo sapien
cttgcaggtccgcaaagcagaaagc

SEQ ID NO: 708869 - DNA, 25 bp, Homo sapien
caggagtctgggcgggcgccattaa

SEQ ID NO: 708870 - DNA, 25 bp, Homo sapien
ttccaggagtctgggcgggcgccat

SEQ ID NO: 708871 - DNA, 25 bp, Homo sapien
ggagtctgggcgggcgccattaagg

SEQ ID NO: 708872 - DNA, 25 bp, Homo sapien
ccaggagtctgggcgggcgccatta

SEQ ID NO: 708873 - DNA, 25 bp, Homo sapien
gaactacagcttccggcgtgctttg

SEQ ID NO: 708874 - DNA, 25 bp, Homo sapien
tgggagctcgctcgctaggccgctc

SEQ ID NO: 708875 - DNA, 25 bp, Homo sapien
cgtgctttgcgcctgggagctcgct

SEQ ID NO: 708876 - DNA, 25 bp, Homo sapien
gtcggcttccgtccgatggcggaac

SEQ ID NO: 708877 - DNA, 25 bp, Homo sapien
cccctaccaatattccgggccacat

SEQ ID NO: 708878 - DNA, 25 bp, Homo sapien
gcggcgaggcgaggccccagcgcgg

SEQ ID NO: 708879 - DNA, 25 bp, Homo sapien
gtgagcggcgaggcgaggccccagc

SEQ ID NO: 708880 - DNA, 25 bp, Homo sapien
aaagtgagcggcgaggcgaggcccc

SEQ ID NO: 708881 - DNA, 25 bp, Homo sapien
ctggaaagtgagcggcgaggcgagg

SEQ ID NO: 708882 - DNA, 25 bp, Homo sapien
ccgtcgcgtgcaggcaccgctgcag

SEQ ID NO: 708883 - DNA, 25 bp, Homo sapien
ggagagcccgggtcgccgtcgcgtg

SEQ ID NO: 708884 - DNA, 25 bp, Homo sapien
acgatgggaatgagcgggagagccc

SEQ ID NO: 708885 - DNA, 25 bp, Homo sapien
gccaggccgttctggagtgtccgct

SEQ ID NO: 708886 - DNA, 25 bp, Homo sapien
gggcagccagccgatccccacccag

SEQ ID NO: 708887 - DNA, 25 bp, Homo sapien
ggggcagccagccgatccccaccca

SEQ ID NO: 708888 - DNA, 25 bp, Homo sapien
ggcagccagccgatccccacccagc

SEQ ID NO: 708889 - DNA, 25 bp, Homo sapien
gcagccgcgagtagatgtcataggc

SEQ ID NO: 708890 - DNA, 25 bp, Homo sapien
gggcccatgacgcacacgatgcgct

SEQ ID NO: 708891 - DNA, 25 bp, Homo sapien
ccgcgagtagatgtcataggcgcgc

SEQ ID NO: 708892 - DNA, 25 bp, Homo sapien
gtagatgtcataggcgcgctcgccg

SEQ ID NO: 708893 - DNA, 25 bp, Homo sapien
gagggtcccggcgcggggcgctcac

SEQ ID NO: 708894 - DNA, 25 bp, Homo sapien
ggagggtcccggcgcggggcgctca

SEQ ID NO: 708895 - DNA, 25 bp, Homo sapien
aaggaagtcggagattaagagccga

SEQ ID NO: 708896 - DNA, 25 bp, Homo sapien
ccaggtgtcaggaaggaagtcggag

SEQ ID NO: 708897 - DNA, 25 bp, Homo sapien
ggagagtcttgagcgtaggaatgag

SEQ ID NO: 708898 - DNA, 25 bp, Homo sapien
gggagagagtagtggagaggaccca

SEQ ID NO: 708899 - DNA, 25 bp, Homo sapien
caaggctggcaacgctgtcatcgat

SEQ ID NO: 708900 - DNA, 25 bp, Homo sapien
tgttgctctcggattgcaggaagag

SEQ ID NO: 708901 - DNA, 25 bp, Homo sapien
aagaggagctgtgcgataacaaggc

SEQ ID NO: 708902 - DNA, 25 bp, Homo sapien
ggcttcttgttgctctcggattgca

SEQ ID NO: 708903 - DNA, 25 bp, Homo sapien
tcgtagatggccaggcccgcggtca

SEQ ID NO: 708904 - DNA, 25 bp, Homo sapien
acgcaccaggtgcagatcgggttga

SEQ ID NO: 708905 - DNA, 25 bp, Homo sapien
gaggatgtactgcatcgtgtcgtag

SEQ ID NO: 708906 - DNA, 25 bp, Homo sapien
ctggtggatcatgatacgggagttg

SEQ ID NO: 708907 - DNA, 25 bp, Homo sapien
tccttctgtctagaccctgtcctga

SEQ ID NO: 708908 - DNA, 25 bp, Homo sapien
ttttaagacatccactcccggctgg

SEQ ID NO: 708909 - DNA, 25 bp, Homo sapien
cacgcttgacttccgcccagtcagt

SEQ ID NO: 708910 - DNA, 25 bp, Homo sapien
tgattcccaacagcagctcgcgtgt

SEQ ID NO: 708911 - DNA, 25 bp, Homo sapien
ctctgtttggtgtgcttggcgtaga

SEQ ID NO: 708912 - DNA, 25 bp, Homo sapien
gatgttatagagctgcttcttgagc

SEQ ID NO: 708913 - DNA, 25 bp, Homo sapien
cgtagatgttatagagctgcttctt

SEQ ID NO: 708914 - DNA, 25 bp, Homo sapien
tgcttggcgtagatgttatagagct

SEQ ID NO: 708915 - DNA, 25 bp, Homo sapien
tccttctgcaccagcgtgggctcat

SEQ ID NO: 708916 - DNA, 25 bp, Homo sapien
cttgtctaagatgccaaactcctgg

SEQ ID NO: 708917 - DNA, 25 bp, Homo sapien
gagggtggaccagaaccttgtctaa

SEQ ID NO: 708918 - DNA, 25 bp, Homo sapien
atgtagcggtccctctccatggcgg

SEQ ID NO: 708919 - DNA, 25 bp, Homo sapien
agcgggcacccctgcaaattaaaag

SEQ ID NO: 708920 - DNA, 25 bp, Homo sapien
tagcgggcacccctgcaaattaaaa

SEQ ID NO: 708921 - DNA, 25 bp, Homo sapien
atagcgggcacccctgcaaattaaa

SEQ ID NO: 708922 - DNA, 25 bp, Homo sapien
taaaatcacagtgtctcagctggaa

SEQ ID NO: 708923 - DNA, 25 bp, Homo sapien
tttaaaatcacagtgtctcagctgg

SEQ ID NO: 708924 - DNA, 25 bp, Homo sapien
gtgtctcagctggaatgccccgtcc

SEQ ID NO: 708925 - DNA, 25 bp, Homo sapien
tcacagtgtctcagctggaatgccc

SEQ ID NO: 708926 - DNA, 25 bp, Homo sapien
ggcagcgattgacttccctcagagt

SEQ ID NO: 708927 - DNA, 25 bp, Homo sapien
tacaccagtggctgagtcgcaagtc

SEQ ID NO: 708928 - DNA, 25 bp, Homo sapien
tctcttgagcttattgggcgccacc

SEQ ID NO: 708929 - DNA, 25 bp, Homo sapien
tatctggtctgaagtccggaagtca

SEQ ID NO: 708930 - DNA, 25 bp, Homo sapien
ccagtgatcgtattcgtagcggcgg

SEQ ID NO: 708931 - DNA, 25 bp, Homo sapien
agttctcggctcagcgtctcctcct

SEQ ID NO: 708932 - DNA, 25 bp, Homo sapien
ggctcagcacggaagggcccgagcc

SEQ ID NO: 708933 - DNA, 25 bp, Homo sapien
agctcgggctccagttctcggctca

SEQ ID NO: 708934 - DNA, 25 bp, Homo sapien
ccagccgccacgttcttctgcactg

SEQ ID NO: 708935 - DNA, 25 bp, Homo sapien
gccgccacgttcttctgcactgtaa

SEQ ID NO: 708936 - DNA, 25 bp, Homo sapien
caatcccagccgccacgttcttctg

SEQ ID NO: 708937 - DNA, 25 bp, Homo sapien
aatcccagccgccacgttcttctgc

SEQ ID NO: 708938 - DNA, 25 bp, Homo sapien
ctgcacagagagctcggttaagcct

SEQ ID NO: 708939 - DNA, 25 bp, Homo sapien
cagagagctcggttaagcctgggag

SEQ ID NO: 708940 - DNA, 25 bp, Homo sapien
acagagagctcggttaagcctggga

SEQ ID NO: 708941 - DNA, 25 bp, Homo sapien
gcacagagagctcggttaagcctgg

SEQ ID NO: 708942 - DNA, 25 bp, Homo sapien
tccagcacgtgcacggaggagagca

SEQ ID NO: 708943 - DNA, 25 bp, Homo sapien
tctgtctctcggaagccgtggatgg

SEQ ID NO: 708944 - DNA, 25 bp, Homo sapien
tctgaccagcgcgacttctctgtct

SEQ ID NO: 708945 - DNA, 25 bp, Homo sapien
ggcttgatgtagccgcgggcttcca

SEQ ID NO: 708946 - DNA, 25 bp, Homo sapien
ggctgggagtgccaaggcaccgtcc

SEQ ID NO: 708947 - DNA, 25 bp, Homo sapien
ctgcctaccccctggctgggagtgc

SEQ ID NO: 708948 - DNA, 25 bp, Homo sapien
tgggagtgccaaggcaccgtcctct

SEQ ID NO: 708949 - DNA, 25 bp, Homo sapien
ggagtgccaaggcaccgtcctctgc

SEQ ID NO: 708950 - DNA, 25 bp, Homo sapien
gtgcaccagccgcataacgctggga

SEQ ID NO: 708951 - DNA, 25 bp, Homo sapien
ccagccgcataacgctgggagacag

SEQ ID NO: 708952 - DNA, 25 bp, Homo sapien
ctgggtgtgcaccagccgcataacg

SEQ ID NO: 708953 - DNA, 25 bp, Homo sapien
agacaggccggcgatggtggccccg

SEQ ID NO: 708954 - DNA, 25 bp, Homo sapien
tccaggcagacctggattccagcct

SEQ ID NO: 708955 - DNA, 25 bp, Homo sapien
cctgctccaggcagacctggattcc

SEQ ID NO: 708956 - DNA, 25 bp, Homo sapien
ctgtgactgggtgcaaggagggcag

SEQ ID NO: 708957 - DNA, 25 bp, Homo sapien
tgctccaggcagacctggattccag

SEQ ID NO: 708958 - DNA, 25 bp, Homo sapien
tcttcatcccgaaggatctcatggg

SEQ ID NO: 708959 - DNA, 25 bp, Homo sapien
gcagatcacggagatgcgccggccc

SEQ ID NO: 708960 - DNA, 25 bp, Homo sapien
cccaaagaaggactcttcatcccga

SEQ ID NO: 708961 - DNA, 25 bp, Homo sapien
catgggagaagtcataacgggctga

SEQ ID NO: 708962 - DNA, 25 bp, Homo sapien
aactttattcacaaatctggtgtct

SEQ ID NO: 708963 - DNA, 25 bp, Homo sapien
ttattcacaaatctggtgtctgtag

SEQ ID NO: 708964 - DNA, 25 bp, Homo sapien
caaatctggtgtctgtagaaagctg

SEQ ID NO: 708965 - DNA, 25 bp, Homo sapien
ctttattcacaaatctggtgtctgt

SEQ ID NO: 708966 - DNA, 25 bp, Homo sapien
acctggatgcagagacaacgaggag

SEQ ID NO: 708967 - DNA, 25 bp, Homo sapien
tgcaataaaggacaccactctcccg

SEQ ID NO: 708968 - DNA, 25 bp, Homo sapien
gctgacttatttattggagacctgg

SEQ ID NO: 708969 - DNA, 25 bp, Homo sapien
gggcgaccagcagtgagtgcaataa

SEQ ID NO: 708970 - DNA, 25 bp, Homo sapien
ttatctgtctgcatcgtgctagacg

SEQ ID NO: 708971 - DNA, 25 bp, Homo sapien
ggaagcctcgagagcccttatctgt

SEQ ID NO: 708972 - DNA, 25 bp, Homo sapien
ctgggtatggaagcctcgagagccc

SEQ ID NO: 708973 - DNA, 25 bp, Homo sapien
gacgttaccatgacctggacagcct

SEQ ID NO: 708974 - DNA, 25 bp, Homo sapien
agcaatccctcacggatggagttga

SEQ ID NO: 708975 - DNA, 25 bp, Homo sapien
caatccctcacggatggagttgagg

SEQ ID NO: 708976 - DNA, 25 bp, Homo sapien
gaagcaatccctcacggatggagtt

SEQ ID NO: 708977 - DNA, 25 bp, Homo sapien
aatccctcacggatggagttgaggc

SEQ ID NO: 708978 - DNA, 25 bp, Homo sapien
agcacttcagtaagaaaaaccacaa

SEQ ID NO: 708979 - DNA, 25 bp, Homo sapien
tttccatcggaaaattatcatctca

SEQ ID NO: 708980 - DNA, 25 bp, Homo sapien
catctcaataagcacttcagtaaga

SEQ ID NO: 708981 - DNA, 25 bp, Homo sapien
ttttctttccatcggaaaattatca

SEQ ID NO: 708982 - DNA, 25 bp, Homo sapien
gagatgtctggctaattcctcggaa

SEQ ID NO: 708983 - DNA, 25 bp, Homo sapien
cattctgtaagggagggcttttcca

SEQ ID NO: 708984 - DNA, 25 bp, Homo sapien
ggttctcagcttgcaggtggccacc

SEQ ID NO: 708985 - DNA, 25 bp, Homo sapien
tacttttgaacccatcttccgggca

SEQ ID NO: 708986 - DNA, 25 bp, Homo sapien
ttgtcccagctgttccgtaggctga

SEQ ID NO: 708987 - DNA, 25 bp, Homo sapien
tgttgtcccagctgttccgtaggct

SEQ ID NO: 708988 - DNA, 25 bp, Homo sapien
cagctgttccgtaggctgaggcacg

SEQ ID NO: 708989 - DNA, 25 bp, Homo sapien
cctgttgtcccagctgttccgtagg

SEQ ID NO: 708990 - DNA, 25 bp, Homo sapien
tggcccagatcctcaagcgactcaa

SEQ ID NO: 708991 - DNA, 25 bp, Homo sapien
cagacagtgaacgtgttggcccaga

SEQ ID NO: 708992 - DNA, 25 bp, Homo sapien
gacctgctgaaaaagttccagacca

SEQ ID NO: 708993 - DNA, 25 bp, Homo sapien
gactcaaccccgagcgcaagatgat

SEQ ID NO: 708994 - DNA, 25 bp, Homo sapien
tctcagctcactggctcattgcaac

SEQ ID NO: 708995 - DNA, 25 bp, Homo sapien
tctgcccgctttggcatcccaatat

SEQ ID NO: 708996 - DNA, 25 bp, Homo sapien
tgcccgctttggcatcccaatatgc

SEQ ID NO: 708997 - DNA, 25 bp, Homo sapien
tgggactacacacgtgcacctcccc

SEQ ID NO: 708998 - DNA, 25 bp, Homo sapien
taaatggcacgaagtcagagcgtcc

SEQ ID NO: 708999 - DNA, 25 bp, Homo sapien
tctgctttgtaagttttagggagaa

SEQ ID NO: 709000 - DNA, 25 bp, Homo sapien
aagagtcataggttggctcagctcc

SEQ ID NO: 709001 - DNA, 25 bp, Homo sapien
tccactgtaaaatcagtcgatcaat

SEQ ID NO: 709002 - DNA, 25 bp, Homo sapien
gaatgtcactgaatacgtcgttcga

SEQ ID NO: 709003 - DNA, 25 bp, Homo sapien
gttaccttttcccagcgccagaggc

SEQ ID NO: 709004 - DNA, 25 bp, Homo sapien
gaccagatcggaaccactgaccatt

SEQ ID NO: 709005 - DNA, 25 bp, Homo sapien
cagggccctagcagccagaatgtca

SEQ ID NO: 709006 - DNA, 25 bp, Homo sapien
ctcgggcagcttggacttgcaaaga

SEQ ID NO: 709007 - DNA, 25 bp, Homo sapien
gcccatctcgggcagcttggacttg

SEQ ID NO: 709008 - DNA, 25 bp, Homo sapien
gggcagcttggacttgcaaagaccc

SEQ ID NO: 709009 - DNA, 25 bp, Homo sapien
ctgcccatctcgggcagcttggact

SEQ ID NO: 709010 - DNA, 25 bp, Homo sapien
ctttgccacagcccgggccccccat

SEQ ID NO: 709011 - DNA, 25 bp, Homo sapien
gtgtccctttgccacagcccgggcc

SEQ ID NO: 709012 - DNA, 25 bp, Homo sapien
tgtccctttgccacagcccgggccc

SEQ ID NO: 709013 - DNA, 25 bp, Homo sapien
ctgtgtccctttgccacagcccggg

SEQ ID NO: 709014 - DNA, 25 bp, Homo sapien
cccgctgcgtgctcctttgagcctc

SEQ ID NO: 709015 - DNA, 25 bp, Homo sapien
gtgatgtcacggatctgccggcccc

SEQ ID NO: 709016 - DNA, 25 bp, Homo sapien
ggagcccctgcagcgtgatgtcacg

SEQ ID NO: 709017 - DNA, 25 bp, Homo sapien
cagtagctggtccagccccacatgg

SEQ ID NO: 709018 - DNA, 25 bp, Homo sapien
aaatttattgttttgaccaggcacg

SEQ ID NO: 709019 - DNA, 25 bp, Homo sapien
tgcgctcaaactccatggcctgctt

SEQ ID NO: 709020 - DNA, 25 bp, Homo sapien
ctggggaaagccatcgatgaggaag

SEQ ID NO: 709021 - DNA, 25 bp, Homo sapien
ggcgggacaacatgttgtcactgac

SEQ ID NO: 709022 - DNA, 25 bp, Homo sapien
ctctccgggcgggacaacatgttgt

SEQ ID NO: 709023 - DNA, 25 bp, Homo sapien
tccaggactgagcaagaaatgtaaa

SEQ ID NO: 709024 - DNA, 25 bp, Homo sapien
gatgacaacccaatagcaacgagta

SEQ ID NO: 709025 - DNA, 25 bp, Homo sapien
gcaacgagtattctttgaaccctaa

SEQ ID NO: 709026 - DNA, 25 bp, Homo sapien
tgaaccctaattttgcaccacgaaa

SEQ ID NO: 709027 - DNA, 25 bp, Homo sapien
tatagtgcgtgtccaagcgctggtg

SEQ ID NO: 709028 - DNA, 25 bp, Homo sapien
actcgtcggagcatcgtctccatgg

SEQ ID NO: 709029 - DNA, 25 bp, Homo sapien
tggccccagtgtagcactcgtcgga

SEQ ID NO: 709030 - DNA, 25 bp, Homo sapien
cagtcaaacacgatgacgacgctgg

SEQ ID NO: 709031 - DNA, 25 bp, Homo sapien
tcagagcaggttattgcgctggtag

SEQ ID NO: 709032 - DNA, 25 bp, Homo sapien
caggttattgcgctggtaggtcaag

SEQ ID NO: 709033 - DNA, 25 bp, Homo sapien
ggttattgcgctggtaggtcaagac

SEQ ID NO: 709034 - DNA, 25 bp, Homo sapien
agcaggttattgcgctggtaggtca

SEQ ID NO: 709035 - DNA, 25 bp, Homo sapien
cacttggcaaagatgttctctggtg

SEQ ID NO: 709036 - DNA, 25 bp, Homo sapien
ggcaaagatgttctctggtgctgct

SEQ ID NO: 709037 - DNA, 25 bp, Homo sapien
tcactgcagactctcaatgacagag

SEQ ID NO: 709038 - DNA, 25 bp, Homo sapien
actgcagactctcaatgacagagca

SEQ ID NO: 709039 - DNA, 25 bp, Homo sapien
ggtggaacattccttggaccaggtg

SEQ ID NO: 709040 - DNA, 25 bp, Homo sapien
tttatcgctcgtttttaacttcaca

SEQ ID NO: 709041 - DNA, 25 bp, Homo sapien
tctgttcaagaggagattgaaactg

SEQ ID NO: 709042 - DNA, 25 bp, Homo sapien
ggtgttgtattgcaggaccccttcc

SEQ ID NO: 709043 - DNA, 25 bp, Homo sapien
tctctgaggataaagcaattcattt

SEQ ID NO: 709044 - DNA, 25 bp, Homo sapien
gcaggctcaatgaatcgaatgaatg

SEQ ID NO: 709045 - DNA, 25 bp, Homo sapien
gatagcgagatctaaatctctgcca

SEQ ID NO: 709046 - DNA, 25 bp, Homo sapien
tctttcaaaattgggatccttccat

SEQ ID NO: 709047 - DNA, 25 bp, Homo sapien
cagttaacaagcacgtccttccagc

SEQ ID NO: 709048 - DNA, 25 bp, Homo sapien
cctggctagacagttaacaagcacg

SEQ ID NO: 709049 - DNA, 25 bp, Homo sapien
agcagcgtgacttcagcgagtcccg

SEQ ID NO: 709050 - DNA, 25 bp, Homo sapien
tcccgcgagcacctggctagacagt

SEQ ID NO: 709051 - DNA, 25 bp, Homo sapien
cgtgaagatcgttgccaccttccaa

SEQ ID NO: 709052 - DNA, 25 bp, Homo sapien
ttcatgtcgtcgtgctgcgccggga

SEQ ID NO: 709053 - DNA, 25 bp, Homo sapien
tgtgtcccgggcttgtctgtgaagt

SEQ ID NO: 709054 - DNA, 25 bp, Homo sapien
ggagacagggcagctcccctacgac

SEQ ID NO: 709055 - DNA, 25 bp, Homo sapien
gcctgggaagagtattacaaaaaga

SEQ ID NO: 709056 - DNA, 25 bp, Homo sapien
agtggtttctgacctgtctcggcgc

SEQ ID NO: 709057 - DNA, 25 bp, Homo sapien
tcggactacactaaggcctgggaag

SEQ ID NO: 709058 - DNA, 25 bp, Homo sapien
caaaaagatcggtgagtctgcaggg

SEQ ID NO: 709059 - DNA, 25 bp, Homo sapien
cattggcttgtgtccacgactatca

SEQ ID NO: 709060 - DNA, 25 bp, Homo sapien
gaatctggcactcgcgtttcattgg

SEQ ID NO: 709061 - DNA, 25 bp, Homo sapien
tacagagctcgcgattggtgtccgg

SEQ ID NO: 709062 - DNA, 25 bp, Homo sapien
ataggagtcttccactaggcccggc

SEQ ID NO: 709063 - DNA, 25 bp, Homo sapien
gaaggcagatcctgatattccaagg

SEQ ID NO: 709064 - DNA, 25 bp, Homo sapien
gagcttaggatcatctggagacccc

SEQ ID NO: 709065 - DNA, 25 bp, Homo sapien
caagtggatcctggcaactgcagct

SEQ ID NO: 709066 - DNA, 25 bp, Homo sapien
tgaaattgcatggtcgagggagtct

SEQ ID NO: 709067 - DNA, 25 bp, Homo sapien
cacacctcagccactggagactgat

SEQ ID NO: 709068 - DNA, 25 bp, Homo sapien
ttcatgaaggttattccagctgtga

SEQ ID NO: 709069 - DNA, 25 bp, Homo sapien
gcatctcctatgtggtctacgagaa

SEQ ID NO: 709070 - DNA, 25 bp, Homo sapien
tgggtctgctacgtcacatcctgtc

SEQ ID NO: 709071 - DNA, 25 bp, Homo sapien
ggggcgggagactgtagaatgcatt

SEQ ID NO: 709072 - DNA, 25 bp, Homo sapien
gggcgggagactgtagaatgcattc

SEQ ID NO: 709073 - DNA, 25 bp, Homo sapien
gcgggagactgtagaatgcattcat

SEQ ID NO: 709074 - DNA, 25 bp, Homo sapien
ggcgggagactgtagaatgcattca

SEQ ID NO: 709075 - DNA, 25 bp, Homo sapien
catatctgtgggagcgcacaggtgt

SEQ ID NO: 709076 - DNA, 25 bp, Homo sapien
tatgtacccgtgcactaggcactcc

SEQ ID NO: 709077 - DNA, 25 bp, Homo sapien
gaaaaaatacctgcccaggcgcaat

SEQ ID NO: 709078 - DNA, 25 bp, Homo sapien
gggaccttacacctgcattgcgagc

SEQ ID NO: 709079 - DNA, 25 bp, Homo sapien
tgggagagcgcacttccggcttgtg

SEQ ID NO: 709080 - DNA, 25 bp, Homo sapien
gagagcgcacttccggcttgtgcac

SEQ ID NO: 709081 - DNA, 25 bp, Homo sapien
ctgggagagcgcacttccggcttgt

SEQ ID NO: 709082 - DNA, 25 bp, Homo sapien
ggagagcgcacttccggcttgtgca

SEQ ID NO: 709083 - DNA, 25 bp, Homo sapien
tcaggttcctggtccgtgtccctcc

SEQ ID NO: 709084 - DNA, 25 bp, Homo sapien
ccctcggtccgtcggtcgttctgtg

SEQ ID NO: 709085 - DNA, 25 bp, Homo sapien
ctggcccgggcgtctttgacctagc

SEQ ID NO: 709086 - DNA, 25 bp, Homo sapien
ggcgtctttgacctagctcaggttc

SEQ ID NO: 709087 - DNA, 25 bp, Homo sapien
agaggcccaggcgttgggatcgggg

SEQ ID NO: 709088 - DNA, 25 bp, Homo sapien
aggcccaggcgttgggatcggggtg

SEQ ID NO: 709089 - DNA, 25 bp, Homo sapien
gccaggggcacctgcgacggggcac

SEQ ID NO: 709090 - DNA, 25 bp, Homo sapien
ggcttctcgcgctcgcccctcctac

SEQ ID NO: 709091 - DNA, 25 bp, Homo sapien
gggcttctcgcgctcgcccctccta

SEQ ID NO: 709092 - DNA, 25 bp, Homo sapien
gtggcgggttggcagcgccgaggaa

SEQ ID NO: 709093 - DNA, 25 bp, Homo sapien
ctgggtggcgggttggcagcgccga

SEQ ID NO: 709094 - DNA, 25 bp, Homo sapien
gggtggcgggttggcagcgccgagg

SEQ ID NO: 709095 - DNA, 25 bp, Homo sapien
gggctgggtggcgggttggcagcgc

SEQ ID NO: 709096 - DNA, 25 bp, Homo sapien
agcaggaacggcaggcccagcgcca

SEQ ID NO: 709097 - DNA, 25 bp, Homo sapien
caggcccagcgccagaagcagcccc

SEQ ID NO: 709098 - DNA, 25 bp, Homo sapien
aggctcggccccagcgggccagcag

SEQ ID NO: 709099 - DNA, 25 bp, Homo sapien
agcgggccagcaggaacggcaggcc

SEQ ID NO: 709100 - DNA, 25 bp, Homo sapien
ggcaaaacagtgctattctcatttg

SEQ ID NO: 709101 - DNA, 25 bp, Homo sapien
gcaaaacagtgctattctcatttgc

SEQ ID NO: 709102 - DNA, 25 bp, Homo sapien
gaagcttccgcaccaacagtgccag

SEQ ID NO: 709103 - DNA, 25 bp, Homo sapien
ctgctcctcgctactgggccggtag

SEQ ID NO: 709104 - DNA, 25 bp, Homo sapien
gccgcttctcccgaagcttccgcac

SEQ ID NO: 709105 - DNA, 25 bp, Homo sapien
ctgggccggtaggtgccctccgtct

SEQ ID NO: 709106 - DNA, 25 bp, Homo sapien
ctcttccggcggcaacttgaggttg

SEQ ID NO: 709107 - DNA, 25 bp, Homo sapien
ttgaggttgggggtcggtggcacgc

SEQ ID NO: 709108 - DNA, 25 bp, Homo sapien
gctcttccggcggcaacttgaggtt

SEQ ID NO: 709109 - DNA, 25 bp, Homo sapien
gggtcggtggcacgcgggcacccac

SEQ ID NO: 709110 - DNA, 25 bp, Homo sapien
ggtgtacaagccagcaacccgcagt

SEQ ID NO: 709111 - DNA, 25 bp, Homo sapien
ctcggtggcagctgcggtgtacaag

SEQ ID NO: 709112 - DNA, 25 bp, Homo sapien
acagagcccaccacatgggtgcccc

SEQ ID NO: 709113 - DNA, 25 bp, Homo sapien
agaaaagttggttccgcaagcaggg

SEQ ID NO: 709114 - DNA, 25 bp, Homo sapien
gggcccgggcctcggctgcatggga

SEQ ID NO: 709115 - DNA, 25 bp, Homo sapien
cccgggcctcggctgcatgggagaa

SEQ ID NO: 709116 - DNA, 25 bp, Homo sapien
atgggcaggcagccctgcaccgtct

SEQ ID NO: 709117 - DNA, 25 bp, Homo sapien
gcaccgtctccttggagtcctgagg

SEQ ID NO: 709118 - DNA, 25 bp, Homo sapien
cactgggtggatctgactgcccaga

SEQ ID NO: 709119 - DNA, 25 bp, Homo sapien
caccagctcaaacacaccaataaag

SEQ ID NO: 709120 - DNA, 25 bp, Homo sapien
aagtaccttcttccctgctattaag

SEQ ID NO: 709121 - DNA, 25 bp, Homo sapien
taaaagtgaatagccccatcctctc

SEQ ID NO: 709122 - DNA, 25 bp, Homo sapien
tgagaccgagccagagtttagactg

SEQ ID NO: 709123 - DNA, 25 bp, Homo sapien
cactttggaaaggtgagagcgcccc

SEQ ID NO: 709124 - DNA, 25 bp, Homo sapien
tataaggtaagatcaactggccggg

SEQ ID NO: 709125 - DNA, 25 bp, Homo sapien
tctggacagtcttagcatgggagcc

SEQ ID NO: 709126 - DNA, 25 bp, Homo sapien
tgctgagcgtgcagagcaagaacag

SEQ ID NO: 709127 - DNA, 25 bp, Homo sapien
cgcaagctggccgtcaacatggttc

SEQ ID NO: 709128 - DNA, 25 bp, Homo sapien
aagctggccgtcaacatggttccct

SEQ ID NO: 709129 - DNA, 25 bp, Homo sapien
agcagatgctgagcgtgcagagcaa

SEQ ID NO: 709130 - DNA, 25 bp, Homo sapien
gtggtgccctcgcccaaagtgtcag

SEQ ID NO: 709131 - DNA, 25 bp, Homo sapien
gcgaggagttcccagaccgcatcat

SEQ ID NO: 709132 - DNA, 25 bp, Homo sapien
agatccgcgaggagttcccagaccg

SEQ ID NO: 709133 - DNA, 25 bp, Homo sapien
catcagtaagatccgcgaggagttc

SEQ ID NO: 709134 - DNA, 25 bp, Homo sapien
aatttcgctgggacttgcagccgcc

SEQ ID NO: 709135 - DNA, 25 bp, Homo sapien
atttcgctgggacttgcagccgccc

SEQ ID NO: 709136 - DNA, 25 bp, Homo sapien
caatttcgctgggacttgcagccgc

SEQ ID NO: 709137 - DNA, 25 bp, Homo sapien
agtgacatcaaaggcaggaaatggt

SEQ ID NO: 709138 - DNA, 25 bp, Homo sapien
atcaaaggcaggaaatggtgtttcc

SEQ ID NO: 709139 - DNA, 25 bp, Homo sapien
ctagtgacatcaaaggcaggaaatg

SEQ ID NO: 709140 - DNA, 25 bp, Homo sapien
gacatcaaaggcaggaaatggtgtt

SEQ ID NO: 709141 - DNA, 25 bp, Homo sapien
tgtctcctcgaagtaagcgtgggcc

SEQ ID NO: 709142 - DNA, 25 bp, Homo sapien
ctcgaagtaagcgtgggccctggtt

SEQ ID NO: 709143 - DNA, 25 bp, Homo sapien
tctcctcgaagtaagcgtgggccct

SEQ ID NO: 709144 - DNA, 25 bp, Homo sapien
tcagctgtctcctcgaagtaagcgt

SEQ ID NO: 709145 - DNA, 25 bp, Homo sapien
tgagcgagttggaggaaacacattt

SEQ ID NO: 709146 - DNA, 25 bp, Homo sapien
caagaaagggacagtgttgagcgag

SEQ ID NO: 709147 - DNA, 25 bp, Homo sapien
cgagttggaggaaacacatttccca

SEQ ID NO: 709148 - DNA, 25 bp, Homo sapien
aattccccttgcaagaaagggacag

SEQ ID NO: 709149 - DNA, 25 bp, Homo sapien
cagtgaagcgtcagaggcgtattcc

SEQ ID NO: 709150 - DNA, 25 bp, Homo sapien
gtccagtgaagcgtcagaggcgtat

SEQ ID NO: 709151 - DNA, 25 bp, Homo sapien
cttcggggtccagtgaagcgtcaga

SEQ ID NO: 709152 - DNA, 25 bp, Homo sapien
gtgaagcgtcagaggcgtattccat

SEQ ID NO: 709153 - DNA, 25 bp, Homo sapien
gcagccccgcgaccagggcccaagg

SEQ ID NO: 709154 - DNA, 25 bp, Homo sapien
agcagccccgcgaccagggcccaag

SEQ ID NO: 709155 - DNA, 25 bp, Homo sapien
gaggaagacggcgcaggcggcagcg

SEQ ID NO: 709156 - DNA, 25 bp, Homo sapien
ggaagacggcgcaggcggcagcgag

SEQ ID NO: 709157 - DNA, 25 bp, Homo sapien
agaggccggcgggatcgtcgggcga

SEQ ID NO: 709158 - DNA, 25 bp, Homo sapien
ctgccgcaggtccaagaggccggcg

SEQ ID NO: 709159 - DNA, 25 bp, Homo sapien
tcgggcgaaagctcgggaccctcgc

SEQ ID NO: 709160 - DNA, 25 bp, Homo sapien
ggatcgtcgggcgaaagctcgggac

SEQ ID NO: 709161 - DNA, 25 bp, Homo sapien
ttttgggccaccagctgcgcaaaca

SEQ ID NO: 709162 - DNA, 25 bp, Homo sapien
tttgggccaccagctgcgcaaacat

SEQ ID NO: 709163 - DNA, 25 bp, Homo sapien
cattttgggccaccagctgcgcaaa

SEQ ID NO: 709164 - DNA, 25 bp, Homo sapien
attttgggccaccagctgcgcaaac

SEQ ID NO: 709165 - DNA, 25 bp, Homo sapien
ccgtcagggacacgcctgccaggcc

SEQ ID NO: 709166 - DNA, 25 bp, Homo sapien
cacgcgccgcagctctagttgaaag

SEQ ID NO: 709167 - DNA, 25 bp, Homo sapien
ttcgtgtcctctttgtagctcaggc

SEQ ID NO: 709168 - DNA, 25 bp, Homo sapien
tgggtcactgtaccagctcaggggc

SEQ ID NO: 709169 - DNA, 25 bp, Homo sapien
actgtggcgccctgggtaagctgcc

SEQ ID NO: 709170 - DNA, 25 bp, Homo sapien
tcaggtgcagcaagcggccctggaa

SEQ ID NO: 709171 - DNA, 25 bp, Homo sapien
ggtggcaggtccacggtcaaagcca

SEQ ID NO: 709172 - DNA, 25 bp, Homo sapien
gtgcagcgcaagtgaaacggagcct

SEQ ID NO: 709173 - DNA, 25 bp, Homo sapien
tgaagggagtccggctgggatttcg

SEQ ID NO: 709174 - DNA, 25 bp, Homo sapien
tattccgacctcggtgaagggagtc

SEQ ID NO: 709175 - DNA, 25 bp, Homo sapien
cctcggtgaagggagtccggctggg

SEQ ID NO: 709176 - DNA, 25 bp, Homo sapien
cgacctcggtgaagggagtccggct

SEQ ID NO: 709177 - DNA, 25 bp, Homo sapien
accagcctcggcaatgtcgaagacc

SEQ ID NO: 709178 - DNA, 25 bp, Homo sapien
taatatattatctgagctcaggctc

SEQ ID NO: 709179 - DNA, 25 bp, Homo sapien
caacatagcaataccgtctccgcaa

SEQ ID NO: 709180 - DNA, 25 bp, Homo sapien
caagccccttgaggtagagaaagca

SEQ ID NO: 709181 - DNA, 25 bp, Homo sapien
gaggaagctcctgaagaagtcttat

SEQ ID NO: 709182 - DNA, 25 bp, Homo sapien
acccaccacttataactttcaacag

SEQ ID NO: 709183 - DNA, 25 bp, Homo sapien
tcccaagtacttaaagctttcacca

SEQ ID NO: 709184 - DNA, 25 bp, Homo sapien
cagtgaagtcaaataagattgagga

SEQ ID NO: 709185 - DNA, 25 bp, Homo sapien
gatgccactgaacaagttgaaggag

SEQ ID NO: 709186 - DNA, 25 bp, Homo sapien
tgtcgatgccactgaacaagttgaa

SEQ ID NO: 709187 - DNA, 25 bp, Homo sapien
ttggcattgtcgatgccactgaaca

SEQ ID NO: 709188 - DNA, 25 bp, Homo sapien
ggccttggcattgtcgatgccactg

SEQ ID NO: 709189 - DNA, 25 bp, Homo sapien
ggcagccatggggtagaacctatcc

SEQ ID NO: 709190 - DNA, 25 bp, Homo sapien
cagccatggggtagaacctatccac

SEQ ID NO: 709191 - DNA, 25 bp, Homo sapien
ttaggcagccatggggtagaaccta

SEQ ID NO: 709192 - DNA, 25 bp, Homo sapien
taggcagccatggggtagaacctat

SEQ ID NO: 709193 - DNA, 25 bp, Homo sapien
agatgtccactgtcataaatttagc

SEQ ID NO: 709194 - DNA, 25 bp, Homo sapien
ttaaactcggacatccagattaaca

SEQ ID NO: 709195 - DNA, 25 bp, Homo sapien
gaccagagatgtccactgtcataaa

SEQ ID NO: 709196 - DNA, 25 bp, Homo sapien
cggacatccagattaacaggataga

SEQ ID NO: 709197 - DNA, 25 bp, Homo sapien
aaaagagaaggagaataacagagag

SEQ ID NO: 709198 - DNA, 25 bp, Homo sapien
aaagagaaggagaataacagagagg

SEQ ID NO: 709199 - DNA, 25 bp, Homo sapien
agagaaggagaataacagagaggaa

SEQ ID NO: 709200 - DNA, 25 bp, Homo sapien
agaaggagaataacagagaggaaga

SEQ ID NO: 709201 - DNA, 25 bp, Homo sapien
gtttctggcacagcgggaacttcct

SEQ ID NO: 709202 - DNA, 25 bp, Homo sapien
ctggcacagcgggaacttccttctt

SEQ ID NO: 709203 - DNA, 25 bp, Homo sapien
ttctggcacagcgggaacttccttc

SEQ ID NO: 709204 - DNA, 25 bp, Homo sapien
ggtttctggcacagcgggaacttcc

SEQ ID NO: 709205 - DNA, 25 bp, Homo sapien
gacatcttttccattcgaatttcag

SEQ ID NO: 709206 - DNA, 25 bp, Homo sapien
ttttcttgacatcttttccattcga

SEQ ID NO: 709207 - DNA, 25 bp, Homo sapien
ttgacatcttttccattcgaatttc

SEQ ID NO: 709208 - DNA, 25 bp, Homo sapien
tcttgacatcttttccattcgaatt

SEQ ID NO: 709209 - DNA, 25 bp, Homo sapien
cagcatgttaattggccttcacaaa

SEQ ID NO: 709210 - DNA, 25 bp, Homo sapien
catgttaattggccttcacaaaggt

SEQ ID NO: 709211 - DNA, 25 bp, Homo sapien
tgttaattggccttcacaaaggttc

SEQ ID NO: 709212 - DNA, 25 bp, Homo sapien
agcatgttaattggccttcacaaag

SEQ ID NO: 709213 - DNA, 25 bp, Homo sapien
ccacgaaatgggtggtctgtttctt

SEQ ID NO: 709214 - DNA, 25 bp, Homo sapien
caccttccacgaaatgggtggtctg

SEQ ID NO: 709215 - DNA, 25 bp, Homo sapien
cttccacgaaatgggtggtctgttt

SEQ ID NO: 709216 - DNA, 25 bp, Homo sapien
atagttcattcttctaacaagcctg

SEQ ID NO: 709217 - DNA, 25 bp, Homo sapien
caagagccgagctcctcaagtgagc

SEQ ID NO: 709218 - DNA, 25 bp, Homo sapien
caggagcatcagcaagactcctgtc

SEQ ID NO: 709219 - DNA, 25 bp, Homo sapien
tcacacctctaagggggtgagcgtg

SEQ ID NO: 709220 - DNA, 25 bp, Homo sapien
agcgagcagcgggtacgtgactggg

SEQ ID NO: 709221 - DNA, 25 bp, Homo sapien
caaggtcctttggtctgcagtgtta

SEQ ID NO: 709222 - DNA, 25 bp, Homo sapien
ttctatatatgtctgcaaggtcctt

SEQ ID NO: 709223 - DNA, 25 bp, Homo sapien
aaaactgctgttgctacctcccata

SEQ ID NO: 709224 - DNA, 25 bp, Homo sapien
tctagtttcgtatcattgtggtgag

SEQ ID NO: 709225 - DNA, 25 bp, Homo sapien
acatcagtgatctaatggtgggggc

SEQ ID NO: 709226 - DNA, 25 bp, Homo sapien
atcagtgatctaatggtgggggcca

SEQ ID NO: 709227 - DNA, 25 bp, Homo sapien
gtgatctaatggtgggggccagaag

SEQ ID NO: 709228 - DNA, 25 bp, Homo sapien
tcacatcagtgatctaatggtgggg

SEQ ID NO: 709229 - DNA, 25 bp, Homo sapien
gtgtatgttataacacaagcacaca

SEQ ID NO: 709230 - DNA, 25 bp, Homo sapien
ccacacaatcacatggaagtcacag

SEQ ID NO: 709231 - DNA, 25 bp, Homo sapien
tacacgcgaagtgccagattcatgc

SEQ ID NO: 709232 - DNA, 25 bp, Homo sapien
cagacggcatcacagacagtcacag

SEQ ID NO: 709233 - DNA, 25 bp, Homo sapien
aagcatagacatccctaataggaca

SEQ ID NO: 709234 - DNA, 25 bp, Homo sapien
gcttgctgattgaaaggaaggaaga

SEQ ID NO: 709235 - DNA, 25 bp, Homo sapien
ctggcacaaagcatgctctagggaa

SEQ ID NO: 709236 - DNA, 25 bp, Homo sapien
ccctaataggacaccacggatctgt

SEQ ID NO: 709237 - DNA, 25 bp, Homo sapien
cctaggtaatgtgagtgggccgcac

SEQ ID NO: 709238 - DNA, 25 bp, Homo sapien
tgggccgcacctgatcagttgaagg

SEQ ID NO: 709239 - DNA, 25 bp, Homo sapien
tctgaggagtaaacaccgaagtttc

SEQ ID NO: 709240 - DNA, 25 bp, Homo sapien
taggctttaagacggtagtgtcacc

SEQ ID NO: 709241 - DNA, 25 bp, Homo sapien
tcccccggcatctgtccttgtagat

SEQ ID NO: 709242 - DNA, 25 bp, Homo sapien
ctcccccggcatctgtccttgtaga

SEQ ID NO: 709243 - DNA, 25 bp, Homo sapien
cccccggcatctgtccttgtagatt

SEQ ID NO: 709244 - DNA, 25 bp, Homo sapien
ccccggcatctgtccttgtagattc

SEQ ID NO: 709245 - DNA, 25 bp, Homo sapien
tacctgcatgcttttctaggtattt

SEQ ID NO: 709246 - DNA, 25 bp, Homo sapien
tcacctacattctcacctgcagatt

SEQ ID NO: 709247 - DNA, 25 bp, Homo sapien
catctttacctgcatgcttttctag

SEQ ID NO: 709248 - DNA, 25 bp, Homo sapien
ttgcccacattctcacctacattct

SEQ ID NO: 709249 - DNA, 25 bp, Homo sapien
ttcttacaaaaggagtggatgtcag

SEQ ID NO: 709250 - DNA, 25 bp, Homo sapien
gggtcaagagtgtgctgtaatccca

SEQ ID NO: 709251 - DNA, 25 bp, Homo sapien
tagcagagtatagcacaggctgtga

SEQ ID NO: 709252 - DNA, 25 bp, Homo sapien
tccactgtggccacgtgaatggaag

SEQ ID NO: 709253 - DNA, 25 bp, Homo sapien
caaaaatagcctggcgagctggcag

SEQ ID NO: 709254 - DNA, 25 bp, Homo sapien
gaaagacctgccaaactcgatgagt

SEQ ID NO: 709255 - DNA, 25 bp, Homo sapien
ccaagtttggcttcaccagagaaaa

SEQ ID NO: 709256 - DNA, 25 bp, Homo sapien
gagatggaggcgtcaatgagccaaa

SEQ ID NO: 709257 - DNA, 25 bp, Homo sapien
gcccatttggaagaagagtcccttc

SEQ ID NO: 709258 - DNA, 25 bp, Homo sapien
gtcaacaaaacagccagcgggcggg

SEQ ID NO: 709259 - DNA, 25 bp, Homo sapien
ggaactgttatgatcacctccacat

SEQ ID NO: 709260 - DNA, 25 bp, Homo sapien
cacatctcagaccaaagggtcgtcc

SEQ ID NO: 709261 - DNA, 25 bp, Homo sapien
gaaacaacccgtacctgcagctgcc

SEQ ID NO: 709262 - DNA, 25 bp, Homo sapien
ggacgaggaggatgttcagatggag

SEQ ID NO: 709263 - DNA, 25 bp, Homo sapien
aggacgaggaggatgttcagatgga

SEQ ID NO: 709264 - DNA, 25 bp, Homo sapien
gacgaggaggatgttcagatggagc

SEQ ID NO: 709265 - DNA, 25 bp, Homo sapien
gccctccccggggagactcagccga

SEQ ID NO: 709266 - DNA, 25 bp, Homo sapien
ccctccccggggagactcagccgag

SEQ ID NO: 709267 - DNA, 25 bp, Homo sapien
ctccccggggagactcagccgaggg

SEQ ID NO: 709268 - DNA, 25 bp, Homo sapien
cctccccggggagactcagccgagg

SEQ ID NO: 709269 - DNA, 25 bp, Homo sapien
agcccgccgaccagactcccaggga

SEQ ID NO: 709270 - DNA, 25 bp, Homo sapien
ggccaaggctctgcgctcctagaag

SEQ ID NO: 709271 - DNA, 25 bp, Homo sapien
tcctagaaggagtggcttcccggcg

SEQ ID NO: 709272 - DNA, 25 bp, Homo sapien
tctgcgctcctagaaggagtggctt

SEQ ID NO: 709273 - DNA, 25 bp, Homo sapien
acatatctgtccaacaggtccagcc

SEQ ID NO: 709274 - DNA, 25 bp, Homo sapien
tcggtgcgttctttcacgaacttta

SEQ ID NO: 709275 - DNA, 25 bp, Homo sapien
tgtggcgctcgagcacctcgaactg

SEQ ID NO: 709276 - DNA, 25 bp, Homo sapien
taagcctgttccacttcggtgcgtt

SEQ ID NO: 709277 - DNA, 25 bp, Homo sapien
gcgcgtcctccgtagcgtccacccc

SEQ ID NO: 709278 - DNA, 25 bp, Homo sapien
cgtcctccgtagcgtccaccccagg

SEQ ID NO: 709279 - DNA, 25 bp, Homo sapien
gcgtcctccgtagcgtccaccccag

SEQ ID NO: 709280 - DNA, 25 bp, Homo sapien
cgcgtcctccgtagcgtccacccca

SEQ ID NO: 709281 - DNA, 25 bp, Homo sapien
ggactcaggatcatccttggcaggt

SEQ ID NO: 709282 - DNA, 25 bp, Homo sapien
actcaggatcatccttggcaggtct

SEQ ID NO: 709283 - DNA, 25 bp, Homo sapien
tggactcaggatcatccttggcagg

SEQ ID NO: 709284 - DNA, 25 bp, Homo sapien
ttggactcaggatcatccttggcag

SEQ ID NO: 709285 - DNA, 25 bp, Homo sapien
tgtttcatctcttgtgagtacttgg

SEQ ID NO: 709286 - DNA, 25 bp, Homo sapien
tcagctcaagacatacacggacact

SEQ ID NO: 709287 - DNA, 25 bp, Homo sapien
tcccgctggcctgcaaagtcattca

SEQ ID NO: 709288 - DNA, 25 bp, Homo sapien
tacgaaggactgttgctggctgaat

SEQ ID NO: 709289 - DNA, 25 bp, Homo sapien
attctccagctgtttaaagccattt

SEQ ID NO: 709290 - DNA, 25 bp, Homo sapien
ctccagctgtttaaagccattttcc

SEQ ID NO: 709291 - DNA, 25 bp, Homo sapien
ctgggcccgccgcccttcttggaag

SEQ ID NO: 709292 - DNA, 25 bp, Homo sapien
cagctgtttaaagccattttccagc

SEQ ID NO: 709293 - DNA, 25 bp, Homo sapien
caaggtttcagggattattgggatg

SEQ ID NO: 709294 - DNA, 25 bp, Homo sapien
tcaagggagtactggaagcctatgg

SEQ ID NO: 709295 - DNA, 25 bp, Homo sapien
acagaaccggagtgagggagccacc

SEQ ID NO: 709296 - DNA, 25 bp, Homo sapien
aaggtccaggtctgacaaagagggc

SEQ ID NO: 709297 - DNA, 25 bp, Homo sapien
ccttggtggcgttgatatcctggtc

SEQ ID NO: 709298 - DNA, 25 bp, Homo sapien
ggcagtcccgctcaaatttacgctt

SEQ ID NO: 709299 - DNA, 25 bp, Homo sapien
gcgttgatatcctggtctagccgtt

SEQ ID NO: 709300 - DNA, 25 bp, Homo sapien
tagccgttcagcagtctgggctgcc

SEQ ID NO: 709301 - DNA, 25 bp, Homo sapien
gctttcttcggccatgtgactccga

SEQ ID NO: 709302 - DNA, 25 bp, Homo sapien
gcttggtctcggttgaagcgctgca

SEQ ID NO: 709303 - DNA, 25 bp, Homo sapien
tgactccgaaggtgggcttgctgct

SEQ ID NO: 709304 - DNA, 25 bp, Homo sapien
agttgagccgcatattcgtttttgc

SEQ ID NO: 709305 - DNA, 25 bp, Homo sapien
gccctgcgttcatccatgtcttgga

SEQ ID NO: 709306 - DNA, 25 bp, Homo sapien
gacaggagcccatacccggcaccca

SEQ ID NO: 709307 - DNA, 25 bp, Homo sapien
acccaggcgggtggccctgcgttca

SEQ ID NO: 709308 - DNA, 25 bp, Homo sapien
ccatacccggcacccaggcgggtgg

SEQ ID NO: 709309 - DNA, 25 bp, Homo sapien
cttggctattatgggcaccacctcc

SEQ ID NO: 709310 - DNA, 25 bp, Homo sapien
caagcacttggctattatgggcacc

SEQ ID NO: 709311 - DNA, 25 bp, Homo sapien
aagcacttggctattatgggcacca

SEQ ID NO: 709312 - DNA, 25 bp, Homo sapien
gcacttggctattatgggcaccacc

SEQ ID NO: 709313 - DNA, 25 bp, Homo sapien
cgtagcccagtggacccagaccagg

SEQ ID NO: 709314 - DNA, 25 bp, Homo sapien
ctgcccttcccgtagcccagtggac

SEQ ID NO: 709315 - DNA, 25 bp, Homo sapien
cttcccgtagcccagtggacccaga

SEQ ID NO: 709316 - DNA, 25 bp, Homo sapien
gtagcccagtggacccagaccaggc

SEQ ID NO: 709317 - DNA, 25 bp, Homo sapien
cccagactgctgtcggagggtgcac

SEQ ID NO: 709318 - DNA, 25 bp, Homo sapien
ccgggcgggcaaaacctgacttgtg

SEQ ID NO: 709319 - DNA, 25 bp, Homo sapien
ttcttgccaaaaggccagcgcttgg

SEQ ID NO: 709320 - DNA, 25 bp, Homo sapien
ggctggctgaagtcctcgaattcca

SEQ ID NO: 709321 - DNA, 25 bp, Homo sapien
aaattcctgcccgagactcggcgtt

SEQ ID NO: 709322 - DNA, 25 bp, Homo sapien
aagaaagcaagacatgcagggcggc

SEQ ID NO: 709323 - DNA, 25 bp, Homo sapien
agcatcccgagaagcagcagacaaa

SEQ ID NO: 709324 - DNA, 25 bp, Homo sapien
aataaaaccacaagccgagagggag

SEQ ID NO: 709325 - DNA, 25 bp, Homo sapien
ttatgtccgggagcaagcatgggtc

SEQ ID NO: 709326 - DNA, 25 bp, Homo sapien
cacacagagaaaacgcatgcaggag

SEQ ID NO: 709327 - DNA, 25 bp, Homo sapien
ggtaagaaaaccacaactcaagatg

SEQ ID NO: 709328 - DNA, 25 bp, Homo sapien
cccggtatctcctaggtctctggaa

SEQ ID NO: 709329 - DNA, 25 bp, Homo sapien
ctgatctcgctcagtatggccaagg

SEQ ID NO: 709330 - DNA, 25 bp, Homo sapien
ggtttgaccgacttactgatctcgc

SEQ ID NO: 709331 - DNA, 25 bp, Homo sapien
ctgcggaaggatgctagcctcggtt

SEQ ID NO: 709332 - DNA, 25 bp, Homo sapien
tccgttaggcaatgccgagggtacg

SEQ ID NO: 709333 - DNA, 25 bp, Homo sapien
gactctgcacccgtctgagatattt

SEQ ID NO: 709334 - DNA, 25 bp, Homo sapien
gatcaaggagtctagcctgccagac

SEQ ID NO: 709335 - DNA, 25 bp, Homo sapien
cttgacagcgaagccatgcacagag

SEQ ID NO: 709336 - DNA, 25 bp, Homo sapien
cccagccatggttcttgacagcgaa

SEQ ID NO: 709337 - DNA, 25 bp, Homo sapien
aagccgttttcgctgctgctctggg

SEQ ID NO: 709338 - DNA, 25 bp, Homo sapien
gctgttgaagccgttttcgctgctg

SEQ ID NO: 709339 - DNA, 25 bp, Homo sapien
ttctgaagttcacgactgcgttctt

SEQ ID NO: 709340 - DNA, 25 bp, Homo sapien
cacgactgcgttcttccaactgctg

SEQ ID NO: 709341 - DNA, 25 bp, Homo sapien
ctgcccaagtcctgagatgaagctg

SEQ ID NO: 709342 - DNA, 25 bp, Homo sapien
ccattctgtccaagaggttacatgc

SEQ ID NO: 709343 - DNA, 25 bp, Homo sapien
caccgtagaaactcaggaactagag

SEQ ID NO: 709344 - DNA, 25 bp, Homo sapien
gaaatcaagtccagtttgtcgtgac

SEQ ID NO: 709345 - DNA, 25 bp, Homo sapien
caatttcagccgttcaatgttgctc

SEQ ID NO: 709346 - DNA, 25 bp, Homo sapien
cccatctgaggtgtcttctcataga

SEQ ID NO: 709347 - DNA, 25 bp, Homo sapien
ggtgtcttctcatagacatccttca

SEQ ID NO: 709348 - DNA, 25 bp, Homo sapien
ttgctcagggtttcagcgatctggg

SEQ ID NO: 709349 - DNA, 25 bp, Homo sapien
gtgtcctgtgatgcgctgttgctgc

SEQ ID NO: 709350 - DNA, 25 bp, Homo sapien
tctccccggttgctaaggactcgac

SEQ ID NO: 709351 - DNA, 25 bp, Homo sapien
gctgtctccccggttgctaaggact

SEQ ID NO: 709352 - DNA, 25 bp, Homo sapien
ctctccttggtgtcctgtgatgcgc

SEQ ID NO: 709353 - DNA, 25 bp, Homo sapien
tgggaacagacccactctgacgtca

SEQ ID NO: 709354 - DNA, 25 bp, Homo sapien
gggataattcggcagataaagacag

SEQ ID NO: 709355 - DNA, 25 bp, Homo sapien
cagataaagacaggccctcctggga

SEQ ID NO: 709356 - DNA, 25 bp, Homo sapien
taattcggcagataaagacaggccc

SEQ ID NO: 709357 - DNA, 25 bp, Homo sapien
cttcaaagtggtagatggccacaca

SEQ ID NO: 709358 - DNA, 25 bp, Homo sapien
ggccacacagtgacctatgggggat

SEQ ID NO: 709359 - DNA, 25 bp, Homo sapien
gggatgtgggttcctcctcgaaatc

SEQ ID NO: 709360 - DNA, 25 bp, Homo sapien
cctcatcaaactccgtgtaaatggg

SEQ ID NO: 709361 - DNA, 25 bp, Homo sapien
tcttccataagactgaggtcttcac

SEQ ID NO: 709362 - DNA, 25 bp, Homo sapien
catagagatagtgccctcgctggac

SEQ ID NO: 709363 - DNA, 25 bp, Homo sapien
tcaccctcggccatagagatagtgc

SEQ ID NO: 709364 - DNA, 25 bp, Homo sapien
tcaattgagcgtgactcggaggtag

SEQ ID NO: 709365 - DNA, 25 bp, Homo sapien
tacacaggtctcagccgaagccacg

SEQ ID NO: 709366 - DNA, 25 bp, Homo sapien
cacaggtctcagccgaagccacggg

SEQ ID NO: 709367 - DNA, 25 bp, Homo sapien
cgaagccacggggtcagaaataaag

SEQ ID NO: 709368 - DNA, 25 bp, Homo sapien
agccacggggtcagaaataaagtgc

SEQ ID NO: 709369 - DNA, 25 bp, Homo sapien
aaggcacagcgggtccgtccggtgt

SEQ ID NO: 709370 - DNA, 25 bp, Homo sapien
cacagcgggtccgtccggtgtgaca

SEQ ID NO: 709371 - DNA, 25 bp, Homo sapien
acatcaatggtggaacgatggtaga

SEQ ID NO: 709372 - DNA, 25 bp, Homo sapien
gtggaacgatggtagaaggcacagc

SEQ ID NO: 709373 - DNA, 25 bp, Homo sapien
cacatgagggttggtcctggccctt

SEQ ID NO: 709374 - DNA, 25 bp, Homo sapien
acacgagacttgttcctaggccacg

SEQ ID NO: 709375 - DNA, 25 bp, Homo sapien
gagcaccctgcaggttctaaccgga

SEQ ID NO: 709376 - DNA, 25 bp, Homo sapien
tggcacccatggttcgcctactgga

SEQ ID NO: 709377 - DNA, 25 bp, Homo sapien
ccaaaaaatgagtgggtagctgggt

SEQ ID NO: 709378 - DNA, 25 bp, Homo sapien
aggcagtgcaaaggctcttgggtca

SEQ ID NO: 709379 - DNA, 25 bp, Homo sapien
caggaaaggccccattgcagaaaaa

SEQ ID NO: 709380 - DNA, 25 bp, Homo sapien
gccattgtacccaagcaagcaattt

SEQ ID NO: 709381 - DNA, 25 bp, Homo sapien
ctaccgcctgcccagggccggccgt

SEQ ID NO: 709382 - DNA, 25 bp, Homo sapien
tgccctgctcgcctgtggagcgaca

SEQ ID NO: 709383 - DNA, 25 bp, Homo sapien
gctcgcctgtggagcgacagctagt

SEQ ID NO: 709384 - DNA, 25 bp, Homo sapien
taccgcctgcccagggccggccgtg

SEQ ID NO: 709385 - DNA, 25 bp, Homo sapien
ccatcccaggtcacgcggtggctgg

SEQ ID NO: 709386 - DNA, 25 bp, Homo sapien
agccagtgggtgcattggcgccaca

SEQ ID NO: 709387 - DNA, 25 bp, Homo sapien
gacctcacgcaggttgatggcatgg

SEQ ID NO: 709388 - DNA, 25 bp, Homo sapien
catctgggggcgcaggttgacctca

SEQ ID NO: 709389 - DNA, 25 bp, Homo sapien
tggggagctcccccgagacctctgg

SEQ ID NO: 709390 - DNA, 25 bp, Homo sapien
ggagctcccccgagacctctggttg

SEQ ID NO: 709391 - DNA, 25 bp, Homo sapien
agctcccccgagacctctggttggt

SEQ ID NO: 709392 - DNA, 25 bp, Homo sapien
ttctggggagctcccccgagacctc

SEQ ID NO: 709393 - DNA, 25 bp, Homo sapien
tagataagacaatcagggatccaat

SEQ ID NO: 709394 - DNA, 25 bp, Homo sapien
cagggatccaataggttaagtaatt

SEQ ID NO: 709395 - DNA, 25 bp, Homo sapien
gtgcacggccaacattctcatttta

SEQ ID NO: 709396 - DNA, 25 bp, Homo sapien
catgtgcacggccaacattctcatt

SEQ ID NO: 709397 - DNA, 25 bp, Homo sapien
tggagtacagtggtagcacaatcat

SEQ ID NO: 709398 - DNA, 25 bp, Homo sapien
tcttttgtccagtctggagtacagt

SEQ ID NO: 709399 - DNA, 25 bp, Homo sapien
tttgtccagtctggagtacagtggt

SEQ ID NO: 709400 - DNA, 25 bp, Homo sapien
ctggagtacagtggtagcacaatca

SEQ ID NO: 709401 - DNA, 25 bp, Homo sapien
agacgaggaggtagctcaaggaccc

SEQ ID NO: 709402 - DNA, 25 bp, Homo sapien
gaccccaggataaggagctagctca

SEQ ID NO: 709403 - DNA, 25 bp, Homo sapien
gaggagatatttaagacccacccag

SEQ ID NO: 709404 - DNA, 25 bp, Homo sapien
gatgagatagctcaaggacctcgag

SEQ ID NO: 709405 - DNA, 25 bp, Homo sapien
cgtggccatgtaatcaaaatgcagc

SEQ ID NO: 709406 - DNA, 25 bp, Homo sapien
tattctgccatatctcccggggtcc

SEQ ID NO: 709407 - DNA, 25 bp, Homo sapien
gcaagtggctgtcaccccaagcacc

SEQ ID NO: 709408 - DNA, 25 bp, Homo sapien
tcaggtgccgatatgcccaaaccgt

SEQ ID NO: 709409 - DNA, 25 bp, Homo sapien
cagcacaaaggaagaaaagttggta

SEQ ID NO: 709410 - DNA, 25 bp, Homo sapien
cttgcaattccagcacaaaggaaga

SEQ ID NO: 709411 - DNA, 25 bp, Homo sapien
cacaaaggaagaaaagttggtacat

SEQ ID NO: 709412 - DNA, 25 bp, Homo sapien
tgcaattccagcacaaaggaagaaa

SEQ ID NO: 709413 - DNA, 25 bp, Homo sapien
ctccgttccagatgaggacaaaggt

SEQ ID NO: 709414 - DNA, 25 bp, Homo sapien
gatgaggacaaaggttttggaacaa

SEQ ID NO: 709415 - DNA, 25 bp, Homo sapien
ttccagatgaggacaaaggttttgg

SEQ ID NO: 709416 - DNA, 25 bp, Homo sapien
ggttttggaacaacagttgaaagca

SEQ ID NO: 709417 - DNA, 25 bp, Homo sapien
tcctcagagacctcatggatctcca

SEQ ID NO: 709418 - DNA, 25 bp, Homo sapien
cagagttagctgtgatgtgtctgtc

SEQ ID NO: 709419 - DNA, 25 bp, Homo sapien
atcctcagagacctcatggatctcc

SEQ ID NO: 709420 - DNA, 25 bp, Homo sapien
cctcagagacctcatggatctccat

SEQ ID NO: 709421 - DNA, 25 bp, Homo sapien
tcaaaggcttcgaagagctcgctcc

SEQ ID NO: 709422 - DNA, 25 bp, Homo sapien
cttgaggccgaacttctcacagcag

SEQ ID NO: 709423 - DNA, 25 bp, Homo sapien
gaaggttctaatgttcttaaggcac

SEQ ID NO: 709424 - DNA, 25 bp, Homo sapien
gccaaaatcctgcacatcgaagagg

SEQ ID NO: 709425 - DNA, 25 bp, Homo sapien
ccctgttctgggcgatcggggtcca

SEQ ID NO: 709426 - DNA, 25 bp, Homo sapien
tgggcgatcggggtccaggacagag

SEQ ID NO: 709427 - DNA, 25 bp, Homo sapien
tgttctgggcgatcggggtccagga

SEQ ID NO: 709428 - DNA, 25 bp, Homo sapien
atcggggtccaggacagagcagaca

SEQ ID NO: 709429 - DNA, 25 bp, Homo sapien
tcgatctggtcggacaggccactgt

SEQ ID NO: 709430 - DNA, 25 bp, Homo sapien
cgcagaccccagcgcagggctttgt

SEQ ID NO: 709431 - DNA, 25 bp, Homo sapien
aagactccaagggtgggacctcaga

SEQ ID NO: 709432 - DNA, 25 bp, Homo sapien
gtgaggtcagggatcccttggacct

SEQ ID NO: 709433 - DNA, 25 bp, Homo sapien
agaccccagcgcagggctttgtccc

SEQ ID NO: 709434 - DNA, 25 bp, Homo sapien
gcgcatgaggtcctcatagatctcg

SEQ ID NO: 709435 - DNA, 25 bp, Homo sapien
tcattctccacgcagtcatacaggt

SEQ ID NO: 709436 - DNA, 25 bp, Homo sapien
atggacacgggctccgagcgcatga

SEQ ID NO: 709437 - DNA, 25 bp, Homo sapien
tcatagatctcgtcgccttccgcct

SEQ ID NO: 709438 - DNA, 25 bp, Homo sapien
cagcgtgtcagtgtacttctcctcc

SEQ ID NO: 709439 - DNA, 25 bp, Homo sapien
cagcagcgcttgtcatactctgtca

SEQ ID NO: 709440 - DNA, 25 bp, Homo sapien
tcagtgtacttctcctccgtctgct

SEQ ID NO: 709441 - DNA, 25 bp, Homo sapien
caggcagcagcagcgcttgtcatac

SEQ ID NO: 709442 - DNA, 25 bp, Homo sapien
tttcaggaaccgttgcaggggcttc

SEQ ID NO: 709443 - DNA, 25 bp, Homo sapien
atgttgataaagatgatctcaatgt

SEQ ID NO: 709444 - DNA, 25 bp, Homo sapien
tgataaagatgatctcaatgtcttg

SEQ ID NO: 709445 - DNA, 25 bp, Homo sapien
ggaaccgttgcaggggcttcaagaa

SEQ ID NO: 709446 - DNA, 25 bp, Homo sapien
ctttaggaagtgagtatgaacacga

SEQ ID NO: 709447 - DNA, 25 bp, Homo sapien
tcatctcctttaggaagtgagtatg

SEQ ID NO: 709448 - DNA, 25 bp, Homo sapien
ctggtagagattggctgcgccaggg

SEQ ID NO: 709449 - DNA, 25 bp, Homo sapien
tctcctttaggaagtgagtatgaac

SEQ ID NO: 709450 - DNA, 25 bp, Homo sapien
cacctggctgcagtagcggccatag

SEQ ID NO: 709451 - DNA, 25 bp, Homo sapien
ggccacacggtccaggtgtttgctg

SEQ ID NO: 709452 - DNA, 25 bp, Homo sapien
tgcagtagcggccatagacgaggaa

SEQ ID NO: 709453 - DNA, 25 bp, Homo sapien
gctgcggccacacggtccaggtgtt

SEQ ID NO: 709454 - DNA, 25 bp, Homo sapien
tccctagtcctttggtggatctctg

SEQ ID NO: 709455 - DNA, 25 bp, Homo sapien
cctccctagtcctttggtggatctc

SEQ ID NO: 709456 - DNA, 25 bp, Homo sapien
ctccctccctagtcctttggtggat

SEQ ID NO: 709457 - DNA, 25 bp, Homo sapien
cctagtcctttggtggatctctggc

SEQ ID NO: 709458 - DNA, 25 bp, Homo sapien
gaggtgatatttgagaactcgctgc

SEQ ID NO: 709459 - DNA, 25 bp, Homo sapien
ccgcagggtgaacctcccgttgttg

SEQ ID NO: 709460 - DNA, 25 bp, Homo sapien
gctgcataggcaccatcagcaggtc

SEQ ID NO: 709461 - DNA, 25 bp, Homo sapien
tcccgttgttggctctctgagaaca

SEQ ID NO: 709462 - DNA, 25 bp, Homo sapien
ttctccatcgcctcctgcgtgtgtt

SEQ ID NO: 709463 - DNA, 25 bp, Homo sapien
gcctcctgcgtgtgtttcaccagct

SEQ ID NO: 709464 - DNA, 25 bp, Homo sapien
atggcatccagggccagccgcaggt

SEQ ID NO: 709465 - DNA, 25 bp, Homo sapien
ctccttctccatcgcctcctgcgtg

SEQ ID NO: 709466 - DNA, 25 bp, Homo sapien
aggctcctacctaatcccggctaga

SEQ ID NO: 709467 - DNA, 25 bp, Homo sapien
aacagccgacccaggctcctaccta

SEQ ID NO: 709468 - DNA, 25 bp, Homo sapien
cggctagaggatcagcccctaccag

SEQ ID NO: 709469 - DNA, 25 bp, Homo sapien
acctaatcccggctagaggatcagc

SEQ ID NO: 709470 - DNA, 25 bp, Homo sapien
agctggaaattggtgatctgtcgca

SEQ ID NO: 709471 - DNA, 25 bp, Homo sapien
cgcttgacctcgttcacgcactgag

SEQ ID NO: 709472 - DNA, 25 bp, Homo sapien
ttctcaatggacagctggaaattgg

SEQ ID NO: 709473 - DNA, 25 bp, Homo sapien
cgcagtgtctcgttgtctcgcttga

SEQ ID NO: 709474 - DNA, 25 bp, Homo sapien
cccgtcgatcttgggccggccatag

SEQ ID NO: 709475 - DNA, 25 bp, Homo sapien
tgtccatcttggagcgccgttccac

SEQ ID NO: 709476 - DNA, 25 bp, Homo sapien
gagcgccgttccaccgaggtgatct

SEQ ID NO: 709477 - DNA, 25 bp, Homo sapien
gaggtgatcttgagttccccgtcga

SEQ ID NO: 709478 - DNA, 25 bp, Homo sapien
caggtttacaaagtccttgaggtca

SEQ ID NO: 709479 - DNA, 25 bp, Homo sapien
ccctgcgcttacagatgagtagagc

SEQ ID NO: 709480 - DNA, 25 bp, Homo sapien
tgagtagagctttgtcgagcaggaa

SEQ ID NO: 709481 - DNA, 25 bp, Homo sapien
gagtcatcccgaacctggaagctgt

SEQ ID NO: 709482 - DNA, 25 bp, Homo sapien
tcctcgagggagacacaggttgaga

SEQ ID NO: 709483 - DNA, 25 bp, Homo sapien
cagagaatgtccctgaacaatggag

SEQ ID NO: 709484 - DNA, 25 bp, Homo sapien
aagaaatagagaagccacagaccag

SEQ ID NO: 709485 - DNA, 25 bp, Homo sapien
tccagggcaaaaactgaagcgaacg

SEQ ID NO: 709486 - DNA, 25 bp, Homo sapien
ccttggtcctcgatcaggaggaaca

SEQ ID NO: 709487 - DNA, 25 bp, Homo sapien
cttggtcctcgatcaggaggaacat

SEQ ID NO: 709488 - DNA, 25 bp, Homo sapien
caccttggtcctcgatcaggaggaa

SEQ ID NO: 709489 - DNA, 25 bp, Homo sapien
ggcaccttggtcctcgatcaggagg

SEQ ID NO: 709490 - DNA, 25 bp, Homo sapien
tgacaggccttgcaggatgtggtct

SEQ ID NO: 709491 - DNA, 25 bp, Homo sapien
aagtcatgcccgttggcggtggcat

SEQ ID NO: 709492 - DNA, 25 bp, Homo sapien
caggatgtggtctcctcaaaggaga

SEQ ID NO: 709493 - DNA, 25 bp, Homo sapien
tggcattctccggatagatgttgga

SEQ ID NO: 709494 - DNA, 25 bp, Homo sapien
ttgtgtgcagatgcccggcaccgat

SEQ ID NO: 709495 - DNA, 25 bp, Homo sapien
gatggcagcggtagccctgatagaa

SEQ ID NO: 709496 - DNA, 25 bp, Homo sapien
cactccttgtgtgcagatgcccggc

SEQ ID NO: 709497 - DNA, 25 bp, Homo sapien
atgcccggcaccgatggcagcggta

SEQ ID NO: 709498 - DNA, 25 bp, Homo sapien
gcccattatttgtggtacacaggaa

SEQ ID NO: 709499 - DNA, 25 bp, Homo sapien
ttgtggtacacaggaaggaccacgg

SEQ ID NO: 709500 - DNA, 25 bp, Homo sapien
tccccgcgctgttgcccattatttg

SEQ ID NO: 709501 - DNA, 25 bp, Homo sapien
cacaaaggatcctgcccagttccag

SEQ ID NO: 709502 - DNA, 25 bp, Homo sapien
cagctcattcctctttttgtcctga

SEQ ID NO: 709503 - DNA, 25 bp, Homo sapien
cctgagccctgcgatgtagtttgtc

SEQ ID NO: 709504 - DNA, 25 bp, Homo sapien
ttgtcctgagccctgcgatgtagtt

SEQ ID NO: 709505 - DNA, 25 bp, Homo sapien
tcattcctctttttgtcctgagccc

SEQ ID NO: 709506 - DNA, 25 bp, Homo sapien
tgaatcttgccacccacgagaatgg

SEQ ID NO: 709507 - DNA, 25 bp, Homo sapien
cagggtggttggcagtcaactttca

SEQ ID NO: 709508 - DNA, 25 bp, Homo sapien
tctgtaacccagcaacccaagagaa

SEQ ID NO: 709509 - DNA, 25 bp, Homo sapien
tctactgaagctaaacattgtatct

SEQ ID NO: 709510 - DNA, 25 bp, Homo sapien
ccgtagaaagggtccaatggctcca

SEQ ID NO: 709511 - DNA, 25 bp, Homo sapien
cagccttcgtgagctccacaatgtc

SEQ ID NO: 709512 - DNA, 25 bp, Homo sapien
gaagcccgtagtattcctgaaacac

SEQ ID NO: 709513 - DNA, 25 bp, Homo sapien
acaatgtctccagggttgagccgta

SEQ ID NO: 709514 - DNA, 25 bp, Homo sapien
gcttcaccctgttacaaggaaacca

SEQ ID NO: 709515 - DNA, 25 bp, Homo sapien
ggaaaccagccaatttcattagtag

SEQ ID NO: 709516 - DNA, 25 bp, Homo sapien
gaaaccagccaatttcattagtaga

SEQ ID NO: 709517 - DNA, 25 bp, Homo sapien
caccctgttacaaggaaaccagcca

SEQ ID NO: 709518 - DNA, 25 bp, Homo sapien
tacactactcttcggctctttacag

SEQ ID NO: 709519 - DNA, 25 bp, Homo sapien
gctttgtaggaacacagccgtgtct

SEQ ID NO: 709520 - DNA, 25 bp, Homo sapien
tgcaaaaccatatgggaccctggag

SEQ ID NO: 709521 - DNA, 25 bp, Homo sapien
cctgtcagtgcccatgaattatgct

SEQ ID NO: 709522 - DNA, 25 bp, Homo sapien
agatgaacagacaggtcctgaggag

SEQ ID NO: 709523 - DNA, 25 bp, Homo sapien
gagatgaacagacaggtcctgagga

SEQ ID NO: 709524 - DNA, 25 bp, Homo sapien
atgaacagacaggtcctgaggaggg

SEQ ID NO: 709525 - DNA, 25 bp, Homo sapien
cagagatgaacagacaggtcctgag

SEQ ID NO: 709526 - DNA, 25 bp, Homo sapien
caggtgcaaaatgtaagtgagagcc

SEQ ID NO: 709527 - DNA, 25 bp, Homo sapien
gagccaaaaaacctagtcatcaagg

SEQ ID NO: 709528 - DNA, 25 bp, Homo sapien
gaatgagtcacgagcctcaggtgca

SEQ ID NO: 709529 - DNA, 25 bp, Homo sapien
ttcagcaccaaggtaggccccgtgg

SEQ ID NO: 709530 - DNA, 25 bp, Homo sapien
tgccatatggaggttgcctttcccc

SEQ ID NO: 709531 - DNA, 25 bp, Homo sapien
attgccatatggaggttgcctttcc

SEQ ID NO: 709532 - DNA, 25 bp, Homo sapien
acagaggtggcacggtccccgtgcc

SEQ ID NO: 709533 - DNA, 25 bp, Homo sapien
ctgggtccccatattgccatatgga

SEQ ID NO: 709534 - DNA, 25 bp, Homo sapien
caccctctgccgcaccaagaaagtc

SEQ ID NO: 709535 - DNA, 25 bp, Homo sapien
gcaccaagaaagtcccgtccgagcg

SEQ ID NO: 709536 - DNA, 25 bp, Homo sapien
cgtccgagcggttggccaggatgct

SEQ ID NO: 709537 - DNA, 25 bp, Homo sapien
aagtcccgtccgagcggttggccag

SEQ ID NO: 709538 - DNA, 25 bp, Homo sapien
aaaggtggatgctattaccgtacac

SEQ ID NO: 709539 - DNA, 25 bp, Homo sapien
tcagtaaaaggtggatgctattacc

SEQ ID NO: 709540 - DNA, 25 bp, Homo sapien
tggatgctattaccgtacacttcta

SEQ ID NO: 709541 - DNA, 25 bp, Homo sapien
gctattaccgtacacttctataaag

SEQ ID NO: 709542 - DNA, 25 bp, Homo sapien
ccccagttatggaggaagcaacctt

SEQ ID NO: 709543 - DNA, 25 bp, Homo sapien
gacccatttctgtcaacatggtgga

SEQ ID NO: 709544 - DNA, 25 bp, Homo sapien
gaatggatacgaagagacctcccct

SEQ ID NO: 709545 - DNA, 25 bp, Homo sapien
aagggaattcctctacactgtgggc

SEQ ID NO: 709546 - DNA, 25 bp, Homo sapien
taatgtgcttgacctcgacgttata

SEQ ID NO: 709547 - DNA, 25 bp, Homo sapien
aatgtgcttgacctcgacgttatat

SEQ ID NO: 709548 - DNA, 25 bp, Homo sapien
gattttaatgtgcttgacctcgacg

SEQ ID NO: 709549 - DNA, 25 bp, Homo sapien
tttaatgtgcttgacctcgacgtta

SEQ ID NO: 709550 - DNA, 25 bp, Homo sapien
tttctctgtgatccggtacagtcct

SEQ ID NO: 709551 - DNA, 25 bp, Homo sapien
gcctttttctctgtgatccggtaca

SEQ ID NO: 709552 - DNA, 25 bp, Homo sapien
tgatccggtacagtccttctgctgt

SEQ ID NO: 709553 - DNA, 25 bp, Homo sapien
gtgatccggtacagtccttctgctg

SEQ ID NO: 709554 - DNA, 25 bp, Homo sapien
tgtccagagacttgaagcaatcctt

SEQ ID NO: 709555 - DNA, 25 bp, Homo sapien
agagacttgaagcaatcctttagag

SEQ ID NO: 709556 - DNA, 25 bp, Homo sapien
gatggttctcttttcaggctccttg

SEQ ID NO: 709557 - DNA, 25 bp, Homo sapien
aggtggtgtccagagacttgaagca

SEQ ID NO: 709558 - DNA, 25 bp, Homo sapien
gcagaagtcatagcgggctttggct

SEQ ID NO: 709559 - DNA, 25 bp, Homo sapien
tccttgagcgacagctctgatcggt

SEQ ID NO: 709560 - DNA, 25 bp, Homo sapien
tgctgtcccttcttgttaaggatct

SEQ ID NO: 709561 - DNA, 25 bp, Homo sapien
tcttgttaaggatcttgatgatgtc

SEQ ID NO: 709562 - DNA, 25 bp, Homo sapien
agaataatcttcctccacgtagttg

SEQ ID NO: 709563 - DNA, 25 bp, Homo sapien
gaataatcttcctccacgtagttgg

SEQ ID NO: 709564 - DNA, 25 bp, Homo sapien
ctcagagcctggagtttctcgtctc

SEQ ID NO: 709565 - DNA, 25 bp, Homo sapien
ttgagccccgtctgcttgaggggac

SEQ ID NO: 709566 - DNA, 25 bp, Homo sapien
ttaaccatgtcagggcacatcccgg

SEQ ID NO: 709567 - DNA, 25 bp, Homo sapien
ttctcgtctctctgccaaggcacca

SEQ ID NO: 709568 - DNA, 25 bp, Homo sapien
tatgctgtagttctgtcattcaaag

SEQ ID NO: 709569 - DNA, 25 bp, Homo sapien
tgctgtagttctgtcattcaaagaa

SEQ ID NO: 709570 - DNA, 25 bp, Homo sapien
atgctgtagttctgtcattcaaaga

SEQ ID NO: 709571 - DNA, 25 bp, Homo sapien
cccagaagaggagcaggttgaagcc

SEQ ID NO: 709572 - DNA, 25 bp, Homo sapien
cagaagaggagcaggttgaagccac

SEQ ID NO: 709573 - DNA, 25 bp, Homo sapien
aagaggagcaggttgaagccacgca

SEQ ID NO: 709574 - DNA, 25 bp, Homo sapien
agaggagcaggttgaagccacgcat

SEQ ID NO: 709575 - DNA, 25 bp, Homo sapien
ttggtttccgtgtgggtcttatgtg

SEQ ID NO: 709576 - DNA, 25 bp, Homo sapien
tggtttccgtgtgggtcttatgtgc

SEQ ID NO: 709577 - DNA, 25 bp, Homo sapien
tgggcacaaggtactgtctctacag

SEQ ID NO: 709578 - DNA, 25 bp, Homo sapien
gggcacaaggtactgtctctacagt

SEQ ID NO: 709579 - DNA, 25 bp, Homo sapien
ctgggcacaaggtactgtctctaca

SEQ ID NO: 709580 - DNA, 25 bp, Homo sapien
gcacaaggtactgtctctacagtta

SEQ ID NO: 709581 - DNA, 25 bp, Homo sapien
gacaggaagccttgtttgcaagcgc

SEQ ID NO: 709582 - DNA, 25 bp, Homo sapien
ttgcaagcgcaatagtaactgtcca

SEQ ID NO: 709583 - DNA, 25 bp, Homo sapien
taactgtccactgtattggtgcagg

SEQ ID NO: 709584 - DNA, 25 bp, Homo sapien
tttgcatcgcactcctggatccttg

SEQ ID NO: 709585 - DNA, 25 bp, Homo sapien
gaaaccatctaaacagctgcacttg

SEQ ID NO: 709586 - DNA, 25 bp, Homo sapien
tacaggagaaattgcccggctttcc

SEQ ID NO: 709587 - DNA, 25 bp, Homo sapien
cagtacaggagaaattgcccggctt

SEQ ID NO: 709588 - DNA, 25 bp, Homo sapien
aacagctgcacttgtacctccctga

SEQ ID NO: 709589 - DNA, 25 bp, Homo sapien
aaatacatgaactcaccccactgat

SEQ ID NO: 709590 - DNA, 25 bp, Homo sapien
tgatagatatccacccaagacccat

SEQ ID NO: 709591 - DNA, 25 bp, Homo sapien
gcagataagaaattgggtgcctcag

SEQ ID NO: 709592 - DNA, 25 bp, Homo sapien
gaaattgggtgcctcagttcagaaa

SEQ ID NO: 709593 - DNA, 25 bp, Homo sapien
gcttcccatggagttgacacagtca

SEQ ID NO: 709594 - DNA, 25 bp, Homo sapien
gctgctggtgaggcactcattgata

SEQ ID NO: 709595 - DNA, 25 bp, Homo sapien
cttgacagctgcaactgtagcttcc

SEQ ID NO: 709596 - DNA, 25 bp, Homo sapien
atgaatccaacttgacagctgcaac

SEQ ID NO: 709597 - DNA, 25 bp, Homo sapien
tgctggctacaagagacctacctag

SEQ ID NO: 709598 - DNA, 25 bp, Homo sapien
catatggtcttccagtgagatgacc

SEQ ID NO: 709599 - DNA, 25 bp, Homo sapien
gagccccaattttcttatccctaca

SEQ ID NO: 709600 - DNA, 25 bp, Homo sapien
tactagctagcaatgctgtgacagg

SEQ ID NO: 709601 - DNA, 25 bp, Homo sapien
tacaggagaaattgcccggctttcc

SEQ ID NO: 709602 - DNA, 25 bp, Homo sapien
gaaaccatctaaacagctgcacttg

SEQ ID NO: 709603 - DNA, 25 bp, Homo sapien
cagtacaggagaaattgcccggctt

SEQ ID NO: 709604 - DNA, 25 bp, Homo sapien
aacagctgcacttgtacctccctga

SEQ ID NO: 709605 - DNA, 25 bp, Homo sapien
agtgttattacaagttgcatgctct

SEQ ID NO: 709606 - DNA, 25 bp, Homo sapien
tgttattacaagttgcatgctctgg

SEQ ID NO: 709607 - DNA, 25 bp, Homo sapien
atgctctgggcaagctcttggatct

SEQ ID NO: 709608 - DNA, 25 bp, Homo sapien
aagctcttggatctgcacattcatc

SEQ ID NO: 709609 - DNA, 25 bp, Homo sapien
cccaggagtgttggtgcatgttgaa

SEQ ID NO: 709610 - DNA, 25 bp, Homo sapien
gaattgatggggcacatttcagtgc

SEQ ID NO: 709611 - DNA, 25 bp, Homo sapien
ggtgcaaaagtagctcccaggagtg

SEQ ID NO: 709612 - DNA, 25 bp, Homo sapien
tccattgcttggtgcaaagccaggg

SEQ ID NO: 709613 - DNA, 25 bp, Homo sapien
tgaagttgccatctttctgggagcc

SEQ ID NO: 709614 - DNA, 25 bp, Homo sapien
tgcagatagaattaggaccacaggt

SEQ ID NO: 709615 - DNA, 25 bp, Homo sapien
ggttgatggatcttggcggcactca

SEQ ID NO: 709616 - DNA, 25 bp, Homo sapien
tgggatgaaagcctgcaatgcagcc

SEQ ID NO: 709617 - DNA, 25 bp, Homo sapien
tatgcaggtttcactgcggttccct

SEQ ID NO: 709618 - DNA, 25 bp, Homo sapien
ggcattgctggatctgcttattatc

SEQ ID NO: 709619 - DNA, 25 bp, Homo sapien
tattatcgggtatcacatcttcctt

SEQ ID NO: 709620 - DNA, 25 bp, Homo sapien
ttcactgcggttccctcttggcatt

SEQ ID NO: 709621 - DNA, 25 bp, Homo sapien
cactttgtccagaacgctgaagatg

SEQ ID NO: 709622 - DNA, 25 bp, Homo sapien
tgtccagaacgctgaagatgttatt

SEQ ID NO: 709623 - DNA, 25 bp, Homo sapien
ctttgtccagaacgctgaagatgtt

SEQ ID NO: 709624 - DNA, 25 bp, Homo sapien
acactttgtccagaacgctgaagat

SEQ ID NO: 709625 - DNA, 25 bp, Homo sapien
actgtggccagggaggacgtctctt

SEQ ID NO: 709626 - DNA, 25 bp, Homo sapien
ccacgtggatatttgtttaagcaca

SEQ ID NO: 709627 - DNA, 25 bp, Homo sapien
tccgaacagccggagtgatatttgc

SEQ ID NO: 709628 - DNA, 25 bp, Homo sapien
aagatgccagtgtcatgctttccac

SEQ ID NO: 709629 - DNA, 25 bp, Homo sapien
tttgttgataactttgctctcaatg

SEQ ID NO: 709630 - DNA, 25 bp, Homo sapien
cttggctaccaagtccaacgtcaca

SEQ ID NO: 709631 - DNA, 25 bp, Homo sapien
caattgtggaacacccgatcttcat

SEQ ID NO: 709632 - DNA, 25 bp, Homo sapien
aagtccaacgtcacattctcttcac

SEQ ID NO: 709633 - DNA, 25 bp, Homo sapien
caacgactcgagaattcatcttcag

SEQ ID NO: 709634 - DNA, 25 bp, Homo sapien
gaagaagcgctcatttaaaaccgat

SEQ ID NO: 709635 - DNA, 25 bp, Homo sapien
gattggatctgagaagccgtctttc

SEQ ID NO: 709636 - DNA, 25 bp, Homo sapien
tcatcttcagcttgatctcagaggt

SEQ ID NO: 709637 - DNA, 25 bp, Homo sapien
aatagcttcccgtaaaaaatgagag

SEQ ID NO: 709638 - DNA, 25 bp, Homo sapien
ggtagacaagaatctcagtagagac

SEQ ID NO: 709639 - DNA, 25 bp, Homo sapien
gaggagttcccaacaggtagacaag

SEQ ID NO: 709640 - DNA, 25 bp, Homo sapien
tgagagttaaggcaatcgagagacg

SEQ ID NO: 709641 - DNA, 25 bp, Homo sapien
gatttgccatctgattacagctgca

SEQ ID NO: 709642 - DNA, 25 bp, Homo sapien
tccccagacgccatgataacggcaa

SEQ ID NO: 709643 - DNA, 25 bp, Homo sapien
tacagctgcagatggtatatgtctc

SEQ ID NO: 709644 - DNA, 25 bp, Homo sapien
cttcacatcagtgctccaggaaaca

SEQ ID NO: 709645 - DNA, 25 bp, Homo sapien
tgatttcggatggagcgacacagca

SEQ ID NO: 709646 - DNA, 25 bp, Homo sapien
gatgataatgcctacatggctaatg

SEQ ID NO: 709647 - DNA, 25 bp, Homo sapien
atggccaagacgaggcacaccaagg

SEQ ID NO: 709648 - DNA, 25 bp, Homo sapien
gttgtgatttcggatggagcgacac

SEQ ID NO: 709649 - DNA, 25 bp, Homo sapien
gcgaggaagagagtcttcgccaaga

SEQ ID NO: 709650 - DNA, 25 bp, Homo sapien
tgtataccggcgaggaagagagtct

SEQ ID NO: 709651 - DNA, 25 bp, Homo sapien
gaagagagtcttcgccaagaggaga

SEQ ID NO: 709652 - DNA, 25 bp, Homo sapien
cagtcttgtgtataccggcgaggaa

SEQ ID NO: 709653 - DNA, 25 bp, Homo sapien
catcggcagcccataaccaaaggca

SEQ ID NO: 709654 - DNA, 25 bp, Homo sapien
aaaggtagtgcaggaagcccgcgat

SEQ ID NO: 709655 - DNA, 25 bp, Homo sapien
gattatgcattccatagccctgtgg

SEQ ID NO: 709656 - DNA, 25 bp, Homo sapien
catcttgatgttgcgagagctgaag

SEQ ID NO: 709657 - DNA, 25 bp, Homo sapien
tgtgcaaactggccccaagaaactc

SEQ ID NO: 709658 - DNA, 25 bp, Homo sapien
caaactggccccaagaaactccaga

SEQ ID NO: 709659 - DNA, 25 bp, Homo sapien
tgcaaactggccccaagaaactcca

SEQ ID NO: 709660 - DNA, 25 bp, Homo sapien
actgtgcaaactggccccaagaaac

SEQ ID NO: 709661 - DNA, 25 bp, Homo sapien
gaaattccagatctcgcaggtctcc

SEQ ID NO: 709662 - DNA, 25 bp, Homo sapien
cttcagaacacacttcgccaggctg

SEQ ID NO: 709663 - DNA, 25 bp, Homo sapien
cttcggcattaacactggaaagcct

SEQ ID NO: 709664 - DNA, 25 bp, Homo sapien
tctgcctcaggatccacaaggtcca

SEQ ID NO: 709665 - DNA, 25 bp, Homo sapien
ctggtgtcttttagcgttgagactt

SEQ ID NO: 709666 - DNA, 25 bp, Homo sapien
tgcctcaggatccacaaggtccagg

SEQ ID NO: 709667 - DNA, 25 bp, Homo sapien
cagcacacaagaagtgctcaaagaa

SEQ ID NO: 709668 - DNA, 25 bp, Homo sapien
ctctgtctcaggcataggacccagc

SEQ ID NO: 709669 - DNA, 25 bp, Homo sapien
agcacacaagaagtgctcaaagaac

SEQ ID NO: 709670 - DNA, 25 bp, Homo sapien
cctgccacaggtccaatctgaaaaa

SEQ ID NO: 709671 - DNA, 25 bp, Homo sapien
aggtccaatctgaaaaatgcccagc

SEQ ID NO: 709672 - DNA, 25 bp, Homo sapien
tgacacctgccacaggtccaatctg

SEQ ID NO: 709673 - DNA, 25 bp, Homo sapien
ctggccgttgagcagacagtggatg

SEQ ID NO: 709674 - DNA, 25 bp, Homo sapien
gatccacctcttgtattcttctcgt

SEQ ID NO: 709675 - DNA, 25 bp, Homo sapien
cgtcttggaagcggatggcatggag

SEQ ID NO: 709676 - DNA, 25 bp, Homo sapien
gtcttcccagtgatccacctcttgt

SEQ ID NO: 709677 - DNA, 25 bp, Homo sapien
ctgggcttcgtcttcccagtgatcc

SEQ ID NO: 709678 - DNA, 25 bp, Homo sapien
ccattcagtacccaacacgtggcag

SEQ ID NO: 709679 - DNA, 25 bp, Homo sapien
ctcccattcagtacccaacacgtgg

SEQ ID NO: 709680 - DNA, 25 bp, Homo sapien
ttcagtacccaacacgtggcagagc

SEQ ID NO: 709681 - DNA, 25 bp, Homo sapien
tgtcaccaagaggccggcacctccc

SEQ ID NO: 709682 - DNA, 25 bp, Homo sapien
taggctcctgcaggaaactactgtc

SEQ ID NO: 709683 - DNA, 25 bp, Homo sapien
tagaaccatgcaccaacaagggcag

SEQ ID NO: 709684 - DNA, 25 bp, Homo sapien
tcagtgcatacaaccacaggaagac

SEQ ID NO: 709685 - DNA, 25 bp, Homo sapien
tgagaggttctctgtatcaggcgta

SEQ ID NO: 709686 - DNA, 25 bp, Homo sapien
gatgcaaagggtccaagtcaagaag

SEQ ID NO: 709687 - DNA, 25 bp, Homo sapien
tcaaagaatgcttcctagcagaggg

SEQ ID NO: 709688 - DNA, 25 bp, Homo sapien
tgatgatccagggaccacgctttgg

SEQ ID NO: 709689 - DNA, 25 bp, Homo sapien
cagtgcccatagaagtgaaaatacc

SEQ ID NO: 709690 - DNA, 25 bp, Homo sapien
gcagtccaatgcagaatgttgacca

SEQ ID NO: 709691 - DNA, 25 bp, Homo sapien
agtccaaccccagagtcagacaagg

SEQ ID NO: 709692 - DNA, 25 bp, Homo sapien
taaagcagcaagttggcatggtggc

SEQ ID NO: 709693 - DNA, 25 bp, Homo sapien
gacaacctccaccagtgtaactgcg

SEQ ID NO: 709694 - DNA, 25 bp, Homo sapien
tgcagagtcaaccaagcaaccgcag

SEQ ID NO: 709695 - DNA, 25 bp, Homo sapien
ttctccttattatcttccccgcaag

SEQ ID NO: 709696 - DNA, 25 bp, Homo sapien
tttcataaaggaggcactgcatcat

SEQ ID NO: 709697 - DNA, 25 bp, Homo sapien
cttccccgcaagtaggaagaagtgg

SEQ ID NO: 709698 - DNA, 25 bp, Homo sapien
gagatgtctcgctctactacccaaa

SEQ ID NO: 709699 - DNA, 25 bp, Homo sapien
ggaatccgacatctcatgcctctag

SEQ ID NO: 709700 - DNA, 25 bp, Homo sapien
gctctggatgtaacacggacctctc

SEQ ID NO: 709701 - DNA, 25 bp, Homo sapien
aaccaaaacggtaagatcagctcct

SEQ ID NO: 709702 - DNA, 25 bp, Homo sapien
gatgaccttgaggagcctatgatca

SEQ ID NO: 709703 - DNA, 25 bp, Homo sapien
cagtaagggactcctcggaggcaga

SEQ ID NO: 709704 - DNA, 25 bp, Homo sapien
ccagtgagaatgtgctgggccagct

SEQ ID NO: 709705 - DNA, 25 bp, Homo sapien
tgatcatcagtaagggactcctcgg

SEQ ID NO: 709706 - DNA, 25 bp, Homo sapien
tgttctcggtgccagccacgtgggt

SEQ ID NO: 709707 - DNA, 25 bp, Homo sapien
ggaacagcctgttctcggtgccagc

SEQ ID NO: 709708 - DNA, 25 bp, Homo sapien
agccacgtgggtctgatgatcttcg

SEQ ID NO: 709709 - DNA, 25 bp, Homo sapien
gatcttcgggtgattaagggccttc

SEQ ID NO: 709710 - DNA, 25 bp, Homo sapien
gtggatttctcgtttcttctgtaaa

SEQ ID NO: 709711 - DNA, 25 bp, Homo sapien
tcgtttcttctgtaaagcccagggc

SEQ ID NO: 709712 - DNA, 25 bp, Homo sapien
tggatttctcgtttcttctgtaaag

SEQ ID NO: 709713 - DNA, 25 bp, Homo sapien
ttctcgtttcttctgtaaagcccag

SEQ ID NO: 709714 - DNA, 25 bp, Homo sapien
tgcagtctccggtaggcgcagagtt

SEQ ID NO: 709715 - DNA, 25 bp, Homo sapien
gccgtccccggtgcaaggatactta

SEQ ID NO: 709716 - DNA, 25 bp, Homo sapien
aatgcagtggacttgaaccttctcc

SEQ ID NO: 709717 - DNA, 25 bp, Homo sapien
ttaagacgctctccaaatgcagtgg

SEQ ID NO: 709718 - DNA, 25 bp, Homo sapien
ttccggaggccggtgacaaggatca

SEQ ID NO: 709719 - DNA, 25 bp, Homo sapien
tggagaagccgcagcaactctgcgc

SEQ ID NO: 709720 - DNA, 25 bp, Homo sapien
actctgcgcctaccggagactgcag

SEQ ID NO: 709721 - DNA, 25 bp, Homo sapien
tcagacgcagaaaaggggacgagca

SEQ ID NO: 709722 - DNA, 25 bp, Homo sapien
agctgtagagttcctcctgctgacc

SEQ ID NO: 709723 - DNA, 25 bp, Homo sapien
agagttcctcctgctgaccccactc

SEQ ID NO: 709724 - DNA, 25 bp, Homo sapien
ttcctcctgctgaccccactcctga

SEQ ID NO: 709725 - DNA, 25 bp, Homo sapien
agttcctcctgctgaccccactcct

SEQ ID NO: 709726 - DNA, 25 bp, Homo sapien
aggcaggcttggaaaagaggtgaac

SEQ ID NO: 709727 - DNA, 25 bp, Homo sapien
cttggaaaagaggtgaacgcaggtt

SEQ ID NO: 709728 - DNA, 25 bp, Homo sapien
tggaaaagaggtgaacgcaggttct

SEQ ID NO: 709729 - DNA, 25 bp, Homo sapien
gaaaagaggtgaacgcaggttctcc

SEQ ID NO: 709730 - DNA, 25 bp, Homo sapien
gtggatttctcgtttcttctgtaaa

SEQ ID NO: 709731 - DNA, 25 bp, Homo sapien
tcgtttcttctgtaaagcccagggc

SEQ ID NO: 709732 - DNA, 25 bp, Homo sapien
tggatttctcgtttcttctgtaaag

SEQ ID NO: 709733 - DNA, 25 bp, Homo sapien
ttctcgtttcttctgtaaagcccag

SEQ ID NO: 709734 - DNA, 25 bp, Homo sapien
tgcagtctccggtaggcgcagagtt

SEQ ID NO: 709735 - DNA, 25 bp, Homo sapien
gccgtccccggtgcaaggatactta

SEQ ID NO: 709736 - DNA, 25 bp, Homo sapien
aatgcagtggacttgaaccttctcc

SEQ ID NO: 709737 - DNA, 25 bp, Homo sapien
ttaagacgctctccaaatgcagtgg

SEQ ID NO: 709738 - DNA, 25 bp, Homo sapien
gagctgacaacccattcctggggtt

SEQ ID NO: 709739 - DNA, 25 bp, Homo sapien
tgccacagctggaaaccgcccaggg

SEQ ID NO: 709740 - DNA, 25 bp, Homo sapien
tcctggcctgtctccggatatctgc

SEQ ID NO: 709741 - DNA, 25 bp, Homo sapien
tggctttcttcaccctcctggcctg

SEQ ID NO: 709742 - DNA, 25 bp, Homo sapien
taggaatgaggatgggcattaaaag

SEQ ID NO: 709743 - DNA, 25 bp, Homo sapien
caattcagagtaggaatgaggatgg

SEQ ID NO: 709744 - DNA, 25 bp, Homo sapien
atgaggatgggcattaaaagaaagg

SEQ ID NO: 709745 - DNA, 25 bp, Homo sapien
gggaaaagtgtgacaattcagagta

SEQ ID NO: 709746 - DNA, 25 bp, Homo sapien
ttccggaggccggtgacaaggatca

SEQ ID NO: 709747 - DNA, 25 bp, Homo sapien
tggagaagccgcagcaactctgcgc

SEQ ID NO: 709748 - DNA, 25 bp, Homo sapien
actctgcgcctaccggagactgcag

SEQ ID NO: 709749 - DNA, 25 bp, Homo sapien
tcagacgcagaaaaggggacgagca

SEQ ID NO: 709750 - DNA, 25 bp, Homo sapien
gtgtctggcagttgtatttagggat

SEQ ID NO: 709751 - DNA, 25 bp, Homo sapien
ctggcagttgtatttagggatagtc

SEQ ID NO: 709752 - DNA, 25 bp, Homo sapien
ttgtatttagggatagtctgtctcc

SEQ ID NO: 709753 - DNA, 25 bp, Homo sapien
cagttgtatttagggatagtctgtc

SEQ ID NO: 709754 - DNA, 25 bp, Homo sapien
cagaagagctccaatcttggttgaa

SEQ ID NO: 709755 - DNA, 25 bp, Homo sapien
ccgtgggcttctgtagcaccccaga

SEQ ID NO: 709756 - DNA, 25 bp, Homo sapien
gaagatactgacgtggtacctggca

SEQ ID NO: 709757 - DNA, 25 bp, Homo sapien
tggttgaagatactgacgtggtacc

SEQ ID NO: 709758 - DNA, 25 bp, Homo sapien
taatagaaccaggttgggccctggc

SEQ ID NO: 709759 - DNA, 25 bp, Homo sapien
gaccgaaagattctcccagacgctg

SEQ ID NO: 709760 - DNA, 25 bp, Homo sapien
ttctcacaagacacaagcgcgcttc

SEQ ID NO: 709761 - DNA, 25 bp, Homo sapien
ctccggctgaggtgttctagtttgc

SEQ ID NO: 709762 - DNA, 25 bp, Homo sapien
ccacggatcagtgaggataggtgaa

SEQ ID NO: 709763 - DNA, 25 bp, Homo sapien
ctgatcatacagaagtccacggatc

SEQ ID NO: 709764 - DNA, 25 bp, Homo sapien
ggataggtgaaacttgaggctggtt

SEQ ID NO: 709765 - DNA, 25 bp, Homo sapien
tacagaagtccacggatcagtgagg

SEQ ID NO: 709766 - DNA, 25 bp, Homo sapien
tatcttttacaatagccgttctggc

SEQ ID NO: 709767 - DNA, 25 bp, Homo sapien
tagccgttctggcttcattgcaatg

SEQ ID NO: 709768 - DNA, 25 bp, Homo sapien
tggacagatgggaagagactagaac

SEQ ID NO: 709769 - DNA, 25 bp, Homo sapien
gcttcattgcaatggacagatggga

SEQ ID NO: 709770 - DNA, 25 bp, Homo sapien
ctcctcctttatcccgcagcgctct

SEQ ID NO: 709771 - DNA, 25 bp, Homo sapien
aggacgctcctcctttatcccgcag

SEQ ID NO: 709772 - DNA, 25 bp, Homo sapien
gaagcaggacgctcctcctttatcc

SEQ ID NO: 709773 - DNA, 25 bp, Homo sapien
cctgtgactccgacagcaacagggc

SEQ ID NO: 709774 - DNA, 25 bp, Homo sapien
cggcagttgggggcaggacgacagc

SEQ ID NO: 709775 - DNA, 25 bp, Homo sapien
gttgggggcaggacgacagccgcca

SEQ ID NO: 709776 - DNA, 25 bp, Homo sapien
ggcagttgggggcaggacgacagcc

SEQ ID NO: 709777 - DNA, 25 bp, Homo sapien
cagttgggggcaggacgacagccgc

SEQ ID NO: 709778 - DNA, 25 bp, Homo sapien
cccacagcaatccaaggaaaccaga

SEQ ID NO: 709779 - DNA, 25 bp, Homo sapien
accaacccacagcaatccaaggaaa

SEQ ID NO: 709780 - DNA, 25 bp, Homo sapien
gaccaggtccccatgcatacacagt

SEQ ID NO: 709781 - DNA, 25 bp, Homo sapien
tgcctgcgatcgaccaggtccccat

SEQ ID NO: 709782 - DNA, 25 bp, Homo sapien
tcaggagctcattaaccagctctcc

SEQ ID NO: 709783 - DNA, 25 bp, Homo sapien
aggagctcattaaccagctctccgc

SEQ ID NO: 709784 - DNA, 25 bp, Homo sapien
caggagctcattaaccagctctccg

SEQ ID NO: 709785 - DNA, 25 bp, Homo sapien
tggctgaaggaatcatgatttggaa

SEQ ID NO: 709786 - DNA, 25 bp, Homo sapien
catgatttggaaaaaggaacatccg

SEQ ID NO: 709787 - DNA, 25 bp, Homo sapien
ttggaaaaaggaacatccgactcac

SEQ ID NO: 709788 - DNA, 25 bp, Homo sapien
gctgaaggaatcatgatttggaaaa

SEQ ID NO: 709789 - DNA, 25 bp, Homo sapien
tacagtgtcctttgggcagggtcca

SEQ ID NO: 709790 - DNA, 25 bp, Homo sapien
tccctgtacagtgtcctttgggcag

SEQ ID NO: 709791 - DNA, 25 bp, Homo sapien
cacgtccctgtacagtgtcctttgg

SEQ ID NO: 709792 - DNA, 25 bp, Homo sapien
gtgaggccaggttcctgcagttctc

SEQ ID NO: 709793 - DNA, 25 bp, Homo sapien
ctcttctgtcatcactttatcttct

SEQ ID NO: 709794 - DNA, 25 bp, Homo sapien
cagcctaggtttatcaacttggttc

SEQ ID NO: 709795 - DNA, 25 bp, Homo sapien
tcttctgtcatcactttatcttctt

SEQ ID NO: 709796 - DNA, 25 bp, Homo sapien
aaaatgcatacgtgagtgaaggcag

SEQ ID NO: 709797 - DNA, 25 bp, Homo sapien
ttttaagttgatggtgaaatagtaa

SEQ ID NO: 709798 - DNA, 25 bp, Homo sapien
gaaatagtaaaatgcatacgtgagt

SEQ ID NO: 709799 - DNA, 25 bp, Homo sapien
catacgtgagtgaaggcagaatctg

SEQ ID NO: 709800 - DNA, 25 bp, Homo sapien
cagcttaggagttaaccctttggct

SEQ ID NO: 709801 - DNA, 25 bp, Homo sapien
tgttcttttcgaaaaacatgcagct

SEQ ID NO: 709802 - DNA, 25 bp, Homo sapien
catgcagcttaggagttaacccttt

SEQ ID NO: 709803 - DNA, 25 bp, Homo sapien
tctagattgttcttttcgaaaaaca

SEQ ID NO: 709804 - DNA, 25 bp, Homo sapien
ggcttttctcatgtagggcattcta

SEQ ID NO: 709805 - DNA, 25 bp, Homo sapien
caatcgtggcattcgtaagggtact

SEQ ID NO: 709806 - DNA, 25 bp, Homo sapien
tgaatcttcctgtgccgtgtaaggg

SEQ ID NO: 709807 - DNA, 25 bp, Homo sapien
tgcggaactcacgaaaacactggtt

SEQ ID NO: 709808 - DNA, 25 bp, Homo sapien
gaaagagatgacctcgtgccgaaag

SEQ ID NO: 709809 - DNA, 25 bp, Homo sapien
taacctgtgggtgattgaatgctac

SEQ ID NO: 709810 - DNA, 25 bp, Homo sapien
gacatctggactgtaacctcttgag

SEQ ID NO: 709811 - DNA, 25 bp, Homo sapien
tacgtgatttggaagcgcagctccc

SEQ ID NO: 709812 - DNA, 25 bp, Homo sapien
aacagctagcatgcacttgtcgggc

SEQ ID NO: 709813 - DNA, 25 bp, Homo sapien
ccatctttacaaaaactagacaggc

SEQ ID NO: 709814 - DNA, 25 bp, Homo sapien
ggtggtgcatgcctacagtcccagc

SEQ ID NO: 709815 - DNA, 25 bp, Homo sapien
atctttacaaaaactagacaggcat

SEQ ID NO: 709816 - DNA, 25 bp, Homo sapien
agctacttgggaggctgaggtggga

SEQ ID NO: 709817 - DNA, 25 bp, Homo sapien
cacagtttgagtacgtatgtccatc

SEQ ID NO: 709818 - DNA, 25 bp, Homo sapien
tagatgagaataagccagacggtgt

SEQ ID NO: 709819 - DNA, 25 bp, Homo sapien
tcactaagtcaggtcgagagaaaca

SEQ ID NO: 709820 - DNA, 25 bp, Homo sapien
cagagccaatgcagccaatcaaagg

SEQ ID NO: 709821 - DNA, 25 bp, Homo sapien
cataagacaaatttgagctggactc

SEQ ID NO: 709822 - DNA, 25 bp, Homo sapien
tcttttgctgggtagtgccaccact

SEQ ID NO: 709823 - DNA, 25 bp, Homo sapien
gtgtgccactcagatgccctgcatt

SEQ ID NO: 709824 - DNA, 25 bp, Homo sapien
actgtacctactgtggtccaccatg

SEQ ID NO: 709825 - DNA, 25 bp, Homo sapien
gagcctcaaaataagtgtgcaccca

SEQ ID NO: 709826 - DNA, 25 bp, Homo sapien
caaatttctatctgggtgcgggcca

SEQ ID NO: 709827 - DNA, 25 bp, Homo sapien
tagcaccatgtacagaagacgcctt

SEQ ID NO: 709828 - DNA, 25 bp, Homo sapien
ttggcaacgcaggatcaaatgtgct

SEQ ID NO: 709829 - DNA, 25 bp, Homo sapien
acacaagggtctgcataggtcatcc

SEQ ID NO: 709830 - DNA, 25 bp, Homo sapien
caaacagctattgggttgcaaacct

SEQ ID NO: 709831 - DNA, 25 bp, Homo sapien
tccaggaggagaataccaagcacat

SEQ ID NO: 709832 - DNA, 25 bp, Homo sapien
gcagctttgataacccatgtgagag

SEQ ID NO: 709833 - DNA, 25 bp, Homo sapien
cataagttattgactattccccggg

SEQ ID NO: 709834 - DNA, 25 bp, Homo sapien
tcttctcaagggtgcgagctcatcc

SEQ ID NO: 709835 - DNA, 25 bp, Homo sapien
ggaatgaagccatgttcgctgctaa

SEQ ID NO: 709836 - DNA, 25 bp, Homo sapien
tttcaagaccaaaccaagctaggac

SEQ ID NO: 709837 - DNA, 25 bp, Homo sapien
gtaggcacctgtgttagtctgtact

SEQ ID NO: 709838 - DNA, 25 bp, Homo sapien
agtaggcacctgtgttagtctgtac

SEQ ID NO: 709839 - DNA, 25 bp, Homo sapien
cacccaccactctcaagtaggcacc

SEQ ID NO: 709840 - DNA, 25 bp, Homo sapien
caaatctccatttgggtggatccca

SEQ ID NO: 709841 - DNA, 25 bp, Homo sapien
cagagttttgggctcgatgcttgca

SEQ ID NO: 709842 - DNA, 25 bp, Homo sapien
actattagcttggaactgtgtcgaa

SEQ ID NO: 709843 - DNA, 25 bp, Homo sapien
gcttatcacagggtatgtttcccac

SEQ ID NO: 709844 - DNA, 25 bp, Homo sapien
tctagggtgaacacagttggtctgg

SEQ ID NO: 709845 - DNA, 25 bp, Homo sapien
cacgggccagtcaaaggcatgggaa

SEQ ID NO: 709846 - DNA, 25 bp, Homo sapien
tctaggtttagccaggactgagggc

SEQ ID NO: 709847 - DNA, 25 bp, Homo sapien
gagttaaatccagtgccaacagggt

SEQ ID NO: 709848 - DNA, 25 bp, Homo sapien
gggaaggattttggccccactgaga

SEQ ID NO: 709849 - DNA, 25 bp, Homo sapien
tgtaaggatcgaaggcagcaagaat

SEQ ID NO: 709850 - DNA, 25 bp, Homo sapien
ggatgcagctgtgttaacccacgca

SEQ ID NO: 709851 - DNA, 25 bp, Homo sapien
taaacatcgtaacacaagcacgcac

SEQ ID NO: 709852 - DNA, 25 bp, Homo sapien
tattgcctcaaaggtgagtgcaggc

SEQ ID NO: 709853 - DNA, 25 bp, Homo sapien
aatggcaacatcacccactacctgg

SEQ ID NO: 709854 - DNA, 25 bp, Homo sapien
gctgttcgagctggattattgcctc

SEQ ID NO: 709855 - DNA, 25 bp, Homo sapien
gattattctgaagtggaaaccaccc

SEQ ID NO: 709856 - DNA, 25 bp, Homo sapien
aaggtctcaccatctactgtcgttc

SEQ ID NO: 709857 - DNA, 25 bp, Homo sapien
ctgggatgtaatagcacagtgctgc

SEQ ID NO: 709858 - DNA, 25 bp, Homo sapien
tcgttccaaagtacctgctgggatg

SEQ ID NO: 709859 - DNA, 25 bp, Homo sapien
gagaaggaccagatatttgtgatga

SEQ ID NO: 709860 - DNA, 25 bp, Homo sapien
tgtcaccgtattttattgcgtaggt

SEQ ID NO: 709861 - DNA, 25 bp, Homo sapien
caaaggagaggggggtgcattgtca

SEQ ID NO: 709862 - DNA, 25 bp, Homo sapien
cattgtcaccgtattttattgcgta

SEQ ID NO: 709863 - DNA, 25 bp, Homo sapien
tgcattgtcaccgtattttattgcg

SEQ ID NO: 709864 - DNA, 25 bp, Homo sapien
atgaggttcctagagtcatcagagt

SEQ ID NO: 709865 - DNA, 25 bp, Homo sapien
aagtaaaatgggatgtcgggcgcag

SEQ ID NO: 709866 - DNA, 25 bp, Homo sapien
gtaaaatgggatgtcgggcgcagtg

SEQ ID NO: 709867 - DNA, 25 bp, Homo sapien
gaaagtaaaatgggatgtcgggcgc

SEQ ID NO: 709868 - DNA, 25 bp, Homo sapien
atccgtggcagactcgacctgcggg

SEQ ID NO: 709869 - DNA, 25 bp, Homo sapien
tttttccaaagttccatccgtggca

SEQ ID NO: 709870 - DNA, 25 bp, Homo sapien
ggccagcgcccctgcagcacgcccg

SEQ ID NO: 709871 - DNA, 25 bp, Homo sapien
ggccactgcccgagcgccagtctgg

SEQ ID NO: 709872 - DNA, 25 bp, Homo sapien
cagcctccaaagtgcagcctctata

SEQ ID NO: 709873 - DNA, 25 bp, Homo sapien
gaaagttgggcgtcatccagcaggt

SEQ ID NO: 709874 - DNA, 25 bp, Homo sapien
tctctcgtgagttgtatccagttgc

SEQ ID NO: 709875 - DNA, 25 bp, Homo sapien
tgaatccgatggtgttctttctgcc

SEQ ID NO: 709876 - DNA, 25 bp, Homo sapien
tccggttgctaaggaaagtacatta

SEQ ID NO: 709877 - DNA, 25 bp, Homo sapien
tcaaggttatgacggtttgtgtggc

SEQ ID NO: 709878 - DNA, 25 bp, Homo sapien
gagaaccaagaaacacctttgatct

SEQ ID NO: 709879 - DNA, 25 bp, Homo sapien
tgtgaataatacacggccagaggga

SEQ ID NO: 709880 - DNA, 25 bp, Homo sapien
gagctggattatctctctggtggca

SEQ ID NO: 709881 - DNA, 25 bp, Homo sapien
cttttgagcagggtgacattaggca

SEQ ID NO: 709882 - DNA, 25 bp, Homo sapien
gcctattcaaccacagtactgagga

SEQ ID NO: 709883 - DNA, 25 bp, Homo sapien
catggttgttaaccccaggtctgcc

SEQ ID NO: 709884 - DNA, 25 bp, Homo sapien
ccgtcggcaagtcgcctgggcttcg

SEQ ID NO: 709885 - DNA, 25 bp, Homo sapien
gggcttcgtggaggctcgctgcccc

SEQ ID NO: 709886 - DNA, 25 bp, Homo sapien
ggagtggggccgtcggcaagtcgcc

SEQ ID NO: 709887 - DNA, 25 bp, Homo sapien
cctgggcttcgtggaggctcgctgc

SEQ ID NO: 709888 - DNA, 25 bp, Homo sapien
aagaatttgtggccctgtttgccat

SEQ ID NO: 709889 - DNA, 25 bp, Homo sapien
gaagaatttgtggccctgtttgcca

SEQ ID NO: 709890 - DNA, 25 bp, Homo sapien
cacggggagagcgatagctgaacct

SEQ ID NO: 709891 - DNA, 25 bp, Homo sapien
tcacagatgtcacggggagagcgat

SEQ ID NO: 709892 - DNA, 25 bp, Homo sapien
gggcagaagacgtcatcacagatgt

SEQ ID NO: 709893 - DNA, 25 bp, Homo sapien
tggtggtaaagaagatggaatgggc

SEQ ID NO: 709894 - DNA, 25 bp, Homo sapien
ttactcggaggtctgataaggatgg

SEQ ID NO: 709895 - DNA, 25 bp, Homo sapien
taaggatgggctttaaagcgctggc

SEQ ID NO: 709896 - DNA, 25 bp, Homo sapien
tccacacgcggtgtgcgaagcacgg

SEQ ID NO: 709897 - DNA, 25 bp, Homo sapien
tggcagctagtcatgtccacacgcg

SEQ ID NO: 709898 - DNA, 25 bp, Homo sapien
aagtctttcaacacactggacttag

SEQ ID NO: 709899 - DNA, 25 bp, Homo sapien
cacaggtttgggaagtggaccaaag

SEQ ID NO: 709900 - DNA, 25 bp, Homo sapien
tctttcaacacactggacttagcat

SEQ ID NO: 709901 - DNA, 25 bp, Homo sapien
tcacaggtttgggaagtggaccaaa

SEQ ID NO: 709902 - DNA, 25 bp, Homo sapien
gggctatcagttgaaactgaccttt

SEQ ID NO: 709903 - DNA, 25 bp, Homo sapien
tgagggctatcagttgaaactgacc

SEQ ID NO: 709904 - DNA, 25 bp, Homo sapien
gaggctgagggctatcagttgaaac

SEQ ID NO: 709905 - DNA, 25 bp, Homo sapien
gctgagggctatcagttgaaactga

SEQ ID NO: 709906 - DNA, 25 bp, Homo sapien
gtggtgaagataacgaatttacaat

SEQ ID NO: 709907 - DNA, 25 bp, Homo sapien
gatgatgctgtctaaatcttgagtg

SEQ ID NO: 709908 - DNA, 25 bp, Homo sapien
tgctgtctaaatcttgagtggtgaa

SEQ ID NO: 709909 - DNA, 25 bp, Homo sapien
tcttgagtggtgaagataacgaatt

SEQ ID NO: 709910 - DNA, 25 bp, Homo sapien
ggtgtgaaccactactctgggcttg

SEQ ID NO: 709911 - DNA, 25 bp, Homo sapien
tattgttgagaccactaaggcttcg

SEQ ID NO: 709912 - DNA, 25 bp, Homo sapien
tgctgatttcatgccagccgtggtt

SEQ ID NO: 709913 - DNA, 25 bp, Homo sapien
tgattaggatattgcatcccatctt

SEQ ID NO: 709914 - DNA, 25 bp, Homo sapien
agagaaagctactcatcccggctgg

SEQ ID NO: 709915 - DNA, 25 bp, Homo sapien
ggatatccggaacaacctcactagg

SEQ ID NO: 709916 - DNA, 25 bp, Homo sapien
tgatgttcaaaacgaggcccgaaga

SEQ ID NO: 709917 - DNA, 25 bp, Homo sapien
taactacgcgctggtcatcttcgag

SEQ ID NO: 709918 - DNA, 25 bp, Homo sapien
tcactgaaacctccaactctctggt

SEQ ID NO: 709919 - DNA, 25 bp, Homo sapien
cctccaactctctggttcaagtgac

SEQ ID NO: 709920 - DNA, 25 bp, Homo sapien
caactctctggttcaagtgactctt

SEQ ID NO: 709921 - DNA, 25 bp, Homo sapien
tccaactctctggttcaagtgactc

SEQ ID NO: 709922 - DNA, 25 bp, Homo sapien
agtagccgggagcacagacgcgcct

SEQ ID NO: 709923 - DNA, 25 bp, Homo sapien
tagaggtagggttttgccagttgcc

SEQ ID NO: 709924 - DNA, 25 bp, Homo sapien
aggcgagcgctaccgtgcccggcta

SEQ ID NO: 709925 - DNA, 25 bp, Homo sapien
ccgcctatgcctcccaatatgttgg

SEQ ID NO: 709926 - DNA, 25 bp, Homo sapien
ccaccagcatccgtacctgttcccc

SEQ ID NO: 709927 - DNA, 25 bp, Homo sapien
tccaccagcatccgtacctgttccc

SEQ ID NO: 709928 - DNA, 25 bp, Homo sapien
tcctgcaatatcacctgttgtcact

SEQ ID NO: 709929 - DNA, 25 bp, Homo sapien
ctttcctgcaatatcacctgttgtc

SEQ ID NO: 709930 - DNA, 25 bp, Homo sapien
caagctttgctatcctgcggtgcca

SEQ ID NO: 709931 - DNA, 25 bp, Homo sapien
tgttggagttcaaagcggacttgtg

SEQ ID NO: 709932 - DNA, 25 bp, Homo sapien
gccacgtacagactggctctaagct

SEQ ID NO: 709933 - DNA, 25 bp, Homo sapien
cggacttgtgggaatgaatgtttaa

SEQ ID NO: 709934 - DNA, 25 bp, Homo sapien
tcgctgtgccccgttgccagccgtc

SEQ ID NO: 709935 - DNA, 25 bp, Homo sapien
cctcgctgtgccccgttgccagccg

SEQ ID NO: 709936 - DNA, 25 bp, Homo sapien
gctgtgccccgttgccagccgtccc

SEQ ID NO: 709937 - DNA, 25 bp, Homo sapien
gctcctcgctgtgccccgttgccag

SEQ ID NO: 709938 - DNA, 25 bp, Homo sapien
cttctccgtgggcttcaatagtgga

SEQ ID NO: 709939 - DNA, 25 bp, Homo sapien
tagtggagcaatggggaccaccctg

SEQ ID NO: 709940 - DNA, 25 bp, Homo sapien
accaccctgggggccatattagcac

SEQ ID NO: 709941 - DNA, 25 bp, Homo sapien
gggccatattagcaccccctggaca

SEQ ID NO: 709942 - DNA, 25 bp, Homo sapien
ccagggcaaaggcttggaggcaaga

SEQ ID NO: 709943 - DNA, 25 bp, Homo sapien
ggaggactgtcacaggacccaaagt

SEQ ID NO: 709944 - DNA, 25 bp, Homo sapien
ttacaaatacgacacaccgcacctg

SEQ ID NO: 709945 - DNA, 25 bp, Homo sapien
ctgggattacaaatacgacacaccg

SEQ ID NO: 709946 - DNA, 25 bp, Homo sapien
gggcctaaaaagagcccagaggatg

SEQ ID NO: 709947 - DNA, 25 bp, Homo sapien
gaatgacccaatagcacctcgactt

SEQ ID NO: 709948 - DNA, 25 bp, Homo sapien
tgacctacggccagcgtttcgagct

SEQ ID NO: 709949 - DNA, 25 bp, Homo sapien
agctcagttcttcaacctgcaggca

SEQ ID NO: 709950 - DNA, 25 bp, Homo sapien
agtggttgagcaccgagtcagccat

SEQ ID NO: 709951 - DNA, 25 bp, Homo sapien
aaggcccaccgcttcagccacagct

SEQ ID NO: 709952 - DNA, 25 bp, Homo sapien
tcttgaaggcccaccgcttcagcca

SEQ ID NO: 709953 - DNA, 25 bp, Homo sapien
gccaggagtggttgagcaccgagtc

SEQ ID NO: 709954 - DNA, 25 bp, Homo sapien
aagtctgggttctcaggtttccagg

SEQ ID NO: 709955 - DNA, 25 bp, Homo sapien
tcttggtggctgaagccacagctcc

SEQ ID NO: 709956 - DNA, 25 bp, Homo sapien
agagaagaagtctgggttctcaggt

SEQ ID NO: 709957 - DNA, 25 bp, Homo sapien
cttggtggctgaagccacagctcca

SEQ ID NO: 709958 - DNA, 25 bp, Homo sapien
catcccatggttctctttcaaagag

SEQ ID NO: 709959 - DNA, 25 bp, Homo sapien
tttacccgggaccttccatgacatc

SEQ ID NO: 709960 - DNA, 25 bp, Homo sapien
catgacatctggactaattccttca

SEQ ID NO: 709961 - DNA, 25 bp, Homo sapien
ggcgcagggctaaactccagtcctg

SEQ ID NO: 709962 - DNA, 25 bp, Homo sapien
gtgcctggaaaacctcctactgtct

SEQ ID NO: 709963 - DNA, 25 bp, Homo sapien
tggctggccctcatgtgacttgggc

SEQ ID NO: 709964 - DNA, 25 bp, Homo sapien
ctgtaaatataaacacgtcaggaca

SEQ ID NO: 709965 - DNA, 25 bp, Homo sapien
tcctttgtggccaccgtcctcattt

SEQ ID NO: 709966 - DNA, 25 bp, Homo sapien
tgagtcactgcacccgcctaatttt

SEQ ID NO: 709967 - DNA, 25 bp, Homo sapien
gagccgccgcgcctggtcaatttta

SEQ ID NO: 709968 - DNA, 25 bp, Homo sapien
gagtcactgcacccgcctaattttg

SEQ ID NO: 709969 - DNA, 25 bp, Homo sapien
ccgccgcgcctggtcaattttaggt

SEQ ID NO: 709970 - DNA, 25 bp, Homo sapien
tgcaaccgtcaaaacccagcttggg

SEQ ID NO: 709971 - DNA, 25 bp, Homo sapien
ggatgctctcaatttgtcagctggg

SEQ ID NO: 709972 - DNA, 25 bp, Homo sapien
gactcctcaaggttggtaaggtgcc

SEQ ID NO: 709973 - DNA, 25 bp, Homo sapien
caggcatccatgtgatctcaggcag

SEQ ID NO: 709974 - DNA, 25 bp, Homo sapien
gaggtcctccatactctcgctgagc

SEQ ID NO: 709975 - DNA, 25 bp, Homo sapien
tgaggtcctccatactctcgctgag

SEQ ID NO: 709976 - DNA, 25 bp, Homo sapien
caggctgaggtcctccatactctcg

SEQ ID NO: 709977 - DNA, 25 bp, Homo sapien
gctgaggtcctccatactctcgctg

SEQ ID NO: 709978 - DNA, 25 bp, Homo sapien
ggaccctgccaagctggagaaaaga

SEQ ID NO: 709979 - DNA, 25 bp, Homo sapien
ttcttcaccggtggggcggctgtct

SEQ ID NO: 709980 - DNA, 25 bp, Homo sapien
agctccgcgacctttcccagctgcg

SEQ ID NO: 709981 - DNA, 25 bp, Homo sapien
agctgcgccgccttgacaggtcttg

SEQ ID NO: 709982 - DNA, 25 bp, Homo sapien
tggcaggttcaaagcaaggctggcc

SEQ ID NO: 709983 - DNA, 25 bp, Homo sapien
ggcaggttcaaagcaaggctggcca

SEQ ID NO: 709984 - DNA, 25 bp, Homo sapien
ggttcaaagcaaggctggccagtgt

SEQ ID NO: 709985 - DNA, 25 bp, Homo sapien
caaagcaaggctggccagtgttcgg

SEQ ID NO: 709986 - DNA, 25 bp, Homo sapien
gacacaggaacggaccttgacctcc

SEQ ID NO: 709987 - DNA, 25 bp, Homo sapien
gagagcggatctcatagaaggacac

SEQ ID NO: 709988 - DNA, 25 bp, Homo sapien
gagagatttccggagagcggatctc

SEQ ID NO: 709989 - DNA, 25 bp, Homo sapien
tcatagaaggacacaggaacggacc

SEQ ID NO: 709990 - DNA, 25 bp, Homo sapien
ccaggaagcacagttgtcaggagct

SEQ ID NO: 709991 - DNA, 25 bp, Homo sapien
atggtctttttccatgcactccagc

SEQ ID NO: 709992 - DNA, 25 bp, Homo sapien
ggtctttttccatgcactccagcac

SEQ ID NO: 709993 - DNA, 25 bp, Homo sapien
tggtctttttccatgcactccagca

SEQ ID NO: 709994 - DNA, 25 bp, Homo sapien
gtctttttccatgcactccagcact

SEQ ID NO: 709995 - DNA, 25 bp, Homo sapien
tgtcgaagttcttgaagcacctgct

SEQ ID NO: 709996 - DNA, 25 bp, Homo sapien
ggtactgtcgaagttcttgaagcac

SEQ ID NO: 709997 - DNA, 25 bp, Homo sapien
tcgaagttcttgaagcacctgctgg

SEQ ID NO: 709998 - DNA, 25 bp, Homo sapien
ccatggtactgtcgaagttcttgaa

SEQ ID NO: 709999 - DNA, 25 bp, Homo sapien
atcctcctgcgtcaacacccccaca

SEQ ID NO: 710000 - DNA, 25 bp, Homo sapien
tcctcctgcgtcaacacccccacac

SEQ ID NO: 710001 - DNA, 25 bp, Homo sapien
catcctcctgcgtcaacacccccac

SEQ ID NO: 710002 - DNA, 25 bp, Homo sapien
aaccaggtcaggttcgagtgggctc

SEQ ID NO: 710003 - DNA, 25 bp, Homo sapien
gctgacatgcaagccctctgccggg

SEQ ID NO: 710004 - DNA, 25 bp, Homo sapien
aggtcaggttcgagtgggctcctcc

SEQ ID NO: 710005 - DNA, 25 bp, Homo sapien
gctggctgacatgcaagccctctgc

SEQ ID NO: 710006 - DNA, 25 bp, Homo sapien
ggtactcttgtcactcttctcgttc

SEQ ID NO: 710007 - DNA, 25 bp, Homo sapien
tctgcctggtcactcgactgcggag

SEQ ID NO: 710008 - DNA, 25 bp, Homo sapien
actcgactgcggaggcagctcagcc

SEQ ID NO: 710009 - DNA, 25 bp, Homo sapien
tctcgttcttgccagcaccgtcctc

SEQ ID NO: 710010 - DNA, 25 bp, Homo sapien
ggcactggccctcttatatactgtg

SEQ ID NO: 710011 - DNA, 25 bp, Homo sapien
ctcccgggctaagggcagcaagcca

SEQ ID NO: 710012 - DNA, 25 bp, Homo sapien
ctggatgggacagaggtgggtctca

SEQ ID NO: 710013 - DNA, 25 bp, Homo sapien
aggtgggtctcaggatgccctctgc

SEQ ID NO: 710014 - DNA, 25 bp, Homo sapien
ctcaagaaaggtttgccacacaggg

SEQ ID NO: 710015 - DNA, 25 bp, Homo sapien
agctggtgcccattgacacactccc

SEQ ID NO: 710016 - DNA, 25 bp, Homo sapien
cctggcccttgtccttcagatgtgc

SEQ ID NO: 710017 - DNA, 25 bp, Homo sapien
ggagaaggtcccttgcaacagctgg

SEQ ID NO: 710018 - DNA, 25 bp, Homo sapien
cacccccagccccatggccagcaat

SEQ ID NO: 710019 - DNA, 25 bp, Homo sapien
ctagccaccaacagccacccccagc

SEQ ID NO: 710020 - DNA, 25 bp, Homo sapien
cccccagccccatggccagcaatgg

SEQ ID NO: 710021 - DNA, 25 bp, Homo sapien
cccagccccatggccagcaatggca

SEQ ID NO: 710022 - DNA, 25 bp, Homo sapien
cttgcttgctaccagataacctcgt

SEQ ID NO: 710023 - DNA, 25 bp, Homo sapien
gataacctcgttcaggggttggcaa

SEQ ID NO: 710024 - DNA, 25 bp, Homo sapien
tgctttgtaatgctgcaaactcaac

SEQ ID NO: 710025 - DNA, 25 bp, Homo sapien
tggcaaacttgctttgtaatgctgc

SEQ ID NO: 710026 - DNA, 25 bp, Homo sapien
ccagcctttacccacattatttctt

SEQ ID NO: 710027 - DNA, 25 bp, Homo sapien
cgcccagcctttacccacattattt

SEQ ID NO: 710028 - DNA, 25 bp, Homo sapien
cagcctttacccacattatttcttt

SEQ ID NO: 710029 - DNA, 25 bp, Homo sapien
cacgcccagcctttacccacattat

SEQ ID NO: 710030 - DNA, 25 bp, Homo sapien
gccgcttactggctgaaagacttta

SEQ ID NO: 710031 - DNA, 25 bp, Homo sapien
tcatgctaagtgagtgctacccaca

SEQ ID NO: 710032 - DNA, 25 bp, Homo sapien
gatacaagataccattgcccgtgtg

SEQ ID NO: 710033 - DNA, 25 bp, Homo sapien
tgcccgtgtgtaccagacatcatgc

SEQ ID NO: 710034 - DNA, 25 bp, Homo sapien
cggcgagggtgagggcgacttttga

SEQ ID NO: 710035 - DNA, 25 bp, Homo sapien
caccgaagtgggagggtgctcgcgg

SEQ ID NO: 710036 - DNA, 25 bp, Homo sapien
tttttgaaggagagcaatgcgagcc

SEQ ID NO: 710037 - DNA, 25 bp, Homo sapien
taacggaagcctgggtgattagcgc

SEQ ID NO: 710038 - DNA, 25 bp, Homo sapien
ctgggagccggaagcgggaagccgc

SEQ ID NO: 710039 - DNA, 25 bp, Homo sapien
aagccgcgcgaggagagcagcgcat

SEQ ID NO: 710040 - DNA, 25 bp, Homo sapien
gggaagccgcgcgaggagagcagcg

SEQ ID NO: 710041 - DNA, 25 bp, Homo sapien
tgggagccggaagcgggaagccgcg

SEQ ID NO: 710042 - DNA, 25 bp, Homo sapien
ccgatcgcccgcaggccgctctccg

SEQ ID NO: 710043 - DNA, 25 bp, Homo sapien
gccactctcgcagccgcctccgatg

SEQ ID NO: 710044 - DNA, 25 bp, Homo sapien
cccccagatccacagtagctagcag

SEQ ID NO: 710045 - DNA, 25 bp, Homo sapien
gcctccgatgcctccgtccggcccc

SEQ ID NO: 710046 - DNA, 25 bp, Homo sapien
cccgggcgctcctgaacgaggagca

SEQ ID NO: 710047 - DNA, 25 bp, Homo sapien
tctcctggaggagagtaagccgtag

SEQ ID NO: 710048 - DNA, 25 bp, Homo sapien
gagcctccatgcattgaaggagcag

SEQ ID NO: 710049 - DNA, 25 bp, Homo sapien
tgtggtgggttccattccatccctg

SEQ ID NO: 710050 - DNA, 25 bp, Homo sapien
tgctccggggtgtgagggttctccc

SEQ ID NO: 710051 - DNA, 25 bp, Homo sapien
gagggctgtctgctccggggtgtga

SEQ ID NO: 710052 - DNA, 25 bp, Homo sapien
cacccaaacgctccctgccagggag

SEQ ID NO: 710053 - DNA, 25 bp, Homo sapien
tttgcacccaaacgctccctgccag

SEQ ID NO: 710054 - DNA, 25 bp, Homo sapien
caaaacgaaacatgtaaggaccagg

SEQ ID NO: 710055 - DNA, 25 bp, Homo sapien
gtccgcaatgaaagcaccaactgag

SEQ ID NO: 710056 - DNA, 25 bp, Homo sapien
cagtacctgggtgacgagatcagtc

SEQ ID NO: 710057 - DNA, 25 bp, Homo sapien
tgtaagtggagctaaaccttgggta

SEQ ID NO: 710058 - DNA, 25 bp, Homo sapien
tctgcctcccgagttcaagtgattc

SEQ ID NO: 710059 - DNA, 25 bp, Homo sapien
ggcccgatcgcggctcactgcaact

SEQ ID NO: 710060 - DNA, 25 bp, Homo sapien
tgattcccctgcctcagcctccaga

SEQ ID NO: 710061 - DNA, 25 bp, Homo sapien
ggaaagtttgccatatgccagacac

SEQ ID NO: 710062 - DNA, 25 bp, Homo sapien
tgttaacctaaacatccaagcctgg

SEQ ID NO: 710063 - DNA, 25 bp, Homo sapien
gaagttacacggctaacaggtggtg

SEQ ID NO: 710064 - DNA, 25 bp, Homo sapien
gcctgggagcattcgcatatgcaaa

SEQ ID NO: 710065 - DNA, 25 bp, Homo sapien
gaagggagagcctatttccaagaat

SEQ ID NO: 710066 - DNA, 25 bp, Homo sapien
ggcccctggcctactatatctaatt

SEQ ID NO: 710067 - DNA, 25 bp, Homo sapien
ggctcatgcagtctgggaactccca

SEQ ID NO: 710068 - DNA, 25 bp, Homo sapien
cctgatgtgcagaaggaaccggaat

SEQ ID NO: 710069 - DNA, 25 bp, Homo sapien
ttaattcaggtctagttacatagct

SEQ ID NO: 710070 - DNA, 25 bp, Homo sapien
tctagttacatagctgaaatcttcc

SEQ ID NO: 710071 - DNA, 25 bp, Homo sapien
tagttacatagctgaaatcttccag

SEQ ID NO: 710072 - DNA, 25 bp, Homo sapien
caggtctagttacatagctgaaatc

SEQ ID NO: 710073 - DNA, 25 bp, Homo sapien
tgggccacctggctccacccacccc

SEQ ID NO: 710074 - DNA, 25 bp, Homo sapien
ttcactctcccactctcctgggcca

SEQ ID NO: 710075 - DNA, 25 bp, Homo sapien
cagctaccaccagccttcactctcc

SEQ ID NO: 710076 - DNA, 25 bp, Homo sapien
tcctgggccacctggctccacccac

SEQ ID NO: 710077 - DNA, 25 bp, Homo sapien
ctgggtgcagggggcaagtgtgggc

SEQ ID NO: 710078 - DNA, 25 bp, Homo sapien
gggtgcagggggcaagtgtgggcgc

SEQ ID NO: 710079 - DNA, 25 bp, Homo sapien
ggtgcagggggcaagtgtgggcgca

SEQ ID NO: 710080 - DNA, 25 bp, Homo sapien
gtgcagggggcaagtgtgggcgcat

SEQ ID NO: 710081 - DNA, 25 bp, Homo sapien
gactaagtgtgggtacatctgggtt

SEQ ID NO: 710082 - DNA, 25 bp, Homo sapien
gggactaagtgtgggtacatctggg

SEQ ID NO: 710083 - DNA, 25 bp, Homo sapien
taagtgtgggtacatctgggttgta

SEQ ID NO: 710084 - DNA, 25 bp, Homo sapien
tggggggactaagtgtgggtacatc

SEQ ID NO: 710085 - DNA, 25 bp, Homo sapien
tggggtacagaggccgagtgtgggt

SEQ ID NO: 710086 - DNA, 25 bp, Homo sapien
ctggggtacagaggccgagtgtggg

SEQ ID NO: 710087 - DNA, 25 bp, Homo sapien
gtacagaggccgagtgtgggtgtat

SEQ ID NO: 710088 - DNA, 25 bp, Homo sapien
gggtacagaggccgagtgtgggtgt

SEQ ID NO: 710089 - DNA, 25 bp, Homo sapien
ggggtatgagggccgagtgtgagta

SEQ ID NO: 710090 - DNA, 25 bp, Homo sapien
tcaaagacataatcctgaggaacgg

SEQ ID NO: 710091 - DNA, 25 bp, Homo sapien
gaaacccgtgctgttcaagggccga

SEQ ID NO: 710092 - DNA, 25 bp, Homo sapien
tgtgtgtaactggactcacgcagct

SEQ ID NO: 710093 - DNA, 25 bp, Homo sapien
tccggcatatgggaaaagtcggccc

SEQ ID NO: 710094 - DNA, 25 bp, Homo sapien
ccggtaaacacgggcacggatggag

SEQ ID NO: 710095 - DNA, 25 bp, Homo sapien
aagatgtctggtttgggccaccgag

SEQ ID NO: 710096 - DNA, 25 bp, Homo sapien
cagaggcagaaccagcagggcttgg

SEQ ID NO: 710097 - DNA, 25 bp, Homo sapien
gcagggcttggtgccccggtaaaca

SEQ ID NO: 710098 - DNA, 25 bp, Homo sapien
gtcatctgtgcagaagtaataaatg

SEQ ID NO: 710099 - DNA, 25 bp, Homo sapien
tcactacctttttgatcatggccaa

SEQ ID NO: 710100 - DNA, 25 bp, Homo sapien
tcatggccaattaatgaccaggctc

SEQ ID NO: 710101 - DNA, 25 bp, Homo sapien
ccaggctcccctgagattgtttagt

SEQ ID NO: 710102 - DNA, 25 bp, Homo sapien
tccaatttcatacaagagcctccgt

SEQ ID NO: 710103 - DNA, 25 bp, Homo sapien
ctcaagaaagaaactccggcctggg

SEQ ID NO: 710104 - DNA, 25 bp, Homo sapien
gagcctccgtgagacgagattttgg

SEQ ID NO: 710105 - DNA, 25 bp, Homo sapien
cattaccaaattgcttttcccaagg

SEQ ID NO: 710106 - DNA, 25 bp, Homo sapien
gaaactgggtgtgggtaccatgaat

SEQ ID NO: 710107 - DNA, 25 bp, Homo sapien
tagtcatcagttattaatgtgcggg

SEQ ID NO: 710108 - DNA, 25 bp, Homo sapien
aattattcccaagcaatagtttcct

SEQ ID NO: 710109 - DNA, 25 bp, Homo sapien
ccaagtgcaatgtgggagcctgagc

SEQ ID NO: 710110 - DNA, 25 bp, Homo sapien
ttaccgcagttacgaattcctgggc

SEQ ID NO: 710111 - DNA, 25 bp, Homo sapien
gtggcacagacttagcttaccgcag

SEQ ID NO: 710112 - DNA, 25 bp, Homo sapien
atagtacacaggcacgatcacggct

SEQ ID NO: 710113 - DNA, 25 bp, Homo sapien
agctgggattatggccgcccacatc

SEQ ID NO: 710114 - DNA, 25 bp, Homo sapien
tgtggtaattcgtagcaacaggtac

SEQ ID NO: 710115 - DNA, 25 bp, Homo sapien
caagcacctcggtttcaaggcctgg

SEQ ID NO: 710116 - DNA, 25 bp, Homo sapien
gagagtgcaacctggctctagagag

SEQ ID NO: 710117 - DNA, 25 bp, Homo sapien
tattgagtgcttcttgcattccagg

SEQ ID NO: 710118 - DNA, 25 bp, Homo sapien
ggccctagtccataagtctccagtt

SEQ ID NO: 710119 - DNA, 25 bp, Homo sapien
agaattgcctgtcttaaattgcaga

SEQ ID NO: 710120 - DNA, 25 bp, Homo sapien
ggcagctgggccctagtccataagt

SEQ ID NO: 710121 - DNA, 25 bp, Homo sapien
agttttctgcaaaggactattcaag

SEQ ID NO: 710122 - DNA, 25 bp, Homo sapien
tgggccagtgtacccggacctgata

SEQ ID NO: 710123 - DNA, 25 bp, Homo sapien
gggccagtgtacccggacctgatat

SEQ ID NO: 710124 - DNA, 25 bp, Homo sapien
catgggccagtgtacccggacctga

SEQ ID NO: 710125 - DNA, 25 bp, Homo sapien
ggcatgggccagtgtacccggacct

SEQ ID NO: 710126 - DNA, 25 bp, Homo sapien
taagatcatgaaacggtgagcctgg

SEQ ID NO: 710127 - DNA, 25 bp, Homo sapien
gcctcggtgggatccttctagaaaa

SEQ ID NO: 710128 - DNA, 25 bp, Homo sapien
gaattctagcatcgaagtggacgcg

SEQ ID NO: 710129 - DNA, 25 bp, Homo sapien
ggtcatcagcactcgaacagaattc

SEQ ID NO: 710130 - DNA, 25 bp, Homo sapien
cctgtccccgcttttggagtgcgca

SEQ ID NO: 710131 - DNA, 25 bp, Homo sapien
gcagcacagacaggatcttggaggt

SEQ ID NO: 710132 - DNA, 25 bp, Homo sapien
ggtcagcagctcgttatccaagaag

SEQ ID NO: 710133 - DNA, 25 bp, Homo sapien
gaaagagccgtaaaaagacagctcg

SEQ ID NO: 710134 - DNA, 25 bp, Homo sapien
accgacattcctggacagggccggg

SEQ ID NO: 710135 - DNA, 25 bp, Homo sapien
cgacattcctggacagggccgggct

SEQ ID NO: 710136 - DNA, 25 bp, Homo sapien
ggctgccatcggacaggagggtgcc

SEQ ID NO: 710137 - DNA, 25 bp, Homo sapien
ggccgggctgccatcggacaggagg

SEQ ID NO: 710138 - DNA, 25 bp, Homo sapien
gaccccctttctgagagaccgtcat

SEQ ID NO: 710139 - DNA, 25 bp, Homo sapien
ggaccccctttctgagagaccgtca

SEQ ID NO: 710140 - DNA, 25 bp, Homo sapien
ctacaaaaatggactcggtgtttgg

SEQ ID NO: 710141 - DNA, 25 bp, Homo sapien
aatggactcggtgtttggagatgta

SEQ ID NO: 710142 - DNA, 25 bp, Homo sapien
gcagaatcggcttcatccatctctc

SEQ ID NO: 710143 - DNA, 25 bp, Homo sapien
ttttaaaaacgcagaatcggcttca

SEQ ID NO: 710144 - DNA, 25 bp, Homo sapien
caggactcagcttcaaactcgtggc

SEQ ID NO: 710145 - DNA, 25 bp, Homo sapien
gactcaatctcactcctcagcgagg

SEQ ID NO: 710146 - DNA, 25 bp, Homo sapien
tcttttgcttcttggcgtaggctgc

SEQ ID NO: 710147 - DNA, 25 bp, Homo sapien
cgtaggctgcatccacggcgaggct

SEQ ID NO: 710148 - DNA, 25 bp, Homo sapien
gaggtcgccgattttctggatgaca

SEQ ID NO: 710149 - DNA, 25 bp, Homo sapien
gatgacataattccggtcactgccc

SEQ ID NO: 710150 - DNA, 25 bp, Homo sapien
tgatcttgagcgtccgcacgtggtg

SEQ ID NO: 710151 - DNA, 25 bp, Homo sapien
gagtacaccttcagcatgatcttga

SEQ ID NO: 710152 - DNA, 25 bp, Homo sapien
ggctcaggctaaagagcaatggcgc

SEQ ID NO: 710153 - DNA, 25 bp, Homo sapien
cgatgctcctgctgtagtctcccaa

SEQ ID NO: 710154 - DNA, 25 bp, Homo sapien
aagcgatgctcctgctgtagtctcc

SEQ ID NO: 710155 - DNA, 25 bp, Homo sapien
tggctcaggctaaagagcaatggcg

SEQ ID NO: 710156 - DNA, 25 bp, Homo sapien
tggccactacaaaacacaccgtact

SEQ ID NO: 710157 - DNA, 25 bp, Homo sapien
taacagcttcattgtggccactaca

SEQ ID NO: 710158 - DNA, 25 bp, Homo sapien
gcagcaacttgtaatgactaacagc

SEQ ID NO: 710159 - DNA, 25 bp, Homo sapien
taatgactaacagcttcattgtggc

SEQ ID NO: 710160 - DNA, 25 bp, Homo sapien
gtgttctggatgatgcgctccacca

SEQ ID NO: 710161 - DNA, 25 bp, Homo sapien
gtgtaaccaggagaatgcactcctg

SEQ ID NO: 710162 - DNA, 25 bp, Homo sapien
ctgggtatttggttatgcgttgtgt

SEQ ID NO: 710163 - DNA, 25 bp, Homo sapien
caagccgccgcacgatggagaagtt

SEQ ID NO: 710164 - DNA, 25 bp, Homo sapien
gccacacatagcagagttagcgtct

SEQ ID NO: 710165 - DNA, 25 bp, Homo sapien
cacatagcagagttagcgtctttct

SEQ ID NO: 710166 - DNA, 25 bp, Homo sapien
cacacatagcagagttagcgtcttt

SEQ ID NO: 710167 - DNA, 25 bp, Homo sapien
ctgccacacatagcagagttagcgt

SEQ ID NO: 710168 - DNA, 25 bp, Homo sapien
ggcgtccacttgtgagatgatatct

SEQ ID NO: 710169 - DNA, 25 bp, Homo sapien
catgtcttccttgcggaaggtgagc

SEQ ID NO: 710170 - DNA, 25 bp, Homo sapien
tttgatgaggttcaaggcctgggtc

SEQ ID NO: 710171 - DNA, 25 bp, Homo sapien
caagcgccctgatgtggtcttccag

SEQ ID NO: 710172 - DNA, 25 bp, Homo sapien
tagaggtgggcaggggcaggccttt

SEQ ID NO: 710173 - DNA, 25 bp, Homo sapien
actagaggtgggcaggggcaggcct

SEQ ID NO: 710174 - DNA, 25 bp, Homo sapien
ccactagaggtgggcaggggcaggc

SEQ ID NO: 710175 - DNA, 25 bp, Homo sapien
gaggtgggcaggggcaggcctttac

SEQ ID NO: 710176 - DNA, 25 bp, Homo sapien
ctggcaggcagaaggcgctaaacct

SEQ ID NO: 710177 - DNA, 25 bp, Homo sapien
cgcctggcaggcagaaggcgctaaa

SEQ ID NO: 710178 - DNA, 25 bp, Homo sapien
catccaactcggcgcctggcaggca

SEQ ID NO: 710179 - DNA, 25 bp, Homo sapien
tggcaggcagaaggcgctaaacctg

SEQ ID NO: 710180 - DNA, 25 bp, Homo sapien
ctgggaaaacagcatggaaggatgc

SEQ ID NO: 710181 - DNA, 25 bp, Homo sapien
tgggaaaacagcatggaaggatgca

SEQ ID NO: 710182 - DNA, 25 bp, Homo sapien
gggaaaacagcatggaaggatgcat

SEQ ID NO: 710183 - DNA, 25 bp, Homo sapien
agtacgtcggtcagcaggatagcca

SEQ ID NO: 710184 - DNA, 25 bp, Homo sapien
gcaaaagtacgtcggtcagcaggat

SEQ ID NO: 710185 - DNA, 25 bp, Homo sapien
tagcagcaaaagtacgtcggtcagc

SEQ ID NO: 710186 - DNA, 25 bp, Homo sapien
tcttgtagcagcaaaagtacgtcgg

SEQ ID NO: 710187 - DNA, 25 bp, Homo sapien
cttttgtaacgagatgacgggtggc

SEQ ID NO: 710188 - DNA, 25 bp, Homo sapien
cgttggccacttccctcacgatgag

SEQ ID NO: 710189 - DNA, 25 bp, Homo sapien
cccttgcaaggaggcgctgatcaga

SEQ ID NO: 710190 - DNA, 25 bp, Homo sapien
gatgtgggccatccaggcgttcctg

SEQ ID NO: 710191 - DNA, 25 bp, Homo sapien
cttgaaagtcccggagtctcgtggc

SEQ ID NO: 710192 - DNA, 25 bp, Homo sapien
tgaaagtcccggagtctcgtggcgc

SEQ ID NO: 710193 - DNA, 25 bp, Homo sapien
tggcgcgggcctcgaccaccttcct

SEQ ID NO: 710194 - DNA, 25 bp, Homo sapien
agtctcgtggcgcgggcctcgacca

SEQ ID NO: 710195 - DNA, 25 bp, Homo sapien
ttctctaggaggctctgtgcgatca

SEQ ID NO: 710196 - DNA, 25 bp, Homo sapien
tctgtgcgatcagctggtctttcat

SEQ ID NO: 710197 - DNA, 25 bp, Homo sapien
gatgggtcccctccacggaataggc

SEQ ID NO: 710198 - DNA, 25 bp, Homo sapien
tctccaggtagatctgctgtttctc

SEQ ID NO: 710199 - DNA, 25 bp, Homo sapien
tgtgtgccgtgggatttcagcccca

SEQ ID NO: 710200 - DNA, 25 bp, Homo sapien
actgtccctgcgcacacccttactt

SEQ ID NO: 710201 - DNA, 25 bp, Homo sapien
tgccgtgggatttcagccccactgt

SEQ ID NO: 710202 - DNA, 25 bp, Homo sapien
acacccttacttcaggtatggccac

SEQ ID NO: 710203 - DNA, 25 bp, Homo sapien
tccgtcttccgcctggccgttggcg

SEQ ID NO: 710204 - DNA, 25 bp, Homo sapien
ggctgtttgtgcagtcgtagcccgc

SEQ ID NO: 710205 - DNA, 25 bp, Homo sapien
gctgcctgcagatcaggctctggat

SEQ ID NO: 710206 - DNA, 25 bp, Homo sapien
gtcgtagcccgcgaaggtctcagcc

SEQ ID NO: 710207 - DNA, 25 bp, Homo sapien
agtgctgctgactttcttcttgaaa

SEQ ID NO: 710208 - DNA, 25 bp, Homo sapien
tgagcttcaagtccgggctgtttgg

SEQ ID NO: 710209 - DNA, 25 bp, Homo sapien
cacctgcggcgattcctcagagctc

SEQ ID NO: 710210 - DNA, 25 bp, Homo sapien
gaatgtcactgtcactgagcttcaa

SEQ ID NO: 710211 - DNA, 25 bp, Homo sapien
cggctgaaagctggtggtccctgta

SEQ ID NO: 710212 - DNA, 25 bp, Homo sapien
ggctgaaagctggtggtccctgtag

SEQ ID NO: 710213 - DNA, 25 bp, Homo sapien
ctgaaagctggtggtccctgtaggg

SEQ ID NO: 710214 - DNA, 25 bp, Homo sapien
cccggctgaaagctggtggtccctg

SEQ ID NO: 710215 - DNA, 25 bp, Homo sapien
ggcaaaggaatagccggggacatct

SEQ ID NO: 710216 - DNA, 25 bp, Homo sapien
aaggcaaaggaatagccggggacat

SEQ ID NO: 710217 - DNA, 25 bp, Homo sapien
aaaggaatagccggggacatctggc

SEQ ID NO: 710218 - DNA, 25 bp, Homo sapien
aggaatagccggggacatctggcat

SEQ ID NO: 710219 - DNA, 25 bp, Homo sapien
cagacggggatcggattccgtgcct

SEQ ID NO: 710220 - DNA, 25 bp, Homo sapien
caggacggtgggcagacggggatcg

SEQ ID NO: 710221 - DNA, 25 bp, Homo sapien
gatcggattccgtgcctggcgcctc

SEQ ID NO: 710222 - DNA, 25 bp, Homo sapien
tgggcagacggggatcggattccgt

SEQ ID NO: 710223 - DNA, 25 bp, Homo sapien
acagtgtctggatccgctggacaag

SEQ ID NO: 710224 - DNA, 25 bp, Homo sapien
gcttctcgaagttgcgttgccgctc

SEQ ID NO: 710225 - DNA, 25 bp, Homo sapien
gcgtcgactgcagccggaactgctt

SEQ ID NO: 710226 - DNA, 25 bp, Homo sapien
cgcctggcgcggtgttctgcttctt

SEQ ID NO: 710227 - DNA, 25 bp, Homo sapien
gctgctgctcgtgccgcagctggct

SEQ ID NO: 710228 - DNA, 25 bp, Homo sapien
ctgcgtactctggccccacgccgga

SEQ ID NO: 710229 - DNA, 25 bp, Homo sapien
cagcccttccccgttgaagctggga

SEQ ID NO: 710230 - DNA, 25 bp, Homo sapien
ggcagcatgctcacacgagggccct

SEQ ID NO: 710231 - DNA, 25 bp, Homo sapien
cgtactctggccccacgccggatgg

SEQ ID NO: 710232 - DNA, 25 bp, Homo sapien
gtccttgccacccttggtggaggcc

SEQ ID NO: 710233 - DNA, 25 bp, Homo sapien
gctcttggccagccggttctcggtg

SEQ ID NO: 710234 - DNA, 25 bp, Homo sapien
tgagcagctggatgggcacatcgct

SEQ ID NO: 710235 - DNA, 25 bp, Homo sapien
tggaactggttggtggcgctgagca

SEQ ID NO: 710236 - DNA, 25 bp, Homo sapien
tgtctgccgggcaggatagggctca

SEQ ID NO: 710237 - DNA, 25 bp, Homo sapien
atagggctcagcgagcggcggttcc

SEQ ID NO: 710238 - DNA, 25 bp, Homo sapien
agctgctgcttcaggtcgaaggacg

SEQ ID NO: 710239 - DNA, 25 bp, Homo sapien
cggcggttccgtgaggtgctctcat

SEQ ID NO: 710240 - DNA, 25 bp, Homo sapien
ctcggaggggctgtcagctggcggt

SEQ ID NO: 710241 - DNA, 25 bp, Homo sapien
tcggaggggctgtcagctggcggtg

SEQ ID NO: 710242 - DNA, 25 bp, Homo sapien
cggaggggctgtcagctggcggtgg

SEQ ID NO: 710243 - DNA, 25 bp, Homo sapien
tagaagaagatgacgtcttctttgc

SEQ ID NO: 710244 - DNA, 25 bp, Homo sapien
gtcttctttgctggcgtcctccttg

SEQ ID NO: 710245 - DNA, 25 bp, Homo sapien
ggcgctgagtggtgtggccggcagt

SEQ ID NO: 710246 - DNA, 25 bp, Homo sapien
cgtcctccttggcgctgagtggtgt

SEQ ID NO: 710247 - DNA, 25 bp, Homo sapien
ttcagaaagtgaccccggcaccacc

SEQ ID NO: 710248 - DNA, 25 bp, Homo sapien
accgctaaccctacagaaacagctg

SEQ ID NO: 710249 - DNA, 25 bp, Homo sapien
agtggtttgctagggaagaggaggg

SEQ ID NO: 710250 - DNA, 25 bp, Homo sapien
cctgccaggcggtcatcagtggttt

SEQ ID NO: 710251 - DNA, 25 bp, Homo sapien
tcctcactgcctcggaaaaacagct

SEQ ID NO: 710252 - DNA, 25 bp, Homo sapien
aacagctcggagttgatctccccgc

SEQ ID NO: 710253 - DNA, 25 bp, Homo sapien
gctccctggtttagttctggctcaa

SEQ ID NO: 710254 - DNA, 25 bp, Homo sapien
ggtgctatgatttcagacagctccc

SEQ ID NO: 710255 - DNA, 25 bp, Homo sapien
ggccggcagctccttctcaaagcaa

SEQ ID NO: 710256 - DNA, 25 bp, Homo sapien
ttggctccactgtcgcgcggcggct

SEQ ID NO: 710257 - DNA, 25 bp, Homo sapien
ggcggctgtggagcgtggccccggc

SEQ ID NO: 710258 - DNA, 25 bp, Homo sapien
ctgtcctcagctccgtgcagagccg

SEQ ID NO: 710259 - DNA, 25 bp, Homo sapien
ctctgtttgggaagtggattctgcc

SEQ ID NO: 710260 - DNA, 25 bp, Homo sapien
gctctgtttgggaagtggattctgc

SEQ ID NO: 710261 - DNA, 25 bp, Homo sapien
tggctcattccctgaccctgaggtt

SEQ ID NO: 710262 - DNA, 25 bp, Homo sapien
tcatggtgaacctgcgtggggctct

SEQ ID NO: 710263 - DNA, 25 bp, Homo sapien
acagcaacggttgcccttgggaagc

SEQ ID NO: 710264 - DNA, 25 bp, Homo sapien
aaaggtcagcccctttcacgatggg

SEQ ID NO: 710265 - DNA, 25 bp, Homo sapien
tgtacccgccctggctgaagctaga

SEQ ID NO: 710266 - DNA, 25 bp, Homo sapien
actgatgttccctcagtgggccctg

SEQ ID NO: 710267 - DNA, 25 bp, Homo sapien
cagaacaaggcttgacatgggccct

SEQ ID NO: 710268 - DNA, 25 bp, Homo sapien
gaacggaccgtaagctgcaacagct

SEQ ID NO: 710269 - DNA, 25 bp, Homo sapien
tgcaacagctcactacaagcgaggg

SEQ ID NO: 710270 - DNA, 25 bp, Homo sapien
ggatggatctcaccaccctgggatg

SEQ ID NO: 710271 - DNA, 25 bp, Homo sapien
tattcagcgtcacaggagtgcctct

SEQ ID NO: 710272 - DNA, 25 bp, Homo sapien
gaccttgtcaccaatgggctgtatg

SEQ ID NO: 710273 - DNA, 25 bp, Homo sapien
gagcacttcctgatggagtttcccc

SEQ ID NO: 710274 - DNA, 25 bp, Homo sapien
gggctcacatgtaccccactgggaa

SEQ ID NO: 710275 - DNA, 25 bp, Homo sapien
gtgtgcagatcccacgaaaatagga

SEQ ID NO: 710276 - DNA, 25 bp, Homo sapien
ccgcgtggccgagcagaaattcctt

SEQ ID NO: 710277 - DNA, 25 bp, Homo sapien
ggtcagaaatatcccgcagtgagga

SEQ ID NO: 710278 - DNA, 25 bp, Homo sapien
aacatggcacacatgggatctgacg

SEQ ID NO: 710279 - DNA, 25 bp, Homo sapien
gtcatcctgataaagaaaggccggg

SEQ ID NO: 710280 - DNA, 25 bp, Homo sapien
ggcttatcgtcactgtgtcatcctg

SEQ ID NO: 710281 - DNA, 25 bp, Homo sapien
tgtttttcacaaggaatccccatct

SEQ ID NO: 710282 - DNA, 25 bp, Homo sapien
tgaggacttggacccgggttcctgc

SEQ ID NO: 710283 - DNA, 25 bp, Homo sapien
tcaagggatggcgtgtgaatcaatg

SEQ ID NO: 710284 - DNA, 25 bp, Homo sapien
gggatggcgtgtgaatcaatgagtt

SEQ ID NO: 710285 - DNA, 25 bp, Homo sapien
atggcgtgtgaatcaatgagtttta

SEQ ID NO: 710286 - DNA, 25 bp, Homo sapien
caagggatggcgtgtgaatcaatga

SEQ ID NO: 710287 - DNA, 25 bp, Homo sapien
gcctgtggccatcgcgggacaccag

SEQ ID NO: 710288 - DNA, 25 bp, Homo sapien
ggcgcctgtggccatcgcgggacac

SEQ ID NO: 710289 - DNA, 25 bp, Homo sapien
gggcacgggcgcgagcacggcagga

SEQ ID NO: 710290 - DNA, 25 bp, Homo sapien
cgggcgcgagcacggcaggagggcg

SEQ ID NO: 710291 - DNA, 25 bp, Homo sapien
cagcgcgggtccattgggaaaagca

SEQ ID NO: 710292 - DNA, 25 bp, Homo sapien
aagtcccggtgcgacgtggtgcgca

SEQ ID NO: 710293 - DNA, 25 bp, Homo sapien
ggatgcgcaacttgtcgcggtcgcc

SEQ ID NO: 710294 - DNA, 25 bp, Homo sapien
cgtcctcgtgcaggtgcaggttgcc

SEQ ID NO: 710295 - DNA, 25 bp, Homo sapien
tctctccgtctctcttttattttgg

SEQ ID NO: 710296 - DNA, 25 bp, Homo sapien
caccaggtcaggctgaattttgtat

SEQ ID NO: 710297 - DNA, 25 bp, Homo sapien
aggaacgcaccaccaggtcaggctg

SEQ ID NO: 710298 - DNA, 25 bp, Homo sapien
aacgcaccaccaggtcaggctgaat

SEQ ID NO: 710299 - DNA, 25 bp, Homo sapien
ggaagtcccatcttgtctcgtgtag

SEQ ID NO: 710300 - DNA, 25 bp, Homo sapien
ggcctggaactgtctttggtaggaa

SEQ ID NO: 710301 - DNA, 25 bp, Homo sapien
ggtaggaagtcccatcttgtctcgt

SEQ ID NO: 710302 - DNA, 25 bp, Homo sapien
tcgtgtagtcccacttgagggtgtt

SEQ ID NO: 710303 - DNA, 25 bp, Homo sapien
gatcctggggcctgtaggcctgttt

SEQ ID NO: 710304 - DNA, 25 bp, Homo sapien
ccatagctgatcttgcagtctccca

SEQ ID NO: 710305 - DNA, 25 bp, Homo sapien
cacgttgatccatagctgatcttgc

SEQ ID NO: 710306 - DNA, 25 bp, Homo sapien
tctgctccgaacacgttgatccata

SEQ ID NO: 710307 - DNA, 25 bp, Homo sapien
ctccctggcatagaagtgctcggcc

SEQ ID NO: 710308 - DNA, 25 bp, Homo sapien
tggcatagaagtgctcggccttggt

SEQ ID NO: 710309 - DNA, 25 bp, Homo sapien
gacggatatttacacagtggatgtg

SEQ ID NO: 710310 - DNA, 25 bp, Homo sapien
gtcctgtcgcggaagaggccgtcac

SEQ ID NO: 710311 - DNA, 25 bp, Homo sapien
tgccagaagcggaacaggtgcagag

SEQ ID NO: 710312 - DNA, 25 bp, Homo sapien
ctgccagaagcggaacaggtgcaga

SEQ ID NO: 710313 - DNA, 25 bp, Homo sapien
ccggagtctgatcgtggtgaagaac

SEQ ID NO: 710314 - DNA, 25 bp, Homo sapien
ttcaggatgtgcgactccggagtct

SEQ ID NO: 710315 - DNA, 25 bp, Homo sapien
gcatgaaggtgtccagactgccggg

SEQ ID NO: 710316 - DNA, 25 bp, Homo sapien
ctggccgtagaagtactgcatgaag

SEQ ID NO: 710317 - DNA, 25 bp, Homo sapien
catggtggtcttgaagaagcgtttg

SEQ ID NO: 710318 - DNA, 25 bp, Homo sapien
tctgaagggcagtagtccgagccca

SEQ ID NO: 710319 - DNA, 25 bp, Homo sapien
gagtagctttggctcccctagggtc

SEQ ID NO: 710320 - DNA, 25 bp, Homo sapien
caagtggaggttgggcgctttctgc

SEQ ID NO: 710321 - DNA, 25 bp, Homo sapien
ggctgagggtgtggtgaagttcaag

SEQ ID NO: 710322 - DNA, 25 bp, Homo sapien
ctgggaaagaggtaggcgctgggga

SEQ ID NO: 710323 - DNA, 25 bp, Homo sapien
agttgaccaggggagaaaaatggat

SEQ ID NO: 710324 - DNA, 25 bp, Homo sapien
aggccagcgctgaagttgaccaggg

SEQ ID NO: 710325 - DNA, 25 bp, Homo sapien
tggagattcaggttggggaggctga

SEQ ID NO: 710326 - DNA, 25 bp, Homo sapien
gagattcaggttggggaggctgagt

SEQ ID NO: 710327 - DNA, 25 bp, Homo sapien
attcaggttggggaggctgagtgag

SEQ ID NO: 710328 - DNA, 25 bp, Homo sapien
ctggagattcaggttggggaggctg

SEQ ID NO: 710329 - DNA, 25 bp, Homo sapien
ccggaggtgttctgtgtggcttcag

SEQ ID NO: 710330 - DNA, 25 bp, Homo sapien
tagcatctcttcagtcaccggggcc

SEQ ID NO: 710331 - DNA, 25 bp, Homo sapien
tgtgttgagaagaagcgcagtccac

SEQ ID NO: 710332 - DNA, 25 bp, Homo sapien
tgaaaggaaactcgtccttgtattg

SEQ ID NO: 710333 - DNA, 25 bp, Homo sapien
cgtccttgtattgtgttgagaagaa

SEQ ID NO: 710334 - DNA, 25 bp, Homo sapien
gaagaagcgcagtccacccagaggg

SEQ ID NO: 710335 - DNA, 25 bp, Homo sapien
aagccctcctgaggatttttcagtc

SEQ ID NO: 710336 - DNA, 25 bp, Homo sapien
gggaccagagggtctatcttctccc

SEQ ID NO: 710337 - DNA, 25 bp, Homo sapien
ctgcagccgcgctggtgaggcgtgc

SEQ ID NO: 710338 - DNA, 25 bp, Homo sapien
cagagggtctatcttctccctgcag

SEQ ID NO: 710339 - DNA, 25 bp, Homo sapien
ccgcaggaagccccccgcccgccag

SEQ ID NO: 710340 - DNA, 25 bp, Homo sapien
cgccggcggccccctcggcccagcg

SEQ ID NO: 710341 - DNA, 25 bp, Homo sapien
cctcgcccctgcccggcccgccgcg

SEQ ID NO: 710342 - DNA, 25 bp, Homo sapien
gcgcccgcgccggccgccggctccc

SEQ ID NO: 710343 - DNA, 25 bp, Homo sapien
ggatgggtgcgctaggccggagctg

SEQ ID NO: 710344 - DNA, 25 bp, Homo sapien
gccggagctggccgcagagtcccct

SEQ ID NO: 710345 - DNA, 25 bp, Homo sapien
ccccagcggcgggatgggtgcgcta

SEQ ID NO: 710346 - DNA, 25 bp, Homo sapien
ggcgggatgggtgcgctaggccgga

SEQ ID NO: 710347 - DNA, 25 bp, Homo sapien
gctcctcttgtgggaagctggggtc

SEQ ID NO: 710348 - DNA, 25 bp, Homo sapien
ggctcctcttgtgggaagctggggt

SEQ ID NO: 710349 - DNA, 25 bp, Homo sapien
tgggctcctcttgtgggaagctggg

SEQ ID NO: 710350 - DNA, 25 bp, Homo sapien
ctgggctcctcttgtgggaagctgg

SEQ ID NO: 710351 - DNA, 25 bp, Homo sapien
gccccaaacctggacggaggtcatg

SEQ ID NO: 710352 - DNA, 25 bp, Homo sapien
ggtcatgagacccagcactagaggt

SEQ ID NO: 710353 - DNA, 25 bp, Homo sapien
gagatttctgacttaccccagccag

SEQ ID NO: 710354 - DNA, 25 bp, Homo sapien
ccaggtgggacatggtaggaccctc

SEQ ID NO: 710355 - DNA, 25 bp, Homo sapien
gcaagggcaaggatagagggtagag

SEQ ID NO: 710356 - DNA, 25 bp, Homo sapien
ctgcaagggcaaggatagagggtag

SEQ ID NO: 710357 - DNA, 25 bp, Homo sapien
gggcaaggatagagggtagagggta

SEQ ID NO: 710358 - DNA, 25 bp, Homo sapien
caaggatagagggtagagggtaggt

SEQ ID NO: 710359 - DNA, 25 bp, Homo sapien
ttcaggcgtggatgtgcccgcagct

SEQ ID NO: 710360 - DNA, 25 bp, Homo sapien
caggcgtggatgtgcccgcagcttc

SEQ ID NO: 710361 - DNA, 25 bp, Homo sapien
tcaggcgtggatgtgcccgcagctt

SEQ ID NO: 710362 - DNA, 25 bp, Homo sapien
cagaaaccgggtccagatcttcagg

SEQ ID NO: 710363 - DNA, 25 bp, Homo sapien
gatcttcaggattggggtctaggtc

SEQ ID NO: 710364 - DNA, 25 bp, Homo sapien
cttcataaacgggtctcaggccttt

SEQ ID NO: 710365 - DNA, 25 bp, Homo sapien
aggtcctcggagtcagagtcgagct

SEQ ID NO: 710366 - DNA, 25 bp, Homo sapien
cagatcttcatagctggggtccacg

SEQ ID NO: 710367 - DNA, 25 bp, Homo sapien
tccagatcttcatagctggggtcca

SEQ ID NO: 710368 - DNA, 25 bp, Homo sapien
agatcttcatagctggggtccacgt

SEQ ID NO: 710369 - DNA, 25 bp, Homo sapien
atcttcatagctggggtccacgtct

SEQ ID NO: 710370 - DNA, 25 bp, Homo sapien
ggagcttcggcgtcggggtccagat

SEQ ID NO: 710371 - DNA, 25 bp, Homo sapien
agcttcggcgtcggggtccagatcc

SEQ ID NO: 710372 - DNA, 25 bp, Homo sapien
ttccgagcccggagcttcggcgtcg

SEQ ID NO: 710373 - DNA, 25 bp, Homo sapien
cttcggcgtcggggtccagatcctc

SEQ ID NO: 710374 - DNA, 25 bp, Homo sapien
gggccaatcacatctggatcgaggt

SEQ ID NO: 710375 - DNA, 25 bp, Homo sapien
tcgctgttaggatcgagaatcaggg

SEQ ID NO: 710376 - DNA, 25 bp, Homo sapien
tccacttttggatcgccggggctga

SEQ ID NO: 710377 - DNA, 25 bp, Homo sapien
gatcgaggtcgaaactcgaagacat

SEQ ID NO: 710378 - DNA, 25 bp, Homo sapien
cggcggaaggctcgcccgcaatccg

SEQ ID NO: 710379 - DNA, 25 bp, Homo sapien
tgcggcggaaggctcgcccgcaatc

SEQ ID NO: 710380 - DNA, 25 bp, Homo sapien
ctgcggcggaaggctcgcccgcaat

SEQ ID NO: 710381 - DNA, 25 bp, Homo sapien
gcggaaggctcgcccgcaatccggg

SEQ ID NO: 710382 - DNA, 25 bp, Homo sapien
gtggcaccgtggctgaaggacttcc

SEQ ID NO: 710383 - DNA, 25 bp, Homo sapien
aagttggagctctgcccgaaggctt

SEQ ID NO: 710384 - DNA, 25 bp, Homo sapien
gctcgcccgaatgcacgtgcaggtg

SEQ ID NO: 710385 - DNA, 25 bp, Homo sapien
cgatgtttcagcagcgtggagcgcc

SEQ ID NO: 710386 - DNA, 25 bp, Homo sapien
ggatccggcagagtgcccggcccag

SEQ ID NO: 710387 - DNA, 25 bp, Homo sapien
gctgaggcccaagccagagccgagc

SEQ ID NO: 710388 - DNA, 25 bp, Homo sapien
gggtttggagctgggatccggcaga

SEQ ID NO: 710389 - DNA, 25 bp, Homo sapien
atggatgcagggcttaggccaggcc

SEQ ID NO: 710390 - DNA, 25 bp, Homo sapien
cacaaggtcgggaccagcgtcgtgc

SEQ ID NO: 710391 - DNA, 25 bp, Homo sapien
acagtgccacgagtgggagaacagg

SEQ ID NO: 710392 - DNA, 25 bp, Homo sapien
actctggactctcgccggtagggag

SEQ ID NO: 710393 - DNA, 25 bp, Homo sapien
gggctgggctgacagtgccacgagt

SEQ ID NO: 710394 - DNA, 25 bp, Homo sapien
ttttactgactgcacaacacacaac

SEQ ID NO: 710395 - DNA, 25 bp, Homo sapien
aggcccccgaggatgccggcgtctc

SEQ ID NO: 710396 - DNA, 25 bp, Homo sapien
ggattttactgactgcacaacacac

SEQ ID NO: 710397 - DNA, 25 bp, Homo sapien
tactgactgcacaacacacaacttc

SEQ ID NO: 710398 - DNA, 25 bp, Homo sapien
agagtggtgactagtgggatggacc

SEQ ID NO: 710399 - DNA, 25 bp, Homo sapien
gatggaccaggatgagacactgtgg

SEQ ID NO: 710400 - DNA, 25 bp, Homo sapien
cactgtgggttaagctggaaagtct

SEQ ID NO: 710401 - DNA, 25 bp, Homo sapien
cacttgtatacctactgtatgggct

SEQ ID NO: 710402 - DNA, 25 bp, Homo sapien
ttcaaaccctccggcatcagctgat

SEQ ID NO: 710403 - DNA, 25 bp, Homo sapien
ggcagcctgggtccgatcgcccgcc

SEQ ID NO: 710404 - DNA, 25 bp, Homo sapien
acctcgctccctcgcggcgcggctt

SEQ ID NO: 710405 - DNA, 25 bp, Homo sapien
gatcgcccgccgctgtcactgcgac

SEQ ID NO: 710406 - DNA, 25 bp, Homo sapien
tgagccgcgcggacccgccggggct

SEQ ID NO: 710407 - DNA, 25 bp, Homo sapien
ctgagccgcgcggacccgccggggc

SEQ ID NO: 710408 - DNA, 25 bp, Homo sapien
ccgcgcggacccgccggggctgtca

SEQ ID NO: 710409 - DNA, 25 bp, Homo sapien
agccgcgcggacccgccggggctgt

SEQ ID NO: 710410 - DNA, 25 bp, Homo sapien
tgaggcctgggcaactccccttttc

SEQ ID NO: 710411 - DNA, 25 bp, Homo sapien
ctgtgggaataggagagggcactgg

SEQ ID NO: 710412 - DNA, 25 bp, Homo sapien
gaaggcagcacacgccctatcttca

SEQ ID NO: 710413 - DNA, 25 bp, Homo sapien
caggaaggcagcacacgccctatct

SEQ ID NO: 710414 - DNA, 25 bp, Homo sapien
gctcgaaacttgtcgcagggactca

SEQ ID NO: 710415 - DNA, 25 bp, Homo sapien
cgcagggactcatgaaaaagtattt

SEQ ID NO: 710416 - DNA, 25 bp, Homo sapien
ggcttgcggcccttggctcgaaact

SEQ ID NO: 710417 - DNA, 25 bp, Homo sapien
aaaagtatttgagacgacggcgaag

SEQ ID NO: 710418 - DNA, 25 bp, Homo sapien
gagggtagtagaggttggcatggct

SEQ ID NO: 710419 - DNA, 25 bp, Homo sapien
agtagaggttggcatggctaggatg

SEQ ID NO: 710420 - DNA, 25 bp, Homo sapien
gggagagggtagtagaggttggcat

SEQ ID NO: 710421 - DNA, 25 bp, Homo sapien
ctggggagagggtagtagaggttgg

SEQ ID NO: 710422 - DNA, 25 bp, Homo sapien
ctccgtccgagtagcccagcaggaa

SEQ ID NO: 710423 - DNA, 25 bp, Homo sapien
gcaggaagaggtgtcggaaggcgat

SEQ ID NO: 710424 - DNA, 25 bp, Homo sapien
tgtcggaaggcgatggtgttctctt

SEQ ID NO: 710425 - DNA, 25 bp, Homo sapien
cgtgtaggctgcgaaggtgtcatcc

SEQ ID NO: 710426 - DNA, 25 bp, Homo sapien
acggacatacgcataccggcccagt

SEQ ID NO: 710427 - DNA, 25 bp, Homo sapien
cagtaaccaccatcggatcaatgtc

SEQ ID NO: 710428 - DNA, 25 bp, Homo sapien
tggtagtaccgctggcagagagcaa

SEQ ID NO: 710429 - DNA, 25 bp, Homo sapien
gagagcaagccctgagccattggtc

SEQ ID NO: 710430 - DNA, 25 bp, Homo sapien
cagctgttgattttaatcccagcag

SEQ ID NO: 710431 - DNA, 25 bp, Homo sapien
acagctgttgattttaatcccagca

SEQ ID NO: 710432 - DNA, 25 bp, Homo sapien
ctgttgattttaatcccagcagctc

SEQ ID NO: 710433 - DNA, 25 bp, Homo sapien
gctgttgattttaatcccagcagct

SEQ ID NO: 710434 - DNA, 25 bp, Homo sapien
ttccaagagggtgagatcgtcgctg

SEQ ID NO: 710435 - DNA, 25 bp, Homo sapien
ttgtggaatttgagcgtgaggttct

SEQ ID NO: 710436 - DNA, 25 bp, Homo sapien
gctcggggggatccacctggatgca

SEQ ID NO: 710437 - DNA, 25 bp, Homo sapien
tgagcgtgaggttcttgtaactgga

SEQ ID NO: 710438 - DNA, 25 bp, Homo sapien
ggcccccctcgagtgagcaggcagt

SEQ ID NO: 710439 - DNA, 25 bp, Homo sapien
gcccccctcgagtgagcaggcagta

SEQ ID NO: 710440 - DNA, 25 bp, Homo sapien
tgggcccccctcgagtgagcaggca

SEQ ID NO: 710441 - DNA, 25 bp, Homo sapien
cctgggcccccctcgagtgagcagg

SEQ ID NO: 710442 - DNA, 25 bp, Homo sapien
tgagagtgcctagtgtgctgcctcc

SEQ ID NO: 710443 - DNA, 25 bp, Homo sapien
gggtgagagtgcctagtgtgctgcc

SEQ ID NO: 710444 - DNA, 25 bp, Homo sapien
cttagggaagtagttgctggggtga

SEQ ID NO: 710445 - DNA, 25 bp, Homo sapien
agagtgcctagtgtgctgcctcccc

SEQ ID NO: 710446 - DNA, 25 bp, Homo sapien
ggcaggggaagtgctcacccagcag

SEQ ID NO: 710447 - DNA, 25 bp, Homo sapien
tgagggtcaggggcgtcttcgggtc

SEQ ID NO: 710448 - DNA, 25 bp, Homo sapien
gccagcgtcccctgccacgtgctga

SEQ ID NO: 710449 - DNA, 25 bp, Homo sapien
cccttccggccccaagtgccagcgt

SEQ ID NO: 710450 - DNA, 25 bp, Homo sapien
taggcaggaggctcgggtgagggtc

SEQ ID NO: 710451 - DNA, 25 bp, Homo sapien
tcagccggaagtggatggtgacatt

SEQ ID NO: 710452 - DNA, 25 bp, Homo sapien
ggaggttaatggtcttcagccggaa

SEQ ID NO: 710453 - DNA, 25 bp, Homo sapien
gatctcattattgatgaggctctgg

SEQ ID NO: 710454 - DNA, 25 bp, Homo sapien
caggacgctgaaggtatagcagtcc

SEQ ID NO: 710455 - DNA, 25 bp, Homo sapien
ttgggggcagagtaaaccttggcag

SEQ ID NO: 710456 - DNA, 25 bp, Homo sapien
tcatcacccgcacgcttgcccttgg

SEQ ID NO: 710457 - DNA, 25 bp, Homo sapien
cacatgacaggtggcctgacagacc

SEQ ID NO: 710458 - DNA, 25 bp, Homo sapien
acaggtggcctgacagaccccgggc

SEQ ID NO: 710459 - DNA, 25 bp, Homo sapien
ccgcccactgtgtgctttgttgtca

SEQ ID NO: 710460 - DNA, 25 bp, Homo sapien
ggtgcttacactcctggatgtgggc

SEQ ID NO: 710461 - DNA, 25 bp, Homo sapien
tggaagacactggggtgcttacact

SEQ ID NO: 710462 - DNA, 25 bp, Homo sapien
caggctgatggggatccgcccactg

SEQ ID NO: 710463 - DNA, 25 bp, Homo sapien
gatctgaggctcagcggattcctgg

SEQ ID NO: 710464 - DNA, 25 bp, Homo sapien
gccttgggaggctagcattggtgcc

SEQ ID NO: 710465 - DNA, 25 bp, Homo sapien
ggtgagtcaagaaccccggtcagtg

SEQ ID NO: 710466 - DNA, 25 bp, Homo sapien
ctgcacggctggttttggttggtca

SEQ ID NO: 710467 - DNA, 25 bp, Homo sapien
gaagcctcgaaggagtgagcgggcg

SEQ ID NO: 710468 - DNA, 25 bp, Homo sapien
ggatgaccaccacgtcaaacaggag

SEQ ID NO: 710469 - DNA, 25 bp, Homo sapien
cagcaggaagcctcgaaggagtgag

SEQ ID NO: 710470 - DNA, 25 bp, Homo sapien
tgaccaccacgtcaaacaggagccg

SEQ ID NO: 710471 - DNA, 25 bp, Homo sapien
aagccctggcttttatcgccccagg

SEQ ID NO: 710472 - DNA, 25 bp, Homo sapien
gccctggcttttatcgccccagggc

SEQ ID NO: 710473 - DNA, 25 bp, Homo sapien
caaagccctggcttttatcgcccca

SEQ ID NO: 710474 - DNA, 25 bp, Homo sapien
tcaaagccctggcttttatcgcccc

SEQ ID NO: 710475 - DNA, 25 bp, Homo sapien
cctcgatgccgatcttcatgatggt

SEQ ID NO: 710476 - DNA, 25 bp, Homo sapien
tggtgcccgagatggtgagcacatc

SEQ ID NO: 710477 - DNA, 25 bp, Homo sapien
gacgagcaggatgtaccagccattg

SEQ ID NO: 710478 - DNA, 25 bp, Homo sapien
agatggtgagcacatcgctggtgac

SEQ ID NO: 710479 - DNA, 25 bp, Homo sapien
agctgcgtcaacctatctggcccag

SEQ ID NO: 710480 - DNA, 25 bp, Homo sapien
gatatggccccggataggcactgac

SEQ ID NO: 710481 - DNA, 25 bp, Homo sapien
cgggtgggagctgcgtcaacctatc

SEQ ID NO: 710482 - DNA, 25 bp, Homo sapien
cccggataggcactgacagcaggga

SEQ ID NO: 710483 - DNA, 25 bp, Homo sapien
attgtagttgtggaagaaggtcagg

SEQ ID NO: 710484 - DNA, 25 bp, Homo sapien
ggtcaggtagcggatcacgcccacc

SEQ ID NO: 710485 - DNA, 25 bp, Homo sapien
gaggatgctgcagacgtcgtagctc

SEQ ID NO: 710486 - DNA, 25 bp, Homo sapien
tgcagacgtcgtagctcgccaagtt

SEQ ID NO: 710487 - DNA, 25 bp, Homo sapien
gtgcagtgacagatatatctggtgt

SEQ ID NO: 710488 - DNA, 25 bp, Homo sapien
caggtgcagtgacagatatatctgg

SEQ ID NO: 710489 - DNA, 25 bp, Homo sapien
ggtgcagtgacagatatatctggtg

SEQ ID NO: 710490 - DNA, 25 bp, Homo sapien
aggtgcagtgacagatatatctggt

SEQ ID NO: 710491 - DNA, 25 bp, Homo sapien
ggcagagggagcctcgttgagggtg

SEQ ID NO: 710492 - DNA, 25 bp, Homo sapien
ttggggcagagggagcctcgttgag

SEQ ID NO: 710493 - DNA, 25 bp, Homo sapien
agggagcctcgttgagggtgtggcc

SEQ ID NO: 710494 - DNA, 25 bp, Homo sapien
cagagggagcctcgttgagggtgtg

SEQ ID NO: 710495 - DNA, 25 bp, Homo sapien
aggtagatgacagccacgcagcagc

SEQ ID NO: 710496 - DNA, 25 bp, Homo sapien
cacagaagcagtagcccaggtagat

SEQ ID NO: 710497 - DNA, 25 bp, Homo sapien
ccacccgcagtgtggcgatgaggat

SEQ ID NO: 710498 - DNA, 25 bp, Homo sapien
cagcagaagcgcatgacgctgggca

SEQ ID NO: 710499 - DNA, 25 bp, Homo sapien
caaacatgtcgtccccattgatgag

SEQ ID NO: 710500 - DNA, 25 bp, Homo sapien
gatgagcgagaacaggcactcagac

SEQ ID NO: 710501 - DNA, 25 bp, Homo sapien
tggcggcgaacgtcacaaacatgtc

SEQ ID NO: 710502 - DNA, 25 bp, Homo sapien
taaaggtagagctgggagaagagcc

SEQ ID NO: 710503 - DNA, 25 bp, Homo sapien
agcgcgatgaagaggctgagcacca

SEQ ID NO: 710504 - DNA, 25 bp, Homo sapien
cgtaggcgccggtgatgagcgcgat

SEQ ID NO: 710505 - DNA, 25 bp, Homo sapien
cttgatggtgtcgtaggcgccggtg

SEQ ID NO: 710506 - DNA, 25 bp, Homo sapien
gaagaggctgagcaccatgtagatg

SEQ ID NO: 710507 - DNA, 25 bp, Homo sapien
tcttctctgttcaccctgcggtgtc

SEQ ID NO: 710508 - DNA, 25 bp, Homo sapien
tgttcaccctgcggtgtccccaaga

SEQ ID NO: 710509 - DNA, 25 bp, Homo sapien
ggtcttctctgttcaccctgcggtg

SEQ ID NO: 710510 - DNA, 25 bp, Homo sapien
ctgggtcttctctgttcaccctgcg

SEQ ID NO: 710511 - DNA, 25 bp, Homo sapien
gccatatctgcatcgcttcccacct

SEQ ID NO: 710512 - DNA, 25 bp, Homo sapien
tctgcatcgcttcccacctccgggc

SEQ ID NO: 710513 - DNA, 25 bp, Homo sapien
ccatatctgcatcgcttcccacctc

SEQ ID NO: 710514 - DNA, 25 bp, Homo sapien
cagccatatctgcatcgcttcccac

SEQ ID NO: 710515 - DNA, 25 bp, Homo sapien
cgcggcggaacttgccggaggtggg

SEQ ID NO: 710516 - DNA, 25 bp, Homo sapien
tggcactgtgcgatgtaggcctgca

SEQ ID NO: 710517 - DNA, 25 bp, Homo sapien
gctgtcctggcactgtgcgatgtag

SEQ ID NO: 710518 - DNA, 25 bp, Homo sapien
gctcccgcggcggaacttgccggag

SEQ ID NO: 710519 - DNA, 25 bp, Homo sapien
caatctgaatgtgccagacccggga

SEQ ID NO: 710520 - DNA, 25 bp, Homo sapien
ctccaatctgaatgtgccagacccg

SEQ ID NO: 710521 - DNA, 25 bp, Homo sapien
ccaatctgaatgtgccagacccggg

SEQ ID NO: 710522 - DNA, 25 bp, Homo sapien
aatctgaatgtgccagacccgggac

SEQ ID NO: 710523 - DNA, 25 bp, Homo sapien
cagcagcgaatgctcctccgagggg

SEQ ID NO: 710524 - DNA, 25 bp, Homo sapien
gcctacggtccaacggcagtcaggt

SEQ ID NO: 710525 - DNA, 25 bp, Homo sapien
acggtccaacggcagtcaggtcgaa

SEQ ID NO: 710526 - DNA, 25 bp, Homo sapien
cagtccagggcctacggtccaacgg

SEQ ID NO: 710527 - DNA, 25 bp, Homo sapien
agggcctacggtccaacggcagtca

SEQ ID NO: 710528 - DNA, 25 bp, Homo sapien
cagggagccgatccttaaaagcaaa

SEQ ID NO: 710529 - DNA, 25 bp, Homo sapien
tcctcgggcgcgacagggagccgat

SEQ ID NO: 710530 - DNA, 25 bp, Homo sapien
ggcgcgacagggagccgatccttaa

SEQ ID NO: 710531 - DNA, 25 bp, Homo sapien
caagggtccgacacgaaaggtccag

SEQ ID NO: 710532 - DNA, 25 bp, Homo sapien
tccccgcgccatgcttggaaggccg

SEQ ID NO: 710533 - DNA, 25 bp, Homo sapien
cctcctccccgcgccatgcttggaa

SEQ ID NO: 710534 - DNA, 25 bp, Homo sapien
tcctccccgcgccatgcttggaagg

SEQ ID NO: 710535 - DNA, 25 bp, Homo sapien
cccgcgccatgcttggaaggccgac

SEQ ID NO: 710536 - DNA, 25 bp, Homo sapien
accgctagcgttccgcccggctccg

SEQ ID NO: 710537 - DNA, 25 bp, Homo sapien
gcgccaacaccgctagcgttccgcc

SEQ ID NO: 710538 - DNA, 25 bp, Homo sapien
tccactccgcgccaacaccgctagc

SEQ ID NO: 710539 - DNA, 25 bp, Homo sapien
gcagccggggtccactccgcgccaa

SEQ ID NO: 710540 - DNA, 25 bp, Homo sapien
tcgctaacgaccctcgaagggacac

SEQ ID NO: 710541 - DNA, 25 bp, Homo sapien
ggaaagcggaggctcgctaacgacc

SEQ ID NO: 710542 - DNA, 25 bp, Homo sapien
gacacccctgcgaggctaacggaaa

SEQ ID NO: 710543 - DNA, 25 bp, Homo sapien
caggaatcggaggacagatcgtggg

SEQ ID NO: 710544 - DNA, 25 bp, Homo sapien
cagctggctaccggtgtggaaacac

SEQ ID NO: 710545 - DNA, 25 bp, Homo sapien
gcacagctggctaccggtgtggaaa

SEQ ID NO: 710546 - DNA, 25 bp, Homo sapien
acagctggctaccggtgtggaaaca

SEQ ID NO: 710547 - DNA, 25 bp, Homo sapien
cacagctggctaccggtgtggaaac

SEQ ID NO: 710548 - DNA, 25 bp, Homo sapien
cgggagataggaatcccggagactc

SEQ ID NO: 710549 - DNA, 25 bp, Homo sapien
gggagataggaatcccggagactcc

SEQ ID NO: 710550 - DNA, 25 bp, Homo sapien
aggatgtttctgacatcgctagaat

SEQ ID NO: 710551 - DNA, 25 bp, Homo sapien
ctgacatcgctagaatattaatgga

SEQ ID NO: 710552 - DNA, 25 bp, Homo sapien
cactggaaagttactgagattctga

SEQ ID NO: 710553 - DNA, 25 bp, Homo sapien
cattcctggggtgcttatgagagcg

SEQ ID NO: 710554 - DNA, 25 bp, Homo sapien
cagagacgctgggattagtgggtgg

SEQ ID NO: 710555 - DNA, 25 bp, Homo sapien
ccttggaagatactgagagatgctg

SEQ ID NO: 710556 - DNA, 25 bp, Homo sapien
ctccgggaccgatggtggcgccatt

SEQ ID NO: 710557 - DNA, 25 bp, Homo sapien
tgcaaggcgctgctggtttttgccg

SEQ ID NO: 710558 - DNA, 25 bp, Homo sapien
gggctctatggcacagagcatcact

SEQ ID NO: 710559 - DNA, 25 bp, Homo sapien
gggatttactatcacgtagtagtga

SEQ ID NO: 710560 - DNA, 25 bp, Homo sapien
tgtcagcagcctgcaggcaggtccc

SEQ ID NO: 710561 - DNA, 25 bp, Homo sapien
agggcacggtcctctgcacctggtg

SEQ ID NO: 710562 - DNA, 25 bp, Homo sapien
gtccccacagggcacggtcctctgc

SEQ ID NO: 710563 - DNA, 25 bp, Homo sapien
tgcacctggtgacttcctcccgggt

SEQ ID NO: 710564 - DNA, 25 bp, Homo sapien
gtggcgggggaagcgtctccagctg

SEQ ID NO: 710565 - DNA, 25 bp, Homo sapien
agctggacggccgatctggtagccc

SEQ ID NO: 710566 - DNA, 25 bp, Homo sapien
acggccgatctggtagcccggagtc

SEQ ID NO: 710567 - DNA, 25 bp, Homo sapien
gattccagctggacggccgatctgg

SEQ ID NO: 710568 - DNA, 25 bp, Homo sapien
cggttgattccagctggacggccga

SEQ ID NO: 710569 - DNA, 25 bp, Homo sapien
ttccagtttgcagcggagcctccat

SEQ ID NO: 710570 - DNA, 25 bp, Homo sapien
cattccagtttgcagcggagcctcc

SEQ ID NO: 710571 - DNA, 25 bp, Homo sapien
attccagtttgcagcggagcctcca

SEQ ID NO: 710572 - DNA, 25 bp, Homo sapien
ttatcgccagaccacgtaatgcgcg

SEQ ID NO: 710573 - DNA, 25 bp, Homo sapien
tgcatgccgggaaacgtagttccgc

SEQ ID NO: 710574 - DNA, 25 bp, Homo sapien
cggacgcagcgcgttatcgccagac

SEQ ID NO: 710575 - DNA, 25 bp, Homo sapien
gtagttccgcccgagcggacgcagc

SEQ ID NO: 710576 - DNA, 25 bp, Homo sapien
ttcgcccccgaggagttcgtagcca

SEQ ID NO: 710577 - DNA, 25 bp, Homo sapien
gtagccagcccgtgactcgatgtcc

SEQ ID NO: 710578 - DNA, 25 bp, Homo sapien
ggcgccaggacgtcctggaacccat

SEQ ID NO: 710579 - DNA, 25 bp, Homo sapien
ggacgaacggcactggctgcgcacc

SEQ ID NO: 710580 - DNA, 25 bp, Homo sapien
caccgccactccggccccgatcatc

SEQ ID NO: 710581 - DNA, 25 bp, Homo sapien
gtgaccaccaccgccactccggccc

SEQ ID NO: 710582 - DNA, 25 bp, Homo sapien
tgaccaccaccgccactccggcccc

SEQ ID NO: 710583 - DNA, 25 bp, Homo sapien
ccgccactccggccccgatcatcac

SEQ ID NO: 710584 - DNA, 25 bp, Homo sapien
ggccatagaagagcactttgtccct

SEQ ID NO: 710585 - DNA, 25 bp, Homo sapien
agagcactttgtccctcttccggaa

SEQ ID NO: 710586 - DNA, 25 bp, Homo sapien
taatcttccggccatagaagagcac

SEQ ID NO: 710587 - DNA, 25 bp, Homo sapien
ttccgcataatcttccggccataga

SEQ ID NO: 710588 - DNA, 25 bp, Homo sapien
ttcttggcaatgttgagcatcttca

SEQ ID NO: 710589 - DNA, 25 bp, Homo sapien
gacagaggtatccacgagggaggag

SEQ ID NO: 710590 - DNA, 25 bp, Homo sapien
agtttcttcctcatgcgtggccggg

SEQ ID NO: 710591 - DNA, 25 bp, Homo sapien
tcttcctcatgcgtggccgggaggt

SEQ ID NO: 710592 - DNA, 25 bp, Homo sapien
caggactattgatcatggagagccc

SEQ ID NO: 710593 - DNA, 25 bp, Homo sapien
gaaaattcataagatagcccctagg

SEQ ID NO: 710594 - DNA, 25 bp, Homo sapien
tagactacatgacgcacagggatcc

SEQ ID NO: 710595 - DNA, 25 bp, Homo sapien
gagacagcctccttagtgtgggaag

SEQ ID NO: 710596 - DNA, 25 bp, Homo sapien
cagatgggagttagccaggtcgccc

SEQ ID NO: 710597 - DNA, 25 bp, Homo sapien
cggacgttcttgagcatataaagca

SEQ ID NO: 710598 - DNA, 25 bp, Homo sapien
caggtcagcttctagcactgcgggc

SEQ ID NO: 710599 - DNA, 25 bp, Homo sapien
taaagcacttcagagggcagatggg

SEQ ID NO: 710600 - DNA, 25 bp, Homo sapien
cagagctccaggaagagtggcttct

SEQ ID NO: 710601 - DNA, 25 bp, Homo sapien
ctggcccggccggaagacgtagtca

SEQ ID NO: 710602 - DNA, 25 bp, Homo sapien
aagagtggcttctcgaagtggccca

SEQ ID NO: 710603 - DNA, 25 bp, Homo sapien
ccagccgctggaagaccatgtggcg

SEQ ID NO: 710604 - DNA, 25 bp, Homo sapien
ctgagaaggctgttgacgctgtccc

SEQ ID NO: 710605 - DNA, 25 bp, Homo sapien
tctccgggtacttggtgaagaccgc

SEQ ID NO: 710606 - DNA, 25 bp, Homo sapien
cgcaccaagctctccgggtacttgg

SEQ ID NO: 710607 - DNA, 25 bp, Homo sapien
gcccgggcagacacggtccgctggg

SEQ ID NO: 710608 - DNA, 25 bp, Homo sapien
tgaagaccgcggagaatgcttccac

SEQ ID NO: 710609 - DNA, 25 bp, Homo sapien
ctcgaggggcgtggccataagatgg

SEQ ID NO: 710610 - DNA, 25 bp, Homo sapien
gggcgtggccataagatggggcggg

SEQ ID NO: 710611 - DNA, 25 bp, Homo sapien
ctgcagggctcgaggggcgtggcca

SEQ ID NO: 710612 - DNA, 25 bp, Homo sapien
ggctcgaggggcgtggccataagat

SEQ ID NO: 710613 - DNA, 25 bp, Homo sapien
caggaaggtgactcgctgcagccgc

SEQ ID NO: 710614 - DNA, 25 bp, Homo sapien
ttggtcagacccaggtagttgtgca

SEQ ID NO: 710615 - DNA, 25 bp, Homo sapien
gtggctgaagagctcattggtcaga

SEQ ID NO: 710616 - DNA, 25 bp, Homo sapien
gaagagctcattggtcagacccagg

SEQ ID NO: 710617 - DNA, 25 bp, Homo sapien
ggctggtgcgagttgggaggccggg

SEQ ID NO: 710618 - DNA, 25 bp, Homo sapien
ggtctccctgggctcgtctgtagct

SEQ ID NO: 710619 - DNA, 25 bp, Homo sapien
tccctgggctcgtctgtagctgagg

SEQ ID NO: 710620 - DNA, 25 bp, Homo sapien
ctcgtctgtagctgaggtgctgacc

SEQ ID NO: 710621 - DNA, 25 bp, Homo sapien
gtcccctggcatggagacgcagcgg

SEQ ID NO: 710622 - DNA, 25 bp, Homo sapien
cccctggcatggagacgcagcggct

SEQ ID NO: 710623 - DNA, 25 bp, Homo sapien
ctggcatggagacgcagcggctcag

SEQ ID NO: 710624 - DNA, 25 bp, Homo sapien
cctggcatggagacgcagcggctca

SEQ ID NO: 710625 - DNA, 25 bp, Homo sapien
acgctcataggccatgtcgaagtcg

SEQ ID NO: 710626 - DNA, 25 bp, Homo sapien
cggagatccggccacgctcataggc

SEQ ID NO: 710627 - DNA, 25 bp, Homo sapien
ggccacgctcataggccatgtcgaa

SEQ ID NO: 710628 - DNA, 25 bp, Homo sapien
cataggccatgtcgaagtcggagcg

SEQ ID NO: 710629 - DNA, 25 bp, Homo sapien
tgctggtctggcggccctggtaggg

SEQ ID NO: 710630 - DNA, 25 bp, Homo sapien
tcctcacagtagctgtattcacagg

SEQ ID NO: 710631 - DNA, 25 bp, Homo sapien
ctggtagggcccgaaagggcagcca

SEQ ID NO: 710632 - DNA, 25 bp, Homo sapien
cagtggccgactcatcctcacagta

SEQ ID NO: 710633 - DNA, 25 bp, Homo sapien
gggggttgagatgggcgcagccagg

SEQ ID NO: 710634 - DNA, 25 bp, Homo sapien
ggtaggggggttgagatgggcgcag

SEQ ID NO: 710635 - DNA, 25 bp, Homo sapien
agccaggcctcccttgcgccctgtg

SEQ ID NO: 710636 - DNA, 25 bp, Homo sapien
caggcctcccttgcgccctgtgccc

SEQ ID NO: 710637 - DNA, 25 bp, Homo sapien
tttggcgtggtgcagcaagactctg

SEQ ID NO: 710638 - DNA, 25 bp, Homo sapien
caagactctgctgttcaggagggag

SEQ ID NO: 710639 - DNA, 25 bp, Homo sapien
tggtctccctggcgggcaatgatgg

SEQ ID NO: 710640 - DNA, 25 bp, Homo sapien
caatgatggtgccagctttggcgtg

SEQ ID NO: 710641 - DNA, 25 bp, Homo sapien
agaactttctagatcatctgccaca

SEQ ID NO: 710642 - DNA, 25 bp, Homo sapien
aactttctagatcatctgccacact

SEQ ID NO: 710643 - DNA, 25 bp, Homo sapien
gagaactttctagatcatctgccac

SEQ ID NO: 710644 - DNA, 25 bp, Homo sapien
cagagaactttctagatcatctgcc

SEQ ID NO: 710645 - DNA, 25 bp, Homo sapien
gagattaaaggtgcctgccacacgc

SEQ ID NO: 710646 - DNA, 25 bp, Homo sapien
cagctatctttagtggggttttttg

SEQ ID NO: 710647 - DNA, 25 bp, Homo sapien
agctcatcagctatctttagtgggg

SEQ ID NO: 710648 - DNA, 25 bp, Homo sapien
tcatcagctatctttagtggggttt

SEQ ID NO: 710649 - DNA, 25 bp, Homo sapien
cagagcacgaagtgcaggctcacgt

SEQ ID NO: 710650 - DNA, 25 bp, Homo sapien
gccttgtcgatcatgcgctggtaca

SEQ ID NO: 710651 - DNA, 25 bp, Homo sapien
agatgagaggttcgccagtgagcac

SEQ ID NO: 710652 - DNA, 25 bp, Homo sapien
ggctgcgctacgaacaggcacacgt

SEQ ID NO: 710653 - DNA, 25 bp, Homo sapien
ttggggtcctccgagtgccacccac

SEQ ID NO: 710654 - DNA, 25 bp, Homo sapien
gcgacatcctggctgccaccgtgtg

SEQ ID NO: 710655 - DNA, 25 bp, Homo sapien
cagtccagtcgatggcgaagtccat

SEQ ID NO: 710656 - DNA, 25 bp, Homo sapien
gtccatctggcgcacgaagggcgac

SEQ ID NO: 710657 - DNA, 25 bp, Homo sapien
tgcagtccagtcgatggcgaagtcc

SEQ ID NO: 710658 - DNA, 25 bp, Homo sapien
taagtgcagtcggagcggtcgccct

SEQ ID NO: 710659 - DNA, 25 bp, Homo sapien
gcagccgcccattgagcacgatgta

SEQ ID NO: 710660 - DNA, 25 bp, Homo sapien
tgcctcgctggatcacgctacgcag

SEQ ID NO: 710661 - DNA, 25 bp, Homo sapien
cattgagcacgatgtaagtgcagtc

SEQ ID NO: 710662 - DNA, 25 bp, Homo sapien
gatgatgtgtgtgagttgtcgaggg

SEQ ID NO: 710663 - DNA, 25 bp, Homo sapien
gatgtgtgtgagttgtcgagggact

SEQ ID NO: 710664 - DNA, 25 bp, Homo sapien
gtgtgtgagttgtcgagggactggc

SEQ ID NO: 710665 - DNA, 25 bp, Homo sapien
tgatgtgtgtgagttgtcgagggac

SEQ ID NO: 710666 - DNA, 25 bp, Homo sapien
gggtgtagggaagcaagcctcgctc

SEQ ID NO: 710667 - DNA, 25 bp, Homo sapien
aagcctcgctcgctacccattagag

SEQ ID NO: 710668 - DNA, 25 bp, Homo sapien
caatgggggtgtagggaagcaagcc

SEQ ID NO: 710669 - DNA, 25 bp, Homo sapien
agggaagcaagcctcgctcgctacc

SEQ ID NO: 710670 - DNA, 25 bp, Homo sapien
aagggggctgtactgccccatctag

SEQ ID NO: 710671 - DNA, 25 bp, Homo sapien
ctggggggccgcgtgcatgattggg

SEQ ID NO: 710672 - DNA, 25 bp, Homo sapien
ccgcgtgcatgattggggctgcttg

SEQ ID NO: 710673 - DNA, 25 bp, Homo sapien
ggctgtactgccccatctagggctc

SEQ ID NO: 710674 - DNA, 25 bp, Homo sapien
gggtaccggcgtttgatgtgaccca

SEQ ID NO: 710675 - DNA, 25 bp, Homo sapien
gcgggtaccggcgtttgatgtgacc

SEQ ID NO: 710676 - DNA, 25 bp, Homo sapien
tccgtgtcgcgcaccgcgtgcaccg

SEQ ID NO: 710677 - DNA, 25 bp, Homo sapien
gtgcaccgtcgtggctcgcggctgc

SEQ ID NO: 710678 - DNA, 25 bp, Homo sapien
aattttctggctcagtaggtggata

SEQ ID NO: 710679 - DNA, 25 bp, Homo sapien
gaattttctggctcagtaggtggat

SEQ ID NO: 710680 - DNA, 25 bp, Homo sapien
tgtcaactcccatatcttgcctaga

SEQ ID NO: 710681 - DNA, 25 bp, Homo sapien
ctacttttgacccagctgttgcttc

SEQ ID NO: 710682 - DNA, 25 bp, Homo sapien
ttgcctagacctcttgttgcctcct

SEQ ID NO: 710683 - DNA, 25 bp, Homo sapien
ccagtttctccactaacagcctaga

SEQ ID NO: 710684 - DNA, 25 bp, Homo sapien
gcaggattgccacagttgccaggtt

SEQ ID NO: 710685 - DNA, 25 bp, Homo sapien
cacacacaggcaggattgccacagt

SEQ ID NO: 710686 - DNA, 25 bp, Homo sapien
gctgggttggtgagttccgagtgtg

SEQ ID NO: 710687 - DNA, 25 bp, Homo sapien
agttccgagtgtgggggcacaccca

SEQ ID NO: 710688 - DNA, 25 bp, Homo sapien
ccccaggcgtgcccggatgatgtca

SEQ ID NO: 710689 - DNA, 25 bp, Homo sapien
ggcccccaggcgtgcccggatgatg

SEQ ID NO: 710690 - DNA, 25 bp, Homo sapien
ccaggcgtgcccggatgatgtcact

SEQ ID NO: 710691 - DNA, 25 bp, Homo sapien
tcactgttaaggagtagcgtcggac

SEQ ID NO: 710692 - DNA, 25 bp, Homo sapien
cggcctgtcgcaggcagcgcacggt

SEQ ID NO: 710693 - DNA, 25 bp, Homo sapien
ggcgtccgtctggtagagtacgata

SEQ ID NO: 710694 - DNA, 25 bp, Homo sapien
gagtacgatacggtgtgcatcctcc

SEQ ID NO: 710695 - DNA, 25 bp, Homo sapien
acggtccagggcgtcagcgaggcgt

SEQ ID NO: 710696 - DNA, 25 bp, Homo sapien
atcgcctacccccatggcgagggtg

SEQ ID NO: 710697 - DNA, 25 bp, Homo sapien
aatacggacggctgaggtcaccagc

SEQ ID NO: 710698 - DNA, 25 bp, Homo sapien
ctgcggaatacggacggctgaggtc

SEQ ID NO: 710699 - DNA, 25 bp, Homo sapien
acacctgggtccctgatcgcctacc

SEQ ID NO: 710700 - DNA, 25 bp, Homo sapien
ttaagggcgcgcacagccgtgttct

SEQ ID NO: 710701 - DNA, 25 bp, Homo sapien
tctcggtggagcaggactagctgct

SEQ ID NO: 710702 - DNA, 25 bp, Homo sapien
gcaccagctgcgcatatttagccac

SEQ ID NO: 710703 - DNA, 25 bp, Homo sapien
ctgcggcgcgaaaagaggcggcgcg

SEQ ID NO: 710704 - DNA, 25 bp, Homo sapien
caagcgggagaagtcgctgtgccgg

SEQ ID NO: 710705 - DNA, 25 bp, Homo sapien
ggagaaaaccttctcgtagagctca

SEQ ID NO: 710706 - DNA, 25 bp, Homo sapien
ccccgcctagcacaagggcaatggt

SEQ ID NO: 710707 - DNA, 25 bp, Homo sapien
atggtgttccccgtgagcaccctcg

SEQ ID NO: 710708 - DNA, 25 bp, Homo sapien
ccgcgtacaacgctccgatgaaaga

SEQ ID NO: 710709 - DNA, 25 bp, Homo sapien
ttagtactccgatgtgcgagcagcc

SEQ ID NO: 710710 - DNA, 25 bp, Homo sapien
cgcctcctctaatgcctttagtact

SEQ ID NO: 710711 - DNA, 25 bp, Homo sapien
tgaaagagccaatggacgtgccgcc

SEQ ID NO: 710712 - DNA, 25 bp, Homo sapien
tacgtgaggtccaacacaggttcca

SEQ ID NO: 710713 - DNA, 25 bp, Homo sapien
gacccgatggatgctgcggttaaag

SEQ ID NO: 710714 - DNA, 25 bp, Homo sapien
tgactgggtacgtgaggtccaacac

SEQ ID NO: 710715 - DNA, 25 bp, Homo sapien
gttaaaggcagacccagtgaacatg

SEQ ID NO: 710716 - DNA, 25 bp, Homo sapien
gacagggatcgaggtgggggaggag

SEQ ID NO: 710717 - DNA, 25 bp, Homo sapien
ctgcggggacagggatcgaggtggg

SEQ ID NO: 710718 - DNA, 25 bp, Homo sapien
ggacagggatcgaggtgggggagga

SEQ ID NO: 710719 - DNA, 25 bp, Homo sapien
tgcggggacagggatcgaggtgggg

SEQ ID NO: 710720 - DNA, 25 bp, Homo sapien
atctgtggtcacgttgaagtaaggc

SEQ ID NO: 710721 - DNA, 25 bp, Homo sapien
atctttgtggactcgcatggctgag

SEQ ID NO: 710722 - DNA, 25 bp, Homo sapien
tctgtggtcacgttgaagtaaggca

SEQ ID NO: 710723 - DNA, 25 bp, Homo sapien
catctttgtggactcgcatggctga

SEQ ID NO: 710724 - DNA, 25 bp, Homo sapien
gtgcccgtccttggggtcgcacagt

SEQ ID NO: 710725 - DNA, 25 bp, Homo sapien
cagtaggaggcgctggcccggacgt

SEQ ID NO: 710726 - DNA, 25 bp, Homo sapien
tggcccggacgtaacgccacacaca

SEQ ID NO: 710727 - DNA, 25 bp, Homo sapien
ttgttaacgtagcacccgtccacca

SEQ ID NO: 710728 - DNA, 25 bp, Homo sapien
gcccagccggcccgatgggctcgct

SEQ ID NO: 710729 - DNA, 25 bp, Homo sapien
cccagccggcccgatgggctcgctg

SEQ ID NO: 710730 - DNA, 25 bp, Homo sapien
ccagccggcccgatgggctcgctga

SEQ ID NO: 710731 - DNA, 25 bp, Homo sapien
cagccggcccgatgggctcgctgac

SEQ ID NO: 710732 - DNA, 25 bp, Homo sapien
gggacacacagacacaaacacgcac

SEQ ID NO: 710733 - DNA, 25 bp, Homo sapien
ggtgggacacacagacacaaacacg

SEQ ID NO: 710734 - DNA, 25 bp, Homo sapien
ctgcgcggtgggacacacagacaca

SEQ ID NO: 710735 - DNA, 25 bp, Homo sapien
tgcgcggtgggacacacagacacaa

SEQ ID NO: 710736 - DNA, 25 bp, Homo sapien
catccatgagtaggtgcccgtcctt

SEQ ID NO: 710737 - DNA, 25 bp, Homo sapien
aggtagcccgacagcgtcatgctgg

SEQ ID NO: 710738 - DNA, 25 bp, Homo sapien
ctggcagattgttgatgtagccgcc

SEQ ID NO: 710739 - DNA, 25 bp, Homo sapien
acagcgtcatgctggcgcgcacgta

SEQ ID NO: 710740 - DNA, 25 bp, Homo sapien
tggtgcgggaggtgcttgcgtgtgc

SEQ ID NO: 710741 - DNA, 25 bp, Homo sapien
tgcgggaggtgcttgcgtgtgcggg

SEQ ID NO: 710742 - DNA, 25 bp, Homo sapien
gcgtgtgtgtggtgcgggaggtgct

SEQ ID NO: 710743 - DNA, 25 bp, Homo sapien
gtgcttgcgtgtgcgggtggtgcgg

SEQ ID NO: 710744 - DNA, 25 bp, Homo sapien
caactgcacatgtcgctgtccacag

SEQ ID NO: 710745 - DNA, 25 bp, Homo sapien
cctggccagaatgtagatctcaact

SEQ ID NO: 710746 - DNA, 25 bp, Homo sapien
tgcaagtgatcgtatgtgtgcgcat

SEQ ID NO: 710747 - DNA, 25 bp, Homo sapien
gcttgggcatgtgtcccgtcatcga

SEQ ID NO: 710748 - DNA, 25 bp, Homo sapien
tgtgcacatccctgcgtgtttgagg

SEQ ID NO: 710749 - DNA, 25 bp, Homo sapien
gacttaactcggtcagaggtgccgc

SEQ ID NO: 710750 - DNA, 25 bp, Homo sapien
gaggtgccgcatcctatctacgtgt

SEQ ID NO: 710751 - DNA, 25 bp, Homo sapien
gaacgtgcaggacaaacgggacaga

SEQ ID NO: 710752 - DNA, 25 bp, Homo sapien
cacccctggcctacaagattgtgag

SEQ ID NO: 710753 - DNA, 25 bp, Homo sapien
cagttggcgtacatgtctgttcata

SEQ ID NO: 710754 - DNA, 25 bp, Homo sapien
cctggcctacaagattgtgagcatg

SEQ ID NO: 710755 - DNA, 25 bp, Homo sapien
tgagcatgtgtgcagttggcgtaca

SEQ ID NO: 710756 - DNA, 25 bp, Homo sapien
gccatgtctggaacctttaccttgt

SEQ ID NO: 710757 - DNA, 25 bp, Homo sapien
tagatctggtcgaacttcccaaagt

SEQ ID NO: 710758 - DNA, 25 bp, Homo sapien
ggcgatgaccgttttggcacccatg

SEQ ID NO: 710759 - DNA, 25 bp, Homo sapien
gctgtccccgtaggtgctgaggtcc

SEQ ID NO: 710760 - DNA, 25 bp, Homo sapien
gtagcaaagcttagccggaccacct

SEQ ID NO: 710761 - DNA, 25 bp, Homo sapien
ctttaagtagcaaagcttagccgga

SEQ ID NO: 710762 - DNA, 25 bp, Homo sapien
ttagccggaccacctatgcaggcac

SEQ ID NO: 710763 - DNA, 25 bp, Homo sapien
atgcaggcaccatgccactcctgcc

SEQ ID NO: 710764 - DNA, 25 bp, Homo sapien
aaatgaggggctgggtccatgtctg

SEQ ID NO: 710765 - DNA, 25 bp, Homo sapien
atgaggggctgggtccatgtctgca

SEQ ID NO: 710766 - DNA, 25 bp, Homo sapien
gaggggctgggtccatgtctgcaac

SEQ ID NO: 710767 - DNA, 25 bp, Homo sapien
aggggctgggtccatgtctgcaacc

SEQ ID NO: 710768 - DNA, 25 bp, Homo sapien
agaccgccggtctgtgagcattttc

SEQ ID NO: 710769 - DNA, 25 bp, Homo sapien
tgcacggcggctctcattaaggtct

SEQ ID NO: 710770 - DNA, 25 bp, Homo sapien
gccttcccgtactggtagcccacat

SEQ ID NO: 710771 - DNA, 25 bp, Homo sapien
tttctcaatgacgttgccacggctc

SEQ ID NO: 710772 - DNA, 25 bp, Homo sapien
agccatcagagacatagctcgtggg

SEQ ID NO: 710773 - DNA, 25 bp, Homo sapien
gcacagccatcagagacatagctcg

SEQ ID NO: 710774 - DNA, 25 bp, Homo sapien
agtcagtgaagccagagcttgggaa

SEQ ID NO: 710775 - DNA, 25 bp, Homo sapien
tccgggacacaatctctgccaagtc

SEQ ID NO: 710776 - DNA, 25 bp, Homo sapien
tcctcatactctgtcagacaatctg

SEQ ID NO: 710777 - DNA, 25 bp, Homo sapien
gagcagtcgggtccggcgtcctcct

SEQ ID NO: 710778 - DNA, 25 bp, Homo sapien
cccttcatccctcgagcagtcgggt

SEQ ID NO: 710779 - DNA, 25 bp, Homo sapien
tccctcgagcagtcgggtccggcgt

SEQ ID NO: 710780 - DNA, 25 bp, Homo sapien
tgccggagaatcgacttctcctcct

SEQ ID NO: 710781 - DNA, 25 bp, Homo sapien
gcagacagcgtcgttgccggagaat

SEQ ID NO: 710782 - DNA, 25 bp, Homo sapien
gacagcgtcgttgccggagaatcga

SEQ ID NO: 710783 - DNA, 25 bp, Homo sapien
cgtcgttgccggagaatcgacttct

SEQ ID NO: 710784 - DNA, 25 bp, Homo sapien
ggggtcacaggcatagcagcaggag

SEQ ID NO: 710785 - DNA, 25 bp, Homo sapien
ggagtgagctacccccacggggcca

SEQ ID NO: 710786 - DNA, 25 bp, Homo sapien
tccagtgtgtgggccgcgggggtca

SEQ ID NO: 710787 - DNA, 25 bp, Homo sapien
cgggggtcacaggcatagcagcagg

SEQ ID NO: 710788 - DNA, 25 bp, Homo sapien
ggaggggctggtcaagtcatcagtg

SEQ ID NO: 710789 - DNA, 25 bp, Homo sapien
ggtcaagtcatcagtgcaacactgc

SEQ ID NO: 710790 - DNA, 25 bp, Homo sapien
ctggtcaagtcatcagtgcaacact

SEQ ID NO: 710791 - DNA, 25 bp, Homo sapien
tggtcaagtcatcagtgcaacactg

SEQ ID NO: 710792 - DNA, 25 bp, Homo sapien
ccgttctggccggtcaaggaggctc

SEQ ID NO: 710793 - DNA, 25 bp, Homo sapien
tctggccggtcaaggaggctcatgc

SEQ ID NO: 710794 - DNA, 25 bp, Homo sapien
agataaaccgttctggccggtcaag

SEQ ID NO: 710795 - DNA, 25 bp, Homo sapien
gttctggccggtcaaggaggctcat

SEQ ID NO: 710796 - DNA, 25 bp, Homo sapien
gtcacagtgacccaaaacattccag

SEQ ID NO: 710797 - DNA, 25 bp, Homo sapien
tgttacagcggcataacctgacttg

SEQ ID NO: 710798 - DNA, 25 bp, Homo sapien
gacttgtcctgcctgatccattaca

SEQ ID NO: 710799 - DNA, 25 bp, Homo sapien
gcttcgacctcgcaaatagccgaga

SEQ ID NO: 710800 - DNA, 25 bp, Homo sapien
tatgtttatgttgcatttgttttat

SEQ ID NO: 710801 - DNA, 25 bp, Homo sapien
ctttatgtttatgttgcatttgttt

SEQ ID NO: 710802 - DNA, 25 bp, Homo sapien
tgtttatgttgcatttgttttataa

SEQ ID NO: 710803 - DNA, 25 bp, Homo sapien
tctttgggctcttacacctcctaac

SEQ ID NO: 710804 - DNA, 25 bp, Homo sapien
aactcattagacagagcctggttat

SEQ ID NO: 710805 - DNA, 25 bp, Homo sapien
gggctcttacacctcctaactcatt

SEQ ID NO: 710806 - DNA, 25 bp, Homo sapien
tcctaactcattagacagagcctgg

SEQ ID NO: 710807 - DNA, 25 bp, Homo sapien
cgccgggtccgcgctcggactgggc

SEQ ID NO: 710808 - DNA, 25 bp, Homo sapien
gccgggtccgcgctcggactgggct

SEQ ID NO: 710809 - DNA, 25 bp, Homo sapien
tggtccagcgacttgatctcgggca

SEQ ID NO: 710810 - DNA, 25 bp, Homo sapien
cgcgagaaatcgtactggtccagcg

SEQ ID NO: 710811 - DNA, 25 bp, Homo sapien
gcactagaaaggtcctccgcagcgg

SEQ ID NO: 710812 - DNA, 25 bp, Homo sapien
gccttggcccgcgagaaatcgtact

SEQ ID NO: 710813 - DNA, 25 bp, Homo sapien
cgcccccgaacgcggcccgcagcac

SEQ ID NO: 710814 - DNA, 25 bp, Homo sapien
ctgcgcccccgaacgcggcccgcag

SEQ ID NO: 710815 - DNA, 25 bp, Homo sapien
tgcgcccccgaacgcggcccgcagc

SEQ ID NO: 710816 - DNA, 25 bp, Homo sapien
gcgcccccgaacgcggcccgcagca

SEQ ID NO: 710817 - DNA, 25 bp, Homo sapien
agaacaggttgatctgggaaggcca

SEQ ID NO: 710818 - DNA, 25 bp, Homo sapien
aggttgatctgggaaggccagggag

SEQ ID NO: 710819 - DNA, 25 bp, Homo sapien
gttgatctgggaaggccagggagag

SEQ ID NO: 710820 - DNA, 25 bp, Homo sapien
ccagaacaggttgatctgggaaggc

SEQ ID NO: 710821 - DNA, 25 bp, Homo sapien
tcaattctgacactccacgttgagt

SEQ ID NO: 710822 - DNA, 25 bp, Homo sapien
tgtccaatgcccaatctctttcttc

SEQ ID NO: 710823 - DNA, 25 bp, Homo sapien
ctggctgtccaatgcccaatctctt

SEQ ID NO: 710824 - DNA, 25 bp, Homo sapien
gagttctctacagcctggtaacctt

SEQ ID NO: 710825 - DNA, 25 bp, Homo sapien
tgccgtgtgtcacacagcagaggga

SEQ ID NO: 710826 - DNA, 25 bp, Homo sapien
tgaatcttgtagaactctgctccca

SEQ ID NO: 710827 - DNA, 25 bp, Homo sapien
gaacttgaccctcacggtagaggca

SEQ ID NO: 710828 - DNA, 25 bp, Homo sapien
ccccagagctcatgaatcttgtaga

SEQ ID NO: 710829 - DNA, 25 bp, Homo sapien
gagttgagtgatgtaaacctggtga

SEQ ID NO: 710830 - DNA, 25 bp, Homo sapien
gtgatgtaaacctggtgattgaagg

SEQ ID NO: 710831 - DNA, 25 bp, Homo sapien
cacatcgagggagttgagtgatgta

SEQ ID NO: 710832 - DNA, 25 bp, Homo sapien
cagagagggaggtagccaggacctt

SEQ ID NO: 710833 - DNA, 25 bp, Homo sapien
aggcgagcaggggaggtgggcacac

SEQ ID NO: 710834 - DNA, 25 bp, Homo sapien
ctgagagcagcagccgtgtcaccgg

SEQ ID NO: 710835 - DNA, 25 bp, Homo sapien
tctgcagtagagctcggctgagagc

SEQ ID NO: 710836 - DNA, 25 bp, Homo sapien
gggtgtttcaagctgtggcagtgcc

SEQ ID NO: 710837 - DNA, 25 bp, Homo sapien
ttcacatgctcctgcgcgtactggt

SEQ ID NO: 710838 - DNA, 25 bp, Homo sapien
gaatgggctggtgcctcaggtcggc

SEQ ID NO: 710839 - DNA, 25 bp, Homo sapien
aatgggctggtgcctcaggtcggcc

SEQ ID NO: 710840 - DNA, 25 bp, Homo sapien
ggcagggtctttgtccactcgaagg

SEQ ID NO: 710841 - DNA, 25 bp, Homo sapien
gcatcaatgacagctaggtgggctc

SEQ ID NO: 710842 - DNA, 25 bp, Homo sapien
catcaatgacagctaggtgggctcc

SEQ ID NO: 710843 - DNA, 25 bp, Homo sapien
ttgtccactcgaaggcaaaggcagc

SEQ ID NO: 710844 - DNA, 25 bp, Homo sapien
gcttcctgctcggtcttctcctgca

SEQ ID NO: 710845 - DNA, 25 bp, Homo sapien
ggccgcttcctgctcggtcttctcc

SEQ ID NO: 710846 - DNA, 25 bp, Homo sapien
tgggccgcttcctgctcggtcttct

SEQ ID NO: 710847 - DNA, 25 bp, Homo sapien
ccgcttcctgctcggtcttctcctg

SEQ ID NO: 710848 - DNA, 25 bp, Homo sapien
cagcttccagtaccagcgcgtaggg

SEQ ID NO: 710849 - DNA, 25 bp, Homo sapien
accagcttccagtaccagcgcgtag

SEQ ID NO: 710850 - DNA, 25 bp, Homo sapien
gaaccagcttccagtaccagcgcgt

SEQ ID NO: 710851 - DNA, 25 bp, Homo sapien
gcttccagtaccagcgcgtagggca

SEQ ID NO: 710852 - DNA, 25 bp, Homo sapien
gtttgctccccgactccttcaaaca

SEQ ID NO: 710853 - DNA, 25 bp, Homo sapien
ccttcaaacagaaggcaattgcgtg

SEQ ID NO: 710854 - DNA, 25 bp, Homo sapien
tgctccccgactccttcaaacagaa

SEQ ID NO: 710855 - DNA, 25 bp, Homo sapien
actccttcaaacagaaggcaattgc

SEQ ID NO: 710856 - DNA, 25 bp, Homo sapien
tcctggaggctggtcaccgtcggga

SEQ ID NO: 710857 - DNA, 25 bp, Homo sapien
cctcaagtcgaagcagctggggaca

SEQ ID NO: 710858 - DNA, 25 bp, Homo sapien
ccacacggtccttgcggtatcggat

SEQ ID NO: 710859 - DNA, 25 bp, Homo sapien
acgtcgcgccaccacacggtccttg

SEQ ID NO: 710860 - DNA, 25 bp, Homo sapien
aggcacagaaatcctgcacgagctg

SEQ ID NO: 710861 - DNA, 25 bp, Homo sapien
cttgagtggcggtgggacgtacagc

SEQ ID NO: 710862 - DNA, 25 bp, Homo sapien
tacaggctgtccgccacagacatgg

SEQ ID NO: 710863 - DNA, 25 bp, Homo sapien
tcctgcacgagctggaggttgtaca

SEQ ID NO: 710864 - DNA, 25 bp, Homo sapien
tcgggcaagtccttcacttgcacaa

SEQ ID NO: 710865 - DNA, 25 bp, Homo sapien
gtgaccatcgggcaagtccttcact

SEQ ID NO: 710866 - DNA, 25 bp, Homo sapien
gaccatcgggcaagtccttcacttg

SEQ ID NO: 710867 - DNA, 25 bp, Homo sapien
gtcgggcttgagcacctcaaaacac

SEQ ID NO: 710868 - DNA, 25 bp, Homo sapien
ggcctcagtgccccggggggaggca

SEQ ID NO: 710869 - DNA, 25 bp, Homo sapien
ctgaggtggggaggcctcagtgccc

SEQ ID NO: 710870 - DNA, 25 bp, Homo sapien
aggtggggaggcctcagtgccccgg

SEQ ID NO: 710871 - DNA, 25 bp, Homo sapien
gcctcagtgccccggggggaggcag

SEQ ID NO: 710872 - DNA, 25 bp, Homo sapien
ccaccagatgacagaagcgggtggc

SEQ ID NO: 710873 - DNA, 25 bp, Homo sapien
tgtggatcctcggagtggggactgg

SEQ ID NO: 710874 - DNA, 25 bp, Homo sapien
tgacagaagcgggtggcggaaggtg

SEQ ID NO: 710875 - DNA, 25 bp, Homo sapien
ggactgggggccaccagatgacaga

SEQ ID NO: 710876 - DNA, 25 bp, Homo sapien
gggaaccctgagtggggtcagccag

SEQ ID NO: 710877 - DNA, 25 bp, Homo sapien
tgggaaccctgagtggggtcagcca

SEQ ID NO: 710878 - DNA, 25 bp, Homo sapien
atgggacatggacggggaagacttc

SEQ ID NO: 710879 - DNA, 25 bp, Homo sapien
ccagggcctccatatgggacatgga

SEQ ID NO: 710880 - DNA, 25 bp, Homo sapien
gcccagggcctccatatgggacatg

SEQ ID NO: 710881 - DNA, 25 bp, Homo sapien
agggcctccatatgggacatggacg

SEQ ID NO: 710882 - DNA, 25 bp, Homo sapien
gaatgacacagcctgggagagggga

SEQ ID NO: 710883 - DNA, 25 bp, Homo sapien
ctgaatgacacagcctgggagaggg

SEQ ID NO: 710884 - DNA, 25 bp, Homo sapien
aatgacacagcctgggagaggggac

SEQ ID NO: 710885 - DNA, 25 bp, Homo sapien
tgacacagcctgggagaggggacgg

SEQ ID NO: 710886 - DNA, 25 bp, Homo sapien
tccgagctcacagagcggaggagca

SEQ ID NO: 710887 - DNA, 25 bp, Homo sapien
gcttcctcgatggtgggcaggtcac

SEQ ID NO: 710888 - DNA, 25 bp, Homo sapien
gggtctcccatgacgacatccacgt

SEQ ID NO: 710889 - DNA, 25 bp, Homo sapien
tggtcattttcacctcggagttggt

SEQ ID NO: 710890 - DNA, 25 bp, Homo sapien
cccaccagggactggaccggaatcg

SEQ ID NO: 710891 - DNA, 25 bp, Homo sapien
tttgcccagccgctggcggtgcttg

SEQ ID NO: 710892 - DNA, 25 bp, Homo sapien
tatggcctcaatccgtcgcttctga

SEQ ID NO: 710893 - DNA, 25 bp, Homo sapien
tctgagcctcgatggctctgcgttt

SEQ ID NO: 710894 - DNA, 25 bp, Homo sapien
tcactgccttgggccgtgaggttgg

SEQ ID NO: 710895 - DNA, 25 bp, Homo sapien
gtcactgccttgggccgtgaggttg

SEQ ID NO: 710896 - DNA, 25 bp, Homo sapien
ggtcactgccttgggccgtgaggtt

SEQ ID NO: 710897 - DNA, 25 bp, Homo sapien
atgtcccgctgcagcgagctcaagg

SEQ ID NO: 710898 - DNA, 25 bp, Homo sapien
tgctgaccgctcgattgtattcccc

SEQ ID NO: 710899 - DNA, 25 bp, Homo sapien
acctggctcggcgagaacttgcgca

SEQ ID NO: 710900 - DNA, 25 bp, Homo sapien
tggtccgtgagcctctgcatgtccc

SEQ ID NO: 710901 - DNA, 25 bp, Homo sapien
acagacactctacactgcgggagga

SEQ ID NO: 710902 - DNA, 25 bp, Homo sapien
atgggatacactgggtgccgctcac

SEQ ID NO: 710903 - DNA, 25 bp, Homo sapien
caaaagctcgtgttgggcacagaca

SEQ ID NO: 710904 - DNA, 25 bp, Homo sapien
atttaactaggtgggcgtacagagc

SEQ ID NO: 710905 - DNA, 25 bp, Homo sapien
ctggcccgcttttgggccatctcgt

SEQ ID NO: 710906 - DNA, 25 bp, Homo sapien
caggctggcccgcttttgggccatc

SEQ ID NO: 710907 - DNA, 25 bp, Homo sapien
aggctggcccgcttttgggccatct

SEQ ID NO: 710908 - DNA, 25 bp, Homo sapien
ggcccgcttttgggccatctcgtcc

SEQ ID NO: 710909 - DNA, 25 bp, Homo sapien
gggcccggcgctcgtactcctgccg

SEQ ID NO: 710910 - DNA, 25 bp, Homo sapien
agtcgccatcgggactgcggacaca

SEQ ID NO: 710911 - DNA, 25 bp, Homo sapien
caccttatcgaggtcgtccatcagc

SEQ ID NO: 710912 - DNA, 25 bp, Homo sapien
gggccgcagcaccttatcgaggtcg

SEQ ID NO: 710913 - DNA, 25 bp, Homo sapien
cacagcaacccgagcgaggccgggt

SEQ ID NO: 710914 - DNA, 25 bp, Homo sapien
agtcgtcacagcaacccgagcgagg

SEQ ID NO: 710915 - DNA, 25 bp, Homo sapien
ttcgtgccagggctgagtcgtcaca

SEQ ID NO: 710916 - DNA, 25 bp, Homo sapien
gggctgagtcgtcacagcaacccga

SEQ ID NO: 710917 - DNA, 25 bp, Homo sapien
cagtgagccccggaaagggcactgg

SEQ ID NO: 710918 - DNA, 25 bp, Homo sapien
ctcacccagtgagccccggaaaggg

SEQ ID NO: 710919 - DNA, 25 bp, Homo sapien
cccagtgagccccggaaagggcact

SEQ ID NO: 710920 - DNA, 25 bp, Homo sapien
ggcctcacccagtgagccccggaaa

SEQ ID NO: 710921 - DNA, 25 bp, Homo sapien
cgcgcccggccccctatggaagtct

SEQ ID NO: 710922 - DNA, 25 bp, Homo sapien
gccctccacaacacccggtccagca

SEQ ID NO: 710923 - DNA, 25 bp, Homo sapien
cctccacaacacccggtccagcagg

SEQ ID NO: 710924 - DNA, 25 bp, Homo sapien
gaatagattttgctcagccgagagc

SEQ ID NO: 710925 - DNA, 25 bp, Homo sapien
tcttcaccccgaggttattgtgggc

SEQ ID NO: 710926 - DNA, 25 bp, Homo sapien
agtgacagggtggactgggaataga

SEQ ID NO: 710927 - DNA, 25 bp, Homo sapien
tattgtgggcctcgttggccacagt

SEQ ID NO: 710928 - DNA, 25 bp, Homo sapien
tcccagtcccgttcgcggcttccag

SEQ ID NO: 710929 - DNA, 25 bp, Homo sapien
ggcggcttggggacatgagacctga

SEQ ID NO: 710930 - DNA, 25 bp, Homo sapien
catgagacctgacggggagggagcc

SEQ ID NO: 710931 - DNA, 25 bp, Homo sapien
cattttcccagtcccgttcgcggct

SEQ ID NO: 710932 - DNA, 25 bp, Homo sapien
cttgttggacttggcgctgggttct

SEQ ID NO: 710933 - DNA, 25 bp, Homo sapien
ccaggcagcagtgtgatagggcatt

SEQ ID NO: 710934 - DNA, 25 bp, Homo sapien
gatgaacttgttggacttggcgctg

SEQ ID NO: 710935 - DNA, 25 bp, Homo sapien
gattcttctgcggttcgttcacctt

SEQ ID NO: 710936 - DNA, 25 bp, Homo sapien
tgaaggcatcgacgctcatggacat

SEQ ID NO: 710937 - DNA, 25 bp, Homo sapien
aactggcagctcgagtcgcgaaaga

SEQ ID NO: 710938 - DNA, 25 bp, Homo sapien
gagtggtgggtttcttgccctgcca

SEQ ID NO: 710939 - DNA, 25 bp, Homo sapien
gaagcgcttgcggtccgagttgtac

SEQ ID NO: 710940 - DNA, 25 bp, Homo sapien
cagcaggactggactcaaagtcaga

SEQ ID NO: 710941 - DNA, 25 bp, Homo sapien
aggaataccgactgactgtcctcca

SEQ ID NO: 710942 - DNA, 25 bp, Homo sapien
gacaggacccaggaataccgactga

SEQ ID NO: 710943 - DNA, 25 bp, Homo sapien
actcaaagtcagagggtggagactc

SEQ ID NO: 710944 - DNA, 25 bp, Homo sapien
tggttttctggatagcggtctctag

SEQ ID NO: 710945 - DNA, 25 bp, Homo sapien
tagcggtctctaggcctggactgca

SEQ ID NO: 710946 - DNA, 25 bp, Homo sapien
tctggatagcggtctctaggcctgg

SEQ ID NO: 710947 - DNA, 25 bp, Homo sapien
tggatagcggtctctaggcctggac

SEQ ID NO: 710948 - DNA, 25 bp, Homo sapien
tgatggcgcgactctcgcggcccga

SEQ ID NO: 710949 - DNA, 25 bp, Homo sapien
ccgagcggccggaccttgtcttcgt

SEQ ID NO: 710950 - DNA, 25 bp, Homo sapien
aaatggtggtgatggcgcgactctc

SEQ ID NO: 710951 - DNA, 25 bp, Homo sapien
tgtcttcgtgagtccacagaggagc

SEQ ID NO: 710952 - DNA, 25 bp, Homo sapien
cgtttctcccggtcaacaaagccag

SEQ ID NO: 710953 - DNA, 25 bp, Homo sapien
tcgtttctcccggtcaacaaagcca

SEQ ID NO: 710954 - DNA, 25 bp, Homo sapien
ccgaaatatctccagcttcaccccc

SEQ ID NO: 710955 - DNA, 25 bp, Homo sapien
cgaaatatctccagcttcaccccca

SEQ ID NO: 710956 - DNA, 25 bp, Homo sapien
gaaatatctccagcttcacccccat

SEQ ID NO: 710957 - DNA, 25 bp, Homo sapien
tctcctggatttccaaccagaaagg

SEQ ID NO: 710958 - DNA, 25 bp, Homo sapien
ctctcctggatttccaaccagaaag

SEQ ID NO: 710959 - DNA, 25 bp, Homo sapien
ctcctggatttccaaccagaaaggt

SEQ ID NO: 710960 - DNA, 25 bp, Homo sapien
ggaatctccctgtcatagacaccca

SEQ ID NO: 710961 - DNA, 25 bp, Homo sapien
gctcccccaggatcttaagtcttcc

SEQ ID NO: 710962 - DNA, 25 bp, Homo sapien
ccacccaccacgagcccgagagctc

SEQ ID NO: 710963 - DNA, 25 bp, Homo sapien
tgaggtccttcctcggaccagccct

SEQ ID NO: 710964 - DNA, 25 bp, Homo sapien
gaatggcagagggtgggtgaggtga

SEQ ID NO: 710965 - DNA, 25 bp, Homo sapien
tggaatggcagagggtgggtgaggt

SEQ ID NO: 710966 - DNA, 25 bp, Homo sapien
ctggaatggcagagggtgggtgagg

SEQ ID NO: 710967 - DNA, 25 bp, Homo sapien
ggaatggcagagggtgggtgaggtg

SEQ ID NO: 710968 - DNA, 25 bp, Homo sapien
accactcggcctgattggaaaccca

SEQ ID NO: 710969 - DNA, 25 bp, Homo sapien
tcctcaaaccactcggcctgattgg

SEQ ID NO: 710970 - DNA, 25 bp, Homo sapien
tcggcctgattggaaacccagaaca

SEQ ID NO: 710971 - DNA, 25 bp, Homo sapien
cctgattggaaacccagaacatagc

SEQ ID NO: 710972 - DNA, 25 bp, Homo sapien
ccacatcagggcagggtcggcttat

SEQ ID NO: 710973 - DNA, 25 bp, Homo sapien
tggaatgaaccctcaaacactcctc

SEQ ID NO: 710974 - DNA, 25 bp, Homo sapien
gaggcagacattagtccccagcaga

SEQ ID NO: 710975 - DNA, 25 bp, Homo sapien
acaaatgggacacgagccaaaggcc

SEQ ID NO: 710976 - DNA, 25 bp, Homo sapien
tcatctaaaacccatcccggataca

SEQ ID NO: 710977 - DNA, 25 bp, Homo sapien
tctaaaacccatcccggatacaaga

SEQ ID NO: 710978 - DNA, 25 bp, Homo sapien
tttcatctaaaacccatcccggata

SEQ ID NO: 710979 - DNA, 25 bp, Homo sapien
aacccatcccggatacaagaatcca

SEQ ID NO: 710980 - DNA, 25 bp, Homo sapien
gatccgcttcactcttccaggagaa

SEQ ID NO: 710981 - DNA, 25 bp, Homo sapien
tctgctctcggttccttactcatgg

SEQ ID NO: 710982 - DNA, 25 bp, Homo sapien
gaaggcaataaggaaaccatctact

SEQ ID NO: 710983 - DNA, 25 bp, Homo sapien
gggtccgcgtgggatccgcttcact

SEQ ID NO: 710984 - DNA, 25 bp, Homo sapien
gggcgtcgcgaaggagcttctcctc

SEQ ID NO: 710985 - DNA, 25 bp, Homo sapien
tcaggagttctgctgggcgtcgcga

SEQ ID NO: 710986 - DNA, 25 bp, Homo sapien
gcttccgtaacctctctttgaattc

SEQ ID NO: 710987 - DNA, 25 bp, Homo sapien
ccgcttccgtaacctctctttgaat

SEQ ID NO: 710988 - DNA, 25 bp, Homo sapien
acagaaacgagctgggaccctcagt

SEQ ID NO: 710989 - DNA, 25 bp, Homo sapien
tgagggtaaacatagaccagtgctc

SEQ ID NO: 710990 - DNA, 25 bp, Homo sapien
tgctcacaatgaggtgggacacggt

SEQ ID NO: 710991 - DNA, 25 bp, Homo sapien
tcttcatccacaggacggagcacag

SEQ ID NO: 710992 - DNA, 25 bp, Homo sapien
gggacacctgcaagtcctccctaag

SEQ ID NO: 710993 - DNA, 25 bp, Homo sapien
ctccagggacagtgagttgaaggaa

SEQ ID NO: 710994 - DNA, 25 bp, Homo sapien
ggagaccccttgacttgctgccaag

SEQ ID NO: 710995 - DNA, 25 bp, Homo sapien
tgctcaggccttttgtgacatcaca

SEQ ID NO: 710996 - DNA, 25 bp, Homo sapien
gaacttggccttttgtggaacagag

SEQ ID NO: 710997 - DNA, 25 bp, Homo sapien
cctaggaaagggatacacgtactga

SEQ ID NO: 710998 - DNA, 25 bp, Homo sapien
tggtatcccctgcttgggcactgag

SEQ ID NO: 710999 - DNA, 25 bp, Homo sapien
cactggtttccgtaaaggcgtcttg

SEQ ID NO: 711000 - DNA, 25 bp, Homo sapien
cctaaggtgcgtaagtcaatggctt

SEQ ID NO: 711001 - DNA, 25 bp, Homo sapien
ttggagttgtgtgtccattaccaca

SEQ ID NO: 711002 - DNA, 25 bp, Homo sapien
acataccatacaactcgctgaccta

SEQ ID NO: 711003 - DNA, 25 bp, Homo sapien
tacaactcgctgacctaaggtgcgt

SEQ ID NO: 711004 - DNA, 25 bp, Homo sapien
ccgccttcagccccgagggcgccat

SEQ ID NO: 711005 - DNA, 25 bp, Homo sapien
ccccaccaccgccttcagccccgag

SEQ ID NO: 711006 - DNA, 25 bp, Homo sapien
ccaccgccttcagccccgagggcgc

SEQ ID NO: 711007 - DNA, 25 bp, Homo sapien
ccaccaccgccttcagccccgaggg

SEQ ID NO: 711008 - DNA, 25 bp, Homo sapien
gagacacggcacaggaatcatttat

SEQ ID NO: 711009 - DNA, 25 bp, Homo sapien
gcatcctgagtgtctaagtggcaga

SEQ ID NO: 711010 - DNA, 25 bp, Homo sapien
aacatgtaactcacctacgcatcct

SEQ ID NO: 711011 - DNA, 25 bp, Homo sapien
gaaacagattcttaggcaacatgta

SEQ ID NO: 711012 - DNA, 25 bp, Homo sapien
tgacactccgaataactccgctcag

SEQ ID NO: 711013 - DNA, 25 bp, Homo sapien
gacactccgaataactccgctcaga

SEQ ID NO: 711014 - DNA, 25 bp, Homo sapien
cactccgaataactccgctcagaat

SEQ ID NO: 711015 - DNA, 25 bp, Homo sapien
ctccgaataactccgctcagaattt

SEQ ID NO: 711016 - DNA, 25 bp, Homo sapien
ccccataggcctgatgatgagctgc

SEQ ID NO: 711017 - DNA, 25 bp, Homo sapien
cattcacccaactccacccatgtgg

SEQ ID NO: 711018 - DNA, 25 bp, Homo sapien
cttccccataggcctgatgatgagc

SEQ ID NO: 711019 - DNA, 25 bp, Homo sapien
tcacccaactccacccatgtggaca

SEQ ID NO: 711020 - DNA, 25 bp, Homo sapien
atgcgcatgcttgggtgatccatga

SEQ ID NO: 711021 - DNA, 25 bp, Homo sapien
aagatgcgcatgcttgggtgatcca

SEQ ID NO: 711022 - DNA, 25 bp, Homo sapien
gacaagatgcgcatgcttgggtgat

SEQ ID NO: 711023 - DNA, 25 bp, Homo sapien
caagatgcgcatgcttgggtgatcc

SEQ ID NO: 711024 - DNA, 25 bp, Homo sapien
ttagggaccaccagctaagagccac

SEQ ID NO: 711025 - DNA, 25 bp, Homo sapien
ccgcagtcagcttgcaaggtttaag

SEQ ID NO: 711026 - DNA, 25 bp, Homo sapien
tcaatggcaaagtgactgggacacc

SEQ ID NO: 711027 - DNA, 25 bp, Homo sapien
tggtcacatgatccgggctgtccgt

SEQ ID NO: 711028 - DNA, 25 bp, Homo sapien
ctccgtggggctcagcaaataaatg

SEQ ID NO: 711029 - DNA, 25 bp, Homo sapien
cagcaaataaatggcctccagactg

SEQ ID NO: 711030 - DNA, 25 bp, Homo sapien
cccgccgtttgttgatgtcttcaac

SEQ ID NO: 711031 - DNA, 25 bp, Homo sapien
tggcctccagactgggaatgggttc

SEQ ID NO: 711032 - DNA, 25 bp, Homo sapien
ccatgtgcaaacatggacggacggg

SEQ ID NO: 711033 - DNA, 25 bp, Homo sapien
ccaccatgtgcaaacatggacggac

SEQ ID NO: 711034 - DNA, 25 bp, Homo sapien
tagtgtcgcacccacatgggcacac

SEQ ID NO: 711035 - DNA, 25 bp, Homo sapien
tgtgcaaatgcacactagtgtcgca

SEQ ID NO: 711036 - DNA, 25 bp, Homo sapien
gggaaggtggatcactctctgggcc

SEQ ID NO: 711037 - DNA, 25 bp, Homo sapien
aaggtggatcactctctgggcctga

SEQ ID NO: 711038 - DNA, 25 bp, Homo sapien
gaaggtggatcactctctgggcctg

SEQ ID NO: 711039 - DNA, 25 bp, Homo sapien
ctggggaaggtggatcactctctgg

SEQ ID NO: 711040 - DNA, 25 bp, Homo sapien
gggtcccctggaagtctttgatcag

SEQ ID NO: 711041 - DNA, 25 bp, Homo sapien
gtgaagaagatatgggccgctttgt

SEQ ID NO: 711042 - DNA, 25 bp, Homo sapien
atgggccgctttgtaggtgaaagtc

SEQ ID NO: 711043 - DNA, 25 bp, Homo sapien
tcccctggaagtctttgatcagggc

SEQ ID NO: 711044 - DNA, 25 bp, Homo sapien
aacaccctaggctctcctcactcac

SEQ ID NO: 711045 - DNA, 25 bp, Homo sapien
caccaacaccctaggctctcctcac

SEQ ID NO: 711046 - DNA, 25 bp, Homo sapien
accaacaccctaggctctcctcact

SEQ ID NO: 711047 - DNA, 25 bp, Homo sapien
caacaccctaggctctcctcactca

SEQ ID NO: 711048 - DNA, 25 bp, Homo sapien
ggcaaggtgaatctccttcaacgtc

SEQ ID NO: 711049 - DNA, 25 bp, Homo sapien
gagcggcctagctcactgaacaggg

SEQ ID NO: 711050 - DNA, 25 bp, Homo sapien
gaaggcaaggtgaatctccttcaac

SEQ ID NO: 711051 - DNA, 25 bp, Homo sapien
tcttcaccacctttgccagacgaga

SEQ ID NO: 711052 - DNA, 25 bp, Homo sapien
cgcccagcctcagtgtctgtttctg

SEQ ID NO: 711053 - DNA, 25 bp, Homo sapien
tgtttctgagggaacaggggacatt

SEQ ID NO: 711054 - DNA, 25 bp, Homo sapien
tgcccaggatgagcccgggccgtac

SEQ ID NO: 711055 - DNA, 25 bp, Homo sapien
gaacaggggacatttggtcacaaac

SEQ ID NO: 711056 - DNA, 25 bp, Homo sapien
agcacctcgagctgccgcgtgcgct

SEQ ID NO: 711057 - DNA, 25 bp, Homo sapien
tggcgcacagcgtggcaatctgctg

SEQ ID NO: 711058 - DNA, 25 bp, Homo sapien
gggtactcctgcagggtggcgcaca

SEQ ID NO: 711059 - DNA, 25 bp, Homo sapien
tgcggtagcggatggccgggtactc

SEQ ID NO: 711060 - DNA, 25 bp, Homo sapien
gtcggcatcggggtggggctgggtg

SEQ ID NO: 711061 - DNA, 25 bp, Homo sapien
cggcatcggggtggggctgggtggg

SEQ ID NO: 711062 - DNA, 25 bp, Homo sapien
tcggcatcggggtggggctgggtgg

SEQ ID NO: 711063 - DNA, 25 bp, Homo sapien
gggaggtcagacacgggggacatca

SEQ ID NO: 711064 - DNA, 25 bp, Homo sapien
gggtcaaggatgggtttgaaggtga

SEQ ID NO: 711065 - DNA, 25 bp, Homo sapien
gtcaaggatgggtttgaaggtgaga

SEQ ID NO: 711066 - DNA, 25 bp, Homo sapien
caaggatgggtttgaaggtgagagt

SEQ ID NO: 711067 - DNA, 25 bp, Homo sapien
ggcgtgggccaactgggctgtgtcc

SEQ ID NO: 711068 - DNA, 25 bp, Homo sapien
gagtgtctgccttgaaggcgttcag

SEQ ID NO: 711069 - DNA, 25 bp, Homo sapien
ggagtgtctgccttgaaggcgttca

SEQ ID NO: 711070 - DNA, 25 bp, Homo sapien
agcttggccaggacggcgtgggcca

SEQ ID NO: 711071 - DNA, 25 bp, Homo sapien
tccagcagatcatacgccatggcct

SEQ ID NO: 711072 - DNA, 25 bp, Homo sapien
cctggaacgtgagctcatgcagtag

SEQ ID NO: 711073 - DNA, 25 bp, Homo sapien
tgcccggtccattatcagcagctgg

SEQ ID NO: 711074 - DNA, 25 bp, Homo sapien
cagctgcccggtccattatcagcag

SEQ ID NO: 711075 - DNA, 25 bp, Homo sapien
agcaagacggccttctcccgcgcct

SEQ ID NO: 711076 - DNA, 25 bp, Homo sapien
acatctgcgatatgcatgtggcgaa

SEQ ID NO: 711077 - DNA, 25 bp, Homo sapien
tatgcatgtggcgaagctccaccca

SEQ ID NO: 711078 - DNA, 25 bp, Homo sapien
ttggacacatctgcgatatgcatgt

SEQ ID NO: 711079 - DNA, 25 bp, Homo sapien
gggatccggtccccgtgtgcacgca

SEQ ID NO: 711080 - DNA, 25 bp, Homo sapien
ggatccggtccccgtgtgcacgcac

SEQ ID NO: 711081 - DNA, 25 bp, Homo sapien
ggggatccggtccccgtgtgcacgc

SEQ ID NO: 711082 - DNA, 25 bp, Homo sapien
ccgtggtcagcctcttgctctcaca

SEQ ID NO: 711083 - DNA, 25 bp, Homo sapien
cgtggtcagcctcttgctctcacag

SEQ ID NO: 711084 - DNA, 25 bp, Homo sapien
ttccttccaccagcgcctttggtga

SEQ ID NO: 711085 - DNA, 25 bp, Homo sapien
gtccaggctcgaaatccaggctgtg

SEQ ID NO: 711086 - DNA, 25 bp, Homo sapien
ttccaccagcgcctttggtgacctg

SEQ ID NO: 711087 - DNA, 25 bp, Homo sapien
tgggtctcagtccaggctcgaaatc

SEQ ID NO: 711088 - DNA, 25 bp, Homo sapien
ggtactgcggcatctttttcaggat

SEQ ID NO: 711089 - DNA, 25 bp, Homo sapien
ttcaggatctgggataggtctttga

SEQ ID NO: 711090 - DNA, 25 bp, Homo sapien
ttattcagctccttctggtactgcg

SEQ ID NO: 711091 - DNA, 25 bp, Homo sapien
tctgggataggtctttgatgttcgc

SEQ ID NO: 711092 - DNA, 25 bp, Homo sapien
tacaatcatctgctagatgcaggtg

SEQ ID NO: 711093 - DNA, 25 bp, Homo sapien
ctgctagatgcaggtgcgtagaata

SEQ ID NO: 711094 - DNA, 25 bp, Homo sapien
tccaccgagcccttgaagtgcttca

SEQ ID NO: 711095 - DNA, 25 bp, Homo sapien
tgaagtgcttcatacaatcatctgc

SEQ ID NO: 711096 - DNA, 25 bp, Homo sapien
cacctatgaataggccacattcctg

SEQ ID NO: 711097 - DNA, 25 bp, Homo sapien
aaggtcccacccacctatgaatagg

SEQ ID NO: 711098 - DNA, 25 bp, Homo sapien
ctccaaggtcccacccacctatgaa

SEQ ID NO: 711099 - DNA, 25 bp, Homo sapien
ggtcccacctctcttaaggctccac

SEQ ID NO: 711100 - DNA, 25 bp, Homo sapien
ccaccggccgctatgtgtcagggaa

SEQ ID NO: 711101 - DNA, 25 bp, Homo sapien
ggatcctcggcaagaggacatttgg

SEQ ID NO: 711102 - DNA, 25 bp, Homo sapien
gacatttgggtcctacctcatctca

SEQ ID NO: 711103 - DNA, 25 bp, Homo sapien
ctgtccagggacagtctctccacag

SEQ ID NO: 711104 - DNA, 25 bp, Homo sapien
cattccgaaggaggatgtagagcag

SEQ ID NO: 711105 - DNA, 25 bp, Homo sapien
ccagcagcaccggaacgatcagctt

SEQ ID NO: 711106 - DNA, 25 bp, Homo sapien
ccggatcttgtcgtaggcgggcacc

SEQ ID NO: 711107 - DNA, 25 bp, Homo sapien
aacgatcagcttcatggagtccttg

SEQ ID NO: 711108 - DNA, 25 bp, Homo sapien
tccccaagccaatggaggagggttc

SEQ ID NO: 711109 - DNA, 25 bp, Homo sapien
ccaagccaatggaggagggttcccg

SEQ ID NO: 711110 - DNA, 25 bp, Homo sapien
caagccaatggaggagggttcccgg

SEQ ID NO: 711111 - DNA, 25 bp, Homo sapien
tgtgcgcctgtacattggcatgctg

SEQ ID NO: 711112 - DNA, 25 bp, Homo sapien
tccaggttacggatgaggctgctgt

SEQ ID NO: 711113 - DNA, 25 bp, Homo sapien
gctgctgtgcgcctgtacattggca

SEQ ID NO: 711114 - DNA, 25 bp, Homo sapien
agctgctccaggttacggatgaggc

SEQ ID NO: 711115 - DNA, 25 bp, Homo sapien
gctgtgatccgcaccctctcccagg

SEQ ID NO: 711116 - DNA, 25 bp, Homo sapien
tccccccatgcccgctcctggcgta

SEQ ID NO: 711117 - DNA, 25 bp, Homo sapien
agccccggctgtgatccgcaccctc

SEQ ID NO: 711118 - DNA, 25 bp, Homo sapien
cccggctgtgatccgcaccctctcc

SEQ ID NO: 711119 - DNA, 25 bp, Homo sapien
gagagcgagagacagcaagaaagcg

SEQ ID NO: 711120 - DNA, 25 bp, Homo sapien
gacagcaagaaagcgagagagagaa

SEQ ID NO: 711121 - DNA, 25 bp, Homo sapien
cagagataggcaaagagataagaag

SEQ ID NO: 711122 - DNA, 25 bp, Homo sapien
aaacagtgagccagagagagacgga

SEQ ID NO: 711123 - DNA, 25 bp, Homo sapien
gggagggcagcagggggattgaggg

SEQ ID NO: 711124 - DNA, 25 bp, Homo sapien
cgttctctcggctccagccggctgg

SEQ ID NO: 711125 - DNA, 25 bp, Homo sapien
ttacatccttgatgaccggggtcca

SEQ ID NO: 711126 - DNA, 25 bp, Homo sapien
taggtgggctccatgcgttctctcg

SEQ ID NO: 711127 - DNA, 25 bp, Homo sapien
cagcgggacagctgataggtgggct

SEQ ID NO: 711128 - DNA, 25 bp, Homo sapien
agatcggtgccaagggaatgccagc

SEQ ID NO: 711129 - DNA, 25 bp, Homo sapien
ggacccaggagtctaggcctctagt

SEQ ID NO: 711130 - DNA, 25 bp, Homo sapien
ctagagagatatagcggaggcagcc

SEQ ID NO: 711131 - DNA, 25 bp, Homo sapien
gttcctcggcaacccagtagtctgg

SEQ ID NO: 711132 - DNA, 25 bp, Homo sapien
gatacgaagggccacaggttcctgt

SEQ ID NO: 711133 - DNA, 25 bp, Homo sapien
cgaagggccacaggttcctgtccag

SEQ ID NO: 711134 - DNA, 25 bp, Homo sapien
gtcggatacgaagggccacaggttc

SEQ ID NO: 711135 - DNA, 25 bp, Homo sapien
aggttcctgtccagccggtcctcca

SEQ ID NO: 711136 - DNA, 25 bp, Homo sapien
gcccacctaacacagacccaggcgt

SEQ ID NO: 711137 - DNA, 25 bp, Homo sapien
acctaacacagacccaggcgtgggc

SEQ ID NO: 711138 - DNA, 25 bp, Homo sapien
cgccaggccgcccacctaacacaga

SEQ ID NO: 711139 - DNA, 25 bp, Homo sapien
aggccgcccacctaacacagaccca

SEQ ID NO: 711140 - DNA, 25 bp, Homo sapien
cttgtgccagtgaccgaagcgggca

SEQ ID NO: 711141 - DNA, 25 bp, Homo sapien
cagccttgttcttgtgccagtgacc

SEQ ID NO: 711142 - DNA, 25 bp, Homo sapien
tcgtaggcggccctcatctctgaca

SEQ ID NO: 711143 - DNA, 25 bp, Homo sapien
cccatgacatacacgatgagccggg

SEQ ID NO: 711144 - DNA, 25 bp, Homo sapien
actctggagtccagacacctagaag

SEQ ID NO: 711145 - DNA, 25 bp, Homo sapien
gggcgctgccttcgtctttgacagg

SEQ ID NO: 711146 - DNA, 25 bp, Homo sapien
ttggggggcgctgccttcgtctttg

SEQ ID NO: 711147 - DNA, 25 bp, Homo sapien
ggactctggagtccagacacctaga

SEQ ID NO: 711148 - DNA, 25 bp, Homo sapien
tcatccaggaagcgggtcggggtga

SEQ ID NO: 711149 - DNA, 25 bp, Homo sapien
tccaggaagcgggtcggggtgagga

SEQ ID NO: 711150 - DNA, 25 bp, Homo sapien
catccaggaagcgggtcggggtgag

SEQ ID NO: 711151 - DNA, 25 bp, Homo sapien
ccaggaagcgggtcggggtgaggat

SEQ ID NO: 711152 - DNA, 25 bp, Homo sapien
agggcagggcaatgtcctccagctt

SEQ ID NO: 711153 - DNA, 25 bp, Homo sapien
tcagggcagggcaatgtcctccagc

SEQ ID NO: 711154 - DNA, 25 bp, Homo sapien
tgtcctccagcttcttgtccagtgc

SEQ ID NO: 711155 - DNA, 25 bp, Homo sapien
tcctccagcttcttgtccagtgcct

SEQ ID NO: 711156 - DNA, 25 bp, Homo sapien
gagcgacgggaagagtttatttctc

SEQ ID NO: 711157 - DNA, 25 bp, Homo sapien
gacgggaagagtttatttctctgga

SEQ ID NO: 711158 - DNA, 25 bp, Homo sapien
gcgacgggaagagtttatttctctg

SEQ ID NO: 711159 - DNA, 25 bp, Homo sapien
agagtttatttctctggaaagggag

SEQ ID NO: 711160 - DNA, 25 bp, Homo sapien
ggcagggagaggctaattctccttc

SEQ ID NO: 711161 - DNA, 25 bp, Homo sapien
tctccttctgagaggataatagggg

SEQ ID NO: 711162 - DNA, 25 bp, Homo sapien
gactcccttgataagaaggtgaggt

SEQ ID NO: 711163 - DNA, 25 bp, Homo sapien
tggctcagcacaactcccagggact

SEQ ID NO: 711164 - DNA, 25 bp, Homo sapien
agccttcctgcgctatctctgttct

SEQ ID NO: 711165 - DNA, 25 bp, Homo sapien
agctgtcatgcttgcacgccaccag

SEQ ID NO: 711166 - DNA, 25 bp, Homo sapien
caccagccttcctgcgctatctctg

SEQ ID NO: 711167 - DNA, 25 bp, Homo sapien
agcagctgtcatgcttgcacgccac

SEQ ID NO: 711168 - DNA, 25 bp, Homo sapien
aggtctccagcactgattcctttgt

SEQ ID NO: 711169 - DNA, 25 bp, Homo sapien
ggtctccagcactgattcctttgtc

SEQ ID NO: 711170 - DNA, 25 bp, Homo sapien
tgtgaaaccgaccaccagaggaaac

SEQ ID NO: 711171 - DNA, 25 bp, Homo sapien
cttactaagatggtgacttgttgcc

SEQ ID NO: 711172 - DNA, 25 bp, Homo sapien
actcggatgcctagaaactgttgcc

SEQ ID NO: 711173 - DNA, 25 bp, Homo sapien
caaagagttctggtatcactcggat

SEQ ID NO: 711174 - DNA, 25 bp, Homo sapien
ttttccttgtgaaaattcataattg

SEQ ID NO: 711175 - DNA, 25 bp, Homo sapien
ctagttttccttgtgaaaattcata

SEQ ID NO: 711176 - DNA, 25 bp, Homo sapien
tccttgtgaaaattcataattgcta

SEQ ID NO: 711177 - DNA, 25 bp, Homo sapien
ccttgtgaaaattcataattgctac

SEQ ID NO: 711178 - DNA, 25 bp, Homo sapien
cagagtacgcccatcttccagtgct

SEQ ID NO: 711179 - DNA, 25 bp, Homo sapien
gacagagtacgcccatcttccagtg

SEQ ID NO: 711180 - DNA, 25 bp, Homo sapien
acagagtacgcccatcttccagtgc

SEQ ID NO: 711181 - DNA, 25 bp, Homo sapien
caacctcgacgaaggtgactaattt

SEQ ID NO: 711182 - DNA, 25 bp, Homo sapien
gggcaacctcgacgaaggtgactaa

SEQ ID NO: 711183 - DNA, 25 bp, Homo sapien
tcagaagggcaacctcgacgaaggt

SEQ ID NO: 711184 - DNA, 25 bp, Homo sapien
gaagggcaacctcgacgaaggtgac

SEQ ID NO: 711185 - DNA, 25 bp, Homo sapien
ccctgagcagacagtaagggctgga

SEQ ID NO: 711186 - DNA, 25 bp, Homo sapien
ggctcagctaaccaaatccggcaca

SEQ ID NO: 711187 - DNA, 25 bp, Homo sapien
tggcttggctaataagtccctgggc

SEQ ID NO: 711188 - DNA, 25 bp, Homo sapien
gggcctccgtcttcatgtccagaga

SEQ ID NO: 711189 - DNA, 25 bp, Homo sapien
aaccaagagacccacagctggatca

SEQ ID NO: 711190 - DNA, 25 bp, Homo sapien
ggaaccaagagacccacagctggat

SEQ ID NO: 711191 - DNA, 25 bp, Homo sapien
ccaagagacccacagctggatcagc

SEQ ID NO: 711192 - DNA, 25 bp, Homo sapien
gagggaaccaagagacccacagctg

SEQ ID NO: 711193 - DNA, 25 bp, Homo sapien
gggtcttgctagacaccaacagccc

SEQ ID NO: 711194 - DNA, 25 bp, Homo sapien
gggagccggcgacctcctggatcct

SEQ ID NO: 711195 - DNA, 25 bp, Homo sapien
tagggagccggcgacctcctggatc

SEQ ID NO: 711196 - DNA, 25 bp, Homo sapien
cacagggtcttgctagacaccaaca

SEQ ID NO: 711197 - DNA, 25 bp, Homo sapien
tggaggtgacgctctggcactccag

SEQ ID NO: 711198 - DNA, 25 bp, Homo sapien
ccaggccaatgctgcttattgccct

SEQ ID NO: 711199 - DNA, 25 bp, Homo sapien
ggcaagtagccaggtcccccctgga

SEQ ID NO: 711200 - DNA, 25 bp, Homo sapien
ccaatgctgcttattgccctaaata

SEQ ID NO: 711201 - DNA, 25 bp, Homo sapien
agtccatgcccgcgcactggcagtg

SEQ ID NO: 711202 - DNA, 25 bp, Homo sapien
actggcagtgacatgtggtctcggc

SEQ ID NO: 711203 - DNA, 25 bp, Homo sapien
agccacaagtgcagccggtgacggc

SEQ ID NO: 711204 - DNA, 25 bp, Homo sapien
ggtctcggcgcgcacatcccacgag

SEQ ID NO: 711205 - DNA, 25 bp, Homo sapien
caggtttatttccagctcccccgca

SEQ ID NO: 711206 - DNA, 25 bp, Homo sapien
ccctccggacctggagccgcctccg

SEQ ID NO: 711207 - DNA, 25 bp, Homo sapien
tgtgtctacctggatggacctcacc

SEQ ID NO: 711208 - DNA, 25 bp, Homo sapien
tcagtgtcccaacttttcgcgtaag

SEQ ID NO: 711209 - DNA, 25 bp, Homo sapien
taagagcaaccaggcttggagacag

SEQ ID NO: 711210 - DNA, 25 bp, Homo sapien
gcttggagacaggacccctgggtcc

SEQ ID NO: 711211 - DNA, 25 bp, Homo sapien
gagccaagaggtctcaggaaggacc

SEQ ID NO: 711212 - DNA, 25 bp, Homo sapien
gagatggaattcgacactcggaaat

SEQ ID NO: 711213 - DNA, 25 bp, Homo sapien
tcctgccccgatcaagaggctcttg

SEQ ID NO: 711214 - DNA, 25 bp, Homo sapien
agaaaaacctctagaccgggagatg

SEQ ID NO: 711215 - DNA, 25 bp, Homo sapien
gcccgcaaatttgtccatacacgtc

SEQ ID NO: 711216 - DNA, 25 bp, Homo sapien
ccagcccgcaaatttgtccatacac

SEQ ID NO: 711217 - DNA, 25 bp, Homo sapien
ccgcccaccggaaggtgtgggcaga

SEQ ID NO: 711218 - DNA, 25 bp, Homo sapien
gcaaatttgtccatacacgtccccg

SEQ ID NO: 711219 - DNA, 25 bp, Homo sapien
cttcctggtgcttgtagatttcctc

SEQ ID NO: 711220 - DNA, 25 bp, Homo sapien
gagaccccctgtttcttgtccctga

SEQ ID NO: 711221 - DNA, 25 bp, Homo sapien
aatgaccaccctttgcatggtcctg

SEQ ID NO: 711222 - DNA, 25 bp, Homo sapien
tgaaggccaaggtgatattctcata

SEQ ID NO: 711223 - DNA, 25 bp, Homo sapien
ggctcgtgggtcgtgaatgaccacc

SEQ ID NO: 711224 - DNA, 25 bp, Homo sapien
aggccaaggtgatattctcatagtc

SEQ ID NO: 711225 - DNA, 25 bp, Homo sapien
cactcaaaccatcctcactgtctct

SEQ ID NO: 711226 - DNA, 25 bp, Homo sapien
gtcatcatcgtcaacaacactgcca

SEQ ID NO: 711227 - DNA, 25 bp, Homo sapien
ctcgctcctctcaaaaccatcagca

SEQ ID NO: 711228 - DNA, 25 bp, Homo sapien
acaccatggacacctcgctcctctc

SEQ ID NO: 711229 - DNA, 25 bp, Homo sapien
tgtacaaccagcaggggacctgggt

SEQ ID NO: 711230 - DNA, 25 bp, Homo sapien
gggacctgggtggagtctgagggcg

SEQ ID NO: 711231 - DNA, 25 bp, Homo sapien
tgggtggagtctgagggcggcctgc

SEQ ID NO: 711232 - DNA, 25 bp, Homo sapien
ggtggagtctgagggcggcctgcac

SEQ ID NO: 711233 - DNA, 25 bp, Homo sapien
gggccaggaggatgtacaggctcag

SEQ ID NO: 711234 - DNA, 25 bp, Homo sapien
caggatgatgcagaggacaaaggcc

SEQ ID NO: 711235 - DNA, 25 bp, Homo sapien
caccatgatgaaggctgacaggatg

SEQ ID NO: 711236 - DNA, 25 bp, Homo sapien
ccaggaggatgtacaggctcaggat

SEQ ID NO: 711237 - DNA, 25 bp, Homo sapien
cagcagctccttggacatctcagca

SEQ ID NO: 711238 - DNA, 25 bp, Homo sapien
agctcccttttaaagcccagcagct

SEQ ID NO: 711239 - DNA, 25 bp, Homo sapien
caaagctcccttttaaagcccagca

SEQ ID NO: 711240 - DNA, 25 bp, Homo sapien
agcagctccttggacatctcagcat

SEQ ID NO: 711241 - DNA, 25 bp, Homo sapien
tgatgctctgctgaacggaatccca

SEQ ID NO: 711242 - DNA, 25 bp, Homo sapien
gctaatgtcgtctctaatctatcaa

SEQ ID NO: 711243 - DNA, 25 bp, Homo sapien
tgtctctcttcgcatgcttgtacgg

SEQ ID NO: 711244 - DNA, 25 bp, Homo sapien
tctatcaatcttgctcctgaccatg

SEQ ID NO: 711245 - DNA, 25 bp, Homo sapien
ttttctgcagcacctccaagatttt

SEQ ID NO: 711246 - DNA, 25 bp, Homo sapien
gcagcacctccaagattttctgtac

SEQ ID NO: 711247 - DNA, 25 bp, Homo sapien
ggcattttctgcagcacctccaaga

SEQ ID NO: 711248 - DNA, 25 bp, Homo sapien
gtggcattttctgcagcacctccaa

SEQ ID NO: 711249 - DNA, 25 bp, Homo sapien
tcccgtcttcgttggcaggtgcagc

SEQ ID NO: 711250 - DNA, 25 bp, Homo sapien
tggcgacacccacatgtacggagat

SEQ ID NO: 711251 - DNA, 25 bp, Homo sapien
acacagggtggcataactcggcaca

SEQ ID NO: 711252 - DNA, 25 bp, Homo sapien
gaaaacacgccgcagtatactctag

SEQ ID NO: 711253 - DNA, 25 bp, Homo sapien
gtgggtacacgcttagggcttgtat

SEQ ID NO: 711254 - DNA, 25 bp, Homo sapien
tcccaggtacactcagggagatgtt

SEQ ID NO: 711255 - DNA, 25 bp, Homo sapien
cgtggtcccaggtacactcagggag

SEQ ID NO: 711256 - DNA, 25 bp, Homo sapien
agggcttgtatatatccgtggtccc

SEQ ID NO: 711257 - DNA, 25 bp, Homo sapien
gcaggcgctcgacgggccaggcgtg

SEQ ID NO: 711258 - DNA, 25 bp, Homo sapien
caggaaccgcagcagtctgctcggc

SEQ ID NO: 711259 - DNA, 25 bp, Homo sapien
tttacggcgccgtaaaaggcgctgc

SEQ ID NO: 711260 - DNA, 25 bp, Homo sapien
tctgctcggccgagctgctttacgg

SEQ ID NO: 711261 - DNA, 25 bp, Homo sapien
cggggagcggacgaggcccggcgcg

SEQ ID NO: 711262 - DNA, 25 bp, Homo sapien
aagcgagcgggctcgggatcgcgga

SEQ ID NO: 711263 - DNA, 25 bp, Homo sapien
gagcgggctcgggatcgcggacgcc

SEQ ID NO: 711264 - DNA, 25 bp, Homo sapien
cgggctcgggatcgcggacgccgag

SEQ ID NO: 711265 - DNA, 25 bp, Homo sapien
ggttcaattgcgaaagcgccttcct

SEQ ID NO: 711266 - DNA, 25 bp, Homo sapien
gggagtcttataccctcggcaggca

SEQ ID NO: 711267 - DNA, 25 bp, Homo sapien
ccacttgcaaagagatgcgcgtaaa

SEQ ID NO: 711268 - DNA, 25 bp, Homo sapien
cctcgggcatgcagacggttcaatt

SEQ ID NO: 711269 - DNA, 25 bp, Homo sapien
cagcagcgccgacttcccgcgcgtg

SEQ ID NO: 711270 - DNA, 25 bp, Homo sapien
tcccgcgcgtgaagcgcgcctccat

SEQ ID NO: 711271 - DNA, 25 bp, Homo sapien
cagcgccgacttcccgcgcgtgaag

SEQ ID NO: 711272 - DNA, 25 bp, Homo sapien
gacttcccgcgcgtgaagcgcgcct

SEQ ID NO: 711273 - DNA, 25 bp, Homo sapien
tagcaccttggtctcacgccgggca

SEQ ID NO: 711274 - DNA, 25 bp, Homo sapien
aagacgcggctctggcagtgctgta

SEQ ID NO: 711275 - DNA, 25 bp, Homo sapien
ttgacgaagagcaacgcgcctagca

SEQ ID NO: 711276 - DNA, 25 bp, Homo sapien
gagaacagcagtgcgaaggcgctca

SEQ ID NO: 711277 - DNA, 25 bp, Homo sapien
gaacttgatcatgagcgtggtgccc

SEQ ID NO: 711278 - DNA, 25 bp, Homo sapien
agcgatgactgcctcctcgaacttg

SEQ ID NO: 711279 - DNA, 25 bp, Homo sapien
ttgtccgcctccttgccgaagagcg

SEQ ID NO: 711280 - DNA, 25 bp, Homo sapien
aaggtgcgcgcgtcatcgttggcct

SEQ ID NO: 711281 - DNA, 25 bp, Homo sapien
ctctgtatcctttatctccggcagg

SEQ ID NO: 711282 - DNA, 25 bp, Homo sapien
tctctgtatcctttatctccggcag

SEQ ID NO: 711283 - DNA, 25 bp, Homo sapien
ctctctgtatcctttatctccggca

SEQ ID NO: 711284 - DNA, 25 bp, Homo sapien
tctgtatcctttatctccggcaggg

SEQ ID NO: 711285 - DNA, 25 bp, Homo sapien
gagttgactcatggaagtacccaga

SEQ ID NO: 711286 - DNA, 25 bp, Homo sapien
tatgacacggagaatgtgcaggaca

SEQ ID NO: 711287 - DNA, 25 bp, Homo sapien
tccaagaccataagaaatgccagtg

SEQ ID NO: 711288 - DNA, 25 bp, Homo sapien
gagcagggcttagtacacagaaggc

SEQ ID NO: 711289 - DNA, 25 bp, Homo sapien
gggctggacgttcccactgtgtcag

SEQ ID NO: 711290 - DNA, 25 bp, Homo sapien
catccactagggctggacgttccca

SEQ ID NO: 711291 - DNA, 25 bp, Homo sapien
tgggccatccactagggctggacgt

SEQ ID NO: 711292 - DNA, 25 bp, Homo sapien
tggaccctgcactccagaacagctg

SEQ ID NO: 711293 - DNA, 25 bp, Homo sapien
aaggacggctggatctgtgagaaaa

SEQ ID NO: 711294 - DNA, 25 bp, Homo sapien
tgctgagtctcagaaacacttggcc

SEQ ID NO: 711295 - DNA, 25 bp, Homo sapien
taaccaaggttaggtgactgaggac

SEQ ID NO: 711296 - DNA, 25 bp, Homo sapien
tgtggaacgacgcaccgtgtgacag

SEQ ID NO: 711297 - DNA, 25 bp, Homo sapien
ctcacagtctcctatacttcccaga

SEQ ID NO: 711298 - DNA, 25 bp, Homo sapien
gctgataaccatgttggggccattc

SEQ ID NO: 711299 - DNA, 25 bp, Homo sapien
tgttcccttactctcccaatctttg

SEQ ID NO: 711300 - DNA, 25 bp, Homo sapien
tactctcccaatctttgcatgtgct

SEQ ID NO: 711301 - DNA, 25 bp, Homo sapien
tgtccagatgaacgaagcgtgcaaa

SEQ ID NO: 711302 - DNA, 25 bp, Homo sapien
aaatgtcaccttttcgggcgcagcc

SEQ ID NO: 711303 - DNA, 25 bp, Homo sapien
tccctcagtggagcaagttcctgct

SEQ ID NO: 711304 - DNA, 25 bp, Homo sapien
cattgtaaccgcagattcagcccaa

SEQ ID NO: 711305 - DNA, 25 bp, Homo sapien
gttcttgccgttttctagccacctc

SEQ ID NO: 711306 - DNA, 25 bp, Homo sapien
tcttctggacagcttccggtttttg

SEQ ID NO: 711307 - DNA, 25 bp, Homo sapien
atcttctggacagcttccggttttt

SEQ ID NO: 711308 - DNA, 25 bp, Homo sapien
cttctggacagcttccggtttttgt

SEQ ID NO: 711309 - DNA, 25 bp, Homo sapien
aggcttgcttcggagtcatagtcat

SEQ ID NO: 711310 - DNA, 25 bp, Homo sapien
caggcttgcttcggagtcatagtca

SEQ ID NO: 711311 - DNA, 25 bp, Homo sapien
acatatatacttgcccctcaggtga

SEQ ID NO: 711312 - DNA, 25 bp, Homo sapien
ctgaacatatatacttgcccctcag

SEQ ID NO: 711313 - DNA, 25 bp, Homo sapien
catcattttccaccgagccactggg

SEQ ID NO: 711314 - DNA, 25 bp, Homo sapien
atcatcattttccaccgagccactg

SEQ ID NO: 711315 - DNA, 25 bp, Homo sapien
aaatcatcattttccaccgagccac

SEQ ID NO: 711316 - DNA, 25 bp, Homo sapien
gcagaattcacactgaagctgtcgt

SEQ ID NO: 711317 - DNA, 25 bp, Homo sapien
tagtattcatcgtggtggcccaccc

SEQ ID NO: 711318 - DNA, 25 bp, Homo sapien
cagaggtctctattggatttctcaa

SEQ ID NO: 711319 - DNA, 25 bp, Homo sapien
ttccccgcagcctgtagtattcatc

SEQ ID NO: 711320 - DNA, 25 bp, Homo sapien
gagacaagcagaggtctctattgga

SEQ ID NO: 711321 - DNA, 25 bp, Homo sapien
ttcttacaaattcgcatatacgtgg

SEQ ID NO: 711322 - DNA, 25 bp, Homo sapien
ttgccacggtaacccttgtggtcca

SEQ ID NO: 711323 - DNA, 25 bp, Homo sapien
tcctcttcccctttgcgttcatcat

SEQ ID NO: 711324 - DNA, 25 bp, Homo sapien
tctctcggcatgaatcttgcccttg

SEQ ID NO: 711325 - DNA, 25 bp, Homo sapien
gttttcccgctgtccccagatgttc

SEQ ID NO: 711326 - DNA, 25 bp, Homo sapien
accctctgatcctcactttctaaat

SEQ ID NO: 711327 - DNA, 25 bp, Homo sapien
tattttccaccctctgatcctcact

SEQ ID NO: 711328 - DNA, 25 bp, Homo sapien
gatgttcaggactcctggggaccac

SEQ ID NO: 711329 - DNA, 25 bp, Homo sapien
cacccttggttccttggagtcactc

SEQ ID NO: 711330 - DNA, 25 bp, Homo sapien
cccttggttccttggagtcactcat

SEQ ID NO: 711331 - DNA, 25 bp, Homo sapien
agctgctgcacccttggttccttgg

SEQ ID NO: 711332 - DNA, 25 bp, Homo sapien
gctgcacccttggttccttggagtc

SEQ ID NO: 711333 - DNA, 25 bp, Homo sapien
ctgtagagctcttgtggccatgtat

SEQ ID NO: 711334 - DNA, 25 bp, Homo sapien
gatgccactggttgttggatcttct

SEQ ID NO: 711335 - DNA, 25 bp, Homo sapien
tctgctggaattgaaagtctcttgg

SEQ ID NO: 711336 - DNA, 25 bp, Homo sapien
tcttggaaaaagtctgatgccactg

SEQ ID NO: 711337 - DNA, 25 bp, Homo sapien
gcaccagggcgccatggccaagaca

SEQ ID NO: 711338 - DNA, 25 bp, Homo sapien
catgaaggagaggagttgcagcacc

SEQ ID NO: 711339 - DNA, 25 bp, Homo sapien
cttggacaaggatggccaccaggac

SEQ ID NO: 711340 - DNA, 25 bp, Homo sapien
caggaccccagccaagagcatgaag

SEQ ID NO: 711341 - DNA, 25 bp, Homo sapien
tctggtagattgcgtcttgctcgga

SEQ ID NO: 711342 - DNA, 25 bp, Homo sapien
gattgcgtcttgctcggattgttcc

SEQ ID NO: 711343 - DNA, 25 bp, Homo sapien
ggtagattgcgtcttgctcggattg

SEQ ID NO: 711344 - DNA, 25 bp, Homo sapien
tagattgcgtcttgctcggattgtt

SEQ ID NO: 711345 - DNA, 25 bp, Homo sapien
gtcagctcctggtagatctcctgca

SEQ ID NO: 711346 - DNA, 25 bp, Homo sapien
gtcagctcctggtagatctcctgca

SEQ ID NO: 711347 - DNA, 25 bp, Homo sapien
gtcagctcctggtagatctcctgca

SEQ ID NO: 711348 - DNA, 25 bp, Homo sapien
gtcagctcctggtagatctcctgca

SEQ ID NO: 711349 - DNA, 25 bp, Homo sapien
gtcagctcctggtagatctcctgca

SEQ ID NO: 711350 - DNA, 25 bp, Homo sapien
tcaaatcggtcagttcttgatagat

SEQ ID NO: 711351 - DNA, 25 bp, Homo sapien
gcagtcttcaaatcggtcagttctt

SEQ ID NO: 711352 - DNA, 25 bp, Homo sapien
tgctgctgcttggactggtctggca

SEQ ID NO: 711353 - DNA, 25 bp, Homo sapien
tcggtcagttcttgatagatttgct

SEQ ID NO: 711354 - DNA, 25 bp, Homo sapien
tcaggcccaaggacccttgatgtgc

SEQ ID NO: 711355 - DNA, 25 bp, Homo sapien
caaggacccttgatgtgcaggaact

SEQ ID NO: 711356 - DNA, 25 bp, Homo sapien
gcccaaggacccttgatgtgcagga

SEQ ID NO: 711357 - DNA, 25 bp, Homo sapien
ggacccttgatgtgcaggaactcac

SEQ ID NO: 711358 - DNA, 25 bp, Homo sapien
agggcccttccttgactgtccatgt

SEQ ID NO: 711359 - DNA, 25 bp, Homo sapien
taccccgtgttctcatttcacaggg

SEQ ID NO: 711360 - DNA, 25 bp, Homo sapien
ggctcaggcagggttggtaactcaa

SEQ ID NO: 711361 - DNA, 25 bp, Homo sapien
tgcaatgatcgcagttaccccgtgt

SEQ ID NO: 711362 - DNA, 25 bp, Homo sapien
cagttccgctgggagttagacatga

SEQ ID NO: 711363 - DNA, 25 bp, Homo sapien
ccgctgggagttagacatgaagtaa

SEQ ID NO: 711364 - DNA, 25 bp, Homo sapien
agtcgtgccagttccgctgggagtt

SEQ ID NO: 711365 - DNA, 25 bp, Homo sapien
ggagttagacatgaagtaacagttt

SEQ ID NO: 711366 - DNA, 25 bp, Homo sapien
tatttgcttgaagggtacctgggac

SEQ ID NO: 711367 - DNA, 25 bp, Homo sapien
tgtactggagccacattggacccac

SEQ ID NO: 711368 - DNA, 25 bp, Homo sapien
gagagctggccgttaaacacctgca

SEQ ID NO: 711369 - DNA, 25 bp, Homo sapien
tttctgatatagcaggtcctgagcc

SEQ ID NO: 711370 - DNA, 25 bp, Homo sapien
agaagcggttactcctggaagtctg

SEQ ID NO: 711371 - DNA, 25 bp, Homo sapien
ggagaagcggttactcctggaagtc

SEQ ID NO: 711372 - DNA, 25 bp, Homo sapien
aggagaagcggttactcctggaagt

SEQ ID NO: 711373 - DNA, 25 bp, Homo sapien
catcctgtctggaggtgggtatgaa

SEQ ID NO: 711374 - DNA, 25 bp, Homo sapien
cccagggaaagctcaagtcagagtt

SEQ ID NO: 711375 - DNA, 25 bp, Homo sapien
gagctggtggccttactagacttca

SEQ ID NO: 711376 - DNA, 25 bp, Homo sapien
gaaatgtgcgccctctaggaacctg

SEQ ID NO: 711377 - DNA, 25 bp, Homo sapien
agcccatgcagaatgtgagcctctg

SEQ ID NO: 711378 - DNA, 25 bp, Homo sapien
aaagcccatgcagaatgtgagcctc

SEQ ID NO: 711379 - DNA, 25 bp, Homo sapien
cccatgcagaatgtgagcctctgcc

SEQ ID NO: 711380 - DNA, 25 bp, Homo sapien
ctgcaaagcccatgcagaatgtgag

SEQ ID NO: 711381 - DNA, 25 bp, Homo sapien
tattgttgggttctccactgttcca

SEQ ID NO: 711382 - DNA, 25 bp, Homo sapien
tctccactgttccagtaccgctgga

SEQ ID NO: 711383 - DNA, 25 bp, Homo sapien
ctccactgttccagtaccgctggaa

SEQ ID NO: 711384 - DNA, 25 bp, Homo sapien
ctattgttgggttctccactgttcc

SEQ ID NO: 711385 - DNA, 25 bp, Homo sapien
ttgtcaacgtcacatcgattgtcgt

SEQ ID NO: 711386 - DNA, 25 bp, Homo sapien
ctaaattccgcacagtcttcattcc

SEQ ID NO: 711387 - DNA, 25 bp, Homo sapien
aagcaggctgcgggctttttgcaga

SEQ ID NO: 711388 - DNA, 25 bp, Homo sapien
tttttgcagatccagtaattgtcaa

SEQ ID NO: 711389 - DNA, 25 bp, Homo sapien
tgctataccacaatggaggctgagg

SEQ ID NO: 711390 - DNA, 25 bp, Homo sapien
gttctgctataccacaatggaggct

SEQ ID NO: 711391 - DNA, 25 bp, Homo sapien
gaagttctgctataccacaatggag

SEQ ID NO: 711392 - DNA, 25 bp, Homo sapien
ggtgaagttctgctataccacaatg

SEQ ID NO: 711393 - DNA, 25 bp, Homo sapien
gattcatacaacataccaagcccgc

SEQ ID NO: 711394 - DNA, 25 bp, Homo sapien
tctcagggcatttgtgaaggtccaa

SEQ ID NO: 711395 - DNA, 25 bp, Homo sapien
gacagggcagctacacatgaatcca

SEQ ID NO: 711396 - DNA, 25 bp, Homo sapien
tgaaaaatcgaacagagaaccgtct

SEQ ID NO: 711397 - DNA, 25 bp, Homo sapien
cagtcaaaagggtgcacggggtgta

SEQ ID NO: 711398 - DNA, 25 bp, Homo sapien
agaggttgtatggagcctccatgcc

SEQ ID NO: 711399 - DNA, 25 bp, Homo sapien
ggaagaggttgtatggagcctccat

SEQ ID NO: 711400 - DNA, 25 bp, Homo sapien
cttcaaccagcaagtccccagtcaa

SEQ ID NO: 711401 - DNA, 25 bp, Homo sapien
caaaacattcacattcgccttgata

SEQ ID NO: 711402 - DNA, 25 bp, Homo sapien
aacattcacattcgccttgatagac

SEQ ID NO: 711403 - DNA, 25 bp, Homo sapien
cattcacattcgccttgatagacat

SEQ ID NO: 711404 - DNA, 25 bp, Homo sapien
aaaacattcacattcgccttgatag

SEQ ID NO: 711405 - DNA, 25 bp, Homo sapien
ggcaagagccgagttgcagcagatc

SEQ ID NO: 711406 - DNA, 25 bp, Homo sapien
caagtcaaaggtcgcactgagcacc

SEQ ID NO: 711407 - DNA, 25 bp, Homo sapien
tcaaattgcctggttggccctcttc

SEQ ID NO: 711408 - DNA, 25 bp, Homo sapien
gcagcagatccgtaacctcaaagta

SEQ ID NO: 711409 - DNA, 25 bp, Homo sapien
cgcacctggtgggtggagtttacct

SEQ ID NO: 711410 - DNA, 25 bp, Homo sapien
gacagcgcaccccagtgaaagaatc

SEQ ID NO: 711411 - DNA, 25 bp, Homo sapien
caggctactgcgcatgcagacagcg

SEQ ID NO: 711412 - DNA, 25 bp, Homo sapien
gtaaatacactgttcacgtggcccc

SEQ ID NO: 711413 - DNA, 25 bp, Homo sapien
gcagggacaagaggtttggacaaat

SEQ ID NO: 711414 - DNA, 25 bp, Homo sapien
agctccaaggccatgaccactctgg

SEQ ID NO: 711415 - DNA, 25 bp, Homo sapien
aaggccatgaccactctggtttcca

SEQ ID NO: 711416 - DNA, 25 bp, Homo sapien
tccaaggccatgaccactctggttt

SEQ ID NO: 711417 - DNA, 25 bp, Homo sapien
cattaaagaacgttctcaatacggt

SEQ ID NO: 711418 - DNA, 25 bp, Homo sapien
cctggaggatccgagagggcttcct

SEQ ID NO: 711419 - DNA, 25 bp, Homo sapien
catgtaaccacggaatttgaagaca

SEQ ID NO: 711420 - DNA, 25 bp, Homo sapien
tcaatacggtatcagcacatgcaag

SEQ ID NO: 711421 - DNA, 25 bp, Homo sapien
cggagctgtccagcttagtgaggaa

SEQ ID NO: 711422 - DNA, 25 bp, Homo sapien
ctgtgcccagacctcgctgcggggt

SEQ ID NO: 711423 - DNA, 25 bp, Homo sapien
gcccatcaatgtcctgtgcccagac

SEQ ID NO: 711424 - DNA, 25 bp, Homo sapien
gtgcccagacctcgctgcggggtaa

SEQ ID NO: 711425 - DNA, 25 bp, Homo sapien
gaggagatagaggctctgctggata

SEQ ID NO: 711426 - DNA, 25 bp, Homo sapien
gagatagaggctctgctggatacac

SEQ ID NO: 711427 - DNA, 25 bp, Homo sapien
ttatggaggagatagaggctctgct

SEQ ID NO: 711428 - DNA, 25 bp, Homo sapien
cttatggaggagatagaggctctgc

SEQ ID NO: 711429 - DNA, 25 bp, Homo sapien
gagggcacgccctcttcattctgag

SEQ ID NO: 711430 - DNA, 25 bp, Homo sapien
ttttggagggcacgccctcttcatt

SEQ ID NO: 711431 - DNA, 25 bp, Homo sapien
tggagggcacgccctcttcattctg

SEQ ID NO: 711432 - DNA, 25 bp, Homo sapien
ctttttggagggcacgccctcttca

SEQ ID NO: 711433 - DNA, 25 bp, Homo sapien
atataaatttcaccctcgtcctcac

SEQ ID NO: 711434 - DNA, 25 bp, Homo sapien
agatataaatttcaccctcgtcctc

SEQ ID NO: 711435 - DNA, 25 bp, Homo sapien
gatataaatttcaccctcgtcctca

SEQ ID NO: 711436 - DNA, 25 bp, Homo sapien
gtgtctatggcggtgcaggcaccga

SEQ ID NO: 711437 - DNA, 25 bp, Homo sapien
tctatggcggtgcaggcaccgagac

SEQ ID NO: 711438 - DNA, 25 bp, Homo sapien
tgtctatggcggtgcaggcaccgag

SEQ ID NO: 711439 - DNA, 25 bp, Homo sapien
ggtgtctatggcggtgcaggcaccg

SEQ ID NO: 711440 - DNA, 25 bp, Homo sapien
gacctcctcgtagctcccgccccag

SEQ ID NO: 711441 - DNA, 25 bp, Homo sapien
ctcctcgtagctcccgccccagttg

SEQ ID NO: 711442 - DNA, 25 bp, Homo sapien
tcgtagctcccgccccagttgctgt

SEQ ID NO: 711443 - DNA, 25 bp, Homo sapien
gtagctcccgccccagttgctgtac

SEQ ID NO: 711444 - DNA, 25 bp, Homo sapien
ctggcagaacaaggacggcatgctg

SEQ ID NO: 711445 - DNA, 25 bp, Homo sapien
ccccaggactgagccctagaggcct

SEQ ID NO: 711446 - DNA, 25 bp, Homo sapien
tggcagaacaaggacggcatgctgg

SEQ ID NO: 711447 - DNA, 25 bp, Homo sapien
ggccaggaagaggggtctcgggctc

SEQ ID NO: 711448 - DNA, 25 bp, Homo sapien
tccagtgcacccagcgtccccagtg

SEQ ID NO: 711449 - DNA, 25 bp, Homo sapien
caggaagaggggtctcgggctccag

SEQ ID NO: 711450 - DNA, 25 bp, Homo sapien
aggggtctcgggctccagtgcaccc

SEQ ID NO: 711451 - DNA, 25 bp, Homo sapien
gcccacagtactggcgaccaggaca

SEQ ID NO: 711452 - DNA, 25 bp, Homo sapien
cacagcccacagtactggcgaccag

SEQ ID NO: 711453 - DNA, 25 bp, Homo sapien
agcccacagtactggcgaccaggac

SEQ ID NO: 711454 - DNA, 25 bp, Homo sapien
aatcacagcccacagtactggcgac

SEQ ID NO: 711455 - DNA, 25 bp, Homo sapien
gcaaacggcccaaagatgtacacac

SEQ ID NO: 711456 - DNA, 25 bp, Homo sapien
tctgctcacgctcagacgcgagcaa

SEQ ID NO: 711457 - DNA, 25 bp, Homo sapien
catgcagtgggggttttgtgtcccc

SEQ ID NO: 711458 - DNA, 25 bp, Homo sapien
cagggcgcagttggtgcgccatgca

SEQ ID NO: 711459 - DNA, 25 bp, Homo sapien
tgcacacacgccgatgggagacaaa

SEQ ID NO: 711460 - DNA, 25 bp, Homo sapien
caaacgcgtggggactcgcacacat

SEQ ID NO: 711461 - DNA, 25 bp, Homo sapien
cacgccgatgggagacaaacgcgtg

SEQ ID NO: 711462 - DNA, 25 bp, Homo sapien
cgtggggactcgcacacatacgtgc

SEQ ID NO: 711463 - DNA, 25 bp, Homo sapien
cgggcaggcaggcatatagcgcaca

SEQ ID NO: 711464 - DNA, 25 bp, Homo sapien
ccccgactcgggaccacagagcggg

SEQ ID NO: 711465 - DNA, 25 bp, Homo sapien
cagggactcggaaatccttcccttg

SEQ ID NO: 711466 - DNA, 25 bp, Homo sapien
tcgggaccacagagcgggcgggcag

SEQ ID NO: 711467 - DNA, 25 bp, Homo sapien
aggtcctggcagccgagcagcgccg

SEQ ID NO: 711468 - DNA, 25 bp, Homo sapien
caggtcctggcagccgagcagcgcc

SEQ ID NO: 711469 - DNA, 25 bp, Homo sapien
ctggcagccgagcagcgccgcgcgc

SEQ ID NO: 711470 - DNA, 25 bp, Homo sapien
tcctggcagccgagcagcgccgcgc

SEQ ID NO: 711471 - DNA, 25 bp, Homo sapien
atctctggggtctcagacgctcccg

SEQ ID NO: 711472 - DNA, 25 bp, Homo sapien
gggtctcagacgctcccgccgcaca

SEQ ID NO: 711473 - DNA, 25 bp, Homo sapien
ggcgcccaggcgcccggctctgcac

SEQ ID NO: 711474 - DNA, 25 bp, Homo sapien
cgcacacgccccgggcgcccaggcg

SEQ ID NO: 711475 - DNA, 25 bp, Homo sapien
aaacgcatgcccgccgggtcacttg

SEQ ID NO: 711476 - DNA, 25 bp, Homo sapien
cccaaaacgcatgcccgccgggtca

SEQ ID NO: 711477 - DNA, 25 bp, Homo sapien
catcccaaaacgcatgcccgccggg

SEQ ID NO: 711478 - DNA, 25 bp, Homo sapien
cccttccacaccccgtggccagact

SEQ ID NO: 711479 - DNA, 25 bp, Homo sapien
ctccagggcacccagcgccgccgtc

SEQ ID NO: 711480 - DNA, 25 bp, Homo sapien
tcctccagggcacccagcgccgccg

SEQ ID NO: 711481 - DNA, 25 bp, Homo sapien
ccagggcacccagcgccgccgtctg

SEQ ID NO: 711482 - DNA, 25 bp, Homo sapien
cctcctccagggcacccagcgccgc

SEQ ID NO: 711483 - DNA, 25 bp, Homo sapien
gctccgcgctcgtggtctgcagcag

SEQ ID NO: 711484 - DNA, 25 bp, Homo sapien
cctgcgcctccccaagctccgcgct

SEQ ID NO: 711485 - DNA, 25 bp, Homo sapien
tgctccatcagcttcgcctgcgcct

SEQ ID NO: 711486 - DNA, 25 bp, Homo sapien
caagctccgcgctcgtggtctgcag

SEQ ID NO: 711487 - DNA, 25 bp, Homo sapien
gtacagctcggtgctgacgtcctcg

SEQ ID NO: 711488 - DNA, 25 bp, Homo sapien
agctcggtgctgacgtcctcgcggt

SEQ ID NO: 711489 - DNA, 25 bp, Homo sapien
agcgcccggtacagctcggtgctga

SEQ ID NO: 711490 - DNA, 25 bp, Homo sapien
ggtgctgacgtcctcgcggtccctg

SEQ ID NO: 711491 - DNA, 25 bp, Homo sapien
atagtagcaggagcccccgaagggc

SEQ ID NO: 711492 - DNA, 25 bp, Homo sapien
aatagtagcaggagcccccgaaggg

SEQ ID NO: 711493 - DNA, 25 bp, Homo sapien
tagtagcaggagcccccgaagggca

SEQ ID NO: 711494 - DNA, 25 bp, Homo sapien
tggcatcggcgcagtggccctgcgc

SEQ ID NO: 711495 - DNA, 25 bp, Homo sapien
tacatcgccagatgtgcgctggcat

SEQ ID NO: 711496 - DNA, 25 bp, Homo sapien
atcgccagatgtgcgctggcatcgg

SEQ ID NO: 711497 - DNA, 25 bp, Homo sapien
gtggccctgcgcctctgcccacgtg

SEQ ID NO: 711498 - DNA, 25 bp, Homo sapien
cactagtgtcacgactcaggaagtc

SEQ ID NO: 711499 - DNA, 25 bp, Homo sapien
tgaaccttgcgcaggtgttgcacgg

SEQ ID NO: 711500 - DNA, 25 bp, Homo sapien
gatccagtattcacgggcactagtg

SEQ ID NO: 711501 - DNA, 25 bp, Homo sapien
ggccctgcggccgatccagtattca

SEQ ID NO: 711502 - DNA, 25 bp, Homo sapien
cctacctgaagctgagtgggactca

SEQ ID NO: 711503 - DNA, 25 bp, Homo sapien
gtccctgagatctggccaaagcatg

SEQ ID NO: 711504 - DNA, 25 bp, Homo sapien
gtctaacctgagtatacacctggga

SEQ ID NO: 711505 - DNA, 25 bp, Homo sapien
gaatctaagctagggatggacccgg

SEQ ID NO: 711506 - DNA, 25 bp, Homo sapien
cgcgcttcccagttatgaaaggcaa

SEQ ID NO: 711507 - DNA, 25 bp, Homo sapien
ccgcgcttcccagttatgaaaggca

SEQ ID NO: 711508 - DNA, 25 bp, Homo sapien
ggccccttgggctcgcacacttcct

SEQ ID NO: 711509 - DNA, 25 bp, Homo sapien
tggccccttgggctcgcacacttcc

SEQ ID NO: 711510 - DNA, 25 bp, Homo sapien
ccccttgggctcgcacacttcctcc

SEQ ID NO: 711511 - DNA, 25 bp, Homo sapien
gccccttgggctcgcacacttcctc

SEQ ID NO: 711512 - DNA, 25 bp, Homo sapien
ggttggtttctcacttagttcctgc

SEQ ID NO: 711513 - DNA, 25 bp, Homo sapien
gagtggccaccccattaatgagtgg

SEQ ID NO: 711514 - DNA, 25 bp, Homo sapien
tctgactttgctacccagtgtaacc

SEQ ID NO: 711515 - DNA, 25 bp, Homo sapien
acaagtctggttggctttcacaaag

SEQ ID NO: 711516 - DNA, 25 bp, Homo sapien
atgacaattacacccatccactgct

SEQ ID NO: 711517 - DNA, 25 bp, Homo sapien
caattacacccatccactgctcctt

SEQ ID NO: 711518 - DNA, 25 bp, Homo sapien
gacaattacacccatccactgctcc

SEQ ID NO: 711519 - DNA, 25 bp, Homo sapien
catgacaattacacccatccactgc

SEQ ID NO: 711520 - DNA, 25 bp, Homo sapien
ggaagaccagagatgagcaccttgt

SEQ ID NO: 711521 - DNA, 25 bp, Homo sapien
tctggaaggaggaatgagagtctca

SEQ ID NO: 711522 - DNA, 25 bp, Homo sapien
cagacagcttagagcggacatacac

SEQ ID NO: 711523 - DNA, 25 bp, Homo sapien
tactgctgtcacacaagggagggca

SEQ ID NO: 711524 - DNA, 25 bp, Homo sapien
ctttcaatgggccataatttccttt

SEQ ID NO: 711525 - DNA, 25 bp, Homo sapien
tcttgcaaagactatattacttgtc

SEQ ID NO: 711526 - DNA, 25 bp, Homo sapien
ttctctgtataccttgtgatttttc

SEQ ID NO: 711527 - DNA, 25 bp, Homo sapien
ttggatgtcagattctcccactgtc

SEQ ID NO: 711528 - DNA, 25 bp, Homo sapien
cattccgtggccattccgtgaggcg

SEQ ID NO: 711529 - DNA, 25 bp, Homo sapien
tacgttcagaaggttgccgcctctg

SEQ ID NO: 711530 - DNA, 25 bp, Homo sapien
ggacaggtagttttgcgtatcggaa

SEQ ID NO: 711531 - DNA, 25 bp, Homo sapien
gccgcctctgaggagagagcgaatt

SEQ ID NO: 711532 - DNA, 25 bp, Homo sapien
cgccggatcctagccgcgccgttcg

SEQ ID NO: 711533 - DNA, 25 bp, Homo sapien
cgccgctgccatttcacccgctgac

SEQ ID NO: 711534 - DNA, 25 bp, Homo sapien
cgggctgagccgccggatcctagcc

SEQ ID NO: 711535 - DNA, 25 bp, Homo sapien
gccgccatctccgtgccgagcctcg

SEQ ID NO: 711536 - DNA, 25 bp, Homo sapien
cagagaggggtcctgtggggtcagc

SEQ ID NO: 711537 - DNA, 25 bp, Homo sapien
catggggggcgggtaggccctgagg

SEQ ID NO: 711538 - DNA, 25 bp, Homo sapien
ggtaggccctgaggctggtctcctt

SEQ ID NO: 711539 - DNA, 25 bp, Homo sapien
gccagagaggggtcctgtggggtca

SEQ ID NO: 711540 - DNA, 25 bp, Homo sapien
ctgggtggacgccggggagtggtgt

SEQ ID NO: 711541 - DNA, 25 bp, Homo sapien
gcatgggtggatttttcaggatcca

SEQ ID NO: 711542 - DNA, 25 bp, Homo sapien
tatccaacgggaggtcttgagcatg

SEQ ID NO: 711543 - DNA, 25 bp, Homo sapien
tcagaatatccaacgggaggtcttg

SEQ ID NO: 711544 - DNA, 25 bp, Homo sapien
ttgagcatgggtggatttttcagga

SEQ ID NO: 711545 - DNA, 25 bp, Homo sapien
tcaatcaaacactctcacaagcata

SEQ ID NO: 711546 - DNA, 25 bp, Homo sapien
tcaaacactctcacaagcatatcgt

SEQ ID NO: 711547 - DNA, 25 bp, Homo sapien
actctcacaagcatatcgtggcatg

SEQ ID NO: 711548 - DNA, 25 bp, Homo sapien
aacactctcacaagcatatcgtggc

SEQ ID NO: 711549 - DNA, 25 bp, Homo sapien
caggaaccttctgatcccaccggaa

SEQ ID NO: 711550 - DNA, 25 bp, Homo sapien
gagccgtccaccagcagaggttgtt

SEQ ID NO: 711551 - DNA, 25 bp, Homo sapien
gaaacttgcagtctgagaggcagga

SEQ ID NO: 711552 - DNA, 25 bp, Homo sapien
catcctcctgaagcgtgtgtgcacg

SEQ ID NO: 711553 - DNA, 25 bp, Homo sapien
tgggtgggcttgttagccgtgagcg

SEQ ID NO: 711554 - DNA, 25 bp, Homo sapien
ccgtgagcggggttggttcacagct

SEQ ID NO: 711555 - DNA, 25 bp, Homo sapien
ggtgggtgggcttgttagccgtgag

SEQ ID NO: 711556 - DNA, 25 bp, Homo sapien
ggtgggcttgttagccgtgagcggg

SEQ ID NO: 711557 - DNA, 25 bp, Homo sapien
cggttctgctcttcgagcttggcca

SEQ ID NO: 711558 - DNA, 25 bp, Homo sapien
tcctgggatgaggagtcggggctca

SEQ ID NO: 711559 - DNA, 25 bp, Homo sapien
tctgctcttcgagcttggccagcag

SEQ ID NO: 711560 - DNA, 25 bp, Homo sapien
tgaggttctcggagtcagaggttgg

SEQ ID NO: 711561 - DNA, 25 bp, Homo sapien
catggacttggagtcggcctccagg

SEQ ID NO: 711562 - DNA, 25 bp, Homo sapien
ctagcgaggagccactgttccgccg

SEQ ID NO: 711563 - DNA, 25 bp, Homo sapien
agctggacactagcgaggagccact

SEQ ID NO: 711564 - DNA, 25 bp, Homo sapien
tgttccgccgcgagccattcatgga

SEQ ID NO: 711565 - DNA, 25 bp, Homo sapien
tcttgagcagctcggagtactggtt

SEQ ID NO: 711566 - DNA, 25 bp, Homo sapien
tactggttcttgacgggcatgtccg

SEQ ID NO: 711567 - DNA, 25 bp, Homo sapien
ctcgcacggcgaggacatcttgagc

SEQ ID NO: 711568 - DNA, 25 bp, Homo sapien
agaactcatgttccgggtaggtgcg

SEQ ID NO: 711569 - DNA, 25 bp, Homo sapien
acctcccggtctaccagcgagtatg

SEQ ID NO: 711570 - DNA, 25 bp, Homo sapien
tagcccacctcccggtctaccagcg

SEQ ID NO: 711571 - DNA, 25 bp, Homo sapien
ccacctcccggtctaccagcgagta

SEQ ID NO: 711572 - DNA, 25 bp, Homo sapien
gcccacctcccggtctaccagcgag

SEQ ID NO: 711573 - DNA, 25 bp, Homo sapien
agccgcacgaacacacagaaggcct

SEQ ID NO: 711574 - DNA, 25 bp, Homo sapien
tgcatcagccgcacgaacacacaga

SEQ ID NO: 711575 - DNA, 25 bp, Homo sapien
ctgatagatgcagagcccgagctcg

SEQ ID NO: 711576 - DNA, 25 bp, Homo sapien
tgcagcatgtactcgaactgataga

SEQ ID NO: 711577 - DNA, 25 bp, Homo sapien
agatgtcaaagacccgggtggcgac

SEQ ID NO: 711578 - DNA, 25 bp, Homo sapien
catgaagatgtcaaagacccgggtg

SEQ ID NO: 711579 - DNA, 25 bp, Homo sapien
catacatggatgtgtggaagctttg

SEQ ID NO: 711580 - DNA, 25 bp, Homo sapien
gtgaggaaccaggacgaggcataca

SEQ ID NO: 711581 - DNA, 25 bp, Homo sapien
cagggcgaggcccactcggaacacg

SEQ ID NO: 711582 - DNA, 25 bp, Homo sapien
agcagggcgaggcccactcggaaca

SEQ ID NO: 711583 - DNA, 25 bp, Homo sapien
gcgaggcccactcggaacacgatct

SEQ ID NO: 711584 - DNA, 25 bp, Homo sapien
gggcgaggcccactcggaacacgat

SEQ ID NO: 711585 - DNA, 25 bp, Homo sapien
catgttcacggacacaaccgtggcc

SEQ ID NO: 711586 - DNA, 25 bp, Homo sapien
ccgtggcctttgtgcattcttccct

SEQ ID NO: 711587 - DNA, 25 bp, Homo sapien
ggacacaaccgtggcctttgtgcat

SEQ ID NO: 711588 - DNA, 25 bp, Homo sapien
agctggccccctctggtagctgtgg

SEQ ID NO: 711589 - DNA, 25 bp, Homo sapien
tgcctgcagccaaagccttagtttc

SEQ ID NO: 711590 - DNA, 25 bp, Homo sapien
aaagactgagcgtgaggggagggaa

SEQ ID NO: 711591 - DNA, 25 bp, Homo sapien
ggctcattcatataatcccaatgat

SEQ ID NO: 711592 - DNA, 25 bp, Homo sapien
tcagtgtttgtggagcaatggaaag

SEQ ID NO: 711593 - DNA, 25 bp, Homo sapien
ctggtcaccaacatgcaggccctga

SEQ ID NO: 711594 - DNA, 25 bp, Homo sapien
gtcaccaacatgcaggccctgacca

SEQ ID NO: 711595 - DNA, 25 bp, Homo sapien
acatgcaggccctgaccaccggggg

SEQ ID NO: 711596 - DNA, 25 bp, Homo sapien
caacatgcaggccctgaccaccggg

SEQ ID NO: 711597 - DNA, 25 bp, Homo sapien
ctgtcgaactggtgggggatcactc

SEQ ID NO: 711598 - DNA, 25 bp, Homo sapien
gtacttgacctggtaggctttgagg

SEQ ID NO: 711599 - DNA, 25 bp, Homo sapien
gttgtacttgacctggtaggctttg

SEQ ID NO: 711600 - DNA, 25 bp, Homo sapien
tttgaggaccagcttgtccgggcag

SEQ ID NO: 711601 - DNA, 25 bp, Homo sapien
accctggttgcccagcaggcaccga

SEQ ID NO: 711602 - DNA, 25 bp, Homo sapien
cagtaccctggttgcccagcaggca

SEQ ID NO: 711603 - DNA, 25 bp, Homo sapien
gtaccctggttgcccagcaggcacc

SEQ ID NO: 711604 - DNA, 25 bp, Homo sapien
ccctggttgcccagcaggcaccgac

SEQ ID NO: 711605 - DNA, 25 bp, Homo sapien
ccttgctcttcatggctgcgtactc

SEQ ID NO: 711606 - DNA, 25 bp, Homo sapien
tccttgctcttcatggctgcgtact

SEQ ID NO: 711607 - DNA, 25 bp, Homo sapien
cttgctcttcatggctgcgtactcc

SEQ ID NO: 711608 - DNA, 25 bp, Homo sapien
ttgctcttcatggctgcgtactcct

SEQ ID NO: 711609 - DNA, 25 bp, Homo sapien
gattgcttccccatgacgctgggcg

SEQ ID NO: 711610 - DNA, 25 bp, Homo sapien
ctgtcttggttaccgcggcgtcagg

SEQ ID NO: 711611 - DNA, 25 bp, Homo sapien
ggaccttgactgtcttggttaccgc

SEQ ID NO: 711612 - DNA, 25 bp, Homo sapien
tattgattgcttccccatgacgctg

SEQ ID NO: 711613 - DNA, 25 bp, Homo sapien
tagggtttcaatccgctgtttcagg

SEQ ID NO: 711614 - DNA, 25 bp, Homo sapien
tctagggtttcaatccgctgtttca

SEQ ID NO: 711615 - DNA, 25 bp, Homo sapien
ctagggtttcaatccgctgtttcag

SEQ ID NO: 711616 - DNA, 25 bp, Homo sapien
gaaccacttgtcactaacgcagtgg

SEQ ID NO: 711617 - DNA, 25 bp, Homo sapien
gacagacaagaaccacttgtcacta

SEQ ID NO: 711618 - DNA, 25 bp, Homo sapien
gacaagaaccacttgtcactaacgc

SEQ ID NO: 711619 - DNA, 25 bp, Homo sapien
ttgtcactaacgcagtggactatct

SEQ ID NO: 711620 - DNA, 25 bp, Homo sapien
ggattaacctatcagccagagcagc

SEQ ID NO: 711621 - DNA, 25 bp, Homo sapien
aacctatcagccagagcagcgctct

SEQ ID NO: 711622 - DNA, 25 bp, Homo sapien
attaacctatcagccagagcagcgc

SEQ ID NO: 711623 - DNA, 25 bp, Homo sapien
ctggattaacctatcagccagagca

SEQ ID NO: 711624 - DNA, 25 bp, Homo sapien
gccccagttgggatccttatccagg

SEQ ID NO: 711625 - DNA, 25 bp, Homo sapien
tgaatatggttttaggttccccagc

SEQ ID NO: 711626 - DNA, 25 bp, Homo sapien
gcatgtggacattcacacccaaacg

SEQ ID NO: 711627 - DNA, 25 bp, Homo sapien
tgtgtcgcccggaggaagctttctg

SEQ ID NO: 711628 - DNA, 25 bp, Homo sapien
tgctcctgtagctgccggatggtgc

SEQ ID NO: 711629 - DNA, 25 bp, Homo sapien
gccgagctgcactgctgccgcacca

SEQ ID NO: 711630 - DNA, 25 bp, Homo sapien
ttgatgacgtagttctcctccgcct

SEQ ID NO: 711631 - DNA, 25 bp, Homo sapien
agctcccgcttgatgacgtagttct

SEQ ID NO: 711632 - DNA, 25 bp, Homo sapien
ggacaggcaagagcctccgtaagga

SEQ ID NO: 711633 - DNA, 25 bp, Homo sapien
cagatactgcagacacactatgagg

SEQ ID NO: 711634 - DNA, 25 bp, Homo sapien
gagcctccgtaaggagtcacagccc

SEQ ID NO: 711635 - DNA, 25 bp, Homo sapien
caccaggtcgcagttaagttctaaa

SEQ ID NO: 711636 - DNA, 25 bp, Homo sapien
tcggtctccaggtgggacacgaagt

SEQ ID NO: 711637 - DNA, 25 bp, Homo sapien
ttttccatgtcgagaaccttgtcct

SEQ ID NO: 711638 - DNA, 25 bp, Homo sapien
tgggacacgaagtcttctgtgaggc

SEQ ID NO: 711639 - DNA, 25 bp, Homo sapien
gagaaccttgtcctgcatctcccga

SEQ ID NO: 711640 - DNA, 25 bp, Homo sapien
ctagggctgggacagatctagcagc

SEQ ID NO: 711641 - DNA, 25 bp, Homo sapien
actcgcctgtggaacccggttggag

SEQ ID NO: 711642 - DNA, 25 bp, Homo sapien
gatgaggtccgcactgacccgtgtt

SEQ ID NO: 711643 - DNA, 25 bp, Homo sapien
tactctcacagggtgtcctagggca

SEQ ID NO: 711644 - DNA, 25 bp, Homo sapien
cacattgttctcgtcgggcagcgag

SEQ ID NO: 711645 - DNA, 25 bp, Homo sapien
tgccaggtgtccgagagctcctgca

SEQ ID NO: 711646 - DNA, 25 bp, Homo sapien
tgcagtttaagctctcgcgtcgagg

SEQ ID NO: 711647 - DNA, 25 bp, Homo sapien
tgcagctgcgccacattgttctcgt

SEQ ID NO: 711648 - DNA, 25 bp, Homo sapien
ctggggggtgaagccgagaagccgg

SEQ ID NO: 711649 - DNA, 25 bp, Homo sapien
aagccggcggtcagcctccgcccaa

SEQ ID NO: 711650 - DNA, 25 bp, Homo sapien
ccgagaagccggcggtcagcctccg

SEQ ID NO: 711651 - DNA, 25 bp, Homo sapien
atggccctagggggcgctctgcccg

SEQ ID NO: 711652 - DNA, 25 bp, Homo sapien
gacgcacgctcatcagctcgtcctg

SEQ ID NO: 711653 - DNA, 25 bp, Homo sapien
gggcctcgcgcagacgcacgctcat

SEQ ID NO: 711654 - DNA, 25 bp, Homo sapien
gaccagcttccgtggggactccttc

SEQ ID NO: 711655 - DNA, 25 bp, Homo sapien
cgtctcaagttccaccacgcgctgc

SEQ ID NO: 711656 - DNA, 25 bp, Homo sapien
ctcggcctgcttgcggcggctttcg

SEQ ID NO: 711657 - DNA, 25 bp, Homo sapien
cggcggctttcgctgagctgcgtct

SEQ ID NO: 711658 - DNA, 25 bp, Homo sapien
tgagctgcgtctgcagccccttgtt

SEQ ID NO: 711659 - DNA, 25 bp, Homo sapien
cacgcggttcagaaggttgcggtgg

SEQ ID NO: 711660 - DNA, 25 bp, Homo sapien
atgcgctgccgcatctcggccaccg

SEQ ID NO: 711661 - DNA, 25 bp, Homo sapien
gcatctcggccaccgcagccatgct

SEQ ID NO: 711662 - DNA, 25 bp, Homo sapien
tctccagctcggcaatgcgctgccg

SEQ ID NO: 711663 - DNA, 25 bp, Homo sapien
gccaccgcagccatgctgtccgcct

SEQ ID NO: 711664 - DNA, 25 bp, Homo sapien
ccaggtcacgcggggccagtgccat

SEQ ID NO: 711665 - DNA, 25 bp, Homo sapien
caggtcacgcggggccagtgccatg

SEQ ID NO: 711666 - DNA, 25 bp, Homo sapien
aggtcacgcggggccagtgccatgc

SEQ ID NO: 711667 - DNA, 25 bp, Homo sapien
gccaggtcacgcggggccagtgcca

SEQ ID NO: 711668 - DNA, 25 bp, Homo sapien
agtccgagtggttcagctggccctg

SEQ ID NO: 711669 - DNA, 25 bp, Homo sapien
cttgagctcgcggatgtactgcgat

SEQ ID NO: 711670 - DNA, 25 bp, Homo sapien
tcgcggatgtactgcgatgagtccg

SEQ ID NO: 711671 - DNA, 25 bp, Homo sapien
tactgcgatgagtccgagtggttca

SEQ ID NO: 711672 - DNA, 25 bp, Homo sapien
cggccttcagctcctcgatctggtc

SEQ ID NO: 711673 - DNA, 25 bp, Homo sapien
tcggccttcagctcctcgatctggt

SEQ ID NO: 711674 - DNA, 25 bp, Homo sapien
ctcggccttcagctcctcgatctgg

SEQ ID NO: 711675 - DNA, 25 bp, Homo sapien
ccaggctcagcccatcgaaagccag

SEQ ID NO: 711676 - DNA, 25 bp, Homo sapien
catcgaaagccagcgggtcctcgaa

SEQ ID NO: 711677 - DNA, 25 bp, Homo sapien
acgcctacgccaagtagctcctcgt

SEQ ID NO: 711678 - DNA, 25 bp, Homo sapien
acgacggcagcgagtcctcgtccaa

SEQ ID NO: 711679 - DNA, 25 bp, Homo sapien
tccagacggcggaagaagcgcgcat

SEQ ID NO: 711680 - DNA, 25 bp, Homo sapien
catcggcgtcgctgtctgagctgcc

SEQ ID NO: 711681 - DNA, 25 bp, Homo sapien
catcgcgcggggacagaggatacaa

SEQ ID NO: 711682 - DNA, 25 bp, Homo sapien
ttgtccagaccctggctgtagggcg

SEQ ID NO: 711683 - DNA, 25 bp, Homo sapien
tcctgttaagagagcagtcagcccc

SEQ ID NO: 711684 - DNA, 25 bp, Homo sapien
ccagggagattgcttgtgacgctac

SEQ ID NO: 711685 - DNA, 25 bp, Homo sapien
cgctactctactggaggctccggga

SEQ ID NO: 711686 - DNA, 25 bp, Homo sapien
tgattcagcagagacaacgggacca

SEQ ID NO: 711687 - DNA, 25 bp, Homo sapien
acctccgtctcgggcccacggctga

SEQ ID NO: 711688 - DNA, 25 bp, Homo sapien
tccggatacctccgtctcgggccca

SEQ ID NO: 711689 - DNA, 25 bp, Homo sapien
cggatacctccgtctcgggcccacg

SEQ ID NO: 711690 - DNA, 25 bp, Homo sapien
atacctccgtctcgggcccacggct

SEQ ID NO: 711691 - DNA, 25 bp, Homo sapien
gccctcttccatagccacgcctcct

SEQ ID NO: 711692 - DNA, 25 bp, Homo sapien
gagacgccctcttccatagccacgc

SEQ ID NO: 711693 - DNA, 25 bp, Homo sapien
accttcgccattgaccacgccccct

SEQ ID NO: 711694 - DNA, 25 bp, Homo sapien
tgaccacgccccctccggagacgcc

SEQ ID NO: 711695 - DNA, 25 bp, Homo sapien
cctctgcaggcgctatcttctctgg

SEQ ID NO: 711696 - DNA, 25 bp, Homo sapien
cacccctgaccatacaccctctgca

SEQ ID NO: 711697 - DNA, 25 bp, Homo sapien
ctgctgtctcacccctaagctcacc

SEQ ID NO: 711698 - DNA, 25 bp, Homo sapien
tctggagacccaatcttccctagcc

SEQ ID NO: 711699 - DNA, 25 bp, Homo sapien
aacaaagacctaggcctgagcgtgg

SEQ ID NO: 711700 - DNA, 25 bp, Homo sapien
gatctcagcggaggaaactgtggcc

SEQ ID NO: 711701 - DNA, 25 bp, Homo sapien
tcagaggtatcggtgacccttggcc

SEQ ID NO: 711702 - DNA, 25 bp, Homo sapien
tctccatcgggtaccaaggcaagac

SEQ ID NO: 711703 - DNA, 25 bp, Homo sapien
tgggagcggagctgccgcgactccc

SEQ ID NO: 711704 - DNA, 25 bp, Homo sapien
ctgggtctctgggagcggagctgcc

SEQ ID NO: 711705 - DNA, 25 bp, Homo sapien
tctctgggagcggagctgccgcgac

SEQ ID NO: 711706 - DNA, 25 bp, Homo sapien
ccgcagagttcccgggcgggccgcg

SEQ ID NO: 711707 - DNA, 25 bp, Homo sapien
gtaaaatgtcataggttgggccagg

SEQ ID NO: 711708 - DNA, 25 bp, Homo sapien
agtgtaaaatgtcataggttgggcc

SEQ ID NO: 711709 - DNA, 25 bp, Homo sapien
aatgtcataggttgggccaggcgca

SEQ ID NO: 711710 - DNA, 25 bp, Homo sapien
catgcaagtgtaaaatgtcataggt

SEQ ID NO: 711711 - DNA, 25 bp, Homo sapien
atgagggatagtccacagggccgcc

SEQ ID NO: 711712 - DNA, 25 bp, Homo sapien
tgtctgacctcgaagagcacatgag

SEQ ID NO: 711713 - DNA, 25 bp, Homo sapien
tgcagacactcagcgtctgggccag

SEQ ID NO: 711714 - DNA, 25 bp, Homo sapien
gaaaacatctgcctcgatgctccct

SEQ ID NO: 711715 - DNA, 25 bp, Homo sapien
agaccctcaggatgggaggctctgc

SEQ ID NO: 711716 - DNA, 25 bp, Homo sapien
tggccttagtcaccctccatgcaga

SEQ ID NO: 711717 - DNA, 25 bp, Homo sapien
acttccctcttagcctggccttagt

SEQ ID NO: 711718 - DNA, 25 bp, Homo sapien
gtccaaaccaccaaagtgtgtgccc

SEQ ID NO: 711719 - DNA, 25 bp, Homo sapien
gcaggctgctgttccgtgaactgct

SEQ ID NO: 711720 - DNA, 25 bp, Homo sapien
cccaccagggtttgagcaccttgaa

SEQ ID NO: 711721 - DNA, 25 bp, Homo sapien
gagcaccttgaacgcaggctgctgt

SEQ ID NO: 711722 - DNA, 25 bp, Homo sapien
tgctgttccgtgaactgcttgaact

SEQ ID NO: 711723 - DNA, 25 bp, Homo sapien
caggtaagtccgtagatgcacacaa

SEQ ID NO: 711724 - DNA, 25 bp, Homo sapien
ggatggccaggaacttacacacttt

SEQ ID NO: 711725 - DNA, 25 bp, Homo sapien
gagagtcgaaacacttgcccaggat

SEQ ID NO: 711726 - DNA, 25 bp, Homo sapien
tacatggtgtacaggatgtcgccct

SEQ ID NO: 711727 - DNA, 25 bp, Homo sapien
tcactgagctcaaagacggtgtcgg

SEQ ID NO: 711728 - DNA, 25 bp, Homo sapien
aaggtgatatcgcagatggcctcca

SEQ ID NO: 711729 - DNA, 25 bp, Homo sapien
tttagacggctttcgctgacctcgg

SEQ ID NO: 711730 - DNA, 25 bp, Homo sapien
ttgctccggagggacaacaccttga

SEQ ID NO: 711731 - DNA, 25 bp, Homo sapien
tcattcctcctccatcttgtcccgc

SEQ ID NO: 711732 - DNA, 25 bp, Homo sapien
attcctcctccatcttgtcccgcac

SEQ ID NO: 711733 - DNA, 25 bp, Homo sapien
cattcctcctccatcttgtcccgca

SEQ ID NO: 711734 - DNA, 25 bp, Homo sapien
gggtctaggacctcaaaagggatca

SEQ ID NO: 711735 - DNA, 25 bp, Homo sapien
gcactaattgagctggaatatccag

SEQ ID NO: 711736 - DNA, 25 bp, Homo sapien
tatttaggaacagactcctggcccc

SEQ ID NO: 711737 - DNA, 25 bp, Homo sapien
ttttggtcggagaatgccatgactg

SEQ ID NO: 711738 - DNA, 25 bp, Homo sapien
gggggaaatctatcagctgcctgaa

SEQ ID NO: 711739 - DNA, 25 bp, Homo sapien
cttaggaagtccttgaatagctctc

SEQ ID NO: 711740 - DNA, 25 bp, Homo sapien
ggaagtccttgaatagctctctggg

SEQ ID NO: 711741 - DNA, 25 bp, Homo sapien
tctgggggaaatctatcagctgcct

SEQ ID NO: 711742 - DNA, 25 bp, Homo sapien
gcaggtgtcctaaccctgcagtcca

SEQ ID NO: 711743 - DNA, 25 bp, Homo sapien
aatgtcacctctatagcaggtgtcc

SEQ ID NO: 711744 - DNA, 25 bp, Homo sapien
tatagcaggtgtcctaaccctgcag

SEQ ID NO: 711745 - DNA, 25 bp, Homo sapien
cctctatagcaggtgtcctaaccct

SEQ ID NO: 711746 - DNA, 25 bp, Homo sapien
cgtaattaggctccgtcgagagccc

SEQ ID NO: 711747 - DNA, 25 bp, Homo sapien
ttaggctccgtcgagagccctttcc

SEQ ID NO: 711748 - DNA, 25 bp, Homo sapien
caggctcagagttggccgaagccag

SEQ ID NO: 711749 - DNA, 25 bp, Homo sapien
gcaggctcagagttggccgaagcca

SEQ ID NO: 711750 - DNA, 25 bp, Homo sapien
cctcctgctggcagcggggtgccgc

SEQ ID NO: 711751 - DNA, 25 bp, Homo sapien
tcctgctggcagcggggtgccgcct

SEQ ID NO: 711752 - DNA, 25 bp, Homo sapien
ctgctggcagcggggtgccgcctcc

SEQ ID NO: 711753 - DNA, 25 bp, Homo sapien
tggcagcggggtgccgcctcctcac

SEQ ID NO: 711754 - DNA, 25 bp, Homo sapien
agagctcgaggcaggcaacgtgcaa

SEQ ID NO: 711755 - DNA, 25 bp, Homo sapien
aaggatgacgccacctagagctcga

SEQ ID NO: 711756 - DNA, 25 bp, Homo sapien
gaacctccgcgcgtgcgtgcttcgg

SEQ ID NO: 711757 - DNA, 25 bp, Homo sapien
ggctcagcccgaaggatgacgccac

SEQ ID NO: 711758 - DNA, 25 bp, Homo sapien
ccggatgaccccgtcgagccgccgt

SEQ ID NO: 711759 - DNA, 25 bp, Homo sapien
ggcagacaaacaccgcactgcgcct

SEQ ID NO: 711760 - DNA, 25 bp, Homo sapien
atgaccccgtcgagccgccgtctcg

SEQ ID NO: 711761 - DNA, 25 bp, Homo sapien
gccgcccgtcagtccggcagacaaa

SEQ ID NO: 711762 - DNA, 25 bp, Homo sapien
ggctgatatccaggttgaggtcgat

SEQ ID NO: 711763 - DNA, 25 bp, Homo sapien
gatatccaggttgaggtcgatcctc

SEQ ID NO: 711764 - DNA, 25 bp, Homo sapien
caggttgaggtcgatcctccgccgg

SEQ ID NO: 711765 - DNA, 25 bp, Homo sapien
ttgaggtcgatcctccgccgggcct

SEQ ID NO: 711766 - DNA, 25 bp, Homo sapien
cccgagccaggcgtgcgcgtgtgcg

SEQ ID NO: 711767 - DNA, 25 bp, Homo sapien
gtgcgcgtgtgcgtagatcgtcgct

SEQ ID NO: 711768 - DNA, 25 bp, Homo sapien
gatcgtcgctgcacggggctgacaa

SEQ ID NO: 711769 - DNA, 25 bp, Homo sapien
aggtgtccccgagccaggcgtgcgc

SEQ ID NO: 711770 - DNA, 25 bp, Homo sapien
tgccatggtcactgtcgccaagagg

SEQ ID NO: 711771 - DNA, 25 bp, Homo sapien
ggagcaggcctagagtcacactggc

SEQ ID NO: 711772 - DNA, 25 bp, Homo sapien
cagcccagaggatttagagaccagg

SEQ ID NO: 711773 - DNA, 25 bp, Homo sapien
gactagatatggtcagtgttcccag

SEQ ID NO: 711774 - DNA, 25 bp, Homo sapien
aggaggaacccacgctgactcaggt

SEQ ID NO: 711775 - DNA, 25 bp, Homo sapien
gagatggctaggaaccgacagagat

SEQ ID NO: 711776 - DNA, 25 bp, Homo sapien
taaactacgaaggtcacatcagagg

SEQ ID NO: 711777 - DNA, 25 bp, Homo sapien
ttgacacagacagagacgcctggag

SEQ ID NO: 711778 - DNA, 25 bp, Homo sapien
tagttgttgagagagatccataggc

SEQ ID NO: 711779 - DNA, 25 bp, Homo sapien
gcagatgtccaagcagcgatgataa

SEQ ID NO: 711780 - DNA, 25 bp, Homo sapien
cagcggttaggtcaatggtgcagat

SEQ ID NO: 711781 - DNA, 25 bp, Homo sapien
gagcagggcttagagtgatcacaat

SEQ ID NO: 711782 - DNA, 25 bp, Homo sapien
aggctgccggaccacagactggagc

SEQ ID NO: 711783 - DNA, 25 bp, Homo sapien
aggaggctgccggaccacagactgg

SEQ ID NO: 711784 - DNA, 25 bp, Homo sapien
gctgccggaccacagactggagcat

SEQ ID NO: 711785 - DNA, 25 bp, Homo sapien
ctgccggaccacagactggagcatg

SEQ ID NO: 711786 - DNA, 25 bp, Homo sapien
ttgagacactgcctagttcccgccc

SEQ ID NO: 711787 - DNA, 25 bp, Homo sapien
ctgtgcacctggcatctcttgagac

SEQ ID NO: 711788 - DNA, 25 bp, Homo sapien
acaccctgcactcagcggttgacga

SEQ ID NO: 711789 - DNA, 25 bp, Homo sapien
ctcagagagtatccgagtcccgctc

SEQ ID NO: 711790 - DNA, 25 bp, Homo sapien
ggggggtgagaaccagtggcaggga

SEQ ID NO: 711791 - DNA, 25 bp, Homo sapien
aggggggtgagaaccagtggcaggg

SEQ ID NO: 711792 - DNA, 25 bp, Homo sapien
taggggggtgagaaccagtggcagg

SEQ ID NO: 711793 - DNA, 25 bp, Homo sapien
ctaggggggtgagaaccagtggcag

SEQ ID NO: 711794 - DNA, 25 bp, Homo sapien
tgcccccatcgttggccagcgggag

SEQ ID NO: 711795 - DNA, 25 bp, Homo sapien
gctgcccccatcgttggccagcggg

SEQ ID NO: 711796 - DNA, 25 bp, Homo sapien
cggctgcccccatcgttggccagcg

SEQ ID NO: 711797 - DNA, 25 bp, Homo sapien
ctgcccccatcgttggccagcggga

SEQ ID NO: 711798 - DNA, 25 bp, Homo sapien
ggtgtgaacagggttgacgggagcc

SEQ ID NO: 711799 - DNA, 25 bp, Homo sapien
gctgcggggtgtgaacagggttgac

SEQ ID NO: 711800 - DNA, 25 bp, Homo sapien
tgtgaacagggttgacgggagcccc

SEQ ID NO: 711801 - DNA, 25 bp, Homo sapien
tgaacagggttgacgggagccccag

SEQ ID NO: 711802 - DNA, 25 bp, Homo sapien
gggacatggagcaggtgccggtgga

SEQ ID NO: 711803 - DNA, 25 bp, Homo sapien
gacatggagcaggtgccggtggagg

SEQ ID NO: 711804 - DNA, 25 bp, Homo sapien
ctggggacatggagcaggtgccggt

SEQ ID NO: 711805 - DNA, 25 bp, Homo sapien
catggagcaggtgccggtggaggtg

SEQ ID NO: 711806 - DNA, 25 bp, Homo sapien
ccccgatggtcaggtagcccgtctg

SEQ ID NO: 711807 - DNA, 25 bp, Homo sapien
tggcccccgatggtcaggtagcccg

SEQ ID NO: 711808 - DNA, 25 bp, Homo sapien
gatggtcaggtagcccgtctgcttc

SEQ ID NO: 711809 - DNA, 25 bp, Homo sapien
aggtagcccgtctgcttcatgatct

SEQ ID NO: 711810 - DNA, 25 bp, Homo sapien
actggcgctcccaggatgggtccag

SEQ ID NO: 711811 - DNA, 25 bp, Homo sapien
ctggcgctcccaggatgggtccagc

SEQ ID NO: 711812 - DNA, 25 bp, Homo sapien
cccccactggcgctcccaggatggg

SEQ ID NO: 711813 - DNA, 25 bp, Homo sapien
ccactggcgctcccaggatgggtcc

SEQ ID NO: 711814 - DNA, 25 bp, Homo sapien
gcccatctcgcccaagttctccagg

SEQ ID NO: 711815 - DNA, 25 bp, Homo sapien
gcaatgacgtggccggtcttccgga

SEQ ID NO: 711816 - DNA, 25 bp, Homo sapien
cgtggccggtcttccggaagcgcat

SEQ ID NO: 711817 - DNA, 25 bp, Homo sapien
ggtcttccggaagcgcatcttccac

SEQ ID NO: 711818 - DNA, 25 bp, Homo sapien
ggcgcagccggggtagccgccaagg

SEQ ID NO: 711819 - DNA, 25 bp, Homo sapien
agccggggtagccgccaaggctcac

SEQ ID NO: 711820 - DNA, 25 bp, Homo sapien
cgcagccggggtagccgccaaggct

SEQ ID NO: 711821 - DNA, 25 bp, Homo sapien
cagccggggtagccgccaaggctca

SEQ ID NO: 711822 - DNA, 25 bp, Homo sapien
gggcagtcgtggctcttcagcacca

SEQ ID NO: 711823 - DNA, 25 bp, Homo sapien
tcccaaagcactgcacgatgtaggg

SEQ ID NO: 711824 - DNA, 25 bp, Homo sapien
ccttgttcccggagcgccgcatttg

SEQ ID NO: 711825 - DNA, 25 bp, Homo sapien
gtccatgaggatgcgcttgttctcc

SEQ ID NO: 711826 - DNA, 25 bp, Homo sapien
gagctgtgtcttccggcccaccccc

SEQ ID NO: 711827 - DNA, 25 bp, Homo sapien
gctgtgtcttccggcccacccccca

SEQ ID NO: 711828 - DNA, 25 bp, Homo sapien
gggggagctgtgtcttccggcccac

SEQ ID NO: 711829 - DNA, 25 bp, Homo sapien
gggagctgtgtcttccggcccaccc

SEQ ID NO: 711830 - DNA, 25 bp, Homo sapien
tcttgagcttctcagcgcaggtgcc

SEQ ID NO: 711831 - DNA, 25 bp, Homo sapien
gtcatcttgcccagaatgcgctcgg

SEQ ID NO: 711832 - DNA, 25 bp, Homo sapien
cttgcccagaatgcgctcggggatg

SEQ ID NO: 711833 - DNA, 25 bp, Homo sapien
cttcttgagcttctcagcgcaggtg

SEQ ID NO: 711834 - DNA, 25 bp, Homo sapien
cccagtgcaagccccgcctggtcac

SEQ ID NO: 711835 - DNA, 25 bp, Homo sapien
gcccagtgcaagccccgcctggtca

SEQ ID NO: 711836 - DNA, 25 bp, Homo sapien
ccagtgcaagccccgcctggtcact

SEQ ID NO: 711837 - DNA, 25 bp, Homo sapien
accaggcggccgctgatgccgaagt

SEQ ID NO: 711838 - DNA, 25 bp, Homo sapien
tgccgaagtcgcagagcttgatctg

SEQ ID NO: 711839 - DNA, 25 bp, Homo sapien
cggcgctccgcgtcttggctttgga

SEQ ID NO: 711840 - DNA, 25 bp, Homo sapien
cttgacgtcgcggtggatgacaccg

SEQ ID NO: 711841 - DNA, 25 bp, Homo sapien
gcccggatgtcatagtccggcttgg

SEQ ID NO: 711842 - DNA, 25 bp, Homo sapien
ggtctggggggtcaatgcgctcggg

SEQ ID NO: 711843 - DNA, 25 bp, Homo sapien
caggctccatacgtcggcccggatg

SEQ ID NO: 711844 - DNA, 25 bp, Homo sapien
tacgtcggcccggatgtcatagtcc

SEQ ID NO: 711845 - DNA, 25 bp, Homo sapien
gaagcccatgtgtccgggcagaagc

SEQ ID NO: 711846 - DNA, 25 bp, Homo sapien
tcttgtagggaaactgtcctgttgc

SEQ ID NO: 711847 - DNA, 25 bp, Homo sapien
tctttgacgaaggactggaagtccc

SEQ ID NO: 711848 - DNA, 25 bp, Homo sapien
aagtccgtcttgcagttcttgtagg

SEQ ID NO: 711849 - DNA, 25 bp, Homo sapien
gtagcttattatactttggtctctt

SEQ ID NO: 711850 - DNA, 25 bp, Homo sapien
agtagcttattatactttggtctct

SEQ ID NO: 711851 - DNA, 25 bp, Homo sapien
tctcgtagcgcttgatgaagctgtg

SEQ ID NO: 711852 - DNA, 25 bp, Homo sapien
cggtgactcagtcttcgccatgaca

SEQ ID NO: 711853 - DNA, 25 bp, Homo sapien
aggacgccgctagtccgcggtgact

SEQ ID NO: 711854 - DNA, 25 bp, Homo sapien
acatccttgaaccaggacgccacgt

SEQ ID NO: 711855 - DNA, 25 bp, Homo sapien
ggctgcggctgaatgaacagcgact

SEQ ID NO: 711856 - DNA, 25 bp, Homo sapien
tctgtcctcagtcctaggtggccgt

SEQ ID NO: 711857 - DNA, 25 bp, Homo sapien
tgtcttccgttcacagtgtctgtcg

SEQ ID NO: 711858 - DNA, 25 bp, Homo sapien
tctgatcgcggcctgctgtcttccg

SEQ ID NO: 711859 - DNA, 25 bp, Homo sapien
gctggagcttgtcacacgtcctcaa

SEQ ID NO: 711860 - DNA, 25 bp, Homo sapien
tattctcaagcgtctaagggtttac

SEQ ID NO: 711861 - DNA, 25 bp, Homo sapien
cctcaacgtggactgggccaggtgt

SEQ ID NO: 711862 - DNA, 25 bp, Homo sapien
ggtcttcaactcaccccaagctgtg

SEQ ID NO: 711863 - DNA, 25 bp, Homo sapien
gctggaccagctgaggtcggagtgt

SEQ ID NO: 711864 - DNA, 25 bp, Homo sapien
accagctgaggtcggagtgtttggg

SEQ ID NO: 711865 - DNA, 25 bp, Homo sapien
gaccagctgaggtcggagtgtttgg

SEQ ID NO: 711866 - DNA, 25 bp, Homo sapien
tggaccagctgaggtcggagtgttt

SEQ ID NO: 711867 - DNA, 25 bp, Homo sapien
ctgggtaaggtggtgatccctggga

SEQ ID NO: 711868 - DNA, 25 bp, Homo sapien
acgcagcaggacaggcggctcccct

SEQ ID NO: 711869 - DNA, 25 bp, Homo sapien
ctgctcttggggacgcagcaggaca

SEQ ID NO: 711870 - DNA, 25 bp, Homo sapien
ggctgctcttggggacgcagcagga

SEQ ID NO: 711871 - DNA, 25 bp, Homo sapien
gcagcaggacaggcggctccccttt

SEQ ID NO: 711872 - DNA, 25 bp, Homo sapien
gcccagcaactgagccggttgcaga

SEQ ID NO: 711873 - DNA, 25 bp, Homo sapien
gattcacccatgatgggctccgcgc

SEQ ID NO: 711874 - DNA, 25 bp, Homo sapien
tccggctgggtgaagtcagagctcc

SEQ ID NO: 711875 - DNA, 25 bp, Homo sapien
gcgctgccctttaggcctccgggaa

SEQ ID NO: 711876 - DNA, 25 bp, Homo sapien
gcagccaggggccgggcgccgcggg

SEQ ID NO: 711877 - DNA, 25 bp, Homo sapien
ctgcgcagccaggggccgggcgccg

SEQ ID NO: 711878 - DNA, 25 bp, Homo sapien
gcgcagccaggggccgggcgccgcg

SEQ ID NO: 711879 - DNA, 25 bp, Homo sapien
cagccaggggccgggcgccgcgggg

SEQ ID NO: 711880 - DNA, 25 bp, Homo sapien
cgcggcgaggaaagacgtcctctgt

SEQ ID NO: 711881 - DNA, 25 bp, Homo sapien
aacacgcggctgtcggccgggacct

SEQ ID NO: 711882 - DNA, 25 bp, Homo sapien
tgtcggacagcttcaggctgaagag

SEQ ID NO: 711883 - DNA, 25 bp, Homo sapien
tctgtgtcggacagcttcaggctga

SEQ ID NO: 711884 - DNA, 25 bp, Homo sapien
ctgggggacggaggcgccatcaggg

SEQ ID NO: 711885 - DNA, 25 bp, Homo sapien
ggacggaggcgccatcagggatcgc

SEQ ID NO: 711886 - DNA, 25 bp, Homo sapien
gaggcgccatcagggatcgcccgtc

SEQ ID NO: 711887 - DNA, 25 bp, Homo sapien
acggaggcgccatcagggatcgccc

SEQ ID NO: 711888 - DNA, 25 bp, Homo sapien
gacggcgtcactgagcagcggtgca

SEQ ID NO: 711889 - DNA, 25 bp, Homo sapien
gcaccgaggcgttgaagaccgggcg

SEQ ID NO: 711890 - DNA, 25 bp, Homo sapien
ggcggcgtcagaggcgcaggcgccc

SEQ ID NO: 711891 - DNA, 25 bp, Homo sapien
tggcgggaaggcgacagaggtgtcg

SEQ ID NO: 711892 - DNA, 25 bp, Homo sapien
gagagtatcctctttccactgccag

SEQ ID NO: 711893 - DNA, 25 bp, Homo sapien
ctctgtcggcagagatggacccttg

SEQ ID NO: 711894 - DNA, 25 bp, Homo sapien
actgtccccggagaaactctgtcgg

SEQ ID NO: 711895 - DNA, 25 bp, Homo sapien
ctacgcatacaagtggctagccgcc

SEQ ID NO: 711896 - DNA, 25 bp, Homo sapien
ccgcggcacggtgaccacgataggc

SEQ ID NO: 711897 - DNA, 25 bp, Homo sapien
tgccactgccagtgtcggcgcacgc

SEQ ID NO: 711898 - DNA, 25 bp, Homo sapien
acgataggctgcgtcagcgtgtgca

SEQ ID NO: 711899 - DNA, 25 bp, Homo sapien
ggcgcacgcctcgtcctgaggcaga

SEQ ID NO: 711900 - DNA, 25 bp, Homo sapien
catgcggaggaggactgcgtgctca

SEQ ID NO: 711901 - DNA, 25 bp, Homo sapien
cccatgcggaggaggactgcgtgct

SEQ ID NO: 711902 - DNA, 25 bp, Homo sapien
ggccccatgcggaggaggactgcgt

SEQ ID NO: 711903 - DNA, 25 bp, Homo sapien
atgcggaggaggactgcgtgctcac

SEQ ID NO: 711904 - DNA, 25 bp, Homo sapien
aagtgccacgctgagactgggtcca

SEQ ID NO: 711905 - DNA, 25 bp, Homo sapien
ggaagtgccacgctgagactgggtc

SEQ ID NO: 711906 - DNA, 25 bp, Homo sapien
agtgccacgctgagactgggtccag

SEQ ID NO: 711907 - DNA, 25 bp, Homo sapien
gccacgctgagactgggtccagctc

SEQ ID NO: 711908 - DNA, 25 bp, Homo sapien
aggctcagggcgcactgcacggccg

SEQ ID NO: 711909 - DNA, 25 bp, Homo sapien
cacggccggggacactcttgggcgg

SEQ ID NO: 711910 - DNA, 25 bp, Homo sapien
gcggcgcccagcacgaaggctgcca

SEQ ID NO: 711911 - DNA, 25 bp, Homo sapien
ctgagtgcgcacagacgagacccag

SEQ ID NO: 711912 - DNA, 25 bp, Homo sapien
gcatcgcggaggcaggcctagctag

SEQ ID NO: 711913 - DNA, 25 bp, Homo sapien
ggctgctgcgggcatcgcggaggca

SEQ ID NO: 711914 - DNA, 25 bp, Homo sapien
aggcaggcctagctagggttgatca

SEQ ID NO: 711915 - DNA, 25 bp, Homo sapien
ctagggttgatcaggccccgcaggc

SEQ ID NO: 711916 - DNA, 25 bp, Homo sapien
gcagaagggctgctgcgcgccacgc

SEQ ID NO: 711917 - DNA, 25 bp, Homo sapien
gggcgaggctctcgcgggcgggcca

SEQ ID NO: 711918 - DNA, 25 bp, Homo sapien
tggggaccgctgggcgaggctctcg

SEQ ID NO: 711919 - DNA, 25 bp, Homo sapien
gctgggcgaggctctcgcgggcggg

SEQ ID NO: 711920 - DNA, 25 bp, Homo sapien
gggaccgctgggcgaggctctcgcg

SEQ ID NO: 711921 - DNA, 25 bp, Homo sapien
gaagcgtcactgtcagatctcctac

SEQ ID NO: 711922 - DNA, 25 bp, Homo sapien
agaccgaagcggtaggatcacctga

SEQ ID NO: 711923 - DNA, 25 bp, Homo sapien
gtgcctggcacgaactaagcgctag

SEQ ID NO: 711924 - DNA, 25 bp, Homo sapien
gaactaagcgctaggaagcgtcact

SEQ ID NO: 711925 - DNA, 25 bp, Homo sapien
gccgggtccgaatgctgagttctcc

SEQ ID NO: 711926 - DNA, 25 bp, Homo sapien
gggtgacccactgcctgagttcgaa

SEQ ID NO: 711927 - DNA, 25 bp, Homo sapien
tagcctcttccatcggtctgcatgc

SEQ ID NO: 711928 - DNA, 25 bp, Homo sapien
gattataatagtgtccgcctagagg

SEQ ID NO: 711929 - DNA, 25 bp, Homo sapien
tcctgttggtcctggtcccgaattg

SEQ ID NO: 711930 - DNA, 25 bp, Homo sapien
ggtagctgggtgtatctccggacca

SEQ ID NO: 711931 - DNA, 25 bp, Homo sapien
cagggaggcgggtccggtcctgttg

SEQ ID NO: 711932 - DNA, 25 bp, Homo sapien
tcctggtcccgaattggtagctggg

SEQ ID NO: 711933 - DNA, 25 bp, Homo sapien
aggagagaagcgcaggggtcgtggc

SEQ ID NO: 711934 - DNA, 25 bp, Homo sapien
ggagagaagcgcaggggtcgtggcc

SEQ ID NO: 711935 - DNA, 25 bp, Homo sapien
gaggagagaagcgcaggggtcgtgg

SEQ ID NO: 711936 - DNA, 25 bp, Homo sapien
gcaggcgctgtaaggtcgcttctcc

SEQ ID NO: 711937 - DNA, 25 bp, Homo sapien
taaggtcgcttctccgatgggcgga

SEQ ID NO: 711938 - DNA, 25 bp, Homo sapien
aggcgctgtaaggtcgcttctccga

SEQ ID NO: 711939 - DNA, 25 bp, Homo sapien
gctgtaaggtcgcttctccgatggg

SEQ ID NO: 711940 - DNA, 25 bp, Homo sapien
gggccgctcgccgcctgggaggtgg

SEQ ID NO: 711941 - DNA, 25 bp, Homo sapien
ggggccgctcgccgcctgggaggtg

SEQ ID NO: 711942 - DNA, 25 bp, Homo sapien
cgctccaggtcgcgggaccggtcac

SEQ ID NO: 711943 - DNA, 25 bp, Homo sapien
ggccagctcggtggcgtccggctcc

SEQ ID NO: 711944 - DNA, 25 bp, Homo sapien
cctgccgcgcctgcaggagtcgcac

SEQ ID NO: 711945 - DNA, 25 bp, Homo sapien
cgggccagctcggtggcgtccggct

SEQ ID NO: 711946 - DNA, 25 bp, Homo sapien
gtccggctccggctggccctgccgc

SEQ ID NO: 711947 - DNA, 25 bp, Homo sapien
tatcctgtccaacagcatgcgttgc

SEQ ID NO: 711948 - DNA, 25 bp, Homo sapien
ggactcggcagcatcttactcccag

SEQ ID NO: 711949 - DNA, 25 bp, Homo sapien
ttcattccgcccgtttagccctcgc

SEQ ID NO: 711950 - DNA, 25 bp, Homo sapien
tgcgttgcttttcgcccggactcgg

SEQ ID NO: 711951 - DNA, 25 bp, Homo sapien
aggcttctatgagctcagggctgca

SEQ ID NO: 711952 - DNA, 25 bp, Homo sapien
aaagaggcggcggaatgaggcttct

SEQ ID NO: 711953 - DNA, 25 bp, Homo sapien
ggcggaatgaggcttctatgagctc

SEQ ID NO: 711954 - DNA, 25 bp, Homo sapien
gccaaagcccaatcccttgtatgct

SEQ ID NO: 711955 - DNA, 25 bp, Homo sapien
cgggctacgcggcccttgagctgct

SEQ ID NO: 711956 - DNA, 25 bp, Homo sapien
ctgaatggcctcccgggctacgcgg

SEQ ID NO: 711957 - DNA, 25 bp, Homo sapien
tcccggcgccttggtccctgaaggc

SEQ ID NO: 711958 - DNA, 25 bp, Homo sapien
ggccacccggatgcactttctgaat

SEQ ID NO: 711959 - DNA, 25 bp, Homo sapien
gtggccctgttatcttctcagccag

SEQ ID NO: 711960 - DNA, 25 bp, Homo sapien
tggccctgttatcttctcagccaga

SEQ ID NO: 711961 - DNA, 25 bp, Homo sapien
agtggccctgttatcttctcagcca

SEQ ID NO: 711962 - DNA, 25 bp, Homo sapien
agtgcaggagggtgaccggttccgt

SEQ ID NO: 711963 - DNA, 25 bp, Homo sapien
gtgaccggttccgtggccgcgatgg

SEQ ID NO: 711964 - DNA, 25 bp, Homo sapien
gaccggttccgtggccgcgatggtg

SEQ ID NO: 711965 - DNA, 25 bp, Homo sapien
gcaggagggtgaccggttccgtggc

SEQ ID NO: 711966 - DNA, 25 bp, Homo sapien
cagagctaggtatttcaggggcggg

SEQ ID NO: 711967 - DNA, 25 bp, Homo sapien
gggtcaggagtcctgggtgcggagc

SEQ ID NO: 711968 - DNA, 25 bp, Homo sapien
tcctgggtgcggagctaggtgcagc

SEQ ID NO: 711969 - DNA, 25 bp, Homo sapien
gggtgcggagctaggtgcagcaggg

SEQ ID NO: 711970 - DNA, 25 bp, Homo sapien
ctgcggccacttcgggagacagagg

SEQ ID NO: 711971 - DNA, 25 bp, Homo sapien
gacagaggacaagtacttgtagatc

SEQ ID NO: 711972 - DNA, 25 bp, Homo sapien
aagtccacagcaaagtcttcttcag

SEQ ID NO: 711973 - DNA, 25 bp, Homo sapien
gctgctgagagctcggggctgcggc

SEQ ID NO: 711974 - DNA, 25 bp, Homo sapien
gccagggacccttgatccctctgct

SEQ ID NO: 711975 - DNA, 25 bp, Homo sapien
gctgccagggacccttgatccctct

SEQ ID NO: 711976 - DNA, 25 bp, Homo sapien
ggtaaggggacacccctgcctgctg

SEQ ID NO: 711977 - DNA, 25 bp, Homo sapien
tgccagggacccttgatccctctgc

SEQ ID NO: 711978 - DNA, 25 bp, Homo sapien
tctggaagtgacatgagcaggtcga

SEQ ID NO: 711979 - DNA, 25 bp, Homo sapien
agatcccagctgcttgccaaggcga

SEQ ID NO: 711980 - DNA, 25 bp, Homo sapien
caggcgtaggtacgtctccgtcata

SEQ ID NO: 711981 - DNA, 25 bp, Homo sapien
gatttcagttcgctgtgctcggcct

SEQ ID NO: 711982 - DNA, 25 bp, Homo sapien
ccatgacgggatcctcagaaagagc

SEQ ID NO: 711983 - DNA, 25 bp, Homo sapien
ctggccccgaggtgtacaggaaggg

SEQ ID NO: 711984 - DNA, 25 bp, Homo sapien
atcaggaggcttgtgagtggagtcc

SEQ ID NO: 711985 - DNA, 25 bp, Homo sapien
aaaatgtgcgagggcctttacggtg

SEQ ID NO: 711986 - DNA, 25 bp, Homo sapien
aaccacgactggtcagttgaagaag

SEQ ID NO: 711987 - DNA, 25 bp, Homo sapien
agcagggagtaaccacgactggtca

SEQ ID NO: 711988 - DNA, 25 bp, Homo sapien
gagtaaccacgactggtcagttgaa

SEQ ID NO: 711989 - DNA, 25 bp, Homo sapien
cagggagtaaccacgactggtcagt

SEQ ID NO: 711990 - DNA, 25 bp, Homo sapien
acagcgtgggcaggctcatttctgc

SEQ ID NO: 711991 - DNA, 25 bp, Homo sapien
gggcggacgctgcataccaatttgc

SEQ ID NO: 711992 - DNA, 25 bp, Homo sapien
caccttgactgagtgttgagcccgt

SEQ ID NO: 711993 - DNA, 25 bp, Homo sapien
gcctctgagccgaacatgataataa

SEQ ID NO: 711994 - DNA, 25 bp, Homo sapien
cgccgccggggagaggccgaacgcg

SEQ ID NO: 711995 - DNA, 25 bp, Homo sapien
ctgcctcggtctccgccgctccagg

SEQ ID NO: 711996 - DNA, 25 bp, Homo sapien
tctccgccgctccaggggcgggtgg

SEQ ID NO: 711997 - DNA, 25 bp, Homo sapien
ggccgaacgcgcagccggcgcgggt

SEQ ID NO: 711998 - DNA, 25 bp, Homo sapien
ccacaaacagggagtctcgagtggg

SEQ ID NO: 711999 - DNA, 25 bp, Homo sapien
cggaggagaatgcaggcacagggca

SEQ ID NO: 712000 - DNA, 25 bp, Homo sapien
gtgacctgcctgagctctctgagaa

SEQ ID NO: 712001 - DNA, 25 bp, Homo sapien
tatgagtgttttagggccactgagg

SEQ ID NO: 712002 - DNA, 25 bp, Homo sapien
gaaagaataaaacaccgaattgcag

SEQ ID NO: 712003 - DNA, 25 bp, Homo sapien
agaagagcagctacggagtctgaag

SEQ ID NO: 712004 - DNA, 25 bp, Homo sapien
ttaattttaacagtgctcttccatc

SEQ ID NO: 712005 - DNA, 25 bp, Homo sapien
tcttccatcttgtgcataagcctga

SEQ ID NO: 712006 - DNA, 25 bp, Homo sapien
aacctccagcgaaaacgtgtctcgg

SEQ ID NO: 712007 - DNA, 25 bp, Homo sapien
tggtttcatgccaagcccagagaaa

SEQ ID NO: 712008 - DNA, 25 bp, Homo sapien
ttaccttgggaccattacgccacag

SEQ ID NO: 712009 - DNA, 25 bp, Homo sapien
tagaagaggcgtttgatctcaggcc

SEQ ID NO: 712010 - DNA, 25 bp, Homo sapien
cacggtggcctatgctttcaatccc

SEQ ID NO: 712011 - DNA, 25 bp, Homo sapien
gtgagagatcacaaagctgccaatt

SEQ ID NO: 712012 - DNA, 25 bp, Homo sapien
tcaaagactggtgctatgaagctgt

SEQ ID NO: 712013 - DNA, 25 bp, Homo sapien
ataattttggttaggtctgggcacg

SEQ ID NO: 712014 - DNA, 25 bp, Homo sapien
tgacaaggaccggtttctgaaacag

SEQ ID NO: 712015 - DNA, 25 bp, Homo sapien
tgaaacagtgcgagaacgacatcat

SEQ ID NO: 712016 - DNA, 25 bp, Homo sapien
aggctggttgcacacgggctcctgc

SEQ ID NO: 712017 - DNA, 25 bp, Homo sapien
cagggaactctgctgccgaggctgt

SEQ ID NO: 712018 - DNA, 25 bp, Homo sapien
aagtctatccatcgcagaagccagg

SEQ ID NO: 712019 - DNA, 25 bp, Homo sapien
tgaaatgacaaaggcctgagcgtct

SEQ ID NO: 712020 - DNA, 25 bp, Homo sapien
caattactctggagctggtccgccg

SEQ ID NO: 712021 - DNA, 25 bp, Homo sapien
cactgaatcgaagtaggactggacc

SEQ ID NO: 712022 - DNA, 25 bp, Homo sapien
cctggtgacgccagtgtcagactca

SEQ ID NO: 712023 - DNA, 25 bp, Homo sapien
tctccctggtgacgccagtgtcaga

SEQ ID NO: 712024 - DNA, 25 bp, Homo sapien
tttctccctggtgacgccagtgtca

SEQ ID NO: 712025 - DNA, 25 bp, Homo sapien
tatttctccctggtgacgccagtgt

SEQ ID NO: 712026 - DNA, 25 bp, Homo sapien
ccagagagctgagctaacatgggcc

SEQ ID NO: 712027 - DNA, 25 bp, Homo sapien
aaggactggatggtcgcgcccagca

SEQ ID NO: 712028 - DNA, 25 bp, Homo sapien
gacgtgactaaatgatccctcggct

SEQ ID NO: 712029 - DNA, 25 bp, Homo sapien
accttctcttccagacgtgactaaa

SEQ ID NO: 712030 - DNA, 25 bp, Homo sapien
ttcgacacaaaagagggtccctgct

SEQ ID NO: 712031 - DNA, 25 bp, Homo sapien
tctcataaaagtcggcctggtgcca

SEQ ID NO: 712032 - DNA, 25 bp, Homo sapien
gatgatgttgccatccgtacccagg

SEQ ID NO: 712033 - DNA, 25 bp, Homo sapien
gaaattgagcaataggcaggcacca

SEQ ID NO: 712034 - DNA, 25 bp, Homo sapien
tatactctgggatgcaaccgacatg

SEQ ID NO: 712035 - DNA, 25 bp, Homo sapien
tctaagactgtctaacacgcgtttc

SEQ ID NO: 712036 - DNA, 25 bp, Homo sapien
gagtgtgcgttttctcaaccgcttc

SEQ ID NO: 712037 - DNA, 25 bp, Homo sapien
tagtgtacaactcattttgcgccaa

SEQ ID NO: 712038 - DNA, 25 bp, Homo sapien
ccatcacagtgaagtttgcagccaa

SEQ ID NO: 712039 - DNA, 25 bp, Homo sapien
gaacaaaaacgtggcactcctctcg

SEQ ID NO: 712040 - DNA, 25 bp, Homo sapien
tgaaagccatacttagccccgctgg

SEQ ID NO: 712041 - DNA, 25 bp, Homo sapien
tcccgtcagagagcgcgtttcagaa

SEQ ID NO: 712042 - DNA, 25 bp, Homo sapien
tgaaaatttcttgcctctctcactc

SEQ ID NO: 712043 - DNA, 25 bp, Homo sapien
gcgcccagcccatggtgctatttca

SEQ ID NO: 712044 - DNA, 25 bp, Homo sapien
cagcccatggtgctatttcaagtaa

SEQ ID NO: 712045 - DNA, 25 bp, Homo sapien
tttatgaaaatttcttgcctctctc

SEQ ID NO: 712046 - DNA, 25 bp, Homo sapien
ttttcttcttagcctgttcaccact

SEQ ID NO: 712047 - DNA, 25 bp, Homo sapien
tcttcttagcctgttcaccacttga

SEQ ID NO: 712048 - DNA, 25 bp, Homo sapien
ttcttcttagcctgttcaccacttg

SEQ ID NO: 712049 - DNA, 25 bp, Homo sapien
tttcttcttagcctgttcaccactt

SEQ ID NO: 712050 - DNA, 25 bp, Homo sapien
taatggtaccaaccatgtgccaagt

SEQ ID NO: 712051 - DNA, 25 bp, Homo sapien
tacaaaacacacatggaggccaggt

SEQ ID NO: 712052 - DNA, 25 bp, Homo sapien
ctgaaatgttgtggcatgatcacaa

SEQ ID NO: 712053 - DNA, 25 bp, Homo sapien
ggccagaaagtcagttctttaatgg

SEQ ID NO: 712054 - DNA, 25 bp, Homo sapien
cagacccaggttgttcaaggatcac

SEQ ID NO: 712055 - DNA, 25 bp, Homo sapien
ggatcataacggtcttcatcttcat

SEQ ID NO: 712056 - DNA, 25 bp, Homo sapien
taaatccagctgtaagtggacctgt

SEQ ID NO: 712057 - DNA, 25 bp, Homo sapien
ttcactcggagtaggctaggaagag

SEQ ID NO: 712058 - DNA, 25 bp, Homo sapien
gtaagacagagaaaacaagatgtac

SEQ ID NO: 712059 - DNA, 25 bp, Homo sapien
taaaaaatcattaggaagaggccag

SEQ ID NO: 712060 - DNA, 25 bp, Homo sapien
acagagaaaacaagatgtactttaa

SEQ ID NO: 712061 - DNA, 25 bp, Homo sapien
tatgataaagtaagacagagaaaac

SEQ ID NO: 712062 - DNA, 25 bp, Homo sapien
ctgctgtggctgcaactgctctggc

SEQ ID NO: 712063 - DNA, 25 bp, Homo sapien
ctgtggctgcaactgctctggccag

SEQ ID NO: 712064 - DNA, 25 bp, Homo sapien
gctctggccagccaggtgacttcca

SEQ ID NO: 712065 - DNA, 25 bp, Homo sapien
ctctggccagccaggtgacttccat

SEQ ID NO: 712066 - DNA, 25 bp, Homo sapien
gccctgcactggatgcaggagctgt

SEQ ID NO: 712067 - DNA, 25 bp, Homo sapien
agctgtggttgagggcaaaacagct

SEQ ID NO: 712068 - DNA, 25 bp, Homo sapien
caggagctgtggttgagggcaaaac

SEQ ID NO: 712069 - DNA, 25 bp, Homo sapien
tggttgagggcaaaacagctgtgtt

SEQ ID NO: 712070 - DNA, 25 bp, Homo sapien
agtagcgcactctgcctggcaagcc

SEQ ID NO: 712071 - DNA, 25 bp, Homo sapien
cctagtagcgcactctgcctggcaa

SEQ ID NO: 712072 - DNA, 25 bp, Homo sapien
tttgccctagtagcgcactctgcct

SEQ ID NO: 712073 - DNA, 25 bp, Homo sapien
tgagcctttgccctagtagcgcact

SEQ ID NO: 712074 - DNA, 25 bp, Homo sapien
tgttttctgagtatcccttatgttc

SEQ ID NO: 712075 - DNA, 25 bp, Homo sapien
ttctgagtatcccttatgttccagc

SEQ ID NO: 712076 - DNA, 25 bp, Homo sapien
catctgttttctgagtatcccttat

SEQ ID NO: 712077 - DNA, 25 bp, Homo sapien
gagtatcccttatgttccagccaca

SEQ ID NO: 712078 - DNA, 25 bp, Homo sapien
caggatgtgcgggggccagacagct

SEQ ID NO: 712079 - DNA, 25 bp, Homo sapien
ctgcaggatgtgcgggggccagaca

SEQ ID NO: 712080 - DNA, 25 bp, Homo sapien
agctgggaagagtgactgcctgatc

SEQ ID NO: 712081 - DNA, 25 bp, Homo sapien
cagacagctgggaagagtgactgcc

SEQ ID NO: 712082 - DNA, 25 bp, Homo sapien
tttcatccttgtacttgtcctgccc

SEQ ID NO: 712083 - DNA, 25 bp, Homo sapien
ggctttcatccttgtacttgtcctg

SEQ ID NO: 712084 - DNA, 25 bp, Homo sapien
cttggctttcatccttgtacttgtc

SEQ ID NO: 712085 - DNA, 25 bp, Homo sapien
gctttcatccttgtacttgtcctgc

SEQ ID NO: 712086 - DNA, 25 bp, Homo sapien
ctactggtattaccgagctcatgac

SEQ ID NO: 712087 - DNA, 25 bp, Homo sapien
ccagagggattcagactactggtat

SEQ ID NO: 712088 - DNA, 25 bp, Homo sapien
cagactactggtattaccgagctca

SEQ ID NO: 712089 - DNA, 25 bp, Homo sapien
gattcagactactggtattaccgag

SEQ ID NO: 712090 - DNA, 25 bp, Homo sapien
cgtcccgttgctgcggccagtggca

SEQ ID NO: 712091 - DNA, 25 bp, Homo sapien
cacgggccggggcgctgttccagtt

SEQ ID NO: 712092 - DNA, 25 bp, Homo sapien
tcacccgtcccgttgctgcggccag

SEQ ID NO: 712093 - DNA, 25 bp, Homo sapien
acccgtcccgttgctgcggccagtg

SEQ ID NO: 712094 - DNA, 25 bp, Homo sapien
cagagcagttaagacgcgtcggggg

SEQ ID NO: 712095 - DNA, 25 bp, Homo sapien
gttaagacgcgtcgggggcaggtgc

SEQ ID NO: 712096 - DNA, 25 bp, Homo sapien
cagttaagacgcgtcgggggcaggt

SEQ ID NO: 712097 - DNA, 25 bp, Homo sapien
gagcagttaagacgcgtcgggggca

SEQ ID NO: 712098 - DNA, 25 bp, Homo sapien
gggtcaagggagctgatgcccgccg

SEQ ID NO: 712099 - DNA, 25 bp, Homo sapien
gcacctggacgaataacggggccac

SEQ ID NO: 712100 - DNA, 25 bp, Homo sapien
ctccctgggcacctggacgaataac

SEQ ID NO: 712101 - DNA, 25 bp, Homo sapien
cctgggcacctggacgaataacggg

SEQ ID NO: 712102 - DNA, 25 bp, Homo sapien
ggcacctggacgaataacggggcca

SEQ ID NO: 712103 - DNA, 25 bp, Homo sapien
aggaagccggccaccaggcaggcca

SEQ ID NO: 712104 - DNA, 25 bp, Homo sapien
ggctcccaggaagccggccaccagg

SEQ ID NO: 712105 - DNA, 25 bp, Homo sapien
cttgggtgtggacagcgggggccca

SEQ ID NO: 712106 - DNA, 25 bp, Homo sapien
caggctcccaggaagccggccacca

SEQ ID NO: 712107 - DNA, 25 bp, Homo sapien
agctcccgggaaactgatctctgca

SEQ ID NO: 712108 - DNA, 25 bp, Homo sapien
gcacaggcactgtggggggtgccca

SEQ ID NO: 712109 - DNA, 25 bp, Homo sapien
agggagctcccgggaaactgatctc

SEQ ID NO: 712110 - DNA, 25 bp, Homo sapien
tcccgggaaactgatctctgcagaa

SEQ ID NO: 712111 - DNA, 25 bp, Homo sapien
cacacagccgcccagatactcgcac

SEQ ID NO: 712112 - DNA, 25 bp, Homo sapien
agccgcccagatactcgcacccttg

SEQ ID NO: 712113 - DNA, 25 bp, Homo sapien
acagccgcccagatactcgcaccct

SEQ ID NO: 712114 - DNA, 25 bp, Homo sapien
cgcccagatactcgcacccttgcat

SEQ ID NO: 712115 - DNA, 25 bp, Homo sapien
atccggtaagtccaggcgcgccgga

SEQ ID NO: 712116 - DNA, 25 bp, Homo sapien
gtaagtccaggcgcgccggagcaca

SEQ ID NO: 712117 - DNA, 25 bp, Homo sapien
ctggatccggtaagtccaggcgcgc

SEQ ID NO: 712118 - DNA, 25 bp, Homo sapien
aagtccaggcgcgccggagcacagc

SEQ ID NO: 712119 - DNA, 25 bp, Homo sapien
aggcagattgcagctcccgctcacc

SEQ ID NO: 712120 - DNA, 25 bp, Homo sapien
gcaggcagattgcagctcccgctca

SEQ ID NO: 712121 - DNA, 25 bp, Homo sapien
cagcaggcagattgcagctcccgct

SEQ ID NO: 712122 - DNA, 25 bp, Homo sapien
agcaggcagattgcagctcccgctc

SEQ ID NO: 712123 - DNA, 25 bp, Homo sapien
cctgtgtctcttggggaggtagaat

SEQ ID NO: 712124 - DNA, 25 bp, Homo sapien
gctttgcaaaaaccttatttcgagc

SEQ ID NO: 712125 - DNA, 25 bp, Homo sapien
gaaggtctgcgtgttgtggtggagc

SEQ ID NO: 712126 - DNA, 25 bp, Homo sapien
accttatttcgagcatccaggagct

SEQ ID NO: 712127 - DNA, 25 bp, Homo sapien
ctcaacttctttacagcatgagggc

SEQ ID NO: 712128 - DNA, 25 bp, Homo sapien
ctaaacttggacgatgataacttgg

SEQ ID NO: 712129 - DNA, 25 bp, Homo sapien
ggacgatgataacttggagtttcca

SEQ ID NO: 712130 - DNA, 25 bp, Homo sapien
aactcaacttctttacagcatgagg

SEQ ID NO: 712131 - DNA, 25 bp, Homo sapien
ttagctgatatcaggagggagacat

SEQ ID NO: 712132 - DNA, 25 bp, Homo sapien
ctgaattagctgatatcaggaggga

SEQ ID NO: 712133 - DNA, 25 bp, Homo sapien
gagggagacattcctcttactgctg

SEQ ID NO: 712134 - DNA, 25 bp, Homo sapien
ggagacattcctcttactgctgctg

SEQ ID NO: 712135 - DNA, 25 bp, Homo sapien
gggcatccttgaactgaccagagtt

SEQ ID NO: 712136 - DNA, 25 bp, Homo sapien
caactcaggtgcagggattaagact

SEQ ID NO: 712137 - DNA, 25 bp, Homo sapien
tctgtagggcgacggttttatcgga

SEQ ID NO: 712138 - DNA, 25 bp, Homo sapien
cctctttccagttgccagacgggca

SEQ ID NO: 712139 - DNA, 25 bp, Homo sapien
gggacatgcaccaatgtcatcggag

SEQ ID NO: 712140 - DNA, 25 bp, Homo sapien
tgggcaagggacatgcaccaatgtc

SEQ ID NO: 712141 - DNA, 25 bp, Homo sapien
gtgctctgtcggccacccctgtggg

SEQ ID NO: 712142 - DNA, 25 bp, Homo sapien
caatgtcatcggaggcttcgaatgt

SEQ ID NO: 712143 - DNA, 25 bp, Homo sapien
ggagtcaggatgaacccaagacctg

SEQ ID NO: 712144 - DNA, 25 bp, Homo sapien
agaaaaaaggagaacggacacagtg

SEQ ID NO: 712145 - DNA, 25 bp, Homo sapien
gagaacggacacagtgatgtctttc

SEQ ID NO: 712146 - DNA, 25 bp, Homo sapien
aaaaggagaacggacacagtgatgt

SEQ ID NO: 712147 - DNA, 25 bp, Homo sapien
gagtaacagcttcaggcccaacgca

SEQ ID NO: 712148 - DNA, 25 bp, Homo sapien
gactttgacagatgcgtaggagttt

SEQ ID NO: 712149 - DNA, 25 bp, Homo sapien
tgaactggactttgacagatgcgta

SEQ ID NO: 712150 - DNA, 25 bp, Homo sapien
gtaacagcttcaggcccaacgcaca

SEQ ID NO: 712151 - DNA, 25 bp, Homo sapien
tgacattctgggtaatggtatgacc

SEQ ID NO: 712152 - DNA, 25 bp, Homo sapien
tctttctgctgagcccggttgttgc

SEQ ID NO: 712153 - DNA, 25 bp, Homo sapien
gatgccagtgaattgtgatgttaag

SEQ ID NO: 712154 - DNA, 25 bp, Homo sapien
tgatgttaagaaccctgacattctg

SEQ ID NO: 712155 - DNA, 25 bp, Homo sapien
ccacaccataaaactcattctcctt

SEQ ID NO: 712156 - DNA, 25 bp, Homo sapien
ttttctgcagggctcttgaaaccac

SEQ ID NO: 712157 - DNA, 25 bp, Homo sapien
gcagggctcttgaaaccacaccata

SEQ ID NO: 712158 - DNA, 25 bp, Homo sapien
gaaaccacaccataaaactcattct

SEQ ID NO: 712159 - DNA, 25 bp, Homo sapien
ccaagaagaattcatcatgagtaca

SEQ ID NO: 712160 - DNA, 25 bp, Homo sapien
tggtggatgaacaatactagcgtaa

SEQ ID NO: 712161 - DNA, 25 bp, Homo sapien
tccacagtgagaggatatggttcag

SEQ ID NO: 712162 - DNA, 25 bp, Homo sapien
taattcccagctttccacagtgaga

SEQ ID NO: 712163 - DNA, 25 bp, Homo sapien
gctttcttagttggttcatctgaag

SEQ ID NO: 712164 - DNA, 25 bp, Homo sapien
caggctttgcactaactgaatatta

SEQ ID NO: 712165 - DNA, 25 bp, Homo sapien
tggaaatactggctggaaaaaggca

SEQ ID NO: 712166 - DNA, 25 bp, Homo sapien
cacgtgattgtacacagcgtaccgg

SEQ ID NO: 712167 - DNA, 25 bp, Homo sapien
taactgcatattggatcttatcacg

SEQ ID NO: 712168 - DNA, 25 bp, Homo sapien
gacacattcagtagtgcattaactg

SEQ ID NO: 712169 - DNA, 25 bp, Homo sapien
ctaaagacacattcagtagtgcatt

SEQ ID NO: 712170 - DNA, 25 bp, Homo sapien
cattcagtagtgcattaactgtaca

SEQ ID NO: 712171 - DNA, 25 bp, Homo sapien
aagacacattcagtagtgcattaac

SEQ ID NO: 712172 - DNA, 25 bp, Homo sapien
cagctgcagacacgcgccgcccgcc

SEQ ID NO: 712173 - DNA, 25 bp, Homo sapien
cctagcgggctacccggagcagctg

SEQ ID NO: 712174 - DNA, 25 bp, Homo sapien
gcgcctagcgggctacccggagcag

SEQ ID NO: 712175 - DNA, 25 bp, Homo sapien
gggacggcgcgcctagcgggctacc

SEQ ID NO: 712176 - DNA, 25 bp, Homo sapien
acagccgcgtcctcgggcacccgtt

SEQ ID NO: 712177 - DNA, 25 bp, Homo sapien
ccctcgtgggggagcgcggatagct

SEQ ID NO: 712178 - DNA, 25 bp, Homo sapien
agctcggggagacggccatgatggg

SEQ ID NO: 712179 - DNA, 25 bp, Homo sapien
gcgtcctcgggcacccgttgcgccc

SEQ ID NO: 712180 - DNA, 25 bp, Homo sapien
ggattcccccgcgtcacgaggccag

SEQ ID NO: 712181 - DNA, 25 bp, Homo sapien
acacatccggattcccccgcgtcac

SEQ ID NO: 712182 - DNA, 25 bp, Homo sapien
tcacacatccggattcccccgcgtc

SEQ ID NO: 712183 - DNA, 25 bp, Homo sapien
cccgcgtcacgaggccaggatcgcc

SEQ ID NO: 712184 - DNA, 25 bp, Homo sapien
tgaggcttctaatcagtcccccagc

SEQ ID NO: 712185 - DNA, 25 bp, Homo sapien
gaggcttctaatcagtcccccagct

SEQ ID NO: 712186 - DNA, 25 bp, Homo sapien
cactgaatgaggcttctaatcagtc

SEQ ID NO: 712187 - DNA, 25 bp, Homo sapien
tgaatgaggcttctaatcagtcccc

SEQ ID NO: 712188 - DNA, 25 bp, Homo sapien
gctgggccttctgcccggagcactc

SEQ ID NO: 712189 - DNA, 25 bp, Homo sapien
ttcctccagatgtctagctgctcct

SEQ ID NO: 712190 - DNA, 25 bp, Homo sapien
ccttctgcccggagcactcttcctc

SEQ ID NO: 712191 - DNA, 25 bp, Homo sapien
tcctccagatgtctagctgctcctt

SEQ ID NO: 712192 - DNA, 25 bp, Homo sapien
ccagcctcattgcattcctccaaca

SEQ ID NO: 712193 - DNA, 25 bp, Homo sapien
gcctcattgcattcctccaacacac

SEQ ID NO: 712194 - DNA, 25 bp, Homo sapien
cagcctcattgcattcctccaacac

SEQ ID NO: 712195 - DNA, 25 bp, Homo sapien
agcctcattgcattcctccaacaca

SEQ ID NO: 712196 - DNA, 25 bp, Homo sapien
cagatcacagaggagtgccagggac

SEQ ID NO: 712197 - DNA, 25 bp, Homo sapien
gatctaggctccagcatccaagtgt

SEQ ID NO: 712198 - DNA, 25 bp, Homo sapien
cccagtgaagcccaggttcgtggtg

SEQ ID NO: 712199 - DNA, 25 bp, Homo sapien
agtgtctaaattccctcccagtgaa

SEQ ID NO: 712200 - DNA, 25 bp, Homo sapien
caaaaagaaggccaaatgtagatcc

SEQ ID NO: 712201 - DNA, 25 bp, Homo sapien
aagaaggccaaatgtagatcccagc

SEQ ID NO: 712202 - DNA, 25 bp, Homo sapien
aaaagaaggccaaatgtagatccca

SEQ ID NO: 712203 - DNA, 25 bp, Homo sapien
gaaggccaaatgtagatcccagcac

SEQ ID NO: 712204 - DNA, 25 bp, Homo sapien
tacagacacgcaccatgatgcccgg

SEQ ID NO: 712205 - DNA, 25 bp, Homo sapien
tgatcaaggttcactgcagtttcga

SEQ ID NO: 712206 - DNA, 25 bp, Homo sapien
cagccacgggcaactgttttttgtg

SEQ ID NO: 712207 - DNA, 25 bp, Homo sapien
tgcacccagccacgggcaactgttt

SEQ ID NO: 712208 - DNA, 25 bp, Homo sapien
ctggaagctgcggccagcacgtcca

SEQ ID NO: 712209 - DNA, 25 bp, Homo sapien
tggaagctgcggccagcacgtccat

SEQ ID NO: 712210 - DNA, 25 bp, Homo sapien
tacatggaggtagattcatataggg

SEQ ID NO: 712211 - DNA, 25 bp, Homo sapien
ggtgacagcatacatggaggtagat

SEQ ID NO: 712212 - DNA, 25 bp, Homo sapien
tagattcatatagggccaagcaggt

SEQ ID NO: 712213 - DNA, 25 bp, Homo sapien
gtgcaaagccagactgttctgtggg

SEQ ID NO: 712214 - DNA, 25 bp, Homo sapien
tacctctgcgtcttgggcctaagtg

SEQ ID NO: 712215 - DNA, 25 bp, Homo sapien
tgctacctctgcgtcttgggcctaa

SEQ ID NO: 712216 - DNA, 25 bp, Homo sapien
gctacctctgcgtcttgggcctaag

SEQ ID NO: 712217 - DNA, 25 bp, Homo sapien
cctctgcgtcttgggcctaagtgat

SEQ ID NO: 712218 - DNA, 25 bp, Homo sapien
aattataggtccatgccacgatgcc

SEQ ID NO: 712219 - DNA, 25 bp, Homo sapien
gaattataggtccatgccacgatgc

SEQ ID NO: 712220 - DNA, 25 bp, Homo sapien
cacccacctgaataactaggatgac

SEQ ID NO: 712221 - DNA, 25 bp, Homo sapien
ctcacccacctgaataactaggatg

SEQ ID NO: 712222 - DNA, 25 bp, Homo sapien
cccacctgaataactaggatgacag

SEQ ID NO: 712223 - DNA, 25 bp, Homo sapien
tcacccacctgaataactaggatga

SEQ ID NO: 712224 - DNA, 25 bp, Homo sapien
cagatcacaggtcactcagtcagca

SEQ ID NO: 712225 - DNA, 25 bp, Homo sapien
caggcctacctctgctgattaaagt

SEQ ID NO: 712226 - DNA, 25 bp, Homo sapien
gttcatacggtcctgcggaggcctc

SEQ ID NO: 712227 - DNA, 25 bp, Homo sapien
ttctcagactaccaccaaagaggcc

SEQ ID NO: 712228 - DNA, 25 bp, Homo sapien
gggggctgtttgcagataaccacag

SEQ ID NO: 712229 - DNA, 25 bp, Homo sapien
aagggggctgtttgcagataaccac

SEQ ID NO: 712230 - DNA, 25 bp, Homo sapien
tgcctctgcaccgggtcctggctgt

SEQ ID NO: 712231 - DNA, 25 bp, Homo sapien
tggctgtcccttccagacggacctg

SEQ ID NO: 712232 - DNA, 25 bp, Homo sapien
tggggtcacctgattcctgcggcca

SEQ ID NO: 712233 - DNA, 25 bp, Homo sapien
ggtcacctgattcctgcggccagag

SEQ ID NO: 712234 - DNA, 25 bp, Homo sapien
gggtcacctgattcctgcggccaga

SEQ ID NO: 712235 - DNA, 25 bp, Homo sapien
ggggtcacctgattcctgcggccag

SEQ ID NO: 712236 - DNA, 25 bp, Homo sapien
tccagcctgggtgacggagcagatc

SEQ ID NO: 712237 - DNA, 25 bp, Homo sapien
aacaagcaacatctctgccctgaag

SEQ ID NO: 712238 - DNA, 25 bp, Homo sapien
gcttcaatgcccaccagtttactga

SEQ ID NO: 712239 - DNA, 25 bp, Homo sapien
gacagaccccaaggtgcagatggaa

SEQ ID NO: 712240 - DNA, 25 bp, Homo sapien
ggatgcatccttgcacaccttggta

SEQ ID NO: 712241 - DNA, 25 bp, Homo sapien
gcaggactggaagatggaactcccc

SEQ ID NO: 712242 - DNA, 25 bp, Homo sapien
actccattgcctggtcagtgttaaa

SEQ ID NO: 712243 - DNA, 25 bp, Homo sapien
ccttgcctgggactttggaactgtc

SEQ ID NO: 712244 - DNA, 25 bp, Homo sapien
gggcccctatcagcgcagttgacaa

SEQ ID NO: 712245 - DNA, 25 bp, Homo sapien
gacacaggttccagttagctgggag

SEQ ID NO: 712246 - DNA, 25 bp, Homo sapien
cacaggttccagttagctgggaggt

SEQ ID NO: 712247 - DNA, 25 bp, Homo sapien
acacaggttccagttagctgggagg

SEQ ID NO: 712248 - DNA, 25 bp, Homo sapien
ggacacaggttccagttagctggga

SEQ ID NO: 712249 - DNA, 25 bp, Homo sapien
ccacgtgacattgggtggtaaccag

SEQ ID NO: 712250 - DNA, 25 bp, Homo sapien
gtaaccagaacctgtcctgccaaaa

SEQ ID NO: 712251 - DNA, 25 bp, Homo sapien
ggtagacacggccatcccggtcttc

SEQ ID NO: 712252 - DNA, 25 bp, Homo sapien
tctcaaaggcaaggcgcatggccag

SEQ ID NO: 712253 - DNA, 25 bp, Homo sapien
ccaggtgaagagatgggactgcctg

SEQ ID NO: 712254 - DNA, 25 bp, Homo sapien
gggcagacatgctgccggtgggata

SEQ ID NO: 712255 - DNA, 25 bp, Homo sapien
cagacatgctgccggtgggataacc

SEQ ID NO: 712256 - DNA, 25 bp, Homo sapien
caaaggagacagagcctatcagccc

SEQ ID NO: 712257 - DNA, 25 bp, Homo sapien
cctggtctgatccctcacacccagc

SEQ ID NO: 712258 - DNA, 25 bp, Homo sapien
cctgtgcccttccgtgaggaagtgt

SEQ ID NO: 712259 - DNA, 25 bp, Homo sapien
ctcacacccagccaccggctcaggg

SEQ ID NO: 712260 - DNA, 25 bp, Homo sapien
gtgcccttccgtgaggaagtgtttc

SEQ ID NO: 712261 - DNA, 25 bp, Homo sapien
tcagctggggtcgatcctggttccg

SEQ ID NO: 712262 - DNA, 25 bp, Homo sapien
ccggcgtctccggaaccatcgctgg

SEQ ID NO: 712263 - DNA, 25 bp, Homo sapien
cgtgaggccacactgggcggccagg

SEQ ID NO: 712264 - DNA, 25 bp, Homo sapien
tcgatcctggttccggcgtctccgg

SEQ ID NO: 712265 - DNA, 25 bp, Homo sapien
ggccgcccacgaaggaggacaggta

SEQ ID NO: 712266 - DNA, 25 bp, Homo sapien
aggccgcccacgaaggaggacaggt

SEQ ID NO: 712267 - DNA, 25 bp, Homo sapien
ttcctgcttctcactctcgactggg

SEQ ID NO: 712268 - DNA, 25 bp, Homo sapien
caccctgggtctgcggtctctttgg

SEQ ID NO: 712269 - DNA, 25 bp, Homo sapien
ttcactgcagaaccccaacttttgg

SEQ ID NO: 712270 - DNA, 25 bp, Homo sapien
caacttttggtgcatagtaaatcca

SEQ ID NO: 712271 - DNA, 25 bp, Homo sapien
tacctgtcccagcacattactggtg

SEQ ID NO: 712272 - DNA, 25 bp, Homo sapien
ggtttgggtacctgtcccagcacat

SEQ ID NO: 712273 - DNA, 25 bp, Homo sapien
gggtacctgtcccagcacattactg

SEQ ID NO: 712274 - DNA, 25 bp, Homo sapien
ctggtttgggtacctgtcccagcac

SEQ ID NO: 712275 - DNA, 25 bp, Homo sapien
tgagaggtagaaacccagctccaag

SEQ ID NO: 712276 - DNA, 25 bp, Homo sapien
gagaggtagaaacccagctccaaga

SEQ ID NO: 712277 - DNA, 25 bp, Homo sapien
gcagcctgattagcagtgagaggta

SEQ ID NO: 712278 - DNA, 25 bp, Homo sapien
cgcttgacatcaaagggcagcctga

SEQ ID NO: 712279 - DNA, 25 bp, Homo sapien
gaggaatcgtgtaacagcagcacca

SEQ ID NO: 712280 - DNA, 25 bp, Homo sapien
tccagcaggtagtcagaggaatcgt

SEQ ID NO: 712281 - DNA, 25 bp, Homo sapien
gtcatcaggatgaccgccacgaagt

SEQ ID NO: 712282 - DNA, 25 bp, Homo sapien
ccagagagccaatgcgcagcaggtt

SEQ ID NO: 712283 - DNA, 25 bp, Homo sapien
agatgaggaagagagcgtcgcacac

SEQ ID NO: 712284 - DNA, 25 bp, Homo sapien
ccagtcgggtgtagaagaagacaaa

SEQ ID NO: 712285 - DNA, 25 bp, Homo sapien
gctgatactgcatgtagttgaccat

SEQ ID NO: 712286 - DNA, 25 bp, Homo sapien
gagcgtcgcacacttgctgatactg

SEQ ID NO: 712287 - DNA, 25 bp, Homo sapien
ggtacaatcttgattcgctgtagcc

SEQ ID NO: 712288 - DNA, 25 bp, Homo sapien
tggtacaatcttgattcgctgtagc

SEQ ID NO: 712289 - DNA, 25 bp, Homo sapien
tttagtagagaggtggtttttgcca

SEQ ID NO: 712290 - DNA, 25 bp, Homo sapien
ttataggcccctgccaccacgccca

SEQ ID NO: 712291 - DNA, 25 bp, Homo sapien
ataggcccctgccaccacgcccagc

SEQ ID NO: 712292 - DNA, 25 bp, Homo sapien
gattataggcccctgccaccacgcc

SEQ ID NO: 712293 - DNA, 25 bp, Homo sapien
tcatctcccgggtagccggacagag

SEQ ID NO: 712294 - DNA, 25 bp, Homo sapien
ggcctcatctcccaaggagtaaaaa

SEQ ID NO: 712295 - DNA, 25 bp, Homo sapien
tgcttgttgcctgggacactgtcct

SEQ ID NO: 712296 - DNA, 25 bp, Homo sapien
tgtgcaacccaagccagttggaaag

SEQ ID NO: 712297 - DNA, 25 bp, Homo sapien
ctacagccagggggagaggaggagg

SEQ ID NO: 712298 - DNA, 25 bp, Homo sapien
gaggaggaggctggggtttgaccag

SEQ ID NO: 712299 - DNA, 25 bp, Homo sapien
gggagaggaggaggctggggtttga

SEQ ID NO: 712300 - DNA, 25 bp, Homo sapien
gagaggaggaggctggggtttgacc

SEQ ID NO: 712301 - DNA, 25 bp, Homo sapien
catgcgcagaatgaggcaagaccag

SEQ ID NO: 712302 - DNA, 25 bp, Homo sapien
catcagaagcccgttgaagaagtag

SEQ ID NO: 712303 - DNA, 25 bp, Homo sapien
ggcccctgttgctgatggactcgta

SEQ ID NO: 712304 - DNA, 25 bp, Homo sapien
ggcccttcttcatgaagctatagag

SEQ ID NO: 712305 - DNA, 25 bp, Homo sapien
actggagtctgattcttctacatca

SEQ ID NO: 712306 - DNA, 25 bp, Homo sapien
gcctgttggtcagacgcccggccac

SEQ ID NO: 712307 - DNA, 25 bp, Homo sapien
cgttctttagctgcagaggttcctg

SEQ ID NO: 712308 - DNA, 25 bp, Homo sapien
cagctgccccgttctttagctgcag

SEQ ID NO: 712309 - DNA, 25 bp, Homo sapien
aaatatccaaggcactggcgggggg

SEQ ID NO: 712310 - DNA, 25 bp, Homo sapien
gcctggaggtgtctctggccagcca

SEQ ID NO: 712311 - DNA, 25 bp, Homo sapien
ctggaggtgtctctggccagccaca

SEQ ID NO: 712312 - DNA, 25 bp, Homo sapien
gggctggagacagatcatcagcctt

SEQ ID NO: 712313 - DNA, 25 bp, Homo sapien
actttgatagggacccaagttctca

SEQ ID NO: 712314 - DNA, 25 bp, Homo sapien
tgaagaaggaactttgatagggacc

SEQ ID NO: 712315 - DNA, 25 bp, Homo sapien
tatcccgtaggtggggtatgtaagc

SEQ ID NO: 712316 - DNA, 25 bp, Homo sapien
tctctggggatgaagaaggaacttt

SEQ ID NO: 712317 - DNA, 25 bp, Homo sapien
aggtcaactattatacacaatgctg

SEQ ID NO: 712318 - DNA, 25 bp, Homo sapien
tatcttggatgctagaacctcttca

SEQ ID NO: 712319 - DNA, 25 bp, Homo sapien
gttctactagctaggtattcatgcc

SEQ ID NO: 712320 - DNA, 25 bp, Homo sapien
ccgataatgtgagattattgacccc

SEQ ID NO: 712321 - DNA, 25 bp, Homo sapien
tttgcaatgttgtagaaccacgact

SEQ ID NO: 712322 - DNA, 25 bp, Homo sapien
tccaccgctgcaagataaaactccg

SEQ ID NO: 712323 - DNA, 25 bp, Homo sapien
gaattattggatagggaaacaccag

SEQ ID NO: 712324 - DNA, 25 bp, Homo sapien
tatgtctgggttcttacactgagca

SEQ ID NO: 712325 - DNA, 25 bp, Homo sapien
tttctgtttccgatcgagtgaccat

SEQ ID NO: 712326 - DNA, 25 bp, Homo sapien
atgtgcttatctggcagttctccct

SEQ ID NO: 712327 - DNA, 25 bp, Homo sapien
accttttctgtttccgatcgagtga

SEQ ID NO: 712328 - DNA, 25 bp, Homo sapien
catgtgcttatctggcagttctccc

SEQ ID NO: 712329 - DNA, 25 bp, Homo sapien
tgtcccatccagaaggtctgtcatg

SEQ ID NO: 712330 - DNA, 25 bp, Homo sapien
gagactgctgggtcaatgttgccga

SEQ ID NO: 712331 - DNA, 25 bp, Homo sapien
gtggcctctccacgtggactcctga

SEQ ID NO: 712332 - DNA, 25 bp, Homo sapien
cgtggactcctgagcaaggtggcca

SEQ ID NO: 712333 - DNA, 25 bp, Homo sapien
tccagggtcactgaccatgtgctta

SEQ ID NO: 712334 - DNA, 25 bp, Homo sapien
ctaatccagggtcactgaccatgtg

SEQ ID NO: 712335 - DNA, 25 bp, Homo sapien
cagggtcactgaccatgtgcttatc

SEQ ID NO: 712336 - DNA, 25 bp, Homo sapien
ggtcactgaccatgtgcttatctgg

SEQ ID NO: 712337 - DNA, 25 bp, Homo sapien
gccagtgtggttcctatatcccggg

SEQ ID NO: 712338 - DNA, 25 bp, Homo sapien
ctcagtaacaagcagccgccagtgt

SEQ ID NO: 712339 - DNA, 25 bp, Homo sapien
gggacttcgcctgtctcctgcggat

SEQ ID NO: 712340 - DNA, 25 bp, Homo sapien
accagtggcttatgcgtgcccctca

SEQ ID NO: 712341 - DNA, 25 bp, Homo sapien
gacagtaagggctgctcacagggaa

SEQ ID NO: 712342 - DNA, 25 bp, Homo sapien
taagaatgaattcgccccagaagga

SEQ ID NO: 712343 - DNA, 25 bp, Homo sapien
aaaagatcagctgtggaccaagagg

SEQ ID NO: 712344 - DNA, 25 bp, Homo sapien
ccagagtgggtcctacaaaggctaa

SEQ ID NO: 712345 - DNA, 25 bp, Homo sapien
gctgttacgagggttagtcctcata

SEQ ID NO: 712346 - DNA, 25 bp, Homo sapien
catctacttcagaaagctgttacga

SEQ ID NO: 712347 - DNA, 25 bp, Homo sapien
acctcctaataactccaccagttag

SEQ ID NO: 712348 - DNA, 25 bp, Homo sapien
gagtcagtgtcctgcctacctccta

SEQ ID NO: 712349 - DNA, 25 bp, Homo sapien
ctcatccagcggctgcggaactggg

SEQ ID NO: 712350 - DNA, 25 bp, Homo sapien
cccagcggtggagacgtcaccggct

SEQ ID NO: 712351 - DNA, 25 bp, Homo sapien
ttcagtatcgcggacggaagatggc

SEQ ID NO: 712352 - DNA, 25 bp, Homo sapien
tttataggacgttctagcaccgccc

SEQ ID NO: 712353 - DNA, 25 bp, Homo sapien
gataggctgcacacggctggtgtcc

SEQ ID NO: 712354 - DNA, 25 bp, Homo sapien
gccagcttgataggctgcacacggc

SEQ ID NO: 712355 - DNA, 25 bp, Homo sapien
cctggccagcttgataggctgcaca

SEQ ID NO: 712356 - DNA, 25 bp, Homo sapien
gcttgataggctgcacacggctggt

SEQ ID NO: 712357 - DNA, 25 bp, Homo sapien
accggtcctgcccaggaccttggtg

SEQ ID NO: 712358 - DNA, 25 bp, Homo sapien
gcactgtccctgagaaccggtcctg

SEQ ID NO: 712359 - DNA, 25 bp, Homo sapien
gtgcactgtccctgagaaccggtcc

SEQ ID NO: 712360 - DNA, 25 bp, Homo sapien
tgagaaccggtcctgcccaggacct

SEQ ID NO: 712361 - DNA, 25 bp, Homo sapien
atatgaattcagagaacgtgtcggg

SEQ ID NO: 712362 - DNA, 25 bp, Homo sapien
tcacatcagggtttaggtcgccggc

SEQ ID NO: 712363 - DNA, 25 bp, Homo sapien
tacagatcgttaaagggaaccatca

SEQ ID NO: 712364 - DNA, 25 bp, Homo sapien
ccgtgatgaaatgagaatcggctcc

SEQ ID NO: 712365 - DNA, 25 bp, Homo sapien
aaagggtgagcacgtcgccctcgcg

SEQ ID NO: 712366 - DNA, 25 bp, Homo sapien
ttctcgctctgactccaaaagggtg

SEQ ID NO: 712367 - DNA, 25 bp, Homo sapien
aagggtgagcacgtcgccctcgcgc

SEQ ID NO: 712368 - DNA, 25 bp, Homo sapien
aaacagacccaaacatgagatgttg

SEQ ID NO: 712369 - DNA, 25 bp, Homo sapien
tgtcagtctctgtatgtagactctg

SEQ ID NO: 712370 - DNA, 25 bp, Homo sapien
tctcaccctgggcttaacgaagcct

SEQ ID NO: 712371 - DNA, 25 bp, Homo sapien
caggccccgcagcaattggcaaact

SEQ ID NO: 712372 - DNA, 25 bp, Homo sapien
cattcccatcggccaagtggtcgaa

SEQ ID NO: 712373 - DNA, 25 bp, Homo sapien
ttcccatcggccaagtggtcgaacc

SEQ ID NO: 712374 - DNA, 25 bp, Homo sapien
attcccatcggccaagtggtcgaac

SEQ ID NO: 712375 - DNA, 25 bp, Homo sapien
gaaaagcttcgtttggcaagaccgc

SEQ ID NO: 712376 - DNA, 25 bp, Homo sapien
gttggatacaaaccaggcagcctgg

SEQ ID NO: 712377 - DNA, 25 bp, Homo sapien
tgctcagaggctaacactggccgaa

SEQ ID NO: 712378 - DNA, 25 bp, Homo sapien
gtcaagcgcctcttccaggtcagaa

SEQ ID NO: 712379 - DNA, 25 bp, Homo sapien
gctgtgccgaaaaggccgcgcagac

SEQ ID NO: 712380 - DNA, 25 bp, Homo sapien
gagctggaggaagcccgcgaggctg

SEQ ID NO: 712381 - DNA, 25 bp, Homo sapien
gctgctgcgcgccagtctggagcac

SEQ ID NO: 712382 - DNA, 25 bp, Homo sapien
tcgcccggatccatggacggagaca

SEQ ID NO: 712383 - DNA, 25 bp, Homo sapien
ttccatgtgggctttccaaagccca

SEQ ID NO: 712384 - DNA, 25 bp, Homo sapien
gttgatccaccccttgcagctggtg

SEQ ID NO: 712385 - DNA, 25 bp, Homo sapien
ggaggacgctgaccccattgcgtca

SEQ ID NO: 712386 - DNA, 25 bp, Homo sapien
gccagctgtgtgagaagtagaccca

SEQ ID NO: 712387 - DNA, 25 bp, Homo sapien
gtgatgaacggcattggctgtcctc

SEQ ID NO: 712388 - DNA, 25 bp, Homo sapien
ggcagtttcatgagtgttctccaag

SEQ ID NO: 712389 - DNA, 25 bp, Homo sapien
atgagtgttctccaagtgaacatga

SEQ ID NO: 712390 - DNA, 25 bp, Homo sapien
agtgttctccaagtgaacatgaaga

SEQ ID NO: 712391 - DNA, 25 bp, Homo sapien
cagtttcatgagtgttctccaagtg

SEQ ID NO: 712392 - DNA, 25 bp, Homo sapien
tggcgacgcatcttaggtactttgt

SEQ ID NO: 712393 - DNA, 25 bp, Homo sapien
taggtctggcgacgcatcttaggta

SEQ ID NO: 712394 - DNA, 25 bp, Homo sapien
atccgaccggagttccgtaggtctg

SEQ ID NO: 712395 - DNA, 25 bp, Homo sapien
gagttccgtaggtctggcgacgcat

SEQ ID NO: 712396 - DNA, 25 bp, Homo sapien
cccaggcgcctgagaggaagttcaa

SEQ ID NO: 712397 - DNA, 25 bp, Homo sapien
tgaactcgagagcagctgttctggc

SEQ ID NO: 712398 - DNA, 25 bp, Homo sapien
tcagacgcgctcctttcccgctgat

SEQ ID NO: 712399 - DNA, 25 bp, Homo sapien
gccctctggtggtgaactcgagagc

SEQ ID NO: 712400 - DNA, 25 bp, Homo sapien
ggtcaatgctgcaatggggtaagca

SEQ ID NO: 712401 - DNA, 25 bp, Homo sapien
tgctgcaatggggtaagcacacagg

SEQ ID NO: 712402 - DNA, 25 bp, Homo sapien
gctgcaatggggtaagcacacaggc

SEQ ID NO: 712403 - DNA, 25 bp, Homo sapien
ctagatggtcaatgctgcaatgggg

SEQ ID NO: 712404 - DNA, 25 bp, Homo sapien
agtccttgccttgcggaggcttcgt

SEQ ID NO: 712405 - DNA, 25 bp, Homo sapien
ccttgcggaggcttcgtgtgacctc

SEQ ID NO: 712406 - DNA, 25 bp, Homo sapien
ttgccttgcggaggcttcgtgtgac

SEQ ID NO: 712407 - DNA, 25 bp, Homo sapien
tgcggaggcttcgtgtgacctccat

SEQ ID NO: 712408 - DNA, 25 bp, Homo sapien
tgaggatccgctcagctcggcttct

SEQ ID NO: 712409 - DNA, 25 bp, Homo sapien
gtgaggatccgctcagctcggcttc

SEQ ID NO: 712410 - DNA, 25 bp, Homo sapien
ctggaaagaatcggatcacagtcgt

SEQ ID NO: 712411 - DNA, 25 bp, Homo sapien
gaggactggagacgcggaggaccgg

SEQ ID NO: 712412 - DNA, 25 bp, Homo sapien
taggtagcctgggagcggggattcg

SEQ ID NO: 712413 - DNA, 25 bp, Homo sapien
aagacccgcttggttgcagaagccg

SEQ ID NO: 712414 - DNA, 25 bp, Homo sapien
gggtaagacccgcttggttgcagaa

SEQ ID NO: 712415 - DNA, 25 bp, Homo sapien
cctgagcgctcagtagcacggcggt

SEQ ID NO: 712416 - DNA, 25 bp, Homo sapien
gcgacttggactgcacgggtccgcc

SEQ ID NO: 712417 - DNA, 25 bp, Homo sapien
gccctgagcgctcagtagcacggcg

SEQ ID NO: 712418 - DNA, 25 bp, Homo sapien
ccaggacgcaaagcgcggcgacttg

SEQ ID NO: 712419 - DNA, 25 bp, Homo sapien
cgtgcgccaggacattcatctcgtc

SEQ ID NO: 712420 - DNA, 25 bp, Homo sapien
ggtgcgctccgcgtgttcgcgcagc

SEQ ID NO: 712421 - DNA, 25 bp, Homo sapien
cgctcagctgactgcgggtgcgctc

SEQ ID NO: 712422 - DNA, 25 bp, Homo sapien
ctcggttccctgacaggcggacccg

SEQ ID NO: 712423 - DNA, 25 bp, Homo sapien
tgtccatacccttccaagccaggag

SEQ ID NO: 712424 - DNA, 25 bp, Homo sapien
agggagccacagttgcgcaccccgc

SEQ ID NO: 712425 - DNA, 25 bp, Homo sapien
gggagcccatcccttgacgcaggga

SEQ ID NO: 712426 - DNA, 25 bp, Homo sapien
actaggggcgcggagaaccagccct

SEQ ID NO: 712427 - DNA, 25 bp, Homo sapien
agatgctgaattcgcaggtgctgct

SEQ ID NO: 712428 - DNA, 25 bp, Homo sapien
gctgaattcgcaggtgctgcttctc

SEQ ID NO: 712429 - DNA, 25 bp, Homo sapien
tgcagatgctgaattcgcaggtgct

SEQ ID NO: 712430 - DNA, 25 bp, Homo sapien
tgtggaagagttgctggatcctgct

SEQ ID NO: 712431 - DNA, 25 bp, Homo sapien
gctgggccatctcgggcagcctctt

SEQ ID NO: 712432 - DNA, 25 bp, Homo sapien
tgcaggcggctgacattgtgagccg

SEQ ID NO: 712433 - DNA, 25 bp, Homo sapien
gcagcctctttcttcgggcaggctt

SEQ ID NO: 712434 - DNA, 25 bp, Homo sapien
tctaggtgcttgtggtccaggaggc

SEQ ID NO: 712435 - DNA, 25 bp, Homo sapien
tcaccaaaaatggcggagacccctg

SEQ ID NO: 712436 - DNA, 25 bp, Homo sapien
cctgaggctggatttcaaatagtcc

SEQ ID NO: 712437 - DNA, 25 bp, Homo sapien
ggctggatttcaaatagtccactct

SEQ ID NO: 712438 - DNA, 25 bp, Homo sapien
aaaatggcggagacccctgaggctg

SEQ ID NO: 712439 - DNA, 25 bp, Homo sapien
ctctgaattactgtccagcctccat

SEQ ID NO: 712440 - DNA, 25 bp, Homo sapien
agtccactgagccatcgtggcgcct

SEQ ID NO: 712441 - DNA, 25 bp, Homo sapien
gtggcgcctctgaattactgtccag

SEQ ID NO: 712442 - DNA, 25 bp, Homo sapien
ccatcgtggcgcctctgaattactg

SEQ ID NO: 712443 - DNA, 25 bp, Homo sapien
cagggccacttctgagggtccctct

SEQ ID NO: 712444 - DNA, 25 bp, Homo sapien
gtgggagaggccactccatgaggca

SEQ ID NO: 712445 - DNA, 25 bp, Homo sapien
ggccactccatgaggcagggccact

SEQ ID NO: 712446 - DNA, 25 bp, Homo sapien
gcctctgtccccactagaaacacct

SEQ ID NO: 712447 - DNA, 25 bp, Homo sapien
cagagaggctcttggcgcagttctt

SEQ ID NO: 712448 - DNA, 25 bp, Homo sapien
gagctgcaggctataggccgtgtcc

SEQ ID NO: 712449 - DNA, 25 bp, Homo sapien
cagttcttgtccctgcggaggtcgt

SEQ ID NO: 712450 - DNA, 25 bp, Homo sapien
tcctggtcccaagtggagaagggta

SEQ ID NO: 712451 - DNA, 25 bp, Homo sapien
ctgaaaggagatagggatagggttg

SEQ ID NO: 712452 - DNA, 25 bp, Homo sapien
tgaaaggagatagggatagggttga

SEQ ID NO: 712453 - DNA, 25 bp, Homo sapien
catggtcaggtctttgagccaccga

SEQ ID NO: 712454 - DNA, 25 bp, Homo sapien
aacatggtcaggtctttgagccacc

SEQ ID NO: 712455 - DNA, 25 bp, Homo sapien
gtcaggtctttgagccaccgatggg

SEQ ID NO: 712456 - DNA, 25 bp, Homo sapien
tggtcaggtctttgagccaccgatg

SEQ ID NO: 712457 - DNA, 25 bp, Homo sapien
gctgtgggatggagcggaagtactg

SEQ ID NO: 712458 - DNA, 25 bp, Homo sapien
cccttcttaagcttctgccgctgct

SEQ ID NO: 712459 - DNA, 25 bp, Homo sapien
ggcctgcagcgggtagtagcggccc

SEQ ID NO: 712460 - DNA, 25 bp, Homo sapien
tagcggccccgccaggtcttccaga

SEQ ID NO: 712461 - DNA, 25 bp, Homo sapien
ggccacatcctcgggcagagccaag

SEQ ID NO: 712462 - DNA, 25 bp, Homo sapien
aagagtcaccgtctttcgtgggcct

SEQ ID NO: 712463 - DNA, 25 bp, Homo sapien
ccaagagtcaccgtctttcgtgggc

SEQ ID NO: 712464 - DNA, 25 bp, Homo sapien
acatcctcgggcagagccaagagtc

SEQ ID NO: 712465 - DNA, 25 bp, Homo sapien
ttctctgtccacaagtttccagatg

SEQ ID NO: 712466 - DNA, 25 bp, Homo sapien
cttctctgtccacaagtttccagat

SEQ ID NO: 712467 - DNA, 25 bp, Homo sapien
ggccagcaaggagtgaagctccatg

SEQ ID NO: 712468 - DNA, 25 bp, Homo sapien
ttggtccacgcctctagagtctgag

SEQ ID NO: 712469 - DNA, 25 bp, Homo sapien
ctgcactcagaaagggggcttctcc

SEQ ID NO: 712470 - DNA, 25 bp, Homo sapien
tgagcatatcctgcagcctcgatct

SEQ ID NO: 712471 - DNA, 25 bp, Homo sapien
gactgagtccgccattgaggccagt

SEQ ID NO: 712472 - DNA, 25 bp, Homo sapien
atgagggcgctctcgacccacacaa

SEQ ID NO: 712473 - DNA, 25 bp, Homo sapien
gccctggtccccgtcagtcaatgtg

SEQ ID NO: 712474 - DNA, 25 bp, Homo sapien
ttggcgcctgcttgtgtccccaggg

SEQ ID NO: 712475 - DNA, 25 bp, Homo sapien
gaactctgtgagctccgcccagata

SEQ ID NO: 712476 - DNA, 25 bp, Homo sapien
aactctgtgagctccgcccagatac

SEQ ID NO: 712477 - DNA, 25 bp, Homo sapien
ctctgtgagctccgcccagatacca

SEQ ID NO: 712478 - DNA, 25 bp, Homo sapien
actctgtgagctccgcccagatacc

SEQ ID NO: 712479 - DNA, 25 bp, Homo sapien
cagtggcactgtatccggaattggg

SEQ ID NO: 712480 - DNA, 25 bp, Homo sapien
ccatggacccttgcggtaagtgttc

SEQ ID NO: 712481 - DNA, 25 bp, Homo sapien
tggacccttgcggtaagtgttccag

SEQ ID NO: 712482 - DNA, 25 bp, Homo sapien
gtgcagtggcactgtatccggaatt

SEQ ID NO: 712483 - DNA, 25 bp, Homo sapien
tggtgataggcgatagtctcaccgc

SEQ ID NO: 712484 - DNA, 25 bp, Homo sapien
cttggtgataggcgatagtctcacc

SEQ ID NO: 712485 - DNA, 25 bp, Homo sapien
gtgataggcgatagtctcaccgctt

SEQ ID NO: 712486 - DNA, 25 bp, Homo sapien
cgcttggtgataggcgatagtctca

SEQ ID NO: 712487 - DNA, 25 bp, Homo sapien
tctaagtcccctacgcgattagtta

SEQ ID NO: 712488 - DNA, 25 bp, Homo sapien
taagtcccctacgcgattagttaga

SEQ ID NO: 712489 - DNA, 25 bp, Homo sapien
ctaagtcccctacgcgattagttag

SEQ ID NO: 712490 - DNA, 25 bp, Homo sapien
tctctaagtcccctacgcgattagt

SEQ ID NO: 712491 - DNA, 25 bp, Homo sapien
ggtcccctttctcggttgcagtctc

SEQ ID NO: 712492 - DNA, 25 bp, Homo sapien
tgggtcccctttctcggttgcagtc

SEQ ID NO: 712493 - DNA, 25 bp, Homo sapien
tcccctttctcggttgcagtctcca

SEQ ID NO: 712494 - DNA, 25 bp, Homo sapien
cccctttctcggttgcagtctccat

SEQ ID NO: 712495 - DNA, 25 bp, Homo sapien
gtcccgatgacgtcataggtcagcg

SEQ ID NO: 712496 - DNA, 25 bp, Homo sapien
gagaaatggggctacgtccaggtaa

SEQ ID NO: 712497 - DNA, 25 bp, Homo sapien
gctacgatgcttaacgtcccgatga

SEQ ID NO: 712498 - DNA, 25 bp, Homo sapien
gatgacgtcataggtcagcgcgcgc

SEQ ID NO: 712499 - DNA, 25 bp, Homo sapien
cggcgagtggagtagcgacgggcac

SEQ ID NO: 712500 - DNA, 25 bp, Homo sapien
gcacccagcgaagccaatcagagat

SEQ ID NO: 712501 - DNA, 25 bp, Homo sapien
ttccggcgggatcggcgactccgca

SEQ ID NO: 712502 - DNA, 25 bp, Homo sapien
ttgaatggcctatcagcggcgagtg

SEQ ID NO: 712503 - DNA, 25 bp, Homo sapien
tgacattatcaacctgtgtgcagct

SEQ ID NO: 712504 - DNA, 25 bp, Homo sapien
tcagtgccacaggacgactctaggc

SEQ ID NO: 712505 - DNA, 25 bp, Homo sapien
acaggacgactctaggcccttgtag

SEQ ID NO: 712506 - DNA, 25 bp, Homo sapien
gaaggctttcgccacacggacagcc

SEQ ID NO: 712507 - DNA, 25 bp, Homo sapien
aacacaggtatgcattgtcccagga

SEQ ID NO: 712508 - DNA, 25 bp, Homo sapien
tcaaggggcagtccgtgtggcagtc

SEQ ID NO: 712509 - DNA, 25 bp, Homo sapien
gtccacgtgtgtgcacagctcctca

SEQ ID NO: 712510 - DNA, 25 bp, Homo sapien
agagcagcttgccaagatgcaaacc

SEQ ID NO: 712511 - DNA, 25 bp, Homo sapien
cccacatccagcttcggcacagatg

SEQ ID NO: 712512 - DNA, 25 bp, Homo sapien
cacatccagcttcggcacagatggc

SEQ ID NO: 712513 - DNA, 25 bp, Homo sapien
catccagcttcggcacagatggctg

SEQ ID NO: 712514 - DNA, 25 bp, Homo sapien
atccagcttcggcacagatggctga

SEQ ID NO: 712515 - DNA, 25 bp, Homo sapien
ctgccaacggtgtggaggagtcgag

SEQ ID NO: 712516 - DNA, 25 bp, Homo sapien
gcggatagcacaacacctgcctgtg

SEQ ID NO: 712517 - DNA, 25 bp, Homo sapien
acagccactgcggatagcacaacac

SEQ ID NO: 712518 - DNA, 25 bp, Homo sapien
cggtgtggaggagtcgagagatgcc

SEQ ID NO: 712519 - DNA, 25 bp, Homo sapien
ttccctgggtgctgcaccaacgcgg

SEQ ID NO: 712520 - DNA, 25 bp, Homo sapien
tccccacactccacccacgactgcc

SEQ ID NO: 712521 - DNA, 25 bp, Homo sapien
aaggcgaggttctgtgaatccccac

SEQ ID NO: 712522 - DNA, 25 bp, Homo sapien
gttccctgggtgctgcaccaacgcg

SEQ ID NO: 712523 - DNA, 25 bp, Homo sapien
tgtcccagatctgcgccttgatggt

SEQ ID NO: 712524 - DNA, 25 bp, Homo sapien
cacctggatgctgcgggtggcgaac

SEQ ID NO: 712525 - DNA, 25 bp, Homo sapien
tggcgaactccacgccgatggtgct

SEQ ID NO: 712526 - DNA, 25 bp, Homo sapien
tctccaggttgaactcgttgcgggt

SEQ ID NO: 712527 - DNA, 25 bp, Homo sapien
tggtcttgggagcacactctcccct

SEQ ID NO: 712528 - DNA, 25 bp, Homo sapien
tggctaaagcgttcttccagcctca

SEQ ID NO: 712529 - DNA, 25 bp, Homo sapien
gtcccacggcgcatggctaaagcgt

SEQ ID NO: 712530 - DNA, 25 bp, Homo sapien
cacttggtacccagagataccctgg

SEQ ID NO: 712531 - DNA, 25 bp, Homo sapien
acatcacgcccagggtgggtcgtcc

SEQ ID NO: 712532 - DNA, 25 bp, Homo sapien
cagggtgggtcgtccagggccgagc

SEQ ID NO: 712533 - DNA, 25 bp, Homo sapien
cacacatcacgcccagggtgggtcg

SEQ ID NO: 712534 - DNA, 25 bp, Homo sapien
atcacgcccagggtgggtcgtccag

SEQ ID NO: 712535 - DNA, 25 bp, Homo sapien
cagcgctccacgttctcataggtca

SEQ ID NO: 712536 - DNA, 25 bp, Homo sapien
tccacgttctcataggtcaggtgct

SEQ ID NO: 712537 - DNA, 25 bp, Homo sapien
gatgttgctgtctgcgtggtcccgc

SEQ ID NO: 712538 - DNA, 25 bp, Homo sapien
cataggtcaggtgcttggcgatgtc

SEQ ID NO: 712539 - DNA, 25 bp, Homo sapien
gaatgcttcctctacgttagtggaa

SEQ ID NO: 712540 - DNA, 25 bp, Homo sapien
agtggaatccaaggctgaggtctcg

SEQ ID NO: 712541 - DNA, 25 bp, Homo sapien
tctcgatgaaggacaagttgttctt

SEQ ID NO: 712542 - DNA, 25 bp, Homo sapien
gctgaggtctcgatgaaggacaagt

SEQ ID NO: 712543 - DNA, 25 bp, Homo sapien
cagcaagggctagacctggtctgac

SEQ ID NO: 712544 - DNA, 25 bp, Homo sapien
gcgaaggttcagaggccgtgttcca

SEQ ID NO: 712545 - DNA, 25 bp, Homo sapien
tggtctgaccctgtgaagtgtccag

SEQ ID NO: 712546 - DNA, 25 bp, Homo sapien
cgccaagagttaaggcagggcccat

SEQ ID NO: 712547 - DNA, 25 bp, Homo sapien
cgcggtctgcgatctgtttctgtga

SEQ ID NO: 712548 - DNA, 25 bp, Homo sapien
tgatgtccaccacgttgttccccgg

SEQ ID NO: 712549 - DNA, 25 bp, Homo sapien
tgttgggcttctgtccgtccgtggt

SEQ ID NO: 712550 - DNA, 25 bp, Homo sapien
tggtgggcggcacgctgatgtccac

SEQ ID NO: 712551 - DNA, 25 bp, Homo sapien
tgcaaacaggttccagaccagatgg

SEQ ID NO: 712552 - DNA, 25 bp, Homo sapien
ggctttggcccagagcacggttctg

SEQ ID NO: 712553 - DNA, 25 bp, Homo sapien
caaaacacggagatattgcttcact

SEQ ID NO: 712554 - DNA, 25 bp, Homo sapien
gctccctagagtcggccaaggaaaa

SEQ ID NO: 712555 - DNA, 25 bp, Homo sapien
tgcattcgccaatcgccttgcacgt

SEQ ID NO: 712556 - DNA, 25 bp, Homo sapien
gagccgacagcgccgcggaccaata

SEQ ID NO: 712557 - DNA, 25 bp, Homo sapien
gaccaatagcgaccgcctctcgcct

SEQ ID NO: 712558 - DNA, 25 bp, Homo sapien
tccggccggcacctgcgtccgggca

SEQ ID NO: 712559 - DNA, 25 bp, Homo sapien
gcacaggcccctcggttcgcctcgg

SEQ ID NO: 712560 - DNA, 25 bp, Homo sapien
ccgcacaggcccctcggttcgcctc

SEQ ID NO: 712561 - DNA, 25 bp, Homo sapien
cacaggcccctcggttcgcctcggc

SEQ ID NO: 712562 - DNA, 25 bp, Homo sapien
ggccgcacaggcccctcggttcgcc

SEQ ID NO: 712563 - DNA, 25 bp, Homo sapien
tattttgcaggcagagccgctctga

SEQ ID NO: 712564 - DNA, 25 bp, Homo sapien
tgtcaggcgttttctgcaccagcca

SEQ ID NO: 712565 - DNA, 25 bp, Homo sapien
tcaggttggcaatgggatgacccag

SEQ ID NO: 712566 - DNA, 25 bp, Homo sapien
caccggccttgacacgggaactgag

SEQ ID NO: 712567 - DNA, 25 bp, Homo sapien
gttttgagcacccacatagcacagg

SEQ ID NO: 712568 - DNA, 25 bp, Homo sapien
gaatgagctcaacatgcccatttga

SEQ ID NO: 712569 - DNA, 25 bp, Homo sapien
aagaactgaatgagctcaacatgcc

SEQ ID NO: 712570 - DNA, 25 bp, Homo sapien
tgcccatttgactaccccgttttga

SEQ ID NO: 712571 - DNA, 25 bp, Homo sapien
tcagagatatttagaggctagaggt

SEQ ID NO: 712572 - DNA, 25 bp, Homo sapien
tgagagagccacatctcttgaccct

SEQ ID NO: 712573 - DNA, 25 bp, Homo sapien
ctggaagaggccaaacttgaggctg

SEQ ID NO: 712574 - DNA, 25 bp, Homo sapien
tcctcactccgtttaagaacagcgt

SEQ ID NO: 712575 - DNA, 25 bp, Homo sapien
gctaggacggttcactgctggataa

SEQ ID NO: 712576 - DNA, 25 bp, Homo sapien
taactcttgcgctaggacggttcac

SEQ ID NO: 712577 - DNA, 25 bp, Homo sapien
gggagcaattactaactcttgcgct

SEQ ID NO: 712578 - DNA, 25 bp, Homo sapien
aaaacaaatctgagctccaaagtgg

SEQ ID NO: 712579 - DNA, 25 bp, Homo sapien
agagaccctatctctctgaaggttt

SEQ ID NO: 712580 - DNA, 25 bp, Homo sapien
gagagaccctatctctctgaaggtt

SEQ ID NO: 712581 - DNA, 25 bp, Homo sapien
agccccgtatcctcagggcctgagg

SEQ ID NO: 712582 - DNA, 25 bp, Homo sapien
ggagccccgtatcctcagggcctga

SEQ ID NO: 712583 - DNA, 25 bp, Homo sapien
ggccaccgggagccccgtatcctca

SEQ ID NO: 712584 - DNA, 25 bp, Homo sapien
caccgggagccccgtatcctcaggg

SEQ ID NO: 712585 - DNA, 25 bp, Homo sapien
ggtccgaggcccgtagcctccacga

SEQ ID NO: 712586 - DNA, 25 bp, Homo sapien
cacatactggggcggtccgaggccc

SEQ ID NO: 712587 - DNA, 25 bp, Homo sapien
gtagcctccacgaccttggagaagg

SEQ ID NO: 712588 - DNA, 25 bp, Homo sapien
gaggcccgtagcctccacgaccttg

SEQ ID NO: 712589 - DNA, 25 bp, Homo sapien
cacggatgacggtggagaggagccg

SEQ ID NO: 712590 - DNA, 25 bp, Homo sapien
ggccatcccttgaagtcacctgtgc

SEQ ID NO: 712591 - DNA, 25 bp, Homo sapien
ggagccggccatcccttgaagtcac

SEQ ID NO: 712592 - DNA, 25 bp, Homo sapien
tcggtgtgtccaaggcacggatgac

SEQ ID NO: 712593 - DNA, 25 bp, Homo sapien
cagaagtgacgagaatcttgaggaa

SEQ ID NO: 712594 - DNA, 25 bp, Homo sapien
ttaaaaagagcccaacaggctgctc

SEQ ID NO: 712595 - DNA, 25 bp, Homo sapien
tcctgcaatggcaaaagggcatgcc

SEQ ID NO: 712596 - DNA, 25 bp, Homo sapien
ggaagaatcatgtcagtttggagct

SEQ ID NO: 712597 - DNA, 25 bp, Homo sapien
tcggactccctagctcgagcgatcc

SEQ ID NO: 712598 - DNA, 25 bp, Homo sapien
cctcggactccctagctcgagcgat

SEQ ID NO: 712599 - DNA, 25 bp, Homo sapien
cggactccctagctcgagcgatcct

SEQ ID NO: 712600 - DNA, 25 bp, Homo sapien
ctcggactccctagctcgagcgatc

SEQ ID NO: 712601 - DNA, 25 bp, Homo sapien
tgcaaactccgtgtggcacagctcg

SEQ ID NO: 712602 - DNA, 25 bp, Homo sapien
gttagatgaggaaagccacttctcc

SEQ ID NO: 712603 - DNA, 25 bp, Homo sapien
tccagacagctcttatgcacggcac

SEQ ID NO: 712604 - DNA, 25 bp, Homo sapien
gcagatccggcagaaaggaccatca

SEQ ID NO: 712605 - DNA, 25 bp, Homo sapien
tgtcgcagcacagtgtccgcttctc

SEQ ID NO: 712606 - DNA, 25 bp, Homo sapien
ccagcggtgtgatgaacaggaaaca

SEQ ID NO: 712607 - DNA, 25 bp, Homo sapien
cgatggtgagggcaatgagacccac

SEQ ID NO: 712608 - DNA, 25 bp, Homo sapien
cagcgtccagaggacatagatggtg

SEQ ID NO: 712609 - DNA, 25 bp, Homo sapien
tgtggggcagccctgcagtgagcgg

SEQ ID NO: 712610 - DNA, 25 bp, Homo sapien
gtggggcagccctgcagtgagcgga

SEQ ID NO: 712611 - DNA, 25 bp, Homo sapien
gccctgcagtgagcggaggcctcca

SEQ ID NO: 712612 - DNA, 25 bp, Homo sapien
gcagccctgcagtgagcggaggcct

SEQ ID NO: 712613 - DNA, 25 bp, Homo sapien
tacagctggcagtggtagcggaagg

SEQ ID NO: 712614 - DNA, 25 bp, Homo sapien
gggctgtccgcctcccggatcttca

SEQ ID NO: 712615 - DNA, 25 bp, Homo sapien
caggcgaactttctggttggtcttt

SEQ ID NO: 712616 - DNA, 25 bp, Homo sapien
tctttctccactcggagtacagctg

SEQ ID NO: 712617 - DNA, 25 bp, Homo sapien
tgttccagctttaagggcgcccttg

SEQ ID NO: 712618 - DNA, 25 bp, Homo sapien
ttccacaggacagggtatcaccagc

SEQ ID NO: 712619 - DNA, 25 bp, Homo sapien
cctaagaagcgttcaggccgtgcgg

SEQ ID NO: 712620 - DNA, 25 bp, Homo sapien
ttttatataaagtcgagggtgccag

SEQ ID NO: 712621 - DNA, 25 bp, Homo sapien
acgagatttaaccatattggctagg

SEQ ID NO: 712622 - DNA, 25 bp, Homo sapien
gacgagatttaaccatattggctag

SEQ ID NO: 712623 - DNA, 25 bp, Homo sapien
gagacgagatttaaccatattggct

SEQ ID NO: 712624 - DNA, 25 bp, Homo sapien
agacgagatttaaccatattggcta

SEQ ID NO: 712625 - DNA, 25 bp, Homo sapien
gccgggaacagccagtcggtgccta

SEQ ID NO: 712626 - DNA, 25 bp, Homo sapien
taacgcgagtgtatctcgagagaga

SEQ ID NO: 712627 - DNA, 25 bp, Homo sapien
ccagtcggtgcctaacgcgagtgta

SEQ ID NO: 712628 - DNA, 25 bp, Homo sapien
tctcgagagagaagcgatcaacagc

SEQ ID NO: 712629 - DNA, 25 bp, Homo sapien
gagagaagcgatcaacagctgccgg

SEQ ID NO: 712630 - DNA, 25 bp, Homo sapien
agcgatcaacagctgccggtctgcg

SEQ ID NO: 712631 - DNA, 25 bp, Homo sapien
gctgttgatcgcttctctctcgaga

SEQ ID NO: 712632 - DNA, 25 bp, Homo sapien
gatacactcgcgttaggcaccgact

SEQ ID NO: 712633 - DNA, 25 bp, Homo sapien
tcgcgttaggcaccgactggctgtt

SEQ ID NO: 712634 - DNA, 25 bp, Homo sapien
tctctcgagatacactcgcgttagg

SEQ ID NO: 712635 - DNA, 25 bp, Homo sapien
ttaggcaccgactggctgttcccgg

SEQ ID NO: 712636 - DNA, 25 bp, Homo sapien
cgcagaccggcagctgttgatcgct

SEQ ID NO: 712637 - DNA, 25 bp, Homo sapien
tggttgcgtcgggtcacgtgggcgc

SEQ ID NO: 712638 - DNA, 25 bp, Homo sapien
gttactggttgcgtcgggtcacgtg

SEQ ID NO: 712639 - DNA, 25 bp, Homo sapien
ggtgcagcccgttcgctcacacaaa

SEQ ID NO: 712640 - DNA, 25 bp, Homo sapien
tactggttgcgtcgggtcacgtggg

SEQ ID NO: 712641 - DNA, 25 bp, Homo sapien
gtgcagcccgttcgctcacacaaag

SEQ ID NO: 712642 - DNA, 25 bp, Homo sapien
gtgttactggttgcgtcgggtcacg

SEQ ID NO: 712643 - DNA, 25 bp, Homo sapien
gcgcccacgtgacccgacgcaacca

SEQ ID NO: 712644 - DNA, 25 bp, Homo sapien
cccacgtgacccgacgcaaccagta

SEQ ID NO: 712645 - DNA, 25 bp, Homo sapien
ctttgtgtgagcgaacgggctgcac

SEQ ID NO: 712646 - DNA, 25 bp, Homo sapien
ccacgtgacccgacgcaaccagtaa

SEQ ID NO: 712647 - DNA, 25 bp, Homo sapien
tttgtgtgagcgaacgggctgcacc

SEQ ID NO: 712648 - DNA, 25 bp, Homo sapien
acgtgacccgacgcaaccagtaaca

SEQ ID NO: 712649 - DNA, 25 bp, Homo sapien
tggcggcgacggagatcaaaatgga

SEQ ID NO: 712650 - DNA, 25 bp, Homo sapien
atggcggcaggggtcgaagcggcgg

SEQ ID NO: 712651 - DNA, 25 bp, Homo sapien
gtgccgagcggcaacggggctccgg

SEQ ID NO: 712652 - DNA, 25 bp, Homo sapien
ggaggtggcggcgacggagatcaaa

SEQ ID NO: 712653 - DNA, 25 bp, Homo sapien
ggcgacggagatcaaaatggaggaa

SEQ ID NO: 712654 - DNA, 25 bp, Homo sapien
gcccggcgtgccgagcggcaacggg

SEQ ID NO: 712655 - DNA, 25 bp, Homo sapien
cccgttgccgctcggcacgccgggc

SEQ ID NO: 712656 - DNA, 25 bp, Homo sapien
tccattttgatctccgtcgccgcca

SEQ ID NO: 712657 - DNA, 25 bp, Homo sapien
attttgatctccgtcgccgccacct

SEQ ID NO: 712658 - DNA, 25 bp, Homo sapien
tcctccattttgatctccgtcgccg

SEQ ID NO: 712659 - DNA, 25 bp, Homo sapien
ccgccgcttcgacccctgccgccat

SEQ ID NO: 712660 - DNA, 25 bp, Homo sapien
cggagccccgttgccgctcggcacg

SEQ ID NO: 712661 - DNA, 25 bp, Homo sapien
tggcggcgacggagatcaaaatgga

SEQ ID NO: 712662 - DNA, 25 bp, Homo sapien
cgacggagatcaaaatggaggaaga

SEQ ID NO: 712663 - DNA, 25 bp, Homo sapien
atggcggcaggggtcgaagcggcgg

SEQ ID NO: 712664 - DNA, 25 bp, Homo sapien
ggaggtggcggcgacggagatcaaa

SEQ ID NO: 712665 - DNA, 25 bp, Homo sapien
gcccggcgtgccgagcggcaacggg

SEQ ID NO: 712666 - DNA, 25 bp, Homo sapien
tcaaaatggaggaagagagcggcgc

SEQ ID NO: 712667 - DNA, 25 bp, Homo sapien
cccgttgccgctcggcacgccgggc

SEQ ID NO: 712668 - DNA, 25 bp, Homo sapien
attttgatctccgtcgccgccacct

SEQ ID NO: 712669 - DNA, 25 bp, Homo sapien
tcctccattttgatctccgtcgccg

SEQ ID NO: 712670 - DNA, 25 bp, Homo sapien
gcgccgctctcttcctccattttga

SEQ ID NO: 712671 - DNA, 25 bp, Homo sapien
cggagccccgttgccgctcggcacg

SEQ ID NO: 712672 - DNA, 25 bp, Homo sapien
tcttcctccattttgatctccgtcg

SEQ ID NO: 712673 - DNA, 25 bp, Homo sapien
cgtaccgcctgctcagggtagcggc

SEQ ID NO: 712674 - DNA, 25 bp, Homo sapien
ctgctcagggtagcggcgtctaggg

SEQ ID NO: 712675 - DNA, 25 bp, Homo sapien
accgcctgctcagggtagcggcgtc

SEQ ID NO: 712676 - DNA, 25 bp, Homo sapien
cgcctgctcagggtagcggcgtcta

SEQ ID NO: 712677 - DNA, 25 bp, Homo sapien
ttcccgtaccgcctgctcagggtag

SEQ ID NO: 712678 - DNA, 25 bp, Homo sapien
taccgcctgctcagggtagcggcgt

SEQ ID NO: 712679 - DNA, 25 bp, Homo sapien
ccgctaccctgagcaggcggtacgg

SEQ ID NO: 712680 - DNA, 25 bp, Homo sapien
tagacgccgctaccctgagcaggcg

SEQ ID NO: 712681 - DNA, 25 bp, Homo sapien
gacgccgctaccctgagcaggcggt

SEQ ID NO: 712682 - DNA, 25 bp, Homo sapien
acgccgctaccctgagcaggcggta

SEQ ID NO: 712683 - DNA, 25 bp, Homo sapien
ctaccctgagcaggcggtacgggaa

SEQ ID NO: 712684 - DNA, 25 bp, Homo sapien
gccgctaccctgagcaggcggtacg

SEQ ID NO: 712685 - DNA, 25 bp, Homo sapien
cctggctcaagtccctcgccgtttc

SEQ ID NO: 712686 - DNA, 25 bp, Homo sapien
ccctggctcaagtccctcgccgttt

SEQ ID NO: 712687 - DNA, 25 bp, Homo sapien
gcgccgaccgcgctccgcgggaagt

SEQ ID NO: 712688 - DNA, 25 bp, Homo sapien
gctccgcgggaagtgcctccctcgg

SEQ ID NO: 712689 - DNA, 25 bp, Homo sapien
gccctggctcaagtccctcgccgtt

SEQ ID NO: 712690 - DNA, 25 bp, Homo sapien
cctcgccccacgctctggccctggc

SEQ ID NO: 712691 - DNA, 25 bp, Homo sapien
acttcccgcggagcgcggtcggcgc

SEQ ID NO: 712692 - DNA, 25 bp, Homo sapien
ccgagggaggcacttcccgcggagc

SEQ ID NO: 712693 - DNA, 25 bp, Homo sapien
aacggcgagggacttgagccagggc

SEQ ID NO: 712694 - DNA, 25 bp, Homo sapien
gccagggccagagcgtggggcgagg

SEQ ID NO: 712695 - DNA, 25 bp, Homo sapien
cgagggaggcacttcccgcggagcg

SEQ ID NO: 712696 - DNA, 25 bp, Homo sapien
gaaacggcgagggacttgagccagg

SEQ ID NO: 712697 - DNA, 25 bp, Homo sapien
cctggctcaagtccctcgccgtttc

SEQ ID NO: 712698 - DNA, 25 bp, Homo sapien
gcgccgaccgcgctccgcgggaagt

SEQ ID NO: 712699 - DNA, 25 bp, Homo sapien
tccgcgggaagtgcctccctcggaa

SEQ ID NO: 712700 - DNA, 25 bp, Homo sapien
gccctggctcaagtccctcgccgtt

SEQ ID NO: 712701 - DNA, 25 bp, Homo sapien
gctcaagtccctcgccgtttcccgc

SEQ ID NO: 712702 - DNA, 25 bp, Homo sapien
cctcgccccacgctctggccctggc

SEQ ID NO: 712703 - DNA, 25 bp, Homo sapien
gcgggaaacggcgagggacttgagc

SEQ ID NO: 712704 - DNA, 25 bp, Homo sapien
ttccgagggaggcacttcccgcgga

SEQ ID NO: 712705 - DNA, 25 bp, Homo sapien
ccgcggagcgcggtcggcgcgcggg

SEQ ID NO: 712706 - DNA, 25 bp, Homo sapien
aacggcgagggacttgagccagggc

SEQ ID NO: 712707 - DNA, 25 bp, Homo sapien
gccagggccagagcgtggggcgagg

SEQ ID NO: 712708 - DNA, 25 bp, Homo sapien
gaaacggcgagggacttgagccagg

SEQ ID NO: 712709 - DNA, 25 bp, Homo sapien
gcagctgaggaaagcgccctgtcag

SEQ ID NO: 712710 - DNA, 25 bp, Homo sapien
ctacctagagatggttagtgttaac

SEQ ID NO: 712711 - DNA, 25 bp, Homo sapien
aggaaagcgccctgtcagccagtgc

SEQ ID NO: 712712 - DNA, 25 bp, Homo sapien
gggcttccaagcctgatggctgcta

SEQ ID NO: 712713 - DNA, 25 bp, Homo sapien
tagtgttaacagtgtggtggcacct

SEQ ID NO: 712714 - DNA, 25 bp, Homo sapien
gcctgatggctgctacctagagatg

SEQ ID NO: 712715 - DNA, 25 bp, Homo sapien
tagcagccatcaggcttggaagccc

SEQ ID NO: 712716 - DNA, 25 bp, Homo sapien
gttaacactaaccatctctaggtag

SEQ ID NO: 712717 - DNA, 25 bp, Homo sapien
catctctaggtagcagccatcaggc

SEQ ID NO: 712718 - DNA, 25 bp, Homo sapien
gcactggctgacagggcgctttcct

SEQ ID NO: 712719 - DNA, 25 bp, Homo sapien
ctgacagggcgctttcctcagctgc

SEQ ID NO: 712720 - DNA, 25 bp, Homo sapien
taggtgccaccacactgttaacact

SEQ ID NO: 712721 - DNA, 25 bp, Homo sapien
cgctttgagccatatgccaatccaa

SEQ ID NO: 712722 - DNA, 25 bp, Homo sapien
tacagagccttcattacaaacatac

SEQ ID NO: 712723 - DNA, 25 bp, Homo sapien
tatgccaatccaactaaaagataca

SEQ ID NO: 712724 - DNA, 25 bp, Homo sapien
tgaaggagaacgacctgctcagaat

SEQ ID NO: 712725 - DNA, 25 bp, Homo sapien
aagaggaggcaatcgctttgagcca

SEQ ID NO: 712726 - DNA, 25 bp, Homo sapien
aaacataaaaagaggaggcaatcgc

SEQ ID NO: 712727 - DNA, 25 bp, Homo sapien
ttggattggcatatggctcaaagcg

SEQ ID NO: 712728 - DNA, 25 bp, Homo sapien
catatggctcaaagcgattgcctcc

SEQ ID NO: 712729 - DNA, 25 bp, Homo sapien
tcttttagttggattggcatatggc

SEQ ID NO: 712730 - DNA, 25 bp, Homo sapien
ggtatgtttgtaatgaaggctctgt

SEQ ID NO: 712731 - DNA, 25 bp, Homo sapien
attctgagcaggtcgttctccttca

SEQ ID NO: 712732 - DNA, 25 bp, Homo sapien
gcgattgcctcctctttttatgttt

SEQ ID NO: 712733 - DNA, 25 bp, Homo sapien
gcatgttctttccaggcttaagagt

SEQ ID NO: 712734 - DNA, 25 bp, Homo sapien
actcttaagcctggaaagaacatgc

SEQ ID NO: 712735 - DNA, 25 bp, Homo sapien
tttccaggcttaagagtgaagcccc

SEQ ID NO: 712736 - DNA, 25 bp, Homo sapien
tggtgtgtcatcttttctgtggcta

SEQ ID NO: 712737 - DNA, 25 bp, Homo sapien
aagcggctctgggtagagcatgttc

SEQ ID NO: 712738 - DNA, 25 bp, Homo sapien
gcatgttctttccaggcttaagagt

SEQ ID NO: 712739 - DNA, 25 bp, Homo sapien
tctgtggctaattccttggttattt

SEQ ID NO: 712740 - DNA, 25 bp, Homo sapien
tatttttggtcagtggaagcggctc

SEQ ID NO: 712741 - DNA, 25 bp, Homo sapien
tagccacagaaaagatgacacacca

SEQ ID NO: 712742 - DNA, 25 bp, Homo sapien
aaagaacatgctctacccagagccg

SEQ ID NO: 712743 - DNA, 25 bp, Homo sapien
gagccgcttccactgaccaaaaata

SEQ ID NO: 712744 - DNA, 25 bp, Homo sapien
gggcttcactcttaagcctggaaag

SEQ ID NO: 712745 - DNA, 25 bp, Homo sapien
actcttaagcctggaaagaacatgc

SEQ ID NO: 712746 - DNA, 25 bp, Homo sapien
aaataaccaaggaattagccacaga

SEQ ID NO: 712747 - DNA, 25 bp, Homo sapien
gtggtcatacccctgtgtgtcaaac

SEQ ID NO: 712748 - DNA, 25 bp, Homo sapien
ggtcatacccctgtgtgtcaaacag

SEQ ID NO: 712749 - DNA, 25 bp, Homo sapien
tggtcatacccctgtgtgtcaaaca

SEQ ID NO: 712750 - DNA, 25 bp, Homo sapien
ctgtttgacacacaggggtatgacc

SEQ ID NO: 712751 - DNA, 25 bp, Homo sapien
gtttgacacacaggggtatgaccac

SEQ ID NO: 712752 - DNA, 25 bp, Homo sapien
tgtttgacacacaggggtatgacca

SEQ ID NO: 712753 - DNA, 25 bp, Homo sapien
gatggtttgtatggtcctttggcct

SEQ ID NO: 712754 - DNA, 25 bp, Homo sapien
atggtttgtatggtcctttggccta

SEQ ID NO: 712755 - DNA, 25 bp, Homo sapien
tggtttgtatggtcctttggcctac

SEQ ID NO: 712756 - DNA, 25 bp, Homo sapien
gtttgtatggtcctttggcctacag

SEQ ID NO: 712757 - DNA, 25 bp, Homo sapien
ggtttgtatggtcctttggcctaca

SEQ ID NO: 712758 - DNA, 25 bp, Homo sapien
gtaggccaaaggaccatacaaacca

SEQ ID NO: 712759 - DNA, 25 bp, Homo sapien
aggccaaaggaccatacaaaccatc

SEQ ID NO: 712760 - DNA, 25 bp, Homo sapien
tgtaggccaaaggaccatacaaacc

SEQ ID NO: 712761 - DNA, 25 bp, Homo sapien
taggccaaaggaccatacaaaccat

SEQ ID NO: 712762 - DNA, 25 bp, Homo sapien
ctgtaggccaaaggaccatacaaac

SEQ ID NO: 712763 - DNA, 25 bp, Homo sapien
ataaggcttcgattaggcttccggg

SEQ ID NO: 712764 - DNA, 25 bp, Homo sapien
cttcgattaggcttccggggagcct

SEQ ID NO: 712765 - DNA, 25 bp, Homo sapien
taataaggcttcgattaggcttccg

SEQ ID NO: 712766 - DNA, 25 bp, Homo sapien
gattttactggcttagtatggttaa

SEQ ID NO: 712767 - DNA, 25 bp, Homo sapien
actggcttagtatggttaataaggc

SEQ ID NO: 712768 - DNA, 25 bp, Homo sapien
gcttagtatggttaataaggcttcg

SEQ ID NO: 712769 - DNA, 25 bp, Homo sapien
aggctccccggaagcctaatcgaag

SEQ ID NO: 712770 - DNA, 25 bp, Homo sapien
taaccatactaagccagtaaaatca

SEQ ID NO: 712771 - DNA, 25 bp, Homo sapien
cccggaagcctaatcgaagccttat

SEQ ID NO: 712772 - DNA, 25 bp, Homo sapien
tcgaagccttattaaccatactaag

SEQ ID NO: 712773 - DNA, 25 bp, Homo sapien
gccttattaaccatactaagccagt

SEQ ID NO: 712774 - DNA, 25 bp, Homo sapien
ggaagcctaatcgaagccttattaa

SEQ ID NO: 712775 - DNA, 25 bp, Homo sapien
taacgcggtgccttaggatgtggat

SEQ ID NO: 712776 - DNA, 25 bp, Homo sapien
tgaattttgcacgttaggtgggaga

SEQ ID NO: 712777 - DNA, 25 bp, Homo sapien
ctgggaaaaaatagagtagactggc

SEQ ID NO: 712778 - DNA, 25 bp, Homo sapien
gtagctggaccttatgcttctcaga

SEQ ID NO: 712779 - DNA, 25 bp, Homo sapien
tgggatcaaaatgtggtagctggac

SEQ ID NO: 712780 - DNA, 25 bp, Homo sapien
taaggtatctgctttgtaacgcggt

SEQ ID NO: 712781 - DNA, 25 bp, Homo sapien
aaaaatctctcccacctaacgtgca

SEQ ID NO: 712782 - DNA, 25 bp, Homo sapien
gtccagctaccacattttgatccca

SEQ ID NO: 712783 - DNA, 25 bp, Homo sapien
aaagcagataccttattttgagctc

SEQ ID NO: 712784 - DNA, 25 bp, Homo sapien
ctaaggcaccgcgttacaaagcaga

SEQ ID NO: 712785 - DNA, 25 bp, Homo sapien
gccagtctactctattttttcccag

SEQ ID NO: 712786 - DNA, 25 bp, Homo sapien
tctgagaagcataaggtccagctac

SEQ ID NO: 712787 - DNA, 25 bp, Homo sapien
tgtacagtacagttgggcctcattc

SEQ ID NO: 712788 - DNA, 25 bp, Homo sapien
catactgctacgaatgcctgggctc

SEQ ID NO: 712789 - DNA, 25 bp, Homo sapien
ccaatgctcctagggcaagagtgca

SEQ ID NO: 712790 - DNA, 25 bp, Homo sapien
gccccgtggataggccattttggta

SEQ ID NO: 712791 - DNA, 25 bp, Homo sapien
gatgtgcctgccttgatcagccaaa

SEQ ID NO: 712792 - DNA, 25 bp, Homo sapien
gactaaagagactgctcagccctgg

SEQ ID NO: 712793 - DNA, 25 bp, Homo sapien
ttagtcctaagtgccaccagcaggg

SEQ ID NO: 712794 - DNA, 25 bp, Homo sapien
gatttggctgatcaaggcaggcaca

SEQ ID NO: 712795 - DNA, 25 bp, Homo sapien
cggtgttgtctaacccagggctgag

SEQ ID NO: 712796 - DNA, 25 bp, Homo sapien
gaatgaggcccaactgtactgtaca

SEQ ID NO: 712797 - DNA, 25 bp, Homo sapien
gagcccaggcattcgtagcagtatg

SEQ ID NO: 712798 - DNA, 25 bp, Homo sapien
caaaatccaatgcagggagcaccag

SEQ ID NO: 712799 - DNA, 25 bp, Homo sapien
gaactggcagatagaggcacttaca

SEQ ID NO: 712800 - DNA, 25 bp, Homo sapien
cctaagcactctttatcagtctgtg

SEQ ID NO: 712801 - DNA, 25 bp, Homo sapien
tgatgaatcttagccttgtttcagg

SEQ ID NO: 712802 - DNA, 25 bp, Homo sapien
cagagatctgggctgttgtaaccta

SEQ ID NO: 712803 - DNA, 25 bp, Homo sapien
tctgtgttttaaggtctgatgaatc

SEQ ID NO: 712804 - DNA, 25 bp, Homo sapien
tctgggctgttgtaacctaagcact

SEQ ID NO: 712805 - DNA, 25 bp, Homo sapien
tcaaaacacttaaaacttatgcgca

SEQ ID NO: 712806 - DNA, 25 bp, Homo sapien
taggttacaacagcccagatctctg

SEQ ID NO: 712807 - DNA, 25 bp, Homo sapien
tgtaagtgcctctatctgccagttc

SEQ ID NO: 712808 - DNA, 25 bp, Homo sapien
cacagactgataaagagtgcttagg

SEQ ID NO: 712809 - DNA, 25 bp, Homo sapien
gattcatcagaccttaaaacacaga

SEQ ID NO: 712810 - DNA, 25 bp, Homo sapien
gaaacaaggctaagattcatcagac

SEQ ID NO: 712811 - DNA, 25 bp, Homo sapien
cgcccaatagagtggcagcctgaga

SEQ ID NO: 712812 - DNA, 25 bp, Homo sapien
cagcctgagaattgaccgttatgag

SEQ ID NO: 712813 - DNA, 25 bp, Homo sapien
gaatacttaggttgagccccagcag

SEQ ID NO: 712814 - DNA, 25 bp, Homo sapien
taacatgtccataagccaagtaggt

SEQ ID NO: 712815 - DNA, 25 bp, Homo sapien
tagaaaggcctgttatgctaaagcg

SEQ ID NO: 712816 - DNA, 25 bp, Homo sapien
caattgaggagcgtgggctcagtca

SEQ ID NO: 712817 - DNA, 25 bp, Homo sapien
tacacacctacttggcttatggaca

SEQ ID NO: 712818 - DNA, 25 bp, Homo sapien
tcaggctgccactctattgggcgag

SEQ ID NO: 712819 - DNA, 25 bp, Homo sapien
tgcgtggcaataacagaacgttact

SEQ ID NO: 712820 - DNA, 25 bp, Homo sapien
ctcataacggtcaattctcaggctg

SEQ ID NO: 712821 - DNA, 25 bp, Homo sapien
tatgaacgctttagcataacaggcc

SEQ ID NO: 712822 - DNA, 25 bp, Homo sapien
gggctcaacctaagtattcatacat

SEQ ID NO: 712823 - DNA, 25 bp, Homo sapien
cttgagcagtaaatgggaacacaaa

SEQ ID NO: 712824 - DNA, 25 bp, Homo sapien
caaaaacaaatactcatttggctaa

SEQ ID NO: 712825 - DNA, 25 bp, Homo sapien
ttgagcagtaaatgggaacacaaaa

SEQ ID NO: 712826 - DNA, 25 bp, Homo sapien
acttgagcagtaaatgggaacacaa

SEQ ID NO: 712827 - DNA, 25 bp, Homo sapien
gagcagtaaatgggaacacaaaaac

SEQ ID NO: 712828 - DNA, 25 bp, Homo sapien
tgagcagtaaatgggaacacaaaaa

SEQ ID NO: 712829 - DNA, 25 bp, Homo sapien
tttgtgttcccatttactgctcaag

SEQ ID NO: 712830 - DNA, 25 bp, Homo sapien
ttttgtgttcccatttactgctcaa

SEQ ID NO: 712831 - DNA, 25 bp, Homo sapien
gtttttgtgttcccatttactgctc

SEQ ID NO: 712832 - DNA, 25 bp, Homo sapien
ttgtgttcccatttactgctcaagt

SEQ ID NO: 712833 - DNA, 25 bp, Homo sapien
tttttgtgttcccatttactgctca

SEQ ID NO: 712834 - DNA, 25 bp, Homo sapien
ttagccaaatgagtatttgtttttg

SEQ ID NO: 712835 - DNA, 25 bp, Homo sapien
tcagtttgccccacaggagtacata

SEQ ID NO: 712836 - DNA, 25 bp, Homo sapien
caactgggacttgaatttcggcaac

SEQ ID NO: 712837 - DNA, 25 bp, Homo sapien
tagtcatagctggtaggaaatcaac

SEQ ID NO: 712838 - DNA, 25 bp, Homo sapien
taaagccgctttgtacaactgtccc

SEQ ID NO: 712839 - DNA, 25 bp, Homo sapien
tcagggcggctgcatttttggaact

SEQ ID NO: 712840 - DNA, 25 bp, Homo sapien
tggtttctgggttgcaattacagct

SEQ ID NO: 712841 - DNA, 25 bp, Homo sapien
gactgctaaatgatgataccacttg

SEQ ID NO: 712842 - DNA, 25 bp, Homo sapien
gatctcagggacagcactactcatg

SEQ ID NO: 712843 - DNA, 25 bp, Homo sapien
gaggatgggcattactgatgatctc

SEQ ID NO: 712844 - DNA, 25 bp, Homo sapien
tctctcagggtagaggttggaattt

SEQ ID NO: 712845 - DNA, 25 bp, Homo sapien
tttctagactagactgttacgtgga

SEQ ID NO: 712846 - DNA, 25 bp, Homo sapien
tacaaaggattgagtcaggtgtgct

SEQ ID NO: 712847 - DNA, 25 bp, Homo sapien
tctagtctagaaatagcacacctga

SEQ ID NO: 712848 - DNA, 25 bp, Homo sapien
gcacacctgactcaatcctttgtat

SEQ ID NO: 712849 - DNA, 25 bp, Homo sapien
gatcatcagtaatgcccatcctcct

SEQ ID NO: 712850 - DNA, 25 bp, Homo sapien
catgagtagtgctgtccctgagatc

SEQ ID NO: 712851 - DNA, 25 bp, Homo sapien
taaaattccaacctctaccctgaga

SEQ ID NO: 712852 - DNA, 25 bp, Homo sapien
caagtggtatcatcatttagcagtc

SEQ ID NO: 712853 - DNA, 25 bp, Homo sapien
caagggacagttgtacaaagcggct

SEQ ID NO: 712854 - DNA, 25 bp, Homo sapien
gtaattgcaacccagaaaccaagca

SEQ ID NO: 712855 - DNA, 25 bp, Homo sapien
tgaagaggccccaagttgatttcct

SEQ ID NO: 712856 - DNA, 25 bp, Homo sapien
agttccaaaaatgcagccgccctga

SEQ ID NO: 712857 - DNA, 25 bp, Homo sapien
gatttcctaccagctatgactacca

SEQ ID NO: 712858 - DNA, 25 bp, Homo sapien
gttgccgaaattcaagtcccagttg

SEQ ID NO: 712859 - DNA, 25 bp, Homo sapien
catgacttgttgaggccgttaagcg

SEQ ID NO: 712860 - DNA, 25 bp, Homo sapien
tcactgaagagaatccagatgctgc

SEQ ID NO: 712861 - DNA, 25 bp, Homo sapien
tgtgcaggaccagctatagaatttg

SEQ ID NO: 712862 - DNA, 25 bp, Homo sapien
gaagcctggcctaattcactgaaga

SEQ ID NO: 712863 - DNA, 25 bp, Homo sapien
catggtggtcatgaattggcaatcc

SEQ ID NO: 712864 - DNA, 25 bp, Homo sapien
tgctaaaccaaaccgatccagagga

SEQ ID NO: 712865 - DNA, 25 bp, Homo sapien
caaattctatagctggtcctgcaca

SEQ ID NO: 712866 - DNA, 25 bp, Homo sapien
ggattgccaattcatgaccaccatg

SEQ ID NO: 712867 - DNA, 25 bp, Homo sapien
tatctctaaccagactctccaaagg

SEQ ID NO: 712868 - DNA, 25 bp, Homo sapien
caccatgaccagatgttagaatcca

SEQ ID NO: 712869 - DNA, 25 bp, Homo sapien
gcttaacggcctcaacaagtcatgc

SEQ ID NO: 712870 - DNA, 25 bp, Homo sapien
tcttcagtgaattaggccaggcttc

SEQ ID NO: 712871 - DNA, 25 bp, Homo sapien
gtggagctcttaatggacgctgaag

SEQ ID NO: 712872 - DNA, 25 bp, Homo sapien
cgtggagctcttaatggacgctgaa

SEQ ID NO: 712873 - DNA, 25 bp, Homo sapien
tggagctcttaatggacgctgaagg

SEQ ID NO: 712874 - DNA, 25 bp, Homo sapien
ttcagcgtccattaagagctccacg

SEQ ID NO: 712875 - DNA, 25 bp, Homo sapien
cttcagcgtccattaagagctccac

SEQ ID NO: 712876 - DNA, 25 bp, Homo sapien
ccttcagcgtccattaagagctcca

SEQ ID NO: 712877 - DNA, 25 bp, Homo sapien
cgtggagctcttaatggacgctgaa

SEQ ID NO: 712878 - DNA, 25 bp, Homo sapien
tcttaatggacgctgaaggaaagtc

SEQ ID NO: 712879 - DNA, 25 bp, Homo sapien
tggtgaggtaacatacgtggagctc

SEQ ID NO: 712880 - DNA, 25 bp, Homo sapien
tggagctcttaatggacgctgaagg

SEQ ID NO: 712881 - DNA, 25 bp, Homo sapien
gagctcttaatggacgctgaaggaa

SEQ ID NO: 712882 - DNA, 25 bp, Homo sapien
aatggacgctgaaggaaagtcaagg

SEQ ID NO: 712883 - DNA, 25 bp, Homo sapien
tttccttcagcgtccattaagagct

SEQ ID NO: 712884 - DNA, 25 bp, Homo sapien
ttcagcgtccattaagagctccacg

SEQ ID NO: 712885 - DNA, 25 bp, Homo sapien
ccttgactttccttcagcgtccatt

SEQ ID NO: 712886 - DNA, 25 bp, Homo sapien
ccttcagcgtccattaagagctcca

SEQ ID NO: 712887 - DNA, 25 bp, Homo sapien
gagctccacgtatgttacctcacca

SEQ ID NO: 712888 - DNA, 25 bp, Homo sapien
gactttccttcagcgtccattaaga

SEQ ID NO: 712889 - DNA, 25 bp, Homo sapien
ttttctgtcgtgcaatagaatggct

SEQ ID NO: 712890 - DNA, 25 bp, Homo sapien
tatgcatggaattttagcggtggta

SEQ ID NO: 712891 - DNA, 25 bp, Homo sapien
tggatgcccaatttggataactggg

SEQ ID NO: 712892 - DNA, 25 bp, Homo sapien
aaagttgtgtgaaccaaagattccg

SEQ ID NO: 712893 - DNA, 25 bp, Homo sapien
tcaaaattggcctagtttaaagaga

SEQ ID NO: 712894 - DNA, 25 bp, Homo sapien
aaggatgagcttaacttacggaagg

SEQ ID NO: 712895 - DNA, 25 bp, Homo sapien
ttctagacaagaacacacgttttac

SEQ ID NO: 712896 - DNA, 25 bp, Homo sapien
tataccaccgctaaaattccatgca

SEQ ID NO: 712897 - DNA, 25 bp, Homo sapien
cccttccgtaagttaagctcatcct

SEQ ID NO: 712898 - DNA, 25 bp, Homo sapien
tcggaatctttggttcacacaactt

SEQ ID NO: 712899 - DNA, 25 bp, Homo sapien
ggtccccagttatccaaattgggca

SEQ ID NO: 712900 - DNA, 25 bp, Homo sapien
tcagcaaacaaccaagagtaacatt

SEQ ID NO: 712901 - DNA, 25 bp, Homo sapien
tacagagggaagcagatctaaagtt

SEQ ID NO: 712902 - DNA, 25 bp, Homo sapien
gcccagcttttaacaaggaaggcga

SEQ ID NO: 712903 - DNA, 25 bp, Homo sapien
aaggcgaggcgaggcacttctgtca

SEQ ID NO: 712904 - DNA, 25 bp, Homo sapien
gcaatgctggtaacgcgtaggagaa

SEQ ID NO: 712905 - DNA, 25 bp, Homo sapien
aatgtcagcagctctagtgcaatgc

SEQ ID NO: 712906 - DNA, 25 bp, Homo sapien
gaaggagatattaaggagcccagct

SEQ ID NO: 712907 - DNA, 25 bp, Homo sapien
gaaatcacaccaactttagatctgc

SEQ ID NO: 712908 - DNA, 25 bp, Homo sapien
tctcctacgcgttaccagcattgca

SEQ ID NO: 712909 - DNA, 25 bp, Homo sapien
aattcagggtctccaagaaatcaca

SEQ ID NO: 712910 - DNA, 25 bp, Homo sapien
agctgggctccttaatatctccttc

SEQ ID NO: 712911 - DNA, 25 bp, Homo sapien
tcgccttccttgttaaaagctgggc

SEQ ID NO: 712912 - DNA, 25 bp, Homo sapien
gcattgcactagagctgctgacatt

SEQ ID NO: 712913 - DNA, 25 bp, Homo sapien
ctagttacttattggtatttgagcc

SEQ ID NO: 712914 - DNA, 25 bp, Homo sapien
agccttctaacttgtaggactggtt

SEQ ID NO: 712915 - DNA, 25 bp, Homo sapien
taagtatcgtctagttacttattgg

SEQ ID NO: 712916 - DNA, 25 bp, Homo sapien
gactggtttcactcgactcgtttcc

SEQ ID NO: 712917 - DNA, 25 bp, Homo sapien
cactcgactcgtttccttttgactc

SEQ ID NO: 712918 - DNA, 25 bp, Homo sapien
tgtaggactggtttcactcgactcg

SEQ ID NO: 712919 - DNA, 25 bp, Homo sapien
taccaataagtaactagacgatact

SEQ ID NO: 712920 - DNA, 25 bp, Homo sapien
ggctcaaataccaataagtaactag

SEQ ID NO: 712921 - DNA, 25 bp, Homo sapien
gagtcaaaaggaaacgagtcgagtg

SEQ ID NO: 712922 - DNA, 25 bp, Homo sapien
aaccagtcctacaagttagaaggct

SEQ ID NO: 712923 - DNA, 25 bp, Homo sapien
gagtcgagtgaaaccagtcctacaa

SEQ ID NO: 712924 - DNA, 25 bp, Homo sapien
gaaacgagtcgagtgaaaccagtcc

SEQ ID NO: 712925 - DNA, 25 bp, Homo sapien
gcggaagtcctaaacaagcatagtc

SEQ ID NO: 712926 - DNA, 25 bp, Homo sapien
ggaagtcctaaacaagcatagtctg

SEQ ID NO: 712927 - DNA, 25 bp, Homo sapien
cggaagtcctaaacaagcatagtct

SEQ ID NO: 712928 - DNA, 25 bp, Homo sapien
tgcggaagtcctaaacaagcatagt

SEQ ID NO: 712929 - DNA, 25 bp, Homo sapien
gctgcggaagtcctaaacaagcata

SEQ ID NO: 712930 - DNA, 25 bp, Homo sapien
gaagtcctaaacaagcatagtctga

SEQ ID NO: 712931 - DNA, 25 bp, Homo sapien
gactatgcttgtttaggacttccgc

SEQ ID NO: 712932 - DNA, 25 bp, Homo sapien
tatgcttgtttaggacttccgcagc

SEQ ID NO: 712933 - DNA, 25 bp, Homo sapien
ctatgcttgtttaggacttccgcag

SEQ ID NO: 712934 - DNA, 25 bp, Homo sapien
tcagactatgcttgtttaggacttc

SEQ ID NO: 712935 - DNA, 25 bp, Homo sapien
agactatgcttgtttaggacttccg

SEQ ID NO: 712936 - DNA, 25 bp, Homo sapien
cagactatgcttgtttaggacttcc

SEQ ID NO: 712937 - DNA, 25 bp, Homo sapien
gagtgtcggtcatagcctacagcag

SEQ ID NO: 712938 - DNA, 25 bp, Homo sapien
gtcccagacggcatttacaaagcaa

SEQ ID NO: 712939 - DNA, 25 bp, Homo sapien
taagctcttgcttaacactgcggat

SEQ ID NO: 712940 - DNA, 25 bp, Homo sapien
ggaaagacggtcatggtcccagacg

SEQ ID NO: 712941 - DNA, 25 bp, Homo sapien
agatgttgttttactgcgcagccct

SEQ ID NO: 712942 - DNA, 25 bp, Homo sapien
gagcccgtgggtttgtgccattaag

SEQ ID NO: 712943 - DNA, 25 bp, Homo sapien
tcttcattagaaacaacaggctggc

SEQ ID NO: 712944 - DNA, 25 bp, Homo sapien
tgctgtaggctatgaccgacactct

SEQ ID NO: 712945 - DNA, 25 bp, Homo sapien
taacttctgcaaaccccgtcaatgg

SEQ ID NO: 712946 - DNA, 25 bp, Homo sapien
gatataatgtagaaccgccagactg

SEQ ID NO: 712947 - DNA, 25 bp, Homo sapien
taaatgccgtctgggaccatgaccg

SEQ ID NO: 712948 - DNA, 25 bp, Homo sapien
ttaatggcacaaacccacgggctca

SEQ ID NO: 712949 - DNA, 25 bp, Homo sapien
cccagtatcctaaataatcccaaca

SEQ ID NO: 712950 - DNA, 25 bp, Homo sapien
cacccagtatcctaaataatcccaa

SEQ ID NO: 712951 - DNA, 25 bp, Homo sapien
tacgactggtgggatgggtatggga

SEQ ID NO: 712952 - DNA, 25 bp, Homo sapien
acgactggtgggatgggtatgggac

SEQ ID NO: 712953 - DNA, 25 bp, Homo sapien
ccagtatcctaaataatcccaacat

SEQ ID NO: 712954 - DNA, 25 bp, Homo sapien
cagtatcctaaataatcccaacatc

SEQ ID NO: 712955 - DNA, 25 bp, Homo sapien
ttgggattatttaggatactgggtg

SEQ ID NO: 712956 - DNA, 25 bp, Homo sapien
gtcccatacccatcccaccagtcgt

SEQ ID NO: 712957 - DNA, 25 bp, Homo sapien
atgttgggattatttaggatactgg

SEQ ID NO: 712958 - DNA, 25 bp, Homo sapien
tgttgggattatttaggatactggg

SEQ ID NO: 712959 - DNA, 25 bp, Homo sapien
gatgttgggattatttaggatactg

SEQ ID NO: 712960 - DNA, 25 bp, Homo sapien
tcccatacccatcccaccagtcgta

SEQ ID NO: 712961 - DNA, 25 bp, Homo sapien
cacccagtatcctaaataatcccaa

SEQ ID NO: 712962 - DNA, 25 bp, Homo sapien
catcccaaatgagattatccatgca

SEQ ID NO: 712963 - DNA, 25 bp, Homo sapien
acgactggtgggatgggtatgggac

SEQ ID NO: 712964 - DNA, 25 bp, Homo sapien
ccaggtggcccaggaatgattacta

SEQ ID NO: 712965 - DNA, 25 bp, Homo sapien
aaataatcccaacatcccaaatgag

SEQ ID NO: 712966 - DNA, 25 bp, Homo sapien
ggaatgattactatcccacccagta

SEQ ID NO: 712967 - DNA, 25 bp, Homo sapien
ttgggattatttaggatactgggtg

SEQ ID NO: 712968 - DNA, 25 bp, Homo sapien
tactgggtgggatagtaatcattcc

SEQ ID NO: 712969 - DNA, 25 bp, Homo sapien
tagtaatcattcctgggccacctgg

SEQ ID NO: 712970 - DNA, 25 bp, Homo sapien
taatgcatggataatctcatttggg

SEQ ID NO: 712971 - DNA, 25 bp, Homo sapien
gatgttgggattatttaggatactg

SEQ ID NO: 712972 - DNA, 25 bp, Homo sapien
gataatctcatttgggatgttggga

SEQ ID NO: 712973 - DNA, 25 bp, Homo sapien
cttggaagcacagtatttgtagcaa

SEQ ID NO: 712974 - DNA, 25 bp, Homo sapien
gacttggaagcacagtatttgtagc

SEQ ID NO: 712975 - DNA, 25 bp, Homo sapien
gctggaagacttggaagcacagtat

SEQ ID NO: 712976 - DNA, 25 bp, Homo sapien
aagacttggaagcacagtatttgta

SEQ ID NO: 712977 - DNA, 25 bp, Homo sapien
acttggaagcacagtatttgtagca

SEQ ID NO: 712978 - DNA, 25 bp, Homo sapien
tggaagcacagtatttgtagcaaat

SEQ ID NO: 712979 - DNA, 25 bp, Homo sapien
atactgtgcttccaagtcttccagc

SEQ ID NO: 712980 - DNA, 25 bp, Homo sapien
atttgctacaaatactgtgcttcca

SEQ ID NO: 712981 - DNA, 25 bp, Homo sapien
tgctacaaatactgtgcttccaagt

SEQ ID NO: 712982 - DNA, 25 bp, Homo sapien
ttgctacaaatactgtgcttccaag

SEQ ID NO: 712983 - DNA, 25 bp, Homo sapien
gctacaaatactgtgcttccaagtc

SEQ ID NO: 712984 - DNA, 25 bp, Homo sapien
tacaaatactgtgcttccaagtctt

SEQ ID NO: 712985 - DNA, 25 bp, Homo sapien
taagtcacaggcttgaccgtggtct

SEQ ID NO: 712986 - DNA, 25 bp, Homo sapien
tttccgcaagcagtaaccgagtctg

SEQ ID NO: 712987 - DNA, 25 bp, Homo sapien
gactgtacgagcagaagtgcactga

SEQ ID NO: 712988 - DNA, 25 bp, Homo sapien
tataggcgggctttgtctgcattcc

SEQ ID NO: 712989 - DNA, 25 bp, Homo sapien
tgagtttcgcaggtgtttccgcaag

SEQ ID NO: 712990 - DNA, 25 bp, Homo sapien
ttaaaaatcagccttataggcgggc

SEQ ID NO: 712991 - DNA, 25 bp, Homo sapien
tatttccccttgcagatggtggagg

SEQ ID NO: 712992 - DNA, 25 bp, Homo sapien
ttaggaatgcagacaaagcccgcct

SEQ ID NO: 712993 - DNA, 25 bp, Homo sapien
ttgcggaaacacctgcgaaactcag

SEQ ID NO: 712994 - DNA, 25 bp, Homo sapien
aacgagaccacggtcaagcctgtga

SEQ ID NO: 712995 - DNA, 25 bp, Homo sapien
gaggtattatcattcaccccagaca

SEQ ID NO: 712996 - DNA, 25 bp, Homo sapien
cagactcggttactgcttgcggaaa

SEQ ID NO: 712997 - DNA, 25 bp, Homo sapien
aagtatttagtatggctggtgtggt

SEQ ID NO: 712998 - DNA, 25 bp, Homo sapien
ctgaaggaagtatttagtatggctg

SEQ ID NO: 712999 - DNA, 25 bp, Homo sapien
ggtccgagcagacattcttgaagat

SEQ ID NO: 713000 - DNA, 25 bp, Homo sapien
tggtccgagcagacattcttgaaga

SEQ ID NO: 713001 - DNA, 25 bp, Homo sapien
tccgagcagacattcttgaagataa

SEQ ID NO: 713002 - DNA, 25 bp, Homo sapien
gaaggaagtatttagtatggctggt

SEQ ID NO: 713003 - DNA, 25 bp, Homo sapien
ttatcttcaagaatgtctgctcgga

SEQ ID NO: 713004 - DNA, 25 bp, Homo sapien
tcttcaagaatgtctgctcggacca

SEQ ID NO: 713005 - DNA, 25 bp, Homo sapien
tatcttcaagaatgtctgctcggac

SEQ ID NO: 713006 - DNA, 25 bp, Homo sapien
caccagccatactaaatacttcctt

SEQ ID NO: 713007 - DNA, 25 bp, Homo sapien
accacaccagccatactaaatactt

SEQ ID NO: 713008 - DNA, 25 bp, Homo sapien
cagccatactaaatacttccttcag

SEQ ID NO: 713009 - DNA, 25 bp, Homo sapien
gtcgtggaataggcactgttacttt

SEQ ID NO: 713010 - DNA, 25 bp, Homo sapien
tcgtggaataggcactgttactttt

SEQ ID NO: 713011 - DNA, 25 bp, Homo sapien
ggcactgttacttttgaacagtcca

SEQ ID NO: 713012 - DNA, 25 bp, Homo sapien
tggactgttcaaaagtaacagtgcc

SEQ ID NO: 713013 - DNA, 25 bp, Homo sapien
aaagtaacagtgcctattccacgac

SEQ ID NO: 713014 - DNA, 25 bp, Homo sapien
aaaagtaacagtgcctattccacga

SEQ ID NO: 713015 - DNA, 25 bp, Homo sapien
ttacttttgaacagtccattgaagc

SEQ ID NO: 713016 - DNA, 25 bp, Homo sapien
tccattgaagctgtgcaagctatat

SEQ ID NO: 713017 - DNA, 25 bp, Homo sapien
gaataggcactgttacttttgaaca

SEQ ID NO: 713018 - DNA, 25 bp, Homo sapien
aacagtccattgaagctgtgcaagc

SEQ ID NO: 713019 - DNA, 25 bp, Homo sapien
tcgtggaataggcactgttactttt

SEQ ID NO: 713020 - DNA, 25 bp, Homo sapien
tttgaacagtccattgaagctgtgc

SEQ ID NO: 713021 - DNA, 25 bp, Homo sapien
tgcacagcttcaatggactgttcaa

SEQ ID NO: 713022 - DNA, 25 bp, Homo sapien
gttcaaaagtaacagtgcctattcc

SEQ ID NO: 713023 - DNA, 25 bp, Homo sapien
tatagcttgcacagcttcaatggac

SEQ ID NO: 713024 - DNA, 25 bp, Homo sapien
gactgttcaaaagtaacagtgccta

SEQ ID NO: 713025 - DNA, 25 bp, Homo sapien
aaaagtaacagtgcctattccacga

SEQ ID NO: 713026 - DNA, 25 bp, Homo sapien
gcttcaatggactgttcaaaagtaa

SEQ ID NO: 713027 - DNA, 25 bp, Homo sapien
gtatccttctgcaggaattcaactt

SEQ ID NO: 713028 - DNA, 25 bp, Homo sapien
tccttctgcaggaattcaacttatg

SEQ ID NO: 713029 - DNA, 25 bp, Homo sapien
tatccttctgcaggaattcaactta

SEQ ID NO: 713030 - DNA, 25 bp, Homo sapien
ccttctgcaggaattcaacttatga

SEQ ID NO: 713031 - DNA, 25 bp, Homo sapien
atccttctgcaggaattcaacttat

SEQ ID NO: 713032 - DNA, 25 bp, Homo sapien
aagttgaattcctgcagaaggatac

SEQ ID NO: 713033 - DNA, 25 bp, Homo sapien
cataagttgaattcctgcagaagga

SEQ ID NO: 713034 - DNA, 25 bp, Homo sapien
tcataagttgaattcctgcagaagg

SEQ ID NO: 713035 - DNA, 25 bp, Homo sapien
taagttgaattcctgcagaaggata

SEQ ID NO: 713036 - DNA, 25 bp, Homo sapien
ataagttgaattcctgcagaaggat

SEQ ID NO: 713037 - DNA, 25 bp, Homo sapien
tgacctaaattgctgtgttagtaat

SEQ ID NO: 713038 - DNA, 25 bp, Homo sapien
catgttttttatgtgactaggggga

SEQ ID NO: 713039 - DNA, 25 bp, Homo sapien
actgtggaattaagaggttctctgg

SEQ ID NO: 713040 - DNA, 25 bp, Homo sapien
tgtgttagtaatgtaggtttgtgtg

SEQ ID NO: 713041 - DNA, 25 bp, Homo sapien
tctctgggccggaccggtcacggtg

SEQ ID NO: 713042 - DNA, 25 bp, Homo sapien
gcattactgtggaattaagaggttc

SEQ ID NO: 713043 - DNA, 25 bp, Homo sapien
caccgtgaccggtccggcccagaga

SEQ ID NO: 713044 - DNA, 25 bp, Homo sapien
ttactaacacagcaatttaggtcaa

SEQ ID NO: 713045 - DNA, 25 bp, Homo sapien
gaacctcttaattccacagtaatgc

SEQ ID NO: 713046 - DNA, 25 bp, Homo sapien
cacacaaacctacattactaacaca

SEQ ID NO: 713047 - DNA, 25 bp, Homo sapien
ccagagaacctcttaattccacagt

SEQ ID NO: 713048 - DNA, 25 bp, Homo sapien
tccccctagtcacataaaaaacatg

SEQ ID NO: 713049 - DNA, 25 bp, Homo sapien
taaggttacgaatgaagcttcacac

SEQ ID NO: 713050 - DNA, 25 bp, Homo sapien
ccttgatgccactgcttaagaggat

SEQ ID NO: 713051 - DNA, 25 bp, Homo sapien
ataagcggaagttgtcttgtcctcc

SEQ ID NO: 713052 - DNA, 25 bp, Homo sapien
catggtccttcagtttagatagtgg

SEQ ID NO: 713053 - DNA, 25 bp, Homo sapien
tcatcacttagagggactggtagca

SEQ ID NO: 713054 - DNA, 25 bp, Homo sapien
tcacacctaaggaataagcggaagt

SEQ ID NO: 713055 - DNA, 25 bp, Homo sapien
aacttccgcttattccttaggtgtg

SEQ ID NO: 713056 - DNA, 25 bp, Homo sapien
tgctaccagtccctctaagtgatga

SEQ ID NO: 713057 - DNA, 25 bp, Homo sapien
cactatctaaactgaaggaccatgt

SEQ ID NO: 713058 - DNA, 25 bp, Homo sapien
taggtgtgaagcttcattcgtaacc

SEQ ID NO: 713059 - DNA, 25 bp, Homo sapien
tcctcttaagcagtggcatcaaggt

SEQ ID NO: 713060 - DNA, 25 bp, Homo sapien
ggaggacaagacaacttccgcttat

SEQ ID NO: 713061 - DNA, 25 bp, Homo sapien
caagaaatagccttaattgtaatac

SEQ ID NO: 713062 - DNA, 25 bp, Homo sapien
aattgcaagaaatagccttaattgt

SEQ ID NO: 713063 - DNA, 25 bp, Homo sapien
ttgcaagaaatagccttaattgtaa

SEQ ID NO: 713064 - DNA, 25 bp, Homo sapien
attgcaagaaatagccttaattgta

SEQ ID NO: 713065 - DNA, 25 bp, Homo sapien
gcaagaaatagccttaattgtaata

SEQ ID NO: 713066 - DNA, 25 bp, Homo sapien
gaaatagccttaattgtaataccag

SEQ ID NO: 713067 - DNA, 25 bp, Homo sapien
ctggtattacaattaaggctatttc

SEQ ID NO: 713068 - DNA, 25 bp, Homo sapien
tacaattaaggctatttcttgcaat

SEQ ID NO: 713069 - DNA, 25 bp, Homo sapien
tggtattacaattaaggctatttct

SEQ ID NO: 713070 - DNA, 25 bp, Homo sapien
tattacaattaaggctatttcttgc

SEQ ID NO: 713071 - DNA, 25 bp, Homo sapien
ttacaattaaggctatttcttgcaa

SEQ ID NO: 713072 - DNA, 25 bp, Homo sapien
gtattacaattaaggctatttcttg

SEQ ID NO: 713073 - DNA, 25 bp, Homo sapien
tgatagaccaatgcacgtcaagatg

SEQ ID NO: 713074 - DNA, 25 bp, Homo sapien
tatttgatagaccaatgcacgtcaa

SEQ ID NO: 713075 - DNA, 25 bp, Homo sapien
gctgctatttgatagaccaatgcac

SEQ ID NO: 713076 - DNA, 25 bp, Homo sapien
gctatttgatagaccaatgcacgtc

SEQ ID NO: 713077 - DNA, 25 bp, Homo sapien
tttgatagaccaatgcacgtcaaga

SEQ ID NO: 713078 - DNA, 25 bp, Homo sapien
tgctatttgatagaccaatgcacgt

SEQ ID NO: 713079 - DNA, 25 bp, Homo sapien
gacgtgcattggtctatcaaatagc

SEQ ID NO: 713080 - DNA, 25 bp, Homo sapien
catcttgacgtgcattggtctatca

SEQ ID NO: 713081 - DNA, 25 bp, Homo sapien
tgacgtgcattggtctatcaaatag

SEQ ID NO: 713082 - DNA, 25 bp, Homo sapien
cgtgcattggtctatcaaatagcag

SEQ ID NO: 713083 - DNA, 25 bp, Homo sapien
tcttgacgtgcattggtctatcaaa

SEQ ID NO: 713084 - DNA, 25 bp, Homo sapien
gtgcattggtctatcaaatagcagc

SEQ ID NO: 713085 - DNA, 25 bp, Homo sapien
ttaaatagggtgcagtatgttgagc

SEQ ID NO: 713086 - DNA, 25 bp, Homo sapien
taagagtgtacatatagccactatg

SEQ ID NO: 713087 - DNA, 25 bp, Homo sapien
tctctgtgatatactcaagtctagc

SEQ ID NO: 713088 - DNA, 25 bp, Homo sapien
gattagtctaagttaaatagggtgc

SEQ ID NO: 713089 - DNA, 25 bp, Homo sapien
cagtatgttgagcaaaattgtgaga

SEQ ID NO: 713090 - DNA, 25 bp, Homo sapien
aataacattttgctggtcaggcgtg

SEQ ID NO: 713091 - DNA, 25 bp, Homo sapien
tgctagacttgagtatatcacagag

SEQ ID NO: 713092 - DNA, 25 bp, Homo sapien
cacgcctgaccagcaaaatgttatt

SEQ ID NO: 713093 - DNA, 25 bp, Homo sapien
taacttagactaatccacaaatatt

SEQ ID NO: 713094 - DNA, 25 bp, Homo sapien
catactgcaccctatttaacttaga

SEQ ID NO: 713095 - DNA, 25 bp, Homo sapien
cacaattttgctcaacatactgcac

SEQ ID NO: 713096 - DNA, 25 bp, Homo sapien
catagtggctatatgtacactctta

SEQ ID NO: 713097 - DNA, 25 bp, Homo sapien
ctcctgagcgtccacaacaacttcc

SEQ ID NO: 713098 - DNA, 25 bp, Homo sapien
cctgagcgtccacaacaacttcccc

SEQ ID NO: 713099 - DNA, 25 bp, Homo sapien
tccctcctgagcgtccacaacaact

SEQ ID NO: 713100 - DNA, 25 bp, Homo sapien
cttccctcctgagcgtccacaacaa

SEQ ID NO: 713101 - DNA, 25 bp, Homo sapien
ttcttccctcctgagcgtccacaac

SEQ ID NO: 713102 - DNA, 25 bp, Homo sapien
tttcttccctcctgagcgtccacaa

SEQ ID NO: 713103 - DNA, 25 bp, Homo sapien
ttgttgtggacgctcaggagggaag

SEQ ID NO: 713104 - DNA, 25 bp, Homo sapien
ttgtggacgctcaggagggaagaaa

SEQ ID NO: 713105 - DNA, 25 bp, Homo sapien
gaagttgttgtggacgctcaggagg

SEQ ID NO: 713106 - DNA, 25 bp, Homo sapien
ggaagttgttgtggacgctcaggag

SEQ ID NO: 713107 - DNA, 25 bp, Homo sapien
agttgttgtggacgctcaggaggga

SEQ ID NO: 713108 - DNA, 25 bp, Homo sapien
gggaagttgttgtggacgctcagga

SEQ ID NO: 713109 - DNA, 25 bp, Homo sapien
tcctgagcgtccacaacaacttccc

SEQ ID NO: 713110 - DNA, 25 bp, Homo sapien
aaggagatttcttccctcctgagcg

SEQ ID NO: 713111 - DNA, 25 bp, Homo sapien
tgagagggccttaccaaaaggagat

SEQ ID NO: 713112 - DNA, 25 bp, Homo sapien
gatgagagggccttaccaaaaggag

SEQ ID NO: 713113 - DNA, 25 bp, Homo sapien
gagatttcttccctcctgagcgtcc

SEQ ID NO: 713114 - DNA, 25 bp, Homo sapien
tttcttccctcctgagcgtccacaa

SEQ ID NO: 713115 - DNA, 25 bp, Homo sapien
aagttgttgtggacgctcaggaggg

SEQ ID NO: 713116 - DNA, 25 bp, Homo sapien
ttgtggacgctcaggagggaagaaa

SEQ ID NO: 713117 - DNA, 25 bp, Homo sapien
tctccttttggtaaggccctctcat

SEQ ID NO: 713118 - DNA, 25 bp, Homo sapien
cgctcaggagggaagaaatctcctt

SEQ ID NO: 713119 - DNA, 25 bp, Homo sapien
atctccttttggtaaggccctctca

SEQ ID NO: 713120 - DNA, 25 bp, Homo sapien
gggaagttgttgtggacgctcagga

SEQ ID NO: 713121 - DNA, 25 bp, Homo sapien
tgcacagaaattcgcacgcagatgt

SEQ ID NO: 713122 - DNA, 25 bp, Homo sapien
tttcatctacaggaaatgctccgca

SEQ ID NO: 713123 - DNA, 25 bp, Homo sapien
tgtgggctagcagtgcacactagac

SEQ ID NO: 713124 - DNA, 25 bp, Homo sapien
ggttagccctcagttctcttggcca

SEQ ID NO: 713125 - DNA, 25 bp, Homo sapien
gatgaaagacacatgctgcagtgtg

SEQ ID NO: 713126 - DNA, 25 bp, Homo sapien
gatactggttagtcccatgtgggct

SEQ ID NO: 713127 - DNA, 25 bp, Homo sapien
tagtgtgcactgctagcccacatgg

SEQ ID NO: 713128 - DNA, 25 bp, Homo sapien
gcccacatgggactaaccagtatct

SEQ ID NO: 713129 - DNA, 25 bp, Homo sapien
acatctgcgtgcgaatttctgtgca

SEQ ID NO: 713130 - DNA, 25 bp, Homo sapien
aagaactggccaagagaactgaggg

SEQ ID NO: 713131 - DNA, 25 bp, Homo sapien
tgcggagcatttcctgtagatgaaa

SEQ ID NO: 713132 - DNA, 25 bp, Homo sapien
aactgagggctaacctggcacaggt

SEQ ID NO: 713133 - DNA, 25 bp, Homo sapien
ggttagtgaaacaaataggctctca

SEQ ID NO: 713134 - DNA, 25 bp, Homo sapien
gctctgtttccaagtgtgccgatgt

SEQ ID NO: 713135 - DNA, 25 bp, Homo sapien
taccccagatattgcaagtgtcagc

SEQ ID NO: 713136 - DNA, 25 bp, Homo sapien
gaaacatcctttgggctactaggga

SEQ ID NO: 713137 - DNA, 25 bp, Homo sapien
ccaaacgccggaacaaggctctgtt

SEQ ID NO: 713138 - DNA, 25 bp, Homo sapien
taagcctcagatggtggttacccca

SEQ ID NO: 713139 - DNA, 25 bp, Homo sapien
tcaacatcggcacacttggaaacag

SEQ ID NO: 713140 - DNA, 25 bp, Homo sapien
aaatgtgcccaatccctagtagccc

SEQ ID NO: 713141 - DNA, 25 bp, Homo sapien
ttgtttcactaacccatggactgag

SEQ ID NO: 713142 - DNA, 25 bp, Homo sapien
aacagagccttgttccggcgtttgg

SEQ ID NO: 713143 - DNA, 25 bp, Homo sapien
gggtaaccaccatctgaggcttaaa

SEQ ID NO: 713144 - DNA, 25 bp, Homo sapien
taaaaatcgtaacaagggcaggcgc

SEQ ID NO: 713145 - DNA, 25 bp, Homo sapien
ggaccaggagggcaacccattgatg

SEQ ID NO: 713146 - DNA, 25 bp, Homo sapien
catcggaatgggaaacataggtccc

SEQ ID NO: 713147 - DNA, 25 bp, Homo sapien
ccaggagggcaacccattgatgcca

SEQ ID NO: 713148 - DNA, 25 bp, Homo sapien
ggaatgggaaacataggtcccgcag

SEQ ID NO: 713149 - DNA, 25 bp, Homo sapien
gcaacccattgatgccaatcacctg

SEQ ID NO: 713150 - DNA, 25 bp, Homo sapien
gagggcaacccattgatgccaatca

SEQ ID NO: 713151 - DNA, 25 bp, Homo sapien
gatgccaatcacctgaataaaggca

SEQ ID NO: 713152 - DNA, 25 bp, Homo sapien
tgcctttattcaggtgattggcatc

SEQ ID NO: 713153 - DNA, 25 bp, Homo sapien
tcctggtcctaaccccatgccaata

SEQ ID NO: 713154 - DNA, 25 bp, Homo sapien
tgcgggacctatgtttcccattccg

SEQ ID NO: 713155 - DNA, 25 bp, Homo sapien
caggtgattggcatcaatgggttgc

SEQ ID NO: 713156 - DNA, 25 bp, Homo sapien
gggacctatgtttcccattccgatg

SEQ ID NO: 713157 - DNA, 25 bp, Homo sapien
gattggcatcaatgggttgccctcc

SEQ ID NO: 713158 - DNA, 25 bp, Homo sapien
catcaatgggttgccctcctggtcc

SEQ ID NO: 713159 - DNA, 25 bp, Homo sapien
tgagaatgacagtgcaccttgcttg

SEQ ID NO: 713160 - DNA, 25 bp, Homo sapien
gccagagagttgatcttgctcaagg

SEQ ID NO: 713161 - DNA, 25 bp, Homo sapien
gccctgaaaagtgtcttaccaagac

SEQ ID NO: 713162 - DNA, 25 bp, Homo sapien
acctgacaacaaccttctaagctga

SEQ ID NO: 713163 - DNA, 25 bp, Homo sapien
gtcagttactgacaggctgcaggtc

SEQ ID NO: 713164 - DNA, 25 bp, Homo sapien
ggtctcctgaccacgggaccatagc

SEQ ID NO: 713165 - DNA, 25 bp, Homo sapien
caagcaaggtgcactgtcattctca

SEQ ID NO: 713166 - DNA, 25 bp, Homo sapien
ccttgagcaagatcaactctctggc

SEQ ID NO: 713167 - DNA, 25 bp, Homo sapien
aatgcccctagctctctagcagcag

SEQ ID NO: 713168 - DNA, 25 bp, Homo sapien
tgctatggtcccgtggtcaggagac

SEQ ID NO: 713169 - DNA, 25 bp, Homo sapien
gacctgcagcctgtcagtaactgac

SEQ ID NO: 713170 - DNA, 25 bp, Homo sapien
tcagcttagaaggttgttgtcaggt

SEQ ID NO: 713171 - DNA, 25 bp, Homo sapien
gaaggcataggatttggaataaata

SEQ ID NO: 713172 - DNA, 25 bp, Homo sapien
tatttattccaaatcctatgccttc

SEQ ID NO: 713173 - DNA, 25 bp, Homo sapien
ggcataggatttggaataaataaaa

SEQ ID NO: 713174 - DNA, 25 bp, Homo sapien
gaatggaaggcataggatttggaat

SEQ ID NO: 713175 - DNA, 25 bp, Homo sapien
aatggaaggcataggatttggaata

SEQ ID NO: 713176 - DNA, 25 bp, Homo sapien
gaaggcataggatttggaataaata

SEQ ID NO: 713177 - DNA, 25 bp, Homo sapien
aatgggaatggaaggcataggattt

SEQ ID NO: 713178 - DNA, 25 bp, Homo sapien
aaggcataggatttggaataaataa

SEQ ID NO: 713179 - DNA, 25 bp, Homo sapien
tttatttattccaaatcctatgcct

SEQ ID NO: 713180 - DNA, 25 bp, Homo sapien
aaatcctatgccttccattcccatt

SEQ ID NO: 713181 - DNA, 25 bp, Homo sapien
tatttattccaaatcctatgccttc

SEQ ID NO: 713182 - DNA, 25 bp, Homo sapien
ttttatttattccaaatcctatgcc

SEQ ID NO: 713183 - DNA, 25 bp, Homo sapien
ttatttattccaaatcctatgcctt

SEQ ID NO: 713184 - DNA, 25 bp, Homo sapien
cattttatttattccaaatcctatg

SEQ ID NO: 713185 - DNA, 25 bp, Homo sapien
tggaaaacatgggtcgatttggatc

SEQ ID NO: 713186 - DNA, 25 bp, Homo sapien
gaaaacatgggtcgatttggatctg

SEQ ID NO: 713187 - DNA, 25 bp, Homo sapien
aacatgggtcgatttggatctggga

SEQ ID NO: 713188 - DNA, 25 bp, Homo sapien
ggtcgatttggatctgggatgaaca

SEQ ID NO: 713189 - DNA, 25 bp, Homo sapien
tcgatttggatctgggatgaacatg

SEQ ID NO: 713190 - DNA, 25 bp, Homo sapien
tttggatctgggatgaacatgggca

SEQ ID NO: 713191 - DNA, 25 bp, Homo sapien
cagatccaaatcgacccatgttttc

SEQ ID NO: 713192 - DNA, 25 bp, Homo sapien
catgttcatcccagatccaaatcga

SEQ ID NO: 713193 - DNA, 25 bp, Homo sapien
gatccaaatcgacccatgttttcca

SEQ ID NO: 713194 - DNA, 25 bp, Homo sapien
tgcccatgttcatcccagatccaaa

SEQ ID NO: 713195 - DNA, 25 bp, Homo sapien
tgttcatcccagatccaaatcgacc

SEQ ID NO: 713196 - DNA, 25 bp, Homo sapien
tcccagatccaaatcgacccatgtt

SEQ ID NO: 713197 - DNA, 25 bp, Homo sapien
ttacacagaaactttcttggactga

SEQ ID NO: 713198 - DNA, 25 bp, Homo sapien
tttacacagaaactttcttggactg

SEQ ID NO: 713199 - DNA, 25 bp, Homo sapien
cagtccaagaaagtttctgtgtaaa

SEQ ID NO: 713200 - DNA, 25 bp, Homo sapien
tcagtccaagaaagtttctgtgtaa

SEQ ID NO: 713201 - DNA, 25 bp, Homo sapien
aagctgctgcttttttacacagaaa

SEQ ID NO: 713202 - DNA, 25 bp, Homo sapien
gaaagctgctgcttttttacacaga

SEQ ID NO: 713203 - DNA, 25 bp, Homo sapien
ttacacagaaactttcttggactga

SEQ ID NO: 713204 - DNA, 25 bp, Homo sapien
aaagctgctgcttttttacacagaa

SEQ ID NO: 713205 - DNA, 25 bp, Homo sapien
tttacacagaaactttcttggactg

SEQ ID NO: 713206 - DNA, 25 bp, Homo sapien
agctgctgcttttttacacagaaac

SEQ ID NO: 713207 - DNA, 25 bp, Homo sapien
cagtccaagaaagtttctgtgtaaa

SEQ ID NO: 713208 - DNA, 25 bp, Homo sapien
tctgtgtaaaaaagcagcagctttc

SEQ ID NO: 713209 - DNA, 25 bp, Homo sapien
tcagtccaagaaagtttctgtgtaa

SEQ ID NO: 713210 - DNA, 25 bp, Homo sapien
ttctgtgtaaaaaagcagcagcttt

SEQ ID NO: 713211 - DNA, 25 bp, Homo sapien
gtttctgtgtaaaaaagcagcagct

SEQ ID NO: 713212 - DNA, 25 bp, Homo sapien
tttctgtgtaaaaaagcagcagctt

SEQ ID NO: 713213 - DNA, 25 bp, Homo sapien
gatgttctgagatacggcactcgga

SEQ ID NO: 713214 - DNA, 25 bp, Homo sapien
aagattgttaaatgtcggccaggcg

SEQ ID NO: 713215 - DNA, 25 bp, Homo sapien
ggaaactgtacatcacactggagga

SEQ ID NO: 713216 - DNA, 25 bp, Homo sapien
ggcaggtgtaatctcgcagtcagga

SEQ ID NO: 713217 - DNA, 25 bp, Homo sapien
cgtgtgacacagtcgatggtgaact

SEQ ID NO: 713218 - DNA, 25 bp, Homo sapien
gagctgtgctgagccgtgtgacaca

SEQ ID NO: 713219 - DNA, 25 bp, Homo sapien
tgctgtgaggagtagagtgatgcag

SEQ ID NO: 713220 - DNA, 25 bp, Homo sapien
aggagtagagtgatgcagtttagaa

SEQ ID NO: 713221 - DNA, 25 bp, Homo sapien
gctgtgaggagtagagtgatgcagt

SEQ ID NO: 713222 - DNA, 25 bp, Homo sapien
tcattagggaatttgagttgttgct

SEQ ID NO: 713223 - DNA, 25 bp, Homo sapien
ttgctgtgaggagtagagtgatgca

SEQ ID NO: 713224 - DNA, 25 bp, Homo sapien
gttgctgtgaggagtagagtgatgc

SEQ ID NO: 713225 - DNA, 25 bp, Homo sapien
ttctaaactgcatcactctactcct

SEQ ID NO: 713226 - DNA, 25 bp, Homo sapien
aaactgcatcactctactcctcaca

SEQ ID NO: 713227 - DNA, 25 bp, Homo sapien
aactgcatcactctactcctcacag

SEQ ID NO: 713228 - DNA, 25 bp, Homo sapien
gcatcactctactcctcacagcaac

SEQ ID NO: 713229 - DNA, 25 bp, Homo sapien
agcaacaactcaaattccctaatga

SEQ ID NO: 713230 - DNA, 25 bp, Homo sapien
tgcatcactctactcctcacagcaa

SEQ ID NO: 713231 - DNA, 25 bp, Homo sapien
gcctggccgacatttaacaatcttt

SEQ ID NO: 713232 - DNA, 25 bp, Homo sapien
tcctccagtgtgatgtacagtttcc

SEQ ID NO: 713233 - DNA, 25 bp, Homo sapien
ccaaagaatgctggtcaagtgggaa

SEQ ID NO: 713234 - DNA, 25 bp, Homo sapien
tccgagtgccgtatctcagaacatc

SEQ ID NO: 713235 - DNA, 25 bp, Homo sapien
tcctgactgcgagattacacctgcc

SEQ ID NO: 713236 - DNA, 25 bp, Homo sapien
gaacagtctaggaaaacacactcca

SEQ ID NO: 713237 - DNA, 25 bp, Homo sapien
cgggcatgatgccgtacacctgtgc

SEQ ID NO: 713238 - DNA, 25 bp, Homo sapien
gcacaggtgtacggcatcatgcccg

SEQ ID NO: 713239 - DNA, 25 bp, Homo sapien
gctgcagtgaagcatgatcacgcca

SEQ ID NO: 713240 - DNA, 25 bp, Homo sapien
tccagcttgggagcttgggttgaca

SEQ ID NO: 713241 - DNA, 25 bp, Homo sapien
gcatgatcacgccactgcattccag

SEQ ID NO: 713242 - DNA, 25 bp, Homo sapien
aaactcaggtgggaggatgacttga

SEQ ID NO: 713243 - DNA, 25 bp, Homo sapien
cctgtgctagctgcctgggaaactc

SEQ ID NO: 713244 - DNA, 25 bp, Homo sapien
ggcatgatgccgtacacctgtgcta

SEQ ID NO: 713245 - DNA, 25 bp, Homo sapien
tgtcaacccaagctcccaagctgga

SEQ ID NO: 713246 - DNA, 25 bp, Homo sapien
tagcacaggtgtacggcatcatgcc

SEQ ID NO: 713247 - DNA, 25 bp, Homo sapien
tcaagtcatcctcccacctgagttt

SEQ ID NO: 713248 - DNA, 25 bp, Homo sapien
ctggaatgcagtggcgtgatcatgc

SEQ ID NO: 713249 - DNA, 25 bp, Homo sapien
tggcgtgatcatgcttcactgcagc

SEQ ID NO: 713250 - DNA, 25 bp, Homo sapien
agtttcccaggcagctagcacaggt

SEQ ID NO: 713251 - DNA, 25 bp, Homo sapien
ggtggtcattagattcatccttcag

SEQ ID NO: 713252 - DNA, 25 bp, Homo sapien
tgaaggccctagaaaggtggtcatt

SEQ ID NO: 713253 - DNA, 25 bp, Homo sapien
ttgcctctgagtggctaggaacaca

SEQ ID NO: 713254 - DNA, 25 bp, Homo sapien
actatgcctggccagcggtgtattt

SEQ ID NO: 713255 - DNA, 25 bp, Homo sapien
tagattcatccttcagctcatcaga

SEQ ID NO: 713256 - DNA, 25 bp, Homo sapien
tgatctcactgtagcaggctgaagc

SEQ ID NO: 713257 - DNA, 25 bp, Homo sapien
tgtgttcctagccactcagaggcaa

SEQ ID NO: 713258 - DNA, 25 bp, Homo sapien
tctgatgagctgaaggatgaatcta

SEQ ID NO: 713259 - DNA, 25 bp, Homo sapien
gcttcagcctgctacagtgagatca

SEQ ID NO: 713260 - DNA, 25 bp, Homo sapien
tctaatgaccacctttctagggcct

SEQ ID NO: 713261 - DNA, 25 bp, Homo sapien
aaatacaccgctggccaggcatagt

SEQ ID NO: 713262 - DNA, 25 bp, Homo sapien
tagccactcagaggcaaaggtagga

SEQ ID NO: 713263 - DNA, 25 bp, Homo sapien
tactaatttgtggatagctatggca

SEQ ID NO: 713264 - DNA, 25 bp, Homo sapien
catgtggctgggcaggtggattaca

SEQ ID NO: 713265 - DNA, 25 bp, Homo sapien
acttactgtcatttgcctgcaaata

SEQ ID NO: 713266 - DNA, 25 bp, Homo sapien
tagctatggcaagaatagatggcat

SEQ ID NO: 713267 - DNA, 25 bp, Homo sapien
catttgcctgcaaatactaatttgt

SEQ ID NO: 713268 - DNA, 25 bp, Homo sapien
tggcaagaatagatggcatgtggct

SEQ ID NO: 713269 - DNA, 25 bp, Homo sapien
agccacatgccatctattcttgcca

SEQ ID NO: 713270 - DNA, 25 bp, Homo sapien
tgccatagctatccacaaattagta

SEQ ID NO: 713271 - DNA, 25 bp, Homo sapien
ctaaccttgtaatccacctgcccag

SEQ ID NO: 713272 - DNA, 25 bp, Homo sapien
tatttgcaggcaaatgacagtaagt

SEQ ID NO: 713273 - DNA, 25 bp, Homo sapien
tattcttgccatagctatccacaaa

SEQ ID NO: 713274 - DNA, 25 bp, Homo sapien
tatccacaaattagtatttgcaggc

SEQ ID NO: 713275 - DNA, 25 bp, Homo sapien
tgctgctcagggcattggctctgct

SEQ ID NO: 713276 - DNA, 25 bp, Homo sapien
agcagagccaatgccctgagcagca

SEQ ID NO: 713277 - DNA, 25 bp, Homo sapien
aattccgccattctctgcaaatcag

SEQ ID NO: 713278 - DNA, 25 bp, Homo sapien
cattctctgcaaatcagtggcatgt

SEQ ID NO: 713279 - DNA, 25 bp, Homo sapien
tccgccattctctgcaaatcagtgg

SEQ ID NO: 713280 - DNA, 25 bp, Homo sapien
ggagaattccgccattctctgcaaa

SEQ ID NO: 713281 - DNA, 25 bp, Homo sapien
ttctctgcaaatcagtggcatgttg

SEQ ID NO: 713282 - DNA, 25 bp, Homo sapien
cgccattctctgcaaatcagtggca

SEQ ID NO: 713283 - DNA, 25 bp, Homo sapien
tgccactgatttgcagagaatggcg

SEQ ID NO: 713284 - DNA, 25 bp, Homo sapien
tgatttgcagagaatggcggaattc

SEQ ID NO: 713285 - DNA, 25 bp, Homo sapien
tttgcagagaatggcggaattctcc

SEQ ID NO: 713286 - DNA, 25 bp, Homo sapien
ccactgatttgcagagaatggcgga

SEQ ID NO: 713287 - DNA, 25 bp, Homo sapien
catgccactgatttgcagagaatgg

SEQ ID NO: 713288 - DNA, 25 bp, Homo sapien
caacatgccactgatttgcagagaa

SEQ ID NO: 713289 - DNA, 25 bp, Homo sapien
tgctggtagactgaagtctgtgtct

SEQ ID NO: 713290 - DNA, 25 bp, Homo sapien
tggtgaactttcccaccttgtccca

SEQ ID NO: 713291 - DNA, 25 bp, Homo sapien
caaagcaaagtaagacgtgttggac

SEQ ID NO: 713292 - DNA, 25 bp, Homo sapien
agctgtacctgctggtagactgaag

SEQ ID NO: 713293 - DNA, 25 bp, Homo sapien
agttagttgggatataagaagcagc

SEQ ID NO: 713294 - DNA, 25 bp, Homo sapien
caaagtaagacgtgttggacaagct

SEQ ID NO: 713295 - DNA, 25 bp, Homo sapien
gctgcttcttatatcccaactaact

SEQ ID NO: 713296 - DNA, 25 bp, Homo sapien
gacacagacttcagtctaccagcag

SEQ ID NO: 713297 - DNA, 25 bp, Homo sapien
gacttcagtctaccagcaggtacag

SEQ ID NO: 713298 - DNA, 25 bp, Homo sapien
gtccaacacgtcttactttgctttg

SEQ ID NO: 713299 - DNA, 25 bp, Homo sapien
tgggacaaggtgggaaagttcacca

SEQ ID NO: 713300 - DNA, 25 bp, Homo sapien
agcttgtccaacacgtcttactttg

SEQ ID NO: 713301 - DNA, 25 bp, Homo sapien
ctttagaaaactgccgctgagcgag

SEQ ID NO: 713302 - DNA, 25 bp, Homo sapien
catatgactcctatctctgctgggc

SEQ ID NO: 713303 - DNA, 25 bp, Homo sapien
tctgctgggcgcattcgcaggtgac

SEQ ID NO: 713304 - DNA, 25 bp, Homo sapien
tgtgcgtgtgtttctcaaacccctt

SEQ ID NO: 713305 - DNA, 25 bp, Homo sapien
ctactctggaatctgtaatgagcac

SEQ ID NO: 713306 - DNA, 25 bp, Homo sapien
gagcctggaccagctttagaaaact

SEQ ID NO: 713307 - DNA, 25 bp, Homo sapien
tttccgcgcagagctcatttgttag

SEQ ID NO: 713308 - DNA, 25 bp, Homo sapien
gctgcagctttaatttgctctatga

SEQ ID NO: 713309 - DNA, 25 bp, Homo sapien
aatttgctctatgataatgagaggt

SEQ ID NO: 713310 - DNA, 25 bp, Homo sapien
gtgatgctgggcggtcttctgaaca

SEQ ID NO: 713311 - DNA, 25 bp, Homo sapien
tgctcaaggatttccgcgcagagct

SEQ ID NO: 713312 - DNA, 25 bp, Homo sapien
catttgttagcgttgaggttgtccg

SEQ ID NO: 713313 - DNA, 25 bp, Homo sapien
catagagcaaattaaagctgcagct

SEQ ID NO: 713314 - DNA, 25 bp, Homo sapien
cggacaacctcaacgctaacaaatg

SEQ ID NO: 713315 - DNA, 25 bp, Homo sapien
cacctctcattatcatagagcaaat

SEQ ID NO: 713316 - DNA, 25 bp, Homo sapien
taacaaatgagctctgcgcggaaat

SEQ ID NO: 713317 - DNA, 25 bp, Homo sapien
agctctgcgcggaaatccttgagca

SEQ ID NO: 713318 - DNA, 25 bp, Homo sapien
tcaacgctaacaaatgagctctgcg

SEQ ID NO: 713319 - DNA, 25 bp, Homo sapien
tcccctgagctggaaagtaagcccc

SEQ ID NO: 713320 - DNA, 25 bp, Homo sapien
gctcattacagattccagagtagaa

SEQ ID NO: 713321 - DNA, 25 bp, Homo sapien
gggtcacgatgccaagaccccacgt

SEQ ID NO: 713322 - DNA, 25 bp, Homo sapien
cagttttctaaagctggtccaggct

SEQ ID NO: 713323 - DNA, 25 bp, Homo sapien
gaactaggagagtccttgatgctgg

SEQ ID NO: 713324 - DNA, 25 bp, Homo sapien
gcccagcagagataggagtcatatg

SEQ ID NO: 713325 - DNA, 25 bp, Homo sapien
aatcctaagtaatgcactgaagaga

SEQ ID NO: 713326 - DNA, 25 bp, Homo sapien
aaatcctaagtaatgcactgaagag

SEQ ID NO: 713327 - DNA, 25 bp, Homo sapien
ctcttcagtgcattacttaggattt

SEQ ID NO: 713328 - DNA, 25 bp, Homo sapien
tctcttcagtgcattacttaggatt

SEQ ID NO: 713329 - DNA, 25 bp, Homo sapien
tcctaagtaatgcactgaagagagg

SEQ ID NO: 713330 - DNA, 25 bp, Homo sapien
agagatcattgcaaagcagggagga

SEQ ID NO: 713331 - DNA, 25 bp, Homo sapien
aatcctaagtaatgcactgaagaga

SEQ ID NO: 713332 - DNA, 25 bp, Homo sapien
aaatcctaagtaatgcactgaagag

SEQ ID NO: 713333 - DNA, 25 bp, Homo sapien
gtaatgcactgaagagaggagagat

SEQ ID NO: 713334 - DNA, 25 bp, Homo sapien
gagaggagagatcattgcaaagcag

SEQ ID NO: 713335 - DNA, 25 bp, Homo sapien
tcctccctgctttgcaatgatctct

SEQ ID NO: 713336 - DNA, 25 bp, Homo sapien
cctgctttgcaatgatctctcctct

SEQ ID NO: 713337 - DNA, 25 bp, Homo sapien
gatctctcctctcttcagtgcatta

SEQ ID NO: 713338 - DNA, 25 bp, Homo sapien
cctctcttcagtgcattacttagga

SEQ ID NO: 713339 - DNA, 25 bp, Homo sapien
tctcttcagtgcattacttaggatt

SEQ ID NO: 713340 - DNA, 25 bp, Homo sapien
ctcttcagtgcattacttaggattt

SEQ ID NO: 713341 - DNA, 25 bp, Homo sapien
ggactgtagagcttagtggtgagaa

SEQ ID NO: 713342 - DNA, 25 bp, Homo sapien
tgtttctcatagcactcatttgtaa

SEQ ID NO: 713343 - DNA, 25 bp, Homo sapien
ctctctgtttctcatagcactcatt

SEQ ID NO: 713344 - DNA, 25 bp, Homo sapien
tgagaagtgcgggttctgacacaga

SEQ ID NO: 713345 - DNA, 25 bp, Homo sapien
agaagtgcgggttctgacacagact

SEQ ID NO: 713346 - DNA, 25 bp, Homo sapien
gaacaggctgttatcgctggggact

SEQ ID NO: 713347 - DNA, 25 bp, Homo sapien
acagtccccagcgataacagcctgt

SEQ ID NO: 713348 - DNA, 25 bp, Homo sapien
tctgtgtcagaacccgcacttctca

SEQ ID NO: 713349 - DNA, 25 bp, Homo sapien
ttctcaccactaagctctacagtcc

SEQ ID NO: 713350 - DNA, 25 bp, Homo sapien
tccccagcgataacagcctgttcta

SEQ ID NO: 713351 - DNA, 25 bp, Homo sapien
aatgagtgctatgagaaacagagag

SEQ ID NO: 713352 - DNA, 25 bp, Homo sapien
tacaaatgagtgctatgagaaacag

SEQ ID NO: 713353 - DNA, 25 bp, Homo sapien
tccctgggatcgagaggatgggtcc

SEQ ID NO: 713354 - DNA, 25 bp, Homo sapien
cctccagcattgagcgcatgggcca

SEQ ID NO: 713355 - DNA, 25 bp, Homo sapien
gggtcctggcattgaccgcctcggg

SEQ ID NO: 713356 - DNA, 25 bp, Homo sapien
catggatcgcgtgggctccgagatc

SEQ ID NO: 713357 - DNA, 25 bp, Homo sapien
agatcgagcgcatgggcctggtcat

SEQ ID NO: 713358 - DNA, 25 bp, Homo sapien
gctccggcattgagcgcatgggccc

SEQ ID NO: 713359 - DNA, 25 bp, Homo sapien
gggcccatgcgctcaatgccggagc

SEQ ID NO: 713360 - DNA, 25 bp, Homo sapien
tggcccatgcgctcaatgctggagg

SEQ ID NO: 713361 - DNA, 25 bp, Homo sapien
catcctctcgatcccagggacgctt

SEQ ID NO: 713362 - DNA, 25 bp, Homo sapien
atgaccaggcccatgcgctcgatct

SEQ ID NO: 713363 - DNA, 25 bp, Homo sapien
gatctcggagcccacgcgatccatg

SEQ ID NO: 713364 - DNA, 25 bp, Homo sapien
acccccgaggcggtcaatgccagga

SEQ ID NO: 713365 - DNA, 25 bp, Homo sapien
ggccccgtgatggatcgcatggcca

SEQ ID NO: 713366 - DNA, 25 bp, Homo sapien
agctttgaccgtgccatcgagatgg

SEQ ID NO: 713367 - DNA, 25 bp, Homo sapien
caacttcggaggaagcttcgcaggt

SEQ ID NO: 713368 - DNA, 25 bp, Homo sapien
accgtgtgggccagaccattgagcg

SEQ ID NO: 713369 - DNA, 25 bp, Homo sapien
caacaatctggagcggatgggcctg

SEQ ID NO: 713370 - DNA, 25 bp, Homo sapien
atgggccctgccatcgagcgcatgg

SEQ ID NO: 713371 - DNA, 25 bp, Homo sapien
ggcctggagcgcatgggcgccaaca

SEQ ID NO: 713372 - DNA, 25 bp, Homo sapien
gccaacagcctcgagcgcatgggcc

SEQ ID NO: 713373 - DNA, 25 bp, Homo sapien
ggcccatgcgctcgaggctgttggc

SEQ ID NO: 713374 - DNA, 25 bp, Homo sapien
tgttggcgcccatgcgctccaggcc

SEQ ID NO: 713375 - DNA, 25 bp, Homo sapien
atgcgctcgaggctgttggcaccca

SEQ ID NO: 713376 - DNA, 25 bp, Homo sapien
ggaacctgcgaagcttcctccgaag

SEQ ID NO: 713377 - DNA, 25 bp, Homo sapien
ctcgatggcacggtcaaagctggca

SEQ ID NO: 713378 - DNA, 25 bp, Homo sapien
aggcccatccgctccagattgttgg

SEQ ID NO: 713379 - DNA, 25 bp, Homo sapien
tgcgctcgaggctgttggcgcccat

SEQ ID NO: 713380 - DNA, 25 bp, Homo sapien
aatggtctggcccacacggtcgatg

SEQ ID NO: 713381 - DNA, 25 bp, Homo sapien
tttggtttaatcacgcatcagtctc

SEQ ID NO: 713382 - DNA, 25 bp, Homo sapien
atttggtttaatcacgcatcagtct

SEQ ID NO: 713383 - DNA, 25 bp, Homo sapien
tgcaaggcatgccttaggatttggt

SEQ ID NO: 713384 - DNA, 25 bp, Homo sapien
caaggcatgccttaggatttggttt

SEQ ID NO: 713385 - DNA, 25 bp, Homo sapien
gcaaggcatgccttaggatttggtt

SEQ ID NO: 713386 - DNA, 25 bp, Homo sapien
aaggcatgccttaggatttggttta

SEQ ID NO: 713387 - DNA, 25 bp, Homo sapien
accaaatcctaaggcatgccttgca

SEQ ID NO: 713388 - DNA, 25 bp, Homo sapien
aaccaaatcctaaggcatgccttgc

SEQ ID NO: 713389 - DNA, 25 bp, Homo sapien
taaaccaaatcctaaggcatgcctt

SEQ ID NO: 713390 - DNA, 25 bp, Homo sapien
aaaccaaatcctaaggcatgccttg

SEQ ID NO: 713391 - DNA, 25 bp, Homo sapien
agactgatgcgtgattaaaccaaat

SEQ ID NO: 713392 - DNA, 25 bp, Homo sapien
gagactgatgcgtgattaaaccaaa

SEQ ID NO: 713393 - DNA, 25 bp, Homo sapien
ttggtttaatcacgcatcagtctcc

SEQ ID NO: 713394 - DNA, 25 bp, Homo sapien
tttggtttaatcacgcatcagtctc

SEQ ID NO: 713395 - DNA, 25 bp, Homo sapien
ggtttaatcacgcatcagtctccct

SEQ ID NO: 713396 - DNA, 25 bp, Homo sapien
atttggtttaatcacgcatcagtct

SEQ ID NO: 713397 - DNA, 25 bp, Homo sapien
taatcacgcatcagtctcccttttc

SEQ ID NO: 713398 - DNA, 25 bp, Homo sapien
caaggcatgccttaggatttggttt

SEQ ID NO: 713399 - DNA, 25 bp, Homo sapien
ggagactgatgcgtgattaaaccaa

SEQ ID NO: 713400 - DNA, 25 bp, Homo sapien
agggagactgatgcgtgattaaacc

SEQ ID NO: 713401 - DNA, 25 bp, Homo sapien
aaaccaaatcctaaggcatgccttg

SEQ ID NO: 713402 - DNA, 25 bp, Homo sapien
gaaaagggagactgatgcgtgatta

SEQ ID NO: 713403 - DNA, 25 bp, Homo sapien
gagactgatgcgtgattaaaccaaa

SEQ ID NO: 713404 - DNA, 25 bp, Homo sapien
aagaaaagggagactgatgcgtgat

SEQ ID NO: 713405 - DNA, 25 bp, Homo sapien
atgctaaaggacaaattcaacgagt

SEQ ID NO: 713406 - DNA, 25 bp, Homo sapien
agatgctaaaggacaaattcaacga

SEQ ID NO: 713407 - DNA, 25 bp, Homo sapien
gatgctaaaggacaaattcaacgag

SEQ ID NO: 713408 - DNA, 25 bp, Homo sapien
actcgttgaatttgtcctttagcat

SEQ ID NO: 713409 - DNA, 25 bp, Homo sapien
tcgttgaatttgtcctttagcatct

SEQ ID NO: 713410 - DNA, 25 bp, Homo sapien
ctcgttgaatttgtcctttagcatc

SEQ ID NO: 713411 - DNA, 25 bp, Homo sapien
cacatggaagatgctaaaggacaaa

SEQ ID NO: 713412 - DNA, 25 bp, Homo sapien
gccattcgatttcacatggaagatg

SEQ ID NO: 713413 - DNA, 25 bp, Homo sapien
tgctaaaggacaaattcaacgagtg

SEQ ID NO: 713414 - DNA, 25 bp, Homo sapien
tgccattcgatttcacatggaagat

SEQ ID NO: 713415 - DNA, 25 bp, Homo sapien
ctaaaggacaaattcaacgagtgcg

SEQ ID NO: 713416 - DNA, 25 bp, Homo sapien
ctgccattcgatttcacatggaaga

SEQ ID NO: 713417 - DNA, 25 bp, Homo sapien
tttgtcctttagcatcttccatgtg

SEQ ID NO: 713418 - DNA, 25 bp, Homo sapien
atcttccatgtgaaatcgaatggca

SEQ ID NO: 713419 - DNA, 25 bp, Homo sapien
cgcactcgttgaatttgtcctttag

SEQ ID NO: 713420 - DNA, 25 bp, Homo sapien
cactcgttgaatttgtcctttagca

SEQ ID NO: 713421 - DNA, 25 bp, Homo sapien
catcttccatgtgaaatcgaatggc

SEQ ID NO: 713422 - DNA, 25 bp, Homo sapien
tcttccatgtgaaatcgaatggcag

SEQ ID NO: 713423 - DNA, 25 bp, Homo sapien
tgaaacaaggtagtagtgtccccat

SEQ ID NO: 713424 - DNA, 25 bp, Homo sapien
cacgccaatgctcaggcaggttgtt

SEQ ID NO: 713425 - DNA, 25 bp, Homo sapien
aacggctttgtaggtgcttccctcg

SEQ ID NO: 713426 - DNA, 25 bp, Homo sapien
atggccttgccatgttctgcccacg

SEQ ID NO: 713427 - DNA, 25 bp, Homo sapien
tgttggtgacgcagccgagtcagca

SEQ ID NO: 713428 - DNA, 25 bp, Homo sapien
gtcggctcaggacccatggccttgc

SEQ ID NO: 713429 - DNA, 25 bp, Homo sapien
aacaacctgcctgagcattggcgtg

SEQ ID NO: 713430 - DNA, 25 bp, Homo sapien
aggttttgctgctgactcggctgcg

SEQ ID NO: 713431 - DNA, 25 bp, Homo sapien
cattggcgtgggcagaacatggcaa

SEQ ID NO: 713432 - DNA, 25 bp, Homo sapien
ggacactactaccttgtttcaaaga

SEQ ID NO: 713433 - DNA, 25 bp, Homo sapien
cgagggaagcacctacaaagccgtt

SEQ ID NO: 713434 - DNA, 25 bp, Homo sapien
tagaagccaggtaacctcagaagga

SEQ ID NO: 713435 - DNA, 25 bp, Homo sapien
gaagtccagactcacaagccccttg

SEQ ID NO: 713436 - DNA, 25 bp, Homo sapien
aagtccagactcacaagccccttga

SEQ ID NO: 713437 - DNA, 25 bp, Homo sapien
cttgaagacctggtcctatcctcct

SEQ ID NO: 713438 - DNA, 25 bp, Homo sapien
ttgaagacctggtcctatcctcctc

SEQ ID NO: 713439 - DNA, 25 bp, Homo sapien
ggaagtccagactcacaagcccctt

SEQ ID NO: 713440 - DNA, 25 bp, Homo sapien
ggccagtgggatcacagcgccccca

SEQ ID NO: 713441 - DNA, 25 bp, Homo sapien
tgggggcgctgtgatcccactggcc

SEQ ID NO: 713442 - DNA, 25 bp, Homo sapien
aggaggataggaccaggtcttcaag

SEQ ID NO: 713443 - DNA, 25 bp, Homo sapien
tcaaggggcttgtgagtctggactt

SEQ ID NO: 713444 - DNA, 25 bp, Homo sapien
aaggggcttgtgagtctggacttcc

SEQ ID NO: 713445 - DNA, 25 bp, Homo sapien
gaggaggataggaccaggtcttcaa

SEQ ID NO: 713446 - DNA, 25 bp, Homo sapien
gctgggggcgctgtgatcccactgg

SEQ ID NO: 713447 - DNA, 25 bp, Homo sapien
tgagcggcaagtgctgcacgtgtcc

SEQ ID NO: 713448 - DNA, 25 bp, Homo sapien
tgctgcacgtgtcccgcaatgctct

SEQ ID NO: 713449 - DNA, 25 bp, Homo sapien
cctgagcggcaagtgctgcacgtgt

SEQ ID NO: 713450 - DNA, 25 bp, Homo sapien
ggcaagtgctgcacgtgtcccgcaa

SEQ ID NO: 713451 - DNA, 25 bp, Homo sapien
agtgctgcacgtgtcccgcaatgct

SEQ ID NO: 713452 - DNA, 25 bp, Homo sapien
aacctgagcggcaagtgctgcacgt

SEQ ID NO: 713453 - DNA, 25 bp, Homo sapien
attgcgggacacgtgcagcacttgc

SEQ ID NO: 713454 - DNA, 25 bp, Homo sapien
acgtgcagcacttgccgctcaggtt

SEQ ID NO: 713455 - DNA, 25 bp, Homo sapien
agcattgcgggacacgtgcagcact

SEQ ID NO: 713456 - DNA, 25 bp, Homo sapien
agagcattgcgggacacgtgcagca

SEQ ID NO: 713457 - DNA, 25 bp, Homo sapien
gggacacgtgcagcacttgccgctc

SEQ ID NO: 713458 - DNA, 25 bp, Homo sapien
acgagagcattgcgggacacgtgca

SEQ ID NO: 713459 - DNA, 25 bp, Homo sapien
tatctggatgcttaacgggtgctca

SEQ ID NO: 713460 - DNA, 25 bp, Homo sapien
tagggctctgtccacggcgttgaca

SEQ ID NO: 713461 - DNA, 25 bp, Homo sapien
aatgaataagtgaaacctgctggct

SEQ ID NO: 713462 - DNA, 25 bp, Homo sapien
tcctgaagcgtaaaggcgtgcattg

SEQ ID NO: 713463 - DNA, 25 bp, Homo sapien
caaaatcgggactgagtgtcgtctc

SEQ ID NO: 713464 - DNA, 25 bp, Homo sapien
cgtgcattgaatccgccaggaaggc

SEQ ID NO: 713465 - DNA, 25 bp, Homo sapien
gaagaagagacgacactcagtcccg

SEQ ID NO: 713466 - DNA, 25 bp, Homo sapien
caatggcgagaaccaatgactacgg

SEQ ID NO: 713467 - DNA, 25 bp, Homo sapien
cagatatgtgtcaacgccgtggaca

SEQ ID NO: 713468 - DNA, 25 bp, Homo sapien
tgagcacccgttaagcatccagata

SEQ ID NO: 713469 - DNA, 25 bp, Homo sapien
actcagtgcctaagagagggcccag

SEQ ID NO: 713470 - DNA, 25 bp, Homo sapien
tttttgatatgccaccgcccctggt

SEQ ID NO: 713471 - DNA, 25 bp, Homo sapien
tacgccgacatcaagatggagaatg

SEQ ID NO: 713472 - DNA, 25 bp, Homo sapien
tgacgttcgaattgatagaaacgct

SEQ ID NO: 713473 - DNA, 25 bp, Homo sapien
ctgagtggccgagagattgacgttc

SEQ ID NO: 713474 - DNA, 25 bp, Homo sapien
tgctgtacgccgacatcaagatgga

SEQ ID NO: 713475 - DNA, 25 bp, Homo sapien
ttaagttcgagtcgccagaggtggc

SEQ ID NO: 713476 - DNA, 25 bp, Homo sapien
gcgtggttaagttcgagtcgccaga

SEQ ID NO: 713477 - DNA, 25 bp, Homo sapien
gccacctctggcgactcgaacttaa

SEQ ID NO: 713478 - DNA, 25 bp, Homo sapien
cattctccatcttgatgtcggcgta

SEQ ID NO: 713479 - DNA, 25 bp, Homo sapien
ttaagcgtttctatcaattcgaacg

SEQ ID NO: 713480 - DNA, 25 bp, Homo sapien
tctggcgactcgaacttaaccacgc

SEQ ID NO: 713481 - DNA, 25 bp, Homo sapien
ttgatgtcggcgtacagcacgtggc

SEQ ID NO: 713482 - DNA, 25 bp, Homo sapien
aattcgaacgtcaatctctcggcca

SEQ ID NO: 713483 - DNA, 25 bp, Homo sapien
ttttaatttgttggctggatgtata

SEQ ID NO: 713484 - DNA, 25 bp, Homo sapien
gagattgcaatgtgcgcaatttttt

SEQ ID NO: 713485 - DNA, 25 bp, Homo sapien
tcgatacgagacctctgaatttgta

SEQ ID NO: 713486 - DNA, 25 bp, Homo sapien
tttgcattgagattgcaatgtgcgc

SEQ ID NO: 713487 - DNA, 25 bp, Homo sapien
taaacatcgatacgagacctctgaa

SEQ ID NO: 713488 - DNA, 25 bp, Homo sapien
gccttttttaaacatcgatacgaga

SEQ ID NO: 713489 - DNA, 25 bp, Homo sapien
tacaaattcagaggtctcgtatcga

SEQ ID NO: 713490 - DNA, 25 bp, Homo sapien
cagaggtctcgtatcgatgtttaaa

SEQ ID NO: 713491 - DNA, 25 bp, Homo sapien
aaaaaattgcgcacattgcaatctc

SEQ ID NO: 713492 - DNA, 25 bp, Homo sapien
tatacatccagccaacaaattaaaa

SEQ ID NO: 713493 - DNA, 25 bp, Homo sapien
gcgcacattgcaatctcaatgcaaa

SEQ ID NO: 713494 - DNA, 25 bp, Homo sapien
tctcgtatcgatgtttaaaaaaggc

SEQ ID NO: 713495 - DNA, 25 bp, Homo sapien
tgactttgataataaataccggttc

SEQ ID NO: 713496 - DNA, 25 bp, Homo sapien
aatatgactttgataataaataccg

SEQ ID NO: 713497 - DNA, 25 bp, Homo sapien
tatgactttgataataaataccggt

SEQ ID NO: 713498 - DNA, 25 bp, Homo sapien
gaatatgactttgataataaatacc

SEQ ID NO: 713499 - DNA, 25 bp, Homo sapien
catcgaatatgactttgataataaa

SEQ ID NO: 713500 - DNA, 25 bp, Homo sapien
atatgactttgataataaataccgg

SEQ ID NO: 713501 - DNA, 25 bp, Homo sapien
ccggtatttattatcaaagtcatat

SEQ ID NO: 713502 - DNA, 25 bp, Homo sapien
accggtatttattatcaaagtcata

SEQ ID NO: 713503 - DNA, 25 bp, Homo sapien
gaaccggtatttattatcaaagtca

SEQ ID NO: 713504 - DNA, 25 bp, Homo sapien
tttattatcaaagtcatattcgatg

SEQ ID NO: 713505 - DNA, 25 bp, Homo sapien
gtatttattatcaaagtcatattcg

SEQ ID NO: 713506 - DNA, 25 bp, Homo sapien
tatttattatcaaagtcatattcga

SEQ ID NO: 713507 - DNA, 25 bp, Homo sapien
tgactttgataataaataccggttc

SEQ ID NO: 713508 - DNA, 25 bp, Homo sapien
tatgactttgataataaataccggt

SEQ ID NO: 713509 - DNA, 25 bp, Homo sapien
gaatatgactttgataataaatacc

SEQ ID NO: 713510 - DNA, 25 bp, Homo sapien
catcgaatatgactttgataataaa

SEQ ID NO: 713511 - DNA, 25 bp, Homo sapien
atatgactttgataataaataccgg

SEQ ID NO: 713512 - DNA, 25 bp, Homo sapien
ttgttgacatcgaatatgactttga

SEQ ID NO: 713513 - DNA, 25 bp, Homo sapien
tatttattatcaaagtcatattcga

SEQ ID NO: 713514 - DNA, 25 bp, Homo sapien
ccggtatttattatcaaagtcatat

SEQ ID NO: 713515 - DNA, 25 bp, Homo sapien
tcaaagtcatattcgatgtcaacaa

SEQ ID NO: 713516 - DNA, 25 bp, Homo sapien
gaaccggtatttattatcaaagtca

SEQ ID NO: 713517 - DNA, 25 bp, Homo sapien
tttattatcaaagtcatattcgatg

SEQ ID NO: 713518 - DNA, 25 bp, Homo sapien
tatcaaagtcatattcgatgtcaac

SEQ ID NO: 713519 - DNA, 25 bp, Homo sapien
gcggaggcctctgccccctgccagc

SEQ ID NO: 713520 - DNA, 25 bp, Homo sapien
gaggcctctgccccctgccagcagc

SEQ ID NO: 713521 - DNA, 25 bp, Homo sapien
ggcggaggcctctgccccctgccag

SEQ ID NO: 713522 - DNA, 25 bp, Homo sapien
cccggcggaggcctctgccccctgc

SEQ ID NO: 713523 - DNA, 25 bp, Homo sapien
ttgcacccaaggtgtcgccgctgct

SEQ ID NO: 713524 - DNA, 25 bp, Homo sapien
gcttccagtgttctcgcagctctga

SEQ ID NO: 713525 - DNA, 25 bp, Homo sapien
taaggccgaggaatgcgcgggtgga

SEQ ID NO: 713526 - DNA, 25 bp, Homo sapien
gcagctctgaatcccgccgctttgg

SEQ ID NO: 713527 - DNA, 25 bp, Homo sapien
caatagaagcgagacgtagagaatc

SEQ ID NO: 713528 - DNA, 25 bp, Homo sapien
taggcagagagtaaaggccccagca

SEQ ID NO: 713529 - DNA, 25 bp, Homo sapien
ctgaccagcatagtctccgggacca

SEQ ID NO: 713530 - DNA, 25 bp, Homo sapien
catcattttacggagcagccggtgg

SEQ ID NO: 713531 - DNA, 25 bp, Homo sapien
tgttttcactgagacaggtatcccc

SEQ ID NO: 713532 - DNA, 25 bp, Homo sapien
ggtatgccctctcaggtgacctgta

SEQ ID NO: 713533 - DNA, 25 bp, Homo sapien
catagagttcagatacacacccgct

SEQ ID NO: 713534 - DNA, 25 bp, Homo sapien
tgtccacaggtacacccagacttgg

SEQ ID NO: 713535 - DNA, 25 bp, Homo sapien
ttcaggggtcgggggactgagtctc

SEQ ID NO: 713536 - DNA, 25 bp, Homo sapien
caggggtcgggggactgagtctcac

SEQ ID NO: 713537 - DNA, 25 bp, Homo sapien
tcaggggtcgggggactgagtctca

SEQ ID NO: 713538 - DNA, 25 bp, Homo sapien
tcactccctgagtccgtgctgtggt

SEQ ID NO: 713539 - DNA, 25 bp, Homo sapien
gttggaggccaggattcacggcaca

SEQ ID NO: 713540 - DNA, 25 bp, Homo sapien
gaggtgcaggcacttacccaaggtc

SEQ ID NO: 713541 - DNA, 25 bp, Homo sapien
gattagccgggtatgatgccatgcg

SEQ ID NO: 713542 - DNA, 25 bp, Homo sapien
cagaaaccctcctgagttacaaatt

SEQ ID NO: 713543 - DNA, 25 bp, Homo sapien
gtgagcaccggcctctactccagtc

SEQ ID NO: 713544 - DNA, 25 bp, Homo sapien
cccggccaggcagacctcagcccca

SEQ ID NO: 713545 - DNA, 25 bp, Homo sapien
tgagactctggtgagcaccggcctc

SEQ ID NO: 713546 - DNA, 25 bp, Homo sapien
caagacgtgccttctacaggaagcc

SEQ ID NO: 713547 - DNA, 25 bp, Homo sapien
gacgtgccttctacaggaagccctc

SEQ ID NO: 713548 - DNA, 25 bp, Homo sapien
gtgccttctacaggaagccctctca

SEQ ID NO: 713549 - DNA, 25 bp, Homo sapien
gttgcaagacgtgccttctacagga

SEQ ID NO: 713550 - DNA, 25 bp, Homo sapien
ctcttgcagccaccactgatgctgc

SEQ ID NO: 713551 - DNA, 25 bp, Homo sapien
ctggctgatgtctcttgcagccacc

SEQ ID NO: 713552 - DNA, 25 bp, Homo sapien
ctctggctgatgtctcttgcagcca

SEQ ID NO: 713553 - DNA, 25 bp, Homo sapien
ttgcagccaccactgatgctgcctg

SEQ ID NO: 713554 - DNA, 25 bp, Homo sapien
gaaaggtgttggtagtagcgttcat

SEQ ID NO: 713555 - DNA, 25 bp, Homo sapien
ggtagtagcgttcatttgctgctgg

SEQ ID NO: 713556 - DNA, 25 bp, Homo sapien
ttgctgctggtagtttattgttggt

SEQ ID NO: 713557 - DNA, 25 bp, Homo sapien
atttggagaggaaaggtgttggtag

SEQ ID NO: 713558 - DNA, 25 bp, Homo sapien
tgcaggttcgtggtgataatggctc

SEQ ID NO: 713559 - DNA, 25 bp, Homo sapien
tcgttggtggtggattgttttcagc

SEQ ID NO: 713560 - DNA, 25 bp, Homo sapien
aaattctggagatgcttggtgacca

SEQ ID NO: 713561 - DNA, 25 bp, Homo sapien
agtggaatgatgaccatcggtggtt

SEQ ID NO: 713562 - DNA, 25 bp, Homo sapien
cctttgatcggaatatgtactgtga

SEQ ID NO: 713563 - DNA, 25 bp, Homo sapien
tccgccagatgtgctgcaaaacctg

SEQ ID NO: 713564 - DNA, 25 bp, Homo sapien
agacggagccggaagttatttattg

SEQ ID NO: 713565 - DNA, 25 bp, Homo sapien
aatttcagttctgcagccgagccta

SEQ ID NO: 713566 - DNA, 25 bp, Homo sapien
cttctggaacctcggaaatgcattg

SEQ ID NO: 713567 - DNA, 25 bp, Homo sapien
tgctgagtgtttcaggcacctgacc

SEQ ID NO: 713568 - DNA, 25 bp, Homo sapien
gacattttgagctagatgattgccg

SEQ ID NO: 713569 - DNA, 25 bp, Homo sapien
gtttttcaacctcaggcactagtga

SEQ ID NO: 713570 - DNA, 25 bp, Homo sapien
tcagacagcgaaccagtggagctat

SEQ ID NO: 713571 - DNA, 25 bp, Homo sapien
tccagcagttatacagccaaaaggc

SEQ ID NO: 713572 - DNA, 25 bp, Homo sapien
gccaaaaggccagatttacgatcag

SEQ ID NO: 713573 - DNA, 25 bp, Homo sapien
caatcgtactgctaggaaaccaggt

SEQ ID NO: 713574 - DNA, 25 bp, Homo sapien
ctggctctccagtcttccacccaag

SEQ ID NO: 713575 - DNA, 25 bp, Homo sapien
tctccagtcttccacccaagccctc

SEQ ID NO: 713576 - DNA, 25 bp, Homo sapien
tcctcctggctctccagtcttccac

SEQ ID NO: 713577 - DNA, 25 bp, Homo sapien
ggctctccagtcttccacccaagcc

SEQ ID NO: 713578 - DNA, 25 bp, Homo sapien
cgtttttagagcatagagggtaact

SEQ ID NO: 713579 - DNA, 25 bp, Homo sapien
catctgtaaaccgtcagggggctgg

SEQ ID NO: 713580 - DNA, 25 bp, Homo sapien
tggtcttgatgggtttgggccggct

SEQ ID NO: 713581 - DNA, 25 bp, Homo sapien
tcagaggtcactcatgtcatcatct

SEQ ID NO: 713582 - DNA, 25 bp, Homo sapien
aaacttgcacatcaacgtctggcac

SEQ ID NO: 713583 - DNA, 25 bp, Homo sapien
cacattatttatcatcgcctatgaa

SEQ ID NO: 713584 - DNA, 25 bp, Homo sapien
tgggcattcgtcaccaaaactggaa

SEQ ID NO: 713585 - DNA, 25 bp, Homo sapien
tgcacatcaacgtctggcacattat

SEQ ID NO: 713586 - DNA, 25 bp, Homo sapien
gcacgcaggaggtgttcgttccgta

SEQ ID NO: 713587 - DNA, 25 bp, Homo sapien
gggtctgttttgttcgccgctgcaa

SEQ ID NO: 713588 - DNA, 25 bp, Homo sapien
caggaggtgttcgttccgtaaatat

SEQ ID NO: 713589 - DNA, 25 bp, Homo sapien
gtctgttttgttcgccgctgcaacc

SEQ ID NO: 713590 - DNA, 25 bp, Homo sapien
ggaggaagacctgcttgtccagccc

SEQ ID NO: 713591 - DNA, 25 bp, Homo sapien
tgggatggcccagactcagggacat

SEQ ID NO: 713592 - DNA, 25 bp, Homo sapien
cagcaagtggagtctgagctggcca

SEQ ID NO: 713593 - DNA, 25 bp, Homo sapien
gacatcactggagagtaaacagccc

SEQ ID NO: 713594 - DNA, 25 bp, Homo sapien
agcccacagtctctggcccaacggg

SEQ ID NO: 713595 - DNA, 25 bp, Homo sapien
cccacagtctctggcccaacgggcc

SEQ ID NO: 713596 - DNA, 25 bp, Homo sapien
ggagcccacagtctctggcccaacg

SEQ ID NO: 713597 - DNA, 25 bp, Homo sapien
cagtctctggcccaacgggcccctc

SEQ ID NO: 713598 - DNA, 25 bp, Homo sapien
tgacgtcagggctgttatgcatgga

SEQ ID NO: 713599 - DNA, 25 bp, Homo sapien
catggatgccgtgcagcggaaattc

SEQ ID NO: 713600 - DNA, 25 bp, Homo sapien
cgtgcagcggaaattcacttcctta

SEQ ID NO: 713601 - DNA, 25 bp, Homo sapien
ttatgcatggatgccgtgcagcgga

SEQ ID NO: 713602 - DNA, 25 bp, Homo sapien
tcaacggatgttgaccagagcccag

SEQ ID NO: 713603 - DNA, 25 bp, Homo sapien
tctgtgtagaggtccacggcacatc

SEQ ID NO: 713604 - DNA, 25 bp, Homo sapien
accattccaacttcaacggatgttg

SEQ ID NO: 713605 - DNA, 25 bp, Homo sapien
gaggtccacggcacatcccggagct

SEQ ID NO: 713606 - DNA, 25 bp, Homo sapien
acccatggaggggacaggtggagtt

SEQ ID NO: 713607 - DNA, 25 bp, Homo sapien
ggggacaggtggagttggaactgag

SEQ ID NO: 713608 - DNA, 25 bp, Homo sapien
tggaggggacaggtggagttggaac

SEQ ID NO: 713609 - DNA, 25 bp, Homo sapien
catggaggggacaggtggagttgga

SEQ ID NO: 713610 - DNA, 25 bp, Homo sapien
tggatgacccctttctctaatttat

SEQ ID NO: 713611 - DNA, 25 bp, Homo sapien
ggacctggatgacccctttctctaa

SEQ ID NO: 713612 - DNA, 25 bp, Homo sapien
gtggacctggatgacccctttctct

SEQ ID NO: 713613 - DNA, 25 bp, Homo sapien
tggagtaatggcaaagggtggacct

SEQ ID NO: 713614 - DNA, 25 bp, Homo sapien
tggcaggcccgagaaacccacatcc

SEQ ID NO: 713615 - DNA, 25 bp, Homo sapien
gcaggcccgagaaacccacatccat

SEQ ID NO: 713616 - DNA, 25 bp, Homo sapien
acatctggcaggcccgagaaaccca

SEQ ID NO: 713617 - DNA, 25 bp, Homo sapien
tctggcaggcccgagaaacccacat

SEQ ID NO: 713618 - DNA, 25 bp, Homo sapien
caaagcgaagcttgagcgccttcag

SEQ ID NO: 713619 - DNA, 25 bp, Homo sapien
ttgagacgtcgcttttccctggatc

SEQ ID NO: 713620 - DNA, 25 bp, Homo sapien
tgaactcccgctggcgacgtatgga

SEQ ID NO: 713621 - DNA, 25 bp, Homo sapien
tggctgcatcattgagacgtcgctt

SEQ ID NO: 713622 - DNA, 25 bp, Homo sapien
tgcaggggcaaggcccggggcccac

SEQ ID NO: 713623 - DNA, 25 bp, Homo sapien
ctgcaggggcaaggcccggggccca

SEQ ID NO: 713624 - DNA, 25 bp, Homo sapien
acgtggccttaagaggcagctgtga

SEQ ID NO: 713625 - DNA, 25 bp, Homo sapien
cagcatccagggaacgtggccttaa

SEQ ID NO: 713626 - DNA, 25 bp, Homo sapien
agagccagacaaggatgagagtgct

SEQ ID NO: 713627 - DNA, 25 bp, Homo sapien
gagggcagtctgcaaggccatgtca

SEQ ID NO: 713628 - DNA, 25 bp, Homo sapien
tgagctctggtctggaccctacatg

SEQ ID NO: 713629 - DNA, 25 bp, Homo sapien
gagctctggtctggaccctacatgc

SEQ ID NO: 713630 - DNA, 25 bp, Homo sapien
gcagtgggtgtcagcaacacatctg

SEQ ID NO: 713631 - DNA, 25 bp, Homo sapien
gctctggtctggaccctacatgccc

SEQ ID NO: 713632 - DNA, 25 bp, Homo sapien
taccctgcctgaggctcgggacttg

SEQ ID NO: 713633 - DNA, 25 bp, Homo sapien
cagccacgaggtaccctgcctgagg

SEQ ID NO: 713634 - DNA, 25 bp, Homo sapien
acccagaccctcaggactgttccct

SEQ ID NO: 713635 - DNA, 25 bp, Homo sapien
ctcgggacttgatgcgcagtttgtg

SEQ ID NO: 713636 - DNA, 25 bp, Homo sapien
caagctcaagggcatggaattcaga

SEQ ID NO: 713637 - DNA, 25 bp, Homo sapien
tcatggggtgttgaggagacatttc

SEQ ID NO: 713638 - DNA, 25 bp, Homo sapien
atggggtgttgaggagacatttctt

SEQ ID NO: 713639 - DNA, 25 bp, Homo sapien
ccaagctcaagggcatggaattcag

SEQ ID NO: 713640 - DNA, 25 bp, Homo sapien
agactacctgcaatgccaccttctc

SEQ ID NO: 713641 - DNA, 25 bp, Homo sapien
gactacctgcaatgccaccttctca

SEQ ID NO: 713642 - DNA, 25 bp, Homo sapien
ccagccatcaaagactacctgcaat

SEQ ID NO: 713643 - DNA, 25 bp, Homo sapien
ttcttctaccactcgcccaccccac

SEQ ID NO: 713644 - DNA, 25 bp, Homo sapien
tcttcttctaccactcgcccacccc

SEQ ID NO: 713645 - DNA, 25 bp, Homo sapien
cttcttctaccactcgcccacccca

SEQ ID NO: 713646 - DNA, 25 bp, Homo sapien
aaatgtgggtctagagtggtccctt

SEQ ID NO: 713647 - DNA, 25 bp, Homo sapien
tgtgggtctagagtggtccctttgc

SEQ ID NO: 713648 - DNA, 25 bp, Homo sapien
tcccgttttcctcagggatgccaaa

SEQ ID NO: 713649 - DNA, 25 bp, Homo sapien
tttcccgttttcctcagggatgcca

SEQ ID NO: 713650 - DNA, 25 bp, Homo sapien
ggtggtcccactgtctttgatgcat

SEQ ID NO: 713651 - DNA, 25 bp, Homo sapien
aggtggtcccactgtctttgatgca

SEQ ID NO: 713652 - DNA, 25 bp, Homo sapien
caggtggtcccactgtctttgatgc

SEQ ID NO: 713653 - DNA, 25 bp, Homo sapien
gccaaggtcaacaccctgattcagc

SEQ ID NO: 713654 - DNA, 25 bp, Homo sapien
tggccaaggtcaacaccctgattca

SEQ ID NO: 713655 - DNA, 25 bp, Homo sapien
ctatgacatggatgtggccaaggtc

SEQ ID NO: 713656 - DNA, 25 bp, Homo sapien
atgacatggatgtggccaaggtcaa

SEQ ID NO: 713657 - DNA, 25 bp, Homo sapien
cactgagtccaccatcaagaagata

SEQ ID NO: 713658 - DNA, 25 bp, Homo sapien
gcaatcatcacgttgccgctgacca

SEQ ID NO: 713659 - DNA, 25 bp, Homo sapien
cagatcaaacagcatgtgaagtagc

SEQ ID NO: 713660 - DNA, 25 bp, Homo sapien
gcttggccactctgcaatcatcacg

SEQ ID NO: 713661 - DNA, 25 bp, Homo sapien
accaaagctgaggtcagataccaaa

SEQ ID NO: 713662 - DNA, 25 bp, Homo sapien
aagctgaggtcagataccaaaaggg

SEQ ID NO: 713663 - DNA, 25 bp, Homo sapien
caaagctgaggtcagataccaaaag

SEQ ID NO: 713664 - DNA, 25 bp, Homo sapien
ttaaccaaagctgaggtcagatacc

SEQ ID NO: 713665 - DNA, 25 bp, Homo sapien
tatgacaaacatgacagccaccagg

SEQ ID NO: 713666 - DNA, 25 bp, Homo sapien
agaagaggagctggcgtgatcctga

SEQ ID NO: 713667 - DNA, 25 bp, Homo sapien
tgaagaggcccaccagaatgaagtc

SEQ ID NO: 713668 - DNA, 25 bp, Homo sapien
tgaggccaccgactgattcacatcc

SEQ ID NO: 713669 - DNA, 25 bp, Homo sapien
gtccacacggatcaagaagagaaga

SEQ ID NO: 713670 - DNA, 25 bp, Homo sapien
gagaagaacggtgttgcccagaagg

SEQ ID NO: 713671 - DNA, 25 bp, Homo sapien
agagaagaacggtgttgcccagaag

SEQ ID NO: 713672 - DNA, 25 bp, Homo sapien
aagagaagaacggtgttgcccagaa

SEQ ID NO: 713673 - DNA, 25 bp, Homo sapien
caatgtcaaacagggagagctggct

SEQ ID NO: 713674 - DNA, 25 bp, Homo sapien
ggagcattaggatcagcacccctga

SEQ ID NO: 713675 - DNA, 25 bp, Homo sapien
taaaagagccccactaccgtgatgt

SEQ ID NO: 713676 - DNA, 25 bp, Homo sapien
ggaagaatatttgagctgcaccacc

SEQ ID NO: 713677 - DNA, 25 bp, Homo sapien
ctgagtccagctctgctaagcactt

SEQ ID NO: 713678 - DNA, 25 bp, Homo sapien
cctgagtccagctctgctaagcact

SEQ ID NO: 713679 - DNA, 25 bp, Homo sapien
gcactttgaccaaagccatccacac

SEQ ID NO: 713680 - DNA, 25 bp, Homo sapien
caatcttatagtttttcctgaagcc

SEQ ID NO: 713681 - DNA, 25 bp, Homo sapien
actgtgtggaacatctcctggcttg

SEQ ID NO: 713682 - DNA, 25 bp, Homo sapien
cctggcaatgagaagtaagtcgaag

SEQ ID NO: 713683 - DNA, 25 bp, Homo sapien
gttttttcgcactcccctggcaatg

SEQ ID NO: 713684 - DNA, 25 bp, Homo sapien
tcagaaatgcggaataccctacagc

SEQ ID NO: 713685 - DNA, 25 bp, Homo sapien
catctgtagattggactgctggctc

SEQ ID NO: 713686 - DNA, 25 bp, Homo sapien
gaaagccttcagtgctatcagcagg

SEQ ID NO: 713687 - DNA, 25 bp, Homo sapien
tcagcagggattcatgtgacagctc

SEQ ID NO: 713688 - DNA, 25 bp, Homo sapien
tgggcacaatagcattcatacaggg

SEQ ID NO: 713689 - DNA, 25 bp, Homo sapien
tgaatgtcacgattgtgggaaaacc

SEQ ID NO: 713690 - DNA, 25 bp, Homo sapien
aaaagccacaagaggattcacacgg

SEQ ID NO: 713691 - DNA, 25 bp, Homo sapien
gagctcctatctgacacagcacgta

SEQ ID NO: 713692 - DNA, 25 bp, Homo sapien
ggagttcttattaggcacatatatg

SEQ ID NO: 713693 - DNA, 25 bp, Homo sapien
catgtgcatttgagatgaatatgga

SEQ ID NO: 713694 - DNA, 25 bp, Homo sapien
acagtatgtacacatgctccgcaac

SEQ ID NO: 713695 - DNA, 25 bp, Homo sapien
tgtctttgaatataaagcaagtgtc

SEQ ID NO: 713696 - DNA, 25 bp, Homo sapien
ggagagagcttcgagcacagacagc

SEQ ID NO: 713697 - DNA, 25 bp, Homo sapien
gaagatgccacatcaggcttgaggg

SEQ ID NO: 713698 - DNA, 25 bp, Homo sapien
gccagataggaaatagcgccagagt

SEQ ID NO: 713699 - DNA, 25 bp, Homo sapien
gaagccagattgcaccgtgtgagga

SEQ ID NO: 713700 - DNA, 25 bp, Homo sapien
tattggagataatctctctgaatac

SEQ ID NO: 713701 - DNA, 25 bp, Homo sapien
tgcaggttttgccatcgaaagtaat

SEQ ID NO: 713702 - DNA, 25 bp, Homo sapien
ctctctgaatacctagaaatctttt

SEQ ID NO: 713703 - DNA, 25 bp, Homo sapien
caggttttgccatcgaaagtaatgg

SEQ ID NO: 713704 - DNA, 25 bp, Homo sapien
ctacaacaaggtttcagcaggctct

SEQ ID NO: 713705 - DNA, 25 bp, Homo sapien
tgagtacagtgtggaacctacaaca

SEQ ID NO: 713706 - DNA, 25 bp, Homo sapien
tgtagaagaactcctcgtgggcttt

SEQ ID NO: 713707 - DNA, 25 bp, Homo sapien
tcaagctcagattcgtgttgaagcc

SEQ ID NO: 713708 - DNA, 25 bp, Homo sapien
tccccagaccggaagcggaagcgcg

SEQ ID NO: 713709 - DNA, 25 bp, Homo sapien
tccagggagccgtgtttcggttcat

SEQ ID NO: 713710 - DNA, 25 bp, Homo sapien
ggccgggctcggtgagcgactggcg

SEQ ID NO: 713711 - DNA, 25 bp, Homo sapien
cgcgagtcggcgcttttggccccgc

SEQ ID NO: 713712 - DNA, 25 bp, Homo sapien
taagcaaactagaacacctctgccc

SEQ ID NO: 713713 - DNA, 25 bp, Homo sapien
caacacgctcgactctgcgaggctg

SEQ ID NO: 713714 - DNA, 25 bp, Homo sapien
ggcctggtacggcctcagccggttc

SEQ ID NO: 713715 - DNA, 25 bp, Homo sapien
gaactggtctctgcccaatcagcct

SEQ ID NO: 713716 - DNA, 25 bp, Homo sapien
ctgaaagaccgtggtgggagaatat

SEQ ID NO: 713717 - DNA, 25 bp, Homo sapien
gtatcaacaatctagggatccaagg

SEQ ID NO: 713718 - DNA, 25 bp, Homo sapien
catgtccacactatatctggaaaga

SEQ ID NO: 713719 - DNA, 25 bp, Homo sapien
tgttaaatcactatgttctgccttg

SEQ ID NO: 713720 - DNA, 25 bp, Homo sapien
atagcatttattccatgaatatgac

SEQ ID NO: 713721 - DNA, 25 bp, Homo sapien
gggggaggtaatagcatttattcca

SEQ ID NO: 713722 - DNA, 25 bp, Homo sapien
gcatttattccatgaatatgactac

SEQ ID NO: 713723 - DNA, 25 bp, Homo sapien
catttattccatgaatatgactacg

SEQ ID NO: 713724 - DNA, 25 bp, Homo sapien
ctatgtctcctatctcctcacctcc

SEQ ID NO: 713725 - DNA, 25 bp, Homo sapien
catctatgtctcctatctcctcacc

SEQ ID NO: 713726 - DNA, 25 bp, Homo sapien
tacatctatgtctcctatctcctca

SEQ ID NO: 713727 - DNA, 25 bp, Homo sapien
tctatgtctcctatctcctcacctc

SEQ ID NO: 713728 - DNA, 25 bp, Homo sapien
ctctgtgacgccatggctaccaccg

SEQ ID NO: 713729 - DNA, 25 bp, Homo sapien
tctctgtgacgccatggctaccacc

SEQ ID NO: 713730 - DNA, 25 bp, Homo sapien
ttctctgtgacgccatggctaccac

SEQ ID NO: 713731 - DNA, 25 bp, Homo sapien
gcacagaaagttcaaggtcaaaatc

SEQ ID NO: 713732 - DNA, 25 bp, Homo sapien
tgcttcctgggacatcatcaggcag

SEQ ID NO: 713733 - DNA, 25 bp, Homo sapien
gtcaagcacagaaagttcaaggtca

SEQ ID NO: 713734 - DNA, 25 bp, Homo sapien
atcatcaggcagatttgagtcaagc

SEQ ID NO: 713735 - DNA, 25 bp, Homo sapien
tcaaagggattgaggtgctcaagcc

SEQ ID NO: 713736 - DNA, 25 bp, Homo sapien
tgtaactggacattctcaaagggat

SEQ ID NO: 713737 - DNA, 25 bp, Homo sapien
cattggtttacacagtcacgttgct

SEQ ID NO: 713738 - DNA, 25 bp, Homo sapien
gatggtatctgacctcattgccagg

SEQ ID NO: 713739 - DNA, 25 bp, Homo sapien
caaggtattggcaagatccaaagtg

SEQ ID NO: 713740 - DNA, 25 bp, Homo sapien
ggcaagatccaaagtgcttgaaagt

SEQ ID NO: 713741 - DNA, 25 bp, Homo sapien
gatccacctgtgtaactagggacaa

SEQ ID NO: 713742 - DNA, 25 bp, Homo sapien
agagatccacctgtgtaactaggga

SEQ ID NO: 713743 - DNA, 25 bp, Homo sapien
cctctgcaggaattatctccaccgc

SEQ ID NO: 713744 - DNA, 25 bp, Homo sapien
tctgcaggaattatctccaccgcat

SEQ ID NO: 713745 - DNA, 25 bp, Homo sapien
ctctgcaggaattatctccaccgca

SEQ ID NO: 713746 - DNA, 25 bp, Homo sapien
ccctctgcaggaattatctccaccg

SEQ ID NO: 713747 - DNA, 25 bp, Homo sapien
tgtttcctgatatcttcctcagtaa

SEQ ID NO: 713748 - DNA, 25 bp, Homo sapien
ttagcgagtccatccgcaatcagtg

SEQ ID NO: 713749 - DNA, 25 bp, Homo sapien
tttctctgcctcattagcgagtcca

SEQ ID NO: 713750 - DNA, 25 bp, Homo sapien
caatcagtgctattgcgagtctctc

SEQ ID NO: 713751 - DNA, 25 bp, Homo sapien
agcgtttttcaggacggccttcttg

SEQ ID NO: 713752 - DNA, 25 bp, Homo sapien
ttttcaggacggccttcttggtctc

SEQ ID NO: 713753 - DNA, 25 bp, Homo sapien
caggacggccttcttggtctctcac

SEQ ID NO: 713754 - DNA, 25 bp, Homo sapien
ttcaggacggccttcttggtctctc

SEQ ID NO: 713755 - DNA, 25 bp, Homo sapien
ttcatctgcactatcttcccttttt

SEQ ID NO: 713756 - DNA, 25 bp, Homo sapien
atgttaataaaggattacactttat

SEQ ID NO: 713757 - DNA, 25 bp, Homo sapien
tttcatctgcactatcttccctttt

SEQ ID NO: 713758 - DNA, 25 bp, Homo sapien
gagatgttaataaaggattacactt

SEQ ID NO: 713759 - DNA, 25 bp, Homo sapien
taaagtttcaagagcttaaagcaaa

SEQ ID NO: 713760 - DNA, 25 bp, Homo sapien
caaaaaaacctcattggggacactg

SEQ ID NO: 713761 - DNA, 25 bp, Homo sapien
aaaaacctcattggggacactgcaa

SEQ ID NO: 713762 - DNA, 25 bp, Homo sapien
tttaaagtttcaagagcttaaagca

SEQ ID NO: 713763 - DNA, 25 bp, Homo sapien
attactagacagtagcccctcctct

SEQ ID NO: 713764 - DNA, 25 bp, Homo sapien
gcacctcagttgaaataccggccac

SEQ ID NO: 713765 - DNA, 25 bp, Homo sapien
tcctgtgtcctccacattactagac

SEQ ID NO: 713766 - DNA, 25 bp, Homo sapien
tgaaataccggccacctctgaaatc

SEQ ID NO: 713767 - DNA, 25 bp, Homo sapien
gggcacaagctcagaacctgaaacc

SEQ ID NO: 713768 - DNA, 25 bp, Homo sapien
agctgaaatactggccatcactgaa

SEQ ID NO: 713769 - DNA, 25 bp, Homo sapien
ccgtttcttccacattaccagacag

SEQ ID NO: 713770 - DNA, 25 bp, Homo sapien
tccactcttcttcgcttcctgtgac

SEQ ID NO: 713771 - DNA, 25 bp, Homo sapien
tcctccacattaccagagagcatct

SEQ ID NO: 713772 - DNA, 25 bp, Homo sapien
tgtgacttcactcctcacgtctggc

SEQ ID NO: 713773 - DNA, 25 bp, Homo sapien
cacgtctggcttggcaaaaactaca

SEQ ID NO: 713774 - DNA, 25 bp, Homo sapien
tacagatatgttgcacaaaagctca

SEQ ID NO: 713775 - DNA, 25 bp, Homo sapien
tactgaggtgttggacgcaagtgca

SEQ ID NO: 713776 - DNA, 25 bp, Homo sapien
caccaggccaagtgaagactactga

SEQ ID NO: 713777 - DNA, 25 bp, Homo sapien
ttaccagcaagtagccactcctctt

SEQ ID NO: 713778 - DNA, 25 bp, Homo sapien
tcttccacattaccagcaagtagcc

SEQ ID NO: 713779 - DNA, 25 bp, Homo sapien
tcagacccatataaagccacatccg

SEQ ID NO: 713780 - DNA, 25 bp, Homo sapien
gactcaatagtttccacatcaatgc

SEQ ID NO: 713781 - DNA, 25 bp, Homo sapien
tcacttccacctcgggggactcaat

SEQ ID NO: 713782 - DNA, 25 bp, Homo sapien
acatccgcagtagttatcacttcca

SEQ ID NO: 713783 - DNA, 25 bp, Homo sapien
gattacagacatattacgtacacgc

SEQ ID NO: 713784 - DNA, 25 bp, Homo sapien
ctctggcctagtgaagattacagac

SEQ ID NO: 713785 - DNA, 25 bp, Homo sapien
ttacgtacacgcttggaacctgtga

SEQ ID NO: 713786 - DNA, 25 bp, Homo sapien
agcagcacctcagataagatactgg

SEQ ID NO: 713787 - DNA, 25 bp, Homo sapien
cactcctttgacaggtagatgttat

SEQ ID NO: 713788 - DNA, 25 bp, Homo sapien
ctcctttgacaggtagatgttattt

SEQ ID NO: 713789 - DNA, 25 bp, Homo sapien
tcactcctttgacaggtagatgtta

SEQ ID NO: 713790 - DNA, 25 bp, Homo sapien
cctttgacaggtagatgttattttc

SEQ ID NO: 713791 - DNA, 25 bp, Homo sapien
gctgctgaatagttctctcctcctt

SEQ ID NO: 713792 - DNA, 25 bp, Homo sapien
ggtgctgctgaatagttctctcctc

SEQ ID NO: 713793 - DNA, 25 bp, Homo sapien
atttcttcttgtagtgactgattca

SEQ ID NO: 713794 - DNA, 25 bp, Homo sapien
actgattcactatttggtgctgctg

SEQ ID NO: 713795 - DNA, 25 bp, Homo sapien
gggctgtaaccctcagtcactgtca

SEQ ID NO: 713796 - DNA, 25 bp, Homo sapien
ctgtcagcccctggcaaaaatctga

SEQ ID NO: 713797 - DNA, 25 bp, Homo sapien
aaatctgacagtgtgaactgagtca

SEQ ID NO: 713798 - DNA, 25 bp, Homo sapien
gtcactgtcacgtcctcatacctga

SEQ ID NO: 713799 - DNA, 25 bp, Homo sapien
gcgtgtggctccagatagaagtgtt

SEQ ID NO: 713800 - DNA, 25 bp, Homo sapien
ggtcggtgtggcgttagtgacaggg

SEQ ID NO: 713801 - DNA, 25 bp, Homo sapien
agtaactctgactgtgggtcggtgt

SEQ ID NO: 713802 - DNA, 25 bp, Homo sapien
atgagtaactctgactgtgggtcgg

SEQ ID NO: 713803 - DNA, 25 bp, Homo sapien
acaggtaaggggatctcttgctcct

SEQ ID NO: 713804 - DNA, 25 bp, Homo sapien
ccacaggtaaggggatctcttgctc

SEQ ID NO: 713805 - DNA, 25 bp, Homo sapien
aggtaaggggatctcttgctccttc

SEQ ID NO: 713806 - DNA, 25 bp, Homo sapien
cacaggtaaggggatctcttgctcc

SEQ ID NO: 713807 - DNA, 25 bp, Homo sapien
ttcaaaccggaagcaaggccatctc

SEQ ID NO: 713808 - DNA, 25 bp, Homo sapien
atcagcatagactcccacttccaca

SEQ ID NO: 713809 - DNA, 25 bp, Homo sapien
caaggccatctcttatccctgataa

SEQ ID NO: 713810 - DNA, 25 bp, Homo sapien
gaagcaaggccatctcttatccctg

SEQ ID NO: 713811 - DNA, 25 bp, Homo sapien
gattatgacgctgtccacgatgcca

SEQ ID NO: 713812 - DNA, 25 bp, Homo sapien
tcacagaggtgtccgtgcacgaaag

SEQ ID NO: 713813 - DNA, 25 bp, Homo sapien
cagacaaagggcgtggctatcacca

SEQ ID NO: 713814 - DNA, 25 bp, Homo sapien
cacaaggatgcgagcataggaggcc

SEQ ID NO: 713815 - DNA, 25 bp, Homo sapien
atcctgatatattttgcagcttgca

SEQ ID NO: 713816 - DNA, 25 bp, Homo sapien
catcctgatatattttgcagcttgc

SEQ ID NO: 713817 - DNA, 25 bp, Homo sapien
acatcctgatatattttgcagcttg

SEQ ID NO: 713818 - DNA, 25 bp, Homo sapien
aacatcctgatatattttgcagctt

SEQ ID NO: 713819 - DNA, 25 bp, Homo sapien
ttaaagtctatttgatagtggtgga

SEQ ID NO: 713820 - DNA, 25 bp, Homo sapien
ttctcagcacgtagaagaagaaatg

SEQ ID NO: 713821 - DNA, 25 bp, Homo sapien
tctatttgatagtggtggataagtt

SEQ ID NO: 713822 - DNA, 25 bp, Homo sapien
ttttgatgtggataatcatgtttta

SEQ ID NO: 713823 - DNA, 25 bp, Homo sapien
cagtcatggcctacgaccgctatgt

SEQ ID NO: 713824 - DNA, 25 bp, Homo sapien
ttcatgagcactatggatgccctgg

SEQ ID NO: 713825 - DNA, 25 bp, Homo sapien
tgaacatccaagctcagaatcagag

SEQ ID NO: 713826 - DNA, 25 bp, Homo sapien
tcagagtatcacttacacaggctgc

SEQ ID NO: 713827 - DNA, 25 bp, Homo sapien
agagagtaatggcttccgcttcact

SEQ ID NO: 713828 - DNA, 25 bp, Homo sapien
tccagagagtaatggcttccgcttc

SEQ ID NO: 713829 - DNA, 25 bp, Homo sapien
tcggggcaatcgactccagagagta

SEQ ID NO: 713830 - DNA, 25 bp, Homo sapien
gtgtctcggggcaatcgactccaga

SEQ ID NO: 713831 - DNA, 25 bp, Homo sapien
ggccgaaagaattcgccgctgaccc

SEQ ID NO: 713832 - DNA, 25 bp, Homo sapien
gggagcggaggtgacggaagccgcc

SEQ ID NO: 713833 - DNA, 25 bp, Homo sapien
gaagttcatacgggaggtccagtct

SEQ ID NO: 713834 - DNA, 25 bp, Homo sapien
ccgccgatgcgaagagaagttcata

SEQ ID NO: 713835 - DNA, 25 bp, Homo sapien
cgccagataggcctcccgtgacccc

SEQ ID NO: 713836 - DNA, 25 bp, Homo sapien
agataggcctcccgtgacccctgga

SEQ ID NO: 713837 - DNA, 25 bp, Homo sapien
ccagataggcctcccgtgacccctg

SEQ ID NO: 713838 - DNA, 25 bp, Homo sapien
gataggcctcccgtgacccctggaa

SEQ ID NO: 713839 - DNA, 25 bp, Homo sapien
tgatcgcgagatctaaacgcacccc

SEQ ID NO: 713840 - DNA, 25 bp, Homo sapien
ggtgatttctcctcgcgatgtccaa

SEQ ID NO: 713841 - DNA, 25 bp, Homo sapien
aattttatccttcgcgtccccagct

SEQ ID NO: 713842 - DNA, 25 bp, Homo sapien
tgactacagcgcagaaagaaggtga

SEQ ID NO: 713843 - DNA, 25 bp, Homo sapien
catgaagatggtccacccaggatca

SEQ ID NO: 713844 - DNA, 25 bp, Homo sapien
taaacactctggtcctagacttctg

SEQ ID NO: 713845 - DNA, 25 bp, Homo sapien
tcactttagagattcgcggccacct

SEQ ID NO: 713846 - DNA, 25 bp, Homo sapien
gaggcctgcgatcatttaggatggc

SEQ ID NO: 713847 - DNA, 25 bp, Homo sapien
tcagagaatggcagtcagtttgcct

SEQ ID NO: 713848 - DNA, 25 bp, Homo sapien
cagagaatggcagtcagtttgcctg

SEQ ID NO: 713849 - DNA, 25 bp, Homo sapien
caaatgtgggggacagagctgccat

SEQ ID NO: 713850 - DNA, 25 bp, Homo sapien
ctgctggggctctgttcccacccct

SEQ ID NO: 713851 - DNA, 25 bp, Homo sapien
aagaccctcagcagacacagtcact

SEQ ID NO: 713852 - DNA, 25 bp, Homo sapien
cagcagacacagtcactggggtggc

SEQ ID NO: 713853 - DNA, 25 bp, Homo sapien
accctcagcagacacagtcactggg

SEQ ID NO: 713854 - DNA, 25 bp, Homo sapien
gcaccctcttcatgcatgaatgata

SEQ ID NO: 713855 - DNA, 25 bp, Homo sapien
atgaatgataaggacactggcctgc

SEQ ID NO: 713856 - DNA, 25 bp, Homo sapien
atgataaggacactggcctgctccc

SEQ ID NO: 713857 - DNA, 25 bp, Homo sapien
ctgcaccctcttcatgcatgaatga

SEQ ID NO: 713858 - DNA, 25 bp, Homo sapien
gagacaggtggaatcctgggtggac

SEQ ID NO: 713859 - DNA, 25 bp, Homo sapien
tccagaccactgcacacgaacaggt

SEQ ID NO: 713860 - DNA, 25 bp, Homo sapien
ctgggaaccaacactgggtgtgtga

SEQ ID NO: 713861 - DNA, 25 bp, Homo sapien
cacacgaacaggtccaaattctggg

SEQ ID NO: 713862 - DNA, 25 bp, Homo sapien
tagggacccagagatcttagtgcac

SEQ ID NO: 713863 - DNA, 25 bp, Homo sapien
tcctgtgccgtcacttcagatgcaa

SEQ ID NO: 713864 - DNA, 25 bp, Homo sapien
gcatgagagacccaacacaggattt

SEQ ID NO: 713865 - DNA, 25 bp, Homo sapien
tgagatgaagctctgcaagaattcc

SEQ ID NO: 713866 - DNA, 25 bp, Homo sapien
aaagtccacagcgacatcttggaaa

SEQ ID NO: 713867 - DNA, 25 bp, Homo sapien
ccttctcggtaaagtccacagcgac

SEQ ID NO: 713868 - DNA, 25 bp, Homo sapien
gcaagggccactccttctcggtaaa

SEQ ID NO: 713869 - DNA, 25 bp, Homo sapien
cagcaagggccactccttctcggta

SEQ ID NO: 713870 - DNA, 25 bp, Homo sapien
gaagtgaggttgctgtagttctcca

SEQ ID NO: 713871 - DNA, 25 bp, Homo sapien
agtgaggttgctgtagttctccagc

SEQ ID NO: 713872 - DNA, 25 bp, Homo sapien
tgaggttgctgtagttctccagcat

SEQ ID NO: 713873 - DNA, 25 bp, Homo sapien
ccagtgaagtgaggttgctgtagtt

SEQ ID NO: 713874 - DNA, 25 bp, Homo sapien
ttccagtagcctgggctcaacactt

SEQ ID NO: 713875 - DNA, 25 bp, Homo sapien
tggacaagtctgacttaggagcagc

SEQ ID NO: 713876 - DNA, 25 bp, Homo sapien
tcagtgttctgagggtggacaagtc

SEQ ID NO: 713877 - DNA, 25 bp, Homo sapien
gacacaggttgagggagggccatgc

SEQ ID NO: 713878 - DNA, 25 bp, Homo sapien
tcctcctgctccaagtgtgagatga

SEQ ID NO: 713879 - DNA, 25 bp, Homo sapien
gtgagatgaggctgggtttgccgac

SEQ ID NO: 713880 - DNA, 25 bp, Homo sapien
cctgctccaagtgtgagatgaggct

SEQ ID NO: 713881 - DNA, 25 bp, Homo sapien
tgcacaagcgccctggtgagcgccc

SEQ ID NO: 713882 - DNA, 25 bp, Homo sapien
ttccataagaagtgaccacttggtt

SEQ ID NO: 713883 - DNA, 25 bp, Homo sapien
tgaccacttggttttagatggagtc

SEQ ID NO: 713884 - DNA, 25 bp, Homo sapien
atcgtcacaccactgggcgtttcct

SEQ ID NO: 713885 - DNA, 25 bp, Homo sapien
gaagtgaccacttggttttagatgg

SEQ ID NO: 713886 - DNA, 25 bp, Homo sapien
taaccatctgccgtgcaaacgtgct

SEQ ID NO: 713887 - DNA, 25 bp, Homo sapien
gacaataggtgaatgccaggccaca

SEQ ID NO: 713888 - DNA, 25 bp, Homo sapien
gaagatccagaattatcccacggaa

SEQ ID NO: 713889 - DNA, 25 bp, Homo sapien
gcttttctaacctaggctgccccag

SEQ ID NO: 713890 - DNA, 25 bp, Homo sapien
aagtgctgacaaaggcaattctcat

SEQ ID NO: 713891 - DNA, 25 bp, Homo sapien
gctgacaaaggcaattctcatattc

SEQ ID NO: 713892 - DNA, 25 bp, Homo sapien
ctgttggttaagacgtaagtgctga

SEQ ID NO: 713893 - DNA, 25 bp, Homo sapien
tggttaagacgtaagtgctgacaaa

SEQ ID NO: 713894 - DNA, 25 bp, Homo sapien
ctaccccatagtcgcggcggtgata

SEQ ID NO: 713895 - DNA, 25 bp, Homo sapien
gagcgtattcagtggacttctctcc

SEQ ID NO: 713896 - DNA, 25 bp, Homo sapien
gtgatagggcctcttgccagcgtgc

SEQ ID NO: 713897 - DNA, 25 bp, Homo sapien
tgccaaagacttcgaacaagtgagc

SEQ ID NO: 713898 - DNA, 25 bp, Homo sapien
taaagttggacttccagcggaaggc

SEQ ID NO: 713899 - DNA, 25 bp, Homo sapien
tgtttcctccgggacacgagatcgc

SEQ ID NO: 713900 - DNA, 25 bp, Homo sapien
tgaggtttgaactcgcgctgaaagc

SEQ ID NO: 713901 - DNA, 25 bp, Homo sapien
cgagatcgccaaaggatttcccgca

SEQ ID NO: 713902 - DNA, 25 bp, Homo sapien
tccacacggatgacacaaagagctt

SEQ ID NO: 713903 - DNA, 25 bp, Homo sapien
tttccacacggatgacacaaagagc

SEQ ID NO: 713904 - DNA, 25 bp, Homo sapien
ccacacggatgacacaaagagcttc

SEQ ID NO: 713905 - DNA, 25 bp, Homo sapien
tgatgagagagtacgtgcagtcccg

SEQ ID NO: 713906 - DNA, 25 bp, Homo sapien
gactgagaacccgtgctgtagacca

SEQ ID NO: 713907 - DNA, 25 bp, Homo sapien
taaggtgcgagctcacagaggcttc

SEQ ID NO: 713908 - DNA, 25 bp, Homo sapien
tcctatgggatgagaacgcctcgtc

SEQ ID NO: 713909 - DNA, 25 bp, Homo sapien
ggattctcttgatattggaagaaga

SEQ ID NO: 713910 - DNA, 25 bp, Homo sapien
tagcacaccttactaatctgacaga

SEQ ID NO: 713911 - DNA, 25 bp, Homo sapien
ttagcacaccttactaatctgacag

SEQ ID NO: 713912 - DNA, 25 bp, Homo sapien
ctggattctcttgatattggaagaa

SEQ ID NO: 713913 - DNA, 25 bp, Homo sapien
tggatggtaccagctgcaagaaaac

SEQ ID NO: 713914 - DNA, 25 bp, Homo sapien
gcacggtcgttaaggtggatcttcc

SEQ ID NO: 713915 - DNA, 25 bp, Homo sapien
tgtttaagaacgatccccattcaag

SEQ ID NO: 713916 - DNA, 25 bp, Homo sapien
tactggatctctttgcaaggtgaaa

SEQ ID NO: 713917 - DNA, 25 bp, Homo sapien
taaatctgtcccgaatgtcaaagtc

SEQ ID NO: 713918 - DNA, 25 bp, Homo sapien
cactaggtccttccgttgtgctgaa

SEQ ID NO: 713919 - DNA, 25 bp, Homo sapien
tgtgctgaatggcagaaagacggct

SEQ ID NO: 713920 - DNA, 25 bp, Homo sapien
aaagtcagagtccaccactcgtagg

SEQ ID NO: 713921 - DNA, 25 bp, Homo sapien
attgatattatctgatggccatgaa

SEQ ID NO: 713922 - DNA, 25 bp, Homo sapien
taacatcgggcacgataaaagccat

SEQ ID NO: 713923 - DNA, 25 bp, Homo sapien
tgtgaaggccctgatgccgtgtatg

SEQ ID NO: 713924 - DNA, 25 bp, Homo sapien
aaagaacgtgcattaacatcgggca

SEQ ID NO: 713925 - DNA, 25 bp, Homo sapien
tgggcctgacgagaaactactaaag

SEQ ID NO: 713926 - DNA, 25 bp, Homo sapien
ggctgtggcagtacacacggaccct

SEQ ID NO: 713927 - DNA, 25 bp, Homo sapien
agtacacacggaccctgctgcgctg

SEQ ID NO: 713928 - DNA, 25 bp, Homo sapien
ctggctgtgggcctgacgagaaact

SEQ ID NO: 713929 - DNA, 25 bp, Homo sapien
tacaaaagaagaggtcattagccag

SEQ ID NO: 713930 - DNA, 25 bp, Homo sapien
aaagaagaggtcattagccaggcat

SEQ ID NO: 713931 - DNA, 25 bp, Homo sapien
gagcccaggaatttgcaactgcagg

SEQ ID NO: 713932 - DNA, 25 bp, Homo sapien
aactgcagggagctatgtttacacc

SEQ ID NO: 713933 - DNA, 25 bp, Homo sapien
gaacagcccaaatatgaacggctgt

SEQ ID NO: 713934 - DNA, 25 bp, Homo sapien
gagagtccgagaaggataaactcta

SEQ ID NO: 713935 - DNA, 25 bp, Homo sapien
caggaacagcccaaatatgaacggc

SEQ ID NO: 713936 - DNA, 25 bp, Homo sapien
gagtccgagaaggataaactctaaa

SEQ ID NO: 713937 - DNA, 25 bp, Homo sapien
gacgatgcaagtgctgaaacagatg

SEQ ID NO: 713938 - DNA, 25 bp, Homo sapien
gggacgatgcaagtgctgaaacaga

SEQ ID NO: 713939 - DNA, 25 bp, Homo sapien
tcttggggacgatgcaagtgctgaa

SEQ ID NO: 713940 - DNA, 25 bp, Homo sapien
gatgcaagtgctgaaacagatgtca

SEQ ID NO: 713941 - DNA, 25 bp, Homo sapien
ccaggtgacaaaaaccaggaggcca

SEQ ID NO: 713942 - DNA, 25 bp, Homo sapien
acggtcaggagtagcgtgtccagaa

SEQ ID NO: 713943 - DNA, 25 bp, Homo sapien
tgatcatatagtgcagagggtggca

SEQ ID NO: 713944 - DNA, 25 bp, Homo sapien
tcacggtcaggagtagcgtgtccag

SEQ ID NO: 713945 - DNA, 25 bp, Homo sapien
tatatcaacgtgctgttcaggaagg

SEQ ID NO: 713946 - DNA, 25 bp, Homo sapien
cagctggaggatgtacgtcagttcg

SEQ ID NO: 713947 - DNA, 25 bp, Homo sapien
tttacagaagattagatgcatcatc

SEQ ID NO: 713948 - DNA, 25 bp, Homo sapien
cgtcagttcgcagaaaaaatgtgga

SEQ ID NO: 713949 - DNA, 25 bp, Homo sapien
gaagcaattcgtgaataagagaaaa

SEQ ID NO: 713950 - DNA, 25 bp, Homo sapien
ttcccccagatgaggacatcttcct

SEQ ID NO: 713951 - DNA, 25 bp, Homo sapien
cataaaataaagaaacgacggagag

SEQ ID NO: 713952 - DNA, 25 bp, Homo sapien
ttccttatggatgaagcaattcgtg

SEQ ID NO: 713953 - DNA, 25 bp, Homo sapien
gaagagtgagtcaccgcagaagtga

SEQ ID NO: 713954 - DNA, 25 bp, Homo sapien
agtgagtcaccgcagaagtgaagtg

SEQ ID NO: 713955 - DNA, 25 bp, Homo sapien
gagtcaccgcagaagtgaagtggac

SEQ ID NO: 713956 - DNA, 25 bp, Homo sapien
tcaccgcagaagtgaagtggacccc

SEQ ID NO: 713957 - DNA, 25 bp, Homo sapien
tcaacatgggggtgaccacagtgta

SEQ ID NO: 713958 - DNA, 25 bp, Homo sapien
ggttcaacatgggggtgaccacagt

SEQ ID NO: 713959 - DNA, 25 bp, Homo sapien
ggggttcaacatgggggtgaccaca

SEQ ID NO: 713960 - DNA, 25 bp, Homo sapien
caacatgggggtgaccacagtgtac

SEQ ID NO: 713961 - DNA, 25 bp, Homo sapien
acaaacaagaggctgccctgctgag

SEQ ID NO: 713962 - DNA, 25 bp, Homo sapien
ctgctgaggagactccccagggctc

SEQ ID NO: 713963 - DNA, 25 bp, Homo sapien
ggctgccctgctgaggagactcccc

SEQ ID NO: 713964 - DNA, 25 bp, Homo sapien
tcacaaacaagaggctgccctgctg

SEQ ID NO: 713965 - DNA, 25 bp, Homo sapien
gaataagagactactaccacttggg

SEQ ID NO: 713966 - DNA, 25 bp, Homo sapien
taagaactctgtgccaccacttgag

SEQ ID NO: 713967 - DNA, 25 bp, Homo sapien
taattggtacgccaaaagctcagac

SEQ ID NO: 713968 - DNA, 25 bp, Homo sapien
cataggacagaagtgccatcaagga

SEQ ID NO: 713969 - DNA, 25 bp, Homo sapien
gacaggaacagcccaaagaggatgg

SEQ ID NO: 713970 - DNA, 25 bp, Homo sapien
acaggaacagcccaaagaggatggg

SEQ ID NO: 713971 - DNA, 25 bp, Homo sapien
aaaccgatgtcagccaaggacaggt

SEQ ID NO: 713972 - DNA, 25 bp, Homo sapien
gacagtggtggaggggaaaccgatg

SEQ ID NO: 713973 - DNA, 25 bp, Homo sapien
tgatgagaaggttccccagcaccat

SEQ ID NO: 713974 - DNA, 25 bp, Homo sapien
agagctgacggccaggatgatgaga

SEQ ID NO: 713975 - DNA, 25 bp, Homo sapien
cagaagcatgtcttccatgcatcca

SEQ ID NO: 713976 - DNA, 25 bp, Homo sapien
agaagcatgtcttccatgcatccaa

SEQ ID NO: 713977 - DNA, 25 bp, Homo sapien
gttcatgatgactggataatccaga

SEQ ID NO: 713978 - DNA, 25 bp, Homo sapien
gatgactggataatccagagggtga

SEQ ID NO: 713979 - DNA, 25 bp, Homo sapien
aatttgtaaggcaatccaattgtgc

SEQ ID NO: 713980 - DNA, 25 bp, Homo sapien
ctggataatccagagggtgacagat

SEQ ID NO: 713981 - DNA, 25 bp, Homo sapien
tagactattctgccatgcagctgct

SEQ ID NO: 713982 - DNA, 25 bp, Homo sapien
ttagactattctgccatgcagctgc

SEQ ID NO: 713983 - DNA, 25 bp, Homo sapien
agactattctgccatgcagctgctg

SEQ ID NO: 713984 - DNA, 25 bp, Homo sapien
gagctgcgcttcccctctgctgggc

SEQ ID NO: 713985 - DNA, 25 bp, Homo sapien
tgagctgcgcttcccctctgctggg

SEQ ID NO: 713986 - DNA, 25 bp, Homo sapien
gctgcgcttcccctctgctgggcca

SEQ ID NO: 713987 - DNA, 25 bp, Homo sapien
ctgcgcttcccctctgctgggccat

SEQ ID NO: 713988 - DNA, 25 bp, Homo sapien
aatacccaagtacctatcccacagt

SEQ ID NO: 713989 - DNA, 25 bp, Homo sapien
gaaatacccaagtacctatcccaca

SEQ ID NO: 713990 - DNA, 25 bp, Homo sapien
aaatacccaagtacctatcccacag

SEQ ID NO: 713991 - DNA, 25 bp, Homo sapien
tggatcatctgggagtcccaggagc

SEQ ID NO: 713992 - DNA, 25 bp, Homo sapien
attctaagacacctgtgagattctc

SEQ ID NO: 713993 - DNA, 25 bp, Homo sapien
tgtgagattctctggctctgtgtat

SEQ ID NO: 713994 - DNA, 25 bp, Homo sapien
taagacacctgtgagattctctggc

SEQ ID NO: 713995 - DNA, 25 bp, Homo sapien
aggaacagcccaaagaggacgggct

SEQ ID NO: 713996 - DNA, 25 bp, Homo sapien
ggacaggaacagcccaaagaggacg

SEQ ID NO: 713997 - DNA, 25 bp, Homo sapien
acaggaacagcccaaagaggacggg

SEQ ID NO: 713998 - DNA, 25 bp, Homo sapien
atggacaggaacagcccaaagagga

SEQ ID NO: 713999 - DNA, 25 bp, Homo sapien
gagtctactatgagcctggatgtcc

SEQ ID NO: 714000 - DNA, 25 bp, Homo sapien
tagtagaggcaaaaccgatgtcagc

SEQ ID NO: 714001 - DNA, 25 bp, Homo sapien
gcagcccacgtaagagatgagtcta

SEQ ID NO: 714002 - DNA, 25 bp, Homo sapien
ggagcagactttccatacatgcgaa

SEQ ID NO: 714003 - DNA, 25 bp, Homo sapien
agcaggtaagttgtaacacaatcaa

SEQ ID NO: 714004 - DNA, 25 bp, Homo sapien
acattattctgccgtgcagcctctg

SEQ ID NO: 714005 - DNA, 25 bp, Homo sapien
taagagagcccagccatcatcattt

SEQ ID NO: 714006 - DNA, 25 bp, Homo sapien
catttgagcttgatcccttgaagaa

SEQ ID NO: 714007 - DNA, 25 bp, Homo sapien
ttgagggctcgtgaacaagttcgtc

SEQ ID NO: 714008 - DNA, 25 bp, Homo sapien
tccccaggtgaggtcaataaaagcc

SEQ ID NO: 714009 - DNA, 25 bp, Homo sapien
gaatgttgatgttcctcaccttagt

SEQ ID NO: 714010 - DNA, 25 bp, Homo sapien
atatcaagtgctgacctggtttcct

SEQ ID NO: 714011 - DNA, 25 bp, Homo sapien
tctcctaaaaactccctctgtaagc

SEQ ID NO: 714012 - DNA, 25 bp, Homo sapien
gatgtgtatggcactcccaatatca

SEQ ID NO: 714013 - DNA, 25 bp, Homo sapien
atctgagagtcctaagaggaggaat

SEQ ID NO: 714014 - DNA, 25 bp, Homo sapien
gacaatgttaatgaggagagcatca

SEQ ID NO: 714015 - DNA, 25 bp, Homo sapien
tatgatgaccatgtactgcagtggg

SEQ ID NO: 714016 - DNA, 25 bp, Homo sapien
gagagcatcagagcgggccaccttg

SEQ ID NO: 714017 - DNA, 25 bp, Homo sapien
acaagacaatgttaatgaggagagc

SEQ ID NO: 714018 - DNA, 25 bp, Homo sapien
catagaacaaggagaccacacagag

SEQ ID NO: 714019 - DNA, 25 bp, Homo sapien
aagtcctgttccatagaacaaggag

SEQ ID NO: 714020 - DNA, 25 bp, Homo sapien
ggctgccctgctaaggagtctcccc

SEQ ID NO: 714021 - DNA, 25 bp, Homo sapien
agaggctgccctgctaaggagtctc

SEQ ID NO: 714022 - DNA, 25 bp, Homo sapien
cgtaagagacaagaggctgccctgc

SEQ ID NO: 714023 - DNA, 25 bp, Homo sapien
tgccctgctaaggagtctccccagg

SEQ ID NO: 714024 - DNA, 25 bp, Homo sapien
tcacatttgcttaagggacccatag

SEQ ID NO: 714025 - DNA, 25 bp, Homo sapien
gcttaagggacccatagcatcctct

SEQ ID NO: 714026 - DNA, 25 bp, Homo sapien
tcctcttagttctgaggttgtgtac

SEQ ID NO: 714027 - DNA, 25 bp, Homo sapien
gacccatagcatcctcttagttctg

SEQ ID NO: 714028 - DNA, 25 bp, Homo sapien
cagaggtcttaagcacaggtgcatc

SEQ ID NO: 714029 - DNA, 25 bp, Homo sapien
tagaaatggattccaagaccctgat

SEQ ID NO: 714030 - DNA, 25 bp, Homo sapien
catctgaagcgcattttgaaactat

SEQ ID NO: 714031 - DNA, 25 bp, Homo sapien
cagaaagttttaagcaatggccaga

SEQ ID NO: 714032 - DNA, 25 bp, Homo sapien
tcacacagatcaggggcatgggcag

SEQ ID NO: 714033 - DNA, 25 bp, Homo sapien
gagtctctggcactaaacttcttca

SEQ ID NO: 714034 - DNA, 25 bp, Homo sapien
ccttgtcacacagatcaggggcatg

SEQ ID NO: 714035 - DNA, 25 bp, Homo sapien
gaattaaatggttggtctttgagtc

SEQ ID NO: 714036 - DNA, 25 bp, Homo sapien
agagaattggaaaataggacataag

SEQ ID NO: 714037 - DNA, 25 bp, Homo sapien
tggaaaataggacataagtaaacca

SEQ ID NO: 714038 - DNA, 25 bp, Homo sapien
gaaaataggacataagtaaaccagc

SEQ ID NO: 714039 - DNA, 25 bp, Homo sapien
aaaagagaattggaaaataggacat

SEQ ID NO: 714040 - DNA, 25 bp, Homo sapien
ctgtggctctgtgtagctcggacac

SEQ ID NO: 714041 - DNA, 25 bp, Homo sapien
ttctgtggctctgtgtagctcggac

SEQ ID NO: 714042 - DNA, 25 bp, Homo sapien
agattctgtggctctgtgtagctcg

SEQ ID NO: 714043 - DNA, 25 bp, Homo sapien
gattctgtggctctgtgtagctcgg

SEQ ID NO: 714044 - DNA, 25 bp, Homo sapien
ggcgtgggttcatgatgattcggta

SEQ ID NO: 714045 - DNA, 25 bp, Homo sapien
agaggcgtgggttcatgatgattcg

SEQ ID NO: 714046 - DNA, 25 bp, Homo sapien
tgggttcatgatgattcggtagtgc

SEQ ID NO: 714047 - DNA, 25 bp, Homo sapien
gttcatgatgattcggtagtgcagg

SEQ ID NO: 714048 - DNA, 25 bp, Homo sapien
tatggcacccatgaaatatatgacc

SEQ ID NO: 714049 - DNA, 25 bp, Homo sapien
tcattgatgaaggtgtcggaacacc

SEQ ID NO: 714050 - DNA, 25 bp, Homo sapien
ccttgaagcaggtgagctgtaacat

SEQ ID NO: 714051 - DNA, 25 bp, Homo sapien
tgcaactgggagtccaaaagactaa

SEQ ID NO: 714052 - DNA, 25 bp, Homo sapien
agaaaagattgtgattgcacctgga

SEQ ID NO: 714053 - DNA, 25 bp, Homo sapien
aggtcattgcacagatactaaagga

SEQ ID NO: 714054 - DNA, 25 bp, Homo sapien
tattcacatacgaaacccagagagg

SEQ ID NO: 714055 - DNA, 25 bp, Homo sapien
tgcacctggatatcaaggtcattgc

SEQ ID NO: 714056 - DNA, 25 bp, Homo sapien
gccgtttttggatgcatggaagaca

SEQ ID NO: 714057 - DNA, 25 bp, Homo sapien
cttatgaccggtttgtggacatctg

SEQ ID NO: 714058 - DNA, 25 bp, Homo sapien
aatggaaaccgggaaatagccagat

SEQ ID NO: 714059 - DNA, 25 bp, Homo sapien
caggtatctctttttgccgtttttg

SEQ ID NO: 714060 - DNA, 25 bp, Homo sapien
tgcctggaccaagataatgaatcta

SEQ ID NO: 714061 - DNA, 25 bp, Homo sapien
ggtctgtgatctactttgaataatt

SEQ ID NO: 714062 - DNA, 25 bp, Homo sapien
tgagatctgacacctgtttaagaat

SEQ ID NO: 714063 - DNA, 25 bp, Homo sapien
taatgagcataaagatcaacttgag

SEQ ID NO: 714064 - DNA, 25 bp, Homo sapien
cagtgataattactccacagggcaa

SEQ ID NO: 714065 - DNA, 25 bp, Homo sapien
tactaacatgcatgaagtgtgctaa

SEQ ID NO: 714066 - DNA, 25 bp, Homo sapien
tgtatgtacatgtcctggtaaacag

SEQ ID NO: 714067 - DNA, 25 bp, Homo sapien
tccaagactttaggaagttccttca

SEQ ID NO: 714068 - DNA, 25 bp, Homo sapien
tatttgctcaaaactgaatgttata

SEQ ID NO: 714069 - DNA, 25 bp, Homo sapien
ctgaatgttatagctggacgtgatg

SEQ ID NO: 714070 - DNA, 25 bp, Homo sapien
gctcaaaactgaatgttatagctgg

SEQ ID NO: 714071 - DNA, 25 bp, Homo sapien
caaaactgaatgttatagctggacg

SEQ ID NO: 714072 - DNA, 25 bp, Homo sapien
cgaagagcgcaagtgtcaccggtag

SEQ ID NO: 714073 - DNA, 25 bp, Homo sapien
acgcgcaaaggctaggaccacctag

SEQ ID NO: 714074 - DNA, 25 bp, Homo sapien
aacgcgctgttaagatggcggccgt

SEQ ID NO: 714075 - DNA, 25 bp, Homo sapien
gaaatgctgtttacctccccgaaga

SEQ ID NO: 714076 - DNA, 25 bp, Homo sapien
acgggacaggctccatttcactggg

SEQ ID NO: 714077 - DNA, 25 bp, Homo sapien
tgcccgaaagtgcacgggacaggct

SEQ ID NO: 714078 - DNA, 25 bp, Homo sapien
ttctactctcgcgtggctgcaccgg

SEQ ID NO: 714079 - DNA, 25 bp, Homo sapien
cgcgacttgggagagcccacaagat

SEQ ID NO: 714080 - DNA, 25 bp, Homo sapien
cgcagccgcctcgacccctgaggac

SEQ ID NO: 714081 - DNA, 25 bp, Homo sapien
gagaaaaggcacaacgctggatgtg

SEQ ID NO: 714082 - DNA, 25 bp, Homo sapien
gccgggccctatgaggcttctgcag

SEQ ID NO: 714083 - DNA, 25 bp, Homo sapien
caacgctggatgtggagactttttt

SEQ ID NO: 714084 - DNA, 25 bp, Homo sapien
cacgacagaattgtcaggttgctga

SEQ ID NO: 714085 - DNA, 25 bp, Homo sapien
cgggacacgacagaattgtcaggtt

SEQ ID NO: 714086 - DNA, 25 bp, Homo sapien
caggaggacaccaagcgaaggtcac

SEQ ID NO: 714087 - DNA, 25 bp, Homo sapien
gaaggtcaccgtgaacaggaaggca

SEQ ID NO: 714088 - DNA, 25 bp, Homo sapien
tctgctctgtatgactgagaaaaat

SEQ ID NO: 714089 - DNA, 25 bp, Homo sapien
atctgctctgtatgactgagaaaaa

SEQ ID NO: 714090 - DNA, 25 bp, Homo sapien
ctctgtatgactgagaaaaatcaca

SEQ ID NO: 714091 - DNA, 25 bp, Homo sapien
tctcagagggttctccaaggggcca

SEQ ID NO: 714092 - DNA, 25 bp, Homo sapien
tcagagggttctccaaggggccagt

SEQ ID NO: 714093 - DNA, 25 bp, Homo sapien
ctctcagagggttctccaaggggcc

SEQ ID NO: 714094 - DNA, 25 bp, Homo sapien
ctcagagggttctccaaggggccag

SEQ ID NO: 714095 - DNA, 25 bp, Homo sapien
caaccctagaggagcacaaactgag

SEQ ID NO: 714096 - DNA, 25 bp, Homo sapien
taggaagccctacctctctgttcac

SEQ ID NO: 714097 - DNA, 25 bp, Homo sapien
gaatcacttgcatcccacctgagca

SEQ ID NO: 714098 - DNA, 25 bp, Homo sapien
gacaatttagtctgtgccccttaaa

SEQ ID NO: 714099 - DNA, 25 bp, Homo sapien
tagaatgtagaacttccaagggttg

SEQ ID NO: 714100 - DNA, 25 bp, Homo sapien
gagagccaagaatgcagatacacct

SEQ ID NO: 714101 - DNA, 25 bp, Homo sapien
gatacacctaaataataagctttgc

SEQ ID NO: 714102 - DNA, 25 bp, Homo sapien
gccacataactacaaaatcatacct

SEQ ID NO: 714103 - DNA, 25 bp, Homo sapien
ctatactccaagctattcagaagac

SEQ ID NO: 714104 - DNA, 25 bp, Homo sapien
ctgagcctagggaggtcaatgctgc

SEQ ID NO: 714105 - DNA, 25 bp, Homo sapien
caacacctgagcctagggaggtcaa

SEQ ID NO: 714106 - DNA, 25 bp, Homo sapien
gtgggagcaacacctgagcctaggg

SEQ ID NO: 714107 - DNA, 25 bp, Homo sapien
gtcatcaagcgccattcattagcca

SEQ ID NO: 714108 - DNA, 25 bp, Homo sapien
tcatcaagcgccattcattagccat

SEQ ID NO: 714109 - DNA, 25 bp, Homo sapien
tactcatctgtcatcaagcgccatt

SEQ ID NO: 714110 - DNA, 25 bp, Homo sapien
atctgtcatcaagcgccattcatta

SEQ ID NO: 714111 - DNA, 25 bp, Homo sapien
aatgtgcctgaatatcttgttccca

SEQ ID NO: 714112 - DNA, 25 bp, Homo sapien
gacactgtctgaacttatgggtaag

SEQ ID NO: 714113 - DNA, 25 bp, Homo sapien
gattaagtagtagtgggagtcttgc

SEQ ID NO: 714114 - DNA, 25 bp, Homo sapien
tcccaaagtctcttcgagacactgt

SEQ ID NO: 714115 - DNA, 25 bp, Homo sapien
cacaaagggaaagaccaatggccag

SEQ ID NO: 714116 - DNA, 25 bp, Homo sapien
acaaagggaaagaccaatggccagc

SEQ ID NO: 714117 - DNA, 25 bp, Homo sapien
aaagggaaagaccaatggccagcat

SEQ ID NO: 714118 - DNA, 25 bp, Homo sapien
caaagggaaagaccaatggccagca

SEQ ID NO: 714119 - DNA, 25 bp, Homo sapien
aattttgactcatgaagacagaaaa

SEQ ID NO: 714120 - DNA, 25 bp, Homo sapien
cagaaaacatcttgagaaagatgat

SEQ ID NO: 714121 - DNA, 25 bp, Homo sapien
cctcttcaaattttgactcatgaag

SEQ ID NO: 714122 - DNA, 25 bp, Homo sapien
ttcaaattttgactcatgaagacag

SEQ ID NO: 714123 - DNA, 25 bp, Homo sapien
agagtaatttgtcaaccacccagcc

SEQ ID NO: 714124 - DNA, 25 bp, Homo sapien
taatttgtcaaccacccagccacca

SEQ ID NO: 714125 - DNA, 25 bp, Homo sapien
gagtaatttgtcaaccacccagcca

SEQ ID NO: 714126 - DNA, 25 bp, Homo sapien
agtaatttgtcaaccacccagccac

SEQ ID NO: 714127 - DNA, 25 bp, Homo sapien
caaattccgagaagcacatgtgcat

SEQ ID NO: 714128 - DNA, 25 bp, Homo sapien
gtcatatggcttgaagagcacctct

SEQ ID NO: 714129 - DNA, 25 bp, Homo sapien
tatcagcatggatgacagtcagact

SEQ ID NO: 714130 - DNA, 25 bp, Homo sapien
tgctccagtgacagcacaaattccg

SEQ ID NO: 714131 - DNA, 25 bp, Homo sapien
tgagggaccttgtcttggcatgcct

SEQ ID NO: 714132 - DNA, 25 bp, Homo sapien
cacacacatgctggcgtcaggcaag

SEQ ID NO: 714133 - DNA, 25 bp, Homo sapien
tacgttctccactatgttgactgga

SEQ ID NO: 714134 - DNA, 25 bp, Homo sapien
ggcatgccttgacaagactctttgg

SEQ ID NO: 714135 - DNA, 25 bp, Homo sapien
tgcaactagattcttatagttctcc

SEQ ID NO: 714136 - DNA, 25 bp, Homo sapien
ctactgcaactagattcttatagtt

SEQ ID NO: 714137 - DNA, 25 bp, Homo sapien
ataagtttctctgagtttgatccag

SEQ ID NO: 714138 - DNA, 25 bp, Homo sapien
ctctgagtttgatccagcaaagtcc

SEQ ID NO: 714139 - DNA, 25 bp, Homo sapien
gaaacccaggcttaagctcatacac

SEQ ID NO: 714140 - DNA, 25 bp, Homo sapien
tgtttcgcctgtttaccaatgcagc

SEQ ID NO: 714141 - DNA, 25 bp, Homo sapien
aaatcacaaggcagtaaggtctatg

SEQ ID NO: 714142 - DNA, 25 bp, Homo sapien
gcccattaacaagcagagtctagaa

SEQ ID NO: 714143 - DNA, 25 bp, Homo sapien
tgtttgcatagctagtaccctggtc

SEQ ID NO: 714144 - DNA, 25 bp, Homo sapien
tgatattctccccaaaaaagtacac

SEQ ID NO: 714145 - DNA, 25 bp, Homo sapien
cagactgcacctctcatagatcagg

SEQ ID NO: 714146 - DNA, 25 bp, Homo sapien
ccttggaaaccaattggccttgata

SEQ ID NO: 714147 - DNA, 25 bp, Homo sapien
gaggtgctgaccatttggtattaat

SEQ ID NO: 714148 - DNA, 25 bp, Homo sapien
ccaccacactggatgttttcccctg

SEQ ID NO: 714149 - DNA, 25 bp, Homo sapien
ttggtattaatatgactctcccaat

SEQ ID NO: 714150 - DNA, 25 bp, Homo sapien
acactggatgttttcccctgcaaaa

SEQ ID NO: 714151 - DNA, 25 bp, Homo sapien
tagagcttagctgataacggcccaa

SEQ ID NO: 714152 - DNA, 25 bp, Homo sapien
caaaaacatctgagatacatatggg

SEQ ID NO: 714153 - DNA, 25 bp, Homo sapien
aaatgtctcaaggttattgtgctgc

SEQ ID NO: 714154 - DNA, 25 bp, Homo sapien
tttcagagggcttctaaatagagct

SEQ ID NO: 714155 - DNA, 25 bp, Homo sapien
caaggcatggttcagacctgagtgt

SEQ ID NO: 714156 - DNA, 25 bp, Homo sapien
cctgagtgttttcaagtggaacaaa

SEQ ID NO: 714157 - DNA, 25 bp, Homo sapien
agacctgagtgttttcaagtggaac

SEQ ID NO: 714158 - DNA, 25 bp, Homo sapien
agtgttttcaagtggaacaaagtga

SEQ ID NO: 714159 - DNA, 25 bp, Homo sapien
atgatggttcatagaagttttccaa

SEQ ID NO: 714160 - DNA, 25 bp, Homo sapien
aatgatggttcatagaagttttcca

SEQ ID NO: 714161 - DNA, 25 bp, Homo sapien
gtgaaaattaatgatggttcataga

SEQ ID NO: 714162 - DNA, 25 bp, Homo sapien
tactgtaaggcctgatgagatactg

SEQ ID NO: 714163 - DNA, 25 bp, Homo sapien
ctgacattcaaagggccgttcacca

SEQ ID NO: 714164 - DNA, 25 bp, Homo sapien
gaaggtaagcctttttcacagtcac

SEQ ID NO: 714165 - DNA, 25 bp, Homo sapien
gaaggcttgcccacacttttgacat

SEQ ID NO: 714166 - DNA, 25 bp, Homo sapien
tatgactgtgtacattgccactatg

SEQ ID NO: 714167 - DNA, 25 bp, Homo sapien
aatagtaaggcctatggaaggagcc

SEQ ID NO: 714168 - DNA, 25 bp, Homo sapien
tgttaagatctgagacaccaaggaa

SEQ ID NO: 714169 - DNA, 25 bp, Homo sapien
taggatgcacagacacatgaatagt

SEQ ID NO: 714170 - DNA, 25 bp, Homo sapien
tgtaagcatcgacaggtttcctacg

SEQ ID NO: 714171 - DNA, 25 bp, Homo sapien
cagccagaggacgtgcatttatatc

SEQ ID NO: 714172 - DNA, 25 bp, Homo sapien
tgtgctcacaagctcagtaaggccc

SEQ ID NO: 714173 - DNA, 25 bp, Homo sapien
tcaacacattccttacagccagagg

SEQ ID NO: 714174 - DNA, 25 bp, Homo sapien
ggaaagagtggaactcctcaataat

SEQ ID NO: 714175 - DNA, 25 bp, Homo sapien
ttcattaaaaaaccctctgaggata

SEQ ID NO: 714176 - DNA, 25 bp, Homo sapien
gcatgcctggccagtaccaattttc

SEQ ID NO: 714177 - DNA, 25 bp, Homo sapien
ggcacaaaccagtacacccagttaa

SEQ ID NO: 714178 - DNA, 25 bp, Homo sapien
caaatcagtggatcaggagagtgac

SEQ ID NO: 714179 - DNA, 25 bp, Homo sapien
tgcaaaaccacatgatcgtgccacg

SEQ ID NO: 714180 - DNA, 25 bp, Homo sapien
taaaagggcatgaggaaaccatctg

SEQ ID NO: 714181 - DNA, 25 bp, Homo sapien
gaaggccagtaagcacgtgaaacca

SEQ ID NO: 714182 - DNA, 25 bp, Homo sapien
agctgccgtgagctgagatggtacc

SEQ ID NO: 714183 - DNA, 25 bp, Homo sapien
actgcactccagtctgggtgataca

SEQ ID NO: 714184 - DNA, 25 bp, Homo sapien
gtggaagctgccgtgagctgagatg

SEQ ID NO: 714185 - DNA, 25 bp, Homo sapien
tgggaggtggaagctgccgtgagct

SEQ ID NO: 714186 - DNA, 25 bp, Homo sapien
aaaaagtttgcaggattcaaggtca

SEQ ID NO: 714187 - DNA, 25 bp, Homo sapien
agattgaagtgttggcagatttggc

SEQ ID NO: 714188 - DNA, 25 bp, Homo sapien
tatatactagcactaaaaaattgaa

SEQ ID NO: 714189 - DNA, 25 bp, Homo sapien
tccaaaaagttacaggaatagataa

SEQ ID NO: 714190 - DNA, 25 bp, Homo sapien
cttggaccactgtctgtgagaatgc

SEQ ID NO: 714191 - DNA, 25 bp, Homo sapien
taggcccttctctatcttggaccac

SEQ ID NO: 714192 - DNA, 25 bp, Homo sapien
cccagaagggatgctgagatactct

SEQ ID NO: 714193 - DNA, 25 bp, Homo sapien
caccaaactaaaggtctctgaggtc

SEQ ID NO: 714194 - DNA, 25 bp, Homo sapien
tttccaactacgtatctcagcaaag

SEQ ID NO: 714195 - DNA, 25 bp, Homo sapien
tccaactacgtatctcagcaaagcc

SEQ ID NO: 714196 - DNA, 25 bp, Homo sapien
cttttccaactacgtatctcagcaa

SEQ ID NO: 714197 - DNA, 25 bp, Homo sapien
caactacgtatctcagcaaagccaa

SEQ ID NO: 714198 - DNA, 25 bp, Homo sapien
gagccttcgcaactctgaagcctgt

SEQ ID NO: 714199 - DNA, 25 bp, Homo sapien
ctctagagccttcgcaactctgaag

SEQ ID NO: 714200 - DNA, 25 bp, Homo sapien
tcccagtcagccatctagtacactg

SEQ ID NO: 714201 - DNA, 25 bp, Homo sapien
tcagccatctagtacactgaagaaa

SEQ ID NO: 714202 - DNA, 25 bp, Homo sapien
tccgatgacaacaatactctcattt

SEQ ID NO: 714203 - DNA, 25 bp, Homo sapien
tgatgaagtctactagcaccatttt

SEQ ID NO: 714204 - DNA, 25 bp, Homo sapien
aaggtttgtggccactgatgaagtc

SEQ ID NO: 714205 - DNA, 25 bp, Homo sapien
cctcttatttccgatgacaacaata

SEQ ID NO: 714206 - DNA, 25 bp, Homo sapien
gacccacatggatgtcttcaaggtg

SEQ ID NO: 714207 - DNA, 25 bp, Homo sapien
catggacgcaaacattggtgggagc

SEQ ID NO: 714208 - DNA, 25 bp, Homo sapien
gacaattcccactgagcccttcaag

SEQ ID NO: 714209 - DNA, 25 bp, Homo sapien
cagggagtcaaaggcccagaaactc

SEQ ID NO: 714210 - DNA, 25 bp, Homo sapien
cggattcgccctgaggacttgggaa

SEQ ID NO: 714211 - DNA, 25 bp, Homo sapien
tgcccagctcgcacatttggcggat

SEQ ID NO: 714212 - DNA, 25 bp, Homo sapien
caattaacttgcttgggtctcaaag

SEQ ID NO: 714213 - DNA, 25 bp, Homo sapien
tgctcctgctcccttagggcgaagg

SEQ ID NO: 714214 - DNA, 25 bp, Homo sapien
ctcccgattccgccggcctcactag

SEQ ID NO: 714215 - DNA, 25 bp, Homo sapien
ccgattccgccggcctcactagtgg

SEQ ID NO: 714216 - DNA, 25 bp, Homo sapien
gattccgccggcctcactagtgggg

SEQ ID NO: 714217 - DNA, 25 bp, Homo sapien
tcccgattccgccggcctcactagt

SEQ ID NO: 714218 - DNA, 25 bp, Homo sapien
aggaaccaaagccggcggcctctga

SEQ ID NO: 714219 - DNA, 25 bp, Homo sapien
ccgggaaccaatgcccggaatggca

SEQ ID NO: 714220 - DNA, 25 bp, Homo sapien
ctcccgggaaccaatgcccggaatg

SEQ ID NO: 714221 - DNA, 25 bp, Homo sapien
tctgagaagaaacgccgcgatagcc

SEQ ID NO: 714222 - DNA, 25 bp, Homo sapien
gatccctaggattctaagtacaaga

SEQ ID NO: 714223 - DNA, 25 bp, Homo sapien
ggttgcttgtagatactcgacgttt

SEQ ID NO: 714224 - DNA, 25 bp, Homo sapien
cgacgttttctcatacaccatgaaa

SEQ ID NO: 714225 - DNA, 25 bp, Homo sapien
aagtacaagacacccctttcagcac

SEQ ID NO: 714226 - DNA, 25 bp, Homo sapien
ttgctcgtcagactcttctcccagg

SEQ ID NO: 714227 - DNA, 25 bp, Homo sapien
tccccttgctcgtcagactcttctc

SEQ ID NO: 714228 - DNA, 25 bp, Homo sapien
ccccttgctcgtcagactcttctcc

SEQ ID NO: 714229 - DNA, 25 bp, Homo sapien
ccttgctcgtcagactcttctccca

SEQ ID NO: 714230 - DNA, 25 bp, Homo sapien
gaagtatcataagcccccaagctga

SEQ ID NO: 714231 - DNA, 25 bp, Homo sapien
tagaagtatcataagcccccaagct

SEQ ID NO: 714232 - DNA, 25 bp, Homo sapien
taagcccccaagctgaatacataaa

SEQ ID NO: 714233 - DNA, 25 bp, Homo sapien
atcataagcccccaagctgaataca

SEQ ID NO: 714234 - DNA, 25 bp, Homo sapien
aactacaagccaatatccctactga

SEQ ID NO: 714235 - DNA, 25 bp, Homo sapien
gttcaagatacgcaaaatcaatgtg

SEQ ID NO: 714236 - DNA, 25 bp, Homo sapien
tacaagccaatatccctactgaaaa

SEQ ID NO: 714237 - DNA, 25 bp, Homo sapien
tcaagatacgcaaaatcaatgtgat

SEQ ID NO: 714238 - DNA, 25 bp, Homo sapien
taagaatgcatgtagcccgaaagta

SEQ ID NO: 714239 - DNA, 25 bp, Homo sapien
tcaaaacacatagtggctgactgga

SEQ ID NO: 714240 - DNA, 25 bp, Homo sapien
taccagcttaatgttacacctcaag

SEQ ID NO: 714241 - DNA, 25 bp, Homo sapien
gcagctaagcccaaagtcagtagaa

SEQ ID NO: 714242 - DNA, 25 bp, Homo sapien
ttaaatataaatgtactcaggaggc

SEQ ID NO: 714243 - DNA, 25 bp, Homo sapien
aggagtttgagaccagcctaggcaa

SEQ ID NO: 714244 - DNA, 25 bp, Homo sapien
ccatcaataattactttaaatataa

SEQ ID NO: 714245 - DNA, 25 bp, Homo sapien
tgaggcaggaggatcacttgagagc

SEQ ID NO: 714246 - DNA, 25 bp, Homo sapien
gaatatcttatatcacaccctcacg

SEQ ID NO: 714247 - DNA, 25 bp, Homo sapien
actgctaacagctcaggaggaatga

SEQ ID NO: 714248 - DNA, 25 bp, Homo sapien
ggaggaatgagcctctaaagtgcaa

SEQ ID NO: 714249 - DNA, 25 bp, Homo sapien
catttacccgtgacagaaaccagga

SEQ ID NO: 714250 - DNA, 25 bp, Homo sapien
tcctggctgggcagagtcctaagca

SEQ ID NO: 714251 - DNA, 25 bp, Homo sapien
ggctgggcagagtcctaagcaggca

SEQ ID NO: 714252 - DNA, 25 bp, Homo sapien
ctgggcagagtcctaagcaggcaga

SEQ ID NO: 714253 - DNA, 25 bp, Homo sapien
tcctcctgtaggtttccttcctggc

SEQ ID NO: 714254 - DNA, 25 bp, Homo sapien
gaccaggttgtcagccaccctgcag

SEQ ID NO: 714255 - DNA, 25 bp, Homo sapien
tcctgggaaaagtccactgccactt

SEQ ID NO: 714256 - DNA, 25 bp, Homo sapien
ctgggaaaagtccactgccacttcc

SEQ ID NO: 714257 - DNA, 25 bp, Homo sapien
cctgggaaaagtccactgccacttc

SEQ ID NO: 714258 - DNA, 25 bp, Homo sapien
ccaggttcctaaagttctccagcat

SEQ ID NO: 714259 - DNA, 25 bp, Homo sapien
gccaggttcctaaagttctccagca

SEQ ID NO: 714260 - DNA, 25 bp, Homo sapien
ctgaggccaggttcctaaagttctc

SEQ ID NO: 714261 - DNA, 25 bp, Homo sapien
ctactgaggccaggttcctaaagtt

SEQ ID NO: 714262 - DNA, 25 bp, Homo sapien
gattattaaaatagtcaagtgcagc

SEQ ID NO: 714263 - DNA, 25 bp, Homo sapien
aagcatggtccacgccctatatgga

SEQ ID NO: 714264 - DNA, 25 bp, Homo sapien
tacacaagatgagacacagattgca

SEQ ID NO: 714265 - DNA, 25 bp, Homo sapien
tatatggaagtgacccttgaaacct

SEQ ID NO: 714266 - DNA, 25 bp, Homo sapien
gatccaccttggagatcagactgtg

SEQ ID NO: 714267 - DNA, 25 bp, Homo sapien
cacagtcaccttgtaaaattcctct

SEQ ID NO: 714268 - DNA, 25 bp, Homo sapien
ccaccttggagatcagactgtgtct

SEQ ID NO: 714269 - DNA, 25 bp, Homo sapien
tcttgatccaccttggagatcagac

SEQ ID NO: 714270 - DNA, 25 bp, Homo sapien
ataatatcttctaagtagagaaatg

SEQ ID NO: 714271 - DNA, 25 bp, Homo sapien
ttattgggagaaaaggttgggatca

SEQ ID NO: 714272 - DNA, 25 bp, Homo sapien
tgcatagcaattgtatcttttggtt

SEQ ID NO: 714273 - DNA, 25 bp, Homo sapien
ctgcatagcaattgtatcttttggt

SEQ ID NO: 714274 - DNA, 25 bp, Homo sapien
gcatagcaattgtatcttttggttt

SEQ ID NO: 714275 - DNA, 25 bp, Homo sapien
aactctcccgagacagctttctggt

SEQ ID NO: 714276 - DNA, 25 bp, Homo sapien
cagacttctactacaaagaccagga

SEQ ID NO: 714277 - DNA, 25 bp, Homo sapien
ggtgaaagcctggtgcctgaattct

SEQ ID NO: 714278 - DNA, 25 bp, Homo sapien
tctgtgagccagcaagtgttaacct

SEQ ID NO: 714279 - DNA, 25 bp, Homo sapien
cagtaggtgcgtatgacttttgccc

SEQ ID NO: 714280 - DNA, 25 bp, Homo sapien
catgactgacatgtgtaccattttc

SEQ ID NO: 714281 - DNA, 25 bp, Homo sapien
catgtgtaccattttcagtaggtgc

SEQ ID NO: 714282 - DNA, 25 bp, Homo sapien
aagcacatgatcatgactgacatgt

SEQ ID NO: 714283 - DNA, 25 bp, Homo sapien
aagtggtgactagaggctttttcac

SEQ ID NO: 714284 - DNA, 25 bp, Homo sapien
gagtaagtggtgactagaggctttt

SEQ ID NO: 714285 - DNA, 25 bp, Homo sapien
tgaaaagggagtaagtggtgactag

SEQ ID NO: 714286 - DNA, 25 bp, Homo sapien
gtggtgactagaggctttttcactt

SEQ ID NO: 714287 - DNA, 25 bp, Homo sapien
tgaatgctcacatgactcctaagag

SEQ ID NO: 714288 - DNA, 25 bp, Homo sapien
tctctccagtaggtatttgctcacg

SEQ ID NO: 714289 - DNA, 25 bp, Homo sapien
actcctgaaacttctgtcctgtggg

SEQ ID NO: 714290 - DNA, 25 bp, Homo sapien
taggctgaaggacatatcacattgc

SEQ ID NO: 714291 - DNA, 25 bp, Homo sapien
tggccattgtggattcgcttgtgca

SEQ ID NO: 714292 - DNA, 25 bp, Homo sapien
gagttctcacgtgtaccctcaggca

SEQ ID NO: 714293 - DNA, 25 bp, Homo sapien
tgggttctcacatgtttctgaaggg

SEQ ID NO: 714294 - DNA, 25 bp, Homo sapien
tgactgatcgatgaaggcttttcca

SEQ ID NO: 714295 - DNA, 25 bp, Homo sapien
cagtcagtgtccagcaattatgttc

SEQ ID NO: 714296 - DNA, 25 bp, Homo sapien
taaggtttgtcccagtataacaggc

SEQ ID NO: 714297 - DNA, 25 bp, Homo sapien
ttccaggtgaccataacagggcttc

SEQ ID NO: 714298 - DNA, 25 bp, Homo sapien
gtctgccacagtacatcagtcagtg

SEQ ID NO: 714299 - DNA, 25 bp, Homo sapien
gccgctcacagctgtaagggaagct

SEQ ID NO: 714300 - DNA, 25 bp, Homo sapien
tgtgaacatatttggccgctcacag

SEQ ID NO: 714301 - DNA, 25 bp, Homo sapien
tatttggccgctcacagctgtaagg

SEQ ID NO: 714302 - DNA, 25 bp, Homo sapien
gctgtatccagtgacttctgcctac

SEQ ID NO: 714303 - DNA, 25 bp, Homo sapien
cagttgggactgaaatcagctgaaa

SEQ ID NO: 714304 - DNA, 25 bp, Homo sapien
tggtttaaaccacatggcagttaat

SEQ ID NO: 714305 - DNA, 25 bp, Homo sapien
tgaaagaggaacttcccacaagagt

SEQ ID NO: 714306 - DNA, 25 bp, Homo sapien
gattagtgcaaccagataatattgt

SEQ ID NO: 714307 - DNA, 25 bp, Homo sapien
ccttgggctcccagacatgcaccac

SEQ ID NO: 714308 - DNA, 25 bp, Homo sapien
gcacctggcctagagagagagattt

SEQ ID NO: 714309 - DNA, 25 bp, Homo sapien
aacaatttggctgggggcggtgact

SEQ ID NO: 714310 - DNA, 25 bp, Homo sapien
ttgggctcccagacatgcaccactg

SEQ ID NO: 714311 - DNA, 25 bp, Homo sapien
tcagcaaacaggagtagagaataag

SEQ ID NO: 714312 - DNA, 25 bp, Homo sapien
tgtatccccttgacatgacccgtca

SEQ ID NO: 714313 - DNA, 25 bp, Homo sapien
ccagtcttaagatgttctaggctca

SEQ ID NO: 714314 - DNA, 25 bp, Homo sapien
tgacccgtcattccatgagaacttt

SEQ ID NO: 714315 - DNA, 25 bp, Homo sapien
ctcttcatcagcctttgcagacttt

SEQ ID NO: 714316 - DNA, 25 bp, Homo sapien
cgggcagcgagcttcggtggggcct

SEQ ID NO: 714317 - DNA, 25 bp, Homo sapien
cctcttcatcagcctttgcagactt

SEQ ID NO: 714318 - DNA, 25 bp, Homo sapien
agcgagcttcggtggggccttttcg

SEQ ID NO: 714319 - DNA, 25 bp, Homo sapien
tcctgtggctttcccggacgtcgcg

SEQ ID NO: 714320 - DNA, 25 bp, Homo sapien
ggtagcctcctgcaggtcgcctcct

SEQ ID NO: 714321 - DNA, 25 bp, Homo sapien
ccggacgtcgcgctgggacttcctg

SEQ ID NO: 714322 - DNA, 25 bp, Homo sapien
cctgcaggtcgcctcctcctgtggc

SEQ ID NO: 714323 - DNA, 25 bp, Homo sapien
aagtgaatgccgtactccgcgtgca

SEQ ID NO: 714324 - DNA, 25 bp, Homo sapien
agtgcgctcccggaaacggaagtga

SEQ ID NO: 714325 - DNA, 25 bp, Homo sapien
accagtctaaggttgctcccaccag

SEQ ID NO: 714326 - DNA, 25 bp, Homo sapien
catgcctggaaacggaagtgcgctc

SEQ ID NO: 714327 - DNA, 25 bp, Homo sapien
acgcggctctcgtggctcctgtttc

SEQ ID NO: 714328 - DNA, 25 bp, Homo sapien
cacgcggctctcgtggctcctgttt

SEQ ID NO: 714329 - DNA, 25 bp, Homo sapien
tcaagagcgtgactccttgatgctt

SEQ ID NO: 714330 - DNA, 25 bp, Homo sapien
ctttcctcaagagcgtgactccttg

SEQ ID NO: 714331 - DNA, 25 bp, Homo sapien
agagcgtgactccttgatgcttgga

SEQ ID NO: 714332 - DNA, 25 bp, Homo sapien
tcctcaagagcgtgactccttgatg

SEQ ID NO: 714333 - DNA, 25 bp, Homo sapien
ccttaatatctttgtgagaattcac

SEQ ID NO: 714334 - DNA, 25 bp, Homo sapien
caagccttaatatctttgtgagaat

SEQ ID NO: 714335 - DNA, 25 bp, Homo sapien
aatatctttgtgagaattcacactg

SEQ ID NO: 714336 - DNA, 25 bp, Homo sapien
tcaagccttaatatctttgtgagaa

SEQ ID NO: 714337 - DNA, 25 bp, Homo sapien
acatcactggtgtccctataaggga

SEQ ID NO: 714338 - DNA, 25 bp, Homo sapien
ctcacattggagagaaaccctgcaa

SEQ ID NO: 714339 - DNA, 25 bp, Homo sapien
ggagaagactgtgtggatccaccag

SEQ ID NO: 714340 - DNA, 25 bp, Homo sapien
gaacagatgctttcattatggcctc

SEQ ID NO: 714341 - DNA, 25 bp, Homo sapien
tggaggttacctctgtccgtgtaga

SEQ ID NO: 714342 - DNA, 25 bp, Homo sapien
tgtagattcctaagctgtcctggag

SEQ ID NO: 714343 - DNA, 25 bp, Homo sapien
ggcctgtgcctgatcattcacgctg

SEQ ID NO: 714344 - DNA, 25 bp, Homo sapien
tcctcagtagtggaagttggtcttc

SEQ ID NO: 714345 - DNA, 25 bp, Homo sapien
tccagctcgtcgcggtgagtactgg

SEQ ID NO: 714346 - DNA, 25 bp, Homo sapien
tgtttttctctttgcgcatcctgta

SEQ ID NO: 714347 - DNA, 25 bp, Homo sapien
tcgttcgaatcaggttgactggtcc

SEQ ID NO: 714348 - DNA, 25 bp, Homo sapien
aatctcccgtacctggcgagtccag

SEQ ID NO: 714349 - DNA, 25 bp, Homo sapien
accttgcctgctccgctcgcgtccg

SEQ ID NO: 714350 - DNA, 25 bp, Homo sapien
aggtcggatgacgggtgggagccag

SEQ ID NO: 714351 - DNA, 25 bp, Homo sapien
ccagcggtggaaggggtggcgaaag

SEQ ID NO: 714352 - DNA, 25 bp, Homo sapien
agaccttgcctgctccgctcgcgtc

SEQ ID NO: 714353 - DNA, 25 bp, Homo sapien
cctgaggttgttcagctcggctgag

SEQ ID NO: 714354 - DNA, 25 bp, Homo sapien
cctggtggcgtttgggcttaataca

SEQ ID NO: 714355 - DNA, 25 bp, Homo sapien
tgacgtcacggagcgctgctgtgtt

SEQ ID NO: 714356 - DNA, 25 bp, Homo sapien
gctgaggttgcagttcccgagcgct

SEQ ID NO: 714357 - DNA, 25 bp, Homo sapien
tgggggtcatcctcagcatcaactt

SEQ ID NO: 714358 - DNA, 25 bp, Homo sapien
tcagcatcaacttggacaatgctgc

SEQ ID NO: 714359 - DNA, 25 bp, Homo sapien
tcaacttggacaatgctgccaccag

SEQ ID NO: 714360 - DNA, 25 bp, Homo sapien
ttggacaatgctgccaccagtgggt

SEQ ID NO: 714361 - DNA, 25 bp, Homo sapien
tttcttatggcttgtttatggccag

SEQ ID NO: 714362 - DNA, 25 bp, Homo sapien
ctgaaagtattctttaaggagaaca

SEQ ID NO: 714363 - DNA, 25 bp, Homo sapien
gacccacctatttattgacagcctg

SEQ ID NO: 714364 - DNA, 25 bp, Homo sapien
gtgtgtgcatcataaccatcacgag

SEQ ID NO: 714365 - DNA, 25 bp, Homo sapien
cattaacaggatgactgtactaagt

SEQ ID NO: 714366 - DNA, 25 bp, Homo sapien
tccagtaccacgaataaatatccat

SEQ ID NO: 714367 - DNA, 25 bp, Homo sapien
caggatgactgtactaagtgtattt

SEQ ID NO: 714368 - DNA, 25 bp, Homo sapien
taaacctatgggtatgttgaccatc

SEQ ID NO: 714369 - DNA, 25 bp, Homo sapien
gtctccaaagagcttcataaccagg

SEQ ID NO: 714370 - DNA, 25 bp, Homo sapien
tctccaaagagcttcataaccaggc

SEQ ID NO: 714371 - DNA, 25 bp, Homo sapien
ctccaaagagcttcataaccaggct

SEQ ID NO: 714372 - DNA, 25 bp, Homo sapien
gcgactccaccgtgttcgggtgagc

SEQ ID NO: 714373 - DNA, 25 bp, Homo sapien
tggcgactccaccgtgttcgggtga

SEQ ID NO: 714374 - DNA, 25 bp, Homo sapien
gactccaccgtgttcgggtgagcat

SEQ ID NO: 714375 - DNA, 25 bp, Homo sapien
ctggcgactccaccgtgttcgggtg

SEQ ID NO: 714376 - DNA, 25 bp, Homo sapien
taatcgaggaacctccttacagagg

SEQ ID NO: 714377 - DNA, 25 bp, Homo sapien
ggtggcagaggtcacaatcgaccca

SEQ ID NO: 714378 - DNA, 25 bp, Homo sapien
tgaggccacgtcgaagaggccattg

SEQ ID NO: 714379 - DNA, 25 bp, Homo sapien
ctactttggtgaggctcgtgtggac

SEQ ID NO: 714380 - DNA, 25 bp, Homo sapien
ccacgcggagggaaactagaatcct

SEQ ID NO: 714381 - DNA, 25 bp, Homo sapien
gaaactagaatcctgaagagttcca

SEQ ID NO: 714382 - DNA, 25 bp, Homo sapien
ttccaatgccccaaacggaagtgac

SEQ ID NO: 714383 - DNA, 25 bp, Homo sapien
gtccaactgcccacacaacgagcca

SEQ ID NO: 714384 - DNA, 25 bp, Homo sapien
ctgagccgaccccttgatacctccg

SEQ ID NO: 714385 - DNA, 25 bp, Homo sapien
aggcactgagccgaccccttgatac

SEQ ID NO: 714386 - DNA, 25 bp, Homo sapien
cccaggcactgagccgaccccttga

SEQ ID NO: 714387 - DNA, 25 bp, Homo sapien
gagccgaccccttgatacctccgca

SEQ ID NO: 714388 - DNA, 25 bp, Homo sapien
cactgtcattggtagcagactttca

SEQ ID NO: 714389 - DNA, 25 bp, Homo sapien
caagctcaagcatggttgagtcacc

SEQ ID NO: 714390 - DNA, 25 bp, Homo sapien
ggcccactggctagaaaacaatcta

SEQ ID NO: 714391 - DNA, 25 bp, Homo sapien
ggtgtgctaaccaaccattcccggc

SEQ ID NO: 714392 - DNA, 25 bp, Homo sapien
gtgtataggcggcagagtggccagg

SEQ ID NO: 714393 - DNA, 25 bp, Homo sapien
gatagatgcagtctcagcggtcgca

SEQ ID NO: 714394 - DNA, 25 bp, Homo sapien
ctgacagcgggcgtgtataggcggc

SEQ ID NO: 714395 - DNA, 25 bp, Homo sapien
gggcaaggctttgtgctcgcgggat

SEQ ID NO: 714396 - DNA, 25 bp, Homo sapien
ggcattgtcgcccacgaagttgacc

SEQ ID NO: 714397 - DNA, 25 bp, Homo sapien
ggtgcttcagatgccccacgatgga

SEQ ID NO: 714398 - DNA, 25 bp, Homo sapien
acgaagttgaccttgcacatgccgg

SEQ ID NO: 714399 - DNA, 25 bp, Homo sapien
tacaagcacctcaatatcatcatcc

SEQ ID NO: 714400 - DNA, 25 bp, Homo sapien
gtaggagtccttctgaccgatgccc

SEQ ID NO: 714401 - DNA, 25 bp, Homo sapien
aggagtccttctgaccgatgcccac

SEQ ID NO: 714402 - DNA, 25 bp, Homo sapien
taggagtccttctgaccgatgccca

SEQ ID NO: 714403 - DNA, 25 bp, Homo sapien
gacaatgctctgctcgatggggtat

SEQ ID NO: 714404 - DNA, 25 bp, Homo sapien
aatgctctgctcgatggggtatttc

SEQ ID NO: 714405 - DNA, 25 bp, Homo sapien
ccagttggtgacaatgctctgctcg

SEQ ID NO: 714406 - DNA, 25 bp, Homo sapien
tggtgacaatgctctgctcgatggg

SEQ ID NO: 714407 - DNA, 25 bp, Homo sapien
acatgcagctcattgtagaaggtgt

SEQ ID NO: 714408 - DNA, 25 bp, Homo sapien
agaaacatgcagctcattgtagaag

SEQ ID NO: 714409 - DNA, 25 bp, Homo sapien
cttgggagaaacatgcagctcattg

SEQ ID NO: 714410 - DNA, 25 bp, Homo sapien
gaaacatgcagctcattgtagaagg

SEQ ID NO: 714411 - DNA, 25 bp, Homo sapien
gaagctggaggccacgtgcagggac

SEQ ID NO: 714412 - DNA, 25 bp, Homo sapien
aagctggaggccacgtgcagggaca

SEQ ID NO: 714413 - DNA, 25 bp, Homo sapien
cagagcctggatggctatatacatg

SEQ ID NO: 714414 - DNA, 25 bp, Homo sapien
cggggaccgctcgttgctgatggtg

SEQ ID NO: 714415 - DNA, 25 bp, Homo sapien
acagcggggaccgctcgttgctgat

SEQ ID NO: 714416 - DNA, 25 bp, Homo sapien
tggaaaagtgccatgggacagcggg

SEQ ID NO: 714417 - DNA, 25 bp, Homo sapien
ctggaaaagtgccatgggacagcgg

SEQ ID NO: 714418 - DNA, 25 bp, Homo sapien
taccagcgtacatggtggtgtcact

SEQ ID NO: 714419 - DNA, 25 bp, Homo sapien
ccatcctgtcagcaataccagcgta

SEQ ID NO: 714420 - DNA, 25 bp, Homo sapien
gccggactcctcgtattcctgcttg

SEQ ID NO: 714421 - DNA, 25 bp, Homo sapien
ccatacagaatatttgtgctcagga

SEQ ID NO: 714422 - DNA, 25 bp, Homo sapien
tagaagtatttgtggtagggtggac

SEQ ID NO: 714423 - DNA, 25 bp, Homo sapien
agaagtatttgtggtagggtggaca

SEQ ID NO: 714424 - DNA, 25 bp, Homo sapien
gaagtatttgtggtagggtggacaa

SEQ ID NO: 714425 - DNA, 25 bp, Homo sapien
aggcttcttttgtgcattgtaaatt

SEQ ID NO: 714426 - DNA, 25 bp, Homo sapien
tatttctcaagccttaaagtgtatg

SEQ ID NO: 714427 - DNA, 25 bp, Homo sapien
gtatgtcaggattcccagtggagag

SEQ ID NO: 714428 - DNA, 25 bp, Homo sapien
gaatgtgggaaagcccttgcctgcc

SEQ ID NO: 714429 - DNA, 25 bp, Homo sapien
ttctcaagccttaaagtgtatgtca

SEQ ID NO: 714430 - DNA, 25 bp, Homo sapien
tcttcaattcttacagtccctttcc

SEQ ID NO: 714431 - DNA, 25 bp, Homo sapien
agagaaatcttatcaatgttagaat

SEQ ID NO: 714432 - DNA, 25 bp, Homo sapien
tacatgaaagatgtgaacagtcaca

SEQ ID NO: 714433 - DNA, 25 bp, Homo sapien
gaattgtggtaaagctctctgttgt

SEQ ID NO: 714434 - DNA, 25 bp, Homo sapien
cctttcttaaacatgaactcatggt

SEQ ID NO: 714435 - DNA, 25 bp, Homo sapien
ctttcttaaacatgaactcatggtg

SEQ ID NO: 714436 - DNA, 25 bp, Homo sapien
tgattaaattgagtctgttagagta

SEQ ID NO: 714437 - DNA, 25 bp, Homo sapien
tttgattaaattgagtctgttagag

SEQ ID NO: 714438 - DNA, 25 bp, Homo sapien
ttgattaaattgagtctgttagagt

SEQ ID NO: 714439 - DNA, 25 bp, Homo sapien
tgcgaatccacactggagaaaaacc

SEQ ID NO: 714440 - DNA, 25 bp, Homo sapien
catgcgaatccacactggagaaaaa

SEQ ID NO: 714441 - DNA, 25 bp, Homo sapien
cacatgcgaatccacactggagaaa

SEQ ID NO: 714442 - DNA, 25 bp, Homo sapien
tcacatgcgaatccacactggagaa

SEQ ID NO: 714443 - DNA, 25 bp, Homo sapien
taaatgacgtcagcggtgcgccgtt

SEQ ID NO: 714444 - DNA, 25 bp, Homo sapien
tctaacctcgaccttgccttctgga

SEQ ID NO: 714445 - DNA, 25 bp, Homo sapien
tattacacggcagaaaccctagtcc

SEQ ID NO: 714446 - DNA, 25 bp, Homo sapien
tgcgccgttccttttgtgacgccgg

SEQ ID NO: 714447 - DNA, 25 bp, Homo sapien
tgaaatagtaacagagcaaaagacg

SEQ ID NO: 714448 - DNA, 25 bp, Homo sapien
ttacatcaaatgttgaaatagtaac

SEQ ID NO: 714449 - DNA, 25 bp, Homo sapien
tagtaacagagcaaaagacgtagtt

SEQ ID NO: 714450 - DNA, 25 bp, Homo sapien
acatcaaatgttgaaatagtaacag

SEQ ID NO: 714451 - DNA, 25 bp, Homo sapien
cagggtttatgatgatttaacttgg

SEQ ID NO: 714452 - DNA, 25 bp, Homo sapien
gggtttatgatgatttaacttgggc

SEQ ID NO: 714453 - DNA, 25 bp, Homo sapien
tttatgatgatttaacttgggctca

SEQ ID NO: 714454 - DNA, 25 bp, Homo sapien
gaggcctgacaagtagttcaagacc

SEQ ID NO: 714455 - DNA, 25 bp, Homo sapien
gaactcctgagactcgtccagaaga

SEQ ID NO: 714456 - DNA, 25 bp, Homo sapien
actcctgagactcgtccagaagaag

SEQ ID NO: 714457 - DNA, 25 bp, Homo sapien
tcctgagactcgtccagaagaagaa

SEQ ID NO: 714458 - DNA, 25 bp, Homo sapien
ctgagactcgtccagaagaagaatg

SEQ ID NO: 714459 - DNA, 25 bp, Homo sapien
caatgggtattgagtgtcagccacg

SEQ ID NO: 714460 - DNA, 25 bp, Homo sapien
cacagttcttatctttagctcaggg

SEQ ID NO: 714461 - DNA, 25 bp, Homo sapien
tactgcggtatttgccacaagctgg

SEQ ID NO: 714462 - DNA, 25 bp, Homo sapien
tctaggtacatgtccaaaggaactg

SEQ ID NO: 714463 - DNA, 25 bp, Homo sapien
tacccatttacttgtaggagcatgt

SEQ ID NO: 714464 - DNA, 25 bp, Homo sapien
tattttctgggcaacagtttgttca

SEQ ID NO: 714465 - DNA, 25 bp, Homo sapien
tcaataagtaggatccccatcaagc

SEQ ID NO: 714466 - DNA, 25 bp, Homo sapien
ctccagccctagactcagaaaaatg

SEQ ID NO: 714467 - DNA, 25 bp, Homo sapien
ggagtgtagtacagttatagcccat

SEQ ID NO: 714468 - DNA, 25 bp, Homo sapien
tagtacagttatagcccattgcagc

SEQ ID NO: 714469 - DNA, 25 bp, Homo sapien
gtagtacagttatagcccattgcag

SEQ ID NO: 714470 - DNA, 25 bp, Homo sapien
gtgtagtacagttatagcccattgc

SEQ ID NO: 714471 - DNA, 25 bp, Homo sapien
gatacaagatacaggcatgccctgt

SEQ ID NO: 714472 - DNA, 25 bp, Homo sapien
gaagagaaaccctattgatacaaga

SEQ ID NO: 714473 - DNA, 25 bp, Homo sapien
tgtggtcacaatccaacatttgaga

SEQ ID NO: 714474 - DNA, 25 bp, Homo sapien
catgccctgtagatattgtgagttt

SEQ ID NO: 714475 - DNA, 25 bp, Homo sapien
agagagagagatgtaatactaccca

SEQ ID NO: 714476 - DNA, 25 bp, Homo sapien
tgtaatactacccatgatataagaa

SEQ ID NO: 714477 - DNA, 25 bp, Homo sapien
gagagagatgtaatactacccatga

SEQ ID NO: 714478 - DNA, 25 bp, Homo sapien
gagatgtaatactacccatgatata

SEQ ID NO: 714479 - DNA, 25 bp, Homo sapien
gggtgtcctaaagaagctctctgat

SEQ ID NO: 714480 - DNA, 25 bp, Homo sapien
tagtaaatccagtgcaacactcctg

SEQ ID NO: 714481 - DNA, 25 bp, Homo sapien
ttcacattatgccagggaagctctg

SEQ ID NO: 714482 - DNA, 25 bp, Homo sapien
caatttcagccctgagaacataaga

SEQ ID NO: 714483 - DNA, 25 bp, Homo sapien
gaataatgctcactttgtagaccaa

SEQ ID NO: 714484 - DNA, 25 bp, Homo sapien
tttttgaggaattcgagttgtattg

SEQ ID NO: 714485 - DNA, 25 bp, Homo sapien
tcagtttttggtaggatttagcagt

SEQ ID NO: 714486 - DNA, 25 bp, Homo sapien
gattcattttgttacggcttcaatc

SEQ ID NO: 714487 - DNA, 25 bp, Homo sapien
gcatggtcaacttctggcgagagct

SEQ ID NO: 714488 - DNA, 25 bp, Homo sapien
tcctggtatgtaaatgcccacttcc

SEQ ID NO: 714489 - DNA, 25 bp, Homo sapien
tggtcaacttctggcgagagctctc

SEQ ID NO: 714490 - DNA, 25 bp, Homo sapien
caacttctggcgagagctctcttcc

SEQ ID NO: 714491 - DNA, 25 bp, Homo sapien
gaaactagaatttctgtgttctacc

SEQ ID NO: 714492 - DNA, 25 bp, Homo sapien
cgagaggaaactagaatttctgtgt

SEQ ID NO: 714493 - DNA, 25 bp, Homo sapien
agaggaaactagaatttctgtgttc

SEQ ID NO: 714494 - DNA, 25 bp, Homo sapien
aggaaactagaatttctgtgttcta

SEQ ID NO: 714495 - DNA, 25 bp, Homo sapien
ctgcgctcgcccgataaaagctttg

SEQ ID NO: 714496 - DNA, 25 bp, Homo sapien
cttccagcccgaccggccacctgaa

SEQ ID NO: 714497 - DNA, 25 bp, Homo sapien
gagccactgcgctcgcccgataaaa

SEQ ID NO: 714498 - DNA, 25 bp, Homo sapien
ctcgcccgataaaagctttggagga

SEQ ID NO: 714499 - DNA, 25 bp, Homo sapien
aagttgaggactgcagtgatccatg

SEQ ID NO: 714500 - DNA, 25 bp, Homo sapien
ttcgagcctagacaatagagtgaga

SEQ ID NO: 714501 - DNA, 25 bp, Homo sapien
ctgcattcgagcctagacaatagag

SEQ ID NO: 714502 - DNA, 25 bp, Homo sapien
gcattcgagcctagacaatagagtg

SEQ ID NO: 714503 - DNA, 25 bp, Homo sapien
gccaggggattccttgagattagga

SEQ ID NO: 714504 - DNA, 25 bp, Homo sapien
ctgggcatatggtgaaatatggtct

SEQ ID NO: 714505 - DNA, 25 bp, Homo sapien
tatggtgaaatatggtctttacaaa

SEQ ID NO: 714506 - DNA, 25 bp, Homo sapien
gggattccttgagattaggacttca

SEQ ID NO: 714507 - DNA, 25 bp, Homo sapien
caggctggtattgatgtaccgggaa

SEQ ID NO: 714508 - DNA, 25 bp, Homo sapien
gtggtgtttgtgctaggaagccttt

SEQ ID NO: 714509 - DNA, 25 bp, Homo sapien
ggtattgatgtaccgggaactccag

SEQ ID NO: 714510 - DNA, 25 bp, Homo sapien
ggtgtttgtgctaggaagcctttca

SEQ ID NO: 714511 - DNA, 25 bp, Homo sapien
cattcatcaagagtaccagatgagg

SEQ ID NO: 714512 - DNA, 25 bp, Homo sapien
tcatcaagagtaccagatgaggtcc

SEQ ID NO: 714513 - DNA, 25 bp, Homo sapien
agagtaccagatgaggtcctcctaa

SEQ ID NO: 714514 - DNA, 25 bp, Homo sapien
tcaagagtaccagatgaggtcctcc

SEQ ID NO: 714515 - DNA, 25 bp, Homo sapien
gagggcctccgcaatactatcaaac

SEQ ID NO: 714516 - DNA, 25 bp, Homo sapien
caaaaggcttgggttcactgcatcc

SEQ ID NO: 714517 - DNA, 25 bp, Homo sapien
tgctcatggatagacaagggcagtc

SEQ ID NO: 714518 - DNA, 25 bp, Homo sapien
gcttggcagcatacccactagaggg

SEQ ID NO: 714519 - DNA, 25 bp, Homo sapien
taatggcatccctggtgtaactgac

SEQ ID NO: 714520 - DNA, 25 bp, Homo sapien
tacagcaccctaagagaatgagcac

SEQ ID NO: 714521 - DNA, 25 bp, Homo sapien
cagaaggtggctgcttgcgcctgta

SEQ ID NO: 714522 - DNA, 25 bp, Homo sapien
gagcttttgaactagtccgcagaca

SEQ ID NO: 714523 - DNA, 25 bp, Homo sapien
tattacacagtaaaggccaactgat

SEQ ID NO: 714524 - DNA, 25 bp, Homo sapien
caggcccactcgtgttagcagtaaa

SEQ ID NO: 714525 - DNA, 25 bp, Homo sapien
gcccactcgtgttagcagtaaagaa

SEQ ID NO: 714526 - DNA, 25 bp, Homo sapien
tgcccacaagccaataaactgtggt

SEQ ID NO: 714527 - DNA, 25 bp, Homo sapien
tacacttactacacttggagagaga

SEQ ID NO: 714528 - DNA, 25 bp, Homo sapien
tactctctgaaggtgcaatctctct

SEQ ID NO: 714529 - DNA, 25 bp, Homo sapien
tctggtggcagaaagaataggctcc

SEQ ID NO: 714530 - DNA, 25 bp, Homo sapien
ccagaaggaagtgcattgtcacaca

SEQ ID NO: 714531 - DNA, 25 bp, Homo sapien
aaaagacaactaaggcttgcataag

SEQ ID NO: 714532 - DNA, 25 bp, Homo sapien
ttaatcttggtagagagtacccagg

SEQ ID NO: 714533 - DNA, 25 bp, Homo sapien
tgctggttgtataacttcagtctcc

SEQ ID NO: 714534 - DNA, 25 bp, Homo sapien
tctgtataccgctgggcatagtggc

SEQ ID NO: 714535 - DNA, 25 bp, Homo sapien
tattcctggataagctcgactgtga

SEQ ID NO: 714536 - DNA, 25 bp, Homo sapien
gcacctagctcatgatggtacctaa

SEQ ID NO: 714537 - DNA, 25 bp, Homo sapien
gactgattttaacccgctgcacaac

SEQ ID NO: 714538 - DNA, 25 bp, Homo sapien
gaagtgaatgcatggaaaggcgctt

SEQ ID NO: 714539 - DNA, 25 bp, Homo sapien
gagaataccgcagaccaaatggctt

SEQ ID NO: 714540 - DNA, 25 bp, Homo sapien
taattgcagtacctcacttctcagt

SEQ ID NO: 714541 - DNA, 25 bp, Homo sapien
gacaaccataagagaataccgcaga

SEQ ID NO: 714542 - DNA, 25 bp, Homo sapien
gccttagtcagctcagacaaccata

SEQ ID NO: 714543 - DNA, 25 bp, Homo sapien
gctagaatacagttctgccaagttc

SEQ ID NO: 714544 - DNA, 25 bp, Homo sapien
cattttatctgtctcaagctctacc

SEQ ID NO: 714545 - DNA, 25 bp, Homo sapien
gctctaccttccgtaaaatgctaga

SEQ ID NO: 714546 - DNA, 25 bp, Homo sapien
gaagcttcctgtgtcctttaacact

SEQ ID NO: 714547 - DNA, 25 bp, Homo sapien
aaacattattcctatagattgtaga

SEQ ID NO: 714548 - DNA, 25 bp, Homo sapien
tgtagatcagctataagtattcctt

SEQ ID NO: 714549 - DNA, 25 bp, Homo sapien
tattcctatagattgtagatcagct

SEQ ID NO: 714550 - DNA, 25 bp, Homo sapien
ggaatcggggctcacagccttcaga

SEQ ID NO: 714551 - DNA, 25 bp, Homo sapien
taaatcatgcagattgatcccagcc

SEQ ID NO: 714552 - DNA, 25 bp, Homo sapien
tgccagtgtggcacattcatgtcaa

SEQ ID NO: 714553 - DNA, 25 bp, Homo sapien
gtcaaaatttaccagaagccaagat

SEQ ID NO: 714554 - DNA, 25 bp, Homo sapien
gcatctgtgaagaagggtcatggat

SEQ ID NO: 714555 - DNA, 25 bp, Homo sapien
agattagtcctaaatgccttttgga

SEQ ID NO: 714556 - DNA, 25 bp, Homo sapien
ggttgtaatggctcacagattggcc

SEQ ID NO: 714557 - DNA, 25 bp, Homo sapien
agattggccttagatgcatcccgag

SEQ ID NO: 714558 - DNA, 25 bp, Homo sapien
gcatcccgagggtctgaaattaaac

SEQ ID NO: 714559 - DNA, 25 bp, Homo sapien
ctgggtctggttgcacatgctagtt

SEQ ID NO: 714560 - DNA, 25 bp, Homo sapien
tgcacatgctagttggcaggctgag

SEQ ID NO: 714561 - DNA, 25 bp, Homo sapien
gctgagacgggggtttcttgtagag

SEQ ID NO: 714562 - DNA, 25 bp, Homo sapien
tgatgaagtcccatctgtaggaaaa

SEQ ID NO: 714563 - DNA, 25 bp, Homo sapien
gccctggtttgtgtgcctttggaaa

SEQ ID NO: 714564 - DNA, 25 bp, Homo sapien
taggtgatacaggactactacggca

SEQ ID NO: 714565 - DNA, 25 bp, Homo sapien
acttctgggcataagaatgtgggca

SEQ ID NO: 714566 - DNA, 25 bp, Homo sapien
taggaacgatggtagaggaccaccg

SEQ ID NO: 714567 - DNA, 25 bp, Homo sapien
actgacaagattaagagactaaagt

SEQ ID NO: 714568 - DNA, 25 bp, Homo sapien
tgttgggctgggagatggtaaggtc

SEQ ID NO: 714569 - DNA, 25 bp, Homo sapien
gctgggagatggtaaggtctttcct

SEQ ID NO: 714570 - DNA, 25 bp, Homo sapien
tcctcaactgacaagattaagagac

SEQ ID NO: 714571 - DNA, 25 bp, Homo sapien
cataagagacaggtacgcccccggg

SEQ ID NO: 714572 - DNA, 25 bp, Homo sapien
cgagatcacaggaccgaggtgaaat

SEQ ID NO: 714573 - DNA, 25 bp, Homo sapien
ttatttcacctctgcaatctcgacc

SEQ ID NO: 714574 - DNA, 25 bp, Homo sapien
cttaccaggagacaggttttgagat

SEQ ID NO: 714575 - DNA, 25 bp, Homo sapien
ttcatcacactaggggggtctccat

SEQ ID NO: 714576 - DNA, 25 bp, Homo sapien
ttacccctgaggctactgcaatgag

SEQ ID NO: 714577 - DNA, 25 bp, Homo sapien
ggtccttgtacaggccaccaaattg

SEQ ID NO: 714578 - DNA, 25 bp, Homo sapien
cagagttatctggtcaccacggtat

SEQ ID NO: 714579 - DNA, 25 bp, Homo sapien
gtagctcaccatgacaaagctcctt

SEQ ID NO: 714580 - DNA, 25 bp, Homo sapien
aagtagctcaccatgacaaagctcc

SEQ ID NO: 714581 - DNA, 25 bp, Homo sapien
ttgtatagtcttcagatgcagatcc

SEQ ID NO: 714582 - DNA, 25 bp, Homo sapien
tagctcaccatgacaaagctccttt

SEQ ID NO: 714583 - DNA, 25 bp, Homo sapien
ggcgagagcacatcacacaatggag

SEQ ID NO: 714584 - DNA, 25 bp, Homo sapien
tttctgcgggtaaagctgttacagc

SEQ ID NO: 714585 - DNA, 25 bp, Homo sapien
tagaagagcgcagggaagaacagtt

SEQ ID NO: 714586 - DNA, 25 bp, Homo sapien
cctgttggccttagttgctgtttca

SEQ ID NO: 714587 - DNA, 25 bp, Homo sapien
gctgtcagtcctcgcgaaagtcggg

SEQ ID NO: 714588 - DNA, 25 bp, Homo sapien
gatacttggcctgctgtgctcgcgt

SEQ ID NO: 714589 - DNA, 25 bp, Homo sapien
ctgtgctcgcgtcaggtaggtctgc

SEQ ID NO: 714590 - DNA, 25 bp, Homo sapien
tcggggtcgataattgccgccctca

SEQ ID NO: 714591 - DNA, 25 bp, Homo sapien
tggcaggtgtacgtggaagaaccac

SEQ ID NO: 714592 - DNA, 25 bp, Homo sapien
tgagtaaatcgaggccttggcagtt

SEQ ID NO: 714593 - DNA, 25 bp, Homo sapien
gactagagtacatgtgcccatccag

SEQ ID NO: 714594 - DNA, 25 bp, Homo sapien
gctaaagtgtcaacctgggcttgga

SEQ ID NO: 714595 - DNA, 25 bp, Homo sapien
ggaaaagggccctcatctgacactg

SEQ ID NO: 714596 - DNA, 25 bp, Homo sapien
caagaagatggctctctgtgaacca

SEQ ID NO: 714597 - DNA, 25 bp, Homo sapien
tctgacactgaatctgactgtacct

SEQ ID NO: 714598 - DNA, 25 bp, Homo sapien
tcatggaagacaccccaaagatatt

SEQ ID NO: 714599 - DNA, 25 bp, Homo sapien
atagcttcagcgcaggaattccagg

SEQ ID NO: 714600 - DNA, 25 bp, Homo sapien
gaaaagcactcgatgagcatcccgc

SEQ ID NO: 714601 - DNA, 25 bp, Homo sapien
cctgggatgcgagaaaacgggactt

SEQ ID NO: 714602 - DNA, 25 bp, Homo sapien
gcaatgatctatgaccgagccactg

SEQ ID NO: 714603 - DNA, 25 bp, Homo sapien
cttttgactggtagatgaatgccat

SEQ ID NO: 714604 - DNA, 25 bp, Homo sapien
tggcttttgactggtagatgaatgc

SEQ ID NO: 714605 - DNA, 25 bp, Homo sapien
tactggcttttgactggtagatgaa

SEQ ID NO: 714606 - DNA, 25 bp, Homo sapien
cttactggcttttgactggtagatg

SEQ ID NO: 714607 - DNA, 25 bp, Homo sapien
tctttggtagtttgaatggatactc

SEQ ID NO: 714608 - DNA, 25 bp, Homo sapien
tttggtagtttgaatggatactctg

SEQ ID NO: 714609 - DNA, 25 bp, Homo sapien
ctttggtagtttgaatggatactct

SEQ ID NO: 714610 - DNA, 25 bp, Homo sapien
tacacttgctggaaccaatcgtggc

SEQ ID NO: 714611 - DNA, 25 bp, Homo sapien
tattcttcagctaggtcagcccgaa

SEQ ID NO: 714612 - DNA, 25 bp, Homo sapien
ggcagattttagtccacaggtcact

SEQ ID NO: 714613 - DNA, 25 bp, Homo sapien
tatgagggactggattacttggtcg

SEQ ID NO: 714614 - DNA, 25 bp, Homo sapien
cataccccggtgaaattgtgccaac

SEQ ID NO: 714615 - DNA, 25 bp, Homo sapien
ttctgagtagtgacctccaagtctg

SEQ ID NO: 714616 - DNA, 25 bp, Homo sapien
ttttagtcctttagggcctgcctgc

SEQ ID NO: 714617 - DNA, 25 bp, Homo sapien
ttctcatgctatgagggactgcagg

SEQ ID NO: 714618 - DNA, 25 bp, Homo sapien
tagcctgctgtggtgtcacgagcct

SEQ ID NO: 714619 - DNA, 25 bp, Homo sapien
tcagctctttgggacgccaaagagg

SEQ ID NO: 714620 - DNA, 25 bp, Homo sapien
ccagctactgttgaatttgagggaa

SEQ ID NO: 714621 - DNA, 25 bp, Homo sapien
gggcaatatagtgtgacctcccatc

SEQ ID NO: 714622 - DNA, 25 bp, Homo sapien
aaatcggttgtatctttcggtgagg

SEQ ID NO: 714623 - DNA, 25 bp, Homo sapien
caatagaacaccagatttccagagg

SEQ ID NO: 714624 - DNA, 25 bp, Homo sapien
tccattctggttggccaagcctcta

SEQ ID NO: 714625 - DNA, 25 bp, Homo sapien
gaggtatctgccagtccacagagtg

SEQ ID NO: 714626 - DNA, 25 bp, Homo sapien
aggaggccaggagaacatgtgccca

SEQ ID NO: 714627 - DNA, 25 bp, Homo sapien
tatatacctacacgcacgcaagaga

SEQ ID NO: 714628 - DNA, 25 bp, Homo sapien
gagaacagaggcctagggacctcca

SEQ ID NO: 714629 - DNA, 25 bp, Homo sapien
tatgagtacccaagaaggactgtct

SEQ ID NO: 714630 - DNA, 25 bp, Homo sapien
ggatgatcatagctacctcacggtt

SEQ ID NO: 714631 - DNA, 25 bp, Homo sapien
tgaatgcatcgtgctggaccgcgtc

SEQ ID NO: 714632 - DNA, 25 bp, Homo sapien
atgtgcgcaagatccggctgaccgt

SEQ ID NO: 714633 - DNA, 25 bp, Homo sapien
acctaccgtgtgaccgagacagggc

SEQ ID NO: 714634 - DNA, 25 bp, Homo sapien
gagctcagctatctgcagaggcttg

SEQ ID NO: 714635 - DNA, 25 bp, Homo sapien
ttctgaaggattgatgataagctat

SEQ ID NO: 714636 - DNA, 25 bp, Homo sapien
taatacagtttgtattacatgggta

SEQ ID NO: 714637 - DNA, 25 bp, Homo sapien
gactaatacagtttgtattacatgg

SEQ ID NO: 714638 - DNA, 25 bp, Homo sapien
gaaggattgatgataagctattttc

SEQ ID NO: 714639 - DNA, 25 bp, Homo sapien
gataaaggacagtacctgcctcacg

SEQ ID NO: 714640 - DNA, 25 bp, Homo sapien
gggctattatgggacttcactgaga

SEQ ID NO: 714641 - DNA, 25 bp, Homo sapien
tatctcggcatcatcgcttaccagc

SEQ ID NO: 714642 - DNA, 25 bp, Homo sapien
gggatttagagccaggcgatccggg

SEQ ID NO: 714643 - DNA, 25 bp, Homo sapien
tcatggcgactttggtcgaactgcc

SEQ ID NO: 714644 - DNA, 25 bp, Homo sapien
tttggtcgaactgccggactcggtc

SEQ ID NO: 714645 - DNA, 25 bp, Homo sapien
tcggcgggatcatggcgactttggt

SEQ ID NO: 714646 - DNA, 25 bp, Homo sapien
gcgactttggtcgaactgccggact

SEQ ID NO: 714647 - DNA, 25 bp, Homo sapien
aacccatacaaccaacaggctgcgt

SEQ ID NO: 714648 - DNA, 25 bp, Homo sapien
ccatacaaccaacaggctgcgtaca

SEQ ID NO: 714649 - DNA, 25 bp, Homo sapien
gagcaacccatacaaccaacaggct

SEQ ID NO: 714650 - DNA, 25 bp, Homo sapien
agcaacccatacaaccaacaggctg

SEQ ID NO: 714651 - DNA, 25 bp, Homo sapien
tgcgcaaggcctcaatcgcatgctc

SEQ ID NO: 714652 - DNA, 25 bp, Homo sapien
cctgcgcaaggcctcaatcgcatgc

SEQ ID NO: 714653 - DNA, 25 bp, Homo sapien
gccctgcgcaaggcctcaatcgcat

SEQ ID NO: 714654 - DNA, 25 bp, Homo sapien
ttggccctgcgcaaggcctcaatcg

SEQ ID NO: 714655 - DNA, 25 bp, Homo sapien
gtcttcaaattcatcagcattgaac

SEQ ID NO: 714656 - DNA, 25 bp, Homo sapien
tcaaattcatcagcattgaacttgg

SEQ ID NO: 714657 - DNA, 25 bp, Homo sapien
gaagccccacttctttgagatgtag

SEQ ID NO: 714658 - DNA, 25 bp, Homo sapien
attcatcagcattgaacttggtgaa

SEQ ID NO: 714659 - DNA, 25 bp, Homo sapien
ccacagccatctgggatgagccgct

SEQ ID NO: 714660 - DNA, 25 bp, Homo sapien
gattggggatgtacttgaccccaca

SEQ ID NO: 714661 - DNA, 25 bp, Homo sapien
ccccacagccatctgggatgagccg

SEQ ID NO: 714662 - DNA, 25 bp, Homo sapien
acagccatctgggatgagccgcttc

SEQ ID NO: 714663 - DNA, 25 bp, Homo sapien
gtattaatagggggggcagcacatt

SEQ ID NO: 714664 - DNA, 25 bp, Homo sapien
gtgagtattaatagggggggcagca

SEQ ID NO: 714665 - DNA, 25 bp, Homo sapien
ctcagcagggccggggtgcacaagt

SEQ ID NO: 714666 - DNA, 25 bp, Homo sapien
ctgagcacctcagcagggccggggt

SEQ ID NO: 714667 - DNA, 25 bp, Homo sapien
agcagggccggggtgcacaagtccc

SEQ ID NO: 714668 - DNA, 25 bp, Homo sapien
cagggccggggtgcacaagtcccac

SEQ ID NO: 714669 - DNA, 25 bp, Homo sapien
tcagtgcttgattcaaagatctgcc

SEQ ID NO: 714670 - DNA, 25 bp, Homo sapien
ctcagtgcttgattcaaagatctgc

SEQ ID NO: 714671 - DNA, 25 bp, Homo sapien
aagttcttccgggtctgcagtctgt

SEQ ID NO: 714672 - DNA, 25 bp, Homo sapien
tcaacactgggacaagttcttccgg

SEQ ID NO: 714673 - DNA, 25 bp, Homo sapien
tgtggtcaacactgggacaagttct

SEQ ID NO: 714674 - DNA, 25 bp, Homo sapien
taaagttcgaggccggaagccctgc

SEQ ID NO: 714675 - DNA, 25 bp, Homo sapien
cgctgaaccccggtcgcagttaacg

SEQ ID NO: 714676 - DNA, 25 bp, Homo sapien
tcacccgagcgctgaaccccggtcg

SEQ ID NO: 714677 - DNA, 25 bp, Homo sapien
ccgagcgctgaaccccggtcgcagt

SEQ ID NO: 714678 - DNA, 25 bp, Homo sapien
accagctcctcacccgagcgctgaa

SEQ ID NO: 714679 - DNA, 25 bp, Homo sapien
tggctgggtcgcgacagctttctcc

SEQ ID NO: 714680 - DNA, 25 bp, Homo sapien
tgggtcgcgacagctttctccgact

SEQ ID NO: 714681 - DNA, 25 bp, Homo sapien
gggtggctgggtcgcgacagctttc

SEQ ID NO: 714682 - DNA, 25 bp, Homo sapien
ttctccgactccgagcctctccgct

SEQ ID NO: 714683 - DNA, 25 bp, Homo sapien
ttctcgccgcctgaaagccctgcca

SEQ ID NO: 714684 - DNA, 25 bp, Homo sapien
caggccctaaaattccaggttactg

SEQ ID NO: 714685 - DNA, 25 bp, Homo sapien
agcaaagtcagagcttcaggcgtct

SEQ ID NO: 714686 - DNA, 25 bp, Homo sapien
aaattccaggttactgagccttccg

SEQ ID NO: 714687 - DNA, 25 bp, Homo sapien
cccagacggtcgttgcaaacaacct

SEQ ID NO: 714688 - DNA, 25 bp, Homo sapien
ggtcgttgcaaacaacctcgatcat

SEQ ID NO: 714689 - DNA, 25 bp, Homo sapien
ttccccagacggtcgttgcaaacaa

SEQ ID NO: 714690 - DNA, 25 bp, Homo sapien
gacggtcgttgcaaacaacctcgat

SEQ ID NO: 714691 - DNA, 25 bp, Homo sapien
ctgcctctcggctgccagtggatac

SEQ ID NO: 714692 - DNA, 25 bp, Homo sapien
actgcctctcggctgccagtggata

SEQ ID NO: 714693 - DNA, 25 bp, Homo sapien
cactgcctctcggctgccagtggat

SEQ ID NO: 714694 - DNA, 25 bp, Homo sapien
ccatccgacaacacagattgagttg

SEQ ID NO: 714695 - DNA, 25 bp, Homo sapien
tgagttgcctgcctcacgccaagca

SEQ ID NO: 714696 - DNA, 25 bp, Homo sapien
taactaaaaccatccgacaacacag

SEQ ID NO: 714697 - DNA, 25 bp, Homo sapien
gacaacacagattgagttgcctgcc

SEQ ID NO: 714698 - DNA, 25 bp, Homo sapien
tggaagcggtagaacgaggaagagg

SEQ ID NO: 714699 - DNA, 25 bp, Homo sapien
aagcggtagaacgaggaagaggaca

SEQ ID NO: 714700 - DNA, 25 bp, Homo sapien
agcggtagaacgaggaagaggacat

SEQ ID NO: 714701 - DNA, 25 bp, Homo sapien
gaagcggtagaacgaggaagaggac

SEQ ID NO: 714702 - DNA, 25 bp, Homo sapien
cacttcttcaggacaatcttgttcc

SEQ ID NO: 714703 - DNA, 25 bp, Homo sapien
cttcaggacaatcttgttccaacgg

SEQ ID NO: 714704 - DNA, 25 bp, Homo sapien
aaggtccccgatggtatcatccgtg

SEQ ID NO: 714705 - DNA, 25 bp, Homo sapien
gcaatcagcttcttaaggtccccga

SEQ ID NO: 714706 - DNA, 25 bp, Homo sapien
agtcccccagagacacgtggtcctt

SEQ ID NO: 714707 - DNA, 25 bp, Homo sapien
ccagagacacgtggtccttaaaaat

SEQ ID NO: 714708 - DNA, 25 bp, Homo sapien
tcccccagagacacgtggtccttaa

SEQ ID NO: 714709 - DNA, 25 bp, Homo sapien
agacacgtggtccttaaaaatcgtg

SEQ ID NO: 714710 - DNA, 25 bp, Homo sapien
taaggaagcccattttggaccaggc

SEQ ID NO: 714711 - DNA, 25 bp, Homo sapien
ttttgaacagataaccgaggctggg

SEQ ID NO: 714712 - DNA, 25 bp, Homo sapien
tcatccattcacagccgggtcaggt

SEQ ID NO: 714713 - DNA, 25 bp, Homo sapien
cgaggctgggtatgtagatgcttcc

SEQ ID NO: 714714 - DNA, 25 bp, Homo sapien
taaagctccaggttcatcccatcgt

SEQ ID NO: 714715 - DNA, 25 bp, Homo sapien
gctccaggttcatcccatcgtggat

SEQ ID NO: 714716 - DNA, 25 bp, Homo sapien
caggttcatcccatcgtggatttca

SEQ ID NO: 714717 - DNA, 25 bp, Homo sapien
aaagctccaggttcatcccatcgtg

SEQ ID NO: 714718 - DNA, 25 bp, Homo sapien
ttacaaacaagcatctatcccagtg

SEQ ID NO: 714719 - DNA, 25 bp, Homo sapien
tacaaacaagcatctatcccagtgt

SEQ ID NO: 714720 - DNA, 25 bp, Homo sapien
tttacaaacaagcatctatcccagt

SEQ ID NO: 714721 - DNA, 25 bp, Homo sapien
ccgctgcctattggctagacgcgct

SEQ ID NO: 714722 - DNA, 25 bp, Homo sapien
gccgccgctgcctattggctagacg

SEQ ID NO: 714723 - DNA, 25 bp, Homo sapien
ctattggctagacgcgctctgcaac

SEQ ID NO: 714724 - DNA, 25 bp, Homo sapien
tgcctattggctagacgcgctctgc

SEQ ID NO: 714725 - DNA, 25 bp, Homo sapien
agctgcggctcatgcgcttctccca

SEQ ID NO: 714726 - DNA, 25 bp, Homo sapien
ctgcggctcatgcgcttctcccagc

SEQ ID NO: 714727 - DNA, 25 bp, Homo sapien
gctgcggctcatgcgcttctcccag

SEQ ID NO: 714728 - DNA, 25 bp, Homo sapien
cattaggccgagaggtatcagccgg

SEQ ID NO: 714729 - DNA, 25 bp, Homo sapien
cattgtggctaacccttaaatcggg

SEQ ID NO: 714730 - DNA, 25 bp, Homo sapien
catcgtctggcagaatgtcacgggc

SEQ ID NO: 714731 - DNA, 25 bp, Homo sapien
cagactcagcattaggtgtacacag

SEQ ID NO: 714732 - DNA, 25 bp, Homo sapien
tgatcttggacgagttccttcagtt

SEQ ID NO: 714733 - DNA, 25 bp, Homo sapien
aatgatcttggacgagttccttcag

SEQ ID NO: 714734 - DNA, 25 bp, Homo sapien
gatcttggacgagttccttcagttt

SEQ ID NO: 714735 - DNA, 25 bp, Homo sapien
tgaatgatcttggacgagttccttc

SEQ ID NO: 714736 - DNA, 25 bp, Homo sapien
gggaatagagaataaggagatcaaa

SEQ ID NO: 714737 - DNA, 25 bp, Homo sapien
accagaacctggcactcaaccaagg

SEQ ID NO: 714738 - DNA, 25 bp, Homo sapien
agaataaggagatcaaacctcatgg

SEQ ID NO: 714739 - DNA, 25 bp, Homo sapien
ccagaacctggcactcaaccaagga

SEQ ID NO: 714740 - DNA, 25 bp, Homo sapien
gaagtaaagaccctactgggtgcca

SEQ ID NO: 714741 - DNA, 25 bp, Homo sapien
tgtactcaggtacttcacacccgaa

SEQ ID NO: 714742 - DNA, 25 bp, Homo sapien
ggagtgtcacccataaaggaagcca

SEQ ID NO: 714743 - DNA, 25 bp, Homo sapien
cgcgggttccaggtgcaaatgcagc

SEQ ID NO: 714744 - DNA, 25 bp, Homo sapien
agcagtgggtaacgcttcctgagtg

SEQ ID NO: 714745 - DNA, 25 bp, Homo sapien
atggcagcagtgggtaacgcttcct

SEQ ID NO: 714746 - DNA, 25 bp, Homo sapien
gcagcagtgggtaacgcttcctgag

SEQ ID NO: 714747 - DNA, 25 bp, Homo sapien
tggcagcagtgggtaacgcttcctg

SEQ ID NO: 714748 - DNA, 25 bp, Homo sapien
agtgggatagcctttattatctcta

SEQ ID NO: 714749 - DNA, 25 bp, Homo sapien
atagatggcaaaacggagacctcac

SEQ ID NO: 714750 - DNA, 25 bp, Homo sapien
tattatctctattgtatagatggca

SEQ ID NO: 714751 - DNA, 25 bp, Homo sapien
ttaagagtgggatagcctttattat

SEQ ID NO: 714752 - DNA, 25 bp, Homo sapien
taccttagggtcattgaaaggacta

SEQ ID NO: 714753 - DNA, 25 bp, Homo sapien
gataacagttcctaccttagggtca

SEQ ID NO: 714754 - DNA, 25 bp, Homo sapien
cagttcctaccttagggtcattgaa

SEQ ID NO: 714755 - DNA, 25 bp, Homo sapien
tggagataacagttcctaccttagg

SEQ ID NO: 714756 - DNA, 25 bp, Homo sapien
atgtgatatatcttccctgggcctt

SEQ ID NO: 714757 - DNA, 25 bp, Homo sapien
tcaaatctgaatctgggttcaaatg

SEQ ID NO: 714758 - DNA, 25 bp, Homo sapien
tcaaatgtgatatatcttccctggg

SEQ ID NO: 714759 - DNA, 25 bp, Homo sapien
ctgaatctgggttcaaatgtgatat

SEQ ID NO: 714760 - DNA, 25 bp, Homo sapien
gctctccagacgtgggccaatgtgg

SEQ ID NO: 714761 - DNA, 25 bp, Homo sapien
caggaattcagctagggttgtgctc

SEQ ID NO: 714762 - DNA, 25 bp, Homo sapien
tcaaggaggaaaataacccagagtg

SEQ ID NO: 714763 - DNA, 25 bp, Homo sapien
caatccctgataacttcaaggagga

SEQ ID NO: 714764 - DNA, 25 bp, Homo sapien
ctgcccgtttttgccaccactgctg

SEQ ID NO: 714765 - DNA, 25 bp, Homo sapien
gccgccgtgactggctgtgcttcac

SEQ ID NO: 714766 - DNA, 25 bp, Homo sapien
tgtgcttcaccagcaggtgcgagca

SEQ ID NO: 714767 - DNA, 25 bp, Homo sapien
cttggtccgggtgatcttctcctgc

SEQ ID NO: 714768 - DNA, 25 bp, Homo sapien
ccaagcccctgccctcgccctgctc

SEQ ID NO: 714769 - DNA, 25 bp, Homo sapien
cctcccaagcccctgccctcgccct

SEQ ID NO: 714770 - DNA, 25 bp, Homo sapien
tcccaagcccctgccctcgccctgc

SEQ ID NO: 714771 - DNA, 25 bp, Homo sapien
caagcccctgccctcgccctgctca

SEQ ID NO: 714772 - DNA, 25 bp, Homo sapien
gtcaacacatctggctaatctttgt

SEQ ID NO: 714773 - DNA, 25 bp, Homo sapien
caggcatgcgtcaacacatctggct

SEQ ID NO: 714774 - DNA, 25 bp, Homo sapien
catgcgtcaacacatctggctaatc

SEQ ID NO: 714775 - DNA, 25 bp, Homo sapien
tacaggcatgcgtcaacacatctgg

SEQ ID NO: 714776 - DNA, 25 bp, Homo sapien
gaaaatgtggaggtcccggctctct

SEQ ID NO: 714777 - DNA, 25 bp, Homo sapien
tacaagccaggaagtgggttctcgc

SEQ ID NO: 714778 - DNA, 25 bp, Homo sapien
tatagggtccggaagcctcagaaca

SEQ ID NO: 714779 - DNA, 25 bp, Homo sapien
actgatgagatttagcccggctgcc

SEQ ID NO: 714780 - DNA, 25 bp, Homo sapien
tgttagctcagcctgtacctgaccc

SEQ ID NO: 714781 - DNA, 25 bp, Homo sapien
aaacgctttctcttgaaactgggag

SEQ ID NO: 714782 - DNA, 25 bp, Homo sapien
tgctctgtgaggctgaccttgaggg

SEQ ID NO: 714783 - DNA, 25 bp, Homo sapien
ggtttggtcctgtgtgtcttgttag

SEQ ID NO: 714784 - DNA, 25 bp, Homo sapien
ctacttcggggaagcaggactgcct

SEQ ID NO: 714785 - DNA, 25 bp, Homo sapien
cactgagcgtctgaggagccaggcc

SEQ ID NO: 714786 - DNA, 25 bp, Homo sapien
tgcctgcaggcactgagcgtctgag

SEQ ID NO: 714787 - DNA, 25 bp, Homo sapien
tgaacaagcatcaccttgccacagc

SEQ ID NO: 714788 - DNA, 25 bp, Homo sapien
ggcagcacttcagttggaaagcctc

SEQ ID NO: 714789 - DNA, 25 bp, Homo sapien
aatctacatacaagctggatgggcc

SEQ ID NO: 714790 - DNA, 25 bp, Homo sapien
tacctgcatgcgcagtcacacctgt

SEQ ID NO: 714791 - DNA, 25 bp, Homo sapien
gaggtgcctttcacgagcatgagca

SEQ ID NO: 714792 - DNA, 25 bp, Homo sapien
caaagtcctcctctcccgacttgat

SEQ ID NO: 714793 - DNA, 25 bp, Homo sapien
cctctcccgacttgatcttctggat

SEQ ID NO: 714794 - DNA, 25 bp, Homo sapien
tcctcctctcccgacttgatcttct

SEQ ID NO: 714795 - DNA, 25 bp, Homo sapien
aaagtcctcctctcccgacttgatc

SEQ ID NO: 714796 - DNA, 25 bp, Homo sapien
tagggccttatgctattattggaag

SEQ ID NO: 714797 - DNA, 25 bp, Homo sapien
ccttctgttaagttgctgaggcttc

SEQ ID NO: 714798 - DNA, 25 bp, Homo sapien
tagtgcttatcgtggacagacacac

SEQ ID NO: 714799 - DNA, 25 bp, Homo sapien
tttctcctagtaaatggcagctcct

SEQ ID NO: 714800 - DNA, 25 bp, Homo sapien
taccaggagaacacggccgcagagt

SEQ ID NO: 714801 - DNA, 25 bp, Homo sapien
caggagaacacggccgcagagtgac

SEQ ID NO: 714802 - DNA, 25 bp, Homo sapien
ggagaacacggccgcagagtgacct

SEQ ID NO: 714803 - DNA, 25 bp, Homo sapien
agaacacggccgcagagtgaccttc

SEQ ID NO: 714804 - DNA, 25 bp, Homo sapien
ccatggtgggaggtgagcttttacc

SEQ ID NO: 714805 - DNA, 25 bp, Homo sapien
tgggaggtgagcttttaccaggttc

SEQ ID NO: 714806 - DNA, 25 bp, Homo sapien
atggtgggaggtgagcttttaccag

SEQ ID NO: 714807 - DNA, 25 bp, Homo sapien
gaggtgagcttttaccaggttccac

SEQ ID NO: 714808 - DNA, 25 bp, Homo sapien
ggccaccggatgtggtccttgtctg

SEQ ID NO: 714809 - DNA, 25 bp, Homo sapien
ccgccagggcctggtgccgcctgct

SEQ ID NO: 714810 - DNA, 25 bp, Homo sapien
ccgcctgctgaagatcatgagcgcc

SEQ ID NO: 714811 - DNA, 25 bp, Homo sapien
ccttgtctgatttgttggggctgcg

SEQ ID NO: 714812 - DNA, 25 bp, Homo sapien
gctgacggtccggttatcctggttg

SEQ ID NO: 714813 - DNA, 25 bp, Homo sapien
cagcatctggctgacggtccggtta

SEQ ID NO: 714814 - DNA, 25 bp, Homo sapien
ctggaaggccaggttgtatttctgc

SEQ ID NO: 714815 - DNA, 25 bp, Homo sapien
gaaggccaggttgtatttctgcatc

SEQ ID NO: 714816 - DNA, 25 bp, Homo sapien
tgtgctcttcgtcactcgctatgac

SEQ ID NO: 714817 - DNA, 25 bp, Homo sapien
ttcgtcactcgctatgacctcgctg

SEQ ID NO: 714818 - DNA, 25 bp, Homo sapien
ctcttcgtcactcgctatgacctcg

SEQ ID NO: 714819 - DNA, 25 bp, Homo sapien
tgctcttcgtcactcgctatgacct

SEQ ID NO: 714820 - DNA, 25 bp, Homo sapien
ggtgtcggtggtgctaaagccatca

SEQ ID NO: 714821 - DNA, 25 bp, Homo sapien
ccttgaacttgagatcggtgtcggt

SEQ ID NO: 714822 - DNA, 25 bp, Homo sapien
cttgaacttgagatcggtgtcggtg

SEQ ID NO: 714823 - DNA, 25 bp, Homo sapien
atcggtgtcggtggtgctaaagcca

SEQ ID NO: 714824 - DNA, 25 bp, Homo sapien
ccagggtacatgcagtgaagaggac

SEQ ID NO: 714825 - DNA, 25 bp, Homo sapien
tggtccagggtacatgcagtgaaga

SEQ ID NO: 714826 - DNA, 25 bp, Homo sapien
ctggtccagggtacatgcagtgaag

SEQ ID NO: 714827 - DNA, 25 bp, Homo sapien
ggcactggtccagggtacatgcagt

SEQ ID NO: 714828 - DNA, 25 bp, Homo sapien
gaagatgtgtgcatagtgggcctgg

SEQ ID NO: 714829 - DNA, 25 bp, Homo sapien
gtgtgcatagtgggcctggagggcg

SEQ ID NO: 714830 - DNA, 25 bp, Homo sapien
agatgtgtgcatagtgggcctggag

SEQ ID NO: 714831 - DNA, 25 bp, Homo sapien
ggggaagatgtgtgcatagtgggcc

SEQ ID NO: 714832 - DNA, 25 bp, Homo sapien
gccagggcagcgtcaagagtctgag

SEQ ID NO: 714833 - DNA, 25 bp, Homo sapien
ccagggcagcgtcaagagtctgagc

SEQ ID NO: 714834 - DNA, 25 bp, Homo sapien
ccccaactggcaccactgctgcccc

SEQ ID NO: 714835 - DNA, 25 bp, Homo sapien
agaagatcatgcagtcatcagtccc

SEQ ID NO: 714836 - DNA, 25 bp, Homo sapien
gaagatcatgcagtcatcagtccca

SEQ ID NO: 714837 - DNA, 25 bp, Homo sapien
tgggatctttggggttgcccacctg

SEQ ID NO: 714838 - DNA, 25 bp, Homo sapien
gggatctttggggttgcccacctgc

SEQ ID NO: 714839 - DNA, 25 bp, Homo sapien
ggatctttggggttgcccacctgcc

SEQ ID NO: 714840 - DNA, 25 bp, Homo sapien
cccacaattcatggtatgtacaggg

SEQ ID NO: 714841 - DNA, 25 bp, Homo sapien
cggaggagggaaactgcccagcttt

SEQ ID NO: 714842 - DNA, 25 bp, Homo sapien
gaaactgcccagctttcccccggca

SEQ ID NO: 714843 - DNA, 25 bp, Homo sapien
aaggtcccacaattcatggtatgta

SEQ ID NO: 714844 - DNA, 25 bp, Homo sapien
gcacaatgaaaaatatcgcccacga

SEQ ID NO: 714845 - DNA, 25 bp, Homo sapien
atatcgcccacgatcaacgtgttct

SEQ ID NO: 714846 - DNA, 25 bp, Homo sapien
tatcgcccacgatcaacgtgttctg

SEQ ID NO: 714847 - DNA, 25 bp, Homo sapien
aatgaaaaatatcgcccacgatcaa

SEQ ID NO: 714848 - DNA, 25 bp, Homo sapien
cacgcggacagaggtcagcctgagc

SEQ ID NO: 714849 - DNA, 25 bp, Homo sapien
cctcccacgcggacagaggtcagcc

SEQ ID NO: 714850 - DNA, 25 bp, Homo sapien
cgcggacagaggtcagcctgagccc

SEQ ID NO: 714851 - DNA, 25 bp, Homo sapien
gagaggtcagtgtgagccccttgtc

SEQ ID NO: 714852 - DNA, 25 bp, Homo sapien
gaggtcagtgtgagcccttgcctca

SEQ ID NO: 714853 - DNA, 25 bp, Homo sapien
ctcccacgcggacagaggtcagcat

SEQ ID NO: 714854 - DNA, 25 bp, Homo sapien
cctcccacgcggacagaggtcagca

SEQ ID NO: 714855 - DNA, 25 bp, Homo sapien
tcccacgctgagagaggtcagtgtg

SEQ ID NO: 714856 - DNA, 25 bp, Homo sapien
tctgcattttccttacttttattgt

SEQ ID NO: 714857 - DNA, 25 bp, Homo sapien
cttttattgtcagaaactccagaaa

SEQ ID NO: 714858 - DNA, 25 bp, Homo sapien
tcaacatgtagaatgctttcctaat

SEQ ID NO: 714859 - DNA, 25 bp, Homo sapien
ctattcaacatgtagaatgctttcc

SEQ ID NO: 714860 - DNA, 25 bp, Homo sapien
tatgtcatgtcacgacatactgccg

SEQ ID NO: 714861 - DNA, 25 bp, Homo sapien
ttacttgagtgttgctaccagtatt

SEQ ID NO: 714862 - DNA, 25 bp, Homo sapien
agtgttgctaccagtattttgcttc

SEQ ID NO: 714863 - DNA, 25 bp, Homo sapien
gtcacgacatactgccgctgcacga

SEQ ID NO: 714864 - DNA, 25 bp, Homo sapien
gactgtaggtatacatgatgatact

SEQ ID NO: 714865 - DNA, 25 bp, Homo sapien
ctctccaggccctgaacattctcag

SEQ ID NO: 714866 - DNA, 25 bp, Homo sapien
ggactgtaggtatacatgatgatac

SEQ ID NO: 714867 - DNA, 25 bp, Homo sapien
tgggactgtaggtatacatgatgat

SEQ ID NO: 714868 - DNA, 25 bp, Homo sapien
tagagttccaactactagggaagct

SEQ ID NO: 714869 - DNA, 25 bp, Homo sapien
taataactggtgtggtgttgtgcac

SEQ ID NO: 714870 - DNA, 25 bp, Homo sapien
tggtgttgtgcacctagagttccaa

SEQ ID NO: 714871 - DNA, 25 bp, Homo sapien
ctgagatgagaggataccttgagct

SEQ ID NO: 714872 - DNA, 25 bp, Homo sapien
acatctggctagtttcttttatttt

SEQ ID NO: 714873 - DNA, 25 bp, Homo sapien
accacatctggctagtttcttttat

SEQ ID NO: 714874 - DNA, 25 bp, Homo sapien
aggctggccacaaattcctggtctc

SEQ ID NO: 714875 - DNA, 25 bp, Homo sapien
atagatggggtcttgttgtgttggc

SEQ ID NO: 714876 - DNA, 25 bp, Homo sapien
tatgtttcccatgcatcaggtgcaa

SEQ ID NO: 714877 - DNA, 25 bp, Homo sapien
ttcccatgcatcaggtgcaatggga

SEQ ID NO: 714878 - DNA, 25 bp, Homo sapien
tgtttcccatgcatcaggtgcaatg

SEQ ID NO: 714879 - DNA, 25 bp, Homo sapien
gtttcccatgcatcaggtgcaatgg

SEQ ID NO: 714880 - DNA, 25 bp, Homo sapien
atgtggtggtgcctgtgtatagtct

SEQ ID NO: 714881 - DNA, 25 bp, Homo sapien
tttgtgttatatgtggattccacag

SEQ ID NO: 714882 - DNA, 25 bp, Homo sapien
tgaaaacttgagtatgcgtggattt

SEQ ID NO: 714883 - DNA, 25 bp, Homo sapien
ctttgaaaacttgagtatgcgtgga

SEQ ID NO: 714884 - DNA, 25 bp, Homo sapien
ggactgactttgaaaacttgagtat

SEQ ID NO: 714885 - DNA, 25 bp, Homo sapien
cctgttgatttcctgctagggagta

SEQ ID NO: 714886 - DNA, 25 bp, Homo sapien
tcttctgaatggtgtttagtaggtc

SEQ ID NO: 714887 - DNA, 25 bp, Homo sapien
tttctttcctgttgcaattcatggg

SEQ ID NO: 714888 - DNA, 25 bp, Homo sapien
aattcatgggtcttagcatcttctg

SEQ ID NO: 714889 - DNA, 25 bp, Homo sapien
tactgcaccatacatggagtcagcc

SEQ ID NO: 714890 - DNA, 25 bp, Homo sapien
tgtatttcaggccattgcagtcttt

SEQ ID NO: 714891 - DNA, 25 bp, Homo sapien
gatcctgttggactttgatggcttc

SEQ ID NO: 714892 - DNA, 25 bp, Homo sapien
tgttccaggatcaatatactgcacc

SEQ ID NO: 714893 - DNA, 25 bp, Homo sapien
ttcccgcctcgactcctgatatcaa

SEQ ID NO: 714894 - DNA, 25 bp, Homo sapien
gaaggctttctactaatggaattcc

SEQ ID NO: 714895 - DNA, 25 bp, Homo sapien
aatggcgcaaccttgctggtcactg

SEQ ID NO: 714896 - DNA, 25 bp, Homo sapien
tatgtagaaggccttcccaaaggaa

SEQ ID NO: 714897 - DNA, 25 bp, Homo sapien
tcttgtgtgagttaagggttatctc

SEQ ID NO: 714898 - DNA, 25 bp, Homo sapien
acacgtaggctgcaccatttcatat

SEQ ID NO: 714899 - DNA, 25 bp, Homo sapien
catgtgcttgttggtgaagtgtgtc

SEQ ID NO: 714900 - DNA, 25 bp, Homo sapien
tctggataacagacactgatgaagt

SEQ ID NO: 714901 - DNA, 25 bp, Homo sapien
gtaataatatccacaccatgcccta

SEQ ID NO: 714902 - DNA, 25 bp, Homo sapien
tgtaataatatccacaccatgccct

SEQ ID NO: 714903 - DNA, 25 bp, Homo sapien
caccatcgcttccagtactaatgta

SEQ ID NO: 714904 - DNA, 25 bp, Homo sapien
actgatctaatccacaccatcgctt

SEQ ID NO: 714905 - DNA, 25 bp, Homo sapien
caccatcgcttccagtactaatgta

SEQ ID NO: 714906 - DNA, 25 bp, Homo sapien
gtaataatatccacaccatgcccta

SEQ ID NO: 714907 - DNA, 25 bp, Homo sapien
tgtaataatatccacaccatgccct

SEQ ID NO: 714908 - DNA, 25 bp, Homo sapien
acaccatgccctatcactgatctag

SEQ ID NO: 714909 - DNA, 25 bp, Homo sapien
gagcccctgagacccgttgaactct

SEQ ID NO: 714910 - DNA, 25 bp, Homo sapien
gactcgccctggctcagttaaggac

SEQ ID NO: 714911 - DNA, 25 bp, Homo sapien
taactgagtgactcagcaagcctgg

SEQ ID NO: 714912 - DNA, 25 bp, Homo sapien
tcaggaactgcagaggtgcaaggca

SEQ ID NO: 714913 - DNA, 25 bp, Homo sapien
gaggacatcattgcatccagagagc

SEQ ID NO: 714914 - DNA, 25 bp, Homo sapien
catgacagtctgtgagcaagggact

SEQ ID NO: 714915 - DNA, 25 bp, Homo sapien
tgtaaaagatgtgatcgtagtctct

SEQ ID NO: 714916 - DNA, 25 bp, Homo sapien
cagcttgcctggtaatgcaactgga

SEQ ID NO: 714917 - DNA, 25 bp, Homo sapien
cacactcaactgctgcgtggagatg

SEQ ID NO: 714918 - DNA, 25 bp, Homo sapien
gagtccacactcaactgctgcgtgg

SEQ ID NO: 714919 - DNA, 25 bp, Homo sapien
ggaggcagagtccacactcaactgc

SEQ ID NO: 714920 - DNA, 25 bp, Homo sapien
tcaactgctgcgtggagatgggcat

SEQ ID NO: 714921 - DNA, 25 bp, Homo sapien
tagaagcggagacgttttgctgcac

SEQ ID NO: 714922 - DNA, 25 bp, Homo sapien
aagctggggacgtctggactgtcct

SEQ ID NO: 714923 - DNA, 25 bp, Homo sapien
ctggactgtcctcatagaagcggag

SEQ ID NO: 714924 - DNA, 25 bp, Homo sapien
tgtcctcatagaagcggagacgttt

SEQ ID NO: 714925 - DNA, 25 bp, Homo sapien
tccacgaatacgctccctttcaggg

SEQ ID NO: 714926 - DNA, 25 bp, Homo sapien
gaatacgctccctttcagggtgcct

SEQ ID NO: 714927 - DNA, 25 bp, Homo sapien
tacgctccctttcagggtgcctgat

SEQ ID NO: 714928 - DNA, 25 bp, Homo sapien
tccctttcagggtgcctgatagtgg

SEQ ID NO: 714929 - DNA, 25 bp, Homo sapien
tgcagcattcggagtgggcaggtgc

SEQ ID NO: 714930 - DNA, 25 bp, Homo sapien
gcagcattcggagtgggcaggtgct

SEQ ID NO: 714931 - DNA, 25 bp, Homo sapien
ctgcagcattcggagtgggcaggtg

SEQ ID NO: 714932 - DNA, 25 bp, Homo sapien
gaggctgccacgatggtgacactga

SEQ ID NO: 714933 - DNA, 25 bp, Homo sapien
gctgccacgatggtgacactgaaga

SEQ ID NO: 714934 - DNA, 25 bp, Homo sapien
gaagagcactggcaaacgcactagc

SEQ ID NO: 714935 - DNA, 25 bp, Homo sapien
tagctgagtaacagacactgtaacc

SEQ ID NO: 714936 - DNA, 25 bp, Homo sapien
cctgaactgaagggactgggagtat

SEQ ID NO: 714937 - DNA, 25 bp, Homo sapien
gcagttccaggaggggcgactcctc

SEQ ID NO: 714938 - DNA, 25 bp, Homo sapien
gcgactcctccaggcctgaactgaa

SEQ ID NO: 714939 - DNA, 25 bp, Homo sapien
actgaagggactgggagtatggagc

SEQ ID NO: 714940 - DNA, 25 bp, Homo sapien
cagcgtcggcgcttggccgcattga

SEQ ID NO: 714941 - DNA, 25 bp, Homo sapien
ttggccgcattgatatatgacacct

SEQ ID NO: 714942 - DNA, 25 bp, Homo sapien
ggcgcttggccgcattgatatatga

SEQ ID NO: 714943 - DNA, 25 bp, Homo sapien
aaggaggaggcagcgtcggcgcttg

SEQ ID NO: 714944 - DNA, 25 bp, Homo sapien
agcatgtgggtcgacgaacagcagc

SEQ ID NO: 714945 - DNA, 25 bp, Homo sapien
gagtttcccggtaagcagcacccag

SEQ ID NO: 714946 - DNA, 25 bp, Homo sapien
catctcggatgccatgagtttcccg

SEQ ID NO: 714947 - DNA, 25 bp, Homo sapien
atgtgggtcgacgaacagcagcctc

SEQ ID NO: 714948 - DNA, 25 bp, Homo sapien
gcaaacagtccagacactggatttc

SEQ ID NO: 714949 - DNA, 25 bp, Homo sapien
aactgtgaaaatctgcattggaaaa

SEQ ID NO: 714950 - DNA, 25 bp, Homo sapien
tctgcattggaaaacagatactgcg

SEQ ID NO: 714951 - DNA, 25 bp, Homo sapien
aacagatactgcgagagaacaggtt

SEQ ID NO: 714952 - DNA, 25 bp, Homo sapien
gcattggaaaacagatactgcgaga

SEQ ID NO: 714953 - DNA, 25 bp, Homo sapien
gtgatcccctgctccaggatctcaa

SEQ ID NO: 714954 - DNA, 25 bp, Homo sapien
aggccagtgttcgtccccactcggc

SEQ ID NO: 714955 - DNA, 25 bp, Homo sapien
cttgttgctccgtctcgtccaggct

SEQ ID NO: 714956 - DNA, 25 bp, Homo sapien
tctcaatcataaagggtagagaagc

SEQ ID NO: 714957 - DNA, 25 bp, Homo sapien
aacacttctgaacggcaacacttaa

SEQ ID NO: 714958 - DNA, 25 bp, Homo sapien
cacttaacgagagtctttccattct

SEQ ID NO: 714959 - DNA, 25 bp, Homo sapien
gcaacacttaacgagagtctttcca

SEQ ID NO: 714960 - DNA, 25 bp, Homo sapien
tgaacggcaacacttaacgagagtc

SEQ ID NO: 714961 - DNA, 25 bp, Homo sapien
cgaactgattccatggacactgaca

SEQ ID NO: 714962 - DNA, 25 bp, Homo sapien
ccaggctcctgtcgctgtggatgcc

SEQ ID NO: 714963 - DNA, 25 bp, Homo sapien
ttcggtgttagagccccaggtgaag

SEQ ID NO: 714964 - DNA, 25 bp, Homo sapien
tgtctggcacagactttcggtgtta

SEQ ID NO: 714965 - DNA, 25 bp, Homo sapien
gtagctttcatatcagacctgccgc

SEQ ID NO: 714966 - DNA, 25 bp, Homo sapien
agttcctgctcttgcccagacggga

SEQ ID NO: 714967 - DNA, 25 bp, Homo sapien
ttaccacggtgggaaacgagctgct

SEQ ID NO: 714968 - DNA, 25 bp, Homo sapien
aggaggctgcctcgtcaataatgca

SEQ ID NO: 714969 - DNA, 25 bp, Homo sapien
gtcccccacgggcccctgcatcctc

SEQ ID NO: 714970 - DNA, 25 bp, Homo sapien
tggtgacgagagtgggaacactgcc

SEQ ID NO: 714971 - DNA, 25 bp, Homo sapien
ggaagtgcgggctggtgacgagagt

SEQ ID NO: 714972 - DNA, 25 bp, Homo sapien
tccacatggcacatttgcccctggc

SEQ ID NO: 714973 - DNA, 25 bp, Homo sapien
aatactcagaggcagcgggaagtgc

SEQ ID NO: 714974 - DNA, 25 bp, Homo sapien
ctttcgctcagcagcacgggcacag

SEQ ID NO: 714975 - DNA, 25 bp, Homo sapien
tcgtctggttctcggagagctggat

SEQ ID NO: 714976 - DNA, 25 bp, Homo sapien
cttgcccctcgtctggttctcggag

SEQ ID NO: 714977 - DNA, 25 bp, Homo sapien
tggatggggctttcgctcagcagca

SEQ ID NO: 714978 - DNA, 25 bp, Homo sapien
cggccgtgcggtccaccgaggcagg

SEQ ID NO: 714979 - DNA, 25 bp, Homo sapien
gggcacatgtgctcgagacacggcc

SEQ ID NO: 714980 - DNA, 25 bp, Homo sapien
atgtgctcgagacacggcccatggt

SEQ ID NO: 714981 - DNA, 25 bp, Homo sapien
caggggcacatgtgctcgagacacg

SEQ ID NO: 714982 - DNA, 25 bp, Homo sapien
tcgaggtcccaaggccgatgctgca

SEQ ID NO: 714983 - DNA, 25 bp, Homo sapien
tggtgggtcccaagtaacagagcag

SEQ ID NO: 714984 - DNA, 25 bp, Homo sapien
ggtggctgagcactccctcgaggtc

SEQ ID NO: 714985 - DNA, 25 bp, Homo sapien
gagcctgcagctcttgccatgggca

SEQ ID NO: 714986 - DNA, 25 bp, Homo sapien
agcaggagggggagcggccttcggg

SEQ ID NO: 714987 - DNA, 25 bp, Homo sapien
ctgcagccgcggaggtgggggccac

SEQ ID NO: 714988 - DNA, 25 bp, Homo sapien
cagccgcggaggtgggggccacacc

SEQ ID NO: 714989 - DNA, 25 bp, Homo sapien
ctgggctcggcagcaggagggggag

SEQ ID NO: 714990 - DNA, 25 bp, Homo sapien
ggtctgagctgtgggcgcctgtgct

SEQ ID NO: 714991 - DNA, 25 bp, Homo sapien
gggtctgagctgtgggcgcctgtgc

SEQ ID NO: 714992 - DNA, 25 bp, Homo sapien
tgccacagacgcactgttgctctgc

SEQ ID NO: 714993 - DNA, 25 bp, Homo sapien
caggaccattgccacagacgcactg

SEQ ID NO: 714994 - DNA, 25 bp, Homo sapien
cctgcacaccgggtgctgttgcccc

SEQ ID NO: 714995 - DNA, 25 bp, Homo sapien
gggtttccgagtgcagccagttcag

SEQ ID NO: 714996 - DNA, 25 bp, Homo sapien
ctgccagttcccagggaatgagaag

SEQ ID NO: 714997 - DNA, 25 bp, Homo sapien
aggagtgagggcacaggatcctgac

SEQ ID NO: 714998 - DNA, 25 bp, Homo sapien
gaaggagtgagggcacaggatcctg

SEQ ID NO: 714999 - DNA, 25 bp, Homo sapien
gagtgagggcacaggatcctgacca

SEQ ID NO: 715000 - DNA, 25 bp, Homo sapien
tggagacgtgccgtggacaccccat

SEQ ID NO: 715001 - DNA, 25 bp, Homo sapien
gctggcagtgttgcgttcgtgagga

SEQ ID NO: 715002 - DNA, 25 bp, Homo sapien
tctgatctacgggatgcttccagca

SEQ ID NO: 715003 - DNA, 25 bp, Homo sapien
tgttgcgttcgtgaggagccaggcc

SEQ ID NO: 715004 - DNA, 25 bp, Homo sapien
ctcctatgagatcgaatgccgccgc

SEQ ID NO: 715005 - DNA, 25 bp, Homo sapien
cgcacagctcacgacagggttcatg

SEQ ID NO: 715006 - DNA, 25 bp, Homo sapien
aaaggtaccttgttaatctgcccag

SEQ ID NO: 715007 - DNA, 25 bp, Homo sapien
aactgttccacctcgtatgctcagg

SEQ ID NO: 715008 - DNA, 25 bp, Homo sapien
tcacgtttgagaagcgctgatggct

SEQ ID NO: 715009 - DNA, 25 bp, Homo sapien
acgtttgagaagcgctgatggcttc

SEQ ID NO: 715010 - DNA, 25 bp, Homo sapien
cacgtttgagaagcgctgatggctt

SEQ ID NO: 715011 - DNA, 25 bp, Homo sapien
aaagtgggaggagaaatagccgctg

SEQ ID NO: 715012 - DNA, 25 bp, Homo sapien
gggaggagaaatagccgctggacta

SEQ ID NO: 715013 - DNA, 25 bp, Homo sapien
aggagaaatagccgctggactaggt

SEQ ID NO: 715014 - DNA, 25 bp, Homo sapien
gaaatagccgctggactaggtgaga

SEQ ID NO: 715015 - DNA, 25 bp, Homo sapien
cggggtggcgtgctctgtggttgct

SEQ ID NO: 715016 - DNA, 25 bp, Homo sapien
tgctggtggcgtgctctcatgctct

SEQ ID NO: 715017 - DNA, 25 bp, Homo sapien
ttgctggtggcgtgctctcatgctc

SEQ ID NO: 715018 - DNA, 25 bp, Homo sapien
ctggtggcgtgctctcatgctctgc

SEQ ID NO: 715019 - DNA, 25 bp, Homo sapien
cagaggggtgagtgtggatgcagcc

SEQ ID NO: 715020 - DNA, 25 bp, Homo sapien
agccctatgctgctcctcagactaa

SEQ ID NO: 715021 - DNA, 25 bp, Homo sapien
ctcctcagactaatggtgctgaagg

SEQ ID NO: 715022 - DNA, 25 bp, Homo sapien
tatgctgctcctcagactaatggtg

SEQ ID NO: 715023 - DNA, 25 bp, Homo sapien
ctgcgttgagcgtgccgctccctgt

SEQ ID NO: 715024 - DNA, 25 bp, Homo sapien
gttgagcgtgccgctccctgtgttc

SEQ ID NO: 715025 - DNA, 25 bp, Homo sapien
tgcgttgagcgtgccgctccctgtg

SEQ ID NO: 715026 - DNA, 25 bp, Homo sapien
gcgttgagcgtgccgctccctgtgt

SEQ ID NO: 715027 - DNA, 25 bp, Homo sapien
tcctggttctggctatcgctggagg

SEQ ID NO: 715028 - DNA, 25 bp, Homo sapien
atggggccagtgatgtcggatccct

SEQ ID NO: 715029 - DNA, 25 bp, Homo sapien
tggtggtcctggttctggctatcgc

SEQ ID NO: 715030 - DNA, 25 bp, Homo sapien
gtgatgtcggatccctggtggtcct

SEQ ID NO: 715031 - DNA, 25 bp, Homo sapien
gtggctggggaagattaaggcaacc

SEQ ID NO: 715032 - DNA, 25 bp, Homo sapien
gctggggaagattaaggcaaccctc

SEQ ID NO: 715033 - DNA, 25 bp, Homo sapien
gggaagattaaggcaaccctcaaga

SEQ ID NO: 715034 - DNA, 25 bp, Homo sapien
tggggaagattaaggcaaccctcaa

SEQ ID NO: 715035 - DNA, 25 bp, Homo sapien
acgagggcctgtctcctgcgggctc

SEQ ID NO: 715036 - DNA, 25 bp, Homo sapien
ctccatgcagctgtctggacactgc

SEQ ID NO: 715037 - DNA, 25 bp, Homo sapien
gcacgggagggctttgcacgtccac

SEQ ID NO: 715038 - DNA, 25 bp, Homo sapien
caaacccggttcttatccagtcttg

SEQ ID NO: 715039 - DNA, 25 bp, Homo sapien
gccccgccccccagatgtgcaggtg

SEQ ID NO: 715040 - DNA, 25 bp, Homo sapien
gggccactgtggcaggacaattcgg

SEQ ID NO: 715041 - DNA, 25 bp, Homo sapien
ctgtgtcggggggatcggcggctgc

SEQ ID NO: 715042 - DNA, 25 bp, Homo sapien
tgcaggccagtctcggggggatcgg

SEQ ID NO: 715043 - DNA, 25 bp, Homo sapien
ttatggtaataggactgcggtgccc

SEQ ID NO: 715044 - DNA, 25 bp, Homo sapien
tggtaataggactgcggtgccctga

SEQ ID NO: 715045 - DNA, 25 bp, Homo sapien
ctcgaatctggatcccaggtgaggc

SEQ ID NO: 715046 - DNA, 25 bp, Homo sapien
tgctcttccggcctcgaatctggat

SEQ ID NO: 715047 - DNA, 25 bp, Homo sapien
ttattgtttgtgctattggggagga

SEQ ID NO: 715048 - DNA, 25 bp, Homo sapien
tttattgtttgtgctattggggagg

SEQ ID NO: 715049 - DNA, 25 bp, Homo sapien
tattgtttgtgctattggggaggag

SEQ ID NO: 715050 - DNA, 25 bp, Homo sapien
attgtttgtgctattggggaggagc

SEQ ID NO: 715051 - DNA, 25 bp, Homo sapien
tgggtgggaatggaatttgaacact

SEQ ID NO: 715052 - DNA, 25 bp, Homo sapien
ttgaacactggcgtgattgtgggtt

SEQ ID NO: 715053 - DNA, 25 bp, Homo sapien
gtgattgtgggttggtatctcagtc

SEQ ID NO: 715054 - DNA, 25 bp, Homo sapien
gaatggaatttgaacactggcgtga

SEQ ID NO: 715055 - DNA, 25 bp, Homo sapien
ccacacgccgctttgttcactgagg

SEQ ID NO: 715056 - DNA, 25 bp, Homo sapien
tgctctcaggctcgtggcatgaccg

SEQ ID NO: 715057 - DNA, 25 bp, Homo sapien
tgaggcggactcagaattcctgtca

SEQ ID NO: 715058 - DNA, 25 bp, Homo sapien
tccaaaagttggattgcactacacg

SEQ ID NO: 715059 - DNA, 25 bp, Homo sapien
tcactaataccctggctatgacagc

SEQ ID NO: 715060 - DNA, 25 bp, Homo sapien
catgaggaccatacagggaaggagc

SEQ ID NO: 715061 - DNA, 25 bp, Homo sapien
gcttctttgggatgtccgctctgca

SEQ ID NO: 715062 - DNA, 25 bp, Homo sapien
tccctcgtacgagagttgcagaact

SEQ ID NO: 715063 - DNA, 25 bp, Homo sapien
gggtgcccacgccttctgaagcacg

SEQ ID NO: 715064 - DNA, 25 bp, Homo sapien
gctgccatcaggacgatcaggaccg

SEQ ID NO: 715065 - DNA, 25 bp, Homo sapien
cgttcccgagtacatataaggacga

SEQ ID NO: 715066 - DNA, 25 bp, Homo sapien
aaaataagccccgaaatgattggcg

SEQ ID NO: 715067 - DNA, 25 bp, Homo sapien
tattagccgggactgatgtagccac

SEQ ID NO: 715068 - DNA, 25 bp, Homo sapien
tatctggagttgagccggatctgcc

SEQ ID NO: 715069 - DNA, 25 bp, Homo sapien
gaaaatcgtctactcttggtccctg

SEQ ID NO: 715070 - DNA, 25 bp, Homo sapien
taagcacagactgggacaggacatc

SEQ ID NO: 715071 - DNA, 25 bp, Homo sapien
tgtgacaatggagaagagttgcccc

SEQ ID NO: 715072 - DNA, 25 bp, Homo sapien
tcacttgagtagaggcaccagaggg

SEQ ID NO: 715073 - DNA, 25 bp, Homo sapien
acactgtggctgatggaccggaaag

SEQ ID NO: 715074 - DNA, 25 bp, Homo sapien
tcttggcgatggactgagaccctgt

SEQ ID NO: 715075 - DNA, 25 bp, Homo sapien
gattctcgcagaaaacatcggctca

SEQ ID NO: 715076 - DNA, 25 bp, Homo sapien
ccttataaacgaggcctgagctgga

SEQ ID NO: 715077 - DNA, 25 bp, Homo sapien
ggtaggcccgacacagatgctagtg

SEQ ID NO: 715078 - DNA, 25 bp, Homo sapien
taagcttcccagtcagttacagcag

SEQ ID NO: 715079 - DNA, 25 bp, Homo sapien
ggagaaacagcatccggtcagcaca

SEQ ID NO: 715080 - DNA, 25 bp, Homo sapien
taaggtgggctttgaccacgtggac

SEQ ID NO: 715081 - DNA, 25 bp, Homo sapien
gctggtcttcaaaccggcctgaggg

SEQ ID NO: 715082 - DNA, 25 bp, Homo sapien
ggtcagcacaaaccgtaaacagcag

SEQ ID NO: 715083 - DNA, 25 bp, Homo sapien
cacctaacgatttccccagcagggt

SEQ ID NO: 715084 - DNA, 25 bp, Homo sapien
agcaaaggctccacctaacgatttc

SEQ ID NO: 715085 - DNA, 25 bp, Homo sapien
tccacctaacgatttccccagcagg

SEQ ID NO: 715086 - DNA, 25 bp, Homo sapien
aggctccacctaacgatttccccag

SEQ ID NO: 715087 - DNA, 25 bp, Homo sapien
ttgaatcaattgtgatccgagagcc

SEQ ID NO: 715088 - DNA, 25 bp, Homo sapien
cgtcctggccgtcacttaaccaggg

SEQ ID NO: 715089 - DNA, 25 bp, Homo sapien
caattgtgatccgagagcctgatgt

SEQ ID NO: 715090 - DNA, 25 bp, Homo sapien
ttgtgatccgagagcctgatgtctg

SEQ ID NO: 715091 - DNA, 25 bp, Homo sapien
aggcggaccgtggtgcagggaagca

SEQ ID NO: 715092 - DNA, 25 bp, Homo sapien
ggagatgtagggcgtcagggccccg

SEQ ID NO: 715093 - DNA, 25 bp, Homo sapien
caggcggaccgtggtgcagggaagc

SEQ ID NO: 715094 - DNA, 25 bp, Homo sapien
agaggagatgtagggcgtcagggcc

SEQ ID NO: 715095 - DNA, 25 bp, Homo sapien
ctcatggcagctggacgttcccacg

SEQ ID NO: 715096 - DNA, 25 bp, Homo sapien
gacgttcccacgaacacgaagtgtc

SEQ ID NO: 715097 - DNA, 25 bp, Homo sapien
cagctggacgttcccacgaacacga

SEQ ID NO: 715098 - DNA, 25 bp, Homo sapien
atggcagctggacgttcccacgaac

SEQ ID NO: 715099 - DNA, 25 bp, Homo sapien
ctctgaactgggctgacctgggccg

SEQ ID NO: 715100 - DNA, 25 bp, Homo sapien
tccctccgcactgggctgacctggg

SEQ ID NO: 715101 - DNA, 25 bp, Homo sapien
tctccccggactgggctgacctggg

SEQ ID NO: 715102 - DNA, 25 bp, Homo sapien
ctccccccggactgggctgacctgg

SEQ ID NO: 715103 - DNA, 25 bp, Homo sapien
tcctccgagagcctcagctggactg

SEQ ID NO: 715104 - DNA, 25 bp, Homo sapien
ctccgagagcctcagctggactggg

SEQ ID NO: 715105 - DNA, 25 bp, Homo sapien
ccgagagcctcagctggactgggct

SEQ ID NO: 715106 - DNA, 25 bp, Homo sapien
tccgagagcctcagctggactgggc

SEQ ID NO: 715107 - DNA, 25 bp, Homo sapien
cttcccgacagacgccccgttagct

SEQ ID NO: 715108 - DNA, 25 bp, Homo sapien
agtgtgtccaaactgcccctaaatc

SEQ ID NO: 715109 - DNA, 25 bp, Homo sapien
tgtgtccaaactgcccctaaatcct

SEQ ID NO: 715110 - DNA, 25 bp, Homo sapien
tgtccaaactgcccctaaatcctgt

SEQ ID NO: 715111 - DNA, 25 bp, Homo sapien
cagacgtctgatcgccacgctggct

SEQ ID NO: 715112 - DNA, 25 bp, Homo sapien
ctttcttgctgacactaatggcctc

SEQ ID NO: 715113 - DNA, 25 bp, Homo sapien
ggtcgtgccgggcacacccagacgt

SEQ ID NO: 715114 - DNA, 25 bp, Homo sapien
tgctgacactaatggcctcccaggg

SEQ ID NO: 715115 - DNA, 25 bp, Homo sapien
cccgtgatgtcagccaggcctcggc

SEQ ID NO: 715116 - DNA, 25 bp, Homo sapien
gtgatgtcagccaggcctcggcggt

SEQ ID NO: 715117 - DNA, 25 bp, Homo sapien
tgatgtcagccaggcctcggcggtg

SEQ ID NO: 715118 - DNA, 25 bp, Homo sapien
atgtcagccaggcctcggcggtgcc

SEQ ID NO: 715119 - DNA, 25 bp, Homo sapien
tgtccagtaaccacagggccttggg

SEQ ID NO: 715120 - DNA, 25 bp, Homo sapien
gtgtccagtaaccacagggccttgg

SEQ ID NO: 715121 - DNA, 25 bp, Homo sapien
agggcaggagccaagacgccttgtg

SEQ ID NO: 715122 - DNA, 25 bp, Homo sapien
ccaagacgccttgtgcaggaggagt

SEQ ID NO: 715123 - DNA, 25 bp, Homo sapien
caggagccaagacgccttgtgcagg

SEQ ID NO: 715124 - DNA, 25 bp, Homo sapien
agccaagacgccttgtgcaggagga

SEQ ID NO: 715125 - DNA, 25 bp, Homo sapien
gagtggctgcctctaaggtgctcag

SEQ ID NO: 715126 - DNA, 25 bp, Homo sapien
tcctggctccgcgtgagggttccat

SEQ ID NO: 715127 - DNA, 25 bp, Homo sapien
gtaaccaggcctgcgaagagtggct

SEQ ID NO: 715128 - DNA, 25 bp, Homo sapien
tgcacatggtgcaagacaggtaacc

SEQ ID NO: 715129 - DNA, 25 bp, Homo sapien
ttaaagcgcactgtgttgcagcagg

SEQ ID NO: 715130 - DNA, 25 bp, Homo sapien
tgttgcccagctccatgtgtgagag

SEQ ID NO: 715131 - DNA, 25 bp, Homo sapien
tgacctccgaagcagggtcctggca

SEQ ID NO: 715132 - DNA, 25 bp, Homo sapien
cacaaggagctggtgtgacctccga

SEQ ID NO: 715133 - DNA, 25 bp, Homo sapien
agctgccgacagcacacataagaag

SEQ ID NO: 715134 - DNA, 25 bp, Homo sapien
tccaggatagcgtggccgctggtca

SEQ ID NO: 715135 - DNA, 25 bp, Homo sapien
caaagcagccccgtcctgacggtaa

SEQ ID NO: 715136 - DNA, 25 bp, Homo sapien
taagaagtcatggatgggtccgagc

SEQ ID NO: 715137 - DNA, 25 bp, Homo sapien
cctcgaggacgtgagggaggccggg

SEQ ID NO: 715138 - DNA, 25 bp, Homo sapien
caccatccgtggaggggccctgtga

SEQ ID NO: 715139 - DNA, 25 bp, Homo sapien
cccagcagatagacagggagcacct

SEQ ID NO: 715140 - DNA, 25 bp, Homo sapien
accgagggacgcctcgaggacgtga

SEQ ID NO: 715141 - DNA, 25 bp, Homo sapien
tgcttgtacaaccagctggtggctt

SEQ ID NO: 715142 - DNA, 25 bp, Homo sapien
ggtgcttgtacaaccagctggtggc

SEQ ID NO: 715143 - DNA, 25 bp, Homo sapien
gggagcggtgcttgtacaaccagct

SEQ ID NO: 715144 - DNA, 25 bp, Homo sapien
gggaatatgagttaatctggatgtc

SEQ ID NO: 715145 - DNA, 25 bp, Homo sapien
ccacgcccgtctcggcaaggaggag

SEQ ID NO: 715146 - DNA, 25 bp, Homo sapien
caaggagcgactgggcctggaccca

SEQ ID NO: 715147 - DNA, 25 bp, Homo sapien
ggagggcgcgctcggttctggccag

SEQ ID NO: 715148 - DNA, 25 bp, Homo sapien
tcctgcccgcggtttgcagagggaa

SEQ ID NO: 715149 - DNA, 25 bp, Homo sapien
gggcctggagcgcgttctgcccgcg

SEQ ID NO: 715150 - DNA, 25 bp, Homo sapien
cccgcgcgcccctctagctgcagct

SEQ ID NO: 715151 - DNA, 25 bp, Homo sapien
ccggcccgggcctggagcgcgttct

SEQ ID NO: 715152 - DNA, 25 bp, Homo sapien
gcacgcggaaccggcgcaccagcat

SEQ ID NO: 715153 - DNA, 25 bp, Homo sapien
tgagcacgcggaaccggcgcaccag

SEQ ID NO: 715154 - DNA, 25 bp, Homo sapien
ggatgagcacgcggaaccggcgcac

SEQ ID NO: 715155 - DNA, 25 bp, Homo sapien
atgagcacgcggaaccggcgcacca

SEQ ID NO: 715156 - DNA, 25 bp, Homo sapien
gcgcgcaggccaccaggaacaccat

SEQ ID NO: 715157 - DNA, 25 bp, Homo sapien
gctgcgcgcacgaacagccgggctc

SEQ ID NO: 715158 - DNA, 25 bp, Homo sapien
ccgcgcgccgcgtcgctccagcctg

SEQ ID NO: 715159 - DNA, 25 bp, Homo sapien
gggctgcgcgcacgaacagccgggc

SEQ ID NO: 715160 - DNA, 25 bp, Homo sapien
ttgttgggccagcccgcgtcgccgg

SEQ ID NO: 715161 - DNA, 25 bp, Homo sapien
tgttgggccagcccgcgtcgccggc

SEQ ID NO: 715162 - DNA, 25 bp, Homo sapien
cttgttgggccagcccgcgtcgccg

SEQ ID NO: 715163 - DNA, 25 bp, Homo sapien
ccgcgggcggcagtttctccagcga

SEQ ID NO: 715164 - DNA, 25 bp, Homo sapien
acgtcctcctccgtgagcggcggaa

SEQ ID NO: 715165 - DNA, 25 bp, Homo sapien
ggtaaagcgggtgctcgaacagcct

SEQ ID NO: 715166 - DNA, 25 bp, Homo sapien
gttcacattgaacaggacgtcctcc

SEQ ID NO: 715167 - DNA, 25 bp, Homo sapien
gcaggcaaggctcagaggcttccaa

SEQ ID NO: 715168 - DNA, 25 bp, Homo sapien
cactgcttcggtgtagcatctgctt

SEQ ID NO: 715169 - DNA, 25 bp, Homo sapien
gccttgtcgtggttaatgttccact

SEQ ID NO: 715170 - DNA, 25 bp, Homo sapien
ccttcggcaggtagttacttattct

SEQ ID NO: 715171 - DNA, 25 bp, Homo sapien
aaagctgaggtgctttctgccgaag

SEQ ID NO: 715172 - DNA, 25 bp, Homo sapien
tgaggtgctttctgccgaagctctg

SEQ ID NO: 715173 - DNA, 25 bp, Homo sapien
ctaaagctgaggtgctttctgccga

SEQ ID NO: 715174 - DNA, 25 bp, Homo sapien
gctgaggtgctttctgccgaagctc

SEQ ID NO: 715175 - DNA, 25 bp, Homo sapien
ggttgtgtctggagtacagctcgta

SEQ ID NO: 715176 - DNA, 25 bp, Homo sapien
aacttgagccagttgggataggagt

SEQ ID NO: 715177 - DNA, 25 bp, Homo sapien
acgctggtgatcctctgggagctga

SEQ ID NO: 715178 - DNA, 25 bp, Homo sapien
taccggttgataccaatgtggaact

SEQ ID NO: 715179 - DNA, 25 bp, Homo sapien
gcacatccagtgtgagagcacacga

SEQ ID NO: 715180 - DNA, 25 bp, Homo sapien
catcgtgcggcagatcaggagcaca

SEQ ID NO: 715181 - DNA, 25 bp, Homo sapien
cagagcgcagtggaccggctgtcca

SEQ ID NO: 715182 - DNA, 25 bp, Homo sapien
tgtcatccagttggcacccccggga

SEQ ID NO: 715183 - DNA, 25 bp, Homo sapien
tatgaaactgcacagcgccttgctg

SEQ ID NO: 715184 - DNA, 25 bp, Homo sapien
tacaagctgagaacaatggcaccaa

SEQ ID NO: 715185 - DNA, 25 bp, Homo sapien
gaaggacggcttcaaaaccacaaga

SEQ ID NO: 715186 - DNA, 25 bp, Homo sapien
caagcactggtgacaaatgggacct

SEQ ID NO: 715187 - DNA, 25 bp, Homo sapien
ggagaaaggcagcgctttcacggag

SEQ ID NO: 715188 - DNA, 25 bp, Homo sapien
agaaaggcagcgctttcacggaggg

SEQ ID NO: 715189 - DNA, 25 bp, Homo sapien
aaaggcagcgctttcacggaggggg

SEQ ID NO: 715190 - DNA, 25 bp, Homo sapien
aggcagcgctttcacggaggggggc

SEQ ID NO: 715191 - DNA, 25 bp, Homo sapien
aggggcagaagggacgttctggctg

SEQ ID NO: 715192 - DNA, 25 bp, Homo sapien
gggcagaagggacgttctggctgtg

SEQ ID NO: 715193 - DNA, 25 bp, Homo sapien
ggcagaagggacgttctggctgtgg

SEQ ID NO: 715194 - DNA, 25 bp, Homo sapien
ggggcagaagggacgttctggctgt

SEQ ID NO: 715195 - DNA, 25 bp, Homo sapien
aatgcatcggatatttccttaatgg

SEQ ID NO: 715196 - DNA, 25 bp, Homo sapien
gcatcggatatttccttaatggcca

SEQ ID NO: 715197 - DNA, 25 bp, Homo sapien
cggatatttccttaatggccatgct

SEQ ID NO: 715198 - DNA, 25 bp, Homo sapien
gttgatcaatgcatcggatatttcc

SEQ ID NO: 715199 - DNA, 25 bp, Homo sapien
gagagaagctcatacggacagcggc

SEQ ID NO: 715200 - DNA, 25 bp, Homo sapien
tgaagtgctcgttcctcctcaggat

SEQ ID NO: 715201 - DNA, 25 bp, Homo sapien
ggaaggccacgcacaaagtactagt

SEQ ID NO: 715202 - DNA, 25 bp, Homo sapien
ttgcattggtcccacgcagcgagat

SEQ ID NO: 715203 - DNA, 25 bp, Homo sapien
gtgttggaaagctgaccggtcggtg

SEQ ID NO: 715204 - DNA, 25 bp, Homo sapien
accggtcggtgagggaggtggcgag

SEQ ID NO: 715205 - DNA, 25 bp, Homo sapien
gaaagctgaccggtcggtgagggag

SEQ ID NO: 715206 - DNA, 25 bp, Homo sapien
tgaccggtcggtgagggaggtggcg

SEQ ID NO: 715207 - DNA, 25 bp, Homo sapien
tttgatgacaaaggcacacgtggtg

SEQ ID NO: 715208 - DNA, 25 bp, Homo sapien
tggaagttcgtactcagaagggccc

SEQ ID NO: 715209 - DNA, 25 bp, Homo sapien
tgtctgcatcagaaggaaagtcggc

SEQ ID NO: 715210 - DNA, 25 bp, Homo sapien
cacgcaggtgctaatctcggacaag

SEQ ID NO: 715211 - DNA, 25 bp, Homo sapien
tcgtccgtcaagagggccagcgtct

SEQ ID NO: 715212 - DNA, 25 bp, Homo sapien
tttggccctggtcatctcgtccgtc

SEQ ID NO: 715213 - DNA, 25 bp, Homo sapien
tgccgtcagcgtgggcccccatgtt

SEQ ID NO: 715214 - DNA, 25 bp, Homo sapien
tgttgccgcctttggccctggtcat

SEQ ID NO: 715215 - DNA, 25 bp, Homo sapien
gtgcccggggcagttacgcctcggc

SEQ ID NO: 715216 - DNA, 25 bp, Homo sapien
gccccgcgtgctccggagctctctg

SEQ ID NO: 715217 - DNA, 25 bp, Homo sapien
gcagttacgcctcggccagggacct

SEQ ID NO: 715218 - DNA, 25 bp, Homo sapien
gcagccccgcgtgctccggagctct

SEQ ID NO: 715219 - DNA, 25 bp, Homo sapien
ctgggatgtgctgcagccacgatca

SEQ ID NO: 715220 - DNA, 25 bp, Homo sapien
cgccgaggtcgggaaagctctggct

SEQ ID NO: 715221 - DNA, 25 bp, Homo sapien
ctgatgccgtgtcctcggtcctgag

SEQ ID NO: 715222 - DNA, 25 bp, Homo sapien
gccacgatcatctccggtatctggg

SEQ ID NO: 715223 - DNA, 25 bp, Homo sapien
gaagaaggaggtggacggtcgcttc

SEQ ID NO: 715224 - DNA, 25 bp, Homo sapien
cggtcgcttcagctcttgacccatt

SEQ ID NO: 715225 - DNA, 25 bp, Homo sapien
tggacggtcgcttcagctcttgacc

SEQ ID NO: 715226 - DNA, 25 bp, Homo sapien
gaggtggacggtcgcttcagctctt

SEQ ID NO: 715227 - DNA, 25 bp, Homo sapien
tctgcggagctcgatgaaggcaacg

SEQ ID NO: 715228 - DNA, 25 bp, Homo sapien
ggcagcccgtgagcttagagcttat

SEQ ID NO: 715229 - DNA, 25 bp, Homo sapien
tcctcttgaagtagccacagtgaga

SEQ ID NO: 715230 - DNA, 25 bp, Homo sapien
gagcttatcaaaagcccggctctgg

SEQ ID NO: 715231 - DNA, 25 bp, Homo sapien
acagatcccacctcaaaccacgaca

SEQ ID NO: 715232 - DNA, 25 bp, Homo sapien
ctacagatcccacctcaaaccacga

SEQ ID NO: 715233 - DNA, 25 bp, Homo sapien
tacagatcccacctcaaaccacgac

SEQ ID NO: 715234 - DNA, 25 bp, Homo sapien
cagatcccacctcaaaccacgacat

SEQ ID NO: 715235 - DNA, 25 bp, Homo sapien
aatgccaggaattctcaatggccat

SEQ ID NO: 715236 - DNA, 25 bp, Homo sapien
cctgtggaacctacggtccagggag

SEQ ID NO: 715237 - DNA, 25 bp, Homo sapien
tgtcctgtggaacctacggtccagg

SEQ ID NO: 715238 - DNA, 25 bp, Homo sapien
attaaatgccaggaattctcaatgg

SEQ ID NO: 715239 - DNA, 25 bp, Homo sapien
cattgtggctgaagaccagagagcc

SEQ ID NO: 715240 - DNA, 25 bp, Homo sapien
aggaagctgggccagcaccactcca

SEQ ID NO: 715241 - DNA, 25 bp, Homo sapien
aggaaagaagccgagcccagaagac

SEQ ID NO: 715242 - DNA, 25 bp, Homo sapien
tggacctgctgaagccaaggtggag

SEQ ID NO: 715243 - DNA, 25 bp, Homo sapien
ggagagctctgtaccgcccggcaca

SEQ ID NO: 715244 - DNA, 25 bp, Homo sapien
gtacacaatccaggctgccaaggag

SEQ ID NO: 715245 - DNA, 25 bp, Homo sapien
tgctgcatgaacagtacacaatcca

SEQ ID NO: 715246 - DNA, 25 bp, Homo sapien
tctgtaccgcccggcacaggaagag

SEQ ID NO: 715247 - DNA, 25 bp, Homo sapien
aaaatggatcactgcgcctgtggct

SEQ ID NO: 715248 - DNA, 25 bp, Homo sapien
tgcgggacgtcatcaaacagtcgct

SEQ ID NO: 715249 - DNA, 25 bp, Homo sapien
cggacttcccgttgccaaaatggat

SEQ ID NO: 715250 - DNA, 25 bp, Homo sapien
aatgggaaagcacgtcgtccacgga

SEQ ID NO: 715251 - DNA, 25 bp, Homo sapien
aagatgtgaacaggaacgtcctgtg

SEQ ID NO: 715252 - DNA, 25 bp, Homo sapien
gaaaggacatttggtgcatacagca

SEQ ID NO: 715253 - DNA, 25 bp, Homo sapien
ctgtgactaggaataatgaaaggac

SEQ ID NO: 715254 - DNA, 25 bp, Homo sapien
caggaacgtcctgtgactaggaata

SEQ ID NO: 715255 - DNA, 25 bp, Homo sapien
tctgccagcagtaaagccaacactc

SEQ ID NO: 715256 - DNA, 25 bp, Homo sapien
tacgatgacaggtaactcagagaca

SEQ ID NO: 715257 - DNA, 25 bp, Homo sapien
tcctgagcaggtgctatgtcacacc

SEQ ID NO: 715258 - DNA, 25 bp, Homo sapien
gaaccatgcacagtgaagaggccag

SEQ ID NO: 715259 - DNA, 25 bp, Homo sapien
tgttttgaggagtaagacttggccc

SEQ ID NO: 715260 - DNA, 25 bp, Homo sapien
tgacagtaggcttacaccgacagct

SEQ ID NO: 715261 - DNA, 25 bp, Homo sapien
tacagagcgtgctccacagagttcc

SEQ ID NO: 715262 - DNA, 25 bp, Homo sapien
gagttacaccgtttacagctagcaa

SEQ ID NO: 715263 - DNA, 25 bp, Homo sapien
ctctcttgacaagaacaggcctggt

SEQ ID NO: 715264 - DNA, 25 bp, Homo sapien
gttgttcccggaaggtctctcttga

SEQ ID NO: 715265 - DNA, 25 bp, Homo sapien
cagcagcacacatcgagcaggaaaa

SEQ ID NO: 715266 - DNA, 25 bp, Homo sapien
gaaaagctgtccatgcatccccagt

SEQ ID NO: 715267 - DNA, 25 bp, Homo sapien
ccagtcgtaggtgcaggggacccga

SEQ ID NO: 715268 - DNA, 25 bp, Homo sapien
gtcgtaggtgcaggggacccgagca

SEQ ID NO: 715269 - DNA, 25 bp, Homo sapien
gtaggtgcaggggacccgagcagca

SEQ ID NO: 715270 - DNA, 25 bp, Homo sapien
cagtcgtaggtgcaggggacccgag

SEQ ID NO: 715271 - DNA, 25 bp, Homo sapien
agctgctacctgagccgtgcagcgt

SEQ ID NO: 715272 - DNA, 25 bp, Homo sapien
gagccgtgcagcgtgttcaaagtct

SEQ ID NO: 715273 - DNA, 25 bp, Homo sapien
tacctgagccgtgcagcgtgttcaa

SEQ ID NO: 715274 - DNA, 25 bp, Homo sapien
gcagcgtgttcaaagtcttctgcat

SEQ ID NO: 715275 - DNA, 25 bp, Homo sapien
agggataaggattcgtgtaggcaaa

SEQ ID NO: 715276 - DNA, 25 bp, Homo sapien
gagaggaagggataaggattcgtgt

SEQ ID NO: 715277 - DNA, 25 bp, Homo sapien
gctctgagtgctgccatacggacgc

SEQ ID NO: 715278 - DNA, 25 bp, Homo sapien
ctgacgccacggtgcggctctgagt

SEQ ID NO: 715279 - DNA, 25 bp, Homo sapien
gacctcaggcacctcgtcgttgagg

SEQ ID NO: 715280 - DNA, 25 bp, Homo sapien
acctcgtcgttgaggctactgagca

SEQ ID NO: 715281 - DNA, 25 bp, Homo sapien
gaaggagtaacggtcacgcagacac

SEQ ID NO: 715282 - DNA, 25 bp, Homo sapien
ggcacctcgtcgttgaggctactga

SEQ ID NO: 715283 - DNA, 25 bp, Homo sapien
gcaggccaacgtcctcccagaggct

SEQ ID NO: 715284 - DNA, 25 bp, Homo sapien
cccctggagcgagcggtgaggtgag

SEQ ID NO: 715285 - DNA, 25 bp, Homo sapien
cagggcccgagtccaccgaggagaa

SEQ ID NO: 715286 - DNA, 25 bp, Homo sapien
agcacagggcccgagtccaccgagg

SEQ ID NO: 715287 - DNA, 25 bp, Homo sapien
agcagacagactggcccctggagcg

SEQ ID NO: 715288 - DNA, 25 bp, Homo sapien
tgaacgtgtgcttccgtgtgagaag

SEQ ID NO: 715289 - DNA, 25 bp, Homo sapien
ggcgtgaacgtgtgcttccgtgtga

SEQ ID NO: 715290 - DNA, 25 bp, Homo sapien
caggcgtgaacgtgtgcttccgtgt

SEQ ID NO: 715291 - DNA, 25 bp, Homo sapien
cgtgaacgtgtgcttccgtgtgaga

SEQ ID NO: 715292 - DNA, 25 bp, Homo sapien
cacgcggtacgctcagtcttgaatt

SEQ ID NO: 715293 - DNA, 25 bp, Homo sapien
gtttagtgcccgctcctctgtggag

SEQ ID NO: 715294 - DNA, 25 bp, Homo sapien
tgtgccgggacaaataccagctgtg

SEQ ID NO: 715295 - DNA, 25 bp, Homo sapien
gcctgacacaagtggaagcctctcg

SEQ ID NO: 715296 - DNA, 25 bp, Homo sapien
tgggagcagctgtgccgacttcact

SEQ ID NO: 715297 - DNA, 25 bp, Homo sapien
tccggaggacgacctccaggtgctg

SEQ ID NO: 715298 - DNA, 25 bp, Homo sapien
acccagtcggtgatgtcgtggcaca

SEQ ID NO: 715299 - DNA, 25 bp, Homo sapien
tcctcgtcggtgcaggcctggaaca

SEQ ID NO: 715300 - DNA, 25 bp, Homo sapien
gagggcgtcttcttcagcgtcgata

SEQ ID NO: 715301 - DNA, 25 bp, Homo sapien
gtgccagctctgtggcgatggctgc

SEQ ID NO: 715302 - DNA, 25 bp, Homo sapien
tggctgccaggtgcggctggagggc

SEQ ID NO: 715303 - DNA, 25 bp, Homo sapien
gggctgacaaacgtcccgacgagct

SEQ ID NO: 715304 - DNA, 25 bp, Homo sapien
gccggtagcacctgcgagggccact

SEQ ID NO: 715305 - DNA, 25 bp, Homo sapien
gcgagggccactattgtcagcagca

SEQ ID NO: 715306 - DNA, 25 bp, Homo sapien
tcagcagcacgtccaagagctgcag

SEQ ID NO: 715307 - DNA, 25 bp, Homo sapien
agcacgtccaagagctgcaggctgg

SEQ ID NO: 715308 - DNA, 25 bp, Homo sapien
ctgactgtgcgacgatgacactgaa

SEQ ID NO: 715309 - DNA, 25 bp, Homo sapien
tggccagtgagtccatcgtctcctg

SEQ ID NO: 715310 - DNA, 25 bp, Homo sapien
accaatgtgcttgcggtagaggtcc

SEQ ID NO: 715311 - DNA, 25 bp, Homo sapien
gtccagtcaaggtgcgacgcggtca

SEQ ID NO: 715312 - DNA, 25 bp, Homo sapien
gaacgatcttagcatcctcagatgc

SEQ ID NO: 715313 - DNA, 25 bp, Homo sapien
gagattgtgtaagaacgatcttagc

SEQ ID NO: 715314 - DNA, 25 bp, Homo sapien
tgcagagcacgaccaccctggtgca

SEQ ID NO: 715315 - DNA, 25 bp, Homo sapien
gcatcctcagatgcagagcacgacc

SEQ ID NO: 715316 - DNA, 25 bp, Homo sapien
gggcccaaagagatgtgtgttccaa

SEQ ID NO: 715317 - DNA, 25 bp, Homo sapien
tgacggccctaaggcttgcagagca

SEQ ID NO: 715318 - DNA, 25 bp, Homo sapien
tttagattcagaggtgcacgtgcgg

SEQ ID NO: 715319 - DNA, 25 bp, Homo sapien
taaagtgtttaatgccccgagtgca

SEQ ID NO: 715320 - DNA, 25 bp, Homo sapien
aaggcagaaaaatcacttgatccca

SEQ ID NO: 715321 - DNA, 25 bp, Homo sapien
ttgatcccagaagtttgaggctaca

SEQ ID NO: 715322 - DNA, 25 bp, Homo sapien
ctaaggcagaaaaatcacttgatcc

SEQ ID NO: 715323 - DNA, 25 bp, Homo sapien
ggctaaggcagaaaaatcacttgat

SEQ ID NO: 715324 - DNA, 25 bp, Homo sapien
tacagtagtgcatgctcattagaga

SEQ ID NO: 715325 - DNA, 25 bp, Homo sapien
tctgtattccaaggacacgatgttg

SEQ ID NO: 715326 - DNA, 25 bp, Homo sapien
tcctctcaaagtttagaaattatcc

SEQ ID NO: 715327 - DNA, 25 bp, Homo sapien
tgtattatatttgaggctgtgcccc

SEQ ID NO: 715328 - DNA, 25 bp, Homo sapien
ccagcgggaccctacagtctttaat

SEQ ID NO: 715329 - DNA, 25 bp, Homo sapien
agttcccactctatttgcttattag

SEQ ID NO: 715330 - DNA, 25 bp, Homo sapien
cactagaagggctggatagttccca

SEQ ID NO: 715331 - DNA, 25 bp, Homo sapien
catatttcctcatcactagaagggc

SEQ ID NO: 715332 - DNA, 25 bp, Homo sapien
atgaagaaatgggaccctacagtct

SEQ ID NO: 715333 - DNA, 25 bp, Homo sapien
ttctattaaattatgccccgatgca

SEQ ID NO: 715334 - DNA, 25 bp, Homo sapien
taacttcgtatgaggtatttgggtc

SEQ ID NO: 715335 - DNA, 25 bp, Homo sapien
cattggcaattccagatgcgcaccg

SEQ ID NO: 715336 - DNA, 25 bp, Homo sapien
tgctggcggacacttctgcccggag

SEQ ID NO: 715337 - DNA, 25 bp, Homo sapien
aagcacgagcgctcctgctggcgga

SEQ ID NO: 715338 - DNA, 25 bp, Homo sapien
agggacacttccacgggaccatgtg

SEQ ID NO: 715339 - DNA, 25 bp, Homo sapien
cgctgcaaggatacttccgcccggg

SEQ ID NO: 715340 - DNA, 25 bp, Homo sapien
tcgaggtaggcgtggacacttccgc

SEQ ID NO: 715341 - DNA, 25 bp, Homo sapien
tggacacttccgcctgggccacgtg

SEQ ID NO: 715342 - DNA, 25 bp, Homo sapien
gacacttccactggaccacttgtct

SEQ ID NO: 715343 - DNA, 25 bp, Homo sapien
atgagcgctcctgctcgaggtaggc

SEQ ID NO: 715344 - DNA, 25 bp, Homo sapien
gcttatccaagcaactgtgagtcac

SEQ ID NO: 715345 - DNA, 25 bp, Homo sapien
tccggtgggcgcgaggcttgggcgc

SEQ ID NO: 715346 - DNA, 25 bp, Homo sapien
tggccccgggccagtgtagagggag

SEQ ID NO: 715347 - DNA, 25 bp, Homo sapien
tccatgaatgacagggcaaggacag

SEQ ID NO: 715348 - DNA, 25 bp, Homo sapien
cgtgggcacgacgtgtggcagggct

SEQ ID NO: 715349 - DNA, 25 bp, Homo sapien
cctcagcgtgggcacgacgtgtggc

SEQ ID NO: 715350 - DNA, 25 bp, Homo sapien
tcagcgtgggcacgacgtgtggcag

SEQ ID NO: 715351 - DNA, 25 bp, Homo sapien
gggcacgacgtgtggcagggcttct

SEQ ID NO: 715352 - DNA, 25 bp, Homo sapien
gagttgatggtgtccgtggctctga

SEQ ID NO: 715353 - DNA, 25 bp, Homo sapien
gttgatggtgtccgtggctctgagc

SEQ ID NO: 715354 - DNA, 25 bp, Homo sapien
ttgatggtgtccgtggctctgagca

SEQ ID NO: 715355 - DNA, 25 bp, Homo sapien
agttgatggtgtccgtggctctgag

SEQ ID NO: 715356 - DNA, 25 bp, Homo sapien
agggagatggggaaccccttgcgca

SEQ ID NO: 715357 - DNA, 25 bp, Homo sapien
aaccccttgcgcagtgcagtgttgg

SEQ ID NO: 715358 - DNA, 25 bp, Homo sapien
gatggggaaccccttgcgcagtgca

SEQ ID NO: 715359 - DNA, 25 bp, Homo sapien
gggaaccccttgcgcagtgcagtgt

SEQ ID NO: 715360 - DNA, 25 bp, Homo sapien
gggacctgcgtacagccggcgctca

SEQ ID NO: 715361 - DNA, 25 bp, Homo sapien
tggtgtccaaggtggagacaccatg

SEQ ID NO: 715362 - DNA, 25 bp, Homo sapien
tggagacaccatggcagacgcagcc

SEQ ID NO: 715363 - DNA, 25 bp, Homo sapien
ttgggcacccgcacagcagggacct

SEQ ID NO: 715364 - DNA, 25 bp, Homo sapien
tccccgcatgccactgcagattggg

SEQ ID NO: 715365 - DNA, 25 bp, Homo sapien
ctggtgagcgcccagaggcaggaca

SEQ ID NO: 715366 - DNA, 25 bp, Homo sapien
tttgtcaccgtctcgaggtagctgg

SEQ ID NO: 715367 - DNA, 25 bp, Homo sapien
agccgtgcggatggccgcggctgtc

SEQ ID NO: 715368 - DNA, 25 bp, Homo sapien
agcggctgcaaaacccgcagcacga

SEQ ID NO: 715369 - DNA, 25 bp, Homo sapien
gaaaccgcacgctcatgagcggctg

SEQ ID NO: 715370 - DNA, 25 bp, Homo sapien
taccagccggaggtgttcatagaaa

SEQ ID NO: 715371 - DNA, 25 bp, Homo sapien
tcctgggattcgactcctggtcttg

SEQ ID NO: 715372 - DNA, 25 bp, Homo sapien
gatcagtcgcgtcatcttcgaatcc

SEQ ID NO: 715373 - DNA, 25 bp, Homo sapien
tcatgccgcccgaggtttttaagaa

SEQ ID NO: 715374 - DNA, 25 bp, Homo sapien
gagtttctctggatccgtcatgccg

SEQ ID NO: 715375 - DNA, 25 bp, Homo sapien
gataatacggcatgagatcagtcgc

SEQ ID NO: 715376 - DNA, 25 bp, Homo sapien
tttacgatggtcactccctggatgg

SEQ ID NO: 715377 - DNA, 25 bp, Homo sapien
tggcgcggtcgactatggaagtaca

SEQ ID NO: 715378 - DNA, 25 bp, Homo sapien
tagcaaacatctatgggcccggaca

SEQ ID NO: 715379 - DNA, 25 bp, Homo sapien
aaatgcgctcagatgcccaaacgcg

SEQ ID NO: 715380 - DNA, 25 bp, Homo sapien
ctggaaggagggagcgagacaggtg

SEQ ID NO: 715381 - DNA, 25 bp, Homo sapien
gaaggagggagcgagacaggtgtgt

SEQ ID NO: 715382 - DNA, 25 bp, Homo sapien
aaggagggagcgagacaggtgtgtg

SEQ ID NO: 715383 - DNA, 25 bp, Homo sapien
tggaaggagggagcgagacaggtgt

SEQ ID NO: 715384 - DNA, 25 bp, Homo sapien
catcgttggacacgtcatctaggcg

SEQ ID NO: 715385 - DNA, 25 bp, Homo sapien
tcaaggtgaaccagcaactctcggt

SEQ ID NO: 715386 - DNA, 25 bp, Homo sapien
gatagtaggattttgcgttggcacc

SEQ ID NO: 715387 - DNA, 25 bp, Homo sapien
ggccctctctggatcgtcaaggtga

SEQ ID NO: 715388 - DNA, 25 bp, Homo sapien
cacaggcgaggccagattattttcc

SEQ ID NO: 715389 - DNA, 25 bp, Homo sapien
gccgctctcagggtttgccaagaac

SEQ ID NO: 715390 - DNA, 25 bp, Homo sapien
tgagtgaccttcaagggacggcctg

SEQ ID NO: 715391 - DNA, 25 bp, Homo sapien
gaagtcccacgcctatctgaaaagg

SEQ ID NO: 715392 - DNA, 25 bp, Homo sapien
ccaatgtgatttacacacactgcat

SEQ ID NO: 715393 - DNA, 25 bp, Homo sapien
catgccttatatacacctatgtgta

SEQ ID NO: 715394 - DNA, 25 bp, Homo sapien
tgtatcacagtatcacacatgcctt

SEQ ID NO: 715395 - DNA, 25 bp, Homo sapien
aaagtgtaagtgtttgaagtgacgg

SEQ ID NO: 715396 - DNA, 25 bp, Homo sapien
gactgtatcttagaaccgccgcctg

SEQ ID NO: 715397 - DNA, 25 bp, Homo sapien
caggcgtctgaaaaggtgcccacca

SEQ ID NO: 715398 - DNA, 25 bp, Homo sapien
gggtaaaagacctgaacagacagct

SEQ ID NO: 715399 - DNA, 25 bp, Homo sapien
catggaaatgacaaacaggcgtctg

SEQ ID NO: 715400 - DNA, 25 bp, Homo sapien
aggcggccacgccaggaagatccga

SEQ ID NO: 715401 - DNA, 25 bp, Homo sapien
cacgccaggaagatccgagtttctg

SEQ ID NO: 715402 - DNA, 25 bp, Homo sapien
ccgagtttctgacgccgcgtgtcgg

SEQ ID NO: 715403 - DNA, 25 bp, Homo sapien
gacgccgcgtgtcgggaggcggcca

SEQ ID NO: 715404 - DNA, 25 bp, Homo sapien
tccgagtttctgatgccgccggagg

SEQ ID NO: 715405 - DNA, 25 bp, Homo sapien
gccatggcaggaagaccgagtttct

SEQ ID NO: 715406 - DNA, 25 bp, Homo sapien
gttgcgtaacaagagcagccacccc

SEQ ID NO: 715407 - DNA, 25 bp, Homo sapien
agccaccccaggacgatccgagttt

SEQ ID NO: 715408 - DNA, 25 bp, Homo sapien
tcactcccagaacaaccgacagggt

SEQ ID NO: 715409 - DNA, 25 bp, Homo sapien
atctggcagagcacggcgtgaaagt

SEQ ID NO: 715410 - DNA, 25 bp, Homo sapien
tcacaatgagccaaagcttggccct

SEQ ID NO: 715411 - DNA, 25 bp, Homo sapien
gcgtgaaagtgaacggcccaagtcc

SEQ ID NO: 715412 - DNA, 25 bp, Homo sapien
gaaaatcaggaaggcaaacgtgtca

SEQ ID NO: 715413 - DNA, 25 bp, Homo sapien
atgaaaatcaggaaggcaaacgtgt

SEQ ID NO: 715414 - DNA, 25 bp, Homo sapien
aatcaggaaggcaaacgtgtcaggg

SEQ ID NO: 715415 - DNA, 25 bp, Homo sapien
gccagaaagggttgggcgtgtctag

SEQ ID NO: 715416 - DNA, 25 bp, Homo sapien
cggcagtcagaatgtggatacgaat

SEQ ID NO: 715417 - DNA, 25 bp, Homo sapien
cagtcagaatgtggatacgaatgac

SEQ ID NO: 715418 - DNA, 25 bp, Homo sapien
tggacggcagtcagaatgtggatac

SEQ ID NO: 715419 - DNA, 25 bp, Homo sapien
gacggcagtcagaatgtggatacga

SEQ ID NO: 715420 - DNA, 25 bp, Homo sapien
taacgtggatataagtaagctgaca

SEQ ID NO: 715421 - DNA, 25 bp, Homo sapien
acacgagcgacctgatgcagcggat

SEQ ID NO: 715422 - DNA, 25 bp, Homo sapien
acgtgcacggcagtcccagtgtgga

SEQ ID NO: 715423 - DNA, 25 bp, Homo sapien
ggtgcacagtagtcataacgtggat

SEQ ID NO: 715424 - DNA, 25 bp, Homo sapien
aatgtggggacgaatgacctgacgc

SEQ ID NO: 715425 - DNA, 25 bp, Homo sapien
agtcacaatgcggatacgagtgatc

SEQ ID NO: 715426 - DNA, 25 bp, Homo sapien
cgagtgatccgactcacaatgtggg

SEQ ID NO: 715427 - DNA, 25 bp, Homo sapien
tgcggatacgagtgatccgactcac

SEQ ID NO: 715428 - DNA, 25 bp, Homo sapien
tgcttgtggatgacggcctccgtct

SEQ ID NO: 715429 - DNA, 25 bp, Homo sapien
tggccgagcggtgcttgtggatgac

SEQ ID NO: 715430 - DNA, 25 bp, Homo sapien
agatctgggaacagcccgctgccct

SEQ ID NO: 715431 - DNA, 25 bp, Homo sapien
caggagatctgggaacagcccgctg

SEQ ID NO: 715432 - DNA, 25 bp, Homo sapien
tgaggagtacattcttgctgtcaca

SEQ ID NO: 715433 - DNA, 25 bp, Homo sapien
aatcagctgcagatgtttgggagcc

SEQ ID NO: 715434 - DNA, 25 bp, Homo sapien
ataacatgcagaatccactcagagg

SEQ ID NO: 715435 - DNA, 25 bp, Homo sapien
tttgggagccctctcgatgaacaga

SEQ ID NO: 715436 - DNA, 25 bp, Homo sapien
gaacacaatggcttccggtaacact

SEQ ID NO: 715437 - DNA, 25 bp, Homo sapien
cagtagacagaacccaaaaagagat

SEQ ID NO: 715438 - DNA, 25 bp, Homo sapien
tagttcatgaaccagctgcgcacgt

SEQ ID NO: 715439 - DNA, 25 bp, Homo sapien
ttggtgggcacctaagcaggatgca

SEQ ID NO: 715440 - DNA, 25 bp, Homo sapien
catgaaagtataaacgttaatattt

SEQ ID NO: 715441 - DNA, 25 bp, Homo sapien
acacgtgtgtcctctcgggcaagct

SEQ ID NO: 715442 - DNA, 25 bp, Homo sapien
ggcaagctccctgccattcatttct

SEQ ID NO: 715443 - DNA, 25 bp, Homo sapien
tttacagatgtgtagagacggagcg

SEQ ID NO: 715444 - DNA, 25 bp, Homo sapien
gagcggcagcgctgatgtctcttcc

SEQ ID NO: 715445 - DNA, 25 bp, Homo sapien
ttcacatggcgacgggagagagaag

SEQ ID NO: 715446 - DNA, 25 bp, Homo sapien
cagaaggtgaaggggaaccaggcac

SEQ ID NO: 715447 - DNA, 25 bp, Homo sapien
gaaggtgaaggggaaccaggcacat

SEQ ID NO: 715448 - DNA, 25 bp, Homo sapien
agttctccatgggtggggaggcctc

SEQ ID NO: 715449 - DNA, 25 bp, Homo sapien
tctccatgggtggggaggcctcagg

SEQ ID NO: 715450 - DNA, 25 bp, Homo sapien
tgggcaagatatttgtattagtccg

SEQ ID NO: 715451 - DNA, 25 bp, Homo sapien
tcaggaagaacacaacccagttttg

SEQ ID NO: 715452 - DNA, 25 bp, Homo sapien
caggaagaacacaacccagttttgt

SEQ ID NO: 715453 - DNA, 25 bp, Homo sapien
agttttgtctaaatgggcaagatat

SEQ ID NO: 715454 - DNA, 25 bp, Homo sapien
tcttcaaacgacattgttaaaataa

SEQ ID NO: 715455 - DNA, 25 bp, Homo sapien
aaagacaagctatggaatgagagaa

SEQ ID NO: 715456 - DNA, 25 bp, Homo sapien
tccaagggtgtggaccccgccctgc

SEQ ID NO: 715457 - DNA, 25 bp, Homo sapien
tacagtccaagggtgtggaccccgc

SEQ ID NO: 715458 - DNA, 25 bp, Homo sapien
tctcgctatcatgcagggtggattg

SEQ ID NO: 715459 - DNA, 25 bp, Homo sapien
caatcttactgaacagtcggacagc

SEQ ID NO: 715460 - DNA, 25 bp, Homo sapien
tcattgccgtggtctactgggcgct

SEQ ID NO: 715461 - DNA, 25 bp, Homo sapien
gaagatgaagcgtcgtcattgccgt

SEQ ID NO: 715462 - DNA, 25 bp, Homo sapien
tgggctgcccgagccatctggatgg

SEQ ID NO: 715463 - DNA, 25 bp, Homo sapien
tgggcaaaatcctcccgcttggttg

SEQ ID NO: 715464 - DNA, 25 bp, Homo sapien
cgatgcccgagaccctccaggaagg

SEQ ID NO: 715465 - DNA, 25 bp, Homo sapien
ccgcttggttgtaaaatccacctgt

SEQ ID NO: 715466 - DNA, 25 bp, Homo sapien
ctccagggtacacgtgtggctccca

SEQ ID NO: 715467 - DNA, 25 bp, Homo sapien
ttcctccagggtacacgtgtggctc

SEQ ID NO: 715468 - DNA, 25 bp, Homo sapien
gtgtggctcccactcagcgtgtctc

SEQ ID NO: 715469 - DNA, 25 bp, Homo sapien
gggtacacgtgtggctcccactcag

SEQ ID NO: 715470 - DNA, 25 bp, Homo sapien
ccttggccttccgcacgtctcccat

SEQ ID NO: 715471 - DNA, 25 bp, Homo sapien
aggccacgtcccggtatgggggctg

SEQ ID NO: 715472 - DNA, 25 bp, Homo sapien
acgggcgaggccacgtcccggtatg

SEQ ID NO: 715473 - DNA, 25 bp, Homo sapien
cgggcgaggccacgtcccggtatgg

SEQ ID NO: 715474 - DNA, 25 bp, Homo sapien
ccacgtcccggtatgggggctgcac

SEQ ID NO: 715475 - DNA, 25 bp, Homo sapien
cgcctcaggcctcgtctgcgccgcc

SEQ ID NO: 715476 - DNA, 25 bp, Homo sapien
cgccgcctcaggcctcgtctgcgcc

SEQ ID NO: 715477 - DNA, 25 bp, Homo sapien
cctcaggcctcgtctgcgccgccca

SEQ ID NO: 715478 - DNA, 25 bp, Homo sapien
tcaggcctcgtctgcgccgcccagg

SEQ ID NO: 715479 - DNA, 25 bp, Homo sapien
cggcagccgttggcccaggaggccc

SEQ ID NO: 715480 - DNA, 25 bp, Homo sapien
cgcagcccgcgctgagggcgcccag

SEQ ID NO: 715481 - DNA, 25 bp, Homo sapien
gcggcagccgttggcccaggaggcc

SEQ ID NO: 715482 - DNA, 25 bp, Homo sapien
gcagcccgcgctgagggcgcccagg

SEQ ID NO: 715483 - DNA, 25 bp, Homo sapien
gtgacagtggcaaggtgttccccgc

SEQ ID NO: 715484 - DNA, 25 bp, Homo sapien
aaatcctccccatgacggtgacagt

SEQ ID NO: 715485 - DNA, 25 bp, Homo sapien
ccgccgctgcttattttgcaccaga

SEQ ID NO: 715486 - DNA, 25 bp, Homo sapien
ctgggcactttgaaggcgcaacagg

SEQ ID NO: 715487 - DNA, 25 bp, Homo sapien
gacacccagcccagcgtccgaccca

SEQ ID NO: 715488 - DNA, 25 bp, Homo sapien
gacacaggctcggcaagtccagttc

SEQ ID NO: 715489 - DNA, 25 bp, Homo sapien
ccagcccagcgtccgacccagacac

SEQ ID NO: 715490 - DNA, 25 bp, Homo sapien
cgacccagacacaggctcggcaagt

SEQ ID NO: 715491 - DNA, 25 bp, Homo sapien
tgtgaatcacagtcggctgctgaaa

SEQ ID NO: 715492 - DNA, 25 bp, Homo sapien
tcctcgtagaagcaatgtgaatcac

SEQ ID NO: 715493 - DNA, 25 bp, Homo sapien
ctttcaaaaagtcctcgtagaagca

SEQ ID NO: 715494 - DNA, 25 bp, Homo sapien
tgcacacaccctgactttcaaaaag

SEQ ID NO: 715495 - DNA, 25 bp, Homo sapien
tatgcgttcctagatggctgaagct

SEQ ID NO: 715496 - DNA, 25 bp, Homo sapien
ctacagcgtggtcaagcagcagcgt

SEQ ID NO: 715497 - DNA, 25 bp, Homo sapien
tggtcaagcagcagcgtatgcgttc

SEQ ID NO: 715498 - DNA, 25 bp, Homo sapien
aagcagcagcgtatgcgttcctaga

SEQ ID NO: 715499 - DNA, 25 bp, Homo sapien
tcaaaactcacaggaaacacggcca

SEQ ID NO: 715500 - DNA, 25 bp, Homo sapien
caaaactcacaggaaacacggccag

SEQ ID NO: 715501 - DNA, 25 bp, Homo sapien
cctcaaaactcacaggaaacacggc

SEQ ID NO: 715502 - DNA, 25 bp, Homo sapien
ctcaaaactcacaggaaacacggcc

SEQ ID NO: 715503 - DNA, 25 bp, Homo sapien
gcagagtgttttaacgggcaggaaa

SEQ ID NO: 715504 - DNA, 25 bp, Homo sapien
gaaatcgagcgcattcctgtctcag

SEQ ID NO: 715505 - DNA, 25 bp, Homo sapien
gcattcctgtctcagtcaacctgag

SEQ ID NO: 715506 - DNA, 25 bp, Homo sapien
tgagctgcctacacgcaactcaact

SEQ ID NO: 715507 - DNA, 25 bp, Homo sapien
tgagcgcatacgtgtagcccgtgtt

SEQ ID NO: 715508 - DNA, 25 bp, Homo sapien
cacacactggggaggactgtacatg

SEQ ID NO: 715509 - DNA, 25 bp, Homo sapien
actgtacatgtgaagccgagaaaaa

SEQ ID NO: 715510 - DNA, 25 bp, Homo sapien
tgtagcccgtgttctccggcacaca

SEQ ID NO: 715511 - DNA, 25 bp, Homo sapien
gagttcctgttaaggtccacgccac

SEQ ID NO: 715512 - DNA, 25 bp, Homo sapien
agtgggcattgcaaggccaggaccc

SEQ ID NO: 715513 - DNA, 25 bp, Homo sapien
aatacagcatgtagtcggtagtact

SEQ ID NO: 715514 - DNA, 25 bp, Homo sapien
gccaccgcgacagcgagtgggcatt

SEQ ID NO: 715515 - DNA, 25 bp, Homo sapien
tgctgtcgtggccaggcgcaaacta

SEQ ID NO: 715516 - DNA, 25 bp, Homo sapien
tacggcgggacatccgtggagaatc

SEQ ID NO: 715517 - DNA, 25 bp, Homo sapien
ggccgctcggttcttcagggagaca

SEQ ID NO: 715518 - DNA, 25 bp, Homo sapien
aaatacagggtccaatttgtgctcc

SEQ ID NO: 715519 - DNA, 25 bp, Homo sapien
taactggtgttagagatcagatgga

SEQ ID NO: 715520 - DNA, 25 bp, Homo sapien
gacagggtgcggctttacagaccaa

SEQ ID NO: 715521 - DNA, 25 bp, Homo sapien
cacacacatatccttaagctcgaga

SEQ ID NO: 715522 - DNA, 25 bp, Homo sapien
gcaaactaccactttatatgacagg

SEQ ID NO: 715523 - DNA, 25 bp, Homo sapien
tcaggaggctgcgtgcagtagaatc

SEQ ID NO: 715524 - DNA, 25 bp, Homo sapien
aagaatgaactggacacggagatcg

SEQ ID NO: 715525 - DNA, 25 bp, Homo sapien
tggacacggagatcgtccacgacag

SEQ ID NO: 715526 - DNA, 25 bp, Homo sapien
gatcgtccacgacagcatgtgtaat

SEQ ID NO: 715527 - DNA, 25 bp, Homo sapien
tgtttgtgcttctgcgctgttttgt

SEQ ID NO: 715528 - DNA, 25 bp, Homo sapien
ttgtttgtgcttctgcgctgttttg

SEQ ID NO: 715529 - DNA, 25 bp, Homo sapien
gtggttgatactaaaagctgatttg

SEQ ID NO: 715530 - DNA, 25 bp, Homo sapien
atactaaaagctgatttgtttgtgc

SEQ ID NO: 715531 - DNA, 25 bp, Homo sapien
tgtggtctgttcacgaatccaagac

SEQ ID NO: 715532 - DNA, 25 bp, Homo sapien
actcgtccaatacaggaggccgtcg

SEQ ID NO: 715533 - DNA, 25 bp, Homo sapien
gaagtggtccactgtggtctgttca

SEQ ID NO: 715534 - DNA, 25 bp, Homo sapien
gaggccgtcgagtcacagcatcctg

SEQ ID NO: 715535 - DNA, 25 bp, Homo sapien
cactggtcacagtttatttcctaaa

SEQ ID NO: 715536 - DNA, 25 bp, Homo sapien
ataaatcagcattatggcactggtc

SEQ ID NO: 715537 - DNA, 25 bp, Homo sapien
ggtgaaagcttatccttgaagaaaa

SEQ ID NO: 715538 - DNA, 25 bp, Homo sapien
gcctccagatatatgcagataccat

SEQ ID NO: 715539 - DNA, 25 bp, Homo sapien
ctttaagatcaccatcatcatcaag

SEQ ID NO: 715540 - DNA, 25 bp, Homo sapien
ttaagatcaccatcatcatcaagac

SEQ ID NO: 715541 - DNA, 25 bp, Homo sapien
tttaagatcaccatcatcatcaaga

SEQ ID NO: 715542 - DNA, 25 bp, Homo sapien
gtgcgccgtgagcacgtccttgcgc

SEQ ID NO: 715543 - DNA, 25 bp, Homo sapien
ccttgcgctcggacagcatgctgca

SEQ ID NO: 715544 - DNA, 25 bp, Homo sapien
acatccccgtttccctgaatggcag

SEQ ID NO: 715545 - DNA, 25 bp, Homo sapien
ggagaagccgttgtgcgcggtggcg

SEQ ID NO: 715546 - DNA, 25 bp, Homo sapien
tttttgattcctgtccctagaataa

SEQ ID NO: 715547 - DNA, 25 bp, Homo sapien
atttttgattcctgtccctagaata

SEQ ID NO: 715548 - DNA, 25 bp, Homo sapien
ttttgattcctgtccctagaataaa

SEQ ID NO: 715549 - DNA, 25 bp, Homo sapien
ttttctgagttttaaaggactgaga

SEQ ID NO: 715550 - DNA, 25 bp, Homo sapien
tttctgagttttaaaggactgagac

SEQ ID NO: 715551 - DNA, 25 bp, Homo sapien
tgagttttaaaggactgagacttac

SEQ ID NO: 715552 - DNA, 25 bp, Homo sapien
tctgagttttaaaggactgagactt

SEQ ID NO: 715553 - DNA, 25 bp, Homo sapien
tagtgcagacactgagacttacaga

SEQ ID NO: 715554 - DNA, 25 bp, Homo sapien
tttaagtctccaagacaaatagtgc

SEQ ID NO: 715555 - DNA, 25 bp, Homo sapien
gcagacactgagacttacagaaagg

SEQ ID NO: 715556 - DNA, 25 bp, Homo sapien
agacaaatagtgcagacactgagac

SEQ ID NO: 715557 - DNA, 25 bp, Homo sapien
cacgtcaagtccaaatttatagaat

SEQ ID NO: 715558 - DNA, 25 bp, Homo sapien
caaaattactaaccacataaaatgt

SEQ ID NO: 715559 - DNA, 25 bp, Homo sapien
ttttcttttgctcacgtcaagtcca

SEQ ID NO: 715560 - DNA, 25 bp, Homo sapien
tgactgtagttttattagtttcgct

SEQ ID NO: 715561 - DNA, 25 bp, Homo sapien
agggctagcgaccacgggaaatgtt

SEQ ID NO: 715562 - DNA, 25 bp, Homo sapien
cgacacgaacactggcataaccact

SEQ ID NO: 715563 - DNA, 25 bp, Homo sapien
atcaccataagcacagggctagcga

SEQ ID NO: 715564 - DNA, 25 bp, Homo sapien
aaatgttttcccgacacgaacactg

SEQ ID NO: 715565 - DNA, 25 bp, Homo sapien
tacaacacgcgtagggagaccttca

SEQ ID NO: 715566 - DNA, 25 bp, Homo sapien
taaactgtgcatacaccgtgatggc

SEQ ID NO: 715567 - DNA, 25 bp, Homo sapien
gctcggagtggataagacagacctg

SEQ ID NO: 715568 - DNA, 25 bp, Homo sapien
gagtttcgggaagctacaatccaca

SEQ ID NO: 715569 - DNA, 25 bp, Homo sapien
gccacaaaatcctattcacgtagaa

SEQ ID NO: 715570 - DNA, 25 bp, Homo sapien
ctattcacgtagaaagacgcaccgc

SEQ ID NO: 715571 - DNA, 25 bp, Homo sapien
aaatcctattcacgtagaaagacgc

SEQ ID NO: 715572 - DNA, 25 bp, Homo sapien
tatctggccagccacaaaatcctat

SEQ ID NO: 715573 - DNA, 25 bp, Homo sapien
ttcataactgagcttcattaaaacc

SEQ ID NO: 715574 - DNA, 25 bp, Homo sapien
tttctgattcataactgagcttcat

SEQ ID NO: 715575 - DNA, 25 bp, Homo sapien
gacttatagctttcggattcacaat

SEQ ID NO: 715576 - DNA, 25 bp, Homo sapien
gattcatggctttttgacttatagc

SEQ ID NO: 715577 - DNA, 25 bp, Homo sapien
aaacaggttctaaataccactcagg

SEQ ID NO: 715578 - DNA, 25 bp, Homo sapien
gatgtttcaacactgatcagctctg

SEQ ID NO: 715579 - DNA, 25 bp, Homo sapien
tctccactgcgaaagtgtgattggt

SEQ ID NO: 715580 - DNA, 25 bp, Homo sapien
gcgcctggcgaggaaagtcacagca

SEQ ID NO: 715581 - DNA, 25 bp, Homo sapien
tctgagaacctctctcacattcatt

SEQ ID NO: 715582 - DNA, 25 bp, Homo sapien
ctctgagaacctctctcacattcat

SEQ ID NO: 715583 - DNA, 25 bp, Homo sapien
tgggaccaactccacgaccgacgcc

SEQ ID NO: 715584 - DNA, 25 bp, Homo sapien
tcattctctactgctagtacccaac

SEQ ID NO: 715585 - DNA, 25 bp, Homo sapien
tctactgctagtacccaacatgaca

SEQ ID NO: 715586 - DNA, 25 bp, Homo sapien
tagtacccaacatgacagcgtgtgg

SEQ ID NO: 715587 - DNA, 25 bp, Homo sapien
tcagccgtgcatagcaatggcagtc

SEQ ID NO: 715588 - DNA, 25 bp, Homo sapien
caaatgcgatctggtggctatgagc

SEQ ID NO: 715589 - DNA, 25 bp, Homo sapien
gatgagggcttaagcagcagctcca

SEQ ID NO: 715590 - DNA, 25 bp, Homo sapien
aacagcccgtcgtcatcagtgagga

SEQ ID NO: 715591 - DNA, 25 bp, Homo sapien
tgcctcttgcccttacagtcgtcgc

SEQ ID NO: 715592 - DNA, 25 bp, Homo sapien
gtgcgcgtcgaggtgcctcttgccc

SEQ ID NO: 715593 - DNA, 25 bp, Homo sapien
gtgcctcttgcccttacagtcgtcg

SEQ ID NO: 715594 - DNA, 25 bp, Homo sapien
cagccgtggcgactgcgagtgggcg

SEQ ID NO: 715595 - DNA, 25 bp, Homo sapien
gtggcgactgcgagtgggcggctgt

SEQ ID NO: 715596 - DNA, 25 bp, Homo sapien
gccgtggcgactgcgagtgggcggc

SEQ ID NO: 715597 - DNA, 25 bp, Homo sapien
cgtggcgactgcgagtgggcggctg

SEQ ID NO: 715598 - DNA, 25 bp, Homo sapien
gcccagatgtgccagagggtccctg

SEQ ID NO: 715599 - DNA, 25 bp, Homo sapien
agacacaaatagcatggtgacaggg

SEQ ID NO: 715600 - DNA, 25 bp, Homo sapien
tctcactgtgggtggctatctcctc

SEQ ID NO: 715601 - DNA, 25 bp, Homo sapien
gcttttcgagagagattcaccctgt

SEQ ID NO: 715602 - DNA, 25 bp, Homo sapien
taacacctgcttgtgaattcctgca

SEQ ID NO: 715603 - DNA, 25 bp, Homo sapien
ttggaagccgccctacaaatattgg

SEQ ID NO: 715604 - DNA, 25 bp, Homo sapien
gcctgcagatacttcaggtgtaaaa

SEQ ID NO: 715605 - DNA, 25 bp, Homo sapien
gaagccgccctacaaatattggcca

SEQ ID NO: 715606 - DNA, 25 bp, Homo sapien
gcggaggttggaagccgccctacaa

SEQ ID NO: 715607 - DNA, 25 bp, Homo sapien
ggtcaagagtctcctcaaaaaatat

SEQ ID NO: 715608 - DNA, 25 bp, Homo sapien
gtggggacgcccaagccacacactt

SEQ ID NO: 715609 - DNA, 25 bp, Homo sapien
caccaaagcctgcatcggtgggtca

SEQ ID NO: 715610 - DNA, 25 bp, Homo sapien
tcagacagacgccagggaccagcct

SEQ ID NO: 715611 - DNA, 25 bp, Homo sapien
tggagcaaccacggccagccaaagg

SEQ ID NO: 715612 - DNA, 25 bp, Homo sapien
cgaccacgccgtcctggacacagcc

SEQ ID NO: 715613 - DNA, 25 bp, Homo sapien
cggccagccaaagggccgaccacgc

SEQ ID NO: 715614 - DNA, 25 bp, Homo sapien
gggccgaccacgccgtcctggacac

SEQ ID NO: 715615 - DNA, 25 bp, Homo sapien
tccccagccaccagaacactccaga

SEQ ID NO: 715616 - DNA, 25 bp, Homo sapien
cattcagccaagaaatcaaagtaac

SEQ ID NO: 715617 - DNA, 25 bp, Homo sapien
caaagtaacaaactggtaccatcca

SEQ ID NO: 715618 - DNA, 25 bp, Homo sapien
taacaaactggtaccatccaatccc

SEQ ID NO: 715619 - DNA, 25 bp, Homo sapien
gagacctacgttaccaactctctgg

SEQ ID NO: 715620 - DNA, 25 bp, Homo sapien
cccagtattagaaaagcagttacgg

SEQ ID NO: 715621 - DNA, 25 bp, Homo sapien
ttctgaggtgactgatgccactggg

SEQ ID NO: 715622 - DNA, 25 bp, Homo sapien
gcagttacggttttatctacaaggc

SEQ ID NO: 715623 - DNA, 25 bp, Homo sapien
gagcaagactaaaaacttgcagatg

SEQ ID NO: 715624 - DNA, 25 bp, Homo sapien
gaagagtgggatgagcaagactaaa

SEQ ID NO: 715625 - DNA, 25 bp, Homo sapien
tgggatgagcaagactaaaaacttg

SEQ ID NO: 715626 - DNA, 25 bp, Homo sapien
aaaacttgcagatgtttcgaaggca

SEQ ID NO: 715627 - DNA, 25 bp, Homo sapien
tgtgtaccgcttagccatcggaggc

SEQ ID NO: 715628 - DNA, 25 bp, Homo sapien
ttttttccactaagttacacatatg

SEQ ID NO: 715629 - DNA, 25 bp, Homo sapien
catcggaggcaactcagccagattt

SEQ ID NO: 715630 - DNA, 25 bp, Homo sapien
cacgcttctcaaaacatggacttac

SEQ ID NO: 715631 - DNA, 25 bp, Homo sapien
tgcatgcttgcccagttcaacacgg

SEQ ID NO: 715632 - DNA, 25 bp, Homo sapien
aattgccctggccccgtaaggagag

SEQ ID NO: 715633 - DNA, 25 bp, Homo sapien
tcaggcgagaagtcgtgggtttaaa

SEQ ID NO: 715634 - DNA, 25 bp, Homo sapien
catccacccgctgtgttctatgcat

SEQ ID NO: 715635 - DNA, 25 bp, Homo sapien
catggctgactatgggtgcttctca

SEQ ID NO: 715636 - DNA, 25 bp, Homo sapien
cagtgtggaacgtccctgaagacct

SEQ ID NO: 715637 - DNA, 25 bp, Homo sapien
gaaaccaggtagtcaaacaagcatg

SEQ ID NO: 715638 - DNA, 25 bp, Homo sapien
tacaacaggacacccaactgaagtg

SEQ ID NO: 715639 - DNA, 25 bp, Homo sapien
tccaatgccacggaaaagcctcact

SEQ ID NO: 715640 - DNA, 25 bp, Homo sapien
gccactcatccaatgccacggaaaa

SEQ ID NO: 715641 - DNA, 25 bp, Homo sapien
gctgctccacgccactcatccaatg

SEQ ID NO: 715642 - DNA, 25 bp, Homo sapien
tcatccaatgccacggaaaagcctc

SEQ ID NO: 715643 - DNA, 25 bp, Homo sapien
tctcggagattctcaccatggtggt

SEQ ID NO: 715644 - DNA, 25 bp, Homo sapien
tggcactgtccagacagagaggcca

SEQ ID NO: 715645 - DNA, 25 bp, Homo sapien
ccgagcctgcagcttctgtagcaaa

SEQ ID NO: 715646 - DNA, 25 bp, Homo sapien
tgtagcaaagtggtcagctctcgga

SEQ ID NO: 715647 - DNA, 25 bp, Homo sapien
cgaagctgacggcccggcagcgccg

SEQ ID NO: 715648 - DNA, 25 bp, Homo sapien
ccggcagcgccgccttccatctggt

SEQ ID NO: 715649 - DNA, 25 bp, Homo sapien
cctcgggggctgtcccacagcgtct

SEQ ID NO: 715650 - DNA, 25 bp, Homo sapien
gggggctgtcccacagcgtctctga

SEQ ID NO: 715651 - DNA, 25 bp, Homo sapien
tccctcgggggctgtcccacagcgt

SEQ ID NO: 715652 - DNA, 25 bp, Homo sapien
tcgggggctgtcccacagcgtctct

SEQ ID NO: 715653 - DNA, 25 bp, Homo sapien
ggagcctggtagcccggcagcaccc

SEQ ID NO: 715654 - DNA, 25 bp, Homo sapien
catggagcctggtagcccggcagca

SEQ ID NO: 715655 - DNA, 25 bp, Homo sapien
atggagcctggtagcccggcagcac

SEQ ID NO: 715656 - DNA, 25 bp, Homo sapien
agcctggtagcccggcagcacccac

SEQ ID NO: 715657 - DNA, 25 bp, Homo sapien
cacgagacggtttgtgtccatctca

SEQ ID NO: 715658 - DNA, 25 bp, Homo sapien
agaagtgcgtctgggacccacacga

SEQ ID NO: 715659 - DNA, 25 bp, Homo sapien
caggctgcctccgagaagtgcgtct

SEQ ID NO: 715660 - DNA, 25 bp, Homo sapien
gccatgacctgccactaagagggca

SEQ ID NO: 715661 - DNA, 25 bp, Homo sapien
ggaataccgacaatcagagaatctg

SEQ ID NO: 715662 - DNA, 25 bp, Homo sapien
caatgtggcacggaccctaaaggaa

SEQ ID NO: 715663 - DNA, 25 bp, Homo sapien
gagaatctgtggtcgcaatgtggca

SEQ ID NO: 715664 - DNA, 25 bp, Homo sapien
caggccaaggcgtttctacacggaa

SEQ ID NO: 715665 - DNA, 25 bp, Homo sapien
gacatacgcacttcatgttcttggt

SEQ ID NO: 715666 - DNA, 25 bp, Homo sapien
ttcttggtgaaaggccataaagtca

SEQ ID NO: 715667 - DNA, 25 bp, Homo sapien
tcatgttcttggtgaaaggccataa

SEQ ID NO: 715668 - DNA, 25 bp, Homo sapien
tgttcttggtgaaaggccataaagt

SEQ ID NO: 715669 - DNA, 25 bp, Homo sapien
gctgccacaccagagaacaagtgtt

SEQ ID NO: 715670 - DNA, 25 bp, Homo sapien
caccagagaacaagtgtttctttcc

SEQ ID NO: 715671 - DNA, 25 bp, Homo sapien
accagagaacaagtgtttctttcca

SEQ ID NO: 715672 - DNA, 25 bp, Homo sapien
cagagccgctgccacaccagagaac

SEQ ID NO: 715673 - DNA, 25 bp, Homo sapien
tctgttctagttccttctggatggc

SEQ ID NO: 715674 - DNA, 25 bp, Homo sapien
ggtctgttctagttccttctggatg

SEQ ID NO: 715675 - DNA, 25 bp, Homo sapien
gtctgttctagttccttctggatgg

SEQ ID NO: 715676 - DNA, 25 bp, Homo sapien
gtgacacgcccagcacaaatccggt

SEQ ID NO: 715677 - DNA, 25 bp, Homo sapien
gcccagcacaaatccggtggttctg

SEQ ID NO: 715678 - DNA, 25 bp, Homo sapien
gggactgccgtccaggagcagcagc

SEQ ID NO: 715679 - DNA, 25 bp, Homo sapien
agatgaggctgagctgtaaccccgc

SEQ ID NO: 715680 - DNA, 25 bp, Homo sapien
tacgagctgcgtgcataaaatgaag

SEQ ID NO: 715681 - DNA, 25 bp, Homo sapien
tggtcgtgtggaagaaagccgccct

SEQ ID NO: 715682 - DNA, 25 bp, Homo sapien
ccctgagtgaggagcaaaatgccag

SEQ ID NO: 715683 - DNA, 25 bp, Homo sapien
gacttggcaaatcagtggtcgtgtg

SEQ ID NO: 715684 - DNA, 25 bp, Homo sapien
tgtacggcatccactgtctcacagc

SEQ ID NO: 715685 - DNA, 25 bp, Homo sapien
ttcacgtgtcgccagctggacagct

SEQ ID NO: 715686 - DNA, 25 bp, Homo sapien
agctggaggtgctcgactgtgggca

SEQ ID NO: 715687 - DNA, 25 bp, Homo sapien
tctgactttagctgatccagctcca

SEQ ID NO: 715688 - DNA, 25 bp, Homo sapien
ggtgacgttccgcaggatctgcagc

SEQ ID NO: 715689 - DNA, 25 bp, Homo sapien
agtcgcctttgctcacaaactgtga

SEQ ID NO: 715690 - DNA, 25 bp, Homo sapien
tcaccatttctctgacttgcacgtc

SEQ ID NO: 715691 - DNA, 25 bp, Homo sapien
gagaaccgccttgctgatcttcgga

SEQ ID NO: 715692 - DNA, 25 bp, Homo sapien
gaatacagcttcaaggcgctgttca

SEQ ID NO: 715693 - DNA, 25 bp, Homo sapien
gattccagagcaaagtccaccatcc

SEQ ID NO: 715694 - DNA, 25 bp, Homo sapien
ccggtcttatcttgggaatacagct

SEQ ID NO: 715695 - DNA, 25 bp, Homo sapien
cgctgttcacgatggcacgtgcttg

SEQ ID NO: 715696 - DNA, 25 bp, Homo sapien
ggcgagctcgggagggcggcactcc

SEQ ID NO: 715697 - DNA, 25 bp, Homo sapien
gcgagctcgggagggcggcactcca

SEQ ID NO: 715698 - DNA, 25 bp, Homo sapien
agcaagggcgagctcgggagggcgg

SEQ ID NO: 715699 - DNA, 25 bp, Homo sapien
ccttagtaggatacaggacaggcag

SEQ ID NO: 715700 - DNA, 25 bp, Homo sapien
accaagttggccgtgaaggcagcac

SEQ ID NO: 715701 - DNA, 25 bp, Homo sapien
gcgaatatgttaatagccacggagc

SEQ ID NO: 715702 - DNA, 25 bp, Homo sapien
caagtccagtttggcccttagtagg

SEQ ID NO: 715703 - DNA, 25 bp, Homo sapien
ctaataccagctaataaaattttcg

SEQ ID NO: 715704 - DNA, 25 bp, Homo sapien
tattatctaataccagctaataaaa

SEQ ID NO: 715705 - DNA, 25 bp, Homo sapien
taattgtactttctcaaattgagtg

SEQ ID NO: 715706 - DNA, 25 bp, Homo sapien
ctcaaattgagtgttaagagtttac

SEQ ID NO: 715707 - DNA, 25 bp, Homo sapien
ctgcgagaagtaccacagcgggatc

SEQ ID NO: 715708 - DNA, 25 bp, Homo sapien
tcagaacagcgagtactcaagatgc

SEQ ID NO: 715709 - DNA, 25 bp, Homo sapien
agcgggatcccaaacagactcatca

SEQ ID NO: 715710 - DNA, 25 bp, Homo sapien
catcagcgccgttttggtttcgtaa

SEQ ID NO: 715711 - DNA, 25 bp, Homo sapien
cagctccggccaccggcggccactc

SEQ ID NO: 715712 - DNA, 25 bp, Homo sapien
cgagtccatgctgaagaggagcagc

SEQ ID NO: 715713 - DNA, 25 bp, Homo sapien
aggagcagctccggccaccggcggc

SEQ ID NO: 715714 - DNA, 25 bp, Homo sapien
gagtccatgctgaagaggagcagct

SEQ ID NO: 715715 - DNA, 25 bp, Homo sapien
gacacagactgtgccggtggcactc

SEQ ID NO: 715716 - DNA, 25 bp, Homo sapien
ggtcaggatcaccaagccctgtgag

SEQ ID NO: 715717 - DNA, 25 bp, Homo sapien
ccctgtgagaaggatgttatggcca

SEQ ID NO: 715718 - DNA, 25 bp, Homo sapien
cacagaaaaagcagccgcatgccaa

SEQ ID NO: 715719 - DNA, 25 bp, Homo sapien
catttgtaattcactcctcagaggg

SEQ ID NO: 715720 - DNA, 25 bp, Homo sapien
gatgtgaccggagagcactgttcgc

SEQ ID NO: 715721 - DNA, 25 bp, Homo sapien
gaccaacatcaagggtcagctgctg

SEQ ID NO: 715722 - DNA, 25 bp, Homo sapien
gatgccctgggaaaatgcacgttct

SEQ ID NO: 715723 - DNA, 25 bp, Homo sapien
ctttaaatgcccagcagttaccggg

SEQ ID NO: 715724 - DNA, 25 bp, Homo sapien
atggagagcctcaccaccaggtacc

SEQ ID NO: 715725 - DNA, 25 bp, Homo sapien
cgctgctgatgttgcctgttggcga

SEQ ID NO: 715726 - DNA, 25 bp, Homo sapien
cagcgtcttagggatgtgctccaga

SEQ ID NO: 715727 - DNA, 25 bp, Homo sapien
tcctgatcatacgtgaactgtccca

SEQ ID NO: 715728 - DNA, 25 bp, Homo sapien
tcatacgtgaactgtcccagaagct

SEQ ID NO: 715729 - DNA, 25 bp, Homo sapien
ggagcgactccccatcctgatcata

SEQ ID NO: 715730 - DNA, 25 bp, Homo sapien
cagggcctggaacatctggagcgac

SEQ ID NO: 715731 - DNA, 25 bp, Homo sapien
ccccaaatatgacgtctgacaggaa

SEQ ID NO: 715732 - DNA, 25 bp, Homo sapien
aaatatgacgtctgacaggaagcag

SEQ ID NO: 715733 - DNA, 25 bp, Homo sapien
tttcatattaataaccccaagtcca

SEQ ID NO: 715734 - DNA, 25 bp, Homo sapien
acttccccaaatatgacgtctgaca

SEQ ID NO: 715735 - DNA, 25 bp, Homo sapien
tcgccatgaactctgaaccgataca

SEQ ID NO: 715736 - DNA, 25 bp, Homo sapien
tttggaaagctgtgtcgtcgggtct

SEQ ID NO: 715737 - DNA, 25 bp, Homo sapien
gaaccgatacagacaggtatactca

SEQ ID NO: 715738 - DNA, 25 bp, Homo sapien
ggtatactcaggatggccccagtta

SEQ ID NO: 715739 - DNA, 25 bp, Homo sapien
gcagccacgtttattgaaggagtgt

SEQ ID NO: 715740 - DNA, 25 bp, Homo sapien
actgtcccatcattgtatatgccct

SEQ ID NO: 715741 - DNA, 25 bp, Homo sapien
tcgtccatgaaggattccagtgttt

SEQ ID NO: 715742 - DNA, 25 bp, Homo sapien
ttcacgctgtcccagtatatacaaa

SEQ ID NO: 715743 - DNA, 25 bp, Homo sapien
tgacttcagcctacaaggagagcga

SEQ ID NO: 715744 - DNA, 25 bp, Homo sapien
tgctgctgaaggaaaaaggatcgtc

SEQ ID NO: 715745 - DNA, 25 bp, Homo sapien
taaaaacaaggagtgtctgagagcc

SEQ ID NO: 715746 - DNA, 25 bp, Homo sapien
ccatggatattggtacagcgagtcc

SEQ ID NO: 715747 - DNA, 25 bp, Homo sapien
ccacaatggcgggtggcacgaaact

SEQ ID NO: 715748 - DNA, 25 bp, Homo sapien
aatggcgggtggcacgaaactgcct

SEQ ID NO: 715749 - DNA, 25 bp, Homo sapien
ccgggactggctcgcgccacaatgg

SEQ ID NO: 715750 - DNA, 25 bp, Homo sapien
ctcgcgccacaatggcgggtggcac

SEQ ID NO: 715751 - DNA, 25 bp, Homo sapien
gtcgcaggcgcggtcggcagcgcct

SEQ ID NO: 715752 - DNA, 25 bp, Homo sapien
ggcgctccgcgcagggctgacgctg

SEQ ID NO: 715753 - DNA, 25 bp, Homo sapien
gggctgacgctgtcgcaggcgcggt

SEQ ID NO: 715754 - DNA, 25 bp, Homo sapien
gcgctccgcgcagggctgacgctgt

SEQ ID NO: 715755 - DNA, 25 bp, Homo sapien
gcggccgccgttccgggcgctctcc

SEQ ID NO: 715756 - DNA, 25 bp, Homo sapien
ggccgccgttccgggcgctctcctg

SEQ ID NO: 715757 - DNA, 25 bp, Homo sapien
gttgcggccgccgttccgggcgctc

SEQ ID NO: 715758 - DNA, 25 bp, Homo sapien
cgccgcggttgcggccgccgttccg

SEQ ID NO: 715759 - DNA, 25 bp, Homo sapien
ctgaagaacagggtccggtacatct

SEQ ID NO: 715760 - DNA, 25 bp, Homo sapien
cttctcgacgctggcgcgcagcttg

SEQ ID NO: 715761 - DNA, 25 bp, Homo sapien
tctggtgcgcctcgtagtagtcgcc

SEQ ID NO: 715762 - DNA, 25 bp, Homo sapien
tagtagtcgcccttctcgacgctgg

SEQ ID NO: 715763 - DNA, 25 bp, Homo sapien
gcgtgcagttaacccagcatagcca

SEQ ID NO: 715764 - DNA, 25 bp, Homo sapien
aggtgtcaccgagcctaggtccaga

SEQ ID NO: 715765 - DNA, 25 bp, Homo sapien
caaaaatactggaacagagcagtcc

SEQ ID NO: 715766 - DNA, 25 bp, Homo sapien
tggaacttccaagcggtcacagtcc

SEQ ID NO: 715767 - DNA, 25 bp, Homo sapien
agaacaactgaacattctgcagtaa

SEQ ID NO: 715768 - DNA, 25 bp, Homo sapien
gaacaactgaacattctgcagtaac

SEQ ID NO: 715769 - DNA, 25 bp, Homo sapien
tgcatgctgcgcactattggccgtg

SEQ ID NO: 715770 - DNA, 25 bp, Homo sapien
tccaggtgactaagccaggacaggt

SEQ ID NO: 715771 - DNA, 25 bp, Homo sapien
tctaaggcggctctgaacgtggacg

SEQ ID NO: 715772 - DNA, 25 bp, Homo sapien
ggtgacaggcaaaccgtctaaggcg

SEQ ID NO: 715773 - DNA, 25 bp, Homo sapien
ctcagttaaccacagaaaagggctc

SEQ ID NO: 715774 - DNA, 25 bp, Homo sapien
gaagctaaaaacaaggcgcccagga

SEQ ID NO: 715775 - DNA, 25 bp, Homo sapien
taagtaaacagcagtgcacaccgga

SEQ ID NO: 715776 - DNA, 25 bp, Homo sapien
ttgagtccgggtagtcaaggccgca

SEQ ID NO: 715777 - DNA, 25 bp, Homo sapien
agaagagcagggctcccgagtacat

SEQ ID NO: 715778 - DNA, 25 bp, Homo sapien
gctcccgagtacatgagctcccggg

SEQ ID NO: 715779 - DNA, 25 bp, Homo sapien
ccgggcctccgtgtgcttgctctgg

SEQ ID NO: 715780 - DNA, 25 bp, Homo sapien
cctccgtgtgcttgctctgggacat

SEQ ID NO: 715781 - DNA, 25 bp, Homo sapien
cagggactccaggaccagcatggac

SEQ ID NO: 715782 - DNA, 25 bp, Homo sapien
agcatggacaagtctgctgcactgt

SEQ ID NO: 715783 - DNA, 25 bp, Homo sapien
cagcagctcgtcagccacctccact

SEQ ID NO: 715784 - DNA, 25 bp, Homo sapien
gggactccaggaccagcatggacaa

SEQ ID NO: 715785 - DNA, 25 bp, Homo sapien
ctctggacacaaaggtcacgcgctc

SEQ ID NO: 715786 - DNA, 25 bp, Homo sapien
aaaggtcacgcgctcaggagagttg

SEQ ID NO: 715787 - DNA, 25 bp, Homo sapien
ccactggaccacttcagggctctgg

SEQ ID NO: 715788 - DNA, 25 bp, Homo sapien
ggacacaaaggtcacgcgctcagga

SEQ ID NO: 715789 - DNA, 25 bp, Homo sapien
gccacactgtgtctaggaggagctg

SEQ ID NO: 715790 - DNA, 25 bp, Homo sapien
tgtgtgcagagtacgtgggccctca

SEQ ID NO: 715791 - DNA, 25 bp, Homo sapien
tcccattcctgtcgctcagggagaa

SEQ ID NO: 715792 - DNA, 25 bp, Homo sapien
tgcgtttcgcatgaccagggacaag

SEQ ID NO: 715793 - DNA, 25 bp, Homo sapien
acacaggagggttgtctgcggccgt

SEQ ID NO: 715794 - DNA, 25 bp, Homo sapien
gccgtgttctgtgtggagccatgct

SEQ ID NO: 715795 - DNA, 25 bp, Homo sapien
gtggcagttcgctatgcaggacaca

SEQ ID NO: 715796 - DNA, 25 bp, Homo sapien
ggaaggcggcagcaggtatgctcca

SEQ ID NO: 715797 - DNA, 25 bp, Homo sapien
cccgtccgctgagtgcagaaaatga

SEQ ID NO: 715798 - DNA, 25 bp, Homo sapien
aacatgtccacctcgctgcggaagc

SEQ ID NO: 715799 - DNA, 25 bp, Homo sapien
gatacctcgactcacaatagttttg

SEQ ID NO: 715800 - DNA, 25 bp, Homo sapien
tggaatactccaccagcatgttggc

SEQ ID NO: 715801 - DNA, 25 bp, Homo sapien
cttctgggtgtacgtcgtgaagacc

SEQ ID NO: 715802 - DNA, 25 bp, Homo sapien
gatgaagttaagcagcggctccaca

SEQ ID NO: 715803 - DNA, 25 bp, Homo sapien
aacggaggcccgtcctcgatggacg

SEQ ID NO: 715804 - DNA, 25 bp, Homo sapien
gaagaccaccgatgcgctacttttg

SEQ ID NO: 715805 - DNA, 25 bp, Homo sapien
tccccctgcaggatcccaagacgca

SEQ ID NO: 715806 - DNA, 25 bp, Homo sapien
cctccccctgcaggatcccaagacg

SEQ ID NO: 715807 - DNA, 25 bp, Homo sapien
cccctccccctgcaggatcccaaga

SEQ ID NO: 715808 - DNA, 25 bp, Homo sapien
ccccctgcaggatcccaagacgcac

SEQ ID NO: 715809 - DNA, 25 bp, Homo sapien
ctgcacaaaccaccgcgcctgcgcc

SEQ ID NO: 715810 - DNA, 25 bp, Homo sapien
tgggtgagcagaacaggaccacact

SEQ ID NO: 715811 - DNA, 25 bp, Homo sapien
acacaccgcgcccatgcccaacact

SEQ ID NO: 715812 - DNA, 25 bp, Homo sapien
ctgcaaccaccacgcctacgcccaa

SEQ ID NO: 715813 - DNA, 25 bp, Homo sapien
gatggctggtactgctcacacagca

SEQ ID NO: 715814 - DNA, 25 bp, Homo sapien
agcacagtgaacaccgtcagcttcc

SEQ ID NO: 715815 - DNA, 25 bp, Homo sapien
cggagggatggctggtactgctcac

SEQ ID NO: 715816 - DNA, 25 bp, Homo sapien
gagggatggctggtactgctcacac

SEQ ID NO: 715817 - DNA, 25 bp, Homo sapien
aaggcacaggcagcgggctcagagg

SEQ ID NO: 715818 - DNA, 25 bp, Homo sapien
ctgcaaggcacaggcagcgggctca

SEQ ID NO: 715819 - DNA, 25 bp, Homo sapien
tcagagggggtggacccagaccgtg

SEQ ID NO: 715820 - DNA, 25 bp, Homo sapien
ggctcagagggggtggacccagacc

SEQ ID NO: 715821 - DNA, 25 bp, Homo sapien
aagacgtctgcttgggcgggacgcc

SEQ ID NO: 715822 - DNA, 25 bp, Homo sapien
acagctgtcctatgcggtcgaggta

SEQ ID NO: 715823 - DNA, 25 bp, Homo sapien
caggcccccgtaggaagacgtctgc

SEQ ID NO: 715824 - DNA, 25 bp, Homo sapien
gcgggacgccgaagaacagctgtcc

SEQ ID NO: 715825 - DNA, 25 bp, Homo sapien
tggagtgggtgtgacaagggcgccc

SEQ ID NO: 715826 - DNA, 25 bp, Homo sapien
tgggtgtgacaagggcgccccggct

SEQ ID NO: 715827 - DNA, 25 bp, Homo sapien
agtgggtgtgacaagggcgccccgg

SEQ ID NO: 715828 - DNA, 25 bp, Homo sapien
gtgtgacaagggcgccccggcttac

SEQ ID NO: 715829 - DNA, 25 bp, Homo sapien
tcagtccagctcgatggggctgccg

SEQ ID NO: 715830 - DNA, 25 bp, Homo sapien
cagtccagctcgatggggctgccgt

SEQ ID NO: 715831 - DNA, 25 bp, Homo sapien
aggcctgtgctttattgtgggtcaa

SEQ ID NO: 715832 - DNA, 25 bp, Homo sapien
cactcttgggtcccagcagcacagt

SEQ ID NO: 715833 - DNA, 25 bp, Homo sapien
tccagccgtcgtcgaccgtggtgtc

SEQ ID NO: 715834 - DNA, 25 bp, Homo sapien
acagaaacagacacgcgccggcatg

SEQ ID NO: 715835 - DNA, 25 bp, Homo sapien
tgtgaaaaaatagagcgtctcccct

SEQ ID NO: 715836 - DNA, 25 bp, Homo sapien
ttatgaaagagacgggcagagtccc

SEQ ID NO: 715837 - DNA, 25 bp, Homo sapien
taacatttggagtagcatctgacag

SEQ ID NO: 715838 - DNA, 25 bp, Homo sapien
tatgcgcaacggttcacacaagcct

SEQ ID NO: 715839 - DNA, 25 bp, Homo sapien
gtgacgccgcacacaaaatccttgg

SEQ ID NO: 715840 - DNA, 25 bp, Homo sapien
gccgtctcacggtaagcccgagtga

SEQ ID NO: 715841 - DNA, 25 bp, Homo sapien
agtgaacgtgacttcctgatagccc

SEQ ID NO: 715842 - DNA, 25 bp, Homo sapien
gatcgaactcgctgctcaaagcaag

SEQ ID NO: 715843 - DNA, 25 bp, Homo sapien
tctgagggacactggtggcctcgct

SEQ ID NO: 715844 - DNA, 25 bp, Homo sapien
gggtctgtggaaccgacacactgga

SEQ ID NO: 715845 - DNA, 25 bp, Homo sapien
gaaatacactcctgcgtcgtcattg

SEQ ID NO: 715846 - DNA, 25 bp, Homo sapien
tcgtcattgcccctggaatgcggcg

SEQ ID NO: 715847 - DNA, 25 bp, Homo sapien
tctgcattggtgacacggacacgca

SEQ ID NO: 715848 - DNA, 25 bp, Homo sapien
gtcatggcgatgctgaacgtctttc

SEQ ID NO: 715849 - DNA, 25 bp, Homo sapien
ctggtttggttttgccgttctcgtg

SEQ ID NO: 715850 - DNA, 25 bp, Homo sapien
tccccacgggcagcgtggaagggcc

SEQ ID NO: 715851 - DNA, 25 bp, Homo sapien
ctcgtgggtcatggcgatgctgaac

SEQ ID NO: 715852 - DNA, 25 bp, Homo sapien
gggcaggagccactaggacccaaag

SEQ ID NO: 715853 - DNA, 25 bp, Homo sapien
taaggccttacccagcaaggagaca

SEQ ID NO: 715854 - DNA, 25 bp, Homo sapien
gctccggtgtttgcctcctgaggga

SEQ ID NO: 715855 - DNA, 25 bp, Homo sapien
cacagaggaggccttcaactctaag

SEQ ID NO: 715856 - DNA, 25 bp, Homo sapien
ttccaggtcgcgcaggaggcaccag

SEQ ID NO: 715857 - DNA, 25 bp, Homo sapien
acggcaccttccaggtcgcgcagga

SEQ ID NO: 715858 - DNA, 25 bp, Homo sapien
gggcatggggtcgtagactgcggct

SEQ ID NO: 715859 - DNA, 25 bp, Homo sapien
gggccacggcaccttccaggtcgcg

SEQ ID NO: 715860 - DNA, 25 bp, Homo sapien
gtgaatggccgcttctcataccagg

SEQ ID NO: 715861 - DNA, 25 bp, Homo sapien
gtgtctcgtgggcagtgggcgtggg

SEQ ID NO: 715862 - DNA, 25 bp, Homo sapien
aggcaggtggcagacggcatctcgt

SEQ ID NO: 715863 - DNA, 25 bp, Homo sapien
gggtggcagacagcgtctcgtcggc

SEQ ID NO: 715864 - DNA, 25 bp, Homo sapien
gggtggcagacagcgtctcgtggaa

SEQ ID NO: 715865 - DNA, 25 bp, Homo sapien
cagcgtcttggagcttcgtgggctg

SEQ ID NO: 715866 - DNA, 25 bp, Homo sapien
gccctcgggtggcagaaacatccag

SEQ ID NO: 715867 - DNA, 25 bp, Homo sapien
tcttggagcttcgtgggctggcggg

SEQ ID NO: 715868 - DNA, 25 bp, Homo sapien
tggtggccacgcacttccattcggg

SEQ ID NO: 715869 - DNA, 25 bp, Homo sapien
tgacctcgacgggtgccctgatagc

SEQ ID NO: 715870 - DNA, 25 bp, Homo sapien
tgatagctccgtcctgtgtctcaga

SEQ ID NO: 715871 - DNA, 25 bp, Homo sapien
ttgccggtagtttctcctgatgccc

SEQ ID NO: 715872 - DNA, 25 bp, Homo sapien
tcctggattcttgggtatttgccgg

SEQ ID NO: 715873 - DNA, 25 bp, Homo sapien
cttaactaatctgcaaccacggtat

SEQ ID NO: 715874 - DNA, 25 bp, Homo sapien
tttccaaatacaggcacactcaggc

SEQ ID NO: 715875 - DNA, 25 bp, Homo sapien
gacagggctctgcatgcatgtctgg

SEQ ID NO: 715876 - DNA, 25 bp, Homo sapien
cttcctaaggacaccgggcacgttg

SEQ ID NO: 715877 - DNA, 25 bp, Homo sapien
gcgtggacctgcagtgtaacccgga

SEQ ID NO: 715878 - DNA, 25 bp, Homo sapien
cgtggacctgcagtgtaacccggag

SEQ ID NO: 715879 - DNA, 25 bp, Homo sapien
tgcagcgtggacctgcagtgtaacc

SEQ ID NO: 715880 - DNA, 25 bp, Homo sapien
agcgtggacctgcagtgtaacccgg

SEQ ID NO: 715881 - DNA, 25 bp, Homo sapien
tggatgttgaagacccctgcttggc

SEQ ID NO: 715882 - DNA, 25 bp, Homo sapien
ggatgttgaagacccctgcttggcc

SEQ ID NO: 715883 - DNA, 25 bp, Homo sapien
ggcggcctactgagctcacggccat

SEQ ID NO: 715884 - DNA, 25 bp, Homo sapien
ctgcagggcggcctactgagctcac

SEQ ID NO: 715885 - DNA, 25 bp, Homo sapien
acagtggtcctgcacgggccgggac

SEQ ID NO: 715886 - DNA, 25 bp, Homo sapien
acggtcgcggcccacatcgcaggtg

SEQ ID NO: 715887 - DNA, 25 bp, Homo sapien
cagcccctcgcccacagtggtcctg

SEQ ID NO: 715888 - DNA, 25 bp, Homo sapien
gagaggagtgttacgtgttaaacac

SEQ ID NO: 715889 - DNA, 25 bp, Homo sapien
tatcaccgctagttgatggaaagtc

SEQ ID NO: 715890 - DNA, 25 bp, Homo sapien
ggttctaccacctgattcggctgca

SEQ ID NO: 715891 - DNA, 25 bp, Homo sapien
aactgagtacctattgcggctgggc

SEQ ID NO: 715892 - DNA, 25 bp, Homo sapien
gcagtggtggccctttcgtggttaa

SEQ ID NO: 715893 - DNA, 25 bp, Homo sapien
ggaccggtcctgttgcgacagacgc

SEQ ID NO: 715894 - DNA, 25 bp, Homo sapien
gtcctgttgcgacagacgcagcaag

SEQ ID NO: 715895 - DNA, 25 bp, Homo sapien
caagtgcaggttcccgacgagcggc

SEQ ID NO: 715896 - DNA, 25 bp, Homo sapien
gggaggggtcttgggcgcaggcgca

SEQ ID NO: 715897 - DNA, 25 bp, Homo sapien
gcacggtgaacaccggcccgtagcg

SEQ ID NO: 715898 - DNA, 25 bp, Homo sapien
tggcgccccaggtgcacggtgaaca

SEQ ID NO: 715899 - DNA, 25 bp, Homo sapien
gccagcgcctctttgaccgcctcga

SEQ ID NO: 715900 - DNA, 25 bp, Homo sapien
tttgaccgcctcgaaccccgtcagc

SEQ ID NO: 715901 - DNA, 25 bp, Homo sapien
tgctgtgtggacacctggcccttct

SEQ ID NO: 715902 - DNA, 25 bp, Homo sapien
cccacacccagtaggccccgtagcg

SEQ ID NO: 715903 - DNA, 25 bp, Homo sapien
gccccgtagcgccggccacacaccg

SEQ ID NO: 715904 - DNA, 25 bp, Homo sapien
cccgtagcgccggccacacaccgac

SEQ ID NO: 715905 - DNA, 25 bp, Homo sapien
ctgtgcagggcacgcaccgtgaact

SEQ ID NO: 715906 - DNA, 25 bp, Homo sapien
ccagcgcgccccagatgagaagaag

SEQ ID NO: 715907 - DNA, 25 bp, Homo sapien
tgaactggcgggcagccctccagcg

SEQ ID NO: 715908 - DNA, 25 bp, Homo sapien
cgcgccccagatgagaagaagatgc

SEQ ID NO: 715909 - DNA, 25 bp, Homo sapien
tcttgtcagccaccggctcccggcc

SEQ ID NO: 715910 - DNA, 25 bp, Homo sapien
ctctgtagccatccagctgcccaga

SEQ ID NO: 715911 - DNA, 25 bp, Homo sapien
tctgtagccatccagctgcccagag

SEQ ID NO: 715912 - DNA, 25 bp, Homo sapien
cctcatcgatgagacccagcaggga

SEQ ID NO: 715913 - DNA, 25 bp, Homo sapien
tcccggtagtcaaatcggcggccga

SEQ ID NO: 715914 - DNA, 25 bp, Homo sapien
ggccgaagaggagcgcgaaggtgat

SEQ ID NO: 715915 - DNA, 25 bp, Homo sapien
ggaccccaagaggaccatgacctca

SEQ ID NO: 715916 - DNA, 25 bp, Homo sapien
ggtgatcgtccccagcggctgtgtt

SEQ ID NO: 715917 - DNA, 25 bp, Homo sapien
tcctgtgagtcatggaatggaagac

SEQ ID NO: 715918 - DNA, 25 bp, Homo sapien
tggcaccagcgggtgctccgtgact

SEQ ID NO: 715919 - DNA, 25 bp, Homo sapien
cagtagtgagttccacgcggcgtct

SEQ ID NO: 715920 - DNA, 25 bp, Homo sapien
cgagccatgggtagacgttgaacag

SEQ ID NO: 715921 - DNA, 25 bp, Homo sapien
gccccgagccatgggtagacgttga

SEQ ID NO: 715922 - DNA, 25 bp, Homo sapien
gatcttgcgcaggacgggccggtgc

SEQ ID NO: 715923 - DNA, 25 bp, Homo sapien
cctcgatcttgcgcaggacgggccg

SEQ ID NO: 715924 - DNA, 25 bp, Homo sapien
ggagggtcctcagaatggcacggac

SEQ ID NO: 715925 - DNA, 25 bp, Homo sapien
tgtccctgctggatcagggcgtcca

SEQ ID NO: 715926 - DNA, 25 bp, Homo sapien
ggatcagggcgtccacatagctgca

SEQ ID NO: 715927 - DNA, 25 bp, Homo sapien
gggcgtccacatagctgcacacggg

SEQ ID NO: 715928 - DNA, 25 bp, Homo sapien
cttggtgcaggaccggtatggaccc

SEQ ID NO: 715929 - DNA, 25 bp, Homo sapien
tccactatggatgccccggtgatct

SEQ ID NO: 715930 - DNA, 25 bp, Homo sapien
tgatctgggctcagccatccctcag

SEQ ID NO: 715931 - DNA, 25 bp, Homo sapien
ggcactatggatgccccgtttcaca

SEQ ID NO: 715932 - DNA, 25 bp, Homo sapien
ggtgcaggccaccgcgttggcctca

SEQ ID NO: 715933 - DNA, 25 bp, Homo sapien
gtcccggccatgaccatgtccaggg

SEQ ID NO: 715934 - DNA, 25 bp, Homo sapien
ggcccatcagaagtgcggcccactg

SEQ ID NO: 715935 - DNA, 25 bp, Homo sapien
catgaccatgtccagggtgcaggcc

SEQ ID NO: 715936 - DNA, 25 bp, Homo sapien
cccagcacgcggtctagctcctcct

SEQ ID NO: 715937 - DNA, 25 bp, Homo sapien
gggcacgtgcggcaggagcgtgatg

SEQ ID NO: 715938 - DNA, 25 bp, Homo sapien
cacggcgcttgtgtagggcagagcc

SEQ ID NO: 715939 - DNA, 25 bp, Homo sapien
cgtgatgaaccgctgcacctcgtgg

SEQ ID NO: 715940 - DNA, 25 bp, Homo sapien
cattcgcgtccaggaaatggccggg

SEQ ID NO: 715941 - DNA, 25 bp, Homo sapien
tcagcaggggaatcacgggcgtgcc

SEQ ID NO: 715942 - DNA, 25 bp, Homo sapien
tcccgcttcacaaagtgcccattcg

SEQ ID NO: 715943 - DNA, 25 bp, Homo sapien
gtgcccattcgcgtccaggaaatgg

SEQ ID NO: 715944 - DNA, 25 bp, Homo sapien
gagccctggaggtgccgccccaccc

SEQ ID NO: 715945 - DNA, 25 bp, Homo sapien
ctggagccctggaggtgccgcccca

SEQ ID NO: 715946 - DNA, 25 bp, Homo sapien
ccctggagccctggaggtgccgccc

SEQ ID NO: 715947 - DNA, 25 bp, Homo sapien
tggagccctggaggtgccgccccac

SEQ ID NO: 715948 - DNA, 25 bp, Homo sapien
ctgagatcaggaggtgggtgcagag

SEQ ID NO: 715949 - DNA, 25 bp, Homo sapien
atcaggaggtgggtgcagaggcggc

SEQ ID NO: 715950 - DNA, 25 bp, Homo sapien
ggaggtgggtgcagaggcggcaggc

SEQ ID NO: 715951 - DNA, 25 bp, Homo sapien
tgagatcaggaggtgggtgcagagg

SEQ ID NO: 715952 - DNA, 25 bp, Homo sapien
gggacctccccaggggagcacagga

SEQ ID NO: 715953 - DNA, 25 bp, Homo sapien
acctccccaggggagcacaggagca

SEQ ID NO: 715954 - DNA, 25 bp, Homo sapien
ctccccaggggagcacaggagcagc

SEQ ID NO: 715955 - DNA, 25 bp, Homo sapien
gtggggacctccccaggggagcaca

SEQ ID NO: 715956 - DNA, 25 bp, Homo sapien
cgggggatgtccaggcacagagtgg

SEQ ID NO: 715957 - DNA, 25 bp, Homo sapien
ctgcgggggatgtccaggcacagag

SEQ ID NO: 715958 - DNA, 25 bp, Homo sapien
tgcgggggatgtccaggcacagagt

SEQ ID NO: 715959 - DNA, 25 bp, Homo sapien
gcgggggatgtccaggcacagagtg

SEQ ID NO: 715960 - DNA, 25 bp, Homo sapien
gcgctccccaacacagacgcggcgg

SEQ ID NO: 715961 - DNA, 25 bp, Homo sapien
ggcagcaggcggtacctctgcagga

SEQ ID NO: 715962 - DNA, 25 bp, Homo sapien
ctggccaggcgctccccaacacaga

SEQ ID NO: 715963 - DNA, 25 bp, Homo sapien
aggccggcaaacagcaggaagagct

SEQ ID NO: 715964 - DNA, 25 bp, Homo sapien
gccctcggcctcatggtaaaagccc

SEQ ID NO: 715965 - DNA, 25 bp, Homo sapien
cggcctcatggtaaaagcccgggcg

SEQ ID NO: 715966 - DNA, 25 bp, Homo sapien
cctcggcctcatggtaaaagcccgg

SEQ ID NO: 715967 - DNA, 25 bp, Homo sapien
tcggcctcatggtaaaagcccgggc

SEQ ID NO: 715968 - DNA, 25 bp, Homo sapien
ctcccagagcagtccgagctgtggg

SEQ ID NO: 715969 - DNA, 25 bp, Homo sapien
gtagtcctgggtgtaaccggaagca

SEQ ID NO: 715970 - DNA, 25 bp, Homo sapien
ggtgtaaccggaagcagttgctgac

SEQ ID NO: 715971 - DNA, 25 bp, Homo sapien
taggtgggtgggagtgcagcttcag

SEQ ID NO: 715972 - DNA, 25 bp, Homo sapien
gcagccacccgttgtctccctgcag

SEQ ID NO: 715973 - DNA, 25 bp, Homo sapien
tgcgcctgtctctggctggatgcag

SEQ ID NO: 715974 - DNA, 25 bp, Homo sapien
gctggatgcagccacccgttgtctc

SEQ ID NO: 715975 - DNA, 25 bp, Homo sapien
tggctggatgcagccacccgttgtc

SEQ ID NO: 715976 - DNA, 25 bp, Homo sapien
gggggtgcagggctcgcacgctgag

SEQ ID NO: 715977 - DNA, 25 bp, Homo sapien
gcagggctcgcacgctgaggacacc

SEQ ID NO: 715978 - DNA, 25 bp, Homo sapien
agggctcgcacgctgaggacaccca

SEQ ID NO: 715979 - DNA, 25 bp, Homo sapien
gtgcagggctcgcacgctgaggaca

SEQ ID NO: 715980 - DNA, 25 bp, Homo sapien
agtcatacgcatggccccagtggct

SEQ ID NO: 715981 - DNA, 25 bp, Homo sapien
agtgttccaggagcgggaatggagt

SEQ ID NO: 715982 - DNA, 25 bp, Homo sapien
tgcaggccgactgcctccaggcaca

SEQ ID NO: 715983 - DNA, 25 bp, Homo sapien
gaagtgttccaggagcgggaatgga

SEQ ID NO: 715984 - DNA, 25 bp, Homo sapien
ccaccgcaccgggtcagtgtttcca

SEQ ID NO: 715985 - DNA, 25 bp, Homo sapien
ccgcaccgggtcagtgtttccattt

SEQ ID NO: 715986 - DNA, 25 bp, Homo sapien
aaggaagcctctggcgccagtgcct

SEQ ID NO: 715987 - DNA, 25 bp, Homo sapien
gcagtgctgcttgtcttcaggggct

SEQ ID NO: 715988 - DNA, 25 bp, Homo sapien
ggccgcctgccgctcacgtgcatgg

SEQ ID NO: 715989 - DNA, 25 bp, Homo sapien
cgcctgccgctcacgtgcatggtca

SEQ ID NO: 715990 - DNA, 25 bp, Homo sapien
tcctctcttctcggtgaggggccgc

SEQ ID NO: 715991 - DNA, 25 bp, Homo sapien
ctgccgctcacgtgcatggtcagcg

SEQ ID NO: 715992 - DNA, 25 bp, Homo sapien
caagtatgggaggagcggccaaccc

SEQ ID NO: 715993 - DNA, 25 bp, Homo sapien
cagcccagctccaagtatgggagga

SEQ ID NO: 715994 - DNA, 25 bp, Homo sapien
cgccagccccgctcgggccttcatg

SEQ ID NO: 715995 - DNA, 25 bp, Homo sapien
aggagcggccaacccatgagacccg

SEQ ID NO: 715996 - DNA, 25 bp, Homo sapien
gagagagaggaactgggacccgggc

SEQ ID NO: 715997 - DNA, 25 bp, Homo sapien
tgcctgggtctgctcgaggcgggag

SEQ ID NO: 715998 - DNA, 25 bp, Homo sapien
gggtctgctcgaggcgggaggtggt

SEQ ID NO: 715999 - DNA, 25 bp, Homo sapien
tgggacccgggccacacggatccag

SEQ ID NO: 716000 - DNA, 25 bp, Homo sapien
tctgcgctgtgaccgtcatgcgctc

SEQ ID NO: 716001 - DNA, 25 bp, Homo sapien
gggattgtggccgtcatgcgctctt

SEQ ID NO: 716002 - DNA, 25 bp, Homo sapien
gacctgtgaccataccctgggctgt

SEQ ID NO: 716003 - DNA, 25 bp, Homo sapien
tggccatcgtgcgctctttgtctgc

SEQ ID NO: 716004 - DNA, 25 bp, Homo sapien
tggccatcttatgggctttccacga

SEQ ID NO: 716005 - DNA, 25 bp, Homo sapien
gaaggtaggtgcccgagttgtcctc

SEQ ID NO: 716006 - DNA, 25 bp, Homo sapien
acagacacgggcaccccggcaggag

SEQ ID NO: 716007 - DNA, 25 bp, Homo sapien
tgtgtggagcccacggtatccctgg

SEQ ID NO: 716008 - DNA, 25 bp, Homo sapien
gctgcccgttcctgtccgtctccct

SEQ ID NO: 716009 - DNA, 25 bp, Homo sapien
catccccgaagcctaatgtgttcct

SEQ ID NO: 716010 - DNA, 25 bp, Homo sapien
ctccatccccgaagcctaatgtgtt

SEQ ID NO: 716011 - DNA, 25 bp, Homo sapien
gataccctccatccccgaagcctaa

SEQ ID NO: 716012 - DNA, 25 bp, Homo sapien
cccgaagcctaatgtgttccttgac

SEQ ID NO: 716013 - DNA, 25 bp, Homo sapien
tctcttcgtcgtagcacaggcttag

SEQ ID NO: 716014 - DNA, 25 bp, Homo sapien
tggccatcctcatgtgacctgtctg

SEQ ID NO: 716015 - DNA, 25 bp, Homo sapien
gcttagcaggatggtgtcggctggg

SEQ ID NO: 716016 - DNA, 25 bp, Homo sapien
tgcttggggacagagcttttggcca

SEQ ID NO: 716017 - DNA, 25 bp, Homo sapien
agttgttgtgcctgccccgttggcg

SEQ ID NO: 716018 - DNA, 25 bp, Homo sapien
cagggccagttgttgtgcctgcccc

SEQ ID NO: 716019 - DNA, 25 bp, Homo sapien
ggccagttgttgtgcctgccccgtt

SEQ ID NO: 716020 - DNA, 25 bp, Homo sapien
ctttcagggccagttgttgtgcctg

SEQ ID NO: 716021 - DNA, 25 bp, Homo sapien
tgactcctgccaggtcgggagcgct

SEQ ID NO: 716022 - DNA, 25 bp, Homo sapien
cgctggtggccagaagcaagagtgg

SEQ ID NO: 716023 - DNA, 25 bp, Homo sapien
gacacgggaattgggctgtgactcc

SEQ ID NO: 716024 - DNA, 25 bp, Homo sapien
ttccgcagcatccaggctggtgcct

SEQ ID NO: 716025 - DNA, 25 bp, Homo sapien
gcagttagagaaagttctccgctgc

SEQ ID NO: 716026 - DNA, 25 bp, Homo sapien
tctttggagggtcggcacgtgggtg

SEQ ID NO: 716027 - DNA, 25 bp, Homo sapien
ttgctagtgaaacccgcgttctttg

SEQ ID NO: 716028 - DNA, 25 bp, Homo sapien
tccgctgctcgtctgtgggtgacag

SEQ ID NO: 716029 - DNA, 25 bp, Homo sapien
gcccgcggcagtcagttcacgtgtt

SEQ ID NO: 716030 - DNA, 25 bp, Homo sapien
tgtgtagctgtctcgctgtcctcca

SEQ ID NO: 716031 - DNA, 25 bp, Homo sapien
tcccctccaggaaagttcgtaagca

SEQ ID NO: 716032 - DNA, 25 bp, Homo sapien
cattgagtccgtgtcttgtttcccc

SEQ ID NO: 716033 - DNA, 25 bp, Homo sapien
gtagcttggcctccgggccgcggtc

SEQ ID NO: 716034 - DNA, 25 bp, Homo sapien
ccgggccgcggtcagtgcctgcggg

SEQ ID NO: 716035 - DNA, 25 bp, Homo sapien
cgcggtcagtgcctgcgggcctctg

SEQ ID NO: 716036 - DNA, 25 bp, Homo sapien
ccaggctgtgggaactgtccacttc

SEQ ID NO: 716037 - DNA, 25 bp, Homo sapien
tccgcaatatcatctctgtcaaggt

SEQ ID NO: 716038 - DNA, 25 bp, Homo sapien
tcagtcactgaaatccgcaatatca

SEQ ID NO: 716039 - DNA, 25 bp, Homo sapien
tctgtcaaggtcaggtcctactgcc

SEQ ID NO: 716040 - DNA, 25 bp, Homo sapien
caggtcctactgccacgatgaaaag

SEQ ID NO: 716041 - DNA, 25 bp, Homo sapien
gaccttgtaaatactcggatgccca

SEQ ID NO: 716042 - DNA, 25 bp, Homo sapien
tcctggctactctgcgagggttgcc

SEQ ID NO: 716043 - DNA, 25 bp, Homo sapien
cattaagaagaccacatcgatgctg

SEQ ID NO: 716044 - DNA, 25 bp, Homo sapien
cagagtccggatccgaatgtggtcc

SEQ ID NO: 716045 - DNA, 25 bp, Homo sapien
ggctgtttaggaagcccacgggcag

SEQ ID NO: 716046 - DNA, 25 bp, Homo sapien
ttcctggtcccacgtctctggcaag

SEQ ID NO: 716047 - DNA, 25 bp, Homo sapien
gcctacatcgttggtgtgtgcagct

SEQ ID NO: 716048 - DNA, 25 bp, Homo sapien
tgctgtttattgcaacccgcctaca

SEQ ID NO: 716049 - DNA, 25 bp, Homo sapien
acctccaaccagaatagagcaggta

SEQ ID NO: 716050 - DNA, 25 bp, Homo sapien
aagggggcgcatttgccgcatgtcc

SEQ ID NO: 716051 - DNA, 25 bp, Homo sapien
caggtatgtgggagcccgcacctgc

SEQ ID NO: 716052 - DNA, 25 bp, Homo sapien
gcatctccacgccttcccttgtgac

SEQ ID NO: 716053 - DNA, 25 bp, Homo sapien
gatctagacgccctctgtgtggtga

SEQ ID NO: 716054 - DNA, 25 bp, Homo sapien
aagccagaagagatctagacgccct

SEQ ID NO: 716055 - DNA, 25 bp, Homo sapien
ctagacgccctctgtgtggtgagga

SEQ ID NO: 716056 - DNA, 25 bp, Homo sapien
gaagagatctagacgccctctgtgt

SEQ ID NO: 716057 - DNA, 25 bp, Homo sapien
tgatgtgatactgacttgctgccca

SEQ ID NO: 716058 - DNA, 25 bp, Homo sapien
tcagctttctattccagcgggaggg

SEQ ID NO: 716059 - DNA, 25 bp, Homo sapien
tgttcagggatgtacctcagccacc

SEQ ID NO: 716060 - DNA, 25 bp, Homo sapien
catagacttgctgtgagctgcgggc

SEQ ID NO: 716061 - DNA, 25 bp, Homo sapien
cgggcgggcagctcgggctggcgga

SEQ ID NO: 716062 - DNA, 25 bp, Homo sapien
ggcgcagtcgccgccgggcgggcag

SEQ ID NO: 716063 - DNA, 25 bp, Homo sapien
ggccggcgcagtcgccgccgggcgg

SEQ ID NO: 716064 - DNA, 25 bp, Homo sapien
cggcggccggcgcagtcgccgccgg

SEQ ID NO: 716065 - DNA, 25 bp, Homo sapien
ctttgagacccctggacagatgtgg

SEQ ID NO: 716066 - DNA, 25 bp, Homo sapien
gcaaaggcaagacctcgctgtggtt

SEQ ID NO: 716067 - DNA, 25 bp, Homo sapien
taacctaagacccacatgaggtgcg

SEQ ID NO: 716068 - DNA, 25 bp, Homo sapien
ggccaggcggcagttattttttcag

SEQ ID NO: 716069 - DNA, 25 bp, Homo sapien
cctaactgggtgtgaggctaattcc

SEQ ID NO: 716070 - DNA, 25 bp, Homo sapien
taatagcgagcatgtttgcggctcc

SEQ ID NO: 716071 - DNA, 25 bp, Homo sapien
tttccacgtggagagcttacgcaca

SEQ ID NO: 716072 - DNA, 25 bp, Homo sapien
ctaggcgtggccttaacctgcaggg

SEQ ID NO: 716073 - DNA, 25 bp, Homo sapien
cagcgcttcttattgtccccggaca

SEQ ID NO: 716074 - DNA, 25 bp, Homo sapien
gtggaaagagaactgcgaggcccca

SEQ ID NO: 716075 - DNA, 25 bp, Homo sapien
catgagacgctcaaccttgggtgaa

SEQ ID NO: 716076 - DNA, 25 bp, Homo sapien
caaggcgagtgatccaatttcccca

SEQ ID NO: 716077 - DNA, 25 bp, Homo sapien
gctgggttaagcctgtccgcacatc

SEQ ID NO: 716078 - DNA, 25 bp, Homo sapien
ctttcccacctacttggagctcttt

SEQ ID NO: 716079 - DNA, 25 bp, Homo sapien
ggttaagcctgtccgcacatccatc

SEQ ID NO: 716080 - DNA, 25 bp, Homo sapien
cacccctccgccagtctttgctggg

SEQ ID NO: 716081 - DNA, 25 bp, Homo sapien
gaatttcccgatgtttcactagtac

SEQ ID NO: 716082 - DNA, 25 bp, Homo sapien
taactcgtgaaaatgtctggagccc

SEQ ID NO: 716083 - DNA, 25 bp, Homo sapien
gcccatgtgcggctgtggagaccat

SEQ ID NO: 716084 - DNA, 25 bp, Homo sapien
accccgtcaggctagctgtcaggag

SEQ ID NO: 716085 - DNA, 25 bp, Homo sapien
gaagaccctgtgcttgcggttcaga

SEQ ID NO: 716086 - DNA, 25 bp, Homo sapien
gcttagaaagcccagcggaatcggg

SEQ ID NO: 716087 - DNA, 25 bp, Homo sapien
gctgacatgcgggagatatctgacc

SEQ ID NO: 716088 - DNA, 25 bp, Homo sapien
cctgggagacgtgagcaaatgtgct

SEQ ID NO: 716089 - DNA, 25 bp, Homo sapien
tcgactccttgcctgtccgtggtct

SEQ ID NO: 716090 - DNA, 25 bp, Homo sapien
tgcgtccgagtgagggggatggcct

SEQ ID NO: 716091 - DNA, 25 bp, Homo sapien
ttgcctgtccgtggtctcccgcttg

SEQ ID NO: 716092 - DNA, 25 bp, Homo sapien
agccttcgactccttgcctgtccgt

SEQ ID NO: 716093 - DNA, 25 bp, Homo sapien
gtctgcatcgctgcggggcatccca

SEQ ID NO: 716094 - DNA, 25 bp, Homo sapien
aggcccctgtctgcatcgctgcggg

SEQ ID NO: 716095 - DNA, 25 bp, Homo sapien
tcgctgcggggcatcccaccgagag

SEQ ID NO: 716096 - DNA, 25 bp, Homo sapien
ctgtctgcatcgctgcggggcatcc

SEQ ID NO: 716097 - DNA, 25 bp, Homo sapien
ggtgagcagcatggcgggacagagg

SEQ ID NO: 716098 - DNA, 25 bp, Homo sapien
gcgctgctgcgcttctctgcaaacc

SEQ ID NO: 716099 - DNA, 25 bp, Homo sapien
gccctggccactgtcggtgagcagc

SEQ ID NO: 716100 - DNA, 25 bp, Homo sapien
ctggtgaggacctgcgcgctgctgc

SEQ ID NO: 716101 - DNA, 25 bp, Homo sapien
gctgacctcctactctcggagtgga

SEQ ID NO: 716102 - DNA, 25 bp, Homo sapien
ttcccatgcccggaggcaagagcag

SEQ ID NO: 716103 - DNA, 25 bp, Homo sapien
agctatctcgggaagcctgatgtcc

SEQ ID NO: 716104 - DNA, 25 bp, Homo sapien
tgtccaccatgtcatttggccccgg

SEQ ID NO: 716105 - DNA, 25 bp, Homo sapien
tagccgatgaacaccagcgtggcgt

SEQ ID NO: 716106 - DNA, 25 bp, Homo sapien
caaagtacacgtccggcatggtcat

SEQ ID NO: 716107 - DNA, 25 bp, Homo sapien
ttccctcgcgagatgatgaccgtgt

SEQ ID NO: 716108 - DNA, 25 bp, Homo sapien
ttcacaaagtgcagtagccccaggt

SEQ ID NO: 716109 - DNA, 25 bp, Homo sapien
tttgcggatgtggaccttgagctgc

SEQ ID NO: 716110 - DNA, 25 bp, Homo sapien
gagcgcgtcactgctattgaatagc

SEQ ID NO: 716111 - DNA, 25 bp, Homo sapien
cagggtaactaagtgctctgcgtcc

SEQ ID NO: 716112 - DNA, 25 bp, Homo sapien
gccttggcccaagagtggcatttgt

SEQ ID NO: 716113 - DNA, 25 bp, Homo sapien
gcaggaacgtgtgctctcacttctg

SEQ ID NO: 716114 - DNA, 25 bp, Homo sapien
ggtgtagtcaatggtgactttattc

SEQ ID NO: 716115 - DNA, 25 bp, Homo sapien
cctcaggggtgtagtcaatggtgac

SEQ ID NO: 716116 - DNA, 25 bp, Homo sapien
acttctgccggaatccttgggaggg

SEQ ID NO: 716117 - DNA, 25 bp, Homo sapien
gcagtgtcagagctgtgttcatctt

SEQ ID NO: 716118 - DNA, 25 bp, Homo sapien
cccatctgtacccaaagatttgctg

SEQ ID NO: 716119 - DNA, 25 bp, Homo sapien
ctgtttggggacagcgtcgcgtgga

SEQ ID NO: 716120 - DNA, 25 bp, Homo sapien
ggacagcgtcgcgtggaagccccag

SEQ ID NO: 716121 - DNA, 25 bp, Homo sapien
cctattgagaggcatccgtgccggc

SEQ ID NO: 716122 - DNA, 25 bp, Homo sapien
gagggagctccagaaccgagcctgc

SEQ ID NO: 716123 - DNA, 25 bp, Homo sapien
tgtcggccccatgccgcctattgag

SEQ ID NO: 716124 - DNA, 25 bp, Homo sapien
tggtccaggcgctctggtcctcggc

SEQ ID NO: 716125 - DNA, 25 bp, Homo sapien
acagaaccggcgcattctccttgtc

SEQ ID NO: 716126 - DNA, 25 bp, Homo sapien
ccgcagcgccatggagcttgtccag

SEQ ID NO: 716127 - DNA, 25 bp, Homo sapien
ggaccccgcagcgccatggagcttg

SEQ ID NO: 716128 - DNA, 25 bp, Homo sapien
agcgccatggagcttgtccaggaac

SEQ ID NO: 716129 - DNA, 25 bp, Homo sapien
ggatgcgcagacacctacggccgca

SEQ ID NO: 716130 - DNA, 25 bp, Homo sapien
gccccgccggatgcgcagacaccta

SEQ ID NO: 716131 - DNA, 25 bp, Homo sapien
taggagccccgccggatgcgcagac

SEQ ID NO: 716132 - DNA, 25 bp, Homo sapien
gtcccgtaggagccccgccggatgc

SEQ ID NO: 716133 - DNA, 25 bp, Homo sapien
gtgcatgggagggtctgggtatcgg

SEQ ID NO: 716134 - DNA, 25 bp, Homo sapien
gagggtctgggtatcggaaggccat

SEQ ID NO: 716135 - DNA, 25 bp, Homo sapien
catgggagggtctgggtatcggaag

SEQ ID NO: 716136 - DNA, 25 bp, Homo sapien
ggagggtctgggtatcggaaggcca

SEQ ID NO: 716137 - DNA, 25 bp, Homo sapien
tgctttggacgttttccgtgccctc

SEQ ID NO: 716138 - DNA, 25 bp, Homo sapien
cgctgcagtcgtgcgtgctttggac

SEQ ID NO: 716139 - DNA, 25 bp, Homo sapien
aaatccgaggagcagtcgtggtccc

SEQ ID NO: 716140 - DNA, 25 bp, Homo sapien
tgtctgccccactgcgtgtgtgcag

SEQ ID NO: 716141 - DNA, 25 bp, Homo sapien
cttccttgactggaccccatttgac

SEQ ID NO: 716142 - DNA, 25 bp, Homo sapien
gccagacgctcgctgacaggtcctg

SEQ ID NO: 716143 - DNA, 25 bp, Homo sapien
aggaaggcgccagacgctcgctgac

SEQ ID NO: 716144 - DNA, 25 bp, Homo sapien
aggcgccagacgctcgctgacaggt

SEQ ID NO: 716145 - DNA, 25 bp, Homo sapien
cagacgctcgctgacaggtcctgtg

SEQ ID NO: 716146 - DNA, 25 bp, Homo sapien
gttgtagttgatgcagtcctgtccc

SEQ ID NO: 716147 - DNA, 25 bp, Homo sapien
tgctgccgtctacgccgtctggttg

SEQ ID NO: 716148 - DNA, 25 bp, Homo sapien
catcggacacagacgccttagggat

SEQ ID NO: 716149 - DNA, 25 bp, Homo sapien
tctgatttgccgagggccgtgtgct

SEQ ID NO: 716150 - DNA, 25 bp, Homo sapien
tgctcggcaggctgcatgacatccc

SEQ ID NO: 716151 - DNA, 25 bp, Homo sapien
gcgggtccctcgagcggctgctcgg

SEQ ID NO: 716152 - DNA, 25 bp, Homo sapien
tgatgacacatgggcgggtccctcg

SEQ ID NO: 716153 - DNA, 25 bp, Homo sapien
catgacatcccaggcgcgggcctca

SEQ ID NO: 716154 - DNA, 25 bp, Homo sapien
aaaagtgacccgatttgttgtgcgg

SEQ ID NO: 716155 - DNA, 25 bp, Homo sapien
aagtgacccgatttgttgtgcggcc

SEQ ID NO: 716156 - DNA, 25 bp, Homo sapien
cccgatttgttgtgcggccttggtc

SEQ ID NO: 716157 - DNA, 25 bp, Homo sapien
tgacccgatttgttgtgcggccttg

SEQ ID NO: 716158 - DNA, 25 bp, Homo sapien
gttggcctccctcaattgcttgtca

SEQ ID NO: 716159 - DNA, 25 bp, Homo sapien
actgtgaatcacctcgccctctggt

SEQ ID NO: 716160 - DNA, 25 bp, Homo sapien
tggtttttgacaaggcgctgggcat

SEQ ID NO: 716161 - DNA, 25 bp, Homo sapien
cttggtggactcagccgctggagct

SEQ ID NO: 716162 - DNA, 25 bp, Homo sapien
catgggaaaccaccggtgccacagg

SEQ ID NO: 716163 - DNA, 25 bp, Homo sapien
aaccagcgtggcacatccatgggaa

SEQ ID NO: 716164 - DNA, 25 bp, Homo sapien
tgtgccctgtgcatgacgcttgcct

SEQ ID NO: 716165 - DNA, 25 bp, Homo sapien
tcgggcctctttacacggtgcccag

SEQ ID NO: 716166 - DNA, 25 bp, Homo sapien
tgtcccgcgcttccttcagttgttc

SEQ ID NO: 716167 - DNA, 25 bp, Homo sapien
tcacggagcagttggcggcagagga

SEQ ID NO: 716168 - DNA, 25 bp, Homo sapien
tgtgctcaccgaaaacaggcacaga

SEQ ID NO: 716169 - DNA, 25 bp, Homo sapien
ttcccagagaaagtacacaaagcat

SEQ ID NO: 716170 - DNA, 25 bp, Homo sapien
agcagccgggcgttgcctgcctggg

SEQ ID NO: 716171 - DNA, 25 bp, Homo sapien
ggaggtggacagcagacgagcagcc

SEQ ID NO: 716172 - DNA, 25 bp, Homo sapien
gcttttgaggtcacaattctcgtgt

SEQ ID NO: 716173 - DNA, 25 bp, Homo sapien
tcgtgtgatttgaggtgtccccata

SEQ ID NO: 716174 - DNA, 25 bp, Homo sapien
ttcatgcagagtgggacgaggtgca

SEQ ID NO: 716175 - DNA, 25 bp, Homo sapien
cgcaaaggcagttcatgcagagtgg

SEQ ID NO: 716176 - DNA, 25 bp, Homo sapien
ggcagttcatgcagagtgggacgag

SEQ ID NO: 716177 - DNA, 25 bp, Homo sapien
ccgcaaaggcagttcatgcagagtg

SEQ ID NO: 716178 - DNA, 25 bp, Homo sapien
agatccttttaacatggactgcagg

SEQ ID NO: 716179 - DNA, 25 bp, Homo sapien
tggatgtcgccgtcaggtgctgtcc

SEQ ID NO: 716180 - DNA, 25 bp, Homo sapien
tcccgtgcggtcatagccaggcctg

SEQ ID NO: 716181 - DNA, 25 bp, Homo sapien
gctgcgtgaggctgtccagatgtcc

SEQ ID NO: 716182 - DNA, 25 bp, Homo sapien
ggatcatcccctgctctgagtaact

SEQ ID NO: 716183 - DNA, 25 bp, Homo sapien
catgaagactgtgctgtagagtcct

SEQ ID NO: 716184 - DNA, 25 bp, Homo sapien
ctgagtaactcagaccaacggccca

SEQ ID NO: 716185 - DNA, 25 bp, Homo sapien
agcacctgtttaaccccattcactt

SEQ ID NO: 716186 - DNA, 25 bp, Homo sapien
gatactcctagatttcctgcttgca

SEQ ID NO: 716187 - DNA, 25 bp, Homo sapien
gcactgggcgggtaagtaacttgta

SEQ ID NO: 716188 - DNA, 25 bp, Homo sapien
gcatctgggtcttggagcgcagcct

SEQ ID NO: 716189 - DNA, 25 bp, Homo sapien
ttgcagcatagagtcagcggatcgg

SEQ ID NO: 716190 - DNA, 25 bp, Homo sapien
ctgtccaggccgaaggggtcctcag

SEQ ID NO: 716191 - DNA, 25 bp, Homo sapien
tctcactcctacttctaggtgtcgt

SEQ ID NO: 716192 - DNA, 25 bp, Homo sapien
agaagggaacttcagcgaatctcac

SEQ ID NO: 716193 - DNA, 25 bp, Homo sapien
agcgaatctcactcctacttctagg

SEQ ID NO: 716194 - DNA, 25 bp, Homo sapien
tgaattttcactcgccgcttcggga

SEQ ID NO: 716195 - DNA, 25 bp, Homo sapien
cgtgcaggcggagaataaacctccc

SEQ ID NO: 716196 - DNA, 25 bp, Homo sapien
tcatggttgcggatttcacagtctc

SEQ ID NO: 716197 - DNA, 25 bp, Homo sapien
ctgccgtccagatgttggtggcctc

SEQ ID NO: 716198 - DNA, 25 bp, Homo sapien
gcgagggaaggttcccggctggctg

SEQ ID NO: 716199 - DNA, 25 bp, Homo sapien
cgcgagggaaggttcccggctggct

SEQ ID NO: 716200 - DNA, 25 bp, Homo sapien
cgagggaaggttcccggctggctgg

SEQ ID NO: 716201 - DNA, 25 bp, Homo sapien
tggacctgccgaatgcctgagcagg

SEQ ID NO: 716202 - DNA, 25 bp, Homo sapien
tccttggtcaggcccatcaggctgg

SEQ ID NO: 716203 - DNA, 25 bp, Homo sapien
gaggtgtacctctgctggacctgcc

SEQ ID NO: 716204 - DNA, 25 bp, Homo sapien
aggtgcacttggaacccgctgcagg

SEQ ID NO: 716205 - DNA, 25 bp, Homo sapien
gcatctgtcaaaaggcgtgtggccc

SEQ ID NO: 716206 - DNA, 25 bp, Homo sapien
gacaccgagaagatacgggacctgg

SEQ ID NO: 716207 - DNA, 25 bp, Homo sapien
gagaggaacctagtgtgccattcac

SEQ ID NO: 716208 - DNA, 25 bp, Homo sapien
tcttttgatcgttgccagacaccga

SEQ ID NO: 716209 - DNA, 25 bp, Homo sapien
atgcgggggcagtcacaggggggtg

SEQ ID NO: 716210 - DNA, 25 bp, Homo sapien
gatgcgggggcagtcacaggggggt

SEQ ID NO: 716211 - DNA, 25 bp, Homo sapien
ccagtggggagggtcccgtcacctg

SEQ ID NO: 716212 - DNA, 25 bp, Homo sapien
tgtgctcctggaagttctctatgca

SEQ ID NO: 716213 - DNA, 25 bp, Homo sapien
cctgccccgtgtcactgtgctcctg

SEQ ID NO: 716214 - DNA, 25 bp, Homo sapien
agttctctatgcagcgggccacggg

SEQ ID NO: 716215 - DNA, 25 bp, Homo sapien
tgggtttgttaactgcagagagtgg

SEQ ID NO: 716216 - DNA, 25 bp, Homo sapien
ggaagaacagatgctcctcacaccg

SEQ ID NO: 716217 - DNA, 25 bp, Homo sapien
acaccggcatggtgcatccgtggag

SEQ ID NO: 716218 - DNA, 25 bp, Homo sapien
gcgggtgtcggccaccgtgcacagt

SEQ ID NO: 716219 - DNA, 25 bp, Homo sapien
gtgagcctggcatttgtcagacagg

SEQ ID NO: 716220 - DNA, 25 bp, Homo sapien
ctgttttaaatggtgaatccatctt

SEQ ID NO: 716221 - DNA, 25 bp, Homo sapien
tctttagaaagaagcgtgattctcc

SEQ ID NO: 716222 - DNA, 25 bp, Homo sapien
aagaagcgtgattctccttgaagtg

SEQ ID NO: 716223 - DNA, 25 bp, Homo sapien
agatttgccgaaaggctcccagagc

SEQ ID NO: 716224 - DNA, 25 bp, Homo sapien
ctctgcaccgtgcagctttcaagat

SEQ ID NO: 716225 - DNA, 25 bp, Homo sapien
gtctctgcaccgtgcagctttcaag

SEQ ID NO: 716226 - DNA, 25 bp, Homo sapien
cagctttcaagatttgccgaaaggc

SEQ ID NO: 716227 - DNA, 25 bp, Homo sapien
ctgcgcggtgcctgggtacatctcc

SEQ ID NO: 716228 - DNA, 25 bp, Homo sapien
tcccattggccagggcggtgcccag

SEQ ID NO: 716229 - DNA, 25 bp, Homo sapien
tcacctgtcccattggccagggcgg

SEQ ID NO: 716230 - DNA, 25 bp, Homo sapien
tgcccaggagcgggtgggacaggtt

SEQ ID NO: 716231 - DNA, 25 bp, Homo sapien
gcccaggagcgggtgggacaggttg

SEQ ID NO: 716232 - DNA, 25 bp, Homo sapien
gatgtcgtagtaccgctcgtgcagg

SEQ ID NO: 716233 - DNA, 25 bp, Homo sapien
gaacaggccgatcacgtactgctgg

SEQ ID NO: 716234 - DNA, 25 bp, Homo sapien
aaagactgcttgcagggagcggccc

SEQ ID NO: 716235 - DNA, 25 bp, Homo sapien
ggtctccccgagaaagctgtagatg

SEQ ID NO: 716236 - DNA, 25 bp, Homo sapien
tgccttgtgtccacccaggtgtgtg

SEQ ID NO: 716237 - DNA, 25 bp, Homo sapien
aggtgtgtgcagctcccgagtcaca

SEQ ID NO: 716238 - DNA, 25 bp, Homo sapien
gacgtggccgtgccttgtgtccacc

SEQ ID NO: 716239 - DNA, 25 bp, Homo sapien
ccctggctgggcctatgcggccaag

SEQ ID NO: 716240 - DNA, 25 bp, Homo sapien
gtgaggtttcctaagcagccccagg

SEQ ID NO: 716241 - DNA, 25 bp, Homo sapien
ttgggattgtagcaattctgtgtga

SEQ ID NO: 716242 - DNA, 25 bp, Homo sapien
gggtgaccaggcaagcgtgaccctc

SEQ ID NO: 716243 - DNA, 25 bp, Homo sapien
gaagccacatctgaccgcagtttag

SEQ ID NO: 716244 - DNA, 25 bp, Homo sapien
tctccgtgtggctttcctggtcgac

SEQ ID NO: 716245 - DNA, 25 bp, Homo sapien
acagtggcctctccgtgtggctttc

SEQ ID NO: 716246 - DNA, 25 bp, Homo sapien
ccacagtggcctctccgtgtggctt

SEQ ID NO: 716247 - DNA, 25 bp, Homo sapien
gcctctccgtgtggctttcctggtc

SEQ ID NO: 716248 - DNA, 25 bp, Homo sapien
ccccacggtggcagatttgctttag

SEQ ID NO: 716249 - DNA, 25 bp, Homo sapien
agaggacacaccgcgacgtccagct

SEQ ID NO: 716250 - DNA, 25 bp, Homo sapien
ctagctagctcagaccgtgggcaca

SEQ ID NO: 716251 - DNA, 25 bp, Homo sapien
tctcctctttaactcggcggtgcgc

SEQ ID NO: 716252 - DNA, 25 bp, Homo sapien
cccagtccacatgagtgcaattgcc

SEQ ID NO: 716253 - DNA, 25 bp, Homo sapien
tcctcgtgggcctggtgaggccgca

SEQ ID NO: 716254 - DNA, 25 bp, Homo sapien
gtgaggccgcacagcgccattgctg

SEQ ID NO: 716255 - DNA, 25 bp, Homo sapien
gtcaacaagcagtgactgaaccacc

SEQ ID NO: 716256 - DNA, 25 bp, Homo sapien
ttcattgtcctggcacccgactaac

SEQ ID NO: 716257 - DNA, 25 bp, Homo sapien
tttcattgtcctggcacccgactaa

SEQ ID NO: 716258 - DNA, 25 bp, Homo sapien
ttatttctgtagaaacaaattcgtc

SEQ ID NO: 716259 - DNA, 25 bp, Homo sapien
tatttctgtagaaacaaattcgtca

SEQ ID NO: 716260 - DNA, 25 bp, Homo sapien
atttctgtagaaacaaattcgtcag

SEQ ID NO: 716261 - DNA, 25 bp, Homo sapien
ggtttttacatcatcaccgcagttg

SEQ ID NO: 716262 - DNA, 25 bp, Homo sapien
gcctcatcagcttttcttacatttt

SEQ ID NO: 716263 - DNA, 25 bp, Homo sapien
aggctgaacgtcaccagcctcatca

SEQ ID NO: 716264 - DNA, 25 bp, Homo sapien
tattgacaaaggctgaacgtcacca

SEQ ID NO: 716265 - DNA, 25 bp, Homo sapien
tggaaatgccaggttaggtccggct

SEQ ID NO: 716266 - DNA, 25 bp, Homo sapien
tggcacccaagcatgacacagaagt

SEQ ID NO: 716267 - DNA, 25 bp, Homo sapien
cacggcattttggacagcctggaaa

SEQ ID NO: 716268 - DNA, 25 bp, Homo sapien
tagaaaggcagcttaggtcgcacag

SEQ ID NO: 716269 - DNA, 25 bp, Homo sapien
tagatggcggcgtgtcagctctgtc

SEQ ID NO: 716270 - DNA, 25 bp, Homo sapien
gcttcacaggtcaagagtctgcttc

SEQ ID NO: 716271 - DNA, 25 bp, Homo sapien
tgggcaagtccccagaagagacctg

SEQ ID NO: 716272 - DNA, 25 bp, Homo sapien
gcttccacgcactcaacagcggtgt

SEQ ID NO: 716273 - DNA, 25 bp, Homo sapien
tcccagagaattgctcaccagccgg

SEQ ID NO: 716274 - DNA, 25 bp, Homo sapien
cagagctcagacctgtcccgggtct

SEQ ID NO: 716275 - DNA, 25 bp, Homo sapien
cccagctgacgccgcttggtgaggt

SEQ ID NO: 716276 - DNA, 25 bp, Homo sapien
gagatgggccgcacgcctcagagct

SEQ ID NO: 716277 - DNA, 25 bp, Homo sapien
cgtggccggagctgtgagcttcaca

SEQ ID NO: 716278 - DNA, 25 bp, Homo sapien
gatacacaaatcaagagctgcccgc

SEQ ID NO: 716279 - DNA, 25 bp, Homo sapien
cacagtcgtggatgagcggaagaac

SEQ ID NO: 716280 - DNA, 25 bp, Homo sapien
tgtggctgcagacgccgacttttcc

SEQ ID NO: 716281 - DNA, 25 bp, Homo sapien
ggttttgcacatagtgtcaccacag

SEQ ID NO: 716282 - DNA, 25 bp, Homo sapien
acgatcagcgtctcacagttcattg

SEQ ID NO: 716283 - DNA, 25 bp, Homo sapien
tcgaagggcatgtcagttggtcacc

SEQ ID NO: 716284 - DNA, 25 bp, Homo sapien
gtgagattttattccagaggtgccc

SEQ ID NO: 716285 - DNA, 25 bp, Homo sapien
cccggggtgcgggactccagtgcgg

SEQ ID NO: 716286 - DNA, 25 bp, Homo sapien
gggtgcgggactccagtgcgggaca

SEQ ID NO: 716287 - DNA, 25 bp, Homo sapien
tgcgggactccagtgcgggacacag

SEQ ID NO: 716288 - DNA, 25 bp, Homo sapien
gtgcgggactccagtgcgggacaca

SEQ ID NO: 716289 - DNA, 25 bp, Homo sapien
accccagggtgtggagcgactgcgt

SEQ ID NO: 716290 - DNA, 25 bp, Homo sapien
cggcgccttctgggagcgggcactc

SEQ ID NO: 716291 - DNA, 25 bp, Homo sapien
gcgccttctgggagcgggcactcct

SEQ ID NO: 716292 - DNA, 25 bp, Homo sapien
cgccttctgggagcgggcactcctg

SEQ ID NO: 716293 - DNA, 25 bp, Homo sapien
ggcgccttctgggagcgggcactcc

SEQ ID NO: 716294 - DNA, 25 bp, Homo sapien
tggcgattccttgctcttgtcagcc

SEQ ID NO: 716295 - DNA, 25 bp, Homo sapien
agtccttccgtaaaggccagctggg

SEQ ID NO: 716296 - DNA, 25 bp, Homo sapien
gcctcagtccttccgtaaaggccag

SEQ ID NO: 716297 - DNA, 25 bp, Homo sapien
cgcggtttgggcctggcgattcctt

SEQ ID NO: 716298 - DNA, 25 bp, Homo sapien
gtcatcatcctgcgtgggcgtcggt

SEQ ID NO: 716299 - DNA, 25 bp, Homo sapien
tgtcatcatcctgcgtgggcgtcgg

SEQ ID NO: 716300 - DNA, 25 bp, Homo sapien
ttgatccgttttcatggctaatagt

SEQ ID NO: 716301 - DNA, 25 bp, Homo sapien
ctaatagttcatgggccgcctgtcg

SEQ ID NO: 716302 - DNA, 25 bp, Homo sapien
ccgcgctgccccatgtccatctgtt

SEQ ID NO: 716303 - DNA, 25 bp, Homo sapien
gtaatagtttatgggctgtctgcca

SEQ ID NO: 716304 - DNA, 25 bp, Homo sapien
cagtgggtgggtgcagcacgctgcc

SEQ ID NO: 716305 - DNA, 25 bp, Homo sapien
ggtgcagcacgctgccctgtgtgag

SEQ ID NO: 716306 - DNA, 25 bp, Homo sapien
tgcagtgggtgggtgcagcacgctg

SEQ ID NO: 716307 - DNA, 25 bp, Homo sapien
gcagtgggtgggtgcagcacgctgc

SEQ ID NO: 716308 - DNA, 25 bp, Homo sapien
ctcccagtgaaatggggtgtctctg

SEQ ID NO: 716309 - DNA, 25 bp, Homo sapien
taatatggatatttccttgctgact

SEQ ID NO: 716310 - DNA, 25 bp, Homo sapien
aatatggatatttccttgctgactc

SEQ ID NO: 716311 - DNA, 25 bp, Homo sapien
ccagtgaaatggggtgtctctgcta

SEQ ID NO: 716312 - DNA, 25 bp, Homo sapien
cccagctgagcgttgggaagcgacc

SEQ ID NO: 716313 - DNA, 25 bp, Homo sapien
tcggcagcacgttccttccgaggga

SEQ ID NO: 716314 - DNA, 25 bp, Homo sapien
ggtctcggtggagcccggttcacca

SEQ ID NO: 716315 - DNA, 25 bp, Homo sapien
cctttggaggagctggcagcgggaa

SEQ ID NO: 716316 - DNA, 25 bp, Homo sapien
taaagataaggctcaattaaagaat

SEQ ID NO: 716317 - DNA, 25 bp, Homo sapien
gagcccctgtgtcaacagtatctca

SEQ ID NO: 716318 - DNA, 25 bp, Homo sapien
tccaatgtgctgttaccagtgatag

SEQ ID NO: 716319 - DNA, 25 bp, Homo sapien
ctgccttttggacagggcctttgct

SEQ ID NO: 716320 - DNA, 25 bp, Homo sapien
tcgtccatggatgcacagacacgga

SEQ ID NO: 716321 - DNA, 25 bp, Homo sapien
catactgccgtgaacatcattggac

SEQ ID NO: 716322 - DNA, 25 bp, Homo sapien
taaatgacccgatgctgagctgtgt

SEQ ID NO: 716323 - DNA, 25 bp, Homo sapien
cacggaggttgtttccaccgcttga

SEQ ID NO: 716324 - DNA, 25 bp, Homo sapien
tggccggatggctggtgtcgtcttc

SEQ ID NO: 716325 - DNA, 25 bp, Homo sapien
tcgtcttcggtgtgcgccggcgcca

SEQ ID NO: 716326 - DNA, 25 bp, Homo sapien
cgccggatgggtcgctaggcctcct

SEQ ID NO: 716327 - DNA, 25 bp, Homo sapien
agcgaccggacacttcgagaaggga

SEQ ID NO: 716328 - DNA, 25 bp, Homo sapien
gaccatctggtctggttggcacgac

SEQ ID NO: 716329 - DNA, 25 bp, Homo sapien
caggctctagtgcagggcgcattca

SEQ ID NO: 716330 - DNA, 25 bp, Homo sapien
gcatggtctctattgattaggcgac

SEQ ID NO: 716331 - DNA, 25 bp, Homo sapien
tggcacgacgctttttgggtttgag

SEQ ID NO: 716332 - DNA, 25 bp, Homo sapien
gcactgatccagacatcttgaaagg

SEQ ID NO: 716333 - DNA, 25 bp, Homo sapien
cagtccaaggagagcgatgtggcca

SEQ ID NO: 716334 - DNA, 25 bp, Homo sapien
ggaggaggtcctgcactgatccaga

SEQ ID NO: 716335 - DNA, 25 bp, Homo sapien
tgttgtgtgattgggagggacagca

SEQ ID NO: 716336 - DNA, 25 bp, Homo sapien
atggatcacctgaccagcctggcta

SEQ ID NO: 716337 - DNA, 25 bp, Homo sapien
atcaagagaaaaggggggcaggccg

SEQ ID NO: 716338 - DNA, 25 bp, Homo sapien
ggcacagtgcctcacgcctgtaatc

SEQ ID NO: 716339 - DNA, 25 bp, Homo sapien
cggatggatcacctgaccagcctgg

SEQ ID NO: 716340 - DNA, 25 bp, Homo sapien
tagatgattccaggtttcctgcgac

SEQ ID NO: 716341 - DNA, 25 bp, Homo sapien
tcagaaaagccgcaactacacaggt

SEQ ID NO: 716342 - DNA, 25 bp, Homo sapien
gaactatcactgagcaacgcaaggt

SEQ ID NO: 716343 - DNA, 25 bp, Homo sapien
ggctcagaccactccacaggtgagt

SEQ ID NO: 716344 - DNA, 25 bp, Homo sapien
gactctgtatttccccgggagccag

SEQ ID NO: 716345 - DNA, 25 bp, Homo sapien
tccccgggagccagtgcctatgggt

SEQ ID NO: 716346 - DNA, 25 bp, Homo sapien
gccagtgcctatgggtgttactcac

SEQ ID NO: 716347 - DNA, 25 bp, Homo sapien
acctgactctgtatttccccgggag

SEQ ID NO: 716348 - DNA, 25 bp, Homo sapien
gtactggccatgaattccatgttaa

SEQ ID NO: 716349 - DNA, 25 bp, Homo sapien
tgttaatgaatcaactagacattat

SEQ ID NO: 716350 - DNA, 25 bp, Homo sapien
tgatcaacttcagtcaggcatgagt

SEQ ID NO: 716351 - DNA, 25 bp, Homo sapien
taagggagaaaaagacgtgctgatc

SEQ ID NO: 716352 - DNA, 25 bp, Homo sapien
cacacgtagtttcttgattgcaaga

SEQ ID NO: 716353 - DNA, 25 bp, Homo sapien
tttcttgattgcaagaaggctgtca

SEQ ID NO: 716354 - DNA, 25 bp, Homo sapien
cgtagtttcttgattgcaagaaggc

SEQ ID NO: 716355 - DNA, 25 bp, Homo sapien
ctggccacacgtagtttcttgattg

SEQ ID NO: 716356 - DNA, 25 bp, Homo sapien
gacagaactctgcatccatatggtg

SEQ ID NO: 716357 - DNA, 25 bp, Homo sapien
ccctttaataaggatgggcgtctgc

SEQ ID NO: 716358 - DNA, 25 bp, Homo sapien
tggccttccggctctgggactaaca

SEQ ID NO: 716359 - DNA, 25 bp, Homo sapien
cactgggcaacaatcagagggcttc

SEQ ID NO: 716360 - DNA, 25 bp, Homo sapien
gagcccagaagcaatgagcgcactg

SEQ ID NO: 716361 - DNA, 25 bp, Homo sapien
ggaaaaacacatgtatgcaacatag

SEQ ID NO: 716362 - DNA, 25 bp, Homo sapien
catagacatagctacagacgtgtgt

SEQ ID NO: 716363 - DNA, 25 bp, Homo sapien
ttcctagcctatgtccaccgagaga

SEQ ID NO: 716364 - DNA, 25 bp, Homo sapien
taggcaagagcctccgaagaactgc

SEQ ID NO: 716365 - DNA, 25 bp, Homo sapien
ttccccaggctcgaggccaagtgga

SEQ ID NO: 716366 - DNA, 25 bp, Homo sapien
cccagcactgttgggacaggcacag

SEQ ID NO: 716367 - DNA, 25 bp, Homo sapien
cagcaagattcaagagccaagcgcg

SEQ ID NO: 716368 - DNA, 25 bp, Homo sapien
gctcatgggtttgagcggagcctcc

SEQ ID NO: 716369 - DNA, 25 bp, Homo sapien
gggctcatgggtttgagcggagcct

SEQ ID NO: 716370 - DNA, 25 bp, Homo sapien
ggctcatgggtttgagcggagcctc

SEQ ID NO: 716371 - DNA, 25 bp, Homo sapien
cttctgtctgagagcccgggcttgg

SEQ ID NO: 716372 - DNA, 25 bp, Homo sapien
tatccgaggaacaactgggagtcgt

SEQ ID NO: 716373 - DNA, 25 bp, Homo sapien
taacctggctcgatcctgccttcta

SEQ ID NO: 716374 - DNA, 25 bp, Homo sapien
tgcctgagttggatgaggccaaacg

SEQ ID NO: 716375 - DNA, 25 bp, Homo sapien
atgaggaacccacacgggcaccagg

SEQ ID NO: 716376 - DNA, 25 bp, Homo sapien
cagagataccgaggcatgaggaacc

SEQ ID NO: 716377 - DNA, 25 bp, Homo sapien
tgctgcaatcaccaagcggaggtcg

SEQ ID NO: 716378 - DNA, 25 bp, Homo sapien
cagatgaattccagcagagataccg

SEQ ID NO: 716379 - DNA, 25 bp, Homo sapien
cagggggtcttccatactggccaac

SEQ ID NO: 716380 - DNA, 25 bp, Homo sapien
caacttgtacgagtgttcaggcaaa

SEQ ID NO: 716381 - DNA, 25 bp, Homo sapien
tccatactggccaacttgtacgagt

SEQ ID NO: 716382 - DNA, 25 bp, Homo sapien
tactggccaacttgtacgagtgttc

SEQ ID NO: 716383 - DNA, 25 bp, Homo sapien
gaaatgctgtactctctgaaccttt

SEQ ID NO: 716384 - DNA, 25 bp, Homo sapien
gcccctccgcaaatcactaatagat

SEQ ID NO: 716385 - DNA, 25 bp, Homo sapien
ctgaacctttaaagtgatgttgctc

SEQ ID NO: 716386 - DNA, 25 bp, Homo sapien
ttaaaacattcagcgccgtgttgtg

SEQ ID NO: 716387 - DNA, 25 bp, Homo sapien
gctgggtgcagggaaacgttttcca

SEQ ID NO: 716388 - DNA, 25 bp, Homo sapien
gctaattatacctgacatgcacctc

SEQ ID NO: 716389 - DNA, 25 bp, Homo sapien
tcaagctcccgataattagccgcgg

SEQ ID NO: 716390 - DNA, 25 bp, Homo sapien
tgggaccaataagaagcgctaatcg

SEQ ID NO: 716391 - DNA, 25 bp, Homo sapien
cccggccagctcgtacacgtggtgg

SEQ ID NO: 716392 - DNA, 25 bp, Homo sapien
ccgagcaggccgtcgatggagaagg

SEQ ID NO: 716393 - DNA, 25 bp, Homo sapien
ccgaactgggcatgcgggtgttcca

SEQ ID NO: 716394 - DNA, 25 bp, Homo sapien
cgactgcagctggtgcccggccagc

SEQ ID NO: 716395 - DNA, 25 bp, Homo sapien
aacacgtcgggatagtggctctcgt

SEQ ID NO: 716396 - DNA, 25 bp, Homo sapien
agctgccagccggtgaagttggtgc

SEQ ID NO: 716397 - DNA, 25 bp, Homo sapien
ggctctcgttgaacgccttctccag

SEQ ID NO: 716398 - DNA, 25 bp, Homo sapien
ctgaactcgggactcgaccaggtct

SEQ ID NO: 716399 - DNA, 25 bp, Homo sapien
tccggatggcagatccgggagcgac

SEQ ID NO: 716400 - DNA, 25 bp, Homo sapien
tggaacaaaggcgtcccggcgcgcc

SEQ ID NO: 716401 - DNA, 25 bp, Homo sapien
agatccgggagcgacgccgggtctt

SEQ ID NO: 716402 - DNA, 25 bp, Homo sapien
gcctggggtccggatggcagatccg

SEQ ID NO: 716403 - DNA, 25 bp, Homo sapien
ccgctgttctggtgactcgggtgct

SEQ ID NO: 716404 - DNA, 25 bp, Homo sapien
ttccccagcaggcgagcgcgaagcg

SEQ ID NO: 716405 - DNA, 25 bp, Homo sapien
ttctcaagccgcccaggcttttggg

SEQ ID NO: 716406 - DNA, 25 bp, Homo sapien
ttcccggttcggacgcagccgctgt

SEQ ID NO: 716407 - DNA, 25 bp, Homo sapien
ttgcaggcgcaaggtaaacagactc

SEQ ID NO: 716408 - DNA, 25 bp, Homo sapien
ctcgcgcggaaggttgaggcggtgc

SEQ ID NO: 716409 - DNA, 25 bp, Homo sapien
cagactcgttcgctccaggctgggt

SEQ ID NO: 716410 - DNA, 25 bp, Homo sapien
tctctcctccgggtcggagccaagc

SEQ ID NO: 716411 - DNA, 25 bp, Homo sapien
taagacacttagaacaaattggatg

SEQ ID NO: 716412 - DNA, 25 bp, Homo sapien
gcacccaccgcagaaaaagaggatt

SEQ ID NO: 716413 - DNA, 25 bp, Homo sapien
ctgccttgcctgtaagaattagtca

SEQ ID NO: 716414 - DNA, 25 bp, Homo sapien
taaacaggcgttttgccagcgtctg

SEQ ID NO: 716415 - DNA, 25 bp, Homo sapien
ctgccgttggaccgctgagccacag

SEQ ID NO: 716416 - DNA, 25 bp, Homo sapien
tccacacctgtcttcggccccttgg

SEQ ID NO: 716417 - DNA, 25 bp, Homo sapien
acctgtcttcggccccttggagact

SEQ ID NO: 716418 - DNA, 25 bp, Homo sapien
actgtgtcaaagcccacatttcggg

SEQ ID NO: 716419 - DNA, 25 bp, Homo sapien
gtggtcgggtgcgagttgtgcgccg

SEQ ID NO: 716420 - DNA, 25 bp, Homo sapien
tcgggtgcgagttgtgcgccggccg

SEQ ID NO: 716421 - DNA, 25 bp, Homo sapien
ggtcgggtgcgagttgtgcgccggc

SEQ ID NO: 716422 - DNA, 25 bp, Homo sapien
gggtgcgagttgtgcgccggccgcc

SEQ ID NO: 716423 - DNA, 25 bp, Homo sapien
cgccgggcgagtgcaagtggcggcc

SEQ ID NO: 716424 - DNA, 25 bp, Homo sapien
tcggagctgggcgcgctgtgcaggg

SEQ ID NO: 716425 - DNA, 25 bp, Homo sapien
gggcgagtgcaagtggcggccctgg

SEQ ID NO: 716426 - DNA, 25 bp, Homo sapien
tgtgcagggacaggccgccgggcga

SEQ ID NO: 716427 - DNA, 25 bp, Homo sapien
ccgcggcgcccgaggcgtgcgctcc

SEQ ID NO: 716428 - DNA, 25 bp, Homo sapien
ccgaggcgtgcgctccggggccctt

SEQ ID NO: 716429 - DNA, 25 bp, Homo sapien
cggcgcccgaggcgtgcgctccggg

SEQ ID NO: 716430 - DNA, 25 bp, Homo sapien
cccgaggcgtgcgctccggggccct

SEQ ID NO: 716431 - DNA, 25 bp, Homo sapien
agaaggcggggtcgcaggtgccggg

SEQ ID NO: 716432 - DNA, 25 bp, Homo sapien
aggcggggtcgcaggtgccgggtgc

SEQ ID NO: 716433 - DNA, 25 bp, Homo sapien
cggggtcgcaggtgccgggtgcagg

SEQ ID NO: 716434 - DNA, 25 bp, Homo sapien
tagaaggcggggtcgcaggtgccgg

SEQ ID NO: 716435 - DNA, 25 bp, Homo sapien
ggctctccacgctgaatgggctggc

SEQ ID NO: 716436 - DNA, 25 bp, Homo sapien
tggcccgcacgaggccgcgtccttg

SEQ ID NO: 716437 - DNA, 25 bp, Homo sapien
tccacgctgaatgggctggccttgg

SEQ ID NO: 716438 - DNA, 25 bp, Homo sapien
tccttgtccgcagggcgacctgggc

SEQ ID NO: 716439 - DNA, 25 bp, Homo sapien
cggcggcggcgttggaagcggcttt

SEQ ID NO: 716440 - DNA, 25 bp, Homo sapien
ggcggcggcgttggaagcggctttc

SEQ ID NO: 716441 - DNA, 25 bp, Homo sapien
tggcccttgccgatcagggtccgcg

SEQ ID NO: 716442 - DNA, 25 bp, Homo sapien
cagcccgggcgcgaagtccagcccc

SEQ ID NO: 716443 - DNA, 25 bp, Homo sapien
aggaagtggcccttgccgatcaggg

SEQ ID NO: 716444 - DNA, 25 bp, Homo sapien
aggaagccgagcggctgcgtgatgg

SEQ ID NO: 716445 - DNA, 25 bp, Homo sapien
tgcgacgcgcgaaggccgagtccgg

SEQ ID NO: 716446 - DNA, 25 bp, Homo sapien
tgccgaggcgaggtcccggaaaggc

SEQ ID NO: 716447 - DNA, 25 bp, Homo sapien
gccgccctcggtagccgctgccgag

SEQ ID NO: 716448 - DNA, 25 bp, Homo sapien
gcggtccccgcgtccgcgcagtccc

SEQ ID NO: 716449 - DNA, 25 bp, Homo sapien
gccgccgcgccaggctcgggaaccc

SEQ ID NO: 716450 - DNA, 25 bp, Homo sapien
tcagtccatgtccagctcctcgccc

SEQ ID NO: 716451 - DNA, 25 bp, Homo sapien
caggctcgggaaccccgcaggtggc

SEQ ID NO: 716452 - DNA, 25 bp, Homo sapien
cgccaggctcgggaaccccgcaggt

SEQ ID NO: 716453 - DNA, 25 bp, Homo sapien
tgctgcctgggtccgaattcataca

SEQ ID NO: 716454 - DNA, 25 bp, Homo sapien
gcagtgtttctagagccgatcacct

SEQ ID NO: 716455 - DNA, 25 bp, Homo sapien
acaaggctgaggattctcgttgtgg

SEQ ID NO: 716456 - DNA, 25 bp, Homo sapien
catacagcactttcgtttactctta

SEQ ID NO: 716457 - DNA, 25 bp, Homo sapien
tgctcagcctcgttggaattaatgg

SEQ ID NO: 716458 - DNA, 25 bp, Homo sapien
ccctattagaacaaatgtgcacggc

SEQ ID NO: 716459 - DNA, 25 bp, Homo sapien
ttttgtaaagagtcgcgttggcggc

SEQ ID NO: 716460 - DNA, 25 bp, Homo sapien
aattggtggcttttgcggcaacgag

SEQ ID NO: 716461 - DNA, 25 bp, Homo sapien
cggtgcagccgccaccgaaatgaac

SEQ ID NO: 716462 - DNA, 25 bp, Homo sapien
ttcaccttagataaaataaccggca

SEQ ID NO: 716463 - DNA, 25 bp, Homo sapien
ttgaaggaaggaggcgatttatcgc

SEQ ID NO: 716464 - DNA, 25 bp, Homo sapien
ttaaggacacgggtgtgcagccagc

SEQ ID NO: 716465 - DNA, 25 bp, Homo sapien
tacactctcccataatgatccggcg

SEQ ID NO: 716466 - DNA, 25 bp, Homo sapien
gaggctggctcgaccagatcgattg

SEQ ID NO: 716467 - DNA, 25 bp, Homo sapien
gatggcgtcggatgcataatagagc

SEQ ID NO: 716468 - DNA, 25 bp, Homo sapien
ttgtctagaatcacacagcctgctg

SEQ ID NO: 716469 - DNA, 25 bp, Homo sapien
tgagcagtgaattgggctcggtcca

SEQ ID NO: 716470 - DNA, 25 bp, Homo sapien
taatttacaccctgatcctgaatcg

SEQ ID NO: 716471 - DNA, 25 bp, Homo sapien
gaatcgatccgacacctccggatgg

SEQ ID NO: 716472 - DNA, 25 bp, Homo sapien
tctaagctccgtattaagcagcggt

SEQ ID NO: 716473 - DNA, 25 bp, Homo sapien
cggtgctggagcccggatttctctg

SEQ ID NO: 716474 - DNA, 25 bp, Homo sapien
acgcagcgacgcctgagacctggga

SEQ ID NO: 716475 - DNA, 25 bp, Homo sapien
gccgggacatcggcgccgggagcca

SEQ ID NO: 716476 - DNA, 25 bp, Homo sapien
ccaagtccgcttccgggaaactgag

SEQ ID NO: 716477 - DNA, 25 bp, Homo sapien
aggccgagctctcgctcaccccgcg

SEQ ID NO: 716478 - DNA, 25 bp, Homo sapien
cgctcaccccgcggcttctctgtgt

SEQ ID NO: 716479 - DNA, 25 bp, Homo sapien
ggcttctctgtgtgcccggaggcca

SEQ ID NO: 716480 - DNA, 25 bp, Homo sapien
ttctctgtgtgcccggaggccagcg

SEQ ID NO: 716481 - DNA, 25 bp, Homo sapien
gaaaggggatgagggtgcgagttac

SEQ ID NO: 716482 - DNA, 25 bp, Homo sapien
ggatgagggtgcgagttacgctggg

SEQ ID NO: 716483 - DNA, 25 bp, Homo sapien
cgactcattaaaccggagtttggat

SEQ ID NO: 716484 - DNA, 25 bp, Homo sapien
tcacgactcattaaaccggagtttg

SEQ ID NO: 716485 - DNA, 25 bp, Homo sapien
tttctcagtggagaagttgcctgtt

SEQ ID NO: 716486 - DNA, 25 bp, Homo sapien
cagtggagaagttgcctgtttccaa

SEQ ID NO: 716487 - DNA, 25 bp, Homo sapien
gaacctgggtgctggatgcttcgct

SEQ ID NO: 716488 - DNA, 25 bp, Homo sapien
tgtttccaattcaggcccccgatcg

SEQ ID NO: 716489 - DNA, 25 bp, Homo sapien
tcagcgaaaattgaattcccccgaa

SEQ ID NO: 716490 - DNA, 25 bp, Homo sapien
ccccgaaatagctccgaggacagga

SEQ ID NO: 716491 - DNA, 25 bp, Homo sapien
tgccgtgaaatagggcaccaggaac

SEQ ID NO: 716492 - DNA, 25 bp, Homo sapien
gacctggtatttcatagtgttttaa

SEQ ID NO: 716493 - DNA, 25 bp, Homo sapien
gacgagcagagctttggcgcctgca

SEQ ID NO: 716494 - DNA, 25 bp, Homo sapien
tatggagggcctaagaactccctga

SEQ ID NO: 716495 - DNA, 25 bp, Homo sapien
caaaagtgcccacgttcatgacggg

SEQ ID NO: 716496 - DNA, 25 bp, Homo sapien
aactccctgagtttggttgtcacca

SEQ ID NO: 716497 - DNA, 25 bp, Homo sapien
ccccacatcaaggagcgggacaggg

SEQ ID NO: 716498 - DNA, 25 bp, Homo sapien
gagccacatgaaggccccacatcaa

SEQ ID NO: 716499 - DNA, 25 bp, Homo sapien
gccccacatcaaggagcgggacagg

SEQ ID NO: 716500 - DNA, 25 bp, Homo sapien
aggccccacatcaaggagcgggaca

SEQ ID NO: 716501 - DNA, 25 bp, Homo sapien
cgggatcgatgcatggtccatgcag

SEQ ID NO: 716502 - DNA, 25 bp, Homo sapien
acttctcctcgtatggacaccggcg

SEQ ID NO: 716503 - DNA, 25 bp, Homo sapien
gacacccgctgtctagagccatgct

SEQ ID NO: 716504 - DNA, 25 bp, Homo sapien
gccatgctgagcagacttctcctcg

SEQ ID NO: 716505 - DNA, 25 bp, Homo sapien
agcgcctttacgtaggtggccagag

SEQ ID NO: 716506 - DNA, 25 bp, Homo sapien
gccaggcactccagcgtcagcacag

SEQ ID NO: 716507 - DNA, 25 bp, Homo sapien
agggtcgcgggccttcacccaggct

SEQ ID NO: 716508 - DNA, 25 bp, Homo sapien
tcccaggacactgcttggctcccag

SEQ ID NO: 716509 - DNA, 25 bp, Homo sapien
gagctcacccttagcaaccaggcta

SEQ ID NO: 716510 - DNA, 25 bp, Homo sapien
gagagacatttaatcgcgggagtag

SEQ ID NO: 716511 - DNA, 25 bp, Homo sapien
cctcgggctgcggtgtaatcagctt

SEQ ID NO: 716512 - DNA, 25 bp, Homo sapien
ccataggtgttaggctgagagacat

SEQ ID NO: 716513 - DNA, 25 bp, Homo sapien
tcggggcgtgcacgcgctgagcacc

SEQ ID NO: 716514 - DNA, 25 bp, Homo sapien
ctaggtgtcggggcgtgcacgcgct

SEQ ID NO: 716515 - DNA, 25 bp, Homo sapien
tgtcggggcgtgcacgcgctgagca

SEQ ID NO: 716516 - DNA, 25 bp, Homo sapien
aggtgtcggggcgtgcacgcgctga

SEQ ID NO: 716517 - DNA, 25 bp, Homo sapien
ttagctccgcgaagcttcgccatcg

SEQ ID NO: 716518 - DNA, 25 bp, Homo sapien
cggacggaaggaatcgtcctggtct

SEQ ID NO: 716519 - DNA, 25 bp, Homo sapien
gtggccgtcgccgagaaggctatta

SEQ ID NO: 716520 - DNA, 25 bp, Homo sapien
tctgagctgaacttgcggcaggagg

SEQ ID NO: 716521 - DNA, 25 bp, Homo sapien
cggccggccgggaacacccatgctc

SEQ ID NO: 716522 - DNA, 25 bp, Homo sapien
ggccggccgggaacacccatgctct

SEQ ID NO: 716523 - DNA, 25 bp, Homo sapien
tcggccggccgggaacacccatgct

SEQ ID NO: 716524 - DNA, 25 bp, Homo sapien
ggcggcggggacttcagcaaaagaa

SEQ ID NO: 716525 - DNA, 25 bp, Homo sapien
gggctgagtcccgcagtttggcact

SEQ ID NO: 716526 - DNA, 25 bp, Homo sapien
ctgagtcccgcagtttggcactgcc

SEQ ID NO: 716527 - DNA, 25 bp, Homo sapien
caccatggcggcagtagtggggctt

SEQ ID NO: 716528 - DNA, 25 bp, Homo sapien
aggtgacagggcctgcactgacggc

SEQ ID NO: 716529 - DNA, 25 bp, Homo sapien
gacagggcctgcactgacggccttc

SEQ ID NO: 716530 - DNA, 25 bp, Homo sapien
gtgacagggcctgcactgacggcct

SEQ ID NO: 716531 - DNA, 25 bp, Homo sapien
tgtgacctgggtggtacccgtcaga

SEQ ID NO: 716532 - DNA, 25 bp, Homo sapien
aaagtgccaggaggagaatgtccag

SEQ ID NO: 716533 - DNA, 25 bp, Homo sapien
ctgacggatgaagccctcaaagtgc

SEQ ID NO: 716534 - DNA, 25 bp, Homo sapien
cggatgaagccctcaaagtgccagg

SEQ ID NO: 716535 - DNA, 25 bp, Homo sapien
aagccctcaaagtgccaggaggaga

SEQ ID NO: 716536 - DNA, 25 bp, Homo sapien
tgccttctgccgataaccgcactga

SEQ ID NO: 716537 - DNA, 25 bp, Homo sapien
tgtcagggtaggcagatgttgcctt

SEQ ID NO: 716538 - DNA, 25 bp, Homo sapien
catatctcgagcttgtcaccacgct

SEQ ID NO: 716539 - DNA, 25 bp, Homo sapien
cggcgctggcggcagatggctttgc

SEQ ID NO: 716540 - DNA, 25 bp, Homo sapien
cacttccctaacaatgatgtcatta

SEQ ID NO: 716541 - DNA, 25 bp, Homo sapien
cgctgccacttccctaacaatgatg

SEQ ID NO: 716542 - DNA, 25 bp, Homo sapien
gcctctatttcagcggggcggtggt

SEQ ID NO: 716543 - DNA, 25 bp, Homo sapien
tccacaacctggtgacagcccagcc

SEQ ID NO: 716544 - DNA, 25 bp, Homo sapien
tcctgagaactgtcggaaacaatgt

SEQ ID NO: 716545 - DNA, 25 bp, Homo sapien
caatttaactgacttgagcggcaca

SEQ ID NO: 716546 - DNA, 25 bp, Homo sapien
gagcggcacactgaaaaacctaatg

SEQ ID NO: 716547 - DNA, 25 bp, Homo sapien
tggactcaattttccgccacactgc

SEQ ID NO: 716548 - DNA, 25 bp, Homo sapien
aacgcccaggccgtgccacgccgcg

SEQ ID NO: 716549 - DNA, 25 bp, Homo sapien
ttcactgctgcatccaacgcccagg

SEQ ID NO: 716550 - DNA, 25 bp, Homo sapien
cacgccgcgggggcctcagaagtga

SEQ ID NO: 716551 - DNA, 25 bp, Homo sapien
cccgcgtgggtcccgttcactgctg

SEQ ID NO: 716552 - DNA, 25 bp, Homo sapien
gccgatgtcggctgcatctccagga

SEQ ID NO: 716553 - DNA, 25 bp, Homo sapien
tctccaggacaacgcggacgagttg

SEQ ID NO: 716554 - DNA, 25 bp, Homo sapien
gagttgtctgctttctccgggtttc

SEQ ID NO: 716555 - DNA, 25 bp, Homo sapien
catattgaatgacgggagctgtgtc

SEQ ID NO: 716556 - DNA, 25 bp, Homo sapien
atgccacctgccagatcttccgggg

SEQ ID NO: 716557 - DNA, 25 bp, Homo sapien
tcatgccacctgccagatcttccgg

SEQ ID NO: 716558 - DNA, 25 bp, Homo sapien
catgccacctgccagatcttccggg

SEQ ID NO: 716559 - DNA, 25 bp, Homo sapien
cactggagtggaaccggcggataat

SEQ ID NO: 716560 - DNA, 25 bp, Homo sapien
ccaattctgatgtgcggagatgatc

SEQ ID NO: 716561 - DNA, 25 bp, Homo sapien
aatggttccaatttagcctctgtaa

SEQ ID NO: 716562 - DNA, 25 bp, Homo sapien
gataataggcagttacccagcaggc

SEQ ID NO: 716563 - DNA, 25 bp, Homo sapien
tattaccgagtcacttgccggaaag

SEQ ID NO: 716564 - DNA, 25 bp, Homo sapien
tctgaagtaattaggagttcctgct

SEQ ID NO: 716565 - DNA, 25 bp, Homo sapien
agttcctgctgatggatcgcactgg

SEQ ID NO: 716566 - DNA, 25 bp, Homo sapien
tgccccaaagaagtgggctgacggt

SEQ ID NO: 716567 - DNA, 25 bp, Homo sapien
gccaccgcgcgcggctgacagttga

SEQ ID NO: 716568 - DNA, 25 bp, Homo sapien
ccgcgcgcggctgacagttgatttt

SEQ ID NO: 716569 - DNA, 25 bp, Homo sapien
ccaccgcgcgcggctgacagttgat

SEQ ID NO: 716570 - DNA, 25 bp, Homo sapien
ggcgggcgaggcttcagggagcgtt

SEQ ID NO: 716571 - DNA, 25 bp, Homo sapien
ttcagggagcgttgtgccagcagga

SEQ ID NO: 716572 - DNA, 25 bp, Homo sapien
accgcccagactggtgtggctgccg

SEQ ID NO: 716573 - DNA, 25 bp, Homo sapien
ggacaccgcccagactggtgtggct

SEQ ID NO: 716574 - DNA, 25 bp, Homo sapien
ctgccccgaaccatgccttggactg

SEQ ID NO: 716575 - DNA, 25 bp, Homo sapien
cccgaaccatgccttggactgcgcc

SEQ ID NO: 716576 - DNA, 25 bp, Homo sapien
tgccccgaaccatgccttggactgc

SEQ ID NO: 716577 - DNA, 25 bp, Homo sapien
gccccgaaccatgccttggactgcg

SEQ ID NO: 716578 - DNA, 25 bp, Homo sapien
tccttaaacagtgctccgtagccat

SEQ ID NO: 716579 - DNA, 25 bp, Homo sapien
tgtacatccttaaacagtgctccgt

SEQ ID NO: 716580 - DNA, 25 bp, Homo sapien
cgtgaggtgtctgtacccgggacat

SEQ ID NO: 716581 - DNA, 25 bp, Homo sapien
ggtgtggggcgtctgtacatcctta

SEQ ID NO: 716582 - DNA, 25 bp, Homo sapien
gtcctcgcagagaagatgaggagcc

SEQ ID NO: 716583 - DNA, 25 bp, Homo sapien
cagtcctcgcagagaagatgaggag

SEQ ID NO: 716584 - DNA, 25 bp, Homo sapien
tcctcgcagagaagatgaggagccc

SEQ ID NO: 716585 - DNA, 25 bp, Homo sapien
tcagtcctcgcagagaagatgagga

SEQ ID NO: 716586 - DNA, 25 bp, Homo sapien
tctaaggagacagccgcaagaggtc

SEQ ID NO: 716587 - DNA, 25 bp, Homo sapien
tggtgatagggagacagaatccgct

SEQ ID NO: 716588 - DNA, 25 bp, Homo sapien
gcagaagcattcaagcggaggtcaa

SEQ ID NO: 716589 - DNA, 25 bp, Homo sapien
tcactgatgactcgctggcctgaac

SEQ ID NO: 716590 - DNA, 25 bp, Homo sapien
gcccagggtgagagcccctccgagc

SEQ ID NO: 716591 - DNA, 25 bp, Homo sapien
gccagcttacggcccatcagctgtg

SEQ ID NO: 716592 - DNA, 25 bp, Homo sapien
tccgagcctgccgaagcacgtcacc

SEQ ID NO: 716593 - DNA, 25 bp, Homo sapien
tgccgaagcacgtcacccaggagcc

SEQ ID NO: 716594 - DNA, 25 bp, Homo sapien
ttgggtccgttccactttctggctg

SEQ ID NO: 716595 - DNA, 25 bp, Homo sapien
catctgcaaactggccggtcccaga

SEQ ID NO: 716596 - DNA, 25 bp, Homo sapien
ccttggctcagtgttgggtttgcag

SEQ ID NO: 716597 - DNA, 25 bp, Homo sapien
ttcatggctgcgtagcactccacca

SEQ ID NO: 716598 - DNA, 25 bp, Homo sapien
ggatctgtgcgtggctcaggagcga

SEQ ID NO: 716599 - DNA, 25 bp, Homo sapien
cagctgtaagcttccttttccatca

SEQ ID NO: 716600 - DNA, 25 bp, Homo sapien
aggagcgacgcgtgacttccccgag

SEQ ID NO: 716601 - DNA, 25 bp, Homo sapien
cactgatgagggaggcggttcttat

SEQ ID NO: 716602 - DNA, 25 bp, Homo sapien
tccgagaagccttccttgactgaca

SEQ ID NO: 716603 - DNA, 25 bp, Homo sapien
aagccttccttgactgacagacagc

SEQ ID NO: 716604 - DNA, 25 bp, Homo sapien
ttccttgactgacagacagcagctg

SEQ ID NO: 716605 - DNA, 25 bp, Homo sapien
ccttgactgacagacagcagctgct

SEQ ID NO: 716606 - DNA, 25 bp, Homo sapien
aaaattttcacatacgtggacaggg

SEQ ID NO: 716607 - DNA, 25 bp, Homo sapien
catggacagagggtacaaagtgcac

SEQ ID NO: 716608 - DNA, 25 bp, Homo sapien
tctggccggtagaacttgtgtatca

SEQ ID NO: 716609 - DNA, 25 bp, Homo sapien
ttttcaggcatcgtcaggtctggcc

SEQ ID NO: 716610 - DNA, 25 bp, Homo sapien
tgcggatgtacagctgagatcagcc

SEQ ID NO: 716611 - DNA, 25 bp, Homo sapien
caaggtcaccgggaagtttgcggat

SEQ ID NO: 716612 - DNA, 25 bp, Homo sapien
cagagctcaccaggagtgtggatgc

SEQ ID NO: 716613 - DNA, 25 bp, Homo sapien
aggccgatgaggacgtggcccggct

SEQ ID NO: 716614 - DNA, 25 bp, Homo sapien
tctctttgaaattggcgtctccaga

SEQ ID NO: 716615 - DNA, 25 bp, Homo sapien
taattcgttgacatcactattaaga

SEQ ID NO: 716616 - DNA, 25 bp, Homo sapien
catcactattaagatgtctctttga

SEQ ID NO: 716617 - DNA, 25 bp, Homo sapien
aggctgacacgccaggcgcggagct

SEQ ID NO: 716618 - DNA, 25 bp, Homo sapien
gtcaacagcttgcatcgtcggcgcc

SEQ ID NO: 716619 - DNA, 25 bp, Homo sapien
acacttcttaattagattctgcaga

SEQ ID NO: 716620 - DNA, 25 bp, Homo sapien
ccggatacgcagagaacacttctta

SEQ ID NO: 716621 - DNA, 25 bp, Homo sapien
cgtcggcgccgcacaattgttcgaa

SEQ ID NO: 716622 - DNA, 25 bp, Homo sapien
tacatgtgctcgtgggtgtgatgca

SEQ ID NO: 716623 - DNA, 25 bp, Homo sapien
gcatgtcaacgcagaagtacacaca

SEQ ID NO: 716624 - DNA, 25 bp, Homo sapien
ggaggcctcgcgcatgtacatgtgc

SEQ ID NO: 716625 - DNA, 25 bp, Homo sapien
caaagaacccttgccacgacaagca

SEQ ID NO: 716626 - DNA, 25 bp, Homo sapien
tgcctgcgtggtgttcgctacttcc

SEQ ID NO: 716627 - DNA, 25 bp, Homo sapien
cctgcgtggtgttcgctacttccca

SEQ ID NO: 716628 - DNA, 25 bp, Homo sapien
cgagtgcctgcgtggtgttcgctac

SEQ ID NO: 716629 - DNA, 25 bp, Homo sapien
gcgtggtgttcgctacttcccaggg

SEQ ID NO: 716630 - DNA, 25 bp, Homo sapien
tgtgcatccattacgcacgtgcacc

SEQ ID NO: 716631 - DNA, 25 bp, Homo sapien
gcacaccagctgcatgcgtgtgcat

SEQ ID NO: 716632 - DNA, 25 bp, Homo sapien
tggcccatagcccacttggccgctg

SEQ ID NO: 716633 - DNA, 25 bp, Homo sapien
ggttacaggtgcgcccgactgcacg

SEQ ID NO: 716634 - DNA, 25 bp, Homo sapien
gggcagctggttccccaaggccact

SEQ ID NO: 716635 - DNA, 25 bp, Homo sapien
aaccctcccacctcgtgtccagctc

SEQ ID NO: 716636 - DNA, 25 bp, Homo sapien
agctggttccccaaggccactgagg

SEQ ID NO: 716637 - DNA, 25 bp, Homo sapien
cagctccagttgtcagaggggtctg

SEQ ID NO: 716638 - DNA, 25 bp, Homo sapien
tcttgtttctggtctaggtacttgg

SEQ ID NO: 716639 - DNA, 25 bp, Homo sapien
ggctttgagactggagcggttgggg

SEQ ID NO: 716640 - DNA, 25 bp, Homo sapien
agactggagcggttggggaggatgt

SEQ ID NO: 716641 - DNA, 25 bp, Homo sapien
cttgtttctggtctaggtacttggg

SEQ ID NO: 716642 - DNA, 25 bp, Homo sapien
tgcacagacgcacacatgtacagag

SEQ ID NO: 716643 - DNA, 25 bp, Homo sapien
gcctcaggtcccgtgaaaggcccat

SEQ ID NO: 716644 - DNA, 25 bp, Homo sapien
tgtacagagcgtgtggcctcaggtc

SEQ ID NO: 716645 - DNA, 25 bp, Homo sapien
gacgcacacatgtacagagcgtgtg

SEQ ID NO: 716646 - DNA, 25 bp, Homo sapien
tggactctgccgctccaacaggcct

SEQ ID NO: 716647 - DNA, 25 bp, Homo sapien
ctggccatactggtgggtttcctgc

SEQ ID NO: 716648 - DNA, 25 bp, Homo sapien
tggccatactggtgggtttcctgca

SEQ ID NO: 716649 - DNA, 25 bp, Homo sapien
ccagagctctcagccgggctcagaa

SEQ ID NO: 716650 - DNA, 25 bp, Homo sapien
tcgttgcttggagcgggtgaggcca

SEQ ID NO: 716651 - DNA, 25 bp, Homo sapien
cccagggaccgtgggaagctgtcgt

SEQ ID NO: 716652 - DNA, 25 bp, Homo sapien
agccagcagcgcttggcgaggctcc

SEQ ID NO: 716653 - DNA, 25 bp, Homo sapien
acctggtggaggcataaagagaatg

SEQ ID NO: 716654 - DNA, 25 bp, Homo sapien
tcctgtcctcgaggacctggtggag

SEQ ID NO: 716655 - DNA, 25 bp, Homo sapien
agctcctgtcctcgaggacctggtg

SEQ ID NO: 716656 - DNA, 25 bp, Homo sapien
ggcataaagagaatggcagtcctgg

SEQ ID NO: 716657 - DNA, 25 bp, Homo sapien
aaaggggcgattggttttgtgagca

SEQ ID NO: 716658 - DNA, 25 bp, Homo sapien
gggcgattggttttgtgagcaggag

SEQ ID NO: 716659 - DNA, 25 bp, Homo sapien
gcgattggttttgtgagcaggagca

SEQ ID NO: 716660 - DNA, 25 bp, Homo sapien
cagaaaaggggcgattggttttgtg

SEQ ID NO: 716661 - DNA, 25 bp, Homo sapien
gttttggattctgcgctaacgaggt

SEQ ID NO: 716662 - DNA, 25 bp, Homo sapien
ggccggcctgccgtgacgatcacag

SEQ ID NO: 716663 - DNA, 25 bp, Homo sapien
agccctgccgtctcaggtcacggtt

SEQ ID NO: 716664 - DNA, 25 bp, Homo sapien
tctgtctgtcggtccacctaggtgt

SEQ ID NO: 716665 - DNA, 25 bp, Homo sapien
tgacggctgccatgcaggcttgctc

SEQ ID NO: 716666 - DNA, 25 bp, Homo sapien
tgcttctctcgggtgaatcatggag

SEQ ID NO: 716667 - DNA, 25 bp, Homo sapien
tcagggtgtgcgctcagggaattct

SEQ ID NO: 716668 - DNA, 25 bp, Homo sapien
gcacagccagatcatacgtccgggc

SEQ ID NO: 716669 - DNA, 25 bp, Homo sapien
cctgactggtttcgtacttgtggga

SEQ ID NO: 716670 - DNA, 25 bp, Homo sapien
ctgactggtttcgtacttgtgggac

SEQ ID NO: 716671 - DNA, 25 bp, Homo sapien
tgactggtttcgtacttgtgggacc

SEQ ID NO: 716672 - DNA, 25 bp, Homo sapien
tgctgacagcgagacccccgctgcc

SEQ ID NO: 716673 - DNA, 25 bp, Homo sapien
agcacggaggtgctctcttgccctc

SEQ ID NO: 716674 - DNA, 25 bp, Homo sapien
gtgtgcctcgggcagtgatgagggt

SEQ ID NO: 716675 - DNA, 25 bp, Homo sapien
tcccccagatgaggccatgggtcac

SEQ ID NO: 716676 - DNA, 25 bp, Homo sapien
gcggcgttgagcacggcctcactgt

SEQ ID NO: 716677 - DNA, 25 bp, Homo sapien
cccagtagtagccagtagggccgtg

SEQ ID NO: 716678 - DNA, 25 bp, Homo sapien
ccgcttgtccaagatctggtcacca

SEQ ID NO: 716679 - DNA, 25 bp, Homo sapien
tccagaggaagaagtccaagttccg

SEQ ID NO: 716680 - DNA, 25 bp, Homo sapien
caccgtgcccggccaaagtcttagt

SEQ ID NO: 716681 - DNA, 25 bp, Homo sapien
cgcggcgttgggctgctacagttca

SEQ ID NO: 716682 - DNA, 25 bp, Homo sapien
tacccaaggtggcatgcattattca

SEQ ID NO: 716683 - DNA, 25 bp, Homo sapien
cgagttaccgacatgcctagcaaag

SEQ ID NO: 716684 - DNA, 25 bp, Homo sapien
gacgagaatgtatactccccatagc

SEQ ID NO: 716685 - DNA, 25 bp, Homo sapien
gatcctgcatatggaggccgtgatg

SEQ ID NO: 716686 - DNA, 25 bp, Homo sapien
caggagcaatactccgagccctggg

SEQ ID NO: 716687 - DNA, 25 bp, Homo sapien
gcagatctccgaggccctgaggatc

SEQ ID NO: 716688 - DNA, 25 bp, Homo sapien
tcctggtgggcatgtacggccagat

SEQ ID NO: 716689 - DNA, 25 bp, Homo sapien
tacgcaaagcatccgcacatagcaa

SEQ ID NO: 716690 - DNA, 25 bp, Homo sapien
tgaggatcaaatgcgtgcacctacg

SEQ ID NO: 716691 - DNA, 25 bp, Homo sapien
tgtccccttggccacgacaaaatgg

SEQ ID NO: 716692 - DNA, 25 bp, Homo sapien
ttcccagtggctttgcggagccaga

SEQ ID NO: 716693 - DNA, 25 bp, Homo sapien
tgagtaggctggggaccgggcacgg

SEQ ID NO: 716694 - DNA, 25 bp, Homo sapien
actcgcttgtacctaggaggcggag

SEQ ID NO: 716695 - DNA, 25 bp, Homo sapien
gagactcgcttgtacctaggaggcg

SEQ ID NO: 716696 - DNA, 25 bp, Homo sapien
atgagtaggctggggaccgggcacg

SEQ ID NO: 716697 - DNA, 25 bp, Homo sapien
tcggctgcccctcgaagcagggatg

SEQ ID NO: 716698 - DNA, 25 bp, Homo sapien
ccaggtcaggatgggttgcccgtct

SEQ ID NO: 716699 - DNA, 25 bp, Homo sapien
cctgccgtcgggacctgtgggtggt

SEQ ID NO: 716700 - DNA, 25 bp, Homo sapien
aggctgaaggagcaggcggagccga

SEQ ID NO: 716701 - DNA, 25 bp, Homo sapien
caggggactgggcagatcaggctct

SEQ ID NO: 716702 - DNA, 25 bp, Homo sapien
agcaggggactgggcagatcaggct

SEQ ID NO: 716703 - DNA, 25 bp, Homo sapien
ggctctcactgaacatggcgagcca

SEQ ID NO: 716704 - DNA, 25 bp, Homo sapien
ctcactgaacatggcgagccaccct

SEQ ID NO: 716705 - DNA, 25 bp, Homo sapien
aagcacttcctagtctccagccaga

SEQ ID NO: 716706 - DNA, 25 bp, Homo sapien
gagccggccgttctattttcagaca

SEQ ID NO: 716707 - DNA, 25 bp, Homo sapien
aacggaaggactcaggtctctcggg

SEQ ID NO: 716708 - DNA, 25 bp, Homo sapien
gactcatttcctcgtgagccggccg

SEQ ID NO: 716709 - DNA, 25 bp, Homo sapien
ggcgctcgggctccgacttcgcgaa

SEQ ID NO: 716710 - DNA, 25 bp, Homo sapien
tccgacttcgcgaagaacaacaagt

SEQ ID NO: 716711 - DNA, 25 bp, Homo sapien
ggcgctcactgtcgcgctcccctcg

SEQ ID NO: 716712 - DNA, 25 bp, Homo sapien
cttcgcgaagaacaacaagtgcccc

SEQ ID NO: 716713 - DNA, 25 bp, Homo sapien
acctcagtgccagtaaagagacctg

SEQ ID NO: 716714 - DNA, 25 bp, Homo sapien
tttggagaagctgcatagggcaccc

SEQ ID NO: 716715 - DNA, 25 bp, Homo sapien
cttacaacaacacaccgtgacggtg

SEQ ID NO: 716716 - DNA, 25 bp, Homo sapien
tagggcaccccactctgtgttggag

SEQ ID NO: 716717 - DNA, 25 bp, Homo sapien
tctggaggatcatgttttccctttt

SEQ ID NO: 716718 - DNA, 25 bp, Homo sapien
ggtcagtcgtccagaactgtgcttt

SEQ ID NO: 716719 - DNA, 25 bp, Homo sapien
gcccagggtcagtcgtccagaactg

SEQ ID NO: 716720 - DNA, 25 bp, Homo sapien
gcttctggaggatcatgttttccct

SEQ ID NO: 716721 - DNA, 25 bp, Homo sapien
tgacttcaggtcaggttgcacagac

SEQ ID NO: 716722 - DNA, 25 bp, Homo sapien
ctcagggcgctgacgtagatggcac

SEQ ID NO: 716723 - DNA, 25 bp, Homo sapien
ttcccacaggaacatcagagcagca

SEQ ID NO: 716724 - DNA, 25 bp, Homo sapien
gatagttgccatggcgaccttggga

SEQ ID NO: 716725 - DNA, 25 bp, Homo sapien
catccgggcccagcccgtcctgagg

SEQ ID NO: 716726 - DNA, 25 bp, Homo sapien
tctcagcccggggtggacagtcaca

SEQ ID NO: 716727 - DNA, 25 bp, Homo sapien
catgaaaacaagacggggcaccatc

SEQ ID NO: 716728 - DNA, 25 bp, Homo sapien
ctcccatgcagggatgcttctcagc

SEQ ID NO: 716729 - DNA, 25 bp, Homo sapien
cgggcacggtcaccaggacagagct

SEQ ID NO: 716730 - DNA, 25 bp, Homo sapien
aacccgggcacggtcaccaggacag

SEQ ID NO: 716731 - DNA, 25 bp, Homo sapien
gggcacggtcaccaggacagagctc

SEQ ID NO: 716732 - DNA, 25 bp, Homo sapien
cccgggcacggtcaccaggacagag

SEQ ID NO: 716733 - DNA, 25 bp, Homo sapien
tattcggtttgggattagtcgtcat

SEQ ID NO: 716734 - DNA, 25 bp, Homo sapien
ttattcggtttgggattagtcgtca

SEQ ID NO: 716735 - DNA, 25 bp, Homo sapien
taatgccttattcggtttgggatta

SEQ ID NO: 716736 - DNA, 25 bp, Homo sapien
tgccttattcggtttgggattagtc

SEQ ID NO: 716737 - DNA, 25 bp, Homo sapien
cctttctgaacgggaaaagccagtg

SEQ ID NO: 716738 - DNA, 25 bp, Homo sapien
ttctgaacgggaaaagccagtggtg

SEQ ID NO: 716739 - DNA, 25 bp, Homo sapien
ctttctgaacgggaaaagccagtgg

SEQ ID NO: 716740 - DNA, 25 bp, Homo sapien
agtgtgcgccgacgctgcttcaggc

SEQ ID NO: 716741 - DNA, 25 bp, Homo sapien
tgctgctgttctcacgcgccagctt

SEQ ID NO: 716742 - DNA, 25 bp, Homo sapien
cagctcatcatcgctgagcaccggg

SEQ ID NO: 716743 - DNA, 25 bp, Homo sapien
taggatgcagccgagaagggcacgg

SEQ ID NO: 716744 - DNA, 25 bp, Homo sapien
caggacaggtgtcgaaggctgctta

SEQ ID NO: 716745 - DNA, 25 bp, Homo sapien
gaaaacaagccccatgctagacctg

SEQ ID NO: 716746 - DNA, 25 bp, Homo sapien
gcctgcgcttggactcggatgtcga

SEQ ID NO: 716747 - DNA, 25 bp, Homo sapien
tcccacgggtgcaagataccaattc

SEQ ID NO: 716748 - DNA, 25 bp, Homo sapien
tcacgggcactgcaacgggacagct

SEQ ID NO: 716749 - DNA, 25 bp, Homo sapien
cccctgctaaggcagacgcggatca

SEQ ID NO: 716750 - DNA, 25 bp, Homo sapien
gagacctcacgacgtgtgagccact

SEQ ID NO: 716751 - DNA, 25 bp, Homo sapien
tgtccgctgagatccgggacggcct

SEQ ID NO: 716752 - DNA, 25 bp, Homo sapien
ctacaagccagctgcatcctggtcc

SEQ ID NO: 716753 - DNA, 25 bp, Homo sapien
tgcactgaccacagttggtgagaag

SEQ ID NO: 716754 - DNA, 25 bp, Homo sapien
tccacatccatgtccaccaacatcc

SEQ ID NO: 716755 - DNA, 25 bp, Homo sapien
ggtgagaagtagctccaggacacac

SEQ ID NO: 716756 - DNA, 25 bp, Homo sapien
gtagacacagaaccaagtcgcagcc

SEQ ID NO: 716757 - DNA, 25 bp, Homo sapien
cctttgctctgtagggacccagtgg

SEQ ID NO: 716758 - DNA, 25 bp, Homo sapien
cttgcaggtcttatgtggcggcccc

SEQ ID NO: 716759 - DNA, 25 bp, Homo sapien
tgtttgggaacacgcaggcctttgc

SEQ ID NO: 716760 - DNA, 25 bp, Homo sapien
cccctggtccttatgacatccaata

SEQ ID NO: 716761 - DNA, 25 bp, Homo sapien
ggtccttatgacatccaatatggat

SEQ ID NO: 716762 - DNA, 25 bp, Homo sapien
taaatatccccctggtccttatgac

SEQ ID NO: 716763 - DNA, 25 bp, Homo sapien
tatgacatccaatatggattaccta

SEQ ID NO: 716764 - DNA, 25 bp, Homo sapien
gccggaggcacggagacagaaaaca

SEQ ID NO: 716765 - DNA, 25 bp, Homo sapien
caccaagaaccccaagacgggacag

SEQ ID NO: 716766 - DNA, 25 bp, Homo sapien
aagcccacggcccacaagacgtgga

SEQ ID NO: 716767 - DNA, 25 bp, Homo sapien
tggaaacgcaaagacctggatctct

SEQ ID NO: 716768 - DNA, 25 bp, Homo sapien
gcaataaattaggtggtggccgcag

SEQ ID NO: 716769 - DNA, 25 bp, Homo sapien
caggacgcacggcaataaattaggt

SEQ ID NO: 716770 - DNA, 25 bp, Homo sapien
cacggcaataaattaggtggtggcc

SEQ ID NO: 716771 - DNA, 25 bp, Homo sapien
gtcacagcagcaggacgcacggcaa

SEQ ID NO: 716772 - DNA, 25 bp, Homo sapien
caggcactgggcgtggagagcagac

SEQ ID NO: 716773 - DNA, 25 bp, Homo sapien
agacaggaagctccagtgggcacca

SEQ ID NO: 716774 - DNA, 25 bp, Homo sapien
acagtacggtgacccggcctgcagg

SEQ ID NO: 716775 - DNA, 25 bp, Homo sapien
gggaccgcggctcccacccgtgctg

SEQ ID NO: 716776 - DNA, 25 bp, Homo sapien
ggtcttggcttctgttcccgcaggg

SEQ ID NO: 716777 - DNA, 25 bp, Homo sapien
agaaccagcgggcacctgtgaggct

SEQ ID NO: 716778 - DNA, 25 bp, Homo sapien
gggctgtgggaatcgctcttattta

SEQ ID NO: 716779 - DNA, 25 bp, Homo sapien
cctcgtgggcacgtggagaagggcc

SEQ ID NO: 716780 - DNA, 25 bp, Homo sapien
tacaccgtgccacaggagcaacgtt

SEQ ID NO: 716781 - DNA, 25 bp, Homo sapien
tgcgctcctacaccgtgccacagga

SEQ ID NO: 716782 - DNA, 25 bp, Homo sapien
ggagcaacgttacatcatccgcctg

SEQ ID NO: 716783 - DNA, 25 bp, Homo sapien
tgctcctcatcgtgcccatctacgc

SEQ ID NO: 716784 - DNA, 25 bp, Homo sapien
tctcggggatcttcgtgtggactgc

SEQ ID NO: 716785 - DNA, 25 bp, Homo sapien
cttcgtgtggactgccctggtgctc

SEQ ID NO: 716786 - DNA, 25 bp, Homo sapien
ggatcttcgtgtggactgccctggt

SEQ ID NO: 716787 - DNA, 25 bp, Homo sapien
tcacctccgcactggcccgaggcgt

SEQ ID NO: 716788 - DNA, 25 bp, Homo sapien
caaaccccgtcttgtgtgtggtgag

SEQ ID NO: 716789 - DNA, 25 bp, Homo sapien
aaataatgccgggtgcgaggctcac

SEQ ID NO: 716790 - DNA, 25 bp, Homo sapien
tttatagtttggcatcgcagcgaga

SEQ ID NO: 716791 - DNA, 25 bp, Homo sapien
caactgtgagaagaccaaaggcgcc

SEQ ID NO: 716792 - DNA, 25 bp, Homo sapien
gaatggttctcaccaggacctgaat

SEQ ID NO: 716793 - DNA, 25 bp, Homo sapien
gaaaaaagactcgtgtctcaggcag

SEQ ID NO: 716794 - DNA, 25 bp, Homo sapien
ggaactttggcactagcccttggag

SEQ ID NO: 716795 - DNA, 25 bp, Homo sapien
tcccggaggagtcgtgaatggttct

SEQ ID NO: 716796 - DNA, 25 bp, Homo sapien
gacacgccgttggtgatatcgaagc

SEQ ID NO: 716797 - DNA, 25 bp, Homo sapien
taacctaaattaaagctgccactgc

SEQ ID NO: 716798 - DNA, 25 bp, Homo sapien
tgcgtttccgtttcaatgccccgtg

SEQ ID NO: 716799 - DNA, 25 bp, Homo sapien
caggtggtgtgtacggccttcagca

SEQ ID NO: 716800 - DNA, 25 bp, Homo sapien
ggtcgcagcgccctttcctgaaaaa

SEQ ID NO: 716801 - DNA, 25 bp, Homo sapien
aagtctccgggaccagaagcgccgc

SEQ ID NO: 716802 - DNA, 25 bp, Homo sapien
gagccgctcagaagcccgggagccc

SEQ ID NO: 716803 - DNA, 25 bp, Homo sapien
agcgcggaacccgagccgctcagaa

SEQ ID NO: 716804 - DNA, 25 bp, Homo sapien
cgcttctacggaaccgggtggctga

SEQ ID NO: 716805 - DNA, 25 bp, Homo sapien
gcacacgtctgtaaaacgcggatga

SEQ ID NO: 716806 - DNA, 25 bp, Homo sapien
cactcggtgccaaataagcgttcgc

SEQ ID NO: 716807 - DNA, 25 bp, Homo sapien
tataaagcgcttagagcgatgcctg

SEQ ID NO: 716808 - DNA, 25 bp, Homo sapien
cagcgccgtaagtttacaaatgcca

SEQ ID NO: 716809 - DNA, 25 bp, Homo sapien
ccaacatggcgatgagtgtgacctc

SEQ ID NO: 716810 - DNA, 25 bp, Homo sapien
caatgccaggacgttaccctaaagg

SEQ ID NO: 716811 - DNA, 25 bp, Homo sapien
caaatgccatagcaatgccaggacg

SEQ ID NO: 716812 - DNA, 25 bp, Homo sapien
catcaaaaacaacatccaggctggg

SEQ ID NO: 716813 - DNA, 25 bp, Homo sapien
tactggagaacagtcaatggcatgc

SEQ ID NO: 716814 - DNA, 25 bp, Homo sapien
catccaggctgccagaaagtccctg

SEQ ID NO: 716815 - DNA, 25 bp, Homo sapien
aatggcatgcaatgaggtcctcttc

SEQ ID NO: 716816 - DNA, 25 bp, Homo sapien
agaaatcatcgtaacacaaaaaccg

SEQ ID NO: 716817 - DNA, 25 bp, Homo sapien
gaagaccagactatccgagttcctg

SEQ ID NO: 716818 - DNA, 25 bp, Homo sapien
cctgccattacagggcagcagagga

SEQ ID NO: 716819 - DNA, 25 bp, Homo sapien
cacaaaaaccgttacttcactggtg

SEQ ID NO: 716820 - DNA, 25 bp, Homo sapien
gacgtgctcgactctcaattctgcg

SEQ ID NO: 716821 - DNA, 25 bp, Homo sapien
caaatagtgcaagaggtgacgtggc

SEQ ID NO: 716822 - DNA, 25 bp, Homo sapien
gacagaaagcctcacgctaggaacg

SEQ ID NO: 716823 - DNA, 25 bp, Homo sapien
taagaccggagcttggctaagtttg

SEQ ID NO: 716824 - DNA, 25 bp, Homo sapien
gcacgtcttgtttaattcaatccag

SEQ ID NO: 716825 - DNA, 25 bp, Homo sapien
gggaccgtgacacacagcacactgg

SEQ ID NO: 716826 - DNA, 25 bp, Homo sapien
aaacgttcatccagggaccgtgaca

SEQ ID NO: 716827 - DNA, 25 bp, Homo sapien
atccagttccacaaacgttcatcca

SEQ ID NO: 716828 - DNA, 25 bp, Homo sapien
tcagcaagttagaggtgaggccaag

SEQ ID NO: 716829 - DNA, 25 bp, Homo sapien
aaggtcatcagcaagttagaggtga

SEQ ID NO: 716830 - DNA, 25 bp, Homo sapien
gctgtgtcctgcctcccgggtcagt

SEQ ID NO: 716831 - DNA, 25 bp, Homo sapien
gtcatcagcaagttagaggtgaggc

SEQ ID NO: 716832 - DNA, 25 bp, Homo sapien
ggaattacaggtgcatctcaccacg

SEQ ID NO: 716833 - DNA, 25 bp, Homo sapien
gcctcggacccctgggcttaagcga

SEQ ID NO: 716834 - DNA, 25 bp, Homo sapien
cccagctgatttatttattttttgt

SEQ ID NO: 716835 - DNA, 25 bp, Homo sapien
gatcctcttacctcagcctcccaag

SEQ ID NO: 716836 - DNA, 25 bp, Homo sapien
ggatggataagcagatggacgggtg

SEQ ID NO: 716837 - DNA, 25 bp, Homo sapien
tggataagcagatggacgggtgggt

SEQ ID NO: 716838 - DNA, 25 bp, Homo sapien
gatggataagcagatggacgggtgg

SEQ ID NO: 716839 - DNA, 25 bp, Homo sapien
atggataagcagatggacgggtggg

SEQ ID NO: 716840 - DNA, 25 bp, Homo sapien
tgagagttcaaggctgcactgagca

SEQ ID NO: 716841 - DNA, 25 bp, Homo sapien
gagttcaaggctgcactgagcagag

SEQ ID NO: 716842 - DNA, 25 bp, Homo sapien
gagcctgagagttcaaggctgcact

SEQ ID NO: 716843 - DNA, 25 bp, Homo sapien
ccagactgggcgacggagcaagacc

SEQ ID NO: 716844 - DNA, 25 bp, Homo sapien
ccacatgcagtgcttatatcgtcat

SEQ ID NO: 716845 - DNA, 25 bp, Homo sapien
gcagtgcttatatcgtcatttttta

SEQ ID NO: 716846 - DNA, 25 bp, Homo sapien
catgcagtgcttatatcgtcatttt

SEQ ID NO: 716847 - DNA, 25 bp, Homo sapien
caccacatgcagtgcttatatcgtc

SEQ ID NO: 716848 - DNA, 25 bp, Homo sapien
gatggacctcgacggcatcgggttt

SEQ ID NO: 716849 - DNA, 25 bp, Homo sapien
cacggggtccctacagcaatcgaat

SEQ ID NO: 716850 - DNA, 25 bp, Homo sapien
agccagtcatgaaaggaccaatact

SEQ ID NO: 716851 - DNA, 25 bp, Homo sapien
cggcatcgggttttgtgaaataagc

SEQ ID NO: 716852 - DNA, 25 bp, Homo sapien
gagagagtcccttaaagcaccagcg

SEQ ID NO: 716853 - DNA, 25 bp, Homo sapien
caaaaggccctgttgtgtgcatcgc

SEQ ID NO: 716854 - DNA, 25 bp, Homo sapien
cccagtcgtcggttctagaggcaaa

SEQ ID NO: 716855 - DNA, 25 bp, Homo sapien
gaagggcttcctagcaggtctggct

SEQ ID NO: 716856 - DNA, 25 bp, Homo sapien
tctgggctccgacattgaagatggc

SEQ ID NO: 716857 - DNA, 25 bp, Homo sapien
gattgacctagatggctgaggcccc

SEQ ID NO: 716858 - DNA, 25 bp, Homo sapien
tgtttgctcaggagacatggccccg

SEQ ID NO: 716859 - DNA, 25 bp, Homo sapien
tttccaaagagacatgcgggtgccg

SEQ ID NO: 716860 - DNA, 25 bp, Homo sapien
caagtggctgggcataatccaatcc

SEQ ID NO: 716861 - DNA, 25 bp, Homo sapien
gtaggcatggagacacacccactgt

SEQ ID NO: 716862 - DNA, 25 bp, Homo sapien
gactttgaggcgtgtgctccagcag

SEQ ID NO: 716863 - DNA, 25 bp, Homo sapien
tgggtttccagcttgcaacacagat

SEQ ID NO: 716864 - DNA, 25 bp, Homo sapien
tgatgctccccatgtacccagagct

SEQ ID NO: 716865 - DNA, 25 bp, Homo sapien
tgaggaccatgggacatcatgagga

SEQ ID NO: 716866 - DNA, 25 bp, Homo sapien
tcatgtgagagacagctgaggtact

SEQ ID NO: 716867 - DNA, 25 bp, Homo sapien
ctgaggtactgacccagggtgtgac

SEQ ID NO: 716868 - DNA, 25 bp, Homo sapien
tcatcactaccaaaaggctgtgggt

SEQ ID NO: 716869 - DNA, 25 bp, Homo sapien
tccctgtcaagatgccaggcatgtg

SEQ ID NO: 716870 - DNA, 25 bp, Homo sapien
tggtcctagcctaagagactggcag

SEQ ID NO: 716871 - DNA, 25 bp, Homo sapien
tagacagtgccgatggttacacaat

SEQ ID NO: 716872 - DNA, 25 bp, Homo sapien
ctggaaggcacggccccagcagccg

SEQ ID NO: 716873 - DNA, 25 bp, Homo sapien
gaaggcacggccccagcagccggta

SEQ ID NO: 716874 - DNA, 25 bp, Homo sapien
aggcacggccccagcagccggtaaa

SEQ ID NO: 716875 - DNA, 25 bp, Homo sapien
cacggccccagcagccggtaaacat

SEQ ID NO: 716876 - DNA, 25 bp, Homo sapien
ctgcctcaacctccagaatagctgg

SEQ ID NO: 716877 - DNA, 25 bp, Homo sapien
gattacaggtgcacgccaccacacc

SEQ ID NO: 716878 - DNA, 25 bp, Homo sapien
gacaggatttcaccatgttggtcag

SEQ ID NO: 716879 - DNA, 25 bp, Homo sapien
gctcactgaaacctcaagcagttct

SEQ ID NO: 716880 - DNA, 25 bp, Homo sapien
gcggtcgacttccacagctggtaca

SEQ ID NO: 716881 - DNA, 25 bp, Homo sapien
gaagttccgtccaatgctcagcgat

SEQ ID NO: 716882 - DNA, 25 bp, Homo sapien
gccaagacaggcgaaaaccatttcc

SEQ ID NO: 716883 - DNA, 25 bp, Homo sapien
tcttctttgtatgcctgccagtcca

SEQ ID NO: 716884 - DNA, 25 bp, Homo sapien
gttttcatttacagtcttcagcttt

SEQ ID NO: 716885 - DNA, 25 bp, Homo sapien
cttttgagaaccagacagatttttc

SEQ ID NO: 716886 - DNA, 25 bp, Homo sapien
agatttttccagttttcatttacag

SEQ ID NO: 716887 - DNA, 25 bp, Homo sapien
ccagttttcatttacagtcttcagc

SEQ ID NO: 716888 - DNA, 25 bp, Homo sapien
tcagtgccatcttttaaaggtggtt

SEQ ID NO: 716889 - DNA, 25 bp, Homo sapien
tgccatcttttaaaggtggttgctt

SEQ ID NO: 716890 - DNA, 25 bp, Homo sapien
gttgctttattttgcgacgtagaaa

SEQ ID NO: 716891 - DNA, 25 bp, Homo sapien
catcttttaaaggtggttgctttat

SEQ ID NO: 716892 - DNA, 25 bp, Homo sapien
tccagatgaaccacacctgcttcta

SEQ ID NO: 716893 - DNA, 25 bp, Homo sapien
tgaaccacacctgcttctatcaacg

SEQ ID NO: 716894 - DNA, 25 bp, Homo sapien
gacgccgccgcgcagttcacaccaa

SEQ ID NO: 716895 - DNA, 25 bp, Homo sapien
gccgcgcagttcacaccaacagatt

SEQ ID NO: 716896 - DNA, 25 bp, Homo sapien
gaaacgtctgcatgacaaaagcgca

SEQ ID NO: 716897 - DNA, 25 bp, Homo sapien
tgcaacccagatcaccaacaaaggg

SEQ ID NO: 716898 - DNA, 25 bp, Homo sapien
aagattgccaagtccagacagagca

SEQ ID NO: 716899 - DNA, 25 bp, Homo sapien
tctggaccgggaaagagtttgtaca

SEQ ID NO: 716900 - DNA, 25 bp, Homo sapien
gaacatgaccgcctctcggagagga

SEQ ID NO: 716901 - DNA, 25 bp, Homo sapien
ggctgggaccccgagtgtctataaa

SEQ ID NO: 716902 - DNA, 25 bp, Homo sapien
tgtctataaacaggagcgaggctgc

SEQ ID NO: 716903 - DNA, 25 bp, Homo sapien
tgacccaggtctgtaggaccccaga

SEQ ID NO: 716904 - DNA, 25 bp, Homo sapien
acaacctccacgtttcatgcctcag

SEQ ID NO: 716905 - DNA, 25 bp, Homo sapien
tctcgggagtccttgtggagcaaat

SEQ ID NO: 716906 - DNA, 25 bp, Homo sapien
accggtgtcaccctgcggacactga

SEQ ID NO: 716907 - DNA, 25 bp, Homo sapien
ccaaagctgcccatggaacttagca

SEQ ID NO: 716908 - DNA, 25 bp, Homo sapien
tgatgcaccagcgaggaataggctg

SEQ ID NO: 716909 - DNA, 25 bp, Homo sapien
cctgctgggctcaaagacatgttcg

SEQ ID NO: 716910 - DNA, 25 bp, Homo sapien
gcctgggtccggacaaactgtagga

SEQ ID NO: 716911 - DNA, 25 bp, Homo sapien
gacatgttcgcctcattccagcaca

SEQ ID NO: 716912 - DNA, 25 bp, Homo sapien
gaaactacggaacaggacctgctaa

SEQ ID NO: 716913 - DNA, 25 bp, Homo sapien
caatagcgcctccttctggtcaagt

SEQ ID NO: 716914 - DNA, 25 bp, Homo sapien
ggttttacgctcaaacactggacca

SEQ ID NO: 716915 - DNA, 25 bp, Homo sapien
taactgggtcaccaaaagatctggc

SEQ ID NO: 716916 - DNA, 25 bp, Homo sapien
ctgatctctggacggcggctcaaca

SEQ ID NO: 716917 - DNA, 25 bp, Homo sapien
tttgctgattagctcgtgctgtttg

SEQ ID NO: 716918 - DNA, 25 bp, Homo sapien
agcagccgccagctgatctctggac

SEQ ID NO: 716919 - DNA, 25 bp, Homo sapien
gccagctgatctctggacggcggct

SEQ ID NO: 716920 - DNA, 25 bp, Homo sapien
ctgtgcaggcatgtagccgggccag

SEQ ID NO: 716921 - DNA, 25 bp, Homo sapien
acacacagacatacgcccacgtcca

SEQ ID NO: 716922 - DNA, 25 bp, Homo sapien
cgcccacgtccagcggcaggaagga

SEQ ID NO: 716923 - DNA, 25 bp, Homo sapien
tgcaggcatgtagccgggccagcct

SEQ ID NO: 716924 - DNA, 25 bp, Homo sapien
caccactgatgcctatcgctcaggg

SEQ ID NO: 716925 - DNA, 25 bp, Homo sapien
tgcctctatttcctgcgtgcggcgg

SEQ ID NO: 716926 - DNA, 25 bp, Homo sapien
gcaaggctgtgatactggagtgtgg

SEQ ID NO: 716927 - DNA, 25 bp, Homo sapien
tgcggcggcaccactgatgcctatc

SEQ ID NO: 716928 - DNA, 25 bp, Homo sapien
tcagcgtgtcagctgagcaagcctg

SEQ ID NO: 716929 - DNA, 25 bp, Homo sapien
gaactgcggcccactgaggtgctca

SEQ ID NO: 716930 - DNA, 25 bp, Homo sapien
gctgagcaagcctggaactgcggcc

SEQ ID NO: 716931 - DNA, 25 bp, Homo sapien
agagtctcagcgtgtcagctgagca

SEQ ID NO: 716932 - DNA, 25 bp, Homo sapien
gctgcctagcccagagccggtcctg

SEQ ID NO: 716933 - DNA, 25 bp, Homo sapien
tgcctagcccagagccggtcctgtt

SEQ ID NO: 716934 - DNA, 25 bp, Homo sapien
gcctagcccagagccggtcctgttg

SEQ ID NO: 716935 - DNA, 25 bp, Homo sapien
cctagcccagagccggtcctgttgg

SEQ ID NO: 716936 - DNA, 25 bp, Homo sapien
tctgtcaaacagagatcatcacggt

SEQ ID NO: 716937 - DNA, 25 bp, Homo sapien
tggagccgcacgctggacatatgtg

SEQ ID NO: 716938 - DNA, 25 bp, Homo sapien
gggacacagaaccatcgtgggccag

SEQ ID NO: 716939 - DNA, 25 bp, Homo sapien
ttcagcacagttgccggacctggtg

SEQ ID NO: 716940 - DNA, 25 bp, Homo sapien
gtgtcctgtcccaaaccgcatggcc

SEQ ID NO: 716941 - DNA, 25 bp, Homo sapien
agtcctgtggtgaccgaggcctcct

SEQ ID NO: 716942 - DNA, 25 bp, Homo sapien
tgcagggagccccaattcagcctgc

SEQ ID NO: 716943 - DNA, 25 bp, Homo sapien
tgtcctgatggctccactgactcct

SEQ ID NO: 716944 - DNA, 25 bp, Homo sapien
cctgcaggttgaactggcccgagaa

SEQ ID NO: 716945 - DNA, 25 bp, Homo sapien
gcactgcatgcggtcgtacgtctgt

SEQ ID NO: 716946 - DNA, 25 bp, Homo sapien
tgcacgctgcggatacggttctcgt

SEQ ID NO: 716947 - DNA, 25 bp, Homo sapien
gatgttgacgatgttgggacactcc

SEQ ID NO: 716948 - DNA, 25 bp, Homo sapien
gatgctggacgtgggggcccgacca

SEQ ID NO: 716949 - DNA, 25 bp, Homo sapien
tgtgagcgcccggatgctggacgtg

SEQ ID NO: 716950 - DNA, 25 bp, Homo sapien
tgagcgcccggatgctggacgtggg

SEQ ID NO: 716951 - DNA, 25 bp, Homo sapien
ccggatgctggacgtgggggcccga

SEQ ID NO: 716952 - DNA, 25 bp, Homo sapien
aacaggttggtcagacggatctcct

SEQ ID NO: 716953 - DNA, 25 bp, Homo sapien
tgaaatgctccagggtgtacatccg

SEQ ID NO: 716954 - DNA, 25 bp, Homo sapien
tctggcccgtacttgagctcgatga

SEQ ID NO: 716955 - DNA, 25 bp, Homo sapien
gagaagcactcatcatcggcacagg

SEQ ID NO: 716956 - DNA, 25 bp, Homo sapien
agttttccgaagtccctcgtgtgtg

SEQ ID NO: 716957 - DNA, 25 bp, Homo sapien
cggcaatgaagagacggactggaca

SEQ ID NO: 716958 - DNA, 25 bp, Homo sapien
gaatccacagaaaaccacggaccga

SEQ ID NO: 716959 - DNA, 25 bp, Homo sapien
tttttggtccagtgggcatcgccgg

SEQ ID NO: 716960 - DNA, 25 bp, Homo sapien
ctgggggcactccacgctgggggca

SEQ ID NO: 716961 - DNA, 25 bp, Homo sapien
tgggggcactccacgctgggggcat

SEQ ID NO: 716962 - DNA, 25 bp, Homo sapien
gggcactccacgctgggggcatttc

SEQ ID NO: 716963 - DNA, 25 bp, Homo sapien
ggcactccacgctgggggcatttcc

SEQ ID NO: 716964 - DNA, 25 bp, Homo sapien
gacgttttgcctgctgtgaacatca

SEQ ID NO: 716965 - DNA, 25 bp, Homo sapien
tcatggaaatgaaactgcgcacagc

SEQ ID NO: 716966 - DNA, 25 bp, Homo sapien
cttcgtttttcagctcccaacagga

SEQ ID NO: 716967 - DNA, 25 bp, Homo sapien
tacacaaatatgagggtgcagctca

SEQ ID NO: 716968 - DNA, 25 bp, Homo sapien
taatgccggagcgttagaccgaggt

SEQ ID NO: 716969 - DNA, 25 bp, Homo sapien
tgagcagcccgtaattacagtgatt

SEQ ID NO: 716970 - DNA, 25 bp, Homo sapien
tgatatttgaacatggcagagggct

SEQ ID NO: 716971 - DNA, 25 bp, Homo sapien
gcacagcaggtcgacttgttcaccg

SEQ ID NO: 716972 - DNA, 25 bp, Homo sapien
tagttctggtgggtgcgaaagcccc

SEQ ID NO: 716973 - DNA, 25 bp, Homo sapien
tctgacgtaggagccgtataacgct

SEQ ID NO: 716974 - DNA, 25 bp, Homo sapien
tctgttagaaagtggcctggacgcg

SEQ ID NO: 716975 - DNA, 25 bp, Homo sapien
cgttagtcttctcggcaatgcccag

SEQ ID NO: 716976 - DNA, 25 bp, Homo sapien
gtggtgccaccagccaagatgccag

SEQ ID NO: 716977 - DNA, 25 bp, Homo sapien
agctggctgggctcacgctgtgacc

SEQ ID NO: 716978 - DNA, 25 bp, Homo sapien
tggcgtctgtggtgccaccagccaa

SEQ ID NO: 716979 - DNA, 25 bp, Homo sapien
tgtgacccacgcctggcgtctgtgg

SEQ ID NO: 716980 - DNA, 25 bp, Homo sapien
ttctttggaacttcatgccgggaca

SEQ ID NO: 716981 - DNA, 25 bp, Homo sapien
tttttgccagcttccgttctttgga

SEQ ID NO: 716982 - DNA, 25 bp, Homo sapien
tcatgccgggacatttgttctcggc

SEQ ID NO: 716983 - DNA, 25 bp, Homo sapien
cacgcggcagcatctgcgaggcctc

SEQ ID NO: 716984 - DNA, 25 bp, Homo sapien
gcccgtggcggatgccactcacagc

SEQ ID NO: 716985 - DNA, 25 bp, Homo sapien
atgcccttccacggcccttggagcc

SEQ ID NO: 716986 - DNA, 25 bp, Homo sapien
agccgcccgtggcggatgccactca

SEQ ID NO: 716987 - DNA, 25 bp, Homo sapien
cgtggcggatgccactcacagcagg

SEQ ID NO: 716988 - DNA, 25 bp, Homo sapien
agccgctgtctgtgttgtctctaga

SEQ ID NO: 716989 - DNA, 25 bp, Homo sapien
tggaatgaatgcctttatcaccctg

SEQ ID NO: 716990 - DNA, 25 bp, Homo sapien
tagactccgctacctgcagtgttgc

SEQ ID NO: 716991 - DNA, 25 bp, Homo sapien
tatcaccctggaaggaaacgtgccc

SEQ ID NO: 716992 - DNA, 25 bp, Homo sapien
gagatgtcatctacagagcgtgcag

SEQ ID NO: 716993 - DNA, 25 bp, Homo sapien
tgtggatggcaggacgttcaccccg

SEQ ID NO: 716994 - DNA, 25 bp, Homo sapien
gggcctttctcatgaagcagcttga

SEQ ID NO: 716995 - DNA, 25 bp, Homo sapien
cgttcaccccgtggtcagtggctgg

SEQ ID NO: 716996 - DNA, 25 bp, Homo sapien
tcgtctggccctcgcccatgtggaa

SEQ ID NO: 716997 - DNA, 25 bp, Homo sapien
gctggatgcgcagcagtaatgcggg

SEQ ID NO: 716998 - DNA, 25 bp, Homo sapien
tccgcctgggcacgtcttccagcag

SEQ ID NO: 716999 - DNA, 25 bp, Homo sapien
cccatgtggaatgcccgccgtgctg

SEQ ID NO: 717000 - DNA, 25 bp, Homo sapien
gacagcttctgtctcgtgagtgacg

SEQ ID NO: 717001 - DNA, 25 bp, Homo sapien
acgtggtgcccgctttcatcctggg

SEQ ID NO: 717002 - DNA, 25 bp, Homo sapien
ctgggaggctctgagaacgacagct

SEQ ID NO: 717003 - DNA, 25 bp, Homo sapien
tctgtctcgtgagtgacgtggtgcc

SEQ ID NO: 717004 - DNA, 25 bp, Homo sapien
taattacacaggatcccggcactgt

SEQ ID NO: 717005 - DNA, 25 bp, Homo sapien
tactgccgaagaacctgtaaggccc

SEQ ID NO: 717006 - DNA, 25 bp, Homo sapien
acatgtgggacgcagctgtgcagca

SEQ ID NO: 717007 - DNA, 25 bp, Homo sapien
ggtgaacctggctcgctttcagagg

SEQ ID NO: 717008 - DNA, 25 bp, Homo sapien
cgtgagggacgtctgcgcaggagct

SEQ ID NO: 717009 - DNA, 25 bp, Homo sapien
gcctccctggccgtgagggacgtct

SEQ ID NO: 717010 - DNA, 25 bp, Homo sapien
ggacgtctgcgcaggagctccccgg

SEQ ID NO: 717011 - DNA, 25 bp, Homo sapien
ctccctggccgtgagggacgtctgc

SEQ ID NO: 717012 - DNA, 25 bp, Homo sapien
gatgacagaggaggtctacaccgca

SEQ ID NO: 717013 - DNA, 25 bp, Homo sapien
gcatcttaaaatagcattgcagtaa

SEQ ID NO: 717014 - DNA, 25 bp, Homo sapien
gactaaccaattgcacttcaggagg

SEQ ID NO: 717015 - DNA, 25 bp, Homo sapien
tgcccacttgtggacgcccatcaag

SEQ ID NO: 717016 - DNA, 25 bp, Homo sapien
cttcttcttgcagcgggctctcctg

SEQ ID NO: 717017 - DNA, 25 bp, Homo sapien
tccacgtggcctgccgtggggcttc

SEQ ID NO: 717018 - DNA, 25 bp, Homo sapien
tgggtaggaggtgaattcgcctcca

SEQ ID NO: 717019 - DNA, 25 bp, Homo sapien
ggcttcttcttgcagcgggctctcc

SEQ ID NO: 717020 - DNA, 25 bp, Homo sapien
gggcctgtgggaccaccacacttct

SEQ ID NO: 717021 - DNA, 25 bp, Homo sapien
ccgtgtgtgaggctccgtgacacca

SEQ ID NO: 717022 - DNA, 25 bp, Homo sapien
ggagtgcttcctcaagcatgaggtt

SEQ ID NO: 717023 - DNA, 25 bp, Homo sapien
tggatgtgagttaagcggttcagcc

SEQ ID NO: 717024 - DNA, 25 bp, Homo sapien
atgtgcacatctccctggtcacggg

SEQ ID NO: 717025 - DNA, 25 bp, Homo sapien
tggcaagggctgtaacacaccaagg

SEQ ID NO: 717026 - DNA, 25 bp, Homo sapien
tctgaatgcccaagagcctgagggc

SEQ ID NO: 717027 - DNA, 25 bp, Homo sapien
cagtgacgctgaacgcatgtgcaca

SEQ ID NO: 717028 - DNA, 25 bp, Homo sapien
aacactgtccgtgagggctgacccc

SEQ ID NO: 717029 - DNA, 25 bp, Homo sapien
cctgaaccctctatggaaacactgt

SEQ ID NO: 717030 - DNA, 25 bp, Homo sapien
ccaggagctgtcagccatggacgtc

SEQ ID NO: 717031 - DNA, 25 bp, Homo sapien
gccatggacgtccaggactgcagcg

SEQ ID NO: 717032 - DNA, 25 bp, Homo sapien
catcaggcggagtattctttgcaaa

SEQ ID NO: 717033 - DNA, 25 bp, Homo sapien
tggtcaatgaaaacgcggagccatc

SEQ ID NO: 717034 - DNA, 25 bp, Homo sapien
tcgtggctggacacacttggcccaa

SEQ ID NO: 717035 - DNA, 25 bp, Homo sapien
ggtatctgtagtctccggttccgga

SEQ ID NO: 717036 - DNA, 25 bp, Homo sapien
agcaagtgtgttccgtgtcccgggc

SEQ ID NO: 717037 - DNA, 25 bp, Homo sapien
tcttgtacacagcacgcagcaagtg

SEQ ID NO: 717038 - DNA, 25 bp, Homo sapien
tgtgcatcccggtttcagaacatgg

SEQ ID NO: 717039 - DNA, 25 bp, Homo sapien
tccccagtgtatgcgtccaggcttt

SEQ ID NO: 717040 - DNA, 25 bp, Homo sapien
atctgggtggcctgttagccctgga

SEQ ID NO: 717041 - DNA, 25 bp, Homo sapien
tctctgtcatgagagtccacagttc

SEQ ID NO: 717042 - DNA, 25 bp, Homo sapien
aaaccggctgtgtaggtgagcagct

SEQ ID NO: 717043 - DNA, 25 bp, Homo sapien
ccctgagagcgacactaggtctgtg

SEQ ID NO: 717044 - DNA, 25 bp, Homo sapien
tgatgcttccagcacgggctgcttg

SEQ ID NO: 717045 - DNA, 25 bp, Homo sapien
ccgagtggccgatggtcagccgcac

SEQ ID NO: 717046 - DNA, 25 bp, Homo sapien
gatgcttccagcacgggctgcttgc

SEQ ID NO: 717047 - DNA, 25 bp, Homo sapien
agtggccgatggtcagccgcacaca

SEQ ID NO: 717048 - DNA, 25 bp, Homo sapien
taaagcaaagcttcacccggctaag

SEQ ID NO: 717049 - DNA, 25 bp, Homo sapien
tcccaagtgccgctgagtgaagaag

SEQ ID NO: 717050 - DNA, 25 bp, Homo sapien
tattcaaatggagccggaaacttcc

SEQ ID NO: 717051 - DNA, 25 bp, Homo sapien
gctggagaactacatgccgtcgcct

SEQ ID NO: 717052 - DNA, 25 bp, Homo sapien
ggacgctgccgcttcccgttcttgg

SEQ ID NO: 717053 - DNA, 25 bp, Homo sapien
ctgaggagggcgtggacccagtcgg

SEQ ID NO: 717054 - DNA, 25 bp, Homo sapien
cgttcttgggccacgccgagcacga

SEQ ID NO: 717055 - DNA, 25 bp, Homo sapien
gcacgacttcttggggcctgtccag

SEQ ID NO: 717056 - DNA, 25 bp, Homo sapien
gcagggagccgtcttgaagtctcac

SEQ ID NO: 717057 - DNA, 25 bp, Homo sapien
gagagtggcctcaggtgtcgggcac

SEQ ID NO: 717058 - DNA, 25 bp, Homo sapien
tccacctttagcccaggtgggagca

SEQ ID NO: 717059 - DNA, 25 bp, Homo sapien
ttttatggccgcctctcagtgccgc

SEQ ID NO: 717060 - DNA, 25 bp, Homo sapien
cacagaagcttagggcaacacattt

SEQ ID NO: 717061 - DNA, 25 bp, Homo sapien
atttgtggtcctcgacccacggacg

SEQ ID NO: 717062 - DNA, 25 bp, Homo sapien
tgccaccttgttggctccagccggg

SEQ ID NO: 717063 - DNA, 25 bp, Homo sapien
ccacggtggacgcagggtcacagaa

SEQ ID NO: 717064 - DNA, 25 bp, Homo sapien
ttcagactagccgtgctgtcccggg

SEQ ID NO: 717065 - DNA, 25 bp, Homo sapien
cacgaggatggcacgttcgaggtct

SEQ ID NO: 717066 - DNA, 25 bp, Homo sapien
cgtgcattcctcgagttttcagact

SEQ ID NO: 717067 - DNA, 25 bp, Homo sapien
gggacgcctctcatccacgaggatg

SEQ ID NO: 717068 - DNA, 25 bp, Homo sapien
ccccagcgggctcagtacccaacac

SEQ ID NO: 717069 - DNA, 25 bp, Homo sapien
ggcccaggacgtccgctcgctgctg

SEQ ID NO: 717070 - DNA, 25 bp, Homo sapien
cagtacccaacaccgaggcaccggg

SEQ ID NO: 717071 - DNA, 25 bp, Homo sapien
ctgccggggcccaggacgtccgctc

SEQ ID NO: 717072 - DNA, 25 bp, Homo sapien
gtccagcacagtcagggtttcctgg

SEQ ID NO: 717073 - DNA, 25 bp, Homo sapien
tcgtcctcacccgagtgctgctgga

SEQ ID NO: 717074 - DNA, 25 bp, Homo sapien
agggtccagcacagtcagggtttcc

SEQ ID NO: 717075 - DNA, 25 bp, Homo sapien
gtggcagctcatggtcagctcggtc

SEQ ID NO: 717076 - DNA, 25 bp, Homo sapien
cacggtagccgaaacacatatccct

SEQ ID NO: 717077 - DNA, 25 bp, Homo sapien
ctttgcacggtagccgaaacacata

SEQ ID NO: 717078 - DNA, 25 bp, Homo sapien
caaagccctttgcacggtagccgaa

SEQ ID NO: 717079 - DNA, 25 bp, Homo sapien
gcagcactgacttttcaaagccctt

SEQ ID NO: 717080 - DNA, 25 bp, Homo sapien
tggctcccgaagtccagagcaccga

SEQ ID NO: 717081 - DNA, 25 bp, Homo sapien
tcccgaagtccagagcaccgaggct

SEQ ID NO: 717082 - DNA, 25 bp, Homo sapien
caccgaggctgcggggtgccgctct

SEQ ID NO: 717083 - DNA, 25 bp, Homo sapien
cgaggctgcggggtgccgctcttgg

SEQ ID NO: 717084 - DNA, 25 bp, Homo sapien
tgccgtcttctagggcacagttcaa

SEQ ID NO: 717085 - DNA, 25 bp, Homo sapien
ggacccgtggcaacatctggagata

SEQ ID NO: 717086 - DNA, 25 bp, Homo sapien
gacactgtgaaaggttgagagactc

SEQ ID NO: 717087 - DNA, 25 bp, Homo sapien
gggactctccggcacaaatcctcaa

SEQ ID NO: 717088 - DNA, 25 bp, Homo sapien
tctggccaaaggcaagttcccccga

SEQ ID NO: 717089 - DNA, 25 bp, Homo sapien
ctggccaaaggcaagttcccccgag

SEQ ID NO: 717090 - DNA, 25 bp, Homo sapien
ttggccccttggtgctgagccgcat

SEQ ID NO: 717091 - DNA, 25 bp, Homo sapien
tgtgagaactctcgcctctggttaa

SEQ ID NO: 717092 - DNA, 25 bp, Homo sapien
tgctggtcttctgggcgttcccctg

SEQ ID NO: 717093 - DNA, 25 bp, Homo sapien
gttcccctggtggtcgtcactgcgt

SEQ ID NO: 717094 - DNA, 25 bp, Homo sapien
ccttcggcagctggagatggatggc

SEQ ID NO: 717095 - DNA, 25 bp, Homo sapien
tggcaggcatatgttgggcaccaac

SEQ ID NO: 717096 - DNA, 25 bp, Homo sapien
ggcagcctgaccttcgttttccatc

SEQ ID NO: 717097 - DNA, 25 bp, Homo sapien
tccccactccggtgcagatggagag

SEQ ID NO: 717098 - DNA, 25 bp, Homo sapien
ttccatccccactccggtgcagatg

SEQ ID NO: 717099 - DNA, 25 bp, Homo sapien
tgggcagcctgaccttcgttttcca

SEQ ID NO: 717100 - DNA, 25 bp, Homo sapien
tggagtcgtttgtgacacgaggttt

SEQ ID NO: 717101 - DNA, 25 bp, Homo sapien
tgattcacagtttggtagtttgggt

SEQ ID NO: 717102 - DNA, 25 bp, Homo sapien
ggttcctggagtcgtttgtgacacg

SEQ ID NO: 717103 - DNA, 25 bp, Homo sapien
ttgtgacaccaggtttgctgttaaa

SEQ ID NO: 717104 - DNA, 25 bp, Homo sapien
agggcggtcaccctgtctctccgga

SEQ ID NO: 717105 - DNA, 25 bp, Homo sapien
gagctctggggtcacgggccgctgt

SEQ ID NO: 717106 - DNA, 25 bp, Homo sapien
tctggggtcacgggccgctgtctcc

SEQ ID NO: 717107 - DNA, 25 bp, Homo sapien
tctcctgagggggccgcacactgca

SEQ ID NO: 717108 - DNA, 25 bp, Homo sapien
cagcagagttgaagcgaccatcttc

SEQ ID NO: 717109 - DNA, 25 bp, Homo sapien
gcagagttgaagcgaccatcttctt

SEQ ID NO: 717110 - DNA, 25 bp, Homo sapien
tggcaggtggtggcgtcccatcctc

SEQ ID NO: 717111 - DNA, 25 bp, Homo sapien
ctggcaggtggtggcgtcccatcct

SEQ ID NO: 717112 - DNA, 25 bp, Homo sapien
cggctcctccgtgtgtaattccagg

SEQ ID NO: 717113 - DNA, 25 bp, Homo sapien
aattccagggcgagtgtcttctcac

SEQ ID NO: 717114 - DNA, 25 bp, Homo sapien
ccagggcgagtgtcttctcactgga

SEQ ID NO: 717115 - DNA, 25 bp, Homo sapien
tccgtgtgtaattccagggcgagtg

SEQ ID NO: 717116 - DNA, 25 bp, Homo sapien
cacgggcaaacacgcgatctcagat

SEQ ID NO: 717117 - DNA, 25 bp, Homo sapien
gcaaacacgcgatctcagatgctcg

SEQ ID NO: 717118 - DNA, 25 bp, Homo sapien
ccaggacacgggcaaacacgcgatc

SEQ ID NO: 717119 - DNA, 25 bp, Homo sapien
acgcgatctcagatgctcgtgagct

SEQ ID NO: 717120 - DNA, 25 bp, Homo sapien
ccatgatgtgtgctcagcatgatgg

SEQ ID NO: 717121 - DNA, 25 bp, Homo sapien
gcgacgatggcggctgtggcctgag

SEQ ID NO: 717122 - DNA, 25 bp, Homo sapien
tcagcatgatggtgatggcgacgat

SEQ ID NO: 717123 - DNA, 25 bp, Homo sapien
gcccatttggtagaagctgagccag

SEQ ID NO: 717124 - DNA, 25 bp, Homo sapien
ccgcaggattgcccgggtgccgggg

SEQ ID NO: 717125 - DNA, 25 bp, Homo sapien
ctacctatttcaggttatttggcct

SEQ ID NO: 717126 - DNA, 25 bp, Homo sapien
tcctacctatttcaggttatttggc

SEQ ID NO: 717127 - DNA, 25 bp, Homo sapien
tggtttacaatgtgcaagcttaaca

SEQ ID NO: 717128 - DNA, 25 bp, Homo sapien
gcttaacatttcacggtgcacttat

SEQ ID NO: 717129 - DNA, 25 bp, Homo sapien
gcaggagttccgtcgtgggctcctt

SEQ ID NO: 717130 - DNA, 25 bp, Homo sapien
caggcgtggcgggagttccgtcatg

SEQ ID NO: 717131 - DNA, 25 bp, Homo sapien
caggtgttccgtcgtgggctccgac

SEQ ID NO: 717132 - DNA, 25 bp, Homo sapien
cgggtcgtcgggagcagtgtcaggt

SEQ ID NO: 717133 - DNA, 25 bp, Homo sapien
tggcctcagtgaggtgccctaatgg

SEQ ID NO: 717134 - DNA, 25 bp, Homo sapien
gaggtgccctaatggctgctccgtg

SEQ ID NO: 717135 - DNA, 25 bp, Homo sapien
ccacaggtggcctcagtgaggtgcc

SEQ ID NO: 717136 - DNA, 25 bp, Homo sapien
cagtgaggtgccctaatggctgctc

SEQ ID NO: 717137 - DNA, 25 bp, Homo sapien
gcttgctgccagagagggctgtccc

SEQ ID NO: 717138 - DNA, 25 bp, Homo sapien
ggtgtgcccgcagtgtcagcagacc

SEQ ID NO: 717139 - DNA, 25 bp, Homo sapien
tcctgtgaccgtgggtaggctgcct

SEQ ID NO: 717140 - DNA, 25 bp, Homo sapien
catcagcagacccttgacatggacc

SEQ ID NO: 717141 - DNA, 25 bp, Homo sapien
gattcagccagagttacaagatgtc

SEQ ID NO: 717142 - DNA, 25 bp, Homo sapien
cctgtgaagagctgcgcggatcctc

SEQ ID NO: 717143 - DNA, 25 bp, Homo sapien
ggctggattctgcatactgggttat

SEQ ID NO: 717144 - DNA, 25 bp, Homo sapien
tgaaaactggatgaagtagcaatcc

SEQ ID NO: 717145 - DNA, 25 bp, Homo sapien
cgggcactggtcacggacagcagca

SEQ ID NO: 717146 - DNA, 25 bp, Homo sapien
cgctcccgggcactggtcacggaca

SEQ ID NO: 717147 - DNA, 25 bp, Homo sapien
tcccgggcactggtcacggacagca

SEQ ID NO: 717148 - DNA, 25 bp, Homo sapien
gctcccgggcactggtcacggacag

SEQ ID NO: 717149 - DNA, 25 bp, Homo sapien
tggacatggcacgatggaggtctcc

SEQ ID NO: 717150 - DNA, 25 bp, Homo sapien
gggtccgggctcctcaaagctgata

SEQ ID NO: 717151 - DNA, 25 bp, Homo sapien
tatccctgagcatgtctgcagcctc

SEQ ID NO: 717152 - DNA, 25 bp, Homo sapien
agtccccgcggctcttggacatggc

SEQ ID NO: 717153 - DNA, 25 bp, Homo sapien
ctcaggtagatgcctcgtctgcaga

SEQ ID NO: 717154 - DNA, 25 bp, Homo sapien
tgcagatggggcaggcgatgtgctg

SEQ ID NO: 717155 - DNA, 25 bp, Homo sapien
gatggggcaggcgatgtgctgtgag

SEQ ID NO: 717156 - DNA, 25 bp, Homo sapien
aggtagatgcctcgtctgcagatgg

SEQ ID NO: 717157 - DNA, 25 bp, Homo sapien
catgagatctcactgctccacagat

SEQ ID NO: 717158 - DNA, 25 bp, Homo sapien
cggagcagcatcgtgttttctatga

SEQ ID NO: 717159 - DNA, 25 bp, Homo sapien
tgtgggaaaccaggaatgttctgcc

SEQ ID NO: 717160 - DNA, 25 bp, Homo sapien
gttttaatcggagcttcctggcagc

SEQ ID NO: 717161 - DNA, 25 bp, Homo sapien
gcgctgctctaagccagggcacagc

SEQ ID NO: 717162 - DNA, 25 bp, Homo sapien
tgtgccaggcgctgctctaagccag

SEQ ID NO: 717163 - DNA, 25 bp, Homo sapien
agcccggatgttctgggcccctgtt

SEQ ID NO: 717164 - DNA, 25 bp, Homo sapien
acagcccggatgttctgggcccctg

SEQ ID NO: 717165 - DNA, 25 bp, Homo sapien
tcgtccttacctccaagacacttgg

SEQ ID NO: 717166 - DNA, 25 bp, Homo sapien
gtctgtcataataccgtcgtcctta

SEQ ID NO: 717167 - DNA, 25 bp, Homo sapien
gacacttggacgttttccacgtctg

SEQ ID NO: 717168 - DNA, 25 bp, Homo sapien
ccacgtctgtggttctgatgggcca

SEQ ID NO: 717169 - DNA, 25 bp, Homo sapien
acggcgtgtgctcgggagctcacta

SEQ ID NO: 717170 - DNA, 25 bp, Homo sapien
ggtgtgggtgagtgcggtgccagca

SEQ ID NO: 717171 - DNA, 25 bp, Homo sapien
tggccaccatccctgttctgcgcag

SEQ ID NO: 717172 - DNA, 25 bp, Homo sapien
ccagcactggtgaacacctgatggg

SEQ ID NO: 717173 - DNA, 25 bp, Homo sapien
ctggtcaccgtcttgctgtccttgc

SEQ ID NO: 717174 - DNA, 25 bp, Homo sapien
ggacacctggtcaccgtcttgctgt

SEQ ID NO: 717175 - DNA, 25 bp, Homo sapien
gacttccccagcatggctggcctcg

SEQ ID NO: 717176 - DNA, 25 bp, Homo sapien
acctggtcaccgtcttgctgtcctt

SEQ ID NO: 717177 - DNA, 25 bp, Homo sapien
tctcttacggattctaatctgtcat

SEQ ID NO: 717178 - DNA, 25 bp, Homo sapien
cacttctacctgtgtctcttccgag

SEQ ID NO: 717179 - DNA, 25 bp, Homo sapien
ttctattgctgtgccctcgaggaca

SEQ ID NO: 717180 - DNA, 25 bp, Homo sapien
taatcccatccagcatgtttatctg

SEQ ID NO: 717181 - DNA, 25 bp, Homo sapien
cgtgtccaggcattgtagccctgtc

SEQ ID NO: 717182 - DNA, 25 bp, Homo sapien
actgccatgtctgcgcggctttgtc

SEQ ID NO: 717183 - DNA, 25 bp, Homo sapien
cacgtgctctctttatgacaaacaa

SEQ ID NO: 717184 - DNA, 25 bp, Homo sapien
gtgggcacccgtcacactgccatgt

SEQ ID NO: 717185 - DNA, 25 bp, Homo sapien
tgaccaccagactgaggcgttgaca

SEQ ID NO: 717186 - DNA, 25 bp, Homo sapien
tgcctcgtccgcgaagctgtttgca

SEQ ID NO: 717187 - DNA, 25 bp, Homo sapien
tgtggacggttgacctgaccaccag

SEQ ID NO: 717188 - DNA, 25 bp, Homo sapien
actgaggcgttgatgtggacaagac

SEQ ID NO: 717189 - DNA, 25 bp, Homo sapien
gcgtgcatctccacgttgatcgagt

SEQ ID NO: 717190 - DNA, 25 bp, Homo sapien
tgggccccgcatggcactgcgtgca

SEQ ID NO: 717191 - DNA, 25 bp, Homo sapien
cgttgatcgagttctaactgcgggc

SEQ ID NO: 717192 - DNA, 25 bp, Homo sapien
catctccacgttgatcgagttctaa

SEQ ID NO: 717193 - DNA, 25 bp, Homo sapien
aggccgccagggagagttcagcctg

SEQ ID NO: 717194 - DNA, 25 bp, Homo sapien
ctcctgctgcccaccgtggagaacc

SEQ ID NO: 717195 - DNA, 25 bp, Homo sapien
actggttttccctggttctgtcctg

SEQ ID NO: 717196 - DNA, 25 bp, Homo sapien
ttcagcctgggaaagtggaactggt

SEQ ID NO: 717197 - DNA, 25 bp, Homo sapien
gaaggtttcaggaaggtcagcgtgt

SEQ ID NO: 717198 - DNA, 25 bp, Homo sapien
cttttggcacctagaacctctcgtt

SEQ ID NO: 717199 - DNA, 25 bp, Homo sapien
tctgctgggccttttggcacctaga

SEQ ID NO: 717200 - DNA, 25 bp, Homo sapien
acgcaggagcctgcgtcacgctgca

SEQ ID NO: 717201 - DNA, 25 bp, Homo sapien
cattggccccttgcgcagcatgtgt

SEQ ID NO: 717202 - DNA, 25 bp, Homo sapien
tgtgtacgtgcagactcaggaggcc

SEQ ID NO: 717203 - DNA, 25 bp, Homo sapien
gagctggtctctatcagggccatga

SEQ ID NO: 717204 - DNA, 25 bp, Homo sapien
cactgggtcggtctctcctaggagc

SEQ ID NO: 717205 - DNA, 25 bp, Homo sapien
ggccatggccagaggctgtccccat

SEQ ID NO: 717206 - DNA, 25 bp, Homo sapien
cgtggccatggccagaggctgtccc

SEQ ID NO: 717207 - DNA, 25 bp, Homo sapien
aggcgtggccatggccagaggctgt

SEQ ID NO: 717208 - DNA, 25 bp, Homo sapien
caggcgtggccatggccagaggctg

SEQ ID NO: 717209 - DNA, 25 bp, Homo sapien
tccagtgtttaatagcattggcacc

SEQ ID NO: 717210 - DNA, 25 bp, Homo sapien
attaatacgggtatgtcagcttcca

SEQ ID NO: 717211 - DNA, 25 bp, Homo sapien
taatagcattggcaccttttacttt

SEQ ID NO: 717212 - DNA, 25 bp, Homo sapien
atattaatacgggtatgtcagcttc

SEQ ID NO: 717213 - DNA, 25 bp, Homo sapien
tttggatgactctgaaaactttgtg

SEQ ID NO: 717214 - DNA, 25 bp, Homo sapien
ccattgaactggactttttacccag

SEQ ID NO: 717215 - DNA, 25 bp, Homo sapien
ttttacccagttagcaaggtaatga

SEQ ID NO: 717216 - DNA, 25 bp, Homo sapien
cgtagcggacatgcacctgtacaca

SEQ ID NO: 717217 - DNA, 25 bp, Homo sapien
gcatcttctcagctggtgccctctc

SEQ ID NO: 717218 - DNA, 25 bp, Homo sapien
cccaagaaggcagtagacacgtgat

SEQ ID NO: 717219 - DNA, 25 bp, Homo sapien
tagacacgtgataccagtgggctgg

SEQ ID NO: 717220 - DNA, 25 bp, Homo sapien
gaaggcagtagacacgtgataccag

SEQ ID NO: 717221 - DNA, 25 bp, Homo sapien
tgggcgcgtggaagctcatgctgtg

SEQ ID NO: 717222 - DNA, 25 bp, Homo sapien
tggctggacaccttcgtgggcgcgt

SEQ ID NO: 717223 - DNA, 25 bp, Homo sapien
tcttctgcgcgtgggtgggcacgcg

SEQ ID NO: 717224 - DNA, 25 bp, Homo sapien
ggtggaggtcttctgcgcgtgggtg

SEQ ID NO: 717225 - DNA, 25 bp, Homo sapien
cattctgcgtggaaatatcttcgca

SEQ ID NO: 717226 - DNA, 25 bp, Homo sapien
tgtggcagcgtcctctggccctcag

SEQ ID NO: 717227 - DNA, 25 bp, Homo sapien
tcttggcgaaggtgactttcagctt

SEQ ID NO: 717228 - DNA, 25 bp, Homo sapien
tagggtctgaagtttctaagtgcag

SEQ ID NO: 717229 - DNA, 25 bp, Homo sapien
gaacagtcatgacccagcgtccttg

SEQ ID NO: 717230 - DNA, 25 bp, Homo sapien
cactctcgagaaaaaggctggcact

SEQ ID NO: 717231 - DNA, 25 bp, Homo sapien
agcgtccttgtaggcacggtacccg

SEQ ID NO: 717232 - DNA, 25 bp, Homo sapien
cttatgtctatgttgggcagtgcgg

SEQ ID NO: 717233 - DNA, 25 bp, Homo sapien
ttgctgccgccgtccattgcgtgtg

SEQ ID NO: 717234 - DNA, 25 bp, Homo sapien
ctcttgacgggacgggcacccatct

SEQ ID NO: 717235 - DNA, 25 bp, Homo sapien
attgtggccgccagctctaggcagc

SEQ ID NO: 717236 - DNA, 25 bp, Homo sapien
tctgtgcttgagtcacgtccgagcc

SEQ ID NO: 717237 - DNA, 25 bp, Homo sapien
attcgctatgatttttattccagac

SEQ ID NO: 717238 - DNA, 25 bp, Homo sapien
tctgtcctgtgagcattcgctatga

SEQ ID NO: 717239 - DNA, 25 bp, Homo sapien
ctctgtcctgtgagcattcgctatg

SEQ ID NO: 717240 - DNA, 25 bp, Homo sapien
agcattcgctatgatttttattcca

SEQ ID NO: 717241 - DNA, 25 bp, Homo sapien
tgtgctgagtcgccctcgctgtaca

SEQ ID NO: 717242 - DNA, 25 bp, Homo sapien
gagtcgccctcgctgtacaggaaga

SEQ ID NO: 717243 - DNA, 25 bp, Homo sapien
tcgccctcgctgtacaggaagagaa

SEQ ID NO: 717244 - DNA, 25 bp, Homo sapien
ctgagtcgccctcgctgtacaggaa

SEQ ID NO: 717245 - DNA, 25 bp, Homo sapien
ctccactgccgcctctgtcatgggc

SEQ ID NO: 717246 - DNA, 25 bp, Homo sapien
tggatgagatgaaggaacttgcctg

SEQ ID NO: 717247 - DNA, 25 bp, Homo sapien
cctgggtgaacaggcaggattcgca

SEQ ID NO: 717248 - DNA, 25 bp, Homo sapien
ggaaatcccgtgtttgtgcaacagg

SEQ ID NO: 717249 - DNA, 25 bp, Homo sapien
caacaggaatttgtcgttggatgag

SEQ ID NO: 717250 - DNA, 25 bp, Homo sapien
agctctcgtaggagtgcaacaggtg

SEQ ID NO: 717251 - DNA, 25 bp, Homo sapien
gcttagctctcgtaggagtgcaaca

SEQ ID NO: 717252 - DNA, 25 bp, Homo sapien
ctggcttagctctcgtaggagtgca

SEQ ID NO: 717253 - DNA, 25 bp, Homo sapien
tctggtgcccgcagatggtgccagc

SEQ ID NO: 717254 - DNA, 25 bp, Homo sapien
ctggccgttccgcacaggtgtgttt

SEQ ID NO: 717255 - DNA, 25 bp, Homo sapien
gttgtccttggtgtcacggcacacc

SEQ ID NO: 717256 - DNA, 25 bp, Homo sapien
ggtgtcacggcacacccaagagcct

SEQ ID NO: 717257 - DNA, 25 bp, Homo sapien
tccgcacaggtgtgtttgctcctgg

SEQ ID NO: 717258 - DNA, 25 bp, Homo sapien
aaatccaaatctttgaataaccttg

SEQ ID NO: 717259 - DNA, 25 bp, Homo sapien
tcagtttcgaagaaatccaaatctt

SEQ ID NO: 717260 - DNA, 25 bp, Homo sapien
atccaaatctttgaataaccttgat

SEQ ID NO: 717261 - DNA, 25 bp, Homo sapien
gaagaaatccaaatctttgaataac

SEQ ID NO: 717262 - DNA, 25 bp, Homo sapien
tgacccagtaggcacagcgcagctg

SEQ ID NO: 717263 - DNA, 25 bp, Homo sapien
ggtgacccagtaggcacagcgcagc

SEQ ID NO: 717264 - DNA, 25 bp, Homo sapien
gtggacagcaaggtgacctggcggg

SEQ ID NO: 717265 - DNA, 25 bp, Homo sapien
aaggtgacccagtaggcacagcgca

SEQ ID NO: 717266 - DNA, 25 bp, Homo sapien
tagcagatcccgaggcttctgcttc

SEQ ID NO: 717267 - DNA, 25 bp, Homo sapien
gaagggcctgctaccaggtagcaga

SEQ ID NO: 717268 - DNA, 25 bp, Homo sapien
cccaacaaccaaagtcgcaagacgt

SEQ ID NO: 717269 - DNA, 25 bp, Homo sapien
gcttctgatgcctgagctaatgtca

SEQ ID NO: 717270 - DNA, 25 bp, Homo sapien
gcatcggtgtatcttggcatcagca

SEQ ID NO: 717271 - DNA, 25 bp, Homo sapien
tggcttcggcgtatctcggcatcag

SEQ ID NO: 717272 - DNA, 25 bp, Homo sapien
tggcattggcgtatctcagcatcgg

SEQ ID NO: 717273 - DNA, 25 bp, Homo sapien
gtatcttgacatctcggcatcggtg

SEQ ID NO: 717274 - DNA, 25 bp, Homo sapien
gatgtcccatgtgccgtctactgag

SEQ ID NO: 717275 - DNA, 25 bp, Homo sapien
cactgagtgcaggagcgcaggtatg

SEQ ID NO: 717276 - DNA, 25 bp, Homo sapien
ttccaaacagaaacgtcatcactag

SEQ ID NO: 717277 - DNA, 25 bp, Homo sapien
atcactaggcatggcgatgtcccat

SEQ ID NO: 717278 - DNA, 25 bp, Homo sapien
cagggaaggtgcttgcgactcctct

SEQ ID NO: 717279 - DNA, 25 bp, Homo sapien
aggtgcttgcgactcctctgtgttg

SEQ ID NO: 717280 - DNA, 25 bp, Homo sapien
acgcctcccggtgcgctgccatcct

SEQ ID NO: 717281 - DNA, 25 bp, Homo sapien
tatgtgggtgcccttcctgtccttg

SEQ ID NO: 717282 - DNA, 25 bp, Homo sapien
cagggctggcacagtgcggggatca

SEQ ID NO: 717283 - DNA, 25 bp, Homo sapien
atcacagcatgattgcagcgggcag

SEQ ID NO: 717284 - DNA, 25 bp, Homo sapien
gggacagacgagctgctgggacgcc

SEQ ID NO: 717285 - DNA, 25 bp, Homo sapien
agcatgattgcagcgggcagctgtt

SEQ ID NO: 717286 - DNA, 25 bp, Homo sapien
ccgggttcggctcctgtgttgccgt

SEQ ID NO: 717287 - DNA, 25 bp, Homo sapien
gcagccgcttctcgtcacctgattg

SEQ ID NO: 717288 - DNA, 25 bp, Homo sapien
tgccgtgttccctgcggctgctgca

SEQ ID NO: 717289 - DNA, 25 bp, Homo sapien
cacctgattgtgtgtgcgcctccag

SEQ ID NO: 717290 - DNA, 25 bp, Homo sapien
gacttgagaccgaagctctcttctg

SEQ ID NO: 717291 - DNA, 25 bp, Homo sapien
tggccgcagcgtgccctgtggactt

SEQ ID NO: 717292 - DNA, 25 bp, Homo sapien
gcttcctgatccgttcttcctcccc

SEQ ID NO: 717293 - DNA, 25 bp, Homo sapien
ttttcgtcggaggacttggccgcag

SEQ ID NO: 717294 - DNA, 25 bp, Homo sapien
gccacgtgacgtcggcttgggcctt

SEQ ID NO: 717295 - DNA, 25 bp, Homo sapien
tcttcatgaagatccttctgccacg

SEQ ID NO: 717296 - DNA, 25 bp, Homo sapien
ccttctgccacgtgacgtcggcttg

SEQ ID NO: 717297 - DNA, 25 bp, Homo sapien
cgttcaagtcgtagccatgctcatc

SEQ ID NO: 717298 - DNA, 25 bp, Homo sapien
tcatcgtctgcgctggctctctggg

SEQ ID NO: 717299 - DNA, 25 bp, Homo sapien
caggaagcgtttgttcaacacctgc

SEQ ID NO: 717300 - DNA, 25 bp, Homo sapien
agaggctccttgtcgctcccgttca

SEQ ID NO: 717301 - DNA, 25 bp, Homo sapien
caaggctcttgtctcttagaggaca

SEQ ID NO: 717302 - DNA, 25 bp, Homo sapien
ctccagtccgatggacctgggcccc

SEQ ID NO: 717303 - DNA, 25 bp, Homo sapien
ctgctccagtccgatggacctgggc

SEQ ID NO: 717304 - DNA, 25 bp, Homo sapien
ttttctgctccagtccgatggacct

SEQ ID NO: 717305 - DNA, 25 bp, Homo sapien
tgctccagtccgatggacctgggcc

SEQ ID NO: 717306 - DNA, 25 bp, Homo sapien
tggactgcctgttagtttgcacagg

SEQ ID NO: 717307 - DNA, 25 bp, Homo sapien
tagagaccacgaccatgtgggtggc

SEQ ID NO: 717308 - DNA, 25 bp, Homo sapien
gtcagaccatatcatatcatgcctc

SEQ ID NO: 717309 - DNA, 25 bp, Homo sapien
taaaacagtcacctctctcgagagc

SEQ ID NO: 717310 - DNA, 25 bp, Homo sapien
gcacagtgtgccgtgtagatctgtg

SEQ ID NO: 717311 - DNA, 25 bp, Homo sapien
tgccgtgtagatctgtgaccgccaa

SEQ ID NO: 717312 - DNA, 25 bp, Homo sapien
gtagatctgtgaccgccaaccacgt

SEQ ID NO: 717313 - DNA, 25 bp, Homo sapien
aaccacgtcctgcgtgtgtcaggct

SEQ ID NO: 717314 - DNA, 25 bp, Homo sapien
gagcctgatggcagcacagggggag

SEQ ID NO: 717315 - DNA, 25 bp, Homo sapien
cctgatggcagcacagggggaggtc

SEQ ID NO: 717316 - DNA, 25 bp, Homo sapien
tcctgcttctgggagcctgatggca

SEQ ID NO: 717317 - DNA, 25 bp, Homo sapien
ttctgggagcctgatggcagcacag

SEQ ID NO: 717318 - DNA, 25 bp, Homo sapien
agccccttatccggaaggaagactg

SEQ ID NO: 717319 - DNA, 25 bp, Homo sapien
tagctggtggtagccccttatccgg

SEQ ID NO: 717320 - DNA, 25 bp, Homo sapien
cttttggagggatgtgcttagctgg

SEQ ID NO: 717321 - DNA, 25 bp, Homo sapien
gagcctgctccttggcggcatgaac

SEQ ID NO: 717322 - DNA, 25 bp, Homo sapien
gccgctcctgcttgtccgcgcaggg

SEQ ID NO: 717323 - DNA, 25 bp, Homo sapien
agctgggcgtgtggagcttttggcc

SEQ ID NO: 717324 - DNA, 25 bp, Homo sapien
tctgggaggcagaccgtcacgtggg

SEQ ID NO: 717325 - DNA, 25 bp, Homo sapien
ttttggccttgatggaggacgtctc

SEQ ID NO: 717326 - DNA, 25 bp, Homo sapien
cgcctgggggtgagctttagcaacc

SEQ ID NO: 717327 - DNA, 25 bp, Homo sapien
tggacagatcctgcgccttgacttc

SEQ ID NO: 717328 - DNA, 25 bp, Homo sapien
gcgctgggtggacggcggccgtcac

SEQ ID NO: 717329 - DNA, 25 bp, Homo sapien
acactgacgccatggcctgcacatg

SEQ ID NO: 717330 - DNA, 25 bp, Homo sapien
tcgcttcacaggagggccgcctggc

SEQ ID NO: 717331 - DNA, 25 bp, Homo sapien
tgcccggtctttgcaggaacctagg

SEQ ID NO: 717332 - DNA, 25 bp, Homo sapien
gaggaccgaagcctgggtctgtccc

SEQ ID NO: 717333 - DNA, 25 bp, Homo sapien
gaacctaggccatatggcagaggtg

SEQ ID NO: 717334 - DNA, 25 bp, Homo sapien
tctccttgccccttgggtgctccat

SEQ ID NO: 717335 - DNA, 25 bp, Homo sapien
tcctccgtggcacagcacgaagcag

SEQ ID NO: 717336 - DNA, 25 bp, Homo sapien
cgtggcacagcacgaagcagcttcc

SEQ ID NO: 717337 - DNA, 25 bp, Homo sapien
gctgctcctccgtggcacagcacga

SEQ ID NO: 717338 - DNA, 25 bp, Homo sapien
ggtctttcacggtggtctggcctcc

SEQ ID NO: 717339 - DNA, 25 bp, Homo sapien
gaagcagccttcctgttcgtgttct

SEQ ID NO: 717340 - DNA, 25 bp, Homo sapien
gagcgagtgtttcatgaactctgaa

SEQ ID NO: 717341 - DNA, 25 bp, Homo sapien
ttgtgactcccgtgctgatgagcga

SEQ ID NO: 717342 - DNA, 25 bp, Homo sapien
tgctgcctcgtgtgtgactggactc

SEQ ID NO: 717343 - DNA, 25 bp, Homo sapien
gactggactctgagaagcgcgtgtt

SEQ ID NO: 717344 - DNA, 25 bp, Homo sapien
gtgacggattcagacccacggcagg

SEQ ID NO: 717345 - DNA, 25 bp, Homo sapien
tcgcgtcctcgtcactggcaggtga

SEQ ID NO: 717346 - DNA, 25 bp, Homo sapien
aggacaccatcagtgcctgcgcaga

SEQ ID NO: 717347 - DNA, 25 bp, Homo sapien
agctggtgcaggcacgaatgttcca

SEQ ID NO: 717348 - DNA, 25 bp, Homo sapien
tgggaggccttgagcaaggacacca

SEQ ID NO: 717349 - DNA, 25 bp, Homo sapien
gcagaggtcccctgggactgacaag

SEQ ID NO: 717350 - DNA, 25 bp, Homo sapien
gccagttgccgaaagaaggaagcag

SEQ ID NO: 717351 - DNA, 25 bp, Homo sapien
gaagcaggtcccttgtcatgaccag

SEQ ID NO: 717352 - DNA, 25 bp, Homo sapien
agagaccccaggtgcgatggctgtc

SEQ ID NO: 717353 - DNA, 25 bp, Homo sapien
acttgtgtgactgccagttgccgaa

SEQ ID NO: 717354 - DNA, 25 bp, Homo sapien
gcatagttatccgacatggcaccgt

SEQ ID NO: 717355 - DNA, 25 bp, Homo sapien
tgtcgtgtggccctcgcatagttat

SEQ ID NO: 717356 - DNA, 25 bp, Homo sapien
cgtgtcctcgtgtagttgccccata

SEQ ID NO: 717357 - DNA, 25 bp, Homo sapien
catcatggccggtatcgtgtcctcg

SEQ ID NO: 717358 - DNA, 25 bp, Homo sapien
ctgcttgaggattcagcgggatgac

SEQ ID NO: 717359 - DNA, 25 bp, Homo sapien
gattcagcgggatgacgttggtaac

SEQ ID NO: 717360 - DNA, 25 bp, Homo sapien
gacgtggtgctgtgacgaagggtcc

SEQ ID NO: 717361 - DNA, 25 bp, Homo sapien
ttggtaacgtgcctggtgcagcagc

SEQ ID NO: 717362 - DNA, 25 bp, Homo sapien
tatcagccggcgtagtgtgccgctg

SEQ ID NO: 717363 - DNA, 25 bp, Homo sapien
aagatgaatgttgcctatcagccgg

SEQ ID NO: 717364 - DNA, 25 bp, Homo sapien
tccctcatcgaggtggtaccctgtt

SEQ ID NO: 717365 - DNA, 25 bp, Homo sapien
tgacggctgggtcattcgtgtgcct

SEQ ID NO: 717366 - DNA, 25 bp, Homo sapien
tgcatgcttacaaaacttcctgggt

SEQ ID NO: 717367 - DNA, 25 bp, Homo sapien
cagagttttgaccacgcttgggagc

SEQ ID NO: 717368 - DNA, 25 bp, Homo sapien
gagagctagcttgatctgtgctgca

SEQ ID NO: 717369 - DNA, 25 bp, Homo sapien
gctctgttgggctgcacatggctcc

SEQ ID NO: 717370 - DNA, 25 bp, Homo sapien
cctcgaggtgcttcctggcaggaga

SEQ ID NO: 717371 - DNA, 25 bp, Homo sapien
tctgtgccctgctgacgtgactgac

SEQ ID NO: 717372 - DNA, 25 bp, Homo sapien
gagaacctcacagagaatcctcgag

SEQ ID NO: 717373 - DNA, 25 bp, Homo sapien
tgattctgagcgacatggcgcccaa

SEQ ID NO: 717374 - DNA, 25 bp, Homo sapien
cagtggtttctgttcccctaagtgc

SEQ ID NO: 717375 - DNA, 25 bp, Homo sapien
cattgctgagcttatcaccgtggag

SEQ ID NO: 717376 - DNA, 25 bp, Homo sapien
tcctggtgcttccatcgtggtcagc

SEQ ID NO: 717377 - DNA, 25 bp, Homo sapien
ccctaagtgctcttgagatgaagca

SEQ ID NO: 717378 - DNA, 25 bp, Homo sapien
catttgaacagggtgagacagtcca

SEQ ID NO: 717379 - DNA, 25 bp, Homo sapien
gaagacactgtcgtcattgggaaag

SEQ ID NO: 717380 - DNA, 25 bp, Homo sapien
aaagccagggtagctgcatgcactg

SEQ ID NO: 717381 - DNA, 25 bp, Homo sapien
taccttagagtagggacactggtcc

SEQ ID NO: 717382 - DNA, 25 bp, Homo sapien
cgccgcttccgggggcgtggcctct

SEQ ID NO: 717383 - DNA, 25 bp, Homo sapien
tgcaccgccgcttccgggggcgtgg

SEQ ID NO: 717384 - DNA, 25 bp, Homo sapien
gcttccgggggcgtggcctctgacc

SEQ ID NO: 717385 - DNA, 25 bp, Homo sapien
ccgcttccgggggcgtggcctctga

SEQ ID NO: 717386 - DNA, 25 bp, Homo sapien
cacgactcctggaatccccgcgcgc

SEQ ID NO: 717387 - DNA, 25 bp, Homo sapien
tcctggaatccccgcgcgcgctttt

SEQ ID NO: 717388 - DNA, 25 bp, Homo sapien
gactcctggaatccccgcgcgcgct

SEQ ID NO: 717389 - DNA, 25 bp, Homo sapien
cctggaatccccgcgcgcgcttttc

SEQ ID NO: 717390 - DNA, 25 bp, Homo sapien
ctcccctagtctcctgccgcccgct

SEQ ID NO: 717391 - DNA, 25 bp, Homo sapien
agctcccctagtctcctgccgcccg

SEQ ID NO: 717392 - DNA, 25 bp, Homo sapien
aagcccatggctcagctcccctagt

SEQ ID NO: 717393 - DNA, 25 bp, Homo sapien
gcccatggctcagctcccctagtct

SEQ ID NO: 717394 - DNA, 25 bp, Homo sapien
gcttagtttcacaccaggcccgtgt

SEQ ID NO: 717395 - DNA, 25 bp, Homo sapien
gtttctgccagaagccacggtttcc

SEQ ID NO: 717396 - DNA, 25 bp, Homo sapien
cgataaggcagggagtctaacagct

SEQ ID NO: 717397 - DNA, 25 bp, Homo sapien
tgactaacacaagccacctacaagg

SEQ ID NO: 717398 - DNA, 25 bp, Homo sapien
ccaagccgccgtgtgatctgattgc

SEQ ID NO: 717399 - DNA, 25 bp, Homo sapien
caagccgccgtgtgatctgattgct

SEQ ID NO: 717400 - DNA, 25 bp, Homo sapien
aagccgccgtgtgatctgattgctc

SEQ ID NO: 717401 - DNA, 25 bp, Homo sapien
agccgccgtgtgatctgattgctcc

SEQ ID NO: 717402 - DNA, 25 bp, Homo sapien
ccccatctgctgagggctaattcca

SEQ ID NO: 717403 - DNA, 25 bp, Homo sapien
tctgctgagggctaattccactcat

SEQ ID NO: 717404 - DNA, 25 bp, Homo sapien
cactccaactgccttctggctcccc

SEQ ID NO: 717405 - DNA, 25 bp, Homo sapien
ttcccactccaactgccttctggct

SEQ ID NO: 717406 - DNA, 25 bp, Homo sapien
atggtctctccttcttgcactttgc

SEQ ID NO: 717407 - DNA, 25 bp, Homo sapien
cagcaccagggtatagagcctggag

SEQ ID NO: 717408 - DNA, 25 bp, Homo sapien
tgcccaggagaactcgctgaggctg

SEQ ID NO: 717409 - DNA, 25 bp, Homo sapien
tcgctttttcatgcccaggagaact

SEQ ID NO: 717410 - DNA, 25 bp, Homo sapien
gatgcctcctcagcttaaactgcag

SEQ ID NO: 717411 - DNA, 25 bp, Homo sapien
catgcctggtctaaatggtctgatt

SEQ ID NO: 717412 - DNA, 25 bp, Homo sapien
tctgatttaagcgatgcctcctcag

SEQ ID NO: 717413 - DNA, 25 bp, Homo sapien
taaatggtctgatttaagcgatgcc

SEQ ID NO: 717414 - DNA, 25 bp, Homo sapien
ggcctgtctgcccaaagaaatgtct

SEQ ID NO: 717415 - DNA, 25 bp, Homo sapien
ggttacttgcttttccgcggctgag

SEQ ID NO: 717416 - DNA, 25 bp, Homo sapien
cagagcccatgcagcggtagttacg

SEQ ID NO: 717417 - DNA, 25 bp, Homo sapien
cctctggtgggaggaacgcagttct

SEQ ID NO: 717418 - DNA, 25 bp, Homo sapien
caggggagggaggccgtcagggcat

SEQ ID NO: 717419 - DNA, 25 bp, Homo sapien
gggagggaggccgtcagggcatggt

SEQ ID NO: 717420 - DNA, 25 bp, Homo sapien
ttgtgcagggcgtccactgtcagac

SEQ ID NO: 717421 - DNA, 25 bp, Homo sapien
caaacacgatctggcccaccttgtg

SEQ ID NO: 717422 - DNA, 25 bp, Homo sapien
gacatgcacgtccatgagctcaggc

SEQ ID NO: 717423 - DNA, 25 bp, Homo sapien
cctggatgctgtctgtgcagaagac

SEQ ID NO: 717424 - DNA, 25 bp, Homo sapien
ctgtaccaatgggggaagaggaggc

SEQ ID NO: 717425 - DNA, 25 bp, Homo sapien
tgtaccaatgggggaagaggaggca

SEQ ID NO: 717426 - DNA, 25 bp, Homo sapien
tcgtcgggccacatgtccttgaagg

SEQ ID NO: 717427 - DNA, 25 bp, Homo sapien
tgtagtccaggatggtgtcctgacc

SEQ ID NO: 717428 - DNA, 25 bp, Homo sapien
gaagcaggagtggaaaccagtagct

SEQ ID NO: 717429 - DNA, 25 bp, Homo sapien
tcctgaccctggaacttgaagtacc

SEQ ID NO: 717430 - DNA, 25 bp, Homo sapien
taattccagatgaaacccggctctg

SEQ ID NO: 717431 - DNA, 25 bp, Homo sapien
aatgcccccaggtgaagatggtttg

SEQ ID NO: 717432 - DNA, 25 bp, Homo sapien
tcccttccatccagttaattccaga

SEQ ID NO: 717433 - DNA, 25 bp, Homo sapien
gatggtttgcggctgttcagcagcc

SEQ ID NO: 717434 - DNA, 25 bp, Homo sapien
cgtggggcacgcacggtgaattttc

SEQ ID NO: 717435 - DNA, 25 bp, Homo sapien
gggcacgcacggtgaattttctagg

SEQ ID NO: 717436 - DNA, 25 bp, Homo sapien
actgaccacggacagcgaggggaca

SEQ ID NO: 717437 - DNA, 25 bp, Homo sapien
cgcacggtgaattttctagggaaat

SEQ ID NO: 717438 - DNA, 25 bp, Homo sapien
tcgggaggcgcatccgtggaccatg

SEQ ID NO: 717439 - DNA, 25 bp, Homo sapien
tgtccttcgccctgtggcctgctag

SEQ ID NO: 717440 - DNA, 25 bp, Homo sapien
gcagaggagctcacgcctgcgggtc

SEQ ID NO: 717441 - DNA, 25 bp, Homo sapien
attccctttggacggcagctcccct

SEQ ID NO: 717442 - DNA, 25 bp, Homo sapien
gacaaaacagattaggctgtagtct

SEQ ID NO: 717443 - DNA, 25 bp, Homo sapien
gggttgccagcgacaaaacagatta

SEQ ID NO: 717444 - DNA, 25 bp, Homo sapien
cctgggagcgtttacgctttcgaga

SEQ ID NO: 717445 - DNA, 25 bp, Homo sapien
agttctgagccgagtgaatgacagc

SEQ ID NO: 717446 - DNA, 25 bp, Homo sapien
tgcctgcatctgcaaagccatggca

SEQ ID NO: 717447 - DNA, 25 bp, Homo sapien
tgcatctgcaaagccatggcagcct

SEQ ID NO: 717448 - DNA, 25 bp, Homo sapien
tctgcaaagccatggcagcctgagc

SEQ ID NO: 717449 - DNA, 25 bp, Homo sapien
ctggctggcattgccctgcctgcat

SEQ ID NO: 717450 - DNA, 25 bp, Homo sapien
ctggctgacgatgggacctgttgca

SEQ ID NO: 717451 - DNA, 25 bp, Homo sapien
ccgcagcgtcgactctgtagcatga

SEQ ID NO: 717452 - DNA, 25 bp, Homo sapien
tgttgcatgacgtggccagagtcca

SEQ ID NO: 717453 - DNA, 25 bp, Homo sapien
tgggtccagcgttgactccgtagca

SEQ ID NO: 717454 - DNA, 25 bp, Homo sapien
tgcagaatcttttcggattggagcg

SEQ ID NO: 717455 - DNA, 25 bp, Homo sapien
tgagaggggaatgcattctgagttt

SEQ ID NO: 717456 - DNA, 25 bp, Homo sapien
cattctgagttttagtgggtagatc

SEQ ID NO: 717457 - DNA, 25 bp, Homo sapien
cgccaccgaaaacttgctgagaggg

SEQ ID NO: 717458 - DNA, 25 bp, Homo sapien
gctctgtgttgttactgtctgaagt

SEQ ID NO: 717459 - DNA, 25 bp, Homo sapien
ctgctctgtgttgttactgtctgaa

SEQ ID NO: 717460 - DNA, 25 bp, Homo sapien
tgctctgtgttgttactgtctgaag

SEQ ID NO: 717461 - DNA, 25 bp, Homo sapien
tctgtgttgttactgtctgaagttc

SEQ ID NO: 717462 - DNA, 25 bp, Homo sapien
accaccagtgtgttcaaaagcacag

SEQ ID NO: 717463 - DNA, 25 bp, Homo sapien
agccacactgaagagtatagccaag

SEQ ID NO: 717464 - DNA, 25 bp, Homo sapien
agagtatagccaagttgaagggttt

SEQ ID NO: 717465 - DNA, 25 bp, Homo sapien
ctgaatattgaactgtaggctccgt

SEQ ID NO: 717466 - DNA, 25 bp, Homo sapien
attcactaagattttctacaaagac

SEQ ID NO: 717467 - DNA, 25 bp, Homo sapien
tctctggatgccataaaaatattca

SEQ ID NO: 717468 - DNA, 25 bp, Homo sapien
aaatattcactaagattttctacaa

SEQ ID NO: 717469 - DNA, 25 bp, Homo sapien
ctctggatgccataaaaatattcac

SEQ ID NO: 717470 - DNA, 25 bp, Homo sapien
cagcccggtgctctgttgagtccag

SEQ ID NO: 717471 - DNA, 25 bp, Homo sapien
cagcaaggcttgtctgggaacctca

SEQ ID NO: 717472 - DNA, 25 bp, Homo sapien
gggaacctcactctcagccaaaagc

SEQ ID NO: 717473 - DNA, 25 bp, Homo sapien
tgagtccagctgtttcggtgaccca

SEQ ID NO: 717474 - DNA, 25 bp, Homo sapien
ctgtgtgaatacgttggtcagaatt

SEQ ID NO: 717475 - DNA, 25 bp, Homo sapien
gtgtgaatacgttggtcagaattca

SEQ ID NO: 717476 - DNA, 25 bp, Homo sapien
tgtgaatacgttggtcagaattcat

SEQ ID NO: 717477 - DNA, 25 bp, Homo sapien
tgtgtgaatacgttggtcagaattc

SEQ ID NO: 717478 - DNA, 25 bp, Homo sapien
ctgctcgctcatgtcaggtctgttc

SEQ ID NO: 717479 - DNA, 25 bp, Homo sapien
gctgctcgctcatgtcaggtctgtt

SEQ ID NO: 717480 - DNA, 25 bp, Homo sapien
acagtggttcagtccatccgaggcc

SEQ ID NO: 717481 - DNA, 25 bp, Homo sapien
agtccttccctagcggccgtcactg

SEQ ID NO: 717482 - DNA, 25 bp, Homo sapien
ccgcgtggagctcgaggctgactcc

SEQ ID NO: 717483 - DNA, 25 bp, Homo sapien
cccattcgggctttcacagtggttc

SEQ ID NO: 717484 - DNA, 25 bp, Homo sapien
aagaaagtgcttaattccattcagc

SEQ ID NO: 717485 - DNA, 25 bp, Homo sapien
gaccgcgcccgaaaatcatcaaact

SEQ ID NO: 717486 - DNA, 25 bp, Homo sapien
gatggttccgtccaacatggcgtcc

SEQ ID NO: 717487 - DNA, 25 bp, Homo sapien
tgagaggactcgcatccacaagacc

SEQ ID NO: 717488 - DNA, 25 bp, Homo sapien
aacgctgcctactcgcagggctccg

SEQ ID NO: 717489 - DNA, 25 bp, Homo sapien
cagcccagccatgtgcgtgcgacgg

SEQ ID NO: 717490 - DNA, 25 bp, Homo sapien
gggcccaacgctgcctactcgcagg

SEQ ID NO: 717491 - DNA, 25 bp, Homo sapien
gcgacggctacagcccagccatgtg

SEQ ID NO: 717492 - DNA, 25 bp, Homo sapien
gcaccgccacgttctccgcgtcctg

SEQ ID NO: 717493 - DNA, 25 bp, Homo sapien
tcgggcaccgccacgttctccgcgt

SEQ ID NO: 717494 - DNA, 25 bp, Homo sapien
gcctcgggcaccgccacgttctccg

SEQ ID NO: 717495 - DNA, 25 bp, Homo sapien
gggcaccgccacgttctccgcgtcc

SEQ ID NO: 717496 - DNA, 25 bp, Homo sapien
tccggcccggcctccgcgatcccca

SEQ ID NO: 717497 - DNA, 25 bp, Homo sapien
ctcggactccggcccggcctccgcg

SEQ ID NO: 717498 - DNA, 25 bp, Homo sapien
ggcctccgcgatccccacctcctca

SEQ ID NO: 717499 - DNA, 25 bp, Homo sapien
gcccggcctccgcgatccccacctc

SEQ ID NO: 717500 - DNA, 25 bp, Homo sapien
gggggctcagcatgcgacccgggca

SEQ ID NO: 717501 - DNA, 25 bp, Homo sapien
ggctcagcatgcgacccgggcagct

SEQ ID NO: 717502 - DNA, 25 bp, Homo sapien
cgagggcgactcggacgggccggag

SEQ ID NO: 717503 - DNA, 25 bp, Homo sapien
gcgactcggacgggccggaggccgc

SEQ ID NO: 717504 - DNA, 25 bp, Homo sapien
ccggctgtcggagcgctcgtcccga

SEQ ID NO: 717505 - DNA, 25 bp, Homo sapien
acaccgcctgggcccggctgtcgga

SEQ ID NO: 717506 - DNA, 25 bp, Homo sapien
tgtcggagcgctcgtcccgagcctg

SEQ ID NO: 717507 - DNA, 25 bp, Homo sapien
gcctgggcccggctgtcggagcgct

SEQ ID NO: 717508 - DNA, 25 bp, Homo sapien
aggagggctcgtccgcgtcgccgtt

SEQ ID NO: 717509 - DNA, 25 bp, Homo sapien
ccacgaagtcctcggggtcgctgaa

SEQ ID NO: 717510 - DNA, 25 bp, Homo sapien
gagggctcgtccgcgtcgccgttct

SEQ ID NO: 717511 - DNA, 25 bp, Homo sapien
ttcctcgctcacgtcgtccacgaag

SEQ ID NO: 717512 - DNA, 25 bp, Homo sapien
aatcaccgaatcgattccatctgct

SEQ ID NO: 717513 - DNA, 25 bp, Homo sapien
tgagtttctcaagtcggtcgggtcc

SEQ ID NO: 717514 - DNA, 25 bp, Homo sapien
ggtcccacctgagggacattgtcca

SEQ ID NO: 717515 - DNA, 25 bp, Homo sapien
gccgatctttgagtacatctcccag

SEQ ID NO: 717516 - DNA, 25 bp, Homo sapien
tcacagcatccacagcgtgggcagg

SEQ ID NO: 717517 - DNA, 25 bp, Homo sapien
tagccgtcggcgttcttcacagcat

SEQ ID NO: 717518 - DNA, 25 bp, Homo sapien
gggacgcgtactccaggaaaatata

SEQ ID NO: 717519 - DNA, 25 bp, Homo sapien
ggttgacccggaatgtgtgctgctt

SEQ ID NO: 717520 - DNA, 25 bp, Homo sapien
tctctggaatatcccactcgtcact

SEQ ID NO: 717521 - DNA, 25 bp, Homo sapien
ccactcgtcactgatcgtcatatac

SEQ ID NO: 717522 - DNA, 25 bp, Homo sapien
gaatatcccactcgtcactgatcgt

SEQ ID NO: 717523 - DNA, 25 bp, Homo sapien
tatcccactcgtcactgatcgtcat

SEQ ID NO: 717524 - DNA, 25 bp, Homo sapien
actgtactgatctctgcattctgcc

SEQ ID NO: 717525 - DNA, 25 bp, Homo sapien
cacactgtactgatctctgcattct

SEQ ID NO: 717526 - DNA, 25 bp, Homo sapien
tacgtcattccagaatatggaagtg

SEQ ID NO: 717527 - DNA, 25 bp, Homo sapien
gtgcggtctccactctcaaaaatca

SEQ ID NO: 717528 - DNA, 25 bp, Homo sapien
caacgttaatacaacaaaatggcaa

SEQ ID NO: 717529 - DNA, 25 bp, Homo sapien
cccctcctacaatgaatttatccta

SEQ ID NO: 717530 - DNA, 25 bp, Homo sapien
cctacaatgaatctgttctacaaac

SEQ ID NO: 717531 - DNA, 25 bp, Homo sapien
cagaaaaaggcagtgccaacgttaa

SEQ ID NO: 717532 - DNA, 25 bp, Homo sapien
ccccttggtggctgaatctctgaat

SEQ ID NO: 717533 - DNA, 25 bp, Homo sapien
tcacaaggtgagaagtcaataagct

SEQ ID NO: 717534 - DNA, 25 bp, Homo sapien
accaacgcacatacgtctctgtcca

SEQ ID NO: 717535 - DNA, 25 bp, Homo sapien
tctttgatgaaaggtagccaggtag

SEQ ID NO: 717536 - DNA, 25 bp, Homo sapien
gatgattatggcctgagggtcatcc

SEQ ID NO: 717537 - DNA, 25 bp, Homo sapien
ccctcttcttgtgccccgtaaggat

SEQ ID NO: 717538 - DNA, 25 bp, Homo sapien
taaggatgtcccagatgattatggc

SEQ ID NO: 717539 - DNA, 25 bp, Homo sapien
catcagggggctaaaggtcaccagg

SEQ ID NO: 717540 - DNA, 25 bp, Homo sapien
gagctcgttacaatggtccacttac

SEQ ID NO: 717541 - DNA, 25 bp, Homo sapien
aacaaaagtgccagggtattcccat

SEQ ID NO: 717542 - DNA, 25 bp, Homo sapien
acaaaggctacagagctcgttacaa

SEQ ID NO: 717543 - DNA, 25 bp, Homo sapien
cagggtattcccatgaaaagacaaa

SEQ ID NO: 717544 - DNA, 25 bp, Homo sapien
aggagtttcatagatgctaagcgta

SEQ ID NO: 717545 - DNA, 25 bp, Homo sapien
tctggcaaagaatttgccatcatgg

SEQ ID NO: 717546 - DNA, 25 bp, Homo sapien
tagatgctaagcgtatccagggtca

SEQ ID NO: 717547 - DNA, 25 bp, Homo sapien
atccagggtcattctggcaaagaat

SEQ ID NO: 717548 - DNA, 25 bp, Homo sapien
ggaccggacggggcgtttgccatca

SEQ ID NO: 717549 - DNA, 25 bp, Homo sapien
gacggggcgtttgccatcactgagg

SEQ ID NO: 717550 - DNA, 25 bp, Homo sapien
accggacggggcgtttgccatcact

SEQ ID NO: 717551 - DNA, 25 bp, Homo sapien
cggacggggcgtttgccatcactga

SEQ ID NO: 717552 - DNA, 25 bp, Homo sapien
caagagtctgatgtgagtttgccta

SEQ ID NO: 717553 - DNA, 25 bp, Homo sapien
caaatcatgtcagtgtctcagaaac

SEQ ID NO: 717554 - DNA, 25 bp, Homo sapien
acttcccacggctgcgccaggtggg

SEQ ID NO: 717555 - DNA, 25 bp, Homo sapien
agagcgtgacagtgaacccatccac

SEQ ID NO: 717556 - DNA, 25 bp, Homo sapien
tcttcttgtccaaaagacccataga

SEQ ID NO: 717557 - DNA, 25 bp, Homo sapien
cactaagacaccaaactgataagaa

SEQ ID NO: 717558 - DNA, 25 bp, Homo sapien
taagacaccaaactgataagaatac

SEQ ID NO: 717559 - DNA, 25 bp, Homo sapien
cacactaagacaccaaactgataag

SEQ ID NO: 717560 - DNA, 25 bp, Homo sapien
gacaccaaactgataagaatactca

SEQ ID NO: 717561 - DNA, 25 bp, Homo sapien
tctccaactggttaagaactgagtg

SEQ ID NO: 717562 - DNA, 25 bp, Homo sapien
caactggttaagaactgagtgacag

SEQ ID NO: 717563 - DNA, 25 bp, Homo sapien
tctctccaactggttaagaactgag

SEQ ID NO: 717564 - DNA, 25 bp, Homo sapien
tggttaagaactgagtgacaggctg

SEQ ID NO: 717565 - DNA, 25 bp, Homo sapien
gtagtctccgttcttctgccaatgg

SEQ ID NO: 717566 - DNA, 25 bp, Homo sapien
caggcacccagaaggcgattatgtt

SEQ ID NO: 717567 - DNA, 25 bp, Homo sapien
tcttgcctggtagggagctgcatca

SEQ ID NO: 717568 - DNA, 25 bp, Homo sapien
cgattatgttaccaccaggagacca

SEQ ID NO: 717569 - DNA, 25 bp, Homo sapien
gccctgcccgccacacttgggcaca

SEQ ID NO: 717570 - DNA, 25 bp, Homo sapien
cccgccacacttgggcacaagcagt

SEQ ID NO: 717571 - DNA, 25 bp, Homo sapien
acaagcagtcccagggtccacactg

SEQ ID NO: 717572 - DNA, 25 bp, Homo sapien
gggcacaagcagtcccagggtccac

SEQ ID NO: 717573 - DNA, 25 bp, Homo sapien
taaatcaaagatcaacgtcacaatg

SEQ ID NO: 717574 - DNA, 25 bp, Homo sapien
gaagacggttctaaggctggagaac

SEQ ID NO: 717575 - DNA, 25 bp, Homo sapien
tgcctggttcacacacgagcatgtg

SEQ ID NO: 717576 - DNA, 25 bp, Homo sapien
gccctcaggatggaagacggttcta

SEQ ID NO: 717577 - DNA, 25 bp, Homo sapien
ttcatctcgaccacatccacaggta

SEQ ID NO: 717578 - DNA, 25 bp, Homo sapien
ttctccctcattcggaaaatttcaa

SEQ ID NO: 717579 - DNA, 25 bp, Homo sapien
atctcgaccacatccacaggtacct

SEQ ID NO: 717580 - DNA, 25 bp, Homo sapien
tttctccctcattcggaaaatttca

SEQ ID NO: 717581 - DNA, 25 bp, Homo sapien
ggtgagggctcacagtcctgactca

SEQ ID NO: 717582 - DNA, 25 bp, Homo sapien
gacaacccctcgcatggaagtgtta

SEQ ID NO: 717583 - DNA, 25 bp, Homo sapien
caagagtaaaacagcacgtaggccc

SEQ ID NO: 717584 - DNA, 25 bp, Homo sapien
gttgcccaggctctaaacacgttct

SEQ ID NO: 717585 - DNA, 25 bp, Homo sapien
ctaaaatgcacaaaacagacccctc

SEQ ID NO: 717586 - DNA, 25 bp, Homo sapien
taaaatgcacaaaacagacccctcc

SEQ ID NO: 717587 - DNA, 25 bp, Homo sapien
caatcttcccgttgtttttgacgtg

SEQ ID NO: 717588 - DNA, 25 bp, Homo sapien
aaagacacagatatccgcggagcct

SEQ ID NO: 717589 - DNA, 25 bp, Homo sapien
ttttgacgtggtagaaagacacaga

SEQ ID NO: 717590 - DNA, 25 bp, Homo sapien
gcacagcaaacttacttccatttgg

SEQ ID NO: 717591 - DNA, 25 bp, Homo sapien
ggtaatgctggaccacctcggaaaa

SEQ ID NO: 717592 - DNA, 25 bp, Homo sapien
gaaatactcgcttaaacgtgagggc

SEQ ID NO: 717593 - DNA, 25 bp, Homo sapien
cacgcagcatgtttggaaggtacaa

SEQ ID NO: 717594 - DNA, 25 bp, Homo sapien
gaatcatgctgcgaaaggtgcggcc

SEQ ID NO: 717595 - DNA, 25 bp, Homo sapien
ccagaagatggtgttcgcctgctgc

SEQ ID NO: 717596 - DNA, 25 bp, Homo sapien
ccgccaacaccacgaactgtccttg

SEQ ID NO: 717597 - DNA, 25 bp, Homo sapien
acgaactgtccttgggggctccaga

SEQ ID NO: 717598 - DNA, 25 bp, Homo sapien
ttcgcctgctgcttgtcgaacatct

SEQ ID NO: 717599 - DNA, 25 bp, Homo sapien
tggtcacttcacgaaagcatctggg

SEQ ID NO: 717600 - DNA, 25 bp, Homo sapien
cagcctcggcgttaacatggaaaca

SEQ ID NO: 717601 - DNA, 25 bp, Homo sapien
tatttcactctgtgcgggcttggcc

SEQ ID NO: 717602 - DNA, 25 bp, Homo sapien
tgcaaagacagacaggaccgtcagg

SEQ ID NO: 717603 - DNA, 25 bp, Homo sapien
gacacagaggtgacgacgtagcgcc

SEQ ID NO: 717604 - DNA, 25 bp, Homo sapien
cagtaggatcccattcgacgtcgga

SEQ ID NO: 717605 - DNA, 25 bp, Homo sapien
cgaagtgtccacaaacgctaaggca

SEQ ID NO: 717606 - DNA, 25 bp, Homo sapien
gccatgtagtgctctgcgatgttca

SEQ ID NO: 717607 - DNA, 25 bp, Homo sapien
gactgaaccctgtgccaaacgtaag

SEQ ID NO: 717608 - DNA, 25 bp, Homo sapien
tgatttcaagtgtcaaggcaggccc

SEQ ID NO: 717609 - DNA, 25 bp, Homo sapien
taagaaccccatgctggatgtaagc

SEQ ID NO: 717610 - DNA, 25 bp, Homo sapien
tccattatgcaaccgacccggagtg

SEQ ID NO: 717611 - DNA, 25 bp, Homo sapien
tgcaggaggcgtccctggaaagtcc

SEQ ID NO: 717612 - DNA, 25 bp, Homo sapien
tctgcaggaggcgtccctggaaagt

SEQ ID NO: 717613 - DNA, 25 bp, Homo sapien
gcaggaggcgtccctggaaagtcca

SEQ ID NO: 717614 - DNA, 25 bp, Homo sapien
cttctgcaggaggcgtccctggaaa

SEQ ID NO: 717615 - DNA, 25 bp, Homo sapien
ccatgtgccctgcacccgggggtgg

SEQ ID NO: 717616 - DNA, 25 bp, Homo sapien
catgtgccctgcacccgggggtggg

SEQ ID NO: 717617 - DNA, 25 bp, Homo sapien
cagaacacggattcccaggagagct

SEQ ID NO: 717618 - DNA, 25 bp, Homo sapien
tgacacccagggtcattcacagaac

SEQ ID NO: 717619 - DNA, 25 bp, Homo sapien
agaacacggattcccaggagagctc

SEQ ID NO: 717620 - DNA, 25 bp, Homo sapien
gacacccagggtcattcacagaaca

SEQ ID NO: 717621 - DNA, 25 bp, Homo sapien
acagaacacggattcccaggagagc

SEQ ID NO: 717622 - DNA, 25 bp, Homo sapien
ccatgacacccagggtcattcacag

SEQ ID NO: 717623 - DNA, 25 bp, Homo sapien
gacacccagggtcattcacagaaca

SEQ ID NO: 717624 - DNA, 25 bp, Homo sapien
tgacacccagggtcattcacagaac

SEQ ID NO: 717625 - DNA, 25 bp, Homo sapien
aaacaaaagacccatcactcaggat

SEQ ID NO: 717626 - DNA, 25 bp, Homo sapien
acatgacatgacacccaaagccatt

SEQ ID NO: 717627 - DNA, 25 bp, Homo sapien
ggagcgctcgcatgctcctttctcc

SEQ ID NO: 717628 - DNA, 25 bp, Homo sapien
aaatgcaatcttcagagttgccaac

SEQ ID NO: 717629 - DNA, 25 bp, Homo sapien
gaggctttggactgactcaaacgat

SEQ ID NO: 717630 - DNA, 25 bp, Homo sapien
aggctttggactgactcaaacgatc

SEQ ID NO: 717631 - DNA, 25 bp, Homo sapien
tgtcttcggagcagaggcaactctg

SEQ ID NO: 717632 - DNA, 25 bp, Homo sapien
gaactggtaagacaagtgcctcccc

SEQ ID NO: 717633 - DNA, 25 bp, Homo sapien
gccatgatggcggatgtcacagcac

SEQ ID NO: 717634 - DNA, 25 bp, Homo sapien
gcagcagtgaggtcaccaactccaa

SEQ ID NO: 717635 - DNA, 25 bp, Homo sapien
cggtacttccggaaatcttccatca

SEQ ID NO: 717636 - DNA, 25 bp, Homo sapien
tcttccatcatggtgcgccttctct

SEQ ID NO: 717637 - DNA, 25 bp, Homo sapien
tccggaaatcttccatcatggtgcg

SEQ ID NO: 717638 - DNA, 25 bp, Homo sapien
aactccaggcgctcgtttttctgct

SEQ ID NO: 717639 - DNA, 25 bp, Homo sapien
ccagtgggaaggaacgcaggagtcc

SEQ ID NO: 717640 - DNA, 25 bp, Homo sapien
ggacaaagggcgcagatcacccatg

SEQ ID NO: 717641 - DNA, 25 bp, Homo sapien
cagatcacccatgggggcacatgcc

SEQ ID NO: 717642 - DNA, 25 bp, Homo sapien
cacatgcctagtggcaccgccgagg

SEQ ID NO: 717643 - DNA, 25 bp, Homo sapien
cacgttgctgtccagctcgtcagtg

SEQ ID NO: 717644 - DNA, 25 bp, Homo sapien
gattcccgaggggaatgatttcttc

SEQ ID NO: 717645 - DNA, 25 bp, Homo sapien
cctgattcccgaggggaatgatttc

SEQ ID NO: 717646 - DNA, 25 bp, Homo sapien
gttgctgtccagctcgtcagtgtcc

SEQ ID NO: 717647 - DNA, 25 bp, Homo sapien
gctgacgttgagtcccgcaagagga

SEQ ID NO: 717648 - DNA, 25 bp, Homo sapien
ctagcacaggtatcaggaaatggcc

SEQ ID NO: 717649 - DNA, 25 bp, Homo sapien
taaacggcaccacctcaaaaggctg

SEQ ID NO: 717650 - DNA, 25 bp, Homo sapien
tggatagacaggcatggcggcccta

SEQ ID NO: 717651 - DNA, 25 bp, Homo sapien
gaggaaccgcggctcacactcggga

SEQ ID NO: 717652 - DNA, 25 bp, Homo sapien
gctcacactcgggagtcctgtagct

SEQ ID NO: 717653 - DNA, 25 bp, Homo sapien
agtcctgtagctcagcgcgggaaca

SEQ ID NO: 717654 - DNA, 25 bp, Homo sapien
tgcaacagaggaaccgcggctcaca

SEQ ID NO: 717655 - DNA, 25 bp, Homo sapien
tggcagaatccaggcgcagtcacag

SEQ ID NO: 717656 - DNA, 25 bp, Homo sapien
gtcacgcggcttcctgcaggacggc

SEQ ID NO: 717657 - DNA, 25 bp, Homo sapien
agaatccaggcgcagtcacagtcca

SEQ ID NO: 717658 - DNA, 25 bp, Homo sapien
gagtcacgcggcttcctgcaggacg

SEQ ID NO: 717659 - DNA, 25 bp, Homo sapien
ttaaatcccccactgcagacaccag

SEQ ID NO: 717660 - DNA, 25 bp, Homo sapien
taaatcccccactgcagacaccagg

SEQ ID NO: 717661 - DNA, 25 bp, Homo sapien
aaatcccccactgcagacaccaggg

SEQ ID NO: 717662 - DNA, 25 bp, Homo sapien
aatcccccactgcagacaccagggg

SEQ ID NO: 717663 - DNA, 25 bp, Homo sapien
ggagccaacgccggcggttccaaca

SEQ ID NO: 717664 - DNA, 25 bp, Homo sapien
tcggagccaacgccggcggttccaa

SEQ ID NO: 717665 - DNA, 25 bp, Homo sapien
ttcggagccaacgccggcggttcca

SEQ ID NO: 717666 - DNA, 25 bp, Homo sapien
tcaacggaaatgctgctcggctgtg

SEQ ID NO: 717667 - DNA, 25 bp, Homo sapien
tgtacaggcaccgtggaaacatcac

SEQ ID NO: 717668 - DNA, 25 bp, Homo sapien
aaggtgccgccagtggcgtcgctaa

SEQ ID NO: 717669 - DNA, 25 bp, Homo sapien
ttcaacctgcggagaaaaccggcca

SEQ ID NO: 717670 - DNA, 25 bp, Homo sapien
tcggcacactagaatttaagcagca

SEQ ID NO: 717671 - DNA, 25 bp, Homo sapien
gcaggactgcgacaattctagaact

SEQ ID NO: 717672 - DNA, 25 bp, Homo sapien
gaaatgtagggctcccaaaaaagca

SEQ ID NO: 717673 - DNA, 25 bp, Homo sapien
ctgtcatatggtagaactgtgtgcc

SEQ ID NO: 717674 - DNA, 25 bp, Homo sapien
cattagtggctggtctttgggctcc

SEQ ID NO: 717675 - DNA, 25 bp, Homo sapien
ttagtggctggtctttgggctccat

SEQ ID NO: 717676 - DNA, 25 bp, Homo sapien
attagtggctggtctttgggctcca

SEQ ID NO: 717677 - DNA, 25 bp, Homo sapien
ggctgctctgggatctgctcagtct

SEQ ID NO: 717678 - DNA, 25 bp, Homo sapien
aggcagtcaccagggcggctgctct

SEQ ID NO: 717679 - DNA, 25 bp, Homo sapien
cggctgctctgggatctgctcagtc

SEQ ID NO: 717680 - DNA, 25 bp, Homo sapien
ctgcaggcagtcaccagggcggctg

SEQ ID NO: 717681 - DNA, 25 bp, Homo sapien
ttgtgggcgatgaccgcggctccct

SEQ ID NO: 717682 - DNA, 25 bp, Homo sapien
tgagcgggtggattcgaagtgccac

SEQ ID NO: 717683 - DNA, 25 bp, Homo sapien
tccttcagttctgcgtcattgagcg

SEQ ID NO: 717684 - DNA, 25 bp, Homo sapien
cactttgtgggcgatgaccgcggct

SEQ ID NO: 717685 - DNA, 25 bp, Homo sapien
gggaccggcgtgttcgcgccacgtc

SEQ ID NO: 717686 - DNA, 25 bp, Homo sapien
gtcgaagatgaaggtccgctcccgg

SEQ ID NO: 717687 - DNA, 25 bp, Homo sapien
gaagatgaaggtccgctcccgggac

SEQ ID NO: 717688 - DNA, 25 bp, Homo sapien
cctgtcgaagatgaaggtccgctcc

SEQ ID NO: 717689 - DNA, 25 bp, Homo sapien
acgcagggatggcaggggcaggtgg

SEQ ID NO: 717690 - DNA, 25 bp, Homo sapien
aggaggacgcagggatggcaggggc

SEQ ID NO: 717691 - DNA, 25 bp, Homo sapien
gcagggatggcaggggcaggtggag

SEQ ID NO: 717692 - DNA, 25 bp, Homo sapien
agggatggcaggggcaggtggagac

SEQ ID NO: 717693 - DNA, 25 bp, Homo sapien
tatactttgtctctgtgtctttttc

SEQ ID NO: 717694 - DNA, 25 bp, Homo sapien
ctctgtgtctttttcttttccaagt

SEQ ID NO: 717695 - DNA, 25 bp, Homo sapien
tgtgtctttttcttttccaagtctc

SEQ ID NO: 717696 - DNA, 25 bp, Homo sapien
ttcttttccaagtctctcgttccac

SEQ ID NO: 717697 - DNA, 25 bp, Homo sapien
tgacaccacatgtgctcacaacgcg

SEQ ID NO: 717698 - DNA, 25 bp, Homo sapien
aacgcgcctgcttctccatttggtc

SEQ ID NO: 717699 - DNA, 25 bp, Homo sapien
catgcgacctcttgtagggtgcttc

SEQ ID NO: 717700 - DNA, 25 bp, Homo sapien
tgtgaaacaggcacgatgaagcctc

SEQ ID NO: 717701 - DNA, 25 bp, Homo sapien
ggcctggagagagcatgaaatcctc

SEQ ID NO: 717702 - DNA, 25 bp, Homo sapien
aaatcctccgttgggctttgtcttg

SEQ ID NO: 717703 - DNA, 25 bp, Homo sapien
tgtcttggggccaaacatctcccaa

SEQ ID NO: 717704 - DNA, 25 bp, Homo sapien
caggaagggaagtcacttggctgca

SEQ ID NO: 717705 - DNA, 25 bp, Homo sapien
gaatccagggatgagcttcaggtgc

SEQ ID NO: 717706 - DNA, 25 bp, Homo sapien
ctgaatccagggatgagcttcaggt

SEQ ID NO: 717707 - DNA, 25 bp, Homo sapien
tgaatccagggatgagcttcaggtg

SEQ ID NO: 717708 - DNA, 25 bp, Homo sapien
aatccagggatgagcttcaggtgcc

SEQ ID NO: 717709 - DNA, 25 bp, Homo sapien
gctgccgttgtgagcgaatcctcta

SEQ ID NO: 717710 - DNA, 25 bp, Homo sapien
agtggcacgatcaggccttgtattc

SEQ ID NO: 717711 - DNA, 25 bp, Homo sapien
ccgccacgtggcgtaagtgtgtttt

SEQ ID NO: 717712 - DNA, 25 bp, Homo sapien
gattgagcccctgtaactttccatg

SEQ ID NO: 717713 - DNA, 25 bp, Homo sapien
taatatatatggagcggcctggatt

SEQ ID NO: 717714 - DNA, 25 bp, Homo sapien
cgggaacttcccgtgcagaatctga

SEQ ID NO: 717715 - DNA, 25 bp, Homo sapien
ggatttctgcgtatagataagcccc

SEQ ID NO: 717716 - DNA, 25 bp, Homo sapien
gcgatgctgcgttgccaagtgagca

SEQ ID NO: 717717 - DNA, 25 bp, Homo sapien
cccgcgactagcggaccccccagag

SEQ ID NO: 717718 - DNA, 25 bp, Homo sapien
gcgactagcggaccccccagaggca

SEQ ID NO: 717719 - DNA, 25 bp, Homo sapien
cgcgactagcggaccccccagaggc

SEQ ID NO: 717720 - DNA, 25 bp, Homo sapien
ccgcgactagcggaccccccagagg

SEQ ID NO: 717721 - DNA, 25 bp, Homo sapien
gatttctcgtccagaccccgaggag

SEQ ID NO: 717722 - DNA, 25 bp, Homo sapien
cactgttcccggactaaatgcacgg

SEQ ID NO: 717723 - DNA, 25 bp, Homo sapien
catttaagggataccctgagcgacc

SEQ ID NO: 717724 - DNA, 25 bp, Homo sapien
ccgcagaggaggtctaagtcccact

SEQ ID NO: 717725 - DNA, 25 bp, Homo sapien
aacactatggcttgttgtgctgcct

SEQ ID NO: 717726 - DNA, 25 bp, Homo sapien
gctgcctgccagacggagcctctgc

SEQ ID NO: 717727 - DNA, 25 bp, Homo sapien
cttgttgtgctgcctgccagacgga

SEQ ID NO: 717728 - DNA, 25 bp, Homo sapien
ggcttgttgtgctgcctgccagacg

SEQ ID NO: 717729 - DNA, 25 bp, Homo sapien
tattcgaatactccttttggtggct

SEQ ID NO: 717730 - DNA, 25 bp, Homo sapien
gctcacctccgcgtggacattaatg

SEQ ID NO: 717731 - DNA, 25 bp, Homo sapien
gggctactcagattccccaaagaca

SEQ ID NO: 717732 - DNA, 25 bp, Homo sapien
taatgacgggcttcgttagcaaggg

SEQ ID NO: 717733 - DNA, 25 bp, Homo sapien
tgggctgcctggaacttacacacag

SEQ ID NO: 717734 - DNA, 25 bp, Homo sapien
tcgctgtagtcaacaaaaatgtgga

SEQ ID NO: 717735 - DNA, 25 bp, Homo sapien
ttatgctactgacacaaagaccaga

SEQ ID NO: 717736 - DNA, 25 bp, Homo sapien
taaaacctccatcgtgagacacatt

SEQ ID NO: 717737 - DNA, 25 bp, Homo sapien
ctgccgccgtccacgaattctgtac

SEQ ID NO: 717738 - DNA, 25 bp, Homo sapien
tcagtcacatcgccgacataggcag

SEQ ID NO: 717739 - DNA, 25 bp, Homo sapien
acatcgccgacataggcagacgcca

SEQ ID NO: 717740 - DNA, 25 bp, Homo sapien
tcacatcgccgacataggcagacgc

SEQ ID NO: 717741 - DNA, 25 bp, Homo sapien
ctgcagagccggggcatcctgctgg

SEQ ID NO: 717742 - DNA, 25 bp, Homo sapien
cgtagcggcgccagaacttgttgaa

SEQ ID NO: 717743 - DNA, 25 bp, Homo sapien
tgtcccagtacacgatgatcagcag

SEQ ID NO: 717744 - DNA, 25 bp, Homo sapien
gaaactcgtcgacatcggagtcggc

SEQ ID NO: 717745 - DNA, 25 bp, Homo sapien
ggcgaacttgcggtagaactcctcg

SEQ ID NO: 717746 - DNA, 25 bp, Homo sapien
caggtgcggcctgacttcaagtgca

SEQ ID NO: 717747 - DNA, 25 bp, Homo sapien
tctggaaggatttgtcggctaccct

SEQ ID NO: 717748 - DNA, 25 bp, Homo sapien
aaaaaactggagtgcgcgtgcgtca

SEQ ID NO: 717749 - DNA, 25 bp, Homo sapien
tcaggttccaggcacgcgagaaaaa

SEQ ID NO: 717750 - DNA, 25 bp, Homo sapien
tgccacgacaccgatgaacctagag

SEQ ID NO: 717751 - DNA, 25 bp, Homo sapien
tgaagtacttcagtcccaaaaggac

SEQ ID NO: 717752 - DNA, 25 bp, Homo sapien
tggtggtggcacgacaatacgaatg

SEQ ID NO: 717753 - DNA, 25 bp, Homo sapien
cctagaggacattgcatgaggtgaa

SEQ ID NO: 717754 - DNA, 25 bp, Homo sapien
gaatcaaagtgggttctccccgctc

SEQ ID NO: 717755 - DNA, 25 bp, Homo sapien
taaattttccagttgtacgatgcca

SEQ ID NO: 717756 - DNA, 25 bp, Homo sapien
caaaggtctctacgcagtgtggtgc

SEQ ID NO: 717757 - DNA, 25 bp, Homo sapien
tgtggtgctgcgcatcaggcaaaca

SEQ ID NO: 717758 - DNA, 25 bp, Homo sapien
gatgaatgcagctggcctcatcgga

SEQ ID NO: 717759 - DNA, 25 bp, Homo sapien
gaacaaacttggaacacaactccta

SEQ ID NO: 717760 - DNA, 25 bp, Homo sapien
aactcctacaccctctggaagaagg

SEQ ID NO: 717761 - DNA, 25 bp, Homo sapien
cctcatcggagggtttgcaggaaca

SEQ ID NO: 717762 - DNA, 25 bp, Homo sapien
cagttggtctcagttccgggacggc

SEQ ID NO: 717763 - DNA, 25 bp, Homo sapien
gttaattacgtccatgcaagccaag

SEQ ID NO: 717764 - DNA, 25 bp, Homo sapien
tatgtgaaacgctagaaatccaacc

SEQ ID NO: 717765 - DNA, 25 bp, Homo sapien
tcacagctaagagcactgggtctca

SEQ ID NO: 717766 - DNA, 25 bp, Homo sapien
tgagcggcggcattcttcttggcag

SEQ ID NO: 717767 - DNA, 25 bp, Homo sapien
ggtggtaacttcacacggccggaga

SEQ ID NO: 717768 - DNA, 25 bp, Homo sapien
tctaccagataaacctgagcggcgg

SEQ ID NO: 717769 - DNA, 25 bp, Homo sapien
caagaagtatcgttgactcccgacc

SEQ ID NO: 717770 - DNA, 25 bp, Homo sapien
gctgggttctcactgatcctgtgcc

SEQ ID NO: 717771 - DNA, 25 bp, Homo sapien
acagatgccacaacggccggcaatg

SEQ ID NO: 717772 - DNA, 25 bp, Homo sapien
tttccttgtcaacggcctgaggtcc

SEQ ID NO: 717773 - DNA, 25 bp, Homo sapien
ggcaatggtcccacgaagtgccctt

SEQ ID NO: 717774 - DNA, 25 bp, Homo sapien
ttctcatggcaggtaaggaacggga

SEQ ID NO: 717775 - DNA, 25 bp, Homo sapien
aaggtgctcgggacaacagacaaag

SEQ ID NO: 717776 - DNA, 25 bp, Homo sapien
tggctccgtcatccacagacatagt

SEQ ID NO: 717777 - DNA, 25 bp, Homo sapien
cagacatagttcaggcaccgccttg

SEQ ID NO: 717778 - DNA, 25 bp, Homo sapien
tcttactggacccagtggctgggca

SEQ ID NO: 717779 - DNA, 25 bp, Homo sapien
tcttggcagaatgactcgaggctct

SEQ ID NO: 717780 - DNA, 25 bp, Homo sapien
cacatcagggctggatcgctgggac

SEQ ID NO: 717781 - DNA, 25 bp, Homo sapien
ccacagcaagaagtacctttgaggg

SEQ ID NO: 717782 - DNA, 25 bp, Homo sapien
agctacttggggaagaagcgcttga

SEQ ID NO: 717783 - DNA, 25 bp, Homo sapien
tgacgggagtttcccatgattctgg

SEQ ID NO: 717784 - DNA, 25 bp, Homo sapien
gagtttcccatgattctgggctcaa

SEQ ID NO: 717785 - DNA, 25 bp, Homo sapien
caccgtgtggacctgacgggagttt

SEQ ID NO: 717786 - DNA, 25 bp, Homo sapien
tggacctgacgggagtttcccatga

SEQ ID NO: 717787 - DNA, 25 bp, Homo sapien
ccactgactggtgggaagagatgcc

SEQ ID NO: 717788 - DNA, 25 bp, Homo sapien
catttgctgagtggccgctgcttcc

SEQ ID NO: 717789 - DNA, 25 bp, Homo sapien
cctgggactgggttttccggctcag

SEQ ID NO: 717790 - DNA, 25 bp, Homo sapien
agagatgccacgttcctgcccttgg

SEQ ID NO: 717791 - DNA, 25 bp, Homo sapien
tacatattcagcacaatcccggcca

SEQ ID NO: 717792 - DNA, 25 bp, Homo sapien
ggaggaattcaaccctaagaccagc

SEQ ID NO: 717793 - DNA, 25 bp, Homo sapien
gcaaggcttatatgctgaaaaagac

SEQ ID NO: 717794 - DNA, 25 bp, Homo sapien
gcagtgctcctcgaattgatctaca

SEQ ID NO: 717795 - DNA, 25 bp, Homo sapien
caggaaccagtcaggaatggtgtgc

SEQ ID NO: 717796 - DNA, 25 bp, Homo sapien
catgcccggctgattgtataatctt

SEQ ID NO: 717797 - DNA, 25 bp, Homo sapien
taaagttggtacatacaggaaccag

SEQ ID NO: 717798 - DNA, 25 bp, Homo sapien
tctgtgccttaaactgagcctcggt

SEQ ID NO: 717799 - DNA, 25 bp, Homo sapien
tgcaaaatggagcaacaacagtctc

SEQ ID NO: 717800 - DNA, 25 bp, Homo sapien
gatgaagtttaatgcgtagacctgg

SEQ ID NO: 717801 - DNA, 25 bp, Homo sapien
ggcatcccatgtacccagacgttgg

SEQ ID NO: 717802 - DNA, 25 bp, Homo sapien
tccactgcgtcatttctgcatctgt

SEQ ID NO: 717803 - DNA, 25 bp, Homo sapien
gcattgctgtaacactattaacgaa

SEQ ID NO: 717804 - DNA, 25 bp, Homo sapien
tgcgtgctatgtatctccagacaaa

SEQ ID NO: 717805 - DNA, 25 bp, Homo sapien
gcagatgcagagtaaacatgtcaca

SEQ ID NO: 717806 - DNA, 25 bp, Homo sapien
cactattaacgaagctacagaattt

SEQ ID NO: 717807 - DNA, 25 bp, Homo sapien
gtgcgcgtgctgagtgaccactgcc

SEQ ID NO: 717808 - DNA, 25 bp, Homo sapien
ccggagcacaaggtgctacagttcc

SEQ ID NO: 717809 - DNA, 25 bp, Homo sapien
tacagttcccatgccgtcagaggcc

SEQ ID NO: 717810 - DNA, 25 bp, Homo sapien
ctgggacgcggagcacttccacgtc

SEQ ID NO: 717811 - DNA, 25 bp, Homo sapien
gagcaggtgtctagcatcttcccgc

SEQ ID NO: 717812 - DNA, 25 bp, Homo sapien
ccgggggagccctttgaggtgacag

SEQ ID NO: 717813 - DNA, 25 bp, Homo sapien
cggagcaggtgtctagcatcttccc

SEQ ID NO: 717814 - DNA, 25 bp, Homo sapien
gcaggtgtctagcatcttcccgctg

SEQ ID NO: 717815 - DNA, 25 bp, Homo sapien
aggcaggagagacgggctccacagc

SEQ ID NO: 717816 - DNA, 25 bp, Homo sapien
ggacagtcacgaccaccttgaggcc

SEQ ID NO: 717817 - DNA, 25 bp, Homo sapien
acggccagccctgctacgagccagg

SEQ ID NO: 717818 - DNA, 25 bp, Homo sapien
tcctaccaggacgtccgggcacagg

SEQ ID NO: 717819 - DNA, 25 bp, Homo sapien
caacgctgttagccccatatcccag

SEQ ID NO: 717820 - DNA, 25 bp, Homo sapien
aagccaacgctgttagccccatatc

SEQ ID NO: 717821 - DNA, 25 bp, Homo sapien
gccaacgctgttagccccatatccc

SEQ ID NO: 717822 - DNA, 25 bp, Homo sapien
acgctgttagccccatatcccagcc

SEQ ID NO: 717823 - DNA, 25 bp, Homo sapien
ccaggctgggtgctcggtgctggct

SEQ ID NO: 717824 - DNA, 25 bp, Homo sapien
tgggtacattgacacctgactccag

SEQ ID NO: 717825 - DNA, 25 bp, Homo sapien
ggaattccacggaagctctgccagg

SEQ ID NO: 717826 - DNA, 25 bp, Homo sapien
ccaggctcccggaaagatgaggcca

SEQ ID NO: 717827 - DNA, 25 bp, Homo sapien
ccacaggggccttggagcaagtgct

SEQ ID NO: 717828 - DNA, 25 bp, Homo sapien
gtttccccatccgtgtaatgaggac

SEQ ID NO: 717829 - DNA, 25 bp, Homo sapien
tggtgcccaccctgctattgccggc

SEQ ID NO: 717830 - DNA, 25 bp, Homo sapien
caccctgctattgccggctcccagc

SEQ ID NO: 717831 - DNA, 25 bp, Homo sapien
ggttacagagcagcacgccgaggtt

SEQ ID NO: 717832 - DNA, 25 bp, Homo sapien
taaaaatcaatgagatatttcacct

SEQ ID NO: 717833 - DNA, 25 bp, Homo sapien
tctgtagacagggaggcttgaaccc

SEQ ID NO: 717834 - DNA, 25 bp, Homo sapien
cccaatatgtcaaaatccttatcct

SEQ ID NO: 717835 - DNA, 25 bp, Homo sapien
ctggaggaccccacggcgtccagcc

SEQ ID NO: 717836 - DNA, 25 bp, Homo sapien
cacggtctgccccatgaggattagg

SEQ ID NO: 717837 - DNA, 25 bp, Homo sapien
gggccacggtctgccccatgaggat

SEQ ID NO: 717838 - DNA, 25 bp, Homo sapien
tgtggaaaagctgggccctgacttc

SEQ ID NO: 717839 - DNA, 25 bp, Homo sapien
gctccagcaacccacgtgtgtgaag

SEQ ID NO: 717840 - DNA, 25 bp, Homo sapien
gtcaggcttcctcaagtccaggctc

SEQ ID NO: 717841 - DNA, 25 bp, Homo sapien
gggtcgcagatgacagcaccttcgc

SEQ ID NO: 717842 - DNA, 25 bp, Homo sapien
gcaccttcgcatctgagctaaagcc

SEQ ID NO: 717843 - DNA, 25 bp, Homo sapien
ccctgcaggtcggaacggaatgtcc

SEQ ID NO: 717844 - DNA, 25 bp, Homo sapien
tgtccaggacccacgtagactcaga

SEQ ID NO: 717845 - DNA, 25 bp, Homo sapien
tgggccggaacaagaaccagcttcc

SEQ ID NO: 717846 - DNA, 25 bp, Homo sapien
tgttaagcagcttaccaggcgggcc

SEQ ID NO: 717847 - DNA, 25 bp, Homo sapien
gacagcacgtgattctcatggagtg

SEQ ID NO: 717848 - DNA, 25 bp, Homo sapien
ccctggattagggtggacagcacgt

SEQ ID NO: 717849 - DNA, 25 bp, Homo sapien
tatctttcacgcagagtggcagagc

SEQ ID NO: 717850 - DNA, 25 bp, Homo sapien
gctagaagggacagtgccacaggat

SEQ ID NO: 717851 - DNA, 25 bp, Homo sapien
ctcatacaatacgtgtccagcctga

SEQ ID NO: 717852 - DNA, 25 bp, Homo sapien
tcatacaatacgtgtccagcctgag

SEQ ID NO: 717853 - DNA, 25 bp, Homo sapien
ccctctgagctttgggtccttgtgg

SEQ ID NO: 717854 - DNA, 25 bp, Homo sapien
ctctgagctttgggtccttgtggcc

SEQ ID NO: 717855 - DNA, 25 bp, Homo sapien
tccgtaggacctgagagctggtgtt

SEQ ID NO: 717856 - DNA, 25 bp, Homo sapien
tgagagaggccacctccgtaggacc

SEQ ID NO: 717857 - DNA, 25 bp, Homo sapien
ctggtgttgggctccactcatccat

SEQ ID NO: 717858 - DNA, 25 bp, Homo sapien
cctgagcatttgctccatgcccaga

SEQ ID NO: 717859 - DNA, 25 bp, Homo sapien
cagcagctggacaactaggatcata

SEQ ID NO: 717860 - DNA, 25 bp, Homo sapien
tacttattctccacgcagcagctgg

SEQ ID NO: 717861 - DNA, 25 bp, Homo sapien
actaggatcatagccactcacacac

SEQ ID NO: 717862 - DNA, 25 bp, Homo sapien
gctttacttattctccacgcagcag

SEQ ID NO: 717863 - DNA, 25 bp, Homo sapien
ctctacctgaatgtcagccgcaaga

SEQ ID NO: 717864 - DNA, 25 bp, Homo sapien
cagccgcaagacagcagcgacctgg

SEQ ID NO: 717865 - DNA, 25 bp, Homo sapien
agccgcaagacagcagcgacctggt

SEQ ID NO: 717866 - DNA, 25 bp, Homo sapien
ctacctgaatgtcagccgcaagaca

SEQ ID NO: 717867 - DNA, 25 bp, Homo sapien
cgaagcccgtcgctccggcggcgca

SEQ ID NO: 717868 - DNA, 25 bp, Homo sapien
gcgcggcgcgcccttccccgtgcgc

SEQ ID NO: 717869 - DNA, 25 bp, Homo sapien
tgccttgcaccgacccgaagcccgt

SEQ ID NO: 717870 - DNA, 25 bp, Homo sapien
ttgcaccgacccgaagcccgtcgct

SEQ ID NO: 717871 - DNA, 25 bp, Homo sapien
agcaggcaggcgagcagcgcgcccg

SEQ ID NO: 717872 - DNA, 25 bp, Homo sapien
agcaggcgccggccgcagcgcttga

SEQ ID NO: 717873 - DNA, 25 bp, Homo sapien
ggcgccggccgcagcgcttgagcat

SEQ ID NO: 717874 - DNA, 25 bp, Homo sapien
aggcaggcgagcagcgcgcccgcca

SEQ ID NO: 717875 - DNA, 25 bp, Homo sapien
gaagtactcggacagactgtgcacg

SEQ ID NO: 717876 - DNA, 25 bp, Homo sapien
gcggcggcgggtcggcggtgagcac

SEQ ID NO: 717877 - DNA, 25 bp, Homo sapien
gtgagcaggctgaagtactcggaca

SEQ ID NO: 717878 - DNA, 25 bp, Homo sapien
agactgtgcacgtcgcggaccagcg

SEQ ID NO: 717879 - DNA, 25 bp, Homo sapien
gtcttcctataccttgtgaaccttc

SEQ ID NO: 717880 - DNA, 25 bp, Homo sapien
gaaggttcacaaggtataggaagac

SEQ ID NO: 717881 - DNA, 25 bp, Homo sapien
cttgtggcgcgagatccaggtctcc

SEQ ID NO: 717882 - DNA, 25 bp, Homo sapien
aggcgcgcgcggtggaactttttgg

SEQ ID NO: 717883 - DNA, 25 bp, Homo sapien
cgcgcgcggtggaactttttggtgg

SEQ ID NO: 717884 - DNA, 25 bp, Homo sapien
catctccttgtggcgcgagatccag

SEQ ID NO: 717885 - DNA, 25 bp, Homo sapien
acggagcgcgtagctgcacacaagg

SEQ ID NO: 717886 - DNA, 25 bp, Homo sapien
ggcccgacgcctttctcgctggaga

SEQ ID NO: 717887 - DNA, 25 bp, Homo sapien
taccttgcccaaggggccggcgtga

SEQ ID NO: 717888 - DNA, 25 bp, Homo sapien
agcacgccagcagcggttcccacgg

SEQ ID NO: 717889 - DNA, 25 bp, Homo sapien
cccagcaattgtggccgctgtggtg

SEQ ID NO: 717890 - DNA, 25 bp, Homo sapien
gccgcgattcaaagaaacacaggat

SEQ ID NO: 717891 - DNA, 25 bp, Homo sapien
aggatgccaagttctccccagcaat

SEQ ID NO: 717892 - DNA, 25 bp, Homo sapien
attgttcctggagccgcgattcaaa

SEQ ID NO: 717893 - DNA, 25 bp, Homo sapien
ggctgagtgcaaaacccagggtgta

SEQ ID NO: 717894 - DNA, 25 bp, Homo sapien
caaggctacggagattaaagtcacc

SEQ ID NO: 717895 - DNA, 25 bp, Homo sapien
tacgggcaatgctctgaccaaggga

SEQ ID NO: 717896 - DNA, 25 bp, Homo sapien
cactgcgccgctgggttaaaaggaa

SEQ ID NO: 717897 - DNA, 25 bp, Homo sapien
caggcattgtccgccagctttgtcc

SEQ ID NO: 717898 - DNA, 25 bp, Homo sapien
catcttccccgtcagtgaagatgaa

SEQ ID NO: 717899 - DNA, 25 bp, Homo sapien
ggcctcatcttccccgtcagtgaag

SEQ ID NO: 717900 - DNA, 25 bp, Homo sapien
cttccccgtcagtgaagatgaacgt

SEQ ID NO: 717901 - DNA, 25 bp, Homo sapien
ctcatcttccccgtcagtgaagatg

SEQ ID NO: 717902 - DNA, 25 bp, Homo sapien
ctgtgggcggccgagcagtttgtga

SEQ ID NO: 717903 - DNA, 25 bp, Homo sapien
ttcctgccggactcgatgaagcggt

SEQ ID NO: 717904 - DNA, 25 bp, Homo sapien
gagcagtttgtgatgaccacgttgc

SEQ ID NO: 717905 - DNA, 25 bp, Homo sapien
atgaagcggtcatactccacggcca

SEQ ID NO: 717906 - DNA, 25 bp, Homo sapien
gtgtgcgggtagctggccagcagcc

SEQ ID NO: 717907 - DNA, 25 bp, Homo sapien
ttgttctcgctgacccgctccatgg

SEQ ID NO: 717908 - DNA, 25 bp, Homo sapien
tgccgacgtagacgtcccgcgtgtg

SEQ ID NO: 717909 - DNA, 25 bp, Homo sapien
caggttgacgtagttgtcatcgtcc

SEQ ID NO: 717910 - DNA, 25 bp, Homo sapien
ccgcccgtggcaaaccagaagtgga

SEQ ID NO: 717911 - DNA, 25 bp, Homo sapien
gccagcccacggctgatgcagaagc

SEQ ID NO: 717912 - DNA, 25 bp, Homo sapien
tcagagccagcccacggctgatgca

SEQ ID NO: 717913 - DNA, 25 bp, Homo sapien
ctggcccacgggctcatcttcagag

SEQ ID NO: 717914 - DNA, 25 bp, Homo sapien
tccgctcagccgtattcatgaagtg

SEQ ID NO: 717915 - DNA, 25 bp, Homo sapien
tcagccgtattcatgaagtgacccc

SEQ ID NO: 717916 - DNA, 25 bp, Homo sapien
cgatgtagccgatggtgcagtcatc

SEQ ID NO: 717917 - DNA, 25 bp, Homo sapien
aggcagccggatccgctcagccgta

SEQ ID NO: 717918 - DNA, 25 bp, Homo sapien
cccactgcgcccctctcggcagcca

SEQ ID NO: 717919 - DNA, 25 bp, Homo sapien
gagtcctggcggggcccggaggatg

SEQ ID NO: 717920 - DNA, 25 bp, Homo sapien
cctgtgctctcggagtcctggcggg

SEQ ID NO: 717921 - DNA, 25 bp, Homo sapien
ttcctgtgctctcggagtcctggcg

SEQ ID NO: 717922 - DNA, 25 bp, Homo sapien
gtggacggcgttccgcttgttttca

SEQ ID NO: 717923 - DNA, 25 bp, Homo sapien
tcaaacataccgtagctcagcgtca

SEQ ID NO: 717924 - DNA, 25 bp, Homo sapien
caaacataccgtagctcagcgtcac

SEQ ID NO: 717925 - DNA, 25 bp, Homo sapien
cgagaagggccccttcacgtggacg

SEQ ID NO: 717926 - DNA, 25 bp, Homo sapien
ctagaagatggcagtgcggggacac

SEQ ID NO: 717927 - DNA, 25 bp, Homo sapien
gtgtgtccgggtacaggtggcagtg

SEQ ID NO: 717928 - DNA, 25 bp, Homo sapien
caccagggtgtgtccgggtacaggt

SEQ ID NO: 717929 - DNA, 25 bp, Homo sapien
gggtgtgtccgggtacaggtggcag

SEQ ID NO: 717930 - DNA, 25 bp, Homo sapien
gaagagaaaggcacctacgcatcgc

SEQ ID NO: 717931 - DNA, 25 bp, Homo sapien
tatttacagacacgcccactgtggg

SEQ ID NO: 717932 - DNA, 25 bp, Homo sapien
tattcacagcaaaaggacgtcacca

SEQ ID NO: 717933 - DNA, 25 bp, Homo sapien
ttactcttaagccacagcgtccagg

SEQ ID NO: 717934 - DNA, 25 bp, Homo sapien
agcatcctagacctgttcctcctgg

SEQ ID NO: 717935 - DNA, 25 bp, Homo sapien
ccagcaggcagctatagtgacgcca

SEQ ID NO: 717936 - DNA, 25 bp, Homo sapien
tatctacctgctccatgcggtgcac

SEQ ID NO: 717937 - DNA, 25 bp, Homo sapien
caaagtgaggcgatgatgtggactc

SEQ ID NO: 717938 - DNA, 25 bp, Homo sapien
ggcatcagctgctccgtgcctcagt

SEQ ID NO: 717939 - DNA, 25 bp, Homo sapien
agggaggtgcagcattaccagctgt

SEQ ID NO: 717940 - DNA, 25 bp, Homo sapien
taaaaaacaagcgtctggatctctg

SEQ ID NO: 717941 - DNA, 25 bp, Homo sapien
gaaaagcaccgcagagctgctgtat

SEQ ID NO: 717942 - DNA, 25 bp, Homo sapien
cacagtgtgtcgtctccttggagca

SEQ ID NO: 717943 - DNA, 25 bp, Homo sapien
acagtgtgtcgtctccttggagcag

SEQ ID NO: 717944 - DNA, 25 bp, Homo sapien
cagtgtgtcgtctccttggagcaga

SEQ ID NO: 717945 - DNA, 25 bp, Homo sapien
tcacagtgtgtcgtctccttggagc

SEQ ID NO: 717946 - DNA, 25 bp, Homo sapien
gtggtgggcacctgtaatcacagct

SEQ ID NO: 717947 - DNA, 25 bp, Homo sapien
aaaatacaaaaattagctaggcatg

SEQ ID NO: 717948 - DNA, 25 bp, Homo sapien
tactcaggaggctgaggcaggagaa

SEQ ID NO: 717949 - DNA, 25 bp, Homo sapien
taacacggtgagaccccgtccacta

SEQ ID NO: 717950 - DNA, 25 bp, Homo sapien
gtgctggccatgctcaggtccctag

SEQ ID NO: 717951 - DNA, 25 bp, Homo sapien
gcgaccacgtggaaaagagtcccca

SEQ ID NO: 717952 - DNA, 25 bp, Homo sapien
gacgaggccgactgctactgagcag

SEQ ID NO: 717953 - DNA, 25 bp, Homo sapien
aggtccctagacctggagggcctgc

SEQ ID NO: 717954 - DNA, 25 bp, Homo sapien
ggtctgggaatccgcgggcagccct

SEQ ID NO: 717955 - DNA, 25 bp, Homo sapien
ggccttccctggcgccggcccgcga

SEQ ID NO: 717956 - DNA, 25 bp, Homo sapien
cctcagggttgctggctcgggcgtc

SEQ ID NO: 717957 - DNA, 25 bp, Homo sapien
ctgccatggcaaccaggccgccgac

SEQ ID NO: 717958 - DNA, 25 bp, Homo sapien
ccaaggccggctccccggtgcccag

SEQ ID NO: 717959 - DNA, 25 bp, Homo sapien
gccggctccccggtgcccaggaaca

SEQ ID NO: 717960 - DNA, 25 bp, Homo sapien
cgtgtccaaggccggctccccggtg

SEQ ID NO: 717961 - DNA, 25 bp, Homo sapien
ccggctccccggtgcccaggaacat

SEQ ID NO: 717962 - DNA, 25 bp, Homo sapien
acctgcgggccgcagactcgcaggc

SEQ ID NO: 717963 - DNA, 25 bp, Homo sapien
agctccgtcacctgcgggccgcaga

SEQ ID NO: 717964 - DNA, 25 bp, Homo sapien
ccgcagactcgcaggcgcccagagg

SEQ ID NO: 717965 - DNA, 25 bp, Homo sapien
ccgtgagctccgtcacctgcgggcc

SEQ ID NO: 717966 - DNA, 25 bp, Homo sapien
tatgggatgtacctaaagcagggct

SEQ ID NO: 717967 - DNA, 25 bp, Homo sapien
taaagcagggctcaaagagaaacat

SEQ ID NO: 717968 - DNA, 25 bp, Homo sapien
tttatgggatgtacctaaagcaggg

SEQ ID NO: 717969 - DNA, 25 bp, Homo sapien
tgtacctaaagcagggctcaaagag

SEQ ID NO: 717970 - DNA, 25 bp, Homo sapien
cgaggcagaagatcaacgaggagtt

SEQ ID NO: 717971 - DNA, 25 bp, Homo sapien
gaggttgccacttatttccacagta

SEQ ID NO: 717972 - DNA, 25 bp, Homo sapien
cacagtaggttaagctcaatcagcc

SEQ ID NO: 717973 - DNA, 25 bp, Homo sapien
tccttcaagcactatctgaggttgc

SEQ ID NO: 717974 - DNA, 25 bp, Homo sapien
acatcagagtcaaaggtgactgcag

SEQ ID NO: 717975 - DNA, 25 bp, Homo sapien
atcagagtcaaaggtgactgcagac

SEQ ID NO: 717976 - DNA, 25 bp, Homo sapien
cacatcagagtcaaaggtgactgca

SEQ ID NO: 717977 - DNA, 25 bp, Homo sapien
catcagagtcaaaggtgactgcaga

SEQ ID NO: 717978 - DNA, 25 bp, Homo sapien
gcgatgtgggtggaggtttgtggaa

SEQ ID NO: 717979 - DNA, 25 bp, Homo sapien
ggcgatgtgggtggaggtttgtgga

SEQ ID NO: 717980 - DNA, 25 bp, Homo sapien
ttggcgatgtgggtggaggtttgtg

SEQ ID NO: 717981 - DNA, 25 bp, Homo sapien
tggcgatgtgggtggaggtttgtgg

SEQ ID NO: 717982 - DNA, 25 bp, Homo sapien
ggaaaagccaacacgtggattcaga

SEQ ID NO: 717983 - DNA, 25 bp, Homo sapien
gacagcaacatgtgagctcaacaca

SEQ ID NO: 717984 - DNA, 25 bp, Homo sapien
tggattcagaggtgccggacagcaa

SEQ ID NO: 717985 - DNA, 25 bp, Homo sapien
cacgagcgtggtgactctagtcaaa

SEQ ID NO: 717986 - DNA, 25 bp, Homo sapien
tccctgccgtcctgagggacctcca

SEQ ID NO: 717987 - DNA, 25 bp, Homo sapien
ctccctgccgtcctgagggacctcc

SEQ ID NO: 717988 - DNA, 25 bp, Homo sapien
gctccctgccgtcctgagggacctc

SEQ ID NO: 717989 - DNA, 25 bp, Homo sapien
gcttctgcggggtcagggacgctcg

SEQ ID NO: 717990 - DNA, 25 bp, Homo sapien
tggctttgcggttcccagccacagc

SEQ ID NO: 717991 - DNA, 25 bp, Homo sapien
gttgctggcagagcgcctgagatgt

SEQ ID NO: 717992 - DNA, 25 bp, Homo sapien
tctgtcagacagtcaggagtgccgc

SEQ ID NO: 717993 - DNA, 25 bp, Homo sapien
tctgaaggtgtctgtcagacagtca

SEQ ID NO: 717994 - DNA, 25 bp, Homo sapien
gggacgccagtccacgcatgctccc

SEQ ID NO: 717995 - DNA, 25 bp, Homo sapien
gcaacacagcgagattccgtctcta

SEQ ID NO: 717996 - DNA, 25 bp, Homo sapien
ggcaacacagcgagattccgtctct

SEQ ID NO: 717997 - DNA, 25 bp, Homo sapien
aacacagcgagattccgtctctaaa

SEQ ID NO: 717998 - DNA, 25 bp, Homo sapien
caacacagcgagattccgtctctaa

SEQ ID NO: 717999 - DNA, 25 bp, Homo sapien
tttaactcaataatctcgtcataca

SEQ ID NO: 718000 - DNA, 25 bp, Homo sapien
taactcaataatctcgtcatacata

SEQ ID NO: 718001 - DNA, 25 bp, Homo sapien
caataatctcgtcatacatatcttc

SEQ ID NO: 718002 - DNA, 25 bp, Homo sapien
actcaataatctcgtcatacatatc

SEQ ID NO: 718003 - DNA, 25 bp, Homo sapien
gatggcctggacattggaatcccgc

SEQ ID NO: 718004 - DNA, 25 bp, Homo sapien
gatgaaacactcagagcgtcctggt

SEQ ID NO: 718005 - DNA, 25 bp, Homo sapien
caaagatgcgccagtgaccaatgac

SEQ ID NO: 718006 - DNA, 25 bp, Homo sapien
gattgagcaagagtcagagtctcgc

SEQ ID NO: 718007 - DNA, 25 bp, Homo sapien
ccaatgcgtatacgccgcacacagg

SEQ ID NO: 718008 - DNA, 25 bp, Homo sapien
gcgtatacgccgcacacagtccccg

SEQ ID NO: 718009 - DNA, 25 bp, Homo sapien
gcacagccatccacacgaagctgcg

SEQ ID NO: 718010 - DNA, 25 bp, Homo sapien
cagccacgcacacgccaatgtgtat

SEQ ID NO: 718011 - DNA, 25 bp, Homo sapien
tccaggcgccggagcttcgttctca

SEQ ID NO: 718012 - DNA, 25 bp, Homo sapien
gctgctctatctgccggtccttcct

SEQ ID NO: 718013 - DNA, 25 bp, Homo sapien
ggagcttcgttctcatcaggtccac

SEQ ID NO: 718014 - DNA, 25 bp, Homo sapien
cgtcgctcttctgcacgtgcaatga

SEQ ID NO: 718015 - DNA, 25 bp, Homo sapien
ttgccccgtccgtgaagcgccagga

SEQ ID NO: 718016 - DNA, 25 bp, Homo sapien
taagcagattgagacatgaagacgg

SEQ ID NO: 718017 - DNA, 25 bp, Homo sapien
tgaagacggccttcggtgtagcccc

SEQ ID NO: 718018 - DNA, 25 bp, Homo sapien
cccgtccgtgaagcgccaggagctt

SEQ ID NO: 718019 - DNA, 25 bp, Homo sapien
gccagagtccgaacaaaatccgtgc

SEQ ID NO: 718020 - DNA, 25 bp, Homo sapien
aactggcatcgggccttttctctgc

SEQ ID NO: 718021 - DNA, 25 bp, Homo sapien
ccagagtccgaacaaaatccgtgcc

SEQ ID NO: 718022 - DNA, 25 bp, Homo sapien
ccaactggcatcgggccttttctct

SEQ ID NO: 718023 - DNA, 25 bp, Homo sapien
ttttgtgattctggtcaatcctcca

SEQ ID NO: 718024 - DNA, 25 bp, Homo sapien
caggtgatgacacgtagacacggca

SEQ ID NO: 718025 - DNA, 25 bp, Homo sapien
aagttgtagcccatttttgtgattc

SEQ ID NO: 718026 - DNA, 25 bp, Homo sapien
aatcctccaatcgaaatccttggcc

SEQ ID NO: 718027 - DNA, 25 bp, Homo sapien
tcctctgcttcagcccgttaatgac

SEQ ID NO: 718028 - DNA, 25 bp, Homo sapien
gatggtgccgtccttctccttgcac

SEQ ID NO: 718029 - DNA, 25 bp, Homo sapien
ctgttccagcttcaggatcctctgc

SEQ ID NO: 718030 - DNA, 25 bp, Homo sapien
ccagcttcaggatcctctgcttcag

SEQ ID NO: 718031 - DNA, 25 bp, Homo sapien
caggttggtagtcttcatatcggtc

SEQ ID NO: 718032 - DNA, 25 bp, Homo sapien
tagtcttcatatcggtctggagttt

SEQ ID NO: 718033 - DNA, 25 bp, Homo sapien
ctcgtagtatgtctccatggcgatc

SEQ ID NO: 718034 - DNA, 25 bp, Homo sapien
cgcatctcttccaggttggtagtct

SEQ ID NO: 718035 - DNA, 25 bp, Homo sapien
gcgggaactaagtggccgcacttca

SEQ ID NO: 718036 - DNA, 25 bp, Homo sapien
ctgcctacggccagaagcgggaact

SEQ ID NO: 718037 - DNA, 25 bp, Homo sapien
ggccgcacttcatctttccgttggg

SEQ ID NO: 718038 - DNA, 25 bp, Homo sapien
cagaagcgggaactaagtggccgca

SEQ ID NO: 718039 - DNA, 25 bp, Homo sapien
tttccggtggtttcagaacttgcca

SEQ ID NO: 718040 - DNA, 25 bp, Homo sapien
tccggtggtttcagaacttgccaag

SEQ ID NO: 718041 - DNA, 25 bp, Homo sapien
cggtggtttcagaacttgccaagag

SEQ ID NO: 718042 - DNA, 25 bp, Homo sapien
tctttccggtggtttcagaacttgc

SEQ ID NO: 718043 - DNA, 25 bp, Homo sapien
cacagcttgcaagcggccatcatac

SEQ ID NO: 718044 - DNA, 25 bp, Homo sapien
aaacacagcttgcaagcggccatca

SEQ ID NO: 718045 - DNA, 25 bp, Homo sapien
tccacaacgtgaaggcaacacacaa

SEQ ID NO: 718046 - DNA, 25 bp, Homo sapien
aggagcttccacaacgtgaaggcaa

SEQ ID NO: 718047 - DNA, 25 bp, Homo sapien
gcggcattgaacacgcgttggccat

SEQ ID NO: 718048 - DNA, 25 bp, Homo sapien
caacacgtggtcactatgaggagtc

SEQ ID NO: 718049 - DNA, 25 bp, Homo sapien
gaatctataacgaacacgggcggca

SEQ ID NO: 718050 - DNA, 25 bp, Homo sapien
tggaaacgtgtcaactctaaccctg

SEQ ID NO: 718051 - DNA, 25 bp, Homo sapien
gctcctggacactccgggacaagct

SEQ ID NO: 718052 - DNA, 25 bp, Homo sapien
agctcctggacactccgggacaagc

SEQ ID NO: 718053 - DNA, 25 bp, Homo sapien
ctcctggacactccgggacaagctc

SEQ ID NO: 718054 - DNA, 25 bp, Homo sapien
tcctggacactccgggacaagctca

SEQ ID NO: 718055 - DNA, 25 bp, Homo sapien
gccggggcttgctccactccacata

SEQ ID NO: 718056 - DNA, 25 bp, Homo sapien
aatgcgcctcagcagccggggcttg

SEQ ID NO: 718057 - DNA, 25 bp, Homo sapien
ctcagcagccggggcttgctccact

SEQ ID NO: 718058 - DNA, 25 bp, Homo sapien
ttctccagctccacaatgcgcctca

SEQ ID NO: 718059 - DNA, 25 bp, Homo sapien
cctcggagacgctcgtggtccttgt

SEQ ID NO: 718060 - DNA, 25 bp, Homo sapien
tgtgatctgactggctctgcggcgt

SEQ ID NO: 718061 - DNA, 25 bp, Homo sapien
tctgcggcgtgtgattttgagctct

SEQ ID NO: 718062 - DNA, 25 bp, Homo sapien
ccctcgtggctgtctgtgcagcgca

SEQ ID NO: 718063 - DNA, 25 bp, Homo sapien
tcctcgccctccctcgcgcactcca

SEQ ID NO: 718064 - DNA, 25 bp, Homo sapien
ctccctcgcgcactccagctccttc

SEQ ID NO: 718065 - DNA, 25 bp, Homo sapien
tcgccctccctcgcgcactccagct

SEQ ID NO: 718066 - DNA, 25 bp, Homo sapien
tccctcgcgcactccagctccttct

SEQ ID NO: 718067 - DNA, 25 bp, Homo sapien
tctttgccgagcaccaggttttcca

SEQ ID NO: 718068 - DNA, 25 bp, Homo sapien
gcctacgcgtggtcgacctcagggt

SEQ ID NO: 718069 - DNA, 25 bp, Homo sapien
gcttcctggctctcgcgaatggcat

SEQ ID NO: 718070 - DNA, 25 bp, Homo sapien
tccaccagcagttgatgggccgtgg

SEQ ID NO: 718071 - DNA, 25 bp, Homo sapien
aggatagaggacagtggcatgctct

SEQ ID NO: 718072 - DNA, 25 bp, Homo sapien
ttctgacagaattcagtcagatttc

SEQ ID NO: 718073 - DNA, 25 bp, Homo sapien
gtcttctgacagaattcagtcagat

SEQ ID NO: 718074 - DNA, 25 bp, Homo sapien
ctgacagaattcagtcagatttctc

SEQ ID NO: 718075 - DNA, 25 bp, Homo sapien
tgataagtaagtaggaggccaggcc

SEQ ID NO: 718076 - DNA, 25 bp, Homo sapien
tcactatgtgatgaaggccggcaca

SEQ ID NO: 718077 - DNA, 25 bp, Homo sapien
aacagtatgaacagaaggcattgca

SEQ ID NO: 718078 - DNA, 25 bp, Homo sapien
cagctatgacctgacaacaccagaa

SEQ ID NO: 718079 - DNA, 25 bp, Homo sapien
gaacttccgggcaatcctctttctc

SEQ ID NO: 718080 - DNA, 25 bp, Homo sapien
cttatgaggaacttccgggcaatcc

SEQ ID NO: 718081 - DNA, 25 bp, Homo sapien
ttggagcttgctggtaagtgtctga

SEQ ID NO: 718082 - DNA, 25 bp, Homo sapien
cttgctggtaagtgtctgaatctcc

SEQ ID NO: 718083 - DNA, 25 bp, Homo sapien
gggacctgggagtgtaatcttccta

SEQ ID NO: 718084 - DNA, 25 bp, Homo sapien
cttgggtgtctgcacatcttaacat

SEQ ID NO: 718085 - DNA, 25 bp, Homo sapien
taacatccctgacgaagatgccctg

SEQ ID NO: 718086 - DNA, 25 bp, Homo sapien
cctgcgtggccttgcgtgccctgcc

SEQ ID NO: 718087 - DNA, 25 bp, Homo sapien
agaggacgcttcttcacacggccgt

SEQ ID NO: 718088 - DNA, 25 bp, Homo sapien
tgcggctgcgcttatcaggtgagtc

SEQ ID NO: 718089 - DNA, 25 bp, Homo sapien
gagagacagcgtctaggcgagcaca

SEQ ID NO: 718090 - DNA, 25 bp, Homo sapien
gagagagctgttccacactggtctg

SEQ ID NO: 718091 - DNA, 25 bp, Homo sapien
ggaaattgaaggagtaagaggacaa

SEQ ID NO: 718092 - DNA, 25 bp, Homo sapien
agggacaaccagtatccggcaaggg

SEQ ID NO: 718093 - DNA, 25 bp, Homo sapien
cagtatccggcaaggggacaggata

SEQ ID NO: 718094 - DNA, 25 bp, Homo sapien
gaaattgaaggagtaagaggacaat

SEQ ID NO: 718095 - DNA, 25 bp, Homo sapien
tgcttgtacaccttccactgggcct

SEQ ID NO: 718096 - DNA, 25 bp, Homo sapien
gaatccggcggccagtcttgctcgc

SEQ ID NO: 718097 - DNA, 25 bp, Homo sapien
cagtcttgctcgcagtgcctgctgc

SEQ ID NO: 718098 - DNA, 25 bp, Homo sapien
gcggcgtctcttctcccatcagagc

SEQ ID NO: 718099 - DNA, 25 bp, Homo sapien
ttgtccgcgtgagatgtcccctgaa

SEQ ID NO: 718100 - DNA, 25 bp, Homo sapien
ttgctaagagctttgtccgcgtgag

SEQ ID NO: 718101 - DNA, 25 bp, Homo sapien
agctttgtccgcgtgagatgtcccc

SEQ ID NO: 718102 - DNA, 25 bp, Homo sapien
gtgagatgtcccctgaaagctgcct

SEQ ID NO: 718103 - DNA, 25 bp, Homo sapien
tgggcgatggggctcggaacgcggg

SEQ ID NO: 718104 - DNA, 25 bp, Homo sapien
caggtgtgcccgcagagcggactgg

SEQ ID NO: 718105 - DNA, 25 bp, Homo sapien
atggggctcggaacgcggggcacag

SEQ ID NO: 718106 - DNA, 25 bp, Homo sapien
cggactggatgatgacgatggcctc

SEQ ID NO: 718107 - DNA, 25 bp, Homo sapien
gtccagaaacgtccggcggtgaaga

SEQ ID NO: 718108 - DNA, 25 bp, Homo sapien
tggaggcaagtattccaatgaaagc

SEQ ID NO: 718109 - DNA, 25 bp, Homo sapien
gcggtgaagagcctcagacacgtcc

SEQ ID NO: 718110 - DNA, 25 bp, Homo sapien
tacccaatatgcacccagggtccag

SEQ ID NO: 718111 - DNA, 25 bp, Homo sapien
tgtgtggctgaagccgatctcctcc

SEQ ID NO: 718112 - DNA, 25 bp, Homo sapien
tcctcctggtagaagctgcggtggt

SEQ ID NO: 718113 - DNA, 25 bp, Homo sapien
caggaagagctgcgaggaagggtgg

SEQ ID NO: 718114 - DNA, 25 bp, Homo sapien
agctgcggtggtggttcttttaccg

SEQ ID NO: 718115 - DNA, 25 bp, Homo sapien
aggcagctccagatgggacactcct

SEQ ID NO: 718116 - DNA, 25 bp, Homo sapien
ttcctggcataaggcgacgcttagt

SEQ ID NO: 718117 - DNA, 25 bp, Homo sapien
gacgcttagttcagaggcagctcca

SEQ ID NO: 718118 - DNA, 25 bp, Homo sapien
taaagacagcaaggacctcggcaat

SEQ ID NO: 718119 - DNA, 25 bp, Homo sapien
ttctagaatgggacgccacctacag

SEQ ID NO: 718120 - DNA, 25 bp, Homo sapien
gcatctagagcgttccaaactttta

SEQ ID NO: 718121 - DNA, 25 bp, Homo sapien
cctgttaactcgctggccactggta

SEQ ID NO: 718122 - DNA, 25 bp, Homo sapien
tacccgtgtgtaggagcgtttctgc

SEQ ID NO: 718123 - DNA, 25 bp, Homo sapien
tgggcagagacggtgcaatgacaat

SEQ ID NO: 718124 - DNA, 25 bp, Homo sapien
ggagttgacgtcatccccaggtaga

SEQ ID NO: 718125 - DNA, 25 bp, Homo sapien
ccaggtagaggtgccaaggcctgtg

SEQ ID NO: 718126 - DNA, 25 bp, Homo sapien
caatatcgtcggaatcatcggagtt

SEQ ID NO: 718127 - DNA, 25 bp, Homo sapien
gcgctgccatcacggcgtggagaca

SEQ ID NO: 718128 - DNA, 25 bp, Homo sapien
agtcgtggttcctatgtcctcggca

SEQ ID NO: 718129 - DNA, 25 bp, Homo sapien
gataaattatctttccagtcgtggt

SEQ ID NO: 718130 - DNA, 25 bp, Homo sapien
cacaaagagacacgacgcagatgct

SEQ ID NO: 718131 - DNA, 25 bp, Homo sapien
tccccagagaataaagtaaaggcat

SEQ ID NO: 718132 - DNA, 25 bp, Homo sapien
tgagggggatgcgagccgctggccc

SEQ ID NO: 718133 - DNA, 25 bp, Homo sapien
gctggccctccccagagaataaagt

SEQ ID NO: 718134 - DNA, 25 bp, Homo sapien
ggatgcgagccgctggccctcccca

SEQ ID NO: 718135 - DNA, 25 bp, Homo sapien
tagcagctcctcacggtcaaggtcg

SEQ ID NO: 718136 - DNA, 25 bp, Homo sapien
gctgggctgagatcgagcaaatcct

SEQ ID NO: 718137 - DNA, 25 bp, Homo sapien
tcagagaacgtgtcactacagggct

SEQ ID NO: 718138 - DNA, 25 bp, Homo sapien
ctgaaaatccaccatccgagctgca

SEQ ID NO: 718139 - DNA, 25 bp, Homo sapien
gggatgggggaagccggtctcacac

SEQ ID NO: 718140 - DNA, 25 bp, Homo sapien
ggcttgggacaggccgtgttttgct

SEQ ID NO: 718141 - DNA, 25 bp, Homo sapien
tggcttgggacaggccgtgttttgc

SEQ ID NO: 718142 - DNA, 25 bp, Homo sapien
gcttgggacaggccgtgttttgctg

SEQ ID NO: 718143 - DNA, 25 bp, Homo sapien
agaaggccgccatgctgcagaaaag

SEQ ID NO: 718144 - DNA, 25 bp, Homo sapien
taaagagggcctgtgtcagttacac

SEQ ID NO: 718145 - DNA, 25 bp, Homo sapien
tcctcccatagagcaggtggacatg

SEQ ID NO: 718146 - DNA, 25 bp, Homo sapien
gcaagagatgggcactggacactgt

SEQ ID NO: 718147 - DNA, 25 bp, Homo sapien
cagctgccacaagagaacggagggt

SEQ ID NO: 718148 - DNA, 25 bp, Homo sapien
tgtaacccaaagctctaggccactg

SEQ ID NO: 718149 - DNA, 25 bp, Homo sapien
ctggttcccaagagtgagcacgtcc

SEQ ID NO: 718150 - DNA, 25 bp, Homo sapien
ggtttaacaagtgggagcagctgcc

SEQ ID NO: 718151 - DNA, 25 bp, Homo sapien
ccaacgtcgaccctgaagtggtaga

SEQ ID NO: 718152 - DNA, 25 bp, Homo sapien
tagacattcagcagacagaccacag

SEQ ID NO: 718153 - DNA, 25 bp, Homo sapien
tgagaaatagctggctcggacccat

SEQ ID NO: 718154 - DNA, 25 bp, Homo sapien
ggcatggtcctcacgtctcgtcagg

SEQ ID NO: 718155 - DNA, 25 bp, Homo sapien
tatcccttccaaaagatcggcctat

SEQ ID NO: 718156 - DNA, 25 bp, Homo sapien
taagggtgcttacccagccgtggtc

SEQ ID NO: 718157 - DNA, 25 bp, Homo sapien
gtagttggcacagcgtaggcactgc

SEQ ID NO: 718158 - DNA, 25 bp, Homo sapien
gccgtggtctgtaccagacagggta

SEQ ID NO: 718159 - DNA, 25 bp, Homo sapien
gcagcagagttgagggctgctgagg

SEQ ID NO: 718160 - DNA, 25 bp, Homo sapien
agcagcctcgccttgtccagaaagc

SEQ ID NO: 718161 - DNA, 25 bp, Homo sapien
cagcctcgccttgtccagaaagcca

SEQ ID NO: 718162 - DNA, 25 bp, Homo sapien
gcagcctcgccttgtccagaaagcc

SEQ ID NO: 718163 - DNA, 25 bp, Homo sapien
cgggcagtgtcttcccaggaggcct

SEQ ID NO: 718164 - DNA, 25 bp, Homo sapien
gggccttattcctggacctcctgtg

SEQ ID NO: 718165 - DNA, 25 bp, Homo sapien
tctgctgtgcccgacttggccagct

SEQ ID NO: 718166 - DNA, 25 bp, Homo sapien
cctggactttggctcattgactgcc

SEQ ID NO: 718167 - DNA, 25 bp, Homo sapien
ggccgcccgcatcatccgcgcgctc

SEQ ID NO: 718168 - DNA, 25 bp, Homo sapien
cccgcatcatccgcgcgctcctggg

SEQ ID NO: 718169 - DNA, 25 bp, Homo sapien
catcatccgcgcgctcctgggcccg

SEQ ID NO: 718170 - DNA, 25 bp, Homo sapien
cgcctggccgcccgcatcatccgcg

SEQ ID NO: 718171 - DNA, 25 bp, Homo sapien
tccggatgcgcgcggcctgcgcggg

SEQ ID NO: 718172 - DNA, 25 bp, Homo sapien
ccgcctccggatgcgcgcggcctgc

SEQ ID NO: 718173 - DNA, 25 bp, Homo sapien
cggccgcctccggatgcgcgcggcc

SEQ ID NO: 718174 - DNA, 25 bp, Homo sapien
ctccggatgcgcgcggcctgcgcgg

SEQ ID NO: 718175 - DNA, 25 bp, Homo sapien
tcgggccggaactggctgctagtgg

SEQ ID NO: 718176 - DNA, 25 bp, Homo sapien
ggcgccgcgtagctgaccccggcca

SEQ ID NO: 718177 - DNA, 25 bp, Homo sapien
tgctggtagtcggtgtcctcgggcc

SEQ ID NO: 718178 - DNA, 25 bp, Homo sapien
tcccagctcaggtcgaagtggggca

SEQ ID NO: 718179 - DNA, 25 bp, Homo sapien
ccgcgaccccgagaggcccatgtca

SEQ ID NO: 718180 - DNA, 25 bp, Homo sapien
cgcgaccccgagaggcccatgtcac

SEQ ID NO: 718181 - DNA, 25 bp, Homo sapien
cccgcgaccccgagaggcccatgtc

SEQ ID NO: 718182 - DNA, 25 bp, Homo sapien
gccgtgaccctggagggggggatga

SEQ ID NO: 718183 - DNA, 25 bp, Homo sapien
tgcgaggaggaggtggccgtgaccc

SEQ ID NO: 718184 - DNA, 25 bp, Homo sapien
aggaggaggtggccgtgaccctgga

SEQ ID NO: 718185 - DNA, 25 bp, Homo sapien
aggaggtggccgtgaccctggaggg

SEQ ID NO: 718186 - DNA, 25 bp, Homo sapien
tcccagcgacactggcccaaaatta

SEQ ID NO: 718187 - DNA, 25 bp, Homo sapien
ttgggtttcacgcattccatgacgg

SEQ ID NO: 718188 - DNA, 25 bp, Homo sapien
tccgaggtccaggtcgccaggctgc

SEQ ID NO: 718189 - DNA, 25 bp, Homo sapien
tgacggtgagctcctggccgtgcct

SEQ ID NO: 718190 - DNA, 25 bp, Homo sapien
gctaattgggagcatcagcttccag

SEQ ID NO: 718191 - DNA, 25 bp, Homo sapien
ttggacagacagctcggccgcgcta

SEQ ID NO: 718192 - DNA, 25 bp, Homo sapien
ggctccgggctaattgggagcatca

SEQ ID NO: 718193 - DNA, 25 bp, Homo sapien
gatggggacggagtccccacactga

SEQ ID NO: 718194 - DNA, 25 bp, Homo sapien
ctcggctggacactgctgcgggtct

SEQ ID NO: 718195 - DNA, 25 bp, Homo sapien
ctgatgagaagtttggcccgatgca

SEQ ID NO: 718196 - DNA, 25 bp, Homo sapien
acaggcagtggccacgatcccacca

SEQ ID NO: 718197 - DNA, 25 bp, Homo sapien
ctgtgggctaccgtggcgcgtggct

SEQ ID NO: 718198 - DNA, 25 bp, Homo sapien
gattcccagcagacggtctcctgcg

SEQ ID NO: 718199 - DNA, 25 bp, Homo sapien
ggccagcggcattcctacggtggcc

SEQ ID NO: 718200 - DNA, 25 bp, Homo sapien
gtcagggtgctcagcaaaccgggca

SEQ ID NO: 718201 - DNA, 25 bp, Homo sapien
ctgcacccacttcccgaagccagat

SEQ ID NO: 718202 - DNA, 25 bp, Homo sapien
gtgtgagcaccgcgattggctgagg

SEQ ID NO: 718203 - DNA, 25 bp, Homo sapien
gtgagcaccgcgattggctgaggca

SEQ ID NO: 718204 - DNA, 25 bp, Homo sapien
tgtgagcaccgcgattggctgaggc

SEQ ID NO: 718205 - DNA, 25 bp, Homo sapien
ggtgtgagcaccgcgattggctgag

SEQ ID NO: 718206 - DNA, 25 bp, Homo sapien
aacctcctgggcttaagtgatcctc

SEQ ID NO: 718207 - DNA, 25 bp, Homo sapien
ctcaacctcctgggcttaagtgatc

SEQ ID NO: 718208 - DNA, 25 bp, Homo sapien
cagcctctcaagtagcttggaccac

SEQ ID NO: 718209 - DNA, 25 bp, Homo sapien
tggcacgatcaccactcactgaagc

SEQ ID NO: 718210 - DNA, 25 bp, Homo sapien
aggcactcagcatcatcgtaagtga

SEQ ID NO: 718211 - DNA, 25 bp, Homo sapien
ggcactcagcatcatcgtaagtgaa

SEQ ID NO: 718212 - DNA, 25 bp, Homo sapien
cagcagccagcaatctgggcactgc

SEQ ID NO: 718213 - DNA, 25 bp, Homo sapien
gcagccagcaatctgggcactgcag

SEQ ID NO: 718214 - DNA, 25 bp, Homo sapien
tgcccagcagccagcaatctgggca

SEQ ID NO: 718215 - DNA, 25 bp, Homo sapien
cggtgtgtccacggctgcccagcag

SEQ ID NO: 718216 - DNA, 25 bp, Homo sapien
gtgctcctcgctcttgcgccgccgg

SEQ ID NO: 718217 - DNA, 25 bp, Homo sapien
agccagaaggagtagaagagcagga

SEQ ID NO: 718218 - DNA, 25 bp, Homo sapien
ccaggtgctcctcgctcttgcgccg

SEQ ID NO: 718219 - DNA, 25 bp, Homo sapien
cagccagaaggagtagaagagcagg

SEQ ID NO: 718220 - DNA, 25 bp, Homo sapien
cacaccagcgtggcgatgatgacac

SEQ ID NO: 718221 - DNA, 25 bp, Homo sapien
caccagcgtggcgatgatgacacac

SEQ ID NO: 718222 - DNA, 25 bp, Homo sapien
acaccagcgtggcgatgatgacaca

SEQ ID NO: 718223 - DNA, 25 bp, Homo sapien
gcacaccagcgtggcgatgatgaca

SEQ ID NO: 718224 - DNA, 25 bp, Homo sapien
ccgttgccgtagaatcccactgcga

SEQ ID NO: 718225 - DNA, 25 bp, Homo sapien
ctggaccccggccaccgtgcggttg

SEQ ID NO: 718226 - DNA, 25 bp, Homo sapien
cgtagaatcccactgcgatgccggc

SEQ ID NO: 718227 - DNA, 25 bp, Homo sapien
tggcgtggcggagcgagtaggtggc

SEQ ID NO: 718228 - DNA, 25 bp, Homo sapien
gcctctgtacggctcgcaggggctc

SEQ ID NO: 718229 - DNA, 25 bp, Homo sapien
taccagtcgtagagatccacctgct

SEQ ID NO: 718230 - DNA, 25 bp, Homo sapien
gtgtggttcagccccaccgccgtgt

SEQ ID NO: 718231 - DNA, 25 bp, Homo sapien
tgttcctccaaaaggggatggcggc

SEQ ID NO: 718232 - DNA, 25 bp, Homo sapien
ccccagagggcattcagagcgtctg

SEQ ID NO: 718233 - DNA, 25 bp, Homo sapien
aaggctcccattaggggaactccag

SEQ ID NO: 718234 - DNA, 25 bp, Homo sapien
gtcagttcttgagaaaggctcccat

SEQ ID NO: 718235 - DNA, 25 bp, Homo sapien
ccatcaggcctcatgtactaggtgc

SEQ ID NO: 718236 - DNA, 25 bp, Homo sapien
gagctgcggatgaggccaaccagca

SEQ ID NO: 718237 - DNA, 25 bp, Homo sapien
tgcggatgaggccaaccagcaccag

SEQ ID NO: 718238 - DNA, 25 bp, Homo sapien
gaggcagatgatgacgtccagcagc

SEQ ID NO: 718239 - DNA, 25 bp, Homo sapien
caggaggcagatgatgacgtccagc

SEQ ID NO: 718240 - DNA, 25 bp, Homo sapien
tctgccttccaaacgaggagaccaa

SEQ ID NO: 718241 - DNA, 25 bp, Homo sapien
gcttgtggctaggatctgcagatga

SEQ ID NO: 718242 - DNA, 25 bp, Homo sapien
tcaccctcctagtgagccggagctg

SEQ ID NO: 718243 - DNA, 25 bp, Homo sapien
caagtgccccacgtgcagactcttg

SEQ ID NO: 718244 - DNA, 25 bp, Homo sapien
caagcccagcgcgccccagctgatg

SEQ ID NO: 718245 - DNA, 25 bp, Homo sapien
ccagcgcgccccagctgatgaccag

SEQ ID NO: 718246 - DNA, 25 bp, Homo sapien
agcgcgccccagctgatgaccaggg

SEQ ID NO: 718247 - DNA, 25 bp, Homo sapien
agctccaagcccagcgcgccccagc

SEQ ID NO: 718248 - DNA, 25 bp, Homo sapien
caccattttggtcacgtaggcgtca

SEQ ID NO: 718249 - DNA, 25 bp, Homo sapien
ggtcacgtaggcgtcagggtccaca

SEQ ID NO: 718250 - DNA, 25 bp, Homo sapien
aggcgtcagggtccacacagaagtc

SEQ ID NO: 718251 - DNA, 25 bp, Homo sapien
cattttggtcacgtaggcgtcaggg

SEQ ID NO: 718252 - DNA, 25 bp, Homo sapien
tgggacacggccgtggacacagact

SEQ ID NO: 718253 - DNA, 25 bp, Homo sapien
gacacggccgtggacacagactcac

SEQ ID NO: 718254 - DNA, 25 bp, Homo sapien
cgctgggacacggccgtggacacag

SEQ ID NO: 718255 - DNA, 25 bp, Homo sapien
ccgctgggacacggccgtggacaca

SEQ ID NO: 718256 - DNA, 25 bp, Homo sapien
tacttgatgagatccccccaaaggc

SEQ ID NO: 718257 - DNA, 25 bp, Homo sapien
tacatgtacacgtgtagggggcgct

SEQ ID NO: 718258 - DNA, 25 bp, Homo sapien
tgtagggggcgctgctcatacttga

SEQ ID NO: 718259 - DNA, 25 bp, Homo sapien
caaaggccgccggctacagtaggga

SEQ ID NO: 718260 - DNA, 25 bp, Homo sapien
agcaggccaggtagtactgcaggat

SEQ ID NO: 718261 - DNA, 25 bp, Homo sapien
ggcgcggggcgagcaggccaggtag

SEQ ID NO: 718262 - DNA, 25 bp, Homo sapien
ctgctggaaggggttggcggcgcgg

SEQ ID NO: 718263 - DNA, 25 bp, Homo sapien
gggcgagcaggccaggtagtactgc

SEQ ID NO: 718264 - DNA, 25 bp, Homo sapien
caaaagcagtcccagcgatgcgggt

SEQ ID NO: 718265 - DNA, 25 bp, Homo sapien
aggtcaccggcatggtaaccccagg

SEQ ID NO: 718266 - DNA, 25 bp, Homo sapien
agtcccagcgatgcgggtgcattga

SEQ ID NO: 718267 - DNA, 25 bp, Homo sapien
atgcgggtgcattgagcaggtcccc

SEQ ID NO: 718268 - DNA, 25 bp, Homo sapien
agaggagaccaagtccatgggcgct

SEQ ID NO: 718269 - DNA, 25 bp, Homo sapien
gagaccaagtccatgggcgctgctg

SEQ ID NO: 718270 - DNA, 25 bp, Homo sapien
cagagaggagaccaagtccatgggc

SEQ ID NO: 718271 - DNA, 25 bp, Homo sapien
ctccagagaggagaccaagtccatg

SEQ ID NO: 718272 - DNA, 25 bp, Homo sapien
agaagctcagccacgacatcctgca

SEQ ID NO: 718273 - DNA, 25 bp, Homo sapien
gtcctcagaagctcagccacgacat

SEQ ID NO: 718274 - DNA, 25 bp, Homo sapien
ctcagaagctcagccacgacatcct

SEQ ID NO: 718275 - DNA, 25 bp, Homo sapien
gcatctccaccagtgccttgtggct

SEQ ID NO: 718276 - DNA, 25 bp, Homo sapien
tccaccagggcggtgaggtgctgca

SEQ ID NO: 718277 - DNA, 25 bp, Homo sapien
tcacctccgtgccattcagcacctc

SEQ ID NO: 718278 - DNA, 25 bp, Homo sapien
cagatgcaggctgcggcagtccacc

SEQ ID NO: 718279 - DNA, 25 bp, Homo sapien
gaggtgctgcaggttcacctccgtg

SEQ ID NO: 718280 - DNA, 25 bp, Homo sapien
gacgctgcagacgatggagctgaac

SEQ ID NO: 718281 - DNA, 25 bp, Homo sapien
gtagatgaggccctccacgccgtca

SEQ ID NO: 718282 - DNA, 25 bp, Homo sapien
agccggtcagcgcttgcacgtagtc

SEQ ID NO: 718283 - DNA, 25 bp, Homo sapien
cacgccgtcatagcagaagccggtc

SEQ ID NO: 718284 - DNA, 25 bp, Homo sapien
acagcgtcgtgcacctgcaccccat

SEQ ID NO: 718285 - DNA, 25 bp, Homo sapien
ttcccccacagcgtcgtgcacctgc

SEQ ID NO: 718286 - DNA, 25 bp, Homo sapien
tcgtgcacctgcaccccatggtggg

SEQ ID NO: 718287 - DNA, 25 bp, Homo sapien
gcgtcgtgcacctgcaccccatggt

SEQ ID NO: 718288 - DNA, 25 bp, Homo sapien
tcaccatcatcgttggcagcatcac

SEQ ID NO: 718289 - DNA, 25 bp, Homo sapien
ggatgctggtctcactgccgtagct

SEQ ID NO: 718290 - DNA, 25 bp, Homo sapien
tgggcatgtggacgcggtagaggct

SEQ ID NO: 718291 - DNA, 25 bp, Homo sapien
cggccgggatgctggtctcactgcc

SEQ ID NO: 718292 - DNA, 25 bp, Homo sapien
ggtagaggctgtcgtgcgcctgccg

SEQ ID NO: 718293 - DNA, 25 bp, Homo sapien
ggttctggaaattagcgttctggct

SEQ ID NO: 718294 - DNA, 25 bp, Homo sapien
tgttctcacagcgggggttctggaa

SEQ ID NO: 718295 - DNA, 25 bp, Homo sapien
cgcccaatgagtggggtgttctcac

SEQ ID NO: 718296 - DNA, 25 bp, Homo sapien
actcgcgcccaatgagtggggtgtt

SEQ ID NO: 718297 - DNA, 25 bp, Homo sapien
tgccagcccgcgtggctgccagagt

SEQ ID NO: 718298 - DNA, 25 bp, Homo sapien
catgggcttaaactgccagcccgcg

SEQ ID NO: 718299 - DNA, 25 bp, Homo sapien
cagcgttcgggcactgtccatgggc

SEQ ID NO: 718300 - DNA, 25 bp, Homo sapien
acagcgttcgggcactgtccatggg

SEQ ID NO: 718301 - DNA, 25 bp, Homo sapien
cgaggtatttggctctcatgctgga

SEQ ID NO: 718302 - DNA, 25 bp, Homo sapien
gggcgaggctggctcgtggcgaggt

SEQ ID NO: 718303 - DNA, 25 bp, Homo sapien
tgccgctggagtcagggcgaggctg

SEQ ID NO: 718304 - DNA, 25 bp, Homo sapien
gctcgtggcgaggtatttggctctc

SEQ ID NO: 718305 - DNA, 25 bp, Homo sapien
gggcaggcctggcacggcgtgcgag

SEQ ID NO: 718306 - DNA, 25 bp, Homo sapien
gggcaagcggcctgcagacgcgtct

SEQ ID NO: 718307 - DNA, 25 bp, Homo sapien
tgcgagggtccggtgggtggcccag

SEQ ID NO: 718308 - DNA, 25 bp, Homo sapien
caagcggcctgcagacgcgtctggg

SEQ ID NO: 718309 - DNA, 25 bp, Homo sapien
gagcaggtggcacgtgtccctgtcc

SEQ ID NO: 718310 - DNA, 25 bp, Homo sapien
taagaaggggtccacagaagtgccg

SEQ ID NO: 718311 - DNA, 25 bp, Homo sapien
cagccgtgcctgtgaactaagaagg

SEQ ID NO: 718312 - DNA, 25 bp, Homo sapien
tgtaggtgcggcgaccatctgcaga

SEQ ID NO: 718313 - DNA, 25 bp, Homo sapien
taccaaccttgccatgacatgtggg

SEQ ID NO: 718314 - DNA, 25 bp, Homo sapien
tatgtccattcacctggcaggcagc

SEQ ID NO: 718315 - DNA, 25 bp, Homo sapien
tgagtagaaagtcacagacgggcac

SEQ ID NO: 718316 - DNA, 25 bp, Homo sapien
gagtagttaggaacacggcaccgaa

SEQ ID NO: 718317 - DNA, 25 bp, Homo sapien
acaaaacaaagatcccacaggagag

SEQ ID NO: 718318 - DNA, 25 bp, Homo sapien
aaacacaaaacaaagatcccacagg

SEQ ID NO: 718319 - DNA, 25 bp, Homo sapien
acacaaaacaaagatcccacaggag

SEQ ID NO: 718320 - DNA, 25 bp, Homo sapien
cacaaaacaaagatcccacaggaga

SEQ ID NO: 718321 - DNA, 25 bp, Homo sapien
aggctgagtcttaaggagattatat

SEQ ID NO: 718322 - DNA, 25 bp, Homo sapien
ggctgagtcttaaggagattatata

SEQ ID NO: 718323 - DNA, 25 bp, Homo sapien
tggatgttaaatcacactggggtgg

SEQ ID NO: 718324 - DNA, 25 bp, Homo sapien
gatgttaaatcacactggggtgggg

SEQ ID NO: 718325 - DNA, 25 bp, Homo sapien
cctggatgttaaatcacactggggt

SEQ ID NO: 718326 - DNA, 25 bp, Homo sapien
ttcctggatgttaaatcacactggg

SEQ ID NO: 718327 - DNA, 25 bp, Homo sapien
gctggaggagggggaaatgcaaaat

SEQ ID NO: 718328 - DNA, 25 bp, Homo sapien
ctggaggagggggaaatgcaaaatg

SEQ ID NO: 718329 - DNA, 25 bp, Homo sapien
tggaggagggggaaatgcaaaatgg

SEQ ID NO: 718330 - DNA, 25 bp, Homo sapien
aattacattgacgagatttttagta

SEQ ID NO: 718331 - DNA, 25 bp, Homo sapien
aaacccaagctgaatagaaaccaca

SEQ ID NO: 718332 - DNA, 25 bp, Homo sapien
aaaaacacagcgacagtacatacag

SEQ ID NO: 718333 - DNA, 25 bp, Homo sapien
cacagcgacagtacatacagccatg

SEQ ID NO: 718334 - DNA, 25 bp, Homo sapien
gtgggcgctcaacgcaggcggctgt

SEQ ID NO: 718335 - DNA, 25 bp, Homo sapien
ctagtgcaaagtccagcccaccgtg

SEQ ID NO: 718336 - DNA, 25 bp, Homo sapien
acctctgccggtcctgtcagcacct

SEQ ID NO: 718337 - DNA, 25 bp, Homo sapien
tgttcagcgtcagccttcgcccagg

SEQ ID NO: 718338 - DNA, 25 bp, Homo sapien
agaaatgccccccacgccctcagca

SEQ ID NO: 718339 - DNA, 25 bp, Homo sapien
cagctctgcttcaccgtgcagaaat

SEQ ID NO: 718340 - DNA, 25 bp, Homo sapien
acagatggctgagggattcgtcacc

SEQ ID NO: 718341 - DNA, 25 bp, Homo sapien
tctgcttcaccgtgcagaaatgccc

SEQ ID NO: 718342 - DNA, 25 bp, Homo sapien
ggcagaggccgcgccgggcaccgag

SEQ ID NO: 718343 - DNA, 25 bp, Homo sapien
gcgcccgccggagccggcagaggcc

SEQ ID NO: 718344 - DNA, 25 bp, Homo sapien
gagccccgggcagcagcgtgggcag

SEQ ID NO: 718345 - DNA, 25 bp, Homo sapien
cgggcagcagcgtgggcagctcggc

SEQ ID NO: 718346 - DNA, 25 bp, Homo sapien
gccttctttcgggcgcttggccctg

SEQ ID NO: 718347 - DNA, 25 bp, Homo sapien
tctttcgggcgcttggccctggatt

SEQ ID NO: 718348 - DNA, 25 bp, Homo sapien
gtccccagtttgctcccatcgggaa

SEQ ID NO: 718349 - DNA, 25 bp, Homo sapien
tcccatcgggaagcgcgcaggtcgc

SEQ ID NO: 718350 - DNA, 25 bp, Homo sapien
aggggcagggacatgtgtccatggg

SEQ ID NO: 718351 - DNA, 25 bp, Homo sapien
ggggcagggacatgtgtccatgggc

SEQ ID NO: 718352 - DNA, 25 bp, Homo sapien
gggcagggacatgtgtccatgggcc

SEQ ID NO: 718353 - DNA, 25 bp, Homo sapien
aagggcccttaaggcccagctctgc

SEQ ID NO: 718354 - DNA, 25 bp, Homo sapien
acagacactggtccaagggccctta

SEQ ID NO: 718355 - DNA, 25 bp, Homo sapien
ctctcaggcatgggcgcttctgggc

SEQ ID NO: 718356 - DNA, 25 bp, Homo sapien
aggcatgggcgcttctgggcccaca

SEQ ID NO: 718357 - DNA, 25 bp, Homo sapien
ggccacggtctcgtccagaatcttc

SEQ ID NO: 718358 - DNA, 25 bp, Homo sapien
gggacggccacggtctcgtccagaa

SEQ ID NO: 718359 - DNA, 25 bp, Homo sapien
acggccacggtctcgtccagaatct

SEQ ID NO: 718360 - DNA, 25 bp, Homo sapien
ggacggccacggtctcgtccagaat

SEQ ID NO: 718361 - DNA, 25 bp, Homo sapien
gtggagaccagagcgtccttcaagg

SEQ ID NO: 718362 - DNA, 25 bp, Homo sapien
cgtcctctgcgggttgtaggcctcg

SEQ ID NO: 718363 - DNA, 25 bp, Homo sapien
cagggtgcagaagagcgtcctctgc

SEQ ID NO: 718364 - DNA, 25 bp, Homo sapien
gagaaggcggacacatacagctgct

SEQ ID NO: 718365 - DNA, 25 bp, Homo sapien
tcctcgggagcctcgggtcggctca

SEQ ID NO: 718366 - DNA, 25 bp, Homo sapien
ctatcggctgtaggtagatgtgctt

SEQ ID NO: 718367 - DNA, 25 bp, Homo sapien
cggctgtaggtagatgtgcttccga

SEQ ID NO: 718368 - DNA, 25 bp, Homo sapien
gtaggtagatgtgcttccgagccag

SEQ ID NO: 718369 - DNA, 25 bp, Homo sapien
aaaggggctgcgtggaccaccaggg

SEQ ID NO: 718370 - DNA, 25 bp, Homo sapien
gaccaacggacacccgcaggatttg

SEQ ID NO: 718371 - DNA, 25 bp, Homo sapien
tggtggatgctgagaccaacggaca

SEQ ID NO: 718372 - DNA, 25 bp, Homo sapien
gagggaagcgggtagctcccaagct

SEQ ID NO: 718373 - DNA, 25 bp, Homo sapien
ggctgcatggctgcaaaatgccagc

SEQ ID NO: 718374 - DNA, 25 bp, Homo sapien
gcatggctgcaaaatgccagcctgg

SEQ ID NO: 718375 - DNA, 25 bp, Homo sapien
caggctgcatggctgcaaaatgcca

SEQ ID NO: 718376 - DNA, 25 bp, Homo sapien
tgcatggctgcaaaatgccagcctg

SEQ ID NO: 718377 - DNA, 25 bp, Homo sapien
acctcgctgcaaaatgccagcctga

SEQ ID NO: 718378 - DNA, 25 bp, Homo sapien
ggcagcacacagagccgagccacct

SEQ ID NO: 718379 - DNA, 25 bp, Homo sapien
gagccacctcgctgcaaaatgccag

SEQ ID NO: 718380 - DNA, 25 bp, Homo sapien
ggacttctagggttagcgccaggca

SEQ ID NO: 718381 - DNA, 25 bp, Homo sapien
ctggagcctgtcagagtcccggctg

SEQ ID NO: 718382 - DNA, 25 bp, Homo sapien
gagcagcggatggacgcggctgcca

SEQ ID NO: 718383 - DNA, 25 bp, Homo sapien
ggctgccaccgacggcaggcacttg

SEQ ID NO: 718384 - DNA, 25 bp, Homo sapien
ggcaggcacttgacgcgcaggccca

SEQ ID NO: 718385 - DNA, 25 bp, Homo sapien
cgcgtcccctggcttgttgttcttc

SEQ ID NO: 718386 - DNA, 25 bp, Homo sapien
cacagcgcgtcccctggcttgttgt

SEQ ID NO: 718387 - DNA, 25 bp, Homo sapien
cagcgcgtcccctggcttgttgttc

SEQ ID NO: 718388 - DNA, 25 bp, Homo sapien
agcgcgtcccctggcttgttgttct

SEQ ID NO: 718389 - DNA, 25 bp, Homo sapien
attcccctgagaaccgggcgaagct

SEQ ID NO: 718390 - DNA, 25 bp, Homo sapien
agaaccgggcgaagctgcagacgcc

SEQ ID NO: 718391 - DNA, 25 bp, Homo sapien
ttcccctgagaaccgggcgaagctg

SEQ ID NO: 718392 - DNA, 25 bp, Homo sapien
ctgagaaccgggcgaagctgcagac

SEQ ID NO: 718393 - DNA, 25 bp, Homo sapien
tgaaacccaggacatgctgcagctt

SEQ ID NO: 718394 - DNA, 25 bp, Homo sapien
ggtacctctcgatgagcctgaaacc

SEQ ID NO: 718395 - DNA, 25 bp, Homo sapien
ccaggctgagcgcaccctgcatgag

SEQ ID NO: 718396 - DNA, 25 bp, Homo sapien
agcggagccagcggcagttccccag

SEQ ID NO: 718397 - DNA, 25 bp, Homo sapien
ggggtgtcctcccacactgacggct

SEQ ID NO: 718398 - DNA, 25 bp, Homo sapien
tggtgccgggctccgagtcactctc

SEQ ID NO: 718399 - DNA, 25 bp, Homo sapien
gcacatgcccgagtcggcgctggca

SEQ ID NO: 718400 - DNA, 25 bp, Homo sapien
tgaggggctccgacacactggtgcc

SEQ ID NO: 718401 - DNA, 25 bp, Homo sapien
caggtggcagcggagcctctgaggc

SEQ ID NO: 718402 - DNA, 25 bp, Homo sapien
atgctccttgatggcctccgcaggg

SEQ ID NO: 718403 - DNA, 25 bp, Homo sapien
tcctctggccccgaggcgaaggtgt

SEQ ID NO: 718404 - DNA, 25 bp, Homo sapien
tctgaggctgccaggtagctcagcc

SEQ ID NO: 718405 - DNA, 25 bp, Homo sapien
tgaacatctcccagcggtcgagggc

SEQ ID NO: 718406 - DNA, 25 bp, Homo sapien
gccgggagctggcccgtgaacatct

SEQ ID NO: 718407 - DNA, 25 bp, Homo sapien
gagctggcccgtgaacatctcccag

SEQ ID NO: 718408 - DNA, 25 bp, Homo sapien
atctcccagcggtcgagggcgtcca

SEQ ID NO: 718409 - DNA, 25 bp, Homo sapien
gggccgactctgctctggcgagttt

SEQ ID NO: 718410 - DNA, 25 bp, Homo sapien
tctggcgagttttcgggcactcagc

SEQ ID NO: 718411 - DNA, 25 bp, Homo sapien
gagttttcgggcactcagcttcctc

SEQ ID NO: 718412 - DNA, 25 bp, Homo sapien
tctgctctggcgagttttcgggcac

SEQ ID NO: 718413 - DNA, 25 bp, Homo sapien
tataaataactgaagggcaggccca

SEQ ID NO: 718414 - DNA, 25 bp, Homo sapien
gaaatcggaaaacaggtcaggccac

SEQ ID NO: 718415 - DNA, 25 bp, Homo sapien
ttagaagccctccataaccgtgtga

SEQ ID NO: 718416 - DNA, 25 bp, Homo sapien
cacttggcagccgtgtgaacgaaca

SEQ ID NO: 718417 - DNA, 25 bp, Homo sapien
cagggttcacaccatggacaggagt

SEQ ID NO: 718418 - DNA, 25 bp, Homo sapien
tcctcacccatgctctggaaacggg

SEQ ID NO: 718419 - DNA, 25 bp, Homo sapien
gcaaatattaacaggtcggcatccc

SEQ ID NO: 718420 - DNA, 25 bp, Homo sapien
cagaaggcatgtgttagcttcccca

SEQ ID NO: 718421 - DNA, 25 bp, Homo sapien
tgaacaaaacacgtccccattcatt

SEQ ID NO: 718422 - DNA, 25 bp, Homo sapien
attcattcccgctggtcacagacca

SEQ ID NO: 718423 - DNA, 25 bp, Homo sapien
ccttcgtccacgtgccaggtgagtg

SEQ ID NO: 718424 - DNA, 25 bp, Homo sapien
gggcgtcggcttcagactggacccc

SEQ ID NO: 718425 - DNA, 25 bp, Homo sapien
ggtaagcttggcacctactcatggc

SEQ ID NO: 718426 - DNA, 25 bp, Homo sapien
tgggcacaagcgtcgccaggaaatt

SEQ ID NO: 718427 - DNA, 25 bp, Homo sapien
aaaggaaccgagtgctctgtgcagc

SEQ ID NO: 718428 - DNA, 25 bp, Homo sapien
cacactgccgaagggaccagttgga

SEQ ID NO: 718429 - DNA, 25 bp, Homo sapien
tctacaccactcacaggttgtacaa

SEQ ID NO: 718430 - DNA, 25 bp, Homo sapien
ggttgtacaactgccatgcaaatgc

SEQ ID NO: 718431 - DNA, 25 bp, Homo sapien
accactcacaggttgtacaactgcc

SEQ ID NO: 718432 - DNA, 25 bp, Homo sapien
atataatttctacaccactcacagg

SEQ ID NO: 718433 - DNA, 25 bp, Homo sapien
gatctgaatcgtccccgagagcttg

SEQ ID NO: 718434 - DNA, 25 bp, Homo sapien
tgatctgaatcgtccccgagagctt

SEQ ID NO: 718435 - DNA, 25 bp, Homo sapien
aaagctgatctgaatcgtccccgag

SEQ ID NO: 718436 - DNA, 25 bp, Homo sapien
gctgatctgaatcgtccccgagagc

SEQ ID NO: 718437 - DNA, 25 bp, Homo sapien
gccccagctggcttagaccgtgtag

SEQ ID NO: 718438 - DNA, 25 bp, Homo sapien
gaccgtgtagctcgtctgttaaagt

SEQ ID NO: 718439 - DNA, 25 bp, Homo sapien
tcttctcgacaggtcgcaggtctgg

SEQ ID NO: 718440 - DNA, 25 bp, Homo sapien
gagctttcctggaggaccacatctt

SEQ ID NO: 718441 - DNA, 25 bp, Homo sapien
ttcaccgtgtaacgtgccaccaagg

SEQ ID NO: 718442 - DNA, 25 bp, Homo sapien
agcaacctgcctcgagaattgcggg

SEQ ID NO: 718443 - DNA, 25 bp, Homo sapien
tctctgtaaggtgcatcacatgtgc

SEQ ID NO: 718444 - DNA, 25 bp, Homo sapien
gaggacaggccactttaagacttgc

SEQ ID NO: 718445 - DNA, 25 bp, Homo sapien
gaaggaccttgacgtgctctggaga

SEQ ID NO: 718446 - DNA, 25 bp, Homo sapien
ggttatcgttccagccagaaagcga

SEQ ID NO: 718447 - DNA, 25 bp, Homo sapien
gaaagcgaagagaccactcacagga

SEQ ID NO: 718448 - DNA, 25 bp, Homo sapien
gatgtcctcacgtctccatgctgga

SEQ ID NO: 718449 - DNA, 25 bp, Homo sapien
aaataaataaagttgtgttccagag

SEQ ID NO: 718450 - DNA, 25 bp, Homo sapien
aataaataaagttgtgttccagagg

SEQ ID NO: 718451 - DNA, 25 bp, Homo sapien
ataaataaagttgtgttccagaggc

SEQ ID NO: 718452 - DNA, 25 bp, Homo sapien
cccagctctaatcctaatgttattt

SEQ ID NO: 718453 - DNA, 25 bp, Homo sapien
attgtaaataatacaggtgtggctc

SEQ ID NO: 718454 - DNA, 25 bp, Homo sapien
tggcatgtaggagaaccattgtaaa

SEQ ID NO: 718455 - DNA, 25 bp, Homo sapien
atttccacataccaaacaaagcctg

SEQ ID NO: 718456 - DNA, 25 bp, Homo sapien
cgtttaactcgatagaaagcgcagg

SEQ ID NO: 718457 - DNA, 25 bp, Homo sapien
gaaactctgcaaggctaaactgtca

SEQ ID NO: 718458 - DNA, 25 bp, Homo sapien
gagtagtccggccttgtcaatgagt

SEQ ID NO: 718459 - DNA, 25 bp, Homo sapien
cagacctcacggatgtgaccggaga

SEQ ID NO: 718460 - DNA, 25 bp, Homo sapien
gaatgttgatacgagctggccagtc

SEQ ID NO: 718461 - DNA, 25 bp, Homo sapien
taagtctgattctcatcgaggcccc

SEQ ID NO: 718462 - DNA, 25 bp, Homo sapien
gagtaaacactctcggatgccgctg

SEQ ID NO: 718463 - DNA, 25 bp, Homo sapien
gagctaacagctgacctttcgggaa

SEQ ID NO: 718464 - DNA, 25 bp, Homo sapien
tccccgaaatgctgtagtggcaaca

SEQ ID NO: 718465 - DNA, 25 bp, Homo sapien
ggagtgtgcatatctctcgcttctg

SEQ ID NO: 718466 - DNA, 25 bp, Homo sapien
catgtctgggtaccactcctggagt

SEQ ID NO: 718467 - DNA, 25 bp, Homo sapien
gggcccggccctaatataagcatgt

SEQ ID NO: 718468 - DNA, 25 bp, Homo sapien
cagctgtggtcagtctcagtgttcc

SEQ ID NO: 718469 - DNA, 25 bp, Homo sapien
gagagggacttcagatgctgcttca

SEQ ID NO: 718470 - DNA, 25 bp, Homo sapien
aacgcgtgcttaagcctctgaggac

SEQ ID NO: 718471 - DNA, 25 bp, Homo sapien
tcattcactaagaggacgaggcggc

SEQ ID NO: 718472 - DNA, 25 bp, Homo sapien
gagaaggcagcctataaaacgggaa

SEQ ID NO: 718473 - DNA, 25 bp, Homo sapien
gggtatgataccaaaagcctaggca

SEQ ID NO: 718474 - DNA, 25 bp, Homo sapien
cagtggaatgcagcatagctatttt

SEQ ID NO: 718475 - DNA, 25 bp, Homo sapien
tagaccaatgggagcacatcaaatg

SEQ ID NO: 718476 - DNA, 25 bp, Homo sapien
catcgttccttcaggtctcgagatg

SEQ ID NO: 718477 - DNA, 25 bp, Homo sapien
atgaaggccatcacccatcgttcct

SEQ ID NO: 718478 - DNA, 25 bp, Homo sapien
ctggtgtcttccttgccgggggctt

SEQ ID NO: 718479 - DNA, 25 bp, Homo sapien
cttcaggtctcgagatgggcatggt

SEQ ID NO: 718480 - DNA, 25 bp, Homo sapien
agcttcaggattgctggtgtgtccg

SEQ ID NO: 718481 - DNA, 25 bp, Homo sapien
cagcttcaggattgctggtgtgtcc

SEQ ID NO: 718482 - DNA, 25 bp, Homo sapien
cacagcttcaggattgctggtgtgt

SEQ ID NO: 718483 - DNA, 25 bp, Homo sapien
tcacacagcttcaggattgctggtg

SEQ ID NO: 718484 - DNA, 25 bp, Homo sapien
tgggatgttgccacccggtctgtgt

SEQ ID NO: 718485 - DNA, 25 bp, Homo sapien
tcagaggtcacagcgttctctgcgg

SEQ ID NO: 718486 - DNA, 25 bp, Homo sapien
catgtaccaagcagtttgaactcac

SEQ ID NO: 718487 - DNA, 25 bp, Homo sapien
ttgccacccggtctgtgtgctgtaa

SEQ ID NO: 718488 - DNA, 25 bp, Homo sapien
atagataaccgtagccttgacctcc

SEQ ID NO: 718489 - DNA, 25 bp, Homo sapien
caatcatagataaccgtagccttga

SEQ ID NO: 718490 - DNA, 25 bp, Homo sapien
ctcccaaaggggaggctcacagtgt

SEQ ID NO: 718491 - DNA, 25 bp, Homo sapien
tgctctcggccatgtgcgtctgtct

SEQ ID NO: 718492 - DNA, 25 bp, Homo sapien
gcaggccgtaagcactgaaggcgct

SEQ ID NO: 718493 - DNA, 25 bp, Homo sapien
gtgggtgtcgggtagcactactcat

SEQ ID NO: 718494 - DNA, 25 bp, Homo sapien
tgaaggcgctgctctaggtgggtgt

SEQ ID NO: 718495 - DNA, 25 bp, Homo sapien
tttcaggcagcatggtagcagggcc

SEQ ID NO: 718496 - DNA, 25 bp, Homo sapien
aggccacagtcagctcggcccacac

SEQ ID NO: 718497 - DNA, 25 bp, Homo sapien
aaggccacagtcagctcggcccaca

SEQ ID NO: 718498 - DNA, 25 bp, Homo sapien
ctgttgaatgagagcgctccagggc

SEQ ID NO: 718499 - DNA, 25 bp, Homo sapien
cctgttgaatgagagcgctccaggg

SEQ ID NO: 718500 - DNA, 25 bp, Homo sapien
ttcttgggacttgccatctccaaag

SEQ ID NO: 718501 - DNA, 25 bp, Homo sapien
ttcttctgattcttgggacttgcca

SEQ ID NO: 718502 - DNA, 25 bp, Homo sapien
ctgagccgtcttccctgaacctgaa

SEQ ID NO: 718503 - DNA, 25 bp, Homo sapien
agagttctggcagctttgttgctcc

SEQ ID NO: 718504 - DNA, 25 bp, Homo sapien
gtgtgagccgcggtgtcatcagcca

SEQ ID NO: 718505 - DNA, 25 bp, Homo sapien
cctgaaatggttcgcctggagccca

SEQ ID NO: 718506 - DNA, 25 bp, Homo sapien
tggcctgccggactgtcttttcagc

SEQ ID NO: 718507 - DNA, 25 bp, Homo sapien
tgggacttttcacttggctcttaag

SEQ ID NO: 718508 - DNA, 25 bp, Homo sapien
tcctgcgtggcctgccggactgtct

SEQ ID NO: 718509 - DNA, 25 bp, Homo sapien
gggacatgggacttttcacttggct

SEQ ID NO: 718510 - DNA, 25 bp, Homo sapien
gtcttgggtactacccagagcgaga

SEQ ID NO: 718511 - DNA, 25 bp, Homo sapien
gagtcttgggtactacccagagcga

SEQ ID NO: 718512 - DNA, 25 bp, Homo sapien
tcttgggtactacccagagcgagat

SEQ ID NO: 718513 - DNA, 25 bp, Homo sapien
ggagtcttgggtactacccagagcg

SEQ ID NO: 718514 - DNA, 25 bp, Homo sapien
cctgtcttttggtggcagtctgatg

SEQ ID NO: 718515 - DNA, 25 bp, Homo sapien
ttagttcctaatttgagtgtcctgc

SEQ ID NO: 718516 - DNA, 25 bp, Homo sapien
ggatgtaaattgttgtaacctgtct

SEQ ID NO: 718517 - DNA, 25 bp, Homo sapien
ctaatttgagtgtcctgcttgtttc

SEQ ID NO: 718518 - DNA, 25 bp, Homo sapien
tgtcctggacgcaaacgccagcaca

SEQ ID NO: 718519 - DNA, 25 bp, Homo sapien
ttcagtgtcctggacgcaaacgcca

SEQ ID NO: 718520 - DNA, 25 bp, Homo sapien
gacgcaaacgccagcacacgttttc

SEQ ID NO: 718521 - DNA, 25 bp, Homo sapien
ctgctttgtgtctgcggccccacca

SEQ ID NO: 718522 - DNA, 25 bp, Homo sapien
ccaaatgcatttggaacgtctgctt

SEQ ID NO: 718523 - DNA, 25 bp, Homo sapien
ttggaagtgcggcatccagaggaca

SEQ ID NO: 718524 - DNA, 25 bp, Homo sapien
tcttgcaagcagctagaaaggtgct

SEQ ID NO: 718525 - DNA, 25 bp, Homo sapien
catgcttctggttgattctgttgac

SEQ ID NO: 718526 - DNA, 25 bp, Homo sapien
gtcacgagcatcttctacgttttgg

SEQ ID NO: 718527 - DNA, 25 bp, Homo sapien
tcacacccactgaattgcttcgact

SEQ ID NO: 718528 - DNA, 25 bp, Homo sapien
tcagcatctgcaagcatggtaccgt

SEQ ID NO: 718529 - DNA, 25 bp, Homo sapien
tgcttcgactttggattctaaggcg

SEQ ID NO: 718530 - DNA, 25 bp, Homo sapien
tgtttaactttcatcagcttcaagg

SEQ ID NO: 718531 - DNA, 25 bp, Homo sapien
aattttgcatacaactgaactttca

SEQ ID NO: 718532 - DNA, 25 bp, Homo sapien
tcagcttcaaggtttatgctgctcc

SEQ ID NO: 718533 - DNA, 25 bp, Homo sapien
tatgctgctcccaaattttgcatac

SEQ ID NO: 718534 - DNA, 25 bp, Homo sapien
tcatggatgcctcttcatgcctctt

SEQ ID NO: 718535 - DNA, 25 bp, Homo sapien
cagcctcgggtatcctgttgtagct

SEQ ID NO: 718536 - DNA, 25 bp, Homo sapien
ggcatctatctctaagttcatggat

SEQ ID NO: 718537 - DNA, 25 bp, Homo sapien
tggccatgagcacaacagctgcgac

SEQ ID NO: 718538 - DNA, 25 bp, Homo sapien
tccctaaaggatgactggcaggcag

SEQ ID NO: 718539 - DNA, 25 bp, Homo sapien
cccacagaagcaggggtttgatcag

SEQ ID NO: 718540 - DNA, 25 bp, Homo sapien
tatcatccccgaagaaagcaaaagg

SEQ ID NO: 718541 - DNA, 25 bp, Homo sapien
gcctttggtctctgatggttcttgg

SEQ ID NO: 718542 - DNA, 25 bp, Homo sapien
ggcacagcccgggcacagctccacg

SEQ ID NO: 718543 - DNA, 25 bp, Homo sapien
gtaaggagaccactgttctgccgtg

SEQ ID NO: 718544 - DNA, 25 bp, Homo sapien
tgggccgtaaggagaccactgttct

SEQ ID NO: 718545 - DNA, 25 bp, Homo sapien
agctggccgccagcacattgaacca

SEQ ID NO: 718546 - DNA, 25 bp, Homo sapien
cattgaaccatgagctcggagcagg

SEQ ID NO: 718547 - DNA, 25 bp, Homo sapien
gggctcatgggtgcgtgtgggtggc

SEQ ID NO: 718548 - DNA, 25 bp, Homo sapien
gatcaacctgtcctaagtcactgag

SEQ ID NO: 718549 - DNA, 25 bp, Homo sapien
ggccctgccacggtgcacactggca

SEQ ID NO: 718550 - DNA, 25 bp, Homo sapien
aggactggcccgaaagccctgagag

SEQ ID NO: 718551 - DNA, 25 bp, Homo sapien
tctccgtcagaacccgctcctgaat

SEQ ID NO: 718552 - DNA, 25 bp, Homo sapien
gcaaggttggcttagctgctcccct

SEQ ID NO: 718553 - DNA, 25 bp, Homo sapien
tgtctgccggcaaggttggcttagc

SEQ ID NO: 718554 - DNA, 25 bp, Homo sapien
cctcatcactggtgtctgccggcaa

SEQ ID NO: 718555 - DNA, 25 bp, Homo sapien
ctttgtttgtgaacagcttgccagg

SEQ ID NO: 718556 - DNA, 25 bp, Homo sapien
accataaacacatccccaggcagga

SEQ ID NO: 718557 - DNA, 25 bp, Homo sapien
gacagccaggtgactaccagtcctg

SEQ ID NO: 718558 - DNA, 25 bp, Homo sapien
gtaccaggctatgatttctcttgca

SEQ ID NO: 718559 - DNA, 25 bp, Homo sapien
gccgaccttggaggtacaaggctgt

SEQ ID NO: 718560 - DNA, 25 bp, Homo sapien
gagagaggccgaccttggaggtaca

SEQ ID NO: 718561 - DNA, 25 bp, Homo sapien
ccagggggagaggccgaaattggag

SEQ ID NO: 718562 - DNA, 25 bp, Homo sapien
gaggccgaccttggaggtacaaggc

SEQ ID NO: 718563 - DNA, 25 bp, Homo sapien
tgtcctcgaagcaaccctgaaaggc

SEQ ID NO: 718564 - DNA, 25 bp, Homo sapien
gaggcgggcacgattttgcattgaa

SEQ ID NO: 718565 - DNA, 25 bp, Homo sapien
catcgtcagacgctacaaggaggac

SEQ ID NO: 718566 - DNA, 25 bp, Homo sapien
gtaatatttatgcacccgtaacgtg

SEQ ID NO: 718567 - DNA, 25 bp, Homo sapien
ccaggctcttttccagggatacata

SEQ ID NO: 718568 - DNA, 25 bp, Homo sapien
caggctcttttccagggatacatag

SEQ ID NO: 718569 - DNA, 25 bp, Homo sapien
tcttttccagggatacatagctgaa

SEQ ID NO: 718570 - DNA, 25 bp, Homo sapien
ggctcttttccagggatacatagct

SEQ ID NO: 718571 - DNA, 25 bp, Homo sapien
gggtcttccactgcccaggctgcag

SEQ ID NO: 718572 - DNA, 25 bp, Homo sapien
gacagggtcttccactgcccaggct

SEQ ID NO: 718573 - DNA, 25 bp, Homo sapien
tggtgtgatcatggctcactgaagc

SEQ ID NO: 718574 - DNA, 25 bp, Homo sapien
ctgaagccttgacctcctagactca

SEQ ID NO: 718575 - DNA, 25 bp, Homo sapien
tcaattctcccataaagcaggtgca

SEQ ID NO: 718576 - DNA, 25 bp, Homo sapien
gagctgctaaccttccaggagcggt

SEQ ID NO: 718577 - DNA, 25 bp, Homo sapien
tcaaggtgaaggacgacaactacaa

SEQ ID NO: 718578 - DNA, 25 bp, Homo sapien
catgcgctacgcacagctcagtgag

SEQ ID NO: 718579 - DNA, 25 bp, Homo sapien
gcagacatcagtaatcagcatgctt

SEQ ID NO: 718580 - DNA, 25 bp, Homo sapien
cactgagcttggatgtaactttgga

SEQ ID NO: 718581 - DNA, 25 bp, Homo sapien
tcatcagctgcgactctctggcatc

SEQ ID NO: 718582 - DNA, 25 bp, Homo sapien
tttctcgaaacagtactgcaggcgg

SEQ ID NO: 718583 - DNA, 25 bp, Homo sapien
cttctctgccctcatagccttgacc

SEQ ID NO: 718584 - DNA, 25 bp, Homo sapien
tggcaccactcggtagaccagcttc

SEQ ID NO: 718585 - DNA, 25 bp, Homo sapien
catggcaccactcggtagaccagct

SEQ ID NO: 718586 - DNA, 25 bp, Homo sapien
accactcggtagaccagcttcctct

SEQ ID NO: 718587 - DNA, 25 bp, Homo sapien
cagccctgagtgcagagatttcggg

SEQ ID NO: 718588 - DNA, 25 bp, Homo sapien
taaatcctggcttcctaagtgggct

SEQ ID NO: 718589 - DNA, 25 bp, Homo sapien
tagtgtctctagttcacataccgcg

SEQ ID NO: 718590 - DNA, 25 bp, Homo sapien
ataccgcgtaacgtccgtctgacag

SEQ ID NO: 718591 - DNA, 25 bp, Homo sapien
gaaattgccagtcccatattgaatc

SEQ ID NO: 718592 - DNA, 25 bp, Homo sapien
ggtttcaggcctcccgatatcatca

SEQ ID NO: 718593 - DNA, 25 bp, Homo sapien
attgccagtcccatattgaatcagc

SEQ ID NO: 718594 - DNA, 25 bp, Homo sapien
ctgaaattgccagtcccatattgaa

SEQ ID NO: 718595 - DNA, 25 bp, Homo sapien
cgtgcgtgtcggctcttcgtgccat

SEQ ID NO: 718596 - DNA, 25 bp, Homo sapien
gagcgcggctacttctgtacccttg

SEQ ID NO: 718597 - DNA, 25 bp, Homo sapien
ctgttactgtcaccgccccgccagg

SEQ ID NO: 718598 - DNA, 25 bp, Homo sapien
caatgtgattgagctgcagcaaaga

SEQ ID NO: 718599 - DNA, 25 bp, Homo sapien
tcaatgtgattgagctgcagcaaag

SEQ ID NO: 718600 - DNA, 25 bp, Homo sapien
ggtgtccttgcaagggactcttaat

SEQ ID NO: 718601 - DNA, 25 bp, Homo sapien
ttgccacgttcagtcctcagtgggc

SEQ ID NO: 718602 - DNA, 25 bp, Homo sapien
ggcagccgcagagcaggatgaggat

SEQ ID NO: 718603 - DNA, 25 bp, Homo sapien
gatgaggattgccacgttcagtcct

SEQ ID NO: 718604 - DNA, 25 bp, Homo sapien
gccgcagagcaggatgaggattgcc

SEQ ID NO: 718605 - DNA, 25 bp, Homo sapien
gtgagtccaggcagggaagaaatga

SEQ ID NO: 718606 - DNA, 25 bp, Homo sapien
agagtgagtccaggcagggaagaaa

SEQ ID NO: 718607 - DNA, 25 bp, Homo sapien
cacttcccacagagtgagtccaggc

SEQ ID NO: 718608 - DNA, 25 bp, Homo sapien
acttcccacagagtgagtccaggca

SEQ ID NO: 718609 - DNA, 25 bp, Homo sapien
catggtaaccagcaggaagctggtg

SEQ ID NO: 718610 - DNA, 25 bp, Homo sapien
ttgcccacaaatactccctcgccca

SEQ ID NO: 718611 - DNA, 25 bp, Homo sapien
aatgtgccatcccagtggggacccc

SEQ ID NO: 718612 - DNA, 25 bp, Homo sapien
ggcgtggagcatattgcagtcctca

SEQ ID NO: 718613 - DNA, 25 bp, Homo sapien
caaatggtcagctctgactgtatct

SEQ ID NO: 718614 - DNA, 25 bp, Homo sapien
aagcaccgtcgtgcctctctgaccg

SEQ ID NO: 718615 - DNA, 25 bp, Homo sapien
gccttttggtgagcacgagatgatc

SEQ ID NO: 718616 - DNA, 25 bp, Homo sapien
gatccctgctgcgttgtagggactc

SEQ ID NO: 718617 - DNA, 25 bp, Homo sapien
tggccctgtgaacgctttccttgac

SEQ ID NO: 718618 - DNA, 25 bp, Homo sapien
tccttgaccgtgcttggttgtttct

SEQ ID NO: 718619 - DNA, 25 bp, Homo sapien
gctggccctgtgaacgctttccttg

SEQ ID NO: 718620 - DNA, 25 bp, Homo sapien
acgctttccttgaccgtgcttggtt

SEQ ID NO: 718621 - DNA, 25 bp, Homo sapien
caagaacaaggcatttagtgtctgg

SEQ ID NO: 718622 - DNA, 25 bp, Homo sapien
tgtcctcccatggtgaaacgggcaa

SEQ ID NO: 718623 - DNA, 25 bp, Homo sapien
gaatatttctctaggttgggcgcca

SEQ ID NO: 718624 - DNA, 25 bp, Homo sapien
gcctgcttcgtcatagacggtgcct

SEQ ID NO: 718625 - DNA, 25 bp, Homo sapien
cctcctgcgtcttccagtagattcc

SEQ ID NO: 718626 - DNA, 25 bp, Homo sapien
tcctgcgtcttccagtagattccag

SEQ ID NO: 718627 - DNA, 25 bp, Homo sapien
ctgcgtcttccagtagattccagga

SEQ ID NO: 718628 - DNA, 25 bp, Homo sapien
cctgcgtcttccagtagattccagg

SEQ ID NO: 718629 - DNA, 25 bp, Homo sapien
gaagggcctgccgttccgtcctgtg

SEQ ID NO: 718630 - DNA, 25 bp, Homo sapien
acaatccattttcccgcttgcggca

SEQ ID NO: 718631 - DNA, 25 bp, Homo sapien
agaaatgctggtgcaacaatccatt

SEQ ID NO: 718632 - DNA, 25 bp, Homo sapien
tgagctcctctgtgggcacggtgct

SEQ ID NO: 718633 - DNA, 25 bp, Homo sapien
atcatgggctgttgtgtccccccac

SEQ ID NO: 718634 - DNA, 25 bp, Homo sapien
cccgtgggggatcatgggctgctgt

SEQ ID NO: 718635 - DNA, 25 bp, Homo sapien
gtgggggatcatgggctgctgtctc

SEQ ID NO: 718636 - DNA, 25 bp, Homo sapien
cccccgtgggggatcatgggctgct

SEQ ID NO: 718637 - DNA, 25 bp, Homo sapien
ccgtgggggatcatgggctgctgtc

SEQ ID NO: 718638 - DNA, 25 bp, Homo sapien
cagccggctgctatcaacagtaaga

SEQ ID NO: 718639 - DNA, 25 bp, Homo sapien
tctggaagtgttgccagccagagtt

SEQ ID NO: 718640 - DNA, 25 bp, Homo sapien
gggtggttctggaatgagagtctgg

SEQ ID NO: 718641 - DNA, 25 bp, Homo sapien
gagtctcaacacattctgttatttc

SEQ ID NO: 718642 - DNA, 25 bp, Homo sapien
gcactggtcacaacgtccatttcct

SEQ ID NO: 718643 - DNA, 25 bp, Homo sapien
tcccacgccgccatctttgctggca

SEQ ID NO: 718644 - DNA, 25 bp, Homo sapien
ggagcccgcactggtcacaacgtcc

SEQ ID NO: 718645 - DNA, 25 bp, Homo sapien
aggcccagggtgacgatgttgcagg

SEQ ID NO: 718646 - DNA, 25 bp, Homo sapien
tggtttgctgccctatccacccatc

SEQ ID NO: 718647 - DNA, 25 bp, Homo sapien
ggtttgctgccctatccacccatca

SEQ ID NO: 718648 - DNA, 25 bp, Homo sapien
gaggtcttagactggcgaagagcat

SEQ ID NO: 718649 - DNA, 25 bp, Homo sapien
aggtcttagactggcgaagagcatg

SEQ ID NO: 718650 - DNA, 25 bp, Homo sapien
ctgttccgagtgttctgagcccggg

SEQ ID NO: 718651 - DNA, 25 bp, Homo sapien
gggccctgttccgagtgttctgagc

SEQ ID NO: 718652 - DNA, 25 bp, Homo sapien
aaatcgtggtgaaatacatgtgaca
